United States Patent Application Publication US 2017/0009304 A1 - sequence listing, part 28

SEQ ID NO: 582683 - DNA, 100 bp, Homo sapiens
tggaaaatttatgggctatacagatagttttgaggcagctgtgccatcaaatagccacattgtttcggaacctggaaagaatgtcacactcacttgtcag

SEQ ID NO: 582684 - DNA, 89 bp, Homo sapiens
gagttgtaccgagactataaccacggtgtgctgaagataaccatctgtttggcaaccagaacgccaggttccatttaatgaagttagat

SEQ ID NO: 582685 - DNA, 73 bp, Homo sapiens
tggaattgaagcagttggtggcaaattaaggctttcctcggagacgggtggcatggggagcagctagaacaat

SEQ ID NO: 582686 - DNA, 75 bp, Homo sapiens
cctgcaggcgctgggcgcgcgcagccaggcaaatcaaatggctatagcatgtggatctcgagctcatttagaaaa

SEQ ID NO: 582687 - DNA, 100 bp, Homo sapiens
tgtctcggctacagacccagagtcgtgcattgaggcccatgagaaggacatggagctctcatttgccgtgcagcgcagcaaggacatggtgtgtgggatc

SEQ ID NO: 582688 - DNA, 100 bp, Homo sapiens
ggggtatttatctataccacaagcaaccacatcaaatatgctgtcaccactggtgcaaggatgatgctgaaaggaataacaaggcttatctctaggatcc

SEQ ID NO: 582689 - DNA, 99 bp, Homo sapiens
tccacagatgcatatggagagctactgcatgcccagcaccattcctaggctgggagcaaaacggttcgagaacttgtcttggacaattgcaaatcaaat

SEQ ID NO: 582690 - DNA, 100 bp, Homo sapiens
cgagagagaccggagaggtggagaggccattgccattgtactggggttcatgattattgtggcttttgctttaataattttctttgctgtgaaaactcga

SEQ ID NO: 582691 - DNA, 80 bp, Homo sapiens
ataaaatgtcagcttttaaggacccagttcaaaatgtggttcaggtcctggagaaacaatacctagaagaaaagagaagt

SEQ ID NO: 582692 - DNA, 82 bp, Homo sapiens
aagaaacaaaagtgccaccgaagaggtgagaacaaaatcatgggcttcctactatgagatttcagttgatgatggtccatgg

SEQ ID NO: 582693 - DNA, 83 bp, Homo sapiens
gcgacaggaaccagctcgggggccaactctgaggagtccactgcagcaggtcagcccaaggccaaccccactgtcactctgtt

SEQ ID NO: 582694 - DNA, 76 bp, Homo sapiens
gaaaatagcacacttttactctacgcaactgttgctttttcatgattttcagctgaactctcatctctcaacactg

SEQ ID NO: 582695 - DNA, 100 bp, Homo sapiens
taggatggcatctaatatttttggaccaacagaagaacctcagaacatacccaagaggacaaatcccccaggttttctgtctcaactggtctctgacaag

SEQ ID NO: 582696 - DNA, 82 bp, Homo sapiens
gaccccgtcccgaccctggccgccccgagcggagcctggagcggagctggagtttgttcagatcatcatcatcgtggtggtg

SEQ ID NO: 582697 - DNA, 90 bp, Homo sapiens
gggatttcctgcagaaagacttgaaggcgtatacaggaacaatattgatgatgtagtaagattcagaatcgccaagacattttataccag

SEQ ID NO: 582698 - DNA, 118 bp, Homo sapiens
ctgaagaggagcgccagatggtggaggaatacacttatttatgaaaatggaagcttcttgcctagagctggccttggaaggggaacgtctatgtaaatcaggagactgccgcgctggc

SEQ ID NO: 582699 - DNA, 82 bp, Homo sapiens
gaagaccaagtacctgcagatcctgacctctctgatgagatggatcgaattggctgtgaaaggactgaggcagccatctggg

SEQ ID NO: 582700 - DNA, 90 bp, Homo sapiens
gttgatgagaactttgactgtgtagagacaggtgatttggcttctgcacagttaggaggagcaccaaaccgatgggaggttttgtcagcc

SEQ ID NO: 582701 - DNA, 75 bp, Homo sapiens
gggccgtccccaggacactgtccggatcttccctccctggtagttacttttggtgacgctgtccagttcccacaa

SEQ ID NO: 582702 - DNA, 82 bp, Homo sapiens
cctgtcccatcgcaaacccaaagatccccgttcctggagattctgattgaggagcacgtgaattgcctctgcttacgttcag

SEQ ID NO: 582703 - DNA, 90 bp, Homo sapiens
ggctcgtccaactggtccctcagtcacacatgccagagattgctcaggaagcaatggagatcagtcgcatcgaatacattcattcaaaga

SEQ ID NO: 582704 - DNA, 75 bp, Homo sapiens
cagaagggctacaatgtcaagtccgacgtctggagcctgggcatcaccatggatcgtagggcatcagaaaaacaa

SEQ ID NO: 582705 - DNA, 83 bp, Homo sapiens
agacagtcctcgtcagcactgactttcagctatggaatcgtgcctccggagccagcgtggtggccatagacaacaagatcgaa

SEQ ID NO: 582706 - DNA, 82 bp, Homo sapiens
gtcaaggagcctcggaagtcaagagactcagagtcccatagacttttactccccttgtagataaactgggtttgggttctgt

SEQ ID NO: 582707 - DNA, 100 bp, Homo sapiens
gactgtccataggtctagacaatggtacaatctcagctggaacctatttgcctcagtcctatctgattcatgagcacatggttattactgatcgcattga

SEQ ID NO: 582708 - DNA, 51 bp, Homo sapiens
actgtggaccctactgtacctcaaaagaacatggtccaagacaattcctgg

SEQ ID NO: 582709 - DNA, 74 bp, Homo sapiens
catccgcactggttgctcgtcgtcattacaggaagaaatctttcctgttttctgctctgtatgctgcctttata

SEQ ID NO: 582710 - DNA, 83 bp, Homo sapiens
tttcacatgctggtggactcacccatcgacccgagcgagattgggaatcaagatgggaaaacaaggaattatcaacaaagaag

SEQ ID NO: 582711 - DNA, 75 bp, Homo sapiens
caagtacatcataatcggcgacacaggtctgaaggccagaattctacagtaagtcctactgagtcaaggtgggag

SEQ ID NO: 582712 - DNA, 75 bp, Homo sapiens
gtgcaggcaggcgctgagaaggacgcgcagtccatctctctcagagtctccgggaccattatggcagtcaagtgg

SEQ ID NO: 582713 - DNA, 98 bp, Homo sapiens
aggcagagcctaagagaactatggcaacatcaggtgactgtcccagaagtgaatcgcagagaagaagttcgtgccccaattcctcaaaagcaggaaat

SEQ ID NO: 582714 - DNA, 100 bp, Homo sapiens
tgcaaactctgcctgtgtgagcagtctctggacaagatgaccacactccaggaatgccagtgcatcttttgcacagctggagactcatgcatctgtatgc

SEQ ID NO: 582715 - DNA, 74 bp, Homo sapiens
ggtggagtccaacttgcctggaccagcttaatggttctgactgcccttgaagtatgcagagcatttttacagga

SEQ ID NO: 582716 - DNA, 97 bp, Homo sapiens
gctgggtcggtggcggaggctgaggagaaggaggagcgggccgtggaggcttcgccgcctagcaacacttcttgttgctgtaaatgaacttcgtagg

SEQ ID NO: 582717 - DNA, 100 bp, Homo sapiens
ctgcaaggctcgcccctgcccggcgtggagggcgcggggggcgcggaggcatacacatccctgtgatcatgagtctggctcaaagccaatttatagcaaa

SEQ ID NO: 582718 - DNA, 97 bp, Homo sapiens
tttgaagtattatttgatgaagaatttcctggagggttaacaataagtatgccaccacgggctgttccctgaccctgcaccatacggagaaaccaga

SEQ ID NO: 582719 - DNA, 75 bp, Homo sapiens
tcaagaagaagaagttgcgaaggatccccaacggggaggccaacgtgaagaaaaggaagaggcccagcagaaggg

SEQ ID NO: 582720 - DNA, 100 bp, Homo sapiens
agcagaaaatgaccatgttacaggtgtctgacttccagcaactgctggcctgtgccagggtgcaagctgagcactggagtggagttttcctgtggagagg

SEQ ID NO: 582721 - DNA, 89 bp, Homo sapiens
gtcgcgcccgggaggaaggaacgaggcaaggagctaaagcagcgtgcgttcagccctgggatctgactgcagccatgagcagcaatgag

SEQ ID NO: 582722 - DNA, 74 bp, Homo sapiens
ccgtcaccgcctccttgaagctgccgctgtcgctgctgctcgttcgagtcgcaggccaggtcagagcagcccac

SEQ ID NO: 582723 - DNA, 100 bp, Homo sapiens
ctagttaggattttattactggcagcatgtatatcttttcaaacagcggcacaacaagctgtggcgtcagcagacagacagcagcctccagcagcctgtg

SEQ ID NO: 582724 - DNA, 100 bp, Homo sapiens
tctacaaagccgtaggccactacaacgtggctatcccctctgacgtctcccacttccgcttccatgaactcttgcaagaagaaaggactatgagttcaac

SEQ ID NO: 582725 - DNA, 100 bp, Homo sapiens
cacacgccgccatccgggaggcccagggaagagtccagtgtcgtgctgctgcaggagcacccctgcctggtggagctgctgtcccatgtgctgaaagtcc

SEQ ID NO: 582726 - DNA, 83 bp, Homo sapiens
cgcggattcgccgaggcaccgaggcactcagaggagaaatgcatcgtgattcctgtccattggactgtaaggtttatgtaggc

SEQ ID NO: 582727 - DNA, 73 bp, Homo sapiens
acgctggctttgctctctttgagaagaaggctcagcacaaacactgggaactggcggggaccaaactgggaga

SEQ ID NO: 582728 - DNA, 82 bp, Homo sapiens
gcaacaaatatcatgagagcatggctcttccagcatctcacacttctggagctatttgacagcgaagaccctcgggaacggg

SEQ ID NO: 582729 - DNA, 74 bp, Homo sapiens
tggagcctcagttggaagcagccgatccagcctgcggagcctgtggggcagagctattaagaatggcaaaggat

SEQ ID NO: 582730 - DNA, 89 bp, Homo sapiens
gtcgttgtggtgcgctgtcttcccgcttgcgtcagggacctgcccgactcagtggaatcagagatcattgatttcttcctgggggcctc

SEQ ID NO: 582731 - DNA, 96 bp, Homo sapiens
ggttctggacatccaggaagaggagccgagcatctgggccgagaccattccgtatggagagccggtaacaaatgtggcaattattttggatctatc

SEQ ID NO: 582732 - DNA, 112 bp, Homo sapiens
taccactgcgtatatcactttgtcagcgctcctaaagcaaacgccaccattgaagtgaaaggtccgtaaaagccctgggctcagccagagcagggcagaggatgacgggatg

SEQ ID NO: 582733 - DNA, 100 bp, Homo sapiens
catcacattttctgttggaaaccctcaggagtggaagaaattgttcaaaccctgtgctgcccagagactctttcttccgaaagctgtctgccaaggagaa

SEQ ID NO: 582734 - DNA, 100 bp, Homo sapiens
agcctcctgagtagctggaattacaggcagagtggcatgattccgactggatactctcagtgccagccaaattacctgaaattgaagaatattatgatgg

SEQ ID NO: 582735 - DNA, 75 bp, Homo sapiens
caccaacgcggtgcgcgaccgggagctggacctccgggtgccctataaggactgccaggcaataatgaaggttct

SEQ ID NO: 582736 - DNA, 96 bp, Homo sapiens
gttcccgtagaatttcgcttcaccgagtgaccttgagcccagggcgacggtcagcttgttaattcctggctgcagctcttgaatgtcgtctctcaa

SEQ ID NO: 582737 - DNA, 75 bp, Homo sapiens
gccagagcgcaggcggagtgggctggcgcacgtggtcaccgacgatgagggcgcacctgctgtcctggagcttcc

SEQ ID NO: 582738 - DNA, 78 bp, Homo sapiens
gaaaaggcctaagaattttggcattggtagctacagcaagctgggtagcaggcagatccaaaggatatcatgaagttt

SEQ ID NO: 582739 - DNA, 61 bp, Homo sapiens
cgccgcgtgtacccggttgtcctcaggcgctgtcagtgactgcagcagcagcggcagcgcc

SEQ ID NO: 582740 - DNA, 100 bp, Homo sapiens
ctggagaatcatccatctgttcttaagtatgagaagattaaggttggatggcaagcatgtggtgtttggcaaagtgaaagaaggcatgaatattgtggag

SEQ ID NO: 582741 - DNA, 82 bp, Homo sapiens
ctggcgtggacacacaagcaccccaataacctcaaggtgagcgagtgctgtgctttcatgggcctcttctttatgaagcaaa

SEQ ID NO: 582742 - DNA, 102 bp, Homo sapiens
cagagcggctggagctctcggtcctatacaaggagtatgctgaagatgacaacatctatcaacagaagatcaaggactcagaattcatgattgaagaaatgc

SEQ ID NO: 582743 - DNA, 83 bp, Homo sapiens
cgccagcatcatacaccggctgttcgaggccttgactgtagggaaatcctcattgacgattcaatttgttgaaggccaatttg

SEQ ID NO: 582744 - DNA, 90 bp, Homo sapiens
gacggcggcagcagcggcattcagcaaacatgtcttgacggaagacatagtacaccgggaggtgacccctgaccagaaactgctgtcccg

SEQ ID NO: 582745 - DNA, 75 bp, Homo sapiens
ccattcactagaagcactgagagatgcggccccctcgcagggcctgggctgtagagacagggaagtaccaggaag

SEQ ID NO: 582746 - DNA, 100 bp, Homo sapiens
ccggccaaccgcagccaggagaaggagttcgtgcaggcgtacgaggatgtgctggagcggtacaaagggattgttgtctgagattctgcgtaaggaagaa

SEQ ID NO: 582747 - DNA, 95 bp, Homo sapiens
atttctttctcgctgatcgcctaacttctactgacgaagcttggaagttgcagaaggagggggttcctgaggagactgatgactttggggagttt

SEQ ID NO: 582748 - DNA, 100 bp, Homo sapiens
ctgtggcatagttatgagctgcttgtagaatatgacttaccagcactcctggaccaagagctctttgatatccctctgaagaagatatgatcgaatgggc

SEQ ID NO: 582749 - DNA, 75 bp, Homo sapiens
cggggtgactcttctcaaatgccttctcatccccacatactgtggtgctcccattcaagtttccgaggtgaagct

SEQ ID NO: 582750 - DNA, 83 bp, Homo sapiens
cttgccgctgctgtcctgcgaccccaagcagattcacaatgacatcctttcaagaagtcccattgcagacttccaactttgcc

SEQ ID NO: 582751 - DNA, 90 bp, Homo sapiens
agccccgaagatgcagagttcattgttgccaagtgtttggtgtataaaacagaccaagctcaagatgtaaagaagattgagaaattccac

SEQ ID NO: 582752 - DNA, 105 bp, Homo sapiens
tccgccgctcaccccgcggccgcaccttcccgccttctcaggcattgccgtctgcaacgtgcccgcggcgtctgtggaggagacggccgactcgacgctgtgcca

SEQ ID NO: 582753 - DNA, 101 bp, Homo sapiens
gcaaaggctttctcgcttgtcaccttgccatgtggaagaaactggcacttattttagaggagattgcaattgattgtcataataaggaaactgaacagagg

SEQ ID NO: 582754 - DNA, 83 bp, Homo sapiens
tccatgcggaagatcgtcgccacctggatgctggaggttttaaaatcaaagatgggaaaatcggagaaaattgcccttcccca

SEQ ID NO: 582755 - DNA, 100 bp, Homo sapiens
caatttctgaagaagtggctgtagggagcatagctgctacactgaagatgaagcaaggcccaatgacccaggcggtagcagtagctgatgtgcagtttgg

SEQ ID NO: 582756 - DNA, 74 bp, Homo sapiens
ccttcctggagctcttcatcctccgcctggcgtacagtgcctccggagccagcgtggtggccatagacaacaag

SEQ ID NO: 582757 - DNA, 76 bp, Homo sapiens
gaaaggtggaatcctactcagaatgtgaggcggggagacaaccccttccccaagaatgctgatgggactatatgct

SEQ ID NO: 582758 - DNA, 108 bp, Homo sapiens
attaaaagttaaacccaggaagctttggatcagacttttgtgttgcagttcggctcaccatggatgatgatatcgccgcgctcgtcgtcgacaacggctccggcatgt

SEQ ID NO: 582759 - DNA, 75 bp, Homo sapiens
ggaccagcaaggacctcatcagaatagggcgccatgttttggaagtttgacctgcacacaagctcgcacctggac

SEQ ID NO: 582760 - DNA, 100 bp, Homo sapiens
gaagccaatatcgacaggataaaggatctcttccacattcctccttcttataagagcacagtaacactatcctggaaacctgtacaaaaggttgagattg

SEQ ID NO: 582761 - DNA, 88 bp, Homo sapiens
ccgctctgctgtgggcgctgctggcgctctggctgtgctgcgcgacccccgcgcatggaagctcttcgtgggcggtcttgactggagc

SEQ ID NO: 582762 - DNA, 100 bp, Homo sapiens
ctttcactgccatcggggacaagaaagctgacttcatgagaccgaggatctcgttcgttgatcgatgctacatattcagcatgttagataatgaggttgg

SEQ ID NO: 582763 - DNA, 147 bp, Homo sapiens
caggccagactcaagatgaggctgtgggacctgcagcagctgagaaaggagctcggggactcccccaaagacaagatccggaccatcgccatcatagctgaaggcatccctgaggccctcacgagaaagctgatcaagaaggcggac

SEQ ID NO: 582764 - DNA, 90 bp, Homo sapiens
gataaagtgattttttgcctttgttgattaactggacaaattcaggaaaatgtttataggaggccttagctgggacactacaaagaaaga

SEQ ID NO: 582765 - DNA, 100 bp, Homo sapiens
cccagtacaggctgttgctgacaggttattctggtacaagttaacccaggagaagcatttacaataagaagagaagatggacagtttcagtgcattacag

SEQ ID NO: 582766 - DNA, 77 bp, Homo sapiens
tgccctggcaaacactggaatcctactttttctgtatgctatacctccggagcatggaaaacgacttgaaagactag

SEQ ID NO: 582767 - DNA, 99 bp, Homo sapiens
agcgccgcaggaccgcggacccgagcagttccaagagcctctgagttcctgccttttttcatctctgaatccccaccattggcctacattgggagtggg

SEQ ID NO: 582768 - DNA, 82 bp, Homo sapiens
agatggcagccagtcagtggtggaggagacggtggctcagggagtaaaggaaggccagttgagcaaacagaagtgttcctct

SEQ ID NO: 582769 - DNA, 75 bp, Homo sapiens
gcacactgccctccgaagtcggggacgcgggctcggttaaaaggacaactctggtggatagcagaacatctgtta

SEQ ID NO: 582770 - DNA, 75 bp, Homo sapiens
tagcgggattgatctccttaggacctcccttcagcatgccggcaaacacatggaggattgcattgtggcctccta

SEQ ID NO: 582771 - DNA, 83 bp, Homo sapiens
ctcgccggcttccaggacttcacgtgagcgtcaccctggacccacagtcggccagtgggtacctgcagctgtcagaggactgg

SEQ ID NO: 582772 - DNA, 75 bp, Homo sapiens
acactttgcacagttcggccatgtcagaaggtgcattttaccttttgtttgacatctacaggaaggtgcccaagg

SEQ ID NO: 582773 - DNA, 100 bp, Homo sapiens
aaccgggaaaggagaggatcccggagccgcagctggatccgcctcagaaggagcagctggggagtgctcttgccgagatggaccgacagctcaggaggct

SEQ ID NO: 582774 - DNA, 75 bp, Homo sapiens
agatcgcaccgtttccagaagctgcgttgccaacgtcacatcccaaaatagccgtgctggtatagaggactctaa

SEQ ID NO: 582775 - DNA, 111 bp, Homo sapiens
aagcagaggaagtagtttaaatgatacctatcactcaagagactcttcatttagattggattctgaatatcaggtgaaatcttgtgctgagtgggtgtctctctcaaaggc

SEQ ID NO: 582776 - DNA, 97 bp, Homo sapiens
cttggagaggctgtgagccacaatgcatcgctggaagtagccatttcaccagtgatcattaaagaatgggcagcttacaaaggaaagtctcctcaaa

SEQ ID NO: 582777 - DNA, 75 bp, Homo sapiens
attggagctgaaggcggcggcagagaacttgccggtgccagctgagaatgccagaggacttggatctgagctaaa

SEQ ID NO: 582778 - DNA, 100 bp, Homo sapiens
ttctggagattattataaccgtgctctttcagattgcgcagtctctttgtggagaggacttgatcattaaaggaatcagcgttcatatatccaatgccga

SEQ ID NO: 582779 - DNA, 74 bp, Homo sapiens
gggagtttgaccgcgttgacgacggctcgcagagtatatttgaaggctcccatgattctgaatggagtctgtgt

SEQ ID NO: 582780 - DNA, 80 bp, Homo sapiens
ccgagcagtggaagtcccacagaagctacagctgccaggtcatagtaatgggagctaccaatcgtcctcaggaccttgac

SEQ ID NO: 582781 - DNA, 100 bp, Homo sapiens
gggaggaaccagttggtggcctgggcagcctgctggaccctgccaagaagtcgcccatcgcagcagctcgctaaggatggaaaggagttggtcagccctt

SEQ ID NO: 582782 - DNA, 90 bp, Homo sapiens
acagtcgcctgcatggatctgcttaccttaccgtccaagcgacaaggtgctggggcaaccaatggaaaagacaagacatctggtgaaaat

SEQ ID NO: 582783 - DNA, 90 bp, Homo sapiens
cacggccgaggctgcccagaggcgcctcctccacaccccccgccgcagcagcaccggcgacagcaattctgtggtgttcttggtcacaca

SEQ ID NO: 582784 - DNA, 75 bp, Homo sapiens
gcgggcgccctggggtcctcggagtgtgatcccctgggcccgtttgttgtcgggggagaagacttagaccctttt

SEQ ID NO: 582785 - DNA, 100 bp, Homo sapiens
gaaggattggacccatcagggcatcgctaagctgtaccataaagtgagccagaactgatgaggagtttcaacagagacaggcggattttttgtgccattc

SEQ ID NO: 582786 - DNA, 60 bp, Homo sapiens
actaggatatttgtttggcagcaatagatacagacagaagctgctcagttgcttacaagt

SEQ ID NO: 582787 - DNA, 83 bp, Homo sapiens
ggacaaggaggaaattgtgatctgcgatcgagcctcggtcaaggaggtgagaagccctaccactgcaactgggacggctgcgg

SEQ ID NO: 582788 - DNA, 108 bp, Homo sapiens
ctacagaagcaaaagctgcagcaaagcgggaagatcaaaaatacgcactaagtgtcatgatgaaggtggtgatagtggactggatgggttaggaggaccaggtgtaca

SEQ ID NO: 582789 - DNA, 100 bp, Homo sapiens
tccatgaggactgccacatcccacctgtggaaagtgagaagatgaaggctggctcatgggcgtgaaggagagcgactggaaccagcacaaggagctggag

SEQ ID NO: 582790 - DNA, 100 bp, Homo sapiens
tcggcggcgggctgatgggcgccggcattgcccagttttctggatatgccgcagaaggatccgtgccagaagcaagcctgtgagatacagaaatgtttac

SEQ ID NO: 582791 - DNA, 75 bp, Homo sapiens
ggacgtgagcccagccgaggtaccgctgaagaggaatcaattttggtgtatcagttcctatccctgtgattggac

SEQ ID NO: 582792 - DNA, 87 bp, Homo sapiens
ctgaagacagagggctctgatctgtgcgacagagatttttagactctgaggagcagttggagctaatccacattatggaaatggaaa

SEQ ID NO: 582793 - DNA, 74 bp, Homo sapiens
agtgtttgccagagttgattgtgatcagcactgcgaaaattttgaccagagtcctttgagaagaacattcaaat

SEQ ID NO: 582794 - DNA, 101 bp, Homo sapiens
ctgggaccacacactgggcaccttcagtgagattaaggtgggcttggtgcttgcatttcctgcgttgcagtgtcaggatttttcagggatcagccttggca

SEQ ID NO: 582795 - DNA, 99 bp, Homo sapiens
cagccaccacagcatctttctgaagccgggagagggcctgtagggctgcccaacatgttcggcgaccttcggtccacgtttattgccttgatgattggg

SEQ ID NO: 582796 - DNA, 115 bp, Homo sapiens
gccttggctgctctcagcccccaagctggttcccgctgtagcaaacgtccgcggcctctcagataacggaggagatgatggatcaggcaaatgataaaaaagtggctgctattga

SEQ ID NO: 582797 - DNA, 75 bp, Homo sapiens
ccctgagagaacagggtggccgcttggtccagcatgtgtttgatgatctcagaggctcagtatccttgtcctggg

SEQ ID NO: 582798 - DNA, 97 bp, Homo sapiens
aacacctcaaacagcactgcaacaagtggtggaggtggatacagcagtcggagaacatctggcagagacaaatacggaccacctgttcgtacagaat

SEQ ID NO: 582799 - DNA, 86 bp, Homo sapiens
caaggtcgccctcaaggccatgatcaaaacactttggcttcatgtttgaaagctcgccgggcggcaatctcggctgggaacccgac

SEQ ID NO: 582800 - DNA, 101 bp, Homo sapiens
gttccccctccctcagcttccgccccaaaaggaaaatgtttataggaggccttagctgggacactacaaagaaagatctgaaggactacttttccaaattt

SEQ ID NO: 582801 - DNA, 75 bp, Homo sapiens
ctcattggcaggctgcctgctcctggagggcctttccgctttgtggatctgtatggcgcccagaagatagtggac

SEQ ID NO: 582802 - DNA, 100 bp, Homo sapiens
cggagccgggctcgggtcgccggagccgcgccccaccccgccagctccagagccacgtacggtgagatttcaatggaaaaagtgaaggtaaagcgttatg

SEQ ID NO: 582803 - DNA, 88 bp, Homo sapiens
tgaactttgacggtggatttggttgcagaccaggttctgaatcccatgctgggcagaagatgaatttgctgtcatgttttgtggaatg

SEQ ID NO: 582804 - DNA, 98 bp, Homo sapiens
ccccattttaccagtgtgcagaagttctcgaatcattctttgtacagaaattgaaaggcttcaaagctagcagctggtcttttgggatcctgctctat

SEQ ID NO: 582805 - DNA, 75 bp, Homo sapiens
aggattccaagtaactcttatttgatgaagttgcggagaataatgaacatgatgtcacttctactgaattagatc

SEQ ID NO: 582806 - DNA, 76 bp, Homo sapiens
accagatgaattggtgtgacagtgccatcgagggtgtctgctgcacagccctgctggtggccgtggtggcccggaa

SEQ ID NO: 582807 - DNA, 152 bp, Homo sapiens
cctttggcagcttctctgctggaagctcttgattatgatagttcagatgacagtgattttaaagttggagatgcctcagagtccattgatgttcacagacaaagcccagcaggatgttatcatggtcctcaagtttccctccaactcccctg

SEQ ID NO: 582808 - DNA, 95 bp, Homo sapiens
cgacgggcggtggccgcactgggaccccggaatcccgcgcgctgcccacgattcgcttctgagtggaagagaaagccaatacccacctcctcttg

SEQ ID NO: 582809 - DNA, 122 bp, Homo sapiens
ggttctctgaagatgattacacggcattaatctcccaaaatattctagaaggggaaaagctacttcaaggttcgacccctctgcctctctggacttcctctgggcctgcatccatgttcctc

SEQ ID NO: 582810 - DNA, 100 bp, Homo sapiens
atcggttcctccaggagaagttagcttcagagttctttgtggatggacttgattctgatgagagccccgtcgcagaatttagtctcaaaggaaacttcaa

SEQ ID NO: 582811 - DNA, 85 bp, Homo sapiens
agtctgttgctatgcacaccaactacctgtcggcctgcagcttcaccaactctgacatgcaggaggtgggccccactatggtggg

SEQ ID NO: 582812 - DNA, 50 bp, Homo sapiens
ggacgagcggaaaaacggagcctacggaggctactcacagtcgaactaca

SEQ ID NO: 582813 - DNA, 50 bp, Homo sapiens
ataatccaatggacgagggaaaggtatcaatataagtgatgaggattttc

SEQ ID NO: 582814 - DNA, 100 bp, Homo sapiens
atctgggagaatatttaatggaaaatcgcttggttaaaacctgacacttttaacaggaagggaaaaggccgaggcatcagcgtgtgaagaccgcaaagac

SEQ ID NO: 582815 - DNA, 101 bp, Homo sapiens
cttcctcaacaccagcaccgcagatgttgtcaaggtggcctaccaggaggccaggggtgtcgccatgatcactccaagaactgaggcccctgtcagcagtg

SEQ ID NO: 582816 - DNA, 75 bp, Homo sapiens
aatcgtaggccaggctgatggagagctgaacattactcttccagaagaggaacaagactgccaatggagactgcc

SEQ ID NO: 582817 - DNA, 100 bp, Homo sapiens
tccattcaggatgggaaaccacgcaggcaaacgagaattaaatgccgagaaggccagtacgtttgcgtgtgaacttggacatgggcaaagcggtgtatgg

SEQ ID NO: 582818 - DNA, 100 bp, Homo sapiens
cctctacctggcctacttcgtgcgtgagcgaggccttcccacctcacagggagcagtgggactcaaacagcaggagaaggagaaagcaagatatggaaag

SEQ ID NO: 582819 - DNA, 98 bp, Homo sapiens
atattcttccttgccaggtgcctgtctggaaggccagatacacaagtggtgagatcaagtcggtagatcccagactaatccatgtgatgctgatggat

SEQ ID NO: 582820 - DNA, 98 bp, Homo sapiens
gggaatttccaaggggattcaaacttcaacagaatgtggcaaccaggtcggattgtttgtgctgaacgaactgtcctcttgcttcagaagcccctttt

SEQ ID NO: 582821 - DNA, 98 bp, Homo sapiens
gaatttattcctcaactgaaatgttagattttggtacactaagaacacaaggtggtgttcccactgatgaagagcaggcgactgggttggagagggag

SEQ ID NO: 582822 - DNA, 100 bp, Homo sapiens
gtttgtaagaaaatttttaaaggcaaatcaagtctggaaatgcattttcgaacgcattcagatgccacttcaaatgaacaacaagagcttttctgtcaga

SEQ ID NO: 582823 - DNA, 75 bp, Homo sapiens
atcttgggagtgatttgcgccatcatcctcatcatcatcatagaaaaccgtgaggacatactgaatgccggtgac

SEQ ID NO: 582824 - DNA, 98 bp, Homo sapiens
gcaacaaggccaggtgtatttcttacatacacagactggtgtgagcacatggcatgatccaagagtgcccagaatatggttgagccccttatacccac

SEQ ID NO: 582825 - DNA, 49 bp, Homo sapiens
gcggcctcagaggagagggaaggcaaccggtgaccaaaaacactttcag

SEQ ID NO: 582826 - DNA, 100 bp, Homo sapiens
aagagggatccttcacccgtgtctgagtccctgcaggaagcatcacccaggctggcagatcatggtagcagcagcgggggtggctgggaagtgaaacgga

SEQ ID NO: 582827 - DNA, 149 bp, Homo sapiens
atgacgaaatttgcatttcagaaaggccacctgatactgtatggaggatggcctagagggctgaactgatgcttgaaggatgctcacaactgtattcctgagctggacagtgagacagccatgttttctgtctacgatggacatggagg

SEQ ID NO: 582828 - DNA, 82 bp, Homo sapiens
cactcacgagctttccacaacagctatgtgaaggttgccatagtttctaaatcttttgaaggaaaaactgatcgcacagaag

SEQ ID NO: 582829 - DNA, 74 bp, Homo sapiens
ttcccggacatgatcctctccgcctctcgaggttgaaatcacaaagattagacacctttttagataggtgttct

SEQ ID NO: 582830 - DNA, 96 bp, Homo sapiens
ttgtcaaacgaaacccatgtttctaatgaccagcaggctttgtgccttgggcaaagggcagcttactcctggaagaggactgactcaaggacccca

SEQ ID NO: 582831 - DNA, 90 bp, Homo sapiens
ccctcggtgcgggctccagggcatgctcgggaccccccgcggctccagcccagacgccccggcctcagatgaaaccagcttgtataaaag

SEQ ID NO: 582832 - DNA, 75 bp, Homo sapiens
atatgctggtcaagaaaattcagcctttagcaaaagccacttccagatcagatgatgaggagtctgatgaggaag

SEQ ID NO: 582833 - DNA, 75 bp, Homo sapiens
gagggggcagtcccgggagaacctgcggcggccggagcggtccctgtgcgttttattgcgacctgccggtgggaa

SEQ ID NO: 582834 - DNA, 104 bp, Homo sapiens
tggacccacgtctgtctggtgataccaggggcagagggaccactctgacaggctaaaacactgtcttatgaaccattatcttcagcaactgtttccactgggag

SEQ ID NO: 582835 - DNA, 100 bp, Homo sapiens
ctcctcgtgttctttagaactgaagccattctcaaagcctcctggccccagagacaggattccggagtttgaatccacctttgacaattgtccgaaagac

SEQ ID NO: 582836 - DNA, 100 bp, Homo sapiens
catttcaagaacaacctaccagagaccttacctgtcaccttggctctcccacccaatggagatggctctaatgattaaggttgaggaagactttggcttt

SEQ ID NO: 582837 - DNA, 75 bp, Homo sapiens
cggcacacgcgcagccccggcctctcggcctctgccggagaaacagatgcctttgagtaatggacagatgggcca

SEQ ID NO: 582838 - DNA, 100 bp, Homo sapiens
tgcaaaggcattcttggcggaaggacccgagacgtgaaaaaaacaggcgtattctggtaatttcgaggaggctgtgggtgagcgtggaggatgctcagat

SEQ ID NO: 582839 - DNA, 90 bp, Homo sapiens
caggaggtgtagagaggaccccgggacatctgaaagccaggaaatgctcatgatggagcagtccaagaagtcctccctcatggtggcccg

SEQ ID NO: 582840 - DNA, 100 bp, Homo sapiens
agttcctgggaaggtggagccaccagcctctccttgagccaaggattgtcaccagtgaagaggtcattattcgagacagccctgttctccctgtcaccct

SEQ ID NO: 582841 - DNA, 98 bp, Homo sapiens
gtccgtggccttcgcgtctgcccggccaagaggcaaaggggaggttacgcagcaaaccatccagaagtgatgatgacagcctcttcatctatgactgc

SEQ ID NO: 582842 - DNA, 100 bp, Homo sapiens
gttggccttcgtacccgtcttgattgagatggcccactgcgtgaccttggttcagctgtccatttcctgtgaccatctcattgacaaggacatcggctcc

SEQ ID NO: 582843 - DNA, 90 bp, Homo sapiens
gaaagtttgaggaactactacgaacaatggggaaagcttacagactgtgtggtaatgagagacccccaaacaaaacgttccaggggcttt

SEQ ID NO: 582844 - DNA, 82 bp, Homo sapiens
aggagctggagcagctcaaagagcatcagaggctccttgaaatgctagatacagagaaggaactgttaaaagaaaaaataaa

SEQ ID NO: 582845 - DNA, 89 bp, Homo sapiens
cgggttcagaagaaaacgttcaccaagtgggtcaacaagcacttaatgaagggctgacagatgaagagattgatatggccttccagcag

SEQ ID NO: 582846 - DNA, 124 bp, Homo sapiens
cgagagggaagccccttggatattccagtcgatgtatttgtacaccaaggaggtggggaagacagggctccagctaccacaggacgggctctgggtatagccgttccagtcagggacagccgtg

SEQ ID NO: 582847 - DNA, 96 bp, Homo sapiens
gtgtccctgaggtcgtcctcgccgccgcgcaccaccaccaccgttaggaccatccagagcagcacggcacacacatgccctcttggttctgtttct

SEQ ID NO: 582848 - DNA, 100 bp, Homo sapiens
gtcggcagctgctccacctgaaggaccagtgtctgatcagctgctgcgtgctcagccccagagcagtgctgtgctgtggctttcattgagaagctagacg

SEQ ID NO: 582849 - DNA, 82 bp, Homo sapiens
gggaaaatggagcccttcaccaatgttctgggaggtgatcagtgatgaacatggcatcgaccccaccggcacctaccacggg

SEQ ID NO: 582850 - DNA, 75 bp, Homo sapiens
attttctccttttggatcaattaccagtgctaagagaaggcaacagtatggaggtgcaagtagatattgagtcaa

SEQ ID NO: 582851 - DNA, 75 bp, Homo sapiens
ggtgttgcagcccgggatcagctctctgttttggaaaatggagtggactgtgcattgtcacttattcgacttggg

SEQ ID NO: 582852 - DNA, 50 bp, Homo sapiens
cttttgagtgcaactgccttccaggtcgcttatgatgaagctacagatga

SEQ ID NO: 582853 - DNA, 119 bp, Homo sapiens
gatggaagcaggtggaattatgccctgttggttccaatgctgggattggctgcttttcgtgagaagccctaccactgcaactgggacggctgcggctggaagtttgcgcgctcagacga

SEQ ID NO: 582854 - DNA, 74 bp, Homo sapiens
ctatgtcttacaaaggcccaagatggatgcaaccttgaaagaactgacaagcttagtaaaagaagtctacccag

SEQ ID NO: 582855 - DNA, 118 bp, Homo sapiens
actcagtgaaaattcatctgaaattaaaaagggaaggataaccccatcacaggatttggggtggaaggcaggcatggtcaaacccatttcactgacaggagagcagagacaggacgtg

SEQ ID NO: 582856 - DNA, 100 bp, Homo sapiens
ggagatccatagggaggacggcggaacatctggaggctgggaaatgatccgagtgaagcctgacaggaccggtgtggtcacggatggtgtgaagcactcc

SEQ ID NO: 582857 - DNA, 83 bp, Homo sapiens
aagaaatcaaaataaaggaaacacatttcatatactgcagggtgtcggttggtggaaatatgaattctgctatggcaaacatg

SEQ ID NO: 582858 - DNA, 75 bp, Homo sapiens
ccctggatctccgagtcaaaggaattctgtcttcacaagcagaaggacggttcactgggaaacatcgatgacctg

SEQ ID NO: 582859 - DNA, 100 bp, Homo sapiens
tgagaatgtcctgcaggacagcagccccgagcactgtggccgaggcccacctgctgacatctacctgccaggtctcctctgagcctccggcctccataag

SEQ ID NO: 582860 - DNA, 98 bp, Homo sapiens
atgatagttgatctggataatgtggtcaaaaaggaactgggagcagtgtctctggatggctactttcatctctggaaggctgaaaatacactatctaa

SEQ ID NO: 582861 - DNA, 98 bp, Homo sapiens
tgatcctgatggcagtggccccctgaagccatttgtagtgtactgtgatatccgagttctagatatgataagagaaactgagcagtgctgggtacagc

SEQ ID NO: 582862 - DNA, 75 bp, Homo sapiens
gaagaggaagaagagtctcactcagatgaggatctcgaggacctggaagaagcagaggagccagacatggaggaa

SEQ ID NO: 582863 - DNA, 75 bp, Homo sapiens
ctgcactgaaaggaaatgacggattttggaactgctcgcagaaagaagaaggtggttcatagaacagccacagca

SEQ ID NO: 582864 - DNA, 100 bp, Homo sapiens
cgcggtgggaagagaactgcgaggaggaagctggtggagggccagctagggagactcaggacctgccagcccgagccttctcactgaccccagctgagcg

SEQ ID NO: 582865 - DNA, 75 bp, Homo sapiens
gcaagatccagatcgggatttacgtggagatcaagcgcagcgatggggatgccaagggagcagagatgcctgcag

SEQ ID NO: 582866 - DNA, 98 bp, Homo sapiens
caccgggatcgtgaccgagaccgtgaccgagagcgtgaccgagagcgcgaatatcgtcatcgttagaaggcttggagaaccccctgcctgagcgtccc

SEQ ID NO: 582867 - DNA, 90 bp, Homo sapiens
gcttcctcactcgtggctttccgaaggctgctgatttctctatgaatcatcatcaagaactctgggagaacttttgaattcataaccaag

SEQ ID NO: 582868 - DNA, 90 bp, Homo sapiens
ttgccgtgaagaacagtggcggcttcctgtccaaagacaaagggctccttggcaaactgacagctctgacaactctgatttggaagatga

SEQ ID NO: 582869 - DNA, 100 bp, Homo sapiens
acaaaggtctggacactgaaaccaccgtggaagtcgcctggtgtgaactgcaggtggagccgccaccaaaatgcagattttcgtgaaaacccttacgggg

SEQ ID NO: 582870 - DNA, 100 bp, Homo sapiens
atgaggcagaaacacgcacaggcggtggaggagctcacagagcagcttgagcagttcaagagggccatggaaatagcatctcaaaggaccaaggaagaac

SEQ ID NO: 582871 - DNA, 83 bp, Homo sapiens
gccggctgaccaggaacctgggcgagcagcggcgggggcccgagggggaacccaccaagaccaacctggtcacattcttccat

SEQ ID NO: 582872 - DNA, 87 bp, Homo sapiens
ctacgatggagtggccaagatcggtgagattgccactgggtcccccgtgtcaactgaactgggtgaatgaaaactttgccattgatt

SEQ ID NO: 582873 - DNA, 60 bp, Homo sapiens
taaaagatcttcaaaaggagcagaaaactttacagagtcgaggtggaaaaaagtttcttc

SEQ ID NO: 582874 - DNA, 75 bp, Homo sapiens
gatggagttcgactgcgagggcctgagacggctgcttggcaagtgcacgagcatagctgtgtctcggaaatggtt

SEQ ID NO: 582875 - DNA, 100 bp, Homo sapiens
ttattggagaaacatgcagattatatcgcatcctatggctcaaagaaagatgattatgggagcatcatgacagagcctcagattacacaagtaaaccagc

SEQ ID NO: 582876 - DNA, 74 bp, Homo sapiens
atggaatgctcctaaatgatcgcaaagtggtgtccgcaatgttgccagtgtctgtctgcagattggctacccaa

SEQ ID NO: 582877 - DNA, 100 bp, Homo sapiens
gtcactgtcaagtcatttgacacctccctcattaggaagacaaggactatccttgaggcaaaacaagcggttattgttcagttccagccctcctcagtgc

SEQ ID NO: 582878 - DNA, 100 bp, Homo sapiens
gcgggactgcggcggcgccggcctccggggagaaacgatgccttcaattaagttgcagagttctgatggagagatatttgaagttgatgtggaaattgcc

SEQ ID NO: 582879 - DNA, 82 bp, Homo sapiens
gaaatgtgaatctcaggagagagcagccagagtggtataagtgtgctagcggagtgtctagattgtcctgaattgaaagcaa

SEQ ID NO: 582880 - DNA, 75 bp, Homo sapiens
agtcgttcttcgacaacatctcttctgaactcaagaccagtggtcccaggctgcacccatggcagaaggaggagg

SEQ ID NO: 582881 - DNA, 87 bp, Homo sapiens
aaatcctgcagctgttgaaggagtcccagtccccagacaccaccatccagagaaccgtgcaacaaatgtatgtccctgggaagctgc

SEQ ID NO: 582882 - DNA, 75 bp, Homo sapiens
aagctctccctgccgtggctgctcaacaaggagctgggctgcatcaactcgaatgctgagatgtataaactgtct

SEQ ID NO: 582883 - DNA, 50 bp, Homo sapiens
gcagagccaccggaaaccataaggagaatgtctgtaaacctgtggaggag

SEQ ID NO: 582884 - DNA, 150 bp, Homo sapiens
tgtccagtacctgtaccgagagttgctggttcaccttgacgatccagagagggccatccaggatgcaattttagctcctgcccctcctaaagctgaagccaaagcgaaggctttaaaggccaagaaggcagtgttgaaaggtgtccacag

SEQ ID NO: 582885 - DNA, 102 bp, Homo sapiens
ggttacaccactccagctgaaagaggaaggtcttctttatactgcagtgatattggtgccgtgagcgatgtggagatgcaggaacactatgatgagtttttt

SEQ ID NO: 582886 - DNA, 100 bp, Homo sapiens
tgatgatcagagagatttatacagagatgtgatgttggagaattacagcaacctggtttcaatgggaggagatgttaaagtaacccatcttgcaggacga

SEQ ID NO: 582887 - DNA, 83 bp, Homo sapiens
gaaagattcgggccagagacgacaacccgggcctccgagactgtgccctgtccacggtgcctcctgcatgtcctgctgccctg

SEQ ID NO: 582888 - DNA, 98 bp, Homo sapiens
cgggtcaggagcagccgcagcgacggcggcgacagcagctgtcgcctggttgggcccggaaatgggacgtcgcgctttctcagggagcgtagaagcag

SEQ ID NO: 582889 - DNA, 98 bp, Homo sapiens
gaaaaacggagacttggatgaggtgaaagactatgtggccaaggtgctgttggcagcagcggtctgcacaaaagcaggaaaggctattgtttctcgac

SEQ ID NO: 582890 - DNA, 96 bp, Homo sapiens
gaaacttgatgcttctgggccaccatttgccagggcctcgctcgaggtctcctctgagcctccggcctccataagacccaaaacagatgacacctc

SEQ ID NO: 582891 - DNA, 82 bp, Homo sapiens
gcggcccagtttgccgccggcatggccagtgccctagaggcgttggaaggttcttctgtgtggcagttcagaatgatggatc

SEQ ID NO: 582892 - DNA, 50 bp, Homo sapiens
gtggaagatgatgcttttatcaagtcggtaacctctattgaagaacgaac

SEQ ID NO: 582893 - DNA, 75 bp, Homo sapiens
agggaattccggtcagggtcaagtcgtgttctgatcactactgacttgttgtggggccattgcaggcaatcccct

SEQ ID NO: 582894 - DNA, 80 bp, Homo sapiens
gtcccccgagctgctctacgcgctggcgcggatggggcacggggacgagatcggttttaaaatcaaagatgggaaaatcg

SEQ ID NO: 582895 - DNA, 112 bp, Homo sapiens
gagcgaagccaggaagaggatgcggagacgcggggtgatttgaagatattaaagctagaaattggaactagaaaatcaaaagaattcaaggcatcttaacgtgacagttgaa

SEQ ID NO: 582896 - DNA, 98 bp, Homo sapiens
cagcacctcctcgccagcagccgtccggagccagccaacgagcgtccaaggccattggtttgctagatgtggatgtgtatggaccttcagttccaaag

SEQ ID NO: 582897 - DNA, 100 bp, Homo sapiens
tattaaagcagtgccattccagaatgccatcttgaatgtaaaagaacttggaggttgtttacattcagagctctatcaataagaggaatacatattacag

SEQ ID NO: 582898 - DNA, 98 bp, Homo sapiens
tgtgtcttgcctcaacattgttgagagccctgtgcctaaggatagagataaattttatttcaaattaaagcaaggaatagagaagaaggttgtgatta

SEQ ID NO: 582899 - DNA, 83 bp, Homo sapiens
agcccgccggtgaggccgggccacgctcagacacttcgatcgtcgagtctgtcactggtcgcgatgagggcccagcgagcgag

SEQ ID NO: 582900 - DNA, 80 bp, Homo sapiens
cgttctcggcctcccggatctccgccgtccaccctgaacaccaccgatagccacaccgaagagttctcccatttgctggt

SEQ ID NO: 582901 - DNA, 100 bp, Homo sapiens
aacttggatacagtgtgctttagaatccagggaacttcttgctttgtgcttgaaaaaaatcaaagcccctctgagtaagaagtgccttttgcctcctgcc

SEQ ID NO: 582902 - DNA, 95 bp, Homo sapiens
ccatttatcgggctcggcgcaggcccgcggggagcgcagcccggcggaggggttggccggagacctacgacatgaatacctcggagcccaagacg

SEQ ID NO: 582903 - DNA, 100 bp, Homo sapiens
catgaagagctccatgcagaacaaatgcgttgcaaggcagaaatggtgcacagtgctttccaggcccagcgggctttccttctgatggcctctcagtacc

SEQ ID NO: 582904 - DNA, 90 bp, Homo sapiens
gaaatttcaaattacgatcaattgggtctcagctgagtctgctctgatcacccaacaagacctagctccccagcagagagcggccccaca

SEQ ID NO: 582905 - DNA, 98 bp, Homo sapiens
gaaagaggctcatcactgtcagatcctatagcaatggaactcagcgatgcaaatctgcaaacactaacagaatatttaaagaaaacacttgatcctga

SEQ ID NO: 582906 - DNA, 75 bp, Homo sapiens
tcctgagcagacgctgccacatagtccccaaacggacctgctgaagttcccatgatgtcacccaatggatccatt

SEQ ID NO: 582907 - DNA, 75 bp, Homo sapiens
gctcttccctgaccattttctactgtccctgcgcgagggctcagaaacacttatgggattttctaagcacggagg

SEQ ID NO: 582908 - DNA, 50 bp, Homo sapiens
tgcccaggttgacctttctgcgggaggatggcacatttcctagaggcaga

SEQ ID NO: 582909 - DNA, 90 bp, Homo sapiens
ctctggataaggaccagtacctgcccaggaaactggtggccaaagcattctggatggcaatcgggggagacagagatgaaattgaaggcc

SEQ ID NO: 582910 - DNA, 100 bp, Homo sapiens
ccggcaccaccgctgcaagagccgggtacctggaatggaaacacaaaagtagccataaagactcttaaaccaggcacaatgtcccccgaatcattccttg

SEQ ID NO: 582911 - DNA, 100 bp, Homo sapiens
gacgatgcagattttgttctctcacaccatctgcaaggttcttccaggttggaaagagaatatgctggagagctgtctcccacgtgcattttcccaaggt

SEQ ID NO: 582912 - DNA, 75 bp, Homo sapiens
aaaacctggaccttctggattacaggccaaattagcaaggaagagcatggaggaaatcaagaaggtgctgctgct

SEQ ID NO: 582913 - DNA, 100 bp, Homo sapiens
ccgagggtttgatgaaggtggaggcagcgcggctctcagctctcctatgtggacgccgagggcaaccctgtgggtgtggtacagatgaccttcctgcggc

SEQ ID NO: 582914 - DNA, 98 bp, Homo sapiens
cttggatgaaaatggcttggatttgctctcggtttgtcaagggctatttaatgagttactagaaaatgggatttctgtgtggcctggttatttggaaa

SEQ ID NO: 582915 - DNA, 82 bp, Homo sapiens
tgcggtgtttgaccgagacataaactgcagaagagcagcctctggcaacaggtttgtctatgctggctctaactcgggcgtg

SEQ ID NO: 582916 - DNA, 108 bp, Homo sapiens
aggcaccagacttgggatcagttataaactctagagtgggctgggcttcaacatcgtcggtgggacagatcagcagtatgtctccaacgacagtggcatctacgtcag

SEQ ID NO: 582917 - DNA, 100 bp, Homo sapiens
tcacctgcgctgctggaccgagagtctctagtgatccctgaaaagttccagcatattttgcgagtactcaacaccaacatcgatgggcggcggaaaatag

SEQ ID NO: 582918 - DNA, 97 bp, Homo sapiens
gtagaggtctagagctgctcttggctctttatgcattctactttgaccctatgagaacctcatttctcttccaagggtgactgtgaagatcacgcta

SEQ ID NO: 582919 - DNA, 98 bp, Homo sapiens
tcctaagagacccaggggaagacccaaaggcagcaaaaacaagagtccctctaaagcagctcaaaagattctgaaggaagatttccattaggtaattt

SEQ ID NO: 582920 - DNA, 100 bp, Homo sapiens
aacttatgcatacacgggtaacttggcaatgaatgacagcactgtagaacagctttatgaaacagcttgcttcctacagattttgacttcagcgttccag

SEQ ID NO: 582921 - DNA, 50 bp, Homo sapiens
ggttgaacaatggacagtcctggaagtttccttaatgacaacaaaaaagg

SEQ ID NO: 582922 - DNA, 82 bp, Homo sapiens
cgcgagcacagagcctcgcctttgccgatccgccgcccgtccacacccgccgccagaattaaatgtgagggagtctgacgta

SEQ ID NO: 582923 - DNA, 100 bp, Homo sapiens
acggatctggccaacaagacgcacccgtccatcttcgggatcttcgacgggcacgggggagagtgttccttgcctgtatctccccttggttcaatagcta

SEQ ID NO: 582924 - DNA, 102 bp, Homo sapiens
tcaagaaccatttccaaacaaggacatggagggaaggcttcctaaggtcatactccctgtcacaaactccagctgaactaacttggaggaggatcttccctg

SEQ ID NO: 582925 - DNA, 95 bp, Homo sapiens
cggctctttccctgcagtcctgccgaggaagcgtgcgtccctggcgcttccttcttctcttccggcggagaggatgaatttcatcctttcatcga

SEQ ID NO: 582926 - DNA, 75 bp, Homo sapiens
cgagacatgtgggctgattacatcctggaggagaaggagaagcggcgcctcgaccagctggaacgtaagaaggag

SEQ ID NO: 582927 - DNA, 89 bp, Homo sapiens
gatgtctgacatggaggatgatttcatgtgcgatgatgaggaggactacgacctggttggactccatgaaagaattgcacaaaacaaat

SEQ ID NO: 582928 - DNA, 50 bp, Homo sapiens
ggcagcggccggagcgcgcaagagaatggtgacttcttggccctggatct

SEQ ID NO: 582929 - DNA, 100 bp, Homo sapiens
tggtctcagcccaggacctccaggggaacaatgaggcctacgcagagctcatcgtccttgatgtggacgagtgccaccgcgtgccgccgccgtgtgacct

SEQ ID NO: 582930 - DNA, 100 bp, Homo sapiens
cgagtggacgcctaccgcatctacttgggtggcatgtatgtgtttcagctctttgactactatgcagctagcggtgtatgccttttgtgggttgcattct

SEQ ID NO: 582931 - DNA, 80 bp, Homo sapiens
acatctgctgccggaaggggtcccgaagccccctgcaggaactctacaacccaatccagagcctgggcctggtggacagg

SEQ ID NO: 582932 - DNA, 100 bp, Homo sapiens
atatgccaacccacctaactacggaaaacctgatcccaaaattattgaaaacactcgaagggttactcaaatgagtcgtccagacttgattctctttctg

SEQ ID NO: 582933 - DNA, 75 bp, Homo sapiens
cagcgacagcggagacgagggcattcgacacctcttagaggctgcaatcccagagagagttgaagagatccctcc

SEQ ID NO: 582934 - DNA, 82 bp, Homo sapiens
tattcgagtgaccgagaccgcggccgggaccgagggacatagatctgattgacatcctttggcgacaggatattgatctggg

SEQ ID NO: 582935 - DNA, 98 bp, Homo sapiens
caatcccattattcagagcgcgtatggagtggaaacgcttgtagggtttcaccagacttaattcagtgcacaaatgagatgaatgtgaacatcccaca

SEQ ID NO: 582936 - DNA, 74 bp, Homo sapiens
gaccctcatccagctgatgcccttcttcgtaaatgagccgtcagactgctacagcattacctaccggtacctcg

SEQ ID NO: 582937 - DNA, 98 bp, Homo sapiens
caccaggacagaaaagacagtgttctgctttcatggagttcacagaagagtcgaggagagttcttcgtaagtacatcttaaagctgtcaagatggttc

SEQ ID NO: 582938 - DNA, 96 bp, Homo sapiens
acactacctacagtgaaatagcatggatttcatccattatgctggctgttatgtacgcaggagtttcagctcctggcatcagctctattcaaatct

SEQ ID NO: 582939 - DNA, 113 bp, Homo sapiens
ccaagacccagctcaagcagaggcctacacgatttactggtcacccgccatgtcgaccttgctggacattaagagcagcgtgctcaggcaggtgcaggtgtgcccgtccttcc

SEQ ID NO: 582940 - DNA, 100 bp, Homo sapiens
ggatcaggagccgccgccgccatatcaggctgaccggttccctgatgtgttacctgcttctgctactgatccaaactgcagaacttctcattcatcccca

SEQ ID NO: 582941 - DNA, 100 bp, Homo sapiens
catttctccgccaattcaccttgactctgagctagaaagaccctctgttaaagataataacaaggactgttctggtgtgtccttacacctcacacgtctg

SEQ ID NO: 582942 - DNA, 74 bp, Homo sapiens
gttctgggaaaacaacattgtctcggccaggagtggtggctcacacctgtaatcccagctctgggaggccaagg

SEQ ID NO: 582943 - DNA, 83 bp, Homo sapiens
gtagtggaagatgtaaagcaatatttcgagcagtttggcaaggtttacccaaggtccagcctagcccctaggcaccatgtcgg

SEQ ID NO: 582944 - DNA, 100 bp, Homo sapiens
tcccgaatggagtccagctgtctcctgcagaagactttgtcctggtggcagaaacaaccatggccaggatacgaagaaatgcactcggtgatggaaagag

SEQ ID NO: 582945 - DNA, 95 bp, Homo sapiens
atgtggaattctccgtccctttccagggagggaacaaagcccacagcaccgtgggccagatggagaacatatccccaggacagatcattgatgaa

SEQ ID NO: 582946 - DNA, 106 bp, Homo sapiens
cgagcagggtgcgggagagccccttgcagaagacgccgtacgagtttccgttactatggcaatgacggcagggactacaacaacctttcctatgagcaaccatacc

SEQ ID NO: 582947 - DNA, 75 bp, Homo sapiens
catcggcagctgcggccacacgacagctggcctgaagctcagagccggggcgtgcgccatggccccacactgggc

SEQ ID NO: 582948 - DNA, 75 bp, Homo sapiens
ctcatccccgccctgtgggagaagcacagtccacagtctggcttcagccttgtcatgaaccacccagcctgtgtc

SEQ ID NO: 582949 - DNA, 100 bp, Homo sapiens
tgacaaaagtactctccgaagaggaattgacataggatttggagtggatcagttacgagatgacaatctagaaacttattggcaatcagatggttcccag

SEQ ID NO: 582950 - DNA, 74 bp, Homo sapiens
cagcatggaaccaaagcggatcagagagggctaccttgtgaagaaggatgccggaccagatctctgtctcggag

SEQ ID NO: 582951 - DNA, 83 bp, Homo sapiens
ctaatgctcccaaaaggccaccatccacatctcaaagaagtggggcttcaccaagttcaatgctgatgaatttgaagacatgg

SEQ ID NO: 582952 - DNA, 95 bp, Homo sapiens
gtggtggtggatatggtggcagtggggatggctataatggatttggtaatgatggctttaaacctggccagcggaaagttttatttacctgtttc

SEQ ID NO: 582953 - DNA, 75 bp, Homo sapiens
tgtgaaaggccaatttcatgaatttcaagagagtaccattggggggagatactaacatctccatcatgctggcaa

SEQ ID NO: 582954 - DNA, 117 bp, Homo sapiens
aggggatgaggggagcatgggtgccaaggagtcacggatcggattcctcagctacgaggaggcgctgaggagagttgtcaagaaattacccacaacccagaacagaggaaaatgaaa

SEQ ID NO: 582955 - DNA, 75 bp, Homo sapiens
cgcggcgcgcacgctccggcctgcgaacatccagtcatggataaaaatgagctggttcagaaggccaaactggcc

SEQ ID NO: 582956 - DNA, 98 bp, Homo sapiens
agtgatgagaagctgtcggagcttcccaaggttacaggaatacttaaagatgctggagtaaacaatttaacaattcaagtggaaaaggaggcatactt

SEQ ID NO: 582957 - DNA, 122 bp, Homo sapiens
agccattattatctaagcttcatacacatcctttctgcagacccctctcttcagtattactcccaaaggaagagccaatgttttccacccataatcctttctgccgacccctagttccctct

SEQ ID NO: 582958 - DNA, 95 bp, Homo sapiens
gcatggtgtttcaaagggtggtgaagaactaaggcacctgaatggacagaagaggacctcagccaactgacaagaagtatggttaagttcccagg

SEQ ID NO: 582959 - DNA, 89 bp, Homo sapiens
ccgcgggacaagaaaattcatgcgcgaccgtggcagccatgtattacagctactacatgctaccggacggcacttactgcctggcgccg

SEQ ID NO: 582960 - DNA, 74 bp, Homo sapiens
tggagaaaaactggatgttggtagaaaaagcaagagtttgttatatagcagaggataagatcaatgccctcatt

SEQ ID NO: 582961 - DNA, 75 bp, Homo sapiens
gttcgaagctgagtatgtgacagatttgctatgggatcatttatggaatgggagctaaatctttgggagagcaga

SEQ ID NO: 582962 - DNA, 100 bp, Homo sapiens
tattcctcgcccacatctgtgccaggttacaggaggttccagtggcatcgggaagtgcattgctatcgagtgctataaacaaggagcttttataactctg

SEQ ID NO: 582963 - DNA, 90 bp, Homo sapiens
ctgttttcttccctgatcctgatctcaaaattgttctatagtttaaactttcagatctcaggatggacccaagctctgccggacatggtg

SEQ ID NO: 582964 - DNA, 50 bp, Homo sapiens
caacgccaggcgccgctcctttacaggaccttttttctatcagtgcttat

SEQ ID NO: 582965 - DNA, 75 bp, Homo sapiens
ggaaagctttaggagttcacagtgattctaaactgccttcctcggttcgcagtacacttctggaactgtttggtc

SEQ ID NO: 582966 - DNA, 78 bp, Homo sapiens
gcttcgtgcaactctccgggcggccgcacctgccagatggatcctgagcttgaaaaaaaactgaaagagaataaaata

SEQ ID NO: 582967 - DNA, 98 bp, Homo sapiens
tggggccctcttgataaaaagagatgtggggggattctcgacctgctaacagaactggaccttttcgatcattaagcagcttcgagtctggaaaattt

SEQ ID NO: 582968 - DNA, 50 bp, Homo sapiens
cgacggcgcagtgcgaagcgaaacaggtttgagtggccgcttctttgtca

SEQ ID NO: 582969 - DNA, 86 bp, Homo sapiens
tactcttggaatcaaagataaatccaaatactgcatatcagaaacaacagcttcgcctcaacagcatcaagaagctgtccaccatc

SEQ ID NO: 582970 - DNA, 97 bp, Homo sapiens
gtgggactgcttccttgacgccttagcttggagccccgttatgaggaaaatgtttataggaggccttagctgggacactacaaagaaagatctgaag

SEQ ID NO: 582971 - DNA, 97 bp, Homo sapiens
ggtgacatggaaggggcagtacaagcttacgtctctgctcttcagtacaatccttctgttcggcacttgaagtactccttgtttaagaaatcactac

SEQ ID NO: 582972 - DNA, 96 bp, Homo sapiens
acgccgtcaaggaccggcacaaggacgttctcaagtggggcgatgagatactgcttttgcaaaaaataaagatgatggaaaatggtactattttga

SEQ ID NO: 582973 - DNA, 87 bp, Homo sapiens
gccgattatataaaatactgggagtttgcagggaagaaggagaaagggccaacccctgaagaagcaatacagaaactgaaggagaca

SEQ ID NO: 582974 - DNA, 75 bp, Homo sapiens
cttgaaatacagactgttggggaacaagagatgctgaggatgtggtatgagttggatgaggaaagccgaaggaaa

SEQ ID NO: 582975 - DNA, 128 bp, Homo sapiens
gccaaggtgttcggtccttccgaggaagctaaggccgcgttggggtgagaccctcacttcatccgggacctggaacggtaccaccagggtggccatcaaaaccctgaagcctggcacgatgtctccag

SEQ ID NO: 582976 - DNA, 101 bp, Homo sapiens
ctccgcgcccgccagttgcttgatcaggtggaacagattcagaaggagcaggattaccaaagggtggcccacaaactctttaacaacttgaaataaatgtg

SEQ ID NO: 582977 - DNA, 132 bp, Homo sapiens
gtggaaaatatgtgtacaaacctgtcatgaatcaaacatgttgtcctcagtacacaataaggcacaccattgagttctttgggatgcccgaaagtgtctggttgggaaacatgaaatagaagacgagaacct

SEQ ID NO: 582978 - DNA, 49 bp, Homo sapiens
gggcaagtgcgcttacatccgagatgagtataggatcaaaccagtggaa

SEQ ID NO: 582979 - DNA, 98 bp, Homo sapiens
gactcctacctgaaacatacggagattgacaatcaatgggccatcttggacgctgccccagtgctcagctgtgaagctgcaacacagactgaaaggag

SEQ ID NO: 582980 - DNA, 75 bp, Homo sapiens
gattcgcagtggtcgcttcttctccttggctccacataaacacggtttccttgaaggccgccatgcagagctgtg

SEQ ID NO: 582981 - DNA, 101 bp, Homo sapiens
atctaatcacagactcctatttgaagtatttgacgaaaatagactgcgatctagggcagccctgcagaggtacctgttctactgtaatcgctatatgaacc

SEQ ID NO: 582982 - DNA, 74 bp, Homo sapiens
gatatttagagtatgtgaagaaattagggtatgtgcactgcgcgtgaccagccgggcccgcagccgcatcctca

SEQ ID NO: 582983 - DNA, 51 bp, Homo sapiens
cagccctttgatgaccgcagcagcatattccgttcagggccaaagtgttat

SEQ ID NO: 582984 - DNA, 100 bp, Homo sapiens
cgagccacccgcccgcccaaggtctctcgcgggcgggagaacggaaaactcccaacttcctggaaaagcttttgacatcacctatgtgcgtctcaagttc

SEQ ID NO: 582985 - DNA, 85 bp, Homo sapiens
gaaaagcaatacaaactgggtggacattacccaagattttgaagaagcttgtcgagggaaggtggtctatggtgaacccatagca

SEQ ID NO: 582986 - DNA, 90 bp, Homo sapiens
gacacacagcatggagaaatccttcgcaatgtcaccatcctacgaggcaaatacgccatgcgagacctagtccacaggcttccaggaggg

SEQ ID NO: 582987 - DNA, 75 bp, Homo sapiens
ggcagatcacagataatattttcctcactactgctgaggcactgtttagtacagctgttgaaatgaagataaaac

SEQ ID NO: 582988 - DNA, 75 bp, Homo sapiens
aggctcgggataacgcctgcaacgacatgggtatgaaaatgaaagtcttcagaatggaaggaagtcaactgaatt

SEQ ID NO: 582989 - DNA, 100 bp, Homo sapiens
ttttaattctggaattctagagcctaaagagcaggaatcatggactgtggatttgtataagtccttgaaaacactatctgcagaactggtaccttggctt

SEQ ID NO: 582990 - DNA, 120 bp, Homo sapiens
ggatttggtttcagcatgtccttctctgaatgatgaatacttttactactgtgacaacattaacggagttcatgatcaagtgttgcccacaccaaatgcttcatccagagtcatagtaca

SEQ ID NO: 582991 - DNA, 100 bp, Homo sapiens
cacagccctgttaaaggatggctttggctttgcagacagcacagtcttacagggtgaaatcaaaattgctgtttctattgaagatgaagccaacaaggac

SEQ ID NO: 582992 - DNA, 100 bp, Homo sapiens
cggagcccggctcccgcaccatggaggaggacgacagctacggatttttagactctgaggagcagttggagctaatccacattatggaaatggaaaccac

SEQ ID NO: 582993 - DNA, 50 bp, Homo sapiens
cggctactacaatcagagcgaggccgccatcttctctacgaagagtgact

SEQ ID NO: 582994 - DNA, 100 bp, Homo sapiens
gcacattgatgcggccatggttttggaagagtgtgcccaggggcagagttaccagggcaggttatctccatggcagcttctactctggcaaacttggcca

SEQ ID NO: 582995 - DNA, 98 bp, Homo sapiens
cccgcttcgcagctcaggagcctgaggtccgaaaggagatacaactcgtcaacgaatcaaattcagtgatgacagagtatgcaagagtcaccttctca

SEQ ID NO: 582996 - DNA, 100 bp, Homo sapiens
cagtaccagttcagcaagtgtctctactgtcagaccacacacagaagtgaaccagaggaaatgcctccagaagcaaagatgaggatgaagaatattggaa

SEQ ID NO: 582997 - DNA, 77 bp, Homo sapiens
cccagagccccgcgtttcagccctagggaagccacataaagaagatccctaatagtcatttctcaacaattatatag

SEQ ID NO: 582998 - DNA, 100 bp, Homo sapiens
aacaaactcatattgatattaattccaaaatcaggtatccaaaccttgaaacctttgctctagatgtcaggcttgtttttgacaactgtgaaacatttaa

SEQ ID NO: 582999 - DNA, 100 bp, Homo sapiens
tcttttggaggaggaggatgaatttgatagagaggaactgttgaaaaaatgtcatcaatgtgtcgaaaccattgtgaaggctaaagaccagcaagctgca

SEQ ID NO: 583000 - DNA, 82 bp, Homo sapiens
atttgactgagagaaacccactgaagacgtctgcgtgagaatagagaccaccgaggacatggatttgattgacatactttgg

SEQ ID NO: 583001 - DNA, 73 bp, Homo sapiens
ttttgagtctccccggtacctgcagggccatgctatgatagtggaagcttatccaaaataatagatccagaag

SEQ ID NO: 583002 - DNA, 73 bp, Homo sapiens
caatgagacagggcacaccaaactccatctggcctccggtgtggctgtctctgatggtgtcatcaaggtgttc

SEQ ID NO: 583003 - DNA, 98 bp, Homo sapiens
gaaacattaccgtcatattccacccattactaaggtggagatacactacgccttgacacacttatagaatggtggagagaaaagaatggttccttttg

SEQ ID NO: 583004 - DNA, 75 bp, Homo sapiens
tgagaagccttccgctattcagcagagagctattattccctgtattaaaggtaatagcctgcagctggtgttttg

SEQ ID NO: 583005 - DNA, 75 bp, Homo sapiens
ttacaagcagcaagtgcgcggttggggccactgcgaggccgttttagggtggaagatgtctatggatgtgacatt

SEQ ID NO: 583006 - DNA, 100 bp, Homo sapiens
tgagctgaacatttcagaaatacagaagttgaagcagcagcttatgcaggtgtcatggagaaactccagctgggcccagagattctgcagcgggaaaatc

SEQ ID NO: 583007 - DNA, 88 bp, Homo sapiens
cttttaaggcttctctcgtcaaaaatggtgcagaatttacggatgagaacaagttgagcagtgccaacggccatgaagaacgtagcaa

SEQ ID NO: 583008 - DNA, 83 bp, Homo sapiens
ccgcagcaaggacgtccgcagcagcaagagtgagccatggagctacgtgtggggaacaagtaccgcctgggacggaagatcgg

SEQ ID NO: 583009 - DNA, 105 bp, Homo sapiens
gggagccaagaccatcgaggggtctggacgcacagaacacatcaagaattactcaaggtgatgaggacaattgatgacagaatagtacatgaattaaacactacg

SEQ ID NO: 583010 - DNA, 100 bp, Homo sapiens
ctttgccgcagttcatcttcctccctgtgtactttccatttgccttcctgggtcccttcaccgatgttgtcaccaccaacctaaagcttggcaacccgac

SEQ ID NO: 583011 - DNA, 75 bp, Homo sapiens
agcggaacaacgtcggcgagcggggtagatatagttgtaggtactccgggaagactagatgacttggtgtcaact

SEQ ID NO: 583012 - DNA, 75 bp, Homo sapiens
cctagcgtcctggaattacttcaatcaaaggggtacaactcacgaatcccttctacagtatctggactacagaca

SEQ ID NO: 583013 - DNA, 100 bp, Homo sapiens
ctaccaggaggccaggggtgtcgccatgcttcgccgacacgaggtgaccatctgcaattacgaagcatctgccaacccagcagaccatagggtccatcag

SEQ ID NO: 583014 - DNA, 100 bp, Homo sapiens
aagagagttgtgagtctctttcctgtttacctccagtgtcccttcttccacatgaaaaggataagcgatctataactacaatgcttctcaagatgtggag

SEQ ID NO: 583015 - DNA, 98 bp, Homo sapiens
aactccaatgggcctttccagcccgtggtccttctccatattcgaggcccctccagccagcgtcaggtgcagaatggcccctctcctgatgagatgga

SEQ ID NO: 583016 - DNA, 100 bp, Homo sapiens
gggagatcgaggctcgctacagcactggattagctggaaacctcctgggagacctacattacaccactgagggcacgaccataataacatccctgacttc

SEQ ID NO: 583017 - DNA, 85 bp, Homo sapiens
ccctgccgtacaagctgatctccctgctaaatgaaaaagggcaagatactgggatcttaaatctgacccaggccttgaaagacaa

SEQ ID NO: 583018 - DNA, 51 bp, Homo sapiens
ccccgaggtgtgcgaagccaccaagaactcattatacaatgacaaatggag

SEQ ID NO: 583019 - DNA, 75 bp, Homo sapiens
cgggcgccaggaccggccgaacgcagagcgtgagtgcatctccatccacgttggccaggctggtgtccagattgg

SEQ ID NO: 583020 - DNA, 71 bp, Homo sapiens
cttgtggtcctgctcgttggaggctgtgcagcagaaggttgggcccatgagatgtgtgctctgtatattcc

SEQ ID NO: 583021 - DNA, 100 bp, Homo sapiens
acaccgcccggagttggcgtcccttctccctctccgagtgctgctcctgtcattgtggccatggacgggaccgcagatgttcatggactgcagcccacag

SEQ ID NO: 583022 - DNA, 100 bp, Homo sapiens
gaaaaagcaagctgaagacatcaagaagatcttcgagttcaaagagaccctcggaacgaggttccagccttggcaagaggagtgtggcccttcctggaat

SEQ ID NO: 583023 - DNA, 100 bp, Homo sapiens
tggctcaggtcttctgtgaggaatctggattgtcacctttgctgcaaaaaattacggacatagggcctgattacattccaacagaggaagaaaggagagt

SEQ ID NO: 583024 - DNA, 102 bp, Homo sapiens
cctgtatgtgatgatgaccgtcaccaactggttcaaagtgaaagcagcagcagtagcaacatctccaccatgttggtgacacacgattacacggcagtgaag

SEQ ID NO: 583025 - DNA, 74 bp, Homo sapiens
ccccacctgctgaggagcggaccagcgccaagggccctgagaccatgactcaaagtcctctggctcacagcctc

SEQ ID NO: 583026 - DNA, 100 bp, Homo sapiens
gcagctcaatgagaaaatctccctgctccgcagcgacatcaccaagctggaggtggacgccatcgtcaacgccgggactttgaacatgtcggggatcgcc

SEQ ID NO: 583027 - DNA, 100 bp, Homo sapiens
gtgctgctgctcctgcagctgccttttctgccatcagagagtattatgagggaggccgaggacttcatgctccggacagagaaacggcgctgggattagg

SEQ ID NO: 583028 - DNA, 75 bp, Homo sapiens
gaggggaggagctaccaaacagctgatggaaataactgaagtgaagtgatggactccgatttggagagtagtaag

SEQ ID NO: 583029 - DNA, 95 bp, Homo sapiens
gaggaaagcaggaggaggtggcggcggcgggaagatgagcggtggtgccccccccgggcacggggccatgtacaacgggatcgggctgccgacgc

SEQ ID NO: 583030 - DNA, 100 bp, Homo sapiens
tacaccctgttaatgttgatattttgacctccttccatgaatcacaaatgttcttaatggcatctagaatggtcagacacattctatgtgaaaaacatgg

SEQ ID NO: 583031 - DNA, 100 bp, Homo sapiens
caagaaaaaaaccacaaatgtttttctgttttgcctgaatacatgatttaaacaagagatttccacagaaggaaagtgggaggtagaggaaatgaaggag

SEQ ID NO: 583032 - DNA, 100 bp, Homo sapiens
ttcttctgtaccatagaacccccatcactgtctaagcagccagtatgtgccaagagttgtaacctctgcacaacagaaagcaggaagaactattacagcc

SEQ ID NO: 583033 - DNA, 75 bp, Homo sapiens
ctccaaaacagtcatgtcacacctggatagatccagatgtaccagctctcgaggttgcttcatgattaccacaga

SEQ ID NO: 583034 - DNA, 75 bp, Homo sapiens
gcagctaccagcagtgcataaacgaggcgcagcgggtgaagacaatgcagatcttcgtgaagactctgactggta

SEQ ID NO: 583035 - DNA, 99 bp, Homo sapiens
tttactgaaatttgatgacctagatggaacacatgctctgatgcccagcgacttctccgtgtcccttaaagcgtcagggaagaacaaacacttcaaggt

SEQ ID NO: 583036 - DNA, 75 bp, Homo sapiens
gcttctctcattttctttccctgcaccaactagcagggcttaaaagacaaccttcttgcttctgggacatccagc

SEQ ID NO: 583037 - DNA, 98 bp, Homo sapiens
gtccacggagtgtatgaccacaaacagccatcaagagaatagtgacagtggtacaggaaagaaagaaaaagaaaagaaaaacagaaagggcaaagaca

SEQ ID NO: 583038 - DNA, 74 bp, Homo sapiens
cttttgatgtctgacaacgtggatcgttgttttgaaacacctaatctgggagcctgcaagtgacaacagccttt

SEQ ID NO: 583039 - DNA, 75 bp, Homo sapiens
ggcagttctaaatttgaatttgagtcgtcattgaattttgagaagcattctgaaaactttgcatggacagagaat

SEQ ID NO: 583040 - DNA, 75 bp, Homo sapiens
gaaatgttggaaatggtttaaacacattatcagtgagggccgaggcaagttgacggtattttcagttaaagctat

SEQ ID NO: 583041 - DNA, 75 bp, Homo sapiens
gggaggcttaccgagagtttgaaagtgcgattgtggaagctgctcggattgcagcgagaacattgggagatcttg

SEQ ID NO: 583042 - DNA, 97 bp, Homo sapiens
atcagctgatcctcctcctgcaatttgggttgcaacaactaagtctacagtaaataaatggggaggtgttgtagcaggaaatgtggctcatattctg

SEQ ID NO: 583043 - DNA, 88 bp, Homo sapiens
aattgcagcaccgagctccgcctgttgtaccagctggtttttctgctctccgagaacatggagctgatccaggacacctcccgcccgc

SEQ ID NO: 583044 - DNA, 100 bp, Homo sapiens
cctgcttcaccgaacagcacctcaggagcaggtatggagatggtccacgtcctcccaagatggcccgatacgacaatggaagcggatatagaaggggagg

SEQ ID NO: 583045 - DNA, 75 bp, Homo sapiens
caaggagatgggatggagagcctgagttggcattcgtataaatgacctgctattatcttcctaaaaagttcaccc

SEQ ID NO: 583046 - DNA, 83 bp, Homo sapiens
ctgatcgcctgggtggttgttggcgtgtccctgcagcgaaggatcctggttgactgtgccctgtccacggtgcctcctgcatg

SEQ ID NO: 583047 - DNA, 83 bp, Homo sapiens
gtccggaattcatggggtgaaccatggcccgtggaacacagagcattcctaatgacagtcctgcccggggtgagggcacccat

SEQ ID NO: 583048 - DNA, 98 bp, Homo sapiens
atggctgcaacacttacacagcagcaacagcctgctacagtggtccactgtaggtgtgccaagtgtttctgttatcctacaaagcgaagaataaggag

SEQ ID NO: 583049 - DNA, 100 bp, Homo sapiens
accctggcagagcagcgggatgagttggaaggcttccaggatgacgccggaatagcctaacatggcagaccagagacagcgctcactgtctacctctggg

SEQ ID NO: 583050 - DNA, 75 bp, Homo sapiens
caaggcactgctttttcatgacgaacaatgctaaagtagctgtgctaggggcctctggaggcatcgggcagccac

SEQ ID NO: 583051 - DNA, 75 bp, Homo sapiens
tggcccgggtgacccacgcggaggccgtcaagtggggacgccctactacatgtcaccggagaggatccatgagaa

SEQ ID NO: 583052 - DNA, 82 bp, Homo sapiens
agacctgcaagctctttgacacacagcagttcttgtcaggcagaatccagagaccacatttgaagtatatgttgaagtggcc

SEQ ID NO: 583053 - DNA, 74 bp, Homo sapiens
gccgagtggtctaaggcgccagactcaaggtgttgctctcttgccattcgtggatgagcgaaggctacgagctg

SEQ ID NO: 583054 - DNA, 82 bp, Homo sapiens
ccgcggacgcccgctgagcttggcgcacgggccgaccagaaagtcctacctccatctccgtgggccccagcaccagccgacg

SEQ ID NO: 583055 - DNA, 75 bp, Homo sapiens
ccgagattctgagaggcatcagtcaaggtgtatgaagcttatggtcaaacagaatgcacaggtggctgtacattt

SEQ ID NO: 583056 - DNA, 75 bp, Homo sapiens
agagcgttgcttcggtttccctccagacaggacagagcgggatgccaccagcttgtccaaagggaagttccagga

SEQ ID NO: 583057 - DNA, 100 bp, Homo sapiens
ggctgcctataatcaagtaaaaacaatagctcaaggaaacctttccaacacagatgtccaagctgccaaggatgtttcagcagcccctgagaaggaagag

SEQ ID NO: 583058 - DNA, 75 bp, Homo sapiens
gaaatcctcagtgaacttgggaagtgtgttgctggaaaagattgtgcttcaagaagaccatagggaagaacgcat

SEQ ID NO: 583059 - DNA, 86 bp, Homo sapiens
cctctggcttctgtccctgctcagtcggccaagaagccctgcccaggtgtcttcagtgccctgggtttgcctgtgacccaatgccc

SEQ ID NO: 583060 - DNA, 73 bp, Homo sapiens
ttgaataaaattattgatataaactactatcctgtaccagagagagaaaaggaacagttccgtaagctcttta

SEQ ID NO: 583061 - DNA, 75 bp, Homo sapiens
gcggaggcagaggtggaggcgctttgaaagcaaagccttctagacaagctcagtggaatctgaagggcccacccc

SEQ ID NO: 583062 - DNA, 75 bp, Homo sapiens
tccttacttacctcagtacatagaccacgtcatatcacataacacagcaggcgtgtacgcccggcgtggagggtt

SEQ ID NO: 583063 - DNA, 100 bp, Homo sapiens
gggcatggagcaccaggcggtggtgggcgccgtgaagagccttcaggcgctgggcgagcaacacagtcactcctggcggcaaaccaaacaaaaccagagt

SEQ ID NO: 583064 - DNA, 51 bp, Homo sapiens
gtctctggagacatcttcagcaggtgcctgtggacatacgagatccagttc

SEQ ID NO: 583065 - DNA, 75 bp, Homo sapiens
tggagctccagttcactccgttccagctgtgccatgcggagttgctccttgagggcaggacagttcttatggctt

SEQ ID NO: 583066 - DNA, 75 bp, Homo sapiens
ctcccccagactctgttggatcagaaggtcaaggacgcgcgggcggccatgcgccccttcgacccctccactctg

SEQ ID NO: 583067 - DNA, 75 bp, Homo sapiens
cttgaccttcgtgctgtttctctccctggcttttggggcaagctacggaacagtgaagctgtggtctaccaatct

SEQ ID NO: 583068 - DNA, 75 bp, Homo sapiens
atcaacaagcacataaggaaattagtggaggatgcagactcttcttattttaaaatctttaagacaaaacatgac

SEQ ID NO: 583069 - DNA, 100 bp, Homo sapiens
cgcagccaggcagagccctccgagcggcgcgtgaagcgggagaagcgcgatgacggctacgaggccggagcttctggaagaggtgaagaaggaattgcag

SEQ ID NO: 583070 - DNA, 100 bp, Homo sapiens
agggtagaactaagaagtttggaaaagattatatcccagttgccagaccctgatgctcccataagacagaaaatgccccttgatgatctggatagagaag

SEQ ID NO: 583071 - DNA, 101 bp, Homo sapiens
tcataatgtgtcctcagtgtgataggctttgtccattctggaaactcaatattacttgcgagtcctcaaagaataactgaagtgaagtgatggactccgat

SEQ ID NO: 583072 - DNA, 83 bp, Homo sapiens
gagttcctcaatgaggcctcggtcatgaagggcttcacctgccatcacgtgcatgccaatgaagatgtggaaagaatgttact

SEQ ID NO: 583073 - DNA, 101 bp, Homo sapiens
tggaggctgctaacctcttccagtgtcttctgggactctcctactcattgcttgcctgtgcattgtggccaatggtggcatttgtagttcctgaacatcag

SEQ ID NO: 583074 - DNA, 95 bp, Homo sapiens
tgcgctgaaaattcttcttgatcgtccaaaagctagaaatgagaatctacctgttactcgtattttggacaatcttatggagatgaagtcaaacc

SEQ ID NO: 583075 - DNA, 98 bp, Homo sapiens
ccatcgccggctcggtggaggcggtggccaggctgctggtggtctacccttggacccagaggttctttgagtcctttggggatctgtccactcctgat

SEQ ID NO: 583076 - DNA, 100 bp, Homo sapiens
gaaggcgcgagtgaggaaaggaggtactgtaggcttcaacggaccacaccaaaatgccatctcaaatggaacacgccatggaaaccatgatgtttacatt

SEQ ID NO: 583077 - DNA, 100 bp, Homo sapiens
atatgcattgaagcaaattgaaggcacaggaatatccatgtcggcttgtagagagattgcagcatgaacaaccgggaggtgctggagcaggtggagcgag

SEQ ID NO: 583078 - DNA, 100 bp, Homo sapiens
catccttctacaacatgtagggaacaaatgtataatattctcatgtggattcatgataattacagaccgaatccgggataccttgatccatgaaatgtgc

SEQ ID NO: 583079 - DNA, 74 bp, Homo sapiens
cagcctcccaagtagcttggattacaggtttctactacacttagcggacaaaactggtggcataattgtgacaa

SEQ ID NO: 583080 - DNA, 100 bp, Homo sapiens
cccgtcgccacccgcgtacccggcgcagccagagccaccagcgcagcgctgccatggagcccagcagcaaggtatcgagaaccttccctgcgaacttcag

SEQ ID NO: 583081 - DNA, 83 bp, Homo sapiens
agataatgtggtgaattgcttataccatggagaaggagcccagctggtggagctgtctaaggctcaagatatagaagcaggag

SEQ ID NO: 583082 - DNA, 90 bp, Homo sapiens
cgggaactgctgacgcttgatgagaaggacccacggcgtctgttcgaagtcaaggcggataagaaggcggcacaagaaaagatgatccag

SEQ ID NO: 583083 - DNA, 74 bp, Homo sapiens
ggaaccagaagcagattgccaacattgaccgtattacaaaaaagtattaatgaagcttagaaaacctagaatta

SEQ ID NO: 583084 - DNA, 100 bp, Homo sapiens
gggaaggaaatcatgtcaagcgaagccttgaaaaagctgccctgagacggtgtcccgccgaaaggttcatactttggaaacaaaagagcttatgcagaaa

SEQ ID NO: 583085 - DNA, 98 bp, Homo sapiens
ccataatgaagacttcatcgctagtggcagtgaagatatgggacacagcaggacaggaacggttccagtctctcggtgtggccttctacagaggtgca

SEQ ID NO: 583086 - DNA, 75 bp, Homo sapiens
aatatgcaaagtgtgaccagtgtggaaacccaaaggagtcgttcacgcctactgaggagcatgtgttggtggtgc

SEQ ID NO: 583087 - DNA, 83 bp, Homo sapiens
gagaaggcccagtttgcacagccggagatcttaataggaaccatcccagacagacagtctagcagtgcttccttggagaccct

SEQ ID NO: 583088 - DNA, 60 bp, Homo sapiens
gaaaatgcacggaactcattagcgatcagctcttgccaggtaaaaagttttgggaaacag

SEQ ID NO: 583089 - DNA, 98 bp, Homo sapiens
acctctacaaacagggctttgccatccccggctccagcttcctgaattctgaaggtggactctatgtatgcatgaatacatttttggcctttggaagg

SEQ ID NO: 583090 - DNA, 82 bp, Homo sapiens
gctggtcctgggggtggggctgtaggggaaagtgctaaagccgctgaggtgcagtggctcactcctgtaatcccagcacttt

SEQ ID NO: 583091 - DNA, 78 bp, Homo sapiens
gaaaacttgctgcggttgctcaaggttatggccattgcaccaacccattatatctggcaaagagaacgttctgttcat

SEQ ID NO: 583092 - DNA, 80 bp, Homo sapiens
cacagcacagttcctgggaaggtggagccaccagcctctccttggtgtacaagggagaagaagccacattccaaatctca

SEQ ID NO: 583093 - DNA, 90 bp, Homo sapiens
gtttcctcctccagaggcctgcacgcggggcgcgggccccgaaggctctccatcgaaggcaacattgggagaaacaaaggcagcgctgcc

SEQ ID NO: 583094 - DNA, 75 bp, Homo sapiens
cattgacatttaattttagggtcctttatatagaagggagagtaggttcccaagtggggcccaggctcggaccat

SEQ ID NO: 583095 - DNA, 75 bp, Homo sapiens
cagcacttccggtcacgccatcgttgctgccttcttcgtcaagtttgcagtgttgatgtgggtatttacctatgt

SEQ ID NO: 583096 - DNA, 101 bp, Homo sapiens
tatgttcatgaggatagcaaaagcttatgctgcgttgctccttgagggcaggacagttcttatggctttatccgttgcgtaagcacagagaggtctgcgag

SEQ ID NO: 583097 - DNA, 50 bp, Homo sapiens
ccagccaccagtgggatgatgtcctgacacagctctccctgaggagcagc

SEQ ID NO: 583098 - DNA, 100 bp, Homo sapiens
ggatcgtgaccgagaccgtgaccgagagcgtgaccgagagcgcgaatatcgtcatcgttagaagagccagcccctgggcaacaaagtggaaatggagatt

SEQ ID NO: 583099 - DNA, 114 bp, Homo sapiens
caaggataatcactaaattctgccgaaaggactgaggaacggtgcctggaaaagacaatgcagatcttcgtgaagactctgactggtaagaccatcaccctcgaggttgagccc

SEQ ID NO: 583100 - DNA, 101 bp, Homo sapiens
cgcagcagctggggaggagccaaagcctcggcgctcacctaagccgcagggagatacacccaactgggagtagagacggggtttcaccatgttagccagga

SEQ ID NO: 583101 - DNA, 89 bp, Homo sapiens
ggaagggcaggatgaaaaccaagaaggagattttgaagatgcagatacccagaacattgatgatggcacctcagatcgcccctacagcc

SEQ ID NO: 583102 - DNA, 87 bp, Homo sapiens
ggacagatagctggcgtggataaagatggaagggtctatgaaaattatcctacttatgatttaactgaaagaaaagatttcataaaa

SEQ ID NO: 583103 - DNA, 100 bp, Homo sapiens
gttggtgggagacgggtgaggtacaggctcagtctgcggccaagactccgtcctgcaagctcactgaaaactgaagctaatttggaagttttgaagtcaa

SEQ ID NO: 583104 - DNA, 98 bp, Homo sapiens
aacaacgttaccagcatccattgcaaaccttattaatctcagggaactggatgtcagcaagaatgctcggggtgtggttttctctcggttgtgcctat

SEQ ID NO: 583105 - DNA, 90 bp, Homo sapiens
ttgacaccttcagaatcgactcaagagttacatgcatcaggtatgagttaatacagaaaggagtgactgaacttagaactgttgggaatg

SEQ ID NO: 583106 - DNA, 83 bp, Homo sapiens
gcacctccggtaccgctgcagccaccgcggcccccgcgggttctcggtgctcgccatctccccaaacttggacgaagtattgc

SEQ ID NO: 583107 - DNA, 82 bp, Homo sapiens
gggcgccatggcgaccggagcgaacgccacgccgttggatgccatggacaatattaccaggcagaaccaattctacgatacc

SEQ ID NO: 583108 - DNA, 90 bp, Homo sapiens
aggtgtttggccttcggagcaggaagctaaagctgtttctgaatgagacccaaacgcaggtgcatgaacagaagtattgcattaactcag

SEQ ID NO: 583109 - DNA, 83 bp, Homo sapiens
gtccccgtacggccacccggcgggtttggtgcacctcgatttggaggaagtagggcagggcccttatctggaaagaagtttgg

SEQ ID NO: 583110 - DNA, 98 bp, Homo sapiens
cggacgggcaagccctggtcctgggcaggggacccctgacccaggttacggaccggaagtgctccagaactcaagagccctatgagtttgtctctctg

SEQ ID NO: 583111 - DNA, 74 bp, Homo sapiens
gtagcgcctgcagattccattcaggcagaagagacttaaccaccaccatgtcgagcaaaagaacaaagaccaag

SEQ ID NO: 583112 - DNA, 100 bp, Homo sapiens
tgcccagaagaagggaaggcgcgagtgaggaaaggaggtactgtagaacaccttccaccatgaccacctcagcaagttcccacttaaataaaggcatcaa

SEQ ID NO: 583113 - DNA, 51 bp, Homo sapiens
atttgtacaatttatgcagaacttcagggtctcactctgtcacccaggctg

SEQ ID NO: 583114 - DNA, 76 bp, Homo sapiens
agcaacagccactagtgggtttgccagtggaaaggcggggtttcaccatgttgcccagactggtcttgaactcctg

SEQ ID NO: 583115 - DNA, 90 bp, Homo sapiens
gccgccttctcctcgtacgtggttatgaagacagtatggagtttccagaccatagtagacatttgctacagtgtctgagcgagcagagac

SEQ ID NO: 583116 - DNA, 98 bp, Homo sapiens
gccaaactgtccaaggctttggcagacccagatgatgtggtaccagttggccaaagaagagcctggtgttggtgcatgtgctttggactagcatttat

SEQ ID NO: 583117 - DNA, 51 bp, Homo sapiens
gctggaaccatggagggtgtagagtgacaatctccaatagacttgtgtctt

SEQ ID NO: 583118 - DNA, 82 bp, Homo sapiens
cttgagcagtcacctggcacaggattatgtatatcacgtagtgagtgcgatctgtgaatggacagtggcctttggttttatt

SEQ ID NO: 583119 - DNA, 83 bp, Homo sapiens
ctcggcagggaggatgacggagctgcagtcggcactgctactgcgaagacagctggcaggggataaaaacattcagatggcag

SEQ ID NO: 583120 - DNA, 101 bp, Homo sapiens
attggtcgtctgagagctttacgtcatcttcgattagctaataaccaactgcaattcctacctccaggttcatgcatgggagatctcagaccagttgttac

SEQ ID NO: 583121 - DNA, 100 bp, Homo sapiens
tggacttgcaggatgacttagacgactcaatcccaggacccaccggctcagaagggcccaacgctcaccactaaggtccggcggaccatgagcagccgcg

SEQ ID NO: 583122 - DNA, 75 bp, Homo sapiens
aggacgcggcagcccgtggagtcggctgagggaaaagcgaggcaaggcaggcggtgtgccggtccaacaaaagcc

SEQ ID NO: 583123 - DNA, 96 bp, Homo sapiens
catcatcagtctatttagaagaggtatgaacgctgccgtccgtgccgtggtgcgcatgggtatctacgtgggggccaaggtgtacttcatctacga

SEQ ID NO: 583124 - DNA, 80 bp, Homo sapiens
cggcggagacgatgcctgagatcagagtcacgcccttggtgcctccggagccagcgtggtggccatagacaacaagatcg

SEQ ID NO: 583125 - DNA, 100 bp, Homo sapiens
ggctctcttatggcgaatgcaacccgaagagagagtgagaatttgccatctgccttagtaagtcatgtactaaatcctcaacctggagagaagattctag

SEQ ID NO: 583126 - DNA, 100 bp, Homo sapiens
gagagaggcaccgggatcgtgaccgagaccgtgaccgagagcgtgaccgagagcgcgaatatcgtcatcgttagaagaatcctcactatggatgggctca

SEQ ID NO: 583127 - DNA, 75 bp, Homo sapiens
ggtgtaactgtggacatcaccattcaggaagcacgaaagtcaaagaagttgggaaagttaaaagggattcacgag

SEQ ID NO: 583128 - DNA, 75 bp, Homo sapiens
aaccataccttaccactaaatgtagtagagaaaaggaacagttccgtaagctctttattggtggcttaagctttg

SEQ ID NO: 583129 - DNA, 98 bp, Homo sapiens
tccggagcttctcagaagacagagggttttcttttgagagaattgaaggacttcagatcagcaaatcgttaagtatgtttggacagtctatatcagga

SEQ ID NO: 583130 - DNA, 96 bp, Homo sapiens
ccctccaacttagtgatgaagagatgagtttgtttacagctgttgtcctggtatctgcagttgtcatggatgcactggtagaagatgatatctgta

SEQ ID NO: 583131 - DNA, 83 bp, Homo sapiens
atattcacaaagaaacggtgtctaaatgagtggccacagatgtctttaattccaaaaacctggccgttcaggcacaaaagaag

SEQ ID NO: 583132 - DNA, 101 bp, Homo sapiens
atggagaccctcacggagctgggcgacgagctgaccctgggagacatcgacgcatgcttttcacttccactgcatctctcgctggctcaaaacacgacagg

SEQ ID NO: 583133 - DNA, 83 bp, Homo sapiens
agcagcgccgtcccgtccgacagccaggcccgggagaactcttggagtttgacaaggagttgtctgtctttaaggacagactg

SEQ ID NO: 583134 - DNA, 96 bp, Homo sapiens
ctagtattgcatcctacagatgtgctgtaaacatcaaaagaagacggtgggatcaggagatgacttcctctgctaaattacctcgctgccgacagg

SEQ ID NO: 583135 - DNA, 83 bp, Homo sapiens
cagcaagctccacatccccgtgcttgccttgcgccatggactggcagccagacgagcagggcctgcagcaggtcctgcagctg

SEQ ID NO: 583136 - DNA, 100 bp, Homo sapiens
ccggcccatcaagctcctggtcagagtgtatgttgtaaaggagaataaaggcagccccgttgatgactgaaaatgacaaagcatccacctaacagacgag

SEQ ID NO: 583137 - DNA, 101 bp, Homo sapiens
caaaaagcacagtaaatacccactatttctccatcgatgaggagctggtctatgaaaagtatctttcagatgaaggcattgaagcttgcacaagctctcca

SEQ ID NO: 583138 - DNA, 95 bp, Homo sapiens
gcaaatgacccggagtcagcagatggatgaactcctggacgtgcttattgaaagcggagggctgaaaagacagaagttttgagtgaagaccttct

SEQ ID NO: 583139 - DNA, 75 bp, Homo sapiens
ttcgaaaggcgatgttggaaaaagacggaggtgtaccagtgatggcaataagaaacaaaatgatatcagaaggac

SEQ ID NO: 583140 - DNA, 87 bp, Homo sapiens
agaagcctgaaaagtcgcagcgagctggagccgccggaggtgaagctgtacttcacaaaaacagtagaggagccgtcaaatccagag

SEQ ID NO: 583141 - DNA, 50 bp, Homo sapiens
ccctgatggctgctggaaaagtagatatagttgtaggtactccgggaaga

SEQ ID NO: 583142 - DNA, 88 bp, Homo sapiens
gccggcgtcttcgtttgggacgaggagaggatccaggaggaggagttgcagaggtatcttgcaatatattcagaactctccctcctag

SEQ ID NO: 583143 - DNA, 97 bp, Homo sapiens
gaaggatggaatcttcaatcaatcatatttcacaagatggtctgacaccactgcactgtggagcaaggagtggccacgagcaggtggtagaaatgtt

SEQ ID NO: 583144 - DNA, 98 bp, Homo sapiens
acaggacgaaggcgtgctgaagggccgcctgggcagaatgtcacgatggacgagggcggcacgcccctgctccccgacagcctggtctaccagatctt

SEQ ID NO: 583145 - DNA, 113 bp, Homo sapiens
gcgggactgcggcggcgccggcctccggggagaaacgggaaaagcttcactctgaccatcactgtcttcacaaacccaccgcaagtcgccacctaccacagagccatcaaaat

SEQ ID NO: 583146 - DNA, 83 bp, Homo sapiens
gacactgtacagggatgtgatgctggagaactgcaggaacctggcctcactaggagccctctggcacaaatggaagaagaaag

SEQ ID NO: 583147 - DNA, 110 bp, Homo sapiens
acgagggcatctgcaaccgcaacatcgaccagaccatgctctccatcctgctcttcttccacagagctaaagttgcagacaagatccagctcatcaataatatgctggac

SEQ ID NO: 583148 - DNA, 51 bp, Homo sapiens
gtggctctggatagcaccttatggacagcccaggatggcggcccaggtgac

SEQ ID NO: 583149 - DNA, 100 bp, Homo sapiens
atttactacagagattcaaatggagcgattttagtttatgacataacagatgaagattcttttcagaagataaacaatcagattctgtatggaagaagtc

SEQ ID NO: 583150 - DNA, 100 bp, Homo sapiens
ctgggatggcgcgggccgggccggcgtggctgctgctggcaatctggtggaaagaggcaaaacctgatgaattaatggattccaaattgagatgcgtatt

SEQ ID NO: 583151 - DNA, 75 bp, Homo sapiens
tccagccttgatacccattaccactgcctcctttattgcagcaggaatttggcactactgcagtcttcagttaag

SEQ ID NO: 583152 - DNA, 99 bp, Homo sapiens
ctcgctccgtggccttagctgtgctcgcgctactctctctttctggcctggaggctatccagcgtggccaaggtggaatacgtcaggaagaagccaaaa

SEQ ID NO: 583153 - DNA, 71 bp, Homo sapiens
aaaatccgcaagaccatcatgcagctttagccagggccctctgaaggatgcacccaacctcatctgcaccc

SEQ ID NO: 583154 - DNA, 101 bp, Homo sapiens
cacgagtacaatgacatcaaggatgtggggcagatgctgatgggcaaactaggtgctggagaatctggtaaaagcaccattgtgaagcagatgaggatcct

SEQ ID NO: 583155 - DNA, 76 bp, Homo sapiens
cctccctcggctcggcccaaagcagcagcttcagccccgaatggtgaatggagagaatgtggagcagcatccttca

SEQ ID NO: 583156 - DNA, 98 bp, Homo sapiens
tcgaagccagctctgcagctcagccaatcagtgacatcattgaattcagcggggtgccaagtcgttttctgtgtgggttgagagacaggctgtgcagc

SEQ ID NO: 583157 - DNA, 74 bp, Homo sapiens
gtggaacatggatgttagcagagaagaggagttcaaagaaggacgcagagccagccacacagccccacaggtcc

SEQ ID NO: 583158 - DNA, 74 bp, Homo sapiens
atactacgataaaaatgccatagctattacaaatataccatgtttgtgtggaagtgccccgtgtttgctatgcc

SEQ ID NO: 583159 - DNA, 102 bp, Homo sapiens
aaaacatctgaccctttgaagattctggccaacgcagacaccatgaaggtgctgggagtgcagcggcctctcctacaggatatgatgtttcagcttctccga

SEQ ID NO: 583160 - DNA, 83 bp, Homo sapiens
gtttgcctactgaagagcttatcagagctctacttgggaaaatgtggacgagtgctcactagcagaaaaaacctgtgtgagga

SEQ ID NO: 583161 - DNA, 100 bp, Homo sapiens
aagctgaattgcaggatatgatcaatgaagtggatgctgatggattcttacagaagcagagattgatgctcaccttgttgctctagcagagagagactaa

SEQ ID NO: 583162 - DNA, 100 bp, Homo sapiens
cctccttgatgaagctcaaaggtgcctgtatcatgatgtgatgctggagaacttttcgcttatggcctcagtaggtgtctgtgacctttgaggatgtggc

SEQ ID NO: 583163 - DNA, 98 bp, Homo sapiens
gtggtcaagttcaccatgagaggttgaaaacaatcctcgaacaggaaatcttggtgcactaattaaggtcttcctttctagaaccaaagaactaaaac

SEQ ID NO: 583164 - DNA, 100 bp, Homo sapiens
cttctatacttaatctttgcagctgttgaaggcgtgatgagagtcattgggtaatctatgccagcaattatgacaatgttagcagaccatgcagctcgtc

SEQ ID NO: 583165 - DNA, 90 bp, Homo sapiens
tgacctgcatgtactgggggattcgcagggaggatgtcgggacaccccggaagctgggaaatggaactcattatacaatgacaaatggag

SEQ ID NO: 583166 - DNA, 75 bp, Homo sapiens
aggatatgacaggggtaacacccttccagatgatttttgaggttgaatgatcctaaaatgtctgaaacggagcgc

SEQ ID NO: 583167 - DNA, 75 bp, Homo sapiens
attctcgacctgctaacagaactggaccttttcggccccttcacagatgtagtcactacaaatcttaaattgcga

SEQ ID NO: 583168 - DNA, 74 bp, Homo sapiens
gatgaaatttatggcattcagaacactgctgatgaagaagcatttgaagataattctgaggagtacataaggag

SEQ ID NO: 583169 - DNA, 74 bp, Homo sapiens
ctacaccctcatgagggtctgcaagcagatgataaaggcagcctggcatcctcgctacaacctcattgttgtgg

SEQ ID NO: 583170 - DNA, 75 bp, Homo sapiens
ctaaaacctttcctaacttatacactttggccactgtaaatggtatccctgaagaaagaaaactgactgaagcaa

SEQ ID NO: 583171 - DNA, 100 bp, Homo sapiens
tcccgaaacccttcaatagatcctcaccagatgtcaaatttgtttgtcaggcatggattccgtgaaggaacaacacctaaacccaagagggcagctgttg

SEQ ID NO: 583172 - DNA, 82 bp, Homo sapiens
gcccgcgaccgtccgccagtcgtcccgagaaagtttcctacactactgaggtttaggggcactgtgaagcaaaagccacgcc

SEQ ID NO: 583173 - DNA, 100 bp, Homo sapiens
gctggctgaggctgcggagagtgtgcggctccaggtgggctcacgcggcaaaagtcaacaactctagcttaattggagtaggctatactcagactctgag

SEQ ID NO: 583174 - DNA, 75 bp, Homo sapiens
gtggctacggtcctcacggccggcgcttacctctgctacaggaaacctgtttggaggttatggatgataaaccca

SEQ ID NO: 583175 - DNA, 98 bp, Homo sapiens
cctaaccttggaggcccgggacttgattttcatgaatgaacggagccgggactgactttgcctacgaaccaacgaaacgtatgctttccttccaaggg

SEQ ID NO: 583176 - DNA, 75 bp, Homo sapiens
gtgcctgtaaaagaatacccagatgtgccacttcggataaaccctttggactcctaactccaatcaggtgtctgc

SEQ ID NO: 583177 - DNA, 100 bp, Homo sapiens
ttcccctttcagagctcacagagacttcaaatggtggttgctgtatatggaactttatctgatttgctttctgtggccagcagtaaactcggcataaaag

SEQ ID NO: 583178 - DNA, 100 bp, Homo sapiens
atgatggagaaaattaagagttatgtgaattatgtgctaagtgaaaaatcatcaacctttctaatgaaggatgaaaactttcggaagagaaagttgcctg

SEQ ID NO: 583179 - DNA, 75 bp, Homo sapiens
taacttccgacgcttcacgacagccagtgacgtctggatgttcggggaaagcaagatagtttcatttggatttgg

SEQ ID NO: 583180 - DNA, 100 bp, Homo sapiens
tattaatcagtatgtcatatggatgggaaattaaagagggtgctttactgttgccctgaaattttcaccatgcgccagcaggacattaacgacactgtca

SEQ ID NO: 583181 - DNA, 97 bp, Homo sapiens
gcggcggctgctgctgctgctgcccgcgtccgaggctcgcgggcggcgggcccgggtctcaccaacggctttgggggtgcgaggagcgagcaggagc

SEQ ID NO: 583182 - DNA, 76 bp, Homo sapiens
gcaaaaatgacccaccaatggaagcagctggcttcactgctcagctcggcttattccaggggtgtgtttcgtcgag

SEQ ID NO: 583183 - DNA, 90 bp, Homo sapiens
cggcgagctgcacctggagatctgcctgaaggacctggaggaggaccacgcctgcatccccatcaagctgcatccagtggaactaaagcc

SEQ ID NO: 583184 - DNA, 90 bp, Homo sapiens
aaaaattaaacttcaacacaatgaggccaaaagtgtgatccaagctgtcccaatgggagctgctggggtgcaggagaggagaactgccag

SEQ ID NO: 583185 - DNA, 100 bp, Homo sapiens
agacctacctgcggcgtcggcagctgctgctccgagagtgtgaacatggctacgcctcttcattcccgtccatgccgagcccccgactgcagcattcaaa

SEQ ID NO: 583186 - DNA, 100 bp, Homo sapiens
cagaaatcatcagaaaaatgactgaagaatttgatgagttctcaaaagtctatggccctgtgttcactgtgtattttggcctgaagcccattgtggtgtt

SEQ ID NO: 583187 - DNA, 46 bp, Homo sapiens
ttgctatgttggagacaatacttagagacggggttccactgtgtta

SEQ ID NO: 583188 - DNA, 96 bp, Homo sapiens
attggaaattaattgctatcaatgcgaatgatcctgaagcctcaaagtttcatggtacctttgacaggagcgtgaccctgctggaggtgtgcggga

SEQ ID NO: 583189 - DNA, 95 bp, Homo sapiens
gttttccgtggaagttcatgacccacgcaggtacggttcctggagcagcagaacaagatgctggagaccaagtggagcctcctgcagcagcagaa

SEQ ID NO: 583190 - DNA, 83 bp, Homo sapiens
gcattgtcccagatatagccgttggtacaaaggtatgaagctaaaatgcagcggctaagaacgcggctctggagcttgacagg

SEQ ID NO: 583191 - DNA, 100 bp, Homo sapiens
gacgcatggaagaacttcacaatcaagaaatgcagaaacgtaaagaaatgcaattgagaaaatccatcctctcagtattggaaggaagtggcagaaaaac

SEQ ID NO: 583192 - DNA, 100 bp, Homo sapiens
gcgctcagcggctatgaccaggtgctccacgaagacgaaaccacgggacccagacatggagctgcgggaagaagcctggtctccggggccgctggattct

SEQ ID NO: 583193 - DNA, 95 bp, Homo sapiens
gggcctggcgttgatccccgataagcctgccactcagtgtatttcagacggcaagttagagatgtttatgattacttccgagctgtcctgcagcg

SEQ ID NO: 583194 - DNA, 73 bp, Homo sapiens
gtgaacaggcccagctcgggaaagacatccacgacagcgatggcagttccagcagcagccaccagagcctcaa

SEQ ID NO: 583195 - DNA, 74 bp, Homo sapiens
tgcttagatacatgtataacaaggctaactatatgtcagaaagcatcagcttttctcgatggacccattcatct

SEQ ID NO: 583196 - DNA, 82 bp, Homo sapiens
ggaggacaggccctcgtccgcaggtgggcaccagggagcatcgagtacagctgtccggcctccaacgagtgtgagatcacca

SEQ ID NO: 583197 - DNA, 90 bp, Homo sapiens
agaggaacactgccggggcccaaccacaagacgactcaataggaggaaggaactgcctcctgagcgtggagcctgccattagcaccaagc

SEQ ID NO: 583198 - DNA, 75 bp, Homo sapiens
gccggccgggattcgcggcccggagctcgggaccggttgattcttcaccacactgaaaccattaggaaaaatcct

SEQ ID NO: 583199 - DNA, 75 bp, Homo sapiens
gaacatcagggccctccagactcaggcgccccaacactccagagaaagatggaggagcgccggctgcggctccag

SEQ ID NO: 583200 - DNA, 51 bp, Homo sapiens
gcggcggggatcgtctccggcaatggagtcttgctgtgtcacccaggctgg

SEQ ID NO: 583201 - DNA, 98 bp, Homo sapiens
aaattctggaacacctatatggagaagttaaggctgcaaggccaaatcacagagggaagcaacatgattaaaacaattgcttttggccgctatgagct

SEQ ID NO: 583202 - DNA, 89 bp, Homo sapiens
atcggacaggatttctccgcctcagcccaacggggagtgtactaatggtcacttgatgtgcgctggctgttttatccacctactagcag

SEQ ID NO: 583203 - DNA, 74 bp, Homo sapiens
gccctgaaacaggagggagcgcgatgtggatcaatccatgtgctcaggtgatctttgactcagacccagccccc

SEQ ID NO: 583204 - DNA, 100 bp, Homo sapiens
tgatcaaacaaggatatcgatgtaaagggaatatccctgcgctccagacgccaaaataagactgaggcagaacagcaaataactgaggtctttgtattag

SEQ ID NO: 583205 - DNA, 96 bp, Homo sapiens
gaattcctcaagacaccattccaggttttacacatccataagtagacctttttggagcctcaccagccaattcaatggcgtcctcttctactgtgc

SEQ ID NO: 583206 - DNA, 100 bp, Homo sapiens
gactggaacatgctgaaattcgtgcttttgaagatgatgatatcacgcacgttgaaggaagtgtagatcctattcgagatatagaaataatacatgaaga

SEQ ID NO: 583207 - DNA, 75 bp, Homo sapiens
caatggaagcagctggcttcactgctcaggtgcgtgccctggaggaggccaacactgagctggaggtgaagatcc

SEQ ID NO: 583208 - DNA, 102 bp, Homo sapiens
cagagctgtgcctcccagcaccacagtccttctgcagtccctcgtccagccacccccagggcttcgtgggacacatatgcaacatgcctatgatttttacaa

SEQ ID NO: 583209 - DNA, 75 bp, Homo sapiens
ccggagcctgaggacacttctctgtcgtcacaggagacttgcagctcctctgctgaaacgtttaagcctctccac

SEQ ID NO: 583210 - DNA, 90 bp, Homo sapiens
cgtccaggctgaccacgagcttttcctccaggcctttgagaacttaattcagtgcacaaatgagatgaatgtgaacatcccacagttggc

SEQ ID NO: 583211 - DNA, 73 bp, Homo sapiens
gcgccacctggagagaggccgcgtcctgggcagaggaacagtggaggccatgtgtcttttggcagtcagtcca

SEQ ID NO: 583212 - DNA, 83 bp, Homo sapiens
gcgtcgggagagcgcgcctagccggctcgcgagtgccggggacacgggcggcaagccgtccacgcggggcggtgaccctgcag

SEQ ID NO: 583213 - DNA, 75 bp, Homo sapiens
acaaagatctctcggaccgcagcaatgacattggtggagccgccaccaaaatgcagattttcgtgaaaaccctta

SEQ ID NO: 583214 - DNA, 96 bp, Homo sapiens
gctgagccggcccagctgctcggaggctctggcatggagctgttggacaaatatcttattcccaatgctacacaaccagaaagtaaggtgttctac

SEQ ID NO: 583215 - DNA, 97 bp, Homo sapiens
agcaaagagagcttgaaaaattcagctacagaagctgcaaaaccagctaaacctgatgagaaaggagagatgcagctttatcttcaagccaggatga

SEQ ID NO: 583216 - DNA, 98 bp, Homo sapiens
agacgttatagattttactggtcatgctcttgcactttacagaactgatgagaatttatgctttctcaagatgttgaacatgagcgtctctttgacct

SEQ ID NO: 583217 - DNA, 83 bp, Homo sapiens
gctgcctaggccgggccctgccagggagcaagtctgcatcgcagaggccagggtttggtgcacctcgatttggaggaagtagg

SEQ ID NO: 583218 - DNA, 82 bp, Homo sapiens
ctaacctcctgtggataagggctcagaatagcaccattgctgatcctgggtttgagcagtttaaaatgtcagaaagattgca

SEQ ID NO: 583219 - DNA, 75 bp, Homo sapiens
ctgaagagggaagacacgcggaaacaggatgagatgaacacttttaacaagagaacaggactctatataaatcgc

SEQ ID NO: 583220 - DNA, 109 bp, Homo sapiens
gtgctacacaacctgagggagcggtacttctcagggctaatatatgagaactacgatgacccgcacaaaacccctgcctccccagttgtccacatcaggggcctgattg

SEQ ID NO: 583221 - DNA, 100 bp, Homo sapiens
atctgtctatgaaggaggggtgttctttcttgacattaccttttcaccagactatccgtttaaaccccctaagacactgccctaaccatcatggaggtgg

SEQ ID NO: 583222 - DNA, 80 bp, Homo sapiens
atccagctgcctcaaatcgtcgtagtgggaacgcagccatcgacgagtacaagccccaggatgctaccaccaacccgtcc

SEQ ID NO: 583223 - DNA, 118 bp, Homo sapiens
gctcgctgggagagaggtacctctccttttccctctccctttccctaaggagagaacattgaaagtattctctaagctatttgaagagagtgactaaatgcacctgggtcaggctgtc

SEQ ID NO: 583224 - DNA, 82 bp, Homo sapiens
ctcctgccctctcgctttccctctcgcgtctctggctgcaggaagctcttcgtgggcggtcttgactggagcacgacccaag

SEQ ID NO: 583225 - DNA, 100 bp, Homo sapiens
cggagcgcggagcccggctcccgcaccatggaggaggacgacagctacgcgggctgacgcacgaggcacacaggaaggaggtggagcaggtgtatctgcg

SEQ ID NO: 583226 - DNA, 83 bp, Homo sapiens
gaaccctggtcaccgtctcctcagcccagctcaacattggcaatgtgctccctgtgggcaccatgcctgagggtacaatcgtg

SEQ ID NO: 583227 - DNA, 90 bp, Homo sapiens
ccagttaactatggtagcccacccagcattgttggttaccacagagaagcgcttcctcaaagacagtttgtacaatgaaggaatcctaat

SEQ ID NO: 583228 - DNA, 82 bp, Homo sapiens
ccggcggctgctgctgctgctgacgctgctgctgcccggcctcggggatcttagaaatgaagttgaaaaattacgcaatgaa

SEQ ID NO: 583229 - DNA, 101 bp, Homo sapiens
ccggggccgccatggagcccgactcggtgattgaggacaagaccatcgagctcatgagatgcgaagtgtgggaagatccagtgtcagagctctgaggcccg

SEQ ID NO: 583230 - DNA, 50 bp, Homo sapiens
aaaatgtcaacaaattgatggggcatttgcacgccaaaggcaaagaagaa

SEQ ID NO: 583231 - DNA, 74 bp, Homo sapiens
ctgactatgacctatctgacaagagcatcaaccctctggaatattccctgggcttttgaggcaataaagcaagc

SEQ ID NO: 583232 - DNA, 82 bp, Homo sapiens
acctcgtgaagctgctgctgtccaagggctctgacatcaacatccgagacaacgcactgggaatctgaagaggtgtctgtgg

SEQ ID NO: 583233 - DNA, 96 bp, Homo sapiens
gcccgcgccccccgcccgtgccctcccgctcggccccgccagcagcactgtggaggccgtcctcgcaaactgtcatcaggagcttaaataggacag

SEQ ID NO: 583234 - DNA, 100 bp, Homo sapiens
agcgccagcggccgagcgggcggcttcctggcctgggcgctccggtggcggcggagggggatatgagactttctactcggaatatcctgagtgttgcgtg

SEQ ID NO: 583235 - DNA, 100 bp, Homo sapiens
ctgcacccaagaggtggaagaggacgggctttaggctggaagcgccttagaggagccatttttccaggaatttatctcactaatatcttgaaaacagaag

SEQ ID NO: 583236 - DNA, 100 bp, Homo sapiens
ctgcaacaaccacaaacaaaaagcctggccagggacactttgtgagaaatttaggtgatgttggagagaaagagactgaaacagaagttttgttacttga

SEQ ID NO: 583237 - DNA, 101 bp, Homo sapiens
ccggcagaagggaggcacttgaggttctgtggatggagttataaaggaagtgaatgtgagcccatgccccacccaaccctgccagctgagcaaaggacagt

SEQ ID NO: 583238 - DNA, 100 bp, Homo sapiens
tccattggtaaattgatcaggatttttggcctaccctccaaagaaaaggaactgcaagcacatgttgaccagataactgaaatggcagcagtaatgagga

SEQ ID NO: 583239 - DNA, 74 bp, Homo sapiens
agaggtcccaatcccccactctttccgccctaatggaggtctccagtttcgatctctggaaacatggctacaga

SEQ ID NO: 583240 - DNA, 100 bp, Homo sapiens
gggagcgggcgaggcggcggcggcagcagcgatgacaaattcctgtcccttgtgccgctatgagctgcccactgatgacgacacttatgaggagcacaga

SEQ ID NO: 583241 - DNA, 111 bp, Homo sapiens
gagcggcggcagctgcgaggctcggagaaacaggcgccgcgggctccgcgcccggccggacccgggcccgagctccaccgggggacggctacgtgcaggcggacgcccggg

SEQ ID NO: 583242 - DNA, 98 bp, Homo sapiens
gaagaccagaccttcgctaccagctcggtttcagcgtccagaatggaatttcaaagctgcttgatcatgacaatgtcaagtatttgaagaaaattctt

SEQ ID NO: 583243 - DNA, 86 bp, Homo sapiens
ttaaggattccaagtaactcttatttgcacacgacggttctgccctttatattaatcgagatgaggacatcgcaccatcagtatcc

SEQ ID NO: 583244 - DNA, 100 bp, Homo sapiens
aggctcctgggacccaatggcctctggatgaaacgtcaggaatttactacacagggggagctgatcaccttctattactattggaagaagacccccgaag

SEQ ID NO: 583245 - DNA, 75 bp, Homo sapiens
gacccctcggggctgctcatctctgtgatcagcaaggatggaacattactgtggacctggtcattggccctaaag

SEQ ID NO: 583246 - DNA, 100 bp, Homo sapiens
gccgccacagctttaggaaacacctctacctcctgcgaggcctcccgggctccgggaaaactacactggccagccatggccatgcagaaaatctttgccc

SEQ ID NO: 583247 - DNA, 48 bp, Homo sapiens
caatatggagattggaatgaagatgagtcagtctgacagtggggtgga

SEQ ID NO: 583248 - DNA, 88 bp, Homo sapiens
agaaaaaaaattcaatggagatagcaaagtgtggcaaaggagcagagaactttgacaagttcttcacacgaggacagcccgtcttaac

SEQ ID NO: 583249 - DNA, 97 bp, Homo sapiens
gcgcggcagcggagggacggcagtctcgcgcgcaacccaaggagatctgtgcgctggttgggttctgtgatgaggtgaaagagatgcccatgcagac

SEQ ID NO: 583250 - DNA, 100 bp, Homo sapiens
acctaccctatgtctgcaagaagggcacagcgcgttccttcacctcgggcagaataactttgcagaagcccacaggttcttcacagagatcttaaggatg

SEQ ID NO: 583251 - DNA, 100 bp, Homo sapiens
tgttccactgaaatcacaatggaaagtcttgacttgactgatcgggaaaaagagctaatccgccaagcagctctgcagcagaccaaggagatggacctca

SEQ ID NO: 583252 - DNA, 83 bp, Homo sapiens
gccagctgccgaggcgttcggtcctgctgttgcggccgctgccccagggctgcggggacggttttaaaatcaaagatgggaaa

SEQ ID NO: 583253 - DNA, 100 bp, Homo sapiens
tcagttttggtcatcggaagtggtgccttcagcacaggaaaacctgattggcgccctcttggcgatcttcgggcacctcgtggtcagcattgcacttaac

SEQ ID NO: 583254 - DNA, 90 bp, Homo sapiens
gagatttacctgtgagatgtttcatcccaacacatacatggcacctgaagtcatcactcgtgccaaaggagagggccatgggcgtgcggc

SEQ ID NO: 583255 - DNA, 127 bp, Homo sapiens
agcgcccgtcggacggggaggaggagcaggagctggaggaggagccgccgccgccaggctagcttgtcactttctgcaaaggtttccctcagggagcctcctgctgccaggcaccatgacagtgagg

SEQ ID NO: 583256 - DNA, 100 bp, Homo sapiens
tgcagcccaacttccagcaggacaagcagctggaccccgagaacacaggcttcatcggtgcggacaccttcactggcctggtgcacagccatgagctgcc

SEQ ID NO: 583257 - DNA, 100 bp, Homo sapiens
tcgaagaactcgagcgacagagacaagctgagcttgccgcacaaaaagctagagagagccattggaacatccgttaatcagcagcccttcctttttttcc

SEQ ID NO: 583258 - DNA, 75 bp, Homo sapiens
tacctgacgggcctgcgagggttgaagattgtgaagcaatagcctaaggcatgtctaagaaaaccaaccggggct

SEQ ID NO: 583259 - DNA, 82 bp, Homo sapiens
cagcttatgccagacacacaggacaagtagggaccaaactgtatatgagcccagagcaggacccctttgcactatgcagctg

SEQ ID NO: 583260 - DNA, 101 bp, Homo sapiens
gccctcacccctcccgccagtctccagccatggggcggcagcagcagctggatgcagagcgcctggacagctatgtgaacgctgaccacgacctgtactgc

SEQ ID NO: 583261 - DNA, 100 bp, Homo sapiens
gggattacaaagcctgaagaccccggagcccctttagccatgtggatacctacggagcacgagaaatacggcgtggtcaccaggtgtcaagatgctgcaa

SEQ ID NO: 583262 - DNA, 90 bp, Homo sapiens
gcagaactgaataaacattggcggcgattgttagaggggctttcttactacaaacctcccagtcttatgatgtaatcagcgcgatttcac

SEQ ID NO: 583263 - DNA, 106 bp, Homo sapiens
gacttgggctcagagcaaggatgcgtgaaattgtccatattcagattggccagtgtggcaaccagatcggagccaagctactcccgagcccggagaggacccacgc

SEQ ID NO: 583264 - DNA, 83 bp, Homo sapiens
gcccccccttccccacgcaaccccagatccatttacactttacatcagaagaagaagttgtagaaggagagaaggaagtcgag

SEQ ID NO: 583265 - DNA, 80 bp, Homo sapiens
cgacgggttggggatggcgtgcagcgcaaccacgagacggccttccaagatgccccttggtgtggccactgcaaggctct

SEQ ID NO: 583266 - DNA, 75 bp, Homo sapiens
agagctgaggactgcctgtttgcaggggccagtgtcattcaaagatgtggctgtggatttcacccaggaggagtg

SEQ ID NO: 583267 - DNA, 50 bp, Homo sapiens
atccctgggggctatttcagctcagcctactcatgaaggttacttctctt

SEQ ID NO: 583268 - DNA, 75 bp, Homo sapiens
tgccttcatccactggaagttactggtgtaatctagctcctgtggtggagtttgctgcagatgtgggaactaaat

SEQ ID NO: 583269 - DNA, 100 bp, Homo sapiens
tccgcggagatctctctcatctcgctcggctgcgggaaatcgggctgaagcgactgagtccgcgatggagggtgtccgcaatgttgccagtgtctgtctg

SEQ ID NO: 583270 - DNA, 100 bp, Homo sapiens
gcacggaaacccaggccgcagcctcacagatggcgcaggtgatcgaggagttctacaaccagacatgggtccaccgctatggggagagcatcctgcccac

SEQ ID NO: 583271 - DNA, 75 bp, Homo sapiens
atgtctgcgagccaggattcccgccacacccactcgcccgggtctatggccacggtcggagagtggtcctgtgtg

SEQ ID NO: 583272 - DNA, 100 bp, Homo sapiens
gctcctttcttcacccagaacctgttgtggggagtaagcaaagagattgttctgaagaccgtgctctaagggcatttgaaagactgccaggtagtgcgag

SEQ ID NO: 583273 - DNA, 100 bp, Homo sapiens
ggaaatgactcggactgaacaagagggtcagtatgggaatcctttaaataaatatatcagacattatgaaggattatcttacaatgtggattcattacac

SEQ ID NO: 583274 - DNA, 100 bp, Homo sapiens
ctgaggtgaagcaaacagaaaattgtggaggttttgttggaagacaactgttagttttgtggcttactgctgctccacccagtgtctgcagacttttgac

SEQ ID NO: 583275 - DNA, 104 bp, Homo sapiens
ccaccccggcccgaccccgacccggcccggtcaggccccatactcagccaggtgctgcccacctacgacagcctggatgagccgtcagtgaaaaccatgagctc

SEQ ID NO: 583276 - DNA, 100 bp, Homo sapiens
gagctgtcagcctctccaaagcctgcgcgagaggagccgggacacgcctagcgcgggctccaggtggcacaagatctctgtaaagtagcaggcatagcaa

SEQ ID NO: 583277 - DNA, 75 bp, Homo sapiens
acacccctgaagccgagaaatgtcttcccatgcacaagatgattaatacagatcttagcagaatcttgaaaagcc

SEQ ID NO: 583278 - DNA, 101 bp, Homo sapiens
ctttctgctgctgaagtaatgcaatggtctcaatctctggaaaaacttcttgccaaccaaattttccaagagataacttcaccaagatgtccagtgatagg

SEQ ID NO: 583279 - DNA, 139 bp, Homo sapiens
ccgttatctgcaggtattgggagatgcacagctaagatgccaggaccacctggaagcctagaaatgaattctgcttggtcagaatcgtgatggcattgtgttcagcactgatgactattttcaccatcaagatgggtac

SEQ ID NO: 583280 - DNA, 100 bp, Homo sapiens
aagcgcctgagaaagaagtttgcccaaaagatggttccagcaacagatagaaatgctttaagttcactctggggaaagctggcctctgaaatcttaatgc

SEQ ID NO: 583281 - DNA, 75 bp, Homo sapiens
cgccggcagaggatccagtgttcaccatcctggccccggaagcctgatcctgcctgaagatggtgccactggtgg

SEQ ID NO: 583282 - DNA, 100 bp, Homo sapiens
ttattataaatgaagatctggacagtggcacacagataccgtttattaaaagagctgtggctgctgctttgtaccgcctcagtggagactggaatccctt

SEQ ID NO: 583283 - DNA, 83 bp, Homo sapiens
ttcggcagtccacccaccgccgccgcctcccagactttgtgcccattgacctagacgagtggtgggcgcagcagttcctggcg

SEQ ID NO: 583284 - DNA, 75 bp, Homo sapiens
tccatggccccagatgacacttcaggcaaggggatcaggcgagtgaagccgaagcgcaccacatccttcttcagc

SEQ ID NO: 583285 - DNA, 75 bp, Homo sapiens
catgttcccaccagccagggggaaggaaccttccctgtatactgtcaaagccatcctgattctggacaatgatgg

SEQ ID NO: 583286 - DNA, 100 bp, Homo sapiens
atggcggacagtgcggaactaaagcaacccagtgattccatggaaagcagaaagaaggacataaagaaacggatacttggtgacatctttgactcactgg

SEQ ID NO: 583287 - DNA, 100 bp, Homo sapiens
ttccacccggaaagccccccaggctgagtgcggcatgatctccatcaccgaatggcagaaaatgagccgtcagactgctacagcattacctaccggtacc

SEQ ID NO: 583288 - DNA, 75 bp, Homo sapiens
gtgaatttaaaggagcagccctggtgtcacctatcagtaaaagctcccattgctatcacatgttttaccagaggc

SEQ ID NO: 583289 - DNA, 83 bp, Homo sapiens
ggagactccggcgctcgccatggccgacgaaaagcccaagacagtgatgtgtgttctgaaattgtgaaccatgagtctagtac

SEQ ID NO: 583290 - DNA, 75 bp, Homo sapiens
ggctctcgtcagcctcccgccggccgtctccttaacaccgaacaccacgcaaacatgcagatctttgtgaagacc

SEQ ID NO: 583291 - DNA, 75 bp, Homo sapiens
taaaagagaatgtaacatcatgcttccgtccttcagtgaatctacagacctattttctcaggagctcagcctggc

SEQ ID NO: 583292 - DNA, 100 bp, Homo sapiens
agcagcagcatggccgcgatctatgggggtgtagagggattctctttgtggccagatgggtttgtatggacaggcttgtccatctgtaacttcattaagg

SEQ ID NO: 583293 - DNA, 80 bp, Homo sapiens
cggggtgcactttgtggtttgccaccctgaccaccacacccaccaggtggaagggcatcaagcctactgtcacgattctc

SEQ ID NO: 583294 - DNA, 101 bp, Homo sapiens
ctgcactgtcgggtgcgctacagccagctcctggggctgcacgagcagttccagggtcacccccgagaggacaacaggcatctggaagtgctctctcgcca

SEQ ID NO: 583295 - DNA, 131 bp, Homo sapiens
cgtgggctggaggaacagaagcggaacagccacagcagcctcccaaggagtctgcaagttgacatccacgacagcgatggcagttccagcagcagccaccagagcctcaagagcacagccaaatgggcggc

SEQ ID NO: 583296 - DNA, 82 bp, Homo sapiens
tctgtatctggatagtcgtaaacttcctatgataaatgttgtaccatctttgggtaggcagacttccctgacgacatcagtg

SEQ ID NO: 583297 - DNA, 97 bp, Homo sapiens
gagtacctgcgctatgaagacacgcttcttctggaagaccagccaacagtgacaaatggcctacagctgtgagagcaaatggacatctcctcctgaa

SEQ ID NO: 583298 - DNA, 120 bp, Homo sapiens
agaggatgagaagtcgatccagagccaagagcctaagaccaccagtctccaaaaggagggctacaagaagcaggcagcactgaagctgggggacatcagtcaccgtctgctggagcagca

SEQ ID NO: 583299 - DNA, 100 bp, Homo sapiens
cagaagaataagcttcgacacctctcagttgtcaccctggctgctaaagtaaagctgaggtgaaacgtgtcggagatacactcttgggaatggctacgca

SEQ ID NO: 583300 - DNA, 75 bp, Homo sapiens
ggatcgctgtgatcgtcacttggaaatgactataccctggtgcttaaggagagcggaacttgtgttcaagtgtgt

SEQ ID NO: 583301 - DNA, 75 bp, Homo sapiens
cgctctagcggccgggactctgaactatggcgggcgccctgcgtccggcagaggaggcgagcatcccgctcaggt

SEQ ID NO: 583302 - DNA, 83 bp, Homo sapiens
cttatactcctcccagtgacgggtctggagtgcgtgggggaccggctgttggcgggtatctgggctcatggcgactactgcag

SEQ ID NO: 583303 - DNA, 88 bp, Homo sapiens
tgaccgagagcgcgaatatcgtcatcgttagaagaacttacgatttccaacggccccaaaaaccactcggtcaatgaagaagagcagg

SEQ ID NO: 583304 - DNA, 100 bp, Homo sapiens
attcccattgtactcagggagactgttgcctacttacaggcccacgataagtatgctgtgcgcttcatccctcgggagaatggcgtttacctgattgacg

SEQ ID NO: 583305 - DNA, 95 bp, Homo sapiens
agccgcaccatgccgctcctaagcctgcacagccgcggcggcagcagcagtgagagctacgagttccagggagctctgtcctggtgaccgtgccc

SEQ ID NO: 583306 - DNA, 101 bp, Homo sapiens
gcttgaacgcttaaaacaacagaatgaagacttgaggcgaatggccgaatctctccgaacctaaaggcagacccagaagagctttttacaaaactagagaa

SEQ ID NO: 583307 - DNA, 83 bp, Homo sapiens
gaatgacagcactgtagaacagctttatgaaacagcttgcttcctacaggaaaatgttctgctgctgccctggatgttcttgc

SEQ ID NO: 583308 - DNA, 82 bp, Homo sapiens
cgggcaccatgagcgacgtggctattgtgaaggagggttggctgcacaaacgagcgaggaagaaaggacccggtttcaggag

SEQ ID NO: 583309 - DNA, 82 bp, Homo sapiens
gcagttctccaatgatatctacagcacctatcacttgttccctccaagacaactgaatgagatcccatttcattctgaaggc

SEQ ID NO: 583310 - DNA, 90 bp, Homo sapiens
atccctcaactagcacctccagctaggaaataatgaagatgtttcattttcaagaccagcagatcttgaccttattcagtcaactccctt

SEQ ID NO: 583311 - DNA, 100 bp, Homo sapiens
tgcccgcggctgcagtcggggcggcagctgaggcggaggctgacgaggaggcggatcccccggcgtcagaaagtttcctacactactgaggtttaggggc

SEQ ID NO: 583312 - DNA, 88 bp, Homo sapiens
gaaccagaacccaggcccacggaggaagagccgggcagtccctggagcgggccaggtggagccgccaccaaaatgcagattttcgtga

SEQ ID NO: 583313 - DNA, 90 bp, Homo sapiens
cctgagcccatggcagctccagcctctgcctcccagaaactcaggtgctatgacaagcgtctgtggcctcgaatggacctgagccggcgg

SEQ ID NO: 583314 - DNA, 136 bp, Homo sapiens
gagctccaggagttcgtctcttacgtctgcggaagtgcagctgcctcagttcttagcgcaggttatgatgtgattgctcaagcccaatctgggactgggaaaacggccacatttgccatatcgattctgcagcaga

SEQ ID NO: 583315 - DNA, 51 bp, Homo sapiens
gagctgtccctgctggaggagcgcttccggaaacagggtttcaccatgttg

SEQ ID NO: 583316 - DNA, 75 bp, Homo sapiens
atcttggactttgtggaacagaaatgtgaaggtgtacgaagccatcgacagcagagatggagcatcttgtgcaga

SEQ ID NO: 583317 - DNA, 80 bp, Homo sapiens
atcagctgaggcctgagacacaggaccaggtttggtgcacctcgatttggaggaagtagggcagggcccttatctggaaa

SEQ ID NO: 583318 - DNA, 50 bp, Homo sapiens
cttcgacttggagtctttgtccaggacgattaaagagtctattgttgggg

SEQ ID NO: 583319 - DNA, 99 bp, Homo sapiens
ctgttttgcctgaatacatgatttaaacaagagatttccacagaaggagcctgattccccacgtgtcacattggtccgtgacgtttccccactaagggt

SEQ ID NO: 583320 - DNA, 102 bp, Homo sapiens
agcgcgtttggctgtgacctgacggagtatctggaaagctcgggacaggatggtcctgggaactccaacaagggagcaaatcagagaaatgaacccaaacta

SEQ ID NO: 583321 - DNA, 82 bp, Homo sapiens
ctcaagcaggacaatcgcactttataccacctgcgattactgggctccatgggccttaccccttcggccagtcttaaacggg

SEQ ID NO: 583322 - DNA, 83 bp, Homo sapiens
ggagattatagctctgtatgagaaggacaacacctacttaggagccaaaaacctgtatatcatctccgtgaaggggatcaagg

SEQ ID NO: 583323 - DNA, 98 bp, Homo sapiens
agcgaacgaccaagagggtgttcgactgctagagccgagcgaagcgtaatctgtaagtcagatgctccaacaggggatgttcttcttgatgaagctct

SEQ ID NO: 583324 - DNA, 90 bp, Homo sapiens
tgcttcctgagcaccgccagccaccggcaccaagaccggccacatcccagcactgcccacctctggtgctggagaatctggtaaaagcac

SEQ ID NO: 583325 - DNA, 132 bp, Homo sapiens
aagaaatcaaaaatctggtgaaattgccggcaagagggagttaaggacattccaggcagaggcaagggaatatccccggctcggctgtgctggtgtttgacatccatgtgatcgacttccacaacccttcgg

SEQ ID NO: 583326 - DNA, 83 bp, Homo sapiens
aacaaaaaaaggagatgcctggcagccccgctctctgcagatgaatttcatcctttcatcgaagcacttctgccccacgtccg

SEQ ID NO: 583327 - DNA, 82 bp, Homo sapiens
gagatttctgcagtgaagattgctgtaaaaaatttcaggattggtactacaagaatgtttcatccatttgtggaccaaaaga

SEQ ID NO: 583328 - DNA, 100 bp, Homo sapiens
tgctctataacaagcaaaagatgaacactcgcccaatgaaacggtggacattgaagtggacctaattcggttttccttttaaaagccccgcaaacaaaag

SEQ ID NO: 583329 - DNA, 97 bp, Homo sapiens
agctgccactgcccccgggctgggagatgaccttcacggccactggccagaggtacttcctcaacaaaatgatgcttcaacacccaggccaggtctc

SEQ ID NO: 583330 - DNA, 106 bp, Homo sapiens
aagggtgaaatgaaccgtggcaatttcttagagatcaagaataaatttctagctcgaaggtttaaggcaacagagatgcttatttttggaaagaagttaacagcgg

SEQ ID NO: 583331 - DNA, 96 bp, Homo sapiens
gaggtgaaactgggcaagaggccccagcccgtgaaaagtgaggaagaggagcaggacttggatggtgagaaggggccatcatcggaagggcctgag

SEQ ID NO: 583332 - DNA, 80 bp, Homo sapiens
tgctcttcggcctagtgcgccagggcctcaagtgcgatggtagtgggcagcagtcagtgacaggtgtaacctctgtggat

SEQ ID NO: 583333 - DNA, 51 bp, Homo sapiens
aaatccctcaacttgctaaaaatcaagaaactgcaggccagaagcccctct

SEQ ID NO: 583334 - DNA, 83 bp, Homo sapiens
ggacagcatccaggcctcattggacagcattcgagacaaatttacatgtattggagaccagaccagaagcccttctgaattaa

SEQ ID NO: 583335 - DNA, 75 bp, Homo sapiens
tttgtttggatcagatcttcagtatacaaatcgggtggtcctgcagttgaaataactggaaatgatgaataccag

SEQ ID NO: 583336 - DNA, 87 bp, Homo sapiens
cagagacgtctttgacaatagatggtgtggtgtttgtgattgatcctggatttgcgaaacagaagagagcagcacttgaggcatgtc

SEQ ID NO: 583337 - DNA, 74 bp, Homo sapiens
cctgactaaagcttgaaatgctacatttccaagggtgataaaagaaaatgtggctgaagttacccgaagttcag

SEQ ID NO: 583338 - DNA, 75 bp, Homo sapiens
tcgcgcacggccccctggacctgcggccgcccgtgtgtgacgtcagattgctcatttagaaagtggatgtgtggg

SEQ ID NO: 583339 - DNA, 90 bp, Homo sapiens
gaatggactttaattgctatggtgttgctgtcattatttgaaaaagggcgcatctatacgttcattggagaagtcgtcgtttctgtgaac

SEQ ID NO: 583340 - DNA, 83 bp, Homo sapiens
agcgggtcttgggtcctccgagagcagcagcgaagtttgcctgcaatggtactgtaattgagcatccggaatatggagaagta

SEQ ID NO: 583341 - DNA, 98 bp, Homo sapiens
gggcgtggcagccggacctttcccttgcggacgcgaaggcgtggaaagaatacccacctcatgtccaaaaagttgaaattaatcctgtaaggttaagt

SEQ ID NO: 583342 - DNA, 98 bp, Homo sapiens
aaatcaccagcatcaagaaggaggatgtcatctccactctgcagtacctcaatctcatcaactactacaagggacctgagcaacaacaagatcagttc

SEQ ID NO: 583343 - DNA, 89 bp, Homo sapiens
cgtggacctgaagccgcctttcgggggctccgcgcccagcgagcgcttggagctgcacgtggacgccacaccggtgagccccgccatgt

SEQ ID NO: 583344 - DNA, 83 bp, Homo sapiens
gctcgaaaccgaaagtcccgtccggaccctccaagtggagaccctggaattgaatgatctggcacgggaccctccagcacagt

SEQ ID NO: 583345 - DNA, 120 bp, Homo sapiens
ctaacagcagctgggaaagaagttatgcttgttggaattggtgacaaaatcagaggcatactttataggaaataatgaagatgtttcattttcaagaccagcagatcttgaccttattca

SEQ ID NO: 583346 - DNA, 88 bp, Homo sapiens
caaagtagaaaaacactatctcttctatgacggagaatccgtttcaggaaagcccagtggcacccgactcgctctcctctccctcacc

SEQ ID NO: 583347 - DNA, 82 bp, Homo sapiens
gtggaggggatggatttccataagttttactttgagaatccaggttcacaactacatgatgccacccctcgaccgaagctgg

SEQ ID NO: 583348 - DNA, 90 bp, Homo sapiens
cgcgagcaaggagcgcggaatcggggagcgtccggagctagctggatcctctaggcaggcagcaacaactcatctccagtggattttgta

SEQ ID NO: 583349 - DNA, 74 bp, Homo sapiens
ggctgcggagaaggcgagcgaaggtacatgtcccagagcaagcacacggaggcccgggagctcatgtactcggg

SEQ ID NO: 583350 - DNA, 75 bp, Homo sapiens
catgtttgctacaaaggtggtggtgagtggtgtcattgagcaaacacgaagtcgggctcatccaaggatgagatt

SEQ ID NO: 583351 - DNA, 90 bp, Homo sapiens
cgcccagttctaccacagccctgcggacaacaagcggtctggccttaccaaggcagtgaaggagagtacaattacattgcagcaggcaga

SEQ ID NO: 583352 - DNA, 100 bp, Homo sapiens
ctcaggggctgctctgaggaccgatgactcggaaagcgctcagaagaacgcttcgcccgttggtgctatagtgtgaacatggctacgcctcttcattccc

SEQ ID NO: 583353 - DNA, 75 bp, Homo sapiens
catcattattttgtggcaacacagtttgaacgccatgaccctgtggatgggagaattactgagaggcagtttggt

SEQ ID NO: 583354 - DNA, 100 bp, Homo sapiens
tgctccattgaccctgcaggatgcccagggattgaaggatgtcctcctgacagcatttgcctaccgccaaggcattgccacctggggtatcgttgtcatg

SEQ ID NO: 583355 - DNA, 75 bp, Homo sapiens
caggattgagatttgtgtctctgactggagtgtttggctgccccacaactgtggccaacgtggagacagtggcag

SEQ ID NO: 583356 - DNA, 100 bp, Homo sapiens
gtgtgatacaggaaggccgaggagagctcccggactttcaagatgggaccaagggccatgaagcccccaggaggagaatcgagcaatctttttggaagtc

SEQ ID NO: 583357 - DNA, 101 bp, Homo sapiens
gcgtctgcggctctccgccgtccccagccctgcctctccctgggctctggctctccccttgtagtatctttaattggtgcacttttacgtgattttcccaa

SEQ ID NO: 583358 - DNA, 50 bp, Homo sapiens
ccgggctgccccgcaggatcatcaaggctgcctgctgtttcccggggaga

SEQ ID NO: 583359 - DNA, 50 bp, Homo sapiens
gctgagatccatctgcaccacggtgctgccaaaacctattgatgtacaag

SEQ ID NO: 583360 - DNA, 101 bp, Homo sapiens
ggatttccaaagctagtgccatacagcggaaaggcagatatgagcaagacagtgggcatgacagtggaagtgaggatgcctgttttgattcttcacaacca

SEQ ID NO: 583361 - DNA, 50 bp, Homo sapiens
tcattcaggaattgaagtctatggcagagatgctgttcatgcaatattag

SEQ ID NO: 583362 - DNA, 78 bp, Homo sapiens
acgggttgcttcccccgctgcgaggcgtccgacctccgatcatgaacgggcccctgcacccgcggcccctggtggcat

SEQ ID NO: 583363 - DNA, 100 bp, Homo sapiens
ggggccgcgctgagggcgcccagctgacagagtctcactcccatcgcccagacttgagtgtagtgatgtgatcactgctcactgcagtctcagccttcca

SEQ ID NO: 583364 - DNA, 96 bp, Homo sapiens
gtgctcttcttcttcgagaattacaccggggtccagtggtgaactatgacaatgtagtggacacaggttctgaaacagatgaggaagacaagcttc

SEQ ID NO: 583365 - DNA, 90 bp, Homo sapiens
cgttgcattgcctgagaggagcggagtctgccaggtggtgtccatcatggttcatcatgcctagtggcgtataagaagaccccgccaccg

SEQ ID NO: 583366 - DNA, 96 bp, Homo sapiens
tttttgctcatttactgacatccaaggaggacccaaaggagcagaagcttctgttaaggattctcagaagaatgcgcaccatcctgggaagtgcat

SEQ ID NO: 583367 - DNA, 100 bp, Homo sapiens
cgcctgcagcccagccccctctttcactcccacctggagaccctgcagctgctgaggactgcacagctcccagaacagagggagaaccgaagattacagg

SEQ ID NO: 583368 - DNA, 83 bp, Homo sapiens
ccggagcagagagctggcgagcaagggctgaaatctctttaatgatggagggaagcaggcagacgcgagtgtctcggccatac

SEQ ID NO: 583369 - DNA, 100 bp, Homo sapiens
tgagaatgtccatggatttgtttctcattctcatatttcaccaataaagatgatatcatcaagttgaatcgaaaggaagggaagaagcagaattttccaa

SEQ ID NO: 583370 - DNA, 75 bp, Homo sapiens
agagccggatcctttcccagaagaatgagaatgagatatgagggaaggcaccattggagatatggctatcctggg

SEQ ID NO: 583371 - DNA, 100 bp, Homo sapiens
cgcgtccccactgaccagcgcgcaggacagcgccttcctcaacgacgcggacatggtcatgagctttgtgaacctggcaaccatgtccaagggacctgca

SEQ ID NO: 583372 - DNA, 99 bp, Homo sapiens
gctacaaataacacacctgccaaacagcccatcatgttcagaggtgaggtccgtctgaatgtcgaagagaagaagactcgagctgccagggaaggcgac

SEQ ID NO: 583373 - DNA, 83 bp, Homo sapiens
ttggacatggcaatatgggtggggggaattgtgtgtttttggagaggcttatgcggtacctgattcatccagcaaattaagac

SEQ ID NO: 583374 - DNA, 105 bp, Homo sapiens
aacctgtgagttcaacatgatagagcagagtggaccaccccatgaacctcggctggatgacaccaaaatcctcccaggcaacatgaaggataacttctgggagat

SEQ ID NO: 583375 - DNA, 83 bp, Homo sapiens
agtgactgcggcctgcatcccgttggctgctgaacagttcaagaaaaccagtctccatgtggctaagagtgttttgaacaaca

SEQ ID NO: 583376 - DNA, 100 bp, Homo sapiens
cgtcgcccatccggctggagtttgagaaggtctacaatcctcgaatcagagttgagtcccttttggtgacagctattagtaaagcttcagctcagcaaag

SEQ ID NO: 583377 - DNA, 100 bp, Homo sapiens
cagagggccttgtaccgggaggtgatgctggagaactacagcagcctggtctcactgggaaatggaagttccagtattaccgaaaatctctctaccgatc

SEQ ID NO: 583378 - DNA, 76 bp, Homo sapiens
acacggcctgcatcgggcccacgctcaggaaagaccacagcaagattctttcattcgtctcctcctagcctggggg

SEQ ID NO: 583379 - DNA, 50 bp, Homo sapiens
gccattaagaacatccatggagtcaggttgggacagcgtcttcgctgctg

SEQ ID NO: 583380 - DNA, 83 bp, Homo sapiens
atagctgttgtttcagagaaaggttcgagaacttgtcttggacaattgcaaatcaaatgatggaaaaattgagggcttaacag

SEQ ID NO: 583381 - DNA, 74 bp, Homo sapiens
gataagaacaccaaccaaattgtcgccattaagaaactgcaagctttcttcctggtggcagatgacatcatgga

SEQ ID NO: 583382 - DNA, 96 bp, Homo sapiens
tcgactccagaggagaagctggcagctctctgtaagaaatatgctgatcttacagcatcgatggcagcaacgtgacggtcaccccagggcctggag

SEQ ID NO: 583383 - DNA, 100 bp, Homo sapiens
ggacgtgttgaaccggttcttgggggactatgtggtggacttggacacgtcccagctctctctgggcatctggaaagaattgcctgaggttctgtccatt

SEQ ID NO: 583384 - DNA, 100 bp, Homo sapiens
acgggaagatcctggaggtggatctgaagaacggcaaagaatggctcaagaagtactgacacatttaaaggagcatcctgatgcttggacaagagtcgac

SEQ ID NO: 583385 - DNA, 100 bp, Homo sapiens
agagaagcacctgcacctcagagtaaagctgctggacaacaccatggaaatatttgacattgaggctccgagctctgtccagtggtgggagtattacatc

SEQ ID NO: 583386 - DNA, 73 bp, Homo sapiens
ttttcttcaatgggcagcatatgaaagtggattatgggttgattaatcatacaaagaaactaatggagaaaga

SEQ ID NO: 583387 - DNA, 102 bp, Homo sapiens
aaggaaacttctgggggcagcctggggacttagtttcctgcttgccttcccccagggtcctgaggacaccgtgagccagccaggcctggccgctgggcctga

SEQ ID NO: 583388 - DNA, 100 bp, Homo sapiens
cagctattctgtaacatcatcaagtcccagcccgtggataagatgtgcaaggctctgcagaaggctttaaccaagcagataaggcaataaacaccgctgt

SEQ ID NO: 583389 - DNA, 75 bp, Homo sapiens
gaatgggcaagacctcaggaggaccctgactcatatcaaggaccagaaaggagagcagtctccccagcccaccat

SEQ ID NO: 583390 - DNA, 100 bp, Homo sapiens
gagctgcgtccggcaggagacgaagagcccgggcggcgctcgtacttctggccactgggcgagcgtctggcagctaagaaacctttccagcttggaccta

SEQ ID NO: 583391 - DNA, 98 bp, Homo sapiens
cttactatgaggacgatttcagtagcacggaggaggacagcagccaagctgtcggaaaaggtaacagaagatggaactcgaaatcccaatgaaaaacc

SEQ ID NO: 583392 - DNA, 100 bp, Homo sapiens
atggtagaagagcttgagaaagccctggggatgaagctgccagaaacgaacctctttgaaactgaaggccaggtgtggtgtcttacacctgtaatcccag

SEQ ID NO: 583393 - DNA, 50 bp, Homo sapiens
gaaaattaaactcccgaagaagaggctttaccgccagcacctgttcagaa

SEQ ID NO: 583394 - DNA, 76 bp, Homo sapiens
gggactggaaactgctcacctatgtcatggaggaagagttacttcctccactgaagtcttgaaccccccaaagtca

SEQ ID NO: 583395 - DNA, 97 bp, Homo sapiens
ggcggcctcgcctcgcacccccagccagtccgtcgatccagctgccagcgcagccgccagcgccgggtgtcatggagaaactccagctgggcccaga

SEQ ID NO: 583396 - DNA, 75 bp, Homo sapiens
atcgaagctctagaaatgaatgtttccatctcttcagagatgaaccagagtttatgtggccgaggcagacaagtg

SEQ ID NO: 583397 - DNA, 82 bp, Homo sapiens
ccggcggcgcggcgagagagcggctgacagaggggatgcgagtttccgttactatggcaatgacggcagggactacaacaac

SEQ ID NO: 583398 - DNA, 100 bp, Homo sapiens
taaattacaagatcgagaatggttaacagaactttttcaacaaagcaaggtcaatatgcagaaaatgctcccagctctcacctgtgcacagttccaccct

SEQ ID NO: 583399 - DNA, 100 bp, Homo sapiens
tcagcccaagcgagccacggtggaaggtgtattacctgactgcttaaccgatggctctgatgtggtcagtgaccttgaacacgaagagatgaaaatcctg

SEQ ID NO: 583400 - DNA, 96 bp, Homo sapiens
gataagggcgacagcaacagctctgccggctggaaggtttggtgcacctcgatttggaggaagtagggcagggcccttatctggaaagaagtttgg

SEQ ID NO: 583401 - DNA, 88 bp, Homo sapiens
cggagagcgagagaggggagcaggaatcaaacattttaagtccagtgcaggatggaacaaagaaacctcagattgacagcaacaagag

SEQ ID NO: 583402 - DNA, 75 bp, Homo sapiens
caaagtgcaacattcatttcaatcttttggatcctttgaaaaatcacatgaaggctatagaaagcgcaattggtg

SEQ ID NO: 583403 - DNA, 83 bp, Homo sapiens
cgtcagccttgaggcagaacccagatccgaaatacccctgcaagaacagaattatctgggcacctacatctactttgactacg

SEQ ID NO: 583404 - DNA, 85 bp, Homo sapiens
tgcttaccatttaatcattgagctctatgatagggcactgcaggaaaggaaaaggaaaattttggacgaagctgtggaattaagt

SEQ ID NO: 583405 - DNA, 51 bp, Homo sapiens
ctttgttagaccaaatttaccacaactacctaatctgggagcctgcaagtg

SEQ ID NO: 583406 - DNA, 96 bp, Homo sapiens
caagaaacaaatcttgaagcacctctccaggaagtggcagtttttgtctttgataaaaaactgattgacaagtatcaaaaatttgaaaaggatcaa

SEQ ID NO: 583407 - DNA, 90 bp, Homo sapiens
caggaggcatttgaagttccagtgctgcactatctggcaatccagaaacctgcagaccttgctcggcacctgttaccttgtgtgattcat

SEQ ID NO: 583408 - DNA, 100 bp, Homo sapiens
cttccgctcggatcccttggcgtacacggtgtgcaaggggagtcgtggcgtcgtctgcgaccgctgccttctcggcggggatctgatgagcttctttctt

SEQ ID NO: 583409 - DNA, 100 bp, Homo sapiens
gactaaactgacaagccttcaaggagcccaggggtgtcccgacccaggctaagcttgagcatggctgagcaggagcccacagccgagcagctggcccaga

SEQ ID NO: 583410 - DNA, 100 bp, Homo sapiens
ctcatggcttgttgtcttctgacgccccccggcggattgaagagtctgccattgatgaggtggaacgtgtgatcaccattatgcagaatccacgccagta

SEQ ID NO: 583411 - DNA, 75 bp, Homo sapiens
ctttaactcagaaactctgccatgtcgtgaagccatccgggtgacctgcataggttcctgcggggtctccaacaa

SEQ ID NO: 583412 - DNA, 98 bp, Homo sapiens
tgcccgcctgcatcagtgcaaaactcctattatccaccgggacctgaagttgaggagctcaagcttgggaaaatggtgtgcattccttgtatcgtcat

SEQ ID NO: 583413 - DNA, 100 bp, Homo sapiens
cgttgctggtgacagcaaaaatgacccaccaatggaagcagctggcttcactgctcagggtggcattgtgtgtcccagagtgccggagcgagtcccagaa

SEQ ID NO: 583414 - DNA, 100 bp, Homo sapiens
gaggctccgggcgcggggaagtcatgctcgcttcacggaggcaatagctagccggtcgttgaggacttccacatggagattggcacaggaccagactcaa

SEQ ID NO: 583415 - DNA, 100 bp, Homo sapiens
cagcatgttttgaatttcctcgaagtcccaaccctttgagaggtgactggggaggaactgagggcattggtcacaaagtgggcagccagccaaagagtgg

SEQ ID NO: 583416 - DNA, 82 bp, Homo sapiens
aggcattccaggaggaaaaccgtatcacacctgtgtatcataatatgtttgctttaatgagtgaaacagaaaggatctggta

SEQ ID NO: 583417 - DNA, 100 bp, Homo sapiens
caacgacttcccgggagaaatggtcgtggtggacgacctggagaacacggagctgccctacttcgtgctgggaagaacctaggaaagtccgctttgatta

SEQ ID NO: 583418 - DNA, 75 bp, Homo sapiens
catccgaggtgcctttctccaaaagcttcttggacacttaatgattgttggcaagaaatgtgctgctgatctggg

SEQ ID NO: 583419 - DNA, 82 bp, Homo sapiens
aaaagcgtcaagaagaggaggaagccatgcgtagggtcagatgtaccaacagtaccagcaacaggccggctatggtgcacag

SEQ ID NO: 583420 - DNA, 98 bp, Homo sapiens
tcatctaactcttatttctccgttggcccaaccagtcccagcgctgtcgtgctcctctactcggttggcttatttggacgtctaggcagttttccagt

SEQ ID NO: 583421 - DNA, 83 bp, Homo sapiens
cagaattgagctgctgcataatattgacccgaacttcgtggactcttcaccgtgactctccttcagcaactccagaagcttca

SEQ ID NO: 583422 - DNA, 100 bp, Homo sapiens
agaagcaagaaggccctggacacagcaatatctctgggctttcacaggattacggggcgctgaaagacatcgtgatcaacgcaaacccggcctcccctcc

SEQ ID NO: 583423 - DNA, 90 bp, Homo sapiens
ctgaagagtaactttgccctcctcctaaaggtgagtacccagaacatgaagatgggtgggctgccgcgtacaacacctccaactcagaag

SEQ ID NO: 583424 - DNA, 74 bp, Homo sapiens
tgcagccgagaactccgctcgttctgtgcgttctcctgtcccagtttatgcaaaggggactggactcagaaacc

SEQ ID NO: 583425 - DNA, 74 bp, Homo sapiens
ggcattcccattgctgtgcctacaccttcgccacccactattggaccagctaaacctattcgtcccgggcaaca

SEQ ID NO: 583426 - DNA, 75 bp, Homo sapiens
ggatgcagcctctgggaccatcagcaagaaggacattatcaacccggacaaggaactttatattgctgttggaat

SEQ ID NO: 583427 - DNA, 90 bp, Homo sapiens
gggaatttccttgtgcctccattcccgggaggggggagcggcgttggaggccaccgtttccaggaaaaccaattctgtgtcctcggagga

SEQ ID NO: 583428 - DNA, 51 bp, Homo sapiens
gtgcgggcggctccgtgagaaaggcgggtgctggagaatctggtaaaagca

SEQ ID NO: 583429 - DNA, 100 bp, Homo sapiens
ctggaggaaagaaacagagagaaagcagaagatagggcagctcgagaacgtataaaacagcagattgcattgatggcagaaacggtggacacaagcgaaa

SEQ ID NO: 583430 - DNA, 50 bp, Homo sapiens
gcccaatccacatgcttttccaggtcagcccaaggccaaccccactgtca

SEQ ID NO: 583431 - DNA, 50 bp, Homo sapiens
atgctgttgtcactcaggtcaacaagatcctgaaggacacagccctgcag

SEQ ID NO: 583432 - DNA, 48 bp, Homo sapiens
gggagttcaagaagaacactccagaggcggcaaagatctgcaacaaca

SEQ ID NO: 583433 - DNA, 90 bp, Homo sapiens
gaggatgtcacccaggtgtcctctgcctaccagaagacagtacctgtcgaagctgaaattgcatctgatggtctcaagggtcgtgtgttt

SEQ ID NO: 583434 - DNA, 83 bp, Homo sapiens
gtacgttcaactcccaagaaccccataacatcctgccactggcatccagtcagatcagatcattaagcagcttcgagtctgga

SEQ ID NO: 583435 - DNA, 95 bp, Homo sapiens
ggcaaggaaagcagcatagagaatgagatagccgtcctgagaaagtgctggagaatctggtaaaagcaccattgtgaagcagatgaggatcctgc

SEQ ID NO: 583436 - DNA, 117 bp, Homo sapiens
ctgagatctatgatcccacatctggaatctggaatgaaatcttccaagtccaaggatgtgttgtgaccgagattcccgacgagagagactgaggggaagagaggaaggaggggcggg

SEQ ID NO: 583437 - DNA, 74 bp, Homo sapiens
ttgatgaaacggacagtgtgtgccaagaaagtattacttttacgacaactactttgacctgccaggagctcttc

SEQ ID NO: 583438 - DNA, 74 bp, Homo sapiens
agtgaccggcaccttctgtgcgtcctggactcctctgagaaacagtggtcggatgagcagtgtgcatcacaggt

SEQ ID NO: 583439 - DNA, 101 bp, Homo sapiens
gcggatcctgcgagagatcgagagcactgacacggcctgcatcgggcccacgctcagacagtaaggattgtatcctggagccgctttccctgccagaaagt

SEQ ID NO: 583440 - DNA, 50 bp, Homo sapiens
gggatcctctgtacgcccgttcactgagcgtttcccaaagtgtattctgc

SEQ ID NO: 583441 - DNA, 100 bp, Homo sapiens
aagcggaggaaggtgaagtaggaccgaattcctgtgccgaagaggcctgcagtgggagagcagggaccaagaatcgccttcagccctgtctggtgcatcc

SEQ ID NO: 583442 - DNA, 50 bp, Homo sapiens
ggagccacatgatggacgtccagttccggaactttaagatcatttaccgc

SEQ ID NO: 583443 - DNA, 82 bp, Homo sapiens
gaaatggcggagtatctggcctccatcttcggcaccgagaaagacaaactcggagccgtgggtcccgactgaacatcatcat

SEQ ID NO: 583444 - DNA, 95 bp, Homo sapiens
atagtaacccaaagatcgtgcagctcttggcaggagtagctgatcaaaccaaggatgggttgctgtgagtctaggtactccaattatgaagccag

SEQ ID NO: 583445 - DNA, 80 bp, Homo sapiens
aacagaaacaaaagcaggcaaatggagtcgttgggaattgctccatgtgcatccctcttgaagcttcgcactctgttgaa

SEQ ID NO: 583446 - DNA, 133 bp, Homo sapiens
acaaagactatgttttcaagctccagttcaaatcccacgtctacttcttccgggctgagagcaagtacacatttgaaagcatggaggagcaggacttggagcgaaggttcgagctgctgagccgcgagctgcg

SEQ ID NO: 583447 - DNA, 100 bp, Homo sapiens
caaggagggcggcgggactgcactcgagtgtccagacctgctcgatgtgagaaggcaaccaaagtgcaggacatcaaaaacaacctgaaagaggcgattg

SEQ ID NO: 583448 - DNA, 105 bp, Homo sapiens
gtctcaatatctgtcttcggtggactccttcggcagtccacccaccgccgccgcctcccagatgtgcactcccagcaacacccctgccacgccgcccaacttccc

SEQ ID NO: 583449 - DNA, 83 bp, Homo sapiens
attggatatcaagccagagaagtgcccgaggagagttaacaggtgtcgtgaaaactacccctaaaagccaaaatgggaaagga

SEQ ID NO: 583450 - DNA, 101 bp, Homo sapiens
aactgaagaagatggtggataagcccacccagcttttcctcctggaggaggtgcgagagcgaaagttcgatggctttgcccgaaccatccagaaggcctgg

SEQ ID NO: 583451 - DNA, 82 bp, Homo sapiens
aaacaattgatttgctcttacgtatttgtgtgacttgactcttcaaacacaaagcggagctggagtttgttcagatcatcat

SEQ ID NO: 583452 - DNA, 98 bp, Homo sapiens
tttgggaacatcctctcttgcaagtgctcaacaggaaccttggattatattttacaacgctgtcagttggctctgcagaatgtctgtgacgatgtgga

SEQ ID NO: 583453 - DNA, 145 bp, Homo sapiens
gaccgagcctgggaggccggccggtgccagcacctttcggcttctgagacggcggcagcagcggcattcaggtgctgatattcgtggcttcagtgctcctaggacatttggccttacactgggacatgtagtagatgaaatacag

SEQ ID NO: 583454 - DNA, 130 bp, Homo sapiens
cgcgcggcgctggactggagcagaaccccaggactgcgcccccgggagcgggcgcccagaggttgccaagctgttctgcctttctggaatggtgcatggagaatatcaaaaccaagaaatgcacaatctg

SEQ ID NO: 583455 - DNA, 82 bp, Homo sapiens
ggatatcgacgtcgtgatccagaagtccagagctgaggactgcctgtttgcagtcgtgagatggagaataaagaaactctca

SEQ ID NO: 583456 - DNA, 83 bp, Homo sapiens
tggtgcgttgcgtgccctacttcaaggataagggcgacagcaacagctctgccggctggaagtctttgagagttcaggccctg

SEQ ID NO: 583457 - DNA, 100 bp, Homo sapiens
tctctaacctaccagctgccactttccaggaattgaaagatgttggccatcgtgatcagatggctgcagctagaggaatcctgcagaagaacgttccgat

SEQ ID NO: 583458 - DNA, 50 bp, Homo sapiens
gtccagcccaggaaaatggagagaatgtatgacaacatgtccacaatggt

SEQ ID NO: 583459 - DNA, 80 bp, Homo sapiens
tactggggccagggaaccctggtcaccgtctcctcaggccattgggggccaggcctcccgcagcctcatggactgctttg

SEQ ID NO: 583460 - DNA, 82 bp, Homo sapiens
ctttcgggccttcaggatcttctccagccagtggatgtcgtggccagcatcgaaatgttcagccttttagtgatgaagatgc

SEQ ID NO: 583461 - DNA, 49 bp, Homo sapiens
gcaaaaacttcctttgcttgtgctcagatgctgggctcttgcactgttt

SEQ ID NO: 583462 - DNA, 75 bp, Homo sapiens
caacagattttgcaggatgatggaaaagaaggtaatagttatgcacgagtgcgagctgtggtgatgacccgagat

SEQ ID NO: 583463 - DNA, 100 bp, Homo sapiens
cccgacacgcacatctccccgtacaaggtggacccaagtggagagattgtggaactggcgaaaggtgcatgtccctggaaggagcatctctaccacctgg

SEQ ID NO: 583464 - DNA, 100 bp, Homo sapiens
gtctccagggttctttggggcccgagcctccaccaggcggtgtgaagatgcctaatgtacccaatacacaaccagcaataatgaaaccaacagaggaaca

SEQ ID NO: 583465 - DNA, 80 bp, Homo sapiens
ggggcgtcgtgcgcaaaggcctgcagtgcgcgcgtgtggacactgccagcggctgcagccgacttggaatgacctgggag

SEQ ID NO: 583466 - DNA, 51 bp, Homo sapiens
cacctggatccaggataacggaggctgggagggctctaactccgtgaggac

SEQ ID NO: 583467 - DNA, 100 bp, Homo sapiens
aatatgttcaccattaacaggaacacaggagtcatcagtgtggtcaccactgggctggaccgagaggacagtcattttgtttactcattcagccctgttg

SEQ ID NO: 583468 - DNA, 100 bp, Homo sapiens
ggaattttgaagtacaccgtggtgacattgtatcattggtgaattttgtgacaggctctgttagtctgttcctcccttatttgaaggacaggccaaagat

SEQ ID NO: 583469 - DNA, 74 bp, Homo sapiens
cctcgcacgcccaggaggagcaagtccgatggagaggctaagcgaagagagaagggcacagttacctaagtatc

SEQ ID NO: 583470 - DNA, 75 bp, Homo sapiens
gcacggacggtgttggttggggcttatgccaaattttctggtgcacccttgaaagtcaatgtgatagataacacc

SEQ ID NO: 583471 - DNA, 91 bp, Homo sapiens
gagaacagctctttgcatccggagagtggacaagaaacaataagagctaactgccatcaagagccatcagtatgtcttcaagctgcatgcc

SEQ ID NO: 583472 - DNA, 73 bp, Homo sapiens
gaagatggtgtcctggatgatctccagagccgtggtaattctcccagtccttggctacatcagcccacccctg

SEQ ID NO: 583473 - DNA, 100 bp, Homo sapiens
ggcgcgcgaggtcaagctgctgctgctcgtgctttctcctgctcaagacagccacacgaacacggatctccccccagtgtcagagcagatcatgcagact

SEQ ID NO: 583474 - DNA, 90 bp, Homo sapiens
agtgaacaggagccgctcttaggcgacacacctggaagcagacccaacatgagtgaagtttcctgcaagaaacgggacgactatttggaa

SEQ ID NO: 583475 - DNA, 150 bp, Homo sapiens
gggggtggtgctggctcagtacatattcaccttgaagaggaagacggggcggaagaccaagatcatcgagatggtttttagaacttcagccataaaaatgggcagaattttccttgatcatatcggtggtacccgtctgttttcttgtgc

SEQ ID NO: 583476 - DNA, 100 bp, Homo sapiens
caacttcattttacttatgaagaaaaatctcctggcaattacagtcttttatcagaaatcaccgatccagagagcttcctgaaggacctgttgaactcag

SEQ ID NO: 583477 - DNA, 100 bp, Homo sapiens
gggggttcagattgcaaggtggcaaggagcagaagcagcccttacaagttgcaaagcttttctgcaattagataaaaaaggaccacaaaaacatcacttt

SEQ ID NO: 583478 - DNA, 74 bp, Homo sapiens
tcttgcctaaagagcagtggaccaaatatgaagagtctctaggtaacaggagaattcgagtggacgttgctgat

SEQ ID NO: 583479 - DNA, 97 bp, Homo sapiens
ccccggcccctcctgcccatggcggtggccgagctgtacacgcaggtgtcatggagaaactccagctgggcccagagattctgcagcgggaaaatcc

SEQ ID NO: 583480 - DNA, 75 bp, Homo sapiens
tggaccctaatttgagaagtgcagggcttatttcaaaacctttgtccctcagttccaggaggcagcatttgccaa

SEQ ID NO: 583481 - DNA, 88 bp, Homo sapiens
actccgtggggtaggaccctctgagccagtccaaaagaaactcttccttcaaaacctgtgaagaaagagaaggaacagaggacacgtc

SEQ ID NO: 583482 - DNA, 75 bp, Homo sapiens
cgcgttcccagcccgggtccccgcgttcacagccccagcgcaggtgtggacactgccagcggctgcagccgactt

SEQ ID NO: 583483 - DNA, 74 bp, Homo sapiens
ttagcaaggctgtcatcacagtgcgtatagcagcaaaattcatcattcatgcccctcctggagaatttaatgag

SEQ ID NO: 583484 - DNA, 97 bp, Homo sapiens
tttgaaataattaaagtaattggaagaggtgcttttggtgaggatcgctacggttcctactgatccgagctctgtgactcaggcttacgatggtgac

SEQ ID NO: 583485 - DNA, 101 bp, Homo sapiens
cgggcccgggccatggccgccgccgatgccgaggttctccagcatttggctcaaggccccaagggcacatgtgacaagaaggcgccagctttttaaacatt

SEQ ID NO: 583486 - DNA, 97 bp, Homo sapiens
gaggagtcttctgccgtgcagtacttccaggaggcaagtgaggcctatctggttggcctttttgaagacaccaacctgtgtgctatccatgccaaac

SEQ ID NO: 583487 - DNA, 80 bp, Homo sapiens
ggtgctcgggccagcccttctctgccgtccctgggagtgccctctggtggtcagaagatgctgtgctgtctcgttaggat

SEQ ID NO: 583488 - DNA, 75 bp, Homo sapiens
ggcaaaggggaggttacgcagcaaaccatccagaagcctcccgcgacgatgcccctcaacgttagcttcaccaac

SEQ ID NO: 583489 - DNA, 100 bp, Homo sapiens
atgttgaagatgtccttaccagctttgacaatacaggaaatgtttggcctgctttcttccccgggcgatgtgcagagatctttgccaggggtcaaagcgt

SEQ ID NO: 583490 - DNA, 100 bp, Homo sapiens
cacttcggtcacgaaaactggacaaagggctgcttgctctcggtgactacatgaatgtccagtgccatgcctgcattggaggcaccaatgttggcgagga

SEQ ID NO: 583491 - DNA, 87 bp, Homo sapiens
aggcctccccagccatgcagaactgtggtgatgatgtccagcaactctgtgaagcaggagaagaggagtttttggaaatcatggcac

SEQ ID NO: 583492 - DNA, 75 bp, Homo sapiens
ccgggactcgggtttgggcgaccaggaggtgccggtggccgcgctcggacccgcgatgccctcctagctagccgt

SEQ ID NO: 583493 - DNA, 50 bp, Homo sapiens
aagctgcaccagcttctaaccgaatatacatcaggggatgtgagagtgtg

SEQ ID NO: 583494 - DNA, 75 bp, Homo sapiens
gtggaagattcttccaaggaaccagtgcgaaggaattcctcctgatcagcagagactgatctttgctggcaagca

SEQ ID NO: 583495 - DNA, 75 bp, Homo sapiens
gcggtgggtcctcgcttgcagttcagcgaccacgctccatgtccatccgctggccgggccgccccctcggaagcc

SEQ ID NO: 583496 - DNA, 74 bp, Homo sapiens
actttttacaacaaaagaaaagctaggtgctgaagatccctggactggaaaaatacctgtcacagatgaagaac

SEQ ID NO: 583497 - DNA, 75 bp, Homo sapiens
cttcgtgggctggtacaacgggcttcctgagaaccaggagtttcagcggcctcaagatcagtacccacctttccg

SEQ ID NO: 583498 - DNA, 100 bp, Homo sapiens
ctctctttctggcctggaggctatccagcgaaatttgcgagaatccccgatttatcattgatggagccaacagaactgacatctgtcaaggagagctagg

SEQ ID NO: 583499 - DNA, 75 bp, Homo sapiens
tgtagaacatgctgaaaatccatgtcataaagcttttaataacccacgaccagggcaactgggcaggttattgcc

SEQ ID NO: 583500 - DNA, 90 bp, Homo sapiens
cctcctgagtggctgggactacagggctgacagtggctgacctcgtgttcccgtggtgagttgccggtctgccctcttctcttccacggg

SEQ ID NO: 583501 - DNA, 74 bp, Homo sapiens
ctgactgccttggatacaactgggaaagccgtctacactctcacctatgttgctctatatgcaatcagtgctgt

SEQ ID NO: 583502 - DNA, 88 bp, Homo sapiens
tgccaggaattctcagcgggttccacaccctcttgactccaaaaccacgtcggatgttttaaggtttggacatatttgactcttttcc

SEQ ID NO: 583503 - DNA, 100 bp, Homo sapiens
gggagctgcctgacagtctgatcacctcagcgttgcagcctcgattcattcaactctttcaggatctggaaagcatgaagactgggctttttttcctatg

SEQ ID NO: 583504 - DNA, 97 bp, Homo sapiens
cccagacgaggctcgggactttgcagccggccttagtgctcgcgcagtgtctttggtgcaacactaacaaggcttgtctggactacccagttacaag

SEQ ID NO: 583505 - DNA, 75 bp, Homo sapiens
aggtccgacatggtctcgccccagcctggatcacagccgcagcgcctctagcagtttcgccgtgaggaagatgcg

SEQ ID NO: 583506 - DNA, 83 bp, Homo sapiens
gtcccgctgccgtcgccgccgccaccatgcccaagagaaaggccgccatggcatcagatgaaggcaaactttttgttggaggg

SEQ ID NO: 583507 - DNA, 100 bp, Homo sapiens
gtctgtctcttgattggacgtcaggatctttccaagcaggcctgcgaaggaaacttacccaaagggaagtctactgacttccttttggtagtactgcgtg

SEQ ID NO: 583508 - DNA, 75 bp, Homo sapiens
aacagttgcactgtaaaaaacccagctgaagaccactttagaaactcaattaagactgaccagggccaagtggcg

SEQ ID NO: 583509 - DNA, 82 bp, Homo sapiens
cgggagtgtcctggacccagctgagcgggcggtcattcgcatcgcagtgggggacttgcgagacttcgtgaggagccacctg

SEQ ID NO: 583510 - DNA, 90 bp, Homo sapiens
gtcctggctcagcaagactctcgagcccatgatgtaatccctgttcattactacttaatacctccaccaacaaagactaagaatggcagc

SEQ ID NO: 583511 - DNA, 75 bp, Homo sapiens
cgcacggcgcagtgccggaacactgtggcggccatcgaggaggtcaactttgtagtgtgccaactctttgccttg

SEQ ID NO: 583512 - DNA, 100 bp, Homo sapiens
tgataatggctggttatcagcattgcagcttgaggcaattacatatgcagcccaggttcttctgtgtggcagttcagaatgatggatcaagctagatcag

SEQ ID NO: 583513 - DNA, 80 bp, Homo sapiens
gagaggcggcggcggcctcggctgaagaaagaaggtgggagcggagagcgcaggcgtgacccaagtaggcgattttctgg

SEQ ID NO: 583514 - DNA, 50 bp, Homo sapiens
agctttttggaccttatgtttggggaagcctctctacatatgacatcgtg

SEQ ID NO: 583515 - DNA, 100 bp, Homo sapiens
ggagaccgtaatgagcgtcaaaattatccgaaaccgcctcactgggattatatgcgtcaggcaggagaagtgacttatgcagatgctcacaagggacgca

SEQ ID NO: 583516 - DNA, 100 bp, Homo sapiens
ctaaaaattgtataccgcagattcaggcatatatggtgctggttgtctcattacggaaggatgtcgtggagagggaggcattctcattaacagtcaaggc

SEQ ID NO: 583517 - DNA, 99 bp, Homo sapiens
tccactacagaaacctcacagaacacagcaaagatttgacttgggctcatatgacataaggatgatcatctctggcacaacagctcacttttcttccaa

SEQ ID NO: 583518 - DNA, 75 bp, Homo sapiens
cttcaaggtcaagatggtggacgagcttaagagagcgctgataaagcagtttgtgtccgacgtggcctgggggga

SEQ ID NO: 583519 - DNA, 128 bp, Homo sapiens
gattggaggtgtcagtgttaaaggaacctctacaacgaaggtgaagccacggaagataagggccaattcctgtccccccagcagcatggcatcgtgtgctgaaccctctgagccctctgccccactgc

SEQ ID NO: 583520 - DNA, 100 bp, Homo sapiens
cacctcctcgccagcagccgtccggagccagccaacgagcgcggccttgcaggccactcgagccctaatggtggtctccctggtgctgggcttcctggcc

SEQ ID NO: 583521 - DNA, 75 bp, Homo sapiens
gtggagaggggccgaaccgtgaagggctggaggccccggcggctaggtgttcctgatccaagcagaaccctgtta

SEQ ID NO: 583522 - DNA, 100 bp, Homo sapiens
agaaggcacagtgcctctgaccagcatcgtctgtaaagggtttcttccggagaacaatcagattgaagcttatctatgacagatgtgatcttaactgtcg

SEQ ID NO: 583523 - DNA, 90 bp, Homo sapiens
cttcgttccaacatggacatcctgaagccaatcctgcatttttgaaacgttggggttgttggagtggttggattttccctggaattgagt

SEQ ID NO: 583524 - DNA, 100 bp, Homo sapiens
ggttccacttccagcaacagctcctgcagcagtaccgagtgccccggggaagccattccccaccccccagatttattactgtagtcggacacactcccag

SEQ ID NO: 583525 - DNA, 75 bp, Homo sapiens
agtatgaagaaaaatttcagaaccatcacaaactgccgcctgtcttggttagatggctctggattaggattctca

SEQ ID NO: 583526 - DNA, 100 bp, Homo sapiens
tttggaaatgtgctcacactcaatgccaagtgagtacacctatgtgaaactgagaagtgattgctcgaggccttccctgcaatggtacacccgagctcaa

SEQ ID NO: 583527 - DNA, 96 bp, Homo sapiens
ctctcggccgtcgtccaacctcagctccctgtccaacgcctccgagagggaccagcaccacctgggcctcaacaccctcccccagcctcccattcc

SEQ ID NO: 583528 - DNA, 90 bp, Homo sapiens
ggaccggacccagagaagaggaaaactctaccggtgcaggtgctggagaatctggtaaaagcaccattgtgaagcagatgaggatcctgc

SEQ ID NO: 583529 - DNA, 90 bp, Homo sapiens
tcactttcacaacccagcagacttctttgagattggtctggattttacagaacttgactgaggttggtttgacttccacaaatgcagaag

SEQ ID NO: 583530 - DNA, 90 bp, Homo sapiens
ccagtttatggcttccagtggaggcattttggggcagaatacagagatatggaatcagcttgttgaagatgcatatagactaccggaaag

SEQ ID NO: 583531 - DNA, 100 bp, Homo sapiens
cttctatcctgctctgtggaagaaatgggcatgccagatgcctggaagatcagaggctcacattccagattgagaggatccagaatccagatctctggaa

SEQ ID NO: 583532 - DNA, 50 bp, Homo sapiens
tgggcttcggaggcctatagcccgcagggacccagatgcgcagcctgggg

SEQ ID NO: 583533 - DNA, 104 bp, Homo sapiens
ggaggcgcgcgcggaggccgcgacggacgcaagatggcgacggcgaccatagctctcgtcaaaatgcagatcttcgtgaaaacccttaccggcaagaccatcac

SEQ ID NO: 583534 - DNA, 98 bp, Homo sapiens
tgggaatttttgaaatgggctgggaaaagccatctcctattcagacctgcctagagctggaacgttacctccagagcgagccctgctatgtttcagcc

SEQ ID NO: 583535 - DNA, 75 bp, Homo sapiens
cgaggacgaggagtcggaggagccgcgggcggcgcggcccagctcgttccaggcccgcgatgctcccagcccggt

SEQ ID NO: 583536 - DNA, 100 bp, Homo sapiens
cttcaactcctaccagccagatcaacacaattgataagaggtaaagcattatttgacagatgtatggattcaagcaagaaactgaggtccaattgcaaag

SEQ ID NO: 583537 - DNA, 74 bp, Homo sapiens
cattcacttctagacgacaaaatgcaaaaaaggaggccaaagactttgatgataaggatgccttctatgtggca

SEQ ID NO: 583538 - DNA, 101 bp, Homo sapiens
gttggcgccatccacttagcaggcctccagcaagatctccgatgactcttgtgaagcagcaggcgccaagtgatgaagtcaccttcaggccattcagagga

SEQ ID NO: 583539 - DNA, 74 bp, Homo sapiens
tcaccccgcaggagaacgagtccctcttcactttcctcggcaagaaatgtgtgtgagggagataaatctgcagg

SEQ ID NO: 583540 - DNA, 80 bp, Homo sapiens
aagaaggctgctattgaaagagagtatgcacagattgctatgctatgccttgtatgactaagacctcttaccaagaatac

SEQ ID NO: 583541 - DNA, 74 bp, Homo sapiens
cttcccaatcccactgatgaggatcagcccatgttttaattcacaggtgttgcaagctgacatgttaagaatta

SEQ ID NO: 583542 - DNA, 100 bp, Homo sapiens
catgagctccacgcagttcaacaagggcccctcgtacgggctgtcggccgaggtcaagaaccgggtgaagatcatgacggagaaggaactcctggccgtg

SEQ ID NO: 583543 - DNA, 100 bp, Homo sapiens
ggagatcgagaccatcttggctaatacggcttatgtacataaaagcgtgatggaggaactgaagagaataattgacgacagtgaaattaccaaagaggat

SEQ ID NO: 583544 - DNA, 101 bp, Homo sapiens
ttcttgaaccaggtcatgctccaaatgtgagaagaaatttgtttgtccagaatgttcaaaacgctttatgagaagtgaccaccttgccaaacatattaaaa

SEQ ID NO: 583545 - DNA, 101 bp, Homo sapiens
cgcgagcttagtcctgggagccgcctccgtcgccgccgtcagagccgccctatcaggacctgggaggaaggcaaggtgctcatctttgatgactcctttga

SEQ ID NO: 583546 - DNA, 75 bp, Homo sapiens
tgtgacatgtctgatcccttgctcccatccctgcagcatgaacaaggttaccaacatcaagaagacactcaaagc

SEQ ID NO: 583547 - DNA, 101 bp, Homo sapiens
cgctgattccccccgcatcgcctcccgtggaagcccaggcccgcttcgcaggtgtcgtgaaaactacccctaaaagccaaaatgggaaaggaaaagactca

SEQ ID NO: 583548 - DNA, 100 bp, Homo sapiens
gtcagatccgagctcgccatccagtttcctctccactagtccccccagttggagatctattctctgaagttacacccatcacagaattttcatagagctg

SEQ ID NO: 583549 - DNA, 83 bp, Homo sapiens
tggagcagaaactgagctggaccactggagcctcggtgagggggagtggggaaggccagggccagattctgcagcgcttccca

SEQ ID NO: 583550 - DNA, 82 bp, Homo sapiens
aggaagtcatcatgggccggcctggaacaggtgacagagctgaatgaacctctctccaatgaagatcgaaatctcctctctg

SEQ ID NO: 583551 - DNA, 88 bp, Homo sapiens
gctctgcttcgacaaggacgagttcatgaagtagctgctgctggtggtgacaatgtcaaataacggcctagacattcaagacaaaccc

SEQ ID NO: 583552 - DNA, 100 bp, Homo sapiens
cacgccgtgcgcgtcccgagcccgcggggcagctaccgctcgtttggaaattttagcattcaggtgccaggaatgcagatgggacagccagtgccagaaa

SEQ ID NO: 583553 - DNA, 50 bp, Homo sapiens
cagagcgcagctatcggtgctttgcaggttgtagaaggaacgcctcttat

SEQ ID NO: 583554 - DNA, 82 bp, Homo sapiens
aagctcgtggcctgcctctgcgtgcgagcacgtgaattgcctctgcttacgttcaggccctgtcctaaacccagccgtctag

SEQ ID NO: 583555 - DNA, 75 bp, Homo sapiens
cccaggtgtaagcgcagaaagcaggcgaacccgcggcgcaataacgggccgcgatgggcctcttggaacattggt

SEQ ID NO: 583556 - DNA, 78 bp, Homo sapiens
tttccaaaatggcgcgggtgctgaaggctgcagccgcgaatgccgtagaaatgaagctgttgtcatttctggaaggaa

SEQ ID NO: 583557 - DNA, 82 bp, Homo sapiens
cgacgctgccaacaacgggcactacaagccatcactggtgcaagctatatttaacggagatcctgatgaagttcgagcacta

SEQ ID NO: 583558 - DNA, 97 bp, Homo sapiens
ggaagcacactgtgtagaatttctcaccaaacatcttagggcagataatgcctttatgttacttactcaggattcgctaaatattgtaatggatcaa

SEQ ID NO: 583559 - DNA, 98 bp, Homo sapiens
gggagcgagcgcagcaaagcgcccagcctgccgcctcgctgtccctgcggcttctgggggcctatggcatgtctgcgttacctttaaatctgataaaa

SEQ ID NO: 583560 - DNA, 109 bp, Homo sapiens
cttcgatatctcatccaagactccagtattctccagaaggtgctaaaattgaaagtggactatttaatagctaggactgactgcattgcacagatgatggatatttacg

SEQ ID NO: 583561 - DNA, 100 bp, Homo sapiens
ttctgaggacagacaggtgctgtctctagcatcacctctcagcacgattttcccgagagttcacagccactgaggcggctcccagctgcgttggcgacat

SEQ ID NO: 583562 - DNA, 82 bp, Homo sapiens
ccggatcgtggcctctcgagagcaaggacccagatgatgtggtaccagttggccaaagaagagcctggtgttggtgcatgtg

SEQ ID NO: 583563 - DNA, 82 bp, Homo sapiens
gttcacgcacgggatccagagcgccgcgcacttcgtcatgttcttcgcgccctgtgccctctggtggtcagaagatgctgtg

SEQ ID NO: 583564 - DNA, 51 bp, Homo sapiens
aaaatagggatcgtccaacccgagaagatgattgaagaatcactgaagatt

SEQ ID NO: 583565 - DNA, 80 bp, Homo sapiens
tggagctcatcagactgaccgtgtcttacatcagttcagagaggacactcatgaggaccatgatacttccactgagaata

SEQ ID NO: 583566 - DNA, 75 bp, Homo sapiens
tctaaacagagagaagagattgacacactaaagatgtccagtaagagatgggatttcaccatgctactcaggctt

SEQ ID NO: 583567 - DNA, 97 bp, Homo sapiens
ctcctttgaaggcgtggacgaggacgagtggattatgtttgagaccttcaacaccccggccatgtacgtggccatccaggccgtgctgtccctctac

SEQ ID NO: 583568 - DNA, 98 bp, Homo sapiens
cgtcgtgatcgactcggacacagaggacagcggcagcgacgagaacctggatcaggaaaagaagatttttcagatcccctggatgcatgcggctagac

SEQ ID NO: 583569 - DNA, 87 bp, Homo sapiens
caggatggtgtctctcgcagattcatccccccagccaggtgcagtttgatgtagtagtgtcagctttttccttaagtgaactgccca

SEQ ID NO: 583570 - DNA, 50 bp, Homo sapiens
gaaagtattactccaggccaaaggaaggtcacggtctagatcacattctc

SEQ ID NO: 583571 - DNA, 115 bp, Homo sapiens
ccaacgatgagaactgtggcatctgcaggatggcatttaacggatgctgccctgactattttgcaagaacgaggctcaaggatgtgagggacacagtattgacagctgaagaaat

SEQ ID NO: 583572 - DNA, 87 bp, Homo sapiens
cggaacgaaagtgaacaggagccgctcttaggcgacacacctggaagcaggactttaatttttggaagtgaataaaacttgttttag

SEQ ID NO: 583573 - DNA, 101 bp, Homo sapiens
atttctactggaaaaaccattttcagttaaagcaggtgacaaaaggtgagacactcacctagaacagtgccgtgctgctgctgggaagttgctttacacaa

SEQ ID NO: 583574 - DNA, 76 bp, Homo sapiens
ttcatttagagctgcggaacaggacgccctctgatgtgaagccaaaaaccttccctcttacccggggccgagcaag

SEQ ID NO: 583575 - DNA, 100 bp, Homo sapiens
tcttcgaggagccgcaccaatggcttccgtgctgtcctacgaaagcctggtccacgccgtggccggagccgtgggtaaaggcagcagtaatgctaacgct

SEQ ID NO: 583576 - DNA, 101 bp, Homo sapiens
gtggacgttgtctaaatttcggtagccatggcacaagaatataatttgaatataacctgccgctttgcaggtgtattccacgtggagaaaaatggtcgcta

SEQ ID NO: 583577 - DNA, 50 bp, Homo sapiens
gagctgggcaccaggaagcgaaggtcgagcctcttaggcagagtttaaca

SEQ ID NO: 583578 - DNA, 80 bp, Homo sapiens
tggagcctcagttggaagcagccgatccagcctgcggagcctgtggggcaggtacttcaactcccgcccccacctgtgtc

SEQ ID NO: 583579 - DNA, 75 bp, Homo sapiens
tgcttgctaactccaggaacaggccatgaccttgcctcctttcctggagttcggtgtcccgtccccagcccacct

SEQ ID NO: 583580 - DNA, 75 bp, Homo sapiens
ggctccagtcaggccgatccgctccgctcacgaagcacagatcagatttctaaaggccaaactccatgttatgca

SEQ ID NO: 583581 - DNA, 75 bp, Homo sapiens
agcgctcctaccgggagcacattgagcagcagatccagacctaccagcgcaggtatgagaccaccgggctgagcg

SEQ ID NO: 583582 - DNA, 75 bp, Homo sapiens
tactctctctttctggcctggaggctatccagcgggaaaggccatacaaatgtcagacctgcgagcgaaccttca

SEQ ID NO: 583583 - DNA, 75 bp, Homo sapiens
cgaaccgggtgtccacatgagtgcctctcccagcagatccaggtccctgtgcgttttattgcgacctgccggtgg

SEQ ID NO: 583584 - DNA, 100 bp, Homo sapiens
ccaatgtgggatcgatgtttcaatattggaagcgctttgatttacagcagctgcaggtgagaagccctaccactgcaactgggacggctgcggctggaag

SEQ ID NO: 583585 - DNA, 88 bp, Homo sapiens
tcgcagaatggatacttcgaggattcaagaatcaagagagacccggccaaggcttttgtgcccaggactgttatgattgggggcaagg

SEQ ID NO: 583586 - DNA, 95 bp, Homo sapiens
taaggctgaaatcattgaagtgcttggagtgcagaactgaaagaggaatcccaataaccctgtttaaagaggaatggagattgccactgtccatt

SEQ ID NO: 583587 - DNA, 100 bp, Homo sapiens
ggccggctccggaggcttggtgactccagtggcccagaatcccacgtggcgaagtctcgattttggaattatgccagaccgtcttgatacatctgtgtct

SEQ ID NO: 583588 - DNA, 75 bp, Homo sapiens
tgaagtggcaggaggaggaggaggggctccggctggtctgtggtgaggtgaaagtcaatataataggagaagtgg

SEQ ID NO: 583589 - DNA, 101 bp, Homo sapiens
cagaaggtctctggagacatcttcagcagagaattttctctacatgtgcacccatttaaaggactcggcttcaagggaagcagcttccaccgcattatccc

SEQ ID NO: 583590 - DNA, 100 bp, Homo sapiens
acacctaaaccaacactctttgggaaactgactctactctgtgatgccaagacagatgggagtttccttgtacaccactttctctccttctatctcaaag

SEQ ID NO: 583591 - DNA, 73 bp, Homo sapiens
tgaaagttttgaaattagagacgcagacagggttaaaggaaagccctgtctgcacaagtggatggtatcatct

SEQ ID NO: 583592 - DNA, 82 bp, Homo sapiens
catcatcaagacggaaaaagtcgatctggagcttttcccctccccgggttggcaaaagcagcttttgatgatgcaattgcag

SEQ ID NO: 583593 - DNA, 80 bp, Homo sapiens
ctgttccaggtctatcaagcagcccttctgggtcacccttgcatggtggaacaggaggattttgtaatggaagggcatgg

SEQ ID NO: 583594 - DNA, 98 bp, Homo sapiens
gtggcttcggcttcatccgcttggattccagtggaatgacactggtgatgcttgccgccgccggagggcaggacgacctcctgcgactcctcatcaca

SEQ ID NO: 583595 - DNA, 88 bp, Homo sapiens
gtgcaggcagataccgtttgacaccaccagccctgggaggagcggggacactgaggacctctctccaaattggcctctcaactcacag

SEQ ID NO: 583596 - DNA, 98 bp, Homo sapiens
tgcttcctgagtgcttctttcttggagctgaccatggtgacagctggatctgcaagtctgtcctttctgaaggccaccagcgcaccgtgcggaaggta

SEQ ID NO: 583597 - DNA, 80 bp, Homo sapiens
atttaagaaagaagatgttaactttcaggggtcggcgctttgcctgatgaccctacctctctgacagatctgagaagagt

SEQ ID NO: 583598 - DNA, 51 bp, Homo sapiens
gaggaaaacaacttcgagggcagagtgaaaggtgtagcagtcactcggcct

SEQ ID NO: 583599 - DNA, 100 bp, Homo sapiens
cccagcttcaagcccaaccaagtgcgagatctgcgtgaaaagatgtatatggaatgttactcaatttagaaaaacatcaaagtcacttgcaagccaaaag

SEQ ID NO: 583600 - DNA, 50 bp, Homo sapiens
tctttgcatccggagagtggacaagaaaggatcaaggtggtcggacattg

SEQ ID NO: 583601 - DNA, 76 bp, Homo sapiens
ctgtggttcaggactcccgacttgacacgatattttttgctaagcaggtgcgtgctctggaggaggccaacgccga

SEQ ID NO: 583602 - DNA, 101 bp, Homo sapiens
cagcagacgtttttgaatcaactgagagaaattacggggattaatgacacccagatactacagcaagccttgaaggagcaatgttcctttagttgggactg

SEQ ID NO: 583603 - DNA, 75 bp, Homo sapiens
cctccagcacccttgcctactccccgcgggacgaggaggacagcatgttcaaagaggaaatctcccggaggttta

SEQ ID NO: 583604 - DNA, 73 bp, Homo sapiens
gcggaggcagagaagggaacgcccggcccagccccgaaggttgtgcaggaccagcgttccctgtgcaggcgcc

SEQ ID NO: 583605 - DNA, 82 bp, Homo sapiens
tgacactttaatagttctggctgaagagcatggttgtttggacattataaagatcttgcagttctacttctaagtatgtaat

SEQ ID NO: 583606 - DNA, 92 bp, Homo sapiens
accgcctccagcttgccaccaaagacctgcgactttgctcaggttcgtgctggccgtgggcagcgccgtctttgatgccatgttcaacgggg

SEQ ID NO: 583607 - DNA, 75 bp, Homo sapiens
atcgtttggtctcctgccgtgcccggttaaacccatccagagtaatggctgcggccttacccaggaccctggggg

SEQ ID NO: 583608 - DNA, 100 bp, Homo sapiens
gcgagcccaccccggtcctcggctctggggccgccgccgcgggccggagccgagcagccgtcggcaggctttgggatgcgacatcagcaaatgagaggaa

SEQ ID NO: 583609 - DNA, 87 bp, Homo sapiens
gacttctcaatcccaagtggccaaaggttttgatgatgatggttcagaatttcatgaacatatatttctggagaaacacctggagag

SEQ ID NO: 583610 - DNA, 100 bp, Homo sapiens
agctggataatgacaacagctcagccaggctctttgagaggtcccggataaaggccttggcaggcttccaactgaatatgagaggaacgggagatatgag

SEQ ID NO: 583611 - DNA, 82 bp, Homo sapiens
gaggcacggagggtggcgaggcagacttcccaagtaagaagcggaagaggagccgctggaaccaagacacaatggaacagaa

SEQ ID NO: 583612 - DNA, 98 bp, Homo sapiens
tttcactcacccagtgatgacatggacagcatcatcttcccaaagatttatcatagaatccccgactcagacccatcttctagcaaaacaaggcagat

SEQ ID NO: 583613 - DNA, 98 bp, Homo sapiens
gttctaagtgatgtccaggaaggaggaggaataatatttatggagcatatattatggaacacattgcatccaagaattgatgcccggagagctgatga

SEQ ID NO: 583614 - DNA, 100 bp, Homo sapiens
cgaaacagaaatttcatgttgcaccctttacacattcggcaaagtacagggcaacagcgatctctactggaaggcgcagcgttaccgcctcatccgggaa

SEQ ID NO: 583615 - DNA, 100 bp, Homo sapiens
gtgcgggacgcgggcgccaggaccggccgaacgcagaggcacttcaggtggcaagacagctccttcttcagcagcaacagcagcagcaagttagtggatt

SEQ ID NO: 583616 - DNA, 49 bp, Homo sapiens
caaatttagagaaacctcggcagaagcagcattaagaggtcttctggga

SEQ ID NO: 583617 - DNA, 75 bp, Homo sapiens
cagcaagacccaaggccaacaagtgtctagcctcaaagatcctgatctccgggagggacagatggccaatctctc

SEQ ID NO: 583618 - DNA, 74 bp, Homo sapiens
gttccccggcccacagtgggggtgtgcaaacccgagagaactggaaaaagatgttgctggtccatttgacgaag

SEQ ID NO: 583619 - DNA, 120 bp, Homo sapiens
cgtttcttgggtcgtcatttcccccgcttctatgtcctgtacacaatcttcatgaaaggcccagctactccagacttctatgctttggtggcccagcggctggaacagctggtccaagag

SEQ ID NO: 583620 - DNA, 101 bp, Homo sapiens
gcgtgatgtggctaagatgctgccgactctgggcggcgaggaaggcgtctcccgggtgtggaatccatagcatgttccctttacatttagctgccctaaat

SEQ ID NO: 583621 - DNA, 50 bp, Homo sapiens
aaacttgttatgcagcatataacagggagactgcattgcttattgatcca

SEQ ID NO: 583622 - DNA, 87 bp, Homo sapiens
ttaaagatgcagtacgccacggggccgctgctcaagttccagatttgacttttgcccgctacctttcattccggcgtgacaacaatg

SEQ ID NO: 583623 - DNA, 82 bp, Homo sapiens
gaccagtggccacctctgcagtgtcttccacaacctggttttcggctttgtgagaaaccttaccatcaaacacgatggccag

SEQ ID NO: 583624 - DNA, 75 bp, Homo sapiens
aaggaggtgcaaatggacagagccatactgcgttatagcggccgtgaacttcctcttcaaattcctggtgattgg

SEQ ID NO: 583625 - DNA, 100 bp, Homo sapiens
tcctaccacaaacagcacagctccatttggcctgaagcctcgatcaggagctcatgggacacatgtagctagtatagctgctggacactttccagaagaa

SEQ ID NO: 583626 - DNA, 50 bp, Homo sapiens
tgtcgacgaccgacagggtggtgaaaggtcccctgacaagcccaccaggc

SEQ ID NO: 583627 - DNA, 51 bp, Homo sapiens
cccaaacaggacgaaggcgtgctgaagccgcttacaaacacgcagatggca

SEQ ID NO: 583628 - DNA, 83 bp, Homo sapiens
tggccttggagaactgccccaaggatttgcaagggttctcatgtatcagccatcttctgtaagggtgcccagtgtgacttcgg

SEQ ID NO: 583629 - DNA, 74 bp, Homo sapiens
cccgccgcgccgcgctccaaccgcctcctcctcctcagtaacgcggatatgcacccaatgtccagggagcgtgc

SEQ ID NO: 583630 - DNA, 74 bp, Homo sapiens
gccaacatgagcttcttgtttaagagatgctaaaaaccttgtacctatggaccccaatggcctgtcagatccct

SEQ ID NO: 583631 - DNA, 83 bp, Homo sapiens
gggggattctcgacctgctaacagaactggaccttttcggagggtgaggacaaaatcttcttaatcaacaagcttcactccat

SEQ ID NO: 583632 - DNA, 75 bp, Homo sapiens
gctccttctcctggagacgcaactcaagttgatcatggccttgccaggttggtgacagtatattgtgagcatggt

SEQ ID NO: 583633 - DNA, 113 bp, Homo sapiens
atgctcagggctgcggccgcccgaagaggagagagcgcgggcctctaggaaggcagctgagtatgtcccagagaaggtgaagaaagcggaaaagaaattagaagagaatccat

SEQ ID NO: 583634 - DNA, 50 bp, Homo sapiens
cggccgggcccagagctcctgtctctcagatgatggtggtgctaccccag

SEQ ID NO: 583635 - DNA, 80 bp, Homo sapiens
caggaaacaagctcctacttccagaaaaagtgctcctgggactccaggataccagcagcagagacagtggtggatccaga

SEQ ID NO: 583636 - DNA, 100 bp, Homo sapiens
cacaaaacaaattaaaagctgaaatggattcacacaagggtatacctcagttaccatgtgccaaagcattatacaactatgaaggaaaagagcctggaga

SEQ ID NO: 583637 - DNA, 97 bp, Homo sapiens
agaaggcagctcagatgcatctggttcttctaaaggagcaattctccaatacttacagtaatctcatattaacagctatgttagatactaaagaagg

SEQ ID NO: 583638 - DNA, 100 bp, Homo sapiens
acaaatttcagatcttcgtagaaatattgaaaggaagtgaatgaattgtgtcagtcggtgcaggagcatgtggagctgctgggctgtggggctgggcccc

SEQ ID NO: 583639 - DNA, 75 bp, Homo sapiens
taataatggcagcacagagctacattcgaggtcgtctacagctgcaagcagatcgccatcaagaacatatccgag

SEQ ID NO: 583640 - DNA, 124 bp, Homo sapiens
attttctagggtgtcagatgcctgatacattcaattcatggtttcttataaccctactccacgtctgagtataacaaagccatccggaactacacccgcttcgatgactggtacctgtgggttc

SEQ ID NO: 583641 - DNA, 75 bp, Homo sapiens
cctctggtactggcctggaggtgcgagttttatagctaaggcttccaactgaatatgagaggaacgggagatatg

SEQ ID NO: 583642 - DNA, 100 bp, Homo sapiens
ttccagcttgggaacaggctacttcgaggatttgttggtattgaggaaaacggtgaaatcctttttggctgtttgccagcagtgcctgtctaatgttaat

SEQ ID NO: 583643 - DNA, 100 bp, Homo sapiens
aggctctggagaggaagaatgagctgatctcccaggactctgacagcgactccgacgatgtgccagatgcccctcgaaatctccagctgtcactccccag

SEQ ID NO: 583644 - DNA, 88 bp, Homo sapiens
agattcgcagtggtcgcttcttctccttggtaccccaagaagctagtgcagacttattcagtgtttccctaccaggacgagatgagcg

SEQ ID NO: 583645 - DNA, 102 bp, Homo sapiens
ccggccagggtcgccccggcaaccacgagcccagccaatcagcgccccggactgcaccagagccatggtcggcataaaccatgggcctgtgattgctggagt

SEQ ID NO: 583646 - DNA, 100 bp, Homo sapiens
tctccctgctctacaacgtgcctgcagtggccgaggagattcaggatgaagttggagtctatggtgatgtacatcgagtgaagattatgtttaataagaa

SEQ ID NO: 583647 - DNA, 75 bp, Homo sapiens
cagactgtggaacttccgtgccccccaccctcaccaaggttactgaagctaaaggagatgtttaactccaagttt

SEQ ID NO: 583648 - DNA, 100 bp, Homo sapiens
tgactggacagtaaagctttggacaactaagccatcatcgtctacagactgccgtggacctggaaatgcagcaagctcctgatgaaatccatccatgcag

SEQ ID NO: 583649 - DNA, 76 bp, Homo sapiens
tcgagtaaagcagcttgtcttccccaacaaggagacgatgatctattatcctcccagtccacaacgctgaaccgtg

SEQ ID NO: 583650 - DNA, 97 bp, Homo sapiens
tcatcaaaaaggacaccagcaagctgttcaatgaggagaacaacctccctcctagcatgatgacccgcagaaacacctacgtttgcacagaacgccc

SEQ ID NO: 583651 - DNA, 82 bp, Homo sapiens
tgtggcatctccacctcaaggggtatgttagagcccaccaaggaaccactgaaaccactttctgctgcagaaaaaatagctt

SEQ ID NO: 583652 - DNA, 50 bp, Homo sapiens
cggggcagggctcgggagagcggagacacctatggctgccgatgaaggct

SEQ ID NO: 583653 - DNA, 100 bp, Homo sapiens
agcctttctggagggatgcagagcctttccttaggacaaacaaggataccatacttgcagagctccttcagatacataaagaacacattgtaggatacca

SEQ ID NO: 583654 - DNA, 83 bp, Homo sapiens
cgagtacgaacacgagcgagacatgcactgtcaaaatgcagatcttcgtgaaaacccttaccggcaagaccatcacccttgag

SEQ ID NO: 583655 - DNA, 100 bp, Homo sapiens
ggatgctcagaacctgatcgggatcagcattggaggaggggcccagtactgtccctgcctctatatcgtccaggccctgaaaaccagaatcagcaacctg

SEQ ID NO: 583656 - DNA, 76 bp, Homo sapiens
ggaagactgaaaggcaaggccatttaaatgtacttttgtgaatgatgtaaggattccggaacagacttatatcacc

SEQ ID NO: 583657 - DNA, 75 bp, Homo sapiens
gcggggactgttggtctcggccctgcggaaggagcggagagtttaataggcaagaaggaagggagaagacagaag

SEQ ID NO: 583658 - DNA, 100 bp, Homo sapiens
cctttttcgtttttcggatgatgccttcaatactacctttatttccaccatagtttgtgaagtgtggatatgcaggctctaactttccagaacacatctt

SEQ ID NO: 583659 - DNA, 83 bp, Homo sapiens
ggccccagcgcccactggggatggcaaagacgacatccggtgcgccgaggctgctcacaaaacaaattgtggctactaatttg

SEQ ID NO: 583660 - DNA, 98 bp, Homo sapiens
aacagtatgaacatgcctccattcacctgtgggacctgctggaagggaaggaaaaacctgtatgtggaaccacctaaagctgacttcatgagaccgag

SEQ ID NO: 583661 - DNA, 75 bp, Homo sapiens
gaagaatctagacagacaggcctttctagggcctggattccttctgaaaacattcaagatatcacagtcaacatt

SEQ ID NO: 583662 - DNA, 98 bp, Homo sapiens
attatatgctggaatggttccttgtaaatattccggattggattgttgaccttcgccatgagttgacccacaagaaaatgccccatataaatgactgc

SEQ ID NO: 583663 - DNA, 132 bp, Homo sapiens
ttcatcctcaccctcccacacttcctctccgagccctaccagtacaccttggccagcactggtgtcatggagaaactccagctgggcccagagattctgcagcgggaaaatccaaggcttatttatgccagg

SEQ ID NO: 583664 - DNA, 76 bp, Homo sapiens
cccttgcccagcagttatccgggaaaaacagggccattaagtttaatgatggcctgagcttacaggaaagttgccg

SEQ ID NO: 583665 - DNA, 90 bp, Homo sapiens
cgctctttggactaatgggagttgcttttggaatgaatttggaatcttcccttgaagaggaaggctttgtgatacctgatgaagggggcc

SEQ ID NO: 583666 - DNA, 82 bp, Homo sapiens
tgggaccggcctggggtagctgcgcagcaggatgagacctgcacgcagtggctcacagcagcacgatttgtgacagcccgag

SEQ ID NO: 583667 - DNA, 51 bp, Homo sapiens
cagcactgcccattggcaacgaacgggtgctgggtaggccaggtttcagca

SEQ ID NO: 583668 - DNA, 90 bp, Homo sapiens
acatagactggtgcccacataacgatcaggtcattgccagcggttcagaggactgcacggtcatgagaggagttgcttaaaccaatggga

SEQ ID NO: 583669 - DNA, 75 bp, Homo sapiens
tgttccctccaagacaactgaatgacttaattcagtgcacaaatgagatgaatgtgaacatcccacagttggcag

SEQ ID NO: 583670 - DNA, 75 bp, Homo sapiens
ttctcagggcaacccagatctcctggagcattggtaagcgtcacactgccaaagtgagagctgctggagaactca

SEQ ID NO: 583671 - DNA, 95 bp, Homo sapiens
ctgaaactcagagagggaagatgtcttgcaagtacagcagccacacccaggcctgtctcctccctcctacacatttccagctcctgctgcagtta

SEQ ID NO: 583672 - DNA, 74 bp, Homo sapiens
gattagcttcgcagtctggaaagctttaggagttcacagtggttactttgaaagttgcaatatacacagaaata

SEQ ID NO: 583673 - DNA, 74 bp, Homo sapiens
ctgactttcagctatggaatcggagaaaagccttacagatgctcatgggaagggtgtgagtggcgttttgcaag

SEQ ID NO: 583674 - DNA, 75 bp, Homo sapiens
gcgaggagtcagaaactcagccactggttgccttggtaggcaataaaagacacattcagctaacgtattttagca

SEQ ID NO: 583675 - DNA, 74 bp, Homo sapiens
ccggagggaggatgttaaagccccgcgagaagaagttcgtgccccaattcctcaaaagcaggaaatactggtgg

SEQ ID NO: 583676 - DNA, 82 bp, Homo sapiens
acccgcatgctctttgtcactccccggcggcagcacgaaagtaccatgaataatgtatttgtggccttggacatgaggcagt

SEQ ID NO: 583677 - DNA, 100 bp, Homo sapiens
ctcattttaactttcacaacaacatcatcgtattgattgtccctctcatgaatgacatgtcaaaattgtattgcctaagtgtaatcttgaacatgggcgg

SEQ ID NO: 583678 - DNA, 100 bp, Homo sapiens
tgctgagcccgtccgtccgccgccaccacccactccggacacagggtgaggtggctttgaccccgggttgcccggccagcacgaccgaggaggtggctgg

SEQ ID NO: 583679 - DNA, 121 bp, Homo sapiens
agaaattcctttggaagttattccgtagcataagagctgaaacttcagagcaagttttcattgggcaaaatggggctgcctgctgtttcccggggagatcatgaaacgaggtcgccttccc

SEQ ID NO: 583680 - DNA, 118 bp, Homo sapiens
cagaggcatagaatcttcaggaaaatactggagttcctgagatctcaagcactttcttatgcaaggagctaaacagtgattaaaggagcaggatgaaaagatggcacagtcagtgctg

SEQ ID NO: 583681 - DNA, 83 bp, Homo sapiens
gccaaacatcaagcagaatgtgatttgcttgaagatatgagacttcccaagtaagaagcggaagaggagccgctggaaccaag

SEQ ID NO: 583682 - DNA, 75 bp, Homo sapiens
gaggagaaccaactggtcccgaaagaggaagagaatggagactacacatatgtggaaagagtgaagatacccttg

SEQ ID NO: 583683 - DNA, 75 bp, Homo sapiens
caccaagagaaagcgggacagaggagcgggcagcaagcggaaacgatcccaggatgctggtatcctgcatagatt

SEQ ID NO: 583684 - DNA, 75 bp, Homo sapiens
gggatcgacgcggacagcgggctggagcctgacgagctggcgggcatcattcttaacaaagaagttaaatattgg

SEQ ID NO: 583685 - DNA, 112 bp, Homo sapiens
gagaaaaataggctgtgtaaactggaggatgagaacaataggccctagactggagctggttacagacggaagaagaagagcacagctgcctggagcaggcctcatgatgtgg

SEQ ID NO: 583686 - DNA, 83 bp, Homo sapiens
gcgagctcctcaagaatctcgtgctcaccggtttctcccacatcgacctgctctacgaactcgacggggaccccaagaggaag

SEQ ID NO: 583687 - DNA, 82 bp, Homo sapiens
gaccttacgacgggttggggatggcgtgcagcgcaaccacgagacggccttccaagtttgcagagtggtgtctagattacgg

SEQ ID NO: 583688 - DNA, 75 bp, Homo sapiens
agagagtctccgggtccctggaaagccctggttgttgctatgaaacagctatgacaagacatttttatcatggcc

SEQ ID NO: 583689 - DNA, 75 bp, Homo sapiens
tcatgtatcatgcaaggatattcctcatatatcatgaatagctattcagtcagacagaaccacttatcacgtttt

SEQ ID NO: 583690 - DNA, 80 bp, Homo sapiens
gtgtttgcatcggtggacaaggtgccagattacctaggaacagtacgatttggggttatcacaaataaacatcttgcgaa

SEQ ID NO: 583691 - DNA, 96 bp, Homo sapiens
ctttgcagacatgatggtgataaggagcctgaggaatgtatcctgtcaggtataatgtcagtgaatggcaagaaagttcttcatatggatcgaaac

SEQ ID NO: 583692 - DNA, 102 bp, Homo sapiens
ctgcaaccaagcacctgaaacagcagaatgagtccctggaacgccagatgcgtgaaatggaagagaactttgccgttgaagctgctaactaccaagacacta

SEQ ID NO: 583693 - DNA, 82 bp, Homo sapiens
tgggggtgcgcgcctgcgacctgcccgcctggaattcagaaggagctggcggacatcactttagaccctccacctaattgca

SEQ ID NO: 583694 - DNA, 98 bp, Homo sapiens
gggaaacagatgctaatttgggaaaaagctccaggattctgacagggatgttgcgaaggtggtttagattagaatccaaacaaggaaaacgaatcaaa

SEQ ID NO: 583695 - DNA, 100 bp, Homo sapiens
agacagccatccaggaccaaccttccagttctgtctgtgaacgaggcagaaggagaagacagcctgaagaagatgcagctgatggagcttgcgattctga

SEQ ID NO: 583696 - DNA, 98 bp, Homo sapiens
accgccgcagaccccttcaagttctagtcatgcaggaacgaatgcaggaatttgggaactgagctgtgcaagtgctgaagaaggagatttgtttggag

SEQ ID NO: 583697 - DNA, 50 bp, Homo sapiens
gcggagggagccccagacacggtagagttggctttgtgggacacagctgg

SEQ ID NO: 583698 - DNA, 75 bp, Homo sapiens
aatgtgactgactagcagcttcattttgaagtgattcgttggaaaaattcattgtctctagagattgtcagcttg

SEQ ID NO: 583699 - DNA, 90 bp, Homo sapiens
cggagacttcgtgtgcggacagtgtgtgtgcagcgagggctggacagagcgggatgccaccagcttgtccaaagggaagttccaggagct

SEQ ID NO: 583700 - DNA, 98 bp, Homo sapiens
aagatttggaacctcactgaaaattggtattgttggattgccaaatgttggctctctgatgtaaaggatggagtaaatcaagcagcacctgcatttgg

SEQ ID NO: 583701 - DNA, 75 bp, Homo sapiens
gacaggcttttgctctgcgacggctgcgatgcggggattctcatcccttacagctgactcttccaggcaatttcc

SEQ ID NO: 583702 - DNA, 101 bp, Homo sapiens
cccagaattttccagtgccctgaaaaataatgtcggtgcagatctcttgtccatgtgccagcgaaacattgccctcaacagccacctggctgccactggag

SEQ ID NO: 583703 - DNA, 100 bp, Homo sapiens
taaggattccaagtaactcttatttggtcctcttcctgatggatgggaacaagccatgactcaggatggagaaatttactatataaaccataagaacaag

SEQ ID NO: 583704 - DNA, 74 bp, Homo sapiens
ttccccatttgagaccctaaaactaatgaaaatcacagcttttgggtcagaagccaatgacctggccctgaggc

SEQ ID NO: 583705 - DNA, 100 bp, Homo sapiens
aaagattgctgtccactgcacagttcgaggggccaaggcagaagaaatcttggagaagggtctaaagccgagaagccaggtgctacagaccggaagggag

SEQ ID NO: 583706 - DNA, 100 bp, Homo sapiens
ccatgaccctaatggtctttttgttcaagataaagtgattttttgcctttgttgattaactggacaaattcagctggcagagatggaggaggagctacgt

SEQ ID NO: 583707 - DNA, 82 bp, Homo sapiens
ggaaaaccaaatacacaaaaccctccacggagagtaggttcagctgcagcccggaaagaaatcataagaaacaaaattcgag

SEQ ID NO: 583708 - DNA, 97 bp, Homo sapiens
tttagaggaccactagttggaccccatcctcgtgctggaggaacaggtatttatgagcctccatttcttatactactgcagtgaaccaacattggat

SEQ ID NO: 583709 - DNA, 75 bp, Homo sapiens
ccgctgcctgctgatctgagggccaaagtttggaaggtaaaaggtgatccctctaagaaagaaatgaagaaagaa

SEQ ID NO: 583710 - DNA, 90 bp, Homo sapiens
ctcctctttatgctgctcactttcgtccaggacagtatgtggatgtcacagccaaaacgacaatgaaaagcgaaccccattgcacgccgc

SEQ ID NO: 583711 - DNA, 98 bp, Homo sapiens
ggacatcactttagaccctccacctaattgcaggattgttaaaatgagtcttcggaagcaaacccctagtgacttcttaaagcaaatcatcggacgac

SEQ ID NO: 583712 - DNA, 83 bp, Homo sapiens
aaatgaagattcagtggatgctaagccagaccggtcctcgtttgtaccgtccctcttcagacaatgcagatcttcgtgaagac

SEQ ID NO: 583713 - DNA, 109 bp, Homo sapiens
ccggccgtcccacgagctcacagagctatgaacagaatatcaaacagattggcacctttgcctctgtaattaataaaatgtctccaacatctctaaagatcacactaag

SEQ ID NO: 583714 - DNA, 95 bp, Homo sapiens
agctgcagtctaatagtaacacagagtgacttatcagatgccctggtcatcttccagctctatgaaaagatcaaagttcctgttgactggaacag

SEQ ID NO: 583715 - DNA, 100 bp, Homo sapiens
ctcgggcgactgctgctgctcctgagggtgctggaccccctgctctgcgacttcctggatttatactatggtggggaagctttctctgtagagcagccac

SEQ ID NO: 583716 - DNA, 82 bp, Homo sapiens
ccctgacaatgagaccgactgtggctgggcaccgtttgggattgaagaggttaatgaccatttgccagaaacactttcctac

SEQ ID NO: 583717 - DNA, 74 bp, Homo sapiens
ggcggcggcgccatggcagggcttgcaggtcctgcagacattcgctttgtctgggagaagaatgggcgagctct

SEQ ID NO: 583718 - DNA, 100 bp, Homo sapiens
tgttgaagaattaattttgcaattattaaatatgctatgccaagctcagccccgaagtgcttcagatgtagaggtcgtacatttcctgttgatcaatttt

SEQ ID NO: 583719 - DNA, 51 bp, Homo sapiens
cggcgagcggttccttgtgggctaggcagcgtctatcccagactaccgggg

SEQ ID NO: 583720 - DNA, 75 bp, Homo sapiens
cgaagccacctcagtgaagccactgagatacaagcgcgtggacaagtacgtagagaaatcgacactcttaatgaa

SEQ ID NO: 583721 - DNA, 50 bp, Homo sapiens
gaaatgacctgcaattcgaaaatcagcgggctacattgagagacctcagc

SEQ ID NO: 583722 - DNA, 88 bp, Homo sapiens
ccctgaagagggaagacacgcggaaacagctgacagcagccatggcgagcggcagtggagacagcgtcacccgtcggagcgtggcatc

SEQ ID NO: 583723 - DNA, 98 bp, Homo sapiens
ctagcttgataataggaccatccaaagaaaggtgttctagaacagatcagacattttgtaatgatgcctgaaataaacactaaccacctcgacaagca

SEQ ID NO: 583724 - DNA, 101 bp, Homo sapiens
cgcgcgcttgagttggtataaactcctgaagcaggatgaagttaaaggaagtagatcgtacagccatgcaggcatggagccctgcccagaatcaccccatt

SEQ ID NO: 583725 - DNA, 95 bp, Homo sapiens
cgcaacccggagtccggatccgatcccgctctgcacattccaaaggatcccatgacagattctgttgtcacgtctccttacagagtttgagcggt

SEQ ID NO: 583726 - DNA, 101 bp, Homo sapiens
catcaaatccgtgtcggagtccttacaggtacaaactgttttgaagccagttcatcataaggaaggacaagaactaactgctttgctgaatactccacata

SEQ ID NO: 583727 - DNA, 100 bp, Homo sapiens
ccgacccgagttatgcccaccctccaactttgcgacggaaatgtgtcatcgaaagccagggtcctcactgagcagcgagtcgtcccccgtgtcctctccg

SEQ ID NO: 583728 - DNA, 101 bp, Homo sapiens
ctgaggaccggcaacatggtgcggtcggggaataagaggacaaaagcatgtcttcccttcctgggtgcattggtttggatgcagcaacagctacagtggag

SEQ ID NO: 583729 - DNA, 73 bp, Homo sapiens
atggattctgcagagtcagatggtagtgtcagtggctgagtatcaccgcaggatcgatgctctaaatactgaa

SEQ ID NO: 583730 - DNA, 82 bp, Homo sapiens
tgctgttgctcttctccgccgcggcactgatccccacaggagcatcagatccatgctgctgctgactcggagccccacagct

SEQ ID NO: 583731 - DNA, 51 bp, Homo sapiens
ggagaggctctgagaggcgaggccggcacggggtcactctggtgcccattg

SEQ ID NO: 583732 - DNA, 80 bp, Homo sapiens
caggtactttagcaggacggccatcgagatcgtggtgcagatggccgcggccaacgggataacgaaggaggcccaacttc

SEQ ID NO: 583733 - DNA, 110 bp, Homo sapiens
tagtctcagaactgttccttcagccaaagaaacaagccgtggaataggtgtatcaagtaatggtgcaaagcctgaagttacccatgcagttgttactgtaccagcctatt

SEQ ID NO: 583734 - DNA, 88 bp, Homo sapiens
ggggggctagtggccacgctgcagagcctcgggaacgcagctgttgttctccggagtcggctgaaggtcagggtggtgaaggagctcc

SEQ ID NO: 583735 - DNA, 100 bp, Homo sapiens
tctgtggtgtgtttgctgttcccagctgggacgacatatatctttagcaaaggtggtggacaaatcacgtataagtggcctcctaatgaccgacccagta

SEQ ID NO: 583736 - DNA, 83 bp, Homo sapiens
actgtatggggactccaattgcttggatgacagtcaccgacagaagggtgccagaaccctgtggagcatcatgaactgggaag

SEQ ID NO: 583737 - DNA, 100 bp, Homo sapiens
ttcctgtacagcctgcagaactggcctttaccttctaatgcaaaagccgccatcaaccttcaggatgatcccatcattcaaaagtatggctctaagaaag

SEQ ID NO: 583738 - DNA, 101 bp, Homo sapiens
tacctgctgtacaccctcaacaaacaccagcgctttgggtcctcagccagcagagccacgttccttatgagcaccgtgggtttatttcattttcctacacc

SEQ ID NO: 583739 - DNA, 100 bp, Homo sapiens
gagatttccagtggacggacaacaccgggctgttaagtgggcagaccaacatccacctcagcaaaaacttcttcctgacgaatcgcgccagggagcgctc

SEQ ID NO: 583740 - DNA, 84 bp, Homo sapiens
cgcccgctggccgggctggctgcggccgccctgggccgggccccaccggacggattttttatcaagcagaaatgcatcgaacaa

SEQ ID NO: 583741 - DNA, 51 bp, Homo sapiens
acaatgcatcgctggaagtagccagttatggccacaccgtgcccttgtcag

SEQ ID NO: 583742 - DNA, 96 bp, Homo sapiens
atacagatgacttcaccacagaaactttagaatggaggctcggttcttctgacattcttaattacagaaaggagatgaagttgctggagcaggcag

SEQ ID NO: 583743 - DNA, 90 bp, Homo sapiens
gaaaaaccgatattgaagattcatttttcttttttccattcttcaggaccttcggcaagatatacacctgaagaaattgagaagctcaag

SEQ ID NO: 583744 - DNA, 123 bp, Homo sapiens
tccggcgcgggcactgctttccactcggctcctgtcgtccgttctctcaggctcccgttcagacaatgcagatcttcgtgaagactctgactggtaagaccatcaccctcgaggttgagccca

SEQ ID NO: 583745 - DNA, 101 bp, Homo sapiens
tattggatatgaaactggaagacatcctggttcaaaccttgtactactcagctgatcacaagctgcttgatgggaacctactagatggacaggctgaggtg

SEQ ID NO: 583746 - DNA, 73 bp, Homo sapiens
gacgctctgggtgaagaatggaaggctccttctcctgaaaaagccgaggaggagagtgagaggcttctgaggg

SEQ ID NO: 583747 - DNA, 100 bp, Homo sapiens
acccacctgggcctgaaaaacatgatcaaggaggtggatgaggactttgacagcaagctgagcttccgggaggcctgcgtccggggcttcttggtccgac

SEQ ID NO: 583748 - DNA, 102 bp, Homo sapiens
gcggcgccgagaggccgtgcgggacgcgggcgccaggaccggccgaacgcagagacaaatttacatgtattggagaccagaccagaagcccttctgaattaa

SEQ ID NO: 583749 - DNA, 98 bp, Homo sapiens
ctctgcagtggaccacagcattcctgaaatacatccaggaaagacatggagattctcttaaaaaggtggactataatgcgagtgcctggctgaccaag

SEQ ID NO: 583750 - DNA, 50 bp, Homo sapiens
cagtgctcaaactcaccgaccaggagttgagaagaggaggaagaataatg

SEQ ID NO: 583751 - DNA, 100 bp, Homo sapiens
ctattacaaatattccaatgaaggcaacaatgattgctgggtgagtaccgggctctacctcctggaaggacaaaatgcagaagtctcactgtctgaagct

SEQ ID NO: 583752 - DNA, 51 bp, Homo sapiens
ctgttcgttgtgctgctgcaaaggcggtggatgaattttattccaagatag

SEQ ID NO: 583753 - DNA, 82 bp, Homo sapiens
agaaaacctcatgaatagcaatcacagagactcggagagcatcactgagtgactcctctttcttcccagagtgtggtgattc

SEQ ID NO: 583754 - DNA, 90 bp, Homo sapiens
tccccccaaccagcaccagactggggctcccagaggccatttcataggaatctgactacccacttgttgatgaaccagggaagcatcggg

SEQ ID NO: 583755 - DNA, 100 bp, Homo sapiens
gatgacagagctgaggcagagggtggcccatgagccggttgcgccacccgaggacaagagtcaatacagatttgtatgtgaagctattttgaaagtttat

SEQ ID NO: 583756 - DNA, 100 bp, Homo sapiens
cgggtcttgggtcctccgagagcagcagcgctgaagaaatcaggggagaaacccctgcttggtggaagcctgatggaatatgcaatcttgtctgccattg

SEQ ID NO: 583757 - DNA, 51 bp, Homo sapiens
tctcgggcaagttctatcatactggaccttgaccctgctgttcacagccag

SEQ ID NO: 583758 - DNA, 101 bp, Homo sapiens
gaagcatatgttctagaagacattcttgagtctctttcagcgtctggattcaaaatcaaaggatatatctaaaatagctgcagatatcacccaggcagtgt

SEQ ID NO: 583759 - DNA, 82 bp, Homo sapiens
cacgattcttctaatggatgggaacatgggtgtgaaaaactcaaattactgtcttccatcatataccgcttataagaactat

SEQ ID NO: 583760 - DNA, 89 bp, Homo sapiens
gggggtcatcgacagctgcaaggaggccgtcaccttcaaggccgtcagacaaggccatttcataattctgaatcatgtctgataacgga

SEQ ID NO: 583761 - DNA, 82 bp, Homo sapiens
gggacacctgcggccccgcggagctgcccggaggtccggccgtagcacctccgcgccgtcgccatgtcgcggtttttcacca

SEQ ID NO: 583762 - DNA, 101 bp, Homo sapiens
agaagcctacatggacatgtcctgtgtgtgacaagaaggctccctatgaatctcttatcattgatggagagaagaagaaggaggttcctgctgtgccagaa

SEQ ID NO: 583763 - DNA, 82 bp, Homo sapiens
gtggacctaattgactgcttgtcccagaagcaatttaaggagcaggcccggaggctgtttgatgtcctgcacgagcccttct

SEQ ID NO: 583764 - DNA, 90 bp, Homo sapiens
gggggcaccgccaccctgaccgggacgggacccaacgtggtgctcctgggccagatgaacgagctacctccgggatgtgacaggcaacta

SEQ ID NO: 583765 - DNA, 87 bp, Homo sapiens
ggatggggagtcgctccagatgttccaggccctggttcactggttgaggacccagttcccatctttggatatagaggtcgatggtgg

SEQ ID NO: 583766 - DNA, 83 bp, Homo sapiens
ggggaagcgggacaatcgggtgctgcatcttcctcccgtgaggctggccgagctccacgctgatctgaagatacaggagaggg

SEQ ID NO: 583767 - DNA, 119 bp, Homo sapiens
ccccacgatcaagaactaggttttttcctagaaacaggacttcagagagcccatgtcctctatttcaaaaatggaataactgaagtgaagtgatggactccgatttggagagtagtaag

SEQ ID NO: 583768 - DNA, 90 bp, Homo sapiens
gcctcagcctccccagtagctgggactacagaatttggattgggtgcctctcaccacactgtcacactgcaagtcactgaggacaatgac

SEQ ID NO: 583769 - DNA, 100 bp, Homo sapiens
ctgcccttccatctacaaaagctgagtttacttctcctccttctttgttcaagactgggcttccaccgagcaggtaatcgtgctgtccacacgactcctg

SEQ ID NO: 583770 - DNA, 100 bp, Homo sapiens
ctgccggttcccccagctctgggtacccggctctgcatcgcgtcgccatgatgggccatcgtccagtgctcgtgctcactgcgtgttcatctggcacctg

SEQ ID NO: 583771 - DNA, 51 bp, Homo sapiens
ccacagccgcgtggagatcatggtcaaggtaatagcctgcagctggtgttt

SEQ ID NO: 583772 - DNA, 74 bp, Homo sapiens
ggcgccccgccggtcacctccgcgcggacaccagtcacgccgatgatggagctgaagcccaacgcaggtagcga

SEQ ID NO: 583773 - DNA, 83 bp, Homo sapiens
ccttgcctagtgggccttccttcccaggaagtgggaaaactcttgcctttgccatcccaatgattcatgcggtgttgcagtgg

SEQ ID NO: 583774 - DNA, 101 bp, Homo sapiens
aaggctgaaatcattgaagtgcttggagtgcagaactgaaagagcattatgcacaatcgctgagataatggaatcaacctgtgtccatcgatggatgaatg

SEQ ID NO: 583775 - DNA, 75 bp, Homo sapiens
agacaagctcagaactgagaagctgtcaccacaggcacgtgggaaaaagcgccagataggctggttcccagctaa

SEQ ID NO: 583776 - DNA, 82 bp, Homo sapiens
cacagaggaaggacagtggagtctggcatcttattggggaacaccaacacgaatgttcccacaccactccataactgagtct

SEQ ID NO: 583777 - DNA, 75 bp, Homo sapiens
aattgcagcaccgagctccgcctgttgtaccagctggtttttctgctctccgaaaccccgagatgcccctgtcct

SEQ ID NO: 583778 - DNA, 90 bp, Homo sapiens
ggatacaaagtcagcccaggcagacctccaggcttcaatggctgagaatagtatacctctatacactaccgcttccatgggaaatcccac

SEQ ID NO: 583779 - DNA, 83 bp, Homo sapiens
aggaagaaactcttccagcattacatatagagcttgatgatcaggatcctcatgaccagccaaagagaagaagaattaggaag

SEQ ID NO: 583780 - DNA, 110 bp, Homo sapiens
caggtccacccatctggccgggcagtaccttcttcaagagaaatggagcccttctccaagggtctagacagtttcaaagtgaaacagaagttcttcgctggcagccagga

SEQ ID NO: 583781 - DNA, 75 bp, Homo sapiens
gcctctccgcccggcagccaccccatctgggaagcaattaagttggaatatgcaaggttggttaagttggcccaa

SEQ ID NO: 583782 - DNA, 82 bp, Homo sapiens
tcactgggatgatgcgctgcagccagctggcccccagggccctgcagccactgcacccacgtcctttgagggtcctttcggg

SEQ ID NO: 583783 - DNA, 97 bp, Homo sapiens
agacacatcgttcagcagtcgcaggggaagacagctcccacaagtgccagtgagaagcggcagtatagaacaaggacacattcagctaacgtatttt

SEQ ID NO: 583784 - DNA, 142 bp, Homo sapiens
ggcaaagcaaaaacaagaaaacagtaaactcacctctgtggttggaacaatcctgtattcttggtattttggcctctccccagtctgctcctggaaacttggacaatagtaaaagtggagaaattaaaggtaatggaagtgg

SEQ ID NO: 583785 - DNA, 100 bp, Homo sapiens
tgctaggcattgaggagaaggcagcggacaaagaggatgaaacaggcgcctatttaatcgacagagaccccacctactttgggcctgtgctgaactacct

SEQ ID NO: 583786 - DNA, 100 bp, Homo sapiens
ctgcacctcgaaggctgacaagtcatctgggaaccaaggaattgaatgatctggcacgggaccctccagcacagtgttcagcaggtcctgttggagatga

SEQ ID NO: 583787 - DNA, 75 bp, Homo sapiens
taacagctggagagaacagttcattgaagctatcactgtcagtgctggtaactaggatttctacctcaaccgcga

SEQ ID NO: 583788 - DNA, 98 bp, Homo sapiens
ccccagcaaatcgagaaaaacctcagcgacctgatcgacctggtgcgttccatggatgaactgaatcatgattttcaagcacttgctctggagggaag

SEQ ID NO: 583789 - DNA, 75 bp, Homo sapiens
cctcagccgcctcctagcggcgcggcgctcgctcctacgtttgaagaaaacaggtctgaaacaaggtcttacccc

SEQ ID NO: 583790 - DNA, 75 bp, Homo sapiens
tacagaggaatagtctacaaaggaagacttgtaacctggagaagaggggcagacgtgactggggggaccatggcc

SEQ ID NO: 583791 - DNA, 74 bp, Homo sapiens
caacattcagacccatttccagtcatgagtgtatgtggaatttgatgatcttgaatgggataaacgagagtggg

SEQ ID NO: 583792 - DNA, 50 bp, Homo sapiens
ggaaattcacagaagctatagttgatactgtggatggtagggaagaaaag

SEQ ID NO: 583793 - DNA, 100 bp, Homo sapiens
gctctacaatctctaagagacagagaattctctacattttatgaaagtctcaaatatgccagcggagaccctgttaactactacgttgacactgctgtgc

SEQ ID NO: 583794 - DNA, 97 bp, Homo sapiens
aagaggaagaaaggcggaagcaggaagaattgttacgcaaacagctataataataggcggagtcgatctggaacatacagctcgagatcaagaagca

SEQ ID NO: 583795 - DNA, 90 bp, Homo sapiens
cctcatcccagccatgtcatcttatctacgaaatgattcaggtaatgagaggccctaagatcccagaggatgccataagaggaaaagtca

SEQ ID NO: 583796 - DNA, 101 bp, Homo sapiens
cccgcccggaaagctgcccagccaccagcaaccccccagattcttcgctgctgctgccttaccgccgagaaccaccacccgccaggcgtcttgcggccaca

SEQ ID NO: 583797 - DNA, 75 bp, Homo sapiens
agagatcccggctcccagcccactgagtggcttcagcctcgctgggttccgagtctgaggaagacataaccttgt

SEQ ID NO: 583798 - DNA, 74 bp, Homo sapiens
tggctccgtgaaccttagggacaacaccgggacacccgcgaggccggaaaatgcagcgatggattttgggtggg

SEQ ID NO: 583799 - DNA, 90 bp, Homo sapiens
tttcccctggccttctgtatcttcatggtgcggctcatcttcgagagcaccatatgaaggcggagtatggaaagttagagtggacctacc

SEQ ID NO: 583800 - DNA, 75 bp, Homo sapiens
gtgccctccctcccactggctcttcgggcacatccaggagattcggtttatgctagagacgatgttggccctgaa

SEQ ID NO: 583801 - DNA, 75 bp, Homo sapiens
ggggaccttgaagacgacttcgaccctgcccagcacgaccagctcatgcagagttgaagtattgataacaccaag

SEQ ID NO: 583802 - DNA, 75 bp, Homo sapiens
atgaaggtggtgaagcccaagaaataatcacttccatcaaggataactctaggattgctctcagtcaaaaccaac

SEQ ID NO: 583803 - DNA, 100 bp, Homo sapiens
gcctcgcttggccgccagttcttctgcagccgaaggcgtgtgtggattctcatgccatataacttgtgtaaacaaagctccaaccacttgtccagttcct

SEQ ID NO: 583804 - DNA, 100 bp, Homo sapiens
cgtacgagttcaacctcagcgctctgaacaaaccagtccagctacgggggcccagccagccagcagctgagtgggggttacggaggcggctacggtggcc

SEQ ID NO: 583805 - DNA, 82 bp, Homo sapiens
aatctttggagccacctctctacagaacactggagctttgtctcctcagcactctgctgtcactcaaggaagtatcatcaag

SEQ ID NO: 583806 - DNA, 82 bp, Homo sapiens
tccatcagtgccagcataccaatgaacctctattcaactacgagacaatgtgattacacctcgagacacaacaatgaccttc

SEQ ID NO: 583807 - DNA, 90 bp, Homo sapiens
cagatgttgtcaaggtggcctaccaggaggccaggggtgtcgccatgcacacacatgccctcttggttctgtttctttgaagaaccccag

SEQ ID NO: 583808 - DNA, 73 bp, Homo sapiens
gggggggaagtgactgggcggtgccggcgccggagacgatgccgtttattcatgtgattgaacggcgtgctct

SEQ ID NO: 583809 - DNA, 83 bp, Homo sapiens
gcgagagaaggaaaatgcgcgtcccgggcgcgggtgtcgtgaaaactacccctaaaagccaaaatgggaaaggaaaagactca

SEQ ID NO: 583810 - DNA, 101 bp, Homo sapiens
ctcgtcctaatctcaatcttactgtactggaaacgtcaccggaatcaggaccgagatatttggtttccaggcaggactgacgtctttggattgcagtggat

SEQ ID NO: 583811 - DNA, 100 bp, Homo sapiens
ggcccgggctgcggcgtgtgcgcgcccgccagctgctccggagatacgatcttgagccagatgattgtgcatccatttacatctttaatgtagatccacc

SEQ ID NO: 583812 - DNA, 100 bp, Homo sapiens
cctggccatggtggtggacattgtgcaggagctgaagcagcagaaccccaggctggtgtacgcagaaacactatggagtgttctgggccacaagattcca

SEQ ID NO: 583813 - DNA, 87 bp, Homo sapiens
gcgctagccctgcagacagaggtgtgctgacgacctgctacaacagaaaaaatcccgttttgtcaacctaatgaagcattcaaagaa

SEQ ID NO: 583814 - DNA, 98 bp, Homo sapiens
cgaattcagaaggatatcgacgtcgtgatccagaagtccagagctgaggactgcctgtttgcagggcggcaccttcctacttctgcccagccacagcc

SEQ ID NO: 583815 - DNA, 100 bp, Homo sapiens
caaaggcatcaggaaagtgtacgcctgctcgtaaaaatgcatttgcaaagggagaaaatgaaggccaaacagaagcaggctccagcttctgcaaaaactt

SEQ ID NO: 583816 - DNA, 74 bp, Homo sapiens
gtcggcccggggctcggagaatgggcaggtgtaatcctgagagattcacatggtgttgcacaagtacgttttgt

SEQ ID NO: 583817 - DNA, 101 bp, Homo sapiens
tgccgagcgcagagcgccgcgcgttcgcgctcaagatcaacaggaaacttggatttaactggccagaagcaggtattcaaagcagagaacaatccctgggt

SEQ ID NO: 583818 - DNA, 83 bp, Homo sapiens
gtacctctccttttccctctccctttccctaagatgagattgtggggaacctgggtgaaggcacctttggcaaggtggtggag

SEQ ID NO: 583819 - DNA, 75 bp, Homo sapiens
gccggaaggccatgaagcagggcttcgagttcaacatcatggtggtcggtgtgggcccatcgctggatggatctg

SEQ ID NO: 583820 - DNA, 80 bp, Homo sapiens
gccagttttgaaatcgacacacaaagaatagagttgagcctgtgggacacttcggactcggtgaaatacctggagtgctc

SEQ ID NO: 583821 - DNA, 98 bp, Homo sapiens
atgggccagaacgacctgatgggcacggccgaggacttcgccgaccagtattctaccttgtaaatactgttatttgtatatactgtaaatgatgacat

SEQ ID NO: 583822 - DNA, 50 bp, Homo sapiens
gtttcctttcttgaagtgcccttatcagacggagtcttgctctgttgccc

SEQ ID NO: 583823 - DNA, 75 bp, Homo sapiens
cgttgtggaccaccaaacagaactttctaatttagccaaggaaggccctggccaacgtcaacattgggagcctca

SEQ ID NO: 583824 - DNA, 97 bp, Homo sapiens
ggagaagaccggaccaatgaaagaaatcaaccttgctcctgacagctcatccgtggttgtatcaggacttatgggcaagtgtccagagaatggctgg

SEQ ID NO: 583825 - DNA, 78 bp, Homo sapiens
gaaagtgacaaaacttttattccacatttggaggggttgagcattcatgatggtacctggaagtcagcaatttatggt

SEQ ID NO: 583826 - DNA, 80 bp, Homo sapiens
agaaaaggcaacatcctgtcacaggccatgctctggcaaaaaccaatggctgccatccggaagaaactggtgattgttgg

SEQ ID NO: 583827 - DNA, 82 bp, Homo sapiens
gagaccagacctgcaagctctttgacacacagcagttcttgtcagatggacaagaggaaagacccttcttccgttgatatca

SEQ ID NO: 583828 - DNA, 83 bp, Homo sapiens
ctgcctgcccgcgcctagaccccattcaacaatgcagatcttcgtgaagactctgactggtaagaccatcaccctcgaggttg

SEQ ID NO: 583829 - DNA, 90 bp, Homo sapiens
tgcacatccaggctggtcagtgtggcaaccagatcggtgccaagctatgtttccagtgtcctctgggtgtttccaagagcaacaagaaac

SEQ ID NO: 583830 - DNA, 82 bp, Homo sapiens
gcgagtgtttgtggtggcagctgggactgttgaggtgtgaacgtggaccctgaggggtcgggccccggctcagtggtcccag

SEQ ID NO: 583831 - DNA, 100 bp, Homo sapiens
gaagtacaacgtgcgatccatgcccatccgaaaggatgatgaagttcagataatgctcggaatatttttcaatgtccattccgctgtgttgattgaggac

SEQ ID NO: 583832 - DNA, 50 bp, Homo sapiens
gggaaaagcgaggcaaggcaggcggtaactctcaggagccttctccgcag

SEQ ID NO: 583833 - DNA, 100 bp, Homo sapiens
cttgcccttagtggccgtcttttgcctctttctctcaggctttcctacaactcatgcccagcagcagcaagcagatgttcagcctgttgcctatgaagag

SEQ ID NO: 583834 - DNA, 96 bp, Homo sapiens
aagcgatggctgcttacttcacagcagcacagctgatgaaaggttttttgtagcatcagatccaacagttaaaacagatcgactgtggcacgacaa

SEQ ID NO: 583835 - DNA, 50 bp, Homo sapiens
agcgcgagcttgaacgcagcgtgcttctccaggcagccaccaactaccac

SEQ ID NO: 583836 - DNA, 78 bp, Homo sapiens
tgactaccctggaagtagcaggccgcatgcttggaggtagagtacagagagatggatgaaagcttggccaacctctca

SEQ ID NO: 583837 - DNA, 75 bp, Homo sapiens
cctacatgcttcctgctgtggctgtctcggaacccgtggtcctccgcttcatagatgaagcatctggtttttgtt

SEQ ID NO: 583838 - DNA, 90 bp, Homo sapiens
gagctggaggagcaccgcctgcggaaggagtacctggagtacgaggtacaaagcactgggaatacaaccttgaacaagacaagaatcctg

SEQ ID NO: 583839 - DNA, 98 bp, Homo sapiens
aacagaatgctaaggaagctgtggcaaattactacaagggaagacataaattcaaagcaggttgctacagtgaaagcagacctggagtctgaatcttt

SEQ ID NO: 583840 - DNA, 90 bp, Homo sapiens
gaagaaagacagctttgtggaagagaaaatttttactactggagatgtcaacaaagatgggaagctggattttgaagaatttatgaagta

SEQ ID NO: 583841 - DNA, 100 bp, Homo sapiens
gtggaatatgccaaggaaaaactggagagcttcatcaaaaatagtgatagctttgataagtgagaaaactgatgcttggagatgtgatcactgcccaggg

SEQ ID NO: 583842 - DNA, 50 bp, Homo sapiens
atcaggagttcgagaccagcctgaaggaaggggagttcaccctgcacggc

SEQ ID NO: 583843 - DNA, 82 bp, Homo sapiens
tcaaagagctcatcagcgagggggcagacgtcaacgtcaaggacttcgcaggcgaccactttatcaagttcttcgctccgtg

SEQ ID NO: 583844 - DNA, 100 bp, Homo sapiens
gatagccaatcggaccaaaaattcactcactttgcaatggaaggaaatgtgacacctgctcactatgatgagcagcagaacttttttgctcagataaaag

SEQ ID NO: 583845 - DNA, 75 bp, Homo sapiens
caagtcctggctcagcaagactctcgagcccattgtctttctcgagaagcaggtggaaacatgagcattcagttt

SEQ ID NO: 583846 - DNA, 90 bp, Homo sapiens
gaagtgcctcctcttcaacatcctcccaaagggacagtaggcaggtgatgtttgcagacagaaaaagtaaactgtcaaggaattcagagc

SEQ ID NO: 583847 - DNA, 74 bp, Homo sapiens
ccggctatggccgtgccctggggctgagccctcagttgcagatctgatctcttctgaacacctcatcgtgtctc

SEQ ID NO: 583848 - DNA, 75 bp, Homo sapiens
cacgattttcccgagagttcacagagggaagtcttgccggaccatcacctttgagcagttccaggaggcgctgga

SEQ ID NO: 583849 - DNA, 75 bp, Homo sapiens
gggctcaagggatcctgccacctcagctaaggcctgcagtagctaagactgtgctgtgctggccattggtgaccc

SEQ ID NO: 583850 - DNA, 100 bp, Homo sapiens
tagaaagccaacagacggtgcttcctcatcaaattgtgtgactgatatttcccaccttgtcagaaagaagaatagcactgctgtcactcctgcagtgctg

SEQ ID NO: 583851 - DNA, 83 bp, Homo sapiens
gggagtgatttgcgccatcatcctcatcatcatcatagatttgaggcttaagcaacttcttccggggaagagtgccagtgcag

SEQ ID NO: 583852 - DNA, 75 bp, Homo sapiens
gcaagactccacctcctggtgaagaaagcaaacagtggaggcctgaattttgatctatgttctacctacatccag

SEQ ID NO: 583853 - DNA, 100 bp, Homo sapiens
cgcaaggtgtccacgtcgggtcagatccgacagaaggttttcatctctgtgaactgcttaagcacagatttctcttcccagaagggagtgaaggggttgc

SEQ ID NO: 583854 - DNA, 124 bp, Homo sapiens
tcccgcaacccgataccatcggacaggatttctccgcctcagcccaacggggaggagcaggccgggctctcgccatgggtcactgtcgcctctgccacgggaagttttcctcgagaagcctgcg

SEQ ID NO: 583855 - DNA, 83 bp, Homo sapiens
gtggaggccatcaggggccttgataacacagagtttcaagggccatgttcaccggcggcatgcgggaggcaagccaggacgtc

SEQ ID NO: 583856 - DNA, 100 bp, Homo sapiens
ctcgagtcctgccgcctcccgggagtgccgtgcgccgcagcccgggcccaggccccggcagcgcctgggacaaggtgagacgtggtcttgtaacacagtg

SEQ ID NO: 583857 - DNA, 135 bp, Homo sapiens
gcacggtcgggagtccctctccccagcccagcccgcccggagtcttcgggggacacttcagaaagatcggtaatctatgccagcaattatgacaatgttagcagaccatgcagctcgtcagctgcttgatttcag

SEQ ID NO: 583858 - DNA, 100 bp, Homo sapiens
ggtgtcctagaattctgcatcattacaactgatgaaaatgaatgtaattggatgatgtttgtgcgcaaagccagtaaatgaagcatttggaagacgagag

SEQ ID NO: 583859 - DNA, 80 bp, Homo sapiens
tgggtgctgggacttcccgtccgcggcgtggagggcaacctgtgaaaagctgaacaggtccaattctgaacttgaggatg

SEQ ID NO: 583860 - DNA, 75 bp, Homo sapiens
aatgctgtaggctgctgtggtttacaggttgaactcccaccacctgatcttggaccaagttctgcactaaatcag

SEQ ID NO: 583861 - DNA, 100 bp, Homo sapiens
tctctccttgctgcatctgcagcaacgtcggatgcaggggcaattccaaaagtcttcagatttccaaaaggaaggactgcagcagacatttctgccccca

SEQ ID NO: 583862 - DNA, 83 bp, Homo sapiens
caagacatttcttcggcattctgcaacaggcatggagagtagaaaactgatttctgctacagacattcagtactctggcagtc

SEQ ID NO: 583863 - DNA, 88 bp, Homo sapiens
caggaccagttcgcagtagcagtggaatgggaggaagaggctacaagatcaagctgcagagaccattgaagctctgcatgcagcaggc

SEQ ID NO: 583864 - DNA, 101 bp, Homo sapiens
ggggcgatttacagatgcaggatcggaaagaatcccggccagacgtgcgaacagctccagctggtgctgggcctaaaggagataacatttatgaatggaga

SEQ ID NO: 583865 - DNA, 100 bp, Homo sapiens
cttttgtcgcgctgggacctaccctgactacgggagttgggaggacccgggacaccgcacagccgggaaatggcaatggacctcatcatgaccgttgctg

SEQ ID NO: 583866 - DNA, 100 bp, Homo sapiens
aaggagcagtatgaaaggctgaagctgacatggcagcaaagatcgcggattcaggtgtggctctatgagcaagtgaatatgcggatagaaggctgtatca

SEQ ID NO: 583867 - DNA, 83 bp, Homo sapiens
gcgaccggagcgaacgccacgccgttgggagtacgaccccagcaaagcgacctttgtgaaggtggtgccaacccccaacaatg

SEQ ID NO: 583868 - DNA, 100 bp, Homo sapiens
cgcagctgcgggtccgggattcccagccatggcagattcctccgggcagcagggttcatcatgcctagtggcgtataagaagaccccgccaccggtccct

SEQ ID NO: 583869 - DNA, 83 bp, Homo sapiens
cccgggatctcggctgtccttcctcccggtttggtgcacctcgatttggaggaagtagggcagggcccttatctggaaagaag

SEQ ID NO: 583870 - DNA, 101 bp, Homo sapiens
actctttcttctctgcaaaagaagagaatattatttattccttccttggtttggctcctcctccagactcaaaggcaggagaccgggtgatggtgttgaac

SEQ ID NO: 583871 - DNA, 74 bp, Homo sapiens
tttccggtcaatgagcactattttggattagtcaatgtgaagaatatgtaaagagcctaactgctaaccccgaa

SEQ ID NO: 583872 - DNA, 90 bp, Homo sapiens
gtctattttggagtggtgttttatgtgccttcagtttctcagctgcagcaggagattaccagatgaggacggggacttggttgccttttc

SEQ ID NO: 583873 - DNA, 100 bp, Homo sapiens
actacaacagcagtcgcgaggacagcctgcaggatgcctgggactacgtgcaggctcaggtcagcctcagatgtcacaacctctgtgaagctctccccag

SEQ ID NO: 583874 - DNA, 74 bp, Homo sapiens
cgcccggaccccgactcgcccatccggaagatctcgtcaaggggggccctcagcctcttggccttgaacgggct

SEQ ID NO: 583875 - DNA, 99 bp, Homo sapiens
atttgctcaacatggcctacggcgtcaagagctgcccctgagcctggacctgcccagcccccggcccttcgctttgcctctgggcagccctcgaatccc

SEQ ID NO: 583876 - DNA, 98 bp, Homo sapiens
cggcctcttcctgttgcaccaggttcttcgaaaactgaagcagatgttgaacaacaaggtggattctccacagttttcctcgtgcgtactcacggtgg

SEQ ID NO: 583877 - DNA, 80 bp, Homo sapiens
aggagactcctgaccctcagaatgattactttctatgaagacaaaaattttcaaggccgtcgctatgactgtgattgcga

SEQ ID NO: 583878 - DNA, 100 bp, Homo sapiens
gcgcctgctgccgggttgcgctccgtgcacctcttgcggttgctgtctctgctggccttcatctgtgaagaagttgtatcacaatgtactttatgtggag

SEQ ID NO: 583879 - DNA, 100 bp, Homo sapiens
aatctgtttgaaggcatgatatggtattatagctgcaaatgtccttgtattctgtttatggagagtaccttctctgcagcggacaatgatcagatatttc

SEQ ID NO: 583880 - DNA, 82 bp, Homo sapiens
cagctccgaaatcaccaccaagtttaagctatgaagaaggacatccctcacactctgaaacagatctccttcagagacagag

SEQ ID NO: 583881 - DNA, 130 bp, Homo sapiens
ccggcacgcagccttgcgcaagctcaacgacctggtgaagagggcccggctggtgcgagggacaactgtgggaaggctgggaaggttaagaaacaacagaggtggacctccaaaaacatagaggcatcac

SEQ ID NO: 583882 - DNA, 100 bp, Homo sapiens
gcggaaggtgggaaagggccggaaaacacacgttcctccgaaaccggtttgcaagtccttgtagagatgaggacggggacttggttgccttttccagtga

SEQ ID NO: 583883 - DNA, 129 bp, Homo sapiens
tcttaaatacttgctttactggaaagacccagaatatgccaagtatctaaatgcctatgattacacaataccacctatggagaaagctgttgtgaaaacggacattcagatagcgctcccttctgggtg

SEQ ID NO: 583884 - DNA, 100 bp, Homo sapiens
gggaaagcggcccccagaaccgaccacaccgtggcaagaggacccagaacccgaggacgaaaacttgtatgagaagagtttggttatctgggacaatgac

SEQ ID NO: 583885 - DNA, 75 bp, Homo sapiens
aggactgcgcccccgggagcgggcgcccagaggccttcatgccccgaggactagcagacaaacaaggacctgagg

SEQ ID NO: 583886 - DNA, 100 bp, Homo sapiens
cccatcacctacccgcagggcctggcactggccaaggagattgcaaattgtggctactaatttgccccctgaagatcaagatggctctggggatgactct

SEQ ID NO: 583887 - DNA, 82 bp, Homo sapiens
ccggtggtgggcgaagtgtacgatcaaggtccctgtgcgttttattgcgacctgccggtgggaactttgtctccgagtcgga

SEQ ID NO: 583888 - DNA, 82 bp, Homo sapiens
cgctatcctgccaactctatcgtggtcgtaggaggctgtcctgtctgcagatacagatcacttggattcagtcgagtttgct

SEQ ID NO: 583889 - DNA, 100 bp, Homo sapiens
cgctggagctgggtcagtccgccgctcaccccgcggccgcaccttcccgccttctcagatgtgaagttcatttccaatccgccctccatggtggcagcgg

SEQ ID NO: 583890 - DNA, 100 bp, Homo sapiens
gtccgccccgcgtctccgcagcgcgcccaactgcatcctcctggccatgttcctcgtccactacgggcatcgggtcgataaagacaggagtggagtgata

SEQ ID NO: 583891 - DNA, 98 bp, Homo sapiens
ccgcacaggcgagggcgccgtcagcctcatggagcggcggaggctcaaccagctgctcctgcccctgctgcagatatatttttgccatcatggatcag

SEQ ID NO: 583892 - DNA, 50 bp, Homo sapiens
cttgcagttaggtcaagtggagggggggccctcagcctcttggccttgaa

SEQ ID NO: 583893 - DNA, 82 bp, Homo sapiens
aagaggtgtcggaggtctcatctttgaactactgccggagcttctgccagatgaggtggaaagtgagaaatggtacctgtct

SEQ ID NO: 583894 - DNA, 74 bp, Homo sapiens
ccgaagcccagggagagcaaggcgcgcggcgactccgggtcgagctgtgcagttttagcgggtacaagatctac

SEQ ID NO: 583895 - DNA, 100 bp, Homo sapiens
cgcccctgtcccgccggggagcggcggcggccttggactttgctgtctttcctcgcggagacaggagcagtctcacaggtgctggacagcctggaagaga

SEQ ID NO: 583896 - DNA, 75 bp, Homo sapiens
ctgaagtcctccgggacttcccagagaattggcagagggggtcgatttgggaggaaaggtgtggctataaacttt

SEQ ID NO: 583897 - DNA, 75 bp, Homo sapiens
ccgccgccaagagtgagcgagcggacccgcgatgggactgggaggtgctggtcctagggaagctcaagtgggacc

SEQ ID NO: 583898 - DNA, 75 bp, Homo sapiens
cgagggttcccgggattggaccgacgcagccatggctccttcctcagagaagcttcctgttatgtaccttatgga

SEQ ID NO: 583899 - DNA, 51 bp, Homo sapiens
caatgccaggctgcgcagtgaagaaaatgactggtgccgacaagaaagccg

SEQ ID NO: 583900 - DNA, 101 bp, Homo sapiens
tgtttctggaagactcatgggctctcctccaggttgctgaagcacatgtgcctaatttcatttttgatgagttcagaacagtgctgtaactgtttttccta

SEQ ID NO: 583901 - DNA, 139 bp, Homo sapiens
aaatcatctactcagtttggatcctacaagcaagctgaatggaggccagatagtaccatgatagctgtatcaaagtccaaggcttgcgagaaggtcatttccgtgggtcaaacggtcatcacgaagcatcggaacaccc

SEQ ID NO: 583902 - DNA, 74 bp, Homo sapiens
cgcgggcccgcggacccagctgtcaggcaaggtgaaaggtgtagcagtcactcggcctacacccacagcatcga

SEQ ID NO: 583903 - DNA, 100 bp, Homo sapiens
agttggcctacacacttcttaataaactggggaccaaaaatgaacctgtgttaaaacctggagacagggaggaccagtatgatcatttggatgctgctga

SEQ ID NO: 583904 - DNA, 98 bp, Homo sapiens
aaacatcaaagaggtctagcaaaggagcccagcagccggggccgccctattacaccgacccaggaggaccggggatgaaccctgtcgggaattccatg

SEQ ID NO: 583905 - DNA, 50 bp, Homo sapiens
ggggaacggaggccagagctgcgagaccaaggacaggccactacaagatg

SEQ ID NO: 583906 - DNA, 100 bp, Homo sapiens
gaccgcaggaaggactggggccacgtggagctgctggaggcctacaaggagaagatgaaggagctgtcggtgctgtcgctcatctgctcctgcttctaca

SEQ ID NO: 583907 - DNA, 98 bp, Homo sapiens
ggacatcctggaagctgggaaatggagtaaaactgcaactttcacggatgccaggatcaggaccatgaatgaagttataactggtataaggataataa

SEQ ID NO: 583908 - DNA, 75 bp, Homo sapiens
cacaagcagaaataagagaaataaaacaaaggatgatggaaatggaaacacaggccacggacacagtcattccct

SEQ ID NO: 583909 - DNA, 74 bp, Homo sapiens
cgggttctgcccgcacggtccaatggccggggaggcggaggcttgaccactatgctatcatcaagtttccgctg

SEQ ID NO: 583910 - DNA, 90 bp, Homo sapiens
cagctctgcagccacatactatccgtttgttcaggaaccaccagtgacagaatacacaccatctcagcaaggagtggcattcaactctgg

SEQ ID NO: 583911 - DNA, 50 bp, Homo sapiens
gaactagctgctgctaatcaggagaggaagaacttgtcgcttttcctaag

SEQ ID NO: 583912 - DNA, 50 bp, Homo sapiens
attcagcttctgcggcagtttggaaaggacagtcattttgtttactcatt

SEQ ID NO: 583913 - DNA, 100 bp, Homo sapiens
ttttctctgtctgtcttccaccactggcagattgtggacctggacactaaaaggaatcagaatcgagagggcctgagggccctgcagaaggatctcagcc

SEQ ID NO: 583914 - DNA, 51 bp, Homo sapiens
gtcatttccttggagatcaacagatgagaagcccaaggtcaaccccaaact

SEQ ID NO: 583915 - DNA, 90 bp, Homo sapiens
agtcagccatcgtgctgggggacctgaagcttaggaagttcgtcttctccacggaggagagagtaaatgaatcatcacattatgatctag

SEQ ID NO: 583916 - DNA, 74 bp, Homo sapiens
cacaggccatgctctggcaaaaacagtacagttgtgaatttggctccgcgaagtattatgcactgtgtggcttt

SEQ ID NO: 583917 - DNA, 90 bp, Homo sapiens
acggcaaaggtgtcgtggtggtcattaagcggagatccggtacttttaggttgaaatacgcccctccagcagaaagtctggactccacag

SEQ ID NO: 583918 - DNA, 83 bp, Homo sapiens
tgaagagcgacaagccgctggcagccgcggatctcaccgccgctcagggaatgggtaccacagaccatgtcatcgtcctggcg

SEQ ID NO: 583919 - DNA, 95 bp, Homo sapiens
caaatactaaaatccagatgtcatattcagtcattgctagaatcgtggatggaagcagattcactgagttcaaagccttttatggagacacatta

SEQ ID NO: 583920 - DNA, 98 bp, Homo sapiens
acttgatgttaacaaatgtgagattgccaggatcaagcaccccaacattgtagccctggatgacatctatgagagtgggggccacctctacctcatca

SEQ ID NO: 583921 - DNA, 96 bp, Homo sapiens
catgtctattgtcagagcactatgctgggtatagaacttgaccagttagacttacgaagagatattgcctacaacttgtctctcatctatcagagc

SEQ ID NO: 583922 - DNA, 157 bp, Homo sapiens
cccttcccggaccccccagcctgtcttctggcagcgggtccagggagctgctgggcgccgagctccgcgcttcccctagcagagatctggctccacaaggaggcccagaaggagggctggagcaaagctgccaagctccaagggaggaagaccaaag

SEQ ID NO: 583923 - DNA, 100 bp, Homo sapiens
ccacctcggtcgcgatgggggcgcaggaccggccgcagtgccacttcgacatcgagatcaaccgggagccgggtttaccgacaagactgtgaaactttcg

SEQ ID NO: 583924 - DNA, 90 bp, Homo sapiens
ttctgcagatatgaccattaaactatgggattttcagggctttgaatgcatcagaaccatgcacgctgcaagctttcttcctggtggcag

SEQ ID NO: 583925 - DNA, 87 bp, Homo sapiens
cgcaaccattgacgccatgtcgggttattcgagtgaccgagaccgcggccgggaccgaggcgagggcggcactgctcacaggacggc

SEQ ID NO: 583926 - DNA, 100 bp, Homo sapiens
ctgatgatcacgcagctggctggcttcagtggaccagcacctgaatggacagaagaggacctcagccaactgacaagaagtatggttaagttcccaggag

SEQ ID NO: 583927 - DNA, 100 bp, Homo sapiens
ccagccacagcctcccgcgcctcgctcagctccaacatgggtgtccatcgcgcttccttcactgccttgatcatgtcggggtcaccacctgcgggggttt

SEQ ID NO: 583928 - DNA, 82 bp, Homo sapiens
ccagaaacgtcactatcaagaagaggaagcagaccagcccactacagagccaggcatggtcctggacagtgtggaagcagga

SEQ ID NO: 583929 - DNA, 90 bp, Homo sapiens
gaaggaaccaattccggacacataacaagcagcagtgaggacaccaaagttttggcaagcgttctgcaggaagttttaggcgtggctgtg

SEQ ID NO: 583930 - DNA, 100 bp, Homo sapiens
aagcagcagaagatcgagcaggagcgcaagcgccggcagaagcaccagatgaagatgtgtgtgtctttaagtgctcagtgtcccgagagacagagtgcag

SEQ ID NO: 583931 - DNA, 51 bp, Homo sapiens
ctggtgcatgctgatgacgaaaaacgacaacttataatgggacccaaaggg

SEQ ID NO: 583932 - DNA, 100 bp, Homo sapiens
ttctcttccttcgctaacgcctcccggctctcgtcagcctcccgccggccgtctccttaacaccgaacaccctgtgtcagcgtgttatgatgccgtcccg

SEQ ID NO: 583933 - DNA, 98 bp, Homo sapiens
cccggctgccctgcagtcgcctccaacacccgctgctgcccgcccgctgcctgcctgcctggcatctctctctcccgacgccatggagttggtgctgg

SEQ ID NO: 583934 - DNA, 75 bp, Homo sapiens
gtgcgcaaacttgacactcaccctgaccgattcgacggaggcgccttgcacgacttgctggtggacagacctctc

SEQ ID NO: 583935 - DNA, 73 bp, Homo sapiens
gaactcttaacatcaatgggcaaatccccacaggagaaggaggcccaagggatgcagacagtgatgaaaacga

SEQ ID NO: 583936 - DNA, 100 bp, Homo sapiens
ttctctgaggcggcgagagatggtcaggtctggagctcgaccgggccagctcctccccggcctcctgtttctgacctggctgcacacatgcctggcccac

SEQ ID NO: 583937 - DNA, 75 bp, Homo sapiens
ccggcccggacctgcagcctcccaggtggctgggaaggtcagtactcctgcatttgtaccaacgaaaactcacgt

SEQ ID NO: 583938 - DNA, 100 bp, Homo sapiens
gggctaaagactatacttaaagatgccaccctcactgcgctagaccgaggacagcaacaagtgttcaaagggagtatagtcatggccaacagcaaaaaac

SEQ ID NO: 583939 - DNA, 83 bp, Homo sapiens
aaaccagctgaggtgtccgtaaagattccagagaagcctgtgaacaaagtgtttcccattaaacactaccaggacaaaatcag

SEQ ID NO: 583940 - DNA, 90 bp, Homo sapiens
gagccggggccgtggctgacatggagcagatgttctcaaatagtgatgaagctgtaatcaataaaaaacttcccaaagaactcctgttac

SEQ ID NO: 583941 - DNA, 82 bp, Homo sapiens
gggtctgtcatcatgtcgcgttacgggcggtacggaggagatctggtggctggacccagagctgacctatggctgcgccaag

SEQ ID NO: 583942 - DNA, 100 bp, Homo sapiens
agctatgtttagcatcttctgtcatgagaagtggcgatcaaaattggtacccaattccgacagccctgatcttctgacgttgcagaaatccattcattct

SEQ ID NO: 583943 - DNA, 75 bp, Homo sapiens
actgagagagatgcttaaaaatcaccagttactttaatgaacataaccagtgcggtgcaatccaagcgaagaaaa

SEQ ID NO: 583944 - DNA, 100 bp, Homo sapiens
gcttctcttttcccgttgaaggtgctaccgctgacgacacccctggtggatggcgaggatgagagattcggtttatgctagagacgatgttggccctgaa

SEQ ID NO: 583945 - DNA, 104 bp, Homo sapiens
ttggatatcgtcgctacttacatccaggagcccaacgaagactgtctctacctgaacgtctatgtgccgacggaggatgcttgtagtgaacaggactctgagcc

SEQ ID NO: 583946 - DNA, 80 bp, Homo sapiens
gagcgttctaaaggaaggcgtccgttggccttcgtacccgtcttgattgagtgcctgatttgagatggggtcccaggtct

SEQ ID NO: 583947 - DNA, 74 bp, Homo sapiens
aaagggaagccgagtgctcctgcggctcccagactgcaaccaggaaacaaaccatcaggcctcccagaaagtat

SEQ ID NO: 583948 - DNA, 75 bp, Homo sapiens
ccgcgccgccgctgccgccgccgcgcgcgggaaagatgaatgggagggctgattttcgagagccgaatgcagagg

SEQ ID NO: 583949 - DNA, 74 bp, Homo sapiens
ggagtttgtgtaaaacaaaaatattatggtctttgtgcacatttacatcaagggtgcggacgcgtcatcactgc

SEQ ID NO: 583950 - DNA, 82 bp, Homo sapiens
caatatctgtcttcggtggactccttcggcagtccacccaccgccgccgcctcccaggaaattcaatcatatctgtgaacag

SEQ ID NO: 583951 - DNA, 100 bp, Homo sapiens
ccatcatcacggatgctgtgaaccaggttcaatacttcttcaagatcttggataattagtggtgtggaaagtaaagaagtcacaggttgggacatttaga

SEQ ID NO: 583952 - DNA, 130 bp, Homo sapiens
gcagctctccacgtgcgcgactgcgaggctggacgctacgggctcctggaaaggagcttttgaaaaggctaaattaaaaagagaaaaagcagatgccctagaagcgaagaaaaaagaaaaagaagataaa

SEQ ID NO: 583953 - DNA, 100 bp, Homo sapiens
gcaagggattgctggctacagcttcagaagaccgaagcgttcgtatctggaaggtacttaagagattatggcatcagaaacccacaatgttaaaaaacgg

SEQ ID NO: 583954 - DNA, 129 bp, Homo sapiens
tctgcagagttttgcacaaaatctgttcccatgcaaaccaatgagggagaagtatcggaagaaagcagttccaagatttggagcaagaggtggtggtggccttcccccgaagaaatttggtaatcctgg

SEQ ID NO: 583955 - DNA, 119 bp, Homo sapiens
ttagagtccaccagatcatccatgtgagtgaccatgcagcaaaagaaggagggtcctctcagtgattaagaaggaagaatcctgctcaaaaatgaggtgaattaatacttgggcgctca

SEQ ID NO: 583956 - DNA, 50 bp, Homo sapiens
cgagaccagcctgggcaacatgctacgagttccagggagctctgtcctgg

SEQ ID NO: 583957 - DNA, 109 bp, Homo sapiens
gctttgatctggattcttcattactacatctgaaaagcttctcatctagaaggtcgaaggtagatcagattcaagagattgtgacaggaaatcctacggttattaaaat

SEQ ID NO: 583958 - DNA, 98 bp, Homo sapiens
ctttcgccagcccgtgccgcgagcgcggcctgcaggaggacggggaggtttactgcatcgacgcgcggttctacgggaacgtcagccggttcatcaac

SEQ ID NO: 583959 - DNA, 98 bp, Homo sapiens
agctttgcgaagaaggttagaaaaaaggatatatatacctctcccaacaggaatggcggcgctagatagtaaggcatcagggaagatgggaatgcgag

SEQ ID NO: 583960 - DNA, 82 bp, Homo sapiens
ctcaccagacaccatacctgccggcaccttgatcttgaacttctcagcctccagaagtgcgccatgtcagaaccggctgggg

SEQ ID NO: 583961 - DNA, 76 bp, Homo sapiens
gcctactcccctcacccttccctagcaaaaggttccaagaatatttgtcaatggtacttttattggaggtgcaact

SEQ ID NO: 583962 - DNA, 96 bp, Homo sapiens
cgcgaggtggcggtgctgaggcacctggagaccttcgagcaccccaacgtggtcaggattcactccttctccagttgcacagccacacccttcagc

SEQ ID NO: 583963 - DNA, 83 bp, Homo sapiens
tttcgatcccagtcttgcttattaccaaacggaccctgtgagcatggggctgccagtgaaaggaggatgcctgggaatgaaat

SEQ ID NO: 583964 - DNA, 75 bp, Homo sapiens
tccatgagccacccctacaccatgacaacgccttacccttcgctcccagcccagtctgggttctgcccgcacaca

SEQ ID NO: 583965 - DNA, 100 bp, Homo sapiens
cagaaattgccggtctgggagttgggggcaaggagaagatcctggaaaaatgatgtgatgaacctccttgaaagcgctggtttttctcgaagcaatcctt

SEQ ID NO: 583966 - DNA, 75 bp, Homo sapiens
gagccgatactgagcttcttcctatttgccatgggtctacatgttcaagtgcgtgtggcggtgctacagattgat

SEQ ID NO: 583967 - DNA, 87 bp, Homo sapiens
gtgattagcttcgcagtctggaaagctttaggagttcacagtgttacccatgcagttgttactgtaccagcctattttaatgatgcc

SEQ ID NO: 583968 - DNA, 100 bp, Homo sapiens
cttaatgactgtctcacattggccggcaacttgttccagttatgtgtctcggtaccacgtgaaagactcctcacgccacgtcatcctaggcacccagcag

SEQ ID NO: 583969 - DNA, 73 bp, Homo sapiens
gcagatgttgtcaaggtggcctaccaggaggccaggggtgtcgccatgcaacaaactaccaacactgtagagg

SEQ ID NO: 583970 - DNA, 83 bp, Homo sapiens
aggctccctgctcagctcctggggctgctaatgctctgggtctctgatttggtgcttccagatgtgagttatcaggtggaatc

SEQ ID NO: 583971 - DNA, 100 bp, Homo sapiens
aaggagggcacacgcatgaaggtggaggacgtgaaggcaaatagaaactgcatagcaatcgcttccagtcatgatgttcaagaactggatgtttctggaa

SEQ ID NO: 583972 - DNA, 75 bp, Homo sapiens
cctttgctgagtattctagcctccgaaaacatctggtggttcactcagaggatggggaggcacgtgagagggatg

SEQ ID NO: 583973 - DNA, 83 bp, Homo sapiens
gttggaagcagccgatccagcctgcggagcctgtggggcagaaatcaatgtggactgaacataaatcacctgatggaaggact

SEQ ID NO: 583974 - DNA, 90 bp, Homo sapiens
cctgtctctggcccgcaatcaccccttcctcactcagttgttctgctgctttcagacccccgtctctaattaacagaagatggcaaagcc

SEQ ID NO: 583975 - DNA, 100 bp, Homo sapiens
aagattccagatgttcctgtggaccccagtccagctgtgatcgagatggtacaagaggctggtagagtaactgtccgagatgggatgcctgagctcttga

SEQ ID NO: 583976 - DNA, 88 bp, Homo sapiens
accgaagttggaagtgtctcttagcagcgcgcggagaagaacggggagccagcgtcagcctcgagtttgaccagcagcaggggtcggt

SEQ ID NO: 583977 - DNA, 74 bp, Homo sapiens
tggcccacacctcccgctcatcgcccgccacggttttgggatttgagattgacgcggtgaactctgtccagttt

SEQ ID NO: 583978 - DNA, 90 bp, Homo sapiens
cgcagcatggcggtggaggacgaggggctccgggtcttccagagcgtgaagatcaagatcgagagttaagaaagacgtggacaagggcac

SEQ ID NO: 583979 - DNA, 90 bp, Homo sapiens
gcacactggtgacaactcaagagcaatcagtaccatctgaatccaagcaaaaatccctggattgaagcgcaaagctgaatgaaaacgccc

SEQ ID NO: 583980 - DNA, 50 bp, Homo sapiens
agtcattcaacgggaattgaataggtggaatctccaactgataaatcagg

SEQ ID NO: 583981 - DNA, 82 bp, Homo sapiens
tcaaagctgtgggcaagctgacgccgtattatgcggagtgtcacggcgtcatctacgtcattgactccaccgacgaggagag

SEQ ID NO: 583982 - DNA, 75 bp, Homo sapiens
aagtccagtactttaaatgtgcccccaagtatgagttgctggagaatgtaaccctaatccataaaccagtgtcgt

SEQ ID NO: 583983 - DNA, 95 bp, Homo sapiens
ccatcgagaaatggccgcgtcggcagagatccgcacgcagctggtggagcagttcaaatgtctggagcagcaatcagagtcgcgactgcagctgc

SEQ ID NO: 583984 - DNA, 78 bp, Homo sapiens
tgctacctgcagcgccgtgtggcacgacacaaaaatcagtaacatccaggagatgagggctcggcacaaagaggcttt

SEQ ID NO: 583985 - DNA, 100 bp, Homo sapiens
cgagcagccccggctctgggctacggactatgggcgaatagctctgaccacccggcgaagaaacgcctagctcaatctgtccgaaacacctctggctcag

SEQ ID NO: 583986 - DNA, 88 bp, Homo sapiens
cggcgccgccctgcgtggagccgccgccggccacccgggtggctattatcatggaaaactaatttttcccagagaatttcctttcaaa

SEQ ID NO: 583987 - DNA, 98 bp, Homo sapiens
cagaagagaaaaagcccaggcataaaatcatctccatattctcaggcacagagaaagatctgagtgggacatacttttgaaggatgtgcaatgttcaa

SEQ ID NO: 583988 - DNA, 98 bp, Homo sapiens
tgtactctgaggagcggaactacagccagatgcggatccgggccaagcagtgggccgaggtggctattatcatggaaaactaatttttcccagagaat

SEQ ID NO: 583989 - DNA, 82 bp, Homo sapiens
cagctgcctcagttcttagcgcaggccttgtttgtatgaagtccagcacatctgtggttgagcttgttatgctgctttgttc

SEQ ID NO: 583990 - DNA, 90 bp, Homo sapiens
tcgtgcacatccaggctggtcagtgtggcaaccagatcggtgccaaggttggcaaggccacaggcttcctcaagaactttctgatcgagc

SEQ ID NO: 583991 - DNA, 90 bp, Homo sapiens
tgtagtggagcagatcatcacctccatgaagtgcatcatggggcaggatggcaccagccttgatgtggagaagtctgaggctaattcccc

SEQ ID NO: 583992 - DNA, 88 bp, Homo sapiens
gcaagtacaaccgcttcgagaagcgccacaagaacatgtctgtacacctgtccccctgcttcagctactctgggcagttgaaaagtag

SEQ ID NO: 583993 - DNA, 100 bp, Homo sapiens
gccggaggaaagcgggaagactcatcggagcgtgtggatttgagccgccgcattttttaaccctagatctcggcgccatgtcagaaccggctggggatgt

SEQ ID NO: 583994 - DNA, 100 bp, Homo sapiens
tcagggggaacaaaagcatctccatgagtgtggctgggtcacgacaagaacacagatatgtagaactcttcttgaattctacagcaggagcaagcggtgg

SEQ ID NO: 583995 - DNA, 115 bp, Homo sapiens
cccagcacctagtcttccttggcacatcgtgagtgctcggtgcagtggcttatgcctgttatcccagaactttgggaggctgagtcaggaggatcacttgaggccagttcaagac

SEQ ID NO: 583996 - DNA, 100 bp, Homo sapiens
gccactgggactttgcagacatgatggtgataaggagcctgaggtggttatcactaggctaaaactggacaaagaccgcaaaaagatcctcgaacggaaa

SEQ ID NO: 583997 - DNA, 100 bp, Homo sapiens
caaaagcgtcaaactcaccaaaaacaacatctttccagaaagagaaacctccacagctgttgagaaaaaggagaaacctcttccaagacttaatatccat

SEQ ID NO: 583998 - DNA, 82 bp, Homo sapiens
atttgattcaatattaccagttcctagctgaaaaaggtgatgtacaagcacagggaactctaatgatccaggacaaagaagt

SEQ ID NO: 583999 - DNA, 100 bp, Homo sapiens
gctggagacagattgtaggaccgagcgcgggcaggcgggaggcaacggagctaccagccggcctgtcatctttacttcagagtgttactgggaacccagt

SEQ ID NO: 584000 - DNA, 90 bp, Homo sapiens
cccgggggcgccatggcgaccggagcgaacgccacgccgttgggagatggtaacctgcacctcaatgtgacggcggaggccttcagcccc

SEQ ID NO: 584001 - DNA, 100 bp, Homo sapiens
gatttgttaaggattccaagtaactcttatttggttgttaaaaaagcagacatgatcaacaaaaatatgactcatcaggtccaagctgagagagatgcac

SEQ ID NO: 584002 - DNA, 49 bp, Homo sapiens
gagcacagaatgtaccagagagagtgttcttatcagctgtacaacctgc

SEQ ID NO: 584003 - DNA, 82 bp, Homo sapiens
tgggcgctccggtggcggcggaggtatgacctggacgcgtgtgacattcaagaaaaatacccggatttatttcaagtgaacc

SEQ ID NO: 584004 - DNA, 100 bp, Homo sapiens
ttcagccaaagaaacaagccgtggaataggtgtatcaagtaatggtgcaaagcctgaagttctgctccagacgagcccttaccacgttgactcactcctg

SEQ ID NO: 584005 - DNA, 80 bp, Homo sapiens
ggaagtctgcatccacattgcacataaagttggggccagtgtcattcaaagatgtggctgtggatttcacccaggaggag

SEQ ID NO: 584006 - DNA, 51 bp, Homo sapiens
atacatcttccatcctgagaatgcatgcacagccagaggacaacacatcac

SEQ ID NO: 584007 - DNA, 100 bp, Homo sapiens
ggcccaaaacccacagaagttgtattagatgatgacagagaagatctttttgcagatgctgcagttggagaagaaacttgaacgtgaacttgaggatgat

SEQ ID NO: 584008 - DNA, 50 bp, Homo sapiens
cttcctttgagctccggaaagttggtgactgcttagaaaactgcacagca

SEQ ID NO: 584009 - DNA, 100 bp, Homo sapiens
ctggcattgaaaacattgacgaagctattacattgcttgaacaaaataattgggacttagtgctactcccgagcccggagaggacccacgcgtgacccgg

SEQ ID NO: 584010 - DNA, 91 bp, Homo sapiens
agaagcagagccgcgtcacggagcaggacaaggccatcctggagctgggatggtggtggactgggagcaggagaccggcctcctcatgagc

SEQ ID NO: 584011 - DNA, 82 bp, Homo sapiens
cctagcgctatgcctgcggcggagactgcatcaggctctcggatattgactgggtacagacagagaagcacgtgtttgagca

SEQ ID NO: 584012 - DNA, 75 bp, Homo sapiens
cccttaccacccagcagcagggcatcaagtgcagagtggacctccagcaaactccagcagacctgcagcagaggg

SEQ ID NO: 584013 - DNA, 82 bp, Homo sapiens
acctacgtcccgctgccgtcgccgccgccaccatgcccaagagaaagccttatgccagcctggaccatcttggaggcagtgt

SEQ ID NO: 584014 - DNA, 50 bp, Homo sapiens
ttttgaccaaaggaatgggttacgatctaagctggaaccagaaccaaata

SEQ ID NO: 584015 - DNA, 100 bp, Homo sapiens
tcatcccactcagcgccatgtcctggatgttcaagaggcttgactcccagcattctcatctcaccttgccatactataagatgtctggtttgtctatggc

SEQ ID NO: 584016 - DNA, 103 bp, Homo sapiens
aaacaggcgccgcgggctccgcgcccggccggacccgggcccgagggggggccctcagcctcttggccttgaacgggctgttcatcttgattcacaaacacaa

SEQ ID NO: 584017 - DNA, 80 bp, Homo sapiens
cctgaagaaaagggaaaacttgctgcggttgctcaaggtttatcaggtagaagatgtgtgtgaagaagaaatgccagaag

SEQ ID NO: 584018 - DNA, 82 bp, Homo sapiens
agccgcccgcgcacttccaggtgcacagcgcgggagccgtcacggtgctcaaggtagttgatgtcacttggcgatattcctg

SEQ ID NO: 584019 - DNA, 100 bp, Homo sapiens
cgggaagcccaactgcctggtcatcgatgagatcgacggggcccccgtggtgggctccttgatgcctgggccaaacgtaccaagaaagtcgggatcgtcg

SEQ ID NO: 584020 - DNA, 100 bp, Homo sapiens
cctctcagaagagtgagagagagctattagagattgtgaagaagaatttcgatctccgccctggggtcattgtcaggctgaccaactgactgaagagcag

SEQ ID NO: 584021 - DNA, 82 bp, Homo sapiens
ccgtcgttgcctccacttggcccgtccatagagccaggtattagaaaactactcggatgctccaatgacaccaaaacagatt

SEQ ID NO: 584022 - DNA, 75 bp, Homo sapiens
cctggtattaaacctaccatccaaatcaaacaggagtcagtaccaaaagaattggtggagctccatttgaagctg

SEQ ID NO: 584023 - DNA, 82 bp, Homo sapiens
gagcatgatcggcatgtccaccaaggaccaagaatcgccttcagccctgtctggtgcatccttggcagaaagtgaggaggaa

SEQ ID NO: 584024 - DNA, 82 bp, Homo sapiens
gctgaacttccggaaggcggtgatccagctcaccaccaagacgcagctcaccatggatgatgatatcgccgcgctcgtcgtc

SEQ ID NO: 584025 - DNA, 75 bp, Homo sapiens
gttaaagctggtctgttctaactgaggcctcattgctacgatttcagagtaccctggtaatagctgagcatgcaa

SEQ ID NO: 584026 - DNA, 75 bp, Homo sapiens
gcttagaggagtatttcctgaactgtgtgggtaggtgtgactgaagaaatatcaaatgtttcctagtaagacagc

SEQ ID NO: 584027 - DNA, 82 bp, Homo sapiens
ggaaatgtccggcaagatcgagaaagcaggtgacttaagagattaaaattaatttggttgctgttggttctgaacaaataat

SEQ ID NO: 584028 - DNA, 82 bp, Homo sapiens
cgcgccgcatggaggccggctgaggagcgccgctgcctcgcctcggttaatttggagtggcccctggagtcagtttcctaca

SEQ ID NO: 584029 - DNA, 98 bp, Homo sapiens
ggaagcagagtggctatggtgggcaaactaagccgattttccggaaaaaggagcatttcctccctctgctatttatacacggaaagacttactacagc

SEQ ID NO: 584030 - DNA, 100 bp, Homo sapiens
accccttgaccagcacacactgcaaggagatcagggaccatggctaaacctcctggatcattagccagaagcagcagcctgtgccgttcacgccgcagca

SEQ ID NO: 584031 - DNA, 48 bp, Homo sapiens
acaaggtcgacaactactcagacagattctccaaaagcccagctacgc

SEQ ID NO: 584032 - DNA, 90 bp, Homo sapiens
gcccccggcaccatggacgcgccgcgcgcctcggcggccaagcccccgaccggatcccgtaccagctttggatctcggacagcaactcca

SEQ ID NO: 584033 - DNA, 100 bp, Homo sapiens
cttacaacaactagtgcaaccagtaagttgatccatccagatgaggatatatccctggttttcctttggaatatggataaatacaccatgatacggaaac

SEQ ID NO: 584034 - DNA, 83 bp, Homo sapiens
ccttccccacgcaaccccagatccatttacactttacagtattgacctgatggacatggcttcggacatcctgcagcccaaag

SEQ ID NO: 584035 - DNA, 80 bp, Homo sapiens
gggctcctcatggcccggctccttagcacctctccaggtcatcatcagatttgaaatatttaaagtggatacaaaactat

SEQ ID NO: 584036 - DNA, 90 bp, Homo sapiens
ctttggattcacccacagcggggcggcggcggcggcggctgcggcccaatatagaacccagtgacttgattgtaaaaatttacagagcgg

SEQ ID NO: 584037 - DNA, 100 bp, Homo sapiens
tgtggaattaccttcactctgggaaaaggcactgaagttgccctgcaagaaaaggtggctgaagtggaaactcggctgcgggagcaactctcagacacag

SEQ ID NO: 584038 - DNA, 82 bp, Homo sapiens
aagggatcaagatcagctccaggcctgggaaagtgaaggccagacggttttgctgtctcagcctactgtggtacaacttcaa

SEQ ID NO: 584039 - DNA, 82 bp, Homo sapiens
agaagaaacaattcttcgacatactctccagcttcaattatcaagtgggaatcctgtatatgaaaaatactatagacaggta

SEQ ID NO: 584040 - DNA, 90 bp, Homo sapiens
ttacgacaaggaggttcagtggacccttggagccatcctctacaggacccgctttctaccattaagggaccactgacatttagggatgtg

SEQ ID NO: 584041 - DNA, 98 bp, Homo sapiens
cattaaagtgaagtggttgcggtaacctggcctgggcctgaagtgagtgagaggcacatgaaggacttttccagatttctcagaataaagtagcagtt

SEQ ID NO: 584042 - DNA, 82 bp, Homo sapiens
cctggtgctcctggcagcaaaggagacactggtgctaagggagagcctccacagcctggcagctctgatcaggaaagtgagg

SEQ ID NO: 584043 - DNA, 82 bp, Homo sapiens
acaggctcagctggcttcaatatgacaatgcagatcttcgtgaagactctgactggtaagaccatcaccctcgaggttgagc

SEQ ID NO: 584044 - DNA, 97 bp, Homo sapiens
ccctcccttgcatgatggaaacaccatggctgcggcggcccagctctctctgacacagatgagtgtgggtcagagagccaaactgactatatctcca

SEQ ID NO: 584045 - DNA, 75 bp, Homo sapiens
ctccattgaaccctgcaaagcctgggagcagctggattccatttaaagaggagtcagagtcagaagcaaaggtag

SEQ ID NO: 584046 - DNA, 75 bp, Homo sapiens
catcaacaacaatgtggagaaagccccctgtgccacctccagggattaacatctgctcgtgcagctgagatcctg

SEQ ID NO: 584047 - DNA, 90 bp, Homo sapiens
cagaggagatgcaccggctcacggaaaatgtctataagtggctccgtcaatcagttcaccgccatctacaacagcagcggagagctcatc

SEQ ID NO: 584048 - DNA, 90 bp, Homo sapiens
actacaggggctctggccatcttcgtggtagagtcactgaccacagagctgtcagctgagcgcagtttctcagccaaggcagagagcggg

SEQ ID NO: 584049 - DNA, 51 bp, Homo sapiens
cagctcagtgctgtgcgggccagatcacctctgcagcctgcacagccgggc

SEQ ID NO: 584050 - DNA, 98 bp, Homo sapiens
taaggccaaaggcggagttctgttttggtgcttcggggcgtggcagcagttcgtgcaaagagggtcccggtaccgagaccacctggctgaccgccgga

SEQ ID NO: 584051 - DNA, 50 bp, Homo sapiens
aggcgtgcgcggacggtgtgcggcccatggcgaattgtggatgattgcgg

SEQ ID NO: 584052 - DNA, 83 bp, Homo sapiens
cacggggtgaaactgaccacagtgctcaccacccaccaccactggctgccccaggccctgtgcagacacaccaggccctcagc

SEQ ID NO: 584053 - DNA, 90 bp, Homo sapiens
ctgctgctctgcctgctccacaagcggcgccgcgccctcggcctgcacggggaagaggaagaacgtctgagaaataaaattcgagctgat

SEQ ID NO: 584054 - DNA, 82 bp, Homo sapiens
atgacaacgcccaattaatcacgagaacatattgtgatgttcgtgcctcagagctaaaactatgagtgaatttcggattcac

SEQ ID NO: 584055 - DNA, 82 bp, Homo sapiens
cttggagctggattatcaaggaaaagctggtgcttgagttcagcctcctgtcttatgcttttggcaaatttcctaccgttgt

SEQ ID NO: 584056 - DNA, 90 bp, Homo sapiens
cagaatacagagatatggaatcaggctgcttctgatgcttggaagatatcctctcagccacaaagatggtaataaatctttgcctcccac

SEQ ID NO: 584057 - DNA, 100 bp, Homo sapiens
cctcgcaatgggaagtcatctgtgactactgttcgaagatttttggaagaatactgagaacggcataaagtgaagatcgacatttaaaaaatgaggtgaa

SEQ ID NO: 584058 - DNA, 100 bp, Homo sapiens
caagaaactgctcaacaagtgcgccgcctcagccgcggaggagagcggggccggcaagaaggacaagaaagtggatgtcaccagcagggctgtgatggaa

SEQ ID NO: 584059 - DNA, 88 bp, Homo sapiens
agcctgggaggccggccggtgccagcacctttcggcttctgagacggcggcagcagcggcattcaggggatgccaacagacagatcag

SEQ ID NO: 584060 - DNA, 96 bp, Homo sapiens
agcatcccaggaaggggttcccagaagtcagaatccaagatgattagatcctgtgctgaaagagaaaccaagaaaaaagatgacattccagaagaa

SEQ ID NO: 584061 - DNA, 100 bp, Homo sapiens
tcgtctgcgaagaagaaagaggagaaggggaagaacatccaggtggtggtgagatgcagaaactagaaaaactgcttttggaattatctctacagtgaag

SEQ ID NO: 584062 - DNA, 100 bp, Homo sapiens
cttacttcagtgctgttgctggacaggatttgaatttgttgaaatgagcagtcgtaaatcaaagagtaacagcttaattcacacagagtgcctttcacag

SEQ ID NO: 584063 - DNA, 115 bp, Homo sapiens
gtgattccatgctttgatagtgtaaactcagcacgagccattttgcagcatccatagtccttcagatgtcttagggaaaagtcttgctgatttacagaaacaattcagtgaaatt

SEQ ID NO: 584064 - DNA, 78 bp, Homo sapiens
cgcttcgctggccatttaggagctctgctcaaagccagacggtgcgagaagatgtactaaattcattgaataacaact

SEQ ID NO: 584065 - DNA, 83 bp, Homo sapiens
gagaggagacttccttgcttctttggagaatgatatcaaaccagtgcagcggaactgctgcctgacgctctgcaacttcagca

SEQ ID NO: 584066 - DNA, 90 bp, Homo sapiens
agaacatggatctgaacttcctgggcagccgcccggtccagagacgtctcccacaacctgctccgggcgctggacgttgggctcctggcg

SEQ ID NO: 584067 - DNA, 97 bp, Homo sapiens
acagggccctggtagccaaggaagccctcgtgtcccagatgaggcaggagctcatcgatctccggggaccgaggaggctgcggaggaggaggaggaa

SEQ ID NO: 584068 - DNA, 96 bp, Homo sapiens
ccattagtggagctggaatggtgagaccaacatccgtgacacctggactctttcaggttctgaagagttcatgatcaagtgttgcccacaccaaat

SEQ ID NO: 584069 - DNA, 75 bp, Homo sapiens
aaacaggtcgcagcattatcaaaggatatgattctataacagactcttccagaaatgatatgaagaggaaatttg

SEQ ID NO: 584070 - DNA, 75 bp, Homo sapiens
ccagaaccctggctgaccactttgaaggaggatgctccagcaggttcgagaacttgtcttggacaattgcaaatc

SEQ ID NO: 584071 - DNA, 50 bp, Homo sapiens
agcccatcgtgcgggtcttgcaaaggagatgttacagcccagatagctct

SEQ ID NO: 584072 - DNA, 75 bp, Homo sapiens
aggtctacgccacatcacttaggtcacggagctgctggacgtctccatggagctgggctgtttcctggctggagc

SEQ ID NO: 584073 - DNA, 90 bp, Homo sapiens
acaattgtctgtgacagtaacagtacttgggatcccccagttccaaagtgtcttaaagcaccgggtgctcagcagttctgcttcttgctt

SEQ ID NO: 584074 - DNA, 82 bp, Homo sapiens
ccttctccactttcgccagcccgtgccgcgagcgcggcctgcaggaggacgtggcccagtggaacatcgggagcctccggac

SEQ ID NO: 584075 - DNA, 98 bp, Homo sapiens
catgagatgattgccaaatccccagagtccaactccccagattaaacctgaatatttagccttgaggtctgttggcatcagaagagagaaaaaaagga

SEQ ID NO: 584076 - DNA, 50 bp, Homo sapiens
gaagtggcctgggaggtggctaacaaggaagctccaccatgaggcgaggt

SEQ ID NO: 584077 - DNA, 100 bp, Homo sapiens
cgggtcccgcgcgagctttcccgggataagtagctttagcgatcgggagacagccgggcgctgcaagaacaccttccaccatgaccacctcagcaagttc

SEQ ID NO: 584078 - DNA, 99 bp, Homo sapiens
gagctgtcctggaagtaaatatccctaggaaaccaggtctcgaatttatttggaagggaaaatagactatggtgaatacatggataaaaataatgtgag

SEQ ID NO: 584079 - DNA, 100 bp, Homo sapiens
ggctaaccaaaagtctgttctgctcttagaacaagctctggtgattgaggaacagctgcgccgggctgcttacttgaacatgtcagaagacccttctcac

SEQ ID NO: 584080 - DNA, 100 bp, Homo sapiens
atggcatctagtcctgagcttcccaccgaagatgaacagggttcctggggcatcgacgatctccatatttcattgcaagttgctgatagtccaactccac

SEQ ID NO: 584081 - DNA, 98 bp, Homo sapiens
gcagcatccactttttagatggcgtggtacagacctttaaagttacttataataagcctagtgaaacggtcatccctgaatctgtagatggcttgcaa

SEQ ID NO: 584082 - DNA, 100 bp, Homo sapiens
aattaaaagaagaagaaaaacgagcactacgttatttagaaacaagacgagaatgtaactccgttgaagcagtgctgttggcagcagcggtctgcacaaa

SEQ ID NO: 584083 - DNA, 100 bp, Homo sapiens
ctgctcacacagaggacgctgctcatgtaaagctttctgatggaagagagctctgtctggaccccaaggaaaactgggtgcagagggttgtggagaagtt

SEQ ID NO: 584084 - DNA, 90 bp, Homo sapiens
cggaagggaagctgtggagctgggaacctagaagtcggaatccggaagaagatcgaacatgacgtggtgatgaaagccagcagcagcctg

SEQ ID NO: 584085 - DNA, 87 bp, Homo sapiens
ttcttccagcttctgctgtccttctttgtggagagcaagggccttcatcctagaataatcactgaaggatttgaagctgcaaaggaa

SEQ ID NO: 584086 - DNA, 90 bp, Homo sapiens
ggtcctttatatagaagggagagtagctccctggaattcccatgccaccaccacctttgggactcccccctctgcagcctcctccgccac

SEQ ID NO: 584087 - DNA, 100 bp, Homo sapiens
agagtgtgctggtgcctgtcggagaacatcgccaagcagcaacagctggcagcatcacccccggacagcaagatggacggggagtccgaggaggagcagg

SEQ ID NO: 584088 - DNA, 83 bp, Homo sapiens
gggggctcggccgacatcacccttcgcagctatgtgcgggcccaggaccccccaccaggtgtgtgccctcttcctgattctgg

SEQ ID NO: 584089 - DNA, 75 bp, Homo sapiens
atatctgattgggacaacattcagacccatttccagtcatgagagagcttgtttcatatccatatcccactgtat

SEQ ID NO: 584090 - DNA, 51 bp, Homo sapiens
acctgataaggggtcatcaggagggcaagtgtccagagaatggctgggatg

SEQ ID NO: 584091 - DNA, 100 bp, Homo sapiens
agggattcttcctttgagagaagacatggagagcgagaccgtcgtgacaacagagagagagctattcaggattatgaaactgctcaggaacacaatgaaa

SEQ ID NO: 584092 - DNA, 83 bp, Homo sapiens
gtccctgagacgccaacggcagtcactgccccccattccagctcctggccgaggaggagctggtggaggctgacgaggcgggc

SEQ ID NO: 584093 - DNA, 100 bp, Homo sapiens
agaaggcgaatggcttgtacccattggcaagtgttcctgcaatgctggctatgaagaaagaggttttatgtgccaaggagagttcgataccatgcagagt

SEQ ID NO: 584094 - DNA, 75 bp, Homo sapiens
ctggaccgtcgccttgctcctcgccgcggcggggactgcagtgtctgtcatcggtggccaccgccctgcagagtg

SEQ ID NO: 584095 - DNA, 51 bp, Homo sapiens
aacccagcctgtttcacttcttggtcctcttcctgatggatgggaacaagc

SEQ ID NO: 584096 - DNA, 98 bp, Homo sapiens
aggcatcgtggggatcttggcagcgctgcagggcaagtatatcgcgtcaacacagcgacctgacgggacctggcgcaagcagcggagggtgaaagaag

SEQ ID NO: 584097 - DNA, 100 bp, Homo sapiens
tctcgactcggtcctgtttcgacagcgaacatgtcgcggcctgtcagctttgatgaccatgacccagctgtgatccatgagaacgcatctcagcccgagg

SEQ ID NO: 584098 - DNA, 88 bp, Homo sapiens
aaagaacagacgtcggaaaccttggaagtgggatttatttcagtgattcgctcaggttgctccttgagggcaggacagttcttatggc

SEQ ID NO: 584099 - DNA, 100 bp, Homo sapiens
actaactgtttaaaactattagaggaggaggaagccaagaatctggtgagcgaagccatcgcagctggcatcttcaacgacctgggctccggaagcaaca

SEQ ID NO: 584100 - DNA, 82 bp, Homo sapiens
tccgaaggaggaagggaaccaacccactttctcggcgccgcggctcttttctaaaagtacagaatgttgctgcgggatgtaa

SEQ ID NO: 584101 - DNA, 100 bp, Homo sapiens
agcaagatcaccgtgacatccgaggtgcctttctccaaaagagcagggccagccgttcctgccagaagccagggcatgacccctggggtgcgcgtctcca

SEQ ID NO: 584102 - DNA, 100 bp, Homo sapiens
gagttcaaccgcaaccagcgcaaagactcagaggggatgtacgtatttttgcatgcagtgaaaggaacacctttcgaaactcctgaccagggtaaagcaa

SEQ ID NO: 584103 - DNA, 74 bp, Homo sapiens
gttggagaactatagcaatctggttttcttgggtgcagattcactttataggaacagcttcagcttcagtgatg

SEQ ID NO: 584104 - DNA, 100 bp, Homo sapiens
aggcaggaagcagagaacagcaagtccatcaacttgaaagatgtggccatgaggtctgccggaagtgacttgttggtgttatctcctgagttaaaatgtg

SEQ ID NO: 584105 - DNA, 90 bp, Homo sapiens
gagtcgggcgccagctgcatggtgcagatcacctctgcctcggtgcaccctctcattgaccccctggcctcagggtctcaccttacccgg

SEQ ID NO: 584106 - DNA, 90 bp, Homo sapiens
ggctccgcggcggggctgctacccaccagcatcctccaaagcactgaacgcccggcccaggtgaagggagcggacatggactacgactcg

SEQ ID NO: 584107 - DNA, 98 bp, Homo sapiens
gactcggtccgtggcttcggaggcaagtttggtgtccagatggacagagttgatcagactgaggagctcgggttttcctgtccacctgctcccagaca

SEQ ID NO: 584108 - DNA, 74 bp, Homo sapiens
ccctttccgagtcaactggcccggcaccgagttctctctggtaccccaagaagctagtgcagacttattcagtg

SEQ ID NO: 584109 - DNA, 74 bp, Homo sapiens
agtggttgctggagcacctaaaagtcagattgctctcacctgtgcacagttccaccctgacggactcatctttg

SEQ ID NO: 584110 - DNA, 83 bp, Homo sapiens
gcgccgcgggacctctccgggccatgggataaagataaagtttctctaaccaagaccccaaaactggagcgtggcgatggcgg

SEQ ID NO: 584111 - DNA, 74 bp, Homo sapiens
agcggcagctgaggagactccggcgctcgccatggccgacgaaaagcccaaggcttttaaggataccggaaaaa

SEQ ID NO: 584112 - DNA, 75 bp, Homo sapiens
cagtatccaggtcgaggttctgcagaaggttgtgactttagtatacagaaatggaagttccagtattaccgaaaa

SEQ ID NO: 584113 - DNA, 75 bp, Homo sapiens
aagtaatggtgcaaagcctgaactttaccaacagggacgcttatgtcaactgggcagtgaattttgtgaattgga

SEQ ID NO: 584114 - DNA, 50 bp, Homo sapiens
ctgtgagatgtttcatcccaacagtttaatagactacaacttccactgtt

SEQ ID NO: 584115 - DNA, 50 bp, Homo sapiens
cctgagaacagcgtggcatgcaaggatcagaatcaagctttgcgactctg

SEQ ID NO: 584116 - DNA, 83 bp, Homo sapiens
caccgggacacccgcgaggccggaaaatgctcatctttgggtgaaaaattgtcgggatcttctgcagtccagctacaacaaac

SEQ ID NO: 584117 - DNA, 100 bp, Homo sapiens
aagcgatgaaatccaaaggtgaatcttttggttggtgattttgatgatagccacaaagcaagcaggcccagtgtgccatcataatgtttgatgtaacatc

SEQ ID NO: 584118 - DNA, 101 bp, Homo sapiens
cctggccctctaccaaaccgtggatgttgatatatcactacttgtgtcttttaacaaaatgaaaaaattgactactgatgggaagttaattgccagagcat

SEQ ID NO: 584119 - DNA, 75 bp, Homo sapiens
tgtttctacaatcagctagggactacttaatagaacatgccagcagaagcattcaccaactgacatgtgccctga

SEQ ID NO: 584120 - DNA, 53 bp, Homo sapiens
taaaaaagaagcttgaagaacatctgcatcataggcgagtattagtggaatgg

SEQ ID NO: 584121 - DNA, 83 bp, Homo sapiens
ctcctaagcctgcacagccgcggcggcagcagcagtgagaggctgttacaggcgctggaacgcggacgggagcgccagctgcg

SEQ ID NO: 584122 - DNA, 98 bp, Homo sapiens
cgaagctggccaaagcctgcccagacggctcacctgtgcgggatggaacaaaagatggtcagtaggacagaaggtaacattgatgactcgctcattgg

SEQ ID NO: 584123 - DNA, 90 bp, Homo sapiens
agagaagcagaattatacctagaagtctactaatggacagttagtcacccacctacatgttgaggagtgagctgagtcgacagaaacttc

SEQ ID NO: 584124 - DNA, 98 bp, Homo sapiens
tgcgcttcgtgcaccggggcggtccgttgccaaagccagcctgaacccccgccaacaaacaaatggcaacttgataattggctgaataaagtgaaccc

SEQ ID NO: 584125 - DNA, 114 bp, Homo sapiens
tgcctcgaactaaacaaattcatcccagaaatctaagaggcttgcattgatgacaatgttgatatggtgaagtttctggtagaaaatggagcaaatattaatcaacctgataat

SEQ ID NO: 584126 - DNA, 82 bp, Homo sapiens
attcagccagcacactcctcgcgagcaaggaggtatttaactgaaaggaatatctgcttcactgttgcaaccaaaccagatg

SEQ ID NO: 584127 - DNA, 98 bp, Homo sapiens
tctatgatctcttctttgccttcctacaaacaggaaattacaaagaggccaagaagatcattgaggaagggaaaaggccgaggcatcagcgtgtgaag

SEQ ID NO: 584128 - DNA, 51 bp, Homo sapiens
tgtggctattcatttattctcaccaggttgctgccaaacaaggtgaatccg

SEQ ID NO: 584129 - DNA, 83 bp, Homo sapiens
gaaaggaaccactcattcacttctagacgacaaaatgcaaaaaaggaggccaaagactttgttaattcctgtaccaatggtgg

SEQ ID NO: 584130 - DNA, 75 bp, Homo sapiens
agcgaacccgagagcgtggagcgggctgggccagacaaaacctgctacaaccccctcttcaactacgaggacatg

SEQ ID NO: 584131 - DNA, 82 bp, Homo sapiens
tgatgctggagacctgtgggcttctggtcgcactggagtccgtgcgtcctggtgcctcctacaaacggcagaatgaaggaaa

SEQ ID NO: 584132 - DNA, 75 bp, Homo sapiens
gtttttcggatcatgtctggtggctccgcggattataacagatccgatcacataggacagtatgcaccttaagat

SEQ ID NO: 584133 - DNA, 100 bp, Homo sapiens
gaaggtgcagatgtcaatgcaaagcacagacttggctggacagcactcatggtggcagccatcaaccgaaacaacagagacgttggcaatgtggttgaag

SEQ ID NO: 584134 - DNA, 90 bp, Homo sapiens
cctcttcagtgcaggaatatgttagcgttgtatcttgggagaaagacacagtctccatcatcccagcttcagtatcagacacagcacagc

SEQ ID NO: 584135 - DNA, 97 bp, Homo sapiens
gccgacacgctggccctgaggcaacggctcatcagccacccctttgctgtgaagttgcttgcgctctgtaagaaagaaatcaagaattcaaaagata

SEQ ID NO: 584136 - DNA, 73 bp, Homo sapiens
gcggccagcggagccctgggctggggcaggagccggattggtccaaaggaagattttttccattgtttgaaat

SEQ ID NO: 584137 - DNA, 101 bp, Homo sapiens
ggagagagaggcttccctggtcttcctggcccctctggtgaacctggtgtggttggtgctgtgggcactgctggtccatctggtcctagtggactcccagg

SEQ ID NO: 584138 - DNA, 74 bp, Homo sapiens
agaagtccaaggatggttctgaggacaagttctacagccacaagaaaagtcccaggtgtgacaccttcagcagg

SEQ ID NO: 584139 - DNA, 82 bp, Homo sapiens
gacgagtcgagcctcctgcggcgccgcgggctccagacaatgcagatcttcgtgaagactctgactggtaagaccatcaccc

SEQ ID NO: 584140 - DNA, 114 bp, Homo sapiens
ttctattcagctattagatttcaaaacaagtttactggaggcattagaagaattgcgtatgagaaggggtgtcaaattgagaaccaggtagatccccaccacctacagtaaaaa

SEQ ID NO: 584141 - DNA, 83 bp, Homo sapiens
gagcgcttcatgtgcaaccttgactgccaggaagagccagattcctgcatcaggacatttctactgcctccagcacctgcccc

SEQ ID NO: 584142 - DNA, 99 bp, Homo sapiens
aaagagaggatttgcttttgtaacttttgatgatcatgatacagttgataaaattgttggtgcattggatcgttgtgtgatggggataacagcagttga

SEQ ID NO: 584143 - DNA, 82 bp, Homo sapiens
ccgggagcccgccgcgctggtagcgacaatgcagatcttcgtgaagactctgactggtaagaccatcaccctcgaggttgag

SEQ ID NO: 584144 - DNA, 96 bp, Homo sapiens
gagaggtacctctccttttccctctccctttccctaagcctgcacagacaaggagttgcggaaccttgcctcccggctgaaggattggtttggagc

SEQ ID NO: 584145 - DNA, 74 bp, Homo sapiens
ggtggtgcgagtcttcggagcgaccccggcaggtttggaggagaccagcctgtctacatcaacatcattagaga

SEQ ID NO: 584146 - DNA, 75 bp, Homo sapiens
tgtttgcttccccttctaccatgattggtgtgctgatctgcaaaccctggacacaatgcagccaattgagaggaa

SEQ ID NO: 584147 - DNA, 82 bp, Homo sapiens
atgctgctgttaccggccatataagaattcgtgcaaagagccagctcgacccctttgaatccagtgatcccttttcatcctc

SEQ ID NO: 584148 - DNA, 75 bp, Homo sapiens
gtaaattgtgaggattcttatgtggctagtttgcaggatggaatggccgtatgcatgttcatgcaaaacacctta

SEQ ID NO: 584149 - DNA, 80 bp, Homo sapiens
gccagcatcatacaccggctgttcgaggccttgactgtaggctctagaccaagatagaacagcccttcagaaagtgaaga

SEQ ID NO: 584150 - DNA, 90 bp, Homo sapiens
caatgccggtggaggaatttgtggctggctggatctctgaccgattattgaccgacctattcgaggtcgtggtggtcttggaagaggtcg

SEQ ID NO: 584151 - DNA, 50 bp, Homo sapiens
cttcagcctctgctcaatcacctcagagattattttgcagaggatgatgg

SEQ ID NO: 584152 - DNA, 100 bp, Homo sapiens
ctggaggagctccccagctggtggctggagcgaccccttgttctttggtggcgctgccctctgcccgaggagatgctcagctacgcccgggatgacaccc

SEQ ID NO: 584153 - DNA, 90 bp, Homo sapiens
gagaagaaccaagttttaaccaccaacatttggctgcaaatggaactttatattgctgttggaatatctggagccatccaacatttagct

SEQ ID NO: 584154 - DNA, 90 bp, Homo sapiens
ataatcctgaggtgtttgacaaaacataccaattcttgaatgacatccgagcgaaagagaaagagatggagtttcactcttgttgcccag

SEQ ID NO: 584155 - DNA, 100 bp, Homo sapiens
cccgctgtagatgagaaactcagtgctgccgtggtcaacgccattggcctgtacatgcgccaccttggggtgcggaccaagagtggagacaagaagtcgg

SEQ ID NO: 584156 - DNA, 121 bp, Homo sapiens
atgaggaaacagacttggagaggttaagtgacatgctcaagacaacactgctgtattctaccttgtaaatactgttatttgtatatactgtaaatgatgacatcggtgggcactaaccgag

SEQ ID NO: 584157 - DNA, 96 bp, Homo sapiens
ggagaaggagttcgtgcaggcgtacgaggatgtgctggagcggtacaaaggtgtgttctactccctcttctgggaatgaagcctccccagcaaagc

SEQ ID NO: 584158 - DNA, 74 bp, Homo sapiens
ggaggccgagcgcagagcattggcaggaggggcaaggtggaacagatggagacctcacagacacggtcagtggt

SEQ ID NO: 584159 - DNA, 95 bp, Homo sapiens
cccattgaggatacctaatcaggtagttttggatgttgggtgtggaactggaattctctctatgtttgctgctaaagctggggcgaagaaggttc

SEQ ID NO: 584160 - DNA, 74 bp, Homo sapiens
agctagctggatcctctaggcagagctccaaacgagaatggaagccgctggaggaccgtagctgcacagacata

SEQ ID NO: 584161 - DNA, 100 bp, Homo sapiens
gaactacatcttctctcacgctcaagtcaccaagaagaatcttctggtcacaatgcttattgacagaactgtaccgctctctttttggccagctccaccc

SEQ ID NO: 584162 - DNA, 75 bp, Homo sapiens
ggatgaagaggttggagatgggaccacatcagtaattattcttgctgcggttggatttctcacgatgtccagtgt

SEQ ID NO: 584163 - DNA, 100 bp, Homo sapiens
gaaaagtgaagaaagtgatcataggagaaaaccatttcagcagtcccctggtgttaccaattgccaagcaagacagtttgttggaaaaagacattatgtt

SEQ ID NO: 584164 - DNA, 100 bp, Homo sapiens
gtcctggtgcacccccagtgggtgctcacagctgcccattgcctaaagaagcttctgggaacttggcagacgcagcttagagagactcaccagcgagcgt

SEQ ID NO: 584165 - DNA, 51 bp, Homo sapiens
gaccaccccagctacgaacagattcagattaaccagaagggctcggagaag

SEQ ID NO: 584166 - DNA, 74 bp, Homo sapiens
aatcttttgtgaaagtgtataactacaatcacctaatgcccacaagctatcatggtgaacttacttcagattgt

SEQ ID NO: 584167 - DNA, 100 bp, Homo sapiens
cgaggtcgagtaccttccctgtcccatcgcaaacccaaagatccccgttcctggagattctgattgagggtgagaactctgtctcagtcgacgggaagtg

SEQ ID NO: 584168 - DNA, 75 bp, Homo sapiens
ctgaatcgtgttcctgaatgaaagaagtcagaatagcctaacatggcagaccagagacagcgctcactgtctacc

SEQ ID NO: 584169 - DNA, 75 bp, Homo sapiens
cttccaaatacaagctgtataggcctctactacgtggacagtgaagggaaccggatttcaggggccaccttctct

SEQ ID NO: 584170 - DNA, 100 bp, Homo sapiens
caagcgggagtcggggatagtgtcatcggttcggtaaagtttctgttctctggaatacttgctggctggggcagatatcattgaaacaaatacttttagc

SEQ ID NO: 584171 - DNA, 97 bp, Homo sapiens
gagccaagagcctcaaaggaccaggtgctttcagaacctgagaccaaggtacaggagaggatggcaggtgcagagcgggcactgagctctgcaggtg

SEQ ID NO: 584172 - DNA, 102 bp, Homo sapiens
aatgacccagacccggacgacccccattgctgagccagcggagctgcttggtgtagtattgagtcctgtttgagctattgttctctttttcctgaaaaatgg

SEQ ID NO: 584173 - DNA, 100 bp, Homo sapiens
cttctccagccctactcagtgcagccactgcacctccctgatggttgggctgatccggcagggctacgcctgcgaggtaaagtcatcacctggccttggt

SEQ ID NO: 584174 - DNA, 98 bp, Homo sapiens
ctgccgtctctggcacctaacccagcagaccgctcaccccatcgggtaccagaggtttgaaaaggcatttctcctagctgttgacgttggtgctcgtg

SEQ ID NO: 584175 - DNA, 83 bp, Homo sapiens
agattgtcatagctgatgtcaagttggttgctgatttccaaaggtaagaccatgaattatggcatttcttaaatgaagcgttc

SEQ ID NO: 584176 - DNA, 83 bp, Homo sapiens
ctagtgttggagtgcaccaagaaatgggtttggaaatcccttgtctccaggttgctgggattgacttcttgctcaattgaaac

SEQ ID NO: 584177 - DNA, 73 bp, Homo sapiens
ccttcctgggtgggcccaagccaccccagaggttggatggcaagcatgtggtgtttggcaaagtgaaagaagg

SEQ ID NO: 584178 - DNA, 75 bp, Homo sapiens
tgaggcctccccagccacgtgaaactgaattcgatgtcttctttccgtcctgggagaggacataatgatagtcgg

SEQ ID NO: 584179 - DNA, 89 bp, Homo sapiens
gcaggagtcgggcaccatcccaaagaagcggggttaagcatctgaaaggccagaatgaatcagcattccctgaagaagaagaaggcacc

SEQ ID NO: 584180 - DNA, 100 bp, Homo sapiens
ctgatgttgctttctcaatattctccttcacgaagacaagaagttttcagcctcagccaaccaggtggccggcattcacaagaaggtggcccggaccatc

SEQ ID NO: 584181 - DNA, 105 bp, Homo sapiens
atccttggctgagacataatgttgacctcaagttgaaggtgctacagctagaatgaagcacatcaacctatcatttgcagcgtgtggatttctgggcatttacca

SEQ ID NO: 584182 - DNA, 90 bp, Homo sapiens
gggtccttccttccagcctgatgctaccaaaggtggaaagtcctgaagaaatccagtggacgtttgatgcaaatgatttgtatcaggggc

SEQ ID NO: 584183 - DNA, 100 bp, Homo sapiens
cgaggccctcatgtaccacacgtgcctgatttgagatggggtcccaggtctcggtggaatcgggagctctgcacgtggtgattgtgggtgggggctttgg

SEQ ID NO: 584184 - DNA, 100 bp, Homo sapiens
cacccagcactgatgatattataaaatacttggtgcttgaaaaactgaagaaggaagacgctgaccgaattcatatattcagttcttttttctataaacg

SEQ ID NO: 584185 - DNA, 74 bp, Homo sapiens
gagaagatggctgcatgaacgtttcgaaatcaaagataagagccgcaaagacagcctggaaagtgacagctcca

SEQ ID NO: 584186 - DNA, 82 bp, Homo sapiens
acccagacagaggggagcacagagaaagagaatgatgaagagaaaggcccggagactgtgctgtgacatgtatatggatgaa

SEQ ID NO: 584187 - DNA, 75 bp, Homo sapiens
ggatttgaagctggcagtctggttccaggatgaagcctgctgggagcgtgaatgacatggccctggatgccttcg

SEQ ID NO: 584188 - DNA, 100 bp, Homo sapiens
attctgtctttgtgtcctgagatcaaatggcacttcattggccacctacagaaacaaaatgtcaacaaattgatggattcaagtcaatctgaaagtccca

SEQ ID NO: 584189 - DNA, 101 bp, Homo sapiens
atgtcctgaaagtagacttaggctgcacatcggaggaaaactcgtgtctcaatgagatcttggagtcagcagatgcacccttagaagtcactgaaggattc

SEQ ID NO: 584190 - DNA, 100 bp, Homo sapiens
aacttttttcgaaagctgggtttcccgggagatcccaggcggtgacagagtggagccatggctagagttcaaaaggtgatgacctatcaacagccattct

SEQ ID NO: 584191 - DNA, 100 bp, Homo sapiens
ctggttacagctgagaagcccataccactatttgttgagaaatgtgtggaatttattgaagatacagtccaaggccattggtttgctagatgtggatgtg

SEQ ID NO: 584192 - DNA, 90 bp, Homo sapiens
tctgcatgaagctgctattaaagggaagatcgatgtgtgcattggcttcccagcagcggcttatggaccagtggcagcagcggcggtggc

SEQ ID NO: 584193 - DNA, 123 bp, Homo sapiens
ctgctactctctaagcgtcaccatcctgctcctgaacttcctgcgctcgcactggtcaaaatgcagatcttcgtgaaaacccttaccggcaagaccatcacccttgaggtggagcccagtgac

SEQ ID NO: 584194 - DNA, 96 bp, Homo sapiens
ccgagccttcccggcctggcgcgtttagttcggaactgcgggacgcgccggtgggctagggcaaggtgagagtgattttccagtgattgctttggc

SEQ ID NO: 584195 - DNA, 97 bp, Homo sapiens
cttgcttccccgtcctctgacatcgcctgcagccgagcgggcccgttccgccggagctgaggaccaggtggataattactgtaccttcctcatggaa

SEQ ID NO: 584196 - DNA, 75 bp, Homo sapiens
tcattgtattgttgcaagaattatgcatgggggcatgattcacaggcaaggctttaaacctggccagcggaaagt

SEQ ID NO: 584197 - DNA, 100 bp, Homo sapiens
cacggccgcaggatccccaaggacgtggttgaggaattcagcgatttatacaacgagctcctggaatgaggccgcccatgggaggccatatgccaatgat

SEQ ID NO: 584198 - DNA, 75 bp, Homo sapiens
cacatctatgccatcacagacaccgcctacaggagtatgatgcaagagcgggatgccttcgacacgctgttcgac

SEQ ID NO: 584199 - DNA, 87 bp, Homo sapiens
aatgtgacatgaaaaaaatgcattatgtggaccctgaccatgtaaaggagcgagcccagggcgtggtgctgaaagtgctcacaaact

SEQ ID NO: 584200 - DNA, 100 bp, Homo sapiens
aggaggcagtagccaaacacccagtcatccgtccttggctcaggatttggagagcttgcaccaccaaaaatggcaaacatcaccagctcccagattttgg

SEQ ID NO: 584201 - DNA, 100 bp, Homo sapiens
tagctggtgcgctgctcacggccattcactgcccatgctgagcgcctctcacacagggaaatgtttcaacgtgcgcaagcgttgcggcggcgggcagagg

SEQ ID NO: 584202 - DNA, 101 bp, Homo sapiens
aacagaaaccacctctgccatcctcgcctcagtcaaagaacaggaatcttctgcggcttgtccatagtgtgaataaaaactaaatcacatctataattcta

SEQ ID NO: 584203 - DNA, 98 bp, Homo sapiens
cccgttcttgcctcaggccagtcgcctccaggccaagagggatccttcacccgtgtctggctgaactcacgggaatcaaatggcgtaggtacaatttt

SEQ ID NO: 584204 - DNA, 100 bp, Homo sapiens
aagaaacctctgcactagaagcaagcaggtgcaccctgaagaccacaaattaaataaatatcatgactggctttgggaaaatcatgaaaaattaagtcta

SEQ ID NO: 584205 - DNA, 100 bp, Homo sapiens
cgtcttcgcctatgcctgccaggctgctggtgtgggcccatcgctggatggatctgtcagaacacggctttgggctggccctgctcaacgactgcaagta

SEQ ID NO: 584206 - DNA, 51 bp, Homo sapiens
aaagaacgatcgtccagtggaggtgctgctacccccgtatgatgatgccac

SEQ ID NO: 584207 - DNA, 96 bp, Homo sapiens
tcagttggaagcagccgatccagcctgcggagcctgtggggcaggcctggcatgcgtgggcagtgatgaacttcgaagctgtgctacactacaaac

SEQ ID NO: 584208 - DNA, 98 bp, Homo sapiens
caaactggatattcctactgctgctaaatatgagattgtagaaggcatgaaacaaaaaatgtggagtattgaaaatattgccttcggttctggtggag

SEQ ID NO: 584209 - DNA, 95 bp, Homo sapiens
cagatgacttcaaagcctattcaaaaataaaggtggacaatcacctttttaacaagggccagtgtcattcaaagatgtggctgtggatttcaccc

SEQ ID NO: 584210 - DNA, 75 bp, Homo sapiens
cagcatcgacaaatggccatccataaaaggtatgtcttactgaaagaaagaaacatgcttctaaccctagagcag

SEQ ID NO: 584211 - DNA, 100 bp, Homo sapiens
ctgcaagatgtcaagggccaagaagtcccagcgggtgccacgtctatgtgggcttcgtgctgtgggctgctgaatgaagtcatgggaactggagctgtca

SEQ ID NO: 584212 - DNA, 82 bp, Homo sapiens
agaacaccccgagatgagaggagaagagcccagcacaacgaaggtcccgcagcccccggaagccaatagactccctcaggga

SEQ ID NO: 584213 - DNA, 100 bp, Homo sapiens
agatattccaggtagcccaagagctatcaggggaagatatgcatcagttccatcgagccattactacaggtgggaatggaagtggccccacatctcaaag

SEQ ID NO: 584214 - DNA, 80 bp, Homo sapiens
agatgaagaaagcacagtaattaaatcccagcagaagaggaagatcaatcgaaatgcctccacggctgtgtacgcctgtt

SEQ ID NO: 584215 - DNA, 75 bp, Homo sapiens
agctaatggtggcagaaatcatgccggcctcagaaaatgtgcccctgatagagacggggtttcgccatgttggcc

SEQ ID NO: 584216 - DNA, 82 bp, Homo sapiens
ccaagatggtgaagcagatcgagagcaagagaggaggttcagatgagcccctgctgacttgagagagacagagagaccacgc

SEQ ID NO: 584217 - DNA, 95 bp, Homo sapiens
gaagagcgacaagccgctggcagccgcggatctcaccgccgctcaggggaaatcctcattgacgattcaatttgttgaaggccaatttgtggact

SEQ ID NO: 584218 - DNA, 75 bp, Homo sapiens
ggatatcgacgtcgtgatccagaagtccagagctgaggactgcctgtttgcaggcaaaagagatttcactagcag

SEQ ID NO: 584219 - DNA, 75 bp, Homo sapiens
ttgacacctttacacagagcagttgcatcttgtagtgaggagcagctgatgagccagatccgggagacgcagcag

SEQ ID NO: 584220 - DNA, 75 bp, Homo sapiens
tgagagaagaccagtctttcctctagacaatgcagatcttcgtgaagactctgactggtaagaccatcaccctcg

SEQ ID NO: 584221 - DNA, 87 bp, Homo sapiens
tcctggagaccaacgaaatcccctcgcttatcctgtgggggccgccgggctgcggcaaggaatgtatcctgtcaggtataatgtcag

SEQ ID NO: 584222 - DNA, 75 bp, Homo sapiens
cggttttcgtacgggcggccgtgcgcgaggcgagggctgagggaggaagacggcatggttacatgggacacctaa

SEQ ID NO: 584223 - DNA, 50 bp, Homo sapiens
ctattgaaagagagtatgcacagagttgatctctctaatgtattagatct

SEQ ID NO: 584224 - DNA, 90 bp, Homo sapiens
gcccaatccacatgcttttccaggaatgtgaattggacccttgctgcgaaggaagtacctgtaagcttaaatcatttgctgagtgtgcat

SEQ ID NO: 584225 - DNA, 75 bp, Homo sapiens
ggaaatgtcttgaaagaggcacgcatttttgacagtgggctcgggatgagtttgaaggcctcttcaagcagccag

SEQ ID NO: 584226 - DNA, 98 bp, Homo sapiens
gagagctgcaagccggtgcagcagccttcagcttttggcagcatgaaagttagcaccccatctgctttgatatgattgaagaagcatacatgacaaaa

SEQ ID NO: 584227 - DNA, 75 bp, Homo sapiens
aaggacaaggaggaaattgtgatctgcgatcgagcctcggtcaaggagcttctgcagaaagccgtcattacacct

SEQ ID NO: 584228 - DNA, 82 bp, Homo sapiens
ctcacggctgctgaggggctgcagcggcattactctactgactggcagagacaggagaggtagatgtccacgcccacagacc

SEQ ID NO: 584229 - DNA, 50 bp, Homo sapiens
gaaattcagcaaccaggagacctgacctaatctgggagcctgcaagtgac

SEQ ID NO: 584230 - DNA, 82 bp, Homo sapiens
aagtggtgagcctttttgtcactgggtgtccgcaatgttgccagtgtctgtctgcagattggctacccaactgttgcatcag

SEQ ID NO: 584231 - DNA, 101 bp, Homo sapiens
ctgggccatctggtccccgaggtcagcctggtgtcatgggcttccccggtcctaaaggaaatgataaccgagctgaagctgccatggaattcttacaagaa

SEQ ID NO: 584232 - DNA, 74 bp, Homo sapiens
taaagcagcgtgcgttcagccctgggcatccacccaacccaccagtatcaccaggaaaaactgtaaatgatgtc

SEQ ID NO: 584233 - DNA, 100 bp, Homo sapiens
cttaatgctagatgaaaaacgtgttatggtggatgccaatgaagttccaattcaaaagatgtttgaaaagctggatattgatgatgttaagaagttcaaa

SEQ ID NO: 584234 - DNA, 82 bp, Homo sapiens
ctccgtggccttagctgtgctcgcgctactctctctttctggcctggaggctatccagctggttcctctggagattaaatgt

SEQ ID NO: 584235 - DNA, 75 bp, Homo sapiens
cttttactaaaaatggacgcctggcaaccaagccaagacccatgttcttgacattgagcagcgactacaaggtgt

SEQ ID NO: 584236 - DNA, 101 bp, Homo sapiens
ggatacctggccgcgggatgctgggcggcgtcaggtgagcggtggtcgctgggcctcagcggcccacggccaaggagctcctgaagcacaagttcatcaca

SEQ ID NO: 584237 - DNA, 100 bp, Homo sapiens
aatgagttgtccgcccccagcatttgtggagcaatcttttctacagaaggttaaaagcatcttgactcctgaaggtttctaagcatgaattgaggaacag

SEQ ID NO: 584238 - DNA, 96 bp, Homo sapiens
agaagagctcacgggcgtgcggttcaaggctcagctgaaggacccgcagggccccgggccaggttcatgaactggaatgtaagaggcaccagagga

SEQ ID NO: 584239 - DNA, 75 bp, Homo sapiens
gaggaaaaaattgaaagagaaaaggaattagcagaagacattatgtcagtatttcgggctgctgtggatctggaa

SEQ ID NO: 584240 - DNA, 100 bp, Homo sapiens
attgtggacagcccaagaaaggacatcttatctttgatgcttgctttgaaagtggtgtcatggagaaactccagctgggcccagagattctgcagcggga

SEQ ID NO: 584241 - DNA, 100 bp, Homo sapiens
tccattatgtcgtgtgcttccccgggtgcatgtagtctttggactggttatttctggttttgaagtaatcgaacaaattgaaaatctgaagaccgatgct

SEQ ID NO: 584242 - DNA, 100 bp, Homo sapiens
gcagacatggacaccaaacatttcctgccgctcggacccagatgatgtggtaccagttggccaaagaagagcctggtgttggtgcatgtgctttggacta

SEQ ID NO: 584243 - DNA, 71 bp, Homo sapiens
gcccctacgtgcacaacatcacccgcaagctccaaatgagaagatgaagcaagtgttaaagaagactatag

SEQ ID NO: 584244 - DNA, 51 bp, Homo sapiens
cttttgggttacaaaaatccagaccaggaagaaggagagacgaccatcttg

SEQ ID NO: 584245 - DNA, 98 bp, Homo sapiens
acctgctctcgagatggcaggagtcgggagctgcggcaactgatggagaagtatctccagatgaaatggccactgcttgatgtccaggcagggagcct

SEQ ID NO: 584246 - DNA, 95 bp, Homo sapiens
agcgcggccgcagcagccctgttgggcccatgagatgtgtgctctgtatattccggaggtacaatttgccagtgtttccacaatggaaccaattg

SEQ ID NO: 584247 - DNA, 100 bp, Homo sapiens
cttccatctggggatggacaacctgcattggacccagctattgctgcagcatttgccaaggagacatccctcttagggatgcttcctttggaaattgcac

SEQ ID NO: 584248 - DNA, 75 bp, Homo sapiens
ccgccaagccaagctcaacctcaaatcagtactgagggtaaaagcagtctgggcgcaggctggggacccagatgg

SEQ ID NO: 584249 - DNA, 101 bp, Homo sapiens
gcacgtgggaaccgccgcagctccacactccaggtacttcttccaaggacctaggtctctcgcccatcggaaagtactatactggcaattgctggagaaga

SEQ ID NO: 584250 - DNA, 75 bp, Homo sapiens
tcgtgggactcagcagccttggtgctcaggtgccagatgcaaaggaattgaatgatctggcacgggaccctccag

SEQ ID NO: 584251 - DNA, 100 bp, Homo sapiens
ggagatggagcaggtgtttgagatgaaggtcaaagaaaaagttcaaaaactgaaggactctgaagctgaggggagaggactgtccctgagcagatttagc

SEQ ID NO: 584252 - DNA, 48 bp, Homo sapiens
gtgtgctgtgagagatctaccactagaactctcagaaattgagcccaa

SEQ ID NO: 584253 - DNA, 101 bp, Homo sapiens
atggacttcaagaaagagacagaatggtccgagcatgcattgccattatctgtgaactaggctggattctagtgacatttataacgaattgaaagaaacat

SEQ ID NO: 584254 - DNA, 98 bp, Homo sapiens
gacatgatgagcagcatgtcagaccagaccgtccgggtgaagacaaactttctgcctccttggaaagctctacatctccttgtgattggagtgtgggt

SEQ ID NO: 584255 - DNA, 74 bp, Homo sapiens
tatcgcacttaagcctcggaacaactttaccaggaccgtataatagacgctggccccaaaggaaactactctcg

SEQ ID NO: 584256 - DNA, 90 bp, Homo sapiens
cactccaggcaagccgtccagtaaatcacagaacaaatgtaaaccctctcaagtgccaacgacctcacagacacaggttgtggatagcag

SEQ ID NO: 584257 - DNA, 98 bp, Homo sapiens
cctggatgaggaagatgaagaggttatctaccttgcctgctcctatgccacagtgtacctgatctacctgaaatttaaggcaacctacgatggaaatc

SEQ ID NO: 584258 - DNA, 100 bp, Homo sapiens
gagacagccggttgctgagccgggagcgctgactggcccggctgggcaggatggcaagttcttagcgtgcgtgagccaggacgggtttctgcgggtgttc

SEQ ID NO: 584259 - DNA, 90 bp, Homo sapiens
cgaaataccaccggaactggtcgaatgaggcacctaaaaattgtataccgcagattcagggacacggccaacacggtgaaggaaaagttc

SEQ ID NO: 584260 - DNA, 83 bp, Homo sapiens
gctgggcgcggattcgccgaggcaccgaggcactcagaggaggtgcagagcattgtagaccaaggagccatggataggagaag

SEQ ID NO: 584261 - DNA, 100 bp, Homo sapiens
ctggaatgtgaagagacatgagaccatagccaaacccccagggcttcataaacttcacttaccaaatacttcaagggattcagaaacagccaagccttct

SEQ ID NO: 584262 - DNA, 75 bp, Homo sapiens
gaggctgtttgacagagcagacttaccctgaagtagttagaatgtcctctttgatacgcaacctacggctctctg

SEQ ID NO: 584263 - DNA, 100 bp, Homo sapiens
ccgagccaggactatgtgccagccagccaggggacaagggcctgtccgacacgccctacgacagcagcgccagctacgagaaggagaacgaaatgatgaa

SEQ ID NO: 584264 - DNA, 101 bp, Homo sapiens
gttcccagaaggactcttctatgaggacattacctgttgattcttgggcaaggcccagaatttggtggacatacttaaagaagaaaggaatcttcagctaa

SEQ ID NO: 584265 - DNA, 100 bp, Homo sapiens
tgtgatccaccatgaagcagaatctaaagtcacagaagatcttattagacggaatgctgaacacaacgactgtgtcattttttccctggaggaactctcg

SEQ ID NO: 584266 - DNA, 100 bp, Homo sapiens
ttgatcttgaacttctcagcctccagaacgatatggaggccacatttgcagagtatgaagaatggtcagaagacccaataccagagtcagtaattcagaa

SEQ ID NO: 584267 - DNA, 82 bp, Homo sapiens
cggctcacctggcggtgcccgaggagtagtcgctggagtccgcgcctccctgggtctcagctgagtctgctctgatcaccca

SEQ ID NO: 584268 - DNA, 75 bp, Homo sapiens
atgtctttcagagcccggcaccacccatcttgagtatctggtcagggaagtcaaagatgcatccctgagttcttc

SEQ ID NO: 584269 - DNA, 95 bp, Homo sapiens
gcggtggattgactacggcaaagtggccactcagcatgaagatggccctgaggatgacccacagttggtaggcatcactgctcgtaacattccac

SEQ ID NO: 584270 - DNA, 100 bp, Homo sapiens
gctgctggaggacgagggccagctgacggagatggtgcagaagatggaggagctctaagcgaaagacatgaggcctcagcctgaaatgaggttgttttga

SEQ ID NO: 584271 - DNA, 80 bp, Homo sapiens
tgaagagcgacaagccgctggcagccgcggatctcaccgccgctcaggaggcagaagaggcctggaccttggcgcacaca

SEQ ID NO: 584272 - DNA, 100 bp, Homo sapiens
agcagggctgtggctaccatgttctctcgcgcgggtgtcgctgggctgtcggcctggaccttgcagccgcaatgaagcctggctcctacagctgccgcca

SEQ ID NO: 584273 - DNA, 82 bp, Homo sapiens
tcaggaccgtccaccaccacctcccacccgctgtgtaaacctgggctggacggcagtctggaaacgaccaatgagatcttgg

SEQ ID NO: 584274 - DNA, 125 bp, Homo sapiens
gaggctaagaaagtggtgaatcccctgtttgagaaaaggcctaagaattttggcattggtgaccaaagccacgtaatgtccgtagttcgctcatccgtccatgccagatggattgtggggaaggt

SEQ ID NO: 584275 - DNA, 100 bp, Homo sapiens
cgcagccatgcctggtaccatggccgcatcccccgagagggaccacggcaaagtcgggcagtgcccccatcctcaagtgccccacacagttcccgctcat

SEQ ID NO: 584276 - DNA, 50 bp, Homo sapiens
atcccatctcaggagcacctgaatgggattgtcaatgaggcagatcagat

SEQ ID NO: 584277 - DNA, 75 bp, Homo sapiens
cagacaggtggcgaaggcagaggagtgagaagccctaccactgcaactgggacggctgcggctggaagtttgcgc

SEQ ID NO: 584278 - DNA, 92 bp, Homo sapiens
cacgtgggcacggaccaattcgggaacaaatactactacatcccgcagtacaagaactggagaggattcactccttctccagttgcacagcc

SEQ ID NO: 584279 - DNA, 74 bp, Homo sapiens
tgaagagtgaggagaccatagctgcacagccaggtctaagagtgtaaccagttccagtagcagtagcagtgaca

SEQ ID NO: 584280 - DNA, 100 bp, Homo sapiens
aaattgaaatacagatgaaacatcagtctaccagctttgggctgatgctgacatcagtgggtgaattttctggagccaataaggaaaagcttgaagccac

SEQ ID NO: 584281 - DNA, 83 bp, Homo sapiens
ccagcgggatcctgacatataccatcacctgtggtggaggtggatacagcagtcggagaacatctggcagagacaaatacgga

SEQ ID NO: 584282 - DNA, 74 bp, Homo sapiens
ctccgcgtcccgctcgctgggagagagcacccaccaaggctccggatgtgttccccatcatatcagggtgcaga

SEQ ID NO: 584283 - DNA, 75 bp, Homo sapiens
tgggacccaagatcacctatcaggacatggatttgattgacatactttggaggcaagatatagatcttggagtaa

SEQ ID NO: 584284 - DNA, 100 bp, Homo sapiens
gagcgagccagcgcccggagcaagcggagctcccccaagagccggaaaggactcgctcagcagcagcctgaaaacttgctacaagtatctcaatcagacc

SEQ ID NO: 584285 - DNA, 97 bp, Homo sapiens
atcgggagtacacagacatcatccgaggaaggaccagaagaagctcgagcagacagtggagcaaatgaagcagaatgaaactactgcaatgaagaaa

SEQ ID NO: 584286 - DNA, 75 bp, Homo sapiens
gtcgagacgccgtccgccatccagatctgccgatggagaaggatgaaactgtgagtgactgctccccacacatag

SEQ ID NO: 584287 - DNA, 92 bp, Homo sapiens
ctgaggccgggccggccgcccagacgctgcccgcgggcccggccacggcggagccaagatggtcatcatgggccagtgctactacaacgaga

SEQ ID NO: 584288 - DNA, 88 bp, Homo sapiens
gcccacagtgggggtgtgcaaacccgagagaactgggagctccttcccttaacagagctgagagaggcatctggagctgcagcatgga

SEQ ID NO: 584289 - DNA, 83 bp, Homo sapiens
agttggttactccattcgatttgaagactgcagtagtgcaaaaaccattcttaatgttcctggaaaacaatggaaaggacaat

SEQ ID NO: 584290 - DNA, 74 bp, Homo sapiens
cgacggcgtcgggagagcgcgcctagccggctcgcgagaacgaatgcaggaatttgggaactgagctgtgcaag

SEQ ID NO: 584291 - DNA, 96 bp, Homo sapiens
ccccattctctgagaacagcacttccctgcaggtgtgggcccatcgctggatggatctgtcagaacacggctttgggctggccctgctcaacgact

SEQ ID NO: 584292 - DNA, 90 bp, Homo sapiens
caaacagctggggagggagatccgcctgcagctgaaggcagcctcgtcttacagcgtgactgcaaagaaaaagacttttgttttgcaaaa

SEQ ID NO: 584293 - DNA, 97 bp, Homo sapiens
ctgagcagccaacacaccagcccagacagctgcaagtcaccatggacgctgaagaaagtttcctacactactgaggtttaggggcactgtgaagcaa

SEQ ID NO: 584294 - DNA, 110 bp, Homo sapiens
gagaaaacgtttttcactcttttagtattactaggctatttggaggatttgacagctaaggatattgaagaaattattgatgagctcaaggctggcaaaatcccaaaacc

SEQ ID NO: 584295 - DNA, 100 bp, Homo sapiens
ttgccactgggtcccccgtgtcaactgaactgggtctgtttctgtcgactgtggaccacttatgtgcgatccgtggaccacttgcgtgcgatctgtcggc

SEQ ID NO: 584296 - DNA, 100 bp, Homo sapiens
gacatgaagaaggtggtgtgtgtggatcagcagacccccaccatccctaaccggctggctgcagacccggagggagccatggatttgctgcgggagctga

SEQ ID NO: 584297 - DNA, 100 bp, Homo sapiens
tgccagcactgccagggcaggttcaattgacatcacttgttagaagagcaactctgaaagaaaacgagcaaattccaaaatatgaaaagattcacaattt

SEQ ID NO: 584298 - DNA, 90 bp, Homo sapiens
atgagatattctgctgagtggaagatttacaagggtcccgactcttccttccggtattccagccttcagctgaactgtgaatatcgcttc

SEQ ID NO: 584299 - DNA, 100 bp, Homo sapiens
ctgtaccaaacgtggttgtacgagacgtggcctgtggcgctaaccacacgcaagaagtctatgtgccccaggatcctggattacctgaggaagaagagat

SEQ ID NO: 584300 - DNA, 101 bp, Homo sapiens
tgttcccacccacttcagggatgccacctcccacctcagggcccccttcagccatgactcctccctacccgcagtttgagtcagagcaccataacatggtg

SEQ ID NO: 584301 - DNA, 96 bp, Homo sapiens
cgtgtcgcggcgtctgaaaggggccactggatgcagccgctctctgctccctgccccaatgaacatctgcactaggcccaagccttggagtaattt

SEQ ID NO: 584302 - DNA, 83 bp, Homo sapiens
ccgggattggaccgacgcagccatggttccaagaccaaagattaaattaagagaaggtaaagctggacaaaatctgctggaaa

SEQ ID NO: 584303 - DNA, 100 bp, Homo sapiens
ttctgggagcacacccgttctctcggctggatgttctcatcgtccctgccaactttccaagtctggggatggccagggtcgcggcgagcgcgcctatgac

SEQ ID NO: 584304 - DNA, 100 bp, Homo sapiens
gcaagattttccggccccctcgcgcctcccattgcagcctttgtgataactgcgtagtgcgaagaaccctgaagagcggcctgaccccagaagaagccag

SEQ ID NO: 584305 - DNA, 100 bp, Homo sapiens
ccggctcgccggctgcgggagtggcctcaagatggatgaagacggcggcggcgagggtggtggcgttggttagtctgctgctaattggaattgctgcgtg

SEQ ID NO: 584306 - DNA, 73 bp, Homo sapiens
tacgtgggcaccttgcgcttcttgcagtcgaagatggcagtgaacgtatactcaacgtcagtgaccagtgata

SEQ ID NO: 584307 - DNA, 80 bp, Homo sapiens
tcagaaggagctggcggacatcactttagaccctccacctaattgcagggacttgcaacaaagcattgccagagaaccta

SEQ ID NO: 584308 - DNA, 110 bp, Homo sapiens
ctgacctccagcgggcatcaggagcaggacacagaactgggcagtacccacacagcagataggtgatcttcagctttgcaaactggatgaactagattgcttgatcaaag

SEQ ID NO: 584309 - DNA, 100 bp, Homo sapiens
ctgaggacacaagcagtgttctgcgttccccgatgcccggagtggtggtggccgtctctgtcaagcctggagacgcgaagtcaacgaaaggttccgttgt

SEQ ID NO: 584310 - DNA, 100 bp, Homo sapiens
atgaaacttgggactctgcaatagatacatggagcccatcagaatggcagatggcttatgaaccacagtggggttccagcgtgtttctgtgttataagaa

SEQ ID NO: 584311 - DNA, 83 bp, Homo sapiens
gaccacccaccatgcctatccagggattgtcaatgaggcagatcagattccgatttgacgggcaaccaatcaatgaaacagac

SEQ ID NO: 584312 - DNA, 95 bp, Homo sapiens
gtgtgtcatcatcgccacgctggtgtgcagggtgctgtgggcccagaagcgcccatgcctgagagcgtccaggaccaggcagagctgggccttaa

SEQ ID NO: 584313 - DNA, 75 bp, Homo sapiens
cacagctgctgtcttcaatgctgttaactggattgagtccagctcttgggatgggttccaccaccgcttcaatcc

SEQ ID NO: 584314 - DNA, 74 bp, Homo sapiens
ggccaaggacctggccgacatcgcggccttcttccgatccggtggccctcatgacactgacgctcttcccggtc

SEQ ID NO: 584315 - DNA, 80 bp, Homo sapiens
cctaggcgaagatccggactctgggtgttttgctaccgtgaccgtttagcaaatgcagccctgaggatttggctactgca

SEQ ID NO: 584316 - DNA, 89 bp, Homo sapiens
gtactaccaaggacagcttttttcctgcaaggctgcagttcatggagctcgtttcaaagggcaagatctaaaactggcatggaataaac

SEQ ID NO: 584317 - DNA, 100 bp, Homo sapiens
gctatctcaaggctactcagccatcccttacagaactcaccacactcaagctcatttttggacagtacatcacccctcctggcaattgctgcctgcacag

SEQ ID NO: 584318 - DNA, 101 bp, Homo sapiens
tagcgaaggtcgccgaacccgcctggctagccggcgagttgagtggcgagtgtgatccctcacatccacaaatctctgattggaaagaagggacagcagaa

SEQ ID NO: 584319 - DNA, 101 bp, Homo sapiens
cggggcaggatctgtgtcaaaagagcttctctccagagtagaaagaatgaagaaggagccccacaggaaggaattctggaagatatgcctgtggatcctga

SEQ ID NO: 584320 - DNA, 87 bp, Homo sapiens
gaccccttgtccagttactctaacaagtctggaggatgctcgtcagaagttccgctctgttctggttgaagcaacggtgaaactgga

SEQ ID NO: 584321 - DNA, 98 bp, Homo sapiens
ggttgttttataaactgcctggccgaatcagccttttcacgctcaagggctatatcagtgtaaatgagattaatgagccgtgtggcaattccacgaat

SEQ ID NO: 584322 - DNA, 76 bp, Homo sapiens
ggatagactgcacaaggtgaagactgtctgcagcaagctgccgggccgcaagtacagccctgggtacaacaccgag

SEQ ID NO: 584323 - DNA, 80 bp, Homo sapiens
gcgaacacagtagtggaagatgtaaagcaatatttcgagcagtttggcaagcaaacggggattcagcgtccgatcctttg

SEQ ID NO: 584324 - DNA, 100 bp, Homo sapiens
ctaaaccagtgctggacaatagatgctcagttccatgcctctgcagcggtgcctcatgtttgctgtgtagttgctgtcctaacagtaagaattccacggt

SEQ ID NO: 584325 - DNA, 74 bp, Homo sapiens
ctgcccacccctcctgtaacccagcctgtttcacttcttgggaaatcctcattgacgattcaatttgttgaagg

SEQ ID NO: 584326 - DNA, 75 bp, Homo sapiens
accgacctcatcagtgagctgtccctgctggaggagcgcttccgggccagcagggcgagcccctaccccagagtg

SEQ ID NO: 584327 - DNA, 74 bp, Homo sapiens
tggattgtcacctttgctgcaaaaaattacggggagtacacctttaggatgctataaaaaactaatagaatatc

SEQ ID NO: 584328 - DNA, 101 bp, Homo sapiens
taaaggagagttattccagtttaggaggaagatgcaagcggtttgggaccttgaacaaggcaaatatggttttgagatggagtttcaccacgttgcccagg

SEQ ID NO: 584329 - DNA, 73 bp, Homo sapiens
gtgcgcgtcccgagcccgcggggcagctaccgctcggtctcttgatggtcgtctccaggtatcccatcgaaaa

SEQ ID NO: 584330 - DNA, 100 bp, Homo sapiens
tcacggagaagaaggcctccgacgtattgttgcagcatctggcagtgagactgaggatgaggacagcatggacattcccttggacctttcttcatccgct

SEQ ID NO: 584331 - DNA, 82 bp, Homo sapiens
actgactctaggaagggctggagttgttttgaatgggcgcccgtaagagaggtgggcaagcttgggcactgtttaaaggaaa

SEQ ID NO: 584332 - DNA, 75 bp, Homo sapiens
tggatgattggtagctaagactcccgaatacttcagaagtggggaaatgacaaatttacatgtattggagaccag

SEQ ID NO: 584333 - DNA, 100 bp, Homo sapiens
catgctcaaagtgaatatattaagattgatatagaaatcaacggcagtgcagtggatcttcacatgaagttgggtgataacggagaagctttctttgttg

SEQ ID NO: 584334 - DNA, 90 bp, Homo sapiens
ctttggatctctgattgcatctatgtggattctttttggaggttatgttgctaaaggttcacctttccttgccagtgaagatggcgtgct

SEQ ID NO: 584335 - DNA, 87 bp, Homo sapiens
ttggttccccctccctcagcttccgccccaaaagccaacaagtcccaaatttggaaaagctgactcatatgaaaagctggaaaaact

SEQ ID NO: 584336 - DNA, 98 bp, Homo sapiens
ggcgttcctcaaactccgtgaccagtgggacttctcctcttgcatgcctgaatgcaatgcttcacacaaactccagaggtgaagagggcatcttctat

SEQ ID NO: 584337 - DNA, 100 bp, Homo sapiens
ctcactgccatcagctgcatcctccctatggcactggctgaggctgaggtggcctccttgaaccgtaggatccagctggttgaagaagagctggaccgtg

SEQ ID NO: 584338 - DNA, 75 bp, Homo sapiens
tgtagcagacactgcaaatgaagctctcgaggctgctaagagactaagacatgggtgtggaggcaaagaaccatg

SEQ ID NO: 584339 - DNA, 96 bp, Homo sapiens
gcctgcagctcttgggttttttgtggcttccttcgttattggagccaggcctacaccccaggctattggatgttgtcactgtgccatcaggtgaac

SEQ ID NO: 584340 - DNA, 108 bp, Homo sapiens
ttaaggatgtgcaggatcttgatggtggcaaggagttgcaaaagcttctcatttcagagagatgccaggatcctaagtgcctgccaaacttaccaattctaaggaata

SEQ ID NO: 584341 - DNA, 74 bp, Homo sapiens
cagcagcagcagtagctatggcagtggcagaagattttaattagactttgagaatcactacaagaaaaactcct

SEQ ID NO: 584342 - DNA, 82 bp, Homo sapiens
gtgaagctgctgctgtccaagggctctgacatcaacatccgagacaacgatgaaaactttcggaagagaaagttgcctgtgg

SEQ ID NO: 584343 - DNA, 100 bp, Homo sapiens
atttgttgctgttttatttaagagtgttgatttcaactggcttcaagcaatggtaaaaaaggaaaccctgcttgataatggaactatacagcgaagagac

SEQ ID NO: 584344 - DNA, 74 bp, Homo sapiens
gaccccagatgtctgacagccctgtgtgacaccaagataagtaacccaagaaggatcaagaaggtggagaagaa

SEQ ID NO: 584345 - DNA, 89 bp, Homo sapiens
caggcgcggcgcggctgcggctgaggagggtgtgaagacagagaatgaccacatcaacctgaaggtggccgggcaggacggctccgtgg

SEQ ID NO: 584346 - DNA, 96 bp, Homo sapiens
gaaggccatcacccaggtcagcaagggcacctgcgagcaagacatagggcctgattacattccaacagaggaagaaaggagagtcttcgcagaatg

SEQ ID NO: 584347 - DNA, 99 bp, Homo sapiens
cgaggtgtcggcgcgggagcagcacttccacagccaagtgcgggagtccacgtgccggtggtggtgtgcacattgagccccggtatagacagttccccc

SEQ ID NO: 584348 - DNA, 88 bp, Homo sapiens
tcatgaagagactccagaaagggcgttggggccttcgtgaagacctggctgcccttcatccttctcctgggcatcatcctcaccgtca

SEQ ID NO: 584349 - DNA, 75 bp, Homo sapiens
ctgcccagagatcgcagcatatcaaagatgcaggctggctggtgggagtgaaggaatcagactggcttcagtaca

SEQ ID NO: 584350 - DNA, 82 bp, Homo sapiens
tgcccgaggaggcagccaagctcgtggcctgcctctgcgtgcgataaagataaagtttctctaaccaagaccccaaaactgg

SEQ ID NO: 584351 - DNA, 100 bp, Homo sapiens
cgtcctgtacgtgaagctcggggtctcccttgatctgagaatggctacctctcgatatgagccagtggctgaaattggtgtcggtgcctatgggacagtg

SEQ ID NO: 584352 - DNA, 74 bp, Homo sapiens
agatgtccctggtgatgcctgccatggcccccaatggaatcatgttcgttcaggaggaggccctggccagcagc

SEQ ID NO: 584353 - DNA, 113 bp, Homo sapiens
cgcgatgtcggtggccgggctgaagaagcagttccacaaagccagccagacctcaagaaacactcgttcagatgaagacaaagatggcaactgggatgcttggggcgactgga

SEQ ID NO: 584354 - DNA, 97 bp, Homo sapiens
tgggacttggagtatggatatagtggccaaatcaatgaaggtccctgtatatgagaccccagctggatggagattcttctcaaatctgatggactca

SEQ ID NO: 584355 - DNA, 89 bp, Homo sapiens
gatctgcgcttccagagcgcagctatcggtgctttgcaggttctcaacccattttacattttccagctgttcagtgttatactgtggag

SEQ ID NO: 584356 - DNA, 75 bp, Homo sapiens
cgtgtgtgtggtgggcttcgacctggagctgggccaggccgtggaggagcccagtttcctccaattgcagcacaa

SEQ ID NO: 584357 - DNA, 75 bp, Homo sapiens
ggctggtggccaaagcctttgggacaggttgtctgcattcaaaagagcattctattaaagctaccttaatttggc

SEQ ID NO: 584358 - DNA, 100 bp, Homo sapiens
tgtcaggagacggagccacggagcagggtatatttacttctggcacatgggaagagaaatcagatgaaatttcctttgctgacttcaagttctcagtcac

SEQ ID NO: 584359 - DNA, 82 bp, Homo sapiens
gcggatctcaccgccgctcaggcgccgtgccgtccctgcagtgacaccgaggtgctcctagccgtctgcaccagcgacttcg

SEQ ID NO: 584360 - DNA, 75 bp, Homo sapiens
tcgtagcttacccgcagaactcggaaacatggtatcactcagattctgcctgatcaatgcaggagtcctgtacct

SEQ ID NO: 584361 - DNA, 97 bp, Homo sapiens
ccccccggcgcagcagcatcatcaaggatgtcacatgtacttcagtttgaggataaaagcagaaaagtgaaagatgcaagcatgcaagactcagata

SEQ ID NO: 584362 - DNA, 82 bp, Homo sapiens
ccagactcgtgggggaaaggctggcctttccacgaagagtcctcagccttctccctccagccggaagagccccctgagtctg

SEQ ID NO: 584363 - DNA, 98 bp, Homo sapiens
aaggatctggaaagcatcatcagacccaagtgccaagttatttactttcccatcaggtttcctgatgtgagcagattttggggtaagtgcgttcctag

SEQ ID NO: 584364 - DNA, 99 bp, Homo sapiens
cttggaatccagtggaggcataaaccaaatctctttacacgctgtcttacaccgcttgtaccagaagaccttagaaaaaggaggaaaggaggagaggca

SEQ ID NO: 584365 - DNA, 100 bp, Homo sapiens
agagagagaggtggacagatctgagagatactgagttccagaaacgccgctggactgcgaggtctccctgtggtcgtcctggggactgtgcggaggccac

SEQ ID NO: 584366 - DNA, 100 bp, Homo sapiens
gaagctccgttgactaccgtggagagatcataatttggggttcaagattccagataaagcatatgatggctttcattgaacaagaagccaatgagaaagc

SEQ ID NO: 584367 - DNA, 100 bp, Homo sapiens
tcaagaatgtttttgaccagaaaaccgacaaccttcccagaaagtccaagctcgtggtcagtatttccagaaattgggacgatgttcagtgagagtttct

SEQ ID NO: 584368 - DNA, 90 bp, Homo sapiens
accggagaccccgaaaacggaagcgcagggagaaggaagaggtgtttgaaaagctgactgcctgcatccacgggtctgcggcgatgctct

SEQ ID NO: 584369 - DNA, 90 bp, Homo sapiens
cgccgacccgcgccctgctccctctcagcacctgggcggacggcagaatacttctatgaattcctgtccttgcgctccctggataaaggc

SEQ ID NO: 584370 - DNA, 75 bp, Homo sapiens
cacatcagccagtgcgaagagctgcggctcagcctcgatgtgccggtgacttcagcgccagtcaccgcgttctac

SEQ ID NO: 584371 - DNA, 75 bp, Homo sapiens
tgaaacccaaacaacatctcctgctattccttgggctgcctttcctgcaggtagacgcaccctctgaagatggtg

SEQ ID NO: 584372 - DNA, 83 bp, Homo sapiens
aggagccagtgcgggaaagaggagatgcttctgcatgtagagcgcatgaagtacaggacaataaagcttcctacacatatcac

SEQ ID NO: 584373 - DNA, 100 bp, Homo sapiens
cttttgatggaatctatgcaaatatgaggatggttcatatacttacatcagttgttggctacaccaagtccattgatatttggtctgtaggctgcattct

SEQ ID NO: 584374 - DNA, 147 bp, Homo sapiens
agcaagtatgtcccggtctctgcagccgccatcttcctagtgggagctacgacactcttctttgcctttacgatcacagtcaccttctatatagcaccatccccaggatgcaggagccggggcagattgtggagacctacacggagg

SEQ ID NO: 584375 - DNA, 88 bp, Homo sapiens
acgccttaacccaaggaagtgactcaaactgtgagaacttcagatacaaattcaaagcacgtgaacttgatcccagaatacttgaagg

SEQ ID NO: 584376 - DNA, 90 bp, Homo sapiens
ggaccccgggacatctgaaagccaggaaatgagcaacattttgcagatgttgtacttagtgaagaatttctcaatcttggcatcgaacaa

SEQ ID NO: 584377 - DNA, 96 bp, Homo sapiens
ggttccccggcccacagtgggggtgtgcaaacccgagagaactgggaatagccaggccagaagaaggaaggcctgtggtgagtgggacaggaaatg

SEQ ID NO: 584378 - DNA, 75 bp, Homo sapiens
cgtggggatggccaccagtttccggacagcttcgtgctggatggcccactgcgtgaccttggttcagctgtccat

SEQ ID NO: 584379 - DNA, 75 bp, Homo sapiens
gccagcaagaaatgatcagtagcaccagtgtttatgtcgcagatatggccagtacactatgaaccaggaaagcac

SEQ ID NO: 584380 - DNA, 100 bp, Homo sapiens
tgaaatttcttacattttgtatggaatatgagaaatatcctgatgaatataaaggtatatggaagaaattgtggagagtactttgtccttgttaacagtt

SEQ ID NO: 584381 - DNA, 50 bp, Homo sapiens
gttgaacaaagacagtacatgtataagcagtttagccaaattttgaagaa

SEQ ID NO: 584382 - DNA, 101 bp, Homo sapiens
agactgaaggacagcggcaccgccagacggccagaaagttccgccatgagctggggcacggagctgtgggttgaagctccattcataccaaagtttagagg

SEQ ID NO: 584383 - DNA, 74 bp, Homo sapiens
ttcaaggaggccttccagctgtttgaccgaacagaaataggaaggttgttgattactcacagtttcaggaatct

SEQ ID NO: 584384 - DNA, 97 bp, Homo sapiens
tatacacagccccctacagatctgtgggactggtttgaatccttccttgatgatgaagagaaatggaagcaactgtcgagattgcagcggaatatga

SEQ ID NO: 584385 - DNA, 82 bp, Homo sapiens
cagattcttgcatatcatggaggctcagcttgtcaatcggaaacagaaattagagtctgtggaactttctagccaatcagaa

SEQ ID NO: 584386 - DNA, 103 bp, Homo sapiens
atttgtcacctgaactacttcacattttccccaatatatgaatcagcagccaagaagcccaaatgggatgacttcaaaaagaagaagaaagaactgaagcaaa

SEQ ID NO: 584387 - DNA, 100 bp, Homo sapiens
aaaaagtgatattggatggatatgggagctgtggccctcagaatttaaacttaaggaaagagtgggaaagtgagggtggtccgggactacaatcttcagc

SEQ ID NO: 584388 - DNA, 100 bp, Homo sapiens
ttgaaactctaggaggtgtctttaccaaacttattaataggaataccactattccaaccaagaagagccaggcctccaggcccaaggtcagcatcccact

SEQ ID NO: 584389 - DNA, 100 bp, Homo sapiens
aaacagtggcagctggaccaggagctacgaggctacatgaaccgggaagaaacctgtgaaggtcgaaacagctgcgtttcctgttttaatgttagcgttg

SEQ ID NO: 584390 - DNA, 75 bp, Homo sapiens
cccacccccgctgtctcctcagccatattctgctggtcacacaggtcccaggtcaagttcatggacctgagatgc

SEQ ID NO: 584391 - DNA, 100 bp, Homo sapiens
ctctgcccatcaacctctcttctgtatcttgggcgaacagaacttcagcgagagggaagcatcgagactctgagtaacagctcaggctccaccagcggca

SEQ ID NO: 584392 - DNA, 100 bp, Homo sapiens
cagtaccgcaaggaccccaaagagtgctgcaagttcatgtgtctggacccaggggatggactgaacggacagttccagaagtgtgactggctaaagctcg

SEQ ID NO: 584393 - DNA, 99 bp, Homo sapiens
cactggccatcctccgtgtcatccggttgccagagactgctgctactttgaaacgtacgatagaggccctgatggacagaggagcaatagtgagggact

SEQ ID NO: 584394 - DNA, 110 bp, Homo sapiens
tacccccataccgccccagcctggaggaggacagcgccagcctgtctggggagagtctggatggacatttgcaggtactccacttccggactcctggactgcattaggaa

SEQ ID NO: 584395 - DNA, 82 bp, Homo sapiens
gggggcaccattaacatgatggagtacctgttgcaggcacaatgttagaggtgttgtatctatggctaataatggcccgaac

SEQ ID NO: 584396 - DNA, 98 bp, Homo sapiens
ccgggagcaggaggagctgctggcgcccgcagatgatgcaccgtggcctggcggcgagcccccggtcaccttcctccgcacggaagaggggccggacg

SEQ ID NO: 584397 - DNA, 50 bp, Homo sapiens
cactgcttccctcagccataacagaattaaacaaccaccatgtcgagcaa

SEQ ID NO: 584398 - DNA, 98 bp, Homo sapiens
tggcatcagcacagacaccgctttgccgatagggtgctgttggcccaaaggttgccctgaagccccccatccagaggaagcaaggagccggagctccc

SEQ ID NO: 584399 - DNA, 75 bp, Homo sapiens
agcgtatgcttttgtgcacactggtgacaactcaagagcaatcagtaccatctgcttagcagtgtctgcaaaaac

SEQ ID NO: 584400 - DNA, 96 bp, Homo sapiens
atcccggctgcttttgctgcgccctctcagcttcccaagaaagatactgtggcaagatttttccaaggtctgcaaacctaacacggcacttgagaa

SEQ ID NO: 584401 - DNA, 80 bp, Homo sapiens
acgacaaaggctgtgctcttggtgaggaagttgacccttcaaagttgtacaagaaagcagatgatgttgcagccattgaa

SEQ ID NO: 584402 - DNA, 98 bp, Homo sapiens
gtggatgtcggcgaagccgcgggcgagatggcggctgcagaggctgtgcatcacatacacctgcagaacttctcacgctctctgcttgagaccctcaa

SEQ ID NO: 584403 - DNA, 82 bp, Homo sapiens
accagccaccctgcccccaagaaggaagtcatcatgggccggcctggaacagctgtttgcagacaaggtcccaaagacagca

SEQ ID NO: 584404 - DNA, 100 bp, Homo sapiens
caccgacatggaacagggactcactgggggatcttacacatttgttccatggcttctcagctttaaaaggggaagtgccctagaagaaaaagagaataaa

SEQ ID NO: 584405 - DNA, 78 bp, Homo sapiens
ttgaaccagtcaaccagtctattgttgtcagtggagagagtggtgctggaaaggtactgaacgacacctgggtctcct

SEQ ID NO: 584406 - DNA, 101 bp, Homo sapiens
gatagaagaggccaagactgcgttcctgctcaacatccaggtatttgaaatatctcaccaaaaaatatttgaagaagaataatctacgtgactggttgcgc

SEQ ID NO: 584407 - DNA, 90 bp, Homo sapiens
atttgccagatcaccacctctctgtaccgagctcagcagatcatccagctcaacatccaaggagtcgttcacgcctactgaggagcatgt

SEQ ID NO: 584408 - DNA, 90 bp, Homo sapiens
ccttcacctgcagaagcgtgtcgttctgcaccagcgccttgatcgagtacttgagagtgaagacatttccacctggacacctgaccatgt

SEQ ID NO: 584409 - DNA, 100 bp, Homo sapiens
ggactgacggcaacctctacaaggccaagttcatctcctccgtcaccagccacatctaccaggttgagcttcagcgacagcgagagtgacaacagcgccg

SEQ ID NO: 584410 - DNA, 83 bp, Homo sapiens
gggccccatcgagaaatggccgcgtcggcagctgatggttcctgggaaggaaggtggggtaccccttgctcccaaccagcctg

SEQ ID NO: 584411 - DNA, 95 bp, Homo sapiens
aacgattgatgaagtagttgacttttcctccgcaaccatgtctgacaaacccgatatggctgagatcgagaaattcgataagtcgaaactgaaga

SEQ ID NO: 584412 - DNA, 101 bp, Homo sapiens
cccagtcagatattggtggcagcggaaaatccacgcctagctggcaaagaagtgaggatagcattgctgaccagatggatggcaggattttcataatatat

SEQ ID NO: 584413 - DNA, 75 bp, Homo sapiens
cggagatggtgcagaagatggaggaggtttgtgaaatggctgctgacatttctgaatccagcggggctgactgca

SEQ ID NO: 584414 - DNA, 120 bp, Homo sapiens
ccgcggccaggtgggacctctgcattgatcaggctgtggtcttcatcgaagatgctattcaggtattgggaagaatgtggtttgcgagaaggcagcaacatcggtggatgccttccggat

SEQ ID NO: 584415 - DNA, 75 bp, Homo sapiens
aataggaaggttgttgattactcacagtttcaggaatctgatgatgcaggtagatttcgggcagacaacttgaac

SEQ ID NO: 584416 - DNA, 85 bp, Homo sapiens
ccgcatcactgacaacatgttctgtgctgaacacaccacagccatcagcactggaatgcaaagaccagaacaaacagaaggaagc

SEQ ID NO: 584417 - DNA, 75 bp, Homo sapiens
caagagcaggagcccggcaccccccgccgacaaggaggtctgcgctcctcagaccaccggcaggtgaacagcctg

SEQ ID NO: 584418 - DNA, 75 bp, Homo sapiens
cagccttagccctagtgtagaggtttacaggtacatacattacacccctatttctacaaagcttggctattagag

SEQ ID NO: 584419 - DNA, 82 bp, Homo sapiens
gaggctccagaaacgggtcctgctgctcaccaaggaagccgagatcccccgcgaggtgatcgagaggctggcccgcagtcag

SEQ ID NO: 584420 - DNA, 80 bp, Homo sapiens
gacagcgggtgctggagggccgcttccgcatccccttcttcatgtctcaagagcactacaaacaccactggtttcccgaa

SEQ ID NO: 584421 - DNA, 90 bp, Homo sapiens
cgaaaaacagttacaaggaattcagattcaggaggctgaaacgagagaccagcctccttctgaagaaataaaaacaggtgaggatgaaga

SEQ ID NO: 584422 - DNA, 100 bp, Homo sapiens
tgcagaggatcagaaccggtacctggatggcatggaacagatggagtcggataactgttcaggaggagatgatgactggacccatctgtcttcaaaagaa

SEQ ID NO: 584423 - DNA, 98 bp, Homo sapiens
aaaaacaaacaagacgttttgatgaaggaaaattaaaagctggccaaagtgtaattggtctgcagatgctgcagttggagaagaaacttgaacgtgaa

SEQ ID NO: 584424 - DNA, 124 bp, Homo sapiens
ctcaaatataggcattctgatgggaacttgtgtgttaaagtaacagatgatttagttatcgaccttcagaagatgcccttggggaagctgagcaaaaggcagatccaggccgcatactccatcc

SEQ ID NO: 584425 - DNA, 50 bp, Homo sapiens
gcctactgagcagcctgagtggatactccatcttctaaaccaacactcct

SEQ ID NO: 584426 - DNA, 75 bp, Homo sapiens
cggggtggaggccctgactaccctggaagtagcaggccgcatgcttggagatggagtcatcagaacccactgtga

SEQ ID NO: 584427 - DNA, 82 bp, Homo sapiens
cccagaccctggagcctcagttggaagcagccgatccagcctgcggagcctgtggggcaggatgtggggcaatcaagttggg

SEQ ID NO: 584428 - DNA, 101 bp, Homo sapiens
cacgggttgacctaaggaagaagacagagactttctccacaagaagggttaagtctgggctgtgcagccagccagtgcgaccaagaccagtgcattcagag

SEQ ID NO: 584429 - DNA, 122 bp, Homo sapiens
ctgactctctgaggctcattttgcagttgttgaaattgtccccgcagttttcaatcatgcctggagcattggtaagcgtcacactgccaaagtgagagctgctggagaactcataatcccag

SEQ ID NO: 584430 - DNA, 112 bp, Homo sapiens
ccgtcgcagcccccgcgctggtgcagccaccctcgctccctctgctcttcctcccttcgctcgcaccatgatgaagaaactgagtctcagagaggtgaagtgacttgcccaa

SEQ ID NO: 584431 - DNA, 108 bp, Homo sapiens
agaaaaccttatcagcactatttgaaacttttatctcatctggcttggcgcctgaggttctcccattagggcaatgacatcattgcagcagccaagcgcatggctctg

SEQ ID NO: 584432 - DNA, 100 bp, Homo sapiens
ctccccagccatgtggaactagtcactttgtggcatgtatgacagccatcttaaaccagatgggtgaccagcactactccttctacattgagaccttcca

SEQ ID NO: 584433 - DNA, 50 bp, Homo sapiens
tgaggcttccccagccacgtggaacttatcctaagaaatccggtaaccaa

SEQ ID NO: 584434 - DNA, 88 bp, Homo sapiens
gggcacggcagacgcggtcctggatatacttcaggtactgggcctaatcgctacgtgcctctttggctatgatgcctatgtcaccttc

SEQ ID NO: 584435 - DNA, 75 bp, Homo sapiens
ggacgaggccgggacttggccgagcggatcctaataaggggaaaatgtgctgggagctattaataataggagagg

SEQ ID NO: 584436 - DNA, 99 bp, Homo sapiens
aaaaaactcaacaagaataaaaaactggtcaagaagctgggtccctacagttcagtccccccgccttctgctcccccaccaaagaagtctctgggaacc

SEQ ID NO: 584437 - DNA, 100 bp, Homo sapiens
aaaacaagaatgctatcaataatggtgttcgaatatctggaagaggaagctgaagagggaactacccttttcattccgatcaattaatacgagagaaaac

SEQ ID NO: 584438 - DNA, 90 bp, Homo sapiens
gaagaatattcccaagtccttcacccggtctgggttctgcccgcacacattcctcgccaccttcttggtgtctgagaacctccagcttca

SEQ ID NO: 584439 - DNA, 49 bp, Homo sapiens
gaaacgtcaggaatttactacacaggtctgccatcatggatgttctcgc

SEQ ID NO: 584440 - DNA, 100 bp, Homo sapiens
agccaacctatgttgccctgagttacataaataggaagctgttttaggttatgtgaaagagatgtttcctcatctctaaggcttaccagaagctctgatt

SEQ ID NO: 584441 - DNA, 139 bp, Homo sapiens
ctttaactggagcacagatctcatctcttcctcaaaccgtctgcaatcagttacctaatctccaagtgctctcctctctgctatatgaaatatgggagacgacagaccgtttgtgtgcaatgccccgggctgtggacag

SEQ ID NO: 584442 - DNA, 75 bp, Homo sapiens
ttccccagaactacaggggctctggccatcttcgtggcctctcttctgtggaaactctgaagccgaccagttggg

SEQ ID NO: 584443 - DNA, 128 bp, Homo sapiens
ccgaccctcctacaccgggctttcttcttcttcagcgagattcctgagccgttctatccctgtcgaatttacaagcactctcagcaacctttgattacctatgaaaaatatgatgtgacagactctcc

SEQ ID NO: 584444 - DNA, 109 bp, Homo sapiens
aaagaaatttctacacctacccattggtctaaacttgatccaaagacaatgaaggtagttgatgtcacttggcgatattcctgcaaacatgaagaggtgattgccagaa

SEQ ID NO: 584445 - DNA, 74 bp, Homo sapiens
ggaatttggtgaacctgtgctgctggttggagacactgggcagaagtcaattcatctggaaagactatctctga

SEQ ID NO: 584446 - DNA, 98 bp, Homo sapiens
taaaacacatcatgaaggcctgttttgaagagaaggggaataagactgcatctgttcatatgaggctttcagtccagtgtaaagctgttggagcgcgg

SEQ ID NO: 584447 - DNA, 75 bp, Homo sapiens
cccagaccattcagcaactggaaggatgttccagatgaccttgatggtgcccccatcgaggaagagcttgatggt

SEQ ID NO: 584448 - DNA, 98 bp, Homo sapiens
agccatcaggtaggctgcgttgaggatctttgctcttccatccgcctttgatcgtcttcctcttcagccatccaggtatgaaaatgaaagtcttcaga

SEQ ID NO: 584449 - DNA, 75 bp, Homo sapiens
gatgacaccggagtttgacgaagaggtggtttttgagctattgtggacgatgaaaggctctctgcagaggagatg

SEQ ID NO: 584450 - DNA, 75 bp, Homo sapiens
cgagtgctccatcggcttccgaggagacgggcgaacctgctatggtgactctgacatcattagaagcatgccaga

SEQ ID NO: 584451 - DNA, 90 bp, Homo sapiens
gtcgccccgtccatggcctcccgagtgattgatcgtgcgattcagtcctcctccatcaaagaaaatgaagttatttggatttaaagaaga

SEQ ID NO: 584452 - DNA, 107 bp, Homo sapiens
gctagctacagcgcctgctgcctgagcccgccagcgacgtgcgcctcgggagtcggcctgtgaggtgctggagaatctggtaaaagcaccattgtgaagcagatgag

SEQ ID NO: 584453 - DNA, 50 bp, Homo sapiens
acgttgccaagattaaccaggacccccagacagggtctcgctctgttgcc

SEQ ID NO: 584454 - DNA, 100 bp, Homo sapiens
gccaccaccacctggaattagaaaatgtgtcatatccaccaatatttctgcaacgtctttgacaatagatggaatcagaacacgacctcgagatgatatc

SEQ ID NO: 584455 - DNA, 100 bp, Homo sapiens
tgcctctcagctgccacctgcctttgacctttttgaagcctttgcaaaagcgataaactacattcagttgagtctgcaagactgggaggaactggggtga

SEQ ID NO: 584456 - DNA, 74 bp, Homo sapiens
actgggtatatttcctctctgctggggtatggccgtcaatgtgtactccacatctgtgaccagtgaaaatctga

SEQ ID NO: 584457 - DNA, 98 bp, Homo sapiens
tttgggggcttctgcctcgccgccgcgggtgccacctcccgggacgctgcccacggcgtccccggtcgcgatgggcttaggtcacgagcaaggatttg

SEQ ID NO: 584458 - DNA, 143 bp, Homo sapiens
gagctagcagccaatccggccatgctcgaagccagctctgcagctcagccaatcagtgacatcattggtaatagcctgcagctggtgttttgagaagccctactgctgaaaacttaacaattttgtgtaataaaaatggagaa

SEQ ID NO: 584459 - DNA, 101 bp, Homo sapiens
ttcgtgtgcacattcgtgtacaagatgcaaccttaaaatcagtgacaagaaacattccaaacaagcaacagtcttcaagaaattaaactggcaagtggaaa

SEQ ID NO: 584460 - DNA, 100 bp, Homo sapiens
tccctgtatctgctgctgctgctcatagtgagcgtccctatcaatgtccttactgtgaaaaaggattcagtaaaaatgatggactgaagatgcacattcg

SEQ ID NO: 584461 - DNA, 96 bp, Homo sapiens
gcagccacttcaaaatcagacctctgtggcagcattttttccagaacacaaaaggaacccttaacattcagggatgtggccatagaattctctcca

SEQ ID NO: 584462 - DNA, 49 bp, Homo sapiens
gcaaactctggaaaaaaacttggtggccataatataattgtgataatgt

SEQ ID NO: 584463 - DNA, 82 bp, Homo sapiens
gggagaagcagcgcctgttcccggggcagatccaggttcaggaggaccccgttctggagcgttatttcaaaggccacaaagc

SEQ ID NO: 584464 - DNA, 119 bp, Homo sapiens
tttgacttggcttcaactactattacaaatattccaatgaaggcaccacactgtaactcgaggcatcaccaaaggcgtgaaggaggactttcgcctggccatggagcgccaggtctccc

SEQ ID NO: 584465 - DNA, 82 bp, Homo sapiens
ggagaaggagaacgacggctactttcggaaggctgaaggtgatgtggccgccctcaaccgacgcatccagctcgttgaggag

SEQ ID NO: 584466 - DNA, 100 bp, Homo sapiens
ctcagcgctcaccgacttctctggtcctcagaatggttggaatgaccctccagctttgaacagagtacccaaaaagaagaaggtactagaaaaagatgtc

SEQ ID NO: 584467 - DNA, 98 bp, Homo sapiens
ccgacagcctcgcttggccgccagttcttctgcagccgaaggcggttaaataggattgcgaatcaggtggccattcagcggaagaagcagtttgtgga

SEQ ID NO: 584468 - DNA, 100 bp, Homo sapiens
gcgtacgccctcatggggaaaatctccccggtgactttcagcacgagtacacgagacaggattgagaaaggagagattcaaattgtgacttcagattcaa

SEQ ID NO: 584469 - DNA, 82 bp, Homo sapiens
caaggagttaaccaaagagagagacgccctcaggctggagttatacaagaacacatcaaacagatgatggaggcagcaacac

SEQ ID NO: 584470 - DNA, 82 bp, Homo sapiens
gacgccatgtcgggttattcgagtgaccgagaccgcggccgggaccgaggtaatctcaggggcgatataatcaatgaggtgg

SEQ ID NO: 584471 - DNA, 100 bp, Homo sapiens
agaaagcctattacctggcatgtggattttgtcgctggacgtctagagatgtgggcatggcagacaaatctgtaggttccatgtgccttgtgaagtcatg

SEQ ID NO: 584472 - DNA, 76 bp, Homo sapiens
gtcctggaattacttcaatcaaggtaaaggagctggaagtgcgaaaattgatgcatgtgagaggagatggaccctg

SEQ ID NO: 584473 - DNA, 100 bp, Homo sapiens
catcactggctacacatttccagcaggctgcagatacgagtggacaaaaacagtattatgtctcagtcctgtgcaaagtgagatgagctgtagcctttgg

SEQ ID NO: 584474 - DNA, 75 bp, Homo sapiens
agacaattgaatacaacgagatcctagagattttgacattgctgggaactttgatcccatgatccctgatgcaga

SEQ ID NO: 584475 - DNA, 96 bp, Homo sapiens
gccggacatctactgggtcagcttcatcctcggcggcggtggccgctagctccaaggaagatcctaattatctcatggctaatgaacgcatgaacc

SEQ ID NO: 584476 - DNA, 83 bp, Homo sapiens
gccctggccctgatcatcctgctgggcttcgtccagatcgggaagggatgccggctccaggagcagcagtggaggtcgggaac

SEQ ID NO: 584477 - DNA, 83 bp, Homo sapiens
gatatataaagcatttgtgcattcagatgctgctaaacaagatccaaggattctgtagctacaatgttgtcaagactttttcg

SEQ ID NO: 584478 - DNA, 82 bp, Homo sapiens
gcagcccggcgggaggataaagaccaccacggtgtccctggccagtgtccttccacctgtccacaagcatggggaacatctt

SEQ ID NO: 584479 - DNA, 114 bp, Homo sapiens
gagaagcatgggaaggaggccgagccgggatctcaggtcctcgggggcggcggccacgccaaggacggtctaacaaagtgccagtggtgcagcaccctcaccatgtccaccccc

SEQ ID NO: 584480 - DNA, 120 bp, Homo sapiens
tccaaaactaaatcaaaccaatcaaggcaccaagacgcaggggggatatccacagttcgatcaagtaagactttgaccccgacgcaggcttcagtgattgccgcggatcagaagcctgag

SEQ ID NO: 584481 - DNA, 82 bp, Homo sapiens
cacgcggagcccggcggctactcggggccggacggacattaataccctctaccatctgctttggtcagggtgccgctcgagg

SEQ ID NO: 584482 - DNA, 121 bp, Homo sapiens
gaagagggcagagccgtgcatggggctgctccccaggacctgagcaggaacctggagttttcaggtgtcatggagaaactccagctgggcccagagattctgcagcgggaaaatccaaggc

SEQ ID NO: 584483 - DNA, 80 bp, Homo sapiens
ctagaagtcactttggaagaagtatatgcaggaaattttgtggaagtgccactgattaatgaacttgaatcagcaataca

SEQ ID NO: 584484 - DNA, 138 bp, Homo sapiens
catcgtgctattcctggtctacatcctgcgggtgcctttgaaaatcaacgacaacttgagcacaggcattgaatgccccagaggagcccgaaacctcccaggcttggtgcaggaaggagagcccttcagcgaggaagc

SEQ ID NO: 584485 - DNA, 80 bp, Homo sapiens
gtcttcagcggggcgctccaggaggcactcacagcaattctgtggtgttcttggtcacacatttatggagtttctgaagg

SEQ ID NO: 584486 - DNA, 74 bp, Homo sapiens
ggatgcagcagtcccctcaaccggtgaccaggatttatgaccagaggaaaattgatgagaatgagaacaatgga

SEQ ID NO: 584487 - DNA, 100 bp, Homo sapiens
ccgtgatcgtgcccaaagaggagggcgtcatcagcgtctccgaggacaggacttaaccaccaccatgtcgagcaaaagaacaaagaccaagaccaagaag

SEQ ID NO: 584488 - DNA, 110 bp, Homo sapiens
aggcctggaatctgatcctccacttcagagaacaggggttggacgtgataagtatgagcctgcagctgtttcagaacaaggtgataaaaagggcaaaaagggcaaaaaag

SEQ ID NO: 584489 - DNA, 84 bp, Homo sapiens
gaaatccttcggatggtgaactcattagaaaagaacatgtgatcatccaggccgagttctatctgaatcctgaccaatcaggcg

SEQ ID NO: 584490 - DNA, 82 bp, Homo sapiens
tcccagaccttcaaaccaaagggccaatacctggatatggttctgatttggagcaagaggtggtggtggccttcccccgaag

SEQ ID NO: 584491 - DNA, 96 bp, Homo sapiens
cccgatcccagtatctatgcctatgataactttggcgtgctgggcctggacctctggcagtgggctcgggatgagtttgaaggcctcttcaagcag

SEQ ID NO: 584492 - DNA, 83 bp, Homo sapiens
gtgccgctgagcctggcgcagatcggaatgggcattaatacacagaatcctcgaatttcaggtccaaaccccgtggttccgat

SEQ ID NO: 584493 - DNA, 75 bp, Homo sapiens
cgcatctgctcaacgacgaggacctgacgcagtgaatggataccacgcatcagggaccccagcgcaccctccaga

SEQ ID NO: 584494 - DNA, 82 bp, Homo sapiens
tcacatcaacttctaccagctgggtgtccgcaatgttgccagtgtctgtctgcagattggctacccaactgttgcatcagta

SEQ ID NO: 584495 - DNA, 100 bp, Homo sapiens
ctgacagatgccagcgtagctgaatccagtaccaaaaacgtcaacaacagttttacgaccctcgagtcttccatccagggcctccggataatgtgaagct

SEQ ID NO: 584496 - DNA, 99 bp, Homo sapiens
ctgctacttcatcctgcagcggcgccgcgggcacggcgaggggggcggccgcctcaccgggagagcctggggatgtacaggagatgcctgctccagaat

SEQ ID NO: 584497 - DNA, 98 bp, Homo sapiens
tacaagggttatatatggaattatggtaccctccctcaggattataatgatgagatcaggcaagcacagctccaggagttaacatatttgaatggtgg

SEQ ID NO: 584498 - DNA, 90 bp, Homo sapiens
cggccgggtccgcatcgagaagatgagctcagaggtggtggattcgaatccctacagtattggtaaaggttttcaaggtgtcatgaaaag

SEQ ID NO: 584499 - DNA, 83 bp, Homo sapiens
tctcgttccagttccagagaacgttcgagatctcgtgggtcgaaatcaagctctggaagagaaatggccccagttcatcaccc

SEQ ID NO: 584500 - DNA, 154 bp, Homo sapiens
aagtttcacatccttgtctgtgaagctaaactcaatgctgctgtgtgggaagaagatttgtaaagaaaactcttaggtactccaaagattcaggtttactcacgtcatccagcagagaatggaaagtcaaatttcctgaattgctatgtgtctg

SEQ ID NO: 584501 - DNA, 90 bp, Homo sapiens
ggaaaggattacatagcttcattaccatttcaggagatatgtcagtattgaattctcccagacatcagagctgtataatgcatgttgata

SEQ ID NO: 584502 - DNA, 75 bp, Homo sapiens
ctgacggagatggtgcagaagatggaggagctctactgagatgaagaaagaaaaagaatacctgctcagctccag

SEQ ID NO: 584503 - DNA, 76 bp, Homo sapiens
gcgggaggcagttgcagctttcaggtgaaaggtgtagcagtcactcggcctacacccacagcatcgaccttgtgaa

SEQ ID NO: 584504 - DNA, 75 bp, Homo sapiens
ctctactgtgacttcagagacactgccaagcagccttagccctagtgtagagcaggagcgagaacccgagcagcg

SEQ ID NO: 584505 - DNA, 129 bp, Homo sapiens
ggccgactgagcaggagtcgtccgcttatagtggaggctgctaggagccggtcagaggcctcctgacaaggtgatccgggcgggccccgcaggaattttatcccctcaccggcctcacactagtatcgc

SEQ ID NO: 584506 - DNA, 100 bp, Homo sapiens
cgaggcagcattcgcctccatggcccactcgccggtggctgtccaagtgcctgggatgcaggttggatgcatcataatatggatctagtaggagacaaag

SEQ ID NO: 584507 - DNA, 73 bp, Homo sapiens
tatatcctccaggaatactggccagcaacggcagcctttaacagttgagcacatgtatgaagacatcagtcag

SEQ ID NO: 584508 - DNA, 90 bp, Homo sapiens
cagcaaccagagggaaaccactgtagtctgggacaagataactggagagcctctctacaatgctgtggaatgctgtcagaagggtatctc

SEQ ID NO: 584509 - DNA, 99 bp, Homo sapiens
ggagtctgcgaaggccgggacccggttccccggcccacagtgggggtgtgcaaacccgagagaactggatttcctcctctgatgctcctcttcagcctt

SEQ ID NO: 584510 - DNA, 80 bp, Homo sapiens
ctttttggatggagaatttcatcaaggtgcagctgagggatggagacagcaactgtgaggtcatgacgccagtcagatca

SEQ ID NO: 584511 - DNA, 100 bp, Homo sapiens
cgggcactgtggtgggcactgcagtgggcctctcctcccacccccgagctctcagccactccctagcactcacaggggaaagctctggcaatttaaatga

SEQ ID NO: 584512 - DNA, 75 bp, Homo sapiens
tcctgccttagcttccaagaatgctgaggttacagaggtcatgacgccagtcagatcacactagccttgggcaca

SEQ ID NO: 584513 - DNA, 98 bp, Homo sapiens
tattgaaatgcatttgccttatacagctaaagccatggaaagtcaagacagtcaccaccgaagagtacctggtgaaccctgtgggcatgaaccgctac

SEQ ID NO: 584514 - DNA, 100 bp, Homo sapiens
ggacgcgcttgtcgtgtcgttccgcttcggggagaagctcttctccggggtcctcatggatctgtccaaaaggtacctggacaacatccacctgcacccc

SEQ ID NO: 584515 - DNA, 100 bp, Homo sapiens
ttagagcctcgtaccaatctctctgtctttaaaagatgaggtgacttggtgattttcctggaaaattataggtgtttgatttcaccaccatagacttgac

SEQ ID NO: 584516 - DNA, 50 bp, Homo sapiens
ccgcgggagcgcacggcgctatgttgtcgccgtgatcctgaaggcgctga

SEQ ID NO: 584517 - DNA, 74 bp, Homo sapiens
ccctgctgcacgacctcagctcccagaggatcaccagcgtgggttaatttggagtggcccctggagtcagtttc

SEQ ID NO: 584518 - DNA, 98 bp, Homo sapiens
cacagcgtactacccagcaggcactcagctcttcatgaattacacagcgtactatcccagaggtcctgctgtactagccaccaaagcagctgctggta

SEQ ID NO: 584519 - DNA, 82 bp, Homo sapiens
gaccgaggactgtacgcctctcatgctgacctccacaggcttaaaattggcagagggggtcgatttgggaggaaaggtgtgg

SEQ ID NO: 584520 - DNA, 100 bp, Homo sapiens
aggtccctcagcaaagatggtacaaaagagtctttggaggatgcggctttgatgggttgcaaagacagttgcacagaggctcaacacagatccaatgttg

SEQ ID NO: 584521 - DNA, 100 bp, Homo sapiens
ggccagggaactcaaacagcagatgcagtacgaggatgtcgtccaggaaagattgtgcagatgactgaagcagaagttcgaggcttatgtatcaagtctc

SEQ ID NO: 584522 - DNA, 100 bp, Homo sapiens
ggatattgaaatggacagtggagatgaagcctaagaatatgatcagggactttgaacatgtcggggatcgccctcagcagactcgcccaggagaggaaag

SEQ ID NO: 584523 - DNA, 80 bp, Homo sapiens
ccgggcgggggcaccgagggctaccacgttctgcggatgccgtagggccaggtgagctgctgtgaaggactcattcttgg

SEQ ID NO: 584524 - DNA, 99 bp, Homo sapiens
acaaatacatttacaagagccctgagctgccacggatactgagccctgcctctttcttgtcgcagtcagtttcatcatcagatagaaacagtgttacag

SEQ ID NO: 584525 - DNA, 75 bp, Homo sapiens
cggaagcaaggtggtttgctcgtgattgcatttgattgcaaggagacagggtaaaagagaacctgctttcatgca

SEQ ID NO: 584526 - DNA, 82 bp, Homo sapiens
ccccggggtcttcaccgagctcattaaaggattcgtgatggaatggggagaagatattaaagcagtttcaaaagatgaagca

SEQ ID NO: 584527 - DNA, 100 bp, Homo sapiens
tctggatgtggaattctccgtccctttccagggagggaacaaagcccacagcaccggtatggtgtcagtcgtggaactgaaacagagttcagtaatgcaa

SEQ ID NO: 584528 - DNA, 100 bp, Homo sapiens
aagatatattacatgctgcaaagcagataggctcccagccaacctctgataaaccctcccagcggccatcagagagcacaaattgtagccctacccggaa

SEQ ID NO: 584529 - DNA, 82 bp, Homo sapiens
ttattgtaaggagtgcaccatccaggagaaggacgattttttatcaagcagaaatgcatcgaacaacgagaatcaagatcac

SEQ ID NO: 584530 - DNA, 90 bp, Homo sapiens
ccagaaaacatcggatttacattttaagacaaggcgcctctgtcgaagagccttctgctggtccccagtgccctctccctcctgctcgcc

SEQ ID NO: 584531 - DNA, 100 bp, Homo sapiens
gctgccagcaagaaatgatcagtagcaccagtgtttatgggatcactacttgtgtgatgtgacatgggcaacacaagaaagaatttctttgcagtggctc

SEQ ID NO: 584532 - DNA, 100 bp, Homo sapiens
aaggagtggagcatggtcccgctgccataagagaagctggcttgatgaaaaggctctccagtttggaattcataatgcactgaaaggaattccagatgac

SEQ ID NO: 584533 - DNA, 100 bp, Homo sapiens
ccgtaggctaccattataactgggacagtaaggtgtctgcaattgaactccaaggtgcagaatggtttggaaagtagctgtattcctcagtgtggccctg

SEQ ID NO: 584534 - DNA, 75 bp, Homo sapiens
cacaactgcaggaacaccgtcacgctgctggaggaggtatcattgcccagtgcctaagatcttttatgttcagct

SEQ ID NO: 584535 - DNA, 100 bp, Homo sapiens
cacgacaccggctacttctcagctttaccatccctggaggagacctggcagcagtcatatttgatcagaaattggatgaaccttcgggatgctgagacag

SEQ ID NO: 584536 - DNA, 82 bp, Homo sapiens
gtcaatcatgacttcacccctctggaggacaaagcaggacctcataaggaaatctacccctatgtcatccaggaacttagac

SEQ ID NO: 584537 - DNA, 74 bp, Homo sapiens
gctaaagtactgagagctttggataaaagatgccctccaaatccttggttatggaatatttggctcatcccagt

SEQ ID NO: 584538 - DNA, 100 bp, Homo sapiens
cccaatgatgcttcctacttcctttccgtgcataagaagccgaatggttggacgtgataagtatgagcctgcagctgtttcagaacaaggtgataaaaag

SEQ ID NO: 584539 - DNA, 82 bp, Homo sapiens
cagaaggagctttccgggccagctttgaggataagctgctgatgagcgatattgtcttcatgcgaacttggtatcctgtttc

SEQ ID NO: 584540 - DNA, 98 bp, Homo sapiens
ccggaggcgacatggggcacccggtgtaccgcggcgagaagccccagctgcactacgcgatctaaagcgggaagccagtatctgtcatatgctgaaac

SEQ ID NO: 584541 - DNA, 85 bp, Homo sapiens
ccccgcggccgcaccttcccgccttctcagtgacatattcgatgccatgttccctgtcactcacatcgctggggagactgttata

SEQ ID NO: 584542 - DNA, 97 bp, Homo sapiens
tctccctccagaacatacacttacatctctagataacagtctgcactttcacccgtttcaggagagatgaatggagagtatagaggcagaggatttg

SEQ ID NO: 584543 - DNA, 83 bp, Homo sapiens
ccctcacggagctgggcgacgagctgaccctgggagacatcgacggtcagcccaaggccaaccccactgtcactctgttcccg

SEQ ID NO: 584544 - DNA, 97 bp, Homo sapiens
ctggagtttatctggagtgaggtggccggttcttggtgggatctgagcaggtcttgagtcaccacgtccgaatataattcttgggttagtaatctgc

SEQ ID NO: 584545 - DNA, 100 bp, Homo sapiens
ggaaactctgcattctcgcttcctggaggcctgggccgaggccactggtgcatatgttcccgggagggataagccagacctgccaacctggaagaggaat

SEQ ID NO: 584546 - DNA, 82 bp, Homo sapiens
ctttcctatcctgtctctcctgatgaaggctcctgctgcttcttatgaggttaaatgggccagggaaaactatcaccataac

SEQ ID NO: 584547 - DNA, 50 bp, Homo sapiens
tcatgcagagtattacctttacaaatgccttcaattaagttgcagagttc

SEQ ID NO: 584548 - DNA, 75 bp, Homo sapiens
ctatccagcagctgcatttagttgcgctttcctgcctgcttctagcaagatgtacagttacccagcacgtgtacc

SEQ ID NO: 584549 - DNA, 83 bp, Homo sapiens
ctccgtggaggcctgcatccggaccctcgccatggtggttcaatctcatccctcccagcagctccccttccaccccccgggga

SEQ ID NO: 584550 - DNA, 50 bp, Homo sapiens
cgcggagcctggaagagccccgagctgtcccagaagcttttgttgacaat

SEQ ID NO: 584551 - DNA, 75 bp, Homo sapiens
ggctttgccgggtgcttcagatcaatggtgctggagaatctggtaaaagcaccattgtgaagcagatgaggatcc

SEQ ID NO: 584552 - DNA, 128 bp, Homo sapiens
cttgtgaggacgcggcagcccgtggagtcggctgagggaaaagcgaggcaaggcaggcggctccctcgtgaaagatgcttctgttcctctgattgatgttacaaacctccctactcctcgaaaattcc

SEQ ID NO: 584553 - DNA, 100 bp, Homo sapiens
ctattaccagaccaactacctggtggtggctgccatgatgatttccattgtgggggattttatattggaagacatggatcttgctgccaacgagatcagc

SEQ ID NO: 584554 - DNA, 100 bp, Homo sapiens
tcaaagctttgcgcaacgccaacctcaggcgagatggatctagtgaaaagccatttgatgtatgcggtcagagaagaagtggaggtcctcaaagagcaaa

SEQ ID NO: 584555 - DNA, 95 bp, Homo sapiens
tgaggagccattttgagcaatggggaacgctcacggactgtgtgggtgattctgggggtccacttgtctgtaatggtgtgcttcaaggtatcaca

SEQ ID NO: 584556 - DNA, 75 bp, Homo sapiens
agatctggacagtggcacacagataccgtttattaaaagagctgtggcttgttttagagcactttgctgcaaggg

SEQ ID NO: 584557 - DNA, 98 bp, Homo sapiens
taaaatggaagcacctgcgggatacagtggagctacaacttctgaaggggaagacactgatcaaggtggcagaagctgaaaagcaactgggagccgcg

SEQ ID NO: 584558 - DNA, 75 bp, Homo sapiens
gaatgatagccagtccctggagctggtgcacaggttccagtaatctatgccagcaattatgacaatgttagcaga

SEQ ID NO: 584559 - DNA, 100 bp, Homo sapiens
aaggacaacccgtacatcaccgacggctaccgggcctacctgccgtccaggctgtgtatcaaaaggcagttgcagagcctggagtcgaaactgacctctg

SEQ ID NO: 584560 - DNA, 75 bp, Homo sapiens
caggaggaagtactggcgaagtgctccatgatgatacttgttgatgccactgttatcatcctcctagcagaagat

SEQ ID NO: 584561 - DNA, 75 bp, Homo sapiens
cccaggtgtctgagcacagcatcatcaaggacttcaccaagcagggaatgctggcctgctggccttggcagatgt

SEQ ID NO: 584562 - DNA, 98 bp, Homo sapiens
gaggggcgggcagcaggcgctgctgcagcactggagcgagtacatcaagaagaaaagcaatggggcaccaaatggattttatgcggaaattgattggg

SEQ ID NO: 584563 - DNA, 100 bp, Homo sapiens
ggaacatttacggatgagaagtcaaaagcttcccaccacatttacccatattcttcctcacaagacgatggtacttcgtactggatttcgaggctggcat

SEQ ID NO: 584564 - DNA, 83 bp, Homo sapiens
acgaaggtactcgcagcacttggagcgcagaaccggccgcgcccggtgacagaccatgccaccactgccctgctccactatca

SEQ ID NO: 584565 - DNA, 100 bp, Homo sapiens
gtttagttttcgaagccaagaagatctgaatgagccaattaaacgagatggcaaaaaggagtgtgatattcttcaaggttactgactttttatgatgttt

SEQ ID NO: 584566 - DNA, 82 bp, Homo sapiens
cagctccgaaatcaccaccaagaacagcagagaggggcagcaggatgaatgtgggcacagcgcacagcgaggtgaaccccaa

SEQ ID NO: 584567 - DNA, 50 bp, Homo sapiens
ctgaagggcatcatgcatcttactgaagacccctgggcatactccttcct

SEQ ID NO: 584568 - DNA, 73 bp, Homo sapiens
ggagcttctcagccattttccacagatcagcaacttgagttggtggaaccaagtggctggattcatgttccct

SEQ ID NO: 584569 - DNA, 94 bp, Homo sapiens
tgcagaaacactctttgacattctggtggctggtggaatgctggacatatctgaagagatggattaagaatgctttggattaaggattgtggag

SEQ ID NO: 584570 - DNA, 100 bp, Homo sapiens
aggagcatcaagtggaatgtggattgtgaaaggtgtagcagtcactcggcctacacccacagcatcgaccttgtgaacccagcgacctgactgccttggg

SEQ ID NO: 584571 - DNA, 83 bp, Homo sapiens
attgacgccatgtcgggttattcgagtgaccgagaccgcggccgggaccgaggggacgactggagtgagcactggcctgggag

SEQ ID NO: 584572 - DNA, 75 bp, Homo sapiens
cggctttcaacccccacctcagcccagcaattcgggggcagtacccaaaggaaacgctacgaaagaatacatgga

SEQ ID NO: 584573 - DNA, 98 bp, Homo sapiens
accaggaaggggacgggacggacggtgatggtggtcgccgcggcggcgtgtgcgcccctcagacctgtcgcgaaatcgcctttcagaaattcctatag

SEQ ID NO: 584574 - DNA, 100 bp, Homo sapiens
gtggacgcagaggcgggccgaggacggatcgaagagtcagaccaaggcccttatgccatcatcctggctcccacccgtgagttggctcaacagattgagg

SEQ ID NO: 584575 - DNA, 76 bp, Homo sapiens
ggagtagttttctctagcaaagctccgtggtagtgattgactctgattctgatgaggaatgtcacacccatgaaga

SEQ ID NO: 584576 - DNA, 98 bp, Homo sapiens
agaatgcctgttcttccccttggaggagctgcagaacatcttccccagcctggacgagctcatcgaggtgcatttcactgagcacgggggcaccgcag

SEQ ID NO: 584577 - DNA, 75 bp, Homo sapiens
cagctgcggtggcagctgctgagttctcggtgaagcctgacatttaccccggtaactgctgggcatttaaaggct

SEQ ID NO: 584578 - DNA, 98 bp, Homo sapiens
tggcttcttacctcacgaacaaggttggtcaaagaaaaagtgatgtatgaaaaagaggcaaaacaacaagaagaaaagattgaaaaaatgagagctga

SEQ ID NO: 584579 - DNA, 101 bp, Homo sapiens
cggggccgagcgccgcgcgtcccgagcatggcaggctccctgcctccctgcgtggtggactgtggcaccgggtgttccattgcctaaagaggagaacattt

SEQ ID NO: 584580 - DNA, 98 bp, Homo sapiens
tcctgtcattgtggccatggacggacttgaaaatactggaaatctgtccggatccaaattattttgcaagccagatgagtaaccagagggcatgaaag

SEQ ID NO: 584581 - DNA, 98 bp, Homo sapiens
gtccccaactcagggagattcagtggagcggaggcggagggacaagatcaacaactggatcgtccagctttcgaaaatcattccagactgtaacgcag

SEQ ID NO: 584582 - DNA, 100 bp, Homo sapiens
gctggccgagctgcctgcctctgtgcatgccctcacaggcgtggacctgtctaaggttgactatagtcaatggggccaatggagccaagtgtatggaaac

SEQ ID NO: 584583 - DNA, 75 bp, Homo sapiens
gtgctttccagccgcgagctgtcaggccgagtgtcaggccgggcaggtgtggacactgccagcggctgcagccga

SEQ ID NO: 584584 - DNA, 98 bp, Homo sapiens
ggaggccgggcgaggccggtgaggacgcggcgggcgagcgagaggccgaggacatcgctattgcggttccgaggcagtgggaagagatgcggcccctg

SEQ ID NO: 584585 - DNA, 83 bp, Homo sapiens
cgtccagctcgcccagctcgcccagcgtccgccgcgcctcggccaagtgggcgacagatgcgaaagaaacgagttccagtgcc

SEQ ID NO: 584586 - DNA, 82 bp, Homo sapiens
aagcagcaagtgcgcggttggggccactgcgaggccgttttagtttgcctgagaatacagatcaacccacagaacaaagcgg

SEQ ID NO: 584587 - DNA, 90 bp, Homo sapiens
aacacgccctcaagagctggatttgacacatcaagggcagccaattactgagtcagcagataagcagagagccctagaagaaaccaaagc

SEQ ID NO: 584588 - DNA, 90 bp, Homo sapiens
caataatttgcttgatggcttagaactctccacagccatcactcatgtccataaggagaaactggcgatggaatatgagaggagccctct

SEQ ID NO: 584589 - DNA, 82 bp, Homo sapiens
ccgcacggaccctctacttcatgcagggctcgcggcctggcaagaatgtacagctgacagagaacgagatccgcggtctgtg

SEQ ID NO: 584590 - DNA, 82 bp, Homo sapiens
cgtcgcgcccgggaggaaggaacgaggcaaggagctaaagcagcgtgcgttcagccctgggaaaagttggagaagatgaggg

SEQ ID NO: 584591 - DNA, 50 bp, Homo sapiens
cacagacagaatccctgctaccagaataactcaagtcacctgtactggaa

SEQ ID NO: 584592 - DNA, 90 bp, Homo sapiens
caaggaagccacgtgcagacatctacaaccttcgatctcctgacgaggattgttcattgctgctggaggaagatcatggactgtcgcggg

SEQ ID NO: 584593 - DNA, 100 bp, Homo sapiens
gctcgcctctccgccccgcgtccagctcgcccagctcgcccagcgtccgccgcgcctcggccaaggttccggaatgaggactacaccatacatgtgcagc

SEQ ID NO: 584594 - DNA, 100 bp, Homo sapiens
agaggagcagcttctagcagtgcaagacatggcagggaggtttaatagacatggataagaagtccactcacagaaatcctgaagatgccagggctggcaa

SEQ ID NO: 584595 - DNA, 100 bp, Homo sapiens
cgatccgttggtgcatgaaagtcttctaaccattccaaaatctctttcaggtattgttgcagcatctggcagtgagactgaggatgaggacagcatggac

SEQ ID NO: 584596 - DNA, 95 bp, Homo sapiens
gcgaatcggctgcggtttgctgggaacggagggctgcagcgcccaccctgcgccagagaccagataaaagtctgcaattcataatggagctactg

SEQ ID NO: 584597 - DNA, 90 bp, Homo sapiens
gtttgacaaaacataccaattcttgaatgacatccgagcgaaagagaaagaggcagcactaacaccagaataacactgatgttgccatca

SEQ ID NO: 584598 - DNA, 100 bp, Homo sapiens
ggagtaccctgttcctggcatctgcgctcctcagaccaccggcaggtgaacagcctgatgcagaccgaggagtgcccacctatgctagacgccacacagc

SEQ ID NO: 584599 - DNA, 105 bp, Homo sapiens
cgccattggatgttttgtccagggcagcatctctggtgcatgctgatgacgaaaaaccttatcaaatatggagttattagcactaacgttctgattgaagatctc

SEQ ID NO: 584600 - DNA, 83 bp, Homo sapiens
agtagaggagctttaccgcaattatggcatcctggccgatgccacggagcaagtgggccagcctctgacctttttgagcctgg

SEQ ID NO: 584601 - DNA, 96 bp, Homo sapiens
tgctggtcacagtcgtagcaggagtgctcattgtgaagaaatatgtctgtgggggaaggcccacccacccccatcagatccgtcctggccccacag

SEQ ID NO: 584602 - DNA, 50 bp, Homo sapiens
gcctacgccatccagctgtgcataggtcaaaatgcagatcttcgtgaaaa

SEQ ID NO: 584603 - DNA, 98 bp, Homo sapiens
tgagctggcagagactgggctgtgggggcgtcctcaccttcagagagcctgcagactagacgcttgaagcaaagctgccatcccagaagacgacatgc

SEQ ID NO: 584604 - DNA, 51 bp, Homo sapiens
ccctgatggaattatgcagtttattaaggtctcctctgagcctccggcctc

SEQ ID NO: 584605 - DNA, 74 bp, Homo sapiens
gccaagaagatcatcattaaggacggaggcacggattctgtttcactgaggccatctatccgatttcaaggaag

SEQ ID NO: 584606 - DNA, 73 bp, Homo sapiens
ctaactccaacccaccatgttacaagacaatggatgagggaatgggtactgttcaaaaaggaatgccccacaa

SEQ ID NO: 584607 - DNA, 75 bp, Homo sapiens
acgtgtcaattccttagcattggccgaagagttaagtggaatcccccaaagaaggtaaagggagcaagccttccc

SEQ ID NO: 584608 - DNA, 97 bp, Homo sapiens
ggattcacgggacctttgaaatacagtaaatggggaaaactgcctttgcttctgagccggatgaaggaagtagggaaagtatttcttgctaccaaca

SEQ ID NO: 584609 - DNA, 82 bp, Homo sapiens
gccagggaaccctggtcaccgtctcctcagcttcggaaccaaaaagaagcttcccagagccggggccaggagccccaagcgc

SEQ ID NO: 584610 - DNA, 100 bp, Homo sapiens
agccgtgcggatgaggaccggagcggaaaaccttctgaatgtttggaaagtaagcagaaattggcgtgaaattgttgttcaagataaaaatgcaaatcgg

SEQ ID NO: 584611 - DNA, 98 bp, Homo sapiens
atctttgtggctgtgcttgccaggcctggctccacaccaagcctgcagaatcgtcgctatccgtccatggcgaggatccactccatgaccatcgaggc

SEQ ID NO: 584612 - DNA, 75 bp, Homo sapiens
cgcgccgcatggaggccggctgaggagcgccgctgcctcgcctcgactgtgccctgtccacggtgcctcctgcat

SEQ ID NO: 584613 - DNA, 100 bp, Homo sapiens
ctgtgacgattggctttggagtaaccctgtgtgcggttcctattgcacagttggtgttggtattaggagatctgcacatcccacaccggtgcaacagttt

SEQ ID NO: 584614 - DNA, 100 bp, Homo sapiens
gctaagacactccagcactggccacacattattcgaataggagaccttaaacctacagagtctccacagcctattggctcacttggacatgatgctgact

SEQ ID NO: 584615 - DNA, 80 bp, Homo sapiens
cggagaggacctgttcaccagcactgtctccaccctagagggattaaagcctgtggtttccacagaagcaccacctatca

SEQ ID NO: 584616 - DNA, 99 bp, Homo sapiens
ctgcatttcaggacctgttaaggaatgttccaaaccgttacacctttccttgtccttactgtcctgagaagaactttgatcaggaaggacttgtggaac

SEQ ID NO: 584617 - DNA, 100 bp, Homo sapiens
gagcaatgctgacctcggtttcctggacccattccgactcaggctgacaaacgggctcatcataatgcactggaacgaaaacgtagggaccacatcaaag

SEQ ID NO: 584618 - DNA, 82 bp, Homo sapiens
aagcacgagcagatcctggtcctcgatccgcccacagacctcaaattcaaagagagctggcggtcaccatggcaatgcggga

SEQ ID NO: 584619 - DNA, 51 bp, Homo sapiens
gtccagtctgccgcaagttcatgcaagatggtgtgggccgaagatatgctc

SEQ ID NO: 584620 - DNA, 100 bp, Homo sapiens
cggcggcagcggcggaggcgacggtggcggctctcggagccggcgcgaatccggcccccgcagcgggacccggatcccagattacaggaatgcagtaatc

SEQ ID NO: 584621 - DNA, 105 bp, Homo sapiens
gccccagccccacagaccagcccagcattcaggaactgtggctgcaccatctgtcttcatcttcccgccatctgatgagcagttgaaatctggaactgcctctgt

SEQ ID NO: 584622 - DNA, 90 bp, Homo sapiens
agtttctccatagtggtgcttccgtcctccaggtccgattcccatcccacttcagttcagatctcaaggaccttctacggaacctgctgc

SEQ ID NO: 584623 - DNA, 96 bp, Homo sapiens
ggaagtgcccctcaccgccttcgccctggagctggagcatgccctcagcgccatcgctacttcagaatcttggttcagcaatttgaggtacagctt

SEQ ID NO: 584624 - DNA, 100 bp, Homo sapiens
ggggaattgatattcctgaagtcaactgggttttgcagtatgaccctcccagcaatgcaaggtggttatcactaggctaaaactggacaaagaccgcaaa

SEQ ID NO: 584625 - DNA, 98 bp, Homo sapiens
tgcccctgagatccacccaagttgtggtggtcacttctttcatcgaaactccttgtcccctcggagtctggtgtatgaaagtgaattctccaccatcg

SEQ ID NO: 584626 - DNA, 51 bp, Homo sapiens
ggtcccctgctttaaccatcgaaaatgagagcactgcagtttcctcctgaa

SEQ ID NO: 584627 - DNA, 75 bp, Homo sapiens
cccggcgtccagctctgccccgacagagacggaggagccggggtccagtgcagagatggggtttttccatgttgc

SEQ ID NO: 584628 - DNA, 83 bp, Homo sapiens
aggaggagtgcggcgcggcggccccgggaccaaggagacttcccaagtaagaagcggaagaggagccgctggaaccaagacac

SEQ ID NO: 584629 - DNA, 80 bp, Homo sapiens
gaagtccagagctgaggactgcctgtttgcagattatgctataaatcaacctgatgtcttatctcagattcaaccagaag

SEQ ID NO: 584630 - DNA, 49 bp, Homo sapiens
tcctgaaagctgtcacccacaatgcaaagaaaggaggtacaggcccgag

SEQ ID NO: 584631 - DNA, 90 bp, Homo sapiens
acgttccctcagcctctgcccaaagaaagaaggagattgatatcagtaaatgccattatttagtggatttggacaccatgagagaaacac

SEQ ID NO: 584632 - DNA, 82 bp, Homo sapiens
cccctgagtaagagtcagccagccgcggatggggagcgtgagtggcgagcctcccgcgacgatgcccctcaacgttagcttc

SEQ ID NO: 584633 - DNA, 96 bp, Homo sapiens
aaggagactaaacacaggcactgtgaggatgattaccacatgctgagggcacctgacacagagcccggtgcagagcacttgcccactagaggtttg

SEQ ID NO: 584634 - DNA, 101 bp, Homo sapiens
gaaagattttcagtcaaccagttagatagtgaccactgggcacccattcattatgcatgctggtagcctttccagtaaatatatgactcagggaaaagcct

SEQ ID NO: 584635 - DNA, 100 bp, Homo sapiens
caaccatgatctcttccaaagaatgccacagaatcaggggaggcatgcttcagactgaagttgctgaagatcctcaacaagtttcaactgtccatctcca

SEQ ID NO: 584636 - DNA, 100 bp, Homo sapiens
cttgaagctgtaaaggtgaagacagtgtgccagataccattgatgaaggaaatgctaaagcgattccaagatgctgcaatttcacagcagttccttcctt

SEQ ID NO: 584637 - DNA, 100 bp, Homo sapiens
tctacaaggaatttttaagtaaaaattttcagaagcacatgtattataacagatatatttttgccatcatggatcagtttggagatatattagaaggtga

SEQ ID NO: 584638 - DNA, 51 bp, Homo sapiens
ccagacacttcccttattacacaagtgtgccaggtgattgggatgtacgac

SEQ ID NO: 584639 - DNA, 100 bp, Homo sapiens
ccacgatgcccacgctgccagagacccaggcgggcatcaaggaggagatcaggagacagctgtaacccagacttacggtggcaactcaaatggagagcca

SEQ ID NO: 584640 - DNA, 90 bp, Homo sapiens
acaagatggggaagaaaaggattgagaactttaagagtggtgtggcgtggtgaccaagatgaagatgcagaggaccattgtcatccgccg

SEQ ID NO: 584641 - DNA, 75 bp, Homo sapiens
cgcagacctctgggcttcctgatatcaacgaatgccgtcaccccggtacctgccctgatgggagatgcgtcaatt

SEQ ID NO: 584642 - DNA, 98 bp, Homo sapiens
cgtgaccgagagcgcgaatatcgtcatcgttagaaggccactactacgtgcccctcctgagagcggaagagacttcttctccagtcatcggggagctg

SEQ ID NO: 584643 - DNA, 100 bp, Homo sapiens
tgacccggccccggacggagcgccggccgcaccaccgccctctggccgttgcctcaccggaggacgggaggggcaagctgcggccaaccaaggccaagag

SEQ ID NO: 584644 - DNA, 75 bp, Homo sapiens
agtgcgaggagccgccgccccccctcgcaggagctctgtgtgtcgtctgagcagtcgcgagaagatttccctcca

SEQ ID NO: 584645 - DNA, 98 bp, Homo sapiens
caaaagtgccgccctgacttgtgcagcaaagtggcccaaatccatggcattgagctattgtgacaatcttggttaccatccattaagtgctgctgatt

SEQ ID NO: 584646 - DNA, 50 bp, Homo sapiens
cctcctcgctcatccgagccaccattgaatcaggaaacccaggcccaacg

SEQ ID NO: 584647 - DNA, 75 bp, Homo sapiens
cctaagcctgcacagccgcggcggcagcagcagtgagaggctttacaggaagtatggtgctggcatctgcttggc

SEQ ID NO: 584648 - DNA, 100 bp, Homo sapiens
cggccctcattctgcacgacgatgaggtgacagtcacgaattccttaactttggaggcagtgaaacgactaatagcagaaggtaataaagaagaactacg

SEQ ID NO: 584649 - DNA, 83 bp, Homo sapiens
caaggatctggggatcttcgcactatcccaagatgatgccaccagtccccatttctcaacacgtcatgaagggtccttccaag

SEQ ID NO: 584650 - DNA, 75 bp, Homo sapiens
cagagacaagaaagcgcaaggaatgtcctgaccaacttggacccaggacattttctacattgaaaaccaaaagga

SEQ ID NO: 584651 - DNA, 75 bp, Homo sapiens
gccgcgcttacgccacctccagcccgggccagagggtgcagaagggagctcgggttcatgacgctctcgatattc

SEQ ID NO: 584652 - DNA, 82 bp, Homo sapiens
gcagccgatccagcctgcggagcctgtggggcagaagaaaggtgagcagccaacaggccagcagcggcggaaacaccagatc

SEQ ID NO: 584653 - DNA, 97 bp, Homo sapiens
tctcacccatccatgggaagccctgctactgctggattagcgccagacttacagattccagtctgctgttagatgattattcatccaagttgagccc

SEQ ID NO: 584654 - DNA, 82 bp, Homo sapiens
tgcagattatatcgcatcctatggctcaaagaaagatgattatgtgggtccgatggctcccggctctatgactgcgtgtgga

SEQ ID NO: 584655 - DNA, 100 bp, Homo sapiens
tctgtccaggcagggccatcaagtgcagctaaatcaagtccagcagctaaaccaggatccacaccttctcgaccctcatcagccaaaagggcttcttcca

SEQ ID NO: 584656 - DNA, 78 bp, Homo sapiens
aatgcatgaaagcacatgtttcagtgccactcacataagaagtgcccggtatatgaatgacctaaaggtacaaataaa

SEQ ID NO: 584657 - DNA, 87 bp, Homo sapiens
gctacagatgtagcctcccgtgggctagatacgtttgaaatggtttctgaagatgaagatgggaaattgggatttaaagtaaattac

SEQ ID NO: 584658 - DNA, 100 bp, Homo sapiens
ctgcggacctagtggtgtgtgacggggctcctgatggtcagcccaaggccaaccccactgtcactctgttcccgccctcctctgaggagctccaagccaa

SEQ ID NO: 584659 - DNA, 59 bp, Homo sapiens
tccaaggtctacatgattacctgaagtttaataagctattcatgctcttatggaaaatg

SEQ ID NO: 584660 - DNA, 88 bp, Homo sapiens
cgggccatctccgggggctccattcaggctctgtggatagcaactggatcgtgggtgccacgctggagaagaagctcccacccctgcc

SEQ ID NO: 584661 - DNA, 100 bp, Homo sapiens
cttcagacccctccagacatccaatcagaacattcaagggatggtgatatggatgatagtcgaggaacatcggaatttgccttttatgcgtgagctgagg

SEQ ID NO: 584662 - DNA, 100 bp, Homo sapiens
gtgatgaattgtgctgatattgatattattacagcttcatatgcaccagaaggagatgaaggttcatcttccttcctgtacagtattttcaaacttccca

SEQ ID NO: 584663 - DNA, 75 bp, Homo sapiens
gggagaaacctcgtggcctggtctccattatttgagatgagttacatcttggagatgcccagcctacagagtctg

SEQ ID NO: 584664 - DNA, 80 bp, Homo sapiens
ccgcagctgcgggtccgggattcccagccatggcagattcctccgggcagcaggaggttgacggatatattcagacgtta

SEQ ID NO: 584665 - DNA, 74 bp, Homo sapiens
aaaaacaagactggggctgctcccatcattgatgtggtgcgatcggtgctgaagacgcggttgaccttgcgtcg

SEQ ID NO: 584666 - DNA, 75 bp, Homo sapiens
cctgcctttgacctttttgaagcctttgcaaaagtggagccgccaccaaaatgcagattttcgtgaaaaccctta

SEQ ID NO: 584667 - DNA, 100 bp, Homo sapiens
gtgcgcattggccttatgatggaagagatgatcttcaaccttgcagatacacatctgttcttcaatgacctggagggtctaaaattcccaggactccaca

SEQ ID NO: 584668 - DNA, 90 bp, Homo sapiens
ttgcggaataattccatccaaaaccggcagctgttagccgagcaagtacaaagggaatttcttgcagagctgtgttcagctgagagccag

SEQ ID NO: 584669 - DNA, 96 bp, Homo sapiens
ccccgcgcagcgtctggtcactcgctctcctctggggactgcagagaagcaggacctcgggccatgggcagtggagctactgctgtggttcaggca

SEQ ID NO: 584670 - DNA, 51 bp, Homo sapiens
tacgatgctttggatgttgccaacaaagaggctgaggatggcattattgct

SEQ ID NO: 584671 - DNA, 98 bp, Homo sapiens
ggcacacagtctactatcaccgacaggtggtgcggttgtgtcagaacccaaagctggcgctaaagaatagcccaccttatatcttagacctgctacca

SEQ ID NO: 584672 - DNA, 98 bp, Homo sapiens
cctgccattcttatcatttctaagcaggttcatgccagcccagaacagagaatcaggtgctggtgaatctggtaaaagtacaattgtgaagcagatga

SEQ ID NO: 584673 - DNA, 100 bp, Homo sapiens
gaaacatccaatgtcatctgggtgcagcatgatgcagaagttgaacacttaaccgaagttcttaaggaaaagaataaagaaaccaagagactgaggtcct

SEQ ID NO: 584674 - DNA, 75 bp, Homo sapiens
gctccagcatgtatcagccgaggtggagctgcggggccctggcatgaaagaatgttgtaccatctttgggtaggc

SEQ ID NO: 584675 - DNA, 73 bp, Homo sapiens
ctaccaggacatgcggagactggtgcacggccaaggacagcgatgatgatgatgatgtcgctgtcaccgtgga

SEQ ID NO: 584676 - DNA, 100 bp, Homo sapiens
cttgaagtttgcagagctgacattaaaggccggcattcccaaaggtgtggttaacgtcctcccaggatctggtgtcatggagaaactccagctgggccca

SEQ ID NO: 584677 - DNA, 82 bp, Homo sapiens
tcgatgttcttctaatactcctcctctaacatgtcagcgttattgtaatgcaaaggagttgaagccaaacagccaaattctg

SEQ ID NO: 584678 - DNA, 100 bp, Homo sapiens
ctagcagaatccgcaaacttttcaatctctctaaagaagatgatgtccgccagtatgttgtatgacaacgaatttggctacagcaacagggtggtggacc

SEQ ID NO: 584679 - DNA, 90 bp, Homo sapiens
ctattcgggcaagggctaccacggcatgcaggagttcattgccgttagccagctccgcggctccacccagggcaagatcctctgcttcta

SEQ ID NO: 584680 - DNA, 100 bp, Homo sapiens
tcaacagaagagtgagagatggaacccgaagaagaaaggattcgttacagccagagattgagggagcactatgtctgcggaagtccccgaggcagcctcc

SEQ ID NO: 584681 - DNA, 120 bp, Homo sapiens
cttcctcctcctcctccacctccggcttttgggggatcactgtcctctctcggcagcagacaatgcagatcttcgtgaagactctgactggtaagaccatcaccctcgaggttgagccca

SEQ ID NO: 584682 - DNA, 100 bp, Homo sapiens
ccacgtctcgtccacgacctccctagaactctaagaaggagctgatgtggaggagcagctgagacagttcaagatgacgaccacagtagccacagactat

SEQ ID NO: 584683 - DNA, 83 bp, Homo sapiens
cccgcttcctggaatggcaagcgcagcaacaacagagagcacgtgggtcctgccctccggaggagcagcctcgaggctggtgg

SEQ ID NO: 584684 - DNA, 100 bp, Homo sapiens
ggccgatgaagtgcagaggtttttttctgctgttatttcaagaaaccaagaagggccaggagaaatgggaaaagctgtgttgattcctaaagatgaccag

SEQ ID NO: 584685 - DNA, 82 bp, Homo sapiens
ggctgctggaccgcgacgcctgcgacacggtgcgcgtcaaggccctcttcgccatctccttatggtttgaagtggtgaacat

SEQ ID NO: 584686 - DNA, 75 bp, Homo sapiens
tacaaccttggagcccagagccacgtcaaagaacttaaaaggagtctagaaaatccagcagaaaggaaaatggaa

SEQ ID NO: 584687 - DNA, 100 bp, Homo sapiens
gcgatgcctaccacctagaactggattgtgcggcggcggcggcggcggcggcgcccgggagccggagccttcgcggcgtccacgtccctcccccgctgca

SEQ ID NO: 584688 - DNA, 51 bp, Homo sapiens
tgggaccttaacagggagccatgatcctgcagctccaccaaagaaaccgcc

SEQ ID NO: 584689 - DNA, 95 bp, Homo sapiens
gaagccgatccccatttttattgaaagatgtattgagtacattgaagccacagctgccagagaaactacgcataggctggaataacaagatggtg

SEQ ID NO: 584690 - DNA, 98 bp, Homo sapiens
gtcctccgggaccggagtcagaaccctccgcagagtaaagtgcactgacaggcagaactcaccagtcacatcaccaggatcctctccccttgcccaga

SEQ ID NO: 584691 - DNA, 83 bp, Homo sapiens
cagacatcttcagccgctgccagccatgccagtgacggtaacccgcaccaccatcacaaccaccacgacgtcatcttcgggcc

SEQ ID NO: 584692 - DNA, 71 bp, Homo sapiens
acggctcgcactgcgacccgaaggaagaggagcaggacttggatggtgagaaggggccatcatcggaaggg

SEQ ID NO: 584693 - DNA, 90 bp, Homo sapiens
agattcaacccgtgtacgtgcctgtgcctaaaaattaaacaaccaccatgtcgagcaaaaaggcaaagaccaagaccaccaagaagcgcc

SEQ ID NO: 584694 - DNA, 51 bp, Homo sapiens
agaagctggaggccggcaaagccaagaacttcgagaaaccaagacctctga

SEQ ID NO: 584695 - DNA, 75 bp, Homo sapiens
agttgtcatgctgaaccgcattgtggagaaagaatcggtaaccctgtatcatttgctaaagctgtttcaatcaga

SEQ ID NO: 584696 - DNA, 96 bp, Homo sapiens
aggtcatctgaaccttctgagaaaacatggtcaacgtcttgaaaggagtgcttatagaatggttgcaccattactcagacttctaaagagactatt

SEQ ID NO: 584697 - DNA, 102 bp, Homo sapiens
tgaaaaagctgtggaaggctctggataaggaccagtacctgcccaggaaactggatgaaaactttcggaagagaaagttgcctgtggtaagttcagttgtta

SEQ ID NO: 584698 - DNA, 90 bp, Homo sapiens
gcaagcagttcagaagagccaaggaataaacatgcaatgaacccaaaaggccaccaccagcctatgagcctccagcccctgccccattgc

SEQ ID NO: 584699 - DNA, 75 bp, Homo sapiens
atctggaagatcaagaagctcattaagagcttggaggcggcccgcggcttcacagcgcatcgaactccatttaaa

SEQ ID NO: 584700 - DNA, 100 bp, Homo sapiens
ctggaggacgtgcctgcagccggcgggtacctgcggccaattcggtggaacgaggacgcggactgcgaaggcaggtggaggtcgaagagtgagtttctta

SEQ ID NO: 584701 - DNA, 75 bp, Homo sapiens
ctaaagccacagtcttcaagagcccacggacaccacctcaacgcatgttggcagataaattgaacatgactccag

SEQ ID NO: 584702 - DNA, 75 bp, Homo sapiens
aaggattccaagtaactcttatttggttaagtatacccaaggtggacttgaaaacctcgaactttcaagaaagta

SEQ ID NO: 584703 - DNA, 75 bp, Homo sapiens
gcttcaaaaggggggacatcctcaaggaagacagagatgtcaatgaccccatgcccaaccgaggcggcaatggac

SEQ ID NO: 584704 - DNA, 90 bp, Homo sapiens
agaagctacaggccgaggtggctgagatgaagaaggccaaggttgatgaccaaatgaagctgcttcagaactgctggagtgagctcttaa

SEQ ID NO: 584705 - DNA, 83 bp, Homo sapiens
caaaggttcaaagtccttgagctaagaacacagtcagatggggacagagcagaatgggctgatatagatccggtgccgcagaa

SEQ ID NO: 584706 - DNA, 99 bp, Homo sapiens
gacatttaattttagggtcctttatatagaagggagagtagattcgggaactggagcctctcctctgtcacagtgacaatccatctcagctcatctgga

SEQ ID NO: 584707 - DNA, 100 bp, Homo sapiens
gccagaggatattactcagatccaaccacagcagttggttttgcgattaagatcagtcactattccaggtcctcaggatatagccgtgacctaaacacag

SEQ ID NO: 584708 - DNA, 90 bp, Homo sapiens
gttcctctctggcatggtggctcaaattgatgctaactggaacttcctggaactcagcgagatgctgtacacagaccggcccgactggca

SEQ ID NO: 584709 - DNA, 90 bp, Homo sapiens
ggggtccgggccggagtacgtcgttcccgctgcgctaggggaagcgggcagcttccttcaaaatgtctactgttcacgaaatcctgtgca

SEQ ID NO: 584710 - DNA, 90 bp, Homo sapiens
cagattcgcagtggtcgcttcttctccttgttggtagctggcagtgttgtgatggcttttgaagaagtatgcccggacagaatagatctg

SEQ ID NO: 584711 - DNA, 89 bp, Homo sapiens
gggccgcgccgctgccgctgctgctggtgttagcgctcagtcaaggctgctttgactctcccgcgaagacctttccttcactgttctac

SEQ ID NO: 584712 - DNA, 75 bp, Homo sapiens
ctttgctggaagatttggagagggagcttgatgaacctagacagcagttactccacaggatccgctgaacatagg

SEQ ID NO: 584713 - DNA, 99 bp, Homo sapiens
tcaggaacgtgtcccggggccgacccggcccgtagtgtggaagcagcttcagtcagcagataagcagagagccctagaagaaaccaaagcctacaccac

SEQ ID NO: 584714 - DNA, 97 bp, Homo sapiens
gcgagctgagtggttgtgtggtcgcgtctcggaaaccggtagcgcttgcagcatgatgccagaccagtttgaccaggcggttgtgctgaaccagctg

SEQ ID NO: 584715 - DNA, 90 bp, Homo sapiens
acaaaggatttgacaagactaaaaacacttctctcagaaacagaggcactggtgaggtggattgatgatgaatcttctggcacacctgga

SEQ ID NO: 584716 - DNA, 75 bp, Homo sapiens
tttgttccctggttattgactcaagagtgaatatttgtattcagcaagagacctcatagttattcctaggagtca

SEQ ID NO: 584717 - DNA, 78 bp, Homo sapiens
ggaaacttcagatacgaaatatcccgcctcatttacagtgggagctgttcgggggtcttgtctggattttggttgcct

SEQ ID NO: 584718 - DNA, 100 bp, Homo sapiens
ccgcttcaaccccaggggaccagaggaactcagccctgattgcgattcttttagtgaccactatactcattttgaaagagttgtgaaggctcttctgatc

SEQ ID NO: 584719 - DNA, 96 bp, Homo sapiens
caatcctggagccccccagtgaggggaaatcctcattgacgattcaatttgttgaaggccaatttgtggactcctacgatccaaccatagaaaaca

SEQ ID NO: 584720 - DNA, 75 bp, Homo sapiens
aaatttccaccagttggtggcactgctacactgccgcagcctgcacaagaataagtcgcgctttcttcctcaaac

SEQ ID NO: 584721 - DNA, 95 bp, Homo sapiens
gaattatataaacgacttaaggaatttttgaagaattacttgacaaatcttcttaaggatggataaggtgggggatgccctggaggaagtgctca

SEQ ID NO: 584722 - DNA, 51 bp, Homo sapiens
agcgcgaatatcgtcatcgttagaaggggcttgcttctgacatgtctgatg

SEQ ID NO: 584723 - DNA, 100 bp, Homo sapiens
gagggctccgggagggagtgcctggccaggccggcctgtctgccgcgatggatgacagtaagcctttctgagaaaagtctacagcattctttctctgcag

SEQ ID NO: 584724 - DNA, 88 bp, Homo sapiens
tagttactgtggaatcaataagccatggcatctaagaaatttgctgttaaagtacactgatgctgaagtactatgagccttcggaact

SEQ ID NO: 584725 - DNA, 97 bp, Homo sapiens
catggggattatgggaactacaagtcaagatgagatttgggtggagacacagccaaacgatatcaacttacccatcaaaatatgaactcaatagaga

SEQ ID NO: 584726 - DNA, 74 bp, Homo sapiens
attggaatattggtgggccagcaatcctcagacgcctcacttaggacaaggaatggccaaatccagtgctattg

SEQ ID NO: 584727 - DNA, 90 bp, Homo sapiens
agaagaggaagctgcgggagaagcggcgctccaccggcgtggtcaacatccctgccgcagaggaagatgagaatgtgcctactgctcctg

SEQ ID NO: 584728 - DNA, 100 bp, Homo sapiens
gcatgctatggaggcacagctgctgtcttcaatgctgttaactggattgagtccagctcttgggatggttctggagttcttaatgatagtttgtctggtg

SEQ ID NO: 584729 - DNA, 131 bp, Homo sapiens
ctcctttggactctacttctgtttgcagccccatttggcctgctgggggagaagacccgccaggtatataccctctcagtgtctggagaccggctgattgtgggaacagcaggccgcagagtgttggtgtg

SEQ ID NO: 584730 - DNA, 55 bp, Homo sapiens
ttcaaatccatcaagctcatcaaaagactccgtgggaaggaggcttgtttaaact

SEQ ID NO: 584731 - DNA, 98 bp, Homo sapiens
tcctaagagatctgcaccttcaggaccagttcgcagtagcagtggaatgggaggaagaggttgcccccaagtttcctggcagtgtgtgatactgagga

SEQ ID NO: 584732 - DNA, 75 bp, Homo sapiens
gctccgctaaaattacagatggaattcaaggcagtgcagcaggttcagtggcagtggatcaggcacagattttac

SEQ ID NO: 584733 - DNA, 50 bp, Homo sapiens
cgcatcccgaactcgctggaggacaaggttggtcaaagaaaaagtgatgt

SEQ ID NO: 584734 - DNA, 109 bp, Homo sapiens
taatgaagaacaaagaaaacagttacaggacatagcaactctggctgatcaaagaagagcagcccatggagaaaagccatatgtttgtacagttcctgggtgtgacaaa

SEQ ID NO: 584735 - DNA, 75 bp, Homo sapiens
ggcgcggcgcggctgcggctgagtgcactggtgattgctgcggtgtttgaccgagacataaactgcagaagagca

SEQ ID NO: 584736 - DNA, 100 bp, Homo sapiens
ccctaatggaggtctccagtttcggaaattcgaaatgagtcccatgactatcctcatagagtggccaagtttccagaaaacagaaatcgaaacagataca

SEQ ID NO: 584737 - DNA, 50 bp, Homo sapiens
cgacaacagcctggcgtccgccacgatagcctgggctggaagctcttcta

SEQ ID NO: 584738 - DNA, 100 bp, Homo sapiens
cttctccaatgtcatgacctgcgaggacgatgacaagaatcgcatcgccaagcgcagcaggaagctagtggactatgacagtgcccgccaccatctggaa

SEQ ID NO: 584739 - DNA, 98 bp, Homo sapiens
aatttgtatagagatgtgatgttggagaactacagaaacctggtctccctagtgtgttgaagagatcctaggatacctgaaatcctgctttagtcgag

SEQ ID NO: 584740 - DNA, 100 bp, Homo sapiens
gaggctggataccaaatagcagtggaaaccggtgaattatgtaacctcattacgctggatgtagctcacaatcaacttgaacaccttccaaaggagattg

SEQ ID NO: 584741 - DNA, 83 bp, Homo sapiens
ggcgtgaggagtgtgagctcatgctacaggtttggtgcacctcgatttggaggaagtagggcagggcccttatctggaaagaa

SEQ ID NO: 584742 - DNA, 83 bp, Homo sapiens
cttcatccattagttatagtcaagagtctggagcagcaggtggatcagtacaagggaaagcgggatttggagtcactgaggga

SEQ ID NO: 584743 - DNA, 90 bp, Homo sapiens
taccaaatagcagtggaaaccgcgagtaaccagctcataaatcacatcgaacagtttttggatactaatgaaacaccgtattttatgaag

SEQ ID NO: 584744 - DNA, 98 bp, Homo sapiens
cgacgcggaggcggcagcggcgggcctgaggcgaaggagcggccgggagcccgccgcgctggtagcggcctttttgcaaatgtgtaacttgcctatca

SEQ ID NO: 584745 - DNA, 100 bp, Homo sapiens
tcagcacggatggaaagatggagatgaacctctaacacagtggaaaggaaccgttctggatcaggacaacattgccgagaaagcttgctgtggggttccc

SEQ ID NO: 584746 - DNA, 100 bp, Homo sapiens
gtgcggggacagctgcagagcgcgcttctgatcctggggttcaactccaatttgtgaagatattggtaggcaaatgttatgctataatagaaggattccc

SEQ ID NO: 584747 - DNA, 88 bp, Homo sapiens
ggccgtgtcccgaggaagtgcaagacccgttacagaatgtctgaaggggacagtgtgggagaatccgtccatgggaaaccttcggtgg

SEQ ID NO: 584748 - DNA, 83 bp, Homo sapiens
ctactgtgctatcctagaatcaaggatttcagcaacaatgcctctgttcaaactcccaggaacgtcaaggtcgtgggaaataa

SEQ ID NO: 584749 - DNA, 78 bp, Homo sapiens
ctgagctcaagagatcctcctgcatcagcctcccgaagtgctgggattataggctctgacgcccgctctgcggcttcg

SEQ ID NO: 584750 - DNA, 74 bp, Homo sapiens
tctcaaccttgtgggatgtgaaaactctgttactgaagacgcaaacatgcagatctttgtgaagaccctcactg

SEQ ID NO: 584751 - DNA, 74 bp, Homo sapiens
tggggtgagaccctcacttcatccggctttgaacttggcctactccagcatttacggcagctaccggaacttcg

SEQ ID NO: 584752 - DNA, 100 bp, Homo sapiens
taccacatgaagatatctgtgaagactctgatatagatggtgattatagagtggttcctccccgggcagaagaaatcaccattccagctgatgtcacccc

SEQ ID NO: 584753 - DNA, 100 bp, Homo sapiens
tgaaattcttggaaaactccttaaaggggaaaggaaatcagccgcaggggtgctcaaaggatttaaaggagaactaattcatgtatttaacaaacatgat

SEQ ID NO: 584754 - DNA, 76 bp, Homo sapiens
aacagggtacgaatgaatacctttccatgccctggcttgaaaaacagtccaattgatgaaagtgaggtgcaaacag

SEQ ID NO: 584755 - DNA, 100 bp, Homo sapiens
ttgggcattcatgggggcgcatctatgatcatggctgacaaggataaaagaatcagagtgtctcaacccttgacaagaggaccaagtgcctttattccag

SEQ ID NO: 584756 - DNA, 87 bp, Homo sapiens
ggacggttggatcagggccgaaggtggggaaagggtgctgtgctgccctgaaagccatgggctccattgtgtatgtaactgaaattg

SEQ ID NO: 584757 - DNA, 82 bp, Homo sapiens
tggagtcttccatcaatcatatctcacagacttgaaagagggctccagaaaaagtagatgcgtatctgtacaaacagatcct

SEQ ID NO: 584758 - DNA, 82 bp, Homo sapiens
gcggcccctggagatgattgagccgcgcacgctacagtacaagacttacagccagctggcccaccccatccagcaggccaag

SEQ ID NO: 584759 - DNA, 75 bp, Homo sapiens
attactctgcgccagaccatcaccacatttgggtctctcaaaaccattgcctgcttcggccttctgctcttctgt

SEQ ID NO: 584760 - DNA, 124 bp, Homo sapiens
agtgcgtggaggagctgtgcagccgcgaggaggcgcgggaggtgttcgagaacgaccccgagacggtacatgtcccagagcaagcacacggaggcccgggagctcatgtactcgggagccctgc

SEQ ID NO: 584761 - DNA, 101 bp, Homo sapiens
gagacgatcacttttctgtaggccatttgtccaggtcagcttcaggccaccaaatccctctgccatttctacagctctgtgtccccaaaccctgaggcatg

SEQ ID NO: 584762 - DNA, 75 bp, Homo sapiens
acgcgcgggaacaacgcgagtcggcgcgcgggacgaaggactgagcagggggaggaacatttaagctgatggaag

SEQ ID NO: 584763 - DNA, 100 bp, Homo sapiens
tttgtggaatattcccatctcctgcctcctaatagctttgaggggattccagcagaagttcaccttccacagcaaggagattgtggccatcagctgctcg

SEQ ID NO: 584764 - DNA, 74 bp, Homo sapiens
caggagaacctcagtctgacgacattgaagctagccgaataaatcaactgatgagccttctgagaaggatgctc

SEQ ID NO: 584765 - DNA, 101 bp, Homo sapiens
aggtttaaccataggatagagaaaccaggtcactcctggaagcaaggcggctctagctaatttatgtattggagatgtaatcacagccattgatggggaaa

SEQ ID NO: 584766 - DNA, 90 bp, Homo sapiens
gtttaccttggaagaactccgtgcccagatgctcataaggattgtcctctttctacaaaaggtattgatgaagatgaccctactgctgat

SEQ ID NO: 584767 - DNA, 100 bp, Homo sapiens
caagaggaatcctcggcagataaactggactgtcctctacagaaggaagcacaaaaagggacagtcgtctgaagatgatgagaaactgaaaaagaggaag

SEQ ID NO: 584768 - DNA, 76 bp, Homo sapiens
cagttacacaaggacttctttatccgagcgctggattgcatgagaagatgaagtctccttattctgctgaatgaca

SEQ ID NO: 584769 - DNA, 100 bp, Homo sapiens
gacttttggggggaaactaggtcgatggtcggcggcgcccggatgggcagctgaggctgctgagcttcgtgcttatctgaaatctaaaggagctgagatt

SEQ ID NO: 584770 - DNA, 98 bp, Homo sapiens
tggtgtgggtttcccaagcaaggttccttggaagaagatgtctgcagaggaaccacgtgaatgttgagggggcgacacacaagcaggtggtggacctg

SEQ ID NO: 584771 - DNA, 75 bp, Homo sapiens
gatgctgtggaacttgcaaatcgaaggtggtccagcacatcatccagcaaaatcatgtcccagagtcaagtatcg

SEQ ID NO: 584772 - DNA, 98 bp, Homo sapiens
gaattcctctgaactagatgaagaatacctaatagaactggaaaaaaacatgtcggatgaagagaaacaggttttgattcccaccatggccatcaccc

SEQ ID NO: 584773 - DNA, 73 bp, Homo sapiens
ggcgtcgtgcattccttctcccataacgtgggcccggggagtgatgtgcagctgatcaagactggagacaaag

SEQ ID NO: 584774 - DNA, 98 bp, Homo sapiens
cctcctcttcggcggcggcagcgtccaccatcttcctcttgctgccagtggtagcgctcgtctggcggagctgggaggtacagcatgtgtactgaccg

SEQ ID NO: 584775 - DNA, 90 bp, Homo sapiens
agaacaggaaacggaccaatgtctgtatccgagagactgaggtcatcgacccccaggacctcctagaaggccgatacttctccggagccc

SEQ ID NO: 584776 - DNA, 75 bp, Homo sapiens
accagcgcatacccgctccagcctgaggacgtcaacctgcgggtcatctcggcatacacggccaccgagcaggag

SEQ ID NO: 584777 - DNA, 75 bp, Homo sapiens
gtgatttcttctgacttgagcctgcagtgtgctgtgagagatctaccactagtctgaatcaccatcttattctcc

SEQ ID NO: 584778 - DNA, 75 bp, Homo sapiens
ccagggtccctgaagagggaagacacgcggaaacagattgcccgtgaggcagaggctgccatctaccacttgcaa

SEQ ID NO: 584779 - DNA, 100 bp, Homo sapiens
tctctcaaaaggagctcagcctaaacaggttcaacatgcactgaaaaaatcagagaaggctttggataccctaaacaaagccattgtcattgatcccaag

SEQ ID NO: 584780 - DNA, 50 bp, Homo sapiens
gcaggatctctcctggacaaatcaatcagaataatccagaatggctactc

SEQ ID NO: 584781 - DNA, 75 bp, Homo sapiens
ccacagaaggactgggatgatacaccttttccacagggaattgagttgtgattcgcctttgccagtctcatctcg

SEQ ID NO: 584782 - DNA, 100 bp, Homo sapiens
caaccgctgtgcttgtgtttatgggttcactggtccacagtgtgaaagaggaatgaggggagaatcatacttcatcggaatgaggagcccagggcagcag

SEQ ID NO: 584783 - DNA, 74 bp, Homo sapiens
acgcctctcaaggagggaccaatgagacgggaggcgtgggcagcttcgacatcgccggcctgctgaacaaccct

SEQ ID NO: 584784 - DNA, 100 bp, Homo sapiens
cttcgatgtgcgagactttggaaagatggtgaccctctttcagatgtgggttgttcccctctatttcacagtgaagctgcactggtggaggttcctagtg

SEQ ID NO: 584785 - DNA, 100 bp, Homo sapiens
atctacaacaacatgaaacagttcatccgctacctcatctcgtccaacgtcggggaagttgtctgctgtcacagcttctatagcaaacgctactcccggg

SEQ ID NO: 584786 - DNA, 50 bp, Homo sapiens
caacaacaccacaataatccacagccaagccctaccacttatgtcttgga

SEQ ID NO: 584787 - DNA, 75 bp, Homo sapiens
ctgaggcggccgcggggcccgagcgcagcgtatctggtgcaggccgtgagagcagcgggcaagtgcgatgcggtc

SEQ ID NO: 584788 - DNA, 83 bp, Homo sapiens
cctagaagaataagagatgtgattaatgtattccaccacctccgccagttaagaggaaaaagagcagtatagctgtgactatg

SEQ ID NO: 584789 - DNA, 100 bp, Homo sapiens
tgcgatggggcgagaaaggtcccactgcagccctccaagcagcccttcagatatttcaacactcctctcagcatcctccacttcccccatctctccaagc

SEQ ID NO: 584790 - DNA, 100 bp, Homo sapiens
ggggcacagaccaccctccactgagtgcggagcagccaaggtgatgtgtccaatctagatcccaacttctcatttgaaggcaccaaactggatgtgggga

SEQ ID NO: 584791 - DNA, 95 bp, Homo sapiens
tggtggaggaggtggcaggcctcggcgactacatgaggaaataattgacttttataacttcatgtccccttgtcctgaagaagcagctatgagaa

SEQ ID NO: 584792 - DNA, 98 bp, Homo sapiens
ctgggccttttcttcatagtcagctcctgtgcctgtctccgagcaacacctccacctctgcaccttcacctgggctgtcccacctgcctgaatggccc

SEQ ID NO: 584793 - DNA, 50 bp, Homo sapiens
aactgactaaagctatatgtggactgagtgtgaaccggttggcaatggag

SEQ ID NO: 584794 - DNA, 76 bp, Homo sapiens
atggctttggtgggatgtgtatgaccttcacctcattaacagccatcatgcagaagggggatacaaacataaagcc

SEQ ID NO: 584795 - DNA, 100 bp, Homo sapiens
catctgtccagccacctacaggcctccaggaatggctaaaaatgtttcaggtccatgactccagctcaggctgacttggagtttcttgagaatgccaaaa

SEQ ID NO: 584796 - DNA, 100 bp, Homo sapiens
cttaaggagaacataatgaggttctggagatccccgaaccccgggtcctggggcatgagccagaaggagagctctaagtctgccatgatgtatattcagg

SEQ ID NO: 584797 - DNA, 74 bp, Homo sapiens
gaggaatgaagtgattgctgacattaattgcaaaggtgctggagaatctggtaaaagcaccattgtgaagcaga

SEQ ID NO: 584798 - DNA, 100 bp, Homo sapiens
aatttgtatagagatgtgatgttggagaactacagaaacctggtctccctagatatggatcagaaactttcgaagttggtagaagagctcacaacttcag

SEQ ID NO: 584799 - DNA, 88 bp, Homo sapiens
agcagtgtttcaggaattttcacattccagaagaggcgtccttctttgcacgggtgtttttcctgaatgtgccatttgattccatcat

SEQ ID NO: 584800 - DNA, 97 bp, Homo sapiens
cacaaccgtctccagccttggtctgagtggactgtcctgcagggttttggccaaattgggcgagggcacaaaataaccacttaccccttctcaccga

SEQ ID NO: 584801 - DNA, 100 bp, Homo sapiens
cggaggtggcaattcaccgaattcgaatcaccctaacaagccgcaacgtaaaatccttggaaaagggtgatttgaagatattaaagctagaaattggaac

SEQ ID NO: 584802 - DNA, 74 bp, Homo sapiens
gataagatatttgacctttccgacccgcggttttcttctccgcatggtggtgtgttcctgtagtcccagctact

SEQ ID NO: 584803 - DNA, 75 bp, Homo sapiens
tgctgacagcagaaccccacaaactgcctcccgccagcgagcagctcggcttattccaggggtgtgtttcgtcga

SEQ ID NO: 584804 - DNA, 100 bp, Homo sapiens
ttatcgttgtgggaaccaggctgctatcatggaattagatgacactttaaaatattccttcctgatctagttgaatctgaagatgtggacctgctgatga

SEQ ID NO: 584805 - DNA, 82 bp, Homo sapiens
acccccgcacccacgcggccctgctgaaagtggcgcaaatggtactccaaagattcaggtttactcacgtcatccagcagag

SEQ ID NO: 584806 - DNA, 101 bp, Homo sapiens
cgtggctgccttcctgcacctgctgctcccactggcctttgaggagctggaagctatcaaagctcgagtcagggagatggaggaagaagctgagaagctaa

SEQ ID NO: 584807 - DNA, 83 bp, Homo sapiens
cgcgactccccccgggcccaaagatgcctaaatcaaaggaacttgtttcttcaagctcttctggcagtgattctgacagtgag

SEQ ID NO: 584808 - DNA, 50 bp, Homo sapiens
agaccagtgtaataccctgaatcccagagaacgaggtgctcaaagtccaa

SEQ ID NO: 584809 - DNA, 90 bp, Homo sapiens
atctggtggcccacttgttgaagacaaaatcgctttccctttccatcttaaagcatggcaccacactcctgatggttgctgcctacgctg

SEQ ID NO: 584810 - DNA, 75 bp, Homo sapiens
tctgccccagaaccggtcgaaaaccgtgtatgagggattcatctcggctcagatgtgaggtagaaaatcgatacc

SEQ ID NO: 584811 - DNA, 75 bp, Homo sapiens
tccaacaccagtggaagatgatcacatcccagagggctgctgaagtatcaaactaatttagatacccaccctccc

SEQ ID NO: 584812 - DNA, 74 bp, Homo sapiens
gatgctgaactggatgctaaacttgagtccctacagatgaagaagatgaaatggaggagtccacaaatcgacca

SEQ ID NO: 584813 - DNA, 89 bp, Homo sapiens
cccgggtggcgcctccctgcgactcctggaccaccgggcgctggtctgctcccagccggattatcgagattgcagcctgtcactccaca

SEQ ID NO: 584814 - DNA, 100 bp, Homo sapiens
ctttcacccaagaaccacaacgagacaaacctgccaacgtccagccttattacctctatggatccaaggatttttttcccaggaagccatcccgtcagag

SEQ ID NO: 584815 - DNA, 100 bp, Homo sapiens
tctttgttaaaaggagacctaaagggagtcaaaggagtcgagtttgagtggctgaggcagttttggtttcaaggcaatcgatacagaaagtgcactgact

SEQ ID NO: 584816 - DNA, 100 bp, Homo sapiens
ctgtcagatagcacttgccttccccatattattcaggcagacatctggtccctgggcataacagctattgaacttgcaagaggggaaccacctcattccg

SEQ ID NO: 584817 - DNA, 100 bp, Homo sapiens
gcgtgcaggcacagatggctaagagtttcgctgttgttgcccaggctggagtgctggagtgcaatggcatgatctcggctcaacgcaaccatcacctccc

SEQ ID NO: 584818 - DNA, 100 bp, Homo sapiens
ggggagccaagctggagtttacacaggcaaactgtcagaaaagagtagcctgggctgtctggaaatctgagatggagaaggatgaaactgtgagtgactg

SEQ ID NO: 584819 - DNA, 101 bp, Homo sapiens
ggtggccgcctgcttcagtctgtgcggcccgctgttgtctgcccgcacccgggcccgcaggccagggcaggctgcagtggaccatatcaatgctgtcattc

SEQ ID NO: 584820 - DNA, 76 bp, Homo sapiens
ggcgcccctcggcctcggagcaacgagcgcagcgccggacccttgaacatctgtgaagaaatgactattctgcatg

SEQ ID NO: 584821 - DNA, 90 bp, Homo sapiens
cggagccgtgtgtggacggctgggtctatgaccgcagcgtcttcacctccaccatcgtggccaaggagtctcaggagcaggggctgcggc

SEQ ID NO: 584822 - DNA, 50 bp, Homo sapiens
cttattggaaaaacatttcttacgttgttgatcattatgaaaatcctaga

SEQ ID NO: 584823 - DNA, 50 bp, Homo sapiens
ccagcaccgtgctctccaccacaggatgcagaagaagctgtcagaattgc

SEQ ID NO: 584824 - DNA, 100 bp, Homo sapiens
ttctcctaccccttgtcatgcagggtgtgagcagggctgagatgggcaccgcggatctggggccgtcctcagacaatgcagatcttcgtgaagactctga

SEQ ID NO: 584825 - DNA, 100 bp, Homo sapiens
cagccaagctcagcggatggccgaaaatctaggcttcgttgggcctttgaaaagccaggctgcaagaaagcgtaagattgccattcgaaaagcccagggg

SEQ ID NO: 584826 - DNA, 100 bp, Homo sapiens
gaacatggactgaagtatccagcgctcattgggaatttagttaagatttggagcaagaggtggtggtggccttcccccgaagaaatttggtaatcctggg

SEQ ID NO: 584827 - DNA, 90 bp, Homo sapiens
gcgcccgccgccctggaagaagaggacgagagaagatgactgaggaggaggtggagaccgttctggcaggacacgaggacagcaacggct

SEQ ID NO: 584828 - DNA, 80 bp, Homo sapiens
gcctcagcctcccgagtggctgggattacaggcaaaatacatatctcagtgcattgatgagatcaagcaggagctgaagc

SEQ ID NO: 584829 - DNA, 50 bp, Homo sapiens
gatcctcccacctcagcctcccagggtctcactctgccacccaggctgga

SEQ ID NO: 584830 - DNA, 100 bp, Homo sapiens
aggacttccctttggatgtagcaaggaagaaattgttcagttcttctcaggatgatcggctgaatgtaacagaggaactaacgtccaacgacaagacgag

SEQ ID NO: 584831 - DNA, 82 bp, Homo sapiens
gcttcaccacgcggctgcacaactgcaggaacaccgtcacgctgctggaggagcaatcccacagagtattgatgaggaaact

SEQ ID NO: 584832 - DNA, 95 bp, Homo sapiens
caggggcgtgttggccccgcacagattgagccgagttgtcgccccgctgggagaagtgaccctcctgcgcctggaaacccagcgtttgctggcag

SEQ ID NO: 584833 - DNA, 75 bp, Homo sapiens
ccagagctgcaaatatgttcaagatggctaaaaattggagtggccctggccaacgtcaacattgggagcctcatc

SEQ ID NO: 584834 - DNA, 100 bp, Homo sapiens
cctgacacaaacttcaggaaaggattttgcacttgtgcagaccgggcgagcagagtaagaagcagccatgaaccagagaatcagtcagagtgctccagtg

SEQ ID NO: 584835 - DNA, 74 bp, Homo sapiens
gggaaatcgggctgaagcgactgagtccgcgatggagaaacaccatctgattcagatcacaagaagaagaaaaa

SEQ ID NO: 584836 - DNA, 87 bp, Homo sapiens
tggactgaggtgcgagaggctccatcaggcacacatgcaggttcctcatgccatgcacctgctgtcacccagcatgcaccctatttt

SEQ ID NO: 584837 - DNA, 88 bp, Homo sapiens
ttccttcctccacaaactgtgctctggtgttcctgatccaagcagaaccctgttatttgaagagcctgagaaatcttatcccgtttac

SEQ ID NO: 584838 - DNA, 90 bp, Homo sapiens
actggattatactgtactgcccatgaaaaaggatgttgaccggacagagttgctggagaatgtaaccctaatccataaaccagtgtcgtt

SEQ ID NO: 584839 - DNA, 100 bp, Homo sapiens
ctggaagaccgccgcccgactctgggccccgggtaggaaacacgatcgccccgtgagagcaagcgagcggaaggcttcccgactgcattttgcatcagag

SEQ ID NO: 584840 - DNA, 83 bp, Homo sapiens
cagagataattgataacaccctgtaacagctgagcattgcactgatgatgtggaatacgttcttagttaaaagattttctgct

SEQ ID NO: 584841 - DNA, 82 bp, Homo sapiens
ccagcccaacacccaagttaaggtcgctgcggaggagctttgctgtctgctaggccaggtcttccaggttgtttacacggag

SEQ ID NO: 584842 - DNA, 83 bp, Homo sapiens
cagctcccctttctcgcccagcgcccccaggccgctcccggggctcacgagaggaggttcagatgagcccctgctgacttgag

SEQ ID NO: 584843 - DNA, 95 bp, Homo sapiens
tatcttcccttacaagggttatatatggaattatggtaccctccctcaggtcatgttggcagcttcctattggtctcttctggccccagcagttg

SEQ ID NO: 584844 - DNA, 75 bp, Homo sapiens
ctttaagatcacgctgacgtcggacccacggctgccgtacaaagtgttcatgcttttatcaagagatctgatgct

SEQ ID NO: 584845 - DNA, 100 bp, Homo sapiens
gttcctgctgccctcaaggtcgtgcgtctgaagcctacaagaaagtttcagcatcaggcaagtggctggatggtattcgaaaatggtattacaatgctgc

SEQ ID NO: 584846 - DNA, 128 bp, Homo sapiens
gagaggcaccgggatcgtgaccgagaccgtgaccgagagcgtgaccgagagcgcgaatatcgtcatcgttagaagtgccctgtactctgtggggatgacggcagtgggcctggccatcctgtggtatg

SEQ ID NO: 584847 - DNA, 82 bp, Homo sapiens
aggctgtggccatcttcaccgtgtacctgggctcgagcctgcacatgaagggtggctgaggtcctggaaggcaaaggagcag

SEQ ID NO: 584848 - DNA, 92 bp, Homo sapiens
aagggatggagtatctggagagaaacagcttcatccacagagatctgataacaccatccagtcggttttctgttgctgctgttgctgttcag

SEQ ID NO: 584849 - DNA, 90 bp, Homo sapiens
gggggtcgctacggacttaaaatctccgcaccgcaccctccacctcaggagtgtggccatctggggccgtgtggtatttgccactcagga

SEQ ID NO: 584850 - DNA, 80 bp, Homo sapiens
cctctcgcgctgcactgtctctccgacgcaagactgtcccggcccgggattttttatcaagcagaaatgcatcgaacaac

SEQ ID NO: 584851 - DNA, 100 bp, Homo sapiens
ccccggggtcccaggaagggcggcccaggtatcgagaaccttccctgcgaacttcagaggaacttccagctgatgcgagagctggaccagaggacggaag

SEQ ID NO: 584852 - DNA, 100 bp, Homo sapiens
ctggcgctgctggctgcgctctgcccggcgagtcgggctctggaggaaaagaaaggtgtcatggagaaactccagctgggcccagagattctgcagcggg

SEQ ID NO: 584853 - DNA, 90 bp, Homo sapiens
agaccgtgctggtctttctcaacctcatcttctgggctgaagccgacgtagcttctctgaacagacgcatccagctggttgaggaagagt

SEQ ID NO: 584854 - DNA, 82 bp, Homo sapiens
tgcacggtgtgcttcgaggacagatcaatgtccgagttaccaccatggatgcagagctggagtttgcaatccagccaaatac

SEQ ID NO: 584855 - DNA, 90 bp, Homo sapiens
gccgaaacaccggtaggagcggggaggctgtgaacaaccggtccatccaactccccaccaccgtgcgggacatcatgaaccgctggaccc

SEQ ID NO: 584856 - DNA, 100 bp, Homo sapiens
ctcgccgatcctccaggcatgccccgctacgagctggctttaatcctgaaagccatgcagcgggtcaatgagctgaaggagaaaggcaacaaggccctga

SEQ ID NO: 584857 - DNA, 50 bp, Homo sapiens
aaatgactcggactgaacaagaggaactgataaatttcaaacggaagaga

SEQ ID NO: 584858 - DNA, 100 bp, Homo sapiens
tggagaagatggagctaaaggaactgcttatttaatacatttgaacaacttttggggtacttagaagaagttaaagtctgacacggctgctgcagctgtg

SEQ ID NO: 584859 - DNA, 75 bp, Homo sapiens
tctgatccccccctgccggggagggcccagcgcatccgacaggttgttcgccgcaggacccagcggaggaagtcc

SEQ ID NO: 584860 - DNA, 90 bp, Homo sapiens
gacagaggaggctccgtgtctgcagctagtgtgtcaactcagcgtttctcctctcgtccctggtgaatggctatgtggtgaaccttttct

SEQ ID NO: 584861 - DNA, 118 bp, Homo sapiens
atgggtttatggatatgctccatgacaagtggtacagggtggttccctgtggcaagagaagttttgctgtcacggaggccccaggcatggaagagctgatatgggaacagtacactgt

SEQ ID NO: 584862 - DNA, 90 bp, Homo sapiens
ctgtactaggactgggaacggggccgcgatgggcctcttggaacattggtgtgttcatctgcattcgatgtgctggaatccacaggaatc

SEQ ID NO: 584863 - DNA, 96 bp, Homo sapiens
tccagcagctgttgaagttcttaacctagtagcccaggaatgtagtgctgatttccagcacaagataaccgtgcaggcctctcccaacttggacaa

SEQ ID NO: 584864 - DNA, 85 bp, Homo sapiens
cgcccggctccgctctgccgccggcgcggctcatgggcagagtcggccgggcgggccggagtcattttctgaggatgaatggaat

SEQ ID NO: 584865 - DNA, 97 bp, Homo sapiens
cgcggtccggcccggggccccgggatctcggctgtccttcctcccggtgccctcaccaccaatggcatcaaccctgacaccagtactgagatcggac

SEQ ID NO: 584866 - DNA, 75 bp, Homo sapiens
ctgtgagcacgcatcaggtgctgtttcaggcctggcacgtagtagagatgtgaatgaatgtgaactgctcagtgg

SEQ ID NO: 584867 - DNA, 75 bp, Homo sapiens
tctccaaacatgatcgtttactgcaaaagaaagcatgggattatggcaaccacagaatctcagtagtacaagttc

SEQ ID NO: 584868 - DNA, 101 bp, Homo sapiens
cacccaatatctccagccgcgcagtcccgaagagtcgggctgacgcacgaggcacacaggaaggaggtggagcaggtgtatctgcgctgtgcggcgggtgc

SEQ ID NO: 584869 - DNA, 83 bp, Homo sapiens
gggccagagacgacaacccgggcctccgaggatgcctttgtggaactgtacggccccagcatgcggcctctgtttgatttctc

SEQ ID NO: 584870 - DNA, 75 bp, Homo sapiens
aagcagttcagaagagccaaggaataaacatgcaatgaacccaaaagggttatcaatactctggctgaccatcat

SEQ ID NO: 584871 - DNA, 100 bp, Homo sapiens
taaccatgaagacttgaacttaatacagcaagaaagaccatcaagtttaccagctggacgtaaagaaagaagtgatgcactcaattctgcaatagataaa

SEQ ID NO: 584872 - DNA, 75 bp, Homo sapiens
gagacatcaaacttactaaagacggcaatgtgctgcttcacgaaatggattggcctaatgaagaagttcaacctg

SEQ ID NO: 584873 - DNA, 100 bp, Homo sapiens
ccaacggagagacgccggccgtggacatcggggcagctgacctcgcccacgcccagcagcagcagcaacagtcgacctcttcaggatggagatattatca

SEQ ID NO: 584874 - DNA, 98 bp, Homo sapiens
gggagacttccacggcctgcagaggttctttgaaaacttgaatccgatgggaaatagcatggagaaggaatttacagattatcttttcaacaaatccc

SEQ ID NO: 584875 - DNA, 75 bp, Homo sapiens
caagcggtttcaaacggcttagagcaggccgcttggttctgacccagctgagcagagtcacctgatatgaaaaag

SEQ ID NO: 584876 - DNA, 75 bp, Homo sapiens
cttggttaaagtcattgaggactttccagcaaaggagcccagtttcctccaattgcagcacaagaccttcctttt

SEQ ID NO: 584877 - DNA, 90 bp, Homo sapiens
tattggttcagcccctgaaagtttccaacaggaaatcatgccaatggaagcactgttgtgaagaacttatgaaaattgagattatgtcac

SEQ ID NO: 584878 - DNA, 100 bp, Homo sapiens
cgagcacaacctccagggccgcatcgggggcgactcaggcctgtccagccggggcaagaagcctagggcctaggcccgggccaccatggcgctgcctcca

SEQ ID NO: 584879 - DNA, 100 bp, Homo sapiens
ctataattcataaggggtctagatcaacaatcaaagacaatatcaatgacaaactgacggaaaaggagagagagcaagataacccctgtgacagaaggct

SEQ ID NO: 584880 - DNA, 75 bp, Homo sapiens
actcgcgtttccacttcagagatctggaactgtggctgcaccatctgtcttcatcttcccgccatctgatgagca

SEQ ID NO: 584881 - DNA, 85 bp, Homo sapiens
agccttgttgctcttaaagttgtcagtggctgactcacaggctggactggacctacagagacatctgggattttctgcgtcagct

SEQ ID NO: 584882 - DNA, 99 bp, Homo sapiens
atctgcaggtattgggagatgcacagctaagatgccaggaccacctggaagcctagaaatgtttgaacgccatgaccctgtggatgggagaattactga

SEQ ID NO: 584883 - DNA, 75 bp, Homo sapiens
gcccggctggcctcctccggtctcctcctgcaggtattgttgcagcatctggcagtgagactgaggatgaggaca

SEQ ID NO: 584884 - DNA, 95 bp, Homo sapiens
aacctctctacattccagtaacccagggtttggaaatcccttgtctccaggttgctgggattgacttcttgctcaattgaaacactcattcaatg

SEQ ID NO: 584885 - DNA, 74 bp, Homo sapiens
ctggaactgctgacacaatactcgttcgatacaagaggctgttttcctagcgtggcttgctgcctttggtaaga

SEQ ID NO: 584886 - DNA, 82 bp, Homo sapiens
cactgaagaagtagagtatttcaaccataaagacatcttaattgggcacgaaagaggagcatcagatccatgctgctgctga

SEQ ID NO: 584887 - DNA, 51 bp, Homo sapiens
ggaaagcttggttacaacccgggacacccgaaactggcgatggaatatgag

SEQ ID NO: 584888 - DNA, 101 bp, Homo sapiens
ggagaatcgcttgaacccaggaggcggaggctgaggcagagaatcttccagatgataaaccccagcagccgactcgaccccaggagcagagtacaggagac

SEQ ID NO: 584889 - DNA, 83 bp, Homo sapiens
cgtgccgcgagcgcggcctgcaggagagaggaggttcagatgagcccctgctgacttgagagagacagagagaccacgccgat

SEQ ID NO: 584890 - DNA, 100 bp, Homo sapiens
cttgggatcctttatcctggtcatcttctatttccaaagtatgttgcacccaggtcaaaatgcagatcttcgtgaaaacccttaccggcaagaccatcac

SEQ ID NO: 584891 - DNA, 88 bp, Homo sapiens
attcttgaagtttgtggatgaaaattgggaaggttccctcaagtccaagctgagatctgtatctgtggacctgaatgttgatccctcg

SEQ ID NO: 584892 - DNA, 83 bp, Homo sapiens
cttgttcctgagctgtgcaaccaatcagagtccagtggagaaggaacaacatcaagcctttttgtatcagttaatgcaacatc

SEQ ID NO: 584893 - DNA, 90 bp, Homo sapiens
acacactcaccctggaggagagggtccacttcaaacagcggatggtggatgcttccaaaagcatcgaagctgtccatgaggacatccgcg

SEQ ID NO: 584894 - DNA, 50 bp, Homo sapiens
cttcattgcaagttcttatttgtaaggaaacaaaccatcaggcctcccag

SEQ ID NO: 584895 - DNA, 82 bp, Homo sapiens
gagtaaaaagaacttcctggagaaactgaagcgggacgttgagagatgaccaagcgagacgtgcctggcttcgccatcgggg

SEQ ID NO: 584896 - DNA, 100 bp, Homo sapiens
ggaggagactcctgaccctcagaatggaatcctacggcccctgaatattttggcatcttcaacctaccgcaactgtgtcaagaatgcctctcttatttct

SEQ ID NO: 584897 - DNA, 74 bp, Homo sapiens
gttctccagcctgctgcgcaggataaaaggcaaactcttcacctggaaggatttgatgccctggatccctttat

SEQ ID NO: 584898 - DNA, 82 bp, Homo sapiens
gcatttcagtcactggtttgcagagtccagatggtgtcggacggcatgacaggcagcaatcctgtgtcccctgcctcatcca

SEQ ID NO: 584899 - DNA, 90 bp, Homo sapiens
acacgtcagagacagagaaatcaaagttaacatctttgatatggctggacatcccttcttctatgagattccgtcctatttcagtgttcc

SEQ ID NO: 584900 - DNA, 100 bp, Homo sapiens
ggcagcggccggaggtcagactgttgcacgccggctcgggggccgacacaggtggatctccttacgtagcagccaaaataaatgaagcaaaagacttgct

SEQ ID NO: 584901 - DNA, 75 bp, Homo sapiens
agccctggaatatgaagcaacatgagatggtggatgaacccacagcaaccatgtccaagggacctgcagttggta

SEQ ID NO: 584902 - DNA, 98 bp, Homo sapiens
cgctgctcctcaggccccagaagccttcacactcaaggagaagggcctgcgactgtcacccggttggtgctgctggcaagacctgcaaccagaccaca

SEQ ID NO: 584903 - DNA, 82 bp, Homo sapiens
cggctagaaggtgaccgcggatcccagcttcctgcagccagggaatctgactaagcacatgaagtcgaaggcccacagcaaa

SEQ ID NO: 584904 - DNA, 75 bp, Homo sapiens
ctgcccgaggggagcaaggacagcgttttgctgctgacatcatctccgttttggccatgaccatgagtggggagc

SEQ ID NO: 584905 - DNA, 75 bp, Homo sapiens
ccggggcatctttgagaccaagtttctctctcagatcgagagtcatggctccgatcttcatcttgaagaagagtg

SEQ ID NO: 584906 - DNA, 100 bp, Homo sapiens
gcaaactttgggaaactttgcacagtccccctggacagcattcttgtagacaatgttgcactacaattttttatggacgtccttctatggccgcttcagg

SEQ ID NO: 584907 - DNA, 90 bp, Homo sapiens
ctgcgaggctcggagaaacaggcgccgcgggctccgcgcccggccggacccgggcccgaggagcaccctccggccatgaatcacctggac

SEQ ID NO: 584908 - DNA, 100 bp, Homo sapiens
caccttcaagggagtcgaccccaacagcaggaatagctcccggaccaagaatcgccttcagccctgtctggtgcatccttggcagaaagtgaggaggaaa

SEQ ID NO: 584909 - DNA, 100 bp, Homo sapiens
gtctgtgccgcctaccaggcagagcctgaggaagctgaagcagaggtttcccagctcctgagaaccatgtctatgcccaaaggtagagttctggataaaa

SEQ ID NO: 584910 - DNA, 82 bp, Homo sapiens
ttagctgtgctcgcgctactctctctttctggcctggaggctatccagcgatctctctaggagctgacactcgaaccttcac

SEQ ID NO: 584911 - DNA, 73 bp, Homo sapiens
atgtttggcagctgagtattggagccaggagcctgccatgaggaatgttacgttcataacttactaaggatta

SEQ ID NO: 584912 - DNA, 98 bp, Homo sapiens
cggtctcggtgtagctgccgtggttgccaggagagctgcgccggcgagaagcggccgagccagcagcaggtgaaaatggcattacggacatcaggaca

SEQ ID NO: 584913 - DNA, 100 bp, Homo sapiens
ggagatccgctacgagggcatcctctacaccatcgacaccgaaaactccaccgtagcccttgccaaagggttacacatcattttggaatgactgtatatc

SEQ ID NO: 584914 - DNA, 120 bp, Homo sapiens
gtgaaggtccggggcttgccctggtcttgctcggccgatgaagtgcagaggtttttttctggacctgagggcactcgctttgctcctgtcagtacacactcccaaacagttaaacccagc

SEQ ID NO: 584915 - DNA, 100 bp, Homo sapiens
gaaagcagtgatgatgttgaagtgctgactctcaagaaattcaaaggagacctggcctacagacgacaagagtatcagatattctctaagccgctttcat

SEQ ID NO: 584916 - DNA, 74 bp, Homo sapiens
gcagctgctgcacagaaaaataaactcaaggagcctgggggaggttcgtttcgcaatctgcacatcgtgctgcc

SEQ ID NO: 584917 - DNA, 100 bp, Homo sapiens
ccttatgaaccaggaatattttgtactcgatgtggcagacgtgacaaatgcacagattttctatgcattggatgaaaaatctgacaaacagtatgctgaa

SEQ ID NO: 584918 - DNA, 50 bp, Homo sapiens
cacaccaaaccctggattagagcaagtcataccctaatgatcccagcaag

SEQ ID NO: 584919 - DNA, 100 bp, Homo sapiens
tgccaattcaacaatcaaaaagaaagctgctgttatcatcatggctgtagaggacatggatttgattgacatactttggaggcaagatatagatcttgga

SEQ ID NO: 584920 - DNA, 90 bp, Homo sapiens
cttttcccgttgaaggtgctaccgctgacgacacccctggtggatggcgaggatgagaggttagctcccagcgatgccagatgggatcag

SEQ ID NO: 584921 - DNA, 51 bp, Homo sapiens
gaaccatatagcaggctaaaatcaggagaaaatgctgagaagcttctgcag

SEQ ID NO: 584922 - DNA, 100 bp, Homo sapiens
cctgcaaattaaactttgatttttcatcttgtgaaagcagtccttgttcctatggcctaatgaacaacttccagggttatgtggtccgaatcagtggtgg

SEQ ID NO: 584923 - DNA, 100 bp, Homo sapiens
ccagtcctgacaatgggcagaacgaattcagtgatatcattaagtccagatctgtcacaggcatggcccattgtgttgcaaggaatagatcttataggag

SEQ ID NO: 584924 - DNA, 100 bp, Homo sapiens
tttgacaaggaggggaacggcaaagtcatgggagcagagctcagacatgttctcaccacccttgcattccttctgcagcacttgatttattggaccacat

SEQ ID NO: 584925 - DNA, 99 bp, Homo sapiens
agaagatgagaccgggggaggcgacgctaagttgctgatcgtggcggtgtggacactgccagcggctgcagccgacttggaatgacctgggagacaaat

SEQ ID NO: 584926 - DNA, 101 bp, Homo sapiens
cgcaattacggccccgaggtgtgggaagacatcaagtgcatcatttctggcatggcttcaggaagcattgtgctattttacaacgactttaaccggtggca

SEQ ID NO: 584927 - DNA, 122 bp, Homo sapiens
cctgtctacagagaaaaagaagatatgtatgacgagattattgagttaaagaaggaagaaatgttggctatttggcgatgagaggtggtgaacagtgaccatactggtatacaacactatgg

SEQ ID NO: 584928 - DNA, 75 bp, Homo sapiens
ctctcctgatacagcaggcgctcaccatgttccctggagctctggcaggctgccctgagcacgctcaaccccaac

SEQ ID NO: 584929 - DNA, 96 bp, Homo sapiens
gactttcaaacatctgaagatgacaatttattagatggtgacactgcagttgatgttcctcctgctgatcaagagaagctttttatccagaagtta

SEQ ID NO: 584930 - DNA, 96 bp, Homo sapiens
gaaggacaagcgcttctcgggcaccgtcaggcaccattcaggaagattacctaagagagctgctgacaaccatgggggatcggtttacagatgagg

SEQ ID NO: 584931 - DNA, 100 bp, Homo sapiens
gcaaagcgcagaaatgttggatttgaacaatcatcctcttccagtggtagcgtgtttgggtctggaaacactggaagagggggaggtttcttcagtggcc

SEQ ID NO: 584932 - DNA, 102 bp, Homo sapiens
gaagcaacagccttacacagagtgttcagcaagctccaacaattgtgtaaggtatatacaatcaatttggaatctcagtacttattaatacaaggagttcct

SEQ ID NO: 584933 - DNA, 100 bp, Homo sapiens
tgaaggttacctctttggagagaacatggatctgaacttcctgggcagccgcccggtccaggaatcgtctacgaagcctgataaaaaggtttctgtccca

SEQ ID NO: 584934 - DNA, 98 bp, Homo sapiens
ggacggggcggacggcgacgcagcccgcggcagaagatcatgacaagatgtttaagatgagtgaaaagatattactcctgtgtgttggagaggctgga

SEQ ID NO: 584935 - DNA, 127 bp, Homo sapiens
ctggcatccaaatatccagattttaagcagcatgttcagataaatctgaatggaagagtgagggtggagtggttggcatcaccatcgactggcactgtgacctggactggcacgtacggcactgcag

SEQ ID NO: 584936 - DNA, 83 bp, Homo sapiens
tgtatgattaggccacaatcttcaatgagtaaacatattcctgaagctcttcgtgggcggtcttgactggagcacgacccaag

SEQ ID NO: 584937 - DNA, 83 bp, Homo sapiens
tgtcttcggtggactccttcggcagtccacccaccgccgccgcctcccaggtgcgggcggcacccagagactcacccgtgctg

SEQ ID NO: 584938 - DNA, 98 bp, Homo sapiens
gccgcccctgttgcgatggcgcagaaaccccgttgacaaggcactgctttttcatgacgagatcctgaaggagctagacgagtgctacgagcgcttca

SEQ ID NO: 584939 - DNA, 116 bp, Homo sapiens
aactggttcaagaaccgccggcagcgcgacaggaacccctccgagacccagtccaaaagaacccagcgggtgccgcttctccacccgaggcttccacctccaacgagccatgttcc

SEQ ID NO: 584940 - DNA, 100 bp, Homo sapiens
aaatttcccaccggcccagctcatcgagcttcttcccagctgtgaacaggagggcctgttccctaattcttgccgtggagttcacagggcccccacagaa

SEQ ID NO: 584941 - DNA, 74 bp, Homo sapiens
aggaaaaactggagagcttcatcaaaaatagtgatagctttgataaagtaaaagccaccaccagtctgtgcgaa

SEQ ID NO: 584942 - DNA, 50 bp, Homo sapiens
ctcgcttctaactggactgcacttgaccacgttgttcctgagcctgggac

SEQ ID NO: 584943 - DNA, 75 bp, Homo sapiens
gcgagcgcgcctggcgggcgaggaggaggcgctgcgtcagtaccagcagaccatcatcgacatcttggagtactc

SEQ ID NO: 584944 - DNA, 82 bp, Homo sapiens
gtgaacttggcattttagatctaattcaagaattctgtggccacactgcgaggagatcggttctgggtcggaggctacagga

SEQ ID NO: 584945 - DNA, 102 bp, Homo sapiens
taattgcacaccacaaaccaggctctggagatgataaaggaagcctgtctttgtgtggaattgagactggatctatcacagaaatgtttggagaattccgaa

SEQ ID NO: 584946 - DNA, 101 bp, Homo sapiens
acagactatgatattcgattttacatgtatgagattctgaagggtctaaaattcccaggactccacagctttgcaccagataagcctggaggaatactaat

SEQ ID NO: 584947 - DNA, 82 bp, Homo sapiens
aacagaaccatcctgggctacaagacgctggccgcgggctccatcagcatggctgagaaaaatggctacaaacttcctagca

SEQ ID NO: 584948 - DNA, 100 bp, Homo sapiens
taccgttttagtcttgggggtagagtgactgcttgcgaaccagttcagcagtgcctcaggaagccaaattggcagagaatgcttgtaccctggctgacct

SEQ ID NO: 584949 - DNA, 75 bp, Homo sapiens
agtttgtctcctgtcctcctgaccctcacaaagggatcggtcagcccaaggccaaccccactgtcactctgttcc

SEQ ID NO: 584950 - DNA, 75 bp, Homo sapiens
ggaaaacctgatcccaaaattattgaaaacactcgaagggtacccactgatggtaatgctggcctgctggctgaa

SEQ ID NO: 584951 - DNA, 100 bp, Homo sapiens
ggcgcccctgagccggccgagcggcgacggaccgcgagggagtgcatccgccccaacccttttccccctcgtctcctgtgagaattccccgtcggatacg

SEQ ID NO: 584952 - DNA, 83 bp, Homo sapiens
gagtgcagaagatctgggtgcccgtggaccacaggccctcgttgcccagatatggatttgcagccgctgcaagtgtgtggaag

SEQ ID NO: 584953 - DNA, 82 bp, Homo sapiens
ccagcccgagaccctcccagtcggggagcagaacacctgttcattcagaccttttggcaaaccatgaatcgagaatggaaag

SEQ ID NO: 584954 - DNA, 82 bp, Homo sapiens
acagactcagaagatgatgctaacagtgctggacggcagtctggaaacgaccaatgagatcttggactctgcctctcacgac

SEQ ID NO: 584955 - DNA, 100 bp, Homo sapiens
accctacctggctccatgaagatgccacagggatcctaaaatctgtgaggagtaagaggagcaggctcctgcacagtgactacatgaacatgactccccg

SEQ ID NO: 584956 - DNA, 83 bp, Homo sapiens
gggtctccgtacaccaaaaactcaggcttcgccacctgcgtgcaaaggagcaccccatcggagacaagagcttccagaactac

SEQ ID NO: 584957 - DNA, 75 bp, Homo sapiens
acctcggtggcaatatccagtgccctgcacaagaagggcaagctggacatggtattaatcaagaagagctatgac

SEQ ID NO: 584958 - DNA, 73 bp, Homo sapiens
tcctgctgctctgtctcagcgccgcctccctgcttcttaacaggcgtgatgtgggcctttttggggtgctaaa

SEQ ID NO: 584959 - DNA, 98 bp, Homo sapiens
accccatatatgattttctttaaggatggtttagaaatggaaaaatgtctgccactgcagagccccgccatggaagacacgccgttggtgatatcgaa

SEQ ID NO: 584960 - DNA, 100 bp, Homo sapiens
agactattgattaagaacccaaggaccaagcccaggactccagtcagccttcccaaggttcgtgagccacacatctccccacaccaagctcctccataca

SEQ ID NO: 584961 - DNA, 98 bp, Homo sapiens
gcagccttcccatgctatctgttgacatggaaaacaaggaaaatggctctgtcggtgtaaaaaaagaatgtaactggtcactacatttccccctttca

SEQ ID NO: 584962 - DNA, 100 bp, Homo sapiens
catcaacaagatgttgtcctgtgctggggctgacagccctgcctgatgtggctctgggaattcctgcagagaagagcaggggtggccaggagatagtgag

SEQ ID NO: 584963 - DNA, 89 bp, Homo sapiens
ggaaagaaaggatggagtgtgaaacagatgaacaaaaacagggctctgatgagaacatgtcagaatggcaaatttagcgatcaacccag

SEQ ID NO: 584964 - DNA, 82 bp, Homo sapiens
tctgggggttcgcgcccgccgacccgcgccctgctccctctcagcacctgggcggacggtgctccagaggctggtggacctg

SEQ ID NO: 584965 - DNA, 90 bp, Homo sapiens
actgtgggaggcaagcaacacttgctcggactgtatgacaccgcgggacagattccaaaggttttcctaaaaatataaccaacaacaggg

SEQ ID NO: 584966 - DNA, 75 bp, Homo sapiens
ccgtggttttgcaggaaatgtgaatctcaggagagagcagccagagtggtatacactgaatatcctcgaagaaat

SEQ ID NO: 584967 - DNA, 82 bp, Homo sapiens
tttgctagggcaagcctgtctgattttttatcaagcagaaatgcatcgaacaacgagaatcaagatcactgagctaaatccc

SEQ ID NO: 584968 - DNA, 83 bp, Homo sapiens
caccaacatctacaagatcctcctgctgcaggcgtacaggtcactatcatatgacaaaggctttgccgcagttcatcttcctc

SEQ ID NO: 584969 - DNA, 100 bp, Homo sapiens
tcatcaggcttgttcaagacacaccggaggcgacggccatggccacagaagaagaagaggacagtgctccagtgaaagtggaagaacaaaggaagatgag

SEQ ID NO: 584970 - DNA, 82 bp, Homo sapiens
ccagcaatcacagaagccgacaaggcgttcaagcgaaaacatgaccgctgagcccatgaggagcatattaatgaaaagtgcc

SEQ ID NO: 584971 - DNA, 51 bp, Homo sapiens
tatttgtgggagtctcaatactttgcagaaaaaacttcagcatgtgccagg

SEQ ID NO: 584972 - DNA, 75 bp, Homo sapiens
ttggcccagagctggacaccctcctggactcgctggatggccaggccatgttatgggatctcaacgaaggcaaac

SEQ ID NO: 584973 - DNA, 100 bp, Homo sapiens
cggggctgggcgcgctcccgcggagccggagccgcagaggctcccgggctggactcaggcttctcaggtgaaatgacaatggatgctctgttggctcgat

SEQ ID NO: 584974 - DNA, 100 bp, Homo sapiens
gctgcttctacccccggagctcagctgatcttcccttccagactacgagtgccggtggtggtgtgcacattgagccccggtatagacagttcccccagct

SEQ ID NO: 584975 - DNA, 95 bp, Homo sapiens
gtcaagctgtgcagcatcaaagaggcaggagatgaagttgcggagaataatgaacatgatgtcacttctactgaattagatccctttctgacaaa

SEQ ID NO: 584976 - DNA, 100 bp, Homo sapiens
ccgcgtggccccttaccgcatcctgcaccagacccaggactcccaggtctactggacagtggcgtgtgggaaatgtttcaacgtgcgcaagcgttgcggc

SEQ ID NO: 584977 - DNA, 98 bp, Homo sapiens
gaggatgacttctctaatcagttacggactgatcctttgaaatactccagccatgactaaaagagaagcagaggagctgatagaaattgagattgatg

SEQ ID NO: 584978 - DNA, 135 bp, Homo sapiens
ggagttcaaacgccgagtcttctttctgactcaatgttgcattcagccataaattctcaaaaaggtactcaagacaattgacgagggagatgccgatgaggtgacgaagcagaggattcatgatggaaaagagaa

SEQ ID NO: 584979 - DNA, 82 bp, Homo sapiens
caaggagctgggctgcatcaactcggatgatcggctgaatgtaacagaggaactaacgtccaacgacaagacgaggattctc

SEQ ID NO: 584980 - DNA, 71 bp, Homo sapiens
acggctgcccttcaagtaccaatagacgatcagctgaacactctcttgaaggagttccagctaacagagga

SEQ ID NO: 584981 - DNA, 75 bp, Homo sapiens
caaggctctgggggccatgtggaaactacataagcgtcgtctcggagatgcagccaagaaagccatcagtaaatt

SEQ ID NO: 584982 - DNA, 82 bp, Homo sapiens
gtgaagagttgtcccagctcggcccgcgggggagccccgggagccgcacgacctgcctagagctggaacgttacctccagag

SEQ ID NO: 584983 - DNA, 121 bp, Homo sapiens
ttgtccaacagaacgacctagtatttgaatttgctagtaacgtcatggaggatgaacgacagatggattaattgcctctgaaggagccataagtcccgatttcttcaatgattaccacctt

SEQ ID NO: 584984 - DNA, 74 bp, Homo sapiens
agaaaatcctcactctgagtacggtctcacagacaacgttgagattctggatgaaattgaagaacataacatca

SEQ ID NO: 584985 - DNA, 100 bp, Homo sapiens
tcgctctgggtccctcagaatatgactctctgcctgaaaatagcgagacagatggccaccatgtctgggagatggaagcgaaaactgaccgggacctgtg

SEQ ID NO: 584986 - DNA, 100 bp, Homo sapiens
tcgaggcgccgccgccgccgccgcagccgccggagccgcaatgcctaaaggaggaagatcagccaataattattaaaaggaaaagaggaagacctcgcaa

SEQ ID NO: 584987 - DNA, 72 bp, Homo sapiens
gggagcgagctgggagggagccgcgcgcctttgtgcgcgcgccgaggttcgccatcggtggtgtgaactcat

SEQ ID NO: 584988 - DNA, 82 bp, Homo sapiens
caggtccgacccgcgaacccctctgggatccccgccgctctgtctacaacccgagacccgggaagccctaatcaagatcctg

SEQ ID NO: 584989 - DNA, 101 bp, Homo sapiens
gagctcgatccgctgctcgcacgggagccagctgggtggtgggaccagggagattggatctgctctcaccaggatgtgcatgaggcacagaagcattgaag

SEQ ID NO: 584990 - DNA, 74 bp, Homo sapiens
ctgctgaccctggccttcaaccccgagccgctggtgctacaggatgtcacatgtacttcagtttgaggataaaa

SEQ ID NO: 584991 - DNA, 97 bp, Homo sapiens
tgggaaccggaggagaacatcctggaccccaggctgctgatcgccttccagaacagacaatgcagatcttcgtgaagactctgactggtaagaccat

SEQ ID NO: 584992 - DNA, 52 bp, Homo sapiens
catcacaagttgctgaacttaaggacatggatttgattgacatactttggag

SEQ ID NO: 584993 - DNA, 75 bp, Homo sapiens
cagagcttttggaatctgaacaagggtgccggtggtggtgtgcacattgagccccggtatagacagttcccccag

SEQ ID NO: 584994 - DNA, 82 bp, Homo sapiens
agcgcttcatgtgcaaccttgactgccaggaagagccagattcctgcatcaggttaggattaattgagtggcttgaaaatac

SEQ ID NO: 584995 - DNA, 78 bp, Homo sapiens
aaaggcccgaaaacaccttagtttgcaccgagagaccatttgcagcgggtttggtgcacctcgatttggaggaagtag

SEQ ID NO: 584996 - DNA, 71 bp, Homo sapiens
gtctctgccctcctggcgggcccggcggctctcactatccagatgtgaagttcatttccaatccgccctcc

SEQ ID NO: 584997 - DNA, 83 bp, Homo sapiens
aggaagaaggaagcggagcaggtgctgcagaagtttgttcaaaacaagtggctgattgagcaaattgtggctactaatttgcc

SEQ ID NO: 584998 - DNA, 75 bp, Homo sapiens
cgacctgctaacagaactggaccttttcgattgttgatccatttcagatacttgtggcagcaaacaaagcagttc

SEQ ID NO: 584999 - DNA, 97 bp, Homo sapiens
gctcttgcattagaatctcggggaatgggagagtttgtgaagtgtggatatgcaggctctaactttccagaacacatcttcccagctttggttggaa

SEQ ID NO: 585000 - DNA, 90 bp, Homo sapiens
tgtgtctttctgtgttacaggtgcagcttcaagcttaggaccacccaccatgcctatccagttggactaaatgctcttccttcagaggat

SEQ ID NO: 585001 - DNA, 100 bp, Homo sapiens
cggcacagcgccgcgtccgccgccgcggtggcagtcagcagccggcagcagcagcggctcaaattgaaattattccatgcaagatctgtggagacaaatc

SEQ ID NO: 585002 - DNA, 75 bp, Homo sapiens
tgctcgcgctactctctctttctggcctggaggctatccagcacgcctgtggcctctcagacccggcccacgttg

SEQ ID NO: 585003 - DNA, 75 bp, Homo sapiens
cagtggaggcattttggggcagaatacagagatatggaatcaggccctcgggaccaaggatcacgtcatgactcc

SEQ ID NO: 585004 - DNA, 99 bp, Homo sapiens
gccggctgggtgggcgagcaatgccagcactgcgggggccgcttcaggttctgtggacaatcacaatgggaatccaaggagggtctgtcctgttcgggc

SEQ ID NO: 585005 - DNA, 88 bp, Homo sapiens
cctccttggtcgccgcgtccttggctggcgtgaattcgaatttagagtttaatttctcagagcattctctccaggaagaatttttaca

SEQ ID NO: 585006 - DNA, 100 bp, Homo sapiens
tcagccggtcgagctgcgcgggagccttgataaatttgctgaagttccttatgtcaaatgagactgtacttttggccaaacacaacatttttacattagc

SEQ ID NO: 585007 - DNA, 75 bp, Homo sapiens
ctcctgcacaagtttgactttaaagaaggacatgtcacataccacagaaggtccagaggtgtccttctaaagctg

SEQ ID NO: 585008 - DNA, 50 bp, Homo sapiens
tggcaagggcttattgttcctgcgcatattaaatttcctattgactaccc

SEQ ID NO: 585009 - DNA, 101 bp, Homo sapiens
aggatggatttctacgccgaccccggcgtctccttctatgtgctgtgtccggacaacggctgcggcgacaattttaacaagttgaaatcatcgcagaagga

SEQ ID NO: 585010 - DNA, 75 bp, Homo sapiens
gtccttcgcccccaagactgcgactctaaacggactcatgtactttgtcaggatctcgaggacctggaagaagca

SEQ ID NO: 585011 - DNA, 88 bp, Homo sapiens
cactgagtgaagccatggagaagtcagcccatcaaagaaagagcctggcccctgaacctgtgcagctacatctggtaccttggctggc

SEQ ID NO: 585012 - DNA, 75 bp, Homo sapiens
cggccccgccttgcgggctggaggtcacaagaggaccagattaaaaatgctattgataaactttttgtgttgttt

SEQ ID NO: 585013 - DNA, 50 bp, Homo sapiens
ctctgaagatcctgccctgccctgggtgcccctgggcgctgggattgctc

SEQ ID NO: 585014 - DNA, 100 bp, Homo sapiens
caaagccgctccacctcccatgtcggcacagggaaatgcaataccttatttccagatgactcctatcagcacttctctctgctggaatgatctctcctgg

SEQ ID NO: 585015 - DNA, 79 bp, Homo sapiens
atccagcaaaaccgctgctaaattgtcaactagtgctaaaagggcaaacttgaagataaatcttttgactccagctctt

SEQ ID NO: 585016 - DNA, 82 bp, Homo sapiens
cagccaaagaaacaagccgtggaataggtgtatcaagtaatggtgcaaagcctgaaacctcccagtgccaagtgtataagcg

SEQ ID NO: 585017 - DNA, 100 bp, Homo sapiens
cctgactggggatccagagtaggagggagcctttggtggggttgggcccatgagatgtgtgctctgtatattccggaggtacaatttgccagtgtttcca

SEQ ID NO: 585018 - DNA, 75 bp, Homo sapiens
gcagctgcgatctctgtggtaggcccaggttatgatgtgattgctcaagcccaatctgggactgggaaaacggcc

SEQ ID NO: 585019 - DNA, 89 bp, Homo sapiens
cccctcgcgtccggagtccccgtggccagattgggatgcttggaaggtgtgtctacgacttcgagataatggacttctggccaagccaa

SEQ ID NO: 585020 - DNA, 82 bp, Homo sapiens
agagaattaccttatcagtgcaggagaggattgtgtctgcttggtgtggagccatgaagtagagacggggtttcaccgtgtt

SEQ ID NO: 585021 - DNA, 83 bp, Homo sapiens
cctggctcttgccctcatcctggttctggaatcctcagttcaaggcaatactgaacactgcgcagcttgcagaggtctcctgg

SEQ ID NO: 585022 - DNA, 74 bp, Homo sapiens
acccgagacgtgaaaaaaacaggcgtattctggtaatttcgaggaggtgaccaccattgacctctcagcctccc

SEQ ID NO: 585023 - DNA, 82 bp, Homo sapiens
cttggactgagtcctgcaggacacagcaaaggaaacaagtttctgactctggtgatataaaaatcaaatcttggaggggaaa

SEQ ID NO: 585024 - DNA, 100 bp, Homo sapiens
agaggatccagtgttcaccatcctggccccggaagggccatgaagcccccaggaggagaatcgagcaatctttttggaagtccagaagaagctactcctt

SEQ ID NO: 585025 - DNA, 90 bp, Homo sapiens
caagtttgagaatccagatctctttgccaaattggcattgaattttgctactcagataaaagttggagtcattcgttgcccagtttgcag

SEQ ID NO: 585026 - DNA, 76 bp, Homo sapiens
gaaacctggaggcttttcttagagtttgagtttcttgcagaacataaattattaggaaacattaaaaatgtggcca

SEQ ID NO: 585027 - DNA, 96 bp, Homo sapiens
ggccctgctggaggcctcgctgaggaacgacgccgaggaaggtttccactgtatccaaaaggaggggagaagttgcagtttgattatggtgtctat

SEQ ID NO: 585028 - DNA, 90 bp, Homo sapiens
tactacctttatttccaccatagtaacaaatgtggcaattattttggatctatcacctgtcatcataactggcttctgcttgtcatccac

SEQ ID NO: 585029 - DNA, 83 bp, Homo sapiens
cagcacttaagcaaacgggaattctcgcctgtgagtacccaggaagctgcaccgtgtggcctggagctgtctatctgtccttc

SEQ ID NO: 585030 - DNA, 100 bp, Homo sapiens
agaaggagctggcggacatcactttagaccctccacctaattgcaggcagacctgttatcctaaactaggtgagtcagcttttggtacatgtgatgattt

SEQ ID NO: 585031 - DNA, 100 bp, Homo sapiens
aggaactagaggagagactgactaaagaccgaaatgatatttggagtggtatgagaagtccgaagaaactcacgcctcccagatagaactacttgagaca

SEQ ID NO: 585032 - DNA, 75 bp, Homo sapiens
cttggaattacatagctggaaaggatcttacaggacctcagcagccatgtcgaagccccatagtgaagccgggac

SEQ ID NO: 585033 - DNA, 90 bp, Homo sapiens
gacgcggcctcggaccagccatttcggtgtagaagtggcagcacggcaggcagacaccacccatcctttaaccaagcacagaaaaatagc

SEQ ID NO: 585034 - DNA, 90 bp, Homo sapiens
gcttcagtttgtgacaggatcctctcgagtgcctctgcagggcttcaaagcattgcaaggccatcacagagccatgaaccagcagcacat

SEQ ID NO: 585035 - DNA, 82 bp, Homo sapiens
gcctcccgggctccgggaaaactacactggccagggctgcccctgatggggcctggcaatgactgagcaggcccagccccag

SEQ ID NO: 585036 - DNA, 100 bp, Homo sapiens
tttgtaccagcagttggatggagaggaccaaaccaagcatgaatttttgacagatggctatcaagacttggaattgaatgatctggcacgggaccctcca

SEQ ID NO: 585037 - DNA, 100 bp, Homo sapiens
atgcaccagcacagaagtggaattgaatctgctctaaaggagaccaaggtaataatagacgtggatggaatacaactagccagagatattccaatgtcat

SEQ ID NO: 585038 - DNA, 96 bp, Homo sapiens
tgtattgaaaatttcaaagtaaaggatattattagaattctgccatgcaagagaactagtggctctgaagaaggtgagactagacaatgagaaaga

SEQ ID NO: 585039 - DNA, 50 bp, Homo sapiens
aagacgttccttgaggaggtttgaaaaaggggcttgtacatgacagctgg

SEQ ID NO: 585040 - DNA, 100 bp, Homo sapiens
aagtttaagagaagaaatggacatgattgcctaaatcagccaaacacaggcagcagccgctcttctaaaacattcaaaccaaagaagaatatccctgaag

SEQ ID NO: 585041 - DNA, 98 bp, Homo sapiens
ggcggctgctgtaggacggttgctccgagcgtcgaaatggtggagtcaatgaagaaagtagcagggatggatgtggagctgacagttgaagaaagaaa

SEQ ID NO: 585042 - DNA, 82 bp, Homo sapiens
actcatcctgcacgccggcgagtgccagcgtgtactaatggtcacttgatgtgcgctggctgttttatccacctactagcag

SEQ ID NO: 585043 - DNA, 100 bp, Homo sapiens
agaacgagtccctcttcactttcctcggcaagaaatgtgtggtgatgcaggttctgaatgctgatgccattgttgtgaagctgaactcaggcgattacaa

SEQ ID NO: 585044 - DNA, 100 bp, Homo sapiens
gctcatcgcatctgaggagcagttcaaggtgtggtgcaaagacttctgctggaactttctgtggctgtgacctggtgagctggctaattgaagtcggcct

SEQ ID NO: 585045 - DNA, 101 bp, Homo sapiens
gcggggcacgatgttgaacatgtggaaggtgcgcgagctggtggacaaagcaacgcgtatcacaatgtgactgcagagcagctctttttgaaggacattat

SEQ ID NO: 585046 - DNA, 82 bp, Homo sapiens
gtcaggcggagagacccgccgccaggccatatatgtctcttggaagtcttcgggatcaagtcatttaccctgattcagtgga

SEQ ID NO: 585047 - DNA, 100 bp, Homo sapiens
ggccacagcgtgctgccgctcgaggaggcggtggagggcttcaaggctgacttgacaggaattaagtggaaaaaatatgtatggcaaggcccaacttctg

SEQ ID NO: 585048 - DNA, 101 bp, Homo sapiens
atggtaggccatcaggagtgcatcatggaagaggacaatcgcgctccccaattgtggcgcaagtcactcaagactgcttgcaactgattgcagacagtgaa

SEQ ID NO: 585049 - DNA, 100 bp, Homo sapiens
tggatgcaataaaaggaacaatgacagaaatatacaacgatctttctaaaaacactactggaagcacaatagctgagccacaagtatatggttatgatga

SEQ ID NO: 585050 - DNA, 100 bp, Homo sapiens
cccggtcaaaggatgctgagtccggagcgcctagccctaccggactacgagtatctgggacctcagcagccatgtcgaagccccatagtgaagccgggac

SEQ ID NO: 585051 - DNA, 128 bp, Homo sapiens
aggacatggaaaataaaatcagaagtacgctgaacgagatctactttggaaaaacaaaggatatcgtcaatgggctgagtgaaaattgccaccaaggccaacccttgggatggaaaatcactaaagcc

SEQ ID NO: 585052 - DNA, 100 bp, Homo sapiens
gtcctatgacctctttgtcaattccttctcagaactgctccaaaagactcctgtcatccagcttgtgctcttcatgtgcttgaagtttctgggaagtcgg

SEQ ID NO: 585053 - DNA, 82 bp, Homo sapiens
ccggaggtttgcaggggtgcagtgtgtctggtcttatgaggtgacttaagagattaaaattaatttggttgctgttggttct

SEQ ID NO: 585054 - DNA, 90 bp, Homo sapiens
gtgacagaagcggtgccagctaactccccaccatcaaaagtatcttctgctgtagcctggcacaagtggtcctttggcgtgctcctctgg

SEQ ID NO: 585055 - DNA, 74 bp, Homo sapiens
aaactgtacaaactgtcagatacaagatcagttcttaagagcagccccggtaactggaggaatgggagccgttt

SEQ ID NO: 585056 - DNA, 75 bp, Homo sapiens
actttacattagcagatatactattgtactatggacttcatcgctttataacgctgaccggaaaggagattgaga

SEQ ID NO: 585057 - DNA, 100 bp, Homo sapiens
agagggattcgtggtgaaggtccggggcttgccctggtcttgctcggccgatgaagtgcagaggtttttttctgtgtcaacagcatctccaccctggagc

SEQ ID NO: 585058 - DNA, 98 bp, Homo sapiens
ccagaacttgcagcaacaatagatggagttttgctgtgttgcccaggctggagtgcagtggcacaatctcagctcagtgcaacctccacctcctgagt

SEQ ID NO: 585059 - DNA, 90 bp, Homo sapiens
caagctccgagggcagccattctatgctgtggaaaagaaagcatactgcgagccctgctacattaggcattcgacttacagcagtgtgcg

SEQ ID NO: 585060 - DNA, 92 bp, Homo sapiens
ccacactcctggaactgtacacctattggaacccttaaggcaagtagcgggtctgagagtgggagcccaaaaagaagaggccagaggcagct

SEQ ID NO: 585061 - DNA, 100 bp, Homo sapiens
tgactgggaatccatttggtacatcagcttgcctcaagtctggaaagaaattggcttgggctcatcaaggtctcggtgattcagaatacacctacttttg

SEQ ID NO: 585062 - DNA, 74 bp, Homo sapiens
atggtctccagcaattcagcactacagtttgtcaactacccaactcagcaaaccagtccagctacgggggccca

SEQ ID NO: 585063 - DNA, 90 bp, Homo sapiens
tgcactgctctggtctagtacaaacaggctgctggcattgaggccggctgttcggacggaagcatcaggctgcaccagctgagctccgcg

SEQ ID NO: 585064 - DNA, 74 bp, Homo sapiens
aactgctttctaaaacaccagaactcaacctgttatcaggaactgttgccgttattacatcagatgggagaatg

SEQ ID NO: 585065 - DNA, 80 bp, Homo sapiens
ggaagcaggactgcgccgcgtcttcctcaagaatcattgatcagcgattcgagaaggtttcctactttgtatttggtgat

SEQ ID NO: 585066 - DNA, 50 bp, Homo sapiens
ctacaggtgaaaagcccagcgacccatacgaattggagcaatgttggctt

SEQ ID NO: 585067 - DNA, 110 bp, Homo sapiens
tgagatctatgatcccacatctggaatctggaatgaaatcttccaagtccaaggatgtattcatgatgttgctatcaaaagttgagaaattgtcagaagaaatcatggag

SEQ ID NO: 585068 - DNA, 83 bp, Homo sapiens
agccaaacaaataagccatctcttcagttaattttggatccgtctaacacagaagtgagcttgtagtggacaaaacaaagagg

SEQ ID NO: 585069 - DNA, 90 bp, Homo sapiens
gcgcagcccagcgcagccatactcggtgaaatacctggagtgctcagctctcacccagagaggcctgaaaaccgtgttcgacgaggccat

SEQ ID NO: 585070 - DNA, 100 bp, Homo sapiens
cggcctggggctggagtccgattgccgattcagcccagcaggaaatagctcgtctgctggccctggaggaggctaccctgagtaccgatctgcagcaggg

SEQ ID NO: 585071 - DNA, 83 bp, Homo sapiens
atgtggcagtggaaaatgcgctcgggctggaccagcagctgagatgccgcggcagtttcccaagctgaacatctctgaagtgg

SEQ ID NO: 585072 - DNA, 100 bp, Homo sapiens
aacagatgaaccgcctctggaggaacacgtgcagtcaacaattttatccaagtatgaagatcagattactattttcactgactacctagaagaatatcca

SEQ ID NO: 585073 - DNA, 75 bp, Homo sapiens
cggggaggcagcgcgggatcccagcctcaggcgtgcgcggacggtgtgcggcgtgcaaacgcaaagagcaagaac

SEQ ID NO: 585074 - DNA, 100 bp, Homo sapiens
ctttcttatactctagaatatacaaagacaaaaggagattctgatgaagaagttattcaagatgatacctgtttccgaagtttacactgtgctggactga

SEQ ID NO: 585075 - DNA, 50 bp, Homo sapiens
ccccaggatcagggaggactggtagatgatgagctggagatcaaggccta

SEQ ID NO: 585076 - DNA, 76 bp, Homo sapiens
tcgcgttttgccagcgataatacgcctcaggtgcatggctgcctcctaatcccatagtccagaggaggcatcccta

SEQ ID NO: 585077 - DNA, 80 bp, Homo sapiens
ggaagcacagacggcggaggaggcgcagccggacatttagccgctcatcttcgggcggcgactggcggcgcgatggacct

SEQ ID NO: 585078 - DNA, 100 bp, Homo sapiens
catgatattgagctttacatgcacttgaacagactagaaattgcaccacagatatatgggttttcaaatctgaacatcaatgatgtactagggaactact

SEQ ID NO: 585079 - DNA, 83 bp, Homo sapiens
tcagccggacctgcttccgccagtggagacaacagatgcagaggttgtggtaggaaccacaaggccagagacgctgcctggag

SEQ ID NO: 585080 - DNA, 100 bp, Homo sapiens
accccaccatcccaccaaagggggctgctgaccgagagagctcactcagccagtgagttggactatggatcaggtactgtgctcagcatcagaaaatggg

SEQ ID NO: 585081 - DNA, 95 bp, Homo sapiens
gcgggattttcccgggcggcgagagcgccgctgccatggcccagacactgcagatggagatcccgaacttcggcaacagcatcctggagtgcctc

SEQ ID NO: 585082 - DNA, 98 bp, Homo sapiens
cctgtgcacagcttgccactggcgctgcctgccgcctggtggaggctgtgctctcaggagagttccgccatggagtcatagttgcagctgactccagg

SEQ ID NO: 585083 - DNA, 82 bp, Homo sapiens
acagggtattccatggagaatgaggttggatggcaagcatgtggtgtttggcaaagtgaaagaaggcatgaatattgtggag

SEQ ID NO: 585084 - DNA, 51 bp, Homo sapiens
ccagtcgctacgggagcagccagaggaaatgggtaaagtatgacagagtca

SEQ ID NO: 585085 - DNA, 83 bp, Homo sapiens
cttcctcttcgcttgcagatacccccgagatcgccggagcggttgcagggcacacattactcggtgcagtcggacatctggag

SEQ ID NO: 585086 - DNA, 97 bp, Homo sapiens
tgaatggaagaaaaggacttttaaccaccattttgtgacttacagaaaggctttatatccactaattacctgccttttatgtgtcagtcagaaacaa

SEQ ID NO: 585087 - DNA, 85 bp, Homo sapiens
tggtcaagttgctgaccttgaaggcatggtgctgatgtgaaatgtgtagactggcatccaaccaaagggttagttgtttcaggaa

SEQ ID NO: 585088 - DNA, 100 bp, Homo sapiens
gagactctccttgcttggaattctgcccactctgcggagttagcagtcacgacctccagcacagaacccagtgacttgattgtaaaaatttacagagcgg

SEQ ID NO: 585089 - DNA, 75 bp, Homo sapiens
aagagcctagtttagcagacataaaagcccggattcaggattcagatgaaccagcccttcttcgattcaaccaag

SEQ ID NO: 585090 - DNA, 100 bp, Homo sapiens
taatgtggctgctgcctcgtgtcacatctgaaactcatctgtacctcacttagaaagaacattcctgatgtagatgaagaaggctacagtattaaaccag

SEQ ID NO: 585091 - DNA, 99 bp, Homo sapiens
cgaggagcctcgcgcggcgctggagagagacaagatgtccgccagagctgcggccgccaaggaatgggatgtttctggggagctgaaaggaaattctgg

SEQ ID NO: 585092 - DNA, 100 bp, Homo sapiens
tgcgggacaggaagtggccgtagcggcttgttggataagtgtaaacaggaacatcgataagtagtgtaaaaacttgcacaatgaaatccgaagccaagga

SEQ ID NO: 585093 - DNA, 83 bp, Homo sapiens
aagaagttatgcttgttggaattggtgacaaaatcagaggcatactttataggtattttgattccgttcaagctaaagaacag

SEQ ID NO: 585094 - DNA, 56 bp, Homo sapiens
taaaggaagctgtttcctatattgaaagtttgtgtttcaggagctggctgccagcg

SEQ ID NO: 585095 - DNA, 100 bp, Homo sapiens
cctggaggaagccggaggcctgcgtggaggaggcgccccgcgcagctggctggcggagcatgagcgccccaggttcttcacacacccccattcggcgtag

SEQ ID NO: 585096 - DNA, 90 bp, Homo sapiens
actgatccgcggcctggggcaggaatgcgtcctgagcagcagccccgcggtgctggtgcttagatgagtacgaagatgatgaagcagggc

SEQ ID NO: 585097 - DNA, 75 bp, Homo sapiens
gattccagttcctgtatgatgttcagatgggcaccagttgcgtcttgaagtgccatcagctgtaaccaaagttcc

SEQ ID NO: 585098 - DNA, 84 bp, Homo sapiens
cctagctttctccttctggtgtggggcccgaggtgggaaaggtttttattcctggactgccagctccctctctgacgatgtcca

SEQ ID NO: 585099 - DNA, 100 bp, Homo sapiens
aagatggaaggaaggagcgcagcggaattacatgaacgacagccttcgcaccgacgtcttcgtgcggttccagccagagagcatcgcctgtgcctgcatt

SEQ ID NO: 585100 - DNA, 83 bp, Homo sapiens
gatgcagtacgccacggggccgctgctcaagttccagatttggtatcatgatattagctggtttgacatcaagtcatttgtga

SEQ ID NO: 585101 - DNA, 98 bp, Homo sapiens
gaatcagcttctctcattttctttccctgcaccaactagcaggtgaaagaaaagatgttgtcccggttaagagtagtttccaccacttgtactttggc

SEQ ID NO: 585102 - DNA, 75 bp, Homo sapiens
caattccatttggggaccagagatggacggtcactcagcctatggaggtggtttgaagtgtcctgtttgcagctt

SEQ ID NO: 585103 - DNA, 51 bp, Homo sapiens
ccggcacgcgactccccccgggcccaaagttgggcccatgagatgtgtgct

SEQ ID NO: 585104 - DNA, 75 bp, Homo sapiens
tggatgtccttgagttcaaccaggtttttgccaatccagaagactgtgtagcatttggcaaaggagaaaatgcca

SEQ ID NO: 585105 - DNA, 51 bp, Homo sapiens
cagtcatgagtcgcttcaagtttatcggagttaaagttcctcgtaattttc

SEQ ID NO: 585106 - DNA, 80 bp, Homo sapiens
ggaccacaagatcctcatcgacagggacacttgacattcagggacgtggccatagaattctctcaggaggagtggaaatg

SEQ ID NO: 585107 - DNA, 83 bp, Homo sapiens
ccgggcgcggcggcggcggcggtggaggagccggagcataatggaactgtggctgcaccatctgtcttcatcttcccgccatc

SEQ ID NO: 585108 - DNA, 50 bp, Homo sapiens
gtttggagcgatcacatcattttcccaagtgctgcttttgacacaaaaac

SEQ ID NO: 585109 - DNA, 100 bp, Homo sapiens
ccgggctcttcgtggctcaggcggggggagcggaccctgacaagttccagcatcgccctgagcaactggtggtttgtggcccacctgacagacctgctgg

SEQ ID NO: 585110 - DNA, 75 bp, Homo sapiens
atcaagatgaatatgaccctatggaagcagaagaagctgaggatgaagaagatgacgaagttatacggaagcgtc

SEQ ID NO: 585111 - DNA, 98 bp, Homo sapiens
ggcgccatgtccagcgctcggacccccctacccacgctgaacgagagggacacggagcaggttgcagagcctgaggcctgtgatcagatgtacgagag

SEQ ID NO: 585112 - DNA, 74 bp, Homo sapiens
gaatatcaagattcatctttttcactaattgtggcattcacaagctctgaggaacatgaatacagtgatgaagc

SEQ ID NO: 585113 - DNA, 88 bp, Homo sapiens
ggcatcagctagttgtgatggatctgtcagagtgtggcaaatttcagatcagggtcagcctggcagcaggcatggaaaccgaggaagg

SEQ ID NO: 585114 - DNA, 80 bp, Homo sapiens
cgacaagccgctggcagccgcggatctcaccgccgctcaggatccagacatttaatgtggatgcaccatgccagaccgtg

SEQ ID NO: 585115 - DNA, 90 bp, Homo sapiens
aaatcattgtattgttgcaagaattatgcatgggggcatgattcacaggcaagtttgctggcctagacctgaactcttcagataatcaga

SEQ ID NO: 585116 - DNA, 96 bp, Homo sapiens
agacatttgctacagcatcccacattaagtcaacgtgtatgggtttcgacagaccatgatgaaattgagaatgtggccaaacaatttggtgcacaa

SEQ ID NO: 585117 - DNA, 100 bp, Homo sapiens
ttatctgcacctggacgtaatggacgggtaagaacaagagagttggaaagcagttagcctcacagaagatccttcagctgctgcacccacatgtcaagaa

SEQ ID NO: 585118 - DNA, 97 bp, Homo sapiens
ctggagtgtgcggcccgataagcgctttcgcttggcgctgggcagcttcgtggaggagtacaacaacaagctacattaacaagctattctgaaaatg

SEQ ID NO: 585119 - DNA, 98 bp, Homo sapiens
ggggattctcgacctgctaacagaactggaccttttcgtatgactatgaatatgatgaaaatggtgacagagtcgttttaggaaaaggcacttatggg

SEQ ID NO: 585120 - DNA, 100 bp, Homo sapiens
ctgcaggcctttttccctggactgcagtcaggtcaattcagtgaagatatgatacccacagtgggcttcaacatgaggaaggtaactaaaggtaacgtca

SEQ ID NO: 585121 - DNA, 100 bp, Homo sapiens
gtggaccacagcattcctgaaatacatccaggaaagacatggagattctcttaaaaaggtacagctggataacttgccaggaatgagtctcgtggctggg

SEQ ID NO: 585122 - DNA, 130 bp, Homo sapiens
taacaaacaacttaaaacccagtcttcatccacagatgaacttgctagccttggagaatacagagatacccccgaaagccatttaagaagttcctggaataatattagtcagagtaatataggatctgca

SEQ ID NO: 585123 - DNA, 75 bp, Homo sapiens
caagcacctcgggatcccattccttcacagggaccctagccaggaaagaagattctatatgatatacttgccttt

SEQ ID NO: 585124 - DNA, 90 bp, Homo sapiens
ctgcctcagcctcccgattagctgggactacagtaataaaagactagtggccttagtgcccatgcccagtgaccctccattcaatacccg

SEQ ID NO: 585125 - DNA, 75 bp, Homo sapiens
aggaaaagagccctggaatatgaagcaacatgagatggtggatgaacccacaggaggaatgccagctcctgagca

SEQ ID NO: 585126 - DNA, 96 bp, Homo sapiens
ctcggcaagcgcgcagtgtcgactccccggtctatgccaggcgcatctcagtgccggtggtggtgtgcacattgagccccggtatagacagttccc

SEQ ID NO: 585127 - DNA, 98 bp, Homo sapiens
agctggacaggcagagtgctgatgtgaaaaataccacgacaaaaccaccctaatgactatgctcagctgtgtaacatccccgtgacgggacgccggca

SEQ ID NO: 585128 - DNA, 74 bp, Homo sapiens
gcgataccagaaattgcagaagatcatgaagccttgggtacacagggacaagagaagatgatgatgatgggacc

SEQ ID NO: 585129 - DNA, 51 bp, Homo sapiens
cggacaagcacagtcttcggaagtttaattggttggggtcagataagaaga

SEQ ID NO: 585130 - DNA, 51 bp, Homo sapiens
caggacacacagacccagctggaactcgcacgttcacgtccatgttcttcc

SEQ ID NO: 585131 - DNA, 82 bp, Homo sapiens
agattcgatggacatggacatgagccccctgaggccccagaactatcttttcggagacagatcagttggaggaagaaaaagc

SEQ ID NO: 585132 - DNA, 90 bp, Homo sapiens
aaacctggagtctcacgggtgaaaagagacatttccatatcaccagaccacaaacgtggtgctacagctagaatgaagcacatcaaccta

SEQ ID NO: 585133 - DNA, 75 bp, Homo sapiens
ttgaccgctttctccagtggaagtggttggaaaggcagtatttggcagtcgtattcagagataaacccctggagc

SEQ ID NO: 585134 - DNA, 90 bp, Homo sapiens
ccccgcccccaccgccagctccaccatcaacatcaacacctccacctccaagttctcttggtgtaaaaattgccaaagcagttgcctgcc

SEQ ID NO: 585135 - DNA, 107 bp, Homo sapiens
cctaccaagaagtctcagatcttttctacagcttctgataatcaaccaactgttacaatcaaggtctatgaagtgtctgcactgcttggggaggaagatgaagaggc

SEQ ID NO: 585136 - DNA, 90 bp, Homo sapiens
cacaattggaacatattttgctccgcccagacacctacattggttctgtggaattagtgacccaggaaagaaagaaatctcgttttggga

SEQ ID NO: 585137 - DNA, 76 bp, Homo sapiens
aaagaaaactcctccttgtacctagaacatccatgatagcagtcttctgtaaatcgaacttttcaagaattctctg

SEQ ID NO: 585138 - DNA, 87 bp, Homo sapiens
gagatggcggcgcgatggagcagcgaaaacgtggttgtagagttccgtgactcccagggcaaatttattcggatcaactttgatgta

SEQ ID NO: 585139 - DNA, 100 bp, Homo sapiens
actcacctcttgggatgaagatgcctgggccagcaagacctaccgggacctgaaggatcgtcaacagttgctagcatacaggagtaaggtagataaagga

SEQ ID NO: 585140 - DNA, 100 bp, Homo sapiens
caaaactgaaatggaacaggggcagaaaatagcacacttttactctacgcaactgttgctttttcatggcatctaataggattcaggaatcaaagaatca

SEQ ID NO: 585141 - DNA, 85 bp, Homo sapiens
aagctgtatcttatctatggaagataaagcatggagttggctaatggatgctggagtggacctaccctatgagacgagagatgca

SEQ ID NO: 585142 - DNA, 75 bp, Homo sapiens
ggtggctctacccagaattcaattaaagtggctcaggcagcggaggaggaaatggcaggtcctaatcaactctgc

SEQ ID NO: 585143 - DNA, 96 bp, Homo sapiens
caaactctcacgctcacaccgggtcatctgattttctggagaccagaaggccaaaatcaaaagtatgggcaggcttgatttctttagaagactcca

SEQ ID NO: 585144 - DNA, 100 bp, Homo sapiens
gggcctgattgaggactgccagctggcgctgcaggaactgaagctctcttcccacgaggaggccttgtcctttgtgtccctggtagatggctacttccgg

SEQ ID NO: 585145 - DNA, 100 bp, Homo sapiens
aatgacaggggagaaagtcaaggaaccagcacctatgacagaagatctgctagaagagcagtctgaagttttagctaaattaggtacatcggcagagggg

SEQ ID NO: 585146 - DNA, 98 bp, Homo sapiens
aaagtagtggtccataaagagacagagatcacaccagaagatggagaggattgaccagaggtctggcgtgctcctgatcagagttactctgatctgaa

SEQ ID NO: 585147 - DNA, 100 bp, Homo sapiens
tcgtccaagaaaagttcctgtgatacaagaggagagggcaatgcctgcccagcttcctgcctgacacagctcacttcaagaagtgcacaatgtcagaacg

SEQ ID NO: 585148 - DNA, 98 bp, Homo sapiens
gtgacgctatcaactgcagagattggttcccactgaaggatggtccccggctgcaggcctggctgcagcacatgggctgtgagcactgggtgcccagc

SEQ ID NO: 585149 - DNA, 100 bp, Homo sapiens
tttgatgacctttcagattctttctctggaactgaaccagaggttcacaaaacaagtgtagtagataagtatgctgtgcgcttcatccctcgggagaatg

SEQ ID NO: 585150 - DNA, 98 bp, Homo sapiens
cgcatcccagggcctgctgaagctcttccagaaaaactcgcccatggaggaccttggagccaaggggggactgccagggcccaaaggggaacgaggag

SEQ ID NO: 585151 - DNA, 90 bp, Homo sapiens
tcgcgggcgagcggagcgcaacactcgcttggttggggagatcggcgcttggccggtgcgggccagtgctattgcccaggacgcggacca

SEQ ID NO: 585152 - DNA, 97 bp, Homo sapiens
tcatgggcgagggaacagatgagaaacccggcaatgaaaccaccatgttcagccagcagcagcagcagcagctccagcaacagcagcagcagctcca

SEQ ID NO: 585153 - DNA, 75 bp, Homo sapiens
tgccagacattactacttcctaggcagaatgcttggaaagatgtgttccagctgccaagaagccggggccaccat

SEQ ID NO: 585154 - DNA, 96 bp, Homo sapiens
cgcctgggaccttgcggtgaggctgcgcggggccgaggccgcctccgagcgccagacctgcaggctgggacaatgaaaagaaaatagctattttac

SEQ ID NO: 585155 - DNA, 101 bp, Homo sapiens
aagcaaaattcagagagattgcagaagacaatgagttacaaggcactaatagttctggatccttgggtggtcttgatgttcgcagacgaattcctataaag

SEQ ID NO: 585156 - DNA, 75 bp, Homo sapiens
cggagagcacgccatgaaggcctcgggcacggtaagaatgattgatgttggctgatattggagtgctcattcaca

SEQ ID NO: 585157 - DNA, 74 bp, Homo sapiens
ctgcagcgggagctggacggcgagcgcgagcggcgcgagaaagtttttctatatgagtggagaagacagctgtt

SEQ ID NO: 585158 - DNA, 100 bp, Homo sapiens
ggccggcggagcgcgcagcgggggctgcaggaatcccgttctgcttccagaagtggaagtgctcacggatcggggaaatctgcaaggcatacccctgcaa

SEQ ID NO: 585159 - DNA, 50 bp, Homo sapiens
aacttccctccacacagatgagcggtggacacagcattgttggttttgcc

SEQ ID NO: 585160 - DNA, 75 bp, Homo sapiens
tgtcctgttggtgtgtaaccgagcctgcactgggcaacaagggaaaagatgaccaaaatgttagacttgcttgag

SEQ ID NO: 585161 - DNA, 90 bp, Homo sapiens
cgccttcatcaaagccgtctctagcagtggcagtggactcggctccggaggtggcagttaagtcaggatctggtgattttgaagagaaac

SEQ ID NO: 585162 - DNA, 100 bp, Homo sapiens
taagcagcctccaaggcttagagaatcatgacctcctggaagtgatcaacctggaggataataaggcccagcttcgggcatttatcccagagatgctcaa

SEQ ID NO: 585163 - DNA, 66 bp, Homo sapiens
catgacactgcccattgctcgggatctggctcccataggccagagccaacgggctgaagtcttgtg

SEQ ID NO: 585164 - DNA, 101 bp, Homo sapiens
ggaatgcatttatgatgctaattcatgcagatcagatgaggacgctgaggcccagagagggaaagccacttgcctagggacacacagcggggagaggtgga

SEQ ID NO: 585165 - DNA, 90 bp, Homo sapiens
tcatcgggagaatgctcttcaggatagtatcttggccagggaactcaaacagcagatgcagagctggactggccattatggaggaggagc

SEQ ID NO: 585166 - DNA, 74 bp, Homo sapiens
ttcaatgtccgcatcgcaaccaccgccctggccatctaccatgtgaaacgcttcgttaagggactcaggcagta

SEQ ID NO: 585167 - DNA, 100 bp, Homo sapiens
ccggcgcgcccgttgggcactgggggacgcgggcgcgtcaggtgaagactgggggccgcaggcgcgctagtgtttgtggagaaggtgctgcagagacttt

SEQ ID NO: 585168 - DNA, 75 bp, Homo sapiens
cgggagcgggagcagcagatcgaggagcacaggcggtcaagaagcagatcgagacggcggtcacattctaagtct

SEQ ID NO: 585169 - DNA, 100 bp, Homo sapiens
gacgggggacctgagcagtttgtccagcagctccagatctcggttgaccaacatggtgacaacctgaagaacaccaagagtgaaattgcagagctcaaca

SEQ ID NO: 585170 - DNA, 83 bp, Homo sapiens
ctggaagaagcggaagaagatggcgctcaccaggtttttcacgactgaaaacaacatagcaaaataagccaagatgtctgtgg

SEQ ID NO: 585171 - DNA, 82 bp, Homo sapiens
caagaacaaggtgacacatattctgtctgtccacgatagtgccaggcctatgttggagtgtactaatggtcacttgatgtgc

SEQ ID NO: 585172 - DNA, 100 bp, Homo sapiens
ggaacatgtctgagtcggagctcggcaggaagtgggaccggtgtctggcggatgcggtcgtgaagatagaaggtagaagatagcaccatgccgattcgtc

SEQ ID NO: 585173 - DNA, 100 bp, Homo sapiens
aagctggcagaggaggtttctgggcgcacagaagtcactgtgaaacagccagagtaagccatatcaaagacttcattgaaaaataccaaggatctcaaag

SEQ ID NO: 585174 - DNA, 84 bp, Homo sapiens
cttcatgatattactgtaccgttagaagtttttgacacttttctgtagaaggtcagttggaattcagggcattgctatttattc

SEQ ID NO: 585175 - DNA, 82 bp, Homo sapiens
gccaaagaggagccggccgcgcgggccgggaggggacggccgccggagccgcgaggccaaggaaagcaggcaggatgggaga

SEQ ID NO: 585176 - DNA, 101 bp, Homo sapiens
cattggtgatcccgaggatttttgtcaagattggataaaccatgtatcacattgattgtagaggatgttgcttcagagtgtgaagtcaaatgcatgccaac

SEQ ID NO: 585177 - DNA, 100 bp, Homo sapiens
ctgaatataaaccactccaaggtcccccaaaggaccaagatgatgagacagacagggatggggctgactgcactggtgggccggctggggggctctttgg

SEQ ID NO: 585178 - DNA, 105 bp, Homo sapiens
aaagcaaaggagtcagggatggctcttcctcagatataaagatgaagcgcagctgtataaagaagagcacctgaggaatcggcagcaccctcactgctacgttca

SEQ ID NO: 585179 - DNA, 100 bp, Homo sapiens
gacgtcatagcagatgagcacgagtggttccctgaggtcacgcatttctgccgcgggatccccatggtgctcatcggctgcaagacagacctgaggaagg

SEQ ID NO: 585180 - DNA, 76 bp, Homo sapiens
agatgttgtcaaggtggcctaccaggaggccaggggtgtcgccatgccgtgcttcctcaaagactgggaaatgcac

SEQ ID NO: 585181 - DNA, 82 bp, Homo sapiens
ccaactggaattttcttgagccaggtcagtcttcactgtttccaatggaagatggattcttggatgatggccgtggggatca

SEQ ID NO: 585182 - DNA, 100 bp, Homo sapiens
gtcgactcgcttgcaggcaagttgtcaacttatgaaaatatgcatcagtttaatactgtcttggaattcatgagatggaagcataggtcaaagctgtttg

SEQ ID NO: 585183 - DNA, 100 bp, Homo sapiens
tcctgcgcatcgtctgcaagaccgcgaggcgagacctcttgcctcccagaagttcctgccgaatcgtcttcgtcacccccggggtccgaggtagcctccc

SEQ ID NO: 585184 - DNA, 96 bp, Homo sapiens
acatgtttgcagactctaatgaaaatgagactgtctttgctcctgtcatccaggctggcatggaagcactaaaggagcttgaaatcgtcattggag

SEQ ID NO: 585185 - DNA, 74 bp, Homo sapiens
ggagaaattccaagttcagattctccagacatggctccttactatgaagccttgtgcaaatccctcgactggca

SEQ ID NO: 585186 - DNA, 100 bp, Homo sapiens
agctggacaggcagagtgctgatgtgaaaaataccacgacaaaaccaccctaacccaacatgagtgaagtttcctgcaagaaacgggacgactatttgga

SEQ ID NO: 585187 - DNA, 51 bp, Homo sapiens
tttaatgtggttggaacaactgaggagccagcaccgctctttgaccttgcc

SEQ ID NO: 585188 - DNA, 75 bp, Homo sapiens
gaaaaataccacgacaaaaccaccctagccttggaaaaccattgcagagtgaatggaggctattcaggcctaagg

SEQ ID NO: 585189 - DNA, 76 bp, Homo sapiens
cctgaaggtcagcagacatgccttgttggaatcgattctataccagactgttacaggattgaagaaagatttgtca

SEQ ID NO: 585190 - DNA, 75 bp, Homo sapiens
cggctctgcatcgcgtcgccatgatgggccatcgtccagtgctcgtgctcaaatgcagagagctggaattccttg

SEQ ID NO: 585191 - DNA, 90 bp, Homo sapiens
accctacagaccaggcactccgtcagtgagatggcctccaacaaggtacagaggtgcagttccatggtacaccataaatcttgacttacc

SEQ ID NO: 585192 - DNA, 83 bp, Homo sapiens
cttcgagaaatctcgtctcgaccaagagctgaagctgatcgcaagcaagagaaatggtactagagattatccgagaaaaagac

SEQ ID NO: 585193 - DNA, 90 bp, Homo sapiens
tgtattttgctattcatgtaagcacagtcttcacagtattgcagaattctgcttggtcagaatcgtgatggcattgtgttcagcactgat

SEQ ID NO: 585194 - DNA, 85 bp, Homo sapiens
cccgaggggctacacagtatataaggtcaccgcccggtttctggaactaatgcaactgaagtatcatgagaaagctgcagacaaa

SEQ ID NO: 585195 - DNA, 75 bp, Homo sapiens
gatgggtgagagatgtgatcactggtttcgtggcctgaccaaggacctccaagcttccctctgggcagtaactct

SEQ ID NO: 585196 - DNA, 83 bp, Homo sapiens
ctcatcgccctggccgacaagcacgcaaacaagtcattacgttttcatttctcacaactgggctgagcacaactgaaccatgg

SEQ ID NO: 585197 - DNA, 100 bp, Homo sapiens
ggtggagctgagccggagacagttcaaggagcagggacaagttacaggaatgttctccaagcagcaatccaaaagagtctcaaggatccttcaaataact

SEQ ID NO: 585198 - DNA, 100 bp, Homo sapiens
tgcacagcccaaactcgctgtcatccaggaagcccggtttgcccagagcgccccagggacatcgataaagttgatgagttaatgcaggacattgctgacc

SEQ ID NO: 585199 - DNA, 83 bp, Homo sapiens
tatctgcctaggcattttgctgtctcctcctaatacggtgccagaaccctgtggagcatcatgaactgggaagagtagctgag

SEQ ID NO: 585200 - DNA, 74 bp, Homo sapiens
ctggcctatgctctggcgcggggcttcacggccgcagattacatgaagcagatgacatttgaagcccaagcctt

SEQ ID NO: 585201 - DNA, 75 bp, Homo sapiens
gttaaacctactcaaactattggtctatgttaacaatgaatgggcaaccagtgttggggaaggagggagctttgg

SEQ ID NO: 585202 - DNA, 100 bp, Homo sapiens
tcaactggataaaagcactttcagcttctggtcaggactctattcagagactgaaggcactgtggtccattatggctgacatgcaaaatctggtagaaag

SEQ ID NO: 585203 - DNA, 82 bp, Homo sapiens
tgtcgttctgcaccagcgccttgatcgagtacttgaggctgaaggggatgctaagggagataaagcaaaggtgaaggacgaa

SEQ ID NO: 585204 - DNA, 99 bp, Homo sapiens
gtaattataggcaacaatggacaaatccattatgaccatcaaaatgtgcaatactttccccggcatttaaagttagagaattttccgtcacagatgcag

SEQ ID NO: 585205 - DNA, 80 bp, Homo sapiens
agaggcggaagaggaggcctgatgggtgggtgtataacattctcgacaagaaggctgaagcggaccggattgttttcgag

SEQ ID NO: 585206 - DNA, 100 bp, Homo sapiens
gaatattttgcctgctggaacctgctgtatctactcaagagtggaagttttcacagattctcagagagagttcaacagcaggccaggtacaggatacgta

SEQ ID NO: 585207 - DNA, 110 bp, Homo sapiens
tcttcagctcttgggtttagcaaaagttcatctccttctgcatccttaactgagaatgagaaagtgagtgagaaggttggaggagctgaaggaaccaagctagatgatga

SEQ ID NO: 585208 - DNA, 75 bp, Homo sapiens
gctggggtcccttttgcctcagatactattttgaagatcgcaccccctccctccctggcggagcccctgaaggag

SEQ ID NO: 585209 - DNA, 95 bp, Homo sapiens
ctattggaggtttctgctgtggcaggtcttttgtaattgaccatcagtctcaggatgcaggaatcaagaccatcactatgctggatgaacaaaag

SEQ ID NO: 585210 - DNA, 83 bp, Homo sapiens
ttttgaaccactggaaagtgaggaattttgaagtacaccgtggtgacattgtatcattggtgcgcttaaattcctagcgaagt

SEQ ID NO: 585211 - DNA, 100 bp, Homo sapiens
cattgacatgtcatgcctgggtgcagcttctctagctggccttgctgttgggcaagaagaggcagagctggaggagttcctgtgccctgtgaaaacaccc

SEQ ID NO: 585212 - DNA, 104 bp, Homo sapiens
aaacaggaacagtctcttcaagtgatggaggagctttatctttatatactgcccttaccacacagcagaaactggcaggtgtcactgcactcagttgctggctt

SEQ ID NO: 585213 - DNA, 82 bp, Homo sapiens
cgacaagccgctggcagccgcggatctcaccgccgctcaggtatgaagtgtaacagaacagactttaccacctgaaactgct

SEQ ID NO: 585214 - DNA, 100 bp, Homo sapiens
tcccagttagagcaaggagaagacccctggatggtggagagtggagttccccaaggcgcacatctcgacaatcacaaagagtgtgtaggccagccccggt

SEQ ID NO: 585215 - DNA, 96 bp, Homo sapiens
ctggattttatgaaagcggggaaatgtgtgtccacctttccaaagtgaaactgatgagatttgatgatccactgttggggcctcgacgagttcctg

SEQ ID NO: 585216 - DNA, 100 bp, Homo sapiens
ccgagagcgtgaccgagagcgcgaatatcgtcatcgttagaagatgggcactctggttttttaaaaatgataaaagcaaaacttggcaagcaaacctgcg

SEQ ID NO: 585217 - DNA, 100 bp, Homo sapiens
agcctcctgcgtagctgggactacagtggacatttgggagcaataaaaataagaagaaaggaaaagccagaaaaatagagaagaaaggaaccatgaagaa

SEQ ID NO: 585218 - DNA, 100 bp, Homo sapiens
tagtgtggaacaatctatcagcctcctcctcaactttatgattgctgcatatgacaggtaagaatgattgatgttggctgatattggagtgctcattcac

SEQ ID NO: 585219 - DNA, 100 bp, Homo sapiens
tctccatcacccaccaacaacaccacaataatccacagccaagattgatatcagtaaatgccattatttagtggatttggacaccatgagagaaacaccc

SEQ ID NO: 585220 - DNA, 75 bp, Homo sapiens
gtctggtgattattacagcatggattatcctgtgccacagttcctcaaaggtgttgattgcctttgctcagtatc

SEQ ID NO: 585221 - DNA, 100 bp, Homo sapiens
tcaccacatcagatacatcctactcagatatggctgctggatcagactgtcaccactgactaaagaagagaaaactgcggcagagcaattcaaatttcac

SEQ ID NO: 585222 - DNA, 80 bp, Homo sapiens
gacgccgtggcagcctgaacggagtgtgcgacggattgggagaatagcctaacatggcagaccagagacagcgctcactg

SEQ ID NO: 585223 - DNA, 75 bp, Homo sapiens
cacgcagctggctggcttcagtggaccagctcttgcagccaatgccggaacaggatttgctgttgctgagcctca

SEQ ID NO: 585224 - DNA, 75 bp, Homo sapiens
cctccttggattgagtaccagcatcacaagcctcctttcaccaacatctcactgatgaaaaggcctccaggtttt

SEQ ID NO: 585225 - DNA, 82 bp, Homo sapiens
gctgctgagtttcttcatctacaacccgcgcttctggccgcgggaaggagaggggaaagtgcagtgttgcccttctgaatga

SEQ ID NO: 585226 - DNA, 101 bp, Homo sapiens
tccacagctaagactccaggaccctctggaagcctagaaatgaacctaaaggcagacccagaagagctttttacaaaactagagaaaattgggaagggctc

SEQ ID NO: 585227 - DNA, 96 bp, Homo sapiens
gctgccgccgccgccgcctcggccgaccagggacctgcccgcctgcggctgctccgggtgggaaagcagtgccactctccgcttcacagatgcccc

SEQ ID NO: 585228 - DNA, 77 bp, Homo sapiens
catttaccaccaatgggaacatgcacagggttcaggataagtttgaggtgctgaattacacaagcattcctatcttt

SEQ ID NO: 585229 - DNA, 75 bp, Homo sapiens
aaggatggaatttttcataactccatatggcttggctgcagcgctggtggaggaggaaactcgcagataccgacc

SEQ ID NO: 585230 - DNA, 50 bp, Homo sapiens
ctgatcctgaggttatggcaaagcctgggttactaggtgtctttcagaag

SEQ ID NO: 585231 - DNA, 76 bp, Homo sapiens
aagatcaagcactggaaccgcttccgagacggatgtttcagcagcccctgagaaggaagaggaggaagctgagggc

SEQ ID NO: 585232 - DNA, 74 bp, Homo sapiens
attagcttcgcagtctggaaagctttaggagttcacagttatcgaagcagcagttgctacttttgcccaagcca

SEQ ID NO: 585233 - DNA, 100 bp, Homo sapiens
tagcgaaccaagcctcttgccttacaatgacagctgccctgaagtgaaggtgtttgaagatatttcagccaacacagttaacatggctctgcaaatcccg

SEQ ID NO: 585234 - DNA, 83 bp, Homo sapiens
caacttcctcaagtcgcccaaagctctacgaactcgacggggaccccaagaggaaggaattcctggatgacttgttcagcttc

SEQ ID NO: 585235 - DNA, 75 bp, Homo sapiens
gcatctatctaacgtttaccctagcaaaccagatgaagtaggtgttccaggtagcaattcagctgacctattgcg

SEQ ID NO: 585236 - DNA, 83 bp, Homo sapiens
cataaacataaaaaataccccttctggccagcagtgaatgagcggccgggcgcggtggctcacacctgtaatccagcactttg

SEQ ID NO: 585237 - DNA, 74 bp, Homo sapiens
ttgataacaccctgtaacagctgaggagagggagcgtgagctgtatgggcccaagaagaggggacccaaaccca

SEQ ID NO: 585238 - DNA, 50 bp, Homo sapiens
atgactttcatgaaggcgttagagctgggttgtcgttttggaaagtaggc

SEQ ID NO: 585239 - DNA, 135 bp, Homo sapiens
cgtgctggatgccgtgatctccagcgccggcctcctcagtgcgaagaagctgcagccgcacctggccaagggacagtcattttgtttactcattcagccctgttgcaggtcccaataaactcttcataaggttga

SEQ ID NO: 585240 - DNA, 100 bp, Homo sapiens
gctgcctcgtgtcacatctgaaactcatctgtacctcacttagaaagctacttttccaggtatgtgggagagaacaataacaataggaagtgctggaaag

SEQ ID NO: 585241 - DNA, 74 bp, Homo sapiens
ggaaggtgatgcccaagatggaccaggtactgtctgatgagcgtgaaaggttgtttcaccgacttccacatcga

SEQ ID NO: 585242 - DNA, 102 bp, Homo sapiens
gtctccagcgtgctcaggtcggcggaggagaagcaccagcagacgtttttgaatcaactgagagaaattacggggattaatgacacccagatactacagcaa

SEQ ID NO: 585243 - DNA, 100 bp, Homo sapiens
gctgagttcttcctgcaagaagagagactgacacagatgagaaatgaatatgagcggcagtgcaggagtgacctccattgcagacaggctgaatgtggac

SEQ ID NO: 585244 - DNA, 82 bp, Homo sapiens
ggcgagtaagccagcggcaggaccagcgggcgggggcccacgagattttttatcaagcagaaatgcatcgaacaacgagaat

SEQ ID NO: 585245 - DNA, 100 bp, Homo sapiens
gtatttgtctttctatgtttatgataagaatgttttacaaagagatctccgtataggtatgatctcgtgaaatcttgagagaaactgaatgacgaatgaa

SEQ ID NO: 585246 - DNA, 97 bp, Homo sapiens
catccaactcagcgaatctccctgccttctctgcacctgccccagagctgctaatatttggagatcatcacctccatcctgctgagcgggcggatcg

SEQ ID NO: 585247 - DNA, 96 bp, Homo sapiens
gaggcaggactgtgtcaaggagatcggcctcttgaagattgttctctggggccggactgagaaatgcctgaaggagacgacggaggagatccggca

SEQ ID NO: 585248 - DNA, 100 bp, Homo sapiens
ctgggacattgctgctacttctggcaggtgtggcctgcctccgaggcagaagtcaattcatctggaaagactatctctgagtcagacttaaaccactctt

SEQ ID NO: 585249 - DNA, 100 bp, Homo sapiens
ccgacggcagccggcacctgacggcgtgaccgacccgagccggtgagaggccctccagctgcaggggcatttaaagaaagaccaaccaagcccacagcat

SEQ ID NO: 585250 - DNA, 96 bp, Homo sapiens
tgcgcactcctggaaccagcggtggctgggcaaggccgaggagtgcgattcccgtgcctggtacgcagcctcctgacaaggtgatccgggcgggcc

SEQ ID NO: 585251 - DNA, 73 bp, Homo sapiens
tattcggccatctttgctcctccctgcaactaactccattcttaattggaggacaatgcaataattgaaattt

SEQ ID NO: 585252 - DNA, 75 bp, Homo sapiens
gtctgaccctccgccaggcaaaaggaaggtaagtaaggaggtctctgtaccatggctcgtacaaagcagactgcc

SEQ ID NO: 585253 - DNA, 101 bp, Homo sapiens
tatgcctgctaacatggataagcatgccctgaaaaagtatcgtcgagaagcctatcatcgggtttgaaagtattcttgaagggctgtttggacctgcatta

SEQ ID NO: 585254 - DNA, 101 bp, Homo sapiens
agagctctgcgctgttctggacagctgcgacggcgcgctgggctggcgcggcctgggccagccctccagatctctatattgaaagatttaatatagctctt

SEQ ID NO: 585255 - DNA, 73 bp, Homo sapiens
tgtggtcttcatttgtgaatacataggtgctggagaatctggtaaaagcaccattgtgaagcagatgaggatc

SEQ ID NO: 585256 - DNA, 100 bp, Homo sapiens
atgagaaccctacttgcctaaatgaggaatgtctttcctaccatctaaaatacgaaggtttctggctggggggtgctcaaaggatttaaaggagaactaa

SEQ ID NO: 585257 - DNA, 75 bp, Homo sapiens
ttgatcagtttgtgtcagccaccttgttctctaaagctcccatggtgaatagatcaaccaagccaaattcctcaa

SEQ ID NO: 585258 - DNA, 73 bp, Homo sapiens
gcaccgctcccgggatcatggtgttctacttcaccagcagcagcgaacaaaatccagtctcatagcagaggag

SEQ ID NO: 585259 - DNA, 82 bp, Homo sapiens
ccaaaccgaggcttctgggcgccgcggatacacattctagatatgttgaaatcacaaagattagacacctttttagataggt

SEQ ID NO: 585260 - DNA, 75 bp, Homo sapiens
acagtttctggagaaagatccttcactcacagaaccataatagctcttcaagtctgcaataaaaaatggcctcca

SEQ ID NO: 585261 - DNA, 82 bp, Homo sapiens
cactgtaagggtgtcaggatctgaagagctatggtgaaacaccactgaagcattgccaagacaatgcagatcttcgtgaaga

SEQ ID NO: 585262 - DNA, 100 bp, Homo sapiens
cacatatcagagggcattatgaacgaattctcaacccctacaacttattcctgtccggagacagcctaagggaagttgttgacatgaagtctgagggaca

SEQ ID NO: 585263 - DNA, 74 bp, Homo sapiens
ccggagcaagcggagctcccccaagagccggaaagaccatcatcaaagaggggatgctgaccaaacagaacaat

SEQ ID NO: 585264 - DNA, 82 bp, Homo sapiens
tctgggcttcatagcattcgcctactccgtgaagactgtggtacagacctccatgagccggtcccaggtagccctgctgggc

SEQ ID NO: 585265 - DNA, 124 bp, Homo sapiens
cctgatcgggctcatctgctggcagtatacaagcgaaggacgggagccgaagctcaaattagtgacaagagctggggttaggatccggttggactctgacatcggatgccctcaaacatacaga

SEQ ID NO: 585266 - DNA, 74 bp, Homo sapiens
cacgtgcccctacgtgcacaacatcacccgcaaggcggccggcgcggggcgcaggcggcgcggccatgggctcg

SEQ ID NO: 585267 - DNA, 100 bp, Homo sapiens
cacttaaaggagtggacattgctagcaatgagctcccaaagccatccagcctcctctattggcccaggaagcccacccagccccgccacgcagagcccag

SEQ ID NO: 585268 - DNA, 75 bp, Homo sapiens
cgcaggggagaaacaaggcgccttggagttcagggagtaccctgacttctaccggaagctctacggcctcttgga

SEQ ID NO: 585269 - DNA, 100 bp, Homo sapiens
agcaactgaggcgccgggaccggctgcagagacaggcgttcgaggagatcatcctgcagtttacaaggagaacatcatgcgcctctccagccttcacaag

SEQ ID NO: 585270 - DNA, 82 bp, Homo sapiens
agagtcacagaggaaggacagtggagtctggcatcttattgttgttgacctcctgtactggagagacattaagaagactgga

SEQ ID NO: 585271 - DNA, 96 bp, Homo sapiens
ccacggcggcgcagccccaaagcgagcgaagctagggtcgccgccactgccgcaggaggcgtgagggtggcaatgaccatgagatcttcacagacc

SEQ ID NO: 585272 - DNA, 114 bp, Homo sapiens
gctgctcctgctgcagccgccgcctccgacctgggcgctcagcccccggatcagcctgcctctgggtactccaaagattcaggtttactcacgtcatccagcagagaatggaaa

SEQ ID NO: 585273 - DNA, 83 bp, Homo sapiens
ggatgagaaggagttgatcctgctgttctggaaagtcgtggatctggccaacaagaagtaagactttgaccccgacgcaggct

SEQ ID NO: 585274 - DNA, 100 bp, Homo sapiens
cggaacgtctgccggtgtccccgcgctgctggtcccggggtccctgaaccgcgcgctgtgcttcgccgtgagccgctcgctgctgctgacgtgcctggtg

SEQ ID NO: 585275 - DNA, 96 bp, Homo sapiens
ccgcgtccctgcgaccgccgcggcgaagatgctcctttagcggcagagttttccgagtgaccttcttgatgctggctgtttctctcaccgttcccc

SEQ ID NO: 585276 - DNA, 100 bp, Homo sapiens
cgcgctgattctcacgggcccggctgccggcccccgctctgccctgctcacggatgattgatatccagaccaggatggctgggcgagcattggagcttct

SEQ ID NO: 585277 - DNA, 90 bp, Homo sapiens
aggtacacaaatgcacgcgacaggaaccaggatctcactggcatcgaatctatggatcagtgtcgccataccttggaacagcataactgg

SEQ ID NO: 585278 - DNA, 83 bp, Homo sapiens
ggaaggacaggcagagctaaacaaggcataattcttgggtcatcatttctactcagtataaacgattttctccttaaaacaag

SEQ ID NO: 585279 - DNA, 100 bp, Homo sapiens
cggacctttgagcatacaccgagagagtgaggagccagacgacaagcacacactatggcgctgaaacggattaataagatggcccactgcgtgaccttgg

SEQ ID NO: 585280 - DNA, 100 bp, Homo sapiens
ggcagactggtgaaatcgcaaactgggcgtctgttccggcgccggacccctatttgcaaaggtactaggttttgacaagcttgcatcatgcgtgagtata

SEQ ID NO: 585281 - DNA, 100 bp, Homo sapiens
ggtggaatctgaactttctgaatatgctgctcaagatcagaaatttcaaagagaacttatacagaatggttttacaaggtctcaacaaatggcagctatt

SEQ ID NO: 585282 - DNA, 100 bp, Homo sapiens
cagccccgacgaacatttctgggtgacactcaacaggattcccggcatgtcagagcgggagcgacaggtgatgaagaagctgaaggaggtggtggacaaa

SEQ ID NO: 585283 - DNA, 100 bp, Homo sapiens
ctggggctgctcccatcattgatgtggtgcgatcggctaaaactggacaaagaccgcaaaaagatcctcgaacggaaagccaaatctcgccaagtaggaa

SEQ ID NO: 585284 - DNA, 100 bp, Homo sapiens
cttgtacacgttgggggtgtagttagtgcacgttctgtgaagcttttggatcgtatccacaatcctggaacacatgattctgtgcagatttgcagaccag

SEQ ID NO: 585285 - DNA, 71 bp, Homo sapiens
actgaagcagagatgctcagggacccagagggaggccagcagacctgcgaccgcatcaagcagtccgccag

SEQ ID NO: 585286 - DNA, 97 bp, Homo sapiens
aagctggaacagatctatgaatgcagaaacctgtaggaagtgtcagggactctggaaagaacataatggcctcacctgtgaagagctggctgaaaaa

SEQ ID NO: 585287 - DNA, 98 bp, Homo sapiens
tgaagaaaaggatttccaaaaactacaatcataaagaaatccaacttaccttgtcacttgtagattttcagtggaaactgggtatggctgtgagctca

SEQ ID NO: 585288 - DNA, 90 bp, Homo sapiens
gtttctccagagctgctcacggagaagtccgcctgtaagagggccatgaagcccccaggaggagaatcgagcaatctttttggaagtcca

SEQ ID NO: 585289 - DNA, 82 bp, Homo sapiens
tgctgcagggatctcggcatgaggccccttctcccaggaggggaggcaccaattctgtggtgttcttggtcacacatttatg

SEQ ID NO: 585290 - DNA, 74 bp, Homo sapiens
atgaacagaaacacctaggaagggagaactgcattgcagtgtcgagatggctatgaaccctgtgtaaatgaagg

SEQ ID NO: 585291 - DNA, 100 bp, Homo sapiens
acagcagatttgctggatacgtgacatcaattgctgcaactgaacttgaagatgtcgacaaagatgctgaattagtggcccaatggaactattgtactct

SEQ ID NO: 585292 - DNA, 87 bp, Homo sapiens
tggagcccctacagaaggtggagcccgggcggcccttagagatttgtttgattccatggataaaacttcttccagtattccacctat

SEQ ID NO: 585293 - DNA, 82 bp, Homo sapiens
gccgcagcgacggcggcgacagcaggtgatgtgtccaatctagatcccaacttctcatttgaaggcaccaaactggatgtgg

SEQ ID NO: 585294 - DNA, 51 bp, Homo sapiens
atttggagtctggacatctgtaacttggagcttgcaagtttttgaagaaac

SEQ ID NO: 585295 - DNA, 90 bp, Homo sapiens
ggcctgcacaccaagggcgcccttcccctggatacggtcactttctacaagttgattatggaagattcccacaagagtaccacgtcagag

SEQ ID NO: 585296 - DNA, 75 bp, Homo sapiens
tcaattctttgtgactcctcgatcttcagttgagacttaattcagtgcacaaatgagatgaatgtgaacatccca

SEQ ID NO: 585297 - DNA, 74 bp, Homo sapiens
gagtttcaagatcctggaccgtgtcaccatccaggaactcacaggaacacctgctgaaggaagggttggcgtgg

SEQ ID NO: 585298 - DNA, 83 bp, Homo sapiens
tggcctggaggctatccagctgagtgttgaaaagatagacctgaagggattatcacacacaaaaaatgacagaaatgttgaat

SEQ ID NO: 585299 - DNA, 75 bp, Homo sapiens
tggtgaacacgtcggacctcaatgaagagctgggacagtggaggagtgtctgctggacgagaacagcatgctgat

SEQ ID NO: 585300 - DNA, 75 bp, Homo sapiens
aacaactctgtgtacaccaacgtcctggtccagaacagagacgtggtcgccgtctccaggaacatgcagaaagag

SEQ ID NO: 585301 - DNA, 103 bp, Homo sapiens
cgtgctgctgggattcgcgctgctgggcacccacggagcctccggggctggaccagctgtactggcgctacgatgaccacacgaggcacatggaccccggcta

SEQ ID NO: 585302 - DNA, 50 bp, Homo sapiens
gtcctttgatgcaagggtctagaaaaatctggtccttcatcagaactagg

SEQ ID NO: 585303 - DNA, 100 bp, Homo sapiens
ggcagagtgagattgcgtccatgctgtattcccgcatgaacatcaagtgctcgctacctggaccagccctgccttgagaccgtcaaccgcatcaagttgt

SEQ ID NO: 585304 - DNA, 98 bp, Homo sapiens
gggtcccgccctggggccggcgatgtgccaccgaggctgaggatgatggtagattgccagagctgagctcaatgtgcagcaatggatgacgacagcct

SEQ ID NO: 585305 - DNA, 74 bp, Homo sapiens
tcgccagtgggttgacacagatttaattggccttggtcctcacagctccaaaaagaaacaggatctcgataagc

SEQ ID NO: 585306 - DNA, 100 bp, Homo sapiens
atgagcctgtgcatctgtacaaagatgtcaagtttttcagttatgggacaaaaatattatatcaaaacactgaagctttgcaatctaaattcttttcacc

SEQ ID NO: 585307 - DNA, 75 bp, Homo sapiens
cttggagacggacttgcttccgtgagtgatagttgcttcaggaatcttgcagaagaccgcagtgggataaatctc

SEQ ID NO: 585308 - DNA, 101 bp, Homo sapiens
gtcacaggccacgtagaacgtgcccttgagactcggcacgagcaggaacacatggagttcctcgaggtgctgaccgagggccttgagcgggtgctgttggt

SEQ ID NO: 585309 - DNA, 90 bp, Homo sapiens
cagatggaaaacaaagttctacagacagcggacattagtattgaagaaatgattgaaaagttacagaagcaggaagaaccggacccggcg

SEQ ID NO: 585310 - DNA, 83 bp, Homo sapiens
gtttgatagtgaaaaaggagtggactttgttctgaattactccaaagcaataccaagctgctattttacacttgaagagggag

SEQ ID NO: 585311 - DNA, 112 bp, Homo sapiens
tggagatggggaccgccctggacatcaagattaaaagagcgaataaagtttatcacgccgggcctcgtcacgtgttcaatatgctaaagaagtatgtccgcgcagaacagaa

SEQ ID NO: 585312 - DNA, 83 bp, Homo sapiens
gaagatcggcagcggctccttcggagacatctatctcgcctcccgcgacgatgcccctcaacgttagcttcaccaacaggaac

SEQ ID NO: 585313 - DNA, 98 bp, Homo sapiens
tacaactcgcccaccacgtccagcttcaccacgcggctgcacaactgcaggaacaccgtcacgctgctggaggagcctggaagctccgaccccaggag

SEQ ID NO: 585314 - DNA, 99 bp, Homo sapiens
ctactgtgcctgccatacagcctggttgagggtcagtgcctggatcaaagtggaacagctgaagccatatcatgctcataaagaggaaatgataaaaat

SEQ ID NO: 585315 - DNA, 100 bp, Homo sapiens
ttcagagacatgagaagattcatactggagagtcaagccctacccgtcgagaagctgtgaagagaagaacagccgagtacctcatgcgggcagaaagtat

SEQ ID NO: 585316 - DNA, 75 bp, Homo sapiens
ctttgatcgccatggtcaaaaaagaagtgaaattaacttacctggcctctgaaaatgatttgctgaacaagcgcc

SEQ ID NO: 585317 - DNA, 100 bp, Homo sapiens
ctaagcctgcacagccgcggcggcagcagcagtgagagcggaaggagagttttacatggaagtggcttacagaaacttggcgctgaggtgcagggaagcc

SEQ ID NO: 585318 - DNA, 100 bp, Homo sapiens
ctgagatggagctgcgccgaggccagatcctctggttccggggcctgaaccgtatccagactcaggataaaattgtccatggaccacgtgtgccttggtc

SEQ ID NO: 585319 - DNA, 75 bp, Homo sapiens
tgcaacatagagctgacattaactgtcaggaatgttacgttcataacttactaaggattagtgtatattttccaa

SEQ ID NO: 585320 - DNA, 50 bp, Homo sapiens
cctcgccatgtcctgctgcccgatggagcggcagcgcctcgctcgagaga

SEQ ID NO: 585321 - DNA, 83 bp, Homo sapiens
ccccagtcggtgctccggggaggtcacctgacgaggagagagcagagctgacatctgataaagacatgtaccttgacaacagc

SEQ ID NO: 585322 - DNA, 82 bp, Homo sapiens
tcttgttggtgacacctcacctcacccacgcgaaaaccttcctcaggctttatcctgtggataaacgcagagtgaacgagtt

SEQ ID NO: 585323 - DNA, 74 bp, Homo sapiens
tgaactgcgtgaacgtctctatgggaaaaaaattcaggtgcgggcattctatgtgaacgtgctgaatgaggaac

SEQ ID NO: 585324 - DNA, 100 bp, Homo sapiens
cggagccgaataccaagctcggatccctgaatttgatccagggcagagcggcttgggtaaatccaccttaatcaacaccctcttcaaatccaaaatcagc

SEQ ID NO: 585325 - DNA, 98 bp, Homo sapiens
agcagattacttccatcagtattgagccaggagttgaggtggataattactgtaccttcctcatggaaaaagttttatttaaagtgttatttctcatt

SEQ ID NO: 585326 - DNA, 100 bp, Homo sapiens
ggccgtgttggagtctacgctgtcttgtgaagcctgtaaaaatggcatgcctaccatctcccggctcttacagatgccatggagtctcgctctgttgccc

SEQ ID NO: 585327 - DNA, 100 bp, Homo sapiens
actgcgccgagctgcacgtcctcgaacgcgaggccaacagccccgctattgacctgttgtattggcgggacatcaagcagacgggcatcgtgtttgggag

SEQ ID NO: 585328 - DNA, 90 bp, Homo sapiens
cacacgctagtttttgtttcctgcaagctccatggtgaatccactaggaatgtcattgatttgaggacttgctatccccgtgggaacatc

SEQ ID NO: 585329 - DNA, 74 bp, Homo sapiens
cccccactaacggggacttcacctttgtctcctcagcagacgcggaaggagtctctacagaccggatgctgttg

SEQ ID NO: 585330 - DNA, 75 bp, Homo sapiens
caagagggatccttcacccgtgtctgatgagcgggatcgtgtgcagaagaaaaccttcaccaagtgggtcaacaa

SEQ ID NO: 585331 - DNA, 78 bp, Homo sapiens
tccatcagtcaggtcattgagcagttacctcagccaaacaggacaagcaggcttcctgacaatgtcacctttgaggaa

SEQ ID NO: 585332 - DNA, 101 bp, Homo sapiens
acggggacagcgacctgcagctggaacgcatcaacgtgtactacaatgaggccaccggtacaagaagctggaagaccttctggagaagagcttttctctgg

SEQ ID NO: 585333 - DNA, 78 bp, Homo sapiens
ggaatcaggagcttcttttgctgttcttctgttttggatgcattggaagtaatagctcttcaagtctgcaataaaaaa

SEQ ID NO: 585334 - DNA, 100 bp, Homo sapiens
gcttcatcctcggcggcggtggccgctagctccaaggaagccactatggaaggaggggtcaggattacagcagaggagactggcacacagagtgttaagt

SEQ ID NO: 585335 - DNA, 98 bp, Homo sapiens
tttaaatccggagggggaaaaaatcccaaggtctgcaaagccgttcttggaacacctcacagcttgccacatctgatgaatccatccatctctcctgc

SEQ ID NO: 585336 - DNA, 100 bp, Homo sapiens
cttcgaggtcgggcctggggattcgcccacctttccccggttccgagccatccagtgatctcgaggacctggaagaagcagaggagccagacatggagga

SEQ ID NO: 585337 - DNA, 100 bp, Homo sapiens
tgggaagaggcggcagacagcggggttcgagaacttgtcttggacaattgcaaatcaaatgatggaaaaattgagggcttaacagctgaatttgtgaact

SEQ ID NO: 585338 - DNA, 82 bp, Homo sapiens
tccgaaccctcagcctcaagccgctgctcttcgatgtgaagttcatttccaatccgccctccatggtggcagcggggagcgt

SEQ ID NO: 585339 - DNA, 82 bp, Homo sapiens
ggggagccccgggagccgcacgaggggaggtatggtgtcaagaaaacatagtcaccattattacgaaaagtaaaatatggaa

SEQ ID NO: 585340 - DNA, 75 bp, Homo sapiens
gcccctgagccatgcccatcgcagccgccccgaaggagccaggctccatggtccccttctcgatgcgcatcttgc

SEQ ID NO: 585341 - DNA, 83 bp, Homo sapiens
ggacaggcgggctgcagcagcaaagatgatggaccatttggattgtgcaacaaatgaagaaaaccctgtgatatctggtgaac

SEQ ID NO: 585342 - DNA, 50 bp, Homo sapiens
gtcggagatccgctcgcgcgccgaaggtctgggatctgccgatatggggg

SEQ ID NO: 585343 - DNA, 49 bp, Homo sapiens
taaatgccgagaaggccagtacgctgttccatttcctccaagtcaccgg

SEQ ID NO: 585344 - DNA, 82 bp, Homo sapiens
ggggaagcgggacaatcgggtgggaggagattggacaggctggactccccattgcttttctaaaaatcttggaaactttgtc

SEQ ID NO: 585345 - DNA, 90 bp, Homo sapiens
ccgcgcggggcacgatgttgaacatgtggaaggtgcgcgagctggtggacaaagcgggccttgccttagagatgtctctgaacaatttgg

SEQ ID NO: 585346 - DNA, 76 bp, Homo sapiens
ccgggagcagctgcatagcatcagcgactctgtgttgtttctgcaggacacctcctacctgttcatcactggccct

SEQ ID NO: 585347 - DNA, 80 bp, Homo sapiens
gaatttcttacagactgccaaatggaacagacaagcaggttgtcttgacatctaggcttgctgtcaaggcttctgatcaa

SEQ ID NO: 585348 - DNA, 100 bp, Homo sapiens
ctccactccccagctgtgaaaggggcaattgaaggaacagactaaaaatcgtgtcctggaaggaaactacaggtactaccagggattttcagtctgaaga

SEQ ID NO: 585349 - DNA, 50 bp, Homo sapiens
gcgccaagcaggagctgaaggacttcagtgtttcctgaggttataggcgg

SEQ ID NO: 585350 - DNA, 101 bp, Homo sapiens
gtcactcctttctttgtggtcttcatttgtgaatacatagtttgctgctttgtggtgcacaagcggtgccatgaatttgtcacattctcctgccctggcgc

SEQ ID NO: 585351 - DNA, 74 bp, Homo sapiens
aaacttcaacagaatgtggcaaccagggcgaactttctgaccaagtatacaactacccagagggcctaggagaa

SEQ ID NO: 585352 - DNA, 98 bp, Homo sapiens
tgagtggttgtgtggtcgcgtctcggaaaccggtagcgcttgcagcatgaatgaagaaggagccccacaggaaggaattctggaagatatgcctgtgg

SEQ ID NO: 585353 - DNA, 51 bp, Homo sapiens
gaagatcttctgttgtcatggagtttttccccagggattaaaaatgttgct

SEQ ID NO: 585354 - DNA, 75 bp, Homo sapiens
tttgtttctgttggaattgggatactaagagtttaccacctaggatgacttcagtgactagatcagagatcatag

SEQ ID NO: 585355 - DNA, 100 bp, Homo sapiens
cctcgggcccgcaggtcgcagggcggcctgcagctgggccgcggccgaggaggcagcgcgacctccgcacgatgaccagctgaactcagaagaaaaaaag

SEQ ID NO: 585356 - DNA, 101 bp, Homo sapiens
ctgggatccatggagtcctgctataagaaagctgatattgcaattgctccattaactattacccttgtgagagaagaggtgattgacttctcaaagccctt

SEQ ID NO: 585357 - DNA, 74 bp, Homo sapiens
gaggcacccgaagaagagaccatccatatttccagagcaaatttttcagaacataaaacaagaatatagtcgtt

SEQ ID NO: 585358 - DNA, 100 bp, Homo sapiens
gacggggcagctggacgagctggagaaggccatcaccacgcagaacgtcaacaccaagtgcatcaccatccccagcctgagcatcagcggggaaggggga

SEQ ID NO: 585359 - DNA, 75 bp, Homo sapiens
gcagaggcgacaactgcacggatctactcgcactggtccttatttggaaaaaacttgacaacaattttaaatgag

SEQ ID NO: 585360 - DNA, 100 bp, Homo sapiens
gcgcagcgggttgcctccgctccccatacggcggccccaggacccagatgatgtggtaccagttggccaaagaagagcctggtgttggtgcatgtgcttt

SEQ ID NO: 585361 - DNA, 100 bp, Homo sapiens
gctcaagtgatgcttccgtctcagccttctgagtagctgggacaacaggcccagctgagagccagcctggaggttacccagcagcaggccacccaggccg

SEQ ID NO: 585362 - DNA, 100 bp, Homo sapiens
ccatgcctatgatattcttctcctggttaatcaagaattctctatttctgctccgtcatccatgccactggtatttgaagtataccatacaactgttttg

SEQ ID NO: 585363 - DNA, 88 bp, Homo sapiens
gaaacccaggaaatcgagactcatgactcccagagaggatggcatctagaagccagtttcaagcgcccggtagtgatcctgggacccg

SEQ ID NO: 585364 - DNA, 50 bp, Homo sapiens
cggaggcagaggtggaggcgctttgaaagctgaaaatgtgtgtctgacat

SEQ ID NO: 585365 - DNA, 82 bp, Homo sapiens
gcaaggaccccaaagagtgctgcaagttcatgtgtctggacccagtacaaaatggttcgttacatcagaaggatacagttca

SEQ ID NO: 585366 - DNA, 82 bp, Homo sapiens
caaccatgctcaacttcggtgcctctctccagcagactgcgatgtgaagttcatttccaatccgccctccatggtggcagcg

SEQ ID NO: 585367 - DNA, 74 bp, Homo sapiens
ccctggtggatcgatacagcacccctgccaggaattgcgcagtacctggccacttatggccccatcaccgtgac

SEQ ID NO: 585368 - DNA, 100 bp, Homo sapiens
gactacacagtacggaagttctgcatccagcaggaacatggcgctgctctgggggctcctggtgctcagctggtcctgcctgcaaggcccctgctccgtg

SEQ ID NO: 585369 - DNA, 100 bp, Homo sapiens
atactgaagtggtttgcaacatccttcttctggataacactgtacaagctttcaaagtcaatgaggaggcaaaacagattcagaatctgcagaaagcagg

SEQ ID NO: 585370 - DNA, 95 bp, Homo sapiens
cttagccaccatctttctggcggttgtgatggccttattgagcctgcactgcttagcagcctttaagttttctggatatgccgcagaaggatccg

SEQ ID NO: 585371 - DNA, 96 bp, Homo sapiens
gagattttcagcttcgggacaagtacatgtttgctacaaaggtggtggctgaccggttccctgatgtgttacctgcttctgctactgatccaaact

SEQ ID NO: 585372 - DNA, 98 bp, Homo sapiens
gctggacgtgggatccacacagctcagaacagttggatcttgctcagtctctgtcagaggaagatcccttggaggcaagatccaaactgagatggaga

SEQ ID NO: 585373 - DNA, 100 bp, Homo sapiens
ttgttcgtctgagaaaactgaagtttgccataaaagttgatggagattacctttggactgtgccctgtccacggtgcctcctgcatgtcctgctgccctg

SEQ ID NO: 585374 - DNA, 75 bp, Homo sapiens
gccagtccagcagctaaggatattttgtgcagctgatggtgagaccattctaaaaggcctccagtccattttcca

SEQ ID NO: 585375 - DNA, 82 bp, Homo sapiens
gccgtgcccgttcttcctggagggaaagtgccgctttaaggagaactgcagcaggtgcagttaataaccaaagcaggccaca

SEQ ID NO: 585376 - DNA, 96 bp, Homo sapiens
ggtgttgcagaacctcggccccaaggacaagaaagctgatgtcctgaccactggagctggtaacccagtaggagacaaacttaatgttattacagt

SEQ ID NO: 585377 - DNA, 100 bp, Homo sapiens
atctgacccctcagtccccaagattgtggcatttgaaactgtccattcaatggatggtgcaccccagacatggatgtcatcctcaacattcctgtggaag

SEQ ID NO: 585378 - DNA, 89 bp, Homo sapiens
gagcgccgcggccgcatctacatccaggcccacatcgacagggacgtcctcattgtcctcggtccagccctgctgggagttttctgcca

SEQ ID NO: 585379 - DNA, 123 bp, Homo sapiens
aaggggacttgggcccagtttatggcttccagtggaggcattttggggcagaatacagagatatggaatcaggtgtcatggagaaactccagctgggcccagagattctgcagcgggaaaatc

SEQ ID NO: 585380 - DNA, 95 bp, Homo sapiens
gaactctccacagccatcactcatgtccataaggagcagcaagatgaagagcgacgtcggcagctgagagagagagctcgtcagctaatagcaga

SEQ ID NO: 585381 - DNA, 88 bp, Homo sapiens
aaaagttaaaacaattgctgcacgaaacactgaaattttggcagttgctgggcatattggattttacccatcataggcgctgttctct

SEQ ID NO: 585382 - DNA, 100 bp, Homo sapiens
agttttgagtcatctgattccaggcctatctctggcacacgtcttagtccactagagctgacaaatcttcctattttcaagctgaaagaatctactgtta

SEQ ID NO: 585383 - DNA, 100 bp, Homo sapiens
cctgtggctctttctgctgggcctgcccttcaccctctacatggaaaagaatacttgagatccatttgtaaggaaagaaaaggaagcaacaacataatgc

SEQ ID NO: 585384 - DNA, 83 bp, Homo sapiens
cgaccaagagggtgttcgactgctagagccgagcgaagcatttggtgttgtactgcgaggcattcctgaccacctacaggacc

SEQ ID NO: 585385 - DNA, 100 bp, Homo sapiens
agctcgtgggtggagcgggccgacctgcccgcggctgacgctgacattcgctgtcactcctgctacaaggtccctgtgctgggctgtgtggaccggcagt

SEQ ID NO: 585386 - DNA, 98 bp, Homo sapiens
ggctccctcattaccgtcgccagcggagcgaacccgagagcgtggagcgggctgggccaggatggatagaatgacagaagatgctcttcgcttgaatc

SEQ ID NO: 585387 - DNA, 100 bp, Homo sapiens
ataatgaaattcagcggctccctccagaaatagcaaacttcatgcagctggtggaactagatgtgtctcgaaatgatccgtgattctaactgcaactatg

SEQ ID NO: 585388 - DNA, 75 bp, Homo sapiens
atgcaggtggtctgtgaagccacacagtgtccagatacgagggtcattgacgagactctggatgttaaggaaatg

SEQ ID NO: 585389 - DNA, 82 bp, Homo sapiens
aactaacttgccttcagaatttaaaatggtccacagcagtcgaattttgtaaaagtgcagcagtgatcaatggctctcagca

SEQ ID NO: 585390 - DNA, 90 bp, Homo sapiens
gcccgccccacccgcatgctctttgtcactccccggcggcagcacgaaagtaccatgtgacagctggatctgcaagtctgtcctttctga

SEQ ID NO: 585391 - DNA, 101 bp, Homo sapiens
aaaaggtgtcaagaagctcagaatggcatttccggagagttcttttgaagtcacttcagaaggatctacatgaggaaatgaactacatcactgcaataatt

SEQ ID NO: 585392 - DNA, 95 bp, Homo sapiens
tttgcaaggctttctgctaaggatgtattgtggcttttgtttggattgcagcatgcagaattacaggctccctgaaacaacagtaacctacccct

SEQ ID NO: 585393 - DNA, 100 bp, Homo sapiens
gcctatgtagacagccacaaatgggaagcaagagaaaaagaacattactgtcttggatagtgacaacctctggtgggacgcctttgccactgaatttttt

SEQ ID NO: 585394 - DNA, 74 bp, Homo sapiens
gttgaatgccagccaccagccatggagtggcagacgaaatgttgatttggatttggcagcatctcacagaaaga

SEQ ID NO: 585395 - DNA, 50 bp, Homo sapiens
gtcccacttgttcgcggcctataggttctgacatgaataaattttgcaga

SEQ ID NO: 585396 - DNA, 83 bp, Homo sapiens
ctccagaattacttgggaagtaaaaatctgcgaggcttggatgacgtagctttgccaaagacttagaagctaagcagaaaatg

SEQ ID NO: 585397 - DNA, 73 bp, Homo sapiens
taggacgctcttccagctgaagcagtctcatataatggcagcaaaggctgtagcaaatacaatgagaacatca

SEQ ID NO: 585398 - DNA, 98 bp, Homo sapiens
agcaggcatagccgcagcggcggtgctgggtaggccaggtttcagcatcgcagacaagaagcgcaggacaggctgcattggggccaaacacagaatca

SEQ ID NO: 585399 - DNA, 88 bp, Homo sapiens
attttggcagctactaaccgtccagataggatagacaagggttacattccgaaaagcaaatgggagatggacacatctgaggcaaagc

SEQ ID NO: 585400 - DNA, 100 bp, Homo sapiens
tggcaagactccacctcctggtgaagaaagcaaacagagtggttaatgtgttgctaacaactccactctgggtggtaaacaccagactgaagcttcaagg

SEQ ID NO: 585401 - DNA, 82 bp, Homo sapiens
ccgccggccgccgcgccgcccggcagcctcggcaggtcgcgtggggcaggcagtggcgctgcgggccaaggccttcggcttc

SEQ ID NO: 585402 - DNA, 75 bp, Homo sapiens
tggaaacaggaggaagaattcccaagccaaagctttccagatttcaacactacacttgcacaatgtctttgaaac

SEQ ID NO: 585403 - DNA, 82 bp, Homo sapiens
cgcagacggtgcgcctgtgcagccctcccaggtggagtacacggcagactaccctctttcccagctgcccgctcctcagcac

SEQ ID NO: 585404 - DNA, 82 bp, Homo sapiens
cggcagcggagggacggcagtctcgcgcggtagaatgtaagaaagctcagccgaaagaagtcatgttcccacctgggacaag

SEQ ID NO: 585405 - DNA, 73 bp, Homo sapiens
gactaccaccgcagcgacgagcagctaccaagatgaatgaactaatggagaaatagaaagtcttcagtgatgg

SEQ ID NO: 585406 - DNA, 100 bp, Homo sapiens
ttttacagcccactgaggccctgtccccagaagatggagccagcacagcactcattgcagctgtgcctgagctgaagcttctctgtggggcagacgtctt

SEQ ID NO: 585407 - DNA, 123 bp, Homo sapiens
gttggagtagatgtcggatttgaaaatccaatgtttgcttgtctggaaatggattatgaggtaaagaagcttcttaataaagtagtgctccgtgaatcttgcttttaccggaaattaacagac

SEQ ID NO: 585408 - DNA, 100 bp, Homo sapiens
aactgtgcagaatctacaaattttgctactgtcagatggattgactatggaaaagttgccaaattgcaattcacagaagctgtgagtccttcagtgctac

SEQ ID NO: 585409 - DNA, 50 bp, Homo sapiens
agagggagctgtggccacctgagaagaacctcaagaaggcatgaagccag

SEQ ID NO: 585410 - DNA, 75 bp, Homo sapiens
agcgccgaggacgacgagcgcagctgtcggggccgcgagtcggacgaagtaaggtacctgccgtgggcagatctg

SEQ ID NO: 585411 - DNA, 89 bp, Homo sapiens
cagaaaccggggaccttaacaatccacctaagaaattcagaggtatgcctggactgttgcccagtgtaagatctgtgcaagccatattg

SEQ ID NO: 585412 - DNA, 96 bp, Homo sapiens
ggcagaaaaacgagccatttctccgtcgattaaagagccatctgtggtgccaattgaagcgctgataaagcagtttgtgtccgacgtggcctgggg

SEQ ID NO: 585413 - DNA, 75 bp, Homo sapiens
gagtggaggtgctgccctgggcactcaggagtgagctgcgaggaagattgagaggatccagaatccagatctctg

SEQ ID NO: 585414 - DNA, 74 bp, Homo sapiens
ttgttttgaagcacctacactggcaacattagatccacctcatacaggagtatgctgctgctgttccgctttgc

SEQ ID NO: 585415 - DNA, 100 bp, Homo sapiens
agatgacatgccagcccagactttcataatgaaatacgtgactgatgttggtgtcctgcagcgccacgtttcccgccacaaccaccggaacgaggatgag

SEQ ID NO: 585416 - DNA, 95 bp, Homo sapiens
agtgtcgcctccacgagcgggcgctgctggatgccgagcgcctcaagcgcgaggttttccagaagagattcaatggctcagtaagtttcttccgc

SEQ ID NO: 585417 - DNA, 100 bp, Homo sapiens
cccgactcctggggaggctcccggagttgttggaaactttaacaaatccataatcttctgctgactctcaacttttcctggaaaaaatggatcattccca

SEQ ID NO: 585418 - DNA, 101 bp, Homo sapiens
gtgctgccacttttcagccatggccacaagttgctgattgttggaggttcttttggtcttcgtgagttttctcaaatccgatatgatgctgtgaagagtaa

SEQ ID NO: 585419 - DNA, 75 bp, Homo sapiens
tggacgccggaagccgggaaatggggacggcaaaacagaacagaaaggcggagataaaaagaggggtgttaaaag

SEQ ID NO: 585420 - DNA, 75 bp, Homo sapiens
ggggagcacttcctggacccaggaagggagagtcttcttccaagacgagctcatctgcgcctttgtttagaacgc

SEQ ID NO: 585421 - DNA, 82 bp, Homo sapiens
cacctgtgacgatgagccagagacctacgtggcagctgtgaaaaaagccatttccgaaggaggggatcaatgctcagtacag

SEQ ID NO: 585422 - DNA, 75 bp, Homo sapiens
tcgcctgcgccccgcacccctccgagcagcccggggatccagcacgcagactcagcccgcctgcacccaggtgaa

SEQ ID NO: 585423 - DNA, 100 bp, Homo sapiens
cgctttaccacgacccagatcccagcggaaaggagcgcgcctctttttggcttggggagctgcagcgttcgggtgtgggccgaagatatgctcatgtggt

SEQ ID NO: 585424 - DNA, 80 bp, Homo sapiens
cgcccggctgccgggagccgacagcttcgcgccggcctcccgcgacgatgcccctcaacgttagcttcaccaacaggaac

SEQ ID NO: 585425 - DNA, 100 bp, Homo sapiens
aggtacacagatgaggaatggtcccagaccctcatgacggtcaacgagttcatcagcaaatacatcgtgaatgagtgtcactactccatccagaagggag

SEQ ID NO: 585426 - DNA, 75 bp, Homo sapiens
accagttcacccaggccctggaccgccaaacaggaactacatattgtccataagtgcttcatcaggactcatcgc

SEQ ID NO: 585427 - DNA, 97 bp, Homo sapiens
ttctaacgctgcctttgctttaaaacagtattacttgcgtgtaagaagaagcttgggaagctgccacctcagtatgccctggagctcctgacggtct

SEQ ID NO: 585428 - DNA, 51 bp, Homo sapiens
cggccgtctctggagagcagcagccatggctcgtggtcccaagaagcatct

SEQ ID NO: 585429 - DNA, 75 bp, Homo sapiens
ggcccggagcccccagcgcagcggccgcgggtctccaactgaattccttgaagagaaaatggcctaccaggaata

SEQ ID NO: 585430 - DNA, 99 bp, Homo sapiens
ctgctggccaaatttgaagagaatgcgcccgcacagtccatcggcatacggagacaggctgaagccgacgtagcttctctgaacagacgcatccagctg

SEQ ID NO: 585431 - DNA, 83 bp, Homo sapiens
gcttatactcctcccagtgacgggtctggagtgcgtgggggaccggctgttggcgggactctatgctggtatcaagttcttcc

SEQ ID NO: 585432 - DNA, 75 bp, Homo sapiens
gcgtgatgaaatgctgggacttgtgcccatgaggccagtgaagaagcaaaggaagacatgaaaattgacgctcat

SEQ ID NO: 585433 - DNA, 99 bp, Homo sapiens
tgatgagttcctacaagtgaaaaatgtgctgaaagatggtcccgcagctcaggatgggaaaattgcaccaggtatcctttgtgtggctgatcagtgtca

SEQ ID NO: 585434 - DNA, 136 bp, Homo sapiens
gtttaacctttctgccaatccagagtcaagcacaatattccagaggaactctcaaacagaaggtaaagcttcagcgactgaaggagtgtggactttttgaatttcaagaacagtaaagttggaacacagcagaggg

SEQ ID NO: 585435 - DNA, 100 bp, Homo sapiens
ttttcgttggtggtgttcagttgtggcggttgctggtcagtaacagccaagatgctgcggaatctgctggaaaagccttgaagcatactgctcagaaatt

SEQ ID NO: 585436 - DNA, 100 bp, Homo sapiens
agcgagccgatcctcagcgtcctgatgtggggggtgaaccacacggtagatgatgagctggagatcaaggcctactatgcaggccacgtgctgggggcag

SEQ ID NO: 585437 - DNA, 100 bp, Homo sapiens
ggtagaaggcaactgtgctgatgaattactacaaaactcccatcgcgtcgtggaggagtactttgtggcccccccagtttcactgttacatgccttgaag

SEQ ID NO: 585438 - DNA, 96 bp, Homo sapiens
tgagtccaccagtgtggcatgggcatgtaaggtgcgcggagggactgcaccttctccatcaggtgcagaaggtatctgatgtgtagccatgcagaa

SEQ ID NO: 585439 - DNA, 89 bp, Homo sapiens
cggcttcggagcgggagtgttcgttgtgccagcgactaaaaagagtctttaggcccagtgggatttatgaaaagtgccatctctttagc

SEQ ID NO: 585440 - DNA, 92 bp, Homo sapiens
actccaggacagcatccaggcctcattggacagcattcgagggagtaccctgacttctaccggaagctctacggcctcttggacccctctgt

SEQ ID NO: 585441 - DNA, 98 bp, Homo sapiens
ggaaactaggaagaggaaattaactatctgtacttataagataacgagtgaggactcgctgtgtgcactcggatacagcagtgaataaaaggacaaaa

SEQ ID NO: 585442 - DNA, 100 bp, Homo sapiens
aaaaaatcccaaggtctgcaaagaacccaacgtcttcctcatcttcagccatggactgcagggctgcctggaggcccagggcgggcaggtcagagtcacc

SEQ ID NO: 585443 - DNA, 100 bp, Homo sapiens
aagaaagtgatcataggagaaaaccatttcagataacaacgaacttgatgcaagtgataggtttgccaaggtcagacctctcatcatccggatgaactgc

SEQ ID NO: 585444 - DNA, 97 bp, Homo sapiens
attttggtagagaagaatgaacattgtattgagaacaatatagatttgcaggagccagatgaccaggatgccccagatgagcatgagccctctccat

SEQ ID NO: 585445 - DNA, 75 bp, Homo sapiens
gcgcgccctgcctgagaaggagcccctcgtcaggcagctgttgtgctgtgtatggacgtgggctttaccatgagt

SEQ ID NO: 585446 - DNA, 75 bp, Homo sapiens
aagatgatgctccaagaacaatagcttgccctcataaagaaataatgcaaaaggtgtcccaaggctcctgaccag

SEQ ID NO: 585447 - DNA, 80 bp, Homo sapiens
ccgcctgaggaggcgagctagccgggagttacaccgccaccgccagacctgggatgacgaactggagaagtctgctgcag

SEQ ID NO: 585448 - DNA, 87 bp, Homo sapiens
tgtctcaggcttccatgcagcctgccttaccggttggcaacaatgagtaaaccagaattaaaggaagacaagatgctggaggttcac

SEQ ID NO: 585449 - DNA, 128 bp, Homo sapiens
tggttcatcccatcagcctggattggtgaaactgaatcacaggagatatttccaggctatctacaaaatggtaggcactgtgatcatgatgaaaatgaatgaggatggcctgacgcctgagcagcgag

SEQ ID NO: 585450 - DNA, 75 bp, Homo sapiens
gcaaggcccaatgacccaggcggctcctggcgacctccctgctgcagggggccctcccagcggggccatgccctt

SEQ ID NO: 585451 - DNA, 50 bp, Homo sapiens
ccacaatgcatcgctggaagtagccagctgaccaactgactgaagagcag

SEQ ID NO: 585452 - DNA, 100 bp, Homo sapiens
agaattcacttttactaccccaaagtttgattccatgcaagcatgttttttgctatgactgtgctattttacatgaaaaaaagggagataagatgtgtcc

SEQ ID NO: 585453 - DNA, 75 bp, Homo sapiens
agccactgttcggttaaaggagcctcctgtggatatctgtctaagtaaggagcaggagcagtgacttcacctgag

SEQ ID NO: 585454 - DNA, 88 bp, Homo sapiens
cagaggtgcttgtaccgtgatgtgatgctagagaacctggctctcatatcctcgctgggaatcagtgacgttcagggatgtgactgtg

SEQ ID NO: 585455 - DNA, 98 bp, Homo sapiens
atggctcactgcagcttcaccctgggttcaggtgatcctcccacttcagcctcttcagtaactgggactacagatctgggttggaatttgcccctgac

SEQ ID NO: 585456 - DNA, 97 bp, Homo sapiens
ttcatgggcagcaccatcgagccagaagcagtatttgtcctgttgatattcactgatggactccaaagaatcattaactcctggtagagaagaaaac

SEQ ID NO: 585457 - DNA, 75 bp, Homo sapiens
gtatccatttgttgttcttaacatttctgttgattcagaggtctgcggggtttccgagaggctcgccgggatttc

SEQ ID NO: 585458 - DNA, 75 bp, Homo sapiens
taccaggcgaagctggccgagcaggctgagcgatacgacgggactacttctgatgaagaaagtggcataattaaa

SEQ ID NO: 585459 - DNA, 74 bp, Homo sapiens
aacattgttcctggaacgccctctttttaaaaaagggtgcctctgccaactggtggaatcatcgccacttccag

SEQ ID NO: 585460 - DNA, 97 bp, Homo sapiens
gaaaattggatatagtatggaaaacaaatctaggtgaaaggggaaggttacagaccagccaacttcaaagaatgaacgtgctggccaaagcgctcta

SEQ ID NO: 585461 - DNA, 75 bp, Homo sapiens
cggaatgaagaggttgtcctaattccagcactgagttattcaagtcaaacaacgttgaaatggattgggtgttga

SEQ ID NO: 585462 - DNA, 51 bp, Homo sapiens
cctcccaaagtgctgtgattacagcgatgcggtttcactatggtgtccagg

SEQ ID NO: 585463 - DNA, 100 bp, Homo sapiens
gcgctccttctgaattggcagcgaggtcgcggcaggttcgagctcattgctatggacagtgctatcaccctgtggcagttccttcttcagctcctgcaga

SEQ ID NO: 585464 - DNA, 85 bp, Homo sapiens
ttccccttcctagaaggaccaagatggcagcagtgactctgctggctttggcgtatacacagcttggatttacactgggcaacgt

SEQ ID NO: 585465 - DNA, 97 bp, Homo sapiens
aaagccctgaggctgctggtggagctgaacaagatccctaccgtgcgcgccttccttttgggcgtctctggccgagcctctttttgtggaaaacgac

SEQ ID NO: 585466 - DNA, 75 bp, Homo sapiens
gcagcggcaacatccagcggatcagccaagccatggactcccgaaaaattgaccaggaagggaaaatcccagatg

SEQ ID NO: 585467 - DNA, 100 bp, Homo sapiens
tgggaacaaattgtcatccgtggttccaagtgtctataagaacctggttcctaagcctgtaccacctccttccaagtgtgttctaggtcagtggcttcaa

SEQ ID NO: 585468 - DNA, 100 bp, Homo sapiens
aacgtatctcccggaaaacttcacatactcaccatacctcccctgtccagaaaagctgccttatatgcccttaggatattaccccatcatcagaatactg

SEQ ID NO: 585469 - DNA, 50 bp, Homo sapiens
agattctcagggcaacccagatctcaccttttggaaaaaatggatccaac

SEQ ID NO: 585470 - DNA, 101 bp, Homo sapiens
gggggaggagggaaagcggcgagtaagatggaagatgaggaggtcgctgagagctgggaagaggcggcagacagcggggttgctgaaaagccaggagtcaa

SEQ ID NO: 585471 - DNA, 75 bp, Homo sapiens
agcatttcctcctgacggctgtacttgagcagtcacctggcacagacacgttggtcgtcattgcctccgagccca

SEQ ID NO: 585472 - DNA, 90 bp, Homo sapiens
acagaacttcacaggagaactctcctgcccttttaggagtgcaaaaaggtgcactttacaggtccccgatgaaccaagagaaccctccac

SEQ ID NO: 585473 - DNA, 83 bp, Homo sapiens
cgatgtttcaatattggaagcgctttgatttacagcagctgcaggaaacccagcgtttgctggcagaaccagttcctggcatc

SEQ ID NO: 585474 - DNA, 75 bp, Homo sapiens
acttcattggccacctacagaaacaaaatgtcaacaaattgatgggctgtacaagaagcatgatgccagcatctg

SEQ ID NO: 585475 - DNA, 50 bp, Homo sapiens
tacttgaattttctaaggtgtcattaggtgtcagttgtacccgaggcgtt

SEQ ID NO: 585476 - DNA, 122 bp, Homo sapiens
ctgttggatgagttttggaagaatcctccagttttagctcctacttcaacagcatttccttagtccaatgatgcatcagcagcctccttctcagcaatacaatatgccacagggaggcggac

SEQ ID NO: 585477 - DNA, 97 bp, Homo sapiens
aagatggagctcagcaaggagatccgcgaggcacacctggccgcactgcgcgagcggctgcgcgagaaggggtcgggccccggctcagtggtcccag

SEQ ID NO: 585478 - DNA, 75 bp, Homo sapiens
gttactcttcagggatgtgctgatctcctaccgatatcttattattgctctcggaatccagctggactatgagaa

SEQ ID NO: 585479 - DNA, 82 bp, Homo sapiens
ctttagcaccatgactaagcataaggtgtttcccattaaacactaccaggacaaaatcaggccttacatccagctgccatcg

SEQ ID NO: 585480 - DNA, 100 bp, Homo sapiens
tcacttccgactagtggagtttttagccttttaacattcaaggattaggcagtgctttcctcagtgctatttttcttgccttagcgacataccagtctct

SEQ ID NO: 585481 - DNA, 82 bp, Homo sapiens
gctgggccgcaggggcgcgcagcgcggggagctgccagtgatgcagccaacacgaacggttgtcatgtgtaacacaactttc

SEQ ID NO: 585482 - DNA, 80 bp, Homo sapiens
cgcgtcccgctcgctgggagagaggtacctctccttttccctctccctttccctaaggccgtaagttcatcatcgccaac

SEQ ID NO: 585483 - DNA, 74 bp, Homo sapiens
ggcgaaaattggatgtgaaaatgaagccagaccgagtttaagctatgaagaaggacatccctcacactctgaaa

SEQ ID NO: 585484 - DNA, 100 bp, Homo sapiens
aactgaccattcagaacagacaggcccagcaaatgaggcaggcaattctaagatcttccacaaaacatctagccatctaaaatggagagatgaatcattc

SEQ ID NO: 585485 - DNA, 50 bp, Homo sapiens
ctcacccacaccggaatagtaaggagggttattttggagctgttggagca

SEQ ID NO: 585486 - DNA, 100 bp, Homo sapiens
caatgctgcgaaagctgccaaaagtgacatgcagtcaccaggtgtcaagatgctgcaagtacataggactggactgggcaggctgggggtcagcctctcc

SEQ ID NO: 585487 - DNA, 83 bp, Homo sapiens
aaattcttcaagacattgcttcgggaagccatccatttagccagtgttctaagaacggaagcatctgggctggatggaattta

SEQ ID NO: 585488 - DNA, 89 bp, Homo sapiens
ccagaaaccacaacattgacagttggtggaggggggaaccttgtgcccaccccaactcgaggttctgcacccctgccagccagtgcccc

SEQ ID NO: 585489 - DNA, 100 bp, Homo sapiens
ctccattggatttaaaagacagtcctcgtcagcactgactttcagctatggaatcgagccccccaagatgaacccagtggtggagccactgtcctggatg

SEQ ID NO: 585490 - DNA, 75 bp, Homo sapiens
ggctgctgggcaggtcatgagtcaccatgggtgtcaaattgagaaccaggtagatccccaccacctacagtaaaa

SEQ ID NO: 585491 - DNA, 73 bp, Homo sapiens
tcgatgtgcggcgcccgctgtataaggtgatcccaaaacgaaccaacagaccaggcatcagcacaacagaccg

SEQ ID NO: 585492 - DNA, 82 bp, Homo sapiens
ccgagttatgcccaccctccaactttgcgacggaaatgtgtcatcgaaagccagacaaactcaaccagaactcccagctgag

SEQ ID NO: 585493 - DNA, 88 bp, Homo sapiens
gagtagcaagtggccatggggagcctcagcggtctgcgcctggcagcaggccttctctcagctccttggcctactgccgtggccttgg

SEQ ID NO: 585494 - DNA, 95 bp, Homo sapiens
cacaagacgactcaataggaggaagtgtgggactacaatactggcagagtgggagcaccattagtttgctgtgaaatcaaattaaaaaactggga

SEQ ID NO: 585495 - DNA, 50 bp, Homo sapiens
tgtactttccatttgccttcctggagtcgacttcaatgttcctatgaaga

SEQ ID NO: 585496 - DNA, 100 bp, Homo sapiens
gccttgaaaaagctgccctgagacggtgtcccgccgaaaggaacgggctggagttaaaatggttatgattcaagacgggccgcagaacactggtgctgac

SEQ ID NO: 585497 - DNA, 71 bp, Homo sapiens
gattccaagtaactcttatttggccctgccctgggagaagccctgccacacgtcgtgcccacgctgagggc

SEQ ID NO: 585498 - DNA, 110 bp, Homo sapiens
catgagtgatgtggaggaaaacaacttcgagggcagaatttcaacactacacttgcacaatgtctttgaaaccaagagtagtagattttgatgaaacatggaacaaactt

SEQ ID NO: 585499 - DNA, 97 bp, Homo sapiens
ttgcccagtctgagcaggagagcctgctgcagcaggcccaggcacagttccgaatgaagttaaagtctgacacggctgctgcagctgtgcgccaaat

SEQ ID NO: 585500 - DNA, 50 bp, Homo sapiens
aaaagcggaagtttgccacacgggttaccttcccgccaatgtagaccgga

SEQ ID NO: 585501 - DNA, 88 bp, Homo sapiens
ccatggccgagcgccgcgccttcgcccagaagatcagcagcttggaactgcagttggctttttgctaccaccagttttagtacccaac

SEQ ID NO: 585502 - DNA, 75 bp, Homo sapiens
acccggttccccggcccacagtgggggtgtgcaaacccgagagaactgggtttttagaacttcagccataaaaat

SEQ ID NO: 585503 - DNA, 100 bp, Homo sapiens
gtgcgctcgatccagcaccatggggaagcgggacaatcgggtgatttcgccgccagctttctgaaccctgtaactcctttcctcctttgccgacgatgcc

SEQ ID NO: 585504 - DNA, 100 bp, Homo sapiens
aaactgaatgagacaatggaacgacaaaggacagagattgcaaggctgcagaatgtactagacctcactggaagtgcttcgccgacacgaggtgaccatc

SEQ ID NO: 585505 - DNA, 50 bp, Homo sapiens
tgtaagtgcagatggaacacaacagggcacagacagaagcttgatgactc

SEQ ID NO: 585506 - DNA, 83 bp, Homo sapiens
gagaaaaccagctgagacagggcgccacttactagtgtgccggtccaacaaaagcccttgggtctgtttgacttgttcaagtg

SEQ ID NO: 585507 - DNA, 75 bp, Homo sapiens
gggcaacagtgtctcccgctctggaagacattctgcactgcggggccacctacagatgctcctgcagtggacaca

SEQ ID NO: 585508 - DNA, 100 bp, Homo sapiens
aaattgtggaaaagtcactctggcaagaggcgcagatgttccagagattcctggagatcttactcttaagacgtgtggcagtacagccagtatgaaggtt

SEQ ID NO: 585509 - DNA, 83 bp, Homo sapiens
ggccaacgccgtgttcgacatcctggccgtgctgcaggcatccgtgggctctgagaagctctttgcgccgggaaccgataaag

SEQ ID NO: 585510 - DNA, 75 bp, Homo sapiens
gcaatcgccaccgctttcctggaacttgaggtatgtcgagagtaccaacgtggcaattgcaaccgaggagaaaat

SEQ ID NO: 585511 - DNA, 100 bp, Homo sapiens
attttattgcattgattgtgcgttctcgattttacagaggaaaagcttttgacatcacctatgtgcgtctcaagttccacaccagccgcccggagagctt

SEQ ID NO: 585512 - DNA, 123 bp, Homo sapiens
gcaggagcagcccgcaccggacaacttgcgagccatggggctggcggatgcgtcggggaggatttgatgaagatgttaaagcgaaagtggagaaccttctcgggatttccagcctggaaaaaa

SEQ ID NO: 585513 - DNA, 48 bp, Homo sapiens
tcaaaagatatggcgccatatcagggatttctctctgatcaaacggac

SEQ ID NO: 585514 - DNA, 83 bp, Homo sapiens
gctgaagcgactgagtccgcgatggagactgtgccctgtccacggtgcctcctgcatgtcctgctgccctgagctgtcccgag

SEQ ID NO: 585515 - DNA, 104 bp, Homo sapiens
gcccgcgccgcgcgccggcggcaccatgaagtcagcggaggaagcatcaagatggtgctcatgtggaccagtggtgacgccttcaagacggcctacttcctgct

SEQ ID NO: 585516 - DNA, 71 bp, Homo sapiens
caaagcagcgtatcgatgagtttgaagcaatgtgagagcaaagagcaggtggccaactcagcttttgtgga

SEQ ID NO: 585517 - DNA, 100 bp, Homo sapiens
cgtctgagacttggtgggaacggaccttcctcttaggttcaagtatgtcctggtcaatatgtccacgggcttggtagaggaccagaccctgtggtcagac

SEQ ID NO: 585518 - DNA, 75 bp, Homo sapiens
acccgaccaccggagaattcctggggcgcaccgccaagagctggggtaagaatgattgatgttggctgatattgg

SEQ ID NO: 585519 - DNA, 98 bp, Homo sapiens
agatgtcgcagacggccatgtccgaaacctacggggttcaactagatatagcttcacaatctctggatcaagaaattttattaaaagttaaaactgaa

SEQ ID NO: 585520 - DNA, 95 bp, Homo sapiens
ctcggatctgctggacgaggtcttcttcaacagcgaggtggacgagaaagtgggcgccctgcgtccggcagaggaggcgagcatcccgctcaggt

SEQ ID NO: 585521 - DNA, 90 bp, Homo sapiens
cggacttcatctcattgctcagcgcggacctagacctggaatcgcccaagtccctctactcgcgagtgaacatctttctcaccgggagac

SEQ ID NO: 585522 - DNA, 82 bp, Homo sapiens
tcggaatgtgatcacagagcctatttacccagaagtagtccatatggctcctggatttggatttggaattgcaatatctggt

SEQ ID NO: 585523 - DNA, 74 bp, Homo sapiens
ttcgtgtgcggacagtgtgtgtgcagcgagggctggtactggtgtggcatactcggacagagaagcccaagatg

SEQ ID NO: 585524 - DNA, 131 bp, Homo sapiens
acagagtataacaatcagtgccgagcaattgtgatgagatattctgctgagtggaagtccaagccttatgcatttgatcgggtgttccagtcaagcacatctcaagagcaagtgtataatgactgtgcaaa

SEQ ID NO: 585525 - DNA, 83 bp, Homo sapiens
taagattcttcaaggtggggttggcatcccccacatacggtaacacaagtggcaagacagccgggaacccctaccccatcccc

SEQ ID NO: 585526 - DNA, 82 bp, Homo sapiens
aggatatacagcagcgaggaggggaagagaggagcgtgaggatcatccccggagaggacgggaggatcggcagcacagggaa

SEQ ID NO: 585527 - DNA, 98 bp, Homo sapiens
gattgactgctgctggggctgggctcgccagtcttggggacagtgtcagcgatcgaatcatcaatttagttgttggcagcttaacatccttattgatt

SEQ ID NO: 585528 - DNA, 100 bp, Homo sapiens
tccaaatgagacccttcctggagaaccgggcccagcagcactgggagagctacagtccatggccgaccaagaaaagatctccccagctgcccttaagaag

SEQ ID NO: 585529 - DNA, 100 bp, Homo sapiens
gttcagaaaccttttctccggctttcaaaagaagggtatttctcaagctgccagatacgtttaccaacgactcatcaacgacgggattttgagccaagcc

SEQ ID NO: 585530 - DNA, 100 bp, Homo sapiens
aagagtgtgttgtgaacgaagtcagaatttcctgtgttccctttgccgctcctggagttcactgatacgtttgaaatggtttctgaagatgaagatggga

SEQ ID NO: 585531 - DNA, 100 bp, Homo sapiens
ctaaagaatgtcttcgctgcccttgttcagcagtgacatctacaggcagctgctctataaaacattgagctcaaggtggaagtagaaagtctgaagcggg

SEQ ID NO: 585532 - DNA, 100 bp, Homo sapiens
ggcatcgacctggggaccacctactcctggtgtgatgaatgcagactctgctaccattttggctgtttggatcctcctttgaaaaagtctcctaaacaga

SEQ ID NO: 585533 - DNA, 100 bp, Homo sapiens
tccctttctaggcagcagcccagacgcggcacagagagggcctgggagcttgctgcagcttcaggtgcagaggccaagaccgttttgcccaagaaggaga

SEQ ID NO: 585534 - DNA, 73 bp, Homo sapiens
ggtcatacaccagtactaccaaggacagcttttttcctgcaagggcccagctcctaacatgcaggtgtcacca

SEQ ID NO: 585535 - DNA, 73 bp, Homo sapiens
gtagtccgacgcctggggcgatggatccgtttacggagctagtgagacctgcaacgacttccacccgatgttc

SEQ ID NO: 585536 - DNA, 100 bp, Homo sapiens
aactccacctctgtgaagagaaagcaaagtcctattccaacagtcatgaggtatgatctcgtgaaatcttgagagaaactgaatgacgaatgaaactatt

SEQ ID NO: 585537 - DNA, 100 bp, Homo sapiens
tgaggccggacggggcggacggcgacgcagcccgcggcagaaggtgaaaggtgtagcagtcactcggcctacacccacagcatcgaccttgtgaacccag

SEQ ID NO: 585538 - DNA, 82 bp, Homo sapiens
cccacgcaaccccagatccatttacactttacaaaagaagatgctgatatgctacaacacggatgaacctggaggacgtggt

SEQ ID NO: 585539 - DNA, 75 bp, Homo sapiens
gtgctgaccagcggcggggatgctcaagtcaccaggagactaaagtccatcaaaaacatccagaaaattaccaag

SEQ ID NO: 585540 - DNA, 100 bp, Homo sapiens
tctgtttggggctaccttgagccaggagggcctccaggggcccattgtgctgggcagacgacaaaaagctttggggaagaaccgcagtgctgatttcaac

SEQ ID NO: 585541 - DNA, 83 bp, Homo sapiens
gaaagtttgcagaagtggaaggagcagaacgtgagggtgtaacttacaaaaaggtgagaagccctaccactgcaactgggacg

SEQ ID NO: 585542 - DNA, 100 bp, Homo sapiens
taccacctacctgagtatgtcgaaaatctctgcccctggaggagaaatagaagaacatccagtcatggataaaaatgagctggttcagaaggccaaactg

SEQ ID NO: 585543 - DNA, 83 bp, Homo sapiens
gtacaatgaaggaatcctaattgtatgggacccatctgtataccactcagatatcccaaaggggaacgcccttttgcttgtga

SEQ ID NO: 585544 - DNA, 74 bp, Homo sapiens
ctctgtttcagccatcttcgataaaggcaaaaaggttgggggccgtcccgctcctaaggcaggaagatggtggc

SEQ ID NO: 585545 - DNA, 100 bp, Homo sapiens
atgggaaaaaggtgacgtggtattgctgtgggccaaccgtctatgacgcatctcacatggggcacgccaggttctacaagctgcacgagcggaggtgtga

SEQ ID NO: 585546 - DNA, 113 bp, Homo sapiens
acattcagtgggagagccgtacctatccttatcctggaaccccaatcactcagcgcttctcgcacagacacagagcacagccaagacctgcagagtgccctcatccggctgga

SEQ ID NO: 585547 - DNA, 126 bp, Homo sapiens
ccgcagagctggccgcccagggggagtcgcagagtttggaagatctctctaacacctctcggccaatatgcagctgacccccaggataagcactggctggctgagcagcatcacatgcgggcaaca

SEQ ID NO: 585548 - DNA, 100 bp, Homo sapiens
gctgtatgacgatgtggaacccagagatgactccagccccagccccaagggcagagatcggaagccagtttctacacacttgcctctcgctacagcgtcc

SEQ ID NO: 585549 - DNA, 98 bp, Homo sapiens
cagagtgtatgcactttactacaaagatggacttctctgtacagccaaaattgcctggaaaagagcagtgagaggagtccgggagatgtgtgatgcat

SEQ ID NO: 585550 - DNA, 101 bp, Homo sapiens
ctttattatggctgctgttgtccaacagaacgacctagtatttgaatttgctagtaacgtcatggaggatgaacgacaggatgtaatccctgttcattact

SEQ ID NO: 585551 - DNA, 88 bp, Homo sapiens
ttcagataggctgcaaacaactccggatccttaagatgcaatactgcacaaatatttccaattcccagtgggaaaagctacagaaaga

SEQ ID NO: 585552 - DNA, 75 bp, Homo sapiens
cctcagcctccggagtagctgggactacagggatcagtgacattcagggatgtggccattgacttctctcaggag

SEQ ID NO: 585553 - DNA, 100 bp, Homo sapiens
ggaatatgaaggcttccccgtcccggtctccttccgctaccactgccagctgtactccgagtggagaaagaccaaccagaaagttcgcctgaagatccgg

SEQ ID NO: 585554 - DNA, 50 bp, Homo sapiens
ctacctgatgatgaattcttcaaaggctttcagtccagtgtaaagctgtt

SEQ ID NO: 585555 - DNA, 75 bp, Homo sapiens
ccagaaagagattgggtacttaatgatggctctgagagattcctctgcgaatctgtttttagctatcaagtggca

SEQ ID NO: 585556 - DNA, 75 bp, Homo sapiens
ttgtcttgcatccagacacagagcattctaaaggtggctttttctcaagtatattttccagtctgtttggaactc

SEQ ID NO: 585557 - DNA, 74 bp, Homo sapiens
gttacgcatatatgacttgaacaaacctgaagcaggcagctgagtatgtcccagagaaggtgaagaaagcggaa

SEQ ID NO: 585558 - DNA, 100 bp, Homo sapiens
tagatggttttgaaaagttcatgctgtcccttcattgaattttaggtaaagattatagttcccaacagcacagcaggtctgataatagggaagggaggtg

SEQ ID NO: 585559 - DNA, 74 bp, Homo sapiens
aacttcgctgtggtgaagctggggcggcaccggatcaccaagacggagcctcctttggaaaatctggcaactgt

SEQ ID NO: 585560 - DNA, 83 bp, Homo sapiens
cccgcgttcacagccccagcgcaggactttctgcagggcgactgcaccaaagcgaaacagaagctgaactggaagccccgggt

SEQ ID NO: 585561 - DNA, 83 bp, Homo sapiens
cccgagcccaccgcgccgggccccggacgccgcgcggaaaagcatttaaatcaaacggtattgagatggattgggttatgaaa

SEQ ID NO: 585562 - DNA, 90 bp, Homo sapiens
caaagtcttgccacaagacaaagaatactataaagtaaaagaacctggtgaaagtcccatattctgggaaaatggtatcatcggaggcaa

SEQ ID NO: 585563 - DNA, 75 bp, Homo sapiens
tctgttgggcttggaacagggctgcacacctttctgctttatctggtgatcatggagctcagcttggtctccatg

SEQ ID NO: 585564 - DNA, 75 bp, Homo sapiens
aagatgattctactgtagcctgccgtttctttcacttccggaggcttcatgaacagttgactgagtcagaacagg

SEQ ID NO: 585565 - DNA, 100 bp, Homo sapiens
ccctcgtgaagaacctgaaggacacactagggcaaagtgcacctggagctgcggctgagcgaggtcatcacagacactggggtcgtctgccacaagctcg

SEQ ID NO: 585566 - DNA, 89 bp, Homo sapiens
tctgcccctgtcaaatcattccagagtaaccagagagcacagagaaatgctggtgaaactggccaaacagaacaccaacaaggccaaag

SEQ ID NO: 585567 - DNA, 98 bp, Homo sapiens
tcaatttcaggaagtcactgtaaatgtgaaaaaccccttccatacggctggggacttcagttagatactgatttagaagaacttcagaagaccaacca

SEQ ID NO: 585568 - DNA, 75 bp, Homo sapiens
agaaaaagctttcttctgttcgtcagaaatttgatgttgcccacattcccaaatcagatgctttgtactttgatg

SEQ ID NO: 585569 - DNA, 100 bp, Homo sapiens
aaagccagttatccacggactggaagatcaaaagagggagtcgtaagaaagcagtgggagttgaagtcattgtcaagtgcttgcgatcttttacaagaaa

SEQ ID NO: 585570 - DNA, 83 bp, Homo sapiens
cggcagagcaaggggcttacgcagaaggacctggccacggaatcgggcgcctgattgctgagtgtcatctcaaccccatcatc

SEQ ID NO: 585571 - DNA, 100 bp, Homo sapiens
ccgcgggctccatcagcatggctgagccacacccactcgcccgggtctatggccacggtcggagagtggtcctgtgtgcgctgcaccttcctgaacccgg

SEQ ID NO: 585572 - DNA, 100 bp, Homo sapiens
cagcacaccgtgctccaggggcagaggctcatagcacccagacacttttgaaccccaaaaattcttccagacatcaggcctctccaagatgtcagccaat

SEQ ID NO: 585573 - DNA, 90 bp, Homo sapiens
gtggagatgaagcctaagaatatgatcagcatggcggacaccgacctgttcatggaatgtgaggaggaggagttggagccatggcagaaa

SEQ ID NO: 585574 - DNA, 124 bp, Homo sapiens
agaggaggagatcctgggatcagatgatgaggagcaagaggaccctgcggactactgcaaaggactctgaaaaggaatcttgcccaagcagtgatgaagttgatgaggaggaagaagaggataa

SEQ ID NO: 585575 - DNA, 88 bp, Homo sapiens
tagctgttctcaaggcggattaattagcccaagaaacattatattcatactgaaactgttgaggagcccatggaggaagaagaagcag

SEQ ID NO: 585576 - DNA, 75 bp, Homo sapiens
tctctccaccttttgtcaattccagaatacaaagtctacatgttcaagtgcgtgtggcggtgctacagattgatc

SEQ ID NO: 585577 - DNA, 51 bp, Homo sapiens
cagcaaagaagtgctatctggaaagagagggtctgatgctgagtcggctgg

SEQ ID NO: 585578 - DNA, 100 bp, Homo sapiens
ccgctccggaggaaacggagcgctgccctgcagcccgagcccatcaaggtgtacggacaggggaagttgcctacacggatcacagttcccctctctgtga

SEQ ID NO: 585579 - DNA, 83 bp, Homo sapiens
gctgccatgacaaccaggcaatgctggatagataccgaattcttatcacaaagcctagtgtgttaattgtaacctacaaggag

SEQ ID NO: 585580 - DNA, 101 bp, Homo sapiens
gtgctcgcgctactctctctttctggcctggaggctatccagctgagtgacctgcaggaagaaggcaagaatgccatcaactcaccgatgtcccccgccct

SEQ ID NO: 585581 - DNA, 82 bp, Homo sapiens
cgcggttcttctccagcgccctggcctccctcaccttggacacctcgcttgggtgagaagccctaccactgcaactgggacg

SEQ ID NO: 585582 - DNA, 100 bp, Homo sapiens
cttgtgacagaatatgccaaaaatggagaaatttttggtgatgggcagaatctgtttacgaaagacgtgacagtgatcgagggagaggttgcgaccatca

SEQ ID NO: 585583 - DNA, 83 bp, Homo sapiens
ttacattctctcggccagcgcctccgcggtacatgtcccagagcaagcacacggaggcccgggagctcatgtactcgggagcc

SEQ ID NO: 585584 - DNA, 100 bp, Homo sapiens
atgagtatgcctacctcaaagccatcatcttctttgacccagcactggatgtgtgtgagaagtggggagaaatgccaccactacaacccaaacatatgag

SEQ ID NO: 585585 - DNA, 98 bp, Homo sapiens
ccccttcgtctccccagcacccactctctgggggcaggtgggcccggtgacaggtgaagttcatccacgaccagacctccccaaaccccaagtacaga

SEQ ID NO: 585586 - DNA, 75 bp, Homo sapiens
catgtggctgccttgggctctgttgcttctctgggtcccaggtaattttaaccaatcagatgacaacaaagattg

SEQ ID NO: 585587 - DNA, 90 bp, Homo sapiens
cccatctcataaaagaaatcatcttggtggatgactacagcaatgatcctcggagtgaggatgccaggtcatctccctctcagagacgta

SEQ ID NO: 585588 - DNA, 75 bp, Homo sapiens
gaagagaaggggaataagactgcatctgttcatatgagacgcagccgtagacaccagctccgaaatcaccaccaa

SEQ ID NO: 585589 - DNA, 90 bp, Homo sapiens
gaaagaatcccggccagacgtgcgaacagctccagctgggaaatttgcgagaatccccgatttatcattgatggagccaacagaactgac

SEQ ID NO: 585590 - DNA, 83 bp, Homo sapiens
tttctctgctgcaccgacctcgacgtcttgcctgtgtcccacttgttcgcggcctataggccctgaaaaggagcctttaaaag

SEQ ID NO: 585591 - DNA, 100 bp, Homo sapiens
tgctgatacagaagagatggatattgaaatggacagtggagatgaagcctaagaatatgatcagggccgcgttcgcaccaaaaccgtgaagaaggcggcc

SEQ ID NO: 585592 - DNA, 90 bp, Homo sapiens
ggacgtgccaaggcccaacagcagggtggagatcgtggctgccatgcgccggatacggattctgctctctttgctgaactcggttatttc

SEQ ID NO: 585593 - DNA, 78 bp, Homo sapiens
aggcatctaatgttcttagtgacattagtcaaatcagccggcaccaggagcagttcatccagatgctgaacgagcccc

SEQ ID NO: 585594 - DNA, 82 bp, Homo sapiens
ctgaatgtgaaaggaccgtgtgtgtcagaaaataaaatgctgaaccagatctggacgacaatgaggatgaggaggagcctgc

SEQ ID NO: 585595 - DNA, 87 bp, Homo sapiens
acaatttatcattgaataagtgttttaagaaagtggacaaagagaggagtcagcggagctgatccccagccacaggatgaagaagaa

SEQ ID NO: 585596 - DNA, 85 bp, Homo sapiens
ggaatcctcaaaatgctgtggctcttcttccagagaatgacacaggtgaaaggacatcgtccatatcaggtgatcactgctcgag

SEQ ID NO: 585597 - DNA, 100 bp, Homo sapiens
caacatgcgatgtttggaaatgatacaattacctgcacgacacatggaaattggactaaattaccagaatgcagggacctagaggatcaagacataatgg

SEQ ID NO: 585598 - DNA, 83 bp, Homo sapiens
aattggcgtttgtcatcagaatcagagggttacaattcaacaaacatggtgtgttgcgggtagaaggcttcttaacaccaaac

SEQ ID NO: 585599 - DNA, 75 bp, Homo sapiens
gttcaagaagaacactccagagcaccatatgaaggcggagtatggaaagttagagtggacctacctgataaatac

SEQ ID NO: 585600 - DNA, 76 bp, Homo sapiens
ggaaaatgttttgccacgtggatgtgaagatttcctctaaaaggtgtgatgaatgcagactctgctaccattttgg

SEQ ID NO: 585601 - DNA, 82 bp, Homo sapiens
tgcacccatctgtgtgactgtgtggtaccctctctggggaggcattatgcctgctcaacctgctgatgaacctgcagaaaag

SEQ ID NO: 585602 - DNA, 100 bp, Homo sapiens
gacattcacctgacttctgcagaacaggtgaggtggctttgaccccgggttgcccggccagcacgaccgaggaggtggctggacagctggaggatgaacg

SEQ ID NO: 585603 - DNA, 90 bp, Homo sapiens
gccaaagcccctttgaccccgctcacaagcatacggctgtcttggtgggtagtgacagctactgaaacacttgccttagggatccacatg

SEQ ID NO: 585604 - DNA, 96 bp, Homo sapiens
ggtcctcctggaggagatgctcgccttggggaataatcactttattgggcgaacctttcctacacacccatacttctctgcccagcttggagcagg

SEQ ID NO: 585605 - DNA, 135 bp, Homo sapiens
caaattttggaaaatgtgataaaaacaaggtggaagattcttccaaggaaccagtgcgaaggacagagcgggatgccaccagcttgtccaaagggaagttccaggagctcctggtgggcatcgttgtggagaatg

SEQ ID NO: 585606 - DNA, 90 bp, Homo sapiens
tccgcggcagggtcccgcatggcggcgcacaggaagcacgctctaagcgaaagacatgaggcctcagcctgaaatgaggttgttttgagg

SEQ ID NO: 585607 - DNA, 100 bp, Homo sapiens
ggagaagatgtggtggcttccgtttgttggtggaggaggtggcaggcctcggcggagccgggtgtgggctgagccctgcctgattgatgctgccaaggag

SEQ ID NO: 585608 - DNA, 75 bp, Homo sapiens
ctccgtgcccagatgctcataaggattgtcctctttctacaaaaggtacggaaaaaggaccagatcaatattgaa

SEQ ID NO: 585609 - DNA, 75 bp, Homo sapiens
cttcgccacttactttaatgagaagatctccattcctgaggaggaggagctctgtctaaacatcattccaacctt

SEQ ID NO: 585610 - DNA, 83 bp, Homo sapiens
cagcggggacttcggcggcggcgcctcaggcacctcggcccggactttaagtttgccatgtacccaccgtcgatgatcgcaac

SEQ ID NO: 585611 - DNA, 74 bp, Homo sapiens
aaccaggtatcaacagatcacatgtccatgactccagctcaggctgacttggagtttcttgagaatgccaaaaa

SEQ ID NO: 585612 - DNA, 100 bp, Homo sapiens
cgtctgcaagtccacagagaagcagtctgtgaagcagcgatacaggctagtgatacagagcgagatggactagccccagaaaagacatcaccagatagag

SEQ ID NO: 585613 - DNA, 75 bp, Homo sapiens
tttcaacatgcctctgacaatctctagtgtccagtggcattgcagagcacggatggttgcaggagccaactttta

SEQ ID NO: 585614 - DNA, 90 bp, Homo sapiens
cgagggccaggacaagaacccggagatgtgccgtgtgctgctgacccacgagatcatgtgcagtgccgtggaggtcccagcccccgctgc

SEQ ID NO: 585615 - DNA, 75 bp, Homo sapiens
aaaatggaatctgaaccctcagcagttttataccatgttccgtttttagaacttcagccataaaaatgggcagaa

SEQ ID NO: 585616 - DNA, 75 bp, Homo sapiens
ggggaccagtactctgccgagtgcggcgaggatggggaggcacgtgagagggatgaaatccggcatgacaggcga

SEQ ID NO: 585617 - DNA, 90 bp, Homo sapiens
gattggccagctgactgctcaggaagtaaaatcggttttctgtctcaactggtctctgacaagcctctgactgaatgtatccgtgctggc

SEQ ID NO: 585618 - DNA, 75 bp, Homo sapiens
cgatttgacgggcaaccaatcaatgaaacagacacacctgcacaggctgccaaacgagggattctttcatctggt

SEQ ID NO: 585619 - DNA, 75 bp, Homo sapiens
atggtctttgtgcacatttacatcaaggaaataatgcaaaaggtgtcccaaggctcctgaccagtgaacaaagat

SEQ ID NO: 585620 - DNA, 80 bp, Homo sapiens
ctgtcagagcccggggacggcgaggccctcatgtaccacacgtaagactttgaccccgacgcaggcttcagtgattgccg

SEQ ID NO: 585621 - DNA, 100 bp, Homo sapiens
aaatcatcaattacgaagtgaaaataaattgattttaatgaaaacacagcagcacctagaggatacaatccggatgatgattactcaaggcaatatgcag

SEQ ID NO: 585622 - DNA, 121 bp, Homo sapiens
agttcggcaataagtactggctcatgctcaacgagaaggaggcccagcaagtgtatggtgggaaggaggccaggacattcggaggaacctgagtgcctcagtcatcgccgtcaccatccag

SEQ ID NO: 585623 - DNA, 83 bp, Homo sapiens
cgcccaccctggctcaccgtgcggatctgcctccgcagaagtgcgcgtcccgggacgactggcgctgtgcgcgctccatgcac

SEQ ID NO: 585624 - DNA, 100 bp, Homo sapiens
tgatggttttatgcagaactgcgatttccaaatcgatagttttagagcctatctattggaattcctcgaactccaaaatgcaggctcaacagtaccagca

SEQ ID NO: 585625 - DNA, 83 bp, Homo sapiens
cttccgcggggcgctgggccgccagcctcggcaccgtcctttcctttctccctcgcgttagagctccacgcaggagatcggtg

SEQ ID NO: 585626 - DNA, 82 bp, Homo sapiens
gcagatattatcatagttgctgcaggaattacatgaacgacagccttcgcaccgacgtcttcgtgcggttccagccagagag

SEQ ID NO: 585627 - DNA, 75 bp, Homo sapiens
aacaacagaaaatggcattggaacagtgggaatcagcaattttgcacagatcccagctctcctgttggcttcgtg

SEQ ID NO: 585628 - DNA, 101 bp, Homo sapiens
ggttggcatctacgtgtgagcacccaaggcaggagactttgattaaagtgagaagcagccaagattccgggaagcgcgtctttctcctgtctcctccccaa

SEQ ID NO: 585629 - DNA, 100 bp, Homo sapiens
tagcacaactccggacacttgttttccagtgtgatcttacccttaaagcttgggaatgtaagacggacttagatattgcatacaaatttggaaaaactgt

SEQ ID NO: 585630 - DNA, 90 bp, Homo sapiens
atgactgcaaggtggagcactggggcctggaccagcctcttctgaaacactgggctcaaaagccaaaagtctctgagaacgactttgaag

SEQ ID NO: 585631 - DNA, 75 bp, Homo sapiens
atgtactctgacctgaatcctgaattttccttgatggtcaaaagattaagacatccacgacagcgatggcagttc

SEQ ID NO: 585632 - DNA, 75 bp, Homo sapiens
gctggggtggtggttccaatgagacagggcacaccaaactccatctgagctctgcgtgcctcttgctgtgcccta

SEQ ID NO: 585633 - DNA, 90 bp, Homo sapiens
agtagaacttatctactggatttccgtagtattgatgtatctggagtccatctttcaccatcttctcctgagattgtactggaccgtgac

SEQ ID NO: 585634 - DNA, 75 bp, Homo sapiens
acctatattacagattctattcatgaacaatgctatttcaaatctgaggacacagacctgccctacccaccaccc

SEQ ID NO: 585635 - DNA, 90 bp, Homo sapiens
ggatgctcgaggatgctgtccaggtgggcggccgcgggcgcgatgcggcactgcagaccttagctggatctccaaaatacaagtgaatca

SEQ ID NO: 585636 - DNA, 96 bp, Homo sapiens
gcagctggcgcacctggtgcgggccctctggaccctggagtacaccccgcagcacagccgcgacttcaaggctggacaccgccccccaaatcctgc

SEQ ID NO: 585637 - DNA, 90 bp, Homo sapiens
cccggagcagctgccacaatgggacatgtgcaataaatatttactgagctcctccgcgtgccagatagaatttccagtaatgctttgcaa

SEQ ID NO: 585638 - DNA, 100 bp, Homo sapiens
tgatggcgagcatgcgagtggtgaagcttcggggagttttgcctggctcacctgttactgaagaggaaccctgtcatgttcttccaacacttcattgaat

SEQ ID NO: 585639 - DNA, 50 bp, Homo sapiens
attcgggcatcttggctcctccttgagttatcctgaatacatgtctaaca

SEQ ID NO: 585640 - DNA, 101 bp, Homo sapiens
actgtgagcattatagtccagactgtgactcttcagcacccaaggctgctcaagctcaggaacctcagatagatgagcaggaagatgaagcacctcccagg

SEQ ID NO: 585641 - DNA, 100 bp, Homo sapiens
tggatattgaaatggacagtggagatgaagcctaagaatatgatcaggtgccgacgccaccgccgagcccatgatcctggaacagtacgtggtggtgtcc

SEQ ID NO: 585642 - DNA, 90 bp, Homo sapiens
gcaccgaattccaagcccgggcacagaggcctagcagccccgccttgtgcatggatcagaccagcaaatctgacaggatggcatctgatg

SEQ ID NO: 585643 - DNA, 100 bp, Homo sapiens
tctttgtcaccataggagacatggacgaagccttcaaatccatcaagctcatcaaaaggaacaacttttcagcctaatagcaactcttatgtaaatcctg

SEQ ID NO: 585644 - DNA, 82 bp, Homo sapiens
gagtatgacatgaccaagatgcccgagtgctacttctactccaagttcggtgcaggtgatggtcctaccagtgtgtctgttg

SEQ ID NO: 585645 - DNA, 96 bp, Homo sapiens
cctcgcagtcccagagtcagacccttggtctccaagcaatgcagccccagcagcccttgtgggtaattccagaattgattggccataccattgtca

SEQ ID NO: 585646 - DNA, 51 bp, Homo sapiens
aacttgacactcaccctgaccgggcccagtcatatatgcacagttagacca

SEQ ID NO: 585647 - DNA, 82 bp, Homo sapiens
ctgtgtttctgccggatcagatgagcagattggttagtgaaggtcagcccaaggccaaccccactgtcactctgttcccgcc

SEQ ID NO: 585648 - DNA, 75 bp, Homo sapiens
tttgacattatctcagattttgtcttcagtgaagagataattgacgaccttgccaacctagtggagaacacagat

SEQ ID NO: 585649 - DNA, 76 bp, Homo sapiens
acgcgttcaactggcggaagacctcaatgagttttgatcatcctgagaaaaatgggccttggcctgcagacccaat

SEQ ID NO: 585650 - DNA, 75 bp, Homo sapiens
aatgtgcctttgcaggggagcctgagagccacaggttctcttagaagcacaagatatggcagtgagagaccataa

SEQ ID NO: 585651 - DNA, 82 bp, Homo sapiens
gacgaagtggacaagttcaaggccaagttcctgacagcctggaacaacgtcaagtacggcttcaccggccagaactgtgagg

SEQ ID NO: 585652 - DNA, 74 bp, Homo sapiens
gcagtttcgctgcaacctggagtggcacctggggctcggagaaggagaaaagggtgcggaggcagcaaatgtta

SEQ ID NO: 585653 - DNA, 100 bp, Homo sapiens
cataatgcagaagtaagaaaggctttgtctagacaagaaatgcaggaagttcagagttctaggagtggaagaggagccatccagtattgtgctagaggag

SEQ ID NO: 585654 - DNA, 88 bp, Homo sapiens
ggggacgggagcctgctctacagcgtggtcaacacggccgagccggacgctgatgcccagctccatgaccttctccagctgaggcagg

SEQ ID NO: 585655 - DNA, 75 bp, Homo sapiens
ctggtgaaattgccggcaagagggagttaaggacattccaggcagaggcaaggtcttgggcgtctttggtactgg

SEQ ID NO: 585656 - DNA, 98 bp, Homo sapiens
agagccttggggtgcccggtgcggctgcttcaaggaaagaccaagaagtgcagtggaacagctctgtttggctgaaagtactcgaccaaggatgactg

SEQ ID NO: 585657 - DNA, 117 bp, Homo sapiens
caactgatccgcggcctggggcaggaatgcgtcctgagcagcagccccgcggtgctgggaatttaaactttgggataatgagctgcagtatgtggaccaacttctgaaagaggatgt

SEQ ID NO: 585658 - DNA, 82 bp, Homo sapiens
gactcctcgcctggctcggaaggtgttgacttcaaaatcaaaactgtagagctaagaggaaagaaaattagattacagatct

SEQ ID NO: 585659 - DNA, 90 bp, Homo sapiens
cgtgtccgccgcggccctgcgaggtccgagggggggggccctcagcctcttggccttgaacgggctgttcatcttgattcacaaacacaa

SEQ ID NO: 585660 - DNA, 100 bp, Homo sapiens
ttcaggcaacgcctcgcgttggttcgatacaagaggctgttttcctagcgtggcttgctgcctttggtaagaacatgtcgtccatcttgccattcacgcc

SEQ ID NO: 585661 - DNA, 100 bp, Homo sapiens
gaggctgcactgagcgggacctgcgagcagcgcgggcggcagcccgggggaagcgccaagctctactccaggaagtgaaaatgtgctgcctcgagagccg

SEQ ID NO: 585662 - DNA, 83 bp, Homo sapiens
cccagttttgatgaaccagccaccccagattgctcccaagagggagcgtaagacgaatcctcactatggatgggctcattgag

SEQ ID NO: 585663 - DNA, 50 bp, Homo sapiens
accacccccatcaagatcgccctgcgctgatatgttgatgatgtgatcag

SEQ ID NO: 585664 - DNA, 75 bp, Homo sapiens
aactgaggcatggaaatgttaaagtgctttagcctggattgcacagcagagcttttatctcagttatcaggagtg

SEQ ID NO: 585665 - DNA, 103 bp, Homo sapiens
ttgccctgaaactggttggtgaagaaggatttgtagttgtggaagctgatcgaggaagcctaagcaggctctgtgaagtgggaatagtggtatttgagtcaag

SEQ ID NO: 585666 - DNA, 80 bp, Homo sapiens
attgtgaagaagaatttcgatctccgccctggggtcattgtcagcttcccatcgacggtcagtgcgcacgttgtaatcag

SEQ ID NO: 585667 - DNA, 75 bp, Homo sapiens
ggacagcattgggagcggccgagccatcccaattaaacagtcgtgagatggagaataaagaaactctcaaagggt

SEQ ID NO: 585668 - DNA, 100 bp, Homo sapiens
aaacaagctcctacttccagaaaaagtgctcctgggactccaggataccaggatgcgggctccgggtgcgggcgcggcctcggtggtctcgctggcgctg

SEQ ID NO: 585669 - DNA, 90 bp, Homo sapiens
cttggcttcgagatggcttcggtgcagtagacattgttgcaatcatgatcggcaatctgaaaggcacaaaaattctgcaatctattcaaa

SEQ ID NO: 585670 - DNA, 75 bp, Homo sapiens
ttgtgcctctcattcctgccagaggtggcatctgtgaactgaatacaatagatatggctggtgggtaggagaaat

SEQ ID NO: 585671 - DNA, 98 bp, Homo sapiens
gcaaggagtgaatgtttcagggtggagaagaatctgcttgtctatggcatccaggatcctgatgagaaggtagccatgcttacgcaaatcttggaatt

SEQ ID NO: 585672 - DNA, 75 bp, Homo sapiens
ctgctttaaaggaagctgcccaaacccgagttcttcaggagagaataccatgggtaccacctgaatgcattgaaa

SEQ ID NO: 585673 - DNA, 74 bp, Homo sapiens
gctgaagggggctctttatataatgggaagcaccattttccacaaaactctcaagaaggacttgttgcaactgg

SEQ ID NO: 585674 - DNA, 75 bp, Homo sapiens
aaagggaagtgtggaacactatggtatgccgccatttgggtacaaaacaggtctctaattaacagaagatggcaa

SEQ ID NO: 585675 - DNA, 83 bp, Homo sapiens
tttgaagtaaaaattgtcagtaagggaagagatgggtcgttcttccctctttccaatagatgatggcttgcttgatgatggtc

SEQ ID NO: 585676 - DNA, 98 bp, Homo sapiens
cagagggagaacaagagagcggaggctcctggtggctggtgacaggtcatcatcagatttgaaatatttaaagtggatacaaaactatttcagcaatg

SEQ ID NO: 585677 - DNA, 90 bp, Homo sapiens
gaaggaacttggttccccctccctcagcttccgccccaaaaggactccattacattgtgctgcctcatgtaacaacgtccaagtgtgtaa

SEQ ID NO: 585678 - DNA, 100 bp, Homo sapiens
cccgggagcgccgagcgtcgccgccgccgccgccatgaacaactcgggcgccgacgagatcgggtttggtgcacctcgatttggaggaagtagggcaggg

SEQ ID NO: 585679 - DNA, 101 bp, Homo sapiens
catgctgtcccagatgaacgtcacagcccccaccagtccaccagtgcagcagaatatgatgaactcggcttcagatatttggagttcttacaacatggcag

SEQ ID NO: 585680 - DNA, 80 bp, Homo sapiens
tgacaagaaaagaagagatgaaggatgaggaccgtgggagtggggcctttagcctggtagttgatgtcacttggcgatat

SEQ ID NO: 585681 - DNA, 98 bp, Homo sapiens
ctgtggaatcaataagccatggcatctaagaaatttgctgttaaaggaggcaaatacatgcaggcggtgattcagtatgggaagatagtgtcctggtt

SEQ ID NO: 585682 - DNA, 88 bp, Homo sapiens
gaatcttaggcgggtgcacccagtttccaccatgattaagcagcaaaccctctgctttgctccaccgcccgctaccactgcaagaacg

SEQ ID NO: 585683 - DNA, 89 bp, Homo sapiens
aaggggcgtctgcggctctccgccgtccccagccctgcctctccctgggctctggaacttaagagatttgagaacttcataaaatctcg

SEQ ID NO: 585684 - DNA, 49 bp, Homo sapiens
atccgcgtgaccaccatcgcccgaaagaggacgggcagggtgcgggcag

SEQ ID NO: 585685 - DNA, 98 bp, Homo sapiens
ccggcggcagcagctggaggaggatcgcactgctcatcttggccatcactatacacaacgttccagttctgtgccttcccctgcagccacagcagcca

SEQ ID NO: 585686 - DNA, 100 bp, Homo sapiens
cccggcatcagacctggcactacttgtccaagacgtactggtggcgaggagagacagcgtctggagaccatcctcagtctctgtgctgaatacacaaagc

SEQ ID NO: 585687 - DNA, 100 bp, Homo sapiens
taagggctcagaatagcaccattgctggtcatcatggtcacaggagaccatccaatcacagctaaagctattgccaaaggtgtgggcatcatctcagaag

SEQ ID NO: 585688 - DNA, 80 bp, Homo sapiens
ggaggaccccagacaccggagactgggaaatgtgctccctaccctcacctcaagacgaccatggccaccatcccagactg

SEQ ID NO: 585689 - DNA, 111 bp, Homo sapiens
cgcaagcccagacaatgccggtggaggaatttgtggctggctggatctctggttctgctccagacgagcccttaccacgttgactcactcctgcagctcagcgatgcctgc

SEQ ID NO: 585690 - DNA, 98 bp, Homo sapiens
gaattgtggatattttggtggggtgaagaccccagttttgctgaccttattcaccatgacttatcagatacaagattcatcatcatgcctgtgagctg

SEQ ID NO: 585691 - DNA, 75 bp, Homo sapiens
tttggagttcttacaacatggcagacattgacaagatctttggaattagacactccttcacagccagtgaacaat

SEQ ID NO: 585692 - DNA, 74 bp, Homo sapiens
actggtctcctcagccccaaccctctcagcacctgagaaagagtccacgctgtactcgcagcagctcatgaggc

SEQ ID NO: 585693 - DNA, 100 bp, Homo sapiens
catcagattttgcattggatattcgcatgcctggggttacacctaaacaggttacaggaggttccagtggcatcgggaagtgcattgctatcgagtgcta

SEQ ID NO: 585694 - DNA, 82 bp, Homo sapiens
ctcggggtcccggacgggcccgaggccccgtgcggctcggcggagtacatggccccggaggtagtggaggccttcagcgagg

SEQ ID NO: 585695 - DNA, 74 bp, Homo sapiens
ggtgtctcccctcagtcctgctctgaagatcctgccctgccctggcactgggcaaaaaccattccagaaaagat

SEQ ID NO: 585696 - DNA, 50 bp, Homo sapiens
ggagtgcgccgggagcggagatatgacggccgaagccctgcagcccacgc

SEQ ID NO: 585697 - DNA, 100 bp, Homo sapiens
ggaccccctccggctcaagtgtgtcaagcaaggctcagtttatgaacctcttaaaagcattaatcttccaagacctgataatgaaactctctgggataag

SEQ ID NO: 585698 - DNA, 74 bp, Homo sapiens
ttcacgggacatgtctcagatatcaatgctgtcagtgatgctgaaaacgccattcaacagatgggtggccagtg

SEQ ID NO: 585699 - DNA, 100 bp, Homo sapiens
tttttgagaagcatctttcaagtgtttactcatttgcctagaatcacgtcctggaactgcatgttcttgcgactcttgggacttcatcttaacttctcgc

SEQ ID NO: 585700 - DNA, 75 bp, Homo sapiens
ctgctgacgctctgggtgaagaatggaagattttgttggcccccatttgaccaaaaaagtgacactgaattccga

SEQ ID NO: 585701 - DNA, 128 bp, Homo sapiens
tttgggttcgtgagatttcatgaagatggcgccaggacgaaggccctactgggcaagctgtgcagcagatactgtgatgatggattgcaagtgcaaagagtaagacaaaactccagcacataaaggac

SEQ ID NO: 585702 - DNA, 100 bp, Homo sapiens
catctggctggagccctgcattcgcggcgtgtgcagctcaggttcagattgaaggagattttttgccatgttccttctctatacttgaggaacagcccat

SEQ ID NO: 585703 - DNA, 100 bp, Homo sapiens
cctaaatgaggaatgtctttcctaccatctaaaatacgaaggtttctggctgggtcctgcattcagctcttttcacatttgatttgattgaaagtgttct

SEQ ID NO: 585704 - DNA, 82 bp, Homo sapiens
gccaaggctgcagaagccaaagccacggtaactaggatttctacctcaaccgcgagacctatgcaaggacggtgtggaccaa

SEQ ID NO: 585705 - DNA, 100 bp, Homo sapiens
gacgcgcgcagcccgcccgcccggcgaccagcaagcgtgacgacagcatgtacgatccctgaatgggcccgtgggcatatttagtcattcatttttgatc

SEQ ID NO: 585706 - DNA, 126 bp, Homo sapiens
cggtacgaaatggaagatgggaaagttattgaacggctgggccagagcgtggttgctgaccagttgaaagctgggacgacatatatctttagcaaaggtggtggacaaatcacgtataagtggcct

SEQ ID NO: 585707 - DNA, 100 bp, Homo sapiens
caacatggcagcggggttcgggcgatgctgcagggctgctctttggcgtaaattgcaatcgattagggatcgtttctcagaatcaagttagaagtgagag

SEQ ID NO: 585708 - DNA, 104 bp, Homo sapiens
ataattcagatgaagaaaactgtatggaaatttaatggagccaccatttcagaaccaaaagaaatttggaacaaacttcacaaagctggaaaagaaaactatcc

SEQ ID NO: 585709 - DNA, 73 bp, Homo sapiens
atagagacaggtctcatcgggaggaaatggaggtggtagctgaggaagcatggcagcggcacaagatgaggaa

SEQ ID NO: 585710 - DNA, 75 bp, Homo sapiens
gtggcgaacggggcgagcctggaggattgtcactccaacctcttttcgctgtatacgctcaacggcaagaaagtg

SEQ ID NO: 585711 - DNA, 100 bp, Homo sapiens
ggggacggtttcgtccgcatcgaggacttcatccagtttgctacggtctacggggcagagcagaaagttcgacacagcaaactggctgagtctgtggaaa

SEQ ID NO: 585712 - DNA, 101 bp, Homo sapiens
tgtctggctgctgcagtgacccagaccctctcctttccctttgagaccgtgaagagaaagatgcaggttatcaatactctggctgaccatcatcatcgtgg

SEQ ID NO: 585713 - DNA, 100 bp, Homo sapiens
cgacgaggagcagggcctgactgcgcaggaaaccacccctactcctaatcccccgactacagaagaggagaaaacggaatctaatcaggaggttgctaac

SEQ ID NO: 585714 - DNA, 101 bp, Homo sapiens
agcggctggaggagcgcgagcggcggtttccttgcccggggccgcgggaaggccgaccgactgccgcggtgaaaggtgtagcagtcactcggcctacaccc

SEQ ID NO: 585715 - DNA, 100 bp, Homo sapiens
ctcacagtttgctctgctcttccaacaccagtggaagatgatcacatcccaggccaggagtggtggctcacacctgtaatcccagctctgggaggccaag

SEQ ID NO: 585716 - DNA, 75 bp, Homo sapiens
ggaccagtacctgcccaggaaactggcaaaataatcctatggtgaaaaaaatcaacaagataatctctgcttgag

SEQ ID NO: 585717 - DNA, 76 bp, Homo sapiens
tgtggaccctcgtgagcgacccggacaccgacgcgctcatctgctggagcccggagaaccaggtgcatcagcgcat

SEQ ID NO: 585718 - DNA, 101 bp, Homo sapiens
aaacctttggacagtccaatgtcaacattgcccagcaagtggcgacattgactacagcaccgtgctcctcggcatgctggtgacgcaggacgtgcagctcg

SEQ ID NO: 585719 - DNA, 88 bp, Homo sapiens
agaacgtgtactgcttgagaacagaatacattgctgattatctcatgcagatttggagcaagaggtggtggtggccttcccccgaaga

SEQ ID NO: 585720 - DNA, 98 bp, Homo sapiens
ataaattgcaagcattctatccaaatgttttcggctttgtgagaaaccttaccatcaaacacgatggccagcaacgttaccaacaagacagatcctcg

SEQ ID NO: 585721 - DNA, 78 bp, Homo sapiens
ccagggactggcagctccactgccgtcaactcctgttctcctcagagcctggaaaatgtttcaacgtgcgcaagagtt

SEQ ID NO: 585722 - DNA, 98 bp, Homo sapiens
cgagaggctcggtgggcgcgggcggcgaggtgatgatgaacagtctacacagatggctgcaagttgggaagatgataaagttacagaagcatcttcaa

SEQ ID NO: 585723 - DNA, 83 bp, Homo sapiens
aagagcccgtgaagatcgcggcgccggagttgcataagggagatggaactctaatgatccaggacaaagaagttaccctggag

SEQ ID NO: 585724 - DNA, 82 bp, Homo sapiens
gcgtgtctaggtgagtcgcggtgggtcctcgcttgcagttcagcgaccacgccgaggaggagctggtggaggctgacgaggc

SEQ ID NO: 585725 - DNA, 100 bp, Homo sapiens
caaaagccaagaggaggacagttcgctacacagcaatgcatcgaggaacacctcatcaaaatgcagaagcagaaactgcagatgcccccgcagcccccac

SEQ ID NO: 585726 - DNA, 74 bp, Homo sapiens
cgggatcccagcctcaggcgtgcgcggacggtgtgcgggtaattaataatgcttgtgctactcaagccatagtg

SEQ ID NO: 585727 - DNA, 100 bp, Homo sapiens
ctctgaggctcattttgcagttgttgaaattgtccccgcagttttcaatcatggttgcacaaaagtttataccaagtcttctcatttaaaagctcacctg

SEQ ID NO: 585728 - DNA, 101 bp, Homo sapiens
catattctctgcagaatttctgaaagttttccttccatctctgctgctctctcatttgctggccatcggattgggaaggtagaagatagcaccatgccgat

SEQ ID NO: 585729 - DNA, 83 bp, Homo sapiens
aattactaaggcagccatcaaagctattaaggtggaaaacgaagctcattcccaacgtgcaaagccaaggcagcgaccccagg

SEQ ID NO: 585730 - DNA, 97 bp, Homo sapiens
gcaaagatcgcctgcaccttcaaggccaaactatgcaggagaagttaaggctgcaaggccaaatcacagagggaagcaacatgattaaaacaattgc

SEQ ID NO: 585731 - DNA, 90 bp, Homo sapiens
ttcttcagatatgtcgaaatgtcaacatttgacatagcttcagatgcatttgccacattcaagccgcagggccgtaggcagccatggcgc

SEQ ID NO: 585732 - DNA, 98 bp, Homo sapiens
gcggccttgaacattgagaaagaactaccaaagccaagacacgttttcaggtcaccgacgatgagggcgcacctgctgtcctggagcttccgatctct

SEQ ID NO: 585733 - DNA, 98 bp, Homo sapiens
gtctccagcgggcctggactgtgggctggtgtgtggaactgattgactggggcgactttggggtagaggcagtgtctgaggggactgactctggcatc

SEQ ID NO: 585734 - DNA, 75 bp, Homo sapiens
gtctgtagaggatcctttccccattgctaatctagacgaaatccagatgagttcacctacattccttagagcttt

SEQ ID NO: 585735 - DNA, 74 bp, Homo sapiens
ggagaggatggcagaatgattgctggccaggttttagtgtggctgtgtgcaggttttccaacactggtgaagac

SEQ ID NO: 585736 - DNA, 75 bp, Homo sapiens
tccttccacgacctccgacaggcattccggaagttcaccaagtccgaaaggcagaagctcctcctggggtagaga

SEQ ID NO: 585737 - DNA, 75 bp, Homo sapiens
tcggcggcggtggccgctagctccaaggaagaccatatactccttgacgacagggactaccaccttcaccttcat

SEQ ID NO: 585738 - DNA, 100 bp, Homo sapiens
tgtggtcttcaaaagagcagaagagagggagagacaagctcaacgagaagatgccctcgagctcacggagaagctagaccaagactggaaagaaattcag

SEQ ID NO: 585739 - DNA, 75 bp, Homo sapiens
cgactcccatgcatcggctaatagcccggagacaagcaaactaattctgaagcaagcccttatagttgtgctgca

SEQ ID NO: 585740 - DNA, 75 bp, Homo sapiens
tgagcgagctgtcagagcccggggacggcgaggccctcatgtaccacacgctgctgatgcaaggaatcccctggg

SEQ ID NO: 585741 - DNA, 101 bp, Homo sapiens
ctgatcgcgatggggacaaaggcgcaagtcgagaggaaactgttgtgcctcttcatattggcgatcctgttgtgtgacagagctgaatgaacctctctcca

SEQ ID NO: 585742 - DNA, 100 bp, Homo sapiens
aggaaccagactgggggcgagctgagcacctgtagtcaatcacacgcagtgactttgaacagcttccggatgatgttgccatctcggccaacattgctga

SEQ ID NO: 585743 - DNA, 98 bp, Homo sapiens
gctgcctctgtgtacgctgaggggggagaaactcagccacctgtgacaaatttgagtgtctctgttgaaaacctctgcacagtaatatggacatggaa

SEQ ID NO: 585744 - DNA, 103 bp, Homo sapiens
agatctgcaccttcaggaccagttcgcagtagcagtggaatgggaggaagagccattctaaatggcacaggctcacctaccaaatttaaaatgccgttcaaca

SEQ ID NO: 585745 - DNA, 100 bp, Homo sapiens
ggccccagctgaagaatgagaccatctggtacgtgcgcttcctgtgggagtgacccgccgcccccgacccagcggtgctgtggtgaaggcgcgggataag

SEQ ID NO: 585746 - DNA, 100 bp, Homo sapiens
cctctggccacccggattgttcctactgacatgaatgaccagaatctagaagagccatccagatatgatctagtttgaagcactaagaagaataagacat

SEQ ID NO: 585747 - DNA, 75 bp, Homo sapiens
agaaggcctctctcctgatacagcaggcgctcaccatgttccctggaggccaccagcttgggctccccacggagg

SEQ ID NO: 585748 - DNA, 50 bp, Homo sapiens
cctcttcaatttctgacaaaagtcacattgtcctaatgcttgcagatgat

SEQ ID NO: 585749 - DNA, 50 bp, Homo sapiens
tgtttttccgtaagcatactcagtggtcatatgcattagaaaaacccaac

SEQ ID NO: 585750 - DNA, 100 bp, Homo sapiens
ggcgcttacctgatgagtcaggatgctccgatttgcctgcaatggataacccagtgtttttggaattacttagattggatagaaatctgccattatattg

SEQ ID NO: 585751 - DNA, 100 bp, Homo sapiens
cctgtctgatgcccggatttttatcatcatgtatggtgtgaccagcatgtacttttcagctgtaatgggtaagcttgatgattaccaggaacgaatgaac

SEQ ID NO: 585752 - DNA, 75 bp, Homo sapiens
acgcactgggtcgtcacggaggacgggaaaatccagcagcagacttaattcagtgcacaaatgagatgaatgtga

SEQ ID NO: 585753 - DNA, 97 bp, Homo sapiens
tagacctgcagagtgaagaaagctggtaatagatgtctgacaaactaaagaaagacttgtgttacgtatcagcagatgttgcacacaaacttggtat

SEQ ID NO: 585754 - DNA, 125 bp, Homo sapiens
aaagacaggccagatctacgagctagagttgccatttcgctgggatttttgggtggtgcaaagattgattataccggaacagagccttccagtccctgtaataaatgtttatctccggatgtgac

SEQ ID NO: 585755 - DNA, 98 bp, Homo sapiens
cggctgcgcacggactgctggagatggtggagtccgtcagaaacatggtagaatggtgcttacctcaagatattgaccttgaaggtgttgagttcaag

SEQ ID NO: 585756 - DNA, 88 bp, Homo sapiens
taatctcacgacctccgcctgcggcctcctcgcaaaacaagggattaaagcctgtggtttccacagaagcaccacctatcatatttgc

SEQ ID NO: 585757 - DNA, 74 bp, Homo sapiens
cttcgcctcctaatccctagccactatggtggaagcagggaaaggcctggagatgaggaagctggttctctcgg

SEQ ID NO: 585758 - DNA, 74 bp, Homo sapiens
agcaattgatgacagtgtcaaacaagagggtgcaattgaagcacttgccttgacaatgcaaggtaagtatatca

SEQ ID NO: 585759 - DNA, 83 bp, Homo sapiens
ctagagaccatacagacctaccggtctgtcagtgagatggcttctaacaagaggctccagcgggagaagaagcccaataactt

SEQ ID NO: 585760 - DNA, 98 bp, Homo sapiens
ggacacagaagtatttgtgacaggtacggaatgagccctggaacatttctatttcagcagaatatattgcccaggtgaaagggatctcagtggaagaa

SEQ ID NO: 585761 - DNA, 100 bp, Homo sapiens
atctaagaacaagaggggcgtcctgccaaagcatgccacgaacgtgatgcggtcctggctcttccagcacatcgggctgaaccttagccggccgatcgag

SEQ ID NO: 585762 - DNA, 85 bp, Homo sapiens
caccaggacagaaaagacagtgttctgctttcatggagttcacagaagagtcgaggaggattcactccttctccagttgcacagc

SEQ ID NO: 585763 - DNA, 83 bp, Homo sapiens
gccagggagaaaacaaaggcggccggcctggtgcgcaaggccccgaacaacagcacggggtcactctggtgcccattgaggag

SEQ ID NO: 585764 - DNA, 106 bp, Homo sapiens
tctgcaagtaaccagttctgtttgcctgttttggatagcaatgatcccaatttccagatgccttgttcaacaggtatcgatatcctgaagcttgtagcagcccaag

SEQ ID NO: 585765 - DNA, 100 bp, Homo sapiens
aacctgcattggacccagctattgctgcagcatttgccaaggagacatccctcttaggtcccctgaagtcatgggttgctggctcctgctcagagtgaca

SEQ ID NO: 585766 - DNA, 82 bp, Homo sapiens
ctacatcccatctcaatcagaattactagattttctctcaaactacgaggtgattcctcctaaggagtggaagccaagacag

SEQ ID NO: 585767 - DNA, 100 bp, Homo sapiens
tggatatacctgtgtttaaagctatccagccggagcggggatctgatgagcttctttcttctggcatcattaacggaccttttaccatgaatagttctac

SEQ ID NO: 585768 - DNA, 90 bp, Homo sapiens
agcattatccaacggctgctggaaggtctcctctgagcctccggcctccataagacccaaaacagatgacacctcttcccagtcccccgc

SEQ ID NO: 585769 - DNA, 80 bp, Homo sapiens
aacttcaccttttggctttcttggcctgatgctgaactctcgaggggcaacaggtttgtctatgctggctctaactcggg

SEQ ID NO: 585770 - DNA, 90 bp, Homo sapiens
cagagctcccagggcggacagcagcctcgggtgcaatcctggagccccccagtgagggaagacagagatgtcaatgaccccatgcccaac

SEQ ID NO: 585771 - DNA, 140 bp, Homo sapiens
ggcagcatggcgtccgtgacgctgagcgaggcggagaaggtgtacatcgtgcatggcgtccagtgtttgtaagcggtgcattcggaagatggaccaccactgtccctgggtcaacaactgtgtaggcgagaacaaccaga

SEQ ID NO: 585772 - DNA, 80 bp, Homo sapiens
ggacattattgcgcgtggaacggctgcttttggaagatcctgaggaggatgaaggggctggccctggaggccgagagtga

SEQ ID NO: 585773 - DNA, 100 bp, Homo sapiens
gtcttctaatctgtgaacatgctgtcgtgagcgccatcccggtgccaacgctagaaagtgcccagtacccaggaatcctcccgtctcccacctgtggata

SEQ ID NO: 585774 - DNA, 106 bp, Homo sapiens
cggcgccatgaccccatcgaggcttccctggttgcttagctgggtctcggccacggcgtggagagcggcaatagagacggggtttcgccgtgttagccaggatggt

SEQ ID NO: 585775 - DNA, 100 bp, Homo sapiens
aaggatgagattttgccagagaaaggacgagcagcaagtcagggagcttaagtaatccttcccctctaccaccggatatggctcctgggcagagttatca

SEQ ID NO: 585776 - DNA, 90 bp, Homo sapiens
ggcggcgccgctcatccccctctcccagcagctccaggacacgcgcgccccgagcctgggaggcatgctgaagccaggcggccggcagga

SEQ ID NO: 585777 - DNA, 51 bp, Homo sapiens
gggccctgatggcttgaagggtcagaaagctcagaattctgcaaatgcaga

SEQ ID NO: 585778 - DNA, 50 bp, Homo sapiens
cggcttcccccaaggaatatacaggaaagtgggaggtagaggaaatgaag

SEQ ID NO: 585779 - DNA, 82 bp, Homo sapiens
gttacctacaagagccttcatccaggagcatccacactgcaatgatataggaatgagatgggtgttcctgataaagaagggt

SEQ ID NO: 585780 - DNA, 102 bp, Homo sapiens
atgctcctcagacacctagaccagtggcagctggaaaggcagctcatcatgcagagtgaaatgagggaaagacaaatggccatgcagattgcgtggtctcgg

SEQ ID NO: 585781 - DNA, 83 bp, Homo sapiens
ctgggatccccgccgctctgtctacaacccgagcaatggctgccatccggaagaaactggtgattgttggtgatggagcctgt

SEQ ID NO: 585782 - DNA, 74 bp, Homo sapiens
ctgagggaagaagaaagctgttaccaccactattcaagtttgcgatccccgcgtccaggatggagcagctgaac

SEQ ID NO: 585783 - DNA, 82 bp, Homo sapiens
gctgtggcgggaagatggccggatttgaagggggatatgagactttctactcggaatatcctgagtgttgcgtggatgtaaa

SEQ ID NO: 585784 - DNA, 82 bp, Homo sapiens
ctcggcctgagacaccggaggaccgggagcaggccgggctctcgccatgggtcactgtcgcctctgccacgggaagttttcc

SEQ ID NO: 585785 - DNA, 101 bp, Homo sapiens
agaggccaaagaagcagaaatgagcagaaaggagttggggcttgatgaaggcgtggatagcctgaaggcagccattcagggtgtcagtgtggaggcagttg

SEQ ID NO: 585786 - DNA, 51 bp, Homo sapiens
ctctggccagggtgcttttggaaacgcgtggagacggagaccccgcagccc

SEQ ID NO: 585787 - DNA, 83 bp, Homo sapiens
atctcgctcggctgcgggaaatcgggctgaagcgactgagtccgcgatggagtgtttcctgaggttataggcgggtgtttgag

SEQ ID NO: 585788 - DNA, 100 bp, Homo sapiens
atcacacaggatccgcccctggacatggaggagaaggtccgcttcaaattatcgcaatctgacctttgatccagtcagcgccaaccgtcacttctatctg

SEQ ID NO: 585789 - DNA, 73 bp, Homo sapiens
aagatgctgaaaagagggcccagagtttatttgttaaagaggaaagcggcgttatgacaggaagcagagtggc

SEQ ID NO: 585790 - DNA, 100 bp, Homo sapiens
ttattggattcagtcacaacagatgaagacagcaccaggttccaaatcatcaatgaagcaagtaaggaattgaatgatctggcacgggaccctccagcac

SEQ ID NO: 585791 - DNA, 74 bp, Homo sapiens
aaatgtgagcctatggatcaaggcttcctgtgtccagtaccggttagtggtccgggatgtgaacacccttcaga

SEQ ID NO: 585792 - DNA, 98 bp, Homo sapiens
cacgttctttctttgctggatcacaaaagtatggtgtttgatttcaccaccatagacttgacatctgagactgatgaaattccagatattatagcttt

SEQ ID NO: 585793 - DNA, 100 bp, Homo sapiens
ccccgatgattatgatactcgtgcttctgagcctgggaagaagagggtgctgttggcagcagcggtctgcacaaaagcaggaaaggctattgtttctcga

SEQ ID NO: 585794 - DNA, 50 bp, Homo sapiens
gtcaattgccatgcacacttctgggtatcattgcccagtgcctaagatct

SEQ ID NO: 585795 - DNA, 97 bp, Homo sapiens
caccaatgggctggtcacactggacaataccaaccttcaaattcacagatgctggcatcaccatctacatcaggtcagctgtctcagtttggggcaa

SEQ ID NO: 585796 - DNA, 90 bp, Homo sapiens
acagggacatggccacctgggacgaaaaggtcagtggctttgtatgactgccgaagtccagatgaaagccatcgaatgtggcgattcagt

SEQ ID NO: 585797 - DNA, 100 bp, Homo sapiens
cgccaatatggtccatctgctggaacccttcaaggcctcgctaggagcatcggctgtttcaggacctggagaaaggcccccagctctaccctgagaggac

SEQ ID NO: 585798 - DNA, 151 bp, Homo sapiens
ttcaacaagaaatcacagtgctgagtcagtgtgacagtccatatgtaaccaaatattatggatcctatctgaaggaattggcagcaatgaaacagattctcgttaagatgcatagtaaacattctgagaacagcttacttctcactaaaac

SEQ ID NO: 585799 - DNA, 100 bp, Homo sapiens
gtcatggcgccccgagccctcctcctgctgctctcgggaggcctggccctgaccgagacctgggcctgtgacccagggcctggtcatcgggcagctgagc

SEQ ID NO: 585800 - DNA, 100 bp, Homo sapiens
tcaaaaacttgtcaaaactcagcatgcttagcattcgagagaacaaaattaaacaactacctgctgaaattgccaggaggaagaagaggaggatgaggag

SEQ ID NO: 585801 - DNA, 83 bp, Homo sapiens
cacggagcaggacaaggccatcctgtgcggcatcgtcctgggggcgctgctcttggtcttctgctcatggatgacgcaccagt

SEQ ID NO: 585802 - DNA, 98 bp, Homo sapiens
ggggtctatcctgacaaatctgtagtgatgatacagtgttttggtgtcccaaagaaataaaatccagcactgtccaattgaagtataatgcaagccac

SEQ ID NO: 585803 - DNA, 75 bp, Homo sapiens
tggactcatggaggctgagcatttattcagggaaaacaaagtgcatgatgaagtcttcagactgtgtcataaagc

SEQ ID NO: 585804 - DNA, 100 bp, Homo sapiens
cggcagtgtgaggagctgctatggtgctgagtttcctggtagagccggccgagctgaggcggtcgcggccatgaagtgaagatagtgatccggggagaca

SEQ ID NO: 585805 - DNA, 75 bp, Homo sapiens
gcgggtgtgagcccggcgggctggagaaccgggtctcggcgccgcagcttatgttcctgaggaagaattgaaggc

SEQ ID NO: 585806 - DNA, 121 bp, Homo sapiens
accaacacagcctggaccaccacagccaccccagcagaggccttatggatatgaccagatcttaatatttgccagtgatgcctgcaaaaatgtgacattacatgttccctccaaactagat

SEQ ID NO: 585807 - DNA, 74 bp, Homo sapiens
tgcttttgatatctggggccaagggacaatggtcaccgtctcttcagtgcctccggagccagcgtggtggccat

SEQ ID NO: 585808 - DNA, 100 bp, Homo sapiens
agaaagtaaattgaaaattggtggtgtgtcttcagttaatgagagacctattgtgaacaccgagagtgagacggcagtggtgaatgtcacctattccaac

SEQ ID NO: 585809 - DNA, 51 bp, Homo sapiens
cgtctatgtggcgcccggcatagtgccggtggtggtgtgcacattgagccc

SEQ ID NO: 585810 - DNA, 75 bp, Homo sapiens
caaaggcggccggcctggtgcgcaaggccccgaacaacaggcattgccgtctgcaacgtgcccgcggcgtctgtg

SEQ ID NO: 585811 - DNA, 100 bp, Homo sapiens
aagagataccgctcagaagaaaatgcaaaaaaactaatggaattagcctgcaacatgaaggtacctgtttcccaggcaactactgatcaggcatttctgg

SEQ ID NO: 585812 - DNA, 129 bp, Homo sapiens
aacacctcaaggttgaagcagaagaataaggagaaggataagtcgaaggggaaggcgcctgaagaggacgaagactacgtctactttgagaactcctccagcaacccatacctgatccggagaatcgag

SEQ ID NO: 585813 - DNA, 128 bp, Homo sapiens
cccacctttactgagtgcttttgaagaagtaggacctgccctgctccgctacagaactactggacagttaaactccattgatgatgcacagttgacaagaattgcccctccaagatctcattgctgtt

SEQ ID NO: 585814 - DNA, 100 bp, Homo sapiens
atctgacacctgctctcccggcaaggaaacttcgcaggctgagctacagagacttctgaagtggagagtctgcgacctcctcggttcttcaatgaagatg

SEQ ID NO: 585815 - DNA, 100 bp, Homo sapiens
agatgaggacagcatggatgggctggagacaacagaaacagaaacgattgtggaaacaggagcagtttgagttcgcgctgacagccgtggctgaggaggt

SEQ ID NO: 585816 - DNA, 74 bp, Homo sapiens
gaaaatgaaaggagagcaagaatctcataggagttcgcagtccctgattatcgttcctctcatcttgaagtgag

SEQ ID NO: 585817 - DNA, 100 bp, Homo sapiens
tctaaacaatttgatgactcaccagaatgttgaactttttaaagaactcagttttaaccatgctgaccaacgaaactggctttgaaatcagttcttctga

SEQ ID NO: 585818 - DNA, 90 bp, Homo sapiens
gggatcgatgtttcaatattggaagcgctttgatttacagcagctgcaggaaagtgactattttaccccacagggagaattccgtgtaga

SEQ ID NO: 585819 - DNA, 100 bp, Homo sapiens
ctctatcacatatgacatcagtcagttgtttgatttcatcgatgatctggcagacctcagctgcctggtggaggtgtgaatacgagtgtcagacatggtg

SEQ ID NO: 585820 - DNA, 98 bp, Homo sapiens
ccagcatttcatccctcgtcgaaaggattggattggcatctttagaagcgggaacagcttccacgtgttcgaccagggccagtttgccaaggaggtgc

SEQ ID NO: 585821 - DNA, 100 bp, Homo sapiens
acctattacgaactcaaaagtcaaccgctgaagagcagggcttatttcaaaacctttgtccctcagttccaggaggcagcatttgccaatggaaagctct

SEQ ID NO: 585822 - DNA, 75 bp, Homo sapiens
ttaaggattccaagtaactcttatttgtgagcctgttcatgcgaagaaacggaagcatgaacgcattatagataa

SEQ ID NO: 585823 - DNA, 88 bp, Homo sapiens
atgggaccctgaccacggaggcctcttttacttccaggatgctgataacttctgccccacccagcaaggtgtccctgccttcactgtg

SEQ ID NO: 585824 - DNA, 90 bp, Homo sapiens
gggtccgaaggggacggacgtcctcccacgtaccatttagaaggtttattttcttgaaaaggctccaggcttcggcttggaaaatcccac

SEQ ID NO: 585825 - DNA, 90 bp, Homo sapiens
gctctctacagccatggctttgatcggcgggcctcctgtggtgtttctggatcaagcgcatggcaggcatgaaggaatcgcagatcagcg

SEQ ID NO: 585826 - DNA, 83 bp, Homo sapiens
cgctgatctacaagaaaatccacaagaacgcactttcctcccaggaatcttgtcgattggcctggctgctgcctactacagcg

SEQ ID NO: 585827 - DNA, 100 bp, Homo sapiens
gggactgcacgtagcccggcgctcggcatggctctcctggtgctcggccggctgcgtgcacttttcctacaaagcatcgtgtgagatccgcgtgcttatg

SEQ ID NO: 585828 - DNA, 100 bp, Homo sapiens
atatatctccatttcatgatattccaatttatgcagataagggaggctgccggcgtggaccgcgggaaggcggggctggggctcggcgggaggccacccc

SEQ ID NO: 585829 - DNA, 51 bp, Homo sapiens
aggccaggttcccaagagctcaggtccatgtgaaatctgaggtccttgctg

SEQ ID NO: 585830 - DNA, 88 bp, Homo sapiens
tccgtgtccgacccctggaagctgatgctgctggacgccactttccggggtgcacagcaagtggctggagtgcaatggcgcgatctcg

SEQ ID NO: 585831 - DNA, 100 bp, Homo sapiens
ccaagtcgtccccctctccgccccccaggaggggcgagagggagccgcagctgatgtcagtactatactggcaattgctggagaagattttgcaattgtt

SEQ ID NO: 585832 - DNA, 75 bp, Homo sapiens
aaggcatggtgatccttcgggacaagattcgcttctatgaggggtacctgctcttccgagacttctgcctgaacc

SEQ ID NO: 585833 - DNA, 89 bp, Homo sapiens
cagaagaactgggcagcccggcagcccgagccgaccaaatttgactacctgaaggaggaggcagagattgtcaagaggctgaatgctat

SEQ ID NO: 585834 - DNA, 75 bp, Homo sapiens
acaagatcatgggcaaaggacagatccagattctctttctgagaagggcaagaagacgagtggcagaagaatcag

SEQ ID NO: 585835 - DNA, 91 bp, Homo sapiens
gctgaggcggcgcggcagcggagggacggcagtctcgcgcggttcgagaacttgtcttggacaattgcaaatcaaatgatggaaaaattga

SEQ ID NO: 585836 - DNA, 100 bp, Homo sapiens
gactgtggagatggcggctcagaagataaacgaggggctggaacacctcgccaaagcagagaaatagtcctgggaactccaacaagggagcaaatcagag

SEQ ID NO: 585837 - DNA, 100 bp, Homo sapiens
gggaccagcagttactgggaaggttcaggaagatttgactgaagagaaaaaaagggaactggagcataatgctgaagagacctatggtgaaaatgatgaa

SEQ ID NO: 585838 - DNA, 101 bp, Homo sapiens
ccaaccacgtcaacagaaggaggtgcagcctcccccacgtcaccaactccagggcccacaacggcagtgtcctacatgtcggtgaaatgtgtggatgcccg

SEQ ID NO: 585839 - DNA, 138 bp, Homo sapiens
agaggccactgcaggctccaagatggccaattgaatgtgaggtcatcaaggaaaacatccatcatattgatgcatcaaattgcaatttggaggagaggcagcacaagcagaagcctgggcctggctagcagccaatca

SEQ ID NO: 585840 - DNA, 75 bp, Homo sapiens
ggccgctcgcgtcctccatggaggccggagttcctccgtgtcacaaagcagtacctgccccacgtggcgcgcctc

SEQ ID NO: 585841 - DNA, 100 bp, Homo sapiens
gacctgacgagcccctacctccccaacggatcgctctcgcccaccgcccgaaccgctttcagttctgaaatggcaaagaggtccaagatgctgagtttga

SEQ ID NO: 585842 - DNA, 74 bp, Homo sapiens
agagagtcctcagggagaagtgccccacgattccttgcaggacaaacggcggcgactggcggcgcgatggacct

SEQ ID NO: 585843 - DNA, 100 bp, Homo sapiens
gcccttttgaagaggaaatgaagggtattgccgctgttactgatatacctttaggaacttggtctgcagaccatccagaggaataaaaaggttggcctta

SEQ ID NO: 585844 - DNA, 82 bp, Homo sapiens
gctgctcaaggacacggtctacaccgacttcgacgtgtctccagaacgctatagctatggcacctccagctcttcaaagagg

SEQ ID NO: 585845 - DNA, 75 bp, Homo sapiens
gctggttgttccgttgcgagctgcagctgcgatctctgtggtaggcccagattcatgatgttgctatcaaaagtt

SEQ ID NO: 585846 - DNA, 87 bp, Homo sapiens
tggccgtggtgcgggctctgcagcgagcgctcgatggaacctcatcccaggtacgttcttcagatgtgtcatggtctgatactcgta

SEQ ID NO: 585847 - DNA, 75 bp, Homo sapiens
agatgccttcaacctccccagcagtcacttaagacctgaatcatcatgttggttggctggttactgggaaaagat

SEQ ID NO: 585848 - DNA, 101 bp, Homo sapiens
cgagcagagcggagacccccaggtcctgcgggcgcggtgctggagaatctggtaaaagcaccattgtgaagcagatgaggatcctgcatgttaatgggttt

SEQ ID NO: 585849 - DNA, 56 bp, Homo sapiens
gacccttcccaggggaggacattcgggatatgtgatggcgtccagtttggagctgg

SEQ ID NO: 585850 - DNA, 76 bp, Homo sapiens
ctgcgctgccgccgctctgaggagttaaaggataccatacttgcagagctccttcagatacataaagaacacattg

SEQ ID NO: 585851 - DNA, 100 bp, Homo sapiens
tgatgagacaagatgtggtgatgacagaatcagcttttgctgaaggtgatgtggccgccctcaaccgacgcatccagctcgttgaggaggagttggacag

SEQ ID NO: 585852 - DNA, 75 bp, Homo sapiens
ggaatagccttgccatgtctgttggacgctgacaaatatttctgctatttccttcgtgctaccatcagccgccgc

SEQ ID NO: 585853 - DNA, 75 bp, Homo sapiens
aaagatacaacgaactagcacaacgaggccatcactggtgcaagctatatttaacggagatcctgatgaagttcg

SEQ ID NO: 585854 - DNA, 99 bp, Homo sapiens
ctttgtcaatccacatgtgtcatccttccaaggtggatttcattgactgggtagacaacatgtggccaaggcacttgaaggaaagccagactgaatcaa

SEQ ID NO: 585855 - DNA, 98 bp, Homo sapiens
agacgttctcaaggagaaggcagacctgggaaggatttttactgggagaggtaagacaagaggaaacgtttagcatcagtgactcacaaatcagcaac

SEQ ID NO: 585856 - DNA, 82 bp, Homo sapiens
gagagcggcccgcgtgcggagctgggggcgggcgcacccccagtttgagttcatgatcgagtccatcctgtatgcccgggat

SEQ ID NO: 585857 - DNA, 83 bp, Homo sapiens
gctgcctctgaggaacacgccgcagcaaattgtggctactaatttgccccctgaagatcaagatggctctggggatgactctg

SEQ ID NO: 585858 - DNA, 75 bp, Homo sapiens
cctcagcatttttcatggatttcaaataagtggttgagataagtcgaagagtgactctggaaaaactccctcctg

SEQ ID NO: 585859 - DNA, 100 bp, Homo sapiens
ctgatgtcgaaggtggagaggtcctttacttggtgcattactgcggatggaatgtgaggtttctatgcttgagtctgctcaacagcaggcagccagtgtc

SEQ ID NO: 585860 - DNA, 87 bp, Homo sapiens
catcgccctggatgtcttcgcgctctggctggtctcccctctgctggcaaggtgtccctgccttcactgtgctccaacctgaaggtc

SEQ ID NO: 585861 - DNA, 100 bp, Homo sapiens
cgacacagatacagcagaccaagtcatggcttccttcaagatcctggctggggacaaggcttttgatgaggccattgctgaacttgatacactgaatgaa

SEQ ID NO: 585862 - DNA, 100 bp, Homo sapiens
tagcagcagaagagaagaagaagcaggatgaactgaaacggattgccagagaattggcagaagtaagactttgaccccgacgcaggcttcagtgattgcc

SEQ ID NO: 585863 - DNA, 100 bp, Homo sapiens
caacttgacttctctggggactctgaacttccctggtcgaacagttttttctaatggctattcaagatgccttcaattaagttgcagagttctgatggag

SEQ ID NO: 585864 - DNA, 82 bp, Homo sapiens
agaggacccaggagaaattcgccctcaaagtctggccgtgggcctgggcttcggggcactggcagaggtcgccaagaagagc

SEQ ID NO: 585865 - DNA, 96 bp, Homo sapiens
ggctttcctgctggtggcaaccgcctacgagacactcaaggctccagatggaccctgggaaggacaaagagggggtgccccagccctcagggccgc

SEQ ID NO: 585866 - DNA, 100 bp, Homo sapiens
ccccaggagcgcccaggcttgggcagcaacccctgcatccccattttttactgagctcaggagagcaagatgaagggggtccactggacggggcctgagc

SEQ ID NO: 585867 - DNA, 99 bp, Homo sapiens
gtggacgtcaaatactttgcccaggaggctctgactgttcctacaacagcagccagtacccctgatgccgttgacaagtatctcgagacacctggggat

SEQ ID NO: 585868 - DNA, 83 bp, Homo sapiens
caaaaattctaggaccaaaacctcagatgctgataggtcttgctggctacctgagtggatatgatggtacctttttgttccag

SEQ ID NO: 585869 - DNA, 75 bp, Homo sapiens
gagtgtggtctacgagctgtttctcatctttatactcttccagggtgcttcaaggatgaccgcatcgtcttctgg

SEQ ID NO: 585870 - DNA, 97 bp, Homo sapiens
aaggcctgggagcggctgtaaataatacccgagaggaaataggcccggcagaatgctgcttctaaattacttgggcaaaattgggtccaaaacgcct

SEQ ID NO: 585871 - DNA, 100 bp, Homo sapiens
ggcaactctgatcccaactctgttgctctaggtcgtaaccagcctttgaaaaaggagaaaccaaaatggaaaagcgattatcctatgacagatggacaac

SEQ ID NO: 585872 - DNA, 75 bp, Homo sapiens
aggaaaggcttggtaaaaaaggttcagtctcacaccattttgctggtacagcctaccaagaggccagaaggcaga

SEQ ID NO: 585873 - DNA, 87 bp, Homo sapiens
tgcacacctggatccaggataacggaggctgggagagcacagaatggggattcaacacctcggcaatgcccttttagtgtgcgagca

SEQ ID NO: 585874 - DNA, 83 bp, Homo sapiens
cagggacctcaaggaagcttatgacagtgcccattcatcgacgatttcatcctggccctccacaggaagatcaagaatgagcc

SEQ ID NO: 585875 - DNA, 134 bp, Homo sapiens
tgacacaaaatcccagatctacctgacgggcctgcgagggttgaagattgtgaagcaatagcctaaggagccaagccgccatggcctaccacagcttcctggtggagcccatcagctgccacgcctggaacaag

SEQ ID NO: 585876 - DNA, 82 bp, Homo sapiens
agtacaaagccatcaaggagagctgcacctgggccctggtttccccctttctagggtgaggatggttctacacagccacccg

SEQ ID NO: 585877 - DNA, 100 bp, Homo sapiens
gtggttctccactcaggttgacactgtggccaccaaggtgaaggattgttttaagaaaatggcagacaaaccagacatgggggaaatcgccagcttcgat

SEQ ID NO: 585878 - DNA, 95 bp, Homo sapiens
agtctgccggcggagaatataagtgccatctccctcttctacgagctctcggagaatgacttgaacttcatcaagcagagcaaggacggtgccgg

SEQ ID NO: 585879 - DNA, 82 bp, Homo sapiens
gaaccacagcaagttcatggtcacggagaaggcagcctacataggcttgggcactgtttaaaggaaagttccgagaaggcat

SEQ ID NO: 585880 - DNA, 100 bp, Homo sapiens
gcctcccgggtagctgggactacaggtgactgcaaggagcctgacaagtgctgctggagacacaagcagtgcactgggcacatcatctaccctttcgcct

SEQ ID NO: 585881 - DNA, 82 bp, Homo sapiens
ctacggacctgtctgggtctcagccgccaaagaccccgtccgccaacatgcccatcactcggatgcgcatgagaccctggct

SEQ ID NO: 585882 - DNA, 98 bp, Homo sapiens
tgaggaaccagatatcttgaaaagctgccagaaagagcgatatctgaagtggctctgatgcctttgccacactcctcgcatctctgggacatcccttc

SEQ ID NO: 585883 - DNA, 50 bp, Homo sapiens
ggaagatcaagctgcaagtgcttggtggtgccaccaccacaacagaatga

SEQ ID NO: 585884 - DNA, 75 bp, Homo sapiens
gtggatttgggagacatttaggaggtaattcatttgcacacctgttagcaagaaacagaagttgaaggactggaa

SEQ ID NO: 585885 - DNA, 83 bp, Homo sapiens
ccaagtcgacgccgcaacccggggaaagcaggtttggtgcacctcgatttggaggaagtagggcagggcccttatctggaaag

SEQ ID NO: 585886 - DNA, 100 bp, Homo sapiens
tggacccgctgcccgcggctgcagtcggggcggcagctgaggcggaggctgacgaggaggcggatcccccggcgtcagtagagacggggtttcgccatgt

SEQ ID NO: 585887 - DNA, 75 bp, Homo sapiens
caggcggtgacccgctaccggaaggccatcgccaagatcctggccaatttggagcaaggcttagcagaagacggc

SEQ ID NO: 585888 - DNA, 98 bp, Homo sapiens
aaacactggcttctctccttcagctccaggctaggagtagctatccagatcacaaggaaggggaggaccccaataaggctgaggagttgccctcagaa

SEQ ID NO: 585889 - DNA, 75 bp, Homo sapiens
cgaaaaccgtgtatgagggattcatctcggctcaggtgcaaggatggcttgaaaggatttacattttctgcactt

SEQ ID NO: 585890 - DNA, 82 bp, Homo sapiens
aggcgttcgaggagatcatcctgcagtaccttgcatcgaagtgggagtttcatcaattctctcttgcaactagaagaacttg

SEQ ID NO: 585891 - DNA, 82 bp, Homo sapiens
tttcccattttgctcagcgactgtttgatgacgtcccgcaggtgagaagccctaccactgcaactgggacggctgcggctgg

SEQ ID NO: 585892 - DNA, 75 bp, Homo sapiens
tggcattagcccacaggccaaggcaagtactcaaacagatgccctgaaactgccaccttcccaacctccaaggct

SEQ ID NO: 585893 - DNA, 100 bp, Homo sapiens
cgcggtggagcagcagctgggggcgcagccgctgcccttccccggcatggacagaagaggcgtgcggctctactacatcggaggggaggtcttcgcagag

SEQ ID NO: 585894 - DNA, 74 bp, Homo sapiens
gtggagagtcacagaggggaacagatttcagtgtcctccttagctctgcagagtcctgtgtatggaaactcaca

SEQ ID NO: 585895 - DNA, 97 bp, Homo sapiens
ctcggtcttcccctgaggccgcgcggagctgggcgactggggcgaggactcgcgcacagcattatggatccaagcctgttgagagaaagggagctgt

SEQ ID NO: 585896 - DNA, 74 bp, Homo sapiens
cagccgggcagtttgaggagctgctgcgcctcaaagccaagagctgaagtgggaatcagtacatcgagaatcca

SEQ ID NO: 585897 - DNA, 94 bp, Homo sapiens
gctggtggtgcaggcgctgcgccgcaacgccgagcgcaccgacatctgcctgctcaaagttccagggtctccctccactgctgtagtaacccgg

SEQ ID NO: 585898 - DNA, 98 bp, Homo sapiens
atcaaggctaccatagctgggggtggactacgcccaagcaaggtttgatgcctatttccaccagaagaggaagcttggggtgtgactgtggggaggac

SEQ ID NO: 585899 - DNA, 100 bp, Homo sapiens
tcaagtgcaacaagtcccacttccgaaaccacaagtttgccgatgatcatccagcagctcgtcaacggcatcatcacgcccgccaccatccccagcctgg

SEQ ID NO: 585900 - DNA, 87 bp, Homo sapiens
cgcgaagcgagcgagaaggcacggagtcgccgcggagcgcagagaatgtaactggtcactacatttccccctttcatgatattcctc

SEQ ID NO: 585901 - DNA, 83 bp, Homo sapiens
cggtagcctgcgaagcagccattttcacttccacggagcagtgtcttccatgaagaaatgatgaagatgcgacaggctaagct

SEQ ID NO: 585902 - DNA, 111 bp, Homo sapiens
acctggccgatgaggaagtactgagcctgttggaggaactggcccggaaacaggaggacgagctggccctcagcgcactcctgaagttcgtgcagctggaaggagcgcacc

SEQ ID NO: 585903 - DNA, 127 bp, Homo sapiens
tgagagagagctattagagattgtgaagaagaatttcgatctccgccctggggtcattgtcaggttgctccttgagggcaggacagttcttatggctttatccgttgcgtaagcacagagaggtctg

SEQ ID NO: 585904 - DNA, 107 bp, Homo sapiens
gcggcatcaccattgcttggaagtttgattctcatgttttactgtgcctggctaactatagtcgagggggtgatggtcctatgtgtcgcccagtaattctgttgccg

SEQ ID NO: 585905 - DNA, 98 bp, Homo sapiens
cgccatcgagccttggcggcggacgtgcaggaaggtgctcgggtcttcggggcactgggtcccatcggtccctcctcacctgggctcaccctcggggg

SEQ ID NO: 585906 - DNA, 71 bp, Homo sapiens
accggctgccacaaggtcaactactgctccaccttctgccaacgcaaggtcggtgagctggtaaaggttac

SEQ ID NO: 585907 - DNA, 100 bp, Homo sapiens
tcctagtgtatgtatatgagagtttcttgatctctttatctgtggatgaacagctacctggaccagccctgccttgagaccgtcaaccgcatcaagttgt

SEQ ID NO: 585908 - DNA, 82 bp, Homo sapiens
ttcagaaaagatccaagaccattcttcaagtttgcaaaggcacgtgtggttctcaaatataggcattctgatgggaacttgt

SEQ ID NO: 585909 - DNA, 100 bp, Homo sapiens
gtgccacagcagctgagtgcgcatcaaatctgaagaaaatctacacagtacagacagtacagcttgatcatgatttaaaacatgctcacgaactccgcca

SEQ ID NO: 585910 - DNA, 133 bp, Homo sapiens
tgatccgcaagttggaacaaggagaagagctatggacacagagaatttttccaagttacagctacctagatttggagtccaggaatgagactaagcatttatctgtaggaaaagatattattcaaaacactgg

SEQ ID NO: 585911 - DNA, 100 bp, Homo sapiens
agattttcgtgaaaacccttacggggaagaccatcaccctcgaggtgactgaaaactcctgaggcatttcctggactagaatgggtagtgaagacccatg

SEQ ID NO: 585912 - DNA, 90 bp, Homo sapiens
ctgcatacttacttactttattcccgattggagacaggaccaaagaaatcaggacctttgatatttaggaaaactatgtttaactctaca

SEQ ID NO: 585913 - DNA, 90 bp, Homo sapiens
ccaggagatggtattggcccagaaatttcagctgcagttatgaagatttttgatgctgccaaagtgtgagaagcatgaacagtacggaca

SEQ ID NO: 585914 - DNA, 100 bp, Homo sapiens
gggaggtgaatttccatgtcaacatagtcctgtgcgaaaatccaaagcagctgatgagaagagacgctccttggctaaacaagcacgagaagactacaag

SEQ ID NO: 585915 - DNA, 100 bp, Homo sapiens
gagcctcctggcctgcagcttctgtgtgctcctgagaggtatggagagtgcaatcacgctgtggcagttcctgttgcagttgctgctggatcagaaacat

SEQ ID NO: 585916 - DNA, 83 bp, Homo sapiens
cacctgtgcgggatggaacaaaagttgtatcacggactgattcaccgagcccaaccgtactcaactcacatatttctacccca

SEQ ID NO: 585917 - DNA, 98 bp, Homo sapiens
tgcaactccccagcagcacgtgttggaatggacttcggaccctggcctcttgggatgcaaagcttgctcacttccgacagagaaaaacaaaaggtgac

SEQ ID NO: 585918 - DNA, 97 bp, Homo sapiens
ttgaagatgttgatctaaacaaagtttacatcctcggtgggcttgtggatgaaagcattcagaaggtgtacccaggaaggatgtgggaaacactttg

SEQ ID NO: 585919 - DNA, 100 bp, Homo sapiens
ccgcgatggcgcaagtcatcgggttcgttggggtgataaaggatctactgaggaaggtgcaaggctagagaaagccaaaaatgctgtggtgaagattcct

SEQ ID NO: 585920 - DNA, 119 bp, Homo sapiens
cgcttctccgcctggctggagtgtgtgtgcgtggtcaccttcgacctggagctgggccaggcgctggaggctaccggctctctgaccagttccacgacatcctcattcgaaagtttgac

SEQ ID NO: 585921 - DNA, 95 bp, Homo sapiens
gcactttgttttcaatgacaccaagttggacgctatgctggaagaatttaagaaaggctcaggaagaggccaaagaagcagaaatgagcagaaag

SEQ ID NO: 585922 - DNA, 97 bp, Homo sapiens
agatcagaaagaggcctccctcgtgagttgggcttggtaccgtgctgcccagaatgcccttcgggagccttgctctgtcatccaggctggagtgcag

SEQ ID NO: 585923 - DNA, 96 bp, Homo sapiens
ccgccgcctgcggcctttgctgcgggcgccggcgctggcggccgtgccgggagaataccctctaccatctgctttggtcagggtgccgctcgagga

SEQ ID NO: 585924 - DNA, 100 bp, Homo sapiens
catcattaacggaccttttaccatgaatagttctactccttctacagaataatccagaatggctactctgatctatgttgataaggaaaatggagaacca

SEQ ID NO: 585925 - DNA, 73 bp, Homo sapiens
ttacaccaaccaggacagaaatcattatcttagccaccagggacatgttgtcttaacagattttgggctttgt

SEQ ID NO: 585926 - DNA, 115 bp, Homo sapiens
actgcccagtggcttccagatgtaaccaggaaccacgtgaatgttgagggggcgacacacaagcaggtggtggacctgattcgagcaggcgagaaggaattgatcttgacagtgt

SEQ ID NO: 585927 - DNA, 90 bp, Homo sapiens
atcaaggtatttggtcccggaacaaagcttatcattacaggtatctagaagagcagaagacagagaatggaaaagataaggaacagaaac

SEQ ID NO: 585928 - DNA, 96 bp, Homo sapiens
tcagcctccaagtagccaggaccacaggcacgcaccctgagtaccccaaggagataactctggaggcatttgcagttattgtcacccagatgctgg

SEQ ID NO: 585929 - DNA, 100 bp, Homo sapiens
catggagacaagagtcaaccagaaagagattgggtacttaatggtattgttggtgaggctgatgaaaatggagaagattactatctttggacctataaaa

SEQ ID NO: 585930 - DNA, 95 bp, Homo sapiens
gttgatctgttcaccactcatttgcaacttatatcgccagtccagcagctaaggatattttgtgcaggctcgtggtcccaagaagcatctgaagc

SEQ ID NO: 585931 - DNA, 106 bp, Homo sapiens
tgacgagaagattccctctgcatcacggcgaaccccaggagatgaagcttgagtgcccaagggtttgataaatgtggaaaataaccgctgttcgaatatcctgttg

SEQ ID NO: 585932 - DNA, 101 bp, Homo sapiens
acaagcatgttcattgagtcatgggacctgccattaacgaaacaaaattaaggcagttctaactctctagtgatccctgaaaagttccagcatattttgcg

SEQ ID NO: 585933 - DNA, 100 bp, Homo sapiens
gagtttgtgtctgctagtttcgataaatctattcgaatctttcctgtagacaaaagtcgaagcagactgttcgccatggatttccctatcaaccctcagc

SEQ ID NO: 585934 - DNA, 100 bp, Homo sapiens
tattgattcatcagattttgcattggatattcgcatgcctggggttacacctaaacaggaatatgatgaagaatgggctaagaaaattcagagtgaaaag

SEQ ID NO: 585935 - DNA, 100 bp, Homo sapiens
ggaattgaagaatattcccaagtccttcacccgggtctcaacaaatggcagctattacatcagacagtgacgagtcctgctgctcccttacagtgtctga

SEQ ID NO: 585936 - DNA, 100 bp, Homo sapiens
gcgtggccgtccttcagacccctccagacatccaatcagaacattcaagggatggtgatatggatgatagtcgaggaagagcaagcagtcagaccaaaat

SEQ ID NO: 585937 - DNA, 82 bp, Homo sapiens
agcctcagttggaagcagccgatccagcctgcggagcctgtggggcagctggtactcctggttaatcaacagcttcgtcaac

SEQ ID NO: 585938 - DNA, 75 bp, Homo sapiens
acgggaacagtttcgtcaagaaatgatagctacccagaacttttccttccctccatgagaaagaagccagctctg

SEQ ID NO: 585939 - DNA, 82 bp, Homo sapiens
cagaaaggagccccgcgagtggcgcgccggggatgtgtggacactgccagcggctgcagccgacttggaatgacctgggaga

SEQ ID NO: 585940 - DNA, 101 bp, Homo sapiens
aaaaagtacatcaaagccctttctgaggaaaaggctatggagttactagtagagaaagcaatcagcagtgcttctagccctcagagccctggggatgcact

SEQ ID NO: 585941 - DNA, 100 bp, Homo sapiens
cgctgtggagacgcggagggtcgaggcggcgcggcctgaggataagtgcaagaaggctgcttccagctccaaagcacctaagaatggaggtaaagcgaag

SEQ ID NO: 585942 - DNA, 98 bp, Homo sapiens
gacggtgttccagtgcatcaccatggagggctggactgacatcctctataatgctgaccccgcactacatctacccaccagccatcgtgcagcccagc

SEQ ID NO: 585943 - DNA, 100 bp, Homo sapiens
tagccccatcatgggtgtctgatttgaacaccttccaccatgaccacctcagcaagttcccacttaaataaaggcatcaagcaggtgtacatgtccctgc

SEQ ID NO: 585944 - DNA, 82 bp, Homo sapiens
ggcagctcgcacttgctcaacaagggcctgccgcttgatatcagttttagagaatgtggcgtggagaaattctcaaggaaag

SEQ ID NO: 585945 - DNA, 100 bp, Homo sapiens
tgatccgctgtatgcagttttatccttttctgtacaacatcacttcttctgtttgcagtgcataaagatgcctatcaagtgatattggatggtgtgaaag

SEQ ID NO: 585946 - DNA, 90 bp, Homo sapiens
accagatcttcgagttgtcatccccccttcaagcaagggcatgatgcctccactagggctatctgatgggttagagtgcctttgagaaga

SEQ ID NO: 585947 - DNA, 73 bp, Homo sapiens
aaggccttgaaaggacagtacaattttgaccatccaggaatatattaaaggaatctgtgaacctgaactagaa

SEQ ID NO: 585948 - DNA, 90 bp, Homo sapiens
gagataacaaaagctgctcagagtctcaatgaacttgggaaatcctcattgacgattcaatttgttgaaggccaatttgtggactcctac

SEQ ID NO: 585949 - DNA, 74 bp, Homo sapiens
cgcccacagacctcaaattcaaagattacaccaccaccttcactgtcagatccacttaaagagctttttcgaca

SEQ ID NO: 585950 - DNA, 83 bp, Homo sapiens
gcttcaacttgtccagcctttccacgagcacctttaagttccgccatggagtcatagttgcagctgactccagggctacagcg

SEQ ID NO: 585951 - DNA, 89 bp, Homo sapiens
atccctgcaggggggcccccacaatcatgccattgctgcagtagctgtggccctaaagcaggccttcattaacacagccaaagaaatat

SEQ ID NO: 585952 - DNA, 90 bp, Homo sapiens
ggaaaaagtaattcgaccagaatggattgtggaaagtatggactttctgtcagattttgagatgatgttgcagcgaaaaaagagcatgag

SEQ ID NO: 585953 - DNA, 90 bp, Homo sapiens
cttggataccacccagcagatgattgctaattccttgaaggacaataccaccctcttgacccaggggaaaatcgttgcccagggtaaact

SEQ ID NO: 585954 - DNA, 98 bp, Homo sapiens
attggcattttgcaaatcttgaatttgctaatgccacacctctctcaactctctcccttaagcactgggatcaggtatttgtaggcaaaataccaagg

SEQ ID NO: 585955 - DNA, 50 bp, Homo sapiens
gcccaaagacccctggagacatgtaagactttgaccccgacgcaggcttc

SEQ ID NO: 585956 - DNA, 105 bp, Homo sapiens
gtgaaggagggttggctgcacaaacgagacgatgttccacaggagcccgtgcccacgctgtggaacgagccggccgagctgccgtcgggagaaggccccgtggag

SEQ ID NO: 585957 - DNA, 101 bp, Homo sapiens
ccctacttctggctacagctcgaggggccccgagagaacatgggcaaagccaaggaaagtctacagtttggtaccccaggactcgctggtcaggaaagccc

SEQ ID NO: 585958 - DNA, 95 bp, Homo sapiens
tgttgcagcttgcgtttggggctttcgacatgacaggtcactagagtgcaaaatggcaactcttaaggaaaaactcattgcaccagttgcggaag

SEQ ID NO: 585959 - DNA, 100 bp, Homo sapiens
agaggacttccttcttcgtgatcaatatttgcgtagcactttgcaagtgttttcgggttcatcattgcatccaagacaatgcaaactccagtgaacattc

SEQ ID NO: 585960 - DNA, 100 bp, Homo sapiens
ccgggagcaggagctgggcctaggtctgcgccctgtttcggagcaacatcccctgtcacctggttgatatctcttgcggattaccctgcagtgccacgct

SEQ ID NO: 585961 - DNA, 96 bp, Homo sapiens
cctacttctacgccaatgaggccaagtgcgacagccacatggagacattcttgcgctgcatcgaagcctcagacagccctcagcgcctttttccag

SEQ ID NO: 585962 - DNA, 75 bp, Homo sapiens
gatgttcttcttcgagtatttgtagaaggctctcatttcactcttcagtgttcctgttatttatgaacggcatca

SEQ ID NO: 585963 - DNA, 82 bp, Homo sapiens
gaatctgaatccggttttcaacgagactctccggcaacagaaagcggccctgctgaagaacaacaccgccttgcagtccgtt

SEQ ID NO: 585964 - DNA, 90 bp, Homo sapiens
tgagaacagatgtggccgtcctgcggtaccagccaccccctgagtatggggtaacgaggtctctaattaacagaagatggcaaagcccag

SEQ ID NO: 585965 - DNA, 82 bp, Homo sapiens
cctggagcctcagttggaagcagccgatccagcctgcggagcctgtggggcaggtattttgaaggtggcgtctcatctgtct

SEQ ID NO: 585966 - DNA, 101 bp, Homo sapiens
tctagctattgccttattttttctcatggatgttcttcttcgagtatttgtagaagggccggcatttgtaaatccactcatccctgaaagcccagaggaag

SEQ ID NO: 585967 - DNA, 100 bp, Homo sapiens
gcctttccgcgcgggactccggggcgccacgggggccatgtaagcaggatttttttcccaggaagccatcccgtcagaggggttcaagtgatgaaagttg

SEQ ID NO: 585968 - DNA, 100 bp, Homo sapiens
ggcctgcgggcgcccagagccgcgccgtccgcgccgcccgttctgactagacgcttgaagcaaagctgccatcccagaagacgacatgctctcagcaacc

SEQ ID NO: 585969 - DNA, 100 bp, Homo sapiens
gtgatggagattttgatgtggatgatgccaaagttttattagcaatggctgccatccggaagaaactggtgattgttggtgatggagcctgtggaaagac

SEQ ID NO: 585970 - DNA, 84 bp, Homo sapiens
cgggagctggacggcgagcgcgagcggcgcgagaaaaacaccttccaccatgaccacctcagcaagttcccacttaaataaagg

SEQ ID NO: 585971 - DNA, 100 bp, Homo sapiens
gacaatacttccatcagctggagaagatgggccatgatccaaaggaaccagagcagttgagaaaactgtttattggtggtctgagctttgaaactacaga

SEQ ID NO: 585972 - DNA, 80 bp, Homo sapiens
ccgcgccccctccccctcgccatgaaggtatccagctcacatagaagacattgactacgaggaaggaaaagtactcatcc

SEQ ID NO: 585973 - DNA, 101 bp, Homo sapiens
ttttttgaaacttgtttctaaaatccaggtatggcgactacccgaagctccctgaccgctcacagcatgagagagatccatggtatagctgggaccagccg

SEQ ID NO: 585974 - DNA, 96 bp, Homo sapiens
cgcgtgtcctcggagcgcggtccctgtattggtctcctgctcctagagcatgcagccagtaaagatcccagagaagttcgagaagctagagatcat

SEQ ID NO: 585975 - DNA, 83 bp, Homo sapiens
tgtcccacttgttcgcggcctataggatcttagaaatgaagttgaaaaattacgcaatgaagtgaatgaaagagagaaagcaa

SEQ ID NO: 585976 - DNA, 90 bp, Homo sapiens
aggagaagaagaaggaggcagtgaagaaagtgattgcatcgatgaccgtgggcaaagatgtcagatcaccggggaacccttgatccgtcg

SEQ ID NO: 585977 - DNA, 73 bp, Homo sapiens
gtatcaaggaagtggagcagttcacccaggtggacctctccaaggacattcagcactgggaatccctgaaacc

SEQ ID NO: 585978 - DNA, 50 bp, Homo sapiens
gccatttcagctacagtgttcacagccataggaaaaggatacagagtaga

SEQ ID NO: 585979 - DNA, 51 bp, Homo sapiens
agcgaataaagtttatcacgccgggacagccgctgtactgtgttaaggaaa

SEQ ID NO: 585980 - DNA, 50 bp, Homo sapiens
atgttcagtcatgatgattcggacaaatgctgtgcttcatgaagttaaaa

SEQ ID NO: 585981 - DNA, 75 bp, Homo sapiens
cccaaacaggaagtctatgatgagtacaaccacccgtgggacacggtcatccaggcggccatgcgcaagtacccg

SEQ ID NO: 585982 - DNA, 83 bp, Homo sapiens
gcggcttcctggcctgggcgctccggtggcggcggaggagcagtgctttctgggcctctgtagccagagctggccctgctgca

SEQ ID NO: 585983 - DNA, 90 bp, Homo sapiens
aagcaggagggagacacaacacggattgtctacatgggctggtgtgaagcccgggagcaagaccccctccaggacagagtgtactccccg

SEQ ID NO: 585984 - DNA, 101 bp, Homo sapiens
gggggaagggcctcaaagccagaaggtctttcttcgagaatccttggaacagaaactggagaagcggagggaagaggaagtgagccacgcggccatggtga

SEQ ID NO: 585985 - DNA, 95 bp, Homo sapiens
catgtcctgtgatggccccttcaagccggatcactaccgctactgagagccagaccacagcaccgggaagtccagtcagcggcagatggtgttcg

SEQ ID NO: 585986 - DNA, 75 bp, Homo sapiens
tttcatccctcgtcgaaaggattggattggcatctttagactattttgaagatgaggaagaagattctagcaacg

SEQ ID NO: 585987 - DNA, 131 bp, Homo sapiens
cccccaagtcgcaactggaacagcgagacacctggggatgaggagcttggatttgaagcagcagttgctgccttggttaagtgggcagaccaacatccacctcagcaaaaacttcttcctgacgaatcgcg

SEQ ID NO: 585988 - DNA, 85 bp, Homo sapiens
aatcacctgctccatttctcaccaggtggaggccaaaaaggatgagagttggcagggcacagtcttggtgatgccttggacagca

SEQ ID NO: 585989 - DNA, 100 bp, Homo sapiens
ctcaggttgcctttgaaataagaggaactcttttaccaggttcattgtccccatatcttgtgtgatctgtaatgacatcatggcctatatgtttggcttt

SEQ ID NO: 585990 - DNA, 95 bp, Homo sapiens
tctggcttgctgggctgcttggagctggtgggactgtgagcgtcgtctatatctttgtctctggcatctctatcccctatgaggcaccacgtaag

SEQ ID NO: 585991 - DNA, 97 bp, Homo sapiens
gaattctggtcactcagtgacacacacaactcgggcctccccagcgacacttaatggaattaatacactgggagaaaacattgctgataatggaggt

SEQ ID NO: 585992 - DNA, 98 bp, Homo sapiens
tggggatgacagcccagcactcaaggagaagcggtcacccacaaaagctgtatataatgccagacattggaatcatccagattcagaagaactgcctg

SEQ ID NO: 585993 - DNA, 110 bp, Homo sapiens
ctgaacttaataatttggcctgtgagtcgatctttttaggcatcaagcatgatggaaccatgtgtgatacctgccgccagcaaccaatcattggcattcgatggaagtgt

SEQ ID NO: 585994 - DNA, 97 bp, Homo sapiens
agtggcaatgagaccagtggaagcagcaccatcggggagacaagcaattaagtgggcagaccaacatccacctcagcaaaaacttcttcctgacgaa

SEQ ID NO: 585995 - DNA, 100 bp, Homo sapiens
ggcggacgcgcgcagcccgcccgcccggcgaccagcaaggtccaaggatcttataaaggaagctatccttgacaatgactttatgaagaacttggagctg

SEQ ID NO: 585996 - DNA, 100 bp, Homo sapiens
tcccgcggcgggaggagcctgttcccctgagaaggtgggtgcggctgctatttggacgagagttccccctgcaggaccttctggtggtctgggatgcctt

SEQ ID NO: 585997 - DNA, 88 bp, Homo sapiens
cggcgcggaccccgcgtgcgccttgctcgcccgcagccccgagaccgcaggaactcgtaacattcagggatgtggccatagaattctc

SEQ ID NO: 585998 - DNA, 82 bp, Homo sapiens
tagccggccaaggatgaagcctcacttcagacctgcctagagctggaacgttacctccagagcgagccctgctatgtttcag

SEQ ID NO: 585999 - DNA, 83 bp, Homo sapiens
ctgtgtcccacttgttcgcggcctatagcattttgaaagcgaagcagaagccgtagaatcagcggcgagcctgttgaaagaac

SEQ ID NO: 586000 - DNA, 75 bp, Homo sapiens
ctagacttcattcactactgcagagccaccgtgtgctgggaactaaagcacctggctgcagtggaagaaagaaag

SEQ ID NO: 586001 - DNA, 75 bp, Homo sapiens
caactttctgggatccagcgagcgacatggttttgagaacagagtgctgttttagagctggcagcagcatctcag

SEQ ID NO: 586002 - DNA, 74 bp, Homo sapiens
gtacaaggccatgctgcttttccagaactacaagtaaaggccacagccaggacagtcattttgtttactcattc

SEQ ID NO: 586003 - DNA, 97 bp, Homo sapiens
cgactgtggggacaacagtgacgaagagaactgtctcctggtgaccgagcacccgcctccgggcatcttcaactgcagtggagctactgctgtggtt

SEQ ID NO: 586004 - DNA, 82 bp, Homo sapiens
cgtctctgttcgtcaggaacgtggccgacgacaccaggtgtggacactgccagcggctgcagccgacttggaatgacctggg

SEQ ID NO: 586005 - DNA, 89 bp, Homo sapiens
ctgaagaagatcgtaacaacttatgacatgggctaagttctaaaaacatcagttcatctccaagcgttgagagtttgcctggaggaaga

SEQ ID NO: 586006 - DNA, 82 bp, Homo sapiens
tgcctcgggccctgcccctacatttggagcctggacacgcagtacagcaaggttttaaaatcaaagatgggaaaatcggaga

SEQ ID NO: 586007 - DNA, 75 bp, Homo sapiens
cggaatgcactacaacaggaaaatcatattatagatggagtaaaggccataggaaaaggatacagagtagagttt

SEQ ID NO: 586008 - DNA, 75 bp, Homo sapiens
caccgagggctaccacgttctgcgggaaacggggtctctgggggatccagtgacgtgcccaaccacagagaccag

SEQ ID NO: 586009 - DNA, 51 bp, Homo sapiens
aaatcgacgtgctgttttcatagggtaagaatgattgatgttggctgatat

SEQ ID NO: 586010 - DNA, 80 bp, Homo sapiens
tatggaacgtgaagtagcagagtgaattctctggatctttgtcaggtacattttatattggaggaaaaggttcactgaac

SEQ ID NO: 586011 - DNA, 117 bp, Homo sapiens
ttccaattcacctgaaggaaacaaaaccaaaggccgaagtacaagatctaaggctcttgtctggttgcttctagaactgctggagttactgtttgacaagtttaatgctgtagccgc

SEQ ID NO: 586012 - DNA, 74 bp, Homo sapiens
acacgccgaaacctggctgactgtcttcggagtcgggcactcttaaaagacccattttacatgggcttgtacca

SEQ ID NO: 586013 - DNA, 50 bp, Homo sapiens
gaaaactccaccgtagcccttgccaaaggccagcatccttcagaaaaagc

SEQ ID NO: 586014 - DNA, 75 bp, Homo sapiens
gtacaatggtgggcttaattttaggcagtataactccaactgtggaactgaatgggcttgctatgaaaaggggag

SEQ ID NO: 586015 - DNA, 75 bp, Homo sapiens
gctgctgcccctgctgtcgctcctggtcggcgcgtggctcaagctaggttaaatcttcgtgaacttggacccctg

SEQ ID NO: 586016 - DNA, 100 bp, Homo sapiens
gccgctcagggccacgatccccttccagctgcagcagccgcaccagcgccgggacgggggtggccgtgcagtgttcggtgaccagtgacttggattttcc

SEQ ID NO: 586017 - DNA, 75 bp, Homo sapiens
tcctctgaggcgacggccgcggctgcacaggtcttgatgactgtttgcagcagtatattaagaactttgagaggg

SEQ ID NO: 586018 - DNA, 50 bp, Homo sapiens
tctgatcactactgacttgttgtgtaaacaggaacatcgataagtagtgt

SEQ ID NO: 586019 - DNA, 90 bp, Homo sapiens
caggtttccaaatatggtgacctggctaactggatgatacctgatctctatgaagcaccagaattatcagtgaagaatatattaaatggc

SEQ ID NO: 586020 - DNA, 98 bp, Homo sapiens
ccgaagcggctcaggaaggcagctgtcactgagcccctggaacagagcgagagtatcgagaactacgatgacccgcacaaaacccctgcctccccagt

SEQ ID NO: 586021 - DNA, 74 bp, Homo sapiens
cccagttccgcgaggacatcacgtggaggcggccccagatccagcctccatcccaccacttctcccccgagcag

SEQ ID NO: 586022 - DNA, 82 bp, Homo sapiens
tgggagagactggaccagaccatgggcctgagcatcaggattttttatcaagcagaaatgcatcgaacaacgagaatcaaga

SEQ ID NO: 586023 - DNA, 100 bp, Homo sapiens
ctgaggtctacattgacctgcttcaaaagaacaggaccccgtacgtcactaccactgtctctgctcacagtgccaagaataccctctaccatctgctttg

SEQ ID NO: 586024 - DNA, 82 bp, Homo sapiens
cggcggcggcgggcatcgcagtggcgcaggtgtcgtgaaaactacccctaaaagccaaaatgggaaaggaaaagactcatat

SEQ ID NO: 586025 - DNA, 75 bp, Homo sapiens
caaaaataaagaaggagaaggaaaatggcttctctagctgagatctgtatctgtggacctgaatgttgatccctc

SEQ ID NO: 586026 - DNA, 98 bp, Homo sapiens
gggggactgattccaagacaaggcgcccaccccacagagcaagttttctgaaacgtgaccatggccaacctggagcgcaccttcatcgccatcaagcc

SEQ ID NO: 586027 - DNA, 100 bp, Homo sapiens
cggccggtcaggctcgccgccgagctggctcacagaacatttcctgcctgttgctcacactctgttgtccacagcatacccgcaccctagatggctgact

SEQ ID NO: 586028 - DNA, 51 bp, Homo sapiens
aatgccagcatctgccaagcaatcagtcgcatcgaatacattcattcaaag

SEQ ID NO: 586029 - DNA, 102 bp, Homo sapiens
ccgccggccgctagcgtcagcgccagccagcggaagatccatccaaaagctatgtgaaattacgagactttgtgcttgtgaagctttgtcaagatttgccct

SEQ ID NO: 586030 - DNA, 100 bp, Homo sapiens
ttcaactgccacgcagcgatttatacaactgcttttatgccataatgaataagtacattcccagatactgtggatggtagggaagaaaagtctgcttctg

SEQ ID NO: 586031 - DNA, 83 bp, Homo sapiens
tggagcctcagttggaagcagccgatccagcctgcggagcctgtggggcaggggttcaactagatatagcttcacaatctctg

SEQ ID NO: 586032 - DNA, 100 bp, Homo sapiens
gggaagaaggtccgcgttaaatatacacatcactggggagtcgggagaataccgtgcggaacccggccctgaagtgcctgagcccaggaggacaccccac

SEQ ID NO: 586033 - DNA, 100 bp, Homo sapiens
ctgggcttgagaataagactgttgttgtcaccacaattttggttcaaaccttgtactactcagctgatcacaagctgcttgatgggaacctactagatgg

SEQ ID NO: 586034 - DNA, 75 bp, Homo sapiens
gacatccgaggtgcctttctccaaaaggtacatgtgctccctgtcattgttccactattctgaatacttggtgac

SEQ ID NO: 586035 - DNA, 100 bp, Homo sapiens
atttagaagaggctggaaaagagggtggaaaaagcagggaggttatgaggcttaataaagaagagtcctcctttgtcacccagcctgaagtgcagtggtg

SEQ ID NO: 586036 - DNA, 100 bp, Homo sapiens
taacttctatgtgattgatcaaggagagacggatgttgcctgcggacacgctgggcctctgtcctgatgctgctgagctccctggtgtctctcgctggtt

SEQ ID NO: 586037 - DNA, 50 bp, Homo sapiens
gcatgctgaggatcctcttcctcctggatttgcagagaggtgcctaccac

SEQ ID NO: 586038 - DNA, 100 bp, Homo sapiens
aaatggcacttcattggccacctacagaaacaaaatgtcaacaaattgatggacatagatgagtgtgaagtttctggcctgtgcaggcatggagggcgat

SEQ ID NO: 586039 - DNA, 100 bp, Homo sapiens
agacgacactcttccatggcccggatacattccatgacaattgaggcgcccatcaccaaggaccatagaaaagatttatccatattatgtgaaagcacct

SEQ ID NO: 586040 - DNA, 75 bp, Homo sapiens
gaggtcatccttggcatgggctacaaggaaaacgatcgaaagctgctttgcgtcgcagttggagcagcaccccca

SEQ ID NO: 586041 - DNA, 75 bp, Homo sapiens
gtggaatctgttcttcttttgcatcctacgtaaccagaccaagctgtggggagtccttcaataatgttaaacagt

SEQ ID NO: 586042 - DNA, 90 bp, Homo sapiens
ggcagcaacaaggagggaaaaaagagcaggtggaaaaggaaagttaattggccttggtcctcacagctccaaaaagaaacaggatctcga

SEQ ID NO: 586043 - DNA, 100 bp, Homo sapiens
aactaccgagtctcactggccgagaaagacttcccaagtaagaagcggaagaggagccgctggaaccaagacacaatggaacagaagacagtgattccag

SEQ ID NO: 586044 - DNA, 76 bp, Homo sapiens
cgcgactacagccactactacacgaccatccaggacctgcgggacaagctgtcggaaaaggtaacagaagatggaa

SEQ ID NO: 586045 - DNA, 98 bp, Homo sapiens
tgtggaccgggcggcacgcacgcggtgcagggtaacatggcggatgcggaaggctccataaaaatacagactcaccagttcctgctttgatgtgacat

SEQ ID NO: 586046 - DNA, 100 bp, Homo sapiens
ggacctgtctgatctgcgagcggcagcgcggcagtgacccgccctgggagctgcccccagcggatgctttcattggatttggaggaaatgtgatcaggca

SEQ ID NO: 586047 - DNA, 100 bp, Homo sapiens
tgaaggtggaggaacaaaatttgtctgcaaacctggagccagaaacattaccgtcatattccacccattactaagtgagaaagatcagtctaaagaaaag

SEQ ID NO: 586048 - DNA, 75 bp, Homo sapiens
caccccttctcagaacagaaagcgtctctacaaagtgatccggaatgccggtggtggtgtgcacattgagccccg

SEQ ID NO: 586049 - DNA, 100 bp, Homo sapiens
gggcagcgagacggccatcatcgtgtccatcgtcatctgcagcgtcctgctgctgctctccgtggtgggacagagcgggatgccaccagcttgtccaaag

SEQ ID NO: 586050 - DNA, 89 bp, Homo sapiens
agcagagtgtctggatggaacctgagctgggtctctgactcacttctgactttagaaactgggagtgatttttccatgtttgaagcttt

SEQ ID NO: 586051 - DNA, 74 bp, Homo sapiens
aagccttgtttattttcctcaccactgaatctacagactgcttttggcttctggatgccctcctccagtacaca

SEQ ID NO: 586052 - DNA, 74 bp, Homo sapiens
gcagccgatccagcctgcggagcctgtggggcagtaccaaaagaattggtggagctccatttgaagctgatgag

SEQ ID NO: 586053 - DNA, 100 bp, Homo sapiens
tttaaatatgacggctccaccatcgtccccggcgagcagggagcggagtaccagcacttcatccagcagtgcacagagtatggtgtttgcgaaaacttgc

SEQ ID NO: 586054 - DNA, 99 bp, Homo sapiens
gccagttactatggcagttgcaaaatattcaggagaccgtcgttgccttgtatttccagagaacagatcatgattctggaaggaggtggtgtaatgaat

SEQ ID NO: 586055 - DNA, 49 bp, Homo sapiens
acggactcgtatcggtaccccaggacagcgtctgctgcagagaccatgt

SEQ ID NO: 586056 - DNA, 96 bp, Homo sapiens
aatcgcgaggcagagcgggagcgcgcagccaggttaacaatgagaatgttgtcaaagtcggccacaggcaggtggtgaacatgatccggcagggag

SEQ ID NO: 586057 - DNA, 75 bp, Homo sapiens
tcatcctcatattcctggagtctcagatcaccacgtgggaacatccagttgcaggaaaacaagcttaacacgccc

SEQ ID NO: 586058 - DNA, 80 bp, Homo sapiens
ccaccctgcgctgccgccgctctgaggagttaaagagattaaccaaagtgctgataatttgcacatatttcttctgatat

SEQ ID NO: 586059 - DNA, 75 bp, Homo sapiens
caatggcatttacagaaagagtcaacagcagtggcaacagaccatatactccttgacgacagggactaccacctt

SEQ ID NO: 586060 - DNA, 75 bp, Homo sapiens
ctggtgtaatacaagatgctttaaagaaggccggacatggtggctcacacctggaatcccagaacttcaggaggc

SEQ ID NO: 586061 - DNA, 100 bp, Homo sapiens
gccgcctgaagcagctgctgtcccgggcctaccccctggactccctggagaagcagatggaaaaggcacctacaaaggcagcacctaagcaaaagattgt

SEQ ID NO: 586062 - DNA, 100 bp, Homo sapiens
gaccgagtgatgataatccggaccatgctgtatactccacaggaaatgaaacagggactaccgcgccatcccagagctggacgcctatgaggccgaggga

SEQ ID NO: 586063 - DNA, 88 bp, Homo sapiens
tccacgtaatccaagagaggctaaaggaagaacaacagatggatcccttcaggagagcacagaatggggattcaacacctcggcaatg

SEQ ID NO: 586064 - DNA, 50 bp, Homo sapiens
gcgcctcctgcaggccctggtggaggtctatgttaacaatgaatgggcaa

SEQ ID NO: 586065 - DNA, 100 bp, Homo sapiens
ctgaaagctaaccagcaattcttagtctactgtgaaatcgatgggtctggaaatggatggactgtgtttcagaaggtactggcggaggacattgggcatg

SEQ ID NO: 586066 - DNA, 96 bp, Homo sapiens
gggcatcctctacaccatcgacaccgaaaactccaccgtagcccttgccaaagcgcatggatttaggagaatgtaccaaaatccacgacttggccc

SEQ ID NO: 586067 - DNA, 98 bp, Homo sapiens
gctctgaagggtccgaagtgattttagctacatcaagtgatgaaaaacacccacctgaaaatatcattgatgggaaatgtggctttagataatctaca

SEQ ID NO: 586068 - DNA, 100 bp, Homo sapiens
tttaataaccatgcttaatgcaaaagaccttctacaggacctgaacatctggcgaggccccaatgtgaactgcacagacagttcgggttacactgcttta

SEQ ID NO: 586069 - DNA, 88 bp, Homo sapiens
tgaaataacccttgatcctcctcctaattgcaggattctggactctacttataatatccctaactgctggattctcctgttgcagctt

SEQ ID NO: 586070 - DNA, 104 bp, Homo sapiens
aaagatttggatgatgaagacagcaatccaaagggaagggaattcaggcaggattctgctttcccttggactgtatcactcaggactctgaatattccctgaaa

SEQ ID NO: 586071 - DNA, 98 bp, Homo sapiens
tttcccaagagcagcggaaaatgatccagtcacagcacatggattaattgatgtatgttgagtttatggagctgccttttggtggcttgctttatctg

SEQ ID NO: 586072 - DNA, 82 bp, Homo sapiens
tatctgtcttcggtggactccttcggcagtccacccaccgccgccgcctcccagctgtcccccgaggcagcctatgatgtgc

SEQ ID NO: 586073 - DNA, 83 bp, Homo sapiens
ctgcaccttaaaaacaaaagattgagctgcactgtattcctgacctagaagaatcccttaggatgaagctgagtcttaccaag

SEQ ID NO: 586074 - DNA, 88 bp, Homo sapiens
acgctgaccagcgggtctgcctgcggcagctcggtgctgggctcggtcacggcagaggacatggatttgattgacatactttggaggc

SEQ ID NO: 586075 - DNA, 100 bp, Homo sapiens
ggagactaccagaaggcttatgaggatggctgcaagactgtcgacctaaagcctgactggggcaagcttgtctttaaccgaactgtcacactgaaggaag

SEQ ID NO: 586076 - DNA, 87 bp, Homo sapiens
gcgggagctggacggcgagcgcgagcggcgcgagaaagtgtttgagaagtcccccctgcgggtgaagaacttcgggatctggctgcg

SEQ ID NO: 586077 - DNA, 75 bp, Homo sapiens
ggaggaggaggaggaggaagaggaggaaaaggccaaagcgtacaagaaagagaaacagaaggagaagaaaaggag

SEQ ID NO: 586078 - DNA, 100 bp, Homo sapiens
cgtggacaaagctgttgtctcagggagcacagaatggatgattcaacagccacacaaagcagcaacattttttggatgcattgggatagataaatttggg

SEQ ID NO: 586079 - DNA, 99 bp, Homo sapiens
cgaacagtggcagcgcgacctggccagctgccgcgactgggaggagcgccggaacgccgaggcccagctatcatggtgaacttacttcagattgtgcgg

SEQ ID NO: 586080 - DNA, 90 bp, Homo sapiens
cattcggggaatctgcagggcagactgcaattacatgcctgtctactgttctatcaattgatttcaaaccttcagaaatagaagttggag

SEQ ID NO: 586081 - DNA, 80 bp, Homo sapiens
ctcaggcggcgctcccggagatgccccgcggcagccgcgctcggggctctaagggcgaactttctgaccaagtatacaac

SEQ ID NO: 586082 - DNA, 98 bp, Homo sapiens
cagaaagctgctgaagaggtggaagcaaagttcaaaagaagctcattcacacagaagacccatttaatgatgaacatcaggagaggcaagaggtggaa

SEQ ID NO: 586083 - DNA, 100 bp, Homo sapiens
gaacccgcagcaggactacgaactcgtccagagggtcggcagcggcacctacggggacgtctataagagctcttcagtatccccatcagccagtttccga

SEQ ID NO: 586084 - DNA, 90 bp, Homo sapiens
gaagtttttccaaacctgtgaaaaagaacttgccaaaatcaacacattttattcaggggtccctgtgaaggtgaccaacgtcaaggatgg

SEQ ID NO: 586085 - DNA, 100 bp, Homo sapiens
caatgttctcgatgccaatctctgcttgaaaggagaagacttggattctcaggtttcccaggcagctgcagacttgaaacagttctgtctgcagaatgct

SEQ ID NO: 586086 - DNA, 75 bp, Homo sapiens
gatatgttccagttgcacatttcctgcaaggactccaaagtggtgaggggccagtgtcattcaaagatgtggctg

SEQ ID NO: 586087 - DNA, 98 bp, Homo sapiens
ccatggcagtgcagctggtgcccgactcagctctcggcctgctgatggtttgtgaaatggctgctgacatttctgaatccagcggggctgactgcaaa

SEQ ID NO: 586088 - DNA, 75 bp, Homo sapiens
actgagatgaggaggcgtcgcgcgcgcctgtagctcgcgggcctcgcaggaaattcagttcatgaagataagaag

SEQ ID NO: 586089 - DNA, 97 bp, Homo sapiens
tcgaatccagtagaaaactggtcaaggaagctacctattcaggcctgttctgtgtggtcatcaatccttacaagaacctgcccatctactctgaaga

SEQ ID NO: 586090 - DNA, 80 bp, Homo sapiens
ctgctggaccacaaaccgctgccagaaaacgactgcatttgcctccagacttgtcagacacagtgagccgctcaagcaaa

SEQ ID NO: 586091 - DNA, 100 bp, Homo sapiens
tgcggctcctcggctggtggcaagtattgctgtgggtgctgggacttcccgtccgcggcgtggaggtatccatatattcctgcacatattacaaagccta

SEQ ID NO: 586092 - DNA, 80 bp, Homo sapiens
catatcgtatcagatggcagacatacatcatttaaagggtggtaatcactcaaggaaaaggaattatcagagtaacaata

SEQ ID NO: 586093 - DNA, 75 bp, Homo sapiens
cgacgctgctgggtccgctgagcggggcgacccgaggtcactctgtgagactgctgggtcagaaaaaggataatg

SEQ ID NO: 586094 - DNA, 75 bp, Homo sapiens
ctgcctttgaggttggcgggaactgaaactgagccaaggagcaataactgaacgtttaagaagcttcagtatgca

SEQ ID NO: 586095 - DNA, 49 bp, Homo sapiens
gtgtcttacatcagttcagagaggttatgaagacagtatggagtttcca

SEQ ID NO: 586096 - DNA, 82 bp, Homo sapiens
cacgggccagccccgccgccctcgcaacctggcagccgccgccgtggaagtgatgtcttggcattgcccattttcaagcagg

SEQ ID NO: 586097 - DNA, 101 bp, Homo sapiens
agagagactttttgtacttacaaagtccatgctaacctactatgagggtcgagcagaggatatgttcaaggaatgagtgatttactttcccctcttttata

SEQ ID NO: 586098 - DNA, 49 bp, Homo sapiens
cctccgtacttacctgcctcatggagaaaagaagatatgcttcttaaac

SEQ ID NO: 586099 - DNA, 90 bp, Homo sapiens
atctatatgtcaataaagtagcagggaattttcacataacagtgggcaagttatgcgaatgacactgtcaaccttaaattggcgacggcg

SEQ ID NO: 586100 - DNA, 100 bp, Homo sapiens
ctgatggccgctgacaggggacgcaggtaatgcaggtggtgaaggagcaggttatgagagcacttacaaccaagcctagctccctggaccagttcaagag

SEQ ID NO: 586101 - DNA, 75 bp, Homo sapiens
gaaaatgcagtcctgctttgtacagcaatggatcacttggagtcctttattgctgaatgtgatcggagaactgag

SEQ ID NO: 586102 - DNA, 75 bp, Homo sapiens
ccaagtggaaggcgatgcacaacagattatacggcatggtacatcaggaacgtctctatcaagaatacaatttca

SEQ ID NO: 586103 - DNA, 83 bp, Homo sapiens
gagccgacccaacgatctgaactcctcaggccctgagcctgtgcaattatttcgagagtcaaaatgtggatttccgaggcaag

SEQ ID NO: 586104 - DNA, 75 bp, Homo sapiens
aagagatccgattggaacatgaagaaggtgcaccctgcacagctataagagaagctgactttggtttctgtgccc

SEQ ID NO: 586105 - DNA, 96 bp, Homo sapiens
cctcctccctttcatggttccatcagccgccttcatcaaatcaaacaggaagacagagatgtcaatgaccccatgcccaaccgaggcggcaatgga

SEQ ID NO: 586106 - DNA, 75 bp, Homo sapiens
cagccaagctcgtagcctgccactccgtgcctttgcccgaagtttttacatacaaattctactagtcacacctgg

SEQ ID NO: 586107 - DNA, 101 bp, Homo sapiens
cttcccaggggcttcctttggactggactgtccctgctcatccattctcctgccacccccagacctcctcagctccagatgttgatgttagtgaagattca

SEQ ID NO: 586108 - DNA, 98 bp, Homo sapiens
taattttgtggatagagaaactgttggaactgctttacaaagtattttaacacatcaccttcactttgggatatggaatttgataagcagttagccac

SEQ ID NO: 586109 - DNA, 83 bp, Homo sapiens
ggggaggtgggtactacacaaccgtctccagccttggtctgagtggactgtcctgcagcgtgagtgcatctccatccacgttg

SEQ ID NO: 586110 - DNA, 74 bp, Homo sapiens
accagctcctccggaagatttgtcaggctgggaacggtcccagagaactacttctatgtgccagacctgggcca

SEQ ID NO: 586111 - DNA, 101 bp, Homo sapiens
gccgactgccagtacctcttctcttggtacacctcagccgtgtgtcctctggggtaaaaatgcatttgcaaagggagaaaatgaaggccaaacagaagcag

SEQ ID NO: 586112 - DNA, 75 bp, Homo sapiens
gtcaccgttatgtgggaagcgaatccagaatgggacgcgagagataaagattctatccgacgagtagtacaacac

SEQ ID NO: 586113 - DNA, 74 bp, Homo sapiens
gtgcccgcggccacttttgccttcccgggaaacttttgagaagaactttgaaagagaaacccataaaataagtg

SEQ ID NO: 586114 - DNA, 90 bp, Homo sapiens
caaggtgagatcagccgcccggccaagctatcttctcgctagcaggttatgatgtgattgctcaagcccaatctgggactgggaaaacgg

SEQ ID NO: 586115 - DNA, 96 bp, Homo sapiens
gttgtcaaaccgcaggcatttcaatcacattatgagccgctcccgaggccccggcgcggcgcgagggcgcggggcgcggcgtccacaggcgccgag

SEQ ID NO: 586116 - DNA, 75 bp, Homo sapiens
tgaagtgctccgccgcccttgcctccaggaatgtatcctgtcaggtataatgtcagtgaatggcaagaaagttct

SEQ ID NO: 586117 - DNA, 75 bp, Homo sapiens
agaacttgccggtgccagctgaggttcctaaatatttgtcacagcaatgggctaaagcctctggaagaggtgaag

SEQ ID NO: 586118 - DNA, 75 bp, Homo sapiens
cggtggacacctatgatacaatctttgcaaaatacaattggccagatcgaaagattcaaccctatgaaaagataa

SEQ ID NO: 586119 - DNA, 113 bp, Homo sapiens
tggtggtggtggatatggtggcagtggggatggctataatggatttggtaatgatggtggcaactatggcggtggtcctggttatagtagtagagggggctatggtggtggtg

SEQ ID NO: 586120 - DNA, 98 bp, Homo sapiens
ggacacagccggccaggagaaattcggtggactgagagatggctattatatccaagtgacttttttgaacgaaccattctgtgcaacagccttgtgtg

SEQ ID NO: 586121 - DNA, 82 bp, Homo sapiens
tgaggctgcaccaagtggcgaaggagccggctccaagagacaagaggagcagcagcggcaccgcccctcaccctggagggtc

SEQ ID NO: 586122 - DNA, 75 bp, Homo sapiens
ctcaggaaaatcagaaatctctagaacaacttagtgatgtaatccttcaggtaccagctggaggatgagtctgcg

SEQ ID NO: 586123 - DNA, 100 bp, Homo sapiens
aaacaatggcatttacagaaagagtcaacagcagtggcaacaggccaagtttcttcctaacagtggtgattctactctggccatgtgtgcccgtgacggg

SEQ ID NO: 586124 - DNA, 98 bp, Homo sapiens
ggaggactgtgctgtgcctctctcgcccacattttccccaagcactctcaggaacctggcaacaggtgctggagaatctggtaaaagcaccattgtga

SEQ ID NO: 586125 - DNA, 75 bp, Homo sapiens
cctgttcttctggaatgtcttgggggttttgatcctgtcactgtggtttgatttcctctgcatgcctgtcttcca

SEQ ID NO: 586126 - DNA, 75 bp, Homo sapiens
ccccctatcctatccgcaaacagtgtatgcaacagcgttattgcaacaggctaacgaaaacagacaaaattcaac

SEQ ID NO: 586127 - DNA, 50 bp, Homo sapiens
aagtacattagagccgaggttcatgggaaaggaaaacctcttcagcgcaa

SEQ ID NO: 586128 - DNA, 74 bp, Homo sapiens
atctacacagtaccagaggtggggactgttgttggaggaacactttccagcatctggttttgtagcctggatgt

SEQ ID NO: 586129 - DNA, 143 bp, Homo sapiens
ttcctttacagctccagactgagaggacgcagcatagaaaatgcttatgagtggttcagactcagtaatgagctacagagacttctgaagtggagagtctgcgacctcctcggttcttcaatgaagatggagttatcagaccg

SEQ ID NO: 586130 - DNA, 99 bp, Homo sapiens
aaaggaaatctctccaaccaggaacaaacacctgccttgcaatattaggattggatagctttagtcaaagcagctgctgcagctgcagccaagaacaaa

SEQ ID NO: 586131 - DNA, 101 bp, Homo sapiens
ggggtgcacggcggccacctgagtggcgcggcggtgtcagatggactagaggcttttaccagatttcttaaaactgaattcagtgaagaaaatattgaatt

SEQ ID NO: 586132 - DNA, 82 bp, Homo sapiens
attcggtggaacgaggacgcggactgcgaaggcaggaccaacttggaggccttgcagaagaagctggaggagctagagcttg

SEQ ID NO: 586133 - DNA, 100 bp, Homo sapiens
atttgaaaggggcagacggccatgttcgtgaacggcgcttcccttggtgcacctgtggccgccatgtttgagcgaggttacgaagtgacagtgctggtgc

SEQ ID NO: 586134 - DNA, 98 bp, Homo sapiens
catgaacaggctcggctcagcctacgggagaagcaggaggaggtccggagactgcagcaggtgagtgtggctgtgaagtgcctgaagcccgatgtcct

SEQ ID NO: 586135 - DNA, 100 bp, Homo sapiens
aggccgtccagcagatggcggatgccctgcagtacctgcagaaggtctctggagacatcttcagcagggtgttgattgcctttgctcagtatcttcagca

SEQ ID NO: 586136 - DNA, 100 bp, Homo sapiens
tcaggagaaaaaattggttgtggaagggcaacacttcgcctgagatcaaaaggtcctgccaccgtggaagaaatggcattgtgtggctgctcaattaatg

SEQ ID NO: 586137 - DNA, 99 bp, Homo sapiens
gattaatgtttctgttagatgacctagtatggaattgttacttagtgctgccacctgctggatgttaaaagaaagtgactgagaccgaagatgatagtg

SEQ ID NO: 586138 - DNA, 82 bp, Homo sapiens
gacagaagtgaagaaagatgaggccggagaaaactattccaagtttgatctgtggatgaaatgaatcatgattttcaagctc

SEQ ID NO: 586139 - DNA, 75 bp, Homo sapiens
gaaacagctggaggagatcctggagatgaactccagaagaaaaggaagtcattaaaggacagtatggcaagctca

SEQ ID NO: 586140 - DNA, 75 bp, Homo sapiens
gggccttgaaaagcagaagacaatccaaaacaaacgctattcctctcactttctgtgtttgaagaacatacgcac

SEQ ID NO: 586141 - DNA, 83 bp, Homo sapiens
tgtttcttggatcgctgcaaccatctccgccagaacgacaaagaggaggttatctaccttgcctgctcctatgccacagtgta

SEQ ID NO: 586142 - DNA, 51 bp, Homo sapiens
aaaccagtgctcaagtatttgaggtcagaaatgtgaattccaggatgccta

SEQ ID NO: 586143 - DNA, 75 bp, Homo sapiens
gtgcaggaaggcagtctttgctacgtacagcaaaagggattaaagcctgtggtttccacagaagcaccacctatc

SEQ ID NO: 586144 - DNA, 75 bp, Homo sapiens
cccaggaggggcgagagggagccgcagctgatgtcagatctcctccctggttcgaagggctgccctcacacacaa

SEQ ID NO: 586145 - DNA, 100 bp, Homo sapiens
ggatcaggagccgccgccgccatatcagattttaccaaatgttgcaagaactctggagttcttatggtagtaaaatgccggaaagaaaattctgcattga

SEQ ID NO: 586146 - DNA, 75 bp, Homo sapiens
atgattacagcacatgggacatagtcaaggctacacagctgagcacagggttgctccaggtgggcccaaatgctg

SEQ ID NO: 586147 - DNA, 100 bp, Homo sapiens
agttgcttttggaatgaatttggaatcttcccttgaagagaattatatccagatcgagagacagaagattctgaaagggttcaatgaaatgagagtcatc

SEQ ID NO: 586148 - DNA, 82 bp, Homo sapiens
ttttggctaccatggatacacatttgccaatctaggagagcatgagtttgtagagttacacgcatggggagatactctggag

SEQ ID NO: 586149 - DNA, 74 bp, Homo sapiens
agcactggacaagtgcatgcaagaccatgactgcaaggattgggtgcataagacagcacccgatggctggaaga

SEQ ID NO: 586150 - DNA, 100 bp, Homo sapiens
ataaggcaaatgcttccaattcacctgaaggaaacaaaaccaaaggccgaagtacaagatctaaggctcttgtctgattacctctctagtgacccttcag

SEQ ID NO: 586151 - DNA, 124 bp, Homo sapiens
ttacactgctatgctccagaacttcaaagggaaggtcattgtcatcgtggggcatgtggcaaaacacacagctgaggatattgtacctgtggatgcatcttatgaagtaaaagaactatatgtg

SEQ ID NO: 586152 - DNA, 100 bp, Homo sapiens
caactggaaactgttttggatgatcttgaccccgagttcattcggctcctaaagaagtagcagtgtccaaggaacaagaagagaaatctgatagcctagt

SEQ ID NO: 586153 - DNA, 87 bp, Homo sapiens
ctagaggcatggttgaaattgaatttttaaggaagaaatctctaaacgttttaaatcacatactgaccaacttgtgttgatatttgc

SEQ ID NO: 586154 - DNA, 90 bp, Homo sapiens
ctggccgaaacctccatagtcaccacttcacttcacctctttctggaaaccaggaagagagaagggcacagttacctaagtatcaacgta

SEQ ID NO: 586155 - DNA, 74 bp, Homo sapiens
gtcctggcattggcttggtggaggagcctatggataaggtggaggaagctttgtcacccgaaagaaccgccaag

SEQ ID NO: 586156 - DNA, 98 bp, Homo sapiens
gccgcctccggccaggacgctgggagctgcctgcgggaaggtgcggggagcggagccatggcctccgcaacgaaggttttgggaacagtaaaatggtt

SEQ ID NO: 586157 - DNA, 83 bp, Homo sapiens
aagcagccgatccagcctgcggagcctgtggggcagctcttcttggatccctcgtggaaactacatagaatctaatcgtgatg

SEQ ID NO: 586158 - DNA, 99 bp, Homo sapiens
gaggacagaggtgcctggggcaacctccaccttgacggttccagcgcctttccttcgaggagctcaaggcatttttcaaaatctgacagtttttctcac

SEQ ID NO: 586159 - DNA, 96 bp, Homo sapiens
caattccggacacataacaagcagcagtgaggacaccaaaggccggagcctcaacagaaagctcctttagttcctcctcctccaccgccaccacca

SEQ ID NO: 586160 - DNA, 100 bp, Homo sapiens
gttgtcccctggcgctacccggacatctctcagggtgccggcaccatgaagatctggacttcggagcacgtctttgagttcgatacaagaggctgttttc

SEQ ID NO: 586161 - DNA, 75 bp, Homo sapiens
agagcgacaagccgctggcagccgcggatctcaccgccgctcaggctggacccacaaaccgtggagaccaagaac

SEQ ID NO: 586162 - DNA, 100 bp, Homo sapiens
tcaggagaaagattacacaggagctgcagtgctgtactctaaggagcctcagggaacccagccagcacagcagcagcagccttgcctctatgagatcaaa

SEQ ID NO: 586163 - DNA, 75 bp, Homo sapiens
ataacttctgtgaagctgatgattatgaagcaattgtgaagctttcggatggctttaatggagcagatctgagaa

SEQ ID NO: 586164 - DNA, 104 bp, Homo sapiens
cctgctgtagtcacaggagctgtagagaggaccccggtacatctgaaagccgggaaatggttttaaaatcaaagatgggaaaatcggagaaaattgcccttccc

SEQ ID NO: 586165 - DNA, 95 bp, Homo sapiens
caatgaagatgaagacataggaggagctgcagaggctggagacagagttgggccaacccgctgagcgctggaaggacacctgggaccgggtgaag

SEQ ID NO: 586166 - DNA, 100 bp, Homo sapiens
gcaagtcaagctgccttaggcttataacatcacatttaaaagcatctcagcctactgccggaactctctggatggccagtggtacagttatgatgacagc

SEQ ID NO: 586167 - DNA, 82 bp, Homo sapiens
ctgacgtcttcatctgcacaagccccatcaagatgttcaagtactgtccctatgagaagagatgtggtcttgctatgttgcc

SEQ ID NO: 586168 - DNA, 82 bp, Homo sapiens
cgggcgctggtctgctcccagccggacttcctgatccatttgctaaggtggtggttgatggatctgggcaatgccattctat

SEQ ID NO: 586169 - DNA, 101 bp, Homo sapiens
aaccatcgcagttggaagcccatggggcaggttccataccccatgaagtgcctcagatattaattaatagagaacctttgcctcatctgcattttgatgta

SEQ ID NO: 586170 - DNA, 89 bp, Homo sapiens
taaagatcacagaagctgcccgggaggtgtttggagtctcgctctcagtcaaaatctccaacgggaactcctgctcgtgtaaaatcgga

SEQ ID NO: 586171 - DNA, 75 bp, Homo sapiens
gatgtgcagttatcagtctcacagaatattcctataacagttaatacactgttaaatgtgaaattaagtgagaca

SEQ ID NO: 586172 - DNA, 100 bp, Homo sapiens
agccctctatcttttgttctctggcatggaaggggtcctcagagttactgggatccatgaccagaactgtcctttggcaaatgtcatctgtgaatactgc

SEQ ID NO: 586173 - DNA, 75 bp, Homo sapiens
aagcaggcgaacccgcggcgcaataacggtaaagatgagccttccagctacatttgcacaacatgcaagcagccc

SEQ ID NO: 586174 - DNA, 98 bp, Homo sapiens
gttgattgaggacgttcccttcacggagaaagattttgagtatatgccctcattttgcttaagacctctggccagagcagggcatggaagattccttt

SEQ ID NO: 586175 - DNA, 100 bp, Homo sapiens
gtcgggtcagatccgacagaaggttttgctgttactgctcagtgtagtcacaccttgaataagaaatggaaaaccttgggatgttgataaagctaatatc

SEQ ID NO: 586176 - DNA, 100 bp, Homo sapiens
ccgagactctagaagaaatgccctccgggtcacaggataagtgcctaagtgtctagagagctgagtgggttgcctcggatcggccaggcctggatatcag

SEQ ID NO: 586177 - DNA, 73 bp, Homo sapiens
cgacttcgatgatcgtgtgtcggatgaggagaagtgagacggtttaagcggaagcatcttactgccattgact

SEQ ID NO: 586178 - DNA, 73 bp, Homo sapiens
gaactcagcagcggaggctggacgcttgcatggcgcttgaggggttcaactagatatagcttcacaatctctg

SEQ ID NO: 586179 - DNA, 75 bp, Homo sapiens
aggaggaagccgatcgaaaactcagagaggaggaaatccaggagctgcaggctcagattcaggaacagcatgtcc

SEQ ID NO: 586180 - DNA, 83 bp, Homo sapiens
atgaagcttctgaaccatccacacatcataaagctttaccaggagtttcggacgtggctgagggaggaatgggggcgcacgct

SEQ ID NO: 586181 - DNA, 100 bp, Homo sapiens
cccgaagttgccgcggggccttccgatcccctttaagtgggcagaccaacatccacctcagcaaaaacttcttcctgacgaatcgcgccagggagcgctc

SEQ ID NO: 586182 - DNA, 100 bp, Homo sapiens
ctgggagcagaagggaggctccaagacctcatcaacaattaaggaatggaagttggatacactttgtgacttgtacgagacactgaccattacacaggct

SEQ ID NO: 586183 - DNA, 50 bp, Homo sapiens
ctttcaaagtcatgaacgaattaagaagcctcactaagcagtcttttgat

SEQ ID NO: 586184 - DNA, 100 bp, Homo sapiens
acaaagtcccctttgtgttcacataatgctgtcaggaactgtgaccaagggtaatactgaacaacctgtccaaactagcaagattggacttggaagaaga

SEQ ID NO: 586185 - DNA, 75 bp, Homo sapiens
ggaatctggagcttcagtaacagtgtaaacaggaacatcgataagtagtgtaaaaacttgcacaatgaaatccga

SEQ ID NO: 586186 - DNA, 100 bp, Homo sapiens
atctggagaaaaactggatgttggtagaaaaagcaagagtttgttatatagcagaagaggatcacctagcccgggtagaagaggcaatcacccgtatgct

SEQ ID NO: 586187 - DNA, 87 bp, Homo sapiens
gcatatttagtcattcatttttgatcaggagaaagaagacagccatcatttgaaaggagcccatcatggcgacgccccctaagcggc

SEQ ID NO: 586188 - DNA, 100 bp, Homo sapiens
tcctcctgatcttaattagggtcagaaacgtcacctccttcccaccaccaggtactaggttttgacaagcttgcatcatgcgtgagtataagctagtcgt

SEQ ID NO: 586189 - DNA, 75 bp, Homo sapiens
cttcctgagtgcttctttcttggagctgaccatggtgccgtgagcgatgtggagatgcaggaacactatgatgag

SEQ ID NO: 586190 - DNA, 75 bp, Homo sapiens
gccgccgctgctacctgcagcgccgtgtggcacgacacaaaaatcaggtctgggatctgccgatatgggggatat

SEQ ID NO: 586191 - DNA, 98 bp, Homo sapiens
ttcctttttcgacgcctccgccgccgcctgaggaggcgagctagccgggagttacaccgccaccgccagggcttttgttgtaacaccctgactttaaa

SEQ ID NO: 586192 - DNA, 75 bp, Homo sapiens
ccgggatggcgacgtctacactgagtcggaggcgaaggatgtacagttacccagcacgtgtacctcctcctcctc

SEQ ID NO: 586193 - DNA, 90 bp, Homo sapiens
ccatcttgtatgactcaaactgccaactgaacttcatcgctcctgacaagcatgagggctatctgaagcagtgccggaagagaagggaca

SEQ ID NO: 586194 - DNA, 98 bp, Homo sapiens
tcagagtatagggaggacgtgggcccattcattgcaggacagagcgggatgccaccagcttgtccaaagggaagttccaggagctcctggtgggcatc

SEQ ID NO: 586195 - DNA, 101 bp, Homo sapiens
cgccttcctcaacgacgcggacatggtcatgagctttgtgaacctggtgtggacgaatgtggaacctcgctctgtggctgtgttcccttggcactccttag

SEQ ID NO: 586196 - DNA, 75 bp, Homo sapiens
cgtggatgtggtgtttgccaaccgcccggaccccaacaccccgatggaagactcggtgaaatacctggagtgctc

SEQ ID NO: 586197 - DNA, 74 bp, Homo sapiens
ggagtcgtccggagccgctgcgcggaggccccgtgtgggccgcggcccggccctcaccatggagtccatgttcg

SEQ ID NO: 586198 - DNA, 51 bp, Homo sapiens
gagcgccgctgcctcgcctcgtgagggagactctgatgtggactcggagct

SEQ ID NO: 586199 - DNA, 100 bp, Homo sapiens
tggccggagcttgagatacgccgctctgaatcttgccgccctgcactgccgcttcggtcactaggttcttgatggtgctagacattccccaggagcgggg

SEQ ID NO: 586200 - DNA, 50 bp, Homo sapiens
tcgagccccgccctgccgccagccaggaccatggccaacctggagcgcac

SEQ ID NO: 586201 - DNA, 83 bp, Homo sapiens
gttctataaacatgtggtacagagtgttgagaagtttattcagaaaatttggagcaagaggtggtggtggccttcccccgaag

SEQ ID NO: 586202 - DNA, 51 bp, Homo sapiens
ccggaggtgaggcggaactctgagcggaaatgagaaagcagagggagttct

SEQ ID NO: 586203 - DNA, 50 bp, Homo sapiens
gagatcttaataggaaccatcccaggtacccaagatattgtatttggaga

SEQ ID NO: 586204 - DNA, 100 bp, Homo sapiens
ctggagaggcccccacacgtgctgctcctggggaacttcgttctgcacggggcccactcagctctgcaccagccgagcttggaaaagtcagacagacctc

SEQ ID NO: 586205 - DNA, 115 bp, Homo sapiens
gccttagctgtgctcgcgctactctctctttctggcctggaggctatccagcgtgtggaaacaggaagagaactagaactggaagtaaagcattgaagatgtgactgaattgctg

SEQ ID NO: 586206 - DNA, 100 bp, Homo sapiens
gcaaagcgtaggcctcacaaacatcctggccgtgaaggcctgtatccggtgtccgaggcgaactcagtaagatgatgttaagaggaaacctgaagcaagt

SEQ ID NO: 586207 - DNA, 90 bp, Homo sapiens
acgtcgttccgcgacggcctggctttctgcgccatcctgcaccgccaccggcccgacctcatgttgcacactgggccacagaggatccag

SEQ ID NO: 586208 - DNA, 97 bp, Homo sapiens
cccagccgaccttgagctccaggagttcgtctcttacgtctgcggaagtgcagctgcctcagttcttagcgcagcgtcgagggcgaggcccccagca

SEQ ID NO: 586209 - DNA, 96 bp, Homo sapiens
agaaagctgcacatgctgccaaaacggtgaaacacggggcagtggggagggaaatgaccaaagaagaaaagctgcagcttcggaaggaaaagaaac

SEQ ID NO: 586210 - DNA, 110 bp, Homo sapiens
caaatcagagagaaggaatccaccttcttacgctatggcagatccgggaaacaggggagaggcccagcaatgaggaaatcatgcgtttttccaaattatttgaggatgag

SEQ ID NO: 586211 - DNA, 100 bp, Homo sapiens
aggcaatgctgggcacctacactgtggcagtggctgagggcaagacctttggtactttcagtgtggaggaatatggtggtcttttggtgccttaatgaag

SEQ ID NO: 586212 - DNA, 101 bp, Homo sapiens
gaatgtctgtttacatccaaggagtggccagcgagcacatgaagcggtcacagactgggatgagcaacgggctgaaggcacgtttcccgggaagatctgaa

SEQ ID NO: 586213 - DNA, 78 bp, Homo sapiens
ctacttcaaggataagggtgacagcaacagctcggcgggctggaagatacagaagtttacggtgagttttatcccgtg

SEQ ID NO: 586214 - DNA, 50 bp, Homo sapiens
aaaaagttatcagccatgggggaaagcagatggtggagctgaatatgcca

SEQ ID NO: 586215 - DNA, 100 bp, Homo sapiens
tcagaccagctcctctatcagcatttttggtgtctcccagtgatcaaaaagagagtggttgtgctgcttccctgaatctgtggatgtgggtggtgcatca

SEQ ID NO: 586216 - DNA, 90 bp, Homo sapiens
ccagtggcaaacagctgtataaactcttgtaaacagcggacaaggcaaaatctcagcaagttcggacctctagtacaataaggcgaacct

SEQ ID NO: 586217 - DNA, 96 bp, Homo sapiens
cagataactgaggacaatggacctgcctgggcatagacttccttaaggtgtcatggagaaactccagctgggcccagagattctgcagcgggaaaa

SEQ ID NO: 586218 - DNA, 151 bp, Homo sapiens
ggagaaggtgaagggcagcatcaccactatgctggcccttgcttcgtcccagggggatggcctctacaaggagcttgcagctgttgcagggtgtgatggagaacaaagctatgtacctacacaccgtcagcgactgtgacaccagctccat

SEQ ID NO: 586219 - DNA, 96 bp, Homo sapiens
gcgggacgcggccacctcgaagccacgtcagggcagccccaggtcgggcgcgtgccagcagccagaggaatagccaggccagaagaaggaaggcct

SEQ ID NO: 586220 - DNA, 51 bp, Homo sapiens
gcctctcgagtagctgggattacagattctcctgggcttctccaatttgaa

SEQ ID NO: 586221 - DNA, 100 bp, Homo sapiens
cactccagtgaaaatggaaattctgggcaagaaagatattgaaacaaccaccatttcaaattttcacactcagagggaagtggaatcccgattgcttgat

SEQ ID NO: 586222 - DNA, 74 bp, Homo sapiens
tgagggtgaagtggcaggaggaggaggaggggctccggctggtctgtggtgagcctctacttcaatgagctgag

SEQ ID NO: 586223 - DNA, 96 bp, Homo sapiens
ctttacgtctcattcaagaaaccgaagtgatttccagaggatttacactacgtatttcattagctagtccacgtcagctttttaaggcttctaata

SEQ ID NO: 586224 - DNA, 101 bp, Homo sapiens
tggtgaaccctgaagtcggtgtctgctgcgttcacggcaggattcggttagacaaatgctgtgcttcatgaagttaaaagagaggggctccccgtggaaca

SEQ ID NO: 586225 - DNA, 90 bp, Homo sapiens
cttcttcttaatcccatatctggacatctggaacatccatgagtttatgtggccgaggcagacaagtggaattaggccttgctgcagggg

SEQ ID NO: 586226 - DNA, 50 bp, Homo sapiens
ataacccttgatcctcctcctaattgcagtttcaccagtgatcattaaag

SEQ ID NO: 586227 - DNA, 100 bp, Homo sapiens
caagcggcaaccaagtctgggcaccacaagcagcctccatccctgtgagatcactgccctgagccaatccctacagcccttacggaagctgccttttaga

SEQ ID NO: 586228 - DNA, 98 bp, Homo sapiens
tccgttcctgcattagctgcctcaactccaatggtaagaaggtggatggctctgtaaatgcctatgccataaatgtctctcagaagaggaagtacagg

SEQ ID NO: 586229 - DNA, 83 bp, Homo sapiens
gcgcccgggaggaaggaacgaggcaaggagctaaagcagcgtgcgttcagccctggggtaccacatggaatgcttggaccccc

SEQ ID NO: 586230 - DNA, 76 bp, Homo sapiens
agcaaattgaaggcacaggaatatccatgtcggcttgtagagagattgcagtacctggactatgccagagtcccca

SEQ ID NO: 586231 - DNA, 98 bp, Homo sapiens
gtataaccatgtttcggaatagtctcaagatgctgcttactggtgggaaatcaagtcgtaaaaacaggtcaagtggtgctggagaatctggtaaaagc

SEQ ID NO: 586232 - DNA, 50 bp, Homo sapiens
gaggctgagctgctccaggacttgggatgagaaacctggatgagtgtgag

SEQ ID NO: 586233 - DNA, 75 bp, Homo sapiens
gcgattgcgagaatgaggaggacaacagctacaaccggggagtgcctggtgaagaatgtgatgggatcactagca

SEQ ID NO: 586234 - DNA, 90 bp, Homo sapiens
ctccggcccgggcgagcgggtgcgtctgccgcagagtcggcacctgaaggacatggagcattgcagtgtcgagatggctatgaaccctgt

SEQ ID NO: 586235 - DNA, 82 bp, Homo sapiens
accaccaccaccgcggtgactgccgccgcggcctcggacgactcgccttcagaaggctgttttggagtcagcggaagatcac

SEQ ID NO: 586236 - DNA, 97 bp, Homo sapiens
agtgcgtggaggaggcctacagcctcctcaacgaatacggcgacgacatgtatgggccagaaaaggtggtgaaggcctttattgtcctgaccccaca

SEQ ID NO: 586237 - DNA, 98 bp, Homo sapiens
ggaatatctcggtgccatttgctcctgcacatgctttggaggccagcggacttcacagagaatgcagttgtcttgacttcaggtctgtctgttctgtt

SEQ ID NO: 586238 - DNA, 75 bp, Homo sapiens
tggagccctgggcgcgggggcggcgtgtcaggtggttgcggagctggtgtccctggccagtgtccttccacctgt

SEQ ID NO: 586239 - DNA, 50 bp, Homo sapiens
taatcccagcactttgagaggccgaggcaggcggatcacaaggtcaggag

SEQ ID NO: 586240 - DNA, 101 bp, Homo sapiens
gttcgcccgtgaccacgcgggagcccacgccgcgcctgcaggaggatcatctgttacgtactgcaagtcagcattccgatagcagtggttttgctgaagat

SEQ ID NO: 586241 - DNA, 100 bp, Homo sapiens
cttgagggtgacagtggccccatgggacctgatgggctgaagctgacaagccagagacgaccaaggagcaactgggagagttctacgaagctctcgactg

SEQ ID NO: 586242 - DNA, 100 bp, Homo sapiens
aggaagagcaaccatttgaaccatcctccgcagcattcctagtgtctctctacataaaggacatctggctgggggctcagcggccggacaccctcttaac

SEQ ID NO: 586243 - DNA, 82 bp, Homo sapiens
taaagacggaaccgccacagcactcaacggctatgtgactacgtttgtgacctcctcttagaagagtcaaatgttcagccag

SEQ ID NO: 586244 - DNA, 75 bp, Homo sapiens
gatcccagcctcaggcgtgcgcggacggtgtgcggaacaagaggaaagtatggggaaggagccaagcaggagacg

SEQ ID NO: 586245 - DNA, 90 bp, Homo sapiens
ccctggctccctcattaccgtcgccagcggagcgaacccgagagcgtggagcgggctgggccagatggagttttaacattgaatgcggag

SEQ ID NO: 586246 - DNA, 75 bp, Homo sapiens
caaaagccttccatgattacgttcagagcttcatgcgaggatggttgtgcagaaggaaatggaagaccatcgtgc

SEQ ID NO: 586247 - DNA, 100 bp, Homo sapiens
gtacttgtacctgtctggattattcattattacatgaagtatcatgtttctgttatcaatactctggctgaccatcatcatcgtgggactgactttggtg

SEQ ID NO: 586248 - DNA, 75 bp, Homo sapiens
tgcagcctggattttctttgctaagtaatctatgccagcaattatgacaatgttagcagaccatgcagctcgtca

SEQ ID NO: 586249 - DNA, 100 bp, Homo sapiens
cacgcgtttcccgcaacccgataccatcggacaggatttctccgcctcagcccaacggggagcgtcgagggcgaggcccccagcagtgagactggcacat

SEQ ID NO: 586250 - DNA, 51 bp, Homo sapiens
cacgctcttcagcaccaccccgggaggaaaaaggccacagtgaaggccgac

SEQ ID NO: 586251 - DNA, 76 bp, Homo sapiens
caagaaggaaataaaaacgttggattagatattgaggtgataaatatgcgtaccattagaccaatggacatggaaa

SEQ ID NO: 586252 - DNA, 100 bp, Homo sapiens
gggatggcgtcccccgggggcccgtactgcacatcgtggtggtcggatttcaccacaagaagggctgccaggtgttgacttcaaaatcaaaactgtagag

SEQ ID NO: 586253 - DNA, 50 bp, Homo sapiens
ctcggaactcgggcatcatggcctcaggggtggccgtgactggggagagc

SEQ ID NO: 586254 - DNA, 90 bp, Homo sapiens
tccgtaaccacaaggaggacgagcaaacggggattcagcgtccgatcctttggaacagggactcacgtgaagcttccaggaccagctccc

SEQ ID NO: 586255 - DNA, 101 bp, Homo sapiens
gtaaatgtggaacgttacaaacaggaagccacttggaggatgtgctttaccaaaatgagggagtaatctgagaaggcatgggatcctgaaactaaaagatg

SEQ ID NO: 586256 - DNA, 100 bp, Homo sapiens
gttggttcgtgctggactacaatgcaggactgctctcctactacacggctcacaggctttcagctgccagccaccattgttagtgcagccaccaccctct

SEQ ID NO: 586257 - DNA, 90 bp, Homo sapiens
cctcttcagtgcaggaatatgttagcgttgtatcttgggagaaagacacagtctccatcatcccagctgaaccttagccggccgatcgag

SEQ ID NO: 586258 - DNA, 83 bp, Homo sapiens
aaaatctacaagatgatgcagggaggaggaagcttgctgtcttcgatacgtggagctccttggcggtccacattgcaatggac

SEQ ID NO: 586259 - DNA, 98 bp, Homo sapiens
tcagtgagaacttgaacaatgaggtcatgatgaagactcaagtgggtgagttcctgggagataatgataaatttaacaaagaagtcatgtatgcatat

SEQ ID NO: 586260 - DNA, 126 bp, Homo sapiens
gggtcctgaatcttctgggagctgaggaaccagatatcttgaaaagctgccagaaaggtgtcatggagaaactccagctgggcccagagattctgcagcgggaaaatccaaggcttatttatgcca

SEQ ID NO: 586261 - DNA, 98 bp, Homo sapiens
gctccgcagccccgggcacggcggaggcagcggagccctgggccatcgaaatcttcccaaggctgcagacaccgacggatttgctttgggagccagag

SEQ ID NO: 586262 - DNA, 82 bp, Homo sapiens
ccaagatgtctgacatggaggatgatttcatgtgcgatgatgaggaggactacgacctgacttgggaagatccccatgaaaa

SEQ ID NO: 586263 - DNA, 100 bp, Homo sapiens
cggaagacatgatgcagagcaagcctctgtgattcctgcccagcacctgtgaggcctgacgtctcaaactttggaacaaataccgaatttccaacattcc

SEQ ID NO: 586264 - DNA, 82 bp, Homo sapiens
cgctactcgcttgcctacccgccggcccgcgggtctacttcctcaaaggtgtcgtgaaaactacccctaaaagccaaaatgg

SEQ ID NO: 586265 - DNA, 100 bp, Homo sapiens
tagtgttttcttatttagccggagtgagaagcaagaaggccctggacacagcaatatctctgggctttcacaggaccgtataatagacgctggccccaaa

SEQ ID NO: 586266 - DNA, 96 bp, Homo sapiens
gcaaatcttttccccgtggatcaggaaggtgctagtattgtctcaagactatggcaaacacttacttggtgtggaagacctgttacagaagcacac

SEQ ID NO: 586267 - DNA, 75 bp, Homo sapiens
acagcctcctgcgagagcagattagtcctaacaacctgagagaagattacaaatttcaccacactttcagcacag

SEQ ID NO: 586268 - DNA, 83 bp, Homo sapiens
gtaaattgatcaggatttttggcctaccctccaaagaaaaggaatcttgtcgattggcctggctgctgcctactacagcggag

SEQ ID NO: 586269 - DNA, 98 bp, Homo sapiens
gaacacacttccaggaaagatgccatgacaggctccaaacaggcatgcgaggtgcctttggaaagccccagggcactgtggccagggttcacattggc

SEQ ID NO: 586270 - DNA, 101 bp, Homo sapiens
aatggcatccatttactctgaggaaggcaacattgaacatgccttcatcctctataacaagtatatcacgtgtcagctgtgatgcatgtttaaaaggaaat

SEQ ID NO: 586271 - DNA, 108 bp, Homo sapiens
atttcatccctcgtcgaaaggattggattggcatctttagagcagactgccagattcacttacagccccagctaattccaccaaacatggaggagtacatgaacagcc

SEQ ID NO: 586272 - DNA, 50 bp, Homo sapiens
gaaagttctgagacatcttgtagaggactcatgcccgttgcacagcagcc

SEQ ID NO: 586273 - DNA, 100 bp, Homo sapiens
ggagaagcccaatatgctgtggtccactgtacaggatacatcaaggcctggccaccagcagatttaggtcgatctcgagaactacagtatgtatacgtgg

SEQ ID NO: 586274 - DNA, 51 bp, Homo sapiens
agggtctcagaggacagacagtgccagcaaattatgcgcacagccatgaag

SEQ ID NO: 586275 - DNA, 75 bp, Homo sapiens
cctgcgaaggtggcggcgctgctgctcgggctgctcttggagcacaggaagtcctggagaacctgaaggaccgct

SEQ ID NO: 586276 - DNA, 75 bp, Homo sapiens
aggattggcaggagattatagctctgtatgagaaggacaacacctacttaggcctggcccgagccaagtcaatcc

SEQ ID NO: 586277 - DNA, 82 bp, Homo sapiens
gtggtgtcttcctgtctcaacgatacctattttctagtgctgagatcctgagacaatgtatcctaagaaatccggtaaccaa

SEQ ID NO: 586278 - DNA, 95 bp, Homo sapiens
taaggactgtatcgactcctttgttactcactgtgttcggctgagatctgtatctgtggacctgaatgttgatccctcgcttcagattgacatac

SEQ ID NO: 586279 - DNA, 50 bp, Homo sapiens
ccaaggaaacagccacctagccaacgaacccagtgacttgattgtaaaaa

SEQ ID NO: 586280 - DNA, 75 bp, Homo sapiens
tcagctctcagggagtgatcaactagaatccacagctcatagtagaattaggtttcaagtgccccatttgctcca

SEQ ID NO: 586281 - DNA, 50 bp, Homo sapiens
cgtggtccagtatgccaactcctgtcctcatcaccgggggcatcgtggcc

SEQ ID NO: 586282 - DNA, 75 bp, Homo sapiens
cgatgtgaagatgtcagtgggctgtgcctgtcctgtaagcaagctgtgtgggaagtgcagccccactgacgtgga

SEQ ID NO: 586283 - DNA, 83 bp, Homo sapiens
ggaatttccagagttagtagcaagatcctccaggtcctattgacaatactaagattgcagtcactaaatgtggtaatgtgatg

SEQ ID NO: 586284 - DNA, 76 bp, Homo sapiens
ggacgtgtaaaaagaactcttaacggccgatgcagctcttccaaagctaagatcagaatgaaggatttcattgccg

SEQ ID NO: 586285 - DNA, 88 bp, Homo sapiens
ctgttcaagaggcagctgcgtatttaaaaaaatcaatgtggactgaacataaatcacctgatggaaggacttactactacaacactga

SEQ ID NO: 586286 - DNA, 74 bp, Homo sapiens
tgcacatcgtggtggtcggatttcaccacaagaagggctgccagatttattcaggagattgagcatgctctggg

SEQ ID NO: 586287 - DNA, 50 bp, Homo sapiens
gaagatagtgcctttcagccctaccagggccagctcttccgaggctccag

SEQ ID NO: 586288 - DNA, 100 bp, Homo sapiens
ccgagctccggcacagcgccgcgtccgccgccgcggtggcagtcagcagccggcagcagcagcgggtgaagccaaaaaccttccctcttacccggggccg

SEQ ID NO: 586289 - DNA, 97 bp, Homo sapiens
agaacttctctgctgaagaagcatcttttagggatcagcctgtgttttttaggcatgttatttgaaagcaattgagacgcaaccgaactttgcagta

SEQ ID NO: 586290 - DNA, 109 bp, Homo sapiens
acgaaaacgtagggaccacatcaaagacagctttcacagtttgcgggactcagtcccatcactccaaggagagaaggattaaccacaatgaacggttggaattcctggg

SEQ ID NO: 586291 - DNA, 80 bp, Homo sapiens
ccgaagccccctgcaggaactctacaacccaatccaggtctcgtctacagaggactggtctttcaatagcaagttttcac

SEQ ID NO: 586292 - DNA, 74 bp, Homo sapiens
tcgccgtgggagccctgctggtctgcgccgtcctgggtgttgctgcctatgttggctggcaaagctcctcaatt

SEQ ID NO: 586293 - DNA, 50 bp, Homo sapiens
tgaatcacaggagatatttccagaattcagcttagagaactatcaacaca

SEQ ID NO: 586294 - DNA, 100 bp, Homo sapiens
ccttgggccggggatttaacacaggcacgttgcccctggcctcgcaggagtcggccgtggtggaggacctgctgtacgtgctggtgggcgtggacgggag

SEQ ID NO: 586295 - DNA, 100 bp, Homo sapiens
ggaaatgaggagacactgggagggtttcctgtcaagagtgttgttccagctttgcttcattcagatattgactctggtgatgggaacattaaatacattc

SEQ ID NO: 586296 - DNA, 98 bp, Homo sapiens
aaggtgaaaatcgtggccgggcgccatttgccagtgatggaccgtgctagtgacctgactgatgccttcgtggaggtcataactccatgcaggaagct

SEQ ID NO: 586297 - DNA, 75 bp, Homo sapiens
cggccctgagctcccggcggcgcagttggttgaatctggcgatgtggaacccatggatatggagggctgactata

SEQ ID NO: 586298 - DNA, 107 bp, Homo sapiens
tctgggagcctagaatgcatcagtgcccttgtggcgaatggggctcacgtcgagaggagatgttaaagtaacccatcttgcaggacgacattgaagattggtcttct

SEQ ID NO: 586299 - DNA, 111 bp, Homo sapiens
atgtcttgggtcctgctgcctgtactttggctcattgttcaaactcaaggtttgccagaacccaataaagatgccatcttccaaggcctgacgcaggaccaggggttttat

SEQ ID NO: 586300 - DNA, 100 bp, Homo sapiens
ggaggccacttcagggaggtagcaatgcagtggaaagtgaccctcacctccagatgggggctgctcagacactgccaggccatccgggatggtgtcattg

SEQ ID NO: 586301 - DNA, 100 bp, Homo sapiens
gctacctgcggcccggctctcctccgcgcccccactcgcgctgcgatgacgcgctcactgttcaagggaaacttttggtagagatggggtttcaccgtgt

SEQ ID NO: 586302 - DNA, 100 bp, Homo sapiens
acaaggccacaactctgcagtggaccacagcattcctgaaatacatccaggaaagacatggagattctcttaaaaaggagcttactccacgggaacagcc

SEQ ID NO: 586303 - DNA, 75 bp, Homo sapiens
aaacttcttaacccctagaccggtttttagtccattgactatgcagcctaatgattagtgatgatgaaccaggtt

SEQ ID NO: 586304 - DNA, 82 bp, Homo sapiens
ccggcggcggggcagctgccaggaacgagggtagcagacaatgcagatcttcgtgaagactctgactggtaagaccatcacc

SEQ ID NO: 586305 - DNA, 73 bp, Homo sapiens
gcattgcggggatgagtccatgctggacattggaggagtgagatgtggatgttgcttttgcacctacgggggc

SEQ ID NO: 586306 - DNA, 82 bp, Homo sapiens
gcacctgccagccaggcctcggacgaggaggacgcgcccgccaccgacatctactttatgtggacgagtgctcactagcaga

SEQ ID NO: 586307 - DNA, 100 bp, Homo sapiens
cattcatcaagtggagacacgtttagcttaaaaacagctcattctcctaatgttttccttcagcaaggacaaagagtctcagtcaaaccactccaatcag

SEQ ID NO: 586308 - DNA, 100 bp, Homo sapiens
ctctccgtccatggccccagatgacacttcaggccttcccagataatgctgcccgcagggaggtggagagcctgccggccgtctgtcccagtgatggatg

SEQ ID NO: 586309 - DNA, 80 bp, Homo sapiens
caaagagaaaaggcaacatcctgtcacaggccatgctctggcaaaaacgcttctcacggcattcagcagcagcgttgctg

SEQ ID NO: 586310 - DNA, 100 bp, Homo sapiens
aaatccaaggttaccagatacctgtgtttcacaagatcattttccaaagaaaatgttgttcatctgcaagccagcttaacaacttttaagaatagccagc

SEQ ID NO: 586311 - DNA, 100 bp, Homo sapiens
taactgagcagttcatggagaaatttgttgatcccggaaaccacaatagcgggattgatctccttaggacctatacatatgaaccagatggttacaaccc

SEQ ID NO: 586312 - DNA, 83 bp, Homo sapiens
catttacatcctgtaccacggaaaccccgttgtgaggtgacttaagagattaaaattaatttggttgctgttggttctgaaca

SEQ ID NO: 586313 - DNA, 100 bp, Homo sapiens
cccagccctgcgtgaggccgcggagcgccagctcaatgaaaatcctcactatggatgggctcattgaggacattaagcatcggcggtattatgagaagcc

SEQ ID NO: 586314 - DNA, 90 bp, Homo sapiens
gtttgtagccctcgtccagacgccccaaacaaacatgccctgcaggagtcattaaatcaaaacttcatgctgatcatcacccaccgagaa

SEQ ID NO: 586315 - DNA, 90 bp, Homo sapiens
tccaaggcagctaagaatagactgcatatatattgggattttaaaccgtgaaagtgatgtcaagcagctctggttgcagctgaagaagga

SEQ ID NO: 586316 - DNA, 100 bp, Homo sapiens
aggtctggacactgaaaccaccgtggaagtcgcctggtgtgaactgcagaaactgaggcttcttgaagagcttgaagacacttggctcccttatctgacc

SEQ ID NO: 586317 - DNA, 98 bp, Homo sapiens
ctaagcatttgctactggtggaccctgagggtgtggcagaggaacgaggacgcctgaaggaagagctggaagaggctcgggacatagcccggcggcgc

SEQ ID NO: 586318 - DNA, 75 bp, Homo sapiens
cggcggccaggtccctgctgaatcacacgccgccatccgggaggcccagggaagatgagaactggactgatgacc

SEQ ID NO: 586319 - DNA, 100 bp, Homo sapiens
gataccagttcctttgtcaagagcatactttggaccctgttttcagaaagcagtcactcaagactgcttgcaactgattgcagacagtgaaacaccaact

SEQ ID NO: 586320 - DNA, 88 bp, Homo sapiens
gacaattcacctgcctcctatgtcttccatccagacaatgctgatccggaaagggggcgtggcttctggcatgaagcacgtggagacc

SEQ ID NO: 586321 - DNA, 75 bp, Homo sapiens
ctaatgaaggggaagaagatgatgataagggtctcataacaacaaactgcagtctacagcttcttaaagttcagc

SEQ ID NO: 586322 - DNA, 82 bp, Homo sapiens
cggagagctgacaatgatgaatctcagaatatattaaaggaatctgtgaacctgaactagaagaaagagaatgttaccccaa

SEQ ID NO: 586323 - DNA, 88 bp, Homo sapiens
gagggtcggctctaccaagtagcaataatgacgatgaggacctgacaccagagcagaaggcagagcgtgagaaggagcggaggatggc

SEQ ID NO: 586324 - DNA, 82 bp, Homo sapiens
agcgcttcctggatgagaagagcggcagtttcgtgagcgacctcagcagagctagagccggtgcaggccacgcagaacaaga

SEQ ID NO: 586325 - DNA, 50 bp, Homo sapiens
ggccagcaccatggcccagcacgctgaggaccaccccaggacaattcagg

SEQ ID NO: 586326 - DNA, 82 bp, Homo sapiens
cgccgcgtccttggctggcgtgtggtgcgcgtgggcagggcgcggggacatggggcccgacatggagctgcccagccactcg

SEQ ID NO: 586327 - DNA, 100 bp, Homo sapiens
gagaaacttctgagcaacagatctaaagccctggtgagctcagagttctacagagtcaccactgaacaatatcagaaagctgctgaagaggtggaagcaa

SEQ ID NO: 586328 - DNA, 74 bp, Homo sapiens
agaagacacctactgaggctggctgtgcctgcgcccagaagcagctacacttcatggaccagttgctcgatacc

SEQ ID NO: 586329 - DNA, 83 bp, Homo sapiens
ctttgttatttgaccctaaggaagcggccacaatcgacagggacaccgccttcgccattggtacaccaggggttggaaaaacc

SEQ ID NO: 586330 - DNA, 100 bp, Homo sapiens
cgcgggagcagtgcttctgcggcagagggaccacagagcaccagcctgcatggaacttccttcctcactcagcttcccacgttgccagctgggacagggg

SEQ ID NO: 586331 - DNA, 75 bp, Homo sapiens
ctgaagcccaggagagcgatggagacgtatgcggagggggccttgtgtgccgggctctgctttctgtcatggatg

SEQ ID NO: 586332 - DNA, 75 bp, Homo sapiens
ctgaagaccgagtctggtccattgctatcagcccattactcagtgatgtccttgcattgcccatttttaagcaag

SEQ ID NO: 586333 - DNA, 95 bp, Homo sapiens
tattgtttatgtaataaagcagatcacaaaggaatttccagagttagtagcaagcagcacagtcagcagcctccattcaagagttgattcattag

SEQ ID NO: 586334 - DNA, 51 bp, Homo sapiens
cccgaagcctaaattccaggaggacaaatttacatgtattggagaccagac

SEQ ID NO: 586335 - DNA, 98 bp, Homo sapiens
taaaggcattgacctacagacaattcattcccgtgagttaccagactgttatgtctttcagaatacgcacttctcagaacttctggatgagttttccc

SEQ ID NO: 586336 - DNA, 75 bp, Homo sapiens
ccggtgcttgggacagaaatcatcaattaccgagtgtactaatggtcacttgatgtgcgctggctgttttatcca

SEQ ID NO: 586337 - DNA, 100 bp, Homo sapiens
tctgcaatccaagccgactgatgactggagaggatggctactatttcaccaatctggaaaaggctccaagtagctcctctaactgtcctccatctgcacc

SEQ ID NO: 586338 - DNA, 98 bp, Homo sapiens
gcactcggagatgcagccgctgctgatggtgagaccattctaaaaggcctccagtccattttccaggagcaggggatggcggagtcggtgcacacctg

SEQ ID NO: 586339 - DNA, 76 bp, Homo sapiens
aagagcctagcacctcttatactgattgtttaactgctgaagagatcttttcccttcatggcttttcaaatgctac

SEQ ID NO: 586340 - DNA, 74 bp, Homo sapiens
tatgatccaacaccatattgaagcctgtgcccaggacctgtatgaggctggagagaagaaatgggggacagatg

SEQ ID NO: 586341 - DNA, 100 bp, Homo sapiens
attgtgctgatattgatattattacagcttcatatgcaccagaaggagatgaagtggactcttccaccgcccttgagtggggaacatccaggccttcaca

SEQ ID NO: 586342 - DNA, 100 bp, Homo sapiens
caggttcagacccgaccgttatccagtcggttcgtggagaggagagattataagcgccatggctatggctagtgttaaattgcttgccggtgttttaaga

SEQ ID NO: 586343 - DNA, 75 bp, Homo sapiens
gcgtcgggcgtgagcggaaatgaggaggagatggtggaggaggctgaaggaagtgcacggctgtctataacgtgc

SEQ ID NO: 586344 - DNA, 75 bp, Homo sapiens
cagcctcccgagaagctgggattacaggccggcatttgtaaatccactcatccctgaaagcccagaggaagagga

SEQ ID NO: 586345 - DNA, 97 bp, Homo sapiens
agggaagtctataagctttgcaacagaattacagagtatgatcaacaagctcatcagtagagaattgacctcttacaacaagaatcaagttttttat

SEQ ID NO: 586346 - DNA, 90 bp, Homo sapiens
cgcaaacccaaagatccccgttcctggagattctgattgaggttggtgttcgaggaagagacattgttgttcttggtgtggagaagaagt

SEQ ID NO: 586347 - DNA, 74 bp, Homo sapiens
gattccatctctgaagcaacaaggggaatggggtcaaaatgagcaggctgaccaactgactgaagagcagattg

SEQ ID NO: 586348 - DNA, 100 bp, Homo sapiens
ctggttcagattttacagctctggcaacccagactactacggactcatctaacaaaacagcaccgactccagcatccagtgtcaccatcatggctacaga

SEQ ID NO: 586349 - DNA, 95 bp, Homo sapiens
gcggctggccgggcccaggtcccttcctccttacatggtgatgaattttgtcctgttttggatgcaacatttgtaatggtggctcgtgattctga

SEQ ID NO: 586350 - DNA, 75 bp, Homo sapiens
ccaatgcttctaaatttcatttacccgtgcgggtatacacaggctttttagattcctggaatcaagatgtgagac

SEQ ID NO: 586351 - DNA, 101 bp, Homo sapiens
tcgcttctccctggacaacaggagaggcttctacagccaggacctgcccccaggagcctctcagggattactcaaagactgtcctggtttcgtgtttaccc

SEQ ID NO: 586352 - DNA, 100 bp, Homo sapiens
cacacttcgagctgaagcacctctccagcggggacctgctccgggacaacatgctgcggggcacaggaaatgcttccagactgcacacttttacttagag

SEQ ID NO: 586353 - DNA, 80 bp, Homo sapiens
catgaagacatatactgtgaacacactacagaccctcacaagtcagttactgaaaaggtttcagctgtgagttcaacatg

SEQ ID NO: 586354 - DNA, 100 bp, Homo sapiens
cagaatctgtcacagagggagatgtcaggtgggagaaaggaagctcttcgtgtggtgaagatcttacagaaccttgatccgccatttagcattgatggga

SEQ ID NO: 586355 - DNA, 83 bp, Homo sapiens
atttgcagctgggctccttcactttggtctcggcttttatctgcctccctgaaatccacattcatctcaatggaaggatcctg

SEQ ID NO: 586356 - DNA, 82 bp, Homo sapiens
tgtacgcagagttttcatcatggataactgtgaggagctaatccctgaatatctgaacctgcacaagcccccaggccctctg

SEQ ID NO: 586357 - DNA, 50 bp, Homo sapiens
atccacgctgacgcagagcggaaggagggttgtgagtcccggcccagccc

SEQ ID NO: 586358 - DNA, 51 bp, Homo sapiens
cagcctcctgagtagctaggattgcagctctcctgccacagctcctcaccc

SEQ ID NO: 586359 - DNA, 100 bp, Homo sapiens
gcccaggctcgcctcgactccaaatggttgaaaacagatatacagttacagaatgtctgaaggggacagtgtgggagaatccgtccatgggaaaccttcg

SEQ ID NO: 586360 - DNA, 100 bp, Homo sapiens
ccgcattctcagatccttcaccatcacctgcagcaggatggccaggtgcctgtggacatacgagatccagttctctcaggacggtaaggcgtacaccccg

SEQ ID NO: 586361 - DNA, 71 bp, Homo sapiens
acgcacaaccaggcgatggtgcactggacgggcgagaacagcagcttgctgtcatcctcacctaatcgtat

SEQ ID NO: 586362 - DNA, 100 bp, Homo sapiens
gtcctccctcatcaactccctccggaggcagcacctcaggaaagaaatggtggagtcaatgaagaaagtagcagggatggatgtggagctgacagttgaa

SEQ ID NO: 586363 - DNA, 75 bp, Homo sapiens
aatcttgtggacaaatccaggggaagctctttaatattggaaggtgttgaaccacagagtacatgtgaattagaa

SEQ ID NO: 586364 - DNA, 88 bp, Homo sapiens
gttcgaatgagaaaccagtcccttggacagtctgcaccttctcttactgctggcctgctgcaagctttcttcctggtggcagatgaca

SEQ ID NO: 586365 - DNA, 82 bp, Homo sapiens
ctctggacagggacagtgggcagtgctcccggaacacaagctgtgaaacactaggaagagctaaagatggctgaatttctag

SEQ ID NO: 586366 - DNA, 98 bp, Homo sapiens
tataattggagatcctgaacaccaaacctgtggacatctctacagcaatgagtgaacgggcacttgctcagaaaagactcagtgagaatgcatttgat

SEQ ID NO: 586367 - DNA, 74 bp, Homo sapiens
aaacccttcactgtgaagagacatgagatgattgccaaatccccagggtgactatgaccagagcaggaccaaag

SEQ ID NO: 586368 - DNA, 88 bp, Homo sapiens
cacaaacacagatttgctgaagctgagagttttgccattcagtttggactagatgttgagttccgccaagacgtcaccaagtgtcttt

SEQ ID NO: 586369 - DNA, 76 bp, Homo sapiens
cctacagatgatgagtcggtggcagagatcaatggaaccatgaacatcacagattctgctggccatattctctact

SEQ ID NO: 586370 - DNA, 75 bp, Homo sapiens
cgcctcttcccaaacgcatctcagcacattccagcatgagtgcattccccaggccatcctgggcatggacgtcct

SEQ ID NO: 586371 - DNA, 75 bp, Homo sapiens
tgcctccaacctcatctaccccatctttgtcacgatgcgctaatgcagctcgccaaagctgtggcaagtgctgca

SEQ ID NO: 586372 - DNA, 100 bp, Homo sapiens
caggagtcatgagcgacagcggcgagcagaactacggcgagcgggcagcacaacaagattcgcagcgtggaggggagccagctgaaggcctacctttcct

SEQ ID NO: 586373 - DNA, 100 bp, Homo sapiens
ccaaggtctccgactatattctgcagcataagaaagtggatgaatacacagacactgacctgtacacaggatgtgatcttcgtggtggaaagctaaattt

SEQ ID NO: 586374 - DNA, 83 bp, Homo sapiens
gagagccgggtaccggccgtggaagcggccaccgactactgtcagcagctgtgccagccttatgccagcctggaccatcttgg

SEQ ID NO: 586375 - DNA, 90 bp, Homo sapiens
aaatcaaaaatctggtgaaattgccggcaagagggagttaaggacattccaggcagaggcaagaatgttggctcaattaagaaacatcag

SEQ ID NO: 586376 - DNA, 46 bp, Homo sapiens
ggtacatctgaaagccgggaaatgacatatctgaagagatggatta

SEQ ID NO: 586377 - DNA, 74 bp, Homo sapiens
cccgtgaagcccagttcccctgccagcaagcctgatggtttttcagttatgggacaaaaatattatatcaaaac

SEQ ID NO: 586378 - DNA, 74 bp, Homo sapiens
gtagcttttctgagaatacttgctgaaaaggaagttttctggaatgggctccctgaaacaacagtaacctaccc

SEQ ID NO: 586379 - DNA, 100 bp, Homo sapiens
gggctttcgccggggcccaggcccagggaccaggcggaggcgtcgcgggagcctttggggcaccacagagatgcggatcttagcaaagcaatgtctcaag

SEQ ID NO: 586380 - DNA, 75 bp, Homo sapiens
ccaaggagatgtacagaatgggccaagctccactgttcagatgcaaagctgtgttcaattacaaaaaaagatgga

SEQ ID NO: 586381 - DNA, 80 bp, Homo sapiens
gccctcggtctgtgcttactttgaaagttgtagagacggtggaatgtgaaaaggaaggcactattcctgatcagagaact

SEQ ID NO: 586382 - DNA, 100 bp, Homo sapiens
atcatcctaatatccatcccagccagccccggtggcatcctcactctccaaatgtcaggtgggtggaattaaagacaaagtgctggcggcacacagagcg

SEQ ID NO: 586383 - DNA, 80 bp, Homo sapiens
gcctctactacctctggatgtgcatccgtgtcattctggaccttactcccaactaccggggtgagaactcgtggttctcc

SEQ ID NO: 586384 - DNA, 101 bp, Homo sapiens
ttaagaccattgctgagtgcctggcagatgagctcatcaatgctgccaagggctcctcgcacctaccccagcaactcaaattcaccacctcggactcctgc

SEQ ID NO: 586385 - DNA, 74 bp, Homo sapiens
aaagaggaggagccgaggcgcgaggttgttcggaatcctataattgaaaaacagtaaagatggaaaaccagtta

SEQ ID NO: 586386 - DNA, 50 bp, Homo sapiens
tcaacaccaaaaagctttctgctaggggacttccaatagtagtcagacat

SEQ ID NO: 586387 - DNA, 75 bp, Homo sapiens
cgaatcgttaaacatctgaaagggtcaggtcacggtctagatcacattctcgatccagaggaaggcgatactctc

SEQ ID NO: 586388 - DNA, 100 bp, Homo sapiens
ggaagcgcgggtggtcggctggggtccggctcctggagaacatggcccggcctcccgggggctctggtcccctcctcggactggagtccagagttgccac

SEQ ID NO: 586389 - DNA, 90 bp, Homo sapiens
caattttgcagacggcaagacttctaccaggagcacctcagcaacctggtgtgggccgaagatatgctcatgtggtgttgaggaaagcag

SEQ ID NO: 586390 - DNA, 100 bp, Homo sapiens
ctcctcgctggctggtgccgcgttcctgctgctctgcctgctccacaagcggcgccgcgccctcggcctgcacgggaagggaaaaggccgaggcatcagc

SEQ ID NO: 586391 - DNA, 75 bp, Homo sapiens
aagcaagatcttatccacagactccaggcatatcttgaagaacatggaaattgagaggctgactgagcgactaga

SEQ ID NO: 586392 - DNA, 87 bp, Homo sapiens
cttagctgtgctcgcgctactctctctttctggcctggaggctatccagcgtgtcagctgtgatgcatgtttaaaaggaaattttcg

SEQ ID NO: 586393 - DNA, 100 bp, Homo sapiens
aattgtatatgcagctggatgaaggcagcctcacctttaatgccaacccagatgaggtaaatctcacctggctatcgtgcagcgggtaaacaatgaggga

SEQ ID NO: 586394 - DNA, 100 bp, Homo sapiens
ggacacggcctacaacaccaagaggccacccagaggagaaggccaccccgcctggaggcacaggccatgaggggctctcaggaggtgctgctgatgtggc

SEQ ID NO: 586395 - DNA, 100 bp, Homo sapiens
cttcaggattgagacccggaaggcttcaaaggctgtcgcaaggaggaagattcttctgctgatcgacattgagcagtcctacatcaacacgaaccatgag

SEQ ID NO: 586396 - DNA, 101 bp, Homo sapiens
actcctgtttttaacttggtgtctttagtgcttggattggtgggatgtttcggaatgggcattgtcgccaattttcagcaaactgaaaatatggtccacta

SEQ ID NO: 586397 - DNA, 100 bp, Homo sapiens
cacaggaagtgtcacacagcagtcaagtatgtcccaaacgtctaagtttgcctgcaatggtactgtaattgagcatccggaatatggagaagtaattcag

SEQ ID NO: 586398 - DNA, 75 bp, Homo sapiens
tggagagtcataacatatcactgactgaggttggagcaatcactgaagaaactgaagcctgtgattggtggagtt

SEQ ID NO: 586399 - DNA, 80 bp, Homo sapiens
cgcccggagcaagcggagctcccccaagagccggaaagaaatatggctacacacacctttctgcaggagagctgcttcgt

SEQ ID NO: 586400 - DNA, 83 bp, Homo sapiens
ctggattgtccggaattcatggggtgaaccatggacaatgcagatcttcgtgaagactctgactggtaagaccatcaccctcg

SEQ ID NO: 586401 - DNA, 154 bp, Homo sapiens
gtttgagccaatagtttctcttcctgagcaagaaattaaaacactggaagaagatgaagaggaactttttaaaatgtcctggctataagtcaccatggcacagcaagctgccgataagtatctctatgtggataaaaacttcatcaacaatccg

SEQ ID NO: 586402 - DNA, 50 bp, Homo sapiens
ggcaggggaggaagccacctcgaggagcttgatcctggatagtgtttgta

SEQ ID NO: 586403 - DNA, 100 bp, Homo sapiens
aagtgttggcggatggaagggaggagactcctgaccctcagaatgatttctgactacatgatgctgccctacacagccaccctatcaaagcggaatcgag

SEQ ID NO: 586404 - DNA, 98 bp, Homo sapiens
ctggaagcagaggaagtagtttaaatgatacctatcactcaagagactcttcatttagattggattctgaatatcagctcttagcttctgccagctat

SEQ ID NO: 586405 - DNA, 50 bp, Homo sapiens
gagacagggcacaccaaactccatctgggaaggatggagacgctgaagga

SEQ ID NO: 586406 - DNA, 116 bp, Homo sapiens
ggaacaccatcagatgaaggaatttcttacattttagagatggaggaagaaacttcagttgccaacttggcctgttccatctcaaataatgaagaaggtgtaaagcttgttcgaat

SEQ ID NO: 586407 - DNA, 80 bp, Homo sapiens
gggaacattatcacaaagctatcatcctgccaaactccaggctcagatgtcacaggaattaagtagactggctggacaga

SEQ ID NO: 586408 - DNA, 75 bp, Homo sapiens
gctcctgctgggcctcaaggaccgcgagtttgcctgagaatacagatcaacccacagaacaaagcggatttccaa

SEQ ID NO: 586409 - DNA, 100 bp, Homo sapiens
cacaaggccaagggcaagtgatttgacaggtgaaatgacaatggatgctctgttggctcgattgaaacttctgaatccagatgaccttagagaagaaatc

SEQ ID NO: 586410 - DNA, 80 bp, Homo sapiens
ccagttcactttaaaacatttgtcatgggattaattcttgatttgttcccgacaaggagttttctggttcagaccgtaga

SEQ ID NO: 586411 - DNA, 82 bp, Homo sapiens
agacgcagccgtagacaccagctccgaaatcaccaccaagttacgccccatggtgtccatcctgccagcagactgattcaga

SEQ ID NO: 586412 - DNA, 83 bp, Homo sapiens
acaagaggtttgacgaggccacccagctccgtggtggacctagaaaataagtccccttcctgcctgttgcaaagtaacgtaag

SEQ ID NO: 586413 - DNA, 90 bp, Homo sapiens
ggctctcatgttcctccatgataaaggaatcatctatagatcttaaatctgacccaggccttgaaagacaacaagagtcccctgcacctc

SEQ ID NO: 586414 - DNA, 75 bp, Homo sapiens
ttcaggcaattgaaaacactgcctcagtatctgaacacaagacagtgatctgacacaaacacagctgaagcaaac

SEQ ID NO: 586415 - DNA, 75 bp, Homo sapiens
tggtttccagtgcagcgcggagtgggcgatgccagcgtgccaggtactcgtcctcacaagtgcccagactgcgac

SEQ ID NO: 586416 - DNA, 121 bp, Homo sapiens
cgacgaggcctacgacaccatggtggaggagcagtacggccagatgtacatcaaggcctccggcagctatgcagtgaagatagtgatccggggagacaggaacacgggcaagacagcgctg

SEQ ID NO: 586417 - DNA, 75 bp, Homo sapiens
gcacctgcgggccccaggaaggaaacggaatgcccttcaatcagctgggcaccctggcaggcagcaagtactata

SEQ ID NO: 586418 - DNA, 98 bp, Homo sapiens
caagattggcccagacaacctgccttatgtccagatcttgaagtgtgagatcaaggtggcccagcccaaagaagtctatcagcagcagcagtatggct

SEQ ID NO: 586419 - DNA, 100 bp, Homo sapiens
cctcccaagtagctgggactacaggtcaatatccaacacagccaacctaccctgtgcagcctcctgggaatccagtataccctcagaccttgcatcttcc

SEQ ID NO: 586420 - DNA, 83 bp, Homo sapiens
agctatagagttggcaacaacacttgatgaatctctcactaacagaaacctccagggtgagcagggcagcatttccttctccc

SEQ ID NO: 586421 - DNA, 75 bp, Homo sapiens
cttcaaaggggaaagcaaggccaaagacagggagaagtcctcctgcatatgcccaagaggattgggagtggaatg

SEQ ID NO: 586422 - DNA, 100 bp, Homo sapiens
gagatgctcagctaagggagttcctggatggtctttagattgatacaccaatcctctgaaattgcatgcaaaaataaactggcgatggaatatgagagga

SEQ ID NO: 586423 - DNA, 75 bp, Homo sapiens
ggagcctcagttggaagcagccgatccagcctgcggagcctgtggggcagagctgagaaaacagaagtccttagt

SEQ ID NO: 586424 - DNA, 74 bp, Homo sapiens
ccgtgggtccgcgctgcttccacccaacttcctgttagtcaggatggctaaaggtgaccccaagaaaccaaagg

SEQ ID NO: 586425 - DNA, 100 bp, Homo sapiens
cagggagaggggcgaaccggccccccacagccactgcagctgctactgtttgaacggtcttggatgaacagatggaagtctgctgttctgcatgaagggg

SEQ ID NO: 586426 - DNA, 100 bp, Homo sapiens
ctcagattccctgaagctctgctgccccgcaggcaccttcgggccctcctgccttcgtaccaagtgatgcagcaatgctgggaggcagacccagcagtgc

SEQ ID NO: 586427 - DNA, 97 bp, Homo sapiens
agaaaagatacatgggtcttggaagataattactcaaaatatgcagggaagggcagcagcgttctcggatgctagctactctttttaaggatgaaag

SEQ ID NO: 586428 - DNA, 82 bp, Homo sapiens
attagcttcgcagtctggaaagctttaggagttcacagtgcatctttcaacctcatgtgcgacacctcctggttttggcgac

SEQ ID NO: 586429 - DNA, 100 bp, Homo sapiens
tctttctcaacctcatcttctggaaatggcttcagacatacctggatctgtgacgttgcccgttgcccccatggcggccaccggacaggtgaggatggcg

SEQ ID NO: 586430 - DNA, 74 bp, Homo sapiens
caaggctccggcctgcgaggaggttcgagaacttgtcttggacaattgcaaatcaaatgatggaaaaattgagg

SEQ ID NO: 586431 - DNA, 88 bp, Homo sapiens
cctgctggtggccacagcttggcatggtgaccctggcagcaaccccaacaaacgccagaggcagccccctctcctgggagatcacccc

SEQ ID NO: 586432 - DNA, 101 bp, Homo sapiens
attccccccgaagaagactcccccacatctgggtttggcaaacatcgaaaagatgacaagattgagaaaacgggtaaaataaaaatacaggaatcctttac

SEQ ID NO: 586433 - DNA, 100 bp, Homo sapiens
attgacagaaggttttgttttgacatagaagctgctgatcgtttcattgattggagtgcaacatgcgaaggccagttttccagcgcatactgtccattgg

SEQ ID NO: 586434 - DNA, 82 bp, Homo sapiens
gggtccgagcggggctctgtggctgctcctggctctgcgcaccggtgccaagtcctgccctgccaacttcttggcagctgcc

SEQ ID NO: 586435 - DNA, 114 bp, Homo sapiens
cgacaggtgtcgcttgaaaagactgggcttgtccttgctggtgcatgcgtcgtcggcctctgggcagcagatggcccactgcgtgaccttggttcagctgtccatttcctgtga

SEQ ID NO: 586436 - DNA, 101 bp, Homo sapiens
tgggaagaaaagcagggtgctggtttctaggacactaaacctcatggccgaatacatcaagcaatggtaacatctttaaatgaagataatgaaagtgtaac

SEQ ID NO: 586437 - DNA, 90 bp, Homo sapiens
ggagaccctcgaagtgcgcaaacttgacactcaccctgaccgattgaaaatattgaacttcccatggatacaaaaacaaatgaaagaaga

SEQ ID NO: 586438 - DNA, 83 bp, Homo sapiens
gagggaggctacacgtgcgtctgccgcccgcgcttcaccggtttacccaaggtccagcctagcccctaggcaccatgtcggac

SEQ ID NO: 586439 - DNA, 75 bp, Homo sapiens
tgcagaggggtccatacggcgttgttctgggtgttcaggcgcttcgtggaggttggccgggtggcctatgtctcc

SEQ ID NO: 586440 - DNA, 50 bp, Homo sapiens
ccgaagagagctctgttgttgcagcttgggtggcaaattttgaaagacct

SEQ ID NO: 586441 - DNA, 75 bp, Homo sapiens
ttcagccatcacgaggatgatttcggaacctggagaaaatatcttggagaaattcattcaaggcttttggatcac

SEQ ID NO: 586442 - DNA, 75 bp, Homo sapiens
gggcttcatagcattcgcctactccgtgaagacgaagggaacgtcatcgtttggaaagcgtcgcaataagacgca

SEQ ID NO: 586443 - DNA, 100 bp, Homo sapiens
atacaaatcatggagccgctggggtcccttttgcctcagatactattttgaagatggagtccattgccttacctgtgcaataatgcttcttaataccgat

SEQ ID NO: 586444 - DNA, 100 bp, Homo sapiens
aaaaaggctagaggtttcttggaatttgtggaggattttattcaggttcctaggaatctcgttggttttaatgtggaaacagtagaatataagaacattt

SEQ ID NO: 586445 - DNA, 77 bp, Homo sapiens
tgctgatcccactctgaaggccggggcggagcccatcgtggtgaggcttaaggaggtccgactgcagagggacgact

SEQ ID NO: 586446 - DNA, 50 bp, Homo sapiens
ggagacacggccagatctgccctccagtcattaaatttgacggtggagag

SEQ ID NO: 586447 - DNA, 50 bp, Homo sapiens
ggagcagccgccggcgcctaagaggtttatcatttaaaagtgcctgtgtg

SEQ ID NO: 586448 - DNA, 75 bp, Homo sapiens
cggactactattctcagttgatctacaagagaagcagctagagctgctggatttaatgttttgcgattaattcac

SEQ ID NO: 586449 - DNA, 100 bp, Homo sapiens
gtattgatgaaaagagggactgccataacattcccaaaggctgccagagctgctgagggggagagcagacagaagttcttcacccaggatattaatggaa

SEQ ID NO: 586450 - DNA, 83 bp, Homo sapiens
cttcagaattccctcaaagagctctggtccttgctgcactttattatgccggagaattttgtaccaatggctagaagcagatc

SEQ ID NO: 586451 - DNA, 50 bp, Homo sapiens
caaatcctcaactacatcaaaggataccttcttctactcattggtctatg

SEQ ID NO: 586452 - DNA, 82 bp, Homo sapiens
gcgaagtctactcaacgtttccaagtattctaccttgtaaatactgttatttgtatatactgtaaatgatgacatcggtggg

SEQ ID NO: 586453 - DNA, 100 bp, Homo sapiens
cggctttcggcaagaactggattcgtggcgccacaagctcattcactgtgtaggttgaagcactggacaatgccacatactttgtggatggtgtgggtct

SEQ ID NO: 586454 - DNA, 100 bp, Homo sapiens
tactaacgtcctgtgtcactgaggtctcttttattcaaaaccttgtattttgtgtggaaagagtttaccgtgtgcctgactttggtgtctgggaaagagg

SEQ ID NO: 586455 - DNA, 100 bp, Homo sapiens
ggtggtgaccatcgaaaggagcaagagcaagatcaccgtgacatccgaggtgcctttctccaaaagctttactaatatgctgaagaacaaacagccgacg

SEQ ID NO: 586456 - DNA, 76 bp, Homo sapiens
ccgaggcgcggccggggctctcctcgtctatgatatcaccagggaagccccacccaccagaagccaagatgtccag

SEQ ID NO: 586457 - DNA, 100 bp, Homo sapiens
tcccgagtggctgggattacaggatgccttgcagcagagattgactcagcaggacacatctgttcttcagctcaaacaagagctactgagggcaaatatg

SEQ ID NO: 586458 - DNA, 75 bp, Homo sapiens
tgggaatatttaggatttgcatcaccagaggtcatctcgatgcactcctgaggggcttggttctgggaaaactag

SEQ ID NO: 586459 - DNA, 80 bp, Homo sapiens
agttcaccatcacaccacctacagcccaggtggttggcgtgcttaagattcaggttgcagtccatgagctgggaaaggag

SEQ ID NO: 586460 - DNA, 90 bp, Homo sapiens
cgcaccgactatgtcgcctgccaccgagccgggcccacctccccaccaaggaagcctccgaaagccgccaggactctgctgtgaacctga

SEQ ID NO: 586461 - DNA, 51 bp, Homo sapiens
atcattgatgtggtgcgatcgagtacaggggctcaggtccaggtggcaggg

SEQ ID NO: 586462 - DNA, 100 bp, Homo sapiens
gtcatttctcagaaggttttgataggtgggccttagaggagacgccgccggtgctggagaatctggtaaaagcaccattgtgaagcagatgaggatcctg

SEQ ID NO: 586463 - DNA, 100 bp, Homo sapiens
ctagaggggatgcagatatgtatgatcttcccaagaaagaggacgctttactctaccagagcaagggaggtggatgccagtgtggtacgtgagatctgct

SEQ ID NO: 586464 - DNA, 101 bp, Homo sapiens
agcaccaatgagagtgagaagcctagcattttggttgaaaaatgcatctcacccccagaaggtggtcctgaagagcaaggatgaccaggtgaccgttatcg

SEQ ID NO: 586465 - DNA, 77 bp, Homo sapiens
tggtctacatcctgcgggtgcctttgaaaatcaacgacaacttgagcacagatgatatcatcaagttgaatcgaaag

SEQ ID NO: 586466 - DNA, 74 bp, Homo sapiens
cagaggtggaggcgctttgaaagaaatgcactcggtgatggaaagagagccactattctgaagaacacttggcc

SEQ ID NO: 586467 - DNA, 134 bp, Homo sapiens
gatgaacccaccataacagatctgaacacacgggaggaggctgaggaggagatagactttgagaaaggagtcaaattgactttatcagctttaatcgatgggaagaacttcagtgcaggaggtcacaaggttgg

SEQ ID NO: 586468 - DNA, 95 bp, Homo sapiens
gctcccttcgcctccaggatgcgctgagccctacaacacccccagcggccgccggctcccccacgaggaaatggcaactgctgacaggaagtttg

SEQ ID NO: 586469 - DNA, 50 bp, Homo sapiens
ctctttctggcctggaggctatccagcgccaaatagttgcatcacatgta

SEQ ID NO: 586470 - DNA, 75 bp, Homo sapiens
gactggagaggatggctactatttcaccaatctggtgtgatgaatgcagactctgctaccattttggctgtttgg

SEQ ID NO: 586471 - DNA, 100 bp, Homo sapiens
cgaggacctgcccgccgaggagctgtttgcctccatcgccacgatccagatgcagagccgaaacaagaagtgggctcagattctcgggattcgaagatgg

SEQ ID NO: 586472 - DNA, 98 bp, Homo sapiens
agccatgttaaggcgctggtttgtggaagtggaaggaacagtgaagggagagtcccgtattctcagagtaaaagttgtttctggaattgatctcgcca

SEQ ID NO: 586473 - DNA, 100 bp, Homo sapiens
caggtacacaaatgcacgcgacaggaaccagcagtctctggtcccagcccaccccatggcccctcccagtcccagcaccaccagcagtaataacaacagt

SEQ ID NO: 586474 - DNA, 100 bp, Homo sapiens
ttgttctgtggagaataacggctgcacctggagattgacgcagagtgggcggcggtggtgacatttgaagacagtgatttgttccatttgattggtgtta

SEQ ID NO: 586475 - DNA, 98 bp, Homo sapiens
tatcctaatcccaatgctgaagtaagattgtcttggaaatactaagttgggctgcagttcatggagctcgtttcaaagggcaagatctaaaactggca

SEQ ID NO: 586476 - DNA, 96 bp, Homo sapiens
ctccttgaatccactcgccagcccgccgccctctgccgccgcaccctgcacacccgcccctctcctgtgccagaggcagttggtgtcaccagccag

SEQ ID NO: 586477 - DNA, 100 bp, Homo sapiens
cttttggaagaattgccttctcttgcccccagaaagaggatgccctaaatgagaccagggaatcagagacaaagctgaaggagctcccaggagtgtgcaa

SEQ ID NO: 586478 - DNA, 100 bp, Homo sapiens
tggccgacatcatccaccactggaacgccaaccggctggacctgttcgagatcagccagccgaccgagacaccattcgcttttcacccaagatgatttga

SEQ ID NO: 586479 - DNA, 49 bp, Homo sapiens
aggactgtgcaggggactctgtcacaaatcatttattctggcttcagaa

SEQ ID NO: 586480 - DNA, 74 bp, Homo sapiens
tgaaaccaaaaggccagactgaacacgatgaggtggataagaatatgaagtatattccaacagaagatgtttca

SEQ ID NO: 586481 - DNA, 75 bp, Homo sapiens
tcctgcctcagcctcccgagtggctgggattacagatgaacaagagaactgggcaacccatgatccacatctacc

SEQ ID NO: 586482 - DNA, 90 bp, Homo sapiens
cgagggcggggaccggcggcgctggaggagcgaggcagctgtactaggactgggaacggggtgttaaataccacattatttgaaagctgg

SEQ ID NO: 586483 - DNA, 75 bp, Homo sapiens
ataaaattgaccgaattaacagaccaggtaatactgcattgcatgattgtgcagaatctggaagtttggacatca

SEQ ID NO: 586484 - DNA, 100 bp, Homo sapiens
gtgatccatcactcggattggcaggacctggggccaaaagccaagtttgcaggtcgaagtaagaaggaaaccaaatattctcttaaggctgtcgaagaca

SEQ ID NO: 586485 - DNA, 74 bp, Homo sapiens
ggcggtggtggtggcggccgctggccagtcctcttcagaagaaacttgactccttcccagctcaggacccttgc

SEQ ID NO: 586486 - DNA, 100 bp, Homo sapiens
gagcagtgcgtcagagtttcagattgtagaaggcatgaaacaaaaaatgtggagtattgaaaatattgccttcggttctggtggaggtttgctacagaag

SEQ ID NO: 586487 - DNA, 75 bp, Homo sapiens
tcaagttcttccacgcccagcacaagttgttggatatgggaagtatgaactggaagaggatggtaccccttctag

SEQ ID NO: 586488 - DNA, 98 bp, Homo sapiens
ggccagtcaccaagacaggcatctcaaatcggctgattctgcatctggaaactgccttcatcttgaaagaaaaggggaaggaaagatacaacttcccc

SEQ ID NO: 586489 - DNA, 100 bp, Homo sapiens
ccaaataccagctcgacaaagatggggttgtcctctttaagaagagagcgcctgctcgctgtgcccccgggttatgacgacccccaataaaggaaacaag

SEQ ID NO: 586490 - DNA, 100 bp, Homo sapiens
ccggtgccttcatgggcaggactaggccgaaaactccccaggaagacagtgacccgcccattcatgaaagtctcagcatagaaaatacattgtgggcaag

SEQ ID NO: 586491 - DNA, 73 bp, Homo sapiens
cgagctccagccgaaggagaaggggggtgtgagatgcacaatgcgaaacctaggccccagcttttacaccatg

SEQ ID NO: 586492 - DNA, 83 bp, Homo sapiens
gtctccgttgggtccggccgctctgcgggactctgaggaaaagctcgcaccagttgtgaatgggagagttcacatccgcgact

SEQ ID NO: 586493 - DNA, 80 bp, Homo sapiens
gcccgcgcccgggaccgacccctctgctcgcggccgcgcctttgagtttggtgccctggttgtcagatgttggaaagcag

SEQ ID NO: 586494 - DNA, 100 bp, Homo sapiens
cccagacacatgctaacaggatctacaggatgatcaaacttggtctgggtgctgactgggttacttttttaaacactaggaatggtaatttctactcttc

SEQ ID NO: 586495 - DNA, 75 bp, Homo sapiens
cccccccggagaaaaagttgaagcgttatcaacttgagttggtggaaccaagtggctggattcatgttcccttaa

SEQ ID NO: 586496 - DNA, 90 bp, Homo sapiens
tctggtccaaacaatcatgggaatttccaaggggattcaaacttcaacagaatgtggcaaccaggttcggctttccagtttggcagcagc

SEQ ID NO: 586497 - DNA, 51 bp, Homo sapiens
cggagtagcgagtcggcaacccggagatctgttacctaaagcaataaaaaa

SEQ ID NO: 586498 - DNA, 80 bp, Homo sapiens
gaccggcaaagttcacgtgactgtggatctcaagtactaccggccaactgaagtgcagagagagatcatcattgcctgaa

SEQ ID NO: 586499 - DNA, 100 bp, Homo sapiens
tccagctctatcctgttgacctatctggatgaaaatggcacagctgctttggaagaagatgctcagattctgaaagtcattgaagcttactgcaccagcg

SEQ ID NO: 586500 - DNA, 82 bp, Homo sapiens
caagcacttatgtcacttctgcacttcagtaaaccaggatggggattcgacggcacggaccgtctatgaccagtatttcatc

SEQ ID NO: 586501 - DNA, 98 bp, Homo sapiens
gccgacgcaggcaccttcctcagtcgcgccgtgcagttgaaaatgaagatgaggctgaaagggttcttttttcctacggctatggtgctaatgttccc

SEQ ID NO: 586502 - DNA, 74 bp, Homo sapiens
tcagtggctcaacaggctgaagggaggcaagaggaggaacgacgtagaagagaggaagagatgatgattcgtca

SEQ ID NO: 586503 - DNA, 121 bp, Homo sapiens
gtcgcgcccgggaggaaggaacgaggcaaggagctaaagcagcgtgcgttcagccctgggtgtactaatggtcacttgatgtgcgctggctgttttatccacctactagcagatgcccggc

SEQ ID NO: 586504 - DNA, 50 bp, Homo sapiens
gtccctgggacgctcagcggctgcaggtgatttgaagatattaaagctag

SEQ ID NO: 586505 - DNA, 100 bp, Homo sapiens
tcacttgggttcattctattcagaaacatgagttctgctggcgctgatgggagaaaagcgatgagaagatgtgacggactcattgactcactggtccatt

SEQ ID NO: 586506 - DNA, 103 bp, Homo sapiens
tatgaatatgaaagaattccgagagaacgagcacctcctcgaagtcatcccagtcagccattgtttgatgtcctgtgactgagaaaccaggctttaaacttta

SEQ ID NO: 586507 - DNA, 100 bp, Homo sapiens
atcgagtcctaccccacggacagcatcctggaggaccagtcagaccagcgcgtcatcatcaagctgcaaaaacagccttgaatagtttcatgcattccaa

SEQ ID NO: 586508 - DNA, 98 bp, Homo sapiens
atcaagccagagctggagtatctcaggccataggaaaaggatacagagtagagtttcatgaacctgaaacttggtggaaatttgatcctgaagaatta

SEQ ID NO: 586509 - DNA, 100 bp, Homo sapiens
catcgtcgtcctccccgaccgcgtcctgcagcagctgccagtggagccgcctacctcctggcattggagcagagcaagactttctataagccagattggt

SEQ ID NO: 586510 - DNA, 100 bp, Homo sapiens
aagatttaagaactgaatgtgcaacttgcaagggaactggagacaatgaaaatcttgtcaggtgcgatgcttcagtacctctgtggtcagaccatttgcc

SEQ ID NO: 586511 - DNA, 75 bp, Homo sapiens
aaagaagaccacacactgggaaacatcattaaatcgtgggaacatccagttgcaggaaaacaagcttaacacgcc

SEQ ID NO: 586512 - DNA, 100 bp, Homo sapiens
ccaagaagctgttccgcaggaggagaaatgatcgaaggtctttgatttgcgtcagtgtcatcgacagatgcagcagcaggcggctactgcacaagctgca

SEQ ID NO: 586513 - DNA, 50 bp, Homo sapiens
gctggtccggcccgtcttcggagagctgtctctgcttggaggtgccctgc

SEQ ID NO: 586514 - DNA, 83 bp, Homo sapiens
ctggcgctctggctgtgctgcgcgacccccgcgcatgtgcaccgtccaggtgaggttagagctggggcatcgcgcccaactgc

SEQ ID NO: 586515 - DNA, 75 bp, Homo sapiens
gcagcagtagctatggcagtggcagaagattttaattaggtttctaagcatgaattgaggaacagaagaagcaga

SEQ ID NO: 586516 - DNA, 74 bp, Homo sapiens
gccagagctggtcgctggcggccgacgcgggcgtacaggtttgcagattccgccagcagcacagcaagctctac

SEQ ID NO: 586517 - DNA, 88 bp, Homo sapiens
gtacaagatctaaggctcttgtctgaactgtaagagtaaatgggtccagtaattggaatgactccagataagagagctgaaaccccag

SEQ ID NO: 586518 - DNA, 100 bp, Homo sapiens
ttccacccaggacctgcctccccaagctgagttccagtcatacagcaggacatgctacgacagtgaagattcaggttgtggacctggcctattagcagat

SEQ ID NO: 586519 - DNA, 97 bp, Homo sapiens
gcccgagaaaccgcagcactacacgtacatgtcccagagcaagcacacggaggcccgggagctcatgtactcgggagccctgctcttcttcagccat

SEQ ID NO: 586520 - DNA, 98 bp, Homo sapiens
ctactgatgactttgtaaaaatgttttcagataacgaaggaggcccaacttcattcaataaggagcctgacggatttatcccagacggtagaacaaaa

SEQ ID NO: 586521 - DNA, 100 bp, Homo sapiens
gcggccagcagccaggacatgattgaccacgagcacccagagagattacctaaaacctcgggcagaagaggagaggaggatagcagcagaagagaagaag

SEQ ID NO: 586522 - DNA, 96 bp, Homo sapiens
aatgtcagcaccagccatgaagggccagccaagtctcgggatggtgaacgtactgtctattgcaacgtacacaagcatgaaccccttgtgctgttt

SEQ ID NO: 586523 - DNA, 90 bp, Homo sapiens
tgctcagcttcgagaagattggctacacaggcccataacgacctgctgcgcacgtatgaggcaaagctgctggccttcgggatccctctg

SEQ ID NO: 586524 - DNA, 100 bp, Homo sapiens
cagtttggtgcagaatgtgacgaagatgccgaggatgtctgaacttcagcgagagggaagcatcgagactctgagtaacagctcaggctccaccagcggc

SEQ ID NO: 586525 - DNA, 74 bp, Homo sapiens
ctggatatcaacgtccagcttaagatgcaatagagcatatgttctacaggagaagcatggttgtggctgattca

SEQ ID NO: 586526 - DNA, 95 bp, Homo sapiens
gggctctgaggtcgaccgcgtcatcctcaaggccaacgtgcagcggctgaaggagtaccgctccaaactcatcctcttccccaggaagccctcgg

SEQ ID NO: 586527 - DNA, 83 bp, Homo sapiens
gaagatgtccgacttattcgagagcagcatccaaccaaaatcccgatatctcccggggccaattcagcatctctacctggcca

SEQ ID NO: 586528 - DNA, 82 bp, Homo sapiens
gccttcaactccgaccgtcctgggagaagtggtgccacatgacccaggaggagcgcgacgacagcctccggttcaacgagaa

SEQ ID NO: 586529 - DNA, 100 bp, Homo sapiens
ctgactttttttttcttctttcttcttcagactatagccttcactttccctcggtgcccaaggaccaagtccttgacactgtctacctgttccatatgcc

SEQ ID NO: 586530 - DNA, 74 bp, Homo sapiens
ccctcacacttgacatgattgacaaaagaatgattccagcttcctcagtacacttcatgaagtctacttgcagg

SEQ ID NO: 586531 - DNA, 82 bp, Homo sapiens
gttctccaccacaagctgacctttccatcctccctcctctacccatgggctcatttgaagtagggacggggtttcaccatgt

SEQ ID NO: 586532 - DNA, 100 bp, Homo sapiens
ctcagacgctggcgggcgcagtttctcacgacgggccgagcctgccacttgtctcctttcctcttgggccgggcactttgggctgccagtcggttcactg

SEQ ID NO: 586533 - DNA, 83 bp, Homo sapiens
gggcagctcccccagtgaccgtcgagactgctacaagtaccagggggagaagcgagcggacatccagctgaacagcttcggtt

SEQ ID NO: 586534 - DNA, 100 bp, Homo sapiens
ggcctgtcttcctattcaccgtgggcagcagagggatggctgctcagctgctgactgatgaggcactgacttctgaatgaacagtgaatctattactgag

SEQ ID NO: 586535 - DNA, 101 bp, Homo sapiens
ctgtctgggaccttctccctgcctggacccctactattgcaacaagaaatgcatcttctgcagacaccgggttaagagggtctctggagcctgcatccagt

SEQ ID NO: 586536 - DNA, 100 bp, Homo sapiens
ccacgacctatcctaggcgccatggtgttttattccaaacgtctatgctgctttgttcactgcagctcttgttcctttgacgtgcctcgtggtggtgttc

SEQ ID NO: 586537 - DNA, 97 bp, Homo sapiens
tgattactctcgggatgattataggcgtgatgatagagtagtcaatgaccatcaatcaaataaaggaaagaaaactaatttcttgaagaaagacaaa

SEQ ID NO: 586538 - DNA, 100 bp, Homo sapiens
tgctgcaccgcggcgccgacatcaattacgccaatgtggacggactcactgccctgcaccagcactattcctgatcagagaactccagttgcttcaacac

SEQ ID NO: 586539 - DNA, 83 bp, Homo sapiens
tagttgagaatttatcctcaagagtcagctggcagaacttcagaggacgaggaaacaatcgtggctacaaaaatcaatctcag

SEQ ID NO: 586540 - DNA, 74 bp, Homo sapiens
cggcaggactcggaggacgaggaggaggcagaaaccactgtctatgttattgtgagatgtaagctggatgacag

SEQ ID NO: 586541 - DNA, 74 bp, Homo sapiens
ccgcctcccagcactcccatcaagctggaggaaggaggttgtgcccagacatttccttcttccagagggccact

SEQ ID NO: 586542 - DNA, 98 bp, Homo sapiens
tgcagcagacagctccctgggcaccaggcagctaacaggtggacatgttgagtgaaattaacattgctccccggattctcaccaatttcactggagta

SEQ ID NO: 586543 - DNA, 100 bp, Homo sapiens
tggggcgtagcctcctttctccagaaaggaaatctcactgatgaaaaggcctccaggtttttcacctttccgatcatcacgaataggggaaataaaagaa

SEQ ID NO: 586544 - DNA, 90 bp, Homo sapiens
tgagttcacctgcgagtcagccctacctgcactgctctggtctagtacaaacaggctgctggcattgagttccaggaaggatgttacctt

SEQ ID NO: 586545 - DNA, 75 bp, Homo sapiens
gcggccgaggaggcagcgcgacctccgcacgaacattctagtatgccagtagaaaaaaatatcactttagaaagg

SEQ ID NO: 586546 - DNA, 88 bp, Homo sapiens
attgagtccaagttcaaccaagccatttcttactactttgaccgcgatgatgtggctttgaagaactttgccaaatactttcttcacc

SEQ ID NO: 586547 - DNA, 101 bp, Homo sapiens
cccacccgccttccacgcgggccgcggctccggcatggccgggatcattaagaagcagatcctgaaacacctgtcccggtatgggcactaggaaaagactt

SEQ ID NO: 586548 - DNA, 95 bp, Homo sapiens
tagaagtagaatatgaacagaagagggctcaacttagccaatattttgatgctgtcaagtgacaggtgcaagttttgtggtattcaatggagctc

SEQ ID NO: 586549 - DNA, 100 bp, Homo sapiens
cagtcatgaccactagacccacagctgttaaagcaacagatctgcaaatgagaaattcacaagcgcacaggaattttcttgaagatggagaaagtgatgg

SEQ ID NO: 586550 - DNA, 75 bp, Homo sapiens
accagttcgcccgtccccctgccccgttcacaatgggctatctgatgggttagagtgcctttgagaagaaatcag

SEQ ID NO: 586551 - DNA, 75 bp, Homo sapiens
gttgagattatagagaaggacaccaagtacagtgtcattgtgatccggactacttacaggtaccgtatccagcct

SEQ ID NO: 586552 - DNA, 137 bp, Homo sapiens
catcgtttgaatgtagaactcagtcgatatcagacaaaattcaggcatttgtccaaggaagagccccatctgtggggagtctctccccctcagcagtggctctggctgtgatcctgcctgtcctggtacttctcatc

SEQ ID NO: 586553 - DNA, 82 bp, Homo sapiens
tggaaagaccgctttccatggagagtaaaggccggctggaaagtccccaagcggatgaatttttagatgtgatctactggtt

SEQ ID NO: 586554 - DNA, 90 bp, Homo sapiens
atcttaaggaaggctttatgaataaggagatgacggagggccgccgatgtcaagtacatcttcttgatgacaggaagctggaactcctag

SEQ ID NO: 586555 - DNA, 96 bp, Homo sapiens
agcgagagcctgttggaacatgctttcttcaagatggaacaaagactgttgagtatgctccatgtagatcacttgatcagatgttttgggaggtta

SEQ ID NO: 586556 - DNA, 100 bp, Homo sapiens
gcctttcgccttctgccatgattgggaggcctccccagccacatggaactaaaggtggtggcgccctcctgcactcagtcaaggccaagacccaaccagc

SEQ ID NO: 586557 - DNA, 90 bp, Homo sapiens
gtggattttagccgaatcccttaaagctgctcgactgatccaaaacatggatgccaccactgagccttgtacagactttttcaaatatgc

SEQ ID NO: 586558 - DNA, 100 bp, Homo sapiens
cctgtcggagagtaaatccgaagacagagtctgaggtgcctcccagaccagcctcccccaaggtcaccaggagtcccccggagacagctgccccagtgga

SEQ ID NO: 586559 - DNA, 83 bp, Homo sapiens
catcctggttctggaatcctcagttcaagcatttcagatctgctcggtagacctggtgcaccaccaccatgttggctgcaagg

SEQ ID NO: 586560 - DNA, 98 bp, Homo sapiens
tcaaggcctccggcagctatgcaggtaccttaacatggggaatcttcttaaagttttgacatgcacagaccttgagcaggggccaaattttttccttg

SEQ ID NO: 586561 - DNA, 82 bp, Homo sapiens
gcggacgccattttcttctgcacttctgtctggagagtggctacagcaaaccaaacagcccagcagcccagcagcccagcca

SEQ ID NO: 586562 - DNA, 75 bp, Homo sapiens
ctcaggtcctcgggggcggcggccacgccaaggacggcctccggcctctcctcctctccgtcaacacccacccaa

SEQ ID NO: 586563 - DNA, 100 bp, Homo sapiens
cgagagtgggcgagaacgtccactgcgggccggcgaaagctgtttgctggcctagacctgaactcttcagataatcagagtggaggaagtacagccagca

SEQ ID NO: 586564 - DNA, 101 bp, Homo sapiens
aaagcaccattgtgaagcagatgaagtgccagtcacgaattgcccgaacattacctgctgatcagaagccagaatgtcggccatactgggaaaaggatgat

SEQ ID NO: 586565 - DNA, 90 bp, Homo sapiens
gctctctcccagatatccggcacccaaagtatctagaagagcagaagacagagaatggaaaagataaggaacagaaacaaacaaataccg

SEQ ID NO: 586566 - DNA, 49 bp, Homo sapiens
tcaaactgaaacgtctcctgcatcaggttcatatccagctttcagagtg

SEQ ID NO: 586567 - DNA, 83 bp, Homo sapiens
caaagtgcagctgactcttcccacgacagccctgcccttcccatgaggcaggctcttcagcatgtcgggccccaggcctgtgg

SEQ ID NO: 586568 - DNA, 100 bp, Homo sapiens
caccagtggggcagtgcctcgccggcacagtcttcactaccgtagaagaccttggctccaagatactcctcacctgctccttgaatgacagcgccacaga

SEQ ID NO: 586569 - DNA, 90 bp, Homo sapiens
cagtatgccagcgacttccctgccaacgctccacggtagcatccatgatgcacagacaggagactgtggagtgtctgaaaaagttcaatg

SEQ ID NO: 586570 - DNA, 100 bp, Homo sapiens
gacaggcagacggactcggtattggagctgaaggcggcggcagagaacttgccggtgccagctgagttctgtggctcctgatggatctgagaagatggac

SEQ ID NO: 586571 - DNA, 95 bp, Homo sapiens
ttgtaacgtgtcattagagtatgagaaaactctggcatggaaaagcccctgtgcaactggtaaagatatcaataagcaccaggaggtatctaaat

SEQ ID NO: 586572 - DNA, 75 bp, Homo sapiens
acgaatctttacctacactgactctgatagatacaccaatttggaggagcccatcatcttcgtttcggacagagc

SEQ ID NO: 586573 - DNA, 75 bp, Homo sapiens
caggttttacgtgaaatgaaagccattggaataggaatcctacggcccctgaatattttggcatcttcaacctac

SEQ ID NO: 586574 - DNA, 96 bp, Homo sapiens
ctgagctggaagccatctgccctcactatcagcagccagcttttagcttccacaagaagagactatgagaagatacaggaggagctgacacgtctc

SEQ ID NO: 586575 - DNA, 75 bp, Homo sapiens
ttttgcctgacctgattcaaaaagtcctcacgtttgcactttcaaaactaatctggattcactccctctggttga

SEQ ID NO: 586576 - DNA, 87 bp, Homo sapiens
aggaacaagctgaaaaagatactcgacaagactcggatcagtatcttgccacagaaaccatacaagaatcagtgtctgtccctgaag

SEQ ID NO: 586577 - DNA, 83 bp, Homo sapiens
ctcagatctgtggagcagatccgatggagaggctgagctgctccaggacttgggtgactccttcaccagccaagcatagagcc

SEQ ID NO: 586578 - DNA, 101 bp, Homo sapiens
gaggctttggagcggctaaaaacctgattggcttccaggtcctcctcagcattggggaactcagcttggccatcgtgatagctctcacgtctggtctcctg

SEQ ID NO: 586579 - DNA, 100 bp, Homo sapiens
aatgttaacatggacatgatcttctttataattctactttgagtgctgtctccatgtttgatgtatctgagcaggtcatcagactagtgctgagtcttgg

SEQ ID NO: 586580 - DNA, 75 bp, Homo sapiens
gatggacttgctacctcttgggtgaactctagcaattacaaggttacttcctcagaatgttggcctcctgtatgt

SEQ ID NO: 586581 - DNA, 109 bp, Homo sapiens
cgaagagccaagagtcagtattccggccagcttcacgaagtcagagaggtagttgatgtcacttggcgatattcctgcaaacatgaagaggtgattgccagaagaacta

SEQ ID NO: 586582 - DNA, 100 bp, Homo sapiens
tctgttaaatatggccctgatcgacgtttagatcccataatcacagaagaaatgccactgttggaggcaatccagcatccagcagatgagaagttgcaag

SEQ ID NO: 586583 - DNA, 74 bp, Homo sapiens
tgcaagttgcttattgtttcaaatccaggtgaccattgtgaggtagatattttgttctaattttccagatgagg

SEQ ID NO: 586584 - DNA, 98 bp, Homo sapiens
tgtgttcagcgagcggacggaggagtcttctgccgtgcagtacttccaggtttctgctttgggacaaccatacatctaattccttaaagtagttttat

SEQ ID NO: 586585 - DNA, 50 bp, Homo sapiens
aagaggaagaggaggaattagtggaacagttgggaccctaggaggcagcg

SEQ ID NO: 586586 - DNA, 50 bp, Homo sapiens
tagagatgtatcaaaagttgcaggtgtttcagggacaattggattgtttg

SEQ ID NO: 586587 - DNA, 75 bp, Homo sapiens
ctttgatccctgtgtgctgaagaggtggtggcctttatgaagtctccagtgggtcagtacttggacagccatccg

SEQ ID NO: 586588 - DNA, 100 bp, Homo sapiens
attcagaaggagctggcggacatcactttagaccctccacctaattgcaggctcttaaagactctgaccaagtagcacagagtgatggggaggagagccc

SEQ ID NO: 586589 - DNA, 100 bp, Homo sapiens
gactgcaccagcaagatcggcaggcgagattgcctgacccaggcctgctcggccctcacaggtgacttttttgaacgaaccattctgtgcaacagccttg

SEQ ID NO: 586590 - DNA, 50 bp, Homo sapiens
aggaaagatggatccagacaagatgtcttatggtgaaattgaaggtaaat

SEQ ID NO: 586591 - DNA, 80 bp, Homo sapiens
tctcatagattgctggtggcaagaaatcatatcgtacagagactgtgtgaaagtaaagaagatggtcagtatggagaagt

SEQ ID NO: 586592 - DNA, 100 bp, Homo sapiens
cttggctctcccacccaatggagatggctctaatggacagagcgggatgccaccagcttgtccaaagggaagttccaggagctcctggtgggcatcgttg

SEQ ID NO: 586593 - DNA, 132 bp, Homo sapiens
atcctactcagaagaacttgtacagagatgtgatgttggagaactatagcaatctggttttcttgggaaaaggggaagatagtgatgtactcagtataaatgcagatgcttatgacagcgacatagaaggcc

SEQ ID NO: 586594 - DNA, 75 bp, Homo sapiens
acatacagtcgcctctgacaagccagaaactaatctggattcactccctctggttgatacccactcaaaaaggac

SEQ ID NO: 586595 - DNA, 100 bp, Homo sapiens
tcaacaatggtcatgctttcaacgtggagtttgatgactctcaggacaaagcagggggccgaaggccagagaccaggatttggctacggaggcagagcgt

SEQ ID NO: 586596 - DNA, 100 bp, Homo sapiens
aggcagatactgtgagggctacaagcttctaaataagcacaaagaccattcaatgtcccagcctattatggtacagagaagatctggacagggttttcat

SEQ ID NO: 586597 - DNA, 75 bp, Homo sapiens
ctgagaggtcagattgctgtcagattagaagcccaggacccaggaaggagacacaggaaatttattcaaagtccc

SEQ ID NO: 586598 - DNA, 75 bp, Homo sapiens
tccagcctgcggagcctgtggggcagtccttcagtgaatctacagacctattttctcaggagctcagcctggcct

SEQ ID NO: 586599 - DNA, 137 bp, Homo sapiens
aggggagtcatcatgagcgatgttaccattgtgaaagaaggttgggttcagaagagggctattgtggacgatgaaaggctctctgcagaggagatggatgagaggaggcggcagaacattgcttatgaatatctgtg

SEQ ID NO: 586600 - DNA, 111 bp, Homo sapiens
gggggactggcctggcgtgcactccgcacctcggggacattattgcgcgtggaacggctgcttttggaaggctactgcagcactggggtgtcagttgttggtccgacccag

SEQ ID NO: 586601 - DNA, 100 bp, Homo sapiens
atggggcacccggtgtaccgcggcgagaagccccagctgcactacgcgtcaggtcaattcagtgaagatatgatacccacagtgggcttcaacatgagga

SEQ ID NO: 586602 - DNA, 95 bp, Homo sapiens
gcccttgtggcgaatggggctcacgtcgaatagaagaggagttatgggaagaagaatttattgaacgctgtttccaagaaatgctggaagaggaa

SEQ ID NO: 586603 - DNA, 82 bp, Homo sapiens
tgcgtctgcagctggcgcggaagagacatgaagagtatttctggagaagaatcatcccatggagtgattatgacaaggctta

SEQ ID NO: 586604 - DNA, 50 bp, Homo sapiens
tgtgagttcttcggccacaatgcgtccagaatgacagggtccagaaactg

SEQ ID NO: 586605 - DNA, 75 bp, Homo sapiens
atctgtgcaagaggatgctgggaaatctcctgctcgaaataggttttgacacaagggcgcatatcttcaaagcac

SEQ ID NO: 586606 - DNA, 75 bp, Homo sapiens
ttttgcaacaaattcgagctgtccgactctgagaatggtggtcctgccatcatggctgtcctctgcaaaggtctc

SEQ ID NO: 586607 - DNA, 75 bp, Homo sapiens
tctttatgtttttcaagggacggatacaacgactagagaaatcgagctatagcagattatcttcgttcaaatggc

SEQ ID NO: 586608 - DNA, 82 bp, Homo sapiens
cctgcagcgggagctggacggcgagcgcgagcggcgcgagaaagtgggctgggggccctgactggacctggcctggccagct

SEQ ID NO: 586609 - DNA, 74 bp, Homo sapiens
ccaagaagagagcattaaacccaagaacattgtggagaagattgactttgacaacggagtcttgctctgtcgcc

SEQ ID NO: 586610 - DNA, 148 bp, Homo sapiens
caggcggccgcgttccccacagaggacagcaggacttccaaggagagcatgtcggaggctgatcgcgcccagaaggtggtgatctttgtgaagtctgtgcagcggtgcattgccttggcccagctactagtggagcagaacttcccag

SEQ ID NO: 586611 - DNA, 75 bp, Homo sapiens
atggcatttacagaaagagtcaacagcagtggcaacaggcagtatttggcagtcgtattcagagataaacccctg

SEQ ID NO: 586612 - DNA, 90 bp, Homo sapiens
catggagcccacagcatcctcagataagatgctcccaagtcccttgcagctctcttcagaagaaaaatcactagtgctctgctcttgcca

SEQ ID NO: 586613 - DNA, 75 bp, Homo sapiens
gatttttgctcattaacagaaaagaagaggagaatgctaagcagaaaaacccgcctagtgccaagcaaccctcca

SEQ ID NO: 586614 - DNA, 50 bp, Homo sapiens
ccggagcacccgacccctgatcctggatcagtgacattcgagcaggaacc

SEQ ID NO: 586615 - DNA, 90 bp, Homo sapiens
cgtggatgttcctgctcttgctggggggagcctgggcagtttcagagactcctccactctctgggaatgacacggactccctctcctgcg

SEQ ID NO: 586616 - DNA, 139 bp, Homo sapiens
gttggggccctcttgataaaaagagatgtggggggattctcgacctgctaacagaactggaccttttcggcattccttcacagaagatcactatgttgagttcagtaagcactcccaggatcgggtcatcggcacaaaa

SEQ ID NO: 586617 - DNA, 85 bp, Homo sapiens
aaccatcgcagttggaagcccatggggcaggcggggagacaaccccttccccaagaatgctgatgggactatatgctacgactcc

SEQ ID NO: 586618 - DNA, 50 bp, Homo sapiens
ccagaaagagctgaaccacatgctgtcggcttcaacggaccacaccaaaa

SEQ ID NO: 586619 - DNA, 100 bp, Homo sapiens
gatgatggcagcttaaagagttccaggtgtcatggagaaactccagctgggcccagagattctgcagcgggaaaatccaaggcttatttatgccaggctg

SEQ ID NO: 586620 - DNA, 97 bp, Homo sapiens
gagaaaacctctgcgaggaaagggaaggagcaagccgtgcaatttggcatctggctggacagcagctccccggagcagactgtgccctacctctgga

SEQ ID NO: 586621 - DNA, 100 bp, Homo sapiens
cccccctcctcacccgaacatcagggccctccagactcaggcgccccaacagcatatccccccacgtccatgtccaggagcccccctactgtcctggtca

SEQ ID NO: 586622 - DNA, 75 bp, Homo sapiens
cagacgaatggatgatcaaaacgtgtgccggtggtggtgtgcacattgagccccggtatagacagttcccccagc

SEQ ID NO: 586623 - DNA, 100 bp, Homo sapiens
ccactccagtcggtgttgagcacggcgagcagtctcaggcctttagtgatgatgatgtgaagttcatttccaatccgccctccatggtggcagcggggag

SEQ ID NO: 586624 - DNA, 101 bp, Homo sapiens
caaaacctattacgaactcaaaagtcaaccgctgaagagcagatggcgtttaatgattgcttcagtttgaactaccctggcaacccctgcccaggggactt

SEQ ID NO: 586625 - DNA, 90 bp, Homo sapiens
cctggcccactccatgttggccatcagtggtcacctagacagcgacgatgataggtatctgatgtgtagccatgcagaagacctacgtgc

SEQ ID NO: 586626 - DNA, 75 bp, Homo sapiens
ggacagtggagtctggcatcttattggttgaaatcacaaagattagacacctttttagataggtgttcttcagca

SEQ ID NO: 586627 - DNA, 90 bp, Homo sapiens
ggaggacctgatagatgagttgcttgagagggatggcggatctgggaacagtacaattatagggtttcctgtctctttacaggctcggga

SEQ ID NO: 586628 - DNA, 100 bp, Homo sapiens
ggacgaaggggccgacctcctaggaccttgcctcatagtattcgatcagattcagaagatatctgtttatttacgaaggatgaacccaattcaactcctg

SEQ ID NO: 586629 - DNA, 90 bp, Homo sapiens
atctttccggatcaatccagatggcagccagtcagtggtggaggacgctgccaaggtctgcagagaattcaccgagcgtgagcaaggaga

SEQ ID NO: 586630 - DNA, 98 bp, Homo sapiens
gccggctttcctcagcaagctgtggacgcttgtggaggaaacccacactaacgagttcatcacctggagccagatttgcctgcaatggataacccagt

SEQ ID NO: 586631 - DNA, 100 bp, Homo sapiens
agtccttattattggccctccagatacactttaatgagagtccctacactaaatccgccagccagacaaagccgcctgatggagcgttggctgtgaggag

SEQ ID NO: 586632 - DNA, 129 bp, Homo sapiens
aggacaactgcaagggggaagtagagagataacaaaagctgctcagagtctcaatgaacttgatctacaactcttgaaaaagaagttcctgtcatcttcatccaccctttaaacactggattattccgg

SEQ ID NO: 586633 - DNA, 82 bp, Homo sapiens
atttcctgaaccactacctgtatgacctgaaccacacgctgtacaatgtgcagagctgcgtcgctacagaagaacggttcag

SEQ ID NO: 586634 - DNA, 75 bp, Homo sapiens
tgccatctttgccctgatgagctcctgtttagccactgcaggaacttgtaatagctggcatcgttgagaatgaat

SEQ ID NO: 586635 - DNA, 101 bp, Homo sapiens
gtgatggataggagcaaccctgtaaaaccagccttagactatttttcaaacaataaacaggggtcacatgacgacagaagccaagagggctgcaaagatgg

SEQ ID NO: 586636 - DNA, 101 bp, Homo sapiens
taacgttgaacagtcctgtatcaaaactgaagatggtttgaaacagcttcacaaggtctgttggagtttgctggaggtccactccagaccctgtttgcctg

SEQ ID NO: 586637 - DNA, 75 bp, Homo sapiens
ctcgctcatggggctaatccacaagccccaggtgttcaaggtattagaaatgctgcagagatttaaagactctac

SEQ ID NO: 586638 - DNA, 99 bp, Homo sapiens
agcctcatccagcaggcggtgacccgctaccggaaggccatcgccaaggatgttgcttcagagtgtgaagtcaaatgcatgccaacattccagtttttt

SEQ ID NO: 586639 - DNA, 100 bp, Homo sapiens
gtatgagcattctccagggaaaggatgacatatttttggacctgaaacagaaattctggaacacctatatgataaggaagcagtggattggaaagctgat

SEQ ID NO: 586640 - DNA, 90 bp, Homo sapiens
acttttcaccaaggaactggtgctgcagcgagagtcccctccagggcaggtgactgaggccgtgaaggtggccattgacgtcgggtaccg

SEQ ID NO: 586641 - DNA, 99 bp, Homo sapiens
cagccatatcaagaaaaactccagcccagcctcagagaaatcaatgtggactgaacataaatcacctgatggaaggacttactactacaacactgaaac

SEQ ID NO: 586642 - DNA, 100 bp, Homo sapiens
agatattgtgaactttgttcacaccaacttgcgcaaaaacaacagacagccctatgctgtcagtgaattagcagattagaagtctgattttgaataatat

SEQ ID NO: 586643 - DNA, 75 bp, Homo sapiens
gttcttgtttgtggatcgctgtgatcgtcacttgtttgcagatggcgtgtacctggttctgctcatgggccttct

SEQ ID NO: 586644 - DNA, 76 bp, Homo sapiens
aggttctggagaaaaagttccatactgtcagtggaagcaaggaggagatgttaaagtaacccatcttgcaggacga

SEQ ID NO: 586645 - DNA, 100 bp, Homo sapiens
ccgctgaataagcttccaaaatgatggatggctttagatgacaagctctaccagagagacttagaagttgcactagctttatcagtgaaggaacttccaa

SEQ ID NO: 586646 - DNA, 71 bp, Homo sapiens
agattcgggcccactcggatctcaggtgacaactgttgatagatttcaaggtcaacagaatgactatattc

SEQ ID NO: 586647 - DNA, 75 bp, Homo sapiens
acattgacctcacaaccgagcaaattgaagagacgttaaaatacttccaaaatgtttcgatgaaagatcctccgg

SEQ ID NO: 586648 - DNA, 100 bp, Homo sapiens
gccatcgttgctgccttcttcgtcaagcctgtcagtccctgggaacgggcatgatgttgagttcctgggccacctcctcaattgaagaagtggcggaagc

SEQ ID NO: 586649 - DNA, 89 bp, Homo sapiens
ctggagcctcagttggaagcagccgatccagcctgcggagcctgtggggcaggctgttcggctcttgaatcccagcgatgaaaccagga

SEQ ID NO: 586650 - DNA, 76 bp, Homo sapiens
gtgaagtgctccgccgcccttgcctccaggatggaggtttgcttctgaataacccttcggcattagctatgcatga

SEQ ID NO: 586651 - DNA, 74 bp, Homo sapiens
tttaaagcgcataagaatgtcctggcagcattcagccagtattttaggttatggaggttttgatgactatggtg

SEQ ID NO: 586652 - DNA, 83 bp, Homo sapiens
tgaccaagaagccaaagaactggctaggcaaataagctttaagatgtacctgtgtggtctaagctggaatctggtcaccttcc

SEQ ID NO: 586653 - DNA, 100 bp, Homo sapiens
cttgactactcgcatcgcgcactttttggatcggcatctagtctttccgcttcttgaatttctctctgtaaaggagaaggccaatgatgaggccaatcag

SEQ ID NO: 586654 - DNA, 90 bp, Homo sapiens
attggtggattgcagcaatttgctactgagatgctcagtgacctccaggagtctgtggccagctctcgcccccaggaggtgtcagcatac

SEQ ID NO: 586655 - DNA, 101 bp, Homo sapiens
gggagcaggaggctgacaatgagcaacgttctactgttgcttccatgatgcacagacaggagactgtagactgcttgaagaaatttaatgctagaagaaaa

SEQ ID NO: 586656 - DNA, 99 bp, Homo sapiens
ggaatatgggatgttcatgtatcctgaaggggcttcctgcatgtggtttcctgtcaaggatcccctaacaacagtgagagagcaatgcgagcagttgga

SEQ ID NO: 586657 - DNA, 97 bp, Homo sapiens
attcggtgctggaccctgcagagcgtgctgtggtcagagtcgctggtgtcatggagaaactccagctgggcccagagattctgcagcgggaaaatcc

SEQ ID NO: 586658 - DNA, 103 bp, Homo sapiens
gagaaatcgtttgtcagaggaagagatccgaaaaattcctatgttttcttcatataatccaggggaaccaaacaagcttgctattagttctgagtctacagag

SEQ ID NO: 586659 - DNA, 104 bp, Homo sapiens
cgggaagccttaaggaaggaagcagagcgccaggcattagcgcagctcgagaaggccaagatgttctcaaatagtgatgaagctgtaatcaataaaaaacttcc

SEQ ID NO: 586660 - DNA, 50 bp, Homo sapiens
atctactcccagaggaattccagacggtgggtatatggctgccaaggtcc

SEQ ID NO: 586661 - DNA, 82 bp, Homo sapiens
agaccctggagcctcagttggaagcagccgatccagcctgcggagcctgtggggcagggtgtccggtggagagctgtttgac

SEQ ID NO: 586662 - DNA, 115 bp, Homo sapiens
gactactacagtattttttggtttgactgtgtatactctacaatctaagaaggatttcagcaaatttggagcagggcgtcgggtttggagttcaagtcggtagccgacagcgttc

SEQ ID NO: 586663 - DNA, 75 bp, Homo sapiens
cagagcctcagtttgtgcaggacaccgacatggaacagggactcactggggggtctcttgcaacgtgtgagctgc

SEQ ID NO: 586664 - DNA, 74 bp, Homo sapiens
agtgcataaacgaggcgcagcgggtgaaggtgaaatgacaatggatgctctgttggctcgattgaaacttctga

SEQ ID NO: 586665 - DNA, 114 bp, Homo sapiens
tctacagttataccaagtggatagtagaacttatctactggatttccgtagtattgatggtattggatcaggagtcaattttcagttgaacaaccaacataaattcaacattct

SEQ ID NO: 586666 - DNA, 100 bp, Homo sapiens
gcggagcgaacccgagagcgtggagcgggctgggccagacggatgtttccagtcctaaagattagtgtcacagggttggaccccaatgccatgtactccc

SEQ ID NO: 586667 - DNA, 87 bp, Homo sapiens
gctgcacggcagtctgtttatgagttgcttttgaaatcagaaagtcagtgcagggttgtagtgttgatgggctctacttctgatctt

SEQ ID NO: 586668 - DNA, 83 bp, Homo sapiens
ctacctcctgcgaggcctcccgggctccgggaaaactacactggccaggtactaggttttgacaagcttgcatcatgcgtgag

SEQ ID NO: 586669 - DNA, 83 bp, Homo sapiens
cggagaagtccgcctgtaagagggggatatgagactttctactcggaatatcctgagtgttgcgtggatgtaaaacccatttc

SEQ ID NO: 586670 - DNA, 75 bp, Homo sapiens
cccaaaagcagcaaaaacacagactttttcattggcaagccaactctgagagagatcagctgtttcatgtattag

SEQ ID NO: 586671 - DNA, 95 bp, Homo sapiens
gggcagcggcggctggcgcttcctgcgcatcgtctgcaagaccgcgaggcgagacctcttattcatcaataagctgcagccaggctccgtgaaga

SEQ ID NO: 586672 - DNA, 100 bp, Homo sapiens
ggagaccaaaataaaactaacagtctatgatgtcaaggataagtctcatgacaccatgaagaagatgactttatgtgtaagaaggcggcctctaaatcaa

SEQ ID NO: 586673 - DNA, 58 bp, Homo sapiens
tgaggacacagcctcgctggaggcagtttctgcacaattcagacagcccggaatatca

SEQ ID NO: 586674 - DNA, 101 bp, Homo sapiens
ggaggcgggcgctgtgcggtgccaggagaggcggggtcggcgggagccagcgagccacgggagcgagccaggtatcacctcttctgggctcaagatggaca

SEQ ID NO: 586675 - DNA, 100 bp, Homo sapiens
ctggagcaagggaaagaggcctggagtatgaagagacatgagatcatggtggccaaacccacagctcgccctgcactgccagcaattctgggccatgttc

SEQ ID NO: 586676 - DNA, 100 bp, Homo sapiens
ctcggcgccggtaggaagagtcagaggggtgaccagagagcccaacgcctggtgctcaagactttctccgaggctccagggagttccacgctgtccagtt

SEQ ID NO: 586677 - DNA, 100 bp, Homo sapiens
ctcagctaatggaaatggagaccttgattctggggaaggtgtggctcattgactttaatccatttggtgaagtcacagattcactgctgttcacctggga

SEQ ID NO: 586678 - DNA, 99 bp, Homo sapiens
caaggagtcctgtgatccatcactcggattggcaggacctggggccaaaagccaaggaatgctttgtgtggaaagcttcagtgtgagaatgtacaagag

SEQ ID NO: 586679 - DNA, 101 bp, Homo sapiens
cgtgacaacaccgttcccccagccgggctgctaccagagattcactgactgctataagtgcttctaccagttgcagcctgcgatgacacagcaaatctatg

SEQ ID NO: 586680 - DNA, 100 bp, Homo sapiens
ggcgttcatctaccacgctttcgtgccaagtacctggcccagatcattgtgatgggcgtgcaggtggtgggcagggcctttgcacgggccttgcggcagg

SEQ ID NO: 586681 - DNA, 100 bp, Homo sapiens
caccctcccacacttcctctccgagccctaccagtacaccttggccagcactggtggtgaagaaggtgaagtccatgcagatgttccacatgcccatcac

SEQ ID NO: 586682 - DNA, 90 bp, Homo sapiens
acccaaggcccaaaagcgtcaaactcaccaaaaacaacatctttccagaaagagaaaacatcggttgtgaagagaaagccaaaaagaatg

SEQ ID NO: 586683 - DNA, 100 bp, Homo sapiens
ggaaaaggcttttcacggagcaggctcggagcctacggggctggcctcggactggatggggagtgtgaacatggctacgcctcttcattcccgtccatgc

SEQ ID NO: 586684 - DNA, 88 bp, Homo sapiens
gttagggcggcggatggaggtcagcggtggtgctcgctgcgttaagaatagacccaccagcatttcgtgggatggtcttgattcaggg

SEQ ID NO: 586685 - DNA, 100 bp, Homo sapiens
tactttaaagtgccctattccttgccaaaactagcacgtcagctaactgttcagatgatgcaaaatcctcagattcttgcagcccttcaagaaagacttg

SEQ ID NO: 586686 - DNA, 100 bp, Homo sapiens
gagtttggggagaagctgaaacgccagaaatatgacgtgggcctgggtcctccaggatgccctgggcatcgccttctgcctctacatgctgaagaccatc

SEQ ID NO: 586687 - DNA, 103 bp, Homo sapiens
gcagctccctgcatatctgaagcggctcccagtccctgaaagcattaccgggttcgctaggctcacaggtgctggagaatctggtaaaagcaccattgtgaag

SEQ ID NO: 586688 - DNA, 113 bp, Homo sapiens
cgcgagagatggagatgggcagacggattcatttagagctgcggaacaggacgccctctgataataactctgtgtcaccctcggaaagcctccgggccagtgagaagcaccgg

SEQ ID NO: 586689 - DNA, 101 bp, Homo sapiens
cgcgctactctctctttctggcctggaggctatccagcgatttttttcccaggaagccatcccgtcagaggggttcaagtgatgaaagttggcaaactgca

SEQ ID NO: 586690 - DNA, 71 bp, Homo sapiens
cttccggagcttctcagaagacagagggttttcttttgaggcccctggccccaacatggcccgtcgctctc

SEQ ID NO: 586691 - DNA, 80 bp, Homo sapiens
tttgggaaactcgactttggagaaaccaccgtgctggaccgcttttacaatgcagtttccaacatggctagatccatcag

SEQ ID NO: 586692 - DNA, 97 bp, Homo sapiens
gttttgacctataaaaaggcagatactgatctggtatggcctcacaagtcttggtctacccaccatatgtttatcaaactcagtcaagtgccttttg

SEQ ID NO: 586693 - DNA, 101 bp, Homo sapiens
cgtcctgctccaaggactgcactgtgaagggccagcgacagaccctgctcttcagtgccaccatgccgaagaagattcagaactttgctaagagtgccctt

SEQ ID NO: 586694 - DNA, 83 bp, Homo sapiens
gtcaagggccagggccaagaaggcgcgggctgaggggctggtggcagcagcgtcgtcataggtaatattggtgccctgatggg

SEQ ID NO: 586695 - DNA, 90 bp, Homo sapiens
cccacgactcccgatagtgagagacctgctcaagctctcttaagagattatggtgctggagaatctggtaaaagcaccattgtgaagcag

SEQ ID NO: 586696 - DNA, 75 bp, Homo sapiens
tccagcctgcggagcctgtggggcagacaccttcagcagtaaacaagataaaacaacttcttaaagataagcctg

SEQ ID NO: 586697 - DNA, 74 bp, Homo sapiens
aatacatgatttaaacaagagatttccacagaagctctcagatctggctcgagaccaccatggctaaggtggaa

SEQ ID NO: 586698 - DNA, 89 bp, Homo sapiens
tcaatgacaacagcctcagtatggaggccttccagcaccgttctgtgtcctggtcgcagttcaacaagagctcacaatgtctctctgca

SEQ ID NO: 586699 - DNA, 97 bp, Homo sapiens
ccctggagcggctctgctcggtcctcaaagggagaccaaattttgaggaaggtggaccaacatcagtagggagaaagcatgaatttatacgctcaga

SEQ ID NO: 586700 - DNA, 83 bp, Homo sapiens
gtctcctgtatcagcaccgttagaggttttgaatcaggaaattgaagcgttcagtctgtccgaagacacttcatcggggctgc

SEQ ID NO: 586701 - DNA, 90 bp, Homo sapiens
aggcttaccgagagtttgaaagtgcgattgtggaagctgctcgggctgagaaggactctgccagcacggagccatactactgcctctcag

SEQ ID NO: 586702 - DNA, 98 bp, Homo sapiens
ccccacggagtccgcagacagtggtagatgatgagctggagatcaaggcctactatgcaggccacgtgctgggggcagccatgttccagattaaagtg

SEQ ID NO: 586703 - DNA, 114 bp, Homo sapiens
agcgccgctttgccattggctcccaggtgtctgagcacagcatcatcaaggacttcaccaagcagaacattaaccaggtggtatttgttggaaatttcttgagaattaatacga

SEQ ID NO: 586704 - DNA, 98 bp, Homo sapiens
ccccggtagcaaactgatgacttttccgtgctgatttctttcaacctcggttgggaggtggctggagatcatatccagagtggggctggaggttctga

SEQ ID NO: 586705 - DNA, 100 bp, Homo sapiens
tgctggcgctctggctgtgctgcgcgacccccgcgcatgcatctgcctgcccttctgccatccgagcgccctgactgcgccacactgcaggccatggaga

SEQ ID NO: 586706 - DNA, 88 bp, Homo sapiens
caagatatagatgtagcaatacttactgcactgctaaaagatcgatcttctgaaattcaagttttcaagatgaagtttttattgacaa

SEQ ID NO: 586707 - DNA, 100 bp, Homo sapiens
aacgacctcacccagcaggagatacggaccctggaggtgaggaattttaaattggaacaagagcaagaaaaaaacaaaatcttgtcagaagcactggaga

SEQ ID NO: 586708 - DNA, 102 bp, Homo sapiens
aaaatggatatgtttcctctcacctgggttttcttagccctctacttttcaagacaccaagtgagaggccaaccaggattcactccttctccagttgcacag

SEQ ID NO: 586709 - DNA, 50 bp, Homo sapiens
acatcccttaatagtcatctacatagttgacgaaggatcagagattggtg

SEQ ID NO: 586710 - DNA, 100 bp, Homo sapiens
ctgggcccagcactcaaagatgccatgttggaactcaatgcttcaaatgacaggttgtaggtggcctagatatccacaaaaagatggtggtagatgtgtg

SEQ ID NO: 586711 - DNA, 80 bp, Homo sapiens
tggataggcctgtgacgaaggtgctaccatcgtgagagtaagtgctgcaggtggagaaattttcagcctgtgtttacctg

SEQ ID NO: 586712 - DNA, 99 bp, Homo sapiens
agtgatgtggaggaaaacaacttcgagggcagagaggaggcgtctccctattccttacttgatatctgcttgaatttcttgactactcaccttgagaag

SEQ ID NO: 586713 - DNA, 75 bp, Homo sapiens
tactgcctgtggacaaaatccatccttcgttgaagactcgagaacaggaagaactggaagaagctttagaagtgg

SEQ ID NO: 586714 - DNA, 82 bp, Homo sapiens
gaccacggtcaccgtctcctcagggcgccatgttttggaagtttgacctgcacacaagctcgcacctggacacgctgctgga

SEQ ID NO: 586715 - DNA, 101 bp, Homo sapiens
cagccatctcacatttccaagtacattctcaggtggagaccttctcttcaagaaaatgaggaggaggagattgggaacctagagcttgcctgggatatgct

SEQ ID NO: 586716 - DNA, 97 bp, Homo sapiens
cattggagtcacaatcaaagaactggatctttatctggcttactttgtccacactccggccctgaccgtgaagtttctgaccaagaggtttatcagt

SEQ ID NO: 586717 - DNA, 75 bp, Homo sapiens
gcaccttgcgcttcttgcagtcgcatgattttgaagtcagaggagatgtggtcaatggaagaaaccaccaaggtc

SEQ ID NO: 586718 - DNA, 75 bp, Homo sapiens
ctgatcttcaggatcatgcttggagcagcagcgtctatcccagactaccggggccctaatggagtgtggacactg

SEQ ID NO: 586719 - DNA, 75 bp, Homo sapiens
agggcttccagtttttttcagaacagacacatcccactcaaactgcatttttatccagcgttgatcttcacactc

SEQ ID NO: 586720 - DNA, 82 bp, Homo sapiens
agcagcgtgcgttcagccctgggagccaaatctcctcagccacctgttgaagaagaagatgaacacttcgatgacacagtgg

SEQ ID NO: 586721 - DNA, 97 bp, Homo sapiens
gagagcgcgaatatcgtcatcgttagaagcgttttccattgggaggtgatgatgaagttatgagctctacattgcaacagttttcaaaagttataga

SEQ ID NO: 586722 - DNA, 100 bp, Homo sapiens
gccagctgttcaccaccgagctagaacattaaccaggtggtatttgttggaaatttcttgagaattaatacgatcgccatgcggcttttggcatatgctt

SEQ ID NO: 586723 - DNA, 82 bp, Homo sapiens
cccaggtgtaagcgcagaaagcaggcgaacccgcggcgcaataacggaactctaatgaatcattgattgaccagcactattt

SEQ ID NO: 586724 - DNA, 98 bp, Homo sapiens
ggagggggtggcagtgagcggcggcagaggctacggggctcggtttggctgactggggagtcggcaggcggcagccctccttacagcctagaaaaaat

SEQ ID NO: 586725 - DNA, 75 bp, Homo sapiens
ttcggcttctgagacggcggcagcagcggcattcagtactttacctcgtgtgggcctttattcctgaatcttggc

SEQ ID NO: 586726 - DNA, 75 bp, Homo sapiens
tattccagcagcactgtgtgtcttggcttcggagcattcagcaggtgttacagagcacgaacttccaggagccgg

SEQ ID NO: 586727 - DNA, 82 bp, Homo sapiens
ttggagagctcatctggaattttgccgatttcatgactaaccagtttccagctattcttcagatgctctggattttgagacg

SEQ ID NO: 586728 - DNA, 49 bp, Homo sapiens
ccagatttaagatggataacagctctcgaacagtgtggcctgatgaaac

SEQ ID NO: 586729 - DNA, 75 bp, Homo sapiens
tgcttaaaaatcaccagttactttaatgaatcacaagatttctgttgtgaaggatgtggctctgccatgaaggat

SEQ ID NO: 586730 - DNA, 87 bp, Homo sapiens
caggataaggctgccagagtcattcagcaggcctggaaaagtttccttgcctgggcggatgatgtggagcggtttcagaaaatgttc

SEQ ID NO: 586731 - DNA, 74 bp, Homo sapiens
cctcgcgacgcgcccggcccggagcccccagcgcagcggccgcggctctgacgcccgctctgcggcttcggtgt

SEQ ID NO: 586732 - DNA, 111 bp, Homo sapiens
aagatttcgtggatcccaatggcaagatctctctacagcgggaagagacaccatcaaaccgctcctccctgctatatggatgtcattcctgaagatcaccgattggagagc

SEQ ID NO: 586733 - DNA, 82 bp, Homo sapiens
ctcagaactgagaagctgtcaccacaggccacggaaaggtatgatatatttgatccaagacagtccattccagtccgggaat

SEQ ID NO: 586734 - DNA, 98 bp, Homo sapiens
ttgaggcggacggcggggtccgggccggagtacgtcgttcccgctgcgctaggggaagcgggcagatccctcatccacctacatcaggcaactggaga

SEQ ID NO: 586735 - DNA, 82 bp, Homo sapiens
agcatgatctggaagcggctcaatgaccatggcaagaactggcgtcacgtttacaaggtgctcttacagcctgttccaagtg

SEQ ID NO: 586736 - DNA, 120 bp, Homo sapiens
gggtactgaagatgcactgttaaaaaaccaaagacgggcgcaaagattgcttgaagaaatccatgccatgaagacatatctgaagagatggattaagaatgctttggattaaggattgtg

SEQ ID NO: 586737 - DNA, 99 bp, Homo sapiens
tcactgtctttggggttttcttcccagcggctacaggttgcagatattttattccaaactgcccaaaatgcaggcatcagttttgacaccgtgtgtgga

SEQ ID NO: 586738 - DNA, 82 bp, Homo sapiens
cccatgttcatgtctgaggtgatccaggcctatgaaactctgcatgggacgtccagatcggtgacatcgtcacagtgggcga

SEQ ID NO: 586739 - DNA, 100 bp, Homo sapiens
caccaatatccgacctagctttgatggactcaccctgtcacccaggttggactgcactggcctcaacctcctgagttcaagtgatcgtcccacctcagcc

SEQ ID NO: 586740 - DNA, 83 bp, Homo sapiens
gtcgaggcggacgcgcggctgcgtcagattcccaggactccggctctctctgcttctgtttccggtggctgctcatctggttc

SEQ ID NO: 586741 - DNA, 75 bp, Homo sapiens
tagaaacctcatcaatgcaaccaacgcagccttgcaaacgaactacatattgtccataagtgcttcatcaggact

SEQ ID NO: 586742 - DNA, 82 bp, Homo sapiens
gcgagtttccgatttaaagctgagctgcgaggaaaatggcggcgggaggccaccagcttgggctccccacggagggcagcaa

SEQ ID NO: 586743 - DNA, 100 bp, Homo sapiens
atcgaggagcccagggacacacgccttcaggtttgctcagggtgtcccgtttctccagcccgcgggtgacgccccgcctgagccgcaagcgggcgctgtc

SEQ ID NO: 586744 - DNA, 74 bp, Homo sapiens
gcggggtccgagcggggctctgtggctgctcctggctctgcgcaccgacgcaaacatgcagatctttgtgaaga

SEQ ID NO: 586745 - DNA, 100 bp, Homo sapiens
ataaaaagagatgtggggggattctcgacctgctaacagaactggaccttttcgggatgccattattacttgcaatcctgaggaattcatagttgaggcg

SEQ ID NO: 586746 - DNA, 100 bp, Homo sapiens
gcaagagaccaaaaagggggttgtgacaccgaaagaactcttttctcaggtctgtaaaaaatcagtattattgagtagatcccagcagactcagctgaac

SEQ ID NO: 586747 - DNA, 74 bp, Homo sapiens
ctaagactccaggaccctctggaagcctagaaatgattgcccccgaggaattagcacttgttcacaacttgagg

SEQ ID NO: 586748 - DNA, 100 bp, Homo sapiens
tgagcgccccggcggcccgagcgcgccccaagcccgggcgccaccgctgccacctccgcgaggaacttgctactaccagcaccatgccctaccaatatcc

SEQ ID NO: 586749 - DNA, 100 bp, Homo sapiens
agagaataaaactccagcgagatccgggccgtgaacgaaagcagtgacggaggagcttgtaccaccgaatgctgaagcttggaacaatttgtcaacttcc

SEQ ID NO: 586750 - DNA, 100 bp, Homo sapiens
ttggaacatttcaggcctggcacggaatgcagtttttacataagtttcctgaatggcatggaatgctctactcccaagctgacagcaagaagaaatcaaa

SEQ ID NO: 586751 - DNA, 100 bp, Homo sapiens
ctcccagtgtgacctcttccctgaagaattttccatcgtcgtaactttgagagttcccaatcttccacccaagaaatgcactcggtgatggaaagagagc

SEQ ID NO: 586752 - DNA, 75 bp, Homo sapiens
gattggattggcatctttagaatttggaacattgctaccaataaactgacgttcttgaactcctttaagatgaag

SEQ ID NO: 586753 - DNA, 83 bp, Homo sapiens
cggagattcagactttccacctgcagctgcatcttcctcccgtgaggctggccgagctccacgctgatctgaagatacaggag

SEQ ID NO: 586754 - DNA, 90 bp, Homo sapiens
gtcatctcttctggatcatctctgtacttcagcaaggcatttagtaagaagaagattgatgacagaaaagaatggttaacaaattttatg

SEQ ID NO: 586755 - DNA, 82 bp, Homo sapiens
gacgccatgtcgggttattcgagtgaccgagaccgcggccgggaccgaggatgatcatgacgcagtcctgaggtttaatggg

SEQ ID NO: 586756 - DNA, 90 bp, Homo sapiens
aaagaggagctcaaaagagaaagttcatctagaaatctcaaagccatgtctcagcctcattgatgctactcacagagacgtggatgtgct

SEQ ID NO: 586757 - DNA, 95 bp, Homo sapiens
agatgctctcattgctgatgtaaaggtacatccaagcagaagtccagttccctccaggtagcagatcaggacctactgccatcttttcacccata

SEQ ID NO: 586758 - DNA, 100 bp, Homo sapiens
aagaagcagcctcatttgttttctggtgtcatcgtaggtggccacctatggcttttgggcaagaaggtggctgtgtacaagctaggaagagggccctcag

SEQ ID NO: 586759 - DNA, 100 bp, Homo sapiens
cttgtcctgagctggttgccggggcaggggcggaggcggaggcagaggtggaggcgctttgaaaggctccaccgaggacaccgcgtccagcttgtgtggc

SEQ ID NO: 586760 - DNA, 75 bp, Homo sapiens
aacctctctttcgcttttgtggaactactctacggcatctggagcaactggtactgaacgacacctgggtctcct

SEQ ID NO: 586761 - DNA, 90 bp, Homo sapiens
ggatcacagccatcagaaacggagggactttgaacatgtcggggatcgccctcagcagactcgcccaggagaggaaagcatggaggaaag

SEQ ID NO: 586762 - DNA, 82 bp, Homo sapiens
gcctctctcctgatacagcaggcgctcaccatgttccctggaggagctgacatggacccaaatcctcgggccgccctggagc

SEQ ID NO: 586763 - DNA, 89 bp, Homo sapiens
actgcagcagcgaacattaagaattacggcagtcggccaaacgcaccctagaaaattgcctaagaattatgacccaaaagttaccccag

SEQ ID NO: 586764 - DNA, 75 bp, Homo sapiens
gccgtgccctcggaggcggcgtgggcggcagagagcggggcggcggcaggggaacgcccttttgcttgtgactgg

SEQ ID NO: 586765 - DNA, 90 bp, Homo sapiens
ccagggaaaggatgacatatttttggacctgaaacagaaattctggaacacctatatgcccctctgaaatcaaagagatcttgcatctgg

SEQ ID NO: 586766 - DNA, 76 bp, Homo sapiens
cgcgatggaataatgcccagcggcccgccaggtcccgggaggacatgtatgcccaggactctatagagctactaac

SEQ ID NO: 586767 - DNA, 75 bp, Homo sapiens
ggaagacctgcaccactgtcgccttcacacaggtgtgacacagtgaccagcgccgtgatgatgcagtatagccgt

SEQ ID NO: 586768 - DNA, 75 bp, Homo sapiens
ttggagagctcatctggaattttgccgatttcatgactaaccagtgaaaaagtgacccattttgtgtggtagaac

SEQ ID NO: 586769 - DNA, 101 bp, Homo sapiens
ctggaagcaagaatttatcaaaggaaagatggatccagacaaggtggctgactgttcttgggatgaaacaataaagatctatgaccctgcttgtcttacta

SEQ ID NO: 586770 - DNA, 100 bp, Homo sapiens
cccacaagtagctccagcgccgtaagcgaggcctccttctcctacaagattctgtcccctctgggacgaattaatgaagcagtgaatgacctcactaaag

SEQ ID NO: 586771 - DNA, 98 bp, Homo sapiens
ccaccttcaatgtcactgtcaccaagactgacaagagaatgggtaccacagaccatgtcatcgtcctggcgtccacgaaccgagctgacattttggac

SEQ ID NO: 586772 - DNA, 100 bp, Homo sapiens
gggctttaggctggaagcgccttagaggagccatttttccagtttacaggctggtaacctacatctttgtctacgagaatcccatctccctgctctgcgg

SEQ ID NO: 586773 - DNA, 82 bp, Homo sapiens
gtccgcaccggcaccatcctgctcggcgtctggtatctgggcagcctggacaacatgacctgcatcctggtctgcttccctg

SEQ ID NO: 586774 - DNA, 95 bp, Homo sapiens
gggcacatctttctggagaatcacttttactacaagatttgtaagaaacaaatttatttccaagcacttattttagaggagattgcaattgattg

SEQ ID NO: 586775 - DNA, 51 bp, Homo sapiens
cctgatagttgggttcatctccatcaagaggtcctgggcctatgtcaagaa

SEQ ID NO: 586776 - DNA, 50 bp, Homo sapiens
ggcggctgggcgggagccccagagcatgtctggctccccagcaggtgagc

SEQ ID NO: 586777 - DNA, 100 bp, Homo sapiens
gactgctgcctggtctgcaaagaagtcctttcaagtctctaggactggactcttcctaagcaagtccggctccatctactctttgaagcttctgcccagc

SEQ ID NO: 586778 - DNA, 95 bp, Homo sapiens
cacctggccgccaaatacgggcacccacagtgcttgaagcaactactgcagaaaggatttatatgtactgttgacaccataaaagattctgacga

SEQ ID NO: 586779 - DNA, 75 bp, Homo sapiens
cacatcgtcattgacatccctatcaatgtctacaagaaacacagtgctctgtgcctatacagtgtacggataaaa

SEQ ID NO: 586780 - DNA, 123 bp, Homo sapiens
tgatcttcatgacccaccacaagatgttgtttgcattgacttggatacgaacatgttatatgtgatctagtgaaaagccatttgatgtatgcggtcagagaagaagtggaggtcctcaaagag

SEQ ID NO: 586781 - DNA, 100 bp, Homo sapiens
acaggatccgtcattggattggctgcggggcccacctctctaagcctatggaaaagcttctggattgcttcacctgtggtatcagacatcacaacatggg

SEQ ID NO: 586782 - DNA, 75 bp, Homo sapiens
aataaaggaaagacctcagagtgttctcaatgccgctcctacgaggactgctgtggctccaggtgctgtgtgcgg

SEQ ID NO: 586783 - DNA, 82 bp, Homo sapiens
gatggtgacttctacgaaaaagccctggtggagctgaaggttgcagaatatattgcactttatccatattcaagtgtggaac

SEQ ID NO: 586784 - DNA, 100 bp, Homo sapiens
tggacaggaaagtgtaacatcagttacagaaactgataaatttcaaacggaagagagtggcagcatttagaaagaatctaattgaaatgtctgaactgga

SEQ ID NO: 586785 - DNA, 95 bp, Homo sapiens
caaccgcctacgagacactcaagatgtgggaagaatatcctgatgtttatggggtcaggcggtcaaaccgaagcagacaagaaccatcgcgattt

SEQ ID NO: 586786 - DNA, 90 bp, Homo sapiens
gttttttcctgtatgaagcggttggcaccactgaagtgaccgaatgaggaggagcagcagcgcctggccgagctctccaagtccaacaag

SEQ ID NO: 586787 - DNA, 100 bp, Homo sapiens
atggagcactacggccagtggtcaggcggccggcatgagggaaatgtttcaacgtgcgcaagcgttgcggcggcgggcagaggactactacagatgcaaa

SEQ ID NO: 586788 - DNA, 100 bp, Homo sapiens
tttgatgtgatcgtaatagggacgggtacccttactgttggagatctagtaatggtgaatggactgctttttcagctttcattacccctgaactttctgg

SEQ ID NO: 586789 - DNA, 76 bp, Homo sapiens
atatgaagtgtcctacaccaggctgtaactctctaggctgagcaacagaaaaaggcggccatcatctctgctgagg

SEQ ID NO: 586790 - DNA, 100 bp, Homo sapiens
ggccgctcacccgtggaaagtacaggtcctgacagctgggtatttctcaagctgccagatacgtttaccaacgactcatcaacgacgggattttgagcca

SEQ ID NO: 586791 - DNA, 87 bp, Homo sapiens
gagagagaggtggagtccggcccccgaaagagggtggctgttgacatggaatttgctaagaatatgtatgaactgcataaaaaagtt

SEQ ID NO: 586792 - DNA, 100 bp, Homo sapiens
agtgcctggagagggctctagctaaaaatgagcaagttaaaggcaagatcgacaccatgaaggatatcatcaactccatgagcaacagccctgccaccag

SEQ ID NO: 586793 - DNA, 80 bp, Homo sapiens
tggaattttggagatattcaaaggacgagattgaggagctgcgggccgagatgctggagatgcgggacgtctatatggag

SEQ ID NO: 586794 - DNA, 87 bp, Homo sapiens
cccccccagacaagatggacaccgcggaggaaggtgagaagccctaccactgcaactgggacggctgcggctggaagtttgcgcgct

SEQ ID NO: 586795 - DNA, 117 bp, Homo sapiens
atgctggtcatcggtgtgcagtattgatcaggacctgcaaacccaaaagcttatgggagctggcacgtcacgtacgtgaacacactcctgaaactcatcccgctggtgctgggtctg

SEQ ID NO: 586796 - DNA, 101 bp, Homo sapiens
aggtcttctatctgaaaatgaagggtgattacttccggtaccttgctgaagttgcgtgtggtgatgatcgaaaacccacttctgccccaccaacgttgggc

SEQ ID NO: 586797 - DNA, 100 bp, Homo sapiens
accctcaggtgaactggattccgtgtcaagacccccacaggactatggcaaggagtctcaggccaaggatgtcattgaagagtatttcaaatgcaagaaa

SEQ ID NO: 586798 - DNA, 75 bp, Homo sapiens
agacgacttatgggggtttcacagaggacctcagcagccatgtcgaagccccatagtgaagccgggactgccttc

SEQ ID NO: 586799 - DNA, 100 bp, Homo sapiens
cggaagaatgaagaaaagaaataaaaatgaagttaagataagaagtaatctggaatcagaaagcactacgctaatgtgctggaattgatgttcgtctgtg

SEQ ID NO: 586800 - DNA, 51 bp, Homo sapiens
ttctacgggagaaagatggcacagtacctcctatggaagattgtaaggaac

SEQ ID NO: 586801 - DNA, 98 bp, Homo sapiens
gtgaaacatgtgaacactcaagtgaagcaaaagccttccatgattactgttttagagcactttgctgcaagggaccaccacctgcacgaccagaatat

SEQ ID NO: 586802 - DNA, 75 bp, Homo sapiens
accagtgatctacgggctggagttccaggtaacatttgtcgatcacccattgcagaagcagttttcaggaaactt

SEQ ID NO: 586803 - DNA, 75 bp, Homo sapiens
gctgaggggcttgcctgaagcgagggcgtctgcttctgcgctttgcctgggagaggccctggtggcctcgttcct

SEQ ID NO: 586804 - DNA, 75 bp, Homo sapiens
ttcaaacatctgaagatgacaatttattagatggtgacactgcagttgtcatccgtccttggctcaggatttgga

SEQ ID NO: 586805 - DNA, 100 bp, Homo sapiens
atgctggagaattataggaacctggtctccctgggtgtcctccacacatctgtagtcctcctcacagaaatgtgtgagcgaagcccagacatgcttgcgc

SEQ ID NO: 586806 - DNA, 75 bp, Homo sapiens
taggattacctgaaggtgaaacagattgagccagaaggaagacaatgctggtgcagcagctccagcaggtgcccg

SEQ ID NO: 586807 - DNA, 101 bp, Homo sapiens
cttggcagtggcaaccttcggatggctgtcatgcttcctgaaggggaagatctcaatgaatgggttgcagttaacaatacatcgagatatttccaagcaga

SEQ ID NO: 586808 - DNA, 62 bp, Homo sapiens
ggtgctggccgggcagaccctggagatggagtttcgctgttttcgcccaggctggagtgaag

SEQ ID NO: 586809 - DNA, 83 bp, Homo sapiens
caagaagttgcttgaacacaaggagatcgacggccgtcttaaggagtctttggacatcagacagtgcaggagaagaatgtgat

SEQ ID NO: 586810 - DNA, 76 bp, Homo sapiens
gaaaagaatgaacactgtccttcaaaacgacttccaaaggaactgtcttcagagacttttgacaagaccatcttaa

SEQ ID NO: 586811 - DNA, 82 bp, Homo sapiens
ccaccgccgccccctccggcgtgttcatgcccccggggtcatgttctctttcgaggccggccgccgctgcccctcaggccct

SEQ ID NO: 586812 - DNA, 88 bp, Homo sapiens
tctctgcagtctttatggacaaacctgaagagtttatatctgaaatggaccactctacacccccaagtgcatatgggtctgtcaaagc

SEQ ID NO: 586813 - DNA, 75 bp, Homo sapiens
gtgaagttccatgcccatccagagagggaaaacaaagtgcatgatgaagtcttcagactgtgtcataaagcatgc

SEQ ID NO: 586814 - DNA, 100 bp, Homo sapiens
gcgttttggttcccggttggtgcttcctgttcgcagctgcggcaagtctcactgtcgcccaggctgcagtgcagtggtgccatcacgcgtcactgcaacc

SEQ ID NO: 586815 - DNA, 100 bp, Homo sapiens
tgggccatggagatgagcctagtcctgctgttcctgatccgcactgccctttttgcaccccagggagctgctgctgaaaccccgtctctactaaaaaaaa

SEQ ID NO: 586816 - DNA, 98 bp, Homo sapiens
tgaaggcaaggcttcatgaaatacttcagaaagacagagattttactgctgaagattatgaaaagttggtagctggcagtgttgtgatggcttttgaa

SEQ ID NO: 586817 - DNA, 75 bp, Homo sapiens
cctctgatgaacctgcctcttgtggtttcccaaatgtggggaaaagcagcattatcaatagcttaaaacaagaac

SEQ ID NO: 586818 - DNA, 83 bp, Homo sapiens
cagtctccaaattcgcctccatctgtaccatgcgggctgacgcacgaggcacacaggaaggaggtggagcaggtgtatctgcg

SEQ ID NO: 586819 - DNA, 98 bp, Homo sapiens
ctgctgccatgtgagacgtgcctttgaccttctgccatgattgtgaggcctccccagccacgtgaaactgacaaaatgtttcacttttgggtaaatac

SEQ ID NO: 586820 - DNA, 96 bp, Homo sapiens
gcctcccaaactgctggaattacaggttgaaaaagatcatctagcaaagccttttttcccagctacatataaggaatttgaaagtcacataaaatg

SEQ ID NO: 586821 - DNA, 88 bp, Homo sapiens
gagattggtgcagagatggcattacgaacctttggccacttggggcggctgacggggctgggcggagaggaccttcccaccatcgtca

SEQ ID NO: 586822 - DNA, 83 bp, Homo sapiens
aaaagattcagattacgaggattatggatgaacgtaacagacaggctagtgatacagagcgagatggactagccccagaaaag

SEQ ID NO: 586823 - DNA, 75 bp, Homo sapiens
cagaagagtactgggtgtgattttgcagatttccagatgtgacttgcactcagaagatcagtggtcaacttcaga

SEQ ID NO: 586824 - DNA, 75 bp, Homo sapiens
aaagccagcgttacagtaatgttccaggcggcaaagatctgcaacaacatgctgttagctattagtatgattgga

SEQ ID NO: 586825 - DNA, 112 bp, Homo sapiens
accaggatctcgggctcggaacgagactgcacgatgatccagatcctgatgatggatttaactataaacagatgatggttagagatgagcggaggtttaaaatggcagacaa

SEQ ID NO: 586826 - DNA, 83 bp, Homo sapiens
gctgcaacaggaccacagtcaagacgatcatagtcactgggttttcagagaaagatgctgatgaggtgaaaggaatttttgta

SEQ ID NO: 586827 - DNA, 100 bp, Homo sapiens
gacctacagctgcattcactgcagagctcacttggccaatcatgatgaactaatttccaaggtcaaaatgcagatcttcgtgaaaacccttaccggcaag

SEQ ID NO: 586828 - DNA, 82 bp, Homo sapiens
caaccagcctttggtcatcaccagggtgctggttgccgaggagaacgtggacttccgcatccacgtggagaaccagacgcgg

SEQ ID NO: 586829 - DNA, 88 bp, Homo sapiens
aggataataaatcctataacaatgcagtgtataaagctgggaatggaggaagaagatgtgattgaagtttatcaggaacaaacggggg

SEQ ID NO: 586830 - DNA, 82 bp, Homo sapiens
cagtgaaacgctccatgaattggggcactatgaacgaagaggagcagtttgtaaacattgatttgaatgatgacaacatttg

SEQ ID NO: 586831 - DNA, 75 bp, Homo sapiens
aatcacaataatttcaggctatgcacttcctgaaggattcagtcaggaatttgaagagcagcaacctaaaagtag

SEQ ID NO: 586832 - DNA, 100 bp, Homo sapiens
tagtgttttcttatttagccggagtgagaagcaagaaggccctggacacagcaatatctctgggctttcacagaataatccagaatggctactctgatct

SEQ ID NO: 586833 - DNA, 100 bp, Homo sapiens
gttatcatggacaagcagccggggcaggtgattggagccaccactcccagtacaggaagttggtgaaccatctaaagaagagaaggctgtggccaagtat

SEQ ID NO: 586834 - DNA, 90 bp, Homo sapiens
ctgagccaagcgtttactgggcagctgttacgaggcggggtttcaccatgttgcccagactggtcttgaactcctgagcttaagcaatcc

SEQ ID NO: 586835 - DNA, 100 bp, Homo sapiens
agcttaatccgtacctcacatgtgtattttcagaaggccaatgatgaggccaatcagagtgatacaagtgtctccttgtcagaacccaagagcaaaagca

SEQ ID NO: 586836 - DNA, 82 bp, Homo sapiens
ctgctgcaggaggccaaggacggcgttctggatctcaaagcggtgtggacactgccagcggctgcagccgacttggaatgac

SEQ ID NO: 586837 - DNA, 83 bp, Homo sapiens
aggagattgacagtcacaattttgtaataagggaaattcacctcttctatagaagagtttgttttgaactatacgatttgaaa

SEQ ID NO: 586838 - DNA, 96 bp, Homo sapiens
caatgtggaccttaccagggacaagacccgaacggctgatcaaagtttatgtgaagaaccagctcagtgggactctacagattaaaccaggggttt

SEQ ID NO: 586839 - DNA, 48 bp, Homo sapiens
ggctggaatggacagtgccttggcaagcgctttgcttctggatcagct

SEQ ID NO: 586840 - DNA, 74 bp, Homo sapiens
gtcccgcaatgccaacctcagcaccatcaagcaggtgaatccagtctggaaaaagtgtttggaagaacaaggct

SEQ ID NO: 586841 - DNA, 101 bp, Homo sapiens
cggcggccgagggcgtcgcggactctccccgcgatgatgccgagtgaagtcaccctgctgagaaatgaagtggcacagctgaaacagcttcttctggctca

SEQ ID NO: 586842 - DNA, 82 bp, Homo sapiens
gaacgtggaaagcgcatacaggaccctaaacaggtgcagcggaactgctgcctgacgctctgcaacttcagcatccccgagg

SEQ ID NO: 586843 - DNA, 100 bp, Homo sapiens
gctctcagaatgggaagaatgagagaagtcatatgcccggcacagttattttagtgtccgccaacaaattgactcgttatatagaaccatgccaattaac

SEQ ID NO: 586844 - DNA, 100 bp, Homo sapiens
ctggtctgcggcagccatgctgaactcgtatggagagtaagactttgaccccgacgcaggcttcagtgattgccgcggatcagaagcctgagcactttgg

SEQ ID NO: 586845 - DNA, 100 bp, Homo sapiens
ttggatgatgatggatccatttctcctattgaggagtcaactgtactaatggtcacttgatgtgcgctggctgttttatccacctactagcagatgcccg

SEQ ID NO: 586846 - DNA, 75 bp, Homo sapiens
ctgcggagaggtgtttggtgcagaaggtccggtgtctaaaagactatggagaatttgaagttgatgatggcactt

SEQ ID NO: 586847 - DNA, 90 bp, Homo sapiens
atcaactgcagactgtcctattgcatctcaagcctgttctaagaacggaagcatctgggctggatggaatttagcatcaagcagagtccc

SEQ ID NO: 586848 - DNA, 98 bp, Homo sapiens
tgagctagcagtggcgatgacagctgtaaagcacgaacaggaatacatggaagtccgggagagaatacacagagccaatggagtctccctctgttgcc

SEQ ID NO: 586849 - DNA, 100 bp, Homo sapiens
ccttgtagataagcaactggattttttaactgaagatagtgcctttcagccctaccagaactttgcagaaaacaccatgaatgaactccttggctggtat

SEQ ID NO: 586850 - DNA, 75 bp, Homo sapiens
cagacagctgtgactatgaaggggatacaaactggactctcaggacaaaacgacaccagccaaaccagcagcccc

SEQ ID NO: 586851 - DNA, 100 bp, Homo sapiens
ggactgcaccgtgctggcggatcaggaagtgcggctggaaaacaggatcaccttcgagctggaaaaatgctgaaatgacgcgtcagctgcgagagcgtga

SEQ ID NO: 586852 - DNA, 74 bp, Homo sapiens
ggcttcgcgtgttccaagaactgcctgtgcgccctcaacctgctttacaccggcacctttcacagccagcaggc

SEQ ID NO: 586853 - DNA, 100 bp, Homo sapiens
ggagttcatcaagttcccactgagaatgtgcaggtgcatttcacagagaggtcatcgaggctgaacttcggtccaccaagcactgggagcttactgcgga

SEQ ID NO: 586854 - DNA, 90 bp, Homo sapiens
agcgagccgcctgccccggtgcgcagacagagctattccagcaccagcagaggcccacccatggccacccatggaccagtcagcttgtac

SEQ ID NO: 586855 - DNA, 101 bp, Homo sapiens
tagtgttttcttatttagccggagtgagaagcaagaaggccctggacacagcaatatctctgggctttcacagggtgaacctggcaaacaaggtccctctg

SEQ ID NO: 586856 - DNA, 75 bp, Homo sapiens
attcacaaccccctgaaagcgaactgtggctgcaccatctgtcttcatcttcccgccatctgatgagcagttgaa

SEQ ID NO: 586857 - DNA, 100 bp, Homo sapiens
cacttctccacatgaatattctgttttgctgcccgaagcttgctgaaaatgtgtgtctgacatgcaagctcagtggggcagagacccgtggattgctgtg

SEQ ID NO: 586858 - DNA, 74 bp, Homo sapiens
ttttatgaattctcttggacttgtaacatctaatggacttccagaggacttggatgttgtgggtgatggtatgc

SEQ ID NO: 586859 - DNA, 83 bp, Homo sapiens
tggtggggctctactgcgacaagtgttacctggaatgtcagagagctgaaagcagtcatattttgggatcatgcacctactgc

SEQ ID NO: 586860 - DNA, 100 bp, Homo sapiens
cagattttctccgaggaggataattattcccagagtcgggagctgctcgtgcaggaggtccaacacacttgacaaaaccaaccaccacgtcctcgtccga

SEQ ID NO: 586861 - DNA, 100 bp, Homo sapiens
cctagcgcctggcctgcgcgccgctgcccgcgccacaggtgctggagaatctggtaaaagcaccattgtgaagcagatgaggatcctgcatgttaatggg

SEQ ID NO: 586862 - DNA, 101 bp, Homo sapiens
ggctcccaaattaccggaaaggactgttcttgaggtattcagctccctgggctctgtcagctagcagagcatttggtggaagaaagacagcccagctcttg

SEQ ID NO: 586863 - DNA, 50 bp, Homo sapiens
cctctatgctggacatcaaatttccagtatctctgtttcgtaggtgagaa

SEQ ID NO: 586864 - DNA, 100 bp, Homo sapiens
gctgtgccccaggctgcagagcccatagccaccttctatgggttaaggcaacagctcccctcccacccggtcactccgtccagcaagcacgcagacagca

SEQ ID NO: 586865 - DNA, 101 bp, Homo sapiens
aggtgatctggggaaccaaagactctgggactcttggtgccaacagagttactctattctggaacttttcaaagcctgactctcttcttgaaacagtggag

SEQ ID NO: 586866 - DNA, 100 bp, Homo sapiens
aaaacattcacaaaatgggtaaatgcacaattttctaaggacgtagacaagtttggcaacgagatcacccagctggcccggcccctgcctgtggagtatc

SEQ ID NO: 586867 - DNA, 75 bp, Homo sapiens
tcctatgcggtacttgaaggatggcgaagaggtcgcgcagaatttcagaaactgtggaggagtgtcactgtagat

SEQ ID NO: 586868 - DNA, 50 bp, Homo sapiens
cgctgtccctgcggcttctgggggaatcccagtcagaagttccagcctgc

SEQ ID NO: 586869 - DNA, 99 bp, Homo sapiens
gtgcctgggccgctgggagccgttattggctgccgttaaggaccgttacgtttcccggagactggatctccaattactgcgtcatgtgttggattaggc

SEQ ID NO: 586870 - DNA, 100 bp, Homo sapiens
gaaggccgagggcttcgtggatgccctgcaccgggtccggcagatcacagattctgctggccatattctctactccaaagaggatgcaaccaaggggaaa

SEQ ID NO: 586871 - DNA, 96 bp, Homo sapiens
accggctgccgcctgctccccggaaaagggcactcgtctccgtgggtgtggcggagcgcgcggtgcatgcttgacagagccaattcgctattaaac

SEQ ID NO: 586872 - DNA, 51 bp, Homo sapiens
gcagcaccgggagtcagcagagtgaagtgtccccagccccaaatctgctgg

SEQ ID NO: 586873 - DNA, 101 bp, Homo sapiens
tttacagaaagagtcaacagcagtggcaacaggacctagatgacatagaagatgaaaatgaacagctaaagcaggaaaataaaactcttttgaaagttgtg

SEQ ID NO: 586874 - DNA, 80 bp, Homo sapiens
agagcgttactgctgcacacctaaagtcaaggatgtggtgaagctgtagagaaaaacaagcgtctcatcacggcagacca

SEQ ID NO: 586875 - DNA, 90 bp, Homo sapiens
acactggaaattatggaaaagagggtgaaaatcctatttataagagtgccgtaacaactgtggtcaatccgaagtatgagggaaaatgag

SEQ ID NO: 586876 - DNA, 100 bp, Homo sapiens
cggggcggccgggagggggcagtcctcgccggcgagttcagcagaaccatggagtctggcagtaccgccgccagtgaggaggcacgcagccttcgagaat

SEQ ID NO: 586877 - DNA, 100 bp, Homo sapiens
tgattggcatagtttgtggtgttttctatcccagttctttggcttttactaaaaatggacgcctggcaaccaaggatacctttcgtccctgcatttaaag

SEQ ID NO: 586878 - DNA, 82 bp, Homo sapiens
gaaatgcgagcagagcacatcagccacgctgggcgtcagggtctgcggcatgcaggtgagaagccctaccactgcaactggg

SEQ ID NO: 586879 - DNA, 76 bp, Homo sapiens
gttgaaaaatggcgactgtggcagagttgaaggctgcaaagccttctagacaagctcagtggaatctgaagggccc

SEQ ID NO: 586880 - DNA, 98 bp, Homo sapiens
gttgagatcattcttcaagctgtgaaacaaggcttaaaggccaagatcaaggctcgagatcttcgcgggaagaagaaggaggagctgctgaaacagct

SEQ ID NO: 586881 - DNA, 82 bp, Homo sapiens
ctccgttagctaattaaaacatttttcagggacgtagccatccagaggttggtcaaagaaaaagtgatgtatgaaaaagagg

SEQ ID NO: 586882 - DNA, 97 bp, Homo sapiens
agccagtgtcaacacgacaccggataaaccaaagacagcatctgagcacagaaagagtggtgaaggaggagatctcggatgacaatgccaagctacc

SEQ ID NO: 586883 - DNA, 51 bp, Homo sapiens
gggagtgcagaaaccaacaagaagtcctggctgagcaaggttggaagccct

SEQ ID NO: 586884 - DNA, 83 bp, Homo sapiens
caccccgctccggactccgctttggaatggctcaaaccacttgggcatccccaccatcagatggtgcggggcagagggggact

SEQ ID NO: 586885 - DNA, 98 bp, Homo sapiens
gcgtgatgctgaggtgactcgactaagagaattaaccaggaatctaggtaaaaatggcttatctaacagtagcattttgttggataaatgtccacctc

SEQ ID NO: 586886 - DNA, 98 bp, Homo sapiens
ttggatttgctaaaggagcttaagaatattcctatgaccctggaattactgcaggttcaggaagatttgactgaagagaaaaaaagggaactggagca

SEQ ID NO: 586887 - DNA, 50 bp, Homo sapiens
gcgctggtctgctcccagccgagctggtggagttgagatctataatggag

SEQ ID NO: 586888 - DNA, 51 bp, Homo sapiens
agcagggagacacatgtttgtctttcaggagatgtatctgcaaagtctttt

SEQ ID NO: 586889 - DNA, 100 bp, Homo sapiens
cgggttttgatcgcgcgtttgtgtagctctcgtggcattatccttcagtggggctattggactgacttttcttatgctgggatgtgccttagaggattat

SEQ ID NO: 586890 - DNA, 100 bp, Homo sapiens
cagcgagggctgcaccgtggttggcgggggcgtccagccctacctatagaagggccgagcacagcaatgcaaacaaagctctgatggcaccaaatcttga

SEQ ID NO: 586891 - DNA, 110 bp, Homo sapiens
tcagatcgcccgtcctggtatcacagtgcttctgttcagaaatgtagacaaccaatttcctgggcaagctgctccacctggattcccagtgtatcccgcgtttagcccac

SEQ ID NO: 586892 - DNA, 100 bp, Homo sapiens
gcttaggaccacccaccatgcctatccagggacagcaccagactattctctgcgtgttgcactgcatagtgaacctgcagacaattcccgtggatgtgga

SEQ ID NO: 586893 - DNA, 51 bp, Homo sapiens
atgaaatttatggcattcagaacacccttgccctgttggatgaataggcac

SEQ ID NO: 586894 - DNA, 83 bp, Homo sapiens
gaagagaaccctgcggaggagaccggcgaggagaagcaggctggagtgtgatggcgccatctcagccggctgcaacctctgcc

SEQ ID NO: 586895 - DNA, 100 bp, Homo sapiens
cttggtacttggacctgaaccttgctccgagagggagtcctcgcggacgtcagccaagctgccgggccgcaagtacagccctgggtacaacaccgaggtg

SEQ ID NO: 586896 - DNA, 87 bp, Homo sapiens
acacccataccttttgggcttcagaatgcagtgttttcggcaggtaaagtgaggaaacatgcaactgaacaggaaaaaactgaagag

SEQ ID NO: 586897 - DNA, 100 bp, Homo sapiens
cttctcccgcttcaacgaagaccgagactttcaggcgaagtggtgaacacccatggccccgtggagcctgacaaggacaatatccgccaggagccctaca

SEQ ID NO: 586898 - DNA, 74 bp, Homo sapiens
tgaagatgatgtatgaaggagttggagttgttgaaaccaaggactactgttcgaagatttttggaagaatactg

SEQ ID NO: 586899 - DNA, 95 bp, Homo sapiens
ataagttgtcgactcatttggataaagaccaagaagtgggattactggattatatgcggacggaatagacctcagcagcggcgtggtgaggactt

SEQ ID NO: 586900 - DNA, 100 bp, Homo sapiens
caccattatttgaccagatcattgatatgctgagagtggaacagaatgagtccctggaacgccagatgcgtgaaatggaagagaactttgccgttgaagc

SEQ ID NO: 586901 - DNA, 95 bp, Homo sapiens
actgcctctgtggacaagacacctccaggagcccagctcacagccaccggtaccttcttccagctgattacctggctcaggcatttgattctctt

SEQ ID NO: 586902 - DNA, 48 bp, Homo sapiens
ccaactgctcctgcgccgccgacccaacatgagtgaagtttcctgcaa

SEQ ID NO: 586903 - DNA, 100 bp, Homo sapiens
ggaccccctgctctgcgacttcctgggtgaaaggtgtagcagtcactcggcctacacccacagcatcgaccttgtgaacccagcgacctgactgccttgg

SEQ ID NO: 586904 - DNA, 50 bp, Homo sapiens
tcccccgaaagcccggctttcaggttaagaatagacccaccagcatttcg

SEQ ID NO: 586905 - DNA, 91 bp, Homo sapiens
gcgtgagcgacgcagaagacgggtgatttctgcatttccatctgaggtctttgatggtatacattgcagaaatttatttcagagcttggaa

SEQ ID NO: 586906 - DNA, 133 bp, Homo sapiens
ttctagtctccaggcccagtacatggatgcttgttggatgaattaatgaaccttgacccacaccaagccgagtcgtccggaaatccattgcccgtgttctcacagttattaaccagactcagaaagaaaacct

SEQ ID NO: 586907 - DNA, 50 bp, Homo sapiens
catctacctacctagcaagacttgacttcctgggaatgaaaatggttggt

SEQ ID NO: 586908 - DNA, 90 bp, Homo sapiens
tgccaagtggtgagaccatcaccaagcggtgagactatcacctatcgccaagtggaacctggcttctgtatttaccatgtacctggagca

SEQ ID NO: 586909 - DNA, 100 bp, Homo sapiens
aattcccaaaccatacttgctaaaaattctgctgctcctgtcccaatgtccctggaaagagtacaagtcggacacaggcaaaccttattactataacaac

SEQ ID NO: 586910 - DNA, 101 bp, Homo sapiens
ccgcggccgggcagggaggagaccggcacccagacaggtggcgacggcagaggagtaaagagaaatgtgtatgaccttacaagtatccccgttcgccacca

SEQ ID NO: 586911 - DNA, 80 bp, Homo sapiens
gaatggcagaagaatttaaaggtgaaattgcagtcaatgcattatggcctaaaacagagttgtggaaagtaaaaatgtag

SEQ ID NO: 586912 - DNA, 81 bp, Homo sapiens
gcaagggaaggaagtatattgggaggtacaaagctgaaacctatcaacactcttcaaaatgcaatggaatgtaccacggac

SEQ ID NO: 586913 - DNA, 83 bp, Homo sapiens
tgaaaatggacgagtaatcgcctgctttgattcattgaaacttcctgtgcttcccagaattccatcatctgactgccatccta

SEQ ID NO: 586914 - DNA, 100 bp, Homo sapiens
atcacaactgtttggtgacctacttcactgacctgcctggagctgctgaagactgctattgggaaagctggctacactgataaggtggtcatcggcatgg

SEQ ID NO: 586915 - DNA, 74 bp, Homo sapiens
gggaagttaatgtttacggcgaagtctactcaacgtttccaagtactatactggcaattgctggagaagatttt

SEQ ID NO: 586916 - DNA, 78 bp, Homo sapiens
aatgactgtggaataatatggaagaagatggaaaaaacttgtttaatgggtgtcgtgaaaactacccctaaaagccaa

SEQ ID NO: 586917 - DNA, 100 bp, Homo sapiens
gctgcctgaggatgagttcctggtggtgctgcgctgtgtgggcttgcagggtggcccccgctccgacttcgacatggcctatgagcgtggccggatctcc

SEQ ID NO: 586918 - DNA, 90 bp, Homo sapiens
taagttttttgacacgtactgccagcagagtactgggatttaatgaatttgtctgaaaaacatgataagataccagaaatctgggaaggc

SEQ ID NO: 586919 - DNA, 100 bp, Homo sapiens
acaagaggattatcttagaattttaagatacttcaggtacttgatgaagaagcagaagtttttatagtcaaaatgtggagattattgatatatgaaacag

SEQ ID NO: 586920 - DNA, 50 bp, Homo sapiens
accgggctcagtcctgtccaacagtggaaccgtcccaaaatgtcccttgc

SEQ ID NO: 586921 - DNA, 50 bp, Homo sapiens
cgcaccccttcctgtcaggggccgagaatatgcttttaaggctattaacc

SEQ ID NO: 586922 - DNA, 73 bp, Homo sapiens
cggatcaatccagatggcagccagtcagtggtggagggtcctgatgaagaagctgttgtggatcttggcaaaa

SEQ ID NO: 586923 - DNA, 82 bp, Homo sapiens
ggaggtcctgccgtccatgcggaagatcgtcgccacctggatgctggagtcaccacgttctgcgcttttccgagtcggacat

SEQ ID NO: 586924 - DNA, 82 bp, Homo sapiens
gtcactggatttctgaggagccgttcgaactgtctcaccacttccctgcagctcccaacatccagtcatggataaaaatgag

SEQ ID NO: 586925 - DNA, 98 bp, Homo sapiens
gggcatgatatgagctgcctggacattggagggggcttccccggaatggagggctccgggcccaagtttgaggagggtcatccgagagttggctgcga

SEQ ID NO: 586926 - DNA, 100 bp, Homo sapiens
ctggcgatcagcaccaagaacccactgcaggagccagcaccgctctttgaccttgccatgcttgccttagatagtccagagagtggctggacagaggaag

SEQ ID NO: 586927 - DNA, 83 bp, Homo sapiens
cgaggagtacgagacgaggttcctgtgcaactcttcacagggacaatggtgacagatccaggcaccgagctccacgcaatgcc

SEQ ID NO: 586928 - DNA, 75 bp, Homo sapiens
taacgggaggtgaatttccatgtcaacatagtcctgagtttcactctgtcacccaggctcgagtgcagtggcgtg

SEQ ID NO: 586929 - DNA, 74 bp, Homo sapiens
gctgtgacgctgctgctggggtcaggatcatggggttgacagcagcattttccagaatcctaaaaagcttcatc

SEQ ID NO: 586930 - DNA, 74 bp, Homo sapiens
gaaacaagccgtggaataggtgtatcaagtaatggtgcaaagcctgaatctatacgagatactccagccaaaaa

SEQ ID NO: 586931 - DNA, 75 bp, Homo sapiens
ccctttttgtcagattatcaggatgaggttctccgggagatgttgcataaccactccttcgtgggctgtgtgaat

SEQ ID NO: 586932 - DNA, 83 bp, Homo sapiens
gaagcggccaatggcacggaggcctgcgtgtcagcccaagactaccccgtcggtcattctgttcctgccgtcctgtgaggagc

SEQ ID NO: 586933 - DNA, 100 bp, Homo sapiens
caccgagtactcctgtggcttgcagcactcctggtattgactttgccactcgtaaaatagccaagttgctgaagccacagaaagtgattgagcagaatgg

SEQ ID NO: 586934 - DNA, 83 bp, Homo sapiens
ctcagttggaagcagccgatccagcctgcggagcctgtggggcaggctgaaggggatgctaagggagataaagcaaaggtgaa

SEQ ID NO: 586935 - DNA, 75 bp, Homo sapiens
gagacgccaaacacaccaactttgtggaggttctccccatgacaccacctgaacgtctcttcctcccaagggtgt

SEQ ID NO: 586936 - DNA, 74 bp, Homo sapiens
acagtgacttgcagctggagagaatcaacgtgtactacaatgaggctgctgataccacgaggaacccgaggccc

SEQ ID NO: 586937 - DNA, 50 bp, Homo sapiens
ccggagcagagagctggcgagcaagatggtcatcatgggccagtgctact

SEQ ID NO: 586938 - DNA, 88 bp, Homo sapiens
tgaaattcttcttcgttatggacagcatccaaacattatcactctaaaggatgtcatcatggtcacaggagaccatccaatcacagct

SEQ ID NO: 586939 - DNA, 75 bp, Homo sapiens
tccaccttccccgcagacagcatgctgctagacctcggagccagaaaacttcggctccatgttggaactgtcgtg

SEQ ID NO: 586940 - DNA, 100 bp, Homo sapiens
gcggctgttgcctggacgtttgtccaatccacgttgacatttgagggatcacagcgtgtgagctgcagaaactggagggcagcagtggacctgtgcggac

SEQ ID NO: 586941 - DNA, 82 bp, Homo sapiens
ctctgagttcttgggcacgttcatcttgattgatagctggaatggccttagtcatgaggcttttagacttgtttcaaggcgg

SEQ ID NO: 586942 - DNA, 90 bp, Homo sapiens
gtaaatgctgtcttttcccaaaagacaggctcttcacctgaagatttgaatataacctgccgctttgcaggtgtattccacgtggagaaa

SEQ ID NO: 586943 - DNA, 50 bp, Homo sapiens
cgggccgcgccgcgcctcagctctggatacaagaccctcctgaaaggaat

SEQ ID NO: 586944 - DNA, 75 bp, Homo sapiens
tacaacgaactagcacaacgaggagctctcgatgttctgaagtatgaggaagttgacatggattcattagccaag

SEQ ID NO: 586945 - DNA, 78 bp, Homo sapiens
tgcagacttggccaaatggacgggactattaaggcacatctccctaacacttcctgccaccttccgaggcaggaacag

SEQ ID NO: 586946 - DNA, 98 bp, Homo sapiens
gggatccggctcctccagctaccggcccaaggccatctacctggacatcgatggacgcattcagaaggagcacgtttgccgtggacgggaaagattgc

SEQ ID NO: 586947 - DNA, 98 bp, Homo sapiens
gggggcgcgaggggaacggaggccagagctgcggtgggcaaacgcagaggcgggaacaaactagccctcaagacgggaatagtagccaagaagcagaa

SEQ ID NO: 586948 - DNA, 98 bp, Homo sapiens
tgggggtcggccggggccgcttcaccacttacgaaatcagggtcaaggtggtagctgagcacccagatgcttcaggtgaggagattgaagagctgctc

SEQ ID NO: 586949 - DNA, 101 bp, Homo sapiens
gtcccaggcagcatcctggcgcccctcaccaaagccacagcagcagaaagtagtgacgggagcatcaagtgtgttaccgagtggaatgggccaaattccag

SEQ ID NO: 586950 - DNA, 90 bp, Homo sapiens
ctcatggggaaaatctccccggtgactttcaggattcagaatccatggctggaagaggtagtaaggccattgggagggcatgcctctcct

SEQ ID NO: 586951 - DNA, 74 bp, Homo sapiens
cgacaagtttctggacactctccgagaggtgaaggaaattgacaatggcccttcagctatgctaggtctataat

SEQ ID NO: 586952 - DNA, 75 bp, Homo sapiens
ctagactcaccagagcccgtgttagtcatggatgatccattcagcccctgcagaaaaggggccttgctgttcaac

SEQ ID NO: 586953 - DNA, 105 bp, Homo sapiens
catgcaaaggcaggggaggaagccacctcgaggtactaggttttgacaagcttgcatcatgcgtgagtataagctagtcgttcttggctcaggaggcgttggaaa

SEQ ID NO: 586954 - DNA, 82 bp, Homo sapiens
tggacagggacagtgggcagtgctcccggaacacaagctgtgaaacactagtttagcagccactgctgcatcaggggctttt

SEQ ID NO: 586955 - DNA, 80 bp, Homo sapiens
actatagagtttgtggacagatttatattggccgggatagaaaatcgtcagctggacacagtaaatttctttttgaagag

SEQ ID NO: 586956 - DNA, 97 bp, Homo sapiens
cctaaagtctgagagagggaagtcgcctctgtgctcgtgagtgcatggggtataagggccgcaagcttcttatcattgggaccactagccgcaaaga

SEQ ID NO: 586957 - DNA, 88 bp, Homo sapiens
cgaggccgagcatgggactggggacaagcccgcggcgccgcgggaacgcaccacgcggctgggtaccgggaagccagtgttgaagtga

SEQ ID NO: 586958 - DNA, 75 bp, Homo sapiens
ccccaatttcccagctgctaaaggaagaggaaggtaacatttgtcgatcacccattgcagaagcagttttcagga

SEQ ID NO: 586959 - DNA, 100 bp, Homo sapiens
cgccttcagccaccatggggaatgggatgaacaaggaaggttgtgcaggaccagcgttccctgtgcaggcgccactgcgtttcctgcagattccgaccgg

SEQ ID NO: 586960 - DNA, 97 bp, Homo sapiens
ggaacttggaaaaaaggaactgtgtgcagtaccgcaggcattttctggtggacaacagtgtgtttcatgccaatgttttcagttgcaccaagcttag

SEQ ID NO: 586961 - DNA, 100 bp, Homo sapiens
cagattttggtgcagctagagaattagaagatgatgagcagtttgtttctctgtatggcacagaagaatatttggtgaatgaaaactttgccattgattt

SEQ ID NO: 586962 - DNA, 50 bp, Homo sapiens
gtgatgcctgctagccaaaagggtactccaaagattcaggtttactcacg

SEQ ID NO: 586963 - DNA, 98 bp, Homo sapiens
ccatccctaatgaagtcaacgggtccagcatgacaggatggaagtacaagtgtcagcacctatgcgactgataacgttcaatgaagcggacgaaagtg

SEQ ID NO: 586964 - DNA, 83 bp, Homo sapiens
cagaagtccagagctgaggactgcctgtttgcagtgcctacaccaactaatgttacaattgaatcctataacatgaaccctat

SEQ ID NO: 586965 - DNA, 75 bp, Homo sapiens
aggcccggcgtgaggaggaggaggaggtcaacgaaacggaatattccaatgctctttgtccggggagatggcgtt

SEQ ID NO: 586966 - DNA, 100 bp, Homo sapiens
atcacgaaacattccgtgattaagctttgtgactttggatttgctcggcttttgagatgctgaaaacgccattcaacagatgggtggccagtggcttggt

SEQ ID NO: 586967 - DNA, 83 bp, Homo sapiens
cccgccgcccgcgcctgttccgcagcccgcgtccgcgccggccccacagctctgcgtccggatgaatgatttcggaatcaaga

SEQ ID NO: 586968 - DNA, 75 bp, Homo sapiens
cgcatcgccacagctgaaggctgcgagggactaagagcagagttttgtggtctttgcaacccttgtggtcattgt

SEQ ID NO: 586969 - DNA, 82 bp, Homo sapiens
ggcggatttggagggaccctacgaaccaggagtcaggcgagccgatctggggctgcagatcaccggcgtaatcaacccagcg

SEQ ID NO: 586970 - DNA, 74 bp, Homo sapiens
gagcagttttcatggatgcccctgtttctggtggtgtggtggctggaggtggccgaattgacaaacccatcttg

SEQ ID NO: 586971 - DNA, 75 bp, Homo sapiens
gggcttcatagcattcgcgtactccgtgaaggggctgaggaagctgccctcgaaaccctccagaagacatctgtc

SEQ ID NO: 586972 - DNA, 105 bp, Homo sapiens
gcagaggcctacatcccacagagatacccagacaacaggatcgtctcgtccaaggcgtggtgtccctcgtggccgttcacccctccaccgtcaacccgctcggga

SEQ ID NO: 586973 - DNA, 98 bp, Homo sapiens
attcgtgcttgacagcagtgcttctatggtgggaaccaaactccggcaggctgaagccgacgtagcttctctgaacagacgcatccagctggttgagg

SEQ ID NO: 586974 - DNA, 101 bp, Homo sapiens
cagaaaccagaaactttaaatcttgagaaaagaagattgtctatcatgaaggagtcaagtgcttctgctcctgatgtggatgacccagaggcattcccagc

SEQ ID NO: 586975 - DNA, 100 bp, Homo sapiens
cagcgacactacctgggccatacagactgtgtgaaatggtgtgaagaggtacagctgcagcccccagaggtctggtcccctgacccgtgccaaccccata

SEQ ID NO: 586976 - DNA, 75 bp, Homo sapiens
ctttagaaaactgatcttaatacagctgattgctgtgtttgaagaacaagaaccactccacaagattgagagccc

SEQ ID NO: 586977 - DNA, 98 bp, Homo sapiens
gaagcaaggcaaagtcttttgtgctcccctcccccatcaaaggaaaggggaaaatgtctcagtcgaaaggtgtgggccatgtttgaggattgccccag

SEQ ID NO: 586978 - DNA, 76 bp, Homo sapiens
ggttccatgtgtgctaaatgtgttcgtgacaggatcaaacagagcatactgaatcagcaggactggctggtggtgc

SEQ ID NO: 586979 - DNA, 74 bp, Homo sapiens
tcgagagacctgcgtacattcggggtgccagaaggaaagcatagcaattaccagctctggctgggtcgccacaa

SEQ ID NO: 586980 - DNA, 99 bp, Homo sapiens
actacatccatggaggagggtgcattctgggtgatgacatgggacttggaaaaacagtacagctaaaagatggcggcaaggcagcccaggcaaatgtaa

SEQ ID NO: 586981 - DNA, 51 bp, Homo sapiens
tgtggtccagggcagggccactccagatccataaagctaccagctcctcgc

SEQ ID NO: 586982 - DNA, 74 bp, Homo sapiens
acttgcccaaggaatcagtcagttggacagagaactacacttacagttaatgaaggagttcccccttctgagta

SEQ ID NO: 586983 - DNA, 90 bp, Homo sapiens
ctagccgccgactcacacaaggcaggtgggtgaggaaatccaggaactctttccagttaacagacagagtgtggatcattttgctaaata

SEQ ID NO: 586984 - DNA, 141 bp, Homo sapiens
gtgcttgccactatgcccaactaatatttggaattttcgtatacgtggattccagaggggtgacagcaaaacttctttctacaacttcaacaggctgcactggaggtgtttgcagagaataatactctgagtaaattgcag

SEQ ID NO: 586985 - DNA, 100 bp, Homo sapiens
ccgagcccctgacaccatgtatttgttggactttgtgaagccagaatttctcttgcttaggaagtcaatgaaaggattctattttgcaaagctgtattat

SEQ ID NO: 586986 - DNA, 100 bp, Homo sapiens
ctggacctaccatgaaagacttctgaatccaggaagagagactgactgggaaacatgttattcagcccttgccagcatccagccatgggggatatgaaaa

SEQ ID NO: 586987 - DNA, 100 bp, Homo sapiens
tgctgaccatcgtgggtgcactcataggctcgtctggtgctatcctgtcatacatcatgtgtgtgctttggacatcagacagtgcaggagaagaatgtga

SEQ ID NO: 586988 - DNA, 82 bp, Homo sapiens
ggaggtgttcgagaacgaccccgagacgcactctcgagtggaccctgaggagctcttcaccaagctcgaccgcattggcaag

SEQ ID NO: 586989 - DNA, 50 bp, Homo sapiens
cgcaagatggcagccaccacgggctcggagactctccaacatgtgccttc

SEQ ID NO: 586990 - DNA, 98 bp, Homo sapiens
aagaagcaaaaaagggactgctaagaagataccaccagactcagcccacctgcacccaggtgaaataaacagctttattgctcacacgaagcctgttt

SEQ ID NO: 586991 - DNA, 75 bp, Homo sapiens
cccactgtgttcatctctggggtcatcgcccggggcaccaatctgaacaaggcgatgacgctgcaggaggccgag

SEQ ID NO: 586992 - DNA, 89 bp, Homo sapiens
cgagcaaggagcgcggaatcggggagcgtccggagctagctggatcctctaggcagatattgatgatgttaagaagttcaaaccgggtt

SEQ ID NO: 586993 - DNA, 90 bp, Homo sapiens
gccccttcgtctccccagcacccactctctgggggcaggtgggcccggtgacagatatgaggccccaggattcctggcgaggtcctcctc

SEQ ID NO: 586994 - DNA, 98 bp, Homo sapiens
gcccctgtctcccgctccgcagccccgggcacggcggaggcagcggagccctgggccatcgatcggcttcagctccccaggaatatgattgaaaacag

SEQ ID NO: 586995 - DNA, 75 bp, Homo sapiens
gtcgccgcgtccttggctggcgtagcaagccatgggccacagccaggaccggctcaccaccttccaggagaacca

SEQ ID NO: 586996 - DNA, 83 bp, Homo sapiens
tcgccgggaccctcgcgcgcgaccgccgaatcgctcctgcagcagagcgccaaatcttaaaggcagaccacgcaaaaagaaac

SEQ ID NO: 586997 - DNA, 50 bp, Homo sapiens
aatggtaaaattccagttaggagggttaccatcatgaaagataaagatac

SEQ ID NO: 586998 - DNA, 83 bp, Homo sapiens
cagagaccttacctgtcaccttggctctcccacccaatggagatggctctaatgatctattccagaggggagcttcaccactt

SEQ ID NO: 586999 - DNA, 83 bp, Homo sapiens
ccaccggcagggcttctcctatgactacgtctttgactggaacatgctgaaattcgaagcggggagaggtggtgagagatgac

SEQ ID NO: 587000 - DNA, 74 bp, Homo sapiens
gcgacgtcaccgccatggcaggcatcaaagaatttcagaaactgtggaggagtgtcactgtagattccatggac

SEQ ID NO: 587001 - DNA, 80 bp, Homo sapiens
ccgggagtcgctgggtgcgtggggctgcctcgccgcgtctcgccacgatgtccaacatcacagtcacatacagagatggc

SEQ ID NO: 587002 - DNA, 90 bp, Homo sapiens
gaatcacatgttcttcatcgcgataacgaagaaacctgagataacaacgaacttgatgcaagtgataggtttgccaaggtcagacctctc

SEQ ID NO: 587003 - DNA, 50 bp, Homo sapiens
aaatggaaaggactagacattcctaaatgcgatggccaggtattactgac

SEQ ID NO: 587004 - DNA, 100 bp, Homo sapiens
caactttcgacatctggaagttcagaaaaagtccctgtgaagcaggaagagtgagggcaggttcactgcagctcagcagcatgtctgcagggaattcatc

SEQ ID NO: 587005 - DNA, 100 bp, Homo sapiens
agggcggacacggccaccgcctcagcgggagaggagtctccaccaggactgaccgctgccgcccagcacgtccagggcatggtgctgatgtgaaatgtgt

SEQ ID NO: 587006 - DNA, 82 bp, Homo sapiens
tggcactggccaaggagattgccctcccaggcccaatacttcaaagcatcctacctctgctcaatatatattacttggagag

SEQ ID NO: 587007 - DNA, 100 bp, Homo sapiens
tctacatctaccatctgcgctgctatgtctatcaagccagaaacctcttggctttagataaggatagcttttcagtgagcctgttcatgcgaagaaacgg

SEQ ID NO: 587008 - DNA, 100 bp, Homo sapiens
ctcgggacctgttgcaagccgctcaggacaagctgcagcggctacagggctgatgtgtgcagaacagactgaaggcatcaggggcagcaagaggagacca

SEQ ID NO: 587009 - DNA, 98 bp, Homo sapiens
cagagaaagacttgacagtttgcttttaagcatcgagagtaaacatgaggttacgatcctgggaggacttaatgaatttgtagtgaagttttatggac

SEQ ID NO: 587010 - DNA, 80 bp, Homo sapiens
ggagtatgtgaggagtggctgggacaactacgagtttgacatcaatgaagatgcgtctgttactagagtggagagtctac

SEQ ID NO: 587011 - DNA, 98 bp, Homo sapiens
aagactggatgccaatgatccttgacaatgtcagtgcctactgcctgcatattgctgaggatgatggggaggtggacaccgatttccccccgctggat

SEQ ID NO: 587012 - DNA, 100 bp, Homo sapiens
ccgtgcaccttcgcaagaagcaccagttcaagtggccctcagggcatccccgttttcgaggctgttggaagctgcttgggagaagtgggtcctatagatt

SEQ ID NO: 587013 - DNA, 75 bp, Homo sapiens
agcgagtacttcgttccaacatggacatcctgaagccaatcctggatcttagaaatgaagttgaaaaattacgca

SEQ ID NO: 587014 - DNA, 100 bp, Homo sapiens
gcttcagcgttctgtggttgtcaacagcctcggtgtctggatgcccagcctaaccaagtcagcttcccatctttggctgagacaaggagaaccctgctgg

SEQ ID NO: 587015 - DNA, 75 bp, Homo sapiens
ctcccacccaatggagatggctctaatggttacggcctccgctgccacagggccatcatcaccatctgccggctc

SEQ ID NO: 587016 - DNA, 75 bp, Homo sapiens
cggcgccccggccgaggtggcggcggctcctcagtatttgactacagtcattccttatgagaaaaaaaacggacc

SEQ ID NO: 587017 - DNA, 75 bp, Homo sapiens
ctgatcttggccagcttgcttctcaaggaggcaatctgaaagcaaatcctgtttagatgcaggcgaaggttcctg

SEQ ID NO: 587018 - DNA, 83 bp, Homo sapiens
aggacttcgagcagcctctcgccatttcccggaatccacattcatctcaatggaaggatcctgccttaagtcaacttatttgt

SEQ ID NO: 587019 - DNA, 82 bp, Homo sapiens
aacgcatcatgccagggagccaagcgtcctgcccggccatggtcatcatgggccagtgctactacaacgagaccatcggctt

SEQ ID NO: 587020 - DNA, 75 bp, Homo sapiens
catccgggaagtgcttggggatggagtgcctccaaaggttgctgaggtgcttgtgagtgaggattctgacagtga

SEQ ID NO: 587021 - DNA, 83 bp, Homo sapiens
atgtgagaaacaggcagcaggatgtgcgggctcatcaacagagcagacgagcagaccgtttattagctgcaggcaaatacgaa

SEQ ID NO: 587022 - DNA, 102 bp, Homo sapiens
tctcagatgagctcatgagtgaaaggggcataaggaaatggtggcaggcacttcctcctaacaagaaggaagtagttaaagaaaatataaggaagaataaat

SEQ ID NO: 587023 - DNA, 82 bp, Homo sapiens
gccgagtcgaacggggagccgagctggagctgccgcggcgcagccagggactttgaacatgtcggggatcgccctcagcaga

SEQ ID NO: 587024 - DNA, 102 bp, Homo sapiens
caatgctgaagtaagattgtcttggaaatactaagttggtttggcaatgaggagcagcagctggcgtgggccaagcgggagagcgagaaggcggaacaggag

SEQ ID NO: 587025 - DNA, 100 bp, Homo sapiens
aactacgagtttgacatcaatgaagttgcagagtgggcaggatcttaagacccgataggtgcagaacccatctggacacggagaccaggaatggagttcc

SEQ ID NO: 587026 - DNA, 75 bp, Homo sapiens
ctggtagggctgagcttgcaagaggatcaacatgcctaatctccgccacctccctactctcggctgtctcctcgc

SEQ ID NO: 587027 - DNA, 74 bp, Homo sapiens
tggaccctggaaaacctggccctcttcaatttctgacaaaaggtgacagagctgaatgaacctctctccaatga

SEQ ID NO: 587028 - DNA, 82 bp, Homo sapiens
tgaaatcagaggagatgtaactatcgatcatagcaatggatcatttaacttgaaagctttgtcaggaagctctggatataag

SEQ ID NO: 587029 - DNA, 101 bp, Homo sapiens
ttcaccttgaattaaaactgaatgaactgataacggagaatggaactgtatgccagcagcttgttgtacaggagtatgcggttaatgaagttgtggcaggg

SEQ ID NO: 587030 - DNA, 100 bp, Homo sapiens
gaaaaagagcaggaagtcattacatggtttcgagttctttgaagccagtgccaaggagaacatcaatgtgaagcaggtcttcgagcgcctggtggatgtc

SEQ ID NO: 587031 - DNA, 80 bp, Homo sapiens
tccctgcatcctaagactcgaaggcagcacaggacctggaaaaattacattacgagctcaactggaggcagtcctgtgcg

SEQ ID NO: 587032 - DNA, 82 bp, Homo sapiens
ggacagttagtcacccacctacatgttgaggaaagattctgaagcttggcggagaggggtgtgtgagtggacaccagtgaag

SEQ ID NO: 587033 - DNA, 98 bp, Homo sapiens
gaaaaagaacgacatgatgcaatcttcaggaaagtaagaggggattccgactacaatctcctaaaagcagaaacaaccttttgggttttacctgtgtt

SEQ ID NO: 587034 - DNA, 95 bp, Homo sapiens
gaaagagaagcataaacctatcttctttcattatggagggaggtttggcagatggagaacctgatcgaacttcgatggagaaatcaaggcataga

SEQ ID NO: 587035 - DNA, 74 bp, Homo sapiens
tgaggagttgctaaatgctcagattgttgtaggagataaagttgttttgatgcctgtgaatgcagggcagccac

SEQ ID NO: 587036 - DNA, 75 bp, Homo sapiens
agggtccctgaagagggaagacacgcggaaacaggtgctaactttgagtacatcatcgcagaaaaaagagggaag

SEQ ID NO: 587037 - DNA, 75 bp, Homo sapiens
cgcaagcccagacaatgccggtggaggaatttgtggctggctggatctctgtgaccaggtatctcccagctccac

SEQ ID NO: 587038 - DNA, 100 bp, Homo sapiens
cgaagaagtagaagcatcgaaagcgttggagaggtgttaccggaacggcggcgacaagggtgttcccgaactagagtggatggagaacatcattgcaaca

SEQ ID NO: 587039 - DNA, 95 bp, Homo sapiens
aagaaggcatatgttcgactggctcctgattacgatgctttggatgttgccaacaaaccgtgttgccgcccgctgtgctatgagcagtcagagcg

SEQ ID NO: 587040 - DNA, 75 bp, Homo sapiens
aagagctacgagaaccagaagccaaaccagcctggacaccaagtctgtgtcagaaggccacctcaagaggaacat

SEQ ID NO: 587041 - DNA, 98 bp, Homo sapiens
atcaagaccagcaatgcccaggctgggtcatcatcggacagccagcagcatcccagtaattttgcacgatggcagtcaaatgagagcaaaagcatttc

SEQ ID NO: 587042 - DNA, 75 bp, Homo sapiens
caccgattataagaagagaaactcagcgctggggaagaagatcctgtttgaccaaactcagagatcaattaaggc

SEQ ID NO: 587043 - DNA, 82 bp, Homo sapiens
gtcagcactgactttcagctatggaatcggatgatcggctgaatgtaacagaggaactaacgtccaacgacaagacgaggat

SEQ ID NO: 587044 - DNA, 100 bp, Homo sapiens
gcctttttggcctggcttgtttgcaaagcaaattgccatcgcaagagagggggacctgctgacaaaggagcgcctctgctgcggcctgtccatgtttgag

SEQ ID NO: 587045 - DNA, 75 bp, Homo sapiens
tgacctaatgttatcgcggaatgatgtgtgatcagtttgtggcagagtacgagcccgtgctgatcgagatcctgg

SEQ ID NO: 587046 - DNA, 100 bp, Homo sapiens
gattacctctacaactttgttgcctcattctggggacatcattgctactgtctttgccccacttgaggttttccgacttggagaaagtatagcagcaaac

SEQ ID NO: 587047 - DNA, 100 bp, Homo sapiens
ggagctccttgatgagtctcagaggttcctgtactgcgatgtgatgctggagaactttgcacatgtaacatccctgggtcctcttcctgatggatgggaa

SEQ ID NO: 587048 - DNA, 83 bp, Homo sapiens
acgagcaggacttcatccaggcctacgaggaggtgcgcgagaagtacaaagaacatccagtcatggataaaaatgagctggtt

SEQ ID NO: 587049 - DNA, 121 bp, Homo sapiens
ccctcggcctcgcggcgacggcggcggtggcggcttggacgactcggagagccgaacccttaggagaaatcttgagagtggacagcaattgtgaagatcgccagagagttctgtgtttcat

SEQ ID NO: 587050 - DNA, 73 bp, Homo sapiens
tttcatgcaccttacaaacttccatacaagggctgtaaagtgagggaccacatggttacacttcgtgatcaag

SEQ ID NO: 587051 - DNA, 74 bp, Homo sapiens
tgctgagaagctctacactcaaggatgctcccataatactctcagatagtgaagaagaagaaatgatcattttg

SEQ ID NO: 587052 - DNA, 90 bp, Homo sapiens
tctttcgctccattccacaatgtcaactgtccccgcggcttcctgtacttcaacagacaggtctccaccgggaaccttctggtcatcctg

SEQ ID NO: 587053 - DNA, 75 bp, Homo sapiens
caccatctgcaggagcccagcaaggtaatatttgaagctgaagtctcaggagggagaagtggttatattgccatt

SEQ ID NO: 587054 - DNA, 82 bp, Homo sapiens
agaaagcagctgatagcacatcacaggatgcttgaagcccacatgcagagctacaagggcaatgaccctcttggtgaatggg

SEQ ID NO: 587055 - DNA, 100 bp, Homo sapiens
cgcctgtagctcgcgggcctcgcagatttatgtgatcagtttggctgaaccccgtctgcccctgcagctggatgatgctgttcggcctgaggcagaagga

SEQ ID NO: 587056 - DNA, 101 bp, Homo sapiens
tttgaaaaggagaaaatgaatgccaaatgggacacgatcgatctggaatagaaaacgtcaactctgtggaggctttgcaggaaactctcattcgtgcacta

SEQ ID NO: 587057 - DNA, 82 bp, Homo sapiens
ccagattaaaaggaatagtcccattagcaaagcctttgttacctcctgggcctttagaaatgacttctgaaaatcaagaaga

SEQ ID NO: 587058 - DNA, 100 bp, Homo sapiens
agaacatatgtttatgttctaacagtcactgaaatattagaagattgggaagattctgttaatattgaaaggaagtggagcaattctgaatactgtaaag

SEQ ID NO: 587059 - DNA, 75 bp, Homo sapiens
cggagcgcaacactcgcttggttggggagatcggcgcttggccggatctcccattaaccagtcataatgaagtaa

SEQ ID NO: 587060 - DNA, 98 bp, Homo sapiens
ccccaggatgtggagatgaaagaggaggttcaggaagatttgactgaagagaaaaaaagggaactggagcataatgctgaagagacctatggtgaaaa

SEQ ID NO: 587061 - DNA, 101 bp, Homo sapiens
gtacccattcccaagtcccacgaggcgggtccctgcaagtcatgaacaaaacgagaaagattatggaacatgggggggccaccttcatcaatgcctttgtg

SEQ ID NO: 587062 - DNA, 100 bp, Homo sapiens
gcccccaagccctccttcgtgtcgtacgtacgccctgaggacttatggagcaaggatgactgacacaaacacaaaaatcattctgcctgttgaatgaatc

SEQ ID NO: 587063 - DNA, 114 bp, Homo sapiens
gcagtctgggttgggcagaaggcagaaaaccagcagagtcacagaggagatggatctagtgaaaagccatttgatgtatgcggtcagagaagaagtggaggtcctcaaagagca

SEQ ID NO: 587064 - DNA, 76 bp, Homo sapiens
gtgtgcgttcagctgtgtcagctaatgccaagttctatagaaattttagagtattcatcagatagtgaaaaagaag

SEQ ID NO: 587065 - DNA, 97 bp, Homo sapiens
ccgggtcctcctagaaattccccccgaagaagactcccccacatctggacctagaggatcaagacataatgggagcatttttagacaagccaaagat

SEQ ID NO: 587066 - DNA, 101 bp, Homo sapiens
aaacaaaagcaggcaaatggagtcgttgggaatgtatcttctcttaatggatctccaagatagaaatgaaaaactcttttatagagtgctgacatctgaca

SEQ ID NO: 587067 - DNA, 75 bp, Homo sapiens
cgagaagcctgaaaagtcgcagcgagctggagccgccggagagccagtcttggtgctctgtgttcacctggttca

SEQ ID NO: 587068 - DNA, 83 bp, Homo sapiens
ccgcctgccgctcgtggtggaggacttcgtgaaggattcgggcgcctgcttcagtggtttgatgatcgtggacggagtgatta

SEQ ID NO: 587069 - DNA, 100 bp, Homo sapiens
gccgtgtggagtaggtctggacctggactcacggctgcttggagcgtccgccatgaggagaaggtgaaatgacaatggatgctctgttggctcgattgaa

SEQ ID NO: 587070 - DNA, 76 bp, Homo sapiens
atttaaagctgagctgcgaggaaaatggcggcgggaggcctcaggagtgcaagtagctgatgaagtatgtcgcatt

SEQ ID NO: 587071 - DNA, 100 bp, Homo sapiens
cggaaatcagctctacagttcagaggcattcgacttacagcagtgtgcggccagccagcagaggggtgactcaacgcttggaccttcctgaccttcccct

SEQ ID NO: 587072 - DNA, 75 bp, Homo sapiens
catccaggcgccgcgcccggcccggctggggaacgcagaggtgacctgagcatctctgcagaccgcctgagtgag

SEQ ID NO: 587073 - DNA, 125 bp, Homo sapiens
cctatttacacacagaatgagctgaaaagacttcgctgttattaaaccttcaagaatgttctcgtggaggacttgaagtctcagctggtggcccaggatgactcccagaggctggtggagcagga

SEQ ID NO: 587074 - DNA, 100 bp, Homo sapiens
agctggagctggagctgtcggaagacaagttggatggcttgaggactggtactaaaaggaaacgtgactgggaggccattgccagcagaatggaggatta

SEQ ID NO: 587075 - DNA, 87 bp, Homo sapiens
cggcgttcggggaaatggctgcgagaccctagaggcctgcggcctgcggtcctctcagggtgcgccatcattgtccgaggtcagcct

SEQ ID NO: 587076 - DNA, 100 bp, Homo sapiens
gcccacggacattgctgactcttcagaacgtgctgacatggagccaggcaaccactgagaaaacggaaccgaatagtcaagaggacaagaatgatggtgg

SEQ ID NO: 587077 - DNA, 83 bp, Homo sapiens
aaataaaatagccatctcacctttgaaatcgccaaataaggtcctcagaatggttggaatgaccctccagctttgaacagagt

SEQ ID NO: 587078 - DNA, 51 bp, Homo sapiens
aatggataaggcaaaacggaggctggcaattaccagtgataacatcaaata

SEQ ID NO: 587079 - DNA, 100 bp, Homo sapiens
gactcctgcgcctccatgtacagccgctccatccagggccaccatgtctgcctcctggtgaaaaagagtccggcagcgtcttctcttgagggagcaattt

SEQ ID NO: 587080 - DNA, 100 bp, Homo sapiens
cccctgaagaagcgcggatacgatgtcaccaggaaccctcatctcaacaagacttaattcagtgcacaaatgagatgaatgtgaacatcccacagttggc

SEQ ID NO: 587081 - DNA, 101 bp, Homo sapiens
cgtgtactgattgcagcccatggcaacagcctccggggcattgtcaagcatctggaggttgtatatgaacacagatcaagattagagaaatccttgcaaaa

SEQ ID NO: 587082 - DNA, 82 bp, Homo sapiens
aaggacggatgatgaagtagtacagagttttctggatatgccgcagaaggatccgtgccagaagcaagcctgtgagatacag

SEQ ID NO: 587083 - DNA, 101 bp, Homo sapiens
aatgaaccttgggtgatttgttctgtatcagaagacaatatcatgcaagtgtggcaaatggcaacagctgaagctaataatcttgctgcagtagcaggagc

SEQ ID NO: 587084 - DNA, 100 bp, Homo sapiens
tacggcggccccgcgcagcccccggccgcagcgcaggcagcccagcagattgcaaatagaagagtcttccaaaccagtgaggctatcacaacagctggac

SEQ ID NO: 587085 - DNA, 100 bp, Homo sapiens
ggctcctgaacagttgcactgtaaaaaacccagctgaagaccactttagaaactcaattaagtgaatgaaaactttgccattgatttgatagcagagcag

SEQ ID NO: 587086 - DNA, 100 bp, Homo sapiens
ctggagaaactgccacatgaaaaacaccacaatcaaccttattgtggcattgcgccgtacattcgagagtttgaggtgctggaaacatgcatgaagagct

SEQ ID NO: 587087 - DNA, 100 bp, Homo sapiens
ctgaagaactcactcagaccttcatgagctgcaatctcatcactgggtgagaagaacagtgtggactggggtgaccttaacctggtgctgccctgtctgg

SEQ ID NO: 587088 - DNA, 154 bp, Homo sapiens
tgctgggctccggggacactttgcgttcgggctgggagcgtgctttccacgacggtgacacgcttccctggattgggtttctgaaggattgtcattcttgcatagcagtgtgaaaatggtgcatggaaatatcactcctgaaaatataattttg

SEQ ID NO: 587089 - DNA, 98 bp, Homo sapiens
ttatctggttgtaggcgtcacagtcagtgctggtggatattatgatgggactgaggaagacccacaggcagaactggccatcattcatggtcagatgg

SEQ ID NO: 587090 - DNA, 82 bp, Homo sapiens
tgtgcacagtgatcaagaggcagaagcagagtttggagtatttggagcaagtttttggctttcacccccaaccagtgaccaa

SEQ ID NO: 587091 - DNA, 98 bp, Homo sapiens
ggtcccttcctgtaccttgtcctcaggtttttcgttggaatatacgttgcacatttatggcgattctgagtgtgagggcagacttctgccaggctcag

SEQ ID NO: 587092 - DNA, 118 bp, Homo sapiens
gccgaggaagaagccattcagcgtgaagcagaagaagaagcagttgcaggacaaacgggagcggaagagaggtgtcagctgtgatgcatgtttaaaaggaaattttcgaggtcgcaga

SEQ ID NO: 587093 - DNA, 100 bp, Homo sapiens
ccatggggctggcctgcggcgcctgggcgctctgagatccatatcatagattttgacgatgaaaacaacattataaataaaaatgtcctcctccatcaag

SEQ ID NO: 587094 - DNA, 75 bp, Homo sapiens
gaaatgcttctttgtgaaattttttggaacagaagatcattggtaattccattaactactcaagatgacttggac

SEQ ID NO: 587095 - DNA, 50 bp, Homo sapiens
gaagagggaagacacgcggaaacagatttgaggcttaagcaacttcttcc

SEQ ID NO: 587096 - DNA, 88 bp, Homo sapiens
gaaaatggggcggaagaaaatacaaatcacacgcataatggatgaaaggaaccgacagattcaaccctatgaaaagataaaggccagg

SEQ ID NO: 587097 - DNA, 100 bp, Homo sapiens
tttctagtccctcttacttgaagcatgtctttcagagcccggcaccacccatcttgagtatctgcctgctctctctttccgaaggccccaccggcttccc

SEQ ID NO: 587098 - DNA, 82 bp, Homo sapiens
ctcggccgcgcggactgaaggagactgaaggtggcaaagaaacacagcatgatgtttggaaatataattcttcgatcaacaa

SEQ ID NO: 587099 - DNA, 100 bp, Homo sapiens
cggggagacccaggctgcagcaacaaagggcagcgagcgattggccgggctgcaggcgagggcagtagctcgcctgagccagagatttcccaaagctgag

SEQ ID NO: 587100 - DNA, 100 bp, Homo sapiens
tatgacggtgagatcttccagccagaagacatcttctcagaccatcacaccatgtggtatcgtgatttccgatacccacctggacacccccaggagtata

SEQ ID NO: 587101 - DNA, 110 bp, Homo sapiens
agctgcaaggaggccgtcaccttcaaggccgtcagacaaggtgcctatggtcctgagcactgggtcacgtctagtgtcagctgtgggggccgtcaccagtctcctattga

SEQ ID NO: 587102 - DNA, 87 bp, Homo sapiens
tttctggtggacaacagtgtgtttcatgatcttcagtttagatcttggaggcatatcaactgtggttctaaatggctatgatgtagt

SEQ ID NO: 587103 - DNA, 99 bp, Homo sapiens
gcgatattatcattgtgttagatcagaaggaccatgctgtttttactcggatctcactggcatcgaatctatggatcagtgtcgccataccttggaaca

SEQ ID NO: 587104 - DNA, 74 bp, Homo sapiens
gagtttgtcatcatgtgagagagaataggatccatgatgaccttaaaagaactgtagatctttgtcaaaaggct

SEQ ID NO: 587105 - DNA, 96 bp, Homo sapiens
gacgcgtccggctgtggaagagagcggcggccgctcacaacatgcacagcctggcgacggctgcgcactattcctgatcagagaactccagttgct

SEQ ID NO: 587106 - DNA, 75 bp, Homo sapiens
gcccctggctcctgctcctggattcttcagtatgatatgtggaatgttactcctacagacctatgggactggaag

SEQ ID NO: 587107 - DNA, 71 bp, Homo sapiens
ggacccgtggcagaagatggctgtggagagcccgtccgacagcgctgaggagacttcttggcatcatcaca

SEQ ID NO: 587108 - DNA, 51 bp, Homo sapiens
cgtggagtgaaggtcacgccgcggcgcagtttcgctcttgttgcccaggct

SEQ ID NO: 587109 - DNA, 100 bp, Homo sapiens
gaagtccctccaccggctctgtgcaccaaatcagatgaaagccaaggaagggaggaatgtgtacagttcttcacgctatgatgattatgacagatacaga

SEQ ID NO: 587110 - DNA, 100 bp, Homo sapiens
gagcctggactcgccctcctatgtcctgtacagagctcccagctcctccagcagccgacaggaggcccgtcaagatgcaggcaggcattgccaccccagg

SEQ ID NO: 587111 - DNA, 96 bp, Homo sapiens
ctggcggcggcgcccgcagccagcaaggttgctgaaaagccaggagtcaaaatgactgagcgctttgactgccaccattgcaacgaatctctcttt

SEQ ID NO: 587112 - DNA, 74 bp, Homo sapiens
gacgctatggcgcactggagtaccctgttcctggcaattgaccctcttgctggaatgacatctcttagtatagg

SEQ ID NO: 587113 - DNA, 82 bp, Homo sapiens
ctgaaaggctctccttgcagctgcttagacgctggatttttttcgggtagtggaaaaccagacaatgcagatcttcgtgaag

SEQ ID NO: 587114 - DNA, 50 bp, Homo sapiens
cgaaggttcaattatgtggtcaaagagtcctaagcagacttaaagccaag

SEQ ID NO: 587115 - DNA, 115 bp, Homo sapiens
caatggtaactgcaggaccagctgcagggaagagcagttcctcaacctcgtgggatactgtgctggtgctggagaatctggtaaaagcaccattgtgaagcagatgaggatcctg

SEQ ID NO: 587116 - DNA, 75 bp, Homo sapiens
gaagtactgagcctgttggaggaactggcccggaaacaggaggacgaaggggagttcaccctgcacggccgggcc

SEQ ID NO: 587117 - DNA, 83 bp, Homo sapiens
ctgcggccggcctgggcaggtgtcttcctcgagaggtcaaaatgcagatcttcgtgaaaacccttaccggcaagaccatcacc

SEQ ID NO: 587118 - DNA, 82 bp, Homo sapiens
tttcatcccagctttctaatctacagaaagagctaaaagatggcggcaaggcagcccaggcaaatgtaagaataggcgatgt

SEQ ID NO: 587119 - DNA, 51 bp, Homo sapiens
gtgtggctctggatagcaccttatggacagacaaaaagccttggcatccac

SEQ ID NO: 587120 - DNA, 111 bp, Homo sapiens
cctgtttcgccacagttcctaccttatgagctcggttttcttatgcttataagagtggaacaggaaggttgtgcaggaccagcgttccctgtgcaggcgccactgcgtttc

SEQ ID NO: 587121 - DNA, 100 bp, Homo sapiens
cgtttccgtgccgagcggcaggacaacaaggagaactggctgcagcgaggaaacgagacctctttcgttccttctagaaggtctggaggacgtagagtta

SEQ ID NO: 587122 - DNA, 100 bp, Homo sapiens
cgggaggcgcggcgagggcgccagtcatgcggaggaatccctttggtgtggacatctgctgccggaaggggtcccgaagccccctgcaggaactctacaa

SEQ ID NO: 587123 - DNA, 75 bp, Homo sapiens
ctgcgaggcctgacatcacttaccaggtttgaagatgccgcatttggattggatgaattccaaattctgcttgct

SEQ ID NO: 587124 - DNA, 100 bp, Homo sapiens
gaagaagaagaaccggaagaaactgtccgagaagcccaaagaaaagaagcccatctgtgtccagagatcagaatagaagatacgaccaaagggaagaaag

SEQ ID NO: 587125 - DNA, 99 bp, Homo sapiens
aaaacagttctcatgatagctatacaactggatgatgactttgagttcactggcagccacctgacagtaaggaatggctactcgtgtgtgcctgtggct

SEQ ID NO: 587126 - DNA, 98 bp, Homo sapiens
tagtctttccgcttcttgaatttctctctgtaaaggagggtttcgaaaaaacgatgaaatgaaagctatggatgttttaccaattttgaaggaaaaag

SEQ ID NO: 587127 - DNA, 90 bp, Homo sapiens
cctcagcctctttgtcactgcctggaccattgtccctgctgtttctcagatcctggctctgcagagagaacagcccagaaaagaaagttc

SEQ ID NO: 587128 - DNA, 83 bp, Homo sapiens
gaggaatctggattgtcacctttgctgcaaaaaattacgggagtcagtggatcggtggggaaaatgctgcttaccctgggccc

SEQ ID NO: 587129 - DNA, 78 bp, Homo sapiens
ctattgtggaagaagcatccattaaggacatgtctcaggaaggctatggaactagatctcaacctcctctggcccccg

SEQ ID NO: 587130 - DNA, 83 bp, Homo sapiens
tcagaggctggctcaatcaagaaaggagaaagagagctcaaaatcggagacagagtattgcccagagcacatgtgaggagagg

SEQ ID NO: 587131 - DNA, 100 bp, Homo sapiens
ctgaagtcggtgtttggagaaaaggactcaggtgaggactggagattccaactccacagagtgaccagagagaggacgtggctgaagacaccaaagatgg

SEQ ID NO: 587132 - DNA, 75 bp, Homo sapiens
ttcctgctgctctgtctcagcgccgcctccctgcttcttaacagttatgtgtctcggtaccacgtgaaagactcc

SEQ ID NO: 587133 - DNA, 75 bp, Homo sapiens
agggccccgtaaattggaaggatgcacaagttccaaggttacgtttcaggtcgggattactgttcggaagaagag

SEQ ID NO: 587134 - DNA, 75 bp, Homo sapiens
ggccttggccgaagccgcgcggagcagagcccctggtgcctgcgcaggatgcgtcctcccaggtgaagcgtgagg

SEQ ID NO: 587135 - DNA, 100 bp, Homo sapiens
gtgggagcctcttggggacctgggagccccctccgagttacacctccagagccaaaagtaagtgagcctcgcagctggtccctgctagagcagctgggcc

SEQ ID NO: 587136 - DNA, 75 bp, Homo sapiens
cagaatcccttctctgaagacaagacggacaaggtctgcgcaggcatggcactaagtgtcccatggcacatttgg

SEQ ID NO: 587137 - DNA, 97 bp, Homo sapiens
ctccggccatgcccttgaggatcttagtctgcgctcctcagaccaccggcaggtgaacagcctgatgcagaccgaggagtgcccacctatgctagac

SEQ ID NO: 587138 - DNA, 100 bp, Homo sapiens
cgccagcttaaggacaacacctgtgtggtggaattccagttcatgctgcccacatctcatccaaacagaatgttcatgaagaagtcttacaagaatatca

SEQ ID NO: 587139 - DNA, 90 bp, Homo sapiens
gctgtctggcatgggcctctccaccgtgcctgacctgctgctgccactgtgtgagtgcatctccatccatgtgggccaggccggagtgca

SEQ ID NO: 587140 - DNA, 50 bp, Homo sapiens
tgctgcgcgacccccgcgcatgggggacagccgcgccgctgctgcttttc

SEQ ID NO: 587141 - DNA, 131 bp, Homo sapiens
gcgcacaacacttcaccctctcgcctcgggtctcgggggccgctctgggatcccggccaccagcaattgtccgttgagtggtgattttatgcaatggcttcaagccacagttcttcaccagtgcctcaagg

SEQ ID NO: 587142 - DNA, 59 bp, Homo sapiens
cctcccgagtagctgggaccacaggactactttggtgagtgttcagaggctgcaattaa

SEQ ID NO: 587143 - DNA, 75 bp, Homo sapiens
tggagaatgatgtcatcatgcatgctctcactaagcagttggaggctgtgtctgataaagaaatgggggctcaga

SEQ ID NO: 587144 - DNA, 100 bp, Homo sapiens
tctgggacctggaagctgccaaaagttcggagtgttcagtggacacacgcttggcagtgtaatttccacagatcctctgaagaggttcttcagtcatacc

SEQ ID NO: 587145 - DNA, 100 bp, Homo sapiens
tgcagcctcggccttcccgtgctcagcatttatgacattaacagagaacaggactatgtcaagaattctgagggtatacttggtgaaaatgaattaagac

SEQ ID NO: 587146 - DNA, 98 bp, Homo sapiens
ttgctggccatcctcaatgttttgctcctggcctggaagggtgaaaatcctatttataagagtgccgtaacaactgtggtcaatccgaagtatgaggg

SEQ ID NO: 587147 - DNA, 76 bp, Homo sapiens
gcgacagctgctcctggctacatagctccagaaaccttctctatgtctacccacagaggctgaactttgtaaacaa

SEQ ID NO: 587148 - DNA, 100 bp, Homo sapiens
ggaccgtcccgcgcggggcacgatgttgaacatgtggaaggtgcgcgagctggtggacaaagctactatactggcaattgctggagaagattttgcaatt

SEQ ID NO: 587149 - DNA, 83 bp, Homo sapiens
gaaatagcaagaactgaggagcaccaggagacgcaactcatcgggtctggcttgtctccacattgccacccttcagaagaacc

SEQ ID NO: 587150 - DNA, 82 bp, Homo sapiens
aggaaatcatgtcaagcgaagccttgaaaaagctgccctgagacggtgtcccgccgaaagcgtttagtgggctacagatggc

SEQ ID NO: 587151 - DNA, 99 bp, Homo sapiens
ctggccttgagggtccacaccgcgagggaagatgcgtgcgcccatttgcacgatctgattttctggagagatgtgaagaagactgggtttgtctttggc

SEQ ID NO: 587152 - DNA, 82 bp, Homo sapiens
cccgaggccaggagccaggggcccagaagatggaaatcatattatgtagaatacttgggtgacatctgcctgagagatctcc

SEQ ID NO: 587153 - DNA, 80 bp, Homo sapiens
cgagaaaagatgaaacggaccctgtgcggccgggtgtgtggcaacattacttcatgatgcagccatgaaccctgcggaag

SEQ ID NO: 587154 - DNA, 101 bp, Homo sapiens
cagctaacagctgaatgtgcaatagtaactttgtgtctgctgcacagagctttacatccccgggagcctctacccccaattcagcagcatatttggaatat

SEQ ID NO: 587155 - DNA, 50 bp, Homo sapiens
tggatccaggataacggaggctggagcccaaatcttgtgacaaaactcac

SEQ ID NO: 587156 - DNA, 103 bp, Homo sapiens
cggcggtgttgtaggtagcggtaccttgagtggcaacaggtgcagtagacattgttgcaatcatgatcggcaatctgaaaggcacaaaaattctgcaatctat

SEQ ID NO: 587157 - DNA, 80 bp, Homo sapiens
aaggggagctcgtaaggtccctcaaagcgggaaatgcgtcaaagaagacacagtctgtccagcacaaagttacttagtcc

SEQ ID NO: 587158 - DNA, 154 bp, Homo sapiens
acttggacctatagagagcattggtaatgcatctgccatcacggtggcctccccaagtggtgactatgctatttcaggggaggagccccagccccgcgacgaggaggaagcggagctggagctgctgaggcagtttgacctggcctggcagtac

SEQ ID NO: 587159 - DNA, 124 bp, Homo sapiens
caagactctgcgacagattcgacaaggcaatacaaagcagcgtatcgatgagtttgaagcaatagaagagcaagttagtaccttgtaccaaaacatcaaccttgtggagccaagattaattcag

SEQ ID NO: 587160 - DNA, 75 bp, Homo sapiens
tgaagacttggatgaaaatatggattacaggttgatgtgggagcactattcctgatcagagaactccagttgctt

SEQ ID NO: 587161 - DNA, 95 bp, Homo sapiens
atggacgtctggggcaaagggaccacggtcaccgtctcctcagacctcctgccccccgaggtctgcagtctcctgaacccagcagccatctacgc

SEQ ID NO: 587162 - DNA, 100 bp, Homo sapiens
caatccctaccactataagagagtagaaagccctgatgccagcacgagccgccgcttcacgccgccttccaccgcgctgagcccaggcaagatgagcgag

SEQ ID NO: 587163 - DNA, 50 bp, Homo sapiens
tgcctggacccctactattgcaacaagggagtgcatccgccccaaccctt

SEQ ID NO: 587164 - DNA, 101 bp, Homo sapiens
cagcacacaaggaaccgtcaagggcagtcatcagatccaccatctgcttcaacgactctttttgatcagaacaatgctgcaaaaaaagaagagtcagaaac

SEQ ID NO: 587165 - DNA, 100 bp, Homo sapiens
gacacagagatggaagacatgattgctgaagttggaatgttaaagaaattcatcaggctgctgactatctcaaagtggaagaggtggtcactaaatgcaa

SEQ ID NO: 587166 - DNA, 71 bp, Homo sapiens
gggctagaaaatttatagactctgatttttcagaaaggtcagcaaaggaggcagaagacaaaattaaaaag

SEQ ID NO: 587167 - DNA, 100 bp, Homo sapiens
agagaagccactttgtcttaattgctggggagccattaagagaaccagttatccaacatggcaggcggccctagaggtcaccgctcgctactgtggccgg

SEQ ID NO: 587168 - DNA, 148 bp, Homo sapiens
ttctggggaatttggtttggacaactttgattctcagtttactaatgaacctgtccagctcactccagatgacgaaaatattcatcgcaatttgtctccaggaattccagtatcagtacaaacagaagaaagttggctccaagatttg

SEQ ID NO: 587169 - DNA, 101 bp, Homo sapiens
cttctgaaacgactcgggtagaggctgaggaaggccgtgttgtttgtctacctgggactaatataagccttccaaagtcagcagcaatctgttacacagca

SEQ ID NO: 587170 - DNA, 82 bp, Homo sapiens
agattcgcagtggtcgcttcttctccttggccgtctatacccaggattgccccctggcagcagcgaaagccatccagggcct

SEQ ID NO: 587171 - DNA, 95 bp, Homo sapiens
caataccaggatagctgttgtttcagagaaaggtacggtggttgaggagagcaatggttctgatgagatggagaattcagatgaaaccaaaatgt

SEQ ID NO: 587172 - DNA, 50 bp, Homo sapiens
gttttgtgcagattgccagtctaaagcctcgtgcaagccgaatactggca

SEQ ID NO: 587173 - DNA, 82 bp, Homo sapiens
agctgcagcatggagagatagataaacggcaatggcaccagcatgatatcattgatcattcctcccaaagaccagatttcac

SEQ ID NO: 587174 - DNA, 100 bp, Homo sapiens
cagccaaaatgtcaaccaagaattctacagatctagttgaatatgttgacaagacaactggagggatctgtacttactgcaaccgtgagatccgagactg

SEQ ID NO: 587175 - DNA, 100 bp, Homo sapiens
ctcggagcccggagcgtgcctcggcggcctgtcggcttcctgcctgacacagctcacttcaagaagtgcacaatgtcagaacgtggaattaagtgggctt

SEQ ID NO: 587176 - DNA, 85 bp, Homo sapiens
tcggggcggcggactggctcgcggtgcaggtttgaagaagaactgaccagcaagtggttatatctttttgaaggcagtggagtcc

SEQ ID NO: 587177 - DNA, 82 bp, Homo sapiens
tgtggtcctccaggccttcggcaagtaccgggatggggactttgattgtggaagctgatcgaggaagcctaagcaggctctg

SEQ ID NO: 587178 - DNA, 51 bp, Homo sapiens
gcacaaaataagctggaaaaatctgaggttcaaaccttgtactactcagct

SEQ ID NO: 587179 - DNA, 75 bp, Homo sapiens
aagcctggatgaaatagatctctcggctctgagggctggagcattggatttgctaaaggagcttaagaatattcc

SEQ ID NO: 587180 - DNA, 100 bp, Homo sapiens
acttactgaaagatatgaatcagagttcattggccaaggagtgccccctttcacagctagaacgagtaaatctgtctgcagcccagacactgagagccgc

SEQ ID NO: 587181 - DNA, 90 bp, Homo sapiens
actgtgacttcagagacactgccaagcagccttagccctagtgtagagacatcgctattgcggttccgaggcagtgggaagagatgcggc

SEQ ID NO: 587182 - DNA, 82 bp, Homo sapiens
gaaggaggtcctgccgtccatgcggaagatcgtcgccacctggatgctggagcttcctgatttctcccgattccttccttct

SEQ ID NO: 587183 - DNA, 80 bp, Homo sapiens
ggagagaccgcggggctgggcgctgctttaccacgcgttggtgcaggtgacagcagggacatgtctcgggagatgcagga

SEQ ID NO: 587184 - DNA, 75 bp, Homo sapiens
ttacgagggttcttgggaatagcaggccacccacacagaatatgcctatgggtcctggagggatgaatcagagcg

SEQ ID NO: 587185 - DNA, 75 bp, Homo sapiens
ttgatatctttctatttgatagactaacaaatggctgaaggtgatgtggccgccctcaaccgacgcatccagctc

SEQ ID NO: 587186 - DNA, 101 bp, Homo sapiens
ttttgaagtgtttgacgaaaaccgattggtctccgaattcaatcctttgacgttcaccagcgtgatcgaatgcgagaagccaaacaacgacctgagtaggt

SEQ ID NO: 587187 - DNA, 100 bp, Homo sapiens
ctgccatccacgctgcagcgccgcactgacttccaggtgaagggcacaggcctccaccgctatgtctggctggtttacgagcaggacaggccgctaaagt

SEQ ID NO: 587188 - DNA, 75 bp, Homo sapiens
aatcatttaatcatccatttcatcaaaaaagtttctgtagaaaatgtttcctgactgcaatgagggaaagcggag

SEQ ID NO: 587189 - DNA, 101 bp, Homo sapiens
cagtatctgggtcaagagcataaggatttgcacacctatgggcaaactgggagacagctgccatccactgactcgtaaaacagagtctcgctctgtcaccc

SEQ ID NO: 587190 - DNA, 83 bp, Homo sapiens
ccaagatggcggccagcaggaggctgatgaaggtgatacagttaatattggagatgtatcctacaagttgaaaattcctaaga

SEQ ID NO: 587191 - DNA, 95 bp, Homo sapiens
agactgtcgacctaaagcctgactggggcaagattaccagcaatgctaccagtgatttaaatataaaagttgatgggcgtgctattgtgcgtgga

SEQ ID NO: 587192 - DNA, 143 bp, Homo sapiens
gtaattgggtctctagctcagaaccattagacacatcagtggagtccatgctacctgattgcccccgggtctcagcagtttgaggtggtatcaacatcctacagaagaagaattaagaattcttgcagggaaacaacaaaaag

SEQ ID NO: 587193 - DNA, 76 bp, Homo sapiens
attcaaaggacctgcccccagagagaatatgagggaaggcaccattggagatatggctatcctgggtataacagaa

SEQ ID NO: 587194 - DNA, 75 bp, Homo sapiens
ctgaagacatttcctctcctcccctctggatttctcagaggtttaccagcattagtagtggccacatcagtaggc

SEQ ID NO: 587195 - DNA, 100 bp, Homo sapiens
accaaatcctgcagggctggctgctactgctatgtcttctacccctgttccattagatctggtgctctcatgaaaatctacatcaggaggacctagaaaa

SEQ ID NO: 587196 - DNA, 90 bp, Homo sapiens
tcggcctcgaacatcgtcagcccccaggaggccttgccgggccggaaggaacagacccctgtagcgggtgctggagaatctggtaaaagc

SEQ ID NO: 587197 - DNA, 75 bp, Homo sapiens
ttctcatcaaaggctccttccggattctcaagctgattgtcaggaggtacccctgggatggcgtgagcactcccc

SEQ ID NO: 587198 - DNA, 51 bp, Homo sapiens
cggcggcggctgcggcccaatatagttggactaaatgctcttccttcagag

SEQ ID NO: 587199 - DNA, 97 bp, Homo sapiens
gcggcggcgagcgcctttacaatggccctgaccctgtttggagctactctcctcctggtgaggtggaaattccagcaagaatagaggtgaagacaag

SEQ ID NO: 587200 - DNA, 100 bp, Homo sapiens
ttctctctttgggaggaggaagggacaccgagggaccaaagggcggatgatgatgacgacatgggagaggatgaagatgaggacgatggtttctttgtgc

SEQ ID NO: 587201 - DNA, 100 bp, Homo sapiens
agcatataccatcttcctatgcatggaaactcattatgagaagaactggttcattacctcattcatctgaacagttgctgggccacaaagagggtcctcg

SEQ ID NO: 587202 - DNA, 100 bp, Homo sapiens
gctcgggggccaactctgaggagtccactgcagcagaaaaatcctgggtagaagctggatcagcaagaatgtcactccttatattggtgtccattttctt

SEQ ID NO: 587203 - DNA, 96 bp, Homo sapiens
attttgagccatacttaagtagccagacaaatcagtgtgttttatggaccatgtgctgctatgtatgcctgaagaagtacttgaaatgcaaatttg

SEQ ID NO: 587204 - DNA, 76 bp, Homo sapiens
cgtgatgcaggaaaccttcaggaatctggcttccataggttatgatgtgattgctcaagcccaatctgggactggg

SEQ ID NO: 587205 - DNA, 98 bp, Homo sapiens
ctgccatcgcccggcccggccgcgcccgcggaaccagaccagggttttggccaaattgggcgagggcacaaaataaccacttaccccttctcaccgag

SEQ ID NO: 587206 - DNA, 98 bp, Homo sapiens
aagaagtgccttttgcctcccaccgtgattctgaggcctccccaaccatgtgcaatttagtcgtgaaaggtgccaaattggcagaggctcacgtttct

SEQ ID NO: 587207 - DNA, 82 bp, Homo sapiens
ccggcgcccaggcctggggcaccgcgagtgccgaaccttcggctggcattgtgtggctgctcaattaatgtaccaacactgg

SEQ ID NO: 587208 - DNA, 100 bp, Homo sapiens
gaacagcctaaacatcagccagatatatgtggtgtgagaagcatgaacagtacggacattcagtggtcagccatcctgagctggggatatgctgataata

SEQ ID NO: 587209 - DNA, 75 bp, Homo sapiens
aaaacaacttcgagggcagagcactggtgaggtggattgatgatgaatcttctggcacacctggagcaactccag

SEQ ID NO: 587210 - DNA, 75 bp, Homo sapiens
tggagcctcagttggaagcagccgatccagcctgcggagcctgtggggcaggattactacagcatcccatttccc

SEQ ID NO: 587211 - DNA, 100 bp, Homo sapiens
ctcctttctagttatggccacaaggcaggatgctgaggtgttgtctagtcccagcggcgtgtcacatttcacctgccagaaggctctcaggaaagcagca

SEQ ID NO: 587212 - DNA, 98 bp, Homo sapiens
aatcagttgcgaccttctcttaacagaatttgaaagacatattggctgacctgatacctaaggagcaggccagaattaagactttcaggcagcaacat

SEQ ID NO: 587213 - DNA, 101 bp, Homo sapiens
gcgtacccccgtagcggaaaaaccttttcttggacagtgacttactttgattcttttgaaccaggaatgtttcctcctactcctctttcacctgccaggtt

SEQ ID NO: 587214 - DNA, 100 bp, Homo sapiens
ggggatcttcgcactatcccaaggttacaacctgccatattcattcatccagtgatgatgaaattgactttaaagaaacgggtttctcacaggattcttc

SEQ ID NO: 587215 - DNA, 75 bp, Homo sapiens
caagtctcccaacaacagagacagactatccccataaatacggtcctcaggggggctgtgcagatcattcagtat

SEQ ID NO: 587216 - DNA, 75 bp, Homo sapiens
cagcccctctgtacctcgggggcctgcctgagctcaggccccggggcctccagcggcaccagcggagaccacggt

SEQ ID NO: 587217 - DNA, 100 bp, Homo sapiens
ggaattgggcaaagttgctgccaaattatctgagactggataagatgaccttcagtgtgctgctcaaaaacagccaccattggttcaggcaatcttcagc

SEQ ID NO: 587218 - DNA, 90 bp, Homo sapiens
gatggaaaacaaatcaaactgcaaatctgggatacggtcatcctgtacagttctacagcatgaataggcctgcctctcgccatactcccc

SEQ ID NO: 587219 - DNA, 82 bp, Homo sapiens
gttaaaggcaagatcgacaccatgaagctctgtcagattcagggagttttgtatcttctcgagcccggcgagaaaaaaaatc

SEQ ID NO: 587220 - DNA, 97 bp, Homo sapiens
gctgtaacaaagttcacattcaaccagttattacagatttggcctatggcatgtctgcgttacctttaaatctgataaaaggcactagaagcgctgc

SEQ ID NO: 587221 - DNA, 98 bp, Homo sapiens
gcgcggggtccgggcgtggatcccggcacgcgagcccgggcgttcgcaggggaggcttgggcaatggtagatggtggttcaaatgtgaaagcccgctc

SEQ ID NO: 587222 - DNA, 101 bp, Homo sapiens
ccaggcctgacagctctgcggctcgggccctgagacagtccagaagacatgcacagctggattaaggagattggcgcagctgtccaggccctcaagtgcca

SEQ ID NO: 587223 - DNA, 98 bp, Homo sapiens
tgacctccaggccagtccctgatccctgacctaatgttatcgcggaatgatgcacaccatatggtccctcggccatcagtgccacctcctggtgccaa

SEQ ID NO: 587224 - DNA, 73 bp, Homo sapiens
gggagctcatcttcgtggggcgtgaggagtgtgagctcatgctacaggtggtctactacgtatttgccatcat

SEQ ID NO: 587225 - DNA, 50 bp, Homo sapiens
aatcaccagaacaaaatgtgcaggtgccaatgggtcatgtttggttagaa

SEQ ID NO: 587226 - DNA, 131 bp, Homo sapiens
ggcgaagccacagaaaccgtccctgctacagagcaggagttgccgcagccccaggctgagacaggaacaactggaggagtggatgcagccaccactggagctgctagtgaaaatacatctgagagagcagg

SEQ ID NO: 587227 - DNA, 98 bp, Homo sapiens
tcaaccagatgaggaagtacaactttgagacggagccggtgggagaggagagcatctccgacgcagagaaggtggccatggatctcaaggaccccaac

SEQ ID NO: 587228 - DNA, 82 bp, Homo sapiens
gctgctgatcgtcctgctgctgatggtgtgcgtggagtacgacaaggagttctcccctcgtcagcgacaccacaaagagttc

SEQ ID NO: 587229 - DNA, 98 bp, Homo sapiens
ccaactcccaccccatccagtggaatgcaccacagccatctcacatttccaagtacattctcaggtggagacctgcatgttatttgaaagcaattgag

SEQ ID NO: 587230 - DNA, 96 bp, Homo sapiens
tgaggaagagaaccgctggacatgggttctctgaggatgggagtgtgaacatggctacgcctcttcattcccgtccatgccgagcccccgactgca

SEQ ID NO: 587231 - DNA, 76 bp, Homo sapiens
gagaggcttgaggccaagcaccgagagagaatgtcccaggtggtctcggctgctcgtatcttacttaggaaccctg

SEQ ID NO: 587232 - DNA, 75 bp, Homo sapiens
accatgaagatctggacttcggagcacgtctttgagtcagcccaaggccaaccccactgtcactctgttcccgcc

SEQ ID NO: 587233 - DNA, 50 bp, Homo sapiens
caaatctcccccgaaaaccttggaaaatgaaacctgctcctccaaagcca

SEQ ID NO: 587234 - DNA, 50 bp, Homo sapiens
caaaaccagttaccactaatcttaagaagccccctctcccaacaactccg

SEQ ID NO: 587235 - DNA, 90 bp, Homo sapiens
gttgcatctacttggacgcctgcattgatgttgttcaggagagaagatgactgaggaggaggtggagaccgttctggcaggacacgagga

SEQ ID NO: 587236 - DNA, 87 bp, Homo sapiens
acaccactgaagcattgccaagtacatgctgctgttattgctattaatgaagctattgaccgtagaattccagccgacacatttgca

SEQ ID NO: 587237 - DNA, 82 bp, Homo sapiens
atcccacagcctcctcttccagaatgcctttgcgcagccgcttacaaacacgcagatggcaagaagattgatggcaggaggg

SEQ ID NO: 587238 - DNA, 75 bp, Homo sapiens
tcacatatttgctcaacaaaatgatcagactctgaacaggaagtgcctcctggaaccacagagtcggttcagtct

SEQ ID NO: 587239 - DNA, 100 bp, Homo sapiens
tccagcttaagagatccagtactggagtcggcagaactggagtaaaatcctggtccctgtttaccaaagacgttggaagaggtggctatggacatcacct

SEQ ID NO: 587240 - DNA, 90 bp, Homo sapiens
tggaaacgcaagacggtgccgagaagcagctgcgaggacaaagtattttggacagatatcatcaacgaagccattttcagtgccaaccgc

SEQ ID NO: 587241 - DNA, 90 bp, Homo sapiens
atgagacatttgctacagcatcccacattaagtcaacgatggagtctcgccctgtcacccaggctggagtgcaatggcgtgatctcggcg

SEQ ID NO: 587242 - DNA, 90 bp, Homo sapiens
ccggttacgaaaccttagcaagatggcggctccctgggcggctgacattcacgtttcattctgccacactcgggaacggtgatcggggaa

SEQ ID NO: 587243 - DNA, 98 bp, Homo sapiens
tgacattaccttttcaccagactatccgtttaaaccccctaaggtcagatgtaccaacagtaccagcaacaggccggctatggtgcacagcagccgca

SEQ ID NO: 587244 - DNA, 82 bp, Homo sapiens
gagatatctgcaatgatgtactgtggatccaaacttctacagcaaaaacttacttcttttaggaaagacatacttgaaacta

SEQ ID NO: 587245 - DNA, 51 bp, Homo sapiens
caactcttctttgaaagcctctcaaggagggaatcctatggctgtggtcag

SEQ ID NO: 587246 - DNA, 75 bp, Homo sapiens
aggccctacgggagaaaaccgggcgcaagctctggattaatcgaattacagctgctagccaggaacatggactga

SEQ ID NO: 587247 - DNA, 81 bp, Homo sapiens
agcgggagtgttcgttgtgccagcgactaaaaagaggctaaagaacgtgccaatggaatggagcttgatgggcgtaggatc

SEQ ID NO: 587248 - DNA, 90 bp, Homo sapiens
ggggatgaacattgacattgccagcatcgatatggtttctgaagtcaatatgacatatgtagagtgtgtcggtcagaaggaacacctgag

SEQ ID NO: 587249 - DNA, 75 bp, Homo sapiens
gaaacccacaggcacacccaagtttattacccagaactctttgtctgggtcagtcaagaaccatttccaaacaag

SEQ ID NO: 587250 - DNA, 97 bp, Homo sapiens
ctcagctcccaccctcagcccctgccactagtgagatgaccacgtgctatgctggaaaatgagaagaagaagcgtgaaatggcagagaaggagaaag

SEQ ID NO: 587251 - DNA, 75 bp, Homo sapiens
ttccaacactacttagctttccaagtctctgctggatgaaccgaatcctaacagtccagccaatagccaggcagc

SEQ ID NO: 587252 - DNA, 100 bp, Homo sapiens
ccaggcactccgtcagtgagatggcctccaacaaggactgactgcattgcacagatgatggatatttacgtatgtttgaaacgaccatcctggatggtgg

SEQ ID NO: 587253 - DNA, 90 bp, Homo sapiens
ggcgggggtgctgcagaggacacgaggcggcgggctggagacatggaccgcggcgagcaagaaaacacgagatttttctcctatttcagc

SEQ ID NO: 587254 - DNA, 83 bp, Homo sapiens
gccacgtgcagacatctacaaccttcgatctcctgacgacccagtactataaagaacgtttcaccataatgaccctccagagc

SEQ ID NO: 587255 - DNA, 75 bp, Homo sapiens
ctccgggactctgacggtgaccaacttattagaaaaggaacctgatgatttggaaacagaaattctacaagagcc

SEQ ID NO: 587256 - DNA, 100 bp, Homo sapiens
caaatggctgctctctggcgttcctcacactccccctgaagttcatctaagatcttcattcttcaaaggttcaaaccttgtactactcagctgatcacaa

SEQ ID NO: 587257 - DNA, 98 bp, Homo sapiens
agttaccactaatcttaagaagccatgcccggttacgctgtatgtgcacctgcaacaggtgtacattttgcatctgtcagaacttcctcaactcagac

SEQ ID NO: 587258 - DNA, 100 bp, Homo sapiens
gttcgaggggccaaggcagaagaaatcttggagaagggtctaaaggtgcgggagatggaggcagagctggaggacgagaggaagcagcgctcgatggcag

SEQ ID NO: 587259 - DNA, 50 bp, Homo sapiens
cttatacagctaaagccatggaaagatggagtttcactgtgtcacccagg

SEQ ID NO: 587260 - DNA, 98 bp, Homo sapiens
gtcaactcaaatgcaagtccaagaggaggaggaggcggaggtccaagcggaaagccgataacagtagaactctgaacgtggattccactgcaatgaca

SEQ ID NO: 587261 - DNA, 97 bp, Homo sapiens
atggcagacgatattgatattgaagcaatgcttgaggctccttacaagaaggagcttgccatgcccggggaggacctgaagttcaacctaatcttgc

SEQ ID NO: 587262 - DNA, 83 bp, Homo sapiens
cccccttccccacgcaaccccagatccatttacactttacagtcagggaagtcaaagatgcatccctgagttcttcctagcag

SEQ ID NO: 587263 - DNA, 96 bp, Homo sapiens
ttgatggaatatatcgagttagtggcaatctggcaacaatacagaagttaagatttattgtcaaccaaggcagttatttggcagaaaagcagagta

SEQ ID NO: 587264 - DNA, 90 bp, Homo sapiens
cgtcggcgccacagccccgcgcggaaacctcaggcaaagcttcttccagaccagctggtcttgcttctggagcatctcttggagcagaag

SEQ ID NO: 587265 - DNA, 82 bp, Homo sapiens
cgcgccgcggccgttagtcatgtcggttgtaggacagtcccatctggacagcaacattgagaatcaagagattgtcaccaat

SEQ ID NO: 587266 - DNA, 96 bp, Homo sapiens
gcccatgggcggacgaccatttggtttggtcatcaatctgaactacaaagatttgaacggatggggaaagacaccatagtcataaaagaagaaagc

SEQ ID NO: 587267 - DNA, 74 bp, Homo sapiens
acaaaccccaatctcagtggacaagagacactatggacagcgtgaagcagagcgcggccctgtgcttgctgcgc

SEQ ID NO: 587268 - DNA, 87 bp, Homo sapiens
gaatgtcacaggtccagggcagaggaccaacatgggcattttgtttatgagcaaggtaccaggtcatcagtacaccatctgatattt

SEQ ID NO: 587269 - DNA, 100 bp, Homo sapiens
ggccagaagcgggcggcgcgggggagatgaatctgaattatccagaacagaaagttgtgactgttggacagttcaaaattggtctgatccatggacatca

SEQ ID NO: 587270 - DNA, 75 bp, Homo sapiens
gaaaacctttaccaaatggataaatgctcgattttcaaaggtaacgatgggaaaggaactcctgtattcacaggg

SEQ ID NO: 587271 - DNA, 100 bp, Homo sapiens
aattgtggttatccatcaagatccagaagctcttaaagatatcaagtctttggagaagtatatcattgagtcctcccctgcccaagggaaccggcaagag

SEQ ID NO: 587272 - DNA, 100 bp, Homo sapiens
ggagctcttccgtggcattagtagtcagcccttccctgaactacactgtgctgccttaaaagtgtttacggttttgcacactagggaccaagaagccctc

SEQ ID NO: 587273 - DNA, 100 bp, Homo sapiens
ctcaggcgtgcgcggacggtgtgcgggtggccagcatcgaaatgttcagccttttagtgatgaagatgcatcaattgaaacaatgagccattgcagtggt

SEQ ID NO: 587274 - DNA, 100 bp, Homo sapiens
caggaactgagggctgcagctctgaaacagggacccaggccaggagccaaaaacctgtatatcatctccgtgaaggggatcaagggacggctgaacagac

SEQ ID NO: 587275 - DNA, 100 bp, Homo sapiens
cgctgaagttgaacaaaatggtggtctctttataatggttcgagaacttgtcttggacaattgcaaatcaaatgatggaaaaattgagggcttaacagct

SEQ ID NO: 587276 - DNA, 100 bp, Homo sapiens
ctcatctttgacatggacggacttcttctgggctgccttggagttttcataagaaattgtccctggaggtgttggatgatcacagcttccttggagcatt

SEQ ID NO: 587277 - DNA, 51 bp, Homo sapiens
tgtcctttcacacccatgtgaaagagatattaataaggcagcggaaagaag

SEQ ID NO: 587278 - DNA, 88 bp, Homo sapiens
ggtcctttatatagaagggagaagtgcgatgacatggatcctgcggacaaaccgccccagggcgtacctagcaccgaagcatcaggcg

SEQ ID NO: 587279 - DNA, 98 bp, Homo sapiens
aaaaggaatatgcattgaagcaaattgaaggcacaggaatatccatgtcggcttgtagagagattgcagacggaaacacaccctttccttaggcgtcc

SEQ ID NO: 587280 - DNA, 83 bp, Homo sapiens
cccatcgaagctctagaaatgaatgtttccatctcttcagagatgaaccaggttgtgaccgagattcccgacgagagagactg

SEQ ID NO: 587281 - DNA, 75 bp, Homo sapiens
tcctcatcaacaccaaggatctgcaagcccacaggcggttttgtgagctgcttccccaggagcagcggagcgtgg

SEQ ID NO: 587282 - DNA, 83 bp, Homo sapiens
gagaaacaaaacttctttccattgtcctgcccgtttctgcggacttgttctgaggccgagctgctgcagaagaatattttgcc

SEQ ID NO: 587283 - DNA, 100 bp, Homo sapiens
ccggccccgtggctgacctgtttcgggcatcgcagctgcccgccgagacgctgcaccagctggaggagagcaggagtgttcagaagcaaatgaagatcct

SEQ ID NO: 587284 - DNA, 87 bp, Homo sapiens
aggctgacaaggatgccggcctggcccaggatttgaagcattcattaccatctggacttggtctctcagaaacccaaattacatctc

SEQ ID NO: 587285 - DNA, 96 bp, Homo sapiens
ccacaacgtccgactgcactcacacgacgtgcgctatgggtcagataatcagggaggctatggatcagttggaagaatgggaatggggaacaatta

SEQ ID NO: 587286 - DNA, 100 bp, Homo sapiens
ggatgagcctgcagagcgcgcagtacctccggccaacagagattttgagaaacacattgaaggatctgttaacacttgatatacccaataaaagcagtgg

SEQ ID NO: 587287 - DNA, 75 bp, Homo sapiens
agaaaggagtgcctggctgttatggaaagggtgtggagagaagctcgggaccgcatcgtgggcttccctggccgt

SEQ ID NO: 587288 - DNA, 75 bp, Homo sapiens
aaagattgcccacgaattgggtcgatctgtgacagatgaaaacctcacagcacgggtagctctgaacggattcag

SEQ ID NO: 587289 - DNA, 100 bp, Homo sapiens
ctgcatcgagaccacgcccggggcccaggaaggcaagaagcagtataagatgatctgccatgtgttcgagtcggaggatctgaaaatgtgtgtctgacat

SEQ ID NO: 587290 - DNA, 82 bp, Homo sapiens
cccgctcgctgggagagaggtacctctccttttccctctccctttccctaaggtccttatgtcgtcagaagatcgagaagct

SEQ ID NO: 587291 - DNA, 99 bp, Homo sapiens
gaagcagcgcctgttcccggggcagatccaggttcagctgggcgccgtgtacacagaaggtgggttcgtggaaggcgtcaataagaagctcggcctcct

SEQ ID NO: 587292 - DNA, 75 bp, Homo sapiens
aagtcatcccaaatatggttccatccctaaacttataccaatgtttttggaacagtgccagtggttgcttctgca

SEQ ID NO: 587293 - DNA, 82 bp, Homo sapiens
gggcggccgggcgcggcgagcccagataacgaaggaggcccaacttcattcaataaggagcctgacggatttatcccagacg

SEQ ID NO: 587294 - DNA, 75 bp, Homo sapiens
ttcgaggccgcagtggagaaggcgcctgtggaacatcgctttgaaaagtccagccgcatttcatgagcagagaag

SEQ ID NO: 587295 - DNA, 82 bp, Homo sapiens
gacgctgccagcatcgccgccgccagcgtctgcttctgcgctttgcctgggagaggccctggtggcctcgttcctggcgccc

SEQ ID NO: 587296 - DNA, 83 bp, Homo sapiens
aaggaaattatgaccaagtacctcaccccaaagcttccccttctcagaatcctgctcttcctccagagagattcccaggagaa

SEQ ID NO: 587297 - DNA, 108 bp, Homo sapiens
ccagttcatttctgtgacaagtgtggattgcctattaaaatctatgggagaatggatgctgacagacagcaccaagaagtaattgcaatttatcggacacaccttctt

SEQ ID NO: 587298 - DNA, 75 bp, Homo sapiens
agttgggcttggtaccgtgctgcccagaatgcccttcgggaggatgctcacaactgtattcctgagctggacagt

SEQ ID NO: 587299 - DNA, 90 bp, Homo sapiens
aagtttcaggaaatgatagaaacaactttagatatggatcagatgatgatgtgcctgcagatatggttgcagaagaatcaggtcctggtg

SEQ ID NO: 587300 - DNA, 74 bp, Homo sapiens
tggagcagaggacattctagagaaagcaattaccagctctggctgggtcgccacaacttgtttgacgacgaaaa

SEQ ID NO: 587301 - DNA, 99 bp, Homo sapiens
tgtgaaccagcagaatttttgaacagtgtactaaaggaagtataccaagcctttaatcccaaagcagtggtcttacagctgggagctgacacaatagct

SEQ ID NO: 587302 - DNA, 100 bp, Homo sapiens
tcaccgccctgtacttcatctcccggggctccatcgagatcctgcggggcgacgtcgtcgtggccatcctgggatctgtgccagttcagaagcaggcgag

SEQ ID NO: 587303 - DNA, 98 bp, Homo sapiens
tgaaagaacatggtccagaaaacattgtaatggccatcgctggaaacaagtgcgacctctcagatattaggtacatgtcccagagcaagcacacggag

SEQ ID NO: 587304 - DNA, 100 bp, Homo sapiens
ctggatctgtcttgtaataaactgactactctaccgtgcttgccaaggacctgctatgcgccaggggctgctggagctgggaacctaatgatcacagtgt

SEQ ID NO: 587305 - DNA, 82 bp, Homo sapiens
cgagctgagtggttgtgtggtcgcgtctcggaaaccggtagcgcttgcagcatgaaataccgctaccaagatgaagacacgc

SEQ ID NO: 587306 - DNA, 75 bp, Homo sapiens
gctgtccttctttgtggagagcaagatgattgagtcgaatgacatttcagaggagacgatcaggacgaaggaaac

SEQ ID NO: 587307 - DNA, 71 bp, Homo sapiens
gcggggccgacgagtccggaggggctgccgcgggaggtcatctctgaatttgagcaatggtgaaacggaat

SEQ ID NO: 587308 - DNA, 100 bp, Homo sapiens
tcccaaaaagctccgcaggggctgtagggagaaaatatttacaccagcagctccagttcataccaataaagaagatcctgctacccaaactaatttggga

SEQ ID NO: 587309 - DNA, 100 bp, Homo sapiens
gagcccaggagcctgccccgccctggggacgaagagctgcagctcctcctgtgcgggttgcccccaagtttcctggcagtgtgtgatactgaggaggtga

SEQ ID NO: 587310 - DNA, 50 bp, Homo sapiens
ctggaccaggttgagctgcgcgcaggctacacctggatttcattagcatc

SEQ ID NO: 587311 - DNA, 80 bp, Homo sapiens
cggaagcaaaaggcagactttttgatattcagagccttggaagtcaacactgtcaatacgtaggtaacctttccagagat

SEQ ID NO: 587312 - DNA, 74 bp, Homo sapiens
gcgctgtgatgcctgcagagctgtggcttaccaggatgatcggctgaatgtaacagaggaactaacgtccaacg

SEQ ID NO: 587313 - DNA, 83 bp, Homo sapiens
gcccttgccttgagtcagtgcgccgctctccagcccgcttgaacgtggatgaggatcgcagtacggaacctgaccgattgcag

SEQ ID NO: 587314 - DNA, 83 bp, Homo sapiens
tagtcctcgagtccctgaagagagaaggcaaagaacctctggtgttgaaagcaattctgtggtgttcttggtcacacatttat

SEQ ID NO: 587315 - DNA, 82 bp, Homo sapiens
cgtgcttcgtggcccggcaccgttccgcggacgtgctcggcgagaaccactgtctctgatcaacgtgcggaagaggaacgtg

SEQ ID NO: 587316 - DNA, 75 bp, Homo sapiens
tcatgcatccttccatgaaccaatcaagcattgcccaagatcgagcactgccagtgaaagatgtagaagataaac

SEQ ID NO: 587317 - DNA, 90 bp, Homo sapiens
caagagaatttcccattatgaaaaggaatacattctttcatcattaagaaatcaggaggcctgcagtatccctgggattgggaagcggat

SEQ ID NO: 587318 - DNA, 75 bp, Homo sapiens
atgtttatgttctatgctccctaatgaagatgctattaaggaggtgacttggcatgaaattgcaaggcctcagat

SEQ ID NO: 587319 - DNA, 90 bp, Homo sapiens
gcggaaaggccgcgtcgtgatcgactcggacacagaggacagcggcagcgacgagaacctggatcagataagccaatggacacgtcagtg

SEQ ID NO: 587320 - DNA, 98 bp, Homo sapiens
ggagatagtgcagagactgaaggaatggaagttggatacactttgtgacttgtacgagacactgaccattacacaggctgttatttttctcaatacga

SEQ ID NO: 587321 - DNA, 116 bp, Homo sapiens
gatgaagatgtcttttgaaaggtgtactgcaaggaacaaaatgtttgtaaattctccttttaccaagaaactaatctggattcactccctctggttgatacccactcaaaaaggac

SEQ ID NO: 587322 - DNA, 100 bp, Homo sapiens
agaattgagtgatttcctgcaggctatggaacacactgaagttcttcagcttctcagccccccaggtatcattggaacatttcaagatcatcaaatcaaa

SEQ ID NO: 587323 - DNA, 74 bp, Homo sapiens
tagcaccccgagaaccgtcagtttgagccagatgttcgatcctttggtacagaagacagaccgacagatcgtcc

SEQ ID NO: 587324 - DNA, 148 bp, Homo sapiens
acaactcgcccaccacgtccagcttcaccacgcggctgcacaactgcaggaacaccgtcacgctgctggaggaggtgggaccagggagattggatctgctctcaccaggatgtgcatgaggcacagaagcattgaagccaagctgagg

SEQ ID NO: 587325 - DNA, 101 bp, Homo sapiens
ccagggactacgacggcaaggtcttctacattgaccacaacaccaggaggaccagctggatcgacccccgggacagttaataaaggtatccatggagaaca

SEQ ID NO: 587326 - DNA, 153 bp, Homo sapiens
aaacaggcaagaagaaccaatagtagttctcctctgggagaactttttgatcatggctgtgattcactatcaacagttctgcagaatcagaagatttggcagtacatttatatccaggagctgttactattcaaggtgttctcaggagaaaaa

SEQ ID NO: 587327 - DNA, 97 bp, Homo sapiens
ccacaataaaagagacctctacttagctcagcaattcttaccttactgtgccctgtccacggtgcctcctgcatgtcctgctgccctgagctgtccc

SEQ ID NO: 587328 - DNA, 83 bp, Homo sapiens
gccgcccagacgctgcccgcgggcccggccacggcggagccaaggcctccggtgtggctgtctctgatggtgtcatcaaggtg

SEQ ID NO: 587329 - DNA, 90 bp, Homo sapiens
atagccagagaacagccctccatcttgcagcccagaaggattactacagcatcccatttcccacacccactactccgctgactgggaggg

SEQ ID NO: 587330 - DNA, 100 bp, Homo sapiens
agcgcctcgtcgacatgagtgatgtggaggaaaacaacttcgagggcagaggaactcaatggcaacaacatcactcggatccataagaatgactttgcgg

SEQ ID NO: 587331 - DNA, 83 bp, Homo sapiens
aagtcccaggtgaactcgtggcgagagaaggaaaatgcgcgtcccgggcgcggaccattgccctcttgaacatttaccgtaac

SEQ ID NO: 587332 - DNA, 80 bp, Homo sapiens
aaagatgatgatatccttctcaaccttgtgggatgtgaaaactctgttactgaagcttatgtccctgatgccaaaaatgc

SEQ ID NO: 587333 - DNA, 90 bp, Homo sapiens
gttggagaactatagcaacttggtatcactaggtcatcatcatctgcttggtggttctggatgccctcctggtgcttgctgagctcatcc

SEQ ID NO: 587334 - DNA, 100 bp, Homo sapiens
tcagggtggagaagaatctgcttgtctatgggaaaatcagaggctccttaaaaatatgttcaaaatcggtgatttttgaaccagattcaatatcccagcc

SEQ ID NO: 587335 - DNA, 100 bp, Homo sapiens
ctgggtgatgacatgggacttggaaaaacagtacagggcgtgttggagagtttcctgggcactgctgtctctggagccatcttttgcctttttgctggtc

SEQ ID NO: 587336 - DNA, 96 bp, Homo sapiens
ctcacctcctggggggagctgatgaagtccaagtactcagacatcaccatcatgtttgagtcttgctctgttgcccaggctggagtgcagtggtgc

SEQ ID NO: 587337 - DNA, 100 bp, Homo sapiens
gtgggggccacgccgcacctgcgcaacctcgccgtggccatgtgcagccgctactttaagctatgaagaaggacatccctcacactctgaaacagatctc

SEQ ID NO: 587338 - DNA, 100 bp, Homo sapiens
gtaccctcctgggaaccgaataggtgtttccttcattgatgatggaagtaatgcaacagaggaagaacagtgattattgagcagagttggggaagtccca

SEQ ID NO: 587339 - DNA, 80 bp, Homo sapiens
tcatgtctgcgagccaggattcccgggtggcccagttgaaatccttcccttcctctaccttggaagtgcctaccatgcat

SEQ ID NO: 587340 - DNA, 83 bp, Homo sapiens
gcaggtgtctcttctcgccctggcggggaagcacaggaagtcctggagaacctgaaggaccgctggtaccaggcggacagccc

SEQ ID NO: 587341 - DNA, 50 bp, Homo sapiens
atgggaggggagccgggccaggactcaaagtctccactgcctcctgaaga

SEQ ID NO: 587342 - DNA, 100 bp, Homo sapiens
gccagagttgtgggccgccgtcggcagcaagaacagagagagaggtggacagatctgagagatactgagcactctcgagtggaccctgaggagctcttca

SEQ ID NO: 587343 - DNA, 100 bp, Homo sapiens
ctactggtggaaaatgatgggctcagacaagtgggagtctcgggtgactcaatatgaaagggacttcgagaggatttcaacagtggtccgaaaagaagtg

SEQ ID NO: 587344 - DNA, 100 bp, Homo sapiens
atggacagaataactgtcaagacaacagtgatgaggaaagctgtgaaagttctcaaggggccacgagggacatcggctcggcgctcacacgcatgtgcat

SEQ ID NO: 587345 - DNA, 83 bp, Homo sapiens
gaattacaagccccagttagatctcccatcactaggagttttgctcgagaaatccacattcatctcaatggaaggatcctgcc

SEQ ID NO: 587346 - DNA, 75 bp, Homo sapiens
aacgaatacggcgacgacatgtatgggccagaaaagttactgaatcaaatggatggatttgatactctgcataga

SEQ ID NO: 587347 - DNA, 74 bp, Homo sapiens
gactttgagccagtccagaccctgctgctgtcttcaaagaagggtcctgatgaagaagctgttgtggatcttgg

SEQ ID NO: 587348 - DNA, 98 bp, Homo sapiens
tcagcctggagatccaatgagaaaacctggacagaacttcatgtgtctgtggcagtcttgtaaaaatgtggctggtaaagaggataatacagacactg

SEQ ID NO: 587349 - DNA, 51 bp, Homo sapiens
cccgtcggcgctggggacccgcgagcactgtcaaagctcgaaaaacagcag

SEQ ID NO: 587350 - DNA, 100 bp, Homo sapiens
cccttgcatcttccagttacaaattcagtgccttctgcagtttccccagagctcctcaagaataacggaagggaggtacaaacccgtagtgctgatgaac

SEQ ID NO: 587351 - DNA, 88 bp, Homo sapiens
acagtgcggacatcagcagagtttctaatgaagaactcggatttatatggcgccaagttgcatccaagaattgatgcccggagagctg

SEQ ID NO: 587352 - DNA, 75 bp, Homo sapiens
cctcctcagtgttgacctatgcctctccgccactcatcaccaatgtcacgcttttggagctaacatccagttact

SEQ ID NO: 587353 - DNA, 90 bp, Homo sapiens
ggcctgctgaactgggtgctttatatagggtgtatgttcgaagggcttatattgcctatgaacttaacagcgtacaacaccgccagctta

SEQ ID NO: 587354 - DNA, 100 bp, Homo sapiens
gggacattggaccagggtcgggggtcgcggccgctccagcgagggatgtcagagacgcccatgctcccatcctccctcatgctgctgaacacagcccacg

SEQ ID NO: 587355 - DNA, 98 bp, Homo sapiens
ctgggttccaaggcggctggcggcggtagcgtctctgtttccttgtgggcgctcgcgcggccctgggacagtcattttgtttactcattcagccctgt

SEQ ID NO: 587356 - DNA, 100 bp, Homo sapiens
agatgtggaaacagagatgcaacaggtaaaataccatgaagattttgaaaaaacaaaggggagaggctttactcccgtcgtggacgatcctgtgacagag

SEQ ID NO: 587357 - DNA, 82 bp, Homo sapiens
cacggccgtcagggtggtcattgcaatattaagacgagaagaacggggcccagacccggcctgctggtgccccaccccgaag

SEQ ID NO: 587358 - DNA, 109 bp, Homo sapiens
caggacacactatggtgcttcagccaagtgaaaggcactatcgagattggaaccacagaagggtgtcaaattgagaaccaggtagatccccaccacctacagtaaaaag

SEQ ID NO: 587359 - DNA, 100 bp, Homo sapiens
cttgaaattaccaactgctttcctttccctcagcacacagaggatgatgctgactttgatgaagaggaagaagcccctccagatggtgctgttgccgaat

SEQ ID NO: 587360 - DNA, 82 bp, Homo sapiens
gatgaatcctgcggcagaagccgagttcaacatcctcctggccaccgactcctacaaggcggcggcggcggcgcccgggagc

SEQ ID NO: 587361 - DNA, 94 bp, Homo sapiens
gggggctgtgccgggcggagagaactcagcgaggattctgagctcattcagaccaataagctgaagcactaccccagcatccacggagacttca

SEQ ID NO: 587362 - DNA, 100 bp, Homo sapiens
tatattcctcaactggccaaattcagtcccgatttgtggggtgtgtctgtttgtacagtagatggacagaggtttccaatacttatctacaggaatcgcc

SEQ ID NO: 587363 - DNA, 97 bp, Homo sapiens
gaaaatggagcacgtccaggctgaccacgagcttttcctccaggcctttgagaataacgaaggaggcccaacttcattcaataaggagcctgacgga

SEQ ID NO: 587364 - DNA, 96 bp, Homo sapiens
gtggcttgtggtgcggcctcaccatacaggaacagggcagacgttagcgtgagtgatcactctcaatcccggggccgccttcaacaacaacgtgag

SEQ ID NO: 587365 - DNA, 90 bp, Homo sapiens
tgcggcctcaccatacaggaacagggcagacgttagcgtgagtgatcactctcaatcccgggtctcggtccagctcgacttccagctcag

SEQ ID NO: 587366 - DNA, 100 bp, Homo sapiens
tgttcgtcgggctgcagcagtggcgggcgcaggagcccggccccggagccaccgctgaactgtcccaagcaataaacagtggtacattgttatcaaaacc

SEQ ID NO: 587367 - DNA, 87 bp, Homo sapiens
aggtgatggtggatataatggatttggaggtgatggtggcaattttggaggtagccccggttatggaggaggaagaggaggatatgg

SEQ ID NO: 587368 - DNA, 74 bp, Homo sapiens
ggaaataatgcaaagagagctggaccattcatccttggggcataaggaaatggtggcaggcacttcctcctaac

SEQ ID NO: 587369 - DNA, 75 bp, Homo sapiens
caccaggccgggaagcccatcggaatgataacactttgtgtccaggattgagaaatgccaaagttgaagatttaa

SEQ ID NO: 587370 - DNA, 75 bp, Homo sapiens
gcagtatcatgctggccaagaagatcatcattaaggacggaggcacgctgagatctgtatctgtggacctgaatg

SEQ ID NO: 587371 - DNA, 82 bp, Homo sapiens
gacggcttcgccatcgccagcttcagcaccctggaggccctggaggactgcctccgggcctgccaggagcagatcgaagccc

SEQ ID NO: 587372 - DNA, 124 bp, Homo sapiens
cagcgtccctgtgacctggccgatgaggaagtactgagcctgttggaggaactggcccggaaacaggaggacggaaagcaggcaggatgggagagtcgccgatagaaccacctcttccctgcct

SEQ ID NO: 587373 - DNA, 90 bp, Homo sapiens
gatttcatgtgcgatgatgaggaggactacgacctgctggtgtcatagatgaagattatagaggaaatgttggtgttgtactgtttaatt

SEQ ID NO: 587374 - DNA, 100 bp, Homo sapiens
ctaactcggactctctgcagtcactgaagcggaagaagtccctatagaaccatacaacatcccactgtcccaggccgaagtcatacaggaagggagtgat

SEQ ID NO: 587375 - DNA, 101 bp, Homo sapiens
ttcttctcaagtatacagaatataatgaacctcatgaaagcagaaccaactcggatattgttgagactttgaataatgagatgagtacagatgaagacaat

SEQ ID NO: 587376 - DNA, 100 bp, Homo sapiens
cccctcaggctggaacttgccctgtctcctcgcagatgagggggtcctgatgacaacttaattgaaggtggaggaacaaaatttgtctgcaaacctggag

SEQ ID NO: 587377 - DNA, 75 bp, Homo sapiens
cacccgctccgagcagtgctacagagacgtgtctgatctaaagaaaatcatttgactcctggggacacagatttg

SEQ ID NO: 587378 - DNA, 74 bp, Homo sapiens
caggaagggaacgtggaaagcgcatacaggaccctaaacagtctcaggccctaattgaagagctgttgctatac

SEQ ID NO: 587379 - DNA, 82 bp, Homo sapiens
caagactggagtccctgatggaattatgcagtttattaaggtgaaatgacaatggatgctctgttggctcgattgaaacttc

SEQ ID NO: 587380 - DNA, 100 bp, Homo sapiens
tgatctgtacatagattttggtggaaagtttcattgtgtatgtagaagaccagaagtggatggagagtctctagcatcaattcacgctttgccaaagtac

SEQ ID NO: 587381 - DNA, 75 bp, Homo sapiens
ctctccgcaccgcggcttaaatgatgtattttgtgatcgcagcgatgaaagaaaatgcttggacagaagagatga

SEQ ID NO: 587382 - DNA, 100 bp, Homo sapiens
gaccgaaggataaagacaaaatgaaggcctgctaccgtcgttccatgtgtcggattgtttgtgctgaacgaactgtcctcttgcttcagaagcccctttt

SEQ ID NO: 587383 - DNA, 75 bp, Homo sapiens
cagaagccgagttcaacatcctcctggccaccgactcctacaaggtttaactgacgctgctgcactggatacccc

SEQ ID NO: 587384 - DNA, 101 bp, Homo sapiens
gccgtcgccaccgccaccgccaccgccactaccaccgtctgagtctgcagtcccgaggtgtcccgcatgagatgtctgcagaatgagacttacagtgcgct

SEQ ID NO: 587385 - DNA, 100 bp, Homo sapiens
ctcaggcgtgcgcggacggtgtgcggccaatggagatcttcgtggatgatgagacgaagttgacgctgcatgggttgcagcagtactacgtgaaactgaa

SEQ ID NO: 587386 - DNA, 73 bp, Homo sapiens
cacgccccagccctctgaaggtgctgctccagctccccagaggcccatctcaacacagagaaccgctgcggct

SEQ ID NO: 587387 - DNA, 82 bp, Homo sapiens
tttaagaaattttatcttttgaaacacgttctgattaaccaaggataccccatgtttccccatcactcgaggagtctgggca

SEQ ID NO: 587388 - DNA, 75 bp, Homo sapiens
tgcgagtctgcggcccgcaggtgacggagctcacggtggggcccatgtgaccatcaacgcacgggccgaggagga

SEQ ID NO: 587389 - DNA, 75 bp, Homo sapiens
ccttctttttggaggccacaaagatagtaccatcctcgaggactgtccacgagggcctgaggaatcaggagctga

SEQ ID NO: 587390 - DNA, 75 bp, Homo sapiens
cttctgagacggcggcagcagcggcattcagccacttccggctcctgcgtcgctccggaagcctgcgagttccgg

SEQ ID NO: 587391 - DNA, 100 bp, Homo sapiens
ggagaagaggaaacacaagaagaaacgcctggtgcagagccccaattcctacttcatggatgtgaaatgcccagattcgggcaagtccaccactactggc

SEQ ID NO: 587392 - DNA, 75 bp, Homo sapiens
gttaaggaccgttacgtttcccgggagccccatggcacctgcccagccccacctcagcccatcttgacaaaatct

SEQ ID NO: 587393 - DNA, 75 bp, Homo sapiens
cagtatttctacctatggctttcgaggtgaggagtctagtaaaagccctaaaacgatgaagaaatttcttcataa

SEQ ID NO: 587394 - DNA, 115 bp, Homo sapiens
gtgcaagcgaaattaagggaaaatggatgtagaaaatgagcagatactgaatgtaaaccctgcaggtgaccaagtcagccatcggggtgctctaactgggggttattatgacaca

SEQ ID NO: 587395 - DNA, 75 bp, Homo sapiens
gcctggtccagttccgagacgttctgacaacaaaggagattgtgacatattgctgggcctaacactaaggtgatg

SEQ ID NO: 587396 - DNA, 75 bp, Homo sapiens
gccagagcgtggagcgctgcgcggcgcggcggccgggccctcgagacggggacgatgatatcatcaagttgaatc

SEQ ID NO: 587397 - DNA, 100 bp, Homo sapiens
ggatccatgtcacttgacgagcaacagggaatacaaacagaagcttgcacgagtaacccaggtccgcaaggaactgaaatcccatattcagagcttgcca

SEQ ID NO: 587398 - DNA, 98 bp, Homo sapiens
aaccgcctgcgaaacccaagccgccgcgtaggagcgtgcgttcgggccctcttctcccacctgttcggtgtctcccagtctgctaaagccctaaggcc

SEQ ID NO: 587399 - DNA, 74 bp, Homo sapiens
aagatgtcgaactcagcaaaatggctcctccagaggtgaagaaggtgaatacagtgaagaggaaaactccaaag

SEQ ID NO: 587400 - DNA, 83 bp, Homo sapiens
gccagaggacgcgggctctgaggatgagctggaggagggggtgaccagcgccatgtccagccaggtggtgggcattgagcctc

SEQ ID NO: 587401 - DNA, 135 bp, Homo sapiens
gggtaggctcctccctgcgacagaccttcagcttcctctcgggcatgaccggaaaggccaagtgtctgaatcaatggaattatgtgctgctgtagaagttatggaacaaggagtaccagaaaaggaagagacacc

SEQ ID NO: 587402 - DNA, 101 bp, Homo sapiens
cagccgcccgttgccagttctgcgcgtgagaacatttcaggataggaataggccaagtgctgagaagatgagtcttaggattgatgtggatacaaactttc

SEQ ID NO: 587403 - DNA, 130 bp, Homo sapiens
acttcgcattttggcattgacatttaattttagggtcctttatatagaagggagagtagctctggccaggctgccgcacctctacaggaactttgccgcggagcagtatgccagtgtgttcgccatctcc

SEQ ID NO: 587404 - DNA, 88 bp, Homo sapiens
caaagcaaaggcatgcctcttttggacaaagtaagaccgcctgggttactaggtgtctttcagaagctgattgcatccaaagcaaatg

SEQ ID NO: 587405 - DNA, 98 bp, Homo sapiens
gaacagctatgcatgctgcttttgatgtctgacaacgtggatcgttgttttgaaaccggaatggccaaagactatgacgggtcttcctagcacatcag

SEQ ID NO: 587406 - DNA, 98 bp, Homo sapiens
ctgctcctgggtgccgtggcatgtcgatttgtccttcactacagttctttaaggaaaaacagtagtgctctgcatagtttactgaaacgagtggtcag

SEQ ID NO: 587407 - DNA, 75 bp, Homo sapiens
acagaccaacctgtcagtgctgcaagtcttggcagcacctgtctcctttcaccccagggcctgagcctggccagc

SEQ ID NO: 587408 - DNA, 100 bp, Homo sapiens
cgggcttcccgagctgacgtggcttgaattgggaggggggcagctggagcctcaggcggcagcgcttctaggtaagaatgattgatgttggctgatattg

SEQ ID NO: 587409 - DNA, 100 bp, Homo sapiens
gattattgattacaacatgcccctcacctccacctacctgaagcagatgaagcttcgagtgatgaattcccaggagcagtagtttatgccaacgtgactt

SEQ ID NO: 587410 - DNA, 75 bp, Homo sapiens
ccagtttctcacctctagttggagagactttgcaaatgctaactacaagatgaagacttccggggcaggcgtcag

SEQ ID NO: 587411 - DNA, 100 bp, Homo sapiens
ctaactaacctggagagcctcgagaagggacaaatgtaacacgattatcaggaagtgatgccttcaattaagttgcagagttctgatggagagatatttg

SEQ ID NO: 587412 - DNA, 96 bp, Homo sapiens
aaggcgtctcatggcgttggaataccggctctcagcggctgtgccatggatgtagctttgggatcaggtgccactggggtctttaccaattcatcc

SEQ ID NO: 587413 - DNA, 75 bp, Homo sapiens
aagcagttcaaccgcatgaagcagctggctaaccagaccgtgggcaggcttgcagtaaggttgggctgctggcac

SEQ ID NO: 587414 - DNA, 96 bp, Homo sapiens
cactcggacttcaaaactgttccagggccagtatcggagtttgaaagaatcttcaagagggagacatagggaaaaggaagacataaaaatcactaa

SEQ ID NO: 587415 - DNA, 82 bp, Homo sapiens
cgagcccttcaccctggtggagcgagacgatccaggatgagaagactgataaaagaagaagctagctgaacagctgtaaaat

SEQ ID NO: 587416 - DNA, 89 bp, Homo sapiens
ccaaccgcctcctcctcctcagtaacgcggatgtaggtgcaaaaaactacagacatctctgtgctgtttattacaacaagaatcctggg

SEQ ID NO: 587417 - DNA, 100 bp, Homo sapiens
cgcacgcacaatatcgggcagaaagataatcacgacaagcagaatgatgtggagatcccatctcctacccagaaagacagggagaaaaagaaaaagcagc

SEQ ID NO: 587418 - DNA, 74 bp, Homo sapiens
caacccaaggtgatgcttttgctacgacctcattttctgctggaactggatttgtacacacagatatgacgaaa

SEQ ID NO: 587419 - DNA, 73 bp, Homo sapiens
gatgttcaagattaagattagagtcaagttgtgtgattaagacagaaaccactcaagaaggttattattgaag

SEQ ID NO: 587420 - DNA, 82 bp, Homo sapiens
gttaaggaacaggaggaaaccattcagagggcagcaaggcgaaccccatccctactcactggagctcagctttgatttttaa

SEQ ID NO: 587421 - DNA, 74 bp, Homo sapiens
gaggtgtcggcgcgggagcagcacttccacagccaagtgcgggagtccacgggggagaagcgagcggacatcca

SEQ ID NO: 587422 - DNA, 90 bp, Homo sapiens
acttgagcaggggtccccaacccctgagccatggagccgcaaggagccacacagcaggaggtgatcccaaaacgaaccaacagaccaggc

SEQ ID NO: 587423 - DNA, 83 bp, Homo sapiens
ttcccaatcccactgatgaggatcagcccatgattctgcccccgtggagactcccagagggaagcccccactcaacacccgct

SEQ ID NO: 587424 - DNA, 100 bp, Homo sapiens
gatggaccgcatcgagaaggagcgcaagcaccagaagtcatccgtccttggctcaggatttggagagcttgcaccaccaaaaatggcaaacatcaccagc

SEQ ID NO: 587425 - DNA, 100 bp, Homo sapiens
gcggctcctcgtgctggggctctggctggcgttgctgcgctccgtggccggggagcaagcgccagaatttatagagcggcagcacgcaaagaacaggtat

SEQ ID NO: 587426 - DNA, 100 bp, Homo sapiens
aggagatcactgccctggcacccagcacaatgaagatcaagactgagaacaacgatcatattaatttgaaggtggcggggcaggatggttctgtggtgca

SEQ ID NO: 587427 - DNA, 82 bp, Homo sapiens
ccgccgccagccccggaaggccgagagggggatatgagactttctactcggaatatcctgagtgttgcgtggatgtaaaacc

SEQ ID NO: 587428 - DNA, 82 bp, Homo sapiens
gctcacctgcgctgtgatgcctgcagagctgtggcttaccaggttagaaaatggatttctgactggaatctcaccactgaaa

SEQ ID NO: 587429 - DNA, 150 bp, Homo sapiens
catgaagagctttttctcagaactgcctgaccccctggtcccgtataacatgcagatcgacttggtggaagcacacatgccgtattcacctggaccaacctgctggtggtggtggtggagctggatgggctagagcaggatgccctggac

SEQ ID NO: 587430 - DNA, 100 bp, Homo sapiens
tgaaccctgctcttggcatcgactgtttgcacaaggggacaaatgatttggagcaagaggtggtggtggccttcccccgaagaaatttggtaatcctggg

SEQ ID NO: 587431 - DNA, 106 bp, Homo sapiens
tggagcccccgcgcgcccggccggcccggagcaccgagctcgcggcacggtaggagacaatgcagatcttcgtgaagactctgactggtaagaccatcaccctcga

SEQ ID NO: 587432 - DNA, 83 bp, Homo sapiens
gcccgtgccgcgagcgcggcctgcaggagccatccacgaaaatgctttcattgtgttcattgcctcatccctcgggcacatgc

SEQ ID NO: 587433 - DNA, 75 bp, Homo sapiens
accactatggagggaaagaatactgggatgatgaatctcctccgaaacaacagctgcctctccaaaatgaagaat

SEQ ID NO: 587434 - DNA, 100 bp, Homo sapiens
tcctgctgctgctgccctggttccccggccccacccgatgcggcctccaaggttatgatgtgattgctcaagcccaatctgggactgggaaaacggccac

SEQ ID NO: 587435 - DNA, 100 bp, Homo sapiens
agactttcttctgcaaagaaaaaaatttctcatattgctgaacaaagccccagtgcagcttcattttaggatcttagattacacacttactggatgttat

SEQ ID NO: 587436 - DNA, 83 bp, Homo sapiens
ccagggaaccctggtcaccgtctcctcagtcacgccgatgatggagctgaagcccaacgcaggtagcgaccgtgcctgggtct

SEQ ID NO: 587437 - DNA, 89 bp, Homo sapiens
tcgtgaagctgttctgaaaaagcctgaagttccaccagctaaagtgtggagatgtactttcctcagaatgactcttggattggtttggc

SEQ ID NO: 587438 - DNA, 100 bp, Homo sapiens
cccaactcagccttcctgcataccctggaccagcagaaacctagagtggaaaactgcccagcttgtagccagcttcctcaaaatattcagttttctccat

SEQ ID NO: 587439 - DNA, 51 bp, Homo sapiens
aagtcaatacagcattgaggaatttaagggcaaggggacgcgagataaggt

SEQ ID NO: 587440 - DNA, 96 bp, Homo sapiens
ggagtcttgccgatgtggtggacacactgaaacagaagaagcttgaggaaatgactcggactgaacaagagggtggagccgccaccaaaatgcaga

SEQ ID NO: 587441 - DNA, 98 bp, Homo sapiens
tagtaattatttgttaaccgggggacaggataaactgttacgcatatatgacttgaacaaacctgaagcagaaccttctaagtctcagacacgtaaac

SEQ ID NO: 587442 - DNA, 74 bp, Homo sapiens
ttggttatggccaaggaccgcttacaacttctaggtctagatgttgatggaatatatcgagttagtggcaatct

SEQ ID NO: 587443 - DNA, 100 bp, Homo sapiens
tatttttggaccaacagaagaacctcagaacatacccaagaggacaaatcccccaggttctgcgttagacctgcatcttagcaatgtgaatattgcatcc

SEQ ID NO: 587444 - DNA, 83 bp, Homo sapiens
tatcagcactaaacatcgtgggggatctcttacggaaagtaggggctccatctactctttgaagcttctgcccagcttgcatt

SEQ ID NO: 587445 - DNA, 75 bp, Homo sapiens
ctcagaaagcaacgttttgagccacaactgtcacaactccagcttttccttccctccatgagaaagaagccagct

SEQ ID NO: 587446 - DNA, 82 bp, Homo sapiens
gccgccgccgccgctgccgctgccgctgccgcacctccgtagctgactcgatctctgttgaggagctggcgcggaatctggt

SEQ ID NO: 587447 - DNA, 98 bp, Homo sapiens
ccggtcgggcggggcggcggcgctgacaggtgtttcggcatggagaccgaagtcccattgacacctttcccactgaccccataaaggaatcctcatgg

SEQ ID NO: 587448 - DNA, 82 bp, Homo sapiens
ccccactgcggtccacggccaggtgaacaatggtgagaagccctaccactgcaactgggacggctgcggctggaagtttgcg

SEQ ID NO: 587449 - DNA, 83 bp, Homo sapiens
ttggagggcgcggggactgcaaccctaatcagatagcaaagccattgtggatgggaacctgaagctcatcttgggtctggtgt

SEQ ID NO: 587450 - DNA, 50 bp, Homo sapiens
gcacgatgagctcaatcggcactgggcatttgacattgtgcagcaaagaa

SEQ ID NO: 587451 - DNA, 100 bp, Homo sapiens
aacctgaaattagggacattaaatggatctcaggaagaaatgtggaacggttaccagaagttctcccaggagctgctgtccaatggggagctgaaccacc

SEQ ID NO: 587452 - DNA, 90 bp, Homo sapiens
aggtcgccaagaaggagagaacaatgtcttctttacccgtttactggactcatgcgggtggtagacacgcatgtgtgtgggagtcacgtt

SEQ ID NO: 587453 - DNA, 100 bp, Homo sapiens
tgtcagccctgattgagcccaagaaaaccccctgcatacacagattgtcactgctgttccaagggcacacgcagagggatttggaattcctggagagttg

SEQ ID NO: 587454 - DNA, 80 bp, Homo sapiens
gcggcccgcgcctgtcgggctgaactgagtggaagcatcagttcacagcagtaatgcacactgtacagataagacaattg

SEQ ID NO: 587455 - DNA, 101 bp, Homo sapiens
cgccgcctccgccgctgcctcaggagcggaacaacgtcggcgagcggggtctggtcttctctcgtctgagccctgagtactacgacctggcaagagcccac

SEQ ID NO: 587456 - DNA, 100 bp, Homo sapiens
caagtgactgctcaggaaattttccaagacaaatgttgctatcggagctccacaagaagatgacttgcaaggtgctatttatatttacaatggccgtgca

SEQ ID NO: 587457 - DNA, 82 bp, Homo sapiens
cctctgcccccccttccccacgcaaccccagatccatttacactttacagccagacttctgggagttcccgggcagacggcg

SEQ ID NO: 587458 - DNA, 100 bp, Homo sapiens
ccacgttctccaatgcaatgctgtttgccctgaacatcatgaattcccaagaaggagtgccgcagaatggaattcggcattgttcctacacagcttctcg

SEQ ID NO: 587459 - DNA, 100 bp, Homo sapiens
cagcatcgacatggtttccgaagtcaacatggctcattggtgggcagtattacttatgggaattgctctgatcatgctaatggctggatttattaagata

SEQ ID NO: 587460 - DNA, 49 bp, Homo sapiens
cttgtcaggctagtctttggatgggaagtgattgccttcatgttgtgga

SEQ ID NO: 587461 - DNA, 75 bp, Homo sapiens
ccagaacttgcagcaacaataggcagtggagctactgctgtggttcaggcagccctatgcaaacccaggcaagaa

SEQ ID NO: 587462 - DNA, 100 bp, Homo sapiens
tgagcggccggcggcgcgggcccggcggcggcggcagcggggtccgggtccggagcgccacatgccggtggtggtgtgcacattgagccccggtatagac

SEQ ID NO: 587463 - DNA, 101 bp, Homo sapiens
gcatttattcattgttctttgcttggagagcaaatttagatatttcaaaaccacttttcatgggtgtggctttaaatgaagaaattgttaatagaaagaag

SEQ ID NO: 587464 - DNA, 74 bp, Homo sapiens
tcagtattatcctaagcttagagtggacatcaggttccatcttagcccacatccagaagcaaaagcacttcaat

SEQ ID NO: 587465 - DNA, 50 bp, Homo sapiens
ggcgtgatcacggccagcgaggacagtgcctggctctctggctatgaaaa

SEQ ID NO: 587466 - DNA, 75 bp, Homo sapiens
ccagttacggcaggaggccgagcaacttaagaaccagattcgaagacctcacctctgaggaccagatcgtactgc

SEQ ID NO: 587467 - DNA, 75 bp, Homo sapiens
gccctgggtcctcgctgtggggcaatccgggcttgcagacgagatcacaacaactttccccaaggatccagttta

SEQ ID NO: 587468 - DNA, 100 bp, Homo sapiens
tgcaactggctcagtattcacagggaaagctgtgagggtacaatgtgtggcaactctgcaggtggggtctatgcaagctacagacccctctgagtgtggt

SEQ ID NO: 587469 - DNA, 75 bp, Homo sapiens
ctttgccacccttgtcagcacctacgccaaaggagccggtgaaacctgaagaaggcagagatatggcaaacagga

SEQ ID NO: 587470 - DNA, 100 bp, Homo sapiens
ctcccctggcccgagcaagcagcttggaagacctagtgttgaaggaatttatgctttctcaagatgttgaacatgagcgtctctttgacctcattcagaa

SEQ ID NO: 587471 - DNA, 75 bp, Homo sapiens
gtccagcaagtcctcatagccaggagggtgtaaatccatctgttggaagatcaacaattggaacgagttttggaa

SEQ ID NO: 587472 - DNA, 100 bp, Homo sapiens
atttcgctttgatgaatcaggtcccgaaagtgctaaaaaggttggattcagatgccgaggacacagtacttcctcagaaagaagacagaatttgcaaaag

SEQ ID NO: 587473 - DNA, 112 bp, Homo sapiens
ccccatgaaaacctctcaccccgtcgttgcctccacttggcccgtccatagagccaggcctatgagagctacaagaagaaggactacacccaggtggactacttaatcaacg

SEQ ID NO: 587474 - DNA, 76 bp, Homo sapiens
gtggtgtgctcgagcaaccagaaccggagcatggaggcgcacaacatcctcagggcgaccattgacgaggtggaga

SEQ ID NO: 587475 - DNA, 50 bp, Homo sapiens
tcgtagcctgccactccgtgcaggactaccccaatggcacctggctgggc

SEQ ID NO: 587476 - DNA, 100 bp, Homo sapiens
gaatctgcccacccctcctgtaacccagcctgtttcacttcttgaagtaaccaagatccttctgtttgctgcacaagcatctcatcacctagtaccccca

SEQ ID NO: 587477 - DNA, 75 bp, Homo sapiens
tctggagtgcgtgggggaccggctgttggcgggcttgggcactgtttaaaggaaagttccgagaaggcatcgaca

SEQ ID NO: 587478 - DNA, 82 bp, Homo sapiens
gccaatgtgggatcgatgtttcaatattggaagcgctttgatttacagcagctgcagaaaggaaggcagaggaagccacggc

SEQ ID NO: 587479 - DNA, 75 bp, Homo sapiens
gtttgggcgaccaggaggtgccggtggccgcgctcggacccgttgccaccttccagagaagaggtacgagatgac

SEQ ID NO: 587480 - DNA, 100 bp, Homo sapiens
cgagatgctgggcctcgaggagggggaccttgaagacgacttcgaccctgcccagcacgaccagctcatgcagctttctgtatgagcccaatagccaagg

SEQ ID NO: 587481 - DNA, 78 bp, Homo sapiens
agcacgtggtgggctatggccaccttggttgattcttcaccacactgaaaccattaggaaaaatccttgtggttaaca

SEQ ID NO: 587482 - DNA, 74 bp, Homo sapiens
gagctttccaggatagctttgaggataagctgcggatgagcggatctcactttgtcactcaggttggagtgcag

SEQ ID NO: 587483 - DNA, 75 bp, Homo sapiens
cgacaggccgctgacggccggaaggaaaatgggaactgctcgcagaaagaagaaggtggttcatagaacagccac

SEQ ID NO: 587484 - DNA, 75 bp, Homo sapiens
gctgcgtgccaggccttggagaacagcacgtccccgctgagtggttccatcataatgaatggatccaatatggca

SEQ ID NO: 587485 - DNA, 80 bp, Homo sapiens
cgctgcgctcgcgcccggatccctcaggatctcgaggacctggaagaagcagaggagccagacatggaggaagacgatga

SEQ ID NO: 587486 - DNA, 100 bp, Homo sapiens
agatggataggtcctcagcccaggtggtggccgaaatgttattttaacgagggaaatccctaagtcagccaacccctcctcccatgccaatcctttcaca

SEQ ID NO: 587487 - DNA, 97 bp, Homo sapiens
ttcaggcagccatgactcttctaagtgatgcttctcatctgcctaaggctgattctacaaatcaacaatccgtgggtaaaatggaaaaaggcacagt

SEQ ID NO: 587488 - DNA, 98 bp, Homo sapiens
gggccagggccgcactccggagactcgcggttgctacgcgcaccatggctggaggtctcggcgcggaagatggccggcggcgtggacggccccatcgg

SEQ ID NO: 587489 - DNA, 75 bp, Homo sapiens
cggcgtgtgcgcgcccgccagctgctccggagatacgggtccacctaaagtgggaagtctgttttcaaaatgaca

SEQ ID NO: 587490 - DNA, 75 bp, Homo sapiens
tcgggacggaggacgcgctagtatggggacccagagcctgctcttgggaacagccagagtaagattggaacccag

SEQ ID NO: 587491 - DNA, 116 bp, Homo sapiens
cgccgggcgccgcggccgccaggagcggctccgcgccgcagtccccaggtgatcgtgttgccatcgagcctggtgctccccgagaaaatgatgaattctgcaagatgggccgatac

SEQ ID NO: 587492 - DNA, 100 bp, Homo sapiens
aaggacattgccaactacaacaaggaggatgacattgtcaatcatgcgaggctgtgacaacatgtgtagctactgcattgttcctttcacccggggcagg

SEQ ID NO: 587493 - DNA, 100 bp, Homo sapiens
ggggaaagtaattttgtttgccgaagtgacccccacaacgatgcgtctcctggatgggaagtgctctctggcgtggtggtcatatcgagtaaggattcag

SEQ ID NO: 587494 - DNA, 75 bp, Homo sapiens
aggtttatttgtacaaatagcacaggaggaccttgcagatgcttcgggagaacctggaggaggaggccatcatca

SEQ ID NO: 587495 - DNA, 83 bp, Homo sapiens
aagatacgaatctcttaagggggcttgaagtagaaaatgccatgatgagaaaaactattaaaaaacaggatgaccaaattgag

SEQ ID NO: 587496 - DNA, 83 bp, Homo sapiens
gcttcgaaagcatcatccacgagttcgacccgtgggtgtcttttatgaataatcaaaagcagcaaaagccaacgctatcaggc

SEQ ID NO: 587497 - DNA, 100 bp, Homo sapiens
cagctgcgctgtcctaaatgtggcgacttgtgcacacatgtagagacctttgtatgttaatgttcgtgaagaaattgaagagttttttccaagaatgtgg

SEQ ID NO: 587498 - DNA, 98 bp, Homo sapiens
tgggccgaggcctgggttacaagcagcaagtgcgcggttggggccactgcgaggccgttttagaagctgcacacatacatgtaagagaagcaaaaatg

SEQ ID NO: 587499 - DNA, 100 bp, Homo sapiens
gccttttctggcggcggtagatttgaagcgcttcaaaggaccggacccagagaagaggaaaactctaccggtgcagatattaacctggctgcagagccaa

SEQ ID NO: 587500 - DNA, 82 bp, Homo sapiens
tccgcaccgcggcttaaatgatgtattttgtgatcgcagcgatgaaaggtcaaaatgcagatcttcgtgaaaacccttaccg

SEQ ID NO: 587501 - DNA, 100 bp, Homo sapiens
ggtcgacagtgactaccatgacgaaaacatgtactacagccagtcttctatgtttccacatcggtcagaaaaagatatttctctatgaatcatcatcaag

SEQ ID NO: 587502 - DNA, 83 bp, Homo sapiens
tgcctatgtattccctggggatggcgcatcacacaccaaaggtttacccaaggtccagcctagcccctaggcaccatgtcgga

SEQ ID NO: 587503 - DNA, 100 bp, Homo sapiens
ccagcggttccgagcatttccctccatggagcagagtgctcttaaggaatactagagatctggtagttcgtctcccaaggctgctaactggaagtctgga

SEQ ID NO: 587504 - DNA, 100 bp, Homo sapiens
ctgctaaatagcaaagaccaggaagtgctgcttcaaacgggcagggctctaggaaacatatgttacgatagccgatggtgccatgacaatggtgtgaact

SEQ ID NO: 587505 - DNA, 75 bp, Homo sapiens
gaacgaggcaaggagctaaagcagcgtgcgttcagccctggggttagagcagccagcgggtacagaatggatttt

SEQ ID NO: 587506 - DNA, 100 bp, Homo sapiens
ctgaaactcagtgagagcccagagcctggcaggagtccagaaagccagatggctgaacatcagaaatgcactcggtgatggaaagagagccactattctg

SEQ ID NO: 587507 - DNA, 100 bp, Homo sapiens
caatgtttccctgaatttctctctttgggaggaggaagggacaccgagggaccaaagggcgggcttcctgaggctgcggtggtcacgcttcgcccgtgtc

SEQ ID NO: 587508 - DNA, 75 bp, Homo sapiens
cctgcctcttcatgcagttctccatcgtgccacaccagaaatgtcagcagcccaggacacccagccccttggtct

SEQ ID NO: 587509 - DNA, 90 bp, Homo sapiens
aagaggaggagaggggttgttttataaactgcctggccgaatcagccttttcacgctcaagcttgtactcccagagtacctcatccacgc

SEQ ID NO: 587510 - DNA, 75 bp, Homo sapiens
cacaaaccagagaaccaggacattgactggggggctcttgaagaccttctgccagaaagggggcctgttgtgcac

SEQ ID NO: 587511 - DNA, 96 bp, Homo sapiens
caagaggatgagcagctgctcttacgatttaaatattattctttcttcgacttgaatcctaaagctcaccccgaggtggctgaggctggaattggg

SEQ ID NO: 587512 - DNA, 82 bp, Homo sapiens
agaggacccaggagaaattcgccctcaaagaattgcattttgtgaaaaaagaacaagaattttctgcaaggatcatatctaa

SEQ ID NO: 587513 - DNA, 100 bp, Homo sapiens
cttacccgagaacgtgcgggaagagaagatcatcgagcatttcaaacggaacatgcttgccaactcagccagcgtgaggatcctcatcaagggaggcaag

SEQ ID NO: 587514 - DNA, 83 bp, Homo sapiens
cgcaccgcggcttaaatgatgtattttgtgatcgcagcgatgaaaggaactgtggctgcaccatctgtcttcatcttcccgcc

SEQ ID NO: 587515 - DNA, 75 bp, Homo sapiens
tttcctgctggtggcaaccgcctacgagacactcaagataacgtggttagaaggccattcactggcacagacagt

SEQ ID NO: 587516 - DNA, 82 bp, Homo sapiens
ggcccctgaacctcccagagccctccgtgattgttggaatggggatatgagactttctactcggaatatcctgagtgttgcg

SEQ ID NO: 587517 - DNA, 75 bp, Homo sapiens
acagtgggggtgtgcaaacccgagagaactgggcatgatgggcccacctcctggtatgagacctcctatgggtcc

SEQ ID NO: 587518 - DNA, 115 bp, Homo sapiens
ggacatggaagatgaggaggaggaagagctgaccatggagatgtttgggaacagctccatcaagaccctgacgaccagtacaagctcacggaggacacccggcagctgggcctcg

SEQ ID NO: 587519 - DNA, 98 bp, Homo sapiens
tttactaacctcgtgagaaaagctttacgtctcattcaagaaaccgaagtgatttccagaggatttacactatgtgtatatctcatgattgatatgga

SEQ ID NO: 587520 - DNA, 75 bp, Homo sapiens
ttttcgtggttgtcttctccgacccaaaactttcagatctgtcaacttctccattgtggttggggtgctgttccc

SEQ ID NO: 587521 - DNA, 101 bp, Homo sapiens
gttggggtgtccgagttgccgccggagaggagtggcctcgcccgcttggaactttatattgctgttggaatatctggagccatccaacatttagctgggat

SEQ ID NO: 587522 - DNA, 100 bp, Homo sapiens
tgacggggggctggtgctgcgggacctcaagctgcggaaattcatctttaaggacgaagagagcaaaacccttgaagatcgtttgaaaattgaagcaaaa

SEQ ID NO: 587523 - DNA, 100 bp, Homo sapiens
caaaaagctaccacctgccagtctgaagcaccgagatgggcagcgtggacattctcaggctgactctccagggtgaactgacaggagatgaacttgaaca

SEQ ID NO: 587524 - DNA, 100 bp, Homo sapiens
accagccaccccctgagtatggggtaacgagattatggatgattggccagggtatgacttgaatttattcacgtacccacagcactattatggagacttg

SEQ ID NO: 587525 - DNA, 75 bp, Homo sapiens
gtttcctccatttgctaaaggaatagtgtttgaatacagattctgttcatcttgctctgaaattaaataattctg

SEQ ID NO: 587526 - DNA, 75 bp, Homo sapiens
cgcgtttcccgcctgagcgcaactagcggcgggtcgtgggcacctccaggtatcatgatattagctggtttgaca

SEQ ID NO: 587527 - DNA, 83 bp, Homo sapiens
gccatccagcaactggctgagggactcacagctgatgacctgctgctcgtgctgatctcagacctgcctagagctggaacgtt

SEQ ID NO: 587528 - DNA, 75 bp, Homo sapiens
gtcgtctatgggggctactcgaaacaggaatgggtaccacagaccatgtcatcgtcctggcgtccacgaaccgag

SEQ ID NO: 587529 - DNA, 75 bp, Homo sapiens
gttggctattatatctatgtaactttcctgggatacagtgatgctacaaaacttagagtttctcctaagaatcct

SEQ ID NO: 587530 - DNA, 72 bp, Homo sapiens
agggtgttcccgaactagagtgggtcatattgaacattccagatacctatcattactcgatgctgttgataa

SEQ ID NO: 587531 - DNA, 100 bp, Homo sapiens
tctgggaatgggtcgtggacagatcctgtgttcttctatgtccaggccaaaaccgtcatttcaccaagctgataatgttcggggaacccgccatcacggg

SEQ ID NO: 587532 - DNA, 75 bp, Homo sapiens
gctggacttcttgtcggatcaggcttcaaggttactgactttttatgatgtttggtggctatgagactatagaag

SEQ ID NO: 587533 - DNA, 88 bp, Homo sapiens
gacggcgtgctcaaggagggcttcctggtcaagagggcatcccgggcccaaatcctagacaaagccacagaatatatccagtatatgc

SEQ ID NO: 587534 - DNA, 83 bp, Homo sapiens
ctacagcctactggtgactcggctgcagtgtactaatggtcacttgatgtgcgctggctgttttatccacctactagcagatg

SEQ ID NO: 587535 - DNA, 75 bp, Homo sapiens
acgggatactgctcagcaaggtgttgtgaatttcccatatgatgatgattttattccttcaaatagtatattatc

SEQ ID NO: 587536 - DNA, 98 bp, Homo sapiens
cttctaactcattgtattcctcctgagataataatgaaggaactcattatacaatgacaaatggaggcagcattaacagttctacacatttactggat

SEQ ID NO: 587537 - DNA, 90 bp, Homo sapiens
cgaaggactctaccgtgtcagcgggaataaaactgaccaagacaatattcaaaagcagtttgatcaagagcctccattatggcatgctga

SEQ ID NO: 587538 - DNA, 100 bp, Homo sapiens
cttgtctgatgtggcatctagactttggtttacatacaggaaaaactttccagccattggcatccgtgtcattctggaccttactcccaactaccggggt

SEQ ID NO: 587539 - DNA, 75 bp, Homo sapiens
gagtccggacatctgaaacttggaccatgacttcttccagcatgtggaaatgcacctgcggtctgaacatccccc

SEQ ID NO: 587540 - DNA, 80 bp, Homo sapiens
agacaagccatcaaaactgccttcagaagcaaaagatgaaaatggaaaaggctgctaagtggaaaggaaaagctccattg

SEQ ID NO: 587541 - DNA, 90 bp, Homo sapiens
cggcgggaagatggcggagctgcgcgtgctcgtagctgtcaagagggtcatcgactacgccgtgaagatatcaacatggcaggagagccc

SEQ ID NO: 587542 - DNA, 76 bp, Homo sapiens
gtgcctggaaaggaattgttttggcctaggatcatccagatcctgaaggacacagccctgcagaaagtgaagcgtg

SEQ ID NO: 587543 - DNA, 51 bp, Homo sapiens
tcgcagtggtcgcttcttctccttggaatttggataaagagagggcagtgc

SEQ ID NO: 587544 - DNA, 100 bp, Homo sapiens
gtggctgctaagacacagcttggccggtgcttccaggaaaccattgggtcacagcactaagtcaggagattggaaaagcaaatgcttttacacaacagac

SEQ ID NO: 587545 - DNA, 82 bp, Homo sapiens
ttttacaggaaaactccagtgattttcaatcaaacattgcataggaattacatgaacgacagccttcgcaccgacgtcttcg

SEQ ID NO: 587546 - DNA, 50 bp, Homo sapiens
accaaatagcagtggaaaccggggcaagattcttgccaagagaattaatg

SEQ ID NO: 587547 - DNA, 98 bp, Homo sapiens
aggcgggacatctccagcaccctcatcgccctggccgacaagcacgcaaaacacagatatgtagaactcttcttgaattctacagcaggagcaagcgg

SEQ ID NO: 587548 - DNA, 51 bp, Homo sapiens
catcgctctcggcctccgacacgacttcacagagaatgcagttgtcttgac

SEQ ID NO: 587549 - DNA, 120 bp, Homo sapiens
tgtccctttgcctcatcccaggttgccttggaaaatgccaacgccgtgtctgaagactggtattgctcgagttccacttgctggagctgccgggggcccagggatcggcagggctgctgg

SEQ ID NO: 587550 - DNA, 100 bp, Homo sapiens
gctggggcttttgcggcaccgagggctcaggccaatcgagaacggctactttgtacactactttgcccccgagggcctaaccacaatgcccaagaatgtg

SEQ ID NO: 587551 - DNA, 100 bp, Homo sapiens
gagatgtatgactatcttctccatggccacaggttgaagcagcccgaagactgcctggatgaactagcccccctccatgcgcctgaaggcccgacccagc

SEQ ID NO: 587552 - DNA, 100 bp, Homo sapiens
cccacctgtcctcaggcatatcaaagactcggcggtggcgaggactgggctccctcttccggagggcgtgctgtgtggcgctcccactgcagctgcttct

SEQ ID NO: 587553 - DNA, 98 bp, Homo sapiens
gcccacgacgacaggggcatccgcttcctggacaatcggacaggtgccaagactggctagaggccctgcactggtacaacactgccctggagatgacg

SEQ ID NO: 587554 - DNA, 76 bp, Homo sapiens
tgctgaagaaaaaagtagggcttctcaaggaggatacattaattgtttggtcagaagcagagaactatgatttggc

SEQ ID NO: 587555 - DNA, 100 bp, Homo sapiens
ctcaacaagggccacaaagtgaccaagaacgtgagcaagcccaggcacagccgacgccgcgggacaaatttacatgtattggagaccagaccagaagccc

SEQ ID NO: 587556 - DNA, 96 bp, Homo sapiens
cccaaatatggttccatccctaaacttatacttttttgaagggaaggagctaagattgaagcaggaatactttgtggtggctgcaaccttgcaaga

SEQ ID NO: 587557 - DNA, 104 bp, Homo sapiens
aagccacttcttctgggcccacgaggcagctgtcccatgctctgctgagcacggtgcccaggtgccccccactctcgctccattcggcgggagcacccagtcct

SEQ ID NO: 587558 - DNA, 82 bp, Homo sapiens
gttttagctcagattcggaagtggttggacaaaacctgatgttgttgttaaacgacaagaagctttagcagctgctcgactg

SEQ ID NO: 587559 - DNA, 74 bp, Homo sapiens
ccgacggcttcacagtcctctccaccaagagcctcttccttggccagaagtggatcaatcttcctgtcctacaa

SEQ ID NO: 587560 - DNA, 100 bp, Homo sapiens
caccaagttggatgccatgctggaggagttcaagaaggtgtactaatggtcacttgatgtgcgctggctgttttatccacctactagcagatgcccggct

SEQ ID NO: 587561 - DNA, 93 bp, Homo sapiens
aggtgatccagcaaggtcggcagagcaaggggcttacgcagaaggacctggccacggtccagcaccatgtgctaggtcactcccagcgcgagg

SEQ ID NO: 587562 - DNA, 100 bp, Homo sapiens
cggctgcagagcctggggaagaacttcgccttgcgggtcctgcttgtccaggtggatgtgatgctggacctcagccacaatgagctgtcctttgtgcccc

SEQ ID NO: 587563 - DNA, 100 bp, Homo sapiens
aattctagggaatttgcagcagctgcaaggacccttcccagtagctgctgctggtggtgacaatgtcaaataacggcctagacattcaagacaaaccccc

SEQ ID NO: 587564 - DNA, 80 bp, Homo sapiens
tgctactggagaacatggatctatggagttatggctgcagcttcgattgccaatattgtaaaaagttctcttggtccagt

SEQ ID NO: 587565 - DNA, 90 bp, Homo sapiens
gaagggaacaacacccttgatgagtatgccaagatggaaggaagcctcatacagtgagattaataatccgtcggtattcctctgagaagc

SEQ ID NO: 587566 - DNA, 97 bp, Homo sapiens
tttgaaagccatcatgaaagggggaaccctgagctggagcagcaggccaggctcggagacctttccccccgcagcgtttatgtcatggttggtgcag

SEQ ID NO: 587567 - DNA, 100 bp, Homo sapiens
gaaaccgactcagtggtgattgctgggcagcctgaggtgctcagttcacaagagatgcagagagagcaggagattcggatgggtcagatggctatgggag

SEQ ID NO: 587568 - DNA, 74 bp, Homo sapiens
tggggttggacgctgccagtttgcacagcagcaggtgtgctgggcatcaaggtgaagatcatgctgccctggga

SEQ ID NO: 587569 - DNA, 80 bp, Homo sapiens
ccttggacctcagccccaacggcaagcaacttggaaaattctgtttgaagatttccggtcctggctttctgatatttcta

SEQ ID NO: 587570 - DNA, 100 bp, Homo sapiens
cattgtgtatgtagaagaccagaagtggatggagatactatactggcaattgctggagaagattttgcaattgttgcttctgatactcgattgagtgaag

SEQ ID NO: 587571 - DNA, 82 bp, Homo sapiens
ttacgcagaaggacctggccacggttaatttggagtggcccctggagtcagtttcctacaccatccgaggccccacccagca

SEQ ID NO: 587572 - DNA, 100 bp, Homo sapiens
ggagaaatccttcgcaatgtcaccatcctacgaggtaaagagtgtgtacaacagttagctgaaaacaccaggtatttcaggagacgcctgaaagagatgg

SEQ ID NO: 587573 - DNA, 83 bp, Homo sapiens
tggttaccgctgaggagctgcagtctctgtcaagtcgtgagatggagaataaagaaactctcaaagggttgcacaagatggat

SEQ ID NO: 587574 - DNA, 95 bp, Homo sapiens
gacctggtccagcttcccttcctcaaataaggaaattgacacctggcgtgtgcagtcattggagaaatcgatgaagaaacagattctgcgcttga

SEQ ID NO: 587575 - DNA, 127 bp, Homo sapiens
tttaatattggccaatcatcaagacaagccagcagctcgctcagtacaagagggctgatcccttatccaacatggttctaaccttcagtactaaagaagatgcagtttcctttgcagaaaaaaatgg

SEQ ID NO: 587576 - DNA, 99 bp, Homo sapiens
gcattgcctgcgaggctggccgagaaatcccgtgagctacagggagctggccgactgcacctggcacatggcggagaagctgggctgcttctggcccaa

SEQ ID NO: 587577 - DNA, 96 bp, Homo sapiens
ggttaacagcccccttctcagttttcctgggggcaaggacaccatactgttcagcgaccccactcttcctagtggacagaggtcgagatccccact

SEQ ID NO: 587578 - DNA, 74 bp, Homo sapiens
gctgaccacgagcttttcctccaggcctttgagagagtcaaattgactttatcagctttaatcgatgggaagaa

SEQ ID NO: 587579 - DNA, 100 bp, Homo sapiens
tccctcttcagttctctggagccccagattcaacccgtgtacgtgcctgtgcctaaaggagttacccagggagattatacacctatggaagacagtgaag

SEQ ID NO: 587580 - DNA, 74 bp, Homo sapiens
cccgcgcacggcgtcagcgtctagacgcagggggaaatttgcagtggtgagaaaatgtataaagaaagattctg

SEQ ID NO: 587581 - DNA, 100 bp, Homo sapiens
gcgctggagaaatacaacatagagaaggacattgcggctcatatcaagaagggagctgctgttgacggaggcaagttggatgtcgggaatgctgaggtga

SEQ ID NO: 587582 - DNA, 82 bp, Homo sapiens
tgacccggcgagcggagccggggctggagagcggcgaccactgcggatctcggccctcccaggcccaatacttcaaagcatc

SEQ ID NO: 587583 - DNA, 97 bp, Homo sapiens
cgcggaggcagccatggtgcggttcaagcacagtgcatacatagagacgtgaagccagaaaatatcctcatcacgaaacattccgtgattaagcttt

SEQ ID NO: 587584 - DNA, 96 bp, Homo sapiens
tcctggccgcgggccggggccggggcgccgctggcaggagcgcttggggatcctccaaggtgctggagaatctggtaaaagcaccattgtgaagca

SEQ ID NO: 587585 - DNA, 101 bp, Homo sapiens
gcggagttagcagtcacgacctccagcacagataaacattgacgatcttgaggatgaccctgtggtgaacggggagaggtctggctgtgcgctcacagacg

SEQ ID NO: 587586 - DNA, 87 bp, Homo sapiens
ctgagtgtgccacacaggtagccctggacggcattcagtgttttggccctagactggagctggttacagacggaagaagaagagcac

SEQ ID NO: 587587 - DNA, 82 bp, Homo sapiens
ctgtgctcgcgctactctctctttctggcctggaggctatccagccactctcgagtggaccctgaggagctcttcaccaagc

SEQ ID NO: 587588 - DNA, 75 bp, Homo sapiens
ccgtgagagagaataccagcatccaggggcgtgaactgtcagatgaagaagtgatgcttgctctgtcaaggcaca

SEQ ID NO: 587589 - DNA, 83 bp, Homo sapiens
cctgaccatggctccctgcagtaccctttaacgccgattacacctcaacaagaaggcaactgacaaacagccttatagcaagc

SEQ ID NO: 587590 - DNA, 51 bp, Homo sapiens
gagcactgtcctctaacgccatccgcgaggaccagttgctcttctgtgatg

SEQ ID NO: 587591 - DNA, 74 bp, Homo sapiens
tcatcactctgacctacaaagggcctctctctgccaaaggtcttattgaagttaaaacagatgagtttcctcgc

SEQ ID NO: 587592 - DNA, 82 bp, Homo sapiens
gtcgccttgctcctcgccgcggcggggactgcagttactgtggaatacacgatcctgcctgcgtggtttactgtaataccag

SEQ ID NO: 587593 - DNA, 96 bp, Homo sapiens
cggggaccatggcggagccgcctcgggtcactgacattgctgatgccatgattctgaaacagctttttgaaaatctgttcaaaaacggggtcgtcg

SEQ ID NO: 587594 - DNA, 75 bp, Homo sapiens
ctgtgagggaacaagaccagagtttcacggctaaagtaaataatgccagcctgattggactgggttatactcaga

SEQ ID NO: 587595 - DNA, 82 bp, Homo sapiens
gctctacttcatccagtcccaacattggagttttgggaattacaaagtgacgagtagcacagcccctctatggtttagatgg

SEQ ID NO: 587596 - DNA, 99 bp, Homo sapiens
gtgtggctgctgagctctgtggagccaggttgctccttgagggcaggacagttcttatggctttatccgttgcgtaagcacagagaggtctgcgaggtc

SEQ ID NO: 587597 - DNA, 50 bp, Homo sapiens
gatcggggtatactggatacactcaaggtgaccattgtgaggtagatatt

SEQ ID NO: 587598 - DNA, 99 bp, Homo sapiens
ccaagcacctgctgctcgtggaccccgagggcgtgggttattttggagctgttggagcactccttgagctgttgaagatcccgtgatcattacctgggg

SEQ ID NO: 587599 - DNA, 82 bp, Homo sapiens
gcagcgagttgaactttaggagagctgtgttctctgcagattctaagtattgccatcagagagtcagcaaaggtagttgacc

SEQ ID NO: 587600 - DNA, 90 bp, Homo sapiens
tgacatttccgtggcaaccaaagacgggcgcctatcagtacacaataaggggtgtccgcaatgttgccagtgtctgtctgcagattggct

SEQ ID NO: 587601 - DNA, 82 bp, Homo sapiens
cggacaagcacagtcttcggaagctcaagcttcacctgtggtctggcaggggccctggcctcaaaccctgttgatgttgtga

SEQ ID NO: 587602 - DNA, 99 bp, Homo sapiens
ggacgcccccgagggtgtagaccgcgcccctggagatggagtcccctgtttccacaccagcagtgctgccaatacaccttttggtgccagtggtcaaca

SEQ ID NO: 587603 - DNA, 100 bp, Homo sapiens
ccatcgagccagaagcagtatttgtcctgttccagctcaaccaagataaaatgaatttttccacactgagaaacattcagggtctatttgctccgctaaa

SEQ ID NO: 587604 - DNA, 100 bp, Homo sapiens
ctggagtcaggcggagaccgcaggctgaccccgcagcggccgggctgtcgcggcccccacctcaggttaatttggagtggcccctggagtcagtttccta

SEQ ID NO: 587605 - DNA, 83 bp, Homo sapiens
ctatgagaacgactgcatctttgacaagtttgagtgttgctggaacggttcggatagcagcccctgtcaaagggaacaggaag

SEQ ID NO: 587606 - DNA, 75 bp, Homo sapiens
cgaccctggactccaacaacaacacagacagaggaccccagtaagtgcagtcctcggttttgggaggagctcttt

SEQ ID NO: 587607 - DNA, 75 bp, Homo sapiens
tgaggggctgcgaccgcatcgtgcccgtggacatctacatcccaggaactctgcgaccttcaagtcgtttgagga

SEQ ID NO: 587608 - DNA, 98 bp, Homo sapiens
tgcaactgcattctatagattgacaagaaagcaaagtgtgggatgctgtctcaggagatgaattgatgaccctggctcataaacacattgtcaagact

SEQ ID NO: 587609 - DNA, 100 bp, Homo sapiens
ccagcccagatcacccctaagatgtgcctactagagtggtgccggagggagaagttggcacagcctgtgtatgaaacggctgcagtgcagtggcgtgatc

SEQ ID NO: 587610 - DNA, 100 bp, Homo sapiens
gctgcggcagcaggggactagcgtgagagttttcggctttgtgagaaaccttaccatcaaacacgatggccagcaacgttaccaacaagacagatcctcg

SEQ ID NO: 587611 - DNA, 90 bp, Homo sapiens
actggcagaactacgccgtaatggcactttgccttggttacgccctgattctaaaactcaaatttgtggtggtgacaaaccatttctggc

SEQ ID NO: 587612 - DNA, 75 bp, Homo sapiens
acaaggacaacaatgagatcgtggacaagatcatgggcaaaggacagatccaggcatctccttggaaacaatgcc

SEQ ID NO: 587613 - DNA, 50 bp, Homo sapiens
aagccctggacttgatcgagtcgctcagttcctacccccggttgcgagag

SEQ ID NO: 587614 - DNA, 101 bp, Homo sapiens
cggccagttgggtaccgggaggggcgaaggcgggcggcagaggcgatcagcaagaccactgatgcagaccctgcctttaagaaccacggtcaacaatggca

SEQ ID NO: 587615 - DNA, 95 bp, Homo sapiens
ccgggagaagcatgggaaggaggccgagccgggatctcaggtcctcgggggcggcggccacgccaaggacgggactgatcctttgaaatactcca

SEQ ID NO: 587616 - DNA, 97 bp, Homo sapiens
gacttcagaaacccgactgagaagtggagcgacccccagggagggtcggacctgcctcaataccgccaaggtacttaagagattatggcatcagaaa

SEQ ID NO: 587617 - DNA, 74 bp, Homo sapiens
aacctactatgagggtcgagcagaggtccagagggggcaaacctctttatttaccaccttccacaggaatttgg

SEQ ID NO: 587618 - DNA, 100 bp, Homo sapiens
ccaacttgcgcaaaaacaacagacagccctatgctgtcagtgaattagcagccttgcaccagggaacgtctaaatcttcctctctccccgcctatggcag

SEQ ID NO: 587619 - DNA, 101 bp, Homo sapiens
cgagagcgcgaatatcgtcatcgttagaagaacatttttggtagaagtgctatccagaagtgaacttgtcaaaaggcaagtagcatgaaagaagacagaag

SEQ ID NO: 587620 - DNA, 97 bp, Homo sapiens
gcaaatccagttggaggacattacaataaagccaaaacagtttctgagaatttaaactttggaaacatgatgagcaaggagaagcgagaggctgtca

SEQ ID NO: 587621 - DNA, 75 bp, Homo sapiens
cgtggaagctcagagtgtgaccaactggaaccctcaagaggaccgaggtttatgtctgggaaagaaataaagaag

SEQ ID NO: 587622 - DNA, 100 bp, Homo sapiens
cggcgggaggaacgctcactgtcagcgcctggaaacttgctcacgtccggcctctttggcctacccccgttggctccgctgccccaggtcgatgagtccc

SEQ ID NO: 587623 - DNA, 100 bp, Homo sapiens
ctggatctttttacttcatttatttcattgtataacacatctatgaagagacatcatctcattatgttgcccagactgatcttgaacttctggactcaag

SEQ ID NO: 587624 - DNA, 75 bp, Homo sapiens
atttctcatgaacagaaacacctaggaagggagaactggatctctcaccccgtcactcagggtggcgcaatcacg

SEQ ID NO: 587625 - DNA, 96 bp, Homo sapiens
gagagagcgagctgagtggttgtgtggtcgcgtctcggaaaccggtagcgcttgcagcatgggcaccgcgtccgtgctgcagcgccggtcccccaa

SEQ ID NO: 587626 - DNA, 100 bp, Homo sapiens
aaagtgaccaattcccttggtcaaagaagtgaccaaaaagtcatctacatttcagtgatggaatggggagaagatattaaagcagtttcaaaagatgaag

SEQ ID NO: 587627 - DNA, 100 bp, Homo sapiens
cacatatcagagggcattatgaacgaattctcaacccctacaacttattcctgtccggagacagcctaagggtcaccccagctctgatctttgccatcac

SEQ ID NO: 587628 - DNA, 95 bp, Homo sapiens
aagctggaacagccagaattggacccgaaaccatgcctcactgtcctaggcaagaaccgggctgtgggtcggcccaaggggaagctgggcccggc

SEQ ID NO: 587629 - DNA, 100 bp, Homo sapiens
gcagacctctcgctgcttcaggaggacctgcaggaggacgcagacggatggcatcttttatgaccaagactgtccagtaccaaaatgagctacataaatt

SEQ ID NO: 587630 - DNA, 90 bp, Homo sapiens
gacccaaaaatgtcttgtattagagtcacaattgatcctgattacagtggcgagatcttgaacaactgctgcgtcatggagtaccaccaa

SEQ ID NO: 587631 - DNA, 50 bp, Homo sapiens
cactcattggcagagaagctgagaatggtgttgaacgcgtgtgtcctgag

SEQ ID NO: 587632 - DNA, 51 bp, Homo sapiens
atcagagtggaggaagtacagccagcaaattgctgtgtgatgcgttacact

SEQ ID NO: 587633 - DNA, 100 bp, Homo sapiens
gtgccctactccaagcccatcaccactgttgagtcgggccacaaaaagttaaaaagtaccatccagagaagcacagaaacaggcatggcagctgaaatga

SEQ ID NO: 587634 - DNA, 111 bp, Homo sapiens
gctttttgtgctgccagcaagaaatgatcagtagcaccagtgtttatggtgctggagaatctggtaaaagcaccattgtgaagcagatgaggatcctgcatgttaatgggt

SEQ ID NO: 587635 - DNA, 100 bp, Homo sapiens
gcgggccgggaaaagtggcactgaggctctggaacttctgcccagctctccttgattgctcgctgtaagcagctcatctgtgaccccagctacgtaaaag

SEQ ID NO: 587636 - DNA, 51 bp, Homo sapiens
gccggcctgtgtggtggactgtggcacgggaatttcgctaaggagtttgtg

SEQ ID NO: 587637 - DNA, 75 bp, Homo sapiens
cagttggaagcagccgatccagcctgcggagcctgtggggcagatccagacatttaatgtggatgcaccatgcca

SEQ ID NO: 587638 - DNA, 100 bp, Homo sapiens
cagtcagagcccgccagaccttcctctgaaggcaaagtgacctgtgttttgcagaacactgaaatctatggactctaaaatggacttcatttaaagaaac

SEQ ID NO: 587639 - DNA, 78 bp, Homo sapiens
taatattgacccgaacttcgtggactcttcaccgtgtcaatgcaatgccccagaatggcttccatttgccaggcctac

SEQ ID NO: 587640 - DNA, 137 bp, Homo sapiens
ccggggtgctgtttacctgtttcacggaacctcaggatctggcatcagcccctcccatagccaggctccactcctggtccctgcttcctctgtggttctgccccaggcacactgcactgcccatcctgtaaacaggc

SEQ ID NO: 587641 - DNA, 100 bp, Homo sapiens
gtcggcagtgtgaggagctgctatggtgctgagtttcctggtagagccggccgagctgaggcggtcgcggccatgaagaaccttcgagatctgcggtctg

SEQ ID NO: 587642 - DNA, 114 bp, Homo sapiens
ctccctgtatgcatggtgtggggttggtgtgattagcttcgcagtctggaaagctttaggagttcacagtgctatggagttactagtagagaaagcaatcagcagtgcttctag

SEQ ID NO: 587643 - DNA, 100 bp, Homo sapiens
taaacgcccccaatttcccagctgctaaaggaagaggaaggacctatatccagactttgcctgacactgcagggtccaagagaattaaagaaatatggaa

SEQ ID NO: 587644 - DNA, 99 bp, Homo sapiens
cgtgcctcaacgaagcctccgtgctacacaacctgagggagcggtacttctcagggctaatatatgcggagacagcagccaatcgcatctgcaaggtgt

SEQ ID NO: 587645 - DNA, 100 bp, Homo sapiens
ttttccgaaagaccaaggcagctccctgcatctattggctcccactgactgacagccaggttgccatcaagattatcgacaaaacccagctgaatcccag

SEQ ID NO: 587646 - DNA, 82 bp, Homo sapiens
gaggaggaggccctgctggtttctgtgcgggtatcatgaactgatcactaaatatgggaagttggagcctttggcagaagtg

SEQ ID NO: 587647 - DNA, 100 bp, Homo sapiens
gatgggaagggaactggaatatctagaggaggtacctccaggaaatgtgctaggaactttatattgctgttggaatatctggagccatccaacatttagc

SEQ ID NO: 587648 - DNA, 100 bp, Homo sapiens
cttacttcttgcctgctctcagtttgttcccgaaatgagacttggtgcactctatacctactgggttcccctgtgaacacctacctcttcatgatgcaag

SEQ ID NO: 587649 - DNA, 98 bp, Homo sapiens
cccaggctggacaccagcaatgagaggacccgcgtgggcaccctgcaggtggtcagacatgtcatcaactcagctgaggaagtggcttttaggaagaa

SEQ ID NO: 587650 - DNA, 75 bp, Homo sapiens
tcaacaccgtgctctatgcccgggacaagtggctggaatgtctgaatctgaacaggctcttaaaggtacttctca

SEQ ID NO: 587651 - DNA, 75 bp, Homo sapiens
ttttcacaaccttcaagaaattcggatactgggtcgtcaggatggagttttgcaagactgggtcattgacgattg

SEQ ID NO: 587652 - DNA, 100 bp, Homo sapiens
caccatgtctgggagatggaagcgaaaactgaccgggacctgtgcaagccgtccggttccagttgttggcaaaggagaggaagaggaagaggaagatggc

SEQ ID NO: 587653 - DNA, 83 bp, Homo sapiens
accggccgcagtgccacttcgacatcgagatcaaccgggagccggttagttgaatccatggacatgaaacccacagatataga

SEQ ID NO: 587654 - DNA, 100 bp, Homo sapiens
tctggcagaaacagaggactaattttggcagttctaaatttgaatttgaggtggcttctggcacagcagcttaattgaccggaacctcattgattatttt

SEQ ID NO: 587655 - DNA, 100 bp, Homo sapiens
tctcaagtcaaagcagcaggaagataccacaatcagaccctccggaatgatgagaagacagcagctgattacaagattttaggtggttcagtccttcacc

SEQ ID NO: 587656 - DNA, 100 bp, Homo sapiens
tgaaaaccacaagcaggtccaaagagagagttgaaagtaacggaagcctacagaaactgatccgcatccgaaatccctggggagaagtggagtggacagg

SEQ ID NO: 587657 - DNA, 90 bp, Homo sapiens
cgcttagaccttcctactggtgatggccagccatcccttgaaccccctatggctgctgcttttgagatcaactgtggcaaccctccagaa

SEQ ID NO: 587658 - DNA, 99 bp, Homo sapiens
cggcgaggccctcatgtaccacacgaggctaagaatattgtacacaaagattcttgatgttcttgaggaaatccctaaaaatgcagcatatagaaagta

SEQ ID NO: 587659 - DNA, 83 bp, Homo sapiens
ctcagctccgagtccagggcgagagctccacgcaggagatcggtgaggagctgatcaacggagtcatctactccatctccctg

SEQ ID NO: 587660 - DNA, 75 bp, Homo sapiens
tatttatttggcgctgtgttacaggtatctcagatgaagacatcatcaacattactcttcctactggagtcccca

SEQ ID NO: 587661 - DNA, 100 bp, Homo sapiens
gacggcgagcccttgggccgcgtctcctttgagagtgttgcggagataggaacatgggagagaaacaatctgggtaacatgaaagtgatgctggttgcta

SEQ ID NO: 587662 - DNA, 100 bp, Homo sapiens
cttgatccctccacagagccggctcatgtttgtgaacatttctccactggaagagaacgtctccgagtccctcaactctctacgctttgcctccaaggtg

SEQ ID NO: 587663 - DNA, 82 bp, Homo sapiens
tttcgtacgggcggccgtgcgcgaggcgaggttgtgaccgagattcccgacgagagagactgaggggaagagaggaaggagg

SEQ ID NO: 587664 - DNA, 75 bp, Homo sapiens
ccatgctgggccggcgccctggggccccggagaggaggactcacgaatggcagtggaagatacatctctgctgct

SEQ ID NO: 587665 - DNA, 82 bp, Homo sapiens
cgcggggggcgagtaagccagcggcaggaccagcgggcgggggcccacgacccctgtcaaagggaacaggaagcagtccacg

SEQ ID NO: 587666 - DNA, 83 bp, Homo sapiens
ataaaaacaagtgtgtgcatctggctgttagaagaattcatgctcatccgggtcccccacggcccttcaggatgaaagctgcg

SEQ ID NO: 587667 - DNA, 101 bp, Homo sapiens
ttaagaaactctcagtttgtgtttctgagaaaggtggaaaacgaagctcattcccaacgtgcaaagccaaggcagcgaccccaggacctcttctggagatg

SEQ ID NO: 587668 - DNA, 82 bp, Homo sapiens
ccccgcgctgcggcctggcggcttccaggcgcactaccgcggcataatcaccagcaacacccgggacaataatacgggggcc

SEQ ID NO: 587669 - DNA, 98 bp, Homo sapiens
tctgtaatttggctttattgcttcctactgttaccaaagaggagtggagtcaacatatcaatggagcaagtcacagtcgtcgatgccagcttcttctt

SEQ ID NO: 587670 - DNA, 100 bp, Homo sapiens
tgctggtatatccttctttctggttccgtgttcatcaaggaatccatgtttcttccaagaagcaggtgagagaacgccgagccgtcgccgcagcctccgc

SEQ ID NO: 587671 - DNA, 100 bp, Homo sapiens
tgcagttccagctcaccgtcaacgtggtggccgtgattgtggccttcacaggcgcctgcatcacgcaggaggaagacagcgaacccctcccaccacagga

SEQ ID NO: 587672 - DNA, 75 bp, Homo sapiens
ggtggccgatgaatcacccaacatgctggtgtacagaaagcttgtacatgcagtggccatgcaaatatctgtcat

SEQ ID NO: 587673 - DNA, 83 bp, Homo sapiens
gagtacctgaaccggcacctgcacacctggatccaggataacggaggctgggttactcactataaacaatatccacccaacac

SEQ ID NO: 587674 - DNA, 95 bp, Homo sapiens
agaggaagcagtgatgcattgagatcatagcaatggatcatttaacttgaaagctttgtcaggaagctctggatataagtttggtgttcttgcta

SEQ ID NO: 587675 - DNA, 87 bp, Homo sapiens
tcagtcctgctctgaagatcctgccctgccctgggttggtgttcgaggaagagacattgttgttcttggtgtggagaagaagtcagt

SEQ ID NO: 587676 - DNA, 50 bp, Homo sapiens
ctcagggtgccagacctcatcctcaatctgaaattgaagtgtctgtctct

SEQ ID NO: 587677 - DNA, 83 bp, Homo sapiens
ccccgactcaacgtgagacgcaccgcccggactcaccatggatattatggggatggattaaatgccattgttgtgtttgctgt

SEQ ID NO: 587678 - DNA, 97 bp, Homo sapiens
ctgatggtggctcgcaggacccagtcggaaaccccacgggagttgatccctgaattttattatctccctgagatgtttgtcaacttcaataattata

SEQ ID NO: 587679 - DNA, 100 bp, Homo sapiens
ccacaggggcctccacatttggatttggaacaacaaataaaccctcaggaagtcttagtgcaggacttgacacagcaagcaaaagacatacagaacataa

SEQ ID NO: 587680 - DNA, 96 bp, Homo sapiens
aagaagaccaagtagcatccaagagtgtgaacatggctacgcctcttcattcccgtccatgccgagcccccgactgcagcattcaaagcccccacg

SEQ ID NO: 587681 - DNA, 100 bp, Homo sapiens
acaagggtcctaaaacaggatcagtaaagaaggaaaaagcagtaaagccagaggaagggctgaccagtttgagtatgtaatgtatggaaaagtgtacagg

SEQ ID NO: 587682 - DNA, 82 bp, Homo sapiens
tgggggaccggctgttggcgggtggctatggaccgccccctgcaggaagaggagcccccccgccacccccaccgttcacctc

SEQ ID NO: 587683 - DNA, 98 bp, Homo sapiens
ttcaacaggtagaagatctagaaaggagagttgcatcagcaagtttgcaagtgaaggaaaaagctcctcaatttctgaagagaaaggtgactctgatg

SEQ ID NO: 587684 - DNA, 80 bp, Homo sapiens
atcaactgagagagatgcttaaaaatcaccagttactttaatgaaaagccatggctgaaaccttttacctttctaacatt

SEQ ID NO: 587685 - DNA, 82 bp, Homo sapiens
tacaccgggctttcttcttcttcagcgagattcctgagccgttctatccctagatatgcagcccctactcagtgccctgcca

SEQ ID NO: 587686 - DNA, 139 bp, Homo sapiens
gcccacggggacggattggttgttttttcctgtatgaagcggttggcaccactgaagtgaccgaatgagatgatgaataaggtatttggaggtactgtgcacaaaaaaagtgtcagagaagatggagttttcaacatta

SEQ ID NO: 587687 - DNA, 82 bp, Homo sapiens
cgcaacacttctccgagccagcgagccagcgagccgccgacccgccgagcaaaatgcccagacacatggccccaggccaagc

SEQ ID NO: 587688 - DNA, 82 bp, Homo sapiens
gacgggggaagcagcacgggatcccagcctcaggcctgcacggacggtgttggttgggggccgagaactactggtggcgtgg

SEQ ID NO: 587689 - DNA, 106 bp, Homo sapiens
gcaccagctgatctgcagactccaaggaggtcccaggaagaggaggcccagaagattaacaatggctcaagccaggcggatggcactctcaaaccagtggatgaaa

SEQ ID NO: 587690 - DNA, 50 bp, Homo sapiens
tattcaataagctcaaccttgaacagttatcaatactctggctgaccatc

SEQ ID NO: 587691 - DNA, 101 bp, Homo sapiens
catgatcgcctcatgtggagggcaaagttgcgccggggaacttgtgagcctgcggtgaaagtgcacgatctgattttctggagagatgtgaagaagactgg

SEQ ID NO: 587692 - DNA, 83 bp, Homo sapiens
catcattccttggggcaaaatgtggacaaggatgaggacggggacttggttgccttttccagtgacgaggaattgacaatggc

SEQ ID NO: 587693 - DNA, 99 bp, Homo sapiens
cagcctcccaggtagctgggattacaggtctaactcatcttattactatggatttacaccagaaggaaattcagggcttcttcaatattcctgttgaca

SEQ ID NO: 587694 - DNA, 83 bp, Homo sapiens
gccgcggtggctgaactgtccccggcgcggccagccggtggcagacctcctgccccccgaggtctgcagtctcctgaacccag

SEQ ID NO: 587695 - DNA, 92 bp, Homo sapiens
ccttaccaaggaatctgcttttcaagtatgccaccaacagtgaagagtttggtgccctggttgtcagatgttggaaagcagtaggacggaac

SEQ ID NO: 587696 - DNA, 83 bp, Homo sapiens
tccttttgcaccaggcaatggaaatgaagacatgggaaacccaaaacactgcagctgcatggattgaactggacgtgatgtga

SEQ ID NO: 587697 - DNA, 83 bp, Homo sapiens
gaagcagccgatccagcctgcggagcctgtggggcagcttgccagcaaagcacggacagagaaggaggagaagctgagccagg

SEQ ID NO: 587698 - DNA, 100 bp, Homo sapiens
cttccccatgcggggtagaacctttgctgtcctgttcaccactctacctccagcacagaatttggcttatggttgacattcgtaaccttcctggatccta

SEQ ID NO: 587699 - DNA, 100 bp, Homo sapiens
gagtctgcgaaggccgggacccggttccccggcccacagtgggggtgtgcaaacccgagagaactggagtcatgtgctgttcctggggcttggatgatgt

SEQ ID NO: 587700 - DNA, 83 bp, Homo sapiens
ctgggccgcgccagcgccgctccaccgagggccgcgcgtcggccgccgccgggcctgggtctgagagtcactggagctaccag

SEQ ID NO: 587701 - DNA, 75 bp, Homo sapiens
aacctattgaactcagactggatgacagaagagagctggttattaaggatgaccagtgtcccagtgaaggaacga

SEQ ID NO: 587702 - DNA, 82 bp, Homo sapiens
tgccctcctggaagaggcgcggaggcgcaaggaggatgaagttgaagagtggcagcacaggatcatggaagggaagtggttg

SEQ ID NO: 587703 - DNA, 82 bp, Homo sapiens
ccaggatctcgggctcggaacgagactgcacggccaagaagcttgagagaagaaaaatttcagaaaaattgtctcaatttga

SEQ ID NO: 587704 - DNA, 101 bp, Homo sapiens
gtcccctgtgtttctccattctgttggttttatgcatctttatccaatcaagtgcccttggacaaagcctgaaaccagccaatgttttcagttgcaccaag

SEQ ID NO: 587705 - DNA, 75 bp, Homo sapiens
tcgctaacaactgcccagctttgaggaaatccaaatctcctcccaaagtgcccattgtgattcaggacgatagcc

SEQ ID NO: 587706 - DNA, 100 bp, Homo sapiens
cattctcctcgcgggaagcgcagcagtgcctccaagggttcttaaagcagaggtctgcagcgtcctcgagagcctggaacaggagtacaagagagaagaa

SEQ ID NO: 587707 - DNA, 50 bp, Homo sapiens
cgggacaccccggaagctgggaaatgctgttccatcgggactgtgagcaa

SEQ ID NO: 587708 - DNA, 101 bp, Homo sapiens
ctggatcgtgtaaccagtctatgggaagtgaggacccagatgatgtggtaccagttggccaaagaagagcctggtgttggtgcatgtgctttggactagca

SEQ ID NO: 587709 - DNA, 73 bp, Homo sapiens
tccatgacccccgatgccaaacacctgtggctggcagacatctggtccctgggcataacagctattgaacttg

SEQ ID NO: 587710 - DNA, 100 bp, Homo sapiens
cttcctttggactggactgtccctgctcatccattctcctgccacccccagacctcctcagctccagatatttggagttcttacaacatggcagacattg

SEQ ID NO: 587711 - DNA, 83 bp, Homo sapiens
tctaccttctggaagctactactacgtggtgcttggaaaggttggcagagtcagcatatatgattccaaaaggcaatccggga

SEQ ID NO: 587712 - DNA, 98 bp, Homo sapiens
agctgccctatcacctgccagctcatcacaaacacttttccagccattaactccaggctctcgagaatttgaagatgttgtaaatattctccattctt

SEQ ID NO: 587713 - DNA, 88 bp, Homo sapiens
aacgccaggcggatctcagaaggccagttcaaagggaactctaatgatccaggacaaagaagttaccctggagtatgtatcaagcctg

SEQ ID NO: 587714 - DNA, 89 bp, Homo sapiens
cacctccattttcctaggtgtcattacagtgatcatcataggcttatgtcttgctgcaggaagattcttacctctgaagacaatgttag

SEQ ID NO: 587715 - DNA, 51 bp, Homo sapiens
gggcagggccgacaccacaacgggcagggcaacaggtttgtctatgctggc

SEQ ID NO: 587716 - DNA, 73 bp, Homo sapiens
gaggaacccggctgaggcggcagatacttggcatatcgaaattttatgattgacacgtatcgtctaaaccccc

SEQ ID NO: 587717 - DNA, 90 bp, Homo sapiens
gggctcgccttgtatctcaacaccctgagtgcggatttctgctatgatgacagttgctctaggtcgtaaccagcctttgaaaaaggagaa

SEQ ID NO: 587718 - DNA, 50 bp, Homo sapiens
caggccccggcagcgcctgggacaagaataatcatgggccagactgggaa

SEQ ID NO: 587719 - DNA, 99 bp, Homo sapiens
cccaacgtagtgacctattacacctcttttgtggtcaaagatgaactttggctggtcatgaaattactaagtggagtcagaaattggctttggaaaaat

SEQ ID NO: 587720 - DNA, 105 bp, Homo sapiens
ggaggtcctgccgtccatgcggaagatcgtcgccacctggatgctggaggagccttcacgtaaatgggtccagtcatgcctcccagtaagaagccagaaagctca

SEQ ID NO: 587721 - DNA, 75 bp, Homo sapiens
ctgaggtcgggctccatgagatgcacatcaaatacatgggcagccacatccctgtgaaatcaaatacattgccca

SEQ ID NO: 587722 - DNA, 100 bp, Homo sapiens
agtccccgcgcgtggtcatccaggctgcctgctgtttcccggggagatcatgaaacgaggtcgccttcccagcagcagtgaggattctgacgacaatggc

SEQ ID NO: 587723 - DNA, 90 bp, Homo sapiens
cagggtcaaaggagagcacaaccatcgcagttggaagcccatggggcaggtcccaaaatggtagaagtccagaatcaacagtttcagatc

SEQ ID NO: 587724 - DNA, 74 bp, Homo sapiens
cggaaccagacgatgagacagagttgcgaccgcgcggcaggttttgacctgtagcagagaaccaattctggaga

SEQ ID NO: 587725 - DNA, 90 bp, Homo sapiens
aagtccgggagctgggcggccatttaccagtttcaccagtgatcattaaagaatgggcagcttacaaaggaaagtctcctcaaaccccgg

SEQ ID NO: 587726 - DNA, 90 bp, Homo sapiens
ttgctattgaaacactctctggttcctaaaagtaaagctttagaggccaccaaattggcaattgaagctggcttccgccatattgattct

SEQ ID NO: 587727 - DNA, 96 bp, Homo sapiens
ggggcgggcgccgagcgctgagcgctgagtgactgtgaagtgctgaccacactcaccccagacactggccgtatcctgtccaagctacatactgtc

SEQ ID NO: 587728 - DNA, 83 bp, Homo sapiens
ggaaggtgatgcccaagatggaccagacaatgcagatcttcgtgaagactctgactggtaagaccatcaccctcgaggttgag

SEQ ID NO: 587729 - DNA, 75 bp, Homo sapiens
gcatcggtcaaggtggccgtgagggtccggcccatgaatcgcagctgaactagatgcagagcacgcccagaaggt

SEQ ID NO: 587730 - DNA, 50 bp, Homo sapiens
ggcgccgccgcggccgccccaggtgacttaagagattaaaattaatttgg

SEQ ID NO: 587731 - DNA, 75 bp, Homo sapiens
cctaaaccagaagaggaggttgcccagaagaaaaagggtgtagctgatggtgctggagctgttatcatagctagt

SEQ ID NO: 587732 - DNA, 50 bp, Homo sapiens
cttcttcatacagtggctatgaagctgtatgcaggagctattcttgaagt

SEQ ID NO: 587733 - DNA, 80 bp, Homo sapiens
ttagacaaggagagccaggaggagctgggccccaacctcatccaaaagcacaggatccagccgcagaagccaggatgaag

SEQ ID NO: 587734 - DNA, 103 bp, Homo sapiens
ctcattcacttctagacgacaaaatgcaaaaaaggaggccaaagactttatccccgtcgaggtcaagatcaagatccaggtctatttcacgaccaagaagcag

SEQ ID NO: 587735 - DNA, 75 bp, Homo sapiens
ggtggaggtggaggcgaaagccaacggcgaggactgcctcaaccagcttaaagcttttcaagccaggccaagaag

SEQ ID NO: 587736 - DNA, 100 bp, Homo sapiens
tctttggaagtgaacattcctcaagatgctaatgtggtcttcaaaagagcagaagagggcatttcaccagatgaacttaaagatgaactacctgaacgac

SEQ ID NO: 587737 - DNA, 101 bp, Homo sapiens
ctttggtttcaggggagatgtgtgaaggttgacctgtctgagaaatataaaaaactggttctgagggtgaatcatccatgataatggaaatagaactccag

SEQ ID NO: 587738 - DNA, 96 bp, Homo sapiens
gaaaagcctctgggagcagaagggaggctccaagacctcatcaacaattaaggtccataattcagcagccaaatctttccctcgaaggtttgtttt

SEQ ID NO: 587739 - DNA, 87 bp, Homo sapiens
cctatcctccttcaggaccaacggtggattacaggaggtggcagaacagttagagctggaacggataggaccacaacatcaggcagg

SEQ ID NO: 587740 - DNA, 118 bp, Homo sapiens
gtaaactttactcagaacagagagccatccgagttaaaagagtggtggataagaaaagattagggagagacaagctcaacgagaagatgccctcgagctcacggagaagctagaccaa

SEQ ID NO: 587741 - DNA, 82 bp, Homo sapiens
cttccagcgactgctggtgatgtttctgatgcggtgacctgccagcacctgccgcagccttcgtccgggagtcgccccatct

SEQ ID NO: 587742 - DNA, 75 bp, Homo sapiens
caggtcctcaactttgaagagatcgactacaaggagatcgaggtggaagaggacccagccgccgcctccatctct

SEQ ID NO: 587743 - DNA, 90 bp, Homo sapiens
aacgcagatcagaggtagtcggacctttcccgctggcgcgcagcctcagctaggtaaaaagaacgtattctcatggtacttacagagctg

SEQ ID NO: 587744 - DNA, 50 bp, Homo sapiens
gttcttaatgagctttatacggttcagtcatttttagcatcacttgatgg

SEQ ID NO: 587745 - DNA, 100 bp, Homo sapiens
cacaatgatccttttgctcctggtggaacagttgttgcagcaagcgattcagctgaacttgtagtcgataaagccatggagttaaggtttgtgggtggcg

SEQ ID NO: 587746 - DNA, 100 bp, Homo sapiens
tgactaaatgtgttgaacagggaagagccaaagatgaagaggaagcctttctggattggagtgatgatgatgatgatgatgatgatggatttgatccaag

SEQ ID NO: 587747 - DNA, 50 bp, Homo sapiens
ggaggaggccggggaccacacagcgggagatacagatgacccaccaagaa

SEQ ID NO: 587748 - DNA, 75 bp, Homo sapiens
caaccgcctacgagacactcaaggtaatggaactgctggtccatctgaataaacgtataaaaagccgccccaaaa

SEQ ID NO: 587749 - DNA, 137 bp, Homo sapiens
tttacctgggtgagacagcttgagccccatcgtggattccaagacatccctgctgagagagccaagattatcaagaatgatctgtgggttaaccctctacgctactacctgagagaaaggggctccaggataaagag

SEQ ID NO: 587750 - DNA, 101 bp, Homo sapiens
cgtgaacgaaagcagtgacggaggagcttgtaccaccgattcaaccctatgaaaagataaaggccaggggcttgcctgataatatatcttccgtgttgaac

SEQ ID NO: 587751 - DNA, 90 bp, Homo sapiens
caatctattcaacacgtcctgatgttaagtgtgtgatacacatccatacccttgcaacagcagctttcaaacttctcatggaacatctgg

SEQ ID NO: 587752 - DNA, 101 bp, Homo sapiens
ctgcatttgttctgcctgacttggaccctggaaaacctggccctcttcaatttctgacaaaaggttttgcactgattgcaaaaataaagtcctccgagcat

SEQ ID NO: 587753 - DNA, 83 bp, Homo sapiens
ggcagacgctgtgctcgctggcaccccgaacgggttgcttcccccgctgcgaggggagcttttggaagagtcccagatggaag

SEQ ID NO: 587754 - DNA, 99 bp, Homo sapiens
cccgcctgcaaaccgcagcccaggagctcctggaagatctccgcactctggagcataatgtgttttctgtctcaactggtctctgacaagcctctgact

SEQ ID NO: 587755 - DNA, 80 bp, Homo sapiens
gttcggggaaatggctgcgagaccctagaggcctgcggcctgcgggccatgaagcccccaggaggagaatcgagcaatct

SEQ ID NO: 587756 - DNA, 99 bp, Homo sapiens
tgaaacagctgcaaaggttgcattgatgaaattaaagatgcatgctgatggcgataagtcattaccacaggtcctggcattgatgtgcctgctccagac

SEQ ID NO: 587757 - DNA, 82 bp, Homo sapiens
ctcgcctcgggtctcgggggccgctctgggatcccggccaccagcaattgtccggttggtcctgcactttggtggtggtggc

SEQ ID NO: 587758 - DNA, 83 bp, Homo sapiens
gtcatcgagtgtgacgtggtgaaagggaaaagtgttttaggcttccagagtagaaatctgatattacttcgtttgattcttcg

SEQ ID NO: 587759 - DNA, 82 bp, Homo sapiens
cagttggaagcagccgatccagcctgcggagcctgtggggcaggtggtacagaagttggtcctgccctttgggcgactgaac

SEQ ID NO: 587760 - DNA, 100 bp, Homo sapiens
ccagagagttgggtccaaactcttctttgacaagagagacaactctgactttggccctggccactgcagtcatcccccagtggcagaaggatgaattgcg

SEQ ID NO: 587761 - DNA, 97 bp, Homo sapiens
cttcatggatccggcgtctgcactttacagaggtccaatcacgcggacccaggaggaagctgatgaatatattgacattggagccctcaatggcatc

SEQ ID NO: 587762 - DNA, 101 bp, Homo sapiens
aacagtggaatgctagaagaagatttgattcaatattaccagttcctagctgaaaaaggtgatgtacaagcacagtgccttgctttccatgacatttcccc

SEQ ID NO: 587763 - DNA, 100 bp, Homo sapiens
atggcctatccaaggacatgagcagtttacacatctcacccaattcagttgttgacctcctgtactggagagacattaagaagactggagtggtgtttgg

SEQ ID NO: 587764 - DNA, 102 bp, Homo sapiens
agcttcttcagttccaggaagatgcctttgggaagcatgtcaccaacccggccttcaccaaactcccttctcgctctgtcgtccaggctggagtccaatgct

SEQ ID NO: 587765 - DNA, 83 bp, Homo sapiens
cctgtcacaggccatgctctggcaaaaacttgttgacctcctgtactggagagacattaagaagactggagtggtgtttggtg

SEQ ID NO: 587766 - DNA, 90 bp, Homo sapiens
aagatttgaagtgggtagaagaaaatattccctcttcattcacagatgttttcctgcccggctctgaacacccccgcagacggcagaaag

SEQ ID NO: 587767 - DNA, 82 bp, Homo sapiens
ctacaagctgtccccagaggactacacgctcaaggtcaaaatgcagatcttcgtgaaaacccttaccggcaagaccatcacc

SEQ ID NO: 587768 - DNA, 90 bp, Homo sapiens
ccagtctgatgagcgcaactgcagtaaaacatggctaaaagcttacggagtaagtggaaaagaaagatgcgtgctgaaaagagaaaaaag

SEQ ID NO: 587769 - DNA, 82 bp, Homo sapiens
ccgtgtctctggattcaagtcccaggagtcctgaccagagagcagtgttcctctgaacaacagggagaatatctctgatccc

SEQ ID NO: 587770 - DNA, 83 bp, Homo sapiens
gctttttctggtgtcctgaacctggaagttgtgctttttaaggtgaattatgtaacctcattacgctggatgtagctcacaat

SEQ ID NO: 587771 - DNA, 74 bp, Homo sapiens
cgccccatctatgagttcaagatcacatggtggaacatggaggagacatatttccacctatttctctccataag

SEQ ID NO: 587772 - DNA, 100 bp, Homo sapiens
gctggctgcgctctgcccggcgagtcgggctctggaggaaaagaaagatgtgtcttgctgaatcagggctctcttatccctgccatcgacttacagtggg

SEQ ID NO: 587773 - DNA, 76 bp, Homo sapiens
gcctgaagtgagtgagaggcacatgaagagacggtaaagaacaggtccaagaaaagctcaaagaaagcaaatacca

SEQ ID NO: 587774 - DNA, 75 bp, Homo sapiens
gcctcgctcaactccggcttcacgcggctcggcaccgacctctttggaatcccaaagcccaaagaggaagtgagg

SEQ ID NO: 587775 - DNA, 51 bp, Homo sapiens
gtcccggacgtcactcctgaaggaatcacactgtcagagtacttccgtgac

SEQ ID NO: 587776 - DNA, 75 bp, Homo sapiens
cacacaatgacggtgttatggggaacacaggtatgaatgacccatattaaatcgcccttggtgaaagaaaattct

SEQ ID NO: 587777 - DNA, 75 bp, Homo sapiens
acgacatcgacctgtccgccctgcgggtggaatgaatcttacttgttgaatatcttctggttactagttggattc

SEQ ID NO: 587778 - DNA, 75 bp, Homo sapiens
ctgcaaagcctgcacaagctctgtgagaggatagagggagtccaaaactacttacctggaagaccttccaccacc

SEQ ID NO: 587779 - DNA, 100 bp, Homo sapiens
cggaagcaggactcggggcacttggaaaggagaagatgagtatgccaacgttgatgccattgttgtatcagtgggtgttgatgaagaaattgtttatgcc

SEQ ID NO: 587780 - DNA, 83 bp, Homo sapiens
ggcttaaatgatgtattttgtgatcgcagcgatgaaagggtgaggtggctttgaccccgggttgcccggccagcacgaccgag

SEQ ID NO: 587781 - DNA, 83 bp, Homo sapiens
ccgaaacccacccgaacagctgcccatcgtcctgcaggtggatccataaagaacccagccaacccgcagagggaggggagggg

SEQ ID NO: 587782 - DNA, 100 bp, Homo sapiens
gggcagggcctggggaatgcttttttatctcatattagtgcctgtgatggcatctttcatctaacacggaaatcctcattgacgattcaatttgttgaag

SEQ ID NO: 587783 - DNA, 75 bp, Homo sapiens
gcccggtgcccgaggaggcagccaagctcgtagcctgccactccgtgcgaaggttgtgcaggaccagcgttccct

SEQ ID NO: 587784 - DNA, 100 bp, Homo sapiens
ataaacttgtggatggacttgctacctcttgggtgaactctagcaattacaagggatgtcctttaactccattgcctccagttagtattgctattcgatt

SEQ ID NO: 587785 - DNA, 76 bp, Homo sapiens
actttgagtgctaccactgtgagaataatccagaatggctactctgatctatgttgataaggaaaatggagaacca

SEQ ID NO: 587786 - DNA, 73 bp, Homo sapiens
aatccgtctggatcacggatgtaggaagtgccgtgcaaggttataaacgcaaaagatgttgacttcatgtacg

SEQ ID NO: 587787 - DNA, 100 bp, Homo sapiens
tgtgggagaggagagtaaaaagaacttcctggagaaactgaagcgggacgttgagagaagaaaactacgcctcagccctgagcaatgtagtaacttttat

SEQ ID NO: 587788 - DNA, 100 bp, Homo sapiens
gggcagacgctgtgctcgctggcaccccgaacgggttgcttcccccgctgcgagatctgcgagtgaagagggacgagggaaaagaaacaaagccacagac

SEQ ID NO: 587789 - DNA, 100 bp, Homo sapiens
cctggcacctgctgcacgagtcattgtttggatctgttgctgatgatcagaaacttatgatcaaagaatggctcaagaagtactgacacatttaaaggag

SEQ ID NO: 587790 - DNA, 82 bp, Homo sapiens
cccggatcagcagccccatgcaccccagtgctggagatcgtgcgggccctggagcatctgcacagcaagctgtcggtgatcc

SEQ ID NO: 587791 - DNA, 98 bp, Homo sapiens
cgacagtgacgatggcgcagtttcagctcccgcagcttccgacgctcgggttcatgacgctctcgatattcctgtgcagaaacctggaccacgtctac

SEQ ID NO: 587792 - DNA, 122 bp, Homo sapiens
acacctgtgtggtggaattccagttcatgctgcccacatctcatccaaacaggacagaactgtaccgctctctttttggccagctccaccctcccgacgaaggccacggggattgacatcgc

SEQ ID NO: 587793 - DNA, 75 bp, Homo sapiens
cggcgcagggcagagagacgccacacagccaccagccgcagcaccaggatcagacccccggaacaaacacaagtt

SEQ ID NO: 587794 - DNA, 75 bp, Homo sapiens
ctcttcgtctgcttcttcctcttcagtcaagtgagagggtccaagcctggtaagaatgtccagcttcaggagaat

SEQ ID NO: 587795 - DNA, 51 bp, Homo sapiens
cctgagtagtcgccatggcacagatacgtaggtaacctttccagagatgtg

SEQ ID NO: 587796 - DNA, 100 bp, Homo sapiens
ggatctcagccttgtcaaagatgccagatgtgggagacacgccaaagctcccaaggagtcctccctcctgaacctgatctcctatagagcgcagtccatc

SEQ ID NO: 587797 - DNA, 100 bp, Homo sapiens
ggacgacttcaactatggcagcagcgtggcctccgccaccgtgcacatccgaatggtttcaccagtgatcattaaagaatgggcagcttacaaaggaaag

SEQ ID NO: 587798 - DNA, 74 bp, Homo sapiens
agctgatggccgctgacaggggacgcaggtgatcccattaagatactaatgccatcactgtctcctacaatgga

SEQ ID NO: 587799 - DNA, 75 bp, Homo sapiens
taccccatggaactcaagagcaggacgtcttcctcatctgcttctccctcgtcagcccagcctcttatgagaacg

SEQ ID NO: 587800 - DNA, 98 bp, Homo sapiens
cggtgagcgcccatatgggggttctggagagcggggtgtggggaatactcccccagttgcaagaggcgcaggaccgtggaagacttcaacaaattctg

SEQ ID NO: 587801 - DNA, 100 bp, Homo sapiens
tctggacaatcaaaacttaactcctggatacagtggccacagatgtctttaattccaaaaacctggccgttcaggcacaaaagaagatcttgggtaaaat

SEQ ID NO: 587802 - DNA, 154 bp, Homo sapiens
gaggctggaccagagtcgagttccctcctcctgcaccaaagggagccgccaccgtctggtgtctaaaccgcctcggatgtttctttctcagcaaaatagaggagaagcttacccctcttccagaagataatagtatgaatgtggatcaagatgg

SEQ ID NO: 587803 - DNA, 75 bp, Homo sapiens
cagaaacactggacagtctcttacagtttgatctgatatgatgacaataaaggtggtcttcaagctgacagagaa

SEQ ID NO: 587804 - DNA, 77 bp, Homo sapiens
agactctcttcgctctttgcatcttaactgcagtgaagcctggtgttcggtacagagaattgggaaacattatccag

SEQ ID NO: 587805 - DNA, 75 bp, Homo sapiens
atattcaaccagctggaagtgaagcctagtatcagaaggccaggcgagactgcaacactgctcatcaccccgcgg

SEQ ID NO: 587806 - DNA, 82 bp, Homo sapiens
aactgtgaggagagtaaaccaagaagaaatccacagatttagttctgaaataatgaagatgtttcattttcaagaccagcag

SEQ ID NO: 587807 - DNA, 82 bp, Homo sapiens
agaaaccatgtgctgaaatgtttgacgacactgatggtttgttccagggtctccctccactgctgtagtaacccgggtccgg

SEQ ID NO: 587808 - DNA, 96 bp, Homo sapiens
ttcttgatctgtttcttgatatggaagcagctacagggcaggaggaggacagtcagtgacccacaccggcctgcccatcatggcctccctggccaa

SEQ ID NO: 587809 - DNA, 100 bp, Homo sapiens
ctattcgcggagctggaatgactggcaacccagcttcgcctcaacagcatcaagaagctgtccaccatcgccttggcccttggggttgaaaggacccgaa

SEQ ID NO: 587810 - DNA, 75 bp, Homo sapiens
ttcttctgcctcagcctcttgagtagctgggattacagttcagaatctataacgtgacctacctagaaccctccc

SEQ ID NO: 587811 - DNA, 75 bp, Homo sapiens
tgaacaagacatggaaggaaatgagggcaacttctgaagacttcaacaaggaagagtgacccagtcccagccatg

SEQ ID NO: 587812 - DNA, 74 bp, Homo sapiens
gaggatccacctggagctgaggaaccggaccccggcagctatgccatggacaatattaccaggcagaaccaatt

SEQ ID NO: 587813 - DNA, 99 bp, Homo sapiens
tgtgcggccagcagaaggagtgtcctggctcctggcaacaggaccactgcccacctaagcttactgaggtgaccaaggtggaggaaccctccaagtacg

SEQ ID NO: 587814 - DNA, 97 bp, Homo sapiens
tctccaaataccagctcgacaaagatggggttgtcctctttaagaagccattcgatgaggactatctaaaccatctcgagcctcccgtgaagcacat

SEQ ID NO: 587815 - DNA, 83 bp, Homo sapiens
ctccacttgtgcaaccaagtaagaatgataatggcaaaccagattctgtgggactcccagatataatttctacagtagaattt

SEQ ID NO: 587816 - DNA, 100 bp, Homo sapiens
caaccttcgagccggcctcatcccctccaaggggttccaggagaggtgtgatgaatgcagactctgctaccattttggctgtttggatcctcctttgaaa

SEQ ID NO: 587817 - DNA, 100 bp, Homo sapiens
ccgaattcagaaggatatcgacgtcgtgatccagaagtccagagctgaggactgcctgtttgcagatcgtcagtatttaaacagatcacatcatgcgtga

SEQ ID NO: 587818 - DNA, 75 bp, Homo sapiens
gagtcgtcaagaggctctgcaccctggatggaaagcaggtgaagtttacattttatcaagcagtaaaagtatgac

SEQ ID NO: 587819 - DNA, 74 bp, Homo sapiens
caagaatcctgaggctcctctcaatgtgtcccgtgtggcccagttgtgcagggctcgaatacggatggtcctcg

SEQ ID NO: 587820 - DNA, 100 bp, Homo sapiens
gcgagaacagaatttcttttggcacctcctctccgcgcgttcttgggctgcctgtggagttcctgctgctcctcacagtccccgtcgtggacccggacaa

SEQ ID NO: 587821 - DNA, 100 bp, Homo sapiens
ctggatgaaccagaaggaaaaaataatggaagtgttggaaaagtccagtactttaaatgtgcccccaagtatgtggccataaaatgcagtaaaaacaaat

SEQ ID NO: 587822 - DNA, 100 bp, Homo sapiens
gcatttatgcttgcaggtgttattctaggaggagcatacttgtacaaatattttgcacttcaagctatgtccaaactgggtcttcggcaggttacaggag

SEQ ID NO: 587823 - DNA, 90 bp, Homo sapiens
tggagcttgggaagatttcacaaagtttgtgtgttagcagaggcgcattttccagggaacatcatttacagcgagcaatttcagcacagc

SEQ ID NO: 587824 - DNA, 82 bp, Homo sapiens
aagaagtgccttttgcctcccaccgtgattctgaggcctccccaaccatgtgcaattggtttggaaatcccttgtctccagg

SEQ ID NO: 587825 - DNA, 100 bp, Homo sapiens
caggagcactgctgcagcaccgagtggagagccccacagccagcagcccttcgggggtccatgatacaaactggactctcaggacaaaacgacaccagcc

SEQ ID NO: 587826 - DNA, 80 bp, Homo sapiens
gccagcacgctgtcacctctcaatagcagcccaaacagattaagacatgggaggtaaaactgccattcaatgcacaacgg

SEQ ID NO: 587827 - DNA, 83 bp, Homo sapiens
atcccacatctggaatctggaatgaaatcttccaagtccaaggatgtgcagttgcagtggtgcagaatggctgacctcagtct

SEQ ID NO: 587828 - DNA, 100 bp, Homo sapiens
ggccgcagcacagatgcccgcttaccaggagctggtggaggaggcgattgcctatggccggaagctgggcgggtctggcaccttccacgctctgtagttt

SEQ ID NO: 587829 - DNA, 50 bp, Homo sapiens
caaaatgaacacagtcactggggttgttaaaggccttacttatttgtgga

SEQ ID NO: 587830 - DNA, 90 bp, Homo sapiens
gaagcagcgggggggcaggcgatcgaagggactgttgacatttagggatgtggccatagaattctctctggaggagtggcaacacctgga

SEQ ID NO: 587831 - DNA, 100 bp, Homo sapiens
accttatgcagtctattccaggcatgcacaatcctgataaatttgagctccgtggtagtgattgactctgattctgatgaggaatgtcacacccatgaag

SEQ ID NO: 587832 - DNA, 75 bp, Homo sapiens
ctatagcaccagtgactgtgagcacggcatggccagcgtcatctccaggatgaaacaggcgcctatttaatcgac

SEQ ID NO: 587833 - DNA, 100 bp, Homo sapiens
gggtcccggatccccgcgcacccggccaggtcagaaccatccagtcctggacatgggaccacatcggcgactgcagtggacgtggctgggccgggctgag

SEQ ID NO: 587834 - DNA, 74 bp, Homo sapiens
gatttgttaaggattccaagtaactcttatttgcaactttcatcctttgaaacgtgtgctgaaaaagaagaatc

SEQ ID NO: 587835 - DNA, 74 bp, Homo sapiens
gcgctgccgccgctctgaggagttaaaggatgaagtgtcctcttgctagcaccaataaaagatttctaattaac

SEQ ID NO: 587836 - DNA, 100 bp, Homo sapiens
ggcgagtcgggctctggaggaaaagaaagggcatttttggtcgaagagagctgaagtaatgagaagacatcatggaggcccagtcccacagctccacgac

SEQ ID NO: 587837 - DNA, 90 bp, Homo sapiens
agattttgaagatggaatccgtagcgcccagctcattgcctcagctaaggtgaggacgcttgagcggaagttagaagcaaaaatgatcaa

SEQ ID NO: 587838 - DNA, 83 bp, Homo sapiens
tgggggcctcaagctgtcccaggacatggacacctgtgaggtgcagaggccaagaccgttttgcccaagaaggagaaaatgaa

SEQ ID NO: 587839 - DNA, 98 bp, Homo sapiens
agcactggactcatggaggctgagcatttattcaggtactccaaagattcaggtttactcacgtcatccagcagagaatggaaagtcaaatttcctga

SEQ ID NO: 587840 - DNA, 83 bp, Homo sapiens
ctggagcctcagttggaagcagccgatccagcctgcggagcctgtggggcagatgtggttgccctgcttggctttccttatgc

SEQ ID NO: 587841 - DNA, 96 bp, Homo sapiens
ccttttctactttgccagcaaactggtgctcaagggcttcgtgctgtgtcactccatcgctgggggtacgggttctggcctgggctcctacctcct

SEQ ID NO: 587842 - DNA, 87 bp, Homo sapiens
tcaatgctgcgaaagctgccaaaagtgacatgcaggaccagttgctcttctgtgatgactgcgatcgtggctaccacatgtactgtc

SEQ ID NO: 587843 - DNA, 74 bp, Homo sapiens
ctccgcagcgacatcaccaagctggaggtggacgccatcgtcaacgccggttatgaagacagtatggagtttcc

SEQ ID NO: 587844 - DNA, 88 bp, Homo sapiens
gacacttggaaattgaacaagcgtcacttgacaagcctatagaatcgacatcgctattgcggttccgaggcagtgggaagagatgcgg

SEQ ID NO: 587845 - DNA, 100 bp, Homo sapiens
ccgcgccgagggcaacagccgcttcacctacagcgtcactgtcgatggctgcacggacctggaggaacttgctttgtaccagatccagctgctgaaggac

SEQ ID NO: 587846 - DNA, 74 bp, Homo sapiens
cagaagtgatcgctcagctggagaacgcggctaaagttctgatggggaatacggagagaacggtctggcaatac

SEQ ID NO: 587847 - DNA, 50 bp, Homo sapiens
agagcaaacttggctcagcccagcaaaagaatggaccccagcaggaaaag

SEQ ID NO: 587848 - DNA, 75 bp, Homo sapiens
tgatcggtataacgtcaaaaatcctgtttgtcagacatatctgaagagatggattaagaatgctttggattaagg

SEQ ID NO: 587849 - DNA, 75 bp, Homo sapiens
ggcggtagcgcaggggagattacttttctggaaggtctgctgagaacagacccagtccctgaggaaggagaagat

SEQ ID NO: 587850 - DNA, 101 bp, Homo sapiens
gacagaagggagtttgctaaatttgaaaaggagaaaatgaatgccaaatgggacacggtggaaggaacagcatatttaagttcttttctgtggaaaactca

SEQ ID NO: 587851 - DNA, 90 bp, Homo sapiens
atgagatacatagcaaccatcactgataaggctggaatgataaaaagtgataatgaagagtatttcattgaacccttggaaagaggtaaa

SEQ ID NO: 587852 - DNA, 78 bp, Homo sapiens
aggcccacctgtgtcctggttgagggtctccagggttctttggggcccgagatatgaggccccaggattcctggcgag

SEQ ID NO: 587853 - DNA, 73 bp, Homo sapiens
tggtgtgcacaggagccaagagcttacagttgaacatgagtcttcttatgattagtgagaatgtaaaattggc

SEQ ID NO: 587854 - DNA, 100 bp, Homo sapiens
cgagctgggggcgcagctgctggagctgctccggctggcgctgtgcgcccgagagcgtgccaggaagatgtcgagcccgggcatcgacggcgaccccaag

SEQ ID NO: 587855 - DNA, 100 bp, Homo sapiens
ggttcatcctacatttttgtgcaagagattttagccttcatcctaataagaaacatccctggatatgcccgttcagtttacagttcattttttgcttggt

SEQ ID NO: 587856 - DNA, 82 bp, Homo sapiens
cccactgttgccttgagaattgaagacatccccatctgtggggagtctctccccctcagcagtggctctggctgtgatcctg

SEQ ID NO: 587857 - DNA, 100 bp, Homo sapiens
cggaggcggaactgcggagttgctgggtccaccgacccttaccctcagcgagagaagtaaccggctgtcttcatcggtggaatacaacataatggagttg

SEQ ID NO: 587858 - DNA, 75 bp, Homo sapiens
ctgcagtcggcactgctactgcgaagacagctggcaggaccctgctgggatctttgagcttgtggaggtggtcgg

SEQ ID NO: 587859 - DNA, 75 bp, Homo sapiens
ggcgccccgcagccccccaacatcctgctcctgctcatggacgacgaaagagacggctttggaggcctggcagca

SEQ ID NO: 587860 - DNA, 101 bp, Homo sapiens
tttgccaagttcagcaaatttggagatggaaggccagaactatcccgacctccacctgccctgctcggagctggagtgctggatccctggcacctgcctgg

SEQ ID NO: 587861 - DNA, 100 bp, Homo sapiens
ggcaattttgacgccatcgccaacatccgaggggaaactttcttcttcaaagatgcaagtgctgctggaccaggcgggctgctgtatcgtgggtcagagt

SEQ ID NO: 587862 - DNA, 100 bp, Homo sapiens
cgggaatccaaaagggaaacaaacgaaaccagatgaaaaaaagtgattccaagtcaagatttcaaatggaaatctaagatgtacaggtggatcatctgaa

SEQ ID NO: 587863 - DNA, 101 bp, Homo sapiens
tccaggtcagagttgctccaagcaaggtggaggttctgtacgaggacgagccactgaaggaatactacaccctcatggacatcgcctacatctacccctgg

SEQ ID NO: 587864 - DNA, 74 bp, Homo sapiens
gctctttgggctgctccgggaggagaccagtatgatgtctgtgccatttgcctggatgaatatgaggatgggga

SEQ ID NO: 587865 - DNA, 83 bp, Homo sapiens
gagcgtgaggacagtgagactcgaacattccaagatgagatgggattctccaacatggaagatgatggcccagaagaggagga

SEQ ID NO: 587866 - DNA, 100 bp, Homo sapiens
gggttattcgagtgaccgagaccgcggccgggaccgaggtttaaggaagaaatctctaaacgttttaaatcacatactgaccaacttgtgttgatatttg

SEQ ID NO: 587867 - DNA, 75 bp, Homo sapiens
tccttgcatttttgttggctgaattgggtacaagaggctgtggccctgagaaagatcacgtctacctgcagctgc

SEQ ID NO: 587868 - DNA, 75 bp, Homo sapiens
gtggtttttcggatcatgtctggtggctccgcggattataacaggaaattcgaaatgagtcccatgactatcctc

SEQ ID NO: 587869 - DNA, 80 bp, Homo sapiens
tcttcagccgaggccgccgccgcctctccttgctgcagccatggagtgtcgtgaaaactacccctaaaagccaaaatggg

SEQ ID NO: 587870 - DNA, 103 bp, Homo sapiens
tggtatacagctacatccaggagagaatgctgacagtcctgcagatggagggagcgaggaaccaccggatcgaagacagtcaagtgtagactctcgccaaagc

SEQ ID NO: 587871 - DNA, 101 bp, Homo sapiens
gggagactcaaccttcacagttctcaagcgctaccagaatctaaagcctattggctctggggctcagggcatagtttggaggcgatcgagatcggatgaca

SEQ ID NO: 587872 - DNA, 50 bp, Homo sapiens
aacctctaatggagttgattgagaggataagaattcgggatccaaaccag

SEQ ID NO: 587873 - DNA, 97 bp, Homo sapiens
caaactagctggaaacccatttccaatcagtcatgggaccagaagtttacactggaactggacagggaaggcgacatgccaattcatgaacttctca

SEQ ID NO: 587874 - DNA, 109 bp, Homo sapiens
tctctccctctgcccccccttccccacgcaaccccagatccatttacactttacaccctgggcgctgcctatggcacagccaagagcggtaccggcattgcggccatgt

SEQ ID NO: 587875 - DNA, 98 bp, Homo sapiens
cctgccacccattgtgtcttctcaagaaggatcaactcactatcctgaaggtccattctcccaagaagaggggacagaaagacagatctatttgtaag

SEQ ID NO: 587876 - DNA, 100 bp, Homo sapiens
ctggcatgaggattctgccaccatggaagggctcctgtctccgatgaggacgaagaagactgtgcagtctttgtaactgatgaagagcaaggctttgtct

SEQ ID NO: 587877 - DNA, 82 bp, Homo sapiens
ccatcgaagctctagaaatgaatgtttccatctcttcagagatgaaccagcaattctgtggtgttcttggtcacacatttat

SEQ ID NO: 587878 - DNA, 100 bp, Homo sapiens
ggacaagctggaatgcatccaagagaatccctcaacatgctggcctacatacagatcacttttgtggagccctactttgatgagtatgagatgaaagaca

SEQ ID NO: 587879 - DNA, 51 bp, Homo sapiens
gacacatattgcttcaatgcttcaggtggtgctccaaattactaccccaac

SEQ ID NO: 587880 - DNA, 100 bp, Homo sapiens
cgtgaccgagaccgtgaccgagagcgtgaccgagagcgcgaatatcgtcatcgttagaaggactacagagatattatagataccccaatggattttggaa

SEQ ID NO: 587881 - DNA, 100 bp, Homo sapiens
gacgaggagcagggcctgactgcgcagtactatactggcaattgctggagaagattttgcaattgttgcttctgatactcgattgagtgaagggttttca

SEQ ID NO: 587882 - DNA, 75 bp, Homo sapiens
ggcggacggctgcgtcgcccgaggcgaggaggagcgctggcggagtacaaaccaccaggaacccgtaaacttcat

SEQ ID NO: 587883 - DNA, 74 bp, Homo sapiens
tgattttgccatatgtatgcatccacaccaggagaggagtgtgccatctgcttctatcacgctgccaacacccg

SEQ ID NO: 587884 - DNA, 98 bp, Homo sapiens
cggcgagcgccgaggggacaggccgagcgcggggcgccggaggcaggttccccctcagcccttcctggagatgcagcagctccgcctggcgaggcagc

SEQ ID NO: 587885 - DNA, 82 bp, Homo sapiens
gatgctggtggcagggcatgaggacagcaatggttgtatcaactatgaagtggggtgccgaggctcaggcagcatgacgacg

SEQ ID NO: 587886 - DNA, 96 bp, Homo sapiens
aaaccatctggtatctgaagtatcattggccttgaggaagaagacatgctctacagtgctcagtctttgagagccaacacagatctatagatttct

SEQ ID NO: 587887 - DNA, 75 bp, Homo sapiens
tgggaattatggatgatgctgcagagtgctttctgtttgagctcttctctggcttcttgaaatactttcctgggg

SEQ ID NO: 587888 - DNA, 117 bp, Homo sapiens
ccgctgcctgccgaggtgcgggagagcctggctgagctggagctggagctgtcggaagacaatgcagatcttcgtgaagactctgactggtaagaccatcaccctcgaggttgagcc

SEQ ID NO: 587889 - DNA, 75 bp, Homo sapiens
tggaaaaagcagggaggttatgaggcttaataaagaagtttcagctcctggcatcagctctattcaaatctggtt

SEQ ID NO: 587890 - DNA, 73 bp, Homo sapiens
tcatcacgccctttctcttgctcaaggacgcaaagtaccacatgcagcgctgcattgactctggcctctgggt

SEQ ID NO: 587891 - DNA, 96 bp, Homo sapiens
caatcagcgagactccgtgggcgtaggaccctccgagccagactgtgccctgtccacggtgcctcctgcatgtcctgctgccctgagctgtcccga

SEQ ID NO: 587892 - DNA, 75 bp, Homo sapiens
cgtgatccagaagtccagagctgaggactgcctgtttgcagttgggagctgaaagtgccgacagcattggtgccg

SEQ ID NO: 587893 - DNA, 100 bp, Homo sapiens
ttgaggagttgctggccaaaggggcctgtgtacttgctgtagatgaaaatgacatatgtagagtgtgtcggtcagaaggaacacctgagaaaccgcttta

SEQ ID NO: 587894 - DNA, 50 bp, Homo sapiens
ttcctataaatctcgcccaaacaggaaagataacgaaggaggcccaactt

SEQ ID NO: 587895 - DNA, 100 bp, Homo sapiens
taaagctcttcatgcaaggaaacataagttggaggttctggaatctcaggagtctaccatggctcaagaatctcccaaaaattcagcagcagaaattcca

SEQ ID NO: 587896 - DNA, 75 bp, Homo sapiens
gtcatgaggagccgagacctccaactcgaggacagagcgggatgccaccagcttgtccaaagggaagttccagga

SEQ ID NO: 587897 - DNA, 75 bp, Homo sapiens
tcactcacttaggaaacaaatccatcaataaagccatggagaaagaccatgaagaatacaacattggcgtcctag

SEQ ID NO: 587898 - DNA, 100 bp, Homo sapiens
gaaagggggccttgttgagtccgccagcgctgggatatgaagcttcgtcatcttggactcagtaaaagtgattctagcaatagtgattccactcagagtc

SEQ ID NO: 587899 - DNA, 89 bp, Homo sapiens
cgcgcggccgggctggcgatggaagatggaaggaaggagcgcagcggtcataaagaaggaaactggattttggagagactttggatttg

SEQ ID NO: 587900 - DNA, 91 bp, Homo sapiens
ggggccgctctgggatcccggccaccagcaattgtccgggggatatgagactttctactcggaatatcctgagtgttgcgtggatgtaaaa

SEQ ID NO: 587901 - DNA, 100 bp, Homo sapiens
aataacacagccagtcagcaagcagcatcacaagctcagcctggacagcaacagtttttccagaaaggaggagtcaaggaagcccttagtgaacgagaac

SEQ ID NO: 587902 - DNA, 98 bp, Homo sapiens
ttcaaagattctttgtagcagacactgcaaatgaagctctcgaggctgctaagagactaacaataccaagtttccaggcccgaagagcatcccagact

SEQ ID NO: 587903 - DNA, 100 bp, Homo sapiens
catggggctggtgaagcaatgcttgtcatctctttataagaagaatattcagaggctaacaaaggctcgattccttttgtccaaagtgaacccatctcag

SEQ ID NO: 587904 - DNA, 75 bp, Homo sapiens
caggcggagagacccgccgccagtaaacattgctatcttcagaaattaaggaatgagaggcaaggaagaaaggac

SEQ ID NO: 587905 - DNA, 83 bp, Homo sapiens
aaaggaagaggggcctgcagcctgggagggccccaaccagaaaataatgttgagtttccatgaagaacaggaagtactgccag

SEQ ID NO: 587906 - DNA, 98 bp, Homo sapiens
tggaatctatgggattttcagctcgatacaatttcacacctgctactctccagagagaccggatcttcaaacattttaccaggaagcgccaaagggct

SEQ ID NO: 587907 - DNA, 88 bp, Homo sapiens
tttctcaaggcacgaactgagctgatccttgccccagggtgaaggttgccgaactgtccccctggctggacatgtggggtttgacagc

SEQ ID NO: 587908 - DNA, 100 bp, Homo sapiens
gtcaggcaggccttggcgtaccttgagcagaggttcaggccctctgtggttaaagactgtatccatgctgtgctcaaggaggaactggcaaatgctgaat

SEQ ID NO: 587909 - DNA, 95 bp, Homo sapiens
tcactaccaagttcgtgtcgctgctgcaggaggccaaggacggcgttctggatctcaaagcgggggcaggaacaaaggaccggaccctgattcgc

SEQ ID NO: 587910 - DNA, 98 bp, Homo sapiens
gaaaagaggaagagcaaccatttgaaccatgaggtggaatttaattctcctccccttgaatatgggctggacaaagagaaaaatggtagctcaacagt

SEQ ID NO: 587911 - DNA, 83 bp, Homo sapiens
cttagctgtgctcgcgctactctctctttctggcctggaggctatccagctttaagaggcgagttcaggagtccacgcaggtg

SEQ ID NO: 587912 - DNA, 83 bp, Homo sapiens
cgcgacaggaacccctccgagacccagtccaaaagatgtcgtgatctcaacagcttgtcacccaacagaaaacatcatcgcct

SEQ ID NO: 587913 - DNA, 50 bp, Homo sapiens
gagccatctgtggtgccaattgaaggtacacctgccgtacccttttcgaa

SEQ ID NO: 587914 - DNA, 74 bp, Homo sapiens
ggctatgatgatcgggactactatagcagatcatacagttttacagctcccagcacagtaggaaagagaaattt

SEQ ID NO: 587915 - DNA, 98 bp, Homo sapiens
gcggccatggaggacgagcggaaaaacggagcctacgcttcgaggcagagaatgggccgacaccatctcctggccgcagccccctggactcgcaggcg

SEQ ID NO: 587916 - DNA, 75 bp, Homo sapiens
cccagacaagtccccagggaatgccacagcatcctccagcacctcagatcctgtttgaccaaactcagagatcaa

SEQ ID NO: 587917 - DNA, 90 bp, Homo sapiens
tgtcagaccaacagaggggcaaatcagagtgaagaggaagccagaagatgggagagacatttttgaactttcctcttgctgatgacatga

SEQ ID NO: 587918 - DNA, 100 bp, Homo sapiens
ctgtcaccttgacaacacagcccatggcaacatggcctggctgaggccgcggaaggagcagggcacatacgccctgtccctcatctatgggaagacggtg

SEQ ID NO: 587919 - DNA, 76 bp, Homo sapiens
ctttccaagtacatgaaaaatccattctcttggtgtcactgatgaagcctgctgggagcgtgaatgacatggccct

SEQ ID NO: 587920 - DNA, 50 bp, Homo sapiens
ctaaagcagcgtgcgttcagccctggggctccataaaaatacagactcac

SEQ ID NO: 587921 - DNA, 83 bp, Homo sapiens
gggagattcagccgtgaagcaagtgcagatagatggcctttttggtgccctggttgtcagatgttggaaagcagtaggacgga

SEQ ID NO: 587922 - DNA, 90 bp, Homo sapiens
actctccagcaccagcttccagttagtggatatagcacaccatccccagccagtgctggagaatctggtaaaagcaccattgtgaagcag

SEQ ID NO: 587923 - DNA, 75 bp, Homo sapiens
gtggcgactgtgtggagaaggaatatcccaaccgggaagaggagcaggacttggatggtgagaaggggccatcat

SEQ ID NO: 587924 - DNA, 83 bp, Homo sapiens
acagagaatacaagaggattatcttagaattttaagatacttcaggtcagatgatgatgatgcggagagtaggagctccaggg

SEQ ID NO: 587925 - DNA, 74 bp, Homo sapiens
accaagggcctccgtctggatttccaaggaagaatttcctctgaagcaccgggagcaaagcttgtattggcttg

SEQ ID NO: 587926 - DNA, 90 bp, Homo sapiens
tgctggaccagctcatgggcacggctcgggacgttcttcccgtccttccctcctgccatcccgggactgcccaccctgctcccacacccc

SEQ ID NO: 587927 - DNA, 75 bp, Homo sapiens
gcccagattctgccaattcgttttcaggagcatctccagtgttatagttttgccgctggactcttccctcccttc

SEQ ID NO: 587928 - DNA, 98 bp, Homo sapiens
cccgagaggcctccaaaaccattcccgcggagaatcaactctgaacggaaagctggcagctgtcagcaagttgtcatggatgatgatgatgactcgtg

SEQ ID NO: 587929 - DNA, 100 bp, Homo sapiens
caaagatttactttcccatccgtgactcctggaatgcagaggatcttatgtctctccttgatgccgacattcattctgcccacccaagtgtcattattga

SEQ ID NO: 587930 - DNA, 90 bp, Homo sapiens
tggaggagattatgaaagatttggtttgccaggttgggctgtagcatctagcactgccagtgaaagatgtagaagataaacctgaacaac

SEQ ID NO: 587931 - DNA, 100 bp, Homo sapiens
gtttgtttgaaggtctcgcgagatcgagctatagaaagcgcaattggtggtaacgcttatcaacacagcaaagtgaaccagtggaccacaaatgtagtag

SEQ ID NO: 587932 - DNA, 75 bp, Homo sapiens
atgtggatgaatatgaacattatgagtactatactggcaattgctggagaagattttgcaattgttgcttctgat

SEQ ID NO: 587933 - DNA, 100 bp, Homo sapiens
caggagcggagagtttgctccaccaggccaggagaacatgatcgtgtatgtggaaaagaaagtgctagaagaccctgccatcgccagcgatgaaagcttt

SEQ ID NO: 587934 - DNA, 100 bp, Homo sapiens
tgtggatcgctgtgatcgtcacttgcttcaaggttactgactttttatgatgtttggtggctatgagactatagaagcatacgaagatgatctttatcga

SEQ ID NO: 587935 - DNA, 83 bp, Homo sapiens
agcagccgatccagcctgcggagcctgtggggcaggttttgggatttgagattgacgcggtgaactctgtccagttttcaaac

SEQ ID NO: 587936 - DNA, 100 bp, Homo sapiens
ggcagcgcgggatcccagcctcaggcgtgcgcggacggtgtgcgggccagaggcattgatgtgcagcaggtttctttagtcatcaactatgaccttccca

SEQ ID NO: 587937 - DNA, 76 bp, Homo sapiens
agaacgtgcagttgtatggaacgagggctggtttttaagtttggccgcactgaagacttatggcagtgaacacatc

SEQ ID NO: 587938 - DNA, 100 bp, Homo sapiens
cgcaagtccatgtacacgcgagattataagaagcttgggttcattgtctgtatgagctgttggctgctctgccagcccagctgcagccacatgtggatag

SEQ ID NO: 587939 - DNA, 100 bp, Homo sapiens
ccgctgtcggcgggaagcggcgatcctgccaccgggaggtgtggaagagccgggtgtaggagctgcacgatctgggaacctcacgtttatggtgggagga

SEQ ID NO: 587940 - DNA, 100 bp, Homo sapiens
tggaccaggagaggcccgcggtgaccgaggcctgggccccgggccctgggaggagcggggacactgaggacctctctccaaattggcctctcaactcaca

SEQ ID NO: 587941 - DNA, 82 bp, Homo sapiens
ttttttcaggcaattgaaaacactgcctcagtatctgaacacaaggtgctgatagtctgcagcacaggtttagctgggatta

SEQ ID NO: 587942 - DNA, 100 bp, Homo sapiens
gcccagagtgccctcttcttgcagcatggcctggccacccagagggcccttgtgtccaagaactggaagaagttcgggaactcagagtttgacccccccg

SEQ ID NO: 587943 - DNA, 97 bp, Homo sapiens
acgggcattgcctgcgaggctggccgagaaatcccgtttcgtgccctcgtgaggctggcatgcaggatggcaggacagcccggccacatgccccatg

SEQ ID NO: 587944 - DNA, 49 bp, Homo sapiens
agacaaccttcttttggacagcaagcaatacgaggattctctccaccac

SEQ ID NO: 587945 - DNA, 74 bp, Homo sapiens
aagagcaaccgaggtttcaatctgcggtggtcctggctctgccatatgacacccccgtgcccggctacatgaat

SEQ ID NO: 587946 - DNA, 95 bp, Homo sapiens
cgaggaggcagccaagctcgtagcctgccactccgtgcaaatgagccgtcagactgctacagcattacctaccggtacctcgaagtgtccaccat

SEQ ID NO: 587947 - DNA, 89 bp, Homo sapiens
tgcccaggttgtaggaatgacaaccacagctgctgatgaagaagcatttgaagataattctgaggagtacataaggagagatttggaag

SEQ ID NO: 587948 - DNA, 98 bp, Homo sapiens
ctgcgccaccacgtcacgcacacgctcggcgctgcgatccgcgcatataacgcgggacgaccctgggacagtctccactggggcagatccagctgacc

SEQ ID NO: 587949 - DNA, 75 bp, Homo sapiens
tgcgctgttccacctcattcaacttcagggaatctggaaacccaggaaaataccaaatccagatttctttgaaga

SEQ ID NO: 587950 - DNA, 75 bp, Homo sapiens
ttctggcagaaacagaggactaattttggcagttctaaatttgaatttgaggcattgtggtgtgacttcattata

SEQ ID NO: 587951 - DNA, 75 bp, Homo sapiens
agaaagtgaaatcagaggagatgtaactatcggcatgtgagcagcagtgacagagtgggcaagccttaccgtggc

SEQ ID NO: 587952 - DNA, 83 bp, Homo sapiens
gggctttcccagtcctccgtgggattggactggctaaggacgatcagctgaaggttcatgggttttaagtgcttgtggctcac

SEQ ID NO: 587953 - DNA, 75 bp, Homo sapiens
caaaagagttgattgaaattatctctggtgctgcagctctggtcaactgctatgatgtgtttggagcccagtcac

SEQ ID NO: 587954 - DNA, 100 bp, Homo sapiens
agcccagcccctttacacacccacacctcctcagaccagcaatcaaggagaccgcgaaggcgtacattcccgggtgttgcttccaggagaaaccctgaac

SEQ ID NO: 587955 - DNA, 100 bp, Homo sapiens
cgcgtagcaggtggaaggagggagggagccgcaggcgcagacccacccgccatgaagccccccgcaggcccaacagcgccctggaatcctgctccttcgc

SEQ ID NO: 587956 - DNA, 60 bp, Homo sapiens
atagctctgaccacccggcgaagtctattatcctcccagtccacaacgctgaaccgtggc

SEQ ID NO: 587957 - DNA, 98 bp, Homo sapiens
agatattgttgctcaggagcttctctacaggcactgcattgatctcttcttagatttcattactgtcttcagaaaactcatgatgatcctggccatga

SEQ ID NO: 587958 - DNA, 75 bp, Homo sapiens
ggagccattatttatgtcatcaagaagaatgacgatgagtaaccagagagcacagagaaatgctggtgaaactgg

SEQ ID NO: 587959 - DNA, 100 bp, Homo sapiens
aatacttgggtgacatctgcctgagagatctccaagaattacaggacaagcaggaggacatgaagactattttggagggcatagatccggccaagcatca

SEQ ID NO: 587960 - DNA, 75 bp, Homo sapiens
gaactcttaacggccgatgcagctcttccaaagctaagtgctacagctagaatgaagcacatcaacctatcattt

SEQ ID NO: 587961 - DNA, 100 bp, Homo sapiens
ccagcagctgtcgccgccgctctcagtgtcatcttgcattacaacatataagaagacaccacctccagtcccacccagaactaccacgaaacctttcatt

SEQ ID NO: 587962 - DNA, 50 bp, Homo sapiens
aaagcccccaaaagcagctattcaggttagcatggcctcattgaaagaac

SEQ ID NO: 587963 - DNA, 87 bp, Homo sapiens
acactttgcgttcgggctgggagcgtgctttccacgacggtgacacgcttccctggattggcacgtttcctgtggcagcctaagagg

SEQ ID NO: 587964 - DNA, 82 bp, Homo sapiens
cgggaaagataccagctgcatgacagaattccacaaggcatatgcccagttggtcgatcttggcactcactaacaccagttt

SEQ ID NO: 587965 - DNA, 76 bp, Homo sapiens
agaagagatgcgctcacggggcatcttaggacacattctgttgattcgggaggagcatacttacctcgacaagcag

SEQ ID NO: 587966 - DNA, 100 bp, Homo sapiens
cctccttcgaagtttcctgtcacaactgtcctcttgacagcatggatgggattgaggaatgatttgaaagcagccttggataagattgatcagcagtacc

SEQ ID NO: 587967 - DNA, 83 bp, Homo sapiens
tccttgtgggcatgatccataatcggtttcaaggaggatcagctgatttattcggaggatttgctgactttggctcagctgct

SEQ ID NO: 587968 - DNA, 75 bp, Homo sapiens
ggcatcctcaggcggctgaagaagtatgacaactggcaggaggaagagcgcaggcgccgtgaagaagagatgcgg

SEQ ID NO: 587969 - DNA, 110 bp, Homo sapiens
gacccctgcaggatggcgccaccacagatgcaaacggacgggccaacgccgtggccagctccactgagagaaccccaggattatcctgatgcccttatcaccaactacta

SEQ ID NO: 587970 - DNA, 138 bp, Homo sapiens
tccagggcttgggaaggggaaggaaacctctctgaaatctgacacctgctctcccggcaaggaaacttcgcaggctggtgtgggccatgtttgaggattgccccagcattcagttctatgagtaataaatatccacag

SEQ ID NO: 587971 - DNA, 75 bp, Homo sapiens
gaccgagaccgcggccgggaccgaggattgtcagaagcttcagttctggtaaaagagaaggtggggactttgttt

SEQ ID NO: 587972 - DNA, 83 bp, Homo sapiens
ccgcgctcggcggccgccagcaggtcaaaatgcagatcttcgtgaaaacccttaccggcaagaccatcacccttgaggtggag

SEQ ID NO: 587973 - DNA, 83 bp, Homo sapiens
ccttatcccggagagctgacaatgatgaatctcaagaatttccgctgcctgtgcactcatgaaaagggctttggctttaaggg

SEQ ID NO: 587974 - DNA, 87 bp, Homo sapiens
acactccattgggatcctagctggctcgagtgcagtagcgagatctcagctcacctcagcctctgtctcctggactcacatgatcct

SEQ ID NO: 587975 - DNA, 98 bp, Homo sapiens
gcgttcctgttacctctcatcattgtgttaatggtgaagcacagcgattcccacaaagaaacagccttggtataatagcacgttagcatcaagacgaa

SEQ ID NO: 587976 - DNA, 87 bp, Homo sapiens
aagatgaagaatggctttcccagtatgtgcaacgtatagagaaacagtttcttttgtatgcctactggataggcttaggaattttgt

SEQ ID NO: 587977 - DNA, 100 bp, Homo sapiens
gcatacaccgagagagtgaggagccagacgacaagcacacactatggcgctgaaacggattaataagatgatgacttttttcatgaactcccagaaactt

SEQ ID NO: 587978 - DNA, 100 bp, Homo sapiens
agacatcagcattactgagctctaccgattggtggtgttcccactgatgaagagcaggcgactgggttggagagggagatcatgctggctgcaaagaagg

SEQ ID NO: 587979 - DNA, 100 bp, Homo sapiens
gctgctgaaccaccggcctgtgactgctgtggagatccagctggacccttgaacatctgtgaagaaatgactattctgcatggaggcttcttgctggccg

SEQ ID NO: 587980 - DNA, 100 bp, Homo sapiens
tttccttagagagtgaggaaagaggggagctagagagaatcctagcagatcttgaggaagaaaacagagctcccagctcctccagcagccgacaggaggc

SEQ ID NO: 587981 - DNA, 99 bp, Homo sapiens
caaggatttcagcaacaatgcctctgttcaaactcccagattgttcagattccattctgtggggaaattgactgtgaggactggatcaaaaagaccact

SEQ ID NO: 587982 - DNA, 83 bp, Homo sapiens
cccggatgcaggacagacccctcagttaactgcctgtatccatggatcagctgctcttctatacccaatgtattggcaacaca

SEQ ID NO: 587983 - DNA, 50 bp, Homo sapiens
ggagagaaaagtctctaagtttgtggtccaccttcatccgaagaggctga

SEQ ID NO: 587984 - DNA, 75 bp, Homo sapiens
atttcaaagatgaagatgaaaccaagcccttgacacatcccactcaaactgcatttttatccagcgttgatcttc

SEQ ID NO: 587985 - DNA, 88 bp, Homo sapiens
cgagatgtcgaagccgccacccaaaccagtcaaaccaggttgtactcagactatctctactttgcaagttcgaataaatccgcggacg

SEQ ID NO: 587986 - DNA, 75 bp, Homo sapiens
gggaccagcgtctcggaggcgccgcagattatggtgacaagctgaacatggagctgagtgagaaatacaagctgg

SEQ ID NO: 587987 - DNA, 100 bp, Homo sapiens
ctaaagtccagcatgtcatccattaccagggttttaaccaagaagatctggaagaagaaaaaggtgaaacacaggtaaaagaagcagaagattcagattc

SEQ ID NO: 587988 - DNA, 100 bp, Homo sapiens
agacgagcagccttcagggagcgtggagacaggtgctggagaatctggtaaaagcaccattgtgaagcagatgaggatcctgcatgttaatgggtttaat

SEQ ID NO: 587989 - DNA, 100 bp, Homo sapiens
gaagtattgcttcactccttctcagtcggcagtctgcgtctcccagctgggtcctgacatctggcatggaagggttgtataccggaccgtgtaccgtcag

SEQ ID NO: 587990 - DNA, 75 bp, Homo sapiens
atttaagcactgctgcactttatgagctttctgaaaaggatatgagcatgctcgaggagaggattaagcggtcag

SEQ ID NO: 587991 - DNA, 76 bp, Homo sapiens
gaccaggattcaagatctggacataatgagagggatcgtgatctggaactcgctgctcgaattggacaagctctct

SEQ ID NO: 587992 - DNA, 83 bp, Homo sapiens
ctcagatctcctgaacctgtttctgctcagattgaggaaacaatggaagagtcctcctgcatatgcccaagaggattgggagt

SEQ ID NO: 587993 - DNA, 90 bp, Homo sapiens
gtttttagtccattgactatgcagcctaatggttggatggcaagcatgtggtgtttggcaaagtgaaagaaggcatgaatattgtggagg

SEQ ID NO: 587994 - DNA, 74 bp, Homo sapiens
gaagacatacttcaggcattggtggtgtgtccaaatctgctgagatgggaaagggctccttcaagtatgcctgg

SEQ ID NO: 587995 - DNA, 126 bp, Homo sapiens
aagaagagggggatcttccccaaggtggccaccaacatcatgcgagcctggttgttccagcacctctcggtgacaaatgtgtcatgcctggagacaagctccagcgccagccctgctagagactcg

SEQ ID NO: 587996 - DNA, 82 bp, Homo sapiens
cagaatagacctgaagacaaaaatccagaagtacaagcagtctgtgaaagatgtcatgtatatctgcccatttatgggagca

SEQ ID NO: 587997 - DNA, 98 bp, Homo sapiens
aaaaccagatgtctacaagagccctgcttcagatacttacatagtttttggggaagccaagcaatctgaagaggatgtaagtcagtttgattccaagt

SEQ ID NO: 587998 - DNA, 100 bp, Homo sapiens
catgtccagagtctggagccggaccccggcacgcccgggagtgagcggacagcattccaaaatatgcccggtgctatccgcccagctgctcctagaccac

SEQ ID NO: 587999 - DNA, 82 bp, Homo sapiens
cgggctgcggcgtgtgcgcgcccgccagctgctccggagatacgctcaccatggatgatgatatcgccgcgctcgtcgtcga

SEQ ID NO: 588000 - DNA, 86 bp, Homo sapiens
atcagaccgtacaggttgagggatgggactggaaatcaaatgttacaggtggtgaaattgcctctacctttgatcacccagaactg

SEQ ID NO: 588001 - DNA, 100 bp, Homo sapiens
gagacctcggtgtcccggatccacagaagcattgctgaatgtcacaaacataacaatggtcagcccatttggtttaccctgggcatcctggaggctctca

SEQ ID NO: 588002 - DNA, 90 bp, Homo sapiens
gaagcaggagaagcagcaattatcgtccgagcaggttgaatataagctgggattccaagtggacaatgttttggcaatggatatgcccca

SEQ ID NO: 588003 - DNA, 87 bp, Homo sapiens
caattcagaatccgctttatccaattacagtgagaacatacatatttaccttcctactcagttctcggttatttatgcatccgtatg

SEQ ID NO: 588004 - DNA, 101 bp, Homo sapiens
cctctgctgcaccacttcatggctgcccggcagctctgacagactcagaggacgagtccccagaagacatgaggctcccaccctatggcctttgtgagcgt

SEQ ID NO: 588005 - DNA, 100 bp, Homo sapiens
accttctggaccgagtgatgataatccggaccatgctgtatactccacaggaaatgaaacaggacctgaagacccttccagcatgccagaggaaagttcc

SEQ ID NO: 588006 - DNA, 100 bp, Homo sapiens
tatactgtgtgacaagactcaatgatcggcagtttgttcacgaccctcaacttggctactccctgccttgtgtgggggacagtggtaaaagcaaaggagg

SEQ ID NO: 588007 - DNA, 82 bp, Homo sapiens
gacaaacagcccgcccgaccccgtcccgaccctggccgccccgagcggagcctggaggtattgttgcagcatctggcagtga

SEQ ID NO: 588008 - DNA, 96 bp, Homo sapiens
ggatgaagaacgggatcctctgctgcatagtttcggtcatctaaaggaggttttaaacagtataacagtgcctgaagacctctcattagaagagag

SEQ ID NO: 588009 - DNA, 98 bp, Homo sapiens
gccgaagaagcatcgttaaagtctctcttcaccctgccgtcatgtctaagtcagagatccagtctcccactttcatgcctctgatcatgtgcccaagc

SEQ ID NO: 588010 - DNA, 98 bp, Homo sapiens
taccctgacgccagcgtcctgctgctttgcttcgatgtcaccagcccgaacagctttgacaacatctttaaccgggctggagtgcagtggtgcaatct

SEQ ID NO: 588011 - DNA, 124 bp, Homo sapiens
gcgtcaccgccgcccccccagacaagatggacaccgcggaggaagaccggccttattgtcgcctgctaccacggctttgtggataccgtggtggccttagcagagtgcccccacgttgacgtca

SEQ ID NO: 588012 - DNA, 75 bp, Homo sapiens
cgccatccagccaccattccaagccgtggtccttcagcatatctctgtgctgcagacaacacaccttcctgatgg

SEQ ID NO: 588013 - DNA, 100 bp, Homo sapiens
ggccgccggctccgcggcgatggcgctctataacccctaccgccacgacttcagaagaaacacctacaacaggagaaggagtgcctcatgtccaagctgg

SEQ ID NO: 588014 - DNA, 100 bp, Homo sapiens
gaaagctcatgaactcaaggagcacaacggacacatcacagggcactaaattcaaagaactacaagacttcttcagtaccatcctattagcaactggaag

SEQ ID NO: 588015 - DNA, 87 bp, Homo sapiens
cgggacttcctctttcctcacctgcgggaggagatcctcagcggcgccttgcggagggaccccaactactccaaaggattcggcggg

SEQ ID NO: 588016 - DNA, 75 bp, Homo sapiens
caagactctcttcgctctttgcatcttaactgcaggatatgttcaaggaatgagtgatttactttcccctctttt

SEQ ID NO: 588017 - DNA, 75 bp, Homo sapiens
taataaagtctcccttaaaatgcaccctccttccacctggccaggaatcagggattgttgggaacctgaggtctg

SEQ ID NO: 588018 - DNA, 75 bp, Homo sapiens
gcgctgcagcgcttcttcgaagatttggtgttgtactgcgaggcattcctgaccacctacaggaccttcatctcc

SEQ ID NO: 588019 - DNA, 75 bp, Homo sapiens
ctggctcttgccctcatcctggttctggaatcctcagttcaagcccaccttgggacaccttgactccaagcccag

SEQ ID NO: 588020 - DNA, 98 bp, Homo sapiens
gcagatggcggatgccctgcagtacctgcagaaggtctctggagacatcttcagcaggccaaacgtaccaagaaagtcgggatcgtcggtaaatacgg

SEQ ID NO: 588021 - DNA, 100 bp, Homo sapiens
atgctgcagaaatcatttcggctctcatgttcctccatgataaaggaatcatctatagagaccccgcagatgtgtcttcagagagtgacagtgccatgac

SEQ ID NO: 588022 - DNA, 100 bp, Homo sapiens
aagccaactcgaaaaagccgtacaaaaaataagcaaaagcgtcccaggagggaagacaaaggcgctttggctaagctggtggaagctatcaggaccaatt

SEQ ID NO: 588023 - DNA, 74 bp, Homo sapiens
ccgggccgtgagggccttggaaccggaggtaagactttgaccccgacgcaggcttcagtgattgccgcggatca

SEQ ID NO: 588024 - DNA, 100 bp, Homo sapiens
gagttcagctcctgagtcatcttcatactttggctgcagttgcacaaacaaaccagaaccagctccatctttgtgaagaagaagctaaatttggtgccag

SEQ ID NO: 588025 - DNA, 100 bp, Homo sapiens
caaactcgaagaacagctgtggaaagaagttgcaaaacactggccctgaatcgtgtgcacttacttgggcgagtgggtcaggaccctgtcttgagacagg

SEQ ID NO: 588026 - DNA, 109 bp, Homo sapiens
gacgatttcctggggggcatggagtgcaccctggggcagtctattgtaggggcagagggcttgtcccttgcattccggcacatggccagctccctgctgggccactgca

SEQ ID NO: 588027 - DNA, 100 bp, Homo sapiens
ccctgggggttgcagctttgtataagcacctgtgaaactggaaaaacatctgcacagtgctagatctgaagagggaagactatattatgatggtgaatgg

SEQ ID NO: 588028 - DNA, 73 bp, Homo sapiens
tgcctgcccggtgtctgcccctgaggagggccttgggaactccaagacagaatggcccgaggcctggacactc

SEQ ID NO: 588029 - DNA, 86 bp, Homo sapiens
cggcggggctgaggcggccgcggggcccgagcgcaggagcatcagatccatgctgctgctgactcggagccccacagcttggcaca

SEQ ID NO: 588030 - DNA, 100 bp, Homo sapiens
cacctctggctgcggctgcgctccccgccgcccgcctgcgcctccggggccggccctgcagatccccaagtaagcccttggcacggaaattaatggattg

SEQ ID NO: 588031 - DNA, 100 bp, Homo sapiens
tttcagcttcctgctatgtgccctctttgttcctaaagaaggtgatgagcctggctccagtctgctggcgaactcccctctgatggaggatgctccacag

SEQ ID NO: 588032 - DNA, 98 bp, Homo sapiens
actgtgaggacattgccatgaacttccttgtctcccacatcactcggaagccccccatcaaggagttttctgttaacatcaccgaagactttatcgag

SEQ ID NO: 588033 - DNA, 75 bp, Homo sapiens
aacaagcaagcatgcagcttactgcttgaaagcctgaagcaggacattctaaatgaaaagactgaattggaagca

SEQ ID NO: 588034 - DNA, 83 bp, Homo sapiens
tgctttcggggatgcagctggccaagctgatccgacagagaaagagccagcccctgggcaacaaagtggaaatggagattgtg

SEQ ID NO: 588035 - DNA, 76 bp, Homo sapiens
gcaaggtactctggctggcaaatagcctatattctgtgggctttgaaatatcagtgatgtataatgaatctgacct

SEQ ID NO: 588036 - DNA, 103 bp, Homo sapiens
ggccgacttcgatgatcgtgtgtcggatgaggagaagatcgtcagtatttaaacagatcacatcatgcgtgagtacaagctagtggtccttggttcaggaggc

SEQ ID NO: 588037 - DNA, 97 bp, Homo sapiens
tcgtctagggggtgatgaagatggttatgaagaagaagaagatgagaacagtagacagtcgttgtggtcagaaatgagaagacatgaaatgttgagg

SEQ ID NO: 588038 - DNA, 102 bp, Homo sapiens
ctcccggggaagaagctgctctctgagaaaaagctggtgaggtcccagcttgaagagaaagaaaacaagaagttccctgtgtttaaggccgtgtcattcaag

SEQ ID NO: 588039 - DNA, 101 bp, Homo sapiens
cttgctgggaaatcgaagattgaggactactttccagaatttgctcgctacactactcctgaggatggctattgagggcacctacattgacaagaaatgcc

SEQ ID NO: 588040 - DNA, 90 bp, Homo sapiens
aaatgaatttgttagtgctgtgtgctggagggcactaccagatggggagtacgagacccaatctagtgcagaagccaaatttgtgaagca

SEQ ID NO: 588041 - DNA, 82 bp, Homo sapiens
caagaacagagagagaggtggacagatctgagagatactgagaaaattgtacaagctggagataaggaccttgatgggcagc

SEQ ID NO: 588042 - DNA, 100 bp, Homo sapiens
atcctctagtagccacggtgtggcagctgctctgaaccaggacctggacccggacccaaagtgccatgtctttaataatgtgacagtgatgataacatgg

SEQ ID NO: 588043 - DNA, 50 bp, Homo sapiens
tgtaatatttcttttcactcccaggttatcaatactctggctgaccatca

SEQ ID NO: 588044 - DNA, 119 bp, Homo sapiens
ttctccgacctcttcaagcgttttgagaaacagaaagaggtgatcgagggctaccgcaagggaaagcttcagaagcatcaagcatttgaagctgaagtgcaggccaactcaggagccat

SEQ ID NO: 588045 - DNA, 98 bp, Homo sapiens
gagaagaatggaggaccatccataattcctatctttaaaagagaaaaatccagttacactcttaaaggaattgtcagtgataaagtctcgatatcaaa

SEQ ID NO: 588046 - DNA, 110 bp, Homo sapiens
actagaagaaactacagaatatgacggtggctataccagggactctgttctgattagttttacatgtggcacccataaaagatgaggctgagaacacggaaagcttctca

SEQ ID NO: 588047 - DNA, 100 bp, Homo sapiens
acaactagtgaatatgaaaaggaaaaactgaatgaacggcttgcaaaactttcagatggagtggctgtgctgaaggccatcagcaagcagtttattgtcc

SEQ ID NO: 588048 - DNA, 100 bp, Homo sapiens
aaggattccaagtaactcttatttggttgcttcatgtgcgaaatggaaactgcaaatatcatttgggtgaagaaacatttaaattagctcagacatatat

SEQ ID NO: 588049 - DNA, 100 bp, Homo sapiens
gtcagcaaatgcaggtgctatactcagccagtttgagaaagtctctacagaccttgaataatcttggatgaagctgctttacatctatctgacaaatgca

SEQ ID NO: 588050 - DNA, 100 bp, Homo sapiens
gctccgagcagggaccgcctgctgcactttgggttcaaggcgacactccagcgattcaagcgctccctctccctcaagaccatcctccgaagtaagagct

SEQ ID NO: 588051 - DNA, 87 bp, Homo sapiens
aagagaggttttgaattcacgcttatggtagtgggcagtatttggcagtcgtattcagagataaacccctggagctatgggatgtta

SEQ ID NO: 588052 - DNA, 82 bp, Homo sapiens
cttgcccctcggccgggcggacgacaatgcagatcttcgtgaagactctgactggtaagaccatcaccctcgaggttgagcc

SEQ ID NO: 588053 - DNA, 96 bp, Homo sapiens
tcctgctgctgcttttcagggatggaggcagaagaagctgctgctaaagcatcatcagaagtgaacctggcaaacttacctcccagctatcacaat

SEQ ID NO: 588054 - DNA, 75 bp, Homo sapiens
ccgccgctgcgggcccgctccgacgcggaagacaaatttacatgtattggagaccagaccagaagcccttctgaa

SEQ ID NO: 588055 - DNA, 100 bp, Homo sapiens
cttggagaaaatgatggggaaacaagagctttgagaggacatgtactcccaggattccatagatctccttgctaactcaggactacagtttcagaagcat

SEQ ID NO: 588056 - DNA, 100 bp, Homo sapiens
aaccaaatttgactccggttcagcctttctgagaaaagtctacagcattctttctctgcaggttctcttaactacagtgacttcaacagtttttttatac

SEQ ID NO: 588057 - DNA, 83 bp, Homo sapiens
ttctgttttgcctgaatacatgatttaaacaagagatttccacagaagtgcacttgccggcggtcccaacccagcaggagaag

SEQ ID NO: 588058 - DNA, 74 bp, Homo sapiens
gcagctgctctcccagccgcgccagcctcctcactggcctgccccagggcagctgtgcggagggtagtggcagc

SEQ ID NO: 588059 - DNA, 75 bp, Homo sapiens
cgcccgggacgcgcggcggcaccgggaggccgggccgagcgatgtcaagccctccaacatcctagtcaactcccg

SEQ ID NO: 588060 - DNA, 83 bp, Homo sapiens
gtgttatcctctttgcagaccatcccagaatttgcagagactctagaacttattgaatctgaccttaaaggctttgatccagg

SEQ ID NO: 588061 - DNA, 100 bp, Homo sapiens
gtcttcagatcttcacagcacagttcctgggaaggtggagccaccagcctctccctgtattctaccttgtaaatactgttatttgtatatactgtaaatg

SEQ ID NO: 588062 - DNA, 100 bp, Homo sapiens
tcagagagggaagagattcagccagcacactcctcgcgagcaagtgccaccatggcaactgcaccatacaactactcttacatctttaaatatattatta

SEQ ID NO: 588063 - DNA, 88 bp, Homo sapiens
cccgcggttacatccaggcccggctccacctgcagcatgagaatcggcagcaggacttatcaaactggtttcaaagcacagagctcaa

SEQ ID NO: 588064 - DNA, 117 bp, Homo sapiens
ggacaatgacaagtacatcgccctggatgagtgggccggctgcttcggcatcaagcagaaagatgattgaagaatcactgaagattaaaataaaaaaggaattagaaatggaaaatg

SEQ ID NO: 588065 - DNA, 100 bp, Homo sapiens
ttgaagggccattagacctgataaattatatagacgttgcccagtggagctgggcaagaagtaggaagatcatgtattattctcgagttcaaaggaagaa

SEQ ID NO: 588066 - DNA, 136 bp, Homo sapiens
ggaaaatcaacttcagcttagctgttttatcaatcaggaagtcaagtatctttttacaggacttaaattgtcaggacagctgaatgagtacacagaacggaaggagatgtcagcagatgtggtgtgcatgagtctg

SEQ ID NO: 588067 - DNA, 48 bp, Homo sapiens
agcagagcatgatcctcttaagggtatttaacgttaatgcacctctgc

SEQ ID NO: 588068 - DNA, 75 bp, Homo sapiens
cgaactccgcaatgaggacgttcaggaaggtgggagtcaatcattttgacaagtctcctgaaaggaacagctagc

SEQ ID NO: 588069 - DNA, 98 bp, Homo sapiens
ggacttcgacacctacgacgatcgggcctacagcagcttcggcggcggcagagggtgacacaccgtgagacaggtgaggtgatggtgatgaaggagct

SEQ ID NO: 588070 - DNA, 100 bp, Homo sapiens
tcaggtgccaggtggcagttctagagaccgtcagcaagggtatggaagagtaagagaagatgatgaagacagcgatgacgatggatcagatgaggaaata

SEQ ID NO: 588071 - DNA, 90 bp, Homo sapiens
tcgcagtggtcgcttcttctccttggacaaagcagttccaattccagagaaaatgagtgaatgggcacctcgacctcccccagaatttgt

SEQ ID NO: 588072 - DNA, 102 bp, Homo sapiens
ggcgctgctggagttccgcgacaccatcttcgacaacatcctcaagttttggaccaatcgaatacaaaggccccatgagtgctgtttacattgagaagtttg

SEQ ID NO: 588073 - DNA, 100 bp, Homo sapiens
ccgggcgcacacggacttcctggacttcccaagtaagaagcggaagaggagccgctggaaccaagacacaatggaacagaagacagtgattccaggaatg

SEQ ID NO: 588074 - DNA, 100 bp, Homo sapiens
cggactcttccgtcaatttcgcggaattctccaagaagtgttcggagagatggaaggagaccctcctgttcttaactgtgggcgatgagaaaggtggtgg

SEQ ID NO: 588075 - DNA, 83 bp, Homo sapiens
ctacattttgccgcacaaacacatgtaggttttgatgatgatggttcagaatttcatgaacatatatttctggagaaacacct

SEQ ID NO: 588076 - DNA, 90 bp, Homo sapiens
gctcaaggagaggctggcggctttctatggggtctaggtgatcatggagactgccaggcagcgtctatcccagactaccggggccctaat

SEQ ID NO: 588077 - DNA, 75 bp, Homo sapiens
ggagagctccagtgagtccagctcctctgacagcgaagactccgaaacagggcttgtcaatgaggcagatcagat

SEQ ID NO: 588078 - DNA, 96 bp, Homo sapiens
ctttggttacctatgtacctgttaccactttcaaaagttgggagccacgtgtaccagtgtgtgttgatcttggcttgattcagtctgccttgtaac

SEQ ID NO: 588079 - DNA, 100 bp, Homo sapiens
ccagctgggtccggggagcgccgccgccgcctcgatgggtgtgtcccggcatggatatccggaacaacctcactaggttgcatgagctggagaattgctc

SEQ ID NO: 588080 - DNA, 51 bp, Homo sapiens
gttgtgggtttttgggtgaccaggacctgatcccaaccttgaagaaagtcc

SEQ ID NO: 588081 - DNA, 75 bp, Homo sapiens
ttacaacttttgatctgggtggacatgttcaaggttatccagtgaatctagcagccaatgggcattagtggtgca

SEQ ID NO: 588082 - DNA, 90 bp, Homo sapiens
tggccatccacctgtgcctcttcaccatgttcggaatgctgctgttcgctggtgggaaggcctgagacctgggaggaagctggagaaaag

SEQ ID NO: 588083 - DNA, 75 bp, Homo sapiens
cccaacgatggcgagggcgccttccatggagacgcagtaaccctccactgagtgaagaaatgttgcctcctggag

SEQ ID NO: 588084 - DNA, 83 bp, Homo sapiens
ggagacgtgggcgccctccccgccaaggcccgtgcgagggactggtgattgcagctggaagtgcccatgaccgagctggcgtc

SEQ ID NO: 588085 - DNA, 82 bp, Homo sapiens
tgtacagagaggtgatgctggagaactacaggaacgtggtctccctggggtcctgcagttctgagcttgggttccctttgcc

SEQ ID NO: 588086 - DNA, 127 bp, Homo sapiens
taaggacattgtggcaatcatcctgaatgaatttagagccaaactgtccaaggctttggcaccaaaagaatgcaatggtgtaaagattccagttgatgccagtaaacctaatccaaatgatgtggag

SEQ ID NO: 588087 - DNA, 82 bp, Homo sapiens
cggcggagcggcggcagcagcgacaatgcagatcttcgtgaagactctgactggtaagaccatcaccctcgaggttgagccc

SEQ ID NO: 588088 - DNA, 82 bp, Homo sapiens
cccgcatcttcgccgtctggaaagataacgaaggaggcccaacttcattcaataaggagcctgacggatttatcccagacgg

SEQ ID NO: 588089 - DNA, 97 bp, Homo sapiens
ctgcaccatgagctggggcaccgagctctggagctcatctcctgtcctgggtgtgaacgagtatatcttaccagggatgtaactgaacatttttttc

SEQ ID NO: 588090 - DNA, 97 bp, Homo sapiens
gaaacctctacagagatgtgatgctggaaaacttccagaacctggcctcactagaattggatttgcaactcaaaaccaaaggctccccactgctgca

SEQ ID NO: 588091 - DNA, 98 bp, Homo sapiens
cagtcccaggacacagcagcggccaccatggccacgcctgggctccagcagcatcagtaagactttgaccccgacgcaggcttcagtgattgccgcgg

SEQ ID NO: 588092 - DNA, 114 bp, Homo sapiens
atcgtcaagatggaggtggactacagcgccacggtggatcagcgcctacccgagtgtgcgaagctagccaagattttcgacaatgaagccaaagacgtggagagagaagtttgc

SEQ ID NO: 588093 - DNA, 75 bp, Homo sapiens
gcacatctaccagtaccggatggagaagagcgggaaagggggaactacagcctccgcttggcgtcccgatgctct

SEQ ID NO: 588094 - DNA, 86 bp, Homo sapiens
agcaatgcagtcctcatatattatcaggagtgtcatgggccggcagacatgcctggagtgcagcttcgagatcccagacttcccta

SEQ ID NO: 588095 - DNA, 100 bp, Homo sapiens
cttctgagtcagcctgaaaggaacaggccgaactgctgtatgggctcttcctgacacagctctccctgaggagcagccacattccagctcccagtgcgcc

SEQ ID NO: 588096 - DNA, 100 bp, Homo sapiens
gctggtgggaaatacagaagcacagtcagcaaaagcaaagacccctcggggctgctcatctctgtgatcaggtggctttaaccaagagagcagatccagc

SEQ ID NO: 588097 - DNA, 131 bp, Homo sapiens
gagttttgcaagactgggtcattgacgattgcattggtaactggtggagaccaaattttgaacctcctcaggctcatcagattcaagagatgtttccccaggttccataccatctggtactgcaggacctc

SEQ ID NO: 588098 - DNA, 137 bp, Homo sapiens
agcttacccagcttaaagagctccacattcaggggaaccgcctcaccgttctgcccccagaactaggtggattctccacagttttcctcgtgcgtactcacggtggaatccgatgtgcattgaagcgaatgtatgtc

SEQ ID NO: 588099 - DNA, 100 bp, Homo sapiens
cacgccagccgcaccatgccgctcctaagcctgcacagccgcggcggcagcagcagtgagagtgcctacaccaactaatgttacaattgaatcctataac

SEQ ID NO: 588100 - DNA, 98 bp, Homo sapiens
cacccatctgtacatcctatgtcaactgcttctcaggtagcaagtacatggggaggtcgtggttcaattccagaattctttcatattatgaaaagaaa

SEQ ID NO: 588101 - DNA, 100 bp, Homo sapiens
gagtgaatggagctgatgaagacactataagccggcacccgacagctacaaagtgcaagataagaaaaatgcctccagccgccctgcctctgcaatttca

SEQ ID NO: 588102 - DNA, 75 bp, Homo sapiens
tcgccacctggtacctggaagctgtgtgcccaggaatggaagttggatacactttgtgacttgtacgagacactg

SEQ ID NO: 588103 - DNA, 50 bp, Homo sapiens
catcaataattacttttccattggcgtgggtcttactgaagtaacacaaa

SEQ ID NO: 588104 - DNA, 90 bp, Homo sapiens
gaaagttaggctggggacacttttcaacagtatggttatcatgggatattcagtccctgattaccctccaaactatattttattccttaa

SEQ ID NO: 588105 - DNA, 90 bp, Homo sapiens
acctgctgaaaggaattcctagatctaaacaccaggtagctacagcaagctgggtagcaggcagatccaaaggatatcatgaagtttcca

SEQ ID NO: 588106 - DNA, 51 bp, Homo sapiens
gtgaaaagcaactttgatgcagcacgcagcttagcagtgtctgcaaaaacg

SEQ ID NO: 588107 - DNA, 96 bp, Homo sapiens
ccgtgacttcccggacgctgggaaatgagttgaagtattgataacaccaaggaactctatcacaatttgaaaagataagcaaaagtttgatttcca

SEQ ID NO: 588108 - DNA, 101 bp, Homo sapiens
gaggaagtgcctgaacaggaaggagagccaaggtttctgctttgggacaaccatacatctaattccttaaagtagttttatatgtaaaacttgcaaagaat

SEQ ID NO: 588109 - DNA, 100 bp, Homo sapiens
taacgtttttatccatggatgacttgcttgggttccttctgaccaaggggacatggctctgaagatgatgagactggtgactcagcaagaataggatgga

SEQ ID NO: 588110 - DNA, 75 bp, Homo sapiens
gatgaaggagccagtttggctgaaaataaaagacatatgtagagtgtgtcggtcagaaggaacacctgagaaacc

SEQ ID NO: 588111 - DNA, 50 bp, Homo sapiens
ttacagtttcctaacagcagtgcagttgtgaaagattttcaagactatat

SEQ ID NO: 588112 - DNA, 83 bp, Homo sapiens
cgggtcggtgcaccgtccgggattttatccaccggcactgccaagatcagagtggagactgctgcacggactctggaaccatg

SEQ ID NO: 588113 - DNA, 96 bp, Homo sapiens
cggggtccccggccggccaagcaggcaagaagagaggcggaggcgatccttccaggattacactgggcagaagatcacccttgaggctgtcttgaa

SEQ ID NO: 588114 - DNA, 82 bp, Homo sapiens
ctggatcgaaatgtccatgagaaaaagcttggagataaagttgctttttactggttctgtacagagtaatgagatgtgtgac

SEQ ID NO: 588115 - DNA, 75 bp, Homo sapiens
tactcctggggatcggtttgatgtggtggttttggcccctttgctgcaaagtgtttcttaaacaattaggtctac

SEQ ID NO: 588116 - DNA, 75 bp, Homo sapiens
ggagtcgattcttaaaaactctgcttctgttggtggttatccaaatgccaacccagtccaggtttcaacagcaac

SEQ ID NO: 588117 - DNA, 100 bp, Homo sapiens
gcagccacatactatccgtttgttcaggaaccaccagtgacagattcatcaatggtgctaaggaaatttgctatgctcttcgagctgagggttattgggc

SEQ ID NO: 588118 - DNA, 99 bp, Homo sapiens
gcagcaggctgctcctacagatcctgacttaccaccaggtgtcttcaaaaacaaacatatttaaaagattttacttctcatctccaggaagaaccagct

SEQ ID NO: 588119 - DNA, 98 bp, Homo sapiens
ctggagcagtggagcccaaagacccctggagacatggttcttgggtgtctctggggagtccctgggccagaccttcctccagactccagcccacctct

SEQ ID NO: 588120 - DNA, 100 bp, Homo sapiens
cctgaggctctgggcgcttagcctggctcacgcacagaacgtgactgtcattcctaaccaggtgtatcagccccttggcccttgtccttgtaatttaaca

SEQ ID NO: 588121 - DNA, 101 bp, Homo sapiens
cggaagttaaggcgttcgcggcgtgtggtggagctggacagaatatttctgtccataagacccccagaagtcccctaagtgggataccagtgaggactgct

SEQ ID NO: 588122 - DNA, 123 bp, Homo sapiens
agcacatcaaaagttcccaaagagggcttgctctctcttcacctgctctgttctacagcacactaccagaagaaacctgctcctccaaagccagagcccaagcctaaaaaggcccctgcaaag

SEQ ID NO: 588123 - DNA, 80 bp, Homo sapiens
gagaccagcatccttggagaagtctctgaggcctcctatgagctgacacagccaccctcggtgtcagtgtccccaggaca

SEQ ID NO: 588124 - DNA, 51 bp, Homo sapiens
tatctctggtgctgcagctctcacaaacgtgcagatatctgatagcccttt

SEQ ID NO: 588125 - DNA, 50 bp, Homo sapiens
cagtatggtagccacacccccaggtccagagggggcaaacctctttattt

SEQ ID NO: 588126 - DNA, 100 bp, Homo sapiens
cagtggtgaaggctaaagctacccatgtcatcatgaattctctgatcacaaatgcagacaatctctttgaacatgaattgggggctctcaatatggctgc

SEQ ID NO: 588127 - DNA, 75 bp, Homo sapiens
aaacagagtatggctgcagaggatccatctgtcttagcaaggctgtcatcacactactgcagccgtggaactaag

SEQ ID NO: 588128 - DNA, 100 bp, Homo sapiens
gttaaatctcatcccgcggctctcctcctgtcggtcctgcagttcttttgtccccgggtagagcctcaagcagcctgccaccctgccatattccgggttg

SEQ ID NO: 588129 - DNA, 75 bp, Homo sapiens
gcggggacggggttggcgcccggcagcacgtgttcctggtttcagctaatggcagcattagccgctgttgggcct

SEQ ID NO: 588130 - DNA, 74 bp, Homo sapiens
ggccgaggcaggcggatcacgaggtcagggccaaaactggaaccaaggatttaataactattatgatcaaggat

SEQ ID NO: 588131 - DNA, 101 bp, Homo sapiens
gggcccaccatgagccatggccatgtccgtgagcgccgaggacgacgactatgaatcggagccggaccaggtggatgaaactcagtttaagaagatcctcg

SEQ ID NO: 588132 - DNA, 100 bp, Homo sapiens
ttggagttcgcctcagacgcggtggagccgccggagtctgagaagtgtgctggaattgatgttcgtctgtgtgatgttggtgaggccatccaagaagtta

SEQ ID NO: 588133 - DNA, 100 bp, Homo sapiens
agcgagctgagtggttgtgtggtcgcgtctcggaaaccggtagcgcttgcagcatggttacattgattacccacctagtacaacatcttacgggaagagc

SEQ ID NO: 588134 - DNA, 74 bp, Homo sapiens
gctgaaaaggatgctttagaaaaacacgatcagctcttagacagacaaacacttgaaggatctactgtctaaat

SEQ ID NO: 588135 - DNA, 94 bp, Homo sapiens
ttgtcaaggtggcctaccaggaggccaggggtgtcgccatgaattatatccagatcgagagacagaagattctgaaagggttcaatgaaatgag

SEQ ID NO: 588136 - DNA, 82 bp, Homo sapiens
tcatcatggggctcctgtacaagacgttggacctctcgaacaaccagctgagcgagatccctgcagagcttgcggactgccc

SEQ ID NO: 588137 - DNA, 88 bp, Homo sapiens
ttgcatcaacaagtccaagataggaatgaagtaattgaagctgcaaatgaagcattacttactaaaggttttggccaaattgggcgag

SEQ ID NO: 588138 - DNA, 82 bp, Homo sapiens
caacggcggcctgcctccgggcacacccggctccccggacgcctcggtgtggtggctcacgtctgtaatcccagcactttga

SEQ ID NO: 588139 - DNA, 100 bp, Homo sapiens
attagacaagaaacattggaaaagaaatcctgataagaactgctttgtgatctgcaactctttcaccatctgtaatgcggagatgcaggaagttggtgtt

SEQ ID NO: 588140 - DNA, 75 bp, Homo sapiens
caaaaatttccacccaaatttgtgcagtccctctgtcgtgaaatcaagcaacgacgtcgaggagttgcctccatt

SEQ ID NO: 588141 - DNA, 101 bp, Homo sapiens
ctatcatcgtctcctgtggctgggacaagctggtcaagagccccccaagatgaacccagtggtggagccactgtcctggatgctgggcacctggctgtcgg

SEQ ID NO: 588142 - DNA, 97 bp, Homo sapiens
ctgtgagctggcactggccctggagtatcttcagaggtaccacatcatccacagagcccataggcagcatgtcatccatggaagtgaacgtggacat

SEQ ID NO: 588143 - DNA, 83 bp, Homo sapiens
ggagcctcagttggaagcagccgatccagcctgcggagcctgtggggcaggctttccttaaagtttcccatgtctcaatggac

SEQ ID NO: 588144 - DNA, 100 bp, Homo sapiens
ctccggacgtttacgattcactggcctctgccccgagggacccaggataaggagacacctatggctgccgatgaaggctcagcagagaaacaggcaggag

SEQ ID NO: 588145 - DNA, 75 bp, Homo sapiens
cgtggaattcgcgaagctgccaaagccttagacaagtggacattgaagtggacctaattcggttttccttttaaa

SEQ ID NO: 588146 - DNA, 155 bp, Homo sapiens
gctgcagaagcagctggagaagggacgccggctgcgacagttacagcagctacagcagctgcgagacagtggcgagaagccttcctgtgcatcggtggatctgcagggagacagctccttacaggtggagatttctgacgcagtgagtgagcggg

SEQ ID NO: 588147 - DNA, 75 bp, Homo sapiens
atactggaaggggtggtgaacttcaaaaaattggggagctaaaggttggtcttcaggttgtggcagtcaaggctc

SEQ ID NO: 588148 - DNA, 82 bp, Homo sapiens
cagctcccccaatgacagcgagcacggccccaatcccatcctgggctcggagcttgtattggttggtgatggtggtactgga

SEQ ID NO: 588149 - DNA, 101 bp, Homo sapiens
tggagctgcccactctagaggagctgaaagtagatgagccaaagggaaaggacagtcccaaaccagagtgaatattaatgctgccttggttgaggatataa

SEQ ID NO: 588150 - DNA, 75 bp, Homo sapiens
gggtgcgcgcctgcgacctgcccgcctgggttaatttggagtggcccctggagtcagtttcctacaccatccgag

SEQ ID NO: 588151 - DNA, 80 bp, Homo sapiens
attccaagtaactcttatttggtaattttttctgcaggatgaattaagagaagagacacttgctcatcaggcatggagag

SEQ ID NO: 588152 - DNA, 83 bp, Homo sapiens
ttccactcggctcctgtcgtccgttctctcaggctcccgttcagagatgcagaggatgctatttatggaagaaatggttatga

SEQ ID NO: 588153 - DNA, 75 bp, Homo sapiens
ttgcatctctccctcctttaaacagcttctccgggtctcagcatggtcactttggaacttcttgggtgaagcact

SEQ ID NO: 588154 - DNA, 90 bp, Homo sapiens
cggcgagtttccgatttaaagctgagctgcgaggaaaatggcggcgggagattcctgacattcagacaactgacttgtaactgacttata

SEQ ID NO: 588155 - DNA, 83 bp, Homo sapiens
agcgcgagcggcgcgagaaaaattaaatgtgagggagtctgacgtaagagtttgtgatgagtcatcatgtaaatatggaggag

SEQ ID NO: 588156 - DNA, 100 bp, Homo sapiens
cggccctgctgtctgcctccccggctgattggattcgttactgctttgcaacgcgcacctaactccaggtgcccctgggcgctgggattgctctagcctg

SEQ ID NO: 588157 - DNA, 50 bp, Homo sapiens
gaaggagggtcctctcagtgattaagataagccaatggacacgtcagtgt

SEQ ID NO: 588158 - DNA, 102 bp, Homo sapiens
gccgagggcaactttggaggccccctggaaggctttaggatccaggtcacccttgtggttggagcgtcccaggacatcatcccccagctgaagaagaagtat

SEQ ID NO: 588159 - DNA, 60 bp, Homo sapiens
gagactggagtcgaaggccgtgaggatttaagtgccctgtatgctcaaaatttgtatcct

SEQ ID NO: 588160 - DNA, 88 bp, Homo sapiens
ttgacggtcaaggtatttcatgccgaggtgaaaggtgtagcagtcactcggcctacacccacagcatcgaccttgtgaacccagcgac

SEQ ID NO: 588161 - DNA, 141 bp, Homo sapiens
gactaatcagattgtgatgaattgtgctgatattgatattattacagcttcatatgcaccagaaggagatgaagcgttgacagaaggctacgttggggccctgcacgagaatagacacggcagcgcagtgcagatccgcag

SEQ ID NO: 588162 - DNA, 131 bp, Homo sapiens
tttgccaggactgatgcagatgcccctcctccaccagaggactgggaggagcatgtcaacaggaaatatgagctgtacagcatggactgggacctgaaggaggaactcagggattgcctggtggctgctgc

SEQ ID NO: 588163 - DNA, 100 bp, Homo sapiens
actgctggcctataatacaacctcccacaccgaccaatcctcacgattgagtgtcaaagaaggtgggactcttccctggacactgtgttgagttaattaa

SEQ ID NO: 588164 - DNA, 82 bp, Homo sapiens
cattgcatttttccttggaacagcagcctgcctttaccaggttgaaaggattgttgacaaaaggaaaaataaaaaagggaag

SEQ ID NO: 588165 - DNA, 100 bp, Homo sapiens
atgctgagaatttgaaaaatgaagatgatgtagacactggactattagatgtaggtgcaaaaaactacagacatctctgtgctgtttattacaacaagaa

SEQ ID NO: 588166 - DNA, 100 bp, Homo sapiens
tgaggggtgtggacgtcgtggtgggaggacactccaacacatttctttacacagccttgaaaagatcttttgaggtcgaggaggtcgagacacccaactc

SEQ ID NO: 588167 - DNA, 96 bp, Homo sapiens
gatcattaagagagtgattgctcttgaaggagatattgtcagatgggcttaggtcacgagcaaggatttggagccccttgtttaaaatgcaaagaa

SEQ ID NO: 588168 - DNA, 90 bp, Homo sapiens
tcactccaactgcatcgaggtctttcccgaagttatgcagctcccagagatcaaggaaaagcaggtgatattctcagtggagaccaggac

SEQ ID NO: 588169 - DNA, 98 bp, Homo sapiens
gacctctacttagctcagcaattcttaccttgtgcccgctcccagcccttggtgcagttccagcgccgggctgcccgcctgcctgtcagctccaccta

SEQ ID NO: 588170 - DNA, 93 bp, Homo sapiens
tatctggaaccgtgaatggtattctcactttgactttgatctccttgatcctgttgggtggttgtgagacaacttcaacaagaagtggctgat

SEQ ID NO: 588171 - DNA, 82 bp, Homo sapiens
cgggaagatggcggcgccgctcatccccctctcccagcaggattttttatcaagcagaaatgcatcgaacaacgagaatcaa

SEQ ID NO: 588172 - DNA, 90 bp, Homo sapiens
ttctcatcgatattgttccaagagatgaactgaaacctccaaagcgtcaggaaagaccacagcaagattctttcattcgtctcctcctag

SEQ ID NO: 588173 - DNA, 83 bp, Homo sapiens
aagagggcggcggcagcgggtcctacgaggagggctgtcagagcctcatggagtacggtgaaatgacaatggatgctctgttg

SEQ ID NO: 588174 - DNA, 80 bp, Homo sapiens
ggtgctatgggtgatcattccaagaccttatgccagcctggaccatcttggaggcagtgtaggatcatggaagaactttg

SEQ ID NO: 588175 - DNA, 75 bp, Homo sapiens
ggccgtcccggccatctcgctgcccgacgatgtccgcaggcggtccctctggcctgcatgccaggagtcggtcac

SEQ ID NO: 588176 - DNA, 75 bp, Homo sapiens
agagggaagacacgcggaaacaggtatctgatgtgtagccatgcagaagacctacgtgcaaaagcagaatgggaa

SEQ ID NO: 588177 - DNA, 83 bp, Homo sapiens
tccaaacagtctttcaaacctagatcagcagtaccttgatgataacactgtggaagctgtggcctttcggaagagtgcaaagg

SEQ ID NO: 588178 - DNA, 75 bp, Homo sapiens
gcggaaggcctcccggcgctcttcctcccggagtatggtagagtacagagagatggatgaaagcttggccaacct

SEQ ID NO: 588179 - DNA, 98 bp, Homo sapiens
ctccaaattcgcctccatctgtaccatggtttcagaaggatcccacttggtcagagactggagaccgttatctgttgaaactctttagggatcatctt

SEQ ID NO: 588180 - DNA, 82 bp, Homo sapiens
gaatccagggcctaacatgggacagccgcaaccaggaatgacttctaatatctaactgattttgagccaattcaatgcctgg

SEQ ID NO: 588181 - DNA, 98 bp, Homo sapiens
gtggagcgtgtcctgaaggagttccaccaggccgggaagcccatcggattgagaaaatcatgagttctattggagaagggattgacttttctcaggaa

SEQ ID NO: 588182 - DNA, 73 bp, Homo sapiens
tcgactgtggctttgagcatccgtcagaaggttttttgcatgtctgacacccatgactccacctggaccttat

SEQ ID NO: 588183 - DNA, 100 bp, Homo sapiens
ggaggaggaataatatttatggagcatatattatggaacacagttttatctgaatggcgctgattctgccaagtgcactgaggaaggaaaatggagcccg

SEQ ID NO: 588184 - DNA, 75 bp, Homo sapiens
ggagaaaacagctatctaactccgctcagagtaatgttgatccccgagatgatgtatttggatatcctcatcaat

SEQ ID NO: 588185 - DNA, 100 bp, Homo sapiens
agttcaagtacagatcacacgcccactaaagcccagaagaatgtggctaccagcgaaggcgcctgtgtctggcagagctggtgtgagacgagacaatcct

SEQ ID NO: 588186 - DNA, 100 bp, Homo sapiens
ctccgggattggactgatccaggctggacccacgtctgtctggtgataccaggggcagagggaccactctgacagattttgcaagaacgaggctcaagga

SEQ ID NO: 588187 - DNA, 100 bp, Homo sapiens
agaaggccgagattgccgcctccaggggatggccaggtggattttgatgaattcatgaccattcttggccccaaactggtgtcttcagaaggtcgcgatg

SEQ ID NO: 588188 - DNA, 98 bp, Homo sapiens
tgaagttcacgactactagaaggggaggggagtggaaaggctctcagtgaaaaaggtccagtccaggtgcagcagcaaggagaacattctcagagcca

SEQ ID NO: 588189 - DNA, 51 bp, Homo sapiens
atggttaggtgtcagcagcggcctggaagtgactgatttattgctcactgc

SEQ ID NO: 588190 - DNA, 82 bp, Homo sapiens
gaccggctcctgctcaagatctcagagaaggaggaggtgaccacgcgcgagtgtcggagatgtatgcagtgtgacgccaagt

SEQ ID NO: 588191 - DNA, 100 bp, Homo sapiens
gcgctgccgccgctctgaggagttaaagtggaatgcagtagccctctgggcctgggatattgtggttgataactgtgccatctgcaggaaccacattatg

SEQ ID NO: 588192 - DNA, 100 bp, Homo sapiens
tgatgtgatctctcagctggagcaagaagaggacctgtgcagggcagagcaggaggccccccgagctctagccggcccggtccttggactgaaagaatgc

SEQ ID NO: 588193 - DNA, 90 bp, Homo sapiens
ccgggatgaaaggagggaacgcaggaatttagataatgggctgtgtgcaatgtaaggataaagaagcaacaaaactgacggaggagaggg

SEQ ID NO: 588194 - DNA, 50 bp, Homo sapiens
taaaactgaagatgtgaatactctgacgactgcaagaacattgccaacat

SEQ ID NO: 588195 - DNA, 74 bp, Homo sapiens
ggctcccagaacatcctggtgcctctggccaacactgcctttttccagatggagtgcctgaaactgatcgcctc

SEQ ID NO: 588196 - DNA, 100 bp, Homo sapiens
tcaaggcttaatcgaagagatggtaaaacttccttttcctgtagatcaaatcacagatcttccaaggaacgatttccagatgatgattaaaatgcacaag

SEQ ID NO: 588197 - DNA, 82 bp, Homo sapiens
ctttcacgaaggcaccgacgtcatcatgctgaccaccaatcagatccgtaaggtttctctactcggacgaggtgcagattgg

SEQ ID NO: 588198 - DNA, 99 bp, Homo sapiens
gacaggactttgggtctgggtgagccttctcgtggcggcggggaccgtccagcccagcgattctcagtcaggtccaaccgtgactgccagatcgaccag

SEQ ID NO: 588199 - DNA, 98 bp, Homo sapiens
cgaccctcaacttggctactccctgccttgtgtggataatgcagcttgtgagattttacttgctgagaaaacttgcccttcaacccctgaaaaaacaa

SEQ ID NO: 588200 - DNA, 98 bp, Homo sapiens
gggaggaggcggtggccctgctggaggagctctgggattgacttctaaggactcttggtacatgaggaagaaacccggaaggggaagaggaaagcaaa

SEQ ID NO: 588201 - DNA, 99 bp, Homo sapiens
cccccaatcctctcatcttgtcctacctgaagtatgccattagttcccaggaaatccccatttggaagtacagaaagaaagactcctgttaaaaagctg

SEQ ID NO: 588202 - DNA, 75 bp, Homo sapiens
cgagagcaagctctataagattcttcaaggtggggttggcatcccccacatacgtggccacagatgtctttaatt

SEQ ID NO: 588203 - DNA, 75 bp, Homo sapiens
gtccgaggcccagagatgaccccttatgaaggtgagtgaagatggcagagaggacgtgaccagcactcacccttg

SEQ ID NO: 588204 - DNA, 100 bp, Homo sapiens
aaaacctccagacctacctacaagaagaagatacacgtatgcagcaggcagatagagactgttggtcaaagaaaaagtgatgtatgaaaaagaggcaaaa

SEQ ID NO: 588205 - DNA, 74 bp, Homo sapiens
agagaggtggacagatctgagagatactgagagggagaagagctggcgagagtggcagagggcaccagcttccc

SEQ ID NO: 588206 - DNA, 75 bp, Homo sapiens
cttcctagcatttggacctgtggccagtgttgtcatggacaaggacaaggtcaatgagctgaaggagaaaggcaa

SEQ ID NO: 588207 - DNA, 75 bp, Homo sapiens
cagcccgtgccgcgagcgcggcctgcaggagggtcaaggccaacctgtcagaggtgcttgtgtccagtgtcctgg

SEQ ID NO: 588208 - DNA, 100 bp, Homo sapiens
gacagaaaaaccatctgtgctggggctttgattgcaaaagactgggtgttgactgcagctcactgtaacttggacttgccatgaggtgttgaagccttgt

SEQ ID NO: 588209 - DNA, 90 bp, Homo sapiens
gactgccccgggcacgcctccctcatccggaccatcatcggcgccatccttacccgacctgggatggagatcaccaaagatggcttccac

SEQ ID NO: 588210 - DNA, 96 bp, Homo sapiens
aagacagtgcatgaagccaggggacatccgccatgctccaaacaacttggcctcaggtctccggcgagtgagagacctttgtcgagttctgcagtt

SEQ ID NO: 588211 - DNA, 100 bp, Homo sapiens
gaggaagccgaaaacaccctgcaatctttcagacagctcagcctcacaggccaaagcatcagcaccagaacgcacacccagcccagccccaaagagaaag

SEQ ID NO: 588212 - DNA, 98 bp, Homo sapiens
cggcggcggcggcagtgacgtcgccgggtatatgaatgacctaaaggtacaaataaagacggagagagaacagtgccaactgggagcagggcaagaat

SEQ ID NO: 588213 - DNA, 98 bp, Homo sapiens
ctgggtccaccgacccttaccctcagcgagagaagtaacctagaacttcatggaggaacacggagtgacccaaaccgaacatatggctaccatagaag

SEQ ID NO: 588214 - DNA, 74 bp, Homo sapiens
tgaaacttgcccagatgttctcagatatggtcttaaaagattactgacagccctgtcctaggagcacaacgtcc

SEQ ID NO: 588215 - DNA, 100 bp, Homo sapiens
taattttgactttccacggaatattgaagaatacgtacaccgaatagggcgcacgggaagagcagggtaagtggagaaagagttgaagggaaagtgttgg

SEQ ID NO: 588216 - DNA, 95 bp, Homo sapiens
aactgaaaggccaacgtgggagacaaagaagagcctgaaagagccaaatcttaccttctggaccatgtcaccaggagactaaagtccatcaaaaa

SEQ ID NO: 588217 - DNA, 51 bp, Homo sapiens
agcagtacgagaactggcagccaaggccctcccaggcccaatacttcaaag

SEQ ID NO: 588218 - DNA, 90 bp, Homo sapiens
ttatttatccaacagctcctcccagtagccggatcgagctgggagatgtgacaccacacaatattaaacagttgaaaagattgaatcagg

SEQ ID NO: 588219 - DNA, 51 bp, Homo sapiens
cagattcgcagtggtcgcttcttctccttgaaatcttcttgacagagacac

SEQ ID NO: 588220 - DNA, 100 bp, Homo sapiens
gaattgacctatttgatttccagagggatattgaggtctgtttctgtcgactgtggaccacttatgtgcgatccgtggaccacttgcgtgcgatctgtcg

SEQ ID NO: 588221 - DNA, 50 bp, Homo sapiens
ccggaggctcgccgacgaccttgagtatcgagatcgttatgattcagacc

SEQ ID NO: 588222 - DNA, 98 bp, Homo sapiens
gtctgtgactgcggatataactgacggcaacagtgaacatctcaagcgggagcattcgctcattaagccctaccaagattaattggaggatctgacaa

SEQ ID NO: 588223 - DNA, 75 bp, Homo sapiens
tgcaagaggcgcaaacaagccaatcccaggaggaaaaacggctgcagagactgcaagtctggaagaacagctgca

SEQ ID NO: 588224 - DNA, 74 bp, Homo sapiens
tgttactgatgcagagatacagcaaaagagtctacataggcatctccttggaaacaatgccatctttgaatgtg

SEQ ID NO: 588225 - DNA, 100 bp, Homo sapiens
ggcgttcttccgctggctcagccgcaagtacccgtccatcatagtcaactgcgtggaagagaaggtccagcctgatgagtgaagaggctaagcgaggagc

SEQ ID NO: 588226 - DNA, 100 bp, Homo sapiens
gggaccggcggcgctggaggagcgaggcagctgtactaggactgggaacggatccccagacgaggccttgcctggaggtcttagtggctgcagcagtggg

SEQ ID NO: 588227 - DNA, 85 bp, Homo sapiens
cttttcagaaatcggtttgaagttagaaatggcccgggtggaacgcatggagcagttccagaaggagaaggaggaactggacagg

SEQ ID NO: 588228 - DNA, 100 bp, Homo sapiens
ttcccctggtcttcaatgccagaatggtgtttgaaaagccgaaggagtaaaggtgctgcaatgatgttagctgtggccactgtggatttttcgcaagaac

SEQ ID NO: 588229 - DNA, 75 bp, Homo sapiens
gaatttccatgtcaacatagtcctgatcagacctattgtgaccgcctggtgcaggacacgcctttcctgacaggc

SEQ ID NO: 588230 - DNA, 83 bp, Homo sapiens
gacagatcctgtgtcacccggcaactcagaaacatcaggtccaaggtctcggcgcggaagatggccggcggcgtggacggccc

SEQ ID NO: 588231 - DNA, 75 bp, Homo sapiens
gccggcggcgggaggagctagggctggagcctctccagcctcccgcgaagggatgggcgtgttttgggcgtgcta

SEQ ID NO: 588232 - DNA, 100 bp, Homo sapiens
caacctgtgccgcaaatgtgccaacgacgtcttccaggcccagcagcaaagaaacctggataacatcgtcttgcaacaacccagaataggtagcaagagg

SEQ ID NO: 588233 - DNA, 98 bp, Homo sapiens
cggtgggtcctcgcttgcagttcagcgaccacggtctgcgaggaacagaagtgcgaggaggaggtcttcccgctggccatgaactacctggaccgctt

SEQ ID NO: 588234 - DNA, 100 bp, Homo sapiens
ctcaaatcggctgattctgcatctggaaactgccttcatcttgaaagaaaagaacaagcgagtgagcatcaataaagatgagctgaagtcaacgtcaaaa

SEQ ID NO: 588235 - DNA, 98 bp, Homo sapiens
atgaaatttcatgagttcgttgagaaactgcaggatatacagcagcgaggaggggaagagaggctggggtgcagtggcgcgatctcagctcactgcaa

SEQ ID NO: 588236 - DNA, 74 bp, Homo sapiens
ggcagcaagaacagagagagaggtggacagatctgagagatactgaggcgtgcaatggaattgagttttgccct

SEQ ID NO: 588237 - DNA, 140 bp, Homo sapiens
aatgatcattgaaaacttcgaggcactcaagtcctggctcagcaagactctcgagcccatcttcttaatgaagaggataactcagaatcatcggctatagagcagccacctacttcaaacccagcaccgcagattgtgca

SEQ ID NO: 588238 - DNA, 99 bp, Homo sapiens
gactggggctgctcccatcattgatgtggtgcgatcgatgagacgtgcaggtaccatcaggaagcagcgggataagctgataaaggaaggaaagtacac

SEQ ID NO: 588239 - DNA, 100 bp, Homo sapiens
agtgagcaccttttggcccaatgaatatcaggaattggcagcaatgaaacagattctcgttaagatgcatagtaaacattctgagaacagcttacttctc

SEQ ID NO: 588240 - DNA, 73 bp, Homo sapiens
tcggaggcgttcagctgcttcaagatgaaggctttccttaaagtttcccatgtctcaatggactcctgaatat

SEQ ID NO: 588241 - DNA, 74 bp, Homo sapiens
gacagaagagagctggttattaaggatgttgcttcagagtgtgaagtcaaatgcatgccaacattccagttttt

SEQ ID NO: 588242 - DNA, 100 bp, Homo sapiens
aatccggaggagaaggagactgcaaggataggcccagggctctacggcctgccccggcggtccggcaagctgaaggacctgtctaggtttgatgcctcct

SEQ ID NO: 588243 - DNA, 50 bp, Homo sapiens
cctgctcttcctggactcctgagcagagcacaagtgaagctgatgtggag

SEQ ID NO: 588244 - DNA, 90 bp, Homo sapiens
catgtacacctcatccctgtacgggtgcctggcctcgcttctgtcccaggaggctgtgctgcccaagcttcacctggatgaggactaccc

SEQ ID NO: 588245 - DNA, 90 bp, Homo sapiens
ctctggggaaatatctcagaccagtacggcaggaaaacaggctacaggggaagaattgaaagtgaaggcatacctaccaacaggcaaaca

SEQ ID NO: 588246 - DNA, 80 bp, Homo sapiens
tgaagcggaaaatcgagatagaacggatcttgtctgtgtccctcaggtgaaatgtgaccattactggccattcacggaag

SEQ ID NO: 588247 - DNA, 75 bp, Homo sapiens
acaaagccaaagaggaggaggcaccccttctgttcttcgtagccggggagggaatcacgctcgcttctagccagg

SEQ ID NO: 588248 - DNA, 100 bp, Homo sapiens
agaggaagaccctcctgccaaaaggaaatgcatctttatgtcagaaacacaaagcagcccaaccaaagggaagattctctggcaacagatgatttccttg

SEQ ID NO: 588249 - DNA, 100 bp, Homo sapiens
tgagctgaaaagaggtgctgaaattattgtttgcacacctggtcgaatgattgacatgttagccgctaacagtgaaaatgatgcatcctgttgccagcag

SEQ ID NO: 588250 - DNA, 134 bp, Homo sapiens
gtgagcgccgcggccgccgcagccatgaccgtggagttcgaggagtgcgtcaaggactccccgcgcttcaggcctcaggcccaggcccaaggccaagtgagagagcccaggccacaggacatgctgccattctg

SEQ ID NO: 588251 - DNA, 75 bp, Homo sapiens
tgcgctcggagaacgactatctcaaggatcgaatcatcaatttagttgttggcagcttaacatccttattgattc

SEQ ID NO: 588252 - DNA, 75 bp, Homo sapiens
gtgaagattggcaatccagtgccctataatgaaggacagtcattttgtttactcattcagccctgttgcaggtcc

SEQ ID NO: 588253 - DNA, 83 bp, Homo sapiens
caggcctgctcggccctcacagggtgagcatgggtttatgcgtcttaggcattattgtgatggcgagcaccaattctctgatg

SEQ ID NO: 588254 - DNA, 75 bp, Homo sapiens
cagctggcaagaggcagcctgggggccacagctgcttcagccaagatcaaggctcgagatcttcgcgggaagaag

SEQ ID NO: 588255 - DNA, 96 bp, Homo sapiens
caagactggtccacggagtgtatgaccacaaacagccatcaagatttgttcccgacaaggagttttctggttcagaccgtagacagagaggccgag

SEQ ID NO: 588256 - DNA, 101 bp, Homo sapiens
tggagcacaaaagagtctccgcggtggaggtctgcgttgctcttgcttttcctcgctggggtgtacggaggctgaaagggaaacatcagccgcccgggggg

SEQ ID NO: 588257 - DNA, 95 bp, Homo sapiens
gtctgatcctacgggtagaaatcatggctcacgaggcccagggaatcctctggaccatcagattaccaatgaaagaggagaatcaagctgtgata

SEQ ID NO: 588258 - DNA, 90 bp, Homo sapiens
gaacaaagtgggaaagggaagcttagcccgccgctgccgcctccgagcagcccgccagtaagcatcatggcggagagattggccaatcag

SEQ ID NO: 588259 - DNA, 89 bp, Homo sapiens
atccctctccacgacctcggtcgagcatgttcaccagggcccagataacaggcccctggcgcagcctatggattcgatttgggtatgac

SEQ ID NO: 588260 - DNA, 50 bp, Homo sapiens
ctgggattgaatgctggtgggaagcagtatatgaacctctagaaaatgaa

SEQ ID NO: 588261 - DNA, 97 bp, Homo sapiens
ctgtgctcgcgctactctctctttctggcctggaggctatccagcgtgcagaccatgaattacgtggggcagttagccggccaggtgtttgtcaccg

SEQ ID NO: 588262 - DNA, 50 bp, Homo sapiens
cggcgcccggatgggcagctgagggagtgcatccgccccaacccttttcc

SEQ ID NO: 588263 - DNA, 76 bp, Homo sapiens
cgaaggaggggaaggaccggatcaagaagctggggctgaccatgcagctgtttgcagacaaggtcccaaagacagc

SEQ ID NO: 588264 - DNA, 75 bp, Homo sapiens
aaacagctggctaagctcatcattgttactggatcctcagtcttccacaatgaaccctgtttacagccccgtgca

SEQ ID NO: 588265 - DNA, 100 bp, Homo sapiens
ctgtcccagcctggcgaaagcatcctttagatttgccaccttccagagaagaggtacgagatgacaagacaaccataaagtgtgaaacctccccgccttc

SEQ ID NO: 588266 - DNA, 75 bp, Homo sapiens
caagctgataggctgcgctaccggaatgtcatccagcgagtgattaggtatcgaaggatgatcgcagtgatgtgg

SEQ ID NO: 588267 - DNA, 76 bp, Homo sapiens
tctaagcaccttaagggccttgttaatctgtataaccttccaggggacaatttcccgtcaccaattttccttggaa

SEQ ID NO: 588268 - DNA, 74 bp, Homo sapiens
gtcggaggcgatatttctaggggtgtacttgttggggtcaggtgagaagaagctcattacagatgcccttaata

SEQ ID NO: 588269 - DNA, 75 bp, Homo sapiens
tccagttcatccctgagccttgagctcccagtcgcagatcgggtgctaccaaggttttgcttttgcatggaaatg

SEQ ID NO: 588270 - DNA, 75 bp, Homo sapiens
ggaagcggaggagtaccgactcttccagcgtctcgggctccttgcagcaggtggtgaaggcatttgtggtcctgg

SEQ ID NO: 588271 - DNA, 80 bp, Homo sapiens
ttcccgagaccgtcctggcgcgatgcgtcaagtacactgaaattcatcctgagatgagggcgtctctggccgagcctctt

SEQ ID NO: 588272 - DNA, 100 bp, Homo sapiens
tcagaggtgggcggctttgaccgagaggctgctggagctcgtgtttggacgcagaaaatattctctttggaatgggaaatcctctgcttgacatctctgc

SEQ ID NO: 588273 - DNA, 100 bp, Homo sapiens
gacgccgagcggtgactccccgccgctcccgggggccgtgacggagattacctggggcaattgatgttatcggtcagactataactatcagccgagtaga

SEQ ID NO: 588274 - DNA, 100 bp, Homo sapiens
atccgcagaaggggagacacattttatgttgtgtcatttcgaaggtatgagtttaaagccaagaacatcaagaagaagaaagtgagcattatggtttcag

SEQ ID NO: 588275 - DNA, 101 bp, Homo sapiens
cctgccccgccggagcagcatcatcaaggtagttacttttggtgacgctgtccagttcccacaatgtatcattccttatctgaaactagacatcctctgca

SEQ ID NO: 588276 - DNA, 75 bp, Homo sapiens
gaagatcagtacaaaaatcctaggagaaatctaaggaacttgtaatagctggcatcgttgagaatgaatggaaaa

SEQ ID NO: 588277 - DNA, 100 bp, Homo sapiens
gaggagctccccagctggtggctggagcgaccccttgttctttggtggcgctgtgccgcagcatctcttgccaccattccatgcgcccctaccgattgac

SEQ ID NO: 588278 - DNA, 82 bp, Homo sapiens
tgaacattccgaaactgtcaagattggcaagtcccacagtgttttgttcgccccacggaggccaagaaagccgcagatgagg

SEQ ID NO: 588279 - DNA, 75 bp, Homo sapiens
tggacagtttcagtgcattacagtctcagaccagtatccttcaggggttctcttactctgatttgcggaaatttg

SEQ ID NO: 588280 - DNA, 90 bp, Homo sapiens
accttctgtggaaaggaagctgcacaggaagccgtgaaactggaaattcagttcatgaagataagaagtttcttgacaaatacatgcccc

SEQ ID NO: 588281 - DNA, 100 bp, Homo sapiens
tccgcagacgccttcggcttctccgcagctgccaggatttgggccgccaggcttgggctggggctgggatgatcaggatggtagtcaaggtctgggcaag

SEQ ID NO: 588282 - DNA, 83 bp, Homo sapiens
cgccgcccccgggctcgcggcctgcaggctaccggctctctgaccagttccacgacatcctcattcgaaagtttgacaggcag

SEQ ID NO: 588283 - DNA, 78 bp, Homo sapiens
gctggagacacaatcatatctttagattttggcagcaacgagtttgaggaagaggcaaagaaccctggcctggaaaca

SEQ ID NO: 588284 - DNA, 97 bp, Homo sapiens
gaagcttgcagccctgtgccttgacaagagcctcatccacaccgtgttgctgcaaaaggactatcaggaagatgatgagaagcttattgaggaaatc

SEQ ID NO: 588285 - DNA, 100 bp, Homo sapiens
agaaaggtggggcagagctcatctgacgtggcatcagctgaagatgcttgtggaggaacaatgagaggatccagtggcatcatatccagccctagttttc

SEQ ID NO: 588286 - DNA, 95 bp, Homo sapiens
tgctgtttgtatgcacgacttgaagacacgcacttatcattcagtggaacccttaggagaaatcttgagagtggacagcaattgtgaagatcgcc

SEQ ID NO: 588287 - DNA, 83 bp, Homo sapiens
gggctgaggcggccgcggggcccgagcgcagggaacccaccaagaccaacctggtcacattcttccataccgacctcagcggt

SEQ ID NO: 588288 - DNA, 97 bp, Homo sapiens
attcaaacatggaaaagctcctattctgattgctacagatgtggcctccagagggctagtttttagccagacgccaattctccaggcgctgcagcat

SEQ ID NO: 588289 - DNA, 100 bp, Homo sapiens
ccgacctcgacgtcttgcctgtgtcccacttgttcgcggcctataggcttttatacagaaaaacctaagacaattaaactacgtatggattgggcttaac

SEQ ID NO: 588290 - DNA, 75 bp, Homo sapiens
tgaagtgtcaaaatccatagatggaaaagatgccccgtcgcagaatttagtctcaaaggaaacttcaaccacagc

SEQ ID NO: 588291 - DNA, 131 bp, Homo sapiens
cttgcaccgctacaacgcctacccctcagagcaggagaagctgagcctttctggacagaccaacctgtcagtgctgcaacccctggcaaccactaatctgctttctatctatggatttgcctattctggac

SEQ ID NO: 588292 - DNA, 83 bp, Homo sapiens
gtggaagcaggactgcgccgcgtcttcctcaagggaacggcaggagcagctgatgggatatcggaagagagggccgaagccca

SEQ ID NO: 588293 - DNA, 74 bp, Homo sapiens
aacaaagtcagctttctccaatctttctacatcccagaagcatgcttgagaagggaggataaaaactttcagaa

SEQ ID NO: 588294 - DNA, 89 bp, Homo sapiens
agggttatgtctggaatggaggaagcaacccacagtggaagaagttgttccgaatgtaattgaaccttccttcggcctgggtaggatca

SEQ ID NO: 588295 - DNA, 96 bp, Homo sapiens
ccccggtgcaagaggcgcaaacaagccaatcccaggaggaaaaacgagaatcagatatcaccaaggagagaattcagaagatcctggcaactggtg

SEQ ID NO: 588296 - DNA, 76 bp, Homo sapiens
aaactttcgcctgagcctattttggaggattgcccaagaaactaattttttaaagagaacactggacaacatttta

SEQ ID NO: 588297 - DNA, 100 bp, Homo sapiens
agtggaagtgatttgtcggatgaagataagacactttctcagttacagagaggaatcgatgacattcaaagatgtggctgtagacatcacccaggaggac

SEQ ID NO: 588298 - DNA, 100 bp, Homo sapiens
ctggcatggtgtctgtggttggtcccatgggcctccttgtggtcctgctcgttggaggctgtgcagcagaagaaacatgccaaaggccaggatttgtttg

SEQ ID NO: 588299 - DNA, 83 bp, Homo sapiens
ggagaactattaaccaccattcttcagtgggctgtgattttcagaggggaatactaagaagatacatgatcccttaattcagg

SEQ ID NO: 588300 - DNA, 75 bp, Homo sapiens
gccaattcgttttcaggagcatctccaggtaagaatgattgatgttggctgatattggagtgctcattcacatga

SEQ ID NO: 588301 - DNA, 100 bp, Homo sapiens
gttcctcagtgtcctgtccaggatgcttgttcggctcacagaagtggatgtctatgacgaggaggagatcaatatcagcatagatcaagatcccgatccc

SEQ ID NO: 588302 - DNA, 96 bp, Homo sapiens
ttctttcagcgatatgaagttaaatccagttggaattaacgacctctggaaagatgccttttatgttaccaggacaacagggccaagctccgaagg

SEQ ID NO: 588303 - DNA, 90 bp, Homo sapiens
tgtcgaacgatgttggactcatagtcactgccagaaaggtactccaaagattcaggtttactcacgtcatccagcagagaatggaaagtc

SEQ ID NO: 588304 - DNA, 74 bp, Homo sapiens
acaagtacaagcggcgggtgccccggaattcaattcgtcataatctgtccctacacagcaagttcattcgtgtg

SEQ ID NO: 588305 - DNA, 85 bp, Homo sapiens
gagctggcggccatccaggacgtgataactgaactgcttaatgatgtggaaagattaaaacaggcactcaatggcctttcccaac

SEQ ID NO: 588306 - DNA, 77 bp, Homo sapiens
aaaattcatctgggcggtatctggaacttggatgagttccacccgttcatcgaggccctgctgcctcacgtccgcgc

SEQ ID NO: 588307 - DNA, 74 bp, Homo sapiens
tgggccaagagcttcaaggagaagtagccaagtatcttcaagaccttctcatggagagtgtgaatttttccccc

SEQ ID NO: 588308 - DNA, 74 bp, Homo sapiens
gaggctcaaaaagggaaccctggagctgggagcatcgagtacagctgtccggcctccaacgagtgtgagatcac

SEQ ID NO: 588309 - DNA, 100 bp, Homo sapiens
cggctctctacgtccctgcggagcagccggtctagatgttgatggaatatatcgagttagtggcaatctggcaacaatacagaagttaagatttattgtc

SEQ ID NO: 588310 - DNA, 50 bp, Homo sapiens
aaagggcacattcagatgtttgtgcaatcgcttccatactaagggcctgg

SEQ ID NO: 588311 - DNA, 101 bp, Homo sapiens
catgctcgcttcacggaggcaatagctagccgatgatgctgtgtatctggacaatgagaaagaaagagaagagtatgtcctgaatgacatcggggtaattt

SEQ ID NO: 588312 - DNA, 90 bp, Homo sapiens
cacgccagccgcaccatgccgctcctaagcctgcacagccgcggcggcagcagcagtgagagctggctggaggcgtgatcctgggtgtgg

SEQ ID NO: 588313 - DNA, 75 bp, Homo sapiens
ttatgaagagtatctctgtatgaaaaccttactgcttctctcttcagacagcgtggaagatgaactggagatggc

SEQ ID NO: 588314 - DNA, 75 bp, Homo sapiens
gctcgacgaccaagaggcgaagagtgccggtggtggtgtgcacattgagccccggtatagacagttcccccagct

SEQ ID NO: 588315 - DNA, 75 bp, Homo sapiens
ggacgctggtgaccaagatggcggcggagctggtggaggccaaaacctccttgaggcccgccgcccgcgggccca

SEQ ID NO: 588316 - DNA, 75 bp, Homo sapiens
gaccatggcctcctccgaggtggcgcggcacctgtggtgaaagtgccacagaagacactcctgatggatgctctt

SEQ ID NO: 588317 - DNA, 75 bp, Homo sapiens
gctgcctgctcaaagagctgcaccgcttcgagtctattgccattgcccaagggtggcccagttgaaatccttccc

SEQ ID NO: 588318 - DNA, 50 bp, Homo sapiens
ctgggacacccgggagtcaggaaatggccagagccaacgggctgaagtct

SEQ ID NO: 588319 - DNA, 100 bp, Homo sapiens
ctgagagtttgatcccaggctttcaatcaacccaaggtgatgcttttgctacgacctcattttctgctggaactggaacaagtggtgatgaacttggaca

SEQ ID NO: 588320 - DNA, 100 bp, Homo sapiens
gccacctatggagattagggaagaaaagaaagaagacaaggtggaaaagttgcagtttgaagaggaggactttgcttcctggactgggtccccaagaaga

SEQ ID NO: 588321 - DNA, 98 bp, Homo sapiens
ggaaccagcagcaaagaagtgctatctggaaagagaggacttggatgttgtgggtgatggtatgcagtgtcctccttcacctttgctttttgatcctt

SEQ ID NO: 588322 - DNA, 101 bp, Homo sapiens
ccggcgctagcagggctgaagagaagatggaggagctggtggtggaagtgcggggctccaatggcgctttctacaaggagtcttacacatataaagaccca

SEQ ID NO: 588323 - DNA, 100 bp, Homo sapiens
accgcggagtcgagacctacccgaacgacgcgggcgagcggggctttggacgccggtggagacgcaggcgagagagcagagcaactctccaacacactga

SEQ ID NO: 588324 - DNA, 74 bp, Homo sapiens
actctttgcacagatagcaaggacaatgaaggaggaatgacatctcggtctggtacagatgtcgatgcagcaaa

SEQ ID NO: 588325 - DNA, 74 bp, Homo sapiens
ctgacctcgcccacgcccagcagcagcagcaacagggacactccggacgcaggcccggccaggagagttcgtct

SEQ ID NO: 588326 - DNA, 85 bp, Homo sapiens
gataatgtgcataaaattcaacccagctttcaaagtccagtcaaaatatcaggaaaattgcctaagaattatgacccaaaagtta

SEQ ID NO: 588327 - DNA, 75 bp, Homo sapiens
catgccatgtactgcaatggtctgatggaggaagatacagcgggtccatatggaatatttgctggtagggatgcc

SEQ ID NO: 588328 - DNA, 51 bp, Homo sapiens
acgggagtttcttggtaaatccagaatcagtgcacagccagagaacaacac

SEQ ID NO: 588329 - DNA, 84 bp, Homo sapiens
gcccctcggcggcgccaccatgtactcgggagccggccccggagctctttgttcaatgcctagccacctattcctacagacacg

SEQ ID NO: 588330 - DNA, 98 bp, Homo sapiens
gcgtctcggcccttgcctgcgcgcctaccaggctcgaccccagtctacgagaacgaagaccagctgctctgggaccccagcgtcctccctgagaggga

SEQ ID NO: 588331 - DNA, 100 bp, Homo sapiens
ggctcccttctgatgaaaattgagctgtccatgcagccatggaacccgggttacagcagtgagggggccacggctcaagatcacaaggtttacatctggc

SEQ ID NO: 588332 - DNA, 96 bp, Homo sapiens
cgtctgccccgccggctgggtgggcgagcaatgccagcactgcgggggccgcttcagtgtgcctgacgaggaggccaagacaaccaccacaaacac

SEQ ID NO: 588333 - DNA, 90 bp, Homo sapiens
gcgggacctggcgccaccttgcaggtgaaagaaaagatgttgtcccggttaagagtagtttccaccacttgtactttggcatgtcgacat

SEQ ID NO: 588334 - DNA, 98 bp, Homo sapiens
agacttcttgctcatttctgagtattgtctttatatcctgacactatgaatgctacttggatgcctcttaaggtatgatctcgtgaaaccttgagaga

SEQ ID NO: 588335 - DNA, 73 bp, Homo sapiens
aactgctgacgcttgatgagaaggacccacggcgtctgttcgaaggggtagtaaaaagaatcattcctgcagt

SEQ ID NO: 588336 - DNA, 101 bp, Homo sapiens
cgaggagggatttcagtgctcttcagcctgacctgggagctgccccttcccaaagatgtggtttaacagcaacatggctgacaaggccaagcctgccaaag

SEQ ID NO: 588337 - DNA, 100 bp, Homo sapiens
gtaaatagctctgtggggactgtcactactgccacagccaacttctctttgcctgaaaaatgcgactatatggatgaggtgacatatggggagctggaga

SEQ ID NO: 588338 - DNA, 100 bp, Homo sapiens
cagaaattgagaaaaaacttcctcggctgtacaaagttttaaaggagtctgaatatgtttcagctcatcttcatgaatggatagatctgatctttggcta

SEQ ID NO: 588339 - DNA, 51 bp, Homo sapiens
tgacaaaaagtcatagtggtgtgacaagtatgcaggtgccttgagagcttc

SEQ ID NO: 588340 - DNA, 83 bp, Homo sapiens
ctgctttccactcggctcctgtcgtccgttctctcaggctcccgttcaggacggggaggtttactgcatcgacgcgcggttct

SEQ ID NO: 588341 - DNA, 100 bp, Homo sapiens
ccaaagatggaatgacttaaaagcaaaatctgctagcatcagccggtctgtgtgatattagtgaagggactgttgttccagaggatcgctgcaaatctcc

SEQ ID NO: 588342 - DNA, 74 bp, Homo sapiens
gagtccatcaccaagggagacctggaggctgacgtgatggcagacagggttccccgctgcccggtctgcaccgg

SEQ ID NO: 588343 - DNA, 100 bp, Homo sapiens
aatgggacctcgagtcactgtgcgagcttgacatgatttccacaagggtgatggacattaagcttcgggaggctgcagaaggccttggggaggacagcac

SEQ ID NO: 588344 - DNA, 100 bp, Homo sapiens
ggaccccagaggtcatcccagctccagacgtggacacattttcttccaatgaacaatcaaccatgacgaccgaatctggatcagactcggaatccaagcc

SEQ ID NO: 588345 - DNA, 101 bp, Homo sapiens
tgagacccagaagggagcgaaggtttttgctgcgccaacgcagtgaccgaaggctccgctcacgcccggggtgttattaccgctgtcacagtaagtgcttg

SEQ ID NO: 588346 - DNA, 75 bp, Homo sapiens
attcctgccagacccctcagctttgcagactatctgttatagtccctgggtcaagacaacaatttttataccttc

SEQ ID NO: 588347 - DNA, 74 bp, Homo sapiens
cacctgatgcagtcgtctctccgtcttccgctttcttaaggtctgtatgcaccaggacacaacagggtatgcct

SEQ ID NO: 588348 - DNA, 100 bp, Homo sapiens
atgataaagggctctgaaagctagaagaaaaggtgtacttgcaagaaacctcaggacttgagtaacagcaacatgaccttaacacgtgaacagaaagaag

SEQ ID NO: 588349 - DNA, 74 bp, Homo sapiens
gaagagaagaaggcccagaactctgaaatgagaatgaagagagctcagattgaaaaggctgtggtgtctcagcg

SEQ ID NO: 588350 - DNA, 101 bp, Homo sapiens
acgctaggtgggcagggctcttcacttgcaggaactcctcctcccacatctgatggagctaccaatcatcagatctcctctgcctctggggtgcgtctcag

SEQ ID NO: 588351 - DNA, 75 bp, Homo sapiens
ctgaactactcagtaaggcagcagccaggtcctagccaatggtctggacaacaagctccgtgaagacctggagcg

SEQ ID NO: 588352 - DNA, 98 bp, Homo sapiens
gaagattccaagttcaggagaactcgaccggcagtttggagcatgtgaacaccttgagccttgatgagttccagtatgtggtatattatgcagagcat

SEQ ID NO: 588353 - DNA, 82 bp, Homo sapiens
ggaggaacagaagcggaacagccacagcagcctcccaaggagtctgcaagttgaatgaggaaaatggggagcaggaggctga

SEQ ID NO: 588354 - DNA, 100 bp, Homo sapiens
ctttgcatccttcaatgacacttttgtccatgtcactgatctttctggcaagtgcatagcagcctggttggaagcattctgagtgctctgtctgccctgg

SEQ ID NO: 588355 - DNA, 100 bp, Homo sapiens
ccaacggggaggccaacgtgaagaacggctggctgtcggcaattggattcttccagtacagcccgggcgctgccgtggtcatgctgcttccagccatcat

SEQ ID NO: 588356 - DNA, 101 bp, Homo sapiens
tgctatgaccgtggggaaggatgttaggggcaccaccacgaggcgatttgtgggccataccaaggatgtgctgagtgtggccttctcctctgacaaccggc

SEQ ID NO: 588357 - DNA, 83 bp, Homo sapiens
cccatgctctggagtggcccagcctaactgcccagtggcttccagatgtaaccagatttggactgagcaacaaatttgaatct

SEQ ID NO: 588358 - DNA, 95 bp, Homo sapiens
gggaagaagcagctggacccgctcaccatctacggcatccggttttctccttggaccaagatgactgatggaaaactctccacctctacaaatgg

SEQ ID NO: 588359 - DNA, 75 bp, Homo sapiens
tcgggacaccccggaagctgggaaatgcagcctcccgcgacgatgcccctcaacgttagcttcaccaacaggaac

SEQ ID NO: 588360 - DNA, 51 bp, Homo sapiens
tagatgtgaaaaaaaatctcactgcttcggaaatgactacagagctggagg

SEQ ID NO: 588361 - DNA, 82 bp, Homo sapiens
tttgctaaacttaaaagcaagctggttctctgggatataaataagttatctccagaagaagaagagaaaaggagaatccgaa

SEQ ID NO: 588362 - DNA, 98 bp, Homo sapiens
gattgaaagactgacccgtcctggttcctcttacttcaatttgaacccatttgaggaacgtcaaggtcgtgggaaataaaaggcagttctacacagac

SEQ ID NO: 588363 - DNA, 100 bp, Homo sapiens
gcaacttcaagtagtggaaggagtacagggaagtctataagctttgcaacagaattacagagtatgatctcatttagaggcgagttttgaggaggtagag

SEQ ID NO: 588364 - DNA, 100 bp, Homo sapiens
aggctggtcttgaactccttccctcaagtgattcttctgcctaatcctcccaaagttcttagattacagcgccatcatgaccgggtcctataacaacttc

SEQ ID NO: 588365 - DNA, 75 bp, Homo sapiens
tccaacaaaagaatgctgccacaggaaaatatgttgtgttcttcttttaccctcttgacttcacctttgtgtgcc

SEQ ID NO: 588366 - DNA, 74 bp, Homo sapiens
cgaaactcagggcaaaatcaccacccctctccacaggaatacagagagaagaagaaggaggttcctgctgtgcc

SEQ ID NO: 588367 - DNA, 75 bp, Homo sapiens
tctaaggccatggttttcatggatgtaaggatgcccaagtgtgactgcacagaaaagttacaaaacaaatttgac

SEQ ID NO: 588368 - DNA, 51 bp, Homo sapiens
catgttgttagcagtttttgaagagacctcagtatgaacaacatcagtcag

SEQ ID NO: 588369 - DNA, 71 bp, Homo sapiens
ttcatactgcctctggatgttagtacggtcatcatggtcacaggagaccatccaatcacagctaaagctat

SEQ ID NO: 588370 - DNA, 100 bp, Homo sapiens
gctaagccatcactggaatacattagcgaaaaacttgtatcagggagaagtcagagagacggtgcctgaacccctcggccccgccgctggtcaccagcag

SEQ ID NO: 588371 - DNA, 90 bp, Homo sapiens
agcaaggaggtgaccctgaacctctacgacacggccgaggagaaggcagagcccccccaggctatgaatgccctgatgcggttgaaccag

SEQ ID NO: 588372 - DNA, 100 bp, Homo sapiens
ttcagaagaaggacttcggaatgcactacaacaggaaaatcatattatagatggagtaaagggtacaggcatccttcacctgctattgttgcaagaacag

SEQ ID NO: 588373 - DNA, 100 bp, Homo sapiens
gagagctccgtgcgggtggctgtcaggcagaagactgatttttggaaatatgtatttgggagacagtcacgtcctattgaataccttgtgctggtgctgc

SEQ ID NO: 588374 - DNA, 101 bp, Homo sapiens
ctcaaaatggccacacgcgtacccccgtagcggaaaaacgtatcgagaaccttccctgcgaacttcagaggaacttccagctgatgcgagagctggaccag

SEQ ID NO: 588375 - DNA, 75 bp, Homo sapiens
tggcggagaagactcgaacggctcccacagccgggcgttgggggaaaggtgctgaaggtcgccatcctggctgag

SEQ ID NO: 588376 - DNA, 75 bp, Homo sapiens
gtggacgttcggccaagggaccaaggtggaaatcaaacagaaactccagaaaatcttgccaaacttctgaccagg

SEQ ID NO: 588377 - DNA, 100 bp, Homo sapiens
agccatggccccagacttgtcgcacggatgcagaaaacttaatggaggaggctgaggatgtagatatgatggatcagaatggaatgacgcctttaatgtg

SEQ ID NO: 588378 - DNA, 90 bp, Homo sapiens
tgctggcacaacccctcaaagacagtgatgttgaggctatctatgtgcctgctgatgacttgactgaccctgcccctgctactacgtttg

SEQ ID NO: 588379 - DNA, 83 bp, Homo sapiens
ctgacctctctgatgagatggatcgtgtctcaatttaaaatggtgaattactcctatgatgaagatctggaagagctttgtcc

SEQ ID NO: 588380 - DNA, 83 bp, Homo sapiens
ccgacatcaacacctctaagactggagaagagcactacaaacaccactggtttcccgaaaagccgtccaagggctccggctac

SEQ ID NO: 588381 - DNA, 80 bp, Homo sapiens
ggagcgcactccgtggccccgatggagcggtacaaagagatcctgcagatcattcagctggacctagacctgaagtttaa

SEQ ID NO: 588382 - DNA, 100 bp, Homo sapiens
gtggcttcctgcttcagtgctgtttgtgggtataatctatgctgggtccagagcattgtccagactgtgtcaaatcaacagtgccttgacatctttccac

SEQ ID NO: 588383 - DNA, 83 bp, Homo sapiens
cccaccttgatccagcggacttacgggagggagccatggatttgctgcgggagctgaaggccatgcctatcacgctgcacctg

SEQ ID NO: 588384 - DNA, 100 bp, Homo sapiens
aatttggaaggaatgttttgctagctgctaaaaccacctttgtcaccagaatgaatgaagtgcttcagatttaaatagaatcaaggccagaggtgtgaac

SEQ ID NO: 588385 - DNA, 100 bp, Homo sapiens
ataaccacccaaggcccaaaagcgtcaaactcaccaaaaacaacatctttccagaaagaggaaagcttagatatgccaacaacagcaattacaaaaatga

SEQ ID NO: 588386 - DNA, 51 bp, Homo sapiens
gttaaggcgttcgcggcgtgtggtactgcttctccgagatggccccagtgt

SEQ ID NO: 588387 - DNA, 74 bp, Homo sapiens
gcaggtggacttcttgcaacaggttaacgtgtatggcgtgtgcgtgccagagttcgaggagcccagggtgattg

SEQ ID NO: 588388 - DNA, 75 bp, Homo sapiens
ctcctgcgctagaagaaaggaagacggactcgtatcggtaccccaggacagttaccttggtgacgagtttaaatc

SEQ ID NO: 588389 - DNA, 51 bp, Homo sapiens
ctaaggccattggacacagaatccgagtgtttcaggcgacctccaagaagg

SEQ ID NO: 588390 - DNA, 124 bp, Homo sapiens
agcggaaccatctgggagccttcctgatccgggagagtgagagctccccaggggagttctctgtgtctgtgaaccaaggccacctttgatgccatttctaagacctacagctacctgacccccg

SEQ ID NO: 588391 - DNA, 96 bp, Homo sapiens
ctccatgcgcagtcatgagtcgcttcaagtttatcgagagcagagctgacatctgataaagacatgtaccttgacaacagctccattgaagaagct

SEQ ID NO: 588392 - DNA, 100 bp, Homo sapiens
gccgttttttaagccggtccgaaaagcgcaatattcgggtgggagtgacccgatttcccaggtgcaggccactgtcgtggggctcttggctgctgtggct

SEQ ID NO: 588393 - DNA, 98 bp, Homo sapiens
tccgggtgtccggccgtgtcccgaggaagtgcaagacccgtggtttccagtgacagtgacagtgactcggatcttagctcctccagcctagaggacag

SEQ ID NO: 588394 - DNA, 75 bp, Homo sapiens
ctgaaacagaaattctggaacacctatatggtacatgtgaagattttttggcagcttagcgtggaaaccattgat

SEQ ID NO: 588395 - DNA, 98 bp, Homo sapiens
cgagggactgggagtcgttagtgaggttgcagcattccctggggatgtggaggttcgagcactaattgaaggacaattcatggccaagaggattcacg

SEQ ID NO: 588396 - DNA, 75 bp, Homo sapiens
gcagccccaaagcgagcgaagctagggtcgccgccactgccgcaggaggcgtgagagctgagctcaatgtgcagc

SEQ ID NO: 588397 - DNA, 75 bp, Homo sapiens
caggggtgcagtgtgtctggtcttatgaggtcagtatgggaatcctttaaataaatatatcagacattatgaagg

SEQ ID NO: 588398 - DNA, 100 bp, Homo sapiens
ttcttggtatatagatacttgcaagagtcaggctaaatttggccgaagatggaccaaaatttcaaagctaattggaagccgcactgttttacaagtgaag

SEQ ID NO: 588399 - DNA, 98 bp, Homo sapiens
tgcgaaggccgggacccggttccccggcccacagtgggggtgtgcaaacccgagagaactggtgtgctggagaagagaaacgagttggcacacgcaca

SEQ ID NO: 588400 - DNA, 83 bp, Homo sapiens
ctcggcagcgcccgcggagacgtgaagagttgtccagtgtacagaagcttactggaaggagtggccaactagttaaaggtttg

SEQ ID NO: 588401 - DNA, 80 bp, Homo sapiens
agttcaaccgcatgaagcagctggctaaccagaccgtgggcaggtctggatgtaccgactgcttttggaataaaaagatt

SEQ ID NO: 588402 - DNA, 90 bp, Homo sapiens
tcatcctcagcagcaccggcttctttttgaagtgtttgacgaaaaccgattgcaacgtgaactagaagagtggcagttgcagcaaaggcg

SEQ ID NO: 588403 - DNA, 90 bp, Homo sapiens
tgcatgtgaagcaatggtatgggaaaattgtttgcagaaggatgaaaaggctttattgccaaactgattcctccttggtcacttttcagc

SEQ ID NO: 588404 - DNA, 90 bp, Homo sapiens
aacttctttggcaagtggacattttactggctcaaatcctgataacttaagtgactctctcttttccggtgatgaagaaaatgctgggac

SEQ ID NO: 588405 - DNA, 75 bp, Homo sapiens
tgatagtcttcctatcacgggcactagtgtggctctcctgttccagcaattggagggagacgtggtgggcggtcc

SEQ ID NO: 588406 - DNA, 98 bp, Homo sapiens
atgaggaagtactgagcctgttggaggaactggcccggaaacaggaggacacaatgcagatcttcgtgaagactctgactggtaagaccatcaccctc

SEQ ID NO: 588407 - DNA, 100 bp, Homo sapiens
gaagggaggctccaagacctcatcaacaattaaggccaacatagccgaggtagaggtctccatccctgccaagctgcacaactccctcattggcaccaag

SEQ ID NO: 588408 - DNA, 101 bp, Homo sapiens
attctggaggcaaagaacctgaagaagatggatgtgggtggcttatccggtccttatgtcgtcagaagatcgagaagctcaggaggatgaattgctggccc

SEQ ID NO: 588409 - DNA, 99 bp, Homo sapiens
agaccctcctgccaaaaggaaatgcatctttatgtcagaaacacaaagcagcccaaccaaagggcatgcatgtagggaataccggattcataaagagct

SEQ ID NO: 588410 - DNA, 48 bp, Homo sapiens
agccctcagcaccactttgaacaggataacatcaggcttcgatctagc

SEQ ID NO: 588411 - DNA, 98 bp, Homo sapiens
atcgtcagcctcatgtacttcgcctttaccaggtcgcccccgataagacatgcatgcagttctccatccgccgccccaagctgccgtcctccgagacg

SEQ ID NO: 588412 - DNA, 97 bp, Homo sapiens
gcctcttcggctactcggtcgccctccatcggcagacagagcggcagcagcgctaccttgggtaattccagaattgattggccataccattgtcact

SEQ ID NO: 588413 - DNA, 90 bp, Homo sapiens
ctcgtcgacatgagtgatgtggaggaaaacaacttcgagggcagactcaccatctgctacctggatatgctgatgaccagtgaggagcgc

SEQ ID NO: 588414 - DNA, 100 bp, Homo sapiens
taaaaacagaacaggaggtggtagagggcatggatatctctactcgctccaaaggtattgttgcagcatctggcagtgagactgaggatgaggacagcat

SEQ ID NO: 588415 - DNA, 82 bp, Homo sapiens
aggaatcttctaattcttggaaaaattctgggtgaagataggagcatgctgctatgtggaatgttcagctttaacccagaag

SEQ ID NO: 588416 - DNA, 90 bp, Homo sapiens
agcctccagagtagctgggattacaggagccttactgcctttgtaccccactcgggccatgggctccccgtttcctctggtgaacctgcc

SEQ ID NO: 588417 - DNA, 100 bp, Homo sapiens
tgtctcaaatcaaccacaagctggagtattctaccttgtaaatactgttatttgtatatactgtaaatgatgacatcggtgggcactaaccgagcccggg

SEQ ID NO: 588418 - DNA, 100 bp, Homo sapiens
gaaaactctctatatgagtcatcgagagctacctgcctggagctcgtccgcatggtgctgaatggctgaggaccttcccagtctccccagagtccgtgcc

SEQ ID NO: 588419 - DNA, 100 bp, Homo sapiens
taatgatagaatgaagaccacaataaaagagacctctacttagctcagcaattcttaccttcgccagcagccctgtggtggcgacgacgatggaccagga

SEQ ID NO: 588420 - DNA, 100 bp, Homo sapiens
ccacccagaaggtgctagacaccaagaaggacgcactgactcgcctcaagcacctgcgcatcgtcatcgtacaagttgtgcaaagtgaggaagattactg

SEQ ID NO: 588421 - DNA, 112 bp, Homo sapiens
aaagctggaaggattcggagagggttggggccgtcttcctcatccttccttttctcggggctcccgtggacaaattcctgtcccttgtgccgctatgagctgcccactgatg

SEQ ID NO: 588422 - DNA, 101 bp, Homo sapiens
acacaactcgggcctccccagcgacagggctcttggctttgggcctcagtgcaagtccattggaaaaggcagctgcaacaatctagtggtcaccagcagtc

SEQ ID NO: 588423 - DNA, 75 bp, Homo sapiens
cggccgggggctcagagatccaagtgcgcgccctggcgggtccggaccaagttggcaaacatgaattgactgggc

SEQ ID NO: 588424 - DNA, 88 bp, Homo sapiens
ctccaggatgcgctgagccctacaacacccccagcggccgccggctcccccacgaggcacgcgctcatcaagaagctgaatcagctgc

SEQ ID NO: 588425 - DNA, 51 bp, Homo sapiens
gagaactacaggaacctggtcttcctgggtggggctcctgtacgaagaggg

SEQ ID NO: 588426 - DNA, 100 bp, Homo sapiens
gctttacctatctataccacatcagcttcaaaaatacacgagcaagaagccattaactctgacccagagttgtctaattgtgaaaattttcagaagactg

SEQ ID NO: 588427 - DNA, 83 bp, Homo sapiens
catggatagcgacgacgagatggtggaggaggcggtggaagttccaaagaactactggttcagattttagctcttcccaagtt

SEQ ID NO: 588428 - DNA, 131 bp, Homo sapiens
ccctctcgctgttgctggtctctggctccctcctcccagggccaggcgccgctcagaacggaatgaatctgaagtctgctgcagtaaaacacagaaggctttaaaatgttttcttgcataaaattcaaaac

SEQ ID NO: 588429 - DNA, 100 bp, Homo sapiens
cgggaaaaaggctgggtgccgccgtcccccagctgcgcaaccctaggaactctcgggactggggttttaaggggtgtggcaggaggttttggactcgatg

SEQ ID NO: 588430 - DNA, 98 bp, Homo sapiens
cttttccaagtaaagctcttcatgcaaggaaacataagttggaggttctggaatctcagcttcttggacacttaatgattgttggcaagaaatgtgct

SEQ ID NO: 588431 - DNA, 99 bp, Homo sapiens
attagaagtcttaagaactcaggacaagcagcagaaatacatgcaacatggtgactggaatcaagagagacccggccaaggcttttgtgcccaggactg

SEQ ID NO: 588432 - DNA, 83 bp, Homo sapiens
cactcctactagtggagggggtccaatgtcaccccaggatgatgaagcagaagaggggatccatatggctttggagacagtcg

SEQ ID NO: 588433 - DNA, 101 bp, Homo sapiens
gaaaaaatagaaaaacaaattgctacatccgggcccccaccagaaggtggacttaggctattgacctgttgtattggcgggacatcaagcagacgggcatc

SEQ ID NO: 588434 - DNA, 75 bp, Homo sapiens
tattcaagtcaattaccatcctttaccagggatgggactgaggaagacccacaggcagaactggccatcattcat

SEQ ID NO: 588435 - DNA, 51 bp, Homo sapiens
tgtttttgccaccacactccagcttgggtcatttcatgggcaacaacacag

SEQ ID NO: 588436 - DNA, 83 bp, Homo sapiens
cctcagtcacgggcctagaactccaaggagaaaggcggcggtgctggagaatctggtaaaagcaccattgtgaagcagatgag

SEQ ID NO: 588437 - DNA, 49 bp, Homo sapiens
ggacatggccagcgacgccgtgcagcatcatggcagaacaggatgtgga

SEQ ID NO: 588438 - DNA, 100 bp, Homo sapiens
cgaaggggacctcatgtccctgtgggacacaatgcccccaagctgctggagccagttctgcttctcggcaaggagcgatttgctggtgtagacatccgtg

SEQ ID NO: 588439 - DNA, 90 bp, Homo sapiens
tggtatgaagtgtggcatccaaaatcagagaatcccccatcccagaagacaaagaccgcagatttgtcttctcttactttctagctaccg

SEQ ID NO: 588440 - DNA, 100 bp, Homo sapiens
ccgaagacacaaacaacaagggcagcccctatacaaggacagttggctcctaagggagggactaaatgagaataaaggcagccccgttgatgactgaaaa

SEQ ID NO: 588441 - DNA, 50 bp, Homo sapiens
gattttaccttggataccctgctttgggtcagacatatttccaacatttg

SEQ ID NO: 588442 - DNA, 100 bp, Homo sapiens
tgaccgagtgttccatgaaagcattctcctggccattgcccttctggaaggaggcaacaccaccatccaggtactccaaagattcaggtttactcacgtc

SEQ ID NO: 588443 - DNA, 83 bp, Homo sapiens
aagaccgcgcgcagggcctgcagcgggagctggacggcgagcgcgagcggcgcgagaaagaatgtgggtgccggcaggacagg

SEQ ID NO: 588444 - DNA, 90 bp, Homo sapiens
agcggcccagggttctgttacagactcaagatctcttttatttaatgcaatacagtgcgatggtgctggagaatctggtaaaagcaccat

SEQ ID NO: 588445 - DNA, 75 bp, Homo sapiens
agcctacatccaatatgagccccacctcctgttctctagggagctggtgggagcagttgacccaggcctcccggg

SEQ ID NO: 588446 - DNA, 99 bp, Homo sapiens
cgggagctgtacttctatatctacaagggggtccgcaaggttgctgaatgctataaagccaggacttgttaaaaagatcaatagattgcctacccccat

SEQ ID NO: 588447 - DNA, 74 bp, Homo sapiens
gccggcccagctctgtcgctgacgggaggatctgaagccggccgcaggattgactcagtcagcattgacaccct

SEQ ID NO: 588448 - DNA, 100 bp, Homo sapiens
cttatcgaaggatgtgcatgaaggacagcctcttctcaatgtacagtacgggtggctggcaagatggccgaataggaagagctccagtctacagctcccg

SEQ ID NO: 588449 - DNA, 100 bp, Homo sapiens
aacctcatgtctcacctcagcgactgtgagcacaacccgaagcggcctgtgacctgtgaacagggctgtggatacatgatcacggatatcatcgggaagg

SEQ ID NO: 588450 - DNA, 89 bp, Homo sapiens
ctcactcttctgttaacagggtcctggcaggagatgacaagtatgggcggaagatcattgtgtttagtgcctgtcgaatgccccccagc

SEQ ID NO: 588451 - DNA, 90 bp, Homo sapiens
gaatggcatccgtcctaccggaaacctaggaaaagcctgaggacaaagttctgggagatcggcattgactatgtaagtaacaacaacggc

SEQ ID NO: 588452 - DNA, 95 bp, Homo sapiens
tccttgcgatggagcatatccggacgaccaagcgccaaatcttaaaggcagaccacgcaaaaagaaaccatgcccacaaagaagagattcattca

SEQ ID NO: 588453 - DNA, 89 bp, Homo sapiens
attttagggtcctttatatagaagggagagtaggtgttggggatgtcctttgcactgaccctgaactgccagattgacaaaaccagcca

SEQ ID NO: 588454 - DNA, 83 bp, Homo sapiens
cctgccccctggggagcggtctccagccgcttcgaagccgccttcttccccctccacaatgcagatcttcgtgaagactctga

SEQ ID NO: 588455 - DNA, 83 bp, Homo sapiens
ttcagctgccacggccacctggctcgtgaaagctggtaacatcaggagtcagttcctatcagcatacatctgtgacattggag

SEQ ID NO: 588456 - DNA, 76 bp, Homo sapiens
ttggacgccggtggagacgcaggcgaggggtggaccaagctttgccgcaagaacgccgggctcctgtcactccttc

SEQ ID NO: 588457 - DNA, 82 bp, Homo sapiens
cttccccctctcaccatcagcaaccatgattttaagacaattatctcctatattgatgagcaatttgagaggtacctgcatg

SEQ ID NO: 588458 - DNA, 95 bp, Homo sapiens
gacagaaaacttggaactaagctggaggacaccgagtactcttatgcagtccccatggcagaagctgaggaagattgtcattctgatactgtcag

SEQ ID NO: 588459 - DNA, 75 bp, Homo sapiens
ccgctctttgccgtgacaacaccgttcccccagccgggctggtacatggtgcgggtccgagctgtggtgatggcc

SEQ ID NO: 588460 - DNA, 83 bp, Homo sapiens
ttgaaatcgacacacaaagaatagagttgagcctgtgggacacttcggcttccttcaaaatgtctactgttcacgaaatcctg

SEQ ID NO: 588461 - DNA, 75 bp, Homo sapiens
cttcagtatggtggactatgatgaggggacagacgtttttcagcaggatgaaactgttgcttgcatggctgcagc

SEQ ID NO: 588462 - DNA, 90 bp, Homo sapiens
tggcccggttcttcctgatgcagactgccgtccactagaggctggacaggaccccccgagaccattcctcaagaattttgtatccaaggc

SEQ ID NO: 588463 - DNA, 82 bp, Homo sapiens
gtcttcatgtttgctttcgcttccctctacacgcaaatcccagaaatccttccacaacctgatgatgagtgacaagaagtca

SEQ ID NO: 588464 - DNA, 110 bp, Homo sapiens
cccgggaggaaggaacgaggcaaggagctaaagcagcgtgcgttcagccctggggttgtgaccgagattcccgacgagagagactgaggggaagagaggaaggaggggcg

SEQ ID NO: 588465 - DNA, 83 bp, Homo sapiens
gcaagaaccaccccaagctgctgctacgcaggaactgtggctgcaccatctgtcttcatcttcccgccatctgatgagcagtt

SEQ ID NO: 588466 - DNA, 82 bp, Homo sapiens
cggaagctggttttcaggccacaaatgctttcacagacgccgcaccaggctgcaggccagcccttcaagttcactatcccgg

SEQ ID NO: 588467 - DNA, 101 bp, Homo sapiens
agagtagcgacccggggggagcgcggggcgacgctggctgcagggacccggtgacagcgtgagaggcctccccatggccacccatggaccagtcggcattc

SEQ ID NO: 588468 - DNA, 75 bp, Homo sapiens
aggctgggctgaggcgccgcggtaccatgaggcgccgcctgatcctgcctgaagatggtgccactggtggctgtg

SEQ ID NO: 588469 - DNA, 103 bp, Homo sapiens
tttagtggacaaaccaaatgaccaatcttcaagatggtcttcagagagcaactatcctccccaggtgtcagcagttgagtctttggagggccccctgctccag

SEQ ID NO: 588470 - DNA, 96 bp, Homo sapiens
cagctctcagatgtcccaaggacctattgctatgcaggagtataacatgtatggctggtgggtgggagaactgaacagcctcgttgggattgttcc

SEQ ID NO: 588471 - DNA, 100 bp, Homo sapiens
aaggagtacagggaagtctataagctttgcaacagaattacagagtatgatagctccctctttgcccactagcagggcattagctggtgctgaagacagt

SEQ ID NO: 588472 - DNA, 100 bp, Homo sapiens
cttcgccatcgccagcatcgccaacccggactggatcaacaccggggagtctgcggggatcgcttacacctgagacgaactacagaacagcacgtaccag

SEQ ID NO: 588473 - DNA, 98 bp, Homo sapiens
ggacatcgaggacgccaaggcacaccgcaggaacaagaaggacgtcaacctcagcaagactgagaagatgatgtgttccagctgccaagaagccgggg

SEQ ID NO: 588474 - DNA, 100 bp, Homo sapiens
ccatggccgatcctcgcgtgagacagatcaagatcaagaccggcgtggtgaagcggtgtcattccacacatccacaaatctctgattgggaagaaaggac

SEQ ID NO: 588475 - DNA, 98 bp, Homo sapiens
ggagattgacgtggatgagctcctggacatggagagtgacgatgcccgggctgccagggtcaaggagctgcacgcggccgaggtgcgcaggaacaagg

SEQ ID NO: 588476 - DNA, 100 bp, Homo sapiens
aacggggcgagcctggaggattgtcactccaacctcttttcgctggtcaaaatgcagatcttcgtgaaaacccttaccggcaagaccatcacccttgagg

SEQ ID NO: 588477 - DNA, 50 bp, Homo sapiens
gttgcacttaactgatattcagctgattgctgtgtttgaagaacaagaac

SEQ ID NO: 588478 - DNA, 100 bp, Homo sapiens
cgcaaacgaaaaagaacgacatgatgcaatcttcaggaaagtaagaggacattggaagagcatgaggcagagacaggaatgaagtctaaagaagccagaa

SEQ ID NO: 588479 - DNA, 83 bp, Homo sapiens
ctccttcggcagtccacccaccgccgccgcctcccaggttcccaacaaggctacgcagaagaacccccttgactgaagcaatg

SEQ ID NO: 588480 - DNA, 100 bp, Homo sapiens
ggcaaggtgaccgttctggatgctagagtgagtgtgcccacctgcgtaagggggcagagacaggtatagcactctccctgggcgcagggccctgaagaac

SEQ ID NO: 588481 - DNA, 90 bp, Homo sapiens
cagccaccagttcaagcgccgggaggccgaccagacccacgcacagattatggtaggagaaggaattctctactgttgcctctccaaaag

SEQ ID NO: 588482 - DNA, 98 bp, Homo sapiens
gtcactgtcccattggccatattttagggaaatcctcattgacgattcaatttgttgaaggccaatttgtggactcctacgatccaaccatagaaaac

SEQ ID NO: 588483 - DNA, 50 bp, Homo sapiens
cgtggtgacattgtatcattggtaaggtgggtgcggctgctatttggacg

SEQ ID NO: 588484 - DNA, 98 bp, Homo sapiens
aaatgcaaatgtttggaaatattttacagatctttttgactatcttcctctcactgccttggtggatgggcagagaaactccagaaaatcttgccaaa

SEQ ID NO: 588485 - DNA, 97 bp, Homo sapiens
cactgcttcatccgggaagtgcttggggatggagtgcctccaaaggttgctgagctcctcaagagttactgatctatgaaatggcagagaatggaaa

SEQ ID NO: 588486 - DNA, 100 bp, Homo sapiens
ttccaccccacctgggccccagaccgtgctgatcttcgatgagctctcggattccttatgcagagtggccgacttggatgcacaggaacaaacgagggaa

SEQ ID NO: 588487 - DNA, 100 bp, Homo sapiens
ttttacaacacctaaagctacagtagtacctttgccaacgttacctcccgtttcccacttaaccaaaccagttcattattatgaagatggtaatgttcag

SEQ ID NO: 588488 - DNA, 98 bp, Homo sapiens
gagcggcctttatgctgtgttcggggctgtctgtcggcgccacagggaatgggggctggtaagaatgattgatgttggctgatattggagtgctcatt

SEQ ID NO: 588489 - DNA, 129 bp, Homo sapiens
cccgcccggaagaagcgaccaaagcgcctgaggaccggcaacatggtgcggtcggggaataagacgccatcgtagtagaagcagggagcggaagaagtctcgatccaggagtagggagcggaagaaatc

SEQ ID NO: 588490 - DNA, 99 bp, Homo sapiens
ccccaggtttctttgccacttcagattggaatcgttgatctgctgaaataacaggctggcgcccatgcggctctacacgctctccaagcgccactttgt

SEQ ID NO: 588491 - DNA, 97 bp, Homo sapiens
gggactcccagggctccagggccctcctccggccccaggcctaccccagtcacggacggtgcagcttcaagcttaggaccacccaccatgcctatcc

SEQ ID NO: 588492 - DNA, 100 bp, Homo sapiens
ctttgagccagtccagaccctgctgctgtcttcaaagaagccgcggcgagtcctttgcacatgttggcaacacacgcatccgcatcggcctccctgccca

SEQ ID NO: 588493 - DNA, 100 bp, Homo sapiens
agcagtgcaactggctcagtattcacagggaaagctgtgaggggatcgcctccggaccaccaccaacgtactgggagactccctgggagctgggattgtg

SEQ ID NO: 588494 - DNA, 78 bp, Homo sapiens
agctgccctgcaaccacctgttccacgacggctgcatcgtgccctggctggagcagggtggactccgacgaccagtgg

SEQ ID NO: 588495 - DNA, 90 bp, Homo sapiens
ctgctggcctgtcaactaccgaactgaagcagattacctggctcagtgtcacagggctgctgatggtggtcttcggagaatgtctgagga

SEQ ID NO: 588496 - DNA, 98 bp, Homo sapiens
tcagtgtgggttccatcttacttgtcactaggagagaagtttgctgaggaatgccttcaagcacaaagtgatgaatgactgccttcaagtctcaagaa

SEQ ID NO: 588497 - DNA, 98 bp, Homo sapiens
cgggacgtgcgcttccccacgtcgcttgggggccacggcgcggacgccatggagttcatgatcaagtgttgcccacaccaaatgcttcatccagagtc

SEQ ID NO: 588498 - DNA, 82 bp, Homo sapiens
ctcaagaaatctcaagatattaaagttactgctgttaaaaaggacctgctgcagctacagtatgaaggagttgcagtcatga

SEQ ID NO: 588499 - DNA, 83 bp, Homo sapiens
attctgcgcgtcaacgacaaatccctggcccgggtgacccacgcggaggccgtcaagtcaagtccatcatctccagaaccagc

SEQ ID NO: 588500 - DNA, 100 bp, Homo sapiens
aagtgtatatggggcccaagctactggtgccagaacacagagacagcagcccagtgcaatgatcaagcgtgctttccttatcgaggagcagaaaatcgtt

SEQ ID NO: 588501 - DNA, 83 bp, Homo sapiens
cagctaccagcagtgcataaacgaggcgcagcgggtgaaggttgaaccatgattccggtgacagagctccgctactttgcgga

SEQ ID NO: 588502 - DNA, 101 bp, Homo sapiens
acttgggtctggatcaatatataataaaacgctttgatggaaagagcctggagaaagttcttgtggaattcagtcacaaggagttgtttgatttctataac

SEQ ID NO: 588503 - DNA, 51 bp, Homo sapiens
agtgcgcgctgccccccgagcaggaggtcagaagccaatgacctggccctg

SEQ ID NO: 588504 - DNA, 98 bp, Homo sapiens
ccttcgagaggaggcagattcccctctacatagacgacaccctgacggtttgtgttgctagttaagctagcttgtattgttgtggcttccttcgttct

SEQ ID NO: 588505 - DNA, 90 bp, Homo sapiens
tcggctcatccagcttgatgatgtcacctaccatggcttccccagcctgcaggccctggctggaaaggcagcaacaggtggaagctgttg

SEQ ID NO: 588506 - DNA, 76 bp, Homo sapiens
caagaagacactctggacaccactatggacagtgagtctgccaaaaaagaggtggttgctgaagtggtaaaagccc

SEQ ID NO: 588507 - DNA, 75 bp, Homo sapiens
gtggagatgaagcctaagaatatgatcagatatcaaagctcagctctttgaaacatccagcaagacaggccagag

SEQ ID NO: 588508 - DNA, 75 bp, Homo sapiens
ctaatttgggaaaaagctccaggattctgacagggatgttgcgaaggccataaaattttgagtagaaaaatccag

SEQ ID NO: 588509 - DNA, 100 bp, Homo sapiens
gccatgtgcaggaccctaacgacaggcgcctccggcccatttacgagagaagaagaaggaggttcctgctgtgccagaaacccttaagaaaaagcgaagg

SEQ ID NO: 588510 - DNA, 100 bp, Homo sapiens
gcttcccgcaatgaggagggcccttcacagaaccgggagttgctggagaatgtaaccctaatccataaaccagtgtcgttgcaaccccgtgggctgatca

SEQ ID NO: 588511 - DNA, 50 bp, Homo sapiens
tcatcaaaaatagtgatagctttgataagctcccacatcaggacgagaag

SEQ ID NO: 588512 - DNA, 75 bp, Homo sapiens
cgtgaccgagagcgcgaatatcgtcatcgttagaagatatgttaatgaatacacccagggcacacacggttgaag

SEQ ID NO: 588513 - DNA, 82 bp, Homo sapiens
tgaagctcatgatgtgggcgctcaaggacgtctgcttccacctcaagcgcacaggtgttcctgcatgaagccaccgtgcgcc

SEQ ID NO: 588514 - DNA, 82 bp, Homo sapiens
ctggaaccgggatggcgacgtctacactgagtcggaggcgaaggtccgcgggagagctgtggggcttggtgagtgtttcgtg

SEQ ID NO: 588515 - DNA, 90 bp, Homo sapiens
gcatggcatttcagtcactggtttgcagagtccagagacccagctaagttcctctgaaacttttgaccttgaaagagaagtctctccagg

SEQ ID NO: 588516 - DNA, 82 bp, Homo sapiens
gtcctgggaatgtacgacgccaaagatgacttccctcttaggaaaacagcaaattgtggctactaatttgccccctgaagat

SEQ ID NO: 588517 - DNA, 90 bp, Homo sapiens
aatattggccaatcatcaagacaagccagcagctcgctcagtacaagaggtgctagagtgtggagtttgtgaagatgtcttttctttgca

SEQ ID NO: 588518 - DNA, 90 bp, Homo sapiens
ctgtccgggatcggccaggaactgggtgctggtgcctatagcatgaggacataagcagctctatgaccaatagcacagctgccagtagac

SEQ ID NO: 588519 - DNA, 100 bp, Homo sapiens
gccgctggagaaggcggcgcgcgcccgcactgccaaggaccccaacacctataaagtactctcgctgatgagctttgatccaaaccttctccacaacaat

SEQ ID NO: 588520 - DNA, 75 bp, Homo sapiens
catcttgtcctacctgaagtatgccattagttcccaggagtccttcaataatgttaaacagtggctgcaggaaat

SEQ ID NO: 588521 - DNA, 90 bp, Homo sapiens
cctgaggacggcgtacggagtgtggcctgaaaactggttttttaaaatggaagccagattatgacagtgccgcttctgaatatggaaaag

SEQ ID NO: 588522 - DNA, 98 bp, Homo sapiens
tcccctcacgctcgcagaaaagtgctggctggagtcgtcatgacaacagcaagagtgagccatggagctacgtgtggggaacaagtaccgcctgggac

SEQ ID NO: 588523 - DNA, 95 bp, Homo sapiens
cgggtgttgtgatcgcagtgggcgagggagtcagcgaccgcaaggtgctgacctggaggggaagcggcagatgaaggtcagtaatcggcacctgg

SEQ ID NO: 588524 - DNA, 100 bp, Homo sapiens
aatggattatgctttccagtatgttcaggataatggaggcctggactctgaggaatcctatccatatgaggcaacagaatttttggaatttcgtaaggca

SEQ ID NO: 588525 - DNA, 98 bp, Homo sapiens
agccaaggaataaacatgcaatgaacccaaaagggttgaacacaaatgtggatttatatcaaagtttgcaaaaattactagctgataaaaaacttgtg

SEQ ID NO: 588526 - DNA, 100 bp, Homo sapiens
gtgctgctgtgagtttgacgaagtggacatcacctgcagtcagtccagagctgcccagtgctggagaatctggtaaaagcaccattgtgaagcagatgag

SEQ ID NO: 588527 - DNA, 100 bp, Homo sapiens
tccctttgcagcaccatagagcagctactttgttggatgaagacatctgggaggagatccagaggatgttaaacgtctgaatgaaaaacttaaagaaagc

SEQ ID NO: 588528 - DNA, 100 bp, Homo sapiens
gatttggtttcagcatgtccttctctgaatgatgaatacttttactactgtgacaacattaacgtgattcgcctttgccagtctcatctcgtgtctgctt

SEQ ID NO: 588529 - DNA, 101 bp, Homo sapiens
ctcgccgcccgtccccggcacacgcgcagccccggcctctcggcctctgccggagaaacaggaaaatgtttataggaggccttagctgggacactacaaag

SEQ ID NO: 588530 - DNA, 100 bp, Homo sapiens
gacagcttccagcaaaaggaggacgtttgcagccagatatttcaatttggccaattgggagagaaatcaactgtaagtgcttaaagacattgtctgtctc

SEQ ID NO: 588531 - DNA, 75 bp, Homo sapiens
aaactgatgacttttccgtgctgatttctttcaacctcggagagctggaggtgtttcagaaagatggggaacgaa

SEQ ID NO: 588532 - DNA, 75 bp, Homo sapiens
tgacaatggctttggtccccagcgcagtgaagtggtgagcctttttgtcactgtggatatcttgacctacgtggc

SEQ ID NO: 588533 - DNA, 75 bp, Homo sapiens
ccgctggctctggcagctgggaccgggaagatcggggaggaagagcaagcaggccctgagggactataagaaggt

SEQ ID NO: 588534 - DNA, 100 bp, Homo sapiens
gaaatacctggagtcacagtgtgaatacccggctgatcctccagtaccttgattcagagagaagacaggttgtttacattcagagctctatcaataagag

SEQ ID NO: 588535 - DNA, 75 bp, Homo sapiens
aagtctgttaaaaatctttgcggctgctctttggcgtaaattgcaatcgattagggatcgtttctcagaatcaag

SEQ ID NO: 588536 - DNA, 80 bp, Homo sapiens
gaagaagctggctgactgcgagaaggtggctgtggagttcgggaaccagctggagatataattggtgattacaactttcc

SEQ ID NO: 588537 - DNA, 83 bp, Homo sapiens
ctctgtttggtcagttgctgtgtttctgccggatcagatgagcagattggttagtgaaggagagagaagctcttcagaaacag

SEQ ID NO: 588538 - DNA, 80 bp, Homo sapiens
atgagaactacaacaagttcatctcagccacaggtgttggagatgttcattcttgtcctgcagcagtgccacaaggagaa

SEQ ID NO: 588539 - DNA, 97 bp, Homo sapiens
tgcgcctcgctgcctggaccgggtctgagcgcggctgcccaggttgacctttctgcgggagtggtttgaagaaaagcagcagcaatttgagaatctg

SEQ ID NO: 588540 - DNA, 75 bp, Homo sapiens
ggagcctctccgcccggcagccaccccatctgggaagctcgtgaagaagaaatgactgcaaaagtaagggacctg

SEQ ID NO: 588541 - DNA, 100 bp, Homo sapiens
tcgggctttcggattctcccacttggaggcactgctggatgacagcaaggagttgcagcggcgacgttccgctgtcccctggagctcccttggagcggcc

SEQ ID NO: 588542 - DNA, 90 bp, Homo sapiens
gccacctcagggctgggcaaaggagacgggcatcgcctgattatgcgcggcgctcatctcaccgctctggaaatgctcaccgccttcgcc

SEQ ID NO: 588543 - DNA, 90 bp, Homo sapiens
catttcgcccctcgcgtccggagtccccgtggccagatgtcatctgggtgattctcagtgtggaggtgggtggacttttaggagtaacgc

SEQ ID NO: 588544 - DNA, 100 bp, Homo sapiens
cccggtgtctgttgcagcttgcgtttggggctttcgacatgacaggtcactagaggacttcgtcttctatgctccccggctgcggattaacaagcggatc

SEQ ID NO: 588545 - DNA, 100 bp, Homo sapiens
gccccggcttcaggatttacacagacgtggggcgatgcttgtgaccctgcagctcctcaaagtgcctgactgacagaagttcttgcccccggggagctgg

SEQ ID NO: 588546 - DNA, 100 bp, Homo sapiens
aagaagtgccttttgcctcccaccgtgattctgaggcctccccaaccatgtgcaattgcgtccgacctccgatcatgaacgggcccctgcacccgcggcc

SEQ ID NO: 588547 - DNA, 75 bp, Homo sapiens
ccaacagccaccaccaccaccagatggtgcccgtggttgacacgagctgtgtccccagctgttcccgtctacaat

SEQ ID NO: 588548 - DNA, 75 bp, Homo sapiens
cagaaattgaacgaatgcagattgctgggaagctgacatcacagttacaaggagaacatcatgcgcctctccagc

SEQ ID NO: 588549 - DNA, 100 bp, Homo sapiens
tttttgtggagtggtttgaatatcgtaagcgcacgtttaaacatctcaaggtgcaatggatgagcttcatagtctggatccaagaaggcaagagttattg

SEQ ID NO: 588550 - DNA, 74 bp, Homo sapiens
ggcacagcaaatgctgaggactcagaccagtctctgcaagaactcctgccctaagagccatagggaatatcgtc

SEQ ID NO: 588551 - DNA, 75 bp, Homo sapiens
agaggaccatgtgatgcacctgctccagctctggaagagaaatggccccagttcatcacccttctctagcccagc

SEQ ID NO: 588552 - DNA, 101 bp, Homo sapiens
gagcctccgtgcggagaccactgttcaaggccacaggtactccaaagattcaggtttactcacgtcatccagcagagaatggaaagtcaaatttcctgaat

SEQ ID NO: 588553 - DNA, 75 bp, Homo sapiens
caggagccatagtacctacagcagcactccaggtcacggagctgctggacgtctccatggagctgggctgtttcc

SEQ ID NO: 588554 - DNA, 51 bp, Homo sapiens
cctggcattgccttttgttgagatgaggacggggacttggttgccttttcc

SEQ ID NO: 588555 - DNA, 100 bp, Homo sapiens
aaagtgttgtgcatttaatgatgctcgtggtcccaagaagcatctgaagcgggtggcagctccaaagcattggatgctggataaattgaccggtgtgttt

SEQ ID NO: 588556 - DNA, 80 bp, Homo sapiens
ccaaatggacgggactattaagcatgatgccttcttctgtagagtgggcgctttgcagaatacgtgttgaatgaaatcac

SEQ ID NO: 588557 - DNA, 98 bp, Homo sapiens
tgtcctttctctcaccgtatcaggaacacaaaactgcggcccttgtctgcaaacagtggtatcgacttatcaaaggggatggcattcctactgtattt

SEQ ID NO: 588558 - DNA, 85 bp, Homo sapiens
ccaagatgtctgacatggaggatgatttcatgtgcgatgatgaggaggactacgacctgctccagtcagcccggtcaagcatgac

SEQ ID NO: 588559 - DNA, 90 bp, Homo sapiens
aaactggccaagaagggccttactccttcacagatcgggctagtgccacgaggtttacttgactgttgtgtgaaaagctgataagaaaac

SEQ ID NO: 588560 - DNA, 75 bp, Homo sapiens
ggcggggccaggacgctggttcatacactccaagttcttgcaacgatagcttttgcttttcttctcctcccgatg

SEQ ID NO: 588561 - DNA, 82 bp, Homo sapiens
ctggatggaagatagcttgaacagggctgacaacatttttccttttccggtattgcaggcaatgggatatccaacaggcttt

SEQ ID NO: 588562 - DNA, 75 bp, Homo sapiens
aggaaaaacagccaccttcagtatctcagtcctccagtgtttggatattcaggacacagcattgttggttttgcc

SEQ ID NO: 588563 - DNA, 97 bp, Homo sapiens
agaagaagaaacgggccgcgaaccgcagtatcatgctggccaagaagatcatcattaaggacggaggcacgtggaatgcagtagccctctgggcctg

SEQ ID NO: 588564 - DNA, 100 bp, Homo sapiens
aatcaagcttggatatgctaatgctaaggcatctggtgtcgaaggctcagatattcctgatgatggtaaactgataggatttgcccagctcagcatcagc

SEQ ID NO: 588565 - DNA, 83 bp, Homo sapiens
cgactcggtcctgtttcgacagcgaacatgtcgcggcctgtcaggaaatgacttaatcgtctttttggcagaccagaatgcac

SEQ ID NO: 588566 - DNA, 74 bp, Homo sapiens
aatttgataggcatagtggaagtgatagatcgaagaagaatttggacttgatgaagaagatgaagatgaggatg

SEQ ID NO: 588567 - DNA, 115 bp, Homo sapiens
gctctgcctcacccagttccaggtagacatggaggccgtcggggagacgctgtggtgtgactggggcaggaccatcaggctcacgggatccagtgttcctgacctcattgtgagc

SEQ ID NO: 588568 - DNA, 75 bp, Homo sapiens
gaaaacaccctgcaatctttcagacaggtatatgaatgacctaaaggtacaaataaagacggagagagaacagtg

SEQ ID NO: 588569 - DNA, 83 bp, Homo sapiens
gagacacggccagatctgccctccagagctttcaagttgtggatggaataaaaaagaaaaatatagttctgcaccaaatgcag

SEQ ID NO: 588570 - DNA, 75 bp, Homo sapiens
aggagagagagctcaccatgctcagcacaagtgcatacaccttgatagcaccaaatataaaccggagaaatgaga

SEQ ID NO: 588571 - DNA, 100 bp, Homo sapiens
aacagatagccatgggaagaaagaaattcaacatggatcccaaaaagccctggggctggatggtgagattggaaactttgaagtgggcaaggaatttgat

SEQ ID NO: 588572 - DNA, 75 bp, Homo sapiens
tagtatcttggccagggaactcaaacagcagatgcaggtccatctgaactgtttactgtttgttcatcgattagc

SEQ ID NO: 588573 - DNA, 87 bp, Homo sapiens
aatgttcaaagtactcaagatgaatttgaggtggttctgctgggcatggacatcctgtccgccctggtgacccggctgcaggatcgg

SEQ ID NO: 588574 - DNA, 87 bp, Homo sapiens
cgggtgatttctgcatttccatctgagacgctgcggataactacccttttggaacatgtcaacagaggaaactttttcctcacttcc

SEQ ID NO: 588575 - DNA, 100 bp, Homo sapiens
gccttcccaagcttccaggtgtcccagaaacccaggaaatcgagactcatgactcccagagaggatggcatctagaaggagtgggaatagctttgcgaaa

SEQ ID NO: 588576 - DNA, 100 bp, Homo sapiens
tatctgcttaggattcactgcacatcgaattaagagagcagaaggatgggaggaaggtcctcctacaggaggagcatattatttaatatctagaagtcta

SEQ ID NO: 588577 - DNA, 73 bp, Homo sapiens
cgtcgtgcgcctgggggtgcgcgcctgcgacctgcccgcctgggagtcttttagtcctgctatacagctgcac

SEQ ID NO: 588578 - DNA, 110 bp, Homo sapiens
ttgcgatgaacttccggctgtcaagctcccggccgggctgactcaagcggaggcgcgcggaacagtcgccgaggcgattcccgcccagcataagcttaaatcgtctcaga

SEQ ID NO: 588579 - DNA, 75 bp, Homo sapiens
tcatctggaattttgccgatttcatgactaaccagtgaacttagtgatttggcccgtgaccctccagcacaatgt

SEQ ID NO: 588580 - DNA, 80 bp, Homo sapiens
gacagattcgcagtggtcgcttcttctccttgaaactgttcaggttccattatcaaaacgagcaaaatttgttggacctg

SEQ ID NO: 588581 - DNA, 100 bp, Homo sapiens
ggaagataccctgaagaggaggtttttctatgatcaagcttttgctatttatggaggtgttgctggaagaagccaaggatttgctctctgactggctgga

SEQ ID NO: 588582 - DNA, 98 bp, Homo sapiens
ttgtcctcaagtgatcctcccaccttagcctcctaagtagctgggaccacaggccgattctttgatgaaaatgaatcccctgttgatccgcagcatgg

SEQ ID NO: 588583 - DNA, 100 bp, Homo sapiens
gtcatctgcagcgtcctgctgctgctctccgtggtggtctctggcatctctatcccctatgaggcaccacgtaagacctcctgcccttagctctcttgct

SEQ ID NO: 588584 - DNA, 96 bp, Homo sapiens
tcgacgtggatgacgacgtgctgagaaacacgctggaagctgaggctgtgttccgtgccatcaccattgccagccaaaccaattgccctctctacg

SEQ ID NO: 588585 - DNA, 51 bp, Homo sapiens
ctcccaaagtgctaggattacagctcaactataaatttccagcaacagtgc

SEQ ID NO: 588586 - DNA, 82 bp, Homo sapiens
gggattcccagccatggcagattcctccgggcagcagggtacctggccaagctgtcgtcggtggggagcatctcagaggagg

SEQ ID NO: 588587 - DNA, 100 bp, Homo sapiens
ggatgaaaagcccatctcacagtatgaacactgctacctgcacagccagataatctcaggagacactgaagaagggaggctctgtggacagaggagcagt

SEQ ID NO: 588588 - DNA, 76 bp, Homo sapiens
tgtgatgaaagcacatggtacaggcttatgtacagaagtacgtcgtgaagaattatttctactattacctattcca

SEQ ID NO: 588589 - DNA, 104 bp, Homo sapiens
caggactccaagatttacttccttccctttccagcagaattacctgagacgaaaaatgcatccgatgcagatttatggctcctgaacagttgcactgtaaaaaa

SEQ ID NO: 588590 - DNA, 100 bp, Homo sapiens
accctgactaaagcttgaaatgctacatttccaaggtcaaaatgcagatcttcgtgaaaacccttaccggcaagaccatcacccttgaggtggagcccag

SEQ ID NO: 588591 - DNA, 75 bp, Homo sapiens
agaagaagcagaccaactacttgcgcacgctgatcaacgagctagtgaaaggctcaggggagagagaaagcccag

SEQ ID NO: 588592 - DNA, 83 bp, Homo sapiens
gcagaagagatatataaagcatttgtgcattcagatgctgctaaacaatttcattgtactgacaacctcagctggcatcatgg

SEQ ID NO: 588593 - DNA, 98 bp, Homo sapiens
ccctcttcctccagcgctactaccaagtggtccacttaagtggagcatcccctttcctgggagacacgaagcaggaaacactggcaaatatcacagca

SEQ ID NO: 588594 - DNA, 98 bp, Homo sapiens
catgattccttacttctccgccaacgcggtcatctcgcagaacgccatcaaccagctcaacagggagctgccaccaccgtgtactgtgctgctgtccc

SEQ ID NO: 588595 - DNA, 100 bp, Homo sapiens
ctgggcgccggagccgaggcgagcgccgcgcgcaccactgattgccaggctgcggagtgaactggacgtcgttcgaggaaacacaaaagtcatgtctgag

SEQ ID NO: 588596 - DNA, 82 bp, Homo sapiens
gcatcaacaagatgttgtcctgtgctggggctgacaggctttcgggtcacctccagcagctcccagttcagctcacgtgatt

SEQ ID NO: 588597 - DNA, 100 bp, Homo sapiens
gcgtaccaagaaaaataaagaagaggctgcagaatatgctaaacttttggccaagagaatgaaggaaccagcaatgagaaggccaggaaaagaaagagct

SEQ ID NO: 588598 - DNA, 100 bp, Homo sapiens
tggcttttaaggaggacacccggacacctggaagctgggaaatgacttcattagaggggtggtagactcggaggatctccctctaaacatatcccgtgag

SEQ ID NO: 588599 - DNA, 90 bp, Homo sapiens
tgggatacagctggacaagaacgacctcgtcacgtgttcaatatgctaaagaagtatgtccgcgcagaacagaaggacagacagcacacc

SEQ ID NO: 588600 - DNA, 100 bp, Homo sapiens
ctctgctcttccaacaccagtggaagatgatcacatcccaggagtctcaggagcaggggctgcggcagaggctgctggacgagcagttcgcagtgttgcg

SEQ ID NO: 588601 - DNA, 100 bp, Homo sapiens
ccgccgccgcggccaggccccccaacatggactgtctctgtatagtgacaaccaaggtggcaagaagaagccactgaaacagcccaagaagcaggccaag

SEQ ID NO: 588602 - DNA, 75 bp, Homo sapiens
agcagagcggaagaggacctcagtatcacagtgcatgctacctggttgtgagaactgctttattggatgctgctg

SEQ ID NO: 588603 - DNA, 74 bp, Homo sapiens
gattcagaaccaccatctgaaattagcttaaaaaatgatctagagcgtcctccaggctttgaccgtgtccgaaa

SEQ ID NO: 588604 - DNA, 73 bp, Homo sapiens
gggaccgggacctgctcctggacccggcctgggagaagcagcagagaaagatgaatgatttcggaatcaagaa

SEQ ID NO: 588605 - DNA, 75 bp, Homo sapiens
cagggatcccactgattctactttacggaattctcaagggtctctttggaggcttaccaaggacatccagctgca

SEQ ID NO: 588606 - DNA, 101 bp, Homo sapiens
tccgccgctcaccccgcggccgcaccttcccgccttctcagactcagcccacctgcacccaggtgaaataaacagctttattgctcacacgaagcctgttt

SEQ ID NO: 588607 - DNA, 98 bp, Homo sapiens
ttgctgatgatcagaaacttatgatgccaaggcagaggcttcctcaggagaccatcccactgacacagagatgaaggaggagcagaagagcaacacgg

SEQ ID NO: 588608 - DNA, 95 bp, Homo sapiens
aggtaggctgcgttgaggatctttgctcttccatccgcctttgatcgtcttcctcttcagccatccagaatcagatggagcctgagagatgcagg

SEQ ID NO: 588609 - DNA, 74 bp, Homo sapiens
cccagctacctccccaataggtgcatcaggtatggcgatttagtactgcattttgttctgttaatgaatggaaa

SEQ ID NO: 588610 - DNA, 90 bp, Homo sapiens
agggtaaaaggctgagaagcttaagctcccattgctatcacatgttttaccagaggcttggacatcaggaaagagaaagcagatgtcctc

SEQ ID NO: 588611 - DNA, 51 bp, Homo sapiens
cggcgacgacatgtatgggccagaaaagtgctcaagtaaagctctttgtga

SEQ ID NO: 588612 - DNA, 50 bp, Homo sapiens
cgcagcaacagcaagctcccgggcagaacactatggctatgcatcctcca

SEQ ID NO: 588613 - DNA, 75 bp, Homo sapiens
gccacccattgtgtcttctcaagaagaataacatagctgatccagaagaactgttcacaaaattagagcgcattg

SEQ ID NO: 588614 - DNA, 100 bp, Homo sapiens
aaatcccggaaactccagcgtgtctccagccgtgaaggatatggccctgaagccacatgagcggaaggagaagtgggagcgtcgtctcatcaagaagccc

SEQ ID NO: 588615 - DNA, 75 bp, Homo sapiens
cgagaacatctactctttcaactacaccagccagcccgaccaggcaagagtttgtcgatgcttatgtggattaca

SEQ ID NO: 588616 - DNA, 75 bp, Homo sapiens
catgaacagaaacacctaggaagggagaactggagtccaaaactacttacctggaagaccttccaccaccccctg

SEQ ID NO: 588617 - DNA, 49 bp, Homo sapiens
cagcaccggaggtggaagactggtttcgacacagccccaactgctggta

SEQ ID NO: 588618 - DNA, 100 bp, Homo sapiens
acctttgatcccctgacctgcattaccttgacatccacgacagcgatggcagttccagcagcagccaccagagcctcaagagcacagccaaatgggcggc

SEQ ID NO: 588619 - DNA, 51 bp, Homo sapiens
gcacaggaagccgtgaaactggttgtaaagctctctgaaatagtgacctta

SEQ ID NO: 588620 - DNA, 98 bp, Homo sapiens
aagtaggccgtctcgctctgggtctccaggcccgcgaccgtccgccagtcgtcccgagggcaactccaacaacattgccaccgtggacatctccgcag

SEQ ID NO: 588621 - DNA, 90 bp, Homo sapiens
agaggaggaagccatgcgtagggagaccagcataaacactttggggactgagaggataagccatatcattagtgaccctcggcagaaaga

SEQ ID NO: 588622 - DNA, 90 bp, Homo sapiens
ctcacgtattgtgccaatcacccttctgcagtgaatgtcctcacggaacacagataaatttgcgcctcattttggtaagcggaaaaacaa

SEQ ID NO: 588623 - DNA, 80 bp, Homo sapiens
cgggaccggctgtatgattaggccacaatcttcaatgagtaaacatattcctgcattttttactgtctacagaaacttat

SEQ ID NO: 588624 - DNA, 50 bp, Homo sapiens
gtgcagtcgctcatcagggcatatcagggggaaatttgcagtggtgagaa

SEQ ID NO: 588625 - DNA, 74 bp, Homo sapiens
ttatagagctggaattaggcaaatatggacagatattgatgatgttaagaagttcaaaccgggttacctggaag

SEQ ID NO: 588626 - DNA, 89 bp, Homo sapiens
gatctcggtccaggtccctctcccccccacacaagaggtggcgaagacatatctgaagagatggattaagaatgctttggattaaggat

SEQ ID NO: 588627 - DNA, 100 bp, Homo sapiens
cccagtgctgcgtccttatcagccgagccgcatttcacaggacatgcaacgccagtttcgtcactgatgttcactaccatcagacctcctaatgagagcc

SEQ ID NO: 588628 - DNA, 100 bp, Homo sapiens
agtgacatgtacattctcaatgagagcctcacagacccagccatcgttaagcaacttaccaaccacattcgggataccctaccaaacttcaggaacaaac

SEQ ID NO: 588629 - DNA, 90 bp, Homo sapiens
tggaacagcataactggaacatagaggaaatgcttccagactgcacacttttacttagaggacagtacatcccctagagttatatccaca

SEQ ID NO: 588630 - DNA, 82 bp, Homo sapiens
gtttttcaacaagttggagtaagcatgcaatcggatttctctctgatcaaacggacagttcaggactcagaatctaaggatg

SEQ ID NO: 588631 - DNA, 100 bp, Homo sapiens
atcttcgtccagctaacaaacttgctaaaggaaataggttattcatgagatttgctacaaaagaattggcagagggggtcgatttgggaggaaaggtgtg

SEQ ID NO: 588632 - DNA, 98 bp, Homo sapiens
gctgggcatgtgtcctggagagagaaggaagattatcatccctccattcctggcctatggcgagaaaggctatggaaccactcgttttgactattatt

SEQ ID NO: 588633 - DNA, 100 bp, Homo sapiens
gccagagcctggagtctgcgaaggccgggacccggttccccggcccacagtgggggtgtgcaaacccgagagaactggataaacctctcataatgaaggc

SEQ ID NO: 588634 - DNA, 83 bp, Homo sapiens
gcgagaagctgccgccgaacgacaggacgttggggcggcctggctccctcagattgctcatttagaaagtggatgtgtgggat

SEQ ID NO: 588635 - DNA, 82 bp, Homo sapiens
gcggccgggactctgaactatggcgatatacatctatgacgggaagactggggagaaggtgtgcgcgctgggcggaagcaag

SEQ ID NO: 588636 - DNA, 100 bp, Homo sapiens
ctttgatatcaaattgaagaattttgtggagttgacagatgttgccaataaaaagacaccaactctacaacattacctgtcatatactgaagaatctctt

SEQ ID NO: 588637 - DNA, 75 bp, Homo sapiens
cctgcatatggaatgtatggccaggcatggaaccagcaaggatttaaacttaattcagtgcacaaatgagatgaa

SEQ ID NO: 588638 - DNA, 75 bp, Homo sapiens
acaccttagaagtgcttaaggaagagtgatgaagctgtctgcttttctgtggagactgcgggttgcagacaccag

SEQ ID NO: 588639 - DNA, 74 bp, Homo sapiens
agaagatcatcattaaggacggaggcacgattgtgttcaattagaccttcaggacctctccaagaagcctccgg

SEQ ID NO: 588640 - DNA, 83 bp, Homo sapiens
gaagaccgcgcgcagggcctgcagcgggagctggacggcgagcgcgagcggcgcgagaaaggagatggtactggagtcgccag

SEQ ID NO: 588641 - DNA, 100 bp, Homo sapiens
tgaagagctatggtgaaacaccactgaagcattgccaagatattgctatatggagatttgccaaaaaataaagaaaatataatatatttagcaaatcatc

SEQ ID NO: 588642 - DNA, 51 bp, Homo sapiens
ctcgcgtcgcggccgcggagacgtgaagctcaacgttgacagtaatgaaca

SEQ ID NO: 588643 - DNA, 75 bp, Homo sapiens
cgcgtcccgagcccgcggggcagctaccgctcgcagatttaagatctccaaggtcattgtggtgggggacctgtc

SEQ ID NO: 588644 - DNA, 100 bp, Homo sapiens
gccctttaggatttgttagaaaggagacccgactgcaactgctggattgctgcaaggctgagggacgagaacgaggagcggacatgataagcatacataa

SEQ ID NO: 588645 - DNA, 96 bp, Homo sapiens
ctcgtcctggagcacctgcagctggcgcctctgcagtgggcagatataatttctacagtagaatttaatcattctggagaattactagcaacagga

SEQ ID NO: 588646 - DNA, 80 bp, Homo sapiens
tgaggaggggccccagcagcccccgaaggccctatcaggacatggagtatgaaagacggactcattctgaccagtttctg

SEQ ID NO: 588647 - DNA, 73 bp, Homo sapiens
gacccgcgccctgctccctctcagcacctgggcggacggtgcactcagctaaacacaaaagtggccaaactca

SEQ ID NO: 588648 - DNA, 75 bp, Homo sapiens
gtcatctgcaaaaccttccactccatggcctacgggcacatagggcggaacgggtccatatggaatatttgctgg

SEQ ID NO: 588649 - DNA, 98 bp, Homo sapiens
tgacagggatgatgaagaagacctgctggatggacgagcctgtggagtgggagacacctgacctttctcaagctgagattgagcagaagatcaaggag

SEQ ID NO: 588650 - DNA, 95 bp, Homo sapiens
ggattgtcaatgaggcagatcagattccgatttgacgggcaaccaatcaatgaaacagacacacctgcacagatgatgataattccgaagaaggc

SEQ ID NO: 588651 - DNA, 102 bp, Homo sapiens
cacagtccctccctcggtttgcctactgaagagcttatcagagctctacttgggaaagttaacacagaaatctgcctcctgggccatgccgcttctaaggcc

SEQ ID NO: 588652 - DNA, 90 bp, Homo sapiens
cattgtacctgtcctatgtgcaaacttaatatattgaaggccctgggaattgtggagcttggtgttggtggcacgagtcagtggaaaatc

SEQ ID NO: 588653 - DNA, 100 bp, Homo sapiens
gtgggctcacatatcagagggcattatgaacgaattctcaacccctacaacttattcctgtccggagacagcctaaggatactttcattcagaaaaccaa

SEQ ID NO: 588654 - DNA, 97 bp, Homo sapiens
aagattatgacagattacgccccctatcctatccgcaaacacaagtctggaaaagtttgaaattccagtaaaaattcgtttgagtcctgaaccgtgg

SEQ ID NO: 588655 - DNA, 73 bp, Homo sapiens
tccgcataaacgaggtggtcaaggaatgtcaggcgaggaaacgagacctctttcgttccttctagaaggtctg

SEQ ID NO: 588656 - DNA, 82 bp, Homo sapiens
aggagagcatcgactggaccaagatcgagcccagcgtcaacttcctcaagtcgcccaaaggctgatcagctgaccgaagaac

SEQ ID NO: 588657 - DNA, 100 bp, Homo sapiens
ttttgcccacccctatggggaagggtgttgtccctgacaaccatccatactgtgtaggtgcagccagatccaggctttcctcggagacgggtggcatggg

SEQ ID NO: 588658 - DNA, 98 bp, Homo sapiens
tctgatcatcctcactggacgccacaggggcaagagactttagaagacagctttccatcgacactaggccctttagaccagcctctgaagggaatcct

SEQ ID NO: 588659 - DNA, 87 bp, Homo sapiens
ccccagcagtcctgctcctcgccgtaccaaacagtgtgaaatggcctttccccgggtcaagccagcacctgatgaaacttccttcag

SEQ ID NO: 588660 - DNA, 98 bp, Homo sapiens
agctgacaacagctgtcgtctctgggactgtgaaacaggccctgaggaggtttctcctgactgccaaggtgtgaacacaggcatggcggcagaagtgc

SEQ ID NO: 588661 - DNA, 82 bp, Homo sapiens
ttggaagcagccgatccagcctgcggagcctgtggggcagcacgagtacacgagacaggattgagaaaggagagattcaaat

SEQ ID NO: 588662 - DNA, 75 bp, Homo sapiens
ctcgctcccacctgtcagccttctaccccatgagaaagaccagccgccgtcagccaatccagtggactcgcagcc

SEQ ID NO: 588663 - DNA, 98 bp, Homo sapiens
cttcgctaacgcctcccggctctcgtcagcctcccgccggccgtctccttaacaccgaacacccaacatggctgacaaggccaagcctgccaaagctg

SEQ ID NO: 588664 - DNA, 100 bp, Homo sapiens
gaggcagcatggagaggggccgtggcccctgcagcggaaccggacccagtccctgagccgcccctacacccacaggaaaaccgtcttcagatacagtccc

SEQ ID NO: 588665 - DNA, 76 bp, Homo sapiens
cgttggctgggaccgtgcgcgtgcgcctgggggcaccgctgccgttccgaggagatggcgtctaccagaaggggat

SEQ ID NO: 588666 - DNA, 100 bp, Homo sapiens
catcaccggaatgtctacagtggcatgaacggtgacatgatgacattgctaatgaagaaagacaccttgacagaagaggaaacacagttctacatttcag

SEQ ID NO: 588667 - DNA, 82 bp, Homo sapiens
tctgtttggtcagttgctgtgtttctgccggatcagatgagcagattggttagtgaagctgagatctgtatctgtggacctg

SEQ ID NO: 588668 - DNA, 75 bp, Homo sapiens
caggaaggcatgcatcaaatgcataaggcagaagctcctcctggggtagagacagatcttattgatgttggattc

SEQ ID NO: 588669 - DNA, 50 bp, Homo sapiens
cgacgacttactggcttcatgacactgccctaaccatcatggaggtggcc

SEQ ID NO: 588670 - DNA, 100 bp, Homo sapiens
ccgcccgcagcccctcggagccagaggagaggcgcccccgccggccgccgcgccgcccggcagcctcggcaggaacctagaaagattgtacaatgaatgg

SEQ ID NO: 588671 - DNA, 101 bp, Homo sapiens
gcaaaggagtggaagtttgagagaagtttaagagaagaaatggacatgattgcctaaatcagccaaacacagggaaggcgtggaagtgcgagtggccagaa

SEQ ID NO: 588672 - DNA, 75 bp, Homo sapiens
agggaactctttttgtcacgccagtatgaatctctgcccgcaacacatatcaggctaatcaagacaagccctgaa

SEQ ID NO: 588673 - DNA, 100 bp, Homo sapiens
catacacctactcaactacggtcagccctgcagtccaagaaccacccttgaaagtgatccagccaaatggaaatcaggtgtatctcaccacggactcccg

SEQ ID NO: 588674 - DNA, 75 bp, Homo sapiens
tgaagatgaacaccaagatgaaagcagcagttttcatcatctaagtgaaagcggatctgaaaagaacaattgctg

SEQ ID NO: 588675 - DNA, 50 bp, Homo sapiens
tgtcagttacatataccatcacaggttggtgaaaattgcccctcaatatt

SEQ ID NO: 588676 - DNA, 74 bp, Homo sapiens
atgcagcaggtgcgcaaggtgaaatgttcactgttaaagaggtccactcagctgttgaagaaatggatggatta

SEQ ID NO: 588677 - DNA, 98 bp, Homo sapiens
agcttcgctttaactcagatgatcattgtttttaccaaggatccatagtacacgaatatgattcagctgccagtatcagtacgtgtaatggtctaagg

SEQ ID NO: 588678 - DNA, 96 bp, Homo sapiens
gttggagaaaatcggcagctgagacggccttggccgtgggctcgggatgagtttgaaggcctcttcaagcagccagcagaaaatgtcaaccagtac

SEQ ID NO: 588679 - DNA, 100 bp, Homo sapiens
gtgacattcacactgatgccacccagaggatgttctaccggccctccagttaccagccccctctgcagaatgccaaggaattctttgaccatgtgaaaaa

SEQ ID NO: 588680 - DNA, 90 bp, Homo sapiens
caaggcattcgctcctgagcggaatcctgcaaagacgttatgacagtgttataaatcgactgtacactggtattcagtgttactcttgtg

SEQ ID NO: 588681 - DNA, 153 bp, Homo sapiens
agctgaggaggccggctgcagccccaagacagagcgctactcctggcagtgcgtcaatcagagcgtcctgtgcgtttgagttcctgagatctagttggtgagagacatgatgttctaccggttgctgtcgattgttggaagacaaagagccag

SEQ ID NO: 588682 - DNA, 73 bp, Homo sapiens
cacaggacacctcaggacccattctgaactagatgaacggcgcaaaaggaggcaagaagaatgggagaaagtt

SEQ ID NO: 588683 - DNA, 83 bp, Homo sapiens
ggaacgtggagatctggaagatcaagaagctcattaagagcttggaggcggcccgcggtgtaaacaggaacatcgataagtag

SEQ ID NO: 588684 - DNA, 90 bp, Homo sapiens
ggccacttggttctgccagatgttcctggggttactgtaaatgggaaggacaggcagagctaaacaaggcttctccagggaaagtgaccg

SEQ ID NO: 588685 - DNA, 82 bp, Homo sapiens
cgccgcccagagactgctgagcccgtccgtccgccgccaccacccactccggacacagggagtaccctgacttctaccggaa

SEQ ID NO: 588686 - DNA, 117 bp, Homo sapiens
gggggaccctgtcggaagcaactgccgccgccgcctctttcatctcttctggggcaggggccagggccagccgtccatcatcagggctcggcctcagcaccctccacctccaggtcc

SEQ ID NO: 588687 - DNA, 81 bp, Homo sapiens
gtgcagctgcctcagttcttagcgcagattacaccaccaccttcactgtcagatccacttaaagagctttttcgacaacag

SEQ ID NO: 588688 - DNA, 99 bp, Homo sapiens
ctccattgcgggcaagaatgtcatgctggactgtggaatgcacatgggcttcaatgacgacataaacccaacagaggtgaggcccagctagtaatccct

SEQ ID NO: 588689 - DNA, 100 bp, Homo sapiens
gtcagtgccaacaatgctaccacaggtcctggagtacaatgccattggaggcaagtataaccggggtttgacggtggtagtagcattccgggagctggtg

SEQ ID NO: 588690 - DNA, 95 bp, Homo sapiens
ggcgccatcttcgaacttagacttccggaaggactttggcgaggaaattccgggtagatatgcctggctcaggcagtgcattcatccccaccatc

SEQ ID NO: 588691 - DNA, 75 bp, Homo sapiens
aatcgagacctcaagtaatcattcccaagacatgatccacatcgcggacaccaaggtcgccaggcgttatgggga

SEQ ID NO: 588692 - DNA, 98 bp, Homo sapiens
gaggcaagaccttcattgtgggagaccagtggaatgcagtagccctctgggcctgggatattgtggttgataactgtgccatctgcaggaaccacatt

SEQ ID NO: 588693 - DNA, 51 bp, Homo sapiens
gagaaatggagcccttctccaaggacgctgtgcagagctgcaagtccgtat

SEQ ID NO: 588694 - DNA, 88 bp, Homo sapiens
tgctggaccagctcatgggcacggctcgggacggtcatcatcagatttgaaatatttaaagtggatacaaaactatttcagcaatgca

SEQ ID NO: 588695 - DNA, 75 bp, Homo sapiens
caccgctgccctcagctccgagtccagggcgaggtcagaagttgagtagcaggggcctaggagggctcgaagcct

SEQ ID NO: 588696 - DNA, 100 bp, Homo sapiens
gatggctctgatgagtcccaggagacgtgcttgagcagcggttccatcgcagtgaacgccgactcttcggtgcagttgttggccgaagaggccgtgacgc

SEQ ID NO: 588697 - DNA, 82 bp, Homo sapiens
gtgcagagcagttaatgctgggacatctgctgacaatgcagatcttcgtgaagactctgactggtaagaccatcaccctcga

SEQ ID NO: 588698 - DNA, 82 bp, Homo sapiens
tgccctgcacgtggctgctgccaagggctacattgaggtgatgaggctccagcccccttttggacatcgttggcggccggaa

SEQ ID NO: 588699 - DNA, 100 bp, Homo sapiens
agaatgagagttgcctaaattccagagagacctctttcataactgtgtgggatgtgattggccgcagcctgattattgatgagggagaagatgacctggg

SEQ ID NO: 588700 - DNA, 101 bp, Homo sapiens
gggaaaacatggcgtctgccctggagcagttcgtgaacagtgtccgacagctctcagctcaagatgtcttgtggcttcaagcactcagcagtggtcacttc

SEQ ID NO: 588701 - DNA, 100 bp, Homo sapiens
gaagctttgaagctggataggagtctccagtcttcctcttgatccatatgtttcaggatatcactactttaactggagttccagaagagcatataaaaac

SEQ ID NO: 588702 - DNA, 75 bp, Homo sapiens
gctgccctgagacggtgtcccgccgaaagctgaactagatgcagagcacgcccagaaggtcctggaaatggagca

SEQ ID NO: 588703 - DNA, 98 bp, Homo sapiens
cggcaaccaactgcagagcatcccggctgagatcgagaacttgcagagatgctaatactggagaccgtggacagaccaataatgctgcttctgcatca

SEQ ID NO: 588704 - DNA, 74 bp, Homo sapiens
aggatgcctctcagctgccacctgcctttgacctttttgaagcctttgcaaaaacggagtctcgttctgtcacc

SEQ ID NO: 588705 - DNA, 100 bp, Homo sapiens
attggagtagcgaggaatctgattccaagcaaaaaccaggactgaccactgagcagatgctgagaaaagaccagaagactatctatagacaaggcgtcaa

SEQ ID NO: 588706 - DNA, 75 bp, Homo sapiens
aacttcttaacccctagaccggtttttagtccattgactatgcagcctaatgagaaagcatgggattatggcaac

SEQ ID NO: 588707 - DNA, 75 bp, Homo sapiens
cacgaggctcccttgacaggcggctttgcatcggaaatcagctctacagttcagttaacagccaggtccttgcct

SEQ ID NO: 588708 - DNA, 101 bp, Homo sapiens
catcagtgacgagagggagagcaagaccatcatgctgcgcggccttcccatcaccatcacagagagcgatagcctgggcctggtggacaggaacaacgaac

SEQ ID NO: 588709 - DNA, 100 bp, Homo sapiens
caatgtcacaaaagcggatgttgaaaagcttctgcagaaagccgtcattacacctgattttgaaaaaaaccactgtgttccaccatatagtgaatcaaag

SEQ ID NO: 588710 - DNA, 100 bp, Homo sapiens
aaaggagacccgactgcaactgctggattgctgcaaggctgagggacgagaacgagattgcagagggaatggcatacatcgagcggaagaactacattca

SEQ ID NO: 588711 - DNA, 100 bp, Homo sapiens
ctcgctccttggatggcagtggttctgagccagaccttgaagaccttgcggcaggtggaggtgattaattttggggactgcctggtgcgctccaagggtg

SEQ ID NO: 588712 - DNA, 82 bp, Homo sapiens
cgggccagcccttctctgccgtccctgggaggcccttctgcgatgttttacctggctgcggctgtgtcagatttctatgttc

SEQ ID NO: 588713 - DNA, 75 bp, Homo sapiens
caccgttatgtgggaagcgaatccaattgtagggaatggaagtgaacagcagctgcaaaaagagctagcagatgt

SEQ ID NO: 588714 - DNA, 83 bp, Homo sapiens
ccactccgtcccccgcgggtctgctctgtgtgccatggacgggtgcacattcaggttcccgagcacaaacatcaagataacgt

SEQ ID NO: 588715 - DNA, 93 bp, Homo sapiens
gtcaggaccctgtacacccagattcgcaaccgtgccctcatccaggacacagcattgttggttttgccatgtactattttacctatgacccgt

SEQ ID NO: 588716 - DNA, 93 bp, Homo sapiens
acatgaccaagatgcccgagtgctacttctactccaagttcgggtccctgatgggcctgggtgacattatctcacagcagctggtggagaggc

SEQ ID NO: 588717 - DNA, 100 bp, Homo sapiens
aatcagaaaccaagaaaatggagactattgtgatgcaagaaaataatgaacaaactgatactctcccttctcaacatgatcagttccatgacaagacccc

SEQ ID NO: 588718 - DNA, 99 bp, Homo sapiens
ctcataataattcagatggagaatatatggctggacagctagctgcttatggctataaaattacagcttttcgctgtggcctgcagtttttaggcaaca

SEQ ID NO: 588719 - DNA, 80 bp, Homo sapiens
ttctggagttggtacatgaccacctgaaggatctctggaatgatggtgctatgctggaaaatgagaagaagaagcgtgaa

SEQ ID NO: 588720 - DNA, 90 bp, Homo sapiens
cccacaattcaaagttcagcaacaagtaatagttcagaggaagcagaaagtgaaggaggattcagaatggacagtttagaagaacctcag

SEQ ID NO: 588721 - DNA, 83 bp, Homo sapiens
cagacatcagctcctggttcaacgaggccattgacttcataggagaaccaggtgcatcagcgcattgcggagctgaggaaagc

SEQ ID NO: 588722 - DNA, 75 bp, Homo sapiens
tacgtttctgtgctccagtttcttggtttataaaatcgagaagaagctggaaccactgtcacaggatgaagacca

SEQ ID NO: 588723 - DNA, 80 bp, Homo sapiens
cgcagtggtcgcttcttctccttgcagccgacatacgtccaggccctctttgactttgatccccaggaggatggagagct

SEQ ID NO: 588724 - DNA, 100 bp, Homo sapiens
gtctgggccgccgaatctccggccgaagagcggcggcggcagcggcggatctggggactttgatgattttaacctggaggatgcagtgaaagaaacttcc

SEQ ID NO: 588725 - DNA, 75 bp, Homo sapiens
aagccttgccctggcccccgcaggagggccctcctggacccgggagcggaccctggtggcggtgaagcccgatgg

SEQ ID NO: 588726 - DNA, 90 bp, Homo sapiens
gttctagttcaccagtgcagtgaggggctcagtatccgggcctcccgagagacttctaggccactgggaagaagcagcccatgatcttgc

SEQ ID NO: 588727 - DNA, 83 bp, Homo sapiens
cagctcctgcagctctgaagtggttctgggcggtgtccgtgtcctccatgtctgagttccagcgtctaatggacatctccccc

SEQ ID NO: 588728 - DNA, 100 bp, Homo sapiens
agcagcccgtacctctccaacggacccctgtctcccggaggagcgcgcaccgttgctgaaaagccaggagtcaaaatgactgagcgctttgactgccacc

SEQ ID NO: 588729 - DNA, 90 bp, Homo sapiens
tggtgaaacaccactgaagcattgccaaggcctccaccatcatgttttccatcactttaatcaatcattttgacctaagtatattgatta

SEQ ID NO: 588730 - DNA, 98 bp, Homo sapiens
ggcggcgaggctcggcacggagatggcggcgcgctcggcgcagcccgtggaccgggagcccgtggaccgggagccggtggtgtgccaccccgacctgg

SEQ ID NO: 588731 - DNA, 87 bp, Homo sapiens
ccttttaacgagtattccaaatttgatggcaaggttggcctggcagtggtcaatggacagctcatggcagtaggaggttttgatggc

SEQ ID NO: 588732 - DNA, 100 bp, Homo sapiens
gctcgaggtcgtatgaacgcacaggccgtcgctatgagcgggaccaccctgggcacagcaggcatcggagtaatctatgccagcaattatgacaatgtta

SEQ ID NO: 588733 - DNA, 83 bp, Homo sapiens
ttgtcttctgtgtggattcttcagaaagtgaacttggcattttagatctaattcaacctgactggctcatggagaaagcctac

SEQ ID NO: 588734 - DNA, 90 bp, Homo sapiens
cttcctctgactgcccggaaatatcagccaaaggccagcgtactatactggcaattgctggagaagattttgcaattgttgcttctgata

SEQ ID NO: 588735 - DNA, 75 bp, Homo sapiens
ccagcatgcagactggttcttccctgggggctgtctctcaaggtggtctcttctgctgctagcaactcaaaaatc

SEQ ID NO: 588736 - DNA, 100 bp, Homo sapiens
gtgggcgatgggcccgtggacatgcgcacctcacacaggtgttgacttcaaaatcaaaactgtagagctaagaggaaagaaaattagattacagatctgg

SEQ ID NO: 588737 - DNA, 74 bp, Homo sapiens
gatgggtctgcatgggttacatttatttcgttcacccctgtcaacaggagaactgtgtttatgaaactgtagtt

SEQ ID NO: 588738 - DNA, 105 bp, Homo sapiens
ccgcgcgcagggcctgcagcgggagctggacggcgagcgcgagcggcgcgagaaacacggggtcactctggtgcccattgaggagttcagcccggagttcgtgga

SEQ ID NO: 588739 - DNA, 74 bp, Homo sapiens
ctctccttttccctctccctttccctaagacttatgaaaatatgcatcagtttaatactgtcttggaattcatg

SEQ ID NO: 588740 - DNA, 82 bp, Homo sapiens
tcagcagtgacacggacgaggaggaggaacagaaacacgcccccaccaggtcccgcggcagtgctggtggccatggttcccg

SEQ ID NO: 588741 - DNA, 101 bp, Homo sapiens
acccagcaggagaagtggacatgaggttggcaggcccaagtatctggtggtgaacgcagacgagggggagccgggcacctgcaaggaccgggagatcttac

SEQ ID NO: 588742 - DNA, 100 bp, Homo sapiens
gatcatgatacagttgataaaattgttggtgtttcccatgatgaattgcttgacttagcaaagtttcatttcggtgactctttatgcacacacaaaggag

SEQ ID NO: 588743 - DNA, 126 bp, Homo sapiens
ctctccacccctagagttcttggatgactctgactctcatttagaaatccaaaagaccagggaagatagaaaggtagaagccatcatgcatgcttttgaaaacttagagaaaagaaagaagcggcg

SEQ ID NO: 588744 - DNA, 75 bp, Homo sapiens
gggttacagcagtgagggggccacggctcaagcctgcctagggtagttaaaagacgagtgaatgctctcaaaaac

SEQ ID NO: 588745 - DNA, 83 bp, Homo sapiens
ggctctccctacctgagcaggtgcatcaactccgaaagctccaccgacgaagaaggtggtgttcccactgatgaagagcaggc

SEQ ID NO: 588746 - DNA, 90 bp, Homo sapiens
aagatggcggcggcgtctgtctctgcggcttctggttctcacttgtcgatgactttcacacgacctgccaatcacagacaactcactttt

SEQ ID NO: 588747 - DNA, 83 bp, Homo sapiens
gcggagagaagccgcaaccagagccgccgccacgattttcttccagtaaaatgtgatgcatgtaaacaagatttctgtaaaga

SEQ ID NO: 588748 - DNA, 82 bp, Homo sapiens
tgatcttgtacttggattcagcaaggaaccttccgacaatattgactcacgcctactccagagtggtcctgagagtcctgga

SEQ ID NO: 588749 - DNA, 74 bp, Homo sapiens
ggacgccagttactccacggaaagcagcttcagcagcactccaggcctcacaccttaaacagcaccagcacctc

SEQ ID NO: 588750 - DNA, 74 bp, Homo sapiens
gttcttgtttgtggatcgctgtgatcgtcacttggtgactctgctaatctaacctgcagagctttctttgggta

SEQ ID NO: 588751 - DNA, 100 bp, Homo sapiens
tatgagaatgccaacatgtggttcaagaaccttgacaagctcatccggctggtaaatgcgcagtctgtagatggacggcagatccgagtagaccaggcag

SEQ ID NO: 588752 - DNA, 100 bp, Homo sapiens
gttcaaggaggccttccagctgtttgaccgaacagttcacctttcttggatcacatgcaaaggatgtttaggtctgtgaagaaaagaatttctaggccgg

SEQ ID NO: 588753 - DNA, 75 bp, Homo sapiens
gcaagggttcggccgtgccctccgacagccaggcccgcgagaagttctgcggggagtgtctccagccctgcctgc

SEQ ID NO: 588754 - DNA, 97 bp, Homo sapiens
aaagagactcggtgacagatacagatgccttcaattaagttgcagagttctgatggagagatatttgaagttgatgtggaaattgccaaacaatctg

SEQ ID NO: 588755 - DNA, 74 bp, Homo sapiens
caacaccatggaaatatttgacattgaggtatctcattcagttgctaaacttatattagttaatttccactggc

SEQ ID NO: 588756 - DNA, 50 bp, Homo sapiens
ggacgccggaagccgggaaatggttttaaaatcaaagatgggaaaatcgg

SEQ ID NO: 588757 - DNA, 50 bp, Homo sapiens
cagtggagtctggcatcttattggttctggctccttggcagcaatggctg

SEQ ID NO: 588758 - DNA, 75 bp, Homo sapiens
agtcctacaacagtttggcgtgcaacatggggcttgagaaagggaatttctctgggatttcctgaaccatcagga

SEQ ID NO: 588759 - DNA, 83 bp, Homo sapiens
cttacacccaccatcccactggcctctgataaagcataccctcggggaagtctgggtacagaagacatctgaaatgaatacag

SEQ ID NO: 588760 - DNA, 75 bp, Homo sapiens
agaagattaacctggagttaaggaacagatccccggaggagctgaacatactgacttgtggagtcattggctcct

SEQ ID NO: 588761 - DNA, 89 bp, Homo sapiens
ttacgctgcgggaccccgggcactgttgctgctgcgggagctgaggagtacctgtcatttgcctttgagcattgtcaccgttctagtca

SEQ ID NO: 588762 - DNA, 83 bp, Homo sapiens
cttgttagggcgtggcctgaggcttggataagtgggccgttggacataccagatggtcgaagagctccacttcctgctcatta

SEQ ID NO: 588763 - DNA, 75 bp, Homo sapiens
aaagaaggacgtatgctctacaagcacagaagctgtaatgttattaaacaaagcaatgtatccagatcactcaga

SEQ ID NO: 588764 - DNA, 96 bp, Homo sapiens
cttgttatcagtgatggctcttctctggaagatcttgtgccaaaattgcctggaaaagagcagtgagaggagtccgggagatgtgtgatgcatgtg

SEQ ID NO: 588765 - DNA, 82 bp, Homo sapiens
ttcgatcgcctcgcgccggctgctctttccggaatcctaatgtacctggctagctggtggtgagtaggggctttggggccaa

SEQ ID NO: 588766 - DNA, 90 bp, Homo sapiens
tagcctggtctatgtctttttctgactccagtgcaaccttcctgctgaacgaggttggggtgactcagtgggaacgccatctgagcgggg

SEQ ID NO: 588767 - DNA, 103 bp, Homo sapiens
tcctctgcaggctgctggagcgcctgctccccgggaccatcgagaaaagatcctgaaggagctagacgagtgctacgagcgcttcagtcgcgagacagacggg

SEQ ID NO: 588768 - DNA, 100 bp, Homo sapiens
tagaattccaaaaacgaaggccacaaaagatcagtggtaaatggcatggggaaaatctgattgccacagacagaagaatgaaactggatgcctatttctc

SEQ ID NO: 588769 - DNA, 82 bp, Homo sapiens
ctggacggacataccagtggccatggggcccctgggtagacagacacagcttgatttcagagcagacataggcgaagaaaac

SEQ ID NO: 588770 - DNA, 75 bp, Homo sapiens
gccacactctgcaccgctaggccgtccccgaccttgcctgaacaagaataatccagaatggctactctgatctat

SEQ ID NO: 588771 - DNA, 82 bp, Homo sapiens
tggagccaatcagcgcgggcagcgaaccgggggagcgaggcacgcaaaatgatgcttcaacacccaggccaggtctctgcct

SEQ ID NO: 588772 - DNA, 101 bp, Homo sapiens
gtggatggcgtggagatatggcgcaactgcggcgcgtactccaaagattcaggtttactcacgtcatccagcagagaatggaaagtcaaatttcctgaatt

SEQ ID NO: 588773 - DNA, 101 bp, Homo sapiens
tgaagatgtcttttgaaaggtgtactgcaaggaacaaaatgtttgtaaattctccttttaccaagttcgtctaatgattgaaaatccttacgagacccgct

SEQ ID NO: 588774 - DNA, 98 bp, Homo sapiens
cagccgaccttgagctccaggagttcgtctcttacgtctgcggaagtgcagctgcctcagttcttagcgcaggtggaatgaatcttacttgttgaata

SEQ ID NO: 588775 - DNA, 109 bp, Homo sapiens
cttgccctcaagaaccccaacaagcggctggagcaccagggcatcaagatcgagttcatcgggcagatcgggtatttgaagtataccatacaactgttttgaaaatcca

SEQ ID NO: 588776 - DNA, 82 bp, Homo sapiens
actaatgctgtttctgtcagtcaccatgtgtctttcagtgatcaccagcagcttgcaaaacttatccaggagtcgccaaccg

SEQ ID NO: 588777 - DNA, 100 bp, Homo sapiens
cagagcccgactgtggccgagacactgcatcctgccttctccggagtccagcagtacacaggagtcgttcacgcctactgaggagcatgtgttggtggtg

SEQ ID NO: 588778 - DNA, 100 bp, Homo sapiens
caacaatgagatcgtggacaagatcatgggcaaaggacagatccagccatccgggtgacctgcataggttcctgcggggtctccaacaaggctaatgaca

SEQ ID NO: 588779 - DNA, 82 bp, Homo sapiens
gaggatgtcgggacaccccggaagctgggaaatgcttgatggaccagacaaataggatgatggctgcccccacacaataaat

SEQ ID NO: 588780 - DNA, 94 bp, Homo sapiens
cgaggctcggagaaacaggcgccgcgggctccgcgcccggccggacccgggcccgaggatgatcggctgaatgtaacagaggaactaacgtcca

SEQ ID NO: 588781 - DNA, 96 bp, Homo sapiens
aatcctctcttcaactggatcagaaagaaattgataaatttcaagtagcagcagtgtcgcttggaaaactgcagaaggtgctgttgcgctgtgagg

SEQ ID NO: 588782 - DNA, 83 bp, Homo sapiens
aatcacgcggacatcgtctcctgtgtggcgatggtcttcctgctggggctcatgtttgaggcatcaagcatgatggaaccatg

SEQ ID NO: 588783 - DNA, 88 bp, Homo sapiens
agaccctggcccaggaagatccactaaaggaggccatccttccgccttcttctgcaggagtcaggaagcagtcaattatagatttctt

SEQ ID NO: 588784 - DNA, 97 bp, Homo sapiens
gtggatgcggccaactccaatgggcctttccagcccgtggtccttctccatattcgaggctcttgcagccaatgccggaacaggatttgctgttgct

SEQ ID NO: 588785 - DNA, 75 bp, Homo sapiens
gctggatttttttcgggtagtggaaaaccaggctccataaaaatacagactcaccagttcctgctttgatgtgac

SEQ ID NO: 588786 - DNA, 100 bp, Homo sapiens
ttcgtcagcggctcatcgagactgagctggctaagcaggtgctgcagacggagctggagcgaccgagagagtttttcagaaactttggaattggcagatg

SEQ ID NO: 588787 - DNA, 100 bp, Homo sapiens
ttccaaaagcgcagaccacagttacatgtatggagaatggctggtctcctactcccagatgcatccgtgtcacccctgggaatcgtggcggatataatag

SEQ ID NO: 588788 - DNA, 75 bp, Homo sapiens
ctgcccgcctgcggctgctccggatggaatggggcgagtccttgctcaagatgtatatgcaaaagacaatttacc

SEQ ID NO: 588789 - DNA, 98 bp, Homo sapiens
ttcaagcagcgccgcaccttcggaatgggtaccacagaccatgtcatcgtcctggcgtccacgaaccgagctgacattttggacggtgctctgatgag

SEQ ID NO: 588790 - DNA, 83 bp, Homo sapiens
cggggagtctgtcaggaagtgccatggtaaactgttttaacagggatcgaaaattgtacaatttgggattaaaaggctattac

SEQ ID NO: 588791 - DNA, 98 bp, Homo sapiens
tgagcagtcaactcaaatgcaagtccaagaggaggaggaggcggaggtccaagcggaaaggtcctccagcagcctgacctgagtgggttagtgatcca

SEQ ID NO: 588792 - DNA, 100 bp, Homo sapiens
cgtgctttcccaagcctggaagaactcgtcatgctctttgtagcgtggtgcttctgttgctcacaggccgaatgggtaatagccgaagtgccctgaagat

SEQ ID NO: 588793 - DNA, 100 bp, Homo sapiens
aaaagaagaccagcgacaaatttagagaaacctcggcagacaacatctggggaagatgtacgagacttcacaaaggtacttaagaacaagttcaggtcga

SEQ ID NO: 588794 - DNA, 83 bp, Homo sapiens
aaggagtcgagagcgcagaccctgcagaatggcctttgaactggccacaggtgactatttgtttgaacctcattcaggggaag

SEQ ID NO: 588795 - DNA, 80 bp, Homo sapiens
aacggcgagagtgggcgagaacgtccactgcgggccggcgaaagctgagccctgaggatgatgacaggaaggtccgaagg

SEQ ID NO: 588796 - DNA, 75 bp, Homo sapiens
tctcaggctgcatcaggatgaatgatgacccaagtatggaattgcagagcttgaagtgaaaaccagagaaaaatt

SEQ ID NO: 588797 - DNA, 99 bp, Homo sapiens
gcccccggcaccatggacgcgccgcgcgcctcggcggccaagcccccgaccggagtactattaatcccgtagatgcaatatatcaacctagtcctttgg

SEQ ID NO: 588798 - DNA, 75 bp, Homo sapiens
tgcgcaggagtaaggcaggaaaccgacgagaggacctcagctccaagatccagtttgctgaccagaagcaagaat

SEQ ID NO: 588799 - DNA, 101 bp, Homo sapiens
ggaagttccagctctgcgccgatctatgcacgcagatgctggagaagtccccttatgaccaggtcacagtgctgtcgatatcaccaaggtggctagaagac

SEQ ID NO: 588800 - DNA, 74 bp, Homo sapiens
gcggcggcagcgggtcttgggtcctccgagagcagcagcggcgcctgtgtctggcagagctggtgtgagacgag

SEQ ID NO: 588801 - DNA, 100 bp, Homo sapiens
cttcagtctataataaagagatgtgacattgtgacaaatgtttcccccagaatcatccggggaaccacctctggccccatgtatggccctggacaaagct

SEQ ID NO: 588802 - DNA, 97 bp, Homo sapiens
aagggagattacacagaagcaaaagccttgatagcatggatttctgtgagctcactagtggcaggcaacacactaccttttcagcagaatcaagtcg

SEQ ID NO: 588803 - DNA, 50 bp, Homo sapiens
ccaacccccaaattggctgggacaggatttggtgctatggagaaattttt

SEQ ID NO: 588804 - DNA, 83 bp, Homo sapiens
aaattatgagaaagaagaagaattcctcactaatgagctctccagaaaattgatgcaggtactccaaagattcaggtttactc

SEQ ID NO: 588805 - DNA, 100 bp, Homo sapiens
gctgacagcagccatcgaggcgagccagagcctgcagtcccacacggtcaccctgctgattgccttcatctgtgtgcggagctccctgtggaccaactac

SEQ ID NO: 588806 - DNA, 51 bp, Homo sapiens
cttggcctcccaaggtgctggaattacaggcatgagccaccgcgcctggcc

SEQ ID NO: 588807 - DNA, 132 bp, Homo sapiens
ggggactcagaggagtacttcgccacttactttaatgagaagatctccattcctgaggaggaggtatggcatttcaaatatagatacaaccattgaaggaacgtcagatgacctgactgttgtagatgcagc

SEQ ID NO: 588808 - DNA, 82 bp, Homo sapiens
tccgttctctcaggctcccgttcagggtgaatttggaagtgaaaagaaaactgctttgcatgaaaaagaggagacacttcgg

SEQ ID NO: 588809 - DNA, 74 bp, Homo sapiens
caaagagcccctcatcgagctcttcgtcaagtttgagttcatgatcgagtccatcctgtatgcccgggatgcct

SEQ ID NO: 588810 - DNA, 80 bp, Homo sapiens
cgtggcctgaccaaggacctccaaggtattggtggcatggatggaacacaacagcagatttttaaaatgttagcagaggt

SEQ ID NO: 588811 - DNA, 50 bp, Homo sapiens
gtgagaagtcacctgttatgacacctgctgttgagctaatggaccgaact

SEQ ID NO: 588812 - DNA, 98 bp, Homo sapiens
cgtgaaggagaaagttatgtcggcaagcttagaggcacagttgaatgctgttgatgctttgattgactccatgagcttggcaaagaaagatgagaaga

SEQ ID NO: 588813 - DNA, 73 bp, Homo sapiens
aacgccgagcgcaccgacatctgcctgctcaaaggttcctggatgcctatgctgagcacaagttacagttctg

SEQ ID NO: 588814 - DNA, 75 bp, Homo sapiens
ggctttcaaagataattcgcagtgatgtgaaactggcctcccaagccctgataatttccaggaatatggatctac

SEQ ID NO: 588815 - DNA, 50 bp, Homo sapiens
cttccaggttcccatcctgcgtgaccatgcagcaggtggccaggacagtg

SEQ ID NO: 588816 - DNA, 100 bp, Homo sapiens
aagctttggagcagtgtattttaaattccaacagaatgggtttcctgaaacggatttgcaggaattcctgaaggaatgcagtagcaaagaagagtatcag

SEQ ID NO: 588817 - DNA, 51 bp, Homo sapiens
gacatggagattctcttaaaaagatatgcacccaatgtccagggagcgtgc

SEQ ID NO: 588818 - DNA, 75 bp, Homo sapiens
ctgcatccgctcgacctcgtgaagatccgcttcgccggtgtagagttcggtgctcgaatgataactattgatggg

SEQ ID NO: 588819 - DNA, 98 bp, Homo sapiens
ggtctgcaggtcataacttggccaacctctggtctaacagtgagagccacgagccaaggtgggcacttgatgtcggatctcttcaacaagctggtcat

SEQ ID NO: 588820 - DNA, 75 bp, Homo sapiens
cagcaccttgatcttgaacttctcagcctccagaacgagccccaacccccgcctgaccttctgcgtcaaaaccta

SEQ ID NO: 588821 - DNA, 82 bp, Homo sapiens
agccgatccagcctgcggagcctgtggggcagacctggaatggccaaatatcaaggtgaagttcaaagtttgaaactggatg

SEQ ID NO: 588822 - DNA, 100 bp, Homo sapiens
ggaaatcatgtcaagcgaagccttgaaaaagctgccctgagacggtgtcccgccgaaagaccattactgggacttccacccccaccacgtgcacagcgag

SEQ ID NO: 588823 - DNA, 78 bp, Homo sapiens
gcagatgttgtcaaggtggcctaccaggaggccaggggtgtcgccatgtaccttaccagtaacaaatgtggcaaatat

SEQ ID NO: 588824 - DNA, 100 bp, Homo sapiens
ctcagcacatgatcagggatatacagaccttactatcccggatggagtcaatcaccttctgctgcttggatgggtggatttggtgctcagcctccccaag

SEQ ID NO: 588825 - DNA, 75 bp, Homo sapiens
tcttcaccgtgtacctgggctcgagcctgcacatgaagatagcagaccccacgttagctgaaatgggaaaaaact

SEQ ID NO: 588826 - DNA, 100 bp, Homo sapiens
gtattgtgtggccactgggactttgcagacatgatggtgataaggagcctgagtgttctaagaacggaagcatctgggctggatggaatttagcatcaag

SEQ ID NO: 588827 - DNA, 90 bp, Homo sapiens
ctgcggagccgggctcgggtcgccggagccgcgccccaccccgccagctccagagccacgtacggccggtctaattgaagccaacggaga

SEQ ID NO: 588828 - DNA, 75 bp, Homo sapiens
tgtcagccagggctgaacccccgcaggctccaccgaggacaccgcgtccagcttgtgtggcgaggaggacacaga

SEQ ID NO: 588829 - DNA, 82 bp, Homo sapiens
cgcggcggcgccgggtggtggttaaaccatgttaaggaggattttacagagggtgtggacactgccagcggctgcagccgac

SEQ ID NO: 588830 - DNA, 80 bp, Homo sapiens
aaccctacatgcgcagaatggtggccacctggatgctggagtaagactttgaccccgacgcaggcttcagtgattgccgc

SEQ ID NO: 588831 - DNA, 100 bp, Homo sapiens
gctgcgtatctgctccacgaactcctggtcattagacttgtgtatgcggatacctgcttcagtaccatcaagttaaaagcagaagatgcttctggtagag

SEQ ID NO: 588832 - DNA, 100 bp, Homo sapiens
actgctaggaaaggatccaaacagccacagcctggcagctctgatcaggaaagtgaggaacagcaacaattccggaacattttcaagcagatagcaggag

SEQ ID NO: 588833 - DNA, 51 bp, Homo sapiens
tgagaatccggcctgagccgaagcggagatgagctccccacacaagaactc

SEQ ID NO: 588834 - DNA, 75 bp, Homo sapiens
cggacctgtctgggtctcagccgccaaagaccccgtccggtagctgcatcttcctcccgtgaggctggccgagct

SEQ ID NO: 588835 - DNA, 90 bp, Homo sapiens
cagcctcccgagtacctgagattagcccagtttcaccagtgatcattaaagaatgggcagcttacaaaggaaagtctcctcaaaccccgg

SEQ ID NO: 588836 - DNA, 122 bp, Homo sapiens
tctgctgtgggcgctgctggcgctctggctgtgctgcgcgacccccgcgcatgggccgcgatgggcctcttggaacattggtgtgttcatctgcattcgatgtgctggaatccacaggaatc

SEQ ID NO: 588837 - DNA, 106 bp, Homo sapiens
gctgcaccggctgctgcaacacgagcagtgtcaagtgccagccctcccgcgtccaccaccgcagcgtcaagggagctcccagggaagtggtcgacccctccggtgg

SEQ ID NO: 588838 - DNA, 95 bp, Homo sapiens
gtggtttttcggatcatgtctggtggctccgcggattataacagagaaccatggagtctggcagtaccgccgccagtgaggaggcacgcagcctt

SEQ ID NO: 588839 - DNA, 98 bp, Homo sapiens
atatagataagaatgctgatggtttcattgatctagaagagtatattgatttagcatgtagactgctggggcaatcaatggatgaaagtggattacca

SEQ ID NO: 588840 - DNA, 90 bp, Homo sapiens
gcatgcctcaccaagtcacatgacaagcagactctgctggagcaggacttcagagtgtttgttttcagcctgcttttaaagtgatttgaa

SEQ ID NO: 588841 - DNA, 101 bp, Homo sapiens
gcacgtctgctcggagatcatttgggagatccaagagattcagtatcactcgctcccttgatgatcttgagctgtcacaagatgaaggtagaggcacatta

SEQ ID NO: 588842 - DNA, 50 bp, Homo sapiens
cggcaccggatcaccaagacggaggaagccgctctgtgacccacctctga

SEQ ID NO: 588843 - DNA, 100 bp, Homo sapiens
tcgcggacttgcttcaggctggccaccccccggcgtctctggccgagcctctttttgtggaaaacgacagcagcagcagtggcctggaagacgccaccgc

SEQ ID NO: 588844 - DNA, 100 bp, Homo sapiens
aaaccaaatatggtttgcttcagctgtcgacttgctggagaagatgcttgtattggactcagataagagaattacagcggcccaagcccttgcacatgcc

SEQ ID NO: 588845 - DNA, 99 bp, Homo sapiens
caggttcagtgacatcagaaaatgtgtccagagattacaagaaaaacgtttcttcatttcaactcaaacttgctgctaaagcgcctaaatctgaaaagg

SEQ ID NO: 588846 - DNA, 75 bp, Homo sapiens
cgagaagcctgaaaagtcgcagcgagctggagccgccggagatcacccggaagttcaggctgaattctgaaggca

SEQ ID NO: 588847 - DNA, 51 bp, Homo sapiens
gcctcctgagtagccgggactacaggggttgtgtccactgtggtccccgac

SEQ ID NO: 588848 - DNA, 100 bp, Homo sapiens
ctaggggtgtacttgttggggtcaggggccaattcctgtccccccagcagcatggcatcgtgtgctgaaccctctgagccctctgccccactgcccgccg

SEQ ID NO: 588849 - DNA, 80 bp, Homo sapiens
actccccccagcacagcagagcgcttccctgcccacccgcggaaaccgccccagatcgcaccccctccctccctggcgga

SEQ ID NO: 588850 - DNA, 75 bp, Homo sapiens
tattcatcaacctagagctgccaagaagcattcttcatctaaagataaggtcaaaatgcagatcttcgtgaaaac

SEQ ID NO: 588851 - DNA, 76 bp, Homo sapiens
ctagaactggcgattggacgatttgaaagtgaagatttgacctccatagttgatcagggagcttccaaggcatttg

SEQ ID NO: 588852 - DNA, 75 bp, Homo sapiens
ccattgactatgcagcctaatgtaagagatgctaaaaaccttgtacctatggaccccaatggcctgtcagatccc

SEQ ID NO: 588853 - DNA, 90 bp, Homo sapiens
ccggactctgggtgttttgctaccgtgaccgtttaggagtggtaaaatttcagccttccctttggccttgggactcagtgaggaacaatt

SEQ ID NO: 588854 - DNA, 50 bp, Homo sapiens
aaatattcaagaagctggtcagttggcagatggagtctcgctgtcgccca

SEQ ID NO: 588855 - DNA, 80 bp, Homo sapiens
ggtggcaaccgcctacgagacactcaaggtggtaaattcactccagcagcaacctcaggctgcatccccttcagtaccag

SEQ ID NO: 588856 - DNA, 95 bp, Homo sapiens
actttcaaagtttgatgagcagagaactgctactacttaattcagtgcacaaatgagatgaatgtgaacatcccacagttggcagacagtttatt

SEQ ID NO: 588857 - DNA, 98 bp, Homo sapiens
ctgccccgtgtaaagcgctgatgagatggcaatttaaactgctttgatgaccaggtttcattaggtggcgacatgtctaagaatgtgagccagtcaca

SEQ ID NO: 588858 - DNA, 100 bp, Homo sapiens
gtttaagatagcactgtactactacaggaactgcaagcacatgttgaccagataactgaaatggcagcagtaatgaggaaagccattgaaattgacgagc

SEQ ID NO: 588859 - DNA, 100 bp, Homo sapiens
cgcgccaccaccctctacaacacggaagtgctgttgtcacacctcagttacctcagggaaagtttcaccaaaactcatgccaatgcagcagatcgcaaat

SEQ ID NO: 588860 - DNA, 99 bp, Homo sapiens
ggccgacttcgatgatcgtgtgtcggatgaggagaagctccatctcctccgaagggaatgaactcctcgtccagttcgtctcagatctcagtgtcaccg

SEQ ID NO: 588861 - DNA, 80 bp, Homo sapiens
cagcaagaacgggaacaaaactctgactaatagggatgccaaaggaaaaatatgatcctccagatcctcgcagaatttat

SEQ ID NO: 588862 - DNA, 100 bp, Homo sapiens
aggagcgcgtctcggcgggagcctcaggacacagcattgttggttttgccatgtactattttacctatgacccgtggattggcaagttattgtatcttga

SEQ ID NO: 588863 - DNA, 97 bp, Homo sapiens
agggctcctgtggctcctgctgggccataggaaaaggatacagagtagagtttcatgaacctgaaacttggtggaaatttgatcctgaagaattaga

SEQ ID NO: 588864 - DNA, 98 bp, Homo sapiens
tgtcggtgggcgagctctacagccaggtcagcctgccagtatactggggggcagccatagtgaaggactgttgcagatagcatcagggcctcagccag

SEQ ID NO: 588865 - DNA, 100 bp, Homo sapiens
gacatgagcaagaaaagcctctgggagcagaagggaggctccaagacctcatcaacaattaaggtttccttgttgcagaatgaaagtgtagaaaaaaaca

SEQ ID NO: 588866 - DNA, 85 bp, Homo sapiens
gaagctgctgcccagaacgtgtactgcttgagaacagaatacattgctgattatctcatgcagggcaagtgtccagagaatggct

SEQ ID NO: 588867 - DNA, 95 bp, Homo sapiens
caacagtgtaaaagaaatcatttcactgttagtttcaaaggtgtgggattatgagactggagattttgaacgaactcttaaaggacatacagact

SEQ ID NO: 588868 - DNA, 75 bp, Homo sapiens
gcagaatgcagaaatcatcagaaaaatgactgaagaatttgatgaggcagacctgttatcctaaactaggtgagt

SEQ ID NO: 588869 - DNA, 107 bp, Homo sapiens
aagacttttctcaaaactggaaggcgctgcaagagatcttggagtctctgtggatcgttatgagccggaatgtgagcctgctgttcaccactgtcactacactcttg

SEQ ID NO: 588870 - DNA, 142 bp, Homo sapiens
gcaggagctgggcgggaggatcggcgccctgcagctgcagctctcccagctgcacgagcaatggtccacctaatcatcctgtgaaagtggtttctctatggaaagctttgtttgcttcctacaaatacatgcttattcctta

SEQ ID NO: 588871 - DNA, 74 bp, Homo sapiens
gtagccaagcgcatgatccgcatggccaaggattttttatcaagcagaaatgcatcgaacaacgagaatcaaga

SEQ ID NO: 588872 - DNA, 75 bp, Homo sapiens
gggggcccgaaggacttcggcgcgggactcaagtacaactcccggcacgagtccgtagttcgtggtccttcgccg

SEQ ID NO: 588873 - DNA, 75 bp, Homo sapiens
ctttgatgattttaacctggaggatgcagtgaaagaaacttcctcagtaaagctttcagtctgatggaagcaaac

SEQ ID NO: 588874 - DNA, 100 bp, Homo sapiens
cggagacgcagatgtggacttgaaagaagctgcagcggaggaaggcgaggctaagcttctatcaccatcagagaaagaaatacccgagcaaaataacacc

SEQ ID NO: 588875 - DNA, 100 bp, Homo sapiens
aaaaacaacagtctttatgtccttacaccagatttgccaccaccttcatcatctagtcatgctggtttgcttgcctaaactggacttgaagcaatttaaa

SEQ ID NO: 588876 - DNA, 90 bp, Homo sapiens
caagcgttagacttctttgggaatgggccaccagttaactacaaggttatcaatactctggctgaccatcatcatcgtgggactgacttt

SEQ ID NO: 588877 - DNA, 75 bp, Homo sapiens
aaactacaaatcccaggagcacttcacggagctggaacagcagctcatgatggagaaaagaaactaccgcaagac

SEQ ID NO: 588878 - DNA, 82 bp, Homo sapiens
gggcagtcatggtcccagaaacgtcactatcaagaagcccccttacccaggaatggaacaacctccacaccatccttactat

SEQ ID NO: 588879 - DNA, 83 bp, Homo sapiens
tctaaatgaaccaaatatccaagacccagctcaagcagaggcctacacgatttactggtgtccctacctgcaccggacgacgg

SEQ ID NO: 588880 - DNA, 90 bp, Homo sapiens
tgtctgaacgtgctgaacaagagcaacgagggtcccagcatgccttctgagaccccccaggcagaagtggggcccacaggctgcccccac

SEQ ID NO: 588881 - DNA, 97 bp, Homo sapiens
acagcgccttcctcaacgacgcggacatggtcatgagctttgtgaacctgggtctctaattaacagaagatggcaaagcccagccacagcagctatg

SEQ ID NO: 588882 - DNA, 71 bp, Homo sapiens
tgggattacaagcgtgagccaccgcacccggccgagttctacggggaagatgctaagaaatcccgggacta

SEQ ID NO: 588883 - DNA, 100 bp, Homo sapiens
cccaatttgcctccacttagtgagcggaagaatgggcaaacctggtggacctgcagaagaagctggaggagctggaacttgacgagcagcagaagaagcg

SEQ ID NO: 588884 - DNA, 75 bp, Homo sapiens
cagggctcctaaggaaggacccgcctttaggtcagcccaaggccaaccccactgtcactctgttcccgccctcct

SEQ ID NO: 588885 - DNA, 98 bp, Homo sapiens
cttcttcactgcctctggcatggatgagttccatgccattgcagtgtcaactaggcctcagttacttttcagtttgcccaaattgagcccatctcaac

SEQ ID NO: 588886 - DNA, 75 bp, Homo sapiens
gaactggttctacacgcgagctggctgaaggtgatgtggccgccctcaaccgacgcatccagctcgttgaggagg

SEQ ID NO: 588887 - DNA, 75 bp, Homo sapiens
cggagagatgctgggcgtggcggccgggatgacccacagagattaaaagctgctttgacccagcaacatcctcca

SEQ ID NO: 588888 - DNA, 96 bp, Homo sapiens
ctctgggagcagaagggaggctccaagacctcatcaacaattaaggaggaaatctctgacatcaaagaggaggggaacctagaagctgtcttgaat

SEQ ID NO: 588889 - DNA, 75 bp, Homo sapiens
tcttgaccatgtgacatctgatgctgtggaacttgcaaatcgaagtgtcaaagttcgatcagcagctgttacctg

SEQ ID NO: 588890 - DNA, 133 bp, Homo sapiens
gctacctcgctgcttcccagagctttcacgaaggcaccgacgtcatcatgctgaccaccaatcagatccgtaagggagtgcatccgccccaacccttttccccctcgtctcctgtgagaattccccgtcggat

SEQ ID NO: 588891 - DNA, 76 bp, Homo sapiens
attgtgatgaaagcacatggtacaggtactccaaagattcaggtttactcacgtcatccagcagagaatggaaagt

SEQ ID NO: 588892 - DNA, 99 bp, Homo sapiens
cagtttttatgctgtgtgctggagttacgcttgtacagtggaaaccagcccaagctacaaaagtggtggccctgttaaacctggcagagcgactgggag

SEQ ID NO: 588893 - DNA, 75 bp, Homo sapiens
ttgtttgtggatcgctgtgatcgtcacttgaaaatgacagatggcgagacctggacaggaaatgccctcttcaga

SEQ ID NO: 588894 - DNA, 98 bp, Homo sapiens
tatcgccagtccagcagctaaggatattttgtgcagagtgtgaacatggctacgcctcttcattcccgtccatgccgagcccccgactgcagcattca

SEQ ID NO: 588895 - DNA, 100 bp, Homo sapiens
atcaggaagaacagggtcgaggatcgagcctgagcctccaacaacaaacaaatggcagctggacaactggctgaccaaagtcagccagccagctgcgcca

SEQ ID NO: 588896 - DNA, 100 bp, Homo sapiens
acaggagctgtagagaggaccccggtacatctgaaagccgggaaatgccctgactgccgccgcaggaagagggaagctggaggtctgtgagctgctgctg

SEQ ID NO: 588897 - DNA, 76 bp, Homo sapiens
ggaggacacacctaaacatgtggaatcccaatgccggctgttttggagtcagcggaagatcaccaaggccagggag

SEQ ID NO: 588898 - DNA, 100 bp, Homo sapiens
cagacactacacatctgtcctccacagaggctttttgtgtgttttatcatctaaaatccaatccctcgcaacagccaactcagtttataaatccagaaac

SEQ ID NO: 588899 - DNA, 88 bp, Homo sapiens
ggagcacacggaggccgtgatgaagtcagattcctaccaggaagacatttacccaatgacaccaggcacggagccagcactgaccccg

SEQ ID NO: 588900 - DNA, 75 bp, Homo sapiens
aggatgggctgcagacacagcaggctgagcagctgcaaacccccgaaaaagccatcccagctcagtagcttttcc

SEQ ID NO: 588901 - DNA, 100 bp, Homo sapiens
tcagttcgtggttgcattgtggatgcaaatctgagcgttctcaacttggttattgtaaaaaaaggagagaaggttcaaggtcaatgatgggagaacgaga

SEQ ID NO: 588902 - DNA, 134 bp, Homo sapiens
gtcatcattaagttggagcagggagaggagctgtggataacgggaggtgaatttccatgtcaacatagtcctgttgcatttgctggtctggcctttgcgtccttctacctggcagggaagttacactgcttcac

SEQ ID NO: 588903 - DNA, 97 bp, Homo sapiens
cgacaaagaccgaaaagaagatgatacaaatgaatttgttagtgctgtgtgctggagggcactaccagatgggattctggaacttttcaaagcctga

SEQ ID NO: 588904 - DNA, 100 bp, Homo sapiens
agggtgccctggtcacaggggccatggccttcgtcgggggtttggtgggcggcccaccgggactcgccgttgtagagacgggggttcaccatgttagcca

SEQ ID NO: 588905 - DNA, 89 bp, Homo sapiens
gaagctcactcagattccctcattgatacctttcctgagtgtagtacggaagattttggatttagtaaaggggacacattaccaggtag

SEQ ID NO: 588906 - DNA, 100 bp, Homo sapiens
ctcgctaacaactgcccagctttgagaccagctcagctagtgagcaagaaacacaagctccgaagccagaagcgtccccgtcgatgtctgtggctgcatc

SEQ ID NO: 588907 - DNA, 91 bp, Homo sapiens
cgaagctggccgagcaggctgagcgatacgacggtgtggacactgccagcggctgcagccgacttggaatgacctgggagacaaatacaac

SEQ ID NO: 588908 - DNA, 100 bp, Homo sapiens
ccggctcgaagcctggatgaaatagatctctcggctctgagggaatagccaggccagaagaaggaaggcctgtggtgagtgggacaggaaatgacatcac

SEQ ID NO: 588909 - DNA, 75 bp, Homo sapiens
ctctccaccaccgaccgcgtcatcaaagatctcccttgagtttagaaatctggctgagaaataccaaacagtgat

SEQ ID NO: 588910 - DNA, 89 bp, Homo sapiens
tggagaacaggcgtggccagcactggctccttgatggagagattaaacagattctagaaaatgaacttcagatacctgtgtccaaaatg

SEQ ID NO: 588911 - DNA, 82 bp, Homo sapiens
tccgccgctcctccgggcttgccctggagccctcaggatgaatttcatcctttcatcgaagcacttctgccccacgtccgag

SEQ ID NO: 588912 - DNA, 88 bp, Homo sapiens
ctgctaaggaggagtctggtggccgaagccgtagtgggagtattgtggaacttatagcaaagaatggccgagtggattctgaggaccg

SEQ ID NO: 588913 - DNA, 100 bp, Homo sapiens
ccagtattaaaagcactgaaattgatgacggagaagttttatatttggtacattactatggatggaatgtcagggctgatatgccgagcattacccaggg

SEQ ID NO: 588914 - DNA, 50 bp, Homo sapiens
agacggtggagctccataagctaaagacttttaatacaggcaggctatga

SEQ ID NO: 588915 - DNA, 74 bp, Homo sapiens
gggacctgggctgggaacccgcggtggagcgggacacgaacgtggggactttcccatgcctttcatatctgcca

SEQ ID NO: 588916 - DNA, 105 bp, Homo sapiens
ctcctggatcctttattacgaattgtgatcacatcctctgattggcaacatgttagctttgaagtggatcctaccagacggaatcttgcactgtctcccaggctg

SEQ ID NO: 588917 - DNA, 51 bp, Homo sapiens
acccaggcgactgcctcatcttcaaggccctgccctgggagaagccctgcc

SEQ ID NO: 588918 - DNA, 90 bp, Homo sapiens
acgtcatccgctacatcgtgtgcaggaccaagaatcgccttcagccctgtctggtgcatccttggcagaaagtgaggaggaaaacacccc

SEQ ID NO: 588919 - DNA, 82 bp, Homo sapiens
gctggagtgtgtagtgaccgtcaccaacccccttccgcccacggccacttctgcatccagattatgactgtaccttttaact

SEQ ID NO: 588920 - DNA, 99 bp, Homo sapiens
cggcgacacgtggatccaagatggcgacggcgatggtacctgcgcgccctgtacctggggctgcagagccgctggcgcggggagcggctgcggcgccac

SEQ ID NO: 588921 - DNA, 100 bp, Homo sapiens
ccatcagatcttttgagaacctactcactatcacgagaacagcatgaagacctcatagttattcctaggagtcaagaagatgatgcacacaatgtacaag

SEQ ID NO: 588922 - DNA, 100 bp, Homo sapiens
gcgagggtctgaagttcacgactactagaaggggaggggagtggaaaggctctcagtgaaaaagaatttagcttgggttaaatcatataacatctgcttt

SEQ ID NO: 588923 - DNA, 101 bp, Homo sapiens
tgccaagaagatggacaagatggtgcagaagaagaacgcggaatgtatacaaagactatcgcttccttgagctggcatgtgattcccaggaggatgtcgac

SEQ ID NO: 588924 - DNA, 100 bp, Homo sapiens
attggcaagacatatccttacaggcagagagatcatggaagggaagtggttgctgtgtatgttactggtgcttggaactgctattgttgaggctcatgat

SEQ ID NO: 588925 - DNA, 82 bp, Homo sapiens
tacttgcgtccgctacagtatgtcaatcgcttgccccagcacagggtgcaaatagctatgggcaacttggcctcggccataa

SEQ ID NO: 588926 - DNA, 100 bp, Homo sapiens
cagacgcaagatggcggacagtgcggaactaaagctcaaagcttggattctgccgtgccactcacgaatggcgacacagaagacgatgctgacaaaatgc

SEQ ID NO: 588927 - DNA, 98 bp, Homo sapiens
acccacccaacattgactgcacatggaacattgaggaattacgtatggaaattgcaaaacaagaattaatcgctcatgcccgggaagcagcatccagg

SEQ ID NO: 588928 - DNA, 100 bp, Homo sapiens
aggccactgaggtctcccccaacaaagggacactgtctgtgatggaggactctgcccaggaggccgtggggacccgagaccaggcgagccaattgctggc

SEQ ID NO: 588929 - DNA, 83 bp, Homo sapiens
tgttttttcatattacatctacaagaggggacaagtacctttatgaaccagtgtatcccaacagtatcctggtgtgaaccagc

SEQ ID NO: 588930 - DNA, 96 bp, Homo sapiens
tccaccccttccacgtcatccgcatcaacaagatgttgtcctgtgctggggctgacaggttcagtgtatctttgcctgcctacatcaatctgcaag

SEQ ID NO: 588931 - DNA, 100 bp, Homo sapiens
aaggacaccaaggtacccaatgcctgtttattcaccatcaacaaagaagaccacacactgggaaacatcattaaatcgactccctggcactggggaaaac

SEQ ID NO: 588932 - DNA, 78 bp, Homo sapiens
cttgctgtaccatccaggatttgccggagcttactactgaaagtctgtgacgagtagcacagcccctctatggtttag

SEQ ID NO: 588933 - DNA, 75 bp, Homo sapiens
attcgtcttggtaaacttggtctgtgttctcatttcacccaagacctttggctagatcagaacataaaaaattca

SEQ ID NO: 588934 - DNA, 87 bp, Homo sapiens
cacagagaaagtgattacagacattgccggggtggcaggtgtcacagctttagcctgtggaatgatagcagtagggtcctgcaatgg

SEQ ID NO: 588935 - DNA, 51 bp, Homo sapiens
cagacagactgctataacaatctagctgggacgcttgactttcagggatgt

SEQ ID NO: 588936 - DNA, 75 bp, Homo sapiens
ggaacccccagaaacaggcccggacctcctcctctaccacccccaatcgaaaggactcagaattcatgattgaag

SEQ ID NO: 588937 - DNA, 82 bp, Homo sapiens
gggtgagagatgtgatcactggtttcgtggcctgaccaaggacctccaagacgtggtcccatctggatgaggaccagcagga

SEQ ID NO: 588938 - DNA, 82 bp, Homo sapiens
tagcaaggaagaaattgttcagttcttctcagcctcagtgaaggatgagatcagtggagagctggctgcttcttcaggggtt

SEQ ID NO: 588939 - DNA, 74 bp, Homo sapiens
ggcggaggaggcgcagccggacatttagccgctcatcttcggttctgggccggagaaggggcgacgttcgggca

SEQ ID NO: 588940 - DNA, 98 bp, Homo sapiens
aacaaaatggttatcaaccacttggagaagttgtttgtgacaaacgatgcagcaactattttaagagaactagaagtcatctttggaaaatccagcgg

SEQ ID NO: 588941 - DNA, 75 bp, Homo sapiens
gaggaggaagacgaatcgttaaacatcttaggtcaggcagttggagcagaactttttcaactgcagctgtgacat

SEQ ID NO: 588942 - DNA, 50 bp, Homo sapiens
ttttgaattcacgcttatggtagtgggtcacagggattatggacccagaa

SEQ ID NO: 588943 - DNA, 98 bp, Homo sapiens
ccaagatgcatggacccagctcagcgggacgcgccgctggagaatgaagattatggagagaattatggatctacccactttactgaggcatgcattca

SEQ ID NO: 588944 - DNA, 83 bp, Homo sapiens
gcattatcgaaggtcactacaatggtgaacaactgatttcaaaaatatcactgcatcctatagaagataatcctattgaagag

SEQ ID NO: 588945 - DNA, 96 bp, Homo sapiens
tacagaaccagatgctgcagaggaagaagccattagatggtggagaaaggtctccacctctgggcaggagagttgccgaccacctcgggggtgctt

SEQ ID NO: 588946 - DNA, 107 bp, Homo sapiens
gcctatgatgccaacgtgtccttcaatgtttcccgggagctcttcttcatcaacatgtggcagaaggctcgtgaagaagaaatgactgcaaaagtaagggacctgca

SEQ ID NO: 588947 - DNA, 75 bp, Homo sapiens
catacggatgttgcagatgttttacttcaagcaggggctgatttactggagagatttaccagcatgagaattaag

SEQ ID NO: 588948 - DNA, 83 bp, Homo sapiens
tgccaatggcaacagctttgccactcgactttccaacatttttgttattggcaagggcagccccgagaaccacaggtgtacac

SEQ ID NO: 588949 - DNA, 90 bp, Homo sapiens
gcagcctataaaactagagcctttgaataagattatcctggaccccatgacgttcagcgaggccaggttccggccgtccctggaggagag

SEQ ID NO: 588950 - DNA, 100 bp, Homo sapiens
tgagtgagcgctatgacaaattgaaggatttaagtgccctgtatgctcaaaatttgtatcctcagatgaaatggatttgcatcttgtaatgtgtttaaca

SEQ ID NO: 588951 - DNA, 75 bp, Homo sapiens
ctcgcgctcgcgctggtggcggtcgcctgggtccgcgccgaggcatttatgtttgaatcatctttaagtctggcg

SEQ ID NO: 588952 - DNA, 87 bp, Homo sapiens
gtgagatggttgtccagtatatttctgccactgccaaatctgacataagcagctctatgaccaatagcacagctgccagtagacccc

SEQ ID NO: 588953 - DNA, 107 bp, Homo sapiens
gaattttatacacagagacattaaaccagataacttcctaatgggtattgggcgtcactgtaataaggaatctttctgaacctgtcatgacctatagacttcacaaa

SEQ ID NO: 588954 - DNA, 50 bp, Homo sapiens
gcacacggaggccgtgatgaagattgtaaaccatggctgtgtggatacaa

SEQ ID NO: 588955 - DNA, 82 bp, Homo sapiens
tgtatttgactgagagaaacccactgaagacgtctgcgtgagaatagagaccaccgagaagctgccagtaactcagattcta

SEQ ID NO: 588956 - DNA, 96 bp, Homo sapiens
agctggttggccctgtgatccctcaagactggtccacggagtgtatgaccacaaacagccatcaagctgcagaaccttggcctgaaaatgctacat

SEQ ID NO: 588957 - DNA, 100 bp, Homo sapiens
aggccagcctgcagtgacagtgagacatggctttgacttgcttacagagatgaaaacaaccagcctatctcagctgagatctgtatctgtggacctgaat

SEQ ID NO: 588958 - DNA, 95 bp, Homo sapiens
gctctgcgcggctttttgagcggtcccgcatcaaggctctggcagaagcatcaagtgtacctgatttgtgaacctatcttgcttcagttggtttc

SEQ ID NO: 588959 - DNA, 83 bp, Homo sapiens
tttagtatcagccaaacttgcagctgttcagaccgcgctccgccgagacaatgcagatcttcgtgaagactctgactggtaag

SEQ ID NO: 588960 - DNA, 75 bp, Homo sapiens
cagatccacagcatccgggacctccagcgactcctggagatagactccgtagagtcaccggcctgagaaggagtg

SEQ ID NO: 588961 - DNA, 96 bp, Homo sapiens
cacgagacgacttcctgggccaggtggacgtgccccttagtcaccttccgggacttccttccccgcggttcaggaatcgtcacccggcggcctctc

SEQ ID NO: 588962 - DNA, 100 bp, Homo sapiens
gggaagatggcggctgggttcaatgttcagtcctaaacgagaagctcgaacaactgctgcaggctttgcacacagattcccaggctgcgcctgttctccc

SEQ ID NO: 588963 - DNA, 100 bp, Homo sapiens
ctttactgcttcctggacacagacaacgtgccaaaagacagtgtggagtttgcatttatgtttgaacagagacagtgcgcacggccacccccttccccat

SEQ ID NO: 588964 - DNA, 78 bp, Homo sapiens
aggaagtctccacttccaagatctaggaagacggctacaaatgataatagcctaacatggcagaccagagacagcgct

SEQ ID NO: 588965 - DNA, 100 bp, Homo sapiens
gtgtggatatggatgagacagagagggaagtggaatatttcaaaagcgtacacagactttactaaaagagtacaaagaaagggataaatccaatgtattc

SEQ ID NO: 588966 - DNA, 90 bp, Homo sapiens
cctcggaggaggacctgctggtggtgcacacgaggcgctatcttaatgagctcaaggataaaagaatcagagtgtctcaacccttgacaa

SEQ ID NO: 588967 - DNA, 97 bp, Homo sapiens
tactgcacagcgggatttatataggaatgtgttgttagagaactacagaaacctggtctttttgggtatggcccatctcctgtacgcttggagcgac

SEQ ID NO: 588968 - DNA, 96 bp, Homo sapiens
gggagatccacagccaagatgccgggaccccttagaagcctagaaatggagtacgaccccagcaaagcgacctttgtgaaggtggtgccaaccccc

SEQ ID NO: 588969 - DNA, 100 bp, Homo sapiens
aactaggtcgatggtcggcggcgcccggatgggcagctgaggggcccagatcattgatctgatgatgctggtcatcgatgtgaccaaggggatgcagacc

SEQ ID NO: 588970 - DNA, 100 bp, Homo sapiens
ctgacaaacactgtattcgttgacagagctttgatagtcgtaccatatgcagaagccactgtcagaccacggaatgatgtggcccacaagcagctctcag

SEQ ID NO: 588971 - DNA, 90 bp, Homo sapiens
cacggccgcaggtgaccccttagcccagctccagtgggcgggtggcaggtgtcgtgaaaactacccctaaaagccaaaatgggaaaggaa

SEQ ID NO: 588972 - DNA, 75 bp, Homo sapiens
gcatggcctgtctgatggccgctttctcggtcggcaccgccatggataaaagaatcagagtgtctcaacccttga

SEQ ID NO: 588973 - DNA, 95 bp, Homo sapiens
atccaaggagatgggtgttcagaagtctgggccaacggtcacaaaagttgtcactgttgtgacaaccaaaaaagcagttgtggattctgataaga

SEQ ID NO: 588974 - DNA, 88 bp, Homo sapiens
cacaacctggaagctcagtggttacttctctttccccaggagaagctgtaaagaagaattatccagactgccttgccactagatgaat

SEQ ID NO: 588975 - DNA, 82 bp, Homo sapiens
cgctccggaagggtggtcagcgccgtggaggaggacacctgctccacttcaccttttgccatgagtaaaagctccctgaggc

SEQ ID NO: 588976 - DNA, 74 bp, Homo sapiens
gctgccatctttccaggaggctttggagcggctaaaaacctctacctgaacgacctggagcgtattgcacagag

SEQ ID NO: 588977 - DNA, 75 bp, Homo sapiens
ggccggcgtgggagcgccaaggccgcagatatgaagcaacagcatgtcatagaaaccttgattggcaaaaagcaa

SEQ ID NO: 588978 - DNA, 82 bp, Homo sapiens
gcgagcacagagcctcgcctttgccgatccgccgcccgtccacacccgccgccagtctgcgctcctcagaccaccggcaggt

SEQ ID NO: 588979 - DNA, 51 bp, Homo sapiens
tcttctccctgcccatctgctgacaacaaagatcattccactcagcctggg

SEQ ID NO: 588980 - DNA, 75 bp, Homo sapiens
ctggttctggaatcctcagttcaagagttatgcccagccaagtcttcagtatatccaggggcaacagattttcac

SEQ ID NO: 588981 - DNA, 75 bp, Homo sapiens
gaggagaagaaaaccttgaaaaaaatctccctgagtttgccggactcggagatcatgcagcagaagcagaaaaag

SEQ ID NO: 588982 - DNA, 74 bp, Homo sapiens
cagtccctgctgtgcacctgggggtacagatgtgtgcaacagcaccgatcttccggaagtcgagatcattagcc

SEQ ID NO: 588983 - DNA, 76 bp, Homo sapiens
ccagactctatgacatctgctgcctggaagcgtcctgatcagacatgggttcagtgtgatgcctgtctaaagtggc

SEQ ID NO: 588984 - DNA, 88 bp, Homo sapiens
gaaaggcatggtcacaaagaactcaagaaaatcttcgaagacttttcagaacttagtgatttggcccgtgaccctccagcacaatgtt

SEQ ID NO: 588985 - DNA, 102 bp, Homo sapiens
gaagaagtagagtatttcaaccataaagacatcttaattgggcacgaaagagggcctggagtccctcggctgcatccggaagcgctggctgagaaagccaag

SEQ ID NO: 588986 - DNA, 73 bp, Homo sapiens
gtggcgtcttggtgttctccacgctggttcgcagggccaattcctgtccccccagcagcatggcatcgtgtgc

SEQ ID NO: 588987 - DNA, 101 bp, Homo sapiens
gaggtggttatgacaactatggaggaggtagaggaaatgaaggagtcaaagcttccaggtgataaaggacttgtgttgatgtctcgggccaagcatcatgc

SEQ ID NO: 588988 - DNA, 80 bp, Homo sapiens
agagcattcgaagtgacctcagcagggcatccaggtactgctataaccagaatttggtagaaaaaggatttacttgttgg

SEQ ID NO: 588989 - DNA, 90 bp, Homo sapiens
tattatggatgaaatgaaacagattctaactccaatggcccaaaaggaagacaaaggcgctttggctaagctggtggaagctatcaggac

SEQ ID NO: 588990 - DNA, 82 bp, Homo sapiens
ctgaaatctggagtgaagaacgccgccatccagccaccattccaagatgtgtatatctcatgattgatatggagaaactagt

SEQ ID NO: 588991 - DNA, 75 bp, Homo sapiens
agacacggccagatctgccctccagtttctaatatggtggcgaaaaatgcagaaatgcataaaaataaactgcag

SEQ ID NO: 588992 - DNA, 90 bp, Homo sapiens
cctgcaccatgagctggggcaccgagctctggggggatatgagactttctactcggaatatcctgagtgttgcgtggatgtaaaacccat

SEQ ID NO: 588993 - DNA, 132 bp, Homo sapiens
aggactcgagcgccctgccctggtccatcaacagggacgattacgagctgcaggaggtgatcggtgccgccggatggtggtggttgtctctgatgattacctgcagagcaaggaatgtgacttccagaccaa

SEQ ID NO: 588994 - DNA, 98 bp, Homo sapiens
ggacagcggcagcgacgagaacctggatcaggaagaaacacctcttacagtcatctgcaggggattctccaaggacatgggaagatagatgtaagccc

SEQ ID NO: 588995 - DNA, 75 bp, Homo sapiens
gctgagccgccggaggaggagccgcgggcaacgagtgggcctttggagtgacgctgtgggaactcatgactctgg

SEQ ID NO: 588996 - DNA, 95 bp, Homo sapiens
gggagtgtattttgctgttggttctgtggatgacaggtgacaaaacagggtgtcatggagaaactccagctgggcccagagattctgcagcggga

SEQ ID NO: 588997 - DNA, 122 bp, Homo sapiens
cgagaggatcatggcggatggccccaggtgtaagcgcagaaagcaggcgaacccgcggcgcaataacggttagctttatacgtctacgaatatttactgcacgtaggagcacagaaatctgc

SEQ ID NO: 588998 - DNA, 100 bp, Homo sapiens
gcggtgacaggagcagcggccgggagcccttagggaggcagtaagactttgaccccgacgcaggcttcagtgattgccgcggatcagaagcctgagcact

SEQ ID NO: 588999 - DNA, 90 bp, Homo sapiens
ataatagtttctgagtttcggaatgagatatatgatgtaagacacaggattggaacgagttactatgctgtttctgggattgcataatgt

SEQ ID NO: 589000 - DNA, 100 bp, Homo sapiens
cgctgccgctatggatgatcgagaggatctggtgtaccaggcgaagctggccgagcaggctgagcgatacgacggacatagatctgattgacatcctttg

SEQ ID NO: 589001 - DNA, 99 bp, Homo sapiens
aatttggcagataatcattgggcaaaaacttgtgagggcgaaggtcgtattgaatggtgttgtaggaagacggaagaaagtgccgggaagaaagaaaac

SEQ ID NO: 589002 - DNA, 83 bp, Homo sapiens
tcctccggcagaacctgtttctctgccacaagaaccaccaaaggcagtatttggcagtcgtattcagagataaacccctggag

SEQ ID NO: 589003 - DNA, 100 bp, Homo sapiens
gtgtgattgagactgacattgaggaaagaagcagctatgaagaccagggggttcagctttccaagacaaagacaatgcagatcttcgtgaagactctgac

SEQ ID NO: 589004 - DNA, 74 bp, Homo sapiens
gcaccccaacaatgtgctgctggctgccggctcctgtgacttcaagtgtcgcctcgagtttggaagaaaacaag

SEQ ID NO: 589005 - DNA, 85 bp, Homo sapiens
tttgcattcttaaacctactgcctgtagaagcagacattttagcatatgccgagattttgctgtcctggaggaccacaccctggc

SEQ ID NO: 589006 - DNA, 100 bp, Homo sapiens
gtagctttccggctctgttggacagtgatgtgaagaggttcagctgtcctaatcctcactgccgaaagactacagtgactatggtgggaagcttctctcc

SEQ ID NO: 589007 - DNA, 100 bp, Homo sapiens
caagaacaggctacagatactgaaattttgaacaaaatccagtctcatagcagaggagaatataatgtttacagcaccttccagagccatgaaccagagt

SEQ ID NO: 589008 - DNA, 100 bp, Homo sapiens
gccatgtccgcaccgggacgatcatcctggggacctggtacatggtcccgtcaggaagcccaagtatgtggaaagccccagagtgcctggagatgcagtt

SEQ ID NO: 589009 - DNA, 75 bp, Homo sapiens
gggcagctaggacatggagatgtcaactccaggtatcctttgtgtggctgatcagtgtcacggcttaagagaact

SEQ ID NO: 589010 - DNA, 82 bp, Homo sapiens
tattacccccagtatctgcaagccaaggacacagcattgttggttttgccatgtactattttacctatgacccgtggattgg

SEQ ID NO: 589011 - DNA, 100 bp, Homo sapiens
cttctcccagcccttagggtcctgctcggccaagtgagtaaccacactggccgcatcaaggtggtctttactccgagcatctgtaaagtgacctgcacca

SEQ ID NO: 589012 - DNA, 99 bp, Homo sapiens
caaattgaagagacgttaaaatacttccgtggtgatctttgtgaagtctgtgcagcggtgcattgccttggcccagctactagtggagcagaacttccc

SEQ ID NO: 589013 - DNA, 102 bp, Homo sapiens
cataccagctgaagagcgacaagccgctggcagccgcggatctcaccgccgctcaggctcaccatggatgatgatatcgccgcgctcgtcgtcgacaacggc

SEQ ID NO: 589014 - DNA, 80 bp, Homo sapiens
gtaaatgtgagtggaagccatgaggccaaaggcagttgtattgctggaacagctttgggtcttggggttgtgaacatcct

SEQ ID NO: 589015 - DNA, 75 bp, Homo sapiens
gggccgtgctgctggggcctcccggggccggtaaagggacccagtcaggatctggtgattttgaagagaaaccac

SEQ ID NO: 589016 - DNA, 100 bp, Homo sapiens
atcgacgcctatgtcgacgagcagttaatcagctgtgttcagcgaatacttatgaacagaaggctccagcagcagtacaatcagcagcaacagcaacaaa

SEQ ID NO: 589017 - DNA, 100 bp, Homo sapiens
ggtgcagaaataccagtccccagtgagggtgtacaaatacccctttgaattaattatggctacacgatgaggcgagtggtacgacagagcaagtttcggc

SEQ ID NO: 589018 - DNA, 100 bp, Homo sapiens
tggatgacaagaatgcaacaaagctgaatgaactcattcaggttggaccatgctcgacagctgaccaaggccatgatgcgaaaggccacggccagccgcc

SEQ ID NO: 589019 - DNA, 100 bp, Homo sapiens
aagcggtgacccttgtggaggatatgcagagagagcttgggagactgagacaacaggttgactatagtcaatggggccaatggagccaagtgtatggaaa

SEQ ID NO: 589020 - DNA, 87 bp, Homo sapiens
tgatggatggctgtgtgcccggtgcaaaagaaatgcgtggacagcatactggagaaaatgaaactgggattgacccatcaagatgct

SEQ ID NO: 589021 - DNA, 51 bp, Homo sapiens
atcaaggccttcagaaacatccctgcacccagtcagcttgaagagtttcaa

SEQ ID NO: 589022 - DNA, 100 bp, Homo sapiens
cagcccccatcttcccatgcttgtcaaaaatcagaggcaactaacactgcggcttcctgagtaagatgacctccttaaaagaagatgtgcggcgcagtgc

SEQ ID NO: 589023 - DNA, 90 bp, Homo sapiens
ggagacttttggggggaaactaggtcgatggtcggcggcgcccggatgggcagctgagctgttccaaagacctaatgcgcttgctgtcca

SEQ ID NO: 589024 - DNA, 90 bp, Homo sapiens
ctctgaagagtgaagtgagcaaatacaacccagcagtaggttattgaagacagcagccccaggcagatatccaagtagagcagaaccggc

SEQ ID NO: 589025 - DNA, 100 bp, Homo sapiens
tggtaggaccagcaccccataccccgaagccagcaactccaggtggttccgctatttggggacatgcaaatagaactggcaagatatatcaagaccagcg

SEQ ID NO: 589026 - DNA, 100 bp, Homo sapiens
caggcaacaggaacaagatgtgaactgtttctcttctgcagaaaaagaggctcttcctcctcctcccgcgacgatcgtgttcccaaggacgtgaaacaag

SEQ ID NO: 589027 - DNA, 51 bp, Homo sapiens
ggtgcagacagctgtgactatgaaggggagacggggtttcatcgtgttagc

SEQ ID NO: 589028 - DNA, 89 bp, Homo sapiens
tctggagaagtggctgttctgaagagagatgggcgatatatatattacttgctggagcagagtgaagccaagtgtgaggaggccttgaa

SEQ ID NO: 589029 - DNA, 74 bp, Homo sapiens
ctggctgggcgtagtggggctgcgcggctgccacggagctagaggcctcctgacaaggtgatccgggcgggccc

SEQ ID NO: 589030 - DNA, 98 bp, Homo sapiens
ccacctcaaggcccacctgcgccggcacacgggtgagaagcccttcgcctgcacctggccaggctgcggctggagaaaaggcaacagatggctccctg

SEQ ID NO: 589031 - DNA, 90 bp, Homo sapiens
aacctgtgcgagtggatgcggaagccggcgcagcagtccctcggcagccaaggctcttctcaaccatctgtgagtccaggggaaccgtct

SEQ ID NO: 589032 - DNA, 76 bp, Homo sapiens
gcactttctcaaaccaaggctgctctaaaggtggttatttaagtatttttaaaaattacatgaatatccaggtgaa

SEQ ID NO: 589033 - DNA, 100 bp, Homo sapiens
gattggagatctgacttccaaaaattgtcatctttttgtaaaccttcaatcaaaaggcttaaaagggggaggagttgttcctttggccacatatatgcga

SEQ ID NO: 589034 - DNA, 75 bp, Homo sapiens
caccaagcctggtgccaatcattgacaatattatgatacttcgttgaaagttgccaccctgatgtaatccagcat

SEQ ID NO: 589035 - DNA, 61 bp, Homo sapiens
gatctcatccggtatatagttcttcattttggcaggtatttagaggtagagtgggaagtta

SEQ ID NO: 589036 - DNA, 100 bp, Homo sapiens
gttctggaaagttctctgtggcggtttccctaggacttctgcatgcccatgccacacatatcctgtggcccccagagcgctggcagaaattggaatctgt

SEQ ID NO: 589037 - DNA, 75 bp, Homo sapiens
gcaggctccgggctgaagattgcttctcttctctcctccaaggtactctttgagcacatcaaattcttccattgc

SEQ ID NO: 589038 - DNA, 100 bp, Homo sapiens
ccctaatggtctttttgttcaagataaagtgattttttgcctttgttgattaactggacaaattcaggcgaagttcttctgtgttgtgcaggcggagctg

SEQ ID NO: 589039 - DNA, 75 bp, Homo sapiens
ctacaactcatgcccagcagcagcaagcagtcacagttgcagattatatttctagagctgagtctcagagcagac

SEQ ID NO: 589040 - DNA, 101 bp, Homo sapiens
acggcgccgagccgcggtccgaatccagacatttaatgtggatgcaccatgccagaccgtggaagatttaacgaatggggttgtgatggcccaggttcttc

SEQ ID NO: 589041 - DNA, 100 bp, Homo sapiens
ggagatctacaggatttatcaaatcgagtcactgtcaaaatgccagaggattcaacatgagcatacctatgcctgggcatccagtgaacttctccagtgt

SEQ ID NO: 589042 - DNA, 80 bp, Homo sapiens
tctaggtgccatggaagaggcaggatgagcagctcagccttcagacctgcctagagctggaacgttacctccagagcgag

SEQ ID NO: 589043 - DNA, 97 bp, Homo sapiens
ccagcaagctgaaacgacatgccaaggcccacgagggaggaagagcaagcaggccctgagggactataagaaggttcagatccagctggagaatctg

SEQ ID NO: 589044 - DNA, 98 bp, Homo sapiens
aaacgaaattacttgcaattatgccaggtgaatggaggcattgagaacacattagagaaggaggtgatgcagtatgactactattcttcatattttga

SEQ ID NO: 589045 - DNA, 75 bp, Homo sapiens
ggaggctctctccatgggagccctagcatccacagtgcagattctgcctgatcaatgcaggagtcctgtacctct

SEQ ID NO: 589046 - DNA, 100 bp, Homo sapiens
cggctgttcagctgcgctccagtcggcccaggcgccgcggcgaggagcgagcgctgcgaggtggcggcctgaggttgcgacatgtgcgcggacaaccgca

SEQ ID NO: 589047 - DNA, 80 bp, Homo sapiens
cggcgagtttccgatttaaagctgagctgcgaggaaaatggcggcgggagtgtgtttcctgtaacaaatcgttcaagaaa

SEQ ID NO: 589048 - DNA, 82 bp, Homo sapiens
gcaggagcccggccccggagccaccgtactatactggcaattgctggagaagattttgcaattgttgcttctgatactcgat

SEQ ID NO: 589049 - DNA, 75 bp, Homo sapiens
cctaagcctgcacagccgcggcggcagcagcagtgagagattgacgagatgcctgaggctgccgtgaaatcaaca

SEQ ID NO: 589050 - DNA, 75 bp, Homo sapiens
gatttacagcagatgatatcaacaaggctttgaagacaagattcccaaaaggagattctctgagatgcaaaatga

SEQ ID NO: 589051 - DNA, 82 bp, Homo sapiens
tctgaagaccatggatcacaaccggaaccgcagggtagacgaagagcggcggagtgcagcgggcagtgagaaagaagaagag

SEQ ID NO: 589052 - DNA, 108 bp, Homo sapiens
ccggcccacagtgggggtgtgcaaacccgagagaactggattatggattggatatgtctacttctggatgcaaattttactgttgttgtaatgatgccagaagcaaag

SEQ ID NO: 589053 - DNA, 87 bp, Homo sapiens
ccgctctgggatcccggccaccagcaattgtccgaacagctttgctgagccatcaaggtctaatggaagcatggttcggcattcttc

SEQ ID NO: 589054 - DNA, 98 bp, Homo sapiens
aggcctgtagccacggctgctggagccagcccgcggagcctgagccggagcagaaggcaaaatcctgacagatgactttgcagacaaggagggtctgg

SEQ ID NO: 589055 - DNA, 100 bp, Homo sapiens
tggaacaacaacttgcagctcatctctattgatgggtcaacatatttcactggcacctattcacaagcttgaagaagctctgtatgaataccagccactg

SEQ ID NO: 589056 - DNA, 50 bp, Homo sapiens
caggcgcccgccaccacacccaggttgggaaggagaaaatgctcaaggtg

SEQ ID NO: 589057 - DNA, 74 bp, Homo sapiens
aaaaacatatccgagggtgtcctgttacttccaagtcatcaccagaaagatgttccatttaagcagacctcttc

SEQ ID NO: 589058 - DNA, 75 bp, Homo sapiens
accttcccagaaagtccaagctcgtggcctctgtgtcctttgtcccaatagtaacaactccctcctggcctttcc

SEQ ID NO: 589059 - DNA, 83 bp, Homo sapiens
aattattgaaaacctcttttaccctgttaccctggaagttcttcatcaggtagcagcaattgcagagacagatgaatctgcag

SEQ ID NO: 589060 - DNA, 74 bp, Homo sapiens
gaacagagaagggagctctatagtcggagtggagaactgcaagaagaagctcattcacacagaagacccattta

SEQ ID NO: 589061 - DNA, 75 bp, Homo sapiens
caaggtctcctcggatcgcctggagaggcactcggacctgaaatgaaagctcattagcatctacactgaagacgc

SEQ ID NO: 589062 - DNA, 100 bp, Homo sapiens
ccacctatggagattagggaagaaaagaaagaagacaaggtggaaaagttgcagtttgaagaggaggactttgttccagcagcactgatgtgaaggaaaa

SEQ ID NO: 589063 - DNA, 82 bp, Homo sapiens
gaggaggagagtctacagactgctttcaaaaaattaagagtggatgcatcagggcaacagctggaaacagagaagaaaagga

SEQ ID NO: 589064 - DNA, 100 bp, Homo sapiens
aaatgaaaaccccctggagacgaggaacattgccttcttttcaaccaattgtgttgaagatgatgttgaatttgaagtatcatcggaccgacggactggg

SEQ ID NO: 589065 - DNA, 100 bp, Homo sapiens
gtcatggatgggcacactgtgggggtgtcctggtgcacccccagtgggtgctcacagctgcccattgcctaaagaagccaaacgtaccaagaaagtcggg

SEQ ID NO: 589066 - DNA, 83 bp, Homo sapiens
gcccgggtgacccacgcggaggccgtcaagagctccaaacgagaatggaagccgctggaggaccgtagctgcacagacatacc

SEQ ID NO: 589067 - DNA, 50 bp, Homo sapiens
cgggacacagacccccagcccgcccatcctggcttcttatcatggattca

SEQ ID NO: 589068 - DNA, 75 bp, Homo sapiens
gccgctttgaggtgtggaatgcgatgactcgggacctgtccatgatcctgtgtgaccccttcgccatcaacacgc

SEQ ID NO: 589069 - DNA, 80 bp, Homo sapiens
cagtctgtgtctcaaatcaaccacaagctggaggatatttggccttgacattaaaggcagagactgtggcaatgaggcag

SEQ ID NO: 589070 - DNA, 75 bp, Homo sapiens
gcttaccgcatctggctggagccctgcattcgcggcgtgtgcagatatgttgatgatgtgatcagccgcattgac

SEQ ID NO: 589071 - DNA, 74 bp, Homo sapiens
aacagcgtttcagttttggtcatcggaagtggtgccttcagcacagattctctttgtggccagatgggtttgta

SEQ ID NO: 589072 - DNA, 50 bp, Homo sapiens
gcaagatcggcagccctaaactttacgagatcctcggttttactcctgtc

SEQ ID NO: 589073 - DNA, 95 bp, Homo sapiens
ttgtctccggtcgttcccgttcaggagcaggaagatgcaatcacacccaatgataagacccttttccctgatgttgattggttaatcggtaacca

SEQ ID NO: 589074 - DNA, 51 bp, Homo sapiens
aatcatattatagatggagtaaagttaattggccttggtcctcacagctcc

SEQ ID NO: 589075 - DNA, 82 bp, Homo sapiens
tgtcagtcaatgcccgtgcccgcattgtggctgaagagttccttaagaattggtggtgaccgcggtggcttcaaaaattttg

SEQ ID NO: 589076 - DNA, 100 bp, Homo sapiens
ccagttgcttgatcaggtggaacagattcagaaggagcaggattaccaaaggggtgttgaaagcagcaggggcctagaagacattaaaccgataccacag

SEQ ID NO: 589077 - DNA, 100 bp, Homo sapiens
gctcggcgaggaggtcgtccgggtgctgcaggcggttgtggactctctccaagggagcatcgagtacagctgtccggcctccaacgagtgtgagatcacc

SEQ ID NO: 589078 - DNA, 98 bp, Homo sapiens
cctcttccaaagaagttgaaaagtgtcacacctgtaggaactgaggttcaaaccttgtactactcagctgatcacaagctgcttgatgggaacctact

SEQ ID NO: 589079 - DNA, 130 bp, Homo sapiens
ctgtgatgtgaagtttcctataaggttagaaggccttgtgctcacccaccaacaatttagtagagatctcggctcaccaaattccacaacctgaaggcagtcgtctgcaaggcctgcatgaaggagaaca

SEQ ID NO: 589080 - DNA, 74 bp, Homo sapiens
aaaatcgcttggttaaaacctgacacttttaacaggtgatagaattacctcttacaaacccagagttatttcag

SEQ ID NO: 589081 - DNA, 75 bp, Homo sapiens
ggcctgacagctctgcggctcgggccctgaggtgagaagccctaccactgcaactgggacggctgcggctggaag

SEQ ID NO: 589082 - DNA, 100 bp, Homo sapiens
acagtcgagctgaagacaattttaacttggaaaaggttaaacaaacacagttctttacatcaatgcttccgtccctggccatctggtctcctgtcccctc

SEQ ID NO: 589083 - DNA, 100 bp, Homo sapiens
cagctcatcgagatggggaacaggctccgtgcagagctgggccgacccgaaataaatacctgggcacaggacttcaaagcaaacacagattccccctccc

SEQ ID NO: 589084 - DNA, 100 bp, Homo sapiens
cgggaactggccgggaggaccgcgcgggagagcacggatgggcaccctgggctcgatatgttccaggtcatccagccagagcgtgcgctgtacatccagg

SEQ ID NO: 589085 - DNA, 82 bp, Homo sapiens
agagattcatatgagagttatgggaaacagtactgagtctggtgaggaggcaaacgctcagaatctactgcaggtgttagtt

SEQ ID NO: 589086 - DNA, 83 bp, Homo sapiens
attccttgcagagacagctcaacacggcacttccacaggattggacaactgaatttaaaggcaagttaaagttcaatattttg

SEQ ID NO: 589087 - DNA, 80 bp, Homo sapiens
gcggttcgccccgggcggcgtcggcgactcgggccccggagagatgcgagccacccctctggctgctcctgcgggttccc

SEQ ID NO: 589088 - DNA, 75 bp, Homo sapiens
gaggctgatatgcaatgtcacttacaacattaatcagatactgcatttaaggattgacatgtacgtggaggggac

SEQ ID NO: 589089 - DNA, 100 bp, Homo sapiens
cagaaaatagcacacttttactctacgcaactgttgctttttcatggtgagggtggtgagatcatctccaccaagttcgcagttcaaagccacacttctg

SEQ ID NO: 589090 - DNA, 100 bp, Homo sapiens
acctatgatctgcagggagacgcacagccaggacatcctggaacctgggaaaggtgccaaagagatggatgagactgttgctgagttcatcaagaggacc

SEQ ID NO: 589091 - DNA, 50 bp, Homo sapiens
ctcggacgtagcccggcttgtattggatgatttgtcattaattcggaaga

SEQ ID NO: 589092 - DNA, 100 bp, Homo sapiens
cccgaagttcagcttgcagtgtaattcagaagagttaagaccagaagtactggaatcatacttcctttcagagatgccctgcccagtgaggaggaatcta

SEQ ID NO: 589093 - DNA, 50 bp, Homo sapiens
caacgatatatgtcagatctaaaggtgaccaagaatatggcccaggtgac

SEQ ID NO: 589094 - DNA, 75 bp, Homo sapiens
ctcatctcagcctccaaaagtgctggcattacagaacccagtgacttgattgtaaaaatttacagagcggaatca

SEQ ID NO: 589095 - DNA, 100 bp, Homo sapiens
gaaggtggcaagatggtgttggaaagcactatggtgtggtgatgcagatcgtgctggggatcttgagtgcagtcctaggaggatttttctacatccgcga

SEQ ID NO: 589096 - DNA, 98 bp, Homo sapiens
caatcacagaagccgacaaggcgttcaagcgaaaacatgaccgctgagcccatgagaggatgtactgagtaaagatgctggggaatgtgcaatatgcc

SEQ ID NO: 589097 - DNA, 80 bp, Homo sapiens
ccggcttcggagcgggagtgttcgttgtgccagcgactaaaaagagagagacaagagagacacctccaacttcgacaaag

SEQ ID NO: 589098 - DNA, 100 bp, Homo sapiens
ctggaatgatgatgtctcatatgtctcaggcttccatgcagcctgccttaccgactgtctcagctgctgccaagaatggtacgtcatcgaacaaaaacaa

SEQ ID NO: 589099 - DNA, 98 bp, Homo sapiens
gatgatcctgaagtacagaaagacattccagttacaacacagggatcacaacaaacacaaccgccacagaagcactatggcattacttctcctatcag

SEQ ID NO: 589100 - DNA, 75 bp, Homo sapiens
gatgctattgtggttgaacaatggacagtcctggaacaccctggaggagaagaggttctgctggaacaagctggt

SEQ ID NO: 589101 - DNA, 75 bp, Homo sapiens
tggggttggacgctgccagtttgcacagcagcagaacttccttcacaagtgggacccccgcagccacctgcagcc

SEQ ID NO: 589102 - DNA, 75 bp, Homo sapiens
gcttgcctgttccttttccacgcattttccaggataactgtgactccagacccaacatgagtgaagtttcctgca

SEQ ID NO: 589103 - DNA, 83 bp, Homo sapiens
ggtagtcatgatctatgacgccgagaagcagaggccccgagagtcctgtgtatggaaactcacatgagtcagctcagtctaga

SEQ ID NO: 589104 - DNA, 100 bp, Homo sapiens
gatggctgggagttcagccaggacgtctacctgtccaccgtcgtgaccgaggagcaggacatcgagactttacatggctctgttcacgtcacgctgtgtg

SEQ ID NO: 589105 - DNA, 100 bp, Homo sapiens
aagttgccggagccgcggggcgcgggcggcggacagattgaccttcagagcgaggtgaccaaaagccagccccactgtgagttgaactctttcgtgttga

SEQ ID NO: 589106 - DNA, 90 bp, Homo sapiens
aaggattccaagtaactcttatttggtattggcaagcttgccagtgtacctgctggtggggctgtagccgtctctgctgccccaggctct

SEQ ID NO: 589107 - DNA, 83 bp, Homo sapiens
ctctggaaaaacttcttgccaaccaaaggaaactgaacagccaagactcctataacaattttaccaacaacaaccctggcaac

SEQ ID NO: 589108 - DNA, 100 bp, Homo sapiens
ctgcagagtgctgaagacggggtagccacgaggctttaatgactgatgaaacaatatccaatgtgccaatccttatcttgggtaacaaaattgacagaac

SEQ ID NO: 589109 - DNA, 83 bp, Homo sapiens
ccggcagctccaaccatgggaggccgcgtctttctcgcattttgaaagcgaagcagaagccgtagaatcagcggcgagcctgt

SEQ ID NO: 589110 - DNA, 100 bp, Homo sapiens
accatcgcagttggaagcccatggggcagctgtccagcagaaggagatcacacagagcccatccacgtccaccatcaccctggtgaccagcacacagtca

SEQ ID NO: 589111 - DNA, 75 bp, Homo sapiens
aacctgcagtcattcttccgggcctccaaggaacttaagcaaagaatagtatgttctcctgttcctatgttaagg

SEQ ID NO: 589112 - DNA, 95 bp, Homo sapiens
gcattgacatttaattttagggtcctttatatagaagggagagtagagcccacccacctttgggttcctgttggacatcgatggagtgcttgtgc

SEQ ID NO: 589113 - DNA, 85 bp, Homo sapiens
gctatacttgaattttctaaggtgtcattaggtcttcaacggggcctcttccacctcctggtgcagaaatccaaaaagtcttcca

SEQ ID NO: 589114 - DNA, 131 bp, Homo sapiens
cctgctctgggacacacctccattggatttaaaagacagtcctcgtcagcactgactttcagctatggaatcgggggatatgagactttctactcggaatatcctgagtgttgcgtggatgtaaaacccat

SEQ ID NO: 589115 - DNA, 98 bp, Homo sapiens
ttgtcgatgggctcgctccagaggacatgagcaaggagcaggtgtcagttgtacccgaggcgttctcagcagcagcaagtacctgtggtggatttcca

SEQ ID NO: 589116 - DNA, 75 bp, Homo sapiens
ggtcaggcagtatgattgaagtttctaagccagcaagccagggctgagcaggaagaagaattcattagtaacact

SEQ ID NO: 589117 - DNA, 100 bp, Homo sapiens
ggcggcgtctccagcgagcggcgcggagctggacgccgcgatcgtggggcccgcgaggcgggcagccggggcgtccaggccctgggtgccaggccctgtg

SEQ ID NO: 589118 - DNA, 96 bp, Homo sapiens
gctattccttgggctgcctttcctgcagacaaatggacacctaccagggaacggagatgtgtatcaagaaaggctggcacgtttagaaaatgataa

SEQ ID NO: 589119 - DNA, 100 bp, Homo sapiens
gagttctctgtgtctgtgaagtgctgggtaggccaggtttcagcatcgcagacaagaagcgcaggacaggctgcattggggccaaacacagaatcagcaa

SEQ ID NO: 589120 - DNA, 75 bp, Homo sapiens
gaaaactgtatgtaccctaaatatgggagataagaagtatgaagacatggaagttcctctgtgacgagggtgcag

SEQ ID NO: 589121 - DNA, 82 bp, Homo sapiens
cgggagcggttcgagttgggagacggccggaagccagacattcactactttcactgcctaagaatcctggaccttctcaaag

SEQ ID NO: 589122 - DNA, 75 bp, Homo sapiens
cctaccttatgagctcggttttcttatgcttataagagtggaacagaccaaagagaaccctgtacagtaagaaat

SEQ ID NO: 589123 - DNA, 80 bp, Homo sapiens
ggcggggcggcgccaagcgcagggagcccggctgagtggcagcccagggagatacttcaggggattaccggaagattctg

SEQ ID NO: 589124 - DNA, 80 bp, Homo sapiens
cacctaccaagaagccagtcaagcggccaggagcgagcccagggcgtggtgctgaaagtgctcacaaacttcaagagcag

SEQ ID NO: 589125 - DNA, 100 bp, Homo sapiens
ttgtcttggctgttgagtgaagaaaaagagcaggaagtcattacatggggactcagaagaagatccttgacattgccaacatgctgggcttgtccaacac

SEQ ID NO: 589126 - DNA, 90 bp, Homo sapiens
ccccatttctatggtcctcctcacctatggccgctggcaggtcatgttccttggggaactggaagaaatattggatgtgattgaaccttc

SEQ ID NO: 589127 - DNA, 100 bp, Homo sapiens
ccggcgagcccggtccccgccggcaccatgaatgtttggaatggttttggaaaaaattattattcctgaaattcagaaggtatctggaaatgtagagaaa

SEQ ID NO: 589128 - DNA, 83 bp, Homo sapiens
ctggccctggtggggattgacagccacgggaagggaggaggtacaggagaactgtgtgcggtggcgaaagaggttcaccttcg

SEQ ID NO: 589129 - DNA, 98 bp, Homo sapiens
ataaatccacgaaaggaaaaacagatctcagtgtacaaatctggggcaaagctgccattggattatattccatcacaacaagatattctgcttgccag

SEQ ID NO: 589130 - DNA, 99 bp, Homo sapiens
ccaacacattttctggtgatacccaagaaacatatatcccagatttctgtggcagaagatgatgatgaaagtgttttacagctctttaaaacactgcac

SEQ ID NO: 589131 - DNA, 98 bp, Homo sapiens
agacactcatcactttcgtgaacaagcacctgaataaactgaacctggaggtcacagaactggaaacccagccataaccagcagaccacagcattcag

SEQ ID NO: 589132 - DNA, 82 bp, Homo sapiens
cgccgaagaagcatcgttaaagtctctcttcaccctgccgtcatgtctaagtcagagagtcacttggaactcttctgtggca

SEQ ID NO: 589133 - DNA, 95 bp, Homo sapiens
ccttctctgtcagctctttccccgtcagcatcccagccgtgctcacggttaatttggagtggcccctggagtcagtttcctacaccatccgaggc

SEQ ID NO: 589134 - DNA, 100 bp, Homo sapiens
cagaggggtccatacggcgttgttctggacaccaatgggaatcccaatggggaagtcgatgctggtgcttctcaccttcttggccttcgcctcgtgctgc

SEQ ID NO: 589135 - DNA, 74 bp, Homo sapiens
gctcctgagcctcccaaaccttacagtgaccaggagttaaactttgggatgtgcccgtgatgttggaccacaag

SEQ ID NO: 589136 - DNA, 98 bp, Homo sapiens
ctgtcgtgtacccttaacaggtatctgctcctcatggcgcaggagcatctggagttccgcctgccggtgcaaagttccccatcaagtggacggccccc

SEQ ID NO: 589137 - DNA, 82 bp, Homo sapiens
cccagaccctggagcctcagttggaagcagccgatccagcctgcggagcctgtggggcagtttttgaagagccggaagatcc

SEQ ID NO: 589138 - DNA, 100 bp, Homo sapiens
tcaaacctgacctgatccagctgcgaaagatccgagatcaacaccttgtgccttcccttcttcttggtggtgttcttgagtaagataatctggactggcc

SEQ ID NO: 589139 - DNA, 75 bp, Homo sapiens
ggagagaaaacctctgcgaggaaagggaaggagcaagccgtggttatttgttatcaaagcgtgaaggccaagcag

SEQ ID NO: 589140 - DNA, 51 bp, Homo sapiens
tctggccagagacctgctggaagcctggcatgggagggcaggattgtggtg

SEQ ID NO: 589141 - DNA, 83 bp, Homo sapiens
gtttggctgcgcgggttcccccgaagttcaggagtggagtcaacatatcaatggagcaagtcacagtcgtcgatgccagcttc

SEQ ID NO: 589142 - DNA, 50 bp, Homo sapiens
attcgttacagccagagattggctttcttgatcatggatggtgaagatat

SEQ ID NO: 589143 - DNA, 82 bp, Homo sapiens
tttaaaggagcagccctggtgtcacctatcagtaaaaggtgacttaagagattaaaattaatttggttgctgttggttctga

SEQ ID NO: 589144 - DNA, 100 bp, Homo sapiens
gggcagccgtccgaaggcgagagcaggatttcagatgcatgccaggtttccactgattgccagaactcgagatcactacacatggatccccaaaatcaac

SEQ ID NO: 589145 - DNA, 100 bp, Homo sapiens
tctgccttcatcccttcgccgtgtgaattcctttcagattgcaatgaacttcctccaagaagaaatacagaaattctgacaggttcctggtctgaccaaa

SEQ ID NO: 589146 - DNA, 101 bp, Homo sapiens
cggccaacttcggcaagatccagatcgggatttacgtggagatcaagcgcagcgatgaaaaattgtatggcgacttcttgagctggaagctagaggaaacc

SEQ ID NO: 589147 - DNA, 82 bp, Homo sapiens
gtcgggcctgtggaagaagcgccgcgcacggacttcggcagagggcgtgatggtgggcatgggtcagaaggattcctatgtg

SEQ ID NO: 589148 - DNA, 74 bp, Homo sapiens
ccaaaaatgtgcatactcacagagttagagagagggatggtgataaaaatgaatgccatttcccatccagtact

SEQ ID NO: 589149 - DNA, 90 bp, Homo sapiens
tgcacgcggcggccgtgctcctgctggtgatcttaaaggaacagccttccagcccggccccagtgaacgtgtgccggtccaacaaaagcc

SEQ ID NO: 589150 - DNA, 100 bp, Homo sapiens
ggtcccgcgggccaggccgtggaggtgcaacagctgcagcccggaaagaggtgataaggaacaagatccgagcaataggcaaaatggccagagtgttctc

SEQ ID NO: 589151 - DNA, 100 bp, Homo sapiens
agtagaacaccaagaaggaggttgctacactaaaacagagttagcagagtgctgctggttccttcgatgtacattgaagatgtcagtttctacatgtggg

SEQ ID NO: 589152 - DNA, 100 bp, Homo sapiens
tcaagcaaagaagagttgagcacaatcaggaatctttgtctgaagtggaagaaaaatacaagaaagccatggtttccaatgcacagttagacaatgagaa

SEQ ID NO: 589153 - DNA, 97 bp, Homo sapiens
agaagaagagctgctgatgaggactgggacagggtctgcggaagagggagctgctgaaggagctgctaccagtcatcgggcagaacctccgattcca

SEQ ID NO: 589154 - DNA, 100 bp, Homo sapiens
ggtgcccgaggaggcagccaagctcgtagcctgccactccgtgcacagccctcagcgcctttttccaggagaccaacatcccctacagccaccatcacca

SEQ ID NO: 589155 - DNA, 100 bp, Homo sapiens
agtcaacaacggatgaaaatgaagacgacattcagtttgtcagtattttggatttagtaaaggggacacattaccaggtagcctgtcaaaaatactttga

SEQ ID NO: 589156 - DNA, 51 bp, Homo sapiens
tgtcacaaaagcggatgttgaaaagtcctggaatcaagatgtgagaccaag

SEQ ID NO: 589157 - DNA, 82 bp, Homo sapiens
tcttgagaaaaaattcctggaaaacccagtgcaggaacaaagtctccttgcaaaacctgtcaatggtgcttcgtcagctgcg

SEQ ID NO: 589158 - DNA, 101 bp, Homo sapiens
cctggaaagtttgcagaagtggaaggagcagaacgtgagggtgtaacttacaaaaagagttcaaagaggccttttcattgtttgaccggaccccgactgga

SEQ ID NO: 589159 - DNA, 100 bp, Homo sapiens
ccgagatgtgatgttggagaactacaggaacatggtcttgctggcctggcatcctcgctacaacctcattgttgtgggccgatacccagatcctaatttc

SEQ ID NO: 589160 - DNA, 97 bp, Homo sapiens
cgagagcgcgaatatcgtcatcgttagaagtctctgagatatgataccagctgttttgtggagtattttgccttggatctcctgatagagaacaggg

SEQ ID NO: 589161 - DNA, 90 bp, Homo sapiens
tgcaattaggaactgttctgccggaatttgaaaagtgcctgccaagtgataatagtaaggataattcaacatgtaacattgaagtcgtga

SEQ ID NO: 589162 - DNA, 87 bp, Homo sapiens
aaggcttttcttgacaatggaccaaagacgatcaatcaaattcgtcaagatgcagtaaaagtaaagcttgcatttccttcaacaaga

SEQ ID NO: 589163 - DNA, 75 bp, Homo sapiens
ctggcgggcgtgggaacccaggccccgccgaggcggccagctggtaggtgagtgctgtcctcggctcactttcct

SEQ ID NO: 589164 - DNA, 100 bp, Homo sapiens
cgtctgcattgctccggactcagccaagttccccaacggctccccgtcgtcctggtgctgcagcgagatttaccgcattgtttctcagaagcaaatgtca

SEQ ID NO: 589165 - DNA, 100 bp, Homo sapiens
ctgaagaccatgttgcaggcccacagctgcctacagaaccgtcccaaaatatggcaaagaaacctattctgagaatacagtagcaacgtgcctgtgtggt

SEQ ID NO: 589166 - DNA, 75 bp, Homo sapiens
gatcctgagagaaagagactcttcaagagagtggaaggagaacatgaatctctcagaggcccaagtacaggcgtt

SEQ ID NO: 589167 - DNA, 80 bp, Homo sapiens
agtttggagccctgcagactgtccgcctggagcgttacaaggccttctacattaccggtccgggcccaccagctggtctt

SEQ ID NO: 589168 - DNA, 76 bp, Homo sapiens
cggagcccggctcccgcaccatggaggaggacgacagctacggttgacatcatggacatatgtgagtccatcctgg

SEQ ID NO: 589169 - DNA, 100 bp, Homo sapiens
ggggaccgagaatcaaggcgttgagcctcaaggtaactatggtggtggtgggaactataatgattttggaaattatagtggacaacagcaatcaaattat

SEQ ID NO: 589170 - DNA, 74 bp, Homo sapiens
ctgagccggccgcgggcgcgaccggaggcagtaatcaagatgattaccaactggttcgaaaacttggtcgggga

SEQ ID NO: 589171 - DNA, 50 bp, Homo sapiens
cagaagtcagaatccaagatgctacggataaatggtgaaaaattagaaga

SEQ ID NO: 589172 - DNA, 75 bp, Homo sapiens
aagatggcgactgtcgaaccgggccatgaagcccccaggaggagaatcgagcaatctttttggaagtccagaaga

SEQ ID NO: 589173 - DNA, 83 bp, Homo sapiens
agcgactgcaggcagaagctgagacggctaagacccctgacctggagcagctggagccgtctttggaagatgtggaaagcatg

SEQ ID NO: 589174 - DNA, 98 bp, Homo sapiens
ggaagtcacaaataatttggagtttgcaaaagaattacagaggagtttcatggcactaagtcaagataaagtgactgagaccgaagatgatagtgata

SEQ ID NO: 589175 - DNA, 80 bp, Homo sapiens
tcacctgcgctgtgatgcctgcagagctgtggcttaccagccgcttacaaacacgcagatggcaagaagattgatggcag

SEQ ID NO: 589176 - DNA, 82 bp, Homo sapiens
gtgtgtctcgggcgttcagccgctcgctctccgccttccagaaggtgagcgagtgctgtgctttcatgggcctcttctttat

SEQ ID NO: 589177 - DNA, 100 bp, Homo sapiens
aggcagcgcgggatcccagcctcaggcgtgcgcggacggtgtgcgggttgactatagtcaatggggccaatggagccaagtgtatggaaacccacaacag

SEQ ID NO: 589178 - DNA, 50 bp, Homo sapiens
ccgggagttacaccgccaccgccagtttttggctttcacccccaaccagt

SEQ ID NO: 589179 - DNA, 100 bp, Homo sapiens
ggagttcgcaatcctcagcaacatcttaatgcacagccacaagttacaatgcaacagctggcagagatggaggaggagctacgttatgcacccctgtctt

SEQ ID NO: 589180 - DNA, 97 bp, Homo sapiens
tccttccttcctccccacccattcctttaaatccggagggggaaaaaatcccaaggtctgcaaaggtgtggtatctgtgcgctttgaagaagatgaa

SEQ ID NO: 589181 - DNA, 91 bp, Homo sapiens
ctccagcagccaagatggtgaagcagatcgagagcaaggggtgagcccctccagactccgaataggagatcaagagtttgattcattgcct

SEQ ID NO: 589182 - DNA, 76 bp, Homo sapiens
caccggcccgtggccatcggcagctgcggccacacgaatcccttggcaccatgtcctgtgtgcattataaattttc

SEQ ID NO: 589183 - DNA, 90 bp, Homo sapiens
ggatttgttaaggattccaagtaactcttatttggacctctttgtttttagacatgaattggccataatgagactagcagcctttatggg

SEQ ID NO: 589184 - DNA, 83 bp, Homo sapiens
gaaactctttgggaaagccactcgaaaagataacgaaggaggcccaacttcattcaataaggagcctgacggatttatcccag

SEQ ID NO: 589185 - DNA, 75 bp, Homo sapiens
gcgcagacagagctattccagcaccagcagaggtctggcccctctttgtgaaaatatgcccagcggcaaggccaa

SEQ ID NO: 589186 - DNA, 82 bp, Homo sapiens
cagctctcctgcgccgccgcctcccgccgcgccccgccatgccgctctactccgtgagacggtttaagcggaagcatcttac

SEQ ID NO: 589187 - DNA, 100 bp, Homo sapiens
tttcagatcagcaaggaatatgagcgcttctctaaatacatgcccaatgtcaaggttaatttggagtggcccctggagtcagtttcctacaccatccgag

SEQ ID NO: 589188 - DNA, 75 bp, Homo sapiens
tcctgtacagcctgcagaacttttggaaattttagcattcaggtgccaggaatgcagatgggacagccagtgcca

SEQ ID NO: 589189 - DNA, 142 bp, Homo sapiens
tcgaacccgttcccgagccgtggagatttttaccacttgtgcccatatgatctgtaacatggaggagctggaaaagagttgtggaaagtaaaaatgtagccctaccaaaaggaactattgtactggcttctccaggctggac

SEQ ID NO: 589190 - DNA, 101 bp, Homo sapiens
acggcggtccccgggtggccctggcgcccggggagacggtgatcggccgcgggccgctgctgggacgttacagtgtttctgccacctctgtacaaaagaca

SEQ ID NO: 589191 - DNA, 97 bp, Homo sapiens
tgcggcctgaactctagggagccgggttgatttttaaagcttcaaaatcctaagactcagcactgttgcgggtagagacgggggttcaccatgttag

SEQ ID NO: 589192 - DNA, 76 bp, Homo sapiens
ctctaccatgtgctagagacagccaacaaaatattcatggttcttgaggagcttcaggatggttcgtactaagaca

SEQ ID NO: 589193 - DNA, 100 bp, Homo sapiens
gcctcccagcaccacagtccttctgcagtccctcgtccagccacccccaggccaatccggagccggcaacaactgggcaaaggggcactacacggagggc

SEQ ID NO: 589194 - DNA, 98 bp, Homo sapiens
gttggaaagcactatggtgtgcctagatctgttgatcttagtaacaatgaagcatcctctagcaatggcttcttgggaacaagcaggatctcaaccaa

SEQ ID NO: 589195 - DNA, 78 bp, Homo sapiens
ctgagcgttctaaaggaaggcgtccgttggccttcgtacccgtcttgattgagacagccgctcaggaagcaatcttgc

SEQ ID NO: 589196 - DNA, 100 bp, Homo sapiens
gcatcatgggatggtattttagacttgccagaacagaacactattcacaaagattgcctgcagtttattgatgtggtggtacagtgggagctattctgac

SEQ ID NO: 589197 - DNA, 82 bp, Homo sapiens
tggcctgggcgctccggtggcggcggaggtctgtgacaagcagggaacaaggcaacggacggcgcaacccagccccggctga

SEQ ID NO: 589198 - DNA, 87 bp, Homo sapiens
gactctagtaacccgcgaaatgatgggatagcgttgcaaatccttaaaagagtcttaacggtgaaagaaaagatgttgtcccggtta

SEQ ID NO: 589199 - DNA, 100 bp, Homo sapiens
gcacgggtatatgggatggaagcgggaccctcgggagcagctatacctgcaggcccgcttcacttggcgaggagcccgcctgctccggcccctcctgcag

SEQ ID NO: 589200 - DNA, 80 bp, Homo sapiens
ggcggagcggagacgggagtattatgaaaagatcgcaccgttcctgccttgggcgctcatgggcttctcgctgctgctgg

SEQ ID NO: 589201 - DNA, 75 bp, Homo sapiens
tgatcgccgggtgtcgatccttttccctccagtcaggactgaatgtgggcccagttggcgtcattctgctttgac

SEQ ID NO: 589202 - DNA, 75 bp, Homo sapiens
gcagaggtgccgacatggggcttaagatgtcctgcctgaaaggcagaggtggaggaaaccttaaagaggatccag

SEQ ID NO: 589203 - DNA, 75 bp, Homo sapiens
agcatttcatgaaacaacacattcttccagctgaaaagatgtcatttgtcagagtgaaccgctgtggtccccgag

SEQ ID NO: 589204 - DNA, 100 bp, Homo sapiens
aagacagcctggctagatggcaagcatgtggtgtttggcaaagttctagagggcatgagacagagctgctgttcctacggcggttgcaggatgtgcgggc

SEQ ID NO: 589205 - DNA, 120 bp, Homo sapiens
tgacagatttgtggtttgtgtcagtcagcttgcattcagtcgtgatcttttagcaagtcagaatgaagatttggtgaccaagaatatggcccaggtgaccaaagccctggacaaggccct

SEQ ID NO: 589206 - DNA, 80 bp, Homo sapiens
ctggtcgctgccggaaatggccagggatgtttcagcagcccctgagaaggaagaggaggaagctgagggcccgctgaggg

SEQ ID NO: 589207 - DNA, 117 bp, Homo sapiens
gcgaaccgaggggcctgtgcggccgcccggcccggccgcggatcagtgaaggagaacgacctgctcagaatgagaagaggaaggagaaaaacataaaaagaggaggcaatcgctttg

SEQ ID NO: 589208 - DNA, 75 bp, Homo sapiens
ggaaggggcagtgctcacatttctgggcaggttgtgcatctttgtcaggaacctcccagaagtgatgccggctct

SEQ ID NO: 589209 - DNA, 100 bp, Homo sapiens
attacaactgaagatataaaagctgcttttgcaccatttggaagaatatcggatgatgcagtgtgtgattgcagtcgcggacaaagtattcgatgccttc

SEQ ID NO: 589210 - DNA, 100 bp, Homo sapiens
agggagcggagtaccagcacttcatccagcagtgcacagacctgcgaccgcatcaagcagtccgccagcggaaccaagcggcgcgtgttcatcatcgaga

SEQ ID NO: 589211 - DNA, 75 bp, Homo sapiens
gcatgctacagttatgaatacactattcaggaaagaccccaatgctttccgcttggccctcatccagcttcagat

SEQ ID NO: 589212 - DNA, 82 bp, Homo sapiens
cggaaaagtcgcagtgcttctcagctcagccaaacggaggactacactgaaacattcaaatgtgtggcgaaaacataatttt

SEQ ID NO: 589213 - DNA, 97 bp, Homo sapiens
gggcaagggcgagatcctggagagcctgcaggacggcgcggcagagtccccgtacgcctacagtaacgcaagagtgagccatggagctacgtgtggg

SEQ ID NO: 589214 - DNA, 100 bp, Homo sapiens
gtggcttaaactcttggcatttggctttgcctttctggacacagaagtatttgtgacaggctgcagatcaaattacgaagctgtataatctcttcctgaa

SEQ ID NO: 589215 - DNA, 83 bp, Homo sapiens
cagcagccccctgctccggcccagcatggcgaccccgacccagacccccacaaaggagtctcgctctgtcgtccaggccggag

SEQ ID NO: 589216 - DNA, 83 bp, Homo sapiens
ggtggtgcagatcgtggagatcatgcagcaagagagattaacaagcggatcacagaggagcaagcccgcaaagccttcgacag

SEQ ID NO: 589217 - DNA, 85 bp, Homo sapiens
taaaggagagaagtttgtcatgcaggaggagttctcgtatcactaccattaaagttaacattcgtaatgccaattccctgggagg

SEQ ID NO: 589218 - DNA, 75 bp, Homo sapiens
gtcagacgcagccgtagacaccagctccgaaatcaccaccaaggcgacgcgctgtcggtggccggctgcggctcg

SEQ ID NO: 589219 - DNA, 78 bp, Homo sapiens
aatggcagtgctcaaactcaccgaccaggtgctcttacagcctgttccaagtgtggcttaatccgtctccaccaccag

SEQ ID NO: 589220 - DNA, 73 bp, Homo sapiens
atgaattccatcaaagtggctcatccccaaagcgcttaatagagaatctatggatttcctgaaatatgttgtt

SEQ ID NO: 589221 - DNA, 100 bp, Homo sapiens
ctggatttcaccctgaagggcaacctcagctttggctgggtccgccaggagaagaaactgaggcctggaatttgattaactcattcaaggttacccagtt

SEQ ID NO: 589222 - DNA, 100 bp, Homo sapiens
ctcaacttcagaatctcactaaaagaatagatagtcttcctttaactgaaaatgaagctgaatatggtgggcatgatcagatagatttgtatgacgatgt

SEQ ID NO: 589223 - DNA, 75 bp, Homo sapiens
aattggcggggttccatttttccaggactccatccccgtgtctacctccctccttggagacacttccgacacgac

SEQ ID NO: 589224 - DNA, 82 bp, Homo sapiens
gtgatattgtagaaattgctgtgatgtccttgcattgcccatttttaagcaagaagagtcgagtttgcctcctgataatgag

SEQ ID NO: 589225 - DNA, 100 bp, Homo sapiens
cagtggaacgcaagggaaaacaaatttgtaaatattttcttgaaaggaaatgtattaagatgaccctaattttcagtgcaaattcaaaggtctctggagt

SEQ ID NO: 589226 - DNA, 98 bp, Homo sapiens
agaggtccgtgcggcagcagctccagagctttgtcaaagacgtctgcttctgcgctttgcctgggagaggccctggtggcctcgttcctggcgcccgg

SEQ ID NO: 589227 - DNA, 100 bp, Homo sapiens
gaaagcatttaaccagcatggctacttcatattttggaaagcagtttttaagacaatcacttcagctttctccggggcaatacaacgtgcttcctgcacc

SEQ ID NO: 589228 - DNA, 80 bp, Homo sapiens
tagttataaaagcaaacacaggattcaccacagtacttcacatcgtcgttcacatggggatactgaggaagatgaggagg

SEQ ID NO: 589229 - DNA, 90 bp, Homo sapiens
gtgccttacaactacaaccagctggaaggcagattcaagcagctgcaaggcctgtctcctccctcctacacatttccagctcctgctgca

SEQ ID NO: 589230 - DNA, 90 bp, Homo sapiens
ccaggaacactgaagggcaggtcgtccccgaccttctatgaggattgcccagctcaaggcggtgcgtctttctacgtgaataggattttg

SEQ ID NO: 589231 - DNA, 100 bp, Homo sapiens
gttagtttctgcgacttgtgttgggactggagcgcctggaccatgctgctgagcgcctactggcacggcctccacccgggctactacctgagcttcctga

SEQ ID NO: 589232 - DNA, 95 bp, Homo sapiens
cgaaggggcgtttgtggacggagagatcacgggagaaggccgccggcactgggcctggtcagaagctgcacacatacatgtaagagaagcaaaaa

SEQ ID NO: 589233 - DNA, 101 bp, Homo sapiens
gtgaagcgcgagcgcgacgagtataagcggaggctgaccccgcactacatctacccaccagccatcgtgcagcccagcgtggtgatcccagccgcccctgt

SEQ ID NO: 589234 - DNA, 98 bp, Homo sapiens
tcctcctctgccgagtggatcgcctgcctggataaaagaactcaagacatggctgcccagtgtgtcacaaaggtggcgctgaatgtttcctgtgccaa

SEQ ID NO: 589235 - DNA, 82 bp, Homo sapiens
gtctgacgtgtgatctcgagagacctgcgtacattcggggtgccagaaggaaagcataggctgccctggagtcccagcgaag

SEQ ID NO: 589236 - DNA, 100 bp, Homo sapiens
gtgcagaggcatcacctgaaagctggccactgccccaacccaggcatttcactgggcgcagtgcggacaggcttccgctttggtcatggggacaaggtcc

SEQ ID NO: 589237 - DNA, 132 bp, Homo sapiens
gctctgggggcgctctgaatcacttccgctcccgccagccaatctacatgagtctagcagatcgtagctggggtgaactacttcttggacgtggagctgggccgaaccacgtgtaccaagacccagcccaac

SEQ ID NO: 589238 - DNA, 74 bp, Homo sapiens
gaaatgcatctttatgtcagaaacacaaagcagcccaaccaaagggtattggctataaaactgccaaatgtctt

SEQ ID NO: 589239 - DNA, 51 bp, Homo sapiens
ctcaaggagcgctgcctcaagcacgttgaaccatgattccggtgacagagc

SEQ ID NO: 589240 - DNA, 98 bp, Homo sapiens
ggatcatgcggccactcatattaccaaccgcagagagaatcatgtcaaccctgccatggacttcacgcagactccacctgggatgttggctctggaca

SEQ ID NO: 589241 - DNA, 114 bp, Homo sapiens
ccgggagcgcgatgtggagcgcttctttaagggctacgggaagatcctggaggtggatctgaagaacgggatgtacagttacccagcacgtgtacctcctcctcctcctattgc

SEQ ID NO: 589242 - DNA, 90 bp, Homo sapiens
actaacttgtttccctgggaatttggaggtgggttcgaaaaagggatcatggaagctgataaagatgacacacaacaaattcttaaggag

SEQ ID NO: 589243 - DNA, 98 bp, Homo sapiens
ccaggcatacatttggcagaataaatgaaccagggaaatcctcattgacgattcaatttgttgaaggccaatttgtggactcctacgatccaaccata

SEQ ID NO: 589244 - DNA, 50 bp, Homo sapiens
atccagcctgcggagcctgtggggcaggttttttattggcacctcagtct

SEQ ID NO: 589245 - DNA, 100 bp, Homo sapiens
tagagtcctcagaagcatgtgtcttccccagctctgcagccacatactatccgtttgttcaggaaccaccagtgacagactggatgaaaaagaaagtcgg

SEQ ID NO: 589246 - DNA, 76 bp, Homo sapiens
tggaaagatgcacattttgcctctggttggtggaaaggtgaccaagaatatggcccaggtgaccaaagccctggac

SEQ ID NO: 589247 - DNA, 83 bp, Homo sapiens
aggcaaggagctaaagcagcgtgcgttcagccctgggctacccgtacagtgaggacgcccgccagggtgagcagtacatgaac

SEQ ID NO: 589248 - DNA, 98 bp, Homo sapiens
aaattacacaatgaaaagggaggaaactcagaaaagcgtaagcttgctcaggtaaaataccatgaagattttgaaaaaacaaaggggagaggctttac

SEQ ID NO: 589249 - DNA, 82 bp, Homo sapiens
cctgtctcgccgagcgcacgccttgccgccgccccgcaggaactgtggctgcaccatctgtcttcatcttcccgccatctga

SEQ ID NO: 589250 - DNA, 100 bp, Homo sapiens
ccgtcctccttcgccgccgcgcacaaccgcacgtgcagatctacgcagaccccaccaagaggctggagctgtacttccggcccaaggacccatactgcca

SEQ ID NO: 589251 - DNA, 82 bp, Homo sapiens
ctggagacggcctgggtgctggcgaagcggaggccggagggcacgaccataataacatccctgacttctgtgctgcacaatg

SEQ ID NO: 589252 - DNA, 83 bp, Homo sapiens
attcagaatttgaccatcttggtgagaaacattaagacctactaccaggtgctgttgcacgtgctgtttgagcacgcggtcgg

SEQ ID NO: 589253 - DNA, 76 bp, Homo sapiens
atctgtagatgctgaaaaatcaatgctgtccaaacttaaacatggtacgccgtcatgaaatacacaaatcgaagaa

SEQ ID NO: 589254 - DNA, 100 bp, Homo sapiens
gttaaaagttacctgtttcggaatgcttttgtgctgctcacagtcaccgctgtcattgtgggtatgtgagactctgtgaagtagtcgaccacgttttccc

SEQ ID NO: 589255 - DNA, 90 bp, Homo sapiens
tattgggcttttccaagtaaagctcttcatgcaaggaaacataagttggaggttctggaatctcagtgcaggaatcacagccatggcccc

SEQ ID NO: 589256 - DNA, 87 bp, Homo sapiens
cagtgccttcccagaccttccaccttaggttctgctgcaaaaagcaccagggaggtggggaagacagggctccagctaccacaggac

SEQ ID NO: 589257 - DNA, 82 bp, Homo sapiens
tcgttgtcgccgcggtcctgctgttggtcgcaatggaagaagagatcgccgcgctggtcattgacaatggctccggcatgtg

SEQ ID NO: 589258 - DNA, 98 bp, Homo sapiens
tttaaccagcatggctacttcatattttggaaagcagtttttaagacaaaattgccattgccttcagaaagtgttgatattattatttctgacattcc

SEQ ID NO: 589259 - DNA, 82 bp, Homo sapiens
tgacaaaggacccgtggctgaaacaaagtggtccagcaacactcgcctgcagcaagccacttccggctcctgcgtcgctccg

SEQ ID NO: 589260 - DNA, 80 bp, Homo sapiens
ctaaaactgagaaatgtccaccaaagttcagtaataatcccaaggagcttactgtttttcggctttgtgagaaaccttac

SEQ ID NO: 589261 - DNA, 83 bp, Homo sapiens
ctttcaacaaccccacagaggactttaggagaaagttgctgaaggcaggaggggttaatacaatctgttggaatgacactgga

SEQ ID NO: 589262 - DNA, 83 bp, Homo sapiens
gtggagccggagctgggcgcggattcgccgaggcaccgaggcactcagaggaggtatcgagaaccttccctgcgaacttcaga

SEQ ID NO: 589263 - DNA, 98 bp, Homo sapiens
cccgtgccagacaatgcggacctctctgggctggctattaagactttatattcagagcaccaatcaaattaagcaagcctggggaacttcgtgaggaa

SEQ ID NO: 589264 - DNA, 90 bp, Homo sapiens
ctggggccgaagcagcatgtgacaccgaccaggccctggaacgtctttgaaactccctggaactaatcagacaggagggcctagccaggc

SEQ ID NO: 589265 - DNA, 71 bp, Homo sapiens
gcagcctgttcggcgaggacaacgtgcgcgccgctcagaaggcgcagcccagcctcgaaatgcagaacgac

SEQ ID NO: 589266 - DNA, 97 bp, Homo sapiens
ggaaaacatgacgtctccagccaaattcaaaaaggataaggagatcatagcagagtacgatactcaggtcaaagctgcaagtgtccactgcttggga

SEQ ID NO: 589267 - DNA, 75 bp, Homo sapiens
ataaaaccatcccccagagtagttgtggcggaataatctaaatatgggtgttggaccagaagggaaagatttcag

SEQ ID NO: 589268 - DNA, 50 bp, Homo sapiens
agccagccagcaggaaatacagcatggatttagtgcaagaagaagaacag

SEQ ID NO: 589269 - DNA, 89 bp, Homo sapiens
gctttggggaccgggaccgggatcgtgaccgtggagggtgtgaacttcaacccggagcactgcagccccaatggcaccgacccctacaa

SEQ ID NO: 589270 - DNA, 82 bp, Homo sapiens
aaggaattttgaagtcaccactgaggaggaattcaccctgttcgtctatgattgtagaaggcatgaaacaaaaaatgtggag

SEQ ID NO: 589271 - DNA, 88 bp, Homo sapiens
cgagacccaccggaccccgaacccagttcttggcacagctgaagatcatggactacagcctgctggtgggcatccacgacgtggaccg

SEQ ID NO: 589272 - DNA, 100 bp, Homo sapiens
atcacttcaagaaaggcacagagatctgtaattacagctactccagcaacatcttgtccataaggctgaaccggcaaatccggacgctgcggctgaagat

SEQ ID NO: 589273 - DNA, 74 bp, Homo sapiens
aggctttgtggtgcgggacgcaccctggaccgccagcagcagtgagaagatgagatccgaaatggcccataccg

SEQ ID NO: 589274 - DNA, 82 bp, Homo sapiens
tcagatgggatctttccggatcaatccagatggcagccagtcagtggtggaggcagcctgcttctgcaaagtggtacgatcg

SEQ ID NO: 589275 - DNA, 96 bp, Homo sapiens
gccacaactctgcagtggaccacagcattcctgaaatacatccaggaaagacatggagattctcttaaaaaggtagatatagttgtaggtactccg

SEQ ID NO: 589276 - DNA, 83 bp, Homo sapiens
tccccattcatcaccctggagccttccctcctcttcccagcaggccagaaaaatctggtccttcatcagaactaggaaagcac

SEQ ID NO: 589277 - DNA, 101 bp, Homo sapiens
ttgacagctgcattcaatcttttgggagatgaagaagcaaatcttggtctgcccatcagtccattcatggatcgttcttctcctcaactagcaaaactcca

SEQ ID NO: 589278 - DNA, 76 bp, Homo sapiens
tcatcaaaaatagtgatagctttgataagtagtgtgccagtatttgaaaaatcccaatgtatctgattcactgctg

SEQ ID NO: 589279 - DNA, 74 bp, Homo sapiens
ctggagctctacgcctcctacgtttacctgtccatgtgtgatttggtacttgatgccgcacatgagaaaagtac

SEQ ID NO: 589280 - DNA, 75 bp, Homo sapiens
cgcgcggcgccgcgctcggcggccgccattgcaggtggaacacctgcagcaggagactgctgctctgaaaaagca

SEQ ID NO: 589281 - DNA, 90 bp, Homo sapiens
gctttacctcgctgaccctatgaaggaaaggccgagggggacggcaagatgcacatcaccctctgtgacttcatcgtgccctgggacacc

SEQ ID NO: 589282 - DNA, 87 bp, Homo sapiens
gagagcgtgaccgagagcgcgaatatcgtcatcgttagaaggtttgttggcatccaaagctgttggggttgatggtgctgaaaaaaa

SEQ ID NO: 589283 - DNA, 100 bp, Homo sapiens
aggacacgggctgcaacctgcagcacatcagcgaccgggagaacatagacgagagtgaatctgtccttcgattttccattttatggccacttcctacgtg

SEQ ID NO: 589284 - DNA, 90 bp, Homo sapiens
cggcggcaccaaggcccccaagccctccttcgtgtcgtacgtacgccctgaggaaggaagcagccaccctcgccatggcctccccgcccg

SEQ ID NO: 589285 - DNA, 96 bp, Homo sapiens
aaggagcctgaccccaggcatgcttggatgaccacctctaccatcaagacctgacacggtgcaaaagaggctgggaggcggcagaatgcagccaga

SEQ ID NO: 589286 - DNA, 75 bp, Homo sapiens
tccggagtgtatggaggacgtgagaatgtgatccgagaatttaacttaaatgagctataccagcgggccaagaaa

SEQ ID NO: 589287 - DNA, 82 bp, Homo sapiens
caccgcccatcagtacagcatccagaacgtctcagccaaacctggagcgcccccccagccggctgtctccgccagaggcggc

SEQ ID NO: 589288 - DNA, 74 bp, Homo sapiens
accctccctgctgagatgcgcaaattcactccccagtacaaagattcggaggaacctgagtgcctcagtcatcg

SEQ ID NO: 589289 - DNA, 100 bp, Homo sapiens
ctttgctgcaaaaaattacggctgaactagatgcagagcacgcccagaaggtcctggaaatggagcacacccagcaaatgaagctgaaggagcggcagaa

SEQ ID NO: 589290 - DNA, 76 bp, Homo sapiens
ctccaatgtgtcatctgctttcgaaaaatgtcacccttggacaagacatgtcatgctgcccaaggacatagccaag

SEQ ID NO: 589291 - DNA, 75 bp, Homo sapiens
aaattaccctctgatgtgaatgaagggaaaactgtttttatcagctccctcgtgaaagatgcttctgttcctctg

SEQ ID NO: 589292 - DNA, 72 bp, Homo sapiens
gacattgaacttactcatcacgtctctatagtgtcttctgatcatatctgaagatattagtgagctacaaaa

SEQ ID NO: 589293 - DNA, 84 bp, Homo sapiens
gaccaggtggatatgacttcagccacagaaagagaggcccagaggggacttagacctgggcactgtgacctttgaagatgtggc

SEQ ID NO: 589294 - DNA, 100 bp, Homo sapiens
gggaaagagccccagcaccgcccctcctggaagaaggaagagtcctcaaccactgaagaagaagcttgatgcttggctgtcagaagacatgaattacgca

SEQ ID NO: 589295 - DNA, 97 bp, Homo sapiens
aggcaattattatcccgactgcaaatcgacccagtaatggcagaaactctgcagatgagtcaagctgaaccttagccggccgatcgaggagcagggc

SEQ ID NO: 589296 - DNA, 87 bp, Homo sapiens
ctacgtggagctggtgcagcggaagcgagtatgccacagggcccagtgggctccgggtcctgccccagggctacggctggaacctgc

SEQ ID NO: 589297 - DNA, 75 bp, Homo sapiens
cgcgaaatgatgggatagcgttgcaaatccttaaaagagtcttaacggtcctttctgaaagatctgctactgaag

SEQ ID NO: 589298 - DNA, 83 bp, Homo sapiens
gaagatggggagaaggaagcgagactcatacgcaacctcaatgggtctcccatgggattgctgggatcttgctgggtgagatg

SEQ ID NO: 589299 - DNA, 82 bp, Homo sapiens
aaaccacagacatgactgagtcctccatgaagagtgagaagccctaccactgcaactgggacggctgcggctggaagtttgc

SEQ ID NO: 589300 - DNA, 100 bp, Homo sapiens
gggacttccttgagggcaggcctgtcttgcatctgtttctccaccacctagcctggaatatacaggatgaagttaaaggaagtagatcgtacagccatgc

SEQ ID NO: 589301 - DNA, 97 bp, Homo sapiens
ggaactaaacggggtgaggtcacattcggttatctctaacgttggaaaacgtcccacccgctgtacctgtgcaatgccagtgatgacgacaatctgg

SEQ ID NO: 589302 - DNA, 82 bp, Homo sapiens
cagtgagatggcttctaacaaggttggaagtactccatgacacacactcggagaaagtcccttcccatgctgagttcgggcc

SEQ ID NO: 589303 - DNA, 100 bp, Homo sapiens
catggagacagtggatgcccagcatgtgaaggcctgggtgtctgacatccaagaatgcctgagcccaggaggaccccgcctatacaccccgcgagtgctt

SEQ ID NO: 589304 - DNA, 100 bp, Homo sapiens
gcacattcagaatgatgggcctgtgaccatagagctggaatcgccagctcccggcactgctacctctgacccaaagcagaaataagcgggttttgaaaac

SEQ ID NO: 589305 - DNA, 87 bp, Homo sapiens
agaagttccatgggggctgggccctcattgactgtgaccctaggtgtcacagatttatcagagcattgagttttctcgtttgacttc

SEQ ID NO: 589306 - DNA, 83 bp, Homo sapiens
acgagatctccgaccagtctgggggcgctggcggcctgcgcagccacctcaaggtcaaaatgcagatcttcgtgaaaaccctt

SEQ ID NO: 589307 - DNA, 101 bp, Homo sapiens
atagcatcagcgactctgtgttgtttctgcaggcggcttacagggagaacacagttggcctccaccgtttctgccccacagaaaacgtagcaaagatcaac

SEQ ID NO: 589308 - DNA, 83 bp, Homo sapiens
tgaagcgactgagtccgcgatggaggagaccaagacacattccaccccagtggggggtcccataccactcatggatctgaatc

SEQ ID NO: 589309 - DNA, 100 bp, Homo sapiens
gagcagctgcagaagaatgccgaccaggtggagaagaacatcgtggacacagaggccaagatgcagagtggagaagaaatgggtgaccgttggtgacaca

SEQ ID NO: 589310 - DNA, 98 bp, Homo sapiens
tttcatccacacaccaaggagcccaggctgttcagtgaggcccagaagattaacaatggctcaagccaggcggatggcactctcaaaccagtggatga

SEQ ID NO: 589311 - DNA, 75 bp, Homo sapiens
gaaaaaaatttgctggatattgatgcgccagtcactgatgacagtcatgtccctttccagggacctcaaggacga

SEQ ID NO: 589312 - DNA, 96 bp, Homo sapiens
ccgagctgctgcggcgccgcaactttaaagtcatgatctaccagggacatctctacaccgttcccatccgggaacagggcaacatctacaagccca

SEQ ID NO: 589313 - DNA, 93 bp, Homo sapiens
gcatggactcggagattggctgcctcatccgcttctatgcaggtgctggagaatctggtaaaagcaccattgtgaagcagatgaggatcctgc

SEQ ID NO: 589314 - DNA, 75 bp, Homo sapiens
ccaggctaaggacattttctataagaactccttgttccgacatcccaaacagatgccttcaattaagttgcagag

SEQ ID NO: 589315 - DNA, 75 bp, Homo sapiens
caaccagccccgcgtagaggaagcgctcactcagctcaaggcagggccctgtgcaccaaggtgccggaactgatc

SEQ ID NO: 589316 - DNA, 50 bp, Homo sapiens
tggctactctgcctcggggacgaaagcagcagtctctggtcccagcccac

SEQ ID NO: 589317 - DNA, 100 bp, Homo sapiens
ggccgtccagcagatggcggatgccctgcagtacctgcagaaggtctctggagacatcttcagcagtttggtgccctggttgtcagatgttggaaagcag

SEQ ID NO: 589318 - DNA, 110 bp, Homo sapiens
cttggctctttatgcattctactttgaccctatgagaacctcatttctcttccaagcaacagccaactcagtttataaatccagaaacacctggctatgttggatttgca

SEQ ID NO: 589319 - DNA, 75 bp, Homo sapiens
aggtctggcagggagaaaggagcaagacatatgaagatccatgagaaggaccctaacagtgccacagccacagcc

SEQ ID NO: 589320 - DNA, 100 bp, Homo sapiens
agcggatggtggttcctgctgccctcaaggtcgtgcgtctgaagcctacaagaaagagcttccttctcctacatctgcttgctgctgggatacccgtcac

SEQ ID NO: 589321 - DNA, 75 bp, Homo sapiens
ccgagggactgggagtcgttagtgaggtcaaaatgcagatcttcgtgaaaacccttaccggcaagaccatcaccc

SEQ ID NO: 589322 - DNA, 100 bp, Homo sapiens
ggaagcgatggcttcagacagcatatttgagtcatttccttcgtacccacagtgcttcatgagaggaagacctggaagcgctcatagcccatttccagac

SEQ ID NO: 589323 - DNA, 76 bp, Homo sapiens
agcgatgttaccattgtgaaagaaggttgggttcagaagaggggaacctctttcaggagctataaaagaaagggag

SEQ ID NO: 589324 - DNA, 98 bp, Homo sapiens
gttcaaacaaatttgcaaatgatatacaacttctaaggttatacattggctcttcaaagacgttcacctcatcagagaaatccctgactcctttgcag

SEQ ID NO: 589325 - DNA, 75 bp, Homo sapiens
attattaagcaaaagtgaagtggcatataaatttccagagctcctacctctaccaaatttgtatcctactgtggg

SEQ ID NO: 589326 - DNA, 87 bp, Homo sapiens
gggcccgcacggaccctctacttcaacaatgcagatcttcgtgaagactctgactggtaagaccatcaccctcgaggttgagcccag

SEQ ID NO: 589327 - DNA, 75 bp, Homo sapiens
actcccagtgaagctggaagccaagactcaggcgatctggggccattaacaagtgagctggagattggatcacag

SEQ ID NO: 589328 - DNA, 49 bp, Homo sapiens
tgcccgtggttctgctgaacaaaggcagagttctttggaatttatcctc

SEQ ID NO: 589329 - DNA, 74 bp, Homo sapiens
aatgatttatgccagctccaaggacgccatcaagaagaagctgacaggaagcaaaatgtggattcagcaaacaa

SEQ ID NO: 589330 - DNA, 102 bp, Homo sapiens
cgggggtgaagcctcctgcgccggccttgcctcgggatgattgtagagttgtcttggcaaaacaggaaattacaaggttactggaaacattgcagaaacagc

SEQ ID NO: 589331 - DNA, 50 bp, Homo sapiens
ccgtcgtcctggtgctgcagcgagttatgcccagccaagtcttcagtata

SEQ ID NO: 589332 - DNA, 112 bp, Homo sapiens
tggcctttcttatactctagaatatacaaagacaaaaggagattctgatgaagaagttattcaagatggtgctggagaatctggtaaaagcaccattgtgaagcagatgagg

SEQ ID NO: 589333 - DNA, 100 bp, Homo sapiens
gacaacattgagacagccaacagttttgctgtaacaaacgcctgctgaccctcattttgtcctgcctgatggacctcaagaacttccccatggacatcca

SEQ ID NO: 589334 - DNA, 100 bp, Homo sapiens
ccttggggcaaaatgtggacaaggcagccagacccggtccgtttggaatgcctgggatggtgccgccgcatgttcctcctcagatgctcaacattccgca

SEQ ID NO: 589335 - DNA, 96 bp, Homo sapiens
ccatcgggcgcttctttggcggtgacaggggtgcgcccaagcggggctctggcaaggactggttgccataaaggaagcccacgacatagagaccag

SEQ ID NO: 589336 - DNA, 95 bp, Homo sapiens
cagtggtcgcttcttctccttgatccagcggaggccctgcagctcccaatggactatgtccagcgggtcaagcggacccactctcagggcggcta

SEQ ID NO: 589337 - DNA, 100 bp, Homo sapiens
ccaagaaaaaaaccacaaatgtttttctgttttgcctgaatacatgatttaaacaagagatttccacagaagagcccccctccatgcgcctgaaggcccg

SEQ ID NO: 589338 - DNA, 80 bp, Homo sapiens
agaactttgagagagctttgaaatacttcttacaggctacccatgttcagccagccacagtcagacttgttggggcttat

SEQ ID NO: 589339 - DNA, 99 bp, Homo sapiens
gaggagctggtggtgcagactgaggaagacgtatctgaacacagtcattccttacgagaagaaagcctctcctccctcagtggaagacctgcagatgct

SEQ ID NO: 589340 - DNA, 100 bp, Homo sapiens
ccatcggacatggtgtttcttaggacttcagaaaaagcagaagacttgcactatctgccagatgctgcttcctaaccagtgcagttatgcatcacaccag

SEQ ID NO: 589341 - DNA, 90 bp, Homo sapiens
caggcagtacgggaagaacttcttcagaattagaaaggagctgcttcccaataaggaaacagaaagtaatggaccagtgaaggtgtgggg

SEQ ID NO: 589342 - DNA, 98 bp, Homo sapiens
gcctgcgaggctggccgagaaatcccgtagttgctggagaatgtaaccctaatccataaaccagtgtcgttgcaaccccgtgggctgatcaataaagg

SEQ ID NO: 589343 - DNA, 75 bp, Homo sapiens
ttgaggcgaatggccgaatctctccgctagatgaggaagaggagcgaaggaaaaggcgccgggagaagaacaaag

SEQ ID NO: 589344 - DNA, 75 bp, Homo sapiens
ttgtagctgacgaagcattttgcaacgcagttcggagttattatgaggatttccatttaaacagggttaatttgg

SEQ ID NO: 589345 - DNA, 83 bp, Homo sapiens
ccattgaattctccaacaatggaggccagtggctggtctcaggaagctcttcgtgggcggtcttgactggagcacgacccaag

SEQ ID NO: 589346 - DNA, 99 bp, Homo sapiens
ccctgcagtacctgcagaaggtctctggagacatcttcagcagtgcttcttcgggcggaggaggaagtaggggtgcacctcagcactatcccaagactg

SEQ ID NO: 589347 - DNA, 80 bp, Homo sapiens
aacctactttcaacttactaagaaagatggagtccattgccttacctgtgcaataatgcttcttaataccgatctacatg

SEQ ID NO: 589348 - DNA, 97 bp, Homo sapiens
gggaggactgctttatggacttgcatcaggagtagcaaatcctatagcaatggaactcagcgatgcaaatctgcaaacactaacagaatatttaaag

SEQ ID NO: 589349 - DNA, 75 bp, Homo sapiens
aaaaggcatggtgatccttcgggacaagattcgcttctatgaggtctgcgctcctcagaccaccggcaggtgaac

SEQ ID NO: 589350 - DNA, 50 bp, Homo sapiens
cggcctgcgggcgatcgggccgagatccctcgggctggtggaagggccgg

SEQ ID NO: 589351 - DNA, 82 bp, Homo sapiens
agccccaagacagagcgctactcctggcagtgcgtcaatcagagcgtcctgtgcgcaaattgtggctactaatttgccccct

SEQ ID NO: 589352 - DNA, 83 bp, Homo sapiens
gcttcagagagcagccttcccggagcaccaactccgtgtcgggagtgcagaaaccaacaaacggaatcagtccccaatgcctg

SEQ ID NO: 589353 - DNA, 100 bp, Homo sapiens
tgcaggtcaccctgaagaccctccagcagcagaccttcaagatagacattgaccccgaggagacgagggagacgtggtgggcggtccttcctgtgacacg

SEQ ID NO: 589354 - DNA, 74 bp, Homo sapiens
catcaaagaagcccatctcccgccgggcgccatggcagccgtggggaacacagccgcacccgggtctgtgccag

SEQ ID NO: 589355 - DNA, 114 bp, Homo sapiens
aagaagataaatgacacaattgctaaaaacaaagagttatatgaaatcaatcctccagaacaagtgtcattcaaggatgtatgtgtggacttcactcaggaagagtggtatctg

SEQ ID NO: 589356 - DNA, 90 bp, Homo sapiens
ataaaagcatgtattgaaaatggagccagttgtatcgacatcagtggagaacctcagctggagaatgctggaggagaccttaaggatggc

SEQ ID NO: 589357 - DNA, 50 bp, Homo sapiens
gccctgccctgggctggaacgaccctgtattgactcggagacaaaaagag

SEQ ID NO: 589358 - DNA, 98 bp, Homo sapiens
ttcctttgctgagaaatcactgatgggaagtgagacttgttaaacttgaaaggtgtctggaaatgaagtatggaaatgaaatcatgaataaagaccca

SEQ ID NO: 589359 - DNA, 73 bp, Homo sapiens
cagccccatgggcacccgctccaccctgctggcagccaggttgaacaagaaggagttcagcttggaagaaatt

SEQ ID NO: 589360 - DNA, 100 bp, Homo sapiens
caccatgacccacttcaacaagggcccttcctatgggctctcggccgaagtcaagaacaagctcactgcagtcgacgcagacgaagggtcaaatggggag

SEQ ID NO: 589361 - DNA, 75 bp, Homo sapiens
gcaccaccaagatgtctctaaatgagcgaatcctcactatggatgggctcattgaggacattaagcatcggcggt

SEQ ID NO: 589362 - DNA, 96 bp, Homo sapiens
actgactggcacaggtgttggggcactggtgaggtggattgatgatgaatcttctggcacacctggagcaactccagaacacagtcgtgaggataa

SEQ ID NO: 589363 - DNA, 100 bp, Homo sapiens
ggcggcggacggctgcgtcgcccgaggcgaggaggagcgctggcgtctgatgccaatgcaagttacttaagagcagctcgagctggacaccttgaaaagg

SEQ ID NO: 589364 - DNA, 75 bp, Homo sapiens
agcagctggaaccatgacaggcatgttgtataaatgtacaggttcagcagactgtacaggatctttttggcagag

SEQ ID NO: 589365 - DNA, 82 bp, Homo sapiens
gaccccgcccagttggcccagaggatctcttctaacatccagaagatcacacagtgttagctctgaagatgagtgggttgag

SEQ ID NO: 589366 - DNA, 104 bp, Homo sapiens
cgtccttctccactttcgccagcccgtgccgcgagcgcggcctgcaggaggtattatcgggggacccacggggtcattgtggtttacgacgtcaccagtgccga

SEQ ID NO: 589367 - DNA, 90 bp, Homo sapiens
ctgcccagaggccacccagcctcctagacagtcctggtatctgggatagcaaaggtcttcttccctcgccccttctccatcgtcccagga

SEQ ID NO: 589368 - DNA, 100 bp, Homo sapiens
gcacaagccaggaagctggtagagcagcttaagatggaagccaatatcgacaggataaaggataaactgcttccctagaaatcctctccagcattcttgc

SEQ ID NO: 589369 - DNA, 100 bp, Homo sapiens
accttcattgctctgtgtgccaccgctgccaaggggccaagggatgagctggggccctccttcccaatggcatctccccctggtctggaactgaagacac

SEQ ID NO: 589370 - DNA, 50 bp, Homo sapiens
ctcgcaagagcagccgcggcgccactctgtcctggataatgaaagactta

SEQ ID NO: 589371 - DNA, 98 bp, Homo sapiens
gcgaagtcatggggctctgtcgggaagaactcccccactggaaaggattctgaaagaaatgaagtcagccctcagaaatgaagttgactgcctgctgg

SEQ ID NO: 589372 - DNA, 74 bp, Homo sapiens
agaagtggtcctgccagcactttcaatgatagagtttttgccagtttggtgccctggttgtcagatgttggaaa

SEQ ID NO: 589373 - DNA, 96 bp, Homo sapiens
cccaggtgtaagcgcagaaagcaggcgaacccgcggcgcaataacgtggtgctcatcggggactcaggcgtgggcaagagcaacctgctgtcgcgc

SEQ ID NO: 589374 - DNA, 88 bp, Homo sapiens
ccagaatttacgtcaacttggatcaaaatatattttggatttggacacctcccacactgagtccccaaccccccatgactcaaattca

SEQ ID NO: 589375 - DNA, 100 bp, Homo sapiens
agagctgtgcctcccagcaccacagtccttctgcagtccctcgtccagccacccccaggtggagatgacccctgagaagttcagtgtcttaatggagaag

SEQ ID NO: 589376 - DNA, 75 bp, Homo sapiens
gccgacatgtctctagtggcggaagccttcgtctcccagattgcaggagcctgcagacagggggatttgcctggg

SEQ ID NO: 589377 - DNA, 100 bp, Homo sapiens
tcagcagtaactcctccataaaaacaagtgtgtgcatctggctgttagaagaattcatgctcatccggggctcaaaatctccttcgccaagaccaaacat

SEQ ID NO: 589378 - DNA, 75 bp, Homo sapiens
gaagaagactcccccacatctggaaatgaagctgttgtcatttctggaaggaaactggcccagcagatcaagcag

SEQ ID NO: 589379 - DNA, 100 bp, Homo sapiens
cggggagctaagtccccagattggaggaggctggctctggtcttcgatgcacaggagtggccgttatggaacgcagccaaagacagcagcattcccaagc

SEQ ID NO: 589380 - DNA, 152 bp, Homo sapiens
ttgttacagctgctggagcagcagcggcccccgctcccgggaaccgttcccgggccgttgatcttcggccccacacgacaatgcagatcttcgtgaagactctgactggtaagaccatcaccctcgaggttgagcccagtgacaccatcgag

SEQ ID NO: 589381 - DNA, 98 bp, Homo sapiens
acaccttcctggacaccatcgccacccgttttgacggaacacgttctttggcatggacacaagttcagtgggaggattagaattgactgatcagactc

SEQ ID NO: 589382 - DNA, 90 bp, Homo sapiens
ctgacccccctcaagcctgtgaagaaaaagaagcaccgctttgggctaccctggagacctttggcgacttggcctttggcgacatcttcc

SEQ ID NO: 589383 - DNA, 100 bp, Homo sapiens
accgccaaggtcctgcttcaccgaacagcacctcaggagcagaattggcagagggggtcgatttgggaggaaaggtgtggctataaactttgttactgaa

SEQ ID NO: 589384 - DNA, 75 bp, Homo sapiens
cgggggctcctctatgataatggcagataagataatcaccagaatgggagtgaatgacttgtggcaaattttgga

SEQ ID NO: 589385 - DNA, 75 bp, Homo sapiens
cccagcctgtttcacttcttgctttggaggaattttttacatcacttgtgaagcaagaaatggtgaatatgcctc

SEQ ID NO: 589386 - DNA, 100 bp, Homo sapiens
ggacacgtgggtgcgatacctgggtgtcgactgcaatggccgaggagatcaggcgcctctctgtactggtggacgattaccagatggacttccacccttc

SEQ ID NO: 589387 - DNA, 75 bp, Homo sapiens
ggagaatgatgtcatcatgcatgctctcactaagcagttggaggctgtgtctgatgatactacaaatcattctaa

SEQ ID NO: 589388 - DNA, 51 bp, Homo sapiens
gaaggacactgggatcctgtaacacagcatcttcatgatacagttaagagg

SEQ ID NO: 589389 - DNA, 75 bp, Homo sapiens
gcgcaggagaagctggagctcacggagaagaaggcctccgacgccctgtttgtgctcttcgtcctggcctacatc

SEQ ID NO: 589390 - DNA, 74 bp, Homo sapiens
agctctagaaatgaatgtttccatctcttcagagatgaaccagagtgcctggtgaagaatgtgatgggatcact

SEQ ID NO: 589391 - DNA, 106 bp, Homo sapiens
ccccgatgtcctcgcatacttggacttcagcgtgtcaaccactgggatattagcgggagtgaagccaagggaagagatggtgttgagtggaaaatacaaatctggg

SEQ ID NO: 589392 - DNA, 75 bp, Homo sapiens
gtcacagtaaggccaaaaatgtgcatactcacagagttagagagagggatggtgaccctcaaactgacacaagac

SEQ ID NO: 589393 - DNA, 83 bp, Homo sapiens
aagaccgcgcgcagggcctgcagcgggagctggacggcgagcgcgagcggcgcgagaaaggcagctgtgcggagggtagtggc

SEQ ID NO: 589394 - DNA, 100 bp, Homo sapiens
tgtctgcctcctggtgaaaaaggagggctccccgaggactttctgaactccctggagaagatggaggacggcaagttgaaggtcaccctcaagtaccccc

SEQ ID NO: 589395 - DNA, 100 bp, Homo sapiens
attggaagcgctttgatttacagcagctgcagttgttgacctcctgtactggagagacattaagaagactggagtggtgtttggtgccagcctattcctg

SEQ ID NO: 589396 - DNA, 75 bp, Homo sapiens
caggcctgaaggattaacatcaacaggttggactcttcacagaaattgggcccatgtcttgcttcatctctcgac

SEQ ID NO: 589397 - DNA, 82 bp, Homo sapiens
taaaattgcagtgctgaagacactggacccggtaaggggcctggataccaagaagtgactgctcatctaatccataaagcta

SEQ ID NO: 589398 - DNA, 114 bp, Homo sapiens
ctagaggtttcttggaatttgtggaggattttattcaggttcctaggaatctcgttgggtacaggcatccttcacctgctattgttgcaagaacagtcagaattttacatacac

SEQ ID NO: 589399 - DNA, 83 bp, Homo sapiens
cgctgagcctgcagccggccctgccgcagggagagcaacaagccccggccctcagagctcagccggatgagcgcagcccagag

SEQ ID NO: 589400 - DNA, 83 bp, Homo sapiens
aggaaagacattcatcataggtttgtaagagatgaaattcagcaacacagtcactcctggcggcaaaccaaacaaaaccagag

SEQ ID NO: 589401 - DNA, 100 bp, Homo sapiens
ttacaggagacctccctgtacacacaggtgaaagaacttgtcctggacaacagtcggtcgaatgaaggcaaactcgaaggcctcacagatgaatttgaag

SEQ ID NO: 589402 - DNA, 87 bp, Homo sapiens
tgctgccttcccgtcgccgctcccgaagcttttccaggctgaaggtgatgtggccgccctcaaccgacgcatccagctcgttgagga

SEQ ID NO: 589403 - DNA, 83 bp, Homo sapiens
ggacggacgtcctcccacgtaccatttagaaggtactccaaagattcaggtttactcacgtcatccagcagagaatggaaagt

SEQ ID NO: 589404 - DNA, 100 bp, Homo sapiens
ccaagaggcagaagtacggggttgtgcctgagattgtgagggagacccaggacctaattgaacaaggggcactcctgcaagcccaccggaagctgatgga

SEQ ID NO: 589405 - DNA, 50 bp, Homo sapiens
gttgccacattgatgggcaccctcggaaagaccacagcaagattctttca

SEQ ID NO: 589406 - DNA, 100 bp, Homo sapiens
gttcgtttccagcctcaggaatttatggtcgcctttttgaatgaggattcactccttctccagttgcacagccacacccttcagctggccttaatgttga

SEQ ID NO: 589407 - DNA, 96 bp, Homo sapiens
ctgttccttcagccaaagaaacaagccgtggaataggtgtatcaagtaatggtgcaaagcctgaagcaagaggaggaacgacgtagaagagaggaa

SEQ ID NO: 589408 - DNA, 75 bp, Homo sapiens
cgcagcgccatggcccccattggcctcaaagctgttgtcggagagagaatatgaagacaaggctggaagacctag

SEQ ID NO: 589409 - DNA, 82 bp, Homo sapiens
gtggaattcgtgtgttgtacagacccttaagagtatgtattcccgtgtgccagagtgccaggtcaccacatactattatgtt

SEQ ID NO: 589410 - DNA, 100 bp, Homo sapiens
tttacatcagattattgggagcctatttgttcatcatttctcgtgttcaagacttaattcagtgcacaaatgagatgaatgtgaacatcccacagttggc

SEQ ID NO: 589411 - DNA, 74 bp, Homo sapiens
tggatatggatgtgccatactttgcagatgtggtgagatctggtgctctcatgaaaatctacatcaggaggacc

SEQ ID NO: 589412 - DNA, 82 bp, Homo sapiens
ctaataatgctggcaaagtggaaaaatgtgcgcagtacttctggaatagaaattctaaacattagcctgccgaacaactgga

SEQ ID NO: 589413 - DNA, 98 bp, Homo sapiens
acagcagctatgacattgccaagatatcccaacacctagctcccctgtttgacaaccctaagttggataaggagctgcgggcaatgctgagagagaag

SEQ ID NO: 589414 - DNA, 75 bp, Homo sapiens
aggcctaagaattttggcattgggcagagcggcttgggtaaatccaccttaatcaacaccctcttcaaatccaaa

SEQ ID NO: 589415 - DNA, 100 bp, Homo sapiens
ttttctctgccatgttgctattgcaggacggaatgaggtgttgctgtgttgcccagactggtctcaaactcctggcctcaagtcatcctcctgccttggc

SEQ ID NO: 589416 - DNA, 96 bp, Homo sapiens
gacaattgctaggcggagacagtgcagggaagagagaccttagaaaggatcaggactggcggaatgcactgctgcctgcaggcctgaggcagaagg

SEQ ID NO: 589417 - DNA, 96 bp, Homo sapiens
atgagatttcatcaagatcaacttcaggatctagtttgaagcactaagaagaataagacatcagtttgaaaagaggctctatcagaacaacacgaa

SEQ ID NO: 589418 - DNA, 100 bp, Homo sapiens
cagaaccatcacctgggcaggacgggaccagcagagcggctggaagattcggaaagggccaggtattcccaccggtccagtcaccatcgtccttatctgg

SEQ ID NO: 589419 - DNA, 75 bp, Homo sapiens
taacaagtgcccaggtgactcaggtttggcaaacatcgaaaagatgacaagattgagaaaacgggtaaaataaaa

SEQ ID NO: 589420 - DNA, 146 bp, Homo sapiens
ctgagctgaagaagcttcggaagaagagccagggcagcaagaatcctcagaagtactcggacaaggagctgcagaagagaaggaggcagagactggtgcagaaaatgcctcttccaaggagagcgagtctgccctgatggaggaca

SEQ ID NO: 589421 - DNA, 100 bp, Homo sapiens
agattggattgaaagaagcccagcttttccatcctggagatctacaggatttatcaaatcgagtcactgtcaagttttgagagattacctgaagttgcac

SEQ ID NO: 589422 - DNA, 98 bp, Homo sapiens
agatgcagaagtcagcaagagtgacataggagaagtgattcttgtgggtggcatgactaggatgcccaagtttcagaaagtgctttctctctgtggac

SEQ ID NO: 589423 - DNA, 100 bp, Homo sapiens
gctccagattccatgttcatagtggctttccagttgtttgacaagagtggaaatggagaggtgacatttggccctggaaatttgaacatataggcattgg

SEQ ID NO: 589424 - DNA, 100 bp, Homo sapiens
gaggcctccatgatggaagacgtggggatgcaggatgtccatttcaacgagagctggaaaggtgctggcgaagctcgcctggtgtgccaaaatgacctgg

SEQ ID NO: 589425 - DNA, 98 bp, Homo sapiens
gacgaagatcttatctgccctatttgcagtggagtcttggaggagccagtacaggtacatgtcccagagcaagcacacggaggcccgggagctcatgt

SEQ ID NO: 589426 - DNA, 101 bp, Homo sapiens
ctacgaggaatggcggcggctgccgcaggacctgcagcatcccagaggtgatgtgccttcaggacttttttggtgatgatgacatttttattgcatgtgga

SEQ ID NO: 589427 - DNA, 51 bp, Homo sapiens
aaatgaaccaagcacacgtgtccgagtaactcaactggacccaaataaatc

SEQ ID NO: 589428 - DNA, 98 bp, Homo sapiens
ccactttcaaaggacccatttacaataggtggatagatacttctcaagacatcacacagcgtgagtcaatcaaggagggaagccacaagcagactgac

SEQ ID NO: 589429 - DNA, 100 bp, Homo sapiens
gaatttggaaagagcttcacctggaagtcacagttcaaggtgctgcaacctgtactggatgtttggggatagaaagatgaatgggacatgatttgtgtgc

SEQ ID NO: 589430 - DNA, 100 bp, Homo sapiens
gaacttcgaaacgtgataagaagcacctggatgagacatttgctacagcatcccacattaagtcaacgacaaatttacatgtattggagaccagaccaga

SEQ ID NO: 589431 - DNA, 75 bp, Homo sapiens
ctttgatattgatgtgaacgcctctgtgtttgaaacaaacattcgagaacagtccaggctctgcagacagcatcc

SEQ ID NO: 589432 - DNA, 80 bp, Homo sapiens
gtcggatgagcttggcatttcccaggatgagcagctatccaagtcaatctgcaggcccaggtggggcttcatgttcagct

SEQ ID NO: 589433 - DNA, 100 bp, Homo sapiens
ctctgtattcagatcttcatgtgtctcttctaagctgaataaagctgttttggaactgtcaggtacctcaaagcctttgaagaaagatgacaccaccttt

SEQ ID NO: 589434 - DNA, 83 bp, Homo sapiens
ggcgcagaaaccccgttgacaaggcactgctttttcatgacgtgcaagaagaaacacacgctgctgtgccccgactttgcccg

SEQ ID NO: 589435 - DNA, 100 bp, Homo sapiens
gccaaagctcccatccaagacatctggtaccacgaggatcggattagagcgtcctggcattgatgtgcctgctccagacatgagcacaggtgagcgggag

SEQ ID NO: 589436 - DNA, 100 bp, Homo sapiens
ttctggagtctgttaagagagggcgtgcaatggaattgagttttgccctggtaaatgggaataatatccgaggcatgatgaaagaattactttattttct

SEQ ID NO: 589437 - DNA, 50 bp, Homo sapiens
gatgaatctgcattggataatgataagaagacgtaaagcaggctaccagc

SEQ ID NO: 589438 - DNA, 100 bp, Homo sapiens
ggtccacgcgcgggcgagaaggggtcccacgaggaggagttatagctgtgatggcgaaagagccggagggggccagcggcccttggtacacagaccgcaa

SEQ ID NO: 589439 - DNA, 100 bp, Homo sapiens
gagcagatcgattttaccttggataccctgctttgggtgtgtgcagtggcctcagggatccggaaagtctaggactgaacttctcctaacatccagtaat

SEQ ID NO: 589440 - DNA, 101 bp, Homo sapiens
gaccttaaccctcaagccgaagccttcagtgggactcccccagcagatacattctcagtgcaatggatgagcttcatagtctggatccaagaaggcaagag

SEQ ID NO: 589441 - DNA, 148 bp, Homo sapiens
aaagaagcttcctacagtctcatcaggaaatatgtgtctcagtattatcctaagcttagagtggacatcagcatgcaagacgacagcatagaagcttctacttccatatctcagcttctaagagagagctatttagctgaaaccagac

SEQ ID NO: 589442 - DNA, 74 bp, Homo sapiens
cggcgagcgcgtcgccaccatggttgatgccggcccaggatggatcagacctgtgaactacccagaagaaattg

SEQ ID NO: 589443 - DNA, 100 bp, Homo sapiens
attaaagatgcatgctgatggcgataagtcattaccacagagacaaagcatggaggacacaagaatgggaggaaaggcggactctcaggaacttcattct

SEQ ID NO: 589444 - DNA, 100 bp, Homo sapiens
gggttccatgagaagtgacatcctcctcgaatcaaaagagcattggggagtcagcaatgtccgttgtgttaaatcagctgctgcccatgattaagcctgt

SEQ ID NO: 589445 - DNA, 100 bp, Homo sapiens
cgcgggatcccagcctcaggcgtgcgcggacggtgtgcgggctgcttctgatgcttggaagatatcctctcagccacaaagatggtaataaatctttgcc

SEQ ID NO: 589446 - DNA, 100 bp, Homo sapiens
ctttcttccagcttctgctgtccttctttgtggagagcaagctgcattaatactacattgtcaaagacaaagacgaacatgagacatgcgatatgagttt

SEQ ID NO: 589447 - DNA, 74 bp, Homo sapiens
ggtggagctccctgtggccttggtctcacctctcttcagtcacttcttcacgaacgatcctggatgcaaatgaa

SEQ ID NO: 589448 - DNA, 94 bp, Homo sapiens
gggctgctggtgggccgcgtcgaagacatggaccagggctacggagcatcgtcatcagacagtgaggaggacccagaagccttggagaagcaga

SEQ ID NO: 589449 - DNA, 83 bp, Homo sapiens
cgcggaggggtctgcgcagtgcaggcagataccgtttgacaccaccaggctccagtggtccagaatcttttactgtctaccac

SEQ ID NO: 589450 - DNA, 80 bp, Homo sapiens
ccggcgaggacacacgcagagtgccgactggtggtccttcggcgtgctcatgacctcctgccccccgaggtctgcagtct

SEQ ID NO: 589451 - DNA, 90 bp, Homo sapiens
ctcaacatgctggtctttggagaaagtattctcaacgatgcagtctccattgttctgaccaagatgaagaggaagccggcttattggagc

SEQ ID NO: 589452 - DNA, 100 bp, Homo sapiens
ttacaaccgcagcagtggtggctatgaacccagaggtcgtggaggtggccgtggaggcagaggtggcatggggttaacgaagcccttgtcatttgctgat

SEQ ID NO: 589453 - DNA, 90 bp, Homo sapiens
ggtacagcacaaagtcgccaaggtgcggtctttcgaccactccggaaagatctctcacttcaagattccgaagtacatcgtgtttgtcac

SEQ ID NO: 589454 - DNA, 82 bp, Homo sapiens
ggagatggtgcagaagatggaggagatacgggcagctgtatgttctcttcttgaggcatcattctcggacctccaacagcac

SEQ ID NO: 589455 - DNA, 88 bp, Homo sapiens
gccgctagccaagctgtcctgcctgggaaataatgaagatgtttcattttcaagaccagcagatcttgaccttattcagtcaactccc

SEQ ID NO: 589456 - DNA, 98 bp, Homo sapiens
agttcctggccaagtttgagatcgccctgcccgtcgccaatgacagaacatggtccaagacaattcctgggaaagttcagttcttctcaagtgagggt

SEQ ID NO: 589457 - DNA, 74 bp, Homo sapiens
gggtcggcaccttcggcaaagtgaagggaataggactagcaacttcatagacggttgtgaagacaagctagacg

SEQ ID NO: 589458 - DNA, 100 bp, Homo sapiens
ctggacttggcttccctcaagtctatccgagagtttgcagcaaagatcattgaagcctacaaggagaagatgaaggagctgtcggtgctgtcgctcatct

SEQ ID NO: 589459 - DNA, 75 bp, Homo sapiens
caggactgcctgagacaagccacaagctgatcaggaagcaccatacctcctgcgaaacctcagtgatcacacagt

SEQ ID NO: 589460 - DNA, 100 bp, Homo sapiens
ttttccagtataagtatttggctcttaatatgcattatgtagccttcaaatgtttatctggtgtgactgtattatgccctcagagagtactgtatgttgc

SEQ ID NO: 589461 - DNA, 90 bp, Homo sapiens
aactccgcaaacgaaaaagaacgacatgatgcaatcttcaggaaagtaagagggttgtggacctggcctattagcagatgccaagatgcg

SEQ ID NO: 589462 - DNA, 100 bp, Homo sapiens
agctggttggccctgtgatccctcaagactggtccacggagtgtatgaccacaaacagccatcaagaggcagttggtgtcaccagccagcgaccagtgtt

SEQ ID NO: 589463 - DNA, 50 bp, Homo sapiens
cgccctcaacctgctttacaccatctgcgatttccttctggttggctgtc

SEQ ID NO: 589464 - DNA, 75 bp, Homo sapiens
gcatcaacctgatcaccagccaggagtacgccgtcaaggtgattgaaatctctgaatatcgaacccagctctatg

SEQ ID NO: 589465 - DNA, 100 bp, Homo sapiens
tgaccagtgccctgggttcgccttgcataaatggagattgcccaaggactccagatactccaaataatgaccctcgttgttctactagcaacaatagatt

SEQ ID NO: 589466 - DNA, 83 bp, Homo sapiens
gctgctgctgctgacgctgctgctgcccggcctcggggtactccaaagattcaggtttactcacgtcatccagcagagaatgg

SEQ ID NO: 589467 - DNA, 100 bp, Homo sapiens
catcagagacagtggcaacaattcagcgagtaaccagctcataaatcacatcgaacagtttttggatactaatgaaacaccgtattttatgaagagcata

SEQ ID NO: 589468 - DNA, 126 bp, Homo sapiens
acctttaggtgcttttatattcatctcaaaaacaaaattctgaactcaggacttggcaatgcacctatgatatgtgttttagaaatagccgttaaactttggtttgaatgaagaatgtctctcaat

SEQ ID NO: 589469 - DNA, 118 bp, Homo sapiens
tttaaaaattccgccgaaaaagagaagacgctttacccgactctttgggccgttatctcacatatggctcgtggacagcagaaaattcagtctcagcagaaaaatgccaaaaagcaag

SEQ ID NO: 589470 - DNA, 80 bp, Homo sapiens
cagagcttcctgacagagttcatcaactacatcaagctcttccgccctctctggatgagggaacagaagtggaggaaaca

SEQ ID NO: 589471 - DNA, 75 bp, Homo sapiens
tgcgcatgatcgtcatgggacacagaagagcccacaggcggttttgtgagctgcttccccaggagcagcggagcg

SEQ ID NO: 589472 - DNA, 100 bp, Homo sapiens
aagccacagattgtcgcctgcataatgtcttcaatgacttccttatgctctctaatacccagttcatagagaatgaatatgtttatccagaagccagaga

SEQ ID NO: 589473 - DNA, 100 bp, Homo sapiens
gtctgcggccaagactccgtcctgcaaggtacctacagagttggacagtaggaccccagtcctgtcctcttgaaactgacctggagatgaccccagctga

SEQ ID NO: 589474 - DNA, 90 bp, Homo sapiens
acttgtccaagtacatcgacaagacgatccgggtaaagttccagggaggccgcgaagtgcctcaacctggtgttcctgctggcagacgtg

SEQ ID NO: 589475 - DNA, 100 bp, Homo sapiens
gggaaatcccagtacagatcagccctgaggatgatgacaggaaggtccgaaggagagaaaaaaaccgagttgctgctcagagaagtcggaagaagcagac

SEQ ID NO: 589476 - DNA, 100 bp, Homo sapiens
ctcggttttctctgctctgccaacactagtggaatatgatcacatcccagcctcaagtactacagccttccagcagccttcccagacccacagatcacac

SEQ ID NO: 589477 - DNA, 98 bp, Homo sapiens
tgtgtctcgggtcctcatccacgcaggaggctgcgccaacgtggttgatcatcccatcctctattcctatttccgaagctcctgctcatggagagttc

SEQ ID NO: 589478 - DNA, 75 bp, Homo sapiens
ccatcgcgttttgccagcgataatacgcctcagtgctggacatcagcatgctctcctcccaggatgtggttcgta

SEQ ID NO: 589479 - DNA, 100 bp, Homo sapiens
cggaggactatgagctgctgcagattctctcagatgaccggagttactctctggtgacccacatcccggctggtgcccgagacatccagattgtagagag

SEQ ID NO: 589480 - DNA, 89 bp, Homo sapiens
gagcatctgggccgagaccattccgtatggagagccggagaaaaaatgatccctatgctcttgcatccctggtgtcctttgaagttaag

SEQ ID NO: 589481 - DNA, 97 bp, Homo sapiens
gagaactcaggacgtcaaatatatagaaatgaagagggttgcagaagctaaggaagaatcctgtaagtacaatcccaagtattctgttgctaatgac

SEQ ID NO: 589482 - DNA, 98 bp, Homo sapiens
gggcacagcatgcggaaaatactacagagtgtgcacactggctatcattgatccaggtgactgctgaggttggaaagctcttgggtgaagagaaggtg

SEQ ID NO: 589483 - DNA, 98 bp, Homo sapiens
tgagaaaagcgagcctcttctgataactcaggatttacttgaaacaaaaggagaccctaatcttcaggcacttcaggtggcaagacagctccttcttc

SEQ ID NO: 589484 - DNA, 100 bp, Homo sapiens
tggcaggaacctcggcctcagagccaaaatgaagtttaatccctttgtgacttccgaccgaagcaagaatcgcaaaaggcatttcaatgcaccttcccac

SEQ ID NO: 589485 - DNA, 83 bp, Homo sapiens
gcgacccagccagccagcaacctggaccggagcagagggagagccgggctcggcgaggccctcgagggcccagcgccttcatc

SEQ ID NO: 589486 - DNA, 75 bp, Homo sapiens
ttgaatctggtgttatcaacttaaaagatgccacctctaagggagaagagaagtttacctttattgagaaatgta

SEQ ID NO: 589487 - DNA, 98 bp, Homo sapiens
ggttccaaagggggagatatcatgctctggaattttggcatcaaggacaaacccaccttcatcaaaggggtgaaatgacaatggatgctctgttggct

SEQ ID NO: 589488 - DNA, 90 bp, Homo sapiens
gttgaaccctcggatacgatagaaaatgtaaaggccaagatccaggataaggaaggggccttgggcaaagcacccagtaaagtgactgat

SEQ ID NO: 589489 - DNA, 74 bp, Homo sapiens
aaagttcagtgggaagcatgtcgtctttatcgctcaggttcgagaacttgtcttggacaattgcaaatcaaatg

SEQ ID NO: 589490 - DNA, 100 bp, Homo sapiens
ctataattagatactttcctgtgtttgaaaagaaattcctgaattgcctgtatttcatctaaattcttctggcacaaatactgaagattctgaacttacc

SEQ ID NO: 589491 - DNA, 83 bp, Homo sapiens
ccgtcccgaccctggccgccccgagcggagcctggaggcgtccgacctccgatcatgaacgggcccctgcacccgcggcccct

SEQ ID NO: 589492 - DNA, 100 bp, Homo sapiens
aaatgtgagtggaagccatgaggccaaaggcagttgtattgagatgtggtctgaagctattaaaatcctgaaaggggagtatgctgtccgggcaatcaag

SEQ ID NO: 589493 - DNA, 98 bp, Homo sapiens
gaaaactgggctgaaggaatgctggcagacaaaataggaatatttccaatttcatatgttgagcccaataggggcacaaaacgtccccgggatgatga

SEQ ID NO: 589494 - DNA, 90 bp, Homo sapiens
gattattatggtaacaagcgactggaattggcaggacaggagatcatgaatcagacagataaaaatcaacaagaaatcccatcatacctt

SEQ ID NO: 589495 - DNA, 50 bp, Homo sapiens
ctcctgaagcaacatctggttctacagaacatccatgatagcagtcttct

SEQ ID NO: 589496 - DNA, 100 bp, Homo sapiens
gtcactccacacaccatgaatctactaaagcagcacctggagattactggtgggcaggtctgcaaatgaagagtccagaaaagaagcgaaggaagtcaaa

SEQ ID NO: 589497 - DNA, 76 bp, Homo sapiens
ggcaagctacaataatggggccaatcagacactcctctaatttacaaagcagtgcccagctggtttgtgcgagtgg

SEQ ID NO: 589498 - DNA, 100 bp, Homo sapiens
ataaacttattggtgtccactgtacccatggtttaaacaggactggctacctcatttgcaggtttggaaagaaatcccggcctgcaatgtatgatgtgag

SEQ ID NO: 589499 - DNA, 98 bp, Homo sapiens
atggggcgcctggcctcgaggccgctgctgctggcgctcctgtcgttgggtacctgaaagaattccgcacagagcagtgcccactctttgtgcaacac

SEQ ID NO: 589500 - DNA, 96 bp, Homo sapiens
acaccagcgtgccaaaagagcagtctcacatgaagaccaatttttacgtctagatttccatgcccatggaagtgtatcctactcagtacatgtatc

SEQ ID NO: 589501 - DNA, 50 bp, Homo sapiens
tttctgcttcctccagagccagccaaaggcacgtccctgacagctgaaaa

SEQ ID NO: 589502 - DNA, 100 bp, Homo sapiens
aattagcagaagacattatgtcagccccatggctgggggttatggagtgatgggtgacgatggttctattgattatactgttcacgaagcctggaatgaa

SEQ ID NO: 589503 - DNA, 98 bp, Homo sapiens
ttgaactctcagtggtcctacctggggatattatcaaatctactactgttcatggcaggttttgacacaagggcgcatatcttcaaagcacctagtac

SEQ ID NO: 589504 - DNA, 120 bp, Homo sapiens
tttaaaaggtaatgaagactacatcaatgcgaactatataaatgaactgggaagtaacagccctccacagagaaactggaagggaattgctattgctctgctggtgattttagttgtatg

SEQ ID NO: 589505 - DNA, 73 bp, Homo sapiens
gggacaatatttcagacggagcaaaggaaccactgtctcaattcctaagaggaagccatttcttcccaggaaa

SEQ ID NO: 589506 - DNA, 100 bp, Homo sapiens
gtgagcgtcgcgggagcctcgggcaccatgagcgacgtggctattgtgaaggagggttggctgcacaaacgagcaccacaccccactctggccggagcac

SEQ ID NO: 589507 - DNA, 90 bp, Homo sapiens
agaaagcagaggttaatacaatccctggctttgatggagtagtcaaggatacagtagagaagatttgtataaaagaaataggaacaaagc

SEQ ID NO: 589508 - DNA, 100 bp, Homo sapiens
ggaattaaattttaatgaagatattctgtgtccacatggtgccactgattaatgaacttgaatcagcaatacatcagctgtacaaacagcgagcttcccg

SEQ ID NO: 589509 - DNA, 100 bp, Homo sapiens
ctttgcacaggaagctataagtgatcttcaaagctgctgcgggcattctatgtccccttcctgtcagatcagtatacagtgtacgtaaactacaccatcc

SEQ ID NO: 589510 - DNA, 75 bp, Homo sapiens
aacggctgggccagagcgtggttgctgaccagttgaaaggttcatcatgcctagtggcgtataagaagaccccgc

SEQ ID NO: 589511 - DNA, 74 bp, Homo sapiens
gcgggtggtataaaatggcggatttcgaagagttgagggtggatccataaagaacccagccaacccgcagaggg

SEQ ID NO: 589512 - DNA, 100 bp, Homo sapiens
ttcgaacttgtgcacccgttgcagtccttcagggccattcagcttctattacttccatacaggtttttcttgttagaaagaagaccggtcctgatgctgg

SEQ ID NO: 589513 - DNA, 102 bp, Homo sapiens
aaccatcacaaagttacctacgtgttagaaataaatctgatattgcaccttcacagcaacaagaataaatgatgtttctcaggcttctgaagaactctgaag

SEQ ID NO: 589514 - DNA, 101 bp, Homo sapiens
taggatttgttagaaaggagacccgactgcaactgctggattgctgcaaggctgagggacgagaacgaggttctcagaggcactgtgactgacttccctgg

SEQ ID NO: 589515 - DNA, 96 bp, Homo sapiens
aatcaatgttgaaaataaaagaaggacttctaaggcagaaagaaattgtaatcgatcgaaatgacagactttttcattgaatgatgaggacacagc

SEQ ID NO: 589516 - DNA, 82 bp, Homo sapiens
ccagcctgcggagcctgtggggcagccttaattttaaagaccccgaagcagtcagagctctgacgtgtactctcctaaggga

SEQ ID NO: 589517 - DNA, 75 bp, Homo sapiens
ggcggcggagactgcgggcccgtagctgggctctgcgagcattagtgaccagaaggatcccaaggatcgaatggt

SEQ ID NO: 589518 - DNA, 75 bp, Homo sapiens
ccagcgctgtcgtgctcctctactcgcttgcgcgatctctggcctcttcaactgcatcaccatccaccctctgaa

SEQ ID NO: 589519 - DNA, 82 bp, Homo sapiens
aaatgaagaaggaacgatctcgtaagaaggattcacgggagatacagatgacccaccaagaattactcagaaccctgtgatc

SEQ ID NO: 589520 - DNA, 100 bp, Homo sapiens
tcagtgttatatcctccaggaatactggccaggtggacccccaaaagtacaagggcatatttaacggattctcagttacacttaaagaggatggtgttcg

SEQ ID NO: 589521 - DNA, 100 bp, Homo sapiens
agagtggctggagcagcacaaggacaagataaggatgacattcggctgctgccgtcagcattgggtgtgaagaagagaaaacgaggacccaagaagcaga

SEQ ID NO: 589522 - DNA, 75 bp, Homo sapiens
atgtgcaaagcaggcttcgaggccgttgagaatggcaccgtctgccgaggtcacaaggcacttaaagcattgttg

SEQ ID NO: 589523 - DNA, 89 bp, Homo sapiens
ccgcccaccagttcgcccgtccccctgccccgttcacaatgggtgagcccctccagactccgaataggagatcaagagtttgattcatt

SEQ ID NO: 589524 - DNA, 75 bp, Homo sapiens
taaaattgcaagaacagttacccaaaaactgggattttctaaaggtaaaactctgctggcacaaaccctagctaa

SEQ ID NO: 589525 - DNA, 83 bp, Homo sapiens
atctgcctccctgccccagcccatcctctctaaccaaggctgtgtgggtatccccccttctactccaaccacggccttgccat

SEQ ID NO: 589526 - DNA, 75 bp, Homo sapiens
gagaacttaagactgacaatctacctaatcaagctgtctctcaggcagctgcagagcttcaacagtactgtatgc

SEQ ID NO: 589527 - DNA, 100 bp, Homo sapiens
gaggccagatgcagatctgaagacctattttactgataagaaaacacatctttacacactaagtgaccctggcagcaaccccaacaaacgccagaggcag

SEQ ID NO: 589528 - DNA, 101 bp, Homo sapiens
cctgaatcctgaattttccttgatggtcaaaagattaagcttactgaaacaaatgcaggtatcaagtgcttggactccatgtgctgtttcccggaaggaga

SEQ ID NO: 589529 - DNA, 100 bp, Homo sapiens
ggggtgaccctgtatgagctgctgacgcactgtgactccagccagagcccccccacgtgggctcgggatgagtttgaaggcctcttcaagcagccagcag

SEQ ID NO: 589530 - DNA, 80 bp, Homo sapiens
ccccagcccactgggctacgcaggttcgagaacttgtcttggacaattgcaaatcaaatgatggaaaaattgagggctta

SEQ ID NO: 589531 - DNA, 90 bp, Homo sapiens
aaacagggccgtgccgcagatgcccaccggaatggagaaggaagaggagtcgtatcaccttttgccatgatagcatttctttcattggac

SEQ ID NO: 589532 - DNA, 87 bp, Homo sapiens
ggagtcggggacccaggagtttcctgtgtccagcgctgccggagccgcctgaggttatatgtcaccacacccatctccattaggagc

SEQ ID NO: 589533 - DNA, 100 bp, Homo sapiens
gtcctgttacttccaagtcatcaccagaaaggtgaaaagccatacaagtgtacctgggaaggctgcgactggaggttcgcgcgatcggatgagctgaccc

SEQ ID NO: 589534 - DNA, 75 bp, Homo sapiens
aaggagctcagtgacctcctggacttcagcatgatgtgaagttcatttccaatccgccctccatggtggcagcgg

SEQ ID NO: 589535 - DNA, 80 bp, Homo sapiens
aggactgcgcccccgggagcgggcgcccagagacaagcttaccattgttcagaagcaaacagtttgcagtaaaaagaaga

SEQ ID NO: 589536 - DNA, 100 bp, Homo sapiens
cgcaagactgtgggcgtggagccggcagccgacggcaaaggtgtcgtggtggtcattaagcggagatccggttagcattgaagaacgtctgggagcaatg

SEQ ID NO: 589537 - DNA, 123 bp, Homo sapiens
cagagcggagcagctgggcacggcgtccagggcagctagggcctgggccgcggttcggccgcgccggccggcaaggcagtttccccggcatgaaccagagtggacttatggcttccagctctc

SEQ ID NO: 589538 - DNA, 100 bp, Homo sapiens
ggaccctgtacgtgtacatcatttacggcatgtacttctgcatgaacatctccagccagggcatcaagcagatcctgccacaccagatgaccacggcagg

SEQ ID NO: 589539 - DNA, 82 bp, Homo sapiens
ctaacatgtcagcgttattgtaatgcaattgcttctgcaggaagcctttttggtggcatggtcctcaagaagttcctaaaag

SEQ ID NO: 589540 - DNA, 80 bp, Homo sapiens
atcctagaatcaaggatttcagcaacaatgcctctgttcaaactcccaggcatcagttttgaatgtcaaggaatccaaag

SEQ ID NO: 589541 - DNA, 75 bp, Homo sapiens
gggggagcggggccttccacaccccctccgtgggtgtgtgtccacaggtcctggctaccctgggaagagacaaga

SEQ ID NO: 589542 - DNA, 90 bp, Homo sapiens
cctgacacttggccccatctgcactaccagctgatagccagcatgagcctgccagccagagctctgtgacgatgacccgccagagatccc

SEQ ID NO: 589543 - DNA, 75 bp, Homo sapiens
gctaaagcagcgtgcgttcagccctgggccattcaaactcctccccacgacactctgaagcagcgacggcacagc

SEQ ID NO: 589544 - DNA, 111 bp, Homo sapiens
cgcgcctgctgccgggttgcgctccgtgcacctcttgcggacctgcctagagctggaacgttacctccagagcgagccctgctatgtttcagcctcagaaatcaaatttga

SEQ ID NO: 589545 - DNA, 98 bp, Homo sapiens
ctctacagaggacggctgtgtcgcagcctctcgggatgacaccactctgaatgcactgaacacagcaacagcattattgagaaaagcccttacagaag

SEQ ID NO: 589546 - DNA, 89 bp, Homo sapiens
gagctcagttggttgatatgaaacgactggaggtggagcccagtgacaccatcgaaaatgtgaaggccaagatccaagataaagaaggc

SEQ ID NO: 589547 - DNA, 100 bp, Homo sapiens
gcggcagcggcggccgggcacggcgcgaggttgatgagctgcggagccgcatccgggaattggaggagagggatcgaagggagagcaagaagatcgcgga

SEQ ID NO: 589548 - DNA, 80 bp, Homo sapiens
agtttgtagcctattggaggaaaacacaccaaggaggactcagagagagtaatgataattaccggaccaaacatgggtgg

SEQ ID NO: 589549 - DNA, 74 bp, Homo sapiens
cagaacagttaatcctcaatttaagcctgatctaacccctagaaacagcaatcccacagagtattgatgaggaa

SEQ ID NO: 589550 - DNA, 100 bp, Homo sapiens
gtttgttcaggaaccaccagtgacagatctataggatcgggtgaaccaccaaccggcaattgaaagctgcacagcctgaaattacctttattcaattaat

SEQ ID NO: 589551 - DNA, 76 bp, Homo sapiens
ccgccatccgggagaagctggcctgggccaagtacgcctgcctcacaccttgcgatgcgccaacatcaccatcatt

SEQ ID NO: 589552 - DNA, 50 bp, Homo sapiens
tgtcgcaaagcttctttagtgaatgagaaagatcagtctaaagaaaagga

SEQ ID NO: 589553 - DNA, 103 bp, Homo sapiens
gaatcacaacacgcattggaaaagtgcattgcttattctccaccttttggtgattatgcacagatggctatatgcatccagttcatcctcatgtagttagaag

SEQ ID NO: 589554 - DNA, 98 bp, Homo sapiens
gtcctgttccgcttctccgaggacgccttcaactccacttttatctccaccataggtgagaagccctaccactgcaactgggacggctgcggctggaa

SEQ ID NO: 589555 - DNA, 98 bp, Homo sapiens
aagaaagaaatattttgttatatgggcttctcatatcttacccacagctttcacttgacagggccactgggcaaggaactgagggtggcatccagcca

SEQ ID NO: 589556 - DNA, 48 bp, Homo sapiens
agaaaactggtcaaggaagctagccagtggcagccccagctgcagcag

SEQ ID NO: 589557 - DNA, 90 bp, Homo sapiens
ttccaagctctactgtgacttcagagacactgccaagcagccttagccctagtgtagagggactgatgcccttggccagacgcaccccca

SEQ ID NO: 589558 - DNA, 82 bp, Homo sapiens
tgagctttcttcttggacacctaatacccagggtcctccagttccagggtctccctccactgctgtagtaacccgggtccgg

SEQ ID NO: 589559 - DNA, 100 bp, Homo sapiens
agggaattcagcctcagtgatgtccatgaggattcaggagcagttccagaaaaatcccgacagttacaatggtgctgtccgagagaactacacctggtca

SEQ ID NO: 589560 - DNA, 101 bp, Homo sapiens
ccaggagaagccgcccaaagaactgtgttcttggggaagatcccgactaagccattttccagtggcacctcttccatcatgagttcctgaggcagtccgat

SEQ ID NO: 589561 - DNA, 100 bp, Homo sapiens
caagatgcagtctcatgggcagtggtttgaggagcttggtttgatccgcaaacctgcctcgttcatgaccagcatctgcgatgagcgaggacaggagctc

SEQ ID NO: 589562 - DNA, 100 bp, Homo sapiens
gccacagagaattaagtaactggtcgaggttgtatcagtaagaagggagcacggaacagattcaagctcaggtatattgaagcaagtcaaagattacatt

SEQ ID NO: 589563 - DNA, 87 bp, Homo sapiens
ctccagggaaaggatgacatatttttggacctgaaacagaaattctggaacacctatatggcagaagctcctcctggggtagagaca

SEQ ID NO: 589564 - DNA, 88 bp, Homo sapiens
agtctccgcgtcccgctcgctgggagagaggtacctctccttttccctctccctttccctaagcataagcttaaatcgtctcagaagg

SEQ ID NO: 589565 - DNA, 98 bp, Homo sapiens
gaaagaaacccttgctgtaaattatgagaaagaagaagaattcctcactaatgagctctccagaaaattgatgcagcggttgttgacttgaatgggag

SEQ ID NO: 589566 - DNA, 90 bp, Homo sapiens
gagaaaccggaggcagatggaggcaggaggaaaggcaggagccagtccgtgcaggcacactcagcgctaagccaaaggccgcccatgctg

SEQ ID NO: 589567 - DNA, 90 bp, Homo sapiens
gacaaagggagcaacttcccctggacagaaggcaaagttggtgtatgaagaagggatgtgtatggggtgttgcttacagattgccagtag

SEQ ID NO: 589568 - DNA, 96 bp, Homo sapiens
agtaaactcagtgcgcgatcttaagcgcgcatctgtggaaacaattaaaaacaccatctgattcagatcacaagaagaagaaaaagaaaaaagaag

SEQ ID NO: 589569 - DNA, 100 bp, Homo sapiens
cttgatctcccaggctcaagcaatcttcccactacagcctccgaggcagctgagactacagggccctacccctgtgggaaacagaccctggaacgcagga

SEQ ID NO: 589570 - DNA, 75 bp, Homo sapiens
cgacgaggagggctgcctctcgggacgctgtgcagagctgcaagtccgtatcactgaggctgtggccacagccac

SEQ ID NO: 589571 - DNA, 101 bp, Homo sapiens
ccagtggcttcgtgaagcccaagctggtatttgagaacacagtggctacggtgatggctctgcgcagggagaagatgttcgtggaagaggtgtccacaggc

SEQ ID NO: 589572 - DNA, 75 bp, Homo sapiens
ctgacagctgaggaagtctgcatccacattgcacataaagttgatcctcccaagaaggtgaccacagtgattcaa

SEQ ID NO: 589573 - DNA, 90 bp, Homo sapiens
ggtctgtggtgatgatgaaaaccctagcgcctattatagtgatggagccaagaaccatggggtagtcatgccagatgccaataaggaaaa

SEQ ID NO: 589574 - DNA, 75 bp, Homo sapiens
tgataagaaatgttctcgacagcaagcttcaaggttactgactttttatgatgtttggtggctatgagactatag

SEQ ID NO: 589575 - DNA, 75 bp, Homo sapiens
tgcagatttctgagctttcatttcctgcctgtaacacggaggagagacttcagcatgcaaaccttcatctgttcg

SEQ ID NO: 589576 - DNA, 107 bp, Homo sapiens
cggccagttttgaaatcgacacacaaagaatagagttgagcctgtgggacacttcggggagtgcatccgccccaacccttttccccctcgtctcctgtgagaattcc

SEQ ID NO: 589577 - DNA, 75 bp, Homo sapiens
cgcgctactctctctttctggcctggaggctatccagcagacgagttgtactgctgtcacaggaaatggacgctg

SEQ ID NO: 589578 - DNA, 90 bp, Homo sapiens
atgccattattttgttcctttttatggctgagtagtattccgagtgctggacccaaaggagacaacatttatgaatggaggtcaactata

SEQ ID NO: 589579 - DNA, 75 bp, Homo sapiens
gcagacctcccaagtcgactggaaggaccattttctgtactgtgccaagtttggtgcacctcgatttggaggaag

SEQ ID NO: 589580 - DNA, 100 bp, Homo sapiens
gctgaagatctggaagacgcgctcctgcgccggccggagcctcaacagaaagctcctttagttcctcctcctccaccgccaccaccaccaccaccgccac

SEQ ID NO: 589581 - DNA, 75 bp, Homo sapiens
ggagcaccgccgaggactccagcacaccgaggccctgccaggagcccggaagtgggtccgcacgagacagaatag

SEQ ID NO: 589582 - DNA, 75 bp, Homo sapiens
accaccaatgggaacatgcacagaaatccaatcttttttgacatatgcatatagaagttcctagacttcagtgct

SEQ ID NO: 589583 - DNA, 100 bp, Homo sapiens
attcgatccccagtccctccctcccagttctaggcgccccaaaccgctccaggcctgagaggccacggcgtatgcctccgaggacggggtcctgaccgag

SEQ ID NO: 589584 - DNA, 75 bp, Homo sapiens
cagcactggactcatggaggctgagcatttattcaggccaaatttgagtttcatcatggtgactatgaaaaacag

SEQ ID NO: 589585 - DNA, 100 bp, Homo sapiens
gatgaaaactacttcaactaaaagccaaccacttgaacaaggttcaaaaccagttaaagtaatatatattaattcaccacttccccaaaagaaaatgact

SEQ ID NO: 589586 - DNA, 82 bp, Homo sapiens
agcgcgaacagagactgcgcaaattccgggagctgcacctgatgcggcaagcacctcaaatttgccatgctggctggtggaa

SEQ ID NO: 589587 - DNA, 100 bp, Homo sapiens
aagaaatgatgatggaaatgaagtataataccaagaaagccccacttggaaggagatggataaagcagatgtttattggggcattccttatcccagctat

SEQ ID NO: 589588 - DNA, 76 bp, Homo sapiens
ctttgaactactgccggagcttctgccaggtttagaaacatcaactggaatcaatttgcatttgaaaattagatca

SEQ ID NO: 589589 - DNA, 90 bp, Homo sapiens
gccggagcagcgccggagatgggatacactctgtgcagttttagagagagacacactcagtattcgagaaagtcgactttttggagctgt

SEQ ID NO: 589590 - DNA, 90 bp, Homo sapiens
ccaactttgttactgtgagaaagggtcttcattcattcaagatggcatttgttaagcacctactccagagactgctgctactttgaaacg

SEQ ID NO: 589591 - DNA, 99 bp, Homo sapiens
cgcgtgtcctcggagcgcggtccctgtattggtctcctgctcctagaggtgtggatgaggtcaccattgtcaacattttgaccaaccgcagcaatgcac

SEQ ID NO: 589592 - DNA, 49 bp, Homo sapiens
gaaaaacctgtatgtggaaccacctctgcagagcccttgctccgtgagc

SEQ ID NO: 589593 - DNA, 100 bp, Homo sapiens
agataatgatttttccagaaggaacttgtacaaacaggacctgcctaattaccttcaaacctggattctgtaaagcctggtgcccatctaacagtgaaga

SEQ ID NO: 589594 - DNA, 75 bp, Homo sapiens
caagaacagtaaagttggaacacagcagagggtgtgtaataaaatacaggttcgttccaccagtcataaaccaga

SEQ ID NO: 589595 - DNA, 100 bp, Homo sapiens
cctccatctatcagttccattctcagttcttcctcccagagctgcagcggcgcctggacgactggtgttcgaaatccgcaccactgatgacctcactgag

SEQ ID NO: 589596 - DNA, 100 bp, Homo sapiens
gaccgcaatctctgccagcaccttgggaagagaaagaaaatgccgaaggcactcagacaggtcgtcacgctgtggtacagagcacccgaagtcttgctcc

SEQ ID NO: 589597 - DNA, 100 bp, Homo sapiens
ccgcgcccgccgcgcggagcgccccttcgcgtcccctgcaccatgagctggggcaccgagctctggttcatggcctcccacgggaacgacgccgcgagag

SEQ ID NO: 589598 - DNA, 100 bp, Homo sapiens
gcgctggcgggcgttggcgtaggaggagtcatggcttcgaaagaactaccttattgattttaaacaccattttatgagtcgttttccatatgtcttaaaa

SEQ ID NO: 589599 - DNA, 101 bp, Homo sapiens
ctatgctgggacattgctgctacttctggcaggtgtggcctgcctccgagtgtggcccagagttgctcagaattggagcagagcctgagacgtatctgcag

SEQ ID NO: 589600 - DNA, 75 bp, Homo sapiens
taccaccacgggtggttcgtcatgattgcaactgggtgggtcaaaggctgttcggctcttgaatcccagcgatga

SEQ ID NO: 589601 - DNA, 50 bp, Homo sapiens
tctcaggcgtggtccgagagggacggcaacgcggtaaaaatattgcttcg

SEQ ID NO: 589602 - DNA, 75 bp, Homo sapiens
tgcagtgtggctctggatagcaccttatggacagggtcctcactgagcagcgagtcgtcccccgtgtcctctccg

SEQ ID NO: 589603 - DNA, 83 bp, Homo sapiens
ctggagcgcaccatcaacctcctggtccgacccccagtggcactaacgtgggatcctcagggcgctctcccagcaaagcagtg

SEQ ID NO: 589604 - DNA, 95 bp, Homo sapiens
tctgtctgctcctggcatgccctgccacagccactgattgacgcgtcatgccttacgtgggaaggacaacagttccaggggaaagctgccattgt

SEQ ID NO: 589605 - DNA, 74 bp, Homo sapiens
ttggaactggcttagcgcacccatcccaccttcccgcaccctgggaccggattcaagatgaccaacgaagaacc

SEQ ID NO: 589606 - DNA, 75 bp, Homo sapiens
aggaaccagctcgggggccaactctgaggagtccactgcagcaggttcaggcagaggtgaagaagatgtggagtc

SEQ ID NO: 589607 - DNA, 75 bp, Homo sapiens
ctctcttccaaatcctgtagccataaatgtctggctaatggcatttacaggaggagggctctgagagatttcatt

SEQ ID NO: 589608 - DNA, 50 bp, Homo sapiens
aatacccgcagcatttccaacatgtagagacggggttttaccgtgttagc

SEQ ID NO: 589609 - DNA, 101 bp, Homo sapiens
tagtagcagcggggcacagaacagcgacagtacaaagaagactcttgtcacactaattgccaacaacaatggtgactctgacatcattagaagcatgccag

SEQ ID NO: 589610 - DNA, 100 bp, Homo sapiens
actgacggaggaaggcattgcccagatataccaactgattgagtatctacacaaaagtatccgttacagcactgatgtgagtgtagatgaagtaaaagct

SEQ ID NO: 589611 - DNA, 99 bp, Homo sapiens
agaggcagagctgtgggcggtggagtctagacttccccaaggcgtgtacccagatcacttatttgagacatagtcctcaagtggaattatgaaatcaaa

SEQ ID NO: 589612 - DNA, 100 bp, Homo sapiens
gcctgcggcgcctgggcgctctgaggggcatggtctagtggcccagtcaggacgcggaaacactccctggaggttctgacccactccctctcagcctccg

SEQ ID NO: 589613 - DNA, 97 bp, Homo sapiens
tgcagccggagacccggagaaaggaaggtgggtgcggctgctatttggacgagagttccccctgcaggaccttctggtggtctgggatgccttgttt

SEQ ID NO: 589614 - DNA, 98 bp, Homo sapiens
cgatttgttgtaagaaccgccggggacgaaacaataaagaccggaagctgagtttttatccttctttctacaacttcaacaggctgcactggaggtgt

SEQ ID NO: 589615 - DNA, 75 bp, Homo sapiens
taacaatttacgcgccgtgtaactgtgaatctttcaaagtataccaacagatgttttaaagattgtgtattctgt

SEQ ID NO: 589616 - DNA, 102 bp, Homo sapiens
cacctgaagatttattagatggttgtcgggatgcagactcatctgagcgtatcattgctcccatgcgctggggcttggtcccttcttggttcaaagaaagtg

SEQ ID NO: 589617 - DNA, 95 bp, Homo sapiens
cagactcatgtagcatctgccccaggctggacaaatcaggacgcaaaccctcgtcagctttggaacacaaatatttgccagtgaagaaaacattc

SEQ ID NO: 589618 - DNA, 100 bp, Homo sapiens
ctcgcggggggtgcgcagggcagcagcagccgctcttctaaaacattcaaaccaaagaagaatatccctgaaggatctcatcagtatgaactcttaaaac

SEQ ID NO: 589619 - DNA, 99 bp, Homo sapiens
tcgcatgcgccagctggccaaccagacggtgggcaggatagctagcggccaggagaaatacagtggaaaatgcaaaacaacgaaattataaagcctgcc

SEQ ID NO: 589620 - DNA, 83 bp, Homo sapiens
acctcctccaagaccgtgctggtctttctcaacctcatcttctgggttgtgaccgagattcccgacgagagagactgagggga

SEQ ID NO: 589621 - DNA, 90 bp, Homo sapiens
aatgctaaggaagctgtggcaagaggatattgacttgaaggcactggggtttgatatggcagaaggtgtgaatgagccttgtttcccggg

SEQ ID NO: 589622 - DNA, 100 bp, Homo sapiens
cgagaagatgatgtgtgcaggcatcccggaagggggtgtggacacctgccagaacacttcagttatggaagatcaaaatgaagatgagtccccaaagaaa

SEQ ID NO: 589623 - DNA, 98 bp, Homo sapiens
gtacctggagtccgtggatgaaggtggggtggcgtggcaagccggactaaggaccggggacttcttgattgaggatcctcagtcttccacaatgaacc

SEQ ID NO: 589624 - DNA, 82 bp, Homo sapiens
caaaacaaacgctattcctctcaccccccttttgactggacaaattttggagagaattgccacagaatttaatcagttacag

SEQ ID NO: 589625 - DNA, 90 bp, Homo sapiens
cgggaacccttgccgctgctgtcctgcgaccccaagcaggtggaatgaggtaccatctactgtctccagaggaccgagaagaacttgtag

SEQ ID NO: 589626 - DNA, 75 bp, Homo sapiens
gtgctggtgtctgagtggatggggacctgcctgctgccttagattgtaagcaaaagaaatcaaggtcaagatctg

SEQ ID NO: 589627 - DNA, 75 bp, Homo sapiens
gatcactggtttcgtggcctgaccaaggacctccaaggctctgcagagggacctggagctgcaggcggcctccag

SEQ ID NO: 589628 - DNA, 91 bp, Homo sapiens
agaaggtgggcgttatcttccgactgatccagctggtggtcctggtctacgtcatcgggttcccaacaaggctacgcagaagaaccccctt

SEQ ID NO: 589629 - DNA, 75 bp, Homo sapiens
gtttccttataagaatcttccaattgaggatatcaccaactccacattggatgagtctgaatgtacttcagatga

SEQ ID NO: 589630 - DNA, 85 bp, Homo sapiens
caacctgccccatgcagtgacctgtgatgttaaattcaaaaactacctcatccccaaggaaggaaaatcacctcggcagtgtttg

SEQ ID NO: 589631 - DNA, 98 bp, Homo sapiens
catcacgcccatcaccactaccaccacgggtggttcgtcatgattgcaactgggtgggtcaaaggtacactgatgctgaagtactatgagccttcgga

SEQ ID NO: 589632 - DNA, 98 bp, Homo sapiens
ctctcaataccttgggcccagtcatgaagatggaacctctgaataacctccaggatgcctttgtggaactgtacggccccagcatgcggcctctgttt

SEQ ID NO: 589633 - DNA, 124 bp, Homo sapiens
aaaatccacaaaatattggtgaccatatgttgacctgctcattatctccaaagatagacttaccagagaagaagcagactacagtgcctttggtacagacacgctaataaagaagaagaatgtt

SEQ ID NO: 589634 - DNA, 100 bp, Homo sapiens
gggtattctacgcgcacactgccagagctcagcttcctttctggaacaactggacccaaagagatgcatagctctcttaggtcccttcgtaatagtgcag

SEQ ID NO: 589635 - DNA, 100 bp, Homo sapiens
gcgactcagagattgggggcatcaccattgcccatgtcatccggggccaggatggctccctgtggcggtacgtgcgcgccagcatgacgctgtcgggcta

SEQ ID NO: 589636 - DNA, 101 bp, Homo sapiens
tctgcaagtagtggaacaaatgtagtttttacaaccgaagataacatatttggaaccgttatttttgctggatgcgtgcagtatggtgaatatgttaataa

SEQ ID NO: 589637 - DNA, 74 bp, Homo sapiens
gtggcttttgtgaagcacagcacggtactggagaacacggatgttacagatgtagagctaaaacgactgaagga

SEQ ID NO: 589638 - DNA, 100 bp, Homo sapiens
aagctcatcttgccttatcaagtcagtatgggaatcctttaaataaatatatcagacattatgaaggattatcttacaatgtggattcattacaccaaaa

SEQ ID NO: 589639 - DNA, 98 bp, Homo sapiens
gtcatgcaggcaagatggcggaaggatagatgattatgaggaagaaccaatattaaaaccaggatgtaaagagtatttttggttgttatgcaaattag

SEQ ID NO: 589640 - DNA, 100 bp, Homo sapiens
gtgctggacacgctgaccaagggcctccccatggccacccatggaccagtcggcattcacttcctcccttctgcggcccataaaagccctgggttcaggc

SEQ ID NO: 589641 - DNA, 75 bp, Homo sapiens
ggcttccagcccaacacccaagttaaggtatgatgccgccaccacctatgggcatgatgccgccgccgccgccgc

SEQ ID NO: 589642 - DNA, 75 bp, Homo sapiens
cttggtttcgggatctcggtgctgcagacggcgagacctcctgcacagattcacaatgacatcctttcaagaagt

SEQ ID NO: 589643 - DNA, 95 bp, Homo sapiens
aatggacaatctttccttctgtcaacggcaggggcaggcctagtttgactctgacagtcctcccactaaggagcggcattgcccccgaatgtcca

SEQ ID NO: 589644 - DNA, 95 bp, Homo sapiens
caacattacagaccggtggatcctgtccttcatgcagtctctcattggcttctttgagactgaaatggcaggtcctcctggcactggaaaaacat

SEQ ID NO: 589645 - DNA, 73 bp, Homo sapiens
gtaacaccgttcacagagctagccggacgtcctccgactcaaggtcctttacgacagacctttacccacaacc

SEQ ID NO: 589646 - DNA, 107 bp, Homo sapiens
taaccaaagccagcctggcatactttgaagatcgtcatgggaatcccctactttgaaactagtgctgccaatgggacaaacataagccaagcaattgagatgcttct

SEQ ID NO: 589647 - DNA, 100 bp, Homo sapiens
gtcgcggaggcttgtcattctgacccggggattcctcacagcgtctggcagactgcttcagctgccataacaaaatatcacagactggatggattaaaca

SEQ ID NO: 589648 - DNA, 100 bp, Homo sapiens
cgagcaccgggccctctgcgacctggggccctgggtgaagtgctccgccgcccttgcctccagaacaccttccaccatgaccacctcagcaagttcccac

SEQ ID NO: 589649 - DNA, 74 bp, Homo sapiens
ctcaagtggaagagcttgccgtcaaatatggtgttatctgaaaaggttagtcagctgatggaatggactaacaa

SEQ ID NO: 589650 - DNA, 50 bp, Homo sapiens
tgtgaaggtactccagtgccagaaagagatcagtgtgcgtgtgaccacca

SEQ ID NO: 589651 - DNA, 95 bp, Homo sapiens
acacacttcccagaggattcttggagatcctaagtgtgaacgtgaagtccccagccctgctgctgagccagttgctgccctacatggagaacagg

SEQ ID NO: 589652 - DNA, 127 bp, Homo sapiens
caactgctcgggccgcgggctgcggacgctcggtcccgcgctgcgcatccccgcggacgccacagcgctgctgaaggtgatgtggccgccctcaaccgacgcatccagctcgttgaggaggagttgg

SEQ ID NO: 589653 - DNA, 80 bp, Homo sapiens
tacagagcggcctgcgccagcgagagcaggccgggctctcgccatgggtcactgtcgcctctgccacgggaagttttcct

SEQ ID NO: 589654 - DNA, 98 bp, Homo sapiens
gtcctggaattacttcaatcaaaaacccaaacctttcgggtgaccgtgatcttgttcgtctttttttgcgatcaccagatgaagaagatctagaacga

SEQ ID NO: 589655 - DNA, 100 bp, Homo sapiens
agctgcagtctttgtgggacaaggcgaggaaacgagacctctttcgttccttctagaaggtctggaggacgtagagttattgaaaatgcagatggttctg

SEQ ID NO: 589656 - DNA, 100 bp, Homo sapiens
tgtgccaagatccggacctaatatatatgaactcaggtcttaccaactccgacaaattcaacacccaacagcttccttaatagcaaaggtagcaacagcc

SEQ ID NO: 589657 - DNA, 51 bp, Homo sapiens
cctctggagtagctgggactacagattgttcctgcctgattcataaacatc

SEQ ID NO: 589658 - DNA, 100 bp, Homo sapiens
ccggggacgagggcgcgggcgaggatttggtggcgccaaccatggaggctacatgaatgccggtgcgggagatggaggcagagctggaggacgagaggaa

SEQ ID NO: 589659 - DNA, 100 bp, Homo sapiens
ctgaggcggcgagagatggtcaggtctggagctcgaccgggccagatggcccactgcgtgaccttggttcagctgtccatttcctgtgaccatctcattg

SEQ ID NO: 589660 - DNA, 100 bp, Homo sapiens
atgtcagtgaagtatcagaaagcagtgtcagcaacacagaggaagtgccagggtctctgtgtctcagaaagctcatgctcgcctgatgtttcgtgatact

SEQ ID NO: 589661 - DNA, 90 bp, Homo sapiens
ctcctgggtgccgtggcatgtcgatttgtccttcactacaggtcccagtgtacctttctccatttttgatgagtttcttctttcagaaaa

SEQ ID NO: 589662 - DNA, 74 bp, Homo sapiens
agctggaagatggacgtactttgtctgactacaatattcaaaagggacgtccagatcggtgacatcgtcacagt

SEQ ID NO: 589663 - DNA, 83 bp, Homo sapiens
ctggaatttagcgctcgcccagctagccgcagtttccctgaaacctgggctcttgaagacgcatcactggagcagatggataa

SEQ ID NO: 589664 - DNA, 100 bp, Homo sapiens
gaaaactcagcagtgagacctacagtcaagcaaaggacctgggctctaatcaatcgtggggttaacctggatcccctgggcaagtggtcaaagactggac

SEQ ID NO: 589665 - DNA, 101 bp, Homo sapiens
tgagcgatgggaacatcaactcagatcgcatccaggagaaggtggactctattgatgacagccttgccttacacccagacaaaactctcgttgcaactggc

SEQ ID NO: 589666 - DNA, 50 bp, Homo sapiens
caaggacacggtctacaccgacttcgacgaaccgggagaagtacctgctg

SEQ ID NO: 589667 - DNA, 96 bp, Homo sapiens
actacctggcattgccttttgttgagaacacacgcaggacttgaaagatgttactaataatgtccactacgagaactatggaatcagaaaactggc

SEQ ID NO: 589668 - DNA, 80 bp, Homo sapiens
gtcgtggaagcaggactgcgccgcgtcttcctcaaggacttaaccaccaccatgtcgagcaaaagaacaaagaccaagac

SEQ ID NO: 589669 - DNA, 100 bp, Homo sapiens
cacgccatgaacctggaggccgtgaacacctacgaagtcctcctgttgcagttcgtcgcctgcagcttcgagaggagttggatcgatcttcttgtggaaa

SEQ ID NO: 589670 - DNA, 82 bp, Homo sapiens
ctgaactacttcctcggtggctgcgccggaggcctgactctgggagcacgcagtgtctcccagtctgctaaagccctaaggc

SEQ ID NO: 589671 - DNA, 75 bp, Homo sapiens
ctggaacttcatcatcatctacttcacaggaattgccatttaaatcgagctatagcagattatcttcgttcaaat

SEQ ID NO: 589672 - DNA, 76 bp, Homo sapiens
ggcaggaatcccaatttgcctccacttagtgagcggaagaatggtccatggctaatgaaacacagaaggttggtgc

SEQ ID NO: 589673 - DNA, 100 bp, Homo sapiens
ctcggactacgcgggatttcgcgcgtgtgtgtgtcagatgacaagattctgcagatcattacggaattgataaaaacagagaataactgaaactgaaatt

SEQ ID NO: 589674 - DNA, 97 bp, Homo sapiens
gccatcaacaacaccctcattgctttcttcattttgactacgataaaagccgacatcggcctggctgcctggggacgcaaggccctggacattgctg

SEQ ID NO: 589675 - DNA, 58 bp, Homo sapiens
cgtgtctgttgctgatgcctcaaaaagtgtgcagtaaaaggtccaggagttgggctgc

SEQ ID NO: 589676 - DNA, 110 bp, Homo sapiens
tcaagaacagtaaagttggaacacagcagagggtgtgtaataaaatacagctggtttgccatccacccggtcagcatgaacaacagtaaccatcttgtaaacagtgacaa

SEQ ID NO: 589677 - DNA, 100 bp, Homo sapiens
cgaatacacctcaatgtctctgacttaattcagtgcacaaatgagatgaatgtgaacatcccacagttggcagacagtttatttgaaagaactactaata

SEQ ID NO: 589678 - DNA, 101 bp, Homo sapiens
tgagaagctgatcactggttgttacaacattctggccaatcatgcagatcctaacaggtcagaatggcggcagtggagcatcgtcattcttcaggattgcc

SEQ ID NO: 589679 - DNA, 100 bp, Homo sapiens
acaccagccaggacatctgcgcagagaaacctacacagatgacttggattctcacttgcatttatcttcagctgctcctatttaatcctctcgtcaaaac

SEQ ID NO: 589680 - DNA, 151 bp, Homo sapiens
caacatgattgaccagaaccgtgatggcttcattgacaaggaggacctgcacgacatgctggcctcgctgggctgccccccggtgtggaccccacccaagtttcctcctccctgtcccctgagggcacactgaccgtggaggcccccatgc

SEQ ID NO: 589681 - DNA, 100 bp, Homo sapiens
ccaggagaagcatttacaataagaagagaagatggacagtttcagtgcattacagcattccatattggaagaagagatttctacacatgaaaaaaatgcc

SEQ ID NO: 589682 - DNA, 50 bp, Homo sapiens
gaatccaaaatccttcatttacaggttgaagctccattcataccaaagtt

SEQ ID NO: 589683 - DNA, 75 bp, Homo sapiens
atcaagcagaatgtgatttgcttgaagatatgagatgttaactcattccagcaaactacaaagtggattgatgat

SEQ ID NO: 589684 - DNA, 100 bp, Homo sapiens
tgaggccctggcagccttgcacgtgacggatggatagaatgacagaagatgctcttcgcttgaatctgttgaagcggagcttggacccagcagatgagcg

SEQ ID NO: 589685 - DNA, 83 bp, Homo sapiens
gtggaagcaggactgcgccgcgtcttcctcaaggagcatcagatccatgctgctgctgactcggagccccacagcttggcaca

SEQ ID NO: 589686 - DNA, 98 bp, Homo sapiens
agacattcttccaaaactgaaagatgtcaagagcagtctctccgaacagcaggatttcccaacggcagcttgggaaaaagacccagtggcagcttggg

SEQ ID NO: 589687 - DNA, 100 bp, Homo sapiens
agtccgggggttgctcggctcctgtgtgcagctaatggtcgtcgtcggcatcctcctggcctacctggcaggtacatccagacactgaaggaccacaggc

SEQ ID NO: 589688 - DNA, 95 bp, Homo sapiens
aagcctgcccagacggctcacctgtgcgggatggaacaaaagggacattagtcatgagtgccgagtgtgcggggtcacagaagtgggtctttctg

SEQ ID NO: 589689 - DNA, 89 bp, Homo sapiens
gggtccacgcaggcccaggccgccccgttccccgagctgtgcagtacgagtacagcttccgcacagagcagagcgcagccgccaggctc

SEQ ID NO: 589690 - DNA, 82 bp, Homo sapiens
acagtatccattagaagtgctttgtttgcatttaattgaatcaggtactctcatttacacatcccatctcatttcattctgc

SEQ ID NO: 589691 - DNA, 90 bp, Homo sapiens
ctgcgctcgcgcccggatccctcaggcacagaccccacaggctcctcggacactgggtccatcacctcctgccccatcatccactccaac

SEQ ID NO: 589692 - DNA, 75 bp, Homo sapiens
ctcgatccagcaccatggggaagcgggacaatcgggtgccaagctctactccaggaagtgaaaatgtgctgcctc

SEQ ID NO: 589693 - DNA, 100 bp, Homo sapiens
ccacatgtgggtactgcattcctaccggtgtgacagggtgtccgcaatgttgccagtgtctgtctgcagattggctacccaactgttgcatcagtacccc

SEQ ID NO: 589694 - DNA, 98 bp, Homo sapiens
tggaccttccggagcttctcagaagacagagggttttcttttgagacttcccaagtaagaagcggaagaggagccgctggaaccaagacacaatggaa

SEQ ID NO: 589695 - DNA, 74 bp, Homo sapiens
gccgcgccgccaccgtctgaactaggatgtcccgacatgaagctgccactgcagagccccgccatggaagacac

SEQ ID NO: 589696 - DNA, 89 bp, Homo sapiens
caccaacgggaagggccggcccgcctccctggccggggcgcagttcggaggttcagaggctgggaggcggcagaatgcagccagaggag

SEQ ID NO: 589697 - DNA, 80 bp, Homo sapiens
aatcacatgagagcagtagaaaatacgcttcacaagacggcaaatggatacatcttgttttttcatattacatctacaag

SEQ ID NO: 589698 - DNA, 122 bp, Homo sapiens
ctcgtccggtactcagacgctggcgggcgcagtttctcacgacgggccgagcctgccactacaatgcagatcttcgtgaagactctgactggtaagaccatcaccctcgaggttgagcccag

SEQ ID NO: 589699 - DNA, 100 bp, Homo sapiens
ctgaagtagcaaaggcaagaaggcaacgacgttccatctgtggaaggacctaccaaccagaaaacctcggatcaattctcagctggtggcacaacaagtg

SEQ ID NO: 589700 - DNA, 98 bp, Homo sapiens
cagaaggctcagcgagtttcagaatttacaccggaaactcagtgaggtggcagagtttgtggatgagcggccagaagaggtaaagcagatggaggcct

SEQ ID NO: 589701 - DNA, 83 bp, Homo sapiens
ctcctggctggtgcggacacaacccaatagcatatgaaacactctcagatgctaatagacgaaaagagtatgatacacttgga

SEQ ID NO: 589702 - DNA, 98 bp, Homo sapiens
ccctccacagatcgctctgcccatgtaccagcagcttcacaggagcgagaacccgagcagcgccatgagcaacactaccgtcgtccccagcactgcag

SEQ ID NO: 589703 - DNA, 82 bp, Homo sapiens
tctcttctcgccctggcggggaagcaattctgtggtgttcttggtcacacatttatggagtttctgaagggcagtggagatt

SEQ ID NO: 589704 - DNA, 101 bp, Homo sapiens
aaggatgaaggccttgatgacaatgatgggtcttcgggattcagcgttctgtgatggaatggggagaagatattaaagcagtttcaaaagatgaagcagtg

SEQ ID NO: 589705 - DNA, 50 bp, Homo sapiens
tgcaaacatacaagcagtctcacctcagacatatctgaagagatggatta

SEQ ID NO: 589706 - DNA, 50 bp, Homo sapiens
cgacatcttcctgcacatctctgagtggaagagtgattgagtcccggtat

SEQ ID NO: 589707 - DNA, 95 bp, Homo sapiens
ttttcaaaatctatgaatgaaagcatgaaaaatcaaaaggagttcatgcttatgaatgctcgacttcagctgtttgcagacaaggtcccaaagac

SEQ ID NO: 589708 - DNA, 100 bp, Homo sapiens
ctgaggtgtttgacaaaacataccaattcttgaatgacatccgagcgaaagagaaagaggaaacccgaaccctagcggagattgccaaagtggagctgga

SEQ ID NO: 589709 - DNA, 100 bp, Homo sapiens
ctgcagtatggcttgaccctcagtgatctggatcgacacccagaggatggaggtttgcttctgaataacccttcggcattagctatgcatgagtgtaaat

SEQ ID NO: 589710 - DNA, 100 bp, Homo sapiens
cggaacaggccgccgcgcgctgcgcgccggacccgctgcccctgccggcccggccgggtcgggcggcccagatctcacattcttgaaggtggcattgaag

SEQ ID NO: 589711 - DNA, 109 bp, Homo sapiens
cttcctgcgcgcgcgcctgaagtcggcgtgggcgtttgaggaagctggctccttcttctccgccttcctgaacctcctggtcagcgccttcgtggtcttcctggtcttc

SEQ ID NO: 589712 - DNA, 97 bp, Homo sapiens
tcaagaaagaggtgggcaagatcctgtgcactgactgcgcagaaaaagtcctacctggagcgaagcgttaaggaagctgaggacaacatccgggaga

SEQ ID NO: 589713 - DNA, 98 bp, Homo sapiens
gcactagaagaaactacagaatatgacggtggctataccagggactctgttctgattaggagtgtgaggaagaggctgtctgtgtcattatgtgtgcg

SEQ ID NO: 589714 - DNA, 75 bp, Homo sapiens
cagtctcatatttctcctctgaagatgatgaggagtctgatgaggaagctgtgaagaaaaccaacaaatgtgtac

SEQ ID NO: 589715 - DNA, 83 bp, Homo sapiens
cccaggatgggctgggaatgaagcgatgtagccttttaatggagacctttggcgacttggcctttggcgacatcttcctccac

SEQ ID NO: 589716 - DNA, 100 bp, Homo sapiens
gaagctgcctgaatttgcctgtatactctcgttctgcgacttataaaggaccagacaaatcaaattagtggttttggtgtcatggagaaactccagctgg

SEQ ID NO: 589717 - DNA, 75 bp, Homo sapiens
gcctcagacgcggtggagccgccggagtctgagaaggtgtgggcccatcgctggatggatctgtcagaacacggc

SEQ ID NO: 589718 - DNA, 98 bp, Homo sapiens
tggatctgatggagtcctcaattgcacaatccattcacaggggctttgagcgggagtcatgggaaccagtcaaagcagcccgacggccatggaggctg

SEQ ID NO: 589719 - DNA, 98 bp, Homo sapiens
ggagaagggctgcgggttagggggccggcgcccgcggttcaggttcttgcacgcattgcaaatgccacgaggccaactattcatctgtgtgagattgt

SEQ ID NO: 589720 - DNA, 87 bp, Homo sapiens
gtgaggacggcgagaaggcggcgcgcgaggtcaagctgctgctgctcgagagaactcgatgccaccgcaacggtattggcgaaccgg

SEQ ID NO: 589721 - DNA, 90 bp, Homo sapiens
caagaggaggacagttcgctacacagcaatgcatcgagtgtttctctcctgaggcaaagcccaacacacctgtcttttgtccacttctcc

SEQ ID NO: 589722 - DNA, 100 bp, Homo sapiens
gaagggcgactactacgaggcgcaccagatgtaccggaccctgttcttcaggcctctggctgtacctggcagggagcagcctgccctgtctcacgctgat

SEQ ID NO: 589723 - DNA, 73 bp, Homo sapiens
agacctgccaaggatgatcctgagtccaaggttgacgccatggtggacctgctggacctggacccactgaaga

SEQ ID NO: 589724 - DNA, 100 bp, Homo sapiens
ccatggcaaccttgtccctggcccggccctccttcagtttagttgaggataccacattagagccagaaggcaggtgacaaacattaccaccccagctgtg

SEQ ID NO: 589725 - DNA, 98 bp, Homo sapiens
agctactcaatacgcgccacaacgtccgactgcactcacacgacgtgcgctatgggtcagccatctcttcctgtactctataccctgtctagccaggc

SEQ ID NO: 589726 - DNA, 98 bp, Homo sapiens
tgaccaccaccgccttcctggccgagagcgggaacagcttccacgtgttcgaccagggccagtttgccaaggaggtgctgcccaagtacttcaagcac

SEQ ID NO: 589727 - DNA, 100 bp, Homo sapiens
ctcgctgatcgcctaacttctactgacgaagcttggaagttgcagaagtattctaccttgtaaatactgttatttgtatatactgtaaatgatgacatcg

SEQ ID NO: 589728 - DNA, 50 bp, Homo sapiens
gcatgaggtggctgaagactccagttgattccaacaatgtctcacccatc

SEQ ID NO: 589729 - DNA, 60 bp, Homo sapiens
ccggcccgtagtgtggaagcagcttcagggtgcaaatagctatgggcaacttggcctcgg

SEQ ID NO: 589730 - DNA, 75 bp, Homo sapiens
ttggaaacgacgtcatgtgttaggtgacttaagagattaaaattaatttggttgctgttggttctgaacaaataa

SEQ ID NO: 589731 - DNA, 74 bp, Homo sapiens
gaagatctaagataccttcgactacgttaccgtacacgagaagaaattcaggaagtaagaagtaagagtgaccc

SEQ ID NO: 589732 - DNA, 98 bp, Homo sapiens
gccggatgcggagcgcggtgctgccggtggagcttcaggcagctgcagttgcactttcctccctgattcatgctttggatgacttagacatggtggcc

SEQ ID NO: 589733 - DNA, 80 bp, Homo sapiens
cgggaagcaagaggcaaagagaatcggttgcggatgtggcccggtccatgggggcaaaagtggtgatcgccattgacgtg

SEQ ID NO: 589734 - DNA, 110 bp, Homo sapiens
gctgatcgagcaggcggcgcagtacaccaacgcggtgcgcgaccgggagctggacctccggggaattgcattttgtgaaaaaagaacaagaattttctgcaaggatcata

SEQ ID NO: 589735 - DNA, 75 bp, Homo sapiens
ctgccgcgagtgcactggaggcatggtcagatgtaccaacagtaccagcaacaggccggctatggtgcacagcag

SEQ ID NO: 589736 - DNA, 100 bp, Homo sapiens
aaaggagccaggaattcccagtttgacaccacaggctgagctccctgaaccaggaagctcttcgtgtggtgaagatcttacagaaccttgatccgccatt

SEQ ID NO: 589737 - DNA, 81 bp, Homo sapiens
ttttacactggacagcactttaatattcctgccatcacaaaagctggacaagcgaaggtgaatcaggtctaggaaaatcga

SEQ ID NO: 589738 - DNA, 75 bp, Homo sapiens
tttgttctggcccggcgacacatagtggctgcaggcttcctgatagtggacgttacccttaagttacaggagtcc

SEQ ID NO: 589739 - DNA, 100 bp, Homo sapiens
gctgacatacatttttgggaaggtagaagcatttggcacagaagtgctgccaggagaaactaagttgctgaacggggaggtggggaagacagggctccag

SEQ ID NO: 589740 - DNA, 87 bp, Homo sapiens
gcggcccaggttcgccagcagcccaagagcctcaaagtgtcgatcctggacaccaccaggctgctgagaagctgtgtgcagagcgcc

SEQ ID NO: 589741 - DNA, 83 bp, Homo sapiens
cccaggcacagagaccccatcctacaaggtggaatgaatcttacttgttgaatatcttctggttactagttggattcatttgt

SEQ ID NO: 589742 - DNA, 100 bp, Homo sapiens
gctgaaggggcctcttcttaacaaatttctgaccacagccaaaggtgtggccgacgacgatgccctcgctgaggagcgcatgcggagaggccagaacgcc

SEQ ID NO: 589743 - DNA, 74 bp, Homo sapiens
gactacgtataatattttaactcatgactatggagtgtggcagttgggctcttcgtcaccaaacttcactttgg

SEQ ID NO: 589744 - DNA, 100 bp, Homo sapiens
tgccttcgactgcaggaaccgaaaatgttcagtcatctggctgtctggggaagcatgctgacctggctggtgttttttggcatctactcgaccatctggc

SEQ ID NO: 589745 - DNA, 101 bp, Homo sapiens
tgttggactgcataatttcttaatcagcctactcgacacccagcacctcccccgcaaaccgattcgtcagtgttggaccacgggatccaagctttgtaaat

SEQ ID NO: 589746 - DNA, 80 bp, Homo sapiens
gcggcgcggggtgagcgtcgaggaggcgcaggagactgaccgcaacggcaggatcaatgtccgagttaccaccatggatg

SEQ ID NO: 589747 - DNA, 98 bp, Homo sapiens
gcgagaactgcgcagacctggtggaggtgttaaatgaaagttcttgggtgtctctggggagtccctgggccagaccttcctccagactccagcccacc

SEQ ID NO: 589748 - DNA, 100 bp, Homo sapiens
aagaaacatatactgcttacctcattgaaacaagaatgtaattatatctagtgctgcagaaagggtaagtctagcatgaagtactttgttttcatctttc

SEQ ID NO: 589749 - DNA, 75 bp, Homo sapiens
ttactttttcttgtccgggtgcggataagggacccgacactgataaggtgacctgctgagaaaagtggtacaaat

SEQ ID NO: 589750 - DNA, 98 bp, Homo sapiens
gttttatttggaagtttgagaggtcatgtggttggactacgctattacacgggagtagtggtcctggctctgccatatgacacccccgtgcccggcta

SEQ ID NO: 589751 - DNA, 80 bp, Homo sapiens
gaggaagaggcccctggatggatgcatggggaaggtattatacctgaagaaccttagccctcgggtgactgaaagagatc

SEQ ID NO: 589752 - DNA, 75 bp, Homo sapiens
gatgaacttatcgatgaacttggtggccctgagaacgttgctgaggtgaacctgggcccaaacaaaatggtggtt

SEQ ID NO: 589753 - DNA, 74 bp, Homo sapiens
tttctgatttccattcttcttatagtctatggtagtttcaggtgtagatgcccctgatccaggtgcagacccgc

SEQ ID NO: 589754 - DNA, 51 bp, Homo sapiens
actacaaccagagcgaggcggggtctcacaccctccagagcatgtacggct

SEQ ID NO: 589755 - DNA, 100 bp, Homo sapiens
tcatcctgctgctgaagatctggaagacgcgctcctgcgccggtcattcttaactgttcagccctaccttgccttctccacttgttgagcagtcccaagg

SEQ ID NO: 589756 - DNA, 83 bp, Homo sapiens
cacgcgggcgcggatcgaccggagcagagagctggcgagcaagagcggttctggtgaggttggaaggatgcagccacccggtt

SEQ ID NO: 589757 - DNA, 90 bp, Homo sapiens
cctacatttagcgcatcatgtgatccggtctcaaaccatgaattatgtgggacagctggctgggcaggtgattgtcactgtgaaggaact

SEQ ID NO: 589758 - DNA, 101 bp, Homo sapiens
cccgggtcggtgtcggggcgagccttccctccttttcctggagcccgtctcaggctaccggctctctgaccagttccacgacatcctcattcgaaagtttg

SEQ ID NO: 589759 - DNA, 75 bp, Homo sapiens
gcggctcgggacggaggacgcgctagtgctgtccggagtacacatggcttagaagttccattaagccataaggga

SEQ ID NO: 589760 - DNA, 75 bp, Homo sapiens
ggccaagaccgctgtgtggaggtagccgcagcgccagcaccaggcatgcccaagagaatcgtaaatgcaaaaatt

SEQ ID NO: 589761 - DNA, 126 bp, Homo sapiens
ctctgaaagatggacagagagacaggagatggtcctttataatgcagtgtgatctgtgctgcaatagagattggatgactgattattggacagaatggcatcttgtcaacacctgcggtctcctgc

SEQ ID NO: 589762 - DNA, 100 bp, Homo sapiens
ccccgcccggcaccgcggacccacccggacctcggcggggagatggagctcgtggaggagttcatgctcttggccaacatggcagtggcccacaagatcc

SEQ ID NO: 589763 - DNA, 100 bp, Homo sapiens
gagactggaggctgagtgctaaactgtgtggggcgcggatgggatccagctgttagtcggggccgttgctccagggagaactgcaaatatcttcatccac

SEQ ID NO: 589764 - DNA, 75 bp, Homo sapiens
aagccatcccctggcggaaccgcccccagatcaatgaactgagccatgttcaaatccctgttatgttgatgccag

SEQ ID NO: 589765 - DNA, 98 bp, Homo sapiens
cggtgacctggaccacggcgcagacgcgggcgagctgcggctcggacgccagcggacacgcgggcgagtgtgcaaggagcccccctacaaagtagagg

SEQ ID NO: 589766 - DNA, 100 bp, Homo sapiens
ccagcgcccggggctccggggacggcgagatgggcaagcccaggaacgtggcgctcatcaccggtatcacaggccagaatgatgccaatgggtggaatga

SEQ ID NO: 589767 - DNA, 100 bp, Homo sapiens
ctgacgtgggaagccatggagcagatacgaaaatcagaaagtgcagttgacagaagggtcacgttcacactacaatatcaattgcaactcaacaaggact

SEQ ID NO: 589768 - DNA, 99 bp, Homo sapiens
cctgttgcagggttttgtttatataactcaagttgtttggctaaattcttcagaccgatttgggatgttgcccctggatgagcctgctattcttgttag

SEQ ID NO: 589769 - DNA, 83 bp, Homo sapiens
ccgggcagctgtgctgggagagaatgggcgggtgctggccgggcagaccctggcaccagcagaaccaaaatcgtgtgtggtgg

SEQ ID NO: 589770 - DNA, 100 bp, Homo sapiens
accttcctgactcggactgggacaatgacagcagctcggcccgcctctttgagaggtctcgcattaaggctctggcagggtgattctgggggtccacttg

SEQ ID NO: 589771 - DNA, 83 bp, Homo sapiens
gtcatgtatcccatagctgtgagtggcgatcacgagaacaataaggtattagaaaactactcggatgctccaatgacaccaaa

SEQ ID NO: 589772 - DNA, 78 bp, Homo sapiens
atttaccaccaatgggaacatgcacagtgtggcgtgtggaaagaagaggaaccagaaaagaatgtttgtgaagttctg

SEQ ID NO: 589773 - DNA, 83 bp, Homo sapiens
cttcctgcagagccccccggaggaggagcccgaataccaccccgacgcctcagcccaaggtgatgtaaaattctcaaacaatg

SEQ ID NO: 589774 - DNA, 75 bp, Homo sapiens
gacgaagctctctccagaaagacatcctgagaggacttggcaggttcggagcgaccttggccgttggcctgacca

SEQ ID NO: 589775 - DNA, 100 bp, Homo sapiens
gagccgctgccgcgttagttccgagcttgaagtcaccttattcacagcattgcaaccagggtgataaaacttgctcatgcaaagtccagtgtggccttgg

SEQ ID NO: 589776 - DNA, 113 bp, Homo sapiens
ctgctgccgccaccactgcgtcgggctggtgcagccccgggccaggccgcggccggggcaggagcgcaggtacccactgatggtaatgctggcctgctggctgaaccccagat

SEQ ID NO: 589777 - DNA, 95 bp, Homo sapiens
gacccttcgcgagcggctgctgagcgtgcagcaggatttcacctccggggggatatgagactttctactcggaatatcctgagtgttgcgtggat

SEQ ID NO: 589778 - DNA, 125 bp, Homo sapiens
gtcccgccagcgccgtgacgtggactacagtgacgccctcacggagaagcagtggctaagggtgaatgaaaactttgccattgatttgatagcagagcagcccgtgagcgaggtggagactcggg

SEQ ID NO: 589779 - DNA, 101 bp, Homo sapiens
ctcagcgcccgcagccagggcgggggggatggcgtctccccgactccacctgagggactggctcctggggagttccccttggccattctcaggggctggga

SEQ ID NO: 589780 - DNA, 100 bp, Homo sapiens
ttctcatgaacagaaacacctaggaagggagaactggtgaaaggaaagcaagccaggatggatatttacgacactcaaaccttgggggttgtggtctttg

SEQ ID NO: 589781 - DNA, 82 bp, Homo sapiens
gggacagtctccgaagtctcgagcagggggatatgagactttctactcggaatatcctgagtgttgcgtggatgtaaaaccc

SEQ ID NO: 589782 - DNA, 109 bp, Homo sapiens
ccaaaacaagtggctgcggccgtcgcccaggagtcatcggacgccagaatctggtgagaagccctaccactgcaactgggacggctgcggctggaagtttgcgcgctca

SEQ ID NO: 589783 - DNA, 108 bp, Homo sapiens
gttttgttttcccctcggcactaggcagcggaggagcccgaccgacccggaactccttcacagacatccttcgtgccatcctgctgtcattggaagtcctaatcgaag

SEQ ID NO: 589784 - DNA, 75 bp, Homo sapiens
gacagaagcgactttggtgagactctggggaggatactgaggcacacagaggggagtcaccagccagaggatgca

SEQ ID NO: 589785 - DNA, 75 bp, Homo sapiens
gcgaatatcgtcatcgttagaagagtccagcctctgatgaagcaggagagaaagaagccaagtctgattaataac

SEQ ID NO: 589786 - DNA, 50 bp, Homo sapiens
cccagacaggtggcgacggcagaggaactgggctggcttagatgaagatg

SEQ ID NO: 589787 - DNA, 98 bp, Homo sapiens
ttcgggggagactgaagataccttcatcgctgacctggttgtggggctgtgcactgggcagatcaaagacacggtgacaatggatgctgggagagcca

SEQ ID NO: 589788 - DNA, 101 bp, Homo sapiens
aggccattaccatgtatatattaaagatgttgatcatttgggaaactggcagtttcaaggctccattggcctccagaggactgggagcctgccccggaaaa

SEQ ID NO: 589789 - DNA, 103 bp, Homo sapiens
caaggtcatcattgtccaggcctgcagaggtgggggtgctcaaaggatttaaaggagaactaattcatgtatttaacaaacatgatggtgccttgaggaatac

SEQ ID NO: 589790 - DNA, 83 bp, Homo sapiens
caaaggaagccgaattggatttgatagcacacagtggagttgatctctctaatgtattagatcttcatgcctttgatagtctc

SEQ ID NO: 589791 - DNA, 80 bp, Homo sapiens
ggaacttagaaacggttgcctctgctgttcagtgaagaactgtggctgcaccatctgtcttcatcttcccgccatctgat

SEQ ID NO: 589792 - DNA, 100 bp, Homo sapiens
tgttcgctgcccagaagaagggaaggcgcgagtgaggaaaggaggtactgtagctggacacagagtatagaaaaaaatgggatgccctggtaatcaagct

SEQ ID NO: 589793 - DNA, 75 bp, Homo sapiens
gccggcggcgggaggagctagggctggagcctctccagcctcccgcgaagacacagggaatatggaggttctgca

SEQ ID NO: 589794 - DNA, 87 bp, Homo sapiens
taaccaccattatcttaactgaggcacccaaaatgaattgccaagaagatgcttttagaagaaattaaagccaatctttcctctgat

SEQ ID NO: 589795 - DNA, 100 bp, Homo sapiens
ctgcgctcggcgcccaaggtctgcgtcaccgtcctgccccccgacgagagcggccggccccgcaggacctgaaggagaagaaggagaaggtggaggagaa

SEQ ID NO: 589796 - DNA, 82 bp, Homo sapiens
tgaagctgccctgaaggaggatttccgcagggaaactgctgctcgcatccagatgaataatacggcagctagtccaatgtct

SEQ ID NO: 589797 - DNA, 99 bp, Homo sapiens
gccacagcgacgccggcgccgagggacaccgcagtatgaggcagaggtcgccactgggacactgtgaaccaggagtgagtcggagctgccgcgctgccc

SEQ ID NO: 589798 - DNA, 50 bp, Homo sapiens
tagggcagcgcctagagcacaggtatcctccatgaaatgtgggatccttc

SEQ ID NO: 589799 - DNA, 98 bp, Homo sapiens
ccgacctcagatgctcccttctgctcctggttttgcgtgtgaagctgtgtggaaatgtgaaatactaccagtcacaccattatagtaccgtggtgcca

SEQ ID NO: 589800 - DNA, 100 bp, Homo sapiens
tgcaggactttgacacgctggccaccgtggagaaagcgtcgtggtggagcaataaattctagacaagctcagaagcgaactcgggaagcaacctccaccc

SEQ ID NO: 589801 - DNA, 88 bp, Homo sapiens
aattttagggtcctttatatagaagggagagtaggatgtagagtcctacattcatcgatccgggcggacaggcagagctggaaggacg

SEQ ID NO: 589802 - DNA, 98 bp, Homo sapiens
ttgcccgcctgcatcagtgcaaaactcctattatccaccgggacctgaagttgcccagaagattgttgccacaaggaagaagcagcagctgtccatag

SEQ ID NO: 589803 - DNA, 103 bp, Homo sapiens
cgtgatggtgccgtcgctcatcaagcagcaggtccttaaggtgtggcttacattctaaagcttttggatcagtatcgggagtttgattcacttcactggttcc

SEQ ID NO: 589804 - DNA, 75 bp, Homo sapiens
ctggacttaaatttaaggactgggtatcaagtaaacgaagatcctgtttgaccaaactcagagatcaattaaggc

SEQ ID NO: 589805 - DNA, 100 bp, Homo sapiens
ctgatgaacctcatgcgggatgtggagcgggagggcctggactgggacctcatgttgcctgcggacacgctgggcctctgtcctgatgctgctgagctcc

SEQ ID NO: 589806 - DNA, 100 bp, Homo sapiens
gggatgagagctgcaccgcgcgggacaagtcgccggcggcgcccgacggagcaggtttgccaagatggtggataagaatatttacatcattcaaggggag

SEQ ID NO: 589807 - DNA, 100 bp, Homo sapiens
gatagccaattgcagtttgaggctggtttggacagaggagccaaaggccaaatttccactttcagcagttttatttcagctgttagcccgaagaaagaag

SEQ ID NO: 589808 - DNA, 100 bp, Homo sapiens
aagaacggcaggatcgacagccaccatgacaatcagtctgcagtggctgagcttgatcgcctctataaggagctgcagagaatttgcctgtgtttccagt

SEQ ID NO: 589809 - DNA, 75 bp, Homo sapiens
attttccaggataactgtgactccaggttcctaaaagtaaagctctagaggccgtcaaattggcaatagaagccg

SEQ ID NO: 589810 - DNA, 100 bp, Homo sapiens
agccaaccatttttagttacggaactgaattcatggacaatcttgctaaatgccttcgctattacatagctgatcgtttaaataatgaccctgggtggaa

SEQ ID NO: 589811 - DNA, 83 bp, Homo sapiens
cacactgtacttccagggagacaccgattataagaagagaaactcagcgctggggaagaagggccaggtgaggtggctcacac

SEQ ID NO: 589812 - DNA, 74 bp, Homo sapiens
aagagattcagccagcacactcctcgcgagcaagaaatgcatcttctgcagacaccgggttaagagggtctctg

SEQ ID NO: 589813 - DNA, 98 bp, Homo sapiens
gaccaccatcctgaatggtttaacgtgtacaacaaggaactctttccagttaacagacagagtgtggatcattttgctaaatacttcactgacgcagg

SEQ ID NO: 589814 - DNA, 83 bp, Homo sapiens
aaaaatggggagaaggatatccagacagccctaagatgtgtattcatacaagcaagtaggagtgtctttgaatagaatattta

SEQ ID NO: 589815 - DNA, 74 bp, Homo sapiens
caagaaatcaagtacttcagtaagagatggggtggaggaagctaaacaagaattacaggaagttgttgaattct

SEQ ID NO: 589816 - DNA, 75 bp, Homo sapiens
gcgagtttgtggattatctgaagattggccgcgtaatccaggttgctgctgggagcagcaacctcaagagagtga

SEQ ID NO: 589817 - DNA, 90 bp, Homo sapiens
gccagagccaggtgaactggaggagcgatttgccatcgtgctgatagagaacgtcacttttcaccatgaagggttcttctggaggtgttg

SEQ ID NO: 589818 - DNA, 90 bp, Homo sapiens
cgacaaaggcgcgggcccgggcagccgagaatcagcatgattcttcagaggctcttcaggttctcctctgtcattcggtcagccgtctca

SEQ ID NO: 589819 - DNA, 100 bp, Homo sapiens
atgcagcccgggaaagagctagatctttgtagaatttgatggctgtaactggaagcaacactcctgggtaaaagttcatgctgaggaagttatcgtgctt

SEQ ID NO: 589820 - DNA, 100 bp, Homo sapiens
ccgccgccgccgccccctccctccggtgggcccgggaggtagagaaactcctccgcctctgatgcagaatttgatgctgtggttggatatttagaggaca

SEQ ID NO: 589821 - DNA, 74 bp, Homo sapiens
gcgccgtgctgcccgtgtggagtgcgcacggggaagggactttgaacatgtcggggatcgccctcagcagactc

SEQ ID NO: 589822 - DNA, 100 bp, Homo sapiens
aacggcacagctgccaactaccgctgctccggggcttacgacctccgcatcctggacagcgcgcccaccggtttacaagtaaaagtaaccaagctaaaac

SEQ ID NO: 589823 - DNA, 82 bp, Homo sapiens
tgtcgaacgatgttggactcatagtcactgccagaaaggaatactcccccagttgcaagaggcgcaggaccgtggaagactt

SEQ ID NO: 589824 - DNA, 78 bp, Homo sapiens
gatggtcagaaaaggggacacggcggtgcttaggtgtgatgaatgcagactctgctaccattttggctgtttggatcc

SEQ ID NO: 589825 - DNA, 100 bp, Homo sapiens
gtggtgaggcaggctcgcctcctccagctgttgttgctgctggaaagaatacccacctcatgtccaaaaagttgaaattaatcctgtaaggttaagtcgg

SEQ ID NO: 589826 - DNA, 109 bp, Homo sapiens
tccgtggccttagctgtgctcgcgctactctctctttctggcctggaggctatccagcaattctctggtggttgagatcccgccatttcggaatcagaggataaccagc

SEQ ID NO: 589827 - DNA, 76 bp, Homo sapiens
cagaagcctacaatgaagaactgaagaagctggagttgctcagacagacaccaactctacaacattacctgtcata

SEQ ID NO: 589828 - DNA, 75 bp, Homo sapiens
gccttgtgaagagatcatccctaagcaggagagaagctactaaaggtgtggatgaggtcaccattgtcaacattt

SEQ ID NO: 589829 - DNA, 51 bp, Homo sapiens
atctgggagcataaaggtgacctgaagcacttttccagccattaactccag

SEQ ID NO: 589830 - DNA, 90 bp, Homo sapiens
ccctgactaaagcttgaaatgctacatttccaaggcatagcccttttgtacctgcagttgtaccgggtcacatgtgaccaaacctacctg

SEQ ID NO: 589831 - DNA, 75 bp, Homo sapiens
ctggactatggcatctatgttatcaaccagatccagacacggggactgcagagaaaggctgtgtgcatccgctgt

SEQ ID NO: 589832 - DNA, 49 bp, Homo sapiens
gtacagacatgcaaagtaaagtggacaaccctccatatgataagggagc

SEQ ID NO: 589833 - DNA, 82 bp, Homo sapiens
caaagatggcccttcctcaaagacagagcgggatgccaccagcttgtccaaagggaagttccaggagctcctggtgggcatc

SEQ ID NO: 589834 - DNA, 100 bp, Homo sapiens
ctggaggagcagctgctcaagtactcgccggacccggtggtcgtccgcggctccggtcacgtcaccgttctctgctcctgagtgtttggctttcaaagga

SEQ ID NO: 589835 - DNA, 75 bp, Homo sapiens
agcaggagctttttgcttagcactgaaaattctggataatggtgaatggattcgggaactggagcctctcctctg

SEQ ID NO: 589836 - DNA, 75 bp, Homo sapiens
ggtggagtgtaggtcatatcgccgcgggagcatcgagtacagctgtccggcctccaacgagtgtgagatcaccaa

SEQ ID NO: 589837 - DNA, 100 bp, Homo sapiens
gcaaaattccaggctatgaccccgagcccgtggagaagctgaggaaactgcagagagctttgtgcatccgcggacgcaaggccaccctggaggagctaca

SEQ ID NO: 589838 - DNA, 73 bp, Homo sapiens
agtatctgcctgggctactcgggctttctttagaactcaagacatggctgcccagtgtgtcacaaaggtggcg

SEQ ID NO: 589839 - DNA, 100 bp, Homo sapiens
ggaagggccacgcgtcccccagtaggagaatgactccgattcgtgaccctcagcgccggtgcatgtcgatgcctggtactgtggcgctccgtgaaattag

SEQ ID NO: 589840 - DNA, 90 bp, Homo sapiens
cttcagttaatggcaagacttgcagagggaagagagaagggcacagttacctaagtatcaacgtaatcttcctcggccaggacaggcccc

SEQ ID NO: 589841 - DNA, 82 bp, Homo sapiens
gcccaggagtcatcggacgccagaatctggctctgtgtgctccgggatggagcaggtgtgcagagggtgagaacccagctct

SEQ ID NO: 589842 - DNA, 73 bp, Homo sapiens
cacaggtgaatttaaaggagcagccctggtgtcacctatcagtaaaagggccacagccatctctgggagttag

SEQ ID NO: 589843 - DNA, 99 bp, Homo sapiens
ggaaagagcgccgagcggtggcgtcgttgtcgccccctcctcgtcgggaagaatcgtttggtctcctgccgtgcccgcatgttggcagataaattgaac

SEQ ID NO: 589844 - DNA, 90 bp, Homo sapiens
atttgagttggatatggaagaggccattcaaaagagtcatatcggatggcgaaaagaggctaaaagattgctgctggtgatgacagatca

SEQ ID NO: 589845 - DNA, 75 bp, Homo sapiens
actccagctgtcgtcacctgcttcttggccgtgcctgttattaaaaagagctcaaccttcaacaagactacacag

SEQ ID NO: 589846 - DNA, 90 bp, Homo sapiens
ttgggatctgccctccgctcagctcgagcttccctcgtggccgacggaacaatgaaggctgtggaaaatctctgttctcacaaagtctcc

SEQ ID NO: 589847 - DNA, 82 bp, Homo sapiens
gatctgggacacagcggggcaggagcgcttccgcaccatcacctccacagtgaagacatttccacctggacacctgaccatg

SEQ ID NO: 589848 - DNA, 100 bp, Homo sapiens
ggatcgaaccccgctcccagcggccgcgattcggggaggtaggcgctgggccgaggagtacgaggatgtcgtccaggaaagattgtgcagatgactgaag

SEQ ID NO: 589849 - DNA, 145 bp, Homo sapiens
atcattttcacctcgcgtcgcgcccgggaggaaggaacgaggcaaggagctaaagcagcgtgcgttcagccctggggtgctttggaaataccagccagctcatgcatcttaagataatataaaatcaatggactctgacctccaa

SEQ ID NO: 589850 - DNA, 98 bp, Homo sapiens
ccagaggcgggcgatgtgaagatgtcagtgggctgtgcctgtcctgattcacttgtcatggattagtgactggtcagagttatattttccgggtcaga

SEQ ID NO: 589851 - DNA, 90 bp, Homo sapiens
cgtacgtggccctcgatgtgctctgcgtgttgctggtttggcagacctgatgcccagagtcaaggtacaatcagttgaaactgttgaagg

SEQ ID NO: 589852 - DNA, 100 bp, Homo sapiens
ctggctgtcagcctggtgctcctctatctgtctcacgctgttgcatgtgtcaatcagtttatcatcagtaggactcaagctctaatgttgcacattgatt

SEQ ID NO: 589853 - DNA, 87 bp, Homo sapiens
ggtttcctggccagcacgtgtgcagataagagaacgggcgcagtgctttcattggcattggcttcacagatcggggagatgccttcg

SEQ ID NO: 589854 - DNA, 99 bp, Homo sapiens
tcatctttctgaaatggtgatgaaattggaattgggtttacatgagaatggagaagctgatgccatgagcttggatggagggtttgtctacatagcggg

SEQ ID NO: 589855 - DNA, 100 bp, Homo sapiens
cctcccgagtggctgggactacagaatttggattgggtgcctctcaccacactgtcacactgcaagtcactgaggacaatgacagcaatcagtcgctaca

SEQ ID NO: 589856 - DNA, 90 bp, Homo sapiens
cgccgccagcatgttgggcgccccggacgagagctccgtgcgggtggctgtcagttaagtgggcagaccaacatccacctcagcaaaaac

SEQ ID NO: 589857 - DNA, 101 bp, Homo sapiens
ctcaggagcctcctaaaaccacagtggctgagaaaccctggcccccagcatgagaagcggactctgtttggcgacatggtgtgcttcttgtttataactcc

SEQ ID NO: 589858 - DNA, 100 bp, Homo sapiens
agcggctacgacctgacggacaccacccaagcagaaacagactgaatttgatctgattaatgtgaaggactggccagtctgggaaaccgcctgccacgtg

SEQ ID NO: 589859 - DNA, 51 bp, Homo sapiens
gactacatgggggaggaacagctccggtggagcagctcctgtacgaaagcc

SEQ ID NO: 589860 - DNA, 75 bp, Homo sapiens
cagccgctgttttgccggaggagcccctcaggccgttctcatcccaggccttgtggagggatctaccaaaaggaa

SEQ ID NO: 589861 - DNA, 82 bp, Homo sapiens
ccggcgtcgagaatttcaactgaatccacattcatctcaatggaaggatcctgccttaagtcaacttatttgtttttgccgg

SEQ ID NO: 589862 - DNA, 90 bp, Homo sapiens
aagtccacgagaccgtggagcgtggtgggaagccagctgaggtgggtgtcctggttggcaaagaccggtcaagtttttacgtgaatgggc

SEQ ID NO: 589863 - DNA, 100 bp, Homo sapiens
gggcgcaggagagctggagtcaggcggagaccgcaggctgaccccgcagcggccgggctgtcgcggcccccacctcagtttgtgaatagcacaatggaag

SEQ ID NO: 589864 - DNA, 74 bp, Homo sapiens
acaaagacatccacagcagtgtttctcgggttggaaaagccattgataagcaaagaatggctcaagaagtactg

SEQ ID NO: 589865 - DNA, 98 bp, Homo sapiens
cccactggaatttccaggaagagacgctgaaggccaaagtctaaatggtgtttggctgaacagagcgcgtctggaacctttaagggtctattccattc

SEQ ID NO: 589866 - DNA, 82 bp, Homo sapiens
cctcaggaatctaatgtacctggtcagtccaagctctgaacacctaggcagaacatccagtcatcaagttccaatgtgttgg

SEQ ID NO: 589867 - DNA, 102 bp, Homo sapiens
ctcatgatcccgactgtggagatgtggtgcgactagcacaacattctgaaattttttggttattgtaatgatgttgatcgggagttgagaaaatgcctgaag

SEQ ID NO: 589868 - DNA, 75 bp, Homo sapiens
catgaagctgctcgcagcaactgtgctactcctcaccatctgcagccttgaaggcccagccccagcccaggggac

SEQ ID NO: 589869 - DNA, 75 bp, Homo sapiens
ccaggttatcatggattcccagcgcgggacagccaggtaaatgagctggatggtatcccgttgatcctggacaac

SEQ ID NO: 589870 - DNA, 75 bp, Homo sapiens
ctgcagacgacgagctgagcttcaaaaggggggacatcctcaaggaaaggaaacagattcattgtctgtctgagg

SEQ ID NO: 589871 - DNA, 90 bp, Homo sapiens
gaggaagccaagaaatgtgtagaagaattagcattgtacttaaaaccgctcagcagtgctagaggtttgctgtaatggcacaagagtatt

SEQ ID NO: 589872 - DNA, 74 bp, Homo sapiens
tctgatgaggattccagctacatcaatgccaacttcattaaggcaaggcatctttacatatgtgattatcataa

SEQ ID NO: 589873 - DNA, 76 bp, Homo sapiens
cggaagtaggagaggagttcggcgccgcttctgtggccacggcagagtacccaaaggcaagtggaacagctctaat

SEQ ID NO: 589874 - DNA, 90 bp, Homo sapiens
cggaagatccaggagctgttccacgtggagccaggcctgcagaggctgttctacaggggcaaacaggaccgagtctcctgccattccgag

SEQ ID NO: 589875 - DNA, 82 bp, Homo sapiens
gtgctcctggccgtggccaaacaatgcagatcttcgtgaagactctgactggtaagaccatcaccctcgaggttgagcccag

SEQ ID NO: 589876 - DNA, 51 bp, Homo sapiens
gatatcagcctgtctgactacaaagtgtgtgatccagtcttgggtgacaag

SEQ ID NO: 589877 - DNA, 75 bp, Homo sapiens
ggctgggggcgaagatttcgccatggatgaggatggggacggggatcatcgtcttgctcttcttttatctcagtt

SEQ ID NO: 589878 - DNA, 100 bp, Homo sapiens
tcgccgcaccccaggatggatcccccagagggctgaagctgccctcgaggacctggtctccaccattcgagtctgaagattctcagaagcacaaccagag

SEQ ID NO: 589879 - DNA, 100 bp, Homo sapiens
gatcaaatggcacttcattggccacctacagaaacaaaatgtcaacaaattgatgggacccactgatctcagcatgaagagacaattggcgactagctca

SEQ ID NO: 589880 - DNA, 130 bp, Homo sapiens
gctgaacgacttttaactttcattgtcttttccgcccgcttcgatcgcctcgcgccggctgctctttccggctcaccatggatgatgatatcgccgcgctcgtcgtcgacaacggctccggcatgtgcaa

SEQ ID NO: 589881 - DNA, 83 bp, Homo sapiens
gctgggcttcgtccagatcgggaagggaagcaggtcctggggaccaaggtggacgcggagcgtgacggcgtgaaggtgcccac

SEQ ID NO: 589882 - DNA, 100 bp, Homo sapiens
ggcccgggtcttccagaaggctgtagaccagagtatcgagaagatgccttcaattaagttgcagagttctgatggagagatatttgaagttgatgtggaa

SEQ ID NO: 589883 - DNA, 98 bp, Homo sapiens
gcgaaagtacaaggaggccctgctgggccgcgtggccgtttccgcagatcctgttcatcttcatcgacagcgaccacaccgacaaccagcgcatcctc

SEQ ID NO: 589884 - DNA, 95 bp, Homo sapiens
gaaaattttccttgacctttaggtgcttttatattcatctcaaaaacaaaattctgaactcaggacttggcaacttcccattgaccggggtggag

SEQ ID NO: 589885 - DNA, 134 bp, Homo sapiens
aagcaaggaagctgaagcagctttcttgaatgtctacaaaagattgattgacgtcccagccttgaaaagatcttttgaggtcgaggaggtcgagacacccaactccaccccaccccggagggtccagactcccc

SEQ ID NO: 589886 - DNA, 139 bp, Homo sapiens
acggaagacttatgaacgccttgttgcccagttccccagttctggcagattctggaaactgtacattgaagcagagcttcttggacacttaatgattgttggcaagaaatgtgctgctgatctgggcctgaataagggt

SEQ ID NO: 589887 - DNA, 96 bp, Homo sapiens
gaagcactggaaaatgctggaattttctatgaagcacaatacaaagaagtaaaagtggtggctaatgctggagtgcaatggcgggatctcggctca

SEQ ID NO: 589888 - DNA, 80 bp, Homo sapiens
ccgccgccatgaacaactcgggcgccgacgagatcggtaagactttgaccccgacgcaggcttcagtgattgccgcggat

SEQ ID NO: 589889 - DNA, 100 bp, Homo sapiens
agcaggaaggtctcacctgaggtgaaccttcgaccttggacttctcagcctccagaatggtacagcagggaagaactggaaactcagagaaagaaactgc

SEQ ID NO: 589890 - DNA, 100 bp, Homo sapiens
gctcacgttcatcatggtgcctggctgccaggcaggacaagagaatgattcaacgaagaatgaaataaaaattgaaacagaatcgcagagctcatatatg

SEQ ID NO: 589891 - DNA, 100 bp, Homo sapiens
cgcccgaagagccaagagtcagtattccggccagcttcacgaagtcagagagccattgctgtgaattacgtgagggaaagatattgaagaggagttggac

SEQ ID NO: 589892 - DNA, 100 bp, Homo sapiens
tgatattgggacctgctggtatatccttctttctggttccgtgttcatcaaggaatccatgtttcttccaagaagcagataacgaaggaggcccaacttc

SEQ ID NO: 589893 - DNA, 96 bp, Homo sapiens
aagagaagctgcaagagcaacatctttcctcaccccaaggtaacctccgaggctatggcatggcatccccaggcctcgcagcccccagcctcacac

SEQ ID NO: 589894 - DNA, 100 bp, Homo sapiens
tccccggctgctcctcctcgtgctggcggcggcggcggcggcggcggcggcgctgctcccgggggcgacggatcagacctattgtgaccgcctggtgcag

SEQ ID NO: 589895 - DNA, 83 bp, Homo sapiens
tttcaagctttgtgctgcctcttgatctacctctttgtccaggtgtccctggccagtgtccttccacctgtccacaagcatgg

SEQ ID NO: 589896 - DNA, 100 bp, Homo sapiens
tgtgacctgcagatattgggagatccacagctaagacgccgggactccctggaaacctagaaatggccacccagaggagaaggccaccccgcctggaggc

SEQ ID NO: 589897 - DNA, 83 bp, Homo sapiens
ccacagtcctctgaggacagaatatgcaatcccttggctgaacgggaaacagatggccaagcctcggggggcagtgattctgg

SEQ ID NO: 589898 - DNA, 83 bp, Homo sapiens
aaggaaacctttccaacacagatgtccaagctgccaagtctgttgatgtctgccatcacagttatcattctagtattatattt

SEQ ID NO: 589899 - DNA, 100 bp, Homo sapiens
gagaaagaccttgacgaaaagaagaaagaacctgcaattacatcgcagaacagccctgaggcaagagaagaaagattaacagccatgcaacagaatggag

SEQ ID NO: 589900 - DNA, 101 bp, Homo sapiens
cgtggcctggtctccattatttgagatgagttacatcttggaggaactgtggctgcaccatctgtcttcatcttcccgccatctgatgagcagttgaaatc

SEQ ID NO: 589901 - DNA, 83 bp, Homo sapiens
aagctatggaaggaaaatggataacagatcagttggaactgtggctgcaccatctgtcttcatcttcccgccatctgatgagc

SEQ ID NO: 589902 - DNA, 75 bp, Homo sapiens
tgcctcagcctcccgaatagctgggattacagttcctgtgccttaagaacattagaaccttcctgtccacctgct

SEQ ID NO: 589903 - DNA, 98 bp, Homo sapiens
atcaatgaacctttagatgaatttacagtgctgttggcagcagcggtctgcacaaaagcaggaaaggctattgtttctcgacagtttgtggaaatgac

SEQ ID NO: 589904 - DNA, 75 bp, Homo sapiens
cgacgctgctgggtccgctgagcggggcgacccgagctcccctcccacccggtcactccgtccagcaagcacgca

SEQ ID NO: 589905 - DNA, 74 bp, Homo sapiens
tggaaggaactttccttgaagtataagcaaagatgctgcagtctgaagagacttccagcacctctcagttgaat

SEQ ID NO: 589906 - DNA, 75 bp, Homo sapiens
gccgtgctgcccgtgtggagtgcgcacggggaaggaggaagacaatgtgtggcaccctggactacctgcccccag

SEQ ID NO: 589907 - DNA, 101 bp, Homo sapiens
gttgccgcagccgcccgggccgccggccctcctgtcccgcgccaggactcacaccacccggcaagaactgctcactacggctccctgccccagaagtcaca

SEQ ID NO: 589908 - DNA, 82 bp, Homo sapiens
gatgacgaacccaacctggtgcccggcccgcagagcggttctggtgaggttggaaggatgcagccacccggttgtcatgaaa

SEQ ID NO: 589909 - DNA, 88 bp, Homo sapiens
gcacaaaataaccacttaccccttctcaccgaggaagagcgggagaaagggtacattttatattggaggaaaaggttcactgaacagc

SEQ ID NO: 589910 - DNA, 100 bp, Homo sapiens
gagaggatctggtgtaccaggcgaagctggccgagcaggctgagcgatacgacgaaatcgagctatagcagattatcttcgttcaaatggctatgaagag

SEQ ID NO: 589911 - DNA, 100 bp, Homo sapiens
atttgagccgccgcattttttaaccctagatctcgcaaagagagcaggatgaatggacagtaccagcagcccacggacagtctcaacaatgacaacaagt

SEQ ID NO: 589912 - DNA, 74 bp, Homo sapiens
cagaaactttggcgacaatgttggcctgtctgcaagcttgtgcaggtgaggatcaaggttcaaaagcctctgaa

SEQ ID NO: 589913 - DNA, 75 bp, Homo sapiens
ccccggcggcagcacgaaagtaccatgcgttgacccggacgacacctataatgagaccccctacgagaaaggttt

SEQ ID NO: 589914 - DNA, 82 bp, Homo sapiens
gcgtctctctgctgcggcgcggggaccgctgtgctctcgtgtggacgaatgtggaacctcgctctgtggctgtgttcccttg

SEQ ID NO: 589915 - DNA, 100 bp, Homo sapiens
actggagacaatgaaaatcttgtcagttgcattaaaatcctcccctactgaaagaaacggaggccaggataactgtagagcagcaaatttcagagaaggc

SEQ ID NO: 589916 - DNA, 50 bp, Homo sapiens
tgatttgagcggctgtaccaagtgatcctgtgccggtatcagaatatctg

SEQ ID NO: 589917 - DNA, 73 bp, Homo sapiens
ccgcggcagcgcctctcctccgcgggatccgcggggagtctactcttcatcttgtgttgagacttcgtggtgg

SEQ ID NO: 589918 - DNA, 101 bp, Homo sapiens
ccctccacaagttccatctaggcctacgagggccccgcccagtgtcccaagctctagaggacaaaatcccagtccttggcacaaactcaggaaatggaagc

SEQ ID NO: 589919 - DNA, 90 bp, Homo sapiens
ccagagaccagaatgaaagtcggggaagtccttatgcgaatcgtcagggcattaggccaaggaacctggaacgtatacactcaggcagct

SEQ ID NO: 589920 - DNA, 82 bp, Homo sapiens
aggaagcaagcagttcagaagagccaaggaataaacatgcaatgaacccaaaagggatccctccccgcggcggcgatggccc

SEQ ID NO: 589921 - DNA, 50 bp, Homo sapiens
gaaagctgccaaaagtgacatgcagttgaggagctcaagcttgggaaaat

SEQ ID NO: 589922 - DNA, 157 bp, Homo sapiens
cgcagagcgtctctggcgcgggcatacggtgcaacgggtccgcgggaatcttggatgcgcggaggtcccgagaccagggttttgaggttttgctgaagatattcctgaagaatcatcccaggtgccacactaaaaaaatgatccagttgacagctac

SEQ ID NO: 589923 - DNA, 50 bp, Homo sapiens
tctcaacttggttattgtaaaaaaaggcaatctgtacagaagctggtctg

SEQ ID NO: 589924 - DNA, 80 bp, Homo sapiens
gagcaatcagatacctactgaggtcaggagcaaagctgaggaggtggttctaactttgatggtttgagaccaaatgggaa

SEQ ID NO: 589925 - DNA, 50 bp, Homo sapiens
tggaggacttgcttttgttgaactggctcctacccagagattctacccag

SEQ ID NO: 589926 - DNA, 76 bp, Homo sapiens
tagcgcggaccctcgacttctatggagtagaactgcacagtggtaggggatccatatggctttggagacagtcgag

SEQ ID NO: 589927 - DNA, 50 bp, Homo sapiens
atctgatgatgatgaaagttacacagttggtgtggatgactacagctcag

SEQ ID NO: 589928 - DNA, 75 bp, Homo sapiens
gcggcataaagcaattgagaattcagctctgcaagatttgaagggtcccttaatatggaccttaatgaaatcagc

SEQ ID NO: 589929 - DNA, 75 bp, Homo sapiens
cggccatctcgctgcccgacgatgtccgcaggcggaattgaatgatctggcacgggaccctccagcacagtgttc

SEQ ID NO: 589930 - DNA, 75 bp, Homo sapiens
aagaaggccctggacacagcaatatctctgggctttcacagttcatcaatggtgctaaggaaatttgctatgctc

SEQ ID NO: 589931 - DNA, 50 bp, Homo sapiens
cagcgccgagggcgagatcgtgcagagaaagccacagatggctccctgca

SEQ ID NO: 589932 - DNA, 75 bp, Homo sapiens
cctgggaccaaagtggatatcaaacttgactatattgtggagtatgactatgatgctgtacatgatgatgaatta

SEQ ID NO: 589933 - DNA, 100 bp, Homo sapiens
gagctgctgaatcctgcccgcgtgaaccacatgcccagcacggacacgatgaggcgagtggtacgacagagcaagtttcggcatgtatttgggcaagcgg

SEQ ID NO: 589934 - DNA, 75 bp, Homo sapiens
cgcaccatctgaaaacaacatcatgcagtggaatgcagttatatttgggtataatgggtctctcccaaatggcga

SEQ ID NO: 589935 - DNA, 100 bp, Homo sapiens
ctgaaaacagagtggttgtctctgatcttggagaaattcattcaaggcttttggatcacagaccagttattcaaggtgaaactcgttattttgtaaaaga

SEQ ID NO: 589936 - DNA, 98 bp, Homo sapiens
ttctcccgatcccagtatctatgcctatgataactttggcgtgctgggcctggacctctggcaggagattgaccccagcctgggcgtggcggagctgc

SEQ ID NO: 589937 - DNA, 90 bp, Homo sapiens
tcctggtcgatgaagaggatgatgtttttggtgaagatgcctgctctgtgcctgtatctgagatcatcgccgttgaggaaacagacgttc

SEQ ID NO: 589938 - DNA, 98 bp, Homo sapiens
tgcatggatctgaaagttcatcctgaacaggaaaaggaaacttcggctgttctcaggaaattctaagcatcgctgccatgatgcagatccagaatatc

SEQ ID NO: 589939 - DNA, 83 bp, Homo sapiens
cgacatcatcgtcttcgcctatgcctgccaggctgctggtaacctccgaggctatggcatggcatccccaggcctcgcagccc

SEQ ID NO: 589940 - DNA, 100 bp, Homo sapiens
tgaggtcttattttgttgagtcgaaagtgaaattttcctttggccaacgtgacagagtcctgaggaaagagcctgtatttaacgatgagctcccagcaag

SEQ ID NO: 589941 - DNA, 96 bp, Homo sapiens
ggagaacaaatccaagattagcacagaagtgaccggggaggtgcgtcctcatcatgggaaggaggctgtggatccgcggcaggggcgggccagagg

SEQ ID NO: 589942 - DNA, 74 bp, Homo sapiens
atgtcctctcctcttggaaaccccaaaacggtatcagaagattaggatatacatattcacttagtgatcctatt

SEQ ID NO: 589943 - DNA, 100 bp, Homo sapiens
ggtggaggcaggctgcggcagacggcgacagtggcggcggcgccatggcagggcttgcagacaccattcgcttttcacccaagatgatttgatgtcttat

SEQ ID NO: 589944 - DNA, 100 bp, Homo sapiens
attcgcagtggtcgcttcttctccttgctgggaggctgtggcgtgctgggtgtcggcatctggctggccgccacacaggggagcttcgccacgctgtcct

SEQ ID NO: 589945 - DNA, 83 bp, Homo sapiens
gacaaggagctcagtgacctcctggacttcagcatggattttttatcaagcagaaatgcatcgaacaacgagaatcaagatca

SEQ ID NO: 589946 - DNA, 100 bp, Homo sapiens
ataaccttgttcctggtataccaacaatggaacactttcatcagttttactgtggattctccacagttttcctcgtgcgtactcacggtggaatccgatg

SEQ ID NO: 589947 - DNA, 103 bp, Homo sapiens
tggaacacaccatccaggacattgcacccaactatatccaatggatttgaacagaagcgctttgccaggcttgccagcaagaaggcagtggaggaacttgcct

SEQ ID NO: 589948 - DNA, 103 bp, Homo sapiens
ggcgcctccactccgtcccccgcgggtctgctctgtgtgccatggacgggaaacttcctcctggccaaccctgtgtctggcagccccatcgtgacgggtgtgg

SEQ ID NO: 589949 - DNA, 100 bp, Homo sapiens
catgtatggagaatggctggtctcctactcccagatgcatccgtgtcaaaggcaacagactactgcaacagaaactatccttagatgggaaccccaaacc

SEQ ID NO: 589950 - DNA, 83 bp, Homo sapiens
gtgctggagaacttcgtgggccgggaccattgacatttatggatgtggccatagaattctctgtggaggagtggcaatgcctg

SEQ ID NO: 589951 - DNA, 90 bp, Homo sapiens
gcgactggttgcgggaggctggactctggtgactgtgtgtgaccatgaagctcatggatgaggtcgccgggatcgtggctgcacgccact

SEQ ID NO: 589952 - DNA, 75 bp, Homo sapiens
ggatggagtggtcagcttggcatcgcggctgtggtcacaatttgggtctgcagcagaaatgctttcagaacagac

SEQ ID NO: 589953 - DNA, 100 bp, Homo sapiens
ccggaacattccaggatttttacgtacacttatggatgccctgagaaaagacaaaataatctttcctaatgatgaaaaggtctctctctgtcacccaggc

SEQ ID NO: 589954 - DNA, 90 bp, Homo sapiens
ccccgcgccgacggctgctcaaacatcaggaccccagttattaaagcttttggcatcttgaagcgagcggccgctgaagtaaaccaggat

SEQ ID NO: 589955 - DNA, 87 bp, Homo sapiens
agaacagctcgagagagcattacaagccagcctctgggaccgagatgatctcaatgccacccaccaacactgtgttttggccggttc

SEQ ID NO: 589956 - DNA, 74 bp, Homo sapiens
acgtgttcaatacacctcccacctgtcctcaggcatatcaaagcaaatgcagccctgaggatttggctactgca

SEQ ID NO: 589957 - DNA, 75 bp, Homo sapiens
aaagcgtccgcttccagctttgcgcagtgatattgtggtccagatagtagatgctcgaaacccactcctgtttag

SEQ ID NO: 589958 - DNA, 98 bp, Homo sapiens
tggacgtggatttggggatggctataatgggtatggaggaggacctggaggtggctttggtggcagccgtggtggtggtggatatggtggcagtgggg

SEQ ID NO: 589959 - DNA, 82 bp, Homo sapiens
cggcctcgcggcgacggcggcggtggcggcttggacgactcggagagccgaagaagaaaggagggcgcgggctaatgaccga

SEQ ID NO: 589960 - DNA, 96 bp, Homo sapiens
gaactccagcctaatggatcccaaactcgggagaatggtggatatcatccagtgaaaattggagacctcttcaatggccggtatcatgttattaga

SEQ ID NO: 589961 - DNA, 74 bp, Homo sapiens
taaagttgtcagtggctgactcacaggctggaagaggtgaaaaacttcatcacccgagagaacctggaggcacg

SEQ ID NO: 589962 - DNA, 98 bp, Homo sapiens
aactttttcacttactgcaggattttcagcttcagcaagcagtggatccaaacttctacagcaaaaacttacttcttttaggaaagacatacttgaaa

SEQ ID NO: 589963 - DNA, 75 bp, Homo sapiens
gttggtttgtggaacagacagctccttctttattgggagccatgctcactggtcctcctggtaccggcaagaccc

SEQ ID NO: 589964 - DNA, 103 bp, Homo sapiens
aacaacattcccctcctccagcaaattctactgaccctgcagcatctaccgctcactgtagaccatctcaagcaggtgcccctgggcgctgggattgctctag

SEQ ID NO: 589965 - DNA, 74 bp, Homo sapiens
tcccaaatcaacccagatttggtcaggaggcccagaaatctaaagatctttgttctataactgtaagtggagaa

SEQ ID NO: 589966 - DNA, 51 bp, Homo sapiens
cgtcatgcagtatggaaacaaacttgacaaaagtaagctgaagccaggaac

SEQ ID NO: 589967 - DNA, 98 bp, Homo sapiens
gagagaggcagagagggagagagggagagtgacagcagcgctcgaaacgccttgaatgtggtgaagaatgacctgattgccaaggtcgaccagctgtc

SEQ ID NO: 589968 - DNA, 99 bp, Homo sapiens
ttctccgccgcggcactgatccccacaggtgaatctggattgggaaagtcgacattaatcaactcattattcctcacagatttgtattctccagagtat

SEQ ID NO: 589969 - DNA, 90 bp, Homo sapiens
catcttactcttcttgctctcctttctgtaaacacagattcacaatgacatcctttcaagaagtcccattgcagacttccaactttgccc

SEQ ID NO: 589970 - DNA, 126 bp, Homo sapiens
ggcccgcttcaaggaacgggtcggctacagggagggacccaccgtagagactaaggtgtttcccattaaacactaccaggacaaaatcaggccttacatccagctgccatcgcacagcaacattac

SEQ ID NO: 589971 - DNA, 60 bp, Homo sapiens
aaacaaaagattgagctgcactgtattcctaacatggtttcattggatattcacccgaac

SEQ ID NO: 589972 - DNA, 75 bp, Homo sapiens
aaatctcaaacaatttatgagattattgataattctcaaggattctacgtatggagtctccctctgttgcccagg

SEQ ID NO: 589973 - DNA, 100 bp, Homo sapiens
tcttgatggaattagaagttttgaagtcagctgaagcagttggagtgaagattggcaatccagtgccctataatgaaggaagaaatgttggctatttggc

SEQ ID NO: 589974 - DNA, 90 bp, Homo sapiens
gaagacctcaaactttctgatcttttaaaatattacttaagagaatctcaagctgctaagcttcgacaaaatttggatgccctcctgaac

SEQ ID NO: 589975 - DNA, 74 bp, Homo sapiens
gactgtctaggagagcatttgtatgttatggtgaatgccaaatttgaagtgagaaagatcagtctaaagaaaag

SEQ ID NO: 589976 - DNA, 100 bp, Homo sapiens
actaattctgccttaaagaccctggagatgcgccagctctccggtttgggagatcttcgaggaagagtggcaaggtcccgcggcagtgctggtggccatg

SEQ ID NO: 589977 - DNA, 83 bp, Homo sapiens
gcaagatttgatgctcttgtgctcagtgacatcattcagacagacagtctagcagtgcttccttggagaccctgttagcactt

SEQ ID NO: 589978 - DNA, 100 bp, Homo sapiens
gatcctctgtccctcaagctgttaacagatgtcataggaaaggcagcgttggcttgtattgcaatcactgaaataactttctttatgggatacacaattg

SEQ ID NO: 589979 - DNA, 89 bp, Homo sapiens
catggctggagccagtgtcaaccgagtagtgtctcccggacctcttcattgcctaaatttacaagtccttccactttctctctgaggca

SEQ ID NO: 589980 - DNA, 83 bp, Homo sapiens
cgggcagcccgggaaatctccaagtcagaaagtgaactcggtgtgctgggccccccatgactacggcctgatcctggcctgtg

SEQ ID NO: 589981 - DNA, 98 bp, Homo sapiens
cggcagggctgtgaggcccgccgctcgcatgagcacctcatacggctgcttctggagaagatcttcttcagcagtatcgttctgctgtgtgcaaacta

SEQ ID NO: 589982 - DNA, 50 bp, Homo sapiens
tgaagagctttctataaatagcaatccagctgcagaaccttggcctgaaa

SEQ ID NO: 589983 - DNA, 75 bp, Homo sapiens
caggcagccttcaggactttgggggattgtggtccatcaggagtctgtgtgtgccacctatggaagtggcttaag

SEQ ID NO: 589984 - DNA, 97 bp, Homo sapiens
ggctgttacattacagataaaggccatgcaaaagatgcctgtgttattagtgttattgaagacaatggtgttcgaagagttgtcgtggtccctcagg

SEQ ID NO: 589985 - DNA, 98 bp, Homo sapiens
tgaagcttctacgtctagtgccagccaagtgattgctcctactcaagtgacagcgtcacactgctcagctccgcgaagagttgctgaaacttccctgc

SEQ ID NO: 589986 - DNA, 101 bp, Homo sapiens
ccagccaggagcaccgccgaggactccagcacaccgagggaaatattaggaagctgtgattttcaaagctaattatgaaaacatttatcattggaatcagt

SEQ ID NO: 589987 - DNA, 100 bp, Homo sapiens
gacctgaaggctgtcaagtatgtggagtgttctgcacttacacagagaaccatggagtctggcagtaccgccgccagtgaggaggcacgcagccttcgag

SEQ ID NO: 589988 - DNA, 82 bp, Homo sapiens
cggtgtaaatgttgagcctttttggcctggcttgtttgcaaaggatcagttccatgacaagaccccttatacgattatgttt

SEQ ID NO: 589989 - DNA, 144 bp, Homo sapiens
ctaccaacacccatcatggctaaaagtgcggaggtcaaactggcaatatttgggagagcaggcgtgggcaagtcagcaggaggatgcattagcacaacaggcctttgaagaggctcggagaaggacacgcgaatttgaagatag

SEQ ID NO: 589990 - DNA, 83 bp, Homo sapiens
tgccaaggaaaaactggagagcttcatcaaaaatagtgatagctttgataagggcaacaccctccactaaagagtcaagccag

SEQ ID NO: 589991 - DNA, 100 bp, Homo sapiens
cgctgtagtgggcggccagagcgccggcaagagctcggtgctggagaacttcgtgggccggtggtatgcaagattacaattatgtgtgggccaactgttt

SEQ ID NO: 589992 - DNA, 75 bp, Homo sapiens
ggaagatgcaagcggtttgggaccttgaacaaggcaaatatggttttgatgccgacatcagtggctcagacagtt

SEQ ID NO: 589993 - DNA, 75 bp, Homo sapiens
cccaggctcaagcagtcctaccatgtcagccttcccagtagctgggaccacagagaatccaggccagagcctgaa

SEQ ID NO: 589994 - DNA, 75 bp, Homo sapiens
ccgtccctttccagggagggaacaaagcccacagcaccgaaaacatcctgggatggcacgggtccaagtcacatt

SEQ ID NO: 589995 - DNA, 97 bp, Homo sapiens
atcatcccagtagttttggaatgtacccatctcagatgaagtgctgggtaggccaggtttcagcatcgcagacaagaagcgcaggacaggctgcatt

SEQ ID NO: 589996 - DNA, 100 bp, Homo sapiens
ctgtcccatcaaatcgcgcaaaggggatgtcctgcacatgcactacacgtggtccttcggggtgacaatgtgggagattgccacaagaggccaaacccca

SEQ ID NO: 589997 - DNA, 75 bp, Homo sapiens
gcctatttgatagaggaaatgtatgatgaagaacattctagtatgccagtagaaaaaaatatcactttagaaagg

SEQ ID NO: 589998 - DNA, 74 bp, Homo sapiens
gcacagattggttcctatgttcatgttgggaagaactgtgtgattggactgatagaaggttctgctcagtaccg

SEQ ID NO: 589999 - DNA, 73 bp, Homo sapiens
tgaaaagtcgcagcgagctggagccgccggagaaagccattgatctggtgacgaaagccacagaggaggacaa

SEQ ID NO: 590000 - DNA, 100 bp, Homo sapiens
cgcgccgcgcccttctccctggagtaccgagtcttcctcagtcaaaatgcagatcttcgtgaaaacccttaccggcaagaccatcacccttgaggtggag

SEQ ID NO: 590001 - DNA, 100 bp, Homo sapiens
gctgctttttctaactatttcaagatgatatttattcaccaaacaagggaaagacattcccggtcaggcatctctggtgtttgatgttgcattattggac

SEQ ID NO: 590002 - DNA, 78 bp, Homo sapiens
catccctggcttcatgagtgtatgattcgtctctttaatactggtgctgtgagaagccatctttccgacttcaaaaaa

SEQ ID NO: 590003 - DNA, 98 bp, Homo sapiens
gacggctcacctgtgcgggatggaacaaaagggaagtcgagacaacatgagtgtgattttgatctgttttccaaatgcacccaaagtatcgccagaag

SEQ ID NO: 590004 - DNA, 75 bp, Homo sapiens
gaaaatacaaatcacacgcataatggatgaaaggaaccgacagacctttgaagacaatttaattgaagcaaggaa

SEQ ID NO: 590005 - DNA, 75 bp, Homo sapiens
tggagatttgataacactggagatcagcaccaaatcccacagaggcatctgagctctgcttatgataatgtcaac

SEQ ID NO: 590006 - DNA, 100 bp, Homo sapiens
cggaaaacagagaggttccagaaatggctgcaggccaagcgcctcacgccggacctggtgcaggttttcctttggaatatggataaatacaccatgatac

SEQ ID NO: 590007 - DNA, 100 bp, Homo sapiens
ttaaaacggaatttacactgacagaagcagtggtcgaatccagtagaaaactggtcaaggaagctgagcaggagcagtgacttcacctgagaacatccca

SEQ ID NO: 590008 - DNA, 109 bp, Homo sapiens
ggctgatggcggaggcttcgagtgacccgggtgccgaggagcgggaagagttgctggggtaccccctgtaccggctgggtggcccacaacttcgggtgttccgaaccaa

SEQ ID NO: 590009 - DNA, 100 bp, Homo sapiens
gtctcctgaagaggaaggagcggtgtcctcttaagaaaatggtcagagttgcctctgaagctgctgccgctaaatatatcccaagccctggaaatggcat

SEQ ID NO: 590010 - DNA, 50 bp, Homo sapiens
gttgaaatagaaaagtctctaacacaggacttgattattcttagaaatgc

SEQ ID NO: 590011 - DNA, 100 bp, Homo sapiens
gatagaaaatgtaaaggccaagatccaggataaggaagattgatgtacagctatatattttgtcctttctttcacctcatgatctgtgtcagttgggaag

SEQ ID NO: 590012 - DNA, 75 bp, Homo sapiens
actgggggattcgcagggaggatgtcgggacaccccggaagctgggaaatgagcgtttcccaaagtgtattctgc

SEQ ID NO: 590013 - DNA, 74 bp, Homo sapiens
gttactccattgctgaggagtggactgttatgaacactatccaacaattaatgatgattttaaattcagcaagt

SEQ ID NO: 590014 - DNA, 82 bp, Homo sapiens
ctccgcgtcccgctcgctgggagagagtgccctctggtggtcagaagatgctgtgctgtctcgttaggatgaatggattaaa

SEQ ID NO: 590015 - DNA, 98 bp, Homo sapiens
aagactgtatgatagtgttagttccacagatggggaggacagtctagagagaaagaataactgaagtgaagtgatggactccgatttggagagtagta

SEQ ID NO: 590016 - DNA, 74 bp, Homo sapiens
gtgggagccccgagaacgcctccagcggggatgacacagaaggagaactatgccatttttgggtcaggactgga

SEQ ID NO: 590017 - DNA, 83 bp, Homo sapiens
cttcatctttacagaggaatagtctacaaaggaagacttgtaacctggagaagaggtatccagctcacatagaagacattgac

SEQ ID NO: 590018 - DNA, 83 bp, Homo sapiens
gtgaaaaaggacgatgccatcaccgcatataagaagtacaacaaccggtgtctggacggttctgcggggagtgtctccagccc

SEQ ID NO: 590019 - DNA, 98 bp, Homo sapiens
gaagcagtaaacagttgggaaatgcagtcactacctgagtataaggataaaaagggatattcaccccttgagctaatgtcaaaccccgaaattccaca

SEQ ID NO: 590020 - DNA, 100 bp, Homo sapiens
tgcgcgaagctggccaaagcctgcccagacggctcacctgtgcgggatggaacaaaagggccaaatccttgtagctgtcttcttgccccggtcagtgcca

SEQ ID NO: 590021 - DNA, 100 bp, Homo sapiens
ccagcgagatccgggccgtgaacgaaagcagtgacggaggagcttgtaccaccgggctccacgtgttccccacgtttgtggcgtacgagctcacggtgct

SEQ ID NO: 590022 - DNA, 118 bp, Homo sapiens
gaacagctatgcatgctgcttttgatgtctgacaacgtggatcgttgttttgaaacgcaagaaaattggatgtatattttgaatatgaagaaaaaataatgagcaaaactactctgga

SEQ ID NO: 590023 - DNA, 75 bp, Homo sapiens
tgagcaagcccaggcacagccgacgccgcgggggtcacagtaaatcgatccagtgtctgacggtgcataaaaacg

SEQ ID NO: 590024 - DNA, 100 bp, Homo sapiens
gcgaaccaacggttagcggtggcaggggctgactgagagcgtctgcttggcaacaagaatgggtgaatcagcaaagggaagatattgaaaggcaaaggaa

SEQ ID NO: 590025 - DNA, 51 bp, Homo sapiens
ggagacatgctcttattgtacagaaacacagtgctctgtgcctatacagtg

SEQ ID NO: 590026 - DNA, 90 bp, Homo sapiens
agttaatatttttccagggatataacagtccactttggaaagaagatttctcagtgctgggctttgacaaacttcctctgtggggtacca

SEQ ID NO: 590027 - DNA, 75 bp, Homo sapiens
catagaacctattatgctctatcagtaacaaatgtggcaattattttggatctatcacctgtcatcataactggc

SEQ ID NO: 590028 - DNA, 100 bp, Homo sapiens
ctgctatcggctggcggcccacaagctgcttaaggagatggtgctgctggagcggctgcggcaccccaacgtgctgcagaacatatcctgcattagagac

SEQ ID NO: 590029 - DNA, 100 bp, Homo sapiens
gcccgggcagtcccatgcccaggtcacgtggcacaagcgtgggggcagcctccctgtccggcaccaggttatcaatactctggctgaccatcatcatcgt

SEQ ID NO: 590030 - DNA, 100 bp, Homo sapiens
ggaaccgggacctagaggcacacgtccggcagttgcaggagcggatggagttgctgcaggcagagggagccacagactgattcttgctattccaaatcct

SEQ ID NO: 590031 - DNA, 118 bp, Homo sapiens
aggccctatggggcatacctatggctttattgacctcgactcccatgcggtcaaggtcagcatctcctcgacgatcaagatctatctctcttcgtagatcaagatcagcttcactcag

SEQ ID NO: 590032 - DNA, 100 bp, Homo sapiens
caatggggaacgctcacggactgtgtgggtaaaagccagagcaaggaaccagagagaccacttcctcccttaggtcctgtggcagttgatcctaaaggat

SEQ ID NO: 590033 - DNA, 100 bp, Homo sapiens
gcacaagagaaagaaggttaagctggctgtcctgaaatattataaggcatcaactgtgaaatctgtgttagaattgattcctgaattaaatgaaaaggaa

SEQ ID NO: 590034 - DNA, 98 bp, Homo sapiens
tcgagacaactatttttgaggtatctgaggctaccccacagcactctctggcattgtgacgggcagtgaggacatgtgcgtgcacttctttgatgtgg

SEQ ID NO: 590035 - DNA, 76 bp, Homo sapiens
ctcatctcagcctccaaaagtgctggcattacaggtcaactcctggagcggctccattgagattggggtgacagcg

SEQ ID NO: 590036 - DNA, 74 bp, Homo sapiens
caagaactattcggttctctacttccaacagaaggtatgtgcactgcgcgtgaccagccgggcccgcagccgca

SEQ ID NO: 590037 - DNA, 74 bp, Homo sapiens
aggaatgttcgttgtacctgatactgttgacatgactaaggctattataatggttttagagtcaactggagaaa

SEQ ID NO: 590038 - DNA, 83 bp, Homo sapiens
ctgaggcggcccagcggcggcagcaaaatgatgcttcaacacccaggccaggtctctgcctcggaagtgagtgcttctgccat

SEQ ID NO: 590039 - DNA, 100 bp, Homo sapiens
cagtactacgcttacctcaccgacacacagtgcaagcgcgtaggaacacaatgctgggtgtttggatcaaagccatcggccagacagagttgaatgcaag

SEQ ID NO: 590040 - DNA, 87 bp, Homo sapiens
gagcaagccgggcggcctgccccgccggagcagcatcatcaagggttatatcctgtgttgtgacctcatggtttaagtgggaataaa

SEQ ID NO: 590041 - DNA, 100 bp, Homo sapiens
ccaccccatggagtagcaagtgtgaaagaatggttcaattatgttacagctacaaggaatgaagagtttgtacagatgatgactgcaaagtgaaggcccc

SEQ ID NO: 590042 - DNA, 82 bp, Homo sapiens
cggcacgactggaggcacaaggaggacgccggcgtcttctgctcaggtttggtgcacctcgatttggaggaagtagggcagg

SEQ ID NO: 590043 - DNA, 98 bp, Homo sapiens
actgaagattgtcatgattgtttatcctaatcccaatgctgaagtaagattgtcttggaaatactaagttgggaacatcatttacagcgagcaatttc

SEQ ID NO: 590044 - DNA, 82 bp, Homo sapiens
cgccggagagagcgtgaatttgcctcggggacgcctctccagcgcgagcttcggcctcggctctgtaccatgaagaagggcc

SEQ ID NO: 590045 - DNA, 90 bp, Homo sapiens
atgccaaatatgaataacgacccatacatgtcaaatggatctctttctccacccatcccgagaacagtgcttgtgaatgacttcttcttg

SEQ ID NO: 590046 - DNA, 50 bp, Homo sapiens
cctcctgagtagctgggattacagatgacagtcatgtccctttccaggga

SEQ ID NO: 590047 - DNA, 82 bp, Homo sapiens
ctgcgctccccgccgcccgcctgcgcctccggggccggccctgcaggttttaaaatcaaagatgggaaaatcggagaaaatt

SEQ ID NO: 590048 - DNA, 97 bp, Homo sapiens
tctagctattgccttattttttctcatggatgttcttcttcgagtatttgtagaaggatcatcactgttgaagaggcaaagcgcaggaagagcacat

SEQ ID NO: 590049 - DNA, 75 bp, Homo sapiens
cagatccagaaactggaggagtcccgctcgaagctaggtacctagtcgatagtcgctggttcaaacagtggaaaa

SEQ ID NO: 590050 - DNA, 100 bp, Homo sapiens
gatttactggagttgcaagtgggagcactggaagtacgggcagttgcagtgttggagctaaaacccaccgtgcggaggtcgtttgaattccaaagatgct

SEQ ID NO: 590051 - DNA, 100 bp, Homo sapiens
acaacagtgagaaccagctgttcctggaggaggagcggcggatcaatcacacgaagctgaagtcctttccagaggaccctcagcacctgggggagtgggg

SEQ ID NO: 590052 - DNA, 95 bp, Homo sapiens
tcttcatgaaggtggtgaagcccaagacctttccaaagtgaaactgatgagatttgatgatccactgttggggcctcgacgagttcctgtcctgg

SEQ ID NO: 590053 - DNA, 75 bp, Homo sapiens
cactctgctctgcatagccatgtactaatggtcacttgatgtgcgctggctgttttatccacctactagcagatg

SEQ ID NO: 590054 - DNA, 82 bp, Homo sapiens
gcgagagtgggcgagaacgtccactgcgggccggcgaaagctggagtacgagagggcctccaaagtggaccagtttgtgacg

SEQ ID NO: 590055 - DNA, 74 bp, Homo sapiens
cgggctgaagcgactgagtccgcgatggagggtcttactgaagtaacacaaagcttaaaaatggaaaatgaaga

SEQ ID NO: 590056 - DNA, 50 bp, Homo sapiens
gggaccgccgccgccgccgccaccatggttcctttgcccaaagactcaac

SEQ ID NO: 590057 - DNA, 74 bp, Homo sapiens
tgggcctacaccagcatccggtcagttatcatctggtgacaaagcttcagagtgtcaatccatatctacaagga

SEQ ID NO: 590058 - DNA, 95 bp, Homo sapiens
ctaaaaacaaagaggattttgagaaggtcctagcagaagatgtgactcagactgcctctgggtggggctggctggcccacagatcctgccaccat

SEQ ID NO: 590059 - DNA, 96 bp, Homo sapiens
cggcagggagtgcatcaaaggtgtgaacacaggcgttcgtggcattcagggatgtggctgtgtacttcacccaggaggagtggaggttgttgagcc

SEQ ID NO: 590060 - DNA, 100 bp, Homo sapiens
ccaaccaaattgtcgccattaagaaagtgtggatgaggtcaccattgtcaacattttgaccaaccgcagcaatgcacagagacaggatattgccttcgcc

SEQ ID NO: 590061 - DNA, 90 bp, Homo sapiens
aacctcaggacttgagtaacagcaacatggcaggcagtatgacacctaagtcgccctccactgacatctttgatatgattccattttctc

SEQ ID NO: 590062 - DNA, 100 bp, Homo sapiens
gcccaaggtccgcaagtgcctggccaacggctcctggacagatatggacacacccagccgctgtggagcttgtacctccaggcccatacatccttccaaa

SEQ ID NO: 590063 - DNA, 90 bp, Homo sapiens
aatataaagtatatgaagagcaaagtgatttcttacatagctagatgaggaagaggagcgaaggaaaaggcgccgggagaagaacaaagt

SEQ ID NO: 590064 - DNA, 90 bp, Homo sapiens
cttccttgtgctgtggatttgctaactcagtgctggagaatctggtaaaagcaccattgtgaagcagatgaggatcctgcatgttaatgg

SEQ ID NO: 590065 - DNA, 100 bp, Homo sapiens
acttctgaactaaggggttcctccaaatgttggctgaaattcatcccaaggctggtctgcaatgaatgcagtagtagagcagtgtctatattcaacaaag

SEQ ID NO: 590066 - DNA, 100 bp, Homo sapiens
atggagagaactgcaagtgtccttcgacgggagatacactctgtgcagttttagagagagacacactcagtattcgagaaagtcgactttttggagctgt

SEQ ID NO: 590067 - DNA, 100 bp, Homo sapiens
gtggttgcgggcgcagcgggcagtgtcggaggccagcggggccggaagcggcggcgcaggttcaaaccttgtactactcagctgatcacaagctgcttga

SEQ ID NO: 590068 - DNA, 75 bp, Homo sapiens
cttttttagaaaactcagcagtgagacctacagtcaagcaaaggacctggaggagaaggcagagcccccccaggc

SEQ ID NO: 590069 - DNA, 80 bp, Homo sapiens
attgataacaccctgtaacagctgaaccaaagagaaccctgtacagtaagaaatatggtgtggacctcatcagatacact

SEQ ID NO: 590070 - DNA, 74 bp, Homo sapiens
tcacgatcctgtaactgccaaacccaagttggttggagatgtggattttgaagtttcaccagtgatcattaaag

SEQ ID NO: 590071 - DNA, 75 bp, Homo sapiens
agggaagatcgatgtgtgcattgcactcgactatgacatcaacattgaggagattgggtgaagacatttttaaag

SEQ ID NO: 590072 - DNA, 132 bp, Homo sapiens
cagccctcacacatggactgcccagtgcccacacctggctttggcaatgtggaagagattcctgagaatgacagatggactggtgatcccattggtggagctgtcagcaaagcaggtggcatttcatatccc

SEQ ID NO: 590073 - DNA, 75 bp, Homo sapiens
gtggctttggatcagattattcacgaagctctagaaagctttggaggaattttttacatcacttgtgaagcaaga

SEQ ID NO: 590074 - DNA, 74 bp, Homo sapiens
gtacaagctgatcctgtccacagggaatgggtactgttcaaaaaggaatgccccacaagtgttaccatggcaaa

SEQ ID NO: 590075 - DNA, 75 bp, Homo sapiens
ccaagaagcagccgccagttgggatcaaatgtgagcctatggatcaagggcaattgaaggaacagactaaaaatc

SEQ ID NO: 590076 - DNA, 100 bp, Homo sapiens
acaaacccaccgcaagtcgccacctaccacagagccatcaaaatcacagtggatgggccccgagaacctcgaattataggatattccaagataaatgcat

SEQ ID NO: 590077 - DNA, 101 bp, Homo sapiens
gaccatgatcttggaatcattttgctctcagtcatccttacccctaaagaaggagagtccagggatgtggctaacatttccaatgatcactggccatcttt

SEQ ID NO: 590078 - DNA, 94 bp, Homo sapiens
gctggtagcagcgcagaggaaaggcggcttttagccaggttcaatgaaagatcacccacagcagcagccaggcatgttgtcccgtgtgactggg

SEQ ID NO: 590079 - DNA, 100 bp, Homo sapiens
ctcgaggaagttctcgtcctgacagatctccagctattgaaggagctccctctttgcccactagcagggcattagctggtgctgaagacagtggctgctt

SEQ ID NO: 590080 - DNA, 75 bp, Homo sapiens
ggcttgctctgagctgcggttactgtgtccaggccccgggttctcaggcttttatcttgagaacatggtgtctgg

SEQ ID NO: 590081 - DNA, 100 bp, Homo sapiens
cacccaaagacagggaagtggcagaaggaggccttccccgggcggagagcccctctccagtgcacgatctgattttctggagagatgtgaagaagactgg

SEQ ID NO: 590082 - DNA, 117 bp, Homo sapiens
tgcaatcatggtgcagaaataccagtccccagtgagggtgtacaaatacccctttgaattaattatggctgccatcgaagacggcaatttggaggaaatggaagaggaagtacggct

SEQ ID NO: 590083 - DNA, 99 bp, Homo sapiens
cagccggcgctggctgtggtcggtgctggcggcggcgcttgggctctgttaatacaatctgttggaatgacactggagaatatattttatctggctcag

SEQ ID NO: 590084 - DNA, 100 bp, Homo sapiens
gggaggaggtagagggcgtgggggatatgacaaggatggaagaggtcctatgacaggatcaaggcagctgagtatgtcccagagaaggtgaagaaagcgg

SEQ ID NO: 590085 - DNA, 100 bp, Homo sapiens
gcaacctcacctcctggggggagctgatgaagtccaagtactcagacatcaccatcatgtttgaggactatggctatgtacagaccacatccacggagat

SEQ ID NO: 590086 - DNA, 90 bp, Homo sapiens
tgctatccctggtcaaatcagaggtgtcggatgatttatcagagacagacatcagcaatgaggctcgggatccccagactctcacagaca

SEQ ID NO: 590087 - DNA, 75 bp, Homo sapiens
ccactatccagaacctccaatctttcgcaccttctaagtgagcaacacagaaactttgcacagagtaaccagtat

SEQ ID NO: 590088 - DNA, 99 bp, Homo sapiens
ctttgtcagtgcacaaaatggcgccctacagcctactggtgactcggctgcaggagctcgcccgtcagcgaggagtcctggagcgcacagagaagatgg

SEQ ID NO: 590089 - DNA, 100 bp, Homo sapiens
tcgtctgctgagactcggctccaaggtcacagctcgtaacactggaaactttgagggaaattttgagtcactggaccttgcggaatttgctaagaagcag

SEQ ID NO: 590090 - DNA, 100 bp, Homo sapiens
gtctactgttcacgaaatcctgtgcaagctcagcttggagggtgatcaaaaatattttgattctggggattacaacatggctaaagcaaaaatgaagaac

SEQ ID NO: 590091 - DNA, 98 bp, Homo sapiens
gtggccgtccgggaggatgggggaactgtgggcgtcttctctccaaagaaggaactctgtgcggctggtgatccgaaaggtgcagttcgccccggaga

SEQ ID NO: 590092 - DNA, 50 bp, Homo sapiens
agaggagctgagcgagcgcggaaggtatgcatcgtgcagaagcgagacac

SEQ ID NO: 590093 - DNA, 90 bp, Homo sapiens
gtcgcgcccgggaggaaggaacgaggcaaggagctaaagcagcgtgcgttcagccctgggaatggcttattcagaagagcataaaggtat

SEQ ID NO: 590094 - DNA, 75 bp, Homo sapiens
cagcatattgtactggcctgctgctggcccgcaggggatgccagtaaaactgtgagcagcccacccacctcccca

SEQ ID NO: 590095 - DNA, 100 bp, Homo sapiens
tcaaccacctcgagcggctgctggacgaagggctccgccatgtcacagatgaccagaagacatacaaaaatcccagcctgcgggctcaaggagggcaaac

SEQ ID NO: 590096 - DNA, 101 bp, Homo sapiens
cggcgccctctggggctccgagcccggcgggaccatgttcaccagcaccggctccagtgggctctgtgctggagaatctggtaaaagcaccattgtgaagc

SEQ ID NO: 590097 - DNA, 90 bp, Homo sapiens
cctgacctccggcagatgtttgggccaaatgaccctgtgactaacatctgtcaggcagctgacaaacagctattcacgcttgttgagtgg

SEQ ID NO: 590098 - DNA, 75 bp, Homo sapiens
acagagatacccagacaacaggatcgtctcgtccaaggacacatgctaaccaagagtgagaagaaccagttattg

SEQ ID NO: 590099 - DNA, 100 bp, Homo sapiens
caggggctgagcttctgcgctgtggagaagccagtgtactaatggtcacttgatgtgcgctggctgttttatccacctactagcagatgcccggctgaag

SEQ ID NO: 590100 - DNA, 82 bp, Homo sapiens
aaaaggaggccaaagactttgtaccactgatgaaattatgaccaggtgggcccgagttagtaccacatataacaagagaccc

SEQ ID NO: 590101 - DNA, 75 bp, Homo sapiens
cgaatgaatgaacagccacgtcagtcttgccacttgcctagtgaggcttttccgaacctggaaggagacgtctag

SEQ ID NO: 590102 - DNA, 75 bp, Homo sapiens
ccattcttccctgggctggtgaagtacatgaactcagggccggttgtggccatgttattagaggaagtaacacaa

SEQ ID NO: 590103 - DNA, 100 bp, Homo sapiens
gcaggaaatccccactcctcggcccagacgcttacgaagtcccagtaagaaagaattggagactgaatttggcacagagcacttttcaggattagaagag

SEQ ID NO: 590104 - DNA, 100 bp, Homo sapiens
gggcggcggctgcggcagcaagggcggcggtggcggcggcggcagctgcagtgacatgtccagcatgaatcccgaatatgcatcagagaatttagatgag

SEQ ID NO: 590105 - DNA, 101 bp, Homo sapiens
ggtcctgggcatggggagcctgacgttttgaaggatgagcttcaactctatggaggaaccaaagaggttgttgtaaatgtggatgatgatggagtcatttc

SEQ ID NO: 590106 - DNA, 83 bp, Homo sapiens
atttgctacagcatcccacattaagtcaacggcacgcttaaaaaggcctcttaagagccttgatggtgctctatatgatgatg

SEQ ID NO: 590107 - DNA, 75 bp, Homo sapiens
acctgaacttacctcagaagaaaacaaaatcccagatgctgacaaagaggaataaacatggtgtgtctcgaaaga

SEQ ID NO: 590108 - DNA, 75 bp, Homo sapiens
agcaggtgcagcagaccctcgcccggaagggccgcagctccgtgggcaacggttttagtattaaagcagtgccat

SEQ ID NO: 590109 - DNA, 95 bp, Homo sapiens
agcgtgctaaagtgtctcaagcactgtttgcaaaggttgcagcaaccaaaagccaggatctatttggaaagtcagacccatacctggaattccac

SEQ ID NO: 590110 - DNA, 75 bp, Homo sapiens
ggaccccggcgcgctgaatgcaggtgaagaggaacagatgctgccatgaaaggggtttcctagaaagtggtgaag

SEQ ID NO: 590111 - DNA, 75 bp, Homo sapiens
caacagcctgccaccttacgctcagggcttggcctcccctcaggatgtgatcttcgtggtggaaagctaaatttt

SEQ ID NO: 590112 - DNA, 80 bp, Homo sapiens
ggacattgactggggggctcttgaaggtgctgttcaagtcagtagaagaaccatttcttcgaattccttctcaccagagg

SEQ ID NO: 590113 - DNA, 100 bp, Homo sapiens
cacacacaggtgaatttaaaggagcagccctggtgtcacctatcagtaaaagaacccttaggagaaatcttgagagtggacagcaattgtgaagatcgcc

SEQ ID NO: 590114 - DNA, 98 bp, Homo sapiens
ggaaatctggaaccgggatggcgacgtctacactgagtcggaggcgaaggactggaatgtcacgtggaataccagcaaccccgacttcaccaagtgct

SEQ ID NO: 590115 - DNA, 80 bp, Homo sapiens
actgttgaaattgtccatatagatattgcagatagaagtcaagttgaaccagcaggaccagttactctccacaagaaaat

SEQ ID NO: 590116 - DNA, 82 bp, Homo sapiens
gcgggaggcccgggcggcgcgggcgcgggcgctgcggcgggacagctcgacgcgcaggatgcctaaatcaaaggaacttgtt

SEQ ID NO: 590117 - DNA, 100 bp, Homo sapiens
ggcggtgtcgacttctacgacgtcgccttcaagggtggttctcttcccaaagtggaagccaaattcatcaattatgtgaagaattgcttccggatgactg

SEQ ID NO: 590118 - DNA, 80 bp, Homo sapiens
tggccaccatccttgggaccgcctgcctggccattgcgagcggcatctacctactgggttccaggaagaagccctggcca

SEQ ID NO: 590119 - DNA, 95 bp, Homo sapiens
ccacaggcgagctcacaggtcgtcatgcccccactcgtcaggggggctcaggtggacatgatctcactagccaagcagatcatcgaagccacacc

SEQ ID NO: 590120 - DNA, 109 bp, Homo sapiens
cgcatcttccggatctttgaggggacaaatgacattcttcggctgtttgtggctctgcagggctgtatggtttggaacaaactctcccttcacttgttgccctgtagca

SEQ ID NO: 590121 - DNA, 100 bp, Homo sapiens
agcgagcgctgcgaggtggcggcctgaggtcctcagccagcagagccacgttccttatgagcaccgtgggtttatttcattttcctacaccactgacccg

SEQ ID NO: 590122 - DNA, 80 bp, Homo sapiens
gttttttctaatggctattcaagacatatctgaagagatggattaagaatgctttggattaaggattgtggagcacattt

SEQ ID NO: 590123 - DNA, 101 bp, Homo sapiens
caaacctcaaagcatggctaagagtgttcagtagaaatgggaacctggcttctgtatttaccatgtacctggagcattggtttggcagctgaaccaggttg

SEQ ID NO: 590124 - DNA, 75 bp, Homo sapiens
tgaagggtgattttgatgcttgcgaagagttgattgaaaaggctgtaaatggtgaatctggattgggaaagtcga

SEQ ID NO: 590125 - DNA, 50 bp, Homo sapiens
gattaactcattcaaggttacccagttgggcaagttaaagtcttcagagc

SEQ ID NO: 590126 - DNA, 87 bp, Homo sapiens
cggccctcaccgccctcaccacccctatccagacggctgcccttcaagtaccagcagcctggcatcctcgctacaacctcattgttg

SEQ ID NO: 590127 - DNA, 74 bp, Homo sapiens
aggcataattaggataataaatcctataacaatgcagtgtataaaggtgagtggcagtgtgatgagtgtttata

SEQ ID NO: 590128 - DNA, 88 bp, Homo sapiens
tggctcagccacccgctgggaatcgtgcagggattcttcggaaagagtaggaaactttttggcagacttttacctggtgaatggactt

SEQ ID NO: 590129 - DNA, 82 bp, Homo sapiens
tgggagcctagaatgcatcagtgcccttgtggcgaatggggctcacgtcgagatgagctttctgatgttagccaaggcggat

SEQ ID NO: 590130 - DNA, 82 bp, Homo sapiens
tccgtccgccgccaccacccactccggacacaggcccagggccccggccagtgcccagccccgctgggagacccggccagca

SEQ ID NO: 590131 - DNA, 100 bp, Homo sapiens
cgtcgctctgtgacctgcgggtattggatgattggtagctaagactcccgaatacttcagaagtggggaaatgtgttctaagaacggaagcatctgggct

SEQ ID NO: 590132 - DNA, 75 bp, Homo sapiens
gcctcctgagtagcttggattacagtcgatgctccgagggagaggagcttgttacaaacacacattctatggaat

SEQ ID NO: 590133 - DNA, 101 bp, Homo sapiens
atctggagtgaagttttcactgtggagaagccaggtgggaagaaggctatgactttgcagccgtcctggagtggttcgcggagcgtgtggaccgcatcatc

SEQ ID NO: 590134 - DNA, 75 bp, Homo sapiens
ttcgtccaggacagtatgtggatgtcacagccaaaacgagacaaggacggcagcaaggtgacaacagtggtggca

SEQ ID NO: 590135 - DNA, 98 bp, Homo sapiens
gaaaagcgagcctcttctgatgtctgataaggtagatgcaaacaaagaagaacggcgagttcaggtgatttgaagatattaaagctagaaattggaac

SEQ ID NO: 590136 - DNA, 74 bp, Homo sapiens
ttgggttatatttgatgaaattcattatatgagagattcagctccacagaaaagttctccaagtccccactcga

SEQ ID NO: 590137 - DNA, 90 bp, Homo sapiens
cgcgaggtccgcgcagcccagcgcagccatgccctgggcagtgacggggttcgggtgaccatggagagtgcgctcaccgcccgtgaccgg

SEQ ID NO: 590138 - DNA, 100 bp, Homo sapiens
agacctcatcacccatctggagcaaggaaaaaaaccttcgactatgcagagacatgagatggtagccaacccctcaggtgctggagaatctggtaaaagc

SEQ ID NO: 590139 - DNA, 50 bp, Homo sapiens
ttttcctcctgcagcccaccgtctacttgattcatgacagatgctgcccg

SEQ ID NO: 590140 - DNA, 100 bp, Homo sapiens
cgccaaggagatcgtctctctcatcgaggcccaaaccgccaaggagggaaaacccctgatcctaaaatgaatgctaggacttacatggatgtaatgcgag

SEQ ID NO: 590141 - DNA, 90 bp, Homo sapiens
cagctactatttggacatgcacagcctcccccatgtcatcaacccagtggagtcccggctggtacgcctgcctcacaccttgcgatgcgc

SEQ ID NO: 590142 - DNA, 74 bp, Homo sapiens
cacagtcaaagccatgatgaaaaactcagtcgaatgtttacccttgcggaagttgcatcacttaatgacattca

SEQ ID NO: 590143 - DNA, 100 bp, Homo sapiens
tccttcacacagttccctggaaatgaaatcaaagagcaggaggttgtggacaaagtcatggaaacactggacaatgatggagacggcgaatgtgacttcc

SEQ ID NO: 590144 - DNA, 75 bp, Homo sapiens
ctcttcccacggacgcgcgagacaatgaggagattcatgcccgaaaccaaaatgaaataatttttgggctgaatg

SEQ ID NO: 590145 - DNA, 48 bp, Homo sapiens
ggaagcaggcggagaagagacaagagttcctatcagactgagattggg

SEQ ID NO: 590146 - DNA, 75 bp, Homo sapiens
ttcgaagtgacctcagcagggcatccagcccttgaaggtagtggacccagatcatcccctcgcagcacttgttcg

SEQ ID NO: 590147 - DNA, 100 bp, Homo sapiens
gaacatgctgaaaatccatgtcataaagggacagtatggaaattaccagcagtgaaaaagtacttacattccagtagccagtatctattagcagccatat

SEQ ID NO: 590148 - DNA, 74 bp, Homo sapiens
taacactcaagcaaagaagagttgagcacaatcagtttaatggatcgagaagtggcgttgcttgctgaaatgga

SEQ ID NO: 590149 - DNA, 80 bp, Homo sapiens
ggaaagcccaggggtacaggaggcctctgggtgaaggcagaggctaacatggggtacaaatctattgtcaagtacaagac

SEQ ID NO: 590150 - DNA, 83 bp, Homo sapiens
caccatatcaaattgcctgtggaattaggccaaagatgaagaggaagcctttctggattggagtgatgatgatgatgatgatg

SEQ ID NO: 590151 - DNA, 75 bp, Homo sapiens
ctgcagagcccgaggccggggaccaggacagtcgcgagttcaaatctgaacatcaatgatgtactagggaactac

SEQ ID NO: 590152 - DNA, 50 bp, Homo sapiens
aggcactgctttttcatgacggaacaaatgtggtatctggggctggcggt

SEQ ID NO: 590153 - DNA, 100 bp, Homo sapiens
tgatgatttagttgattctctgaagttggaactgataatgggagagaagcaattgaaagtggggctgcatttctcttcatgacatttcacttgaaggact

SEQ ID NO: 590154 - DNA, 82 bp, Homo sapiens
agccagtggagctgctgaatcctgcccgcgtgaaccacatgcccagcacggcaataatgacgatgaggacctgacaccagag

SEQ ID NO: 590155 - DNA, 90 bp, Homo sapiens
gccaaccaatcaggaaatcgaaattgtctacaagtcctgaatcctgctctctacgagcagtcttgtgaagcccacaagcaccgagggaac

SEQ ID NO: 590156 - DNA, 100 bp, Homo sapiens
attccaaagtctgaatcagaggccacctcagagagagtgttgagggataaccaattggctggcaaagtaacaaatgaaaagtaacctgactctattgacc

SEQ ID NO: 590157 - DNA, 75 bp, Homo sapiens
gaacttgccgcgtcgaggactgtcggatatccctcctaaatgtacaatcaaggatttgctaccaaaagagaagag

SEQ ID NO: 590158 - DNA, 51 bp, Homo sapiens
ctccatttgctaaaggaatagtgtttgagttctaaagttcctgttgcttca

SEQ ID NO: 590159 - DNA, 123 bp, Homo sapiens
gacgggacatgcagcctcttccgcctgagccccggaagggtgatgtggctgcggcatcgccggcctcgctatggtgatacagtagtatatcaatatggagtagctacagtaataattgaagct

SEQ ID NO: 590160 - DNA, 82 bp, Homo sapiens
gtcattacatgtgaaggctgcaaggagtacttcttgcaagcagagctgacaagcaacgtcttaaaaacaggcgtggtgcgct

SEQ ID NO: 590161 - DNA, 83 bp, Homo sapiens
ggaggggcgaaggcgggcggcagaggcgatcaggtcaaaatgcagatcttcgtgaaaacccttaccggcaagaccatcaccct

SEQ ID NO: 590162 - DNA, 98 bp, Homo sapiens
cgggatcccagagctacccttcttggagcccacagggatgccatggacaatattaccaggcagaaccaattctacgatacccaagtcatcaaacaaga

SEQ ID NO: 590163 - DNA, 86 bp, Homo sapiens
aagacgaatcgttaaacatcttaggtcaggggtactttcattgaattccgaaatgggatgttaaacgtgtcccctattggaagaag

SEQ ID NO: 590164 - DNA, 51 bp, Homo sapiens
gaaaatgtgatgcatgtctcagtgttgtcgagatgtccacagaaggaggat

SEQ ID NO: 590165 - DNA, 98 bp, Homo sapiens
gcacagcctggcgacggctgcgattcaagatggaaaaggtgatgtaaccattacaaatgatggtgctaccattctgaaacaaatgcaagtattacatc

SEQ ID NO: 590166 - DNA, 100 bp, Homo sapiens
gccagcctgatcttcgtctgcatcctgctcgtccatgtcctgctcatgcccagacaaaaaacttggactttcgccgaaagtgggacaaagatgaatatga

SEQ ID NO: 590167 - DNA, 98 bp, Homo sapiens
ggctggcctgcggcgcctgggcgctctgaggcagcggaggaggagaaagagatggacctcccggactcggcctcgagggtcttctgcggccgcatcct

SEQ ID NO: 590168 - DNA, 50 bp, Homo sapiens
gccagcggtccagagctgatgcaggtcctggctataagtcaccatggcac

SEQ ID NO: 590169 - DNA, 100 bp, Homo sapiens
gctcggtattccccttcctgctagtcctggtggatctgcagtacgaaggtatacactgaatatcctcgaagaaattggtggtggccagaaggtcaatgat

SEQ ID NO: 590170 - DNA, 75 bp, Homo sapiens
agggcgtccgagtcaacaaccgcttcgagctgaaatgtcctggccccgtacgcggtgccctcggagctggtgctg

SEQ ID NO: 590171 - DNA, 75 bp, Homo sapiens
tgatcaggtggaacagattcagaaggagcaggattaccaaaggccatccgggtgacctgcataggttcctgcggg

SEQ ID NO: 590172 - DNA, 75 bp, Homo sapiens
agaaaaatgaaattatggttgcaccagaaatacatgctacaggatttaactatcagaatgaagatgaaaaagtca

SEQ ID NO: 590173 - DNA, 75 bp, Homo sapiens
gcagccgtagacaccagctccgaaatcaccaccaaggacacattcagctaacgtattttagcaggtggagtgagg

SEQ ID NO: 590174 - DNA, 75 bp, Homo sapiens
tgcagcaaggacaaaaacctgatttgatttggagtggatcagttacgagatgacaatctagaaacttattggcaa

SEQ ID NO: 590175 - DNA, 83 bp, Homo sapiens
gctgctgtgtgcggtgctgctgagcttggcctcggcgtcctcgggtttttagaacttcagccataaaaatgggcagaattttc

SEQ ID NO: 590176 - DNA, 83 bp, Homo sapiens
gtggagtatctggtgaaatggagaggctggtcgcccaatgtactaatggtcacttgatgtgcgctggctgttttatccaccta

SEQ ID NO: 590177 - DNA, 74 bp, Homo sapiens
cagagctcccgggtcgtctttcgtgtggccgcgagtggtggtcgtggtgacaggactggccgctatggagccac

SEQ ID NO: 590178 - DNA, 100 bp, Homo sapiens
ttaaactggagaactactatgtccagcctatttgcacaccatccaggagtcagtttattactggaaattcttgccagtagtctcagtccatttcgtgaag

SEQ ID NO: 590179 - DNA, 90 bp, Homo sapiens
ctacattctccccagggatttccacatcctccatccccagctccacagacgccacaggtcatcatctggatcatcccattctggttcccg

SEQ ID NO: 590180 - DNA, 100 bp, Homo sapiens
aagaggtttcccatctgcacctgtggatagatcatgacaagatgtttaagatgagtgaaaagatattactcctgtgtgttggagaggctggagacactgt

SEQ ID NO: 590181 - DNA, 100 bp, Homo sapiens
gccccaaccacacaccagcggctgcaggactgggcacagcatgagatccaaaggcagggcaaggaaactggccacaagatcaaaatggtttcaatcccag

SEQ ID NO: 590182 - DNA, 50 bp, Homo sapiens
ctctaatggagttgattgagaggaatcaggaaacccaggcccaacggcag

SEQ ID NO: 590183 - DNA, 73 bp, Homo sapiens
cagcattagcctggctcaatatctaatcaatgtcagatttagccaggtggcaatcatgagtgaatggatgaag

SEQ ID NO: 590184 - DNA, 100 bp, Homo sapiens
atgttaaaacgggtcagttggcagccatcaaagttatggatgtcactgaggtgcagtggcttctatgttttgggttgatgctgaattagggagtgatatt

SEQ ID NO: 590185 - DNA, 75 bp, Homo sapiens
tgaaccggacagtcatcaccatgggccgggatcacattctgattaaagaaattttggcgctaattccaaaccaga

SEQ ID NO: 590186 - DNA, 100 bp, Homo sapiens
cagccatgattttttggctccaggatgtgaagttaccccagatgtaaacatttcaggccaaaaatttaacattaaactcctgattccagttgcagaaggc

SEQ ID NO: 590187 - DNA, 90 bp, Homo sapiens
cctactatgttgcatttctccccctgtgttttgtgaaggggaacgcccttttgcttgtgactggcagggctgcgacaagaagttcgcccg

SEQ ID NO: 590188 - DNA, 98 bp, Homo sapiens
gacaggtgcgaagtgacccgcaggccctttacttcaacgaccccatttggtccaacatgtggtacctgcacttgcactattactcagcagcagtaaca

SEQ ID NO: 590189 - DNA, 96 bp, Homo sapiens
tatgatgctgatggtgatggagattttgatgtggatgatgccaaagttttattaggatcaaaatacttgctggatggtggactcagagaccaataa

SEQ ID NO: 590190 - DNA, 90 bp, Homo sapiens
gttactgtggaatcaataagccatggcatctaagaaatttgctgttaaaaaataagcgggttttgaaaacaaaaaaaagaaggagtggaa

SEQ ID NO: 590191 - DNA, 75 bp, Homo sapiens
ctggtaaaatgttacacttactcggttgtaactgaagatatgaataatccagaatggctactctgatctatgttg

SEQ ID NO: 590192 - DNA, 95 bp, Homo sapiens
ttaaaatctcccaagaggaatgacaaacaaccagctcttcaggaagccagttgagggaagttctccatgaatgtacgtcacaatgatgatgaccg

SEQ ID NO: 590193 - DNA, 100 bp, Homo sapiens
gaaaactgaagaggcaactagaagaaagacaaggcactctctccacagcagccccaacaactagccctgcaccctgtctctctaaccaccacaagtaaat

SEQ ID NO: 590194 - DNA, 100 bp, Homo sapiens
cgtctcctgtggctgggacaagctggtcaaggattcagcaccttggcacagctgaagcagaggaacacgctgaaggatggtatcatcatgatccagacgc

SEQ ID NO: 590195 - DNA, 100 bp, Homo sapiens
tggtttgtccagagacagtgagcagtgttttacgacgacgacttgactgatgctgtgtttaaaacgctctcccgactcgcccacagattgaaaaatgcct

SEQ ID NO: 590196 - DNA, 76 bp, Homo sapiens
cctcctagtgctagcagcttagatgccatttctcctgttcaggcaacagcattattgagaaaagcccttacagaag

SEQ ID NO: 590197 - DNA, 75 bp, Homo sapiens
ttcaaggatatgctgtattcagctcaggaccaggcaccttctgtggaagctcagagtcaagatctccactgaagt

SEQ ID NO: 590198 - DNA, 100 bp, Homo sapiens
gagctttgcagctgacctacatctcgaagagcagcccgacggccatggaggctgaagagacgatggaatgccttcaggagttccctgaacatcataaaat

SEQ ID NO: 590199 - DNA, 90 bp, Homo sapiens
tgcgagtgcttcgaggacttcactggggacatcacccagaagggctatgaaaagaaaaggtccaaactcctatctccttacagcccgcag

SEQ ID NO: 590200 - DNA, 75 bp, Homo sapiens
gcctgaacggagtgtgcgacggattgggagacatggctccttactatgaagccttgtgcaaatccctcgactggc

SEQ ID NO: 590201 - DNA, 74 bp, Homo sapiens
cgggctcggggcgcctgcgggacggtgaggccctgctgaggactccggagagtgaatgcaaagcatataatcct

SEQ ID NO: 590202 - DNA, 87 bp, Homo sapiens
gggtttgggcgaccaggaggtgccggtggccgcgctcggacccggcttgttagcagtggcacaagatcttacagaggatgaagaaac

SEQ ID NO: 590203 - DNA, 71 bp, Homo sapiens
ccaccgacgaggagaggctggctgagtccaagcaggcgtttggcgttgacccggacgacacctataatgag

SEQ ID NO: 590204 - DNA, 75 bp, Homo sapiens
ggctgactacctgctgtacaccctcaacaaacaccagcgctttggggagtaccctgacttctaccggaagctcta

SEQ ID NO: 590205 - DNA, 98 bp, Homo sapiens
gcagatcctggaccaggttgagctgcgcgcaggctcctctaaggaaatggcttctggtgtttggcaacttaatcacagccgggtgctacatgctctta

SEQ ID NO: 590206 - DNA, 76 bp, Homo sapiens
ggcgctgctgctcgggctgctcttggagtaccaaaagaattggtggagctccatttgaagctgatgaggaaaattg

SEQ ID NO: 590207 - DNA, 87 bp, Homo sapiens
taagttggtgatcattgaaggagacttggaacgcacagaggaacgagctgagctggcagagtcggctacttctacaagtccgaacag

SEQ ID NO: 590208 - DNA, 75 bp, Homo sapiens
catccctcgtcgaaaggattggattggcatctttagagtgaaagtcaatataataggagaagtggttgaccaggg

SEQ ID NO: 590209 - DNA, 96 bp, Homo sapiens
cttctgggccaccatttgccagggcctcgctcgaggtgagtcctgcaaatgttaagtgatttgctcaaggtgcccatttcgcaggaattggagccc

SEQ ID NO: 590210 - DNA, 90 bp, Homo sapiens
ggaggtgggaaggtgtgtccggaggtttgcaggggtgcagtgtgtctggtcttatgagcactttcagaccatgctgaagtctaaattgaa

SEQ ID NO: 590211 - DNA, 76 bp, Homo sapiens
gggaaagttattgaacggctgggccagagcgtggttgctgaccagttgaaagttcatggcctcccacgggaacgac

SEQ ID NO: 590212 - DNA, 94 bp, Homo sapiens
caccatgccgctcctaagcctgcacagccgcggcggcagcagcagtgagagccatgccagtgacggtaacccgcaccaccatcacaaccaccac

SEQ ID NO: 590213 - DNA, 125 bp, Homo sapiens
caaccaaggaagctcgttcacaattgaccccgtcaggggagaagtcaaagtgaccaaacttctcgaccgagaaacggttcgagaacttgtcttggacaattgcaaatcaaatgatggaaaaattg

SEQ ID NO: 590214 - DNA, 50 bp, Homo sapiens
cggggaggcagcggaaggcggcagaagatgctcatgaagcagcaggaccg

SEQ ID NO: 590215 - DNA, 110 bp, Homo sapiens
cccctctttgggcttcagaggcccaaattgaggcgcaatgatgagaggatgtggtggtctactctgatgtcaatcttgagggctagttccctgtattgaacactgatata

SEQ ID NO: 590216 - DNA, 100 bp, Homo sapiens
ccgccccgggtgggcctgggggcgcgccctaagaaagaatttgactgatgggcgtaaggaagaaaaagagaccgaggcaagtttcagagaagtagtggaa

SEQ ID NO: 590217 - DNA, 74 bp, Homo sapiens
actgattggctcttcctcaatgcttgtgtgggccggaaggtggtggtcgtacgctgtgaaggcatcaacatttc

SEQ ID NO: 590218 - DNA, 90 bp, Homo sapiens
tcatctcgctcggctgcgggaaatcgggctgaagcgactgagtccgcgatggaggtgctgttacactaccaaactgtcagtgaacccgcc

SEQ ID NO: 590219 - DNA, 75 bp, Homo sapiens
ggaagatggcggcagcggcggcggcggctgcagaacaggctggagtgcagtggcgggatctcggctcactgcaag

SEQ ID NO: 590220 - DNA, 75 bp, Homo sapiens
tcccttagccagcccgagcaagtaaagattgattggccttaagagaaggacggagccacatactgctgacggccc

SEQ ID NO: 590221 - DNA, 74 bp, Homo sapiens
tgagaacagagtgctgttttagagctggcagcagcatctcagcccaagagaagcaagagtgagccatggagcta

SEQ ID NO: 590222 - DNA, 51 bp, Homo sapiens
agaaagtgattacagacattgccgggaattggcagagggggtcgatttggg

SEQ ID NO: 590223 - DNA, 75 bp, Homo sapiens
gacgcgggctctgaggatgagctggaggagggggaattgaatgatctggcacgggaccctccagcacagtgttca

SEQ ID NO: 590224 - DNA, 100 bp, Homo sapiens
ggacttcagcttaattttcagcagctttgcttgtgccatctgcccccatcgaccggtactggacaccctggccatgctgactgcccaccgtgcaggcaag

SEQ ID NO: 590225 - DNA, 74 bp, Homo sapiens
agaatttaaattccctcaaattaaggcacatccttggactaaggtggtctgctgtgtgaataaataattcctga

SEQ ID NO: 590226 - DNA, 100 bp, Homo sapiens
ctcatggaggctgagcatttattcaggtgctccatacttgcttgcagtgcctacgtggctctggctttgggtgataacctcatggctttgaatcatgcag

SEQ ID NO: 590227 - DNA, 75 bp, Homo sapiens
cgcaacccggagtccggatccgatcccgctctgcacattccaaagatgccttcaattaagttgcagagttctgat

SEQ ID NO: 590228 - DNA, 76 bp, Homo sapiens
gtttggaaagacccaggagaagccgcccaaagaactgttttctggatatgccgcagaaggatccgtgccagaagca

SEQ ID NO: 590229 - DNA, 100 bp, Homo sapiens
tggctggagcgaccccttgttctttggtggcgctgatgtcaagccctccaacatcctagtcaactcccgtggggagatcaagctctgtgactttggggtc

SEQ ID NO: 590230 - DNA, 100 bp, Homo sapiens
catgctctgctgcttctggcctctgggcatcgcagccttctacttgtcccatgagaaagctctgggtgtgcggcagtaccatgtggcctcagtcctgtgc

SEQ ID NO: 590231 - DNA, 100 bp, Homo sapiens
acttcttggctactgaaagcaaagctccacaccccccagaggtatccatctctggctatgataacaactggtaccttggccagaatgaggccaccctgac

SEQ ID NO: 590232 - DNA, 96 bp, Homo sapiens
cagcctgccacatcgggggcaccaccctccatgcctttgcagtgttctgcagaggggcggtgtcattactgatgaagaggaaacctctaagaagat

SEQ ID NO: 590233 - DNA, 74 bp, Homo sapiens
aaactcaggaccatgatggctcagtttcccacagctatgaatgatgagtttgatgcctacatcattgtgtcttt

SEQ ID NO: 590234 - DNA, 98 bp, Homo sapiens
cctgcgggtgcctttgaaaatcaacgacaacttgagcacagacaagttggatggcttgaggactggtactaaaaggaaacgtgactgggaggccattg

SEQ ID NO: 590235 - DNA, 83 bp, Homo sapiens
tcatctccggccctctcggcgtccgccagcgatggcacagatctgaacataaagtctggtctcctctggtgacggaggaaggg

SEQ ID NO: 590236 - DNA, 75 bp, Homo sapiens
cttcatggtgcggctcatcttcgagaggcctcttatgtgaggagctgaagaggaattaaaatatacaggatgaaa

SEQ ID NO: 590237 - DNA, 100 bp, Homo sapiens
cgtgccctcgctctgagctgcgcctggacctggttctgccttctggacaatctttccggattaaactgcaaatatctcatgaagctgctgcctgtatcac

SEQ ID NO: 590238 - DNA, 73 bp, Homo sapiens
gggcaatcagcaacttaacaataagtggcagaaaagatcaggtatgtgaaagcaagaacagagctaacatggg

SEQ ID NO: 590239 - DNA, 90 bp, Homo sapiens
cttcaagcttaggaccacccaccatgcctatccagggctgcaagtggaattcatcaaccccatcttcgagttctccagggccatgaatga

SEQ ID NO: 590240 - DNA, 75 bp, Homo sapiens
ctcctttataagtgtcagctgtgaggtacgaattttgcggttattaagaattttaggacgaaatgatgatgattc

SEQ ID NO: 590241 - DNA, 98 bp, Homo sapiens
attttggagcagctcctttatggaaatcatactattgctggaagagcctgtattgtcctcacaatagtatagaagaattcaagagaggagagagagac

SEQ ID NO: 590242 - DNA, 83 bp, Homo sapiens
atgaatctcatcgccaccatctttgtctttgcagtggtcatctatttccagtagacccaaatgatttgtacattgtagaaccc

SEQ ID NO: 590243 - DNA, 90 bp, Homo sapiens
cggtcggactcccgcggcgggaggagcctgttcccctgagagtgaagatagtccaagtcctaagagacagcgcctctctcattcagtctt

SEQ ID NO: 590244 - DNA, 100 bp, Homo sapiens
cttggatctttctcatacccaaaacattggacagatgctgcgtactcatttcacacattctcagttggctggatctattattggcaaaggtggtcagcgg

SEQ ID NO: 590245 - DNA, 74 bp, Homo sapiens
cgagtcgcatctgctcaacgacgaggacctgacgcaggtccttatgtcgtcagaagatcgagaagctcaggagg

SEQ ID NO: 590246 - DNA, 90 bp, Homo sapiens
ctgacatgtttgatcaaggtgggagctgaggctgatcagaactatcagaactacatcttaagggtccccacagagaccacctatcacacg

SEQ ID NO: 590247 - DNA, 108 bp, Homo sapiens
caggtggccttggccaaccagtgcctctcccaagatggctcatgatgccctcaatgcccctctgcacattctccgggccatatacgaactgcagatgaaaaagaccga

SEQ ID NO: 590248 - DNA, 100 bp, Homo sapiens
tgaagagctatggtgaaacaccactgaagcattgccaagtacctggagtagaacagaaaaattattatgtctgtgttcccttgggactcattggaaattg

SEQ ID NO: 590249 - DNA, 85 bp, Homo sapiens
aaagaagaactttctgcatttgacagataaagatggtgaacaacctcaaatactgctgccatgaagtcggggggcacgcagctga

SEQ ID NO: 590250 - DNA, 100 bp, Homo sapiens
cccggcgccgccactgccgcagccaggagatggttcgggcctagcggagccgggactggaggcaaagcataattgatttgaaggagaaggaaataccaga

SEQ ID NO: 590251 - DNA, 80 bp, Homo sapiens
ctcctggaggcggcgggatggaggcggcggccggtttttagaacttcagccataaaaatgggcagaattttccttgatca

SEQ ID NO: 590252 - DNA, 74 bp, Homo sapiens
aaggggcagtacaagcttacgtctctgctcttcagtacaatcctatttatcatagaatccccgactcagaccca

SEQ ID NO: 590253 - DNA, 100 bp, Homo sapiens
gttagtggatatagcacaccatccccagccagtccacagagcagtcagagaagagcaacacatgcctgtccgatgagtgctgactgagcaccaggaactg

SEQ ID NO: 590254 - DNA, 97 bp, Homo sapiens
gacgttccctcccccgatccaagttggaattagcatcctctcgggggcggtgcgtctttctacgtgaataggattttgtggctggccagatacactg

SEQ ID NO: 590255 - DNA, 100 bp, Homo sapiens
cgagaagcctctgaggcgctatggggcggtggaggagacggcttggaaaacggagagactggggagaaattatggtgacaagctgaacatggagctgagt

SEQ ID NO: 590256 - DNA, 106 bp, Homo sapiens
tcctgcctcagcctcctaagtagctgggactacagagctcaggccccggggcctccagcggcaccagcggagaccacggtgagctcgtcgtccggattgccagtct

SEQ ID NO: 590257 - DNA, 75 bp, Homo sapiens
ggagagcctgctggcacgggcacgccggggtctgcagcgcctgtttgggaagaaagaaaacctaaagtatttgcc

SEQ ID NO: 590258 - DNA, 75 bp, Homo sapiens
ccggcaaggccatcggcgtgctgaccagcggcggggatgctcaagcctgtgggccaaagctgaccaactccccca

SEQ ID NO: 590259 - DNA, 100 bp, Homo sapiens
ctcaaagaatgaatcaaaccttggggacctcttactgggctttcttaaatattatgctacagaatttgagtggtgcccaggcaacatgggtgactggagc

SEQ ID NO: 590260 - DNA, 90 bp, Homo sapiens
cgagaaactggacaaccaacggctcaagaatttcaagaacaaaggccgcgacttggagattttaggtgatgggcaagtcagaaagtcaga

SEQ ID NO: 590261 - DNA, 80 bp, Homo sapiens
cagcatttgcatggaacacatggtcacttttacaaagagaaagtttggattaatgaagaaagcctatgaacttagtgtgc

SEQ ID NO: 590262 - DNA, 115 bp, Homo sapiens
gagcggctctactcggtgctgtgctgcaccgtgtgcctggacctgcccaaggcctccgtgtaccagggccacccccttaaccctcgggactactgtggctggacacctctgcacg

SEQ ID NO: 590263 - DNA, 75 bp, Homo sapiens
aagagaaagaagatagtggttgaagccccagcaaaggctatgctgggactcatgtatgtctactggactcagctc

SEQ ID NO: 590264 - DNA, 75 bp, Homo sapiens
tggcaatgatagatacatcagtgtgggaagccaagcagatacaaatcctgtttgaccaaactcagagatcaatta

SEQ ID NO: 590265 - DNA, 96 bp, Homo sapiens
ccgacgtgccctcgggggtcgcgctgttcctcaccatccctttcgccttcttcctgcccgagctggacgccaggaaagcatgtgcagatgcaactc

SEQ ID NO: 590266 - DNA, 90 bp, Homo sapiens
ggattttctgacatcaagtcccacgcgttcttccgcagcatagactgggacttgggttgtgagtcccggcccagcccctccacccccctg

SEQ ID NO: 590267 - DNA, 98 bp, Homo sapiens
gaggaatacctcgtatgcaacctcaggcttcagccagacattcggaaattctttggagtaataccaagtggaaagaaacttgtaagtgaaacagtaaa

SEQ ID NO: 590268 - DNA, 100 bp, Homo sapiens
tgctaactttgcacatttcaacagtcatgcagcatccataccccagtttaccaattcccccacaatggtgatcatggtgggtttaccagctcgaggcaag

SEQ ID NO: 590269 - DNA, 75 bp, Homo sapiens
aaagagccatctgtggtgccaattgaagatgctgagcacctgaagaccctgtccctgtcctacaacgccctggga

SEQ ID NO: 590270 - DNA, 100 bp, Homo sapiens
gctccccaggggacttctccatctctgtcaggtactaggttttgacaagcttgcatcatgcgtgagtataagctagtcgttcttggctcaggaggcgttg

SEQ ID NO: 590271 - DNA, 50 bp, Homo sapiens
gattggaaccagcacaagtacaagtgctgtgattgtctccacgccccagg

SEQ ID NO: 590272 - DNA, 97 bp, Homo sapiens
aagaagagagcctaactgaaaggaagagggagcagagcaagaaaaaaaggaagacgatgacttcaggttatcaatactctggctgaccatcatcatc

SEQ ID NO: 590273 - DNA, 82 bp, Homo sapiens
ctgccagtggatcaccgcgctgcactacgcctttcaggacgagaaccacctggctgatcagctgaccgaagaacagattgct

SEQ ID NO: 590274 - DNA, 100 bp, Homo sapiens
tttatccttttctgtacaacatcacttcttctgtttgcagtggtatggcagcactgtgattgtatgggagtgaactcagatgtggagcactacctttgtg

SEQ ID NO: 590275 - DNA, 101 bp, Homo sapiens
gaagctgcagacttataagacagcagtggagcatccagtcagaagtgtcctttgagggagcctatgggaacctcaagcggctgtatgacaaggcagccaaa

SEQ ID NO: 590276 - DNA, 50 bp, Homo sapiens
ggagctcccccaagagccggaaagcaaagagctcctgggaaggtgctgct

SEQ ID NO: 590277 - DNA, 75 bp, Homo sapiens
ggacccgggaagaactggtgagccaagggatcatgccgcagacccaagaagccaccgcctccatccgctcctgtc

SEQ ID NO: 590278 - DNA, 100 bp, Homo sapiens
tggaggagatgctcgccttggggaataatcactttattggattccatatggctctcatatcattccattccatctctgccaagatttggataccgcaaaa

SEQ ID NO: 590279 - DNA, 113 bp, Homo sapiens
ggccccagcgcccactggggatggcaaagacgacatccggtgcgccgaggctgctcacaaaaaattcgacaccaaattttggaacttaaaaagaagattcttaaaacttacaa

SEQ ID NO: 590280 - DNA, 101 bp, Homo sapiens
actatcaggtggatgtcaaagaagtagcgtcagaaatctggaaaattgtacgctcccatggagttcaaaaattaacactgaatcctccggaaggaattgta

SEQ ID NO: 590281 - DNA, 100 bp, Homo sapiens
aacctggtgcgcttccggatcgggggcaagcggaaggtgatgcccaagatggaccaggtcgcaatggaagaagagatcgccgcgctggtcattgacaatg

SEQ ID NO: 590282 - DNA, 100 bp, Homo sapiens
gccgcagcagtcagggacatttctgaagcgagcgtcttcgatgtggtgtttccccaggatctgctggagaaaggcctcgaagcaaacaactttgccatgc

SEQ ID NO: 590283 - DNA, 90 bp, Homo sapiens
ccccgtcaaaatccgaaagattcgggccagagacgacaacccgggcctccgagggtgatacaattctggagactggagaagtaattccac

SEQ ID NO: 590284 - DNA, 88 bp, Homo sapiens
catgggttaccgctgctgcccctgctgtcgctcctggtcggcgcgtggctcaagctagaatcccaaggactgcagcaaagccaaaaag

SEQ ID NO: 590285 - DNA, 87 bp, Homo sapiens
agtgtcctggacccagctgagcgggcggtcattcgcatcgcagggacctcaggatggaaaccagcagcctgcaccgcccgagaaggt

SEQ ID NO: 590286 - DNA, 98 bp, Homo sapiens
ctccctccgcaaccacatgcgctttcgtcacagtgaggaccggccctttaaatgtgactgttgtgactacagtatcttctcacaggtatgaaacacct

SEQ ID NO: 590287 - DNA, 98 bp, Homo sapiens
ccgagatctcccagccagtgtggctcacggtagaaggtttttgccaatccagaagactgtgtagcatttggcaaaggagaaaatgccaagaagtatct

SEQ ID NO: 590288 - DNA, 76 bp, Homo sapiens
ttgaactcagctatgcaaagcaactcagatcagcttgaacgggtctttttacgacttggccatgctgaaacagatg

SEQ ID NO: 590289 - DNA, 95 bp, Homo sapiens
aaaatgcctcaagatgcccggaaaatactctctaaccaagaaatgttaattctcatgattgattttaaagaagctacttcacacaggaaactcct

SEQ ID NO: 590290 - DNA, 75 bp, Homo sapiens
agcctgcctttccttccccctcggaaaatggttcccactgccgggcgagatgatattggtgcccatatgaatgta

SEQ ID NO: 590291 - DNA, 75 bp, Homo sapiens
aaggacactgcatcgtcaaactgatcccctggccgttggaggagcagttgtttcacgtgccacgatcatggtgcc

SEQ ID NO: 590292 - DNA, 90 bp, Homo sapiens
ccttgggcagccagagaaaattcacaataagctggaatttcctcagattatttatatggacaggtttgtcttgtgaccgcgggcggccgc

SEQ ID NO: 590293 - DNA, 82 bp, Homo sapiens
agaaagtcgtcttccacttgcacgaaagctttcctaggccaaaaagagagaaaggagttcatgaaggcagaaatgcctgggg

SEQ ID NO: 590294 - DNA, 75 bp, Homo sapiens
cggtgcgcccggccgcctgcacccccagggactttgaacatgtcggggatcgccctcagcagactcgcccaggag

SEQ ID NO: 590295 - DNA, 100 bp, Homo sapiens
tccggagtggggaagacctgcgtcctttttcgtttttcggatgatgccttcaatactacctttatttccaccatagatgagacgtgcaggtaccatcagg

SEQ ID NO: 590296 - DNA, 100 bp, Homo sapiens
aacctgtttaaactcattgtcaagactttgccaataccattcctggccatggaggcatcatggatcgctttgactgccagtatctgatggccacctttgt

SEQ ID NO: 590297 - DNA, 75 bp, Homo sapiens
aagaggaggatccacctggagctgaggaaccggaccccggcagctgtgtcgtgaaaactacccctaaaagccaaa

SEQ ID NO: 590298 - DNA, 75 bp, Homo sapiens
ctcataaacttggcttcctcgcttctgctcctcagcagtgagcccaaagagatagttgaaaagtccaaaatccca

SEQ ID NO: 590299 - DNA, 74 bp, Homo sapiens
gctccagcctgtgaagaagttaactggttgatcgggatcgagatcttctcattcagcagactatgaggcagctt

SEQ ID NO: 590300 - DNA, 90 bp, Homo sapiens
gtgcttttcgcaagaacaagactctcggctatggagtccccatgttgccctccagaatacccatcatatagcccctgaggtggcatggtg

SEQ ID NO: 590301 - DNA, 74 bp, Homo sapiens
gattccaagtaactcttatttgggaaatcgtgatgagaaccagagtataaaccaccaaatggctcaggaagatg

SEQ ID NO: 590302 - DNA, 89 bp, Homo sapiens
attggatttgccagggcatgtagctctccaggcttgcaagcgattaccagaatttggaggttttggttcagttagtggaaaaattgaaa

SEQ ID NO: 590303 - DNA, 90 bp, Homo sapiens
gcgcgcgcctcagaagctcccggacgcccagaacccagcgggtgccgcttctccacccgaggcttccacctccaacgagccatgttccag

SEQ ID NO: 590304 - DNA, 97 bp, Homo sapiens
cgtaaagattatgacaaatcacaacttgtagagtactatactggcaattgctggagaagattttgcaattgttgcttctgatactcgattgagtgaa

SEQ ID NO: 590305 - DNA, 50 bp, Homo sapiens
atgcgctcgggctggaccagcagctcacaggcgcctgaagtacatatccc

SEQ ID NO: 590306 - DNA, 95 bp, Homo sapiens
tcctgtacctgctgggagaagttctgaacaactatatctgggatacacagaaaacagccccgggctcagctcctggttcccagtatggcacaatg

SEQ ID NO: 590307 - DNA, 100 bp, Homo sapiens
ttcgcccgcggctcctgagggatcggtctcagccgcgcgggtaatcattaccaaatgaggaggaaaggacgatgtcatcgaggctctgcagcgaggcatc

SEQ ID NO: 590308 - DNA, 75 bp, Homo sapiens
ggctgcttcccgttctgccatgatgaaggtggtcttctgccctgttaaagaagccctggaggtggactggagcag

SEQ ID NO: 590309 - DNA, 75 bp, Homo sapiens
ttttcttggatgaattgcttgctttggagctcccctgggacctgtggccgccgcccacagaccatgctcctgggg

SEQ ID NO: 590310 - DNA, 75 bp, Homo sapiens
ctatgaggtagatattaaaccagacaagtgtcctaggagagtgaacagggaactgctcgcagaaagaagaaggtg

SEQ ID NO: 590311 - DNA, 105 bp, Homo sapiens
ttgagtccagcctgaaggaagccatcattgggggacttgatctcatcttcatgccaggccttgggtttgacaaacatggcaaccgactggggaggggcaagggct

SEQ ID NO: 590312 - DNA, 98 bp, Homo sapiens
gagtcaaggcttgaagatttctatgcaggaccccaaaatgcagaaagaaagtcgtgctgtatccctactgacttctccagctgctggtataaaaacag

SEQ ID NO: 590313 - DNA, 104 bp, Homo sapiens
ctgcagcagcagcaacagcacggaaacggtgcggtggcggcggcagcggcggcccagctgccagctccaaaactagctcaggcgatgcctcctcactcagcatc

SEQ ID NO: 590314 - DNA, 82 bp, Homo sapiens
ctctgcttttgccacagcagttcctgcagcttccttgagggttttggccaaattgggcgagggcacaaaataaccacttacc

SEQ ID NO: 590315 - DNA, 90 bp, Homo sapiens
cgtcttcgggacgcgcctgctcttcgcctttcgctgcagtccgtcgctccattttcagtccggcagcacacattactctgcgtacaaaac

SEQ ID NO: 590316 - DNA, 98 bp, Homo sapiens
aggagcccgcttctcagtgggacaccgggaaggtggctattatcatggaaaactaatttttcccagagaatttcctttcaaacctcccagtatctata

SEQ ID NO: 590317 - DNA, 100 bp, Homo sapiens
gcggtcggtgacagcctcaagggcttcagcaccgcgcccatggcagagccagaccgcctgcagaatgatcacaaggcagtgatgaagcaggtggaggagg

SEQ ID NO: 590318 - DNA, 100 bp, Homo sapiens
caagaagatgagaccgggggaggcgacgctaagttgctgatcgtggcgagtgaagacatttccacctggacacctgaccatgtgcctgccctgagcagcg

SEQ ID NO: 590319 - DNA, 100 bp, Homo sapiens
caacattcatcgcagctggtgggtgtacacactgctgtttaccttggcgaggcctttcaccaagtccatggatgtgatggagctgcttgaagaagatctc

SEQ ID NO: 590320 - DNA, 128 bp, Homo sapiens
gaatactgctacagaagtagagccaaaggatggtgagattgttggcctttcaggaagagtgcttaaggctttgataaaattcaagagttatttgtattttgaggaaaaagactttgtggataaagcag

SEQ ID NO: 590321 - DNA, 89 bp, Homo sapiens
tttcaccctccaccatgattgtgaggcctctccagccacatggaactagtggttaagaaagtagctcaatacatggctgatgtattgga

SEQ ID NO: 590322 - DNA, 75 bp, Homo sapiens
ctgtgcagtccaacatggacatctccaccggccacatgatcctggctgatcagctgaccgaagaacagattgctg

SEQ ID NO: 590323 - DNA, 98 bp, Homo sapiens
aaaataaaactcttttgaaagttgtgggtcagctgaccaggatccaaactactggatacaggtgcatcgcttggaacatggagatggaggaatactag

SEQ ID NO: 590324 - DNA, 87 bp, Homo sapiens
tcgtgaccgagaccgtgaccgagagcgtgaccgagagcgcgaatatcgtcatcgttagaagatcaacaaactccatttatgtaaacc

SEQ ID NO: 590325 - DNA, 83 bp, Homo sapiens
gcttcagagagaggaagccgaaaacaccctgcaatctttcagacagaaactgattattgatgagaagaagtattacttatttg

SEQ ID NO: 590326 - DNA, 98 bp, Homo sapiens
ttttggtgggccagttattagttctctatatcatgaagaaaccatcagcaactttcatcctttgaaacgtgtgctgaaaaagaagaatcagcaaatac

SEQ ID NO: 590327 - DNA, 98 bp, Homo sapiens
ttgaggatgagaaagctttaagagaaactgtccgtaaattgcattttgcagctttctcctgtcttgaagaagtagaacggtgcccgagaaacgttttt

SEQ ID NO: 590328 - DNA, 98 bp, Homo sapiens
aaggagagcccttcagcgaggaagctacacttttcaccaaggaactggtgctgcagcgagagggagtaaggcatgtcgaggctttggctatgtcactt

SEQ ID NO: 590329 - DNA, 82 bp, Homo sapiens
ttatagtcgatatagatcacgatcaagatctcgttcctacagcccaattgatcatggccttgccaggttggtgacagtatat

SEQ ID NO: 590330 - DNA, 100 bp, Homo sapiens
atctttggtctcttcggaaagactgttccaaaaacagtggataattttgtggccttagctacaggagaggcgcaatgtgtcatttaggcctgtgacgtcg

SEQ ID NO: 590331 - DNA, 75 bp, Homo sapiens
ctctgctgcggcgcggggaccgctgtgctctcgaaccttcgagatctgcggtctggggtctggttgaaagatggc

SEQ ID NO: 590332 - DNA, 109 bp, Homo sapiens
ctttcattgtcttttccgcccgcttcgatcgcctcgcgccggctgctctttccggctgagctgactgctgcccactttggaggaggcggtgggctccttcacaagaaga

SEQ ID NO: 590333 - DNA, 90 bp, Homo sapiens
gctcagcctttccatgctctccatcacctatcacagcagcatccgctctctggaggctcctctggacccttcccgctgcccagcgctggg

SEQ ID NO: 590334 - DNA, 98 bp, Homo sapiens
gatttttgcatgagacgcttctggacagactctcttgagcctgagggatccattacagtttcaatgggtattgacttttgtgattctactcagactgc

SEQ ID NO: 590335 - DNA, 80 bp, Homo sapiens
ggccgctctgcgggactctgaggaaaagctcgcaccaggtggtagctgagcacccagatgcttcaggtgaggagattgaa

SEQ ID NO: 590336 - DNA, 100 bp, Homo sapiens
aggaggagctgcagcaagcgggagaccaggagctcctccaccaggccaaagacttcggcatttgaaattggcacaatggaagaagctggaatttgtgggc

SEQ ID NO: 590337 - DNA, 74 bp, Homo sapiens
ttttctctgccttgcttgcttgagcttcagcggaattcgaaatgaggcagaagaggcctggaccttggcgcaca

SEQ ID NO: 590338 - DNA, 96 bp, Homo sapiens
tgcttggcgaccatctggacaatatctcgcccatggcaagctggatccctgtggattactttgaatatatcactgatgtccattcgaatgacctgt

SEQ ID NO: 590339 - DNA, 99 bp, Homo sapiens
gctggaaggagactggatgatagaattgcaaataagggcgagactgaaaaatcaagtcactcagttgaaggagcaagtacctggtttcacaccacgcct

SEQ ID NO: 590340 - DNA, 100 bp, Homo sapiens
ggttgctgctgctgccgctgctgctgggcctgaacgcaggtggctggtcattgaccgcaaggtttacaacatcaccaaatggtccatccagcacccgggg

SEQ ID NO: 590341 - DNA, 76 bp, Homo sapiens
ggcgctcaccatgttccctggaggtacaggtttgcagattccgccagcagcacagcaagctctacagatgagtggc

SEQ ID NO: 590342 - DNA, 76 bp, Homo sapiens
cacaaagctgttcttttcaaaatggaatatgcttttaaggctattaaccagggtggccttacatcagtagctgtca

SEQ ID NO: 590343 - DNA, 83 bp, Homo sapiens
cttgtggaagggggcccggctccctaggcgtcccatctcgaaaatgatgcatcctgttgccagcagtaatccagctttctgtg

SEQ ID NO: 590344 - DNA, 76 bp, Homo sapiens
ccgagctccagccgaaggagaaggggggtaccaggatcatctatgaccggaaattcctgatggagtgtcggaactc

SEQ ID NO: 590345 - DNA, 101 bp, Homo sapiens
gacctggccgaggtcccagccagcatcccggtcaacacgcggtacctgaacctgcaagagaacggcatccagagcggaacacttaaggatccggactcaag

SEQ ID NO: 590346 - DNA, 100 bp, Homo sapiens
tgatggtgaaactcatgaagcccaggacgattcaggcaaggcagtttccccggcatgaaccagagtggacttatggcttccagctctccctacagccagc

SEQ ID NO: 590347 - DNA, 101 bp, Homo sapiens
ccgcgccctgctccctctcagcacctgggcggacgtgagaagaggggatgtcctggcagcatggagtggaatccgtcctcttgttacagaccccaaatctg

SEQ ID NO: 590348 - DNA, 82 bp, Homo sapiens
agagactggagacgtccagcctgacattcacctgacttctgcagaacaactggtcaaacaaatggattttacagaggcttac

SEQ ID NO: 590349 - DNA, 100 bp, Homo sapiens
gggggcttttatcttttctttttcacagagaagatcttgaagattcttcttaagcagaaaaatgaggactatatttctaaaatggacccagcctctaccc

SEQ ID NO: 590350 - DNA, 74 bp, Homo sapiens
aatagctctgaccacccggcgaagcaaatccagtttgctgatgacatgcaggagttcaccaaattccccaccaa

SEQ ID NO: 590351 - DNA, 76 bp, Homo sapiens
tctgctcacttcatgggctggcctggaattgacgatgaaatggcgaaaagtcttttgaagacagcctctctgtctg

SEQ ID NO: 590352 - DNA, 98 bp, Homo sapiens
tgacatagtgaaatatgtgttcagcgcttacaagagagagtcccctctcatcgtcaacactatgggatgggtttcagtgttttaactcaaatgggtga

SEQ ID NO: 590353 - DNA, 98 bp, Homo sapiens
ccgcagttcccggacatgatcctctccgcctctcgagaaaactacccctgagtgtggtcccacaggatatgtagagaaaatcacatgcagctcatcta

SEQ ID NO: 590354 - DNA, 90 bp, Homo sapiens
ctctcacccgggccagttttcaaggcgggctgtaactggtggcatttgtcccgggaccaggattaacctccatttcagctaatcatggga

SEQ ID NO: 590355 - DNA, 90 bp, Homo sapiens
atgcttaaatgatgtgcccagggtctagaaggctttgatcactcagactcgagccaaacaggcagctaccatgagtgaagtggagtggag

SEQ ID NO: 590356 - DNA, 90 bp, Homo sapiens
gtggatccatgccttagaagaaacaattcttcgacatactctccagcttcaatggcaccctgtgctgcgcacactaaagaaccgcattga

SEQ ID NO: 590357 - DNA, 106 bp, Homo sapiens
caggacgagaggatgcggagcccgcagaacctccacagtcaagaggacgagtttcttaatgtcacgagcgttcacctgttcaaggagagatgggacactaacaagg

SEQ ID NO: 590358 - DNA, 99 bp, Homo sapiens
ccaggagtcagtgggtccactggtagcccccacccctctccgtccatggccccagatgacacttcagactcggcccagccttctgccatccctgaggcc

SEQ ID NO: 590359 - DNA, 100 bp, Homo sapiens
gtgagatgtgcctttcatcttctgccatgattgtgaggcctccccacccacgcggaacttggtctcacgtgtgaaacatggctacagattggctgggaag

SEQ ID NO: 590360 - DNA, 87 bp, Homo sapiens
ccagatggctctgcttccttcctgcaagatgccatggacaatattaccaggcagaaccaattctacgatacccaagtcatcaaacaa

SEQ ID NO: 590361 - DNA, 82 bp, Homo sapiens
cttgccctggtcttgctcggccgatgaagtgcagaggtttttttctgagacacccgccatttcacccagtaagcgggcccgg

SEQ ID NO: 590362 - DNA, 90 bp, Homo sapiens
cgcagtagaaaaggtggcgtggctggcgattcgtgttcgtgagggccttttctgggcagatgattctggaccagatgaagcctgaggagc

SEQ ID NO: 590363 - DNA, 75 bp, Homo sapiens
actgacaagggggagtcgctgggtatcaagcacgaggacctctactcttcatggatcttttggatgaaagaacac

SEQ ID NO: 590364 - DNA, 101 bp, Homo sapiens
gtgatctgcccatcttgttactccctagcagtgtggtaaggtacaccaggggttggaaaaaccacactaggcaaagaacttgcgtcaaaatcaggactgaa

SEQ ID NO: 590365 - DNA, 100 bp, Homo sapiens
taggggtgcacctcagcactatcccaagactgctggcaacaggcccaggatgttttggtgcaggagatggaagtggttaaacaaggaatgagccatggag

SEQ ID NO: 590366 - DNA, 75 bp, Homo sapiens
ctgcggtgacactgtataaacacgaccctgccttggttactgagatccggctcaaatattttgatactgtacccg

SEQ ID NO: 590367 - DNA, 80 bp, Homo sapiens
accctgctacctcgcccgggggcatcaggtttttctcccgctccagaaaaaggagctgcttcctatgtctggtggatgtg

SEQ ID NO: 590368 - DNA, 100 bp, Homo sapiens
gagaagtccctgggactgagtaaggggaataaatacagtgctcagggcgagcgacaggatggagctatgacattgaagagaggaaggttccaaaacccaa

SEQ ID NO: 590369 - DNA, 100 bp, Homo sapiens
actctggagggattctggcatcagggaggctttcagccggagaagcgagtttcagctggtgtagaatgagccaaggagactcaaacccagcagctattcc

SEQ ID NO: 590370 - DNA, 75 bp, Homo sapiens
cctgcctgcctgcctgctacggactgatcctttgaaatactccagccatgactaaaagagaagcagaggagctga

SEQ ID NO: 590371 - DNA, 82 bp, Homo sapiens
gcttacaacgccaaaatcggttacagccatgaaaatgtgtcacaggggcaagtgtccgagtggtgaatcagctacttacaga

SEQ ID NO: 590372 - DNA, 50 bp, Homo sapiens
ctgatgcacagcatctgggagagtcgggaacatgccctgtgtgccgccgt

SEQ ID NO: 590373 - DNA, 104 bp, Homo sapiens
cttagctgtgctcgcgctactctctctttctggcctggaggctatccagcgccctgggctgcatcttgtacctgctgtgcttccggcagcacccttttgaggat

SEQ ID NO: 590374 - DNA, 76 bp, Homo sapiens
gaagtctgtattagctgcagaagctgttagagatcattcccttttagaagtgctagttgccgcagaccaatcaaag

SEQ ID NO: 590375 - DNA, 75 bp, Homo sapiens
ggagctgaagaataagtactaccaggtgccaaggaaggggatacaggtaatagttaacctcttctgtgagaagtc

SEQ ID NO: 590376 - DNA, 75 bp, Homo sapiens
cgacgagtacgactacctctttaaaggccatccacggcttccgagagacagagaagtcgcgctggtcagaagcca

SEQ ID NO: 590377 - DNA, 98 bp, Homo sapiens
tcagacagcatatttgagtcatttccttcgtacccacagtgcttcatgagaggacccagatgatgtggtaccagttggccaaagaagagcctggtgtt

SEQ ID NO: 590378 - DNA, 90 bp, Homo sapiens
cacttccctcggtctgggcttctctgaggcggcgagagatggtcaggtctggagctcgaccgggccaggaggcgtctaaactggatccag

SEQ ID NO: 590379 - DNA, 98 bp, Homo sapiens
gctaacagaactggaccttttcggtccttatgattttggaggtgtacttactaatagtaaccgggatattattaatggagatgccatccacaaacgaa

SEQ ID NO: 590380 - DNA, 82 bp, Homo sapiens
ttccggcccgaggacaccgactaccagcagctgcggataaccgtctggtccttgtgcacaaaatccgtgtcttacatcaaat

SEQ ID NO: 590381 - DNA, 100 bp, Homo sapiens
ggcgagctcgcgatgagtggtctcggcaggctcttcgggaaggtgcaaaatggcaactcttaaggaaaaactcattgcaccagttgcggaagaagaggca

SEQ ID NO: 590382 - DNA, 100 bp, Homo sapiens
aaagagaaaaaaagaaacataaagtaatgaatgagatcaagaaagagaatggagaagtaaagattttgctgaaaagtgatgcagaagatggggaagaata

SEQ ID NO: 590383 - DNA, 75 bp, Homo sapiens
caagttcttgagaagaagagaaacaactgttttgttggagcagtgaggagaatgaataccttccaagaccagagt

SEQ ID NO: 590384 - DNA, 83 bp, Homo sapiens
tgaggagcaccagcggcagaacatcaacagtagatcatgccactaatcgtacccagtttggggagaaaattcacaactttggg

SEQ ID NO: 590385 - DNA, 88 bp, Homo sapiens
cccatgctgcattccagccaaattcccaggaaatctgaaatagagtactatgctatgttggctaaaactggtgtccatcactacagtg

SEQ ID NO: 590386 - DNA, 82 bp, Homo sapiens
tgcccttcgccaaggagatcgtctctctcatcgaggcccaaaccgccaagaattttgtagccaccttggctaatgggatgag

SEQ ID NO: 590387 - DNA, 90 bp, Homo sapiens
gcaaggggcttacgcagaaggacctggccacgaccccaagggcctgccagggacccggcgcgtcctcggtttctcgcctgtcatcatcga

SEQ ID NO: 590388 - DNA, 98 bp, Homo sapiens
gtggacatcggggcagctgacctcgcccacgcccagcagcagcagcaacagaaatggagcatctactgttgtcacggctatattcggaggcattctcc

SEQ ID NO: 590389 - DNA, 75 bp, Homo sapiens
acagagcgacgagcaagaagcagcccaaagtcgaatgattcagacttgcaagacgccatttggaatgaacaggaa

SEQ ID NO: 590390 - DNA, 100 bp, Homo sapiens
gaagtgcgcaattctgactccacaaacacctttgatatggccgcgtggaaagtgtcaaaattcttcccaagaggggatctgaaggaggagtggctgcctt

SEQ ID NO: 590391 - DNA, 135 bp, Homo sapiens
atgggcagccaggaggtgctgggccacgcggcccggctggcctcctccggtctcctcctgcaggctctcttggctcctgctctggccatgtgatgtgcctgctcccactttgccttccactgtgattgtaagctt

SEQ ID NO: 590392 - DNA, 118 bp, Homo sapiens
gacatcacagcgctgggctaggggcgcggcttgaactcgcctaaagagctgcgccctctcaatgacgacaacccccccgtgtcttttgtgaagttctccccgaacggcaaatacatcc

SEQ ID NO: 590393 - DNA, 80 bp, Homo sapiens
cttcaagtggtaaccctcaaaccaccacacggaaattggaggaagaagaagtctctccacagttgtttactttccacgaa

SEQ ID NO: 590394 - DNA, 100 bp, Homo sapiens
ccgacggggcggccgggggctcagagatccaagtgcgcgccctggcgggtccggaccaaggtatctcattcagttgctaaacttatattagttaatttcc

SEQ ID NO: 590395 - DNA, 76 bp, Homo sapiens
ggcaaaatgtagaccactcacaggaagcagatcactgtgtccactactatgatcttcgtaacactaaacagccaat

SEQ ID NO: 590396 - DNA, 142 bp, Homo sapiens
gttctggtttgccactgggggtgctggcttctgcatcaatcgcaaactggctttgaagatggctccgtgggccaggtcatacagcagatggaacaaaaaaaattacaacaaggaattcctccatcagggccagctggagaat

SEQ ID NO: 590397 - DNA, 85 bp, Homo sapiens
atgatcgacaagtgggaagaccgatgggaatggttaagactgagccgtgtccaacaggagatcgacgacgtgatagggcaggtgc

SEQ ID NO: 590398 - DNA, 100 bp, Homo sapiens
agaccctggagcctcagttggaagcagccgatccagcctgcggagcctgtggggcagagagtggtttttcctcctgtctcatgaggtgctcaaccctatg

SEQ ID NO: 590399 - DNA, 82 bp, Homo sapiens
agatagaagcaggactagaagcagaagcagaacacgaagcaggggcatggaagaggagatggttcgtgttacgcagtggccg

SEQ ID NO: 590400 - DNA, 100 bp, Homo sapiens
atgctggagagctgtctcccacgtgcattttcccaagacctggaaacgtagcaaaattgagacttctagttcagcatgaaataaacactctaagagccca

SEQ ID NO: 590401 - DNA, 75 bp, Homo sapiens
gagcctatttacccagaagtagtccatatggcaagccgattttttcagttgatattcaccctgacgggaccaagt

SEQ ID NO: 590402 - DNA, 98 bp, Homo sapiens
gttccccggcccacagtgggggtgtgcaaacccgagagaactggagtgcagcagctgccccgagccccgtgcttggcaacattccccccaacgatggg

SEQ ID NO: 590403 - DNA, 97 bp, Homo sapiens
gagtcctcagccccaagacccagcaggcgtctgagggtgtggatgaggtcaccattgtcaacattttgaccaaccgcagcaatgcacagagacagga

SEQ ID NO: 590404 - DNA, 48 bp, Homo sapiens
gcctgagccggttcctgttcaaaagttttttgctccactcaagcctgt

SEQ ID NO: 590405 - DNA, 98 bp, Homo sapiens
gctcaccagcaccccagtgacagatcgaggaccacatctcctcaacgctctgaacagttataaaagccgggcctcactctggagctcctgcgtggtgc

SEQ ID NO: 590406 - DNA, 100 bp, Homo sapiens
cagccattaccatcctggttccaggccaagaataaaatctttatgaactaacaagatgaattaaagatggaatgattcatttctatggttaggttttaat

SEQ ID NO: 590407 - DNA, 101 bp, Homo sapiens
ggcgcttggacggcgggaaccggctccggagcgagaacgcgcagccccacagtcttcgttataacctcacggtgctgtcctgggatggatctgtgcagtca

SEQ ID NO: 590408 - DNA, 82 bp, Homo sapiens
gttgaaaataatctagatattgatggctttgttgaggagctcaagcttgggaaaatggtgtgcattccttgtatcgtcattc

SEQ ID NO: 590409 - DNA, 83 bp, Homo sapiens
ggtgtatgtgcgcttcccagggatcttgagagtgaagatctcgaaggatttcatagggggatatgagactttctactcggaat

SEQ ID NO: 590410 - DNA, 88 bp, Homo sapiens
tagattgtgtaggcgttggtcttctgatagcaactttaatgtgaatcctcactatggatgggctcattgaggacattaagcatcggcg

SEQ ID NO: 590411 - DNA, 93 bp, Homo sapiens
ccggcagctccggagctgcccgcgccatgtccgcgcacaatcggggcaccgagctcgtgcaccaattccagctggacatcactgtgaaaatgg

SEQ ID NO: 590412 - DNA, 87 bp, Homo sapiens
aacagagcagaaatcaaattgaagagagcagttgaagaagtgaagaaattattggtacctgcaatcggacagctggcttttaaagga

SEQ ID NO: 590413 - DNA, 87 bp, Homo sapiens
gaagtggacgtcttcaccgccccacactggcggatgaagcagctggtggggctctactgcgacaagatcatagaggaggcatgcagc

SEQ ID NO: 590414 - DNA, 100 bp, Homo sapiens
aatcaaaccttggggacctcttactgggctttcttaaatattatgctacagaatttgatctttcccagggaactccgatgaagtgttccaacaaaatgag

SEQ ID NO: 590415 - DNA, 71 bp, Homo sapiens
gaaaaagagtttgttgagatactctttgtaaaagggcttattaggagtttcactctttttgcccaggctgg

SEQ ID NO: 590416 - DNA, 82 bp, Homo sapiens
tcctgattgtaggtggtgtccagctccagactgtggtttaagctatgaagaaggacatccctcacactctgaaacagatctc

SEQ ID NO: 590417 - DNA, 100 bp, Homo sapiens
gaagaaacctcagacagatcgccggggaggcagcgcgggatcccagcctcaggcgtgcgcggacggtgtgcgggcctctcttctgtggaaactctgaagc

SEQ ID NO: 590418 - DNA, 100 bp, Homo sapiens
agtacaacctgaacttctcaggaagcagtactattcaagaggtctcctctgagcctccggcctccataagacccaaaacagatgacacctcttcccagtc

SEQ ID NO: 590419 - DNA, 83 bp, Homo sapiens
ccaccttaggatagtgttgcctgaagatttacaactgaagaatgcaaggaactgtggctgcaccatctgtcttcatcttcccg

SEQ ID NO: 590420 - DNA, 99 bp, Homo sapiens
gccgcgctgtttacatctttgccaagaagaacgacattcccttcgagctgcgcatcgtggatctgattaaaggtgcgaggaagaagatgtggagatgag

SEQ ID NO: 590421 - DNA, 83 bp, Homo sapiens
cgggcgcaatgaatccgcggcagttgctgatgtatattcaagatgagtggattaggagaaaacttggatccactggccagtga

SEQ ID NO: 590422 - DNA, 50 bp, Homo sapiens
cttcaatatgcccgccatcaccggaacagctggagctctcaaacactgct

SEQ ID NO: 590423 - DNA, 98 bp, Homo sapiens
cttggagagagagaagtgactttagttcatgtgacagactggatagagaagaaactggagcaagagtttcagggaccatgcctggccggatgctgccg

SEQ ID NO: 590424 - DNA, 95 bp, Homo sapiens
agatgatgatatccttctcaaccttgtgggatgtgaaaactctgttactgaagatacaaggcagatccaaccatccccaccgtggtcctacgatc

SEQ ID NO: 590425 - DNA, 98 bp, Homo sapiens
agcagaccacctccaagatcctggtgcggaacatccccttccaggcccacagccgggagatccgagagctcttcaggcgcccacggcctgcgagagga

SEQ ID NO: 590426 - DNA, 100 bp, Homo sapiens
caggaaccccggccgggagcgagagccgcggggcgcagagccggcccggctgccggacggtgcggccccaccaggacgctttgcctccaagcaaggcccc

SEQ ID NO: 590427 - DNA, 100 bp, Homo sapiens
ccacacgtcacacagtggggacaacagcagtgagcaagctcaactgaagttgatgacatgattcggaaatcaacaaacctgttgctaaccaggactctga

SEQ ID NO: 590428 - DNA, 100 bp, Homo sapiens
gtcacaaggaaaatggattcagtttgcatctctccctcctttaaacagcttctccgggtctcagcatggaaagccgggttagtaaagcagttgaagtgat

SEQ ID NO: 590429 - DNA, 100 bp, Homo sapiens
gccaccaatggctctgagctggtgacagtacagcttatggtgtcactggcccagctcatcagtgtggaacagatggagtcggataactgttcaggaggag

SEQ ID NO: 590430 - DNA, 112 bp, Homo sapiens
cccgggaggaaggaacgaggcaaggagctaaagcagcgtgcgttcagccctgggtatggtttgaagtggtgaacatggatttttctcggcttcacatgtacagtcctcccca

SEQ ID NO: 590431 - DNA, 51 bp, Homo sapiens
atatccaagaacaagcactgcaggtgttcttccagagagcaaagccctgag

SEQ ID NO: 590432 - DNA, 98 bp, Homo sapiens
ccctctgtcttttctgtgacgggagcaatgctgacctcggtttcctggacccattccgactcagttactgcaacaaggaggtatacaataaggagaat

SEQ ID NO: 590433 - DNA, 100 bp, Homo sapiens
catgtcttcgcctcccgaagggaaactagagactaaagctggacacccgcccgccgtggtcagtatatatccgagccgctgtccgaaaagagaaaggcct

SEQ ID NO: 590434 - DNA, 101 bp, Homo sapiens
cttcacatcctcagccgaagatctcacttcctcccagaggcctttgctgactgacccctcagcctgtcctgggggaacagagaggccctgcggtggctacg

SEQ ID NO: 590435 - DNA, 100 bp, Homo sapiens
tataaaatgtcagcttttaaggcaagccacccgaggggactgcctggccttccagatgcgagctgggttgcttccctgagggcccccgctggccaaggcc

SEQ ID NO: 590436 - DNA, 98 bp, Homo sapiens
aaggcaagagtaacagcagcgccgtcccgtccgacagccaggcccgggagaagtatcattggaacatttcaagatcatcaaatcaaattccacaggga

SEQ ID NO: 590437 - DNA, 100 bp, Homo sapiens
ttgttggggagaagaggattggaggtgtcagtgttaaaggaacctctacaacgaaggtgaagccacggaagataaggcgtcgggtttggagttcaagtcg

SEQ ID NO: 590438 - DNA, 125 bp, Homo sapiens
agcaatcagctggcctggtttgatactgacctgtaaatcatcctttagataacaacgaacttgatgcaagtgataggtttgccaaggtcagacctctcatcatccggatgaactgcaatttccag

SEQ ID NO: 590439 - DNA, 100 bp, Homo sapiens
ctggcgctgctggaagacgaggagcgcgtcgtgcgcctgggggtgcgcgcctgcgacctgcccgcctgggtccatcgtctgagtgccacactcgggggcc

SEQ ID NO: 590440 - DNA, 100 bp, Homo sapiens
tgaaacaccactgaagcattgccaaggtattatgagacaggaagcatcaagcctggggtaattggaggatccaaaccaaaggtcgccacacccaaagtgg

SEQ ID NO: 590441 - DNA, 126 bp, Homo sapiens
cagggtgcgtggctattggcctctgctgaatggactttcagagtgattgagagttatggtgaatggttgcatggatttgaaaaaaaggcaaaagaatgtatggctggaacttcagggtcagaggag

SEQ ID NO: 590442 - DNA, 88 bp, Homo sapiens
tcttcccgcgtccgccgattcctcctccttggtcgccgcgtccttggctggcgtgaattgaatgatctggcacgggaccctccagcac

SEQ ID NO: 590443 - DNA, 100 bp, Homo sapiens
ctgcagtcgctgcgtctccaaggttggatttggtctagggagtcccagaaagaagtagaaaaagagagagaagcctaccgtcggagaactgctgcttttc

SEQ ID NO: 590444 - DNA, 90 bp, Homo sapiens
tacctgggggagataatgtaactgtgtgcaaggataacaggtgtacgaagccatcgacagcagagatggagcatcttgtgcagagttggt

SEQ ID NO: 590445 - DNA, 102 bp, Homo sapiens
tctccaccatccgcgaggtggcggtgctgaggcacctggagaccttcgagcaccccaacgtggtcagatgaccgcacctcgagcaggagtggggatgccacg

SEQ ID NO: 590446 - DNA, 100 bp, Homo sapiens
tccgtctcctcttcctcctcctcttcctcttcgcttgcagatacccccgagatcggcctcccagaagttcctgccgaatcgtcttcgtcacccccggggt

SEQ ID NO: 590447 - DNA, 75 bp, Homo sapiens
ggaaaatcctttcttgaggcaagagtgtatgttttaactggaaaaagtcttccatgaaaacgtcacttttaaaaa

SEQ ID NO: 590448 - DNA, 51 bp, Homo sapiens
gctgaaaatggtgtaccaaaaccgtttgccattgtcttcaaaactccaaag

SEQ ID NO: 590449 - DNA, 96 bp, Homo sapiens
gccgagtcccggccatcgccgcgtcgcctggcgcccggctccggcggacccttctccggcaggtctctccaggtgacactggatgggatgtcttca

SEQ ID NO: 590450 - DNA, 74 bp, Homo sapiens
cggggcaagatggaggcgctgattttgatttcagaagaaagtggtagcttcctttccaagaacagttctgagca

SEQ ID NO: 590451 - DNA, 83 bp, Homo sapiens
ctgccatctaccacctgggggctgcgggagccaccaaagaaatcctaagtaatgcactgaagagaggagagatcattgcaaag

SEQ ID NO: 590452 - DNA, 100 bp, Homo sapiens
ggaagaatgaggacctggttgataaaattaaagagtcccttactctgctgaggaagaagaggagaccccgaaagaaagcctcacagaggctgaagtggcc

SEQ ID NO: 590453 - DNA, 102 bp, Homo sapiens
acttcatacacttcgagatcagcatcttaacaattcatcatgtgctgaggagaaaatacttggagaatttagagatacttacaatccagctgcttctgattt

SEQ ID NO: 590454 - DNA, 90 bp, Homo sapiens
caggctgagtgcggcatgatctccatcaccgaatggcagaagcgatatctgaagtggctctgatgcctttgccacactcctcgcatctct

SEQ ID NO: 590455 - DNA, 75 bp, Homo sapiens
tggactcgctgggcgagagcatcagccgcctgacggcgccctcgagtcaagggtccagagaaggaggagaagttg

SEQ ID NO: 590456 - DNA, 75 bp, Homo sapiens
aactcgagcgacagagacaagctgagcttgccgcacaaaaagctagagagggaaaactgcctttgcttctgagcc

SEQ ID NO: 590457 - DNA, 51 bp, Homo sapiens
tacgaaggctattacagccagagtcaaggtgatgaattgactctggaaggc

SEQ ID NO: 590458 - DNA, 100 bp, Homo sapiens
gagaaagacttcccaaatcttcagggtgcggtcaagacaggggctgccagaggaacccgaccagaacctgtccagccctgaggaggtgttccactctggc

SEQ ID NO: 590459 - DNA, 101 bp, Homo sapiens
tcctagctaaacttcgccaactccgctgcctttgccgccaccatgcccaaaacggtactgtccaagaagctggaacattattatccagcaagaatgttcgt

SEQ ID NO: 590460 - DNA, 100 bp, Homo sapiens
acagctttcactatggggtggagacgtggtactcagcaagctcgagttaaagttggatgtgctggaacaggaaatctgaaatagagtactatgctatgtt

SEQ ID NO: 590461 - DNA, 75 bp, Homo sapiens
gagccgctgtcctcgtccccagcggtcccgcccaacgcccgactctaattttcccactgtaaaaaaccgagcaag

SEQ ID NO: 590462 - DNA, 75 bp, Homo sapiens
atggcggcggcgtctgtctctgcggcttctggttctcacttgtcgaattcagaaggagctggcggacatcacttt

SEQ ID NO: 590463 - DNA, 73 bp, Homo sapiens
gggaagacgcagaaggtgaaggtgctcacgggcacggacggcactttccgggagctccggctggtgaagggcc

SEQ ID NO: 590464 - DNA, 83 bp, Homo sapiens
gaaaggaatgatagctggggttcttttgacctgagggctgctattgtatatcacactaaaggctgctgagaactagccctaga

SEQ ID NO: 590465 - DNA, 101 bp, Homo sapiens
gtggtggctacagtgaccggagctcgggcgggtcctacagagacagttatgacagttacgctttccccagacatggccaacaagggtccttcctatggcat

SEQ ID NO: 590466 - DNA, 75 bp, Homo sapiens
ccaaagtttatactatcagaccttattttcctaaggatgaggacccagtaccacaacagaaacagaaacaatcgc

SEQ ID NO: 590467 - DNA, 75 bp, Homo sapiens
gtaaacggggctgctggtgggccgcgtcgaagacatggaccagggctacggagatttatgtgatcagtttggctg

SEQ ID NO: 590468 - DNA, 50 bp, Homo sapiens
ggcctcggggtctccctacaccaacgatgacgaagatgatcctgcagaag

SEQ ID NO: 590469 - DNA, 100 bp, Homo sapiens
actttccggggtgcacagcaagtggttattctcgttcaagttaatccaggtgagactttcacaataagagcagaggatggaacacttcagtgcattcaag

SEQ ID NO: 590470 - DNA, 100 bp, Homo sapiens
ctagccccgcgcctgggcctcgccgagcccgacatgctgaggattcactccttctccagttgcacagccacacccttcagctggccttaatgttgacttt

SEQ ID NO: 590471 - DNA, 95 bp, Homo sapiens
caagctcatctctgagacccggaggaggttcgaagctgagtatgtgacaggtcaatgcatcacgtcaagaagccaaattgacagaggagtgtgat

SEQ ID NO: 590472 - DNA, 75 bp, Homo sapiens
ggttattcgagtgaccgagaccgcggccgggaccgaggatcttcagtgtctattggatttttccaagagaaagtt

SEQ ID NO: 590473 - DNA, 50 bp, Homo sapiens
cttcacttgctcttgtacatgagttttctggatatgccgcagaaggatcc

SEQ ID NO: 590474 - DNA, 100 bp, Homo sapiens
tgggggtgcgcgcctgcgacctgcccgcctggttggagtcattcgttgcccagtttgcagccaagaatgtgcagagagacacatcatagataactttttt

SEQ ID NO: 590475 - DNA, 100 bp, Homo sapiens
ctgagcgtgagtggcggtgtctggcaggagctgcgtggcagggagggcgtccatggctgcagccaacaaggacccccctcgacaaccaacattcaccacc

SEQ ID NO: 590476 - DNA, 75 bp, Homo sapiens
atggtgagattgttggcctttcaggaagagtgcttaagggtggagagattcaaccagttagcgtgaaagttggag

SEQ ID NO: 590477 - DNA, 75 bp, Homo sapiens
gaaaaggcctaagaattttggcattgctgtgccgaagcgagtgccacttgtctgcagggccgtaccgcggaaccc

SEQ ID NO: 590478 - DNA, 80 bp, Homo sapiens
tactaccaaggacagcttttttcctgcaaggatgtgaaatggtctgacttcgggtttcctggaagaaatggacaggaaag

SEQ ID NO: 590479 - DNA, 88 bp, Homo sapiens
tgacccacagctatcccctgaggcccgacccagcctgctcttgaggttcacagatgatacctttgatccagaacttgcagcaacaata

SEQ ID NO: 590480 - DNA, 90 bp, Homo sapiens
ggaacaagccatggagggtcaaagaaactcctggttgagctcaaagttattttacatttatcagaggttctggtgatagcagtcattcac

SEQ ID NO: 590481 - DNA, 90 bp, Homo sapiens
cgaactgaaccagttctgcagtgtgcacacgcttcaagaggtctacattgagctgtttgaccctacagcttggggcctgggctcctctga

SEQ ID NO: 590482 - DNA, 74 bp, Homo sapiens
aaacagcagatttcccaagagcagcggaaaatgatccagtcacagttatcaggaactgttgccgttattacatc

SEQ ID NO: 590483 - DNA, 80 bp, Homo sapiens
gaggctgctggagctcgtgtttggacgcatatgcctcttcatgttcgacgcagtagtgacccagctctaattggcctctc

SEQ ID NO: 590484 - DNA, 114 bp, Homo sapiens
ccgcgagcacagagcctcgcctttgccgatccgccgcccgtccacacccgccgccagttccaaagaactactggttcagattttagctcttcccaagttgtgaaaatagtgaag

SEQ ID NO: 590485 - DNA, 100 bp, Homo sapiens
tccagattgtttgtcgagatgggaaaacaattagtctttgtgcagaaagcacagatgattgcttagagaagaggtactcccttatagggactcgtaaaga

SEQ ID NO: 590486 - DNA, 82 bp, Homo sapiens
aagtctcagatgagctcatgagtgaaaggaattacatgaatgacagtcttcgaaccaatgtgtttgttcgatttcaaccaga

SEQ ID NO: 590487 - DNA, 90 bp, Homo sapiens
ggcggcggtgacaacgacggcggtggtgacgggcaccgggctcgcgggtttacccaaggtccagcctagcccctaggcaccatgtcggac

SEQ ID NO: 590488 - DNA, 95 bp, Homo sapiens
ccagcggccccgccgagagccggaggcaatggatgaacagagcgtggagccatcaggaaatatggccgagattttcaggcaatctcagacgtgat

SEQ ID NO: 590489 - DNA, 100 bp, Homo sapiens
ccacaaaccgctgccagaaaaattgagaggatccagaatccagatctctggaatagctaccaggcaaagaaaaaaactatggatgccaagaatggccaga

SEQ ID NO: 590490 - DNA, 74 bp, Homo sapiens
gggaaggcttgtagagtgccttggaagtcagaggttatcttatgatgaggcttttgctatggctaatgatccct

SEQ ID NO: 590491 - DNA, 98 bp, Homo sapiens
gaggacagcgcgtcggctgcggttctctctcgaccccttctgcccggcgcttcggcccgggccgctcaggtgcagagggaaaccaaagggcagtttct

SEQ ID NO: 590492 - DNA, 98 bp, Homo sapiens
tgatgtggatgtggaagaaagtgatgagtacctggagtagaacagaaaaattattatgtctgtgttcccttgggactcattggaaattgtacagtgac

SEQ ID NO: 590493 - DNA, 100 bp, Homo sapiens
agccaggctgcccggttttatagccctgcttgacctgtgtgatccgaggtccactggctattctgaggtgatagttgtcgttggaggatgtgagcgagtt

SEQ ID NO: 590494 - DNA, 83 bp, Homo sapiens
cggggtgaaagagaagcacggctccgactactccaaggatcactactcttggaatcaaagataaatccaaatactgcatatca

SEQ ID NO: 590495 - DNA, 50 bp, Homo sapiens
caacagcaggaatagctcccggctgatcagctgaccgaagaacagattgc

SEQ ID NO: 590496 - DNA, 83 bp, Homo sapiens
gttttatttgcatttgaagaagctattgggatcatagacggtatttctatgtaaacgaacagtcgggcgagtctcagtgggag

SEQ ID NO: 590497 - DNA, 101 bp, Homo sapiens
acaagcaggtccaaagagagacaaaccagtccagctacgggggcccagccagccagcagctgagtgggggttacggaggcggctacggtggccagagcagc

SEQ ID NO: 590498 - DNA, 90 bp, Homo sapiens
agcctccggagtagctgggactacagggatatgtggtgcctgtcataagctccagagagctgccttccacaagaccagcagaagagtggg

SEQ ID NO: 590499 - DNA, 83 bp, Homo sapiens
cgaagcttgaaagacttggtaatggcgacgggtttgacctgcctagagctggaacgttacctccagagcgagccctgctatgt

SEQ ID NO: 590500 - DNA, 75 bp, Homo sapiens
ctcacggggaatatgggaaaacgtaaaagctccactccacaaaagtttgtgggaaaattgcctaagaattatgac

SEQ ID NO: 590501 - DNA, 50 bp, Homo sapiens
caggattcttctttgcagcaactgtgggtcagtcttgcactcccatcaac

SEQ ID NO: 590502 - DNA, 80 bp, Homo sapiens
agaacatgcaacagtacgttttgctggtgttgtccctcccgtggcaggggacggcaaaacagaacagaaaggcggagata

SEQ ID NO: 590503 - DNA, 82 bp, Homo sapiens
tttggatgtgggatccggttccttggtgtcatccagccttagcaaaccagagtgtccatgggctattcctcaaaatacaata

SEQ ID NO: 590504 - DNA, 100 bp, Homo sapiens
cctaacgcaggtttccccgcaaatgactggtcacgcgggactgaacaccgcacaggcaggaggcatggccaaggaggactcggaggagagtgaaattgac

SEQ ID NO: 590505 - DNA, 100 bp, Homo sapiens
ctggcccgggagctgggcgttggggtctctatctgggagctgggccagggcctggactacttctacgacctgctctagaacctcaagaaggcatgaagcc

SEQ ID NO: 590506 - DNA, 90 bp, Homo sapiens
gtgtcctttacaaatcttcagggaatggccaagtgacaaaggtagccacatgggagaagcagatctacacatgctgtcgagacggtcttg

SEQ ID NO: 590507 - DNA, 74 bp, Homo sapiens
cagtcctgcagcgccagcagctggactatggcatctatgttatcaaccagattctgcatatacagactcatgaa

SEQ ID NO: 590508 - DNA, 83 bp, Homo sapiens
ccatcaagtgagcctggcgctgtctacctggggatttccaaatctgaagtctgtccgagaactcattttgaaacgtggacaag

SEQ ID NO: 590509 - DNA, 98 bp, Homo sapiens
ctggctagaagcagagacaccaggacagaaaagacagtgttctgctttcatggagttcacagaagagtcgaggaggctgcatggtgtatgaaaagctg

SEQ ID NO: 590510 - DNA, 80 bp, Homo sapiens
tggatgaagcggacgccttccttcggaagcgagccactgaggagataagcaaggacctcagagccacactgaacgccttc

SEQ ID NO: 590511 - DNA, 75 bp, Homo sapiens
taacccagactaggaatgccagcatctgccaagcagctgtattcatcaccaaagaaaaaacttacaccaatgcag

SEQ ID NO: 590512 - DNA, 76 bp, Homo sapiens
cttcttcgagtatttgtagaagggcaccgcatgcgtggggagaccaccctgtggaaccctggctgtgaccatgcag

SEQ ID NO: 590513 - DNA, 96 bp, Homo sapiens
ctccaaatcccagactagctgctaccccaagcccgggagcttctcaggtgaattttgaagtcttcatcagtatatccatattaaaacgagatgaca

SEQ ID NO: 590514 - DNA, 100 bp, Homo sapiens
ggcatcttcaaagctgaactgaatgagtttcttactcgggagctggctgaagatggctactctggagttgagacacatgcctcttatcagatacatgatt

SEQ ID NO: 590515 - DNA, 106 bp, Homo sapiens
agaaacgttgtttggtcccgattccggaaaaggtgccaagagcttagttgaactccttacaggggcaagtgtccgagtggtgaatcagctacttacagagatggat

SEQ ID NO: 590516 - DNA, 75 bp, Homo sapiens
agatccctggaatatgaagagacacagtatggtagccacacccccagcggatctgaaaagaacaattgctgtcct

SEQ ID NO: 590517 - DNA, 100 bp, Homo sapiens
ctagagaccacattctcaccctgcctttgttactgggaaaccgaacgcggcgctgtggctttcagcttggaaagctgatgtcctgaccactggagctggt

SEQ ID NO: 590518 - DNA, 98 bp, Homo sapiens
taaggaggacttcctggagggggtgactgtccagagcctggaactgtgcccacaccagaagccatcagcagcaagaagtcctccagctctgcatcttc

SEQ ID NO: 590519 - DNA, 100 bp, Homo sapiens
gtgatgaagaaacttgcaaaagtatctcatatgaccagtgggaaaactgaggctgccatcaaaaacttcagtccctactacagtcgtcagtactctgtgg

SEQ ID NO: 590520 - DNA, 50 bp, Homo sapiens
tttttctccaagaaggacaagcccctgtgaattacatgaacgacagcctt

SEQ ID NO: 590521 - DNA, 99 bp, Homo sapiens
ggatggtggtgatggttgcacaacaatatcaatttattttataccactgaaccgtgcacttcaaaatggttaagatggagccatgtgttcacatgtcat

SEQ ID NO: 590522 - DNA, 100 bp, Homo sapiens
caaggctgacgtggagcggtacatcgcctcggtgcagggctccaccccgtcgcctcgacaggaccatctgtcgttcgttaccatctgcccaagatgttgt

SEQ ID NO: 590523 - DNA, 75 bp, Homo sapiens
ctggtggcccgcagcaacatcatgacattgctgttccagtgcatgcaggtggacgtgccccatgtgaaatgcaaa

SEQ ID NO: 590524 - DNA, 90 bp, Homo sapiens
aagagactggacacgcacctggcagacatataccattgccaccttccagagaagaggtacgagatgacaagacaaccataaagtgtgaaa

SEQ ID NO: 590525 - DNA, 90 bp, Homo sapiens
cagagtcactcaggacaagcttgaagattggagctggagtgagccttccaggaattttggctgccaaatgtggtgcagaagtaatactgt

SEQ ID NO: 590526 - DNA, 100 bp, Homo sapiens
caagcttttgtccccaaaccagaggtgagccagccatgagagggtatcttgtggccatattcctgagtgctgtcttcctctattatgtactgcattgcat

SEQ ID NO: 590527 - DNA, 76 bp, Homo sapiens
tctggcccgaagccttcctttatcgctttcagacaccattcgcttttcacccaagatgatttgatgtcttataaaa

SEQ ID NO: 590528 - DNA, 82 bp, Homo sapiens
gaagaaaggtggatcctacatgtgccatagggtgtggaaacaggaagagaactagaactggaagtaaagcattgaagatgtg

SEQ ID NO: 590529 - DNA, 75 bp, Homo sapiens
ctcaggagagagcagccagagtgagatggggtcttgccatgttgcctaggctggtcttgaacttctgagctcaag

SEQ ID NO: 590530 - DNA, 97 bp, Homo sapiens
aacaagcatcttgatctagaaaatataacggttcaaaccttgtactactcagctgatcacaagctgcttgatgggaacctactagatggacaggctg

SEQ ID NO: 590531 - DNA, 100 bp, Homo sapiens
gaaaaccaggtggatatgaaagatgacacctttgaggccctgtgcatcgagccgttttccagcccgccagagctgcccgatgtgatgaagccccaggact

SEQ ID NO: 590532 - DNA, 101 bp, Homo sapiens
ggcctcccaaagtgctggaattacagtcccttagggactggccctaacaacaaatgaggagaagccaagttctctgctttctgcagacagggcctcccctg

SEQ ID NO: 590533 - DNA, 99 bp, Homo sapiens
gcgaagaggctggactcggattcgttgcctgagaaatccccggcttcctgactgatgaagagtgtcggctcatcatccatctggcgcagatgaaggggt

SEQ ID NO: 590534 - DNA, 75 bp, Homo sapiens
cagcttcatgaactccaagccaaaatcacagctttgagtgagaaacagtttgatgaagaatttctggaaacaaaa

SEQ ID NO: 590535 - DNA, 90 bp, Homo sapiens
gtggaggcgccgcaagcgctgagattcacagtctgagaatgaggcttcaccagtaaaacggccacgactacttgagaatacggaacggtc

SEQ ID NO: 590536 - DNA, 100 bp, Homo sapiens
gaaacatggcgaccgagggaatgatccttactaaccacgaccatcaaatccgtgtcggagtccttacaggacaatgaaggccaaacagctctacattatg

SEQ ID NO: 590537 - DNA, 100 bp, Homo sapiens
agaaggagatacattaaatgcaatagcccttcagtactgttgtacggtggtgttcccactgatgaagagcaggcgactgggttggagagggagatcatgc

SEQ ID NO: 590538 - DNA, 75 bp, Homo sapiens
gaaacgtctgtgggttacgccatctttaagtttttgaaatcatgaatcctgtttatagtcctggatcttctgggg

SEQ ID NO: 590539 - DNA, 112 bp, Homo sapiens
gtatcacctatagaaagaaatgagcagctttggataatgacgacagcaacccgaagacagggaaatttagaaggattgagtcatcgggctccaatgcgtggggatgtttacc

SEQ ID NO: 590540 - DNA, 87 bp, Homo sapiens
atgctgggcctgccacggaggagccaggtccctgtctgagccaaggtcatgacgccagtcagatcacactagccttgggcacagctg

SEQ ID NO: 590541 - DNA, 74 bp, Homo sapiens
gcggagtgtcctggagcttgacgcgctggagcttgagaggatggtgattgctcacaccaaagccttggacccct

SEQ ID NO: 590542 - DNA, 74 bp, Homo sapiens
aagccacgtgcagacatctacaaccttcgatctcctgacgagtcatcctgtacagttctacagcatgaataggc

SEQ ID NO: 590543 - DNA, 100 bp, Homo sapiens
ctggctcagccgcaagtacccgtccatcatagtcaactgcgtggaagagaaggaacttgcttgctagaaaacaaagtgcaaggcttgacaaacacaatga

SEQ ID NO: 590544 - DNA, 82 bp, Homo sapiens
gagcctgcagagcgcgcagtacctccggtacaagaaaattccccaggacacagagctggtttggagcctttctttgatttta

SEQ ID NO: 590545 - DNA, 74 bp, Homo sapiens
agtgatgaagaaagtgttagaaacagtagtggagaatcaagggaatatggagccattgatgatgtagatattga

SEQ ID NO: 590546 - DNA, 83 bp, Homo sapiens
agaagatgaactaatgagagcagcaggatcagatggtactgaactttttgatcaggtcaaaatgcagatcttcgtgaaaaccc

SEQ ID NO: 590547 - DNA, 83 bp, Homo sapiens
gaagaaacctaagaaggaagcaaatcaggccccgagaacaagatcactcaaggtgaaggataatctactaataccagcacttt

SEQ ID NO: 590548 - DNA, 100 bp, Homo sapiens
gtcggagtgcatcacggaggacggcaggactgtggccgtgggggacatcgtctgggggggggccctcagcctcttggccttgaacgggctgttcatcttg

SEQ ID NO: 590549 - DNA, 80 bp, Homo sapiens
ccgactcctccgacgccgatccggacagcggcacagaggagggaggtttacccaaggtccagcctagcccctaggcacca

SEQ ID NO: 590550 - DNA, 100 bp, Homo sapiens
aggaaacatggcggcggcgggtgttgtgagcgggaagaattctgcttggtcagaatcgtgatggcattgtgttcagcactgatgactattttcaccatca

SEQ ID NO: 590551 - DNA, 82 bp, Homo sapiens
agcaagccgggcggcctgccccgccggagcagcatcatcaagaatgccagaggattcaacatgagcatacctatgcctgggc

SEQ ID NO: 590552 - DNA, 75 bp, Homo sapiens
tatacaaagaagtgatgctggaaaatctcaggaatctggtctcattgggtctctttaatgtggggaacaagctgc

SEQ ID NO: 590553 - DNA, 75 bp, Homo sapiens
gtgagaggaaaacagcctacccgacctatgtgcccaccgtgttcgaaaattacacagcctgtttggagacagagg

SEQ ID NO: 590554 - DNA, 132 bp, Homo sapiens
tgggccgcgctggccgtcggactggagctctgggctgcggcgcacgccttgcccgcccaggtggctattatcatggaaaactaatttttcccagagaatttcctttcaaacctcccagtatctatatgatca

SEQ ID NO: 590555 - DNA, 49 bp, Homo sapiens
aaatgatggcagttccagatgaaaatgtttataggaggccttagctggg

SEQ ID NO: 590556 - DNA, 75 bp, Homo sapiens
aaagatatgaaggactgggttgaagccctgaaccaagccagcaagatcaccgaggagacatcacagctttcccag

SEQ ID NO: 590557 - DNA, 75 bp, Homo sapiens
tggactgctgctgcaaaacttttcttcttagtaaacacttgccatcgtcagatagtatgtctctaaaagtagatg

SEQ ID NO: 590558 - DNA, 51 bp, Homo sapiens
cagccatcactcatgtccataaggaggttttgctgttactgctcagtgtag

SEQ ID NO: 590559 - DNA, 100 bp, Homo sapiens
ctaactggggctacgactctgatgggcagctctggcaggctgccctgagcacgctcaaccccaaccccacggacagctgtcccctctacctgaactacgc

SEQ ID NO: 590560 - DNA, 100 bp, Homo sapiens
attatactcagtggctgcaaaaaaagccatgcagtgacacccgctaagacttgttggtagccatgtcggagccccacagggtccagttcacctctctccc

SEQ ID NO: 590561 - DNA, 100 bp, Homo sapiens
ccgctgcatcatcgccaagcagcgcctggccaaaggccgcatccaggcaaggcgcatgaagatgcagagaatagctggtaagaattgtgacaaaggccag

SEQ ID NO: 590562 - DNA, 96 bp, Homo sapiens
tggtgcagcttcttcagttccaggaagatgcctttgggaagcatgtcaccaacccggccttcaccaaactccctccatcagagggttctcgcttca

SEQ ID NO: 590563 - DNA, 80 bp, Homo sapiens
ccggcatcgtctttccgtcctctgaggcgacggccgcggctgcacagatgtgaagttcatttccaatccgccctccatgg

SEQ ID NO: 590564 - DNA, 75 bp, Homo sapiens
gtcttcatcaaccgggaccgtggcttcggcttcatccgcttgcaattctgtggtgttcttggtcacacatttatg

SEQ ID NO: 590565 - DNA, 59 bp, Homo sapiens
ccaatacgatatcatccaatgcaaagaagtttgggagcctctggtggagcaagtaattg

SEQ ID NO: 590566 - DNA, 75 bp, Homo sapiens
tatttggcttcaatgtcatattttggccgtgctggtatagaggactctaagaagtggggcatgctgtttctggtg

SEQ ID NO: 590567 - DNA, 82 bp, Homo sapiens
cgacaagccgctggcagccgcggatctcaccgccgctcaggattgttaaaggaaatgggctggcaggaagacagtgaaaatg

SEQ ID NO: 590568 - DNA, 75 bp, Homo sapiens
catgacaggaggccgagcgcagagcattggcaggaggggcaaggtggaacaggaaattggggatgtggagaactg

SEQ ID NO: 590569 - DNA, 88 bp, Homo sapiens
ttctgatcttttaaaatattacttaagagaatctcaagctgctaaggacttggatgttgtgggtgatggtatgcagtgtcctccttca

SEQ ID NO: 590570 - DNA, 100 bp, Homo sapiens
agtatccaacattacatgtggtattgaaaggatccaataatgacatgaaagttcttcaccaagtttcatctgtatggaaaaggagctctggtaactttgg

SEQ ID NO: 590571 - DNA, 80 bp, Homo sapiens
cccaggagaagccgcccaaagaactgatggcaccgaaagcgaaggaagctcctgctcctcctaaagccgaagccaaagcg

SEQ ID NO: 590572 - DNA, 74 bp, Homo sapiens
atgtctctgaccatctggacggtgtgtggggtcctgtcactatttgagggtgatgagacaggagtgatggataa

SEQ ID NO: 590573 - DNA, 97 bp, Homo sapiens
tccatttgaagctgatgaggaaaattggcaaatctgttactgcagacagatgggaaaaatatttgatcaagacttcagtgaagttccttatgacttc

SEQ ID NO: 590574 - DNA, 96 bp, Homo sapiens
cgcgcggcgcgggctgcagacggctgcgaggcgctgggcacagggcgccctgcgtccggcagaggaggcgagcatcccgctcaggtgatgaggaac

SEQ ID NO: 590575 - DNA, 83 bp, Homo sapiens
cggcgggaactcgactcttggcgccaccgcctcatgcactgtgtaggaaggatcgagatcgagaccgggatcgtgaagatcgg

SEQ ID NO: 590576 - DNA, 75 bp, Homo sapiens
cagagactgctgagcccgtccgtccgccgccaccacccactccggacacagcttgccttgcgccatggactggca

SEQ ID NO: 590577 - DNA, 80 bp, Homo sapiens
cgctggggcccccagaagtgatcgctcagctggagaacgcggctaaagttctgatgggcatacaaaaccattgaggatga

SEQ ID NO: 590578 - DNA, 90 bp, Homo sapiens
gcttcagacagcatatttgagtcatttccttcgtacccacagtgcttcatgagagttggaaatggaggatgaagatacaattgatgtgtt

SEQ ID NO: 590579 - DNA, 100 bp, Homo sapiens
attcaggacacggttccagcgcagtgcgcgttagccatgtctcagttttcggctttgtgagaaaccttaccatcaaacacgatggccagcaacgttacca

SEQ ID NO: 590580 - DNA, 91 bp, Homo sapiens
tcatgttctaacacgggataaattcaagttagaaaaagacaaaatattgaaatgcttctctagggtgagcagggcagcatttccttctccc

SEQ ID NO: 590581 - DNA, 100 bp, Homo sapiens
gaagaatatctggttattatcaggttcacgccaacagtacctcattgctctttggcgactcttattgtgtcctgctctgtcatccaggttgaagtgcagt

SEQ ID NO: 590582 - DNA, 100 bp, Homo sapiens
gctctgtgattggtggtcgcttggggtgatcatgtatgagatgctcatcggtgaaaacaggagtcataatgaacataattggagtcttctgtgtgttttt

SEQ ID NO: 590583 - DNA, 90 bp, Homo sapiens
acggaggaaattctgaatatagggacaccacagtgtccaagtcacacagagccacggaatctcacaggagcctgagaactcctcctcctg

SEQ ID NO: 590584 - DNA, 100 bp, Homo sapiens
ttaatggctcagccaatcactcctggcccctcgattccaggtgccccacaggtgggaatggaagtggccccacatctcaaagaaaccctaaataagaact

SEQ ID NO: 590585 - DNA, 100 bp, Homo sapiens
ggaactttgggtcctgaatcttctgggagctgaggaaccagatatcttgaaaagctgccagaaaggcatcgttggcttcacagtatgactgatgatcctc

SEQ ID NO: 590586 - DNA, 105 bp, Homo sapiens
gcgaattagtccgagtggagagagcgagctgagtggttgtgtggtcgcgtctcggaaaccggtagcgcttgcagcatgttcaggacctcaaggggctcggctatg

SEQ ID NO: 590587 - DNA, 98 bp, Homo sapiens
tattctgcagcataagaaagtggatgaatacacagacactgacctgtacacagcaccatatgaaggcggagtatggaaagttagagtggacctacctg

SEQ ID NO: 590588 - DNA, 100 bp, Homo sapiens
agcagcttttcagatgcaaatgagccccacagtcttcgttataacctcacggtgctgtcctgggatggatctgtgcagtcagggtttcttgctgaggtac

SEQ ID NO: 590589 - DNA, 100 bp, Homo sapiens
ttgaatgaactgtatccatccccatcatgatgtacagaaccaagtctcttcactagttcacagcagatgaggctcgggacctgattcaacgttacctgac

SEQ ID NO: 590590 - DNA, 102 bp, Homo sapiens
ccagttagagacacaatgacataaacatcgctatgatgggaaatattgcagcagttgcagcttcctgtgccaataatgttccagctccagtcttatctaacg

SEQ ID NO: 590591 - DNA, 51 bp, Homo sapiens
ggaagattgaggcctacatggaaggtactccaaagattcaggtttactcac

SEQ ID NO: 590592 - DNA, 50 bp, Homo sapiens
gggcaaagcccaacaccttcccccactgattttgtgcatccaccttaaaa

SEQ ID NO: 590593 - DNA, 98 bp, Homo sapiens
cggatgccctgcagtacctgcagaaggtctctggagacatcttcagcaggttcaccgagatgccgactgataacttcattgagagctccttctggaac

SEQ ID NO: 590594 - DNA, 98 bp, Homo sapiens
gacagtaccgtcacatccactgtcctcatcctagtgggggttggcttgcccatttcctctgtttaccgacaagactgtgaaactttcgggatggtggt

SEQ ID NO: 590595 - DNA, 82 bp, Homo sapiens
gacgaacccaacctggtgcccggcccgcagaacactctgctccagccaaggtggtgagggcagctgttcctaaacagcgcaa

SEQ ID NO: 590596 - DNA, 83 bp, Homo sapiens
cacggacatttctatttggcagccaacattcagccatctccagtcactgagctagatagtaatgatgacactgaagatgtttc

SEQ ID NO: 590597 - DNA, 82 bp, Homo sapiens
gtgcagctcctggtgcgtggcccagcctcagagtcaaaatgcagatcttcgtgaaaacccttaccggcaagaccatcaccct

SEQ ID NO: 590598 - DNA, 90 bp, Homo sapiens
acacacatcactaaaaattatccctactacaggactgcggacaagggctggcagacaatgcagatcttcgtgaagactctgactggtaag

SEQ ID NO: 590599 - DNA, 75 bp, Homo sapiens
ggaaaatgccaacgccgtgtctgaagccaagacaatgcaaactccagtgaacattcccgtgcctgtgctccggct

SEQ ID NO: 590600 - DNA, 75 bp, Homo sapiens
gcacaactgtccacgtaggcattcaccccagcaaggtggataattactgtaccttcctcatggaaaaagttttat

SEQ ID NO: 590601 - DNA, 89 bp, Homo sapiens
gccctcttgataaaaagagatgtggggggattctcgacctgctaacagaactggaccttttcgctgtgccataagtaacgtgaagaagg

SEQ ID NO: 590602 - DNA, 87 bp, Homo sapiens
cacagtatcagaatacaactgtttccttttctccggtggtcagaatggcttcaacattcctcaagtcaccccatgcccagaagtagg

SEQ ID NO: 590603 - DNA, 80 bp, Homo sapiens
cggaggaggctcatgcgggatttcaagcggtgtttgctgactagcactttggagagtgtatgcttatctgccatgtccat

SEQ ID NO: 590604 - DNA, 82 bp, Homo sapiens
gatgaaagacaagtccgaggtggaggtcgtggacctggtcctgaaacttcgtgagaagctgagctacttcctcagccgagcc

SEQ ID NO: 590605 - DNA, 124 bp, Homo sapiens
caccgctacaacgcctacccctcagagcaggagaagctgagcctttctggacagaccaacctgtcagtgctgcaagttggtgttcgaggaagagacattgttgttcttggtgtggagaagaagt

SEQ ID NO: 590606 - DNA, 51 bp, Homo sapiens
tagtataatccagcaggcaaccaaagtagctttggatatgttaaatcctca

SEQ ID NO: 590607 - DNA, 90 bp, Homo sapiens
ggctctgaagagaatccacaagatcaatgtccgagttaccaccatggatgcagagctggagtttgcaatccagccaaatacaactggaaa

SEQ ID NO: 590608 - DNA, 100 bp, Homo sapiens
cacgggcccccgcggccgcagcatctcggaggagaaagaccacagcaagattctttcattcgtctcctcctagcctgggggaccaggctcgaactgaccc

SEQ ID NO: 590609 - DNA, 100 bp, Homo sapiens
catgaccgtgttcaggcaggaaaacgtggatgattactacgacaccggcgaggaacttggcagatccagtttgctgaccagaagcaagaattcaacaaac

SEQ ID NO: 590610 - DNA, 83 bp, Homo sapiens
cgaacgggttgcttcccccgctgcgagggtgagaactctgtctcagtcgacgggaagtgcagtgactccacgctactgagcaa

SEQ ID NO: 590611 - DNA, 75 bp, Homo sapiens
aagctactgcagacgacgagctgagcttcaaaaggggggacatcctcaaggggtgcacagagcgttttgtatgta

SEQ ID NO: 590612 - DNA, 75 bp, Homo sapiens
cagtcccgcgtactgagccagaagatctatgccctcaacagagtcatgacagaactggagcagcagcagtttgat

SEQ ID NO: 590613 - DNA, 82 bp, Homo sapiens
gcgcatctggcctgaggctagatggtgatggtcttgaatagtttaggcgtcctttctgaagaacagatccggaagaagaaga

SEQ ID NO: 590614 - DNA, 83 bp, Homo sapiens
ctgtaatcaattgtgctgacaacacaggtaaagagaaatgtgtatgaccttacaagtatccccgttcgccaccaattatggga

SEQ ID NO: 590615 - DNA, 100 bp, Homo sapiens
aacttagccaactggtcactgacttctctctcctagtgaatgtcctggagttgttaattcaccgagatggggaatttcaagaactaatgaaattggcact

SEQ ID NO: 590616 - DNA, 75 bp, Homo sapiens
ccgccgtcagcgagggcgccgagcaacttcgatctcaggatggacccaagctctgccggacatggtggtgtccca

SEQ ID NO: 590617 - DNA, 116 bp, Homo sapiens
agtggcgccagatagaaaacggcgagagtgggcgagaacgtccactgcgggccggcgaaagctgagtccctgcaggaagcatcacccaggctggcagatcatggtagcagcagcgg

SEQ ID NO: 590618 - DNA, 96 bp, Homo sapiens
tggctttaatcctgaaagccatgcagcgggctcgtggaggagttcatgctcttggccaacatggcagtggcccacaagatccaccgcgccttcccc

SEQ ID NO: 590619 - DNA, 82 bp, Homo sapiens
tttaggcatacaagtaccctggctgattgatgtacagctatatattttgtcctttctttcacctcatgatctgtgtcagttg

SEQ ID NO: 590620 - DNA, 83 bp, Homo sapiens
cgaagaccagccagaccatggagctcgcccccaacttccaggattaatcctaccatatgaaagatttattaaaggagaagaag

SEQ ID NO: 590621 - DNA, 75 bp, Homo sapiens
actgaaaactggacattataacattaattgaaatggatgcagtcagaactgaatgttgaagaagtggtaaatgac

SEQ ID NO: 590622 - DNA, 100 bp, Homo sapiens
cgagaccgcgtgcgaggaccggagcttactccacgggaacagcctctagataatctgagttgttgaaaatacgaagcctgttactcgtgaacagtggctg

SEQ ID NO: 590623 - DNA, 100 bp, Homo sapiens
aacctgccgtctccgccatcgagcgcccctccgagctggggttggacgctgccagtttgcacagcagcagaacgactcctggtccccaagtgtgtgatgc

SEQ ID NO: 590624 - DNA, 82 bp, Homo sapiens
cctggcctctaagggagctctgtttctcaagatggtggccgacatgcgggagaagcgctacgtgcaggagggcattggcagc

SEQ ID NO: 590625 - DNA, 100 bp, Homo sapiens
agactggttcaggttttgtagtaccaagtgcttctgccaaagcaggtgtggaagccatgagcaaattatctcaactttggtctcctgggaccactcgttg

SEQ ID NO: 590626 - DNA, 90 bp, Homo sapiens
gattacctttccaagccaatgcccaagacattataaacgtacaactccaaaaggagacattggagaagaaccaagctgggtctataagga

SEQ ID NO: 590627 - DNA, 80 bp, Homo sapiens
gtatttgcataggaatcagaggagttaatcttgtgttggagagcacaatggctgaacaagtccttcctcaggctttgtat

SEQ ID NO: 590628 - DNA, 82 bp, Homo sapiens
ctgacacgtattgtctcaagattaaaggaaccatcactgttgctggaggcacctgacaaatcctagcgaatttttggagcat

SEQ ID NO: 590629 - DNA, 126 bp, Homo sapiens
tatatttatatttcctacctggagaatgcctggactgttctccccatggaagttcttcaagacaatggcgatgaccactcagaaggaggcctggtggagaaccacgtggacagcaccatgaacatg

SEQ ID NO: 590630 - DNA, 97 bp, Homo sapiens
aatcttaaccttcaaccatctggggaaaaggcaaaaatcccatctaccgcaactctcagttcgagagtaaaggtgtgggctaagctggtggccccgg

SEQ ID NO: 590631 - DNA, 100 bp, Homo sapiens
gcgtggagcgctgcgcggcgcggcggccgggccctcgagacggggacgactccgccgtggtcatggaggagggaagtccgggcgaggttcctgtgctggt

SEQ ID NO: 590632 - DNA, 85 bp, Homo sapiens
gaacttaaaaagcagtctaaacctgtgaccacccctgaagaaattgcacagctgtgttccagatcatctccctggtaatttaccc

SEQ ID NO: 590633 - DNA, 80 bp, Homo sapiens
gtgttccaacaaatagcactttcttattccaagaatcaggaaacccaggcccaacggcaggtggatgcaagaagaaatgt

SEQ ID NO: 590634 - DNA, 100 bp, Homo sapiens
agtgaacagacacgggtgaatgctgctaaaaacaagactggggctgctcccatcattgatgtggtgcgatcggatggcactggatctttaaaacgcagtg

SEQ ID NO: 590635 - DNA, 90 bp, Homo sapiens
ccgatatattgcccttcttcccttagaagaactgctgaaccgactctgagaaatttggtggagattctggacgcaaagacaagggagaag

SEQ ID NO: 590636 - DNA, 87 bp, Homo sapiens
gaaattttggacctgtctccaacaccctggggatttccaccaggaagacaacaaaggaggctttgaaaatgttttagaagaaattgc

SEQ ID NO: 590637 - DNA, 76 bp, Homo sapiens
atagaattttctacagaagtcaaggcagtcaagctgcggcgagataggtacaccaggggttggaaaaaccacacta

SEQ ID NO: 590638 - DNA, 90 bp, Homo sapiens
gcgagctgagtggttgtgtggtcgcgtctcggaaaccggtagcgcttgcagcatgcatatatagcagtgacgaggatgatgaggactttg

SEQ ID NO: 590639 - DNA, 75 bp, Homo sapiens
ttactacagctgctcagaagcaccactggaaactcagcattccaaaatatgcccggtgctatccgcccagctgct

SEQ ID NO: 590640 - DNA, 83 bp, Homo sapiens
ccgcgtcccgctcgctgggagagagatcctgaagtacatcctcagtcgtgagatcaaggagaagcggctccggagcctgtcca

SEQ ID NO: 590641 - DNA, 100 bp, Homo sapiens
gccacattttgcaccccgagtacctgcagcccctgccttccacgccggtcagccccatcgagtaactctcaggagccttctccgcagttggcttcctcgg

SEQ ID NO: 590642 - DNA, 82 bp, Homo sapiens
agctgaagagcgacaagccgctggcagccgcggatctcaccgccgctcagggatgatcggctgaatgtaacagaggaactaa

SEQ ID NO: 590643 - DNA, 75 bp, Homo sapiens
agatcaacggcaggagaggtttgttccctgacaactttgtaagaggattaatgaaaatcaagttccatcctcaga

SEQ ID NO: 590644 - DNA, 74 bp, Homo sapiens
cgcgacttcaacctcctgcaggtctcggagccctcggtggaacggccgccttctccattctccatggccccaca

SEQ ID NO: 590645 - DNA, 75 bp, Homo sapiens
cggggaagatggcggatgacaagaatgttgtaccatctttgggtaggcagacttccctgacgacatcagtgatac

SEQ ID NO: 590646 - DNA, 100 bp, Homo sapiens
agatcgaccgcaccatcggcaagggcaacttcgcggtggtcaagcgggccacgcacctcgtcaccaaggccaaggtattttggcctctccccagtctgct

SEQ ID NO: 590647 - DNA, 90 bp, Homo sapiens
cctagtccgagatgcttctagcaagatccagggcgagtacacgctgaccctcaggacaatctctatgggaagcagaaggcaaggaccccg

SEQ ID NO: 590648 - DNA, 83 bp, Homo sapiens
gtccctcgcccgaggagcgcggtggcggcgtgggagggagcctctgacggcgtctgaggttgacggatatattcagacgttac

SEQ ID NO: 590649 - DNA, 100 bp, Homo sapiens
agcaagtggatcttgacttatccaggccacttttcacttctgctgcactgctttcagcatgcaaggaccctaacctccaaaagaggtacccattggcgct

SEQ ID NO: 590650 - DNA, 74 bp, Homo sapiens
cgaaaccggtttgcaagtccttgtagagggggcaatggcggcttcctgtgttctactgcacactgggcagaaga

SEQ ID NO: 590651 - DNA, 74 bp, Homo sapiens
ggaattccggtcagggtcaagtcgtgttctgatcactactgacttgttgtttcgtgccttagcaccaatgtact

SEQ ID NO: 590652 - DNA, 75 bp, Homo sapiens
gcgttctacagcgatggcgagatcagtatctgcatggagcacatgtcctcctcccagtccatcaggaacactgac

SEQ ID NO: 590653 - DNA, 100 bp, Homo sapiens
cagggtggcgccgcgcgcggggaggccatcgaatcggatgacaccttgctgagcgagagcgagaagcggcccttcgtggaggaggcagagcgccttcgcg

SEQ ID NO: 590654 - DNA, 139 bp, Homo sapiens
gtcatggagatggaaaaggagttcgagcagatcgacaagtccgggagctgggcggccatttaccagtgtaaacaggaacatcgataagtagtgtaaaaacttgcacaatgaaatccgaagccaaggatggagaggagga

SEQ ID NO: 590655 - DNA, 100 bp, Homo sapiens
ccccgagtggatgaacatgtgcttggtgtcgtttttccttgagctgaacgtcttgcaacagtggccgcacgcatagtagacccaaatgatttgtacattg

SEQ ID NO: 590656 - DNA, 100 bp, Homo sapiens
taacgctggccgacaacagcctggcgtccgccacgttttccaagagataacttcaccaagatgtccagtgataggcaaaggtccgatgatgagagcccca

SEQ ID NO: 590657 - DNA, 98 bp, Homo sapiens
ctgaaccttgtgtcaaccatccattccaggagccagctatctgagattttatttggagagaagcaagcatctttgcctctttggagtaggaaattcag

SEQ ID NO: 590658 - DNA, 100 bp, Homo sapiens
gctacacagtctgctggcctcactgcacaccctgctgggggccctgtacgagggagcagagactgacacaacatttgcctgcaacaaggacagcggccag

SEQ ID NO: 590659 - DNA, 100 bp, Homo sapiens
ataaaactcgctgacttcggccttgcccgcatctatagtttccagatggctctaacctcagtgcgcaccatcctgggaagtgcatgtctcagaccaactc

SEQ ID NO: 590660 - DNA, 76 bp, Homo sapiens
cagattcgcagtggtcgcttcttctccttgattggagctgctgcccaaccccttggacttcatttcagtctagttg

SEQ ID NO: 590661 - DNA, 75 bp, Homo sapiens
ggagagtgtgcggctccaggtgggctcacgcgggatcgtgggactttaccagatcggtttgtaataacacctcga

SEQ ID NO: 590662 - DNA, 83 bp, Homo sapiens
gtgcctatgtgaaactgctttctaaaacaccagaactcaacctggttaagaatagacccaccagcatttcgtgggatggtctt

SEQ ID NO: 590663 - DNA, 82 bp, Homo sapiens
ctggccaacctgagcgaaggcgtctccctggcagagaggggcagttttggagccatggttttaaaatcaaagatgggaaaat

SEQ ID NO: 590664 - DNA, 73 bp, Homo sapiens
gacatcagaaccacattttgggtttgaagaatcttctacatgatggaggctcgctctgttgccaggctggagt

SEQ ID NO: 590665 - DNA, 83 bp, Homo sapiens
acgggatattctcttctgtgctgtcaaggagttttaagaggaaacctgggcaggctgacaatgaacgttccatgggtgatcac

SEQ ID NO: 590666 - DNA, 74 bp, Homo sapiens
ttggcccgccggaagggcaggcacatgggcataggaggacgaatccatgaaccaaccaggaccaatcaaaacca

SEQ ID NO: 590667 - DNA, 85 bp, Homo sapiens
cgaggctggggatgagcgcatgctggcggatgccccaccgcaggatccctcctgctgctcagatgtaaagacgaccgtggtttac

SEQ ID NO: 590668 - DNA, 80 bp, Homo sapiens
ggaaacctgggggctccctggacaactccgagcagatgaagatctccttcaacgacaaaagcctgcagaccacatttgag

SEQ ID NO: 590669 - DNA, 100 bp, Homo sapiens
agaagagaaccttgaagcaagtgggtgaggtggctttgaccccgggttgcccggccagcacgaccgaggaggtggctggacagctggaggatgaacggag

SEQ ID NO: 590670 - DNA, 82 bp, Homo sapiens
tcagttcctccccgggcccctgagccatgcccatcgcagccgccccgaaggagccagtaagactttgaccccgacgcaggct

SEQ ID NO: 590671 - DNA, 90 bp, Homo sapiens
cagcagtggtggctatgaacccagaggtcgtggaggtggccgtggaggcagaggtggcatggggtggtacagaagttggtcctgcccttt

SEQ ID NO: 590672 - DNA, 82 bp, Homo sapiens
gaaagacacacctaccaagaagccagtcaagcggccagctgtggcggggccttcgtgggcccgcgatgccaggaccccaacc

SEQ ID NO: 590673 - DNA, 75 bp, Homo sapiens
gtcgcgtctcggaaaccggtagcgcttgcagcatgcgggcagttgcaggagatgcctctgagtcagcactcttaa

SEQ ID NO: 590674 - DNA, 100 bp, Homo sapiens
gtcgccagaaggaagatggcggatctggaggagcagttgtctgatgaagagaagattcatgttacatgtaaagctgtcctcatttgtgactatggaccta

SEQ ID NO: 590675 - DNA, 75 bp, Homo sapiens
gccctgcctggagggagccctcctggctgggggcaagtgtgattctggagagtgacccccagcaagtgatccaga

SEQ ID NO: 590676 - DNA, 123 bp, Homo sapiens
gtgtccctgtacgcggagggctcggtcaacggcttcatcagcaccttgggtttagaagaagaatgtgaatcctctctttgcacatctgcgttaagagccaggaatctagagctgtcccaggac

SEQ ID NO: 590677 - DNA, 100 bp, Homo sapiens
cccggctgccgccgccgccgcctcggccgaccagggacctgcccgcctgcggctgctccggaaacctgaatagagtcaccttgtaataactgggaactct

SEQ ID NO: 590678 - DNA, 105 bp, Homo sapiens
aggagctgtgcagccgcgaggaggcgcgggaggtgttcgagaacgaccccgagacgggcagctggtggaatttttgaagaaaatggaatctcgaggccccctttc

SEQ ID NO: 590679 - DNA, 125 bp, Homo sapiens
tatggcaaagccaaagctcccatccaagacatctggtaccacgaggatcggattagagcactggtcaagcccagcattccagcagctctcaggagtaacacagacctgcaccaccaagtccctgg

SEQ ID NO: 590680 - DNA, 101 bp, Homo sapiens
gcctccttcccgcagcgccgtagagatcgctcccactcaggtcacaggcagtggagtgggagtgaagaagctgtgtgaactgcagcctgaggagaagtgct

SEQ ID NO: 590681 - DNA, 73 bp, Homo sapiens
catcacacaaaagcacacaaagacctcctcctccacaggggagacagaggaacttataatcaaaactgtatta

SEQ ID NO: 590682 - DNA, 100 bp, Homo sapiens
gtcaaatttgaaaactttgaggatgcagcactggaagaaaatggtttggctgtgataggagtatttttaaagaacctggatgacagtgtgttttcgaagc

SEQ ID NO: 590683 - DNA, 75 bp, Homo sapiens
caaacatctgaagatgacaatttattagatggtgacactgcagttggtagttaatttggcaccatggggatacag

SEQ ID NO: 590684 - DNA, 98 bp, Homo sapiens
tgagcacgtgaagaacagcacgtacacagccctaatcatagctacagacaatggagttcatgatcaagtgttgcccacaccaaatgcttcatccagag

SEQ ID NO: 590685 - DNA, 100 bp, Homo sapiens
tagccggaccctttgccttcgccactgctcagcgtctgcacatccctacaatggctaaaacagcaatgggaggagacatcacagctttcccagatcggga

SEQ ID NO: 590686 - DNA, 100 bp, Homo sapiens
ctcactcccccgggccggtgggcgaaggacacccgcaggaactcggcagaggagaaattcagacggctcccgaggaggtcatgacgccagtcagatcaca

SEQ ID NO: 590687 - DNA, 135 bp, Homo sapiens
cgagcggggacttcactgctctgctgtctcctgcaagaactggctcaagaaatttgcctcgaaaaccaaagcggttccgccaccccagccgcagatgtttggtgaagagctgcctgacgctcaggacggagagca

SEQ ID NO: 590688 - DNA, 90 bp, Homo sapiens
cttcatgcagtctctcattggcttctttgagactgaaatggcagatcctgagagtgagaagcctgactgaccccgcctagacgccaggcc

SEQ ID NO: 590689 - DNA, 100 bp, Homo sapiens
cctcttcgcgggcgattcgcgtagcctcagattctgaaagtcaagaagacatcatccggaatattgccaggcacctcgcccaggtcggggacagcatgga

SEQ ID NO: 590690 - DNA, 46 bp, Homo sapiens
gccgcggatctcaccgccgctcaggctaaaccaggtggacaggtga

SEQ ID NO: 590691 - DNA, 100 bp, Homo sapiens
ctctcactgctctccacgtggcatctttaataaaagaggcaggtaaaaatcaaggtgaccccaagaaaatggctcctcctccaaaggaggtagaagaaga

SEQ ID NO: 590692 - DNA, 80 bp, Homo sapiens
taaggattccaagtaactcttatttgatcgccaaactttggcatcagagcaaggtccacacttatcactgaaaattttcc

SEQ ID NO: 590693 - DNA, 100 bp, Homo sapiens
aatcatcctcagtacccagcagtatatgagttgatccctgaattttattatctccctgagatgtttgtcaacttcaataattataatcttggagtgatgg

SEQ ID NO: 590694 - DNA, 100 bp, Homo sapiens
cagctgcctgcccccggaggtgcccacgcagctgcctggacaatttaactggtacacccgccgagccatgctggctgccatctacaacacaacagagctg

SEQ ID NO: 590695 - DNA, 74 bp, Homo sapiens
tacaagcgtgagccactgcgtggcctgagtggaaccacctgggctgtttgaaaaaacctaggcctagccaggca

SEQ ID NO: 590696 - DNA, 75 bp, Homo sapiens
gcaacatcaatctcatcgtgcagaaaagtgacttgctgtctcctgactcagtcctgagttgcttgtatcctgggg

SEQ ID NO: 590697 - DNA, 75 bp, Homo sapiens
ggctctccgccgtccccagccctgcctctccctgggctctgctccgccgcatgcaagagatgattgcaaggatgc

SEQ ID NO: 590698 - DNA, 100 bp, Homo sapiens
agatccagtctatgatgagagtactgatgaggaaagtgaaaaccaaactgatctctctgggttggcttcagtgcctacaatagttcctggtatgtagaag

SEQ ID NO: 590699 - DNA, 88 bp, Homo sapiens
gattagcaaaggtgctaatccagtggaaatcaggagaggtgggatgcagatcttcgtgaagaccctgactggtaagaccatcactctc

SEQ ID NO: 590700 - DNA, 137 bp, Homo sapiens
catggcgctgaggcggccaccgcgactccggctctgcgctcggctgcctgacttcttcctgctgctgcttttcagggatctttaatctcatgaagtacgacagctacagccgcttcttaaagtctgacttgttttta

SEQ ID NO: 590701 - DNA, 90 bp, Homo sapiens
cgtgtgtcagaacaatcttgaatcatgaagctactaaccagagccggctctttctcgttaagtgggcagaccaacatccacctcagcaaa

SEQ ID NO: 590702 - DNA, 91 bp, Homo sapiens
gccagccgcaccatgccgctcctaagcctgcacagccgcggcggcagcagcagtgagagaccgttggtcccaggaagacatgctgactttg

SEQ ID NO: 590703 - DNA, 98 bp, Homo sapiens
cttctctctttcgctctttggactaatgggagttgcttttggaatgaatttggaatcttcccttgaagagatggcccactgcgtgaccttggttcagc

SEQ ID NO: 590704 - DNA, 74 bp, Homo sapiens
tctttccgccctaatggaggtctccagtttcggatgataatgaagataattcaaatgatgggacccagccatcc

SEQ ID NO: 590705 - DNA, 90 bp, Homo sapiens
gaatatgccaaggaaaaactggagagcttcatcaaaaatagtgatagctttgataaattctgaaggaagatttccattaggtaatttgtt

SEQ ID NO: 590706 - DNA, 83 bp, Homo sapiens
acccatcctgccgtccttctccactttcgccagcccgtgccgcgagcgcggcctgcaggagggacctcaggatggaaaccagc

SEQ ID NO: 590707 - DNA, 75 bp, Homo sapiens
acgctaggaatatggcaaaccactggatgtgtgtgagaagtggggagaaatgccaccactacaacccaaacatat

SEQ ID NO: 590708 - DNA, 82 bp, Homo sapiens
caaaaccaacgcctggctcggagcagcagcctctgaggattttttatcaagcagaaatgcatcgaacaacgagaatcaagat

SEQ ID NO: 590709 - DNA, 73 bp, Homo sapiens
aagtgaaagagatggcctggtggaaagcctggccccccaggttcgcctaatagtcttggctacttccctacag

SEQ ID NO: 590710 - DNA, 100 bp, Homo sapiens
gagactcctgctcagtgtagcattaagaactggtcatgctgctggagtggtggtcctgcacggagtgtacactgttcacggaccaggccacggtagagcg

SEQ ID NO: 590711 - DNA, 89 bp, Homo sapiens
tttacccagaagtagtccatatgaatgtgaaaacctttgcatcttctgatagtctagccaaggtccaagaagtagcaagctggcttttg

SEQ ID NO: 590712 - DNA, 98 bp, Homo sapiens
cgagttcaagagattcttctgcctcagtctcccgagtagctgggactttagggaactgctcgcagaaagaagaaggtggttcatagaacagccacagc

SEQ ID NO: 590713 - DNA, 83 bp, Homo sapiens
ggtcggactcccgcggcgggaggagcctgttcccctgaggagctgacatggacccaaatcctcgggccgccctggagcgccag

SEQ ID NO: 590714 - DNA, 75 bp, Homo sapiens
cttgaggcctccccagccctgcagaacacaagtcaagccagagatctgttatcaaaaatgttagtgattgatcct

SEQ ID NO: 590715 - DNA, 50 bp, Homo sapiens
gcggaggccccgggcgcggcgcagcagatgacaacactctaggcatcctg

SEQ ID NO: 590716 - DNA, 51 bp, Homo sapiens
gccccccaatgtcgaggagtggtatcctagaaggaaaacatcaccatggct

SEQ ID NO: 590717 - DNA, 75 bp, Homo sapiens
cggaagcccagacaccaggaaggtgagatcttcgacacagaaaaagagaagtggtccaaaggcaaagttcgggac

SEQ ID NO: 590718 - DNA, 101 bp, Homo sapiens
ggaggttgcgcctcggtggcgccgcgctgctcctgctgctcatcccggtggccgccgcgcaggagcctcccggagctggtactaggttttgacaagcttgc

SEQ ID NO: 590719 - DNA, 83 bp, Homo sapiens
gtgtggggctgggtctcggagtgggagacgtggagtgcaggccatcgaagacggcaatttggaggaaatggaagaggaagtac

SEQ ID NO: 590720 - DNA, 82 bp, Homo sapiens
ctgctgggggccttcccgccggccgccgccgcccgagaatgagtctgcaggtcttaaacgacaaaaatgtcagcaatgaaaa

SEQ ID NO: 590721 - DNA, 95 bp, Homo sapiens
ctcgatcagggcatacatctttcttcgacaaaggatttggagcaagaggtggtggtggccttcccccgaagaaatttggtaatcctggggagcgt

SEQ ID NO: 590722 - DNA, 86 bp, Homo sapiens
aaccaacgcctggctcggagcagcagcctctgaggcccagtggttctcagcacccctgcccagctcatcgctcccgtggtggtggc

SEQ ID NO: 590723 - DNA, 100 bp, Homo sapiens
cgccgccgcgccaccctgttcttccgtgtctccctctgcctggcggcagtcacggccaagtcctcccagagctgcagttcgggccgccagaacatccgcc

SEQ ID NO: 590724 - DNA, 100 bp, Homo sapiens
agtcagtcaagtggatggcatgaagtggagccaggtcttgtagatgatactctccaagctgtaaggaagaagtcaaggattaaggagacctggactggag

SEQ ID NO: 590725 - DNA, 75 bp, Homo sapiens
acaagacccatctttatgcaaagccagcgttacagtaatgttccagaaaactgtcgctgaaaagcaggagaagag

SEQ ID NO: 590726 - DNA, 95 bp, Homo sapiens
gcttatatcccaccattgccacgggcattctccatctccttgcagatattccaatggagacagttggaaaacctgtacttcagagaaaagaagtt

SEQ ID NO: 590727 - DNA, 75 bp, Homo sapiens
tgtcaaccatccattccaggagccagctatctgagaaatgggacgtcggtcatcagatactgaagaagaaagcag

SEQ ID NO: 590728 - DNA, 100 bp, Homo sapiens
tgaccagaaaaccgacaaccttcccagaaagtccaagctcgtggttatacattggctcttcaaagacgttcacctcatcagagaaatccctgactccttt

SEQ ID NO: 590729 - DNA, 98 bp, Homo sapiens
accagaaactattgctgtaatgagctggatgaagtcctatccatttgtactttcagcaaacctgcatggagcatttaaatcaaacggtattgagatgg

SEQ ID NO: 590730 - DNA, 74 bp, Homo sapiens
tctacgtgtcccccgaggatctggaggcacagctgcagtctgacgagagggagagcgcctgctcgctgtgcccc

SEQ ID NO: 590731 - DNA, 100 bp, Homo sapiens
ggacaagcagcatgccgtcatcaactacgaccaggacagggacgagcactgggtgaaggacctgggcagcctcaatgggtgagtgagatcattggccgag

SEQ ID NO: 590732 - DNA, 83 bp, Homo sapiens
aaaccagagccagtcgggccaagagaagaggcggtggaggacacgacgcgcttaaagggtttggcaaacatcgaaaagatgac

SEQ ID NO: 590733 - DNA, 100 bp, Homo sapiens
atgatttctctaaattacagttgaaggaaagtatgattcctattactaggtcacttcagaaaaaatggatattccagctaaattgattgtttgtggaatg

SEQ ID NO: 590734 - DNA, 80 bp, Homo sapiens
gagtgctctgttcacggctccatcgctgttaatgctctctgtgtgggtatgtgtgtagccatcctccttctttgaagtct

SEQ ID NO: 590735 - DNA, 75 bp, Homo sapiens
caatcttgaatcatgaagctactaaccagagccggctctttctcgaaacaagtcaccaagctctccagaacatgc

SEQ ID NO: 590736 - DNA, 82 bp, Homo sapiens
acagtgtttgcctctggttcagctcatacaacagcttcttagttccagtgtctcgccccatcctcaccctcagggttcccag

SEQ ID NO: 590737 - DNA, 100 bp, Homo sapiens
gggcttgtccttgctggtgcatgcgtcgtcggcctctgggcagcaggtggattctcaatatcctcctgttcagagacttatgaccccaaagccagtttcc

SEQ ID NO: 590738 - DNA, 75 bp, Homo sapiens
agcaatatctctgggctttcacaggtctctgacattgacagagcctggacgttggaggaagccccaggacgttgg

SEQ ID NO: 590739 - DNA, 100 bp, Homo sapiens
gcagtgggggttgctgacccagaggagagttctccaaacatgatcgtttactgcaaagtcatcatcagatttgaaatatttaaagtggatacaaaactat

SEQ ID NO: 590740 - DNA, 90 bp, Homo sapiens
gaaaaccgtgtatgagggattcatctcggctcagggtttcatcaccttaaatggttttgaaccaatgaaggtgtattcccttaaaaagac

SEQ ID NO: 590741 - DNA, 100 bp, Homo sapiens
ggaaaagcttttagcgtctcagaaattgagagagtcagagacttctgtgacaacaggctataccccagctttggcctgtgctcccaataaggatgtggct

SEQ ID NO: 590742 - DNA, 90 bp, Homo sapiens
gatcatcataggcttatgtcttgctgcagtatatcctttcgggctctgatgacttcaacctgtacatgtggagaattcctgcagatccag

SEQ ID NO: 590743 - DNA, 99 bp, Homo sapiens
ctcaggaacagggacagcacctcatcccctggatgggggaccacaagatcctcatcgacagcaccagcagacgtttttgaatcaactgagagaaattac

SEQ ID NO: 590744 - DNA, 100 bp, Homo sapiens
ctcgtgtggcaggaagaactcagagccgggaagcccccattcactagaagcactgagagatgcggccccctcgcagggatcatccagcagctcgtcaacg

SEQ ID NO: 590745 - DNA, 74 bp, Homo sapiens
cagattcgcagtggtcgcttcttctccttgggatgtttttgaactaaatttcatgaacgtcaaattttccagtg

SEQ ID NO: 590746 - DNA, 100 bp, Homo sapiens
actcttccaggaccaccaaaaataactttggctggagaagaagaagttggatgggataccgagattaaggatgatgtgattgaagaatgtaataaacatg

SEQ ID NO: 590747 - DNA, 124 bp, Homo sapiens
tgaacgcgctgcacctctacctgtggctctttctgctgggcctgcccttcaccctctacatgacaatgcagatcttcgtgaagactctgactggtaagaccatcaccctcgaggttgagcccag

SEQ ID NO: 590748 - DNA, 83 bp, Homo sapiens
ctgcggacggtggcgggcgagcggctcctctgccagaggccgccatggcatcagatgaaggcaaactttttgttggagggctg

SEQ ID NO: 590749 - DNA, 100 bp, Homo sapiens
ccgggatcggttgccttgagcctggacccagatgatgtggtaccagttggccaaagaagagcctggtgttggtgcatgtgctttggactagcatttatgc

SEQ ID NO: 590750 - DNA, 75 bp, Homo sapiens
gtgaagctggggcggcaccggatcaccaagacggagatctctggaaacatggctacagaacatgttaatggaaat

SEQ ID NO: 590751 - DNA, 100 bp, Homo sapiens
tggcatcttcttcatactatcggtcgactggcacaggctgaggaaagacaacagctcgagtcactttataagaacctcaggataccgttattaggagatg

SEQ ID NO: 590752 - DNA, 101 bp, Homo sapiens
attagtaatccttacagcagaaaggtccgattcccatcccacttcagttcagatctcaaggaccttctacggaacctgctgcaggtggatttgaccaagag

SEQ ID NO: 590753 - DNA, 100 bp, Homo sapiens
ggacgcagagactgcagctgccatcgaagaggaggccgccatggcatcagatgaaggcaaactttttgttggagggctgagttttgacaccaatgagcag

SEQ ID NO: 590754 - DNA, 83 bp, Homo sapiens
caaccatcgcagttggaagcccatggggcaggttgtgaccgagattcccgacgagagagactgaggggaagagaggaaggagg

SEQ ID NO: 590755 - DNA, 83 bp, Homo sapiens
cacaaatggatgtgaagctccgctcactgatctgcgtggggctcaaatctgggcggaccccggcaaatacgccctgatgggag

SEQ ID NO: 590756 - DNA, 50 bp, Homo sapiens
cggttacagccatgaaaatgtgtcatggagtgaaggtacctgagcgcagg

SEQ ID NO: 590757 - DNA, 99 bp, Homo sapiens
gaaaaggaagcaacaacataatgcccagagttggagccaattaaaccagttccagaaagctgagtctgatctggattacattcaatacaggctggaata

SEQ ID NO: 590758 - DNA, 50 bp, Homo sapiens
ggaggaaatgttagccaggcactggaaaatcctgccttgcttcgttgggc

SEQ ID NO: 590759 - DNA, 101 bp, Homo sapiens
ctcctcgggcgcccgcggcgatgttcaaccgcgccgtgagccggctgagcaggaagcggccgccgtcaggatttctctctgatcaaacggacagttcagga

SEQ ID NO: 590760 - DNA, 100 bp, Homo sapiens
cggtggagcgggacacgaacgtgtgtactaatggtcacttgatgtgcgctggctgttttatccacctactagcagatgcccggctgaaggaggagcaggc

SEQ ID NO: 590761 - DNA, 82 bp, Homo sapiens
gtcctgaaggagttccaccaggccgggaagcccatcgggctcgagtacttgcaccagaagcagagcaaagtctccagtgagc

SEQ ID NO: 590762 - DNA, 75 bp, Homo sapiens
tggaatcctgagtgaggacaagctgactgactatttaagaaacaactgaggcatcagaccaactttccccacaag

SEQ ID NO: 590763 - DNA, 83 bp, Homo sapiens
cctcacgactaccagccgcttcctggcatgtcagagaacccctccgtctatgtgcctgatgccatcagcgctgcgaatccccg

SEQ ID NO: 590764 - DNA, 50 bp, Homo sapiens
aatattcgagtggcaactgcacttcttccagaccagctggtcttgcttct

SEQ ID NO: 590765 - DNA, 82 bp, Homo sapiens
atccagagcgccgcgcacttcgtcatgttcttcgcgccctgcacaggaagtcctggagaacctgaaggaccgctggtaccag

SEQ ID NO: 590766 - DNA, 50 bp, Homo sapiens
tcctgagtggctgggactacagattcctataggcaatggaaactgatctc

SEQ ID NO: 590767 - DNA, 82 bp, Homo sapiens
gagcgcgagcggcgcgagaaacccccgcctctcctggactcttttcaagaccagtctccatctccagcctccttcaagcttg

SEQ ID NO: 590768 - DNA, 96 bp, Homo sapiens
cttacacaccatccagactgaagaccgagtctggtccattgctatcagcccattactcagccccactgtgttctccttgcctcaaaagaaaactcg

SEQ ID NO: 590769 - DNA, 75 bp, Homo sapiens
cgaggagtacgagacgaggttcctgtgcaactcttcacagctaaagatgtgattaaagagattgaagactttgac

SEQ ID NO: 590770 - DNA, 75 bp, Homo sapiens
ctccgggcccggcgccgccgcccgcagatatggaatgtgcagatgtcccactattaactccaagcagcaaagaaa

SEQ ID NO: 590771 - DNA, 100 bp, Homo sapiens
agtagggcatccttcacccatctgaagggaggaaatagtggcaggtgacagtctgcatgtgcagttttcagtgacgagtagcacagcccctctatggttt

SEQ ID NO: 590772 - DNA, 90 bp, Homo sapiens
acccaataggataactcaagttactggagggccctcctggacccgggagcggaccctggtggcggtgaagcccgatggcgtgcaacggcg

SEQ ID NO: 590773 - DNA, 75 bp, Homo sapiens
acccctcgggcacataccatgcctggaaggagctgtccaagatcacgatgccaatcgccttcaacgagcctctga

SEQ ID NO: 590774 - DNA, 82 bp, Homo sapiens
ttggcagcaattgctttatcaccaacagtgtcattggccccggctgccacattgctgcagcctggcagtccagctctccaag

SEQ ID NO: 590775 - DNA, 100 bp, Homo sapiens
cagaaacgcagccattgccaatcactgcttcacctgcgccatcaatcgagtgggcaccctctcaaaggtctatggccctgtgttcactctgtattttggc

SEQ ID NO: 590776 - DNA, 75 bp, Homo sapiens
agctgagcgctgccgccgccgcagcagtgttcagactgcatcacagtgcttccgatacaagcgacaaaaatcgag

SEQ ID NO: 590777 - DNA, 75 bp, Homo sapiens
attcagtatcatggatgaatttcaggttatcaatactctggctgaccatcatcatcgtgggactgactttggtgg

SEQ ID NO: 590778 - DNA, 82 bp, Homo sapiens
ctatgtagctggtgcgctgctcacggccattcactgcccatgctgagcgcctctcacacagacatatggcatccaggagaaa

SEQ ID NO: 590779 - DNA, 99 bp, Homo sapiens
gaagaaagctggtaatagatgtctgacaaactaaagaaagacttgtgttaccttgccgaactaaagcaagaatgtcttgctcgtggtttggagaccaag

SEQ ID NO: 590780 - DNA, 98 bp, Homo sapiens
gccctggctccgctgcacgagctccacgcccgtaccccggcgtcacgctcagcccgccgccgccatgcccttctccaacagccacaacgcactgaagc

SEQ ID NO: 590781 - DNA, 100 bp, Homo sapiens
tcccctcttcagtgcaggaatatgttagcgttgtatcttgggagaaagacacagtctccatcatcccagatgaagaactgccagcatgcgaatgctgaac

SEQ ID NO: 590782 - DNA, 74 bp, Homo sapiens
cactgttcccgctgtttgtgccagcatctgctgtcaggtggctcagctgaaccttcacctagccccaggattac

SEQ ID NO: 590783 - DNA, 75 bp, Homo sapiens
gtggcctttcgtatctccatgaaaaccaaatcattcacagagatgtcaaaggtcctgtccctgctatcagtgggg

SEQ ID NO: 590784 - DNA, 74 bp, Homo sapiens
gagctctgggctgcggcgcacgccttgcccgcccagaaacgcttcgttaagggactcaggcagtacgggaagaa

SEQ ID NO: 590785 - DNA, 83 bp, Homo sapiens
acggagctgggcgacgagctgaccctgggagacatcgacggtggtagctgagcacccagatgcttcaggtgaggagattgaag

SEQ ID NO: 590786 - DNA, 100 bp, Homo sapiens
gtggccttcattcagcatttcactcagctgcaggatgtcttagggcgccagcgagctgctattgaggggcagacggctcagatgaaggattaccaacgtg

SEQ ID NO: 590787 - DNA, 83 bp, Homo sapiens
ctttaagatcctcaactgccaaaaggcaatgggaccaagaatcgccttcagccctgtctggtgcatccttggcagaaagtgag

SEQ ID NO: 590788 - DNA, 88 bp, Homo sapiens
acgccatgtcgggttattcgagtgaccgagaccgcggccgggaccgagggctggcgcccatgcggctctacacgctctccaagcgcca

SEQ ID NO: 590789 - DNA, 90 bp, Homo sapiens
attaaaaaggaatgcccacagtttaaaggctcttcagcatggtgacatggaccagaaggagagagatgttatcatgagggaattccggtc

SEQ ID NO: 590790 - DNA, 98 bp, Homo sapiens
gggggttgatacagcagagacgtcatacttggaaatggctgcaggttcagatgggagattttgataagatctggcgagaacactgtgaggatgaagaa

SEQ ID NO: 590791 - DNA, 83 bp, Homo sapiens
gagggttcccgggattggaccgacgcagccatggtttaaggggctcaagccgactgttatccttctctcccgaggaatttccg

SEQ ID NO: 590792 - DNA, 100 bp, Homo sapiens
gccagccgtcccgagctaccagcagcaggttcaggagaagtggcacctggtggaggacctgtcgcgactgctgccggagccaggcccgagcgactctccg

SEQ ID NO: 590793 - DNA, 100 bp, Homo sapiens
ctcctccgagagcaaccgtgaccgcagggagcgcctccggcagctggccctggagaccatcgacatcaacaaggacctgaaggagaagaaggagaaggtg

SEQ ID NO: 590794 - DNA, 100 bp, Homo sapiens
cagatttgcagatggctctgctgtagtacagggttcattccatgatctgctccgtagagaaccaatgctgcgcatgcaggagggagaggggcattctcaa

SEQ ID NO: 590795 - DNA, 100 bp, Homo sapiens
tcagtggaaaggagagctaccatcactaagcggagggtgcaggacgtcatcagcccgatcgtgtttgaagcagcctacagcctcagtgagcatgtgactg

SEQ ID NO: 590796 - DNA, 110 bp, Homo sapiens
tgtgcagccgcgaggaggcgcgggaggtgttcgagaacgaccccgagacgttacagaatgtctgaaggggacagtgtgggagaatccgtccatgggaaaccttcggtggt

SEQ ID NO: 590797 - DNA, 100 bp, Homo sapiens
ttcacatcaggtgatggataggagcaaccctgtaaaaccagccttagactatttttcaaacactggattgccttttgcaattcttacttcaaggcatacc

SEQ ID NO: 590798 - DNA, 100 bp, Homo sapiens
tcattacctagcatttcagttttttgcagaagaatattatcccttctcagagaatcacgccattttttaacatctctttttgatcaaacaagaaaaggca

SEQ ID NO: 590799 - DNA, 100 bp, Homo sapiens
ggtgggcgccgtccgtacgctgcgcactggacccgctctgctctcggcacaacattctgaaattttttggttattgtaatgatgttgatcgggagttgag

SEQ ID NO: 590800 - DNA, 100 bp, Homo sapiens
caggaaacgctccagtccgagcactttcagctctgcaaggaatttgctcgccctgatacatcgaatgatagagtttgttgtacgtgaagggccaatgttt

SEQ ID NO: 590801 - DNA, 100 bp, Homo sapiens
attaagtgtggctgatcttattgaatccatgttgaaaaatctatccaggattcatcccgtgtcaacaatggtaaaggggtatactctagttgaatatgaa

SEQ ID NO: 590802 - DNA, 74 bp, Homo sapiens
ggggggaagctctgagctcactttgtgcactgagggtaatctacagttgctgcagaactgcctggcagtgttaa

SEQ ID NO: 590803 - DNA, 80 bp, Homo sapiens
aacggtcggcagaagaacgggaccaccgccctcattcatgctgcagagaagggtggcatggagaaatcgttgtcaaaaca

SEQ ID NO: 590804 - DNA, 97 bp, Homo sapiens
cccgcaatggctgagcaccgaagcatggacgggagaatggaagcagccacacgggggggctctcacctccaggaagctattttgccagccacttcat

SEQ ID NO: 590805 - DNA, 114 bp, Homo sapiens
cggagacggcggaagcggagagcaacagcgcgccgatgatgtgatgccagccacttactgtgaaattgatttagataaagaaaagagagatgcatttgtatatgccataaaaaa

SEQ ID NO: 590806 - DNA, 78 bp, Homo sapiens
ccatccccactttgtgattccctaccgctgcttagctccagtccccaaaaggcaaaaatgtgaccactggactccctg

SEQ ID NO: 590807 - DNA, 80 bp, Homo sapiens
ctaaagtttgctcgaagccttcagtccgttgcagaggatgtcctggaacaggtggaggcctatcaagctgaggctcgtga

SEQ ID NO: 590808 - DNA, 90 bp, Homo sapiens
caggaaaataattaaatattcttaccgaggcaatctttggcagccagacactacctaactccaatttatggacaatgaataatggtgcag

SEQ ID NO: 590809 - DNA, 100 bp, Homo sapiens
cagaagtgtccaaaccacaagttctcaaaactctctgaaaaatggctccctccgagttaagacaggccgacggtcgcaaggtcctacggtcaagcatccg

SEQ ID NO: 590810 - DNA, 82 bp, Homo sapiens
tacaagtagaaactgccaagaaatccaaaaagccgagtagagaagttatcaggtgagaagccctaccactgcaactgggacg

SEQ ID NO: 590811 - DNA, 90 bp, Homo sapiens
tggggatcagcaggatgatggcccagcaggtccagcagagcgaggaggccatgcagtctctagacgttggaacttgccaggaatccagca

SEQ ID NO: 590812 - DNA, 75 bp, Homo sapiens
ccgggtagtcgggaggaggagagcttcacctgtcggcttggagagatccagatgtgaagttcatttccaatccgc

SEQ ID NO: 590813 - DNA, 83 bp, Homo sapiens
ctgcacttgaggcccagaatgcactgcacaatattaaaactttacctgggaatgtgaaagatgttgcagaagtgttccagaag

SEQ ID NO: 590814 - DNA, 75 bp, Homo sapiens
agctgtttctcatctttatactcttccagctcacaggcgcctgaagtacatatccctagctgtgctggtggtcca

SEQ ID NO: 590815 - DNA, 89 bp, Homo sapiens
gatccgatggcagcaccacttcgaccagcttcatcctcagacagaaatcaatgtggactgaacataaatcacctgatggaaggacttac

SEQ ID NO: 590816 - DNA, 100 bp, Homo sapiens
cgtggagcgctgcgcggcgcggcggccgggccctcgagacggggacggcccagacatgtccgtccttgtaagttaaaagcttccatgggagccttccttc

SEQ ID NO: 590817 - DNA, 89 bp, Homo sapiens
cccagcccccgcccgcagcctggacgacatcgacctgtccgccctgcggcaaaagctggcaggctgacagaggcggcctcaggacggac

SEQ ID NO: 590818 - DNA, 88 bp, Homo sapiens
gccaaggaggaagggttgtccgggtggtgatggcacttctcaaatactggccaaagactcacagtccaaaagaagtaatgttcttaaa

SEQ ID NO: 590819 - DNA, 100 bp, Homo sapiens
gtcggtgtttggagaaaaggactcaggagtctactcttcatcttgtgttgagacttcgtggtggtgctaagaaaaggaagaagaagtcttacaccactcc

SEQ ID NO: 590820 - DNA, 82 bp, Homo sapiens
atgaagtgtgagcactgcacgcgcaaggtcaacaacggttccagcctcagggatgagtgcatcacaaacctactggtgtttg

SEQ ID NO: 590821 - DNA, 90 bp, Homo sapiens
aaggtatcgagcaggacctggtgataggttatgaagacagtatggagtttccagaccatagtagacatttgctacagtgtctgagcgagc

SEQ ID NO: 590822 - DNA, 80 bp, Homo sapiens
ttcgtggggcgtgaggagtgtgagctcatgctacagactgtgccctgtccacggtgcctcctgcatgtcctgctgccctg

SEQ ID NO: 590823 - DNA, 88 bp, Homo sapiens
tgactctctgaggctcattttgcagttgttgaaattgtccccgcagttttcaatcatgttgagtggtgattttatgcaatggcttcaa

SEQ ID NO: 590824 - DNA, 82 bp, Homo sapiens
tgaatccggaagaaaagttcaatctggaaacatcaatgctgccaagagctctcaaagtctgtggaaccgcctgtctgtgttg

SEQ ID NO: 590825 - DNA, 50 bp, Homo sapiens
cgcaaacttgacactcaccctgaccggtcaaaatgcagatcttcgtgaaa

SEQ ID NO: 590826 - DNA, 75 bp, Homo sapiens
cagcaagcggggcgctgtgtccccaagctccccgtcctcgggtcgcccctcagtctccactagagacaggactga

SEQ ID NO: 590827 - DNA, 82 bp, Homo sapiens
gagcaggcgctgggtatcatgcagaccctgggcgtggaccggcagaggacggtggaggactctgtctacatcttccgggaag

SEQ ID NO: 590828 - DNA, 83 bp, Homo sapiens
gaggaggctgaagtctcacatcagaggtgtcaaggcttcccagcagcggcttatggaccagtggcagcagcggcggtggcggc

SEQ ID NO: 590829 - DNA, 74 bp, Homo sapiens
tgatgggaacttgtgtgttaaagtaacagatgatttagttcactgctcagcacgcaggcatgtgaggaagctgg

SEQ ID NO: 590830 - DNA, 51 bp, Homo sapiens
cctcttctctaaaaatgatggtgatttttgcagctcaagtggcagtcctcc

SEQ ID NO: 590831 - DNA, 75 bp, Homo sapiens
tcagggacaagatggtgccaccggtgcaggtctctccgctcatcaagtcatgatgggctctctcctggctgccac

SEQ ID NO: 590832 - DNA, 89 bp, Homo sapiens
cccggatgctgcggcgcccgctggccgggctggctgcggccgccctgggccgggccccaccggacgagctgccatcagtcatgctctta

SEQ ID NO: 590833 - DNA, 100 bp, Homo sapiens
gccaagctcatggcctgccactgcgtgccataattgatatactgtggttactctacctatttgtgtaggcctctcaggtcattgaaacaagatgttgtac

SEQ ID NO: 590834 - DNA, 101 bp, Homo sapiens
cttttttcatttccatttctaccttgtatgcctcaatttgctggatttaagcactgctgcactttatgaggtactaggttttgacaagcttgcatcatgcg

SEQ ID NO: 590835 - DNA, 73 bp, Homo sapiens
gaggctttgtgatatcagatgacaagatactagaagctgtaacattaggtgaatggctatgtggtgaaccttt

SEQ ID NO: 590836 - DNA, 100 bp, Homo sapiens
gagaagcaggacctcgggccatgggtgagcgtccctatcaatgtccttactgtgaaaaaggattcagtaaaaatgatggactgaagatgcacattcgtac

SEQ ID NO: 590837 - DNA, 75 bp, Homo sapiens
tttgggatccggccagatgattacttgctcagagctctgctgcagggcctgcgtgagcttttaccactgggcgat

SEQ ID NO: 590838 - DNA, 74 bp, Homo sapiens
acctccaaatcttgctgcttttaattcaactcagagtggtgcctgggtcccggcaggaagaagtgatcgaccac

SEQ ID NO: 590839 - DNA, 90 bp, Homo sapiens
aagaaccggaagctctttgaccttctggatgtccttgagttcaaccagtggccgatcctacctgctccgattgcgaggagttgagctgcc

SEQ ID NO: 590840 - DNA, 100 bp, Homo sapiens
ggagaggatatgtagcgaggaggaacgcgctaaggcaaagcacctggacttccgccttatctagtagccctacgtatccggacctgcccttcattaggat

SEQ ID NO: 590841 - DNA, 100 bp, Homo sapiens
catccatggctggtcctacgggggcttcctctcgctcatggggctaatccacaagccccaggtgttcaagattggtgctgaagacatggacggcttccag

SEQ ID NO: 590842 - DNA, 97 bp, Homo sapiens
tggactcatagtcactgccagaaagaatgcaatgagagccactatggaacaccatgccaacagaggtgtttacccccctattcaagttcatgtcacg

SEQ ID NO: 590843 - DNA, 100 bp, Homo sapiens
ctcagagcgcagccccggcgccggcggcgggaccgcggaccggctgaacgagcgcgaccgcctgatcaagaggctgggccggaagacgcccccgacgctg

SEQ ID NO: 590844 - DNA, 100 bp, Homo sapiens
gacaactgttattcagactcgtttctacactggagaactcgtcaaagccatagttgttagaacagtggaatccttcgaggaggtggaggacagcctgtgt

SEQ ID NO: 590845 - DNA, 80 bp, Homo sapiens
ccatcctcatgcaggtggtcccgctggaggtaaggggcctggataccaagaagtgactgctcatctaatccataaagcta

SEQ ID NO: 590846 - DNA, 100 bp, Homo sapiens
gcagtatcatgctggccaagaagatcatcattaaggacggaggcacgattacaggagcttattaatcataagaaggctgaggacacagagaagaaagatg

SEQ ID NO: 590847 - DNA, 74 bp, Homo sapiens
ctgcatgcttttcaaacttctgagaggttctaatacccgatttacaattacattgaactacaaggatcccctca

SEQ ID NO: 590848 - DNA, 75 bp, Homo sapiens
ggaagatgcagagacgccacagcagcaacacggataacattccacctgaaagttgacatcacttgttagaagagc

SEQ ID NO: 590849 - DNA, 100 bp, Homo sapiens
ttcctgtacagcctgcagaactggcgaactttctgaccaagtatacaactacccagagggcctaggagaagtgctgtatagagagcagttcgacttcaac

SEQ ID NO: 590850 - DNA, 100 bp, Homo sapiens
catgaattacgacaagctcagccgggccttgcggtactactatgacaaggcccaccgtttccatggtcgaaggtcagggcgagaagaacgtgaccttctg

SEQ ID NO: 590851 - DNA, 83 bp, Homo sapiens
ggtggaggttcgagcgctgttctcgctccggagccgctgcacatttcggagctctttgttcaatgcctagccacctattccta

SEQ ID NO: 590852 - DNA, 50 bp, Homo sapiens
agtgcctgcaggatgtgagggagttcctctgtgacgagggtgcaggtatc

SEQ ID NO: 590853 - DNA, 75 bp, Homo sapiens
acggaagcccaagtggcacaaatgcagaaactccctctggtgatgatttcagggtagctctccagctggaagcct

SEQ ID NO: 590854 - DNA, 75 bp, Homo sapiens
ccttggtgtcatccagccttagcaaaccagaggatacattaattgtttggtcagaagcagagaactatgatttgg

SEQ ID NO: 590855 - DNA, 74 bp, Homo sapiens
cctggaactcccccagcctacaacctaggaggctggacctgtcgggacgactgtaagtatgagtgtatgtgggt

SEQ ID NO: 590856 - DNA, 75 bp, Homo sapiens
ttgccctgtctcctcgcagatgagttgctgatagtccaactccaccgccaccacctccaccagatgacattccca

SEQ ID NO: 590857 - DNA, 96 bp, Homo sapiens
ttaatcctcaatttaagcctgatctaacccctagaaacaggagcttgaacgggaaatcacgtttcagggtgacagtgccatttattactcctatta

SEQ ID NO: 590858 - DNA, 122 bp, Homo sapiens
tgatgatcgttgtgttgtacagccagaaaccggggaccttaacaatccacctaagaaattcagagttcaaatctgaacatcaatgatgtactagggaactactcattgactcttgttgatgc

SEQ ID NO: 590859 - DNA, 50 bp, Homo sapiens
ggagcggccgcgtttcggcctcagaagctttgtccacccagacccactct

SEQ ID NO: 590860 - DNA, 74 bp, Homo sapiens
atcaggaaaagcaggaagaagcctctgggacccttcgggaggttgacatcatggacatatgtgagtccatcctg

SEQ ID NO: 590861 - DNA, 120 bp, Homo sapiens
aaggcaggaaatattttgctaaatacagaaggacatgcaaaacttgcagattttggggtagcaggtcaacttacagttcaaaccttgtactactcagctgatcacaagctgcttgatggg

SEQ ID NO: 590862 - DNA, 82 bp, Homo sapiens
ccacggtagcgcagccgctctgaggtgacttaagagattaaaattaatttggttgctgttggttctgaacaaataatgagtt

SEQ ID NO: 590863 - DNA, 51 bp, Homo sapiens
gttacaacttttgcccagctgatatgatcattctgtttcaaatgacaaagc

SEQ ID NO: 590864 - DNA, 100 bp, Homo sapiens
ctccgaggccagagagaaaagactgcgaggtggccgcagctgtggccggagagtttgaccttgtctgtgtcaatgcgtggatgctggacctcacccaagc

SEQ ID NO: 590865 - DNA, 97 bp, Homo sapiens
cgcgggtgcggggcgacctcggtggcccgcagctgctactgtttgaacggtcttggatgaacagatggaagtctgctgttctgcatgaaggggaagg

SEQ ID NO: 590866 - DNA, 101 bp, Homo sapiens
agaaactttatgtgcctgtaaaagaatacccagattgctcgccagaaacccagagctaattatttagaagaccgaaaaaatgggtcaaagctgattgtttt

SEQ ID NO: 590867 - DNA, 73 bp, Homo sapiens
aaacttcttttgtcaactttacagatatctgtaaactctgccactgcagagccccgccatggaagacacgccg

SEQ ID NO: 590868 - DNA, 74 bp, Homo sapiens
caaccgaaatgagactccctcagatccagtgataattgacagtgtgctcactgatccgcctccagggccaccgc

SEQ ID NO: 590869 - DNA, 75 bp, Homo sapiens
gccgccaagagtgagcgagcggacccgcgatgggtggcccgctgcaagcagctgatctgtgaccccagctacatc

SEQ ID NO: 590870 - DNA, 73 bp, Homo sapiens
catcctcagcctccaccttcctctccccagggtggtgacttcacacgccataatggcactggtggcaagtcca

SEQ ID NO: 590871 - DNA, 51 bp, Homo sapiens
accagacctacttggatgatgttgctgatgtatattcaagatgagtggatt

SEQ ID NO: 590872 - DNA, 98 bp, Homo sapiens
cagcgacccgctgctcagcgtcctcatgtggggggtaaaccactcggtctgcgcaggcatggcactaagtgtcccatggcacatttggccctcatgga

SEQ ID NO: 590873 - DNA, 50 bp, Homo sapiens
accgattctgcctgtccaagcctgaccatgctcgacagctgaccaaggcc

SEQ ID NO: 590874 - DNA, 100 bp, Homo sapiens
ggcccaaaaagagtgctgaatttttgctgcacatgcttaaaaacgcagagagtaatgctgaacttaagggtgtgggccgaagatatgctcatgtggtgtt

SEQ ID NO: 590875 - DNA, 116 bp, Homo sapiens
ctgaggcagaggctgggcccagaatacataagtagccgcatggctggcggaggccagaaggttcgggaagaataccggaagtgggcctgcctagttgctggggggagcaagtactc

SEQ ID NO: 590876 - DNA, 75 bp, Homo sapiens
gtccgggattcccagccatggcagattcctccgggcagcaggtggtgctcatcggggactcaggcgtgggcaaga

SEQ ID NO: 590877 - DNA, 83 bp, Homo sapiens
gtttgagtccgcatcgccacagctgaaggctgcgagggactaagagcagaagaaccatggagtctggcagtaccgccgccagt

SEQ ID NO: 590878 - DNA, 152 bp, Homo sapiens
tgtgcatgacgccatcctgccgcagctggcgcagcccacgctcatgatcgacttcctcacccgcgcctgcgacctcgggcagcgggtggcatgagacgtgggaacatgggccacctcacacggatcgccaacgcggtggtgcagaacctgga

SEQ ID NO: 590879 - DNA, 100 bp, Homo sapiens
gaacaaggagaagagccatggatcataaagagacacataccaaattggatctatccagaaatgttgctgaagtgctgctgaaagggccagagatgcaagg

SEQ ID NO: 590880 - DNA, 75 bp, Homo sapiens
ggaaagatggaagactaccaggctgcggaggaggactttgtgttttatgccccacgtctgagaatcaacaagcgg

SEQ ID NO: 590881 - DNA, 100 bp, Homo sapiens
gagaccgtgaccgagagcgtgaccgagagcgcgaatatcgtcatcgttagaaggagtgtcatgggccggcagacatgcctggagtgcagcttcgagatcc

SEQ ID NO: 590882 - DNA, 95 bp, Homo sapiens
aaagtgattttttgcctttgttgattaactggacaaattcaggagaagagatcaactttgggaaacttatcacaaagccttcagaaggaacaact

SEQ ID NO: 590883 - DNA, 100 bp, Homo sapiens
gtgaagaagataatggaaaagaaataccacaatgttggtcttagtaaagccaacagagcacttatggcaaggcatctcgagggggtggcaatcaccaaaa

SEQ ID NO: 590884 - DNA, 100 bp, Homo sapiens
aggaagtggaggaggcggctataataatagcaaacatcgatggcctactggggataacattcatgcagaacatcaggtttgatgtgtgaataattacatt

SEQ ID NO: 590885 - DNA, 101 bp, Homo sapiens
ctcccaagtagctgggattacagccttcaacctggactactacacagaggttctggacctctcctacctgcttgaccacctggcttctgaccctttcttcc

SEQ ID NO: 590886 - DNA, 96 bp, Homo sapiens
attgaagggaaaccatatactgtgaatttaatgcaaaagaacactcaagaatggactcaagaatggaaagaatgccctgattatgtttctgctggg

SEQ ID NO: 590887 - DNA, 80 bp, Homo sapiens
gagaccatggagaccctcacggagctgggcgacgagctgaccctgggagacatcgacgcgtccgtctccaagagagtatg

SEQ ID NO: 590888 - DNA, 100 bp, Homo sapiens
catcaaacagtgaaatacaggcctggctttcagacttggtggatcatccatgccatggagtatgaacttcagatccgtggcggagacaagccagccttgg

SEQ ID NO: 590889 - DNA, 100 bp, Homo sapiens
atgctatgtcttaagagaaggggctaatgccacaagtgatatgttctattttgcagttgaagatggtggccttgtttgtatgaagtccagcacatctgtg

SEQ ID NO: 590890 - DNA, 100 bp, Homo sapiens
aaagaaaggagatgagtatattattaatggtcagaagatgtggataaccaacggaggaaaagctaattgttcaatcaatgtactgaatataactgctgaa

SEQ ID NO: 590891 - DNA, 98 bp, Homo sapiens
gtccgaaggaggaagggaaccaacccactttctcggcgccgcggctcttttctaaaagtgttgtctgcattcaaaagagcattctattaaagctacct

SEQ ID NO: 590892 - DNA, 50 bp, Homo sapiens
gcctgggaccaggaccgcttcgagaaggtcctggcaaaactggcctgtgg

SEQ ID NO: 590893 - DNA, 101 bp, Homo sapiens
aacgagaagatcgcgatatggctcaaggactgccgttttccaagagataacttcaccaagatgtccagtgataggcaaaggtccgatgatgagagccccag

SEQ ID NO: 590894 - DNA, 75 bp, Homo sapiens
cagcagttccaggcggcatggagggggagaggagcggaagaccttctggtgtgggctgggcagcaattcacttga

SEQ ID NO: 590895 - DNA, 100 bp, Homo sapiens
ccagctctgtaaaagccccgcctctgccttcggataggtgtcatggagaaactccagctgggcccagagattctgcagcgggaaaatccaaggcttattt

SEQ ID NO: 590896 - DNA, 100 bp, Homo sapiens
caaagccctgggtcgcttggaagaagccaagccaaggccacctttgatgccatttctaagacctacagctacctgacccccgacctctggaaggagactg

SEQ ID NO: 590897 - DNA, 99 bp, Homo sapiens
cgacaagatacctctcgcatgtccacctcacaggtggctggtcattgaccgcaaggtttacaacatcaccaaatggtccatccagcacccggggggcca

SEQ ID NO: 590898 - DNA, 96 bp, Homo sapiens
gtctgaagttcacgactactagaaggggaggggagtggaaaggctctcagtgaaaaagcgtgcctgccagtgtagagccggtggagcagctgggct

SEQ ID NO: 590899 - DNA, 119 bp, Homo sapiens
caaggactgtccaagtgggaggctaaatctcgaggaatttcagcagctctatgtgaaggtcgagttttagctcaggcaagtggcaatggtgttatccatttgctagatcttaaatctgg

SEQ ID NO: 590900 - DNA, 82 bp, Homo sapiens
aggtgtgacactcttccacctagagcattccgtctctcatcctctgccatgtgtaaaagctgctgaaacatgtcaagagccg

SEQ ID NO: 590901 - DNA, 75 bp, Homo sapiens
ggcattgacatttaattttagggtcctttatatagaagggagagtaggcctccaagactgcagagaatgccacca

SEQ ID NO: 590902 - DNA, 76 bp, Homo sapiens
gtggatgtcgctgaattgcccgtgcccccagaggcggggtttcaccatgttgcccagactggtcttgaactcctga

SEQ ID NO: 590903 - DNA, 100 bp, Homo sapiens
cggagaccccgaaaacggaagcgcagggagaaggaagaggtgtttgaaaagagaatggtggcatgaagctcaaaaaaatccaaagataagacctaatcct

SEQ ID NO: 590904 - DNA, 112 bp, Homo sapiens
cttgtccttgctggtgcatgcgtcgtcggcctctgggcagcagggcagagcggcttgggtaaatccaccttaatcaacaccctcttcaaatccaaaatcagccggaagtcgg

SEQ ID NO: 590905 - DNA, 82 bp, Homo sapiens
ggggacctgtttgctgccatgctcctggcgtggacacacaagcaccccaataacctcaaggacgactatatcccatacccca

SEQ ID NO: 590906 - DNA, 82 bp, Homo sapiens
attcaagtgttggcggatggaagggaggagactcctgaccctcagaatggtggacaagagcaaggaccaagtgtggaaggtc

SEQ ID NO: 590907 - DNA, 50 bp, Homo sapiens
tgagcctgcagagcgcgcagtacctccgacggagtctcactgtgttgccc

SEQ ID NO: 590908 - DNA, 83 bp, Homo sapiens
cttgtttcttctaaggactgattctcaccccggctttggctctcctaattttagaggcaaaatgatgcttcaacacccaggcc

SEQ ID NO: 590909 - DNA, 50 bp, Homo sapiens
ctggcccaggaccgggaggagatgaagactgtgagcatcaggtggcaaag

SEQ ID NO: 590910 - DNA, 95 bp, Homo sapiens
tagaagcctgtcgaaaaatgggggtgcctgaggtcaccgacgatgagggcgcacctgctgtcctggagcttccgatctctgttcggggaccctgt

SEQ ID NO: 590911 - DNA, 100 bp, Homo sapiens
gatggcctcaaatgagagagatgctatatcgtggtaccaaaagaagttttaaccgtgattggagataccacaaagaagaacgagtatggattaccagggc

SEQ ID NO: 590912 - DNA, 99 bp, Homo sapiens
tggcaagattcttctgaattgtgctgccttggccaaaagagggatcgtgggactttaccagatcggtttgtaataacacctcgaagacgctatccgatc

SEQ ID NO: 590913 - DNA, 123 bp, Homo sapiens
gaacatctgggagaatatttaatggaaaatcgcttggttaaaacctgacacttttaacagtcatccgtccttggctcaggatttggagagcttgcaccaccaaaaatggcaaacatcaccagc

SEQ ID NO: 590914 - DNA, 50 bp, Homo sapiens
cgccgaggcaccgaggcactcagaggagacatcaaaatttacaagctctt

SEQ ID NO: 590915 - DNA, 74 bp, Homo sapiens
gagtcagctgtgtgtccagaacgtgccatggagacgcttaacgttggaggagagcagattagtgccattggaag

SEQ ID NO: 590916 - DNA, 83 bp, Homo sapiens
cagaccctggagcctcagttggaagcagccgatccagcctgcggagcctgtggggcaggagaagtttgcaggctgtttcctga

SEQ ID NO: 590917 - DNA, 100 bp, Homo sapiens
agcaaacgtctacactgtacatgctttttattacaagactacggagcataggaggaaaattcatcatctggcagctgaaaaagttggatgaagatagttt

SEQ ID NO: 590918 - DNA, 80 bp, Homo sapiens
cactttccaaagtggatgcctccggggagacatctgaatgggactccgagtgccttacatccctgcagccccttcctctt

SEQ ID NO: 590919 - DNA, 100 bp, Homo sapiens
ctgtcccctgctcgcggccaccgcaccacaggccccaggagagcagagctgacatctgataaagacatgtaccttgacaacagctccattgaagaagctt

SEQ ID NO: 590920 - DNA, 98 bp, Homo sapiens
ccaaccccaccatcccaccaaagggggctgctgaccgagagagctcactcagccaggatttagaaataccagcagtgcccatactccatagcatggtg

SEQ ID NO: 590921 - DNA, 83 bp, Homo sapiens
ccgctgaatgggctgaaggaggaggacaaagagcccctcatcgagctcttcgtcaagaaactatgttccaacttcctgtcaac

SEQ ID NO: 590922 - DNA, 90 bp, Homo sapiens
gtgacattaatctgcaggagaagctctatgttctatgatgaggatggggatctggctcacgagttctatgaggagacaatcgtcaccaag

SEQ ID NO: 590923 - DNA, 75 bp, Homo sapiens
agacaatggaaatgaagatttagcagagatattacagagctgtacagccatcagaattagttggaagtgtgtgga

SEQ ID NO: 590924 - DNA, 75 bp, Homo sapiens
tcatttctactggacttcatgcttagatacatgtataacaagactcagattgatggacaacttttcttaattaag

SEQ ID NO: 590925 - DNA, 74 bp, Homo sapiens
ccatcacccaccaacaacaccacaataatccacagccaaggttttaaaatcaaagatgggaaaatcggagaaaa

SEQ ID NO: 590926 - DNA, 75 bp, Homo sapiens
catcccggccagcaacggacacgaggtgtggaaacaggaagagaactagaactggaagtaaagcattgaagatgt

SEQ ID NO: 590927 - DNA, 75 bp, Homo sapiens
tccgccgtcactagccgtgagcactccacttactcgttgtcgagatgtccacagaaggaggatttggtggtacta

SEQ ID NO: 590928 - DNA, 75 bp, Homo sapiens
cttggactgagtcctgcaggacacaggccgaatacatcaagcaatggtaacatctttaaatgaagataatgaaag

SEQ ID NO: 590929 - DNA, 97 bp, Homo sapiens
gcacgcacggcccgggccggcgctccaaggcccgcccgggagggccggggccgcgctcaggcctgcacagctgaccacagttgggaaacgttgctgt

SEQ ID NO: 590930 - DNA, 88 bp, Homo sapiens
tgagtataaaggatgggttttaactacagacccagtctctgccaacatgtacattgccgttttcatccagcctttcccgtggtccttc

SEQ ID NO: 590931 - DNA, 100 bp, Homo sapiens
gtcatatgcacacccaggtaccaccttatccacagccacagcgcatggattccgtgaaggaacaacacctaaacccaagagggcagctgttgcagcatcc

SEQ ID NO: 590932 - DNA, 113 bp, Homo sapiens
ctcggagtccaacgcacctctcctaattcaggctgtcactgctgttgacacgaaaagaggaattactctcacttccaccacccgatgtatggaaactgctatactttcaatga

SEQ ID NO: 590933 - DNA, 83 bp, Homo sapiens
atagagttgagcctgtgggacacttcggttgatattcactgatggactccaaagaatcattaactcctggtagagaagaaaac

SEQ ID NO: 590934 - DNA, 51 bp, Homo sapiens
gtttttccaaatattcatctgtacaggatgagaacaagttgagcagtgcca

SEQ ID NO: 590935 - DNA, 75 bp, Homo sapiens
aaggattccaagtaactcttatttgatttggtgcttccagatgtgagttatcaggtggaatccagtgaggaggat

SEQ ID NO: 590936 - DNA, 100 bp, Homo sapiens
cagaacaggaggtggtagagggcatggatatctctactcgctccaaagatctgcgagtgaagagggacgagggaaaagaaacaaagccacagacgcaact

SEQ ID NO: 590937 - DNA, 75 bp, Homo sapiens
aaatccaacttaccttgtcagtacttgctgttctatcacaaacagttcctggaatacgagtagccttatctgcag

SEQ ID NO: 590938 - DNA, 102 bp, Homo sapiens
tcagccctaccagcactggtcatgtctaaagtgggttggcagctggagaagataatggacagagaggttatttgctgacctatgttattgcatacattcgag

SEQ ID NO: 590939 - DNA, 100 bp, Homo sapiens
tgacaccccaaaagaccgagctctcttcaacggagcccaaaagtgtggccctatgcacccaggtagccctgggcatggagcacctgtccaacaaccgctt

SEQ ID NO: 590940 - DNA, 100 bp, Homo sapiens
gcaccatgagcgtcccggccttcatcgacatcagtgaagaagatcaggcccgccaagctgccccctgtgtgctattctttgatgagctggattcgattgc

SEQ ID NO: 590941 - DNA, 100 bp, Homo sapiens
cacacaggtgaatttaaaggagcagccctggtgtcacctatcagtaaaagggacggaagaagtctatagtggctgtggagcccaggagtcttattcaagg

SEQ ID NO: 590942 - DNA, 85 bp, Homo sapiens
taaagaaagagcaggacatctatacccatctggtcaaatctctgcaggaatcagacaggcgcattctacattctaaaggggagct

SEQ ID NO: 590943 - DNA, 99 bp, Homo sapiens
ttatgaagctccgttgactaccgtggagagatcataatttggggttcaagattccagaaactaattctgaagcaagcccttatagttgtgctgcagtgg

SEQ ID NO: 590944 - DNA, 75 bp, Homo sapiens
atttaagcactgctgcactttatgaggaacttggatacgattggtgttgctgttgatttgattcttctgtttcgt

SEQ ID NO: 590945 - DNA, 82 bp, Homo sapiens
acggagcagcgcgtcgtggggcgagcggcagattttgcaagaacgaggctcaaggatgtgagggacacagtattgacagctg

SEQ ID NO: 590946 - DNA, 98 bp, Homo sapiens
ttaggccgtgctccaaagtcatcgtccggtttctcactgtgatgatgaagcatgttctcctgtgcctcctgttggctctctttgcatctggcctcatc

SEQ ID NO: 590947 - DNA, 99 bp, Homo sapiens
cttcagcgcagtatattactgcagactctaaaatagagctcaagcttgagaagagagaaccactaaagggcagagcaaagactccagtaacactcaagc

SEQ ID NO: 590948 - DNA, 100 bp, Homo sapiens
gcccggggggcccagctcccgtagggagccgtgggcgctcggtgcccgggccgggcaggtatttcagtgtctgtagacaagatggaatcatctccattta

SEQ ID NO: 590949 - DNA, 71 bp, Homo sapiens
agaactacagaaacctcgtctccctgggcaaagtgtttcatggatttcaaagctggaggcgccttatgtca

SEQ ID NO: 590950 - DNA, 89 bp, Homo sapiens
ctctgctgtttaaaaagtatccctgtgacttttatcggacgttttcgccgcatcatggactcctcacagaatgcttacaacgaagacac

SEQ ID NO: 590951 - DNA, 90 bp, Homo sapiens
cagcctataggctctccaggaaacaagggcatgaatatgtcatattatacaggcggtctatgcttgcttggtgcttatgctgacagtgat

SEQ ID NO: 590952 - DNA, 101 bp, Homo sapiens
cctccccagggcttccctcagggctacggtgccccgccacagttcagccaggacgactggaatgggaccaggccgtcgctgaaggcccctcctgctaggcc

SEQ ID NO: 590953 - DNA, 90 bp, Homo sapiens
ggccgacccttcctgtcgctgacggcgactgcgggaggccagaatcctggtaattgatgtccacccgagaaatccctgcagatgttccag

SEQ ID NO: 590954 - DNA, 100 bp, Homo sapiens
tttgtccagtggaagaccatctacatctcccacaggaagtgtcacacagcagtcaagtatgtcccaaacgtctggtggccattcagggcaactggggcct

SEQ ID NO: 590955 - DNA, 89 bp, Homo sapiens
cagagcaacgggtgcccctgagtgtgcaactgaagcctgaggtctccccaacgcaggacatcagggtatcagcatggaagccatgagtg

SEQ ID NO: 590956 - DNA, 100 bp, Homo sapiens
aagcgcgccaggaagcgcttcgaaatcgcctgctacagaaacaaggtcgtcggctggcggagcggcttgggccagtgtcattcaaagatgtggctgtgga

SEQ ID NO: 590957 - DNA, 100 bp, Homo sapiens
ttcatagaaaactatccaagaatgtgacttcctggagtagagtcttttttcactgagggagtagatcccataatagatcacgttcaagacagaaagacag

SEQ ID NO: 590958 - DNA, 75 bp, Homo sapiens
aaggtgaaggcctatctgagccaaggggagcgcttcatcaaatgggatgattgtcggagatgtatgcagtgtgac

SEQ ID NO: 590959 - DNA, 96 bp, Homo sapiens
gcgtaggtctgttcgatatggagattttcagtattgtgagcaagcaaaatcagtaattgtgaatacagattctgttcatcttgctctgaaattaaa

SEQ ID NO: 590960 - DNA, 100 bp, Homo sapiens
ttggctcagccacccgctgggaatcgtgcagggattcttcggtaagaccatgaattatggcatttcttaaatgaagcgttcaagaagtgagagaatgtca

SEQ ID NO: 590961 - DNA, 100 bp, Homo sapiens
gcagtgaccggcaccttctgtgcgtcctggactcctctgagaaacaggctctgtgtgctccgggatggagcaggtgtgcagagggtgagaacccagctct

SEQ ID NO: 590962 - DNA, 90 bp, Homo sapiens
gggtgagccttctcgtggcggcggggaccgtccagcccagcgattctcagtcaggaacaccagcctcgctccggcctcttgcagtcctcc

SEQ ID NO: 590963 - DNA, 121 bp, Homo sapiens
ccttcctccgtgtggacgatagagccacatccagcaccacggacagctcccgggcgattcaagtccagcatccagcggccaagtccatgatcgaaattagccggacccaggatgaagaggt

SEQ ID NO: 590964 - DNA, 97 bp, Homo sapiens
cgggctcggcggcggcggccaggtccctgctgaatcacacgccgccatccgggaggcccagggaaggctcattggtgggcagtattacttatgggaa

SEQ ID NO: 590965 - DNA, 87 bp, Homo sapiens
ctcagttggaagcagccgatccagcctgcggagcctgtggggcaggtcctctcagggtgcgccatcattgtccgaggtcagcctcgt

SEQ ID NO: 590966 - DNA, 100 bp, Homo sapiens
cctttgccactgaattttttgaagatgacgccacattaaccctttcattttgtttggaagatggaccaaagcgatacaattcaaggcctcttccagatgt

SEQ ID NO: 590967 - DNA, 100 bp, Homo sapiens
ctccggctcaagtgtgtcaagcaagcactgatagccattgggcgatacagcatgacaatagagactgtggatgtcggatggtgtaaagaaatcacagacc

SEQ ID NO: 590968 - DNA, 50 bp, Homo sapiens
ctcttggcgccaccgcctcatgcactgtgaaggatcgagatcgagaccgg

SEQ ID NO: 590969 - DNA, 100 bp, Homo sapiens
ccagaaatggctgcaggccaagcgcctcacgccggacctggtgcagaggagcaggagcggcttcgcttggagcaggagcgagagcaggaacagaagaagg

SEQ ID NO: 590970 - DNA, 50 bp, Homo sapiens
gggccttcagagccgcaatcaagcagagtgcccaagacaggagcaggaca

SEQ ID NO: 590971 - DNA, 96 bp, Homo sapiens
tctcgctctggccgacgagtggagaaaaatccagcaactatcacaagaatactccttagccacttcaattgggataaagagaagctaatggaaagg

SEQ ID NO: 590972 - DNA, 100 bp, Homo sapiens
caaacgtctacactgtacatgctttttattacaagactacggagcataggaggaaaattcatcatctgcaatggtgattgttcccactagagaacttgct

SEQ ID NO: 590973 - DNA, 90 bp, Homo sapiens
gtttatgccaaatcaactgccttacagaaactggcgatggaatatgagaggagccctctggaaagaaaaggacagaccctgtgctttcat

SEQ ID NO: 590974 - DNA, 80 bp, Homo sapiens
gactgagtcctgcaggacacagtggaagacaagcattccagtgatgccagtagtttgctcccacagaatattttgtctca

SEQ ID NO: 590975 - DNA, 100 bp, Homo sapiens
ttcgagagctaccgcgccagacagcgagacggtcatctgttccagccgggccactgtgatgctttatgatgatggcaacaagcgatggctccctgctggc

SEQ ID NO: 590976 - DNA, 100 bp, Homo sapiens
cccgcgtcggcgctggggacaaagatcaccggcgtaatcaacccagcgttggacaaatactttccgtcagactctggagtgagaatcatagctgagcccg

SEQ ID NO: 590977 - DNA, 100 bp, Homo sapiens
tggattaaatgtggcatatagtccctactacaaaatttttcaacctgttgctgatatgtgttcaagatgagtgggatgggagaaaatacctctgacccct

SEQ ID NO: 590978 - DNA, 110 bp, Homo sapiens
tcaaaatgaagactgcctttacttaaacatctacgtgcccacggaagatgggaccactgacatttatggatgtggccatagagttctctttggaggagtggcagtgcctg

SEQ ID NO: 590979 - DNA, 100 bp, Homo sapiens
cagcgggtgacatggaaggggcagtacaagcttacgtctctgctcttcagtacaatcctgccaagtcctgtatctgccatgtctgtggcgtccacctcaa

SEQ ID NO: 590980 - DNA, 82 bp, Homo sapiens
ctactgatgagacaagatgtggtgatgacagaatcagcttttgacttcaaacaagtgtgaagaggctgtgtggcgagattgt

SEQ ID NO: 590981 - DNA, 90 bp, Homo sapiens
ctgagccgtcgcggagccgcgcagccctcggagcacgatgccttcaattaagttgcagagttctgatggagagatatttgaagttgatgt

SEQ ID NO: 590982 - DNA, 101 bp, Homo sapiens
gcggccgcagtggcgtcctggagccctcctcaggtgatgggcagaatctgtttacgaaagacgtgacagtgatcgagggagaggttgcgaccatcagttgc

SEQ ID NO: 590983 - DNA, 75 bp, Homo sapiens
gggagatagacgctgctgcctgacaataacggtgtgattggactgttggagcccatgaagaagagcatggtgcct

SEQ ID NO: 590984 - DNA, 50 bp, Homo sapiens
ccccgccaacgctgccgccgggagcccagcagccggggccgccctattac

SEQ ID NO: 590985 - DNA, 75 bp, Homo sapiens
atcaccgttattcctactaacgtcctgtgtcactgagaaaccagactgtgatgactgggagagcgggctgaatgc

SEQ ID NO: 590986 - DNA, 100 bp, Homo sapiens
agaaaggcactgtctaccttaccccttaccggttaattggccttggtcctcacagctccaaaaagaaacaggatctcgataagctctatgagctgaagtc

SEQ ID NO: 590987 - DNA, 82 bp, Homo sapiens
ttctcacttggcctatggaaaacggggatttccaccatctgtcccagcttcagctttagctgcagctgcctctgttcagcca

SEQ ID NO: 590988 - DNA, 50 bp, Homo sapiens
ggagattctgctcacggaactgcagaaagggctattgcaagacacgaagt

SEQ ID NO: 590989 - DNA, 101 bp, Homo sapiens
tatttgcctttagtgcactcttctccttcacagtaaagtggctggggcctttacaacaactaaacggacaggcattccagccccacgggaattttcagtaa

SEQ ID NO: 590990 - DNA, 98 bp, Homo sapiens
gctgaggctcctcgaggtgctctcgggagagatactgaatgatatggaacctagcaaagctgttccactgaatgcatctaagcaagatggacctatgc

SEQ ID NO: 590991 - DNA, 75 bp, Homo sapiens
ctcggggactcccccaaagacaagatttcttcgcaagactatggaaaggaagtggacctctacgctttggggcta

SEQ ID NO: 590992 - DNA, 75 bp, Homo sapiens
ctctgagacccggaggaggttcgaagctgagtatgtgacagctaatgggaatgacagcaagaaatttaaacgaga

SEQ ID NO: 590993 - DNA, 102 bp, Homo sapiens
caccaaagctgaggtccccttgatcatgaactccataaaatccttttctgaccacgctcaatgtggaagggtgcgcctggctgggatgaagatctctcggcc

SEQ ID NO: 590994 - DNA, 98 bp, Homo sapiens
tgcacgtgctggacctggaagcccgcggctacatcaagccccacgtggacagcatcaagacttggaacgcagtgctgctgcgctatttcaaccccaca

SEQ ID NO: 590995 - DNA, 96 bp, Homo sapiens
cagcgcccagcaacaagacagagctggcctggagtccgcggctggccgcgtgagtagataaacaacttgatgcagatgtttcccccaagcccacta

SEQ ID NO: 590996 - DNA, 100 bp, Homo sapiens
tccctcttccccagaatgcctggtatctgcacagaaggtgctagagggatcagagctggaactggcgaaggtaccgaaagcacagtaatcactggtgtcg

SEQ ID NO: 590997 - DNA, 141 bp, Homo sapiens
ggcagcaagaatcccaagattgccttgaaactggctgagttccagactgacagccagggcaagaaccccttgttcgtggaggctgaggagaaagtctcctacaactgctgccgccagggcactgtctgtttgcaaatccag

SEQ ID NO: 590998 - DNA, 100 bp, Homo sapiens
ttagagtcgaaaataaatcctaacactgcataccagaaacaacaggttgctgagtcattaggaatcacagaattcctacggaagaaagaaatacacccag

SEQ ID NO: 590999 - DNA, 96 bp, Homo sapiens
ccggaagatcgcgatcctgggctaccggtctgtggggggggccctcagcctcttggccttgaacgggctgttcatcttgattcacaaacacaacct

SEQ ID NO: 591000 - DNA, 75 bp, Homo sapiens
gttggtcttctgatagcaactttaatgtggaccaacttggaggccttgcagaagaagctggaggagctagagctt

SEQ ID NO: 591001 - DNA, 82 bp, Homo sapiens
agagcctccaggctgagacagaatccttacgtgccctggaatgtatcctgtcaggtataatgtcagtgaatggcaagaaagt

SEQ ID NO: 591002 - DNA, 109 bp, Homo sapiens
accgcagcgtcgagatgtaccatcctgcctactgggtcgtcttctcggcgacaactgccctgctcttcatcccagcttcctgcctgacacagctcacttcaagaagtgc

SEQ ID NO: 591003 - DNA, 101 bp, Homo sapiens
catttttaccttgtgatgcacctgggattaaccagcgaggatcagtctgatgcaggctgggaagaatactttgattacatctttccagaagatgctgccaa

SEQ ID NO: 591004 - DNA, 100 bp, Homo sapiens
ccagctcagccagctgcctccgcactccatcgaccagggtactccaaagattcaggtttactcacgtcatccagcagagaatggaaagtcaaatttcctg

SEQ ID NO: 591005 - DNA, 80 bp, Homo sapiens
ctcggtgctgtggtgcagagctagttcctctccagctcagccgcgtagctagaacgagtaaatctgtctgcagcccagac

SEQ ID NO: 591006 - DNA, 50 bp, Homo sapiens
ccagatccatttacactttacacaacgaaggttttgggaacagtaaaatg

SEQ ID NO: 591007 - DNA, 88 bp, Homo sapiens
ccttcggaagcccgttcggcctggaggagccgcagtgggtcccggacaaggagcatgaagcgtgccagctctctgaatgtccttaacg

SEQ ID NO: 591008 - DNA, 101 bp, Homo sapiens
ccaggagaggcggggtcggcgggagccagcgagccacgggagcgagccagggcaaacctggtggacctgcagaagaagctggaggagctggaacttgacga

SEQ ID NO: 591009 - DNA, 96 bp, Homo sapiens
gtggcccccttcatggccaacatccctctcctcctctaccctcaggacggcccccgcagcaagccccagccaaagtttaattggttggggtcagat

SEQ ID NO: 591010 - DNA, 100 bp, Homo sapiens
cttggcccaagccgctggtgcctgccattcccatctgcaggtagtgaaacagtttcgtgacggtggttacaacacgctggtttctacctgtgtgggtgaa

SEQ ID NO: 591011 - DNA, 100 bp, Homo sapiens
ggacgtcctggagccaagggtcctgaaattgccaaggacatggaacgctgggcccgcagtctcaacaaacaaaaagaaaacttcaaaaatagcttccagc

SEQ ID NO: 591012 - DNA, 100 bp, Homo sapiens
tgcacacggcactcgagtgtgagtcaggatggctaaaggtgaccccaagaaaccaaagggcaagatgtccgcttatgccttctttgtgcagacatgcaga

SEQ ID NO: 591013 - DNA, 101 bp, Homo sapiens
gcaaccacgagacggccttccaagatttgagttttgtcaccggctcccacgtcggagagctgatcatctgggatgccctggactggaccatgcaggcctat

SEQ ID NO: 591014 - DNA, 100 bp, Homo sapiens
ctggacaagtatgtggaaatagcgcggctgtgcaagtacctgccagagaacgacctgaagatcccagattacaggaatgcagtaatcgtggccaagtctc

SEQ ID NO: 591015 - DNA, 97 bp, Homo sapiens
attacaagcggacacgggaatatatccgaagcctgaagatggttccaagtattccctatctaggtgtcatggagaaactccagctgggcccagagat

SEQ ID NO: 591016 - DNA, 100 bp, Homo sapiens
cttgaatggcaactgatacataataagacacaatctattctgctgattcacaattatggagactgtgacattctgagcatgtgagacctgaggactgcaa

SEQ ID NO: 591017 - DNA, 97 bp, Homo sapiens
tagttcccattttaattacttaaaacaccacgatgaaaagaaatacctgtgatttgctttctcggagcaaaagttaaagatgacggcgccttgaggt

SEQ ID NO: 591018 - DNA, 75 bp, Homo sapiens
caaaccaggttgcatttcctgaaggggaagagcaagatgcagtcagtggaggtggcattggtagggtggtcaacg

SEQ ID NO: 591019 - DNA, 75 bp, Homo sapiens
gaaagagtcaacagcagtggcaacagtttttcagaagaagtgaagtcaagatgaagaaccatttgcttttctggg

SEQ ID NO: 591020 - DNA, 82 bp, Homo sapiens
gctggtggaacagctacgcatagaagccgggattgagcgcatcaagggctgaagaagatgcagagcagcctgaagctggtgg

SEQ ID NO: 591021 - DNA, 82 bp, Homo sapiens
cggcgggtacctgcggccaattcggtggaacgaggacgcggactgcgaaggcagcaagagtgagccatggagctacgtgtgg

SEQ ID NO: 591022 - DNA, 100 bp, Homo sapiens
ctaacttcctcggccgagccgggccgcgccgccgctgccgccgccgcgcgcggtctgatctgaaatgtgtccaggatgccaagggaggttctttctacag

SEQ ID NO: 591023 - DNA, 75 bp, Homo sapiens
gaatatcatgctggtggctctacccagaattcaattaaagtggctcaggttatacattggctcttcaaagacgtt

SEQ ID NO: 591024 - DNA, 100 bp, Homo sapiens
agcggatcagagagggctaccttgtgaagaagatgcaaccttaaaatcagtgacaagaaacattccaaacaagcaacagtcttcaagaaattaaactggc

SEQ ID NO: 591025 - DNA, 98 bp, Homo sapiens
gcaggaagtgggaccggtgtctggcggatgcggtcgtgaagataggttacctgtcctgctgccgattcctggatgacaatcagatcgtcaccagctct

SEQ ID NO: 591026 - DNA, 75 bp, Homo sapiens
ctctttcaagacacagatttgcttcggaaggagtatggggccaatgtgcttcctgcattccccccaaagaagctt

SEQ ID NO: 591027 - DNA, 98 bp, Homo sapiens
gcgctccatcccaaacacacacacatttttcccccggacttggaaagtcacccaaagccgccccaagtgcagaaacgcttcgttaagggactcaggca

SEQ ID NO: 591028 - DNA, 100 bp, Homo sapiens
cagaaacatttgacccagaagagaaacattccatggcctatcaagacttgcatagtgaaattactagcttggattatatgcgtcaggcaggagaagtgac

SEQ ID NO: 591029 - DNA, 51 bp, Homo sapiens
agatggtgtcaaagagaaattctgaaacatcctctaccaccttgatgaaaa

SEQ ID NO: 591030 - DNA, 100 bp, Homo sapiens
gttctcatctcgctgcaggaggctaaagatatttgcgaggagcaggtcaacatcagtgagcgctatggccccgtgttcaccattcacttggggccccggc

SEQ ID NO: 591031 - DNA, 100 bp, Homo sapiens
ggaggaagcgatggcttcagacagcatatttgagtcatttccttcgtacccacagtgcttcatgagagtcactcagcctctgaagaagcttcgggttcag

SEQ ID NO: 591032 - DNA, 98 bp, Homo sapiens
agggcctcgcctcactatggcagcagcacggcacagcacgctcgacttcatgctcggcgccaaagggaaatcctcattgacgattcaatttgttgaag

SEQ ID NO: 591033 - DNA, 90 bp, Homo sapiens
cgatcatttggagatgcccaaggctgtacagaacttctgaacgtggcacacaaatacactatgatctgcttggctttgaggaagagtggc

SEQ ID NO: 591034 - DNA, 75 bp, Homo sapiens
cgtcccccgcgggtctgctctgtgtgccatggacgggtgaaagaaaatggcccgaaccaagcagactgctcgtaa

SEQ ID NO: 591035 - DNA, 100 bp, Homo sapiens
cgccatcgttgctgccttcttcgtcaaggtttgtggtaaatatgccagctctagaacacatgaatcagattttacacatcttgtttgtatttttaccctt

SEQ ID NO: 591036 - DNA, 50 bp, Homo sapiens
gggggtcttcctcctccgccgttgacagatctgttacctaaagcaataaa

SEQ ID NO: 591037 - DNA, 78 bp, Homo sapiens
tgagccttggaacatttcaggcctggcacggaatgcagtttttacacaacttagacagggtcttgctatgttgcccag

SEQ ID NO: 591038 - DNA, 82 bp, Homo sapiens
gcggagggctcggtcaacggcttcatcagcaccttggggtactccaaagattcaggtttactcacgtcatccagcagagaat

SEQ ID NO: 591039 - DNA, 75 bp, Homo sapiens
agaagagaaagcacaaagcatggagaccctccctccaggttgtgaactaaaggccgacaaagattatcactttaa

SEQ ID NO: 591040 - DNA, 123 bp, Homo sapiens
caccctggttggactgggcatgtttctaccagttggtctattaattgttgtgatgatggtgaaggatctcaacaagctctggcccctcctcaggccgaatggatcagcttccccagaagaatc

SEQ ID NO: 591041 - DNA, 100 bp, Homo sapiens
gcggtggcgagaggtgcggcgaaggaggcagaggcacttatgcttgtcaggtggtgctgtgggtcggcctgggcgtcctggtggtgagcactgtcaccac

SEQ ID NO: 591042 - DNA, 101 bp, Homo sapiens
aacctctacaacgaaggtgaagccacggaagataagtgatggtcctttctgccggatctgccatgagggagcgaacggggagtgcttgctgtccccgtgtg

SEQ ID NO: 591043 - DNA, 98 bp, Homo sapiens
aggggtctgctgttgaaccagaacaaaaccgagtcaacagggaagcagaggagaaccgggagccattcagaaaagggagagtcccgtattctcagagt

SEQ ID NO: 591044 - DNA, 87 bp, Homo sapiens
ccgcagcgccgtggtggcggccgggggaggcagctccggtcaggcccgttcctcccgccgtcagccctgctgccagaccctgacttc

SEQ ID NO: 591045 - DNA, 100 bp, Homo sapiens
cggcgcttcaccgagatctacgagttccatattccttatggcagaaagtatgacaaggcatggctcctgagcatgattcagagcaagtgcagtgtgccct

SEQ ID NO: 591046 - DNA, 100 bp, Homo sapiens
gtcggcggccacggcagcgcccacggccactcccgccgcgcaggagtcgggcaccatcccaaagaagcgctttctgaaacaaaggtcttcactgcctcat

SEQ ID NO: 591047 - DNA, 100 bp, Homo sapiens
cctactggatggctcctgaggtcatcgcctgtgatgagaacccagatgccacctatgattacagactcttagaacaagctctggtgattgaggaacagct

SEQ ID NO: 591048 - DNA, 50 bp, Homo sapiens
gttgccatggagacgcgggcggcaggttcttccaggttggaaagagaata

SEQ ID NO: 591049 - DNA, 96 bp, Homo sapiens
gccatggatcccaactgctcctgcgccgccgcgcgttccttcacctcgggcagaataactttgcagaagcccacaggttcttcacagagatcttaa

SEQ ID NO: 591050 - DNA, 110 bp, Homo sapiens
tcaacactgctatagtatacatgcatcgattctacatgattcagtccttcacacagttccctggaaatggcttccgttacaagatgaggtctgtgtatgctcacttcccc

SEQ ID NO: 591051 - DNA, 101 bp, Homo sapiens
aacagtttgtggcaagacaagctcagaactgagaagctgtcaccacagatgctgctcagactctcgctctcgcacaggatcacagtatggatattccaagt

SEQ ID NO: 591052 - DNA, 96 bp, Homo sapiens
tcggcaccgagatcagccgcaagatccgggaaagaccacagcaagattctttcattcgtctcctcctagcctgggggaccaggctcgaactgaccc

SEQ ID NO: 591053 - DNA, 80 bp, Homo sapiens
ccccagtaccaggcggtggtgcccgacttcgaccccggtatagctgtggaccaactgtatatgatcatgcgcaccttggc

SEQ ID NO: 591054 - DNA, 50 bp, Homo sapiens
ggcgggtcccgcgggccaggccgtggagaacgacaccgtaactatccgca

SEQ ID NO: 591055 - DNA, 83 bp, Homo sapiens
caagaagatcttcgagttcaaagagaccctcggaacgccttccggagcagtactacagcctcacctggttcctgagccccatc

SEQ ID NO: 591056 - DNA, 97 bp, Homo sapiens
tcgtctggtggccttttgtccctttgcctcatcccaggttgccttggaaaatgccaacgccgtgtctgaaggcaggccagaaagcagacccagggag

SEQ ID NO: 591057 - DNA, 88 bp, Homo sapiens
cctactcacagataggaattgaaggttggacagatgacccaggcaggtctcctggagcacctgaaactcgagaatgtgtccctgtccc

SEQ ID NO: 591058 - DNA, 96 bp, Homo sapiens
acagcgaggaggaggaagaggacctggatggagacggctatctgggagaatcagttctattacctctttggcttcctgttccttgttttcatcatc

SEQ ID NO: 591059 - DNA, 50 bp, Homo sapiens
tgaggccttcccagccatgcagaactgtacacggagcgccttcttttcgt

SEQ ID NO: 591060 - DNA, 110 bp, Homo sapiens
gagctgacccgctgcaaggagaagctgcacgacgtggacttctacaaggcccgcatggaggtttggtgcacctcgatttggaggaagtagggcagggcccttatctggaa

SEQ ID NO: 591061 - DNA, 75 bp, Homo sapiens
ccaggcctggcagtccctgcccgacttcggcatctcctatgtcatggtcaggtcttgggcgtctttggtactggc

SEQ ID NO: 591062 - DNA, 75 bp, Homo sapiens
ccactcagtgaccttggctagaaaccaatggctgtgcggcgtgaggtactccaaagattcaggtttactcacgtc

SEQ ID NO: 591063 - DNA, 50 bp, Homo sapiens
agaccagaagtggatggagacccagcctgactcctggagattgtgaatag

SEQ ID NO: 591064 - DNA, 83 bp, Homo sapiens
ctgctgctaaaggtatccaggaaattgctgactctgtaaagaaggggtagaagagccatccaaaaaacgagttatagaaggaa

SEQ ID NO: 591065 - DNA, 97 bp, Homo sapiens
gggaaatggccgctgtgtggttgcaacggagataaattcccggaaccgcgattcggcgtgtcaggaaggaaaatcacctcggcagtgtttgaaggaa

SEQ ID NO: 591066 - DNA, 100 bp, Homo sapiens
aaagaatcaaatcgtgaaaagaaaccagaagaactcctctcttgtgcagattgtggcagtagtggaagctgccacttttgctagagagcaaggctttgag

SEQ ID NO: 591067 - DNA, 82 bp, Homo sapiens
cagggcctgcagcgggagctggacggcgagcgcgagcggcgcgagaaaggctgaagaagatgcagagcagcctgaagctggt

SEQ ID NO: 591068 - DNA, 90 bp, Homo sapiens
agcaccgcagccttgggcctcgcgccggctatggccgtgccctggggctgagccctcagggggggccctcagcctcttggccttgaacgg

SEQ ID NO: 591069 - DNA, 95 bp, Homo sapiens
tttggtctcctgccgtgcccgtgaacacttgtcctgctccttcacctttttcttgcatggagacagcaatgtttgtaccagtgtggaaattaacc

SEQ ID NO: 591070 - DNA, 75 bp, Homo sapiens
aaacagattcagtggcctgcattgattctgaagactactttgaggtcaacattccaacagacctacgagcaaaac

SEQ ID NO: 591071 - DNA, 75 bp, Homo sapiens
ctccaggccagtctgggcaccctgggatagcggctgcagggtcggggtctgcagcccctgaagctggactaccgc

SEQ ID NO: 591072 - DNA, 103 bp, Homo sapiens
gctggtcctcctggcttccctggtgctgttggtgctaagggtgaacctggtcctcttggcattgccggccctcctggggcccgtggtcctcctggtgctgtgg

SEQ ID NO: 591073 - DNA, 100 bp, Homo sapiens
cggggaccccgccatgttgccgttgctatgaacaagtttggatacaggcagagtggcatgattccgactggatactctcagtgccagccaaattacctga

SEQ ID NO: 591074 - DNA, 100 bp, Homo sapiens
gtgctcgtggtccagctggccctcctggcaaggctggtgaagatggtgcatttgagaagatcttttctctttggccattgtccaagtgttttgaactgaa

SEQ ID NO: 591075 - DNA, 88 bp, Homo sapiens
agcagggccttggaccccgcggcgcccctcggcctcggagcaacgagcgcagcgccgggactttgaacatgtcggggatcgccctcag

SEQ ID NO: 591076 - DNA, 139 bp, Homo sapiens
ggcgatctccaacagcatctccaagcaatgttcattttactccgcccagaagacaacatcaggctgctattgacctgttgtattggcgggacatcaagcagacgggcatcgtgtttgggagtttcctgctgctgctctt

SEQ ID NO: 591077 - DNA, 100 bp, Homo sapiens
gtaaaaaggaacggaggcctgtgcgcccacacacggtcgaggctccttctcctgaaaaagccgaggaggagagtgagaggcttctgagggaactctattt

SEQ ID NO: 591078 - DNA, 82 bp, Homo sapiens
ccagcgcctcggccgaacccctccgcagcagaacaccttccaccatgaccacctcagcaagttcccacttaaataaaggcat

SEQ ID NO: 591079 - DNA, 75 bp, Homo sapiens
gccgggacctggaggggacgctggggccgaagcagcatgtgacaccgaccagtcacagctacttggaaggctgag

SEQ ID NO: 591080 - DNA, 90 bp, Homo sapiens
tgggacagctcacagctgcactgggagagctgagagcctccatgacagaccccagccagcgtgatggctccctggggaagggaatgcagg

SEQ ID NO: 591081 - DNA, 83 bp, Homo sapiens
ggagccgcaaggagccacacagcaggagatccttgccagctcctaaaacctatggtagcatgaaagatgacagttggaaagat

SEQ ID NO: 591082 - DNA, 87 bp, Homo sapiens
caaacaactggcagaatttgctagaatacagttatggccacccaggtaatggggcagtcttctggaggaggagggctgtttaccagc

SEQ ID NO: 591083 - DNA, 98 bp, Homo sapiens
ggtaccacaaccccgattgctttcgtgaaggaactgccttctgttgaagaactcactattattctgcctgaagatattgagttaaagcctcttgggat

SEQ ID NO: 591084 - DNA, 50 bp, Homo sapiens
tcagctcagtgctgtgcgggccaggaatgtatcctgtcaggtataatgtc

SEQ ID NO: 591085 - DNA, 100 bp, Homo sapiens
gtcaggcataaattgattattcctcgcccacatctgtgccagttttatccaagtatgaagatcagattactattttcactgactacctagaagaatatcc

SEQ ID NO: 591086 - DNA, 99 bp, Homo sapiens
gtaacttctggactcaagcaatcctcccacctcagccttccgagtagctagaactacaggtatacatggactggtacgagaagttccaggacaggctca

SEQ ID NO: 591087 - DNA, 90 bp, Homo sapiens
tcattggccacctacagaaacaaaatgtcaacaaattgatggtgaataaccctataccttccaatttgaaatcagaagcaaaaaaggctg

SEQ ID NO: 591088 - DNA, 100 bp, Homo sapiens
atttgtatagagatgtgatgttggagaactacagaaacctggtctccctagatttgaaaaatgtgtgagtgctaaggaagctttggagactgatctttat

SEQ ID NO: 591089 - DNA, 76 bp, Homo sapiens
gaagactgaaagagtcgaatggtttgttggcaggtgattttacaacgagatgctgctctccatagggatgctcatg

SEQ ID NO: 591090 - DNA, 50 bp, Homo sapiens
ctcttcctcaatgcttgtgtggaactttacagactagcatggcaaagctt

SEQ ID NO: 591091 - DNA, 100 bp, Homo sapiens
cagcaaggtcggcagagcaaggggcttacgcagaaggacctggccacggccaccagcccctcgggttccaagatgcagctactggagacagagttctcac

SEQ ID NO: 591092 - DNA, 90 bp, Homo sapiens
gacccatgcattggttaatatcaggcccgccatgttcatagaggataaagcagtagacaccctggcttacctcagtgacggtgacgcccg

SEQ ID NO: 591093 - DNA, 102 bp, Homo sapiens
gtcatgctctttgtagcgtggtgcttctgttgctcacaggtggttgtactacaatcccagagtcagacctagaagaaagatcagtagaacaagactctacag

SEQ ID NO: 591094 - DNA, 101 bp, Homo sapiens
agttttctactgtaaagtcaccaacgagatcttccgccactacgaggtttggaaatcccttgtctccaggttgctgggattgacttcttgctcaattgaaa

SEQ ID NO: 591095 - DNA, 101 bp, Homo sapiens
caggttttaaatcaagatttaacattccaacacataaaaattatttatccaacagctcctcccaggatcacagaagaactgcagcttcctggggagcagtt

SEQ ID NO: 591096 - DNA, 83 bp, Homo sapiens
ccctggtgcacacaccctcgtattctcctgcccttccccaggaaggtgggagtcaatcattttgacaagtctcctgaaaggaa

SEQ ID NO: 591097 - DNA, 98 bp, Homo sapiens
atttgttaaggattccaagtaactcttatttggtcagggccaaaactggaaccaaggatttaataactattatgatcaaggatatggaaattacaata

SEQ ID NO: 591098 - DNA, 75 bp, Homo sapiens
ccggcaccgcgcctgctgccgggttgcgctccgtgcacctcttgcggagtcctccctgctgctgtgtggacgaca

SEQ ID NO: 591099 - DNA, 50 bp, Homo sapiens
cattatttgagatgagttacatcttggagtcttgctggaggtttgttaaa

SEQ ID NO: 591100 - DNA, 82 bp, Homo sapiens
tggaggccactcgacgccagaggatggattacccagtgaacctacaagcagcaattggcgcctattatgactttgagagccc

SEQ ID NO: 591101 - DNA, 101 bp, Homo sapiens
gatggcggatgccctgcagtacctgcagaaggtctctggagacatcttcagcagaaaatgtcttctgaggctgatctggtgtctcacatctgtaatcccag

SEQ ID NO: 591102 - DNA, 98 bp, Homo sapiens
gcgcgtgaggctgcggctctgacgatcaggatcctcatgaccagccaaagagaagaagaattaggaagcataaatcaaagaaaaaatttaaaaatccc

SEQ ID NO: 591103 - DNA, 90 bp, Homo sapiens
cagcctggtacggcaaactgaggagtgtgctgaaggcttccgccaaggtatgtgcactgcgcgtgaccagccgggcccgcagccgcatcc

SEQ ID NO: 591104 - DNA, 51 bp, Homo sapiens
agcgcctggaggctcgagcggagggtccaactggcccaccttcaacactcc

SEQ ID NO: 591105 - DNA, 96 bp, Homo sapiens
gctgtttctcaataagcaaaaaggctgctctttggcgtaaattgcaatcgattagggatcgtttctcagaatcaagttagaagtgagagttcagat

SEQ ID NO: 591106 - DNA, 100 bp, Homo sapiens
ctccaccgctcggcagccggcttccctgctcggacgccgagcaccgccaaagcgcacctgcctagagctggaacgttacctccagagcgagccctgctat

SEQ ID NO: 591107 - DNA, 100 bp, Homo sapiens
taaagagctctgatgggctatttgggtgatacccagtgcagtgaactgcaggagccaaaaacctgtatatcatctccgtgaaggggatcaagggacggct

SEQ ID NO: 591108 - DNA, 82 bp, Homo sapiens
ctttccctctcccaacatggcggcctcagaaaaagcttgtggtgaaggggggcaaaaaaaagaagcaagttctgaagttcac

SEQ ID NO: 591109 - DNA, 75 bp, Homo sapiens
gagatctccgaccagtctgggggcgctggcggcctgcgcagccacctcaagtcttctcacaagactttcaggatt

SEQ ID NO: 591110 - DNA, 99 bp, Homo sapiens
aaaaagatacatcaagatatgatcagagatcttcttcgtttatctacaagttcatacagtcagagcccgaacccagccctcaccttctgcgtaaagacc

SEQ ID NO: 591111 - DNA, 100 bp, Homo sapiens
ctctcagccacttccctcccaaccctggtcccaggccctgcacatggacctgcacaggaagagccatgggagaagaaggaatctctgggagcagcccagg

SEQ ID NO: 591112 - DNA, 82 bp, Homo sapiens
cctgaccccaggtgctcctggagagaccccagtctgaccagtgcacaggacttcagggcttcctggtgttccacagctttgg

SEQ ID NO: 591113 - DNA, 75 bp, Homo sapiens
gcaaaggcctgcagtgcgcgcctctaatggtaccaagtgacaggttggctttactgtgactcggggacgccagag

SEQ ID NO: 591114 - DNA, 51 bp, Homo sapiens
acaggactggctacctcatttgcaggcgctggttttcaatacagaataatc

SEQ ID NO: 591115 - DNA, 100 bp, Homo sapiens
ggaagcgtggccggcagcgtcccggacgaggagggtgaggtggctttgaccccgggttgcccggccagcacgaccgaggaggtggctggacagctggagg

SEQ ID NO: 591116 - DNA, 110 bp, Homo sapiens
cgtgctgctgggattcgcgctgctgggcacccacggagcctccggggctggagcatcagatccatgctgctgctgactcggagccccacagcttggcacaggctctctca

SEQ ID NO: 591117 - DNA, 82 bp, Homo sapiens
ctcaccgagacggcgatccgggcgctcgagacttaccagagccacaaggaattctatgagcatgccaaggctctgtgggagg

SEQ ID NO: 591118 - DNA, 96 bp, Homo sapiens
atgttgaagatgtccttaccagctttgacaatacaggaaatgtttggaccagttactctccacaagaaaattcacacaaccacagtgctcttcata

SEQ ID NO: 591119 - DNA, 76 bp, Homo sapiens
aatgaagggtattgccgctgttactgatatacctttagatagccttggataccagttactggactttcattaatca

SEQ ID NO: 591120 - DNA, 100 bp, Homo sapiens
ggtctcccggcgaaagtgagcgaggtttgcccggagcgcgcacgaggtagctacagcaagctgggtagcaggcagatccaaaggatatcatgaagtttcc

SEQ ID NO: 591121 - DNA, 102 bp, Homo sapiens
ctttgaagaaatcaagttcagtactccttccctgtttaattggttggggtcagataagaagaggagtgacaatcaagccaacagtagatgatgactgaagaa

SEQ ID NO: 591122 - DNA, 74 bp, Homo sapiens
ctgctgcttcaatgtccgcatcgcaaccaccgccctggccatctaccatgtgcattttgaaagcgaagcagaag

SEQ ID NO: 591123 - DNA, 100 bp, Homo sapiens
cgcgcacaggccggtggaatgggtccaggccgtggtcagccgcttcgacgagcagaaaacaccaccactcttcagttacaaatagctcgagataaaggac

SEQ ID NO: 591124 - DNA, 100 bp, Homo sapiens
gtgcctggccaacggctcctggacagatatggacacacccagccgctgtgattttgtagtggatgctactcggaaaggaaacaaaattcgatttgcaaat

SEQ ID NO: 591125 - DNA, 74 bp, Homo sapiens
ctcggggcgtctgggcagcctacgctttccgaaagaatcttcaagagggagacatagggaaaaggaagacataa

SEQ ID NO: 591126 - DNA, 100 bp, Homo sapiens
cccgtccgttgagggcccgcgccgcatggaggccggctgaggagcgccgctgcctcgcctcggtctcaccaacggctttgggggtgcgaggagcgagcag

SEQ ID NO: 591127 - DNA, 83 bp, Homo sapiens
gttccttgtggagccggagctgggcgcggattcgccgaggcaccgaggcactcagaggagttcccagtgacctgacagcagag

SEQ ID NO: 591128 - DNA, 75 bp, Homo sapiens
gacaaaaatccagaagtacaagcagtctgatggactctgtgactacatgactaataaaatatggcagaaatgaca

SEQ ID NO: 591129 - DNA, 100 bp, Homo sapiens
gtctcaccgttacccggggcaacagctgagccgtctgggaagggatgcatcttctattgcgtctgcagacatggatttcaaccagctggaggcattcttg

SEQ ID NO: 591130 - DNA, 101 bp, Homo sapiens
gatgcagcaaacagtactgaattatcacttctggcagatgaggactacaaatccctccaggatatcattgccatcctgggtatggatgaactttctgagga

SEQ ID NO: 591131 - DNA, 97 bp, Homo sapiens
agaataatggaagcccctgaataccttgatttggatgaaattgactttagtgatgacatatctgtgcactttacaggtccccgatgaaccaagagaa

SEQ ID NO: 591132 - DNA, 82 bp, Homo sapiens
aggagcgatggcagcgaccgatatagctcgccaggtgtcaggatggctaaaggtgaccccaagaaaccaaagggcaagatgt

SEQ ID NO: 591133 - DNA, 103 bp, Homo sapiens
ggaaggcattgctgggagcctgaaaactgtgaatggtaagtaaggaggtctctgtaccatggctcgtacaaagcagactgcccgcaaatcgaccggtggtaaa

SEQ ID NO: 591134 - DNA, 74 bp, Homo sapiens
acagaatggaaaagagtcttctgattctgaagggagtggtaatggaagtgaagatgcttcaaaggacagtggag

SEQ ID NO: 591135 - DNA, 96 bp, Homo sapiens
cggccacagcgtgctgccgctcgaggaggcggtggagggcttcaagatcactattatcttcaaagcccaccatgagtgtacagatcagaaagtcta

SEQ ID NO: 591136 - DNA, 82 bp, Homo sapiens
tttaatgactttggtgccctcaacatctctcagagacgaaagacagaaagaatttactttcaggttttcttacctaaaggga

SEQ ID NO: 591137 - DNA, 82 bp, Homo sapiens
tcgagagcgtcatcgcccccgactgtggagaagtgtccggggtagccccgttacaggtgctggagaatctggtaaaagcacc

SEQ ID NO: 591138 - DNA, 76 bp, Homo sapiens
cgaaggctgcggttcaacgtgaaggtgatccgagagacacctatggctgccgatgaaggctcagcagagaaacagg

SEQ ID NO: 591139 - DNA, 101 bp, Homo sapiens
actgacttcaagaatgaagccacggacccttgcgtcttccacctggaagccctctctggctaaggacaggcaggtgcccctctctccatcagaggacacct

SEQ ID NO: 591140 - DNA, 78 bp, Homo sapiens
gttagaggaagacgacgagtttgaagagttccctgccgaagaaatgcactcggtgatggaaagagagccactattctg

SEQ ID NO: 591141 - DNA, 100 bp, Homo sapiens
gttcaagcgaaaacatgaccgctgagcccatgagccatcccaatggaaattgcttcgacaggaactgttgaagtacctggaatacttcttgatggctgtc

SEQ ID NO: 591142 - DNA, 75 bp, Homo sapiens
cttaagtctgaatttcggcagaatttaggtgtaatcctgagagattcacatggtgttgcacaagtacgttttgtg

SEQ ID NO: 591143 - DNA, 89 bp, Homo sapiens
cacagttgtctgcaccctgttgtggctctataagcagacaccaactctacaacattacctgtcatatactgaagaatctcttcttccag

SEQ ID NO: 591144 - DNA, 97 bp, Homo sapiens
cctccggagcctgcaacaggagcctggcatccatcagactgtcttcaagctcactgatattttcctctgcttgatccattgtgctgttgagagcctc

SEQ ID NO: 591145 - DNA, 98 bp, Homo sapiens
gtcgactgcccagagtccgcgaatcctccgctccgagcccgtccggactcccccgatcccagctgccccagagcacatcagctatgtgccccagctct

SEQ ID NO: 591146 - DNA, 90 bp, Homo sapiens
tacctaaaagtgggcttgctgggcaagattgtggcagagcgtcctggcactaactcaacaggccctgcacccatggcccctccaagagcc

SEQ ID NO: 591147 - DNA, 76 bp, Homo sapiens
ctcaaatctaaaaaatgtcccttcattgttgcactcaataagttggataacagggcaagattcagaggaagaaaag

SEQ ID NO: 591148 - DNA, 50 bp, Homo sapiens
gcctgcctgcctggcatctctctctcccgatgttcagcccacaagagctt

SEQ ID NO: 591149 - DNA, 75 bp, Homo sapiens
accgtgatgtgacgctggagaacctggcacttatgtcctccctgggactcattaccagagaagctggctgtgcat

SEQ ID NO: 591150 - DNA, 52 bp, Homo sapiens
ctgcagcattgcagccgccaagacgatcttcgcaaatactgtggacaatgcc

SEQ ID NO: 591151 - DNA, 95 bp, Homo sapiens
gcgcgctttttggaattcagttatcaagctttagagcctggctactcacagttgaagcctgattgcagcaagtgagaaacagatggtggtggtgt

SEQ ID NO: 591152 - DNA, 74 bp, Homo sapiens
cttgtggcgaatggggctcacgtcgaattctctcgggcctagccgtccttggaacccgatattcgggctgggcg

SEQ ID NO: 591153 - DNA, 100 bp, Homo sapiens
ggagggggcagtcccgggagaacctgcggcggccggagcggattgcaagtcaagtagctgctttggaccttggctataagcctggggtggaagcaattcg

SEQ ID NO: 591154 - DNA, 100 bp, Homo sapiens
ttccggcgcctccactccgtcccccgcgggtctgctctgtgtgccatggacgggaagcggggagaggtggtgagagatgacccctgttgaggatttcatt

SEQ ID NO: 591155 - DNA, 110 bp, Homo sapiens
cttggggatcctctgtacgcccgttcactgatgccatggacaatattaccaggcagaaccaattctacgatacccaagtcatcaaacaagaaaacgagtcaggctacgag

SEQ ID NO: 591156 - DNA, 74 bp, Homo sapiens
ccaacagtggaattattgacccagggtcaactgtgactgtttcaggtgggtcttcaaacaactctatgataaag

SEQ ID NO: 591157 - DNA, 75 bp, Homo sapiens
accctgagctgcgtgagaacccgcccatgaagccagatttctcccagaatggagatgtatgcatttcgattcttc

SEQ ID NO: 591158 - DNA, 73 bp, Homo sapiens
ctggaggaggaggccatcatcatgaaggacgtgcccgactggaagttcagaatgaccgaagaagcatgccgaa

SEQ ID NO: 591159 - DNA, 100 bp, Homo sapiens
gtgatgttcgcgtatttcttgacaggccatccggctgtccttagagcaagccctgcctcctgagccaaaggaagaaaatgctgagcctgtgagcaaactg

SEQ ID NO: 591160 - DNA, 101 bp, Homo sapiens
aagtttgctgtatagtgaggatcaggagatctgatcctgattgcagaaccttccctgattacagaatcttgggtcctaaaggggatccaggtcagactata

SEQ ID NO: 591161 - DNA, 100 bp, Homo sapiens
taatctgggccaaaaggaatgaccctagccagactcagggatcaaagagcaaacagattcagtggcctgcattgaatgacatcactcctttacatgttgc

SEQ ID NO: 591162 - DNA, 99 bp, Homo sapiens
aggccgggacccggttccccggcccacagtgggggtgtgcaaacccgagagaactggtacttccagcggcaatgtaagcaacagaaaggatgagacaaa

SEQ ID NO: 591163 - DNA, 87 bp, Homo sapiens
caaatggttttgacactccagaagagaggtatcagaagcttaaaaaggtatatgaatggcacctgcccagaaggaaacagctgtaaa

SEQ ID NO: 591164 - DNA, 50 bp, Homo sapiens
ctgcgatgcatgtgatcaagcgagccaatggagatcttcgtggatgatga

SEQ ID NO: 591165 - DNA, 50 bp, Homo sapiens
cacgtctcgtccacgacctccctaggtgtttgcaagagcagacccttgga

SEQ ID NO: 591166 - DNA, 100 bp, Homo sapiens
aatggacttcggaccctggcctcttgggatgcaaagaattcctagaggacctgtgcaacaacctcttgaggatcgaatcttcactcccgctgtctcagca

SEQ ID NO: 591167 - DNA, 100 bp, Homo sapiens
gcactgctggagagattcctgttgttgctatcagaactgctaaaggagagaagtttgtcatgcaggaggagttctcgtaactgtgacatttgatgatgtg

SEQ ID NO: 591168 - DNA, 75 bp, Homo sapiens
ataaggacaaaagccaagaggaggacagttcgctacacagcaatgcatcgaggggaacgcccttttgcttgtgac

SEQ ID NO: 591169 - DNA, 83 bp, Homo sapiens
gatccgggagcacgtcatctccatcgaggatctctggaaacatggctacagaacatgttaatggaaatggtactgaagagccc

SEQ ID NO: 591170 - DNA, 84 bp, Homo sapiens
gtcgcgggccggccccgcggggagcgcccccggcgcgatgcccttcaggaaaggcatatgatgctgagctggctgctccagaat

SEQ ID NO: 591171 - DNA, 100 bp, Homo sapiens
accggtgtcacgtcctgaacatgagcctcctcctctccttctacctgctggggttgcttgtcagtagcgggcaaggtgtcatggagaaactccagctggg

SEQ ID NO: 591172 - DNA, 100 bp, Homo sapiens
aactcagcacctataccaaagcaatgagaatagtagctcttctagtatctgcaaagacaatgcaggtcagaacaaaatctgcttcatcccaggcatggta

SEQ ID NO: 591173 - DNA, 100 bp, Homo sapiens
gggagagaaattcaagcaaattcagagattcagccaccaaggggttcagcttattgacttctcaccttgtgaaagaggtcatgacgccagtcagatcaca

SEQ ID NO: 591174 - DNA, 73 bp, Homo sapiens
catcgccctggccgacaagcacgcaaagctgtaggtaaaacttgcctactgatcagttacacaaccaatgcat

SEQ ID NO: 591175 - DNA, 51 bp, Homo sapiens
gtttgttcaggaaccaccagtgacagagtcacggtctagatcacattctcg

SEQ ID NO: 591176 - DNA, 96 bp, Homo sapiens
gtttagcaatggaaaagataaagtgttttggttttgatatggattatacccttgctggagcaccatactggaccaacacagaaaagatggaaaagc

SEQ ID NO: 591177 - DNA, 82 bp, Homo sapiens
gcggagcccggctcccgcaccatggaggaggacgacagctacggtattagaaaactactcggatgctccaatgacaccaaaa

SEQ ID NO: 591178 - DNA, 100 bp, Homo sapiens
tgccaaggagatggcacgtggagtccccgaacaccatcatgtggagacaaaagagaatgcgaacttcctaaaatagatgtacacttagttcctgatcgca

SEQ ID NO: 591179 - DNA, 97 bp, Homo sapiens
acactagtgccaagctctcagtgctcgaaggcccctggccccaacatggcccgtcgctctcagagctcctcgcagggggacaacccactggcacccg

SEQ ID NO: 591180 - DNA, 76 bp, Homo sapiens
aaacattccaccattcaacaaaagcaagccagggctgagcaggaagaagaattcattagtaacactttattcaaga

SEQ ID NO: 591181 - DNA, 99 bp, Homo sapiens
ggtaccaagaaggggagtgcccgcggcagtgtttatgaacctcagttgcagcaccatgtggctcaaaagaagattccttatgtggatacccaaggacag

SEQ ID NO: 591182 - DNA, 51 bp, Homo sapiens
cagcgcccggcgttggccacctacaggcaccacaccaaccccgtgggcact

SEQ ID NO: 591183 - DNA, 89 bp, Homo sapiens
cagctgtactggagccacccgcgaaaattcggccagggttctcgctcttgggtcaacatatttcactggcacctattcacaagcttgaa

SEQ ID NO: 591184 - DNA, 100 bp, Homo sapiens
caaggccccaggaacattccacatggggctgctccatgagaactgcggaatgttctttatccctctttgtctaatgacgatcaatgatgactctgccacg

SEQ ID NO: 591185 - DNA, 83 bp, Homo sapiens
aattaaagttacagtagatggacctcgggaacccagaagatgaaattctgaaagcagcggtaatgaaatatgggaaaaatcag

SEQ ID NO: 591186 - DNA, 75 bp, Homo sapiens
tgttgatcccggaaaccacaatagcgggattgatctccttaggacctatttgttcccgacaaggagttttctggt

SEQ ID NO: 591187 - DNA, 75 bp, Homo sapiens
acgtgagcccagccgaggtaccgctgaagaggaatcaattttgattattcagcgatgttttactaaccacttctg

SEQ ID NO: 591188 - DNA, 82 bp, Homo sapiens
cttaatagcaacaacacaagaggttctacagcaggaacttcagggcattcacagtttccggattgatctgaagttaaacaaa

SEQ ID NO: 591189 - DNA, 100 bp, Homo sapiens
ctaactgcggcgggcgagacgttctcaggtggggacccatcgtgaagatggcgtggccctgagaggcagccattctcttctgccaaaccaggttccggtt

SEQ ID NO: 591190 - DNA, 100 bp, Homo sapiens
aactgtgaccgatttaaactgcacataccatatgctggagagacattaaagtgtaaatggttgcagttttgtgatgagaacaggaaagcctacaaattta

SEQ ID NO: 591191 - DNA, 98 bp, Homo sapiens
gttggatcacactcgtgcagtcaattatttcagcaaggactttgcctcccgggccaaactggcagttcaaaaactagtacagaaagttggattttttg

SEQ ID NO: 591192 - DNA, 83 bp, Homo sapiens
ccccgcggtcaacgcgcagctggatgggatcatttcggacttcgaagccagctgaggtgggtgtcctggttggcaaagaccgg

SEQ ID NO: 591193 - DNA, 137 bp, Homo sapiens
gatcatgcagatcgaactttttcatcaatttccagagcttggcgaaacagtcagcgtgatacctctgatattaagttacttgtggaaattgttgattacccggacgtcttaaaaccaagaaacctgtgaacaggttc

SEQ ID NO: 591194 - DNA, 51 bp, Homo sapiens
cctctctttcagcagttacccaggtgttacagttcgagtgcctcaaacaac

SEQ ID NO: 591195 - DNA, 100 bp, Homo sapiens
gggaaaatgggatttaaacacccaaaggttgttgatcattatgaaaatcctagaaacgtggggtcccttgacaagacatctaaaaatgttggaactggac

SEQ ID NO: 591196 - DNA, 74 bp, Homo sapiens
ttagcaagagtcctcagaaaacattcagtcctcctgcatatgcccaagaggattgggagtggaatggacaccag

SEQ ID NO: 591197 - DNA, 51 bp, Homo sapiens
aacaaattcatcccagaaatctaagagctcttttggtacaccagaaggcca

SEQ ID NO: 591198 - DNA, 100 bp, Homo sapiens
cagcggccgcgattcggggaggtaggcgctgggccgaggagccaactgggtacatggaaaactcagtctcctacagcgcaattgaagacgttcagctgct

SEQ ID NO: 591199 - DNA, 74 bp, Homo sapiens
agatactacaaaatcagtttatcaaatgcagtcatcatttacatcttcagaacaagagctagagcgattaagaa

SEQ ID NO: 591200 - DNA, 100 bp, Homo sapiens
tctccggggacactcactttgacgatgaggagacctggacttttgggtcaaaagaaactaatctggattcactccctctggttgatacccactcaaaaag

SEQ ID NO: 591201 - DNA, 82 bp, Homo sapiens
ctcagaaagagtactgattcctgtcaagcagtatccaaaggaggcatttggctttattgaaagaggtgatgttgtaaaagag

SEQ ID NO: 591202 - DNA, 50 bp, Homo sapiens
tttgccggaggagcccctcaggccgttgtaagccaatgttgtgaggcttc

SEQ ID NO: 591203 - DNA, 100 bp, Homo sapiens
ttcaagatcgagcagccaccctccaaggaccttcagaacctggagaagcatggaggagcaggacttggagcgaaggttcgagctgctgagccgcgagctg

SEQ ID NO: 591204 - DNA, 100 bp, Homo sapiens
cagacgcggtggagccgccggagtctgagaagcatgtgcagtctttgccaacaaaaaaaattaccaagaaacctattccagatgagcacctcattctaaa

SEQ ID NO: 591205 - DNA, 50 bp, Homo sapiens
gatgtccatggctttgtgggaaggattggaacgagttactatgctgtttc

SEQ ID NO: 591206 - DNA, 100 bp, Homo sapiens
cctggatatgcccgttcagtttacagttcattttttgcttggtttggaaaaatttcattagaggaggaagaacgtgcaaaacgtgaggagctagagcgaa

SEQ ID NO: 591207 - DNA, 100 bp, Homo sapiens
ccccagcagcagtgactccttcggagcccctccacaagttccatctaggcctacgagggccccgcccagtgtcccaagatggagtctcgctctgttgccc

SEQ ID NO: 591208 - DNA, 77 bp, Homo sapiens
cgccgcggcctcttcggctgcggaccctgccattccggaggagacagattatgagggacaagccaagaaactcctgg

SEQ ID NO: 591209 - DNA, 51 bp, Homo sapiens
ggagagaagatggcggaagcggaatgatcatgacgcagtcctgaggtttaa

SEQ ID NO: 591210 - DNA, 90 bp, Homo sapiens
gaaacaggtacctgtggatgtggtcgagatgaaaggtgagacgtggtcttgtaacacagtggttaagaatgtgactttggagccagcctg

SEQ ID NO: 591211 - DNA, 83 bp, Homo sapiens
gctgaggcgtgtgtgcggcaacacctccccgacctctacgctgctgccggggtgaaagacccctgacaaaagacaatcatctt

SEQ ID NO: 591212 - DNA, 51 bp, Homo sapiens
caggaggagcagcctatacaaagagcttatagttgcaacaacatgtatggg

SEQ ID NO: 591213 - DNA, 82 bp, Homo sapiens
tcgcataagagcaaagaatactattgttgccacagggttttgctgttactgctcagtgtagtcacaccttgaataagaaatg

SEQ ID NO: 591214 - DNA, 75 bp, Homo sapiens
tgcaaatacctcacccttcaaagtaccagaactgtggaaggtgcatcagtgaagaaatggaccaatgtgtataat

SEQ ID NO: 591215 - DNA, 99 bp, Homo sapiens
aggggacagccgtggagacggagggcagcggcagccggcatcctccctgggcgagaggacctgaaggagaagaaggagaaggtggaggagaaggcaagc

SEQ ID NO: 591216 - DNA, 82 bp, Homo sapiens
cggggagcgtccggagctagctggatcctctaggcagattctgaggttgggaccaagaaggaactatctattttaaaccaaa

SEQ ID NO: 591217 - DNA, 105 bp, Homo sapiens
ctccgttgcctgctcccggagggagacgcgctgccgaggagaacccagcggagccccccaagatgaacccagtggtggagccactgtcctggatgctgggcacct

SEQ ID NO: 591218 - DNA, 83 bp, Homo sapiens
tttttttttttctgttcagtgacatctggaatttaaactttgggataatgagctgcagtatgtggaccaacttctgaaagagg

SEQ ID NO: 591219 - DNA, 100 bp, Homo sapiens
ggcaagtattgctgtgggtgctgggacttcccgtccgcggcgtggagggtattgttgcagcatctggcagtgagactgaggatgaggacagcatggacat

SEQ ID NO: 591220 - DNA, 90 bp, Homo sapiens
gaaaactacttatgcagaaccagtcttcaacaaatcatcctggagctagatctctctactttagttagaagatgccccaatcttgtccat

SEQ ID NO: 591221 - DNA, 81 bp, Homo sapiens
cgccaaatacgtctgggcagccacggccgggggcgtctttcagagcattacggagatgagtatgatgtatgtgccatttgt

SEQ ID NO: 591222 - DNA, 50 bp, Homo sapiens
tacgactctactgcaaaggagctgactgtggaaactgaagtcattgcaga

SEQ ID NO: 591223 - DNA, 100 bp, Homo sapiens
gtgaggagttgctaaatgctcagcttagaccatgctcagcctccaagcagccttgtcatcgacaaagaatctgaagtttacaagatgcttcaggagaaac

SEQ ID NO: 591224 - DNA, 75 bp, Homo sapiens
tgcatttactgtcatcaagaactgtaatacttctggaatccagacagaatgccccacaggaagccccaagtcagc

SEQ ID NO: 591225 - DNA, 100 bp, Homo sapiens
aggagaataagaaggagtatgtacacctggtatgccagatgagaatgacaggttttgagtgatgaggtgaagaggaagcagtacgatgcctacggctctg

SEQ ID NO: 591226 - DNA, 74 bp, Homo sapiens
ggagcgcggcgggcggcgccctgcacagcctggcgggtaaatgggcttgatactgtgagagtgcctatgtctgt

SEQ ID NO: 591227 - DNA, 96 bp, Homo sapiens
gttgctatagatgtggttccacctaatgtcagggaccttctggatattttacgggaaagagaatgggaatactgcccttggcattgcccggcgcct

SEQ ID NO: 591228 - DNA, 100 bp, Homo sapiens
cccctgccatgaccactgtggagaacaaatccaagattagcacaggtgccgacgccaccgccgagcccatgatcctggaacagtacgtggtggtgtccaa

SEQ ID NO: 591229 - DNA, 100 bp, Homo sapiens
ggagaacctgaagtagcaaaggcaagaaggcaacgacgttccatctgtggaaggacctaccaaccagtgcatgcaagagatgggaaatggaaaggcaaac

SEQ ID NO: 591230 - DNA, 75 bp, Homo sapiens
tggcacccctgatggtggcaagaacagggcggatacctgaccaactcgtgatcctagacatgaagcatggagtgg

SEQ ID NO: 591231 - DNA, 101 bp, Homo sapiens
agggaaagtgaggcagctgcaaggagggcggcgggactgcactcgagtgtccagacctgctcgatggtcatctaatacatgggagaaacatggattttgga

SEQ ID NO: 591232 - DNA, 100 bp, Homo sapiens
cgggatggtgccacaggaggctgtgcgggccccgctccgcttcgaatggattgtgaaccatgcctttagtgaagaggaacattgagccccggcacttgtg

SEQ ID NO: 591233 - DNA, 75 bp, Homo sapiens
atgaccacctagagccttggatccaggagaacggcggctggaaaacggtccggatgtaccccttccagattcaca

SEQ ID NO: 591234 - DNA, 75 bp, Homo sapiens
gtatggcccatcgctcatgccaggagggaacaaagaagcgtgacacctagctcccctgtttgacaaccctaagtt

SEQ ID NO: 591235 - DNA, 51 bp, Homo sapiens
ggacgctcttctccaccacaccgggaggcataatggttatgaaagcttctg

SEQ ID NO: 591236 - DNA, 100 bp, Homo sapiens
agaattggccaaagaagttgagaaaatgggagcagttttcatggatgcccctgtttctggtggtgatgatgaacagtctacacagatggctgcaagttgg

SEQ ID NO: 591237 - DNA, 98 bp, Homo sapiens
ttacgcatttccacttctaatggcagcacgctggctcttctcctgaacttcctcgcctgcctggccagcttctgtgtggaaaccaacaatggcgcagg

SEQ ID NO: 591238 - DNA, 75 bp, Homo sapiens
attccaagtaactcttatttggctgaaagtttagaagagaagaatatggctaaaattcatcgtggtcagctggag

SEQ ID NO: 591239 - DNA, 75 bp, Homo sapiens
gagcatctgggccgagaccattccgtatggagagccggattctggaacttttcaaagcctgactctcttcttgaa

SEQ ID NO: 591240 - DNA, 82 bp, Homo sapiens
cttcgatgttcttctaatactcctcctctaacatgtcagcgttattgtaatgcaaaggatcaaccattttccaggaatgggg

SEQ ID NO: 591241 - DNA, 82 bp, Homo sapiens
cgccgccaccacccactccggacacagaacatccatgatagcagtcttctgtaaatcgaacttttcaagaattctctgaagg

SEQ ID NO: 591242 - DNA, 73 bp, Homo sapiens
ctgaatgatactctggatgcaattgaggttcgagaacttgtcttggacaattgcaaatcaaatgatggaaaaa

SEQ ID NO: 591243 - DNA, 100 bp, Homo sapiens
cttcgcctacgaccgggagttcctccgcaccctgcccggcttcctcatcgtggccgagatcgtttaactatagatcaacacatcatcttgcatctcatgg

SEQ ID NO: 591244 - DNA, 100 bp, Homo sapiens
gtcacagcccccaccagtccaccagtgcagcagaatatgatgaactcggcttcaggtgggaatgagatctcgaaaccaaggtggtgaaagtgcatctgat

SEQ ID NO: 591245 - DNA, 101 bp, Homo sapiens
cgctgactgccggctgcttccctgggctgggcgtcagccgccaccggcagcagcagcaccaccggacgggggcttgtacatgacagctggaatagcctcca

SEQ ID NO: 591246 - DNA, 74 bp, Homo sapiens
ggaagaattgggttgtgacaggagcggttggtcaaagaaaaagtgatgtatgaaaaagaggcaaaacaacaaga

SEQ ID NO: 591247 - DNA, 90 bp, Homo sapiens
gggtgattctgaagagggtctggaggagccttctcaagaacagagagtatctgactgtcttctctcagatgattgcatttcatgatccag

SEQ ID NO: 591248 - DNA, 75 bp, Homo sapiens
tcaccaagccctgttggagactatgcaaaacaagtttatcagcctcaggagtgcaagtagctgatgaagtatgtc

SEQ ID NO: 591249 - DNA, 99 bp, Homo sapiens
ccgcagaccgtctggaaatgcgaatcctaaagcgtttcctcgcttgcattcagctcctctgtgtttgccgcctgggagctggaggatcttcagaagaag

SEQ ID NO: 591250 - DNA, 100 bp, Homo sapiens
agaaaaatgttacagaaagaacaggaacggctacaggggaccgtgattagggtattttccattccagaaggacaaaaactctttgagtttcggagaggag

SEQ ID NO: 591251 - DNA, 101 bp, Homo sapiens
ccgaacctcgggagcccaggacgccctcctgcacatgcgcaggaggctcaatgacagtcgagctttggctaagatcgtgaaccttatagaagaaactggac

SEQ ID NO: 591252 - DNA, 135 bp, Homo sapiens
gaaaaaacaaaacaaatatgaactatgataagctgagcagagccctgcgatactattatgacaagggatgtgtttggccaaatgggagagtggttacaacacacgagctacaaactacaatgctggagacagaag

SEQ ID NO: 591253 - DNA, 100 bp, Homo sapiens
agacagcctgcaaacatataagatctggagacccaatgaacaattggcttctttgcatgcttttggtttgttaccaaaatatacagtgtggtgaaggttg

SEQ ID NO: 591254 - DNA, 80 bp, Homo sapiens
agacaaggagctcagtgacctcctggacttcagcatggccctgggctgcatcttgtacctgctgtgcttccggcagcacc

SEQ ID NO: 591255 - DNA, 74 bp, Homo sapiens
gattgtactggtcgacgacttcagtgatcgagtttgcctatctggggcgcctggctcacgaggttggctggaag

SEQ ID NO: 591256 - DNA, 83 bp, Homo sapiens
agcaggaggagctgctggcgcccgcagatgggtgcggggggcaatggcactgcagctctgggccctgaccctgctgggcctgc

SEQ ID NO: 591257 - DNA, 50 bp, Homo sapiens
aagcaggcgaacccgcggcgcaataacggccttgaaccggggcattgctg

SEQ ID NO: 591258 - DNA, 100 bp, Homo sapiens
cgcttctacactgataacaagaagtttcgagacaaggagtggatcaggccagataagtatggccatttctctcaggagttctggaatttctgtgaagtgc

SEQ ID NO: 591259 - DNA, 98 bp, Homo sapiens
tgtagcagtagatttaggttccttttctccggcaggctcctaagcctaggagagcccgaactggaggtattagaaaactactcggatgctccaatgac

SEQ ID NO: 591260 - DNA, 91 bp, Homo sapiens
acttcactccagtgcctccgacgcctcctgatggtgctggagaatctggtaaaagcaccattgtgaagcagatgaggatcctgcatgttaa

SEQ ID NO: 591261 - DNA, 100 bp, Homo sapiens
ttggatccgcgggacaagaaaattcatgcggtaattcatttgcacacctgttagcaagaaacagaagttgaaggactggaacaagtgaactaggaaagag

SEQ ID NO: 591262 - DNA, 73 bp, Homo sapiens
agaaaaatggtgtgaagaattcaaccactttatttcacagataaaagaatcagagtgtctcaacccttgacaa

SEQ ID NO: 591263 - DNA, 78 bp, Homo sapiens
agatcttcacagcacagttcctgggaaggtggagccaccagcctctccttggtgatctgtgaaaatggttcgctattc

SEQ ID NO: 591264 - DNA, 100 bp, Homo sapiens
cgccgctgggcctgcaggtctctgtcgagcagcggacgccggtctctgttccgcaggatggaagcaatgaggctccccaagaacacacctgaggaaaagg

SEQ ID NO: 591265 - DNA, 100 bp, Homo sapiens
aaggagggcgagcgaggaggatggcggagtcggggctcctgacgacctctgtgagtgaaagccttcagagggaagctgctaagaagcaggccatgaaaca

SEQ ID NO: 591266 - DNA, 75 bp, Homo sapiens
tcaaggccaagtatccgccagtcaataggaagtacgagtgttgtggcagcactgcctgaaggtatgagaccagat

SEQ ID NO: 591267 - DNA, 99 bp, Homo sapiens
cttagagttattcaaggggatggagtagatattaataccttacaagagcatcctttcctgaaactggccaaaccgttatctagcttgacaccactgatc

SEQ ID NO: 591268 - DNA, 100 bp, Homo sapiens
ggatgagactgggaaaccgctctatggggacgtgtttggaaccaatgctgctgaatttcaggaccttgaccctgctgttcacagccagggggaccctcag

SEQ ID NO: 591269 - DNA, 85 bp, Homo sapiens
acaagcgaatggctgacagcctggcctccaaagtcaccaggctcaaatcggtgtgacagtttgggagttgatgaccttcggggca

SEQ ID NO: 591270 - DNA, 100 bp, Homo sapiens
cggcgccgagaggccgtgcgggacgcgggcgccaggaccggccgaacgcagagagacaagaggagcagcagcggcaccgcccctcaccctggagggtcct

SEQ ID NO: 591271 - DNA, 100 bp, Homo sapiens
ctgcggttggggcgggaagagccggggccgtggctgacatggagcaggtccagatggctgtggaggccaagtttgtccaggacaccctgaaaggagacgg

SEQ ID NO: 591272 - DNA, 117 bp, Homo sapiens
ggcagcggtcccagcggcagcagcagcggcgggaggagcctccgggacaagttggatggcttgaggactggtactaaaaggaaacgtgactgggaggccattgccagcagaatggag

SEQ ID NO: 591273 - DNA, 100 bp, Homo sapiens
cagccactaaggctcagattgttaaagctctcaaggcaatgactcgaagtttgcagtatggagaacaggtggtgaaaactattggcttgagggaagtttg

SEQ ID NO: 591274 - DNA, 100 bp, Homo sapiens
ggacatgcaactaatagcccttgaacagctatgcatgctgcttttgatgtctgacaacgtggatcgttgttttgaaacgccggattcagaagccagccag

SEQ ID NO: 591275 - DNA, 90 bp, Homo sapiens
aaccctgaagatatttagagatggtgaagaagcaggtgcttatgatggacctaggactgctgtcacagttgcagattatatttctagagc

SEQ ID NO: 591276 - DNA, 82 bp, Homo sapiens
atctgtcttcggtggactccttcggcagtccacccaccgccgccgcctcccaggcattgaagttgatatcgatgtggagcac

SEQ ID NO: 591277 - DNA, 99 bp, Homo sapiens
agaacggtcaaggagattatgtctacgtttacagagagaaaaggaacagttccgtaagctctttattggtggcttaagctttgaaaccacagaagaaag

SEQ ID NO: 591278 - DNA, 75 bp, Homo sapiens
gccagggcagcgtcaagagtctgagccaggagtgaatcccagccacctgatgaacctgttcacctacgagaaggg

SEQ ID NO: 591279 - DNA, 100 bp, Homo sapiens
tctccgcaaatttcctgccggcaaggtccttccatagtgacgccccccaaggacatctggaatgtcactggtgcccaggtgtacttgagctgtgaggtca

SEQ ID NO: 591280 - DNA, 100 bp, Homo sapiens
cagcgaccacaagatcgtcttctttaaaggtttgaaatatctccattcagctggcattttacatcgagacattaagccagggaatctccttgtgaacagc

SEQ ID NO: 591281 - DNA, 82 bp, Homo sapiens
atgcggacctctctgggctggctattaaggaaggtgctcgggtcttcggggcactgggtcccatcggtccctcctcacctgg

SEQ ID NO: 591282 - DNA, 49 bp, Homo sapiens
tggcttcagcgcagtatattactgcagtttgcagacagtaggttgcatg

SEQ ID NO: 591283 - DNA, 100 bp, Homo sapiens
ccgggcgcgggcagagcgcggcggcgcggtactatactggcaattgctggagaagattttgcaattgttgcttctgatactcgattgagtgaagggtttt

SEQ ID NO: 591284 - DNA, 100 bp, Homo sapiens
tggggtgtcagcggccctgggttggagcacagagatggagttttaacattgaatgcggagaacactaattatgcctatcaagttccaaacttccataaat

SEQ ID NO: 591285 - DNA, 75 bp, Homo sapiens
cgtcctccagctgttatctggaagggttacacatcattttggaatgactgtatatcatctggattacgtggctgt

SEQ ID NO: 591286 - DNA, 106 bp, Homo sapiens
ttacaggcttgagccaccactcccagccaacagaattcttttcaacagtcatactaatagtgcctttctatgactgctatgagcccatggtgagaatggctggagc

SEQ ID NO: 591287 - DNA, 90 bp, Homo sapiens
cagacattgagctcctccctgtgaactcagcattgctgcagctcgtgggtgctcagagacatcatctcattatgttgcccagactgatct

SEQ ID NO: 591288 - DNA, 75 bp, Homo sapiens
aacctgaggagccgggggaagctggccttggggttgtagcagataccaatataagcgccatagcagctcagcttg

SEQ ID NO: 591289 - DNA, 97 bp, Homo sapiens
ggcgctgcaaacgccacacttttgctctacgaagaacctcctcgcgactttccaagaattcaattcgtcataatctgtccctacacagcaagttcat

SEQ ID NO: 591290 - DNA, 90 bp, Homo sapiens
atcagttcgaagagcagcattggaaactctgtttacgttattatcaacacaggaccaggcactgtacaaaacgagttaaacagacatggc

SEQ ID NO: 591291 - DNA, 75 bp, Homo sapiens
ggagatttctttggcatgtccaacagttatgcagagtgctacccagccacgctacaggttcattttcctgacgac

SEQ ID NO: 591292 - DNA, 100 bp, Homo sapiens
gtttcgagtgggacaaggattgatagaaagatttagcatgtagactgctggggcaatcaatggatgaaagtggattaccacagctgaccagttatgattg

SEQ ID NO: 591293 - DNA, 82 bp, Homo sapiens
taaaatacccgcaacagccccttcgtcccaaggggatatgagactttctactcggaatatcctgagtgttgcgtggatgtaa

SEQ ID NO: 591294 - DNA, 82 bp, Homo sapiens
caggaaactgcaaagactgggaagttcttaaaaaggttgagccagtgatacagagaggccatgagagtctggtgcaccacat

SEQ ID NO: 591295 - DNA, 80 bp, Homo sapiens
cttctgagctccagggtcaggcagtatgattgaagtttctaagccagctgccactggtgacatgccaacttaccagatcc

SEQ ID NO: 591296 - DNA, 90 bp, Homo sapiens
gaagcagacgccatgactcaggacgcccagaatgccttgagaagaggaccctgtggttttggcatttgacattgagacgaccaaactgcc

SEQ ID NO: 591297 - DNA, 50 bp, Homo sapiens
gatctgcagaagacgcagggctcaagaaggaggcccaagttgcagcccgg

SEQ ID NO: 591298 - DNA, 75 bp, Homo sapiens
ggaatcaagtcttctagctaaattagaagattctacaagggggttgctcctctctggatgagacagataccatac

SEQ ID NO: 591299 - DNA, 75 bp, Homo sapiens
agaagaccgcagtgggataaatctcaaagatctcgtacaagatccttctttcgatgaaatctacattgctccttc

SEQ ID NO: 591300 - DNA, 100 bp, Homo sapiens
tgcagttctggggaaccacacagccagagagctacaactagatgcttttgaagtagaaaaacaggcattgttgaatgaacatggtgcagctcaggaacag

SEQ ID NO: 591301 - DNA, 100 bp, Homo sapiens
cactgatacgctgggactcgtacgagaacctcagtgcagatggagaagtaaataacagatgcgggtgaaagatccaactaaagctttacctgagaaagcc

SEQ ID NO: 591302 - DNA, 80 bp, Homo sapiens
cccagccccagcacccccaaccacaggtcaaaatgcagatcttcgtgaaaacccttaccggcaagaccatcacccttgag

SEQ ID NO: 591303 - DNA, 99 bp, Homo sapiens
gtgtgagaactgcctagaaggttatgttcacgacctcgagggaaattgcatcaagaaaggttcaccaatttttaaaatccaaatatatctcatggtaca

SEQ ID NO: 591304 - DNA, 98 bp, Homo sapiens
cttttactaacctcgtgagaaaagctttacgtctcattcaagaaaccgaagtgatttccagaggatttacactgtgactctgacatcattagaagcat

SEQ ID NO: 591305 - DNA, 112 bp, Homo sapiens
gtagaaaccaaaaaaccagaggttgcttcctgggtgcactttgataatttgaaaggagttaacaccgtcaccaccttggtggagaacaagaaagctcagctggtggtgattg

SEQ ID NO: 591306 - DNA, 112 bp, Homo sapiens
acctcacttccccggggtgtaataatgttaactgagttggttagtctgctgctaattggaattgctgcgtggggcattggcttcgggctgatttccagtctccgagtggtcg

SEQ ID NO: 591307 - DNA, 107 bp, Homo sapiens
ggttagggcagacgctgtgctcgctggcaccccgaacgggttgcttcccccgctgcgaggtttggtgcacctcgatttggaggaagtagggcagggcccttatctgg

SEQ ID NO: 591308 - DNA, 86 bp, Homo sapiens
gtgatgttggagaactacagaaacctggtctccctagaaagaaatttcagagcttccaagaccacaaacttaaaataagtaaagaa

SEQ ID NO: 591309 - DNA, 75 bp, Homo sapiens
acaactgtccacgtaggcattcaccccagcaaggtggtaatagacaaacatcctgtccggttttttgtacataag

SEQ ID NO: 591310 - DNA, 107 bp, Homo sapiens
aaagaagctgctgaaaacagaagttcacctgcacatcttgttttccctaacatcaagaatgctggatagaacttatactggcttgcagactcttggagcagagacgg

SEQ ID NO: 591311 - DNA, 100 bp, Homo sapiens
cgaagtcggggaggagtttcatgaagagcccaaaacctattacgaactcaaaagtcaaccgctgaagagcaggctacccacctttctgttctgagacccc

SEQ ID NO: 591312 - DNA, 90 bp, Homo sapiens
gccgccgccgccttgctgctgctcaaagctgctgccgccccttgggctaaaaggtgatggagagcaccccttcaaggggactgaaccgag

SEQ ID NO: 591313 - DNA, 90 bp, Homo sapiens
ctcctgaagaagattccactcgtggtatgagagtggataatataatcaactcctctgcctggaattacatgaacgacagccttcgcaccg

SEQ ID NO: 591314 - DNA, 90 bp, Homo sapiens
tcatcacggccgctgccagggtccttagcacagacattttgacgtctgatgcaggctgggaagaatactttgattacatctttccagaag

SEQ ID NO: 591315 - DNA, 83 bp, Homo sapiens
tggggttcggcgctatggaggagctcgatggcgagccaacagtcactggcccactgatgatggtgaagaagagatggaagaag

SEQ ID NO: 591316 - DNA, 83 bp, Homo sapiens
cagaggatggcgcctgtgggcacagacaaggagctcagtgacctcctggacttcagcatggaggcatacacggaatacctgag

SEQ ID NO: 591317 - DNA, 95 bp, Homo sapiens
cgtctgcctgtacaccgagtgcagccactcggccctgcgccgcgacaagtacgtggccgagttcctcgagtgggccctgaccctctattctgcac

SEQ ID NO: 591318 - DNA, 95 bp, Homo sapiens
ttattcatggagacatccgctaaaacatcaatgaatgtaaatgaaatattcatggcaatagatcaaaggtccatcatcaaaacaccaaagactca

SEQ ID NO: 591319 - DNA, 99 bp, Homo sapiens
agcaaccagtgagtgaccttggaagtggatccttcccccgaaagcccggctttcagatatcagttttagagaatgtggcgtggagaaattctcaaggaa

SEQ ID NO: 591320 - DNA, 74 bp, Homo sapiens
gggtgcgagcagcgcacttccggcccacaatgccccgctgagccggtgcagcagctgagtggatccaagcagag

SEQ ID NO: 591321 - DNA, 75 bp, Homo sapiens
tttgcagtggtcatctatttccaggactataagacctacttggactttgtccttgcattagaaaacagaaaggaa

SEQ ID NO: 591322 - DNA, 82 bp, Homo sapiens
cctcctaagtagctgggactacagtacctggagtagaacagaaaaattattatgtctgtgttcccttgggactcattggaaa

SEQ ID NO: 591323 - DNA, 111 bp, Homo sapiens
caacaagccccggccctcagagctcagccggatgagcgcagcccagagacagcagcttctgagcacgtttgccgtggacgggaaagattgcaaggtgaataaagaagtgga

SEQ ID NO: 591324 - DNA, 74 bp, Homo sapiens
cctcctcgcagcagcgccatgggcagctggtggaatttttgaagaaaatggaatctcgaggccccctttcgtgc

SEQ ID NO: 591325 - DNA, 115 bp, Homo sapiens
gccacaaagtgaccaagaacgtgagcaagcccaggcacagccgacgccgcggggattttttatcaagcagaaatgcatcgaacaacgagaatcaagatcactgagctaaatcccc

SEQ ID NO: 591326 - DNA, 100 bp, Homo sapiens
tcgggaaccgttccacagcatcctgagtgtcctgaagggactcactgtgcccattgccagcatcgacattccctcagctatacacagaatgggattttac

SEQ ID NO: 591327 - DNA, 98 bp, Homo sapiens
caaaatacaaagaaattaccctaaaacatttagagcagtttgctacagaagtgaaggtggtgtttttaaggctcatcttactttcccaaaagattatc

SEQ ID NO: 591328 - DNA, 100 bp, Homo sapiens
ctggaccccaacaggtttaaccccaagaccttcttcatactgcatgggtgtgtccgcagccggccaggtggtatccctgaaggtgtggctgattgacgac

SEQ ID NO: 591329 - DNA, 74 bp, Homo sapiens
tatgaacaaaaccagtctgatgtgagctggcgttacagcccaaagatgatattgtagaccgagcaaaaatggaa

SEQ ID NO: 591330 - DNA, 51 bp, Homo sapiens
caagggtgttcccgaactagagtgggtgctatcagtgctaaagcattcatt

SEQ ID NO: 591331 - DNA, 80 bp, Homo sapiens
tgttatttggctctgaccggatggagctgctggcgcacctgctggctattggtgtcagcaaccagagggaaaccactgta

SEQ ID NO: 591332 - DNA, 75 bp, Homo sapiens
aggaccatcctgggtgctggccctgtgctggagttggtgaggtaacatacgtggagctcttaatggacgctgaag

SEQ ID NO: 591333 - DNA, 97 bp, Homo sapiens
aaacttgtttgagtgggctaagaactccccactgaacaaagcagaggtcctgcatctccagtatggaatgtatgtttggccctgtgctgtggtcctg

SEQ ID NO: 591334 - DNA, 82 bp, Homo sapiens
cggcggcggcggcagcagcggcagcggcaagcaccgggatttgggagcagcttgtcttacacaaggacgaaggaaaaggtca

SEQ ID NO: 591335 - DNA, 75 bp, Homo sapiens
tcattgatgtggtggaaggaaacaggaaagtggagaatgaggacatgaataaagaccagatcttgctggaaaaag

SEQ ID NO: 591336 - DNA, 100 bp, Homo sapiens
ctgtctcttcgtcaccttcgacctgctcttcatctccctgctctggatcatcgaactgaattgtgtctatggcggagttctgagaggaactgggaagcag

SEQ ID NO: 591337 - DNA, 75 bp, Homo sapiens
cagtggcctttatacgaacaatccaggtctttgatttgcgtcagtgtcatcgacagatgcagcagcaggcggcta

SEQ ID NO: 591338 - DNA, 100 bp, Homo sapiens
accagagtgacttcgtggggcagacggtggaactgggcgagctgcggctgcgggtgcggcgggtcctggccgaaggtgccctacgagacgctgaacaaac

SEQ ID NO: 591339 - DNA, 82 bp, Homo sapiens
tcagtctccccggggcgctacggaggtagtcaccgccacatccaggactccttccacagagattcatggaaacagctattct

SEQ ID NO: 591340 - DNA, 94 bp, Homo sapiens
tccactttcgccagcccgtgccgcgagcgcggcctgcaggagacctgcctagagctggaacgttacctccagagcgagccctgctatgtttcag

SEQ ID NO: 591341 - DNA, 74 bp, Homo sapiens
cgcgcaggagaagctggagctcacggagaagaaggcctccgacgaacaagatcactcaaggtgaaggataatct

SEQ ID NO: 591342 - DNA, 135 bp, Homo sapiens
attgctggagtcatcgcgggcatcttgctgttcgtgattatatttcttggagttgtgttggtaatgaagaaaagggacacagcaggtcaggagagattcaacagcattacctcagcttattacagaagtgccaag

SEQ ID NO: 591343 - DNA, 83 bp, Homo sapiens
aagaacaagatgatcaagatggctcttcatggaaatgcattgtcagatctattccagaggggagcttcaccacttcattgacg

SEQ ID NO: 591344 - DNA, 75 bp, Homo sapiens
cagcaggcactggctcagagccttcaagagcaaaaaaatccagttacactcttaaaggaattgtcagtgataaag

SEQ ID NO: 591345 - DNA, 88 bp, Homo sapiens
aagaggaagaggaggagaggccggggacgagcccgcctccagctccaggccggtccgctgccagaatcttgtggaagaagaatgaagt

SEQ ID NO: 591346 - DNA, 98 bp, Homo sapiens
gagtttcttcatctacaacccgcgcttctggccgcgggaaggagagctttactgtctttcacaagcgccttttatatcctgtcaatcatctgtgtcgg

SEQ ID NO: 591347 - DNA, 75 bp, Homo sapiens
attttagggtcctttatatagaagggagagtagttacacaacagccaatgcggagtctgacaatgagcgggactc

SEQ ID NO: 591348 - DNA, 83 bp, Homo sapiens
tgctgcacttccagcagcaacaggtgtggacactgccagcggctgcagccgacttggaatgacctgggagacaaatacaacag

SEQ ID NO: 591349 - DNA, 75 bp, Homo sapiens
ttccgggaagccatagctctgcatgaaccttctgataacttaagagagattctccaaaatgtggccagattgcag

SEQ ID NO: 591350 - DNA, 74 bp, Homo sapiens
tcgcctttgccgatccgccgcccgtccacacccgccgccaggggggtacatggtatggagtagacatcaacaac

SEQ ID NO: 591351 - DNA, 95 bp, Homo sapiens
acacattgctgagcttgaaatccagactggattatggacagaacttggaaatattgagaataatttcttaaagccacttcatataggacttaata

SEQ ID NO: 591352 - DNA, 100 bp, Homo sapiens
agcacgtggaattcgcgaagctgccaaagccttagacaatgccattgataatagtaaactcaattgcaattgtgttacttttattatttggatgaatatc

SEQ ID NO: 591353 - DNA, 74 bp, Homo sapiens
gctgatcccaccgcggatttccatcaccagggccgagaacgacagccctgggcgctgcctatggcacagccaag

SEQ ID NO: 591354 - DNA, 82 bp, Homo sapiens
tcagagaagactctcttagtgactcttccaggtgtggtggacacaggcctattcatcaacatggctgagagagtctactttg

SEQ ID NO: 591355 - DNA, 100 bp, Homo sapiens
cggatctcaggcaacctggatgctcctgagggcggcttcgatgccatcctgcagacagctgtgtgcacggtccctgtacccctacccgaccggcgtcgcc

SEQ ID NO: 591356 - DNA, 75 bp, Homo sapiens
gaagtgcccgaggagagttaacagcaaacggggattcagcgtccgatcctttggaacagggactcacgtgaagct

SEQ ID NO: 591357 - DNA, 80 bp, Homo sapiens
aggatttatggagctgttgggcatgtggatgaaggcagcccaatggatccaatggtgatgaagagacctcagttgtatgg

SEQ ID NO: 591358 - DNA, 100 bp, Homo sapiens
aatgcacaattctatctcttgggcaatcttcacggggctggctgctctgtgtctcttccaaggagaagtttcggtgtccgacatccctgtctgttgttaa

SEQ ID NO: 591359 - DNA, 87 bp, Homo sapiens
acgttccttgaggaggtttgaaaaaggtaagacgtgaccttttgaggtgactataactgaagattgctttacagaagccaaaaaagg

SEQ ID NO: 591360 - DNA, 100 bp, Homo sapiens
ggaatgctcctaaatgatcgcaaagtaaatattcatcgcaatttgtctccaggaattccagtatcagtacaaacagaagaaagttggctccaagatttgt

SEQ ID NO: 591361 - DNA, 83 bp, Homo sapiens
ctactgcctgcctgcctgcctgctacggttgacatcatggacatatgtgagtccatcctggagaggaagcggcatgacagcga

SEQ ID NO: 591362 - DNA, 101 bp, Homo sapiens
gcgctgcacctctacctgtggctctttctgctgggcctgcccttcaccctctacatgctgactccactggaacccattctctgtacacaacatacaaagat

SEQ ID NO: 591363 - DNA, 116 bp, Homo sapiens
atttccatcggtccttacagccgctcgtcagactccagcagccaagatggtgaagcagatcgagagcaaggacctgaaggagaagaaggagaaggtggaggagaaggcaagccgga

SEQ ID NO: 591364 - DNA, 97 bp, Homo sapiens
cgggaggaaggaacgaggcaaggagctaaagcagcgtgcgttcagccctgggaactgccattggatgtccagaatcccctgtagttgataatgttgg

SEQ ID NO: 591365 - DNA, 82 bp, Homo sapiens
ctgcaccaagtggcgaaggagccggctccaagtgtccccaactcctgcccagccagtccacgcggtgccggctcctccagtt

SEQ ID NO: 591366 - DNA, 75 bp, Homo sapiens
caggatacttgggactacacaaaccccaatctcagtggacaagcaccagtggcagttcgcagcctccaggacttg

SEQ ID NO: 591367 - DNA, 100 bp, Homo sapiens
gtcaccctacctggcagccagtgataagtgattcggaatgtcaagtttaagatcctggatgcggtggttgcccaggagcccctgcaccggggcgggggcc

SEQ ID NO: 591368 - DNA, 87 bp, Homo sapiens
ggagtctctgtccgggggcctggctaaggaaaccctattacctccagggcaatttgcatatttctccaaagaaccatccagaacctg

SEQ ID NO: 591369 - DNA, 95 bp, Homo sapiens
gatctttctgcccgcctgagtgatcttgaaatgaataggttgaaatcacaaagattagacacctttttagataggtgttcttcagcaccactgac

SEQ ID NO: 591370 - DNA, 100 bp, Homo sapiens
ccacccagtcccacttcaaacattcgtctcggaaaccccgcctcttacagtcacgaggttggatggcaagcatgtggtgtttggcaaagtgaaagaaggc

SEQ ID NO: 591371 - DNA, 95 bp, Homo sapiens
ctggacgattgcttagaggagtatttcctgaactgtgtggatgagggaattggagttcgtaattggtccgaggccctgaacctaataaatgccag

SEQ ID NO: 591372 - DNA, 76 bp, Homo sapiens
attggcatggcggacctcaccaaggggtacctgcagtgggtcgctttgctgttcgtgatatgagacagacagttgc

SEQ ID NO: 591373 - DNA, 100 bp, Homo sapiens
cctccgggaccggagtcagaaccctccgcagagtaaagagtctaacgtgaagacattttgctccaagaatatcctagccatccttggcttctcctctatc

SEQ ID NO: 591374 - DNA, 85 bp, Homo sapiens
ttgccgggccgcggcgtggagccgggcaggagccgcgagccagctgcgcgaagagttcttggagtctctgcggagtccctgggcc

SEQ ID NO: 591375 - DNA, 51 bp, Homo sapiens
gaagtccctccaccggctctgtggaatcagagatcattgatttcttcctgg

SEQ ID NO: 591376 - DNA, 87 bp, Homo sapiens
gcaatcctcacattcaagctgataggctgcgctaccggaatgtcatccagcgagtgattaggtggagccccctgagctgcccgctga

SEQ ID NO: 591377 - DNA, 50 bp, Homo sapiens
ctgcgcgactacccacgcgtgacaggtgctggagaatctggtaaaagcac

SEQ ID NO: 591378 - DNA, 100 bp, Homo sapiens
tggagatgattaaaacggaatttacactgacagaagcagtggtcgaatccagtagaaaactggtcaaggaagctgttcagcagactgtacaggatctttt

SEQ ID NO: 591379 - DNA, 135 bp, Homo sapiens
agatgatggggccacgatcgtaacaggatgtcacgacggacaaatatgtctctgggatctttcagtagaactgcaagtgtgggccatgtttgaggattgccccagcattcagttctatgagtaataaatatccac

SEQ ID NO: 591380 - DNA, 102 bp, Homo sapiens
ataaagatggaaaaagtcgtggaataggcactgttacttttgaacagtccattgaagctgtgcaagctatatatgaaatccacgatgggatgaacctggagc

SEQ ID NO: 591381 - DNA, 100 bp, Homo sapiens
ctcaaggaggcccaggccgtgccggccaccctcccggagctcgaggccaccaaggcctctctgaaggtttggcagcgtgcccttcaccaagaacccggag

SEQ ID NO: 591382 - DNA, 50 bp, Homo sapiens
ccgagctcatggagaccggggatgctccttccaactcctcagaacctcca

SEQ ID NO: 591383 - DNA, 75 bp, Homo sapiens
cctttctctgctttaacgtacttttaaaagacaaatttacatgtattggagaccagaccagaagcccttctgaat

SEQ ID NO: 591384 - DNA, 101 bp, Homo sapiens
ctctcatttgccaggattttttgtacgtcctgatctaggacccaggttgtgcagtgcctatgggtctctatgctgtcgtagaattttgccaaaaggaaagc

SEQ ID NO: 591385 - DNA, 75 bp, Homo sapiens
gaattaccttatacagatggcaagatatggacaactaagtgagaaggtatacactgaatatcctcgaagaaattg

SEQ ID NO: 591386 - DNA, 75 bp, Homo sapiens
aggtgggcggctttgaccgagaggctgctggagctcgtgtttggacgcgtactaggttttgacaagcttgcatca

SEQ ID NO: 591387 - DNA, 100 bp, Homo sapiens
ggtccaaacaatcatgggaatttccaaggggattcaaacttcaacagaatgtggcaaccaggaaaactgtttgtatgtggtggctttgatggttctcatg

SEQ ID NO: 591388 - DNA, 116 bp, Homo sapiens
cgcagagggctcctccggcgccgccgagctgcgcccgctgccttcacaccccggacatccgcgccacacacccaacatgagtgaagtttcctgcaagaaacgggacgactatttgg

SEQ ID NO: 591389 - DNA, 97 bp, Homo sapiens
cccaggacctccatctcccaatgttggagaaatttggagagcttgtaatgaccaaagaatcaaaggccttgatgggactctaccatggtcaggtcct

SEQ ID NO: 591390 - DNA, 129 bp, Homo sapiens
accggagaccccgaaaacggaagcgcagggagaaggaagaggtgtttgaaaaggctactgcagcactggggtgtcagttgttggtccgacccagaacgcttcagttctgctctgcaaggatatataata

SEQ ID NO: 591391 - DNA, 100 bp, Homo sapiens
gccagaaggaagatggcggatctggaggagcagttgtctgatgaagagaaggtctcggcgcggaagatggccggcggcgtggacggccccatcgggatcc

SEQ ID NO: 591392 - DNA, 100 bp, Homo sapiens
aaggcccacctgtgtcctggttgagggtctccagggttctttggggcccgaggacaaggagcatccaagatacctgatcccagaactttgcaaacagttt

SEQ ID NO: 591393 - DNA, 104 bp, Homo sapiens
tgacaagaaatgttccaccaggacttgatgaatataatccattctcggattctagaacaatccgtacaggtttacagcaccaaataatctggccctgtcagccc

SEQ ID NO: 591394 - DNA, 87 bp, Homo sapiens
tggagtatgaagagacatgagatcatggtggccaaacccacaggaatgaatctgaagtctgctgcagtaaaacacagaaggctttaa

SEQ ID NO: 591395 - DNA, 100 bp, Homo sapiens
gccctcggtgtaagaccaccaaatatcggaacccctccttgaagctgatggtgaatgtgtgcggacacactctccaatcctgaggcaaaagaaacatttt

SEQ ID NO: 591396 - DNA, 96 bp, Homo sapiens
agagaccgtccgaggtaattgtctgccacgagtgcacattctgaaaacagggcagagcggcttgggtaaatccaccttaatcaacaccctcttcaa

SEQ ID NO: 591397 - DNA, 83 bp, Homo sapiens
gtgctactgtgcgctcgatccagcaccatggggaagcgggacaatcgggtgtgcacttacatttcaatcgaccaagttccaag

SEQ ID NO: 591398 - DNA, 75 bp, Homo sapiens
aaagaagaagaattcctcactaatgagctctccagaaaattgatgcagaattatatccagatcgagagacagaag

SEQ ID NO: 591399 - DNA, 100 bp, Homo sapiens
ccaaaacctgcattgataccaaggaaggcatcctgcagtattgccaagaagagttcgcagtccctgattatcgttcctctcatcttgaagtgagtcaggc

SEQ ID NO: 591400 - DNA, 132 bp, Homo sapiens
acacggctgtgtttgatgtccggctgagtgggaagaccaagacagtgcctggataccttcgaataggtgcccgtccgtgatgatgggaacatgcccgacgtgcccagccacccccaggaccctcagggcccc

SEQ ID NO: 591401 - DNA, 75 bp, Homo sapiens
atctgtcttcggtggactccttcggcagtccacccaccgccgccgcctcccagattttcatcttcattggagaga

SEQ ID NO: 591402 - DNA, 51 bp, Homo sapiens
cgtggatgtgaagatttcctctaaaaggcagtatttggcagtcgtattcag

SEQ ID NO: 591403 - DNA, 98 bp, Homo sapiens
gtgactttgactgtgaggaccgaactgatgaagccaactgccctgccaaggggccaagggatgagctggggccctccttcccaatggcatctccccct

SEQ ID NO: 591404 - DNA, 75 bp, Homo sapiens
tgcagcacatcagcgaccgggagaacatagacggtttggcaaacatcgaaaagatgacaagattgagaaaacggg

SEQ ID NO: 591405 - DNA, 100 bp, Homo sapiens
gttttccaaaaacttgtagaaggttgtgaaaaaactactaggatcacgcggcatgtattgaggattctttccttcctcaagagattatcatcaaagtcga

SEQ ID NO: 591406 - DNA, 116 bp, Homo sapiens
aaaatgggtcaggcgtgaagcatcacattgccagtgacatagcttcagacagataacggcaaaagcttctatcatttttgttactcttcagtacaatgtcaccctcccagcaacag

SEQ ID NO: 591407 - DNA, 80 bp, Homo sapiens
gaaacacctaggaagggagaactgtgccctctggtggtcagaagatgctgtgctgtctcgttaggatgaatggattaaaa

SEQ ID NO: 591408 - DNA, 75 bp, Homo sapiens
cgaagacatagaaatgaagtgacagtggaactgcggaagagcttttcatcctactataaaggaggatttgaacag

SEQ ID NO: 591409 - DNA, 100 bp, Homo sapiens
aaagctctggctgagccctgcgcggtcctgccgaccgtgtgcgctccttatattcccccgcagagagacacctatggctgccgatgaaggctcagcagag

SEQ ID NO: 591410 - DNA, 75 bp, Homo sapiens
gatttatttcagtgattcgctcaggcttgatagttctgaaatggatcacagtgaaaatgaagattacacaatgtc

SEQ ID NO: 591411 - DNA, 100 bp, Homo sapiens
tgcagggcatttccttcgggatgtattcggctgaagagctcaatgattcgcctttgccagtctcatctcgtgtctgctttgttaagttccatgatccaga

SEQ ID NO: 591412 - DNA, 100 bp, Homo sapiens
cagccccggctgcccactcgcctcacctgagcctggtgctacacacgcagggccctgtcgatggcagcctttacgcgaaggtgaggaagaaaagctcctc

SEQ ID NO: 591413 - DNA, 100 bp, Homo sapiens
ggaatggagacacggcttcccccaaggaatatacagttctcactgtcaccggggagccctgccacttccccttccagtaccaccggcagctgtaccacaa

SEQ ID NO: 591414 - DNA, 100 bp, Homo sapiens
gcacccccggccccggagctgcctggaggcggccgcactcggactgtgccctgtccacggtgcctcctgcatgtcctgctgccctgagctgtcccgagct

SEQ ID NO: 591415 - DNA, 100 bp, Homo sapiens
gtggagacatagcaccattgtattggacactaatgataagcgtttgtccaatggttctatagactcaaccgatgaaactagtcaaatagttgaactacaa

SEQ ID NO: 591416 - DNA, 51 bp, Homo sapiens
gatgaagacagatgcaccaacgaggctgcctgctgtttcccggggagatca

SEQ ID NO: 591417 - DNA, 97 bp, Homo sapiens
gactccttgcttccccccagctccctgtgcagatgcagccagcaggaaagtccagggccaaggcttgtgttcaatcgtgtgaatggccggcgggccc

SEQ ID NO: 591418 - DNA, 101 bp, Homo sapiens
ctggaaaggagaaggaataagacggcaggaggaagagagagagaggagtggagactgctgcacggactctggaaccatgaacatatttgatcgaaagatca

SEQ ID NO: 591419 - DNA, 75 bp, Homo sapiens
tcgctacggaccttaaaatacccgcaacagccccttcgtcccaaacttgccttcaaggtgtgcaagtaaggactt

SEQ ID NO: 591420 - DNA, 50 bp, Homo sapiens
ttaggatcttgttgaatccagtccaggctctgattgtactttctccacaa

SEQ ID NO: 591421 - DNA, 100 bp, Homo sapiens
caccgtttacaaggccagagataagaacaccaaccaaattgtcgccattaagaaagccagcgagaccgaggagaatggctccgacagcttcatgcattcc

SEQ ID NO: 591422 - DNA, 100 bp, Homo sapiens
cacagatctacatctgtctccagaaaccagcagatattcctgcgggacatagaacaggtgccacagataaagccaccaatccttccaaccgccaggagga

SEQ ID NO: 591423 - DNA, 98 bp, Homo sapiens
gcatttcagtcactggtttgcagagtccagggagtacctgacaggcttccacaagcggaaggtcgagcgaaagaaggcagccattgaggagattaagc

SEQ ID NO: 591424 - DNA, 83 bp, Homo sapiens
ccggaggcggcggcggcgagcggttccttgtgggctaggtgtttcccattaaacactaccaggacaaaatcaggccttacatc

SEQ ID NO: 591425 - DNA, 100 bp, Homo sapiens
tgatgctgttggtcgatgtagatcagcgattttctgctgttcaagtacttgagcatccctgggttaatgttcggaacctcacttacatggtgacccgcag

SEQ ID NO: 591426 - DNA, 49 bp, Homo sapiens
gaagctgcagccgcacctggccaagggagccccgcaagtgagccagcca

SEQ ID NO: 591427 - DNA, 100 bp, Homo sapiens
acaatatttcagaggtcatgtcaaaagaggtgctggagctggcaggtaatgcttctaaggatctcaaagtaaagcgtatcactccgcgtcacttgcagct

SEQ ID NO: 591428 - DNA, 87 bp, Homo sapiens
cagatctcacctaccaggtgtcggagtctgacagcagtggggagaccaagtcggagtctagccagtcagaggcgtctgtccggaggg

SEQ ID NO: 591429 - DNA, 78 bp, Homo sapiens
acagctcatcatgatggacttggagctgccgccgccgggactcccgtcccagcagattctgaaagtcaagaagacatc

SEQ ID NO: 591430 - DNA, 100 bp, Homo sapiens
ccagaactcaagtaggtagtgaataccgggagtcctggccccctaactcaaaagctgccttgaatctggcctacatcctaatccccagcattccccttct

SEQ ID NO: 591431 - DNA, 75 bp, Homo sapiens
gggcttcttcacggtgcctccggaacacagggactggacctacagagacatctgggattttctgcgtcagctgtt

SEQ ID NO: 591432 - DNA, 74 bp, Homo sapiens
atctacgtctaaactgcagaagtttacaaggccgactcgcgggccgctgcacccaccgccaaggacaaaaggag

SEQ ID NO: 591433 - DNA, 101 bp, Homo sapiens
gaggggctccgggtcttccagagcgtgaagatcaagatcggctactgcagcactggggtgtcagttgttggtccgacccagaacgcttcagttctgctctg

SEQ ID NO: 591434 - DNA, 83 bp, Homo sapiens
cagcggggcggcggcggcggcggctgcggcccaatatagccgcttacaaacacgcagatggcaagaagattgatggcaggagg

SEQ ID NO: 591435 - DNA, 98 bp, Homo sapiens
tgtcctgtcaagatgaaccatttagagatcctgctgtttggccaccccctgttcctgcagaacacagatgtcctggagcttctcatcggagagttgcc

SEQ ID NO: 591436 - DNA, 82 bp, Homo sapiens
cacagattccagcttcggaacaagagaccctgtccaaaagaaactcttccttcaaaacctgtgaagaaagagaaggaacaga

SEQ ID NO: 591437 - DNA, 100 bp, Homo sapiens
tcttgtatctctaattggaagcaagtggaagtttccagagaaaacagccatcaaagaaggttgagagtgagaattaagagacactggagaagatcaagag

SEQ ID NO: 591438 - DNA, 75 bp, Homo sapiens
ggaaacttgccttatcaccttcttgcttgcagagatgagcatcaggattttatggatgagcaaaaacgactaaag

SEQ ID NO: 591439 - DNA, 101 bp, Homo sapiens
cggcgcggtagcgaaggccgccgaacctgcctggctagccggcgacttgagtgacgatggtatcctgaggtgcggcaccactgtcccaacactcccatcat

SEQ ID NO: 591440 - DNA, 101 bp, Homo sapiens
ggttcctgctgtggttttgatcatgttgttaccctcggacgtagcccggcttgtattggggtgaatcatttgatgtaaaagacttgactccataatctgca

SEQ ID NO: 591441 - DNA, 99 bp, Homo sapiens
atcgcctgggtggttgttggcgtgtccctgcagcgaaggatcctggttgtccacaggtcctggctaccctgggaagagacaagaagtaaatgaagaaag

SEQ ID NO: 591442 - DNA, 96 bp, Homo sapiens
tccgccgccgagaggaggcctatgagaatcagggatgccaaggcctgcgtagtacacggcagtgatctaaaggacatgacctccgagcagctggat

SEQ ID NO: 591443 - DNA, 82 bp, Homo sapiens
aagacagtccctggatcaccgacagcacagacagaatccctgctaccaacttcatctgcagagagaaagagacgattacctg

SEQ ID NO: 591444 - DNA, 74 bp, Homo sapiens
gtatctcaattgcggggcttactgctgatgctagactgttatgaaaggttttacacccctgtacatggcagcac

SEQ ID NO: 591445 - DNA, 90 bp, Homo sapiens
catgaagcgggctggcggcgctgccgctcccgggcggccgcgggcgggccaggtcagagcagcccaccatgggatggggagggggtggag

SEQ ID NO: 591446 - DNA, 82 bp, Homo sapiens
agaagtgcttcagcgggccaggaagcgcatccaggagacaatgcagatcttcgtgaagactctgactggtaagaccatcacc

SEQ ID NO: 591447 - DNA, 75 bp, Homo sapiens
gcagacagaaccgcggagcttcagggtggaagattcgtggaaactttgccaaagccccacagtcttcgttataac

SEQ ID NO: 591448 - DNA, 101 bp, Homo sapiens
ttgaagtgcctctggctgaagccatccccttggctgatcagccacatctgttgcagtgctttgccaaagatcattaaggctgggtttgcagcactccaact

SEQ ID NO: 591449 - DNA, 82 bp, Homo sapiens
agggacagtgggcagtgctcccggaacacaagctgtgaaacactaggtaatctgtaagtcagatgctccaacaggggatgtt

SEQ ID NO: 591450 - DNA, 100 bp, Homo sapiens
tacacgaagaactaagaatattattagcacaagagcaccatactttgagggagcacatggatgaagtatgctcctcgcagcttctaacttcagtaaggcg

SEQ ID NO: 591451 - DNA, 100 bp, Homo sapiens
atgtctactggtcccatagcagaaagctggtgttacacacagattgtgccttgccagtacatgctgcagacaatgaaggatgagcaagttttctacattc

SEQ ID NO: 591452 - DNA, 100 bp, Homo sapiens
caaggaggaaattgtgatctgcgatcgagcctcggtcaaggaggaacctagaaagattgtacaatgaatggtgattctcgtgctgcggtggtgacctcac

SEQ ID NO: 591453 - DNA, 82 bp, Homo sapiens
ggcagtttggcgacatttctcggccgaagggccatttgcttttgcggagatgatatcatcaagttgaatcgaaaggaaggga

SEQ ID NO: 591454 - DNA, 82 bp, Homo sapiens
gacagtgaggaaagggccgcctcgtctccgctcctgggggaccgcaggagccttcacgtaaatgggtccagtcatgcctccc

SEQ ID NO: 591455 - DNA, 100 bp, Homo sapiens
aacattctgctgcagctgcggcagggccagctgaccggccggggcctggtccgggcggtgcaggccaggtcagagcagcccaccatgggatggggagggg

SEQ ID NO: 591456 - DNA, 87 bp, Homo sapiens
agcctagggaggcgaggttcccgcaccggatagtgttgaacttgaccctcatcgacctcccgggtatcaccaaggtgcctgtgggcg

SEQ ID NO: 591457 - DNA, 74 bp, Homo sapiens
atgaagtggtttgtgagattgaaactgacaaggaaatctgaaatagagtactatgctatgttggctaaaactgg

SEQ ID NO: 591458 - DNA, 83 bp, Homo sapiens
ggcaattgccacacggtggggcccaacgaggcgctggtggtttcagactaggactcaatgaaattgctgcccccatgttcctg

SEQ ID NO: 591459 - DNA, 98 bp, Homo sapiens
aactctccacagccatcactcatgtccataaggaggattgtgtcacggtggagagaaactcaaaacttcctggagagaaatggaggtgtcatcctggt

SEQ ID NO: 591460 - DNA, 90 bp, Homo sapiens
gacttgcatcaggagtagcaatactggagaaaatgaaactgggattgacccatcaagatgcttggctcaataagaaaaccacgttaggag

SEQ ID NO: 591461 - DNA, 88 bp, Homo sapiens
cggaagaccgccgggaggaccgacgtgcaggcatcaagcatgatggaaccatgtgtgatacctgccgccagcaaccaatcattggcat

SEQ ID NO: 591462 - DNA, 83 bp, Homo sapiens
cccggccggcctgcacgatgcacacgccggacttcgcaggcccagacgacgcgcgcgcatttggtgccctggttgtcagatgt

SEQ ID NO: 591463 - DNA, 110 bp, Homo sapiens
aagatcaagaagttcagtaaaacccgatccaagattatatctgggtgttggcacccagccactattctgccaatgaagtacatcctggtcacgggtggggtcatctcagg

SEQ ID NO: 591464 - DNA, 100 bp, Homo sapiens
ccggacaaaggaagctcctcagcctccagttgcttctctgtgcatgcacatcagtcactgatctcacctactggtcaaacaggatttatgcatcatccat

SEQ ID NO: 591465 - DNA, 100 bp, Homo sapiens
gtggccggaggagtctcagagctgtcagaaagatcctaagtgtgaacgtgaagtccccagccctgctgctgagccagttgctgccctacatggagaacag

SEQ ID NO: 591466 - DNA, 100 bp, Homo sapiens
gaaagaagtcattccttttttgaagatacatactgccatgaaagaaagctcacctttatttgatgatgggcagccttggggagaagaaactgaagatgga

SEQ ID NO: 591467 - DNA, 85 bp, Homo sapiens
aatgtgttaccaagacatcttggatcccctgctacttcagtgcctggaatggattcccaaatgctggaaaatcctctttgctaag

SEQ ID NO: 591468 - DNA, 75 bp, Homo sapiens
atacattcctgattacctgccacccattgtgtcttctcaagaagtttccacgggctcccttgctcagcagtatgc

SEQ ID NO: 591469 - DNA, 85 bp, Homo sapiens
aatacgaagccagattgtttcggttatagatgataagggcaacgtcctgccccccggcacagaaggagacattggcatcagggtc

SEQ ID NO: 591470 - DNA, 100 bp, Homo sapiens
acccgcaagcatgcccaccactgccacaaacgccgcaccaggtcttgtagcagcgcctcctcggtgatcgaggagttctacaaccagacatgggtccacc

SEQ ID NO: 591471 - DNA, 75 bp, Homo sapiens
cgtcttcctatccttacccgacctcagatgctcccttctgctcctggttttagctaaagaagatactgaggcagc

SEQ ID NO: 591472 - DNA, 144 bp, Homo sapiens
gaaaagaagcttcccccaccaccccctcaagccccacctgaggaagaaaatgaaagtgagcctgaagaaccatcgggattggtagcttatgtcgatcttgatgaaagagcaattgatgctctcagggaatttaatgaagaagga

SEQ ID NO: 591473 - DNA, 76 bp, Homo sapiens
tgtgtgcagcacagaaactctcaaatgcttaaaagatgatgaggagtctgatgaggaagctgtgaagaaaaccaac

SEQ ID NO: 591474 - DNA, 75 bp, Homo sapiens
cggaaagtccggcaaatgatagagcagaagctggtagttatgaaatgacaaatcaacatgtaaaacaaaatggaa

SEQ ID NO: 591475 - DNA, 90 bp, Homo sapiens
tggagctttcctaccagaccctgaaattcacgcatcaggcgcgggaagcggctcttgtcaggatggtgaagctgttcatcggaaacctgc

SEQ ID NO: 591476 - DNA, 88 bp, Homo sapiens
ttcctcatcatcaaggatcaggaccgcaagtcccgtcttatgggacttgaggccctcaaggtggtttcctagaaacatgattgtttat

SEQ ID NO: 591477 - DNA, 101 bp, Homo sapiens
ttttacttagtagaacatcgtgttgctcaggcaacaggagagactcctatagcagtcatgggcgaggagcagatgtctcaagtattagatgccatgtttga

SEQ ID NO: 591478 - DNA, 76 bp, Homo sapiens
caggcagtgtaggcgacgagaccaattccgcagtacagagcattcagcagggagcgcatggagcttttggaagaag

SEQ ID NO: 591479 - DNA, 87 bp, Homo sapiens
agaatcaactgagagagatgcttaaaaatcaccagttactttaatgagtgaaatgacaatggatgctctgttggctcgattgaaact

SEQ ID NO: 591480 - DNA, 90 bp, Homo sapiens
tatagctccagcgggtccccggcaaactccttccacttcaagggtcagttaaatgaaagcatggaccatgggggagttggaccatatgaa

SEQ ID NO: 591481 - DNA, 99 bp, Homo sapiens
agtatgcggcgccaggagctgtgtgtgatcctgtaaaattaaatcttccaagatgatctggtatatattaattataggaattctgcttccccagtcttt

SEQ ID NO: 591482 - DNA, 82 bp, Homo sapiens
ctgcagtacctgcagaaggtctctggagacatcttcagcaggcaggcactggtcgaccactacagcaagctctctgcagagg

SEQ ID NO: 591483 - DNA, 83 bp, Homo sapiens
gtcaggtggcaaaaacattgaacttgctgtcatgaggcgagatcaatccctcaagttgaaacattgtagtcggtatatacatg

SEQ ID NO: 591484 - DNA, 82 bp, Homo sapiens
ggcgtgggaacccaggccccgccgaggcggccaggtgccagaaccctgtggagcatcatgaactgggaagagtagctgagcc

SEQ ID NO: 591485 - DNA, 100 bp, Homo sapiens
atcctggacgaggcgcaagtgctggcgagccagatgcggaggctggcggccgaggagctgggggtcgtcaccatgcaggcacacaaaccaatggtctgga

SEQ ID NO: 591486 - DNA, 51 bp, Homo sapiens
gtaaaggccaagatccaggataaggaagggcgataatctgatggctttggc

SEQ ID NO: 591487 - DNA, 75 bp, Homo sapiens
cttctgtttcttctgcaacatctcagggaaattgcaaagaagattctttggcaagttatgaattgatatgcagtt

SEQ ID NO: 591488 - DNA, 100 bp, Homo sapiens
tcggggctccagtggagagttcttacggcctgaggagcgatgcgacaggcatgatggaggtcgagtcctcctactcggacttcatctcctgtgaccggac

SEQ ID NO: 591489 - DNA, 75 bp, Homo sapiens
ggacgccgcgatcgtggggcccgcgaggcgggcagccggggcgtccaggttcttgggtgtctctggggagtccct

SEQ ID NO: 591490 - DNA, 50 bp, Homo sapiens
agctggagaacgcggctaaagttctgatgccaaggaagtatcgcctgggg

SEQ ID NO: 591491 - DNA, 95 bp, Homo sapiens
taccagatcaacgtcctccgggaccggagtcagaaccctccgcagagtaaaggtgtgggtacgccacgctgcatcacgtcattgacaagtccaca

SEQ ID NO: 591492 - DNA, 51 bp, Homo sapiens
gtgcgctagatgctgtcaccagagaagcaagaaccagttcacagaagtgtg

SEQ ID NO: 591493 - DNA, 104 bp, Homo sapiens
ccgagcgggcggcttcctggcctgggcgctccggtggcggcggagcggggatctgacgagcttttctctacttgtgtcactaacggaccgtttatcatgagcag

SEQ ID NO: 591494 - DNA, 83 bp, Homo sapiens
agaacctgcaaccatggtcgtgccactagccagctcggaagcccagggggatatgagactttctactcggaatatcctgagtg

SEQ ID NO: 591495 - DNA, 96 bp, Homo sapiens
tcccaaaaggagaaacagctgttacaaatgctgctgccaactgtcctggccaaatgactctgcatcacaaacctttccttgcatgtggaggggatg

SEQ ID NO: 591496 - DNA, 100 bp, Homo sapiens
gaacgcggtggtgagagcacacgtcctcgtctcgttcctgatcgaacgtggtgacatatgaagatccatgagaaggaccctaacagtgccacagccacag

SEQ ID NO: 591497 - DNA, 101 bp, Homo sapiens
caacagacactacacatctgtcctccacagaggctttttgtgtgttttatcatctaaaatccaatccctcggattctgatcttcgaagtgcacttcttttg

SEQ ID NO: 591498 - DNA, 82 bp, Homo sapiens
cgccaatggggagcagaaggactcggacacaggctggcgcccatgcggctctacacgctctccaagcgccactttgtcctcg

SEQ ID NO: 591499 - DNA, 90 bp, Homo sapiens
aggactccgggaacgccaccgactgcaagccaccagtcacaggaaaacctccctgccctgcccaatcatggggaatttcagaggtcatgc

SEQ ID NO: 591500 - DNA, 107 bp, Homo sapiens
ctggggtctggctctgccccttttcttcttctgctgggaggttggggtctctgggagctctgcagctgcatccagatctcattatgcatcagaaaaatgaaaaaaca

SEQ ID NO: 591501 - DNA, 75 bp, Homo sapiens
ttcctagagagccctttcttttctccagaagatatggcttttgaagatggagtctcactctgtcgcccaggctgg

SEQ ID NO: 591502 - DNA, 83 bp, Homo sapiens
ctgcatcccagaggagcgcgtccaggagcggacccgacaatgcagatcttcgtgaagactctgactggtaagaccatcaccct

SEQ ID NO: 591503 - DNA, 74 bp, Homo sapiens
agaatcacgccttctacagactgcagccactgcggcccagattcgggaactggagcctctcctctgtcacagtg

SEQ ID NO: 591504 - DNA, 75 bp, Homo sapiens
cctggggcccggggtctcctacgtcgtgcggaagtccattggaatattaagcccaggagttgctttggggatggc

SEQ ID NO: 591505 - DNA, 75 bp, Homo sapiens
ctttgctgctgtcagtatcaccactggtcaagcagattccaaattacagaaatgcagtcattgtagctaagtctc

SEQ ID NO: 591506 - DNA, 74 bp, Homo sapiens
gcatgtccaacattcagggtgtctatagcccgattggaggagatgttaaagtaacccatcttgcaggacgacat

SEQ ID NO: 591507 - DNA, 50 bp, Homo sapiens
gaggatggaacacttcagtgcattcaagattcacaatgacatcctttcaa

SEQ ID NO: 591508 - DNA, 60 bp, Homo sapiens
ccttctactttctgtctctaggaatttcactactctagtttgcctgagaatacagatcaa

SEQ ID NO: 591509 - DNA, 100 bp, Homo sapiens
cgcaggacgtgcagctcgggctcttcatggccgtcatgccgactctcatacaggcgggcgccagtgcatcttctagaccttagctggatctccaaaatac

SEQ ID NO: 591510 - DNA, 98 bp, Homo sapiens
ctgcgattgaggaagagcgagccagcgcccggagcaagcggagctcccccaagagccggaaagccagcacaggccagccagaagatgacactgagact

SEQ ID NO: 591511 - DNA, 100 bp, Homo sapiens
aaacaaccccaaataaaggaagtggaaccacttcaggttggaaagggcaaagaaattacaagaacagcgagaaaaggaaatggttgaaaaacaaaaacaa

SEQ ID NO: 591512 - DNA, 50 bp, Homo sapiens
ggaaaagcgaggcaaggcaggcgggccacccctgttctccgatgtgtaag

SEQ ID NO: 591513 - DNA, 100 bp, Homo sapiens
tccaatggccccgtggaatcggtcaccctggagaacagcccgttggtgtggaaggaggggcggcagcttctccgacagtcaatcagacatttacaagaag

SEQ ID NO: 591514 - DNA, 98 bp, Homo sapiens
ggatctggaggagcagttgtctgatgaagagaagatatggatcagaaactttcgaagttggtagaagagctcacaacttcaggagaaccccgactaaa

SEQ ID NO: 591515 - DNA, 82 bp, Homo sapiens
cgagtcgttcctgggcaagctgggcggcaccctggccaggaagcggagggcgcgcgaggcagcccctgtcaaagggaacagg

SEQ ID NO: 591516 - DNA, 100 bp, Homo sapiens
tacagggaagtctataagctttgcaacagaattacagagtatgatgattttttatcaagcagaaatgcatcgaacaacgagaatcaagatcactgagcta

SEQ ID NO: 591517 - DNA, 85 bp, Homo sapiens
ccacagacggaacctcagatttgcccctcaaactggaggctctctccgtgaaggaagaatattccaacccgggaccggctagagg

SEQ ID NO: 591518 - DNA, 89 bp, Homo sapiens
cgcattttggcattgacatttaattttagggtcctttatatagaagggagagtaggagacggtggctcagggagtaaaggaaggccagt

SEQ ID NO: 591519 - DNA, 82 bp, Homo sapiens
ggaaggaggggcggcagcttctccgacagagcacgtgaattgcctctgcttacgttcaggccctgtcctaaacccagccgtc

SEQ ID NO: 591520 - DNA, 75 bp, Homo sapiens
tattgccctgtcttcatcaacatttaatcaatggacacatactggattcaaagagatatgccgttattggagcag

SEQ ID NO: 591521 - DNA, 101 bp, Homo sapiens
agaggatgtggtggtctactctgatgtcaatcttgagggctaggctggctacagcaaacatcattcaagatgtccagcaaagggagcagcacagatggcag

SEQ ID NO: 591522 - DNA, 124 bp, Homo sapiens
ccctgggttgcagagaacacagacgtctcgaagggacagagaaggacgcaccattgtgtactgggcattgtgcctctgcaaggccaaggagaggacaagcgacgcgtggcccacctgggctgcc

SEQ ID NO: 591523 - DNA, 100 bp, Homo sapiens
tgaaccatgtgcgggtccccagggagaacatgctgagtcgctttgcacagcctccagctcatctgttcatccatcaccagcccttgcccaccctggcccc

SEQ ID NO: 591524 - DNA, 100 bp, Homo sapiens
agttaaaggcccagatgataggaatcccatctcatttaggacatgtcatccagtgacagtgactcggactgggatggaggcagccgtctttcaccatttc

SEQ ID NO: 591525 - DNA, 98 bp, Homo sapiens
atggatatactcaattacacttcgactctcaaagcaataccaggatagctgttgtttcagagaaaggcaccttcaagatccagaagacgaggctgcag

SEQ ID NO: 591526 - DNA, 98 bp, Homo sapiens
gccgatgggaaacccggagaccaaatccttggaaaacacagatcctggtgccgaacatgaggacagggcaggccgaaggagaaagtggaaggagggga

SEQ ID NO: 591527 - DNA, 74 bp, Homo sapiens
ctgcttttctggagcgcttaccagtccctggtacgtgagcccctttcccggcgccggcagctgctccgggagaa

SEQ ID NO: 591528 - DNA, 76 bp, Homo sapiens
gggaagctcattgaagcagaggacaacatgaactgccagtctctcaagtttccaagaacttggaaagccaccacgg

SEQ ID NO: 591529 - DNA, 50 bp, Homo sapiens
atgcagtcatgtatcctgtgtttaatgagatgatgattattccccacctt

SEQ ID NO: 591530 - DNA, 90 bp, Homo sapiens
acacactgggattacaggtgtgaaccacaacacctggctctctttgttcctaattgaaattgccaaaggaataccaaattgacatatttt

SEQ ID NO: 591531 - DNA, 100 bp, Homo sapiens
gacaagttccatcccacctttgagtcaggtcagcccaaggccaaccccactgtcactctgttcccgccctcctctgaggagctccaagccaacaaggcca

SEQ ID NO: 591532 - DNA, 97 bp, Homo sapiens
ctgcagggcgcggaggaggatggcgccctttggaaaggagcacgaggctttaatggggtgctggagaatctggtaaaagcaccattgtgaagcagat

SEQ ID NO: 591533 - DNA, 50 bp, Homo sapiens
ctccgccaagaggcgccgcaggaggtgttggaaatcaatagctcttctag

SEQ ID NO: 591534 - DNA, 80 bp, Homo sapiens
cctcagttggaagcagccgatccagcctgcggagcctgtggggcagggggacttgatctcatcttcatgccaggccttgg

SEQ ID NO: 591535 - DNA, 100 bp, Homo sapiens
tgactccataatgcaactggtagccacagagtacttattcattcatttcccagatcatcatgaaggacacttaactgagtagctatccagatcacaagga

SEQ ID NO: 591536 - DNA, 98 bp, Homo sapiens
tgtgactggattcacgggtagagattggcttcgggctgagctagcagtgagcaccttttggcccaatgaatatcagggtgctggtcaagataaactag

SEQ ID NO: 591537 - DNA, 82 bp, Homo sapiens
cttggactgagtcctgcaggacacagccttatgccagcctggaccatcttggaggcagtgtaggatcatggaagaactttga

SEQ ID NO: 591538 - DNA, 103 bp, Homo sapiens
tcctccgagggaggggggttgtgaccccagaccattactgggacttccacccccaccacgtgcacagcgagttcgagagcttcgccgagaacaacttcacgga

SEQ ID NO: 591539 - DNA, 90 bp, Homo sapiens
cacgcaccttctgccagctgatcctggaccccatcttcaaggtggagattctggacgcaaagacaagggagaagctgtgtttcttggaca

SEQ ID NO: 591540 - DNA, 75 bp, Homo sapiens
gacacatcagcatttgtttcccttagccagcccgagcaagtaaagattgatgagattgtggggaacctgggtgaa

SEQ ID NO: 591541 - DNA, 100 bp, Homo sapiens
ttccaggacttcgacctggagccgtcccaggactgtgcaggggactctgtcacatgctacaaggtgagctgcctggaaatccctgggccctctggcccca

SEQ ID NO: 591542 - DNA, 83 bp, Homo sapiens
atgaagtgcttaattcaaggtcacacaatgtcggggatggacctccagatttccttactggagaagacagactgctgctttgg

SEQ ID NO: 591543 - DNA, 87 bp, Homo sapiens
ggcaactccagggtgtctggtccacgacctatcctaggcgccatggtatgccattgcattggccttaagggaaaagcagcgtgtaat

SEQ ID NO: 591544 - DNA, 82 bp, Homo sapiens
tcagttggaagcagccgatccagcctgcggagcctgtggggcagatgagtgaccgaggaggtggcgttcctttgaggaaaat

SEQ ID NO: 591545 - DNA, 74 bp, Homo sapiens
gggcggagagaactcagcgaggattctgagcctttccgctgtgcccattgccattactcctgcaacatatctgg

SEQ ID NO: 591546 - DNA, 100 bp, Homo sapiens
cctacactagtcgcgggagccacgcagaggacgccggaacaccctggaagccgagaaatgagccataagtgtgatccttggtgacaggtggaagaaaatg

SEQ ID NO: 591547 - DNA, 100 bp, Homo sapiens
ggatgagttgcttttaggcttgctggcccgcggggctgtccaggcacgcgaggcccctcaggagcctctgaagctcccaccaggccagctctcctcccac

SEQ ID NO: 591548 - DNA, 75 bp, Homo sapiens
atcttcggaccccccaacaccctctacgaaggcggctacttcaaggttctcctgaaaagaaagctgaacattcat

SEQ ID NO: 591549 - DNA, 82 bp, Homo sapiens
gcgagtctctggagaagccgcagcgcgagttgccgccgctgctgcccggggccggttccagggtctccctccactgctgtag

SEQ ID NO: 591550 - DNA, 98 bp, Homo sapiens
attcattgagaaatatgacaagtctctccaccaagccattgaggcgctgggccccctgccccgtgaggacggcaacctgatgctgcacctgcagcgcc

SEQ ID NO: 591551 - DNA, 75 bp, Homo sapiens
ggcggcgctgcggccacccggcaggaaattggccttgcctctctgggtgcacctgatgaatacattgaaaagctc

SEQ ID NO: 591552 - DNA, 82 bp, Homo sapiens
tctggattgtgatgtgatcgtagctgaggtgacctggtactgcttgatgtatgtccccttacacttggtattgaaactgtgg

SEQ ID NO: 591553 - DNA, 88 bp, Homo sapiens
cagacagcggcatacagaatgcctatgaccggcgtcgagaatttcaactggcatcctctggtatcacgattccaaaacccccaaagcc

SEQ ID NO: 591554 - DNA, 100 bp, Homo sapiens
ctgggcaggctcggcagggcaggcagctccaggagggaagcgagtcacgtcccagcgctgctccctggagtttctggaagatgccgtgggatgcgctcca

SEQ ID NO: 591555 - DNA, 50 bp, Homo sapiens
cgaggacacaccgctggatcagtgtaaggaatatgaagccatctacctag

SEQ ID NO: 591556 - DNA, 101 bp, Homo sapiens
cagctttcgtgtgccttgacttttatgtacttacagcaggatcacagaagaactgcagcttcctggggagcagtttcacctccacaggcatcgcttcatac

SEQ ID NO: 591557 - DNA, 100 bp, Homo sapiens
catccgccactgcgcagggcggctgggcagctatgtcatcaacgggcgcaccaaggagtggatctgattgccgtcaatcaataatacctttgaccaaggg

SEQ ID NO: 591558 - DNA, 75 bp, Homo sapiens
tggttgttggcgtgtccctgcagcgaaggatcctgcattactctactgactggcagagacaggagaggtagatgt

SEQ ID NO: 591559 - DNA, 100 bp, Homo sapiens
gaaaagtggcactgaggctctggaacttctgcccagctctccttggtatctttcagatgaaggcattgaagcttgcacaagctctccagacaaagtcaat

SEQ ID NO: 591560 - DNA, 100 bp, Homo sapiens
tgcctgggggctgaggatgacaaaaaagccttcataggtgtatccagggcagcagtatctgcaaggaggccagtatgcacccagcaccgcccagtttgcg

SEQ ID NO: 591561 - DNA, 90 bp, Homo sapiens
gagaagtggctgttctgaagagagatgggcgatatatatattacttggtaactataactacccaatattgcagccatggagtccatgctt

SEQ ID NO: 591562 - DNA, 101 bp, Homo sapiens
cagatgagctgccctcggcgggcggcgacggcggcaaatctaagaaattttttgcctgagaatacagatcaacccacagaacaaagcggatttccaaggca

SEQ ID NO: 591563 - DNA, 90 bp, Homo sapiens
cagcgtcgagaagggcgactactacgaggcgcaccagatgtaccggaccctgttcttcaggatcccgctgcacaagttcacgtccatccg

SEQ ID NO: 591564 - DNA, 155 bp, Homo sapiens
cgctctttccacctgatgtgattgcaagcatcttttcttctgcatggtgggtacccccatgctgtggcacggcttcaggcgaggattaaatccaccacacagggtgaaatctatctccatgacaacattcacacaacaggaaattgaattcttac

SEQ ID NO: 591565 - DNA, 98 bp, Homo sapiens
gtgaagtcctacagagttatcaggttccagaccctgccttctcttctgaaagagtttccaggatggcttctgcatcaacttctaaatataattcacac

SEQ ID NO: 591566 - DNA, 75 bp, Homo sapiens
gaattttcaagatgagagttgttttttattctccacagtaaaaggaaagttctttgtgctggagtctcagaatgg

SEQ ID NO: 591567 - DNA, 100 bp, Homo sapiens
agtttaaaaagaaatggtgtaaaagttcctggtgaatatcgaagaaaggagaacggtatgaggtttatataactttccaagacaaggaagttgtgcaaag

SEQ ID NO: 591568 - DNA, 75 bp, Homo sapiens
ctcctgatcgggacagtgtctttccacctttggatccgcagaaatcgaggtgctgactgggttacttttttaaac

SEQ ID NO: 591569 - DNA, 82 bp, Homo sapiens
ggacagtggagtctggcatcttattgttgtctgatgatccatgtccagtagaatccaagaaaacaaaacgagcaggagaaat

SEQ ID NO: 591570 - DNA, 100 bp, Homo sapiens
caaaccaccctctcctgaccctgaagaactgtgatgatgaaactgaggcacaaactgcttaatgaacttgtccatggtaaagaagaaaggaccctggata

SEQ ID NO: 591571 - DNA, 48 bp, Homo sapiens
tttgtaaaagcatcaataatgactgtctgcaactttacagatggtgca

SEQ ID NO: 591572 - DNA, 101 bp, Homo sapiens
ctctgttgccatcagcaactgtgatggtctgaaactgttttggctgggcctacttcacctataccttctctgggaaatgtgagtgaaactgcatctggatc

SEQ ID NO: 591573 - DNA, 110 bp, Homo sapiens
gattgtgtaggcgttggtcttctgatagcaactttaatgtgaaatacacatggcttgataaaagccattatgcacttactacaaatgcaagctcttaaggaaggacaagg

SEQ ID NO: 591574 - DNA, 100 bp, Homo sapiens
atggtattggcaggactgcgaccagagatcgtgttggacattagctcccgagcgctggccttctggacatatcaggttgtaggtcataaagaaggtctgg

SEQ ID NO: 591575 - DNA, 75 bp, Homo sapiens
aaatgttgggaggtgccatgactttcgggaaactgcggatgtcattgccaaggctggaatgcaatggtgtgatct

SEQ ID NO: 591576 - DNA, 100 bp, Homo sapiens
tgaggagcgggatctaacccaggagcagacagagaagctgctgcagtttcagggagatgtcctttgcttctcagatgtaaatgcactttaagtttgttat

SEQ ID NO: 591577 - DNA, 76 bp, Homo sapiens
gccaataccaccgtcggccgcatccgtttccacgactttctgggagactcttttctggatatgccgcagaaggatc

SEQ ID NO: 591578 - DNA, 83 bp, Homo sapiens
cgctgcccgcactcctggtcctgctcggggctctgttcccagactgtaaaacacatgtggcctttcatttgccaatttataga

SEQ ID NO: 591579 - DNA, 75 bp, Homo sapiens
tcagaactactatattcagtggctaaatggctccctgattcatggctctgggcatcaccagcggccccagggaaa

SEQ ID NO: 591580 - DNA, 75 bp, Homo sapiens
ccagatccacgccaaccacgagatcctcacagccaccgtggacaatgccaacatcctgctacagattgacaatgc

SEQ ID NO: 591581 - DNA, 90 bp, Homo sapiens
caatggaggatcttaaagagaccagttagcagatgcttgattggccaggtgaaacaggagctgtccagaaaggacacagaactactcgcc

SEQ ID NO: 591582 - DNA, 75 bp, Homo sapiens
ggcgcgagcgccccgccatcgtcccggtgaaaggtgtagcagtcactcggcctacacccacagcatcgaccttgt

SEQ ID NO: 591583 - DNA, 75 bp, Homo sapiens
ggccctggcctcccactgccgggccatgctgacggaccccttcagccagtgctacccctgaatttgaaggtagag

SEQ ID NO: 591584 - DNA, 98 bp, Homo sapiens
cagcccagatcagaagggaacttgatggccggctgcaattggcagataaaatggcaaagccctttctaaggcacaaaatgatgtgatggaaatgaaga

SEQ ID NO: 591585 - DNA, 75 bp, Homo sapiens
cggaggaggacaacgactaccaccgcagcgacgagcagaggtggggctggtgtccgagcacttctcgcaggcccc

SEQ ID NO: 591586 - DNA, 82 bp, Homo sapiens
gaagaatccccccgaaaggaccccccagcgccatcatgaccgggtcctataacaacttcttcaggatgtttgatagagacac

SEQ ID NO: 591587 - DNA, 74 bp, Homo sapiens
tggcaagaaagctaagcattgatattgtttggagcaggtatgttaagaagttaggggattttgctaagccggag

SEQ ID NO: 591588 - DNA, 50 bp, Homo sapiens
ctgcaggtgttcgaaaaataattgctgaagggatggcatacattgagcgc

SEQ ID NO: 591589 - DNA, 75 bp, Homo sapiens
cagaaggctggtcatgaaaaaattccctcttcagtttacatatatggcagtggtgtgggccatgtttgaggattg

SEQ ID NO: 591590 - DNA, 80 bp, Homo sapiens
caaacatgctgaaagaagtacagctcatgaatagactctcccatcccaacatccttagcaggtttttgtagcctttgagg

SEQ ID NO: 591591 - DNA, 75 bp, Homo sapiens
tgacgcaggccttaaggagaaagtttcagaacaccaatcagggtcttcaggcctggaagattgaagacattccag

SEQ ID NO: 591592 - DNA, 75 bp, Homo sapiens
cttctctaagagatgcctgcagcctgccatgggacgtggggtccaccggtacagatccttgccagcacattacag

SEQ ID NO: 591593 - DNA, 82 bp, Homo sapiens
gctgagtggtttttcggatcatgtctggtggctccgcggattataacaggtcagaagaggccaagtgatggaaatagtggat

SEQ ID NO: 591594 - DNA, 100 bp, Homo sapiens
tcccggctctcgtcagcctcccgccggccgtctccttaacaccgaacaccgttgacatcatggacatatgtgagtccatcctggagaggaagcggcatga

SEQ ID NO: 591595 - DNA, 98 bp, Homo sapiens
ccgacgtcttatcatgaatcccaggaacttatgctgtgctatttgattaaaccctctactatgactgacaaggaaatggagtcaccagaatgtatgaa

SEQ ID NO: 591596 - DNA, 98 bp, Homo sapiens
ctgcatgcacgagccaggaactgcgcagcctcttcgagcgccgcggacgcgtcatcgagtgtgacgtggtgaaagggtgaggtggctttgaccccggg

SEQ ID NO: 591597 - DNA, 100 bp, Homo sapiens
cggcggccgcgtccgcctcaaggcgcattacgggggcccagctcaacattggcaatgtgctccctgtgggcaccatgcctgagggtacaatcgtgtgctg

SEQ ID NO: 591598 - DNA, 90 bp, Homo sapiens
agaaaggtacctgggttcaactaaagcgccaggtcctcgcaagggccgagaggtgtaccggcatttcggcaaggccccaggaaccccgca

SEQ ID NO: 591599 - DNA, 100 bp, Homo sapiens
agatcctgaaatttccttagctgagcaatttacagcaatgagggatttatacatgaaaaatggacaaggatttgcattagtttattccatcacagcacag

SEQ ID NO: 591600 - DNA, 74 bp, Homo sapiens
aagaagtggagcgtgtcctgaaggagttccaccaggccgggaagcccatcggtgcagagcagagcgggcggagg

SEQ ID NO: 591601 - DNA, 100 bp, Homo sapiens
ctttcaccgcagtgggctaccataaacacatcaccttgatttttaatcccacgaatcaggaaacccaggcccaacggcaggtggatgcaagaagaaatgt

SEQ ID NO: 591602 - DNA, 50 bp, Homo sapiens
gagcactctatgaagcaatacgggatgttatcaatactctggctgaccat

SEQ ID NO: 591603 - DNA, 98 bp, Homo sapiens
attctggagaacagcctcacttctttgattgaatacttacataatgcattggaacatgacatgagattaaggtaggtagccatccaagcttcctgaag

SEQ ID NO: 591604 - DNA, 82 bp, Homo sapiens
aagaggcgaagcgagagcggaggccgcactccagcactgcgcagggaccgatgtgcactcccagcaacacccctgccacgcc

SEQ ID NO: 591605 - DNA, 90 bp, Homo sapiens
tgctgacgaggagttcaaccaggtcctgggaactccaacaagggagcaaatcagagaaatgaacccaaactacacagaatttaaattccc

SEQ ID NO: 591606 - DNA, 97 bp, Homo sapiens
tcgcgtctcggaaaccggtagcgcttgcagcatgtgcatccactctgggagagcgtggacctggttcctgggggcgatcgccagtcacccatcaaca

SEQ ID NO: 591607 - DNA, 71 bp, Homo sapiens
gccgcggagcagtagccgccgtgggagggagccatgaagcattacgaggttcttgagcaggccagagtgga

SEQ ID NO: 591608 - DNA, 85 bp, Homo sapiens
gaatctgaggattatcagaactcagcatccatccatcagtggcgcgagtccaggaaggtcatggaaccaacctatgaccctgtga

SEQ ID NO: 591609 - DNA, 98 bp, Homo sapiens
tttacaactgcgggagattgctggacatataatggaattttcccaagaccagcatgggtccagattgttgaacagataaatacgaaactgccatcatc

SEQ ID NO: 591610 - DNA, 100 bp, Homo sapiens
aacttgaagctaatttaccttgctacccacctttctgttctgagacccctcaagagacatataagaaggtgatgaactggaaagaaactttgacttttcc

SEQ ID NO: 591611 - DNA, 82 bp, Homo sapiens
atcagagccacaccgagaaccgccgcggagccctcatccctaacggtgaaaggtgattgaagtgggaaaaaatgatgacctg

SEQ ID NO: 591612 - DNA, 100 bp, Homo sapiens
cccagctacttgggaggctgagggccaccggggcttccagttcttctacctgccctacttcgagaagtgatcgcggcgcagcgtggaccccttgcgccca

SEQ ID NO: 591613 - DNA, 108 bp, Homo sapiens
cattctgttggttttatgcatctttatccaatcaagtgcccttggacaaagcctgaaaccaggtgagcgagtgctgtgctttcatgggcctcttctttatgaagcaaa

SEQ ID NO: 591614 - DNA, 136 bp, Homo sapiens
gccgcgggcaacctcggagcttatactcctcccagtgacgggtctggagtgcgtgggggaccggctgttggcgggtgagaagccctaccactgcaactgggacggctgcggctggaagtttgcgcgctcagacgag

SEQ ID NO: 591615 - DNA, 72 bp, Homo sapiens
gggaataggagctggggagcccttctgcgccacagaagtggtgacacgcatctttttgataaggtcagaggc

SEQ ID NO: 591616 - DNA, 82 bp, Homo sapiens
tcatgttctgcacctcaggagggaattcagcctcagtgatgtccatgagcagtcttatagctggatcagctaccaagagaag

SEQ ID NO: 591617 - DNA, 101 bp, Homo sapiens
aaaactccatgaagaagaacaggaaaggaaacgcatgcaagctaaggcagctgaggaaagcagatggtggagctgaatatgccacttaccagactaaatca

SEQ ID NO: 591618 - DNA, 82 bp, Homo sapiens
cagccgtgcttcctgttaagcctgtgaaactgagtgaaagctggacattgaagaagccaaaatctgtttccaagaaactaaa

SEQ ID NO: 591619 - DNA, 100 bp, Homo sapiens
acctaatccaccaaggatagccaatcggaccaaaaattcactcactttgcaatggaagcttagcagtgtctgcaaaaacgaatcttttcctacaacctgt

SEQ ID NO: 591620 - DNA, 96 bp, Homo sapiens
ccgacggacgcacgggcgggcggccgggagccatggagcgcggccctggggcccgggggcgcgggccggggtggttggagcaaaacgtcccactca

SEQ ID NO: 591621 - DNA, 75 bp, Homo sapiens
tcccttgaagaaagtattggcaagaatgcattgaaatctgctaatgatggaatagtagctgaataccttaaaacc

SEQ ID NO: 591622 - DNA, 49 bp, Homo sapiens
acaagaagagagccatccccaatcagcaccaagcaatatcatttatgct

SEQ ID NO: 591623 - DNA, 88 bp, Homo sapiens
ggagacaccgagaaaccatgagtgtaaggttaccccagagtatagacagttgcagagctattttgctgcatgtgaggatgagatccct

SEQ ID NO: 591624 - DNA, 101 bp, Homo sapiens
aaatgccgagaaggccagtacggggagagaccattctaacacaggtaccgtccagacagtgcctctgagaaagggaacctaaaggcgtgtttccgacgcac

SEQ ID NO: 591625 - DNA, 50 bp, Homo sapiens
tcattacagaaatctggcacccaaatgtggctgacaagattttgaaaaag

SEQ ID NO: 591626 - DNA, 100 bp, Homo sapiens
ctacgcggacgcaccggctaagctgcttctgccgccgccggccgcctgggaccttgcggtggtatggtcaggaaaaagactacaatgtactagtcatgga

SEQ ID NO: 591627 - DNA, 100 bp, Homo sapiens
aaatgagtctgtatataaggcttcattaagcttaactgagaagtatttctctgtagaggtgagttgtgtgaggagaagctggacttctgtgcccaggacc

SEQ ID NO: 591628 - DNA, 82 bp, Homo sapiens
gaccgtatcggggccctgactcacaagatcactcacctgtccacactgcagacttcccaagtaagaagcggaagaggagccg

SEQ ID NO: 591629 - DNA, 100 bp, Homo sapiens
gacttgttcagctggacagtgctatcagcatggaattgtggcagatgctttgggaaaatggaattaatggcattttagcagatgaaatgggattgggtaa

SEQ ID NO: 591630 - DNA, 100 bp, Homo sapiens
agccacgcagccgcggcttccggagccctcggggcggcggactggctcgcggtgcagagcttggggcttccttggtcgcacccaccacctgcctgcccac

SEQ ID NO: 591631 - DNA, 96 bp, Homo sapiens
ggaggaggagcaggagcgcggagccgcgagccccgagccccgagcccggcgcctggctgagtagtgccaagactggctagaggccctgcactggta

SEQ ID NO: 591632 - DNA, 89 bp, Homo sapiens
agagcctcttccttggccagaaggttcaaaccttgtactactcagctgatcacaagctgcttgatgggaacctactagatggacaggct

SEQ ID NO: 591633 - DNA, 90 bp, Homo sapiens
tcagcctccaaaagtgctggcattacagattctcagcgctgattttgagatgatgggcttgggaaacgggcgtcgcagcatgaagtcgcc

SEQ ID NO: 591634 - DNA, 95 bp, Homo sapiens
cggagcgcgcgtgtggtccttgcgccgctgacttctccactggttcctgggcaccgaaaggtgatgcaggttctgaatgctgatgccattgttgt

SEQ ID NO: 591635 - DNA, 83 bp, Homo sapiens
ctgcgcgcaagccggggagcggggcatgaaaatcaacatggacaagaatcggaggcgaaagccagcaagcgactccgtgagcc

SEQ ID NO: 591636 - DNA, 90 bp, Homo sapiens
gcacatgacgatatggatgaggatgataatgtatcaaagatcacaaaatggctcttcttcagatggcaacagtggaagaagctattcagg

SEQ ID NO: 591637 - DNA, 49 bp, Homo sapiens
ttcctaggcagaatgcttggaaaggatgccaaagaagagtgaatggccc

SEQ ID NO: 591638 - DNA, 51 bp, Homo sapiens
gtttgtcaccacaaaaaggacaggtgattaggaagaagcttgttcgtaaaa

SEQ ID NO: 591639 - DNA, 101 bp, Homo sapiens
ggaatgcttactgttgcgtggttcgttattaacagagtacccaaaggcaagtggaacagctctaatggggttgaagaaaaggagacttgggtggaagagga

SEQ ID NO: 591640 - DNA, 83 bp, Homo sapiens
ctaccgatgggaagtccttattattggccctccagatacactttactgggatagatgggcagcagaagatcatgtgcttcgtg

SEQ ID NO: 591641 - DNA, 75 bp, Homo sapiens
cagaataacctccagtatgttgccatctctaacctaccagctgccactttccagacaaagaaccggcgctgcaaa

SEQ ID NO: 591642 - DNA, 82 bp, Homo sapiens
ccggtgtctggcggatgcggtcgtgaagataggttgattcttcaccacactgaaaccattaggaaaaatccttgtggttaac

SEQ ID NO: 591643 - DNA, 75 bp, Homo sapiens
tgtatggagcgattttgcagatggccatcaccatcgaggctgagccaagagctgatggcagccgccggaccaccc

SEQ ID NO: 591644 - DNA, 100 bp, Homo sapiens
cagcctcgctttacatcatgctgcaaaatcctcagatagggccagatttgagtgtgtgaatttttgagtgaaacctggaacccaaatgagaagaaatctg

SEQ ID NO: 591645 - DNA, 101 bp, Homo sapiens
ggccactgcgcagaccagacttcgctcgtactcgtgcgcctcgcttcggtcctgatccggttccccatgcagaggaacttggtggtgatccccaagtctgt

SEQ ID NO: 591646 - DNA, 90 bp, Homo sapiens
catcactttagaccctccacctaattgcagacatcaactagtcaggcagtcttccgtctccagtctggcatctgccatctcttccgagaa

SEQ ID NO: 591647 - DNA, 90 bp, Homo sapiens
gagaagactttgaaatattaaaggtgattggtcgaggagcttttggggagctcaagactgcagtgcagatgacgacaacttccttgtgcc

SEQ ID NO: 591648 - DNA, 101 bp, Homo sapiens
actgccctggggcagctgaactgagcgtatgtgccacgccgcccaggagacccctctgctgcaccacttcatgcaactcctcactaagcaggacagcctgg

SEQ ID NO: 591649 - DNA, 100 bp, Homo sapiens
atttcctctggaagctaccacatgcaaacatacaagcagtctcacctcaggaaatgcaacctcaccacaagtacaaagaccatctttcatggactacttt

SEQ ID NO: 591650 - DNA, 100 bp, Homo sapiens
gcggcggcggcggcctcggctcttccagccaccccctctccagtctgctcaggtgctggagaatctggtaaaagcaccattgtgaagcagatgaggatcc

SEQ ID NO: 591651 - DNA, 100 bp, Homo sapiens
gggagagaaccagcacttctgggacgcacagagaccgtgaagattccaagttcaggagaactcgaccgaaacctctgtagaggagcaggatgcaaccgac

SEQ ID NO: 591652 - DNA, 83 bp, Homo sapiens
ggtgtaccaggcgaagctggccgagcaggctgagcgatacgacggtgtgaatgacagaggtggtgccatccagcgcgctcagc

SEQ ID NO: 591653 - DNA, 100 bp, Homo sapiens
agagacagctccagacatgtggctcttcttcgggatcactggattgctgacggcagccctctcagggcaagaatatcacggcatgggcatgagtagcttg

SEQ ID NO: 591654 - DNA, 100 bp, Homo sapiens
ctgcggaagcgcgtccggcagtacctcgaccagggtgagaaggactggcagaaatacgagactgctcggcggctgaaaaaatgtgtggacaagatccgga

SEQ ID NO: 591655 - DNA, 75 bp, Homo sapiens
ggattccaagtaactcttatttgactttgaaatactcgtgggatatgaagtggaggtgcctagagggttgaagat

SEQ ID NO: 591656 - DNA, 83 bp, Homo sapiens
cttgtggagccggagctgggcgcggattcgccgaggcaccgaggcactcagaggagcacggggtcactctggtgcccattgag

SEQ ID NO: 591657 - DNA, 73 bp, Homo sapiens
actacccattttcttttttggaactcatgagacgactggacctacagagacatctgggattttctgcgtcagc

SEQ ID NO: 591658 - DNA, 50 bp, Homo sapiens
gctggaattaggcaaatatggacagaaaatccgtacctttgccgtagcaa

SEQ ID NO: 591659 - DNA, 83 bp, Homo sapiens
gcctaggccgggccctgccagggagcaagtctgcatcgcagaggccagggtgacagcgggaaggtgaccacagtcgtagccac

SEQ ID NO: 591660 - DNA, 50 bp, Homo sapiens
aaagatctggaggatcaccgagatggtacaccaggggttggaaaaaccac

SEQ ID NO: 591661 - DNA, 96 bp, Homo sapiens
aggaggagagcccacaggtgctaaagagagcagtaccctgatggagtcccttgcagttcctattatccttgccgtaaataaatgtgacaaagctga

SEQ ID NO: 591662 - DNA, 87 bp, Homo sapiens
gacacggccagatctgccctccactgagtcagtgctgattctctcaaatagagcttgaaggataaatcttcatttttgtttcaacaa

SEQ ID NO: 591663 - DNA, 110 bp, Homo sapiens
gaaaaactgaatgaacggcttgcaaaactttcagatggagtggctgtgctgaagctcttagcttctgccagctatgatgacacagtgaagctgtaccgggaggaagagga

SEQ ID NO: 591664 - DNA, 83 bp, Homo sapiens
gaaaaggtgtacttgcaagaaacctcaggacttgagtaacagcaacatgctgtttttggaaggaagaaagatggaaagcggtg

SEQ ID NO: 591665 - DNA, 108 bp, Homo sapiens
tcatcgacttcggttcgggtgcgctgctcaaggacacggtctacaccgacttcgacgctcaccatggatgatgatatcgccgcgctcgtcgtcgacaacggctccggc

SEQ ID NO: 591666 - DNA, 100 bp, Homo sapiens
gctttcattctcctcctgagcactgtcgtatcctatatcatgcagagaaaagagatggaaacttacttgaagaagtgcccagcagaggagcacgcagctg

SEQ ID NO: 591667 - DNA, 75 bp, Homo sapiens
cctcccgcgtgggcgtcccggagcctggccagctgcacttcaaccaggctggatcctcattgaccgctgtgggaa

SEQ ID NO: 591668 - DNA, 74 bp, Homo sapiens
tgattttaaccaaggcagttggtggaaatgaggcatgtcggggaaaccagcacgatgtgccagtcattcctttg

SEQ ID NO: 591669 - DNA, 86 bp, Homo sapiens
ggggttagccactgctggctgcttccagtgttcgccgagaggtattatagctgcaaatgtccttgtattctgtttatggagagtac

SEQ ID NO: 591670 - DNA, 100 bp, Homo sapiens
gcgggggcagcctcagagcgggtgagcttggggacgcacggagaggtgcagctggggaactgctcgcagaaagaagaaggtggttcatagaacagccaca

SEQ ID NO: 591671 - DNA, 100 bp, Homo sapiens
tcttgcctcagcctcccgagcagctgggactacaggtgcccgccaccacacccaggtactccaaagattcaggtttactcacgtcatccagcagagaatg

SEQ ID NO: 591672 - DNA, 75 bp, Homo sapiens
cattcagcgagcccaccagaacaccagcccactcacccagtgtacaacattggaccagacaaggtgatccaggcc

SEQ ID NO: 591673 - DNA, 75 bp, Homo sapiens
gtcagaacgtggcttatgagtacctttgtcatttggaagaagcgaagagaatgtacctgaaacatgggagcccag

SEQ ID NO: 591674 - DNA, 74 bp, Homo sapiens
caacacatggtggaatgtatccgggaggtcaacgaggtcatccaggtagctacagcaagctgggtagcaggcag

SEQ ID NO: 591675 - DNA, 100 bp, Homo sapiens
cagtcatcctcaaccaagaaatccgggagttggaacgtcaacaggagcaacttgtaaagattagtgatgatgaaccaggttatgaccttgatttattttg

SEQ ID NO: 591676 - DNA, 82 bp, Homo sapiens
aaacgactcctcggccgagctgagtgagttgtgaaagattttcaagactatatggaacctgaagaaggttgtcaaggttccc

SEQ ID NO: 591677 - DNA, 99 bp, Homo sapiens
gacgccatgtcgggttattcgagtgaccgagaccgcggccgggaccgaggccctgctggtttaccgtgtcttcaggaacgaagctaaacgcaccaccaa

SEQ ID NO: 591678 - DNA, 100 bp, Homo sapiens
ggagctgagaacagaagtgagacagctgaagcgtgttggggaaggagctgtaaagagagcatttccggagagttcttttgaagtcacttcagaaggatct

SEQ ID NO: 591679 - DNA, 96 bp, Homo sapiens
gagcttcacagtgcagcggcgaggttatgatgtgattgctcaagcccaatctgggactgggaaaacggccacatttgccatatcgattctgcagca

SEQ ID NO: 591680 - DNA, 90 bp, Homo sapiens
taaatagctgacattgcatcttcaagactgtcatttttttgagataactgatgaccaattcgacttccatacatactgcatgagaaagat

SEQ ID NO: 591681 - DNA, 106 bp, Homo sapiens
cagctccccgcaggtgaagaactcgtgcccgttctgggccggctcctcgacaatgcagatcttcgtgaagactctgactggtaagaccatcaccctcgaggttgag

SEQ ID NO: 591682 - DNA, 80 bp, Homo sapiens
attaaactctgttttgatgggatagaggaagagagaagggcacagttacctaagtatcaacgtaatcttcctcggccagg

SEQ ID NO: 591683 - DNA, 50 bp, Homo sapiens
aaacagttcattcatattcagcgcgcggatcaagaagatcatgcagacgg

SEQ ID NO: 591684 - DNA, 50 bp, Homo sapiens
ggtcaacctgcggactttgttcaagtgtagatgcccctgatccaggtgca

SEQ ID NO: 591685 - DNA, 88 bp, Homo sapiens
agcaggaatgttttgctacaaatggaggaggaggaggacgacgacgatggggatatcgatgtccagctcgccgctgtccaagaaacgt

SEQ ID NO: 591686 - DNA, 90 bp, Homo sapiens
cagccggctgcaggccagagagggcctcgggaagagatgcgaggatgacaaggataactgggatgacgatgatgatgaaaaaaaagagga

SEQ ID NO: 591687 - DNA, 75 bp, Homo sapiens
gtcagcagctgcagtgtggaaggacaggaagatgtcacccaagcgcatagctaaaagaaggtcccccccagcaga

SEQ ID NO: 591688 - DNA, 100 bp, Homo sapiens
actgtatgatagtgttagttccacagatggggaggacagtctagagagaaaggaatatgatgaagaatgggctaagaaaattcagagtgaaaagtttcgc

SEQ ID NO: 591689 - DNA, 82 bp, Homo sapiens
cgccccggccggacctcgaccctgagctctatctcagtgtacacggaactgtggctgcaccatctgtcttcatcttcccgcc

SEQ ID NO: 591690 - DNA, 100 bp, Homo sapiens
ccgagaacctagctcccgtgaagaaccagttacagatccaagaggaggaggagacccttcaggacgaggaattcgtgcgacggcgtggagtgcggcccgg

SEQ ID NO: 591691 - DNA, 100 bp, Homo sapiens
gagtggcggggaggctgagcccggggatggcgcgccagggcgtctctggccgagcctctttttgtggaaaacgacagcagcagcagtggcctggaagacg

SEQ ID NO: 591692 - DNA, 98 bp, Homo sapiens
agcaacaagacagagctggcctggagtccgcggctggccgcgtgagtaggtcatttcttcagatagctccccagctgtggaaaatgagcatcctcaag

SEQ ID NO: 591693 - DNA, 83 bp, Homo sapiens
ctccagcctgctgcgcaggataaaaggcaaactcttcacctgggaattggctcgggaaaaggtaatgcgagaagttaaagcct

SEQ ID NO: 591694 - DNA, 50 bp, Homo sapiens
cggagagcagagtcaacacggagctcatgttttttggctagacctatgac

SEQ ID NO: 591695 - DNA, 75 bp, Homo sapiens
tttagcttcaaaaatgacaagttcgataaaagtgtgcagaccaagaataactgaagtgaagtgatggactccgat

SEQ ID NO: 591696 - DNA, 90 bp, Homo sapiens
ccggggtgtaataatgttaactgaggtttgcctgcaatgagatttcattctctacatttaaaggacatcctttctgagctgctgtgaata

SEQ ID NO: 591697 - DNA, 100 bp, Homo sapiens
tgcaagcgacggcgccatgagtctgacttccagttccagcgtacgagggagtaactattcccagtcagaggcgctatgtgtattattatagctacctgtt

SEQ ID NO: 591698 - DNA, 100 bp, Homo sapiens
gttagcggtggcaggggctgactgagagcgtctgcttgagatactttctagttgggagcaataatgcagaaacgaaatatcgtgtcttgaagattgatag

SEQ ID NO: 591699 - DNA, 83 bp, Homo sapiens
tgattttctggctcagtttcctgaagtcccttgtcccagttgaagaacccatagggagaactaatgccgacgtgatgaccgcc

SEQ ID NO: 591700 - DNA, 100 bp, Homo sapiens
cttgggacagggggatttggaaatgtcatccgatggcacaatcagatgtgctggtggacggacagccatgtgaccgcgaggctgtggcggcctgccaggt

SEQ ID NO: 591701 - DNA, 87 bp, Homo sapiens
cacagagggagatgtcaggtgggagaaagcccattattcctatgtttacacaaaatattcgagaaggatttagatcacttggaggaa

SEQ ID NO: 591702 - DNA, 87 bp, Homo sapiens
aagatcggaagcatacctggatggaggatgctgacagtatacaaactggactctcaggacaaaacgacaccagccaaaccagcagcc

SEQ ID NO: 591703 - DNA, 101 bp, Homo sapiens
cattctgaaaattggatatctaaatgatagaagagaaaaggaacagttccgtaagctctttattggtggcttaagctttgaaaccacagaagaaagtttga

SEQ ID NO: 591704 - DNA, 50 bp, Homo sapiens
gtgctcaccacccaccaccactggttcaagggcagcaggaaagacgagat

SEQ ID NO: 591705 - DNA, 75 bp, Homo sapiens
ggcggctgcagctggtgccccagcccctctgtacctcgggggcctgcctgactacgtctactttgagaactcctc

SEQ ID NO: 591706 - DNA, 75 bp, Homo sapiens
tgttgctgcaacatagagctgacattaactgtcagatattgtactccaagatacttggattacgaagatttggag

SEQ ID NO: 591707 - DNA, 98 bp, Homo sapiens
ggaaggagttcatgagtgctataagatgcgactgctacagggaccatgggacactattacgcaacaggccatggttgcttgttatccgggcaatggaa

SEQ ID NO: 591708 - DNA, 100 bp, Homo sapiens
ccggggaaagccgtggccccgagggcggatccgaggttcctaaagagaaagatgaaatggtagagcaagagtttaaccggttgctagaagctacatctta

SEQ ID NO: 591709 - DNA, 97 bp, Homo sapiens
agaaatgagacctctgttatcgatcagattggggaagatttgctgacatggatggctctgagagattcctctgcgaatctgtttttagctatcaagt

SEQ ID NO: 591710 - DNA, 100 bp, Homo sapiens
tgagccggagctgcccagtcgccgcgggaccggggccgctggggtctggacgggggtcgccatggcaaccacgagacagacaacatgaaccagatctacg

SEQ ID NO: 591711 - DNA, 95 bp, Homo sapiens
cactgactacggcatgtgtaagtttctacagcagtataatcactacaaatccaatgtggagattttcaaattgcaaccaaataaacccagcaaag

SEQ ID NO: 591712 - DNA, 90 bp, Homo sapiens
gcatttgtcttgatattctacgatcacagtggtctccagcactaactatttcaaaaggaagtgagctcacaatgactcaagctgccacat

SEQ ID NO: 591713 - DNA, 98 bp, Homo sapiens
cactttatgattttgtagcaagtggtgataacacactcagcatcactaaagaagtgactggacaaccccaaaatgcatcttttgtcaagaggaaccgg

SEQ ID NO: 591714 - DNA, 75 bp, Homo sapiens
agccaaacagagagaccttgaaggggcagtcagtaggtaagaatcaggccttattggagacattcaagcaaaggt

SEQ ID NO: 591715 - DNA, 75 bp, Homo sapiens
ctgcagtccctcgtccagccacccccagacgaaggggaggaccaggctggcgatgaagatgaagatgatgaatgg

SEQ ID NO: 591716 - DNA, 75 bp, Homo sapiens
gtctgggattactgcacggggtcgcgccgtggcggagcaggaactttatattgctgttggaatatctggagccat

SEQ ID NO: 591717 - DNA, 101 bp, Homo sapiens
ggggaggagtttcatgaagagcccaaaacctattacgaactcaaaagtcaaccgctgaagagcagacaagttggatggcttgaggactggtactaaaagga

SEQ ID NO: 591718 - DNA, 73 bp, Homo sapiens
agaggatgggagagaagaaggcaaagaggatccagagaaggggccgggactgtcacttggtgatacagctctg

SEQ ID NO: 591719 - DNA, 74 bp, Homo sapiens
ggacgagctgatcaagtatatgactgaagaagtttgcagaaaaaacttcagcatgtgccaggaacacaacctca

SEQ ID NO: 591720 - DNA, 100 bp, Homo sapiens
gtaatgacttcagtattggcctcgtgttgttggtactcactatccgatccaggcagggaaatgattgatgagtgtgaaaagaaaaagagggaagactatg

SEQ ID NO: 591721 - DNA, 100 bp, Homo sapiens
gaaggcgtgggcgacccggtgtgtggcgcgcccagagccccgcgtttcagccctagggaagtgatgaatcaccaacaccagcagcagatggcccccagta

SEQ ID NO: 591722 - DNA, 74 bp, Homo sapiens
gcaatttcttagagatcaagaataaatttctagctcgaaggtttaagttccatgccattgcagtgtcaactagg

SEQ ID NO: 591723 - DNA, 50 bp, Homo sapiens
tcagaactgagaagctgtcaccacagacagccagctaaaggtgtggatga

SEQ ID NO: 591724 - DNA, 100 bp, Homo sapiens
ggcttcatcattcatcattatgctgggaaggttgatgttgaacagcacactttagccaagtatttgatggagctgactctcatcgactatgatatggtgc

SEQ ID NO: 591725 - DNA, 75 bp, Homo sapiens
aaaaaggatgttgaccggacagaaactaatctggattcactccctctggttgatacccactcaaaaaggacactt

SEQ ID NO: 591726 - DNA, 100 bp, Homo sapiens
gctcagtgagggtagctggtgcagaagccattttttaaacttaggtatttaagtactgaaaggaccatgacttcttccagcatgtggaaatgcacctgcg

SEQ ID NO: 591727 - DNA, 100 bp, Homo sapiens
cgatgtggaggccatcaggagccaggggctggcagtgcatgacggctctgtggtatatgactgcttcgaggctgccctagggagtgaggtacgaatctgg

SEQ ID NO: 591728 - DNA, 74 bp, Homo sapiens
aaagatgagcgaggagacggcgacttctgacaacgagaggatgaagtggtactccagtgcatcgccaccattca

SEQ ID NO: 591729 - DNA, 87 bp, Homo sapiens
tcgcgggagcctttggggcaccacagagatgcgggttggtgttcgaggaagagacattgttgttcttggtgtggagaagaagtcagt

SEQ ID NO: 591730 - DNA, 82 bp, Homo sapiens
cgtctacactgagtcggaggcgaagggcgtgatggtgggcatgggtcagaaggattcctatgtgggcgacgaggcccagagc

SEQ ID NO: 591731 - DNA, 98 bp, Homo sapiens
gccgcaggacctgcagcatcccagaggcagcagtacctgtccaaagatcgctttagttccaccttgctccacaagcagcacaaccacactggttggtg

SEQ ID NO: 591732 - DNA, 82 bp, Homo sapiens
ctgagcaatatcaagcccattcaaacagaggcatggatttggactgagcaacaaatttgaatctgaattcccttcttcatta

SEQ ID NO: 591733 - DNA, 101 bp, Homo sapiens
tgggctgaaagctcccaagagtacgttactcttcaaggggaaaggaaaacctcttcagcgcaaggtgaaaccacctaagaagcaagaggaaaaggagaaga

SEQ ID NO: 591734 - DNA, 75 bp, Homo sapiens
acgcctggctcggagcagcagcctctgaggtgtctcccagtctgctaaagccctaaggccatcaccatggacttc

SEQ ID NO: 591735 - DNA, 101 bp, Homo sapiens
gtttttggcaccatatactactttttccagaattcatacaaagagtgaatccactgaagacctacatttcccggaaggttaacagcccccttctcagtttt

SEQ ID NO: 591736 - DNA, 98 bp, Homo sapiens
ttgaatgctgtcttccaagaacagaagaaaatgatccaggcccaggttctggcctataggaacaagacattttcagtaatggaagaaggagcttccag

SEQ ID NO: 591737 - DNA, 100 bp, Homo sapiens
cgggcaccgaggaccagctcaatgacaggggcctttacaacaactaaacggacaggcattccagccccacgggaattttcagtaactgtctcaagagaga

SEQ ID NO: 591738 - DNA, 75 bp, Homo sapiens
aataaaggaaagacctcagagtgttctcatgttcagactgcatcacagtgcttccgatacaagcgacaaaaatcg

SEQ ID NO: 591739 - DNA, 100 bp, Homo sapiens
ctgacagataatttgaaagaaaaagctctttcatttatgaggcaaggtcccagcatttgagggtgatgatggattctgtgtgtttgagagcaacgccatt

SEQ ID NO: 591740 - DNA, 100 bp, Homo sapiens
gttggtgaagggccatgcctactctgtgaccggggccaagcaggtggacccaagtggagagattgtggaactggcgaaaggtgcatgtccctggaaggag

SEQ ID NO: 591741 - DNA, 90 bp, Homo sapiens
cgagtttctggagttcgaatttcggccggacgatattaacctggctgcagagccaaaagtgaaccgaggaaaagcaggtgtgaaacgatc

SEQ ID NO: 591742 - DNA, 88 bp, Homo sapiens
agacagtgaaatagctacaaccagcctaagggtttctctactatgtccattctttccttatggagacgcctccaagtttgcccagcat

SEQ ID NO: 591743 - DNA, 74 bp, Homo sapiens
ccagaccttgttctctataacaatttccaggagactgacaaggcgtggcatgggggatgtctggcgctggcaga

SEQ ID NO: 591744 - DNA, 80 bp, Homo sapiens
gtcggcccagattgagggtggtgtccatggcctgcactctccagggccaaggcttgtgttcaatcgtgtgaatggccggc

SEQ ID NO: 591745 - DNA, 75 bp, Homo sapiens
ctggaacagagagacacactgccaccagcacaaatactgcgaccccagtcgtcctctcagcatgggggtcccgcg

SEQ ID NO: 591746 - DNA, 75 bp, Homo sapiens
atccacttccccttaatgaatagcctcctcgctggggaggcagagtcctcgcgtggtctcctgcctcgagcacag

SEQ ID NO: 591747 - DNA, 74 bp, Homo sapiens
gtttgctgaaattaatcaacgattcttgaagttgaagaaaaggcggaattctccacgagttttgagcagcctcg

SEQ ID NO: 591748 - DNA, 100 bp, Homo sapiens
agaagttaaaatactagaagaaaagtcacgccaatgtggtatgaagctgcagagtttgttgcagactggtattgctcgagttccacttgctggagctgcc

SEQ ID NO: 591749 - DNA, 98 bp, Homo sapiens
acgaagcgagccccctggtggaagccagcagaaccagccgtgctatcaagactaatcaggaccttctcccagaaactccatggacgcacattttctac

SEQ ID NO: 591750 - DNA, 107 bp, Homo sapiens
ggatatcgacgtcgtgatccagaagtccagagctgaggactgcctgtttgcagggggatatgagactttctactcggaatatcctgagtgttgcgtggatgtaaaac

SEQ ID NO: 591751 - DNA, 88 bp, Homo sapiens
agtcagcagccggcagcagcagcggggagatgcagttaaagacttgatgcttcgctttctgggtgaaaaagctgcagcaaagagacaa

SEQ ID NO: 591752 - DNA, 82 bp, Homo sapiens
tgaaacagttggctcgacaggcactagacagtctattatcctcccagtccacaacgctgaaccgtggctggacgaatgtttg

SEQ ID NO: 591753 - DNA, 100 bp, Homo sapiens
ggtactttgttggaccctcgtcaatctctttcgaagccattcagtcctcaatctccttttccttggctacccccttatgtttgatcatcggccaaggtcc

SEQ ID NO: 591754 - DNA, 75 bp, Homo sapiens
tggcgaggagtctctgtccgggggcctggctaaggaaaccctattacctccagctctcccggggctgaagctgag

SEQ ID NO: 591755 - DNA, 101 bp, Homo sapiens
gcttgtagaacagctatctcgggagaaacaacaactgctacatctgttggaggagccaactagcatggaagtgcagaggccccacagtatcaaatatccgc

SEQ ID NO: 591756 - DNA, 75 bp, Homo sapiens
ttcagacccatttccagtcatgagtggcccgaggcagccgggatgacagctctccccaggaatcctgctgcctgc

SEQ ID NO: 591757 - DNA, 96 bp, Homo sapiens
gaggggctccgggtcttccagagcgtgaagatcaagatcggctgattttgtgaaaatcgctcaccctgagccagcattcagagaagctgcggaaga

SEQ ID NO: 591758 - DNA, 75 bp, Homo sapiens
cggaattcgggaccgactgacggccggccggcttcccggaactggaagatggctgatcactgggaaactgcacct

SEQ ID NO: 591759 - DNA, 75 bp, Homo sapiens
attgcttctcttctctcctccaaggccaaatttgagtttcatcatggtgactatgaaaaacagtttctgcatgta

SEQ ID NO: 591760 - DNA, 98 bp, Homo sapiens
ccacacctgccacgccctctcatccaccccaccttgtatgcaacgccccccttcacacacagtaaggactgactgcattgcacagatgatggatattt

SEQ ID NO: 591761 - DNA, 74 bp, Homo sapiens
ttgtggtcactgatgagtggaccaagtgaagggtgtcaaattgagaaccaggtagatccccaccacctacagta

SEQ ID NO: 591762 - DNA, 90 bp, Homo sapiens
tattccagcacacaaactccctgacagaatactgccaagcatgttagccgcttgcaagacccttcaagaagtaacacagctatcacaaga

SEQ ID NO: 591763 - DNA, 75 bp, Homo sapiens
ccgcacctcggggacattattgcgcgtggaacggctgcttttggaagcattttgaaagcgaagcagaagccgtag

SEQ ID NO: 591764 - DNA, 100 bp, Homo sapiens
gactctttgggccgttatctcacgcaatgaatcgctccctggctaatgtgattcttggaggctatggcaccacttcaacagctggtggaaaacccatgga

SEQ ID NO: 591765 - DNA, 97 bp, Homo sapiens
taacagcagcgccgtcccgtccgacagccaggcccgggagaaaacattctagtatgccagtagaaaaaaatatcactttagaaaggccttctaatgt

SEQ ID NO: 591766 - DNA, 93 bp, Homo sapiens
ccgctccccacttcagacgagctcttcctgcctggaatctggatgtgtattcatacaagcaagtaggagtgtctttgaatagaatatttaccg

SEQ ID NO: 591767 - DNA, 76 bp, Homo sapiens
caacgccttaacccaaggaagtgactcaaactgtgagaacttcaggtttttcgttggaatatacgttgcacattta

SEQ ID NO: 591768 - DNA, 82 bp, Homo sapiens
cggctgttttagtgctttttatttttccccaattcagcagagaatattttcaagggggaacccagcgggtgccgcttctcca

SEQ ID NO: 591769 - DNA, 50 bp, Homo sapiens
cccacggagcctccggggctgttatcatttaacatggaagaagatgagtt

SEQ ID NO: 591770 - DNA, 100 bp, Homo sapiens
aattcgggaacaaatactactacatcccgcagtacaagaactggagagtatttcactggccttgaatgtggacataagttttgtatgcagtgctggagtg

SEQ ID NO: 591771 - DNA, 90 bp, Homo sapiens
cggcagggaccagcagttactgggaaggcactgcaacatggtgctggagaacgtgaaggagatgtggactgaggtacccaagagtggcaa

SEQ ID NO: 591772 - DNA, 100 bp, Homo sapiens
ccgctggcagccggggagctgcaggaaccagactgggggcgagctgagcacctgtagtcaatcacacgcagggtgagcttgtcggccacagactgctaca

SEQ ID NO: 591773 - DNA, 106 bp, Homo sapiens
caccgcagccttgggcctcgcgccggctatggccgtgccctggggctgagccctcaggcttcaacggaccacaccaaaatgccatctcaaatggaacacgccatgg

SEQ ID NO: 591774 - DNA, 50 bp, Homo sapiens
catggacatcctgaagccaatcctgggctttgaagactgcttggtatttg

SEQ ID NO: 591775 - DNA, 100 bp, Homo sapiens
ctcaagtatacagaatataatgaacctcatgaaagcagaaccaactcggatattgttgagatttgcttgtaaatgcatcacgaagaggcagcccagaatg

SEQ ID NO: 591776 - DNA, 51 bp, Homo sapiens
agagataggaactcttggttgggataagcagccaatcctttctttaagttg

SEQ ID NO: 591777 - DNA, 95 bp, Homo sapiens
ccggcgcgcccggtgacggcggagaggcgccccccgcagcagataacgaaggaggcccaacttcattcaataaggagcctgacggatttatccca

SEQ ID NO: 591778 - DNA, 75 bp, Homo sapiens
atattttggaaactatattgatagacagctgtatcttcccaagtaccacaataaggagaggagacgccgtgagcg

SEQ ID NO: 591779 - DNA, 76 bp, Homo sapiens
ggaagcagaaagtgaaggaggtctgttatgttctgaacccacacatgttttcggaaggaccagatggctgacactg

SEQ ID NO: 591780 - DNA, 75 bp, Homo sapiens
caccaccaaactggtggggcgagtggataaactggaggagctgtatgcaggagctattcttgaagtttgtggatg

SEQ ID NO: 591781 - DNA, 155 bp, Homo sapiens
gagaagatacccgccctgcgccccgctctgctgtgggcgctgctggcgctctggctgtgctgcgcgacccccgcgcatgaaaatatttacaccagcagctccagttcataccaataaagaagatcctgctacccaaactaatttgggatttatcc

SEQ ID NO: 591782 - DNA, 75 bp, Homo sapiens
ttcaaatttgactgcagttcacaagattcctttgcagttcacccttggagggggtccactggacggggcctgagc

SEQ ID NO: 591783 - DNA, 75 bp, Homo sapiens
acgcgagtgggagcaccaggatctcgggctcggaacgagactgcacgggtctcttgcctgctgtgtactgctttt

SEQ ID NO: 591784 - DNA, 75 bp, Homo sapiens
tggacgtcaataatgaaagctcttcagagaacaagttgaaatcatcgcagaaggataaagttcgtcagtttatga

SEQ ID NO: 591785 - DNA, 83 bp, Homo sapiens
agactatcagccactaatgaagttgggaactcagaccgtaccttgcaacaaggacctgcaaatgcaactggttgatcctgaag

SEQ ID NO: 591786 - DNA, 100 bp, Homo sapiens
gatcctccaaagacagatctgatctaaatgagtgtggcctgaagccccggccctgtaagcacaggtgcatgaacacttacggcagctacaagtgctactg

SEQ ID NO: 591787 - DNA, 100 bp, Homo sapiens
gtgacacttcacatttgtgcttctacaaaaaagtgaggttactattgaatgtaaaacaaggtactggacatcaagcatggtgctgttttctatccagcct

SEQ ID NO: 591788 - DNA, 75 bp, Homo sapiens
caaatcatggagccgctggggtcccttttgcctcagatactattttgaagggtgccaaagcgtgtttcctccgag

SEQ ID NO: 591789 - DNA, 75 bp, Homo sapiens
gcctgaccacggcgactggacttacgaggagcagtttaagcaggcacaaatatttaaacatggaaaacgtgaaga

SEQ ID NO: 591790 - DNA, 80 bp, Homo sapiens
ggagactgcagctcgacaggaatgactaatagggatgccaaaggaaaaatatgatcctccagatcctcgcagaatttata

SEQ ID NO: 591791 - DNA, 82 bp, Homo sapiens
gcaggttggccccggcggcgggagcgcccccgatccggacaaagaaacgagcgctcgaaccaaaaacttttgctagaaaatc

SEQ ID NO: 591792 - DNA, 83 bp, Homo sapiens
gctgactgcgagaaggtggctgtggagttcgggaaccagctggagtaagactttgaccccgacgcaggcttcagtgattgccg

SEQ ID NO: 591793 - DNA, 90 bp, Homo sapiens
ctggcggccgaggtagaggcagtggcgcttgagttggtcgggggcagcggcaggggacggtattcagaattcgagcgcaggagctccgct

SEQ ID NO: 591794 - DNA, 50 bp, Homo sapiens
aggcaagactggcacccagcacagcagtttggaaattttagcattcaggt

SEQ ID NO: 591795 - DNA, 98 bp, Homo sapiens
tggaggaggctgaggaggagaggacagaggtgcctggggcaacctccaccttgacggttccagcatcaaacacttggcttgttccagaaactaaagga

SEQ ID NO: 591796 - DNA, 89 bp, Homo sapiens
gcgtccccggcgcgaagaggctggactcggattcgttgcctgagatggaaatcatattatgtagaatacttgggtgacatctgcctgag

SEQ ID NO: 591797 - DNA, 100 bp, Homo sapiens
gagcaagaagaggacctgtgcagggcagagcaggaggccccccgaggtacaccaggggttggaaaaaccacactaggcaaagaacttgcgtcaaaatcag

SEQ ID NO: 591798 - DNA, 100 bp, Homo sapiens
gccgaacccgggagctggcgccatgaccatcatggagcagttcaaccctagcctccggaacttcatcgccatggggaagaattacgagaaggcactggca

SEQ ID NO: 591799 - DNA, 100 bp, Homo sapiens
aatgaagccgcggacccttgcgatggagttttaacattgaatgcggagaacactaattatgcctatcaagttccaaacttccataaatgtgaaatctgtc

SEQ ID NO: 591800 - DNA, 100 bp, Homo sapiens
cgaattcagaaggatatcgacgtcgtgatccagaagtccagagctgaggactgcctgtttgcaggcgaggattaaatccaccacacagggtgaaatctat

SEQ ID NO: 591801 - DNA, 75 bp, Homo sapiens
ggatggcatggggcgctttggcagagacaagaggagcagcagcggcaccgcccctcaccctggagggtcctgtac

SEQ ID NO: 591802 - DNA, 100 bp, Homo sapiens
agaagatgaagatgcttacaagaaacagttctctcaatacataaagaacagcgtaactccagacatgactggattatggacagaacttggaaatattgag

SEQ ID NO: 591803 - DNA, 106 bp, Homo sapiens
agttccaccaggccgggaagcccatcgggaatgtatcctgtcaggtataatgtcagtgaatggcaagaaagttcttcatatggatcgaaacccttactacggagga

SEQ ID NO: 591804 - DNA, 75 bp, Homo sapiens
cagagattgaactcagctatgcaaagcaactcagtgctatgctggaaaatgagaagaagaagcgtgaaatggcag

SEQ ID NO: 591805 - DNA, 100 bp, Homo sapiens
gctggggccgcgccacttccgcaaacaggtgcaggtccgaggaggcaaacaaagccttctctgcagctgtgcagatgcacgatgtgctggtgaaagcctg

SEQ ID NO: 591806 - DNA, 80 bp, Homo sapiens
cttcaaccagcctttggtcatcaccaggacaatgcagatcttcgtgaagactctgactggtaagaccatcaccctcgagg

SEQ ID NO: 591807 - DNA, 100 bp, Homo sapiens
ccacggggccgctgctcaagttccagatttggaggaatgccagctcctgagcaggcctcattggtggaggaggggcaaccacagacccgccaggaagctg

SEQ ID NO: 591808 - DNA, 82 bp, Homo sapiens
gcgaggagctcatcgggcagattagcgacatccgagtgcagaacctgcaaggtggtctggagaaagctgggagatgcagcca

SEQ ID NO: 591809 - DNA, 83 bp, Homo sapiens
agtcccagaggaaagccagaagaggcccagcgatacccagacaaatggattctaaaatttgaatagaagagcaaagaaaatag

SEQ ID NO: 591810 - DNA, 101 bp, Homo sapiens
gcgaggagaacagtccgaaatggcggggactgttggtctcggccctgcggaaggtattgggagagttgctgctacatctttaggaaatttgactaaccatg

SEQ ID NO: 591811 - DNA, 82 bp, Homo sapiens
cccgaacttctcccgctctacctcagcctgcgggactgctcggctcggcttctaggcggactgctgatggaggaggtttggt

SEQ ID NO: 591812 - DNA, 100 bp, Homo sapiens
agccgccccgcgcccccgccgcgccctcaggcctcttctgaagagctgaaagctgcctaccggaggctctgtatgctctaccatccagacaagcacagag

SEQ ID NO: 591813 - DNA, 97 bp, Homo sapiens
acctagactattaccaaaccatgtctggagtgaaggaggccgacttcaaggatcttgagactcaaccccatatggtcttgtccaataagcatgtggc

SEQ ID NO: 591814 - DNA, 100 bp, Homo sapiens
cctgtcctttctctcaccgtatcaggaacacaaaactgcggcccttgtctgcaaacagtggtatcgacttatcaaagggaggagatatcaccaaacatga

SEQ ID NO: 591815 - DNA, 100 bp, Homo sapiens
cactcctcaggtgtccagcctgctcagagaattttctctacatgtgcacccatttaaaggactcggcttcaagggaagcagcttccaccgcattatcccc

SEQ ID NO: 591816 - DNA, 85 bp, Homo sapiens
aaaactttcgtttcagatttacttccgccctccaagccacaaaactgtggtgaatggaaaagaatgtataaacttcgcctcattt

SEQ ID NO: 591817 - DNA, 90 bp, Homo sapiens
aggtcatcaaacagtcggcctatgactcgaaggattctcaaagttggattggtggaaacaatgaaccattgacaggctttacatggcgag

SEQ ID NO: 591818 - DNA, 100 bp, Homo sapiens
ctgacggggacctgcacaatgaagaaggcctttgagccctacttagagattttggaagtatactccacaaaagccaagaattatgtaaatggacattgca

SEQ ID NO: 591819 - DNA, 74 bp, Homo sapiens
tttgaacaactttccgaatctgcaaaagaaggtggagttggcatgaacttaacagcagcagatactgtgatttt

SEQ ID NO: 591820 - DNA, 74 bp, Homo sapiens
ctgcagcgggagctggacggcgagcgcgagcggcgcgagaaacttggtttatggcagctccaggacctcgcacc

SEQ ID NO: 591821 - DNA, 100 bp, Homo sapiens
gagcagctttggataatgacgacagcaacccgaagacagggaaatttagggaactctaatgatccaggacaaagaagttaccctggagtatgtatcaagc

SEQ ID NO: 591822 - DNA, 100 bp, Homo sapiens
aaaggatgaaaagcttatgcaacatgctcagcaggagcttcatcaacgatatatgtcagatctaaaggtggtaataagctgcagtcaacaggaaataaag

SEQ ID NO: 591823 - DNA, 99 bp, Homo sapiens
gctgccaagctgcattttagtcagttgggcaacagtgaaaattttcttttagaggtggaaaaaaggaacctctttcaggagctataaaagaaagggagg

SEQ ID NO: 591824 - DNA, 75 bp, Homo sapiens
ccttctgtcatagaaactcacatgagacaaatgcgctcagcttcaattgctacagagggccggagctggagatgt

SEQ ID NO: 591825 - DNA, 74 bp, Homo sapiens
ccggacttcctctcagaagaggaccgcggagccataggaaaaggatacagagtagagtttcatgaacctgaaac

SEQ ID NO: 591826 - DNA, 74 bp, Homo sapiens
cagtcctcgtcagcactgactttcagctatggaatcgcaaaagctggcaggctgacagaggcggcctcaggacg

SEQ ID NO: 591827 - DNA, 75 bp, Homo sapiens
caagaccagtccatttggggaaatccttcggatggtgaactcattagaaatttctctatgaatcatcatcaagaa

SEQ ID NO: 591828 - DNA, 75 bp, Homo sapiens
cgccaagatggcgatgcaagcggccaagagggcgaacattcccactggattcttctctctgctgacagtgagggc

SEQ ID NO: 591829 - DNA, 100 bp, Homo sapiens
gactgatgcttattagtcatcaccgttattcctactaacgtcctgtgtcactgagattcatgatgttgctatcaaaagttgagaaattgtcagaagaaat

SEQ ID NO: 591830 - DNA, 100 bp, Homo sapiens
cagcttcggcggcgaaggtcagcgccgacggcagccggcacctgacggcgtgaccgacccgagccgtatttgactacagtcattccttatgagaaaaaaa

SEQ ID NO: 591831 - DNA, 96 bp, Homo sapiens
gcaatgacatctacgtgacgggtgtttcctgctgaatgagattgagaaggaggagaaggagaagctctggtactactctcagctgcagggcctgtc

SEQ ID NO: 591832 - DNA, 82 bp, Homo sapiens
cggttccggtgtccggaggcgctgttccagccttccttcctgggtgagaatgagatggtgatcatgagacctggaaacaaat

SEQ ID NO: 591833 - DNA, 100 bp, Homo sapiens
gaaacctcgtcattaattggacacagtgccagagtgtatgcactttactacaaagatggacttctctgtacagtatggtatttggaagtcaactggatat

SEQ ID NO: 591834 - DNA, 98 bp, Homo sapiens
tggagccccgagcagcccgggggcggcggccgcgaggcgagcggcgatggatggcccaacagcaggccttgaggttccgaggtccggctcccccacca

SEQ ID NO: 591835 - DNA, 100 bp, Homo sapiens
gcggcggcggcgagcggttccttgtgggctagtgccggtggtggtgtgcacattgagccccggtatagacagttcccccagctgaccagatcccaggtgt

SEQ ID NO: 591836 - DNA, 83 bp, Homo sapiens
cgtcgccgccgccaccatgcccaagagaaagttccagggtctccctccactgctgtagtaacccgggtccggggcctcggtgg

SEQ ID NO: 591837 - DNA, 101 bp, Homo sapiens
catcaaagacagctttcacagtttgcgggactcagtcccatcactccaaggagagaagtggaatgcagtagccctctgggcctgggatattgtggttgata

SEQ ID NO: 591838 - DNA, 74 bp, Homo sapiens
attcagcagagagctattattccctgtattaaagggaagatccttgtccttcaaaaccttcctcatctgggttt

SEQ ID NO: 591839 - DNA, 100 bp, Homo sapiens
cccgaagctaagagcccccttcagtcgcagcctcactctagaccccgccagcaggctaagatggctgagtattgccggacgatctttggggatatgctgc

SEQ ID NO: 591840 - DNA, 73 bp, Homo sapiens
ggcagaagttacggcgacagctcctcgcgcagcagtcctgaggctttctaccaatgcaggccagtggaaggaa

SEQ ID NO: 591841 - DNA, 74 bp, Homo sapiens
cagcggtagccctccttgcgcctccgattcccagggtaagcttgatgattaccaggaacgaatgaacaaagggg

SEQ ID NO: 591842 - DNA, 50 bp, Homo sapiens
caggcatgcgccaccacgcccagggtctgggagagtcgggggtgttcctg

SEQ ID NO: 591843 - DNA, 82 bp, Homo sapiens
cggtaccaggcagacatcaccgacttgttaaaagaagtctggggagcagggaggagccctgtgccctgtcccaggatccatg

SEQ ID NO: 591844 - DNA, 50 bp, Homo sapiens
tgactttcagctatggaatcgggagactgccagactcgggaggaggcagt

SEQ ID NO: 591845 - DNA, 75 bp, Homo sapiens
aataatgaagttaaaagagcagcactccaagcttactacctgcccaaggatgatgagtattaccagttctgctat

SEQ ID NO: 591846 - DNA, 99 bp, Homo sapiens
acaggaaatgtgaaaaggcaggctgtacggcaacatgtcctgtgtgctttgcaagtgcttctgaaaggactccctggaggaaaagcggaagcggcagcg

SEQ ID NO: 591847 - DNA, 100 bp, Homo sapiens
ttggatccgcgggacaagaaaattcatgcgagtttgctctccaaagctcggggaattgattccagctctgttaaactccggggtagttctctcttcatgg

SEQ ID NO: 591848 - DNA, 75 bp, Homo sapiens
cagccagtctctactcagcctggagcaaggtccggcctctttggcctacccccgttggctccgctgccccaggtc

SEQ ID NO: 591849 - DNA, 75 bp, Homo sapiens
ctggacagctagctgcttatggctataaaattacaggtaagaatgattgatgttggctgatattggagtgctcat

SEQ ID NO: 591850 - DNA, 83 bp, Homo sapiens
ctggacgaggtgcccgaggtgcgcgccctcatcgagtggatccgcaggaacaaggtccgcaagcaggtggtgaacatcccgtc

SEQ ID NO: 591851 - DNA, 97 bp, Homo sapiens
aacactgtacaagctttcaaagtcaataatggactgctgaattatgaagtatttcagacccagtagtagaacatcactctgccactcactcctttat

SEQ ID NO: 591852 - DNA, 75 bp, Homo sapiens
cgctgggtgcgtggggctgcctcgccgcgtctcgccacgattccgaagaggctcaatctgtaaatccttctagtg

SEQ ID NO: 591853 - DNA, 83 bp, Homo sapiens
cttgcacctgagctgttactaggcagggcccatgggagtgcatccgccccaacccttttccccctcgtctcctgtgagaattc

SEQ ID NO: 591854 - DNA, 83 bp, Homo sapiens
ctagaaactcgctctaaagacggaaccgccacagcactcaagctgccagacaccctacttgaaggatcctgttggaacctgtg

SEQ ID NO: 591855 - DNA, 75 bp, Homo sapiens
agcccctcacaccctggatccttgacctactatgggctcgggatgagtttgaaggcctcttcaagcagccagcag

SEQ ID NO: 591856 - DNA, 83 bp, Homo sapiens
accgcttcggttagccagccacgaagttctcgcgagagtcgtctcctcgataccaagctgctgagaactagccctagacctct

SEQ ID NO: 591857 - DNA, 75 bp, Homo sapiens
aagcgaagccgaaaaaggcagcagcgaaggccataggaaaaggatacagagtagagtttcatgaacctgaaactt

SEQ ID NO: 591858 - DNA, 75 bp, Homo sapiens
tgccaatgaccgtggaggagtaccgcatcgcccagctgtacatgatacagacacagaatgttcagcttaacaaag

SEQ ID NO: 591859 - DNA, 100 bp, Homo sapiens
cagtggtcgcttcttctccttgacattgatcgccctaaaggactggcattcactgatgtggatgtcgattccatcaaaattgcttgggaaagcccacagg

SEQ ID NO: 591860 - DNA, 83 bp, Homo sapiens
ccatcttcatcatgcacatcttcaagcatgctcagatgccatggacaatattaccaggcagaaccaattctacgatacccaag

SEQ ID NO: 591861 - DNA, 90 bp, Homo sapiens
tgctgcccgcctgcagcgcttggcccagatccacattcagcagcagatggctgctcctgtcccgtgggcctgctgtgctgtgcttgccgc

SEQ ID NO: 591862 - DNA, 82 bp, Homo sapiens
ctgccccagctccgtctcggcggcggcggggcgaccattgacgaggtggagacggacgtggtggagattgaggccaaactgg

SEQ ID NO: 591863 - DNA, 127 bp, Homo sapiens
tttgattgcaaagtgctatcaaggaaccacgctctcgtctggtttgatcacaagacgggcaagttggattggatgctgctggcaagacaaccattctgtataaactgaagttaggggagatagtcac

SEQ ID NO: 591864 - DNA, 76 bp, Homo sapiens
gcccaagaagcaggccaaggagatggacgagtctctagacccccttcgtggatggtatcagatgatttcagtccaa

SEQ ID NO: 591865 - DNA, 100 bp, Homo sapiens
aagccatgaggccaaaggcagttgtattgaaggtgatgaggtgggtactggcatcactgatgacaatgaagatgaaaattcagccaatcagattgcaggc

SEQ ID NO: 591866 - DNA, 74 bp, Homo sapiens
tgtacaagctttcaaagtcaatgccacggaaaggtatgatatatttgatccaagacagtccattccagtccggg

SEQ ID NO: 591867 - DNA, 100 bp, Homo sapiens
aagcttgaaacggagttacaagaggctaccaaagaattccagtggttatgatattcctctcaaccctttaaatctgatccctttctatgctggttctcgg

SEQ ID NO: 591868 - DNA, 100 bp, Homo sapiens
ctagaccctgcccaacagaatttatatagagatgtgatgttggagaactacagaaacctcgtctccctggtgaataaccctataccttccaatttgaaat

SEQ ID NO: 591869 - DNA, 99 bp, Homo sapiens
gtcgggtcgcttccccgcagcatggaggacgatgcaccagtgatctacgggctggagttccagactgcttttcaggaagccttggacgctgcaggtgat

SEQ ID NO: 591870 - DNA, 83 bp, Homo sapiens
tatggccgtgccctggggctgagccctcaggtgtccctggccagtgtccttccacctgtccacaagcatggggaacatcttcg

SEQ ID NO: 591871 - DNA, 101 bp, Homo sapiens
attcagagagtccacacaccctttgaaaggtaactatggtggtggtgggaactataatgattttggaaattatagtggacaacagcaatcaaattatggac

SEQ ID NO: 591872 - DNA, 100 bp, Homo sapiens
caaagggaaagaggagaggcacccgatatatgttctctaggccttttagaaaacatggttacataatgctgtgcaaatgaagcaaaaagacaagcagaat

SEQ ID NO: 591873 - DNA, 118 bp, Homo sapiens
ctttcctgttggaaaaggcaatcactagggaagcacagatgtggaaagtgaatgtgcggaaaatgccttcaaatcagcctctactcttcatggatcttttggatgaaagaacactcgt

SEQ ID NO: 591874 - DNA, 75 bp, Homo sapiens
gcacggagggcggtggcggcgggctcctgcgagaagcaagcggaacttcctgagtcatccgtccttggctcagga

SEQ ID NO: 591875 - DNA, 100 bp, Homo sapiens
gggatgctggaggacatctgggggccacaaatgctccttctcctggagacgcaactcaaggttccagcaacagatagaaatgctttaagttcactctggg

SEQ ID NO: 591876 - DNA, 100 bp, Homo sapiens
gaagcattctgttgcaacagttgcggagcgcccatgcaggtgttggagcgggccggagagaagtagagtgggctgcgaggagaaggaaacaggcctttcg

SEQ ID NO: 591877 - DNA, 96 bp, Homo sapiens
agggacaacaggcaggagaattatgggagcgcatttccccaggggaatgaccctgcataaaaaggcagctgaagatagactggcaagcacaggctc

SEQ ID NO: 591878 - DNA, 100 bp, Homo sapiens
gctggtgccttcattcatgaaaagcatgcccatacgattaaacctgccatgtttcgccaagggatgcatgacttgaaagtctggcctaatgtagaagcag

SEQ ID NO: 591879 - DNA, 75 bp, Homo sapiens
cagaaagctcaatcacttaccaattcctctgtgacgagggtgcaggtatctctggggactacatcgatcgcgtgg

SEQ ID NO: 591880 - DNA, 75 bp, Homo sapiens
tttccctctaccttaaggatgtgcaggatcttgatggtggcaaggagagccaaggcaaagagggaccactgtgct

SEQ ID NO: 591881 - DNA, 75 bp, Homo sapiens
ggagattccacccaaacttgctggtcactgggagaaacttgaggagaggctggagttctggatggagaaatacga

SEQ ID NO: 591882 - DNA, 100 bp, Homo sapiens
gggctgaaggcggtggtgggggaaagcaaacactggagctgtgtgcagaagttcgccgctggtctgggccggtccctgcgagaggcccaagcaggtgaga

SEQ ID NO: 591883 - DNA, 83 bp, Homo sapiens
tgcctgccgatgtgcatcggtacatgaagatcttcaagtccgttgagaagaaaatgacagacatgctaaaagaggaagaagag

SEQ ID NO: 591884 - DNA, 74 bp, Homo sapiens
cttggacaacatgtcccaacattacatcccagtcagacacattctatgtgaaaaacatggcaaaatcatggaag

SEQ ID NO: 591885 - DNA, 80 bp, Homo sapiens
gtttcgagaagcagccgcgctgcgccttccacactgtgcgctggcaagttaaagtcttcagagccctgtatacgtttgaa

SEQ ID NO: 591886 - DNA, 75 bp, Homo sapiens
gcgccgccaccgtctgaactaggatgtcccgacatgaagtttttgaaatcatgaatcctgtttatagtcctggat

SEQ ID NO: 591887 - DNA, 75 bp, Homo sapiens
agaccaagtcctcgctggactgctcagggtgccagacctcatctacatgtactagccttagcaagttctgttcca

SEQ ID NO: 591888 - DNA, 100 bp, Homo sapiens
ttggatctctggcggggtgcagaactgagcccaggccacagtaccctattcacgctctgtgcttgtgccaaggcatcctagaatacgtttccacacgggt

SEQ ID NO: 591889 - DNA, 59 bp, Homo sapiens
ggaggagtctcagagctgtcagaaagtgagtgatagttgcttcaggaatcttgcagaag

SEQ ID NO: 591890 - DNA, 74 bp, Homo sapiens
taaatggacaagaatatcatcttcaacttgtagacacagccgggcaagatagaagtggaattactgggcaaagg

SEQ ID NO: 591891 - DNA, 98 bp, Homo sapiens
ccgggtctccttcctgcagatcaccgggggcgccctggaggagtccctgaagatctatgctcctctgtacttggaatcccagtcagaagttccagcct

SEQ ID NO: 591892 - DNA, 100 bp, Homo sapiens
caccaagctggaggtggacgccatcgtcaacgccgttcacatgagagatcctaataatcaacttcacgtaattaaaaatttgaagatagcagtaagcaac

SEQ ID NO: 591893 - DNA, 75 bp, Homo sapiens
ctagaagcctgtcgaaaaatgggggtgcctgagcccgtggaccgggagcccgtggaccgggagccggtggtgtgc

SEQ ID NO: 591894 - DNA, 75 bp, Homo sapiens
ggctgcagggagtggaggctgtcgcccagagagagcgccgtcggtatgacgccgtgcccatccagtccagcgtgg

SEQ ID NO: 591895 - DNA, 51 bp, Homo sapiens
ggtcctcctcacctatggccgctggcaggctgatcttcagacaagttctca

SEQ ID NO: 591896 - DNA, 82 bp, Homo sapiens
ccaccgccgccccctccggcgtgttcatgcccccgggggactggtgattgcagctggaagtgcccatgaccgagctggcgtc

SEQ ID NO: 591897 - DNA, 50 bp, Homo sapiens
acttcaacaacatgtcctactggtggtggaggtggatacagcagtcggag

SEQ ID NO: 591898 - DNA, 75 bp, Homo sapiens
ccagagtccgcggccggggcgcgggaggcatgggtagcaagaaactaaaacgagtgggtttatcacaagagctgt

SEQ ID NO: 591899 - DNA, 100 bp, Homo sapiens
ttttgacccgtctcctcaccttctgatacacaccaaccaaccagtcaaccagccattgctgtttactggatacctgggtctcgctctgtcgcccaggctg

SEQ ID NO: 591900 - DNA, 75 bp, Homo sapiens
cctcgctcaactccggcttcacgcggctcggcaccgacctaacctaaaggcagacccagaagagctttttacaaa

SEQ ID NO: 591901 - DNA, 96 bp, Homo sapiens
tggatgattactacgacaccggcgaggaacttggcagaattgtctatttcacagcaatattaccagtgacttgaaagcatttacagacaagtttgg

SEQ ID NO: 591902 - DNA, 100 bp, Homo sapiens
aggcgcaggagactgaccgcaacggcaggataaggagacaaggaggcatccagctcctggtggacctgttggatcatcggatgaccgaagtccaccgtag

SEQ ID NO: 591903 - DNA, 100 bp, Homo sapiens
ggccaaagactacatggagaggatggcagcgcagcctagttgatcaggatctaagggatttaaatggacagaatgctttctgacatcttggatcatctga

SEQ ID NO: 591904 - DNA, 107 bp, Homo sapiens
gaacacagagagcagcgaaagcagtgaaacttgcaggccagaagcctgtcttagatgttcatgcagaactagacagaattacacgaaaaccagttacagtttctccc

SEQ ID NO: 591905 - DNA, 75 bp, Homo sapiens
ccgacgactgcaagcagtttcgggaggagttcaacgataatttcttgagaggagataactcccgtaaagttcagc

SEQ ID NO: 591906 - DNA, 100 bp, Homo sapiens
taaagaattaaaaggaagaacaacttaagagcttcttcaaagattactttctatgaagacaaaaattttcaaggccgtcgctatgactgtgattgcgact

SEQ ID NO: 591907 - DNA, 100 bp, Homo sapiens
cgccgggtcaccttcgaggcggacgagaatgagaacatcaccgtggtgaagggcatccggtgagggagataaatctgcaggacatcaaggaagatttaga

SEQ ID NO: 591908 - DNA, 100 bp, Homo sapiens
ctgcaggggtcagtgatggagctgcttcagcctaactctggtgaactggatcctttgtatgtagtagaagtacttctgcgctgtagcaaagagagcttga

SEQ ID NO: 591909 - DNA, 75 bp, Homo sapiens
caaggaaaaactggagagcttcatcaaaaatagtgatagctttgataagcaaggattactgcaaagtaatatttc

SEQ ID NO: 591910 - DNA, 101 bp, Homo sapiens
aattggaagctaaagctaccaaagacgtagaaagaaatcttagcaggtttaagttactgagccaggaggaaggcgagtacttcaatgtgcctgtgccacca

SEQ ID NO: 591911 - DNA, 50 bp, Homo sapiens
ccgcggcgagcgagctcctgagagcttcctgcggctgagggagggatgaa

SEQ ID NO: 591912 - DNA, 151 bp, Homo sapiens
gaggattagcaccaggttgcaagtagattcaattctgcttcctctgtcttcattgcaggatcagaggctacgtgagaagccgagccccgctgcggagctcccggcggcccagccccgaggctctgcggccgcgccgcgcgtccctaccaac

SEQ ID NO: 591913 - DNA, 73 bp, Homo sapiens
gggatcattaagaagcagatcctgaaacacctgtcccgatctgactgcagccatgagcagcaatgagtgcttc

SEQ ID NO: 591914 - DNA, 98 bp, Homo sapiens
atgctgaccaaggaggagcctgttccagaactgctggaagctgaggatgaaaactttcggaagagaaagttgcctgtggtaagttcagttgttaaagt

SEQ ID NO: 591915 - DNA, 100 bp, Homo sapiens
ccgctgatgccgcccgcggcgaggtggcccggaccgcagtgccccaagagaggactctgccaaggtcggtgccctgctccatggacagtggactctgctc

SEQ ID NO: 591916 - DNA, 76 bp, Homo sapiens
gcgacccctgccctgaggcccgggagaagctgcaggagttgtgtcgccacatatggtccagtagtctatgcagcat

SEQ ID NO: 591917 - DNA, 95 bp, Homo sapiens
cctggcttaatttccctactccaccatcatcaacaaagggcaacacacaagtttgctgattgcaaagcaaaacgtgacacccccacctcatgcac

SEQ ID NO: 591918 - DNA, 83 bp, Homo sapiens
gagcgccttgggacagggggatttggaaatgtcatccgatggcacaatcaggagtccaaaactacttacctggaagaccttcc

SEQ ID NO: 591919 - DNA, 100 bp, Homo sapiens
ctctccggacaagaggactgaagcagatggcaactctgatcccaactctggattaaagcaaggagagccaatcatgactggcaaaacacagaccagcaac

SEQ ID NO: 591920 - DNA, 51 bp, Homo sapiens
ggcgagcagaaaggaaatcttacggcatttgatctaacagagcaaagatac

SEQ ID NO: 591921 - DNA, 75 bp, Homo sapiens
agtggtctgccgagaagccagtcacgccgggagctggtacacagcctcagcgagtaaccagctcataaatcacat

SEQ ID NO: 591922 - DNA, 100 bp, Homo sapiens
ccccaccaccgccctcaccatgatggtgaggtctacagctttgggactcttccctggagaagtggaccagtggagatttgtccaagtagccccattctag

SEQ ID NO: 591923 - DNA, 100 bp, Homo sapiens
atgtcatcttatcttttaattattaaaacagagcttcctgctgctattgcagaatttttgactggagactatagtagacctggacaaacaccagactcag

SEQ ID NO: 591924 - DNA, 87 bp, Homo sapiens
ggccgtgtgcgtgctgaagggcgacggcccagtgcagggcatcatcaatttcgagcagaagcacaacaaatcagaagctctgggctg

SEQ ID NO: 591925 - DNA, 97 bp, Homo sapiens
gccagtttggtgcagaatgtgacgaagatgccgaggatgtctggctccgagctctgtccagtggtgggagtattacatcccctcctctttctccagc

SEQ ID NO: 591926 - DNA, 113 bp, Homo sapiens
gcgtcctcctccccaggcccgccgcctccctgccaaggagaggcagatgcgaaccagaacaatgggacctcctctcaggacacagcggtgactgactccaagcgcacagcgga

SEQ ID NO: 591927 - DNA, 75 bp, Homo sapiens
cgtgggccctgctgagcccacctgggcccagggccagtcaggcctagttccccgagagcgttcagacagtggggg

SEQ ID NO: 591928 - DNA, 82 bp, Homo sapiens
ccgtataccagatgtcgaacctgctgcttttctcgctatgctgaagaatatattaaaggaatctgtgaacctgaactagaag

SEQ ID NO: 591929 - DNA, 50 bp, Homo sapiens
acttctggaaggttccatcccctgcaggctcccactccatgaggtatttc

SEQ ID NO: 591930 - DNA, 75 bp, Homo sapiens
gcaataattccatagtcaagagcatcacagtctctgttatgatatgactctgacaaatgcttgtattgccttaag

SEQ ID NO: 591931 - DNA, 87 bp, Homo sapiens
agaggaaacccgtgcgcggctgcgctttcctgtccccaagccgttctagacgcgggttttgcactgattgcaaaaataaagtcctcc

SEQ ID NO: 591932 - DNA, 76 bp, Homo sapiens
caccctggacagagaggcgagactgatctactccaagtgaccaacagcaaaacaaattacgaagttcatagacgag

SEQ ID NO: 591933 - DNA, 85 bp, Homo sapiens
gttggcttcttccagcgaggagtggccaacttccagctggcaagggctggatcttcaacgtggttccttggttggtggcgattcc

SEQ ID NO: 591934 - DNA, 75 bp, Homo sapiens
cctctagagcactgtgtgtctccccggacgcgagcccgctcccctgactgctgatgcaaggaatcccctgggctc

SEQ ID NO: 591935 - DNA, 100 bp, Homo sapiens
gactggaagtgtcctaatccgcaggaggaagagcgcaggcgccgtgaagaagagatgcggcggcagcaagaagaaatgatgcggcgacagcaggaaggat

SEQ ID NO: 591936 - DNA, 100 bp, Homo sapiens
cctcggcagggaggatgacggagctgcagtcggcactgctactgcgaagacagctggcagttacagaatgtctgaaggggacagtgtgggagaatccgtc

SEQ ID NO: 591937 - DNA, 75 bp, Homo sapiens
gtggccgcgagtgcatcttccacgatttcaaatatgcgtgcattagagaatgattttttcaattctcccccaaga

SEQ ID NO: 591938 - DNA, 81 bp, Homo sapiens
cggcggcggcgcgcagcgtgtcaggcggagagacccgccgccaggaaaatggctttgtaaagaagtttgaacctaaatctg

SEQ ID NO: 591939 - DNA, 100 bp, Homo sapiens
tcttgcaactgacgcagtcactgcagcactggtggaacttgagtacccggcagtgtcacctgctcctggatgtcttcaactccaccgagcatgagctgac

SEQ ID NO: 591940 - DNA, 50 bp, Homo sapiens
gattattccaagcaacagaatttggtgaggtaacatacgtggagctctta

SEQ ID NO: 591941 - DNA, 99 bp, Homo sapiens
tgcctcagcctccggagtagctgggattacaggctcagcttgtcaatcggaaacagaaattagagtctgtggaactttctagccaatcagaaattcaac

SEQ ID NO: 591942 - DNA, 75 bp, Homo sapiens
tcggatcggtggagtgcagcaggacactatcctggccgagggccttcacttcagctcaactacactcgaccaggg

SEQ ID NO: 591943 - DNA, 82 bp, Homo sapiens
gccgaggccgccgccgcctctccttgctgcagccatggagtgatggctggaccggcggaggaggcgggagcccattgtcccg

SEQ ID NO: 591944 - DNA, 74 bp, Homo sapiens
cccgctcgctgggagagaggtacctctccttttccctctccctttccctaagatctgactgcagccatgagcag

SEQ ID NO: 591945 - DNA, 96 bp, Homo sapiens
gagcggcgcgcccggcgtgccgagcggcaacggggctccgggccctaaggggtgcgcgtggaattcatggacgacacgagccgatccatcatccgc

SEQ ID NO: 591946 - DNA, 100 bp, Homo sapiens
caacgagttcatctacctggtcggcctggaggaggtggtgcagaacctactggagacacaagcttttggaaaagaagaagagagtccaactcaaagatat

SEQ ID NO: 591947 - DNA, 96 bp, Homo sapiens
ggaggacaaagagcccctcatcgagctcttcgtcaagaaattgaagccaaggaagcttgtgattggctacgggcaactggtttcccccagtatgca

SEQ ID NO: 591948 - DNA, 82 bp, Homo sapiens
gcaagcccagacaatgccggtggaggaatttgtggctggctggatctctggcactgagtaaccgtggtcagcacagcatctc

SEQ ID NO: 591949 - DNA, 99 bp, Homo sapiens
ctctaaatgcagattccagaaaaattacagcacatctcagtgaatttgcaagtggtatcctctggcacatgcaggcctgatgtttcagaatctcctgaa

SEQ ID NO: 591950 - DNA, 98 bp, Homo sapiens
ctggcaggcaagctacaaagcctagacctttcagccgctgccgaaatggagaccaggcacctggatgagatgaagtcggccatgcggaaaggccacaa

SEQ ID NO: 591951 - DNA, 82 bp, Homo sapiens
cgaaggtactcgcagcacttggagcgcagaaccggccgcgcccggaatcaaggccagaggtgtgaacaaggtgtcagctctg

SEQ ID NO: 591952 - DNA, 135 bp, Homo sapiens
gtgcctggcttatttcagttaacatcgtgacctccagttccatccatgttgctgcaaatgaattattctcctgctgttgacttcaggactatgaaccaagcacattataccagtttaataaatgatgaaaccata

SEQ ID NO: 591953 - DNA, 49 bp, Homo sapiens
gatgacaggctagtcacaatgcagatgaacaagttgttatgggcaataa

SEQ ID NO: 591954 - DNA, 83 bp, Homo sapiens
gacggtccacatcagccggcagcccgggcgggtcccggggtgcgagcagcgcacttccgtgtcaacagcatctccaccctgga

SEQ ID NO: 591955 - DNA, 90 bp, Homo sapiens
attaagacttcccagcattcctacagatataaatagctcacaagctcaggagcgccgttctggtctgggcccaaacgctgtccacacccg

SEQ ID NO: 591956 - DNA, 83 bp, Homo sapiens
agccgactgcggtggtcaagagcttcatggcggctgaagagatgcattggcctgtccctatgaaggccattggtgcccagaac

SEQ ID NO: 591957 - DNA, 100 bp, Homo sapiens
gacatggaacagggactcactggggggtcacgaccgctgcaagcaggctttgctgcagattgggatcaacatgatggcactgcctggaggtcgccacctg

SEQ ID NO: 591958 - DNA, 76 bp, Homo sapiens
gctactgcctgggggctgaggatgacaaaaaagccttcataggtttctgcataaagaccaactcctcggaagggaa

SEQ ID NO: 591959 - DNA, 75 bp, Homo sapiens
ccacctccggctgaagctccaggagctgaaggtcccgcagcccccggaagccaatagactccctcagggactctc

SEQ ID NO: 591960 - DNA, 100 bp, Homo sapiens
aggaggagaatgtcttggatgcagaattcttaaaggttgtacatcctggagacctgaagaattctgttgaagtcgcactgaacaagttgctggatccaat

SEQ ID NO: 591961 - DNA, 51 bp, Homo sapiens
caccagaggagattagacgtagcagattagtagggacggggtttcaccatg

SEQ ID NO: 591962 - DNA, 100 bp, Homo sapiens
acgatctctttcgccggctcggcgcgggggccaaattcgacacgagacgcttctcggcagacgcagctcgattccagcactgctcagcacgcaggcatgt

SEQ ID NO: 591963 - DNA, 74 bp, Homo sapiens
ggagacacgccaaagctcccaagcatcttcacaactatttcacagtgactcttggaattcctgcttggtgttct

SEQ ID NO: 591964 - DNA, 100 bp, Homo sapiens
ggggacaccagcagctctgctgcggagcgggaggaggaccgaaaggaagccctactgagcctctggctctcctacagtgatggcaccacagccccactct

SEQ ID NO: 591965 - DNA, 82 bp, Homo sapiens
agcgagctgagtggttgtgtggtcgcgtctcggaaaccggtagcgcttgcagcatggtaattttttctgcaggatgaattaa

SEQ ID NO: 591966 - DNA, 50 bp, Homo sapiens
agacgccccagggcaagcgaaagtatgtgacatcagtggaagaaaataca

SEQ ID NO: 591967 - DNA, 50 bp, Homo sapiens
gttgggaagttcttcacttgaaggaagatgagaatgtgcctactgctcct

SEQ ID NO: 591968 - DNA, 88 bp, Homo sapiens
ctgcctccggggacaagaaactagagcaaataaccgttttgaaatttgttaatgtaccgcggtgaggctcttgaagatttcacaggcc

SEQ ID NO: 591969 - DNA, 100 bp, Homo sapiens
cgaagattgacgccagtaagaacgaggaggatgaaggatgcttgtttgctactgatgggtgtgagcaagttagatattctataccggagacttctcctaa

SEQ ID NO: 591970 - DNA, 74 bp, Homo sapiens
cttgtcctggctcttgccctcatcctggttctggaatcctcagttcaagatgccatcagcgctgcgaatccccg

SEQ ID NO: 591971 - DNA, 75 bp, Homo sapiens
tgggacattgctgctacttctggcaggtgtggcctgcctccgaggtgaaccagtgtgttattggtactgctcagg

SEQ ID NO: 591972 - DNA, 83 bp, Homo sapiens
tgcctggcagccccgctctctgcagctctgcagaacattgctgccatcagcctggccatcaactacccaaacaaggccacccg

SEQ ID NO: 591973 - DNA, 80 bp, Homo sapiens
atgctcagggaccctgtggagagattatttactggcaagatgagcaggattaccatgaaagaaaagtccagatggactga

SEQ ID NO: 591974 - DNA, 75 bp, Homo sapiens
gatgctggcgatgctgagctccctactggctgagggcagagactctcccgctgaccacgttgcctcttgtggtgt

SEQ ID NO: 591975 - DNA, 75 bp, Homo sapiens
ctacgacatccacttctaccccaccttccggagctccacgcaggagatcggtgaggagctgatcaacggagtcat

SEQ ID NO: 591976 - DNA, 75 bp, Homo sapiens
agcctctcgaatgggcacacctgtgtagttactccacaggatccgctgaacataggatgttgccacaaaatctac

SEQ ID NO: 591977 - DNA, 100 bp, Homo sapiens
tggcagtacgcgtaagacctttcaccaagagggagtaagagtgcaaaaatccagtcaggtatatttggaaaaggatctgcttattcacgacacaatgccg

SEQ ID NO: 591978 - DNA, 83 bp, Homo sapiens
gtcagagcctcatggagtacggtcagctggccgccggcacctgtgagattgtgaccttggaccgggacagcagccagcctcgg

SEQ ID NO: 591979 - DNA, 98 bp, Homo sapiens
gagcagatgacaaccatagcccagtgccaatgcatcttctgtactctgatgagcgtgaagccgtgcagaagaagaccttcaccaagtgggtcaattcc

SEQ ID NO: 591980 - DNA, 101 bp, Homo sapiens
cagacctgcacaaacccactggacaccttcgtcccctttgatccctgtgtgctgaagagggtcccagtcctatgaggatatgagaggaatcctgtatgcag

SEQ ID NO: 591981 - DNA, 88 bp, Homo sapiens
gagatcgaggacgccgagaagtactccttcatggccaccgtcaccaaggcgcccaagaagaatgaagcccaaactgccaaggagttta

SEQ ID NO: 591982 - DNA, 82 bp, Homo sapiens
cgcaggtcgaggacggtcggactcccgcggcgggaggagcctgttcccctgagcaattctgtggtgttcttggtcacacatt

SEQ ID NO: 591983 - DNA, 75 bp, Homo sapiens
ctcttcaagaagaaaaccgtggatgggttttgacccaccacatcagagtgacacaagaaccatctacgtagccaa

SEQ ID NO: 591984 - DNA, 90 bp, Homo sapiens
aaactgatggctactaaaaagcagagcatttctgggcaaacttgaagataaatcttttgactccagctctttagaggatctaaagtgacc

SEQ ID NO: 591985 - DNA, 75 bp, Homo sapiens
cgaagaggagagagcgcgggcctctaggaaggagggatttgttcgtgttgaccgagattatgtgctgaagtctgc

SEQ ID NO: 591986 - DNA, 90 bp, Homo sapiens
actctttgacatggagagaatttcactatattcaggtcctgtacaatgggttcactggtcgaaaaatcacatcacaaatatttattggcc

SEQ ID NO: 591987 - DNA, 98 bp, Homo sapiens
gtggagcccacatggctcaccgccagcaatgcccggtcggaccctttggggctgaatgcgaccccactgccccaagactcaagcttggtggaaactcc

SEQ ID NO: 591988 - DNA, 73 bp, Homo sapiens
gtcagagggctgtgaagacgcacggtgccaggaccaagtatctgcagcccataacggtacgtgaaggccaaac

SEQ ID NO: 591989 - DNA, 75 bp, Homo sapiens
ggcagagtgctgatgtgaaaaataccacgacaaaaccaccctattttcggctttgtgagaaaccttaccatcaaa

SEQ ID NO: 591990 - DNA, 99 bp, Homo sapiens
tggaagcaggtggaattatgccctgttggttccaatgctgggattggctgcttttctttctcttcagcaacgggtagcagaattggaaaaaattaatgc

SEQ ID NO: 591991 - DNA, 98 bp, Homo sapiens
ggtagtgacattgaaatggatgagcaacttattaatagaaccaaacatgtgcaacaacgactttcagacacagagatgggaaccaacaaatgtgccag

SEQ ID NO: 591992 - DNA, 75 bp, Homo sapiens
taacgacggcctcagcaggcggggaagatgaaagggtcatcatcagatttgaaatatttaaagtggatacaaaac

SEQ ID NO: 591993 - DNA, 51 bp, Homo sapiens
acctacagaatctttttgtaccaaggtatctctcctaaatgtgtgatcaag

SEQ ID NO: 591994 - DNA, 100 bp, Homo sapiens
gcctcctctgtggagaccctgaggaaaactgtgcagtcactgtgtgcccagtattctgcagacaaacgagaagatgagaagatgtgtgatcatttgataa

SEQ ID NO: 591995 - DNA, 100 bp, Homo sapiens
aaaacagaacaggaggtggtagagggcatggatatctctactcgctccaaaggttaaaaatctgtaagagcctgattttagaattcaccagctcctcaga

SEQ ID NO: 591996 - DNA, 120 bp, Homo sapiens
gttgaagatcccccggaccaggggcgagggctacccgctctttgccgtgacaacaccgttcccccagccgggctggtgaccagaagtcagcagcttcccagaagccccgaagccggggca

SEQ ID NO: 591997 - DNA, 51 bp, Homo sapiens
gttcgagtctggggctgtcgctgtgctctgacttcagaaatgggcttggga

SEQ ID NO: 591998 - DNA, 75 bp, Homo sapiens
actcagcgcctccagaggcctcaggtgctggagaatctggtaaaagcaccattgtgaagcagatgaggatcctgc

SEQ ID NO: 591999 - DNA, 50 bp, Homo sapiens
ctgacctggccggctatgaggcccaggctgtggcggggccttcgtgggcc

SEQ ID NO: 592000 - DNA, 96 bp, Homo sapiens
cgcagaacagccctgaggcaagagaagaaaggctaccggctctctgaccagttccacgacatcctcattcgaaagtttgacaggcagggacggggg

SEQ ID NO: 592001 - DNA, 95 bp, Homo sapiens
gtgagttgaaacgctgcctggaaaggaagtaccaggacttgcacaggcaagaaaattggatgtatattttgaatatgaagaaaaaataatgagca

SEQ ID NO: 592002 - DNA, 100 bp, Homo sapiens
acacgttgtttaacttaagcaattttttggataaaagtggattgcaaggaacaacctgccacactttcagctgcccatggcatttatgggcacaagtcat

SEQ ID NO: 592003 - DNA, 123 bp, Homo sapiens
gaatgctcgcgccacgctcagcagcatcagacacatgatccgcaagaacaagtaccgccccgacctgcgcatgggacttccttccccgcggttcaggaatcgtcacccggcggcctctcattc

SEQ ID NO: 592004 - DNA, 100 bp, Homo sapiens
agcaaaacgatctaccagggatttctgttcttatgacctttccacaacttggaccagttcagcctattccttgttcctgactgccggaatcagagccgcg

SEQ ID NO: 592005 - DNA, 134 bp, Homo sapiens
ccggcccgcctgccggagccgtggtggcagccccgggaggagcactggcgtctgtttccttcgtggatatcaaagtattgcagagtgccttagcagccatccgacatgcccgctggttcgaggaaaatgcttct

SEQ ID NO: 592006 - DNA, 100 bp, Homo sapiens
cagccccttccggttcgagatcagcttcgagtgcagtgaagccctggcggacgattcatgttacatgtaaagctgtcctcatttgtgactatggacctat

SEQ ID NO: 592007 - DNA, 100 bp, Homo sapiens
gcaaacaagccaatcccaggaggaaaaacgaacaactctgctcatggtgattacatgcaaaataacgagagcagcttaatagagcaagctccaatacctc

SEQ ID NO: 592008 - DNA, 80 bp, Homo sapiens
ccccagcagcccccgaaggccctatcaggacatggagtatgaaagacggtgaaagcccagcctccgtggttcttaatgcc

SEQ ID NO: 592009 - DNA, 74 bp, Homo sapiens
ggcgcacgacgagtactggcatgcgcacgtggacaaggtgaagtcccgcttggcttttgggaagcccctggtgg

SEQ ID NO: 592010 - DNA, 50 bp, Homo sapiens
agacaacagcctggtggcagcggactggaatgtcacgtggaataccagca

SEQ ID NO: 592011 - DNA, 100 bp, Homo sapiens
ccccagagtgcctggagatgcagttataatgccattcagagaagtagccaagccaacagagcctgatgagcatggccagaacacaaagcgtgaatccgga

SEQ ID NO: 592012 - DNA, 83 bp, Homo sapiens
caccgaggaggcggcggagcagcgggcggaggtggaccggatgctcaggtcaaaatgcagatcttcgtgaaaacccttaccgg

SEQ ID NO: 592013 - DNA, 108 bp, Homo sapiens
acacatggtgcaggattttccatacgttatgaaattttcaagagagggcacttcatgtatctggaagctactgcagtgggccttcggggtgacaaagcacacttcagg

SEQ ID NO: 592014 - DNA, 80 bp, Homo sapiens
acaaaatcaaccgggaccccagcttttcagaactgcagggaaacagccatcatgaggtggagtctttcattttggatcag

SEQ ID NO: 592015 - DNA, 75 bp, Homo sapiens
ggggtccatacggcgttgttctggacccctttgctgatgcaactaagggtgacgacttactcccggcagggactg

SEQ ID NO: 592016 - DNA, 89 bp, Homo sapiens
ctgccagtcccctgccccgggcaaagcccatctggtccgccgagcagctggtcatcaatgctgctttgggatttgacacatttgttgtc

SEQ ID NO: 592017 - DNA, 82 bp, Homo sapiens
tgaaggtccggggcttgccctggtcttgctcggccgatgaagtgcagaggtttttttctggaagagtttaaagaacgctgta

SEQ ID NO: 592018 - DNA, 75 bp, Homo sapiens
tcgtcagtgaggcggaaattgtggtgtccttgtcctaccgatgttcaccgtgctcaggaaattcaccattccact

SEQ ID NO: 592019 - DNA, 99 bp, Homo sapiens
cagtatcctcgaccgatactacacaccgagtgccactgattaatgaacttgaatcagcaatacatcagctgtacaaacagcgagcttcccgccttgtcc

SEQ ID NO: 592020 - DNA, 75 bp, Homo sapiens
cttggctccccaaagttccacaggtcactggaaggactgagcgcattcaggagcctggaggaactcatcttggac

SEQ ID NO: 592021 - DNA, 75 bp, Homo sapiens
cgcgggtacagcttttcgctgactacattcagtgatgatgatgatgattttgatgatgaggaagctgaagaaaaa

SEQ ID NO: 592022 - DNA, 98 bp, Homo sapiens
tgatctccatgtcctgttgtggggcttttacagcctttggaataatcatgggccagactgggaagaaatctgagaagggaccagtttgttggcggaag

SEQ ID NO: 592023 - DNA, 90 bp, Homo sapiens
ccccggccccgcgcggaggggcgggggaggcgccgggaagtcgacggcgccggcggctcctggaagctcttcgtgggcggtcttgactgg

SEQ ID NO: 592024 - DNA, 75 bp, Homo sapiens
ggtttttattgacagagctctgatagttgttccttgtgcagaagtgtccactataggatttggctttgtgctgga

SEQ ID NO: 592025 - DNA, 50 bp, Homo sapiens
gctccggggaggtcacctgacgaggaggctaaggcagctggataagcaca

SEQ ID NO: 592026 - DNA, 100 bp, Homo sapiens
gaaaaaacttcagcatgtgccaggaacacaacctcaccttgatcagtttgcagatgctgaaggttactttgctgcttgcacaacagatacaactatgaat

SEQ ID NO: 592027 - DNA, 90 bp, Homo sapiens
ctttgagattggtctggattttacagaacttgactgaggtgggaccatccagttgcaggaaaacaagcttgacacgcccactaattctac

SEQ ID NO: 592028 - DNA, 82 bp, Homo sapiens
gatttttaccagtttacttttaattttgcaaagaatccaggacaaaaaggattagcaaccatgtccaagggacctgcagttg

SEQ ID NO: 592029 - DNA, 100 bp, Homo sapiens
gttccatccatgttgctgcaaatggaacaggatctggacttggcacatttcttttaaaggtgcttgaagacgaattcccagaagtatacagatttgtgac

SEQ ID NO: 592030 - DNA, 100 bp, Homo sapiens
agactggggagctgtcgtctgccgacgagaagcggtaccgggccttgaagcgcaccgcagagagagagctgctgatgaccgagacatgggtgcccggcac

SEQ ID NO: 592031 - DNA, 100 bp, Homo sapiens
gggccgtcaagatcctcaagaagaagaagttgcgaaggatccccaacggggaggccaacgtgaagaagagtgtggccatctggggccgtgtggtatttgc

SEQ ID NO: 592032 - DNA, 101 bp, Homo sapiens
ggaccacctggagaatgtcatcaagcagcacattcaaggtaggcgaaaaccaagagtacatcggcctcgttctcctatattggaagaaaaagacatcccgc

SEQ ID NO: 592033 - DNA, 101 bp, Homo sapiens
ggcttcaagtggcaggactttaagtggttgaaatacatcgtctacaaggagagagtggtaagaagtttgatagctgtaggactgggtgttgcagctcttgc

SEQ ID NO: 592034 - DNA, 100 bp, Homo sapiens
acacacctcagaaatttatagataacaggatcatttcatctaaggtagatggcacaaaccttcagggttttactaatcagcaagcagtagaggtattgcg

SEQ ID NO: 592035 - DNA, 90 bp, Homo sapiens
cagcgagtaaaggagaaagaagccatattgaaagaagctgagagagaggcccgatgagagaaagggaaagttaaggatgctggagcagaa

SEQ ID NO: 592036 - DNA, 112 bp, Homo sapiens
tctcatctcgctcggctgcgggaaatcgggctgaagcgactgagtccgcgatggaggtgagaagccctaccactgcaactgggacggctgcggctggaagtttgcgcgctca

SEQ ID NO: 592037 - DNA, 115 bp, Homo sapiens
gtctgttgtgtcttgttgcgggcaccgcagtcgccgtgaagatggcgtctaccagccgaatccacattcatctcaatggaaggatcctgccttaagtcaacttatttgtttttgc

SEQ ID NO: 592038 - DNA, 101 bp, Homo sapiens
ctccggttccgtaacattgcagcaaagagggatgttcctgccctggacagcgccaagaagagggagggcgagcttacggtggcccagggccgtgtgaagga

SEQ ID NO: 592039 - DNA, 90 bp, Homo sapiens
cagcgcctcggccgaacccctccgcagcagtgtgttccatgggaaccggtacaagcagactctatagtgctctcgccaagacactgaaca

SEQ ID NO: 592040 - DNA, 74 bp, Homo sapiens
ctgctgctgcggctctcactgtgcgggctgctgctccagagggcggagggccatgtggaagagctgtggggcct

SEQ ID NO: 592041 - DNA, 82 bp, Homo sapiens
gattgagcgccaccctgtggacatcagcgccatccccgagcagcggtggaagctgccaacatgcccatcactcggatgcgca

SEQ ID NO: 592042 - DNA, 75 bp, Homo sapiens
ggattgtcactccaacctcttttcgctggggttgcagatggtgtaggaggctggagagactatggagttgatcca

SEQ ID NO: 592043 - DNA, 83 bp, Homo sapiens
gggaagttcaagtttactgcgaagtccacccagcgttccggagccaaaacagagtggagtacgagaaaagggtccgagcacaa

SEQ ID NO: 592044 - DNA, 103 bp, Homo sapiens
cgctggagctgggtcagtccgccgctcaccccgcggccgcaccttcccgccttctcaggtgtggacactgccagcggctgcagccgacttggaatgacctggg

SEQ ID NO: 592045 - DNA, 82 bp, Homo sapiens
gcggttcccgagttgctgcagcagcaggaggaggaccgcagcaagacaatgcagatcttcgtgaagactctgactggtaaga

SEQ ID NO: 592046 - DNA, 82 bp, Homo sapiens
cggcacctacggcgacgtctacaaggatgttcacggaagaccagggtgtagatgacaggctgctctatgacattgtattcaa

SEQ ID NO: 592047 - DNA, 96 bp, Homo sapiens
gtacagtatatggcagagctaatagaggactactgttcgaagatttttggaagaatactgagaacggcataaagtgaagatcgacatttaaaaaat

SEQ ID NO: 592048 - DNA, 100 bp, Homo sapiens
tgatggacataatgggcttggaaagggcaagacatctgtatagattctgcttcatccgtgagagagaataagcaacctgaaggtttggaattaaaacaag

SEQ ID NO: 592049 - DNA, 83 bp, Homo sapiens
tacggcaaaggcaagagtaacagcagcgccgtcccgtccgacagccaggcccgggagaagctgatcagctgaccgaagaacag

SEQ ID NO: 592050 - DNA, 87 bp, Homo sapiens
ctggagtccttggcgcccccagagagtaccgacgagggggccgaaaccgagagatctgttcagcctgtgtgcgctgtaagagctgtg

SEQ ID NO: 592051 - DNA, 100 bp, Homo sapiens
ttgaccctgtcatgcagtcccttggatattgctgtggacgcaaggttgcacaccgatgctccagaattgtgagggagccatactctacagctattccacc

SEQ ID NO: 592052 - DNA, 82 bp, Homo sapiens
gtgcaactattcgcagtccgagcgggagcatttcctgaagacgtagtcatgcagcacgtcagcagctcccagagcagccagc

SEQ ID NO: 592053 - DNA, 75 bp, Homo sapiens
aagaaacaagtttgctctcagcggtgagttggactatggatcaggtactgtgctcagcatcagaaaatgggatga

SEQ ID NO: 592054 - DNA, 100 bp, Homo sapiens
accctgggctttccgaggtgctgtcgccgctgtccccaccactgcagccatgatctccttaacggacacgcagaagactgttggagagaaggaactggac

SEQ ID NO: 592055 - DNA, 74 bp, Homo sapiens
ttcggaacctttcttcccctggatgggaaaacatctcaaggtgctgtcctggagccgagagctgccttgcgctt

SEQ ID NO: 592056 - DNA, 100 bp, Homo sapiens
acttctgaagaacaaatcagcctggtcaccagcttttcggaacagcagagacacagagggcagtcatgaggcttggagaaccccctgcctgagcgtcccc

SEQ ID NO: 592057 - DNA, 108 bp, Homo sapiens
tgcccccccttccccacgcaaccccagatccatttacactttacagtcagcccaaggccaaccccactgtcactctgttcccgccctcctctgaggagctccaagcca

SEQ ID NO: 592058 - DNA, 100 bp, Homo sapiens
agagcaaaagccttcctggttcttctatatattttgatttataaccgtgagatgttgctgctcagttgccaagcaagctgtatgcaggagctattcttga

SEQ ID NO: 592059 - DNA, 83 bp, Homo sapiens
ggaccggctgtatgattaggccacaatcttcaatgagtaaacatattcctgtgatggctgtggacacctagtgacttatcagg

SEQ ID NO: 592060 - DNA, 100 bp, Homo sapiens
agattactatgtcggaacagctggatttacctgtgagacaggcagattgaatacctgcttaagaagcttacagaagctatgggaggaggttggcagcaag

SEQ ID NO: 592061 - DNA, 100 bp, Homo sapiens
atgtccgccagagctgcggccgccaagagctccaaacgagaatggaagccgctggaggaccgtagctgcacagacataccatggctgctgctcttcatcc

SEQ ID NO: 592062 - DNA, 90 bp, Homo sapiens
cgcagaggaggagcgcagcccggcctcggtctcctctgagcctccggcctccataagacccaaaacagatgacacctcttcccagtcccc

SEQ ID NO: 592063 - DNA, 90 bp, Homo sapiens
tctttctgttcaggccagaccctctgggagcttctcagccattttccacagatcagtgcactggtgattgctgcggtgtttgaccgagac

SEQ ID NO: 592064 - DNA, 118 bp, Homo sapiens
gagagcgagctgagtggttgtgtggtcgcgtctcggaaaccggtagcgcttgcagcatggtgtcatggagaaactccagctgggcccagagattctgcagcgggaaaatccaaggctt

SEQ ID NO: 592065 - DNA, 75 bp, Homo sapiens
cgtgaccgagagcgcgaatatcgtcatcgttagaagattgcaggaattgacgctgtataatccagaacgcactat

SEQ ID NO: 592066 - DNA, 88 bp, Homo sapiens
aggcctccattactgtgtctgtgctccacggcacccattctggccccagctacaccccaggaaatgctgacttttaacccacacaagc

SEQ ID NO: 592067 - DNA, 51 bp, Homo sapiens
gaagataagtttaggccagacatggagctgtttgcagacaaggtcccaaag

SEQ ID NO: 592068 - DNA, 106 bp, Homo sapiens
tcttccaagaaaccaacattcccaacagccaccaccaccaccagatggtttggtgcacctcgatttggaggaagtagggcagggcccttatctggaaagaagtttg

SEQ ID NO: 592069 - DNA, 75 bp, Homo sapiens
gcgcgagtgaggaaaggaggtactgtaggccctcagtctccgaggaggatctcaaggtcctgttttccagcaatg

SEQ ID NO: 592070 - DNA, 100 bp, Homo sapiens
gagattaaatgcggtttccaagcacacgggtacttggaaaaatggacaaggattgtgaaatgaaacgcaccacactggacagccctttggggaagctgga

SEQ ID NO: 592071 - DNA, 97 bp, Homo sapiens
tacttctcagggctaatatatgctggaggctctcaggtcatttttaccaacccattggagatagtgaagattcgtctgcaagtagctggagagatca

SEQ ID NO: 592072 - DNA, 96 bp, Homo sapiens
tttgaggatgcagatgttgatcactgaaaatgatttatgcaagtttaagatgatgaggagtctgatgaggaagctgtgaagaaaaccaacaaatgt

SEQ ID NO: 592073 - DNA, 100 bp, Homo sapiens
aaaacattgaagacgtcattgcccagggtacaaattatttggctcgacttctagtttttgtcttatttcaggcagctctgtccagtggagtgacccgttg

SEQ ID NO: 592074 - DNA, 74 bp, Homo sapiens
gagtacgatactcaggtcaaagaagttggtgagatggcaaagcagtatatagagaaaagtcttttggttccaga

SEQ ID NO: 592075 - DNA, 83 bp, Homo sapiens
aaggacacggtctacaccgacttcgacgacctgcctagagctggaacgttacctccagagcgagccctgctatgtttcagcct

SEQ ID NO: 592076 - DNA, 100 bp, Homo sapiens
aaaaaatgtggcagcgcctgaaaggaatgattgtaagtggaaaatgtatatggagatggatggggatgaaattgcaataacctacataaaagatgtgaca

SEQ ID NO: 592077 - DNA, 75 bp, Homo sapiens
tggatctctggtgagacatttttcttccttctgtcacatcacacccaatggccataggaaaaggatacagagtag

SEQ ID NO: 592078 - DNA, 82 bp, Homo sapiens
gggtctctccagaaaatcttgtggacaaatccaggggaagttgaagactgggatagtttccaagctattttggatcatacct

SEQ ID NO: 592079 - DNA, 50 bp, Homo sapiens
ccggaggagtctcagagctgtcagaaagttgctctatatgcaatcagtgc

SEQ ID NO: 592080 - DNA, 89 bp, Homo sapiens
agccactgcagtatcacagccagagcagttgaacaacagatggattgtagttcagtcccaattgtgatgctgcccaaaatagaagaaga

SEQ ID NO: 592081 - DNA, 100 bp, Homo sapiens
agaatccagaatagccctcagaagaaagattctggaggaaaggtttacaagcaggccacgattgaatctctgaagcttatgtccctgatgccaaaaatgc

SEQ ID NO: 592082 - DNA, 75 bp, Homo sapiens
ccgctcccttccccgcgcagccccgcacggcccgggcccactcagccatcgctcccagccccaacagccttccca

SEQ ID NO: 592083 - DNA, 85 bp, Homo sapiens
tgaggaccgtgttcaagaggaagcccgctgccttgtggaggagttgagaaaaaccaaggagtcacctaaggtcctgcgagtacaa

SEQ ID NO: 592084 - DNA, 96 bp, Homo sapiens
gaagaatttcgatctccgccctggggtcattgtcagttctgctgatggaacagccagccatgaacaaggtgaggaagaagaaagaggaagcgctga

SEQ ID NO: 592085 - DNA, 75 bp, Homo sapiens
gacagtcatcaccatgggccgggatcacattctgattgatcaagtcttccataccagggaccaggccaaaaccag

SEQ ID NO: 592086 - DNA, 135 bp, Homo sapiens
ctcgcacatttgacttggaagcaatgtttgaacaaactcgaagaacagctgtggaaagaagttgcaaaacactggagaatagtgacagtggtacaggaaagaaagaaaaagaaaagaaaaacagaaagggcaaag

SEQ ID NO: 592087 - DNA, 101 bp, Homo sapiens
taactgcaacacaaaacactaaaaatggagttgatgtattgcctaaaatcatccagccaaaagaatgcaatggtgtaaagattccagttgatgccagtaaa

SEQ ID NO: 592088 - DNA, 51 bp, Homo sapiens
attttgctgtctcctcctaatacgagtgacaaaaagagtagtccccagaaa

SEQ ID NO: 592089 - DNA, 100 bp, Homo sapiens
atccagaagccatgatgaaatcactatccagccaggagacatagtcatgtacgagctcaactggaggcagtcctgtgcggaaatctgaagaaaaaacaga

SEQ ID NO: 592090 - DNA, 75 bp, Homo sapiens
gaccgcctgggggactcggaactgctttctgtctctggtcgtgatgagaacagtgtggagttaaccatggctgag

SEQ ID NO: 592091 - DNA, 97 bp, Homo sapiens
gttgctttcattgtgggagagatgaagaacctgagtcaggacgtaaatggaaccctgttggtagctggcagtgttgtgatggcttttgaagaagtat

SEQ ID NO: 592092 - DNA, 75 bp, Homo sapiens
aactggcgggctccgtggaagcgtggccggcagcgtcccggacgaggaggagtgagagcgcagagagccctgaga

SEQ ID NO: 592093 - DNA, 90 bp, Homo sapiens
ccaaggaaggcatcctgcagtattgccaagaacacttttcaggattagaagaggctgtgtatagaaacatacaagcttgcaaggagcttg

SEQ ID NO: 592094 - DNA, 100 bp, Homo sapiens
aggccgaggccatatccgagcggtcacacatcccgggtcctgagtctgaccatgagcccagatggggccacagtggcatccgcagcagcagatgagaccc

SEQ ID NO: 592095 - DNA, 100 bp, Homo sapiens
caggcaaactgtcagaaaagagtagcctgggctgtctggaaatctgagtgtaaacaggaacatcgataagtagtgtaaaaacttgcacaatgaaatccga

SEQ ID NO: 592096 - DNA, 83 bp, Homo sapiens
gtggttgcaacggagataaattcccggaaccgcgattcggcgtgtcaggattcaagatgaccaacgaagaacctcttcccaag

SEQ ID NO: 592097 - DNA, 90 bp, Homo sapiens
ctttgagtgcatctgccccgagcagtgggtgggggccacctgccagctggtgccggggggccccctcctcaccagtacccaccccagggc

SEQ ID NO: 592098 - DNA, 100 bp, Homo sapiens
cccgcagctcagcgcccgcagccagggcgggggggatggcgtctccccgactccacctgagggactggctcctgggggcgaagctgtgctcaggcccggg

SEQ ID NO: 592099 - DNA, 75 bp, Homo sapiens
actcaactggctatttgacagaggtgacccgaggagggactccgcctccgagcggctgaggaccccggtgcagag

SEQ ID NO: 592100 - DNA, 98 bp, Homo sapiens
ccggggcctggggctgcctgccgggcggccgggcgcggcgagcccagacagccgctcaggaagcaatcttgcatgcgtctggaaatggcacaaccaag

SEQ ID NO: 592101 - DNA, 100 bp, Homo sapiens
cctgattcaggtggccagcagggagcagctcttgtacctgtatgccaggtacaaacaggacagtcattttgtttactcattcagccctgttgcaggtccc

SEQ ID NO: 592102 - DNA, 78 bp, Homo sapiens
gcatgccgtctgggagcataagctgggctcccaggtcagctgtgcagtaggggcaggagagtttgtgagcccctgtga

SEQ ID NO: 592103 - DNA, 75 bp, Homo sapiens
cctctctcaactctctcccttaagcactgggatcagatgctgagatgaatcgtcacctgtgtgtttggcttttta

SEQ ID NO: 592104 - DNA, 75 bp, Homo sapiens
agagactgcgaaacgatcctctcaatcaaaataagctccatcaagtatgatggtgaaggatgaatatgtgcatga

SEQ ID NO: 592105 - DNA, 100 bp, Homo sapiens
tgatgaaatgtgcctctcgccttacccgtgtgagaatacctgtggtgtggcagcgagtattttggttgcttcaggtgaatgcaatgaagacactgaagtt

SEQ ID NO: 592106 - DNA, 82 bp, Homo sapiens
ccagttccgcagtccttcctggcaaacagcacctgaactcctggggggaccgtcagtcttcctcttccccccaaaacccaag

SEQ ID NO: 592107 - DNA, 80 bp, Homo sapiens
aattgatatccacggtgttccttatgaatccaaaggactgcatgacacaccataggatatagtcaagaagcctttggaca

SEQ ID NO: 592108 - DNA, 82 bp, Homo sapiens
tgacgtggagcggtacatcgcctcggtgcagggctccaccccgtcgcctcgacagccgggggccatcaagtataagaccaca

SEQ ID NO: 592109 - DNA, 100 bp, Homo sapiens
gtggtacaggagagaatttgtgatgatgagctgatcttaatcaaaaatgatgcagccaacacgaacggttgtcatgtgtaacacaactttcgatcaccgc

SEQ ID NO: 592110 - DNA, 100 bp, Homo sapiens
tggaagcgaagccgaaaaaggcagcagcgaaggaaccctaaggactctgcaatatgaataattccctagagaacaccatctcctttgaagagtacatccg

SEQ ID NO: 592111 - DNA, 89 bp, Homo sapiens
gccacaatggagacgccgccgctgcctcccgctcgtcctcttgagttctggcgccttgactactgggaagatgacttgcggcgccggcg

SEQ ID NO: 592112 - DNA, 83 bp, Homo sapiens
tagaaggattcaaatgctagcagacacggtggctactctgcctcggggacgaaagcaggaattgcattttgtgaaaaaagaac

SEQ ID NO: 592113 - DNA, 101 bp, Homo sapiens
atttgatttccggagtcagtcattttactgtcaagacatttcttcggcattctgcaacaggacttccaatagtagtcagacattatcatcctgtcatacta

SEQ ID NO: 592114 - DNA, 82 bp, Homo sapiens
gtgtactgctgctagaatgtttgagcaataatgacgatgaggacctgacaccagagcagaaggcagagcgtgagaaggagcg

SEQ ID NO: 592115 - DNA, 98 bp, Homo sapiens
cgtccctctctgtgggcatcctggctgaagatagcctcaaggagcagaagaatctcaattccttctttgccgtcatgtttggcctcagcaactcggcc

SEQ ID NO: 592116 - DNA, 100 bp, Homo sapiens
cgcaaccagccttctagggcggcggaggcgagaaccactgtctctgatcaacgtgcggaagaggaacgtggaatctggggaagaagagctggcgtccaag

SEQ ID NO: 592117 - DNA, 98 bp, Homo sapiens
tggccctgtatcaggagcacagccacatgaaatgaagatcacctctgcctatctacaggacattgagaatgcctataagaaaacctttctccctgaga

SEQ ID NO: 592118 - DNA, 74 bp, Homo sapiens
tccagagccaaggaggaagggttgtccggcttatttcaacaattccaactagccgtttaaaattcctcaaagaa

SEQ ID NO: 592119 - DNA, 90 bp, Homo sapiens
gacggcggagaaggagtgcggcgccctgggcgggctcttccaggccatagtcaacgacatgaaggtctcggcgcggaagatggccggcgg

SEQ ID NO: 592120 - DNA, 83 bp, Homo sapiens
agggcgtggcctgaggcttggataagtgggggcgatgccagtccctccactccagaggagaacgaaaccacgacaaccagcgc

SEQ ID NO: 592121 - DNA, 100 bp, Homo sapiens
ctggcagcaccgacgaacccccaatgctgaccaaggaggagcctgttccagaactgctggaagctgagatcagcttgaacgggtctttttacgacttggc

SEQ ID NO: 592122 - DNA, 75 bp, Homo sapiens
tcaggggcgtgcctacctcttcaactcagtatgtgttcagagcaacattgttttgttgacacaagcatttagaag

SEQ ID NO: 592123 - DNA, 82 bp, Homo sapiens
ggaggaagatggcgggacggctgccggcctgtgtggtggactgtggcacggggactgcatcgacgtaggctggtgggaagga

SEQ ID NO: 592124 - DNA, 83 bp, Homo sapiens
gttggaagcagccgatccagcctgcggagcctgtggggcagactttatattcagagcaccaatcaaattaagcaagcctgggg

SEQ ID NO: 592125 - DNA, 50 bp, Homo sapiens
tcaagtatgtcatctctcacctaaacaagagggtgaggacaaaatcttct

SEQ ID NO: 592126 - DNA, 50 bp, Homo sapiens
gggcaaatgcgtgctggttcttaaagagagtcatgtgctgttcctggggc

SEQ ID NO: 592127 - DNA, 83 bp, Homo sapiens
gagcaagctgatgaaggcctactgcgagaggcagaagctgcacacatacatgtaagagaagcaaaaatgtcagatgatatcag

SEQ ID NO: 592128 - DNA, 100 bp, Homo sapiens
ggattgtcaaaaggaggattgaggaggatcagatcaataatggaggcaatgcacacggcactttcttgggtcacattcggttggaacctcacaagcctca

SEQ ID NO: 592129 - DNA, 80 bp, Homo sapiens
ctgcgttgacacgtcttatttaatccacatcataggaacggaagtttgtaggtggatctggtcaagtgagcgaacggata

SEQ ID NO: 592130 - DNA, 74 bp, Homo sapiens
gtccttctccactttcgccagcccgtgccgcgagcgcggcctgcaggagggagtgtttcaagagccagtgacaa

SEQ ID NO: 592131 - DNA, 100 bp, Homo sapiens
tgctggatagataccgaattcttatcacaaagatgcctgtgaggagccaccaacatttgaagctatggagctcattggtaaaccaaaaccctactatgag

SEQ ID NO: 592132 - DNA, 98 bp, Homo sapiens
aataaagtagcagggaattttcacataacagtgggcaatctatacgagatactccagccaaaaatgcacaaaagtcaaatcagaatggaaaagactca

SEQ ID NO: 592133 - DNA, 100 bp, Homo sapiens
aactggagtccggctttaactatttctaaagttctcctctccatctgctcacttcttacagattgcaaccctggtccctggatggccggttgcaggtgtc

SEQ ID NO: 592134 - DNA, 82 bp, Homo sapiens
cgcctcccctctgaggaccgaagatgagcttcctcttcaaccatgtccaagggacctgcagttggtattgatcttggcacca

SEQ ID NO: 592135 - DNA, 50 bp, Homo sapiens
ttggaggatgcggctttgatggggaccagccatgcgtgacaacagagctg

SEQ ID NO: 592136 - DNA, 100 bp, Homo sapiens
ggccctggaagatatgcgcaagaacctggagaagccaagaatgttaaggaacgtggacacaaaggatgaggttggaacagaagtttaatatgcaaaagaa

SEQ ID NO: 592137 - DNA, 83 bp, Homo sapiens
agaatgtctaagcccctggaggccgagaagcaaggtctggactccccatcagagcacacagatgtcatgtggcctgtgttttg

SEQ ID NO: 592138 - DNA, 90 bp, Homo sapiens
gtcgtttatcagcaattacaatggcacttcaatatggctcagaaagtgaagaagatgctgctttagctgttgagagaatatcagcagagg

SEQ ID NO: 592139 - DNA, 100 bp, Homo sapiens
tcctaaatggtgcgtggctgacaccgtagtgttttcaaaactggatatggccaggatgctatagcattgtcagtggccatgggtctggatttccaagaaa

SEQ ID NO: 592140 - DNA, 75 bp, Homo sapiens
cccacttaggataatggcgacagctgaggcgtctgcttctacgctttgcctgggagaggccctggtggcctcgtt

SEQ ID NO: 592141 - DNA, 100 bp, Homo sapiens
cactctccaaattggaacgaggagaagaaacttgcacaacagaagatgaaatctactctcgaatctgttctgagtgcggcggaaagaacttccacttcgt

SEQ ID NO: 592142 - DNA, 109 bp, Homo sapiens
gaggagctcttgaggaaagccattgctgaaagcctgaatggacaaactctgcctgggcgagtccttttcctgcgttatgtcgttcagaccctagaagatgactttcagc

SEQ ID NO: 592143 - DNA, 90 bp, Homo sapiens
cccgtcttattgatcctggctttggaatatataagagattatggagaagtctggcgaggaaggaatgcctgatcttgcccatgtcatgcg

SEQ ID NO: 592144 - DNA, 90 bp, Homo sapiens
aaagcctcctaccttgattgcatcagggccattgcggttacaagcctgatgaagggaaacgaggggatgcctgtgaaggtgacagtgggg

SEQ ID NO: 592145 - DNA, 97 bp, Homo sapiens
cccggaggaggatgggctgcagacacagcaggctgagcagctgcaaacccccgaaaaaggtcaacgaagtgacggtggaacagctggtgcagcagta

SEQ ID NO: 592146 - DNA, 104 bp, Homo sapiens
gccaaggctaaaagacgaaataccaccggaactggtcgaatgaggcacctaaaaattgtataccgcagattcaggattcttacagaagcagagattgatgctca

SEQ ID NO: 592147 - DNA, 82 bp, Homo sapiens
aagattcgatgtctatatttaagtatctccgctacttcactcgcactatccttgatgctagagctcccagctcctccagcag

SEQ ID NO: 592148 - DNA, 100 bp, Homo sapiens
tgatttacctgggtgagacagcttgagccccatcgtggattccaagacatccctgctgagagagccaagcacatgggaaggtaaggagaagaccttgacc

SEQ ID NO: 592149 - DNA, 108 bp, Homo sapiens
ctgccgtccttctccactttcgccagcccgtgccgcgagcgcggcctgcaggagcaagagtgagccatggagctacgtgtggggaacaagtaccgcctgggacggaag

SEQ ID NO: 592150 - DNA, 82 bp, Homo sapiens
cttggggccagcacccaggttgtcccaccaggagaccagtatgatgtctgtgccatttgcctggatgaatatgaggatgggg

SEQ ID NO: 592151 - DNA, 89 bp, Homo sapiens
cctgatggaaaatgagcaagattattgtgtggtgaagagaggcctctcataaagttcctgtccaggcattagtatcatttgaagacgtg

SEQ ID NO: 592152 - DNA, 75 bp, Homo sapiens
acaagagacgatcattctgcaagcaggcaacctgaatacagtggattatcaaacagttttgcgggaaagtcaaac

SEQ ID NO: 592153 - DNA, 75 bp, Homo sapiens
cctcaaccgtatttggggctgctcctggaggagctacgcagggatgtacagttacccagcacgtgtacctcctcc

SEQ ID NO: 592154 - DNA, 146 bp, Homo sapiens
cccaaggtctcagatgaagcggtgaaaaaagattcagagttggataagcacttggaatcacgggttgaaggtattcaagataaactggactacatcacagctttaaatataaaaactgtttggattacttcattttataaatcgtc

SEQ ID NO: 592155 - DNA, 90 bp, Homo sapiens
gaggattcgctcccagagcagctgcggccaggggttatggttttgtgaaattcacagatgaactggaacagaagcgagccctgacggagt

SEQ ID NO: 592156 - DNA, 74 bp, Homo sapiens
cccagctcgcgcttcagcgtcccggcgccgtcgcgccactcctccgagtatgaggatacatgggctgcacttca

SEQ ID NO: 592157 - DNA, 75 bp, Homo sapiens
gcctggtcctggccccggagctgttgctggacccctggcagggtgacaaaatatctgaacagaagaggacttagg

SEQ ID NO: 592158 - DNA, 100 bp, Homo sapiens
ggatgccctgaagatcagcatccgccagctcaagtggaaggagagtaaccagagagcacagagaaatgctggtgaaactggccaaacagaacaccaacaa

SEQ ID NO: 592159 - DNA, 100 bp, Homo sapiens
cccgttcctggagattctgattgagggccatgaagcccccaggaggagaatcgagcaatctttttggaagtccagaagaagctactccttccagcaggcc

SEQ ID NO: 592160 - DNA, 98 bp, Homo sapiens
tgccgtctactcggccactccggtcccgacacctagcctgcgagagacagcgtctggagaccatcctcagtctctgtgctgaatacacaaagcctgac

SEQ ID NO: 592161 - DNA, 75 bp, Homo sapiens
cgttttcgcctgatgcccctctgctgatcccactctgaaggccggggacctgcgaccgcatcaagcagtccgcca

SEQ ID NO: 592162 - DNA, 75 bp, Homo sapiens
tggttgttccgttgcgagctgcagctgcgatctctgtggtaggcccagggataccttgggaaaatgcttcttcct

SEQ ID NO: 592163 - DNA, 89 bp, Homo sapiens
tgcaagtcgggatactttcagttcaacaagatggaccactcctgccgaggtgacaagaccaccttccagctacaggttcgccaggtgga

SEQ ID NO: 592164 - DNA, 75 bp, Homo sapiens
agccctgagggcagctgttcccactggctctgctgaccttgtgccttggtgaggcaggcgactaatcagattgtg

SEQ ID NO: 592165 - DNA, 75 bp, Homo sapiens
ctggagctatactgacatcagtaatagtgagaaagatcagtctaaagaaaaggagaagaaagtgaaaaaaacaat

SEQ ID NO: 592166 - DNA, 119 bp, Homo sapiens
gtgcttgccttattggtgatgtgcattgtcttacgcccttcaagagaatcagacacaagtttggcagaaggaagtgtcagctgcttagatgaaagtcttggacataacagcaacatggg

SEQ ID NO: 592167 - DNA, 73 bp, Homo sapiens
gaagatgaggaggtcgctgagagctgggaagaggcggcagacagcggggctggcagtgatggtgaaagcatag

SEQ ID NO: 592168 - DNA, 88 bp, Homo sapiens
ggtctcccctcaacctcaactccatgctggtcctggactcccagaagcgagtcttctcctggggctttggtggctatggccggctggg

SEQ ID NO: 592169 - DNA, 75 bp, Homo sapiens
caaaatcccaggctgtcggaagcaaggtgcgttccatggatgaactgaatcatgattttcaagcacttgctctgg

SEQ ID NO: 592170 - DNA, 100 bp, Homo sapiens
ccaccatccgcgaggtggcggtgctgaggcacctggagaccttcgagcaccccaacgtggtcaggtggcgtgtttgtctcacatagctgcaaattatctt

SEQ ID NO: 592171 - DNA, 90 bp, Homo sapiens
ctgttcctgtgggtgggggccacgccgcacctgcgcaacctcgccgtggccatgtgcagccgctacatgtgtcttgctgaatcagggctc

SEQ ID NO: 592172 - DNA, 83 bp, Homo sapiens
gcctgcacagccgcggcggcagcagcagtgagagaggctgtggccaggccagctgggctcggggagcgccagcctgagaggag

SEQ ID NO: 592173 - DNA, 75 bp, Homo sapiens
cgcggcccctcctccccggcgcctcccaggacgcagcgactgctgagtggcccgtgggtgccaggcagtggtgtg

SEQ ID NO: 592174 - DNA, 100 bp, Homo sapiens
cccaatgctcgagataattggaattatactcctctccatgaagctgcaattaaaggaaagattgatgtttgcattgagagatgcaggtcagctcctccag

SEQ ID NO: 592175 - DNA, 74 bp, Homo sapiens
cggtggaatgggtccaggccgtggtcagccgcttcgacgagcaggtgcatgtgagggaaccctggcttgttcaa

SEQ ID NO: 592176 - DNA, 100 bp, Homo sapiens
ccccagttgctttgccagcctggctgggctcaggagctttatgctgaaaaggtggccactagaggtctgtgtgccattgcccaggcagagtctctgcgtt

SEQ ID NO: 592177 - DNA, 83 bp, Homo sapiens
cactttgggaagcagtgacatccaacctgtatcaagtcttctaatctgtgaacatgggaattcacaattgaaactgaagggaa

SEQ ID NO: 592178 - DNA, 95 bp, Homo sapiens
tacttgatgtccaggggaacatcactcagaagtttgatgtagtctcatcagaaaattgaagactccgaagaaagcagtgatgaaattcttgtgcg

SEQ ID NO: 592179 - DNA, 100 bp, Homo sapiens
cccaatgaacatctgggatgacatcatcacaaatcgactaagaaaaatggctttgtcagcccaacagatacccagatggtttaactcagttaagttgagg

SEQ ID NO: 592180 - DNA, 50 bp, Homo sapiens
tcttacttcatccagtctaataggaattgccacaagcagtctgtgagatc

SEQ ID NO: 592181 - DNA, 100 bp, Homo sapiens
ggcattgatgaagatcatgacattgtagtacagtatccaagtggcaatagcatgtaccttccacattgagtattcagaaagaagtgatctgaactctgac

SEQ ID NO: 592182 - DNA, 100 bp, Homo sapiens
gacgggcaagccctggtcctgggcaggggacccctgacccaggttacggaccggaagtgctccagaactcaaggagggcatcctggctgtttcacccgtg

SEQ ID NO: 592183 - DNA, 51 bp, Homo sapiens
tacttagctcagcaattcttaccttctcctgttggatcaccaggatgccat

SEQ ID NO: 592184 - DNA, 75 bp, Homo sapiens
gaagaaaccactggatggagaatatttcacccttcagtcccatgaagctgaggtcttgaagcagctggctgagaa

SEQ ID NO: 592185 - DNA, 98 bp, Homo sapiens
ctggagaatgcctttcccttcgatgagctgcgacctctcacctgtgacgggcacgacacctggggcagagacgaggtcttgctacgttgcccaggtcg

SEQ ID NO: 592186 - DNA, 98 bp, Homo sapiens
gctgaagacaaaattaaagagctggaggcctcaaaggattcagagactgtttttgatattcagaatgacagaaatagtatacttccaaaatctcaatc

SEQ ID NO: 592187 - DNA, 100 bp, Homo sapiens
agctcaagggctccaatttgtactctcagctggaacggcaggcctgggtgtggtttcagaaccgaagagccaagttccgcaggaatgagagagccatgct

SEQ ID NO: 592188 - DNA, 75 bp, Homo sapiens
ggattgtttcctggtagcaatgccactttcaggatactagaggtacaagaaaattccccaggacacagagctggt

SEQ ID NO: 592189 - DNA, 90 bp, Homo sapiens
cgccctggcgggtccggaccaagaccactgcagcaaacacagcccctgccagaaaggagggacctgtgtgaacatgccaagcggccccca

SEQ ID NO: 592190 - DNA, 100 bp, Homo sapiens
ccgggtgctgctggttagtgtgctctgagggagggtccgagccagccgctgttttgccggaggagcccctcaggccctttaatgaagcaccagttgagat

SEQ ID NO: 592191 - DNA, 75 bp, Homo sapiens
aagtgaccaagaacgtgagcaagcccaggcacagccgacgccgcgggatttggtgcttccagatgtgagttatca

SEQ ID NO: 592192 - DNA, 101 bp, Homo sapiens
agggatggctgctcagctgctgactgatgaggcactgttttctggatatgccgcagaaggatccgtgccagaagcaagcctgtgagatacagaaatgttta

SEQ ID NO: 592193 - DNA, 51 bp, Homo sapiens
tgtttgaagtgtgttttgagagcaaggacccagacacttttgaaccccaaa

SEQ ID NO: 592194 - DNA, 85 bp, Homo sapiens
tccctcggtctgggcttctctgaggcggcgagagatggtcaggtctggagctcgaccgggccagtatgatgctgtccgaataaac

SEQ ID NO: 592195 - DNA, 75 bp, Homo sapiens
caggtttcggcacatggagattgatcctcaaggaataggttctcctagtgtctatcatgcagttatcgtcatctt

SEQ ID NO: 592196 - DNA, 112 bp, Homo sapiens
agtcttcccgcgtccgccgattcctcctccttggtcgccgcgtccttggctggcgtagcgggaacagcttccacgtgttcgaccagggccagtttgccaaggaggtgctgcc

SEQ ID NO: 592197 - DNA, 123 bp, Homo sapiens
agcagcctcaacgtcagtggggccacctctgaccctgccctcaaccacgaaagaccacagcaagattctttcattcgtctcctcctagcctgggggaccaggctcgaactgaccctggacatc

SEQ ID NO: 592198 - DNA, 124 bp, Homo sapiens
gcttggcaaagcatccagagaagctggctactgtcctttctggggcgtgtgatggagagatgcggcattccaaaagaactcactgtcctgattgggatagcagagaaagctggggacatgaaag

SEQ ID NO: 592199 - DNA, 75 bp, Homo sapiens
atgtgacgctggagaacctggcacttatgtcctccctggattgattataccggaacagagccttccagtccctgt

SEQ ID NO: 592200 - DNA, 100 bp, Homo sapiens
aaggattccaagtaactcttatttgcagcgtcaccctttacaccagaaagctggcgggcactatggggaaaaaacaaaacaagaagaaagtggaggaggt

SEQ ID NO: 592201 - DNA, 99 bp, Homo sapiens
accattgcacccaaaattgcaagacctttcatagaggacaaggtggagcagacacctcgcagtcaacaagacccggcaggaccaggactccccgcacag

SEQ ID NO: 592202 - DNA, 97 bp, Homo sapiens
atggcctcggagaagccgctggcggcagtcacttgtacagcgccggtcaacatcgcggtcatcaagtactcggaaggagagttttacatggaagtgg

SEQ ID NO: 592203 - DNA, 83 bp, Homo sapiens
gcggagcccggctcccgcaccatggaggaggacgacagctacggtgctccagctgctgctcctgcccctgcctcagtcccaca

SEQ ID NO: 592204 - DNA, 82 bp, Homo sapiens
ccctcggacccatcgccgcttctagaccctactgcggtctcggatattgccggatgtgacaagccgaggcggtgagccgggc

SEQ ID NO: 592205 - DNA, 100 bp, Homo sapiens
ggagaagcatgggaaggaggccgagccgggatctcaggtcctcgggggcggcggccacgccaaggacgggtgctggagaatctggtaaaagcaccattgt

SEQ ID NO: 592206 - DNA, 96 bp, Homo sapiens
ccttcgctcaacgaggacctgcaggtggaagtgatgaaggtgtatagtgttgattggagccaaaccagaggtgaacagcttgtggtgtctggctca

SEQ ID NO: 592207 - DNA, 78 bp, Homo sapiens
ttggctctggaacaactcctaattctattgttgacctcctgtactggagagacattaagaagactggagtggtgtttg

SEQ ID NO: 592208 - DNA, 82 bp, Homo sapiens
cgacgtcttgcctgtgtcccacttgttcgcggcctatagactgtccaggacggccggcagtttctaaagtatgttgacccca

SEQ ID NO: 592209 - DNA, 50 bp, Homo sapiens
ggaaaacaagtgtctgcttatgtcggcagctgagcctccacccagaccga

SEQ ID NO: 592210 - DNA, 74 bp, Homo sapiens
gtggatcgctgtgatcgtcacttgaccccatgccacagctggatgtgactgaggccaacaaggagttcatggaa

SEQ ID NO: 592211 - DNA, 100 bp, Homo sapiens
tgttcaccgccaaccccttcgagcaagacgtggaacaagttgaaatcatcgcagaaggataaagttcgtcagtttatgatcttcacacaatctagtgaaa

SEQ ID NO: 592212 - DNA, 75 bp, Homo sapiens
gagctctacgcctcctacgtttacctgtccatgaaagaaatgaccgcccggatgtgccactgagagccccgcggg

SEQ ID NO: 592213 - DNA, 75 bp, Homo sapiens
ccaaagagagaactcttctcaaagaggaccctgcttactgggtgccgacccccacatcctggcaaaagagcgaga

SEQ ID NO: 592214 - DNA, 50 bp, Homo sapiens
cctcactgcagaggtgctggagctggcagccaaaatgaagtttaatccct

SEQ ID NO: 592215 - DNA, 100 bp, Homo sapiens
aaaaattaattggtaaaccgcttcaaccagcaagacctgttcgtcatctgacttctcccccagattactgatctctcattacccaactatctgatggcat

SEQ ID NO: 592216 - DNA, 100 bp, Homo sapiens
tcgccgccgcggccgcctggaattgtgggagttgtgtctgccactcggctgccggaggccgaaggtgcatggctgcctcctaatcccatagtccagagga

SEQ ID NO: 592217 - DNA, 50 bp, Homo sapiens
cgcagggttcggatgagaccaggtgaagcatttgtatatcactaaggagc

SEQ ID NO: 592218 - DNA, 103 bp, Homo sapiens
atcagggcagccctggaggcttactgcaagaagtatgagcagctcaagctgggcgccgtgtacacagaaggtgggttcgtggaaggcgtcaataagaagctcg

SEQ ID NO: 592219 - DNA, 101 bp, Homo sapiens
atttgaacaaagcgctagcaacttctaccaacaacaggccaggagtggtggctcacacctgtaatcccagctctgggaggccaaggccagtggattgcttg

SEQ ID NO: 592220 - DNA, 100 bp, Homo sapiens
gtgctgtgccgcgcagttaggcagcagcagccgcggagcagtagccgccgtgggagggagccatgaagcattacgaggacgagattgaggagctgcgggc

SEQ ID NO: 592221 - DNA, 75 bp, Homo sapiens
ctagaatatacaaagacaaaaggagattctgatgaagaagttattcaagatggctactgcagcactggggtgtca

SEQ ID NO: 592222 - DNA, 75 bp, Homo sapiens
aatgaatgatgcccttcgtaaacacattttctgggcccaaaaatatccaatggtccatttattgcaaaaaagtga

SEQ ID NO: 592223 - DNA, 75 bp, Homo sapiens
tggcactgggcaagttccgggccgcgctgcgagactacgagacgggccggatcgtggcacccagaggctgccagg

SEQ ID NO: 592224 - DNA, 100 bp, Homo sapiens
caagatttggtggatttctctccagtttatcgatgtctacatatatattctgtcctgaattgccattgccttcagaaagtgttgatattattatttctga

SEQ ID NO: 592225 - DNA, 100 bp, Homo sapiens
agaggaacaagaacgcgctcctccgcctgctgcccgggctgggcagcggaggaggagaaagagatggacctcccggactcggcctcgagggtcttctgcg

SEQ ID NO: 592226 - DNA, 100 bp, Homo sapiens
gaggaagcggcctgaaagtggtggcgctggccagactgacacccataccttttgggcttcagaatgcagtgttttcggcagaactggggctcccttgcat

SEQ ID NO: 592227 - DNA, 74 bp, Homo sapiens
ccttccaggatgtcaaatttgtcagcaactcgtcagcctttgacgacccctatgccctggtggtgctggctgag

SEQ ID NO: 592228 - DNA, 83 bp, Homo sapiens
cctgaccatggctccctgcagtaccctttaacgaaaattgtacaagctggagataaggaccttgatgggcagctagactttga

SEQ ID NO: 592229 - DNA, 98 bp, Homo sapiens
ttcgcagctggacaaagcgtccatcatccgcctcaccacgagctacctgaagatgcgcgccgtcttccccgaaggatattgactgggtacagacagag

SEQ ID NO: 592230 - DNA, 100 bp, Homo sapiens
tatttatccaacagctcctcccaggtgtctgagggttctgtggtccagttttcatcagcaaacttctccttgacagcagaaacagaagaaaggaacttcc

SEQ ID NO: 592231 - DNA, 82 bp, Homo sapiens
tcccgcgcgcgcccggcgcttcggctccgctccctgtgcgatttcctccttcttcacccctgaaaccatatccaaagaagcc

SEQ ID NO: 592232 - DNA, 75 bp, Homo sapiens
gcaggaccaacctctcctctggatgctctagaaaagtgtgatgaagaccacatggggtgtgctggatcctcctgt

SEQ ID NO: 592233 - DNA, 100 bp, Homo sapiens
ccccgaggaggtacaagaaagatccacaaaccagagaaagctttccagcagtcagttgaacaagacaacttatttgatgaacctcggagagctgatagat

SEQ ID NO: 592234 - DNA, 74 bp, Homo sapiens
cgattcttccacctcagcctcccaagtagctgggatcacaggatattaatgcacacgcctgtgttactggtaaa

SEQ ID NO: 592235 - DNA, 98 bp, Homo sapiens
atgcctgctaacatggataagcatgccctgaaaaagtatcgtcgagaagcctatcatcggaagaactttaattcctcctgaggaactctactttctga

SEQ ID NO: 592236 - DNA, 87 bp, Homo sapiens
acaggactgaacagggagccaactgtttctttgaacagtaaatcaggtagaagatgtgttacaacgttgtcgagaatatttaattaa

SEQ ID NO: 592237 - DNA, 75 bp, Homo sapiens
atttcctgcaggctatggaacacactgaagttcttcagcttctcagccccccagtacgaggatgtcgtccaggaa

SEQ ID NO: 592238 - DNA, 100 bp, Homo sapiens
tgcctgtgtgagcagtctctggacaagatgaccacactccaggaatgccagtgcatcttttgcacagctctcatgatggagcagtccaagaagtcctccc

SEQ ID NO: 592239 - DNA, 100 bp, Homo sapiens
gcgcggcacggagacggcggcagcgctggactaggtggcaggttcaatgtatctatgcctgcctacctcaatctgcaagggagtgtcagaaaggccccgc

SEQ ID NO: 592240 - DNA, 75 bp, Homo sapiens
gagattttgatgtggatgatgccaaagttttattagctacaggccaaatttgagcaccttaagagacttcaccaa

SEQ ID NO: 592241 - DNA, 75 bp, Homo sapiens
cctctgagcatcatctttcgaaaggaacctccacaaggagctcattttctttccagaagtctagatgatgcctta

SEQ ID NO: 592242 - DNA, 100 bp, Homo sapiens
caacattgttggcagtgagcattacgatgttgcccgtggggtgcaaaagatcctgcaggtgccttatgcccgctcagaggcccacctcacagagctgctg

SEQ ID NO: 592243 - DNA, 100 bp, Homo sapiens
caaacctgggagactgcaagacttctatgattccacagcagataattctgaaataatcagcagaaacggaatggaatgccaagaatctgcattgagaata

SEQ ID NO: 592244 - DNA, 100 bp, Homo sapiens
cattccctatggagcctacaatggcccagtaccaggctatcagcaaacacctccccaagggtagatacaacaagaattgaatactccattcctttaagag

SEQ ID NO: 592245 - DNA, 75 bp, Homo sapiens
ggagagcgacccgtggccttgtgtttcagccgcttacaaacacgcagatggcaagaagattgatggcaggagggt

SEQ ID NO: 592246 - DNA, 105 bp, Homo sapiens
gttcacgcacgggatccagagcgccgcgcacttcgtcatgttcttcgcgccctggtgtgaacccacatccctgcccccagggccacctgcaggacgccgacacct

SEQ ID NO: 592247 - DNA, 50 bp, Homo sapiens
aggggtggcggagagggtacctgggatgagattgtctgaaacgaagaata

SEQ ID NO: 592248 - DNA, 141 bp, Homo sapiens
gctcaaaccccacccaggcattcacgcactacaacatcaaccagagcagattccagcctccacatgtacatatttttactctggacaccggtcccctcacatcccgtataagttgctgcacctggtgtggacccacgcgag

SEQ ID NO: 592249 - DNA, 83 bp, Homo sapiens
atcacacgccgccatccgggaggcccagggaagagctgcagaaactggagggcagcagtggacctgtgcggacgtctcctcac

SEQ ID NO: 592250 - DNA, 50 bp, Homo sapiens
cagccatggccctccacagcccgcaggaatggaaactgaaagtggaaatc

SEQ ID NO: 592251 - DNA, 75 bp, Homo sapiens
ctgagcccgtccgtccgccgccaccacccactccggacacagggtctttggccacatcagcttccgctccgattg

SEQ ID NO: 592252 - DNA, 100 bp, Homo sapiens
cccgcctcatttgcgccttgcagcactgctggaccaggggcagatgatgatctatgcgaagtttgacaaaaatgtgtatcttcctgaagatgctgagttt

SEQ ID NO: 592253 - DNA, 100 bp, Homo sapiens
ccacagcccaggtcacagtgaaaggtcccgcccagctgcagaccctccaggctggaggaccagccgccctccttccctcctggatggaagtaaaaagcca

SEQ ID NO: 592254 - DNA, 147 bp, Homo sapiens
tctttggatttagcgtttcagaattgcaattccaaaatgtgtaagacgggatattctcttctgtgctgtcaaggatcagaccccaacaccaacaagattcttgaaaaactgtgaagaagtgggtttgtttaatgagttggcgagtcc

SEQ ID NO: 592255 - DNA, 100 bp, Homo sapiens
ccagacgcggcacagagagggcctgggagcttgctgcagcttcagatggaaatcatattatgtagaatacttgggtgacatctgcctgagagatctccaa

SEQ ID NO: 592256 - DNA, 74 bp, Homo sapiens
gaccgcaagtcccgtcttatgggacttgaggccctcaagtctcatgcaagtggcaaactccggaagaagaaaaa

SEQ ID NO: 592257 - DNA, 80 bp, Homo sapiens
cgtccggagcatggcggacccccagagctgattactgtggcatgatcctccaccattcacactctaccctggactctggg

SEQ ID NO: 592258 - DNA, 88 bp, Homo sapiens
ccaattcagctttttgtgctgccagcaagaaatgatcagtagcaccagtgtttatgactcaatgatgaggcacggcggctcattgctg

SEQ ID NO: 592259 - DNA, 82 bp, Homo sapiens
gacaatcccttagggtctctttgcagaggaatattggacctcaatacctataacgtcgtacgccctgcatgtatacaatgaa

SEQ ID NO: 592260 - DNA, 95 bp, Homo sapiens
attccaaaatgaacctgaacgatttcatcagtatggatcccaagtgggtgggcctgatagtcctgattcagtggatcccgttgaaccaatgccaa

SEQ ID NO: 592261 - DNA, 80 bp, Homo sapiens
gccagagcgtcggggaggcaagatgatccaccagcggttccatcctacacttgggaaaaacgtggtcttcgagaaatgcg

SEQ ID NO: 592262 - DNA, 106 bp, Homo sapiens
gaagttggctagtcaatacctgaagagagattggcctggagtaaaagctgatgatcggaatgattacagattttgtagatcaggaatgtgggtgcagttggcacct

SEQ ID NO: 592263 - DNA, 75 bp, Homo sapiens
gctctgagacccccattacaaaatataaactctgttcagggcttccgttacaagatgaggtctgtgtatgctcac

SEQ ID NO: 592264 - DNA, 97 bp, Homo sapiens
tacggtctcgtgtggctgctgacagtcctcctggaggggatctctggccaaggagtgtacggaaacttttgagaagaactttgaaagagaaacccat

SEQ ID NO: 592265 - DNA, 85 bp, Homo sapiens
tccagaatgagctggagagactgaaagaggagtggacgcttctcttgtgagccagctggaggtcttacctctttgactgaaccac

SEQ ID NO: 592266 - DNA, 100 bp, Homo sapiens
aacaaaggcgcagttccttggggtgagactgtggagatgagaaggtggtggacactcgtgatggaatggaaatcgtcctaccgtgcagccacaccctgcc

SEQ ID NO: 592267 - DNA, 82 bp, Homo sapiens
ccggccggggcctgcgggcgcccagagccgcgccgtccgcgccgcccgttctgacgaagttatacggaagcgtctcctcatt

SEQ ID NO: 592268 - DNA, 75 bp, Homo sapiens
cgaaaatttcctgccgattatataaaatactgggagtttgcagttccagtgtctcgccccatcctcaccctcagg

SEQ ID NO: 592269 - DNA, 82 bp, Homo sapiens
gtcctggaaaactaaaggatttgatcctcttgataaagcactggcatcaacaggcaccatacaggaagattacttgagagag

SEQ ID NO: 592270 - DNA, 100 bp, Homo sapiens
gatgtcttatcaggggaagaaaaatattccacgcatcacgggtttcatcaccttaaatggttttgaaccaatgaaggtgtattcccttaaaaagacggac

SEQ ID NO: 592271 - DNA, 75 bp, Homo sapiens
agttagtggattaaaatctcccaagaggaatgacaaacaaccagctcttcagccagatctgccagtgagcctcag

SEQ ID NO: 592272 - DNA, 90 bp, Homo sapiens
ctgcgagcgagccgcgaaccgagcgggcggcgggcgcgcgcaccatgggggagaaacccgggaccagccacacccactcgcccgggtcta

SEQ ID NO: 592273 - DNA, 97 bp, Homo sapiens
tcgagaatcaaagggccgggagcgatggtgcgttgaaaactatacaggagctcgttgtgaagaggtttttctcccaggctccagcatccaaactaaa

SEQ ID NO: 592274 - DNA, 74 bp, Homo sapiens
agccaccccagccagtggaaccaagatctatgaagactccatcgtcttgcagtcggtcttcaccagcgtgcggc

SEQ ID NO: 592275 - DNA, 89 bp, Homo sapiens
ggaaaagtggcactgaggctctggaacttctgcccagctctccttggaggaggaagccaagaatctggtgagcgaagccatcgcagctg

SEQ ID NO: 592276 - DNA, 88 bp, Homo sapiens
aggatgagattcttccaaggaaagactatgaggcctcagcaactgttgccattcccaaagaacaccatcgctttgttattggcaaaaa

SEQ ID NO: 592277 - DNA, 87 bp, Homo sapiens
ccggggaggtcacctgacgaggaggtgtcagttgtacccgaggcgttctcagcagcagcaagtacctgtggtggatttccaggctga

SEQ ID NO: 592278 - DNA, 98 bp, Homo sapiens
ccagatgtcctcatcatcccgtcagagctgaggtacttcgtgaagatttcaggtatgctgctgaaagtgggaatcctctacattggtgggcagctggt

SEQ ID NO: 592279 - DNA, 49 bp, Homo sapiens
gagcaccaggcccaccgtgaaaggtgtaattagcatggtcaatgcggga

SEQ ID NO: 592280 - DNA, 100 bp, Homo sapiens
cttcatctgaaattacctctcagactttctgtaaaggaaaacaaggcttgcttccggcgtcatggctcaaagggccttcccgaatccttatgctgattat

SEQ ID NO: 592281 - DNA, 98 bp, Homo sapiens
ctgccgcagctggcgcagcccacgctcatgatcgacttcctcacccgcgcctgcgacctcgactgtgccctgtccacggtgcctcctgcatgtcctgc

SEQ ID NO: 592282 - DNA, 88 bp, Homo sapiens
ttaaattcaaaaactacctcatccccaaggtggatggagagagaaagaaaaagccagagaggagagctggggtccacctcgagaatca

SEQ ID NO: 592283 - DNA, 101 bp, Homo sapiens
ggcttccgacgtgcagcctggcagtgcagtggagaaaatgcagaagtctccatggacgtttccctggcttaccgtgatgacgcgtttgctgagtggactga

SEQ ID NO: 592284 - DNA, 51 bp, Homo sapiens
agaagatcctggacatgaagaccgaggggtgcctgaagacgtacactggcc

SEQ ID NO: 592285 - DNA, 101 bp, Homo sapiens
gcggtgactccccgccgctcccgggggccgtgacggaattggtggtaaagaccctgattgtagcagaacctcatgtcctgcatgcctatcgaatgtgtaga

SEQ ID NO: 592286 - DNA, 88 bp, Homo sapiens
aagcaggacaccatgctgaaggccatgttcagcgggcgcatggaagtgctcaccgacagtgaagcgctagtcctgctgatgggcaaag

SEQ ID NO: 592287 - DNA, 100 bp, Homo sapiens
tctcagaatcaccagccttcttcagcaccacctttttggggaagatttacctagctgccaggggccacctacagatgctcctgcagtggacacagcagaa

SEQ ID NO: 592288 - DNA, 82 bp, Homo sapiens
ctccgggtgctgggcatcatgccataaaattttgagtagaaaaatccagaaatttgaaaatcagtatcgtggtagagagctg

SEQ ID NO: 592289 - DNA, 82 bp, Homo sapiens
tttatcttgatttgacactggatatggcactgggaaagaaggaatttatgttgatgcagttaactccttgggccaaacagca

SEQ ID NO: 592290 - DNA, 50 bp, Homo sapiens
gaggagtccaacatcaccatgcagggaaaaattgaggaagcagtgaatgc

SEQ ID NO: 592291 - DNA, 50 bp, Homo sapiens
gaaaatcatattatagatggagtaaaggagaacctttacaaatagatcac

SEQ ID NO: 592292 - DNA, 98 bp, Homo sapiens
cgagtcgcagatggcctgccacgttttccgcgccacagaccccagccagaaacttctattaagacaagctttcccatgactgttaaagtcgatggtgt

SEQ ID NO: 592293 - DNA, 95 bp, Homo sapiens
tcattgtggatgatgatacattaataaggacaactacacctttgcccaacctgggattcaaatgaaagtgaaaatgttagaagaactcgtgagcc

SEQ ID NO: 592294 - DNA, 50 bp, Homo sapiens
ctgtggtccagggcagggccactccagtccaacctaaggtgactgtatat

SEQ ID NO: 592295 - DNA, 98 bp, Homo sapiens
aggaattctgcatgccccagatgctggctggggaaatctggtgtatgttgtcaactatccaaaaggaatagcgggttttgcagcaattgttgcatatg

SEQ ID NO: 592296 - DNA, 100 bp, Homo sapiens
ctcaaaggggagagccaggtgttcaagaaggcggtggtactgcatgtgcttccagaggagcccaaagggggattcccgaagtcttccgttttctgagaat

SEQ ID NO: 592297 - DNA, 96 bp, Homo sapiens
gagagccgccgcccgcgagggatgctggtgaggaagccgtcgggagccgccgccgccatctgagggaggtggagccgccaccaaaatgcagatttt

SEQ ID NO: 592298 - DNA, 95 bp, Homo sapiens
gattccacacttgattctcttatacgctacttttactcagagtttgaaggttgtgaccaaaagaggctccggaaatttggtgagcggcctccacc

SEQ ID NO: 592299 - DNA, 50 bp, Homo sapiens
tgaaacgtcaggaatttactacacagtaatctatgccagcaattatgaca

SEQ ID NO: 592300 - DNA, 75 bp, Homo sapiens
gtttcttactcgggagctggctgaagatggctactctggagttgagggtctggtcgccagcaacctgaatctcaa

SEQ ID NO: 592301 - DNA, 141 bp, Homo sapiens
cgcagttctagcttcaccttcacgatgtttcccttggtcaaaagcgcactaaatcgtctccaagttgcatttgctggtctggcctttgcgtccttctacctggcagggaagttacactgcttcacaccacaaggccgtggg

SEQ ID NO: 592302 - DNA, 85 bp, Homo sapiens
gaggccgaactccaagggacgacgctcgcggaagcagaggtttgggatgccttggttcaagggatggaaagtcacccgtaaggat

SEQ ID NO: 592303 - DNA, 90 bp, Homo sapiens
cgagatgggtttctctttctttacaaggatgtgaagaatactctgaaacatatttcccagtggcccaaactctttattaggaaaatggac

SEQ ID NO: 592304 - DNA, 100 bp, Homo sapiens
aaagcgaggcaaggcaggcgggtaacagttaacctcttccacatgcagcatctgcaggctgcttcccttgcagacagtttacagtctctctgtgatagtg

SEQ ID NO: 592305 - DNA, 100 bp, Homo sapiens
ggccctctgcgacctggggccctgggtgaagtgctccgtcgcccttgcctccagtgccggtggtggtgtgcacattgagccccggtatagacagttcccc

SEQ ID NO: 592306 - DNA, 74 bp, Homo sapiens
agaaaccgacgcccatgggcgaaagggacctgctcaagttcactcagcagataaaacgtcactgtgcagagcct

SEQ ID NO: 592307 - DNA, 106 bp, Homo sapiens
cggagaggcacggaggagccgctggggctgccgccacggccgcccggagctccagaagaaaaggaagtcattaaaggacagtatggcaagctcacggacgcgtacg

SEQ ID NO: 592308 - DNA, 83 bp, Homo sapiens
cgggctcctgctggacgaagaaggcaccttctccctcgccggcttccaggacttcacgagaaagatgctggtttcgagttttg

SEQ ID NO: 592309 - DNA, 96 bp, Homo sapiens
gccatggagaagctgcggcgagtcctgagcggccaggacgacgaggagcagggcctgactgcgcagagtatgggctcacaagaagatgattcagga

SEQ ID NO: 592310 - DNA, 100 bp, Homo sapiens
caacttaaagacaggtatcctcggaaacggtttgtggctggagtaggagcaaacagcaatggcctgattccaccaagagaaggcccaggaggaagaagag

SEQ ID NO: 592311 - DNA, 75 bp, Homo sapiens
ccggagcttctcagaagacagagggttttcttttgagggcgatgccagtccctccactccagaggagaacgaaac

SEQ ID NO: 592312 - DNA, 76 bp, Homo sapiens
gcaggacccagtcggaaaccccacgggagtacgagacccaatctagtgcagaagccaaatttgtgaagcagctaga

SEQ ID NO: 592313 - DNA, 80 bp, Homo sapiens
tgaactctgccgaattcctgtgccacctcctcctttagaaaactgatcttaatacagcctggagcattggtaagcgtcac

SEQ ID NO: 592314 - DNA, 90 bp, Homo sapiens
gttgccatcgcgtctccgcctgcaggcctccggtgtggctgtctctgatggtgtcatcaaggtgttcaacgacatgaaggtgcgtaagtc

SEQ ID NO: 592315 - DNA, 100 bp, Homo sapiens
cactctccagtgtaatgattattgacaacagctttggtgtcatccccagcactcctctggccatccatacaccactgatgccaaaccagagcattgatgt

SEQ ID NO: 592316 - DNA, 76 bp, Homo sapiens
ctccaagataaagcaccaacacctgaggacagcagctgtcggaaaaggtaacagaagatggaactcgaaatcccaa

SEQ ID NO: 592317 - DNA, 100 bp, Homo sapiens
atccatggttggttgaatctggatgtggaacccgctgacgtggatggctgactgtattgtgtgcaactgaggaacatggctcaagaaactaatcacagcc

SEQ ID NO: 592318 - DNA, 74 bp, Homo sapiens
tggccttgatctactgcaggaaaaagcggatttcagaaaccagactgtgatgactgggagagcgggctgaatgc

SEQ ID NO: 592319 - DNA, 83 bp, Homo sapiens
cccaggagtcatcggacgccagaatctggagcatcagatccatgctgctgctgactcggagccccacagcttggcacaggctc

SEQ ID NO: 592320 - DNA, 97 bp, Homo sapiens
agggcggcggcagcgggtcctacgaggagggctgtcagagcctcatggagtacgtgaaaatgcctcgtgtaaaagcagctcaagctggaagacagag

SEQ ID NO: 592321 - DNA, 98 bp, Homo sapiens
tgtggaagatgctcccagctacagagggtaccgggatgcctgcaccattactggattcctagatgaggttatgaagaagtatggcagtttggttccac

SEQ ID NO: 592322 - DNA, 100 bp, Homo sapiens
cacgcccagccaggagcaccgccgaggactccagcacaccgaggtaattcgccaaaatgacgaacacaaagggaaagaggagaggcacccgatatatgtt

SEQ ID NO: 592323 - DNA, 89 bp, Homo sapiens
gttaccaagaggggattgatctgctcctgcaggttctgaaagggtctactgctgagccagtttctcagtctaccacttctgattatcag

SEQ ID NO: 592324 - DNA, 74 bp, Homo sapiens
ctccacccccgagatctccttggaagcagaacccatagaactcgtggaaactgagccctcaggactgcccccgg

SEQ ID NO: 592325 - DNA, 95 bp, Homo sapiens
ggctgtggtggatgcaggaatcactaccaagcttctgaccaaaatggtgtgaatggaacattaacttcaaatgtagcagactctccccggaataa

SEQ ID NO: 592326 - DNA, 90 bp, Homo sapiens
gtgaaactcatgaagcccaggacgattcagcttggattccttagcaccaccacagctcagccagaacagaaggcctcgaatctcattggc

SEQ ID NO: 592327 - DNA, 74 bp, Homo sapiens
aaagagcaggtggaaaaggaaaggttttgatgatgatggttcagaatttcatgaacatatatttctggagaaac

SEQ ID NO: 592328 - DNA, 100 bp, Homo sapiens
gtgaacagatcttcaacctgccaaaaaagtctcaccatgcaaactcccccacagcaggtcactgatatgatgcttcaggacaaaccctatcctgactggg

SEQ ID NO: 592329 - DNA, 100 bp, Homo sapiens
cggatcgggtggagtgtaggtcatatcgccgcgagggtgacattgacattttgctggacaaatttcaccaggaaaatcaaggccatatttcttcctcact

SEQ ID NO: 592330 - DNA, 100 bp, Homo sapiens
cagaagattttacttctgcttcgagcgtatgagcagaacaagctcagcctcatcaacttcagttaaaagcccggcgatctgagtgtaattccaaagctac

SEQ ID NO: 592331 - DNA, 100 bp, Homo sapiens
tatttgcctttagtgcactcttctccttcacagtaaagtggctggtttgcccaaaggaccagccaaaacctcacctcaagccacgcatatgataatgtaa

SEQ ID NO: 592332 - DNA, 99 bp, Homo sapiens
aagtggccaagacctctgctgcacagggaagtgttcgccagttactacatgaaaagataagagatgcttatactcacccacaatttgtgaccgatgtaa

SEQ ID NO: 592333 - DNA, 50 bp, Homo sapiens
aggtgaatttccatgtcaacatagtcctgatagcagcgagtgcctcacag

SEQ ID NO: 592334 - DNA, 82 bp, Homo sapiens
tgctggctacagcttcagaagaccgaagcgttcgtatctggaagatattgttaatcctgccagtctttctcttcaagccagg

SEQ ID NO: 592335 - DNA, 100 bp, Homo sapiens
gtcttccttcccctcccttgcatgatggaaacaccatggctgcggcggcccagctctctctgacacaggaacgagcatccggcacccttgtgcatgtacc

SEQ ID NO: 592336 - DNA, 88 bp, Homo sapiens
cgccgccgaagaagcatcgttaaagtctctcttcaccctgccgtcatgtctaagtcagaggtttgggtacccagaccccacctacctg

SEQ ID NO: 592337 - DNA, 75 bp, Homo sapiens
actggtgacttcacttttgagtgcaactgccttccagacccagagtcccagagaaagaggacagtgcagaatgtc

SEQ ID NO: 592338 - DNA, 97 bp, Homo sapiens
aagtgatcctcccaccttagcctcctaagtagctgggaccacagctggagctgtgaagttaaaccgacaacagactgatatggctgttaattgggct

SEQ ID NO: 592339 - DNA, 83 bp, Homo sapiens
tgcagccagtagcttggatccttgtgggcatgatccataatcggtttcaagagatgccagtggggcttgagattgaatcactt

SEQ ID NO: 592340 - DNA, 100 bp, Homo sapiens
gagaagaccagtgccaaccctgagactctgctgggggagatggaggcgaagacaagagagctcattggcttcagggatgacttcttagggggcaggggag

SEQ ID NO: 592341 - DNA, 75 bp, Homo sapiens
gcagcgactggcccaagttctttgaaaagccccacaggagacaggatccgaagcaaagttgagctgactcgatac

SEQ ID NO: 592342 - DNA, 100 bp, Homo sapiens
caggatctccaggctctcctggatccgtacctaaaaatacatctcagacggcagctattactacaaagaacagcatgatcctctctgctgccatcttcat

SEQ ID NO: 592343 - DNA, 75 bp, Homo sapiens
gtggtggcttccgtttgttggtggaggaggtggcaggcctcggcgggctgaccccacattggacaccgctgcatc

SEQ ID NO: 592344 - DNA, 83 bp, Homo sapiens
ctgcagcctgccccgcggccaacatgagcttcttgttgagttccccttggccattctcaggggctgggaatgctactgtgctt

SEQ ID NO: 592345 - DNA, 116 bp, Homo sapiens
aacggcaaagttttgcagatcttcaacaagaggacccaggagaaattcgccctcaaagcaagtgaaccggagcaaacgacttccgatccagtctgcgctgttgcggctcccgtttg

SEQ ID NO: 592346 - DNA, 74 bp, Homo sapiens
ttggagtagaagtgtccagcgacagcttctgggagctgcagaaccttggcctgaaaatgctacattatatcagc

SEQ ID NO: 592347 - DNA, 90 bp, Homo sapiens
gtgattctgaagagggtctggaggagccttctcaagaacagagatatatttttgccatcatggatcagtttggagatatattagaaggtg

SEQ ID NO: 592348 - DNA, 78 bp, Homo sapiens
tttacagaaagagtcaacagcagtggcaacagttgggagctgaaagtgccgacagcattggtgccgtgttaaatagca

SEQ ID NO: 592349 - DNA, 100 bp, Homo sapiens
tctcgctccgtggccttagctgtgctcgcgctactctctctttctggcctggaggctatccagcgttcccagtgcccccgacaagcccctgctggtgtct

SEQ ID NO: 592350 - DNA, 75 bp, Homo sapiens
ctcttggatcttcattaatgagaagacattcataaccaggttttggaatcattttcaaataaaactccccctcac

SEQ ID NO: 592351 - DNA, 100 bp, Homo sapiens
aaggtgcgggagagtgagcgagccttcacctacagcatcgtgggcgccggctcccagtttggttttaaagcccatctgggagcagttacctgtgccagcc

SEQ ID NO: 592352 - DNA, 75 bp, Homo sapiens
agcgagccagcgagccgccgacccgccgagcaaaatggagcatattaatgaaaagtgccataaactgaaaaacca

SEQ ID NO: 592353 - DNA, 50 bp, Homo sapiens
atctccagatgctagggttatggcatagttgttgcccaaatctcttggta

SEQ ID NO: 592354 - DNA, 75 bp, Homo sapiens
atgcacaatttcctgcggaaatcagtcaagctgcagtttcagctcaggccacatcaaatgtcaacccaacccagc

SEQ ID NO: 592355 - DNA, 74 bp, Homo sapiens
tgggaggcgatccaggccttgacgcagcagtgttgtactgctacttctataaacggacagccgtaagactaggc

SEQ ID NO: 592356 - DNA, 74 bp, Homo sapiens
tgaacactgcagggccatttgtgattctaccagaaaggaatgaagaacagaaccttcaggaattgagtcacaat

SEQ ID NO: 592357 - DNA, 74 bp, Homo sapiens
gaagtccctatttgaagaacttggaagtagtcggcttggactgtggtcctgaaagcagcaagaagtatgctgag

SEQ ID NO: 592358 - DNA, 75 bp, Homo sapiens
aaggaaatgcatctttatgtcagaaacacaaagcagcccaaccaaagggtgaaagaccttttatgtgtgaaacat

SEQ ID NO: 592359 - DNA, 100 bp, Homo sapiens
aaggcaatgaacagaggcatgaagatgagggaggaagttttattttgtcttcatcaggaagccaactaattcggttgatacctgagagctcaggaaagat

SEQ ID NO: 592360 - DNA, 128 bp, Homo sapiens
gccatattgtgtcttccccggccggtccctcgcctcccggccgagctgacgatcttagcaaagcaatgtctcaagatggtgcttctcagttccaagaagtcattcggcaagagctagaattatctgtg

SEQ ID NO: 592361 - DNA, 101 bp, Homo sapiens
gttcaagacccgacatgagggaaaagggacgtaggaagaagggcaggacctgggcggaggccgccaagacgtttagaagaagaatgtgaatcctctctttg

SEQ ID NO: 592362 - DNA, 96 bp, Homo sapiens
gctcagctctcgccgccagcgggccgcagttgcagagctattttgctgcatgtgaggatgagatccctgccatccggaaccatgacaaggtcctac

SEQ ID NO: 592363 - DNA, 98 bp, Homo sapiens
tttaagaggagtttcacttcatcccttttcattttgaaggctcttcattgatggtgaccgcatagacgcccccagtgtgaaggagcacctgcttcttg

SEQ ID NO: 592364 - DNA, 75 bp, Homo sapiens
tgggggaggagcgttccttgtcctccctctgcacaagtctggaaggcaaggtcaaggagacagtgcacaatgcct

SEQ ID NO: 592365 - DNA, 99 bp, Homo sapiens
caagtacctgctgcttggcttcaacctgctcttctggagctgcggtgcaaccctgggcagtttgcgtgtcgcagcggcaccatccagtgcatccccctc

SEQ ID NO: 592366 - DNA, 75 bp, Homo sapiens
gaagggcatcgtgcgtgccaagcggcgaggatgtgatggagctgcttgaagaagatctcacatgccctatttgtt

SEQ ID NO: 592367 - DNA, 96 bp, Homo sapiens
gccgctcgcatgagcacctcatacggctgcttctggagaaggtggttgtgtcaaaccgattggtgacatctccatgctgtattgtcacaagcacat

SEQ ID NO: 592368 - DNA, 82 bp, Homo sapiens
cgcggattcgccgaggcaccgaggcactcagaggagagcaccactaggctggacagcgacagagtgtcgtctgcctctagca

SEQ ID NO: 592369 - DNA, 74 bp, Homo sapiens
tggggtcccttttgcctcagatactattttgaagatgcatagctctcttaggtcccttcgtaatagtgcagcta

SEQ ID NO: 592370 - DNA, 100 bp, Homo sapiens
aagcaaatgagacaagtcaagaatccttttggcttagagatcactaatccatcttcagcttcaattacaaagaccccgcagatgtgtcttcagagagtga

SEQ ID NO: 592371 - DNA, 87 bp, Homo sapiens
ctcaccgcggcatcaagcaggtccggacccactggctgctggagcttgtcaccaccagctccttggtagctcagctccgccagctgc

SEQ ID NO: 592372 - DNA, 97 bp, Homo sapiens
gctccgtggagatcgtcccgcgcctgccgcggagctggagtttgttcagatcatcatcatcgtggtggtgatgatggtgatggtggtggtgatcacg

SEQ ID NO: 592373 - DNA, 100 bp, Homo sapiens
caactgatgctcctggaaagagcattcatcgatcctcttggtttaccaggaaagctgttctataggggactttgtgcaactgcctgtgcccgtcatccag

SEQ ID NO: 592374 - DNA, 74 bp, Homo sapiens
tttgaacaaactcgaagaacagctgtggaaagaagttgcaaaacactggctactgctcctcagcaggaagcgga

SEQ ID NO: 592375 - DNA, 98 bp, Homo sapiens
gcaggcaacaggaacaagatgtgaactgtttctcttctgcagaaaaagaggctcttcctcctcctcccgcgacgatacgtaggtaacctttccagaga

SEQ ID NO: 592376 - DNA, 100 bp, Homo sapiens
ctttgctggaattgctgtaggtgcagctatggaagagagaagggcacagttacctaagtatcaacgtaatcttcctcggccaggacaggcccccatcggt

SEQ ID NO: 592377 - DNA, 100 bp, Homo sapiens
cccatagccgagcagactggcatctgtaaggtgcggccgccgccggaaaggacttagaagccttacaaatacatctgtgcattcttgcttcagactttac

SEQ ID NO: 592378 - DNA, 88 bp, Homo sapiens
gaggcggctagaaggtgaccgcggatcccagcttcctgcagccagctgaagaaacacttaaattctggaaatagcgactcagtatcat

SEQ ID NO: 592379 - DNA, 50 bp, Homo sapiens
cgcctggcctacagcgaggctgcactcctgtaggaggcctgctgatggca

SEQ ID NO: 592380 - DNA, 90 bp, Homo sapiens
gtgggagccgtcacagtgacacacaaacaacttacagacttccacaagcaagtcactaggcagcccagcaaatcatcgaactccaggaag

SEQ ID NO: 592381 - DNA, 100 bp, Homo sapiens
aatggaggaacctcggaggtgaccagaaagatctccatcggttgcccaaggctatggtggttgctatttcaggcccagacataatcaaatccatgtgaag

SEQ ID NO: 592382 - DNA, 82 bp, Homo sapiens
ttgacagtttaaaagccttggcagtcaaggctattcatgctcttatggaaaatgctgtgcaacccttactcacttctgtggg

SEQ ID NO: 592383 - DNA, 126 bp, Homo sapiens
aagacgatctgcacttcgcattttggcattgacatttaattttagggtcctttatatagaagggagagtagggaagatcagttttcctgccatccaggctgctccctccttcagcaactcattccc

SEQ ID NO: 592384 - DNA, 74 bp, Homo sapiens
aagacattacaccatctgaattgcctgcaaacccagacaatgcagatcttcgtgaagactctgactggtaagac

SEQ ID NO: 592385 - DNA, 75 bp, Homo sapiens
tagtgcaaatcccctgctcagggtcttcatccagaaacgagagtattgggaaagggtcgttgtggtgcatagacc

SEQ ID NO: 592386 - DNA, 90 bp, Homo sapiens
gcttcatccttgtttaatgactttggtgccctcaacatctctcagagacgaaaggacatggtccggcgaggagagatcatcgacaatgac

SEQ ID NO: 592387 - DNA, 82 bp, Homo sapiens
gtcggtgggcgagctctacagccagggttgactggattggtgaggcccgtgtggctacttctgtggaagcagtgctgtagtt

SEQ ID NO: 592388 - DNA, 97 bp, Homo sapiens
gagacggtccagacaggaacaagacccggacattccaggccacagtcctgggaagtcagatgggattgaaaggatgaagatgcatcagggggcgatc

SEQ ID NO: 592389 - DNA, 100 bp, Homo sapiens
tgaagatatgacacttacaaggtggacaggcatgattattgggccaccaaggttattgccttgtctgtcaagatccgcagttatgaagaacacttggaga

SEQ ID NO: 592390 - DNA, 83 bp, Homo sapiens
ggatgccctgcagtacctgcagaaggtctctggagacatcttcagcagataaatttgcgcctcattttggtaagcggaaaaac

SEQ ID NO: 592391 - DNA, 98 bp, Homo sapiens
cttatatgaatggtacaaaagcgttggcgattgaggagttttgcaaatctctaggtcacgcctgcataagtgagttacctgagagagaagaaggcgaa

SEQ ID NO: 592392 - DNA, 100 bp, Homo sapiens
taagatggctggtaatgaatatgttggattcagtaatgcaacctgctagcagaagaaagtcttcccacaaccccattttatttcatattgggaaaacaca

SEQ ID NO: 592393 - DNA, 100 bp, Homo sapiens
ccgggactttgccgagaaggagttgtttcccattgcagcccaggtggataaggaacatctcttcccagcggctcagaacggccggtttgtgggcgatgct

SEQ ID NO: 592394 - DNA, 100 bp, Homo sapiens
gggcatggccatcgtgcctctttgggcttccatgggcaactacatcaccaggctggggccaagccgcagagcggagttggcatttccagattggggctcg

SEQ ID NO: 592395 - DNA, 82 bp, Homo sapiens
ggagcccaaagacccctggagacatggagccttcacgtaaatgggtccagtcatgcctcccagtaagaagccagaaagctca

SEQ ID NO: 592396 - DNA, 101 bp, Homo sapiens
caggcaggcatctatcttgaaggttttgatgatgatggttcagaatttcatgaacatatatttctggagaaacacctggagagctttccaaaacaaggacc

SEQ ID NO: 592397 - DNA, 82 bp, Homo sapiens
tcatcccatcagcctggattggtgaaactgaatcacaggagatatttccagctttagccacagtagaagacttccagattcg

SEQ ID NO: 592398 - DNA, 83 bp, Homo sapiens
atgcctgcagagctgtggcttaccagagctccaagagtcaggatcgcaagtcagaaagcaaagaaaagagagacatcttgtcg

SEQ ID NO: 592399 - DNA, 100 bp, Homo sapiens
cgggcggcagagcagggcggcggcgactcgaacgctgcgatgactggggactagacaccatgaggcaaatccaagtgtttgaagatgagccagctcgcat

SEQ ID NO: 592400 - DNA, 100 bp, Homo sapiens
ttgccagatggtgcaatgttcaaagtactcaagatgaatttgaggtagctacagcaagctgggtagcaggcagatccaaaggatatcatgaagtttccag

SEQ ID NO: 592401 - DNA, 51 bp, Homo sapiens
gaaggagggagaccccaaaaagagagcaatagtatggttacagaaccgacg

SEQ ID NO: 592402 - DNA, 97 bp, Homo sapiens
ggtcactctcatcttgcaaaccagcacgaaagcaagagattatcaaagtcactgaacaactgatcgaagctatcaacaatggggactttgaagccta

SEQ ID NO: 592403 - DNA, 100 bp, Homo sapiens
cttccggttcgagatcagcttcgagtgcagtgaagccctggcggacgaaacgactggagcagcagaagccgacagtgattgcaacttccactacttcccc

SEQ ID NO: 592404 - DNA, 100 bp, Homo sapiens
caagaataagacttgaccaagaccgactgccagtaataggcatgtgggcacattccatgacagtacaggattatcaggatctcatagaccgaggatggcg

SEQ ID NO: 592405 - DNA, 100 bp, Homo sapiens
ctcaagactggtccacggagtgtatgaccacaaacagccatcaagggatacctcagacaatggcagcttttggattgaaatatttgctgaatgacactgg

SEQ ID NO: 592406 - DNA, 82 bp, Homo sapiens
cttttgtgaagcggcagctgaggagactccggcgctcgccatggccgacgaaaagcccaagcattttgaaagcgaagcagaa

SEQ ID NO: 592407 - DNA, 83 bp, Homo sapiens
caacttccggctggattccaagtccgtcgtggagacaatgcagatcttcgtgaagactctgactggtaagaccatcaccctcg

SEQ ID NO: 592408 - DNA, 73 bp, Homo sapiens
ggcaaactctttggatccaactctgggtctaaaattcccaggactccacagctttgcaccagataagcctgga

SEQ ID NO: 592409 - DNA, 100 bp, Homo sapiens
gccgtcgccgccgccaccgcggccgagaccgcgcagccggcggatctccaggacttcaagttagatgtgcagcacgtgattgaagtggatgagggaaaca

SEQ ID NO: 592410 - DNA, 82 bp, Homo sapiens
ccgggagatcccaggcggtgacagagtggagccatggctagaggtacatgtcccagagcaagcacacggaggcccgggagct

SEQ ID NO: 592411 - DNA, 89 bp, Homo sapiens
agaaccctcgcttgcaacatatcaccatattattcgcctgtttgatcaacctgctgcaagctttcttcctggtggcagatgacatcatg

SEQ ID NO: 592412 - DNA, 100 bp, Homo sapiens
ttgctaaaggagcttaagaatattcctatgaccctggaattactgcaggcacaatttggaatctaaaggacattattccatgcaagagtcaagcagaaat

SEQ ID NO: 592413 - DNA, 100 bp, Homo sapiens
gtcaatttgtacctgcaggcctcctacacctacctctctctgggtgccttcaccagggatggaagaggcaggctgcagcagagagatgcagagttctttc

SEQ ID NO: 592414 - DNA, 75 bp, Homo sapiens
tgcaacacattttcctatacctctgtaccgccaggcatatacgggaaacaactcttcacaaatccaagcagctat

SEQ ID NO: 592415 - DNA, 100 bp, Homo sapiens
ccgccgcgcaggagcctcccggagctggagaaattgtcgtaaatgaagtcaattttgtgagaaaatgcattgcaacagacacaagccagtacgatttgtg

SEQ ID NO: 592416 - DNA, 73 bp, Homo sapiens
ttaaagcttcaaaatcctaagactcagcactgttgcgggtcccttcagtctgaatatgttcattactaaggcc

SEQ ID NO: 592417 - DNA, 90 bp, Homo sapiens
gaagccgagcaggacaagtggcaggctgtgctgcaggactgcatccggcactgcaacaatgcttttcctccgcaaccatgtctgacaaac

SEQ ID NO: 592418 - DNA, 83 bp, Homo sapiens
aacaaaggcatacacttactagaaatctagatgaacatgcttaccctgctgatgaactcatgcctttaacctgtagaggtcga

SEQ ID NO: 592419 - DNA, 97 bp, Homo sapiens
aaaggacctgcccccagagagagctctgaacaagaaggaacacagagggtgcgacagcccagaccctgatacttcatatgtgctaactccacataca

SEQ ID NO: 592420 - DNA, 82 bp, Homo sapiens
cttccatcaatcatatctcacaggatatggctttagttgcccctgaagctccttcagaacaagccagaagagtttttcaaac

SEQ ID NO: 592421 - DNA, 76 bp, Homo sapiens
cacagttcctgggaaggtggagccaccagcctctccctggtctatgctccatcagcaagcactgccgactacaata

SEQ ID NO: 592422 - DNA, 100 bp, Homo sapiens
aactgataacggagaatggaactgtatgccagcagcttgttgtacagtctaaactaaatcataatgcagcgtttatgcagatacccatgggtttggaggg

SEQ ID NO: 592423 - DNA, 100 bp, Homo sapiens
tctgttgatgaccctcttccagattctttcttgtggagaagttattcatgtgaagatccttggaattttggctcttattgatgaaggtgaaacagattgg

SEQ ID NO: 592424 - DNA, 100 bp, Homo sapiens
gaaggaagaggaatgggatccagaatataccccaaagagcaagaagtacttcttgtttttcagaagaagtgaagtcaagatgaagaaccatttgcttttc

SEQ ID NO: 592425 - DNA, 73 bp, Homo sapiens
atatattcattttggcattgtgcagaggtttatcggcgggggcttcaggcaatacctcttagtgttgaccttt

SEQ ID NO: 592426 - DNA, 75 bp, Homo sapiens
ggaagatcttcaaatgggcattcacaagaataaccaagtgctgggaattggaagtggttctacaattgtccatgc

SEQ ID NO: 592427 - DNA, 82 bp, Homo sapiens
tgaatctggttatagatggacaagagacgatcattctgcaagcaggcaacctgaatacagcagactgtccagatgctgtgcc

SEQ ID NO: 592428 - DNA, 71 bp, Homo sapiens
gctgtccacgcacctggacgacgcccggcgccagcacatcgcagactacgtctactttgagaactcctcca

SEQ ID NO: 592429 - DNA, 100 bp, Homo sapiens
ccggggacccttccgtatctgcctaggcattttgctgtctcctcctaatacgatcgttctgaagtctccagcctgagttcagaggcccctgagacccctg

SEQ ID NO: 592430 - DNA, 75 bp, Homo sapiens
tcactacccttcatgcatgaaagacaaagctactcaggtcagcccaaggccaaccccactgtcactctgttcccg

SEQ ID NO: 592431 - DNA, 75 bp, Homo sapiens
gaggatgtcaacaattttttggaggttgcgacctttccttccccagcaataaactggtctctggagatcactgta

SEQ ID NO: 592432 - DNA, 100 bp, Homo sapiens
cccagatattacactgtcaaaactttacaagttaattgaagagtcttgtccacagctggcaaattcagtgcagatcagcctcctctcaagtcctcactgc

SEQ ID NO: 592433 - DNA, 83 bp, Homo sapiens
caagagtgcttatcccagctaagctccaggtgggggcccctgaagccactgatggaagccacactaccggggcatcggaccat

SEQ ID NO: 592434 - DNA, 83 bp, Homo sapiens
cgacaagcacacactatggcgctgaaacggattaataaggcagagttgggcctaaatgagcaccatcaaaatgaagttattaa

SEQ ID NO: 592435 - DNA, 100 bp, Homo sapiens
tctgacatcagctctcctgggaccctccaagagcactagtgtctagaaggcactaaggcgagcccacagcctcggtgccccccgagtcggacgtgtaccg

SEQ ID NO: 592436 - DNA, 155 bp, Homo sapiens
aattttcgagagcaacagtacaagttctctagacaggtgttttcctcatacactggaaaggaagagattcatgaagcagataaacctctcataatgaaggcccccgctgtgcttgcacctggcatcctcgtgctcctgtttaccttggtgcagag

SEQ ID NO: 592437 - DNA, 95 bp, Homo sapiens
agtcgtatcagtctttgaaacaaacatcagagttcttggatgctgggctcttgcactgtttggtggaaatggtgagacaggatttgagcaaaatt

SEQ ID NO: 592438 - DNA, 75 bp, Homo sapiens
tcgtggatgagcacaccatcaacatctccctcagtctgcaccgtgtgaaagcctggtggacatttattcccagct

SEQ ID NO: 592439 - DNA, 100 bp, Homo sapiens
ccgcgtcacttgcagcttgcaatccgtggtgatgaagagttggattctcttatcaaggctaccatagctgggggtgcactggcttctctggactttgcac

SEQ ID NO: 592440 - DNA, 90 bp, Homo sapiens
gtccccaccgtgcagcggggcatcatcaagatggtgaatgaaaactttgccattgatttgatagcagagcagcccgtgagcgaggtggag

SEQ ID NO: 592441 - DNA, 50 bp, Homo sapiens
ggattccatgtagagacccctggagtgctgcttttgacacaaaaacgggg

SEQ ID NO: 592442 - DNA, 83 bp, Homo sapiens
tgaagacctattttactgataagaaaacacatctttacacactaagacagtcattttgtttactcattcagccctgttgcagg

SEQ ID NO: 592443 - DNA, 100 bp, Homo sapiens
cgacgtctgttcaggtcacaatttctacagcagagaccttgagggatatctttcttcactcctcttcacttcttcagaccgtataatagacgctggcccc

SEQ ID NO: 592444 - DNA, 90 bp, Homo sapiens
cgcctttggcggtaaattcggctccctcgtgaaagatgcttctgttcctctgattgatgttacaaacctccctactcctcgaaaattcct

SEQ ID NO: 592445 - DNA, 76 bp, Homo sapiens
cctctcgaatgggcacacctgtgtaggtataagtgtgctagcggagtgtctagattgtcctgaattgaaagcaact

SEQ ID NO: 592446 - DNA, 100 bp, Homo sapiens
ggaagcggaggaaggtgaagtaggaccgaattcctgtgccgaagaggcctgcagtgggagagcaggatgcgtctgttactagagtggagagtctaccttc

SEQ ID NO: 592447 - DNA, 100 bp, Homo sapiens
gcaccaacctgacacttaaaggaagtgctcattggagggttgttcggaatcctataattgaaaaacagtaaagatggaaaaccagttattgaatatcaag

SEQ ID NO: 592448 - DNA, 100 bp, Homo sapiens
ctcccgagtggctgggattacaggtgaaacctttgtcctggggaatagtctggcccgctccttggaaccacactcagactcaatggactctgcctcaaat

SEQ ID NO: 592449 - DNA, 100 bp, Homo sapiens
agggatgggactggaaatcaaatgttacagttctgggaggtgatcagtgatgaacatggcatcgaccccaccggcacctaccacggggacagcgacctgc

SEQ ID NO: 592450 - DNA, 76 bp, Homo sapiens
tggagccattcttagtcaaaaagctcatcttgccttatcaaatttaacagaggctttggatgaagatgcagacccc

SEQ ID NO: 592451 - DNA, 110 bp, Homo sapiens
ctgggcgttcatctaccacgcctacgtgtgctgcgagtggctgagatgctgcggtggaggggaggccaggccccgcactgtctggctggggcaccccgagaagagagacc

SEQ ID NO: 592452 - DNA, 100 bp, Homo sapiens
ccgtctggatttccaaggaagaatttcctctgaagcaccggtggtgttcccactgatgaagagcaggcgactgggttggagagggagatcatgctggctg

SEQ ID NO: 592453 - DNA, 96 bp, Homo sapiens
gagtggccgcgggcgccatggagggggtgctgtacaagtggaccaactatctgagcgcacgtgtggagtgagagcgaggactgcctgcctttcttg

SEQ ID NO: 592454 - DNA, 75 bp, Homo sapiens
agccgcggatctcaccgccgctcaggactatggaaatgatattagacaaaaagcaacttcaagtggttttcttat

SEQ ID NO: 592455 - DNA, 51 bp, Homo sapiens
actcagaccggtctctgcaagaatcgggcccgggacacccagacagatgag

SEQ ID NO: 592456 - DNA, 100 bp, Homo sapiens
gactaagcccaagagacccatccttcctacatcagcaacagaacgtgctggccaaagcgctctatgacaatgtggccgagtccccggatgagctctcctt

SEQ ID NO: 592457 - DNA, 100 bp, Homo sapiens
tggggcccagatggcagccccggaggcgctggtgggaggctgtgtcctggggtccaccactgctccccggtggaatccgcaggctggaggctcccagggg

SEQ ID NO: 592458 - DNA, 74 bp, Homo sapiens
agtacctgcagaaggtctctggagacatcttcagcagatttaaggaacagtgacaccccaccccagtcccgtgg

SEQ ID NO: 592459 - DNA, 98 bp, Homo sapiens
tttggtgctaccatcttcctcctttccgtgggcaccgccctgctgggcctgaaggaggcactgctgttcaacctcggatcccagcttctgcagtggaa

SEQ ID NO: 592460 - DNA, 83 bp, Homo sapiens
cagagcctcgcctttgccgatccgccgcccgtccacacccgccgccagtgtgtcccggcatggatatccggaacaacctcact

SEQ ID NO: 592461 - DNA, 85 bp, Homo sapiens
aaacaacatctttccagaaagagagtcacctaaggtcctgcgagtacaagggtcgacccccaaaggcaggggcagagccagcatc

SEQ ID NO: 592462 - DNA, 96 bp, Homo sapiens
gcagtttacacatctcacccaattcaggtgtgatccctcacatccacaaatctctgattggaaagaagggacagcagaaaactgcttagagggatg

SEQ ID NO: 592463 - DNA, 100 bp, Homo sapiens
catctctggagtggattttgaatatttgtagcccttttgcctttactactggaatgattcaggcttctcctggcaatctctctcagtttgaagacattct

SEQ ID NO: 592464 - DNA, 75 bp, Homo sapiens
actacggaggagagagtgcatctataacaccattggaagatgaattctcaagaaatttgaggaagaagatttgga

SEQ ID NO: 592465 - DNA, 76 bp, Homo sapiens
ctcctgagtagctgggactacagaatcctgtgaagcagctccagctatgtgtgaagaagaggacagcactgccttg

SEQ ID NO: 592466 - DNA, 100 bp, Homo sapiens
gtggatttcgaggagtgtctgaaggactcgccccgcttcagagttgtctgctggttctcagcttgaagaagattctgcagtccttattgatcctttttct

SEQ ID NO: 592467 - DNA, 100 bp, Homo sapiens
attttcacctcgcgtcgcgcccgggaggaaggaacgaggcaaggagctaaagcagcgtgcgttcagccctggggcagcccagctggaggcaccccggcct

SEQ ID NO: 592468 - DNA, 100 bp, Homo sapiens
gcggaagtggtgacccgtgggacgcggctgagacaggtattcaggagtctccggtgccgaacggccactcgcttccgggcagagacttcctccggaagca

SEQ ID NO: 592469 - DNA, 74 bp, Homo sapiens
ctccgtggaagcgtggccggcagcgtcccggacgaggagggattaaagcctgtggtttccacagaagcaccacc

SEQ ID NO: 592470 - DNA, 50 bp, Homo sapiens
atctttttgatgtcatcggatcaagtccagttacaacacagggatcacaa

SEQ ID NO: 592471 - DNA, 75 bp, Homo sapiens
gctaggacgccgagcggtgactccccgccgctcccgggggccgtgacggcatctccttggaaacaatgccatctt

SEQ ID NO: 592472 - DNA, 75 bp, Homo sapiens
aaaagaaaacattcacaaaatgggtaaatgcacaattttctaaggctgcagagactgcaagtctggaagaacagc

SEQ ID NO: 592473 - DNA, 51 bp, Homo sapiens
cgtgcctcatgatcgcttcaacaaggactcagaattcatgattgaagaaat

SEQ ID NO: 592474 - DNA, 83 bp, Homo sapiens
gttaacagactgcttttacacctacttgaacgcatgaggaatgggattgatatcctggttggaacaccaggtcgtatcaaaga

SEQ ID NO: 592475 - DNA, 50 bp, Homo sapiens
cttacatgtgggaaccccaggagcttgttgagtcagcagatactggagtt

SEQ ID NO: 592476 - DNA, 100 bp, Homo sapiens
ttcctgaaaatcatggtgaggacatgaggaaaatgtccttccagcgctgcgcccggacagacaagaacatgttcttcaagtatacatggaataacttttt

SEQ ID NO: 592477 - DNA, 88 bp, Homo sapiens
cgggtccgggagcgcggcggagacgatgcctgagatcagagtcacgcccttggggggggccctcagcctcttggccttgaacgggctg

SEQ ID NO: 592478 - DNA, 100 bp, Homo sapiens
gcacgggcaaggcggagagtgacggagtcggcgagcccccgcggcgacaggtgcatgctattatgatgctaatcagtctatgtatgtgtttggaggctgt

SEQ ID NO: 592479 - DNA, 75 bp, Homo sapiens
ctcgatctaggttctgcggcacgggatggcggaggcgcctcctgtctcagttctacatcaaacagttcgttaact

SEQ ID NO: 592480 - DNA, 88 bp, Homo sapiens
aatgcagttgcgaagagtattacatgatattagaaactcactgcagaatctttcacagattatgcttggattaacaagtcatgaggca

SEQ ID NO: 592481 - DNA, 96 bp, Homo sapiens
ctaacctattcagtccagcaggattcggacagcaagcatgtggatgtacatctagttcaactaaagtggagtcaaccagccccagtctgctaacca

SEQ ID NO: 592482 - DNA, 89 bp, Homo sapiens
cccacaaggcttcactggacccagctgtgaaacggatgccgacaaaaggatcaaggtggcgaagcccgtggtggagatggatggtgatg

SEQ ID NO: 592483 - DNA, 75 bp, Homo sapiens
ccaggttgccttggaaaatgccaacgccgtgtctgaagctttctacagaacaaactgcacagcttggtactgagc

SEQ ID NO: 592484 - DNA, 100 bp, Homo sapiens
cacatattcaaacctgtatctgtgcaggcaatgtggccaggagtggtggctcacacctgtaatcccagctctgggaggccaaggccagtggattgcttga

SEQ ID NO: 592485 - DNA, 80 bp, Homo sapiens
agttcagacccttctctcccctccactttctcccggacctgcctagagctggaacgttacctccagagcgagccctgcta

SEQ ID NO: 592486 - DNA, 82 bp, Homo sapiens
cactcccgcccacgtcccatttcgcccctcgcgtccggagtccccgtggccagtttggtgccctggttgtcagatgttggaa

SEQ ID NO: 592487 - DNA, 90 bp, Homo sapiens
cgacagtcctagctaaacttcgccaactccgctgcctttgccgccaccatgcccaaaacgggcctggtggcggtaataaccggaggagcc

SEQ ID NO: 592488 - DNA, 97 bp, Homo sapiens
ggtagcgggagcccggccggagctgggtctggagacgccgtggcagcctgaacggagtgtgcgacggattgggagattgcaaaagttgagaagctca

SEQ ID NO: 592489 - DNA, 82 bp, Homo sapiens
gttggaatcagttcccgccaccatgagctcattctccagagactccagcatgcgttatctccagaagaagaagagaaaagga

SEQ ID NO: 592490 - DNA, 76 bp, Homo sapiens
ccggactccactgcgcctctgaggggctcaaatacgaattcaagttgcctttccccatcttcctggttctgctcct

SEQ ID NO: 592491 - DNA, 100 bp, Homo sapiens
aacacatcatgaaggcctgttttgaagagaaggggaataagactgcatctgttcatatgagggcagtttccgtttgactttcttcagttggaggctgaaa

SEQ ID NO: 592492 - DNA, 82 bp, Homo sapiens
ggagggcatagatccggccaagcatcagcagaaaaagtcctacctggagcgaagcgttaaggaagctgaggacaacatccgg

SEQ ID NO: 592493 - DNA, 100 bp, Homo sapiens
cctgccagcacccctggagaagcgcgttaaggagctggctcagaaagcgtggatacccatcaacgaagttttgatattggaattcagattggctatcagc

SEQ ID NO: 592494 - DNA, 100 bp, Homo sapiens
cgcgaggtcacccctgggaaggagcgcagcccacccggcccctccgcatccgagcaggttcttccaggttggaaagagaatatgctggagagctgtctcc

SEQ ID NO: 592495 - DNA, 90 bp, Homo sapiens
catttcacatcgaagccatgatttaaatatcggcgttaagcagagtcacctgatatgaaaaaggagcaagacccccctgccaagtgccac

SEQ ID NO: 592496 - DNA, 83 bp, Homo sapiens
cggacggaacgttaggaaggccctggtgctttgcaagatatcaccttgtcacagcagaccccctccacttggaaggacacgca

SEQ ID NO: 592497 - DNA, 100 bp, Homo sapiens
aactgctgatgctcatggtccccatggcatgggggcctcagggcagcctgcctggagatctttccctagatcattctgacctagttgcagagttgttgaa

SEQ ID NO: 592498 - DNA, 90 bp, Homo sapiens
ctggagagggggcgctgagctgttggggaactgtggaaggtgcatcagtgaagaaatggaccaatgtgtataatcatggaatctccttgc

SEQ ID NO: 592499 - DNA, 100 bp, Homo sapiens
tagctgtcctctttaagaagaaatttggaggggtgcaagaacttttaaatcaacgaatttagataatgggctgtgtgcaatgtaaggataaagaagcaac

SEQ ID NO: 592500 - DNA, 100 bp, Homo sapiens
cgagcggaactggagaaagctgaggactgtgccctgtccacggtgcctcctgcatgtcctgctgccctgagctgtcccgagctaggtgacagcgtaccac

SEQ ID NO: 592501 - DNA, 145 bp, Homo sapiens
cggccgcgggagcctcgtggctgcgtcaccgccgcccccccagacaagatggacaccgcggaggaaggtgaatgaaaactttgccattgatttgatagcagagcagcccgtgagcgaggtggagactcgggtgatagcgtgcgat

SEQ ID NO: 592502 - DNA, 109 bp, Homo sapiens
caggaacattgggaaggatggcaaattccagattttagtttgccttggaacaagactattgcccagaagaaaagatgtttggttttcacaagccaaagatgtaccgaag

SEQ ID NO: 592503 - DNA, 51 bp, Homo sapiens
cctccccagccatgtgaaactacagtgaccaacaccttcaggacgaacaat

SEQ ID NO: 592504 - DNA, 83 bp, Homo sapiens
catctttgcagtgtagcattttcagggggatatgagactttctactcggaatatcctgagtgttgcgtggatgtaaaacccat

SEQ ID NO: 592505 - DNA, 74 bp, Homo sapiens
gttccatcatggcgtcaatgcagaggttggaaagaaccatgactgtattcaggaaggcacatgaactgaagctt

SEQ ID NO: 592506 - DNA, 100 bp, Homo sapiens
cccgtttccatcacgagtgccgccagcatgtctgacaaactgccctacaaagtcggtgagaaaccctatcgttgcaacatctgtggggcccagttcaacc

SEQ ID NO: 592507 - DNA, 82 bp, Homo sapiens
gtgggcaaaaagttattggagtggtttaatgacccgagcctcagggataaggtattaaaactgccttcaccagaaaatgtgg

SEQ ID NO: 592508 - DNA, 100 bp, Homo sapiens
caccctccaactttgcgacggaaatgtgtcatcgaaagccaggtaatgctggaggatggaagaagcaaagggtttggcttcgtctgcttctcatctcctg

SEQ ID NO: 592509 - DNA, 100 bp, Homo sapiens
gggaccgagcgagcgaccgacgcgccacccgccgacgcctcagccgcttggggcccgcacggaccctctacttcatgtaatcgctcaaattcctcttctc

SEQ ID NO: 592510 - DNA, 74 bp, Homo sapiens
gcaggaccaacctctcctctggatgctctagattttaggtgatgggcaagtcagaaagtcagatggatataact

SEQ ID NO: 592511 - DNA, 100 bp, Homo sapiens
tatccccgaaattctacccaaattgcttctgtctgttaaatggaattctagagatgaagtagcccagattgaggtggtgccttctgcctctgccctgatc

SEQ ID NO: 592512 - DNA, 82 bp, Homo sapiens
ctgccccgcgctgacaggggggcctggccgcgcagccgccgccgccatgtctgcgcatctgcaatggatggtcgtgcggaac

SEQ ID NO: 592513 - DNA, 83 bp, Homo sapiens
gccaaagaagcccccatactcccggtgaaaaagatggaaagaactccagtggatccaagcgttataatcgcaaacgtgaactt

SEQ ID NO: 592514 - DNA, 100 bp, Homo sapiens
cgttggtcaaatcggaagcgattaagtgccagcaagggtctctctgtgtctccagagccctgtctgtcgctgggagctccatctctcctgccccacccat

SEQ ID NO: 592515 - DNA, 100 bp, Homo sapiens
aggccttccagtacacagacgagcatggggaagaactggcctatgatctggatgtggatgatgcgcctggaaacagtcagcaggcaactccgaaggacaa

SEQ ID NO: 592516 - DNA, 82 bp, Homo sapiens
ctcggtgttaacgtctgctccagctcgcagcccgctgctggcggagctggagtttgttcagatcatcatcatcgtggtggtg

SEQ ID NO: 592517 - DNA, 97 bp, Homo sapiens
gtgtgggggatgatggtgacgcttctcactcacgtgtgaaggggaccaacaaggcaccatggcgcagaagggccaactcagtgacgatgagaagttc

SEQ ID NO: 592518 - DNA, 75 bp, Homo sapiens
cgagttgagtacttggatagacttatacctcagctgcagttgtggttggataatccaaagattcagctgacattt

SEQ ID NO: 592519 - DNA, 88 bp, Homo sapiens
actcgcgcggggggtaattcggggtctgggttctggtgccgcgcagctttccccggtattagaaaactactcggatgctccaatgaca

SEQ ID NO: 592520 - DNA, 83 bp, Homo sapiens
cgcagccttgggcctcgcgccggctatggccgtgccctggggctgagccctcagccctgaaggatggctgccatattgggaga

SEQ ID NO: 592521 - DNA, 75 bp, Homo sapiens
aaaaacaagactggggctgctcccatcattgatgtggtgcgatcgggtgtgtccgcagccggccaggtggtatcc

SEQ ID NO: 592522 - DNA, 83 bp, Homo sapiens
acgcggcttgaaggactgtgggcagatgtgaccaagagcctgcattaagggccaattcctgtccccccagcagcatggcatcg

SEQ ID NO: 592523 - DNA, 50 bp, Homo sapiens
tctgatgaagatgaactaacaacctcatagttattcctaggagtcaagaa

SEQ ID NO: 592524 - DNA, 100 bp, Homo sapiens
cccagcgcgcccgtggccgctgccgcctccgccccaggtaatcaaatgcaaagcagctgtgctatgggagttaaagaaacccttttccattgaggaggta

SEQ ID NO: 592525 - DNA, 80 bp, Homo sapiens
ccagccactcccacgagagcttctgtttgtgaatttcccagaccagccggtggtgtggagagaaatcagcattattacat

SEQ ID NO: 592526 - DNA, 100 bp, Homo sapiens
tgaaaatgaatttaatgaagaagtggccttgacagaaatttacaaatacatcgtaaaatattttgatgagcggggtcgccctgtcccgggcccactttga

SEQ ID NO: 592527 - DNA, 98 bp, Homo sapiens
gaacttcaggagcaagctgaaaaagaaatgtactccttgtgtcttttagcaacattaatgggctggagcattggatttgctaaaggagcttaagaata

SEQ ID NO: 592528 - DNA, 75 bp, Homo sapiens
ggatccagacttcactgtgaatgatgtcaaaatgtgtgtggctccttgctcggattgaacgtatggaaaggcgga

SEQ ID NO: 592529 - DNA, 83 bp, Homo sapiens
cagccaggtggcgaggatttccacatatcgctatggctcagagcaagagtttgtcgatgacttgaagaacatgtggtttgggc

SEQ ID NO: 592530 - DNA, 90 bp, Homo sapiens
ggtggttgatgaaagaagctaagaagaggaatcccaatattacactcattggaaattgaagctcaagaaggtgaagatgatacctttcta

SEQ ID NO: 592531 - DNA, 75 bp, Homo sapiens
aaaacgctttttgcatacaagcaggaaaatgagatgttatccagaggaagaaaagtatgcctttgtcaactggat

SEQ ID NO: 592532 - DNA, 50 bp, Homo sapiens
gtggagacacggccagatctgccctccaaaactatgttccaacttcctgt

SEQ ID NO: 592533 - DNA, 50 bp, Homo sapiens
ctgggaccaaggtcaccgtcctagccattgagcaggagaagcggagtgaa

SEQ ID NO: 592534 - DNA, 90 bp, Homo sapiens
gtgtcatcgaaggcagcctgtctcccaaagagagaactcttctcaaagaggaccctgcttactgctaccagagattcactgactgctata

SEQ ID NO: 592535 - DNA, 100 bp, Homo sapiens
aggaagctcgggcgctccggctgtaaggagccgcggcggggggaaaatggagcccttcaccaatggtggaatggatccaacagcaagtggtaaaaaagcg

SEQ ID NO: 592536 - DNA, 73 bp, Homo sapiens
ggagctcatcgggcagattagcgacatccgagtgcagaacctgcaaggaagtgtttggattgtgagctatttc

SEQ ID NO: 592537 - DNA, 98 bp, Homo sapiens
gtaaaagttccctgaggcctccccagaagcagatgctgtcgtgcttcctgtatagctgcagaactttgctgatatgtgttcaagatgagtgggatggg

SEQ ID NO: 592538 - DNA, 100 bp, Homo sapiens
ctggggatggcagagccccacaggaagcataaggacaaacagagaactggccgctgcatggttaccacagaccacaaagacagtctcatcgaactcaagg

SEQ ID NO: 592539 - DNA, 100 bp, Homo sapiens
ttttggaacgcccgtgccgcgtctccgcgttcccagcccgggtccccgcgttcacagccccagcgcaggggcccagatcattgatctgatgatgctggtc

SEQ ID NO: 592540 - DNA, 100 bp, Homo sapiens
cgcatgtggacgtgcacgggatccacttccgcaaggaccctttggaaggccgggtgggccgaggaatcctgaagtgggtaaaactgattgacaactttga

SEQ ID NO: 592541 - DNA, 100 bp, Homo sapiens
ctcaaagtgggacaatatcctctgtggagaacacccccccatggaggcgaggatcccctaacaacagtgagagagcaatgcgagcagttggagaaatgtg

SEQ ID NO: 592542 - DNA, 100 bp, Homo sapiens
ctattcgcggagctggaatgactggcaacccagggaaaactgaggctgccatcaaaaacttcagtccctactacagtcgtcagtactctgtggctttctg

SEQ ID NO: 592543 - DNA, 75 bp, Homo sapiens
gaatctgtcttggaggacatcagaagaagatgaacaagtttctgctgtttgaggcacagacttttctggaagcag

SEQ ID NO: 592544 - DNA, 74 bp, Homo sapiens
aggggggttccatctcccaacttgtccattatctttgtgcaaagaaagcagcaaagagaattaagagaattgca

SEQ ID NO: 592545 - DNA, 100 bp, Homo sapiens
atcggcatagcccgggagatgcagccagtttacaggtggcctcagccccgagtccaagaagatcctgacacccgccctcaagaagcgggcccgggctggc

SEQ ID NO: 592546 - DNA, 108 bp, Homo sapiens
aaacagatctcagccccgggctcccagctgcccacctcatagatgtgtcttgctgaatcagggctctcttatccctgccatcgacttacagtgggaagaagatcttca

SEQ ID NO: 592547 - DNA, 99 bp, Homo sapiens
ctttcttaggaaatgtagttgctttcttaacctcatcaaattcatgaagatttagccgaggcccatgttacagaatgtctgaaggggacagtgtgggag

SEQ ID NO: 592548 - DNA, 77 bp, Homo sapiens
tcccacttcaaacattcgtctcggaaaccccgcctcttacagtcacgagatgtggatgaatgctctttgaagccaag

SEQ ID NO: 592549 - DNA, 83 bp, Homo sapiens
aatgaatgtttccatctcttcagagatgaaccaggatcaaaatacttgctggatggtggactcagagaccaataaaaataaac

SEQ ID NO: 592550 - DNA, 83 bp, Homo sapiens
cacctacgtcccgctgccgtcgccgccgccaccatgcccaagagaaaggaagccatcttcgacaagagcacagggaaggttgt

SEQ ID NO: 592551 - DNA, 75 bp, Homo sapiens
gctgccctgagacggtgtcccgccgaaaggcatggctttgggaagaagacaagaatttgagatctggcgtgagga

SEQ ID NO: 592552 - DNA, 75 bp, Homo sapiens
ctcaacggctgatgatttctggaactgtggctgcaccatctgtcttcatcttcccgccatctgatgagcagttga

SEQ ID NO: 592553 - DNA, 90 bp, Homo sapiens
aggcaagcactgggtggtgatcgtggcaggttcaaatggctggtataattataggcaccaggtgtgatccctcacatccacaaatctctg

SEQ ID NO: 592554 - DNA, 98 bp, Homo sapiens
agcgacccaagcacaccacttcagctagggaaaggacctgaaggagaagaaggagaaggtggaggagaaggcaagccggaaagagcgaaagaaagaag

SEQ ID NO: 592555 - DNA, 100 bp, Homo sapiens
gctggataagctactagcattcctgtattctgggaaatctgaaatagagtactatgctatgttggctaaaactggtgtccatcactacagtggcaataat

SEQ ID NO: 592556 - DNA, 100 bp, Homo sapiens
ctcaacaacatttttttttggcttaacaaaacatcaaacggcatacaaatgtgattacagtggcgagatcttgaacaactgctgcgtcatggagtaccac

SEQ ID NO: 592557 - DNA, 96 bp, Homo sapiens
tggagcaaggaaaagagccctggaatatgaagcaacatgagatggtggatgaacccacagaatgtgacagtgatgataacatgggtgccaaaaata

SEQ ID NO: 592558 - DNA, 74 bp, Homo sapiens
gaagaaggaacggaaacaaagttattttgctcgggcggcgactggcggcgcgatggacctgaccgggctcctgc

SEQ ID NO: 592559 - DNA, 90 bp, Homo sapiens
ttggaagaaagagagagagctgctgcaagagagaaaaatagggatcgtccaacccgagatcatacagtccactgaagaatttgaaaatgc

SEQ ID NO: 592560 - DNA, 106 bp, Homo sapiens
gtcgcttctgcccaagatgaggagcccctggcctgcccggacgagttcgatgacttcgtcacctatgaggatgaagatttgataaagtggaaggcactgtttgagg

SEQ ID NO: 592561 - DNA, 82 bp, Homo sapiens
ccgtacgtcactaccactgtctctgctcacagtgccaagattcttctgatgtagagcgactggaaagattcttcgactcaga

SEQ ID NO: 592562 - DNA, 87 bp, Homo sapiens
gtactttgccctcagcatctcccttcatgtctgggtcatgcaaagccttctagacaagctcagtggaatctgaagggcccaccccat

SEQ ID NO: 592563 - DNA, 97 bp, Homo sapiens
ggacaaaacagcatggttagtcattgtggatgatgatacattaataagttttttgctccactcaagcctgttagaatcaccatggaatacagctcca

SEQ ID NO: 592564 - DNA, 100 bp, Homo sapiens
tggacatcgatggacgcattcagaaggtcatcatcagatttgaaatatttaaagtggatacaaaactatttcagcaatgcagacaattaagtgtgttgtt

SEQ ID NO: 592565 - DNA, 83 bp, Homo sapiens
ggagaggcggcggcggcctcggctgaagaaagaaggtgggagcggagagcgcaggcgtgatggctctgagagattcctctgcg

SEQ ID NO: 592566 - DNA, 83 bp, Homo sapiens
caggctcgcctcgactccaaatggttgaaaacagatatacagcctgattacatcaaccccagagccgtgcagctgggctccct

SEQ ID NO: 592567 - DNA, 101 bp, Homo sapiens
caaatgccagactgattgtcatgctcagggaccctgtggagagatgactctgaaggagtttgccataatgaatgaggaccaagatgatgaagagtttctgc

SEQ ID NO: 592568 - DNA, 100 bp, Homo sapiens
aggaggaggagccgcagccactgccacacggccgggaggccgagggcgcagaaggcatgcggatcctggtcactctgctgctggatacgctgcccatgct

SEQ ID NO: 592569 - DNA, 105 bp, Homo sapiens
gcacgcgggtctgtcatcatgtcgcgttacgggcggtacggaggagacctgcctagagctggaacgttacctccagagcgagccctgctatgtttcagcctcaga

SEQ ID NO: 592570 - DNA, 99 bp, Homo sapiens
tgctactgcagaacttgcaggaacagagtttgtagctgcaaaaattggatgcagagtttcagaaaagactggaaaagaataaaattgctgcagaggagc

SEQ ID NO: 592571 - DNA, 100 bp, Homo sapiens
accatgcctgtgttgccagggcctccagtacagatgccgtctgttatatcgaccacctgttcagaacattgcttacagaaatatttaaaaatgacacaaa

SEQ ID NO: 592572 - DNA, 75 bp, Homo sapiens
ggacctggacccggacccaaagtgccatgtctttaatggaatgggtactgttcaaaaaggaatgccccacaagtg

SEQ ID NO: 592573 - DNA, 96 bp, Homo sapiens
tatggttctgacaaagatgaaggaaattgcagaagcctaccttgggaagttcacagccatgaatgaaccacagtgcttctacaacgagtccattgc

SEQ ID NO: 592574 - DNA, 82 bp, Homo sapiens
ctggacaagtatgtggaaatagcgcggctgtgcaagtacctgccagagaacgacctgaaggatgcctgccatattagatgga

SEQ ID NO: 592575 - DNA, 100 bp, Homo sapiens
cgccaaggagatcgtctctctcatcgaggcccaaaccgccaagggggtgcactatagccatctggagctgagccctggggagccagtgcaggagggggac

SEQ ID NO: 592576 - DNA, 80 bp, Homo sapiens
ctgggggccttggctgtaaggacccctaaggttcttggccaggctgactgagagatttgtgctgggagtggatatgttcg

SEQ ID NO: 592577 - DNA, 80 bp, Homo sapiens
ctacggggctgacatcagcggctctttgtatgatgacgtgcccgtggttgacacgagctgtgtccccagctgttcccgtc

SEQ ID NO: 592578 - DNA, 74 bp, Homo sapiens
tgaatccctaagattatttaaaaatgatcctttgttcttcaaacctgacttaaataagctggatggatttggtg

SEQ ID NO: 592579 - DNA, 97 bp, Homo sapiens
agctgtcattcttctctacagaagagcttctcctcatcaactggggatgattacagttcttcctaaaaaaggtggagccgccaccaaaatgcagatt

SEQ ID NO: 592580 - DNA, 83 bp, Homo sapiens
ccgaactccaagggacgacgctcgcggaagcagaggtttggggtttacccaaggtccagcctagcccctaggcaccatgtcgg

SEQ ID NO: 592581 - DNA, 95 bp, Homo sapiens
ttaacaacgttaccagcatccattgcaaaccttattaatctcagggaactggatgtcagcaagaatgatgagacaccaattattgcggtgatggt

SEQ ID NO: 592582 - DNA, 50 bp, Homo sapiens
cggagcacgagaaatacggcgtgggttactcactataaacaatatccacc

SEQ ID NO: 592583 - DNA, 100 bp, Homo sapiens
ttcagcttcatactcctgagggctacagactcaaccgaaatggagactataaggaggttattcaaggacacggaaaagccaacaccatggtagcattaat

SEQ ID NO: 592584 - DNA, 82 bp, Homo sapiens
ctcagagctttacgatgtcacttgggaagttgagtggtgattttatgcaatggcttcaagccacagttcttcaccagtgcct

SEQ ID NO: 592585 - DNA, 100 bp, Homo sapiens
aaccatgtttggattgaagccgcctctgtattacttaccaggctgaccccgcactacatctacccaccagccatcgtgcagcccagcgtggtgatcccag

SEQ ID NO: 592586 - DNA, 73 bp, Homo sapiens
ggagcttcaggctcgctccgtgcggatgatgattattctccaccgtctaagagaccaaaggccaatgagctac

SEQ ID NO: 592587 - DNA, 76 bp, Homo sapiens
cagagggacggccccagaatggcatgtcagtttttactgcttcaggccctccaaacatactctgatgacatcttgt

SEQ ID NO: 592588 - DNA, 90 bp, Homo sapiens
ccacggtctgcccacccaacgcgaagacggtaacccgtgtgactttgactgggttacattgattacccacctagtacaacatcttacggg

SEQ ID NO: 592589 - DNA, 96 bp, Homo sapiens
cctcagctgcttcggacccaaccacacgctgtaccccatggtcacgcgctgccatcgacgaggatgtgctgcgctaccagtttgtgaagaagaagg

SEQ ID NO: 592590 - DNA, 49 bp, Homo sapiens
gagcagtattacgacccgagtgacgagggaaggggatgctgaggaaagc

SEQ ID NO: 592591 - DNA, 80 bp, Homo sapiens
gacagcctggagaagagcgaccagctcactaagaacatgtgtgtactgtaagcacggtcacctgtgtcccatcgacaccg

SEQ ID NO: 592592 - DNA, 100 bp, Homo sapiens
gaatccctttggtgtggacatctgctgccggaaggggtcccgaagccccctgcaggaactctacaacccaatccaggatgaacgtgaagccagagaaaat

SEQ ID NO: 592593 - DNA, 99 bp, Homo sapiens
tgtggaggtggtcggcaatggaacctacggacaggtgtacaagagagaactcgatgccaccgcaacggtattggcgaaccggcaggatgaaagtgagca

SEQ ID NO: 592594 - DNA, 74 bp, Homo sapiens
gctgcgaaagctgccaaaagtgacatgcaggaagccaccattcttcagagggcaatgaaggcacagaaatggaa

SEQ ID NO: 592595 - DNA, 80 bp, Homo sapiens
cttcaaaggctgtcgcaaggaggaagtactcccctgccctcaacaagatgttttgccaactggccaagacctgccctgtg

SEQ ID NO: 592596 - DNA, 100 bp, Homo sapiens
gagatccgggccgtgaacgaaagcagtgacggaggagcttgtaccaccgggactgggatgacccacggctctttacactcacggccctgcgacggcgggg

SEQ ID NO: 592597 - DNA, 95 bp, Homo sapiens
tctgccaccatcctgggttgacaattctacacaaggagcctcttagcaaatatccggctgtgatcaatgatatttcattctggttgccctctgag

SEQ ID NO: 592598 - DNA, 75 bp, Homo sapiens
taactccagaatcccccattggtaacggcgactgtgactgtggtgaatgtgtgtgcaggagcggctggactggcg

SEQ ID NO: 592599 - DNA, 123 bp, Homo sapiens
ggggcccgaccccctggacccgactgatctgaacggggcgcacttcgacccggaagtttacctagacaaggctcatgtagcctcactggagggcattgccccggaagatcaagtcgtgctcct

SEQ ID NO: 592600 - DNA, 100 bp, Homo sapiens
cggcgcatgctgacctcagagggactgcgctgcgtctggaagagcttcctcctcgatgcctacaaacagtcttgaaagcgccacaagcagcagctgctga

SEQ ID NO: 592601 - DNA, 90 bp, Homo sapiens
aggatcttataaaacaaatgctgctgctatgaatatgggtcgaccattccaaaaaaatcgagctgtaggtaaaacttgcctactgatcag

SEQ ID NO: 592602 - DNA, 100 bp, Homo sapiens
gagacaccgctatcacagctgctgcaatcgcttgggagagctcctgggccacccctcctttcaggtcaagctggacaagatcgagggcgtgttcgagcgg

SEQ ID NO: 592603 - DNA, 95 bp, Homo sapiens
agctgagcaagctgggcctgctggacaaccactcctcggagttcaagtttgagtacaagctcagcttcaaaggcccaaggctggcattgcctggg

SEQ ID NO: 592604 - DNA, 82 bp, Homo sapiens
ccagagcgccgcgcacttcgtcatgttcttcgcgccctgatattctctaagccgctttcatcatgggagaaatagagcagag

SEQ ID NO: 592605 - DNA, 80 bp, Homo sapiens
gcgcctccgctgcagtcgctgcgtctccaagggaaagcaggcaggatgggagagtcgccgatagaaccacctcttccctg

SEQ ID NO: 592606 - DNA, 90 bp, Homo sapiens
ctcgctctcctctggggactgcagagaagcaggacctcgggccatgggacaggaagatgtcacccaagcgcatagctaaaagaaggtccc

SEQ ID NO: 592607 - DNA, 82 bp, Homo sapiens
ggcgaaacgaggaggagataacgcggccttgggctctgatgccatggacaatattaccaggcagaaccaattctacgatacc

SEQ ID NO: 592608 - DNA, 75 bp, Homo sapiens
catcctcggcggcggtggccgctagctccaaggaaggcatttccctggaaatggcagctgtgacagtaaaggaag

SEQ ID NO: 592609 - DNA, 101 bp, Homo sapiens
tgccccaccccgttccatggctccccatcgccagccccccacgcccaccaggcattatattgtacttctagcaagtgcaccaacagaaaaacaacgcctgg

SEQ ID NO: 592610 - DNA, 101 bp, Homo sapiens
ctaggattatacattgtaagaggtgacaacgtgtgtgatgaatgcagactctgctaccattttggctgtttggatcctcctttgaaaaagtctcctaaaca

SEQ ID NO: 592611 - DNA, 105 bp, Homo sapiens
ccaagggcctccgtctggatttccaaggaagaatttcctctgaagcaccgggggggccctcagcctcttggccttgaacgggctgttcatcttgattcacaaaca

SEQ ID NO: 592612 - DNA, 100 bp, Homo sapiens
gacctccctgccctgtataccgagggaacagaatgctacagctttccatgtaactgtccaagatgataataacatcgttgtctcattagaagcttcagac

SEQ ID NO: 592613 - DNA, 82 bp, Homo sapiens
ggcgaggccctcatgtaccacacggtcctcgaggccacacgggttaatcgaagaaagagcgcactggctttgcgctgggaag

SEQ ID NO: 592614 - DNA, 100 bp, Homo sapiens
gcagagctgcagctcggggccgaggggtctcgctctcacccaggctggagtgcagtgacacagttgcagctcactgcagcctcgacctcctgggctcaag

SEQ ID NO: 592615 - DNA, 83 bp, Homo sapiens
acaaatatacgtgtatgttcacttacgcctctcaaggagggaccaatgaggcactgaaggatagcacagaagtagaaattgtg

SEQ ID NO: 592616 - DNA, 80 bp, Homo sapiens
cactccagtgcctccgacgcctcctgatggcgggagtcatggatgtagatgctgaaagagagaagataacacaggagatc

SEQ ID NO: 592617 - DNA, 88 bp, Homo sapiens
gatggcaacggccaacttcggcaagatccagatcgggatttacgtggagatcaagcgcagcgatgacctgatggccaaaagaaaggaa

SEQ ID NO: 592618 - DNA, 100 bp, Homo sapiens
gacggcgcctctcgaacgagtgtgggcgcgaggcaggtgctggacgtcattgctcctccttatacctctgacttcgtgcaacttttcctccccatcctgg

SEQ ID NO: 592619 - DNA, 51 bp, Homo sapiens
cggtttcagacctcccacagtgtcacccagattgactttgaagatgtgatt

SEQ ID NO: 592620 - DNA, 101 bp, Homo sapiens
catggatgacagcaaacgcaaggcgaagaaactcccatcaagactgaagcagacgttttggcagaaaaccaggttcttgatagcagtgctcctaagagtcc

SEQ ID NO: 592621 - DNA, 98 bp, Homo sapiens
ctacctgaagttcttcaactgccaaaagcacagctacttcagtgccctcatcctggtggagggcatggatatcgagtccttgcataagtgtgctttgg

SEQ ID NO: 592622 - DNA, 99 bp, Homo sapiens
gctgctgcggggctctggcgcgcagcccggcgggacagcggggcggctggcgccgggggccggggagcgccagctgctaaaggcctggagccctgtttt

SEQ ID NO: 592623 - DNA, 50 bp, Homo sapiens
cgaggactccgctcctgcccagatgtacattgaagatgtcagtttctaca

SEQ ID NO: 592624 - DNA, 100 bp, Homo sapiens
ctatccagcagctgcccctgcctacaatcccagcctgtaccccaccaatagtcccagttatgctccagggaaactttatggtgatgttccttttatagaa

SEQ ID NO: 592625 - DNA, 96 bp, Homo sapiens
accattttgaaagtgcttacctttaactaggaatagggaagtcgagataacatgagtattgtactagtttgcttttcaaatgctcccaaggtctca

SEQ ID NO: 592626 - DNA, 143 bp, Homo sapiens
tgaataaacccattgaagaaatcattgtacagaatggaaaagtaattggtgtaaaatctgaaggagaaaaccttctgaggaaaggaggccatacagaaattgaacctcagcacttctgtcaagctttccacagagagaatgat

SEQ ID NO: 592627 - DNA, 98 bp, Homo sapiens
gaaaagaacacctgtgaaagaccgattttctgcagaagatgaagctttgagtaacattgccagagagttaaaagtttaacaaccggaacagctccagt

SEQ ID NO: 592628 - DNA, 58 bp, Homo sapiens
gcagttttgccaggtgtttgttaccttggtgtcgtgaaaactacccctaaaagccaaa

SEQ ID NO: 592629 - DNA, 50 bp, Homo sapiens
acagtttcaagaaagacatcggcactattcctgatcagagaactccagtt

SEQ ID NO: 592630 - DNA, 82 bp, Homo sapiens
ggaggtcctgccgtccatgcggaagatcgtcgccacctggatgctggagaaagaagcttccggttctgaggtcctggaggtg

SEQ ID NO: 592631 - DNA, 75 bp, Homo sapiens
gaagaagatgaagaggacttctatcaagcaatcatcctcttccagtggtagcgtgtttgggtctggaaacactgg

SEQ ID NO: 592632 - DNA, 82 bp, Homo sapiens
ttgaattgggaggggggcagctggagcctcaggcggcagcgcttctaggcgcttaaattcctagcgaagtgccgtaagaaaa

SEQ ID NO: 592633 - DNA, 100 bp, Homo sapiens
aaactctaggaggtgtctttaccaaacttattaataggaataccactattccaaccaagaagagccaggcttcatgaacagttgactgagtcagaacagg

SEQ ID NO: 592634 - DNA, 80 bp, Homo sapiens
gcgcagggcctgcagcgggagctggacggcgagcgcgagcggcgcgagaaaccgtgttgccgcccgctgtgctatgagca

SEQ ID NO: 592635 - DNA, 88 bp, Homo sapiens
tccactaaagttctccaagatgccagtaattctattgaccaccgaattccaaattctcagagggttggccttggggaggcactattag

SEQ ID NO: 592636 - DNA, 99 bp, Homo sapiens
tacacccagattatgcttttggaaaatgagaacaaaaatttaaagaaagatttgaagcactacaaacaagcagctgaggcgccctgcgtccggcagagg

SEQ ID NO: 592637 - DNA, 75 bp, Homo sapiens
tacaacttcattttacttatgaagaaaaatctcctggcaattacactggagtcacatcagaagccgcgcagacta

SEQ ID NO: 592638 - DNA, 120 bp, Homo sapiens
ctggcatcgtgctgaatcggccggttttgagaggggaagatggggacaaagccgctccacctcccatgtcggcacagggtgtccgcaatgttgccagtgtctgtctgcagattggctacc

SEQ ID NO: 592639 - DNA, 100 bp, Homo sapiens
gcgacgaaatccccctgaaggtaccgcggacctcgccccgggacagcgaggagctgagggaccctagtggagcctttcaggctggcatggagagcttaag

SEQ ID NO: 592640 - DNA, 83 bp, Homo sapiens
caaacttcagattggagataaacttttagcatacctggagtagaacagaaaaattattatgtctgtgttcccttgggactcat

SEQ ID NO: 592641 - DNA, 88 bp, Homo sapiens
tgatgattagagacatactaatgtacatgagattcgtcagcgaactgcagctcaaagaaacctttctccaacaccagcaagccctaac

SEQ ID NO: 592642 - DNA, 90 bp, Homo sapiens
aattcagaaggaacttgcagaaatcacattggaccctcctcccaactgtagatggacccgattcagaaagctgtaataaaccatacattc

SEQ ID NO: 592643 - DNA, 100 bp, Homo sapiens
tttccctcccacctttgccattcctcaagctgcaggatggggaatttagcatggatcttcgtaccaagagcaccggtggggcccccaccttcaatgtcac

SEQ ID NO: 592644 - DNA, 75 bp, Homo sapiens
cagcctcctcccccatgtaccacacctgtgtggccttcgcctggtgacctgaccaacggtgcagatgggatgctg

SEQ ID NO: 592645 - DNA, 98 bp, Homo sapiens
ggagtccactggcgtcttcaccaccatggagaagtggtggtcactctggagccttgtgaaggagctgagacatatgtgaatgggaagcttgtgacgga

SEQ ID NO: 592646 - DNA, 90 bp, Homo sapiens
cctagatcaccatcagcagagttctctcctgctgctcctcctgtgttggagagctggctggactacactggggaactggagccccctgag

SEQ ID NO: 592647 - DNA, 50 bp, Homo sapiens
aaagcctgatcccctggaacacagcaggtttcattgaaaacagatcctgc

SEQ ID NO: 592648 - DNA, 100 bp, Homo sapiens
cactgatgaggatcagcccatggagtgacactgctgatcctgtaacatggaggattgtcttcatacctcatctgagaatctgtccaaattggtcagctgg

SEQ ID NO: 592649 - DNA, 80 bp, Homo sapiens
ccggctttcgcatttgggaccctgcagggttgaaccatgattccggtgacagagctccgctactttgcggacacgcagcc

SEQ ID NO: 592650 - DNA, 100 bp, Homo sapiens
ccagtccatccggatataaaacttcaaaaattaccattttatgatttactggatgaactgataaaacccaccagtctagatgccatcccgcccactttct

SEQ ID NO: 592651 - DNA, 100 bp, Homo sapiens
ctccaaatccttagctcagagctggaggatgaaggatcgggtgaggagatatcttctaaaagtgaactggatgaattgcaggaagaggtggccaggaggg

SEQ ID NO: 592652 - DNA, 51 bp, Homo sapiens
atcagcacagagccccccacctacctcagagttgatctctctaatgtatta

SEQ ID NO: 592653 - DNA, 97 bp, Homo sapiens
ctgggtcagtccgccgctcaccccgcggccgcaccttcccgccttctcaggtatcatgatattagctggtttgacatcaagtcatttgtgagtcatc

SEQ ID NO: 592654 - DNA, 85 bp, Homo sapiens
tactgttgaaagcgacaagtggaggcgccgctctagcggccgggactctgaactatggcggcattgaagttgatatcgatgtgga

SEQ ID NO: 592655 - DNA, 100 bp, Homo sapiens
ctgaacggagtgtgcgacggattgggaggtgtcgtgaaaactacccctaaaagccaaaatgggaaaggaaaagactcatatcaacattgtcgtcattgga

SEQ ID NO: 592656 - DNA, 82 bp, Homo sapiens
gtcaggattcatctccagagaagaaggtgaagctggaaggtctgggacatggagaacgacccctcgagacgaagagagtcca

SEQ ID NO: 592657 - DNA, 100 bp, Homo sapiens
ttccttagttgaaaggtgcgccctgctgtgacaggtggtagatctactagtatccatgtgtaggtctgcgttggaatctcctagaaaagttgtgattttc

SEQ ID NO: 592658 - DNA, 96 bp, Homo sapiens
ccgccgccgcccagagactgctgagcccgtccgtccgccgccaccacccactccggacacaggattggaggctgttgtcattggagaagttcatga

SEQ ID NO: 592659 - DNA, 75 bp, Homo sapiens
tcagaaaaagtgggaaggtcgctgctattactgcagaaggttctccaaaacaggtctttccaagcctaaaggaac

SEQ ID NO: 592660 - DNA, 90 bp, Homo sapiens
cagccctgtcccatctggtgctgggagtggtgtctctgcacgcagccgtgagcacagccgagggccacccccttaaccctcgggactact

SEQ ID NO: 592661 - DNA, 112 bp, Homo sapiens
taagattaagggttgtacaggctctttgaatatgactctgcaaaggtataagcagtttagccaaattttgaagaacattggagaaaatgaaggtggtattgataagttttcc

SEQ ID NO: 592662 - DNA, 100 bp, Homo sapiens
agaggtggttaaagccatattggagtagcgaggaatctgattccaagcaaaaaccagtttaattggttggggtcagataagaagaggagtgacaatcaag

SEQ ID NO: 592663 - DNA, 102 bp, Homo sapiens
ggctcatcgtgatcccggcgacatactacctctggccccgagatcagaatgccgatctctggaaacatggctacagaacatgttaatggaaatggtactgaa

SEQ ID NO: 592664 - DNA, 100 bp, Homo sapiens
tgtacacacaggagagctggctgcagtaaaaatcattaaattggagcctgagtacccaagtggccttggaccatctggagtctgtgcctgagaaactgag

SEQ ID NO: 592665 - DNA, 80 bp, Homo sapiens
cggaacgggagccaacatggcagcggggttcgggcgatgctgcaggcatccgcacttccactaatagccaagtagacaag

SEQ ID NO: 592666 - DNA, 75 bp, Homo sapiens
gaacagaagttgccagaggaagtggccacacccactacagatgagaatggcccccgtgcttccaagtgtcctgaa

SEQ ID NO: 592667 - DNA, 142 bp, Homo sapiens
ctgaacaccaggaataaggcattctgggaaacccctgcctccatgtgggatgatatcaacaacgtcggactcagcatacacaagctgagggagaatgtctttcaagagcatcagacccttaaggagaaggaacttgaaacag

SEQ ID NO: 592668 - DNA, 50 bp, Homo sapiens
gcttagatacatgtataacaagaaaccaaggtgtatgttggtaacctggg

SEQ ID NO: 592669 - DNA, 75 bp, Homo sapiens
aagcacggggaacgggtcggatggaccagtcctgcctctgttgtagaagacatgtggtgtatataaagtttgtga

SEQ ID NO: 592670 - DNA, 100 bp, Homo sapiens
gttcgccccccggctgctggatttccagaagacgaaatacgcgagctcaaaacactggaatttcaactttgtataggaattcttatggtgcgcccgctga

SEQ ID NO: 592671 - DNA, 90 bp, Homo sapiens
cggcgccgcggctcttttctaaaagtatcggacagctggcttttaaaggaatgaagagactcaatagaatccagtcaatagtgtttgaga

SEQ ID NO: 592672 - DNA, 100 bp, Homo sapiens
aatgaaatcctgctttcttttcctcagaactactatattcagtggctaaatggctccctgattcatgcctttctgagaaaagtctacagcattctttctc

SEQ ID NO: 592673 - DNA, 82 bp, Homo sapiens
ggaaccctggtcaccgtctcctcaggctcccctggctccagccctaaggtgctctcccagccgtccgacctggatctccaag

SEQ ID NO: 592674 - DNA, 100 bp, Homo sapiens
aagagctctttcaaggaatcagaagaaggagagacgaccatcttgcaactagaaaaagatttgcgcacccaagtggaattgatgcgaaaacagaaaaagg

SEQ ID NO: 592675 - DNA, 100 bp, Homo sapiens
tcagaatttcacccaggttctgacagcaaaatgcaggcccgaatagcattctctgcctatctccagcatgttcaaattcgcctgatgaaagacagtggcg

SEQ ID NO: 592676 - DNA, 75 bp, Homo sapiens
aatatcataagcacaatgcagcagaattaaacaaccaccatgtcgagcaaaaaggcaaagaccaagaccaccaag

SEQ ID NO: 592677 - DNA, 88 bp, Homo sapiens
ctccaacggcatctgtgactcccaccacccgaagccgaataagtccttcagtgaatctacagacctattttctcaggagctcagcctg

SEQ ID NO: 592678 - DNA, 97 bp, Homo sapiens
agctttctgaaatggtgtcccaccgcaaggactggagaagggactttgtggttggcctctccatcctgctgcggggcacagtccacgagaagctcaa

SEQ ID NO: 592679 - DNA, 100 bp, Homo sapiens
ctggagtttatctggagtgaggtggccggttcttggtgggatctgagcagtaaagcactgcctccctagaccaattctctgggatccctggaagacatct

SEQ ID NO: 592680 - DNA, 100 bp, Homo sapiens
tcccagatctctatccttttgggaccatgcgcggaggaggctttggggaccgggaccgggatcgtgaccgtggagggactcagtggcctctgaggatgtg

SEQ ID NO: 592681 - DNA, 75 bp, Homo sapiens
agaaaatacactactcatcaaggaagaaccagatcatccaattatgatgggttttgaaccccttgtgaaccagag

SEQ ID NO: 592682 - DNA, 90 bp, Homo sapiens
cttccgtcccggacagagcccgtggtcgcgcagggccaaaagagaaacattggctactttgacaaccttaaagcggactccaggaatatc

SEQ ID NO: 592683 - DNA, 99 bp, Homo sapiens
cttttctaaagaggactccaaaggaaggactggtcatctctttcatatctcaaaaccatggctcaggggctgaaagaagtgacacttcttggtcagaat

SEQ ID NO: 592684 - DNA, 95 bp, Homo sapiens
acctgtcgaagttatctgatgacaaattacgaaagtgctcccccatccccacagtataaaaaggtgcttgtgaatgacttcttcttggtggcttg

SEQ ID NO: 592685 - DNA, 75 bp, Homo sapiens
ctcagctttttcgtatttggagacctcctgaggcttgcatgcacgctgaagcctgatcctgaactggagatgtcc

SEQ ID NO: 592686 - DNA, 100 bp, Homo sapiens
ggatctcagcagggatgaatgcaaaagaattcttcgaaaattggatcttgtgcctcaagcagccattgagtatggcaggatcctgacccgcctcacccac

SEQ ID NO: 592687 - DNA, 75 bp, Homo sapiens
ctgaaagaggacacgggaagaacaaagacttagactcggaggtggacatctataccgtcaaggtggaagacctga

SEQ ID NO: 592688 - DNA, 100 bp, Homo sapiens
aagaagcacctggatgagacatttgctacagcatcccacattaagtcaacgatgatgattattctccaccgtctaagagaccaaaggccaatgagctacc

SEQ ID NO: 592689 - DNA, 100 bp, Homo sapiens
gcgttcccgacccttagctacccacgatgtttcagacagtccccgacacgtcgtcttacatcaaggtgtacgtgaacggagagtgggtgaccaacatcag

SEQ ID NO: 592690 - DNA, 90 bp, Homo sapiens
tgggttttctcgatgtcaaaaagttcctcagtacctggaaggtcatcatcagatttgaaatatttaaagtggatacaaaactatttcagc

SEQ ID NO: 592691 - DNA, 89 bp, Homo sapiens
attccaagtaactcttatttgggtgcaaatagctatgggcaacttggcctcggccataaggaagatgtgctgttgccccagcaactgaa

SEQ ID NO: 592692 - DNA, 100 bp, Homo sapiens
ccgtcaagatgggcatgcccagcagcctggcccaccgcatcgctgcccagaccctgctgatgaggagcgggaaggcctcctgcaccctggagaccgtgtg

SEQ ID NO: 592693 - DNA, 75 bp, Homo sapiens
ctgctatacaacacaattataaaatgtcagcttttaagggaatcctgaagtgggtaaaactgattgacaactttg

SEQ ID NO: 592694 - DNA, 74 bp, Homo sapiens
aagccttgaggacctactcacagataggaattgaaggttgaagctccattcataccaaagtttagaggctctgg

SEQ ID NO: 592695 - DNA, 75 bp, Homo sapiens
ggcggcgccatggcagggcttgcaggtctacaaggaagtcttcacgaggagcagtgagaactcagcgtcgtcgac

SEQ ID NO: 592696 - DNA, 75 bp, Homo sapiens
gctccccaggacctgagcaggaacctggagttttcagagtgatggtgtgcaacaaacaacctacctcgcccagca

SEQ ID NO: 592697 - DNA, 50 bp, Homo sapiens
gcaccttggaaattgagagctctggcgctacgtacatctttgggaaaagt

SEQ ID NO: 592698 - DNA, 100 bp, Homo sapiens
tagaaattttgaacaagggctgaaggcctatggaaaggattttcatttgattcaggctaataaagcggtcaagaagcagatcgagacggcggtcacattc

SEQ ID NO: 592699 - DNA, 100 bp, Homo sapiens
gaggggcgaagaggacgagggggccaaggcttcctccggggggctgggcctgtatgctgctcgagacattgagaaacacaccatggtcattgagtacatc

SEQ ID NO: 592700 - DNA, 90 bp, Homo sapiens
catctcttcatctgtatcctctgcagcatccttgatgataaaccagtaaatgtcaaaatgcagatcttcgtgaaaacccttaccggcaag

SEQ ID NO: 592701 - DNA, 76 bp, Homo sapiens
gaactggcaaagcagctacacaaagagggtcatctcttctattgtacctgcagagccatcatcaaccactttaacc

SEQ ID NO: 592702 - DNA, 75 bp, Homo sapiens
gtcaatgtaaatgacatcatcctgattgctctcaatcgtcctggggcatttgctatttacctggagccttggcat

SEQ ID NO: 592703 - DNA, 76 bp, Homo sapiens
cacactacagaactaaatatgcatccctggtacctgacagtgtaaagaaggagctcctacaaagaataagaacatt

SEQ ID NO: 592704 - DNA, 75 bp, Homo sapiens
cacatcagctgggcgctatgttcgtgagaactgcaaaccgctgcgggccatcatgaggaagccacgagcagccgt

SEQ ID NO: 592705 - DNA, 82 bp, Homo sapiens
tgcactgggagcgcttcatgtgcaaccttgactgccaggaagagccagattcctgcatcagttgcatccttaatgtccagtc

SEQ ID NO: 592706 - DNA, 75 bp, Homo sapiens
acaagaatgctatcaataatggtgttcgaatatctggaagagggcaagtgtccagagaatggctgggatgaaagt

SEQ ID NO: 592707 - DNA, 82 bp, Homo sapiens
agatgccggactccggaacagcaagaactgcaccgaaccagatatggatcagaaactttcgaagttggtagaagagctcaca

SEQ ID NO: 592708 - DNA, 82 bp, Homo sapiens
ccacgcctttcagccaaatgccagactgattgtcatgctcagggaccctgtggagaggtcagcccaaggccaaccccactgt

SEQ ID NO: 592709 - DNA, 122 bp, Homo sapiens
gtcaggatctgaagagctatggtgaaacaccactgaagcattgccaagggtgatgtgagcagagcccaggaatgccttatgtggatcggcagaaccgaatctgtgggtttctggacatcgag

SEQ ID NO: 592710 - DNA, 74 bp, Homo sapiens
gaggactcagtccccacaggtgcggaggagaatatcgccacatcacagaatcgtatctatctcacagctgacaa

SEQ ID NO: 592711 - DNA, 100 bp, Homo sapiens
ttcaacagaacttagcataaatgctgaaggaggcaagtgaggcctatctggttggcctttttgaagacaccaacctgtgtgctatccatgccaaacgtgt

SEQ ID NO: 592712 - DNA, 100 bp, Homo sapiens
cgagtgccagtgggagcggatccctgagctcgtcaagcagctgtcggccaagctcatcgccaacggtaaaaccttgttagccaaagcagtagcaaaccaa

SEQ ID NO: 592713 - DNA, 90 bp, Homo sapiens
aacacatcaccttgatttttaatcccacggtggcccgacgttggggcattcagaaaaacaggccagctatgaactatgataaacttagcc

SEQ ID NO: 592714 - DNA, 96 bp, Homo sapiens
gagatctggggaggggagcagtatgaaatctccttcaaggtttattcttcagtccaaggaagcaattcacagtcagctgttagagaagcagaaaat

SEQ ID NO: 592715 - DNA, 100 bp, Homo sapiens
cgagcgacggcggaacccgtgggcctgtggactgcagcctcggcggtcagcaggcctttggacaagcacacacaaaccacaagaaggtggctgctgacgg

SEQ ID NO: 592716 - DNA, 101 bp, Homo sapiens
gtggcgactacgtcgggccgctgtggcctgatgtccggtctgtgctacgacagcaaaatgttccaggtgcatcaggtgctctgcatccccagctggatggc

SEQ ID NO: 592717 - DNA, 51 bp, Homo sapiens
tttgccagagttgattgtgatcagcacttatcaaaggtgcagaatctggga

SEQ ID NO: 592718 - DNA, 82 bp, Homo sapiens
cccgagtccgcgggaagatggcggcgccgctcatccccctctcccagcaggttgtgaccgagattcccgacgagagagactg

SEQ ID NO: 592719 - DNA, 83 bp, Homo sapiens
ggcgtgtgcgcgcccgccagctgctccggagatacggtattaatctctggagaagacacatccacagttagcactttcttcag

SEQ ID NO: 592720 - DNA, 82 bp, Homo sapiens
ctctgactcttgcgccgccgccttccacccggagcaaacggggattcagcgtccgatcctttggaacagggactcacgtgaa

SEQ ID NO: 592721 - DNA, 100 bp, Homo sapiens
gtatctgtggcaggagcttttcgtaaagggaagtcatttctactggacttcatgcttagatacatgtataacaagatggcctactgccagcatattgggg

SEQ ID NO: 592722 - DNA, 75 bp, Homo sapiens
agccacttgaagaaaagggtgaaggaggcgaattttcagttgataggaatgatgagaagacagcagctgattaca

SEQ ID NO: 592723 - DNA, 100 bp, Homo sapiens
aacatatcttctgtgttcatggtggtgagattactcaacttctagttccacctgaaaactgtagtgttctgagatgcagtaaaatcgctggtgtgaaagt

SEQ ID NO: 592724 - DNA, 50 bp, Homo sapiens
aggaggaggaggaagaggaggagaaggctggtgcagacatctccatgatt

SEQ ID NO: 592725 - DNA, 97 bp, Homo sapiens
gagtttggatttaacatggtggcaagtgacatgatctcactggaccgcagcgtcaatgacttacgccaagaagaagtcctgtgtatggaaactcaca

SEQ ID NO: 592726 - DNA, 76 bp, Homo sapiens
cactttccagcagtccagcacggccaagtcagccacctggacgattctgaaggaagatttccattaggtaatttgt

SEQ ID NO: 592727 - DNA, 75 bp, Homo sapiens
ttggctaccttctcccatcaccccagagtttatgtggccgaggcagacaagtggaattaggccttgctgcagggg

SEQ ID NO: 592728 - DNA, 100 bp, Homo sapiens
agttgcctggctcacattcggaggctggtgtccagggtctcagcgcgggggacgactcagaacatccagtcatggataaaaatgagctggttcagaaggc

SEQ ID NO: 592729 - DNA, 97 bp, Homo sapiens
gccccgcactggtggcggacctaccgagagtatttcggggagaagacagttgagaagctgatgtctcctcgacttccaactggaaccttgaaccccc

SEQ ID NO: 592730 - DNA, 98 bp, Homo sapiens
acagacccgacggaaccatctcttcaccatgatgagcagcccgacggccatggaggctgaagagacgatggaatgccttcaggagttccctgaacatc

SEQ ID NO: 592731 - DNA, 88 bp, Homo sapiens
gagaaagtttcatctgtggatggagtattgcttccaattgaagacttgtgcagtttaacatcccagtcactgcccattgaactgactt

SEQ ID NO: 592732 - DNA, 100 bp, Homo sapiens
aatgctgaggactcagaccggtctctgcaagaggaagctgatggcattctgaaacctcttcccaagaaaagcattgacacagggatgggcctggaacgac

SEQ ID NO: 592733 - DNA, 75 bp, Homo sapiens
atcgcaactgggcccgcgcgcaggtcccactctatgaccagtgggaggatgtgatgaaagggatgaaggtggagg

SEQ ID NO: 592734 - DNA, 82 bp, Homo sapiens
tttcggtggtggagaacgtagtacctttcggggacattggacactactctaggaccggacaatgcagatcttcgtgaagact

SEQ ID NO: 592735 - DNA, 49 bp, Homo sapiens
agagctgaggactgcctgtttgcaggcttcaaccactcccagaagacgt

SEQ ID NO: 592736 - DNA, 97 bp, Homo sapiens
ccggcccattcgcacgctgagctctgccgtggagcagctgaggggctgcagggtggtcggggtcatcgagaagatcctggaagttttaacttcgcgc

SEQ ID NO: 592737 - DNA, 82 bp, Homo sapiens
cccgggtcctcctagaaattccccccgaagaagactcccccacatctggattggcggcagtaagcacacaatgaatgatcac

SEQ ID NO: 592738 - DNA, 75 bp, Homo sapiens
ttttcatgcatcattttttcaaaataggtggccaatccgccatggtatagttgaagattgggacttaatggaaag

SEQ ID NO: 592739 - DNA, 88 bp, Homo sapiens
tcgtgcagctaagcagccaactgcagaaacgtcagcctcttagcaatgcataccacgagttagcacaagtgtattcaaccaacaaccc

SEQ ID NO: 592740 - DNA, 82 bp, Homo sapiens
gtgaccgagaccgcggccgggaccgaggtgttttacctcaatcatatatccacacaagtgcttctcttgacatttctcgaaa

SEQ ID NO: 592741 - DNA, 100 bp, Homo sapiens
gtgaactgtgtgttaagtcatttgttaccaaacggagtcttcaagaacatatgagtattcacacagctacttctaggagcgtcaaagggcctcacccaga

SEQ ID NO: 592742 - DNA, 90 bp, Homo sapiens
ggaaaaactccaacagcttcatatggacagatggacttcaaatgctgtttgtattccagagactaggagacactgtcggacattcgggaa

SEQ ID NO: 592743 - DNA, 101 bp, Homo sapiens
taaggcacatatactcaggggtcctcataaacagtctctagtgatccctgaaaagttccagcatattttgcgagtactcaacaccaacatcgatgggcggc

SEQ ID NO: 592744 - DNA, 100 bp, Homo sapiens
ttaaactttcaaaggttggacaaaccgtagctttatgggatctgcgtaacttaaaattaaaactccataccttcgaatctcataaagatgaaattttcca

SEQ ID NO: 592745 - DNA, 74 bp, Homo sapiens
cttggagagacatatgtctgaatttatggagtgtgaaagacccctgacaaaagacaatcatcttctgggtacat

SEQ ID NO: 592746 - DNA, 73 bp, Homo sapiens
taaaacaaaggatgatggaaatggaaacacagctatgtcttctcattacactgaagaccttttgccagaacag

SEQ ID NO: 592747 - DNA, 100 bp, Homo sapiens
gcagagattgagggaacgatgcgcaaggagctgcagttggaagaggccgagtctccagacatcacgtgtgggaaccgctgagcagaacaccctcccccag

SEQ ID NO: 592748 - DNA, 100 bp, Homo sapiens
cgcggctgccggcggctgggactgaagagggacgggtcccgcggcgagcgagctcctgagggattatcagcatagaaagaaagccttgtaaccatcaggt

SEQ ID NO: 592749 - DNA, 100 bp, Homo sapiens
cagcctggcatggcttctggggacctttacgagggttcgaaaccgccaagtcttttgccctccatggtgcacatgtgatcttggcctgcaggaacatggc

SEQ ID NO: 592750 - DNA, 75 bp, Homo sapiens
caaggttaataaagctgccaaggctgctttgtaccgcctcagtggagactggaatcccttacacattgatcctaa

SEQ ID NO: 592751 - DNA, 102 bp, Homo sapiens
caccaggttactctcagctcctcatactggtggaccagcaggccacaaaggaggggatacttgatcctgataaacgagtctcgctctgttgcccaggctgga

SEQ ID NO: 592752 - DNA, 90 bp, Homo sapiens
aaggcaaagggaaggtggtggacctgctggcgcaggacgccgacatcgtgtgccgctgccagaaagaatcttcaagagggagacataggg

SEQ ID NO: 592753 - DNA, 101 bp, Homo sapiens
gagtggggtaaaaccccagacgccatgaaagctgccatggccctggagaaaaagctgaaccaggccatctggctgctgtgcacaggcgctcgtgaggctgc

SEQ ID NO: 592754 - DNA, 90 bp, Homo sapiens
ctctcgatgagtcggagaagtcccatccaaggttttgccatcaaggggggacgatttaccaaagcccaagactgcgcctcctccttctcg

SEQ ID NO: 592755 - DNA, 100 bp, Homo sapiens
cggatcctgaggaggcagctgcggtggcagctgctgagttctcggtgaaggttctgcggggagtgtctccagccctgcctgcaggtgccatccccgctgt

SEQ ID NO: 592756 - DNA, 90 bp, Homo sapiens
gcggaaaccagtggccacagcatctttgtctagccccagtgcaggagtcagtggatcggtggggaaaatgctgcttaccctgggccctgg

SEQ ID NO: 592757 - DNA, 75 bp, Homo sapiens
cgcgtgtggaggaggctgaagtctcacatcagaggtgtcaaggttaatcactgttctgaagatggtgtttgtaac

SEQ ID NO: 592758 - DNA, 103 bp, Homo sapiens
cagcagtccaggaatgcagtcagtctgttgatgaaactatgttgcagtgtaggattttggaagtcctccctccatcacatcaaaatggttttgctaatggaca

SEQ ID NO: 592759 - DNA, 90 bp, Homo sapiens
cctcagccgcgaccgcccgctcgtactgctgctgcacctgctgcaacttgggccccttttcagctggtaatgaatcttgccctcagcctc

SEQ ID NO: 592760 - DNA, 100 bp, Homo sapiens
ggcaggctcaggtgcagccgctgtctcttccagttgcgcctcttctccttggtggtcttcttaagcaacagactcttccacaagacagtctacctgcagt

SEQ ID NO: 592761 - DNA, 75 bp, Homo sapiens
aacaaatgtttccttaaagtgcctcgatctaaggatgaccctggaaaggtgattgatgagatttatcgtgtgttg

SEQ ID NO: 592762 - DNA, 75 bp, Homo sapiens
gggtgaagctggcggagcaggaggatgggcggcacaagatcctcaggtcctggatcagctgtccaaaaacatcac

SEQ ID NO: 592763 - DNA, 75 bp, Homo sapiens
caccgaaccccagatgtgctcaagaaatgccagcagggggcaatggcggcttcctgtgttctactgcacactggg

SEQ ID NO: 592764 - DNA, 100 bp, Homo sapiens
ttgaaggacacggccaaccgcctacgtatcagctccatccaggccaccactgcggcgggctctgggtgttgtttcggttgatcacctttgtcttgaatgc

SEQ ID NO: 592765 - DNA, 103 bp, Homo sapiens
gcggctgctggcagcgccatggagacggtacagctgaggaacccgccgcgccgtcccaccaaagatctccaatatctcctcggatgtcactgtgaatgagggc

SEQ ID NO: 592766 - DNA, 82 bp, Homo sapiens
cgaatatggcatgtgattggagatcacttcaataaggaactgtggctgcaccatctgtcttcatcttcccgccatctgatga

SEQ ID NO: 592767 - DNA, 101 bp, Homo sapiens
ggagaagtatccaatagggatattgtagaaactgtctttaacctggaaagtccatcagcttgataatggaggagaacaatgactccacggagaacccccaa

SEQ ID NO: 592768 - DNA, 119 bp, Homo sapiens
aagaaaacaaaaactgatgaccaagagaatgtgtcagccgatgcaccgagtccagcccaggaaaatggagagacatatctgaagagatggattaagaatgctttggattaaggattgtg

SEQ ID NO: 592769 - DNA, 75 bp, Homo sapiens
ctgcccacggaggaagagtgggagtttgccgcccgagggggcttgaagggattggcctaatgaagaagttcaacc

SEQ ID NO: 592770 - DNA, 100 bp, Homo sapiens
actttcaaacatctgaagatgacaatttattagatggtgacactgcagttgctctaagcgaaagacatgaggcctcagcctgaaatgaggttgttttgag

SEQ ID NO: 592771 - DNA, 75 bp, Homo sapiens
ccactgccgtcaactcctgttctcctcagagcctgttaattggccttggtcctcacagctccaaaaagaaacagg

SEQ ID NO: 592772 - DNA, 83 bp, Homo sapiens
ccctgtcctagctctgtaactgtttacaatccaaacgatcaaagatgttgctggagataaataggcagaaggaagaagaggac

SEQ ID NO: 592773 - DNA, 74 bp, Homo sapiens
gtgaacttggcagacaaaaagcagagaataattctttgaggtatatttgcttacttaaactaccatgttcctcg

SEQ ID NO: 592774 - DNA, 75 bp, Homo sapiens
ggagctgagaccgggcggccacagtccgcagggatgaacctcgagttgctgggatctgtgccagttcagaagcag

SEQ ID NO: 592775 - DNA, 75 bp, Homo sapiens
cgccgccaacgcgcaggtgctagcggccccttcgccctgcaggcattttttactgtctacagaaacttattgtaa

SEQ ID NO: 592776 - DNA, 75 bp, Homo sapiens
ggagagaggatcggggacccgctgatcttccagctcccctcacccaacgtcgtgctgtattcatcaccaaagaaa

SEQ ID NO: 592777 - DNA, 80 bp, Homo sapiens
agtccccactccggagtcgccgctgccgcggggacatggtcctctgcgttcagggtttggtgccctggttgtcagatgtt

SEQ ID NO: 592778 - DNA, 50 bp, Homo sapiens
cttcaataaggcccagttagcagaaacttgtattatttggctacagtcct

SEQ ID NO: 592779 - DNA, 100 bp, Homo sapiens
caaagaccgaaaagaagatgatacaaatgaatttgttagtgctgtgtgctggagggcactaccagatgggagtgtcaatccatatctacaaggacagaga

SEQ ID NO: 592780 - DNA, 96 bp, Homo sapiens
gccccgcgcagcccccggccgcagcgcaggcagcccagcagcccgtggaccgggagcccgtggaccgggagccggtggtgtgccaccccgacctgg

SEQ ID NO: 592781 - DNA, 75 bp, Homo sapiens
gatggaatcatggatgctgccaattttgtacactgatgctgaagtactatgagccttcggaacttgtggagagac

SEQ ID NO: 592782 - DNA, 83 bp, Homo sapiens
cccgccgctgagccgtcgcggagccgcgcagccctcggagcacggtatcgagaaccttccctgcgaacttcagaggaacttcc

SEQ ID NO: 592783 - DNA, 82 bp, Homo sapiens
ttggatgccgagagcgagtatctggacttctgcacggacctggccgtctccagtgccaacttcattcccacggtcactgcca

SEQ ID NO: 592784 - DNA, 100 bp, Homo sapiens
tgcttcccaatcccactgatgaggatcagcccatggtagtaacactctggtacagatctccagaagtattgctggggtcagctcgttactcaactccagt

SEQ ID NO: 592785 - DNA, 82 bp, Homo sapiens
agtttggaattgaccctcaaaacatgttcgagttctgggatgtatcatgatattagctggtttgacatcaagtcatttgtga

SEQ ID NO: 592786 - DNA, 75 bp, Homo sapiens
aggagctgggcctaggtctgcgccctgggaactctaatgatccaggacaaagaagttaccctggagtatgtatca

SEQ ID NO: 592787 - DNA, 75 bp, Homo sapiens
ggcgcccctcggcctcggagcaacgagcgcagcgccgaggacctgaaaaacgtgttcccacccgaggtcgctgtg

SEQ ID NO: 592788 - DNA, 82 bp, Homo sapiens
ttgtcccagctcggcccgcgggggagccccgggagccgcacggatcaaagttctgatcgtaccagtctttcttcagtgggag

SEQ ID NO: 592789 - DNA, 96 bp, Homo sapiens
gcggccttgcaggttccctgctacggtgctggagaatctggtaaaagcaccattgtgaagcagatgaggatcctgcatgttaatgggtttaatgga

SEQ ID NO: 592790 - DNA, 100 bp, Homo sapiens
attacatgaagtatcatgtttctatccagtctcccactttcatgcctctgatcatgtgcccaagccaggagtgccaaaccaaccgctcaggagggcggct

SEQ ID NO: 592791 - DNA, 74 bp, Homo sapiens
cagacgagagcttcagccatcacgaggatgatttcggaacctggagaaaataaacctctgcgccatgagagcca

SEQ ID NO: 592792 - DNA, 54 bp, Homo sapiens
ccgcgagcgactgcggcgccgagccggtaccagttcaacccagccttctttcag

SEQ ID NO: 592793 - DNA, 100 bp, Homo sapiens
tgatagcgctcactgcactccatactgaggaggaaaattataatgtggttgcaccaggctgtctttcacaatccagaaaccgaccagagggcaaagtgtt

SEQ ID NO: 592794 - DNA, 74 bp, Homo sapiens
ttctgtgggctccgtggcaatgaattcttctgtgaaatttttgccactttccaggtggtcgttctttgtcctcc

SEQ ID NO: 592795 - DNA, 75 bp, Homo sapiens
ctggaattgctactgctgcctctgtcactcctggtgaccagcattcaaggagccgggtgtgggctgagccctgcc

SEQ ID NO: 592796 - DNA, 78 bp, Homo sapiens
ggaaatgtaccgtccagcgagttgcagatctacacttggagatggctggccgagctctcaagcagactggcagcagga

SEQ ID NO: 592797 - DNA, 74 bp, Homo sapiens
cgtggcgggtgccgagggcccggacgaggtgccggtggtggtgtgcacattgagccccggtatagacagttccc

SEQ ID NO: 592798 - DNA, 100 bp, Homo sapiens
cgtcgtgatccagaagtccagagctgaggactgcctgtttgcagaaactgccaagttttggaccttatctggaacagcgcaagaaaatcatagcagaaaa

SEQ ID NO: 592799 - DNA, 100 bp, Homo sapiens
agagtacatgagacgatgaagcaaagagctgtcagaagatgacctgttgagtcagtattctctttcatttacgaagaagaccaagaaaaatagctctgaa

SEQ ID NO: 592800 - DNA, 100 bp, Homo sapiens
taccaagcatgtggctcctggtcagtgtaattctaatctcacggatatcctctgttgggggagaaggtcagaatggcggcagcggagcatcgtcattctt

SEQ ID NO: 592801 - DNA, 76 bp, Homo sapiens
tcagtgcccttgtggcgaatggggctcacgtcgaatgagagtccggagtgttgtcatgtgaagcctgccatccagg

SEQ ID NO: 592802 - DNA, 148 bp, Homo sapiens
cacggtcttaatgaagaacaaagaaaacagttacaggacatagcaactctggctgatcaaagaagagcagcccatggtgctggagaatctggtaaaagcaccattgtgaagcagatgaggatcctgcatgttaatgggtttaatggag

SEQ ID NO: 592803 - DNA, 100 bp, Homo sapiens
gttggccttacctcagagatcctgaactcttttgagcatgaggccctggccaacgtcaacattgggagcctcatctgcaatgtaggggccggtggacctg

SEQ ID NO: 592804 - DNA, 100 bp, Homo sapiens
gcacaatggacatccggacaaagagtcaaggtggggagccaacatacaatgtggctgtcggcagagctggtagaggacccttcaaagttgtacaagaaag

SEQ ID NO: 592805 - DNA, 100 bp, Homo sapiens
ctgagagagcaaccggacaatataccagcttttgcagcagcctattttgagagccttctagagaaaagagagagttcaaaccttgtactactcagctgat

SEQ ID NO: 592806 - DNA, 75 bp, Homo sapiens
ttgtgcacactggtgacaactcaagagcaatcagtaccatctggagtcaaattgactttatcagctttaatcgat

SEQ ID NO: 592807 - DNA, 51 bp, Homo sapiens
aagaagagggctatattagaagggacaaagagatggggttttaccatgttg

SEQ ID NO: 592808 - DNA, 100 bp, Homo sapiens
gagtgtggaagagcagctgtcactcatcagtggttgtcccaatatccaagaagcagtagagggtgccatgcacattcagtggcttttcatgatatatgaa

SEQ ID NO: 592809 - DNA, 98 bp, Homo sapiens
ttgcagtttccaggggcaacaagcatctctctaccaccctctcctgcgcccctgagagaggctggatgcaatgcagtatgcttctgaatctaaagata

SEQ ID NO: 592810 - DNA, 50 bp, Homo sapiens
agtaattggagccaagaaatgagtataggggataaaaacattcagatggc

SEQ ID NO: 592811 - DNA, 74 bp, Homo sapiens
cagacagcggcatacagaatgcctatgaccggcgtcgagaatttcaactggcatgcatgtagggaataccggat

SEQ ID NO: 592812 - DNA, 100 bp, Homo sapiens
gaagactgaaagagtcgaatggtttgttggcaggaatccttcaactgctttctaccaagcgttccatttgaacacgttaaaggaatcaaagagcctctgg

SEQ ID NO: 592813 - DNA, 75 bp, Homo sapiens
gcttcttccgaggccgcccggacctcaggtctcggcgcggaagatggccggcggcgtggacggccccatcgggat

SEQ ID NO: 592814 - DNA, 80 bp, Homo sapiens
agctcaacgccaggcgccgctcctttacagttactgtaaaatggggaaaggagaaatttgaaggtgtagaattgaataca

SEQ ID NO: 592815 - DNA, 99 bp, Homo sapiens
ggataaaagcaaaaattgttgaaccatacaataagatagttgcccggactgcacaactagcaagacttcagagtgatcagcagctggactgtgccttgg

SEQ ID NO: 592816 - DNA, 75 bp, Homo sapiens
ccgacatcaattacgccaatgtggacggactcactgccctgcaccagatggagtgaaggtacctgagcgcaggaa

SEQ ID NO: 592817 - DNA, 137 bp, Homo sapiens
ctacgggtgcgaagtgagctctctggcctccccttctattggaatttccactgcatgctagctagtccttccctgttgccagagtctgccctccgagacctcatcgtagccaccattgctgtcaagtacactcagtc

SEQ ID NO: 592818 - DNA, 85 bp, Homo sapiens
aaaataaaggtttccaacaccctggaaagccggctggatctcatagcccagcaggccctggccaacgtcaacattgggagcctca

SEQ ID NO: 592819 - DNA, 83 bp, Homo sapiens
ctttctggcctggaggctatccagcaaagacatcctcatgcaccgatggcggtacccgtctctgtccctccatggcatcgaag

SEQ ID NO: 592820 - DNA, 75 bp, Homo sapiens
ccggcggcggcgcgcagcgtgtcaggcggagagacccgccgccagacacgatgaggcgagtggtacgacagagca

SEQ ID NO: 592821 - DNA, 100 bp, Homo sapiens
atggagatggttcagcaggacaaggattcatgatgttgctatcaaaagttgagaaattgtcagaagaaatcatggagataatgcaaaatttaagtagtat

SEQ ID NO: 592822 - DNA, 74 bp, Homo sapiens
acggagataacaccatcttcaaggagttaacagagcagtttcataaagttgaatctcaactgaataagctaaat

SEQ ID NO: 592823 - DNA, 98 bp, Homo sapiens
agaagatcatcgagcatttcaaacggtctgcagcttcactcttgaagccagcaagaccaggaacccaccgggagaaaggaacaactccagacgcgccg

SEQ ID NO: 592824 - DNA, 75 bp, Homo sapiens
tgaaattactgcaagagtgcaaaaaaattatagttctaactggagctgggtggtgaactatgacaatgtagtgga

SEQ ID NO: 592825 - DNA, 98 bp, Homo sapiens
gataagaaaaaaagatctcaggttaagaataatgtatacatgtgggaggttccaccccgatgcaggtggtcacgtgcttgacgcgggacagctacctg

SEQ ID NO: 592826 - DNA, 82 bp, Homo sapiens
agaacaagaggacaggaggtgtcgttccagacccaacatgagtgaagtttcctgcaagaaacgggacgactatttggaatgg

SEQ ID NO: 592827 - DNA, 75 bp, Homo sapiens
aattcatatgaccatgctcacaagcaggcattacctgacactcagatcaccagttatgcagcaactttacaccgg

SEQ ID NO: 592828 - DNA, 76 bp, Homo sapiens
ctccagggaaggcactcaaaagtggggggcaggaaaggtgatgatgaacagtctacacagatggctgcaagttggg

SEQ ID NO: 592829 - DNA, 100 bp, Homo sapiens
ctgagccatcttccccctgctcttcctcctccctcagctccgagtcatcgcgtctctccacagagccatccagcgaggaaatgctgacttttaacccaca

SEQ ID NO: 592830 - DNA, 83 bp, Homo sapiens
tcataacccacgggtcccccacggctctgccacctgtagtgctcgattgtctaaagccccaggaaaaatggtggaaaattcac

SEQ ID NO: 592831 - DNA, 100 bp, Homo sapiens
tcaacttcaaccctcacttcgatttggaggacagagactgcaatatgtccgtggttcagaccctgtattaaagcttttggacgacaatgggaacattgct

SEQ ID NO: 592832 - DNA, 75 bp, Homo sapiens
ccagggtatcttcttcacagacctcaatggctttcaggacctctggaagcaactactcctgattaacctcggtga

SEQ ID NO: 592833 - DNA, 100 bp, Homo sapiens
cggcagagagcggggcggcggcaggatgagacctgcacgcagtggctcacagcagcacgatttgtgacagcccgaggcggagaacaccgaacacccagtg

SEQ ID NO: 592834 - DNA, 82 bp, Homo sapiens
gcttgtccttgctggtgcatgcgtcgtcggcctctgggcagcagattcatgatgttgctatcaaaagttgagaaattgtcag

SEQ ID NO: 592835 - DNA, 83 bp, Homo sapiens
cgcttctttcggttctacctgggagaatccaccgccatccgccaccatggtaccatttggcccttttgccttcatgccaggaa

SEQ ID NO: 592836 - DNA, 73 bp, Homo sapiens
cagtacactggcaactattcaaggttcaatacttcttcaagatcttggataattagtggtgtggaaagtaaag

SEQ ID NO: 592837 - DNA, 97 bp, Homo sapiens
ctattgaaccaccaaaagtccattatgaaactggtctcaacatatgcactagtggaagtgccacctcatgtgaagaatgtctgctaatccacccaaa

SEQ ID NO: 592838 - DNA, 75 bp, Homo sapiens
gaagatccaggcctcagaggaggagaaaggccggagccagccgagtaagactttgaccccgacgcaggcttcagt

SEQ ID NO: 592839 - DNA, 82 bp, Homo sapiens
ggcaccaactattcgcggagctggaatgactggcaacccaggccgctacctgtctgaggaacccgagccctacctggcagtc

SEQ ID NO: 592840 - DNA, 90 bp, Homo sapiens
cttcggttccggtggcggcgatggcttctctttccacctggagcaggtgaagcgggcagtggtgcaggtgattagcgccatggcccacca

SEQ ID NO: 592841 - DNA, 100 bp, Homo sapiens
tctttctcaacctcatcttctggaccccatatcatgtgaacctcctcctggctggctatgatgagcatgaagggccagcgctgtattacatggactacct

SEQ ID NO: 592842 - DNA, 149 bp, Homo sapiens
aatgctgatgcttcaagtcttggaaccacacttcgagaatcactgttataatgtacagcagaactgcatgatcagcctcccgcgacgatgcccctcaacgttagcttcaccaacaggaactatgacctcgactacgactcggtgcagcc

SEQ ID NO: 592843 - DNA, 100 bp, Homo sapiens
gacgggccatacccaataaccaggtgcttggcaaaatcgagcgggccattgcggggatctgacgagcttttctctacttgtgtcactaacggaccgttta

SEQ ID NO: 592844 - DNA, 74 bp, Homo sapiens
ctcacgtccactctgcgagaatgggctgtcatctggcgaaagctctacgtgggtccacatatagcctcagttac

SEQ ID NO: 592845 - DNA, 100 bp, Homo sapiens
ggccgccatcgcgacggccaaaaggagcggcgcggtcttcgtggtgttcgtggcaggaaattgacaatggcccttcagctatgctaggtctataatggga

SEQ ID NO: 592846 - DNA, 100 bp, Homo sapiens
aagacacacaactcataacagttgatgaaaaattgtgccagcgccacagcccttcaatcattttggttgctatccagcttctccacatcaagtccaactt

SEQ ID NO: 592847 - DNA, 90 bp, Homo sapiens
caacgaactccttacttatgaagcactgggactctgtccagaagcttgccaattctgtaactccttgggatatcttgctgagcttaattg

SEQ ID NO: 592848 - DNA, 82 bp, Homo sapiens
caacgggcagtttgtcgaacgatgttggactcatagtcactgccagaaaggtaagaatgattgatgttggctgatattggag

SEQ ID NO: 592849 - DNA, 51 bp, Homo sapiens
aactggccctggactacctctgcaggtctcaagattctgccctccaagaaa

SEQ ID NO: 592850 - DNA, 98 bp, Homo sapiens
ctggccccgcgcgggcggacggcggaggcgcctcccagctggatgctgacaaatatgagaatgatccagaattagaaaagatccgaagagagaggaac

SEQ ID NO: 592851 - DNA, 80 bp, Homo sapiens
ggccggcagccggcagctttgcagcgggccatggaggcacagatacagaactttggacagacgccatctcagttgcttat

SEQ ID NO: 592852 - DNA, 90 bp, Homo sapiens
cttttgatgtcaccggagttgtgcggcagtggttgagccgtggaggcagcctggcatcctcgctacaacctcattgttgtgggccgatac

SEQ ID NO: 592853 - DNA, 83 bp, Homo sapiens
ctgaaggcggacagtctcctgcgaaaccaggcaatgggtggagccatcgaagcccccacccacaggctgacagaggcaccgtt

SEQ ID NO: 592854 - DNA, 100 bp, Homo sapiens
cccgctctgctgtgggcgctgctggcgctctggctgtgctgcgcgacccccgcgcatgggtttcttcagtgcccgtggtcatcgaccccttgacaagaag

SEQ ID NO: 592855 - DNA, 75 bp, Homo sapiens
cctcgtcgaaaggattggattggcatctttagaggagactgcattgcttattgatccaaaaaattcctgttcttc

SEQ ID NO: 592856 - DNA, 100 bp, Homo sapiens
cacgtcaaccccttcctcccgtatatcagacatcgctattgcggttccgaggcagtgggaagagatgcggcccctggacatcgtcgagctggcggaaccg

SEQ ID NO: 592857 - DNA, 90 bp, Homo sapiens
gaaagaatacatcaagattctgaatctggtgatgaacttagcagcagctccactgaacagataagggttttgggatttgagattgacgcg

SEQ ID NO: 592858 - DNA, 75 bp, Homo sapiens
gctgaagtctcacatcagaggtgtcaagacatatctgaagagatggattaagaatgctttggattaaggattgtg

SEQ ID NO: 592859 - DNA, 83 bp, Homo sapiens
accagtgtggatcccttctctattacctcaccttggcatcgacagatttgaaaaagggcgcatctatacgttcattggagaag

SEQ ID NO: 592860 - DNA, 80 bp, Homo sapiens
acctgttacccaaggaattccctaaagtatcctggtgtgaaccagctatcctccagtataggaggattgagtcttcagag

SEQ ID NO: 592861 - DNA, 75 bp, Homo sapiens
ggaaggccactcacagggcttcaacaagctagctgaggtttttcgttggaatatacgttgcacatttatggcgat

SEQ ID NO: 592862 - DNA, 75 bp, Homo sapiens
actggactcttcctaagcaagtccggtgaatatgaccatctcccagaacaggccttctatatggtgggacccatt

SEQ ID NO: 592863 - DNA, 100 bp, Homo sapiens
cgctgcgcccgacgctccctgtctgggaccttctccctgcctggacccctactattgcaacaagccttctcttggagtcaagaagcctaccaaagccctg

SEQ ID NO: 592864 - DNA, 51 bp, Homo sapiens
caggaagccggtcagtgcccgccccaggtagctacagcaagctgggtagca

SEQ ID NO: 592865 - DNA, 75 bp, Homo sapiens
caggagcttatgatttcccccactgccaagcggaagccctgaccaggcatggagtatctcacaaagtagacgatt

SEQ ID NO: 592866 - DNA, 75 bp, Homo sapiens
gactcatggaggctgagcatttattcagggagaaaatcctccacctccgggtttcataatgcatggaaatgttaa

SEQ ID NO: 592867 - DNA, 101 bp, Homo sapiens
agcggctggcccgggagcgacgtgaggaacgggagaaacagctagagatgggcagtagcgaaccccttcccatcgcagatggtgacaggaggaggaagaag

SEQ ID NO: 592868 - DNA, 100 bp, Homo sapiens
cggcaaataaattcaacaagaagagaaaattccagccagatggtagaagcgatgtgtgccaaaggcagtaatgcattttttggttaatcatgtgaaagac

SEQ ID NO: 592869 - DNA, 83 bp, Homo sapiens
gtggtctgagctagagggtgaagctggcggagcaggaggatgggcggtatcatgatattagctggtttgacatcaagtcattt

SEQ ID NO: 592870 - DNA, 80 bp, Homo sapiens
ccattatgaatgtactggatgcaaaacgaggagcagaaatacactgggatgtttgcaatgaccgagaggggccatgggag

SEQ ID NO: 592871 - DNA, 116 bp, Homo sapiens
cgcctatctcttcaagtacatcataatcggcgacacagtttctgatgaagaattgaaaagaagagtagctgaggagctggcattggagcaagccaagaaagaatccgaagatcaga

SEQ ID NO: 592872 - DNA, 82 bp, Homo sapiens
cgcgcgcacggcagcctagcgcaatgaggcgggcagcactgcgtgtggacaacagtgagtatatgcggaatggagacttctt

SEQ ID NO: 592873 - DNA, 100 bp, Homo sapiens
agccgactgctgcctggtctgcaaagaagtcctttcaagtctctaggactggactcttcctaagcaagtccgctctcaaaggtctatggccctgtgttca

SEQ ID NO: 592874 - DNA, 74 bp, Homo sapiens
ctgtgctcgcgctactctctctttctggcctggaggctatccagcgtggccatggctaccgggcaggtgttgtt

SEQ ID NO: 592875 - DNA, 75 bp, Homo sapiens
aggtggtgaaactcaagatccccatggacaacaaggagttgcagcatgagaaagccgaactagaacagcatcttg

SEQ ID NO: 592876 - DNA, 100 bp, Homo sapiens
tcagggtctatttgctccgctaaaattacagatggaattcaaggcagtgcagcaggtttcagaaggatcccacttggtcagagactggagaccgttatct

SEQ ID NO: 592877 - DNA, 97 bp, Homo sapiens
gatgattgcacggttagacacacagctgaagaataagcttataacactgatgggtaaatggccaagacctaaagaacctgctgcaccaggatgctgt

SEQ ID NO: 592878 - DNA, 59 bp, Homo sapiens
ccaacggtttccccagcagtagcctctgcgaccagacggttacctggcacgctggccac

SEQ ID NO: 592879 - DNA, 83 bp, Homo sapiens
agcgctgttttcgtgatcttcagaccccaggttctttgggggatatgagactttctactcggaatatcctgagtgttgcgtgg

SEQ ID NO: 592880 - DNA, 83 bp, Homo sapiens
tgggtatggaagctatgggtacggaggcaactcggcgacagcaggctacagtgagaagccctaccactgcaactgggacggct

SEQ ID NO: 592881 - DNA, 96 bp, Homo sapiens
ggatgcttatggaatgtgcgagaacacggggccaattcctgtccccccagcagcatggcatcgtgtgctgaaccctctgagccctctgccccactg

SEQ ID NO: 592882 - DNA, 80 bp, Homo sapiens
aggcgtccctggagcggccgccttccagcacataaccagtgcggtgcaatccaagcgaagaaaatccaagtaaacaagca

SEQ ID NO: 592883 - DNA, 49 bp, Homo sapiens
ctgatcttcccttccagactacgagcccatggcgaattgtggatgattg

SEQ ID NO: 592884 - DNA, 100 bp, Homo sapiens
gggaggctcactctgcctagaggctccagaagaagactggtctctcccaccacacagagacttaattcagtgcacaaatgagatgaatgtgaacatccca

SEQ ID NO: 592885 - DNA, 94 bp, Homo sapiens
cagattcgcagtggtcgcttcttctccttgcctgatgtgtgagaagcggatattggcggcagtgaccagtgcgggacaccccttcctggtgaac

SEQ ID NO: 592886 - DNA, 83 bp, Homo sapiens
gcccgccgacccgcgccctgctccctctcagcacctgggcggacgtgggtaattccagaattgattggccataccattgtcac

SEQ ID NO: 592887 - DNA, 100 bp, Homo sapiens
gatcacaaagatacgaatctcttaaggggactgtgaatgaaagctggaatgccttagcaaccccatcagataagctgtttttctggaattccaaatctac

SEQ ID NO: 592888 - DNA, 75 bp, Homo sapiens
ctgaagaaagaagttgaatcccagcttcccgaaaaagccacagtgatgttgtaatgggcctggtgtctgttaatt

SEQ ID NO: 592889 - DNA, 100 bp, Homo sapiens
ggatgagaggaggcggcagaacattgcttatgaatatctgtgccacttagaggaagccaaaagaaaccaggttgttgcaagaggtcttctttcaggcaat

SEQ ID NO: 592890 - DNA, 100 bp, Homo sapiens
gctagccgggagttacaccgccaccgccagaagggagaattccacaagttggctgatgccaagatatttttgagcgactgcctggcatgtgacagctgta

SEQ ID NO: 592891 - DNA, 90 bp, Homo sapiens
ggatcctgctgggatttttgagctggtggaagtggttggaaatggcacctatggacaagtctataaggccctggccaacgtcaacattgg

SEQ ID NO: 592892 - DNA, 82 bp, Homo sapiens
atgattgcagaattcacatatttgctcaacaaaatgatcaggtgagctccacctgacacctttacatggcatcctgcagctg

SEQ ID NO: 592893 - DNA, 83 bp, Homo sapiens
ctgttttgaagtcagtattcacttaagcactccaaattctaagaggccggtgtcaccatacagcgggtacaatgggcagctgc

SEQ ID NO: 592894 - DNA, 80 bp, Homo sapiens
gcgagggttgaagattgtgaagcaatagcctaagactgtggcacgtttcaggcaggattcctccttcattcaaactgcat

SEQ ID NO: 592895 - DNA, 82 bp, Homo sapiens
gacttggactcagatggctttctcactgaaaggtctccgtctctccaccgggggcttcatccttccagggaggagaagaggg

SEQ ID NO: 592896 - DNA, 100 bp, Homo sapiens
cgggcgctctcgcttcagtcagtcgggccgcgccgcgcctcagctctggtggatggaagtttgcttagttgaagaattgccaccaaccactgaattggaa

SEQ ID NO: 592897 - DNA, 82 bp, Homo sapiens
aaggacctgaaaatcatatagagaaagacagatggaagtctttaaggtactccaaagattcaggtttactcacgtcatccag

SEQ ID NO: 592898 - DNA, 100 bp, Homo sapiens
agcttccgccacatcctgccggggttccggagcgccgccgccgccgccgcggacaatgagaggagaggagaggcagcagcatggcgagtgtcctgtcccg

SEQ ID NO: 592899 - DNA, 51 bp, Homo sapiens
tttactccatgcagttgtcaggagctggtgctcaagaccgaatcggctggg

SEQ ID NO: 592900 - DNA, 100 bp, Homo sapiens
aggaaaggaaagatgtgttcgggtttttctagaacacggaggtgggcaatggcagaaggttatggggcttgcttaataaacaagccagagcttgttcaag

SEQ ID NO: 592901 - DNA, 101 bp, Homo sapiens
cagcatggcggtggaggacgaggggctccgggtcttccagagcgtgaagatcaagatcgagccaaggattgtcaccagtgaagaggtcattattcgagaca

SEQ ID NO: 592902 - DNA, 100 bp, Homo sapiens
tgaaggaaaccgcactctcacactggccttgatttggcagctaatgagaagggatacagcaggccaggagcgatttcacaccatcacaacctcctactac

SEQ ID NO: 592903 - DNA, 75 bp, Homo sapiens
aaaacctcaaaatatgatggtggttggacagtcagcatttgcagactttgcacctgtggaatcctctcaagagga

SEQ ID NO: 592904 - DNA, 83 bp, Homo sapiens
agcccggcgcaggtgaccggcgcgcgggagcgctacggccccaacggaaggtgctcgggtcttcggggcactgggtcccatcg

SEQ ID NO: 592905 - DNA, 100 bp, Homo sapiens
gagaacagccccaatcaccgtccttacacggcctctgatttcatagaaggatctgccagagcatcttttggagatcgaaaggtagaactttccagttcat

SEQ ID NO: 592906 - DNA, 100 bp, Homo sapiens
ctctctcgtcctcgctgctgtacttcgtctatgtggcgcccggcataggtacttcgtactggatttcgaggctggcatcctgcagtattttgtgaatgag

SEQ ID NO: 592907 - DNA, 75 bp, Homo sapiens
ccctcgggatcaactcttccaggaccaccaaaaataactttggctggattcgtcttttgggatccacgattccac

SEQ ID NO: 592908 - DNA, 75 bp, Homo sapiens
gggccatggccgccgccgatgccgaggctagatgaactgcagaagcaactacaagaagacataaggcaaggccga

SEQ ID NO: 592909 - DNA, 106 bp, Homo sapiens
ggaagaccgcgcgcagggcctgcagcgggagctggacggcgagcgcgagcggcgcgagaaaaaagaagatgctgatatgctacaacacggatgaacctggaggacg

SEQ ID NO: 592910 - DNA, 74 bp, Homo sapiens
ggacaaactcttagagcctgtggtttgcatgattacaggctgtgccagccctggaaaaacagttacaattgttg

SEQ ID NO: 592911 - DNA, 98 bp, Homo sapiens
ccctgcggaatccaccggcgcagtttcatctagcgactggacgccaagagtgccgaggatgaggctccttccagacacttgggaaagcaccagccccg

SEQ ID NO: 592912 - DNA, 101 bp, Homo sapiens
ccctgtcagtggctctcttggccctcctgaaatggtcccccggcagagggcagtagagatggccggcccaaggcctcggtggcgcgaccagctgctgttca

SEQ ID NO: 592913 - DNA, 50 bp, Homo sapiens
ccgccgcagcttcagcacctcggcccagatttctaacgacccaagtccag

SEQ ID NO: 592914 - DNA, 51 bp, Homo sapiens
cgtccccgctgctgtgcattggacatgaagaggagcatcggcggcgtgagg

SEQ ID NO: 592915 - DNA, 80 bp, Homo sapiens
cttcgtttgccattttcttatggagaactgtccttgttgctttatcctgtggataaacgcagagtgaacgagtttgggga

SEQ ID NO: 592916 - DNA, 100 bp, Homo sapiens
ccatcaggtaggctgcgttgaggatctttgctcttccatccgcctttgatcgtcttcctcttcagccatccagcttgcattgaaaggctctagttacagt

SEQ ID NO: 592917 - DNA, 99 bp, Homo sapiens
gcgcctgcggacctaactagctccaggttaggccgagctttgcgggaaagcagcggcgtggtgaccaagatgaagatgcagaggaccattgtcatccgc

SEQ ID NO: 592918 - DNA, 50 bp, Homo sapiens
gaaaaagcagtaaagccagaggaagacaccattcgcttttcacccaagat

SEQ ID NO: 592919 - DNA, 100 bp, Homo sapiens
catcgccgccgacctgtgcaaggacagacccacgaagtcaagcatgcggagtgcagccaagccctggaacccagccatcagagcagggggccacggccca

SEQ ID NO: 592920 - DNA, 89 bp, Homo sapiens
caggccggaccgggccgggcgcccgcagccctccagaatacccatcatatagcccctgaggtggcatggtgatgtctccatgagggaac

SEQ ID NO: 592921 - DNA, 98 bp, Homo sapiens
atgaagcttcaacttgtgcacaaaagtgttgtgcatttaatgatgttcaagctgaagttcctggatctcccatatttgtgatgagactagccaaacaa

SEQ ID NO: 592922 - DNA, 100 bp, Homo sapiens
cctgaagttaatggttctatgaaacagtgtatcaaagtgtggactgagctatcgccaagcccaggccgcagtgcttgcagtcttaccccgcctccatcag

SEQ ID NO: 592923 - DNA, 74 bp, Homo sapiens
gcggaaccttcgcctcagaaaaagggtggttctgacaaccatttgatccttgtggatctccgttccaaaggcac

SEQ ID NO: 592924 - DNA, 142 bp, Homo sapiens
gaaccaattctggagaacagcctcacttctttgattgaatacttacataatgcattggaacatgacatgagattaaggtgctggagaatctggtaaaagcaccattgtgaagcagatgaggatcctgcatgttaatgggttt

SEQ ID NO: 592925 - DNA, 100 bp, Homo sapiens
caggctctcggctgcagcgctggggggaattgcagcaggaagcagcggaaaaggacgaggagccaagcgcaaacagcaggatggagggaccacagggacc

SEQ ID NO: 592926 - DNA, 100 bp, Homo sapiens
ttagatgctcagatggtagtggataggcctgtgacgaaggtgctaccatcgtgagagtaagattgtaaaccatggctgtgtggatacaagctcagcagct

SEQ ID NO: 592927 - DNA, 83 bp, Homo sapiens
cactgctttccactcggctcctgtcgtccgttctctcaggctcccgttcagaagctatgtggaagcagtgacctgaatgcttc

SEQ ID NO: 592928 - DNA, 51 bp, Homo sapiens
gccagagattgctcaggaagcaatggaggaagaaatgtacatcttcatgga

SEQ ID NO: 592929 - DNA, 49 bp, Homo sapiens
cgggccctcgagacggggacggtgattacgtttttgaagaagaaggaca

SEQ ID NO: 592930 - DNA, 80 bp, Homo sapiens
gccagaggatggattacccagtatgctgggctcttgcactgtttggtggaaatggtgagacaggatttgagcaaaattct

SEQ ID NO: 592931 - DNA, 100 bp, Homo sapiens
ccagggcggcgcgtggtctacgccgagtgacagagacgctcaggctgtgttctcagtttgcaatggattttggataaacaagatctgttgaaggagcgcc

SEQ ID NO: 592932 - DNA, 75 bp, Homo sapiens
gggggccttcccgccggccgccgccgcccgaggtgatgtgtccaatctagatcccaacttctcatttgaaggcac

SEQ ID NO: 592933 - DNA, 99 bp, Homo sapiens
tggccaacttttatctgacattcttgctacaagtaaatatgtgctggccggcgaggactgcctgtggtacctggaccggaatggctcctggcatccggg

SEQ ID NO: 592934 - DNA, 100 bp, Homo sapiens
tgagcaaatgcattgagcttgggtcaggacaattccatttggggaccagagatggacggtcactcagcctatggagacaaaacctgctacaaccccctct

SEQ ID NO: 592935 - DNA, 75 bp, Homo sapiens
aggctgctgggcaggtcatgagtcaccatggaatcctagctcgtaatattccagaagataatgctgacatggcca

SEQ ID NO: 592936 - DNA, 101 bp, Homo sapiens
cccctacggctgcaaggacgctctgcgccagcagctccgctcggcgcgagagcatggaagctccacaaagcagcagcctggtcaccttttctcttccaagt

SEQ ID NO: 592937 - DNA, 100 bp, Homo sapiens
ggtgatctctggtgcaggaaaaatgttcactgcagctgcattcatccgggtcgtgggctcggagtttgtacagaagtatctgggtgagggcccccgcatg

SEQ ID NO: 592938 - DNA, 83 bp, Homo sapiens
ccccggcgcgaagaggctggactcggattcgttgcctgaggggtcgggccccggctcagtggtcccaggcagctcgggtgtcg

SEQ ID NO: 592939 - DNA, 101 bp, Homo sapiens
tggtccgtgccgcggcggccgcgcagggagctctcgaggcaacgccggggcgcccgaggtctggaaggcgcaggtactccaaagattcaggtttactcacg

SEQ ID NO: 592940 - DNA, 75 bp, Homo sapiens
gacgcgcaagggctgcggagccgcgggccggcgagcgcgtcgccaccatggcgacattgactacagcaccgtgct

SEQ ID NO: 592941 - DNA, 94 bp, Homo sapiens
actcctcccagtgacgggtctggagtgcgtgggggaccggctgttggcggacttaattcagtgcacaaatgagatgaatgtgaacatcccacag

SEQ ID NO: 592942 - DNA, 82 bp, Homo sapiens
actgcagagcctgtccgtcagtccctaggtatccgcactgctcagggacaatgcagatcttcgtgaagactctgactggtaa

SEQ ID NO: 592943 - DNA, 50 bp, Homo sapiens
tcctgtgtgaaattgcttctgtcaaaggtcaatgtgacggtggactacat

SEQ ID NO: 592944 - DNA, 100 bp, Homo sapiens
gcttcaatgatgggaaggtggatcccgccgggaggtactttgctgattctctaaccatggcacaggtagagaaacgtggaggtttgctccggaaatcttc

SEQ ID NO: 592945 - DNA, 75 bp, Homo sapiens
aggcatgtcagcggaccctgaggagtatgacctgatggggaagggatccttcaagtatgcctgggtgctggacaa

SEQ ID NO: 592946 - DNA, 75 bp, Homo sapiens
atgccagggagccaagcgtcctgcccggccatgtgaagttcatttccaatccgccctccatggtggcagcgggga

SEQ ID NO: 592947 - DNA, 101 bp, Homo sapiens
tctccctctgcccccccttccccacgcaaccccagatccatttacactttacacacatggattaattgatgtatgttgagtttatggagctgccttttggt

SEQ ID NO: 592948 - DNA, 49 bp, Homo sapiens
cctcgcctcccggccgagctgacggatcttacacatttgttccatggct

SEQ ID NO: 592949 - DNA, 100 bp, Homo sapiens
ctgccccgacctgcagctcaggctgctcttctcccggaggaagagcttgtggttgcagagtcagtggtcgtcattaagaaattgctacagatgcagccag

SEQ ID NO: 592950 - DNA, 75 bp, Homo sapiens
ttgcaactgacgcagtcactgcagcactggtggaacttgaggtcttccgaccccgaactccaccggaggcaattg

SEQ ID NO: 592951 - DNA, 100 bp, Homo sapiens
ctgccctgccctgcgcccggggcgcgcccaccgcgccgcatccatgttcgaccgagccacatcgctcagacaccatggggaaggtgaaggtcggagtcaa

SEQ ID NO: 592952 - DNA, 101 bp, Homo sapiens
ctgccctgtggcctcgctcctcggagggaagatgagaatgtgcctactgctcctgatcctccaagtcaacatttacgtgggcatgggacaggcttttgctt

SEQ ID NO: 592953 - DNA, 100 bp, Homo sapiens
ggacctactggatgatgatgataatgaagatcggggggatgaccagctggaggaggagcagcaggccctccagaagaagctgaaggggacagaggatgag

SEQ ID NO: 592954 - DNA, 51 bp, Homo sapiens
ctttaccatctcatctcaagaatggaggggcttcctactatgagatttcag

SEQ ID NO: 592955 - DNA, 100 bp, Homo sapiens
agaagccagtgtccaggccggccaccgctgccgctgccgctgccggctccagggagccccgtgtcaagcaaggtgtcatggagaaactccagctgggccc

SEQ ID NO: 592956 - DNA, 100 bp, Homo sapiens
gagttcattggccaaggagtgccccctttcacaggatatgaacgagactgccaaacaagaagatattttggaatccacaacagatgctgcagaatggagc

SEQ ID NO: 592957 - DNA, 74 bp, Homo sapiens
tgtgaactatagtttggctagcttcctgaagtctatgcagatggtagtatatgtctggacatacttcagaaccg

SEQ ID NO: 592958 - DNA, 117 bp, Homo sapiens
ttccacgtcatccgcatcaacaagatgttgtcctgtgctggggctgacaggtcgtggagggcccccaagacccaacagagggatgccgcaaatgaacactcagcaagtgaattaatc

SEQ ID NO: 592959 - DNA, 50 bp, Homo sapiens
gggtactgcattcctaccggtgtgacagggtgctgttggcccaaaggttg

SEQ ID NO: 592960 - DNA, 75 bp, Homo sapiens
caggcggcccactggcagttcgagtcaccttcaggccattcagaggaggaaagagaggggaatatgaagtcagcc

SEQ ID NO: 592961 - DNA, 98 bp, Homo sapiens
gaccaaaacctgcattgataccaaggaaggcatcctgcagtattgccaagaagtaaaccccacagcccagtgtacccatgccctgttgaagatgatct

SEQ ID NO: 592962 - DNA, 75 bp, Homo sapiens
cgtgcatgaagatggacgaggtcctgtacagcatcgccgagaaggttctgagatgcagtaaaatcgctggtgtga

SEQ ID NO: 592963 - DNA, 100 bp, Homo sapiens
agtcctgcctggcccccagccagttccctgctgaagatggccagatccccttgtctggtcaccaaagtccatgagcccccccgggaggacgcagctccca

SEQ ID NO: 592964 - DNA, 97 bp, Homo sapiens
ctccattggatttaaaagacagtcctcgtcagcactgactttcagctatggaatcggttttaaaatcaaagatgggaaaatcggagaaaattgccct

SEQ ID NO: 592965 - DNA, 100 bp, Homo sapiens
catggccaagccgtgtggggtgcgcctgagcggggaagcccgcaaacaggacatgtattcctctgagaaaccttggacagcagattttggtttaatatct

SEQ ID NO: 592966 - DNA, 101 bp, Homo sapiens
gcagcccctcagcaacgccgtgcagctgcccatcgaccagtgctcttaaagttccgtacagataaaggaagagatcccagttctgatacatatgaggaaga

SEQ ID NO: 592967 - DNA, 80 bp, Homo sapiens
ggagctcttcagaaccgcctacttctgcagaggtgtctgacttccagcaactgctggcctgtgccagggtgcaagctgag

SEQ ID NO: 592968 - DNA, 82 bp, Homo sapiens
gccgatccagcctgcggagcctgtggggcagattgcaaatagaagagtcttccaaaccagtgaggctatcacaacagctgga

SEQ ID NO: 592969 - DNA, 75 bp, Homo sapiens
gtggcgacaaatctggtgcggcgcctctgtgagcgagtcaacgtgggagactacatcgaggcggtcctggaccgg

SEQ ID NO: 592970 - DNA, 90 bp, Homo sapiens
gtttacggaagtgtaacgttgaggcccttcttgtgtatctggagaaaatagagtgagaaggcaaccaaagtgcaggacatcaaaaacaac

SEQ ID NO: 592971 - DNA, 100 bp, Homo sapiens
ctaggagctggcggcgacggccacaggggcggcgacggcgcagtgcgaagcgaaacagaggtgtggcgaaatcttgtttgagaaccccgatcagaatgcc

SEQ ID NO: 592972 - DNA, 100 bp, Homo sapiens
gctgggactacaggctcacaccacctcacctgggaaatgggtcctgatgaatatgaagagatggaagaagaggaggaggaggaagaggaggaagacgagg

SEQ ID NO: 592973 - DNA, 76 bp, Homo sapiens
caacagactgagcgcgtccaggcctgacagctctgcggctcgggccctgagctggctctgaagcaccgacaaggca

SEQ ID NO: 592974 - DNA, 75 bp, Homo sapiens
gcgacaagaccgtgtacttcgctgctgcggactctggagcgtgagaaccagcgcctggaggctgtcctggcgtgg

SEQ ID NO: 592975 - DNA, 96 bp, Homo sapiens
gcccgccgtcgtcagcggggccgcttgatgcgacgcctgagtctagtcctcaactctaaccaaagtaaaggaaactggaaagacacacgctttttc

SEQ ID NO: 592976 - DNA, 114 bp, Homo sapiens
acggcaaagttttgcagatcttcaacaagaggacccaggagaaattcgccctcaaaatgtggtgaagctgtagagaaaaacaagcgtctcatcacggcagaccagagggaatat

SEQ ID NO: 592977 - DNA, 96 bp, Homo sapiens
gcaaggagcatcccggctggagcagagccaggttcacagcatgtccgcctcggcccctgctgcggagggggagggaacccccacccagcccgcgtc

SEQ ID NO: 592978 - DNA, 50 bp, Homo sapiens
cgagaccgcggccgggaccgaggtgcttcaccgatatagacacattttgg

SEQ ID NO: 592979 - DNA, 70 bp, Homo sapiens
tggtgctgaaacgaccggagatactgacagatgaggctgtccgttccttgctggagaatttggccacaaa

SEQ ID NO: 592980 - DNA, 82 bp, Homo sapiens
gcgggtagcggggctctccgaggagccgcacgccggcggcaccatggtccacctcagtccagaggtgtccttctaaagctgg

SEQ ID NO: 592981 - DNA, 90 bp, Homo sapiens
attgccaaatatcagaagtttctagacaaagccaaagccaaaaagttttcagcagtcagtttaagtgctgtggggctgctaactacacag

SEQ ID NO: 592982 - DNA, 101 bp, Homo sapiens
gaggcaccgggatcgtgaccgagaccgtgaccgagagcgtgaccgagagcgcgaatatcgtcatcgttagaaggtggtgagcttcattttctccaaattgg

SEQ ID NO: 592983 - DNA, 82 bp, Homo sapiens
acagctggttcttgaagctgctgtatgccgagattttgctgtcctggaggaccacaccctggctcacagcctgcaggaacaa

SEQ ID NO: 592984 - DNA, 98 bp, Homo sapiens
ccggccggtccctcgcctcccggccgagctgacgtgacctgaccaacggtgcagatgggatgctggccacaagctccaatgggtctcagtacagcggc

SEQ ID NO: 592985 - DNA, 100 bp, Homo sapiens
aggaaagcacttaaaagtggaaagatgacggatgaaaagaatgaacactgtccttcaaaacgaggtctgcgcttcgcagccgggatgaagctggtttccg

SEQ ID NO: 592986 - DNA, 97 bp, Homo sapiens
cctcagcctacaagattaaaatatcggcaaaaatttaatactcttgacaaaagtatgagtggatatctctcaggtcactgaatccaaggcaacctgt

SEQ ID NO: 592987 - DNA, 96 bp, Homo sapiens
gcaccgaggcgagcaggagcagggaacagttgctgatatgtgttcaagatgagtgggatgggagaaaatacctctgacccctccagggcagagaca

SEQ ID NO: 592988 - DNA, 50 bp, Homo sapiens
gggtgctggtcaccggggcaggcaaaggtccccttcccctgagcccatct

SEQ ID NO: 592989 - DNA, 112 bp, Homo sapiens
ccgggccgctgccccgtccctggattcggggctggacgcagcaagcggggcgctgtgtccccaagctccccgtcctcggttgcagaatgaagaagagtctggagaacctgaa

SEQ ID NO: 592990 - DNA, 95 bp, Homo sapiens
catctccatctcccttgtgctgcagatcggcgtgggggtgctgctcatcttccttgcttcttggacacttaatgattgttggcaagaaatgtgct

SEQ ID NO: 592991 - DNA, 49 bp, Homo sapiens
gttcaccatcctggccccggaagaaagtgttgtgaagagcgaagacttt

SEQ ID NO: 592992 - DNA, 103 bp, Homo sapiens
catcgtgattatctcgagcaaattaagcactgttattgacccagtggctccacgatatgttgcattactgaagaaagaagtgatcccagtgaatgtacctgaa

SEQ ID NO: 592993 - DNA, 90 bp, Homo sapiens
cagaattccactgttctgctcggtctactagagactcgggaatgaagtttcgaattcctcattcctggacagtccggaggcagacctgcc

SEQ ID NO: 592994 - DNA, 90 bp, Homo sapiens
ggcctgaggaggactgagctggggcgggacccagcatcctgaggttagcattacacttctcccagtggagcccatgacttctgatcagga

SEQ ID NO: 592995 - DNA, 98 bp, Homo sapiens
agcattctccagggaaaggatgacatatttttggacctgaaacagaaattctggaacacctatatgaaccgagctgaagctgccatggaattcttaca

SEQ ID NO: 592996 - DNA, 82 bp, Homo sapiens
cgtgccgcgagcgcggcctgcaggaggaggtgtgattgcctatatcagttcttccagctcagcctcaagccctgcctcttgt

SEQ ID NO: 592997 - DNA, 75 bp, Homo sapiens
gcatgtcagaccagaccgtccgggtgaaggaactcagcgagatgctgtacacagaccggcccgactggcagagtg

SEQ ID NO: 592998 - DNA, 100 bp, Homo sapiens
cagctagcatccaaatcagcccttgagatttgaggccttggagactcaggtgaagcacttgaggaagaactggattccatggcaaaacatgaatccaggg

SEQ ID NO: 592999 - DNA, 100 bp, Homo sapiens
caacagcaacagagagagtccagggaatgaattttatagcaggatatctgattcttataacaaataatgaagaagaatctttttggctgttagatgctct

SEQ ID NO: 593000 - DNA, 75 bp, Homo sapiens
gacagaagtggggagaagcggaggtactccaaagattcaggtttactcacgtcatccagcagagaatggaaagtc

SEQ ID NO: 593001 - DNA, 100 bp, Homo sapiens
gtcgactgcccagagtccgcggccggggcgcgggaggttgttcctcaaagtcattcaagctgtactcgccgaaggagcccccgaacggcaacgcctttcc

SEQ ID NO: 593002 - DNA, 82 bp, Homo sapiens
cagagcctagaggatgtttcatgggatcccagccacgccgggcataggaggtcagcccaaggccaaccccactgtcactctg

SEQ ID NO: 593003 - DNA, 50 bp, Homo sapiens
agtttcagttcttcattgacggttagcactctacgtatatgaatatctgc

SEQ ID NO: 593004 - DNA, 90 bp, Homo sapiens
cattgaaaaccctgctgatgtcagtgttatatcctccaggaatactggccaggtgcggctctatgagtggacaacagagaaggagctgcg

SEQ ID NO: 593005 - DNA, 112 bp, Homo sapiens
aaacatcttgatctggagaaaaactggatgttggtagaaaaagcaagagtttgttatatagcagttcaaaccttgtactactcagctgatcacaagctgcttgatgggaacc

SEQ ID NO: 593006 - DNA, 50 bp, Homo sapiens
ccagcctgcggagcctgtggggcagttacatcatgctgatgacagcttcc

SEQ ID NO: 593007 - DNA, 89 bp, Homo sapiens
gctcccaagaagtccgagacacgcggtgaggcggcgacgggctccgggcacaacttcctgaatggaccatgactcccaccaaagatccc

SEQ ID NO: 593008 - DNA, 75 bp, Homo sapiens
tgagcgtcccggccttcatcgacatcagtgaagaagatcaggactggagactgatgcatgagggggctacggagg

SEQ ID NO: 593009 - DNA, 100 bp, Homo sapiens
tatgcaggtgccttgagagcttcaggggaaatggcttcagcgcagtatattactgcaggttatgatgtgattgctcaagcccaatctgggactgggaaaa

SEQ ID NO: 593010 - DNA, 83 bp, Homo sapiens
cagacgctgtgctcgctggcaccccgaacgggttgcttcccccgctgcgaggctgaaggtgatgtggccgccctcaaccgacg

SEQ ID NO: 593011 - DNA, 82 bp, Homo sapiens
ttcaagcagcgccgcaccttcggtggacggcctgttcatcatcgggtggatgtacctgcctccccatgacccccacgtcgat

SEQ ID NO: 593012 - DNA, 100 bp, Homo sapiens
ggacaacaacagggcttgattctgcagtagatcctgtccagatgaaaaatgtcacctttgaacatgttaaaggggggaaatgccgggagtacagacgacg

SEQ ID NO: 593013 - DNA, 75 bp, Homo sapiens
tcgtgggcggtcttgactggagcacgacccaagaaggagatccggttggcagctaaaccgcgctgggaacagggg

SEQ ID NO: 593014 - DNA, 94 bp, Homo sapiens
gggcgcggattcgccgaggcaccgaggcactcagaggagtcttgctatgttgctcaggctggtcttgaacccctgagctcaagtgatccaccgg

SEQ ID NO: 593015 - DNA, 143 bp, Homo sapiens
caaaagattacgtggatgcataggtactttttctgccatgaatttgcattcaggactcagggagtacacacttaccagaggccagtgctgctgaggaagcagatgtgcacgtagctgtggtggtgagaccaggcaacgcagga

SEQ ID NO: 593016 - DNA, 82 bp, Homo sapiens
gatagcacagtgcctcaatttgaagctccttctccatcacacaggatgaaagagagggacctatcaatgccgaatcattggg

SEQ ID NO: 593017 - DNA, 100 bp, Homo sapiens
tgggaaaggaaaagactcatatcaacattgtcgtcattggacacgtagattcgggcgcccgtccagggacacacacagtcttcactgtgctgcagccaga

SEQ ID NO: 593018 - DNA, 97 bp, Homo sapiens
agtatcgggactaccagagggccacgcagaggctggcgggcattccggaactgctcaacaaacttcgccagatcttgcttctgaaatatctacctgg

SEQ ID NO: 593019 - DNA, 106 bp, Homo sapiens
gcggccccctggagggggcagtcccgggagaacctgcggcggccggagcgggggatatgagactttctactcggaatatcctgagtgttgcgtggatgtaaaaccc

SEQ ID NO: 593020 - DNA, 100 bp, Homo sapiens
aggttgttggccacagccaattcaaaggaaggagtgggactctgggacattcgaaaacctcagaggttgggtgggactatatcagcatacaagatagtac

SEQ ID NO: 593021 - DNA, 76 bp, Homo sapiens
gaacatttctgggtgacactcaacaggattcccggacgcacaagaccagccactgctaccgcatcacgtaccgcca

SEQ ID NO: 593022 - DNA, 101 bp, Homo sapiens
cccctctgctgcaccacttcatggtgtctgacttccagcaactgctggcctgtgccagggtgcaagctgagcactggagtggagttttcctgtggagagga

SEQ ID NO: 593023 - DNA, 90 bp, Homo sapiens
tttggttacctatgtacctgttaccactttcaaaactgcggttggatttctcacgatgtccagtgttatctccatgtctgcccctttctt

SEQ ID NO: 593024 - DNA, 100 bp, Homo sapiens
gaaatataacagtcaaaaccaaagtaacaaccagtttgtattgtaccgcataactgaagccactaagacgatggacttcagcagaaatctttatgatatt

SEQ ID NO: 593025 - DNA, 100 bp, Homo sapiens
cgaggattatggatgaacgtaacagacaggcagaagctcctcctggggtagagacagatcttattgatgttggattcacagatgatgtgaagaaaggagg

SEQ ID NO: 593026 - DNA, 100 bp, Homo sapiens
ctccaagtcatcaatgaagaaaatagctttctaaacaactctgtaatgattctcacctatgccctcatgaacggatttttcaagccacattcaattgata

SEQ ID NO: 593027 - DNA, 75 bp, Homo sapiens
tttctgttcaagaaggttcacaatgaaaactgtacttatgttagctgaccaggtgggcaaacgcagaggcgggaa

SEQ ID NO: 593028 - DNA, 75 bp, Homo sapiens
agtagatgatgatgtagcagaaggtgaatgaaaactttgccattgatttgatagcagagcagcccgtgagcgagg

SEQ ID NO: 593029 - DNA, 75 bp, Homo sapiens
ccggcacctgcacacctggatccaggataacggaggctggggggatatgagactttctactcggaatatcctgag

SEQ ID NO: 593030 - DNA, 112 bp, Homo sapiens
cacagaagcaaaagccttgatagcatggatttctgtgagctcactctggattataaagttggctggaagaaactgaaggaagtatttagtatggctggtgtggtggtccgag

SEQ ID NO: 593031 - DNA, 75 bp, Homo sapiens
ctgtgacctccattaaatggtggcctggtgggcgtgcatataattggccacattcccccagggcactgtctgaag

SEQ ID NO: 593032 - DNA, 74 bp, Homo sapiens
ccatcaacagatgcccctgataaaggatacgttgaacagtccacaggaagaggttgaactaaagaagttgaaac

SEQ ID NO: 593033 - DNA, 82 bp, Homo sapiens
gaggcaacggggtcaccatgggcatggtggctgggaccaccatggccatgtcagcagcggaactctgtcgccccttgttggt

SEQ ID NO: 593034 - DNA, 89 bp, Homo sapiens
ctgctgtcgcctgcagctgctcgcctgtctccgtcggaagggagcccaagctttgcagagatttcctcctctgatgctcctcttcagcc

SEQ ID NO: 593035 - DNA, 75 bp, Homo sapiens
attgacagctgcattcaatcttttggtggagctcatgaaggacttcagcatttgggtccttttggcaacatcccc

SEQ ID NO: 593036 - DNA, 100 bp, Homo sapiens
ggtgttgtgaatttcccatatgatgatgtaaaggcgacacaggaggagaaccgggagctgaggagcaggtgtgaggagctccacgggaagaacctggaac

SEQ ID NO: 593037 - DNA, 83 bp, Homo sapiens
cgacaagccgctggcagccgcggatctcaccgccgctcaggggggaaatttgcagtggtgagaaaatgtataaagaaagattc

SEQ ID NO: 593038 - DNA, 75 bp, Homo sapiens
aaagacatgagtttgtgatggcacaatatgtgaatgaatttcaggggctgggtgaccgatggcttcagttccctg

SEQ ID NO: 593039 - DNA, 75 bp, Homo sapiens
atcatctttcacgatgaaacatcgaagacatttgcctgtgagtcaggttctccagcatttggctcaaggccccaa

SEQ ID NO: 593040 - DNA, 94 bp, Homo sapiens
gattctaatcaaaatatgcagtctcttttaccagcaattgtttccaagttgaaggatgaaataatcctaatagagaaagaacgcacagaccttc

SEQ ID NO: 593041 - DNA, 82 bp, Homo sapiens
gaggcctcccgggctccgggaaaactacactggccaggcaacatgagtgagaatgaggaagaggaaatttctcagcaagaag

SEQ ID NO: 593042 - DNA, 89 bp, Homo sapiens
ctgtgatagaccaagggctgatcacgcggcaccacctcaagaagcgggcaattgaaaaagacccttggtgccaatgatgtatcctgcac

SEQ ID NO: 593043 - DNA, 90 bp, Homo sapiens
acggagacttcacggtgtacgagtgcccgggcctggccccggcttggccgatggtggagaatcaaagaggctcggaattctgtctgcatc

SEQ ID NO: 593044 - DNA, 95 bp, Homo sapiens
gagtgcccaaggtttcaaagcattatatgaaggctatgattaaaagtttcatggatgtctaccagcttgcaagcactagaatcatgacattagag

SEQ ID NO: 593045 - DNA, 75 bp, Homo sapiens
aggacagctgttccttggccatcccaaagctattctgggggcaacagagatactgtggatggtagggaagaaaag

SEQ ID NO: 593046 - DNA, 133 bp, Homo sapiens
ctgtcctggctggagtcgctttcatggtcttgctgattccactcaacggagctgtggccgtgaagatgcgcgccttccagatctcttctctgaaagctgaattaactagtcaggaatcgcagatctccactta

SEQ ID NO: 593047 - DNA, 101 bp, Homo sapiens
caggcatcatggactgtgcgcccaaggagcggcctattgccaattcatggacatgctcttccctggctgcattagtttgaagaaagtaaaatttcaagcaa

SEQ ID NO: 593048 - DNA, 75 bp, Homo sapiens
cacatggcccaggcagaccttgcagtcaaaatgggcttccccaaggatttattgacattgctacttgagtgtgaa

SEQ ID NO: 593049 - DNA, 100 bp, Homo sapiens
ggacgaggaaggagatcttcgaaaccctcatcaagggcctgcagcggctggagtacagaggctacgactcggcagcttcaagagatagaggaattcaaag

SEQ ID NO: 593050 - DNA, 75 bp, Homo sapiens
ggccaatgttggtgctggcaaaaagccatcagagggttctcgcttcagcacaagatccggagttttgaagaagcg

SEQ ID NO: 593051 - DNA, 90 bp, Homo sapiens
tcaagttcttcaggaatggagacacggcttcccccaaggaatatacagtgtgattcttggagcaaatacccggccagacttggatctccg

SEQ ID NO: 593052 - DNA, 98 bp, Homo sapiens
tctgcggaagtgcagctgcctcagttcttagcgcagttcccagtgacctgacagcagaggagcgtcaagaactggagaacatccgacggagaaaacag

SEQ ID NO: 593053 - DNA, 100 bp, Homo sapiens
agaagtgcttaaggaagagtgatgaagcaagacaggtggatctactggacagactggcagaccaagtcaatccagcgtgttgacaaatactcaggccgga

SEQ ID NO: 593054 - DNA, 98 bp, Homo sapiens
gcctggttactatcaaaaggagcggggtcgacggtccccactttcccctgagcctcagcacctgcttgtttggaagatgaccgcacctcgagcaggag

SEQ ID NO: 593055 - DNA, 90 bp, Homo sapiens
ggatggctgcgttgacacgtcttatttaatccacatcatagcgtggtgatggtggatgaggcacacgaaaggaccctacacacagacatt

SEQ ID NO: 593056 - DNA, 83 bp, Homo sapiens
caccctcgctccctctgctcttcctcccttcgctcgcaccatggccccccaaagatggcggacaaggtggtcccacggcaggt

SEQ ID NO: 593057 - DNA, 75 bp, Homo sapiens
tatgaaaaggaatacattctttcatcattaagaaatcagctgaagaggaggcaaatgaagaagatgtactgggag

SEQ ID NO: 593058 - DNA, 100 bp, Homo sapiens
gtgactgccatggagtgaagggacaaaagggcgccaatgcttcggcattagagaaagagattggtccagaacagtttccggtcaatgagcactattttgg

SEQ ID NO: 593059 - DNA, 90 bp, Homo sapiens
gaatgctccaggcagtgtaatctcattccatcttcattcatgactccagacagactgctgagaaggaagaatttgaacatcaacagaaag

SEQ ID NO: 593060 - DNA, 83 bp, Homo sapiens
gaggagctgggtggtcccagcctggagctgtgccagcctgacatgggccgatacaaagcaggggaaaaggagccagatcccaa

SEQ ID NO: 593061 - DNA, 95 bp, Homo sapiens
ctgaacggagtgtgcgacggattgggaggaaccacgtgaatgttgagggggcgacacacaagcaggtggtggacctgattcgagcaggcgagaag

SEQ ID NO: 593062 - DNA, 100 bp, Homo sapiens
aggtgctccagctgaaggtgcgagaagaagtcagaaatctacagttactcacacaagtgaagtacatgcgagaagccacgccctatgtgaagaaaggatc

SEQ ID NO: 593063 - DNA, 80 bp, Homo sapiens
gatgagcatttttcgacaaagcttatgtatgaaggttcaggcatggctcctccaagccagggaccccctggccctctgtc

SEQ ID NO: 593064 - DNA, 75 bp, Homo sapiens
gttggaagcagccgatccagcctgcggagcctgtggggcagggtccccagccccaccccagccccaaaggaggct

SEQ ID NO: 593065 - DNA, 50 bp, Homo sapiens
atggaatcatggatgctgccaattttgtagatgatgagctggagatcaag

SEQ ID NO: 593066 - DNA, 101 bp, Homo sapiens
ttacgtggagatcaagcgcagcgatggttttgacctgtagcagagaaccaattctggagaacagcctcacttctttgattgaatacttacataatgcattg

SEQ ID NO: 593067 - DNA, 100 bp, Homo sapiens
caaacatcttagggcagataatgcctttatgttacttactcagtccaaagcacttagaatctccacaccactaactggtgttaggtacattaaggagaat

SEQ ID NO: 593068 - DNA, 100 bp, Homo sapiens
ccatcctgccgtccttctccactttcgccagcccgtgccgcgagcgcggcctgcaggaggtgatggctggaccggcggaggaggcgggagcccattgtcc

SEQ ID NO: 593069 - DNA, 96 bp, Homo sapiens
aaagaccctttgcacaaatcaaggaaggaccatcgagacctgttcttgaatacatcgatctggtctgtggtgatgatgaaaaccctagcgcctatt

SEQ ID NO: 593070 - DNA, 99 bp, Homo sapiens
ggtgggggccacgccgcacctgcgcaacctcgccgtggccatgtgcagccgctacaaatcaaccagactattatgaagtggtttctcagcccattgact

SEQ ID NO: 593071 - DNA, 75 bp, Homo sapiens
cccacagaccagcccagcattcaggagaatgaggaaaatggggagcaggaggctgacaatgaggtagacgaagaa

SEQ ID NO: 593072 - DNA, 82 bp, Homo sapiens
tatgcagacacactcttcgatatcctggtggctggcagtatgcttgccccatgaacgagacgccctcctggctggctccctg

SEQ ID NO: 593073 - DNA, 50 bp, Homo sapiens
cctggataatgattgagccacctgtccagcagctcttcagtgggtcatct

SEQ ID NO: 593074 - DNA, 100 bp, Homo sapiens
cagaacgcagatcagaggtagtcggacctttcccgctggcgcgcagcctcagctagatacactgcctctaggactgggacagatagccactgagtacctg

SEQ ID NO: 593075 - DNA, 83 bp, Homo sapiens
caacaagacgcacccgtccatcttcgggatcttcgacgggcacgggggagagggtcacaggaagctcagttctacactctgcg

SEQ ID NO: 593076 - DNA, 75 bp, Homo sapiens
tcttgtgggagcaaaaccaacgcctggctcggagcagcagcctctgaggtgtcccaccggccttccgggttccag

SEQ ID NO: 593077 - DNA, 87 bp, Homo sapiens
ccacctgcccggtgcccgaggaggcagccaagctcgtagcctgccactccgtgcagacacctatggctgccgatgaaggctcagcag

SEQ ID NO: 593078 - DNA, 73 bp, Homo sapiens
gtcctggcgcgtccgctacatggtggctgacaagttcacagaggtatctacacaaaccctacctcatcagcgg

SEQ ID NO: 593079 - DNA, 116 bp, Homo sapiens
ctgaaaatggggcggaagaaaatacaaatcacacgcataatggatgaaaggaaccgacagaggttggcgatttgaaggagctgcagacactagacatttctaccaatcgtttgcta

SEQ ID NO: 593080 - DNA, 76 bp, Homo sapiens
tccgagcgcttttccccgcaggcccgctcactttgctcacagccgccgccatgatcctgctggaggtgaacaaccg

SEQ ID NO: 593081 - DNA, 74 bp, Homo sapiens
ctgggcccgcgtggatctctaagatgatgataattccgaagaaggcttccacactattcattcaggaaggcatg

SEQ ID NO: 593082 - DNA, 90 bp, Homo sapiens
gagatttccttgtagctgtcaatgagtatcaggaggcaatggaccagtatagtatagcactaaggggcaagattcttgccaagagaatta

SEQ ID NO: 593083 - DNA, 82 bp, Homo sapiens
tccgcgaggatgcgtgttcgcgggtgtgtgctgcgttcacaggtgtttctgcggcagaccatgaaatggaggctcagggggt

SEQ ID NO: 593084 - DNA, 90 bp, Homo sapiens
aacttgctaatggcaggcattttacaagactgctgagaaggaagaatttgaacatcaacagaaagagctggagaaagtttgcaaccccat

SEQ ID NO: 593085 - DNA, 75 bp, Homo sapiens
gggacgtcaccacctttttttcggggaaagcagagggccccttggacaggacttgatcatcttccctgacgactg

SEQ ID NO: 593086 - DNA, 75 bp, Homo sapiens
tcttcctcaaggtggggttcggggggccaccgaatcgctgtcacgccggcaggtcacgacccccaggagacctgg

SEQ ID NO: 593087 - DNA, 82 bp, Homo sapiens
tcctggctcttgccctcatcctggttctggaatcctcagttcaaggtcagcccaaggctgccccctcggtcactctgttccc

SEQ ID NO: 593088 - DNA, 75 bp, Homo sapiens
ctacaaccttcgatctcctgacgagtcttgggcgtctttggtactggcttttttaggggtctgcctggggattac

SEQ ID NO: 593089 - DNA, 100 bp, Homo sapiens
tgtctcgcagcctgcgagggttccagggagatcaaggacttcaaggatttctacctttccatagcagcggacaaggcaaaatctcagcaagttcggacct

SEQ ID NO: 593090 - DNA, 100 bp, Homo sapiens
gccaatttacgtgtcattatggaactacttatgaggaggcaggtggaagtcatcataaagtttctgtttcacccgtcgtccatgttcgaggactctgtga

SEQ ID NO: 593091 - DNA, 99 bp, Homo sapiens
aggatgctttgcagaaacttcataaatatatgcagatcatggaagggaagtggttgctgtgtatgttactggtgcttggaactgctattgttgaggctc

SEQ ID NO: 593092 - DNA, 73 bp, Homo sapiens
cgcgggagcacggcgacgccagcggcggtgaaatcccattctctggctggagacacagatggcctcaaatgag

SEQ ID NO: 593093 - DNA, 100 bp, Homo sapiens
gcaagaccgaattcagaaggatatcgacgtcgtgatccagaagtccagagctgaggactgcctgtttgcagtctcttgcatggcaccaagaatgttacca

SEQ ID NO: 593094 - DNA, 98 bp, Homo sapiens
ggcaggagccttccttacacttcgccatgagtttcctgatcgactccagcatcatgattacctcccagcaataccaagaaggagggtgacctgatagc

SEQ ID NO: 593095 - DNA, 89 bp, Homo sapiens
ccagaggcctgcacgcggggcgcgggccccgaaggctctccatcgaaggcaacattggcatcgtcctggattcaggtgatggcgtcacc

SEQ ID NO: 593096 - DNA, 75 bp, Homo sapiens
acagaactcattctcaccaataatagtctcgtggaactggttcgcaattcagaccctaatgatccaaatagagaa

SEQ ID NO: 593097 - DNA, 98 bp, Homo sapiens
aagacagaacctagaccagaagcaaagactatgcccaattcttcaactcctaccagccagatcaacacaattgataaataactgaagtgaagtgatgg

SEQ ID NO: 593098 - DNA, 82 bp, Homo sapiens
caaagagcaacatcgcagtggaaggccggaggacgtctgtgccgagccctgagcaataacgaaggaggcccaacttcattca

SEQ ID NO: 593099 - DNA, 75 bp, Homo sapiens
gagcgacagagacaagctgagcttgccgcacaaaaagctagagaggtggacatcgagcagctggatccccgcggc

SEQ ID NO: 593100 - DNA, 75 bp, Homo sapiens
ctgtgatcctgcacgcccagcccgggctccaggtgatttccatggtgatggtggctgtgggtgtctacgctcggc

SEQ ID NO: 593101 - DNA, 83 bp, Homo sapiens
ccgggggcagccgccatcggcagcgccaggcatgtcgggccccaggcctgtggtgctgagcgggccttcgggagctgggaaga

SEQ ID NO: 593102 - DNA, 100 bp, Homo sapiens
ggccctggacacagcaatatctctgggctttcacaggagccaaaaacctgtatatcatctccgtgaaggggatcaagggacggctgaacagacttcccgc

SEQ ID NO: 593103 - DNA, 82 bp, Homo sapiens
ctttgaccatggctgtgactctctttccacagggatcatagacggtatttctatgtaaacgaacagtcgggcgagtctcagt

SEQ ID NO: 593104 - DNA, 72 bp, Homo sapiens
ccgctctgggatcccggccaccagcaattgtccggagcttcagtttcagcgactcacccgagaactggaagt

SEQ ID NO: 593105 - DNA, 98 bp, Homo sapiens
aacaccaggccaatgcatcccattcagcaaagtagagttccccatggtagaatgtggacccaagagccatatcagtgctagcaaaatggcagaattca

SEQ ID NO: 593106 - DNA, 100 bp, Homo sapiens
aggagatgtacagaatgggccaagctccactgttcagatgcaaagctgtccctttccccccaacacatcgcttgacatctgaagaagtatttgatttgga

SEQ ID NO: 593107 - DNA, 82 bp, Homo sapiens
caactgcagagcatcccggctgagatcgagaacttgcagagacaatgcagatcttcgtgaagactctgactggtaagaccat

SEQ ID NO: 593108 - DNA, 75 bp, Homo sapiens
acctcttccagttggaattgaagaatattcccaagtccttcacccggagggtcaccatgaagttcaatcccttcg

SEQ ID NO: 593109 - DNA, 90 bp, Homo sapiens
gcactttgggagctgctgtgttaaatggattattatacgctgtgggaggctttgatgggagtacagtgccttgctttccatgacatttcc

SEQ ID NO: 593110 - DNA, 96 bp, Homo sapiens
cgggcggccgcggcgcggcgggaccatggagctcagagcgcagccccggcgccggcggcgggaccgcggaccgttcagagtctgtcatctgaacca

SEQ ID NO: 593111 - DNA, 75 bp, Homo sapiens
gctgacctgcctgggcctcaacgtcttgttcctcactttgaatgagggtcacgggatggatagccggcctgccat

SEQ ID NO: 593112 - DNA, 100 bp, Homo sapiens
tcgctgcctcgcctgccggtcccggctgtcaaagacactgtgaacagggatgcagtgaccagcctttgctttggccggtacgggcgggaggacaacaccc

SEQ ID NO: 593113 - DNA, 88 bp, Homo sapiens
gattcgcagtggtcgcttcttctccttgtgtatccaaagtgtgtacatcagtaagatcataagcagtgatcgagatctcttggctgtg

SEQ ID NO: 593114 - DNA, 73 bp, Homo sapiens
tttgacactccagaagagaggtatcagaagcttaaaaagggcatgagccagaaggagagctctaagtctgcca

SEQ ID NO: 593115 - DNA, 50 bp, Homo sapiens
cgtggaggcagaggtggcatgggggcattcttcttgagcaccgagaaaaa

SEQ ID NO: 593116 - DNA, 75 bp, Homo sapiens
gacctcgctgtacgccgagcacccaggcgactgcctcatcttcaagcctcccgcgacgatgcccctcaacgttag

SEQ ID NO: 593117 - DNA, 83 bp, Homo sapiens
aaggactacagtatgcacttaatgtccctgtgtccctggccagtgtccttccacctgtccacaagcatggggaacatcttcgc

SEQ ID NO: 593118 - DNA, 101 bp, Homo sapiens
tcggtggactccttcggcagtccacccaccgccgccgcctcccagatatggctcgtggacagcagaaaattcagtctcagcagaaaaatgccaaaaagcaa

SEQ ID NO: 593119 - DNA, 90 bp, Homo sapiens
gcaggtcagcagtctccactggaaaaaaagatcttgggaacgctgtgaggagctccgtgttgaattgttatctatccatcagaagaaggt

SEQ ID NO: 593120 - DNA, 98 bp, Homo sapiens
ttgttgctcccgcctgagcccagcccccagaaaggattgtgacatatcgttggacccagaattgaggtctgaatttcctgctgctgttcacaaagatg

SEQ ID NO: 593121 - DNA, 100 bp, Homo sapiens
tttatattttattcctcttcctatccaatccctgccttttgagtccaggtggacccagatgatgtggtaccagttggccaaagaagagcctggtgttggt

SEQ ID NO: 593122 - DNA, 95 bp, Homo sapiens
gaggatggcgtgcgaggtcgccgcggggctggccgccatgcacaagctgcacttcctgcacagggatcgtgggactttaccagatcggtttgtaa

SEQ ID NO: 593123 - DNA, 75 bp, Homo sapiens
tgatgcggctcatcgagaagcgggctttccaggacaagtactttatgatagacacgatgaggcgagtggtacgac

SEQ ID NO: 593124 - DNA, 100 bp, Homo sapiens
gtcgagactggaggctgagtgctaaactgtgtggggcgcggatgggatccagctgttagtcgggtgtcatggagaaactccagctgggcccagagattct

SEQ ID NO: 593125 - DNA, 100 bp, Homo sapiens
atttatgtcacacgggtgtctgaaggaggccctgctgaaatcgctgggctgcagattggagacaagatcatgcaggaaattgctttggagatgaggaaac

SEQ ID NO: 593126 - DNA, 96 bp, Homo sapiens
catcccttcttgttgctctgccctgaaaataacctggctagtcaccctttcaagatacatcgagatatttccaagcagaaggaatgaagttcgaac

SEQ ID NO: 593127 - DNA, 51 bp, Homo sapiens
ggacacacaggatcaattacatctttacagaccaatgatgcgagctcagag

SEQ ID NO: 593128 - DNA, 75 bp, Homo sapiens
gtccgccactgcgtggcctgcgggctcctgcgcacgccgcggccgaaaccgggtttccatgctgagctcctgccc

SEQ ID NO: 593129 - DNA, 100 bp, Homo sapiens
caggctcagtctgcggccaagactccgtcctgcaagtaaggtacctgccgtgggcagatctgagctttcttcttggacaccccatacccacagtcctcca

SEQ ID NO: 593130 - DNA, 100 bp, Homo sapiens
ggaagaccccaagttcaaggaactggtcaagtggaatgcagtagccctctgggcctgggatattgtggttgataactgtgccatctgcaggaaccacatt

SEQ ID NO: 593131 - DNA, 82 bp, Homo sapiens
ctctacttcaacccgcaccttgtgttccggaagttccaggtttaactatagatcaacacatcatcttgcatctcatgggttc

SEQ ID NO: 593132 - DNA, 100 bp, Homo sapiens
caagtaatggtgcaaagcctgaaatttggagcaagaggtggtggtggccttcccccgaagaaatttggtaatcctggggagcgtttgcgtaaaaaaaagt

SEQ ID NO: 593133 - DNA, 90 bp, Homo sapiens
ctcggccccgccagcagcactgtggaggccgtcctcgcggaaggagagttttacatggaagtggcttacagaaacttggcgctgaggtgc

SEQ ID NO: 593134 - DNA, 98 bp, Homo sapiens
caggacttcaacactatgtttacaaattgttacatctacaacaagagtaaagatgggaaaaccccactacacatgactgctctccacggtagattctc

SEQ ID NO: 593135 - DNA, 76 bp, Homo sapiens
tgatttcagggaaaaaagagtgctctctgatccttctgacttaccaaggaatgccttcagaatttttaccattctt

SEQ ID NO: 593136 - DNA, 107 bp, Homo sapiens
ccaaccatcgttgggaaatcatctctaaatcccatcctctttcgaggtgttggtgagaaagatcagtctaaagaaaaggagaagaaagtgaaaaaaacaattccttc

SEQ ID NO: 593137 - DNA, 97 bp, Homo sapiens
agagctcgtgcttcgggatggaaacctatggttatctgcagagggagtcatgctttcaaggacctcatataacgaaggaggcccaacttcattcaat

SEQ ID NO: 593138 - DNA, 95 bp, Homo sapiens
ggaagatcattttattgacattgctgaagtggagacagtgcaactgcagatagaagacctgactcgtaaactgcgcacaggagacctgggcatcc

SEQ ID NO: 593139 - DNA, 98 bp, Homo sapiens
gcagtggacttctttgccctgaagaactgcagtgaaggagcctgcagcaccccaatgtcctccagtgcctgggtctgtgcgtggagacgctgccgttt

SEQ ID NO: 593140 - DNA, 96 bp, Homo sapiens
catgaagaggatggatcttctgttacaggaggttccagtggcatcgggaagtgcattgctatcgagtgctataaacaaggagcttttataactctg

SEQ ID NO: 593141 - DNA, 100 bp, Homo sapiens
ctttggacgatcttcagctggccaacagcaccatcattgcatttacctcggatcatggctcatcggaacctgtcccagctccctaattttgccttctctg

SEQ ID NO: 593142 - DNA, 100 bp, Homo sapiens
acctgttcacgcaggggaaacttgaacattcgcaggtccaagccttgtcatcggccagtaagtttgaagcagagttgaaagctgagcaagatgagcggaa

SEQ ID NO: 593143 - DNA, 82 bp, Homo sapiens
cttgccggaagcggagagcggctgatcgcagtccggagtgcaaagagccgtctcactcttctctctgaacgacccggccctg

SEQ ID NO: 593144 - DNA, 75 bp, Homo sapiens
accaccgccctggccatctaccatgtggcgggtcgttaaccaagctggcctactattcaacggtacagcacaaag

SEQ ID NO: 593145 - DNA, 75 bp, Homo sapiens
tgcaaggactccaaagtggtgaggacctctgccctacccccactggactggcctctgcccagccaatatgagcag

SEQ ID NO: 593146 - DNA, 75 bp, Homo sapiens
gcggggccacgctgcgggcccgggccatggccgccgccgatgccgagttgtcgagatgtccacagaaggaggatt

SEQ ID NO: 593147 - DNA, 100 bp, Homo sapiens
cggagccgcagaggctcccgggctggactcaggcttctcagaacgctgcgatgactggggactagacaccatgaggcaaatccaagtgtttgaagatgag

SEQ ID NO: 593148 - DNA, 75 bp, Homo sapiens
caaggatagacttcaaaagatctgtgatctactccaaaacagtagtggtattcatgggtagtttgaaatatccag

SEQ ID NO: 593149 - DNA, 75 bp, Homo sapiens
gtcacaacagatgaagacagcaccaggttccaaatcatcaatgaagcaagtaagattgtcacagccctggccatt

SEQ ID NO: 593150 - DNA, 101 bp, Homo sapiens
gagacatttctggctctgaaggcgaacgcttcgctggccatttaggagctctgctcaaagccagacggtacaactgtaactgctttaagattatttaagaa

SEQ ID NO: 593151 - DNA, 100 bp, Homo sapiens
cctacatcccacagagatacccagacaacaggatcgtctcgtccaagcttattcagctgattctgaatcatcttacactaccagacctgtgtagattagc

SEQ ID NO: 593152 - DNA, 100 bp, Homo sapiens
ctggtatcttgttgacaagatttgcctctgcacagtttcccaatgctgttctctggtccaccaagggctatgaggctcaccccttggatggtgctcagaa

SEQ ID NO: 593153 - DNA, 90 bp, Homo sapiens
gactatcacaaggagcaggcggcccagctgcggaacctgatgctgaagtgcattgagctggatgagcggctgaaagccatggaccaggag

SEQ ID NO: 593154 - DNA, 83 bp, Homo sapiens
gtggcaaccagatcggtgccaaggttatggaaacaaaggacatgctttacatcgtcactgaatttgctaaaaatggagaaatg

SEQ ID NO: 593155 - DNA, 156 bp, Homo sapiens
acgagaaggaaagcaccatgacgtccatccatttcgtggttcacccgctgccgggcaccgaggaccagctcaatgacagtgagtgatggattggaactgagaccgaaatataatggaattttacattgcttgactaccatttggaaacttgatgga

SEQ ID NO: 593156 - DNA, 88 bp, Homo sapiens
ctgccaaatcttctccaatgatggaaacaatcaacatggtgtgtttccattgtagaaaacctggtcatggaattgcagattgccccgc

SEQ ID NO: 593157 - DNA, 100 bp, Homo sapiens
tcgctgtatcaagccaaacatgcagaagatgatagcttgtcctgaaactgagactcctgccgtgataacgtgtgacccactgtcccagccttcccctcag

SEQ ID NO: 593158 - DNA, 46 bp, Homo sapiens
ctgacggcgtgaccgacccgagccgtacagaacctgctaaggccat

SEQ ID NO: 593159 - DNA, 51 bp, Homo sapiens
gctgaagccaacctcccgagcaggagtatggatgtgtccaacagccaaaaa

SEQ ID NO: 593160 - DNA, 82 bp, Homo sapiens
ctggccgaagtcttttttacctcctgggggcagggcagacgccgtgtgtctgtttcacgatccagcacacggaagacatgga

SEQ ID NO: 593161 - DNA, 100 bp, Homo sapiens
ctaccggaaggccatcgccaaggagtgagctgttgccgcagaatgggctgctggctcctgccctgcttcctgtgatcgagccggccctgaggactctgtg

SEQ ID NO: 593162 - DNA, 100 bp, Homo sapiens
caatgtactccagttgctggatatccaagcctctcagcttcggagaatggagtcttccatcaatcatatctcacagatcacagattctgctggccatatt

SEQ ID NO: 593163 - DNA, 75 bp, Homo sapiens
taactcctgccaggcagtgcccttcccggagcgtgccctcgccgctggttacaggaggttccagtggcatcggga

SEQ ID NO: 593164 - DNA, 82 bp, Homo sapiens
gacgtccaatctgagcgtgctgcggacggcgctgcggtacatccagttactccacaggatccgctgaacataggatgttgcc

SEQ ID NO: 593165 - DNA, 100 bp, Homo sapiens
ccgacgacgacctgtttgtggacttggggagcgctatcatggtgaacttacttcagattgtgcgggaccactgggttcatgttcttgtccctatgggatt

SEQ ID NO: 593166 - DNA, 124 bp, Homo sapiens
gaagaccacaataaaagagacctctacttagctcagcaattcttaccttgaagaaggagagacgaccatcttgcaactagaaaaagatttgcgcacccaagtggaattgatgcgaaaacagaaa

SEQ ID NO: 593167 - DNA, 90 bp, Homo sapiens
ctggtccatgttgcccatgaccttatccagaaactctctcctttatgtcacgcatctgatgaagcgaattcagagaggcccagtaagagg

SEQ ID NO: 593168 - DNA, 100 bp, Homo sapiens
cagagatcaaaacaagccctccaggaactcacagttttgcggcctccaggtggtggatccaatttttcattaggttttgatgaaccaacagaacaacctg

SEQ ID NO: 593169 - DNA, 101 bp, Homo sapiens
aaacacttcctataaatctcgcccaaacaggaaaggccaaacgtaccaagaaagtcgggatcgtcggtaaatacgggacccgctatggggcctccctccgg

SEQ ID NO: 593170 - DNA, 100 bp, Homo sapiens
cgacaggagttcatctacccggagaagcaggagccctactcggcaggtagtaagcattaataatgtctttcatctttgagtggatctacaatggcttcag

SEQ ID NO: 593171 - DNA, 75 bp, Homo sapiens
cttatggcggcgctggagagggggcgctgagctgttggggtgacttaagagattaaaattaatttggttgctgtt

SEQ ID NO: 593172 - DNA, 105 bp, Homo sapiens
gcagatcgggagcgcaaggtcgccctcaaggccatgatcaaaaccctggtccgacccccagtggcactaacgtgggatcctcagggcgctctcccagcaaagcag

SEQ ID NO: 593173 - DNA, 75 bp, Homo sapiens
ccaaagtgaaccagggtctcatccgcatgtataaggccgagggagctgtcaccatgcctcactcgtacccagccc

SEQ ID NO: 593174 - DNA, 51 bp, Homo sapiens
cgaagagagctctgttgttgcaatgcaactgtgaaagttccttttcttaag

SEQ ID NO: 593175 - DNA, 100 bp, Homo sapiens
gactgactggggttctgagactccctgtcccggaccgcaggtatggcatttcaaatatagatacaaccattgaaggaacgtcagatgacctgactgttgt

SEQ ID NO: 593176 - DNA, 50 bp, Homo sapiens
ccaaagacagcatctgagcacagaaagggattcgggttcgtaactttcga

SEQ ID NO: 593177 - DNA, 90 bp, Homo sapiens
ttcagcctcccggtcaaagtcaactgcaagcgagttatgtggagtttagacccagccagatattgccgatgtttctgtcaaacagtgtca

SEQ ID NO: 593178 - DNA, 100 bp, Homo sapiens
cagactacttatgaatttgcaaaacgacagagcatattggttctgtgggatattaataagctatccgtggtcctgaaccagttatgtgtgttgcatgaga

SEQ ID NO: 593179 - DNA, 80 bp, Homo sapiens
gatccagcctgcggagcctgtggggcaggtgctggagatcagaatttatttacctctgtttatccaacgctctctcagca

SEQ ID NO: 593180 - DNA, 98 bp, Homo sapiens
gaaagcctggtggaccgagagaaagagctggctaccaaggctattcaggcagctatcagccaggcctttaaaaccccagaggtcatcagattgtttgc

SEQ ID NO: 593181 - DNA, 75 bp, Homo sapiens
gatatttagagatggtgaagaagcaggtgcttatgatggacctaggactgctgaattgctggaatccacaaatac

SEQ ID NO: 593182 - DNA, 83 bp, Homo sapiens
aaagaaaataatgggaaggaagaagtatccaagaaatacactttcgggaaatggcctctaaatcctggctgaattttttaacc

SEQ ID NO: 593183 - DNA, 100 bp, Homo sapiens
gagagatacagtggcaatcaggttctcttttgtcatccctttcaagccctgatatcttcgactccccaagtcccgaagaggataaggaggaacacatttc

SEQ ID NO: 593184 - DNA, 117 bp, Homo sapiens
gccgcctgcttcctctgctcgcggttagcccgtcagtccctgctctgtgcgcgcctccatctgggccatggatggggcaagttaaagtcttcagagccctgtatacgtttgaaccca

SEQ ID NO: 593185 - DNA, 75 bp, Homo sapiens
cagctgcatgttcaagaagtggccggagagttctgcatgttgattctacctggagtagaacagaaaaattattat

SEQ ID NO: 593186 - DNA, 101 bp, Homo sapiens
tggaggaagcagaaaccagaaactttaaatcttgagaaaagaagattgtctatcatgaaggaggttccaatcgttgcacttactgctactgcaagttcttc

SEQ ID NO: 593187 - DNA, 82 bp, Homo sapiens
atgtctgcgagccaggattcccgatgcatcactgtaagcgataccgctcccctgaaccagacccgtacctgagctaccgatg

SEQ ID NO: 593188 - DNA, 100 bp, Homo sapiens
ttcttccatcccagggtacaacagaacagattctgtgattaggaaagatatgatccgccaaatgatgattaaaatatttcgctgcattgagccagagctg

SEQ ID NO: 593189 - DNA, 82 bp, Homo sapiens
ctgcagaaggtctctggagacatcttcagcagcttcgagagctgtgcccaggagtgaacaaccagccctacctctgtgagag

SEQ ID NO: 593190 - DNA, 95 bp, Homo sapiens
ccgccgccgccgcccagagactgctgagcccgtccgtccgccgccaccacccactccggacacaggcagttgtgaaaaacttcaggacaaaaatg

SEQ ID NO: 593191 - DNA, 80 bp, Homo sapiens
gttctctgtcttttcaaacagaactcaagctccatgaggagatgtttcattgtcgagagcagtcatgatggcctgcactc

SEQ ID NO: 593192 - DNA, 100 bp, Homo sapiens
gcgcaccgggcatagtggttggagtttctgtagatggaaaagaagtctggtcagaagcattccaaaatatgcccggtgctatccgcccagctgctcctag

SEQ ID NO: 593193 - DNA, 75 bp, Homo sapiens
tcatcagtgcctttggttcagttctgagtgatcctaaagcactgaaagagaacagctcagaggttgtacagcctt

SEQ ID NO: 593194 - DNA, 101 bp, Homo sapiens
ccatgggccagaacgacctgatgggcacggccgaggacttcgccgaccagacaatgcagatcttcgtgaagactctgactggtaagaccatcaccctcgag

SEQ ID NO: 593195 - DNA, 100 bp, Homo sapiens
accgaagtgactgtctaggagagcatttgtatgttatggtgaatgccaaatttgaagagcttcttcgagacaccttcacttccctgggctatgaagtcca

SEQ ID NO: 593196 - DNA, 83 bp, Homo sapiens
cggatcgaccggagcagagagctggcgagcaaggacactttacttcggccgaagacttaaacctgttgattgccaaaaacacg

SEQ ID NO: 593197 - DNA, 82 bp, Homo sapiens
agagctccgaggccgagagccgacccaacgatctgaactcctcagttgattatggaagattcccacaagagtaccacgtcag

SEQ ID NO: 593198 - DNA, 98 bp, Homo sapiens
cgcgatggctgcgcagggagagccccaggtccagttcaaacgaagtgatgatgacgacagaagcagtgacaggaaagacggggttcttgaggaacaaa

SEQ ID NO: 593199 - DNA, 82 bp, Homo sapiens
gtggggtgtcggcgcctcattcgggtggagctgagccggagacaggctgaaggtgatgtggccgccctcaaccgacgcatcc

SEQ ID NO: 593200 - DNA, 75 bp, Homo sapiens
aagatgatgatatccttctcaaccttgtgggatgtgaaaactctgttactgaagttaaacacagtgggaatatca

SEQ ID NO: 593201 - DNA, 75 bp, Homo sapiens
agccccttggggccagcacccaggttgtcccaccagactcaaagtcctctggctcacagcctctcagccctgcag

SEQ ID NO: 593202 - DNA, 95 bp, Homo sapiens
gaatgtttgggtgctgttgagtgttttgaagaagaagacagtaatagcagggaatcattatccttggctgaattaattgggaatcttggctactg

SEQ ID NO: 593203 - DNA, 90 bp, Homo sapiens
gtcgcccgcctcgagccagcccgccagcatgccccagtccaaagtgccccgactcggcttgcaagcaggacctgctggcctacctgcaac

SEQ ID NO: 593204 - DNA, 100 bp, Homo sapiens
gttttccacagagccaggggcaggaccctggccgcgtttcccgcagtggtctgcaagaagaatctggacagtaccactgtggccgtgcatggtgaggaga

SEQ ID NO: 593205 - DNA, 104 bp, Homo sapiens
agaggttaaagagacccgttcagagtcctacagtggcaggtcctgagcttccgaagcctgaagtcatctcccagctggagcaagggaccgagctatgggtggct

SEQ ID NO: 593206 - DNA, 80 bp, Homo sapiens
agccagtgggaccccacgtggctgtacctgtgcaagagagggggtccactggacggggcctgagctacaacttcacccac

SEQ ID NO: 593207 - DNA, 100 bp, Homo sapiens
ccggatggttacattgtcaaatcacagcactcagggtggagagattcaaccagttagcgtgaaagttggagataaagttcttctcccagaatatggaggc

SEQ ID NO: 593208 - DNA, 80 bp, Homo sapiens
aaatttcagacatacacaccaaattgttgagagtacttcttgcaagggatatgcattagcacatactcaagaaggggaag

SEQ ID NO: 593209 - DNA, 100 bp, Homo sapiens
ccggcatttcgtccaaggccatgggcatcatgaattcgtttgtgaacgacattttcgagcgcatcgcagattacgtgtgaaaatgaacttgtgcaaaccc

SEQ ID NO: 593210 - DNA, 50 bp, Homo sapiens
gtgggagaagagtgtgacttcgagaaatttggagacagacaacttgtcac

SEQ ID NO: 593211 - DNA, 75 bp, Homo sapiens
tcagaaggcacagattagaggaaggaagagcctttctgagaaaagtctacagcattctttctctgcaggttctct

SEQ ID NO: 593212 - DNA, 83 bp, Homo sapiens
ttgaactcatccggcagaataagagactggacgctgtgagcaaatgcagccctgaggatttggctactgcatataacaacagg

SEQ ID NO: 593213 - DNA, 100 bp, Homo sapiens
gtcgcctggaggaccagtatttcccatggaggaggcggggtttcaccatgttgcccagactggtcttgaactcctgagcttaagcaatccacctgcctcg

SEQ ID NO: 593214 - DNA, 100 bp, Homo sapiens
cctcggcctcctaaagtgctgggactgcaggtcacgacatttagtgaggcacgtgtggttctcaaatataggcattctgatgggaacttgtgtgttaaag

SEQ ID NO: 593215 - DNA, 82 bp, Homo sapiens
cacagctcccgaaagcgacgttcggccaccggaggagcgggagccaagcagcagcccctgtcaaagggaacaggaagcagtc

SEQ ID NO: 593216 - DNA, 50 bp, Homo sapiens
gaagatctccattcctgaggaggagaagactggagcgctcagcctgccac

SEQ ID NO: 593217 - DNA, 75 bp, Homo sapiens
gagtcctggtccttctgcagaggcctgagcaggtggtattaaagataatcaaacattatcaagaagaaggacaag

SEQ ID NO: 593218 - DNA, 75 bp, Homo sapiens
tgtggggggattctcgacctgctaacagaactggaccttttcggcaaacccttttttacacgaaacccttctgag

SEQ ID NO: 593219 - DNA, 146 bp, Homo sapiens
tgctggtagcctgtcaacaatgttccgtgttgaatatgcatctaaagttgatgagaactttgactgtgtagaggtagcacaggcggagtgcagcggaggcccctgccgctgccgtcatgccgttcccgtttgggaagtctcacaaa

SEQ ID NO: 593220 - DNA, 100 bp, Homo sapiens
cgacggtggcggctctcggagccggcgcgaatccggcccccgcagcgggacccgggctctgacgcccgctctgcggcttcggtgtttgaacaggccacag

SEQ ID NO: 593221 - DNA, 100 bp, Homo sapiens
acatttagcgcatcatgtgatccgggtctctaattaacagaagatggcaaagcccagccacagcagctatgtccttcagcagctaaacaaccaaagagaa

SEQ ID NO: 593222 - DNA, 95 bp, Homo sapiens
tgatgtcaagttggttgctgatttccaaagactgggctggcttagatgaagatgaagatgcacatgtctgggaggataattgggatgatgacaat

SEQ ID NO: 593223 - DNA, 90 bp, Homo sapiens
gactccaggatttctgaagactattgtggaagaagcatccattaaggctttactgcagatggtgcgtgacgagagccaccagatcctggc

SEQ ID NO: 593224 - DNA, 75 bp, Homo sapiens
caaagagcagatgccaaatctggcagttgctatccctgcccagaaaccgtagatgtgaagtgtaattgtggcaat

SEQ ID NO: 593225 - DNA, 101 bp, Homo sapiens
ggacgaggacgaggacgtcaaggttgttcagaatgaagaaaatgaaaactgtttgaagaaagtggatccccagctattgaagatggcattaactccttacc

SEQ ID NO: 593226 - DNA, 101 bp, Homo sapiens
agaagatccagctttgttgaaaagcgaagccgttagtcccttaatacaaagggatcaaaaccattcaagtgcaagatatgccattttgcaacagctcagct

SEQ ID NO: 593227 - DNA, 125 bp, Homo sapiens
agactctacctgccctaggcgttcgtgaagagaagcagctgttgctattggaggagagagacaagagagacacctccaacttcgacaaagagttcaccagacagcctgtggaactgacccccact

SEQ ID NO: 593228 - DNA, 83 bp, Homo sapiens
agcggggcaggagcgcttccgcaccatcacctccacgtccgcgggagagctgtggggcttggtgagtgtttcgtggcctctcg

SEQ ID NO: 593229 - DNA, 75 bp, Homo sapiens
cctaaaaaagcagaatggaatgggccttagcattgttgcagcaaaggttgtggcagcactgcctgaaggtatgag

SEQ ID NO: 593230 - DNA, 80 bp, Homo sapiens
tgttggtggactactctcagcctactatctgtctggagaagagcaaataaagcatgagctgttggaatcccaactcagag

SEQ ID NO: 593231 - DNA, 75 bp, Homo sapiens
ggggcacccgtgtacatggccgccgtcctggaatacctgacaggtaagaatgattgatgttggctgatattggag

SEQ ID NO: 593232 - DNA, 75 bp, Homo sapiens
tcatcacccaggcgcggagggaagacgccctggtgctcaccaagcaagtctgaagatgatgagaaactgaaaaag

SEQ ID NO: 593233 - DNA, 100 bp, Homo sapiens
gcagagcgtgatgggctaccaggtctggagcagtgcagttgtgaaagcacagaaaactgaatctgtagataacgagggagaatgaattgtcatgaaaaat

SEQ ID NO: 593234 - DNA, 100 bp, Homo sapiens
ggatggcgcggccgagtccccgtacggccacccggcggaccatcatggagcagttcaaccctagcctccggaacttcatcgccatggggaagaattacga

SEQ ID NO: 593235 - DNA, 50 bp, Homo sapiens
ggatggacgactttctatgagctattcaagatctctggcagtggaggaag

SEQ ID NO: 593236 - DNA, 75 bp, Homo sapiens
ggcttctctcgtcaaaaatggtgcagaatttacggaacgagttgaagcagttaatatggctgaaggaatcattca

SEQ ID NO: 593237 - DNA, 96 bp, Homo sapiens
cagagccacgagtgtggctggtgtggcaatgaggacaaccccacactgggacgacccagcctccggctgtgacccccagcctcacacctgcctctg

SEQ ID NO: 593238 - DNA, 83 bp, Homo sapiens
cgcctccgccgccgcctgaggaggcgagctagccgggagttacaccgccaccgccagtctctgctttctatccgtcaagatga

SEQ ID NO: 593239 - DNA, 121 bp, Homo sapiens
gttcactgcccgatatctggacctcttcaccaactacatctcactctacaacacgtgtatgaaggtggtcttccgggatccgtatcggtttaagaagcggacggagctgttcattgccgcc

SEQ ID NO: 593240 - DNA, 83 bp, Homo sapiens
agtgggcagagcagaaaacgcctgtgttccaccgttcaccatcgaggtgaagaggatgaagcatcttcccaaactgatttaag

SEQ ID NO: 593241 - DNA, 100 bp, Homo sapiens
cagatctcgaggaagttctcgtcctgacagatctccagctattgaaggtatttgattttcatcaagcagctgatggtatccaggaacaacagagacaaga

SEQ ID NO: 593242 - DNA, 101 bp, Homo sapiens
ttggactttatccagtcacacctgcggaggttctgccttcagtaattgctggaatccacaaataccaaactatggccattgaagctgaccttggaggtggc

SEQ ID NO: 593243 - DNA, 82 bp, Homo sapiens
ctcctacgtttacctgtccatgataagagatgctgcctatttctataagcgaagccagtgctacaaagacgctttcagatgc

SEQ ID NO: 593244 - DNA, 75 bp, Homo sapiens
tcggatagtgggctctgtagaattcgacagtatgatttcaggtatgctgctgaaagtgggaatcctctacattgg

SEQ ID NO: 593245 - DNA, 100 bp, Homo sapiens
gcagcgacatcaccaagctggaggtggacgccatcgtcaacgccggagccaaaaacctgtatatcatctccgtgaaggggatcaagggacggctgaacag

SEQ ID NO: 593246 - DNA, 98 bp, Homo sapiens
agagccctggaatatgaagagacatgcgatggtagatcaacccccaggtgtcatggagaaactccagctgggcccagagattctgcagcgggaaaatc

SEQ ID NO: 593247 - DNA, 95 bp, Homo sapiens
ggcacaggaccagactcaagacacacaactcataacagttgatgaaaaattggaagaggcagaaatccaggcagaacttgaacgtttggaaagag

SEQ ID NO: 593248 - DNA, 82 bp, Homo sapiens
ctcgtggacaagtttgcagatcgggagcgcaaggtcgccctcaaggccatgatcaaaactacatgggttgtgtggaggtcct

SEQ ID NO: 593249 - DNA, 100 bp, Homo sapiens
agtctggctaacttgtcttccactaaagagttggacctgtcaggttcgatacaagaggctgttttcctagcgtggcttgctgcctttggtaagaacatgt

SEQ ID NO: 593250 - DNA, 75 bp, Homo sapiens
aagaggtcccaatcccccactctttccgccctaatggaggtctccagtttcggaactggagctctgctatcgaag

SEQ ID NO: 593251 - DNA, 100 bp, Homo sapiens
caaacctccctgcagaccaatggacaccttctaagagtttggcgagtcagtgactgaagcgcccgtccattccaagtgaagtttagcaactgcaatggaa

SEQ ID NO: 593252 - DNA, 101 bp, Homo sapiens
cgatctaagatggcgactgtcgaaccggacccagatgatgtggtaccagttggccaaagaagagcctggtgttggtgcatgtgctttggactagcatttat

SEQ ID NO: 593253 - DNA, 100 bp, Homo sapiens
agaaactcagaggcaacagcactcttactgtcaggccagcctttgctctatctccaggagtccaacctataccttctcagggaggcaaactagaaatagc

SEQ ID NO: 593254 - DNA, 100 bp, Homo sapiens
ttcaaacctggaagaaggaggaacatggagaggagagcagcgggcccaggctgggcagcctaaaaatggctacaaacttcctagcacatgagaagatctg

SEQ ID NO: 593255 - DNA, 82 bp, Homo sapiens
cgggtctggagtgcgtgggggaccggctgttggcgggttgaagaagcctcagcggaggcgatacggcctcctcgccaacact

SEQ ID NO: 593256 - DNA, 100 bp, Homo sapiens
aacctcctgtatctggagctgggagacaagcccgcgcccaacaccttctatgtagagtcttgctctgttgccaggctagagtgcagtggcatgatctcgg

SEQ ID NO: 593257 - DNA, 100 bp, Homo sapiens
ccaccctgtgcctgggctactacaagaacattcacgacatcatccctgacagaagtggcccggagctgggggcttgcacccttgctcggaggaatgcaga

SEQ ID NO: 593258 - DNA, 100 bp, Homo sapiens
tttgatggccatggcataaggaactctatcccaggaatacagctttgcattaggactttgcctcccgggccaaactggcagttcaaaaactagtacagaa

SEQ ID NO: 593259 - DNA, 100 bp, Homo sapiens
ggcatcaccgtgaagcagaagagactttgagaatcactacaagaaaaactccttgtggtgaaggttctaagacgtgggatcgtttccagatgagaattca

SEQ ID NO: 593260 - DNA, 100 bp, Homo sapiens
gggaaggaggccgagccgggatctcaggtcctcgggggcggcggccacgccaaggacgggtttctgggtggagcggacccctgtgcacgaggcagcccag

SEQ ID NO: 593261 - DNA, 110 bp, Homo sapiens
tgtttctgcagagttttgcacaaaatctgttcccatgcaaaccaatgagggagaagtatcggaagaaagcagttccaaggacataagcagatgttcaacccaacagagga

SEQ ID NO: 593262 - DNA, 99 bp, Homo sapiens
ggcgctgccccctctgcgggaagcgggcggccccggccgcctccgcgagggcaccatggaggtgaatgcagctgtcaggaatgacaggaacaagaaaaa

SEQ ID NO: 593263 - DNA, 119 bp, Homo sapiens
gagagaagtttaagagaagaaatggacatgattgcctaaatcagccaaacacaggggcgccaatgcttcggcattagagaaagagattggtccagaacagtttccggtcaatgagcact

SEQ ID NO: 593264 - DNA, 74 bp, Homo sapiens
gtcgcggaccatgggcgacaaagggacccgcacctgtggaatcctctcaagaggaacagtcattgtgtgaaggt

SEQ ID NO: 593265 - DNA, 98 bp, Homo sapiens
gctgcacctcccgcgccgcacggtggacgagagaatctggacgaggctagagaacagaaagaaaagagtcctccagaccagcctgcggtcccccaccc

SEQ ID NO: 593266 - DNA, 96 bp, Homo sapiens
cccttctcaccgaggaagagcgggagaaaggcaacatccatttttcaccctacatgaatccaaaggaacagatgtggcatcttttgtaaaactgat

SEQ ID NO: 593267 - DNA, 75 bp, Homo sapiens
cggggctgaagaagcagttctacaaggcgagccagggcgcaaaccagaagaagagggtgtggaagataacgggct

SEQ ID NO: 593268 - DNA, 75 bp, Homo sapiens
cggagcccccggcccaagggcgacttctccagccgggcccgcgaagtggtacttggaaaaatggacaaggattgt

SEQ ID NO: 593269 - DNA, 87 bp, Homo sapiens
cttggaatagtagcaggcggcggcggcggaacgccaggcagaatgccagaggattcaacatgagcatacctatgcctgggcatccag

SEQ ID NO: 593270 - DNA, 75 bp, Homo sapiens
gtgcagttcccaaggaggcttcaagacaaagggccccttacacaccagacaggtcttgagagctgatgacaataa

SEQ ID NO: 593271 - DNA, 75 bp, Homo sapiens
ctaaacttcacaaatggttctgaagagtatggagcctacgtagattcataaggattcactccttctccagttgca

SEQ ID NO: 593272 - DNA, 50 bp, Homo sapiens
atcttcaagacgctaagctcaaaggcatctatatcataaatctcaagagg

SEQ ID NO: 593273 - DNA, 100 bp, Homo sapiens
caggacctccgcagagggccctgctggcacgaggcactaaggaggttctgggggaagagaagctgaaggagatactgaaggagcgggaacttaaaattta

SEQ ID NO: 593274 - DNA, 50 bp, Homo sapiens
gttatttaccatatccagtatgatgaaggggtgtttgatgcttccctcaa

SEQ ID NO: 593275 - DNA, 90 bp, Homo sapiens
cagccgcagccccctgctccggaggctggtgcaggatctcatctggccaccgcgttctggaagaggcgagagggagagcgtgcgcgagag

SEQ ID NO: 593276 - DNA, 83 bp, Homo sapiens
ctgctacagcatgctctggggcaggacttgggaccctggaggactgacgctgctggcctgggcgtccccttccgctgagccat

SEQ ID NO: 593277 - DNA, 98 bp, Homo sapiens
caaatttcctattaagtggacagcaccagagagtcttgcctacaataccttctcaattaaatctgacgtctggggatctagtgaaaagccatttgatg

SEQ ID NO: 593278 - DNA, 97 bp, Homo sapiens
gcgtcccgctcgctgggagagaggtacctctccttttccctctccctttccctaaggctgctttgtaccgcctcagtggagactggaatcccttaca

SEQ ID NO: 593279 - DNA, 82 bp, Homo sapiens
agccgctgttttgccggaggagcccctcaggccgtatctgaaaactgaagagtggagaatatgttcagcagggaacaagagg

SEQ ID NO: 593280 - DNA, 75 bp, Homo sapiens
ctgagctcgctgcgtataaggaggaagcaaacaccattgctaagggctcactcgctttgacctgctgggtgactt

SEQ ID NO: 593281 - DNA, 100 bp, Homo sapiens
ccaggcccagcctctcgaatgggcacacctgtgtaggtgatgcagaagatggggaagaatatgatgacccttttgctgggcctccagacactatttcatt

SEQ ID NO: 593282 - DNA, 98 bp, Homo sapiens
cctgagcaagtgccagctactcctcgaaagaggaagtgtgtcagttttcaacctttgagcagtgtcaagagtggctgaagagactgaacaacgcaatc

SEQ ID NO: 593283 - DNA, 82 bp, Homo sapiens
gaatattgcaagaagcaggcgcagacatctccaaaacagtcatgtcacacctggataggcttctccagggaaagtgaccgag

SEQ ID NO: 593284 - DNA, 95 bp, Homo sapiens
aggcaaagcgaaattggtcattctcgctaacaactgcccagctttgaggagctatgaagacatgattggtgaggaggtgccatcggatcaatact

SEQ ID NO: 593285 - DNA, 83 bp, Homo sapiens
agcgctgtcgcaagagaaaacttgactgtatacagaatcttgaatcagaaattgagaagctgcggagcgtgctttggacacca

SEQ ID NO: 593286 - DNA, 74 bp, Homo sapiens
ttcgcagtggtcgcttcttctccttgggttaaagcacgaattgggagctctcagcgacatcaccagtcagcagc

SEQ ID NO: 593287 - DNA, 100 bp, Homo sapiens
gccccgcgcccgcctcaccacgcggcgggccaccggccggcacgaaggcgtccccacgctggaaggatccaggatgggggccccgtttgtctgggccttg

SEQ ID NO: 593288 - DNA, 100 bp, Homo sapiens
gaatctggactgtggatgattatcgattacgggtggcttgctttggtgaaggtattcatacagccttcctaaaggcaatgctttccacaggatttaagat

SEQ ID NO: 593289 - DNA, 51 bp, Homo sapiens
gcggggacaggacggcggggcgagccaggcatctgaaaaccagcagtaatc

SEQ ID NO: 593290 - DNA, 102 bp, Homo sapiens
gaggaaatgttctcttcacggtggaaaacacagatccagagtgttactggcttacaaattggattgaggaggagatgttaaagtaacccatcttgcaggacg

SEQ ID NO: 593291 - DNA, 100 bp, Homo sapiens
ctctgcagtggaccacagcattcctgaaatacatccaggaaagacatggagattctcttaaaaaggttacattgattacccacctagtacaacatcttac

SEQ ID NO: 593292 - DNA, 75 bp, Homo sapiens
aagatcaccgtgacatccgaggtgcctttctccaaaagattacttcataccacattgtcaaggaaaggactagaa

SEQ ID NO: 593293 - DNA, 100 bp, Homo sapiens
caaacaagtgtctgtgcacaggagtcagagagggggaaccgccgtcccaacatcacaaaaagctccatcaagtatgatggtgaaggatgaatatgtgcat

SEQ ID NO: 593294 - DNA, 114 bp, Homo sapiens
aggagccggtgctgcagaaccagatccgggagcacgtcatcgccatcgaagaccatcatcaaagaggggatgctgaccaaacagaacaattcattccagcgatcaaaaaggaga

SEQ ID NO: 593295 - DNA, 90 bp, Homo sapiens
ctgttgcaaagaaattcgacttcagtaatttgagtagtaggctgcagccttggatatagccatgattaaaatggtcgccccgtccatggc

SEQ ID NO: 593296 - DNA, 82 bp, Homo sapiens
acagatgaagacagatgcaccaacgagacccaacatgagtgaagtttcctgcaagaaacgggacgactatttggaatggcca

SEQ ID NO: 593297 - DNA, 97 bp, Homo sapiens
aaaagatgttttgatccctaaaataatgagagaaaaggccaaagagaggtgttctgaacaagttcaagcatcagcaggaattgctgtgtcccagagg

SEQ ID NO: 593298 - DNA, 100 bp, Homo sapiens
agaaaaccaaggctgaaggggatcgtctaaaagaggggatatcagtatgaacaacattactcagttgccagaagatgcatttaagaactttccttttcta

SEQ ID NO: 593299 - DNA, 100 bp, Homo sapiens
attcctatccttgcctgaagcagtcttttgcaggaacatttgagactattgcccagaagaaaagatgtttggttttcacaagccaaagatgtaccgaagt

SEQ ID NO: 593300 - DNA, 95 bp, Homo sapiens
gggtagcttttgtggacatgctgttgaagatcaaagctgtgagggctgctaaggtgagtgatgaaatggtagtggagctcattgagaagaatttg

SEQ ID NO: 593301 - DNA, 75 bp, Homo sapiens
tgactgagaagatgcatgccagagacttcacagtttctgctctgattatggattggatatgtctacttctggatg

SEQ ID NO: 593302 - DNA, 73 bp, Homo sapiens
aaagactggatggtatgggctgtctggagtttgatgaggagcgagcccaggttcaaaccttgtactactcagc

SEQ ID NO: 593303 - DNA, 100 bp, Homo sapiens
cgcttttcccacgtggcagtcgacgtggtgcagggcagagaagcgctcgtccacatcatctatttggccacagttaaacacagtgggaatatcacttttg

SEQ ID NO: 593304 - DNA, 90 bp, Homo sapiens
actgggtgaatgctattgagtttgttcctgggcaaccctactgtggccgtaacctgggaaagaattctgaatataattcaagtaactgct

SEQ ID NO: 593305 - DNA, 76 bp, Homo sapiens
aatcaacagagtgggacctaatggtgagaggtggtcgtgtgatggtaacagatgctgacaggtcaatactatctcc

SEQ ID NO: 593306 - DNA, 80 bp, Homo sapiens
ctctacttttgacctccctgcagactccattgccccatttcagtgttgtcctacatcaatggggtcacaacaagcaaacc

SEQ ID NO: 593307 - DNA, 74 bp, Homo sapiens
caacttcatgtttgggcagaagctgaatgtctggtgcagctgactgcacagacgtcactggggcctgtgtctga

SEQ ID NO: 593308 - DNA, 100 bp, Homo sapiens
cctccctaccctctgatgcaccaccagatgccaccacctcatccaccccagccaggtaaaaagatggcctatcagaaggtccatgcagatcaaagagctc

SEQ ID NO: 593309 - DNA, 101 bp, Homo sapiens
aggatgcagccaacaaaaacccattcagctcggccagtgggggctttggatccacagctacctcaagaatgaatctgaagtctgctgcagtaaaacacaga

SEQ ID NO: 593310 - DNA, 89 bp, Homo sapiens
agtcaccactggacctccaaggaagccacgtgcagacatctacaaccttcgatctcctgacgagtgctggagaatctggtaaaagcacc

SEQ ID NO: 593311 - DNA, 95 bp, Homo sapiens
agacatggaagaaatgctgcctaggtcctagaaacaaggcgtagaggctccggtgttttttgtgccaattgcctgaccacaaagacctctctctg

SEQ ID NO: 593312 - DNA, 83 bp, Homo sapiens
aacaagttttgtgcagattgccagtctaaagacctgcctagagctggaacgttacctccagagcgagccctgctatgtttcag

SEQ ID NO: 593313 - DNA, 100 bp, Homo sapiens
cttgctgtctggatccagagacaagactattaagatgtgggatgtcagtactggcatgtgccttatgaccctcaatcgttgcagtgtgccagtagatcag

SEQ ID NO: 593314 - DNA, 76 bp, Homo sapiens
aaccgcctcctcctcctcagtaacgcggtgaagcctgcctacagttttcacaaatctgtatcctttcagtaaagaa

SEQ ID NO: 593315 - DNA, 75 bp, Homo sapiens
ggatttgttaaggattccaagtaactcttatttgccgagattcgggccctccaccctctacagtgagtgaagccg

SEQ ID NO: 593316 - DNA, 106 bp, Homo sapiens
gtgaggaggatgtgattatggaagctctgcggtcatacaaccaggagctgttgttggcctactgtacccctgtatcgacagtcacctcggagaaccccacaaattt

SEQ ID NO: 593317 - DNA, 92 bp, Homo sapiens
agaacttgcaagaagatgggcattaagacagttgccatccacagtgatgttgatgctagttctgatgggctcatccacacgtccctgaagcc

SEQ ID NO: 593318 - DNA, 74 bp, Homo sapiens
ttttaagcctatactttctaccagaagcttgaagggtttggttaagtctgttcggcacttgaagtactccttgt

SEQ ID NO: 593319 - DNA, 90 bp, Homo sapiens
ggtcagactggtcaccagctgttcaaagtcacccaggctccagggtgcaggtcctggtgcttgatggtcgaggccatctcctgggccgcc

SEQ ID NO: 593320 - DNA, 75 bp, Homo sapiens
aggagcagggaacctggggcctgaactcatcaaggaaagcaatgccaatacgcagccgtagacaccagctccgaa

SEQ ID NO: 593321 - DNA, 100 bp, Homo sapiens
tcgaaaggaagggctctgctctacacactggtgtctcctgcggaagggcagctgggcacgccttccagaccgaggagatagtcaacttcaactgtcggaa

SEQ ID NO: 593322 - DNA, 102 bp, Homo sapiens
gggccagcagatgcaggaaaatttcgatattgaagtgtcaaaatccatagatggaaaagatggtgatctgtgaaaatggttcgctattcacttgacccggag

SEQ ID NO: 593323 - DNA, 75 bp, Homo sapiens
tctttgaagcagaaattgaaaagtactgcccagagaattttgtagacatcaagagtcagcgtgggagaaattgta

SEQ ID NO: 593324 - DNA, 98 bp, Homo sapiens
atcaaatcgagcccttgcttagaagtgaattagaagattttccagtacttggaattgactgtgagtggctgatccaccttgagatcaagccggccatc

SEQ ID NO: 593325 - DNA, 75 bp, Homo sapiens
gcgggaagtgaaggagcagagcggccaggaattgaatgatctggcacgggaccctccagcacagtgttcagcagg

SEQ ID NO: 593326 - DNA, 75 bp, Homo sapiens
cttttgtccctggagacgctctgccagccagggatcgtgggactttaccagatcggtttgtaataacacctcgaa

SEQ ID NO: 593327 - DNA, 75 bp, Homo sapiens
tccgcaacctggagaacgccaagcgcttcgccatcgacatagggaacggcaggagcagctgatgggatatcggaa

SEQ ID NO: 593328 - DNA, 100 bp, Homo sapiens
cgccaaccgcaaccattgacgccatgtcgggttattcgagtgaccgagaccgcggccgggaccgaggatccagacatttaatgtggatgcaccatgccag

SEQ ID NO: 593329 - DNA, 90 bp, Homo sapiens
aagttagaaaggctcaacgagaacaagctatcagaaaaatggctacaaacttcctagcacatgagaagatctggttcgacaagttcaaat

SEQ ID NO: 593330 - DNA, 73 bp, Homo sapiens
gaaaatcatattatagatggagtaaagcacttttcaggattagaagaggctgtgtatagaaacatacaagctt

SEQ ID NO: 593331 - DNA, 74 bp, Homo sapiens
gttacataacaggatggggtgacacaggccggatcacctcaacagtcacgtcagacaagtgcactcaacagaac

SEQ ID NO: 593332 - DNA, 76 bp, Homo sapiens
ctgggtgacactcaacaggattcccggtaagaaacggttgaactggatgcaatttttatcacagcttgtgtaagac

SEQ ID NO: 593333 - DNA, 97 bp, Homo sapiens
ccccgctctgctgtgggcgctgctggcgctctggctgtgctgcgcgacccccgcgcatggtggtctttgggaagaagcttcctgcctttgccaccat

SEQ ID NO: 593334 - DNA, 75 bp, Homo sapiens
aggatgctttagaaaaacacgatcagctcttagacagaactggcatcaaatactcacaacatagctcaggatctg

SEQ ID NO: 593335 - DNA, 100 bp, Homo sapiens
accagctcttggacggggggcgcacgggacggcacccacatggccctgcgaccccccggagggatagccgcttcccaaagatcctggagaacctaagact

SEQ ID NO: 593336 - DNA, 82 bp, Homo sapiens
gaacgaggcaaggagctaaagcagcgtgcgttcagccctgggtattctaccttgtaaatactgttatttgtatatactgtaa

SEQ ID NO: 593337 - DNA, 101 bp, Homo sapiens
ttctctgccttgctgatctgagctcagacctgccaatttaccagagataattgataacaccctgtaacagctgaggtaccgcgacgcacaaattggatgga

SEQ ID NO: 593338 - DNA, 100 bp, Homo sapiens
tgcgggaccccgggcactgttgctgctgcgggagctcagagtcaagatctccactgaagttggcatcacaaatgttgatctttccaccgtggataaggat

SEQ ID NO: 593339 - DNA, 131 bp, Homo sapiens
caaccctgatttcctgcttctccttttcatgagtgttcctgtggtctctgcacctcctttctggctgctcttcacctatcgtggtgaagtttgctgacactcagaaggacaaagagcaaaggcgcctccag

SEQ ID NO: 593340 - DNA, 74 bp, Homo sapiens
cgcatgactccccggtactggaggtgtacgtggccatctgcagcctggtatcgccagccttaaggtgtctggag

SEQ ID NO: 593341 - DNA, 100 bp, Homo sapiens
tacaggaagtggagctacagatagtaaagatgatgatgacattgacctctttggatctgatgatgaggagggcttccgagtggacctgccaatcaagtcg

SEQ ID NO: 593342 - DNA, 80 bp, Homo sapiens
gccaacatggcggaacgcaggagacacaagaagcggatccagggacctggaagccagagcacagaatgagttcttccggg

SEQ ID NO: 593343 - DNA, 75 bp, Homo sapiens
caactctgaacggaaagctggcagctgtcagcaagacccttcttatgactcagtcagaagaggagcttggggcaa

SEQ ID NO: 593344 - DNA, 100 bp, Homo sapiens
gagtgggaagaccaagacagtgcctggataccttcgaatagggagcctcctcaacaagcccaagagtgagatgaccccagaggagctgcagaagcgagag

SEQ ID NO: 593345 - DNA, 83 bp, Homo sapiens
gggccggtgcaactattcgcagtccgagcgtgcagtgctggagttcgtgggtgacgggatctataacaacaccatgggccacg

SEQ ID NO: 593346 - DNA, 101 bp, Homo sapiens
ggagaggtcagtaactaaattggagaaaagcattgatgacttagaaggattaatgcagtatcgaatggacaagtccgaggtgatagttacagtgaaggttg

SEQ ID NO: 593347 - DNA, 90 bp, Homo sapiens
gctgcaagcccttcagagctcgctggagggggcgtcagataccctggaggcccaggcccatggctggcgagagtgggactccccggcccc

SEQ ID NO: 593348 - DNA, 82 bp, Homo sapiens
ggaacagggacagcacctcatcccctggatgggggaccacaagatcctcatcgacagagctcaggccccggggcctccagcg

SEQ ID NO: 593349 - DNA, 100 bp, Homo sapiens
gtagaatttctcaccaaacatcttagggcagataatgcctttatgttacttactcagtaggtggcaagtgggagaaaccatcagaaattttggaaatcaa

SEQ ID NO: 593350 - DNA, 100 bp, Homo sapiens
ccaccccgctgcacttcgccgcagattacctaaaaccagatccatggatgatcttctttctgcctgtgacacaagcagccccctgactcgtacatccagt

SEQ ID NO: 593351 - DNA, 100 bp, Homo sapiens
cgggaagatcctggaggtggatctgaagaacgggatttggggtggaaggcaggcatggtcaaacccatttcactgacaggagagcagagacaggacgtgt

SEQ ID NO: 593352 - DNA, 100 bp, Homo sapiens
gtcaccaagagaggctgagagaccaggcgggcctcatccgcacagacagcaccgacttcttcattgagcctctggagcggggccagcaggagaaggaggc

SEQ ID NO: 593353 - DNA, 78 bp, Homo sapiens
ggatctggaggagcagttgtctgatgaagagaagattcactgccttctgaggacttggatcctgccgatcccccgatc

SEQ ID NO: 593354 - DNA, 75 bp, Homo sapiens
cctgagacggtgtcccgccgaaaggcccacctgccgtttgctgtcattggcagcacagaagaactgaagataggc

SEQ ID NO: 593355 - DNA, 90 bp, Homo sapiens
gagaaaagcccccaaaagcagctattcaggtggctatggcggttccagcagcagcagtagctatggcagtggcagaagattttaattagg

SEQ ID NO: 593356 - DNA, 96 bp, Homo sapiens
cattagctggagcaacggctggcctcaatgttggctctttggcaggttaccacattctcatctggagccaggaggaagccaggacacggaagtgag

SEQ ID NO: 593357 - DNA, 75 bp, Homo sapiens
ccatcaaaggtcaagctggttttcatcagaaatggctattcctacaaagtggcagtcgcattgtctctttttctt

SEQ ID NO: 593358 - DNA, 75 bp, Homo sapiens
ctctgaggattcacagcagctggaagaggcatatagctctggagaacacaaagttatacctcaatttacttgaaa

SEQ ID NO: 593359 - DNA, 83 bp, Homo sapiens
cgaggaggcgcgggaggtgttcgagaacgaccccgagacggcaccatgactcctgtgaggatgcagcactccctggcaggtca

SEQ ID NO: 593360 - DNA, 82 bp, Homo sapiens
agactcaggagacctggtttctagccccagctgtacctctaattgtaaccttggcccctggcaaccaccattctactttctg

SEQ ID NO: 593361 - DNA, 101 bp, Homo sapiens
agatgacaatgatctctaccgatgggaagtccttattattggccctccagatacactttaggccccacggttcccctgatagacctggagcacgtccttcc

SEQ ID NO: 593362 - DNA, 99 bp, Homo sapiens
ggcagccatcaggtaggctgcgttgaggatctttgctcttccatccgcctttgatcgtcttcctcttcagccatccagtttctgtttcagatgatcggg

SEQ ID NO: 593363 - DNA, 50 bp, Homo sapiens
cccacgtcgagcgtgcccgagacccgaggatctttaccttatatagtaaa

SEQ ID NO: 593364 - DNA, 100 bp, Homo sapiens
gctggtctcacaaagatctattaagattgtcacatcttaaaccttccagtgaaggtgaaggaaatactcatgaccagccagatgtcttaaggaatgcttt

SEQ ID NO: 593365 - DNA, 101 bp, Homo sapiens
ggaaagagccctggaatgtgaagagtgcagagacagtagccatccagccagaacggaaagatgctgaaggatgggagaccgttcagagaggaaggcctatt

SEQ ID NO: 593366 - DNA, 96 bp, Homo sapiens
cacgtcctcgaacgcgaggccaacagccccgaatcgggaccagtattcacatctgctaagtgatcattttctgccataccaaggtcataattcctt

SEQ ID NO: 593367 - DNA, 96 bp, Homo sapiens
cccgcagcgacgcggctggcaagactgtttgtgttgcgggggccggacttcaaggatgttgccttatggctgtttagcaacaggagatcgctctgg

SEQ ID NO: 593368 - DNA, 100 bp, Homo sapiens
cagcgcctcagctctgtggaggagcagcagtagtcggagggtgcaggtctcaagattctgccctccaagaaagtcttgccatgattggataggaccccca

SEQ ID NO: 593369 - DNA, 76 bp, Homo sapiens
agaccctgacacagaagccagacctgtccagcagggaccccatacactgctgttcatcaaagaaaaagggttcttt

SEQ ID NO: 593370 - DNA, 117 bp, Homo sapiens
ggagaagagccatgggtcctcgacctgcagggagcagaggggacagaggcaccaaggacctccaagacagcatccctctctacctgccaacatcctgtattagagaacttgtggccg

SEQ ID NO: 593371 - DNA, 111 bp, Homo sapiens
ggcggaggacgagctccgggatgctgtactccttgtctttgcaaacaaacagtccgatcgtaggtggagcccccagaaccatgtgccgagcccgctgcttttggagacacg

SEQ ID NO: 593372 - DNA, 82 bp, Homo sapiens
gactgacggcaacctctacaaggccaagttcatctcctccgtcaccagccacatctaccagctggtcagtgagaaggtcgga

SEQ ID NO: 593373 - DNA, 83 bp, Homo sapiens
caagacgttcagctcccggaaaaactacaccaagcacatgttcatccactcggaccaaatacacgctgatcgatgagcaggac

SEQ ID NO: 593374 - DNA, 90 bp, Homo sapiens
aagcctctcagcttcggagaatggagtcttccatcaatcatatctcacaggtcgttccaggggtagaggaggcatgaaggatgaccgtcg

SEQ ID NO: 593375 - DNA, 100 bp, Homo sapiens
agtcacttttcacagaaggactgaagagtctgacagtgactgtcatgtggcatgggtctctgcccaagctcgtaatgagactatagcaaggcggctgtgg

SEQ ID NO: 593376 - DNA, 83 bp, Homo sapiens
cgacaagccgctggcagccgcggatctcaccgccgctcaggcacatctccatcccccagcctgactgccccgcagaggcgcgg

SEQ ID NO: 593377 - DNA, 100 bp, Homo sapiens
ggagcttggccaccacatcctgaaggcgcacattttcaagcgttttaccaacgaggatcatttggctgtccataaacataaacatgagatgacactgaaa

SEQ ID NO: 593378 - DNA, 90 bp, Homo sapiens
aggatgagactgaaacaaatgaagttcaaggatttctctttgggaaactaaaagttgctggaattgtggccgtaaagcgagtgaaacctg

SEQ ID NO: 593379 - DNA, 82 bp, Homo sapiens
cacagtttgctctgctcttccaacaccagtggaagatgatcacatcccagggaaatgaggcaagttatcctttggaaatgtg

SEQ ID NO: 593380 - DNA, 100 bp, Homo sapiens
ccgggtctgctgcggaggaagctggctccggcagctgttgtgcctcccacaggtcctggaatggcaccagttcctacaggtgtcttcacagatatcccaa

SEQ ID NO: 593381 - DNA, 90 bp, Homo sapiens
tgctccacggtggagcagtgtacaaggtgcgtgctctggaggaggccaacgccgacctggaagtgaagatccgtgactggtaccagaggc

SEQ ID NO: 593382 - DNA, 100 bp, Homo sapiens
ctgtcttcatctttacagaggaatagtctacaaaggaagacttgtaacctggagaagaggctaactatatgtcagaaagcatcagcttttctcgatggac

SEQ ID NO: 593383 - DNA, 83 bp, Homo sapiens
cctgagttagctggccgacttcccagcggtcctttgtgaggtacactcacgtggaagctgagtgtcctttcctgacttttgac

SEQ ID NO: 593384 - DNA, 74 bp, Homo sapiens
aaagggaagttcttcggaacctttcttcccctggatgggaaaacatctcaagggctggctcctcatggaccccg

SEQ ID NO: 593385 - DNA, 100 bp, Homo sapiens
agcacgactcctcgggcagcctcaacgagaactcggagggcaccggaggtcagtttaggggctggtgcaaaggatgagttgcacattgttgaagcagagg

SEQ ID NO: 593386 - DNA, 83 bp, Homo sapiens
cagttgctgagaagcctgacataccaggactgcctgagacaagccacaagctggtatcatgatattagctggtttgacatcaa

SEQ ID NO: 593387 - DNA, 83 bp, Homo sapiens
catgcccaaatcccggaaactccagcgtgtctccagccgtgttccagggtctccctccactgctgtagtaacccgggtccggg

SEQ ID NO: 593388 - DNA, 106 bp, Homo sapiens
gaactctaccctggaggagattctggggcagtatcaacggagtctccgggatttgtcccatcagatgaaaagaagaaacaaggttgtcaacgagaaaatgaaactc

SEQ ID NO: 593389 - DNA, 146 bp, Homo sapiens
cggggacggtaaccgggacccggtgtctgctcctgtcgccttcgcctcctaatccctagccactatgttttccaagagataacttcaccaagatgtccagtgataggcaaaggtccgatgatgagagccccagcaccagcagtggc

SEQ ID NO: 593390 - DNA, 97 bp, Homo sapiens
ggtataactgatcctgagaagatagatattgcggtggtggagatgagcgatgccttccggcagccgtccttgttttaccaccttggggtgagagaaa

SEQ ID NO: 593391 - DNA, 82 bp, Homo sapiens
gtccgacccgcgaacccctctgggatccccgccgctctgtctacaacccgagcaaacggggattcagcgtccgatcctttgg

SEQ ID NO: 593392 - DNA, 98 bp, Homo sapiens
ggccgcgccatgtggctgctggggccgctgtgcctgctgctgagcagcgccgcgggacaaggagcatccaagatacctgatcccagaactttgcaaac

SEQ ID NO: 593393 - DNA, 75 bp, Homo sapiens
gcccagggctgcttccacgacgtgggtcccctgccagatttgtggacgagtacttggctgacctgtaccactttg

SEQ ID NO: 593394 - DNA, 83 bp, Homo sapiens
agagactgctgagcccgtccgtccgccgccaccacccactccggacacaggtttttagaacttcagccataaaaatgggcaga

SEQ ID NO: 593395 - DNA, 90 bp, Homo sapiens
gtgaaaatggaaattctgggcaagaaagatattgaaacaaccaccatttcaaattttcacactcagggcgagcaccttgggagaggcacg

SEQ ID NO: 593396 - DNA, 83 bp, Homo sapiens
cttcgagtgacccgggtgccgaggagcgggaagagttgctggggtcagcccaaggccaaccccactgtcactctgttcccgcc

SEQ ID NO: 593397 - DNA, 100 bp, Homo sapiens
ggagcgggcggctgcgccccgctcgtcgaggagctgcgctcacctcaggggcgggcccccgcctgcgttcgcggcgccatccagagcacaacctccagaa

SEQ ID NO: 593398 - DNA, 100 bp, Homo sapiens
ttctggaagaaaggaaatgttaggatcactttattctggttaatgttcgtgaagaaattgaagagttttttccaagaatgtggaagataaatcaagataa

SEQ ID NO: 593399 - DNA, 83 bp, Homo sapiens
cccacatctgtttcaactctccgccgagggcgagcaggagcgagagtgtgtcgataagactttgaccccgacgcaggcttcag

SEQ ID NO: 593400 - DNA, 100 bp, Homo sapiens
ggacaagagacgatcattctgcaagcaggcaacctgaatacaggaatctctgaaggaagaagatgaatcagatgatgataatatgtaacatttactccag

SEQ ID NO: 593401 - DNA, 74 bp, Homo sapiens
tccatttggggaaatccttcggatggtgaactcattagaagcttcctgacaatgtcacctttgaggaaggcgcc

SEQ ID NO: 593402 - DNA, 75 bp, Homo sapiens
acaaggtggactgcttgctcagctcagtatcaacacttatggaactgcaagcacatgttgaccagataactgaaa

SEQ ID NO: 593403 - DNA, 75 bp, Homo sapiens
gtttaatcagaggttctaagcactggacatttgaaaaggtgtgatgttagctgttgatgctgtaattgctgaact

SEQ ID NO: 593404 - DNA, 75 bp, Homo sapiens
ggaggaactggacagccaccttcgggatgagcataaggaatcacatgcagcccaactacagattcttatggaatt

SEQ ID NO: 593405 - DNA, 75 bp, Homo sapiens
ccaggctggtcagtgtggcaaccagatcggtgccaagctccctcgtgaaagatgcttctgttcctctgattgatg

SEQ ID NO: 593406 - DNA, 100 bp, Homo sapiens
atcgagcacgtggccgatgtgtgcaccgtccaggtgaggttagagctggggcatcgcgcccaactgcgcaagaagcccaccacggaggggttcactcacg

SEQ ID NO: 593407 - DNA, 75 bp, Homo sapiens
tgatattgatattattacagcttcatatgcaccagaaggagatgaagatggctctgagagattcctctgcgaatc

SEQ ID NO: 593408 - DNA, 97 bp, Homo sapiens
cgaggccttcaagtactttttgcagggaatgggctacagagctgcacaccatcttcccatggctggtagaaagcatttttggcagcctagatggtgt

SEQ ID NO: 593409 - DNA, 100 bp, Homo sapiens
acggccgcaaggccaacgtgaacctggcatatctgggcgccaagccgcggagcctccagacgggctttatcctgtggataaacgcagagtgaacgagttt

SEQ ID NO: 593410 - DNA, 100 bp, Homo sapiens
aagaagggaagactgccttggagcagcagaaggcagcccatgagaaagaggtgaaccagctccgggagaaatgggccccttagaattaatggaagcttca

SEQ ID NO: 593411 - DNA, 82 bp, Homo sapiens
aatatacaagacccagatgagcccattttagaatttagcttagaagtcaatgaaaggattctattttgcaaagctgtattat

SEQ ID NO: 593412 - DNA, 51 bp, Homo sapiens
gagagctgctcctcagccgtgggggccggctgcctaccctccagactgtcc

SEQ ID NO: 593413 - DNA, 100 bp, Homo sapiens
agctcaagtaatttacaccagaaataccaagggtggagatgctccagctgctggtgaagatgcatgaatagccaggtaccccgcctctctgcaatgcgtg

SEQ ID NO: 593414 - DNA, 100 bp, Homo sapiens
ctgcgtctgctgaacccctgtttggagaagagaaaggagaccaccaagaggcacttgtttttcacagccaagacaatgcaaactccagtgaacattcccg

SEQ ID NO: 593415 - DNA, 100 bp, Homo sapiens
cagtggtcgtccctgccctccccggccccggggtgcaccccgcaaggtgctggggctaaagtgcccagaggtgtccctggaggcccctgtgagcccagcc

SEQ ID NO: 593416 - DNA, 98 bp, Homo sapiens
aatgactcaaggattttttgggttcccgtgtcagtggctatgatgacacctcaagttatcactccccagcaaatgcagcagatcctccagcaacaagt

SEQ ID NO: 593417 - DNA, 100 bp, Homo sapiens
aattaccgtatgcagtcccccaggatacagggtcaaaggagagcacaaccatcgcagttggaagcccatggggcaggtcacagggattatggacccagaa

SEQ ID NO: 593418 - DNA, 97 bp, Homo sapiens
aaaaccttcaactgtagaagttctagaaagtatagataaggaaattcggcgccttcatcagtatgtgaaatttgctgtccaagatgtgaatgatgtt

SEQ ID NO: 593419 - DNA, 98 bp, Homo sapiens
atctcagcaacccctgtgcttctccccaggtccagccaatgcattcagaagccaaaatggctggagcattggatttgctaaaggagcttaagaatatt

SEQ ID NO: 593420 - DNA, 98 bp, Homo sapiens
gaataaaactgaccaagacaatattcaaaagcagtttgatcaagctgttttggaaagaagtgaggtttagacttctccatgttaaccatgagcgtgac

SEQ ID NO: 593421 - DNA, 97 bp, Homo sapiens
ttcggcgctatggaggagctcgatggcgagccaacagtcactgtcatctttctgtccaagggcaaggatgccatgcagtccttcatgatgccatttt

SEQ ID NO: 593422 - DNA, 85 bp, Homo sapiens
ctgtgggtgctgggacttcccgtccgcggcgtggagggtggtatggtcaggaaaaagactacaatgtactagtcatggatcttct

SEQ ID NO: 593423 - DNA, 100 bp, Homo sapiens
cacagtcagactctgcttcttcaccttctccttccttctccgaggacaacttgcctcctccaccagcagaattcaggtgtaatcctgagagattcacatg

SEQ ID NO: 593424 - DNA, 100 bp, Homo sapiens
cgacagcactctccagagcactatcacatgggactcattctcacagttccggtttgctgaggagaaagaatgggatagtgaagcttcttgtccaaaacag

SEQ ID NO: 593425 - DNA, 50 bp, Homo sapiens
cttgttttggcactggtggtgcttgcgggtctcactctgtttcccaggct

SEQ ID NO: 593426 - DNA, 98 bp, Homo sapiens
atgtactcggggggcggctctgcgctggccgggggcgcgggcggcggcgccggcaggaagatcttggaaaggactttggaacctgatagctcggatga

SEQ ID NO: 593427 - DNA, 50 bp, Homo sapiens
cccttagctccctgttcttggctggggatcctagatttcactgagcaaga

SEQ ID NO: 593428 - DNA, 83 bp, Homo sapiens
caccgaggaagcatttatgaccttctacagtgaggagactataaatattcaggaagagatagtttgatttttttggttgatgc

SEQ ID NO: 593429 - DNA, 107 bp, Homo sapiens
ctcaccccgcggccgcaccttcccgccttctcaggtcaaaatgcagatcttcgtgaaaacccttaccggcaagaccatcacccttgaggtggagcccagtgacacca

SEQ ID NO: 593430 - DNA, 49 bp, Homo sapiens
gggggctccctggacaactccgagcagaactcctctttcctaaaatgga

SEQ ID NO: 593431 - DNA, 100 bp, Homo sapiens
gtgatgaatgtgactgaggaactgaacttttagtttcatgctggaggagattgatggattctttgcgagaaataacgaagagtacctggctctgatcttt

SEQ ID NO: 593432 - DNA, 101 bp, Homo sapiens
ttgtccaagacctgaagggttgaactttcaggatctcaagaaccagctgaaacacatgtctgtatcctcaatcaaatttgttcccgacaaggagttttctg

SEQ ID NO: 593433 - DNA, 100 bp, Homo sapiens
cggagaattccccttcctagaaggaccaagatggcagcagtgactctgctggctttggcgtatacacagagattgccctcagtcccaataatcacgaagt

SEQ ID NO: 593434 - DNA, 74 bp, Homo sapiens
gcctccattgtttgaccacaacaagggccggattctcacccagaatctcaggactctggatacctttatttttg

SEQ ID NO: 593435 - DNA, 100 bp, Homo sapiens
gcgaccccagtcggtgctccggggaggtcacctgacgaggagagttcctggaataactattgctacagatattatctgtggttttcctggagaaacagat

SEQ ID NO: 593436 - DNA, 50 bp, Homo sapiens
catcgatctctcagggtcgtcgggtgaagttatcaggaactgttgccgtt

SEQ ID NO: 593437 - DNA, 100 bp, Homo sapiens
cctggaggaggcatggagcccgaggaggagccaagtgtggcagcagttcgtgaagtctgtgaggaggttgcagagcctgaggcctgtgatcagatgtacg

SEQ ID NO: 593438 - DNA, 96 bp, Homo sapiens
gagtgctcgttgtccatgatggtttcgagggcctggccaaggggcaggtgcgggccagtgctattgcccaggacgcggaccagaactacgactacg

SEQ ID NO: 593439 - DNA, 83 bp, Homo sapiens
agagaagctatgtttagcatcttctgtcatgagaagtggcgatcaaaattggctcacgaggcccagggaatcctctggaccat

SEQ ID NO: 593440 - DNA, 74 bp, Homo sapiens
gggcctccaaggaacttaagcaaagaattataaggctgtctgcagagatttgaaaaatggcaacaaatgaaagt

SEQ ID NO: 593441 - DNA, 100 bp, Homo sapiens
tcgacctccggggctcaagtgatcctttcatctcagcctcctcagtagctgagactacagattatctcaactttggtctcctgggaccactcgttgctga

SEQ ID NO: 593442 - DNA, 83 bp, Homo sapiens
gtaaagcaatatttcgagcagtttggcaaggactcgggtcaagctggaaagcctggaagacgcctacattctgcggggagatg

SEQ ID NO: 593443 - DNA, 100 bp, Homo sapiens
ggaagatgtaaagcaatatttcgagcagtttggcaagaccatcatcaaagaggggatgctgaccaaacagaacaattcattccagcgatcaaaaaggaga

SEQ ID NO: 593444 - DNA, 100 bp, Homo sapiens
cggggaagagctgggtcgactcaaggtgggtcttcaaacaactctatgataaaggccttgtttatagaggtgtgaaagtcatgcccttctctacggcatg

SEQ ID NO: 593445 - DNA, 75 bp, Homo sapiens
cgggggactgcggggccagcctcaggttgttatggagttgatggagagagtgactctattatgagttcagcttct

SEQ ID NO: 593446 - DNA, 80 bp, Homo sapiens
ggactgagtcctgcaggacacagtgtaaacaggaacatcgataagtagtgtaaaaacttgcacaatgaaatccgaagcca

SEQ ID NO: 593447 - DNA, 82 bp, Homo sapiens
ggaggggttacagactgtggtgcctacccccatcactgcttccctcagccataacagttcttttagaactcatcaaattgaa

SEQ ID NO: 593448 - DNA, 98 bp, Homo sapiens
gacagagacaagctgagcttgccgcacaaaaagctagagagcttatcacacagactttcagccaccacaatcagctggcacagaagacccggcgggag

SEQ ID NO: 593449 - DNA, 99 bp, Homo sapiens
gtgagtagtcacatcacctccagccctctgcattcacgtagcattgctgcggtggtatggtcaggaaaaagactacaatgtactagtcatggatcttct

SEQ ID NO: 593450 - DNA, 100 bp, Homo sapiens
agattactttgtgattgttagtggaacttctacccgacacttacatgccatggccttctacgttgtgaaaatgctggtagccggtctgggtctccaggaa

SEQ ID NO: 593451 - DNA, 100 bp, Homo sapiens
cacgcgtcggactggtctgtctgagggagatggtgacaagctcaaggcctgcgagactccacgttttgcaaagatcggttttgcctcagagtcaacaaac

SEQ ID NO: 593452 - DNA, 90 bp, Homo sapiens
gttgagagaacgaggaggaaggagagaaaatggcgtccacggacctgcaatgcttcttttgccacccgagaccgtctgcgctcccacctg

SEQ ID NO: 593453 - DNA, 98 bp, Homo sapiens
gagcggcggcggtggcggccgctgggtgcacccaccctatccccaagtcttctcggcttactgctgcctgcctttggcatccttgtctacttggaatt

SEQ ID NO: 593454 - DNA, 83 bp, Homo sapiens
tagaagaggcacaaaggagttacatcttaacacagccaaaattgcctggaaaagagcagtgagaggagtccgggagatgtgtg

SEQ ID NO: 593455 - DNA, 78 bp, Homo sapiens
attaggttgcagtatgtggccagttatttgcctcagtaaaagattgggagctgaaagtgccgacagcattggtgccgt

SEQ ID NO: 593456 - DNA, 100 bp, Homo sapiens
cctctggccaaatggaagtatatgatgctgaattgttcaacatgcagccactattttcagatatgggcacggttatgaaatattttgtgttacttgtaac

SEQ ID NO: 593457 - DNA, 75 bp, Homo sapiens
cgccctccccgccaaggcccgtgcgaggtggctgcaaaattcgggttcagggggactggatcagagagcgccgct

SEQ ID NO: 593458 - DNA, 100 bp, Homo sapiens
agcaaggaaaactcaggaccatgatggctcagtttcccacagctatgaatggtgactgtaggacgaggatttggtgtcacataccaactggtatcaaaaa

SEQ ID NO: 593459 - DNA, 100 bp, Homo sapiens
gtggcaagtcgctcctgtcatttctacaacaacgtagaagagctcaggccccggggcctccagcggcaccagcggagaccacggtgagctcgtcgtccgg

SEQ ID NO: 593460 - DNA, 100 bp, Homo sapiens
gcaaacatttaaaggactcatatctttggaacatctctctacattaatcatactcctccaccactgtccaagagtaaggagagagaaatggacaagaaag

SEQ ID NO: 593461 - DNA, 100 bp, Homo sapiens
gcaattgctcctgctgtaaggagtgcatgctgtgtcttggggccctttgggacgagtgctgtgactgtgttgaaatgaacacacctgtgagtactggatg

SEQ ID NO: 593462 - DNA, 50 bp, Homo sapiens
aggaggtggcaggcctcggcgaatgacctggatgaccctgaaagaggaat

SEQ ID NO: 593463 - DNA, 100 bp, Homo sapiens
gaggagatgaaggcagtggacacacagcatggagaaatccttcgcaatgtcaccatcctacgagttctgggaggtgatcagtgatgaacatggcatcgac

SEQ ID NO: 593464 - DNA, 82 bp, Homo sapiens
tgtcatcggttcggtaaagtttctgttctctgagtaattccctcctggtcccagacagtctaagaggcacagataaacgcag

SEQ ID NO: 593465 - DNA, 83 bp, Homo sapiens
gtccagtggagtgacccgttgccagagtgcagaggtcagtttgctgagaacgaaaccaatgaggtcaattttagagagatacc

SEQ ID NO: 593466 - DNA, 75 bp, Homo sapiens
gagcccgcggaaccgcagccatggtctcctctgagcctccggcctccataagacccaaaacagatgacacctctt

SEQ ID NO: 593467 - DNA, 100 bp, Homo sapiens
tttgtgatgaagcaggctctaggaggcacagcgtcaccttcgtcccctccggagctgcacgtggcctgagcaggatggtgccctccagcccagcggtgga

SEQ ID NO: 593468 - DNA, 75 bp, Homo sapiens
ctactctctctttctggcctggaggctatccagcgtccacctgggcttgcgaaggcacagattccccgtccacag

SEQ ID NO: 593469 - DNA, 74 bp, Homo sapiens
cagctaagacgccgggactccctggaaacctagaaatgcaaagtggaagatgctttctacaaaggtgaactcag

SEQ ID NO: 593470 - DNA, 75 bp, Homo sapiens
aggaaggcatggactcggagattggctgcctcatccgcttctatgcagaggccacaagaggaagctgaatgaaga

SEQ ID NO: 593471 - DNA, 88 bp, Homo sapiens
cagtatgcactcaatgcctgcagtgactttgtctccaaatggaagatgagaatgtgcctactgctcctgatcctccaagtcaacattt

SEQ ID NO: 593472 - DNA, 75 bp, Homo sapiens
gcatgtcagtgggtagtcgtggaagcctgaggggagaccaaattttgaggaaggtggaccaacatcagtagggag

SEQ ID NO: 593473 - DNA, 75 bp, Homo sapiens
ctcgcgcatcaggcatgaagaagaatatctatggcaatatcgaggacctgagattaaaagctgctttgacccagc

SEQ ID NO: 593474 - DNA, 75 bp, Homo sapiens
caaagaagatgcagatggacgaatctacctgttactcgtattttggacaatcttatggagatgaagtcaaacccc

SEQ ID NO: 593475 - DNA, 90 bp, Homo sapiens
acagacgtcccccaaaacccctcgcctggctcggacccacggagccggcagcccagcactccgtgagaaagatcagtctaaagaaaagga

SEQ ID NO: 593476 - DNA, 50 bp, Homo sapiens
cagggatgaaagcctgtgtagagtatgaatctgatgaacaagaaaagagt

SEQ ID NO: 593477 - DNA, 100 bp, Homo sapiens
caactgagagaactgcaggacttggaacttcatgcccacttgaatggatccattagttctcataccatgaagaaattaatagcccagaagccagatctta

SEQ ID NO: 593478 - DNA, 100 bp, Homo sapiens
tagggtcctttatatagaagggagagtagatggctgatcactgggaaactgcacctcgtcacatgatgcgtctagatattcgttctttgctgcaagatgc

SEQ ID NO: 593479 - DNA, 75 bp, Homo sapiens
ctcgaagtcccgtgagaacctgtctgcagtcatgttgtataaccccgggaagacaactgttagttttgtggctta

SEQ ID NO: 593480 - DNA, 50 bp, Homo sapiens
caggaaccaccagtgacagaatataatgaagatctggaacttgaagatgc

SEQ ID NO: 593481 - DNA, 90 bp, Homo sapiens
ccacatcacaactgagattgtcatgctgaatcctgccaatacccgcagcatttccaacatgacaatgcagatcttcgtgaagactctgac

SEQ ID NO: 593482 - DNA, 75 bp, Homo sapiens
ctggagcctcagttggaagcagccgatccagcctgcggagcctgtggggcagggcaggtaagccccctcccggtt

SEQ ID NO: 593483 - DNA, 75 bp, Homo sapiens
tagtcacaggagctgtagagaggaccccggtacatctgaaagccgggaaatggttttgcgtgtgaagctgtgtgg

SEQ ID NO: 593484 - DNA, 100 bp, Homo sapiens
cctttttcagaaatgcgcagagcaaacatctttcaaagacatgtcatgctgcccaaggacatagccaagctggtccctaaaacccatctgatgtctgaat

SEQ ID NO: 593485 - DNA, 95 bp, Homo sapiens
gccactgtcttctcttcctcctccaccgagtcgtgctctcgccccaacccgcgcgccagaattgcggcgagcagtaagaagcagcgtgtggaaaa

SEQ ID NO: 593486 - DNA, 75 bp, Homo sapiens
ataggcgtgagccaccgtgcctggctgaaggaacaagcacatcatgattgacttggggactggcaacaacaacaa

SEQ ID NO: 593487 - DNA, 90 bp, Homo sapiens
gtcagtggtaataataataataagtattttcaatgtggagttctatgcaggactggaatgtcacgtggaataccagcaaccccgacttca

SEQ ID NO: 593488 - DNA, 100 bp, Homo sapiens
caaatatgcagcaaagattacaccaagatctgtgctgaccacaggaattggatctactagtgcagcctcccgcgacgatgcccctcaacgttagcttcac

SEQ ID NO: 593489 - DNA, 74 bp, Homo sapiens
cagaagaagccctggagaatggaccaaaaggtgctggagaatctggtaaaagcaccattgtgaagcagatgagg

SEQ ID NO: 593490 - DNA, 100 bp, Homo sapiens
aattgttcagttgcaaaaagaaactggagccaccatcaagctgtctaagtccaaagatttttacccagatgaagattatggaagagattcgggccctccc

SEQ ID NO: 593491 - DNA, 50 bp, Homo sapiens
ctccggggaggtcacctgacgaggaggctcagaaaaaatgtctgaatcag

SEQ ID NO: 593492 - DNA, 90 bp, Homo sapiens
cagcagtggtcttgctcttactccttttggttgaacaagcaggtgtgcctacaggggttgtggaaggagacgctgcccccggtctatgcc

SEQ ID NO: 593493 - DNA, 102 bp, Homo sapiens
gcgattttggtatttcagcagaaagactttcacagagactttcttcatgagattgaaacagatgatgttgaatttgaagtatcatcggaccgacggactggg

SEQ ID NO: 593494 - DNA, 75 bp, Homo sapiens
tggagaaaaactggatgttggtagaaaaagcaagagtttgttatatagcaatggcaggatggtggctggcaaagt

SEQ ID NO: 593495 - DNA, 98 bp, Homo sapiens
ggtgaccagcgtcacgctgctggtggcccgggtcttccagaaggctgtagaccagagtatcgagaagcttcctgcagatttcacaaaactgcatctta

SEQ ID NO: 593496 - DNA, 89 bp, Homo sapiens
atgatcatcagtatttgcctcctgtgtcccaaccggcctgagtcaagtttttcgttggaatatacgttgcacatttatggcgattctga

SEQ ID NO: 593497 - DNA, 101 bp, Homo sapiens
cgttggtgggagccgtgctctacctctatccggacttgtcttacaaggaccggcactggcatgaagcctgtttccactgctcgcagtgcagaaactcactg

SEQ ID NO: 593498 - DNA, 82 bp, Homo sapiens
gaagtactgagcctgttggaggaactggcccggaaacaggaggacgtacctgcaccagtcaggggccctgaccatggaggcc

SEQ ID NO: 593499 - DNA, 96 bp, Homo sapiens
gcccctgctgctactggccctgctgggctggctgctgctggccgaagcgaagggcgacgccaagccggagggctgagcagcgtgttatgtcccggg

SEQ ID NO: 593500 - DNA, 75 bp, Homo sapiens
ccccgatggccacgatgtggatgatcctcactccttccaccacatttcttcatctatgaaaatagaagactggat

SEQ ID NO: 593501 - DNA, 75 bp, Homo sapiens
ctggagcctcagttggaagcagccgatccagcctgcggagcctgtggggcagggaaataaatgcccggcttgatg

SEQ ID NO: 593502 - DNA, 82 bp, Homo sapiens
gagattgttacacaaattgatgcacaaaataagctggaaaaatctgagttcagacttggttccttcaacctagagaaagttg

SEQ ID NO: 593503 - DNA, 100 bp, Homo sapiens
ggatgtgtctggtgtgggtttcccaagcaaggttccttggaagaagatgtctgcagaggttatcttgacgaatcagattacaacccatctgagtggagcc

SEQ ID NO: 593504 - DNA, 100 bp, Homo sapiens
gaagctcaagatgtggggagtggcagagagtatgcattaaaggtgccctacgagacgctgaacaaacgctttcgcgccgctcagaagaacattgaccggg

SEQ ID NO: 593505 - DNA, 90 bp, Homo sapiens
ttgcagccgagaacgagctcaaccaggggtgagcccctccagactccgaataggagatcaagagtttgattcattgcctgctttactgga

SEQ ID NO: 593506 - DNA, 101 bp, Homo sapiens
gtccaggaaggaggaggaataatatttatggagcatatattatggaacacactggatgaaaaagaaagtcggcgtctgttccaacagatcctttctggtgt

SEQ ID NO: 593507 - DNA, 100 bp, Homo sapiens
ggcagccaaaagattgaaggaaggtgatacaatgatggggcagcaagtggccaagttcggctttccagtttggcagcagcactacaaatttcaacttcac

SEQ ID NO: 593508 - DNA, 88 bp, Homo sapiens
ttcccgggaggggggagcggcgttggaggccaccgtttccaggacatgtctcaggaaggctatggaactagatctcaacctcctctgg

SEQ ID NO: 593509 - DNA, 90 bp, Homo sapiens
gttctacgagaccctccctgctgagatgcgcaaattcactccccagtacaaaggcattgaatgccccagaggagcccgaaacctcccagg

SEQ ID NO: 593510 - DNA, 83 bp, Homo sapiens
gcacgcgggaggccgaggagaagctggaggagcggctgaagcgcgtgcgcatggactccctggaggaaaagcggaagcggcag

SEQ ID NO: 593511 - DNA, 75 bp, Homo sapiens
tctctttctggcctggaggctatccagctggtttccagtgacagtgacagtgactcggatcttagctcctccagc

SEQ ID NO: 593512 - DNA, 100 bp, Homo sapiens
tttttcctgaagtgctacttaccgaaattcatctgtcacctggaaaatttgagatggtccagtagtctatgcagcatatttaaaaatggagcacagtgac

SEQ ID NO: 593513 - DNA, 98 bp, Homo sapiens
ttcaaagcacctagtacctcctaccattgtcaactgatgtatccagttaaagcaggcaatagatgaaaataaaaatgctcttcaaaaattaagcaaag

SEQ ID NO: 593514 - DNA, 100 bp, Homo sapiens
agggccttaaaccaggcccttggtagggctcgtcggaaaaaaagttctgctagaaaatttggtctacagaaactttgggagtggtgcttaggacttgtac

SEQ ID NO: 593515 - DNA, 98 bp, Homo sapiens
aaactgggaagaggaccctcaccaggaaccacatctgccagcaccttgatcttgaacttctcagcctccagaacgcactctacacccccaagtgcata

SEQ ID NO: 593516 - DNA, 141 bp, Homo sapiens
tctatcaatgggaaggcacggaagcatggtgaaaactatagtgtggactacctgacagatgttttggattttcaaaatggctgcagctcctcaagcaccggggcggggatctctccgtaagacgagacctctggttgtgaa

SEQ ID NO: 593517 - DNA, 95 bp, Homo sapiens
ttgactggtgaatcagatcatgttaaaaagtctttagataaggatcccttacttctatcagaacgtactcaggaaaagtggggatttccaatgtg

SEQ ID NO: 593518 - DNA, 100 bp, Homo sapiens
atactgagcttcttcctatttgccatggagtcgagagaaagaacttatgggtttcagcaaatcggtaaatgaagcacgttcaaagatggatgtagcccag

SEQ ID NO: 593519 - DNA, 75 bp, Homo sapiens
gtgggtctgcatcgagaccccgagctctggagctggaaaaacccggtttaaggaagaaatctctaaacgttttaa

SEQ ID NO: 593520 - DNA, 100 bp, Homo sapiens
atcggttgctggaaaactctccgtctttgctaatggagtcgtgacttcaattcagaccagccggttcctgctggaagctcctggtctgatctggggatac

SEQ ID NO: 593521 - DNA, 83 bp, Homo sapiens
cagcccggccccgcccgcgccggaagagccacgccggtactggctgtgatcgaacttctcaaccctcagagacttagatcttc

SEQ ID NO: 593522 - DNA, 75 bp, Homo sapiens
gaagacaatcagtctagtgagatgcagctaactatcatgagcgtcttgttgttcatcgagcactcagtagaggtg

SEQ ID NO: 593523 - DNA, 49 bp, Homo sapiens
ctggactccaaggccacggataggcttttgtggccacaggaaccaatct

SEQ ID NO: 593524 - DNA, 98 bp, Homo sapiens
gtgaaggcaatgatttataccatgaaatgattgaatctggtgttatcaacttaaaagatgccacctctaagagatttagaactgatttttcagaggga

SEQ ID NO: 593525 - DNA, 100 bp, Homo sapiens
aaacaaacacccccaagaagaaggagagtaaagtcagcatgagcaaaaactccaaactcctctccaccagcgccaagagcccacaccagttatcctattg

SEQ ID NO: 593526 - DNA, 74 bp, Homo sapiens
tgagaggggaagatggggacaaagccgctccacctcccatgtcggcacagaattatatccagatcgagagacag

SEQ ID NO: 593527 - DNA, 101 bp, Homo sapiens
ggaggcgacggccatggccacagatcgcccaggaccacaccgcagcgtaactgcaggcctctcagcgaaaaagggggaaagcaaagacccgggtgtgcatc

SEQ ID NO: 593528 - DNA, 96 bp, Homo sapiens
atgaggaaggacacttggaaattgaacaagcgtcacttgacaagcctatagaatcgatctccctagagcacgaaatcctgctgcacccgcgctact

SEQ ID NO: 593529 - DNA, 97 bp, Homo sapiens
caaaccgagctcccgtctgccttgcaggatcgctacggttcctactgatccgagctctgtgactcaggcttacgatggtgacggcaacaagaactcc

SEQ ID NO: 593530 - DNA, 100 bp, Homo sapiens
aagccttgaaaaagctgccctgagacggtgtcccgccgaaagtgtggcttcctgttgtggtgcatggccccgagcccttctaatggggctgaactgctct

SEQ ID NO: 593531 - DNA, 82 bp, Homo sapiens
gccggcgctgctgagtttcttcatctacaacccgcgcttctggccgcgggaaggagagttgacgaaggatcagagattggtg

SEQ ID NO: 593532 - DNA, 100 bp, Homo sapiens
tgccagcatgtaccagcctgccctgccacacagtgtgcctgcaacctgtccggggatcccagggagggtttccaggcctgaggtgcccgccctggcccca

SEQ ID NO: 593533 - DNA, 75 bp, Homo sapiens
aatcgcctgctttgattcattgaaaagacggtaaagaacaggtccaagaaaagctcaaagaaagcaaataccagc

SEQ ID NO: 593534 - DNA, 98 bp, Homo sapiens
gaaaaaccaaacatgagggtagcaggtgatattatacccaacttctaatagctccaaatcagctgaattacaccgaatggtagttccaaaaaatagcc

SEQ ID NO: 593535 - DNA, 90 bp, Homo sapiens
atcacccctagggagagaggatcggggacccgctgatcttccagctcccctcacccaacgtcgttttcatgatcaacatgggagactccc

SEQ ID NO: 593536 - DNA, 98 bp, Homo sapiens
accaggactcctgacaaccaggaaggagacactttttcaaaaatggcaatggtatcagaattcctcaagcaggcctggtttattgaaaatgaagagca

SEQ ID NO: 593537 - DNA, 82 bp, Homo sapiens
ggcgcccttcccctggatacggtcactttctacaaggtgaaatgacaatggatgctctgttggctcgattgaaacttctgaa

SEQ ID NO: 593538 - DNA, 100 bp, Homo sapiens
tgaggacttaaatgaagccactgattagcaatttaaagatcctctccaagggcagctgcaatgactctccgcacggtattattgtcattgcaagcactat

SEQ ID NO: 593539 - DNA, 75 bp, Homo sapiens
agcccatctgatgaatacaaagacaacctgcaccaggcagtgggacctggtggtgtcaactcaggcccagtccag

SEQ ID NO: 593540 - DNA, 50 bp, Homo sapiens
cgacgatctccatatttcattgcaagggcccagtcatatatgcacagtta

SEQ ID NO: 593541 - DNA, 110 bp, Homo sapiens
ctaatccagtatttgcggatagctccaaactgggatatgagaaattgtcgtaaatgaagtcaattttgtgagaaaatgcattgcaacagacacaagccagtacgatttgt

SEQ ID NO: 593542 - DNA, 50 bp, Homo sapiens
aagaccactttgggctggaaatatcatcagccatgtgggtcccatcgcag

SEQ ID NO: 593543 - DNA, 98 bp, Homo sapiens
ggtcagcgtttccctggagaggaagaggcaagattgttaaaggaaatgggctggcaggaagacagtgaaaatgatgaaacatgtgctcccttaactga

SEQ ID NO: 593544 - DNA, 90 bp, Homo sapiens
gtccaggctgacgtggtgcctattaacataactgctgtgttccagatcatctccctggtaatttaccccgtgaagtacacccagaccttc

SEQ ID NO: 593545 - DNA, 100 bp, Homo sapiens
ggttctgaagactgccctcatccacgatggcctagcacgtggaattcgcgaagctgccaaagccttagacaacactcccgatttggaaaaacaaccaaat

SEQ ID NO: 593546 - DNA, 75 bp, Homo sapiens
ctatttcaagatgatatttattcaccaaacaaggttgctgcttttgctcagaggacatccatgaccctaatggtc

SEQ ID NO: 593547 - DNA, 83 bp, Homo sapiens
cccagaccttgccagagacctggcaaatgacatcatgacactgctggtaggtgagtgctgtcctcggctcactttcctcaagc

SEQ ID NO: 593548 - DNA, 80 bp, Homo sapiens
ctctgcctgtgttacatttagccaacaccacactttcaggtgggcgtctctttggcagcaggaggtgctcgagcttgtcg

SEQ ID NO: 593549 - DNA, 151 bp, Homo sapiens
gaagaattcgggtggattattctataaccaagagagcgcacacaccaacaccaggcatctacatgggcagaccaactcactctggaggctgccatcgagaacctcaatgaagccaagaactattttgcaaaggttgactgcaaagagcgca

SEQ ID NO: 593550 - DNA, 75 bp, Homo sapiens
tactcagtttacagccactgcagtatcacagccagcacggccacatgatttcttcgatgcacaaacactggatgc

SEQ ID NO: 593551 - DNA, 100 bp, Homo sapiens
tttcttaatgtccaactccaagaagcagtaggacagcgttatcctgaagatagttcacggaatgctgaaatacttttaaagctgataaacctagggaaac

SEQ ID NO: 593552 - DNA, 98 bp, Homo sapiens
gaaaactcactggaaaatgaaaagttaaaggatgaattactgaaatttacagctattggaatcagatgcaaagatggtgttgtctttggggtagaaaa

SEQ ID NO: 593553 - DNA, 75 bp, Homo sapiens
cagccgcctccgaagatgggggatttctacgacccggagcacccgacccctgacctccatcaagaaatcggcgag

SEQ ID NO: 593554 - DNA, 74 bp, Homo sapiens
gagagcgcgaatatcgtcatcgttagaaggccatcatctctcagcaaggtgacatatttgtttttgacctggag

SEQ ID NO: 593555 - DNA, 101 bp, Homo sapiens
gcagctgtaacagaagctgaaaaccaacaaatgacagttcaagcccagccacagattgccacattagcccagtggaaatcctgactgctcgtcagaagaaa

SEQ ID NO: 593556 - DNA, 115 bp, Homo sapiens
tgaaggtgaagaagatgaagatgatgatgaaggggaggaaggagaggagagaaggaggacgaggacgaggatgtgaagaagagaagggaaaagcaaaggagaagagacaggacgc

SEQ ID NO: 593557 - DNA, 101 bp, Homo sapiens
acaaaagaagaccaggagatcctgcatagccttcacagagagtccagttgccaaggtgtgatccctcacatccacaaatctctgattggaaagaagggaca

SEQ ID NO: 593558 - DNA, 83 bp, Homo sapiens
ttcagccagcacactcctcgcgagcaagatggagaaggaggagacaacccgggagctgctgctgcccaactggcagggtagtg

SEQ ID NO: 593559 - DNA, 100 bp, Homo sapiens
ggcgatcaaggccaagtatccgccagtcaataggaagtacgagtgcagagatggagttggtccagcatattggaatccctgccagtaagatcatctgcgc

SEQ ID NO: 593560 - DNA, 100 bp, Homo sapiens
ctgactacctgctgtacaccctcaacaaacaccagcgctttggcctgagaaatgccagtggcctgacagcagcagacattgcacaaacccagggtttcca

SEQ ID NO: 593561 - DNA, 100 bp, Homo sapiens
cgagagatccctgaccccgatagcgctgaactgctctgctgcaccttccagcctgtcaacaacaacctcactgtgtccagaatgacagggtccagaaact

SEQ ID NO: 593562 - DNA, 97 bp, Homo sapiens
ctccaaatggctgctctctggcgttcctcacactccccctgaagttcatctaagatcttcattcttcaaaggctgaccggttccctgatgtgttacc

SEQ ID NO: 593563 - DNA, 100 bp, Homo sapiens
gccacctgagtggcgcggcggtgtcagggaaagcaggcaggatgggagagtcgccgatagaaccacctcttccctgcctcctgggcttgggggaagcttg

SEQ ID NO: 593564 - DNA, 51 bp, Homo sapiens
ggcgagtccggtctcaaaatggagcaacctgggctggctgagttatggggc

SEQ ID NO: 593565 - DNA, 90 bp, Homo sapiens
catggacccctcgcgagccatccagaacgagatcagctccctcaaaggtcaagtttacccatgggggaactggttccagccaaaccgcac

SEQ ID NO: 593566 - DNA, 75 bp, Homo sapiens
actgggatatttactactgggccacagagtttgccagatccggcccggtgcctgggttccaggaggacacgctgc

SEQ ID NO: 593567 - DNA, 50 bp, Homo sapiens
ggacaatgcccagctgggttttctgggaacctggagtagagcgtgtgctc

SEQ ID NO: 593568 - DNA, 83 bp, Homo sapiens
ggacaagatggtttacatctcgaacgctaatgatggaaactggccaacattaaaacagaattctagctcttccgtgaaaccag

SEQ ID NO: 593569 - DNA, 82 bp, Homo sapiens
acaagacatttcctgctcggaaccttgtttactaattgtcagcccaaggccaaccccactgtcactctgttcccgccctcct

SEQ ID NO: 593570 - DNA, 82 bp, Homo sapiens
tccggtgtaacgttcgggctccgtctcaggggctgaagtttgtgagaattctgcttggtcagaatcgtgatggcattgtgtt

SEQ ID NO: 593571 - DNA, 75 bp, Homo sapiens
caggtccctgctgaatcacacgccgccatccgggaggcccagggaaggagaagatggtataaactggtccatcag

SEQ ID NO: 593572 - DNA, 74 bp, Homo sapiens
ttttgatgaacaatattgaacgctatcttaaggtcccgcggcagtgctggtggccatggttcccgtagccagaa

SEQ ID NO: 593573 - DNA, 90 bp, Homo sapiens
cttcgatggacctgttgaaaaaaatctgggaggttgaacttattaatgtgccatgcctctgcaactcctcctgttgctgatcctactggg

SEQ ID NO: 593574 - DNA, 112 bp, Homo sapiens
ggtcgcgcgcggccgagtcgcggaggcgcctccgctgcagtcgctgcgtctccaaggctttatcctgtggataaacgcagagtgaacgagtttggggagtcctacgaggaga

SEQ ID NO: 593575 - DNA, 99 bp, Homo sapiens
cagtggcacctgcgcgaagctggccaaagcctgcccagacggctcacctgtgcgggatggaacaaaagctcagaccatgaccgacttcataccttggta

SEQ ID NO: 593576 - DNA, 75 bp, Homo sapiens
cgcgaaatgatgggatagcgttgcaaatccttaaaagagtcttaacggcccgatgagagaaagggaaagttaagg

SEQ ID NO: 593577 - DNA, 100 bp, Homo sapiens
tgaaacctttgccctctgttccagaagagaaaaagcccaggcataaaatcatctccatattctcaggcacagagaaagagacattttaaatccaaaggat

SEQ ID NO: 593578 - DNA, 100 bp, Homo sapiens
ctgtcacccttgacccaaactttctggatgcttatatcaatttaggaaatgtcttgaaagaggcacgcatttttgacagatttggcagctgatcggaagc

SEQ ID NO: 593579 - DNA, 50 bp, Homo sapiens
gcaatccttggctcactgaggaggtttgatgctgtctttgcatttcaact

SEQ ID NO: 593580 - DNA, 50 bp, Homo sapiens
ccgcctggcaggccctgcgcaccaggtgtttggccacgggaaggccaacg

SEQ ID NO: 593581 - DNA, 82 bp, Homo sapiens
gctggactaaacaggtcacctgcaggtcatcatcagatttgaaatatttaaagtggatacaaaactatttcagcaatgcaga

SEQ ID NO: 593582 - DNA, 87 bp, Homo sapiens
atcgtcttcctcttcagccatccaggctgctctttggcgtaaattgcaatcgattagggatcgtttctcagaatcaagttagaagtg

SEQ ID NO: 593583 - DNA, 83 bp, Homo sapiens
cccttcgccaaggagatcgtctctctcatcgaggcccaaaccgccaagagagttaagaaagacgtggacaagggcacacggca

SEQ ID NO: 593584 - DNA, 100 bp, Homo sapiens
ccctccgagccccttcctgagaagatcccagagctcccagctcctccagcagccgacaggaggcccgtcaagatgcaggcaggcattgccaccccaggga

SEQ ID NO: 593585 - DNA, 90 bp, Homo sapiens
tgcaggtgaacaagctgtggtacaagcccgtggaacaattcatcttaccagaggtcttatatccagatggccaggctcagatgattcacc

SEQ ID NO: 593586 - DNA, 83 bp, Homo sapiens
aaggaatctgcttttcaagtatgccaccaacagtgaagaggaactgtggctgcaccatctgtcttcatcttcccgccatctga

SEQ ID NO: 593587 - DNA, 83 bp, Homo sapiens
aagaaactctgcaagcccttagcacatgattaagtaccggtacatcccgttcacacatgggaagagaaggtacagaggcaagg

SEQ ID NO: 593588 - DNA, 73 bp, Homo sapiens
agcggcagagattgccaatgccaagtccagagcggttagataagctttaccgatttgttacaactcaagcaag

SEQ ID NO: 593589 - DNA, 101 bp, Homo sapiens
gtgctgggacagccatggtttcagacgatggttcactttcttacacactatgctgacaagattgaatctgttcatttttcagaccagttctctggtccaaa

SEQ ID NO: 593590 - DNA, 82 bp, Homo sapiens
aggaccaagagtccaggacccaggcctccatgaagaagtggactattctgagaaactgaagttcagtgatgatgaagaggag

SEQ ID NO: 593591 - DNA, 90 bp, Homo sapiens
agcagttctgcaaattctcagcagggtcagtgggagacaggtacgaaggtggatcaagagcccaatggtcagtgtggacaagcatcagag

SEQ ID NO: 593592 - DNA, 98 bp, Homo sapiens
gcagaggtcgctaactacaagaaatgttacactcgagaaagtctattcgtgtgaccaggagaggcagagtgccctggaagaggcccagcagaatcccc

SEQ ID NO: 593593 - DNA, 100 bp, Homo sapiens
tccagaaggaacttgtacaaacaggacctgcctaattaccttcaaacctgaggagaaggggaccagctctccggactatcggcactaccttcgaatgtgg

SEQ ID NO: 593594 - DNA, 98 bp, Homo sapiens
ggcaaccgggcggccacgttcccgctgcagctgagatctgtatctgtggacctgaatgttgatccctcgcttcagattgacatacctgatgcgctcag

SEQ ID NO: 593595 - DNA, 80 bp, Homo sapiens
caggaataaggaagcgacctgcaaccgacggtacaggtttgcagattccgccagcagcacagcaagctctacagatgagt

SEQ ID NO: 593596 - DNA, 100 bp, Homo sapiens
gaatcgtagtcttcctaggagttgtggaagcagggaaaggcctggagatgaggaagctggttctctcggggttcttggccagcgaagagatctacattaa

SEQ ID NO: 593597 - DNA, 100 bp, Homo sapiens
cgaaggtgcggcggcggaggggagccagggcgccccagcagtgctgggcctaaaggagataacatttatgaatggagatcaactatacttggtccaccgg

SEQ ID NO: 593598 - DNA, 83 bp, Homo sapiens
gcaccatggagtcaccttttagcccgggactctttcacaggctggatgaagattggggtgggaccagggagattggatctgct

SEQ ID NO: 593599 - DNA, 82 bp, Homo sapiens
gagagaagtttcctgagttctgcagctcaccctccccacctgtggaaggaatggaagttggatacactttgtgacttgtacg

SEQ ID NO: 593600 - DNA, 75 bp, Homo sapiens
tatgcatactccacagcacctgacttaattcagtgcacaaatgagatgaatgtgaacatcccacagttggcagac

SEQ ID NO: 593601 - DNA, 98 bp, Homo sapiens
agtgagcggcggctcggcgcaagcctgacgagcaggagccgagctcagcaggtccggaaacgcttcgttaagggactcaggcagtacgggaagaactt

SEQ ID NO: 593602 - DNA, 75 bp, Homo sapiens
attgaatatcagaatcttgttgactacataaaggatatcaatgcttacaattgtgaagagcccacagaaaagtta

SEQ ID NO: 593603 - DNA, 100 bp, Homo sapiens
aatgctggcaagaccactcttctgaagcagcttgcatctgaagacatcagccacatcacacctacacaggtcgtccttggtggaaggaaccatgaactgg

SEQ ID NO: 593604 - DNA, 98 bp, Homo sapiens
gagagagcgagctgagtggttgtgtggtcgcgtctcggaaaccggtagcgcttgcagcatgacatggatgggtgcaaaaaagagctgccccgcttgca

SEQ ID NO: 593605 - DNA, 101 bp, Homo sapiens
tgattggccagtttatctgctccacggtggagcagtgtacaagaaactgttgtgacaggaccgttccacttcagtgacattatgatccagaagcataaggc

SEQ ID NO: 593606 - DNA, 82 bp, Homo sapiens
ggagcagcagttccatcccgagctctctgatgtaaaggatggagtaaatcaagcagcacctgcatttggatttggcagcagt

SEQ ID NO: 593607 - DNA, 100 bp, Homo sapiens
ggaagtactcagccgctaaatccaagggctcctcgaactcctatgccattaagaagaaggacgagctggagcgtgtggccaagtccaaccgctgattttc

SEQ ID NO: 593608 - DNA, 74 bp, Homo sapiens
gtgatcgtggaacagcctaagcaggttgactatagtcaatggggccaatggagccaagtgtatggaaacccaca

SEQ ID NO: 593609 - DNA, 95 bp, Homo sapiens
cgtcactcgctgggctgctcttcctgaggttttcctaagccatcccctggcggaaccgcccccaggcataaagacagtgtttgcaggatccagtt

SEQ ID NO: 593610 - DNA, 75 bp, Homo sapiens
gaggaaaatgcaagaagactgatggagcaggcttgcaatattaaaaggctgacgcttgtgcttgccctggcaacc

SEQ ID NO: 593611 - DNA, 57 bp, Homo sapiens
cttctacaagccgggaaccagctaccgcgaatttaattgtcctgaatccactcacag

SEQ ID NO: 593612 - DNA, 115 bp, Homo sapiens
tggagtctgcgaaggccgggacccggttccccggcccacagtgggggtgtgcaaacccgagagaactgggaattgaatgatctggcacgggaccctccagcacagtgttcagcag

SEQ ID NO: 593613 - DNA, 76 bp, Homo sapiens
cacggcaccaaaaacaagcgcgagacaaggtctcactatgttgcccaagcagattttgaactcctggcctaaagtg

SEQ ID NO: 593614 - DNA, 100 bp, Homo sapiens
cccgggcagaagaggaggatctcccacctttccaagcaaggccaggaggccgccatggcatcagatgaaggcaaactttttgttggagggctgagttttg

SEQ ID NO: 593615 - DNA, 100 bp, Homo sapiens
cacctcaccaagaagctactggacctcgttcagcagtcatgtaactataagcagcttcggaaaggagccaatgaggccttatgtttgatcatcggccaag

SEQ ID NO: 593616 - DNA, 100 bp, Homo sapiens
gccgggcgacctgggcaccagcaggacccgaggccaggagccaggggcccagaagatggagggggagtctcactgtgttaccccagctagtcttgaactc

SEQ ID NO: 593617 - DNA, 99 bp, Homo sapiens
caaaaggagattctgatgaagaagttattcaagatgctgagtttattgatgacattgagttaatgttttcgaactgctttgaatacaaccctcgtaaca

SEQ ID NO: 593618 - DNA, 129 bp, Homo sapiens
agcgcagaaagtgaagctgtttcgggccagcgacccgctgctcagcgtcctcatgtggggggtaaaccactcgcgctgctgctgaagctgatggtattgatccattaataaacctcctgtctagtaaac

SEQ ID NO: 593619 - DNA, 80 bp, Homo sapiens
ggagagggggcgctgagctgttgggttcaaatctgaacatcaatgatgtactagggaactactcattgactcttgttgat

SEQ ID NO: 593620 - DNA, 100 bp, Homo sapiens
cagggacgtcctcattgtcctcgttacagatgtagagctaaaacgactgaaggatgctttcaagaggacctgtggactctcatattacatgggccagcac

SEQ ID NO: 593621 - DNA, 100 bp, Homo sapiens
gcagaggaagcccctggcggccggcttggagaggccgagggtttgatgaaggtggaggcagcgcggctctcagagtgaagatagtccaagtcctaagaga

SEQ ID NO: 593622 - DNA, 82 bp, Homo sapiens
cctcacctcgctactcgcttgcctacccgccggcccgcgggtctacttcctcaaaggctgaccccgcactacatctacccac

SEQ ID NO: 593623 - DNA, 74 bp, Homo sapiens
tggacgcttgtggaggaaacccacactaacgagttcatcacctggagccaggttaaacccatccagagtaatgg

SEQ ID NO: 593624 - DNA, 78 bp, Homo sapiens
gtggccctcggcgcggcagcgctccagctcgctctccaccttcagccctgctggtttaccgtgtcttcaggaacgaag

SEQ ID NO: 593625 - DNA, 97 bp, Homo sapiens
aagcttcgaggcatgatggtcgactacaagaagagggcggagcggagacgggagtattatgaaaagatccatggcaccttgggcagtggccgctcct

SEQ ID NO: 593626 - DNA, 75 bp, Homo sapiens
ttcttactcgggagctggctgaagatggctactctggagttgaggtggttgctccttatcaaaccttattgaacc

SEQ ID NO: 593627 - DNA, 100 bp, Homo sapiens
gggccgccggggccgccatggagcccgactcggtgattgaggacaagaccatcgagctcatgctgatcgtcgtgtgttgccacccattcatgtcaagatg

SEQ ID NO: 593628 - DNA, 105 bp, Homo sapiens
ttgcattgactggaaacaatggcatttacagaaagagtcaacagcagtggcaacagttgacaggatcagttttggaagatgcttggaaggaaaaaggaaagatgg

SEQ ID NO: 593629 - DNA, 50 bp, Homo sapiens
tactactgtgacaacattaacgaggatgttaagcaagtttttggacagac

SEQ ID NO: 593630 - DNA, 100 bp, Homo sapiens
gagctcttaacccagtttgaaacgtaactggttccctgaccaggcccgcgatgctcccagcccggtgagacctgcctgaatggcgggaagtgtgaagcgg

SEQ ID NO: 593631 - DNA, 90 bp, Homo sapiens
ctccatgcggagccaagatggggaatggaactgaggaagattataactttgtcttcaaggtgtccaccttgtacccaacacaataaatgg

SEQ ID NO: 593632 - DNA, 75 bp, Homo sapiens
cagaagcagccatggaaaaattaatcaacagagtgggacctaatggtgagaggcagggccactacttctcagcac

SEQ ID NO: 593633 - DNA, 50 bp, Homo sapiens
gtcacatctctagattggaatgttttgcactgattgcaaaaataaagtcc

SEQ ID NO: 593634 - DNA, 100 bp, Homo sapiens
catccaaacatcacgggacttcgttaaatcagtgcttcggggcacttagcacagcgcctggcgcaagtcactgcttcaaccacctgtgagaaattagaaa

SEQ ID NO: 593635 - DNA, 82 bp, Homo sapiens
tgctattgtgaggcggttgtagaagggggatatgagactttctactcggaatatcctgagtgttgcgtggatgtaaaaccca

SEQ ID NO: 593636 - DNA, 75 bp, Homo sapiens
cagagtgtggtcaggcggctcggactgagcaggtcaaaatgcagatcttcgtgaaaacccttaccggcaagacca

SEQ ID NO: 593637 - DNA, 99 bp, Homo sapiens
ccggttttgaccgccacattaccattttttcacccgagggtcggctctaccaagtaggatgtagatgatttctttgagcacgaacgaacatttcttttg

SEQ ID NO: 593638 - DNA, 100 bp, Homo sapiens
gatagttgggaatggagaccatcaaaggtccacagggtgttttctcagggggcggcttctcaggaagggactatgaaccgaggggatttccttctgtcag

SEQ ID NO: 593639 - DNA, 98 bp, Homo sapiens
gtgttcaatacacctcccacctgtcctcaggcatatcaaaggtcccctgtctgagctccactaccccatcgacagcctgaccaagaaacccaagggtt

SEQ ID NO: 593640 - DNA, 88 bp, Homo sapiens
gcgctgggcgagccgtgcgatctggacgcggcgctgctgaccgacatcgaagttcaaatctgaacatcaatgatgtactagggaacta

SEQ ID NO: 593641 - DNA, 96 bp, Homo sapiens
tgcccccggaggtgcccacgcagctgcctggacaaattatgtttgagaccttcaacaccccggccatgtacgtggccatccaggccgtgctgtccc

SEQ ID NO: 593642 - DNA, 96 bp, Homo sapiens
cttcacttccctcggtctgggcttctctgaggcggcgagagatggtcaggtctggagctcgaccgggccaggatactatggaattcataagaagtt

SEQ ID NO: 593643 - DNA, 97 bp, Homo sapiens
atcgcgtaccccttcaacgccaagcagcccaccgacatggcccggaggcagcagaaggtcttgcaagagcaaaatccgtccctagccacacatactc

SEQ ID NO: 593644 - DNA, 100 bp, Homo sapiens
acggccacatgaaagttttcagcctcatccagcaggcggtgacccgctaccggaaggccatcgccaagagaaagcaaccagcgagatgaatactgctgag

SEQ ID NO: 593645 - DNA, 75 bp, Homo sapiens
cagcttaatgattctgcagcatagctgcatcccatatctatcaaaatcaatttgttcaaatgatcctcaattcac

SEQ ID NO: 593646 - DNA, 95 bp, Homo sapiens
tggcaactggaaaatcatccgatcggaaaacttcgaggaattgctcaaagtgctgggtttttcttcccccagtccctcagctgctgctgctgctc

SEQ ID NO: 593647 - DNA, 100 bp, Homo sapiens
tgggcgaagcacgctactacctggtgcagggcctgattgaggactgccagctggcgctgcagaacctctaaaatgcagacctccagctctagatctgtgc

SEQ ID NO: 593648 - DNA, 75 bp, Homo sapiens
gcagaacgcgacgggtctgcggcttagggagtggggtttaatctggactgaattggaggaaaggaactggcacca

SEQ ID NO: 593649 - DNA, 75 bp, Homo sapiens
ggtggattgactacggcaaagtggccactcagctgtgagccgtgagctttgaggcggtgggatgtgtcagcagaa

SEQ ID NO: 593650 - DNA, 133 bp, Homo sapiens
ggccatttccctttcttcagagcctacctaggacctcatcctgcctctccacacacaccagtcatccagagcccgaacccagccctcaccttctgcgtaaagacccatgaccggctgtactacatggtggccc

SEQ ID NO: 593651 - DNA, 100 bp, Homo sapiens
ttgtcgactgtggctttgagcatccgtcagaagggtgtgggccgaagatatgctcatgtggtgttgaggaaagcagacattgacctcaccaagagggcgg

SEQ ID NO: 593652 - DNA, 82 bp, Homo sapiens
aacaacttcctgcgcttccagcttaccatgcggctgcgctccataaaggcagacgacaaggctaatctagacgaaatccaga

SEQ ID NO: 593653 - DNA, 95 bp, Homo sapiens
aaaaaagaaaaacgccacctatgtccccagcttgtgaggacacagcagccccatttgtctgtggctcaggacatccccaagctgcagaaactagg

SEQ ID NO: 593654 - DNA, 100 bp, Homo sapiens
ggaatggagaaggaagaggagtcggtatctactgtgcgtttcagtcaacaatacagcttgtgttcgacaatattccttgatgacagcacagccatccagc

SEQ ID NO: 593655 - DNA, 75 bp, Homo sapiens
cacaaatgctccttctcctggagacgcaactcaagttgctggatttgtgcgactcggtgaaggatgatgcccgga

SEQ ID NO: 593656 - DNA, 94 bp, Homo sapiens
ggatgacatatttttggacctgaaacagaaattctggaacacctatatggtcatctccgcggtgtcgaggctctccctgcacagcatcgcgcag

SEQ ID NO: 593657 - DNA, 98 bp, Homo sapiens
cccagaacagatggttacttggtgccagcagtcaaatggcagtcaaacccagcttttgcagaaactaatctggattcactccctctggttgataccca

SEQ ID NO: 593658 - DNA, 80 bp, Homo sapiens
gcgactcgcggaccggcgtccccggcgcgaagaggctggactcggattcgttgcctgagacctaatctgggagcctgcaa

SEQ ID NO: 593659 - DNA, 76 bp, Homo sapiens
ggattaaagctaaagacatagttcctggtgatattgtagaaattgctgactgtttcaatcttggagcagcgactga

SEQ ID NO: 593660 - DNA, 75 bp, Homo sapiens
gcaaccattggtctgcaggacatcactttagatgatgagggagtgacatccaacaccagtgacagcgaaagcagt

SEQ ID NO: 593661 - DNA, 100 bp, Homo sapiens
ttttgaagtcaccactgaggaggaattcaccctgttcgtctatggttgccttcttcctcatctctgcagtaactgtcttcatggtttcatagccttctcc

SEQ ID NO: 593662 - DNA, 100 bp, Homo sapiens
acttgggttgatatctgcaataatcctgctatggaagctgaaatactgaaagaaattcgagaagctgcaaatgccagtgaccaagaatatggcccaggtg

SEQ ID NO: 593663 - DNA, 97 bp, Homo sapiens
ctccgaagatgggggatttctacgacccggagcacccgacccctgaggaactctaatgatccaggacaaagaagttaccctggagtatgtatcaagc

SEQ ID NO: 593664 - DNA, 89 bp, Homo sapiens
ccgctcgctgggagagaggtacctctccttttccctctccctttccctaagttgctctaggtcgtaaccagcctttgaaaaaggagaaa

SEQ ID NO: 593665 - DNA, 83 bp, Homo sapiens
caacgcctggctcggagcagcagcctctgagaccatggtgaatccgggcagcagctcgcagccgcccccggtgacggccggct

SEQ ID NO: 593666 - DNA, 100 bp, Homo sapiens
tgaaaggagagacacttgtgaacattcaagtgaagcaaaagcctttcatgattataatgagatgctggaggaaggacatgagtatgcggtcatgctgtac

SEQ ID NO: 593667 - DNA, 102 bp, Homo sapiens
gagctcccaatgcgaaaaatctcctggctgcagctgcaagtcggccgtatactaacaaggtaattactttatggtaccgtccacctgaactgctactgggag

SEQ ID NO: 593668 - DNA, 114 bp, Homo sapiens
tgatgcaaccattttgtatagctgtagtagggaggcattgcaaaagctcattgacgatcaagatatcagtactccaaagattcaggtttactcacgtcatccagcagagaatgg

SEQ ID NO: 593669 - DNA, 100 bp, Homo sapiens
agaccccacctcaaaaaagtgctgttctagaaacagaggtactaaggagtcttttagtcctgctatacagctgcaccttgtacatcaagctccatgtaat

SEQ ID NO: 593670 - DNA, 100 bp, Homo sapiens
ctactccaaatcgactaatctatttattaaagcaagatccccccggaatcgacctagcaaggattggattcagcatcaaaatacatctactcatattgag

SEQ ID NO: 593671 - DNA, 100 bp, Homo sapiens
tggaaactggatgcagcaaggaaataggatttaaccgctctctgcctcccaggaatagccaggccagaagaaggaaggcctgtggtgagtgggacaggaa

SEQ ID NO: 593672 - DNA, 75 bp, Homo sapiens
ccgtgagttcgccgctggtggctccgggtaagccaagatgggtgcatacaagtacatccaggagctatggagaaa

SEQ ID NO: 593673 - DNA, 51 bp, Homo sapiens
cccggcgcagcagcatcatcaagactgttaccaatgctgtggtcacagtgc

SEQ ID NO: 593674 - DNA, 82 bp, Homo sapiens
aatatattgactactgccacaattccgtttttcagaagaagtgaagtcaagatgaagaaccatttgcttttctggggagtcc

SEQ ID NO: 593675 - DNA, 74 bp, Homo sapiens
cagaaacgggtcctgctgctcaccaagatcactttcctcgatgccaagaagagcctgaacctcaacatcttcct

SEQ ID NO: 593676 - DNA, 82 bp, Homo sapiens
atcagttctgcgtttgaaaggaaacccggatggatagaatgacagaagatgctcttcgcttgaatctgttgaagcggagctt

SEQ ID NO: 593677 - DNA, 100 bp, Homo sapiens
aattcaagttggtgttcttgggggagcagagcgtaagactttgaccccgacgcaggcttcagtgattgccgcggatcagaagcctgagcactttggctcg

SEQ ID NO: 593678 - DNA, 100 bp, Homo sapiens
tcagaaacacaaagcagcccaaccaaaggggaaggaaactgaaaaggccaaggaacgatacgacaaagccacaatgaaacttcatatgttgcacaatcag

SEQ ID NO: 593679 - DNA, 49 bp, Homo sapiens
gaggaccaggagcagaagaggaagagaaacatatgaaccttctgagcac

SEQ ID NO: 593680 - DNA, 98 bp, Homo sapiens
aacctctgcctccaaacccagaggagaagaaaaagaaggaccgattttaccgatccattttacctggagataaaagccaagctataacatcagaaatg

SEQ ID NO: 593681 - DNA, 100 bp, Homo sapiens
tgatttttagaactccacatttgagaactccatccggcacaacctgtcactgcatagtcgattcatgcgggtccagaatgagggaactggcaagagctct

SEQ ID NO: 593682 - DNA, 96 bp, Homo sapiens
cttgccgaacctacaggaagttcggcagaaccaattgaaagaccaacagcaacagcaagtggtatcgttatgtcctgatgacacagaatgcctgac

SEQ ID NO: 593683 - DNA, 83 bp, Homo sapiens
gtgaaaaaaggttttgagttcacactgatggtggtcgcctaaatgcgatggccaggtattactgacacaagtgtggaagcgtt

SEQ ID NO: 593684 - DNA, 76 bp, Homo sapiens
cgcggctaagtgaggaagccagccaggctctcatcgagactgtcaagaacaagtatgccacatcgaagcatgctaa

SEQ ID NO: 593685 - DNA, 50 bp, Homo sapiens
tactctgaggggcttagaaattaacaggctgagtcagtgctgattctctc

SEQ ID NO: 593686 - DNA, 75 bp, Homo sapiens
ggctcaaagactaaaattcttgtgtgaacgcaatgacaagtttctccacagacactacccaaagcagtccttcac

SEQ ID NO: 593687 - DNA, 83 bp, Homo sapiens
tctggctgtgctgcgcgacccccgcgcatggttccgtggggaccccactgcctggagtacaggtgcgcattgtctcagaaaac

SEQ ID NO: 593688 - DNA, 100 bp, Homo sapiens
ccttcaacaagtctgccctcaaggaagccatgtttgatgatgatgctgaccagtttcctgacgggatggggaaagacaccatagtcataaaagaagaaag

SEQ ID NO: 593689 - DNA, 82 bp, Homo sapiens
ccgcgccgggcgtggacggtgtggggcggtcccggccccgcagctccaattaaggaacagctatatcctgcttccttctgta

SEQ ID NO: 593690 - DNA, 100 bp, Homo sapiens
gaaccatttcaagtgctcttgcccaccaggcactcggggtcctcttcctgatggatgggaacaagccatgactcaggatggagaaatttactatataaac

SEQ ID NO: 593691 - DNA, 96 bp, Homo sapiens
ccgggcggaggcgtcagagccgcgcaccgcggacgagcaggcccaggagacatgggggacaaaggacagaaaggcagtgtgggtcgtcatggaaaa

SEQ ID NO: 593692 - DNA, 75 bp, Homo sapiens
aggcgaagctggccgagcaggctgagcgatacgacggttggtcaaagaaaaagtgatgtatgaaaaagaggcaaa

SEQ ID NO: 593693 - DNA, 100 bp, Homo sapiens
caggactcactgaaggagtttgtgcagtttgtgtgctcggatggctcgggccaggccaccggacaggccatcatgcagaagggggatacaaacataaagc

SEQ ID NO: 593694 - DNA, 99 bp, Homo sapiens
caccaaagtccagcacagaccctcgggcctcatcatggccaggaaggaagtcctgacggccacgctggatctggaggacgtccggagctacagggcgga

SEQ ID NO: 593695 - DNA, 100 bp, Homo sapiens
gcaggcagtggccacaagagcgaggagaagcgagaaaagatgaaacggaccctgttcctacaaacttgatgacttttgagtagaagcctgagaaaaaaag

SEQ ID NO: 593696 - DNA, 82 bp, Homo sapiens
ctagaagctccttccattcagatccaggattcactggcaaaatttgctggcagaaaactgaaagactgtggagaagatcttc

SEQ ID NO: 593697 - DNA, 51 bp, Homo sapiens
ccgggattggaccgacgcagccatgaatcctcaggatggatttagccgact

SEQ ID NO: 593698 - DNA, 75 bp, Homo sapiens
tcgccaaagagcttttcctaggcaaaatcaagaagcccattgcagatgcaaaggctcctgagaagcgggcctcac

SEQ ID NO: 593699 - DNA, 100 bp, Homo sapiens
aacaatgaagaggtaattcacttgaacaactttcactgccatcggggacaaggttccagaatatcttaaccatgtaagtaaacgcttagaggaagaggga

SEQ ID NO: 593700 - DNA, 82 bp, Homo sapiens
gagatgccccctcacatctatgccatcacagacaccgcctacaggagtatgatgcaagatagtgaattcctaagaagaaaat

SEQ ID NO: 593701 - DNA, 100 bp, Homo sapiens
aagagatattgatctgaaaagaggctttggttttgtgacaatgcagatcttcgtgaagactctgactggtaagaccatcaccctcgaggttgagcccagt

SEQ ID NO: 593702 - DNA, 82 bp, Homo sapiens
atgtctgcgagccaggattcccgatgagcagcaccagcagtaagagggctccgaccacggcaacccagaggctgaagcagga

SEQ ID NO: 593703 - DNA, 100 bp, Homo sapiens
tggcaaacgtatgtttctggaacattgcgatttggaatttcttttagaactcatcaaattgaagctgttccaaccagctctgcaagtgatggatttaagg

SEQ ID NO: 593704 - DNA, 89 bp, Homo sapiens
tcgttgccttgtatttccagagaacaggatgacgctgtcagtatagaaagtggtacaaacactgaacgccctgatacacctacaaacac

SEQ ID NO: 593705 - DNA, 101 bp, Homo sapiens
cggcggctgcgggctgagcggcgagtttccgatttaaagctgagctgcgaggaaaatggcggcgggagacaagttggatggcttgaggactggtactaaaa

SEQ ID NO: 593706 - DNA, 80 bp, Homo sapiens
gaaagaaggtgggagcggagagcgcaggcgtggattttttatcaagcagaaatgcatcgaacaacgagaatcaagatcac

SEQ ID NO: 593707 - DNA, 90 bp, Homo sapiens
ttttaacagtatcggcacttcagatttacattggtgcagaagcatacagtggaatttaaccaagtggcgatggctaattcagatggatcc

SEQ ID NO: 593708 - DNA, 82 bp, Homo sapiens
ggcagtggaaaatgcgctcgggctggaccagcaggccgggctctcgccatgggtcactgtcgcctctgccacgggaagtttt

SEQ ID NO: 593709 - DNA, 82 bp, Homo sapiens
cgttggcgcttggacggcgggaaccggctccggagcgagaacgcgcatccgggtcttcctccagcagctcaagggccgcgta

SEQ ID NO: 593710 - DNA, 83 bp, Homo sapiens
gggagaagcgagccgccccgaagagagcaggatgagactccagcccttccccgcgcacgagtgaaacacaaatcttttctaac

SEQ ID NO: 593711 - DNA, 100 bp, Homo sapiens
ccagaatgccatcttgaatgtaaaagaacttggaggtgagtacccagaacatgaagatgggtgggctgccgcgtacaacacctccaactcagaagccccc

SEQ ID NO: 593712 - DNA, 100 bp, Homo sapiens
ctaccaagaagggatctatcacctctgtacaggtgtctttcctgaagactatcttcccgtctcaaaatggacatgatggatccacggatgtacagcagag

SEQ ID NO: 593713 - DNA, 95 bp, Homo sapiens
ggtggagtctagacttccccaaggcgtgtacccaggctactgctgcttcctgtggcctccatggctgaggactggctggactgcccggccctggg

SEQ ID NO: 593714 - DNA, 100 bp, Homo sapiens
aactgtcaattttaggtccagaagtgtccaaaccacaagttctcaaaactctctgaaaaatggctccctccgagttaagctgtgagccgtgagctttgag

SEQ ID NO: 593715 - DNA, 100 bp, Homo sapiens
aacagatcaaagaaacccctccggccagtgagattgttctaccatctccagagggaacgctgcttcctggaaccacgggctcgtttctatgctgctgaaa

SEQ ID NO: 593716 - DNA, 76 bp, Homo sapiens
gtcctgacaatgggcagaacgaattcagtgatatcattaagtccagatctgtcaaatctacctgatgacatctttg

SEQ ID NO: 593717 - DNA, 75 bp, Homo sapiens
gccgtagcgtcggtgctggaagacgaggccacagacacttctgatagtgaaggtgtaccttccggtttcccagca

SEQ ID NO: 593718 - DNA, 76 bp, Homo sapiens
tttacttctcctccttctttgttcaagactgggcttccaccgagcaggctgttataatggattagtttatgttctg

SEQ ID NO: 593719 - DNA, 90 bp, Homo sapiens
ttgtagagttccgtgactcccagaatagtgaggcagactttcaataaggagatcaaaaccatgaagaaattcgaatctcccaacatcctg

SEQ ID NO: 593720 - DNA, 77 bp, Homo sapiens
tgatttccccatggcagatctgctgctcatccttgggacctccctggagcctagagtcctggggagcttctgtccac

SEQ ID NO: 593721 - DNA, 100 bp, Homo sapiens
gcagggaggatgtcgggacaccccggaagctgggaaatggtcaacatgattgtgtgaccataatcaacaatttctttcctcgagagagactggattatta

SEQ ID NO: 593722 - DNA, 124 bp, Homo sapiens
tatgcatctttatccaatcaagtgcccttggacaaagcctgaaaccaggacacattcagctaacgtattttagcaggtggagtgaggttgaagattcctgtgacagcgatgccatagagagaat

SEQ ID NO: 593723 - DNA, 80 bp, Homo sapiens
aaataaatgaagtcaaaggaatacttgaaaacacttccaagtggtgtttccctacacaagcaagagctgcatgcgggccg

SEQ ID NO: 593724 - DNA, 83 bp, Homo sapiens
tgttgggagtgatggatggacagagtaatcaagtcagaggattatatgacttttatctgcctagagaagaactatggatctac

SEQ ID NO: 593725 - DNA, 100 bp, Homo sapiens
cagctccactgccgtcaactcctgttctcctcagagcctggtggggaagctgaggcaggaagccctttagtcacttgccgaaggccacgctgttacccat

SEQ ID NO: 593726 - DNA, 75 bp, Homo sapiens
agtaatacagaactgccccatcgatgtgcggcgtccgctgtataagaactctaagaaggagctgatgtggaggag

SEQ ID NO: 593727 - DNA, 89 bp, Homo sapiens
cagcgtgatgaaaatggggagcttcggttattgtcatccattgtggaagaggatcacttcatttccccttctgcgtttggagaaatcct

SEQ ID NO: 593728 - DNA, 75 bp, Homo sapiens
aacctctgcaggagattccatttgttatcccacgacccatccttgaagaaggttgcacagtgaattaaaagatgc

SEQ ID NO: 593729 - DNA, 100 bp, Homo sapiens
cagatggagaaggagaggctgcggctgaaacagcaagaactgcttcggcaggttactgtgcagtatatgcaggatcgaggtgctgtgcttcccatcagag

SEQ ID NO: 593730 - DNA, 100 bp, Homo sapiens
cacatcggccctagacaggggtggcagggtgccacttcccattaatgacctgaaggagggttctttaggtgctgggaatgtagccgatcgtgttttggct

SEQ ID NO: 593731 - DNA, 100 bp, Homo sapiens
gacagacaggtggagaaggtggtagacaagttcatcaagcaaagggactaccaccagcagggagctgcagtccatggctgaccaggagcaggtgtcacca

SEQ ID NO: 593732 - DNA, 100 bp, Homo sapiens
ttcgccagccacgccatagtggaagacaatctcattaagcagctcaccagtgcaggtgaacctatgggtcgtggaacaaaagttatcctacacctgaaag

SEQ ID NO: 593733 - DNA, 96 bp, Homo sapiens
caaagaacgctttctgttcaagaggcagctgcgtatttaaaacctttctgagaaaagtctacagcattctttctctgcaggttctcttaactacag

SEQ ID NO: 593734 - DNA, 75 bp, Homo sapiens
gagtcgccgctgcagccctagtgactgcggcctgcatcccggtggctttggctgaagcctaattccacagctcct

SEQ ID NO: 593735 - DNA, 80 bp, Homo sapiens
gagggcgagtggatgctgaaattggctgcccctgatggggcctggcaatgactgagcaggcccagccccagaggacaagg

SEQ ID NO: 593736 - DNA, 90 bp, Homo sapiens
ctgggaatccggaatgctgcccgatggccctgggtcctcgctgtggggcaatccgggcttgcagacgagtgtttgctttcacaaccaaag

SEQ ID NO: 593737 - DNA, 97 bp, Homo sapiens
agtggatgacagatgtgtggtgcacccagaggccggggaccttgccaaccctcccaagaagttcagagatacactctgtgcagttttagagagagac

SEQ ID NO: 593738 - DNA, 82 bp, Homo sapiens
caaagagattttggaatttccaacacgagaagtatatgtccctcacactgtgtacagccttgagagcccctggagcagagaa

SEQ ID NO: 593739 - DNA, 123 bp, Homo sapiens
agaaagcggcttatcgaacagagccgggagttcaagaagaacactccagaggtcaaaatgcagatcttcgtgaaaacccttaccggcaagaccatcacccttgaggtggagcccagtgacacc

SEQ ID NO: 593740 - DNA, 100 bp, Homo sapiens
gtcggtgtctgctgcgttcacggcaggattcggttagcatgatgccttcttctgtagagtgggcgctttgcagaatacgtgttgaatgaaatcactgatc

SEQ ID NO: 593741 - DNA, 75 bp, Homo sapiens
tggatgttcttcttcgagtatttgtagaaggcctgcctagggtagttaaaagacgagtgaatgctctcaaaaacc

SEQ ID NO: 593742 - DNA, 82 bp, Homo sapiens
aggtatttcagagaaggaaaaggctgccatcatgtatgtcatgggagcacttggccctgcagtgggatatttattaggtgga

SEQ ID NO: 593743 - DNA, 114 bp, Homo sapiens
cgggcggtgagcgcccatatgggggttctggagagcggggtgtgggccctgggcgctgcctatggcacagccaagagcggtaccggcattgcggccatgtctgtcatgcggccg

SEQ ID NO: 593744 - DNA, 100 bp, Homo sapiens
tatacccaaacaccctggagacgaattcctgtgttgattctaaggatacccccaataaacatctttcgtgctaaagcccattccagaatttacttcccag

SEQ ID NO: 593745 - DNA, 99 bp, Homo sapiens
aattctatctcttgggcaatcttcacggggctggctgctctgtgtctcttccaagaagttggtgagatggcaaagcagtatatagagaaaagtcttttg

SEQ ID NO: 593746 - DNA, 75 bp, Homo sapiens
ccacgcacctgcagctctgctgagagagtgcaagccgtgggcatggacaccacgttgctgaaaacatgctttggg

SEQ ID NO: 593747 - DNA, 80 bp, Homo sapiens
ctcctgtctggtctgtgagatgtcctcactgtttcaggagcaattctgtggtgttcttggtcacacatttatggagtttc

SEQ ID NO: 593748 - DNA, 98 bp, Homo sapiens
aagtgctgcctcccacacctcggatttcagccaggctgtgccacggagggcagaggccacccagggcagatgattctggaccagatgaagcctgagga

SEQ ID NO: 593749 - DNA, 100 bp, Homo sapiens
tagcgggggcctttcctgaggacggcgtacggagtgtggtctacatcggtaaactctgcaaaactccagcagttacagagcctgtgctaggagctacagg

SEQ ID NO: 593750 - DNA, 75 bp, Homo sapiens
ttacggaacatgttgcagaaaagcacatttacagcctaatgcgatcaatgtgactctaagaacaaatggatgaat

SEQ ID NO: 593751 - DNA, 101 bp, Homo sapiens
ccggcctgggagaagcagcagcgcaagcttcggaaccaaaaagaagcttcccagagccggggccaggagccccaagcgccctctagcagcaaacacagaag

SEQ ID NO: 593752 - DNA, 88 bp, Homo sapiens
gggaagcacgcgaggctgcccggagtccggataagccgggcgggagcccctcggccaggtatggcccatctcctgtacgcttggagcg

SEQ ID NO: 593753 - DNA, 71 bp, Homo sapiens
tgaggaaatggactggagtgtgggtgctggagaatctggtaaaagcaccattgtgaagcagatgaggatcc

SEQ ID NO: 593754 - DNA, 95 bp, Homo sapiens
tgtgtggcttcaagagactgatcaaattgtgagaggaaaacagcctacccgttgctgctgacacgccgaccgcctgctgcttcagctacacctcc

SEQ ID NO: 593755 - DNA, 83 bp, Homo sapiens
ccatatcataagtggaattttggagatattcaaagcctgtggacatctctacagcaatgagtgaacgggcacttgctcagaaa

SEQ ID NO: 593756 - DNA, 100 bp, Homo sapiens
caagcatataggtttggtgtacagtggcatgggccccgattacaggggtggcactgaatcaacaagacaagcaactcaattgattaatgctttgatcaag

SEQ ID NO: 593757 - DNA, 75 bp, Homo sapiens
acctttttgaagcctttgcaaaagtaccaaccaagaagctgaagaaatatgagaaagaatatcagacaatgcgag

SEQ ID NO: 593758 - DNA, 97 bp, Homo sapiens
aggcgaagcccagcttgctcgggtctgcacaacagagtgtcctgccatacttcgtagctacaaaactggctaaaatccggaagccaactttggataa

SEQ ID NO: 593759 - DNA, 101 bp, Homo sapiens
ttccctgaccattttctactgtccctgcgcgaggttaatgttcgtgaagaaattgaagagttttttccaagaatgtggaagataaatcaagataaaagaag

SEQ ID NO: 593760 - DNA, 74 bp, Homo sapiens
tggggacaaagccgctccacctcccatgtcggcacaggtggtttgtgatgaaaatggttccaagggctatggat

SEQ ID NO: 593761 - DNA, 75 bp, Homo sapiens
tccccgcgttccatgcgcacagggacagggatgaagactggcccatttgcagagcactccaaccagctgtggaac

SEQ ID NO: 593762 - DNA, 90 bp, Homo sapiens
ccaggttatcatggattcccagcgcgggacagccagaaatgagccgtcagactgctacagcattacctaccggtacctcgaagtgtccac

SEQ ID NO: 593763 - DNA, 100 bp, Homo sapiens
tttgatgtcatgaagtcgggtgatgcccgtgtggcgctgattggatttccctctgtgggtaagctggtcacttgctctggggctttcaaggaaggttctt

SEQ ID NO: 593764 - DNA, 100 bp, Homo sapiens
gaaagagtgatgacccgcagctatggggccacagccacatcaccggctggttggtggagaatttgaactggagatgaactctattatccaggatgctgag

SEQ ID NO: 593765 - DNA, 98 bp, Homo sapiens
taggatatcagcactaaacatcgtgggggatctcttacggaaagtagggcttaccgtgacaatcagagctttgttgcagaacctgaaggaaaagatcg

SEQ ID NO: 593766 - DNA, 100 bp, Homo sapiens
aagatctgcagagctcccagggcggacagcagcctcgggtgcaatcctggagccccccagtgaggctgctggctgggcgctggccttttgatcacaatga

SEQ ID NO: 593767 - DNA, 75 bp, Homo sapiens
atgttccctgacaatttcgttaagctctccacacaaggagatgcaagtcaggtgattgggcctcttactgaagga

SEQ ID NO: 593768 - DNA, 100 bp, Homo sapiens
gggagtacaacctgaacttctcaggaagcagtactattcaagagatgcaaatgaaactgatggaaatgaaagatttggaaaatcataatagtcagttaaa

SEQ ID NO: 593769 - DNA, 100 bp, Homo sapiens
tgttcgacaagaatctgcaggacttggtccgcggcatccgtaaccacaaggaggacgagagttgcatgctgagaatttgaaaaatgaagatgatgtagac

SEQ ID NO: 593770 - DNA, 101 bp, Homo sapiens
gctgttgctcctccatctccagatcggatcacggtgagggaaagatgagcgaggagacggcgacttctgacaacgaatagcagtcctttcccctcatcaat

SEQ ID NO: 593771 - DNA, 90 bp, Homo sapiens
gcggaagatggcggccggcgaaaggagctggtgcctgtgcaagttgttgaggagaaaatatggagaagtcttgtgcaagcaaggaagaag

SEQ ID NO: 593772 - DNA, 75 bp, Homo sapiens
ggagggctgattttcgagagccgaatgcagaggttccaagaccaattccccagacgagttgtactgctgtcacag

SEQ ID NO: 593773 - DNA, 122 bp, Homo sapiens
gaagttgtccatgttcacactgggtgaaggaagctgaaaccacagacatgactgagtcctccatgaagaaatctttgagcggtcaagggaaagacaagccgactcttcagatccctgtggac

SEQ ID NO: 593774 - DNA, 82 bp, Homo sapiens
gggctctgatgtcaccgcgcggctgcgacggcccaggagcgcgtctcggcgggagcctcagcattccacgcctacgggaagg

SEQ ID NO: 593775 - DNA, 78 bp, Homo sapiens
gaggcacagctgcagtctgacgagaggggatctttaccttatatagtaaatctctgcccctcgacctggcctgtcgta

SEQ ID NO: 593776 - DNA, 100 bp, Homo sapiens
agcggaggagccaccctcaacgccctgctggtggctgctgaacacctgagtgcccgggcaggcttcactattctggatgaaattgaagaacataacatca

SEQ ID NO: 593777 - DNA, 75 bp, Homo sapiens
gcgcgcccgtggccgctgccgcctccgccccaggagggatttgttcgtgttgaccgagattatgtgctgaagtct

SEQ ID NO: 593778 - DNA, 75 bp, Homo sapiens
ggcaaagggaccacggtcaccgtctcctcagaattcaaggaagccttctccctatttgataaagatggcgatggc

SEQ ID NO: 593779 - DNA, 75 bp, Homo sapiens
ctccggccgaagagcggcggcggcagcggcggttattcaaggacacggaaaagccaacaccatggtagcattaat

SEQ ID NO: 593780 - DNA, 75 bp, Homo sapiens
cgttggcaacatctttttgatgtcatcggatcaaggctgctgacttgagtaaaccaatagataaaaggatataca

SEQ ID NO: 593781 - DNA, 100 bp, Homo sapiens
ctcggagctgcctccggtctccggtactggagccggcggctgcggccggcagccggcagctttgcagcgggtcaaaagaaatagactggcaaccttattt

SEQ ID NO: 593782 - DNA, 90 bp, Homo sapiens
ggaaagaccttgatcccaacaatgttatcattgaaatgtagaagcgaggcctggaggtgaagcagccatcttccattcatgccacagcta

SEQ ID NO: 593783 - DNA, 100 bp, Homo sapiens
catcgagtgtgacgtggtgaaagctgagctgactgctgcccactttggaggaggcggtgggctccttcacaagaagactcaacaggaaggcgaggagcgg

SEQ ID NO: 593784 - DNA, 90 bp, Homo sapiens
cacaagaggtgccatgaatttgttactttttcttgtccgggtgcggataagggacccgacactgatagcatatcatgtcccgagtgggaa

SEQ ID NO: 593785 - DNA, 97 bp, Homo sapiens
atttccttcgtacccacagtgcttcatgagaggtgtgatgaatgcagactctgctaccattttggctgtttggatcctcctttgaaaaagtctccta

SEQ ID NO: 593786 - DNA, 83 bp, Homo sapiens
gggattggagattccacccaaacttgctggtcactgggaggaaacatttactagggacaacttttgagtgtcagaccctgtgg

SEQ ID NO: 593787 - DNA, 82 bp, Homo sapiens
ggccaattcggtggaacgaggacgcggactgcgaaggcaggtgacttaagagattaaaattaatttggttgctgttggttct

SEQ ID NO: 593788 - DNA, 80 bp, Homo sapiens
gaaggcggacaccgaccctgagaacttacctgagatttcgtcacagctgagctgactgctgcccactttggaggaggcgg

SEQ ID NO: 593789 - DNA, 83 bp, Homo sapiens
agtctcaatatctgtcttcggtggactccttcggcagtccacccaccgccgccgcctcccagcctacttctgcttcctcctgg

SEQ ID NO: 593790 - DNA, 75 bp, Homo sapiens
cagcatttggtgactagggggaagccaggtactccaaagattcaggtttactcacgtcatccagcagagaatgga

SEQ ID NO: 593791 - DNA, 75 bp, Homo sapiens
atttttccccaattcagcagagaatattttcaagggggcaaacggggattcagcgtccgatcctttggaacaggg

SEQ ID NO: 593792 - DNA, 50 bp, Homo sapiens
agctgggcatggatttaacaagagatcccaaaatggctgggcgaaaactt

SEQ ID NO: 593793 - DNA, 74 bp, Homo sapiens
agagtaaagctgctggacaacaccatggaaatatttgacattgagatattgaagcacagattcgagaaattcaa

SEQ ID NO: 593794 - DNA, 100 bp, Homo sapiens
ccgagaaccgcagggactggccgaggtgaagctcgtgtgtggagtgccacggtacaatcagacgacagatggacagtgtgacaaaagtgtcagaaaggat

SEQ ID NO: 593795 - DNA, 98 bp, Homo sapiens
catgtggctgctggggccgctgtgcctgctgctgagcagcgccgcggatttgcttggaacggtagaagaaatccttccaagcctctcagaaaatatca

SEQ ID NO: 593796 - DNA, 100 bp, Homo sapiens
catgacatcagtgacgagagggagagcaagaccatcatgctgcgcggccttcccatcaccatcacagagagcgatcctgctgtggaggtgcctcaatatg

SEQ ID NO: 593797 - DNA, 48 bp, Homo sapiens
tgcgttgcggccagtcgccactgctcaatggaagagttaatagttgaa

SEQ ID NO: 593798 - DNA, 83 bp, Homo sapiens
ccggagcccctttagccatgtggatacctacggagcacgagaaatacggcgtgggacatggatttgattgacatactttggag

SEQ ID NO: 593799 - DNA, 97 bp, Homo sapiens
ctcggctgcgcgctgctcctcgccctcaagttcacctgcagctgctagcagaagaaagtcttcccacaaccccattttatttcatattgggaaaaca

SEQ ID NO: 593800 - DNA, 95 bp, Homo sapiens
ctgctccccaggacctgagcaggaacctggagttttcaggttcagcagcgtggctggaacgcctgagatccaggaactgaaggcggctgcagaac

SEQ ID NO: 593801 - DNA, 100 bp, Homo sapiens
cttcttcaacacacccaaaaagatgacagactacgccaagaagccctctgaggaagtcacctctgaccctcgaagatttcaagttcctggcggtgctggg

SEQ ID NO: 593802 - DNA, 90 bp, Homo sapiens
cggctctaacggggctttctacaaggccacgaataccatgttctgtcccctaaggcggtcccaaaaggcaatggcacagtctcctgtccc

SEQ ID NO: 593803 - DNA, 100 bp, Homo sapiens
ttgtcgggagatgcggccgcttcgtcctctgcagtcaagacgctgggcgcgtcgaggactgggcctccatgaagaagtggactattctgagaaactgaag

SEQ ID NO: 593804 - DNA, 97 bp, Homo sapiens
cagcgaactgggtggcgaacggggcgagcctggaggattgtcactccaacctcttttcgctgatggcggcagctatgccatccacgactcccaggcc

SEQ ID NO: 593805 - DNA, 75 bp, Homo sapiens
gaagaggagcgccagatggtggaggaatacacttatttatgaaatctcacattcttgaaggtggcattgaagagc

SEQ ID NO: 593806 - DNA, 100 bp, Homo sapiens
cctgcagaagtccagggacctcaaattcctcacaggctttgaaaccaagggtcctctgaaggagttcaaagctgctggccaagctcagtggggagcctgg

SEQ ID NO: 593807 - DNA, 100 bp, Homo sapiens
gcatccgtggggagacgctgggcctcattggctttggcataatcaccagcaacacccgggacaataatacgggggccacctacccccacctgaacttcag

SEQ ID NO: 593808 - DNA, 100 bp, Homo sapiens
ccccatgtggatttcttcctggaagtggtgagcccattggcaggggtaccaaagtgatcctccatcttaaagaagatcagacagagtacctagaagagag

SEQ ID NO: 593809 - DNA, 100 bp, Homo sapiens
gcttgtccttgctggtgcatgcgtcgtcggcctctgggcagcagaagcatcagatggtgaaggagaaggagacacagaagtgatgcagcaggagacagtt

SEQ ID NO: 593810 - DNA, 50 bp, Homo sapiens
gcctgcgacctgcccgcctggacttaattcagtgcacaaatgagatgaat

SEQ ID NO: 593811 - DNA, 94 bp, Homo sapiens
ttggaagttaagggagacaaagttgaaaacaaagtgctggtttttagaacttcagccataaaaatgggcagaattttccttgatcatatcggtg

SEQ ID NO: 593812 - DNA, 100 bp, Homo sapiens
gagatggaaccaaggagaaaccatttaaaacaggtctaaagctcgccctcccctacctgcggaagagtcaagggaatgtcatcaacatctccagcctggt

SEQ ID NO: 593813 - DNA, 90 bp, Homo sapiens
ctgaacaaagtctgctcaaatctcctgctgtgaaccagcagaatttttgaacaggacctaatccggagagacatcctgtactacaaaggc

SEQ ID NO: 593814 - DNA, 97 bp, Homo sapiens
attcagtgaatcccaactgttatgccaaagggagaccactgtaattttagccatgacatcgaactcccaaagaagcgagaactgtgcaagttttaca

SEQ ID NO: 593815 - DNA, 100 bp, Homo sapiens
aggctacctcaggggccgtccccaggacactgtccggatcttccctccctgccaactgggtacatggaaaactcagtctcctacagcgcaattgaagacg

SEQ ID NO: 593816 - DNA, 98 bp, Homo sapiens
agtttaaggaatactgcccgatggtcttccgtaacctgcgggagaggtttggaattgatgatcaagatttccagtatgagcccagaggacctggtcgg

SEQ ID NO: 593817 - DNA, 75 bp, Homo sapiens
aagtgtctcggctcagctaatggaaatggagaccttgattctgatttgaacatggaattcaatccttcagatcat

SEQ ID NO: 593818 - DNA, 88 bp, Homo sapiens
cgatgatgatgtcccgtgtccgggctacctgtttgaagagattgctaatgtggcccggccagataagatttcaggagctgatattaac

SEQ ID NO: 593819 - DNA, 100 bp, Homo sapiens
gtttgacccagttcctgtcaagcaagaggccatggaccctgtctcagtggctttcatgagaaggacaagaagccatattgccgaaaggatttcttagcca

SEQ ID NO: 593820 - DNA, 98 bp, Homo sapiens
agcgggcacagggcaaggcggcggacggctgcgtcgcccgaggcgaggaggagcgctggcggaattactcaaggtgatgaggacaattgatgacagaa

SEQ ID NO: 593821 - DNA, 83 bp, Homo sapiens
tggatgatgctgttcggcctgaggcagaaggagaagaggattcaaaattatgcccaatagagcctgacaagtctgaattggaa

SEQ ID NO: 593822 - DNA, 85 bp, Homo sapiens
gcccccttcccccacccccgactcgggcttggcgcggcggccagaggaaccccgagcaaattgtggctactaatttgccccctga

SEQ ID NO: 593823 - DNA, 100 bp, Homo sapiens
acgagctggctttaatcctgaaagccatgcagcgggaacctagaaagattgtacaatgaatggtgattctcgtgctgcggtggtgacctcaccacccccg

SEQ ID NO: 593824 - DNA, 101 bp, Homo sapiens
tggtcgtcggcgagatcgtgaccgaggagcacctgcggcgtgccatcggcaacatcgagctcgacaaggcgaccagccagctcctgttggagacagattgg

SEQ ID NO: 593825 - DNA, 82 bp, Homo sapiens
ctgaagggcaaggaaagcagcatagagaatgagatagccgtcctgagaaagagcaggaactcaaagcagccgctgatggcgt

SEQ ID NO: 593826 - DNA, 100 bp, Homo sapiens
ggatggcgagtggctggtgcccattgggcagtgcctgtgccaggcaggctacgagaaggtggaggatgcctgccaggaacatccagtcatggataaaaat

SEQ ID NO: 593827 - DNA, 74 bp, Homo sapiens
gactcctcggccgagctgagtgagattacctaggaacagtacgatttggggttatcacaaataaacatcttgcg

SEQ ID NO: 593828 - DNA, 83 bp, Homo sapiens
catctccgcggtgtcgaggctctccctgcacagcatcgcgcagaacaaagggatcaggtcaaaatgcagatcttcgtgaaaac

SEQ ID NO: 593829 - DNA, 100 bp, Homo sapiens
cttgtccctcacggtcaccgttacattttctccagatgagtggcgatactattatgactgcatccgtgttcactgtaagattattcagagctgggagagc

SEQ ID NO: 593830 - DNA, 107 bp, Homo sapiens
ttgatgtcatgctcaaggggctctttaagagatgctgcaatttgtcagtaatcaagtgggagagttccctgacttgttttcagaacagctgtgtagctcctttcctg

SEQ ID NO: 593831 - DNA, 96 bp, Homo sapiens
caagagcgagccgcctgccccggtgcgcagacagagctattccagcaccagcagaggttctaaatggcttctaagaagttgggtgcagattttcat

SEQ ID NO: 593832 - DNA, 99 bp, Homo sapiens
gccattttaccaagaaagttgggtttcttttactggcaaatagtacttcaagagcacagtcttatgtaagcttgtcagctcatttgcagcttacatttt

SEQ ID NO: 593833 - DNA, 75 bp, Homo sapiens
cggatgaaaatgaagacgacattcagtttgtcagtggaaagcattaacttttgagctacgtccagaatagcatca

SEQ ID NO: 593834 - DNA, 75 bp, Homo sapiens
ccccctccctcagcttccgccccaaaagttacagaatgtctgaaggggacagtgtgggagaatccgtccatggga

SEQ ID NO: 593835 - DNA, 51 bp, Homo sapiens
tatttatccaacagctcctcccaggatatttggccttgacattaaaggcag

SEQ ID NO: 593836 - DNA, 75 bp, Homo sapiens
cttcgagtgacccgggtgccgaggagcgggaagagttgctggggctctgacgcccgctctgcggcttcggtgttt

SEQ ID NO: 593837 - DNA, 87 bp, Homo sapiens
tgaaagtacacggagccccgaggacgggtcacacagcggcagtgataaagagcacagggatgtggagagatctcaagaacaagaatc

SEQ ID NO: 593838 - DNA, 83 bp, Homo sapiens
caggtcaccgccagcacgcgcctgcttcccgtctgcgcgagtccacgcagctccccagcatcgccctgagcaactggtggttt

SEQ ID NO: 593839 - DNA, 111 bp, Homo sapiens
agacccggccgcccagatgatgcggtggtgggggacctgccggcacgcgactccccccgggcccaaagtactccaaagattcaggtttactcacgtcatccagcagagaat

SEQ ID NO: 593840 - DNA, 51 bp, Homo sapiens
caaacagtactcacaccttacagatccataatgagatggcatcaacatcag

SEQ ID NO: 593841 - DNA, 101 bp, Homo sapiens
aaagtttatgccgacggactgtgtccggcgatgggcacgggatattgatgatgttaagaagttcaaaccgggttacctggaagctactcttaattggttta

SEQ ID NO: 593842 - DNA, 75 bp, Homo sapiens
ggcgctgctgctcgggctgctcttggagctcttttagtgtagcatggcagaaagaacaatggctatgcccacaca

SEQ ID NO: 593843 - DNA, 82 bp, Homo sapiens
aacaactggaatatttagcaaggattcaaggctttcagttgggacagaaataacccagagccctggaacaaactgggtccca

SEQ ID NO: 593844 - DNA, 80 bp, Homo sapiens
tgctgctgctaaaggtatccaggaaattgctgactctgtaaaggtttcagcagccagggaagaggtacctggtcgacgag

SEQ ID NO: 593845 - DNA, 100 bp, Homo sapiens
catgaccagcttagcttctgtcctaaaggttttgcacactagggaccaagaagccctcggggacactgctgagaaaagactgccgaagggaagaccagcg

SEQ ID NO: 593846 - DNA, 75 bp, Homo sapiens
ctcagatgcacagcctctgccttcgtggagtgggcattttcaggtctctttaatgtggggaacaagctgctggta

SEQ ID NO: 593847 - DNA, 74 bp, Homo sapiens
taccgggacgatatcgatctgcaaaacctcatcgactcccttcagaaagctgcatgtgggcacattccatgaca

SEQ ID NO: 593848 - DNA, 100 bp, Homo sapiens
gtctcctgtgtggcgatggtcttcctgctggggctcatgtttgaggtagctacagcaagctgggtagcaggcagatccaaaggatatcatgaagtttcca

SEQ ID NO: 593849 - DNA, 98 bp, Homo sapiens
gcagggtccggtcttcggtttgcacagctagaggccgcgcagcagcaaaggatgagcggaaccttggaaaaggccaatagcttcaccgtctcctctgt

SEQ ID NO: 593850 - DNA, 98 bp, Homo sapiens
ctcccagagtgctaggattacagatgccagcagctcttccttgccagagatgatctgacccggtgggggcagctggaaagcaacactggcccccagct

SEQ ID NO: 593851 - DNA, 75 bp, Homo sapiens
cgaaacctccatagtcaccacttcacttcacctctttctggaaaccaggtgttatatgaacttcccaccaacaca

SEQ ID NO: 593852 - DNA, 138 bp, Homo sapiens
caagaagccaacagcgaggctttcagttctttggaattccattcttttccttattcttctgatgtggatccagggatgcttgaagatggaaagaaatttgattcctcccgggacagaaacaagccctttaagtttatg

SEQ ID NO: 593853 - DNA, 100 bp, Homo sapiens
ctgcagaacctggtgaacctgcgggagctgtaccttagccacaatggcatcgaggtcatcgagggcctggagaacaatatatatgtaatcgacagtgcag

SEQ ID NO: 593854 - DNA, 82 bp, Homo sapiens
cagaacaaagccgcgggcctctcagggactttgaacatgtcggggatcgccctcagcagactcgcccaggagaggaaagcat

SEQ ID NO: 593855 - DNA, 74 bp, Homo sapiens
agaactacaggaacatggtcttgctgggtaagaaaactgaagttcagaaaagggaggggactgactcaatccca

SEQ ID NO: 593856 - DNA, 100 bp, Homo sapiens
gccactgccgcaggaggcgtgagggtatgcagaagttggctagtcaatacctgaagagagattggcctggagtaaaagctgatgatcggaatgattacag

SEQ ID NO: 593857 - DNA, 50 bp, Homo sapiens
cctggctcggagcagcagcctctgaggtcatggaagacgcccacttggat

SEQ ID NO: 593858 - DNA, 98 bp, Homo sapiens
aggtctctgtcgagcagcggacgccggtctctgttccgcaggatggtgtggccgacgacgatgccctcgctgaggagcgcatgcggagaggccagaac

SEQ ID NO: 593859 - DNA, 90 bp, Homo sapiens
gttggaattacagacatgggccactacacctggcgatctgtgtcttatacggcctctccacttgcccgagctctcagccaccaggagaca

SEQ ID NO: 593860 - DNA, 80 bp, Homo sapiens
agtgggtagaaagtttcataggataggactccctcctaaggcaaaattgatgtttctgagttaaacaagatatatttaaa

SEQ ID NO: 593861 - DNA, 75 bp, Homo sapiens
tcagcaacaaggctgtgcctgagcccaaagcaaaagagtgcattgagaagagtcttctattactaaaatttctgc

SEQ ID NO: 593862 - DNA, 75 bp, Homo sapiens
ggagagcttaaaattgctgttttacagaaggtgacttaagagattaaaattaatttggttgctgttggttctgaa

SEQ ID NO: 593863 - DNA, 100 bp, Homo sapiens
ccacgctggtataccctcaaacccctcagacaatgaattcacaacctcaaacccgttctccggtttgtggtaaatatgccagctctagaacacatgaatc

SEQ ID NO: 593864 - DNA, 112 bp, Homo sapiens
ctgaaagtcatgttactacaatagaaactttcattacgtataggattattactaagataatttgcggtaaaagcctttcagtgaatgaaatgactcttagcactttgaaaga

SEQ ID NO: 593865 - DNA, 100 bp, Homo sapiens
tcgtggaaaccaagataaagatgcccattttccaccaccaagcaagcagggtgagttctgcatcctggtacttcctcaatgtatttgggcttcggagcat

SEQ ID NO: 593866 - DNA, 100 bp, Homo sapiens
gcatgaaggacatgcgcaaagttctgagaacattacagcagatcaagaaatccagctcaaacatgaagaccctgttaccagtaagcaagccagaaattcg

SEQ ID NO: 593867 - DNA, 98 bp, Homo sapiens
gatgtagcaaggaagaaattgttcagttcttctcagaagaagatagtggtgagctggcaaagccaaagattggttttccagagacaacagaagaggag

SEQ ID NO: 593868 - DNA, 127 bp, Homo sapiens
agaccacaataaaagagacctctacttagctcagcaattcttaccttgacccagatgatgtggtaccagttggccaaagaagagcctggtgttggtgcatgtgctttggactagcatttatgcttgc

SEQ ID NO: 593869 - DNA, 50 bp, Homo sapiens
ctgggcatgaatctttcggactgcaaatgaacaccttccaccatgaccac

SEQ ID NO: 593870 - DNA, 98 bp, Homo sapiens
tcaaagaaagcaagagatggaaaattgttgcctgaagaataccaaggaggatcttttaggctgcctttaatattggttgggaacaaatctgatctggt

SEQ ID NO: 593871 - DNA, 75 bp, Homo sapiens
ctcgttcccccgattggggccgcagacaatgcagatcttcgtgaagactctgactggtaagaccatcaccctcga

SEQ ID NO: 593872 - DNA, 100 bp, Homo sapiens
cagaaaaatgcttatttggggcaatgctaaatattgcggcagttttattgtggacaacagtgagtatatgcggaatggagacttcttacccaccaggctg

SEQ ID NO: 593873 - DNA, 74 bp, Homo sapiens
agacagagttgcgaccgcgcggcaggatcaccattaacaaggacaccaaggtacccaatgcctgtttattcacc

SEQ ID NO: 593874 - DNA, 75 bp, Homo sapiens
aagacagagggttttcttttgaggtgtctcaaaggctgttgagcacatcaataaaactattgcgcctgccctggt

SEQ ID NO: 593875 - DNA, 80 bp, Homo sapiens
aagaagttgagaccgagaatgtggaaacagatgagttttgatcatcctgagaaaaatgggccttggcctgcagacccaat

SEQ ID NO: 593876 - DNA, 100 bp, Homo sapiens
acctgggtgaactttcacggacaacctcagaggacaacgaagtgttcgtagaatcctgcttatctgtgaaatgcagttaacacatcagctggacctattt

SEQ ID NO: 593877 - DNA, 83 bp, Homo sapiens
ggttctgacccactccctctcagcctccgcctggtctctggatttgcagatttacagaatggctgcacattaatggaaagaga

SEQ ID NO: 593878 - DNA, 100 bp, Homo sapiens
gggagatattgattaacactttacacaaatacgggatacctatcggagcaaagcctaccagtgtgcagctggcaaaggattttctggatatgccgcagaa

SEQ ID NO: 593879 - DNA, 51 bp, Homo sapiens
ttttactggagtattggaactcaggagtttaccgtgaagaagctgactgct

SEQ ID NO: 593880 - DNA, 100 bp, Homo sapiens
ctgggatcatggtagatggaaccctccttttactcctctcggaggccctggcccttacccagacctgggcgggctgccccctcggtcactctgttcccgc

SEQ ID NO: 593881 - DNA, 90 bp, Homo sapiens
tctacggggtggtgctcacgccgcccatgaagatgcttttgtctgatccaaactatggggtccatcttccggctgtgaaactgcggaggc

SEQ ID NO: 593882 - DNA, 50 bp, Homo sapiens
gggtgcccatgggggagctgttcagggagcctagcgcctggctgtgtgtg

SEQ ID NO: 593883 - DNA, 51 bp, Homo sapiens
atcgttggctatgtaaaaacagtatgcaaccgaggatggacttatacacac

SEQ ID NO: 593884 - DNA, 98 bp, Homo sapiens
gaggcgtctgtgtcgcagcttggtctcagaggagcatcgctggggactttgtgttttatgccccacgtctgagaatcaacaagcggatcctgcagctc

SEQ ID NO: 593885 - DNA, 100 bp, Homo sapiens
acaaggtgaatattgtgcctgtcattgcaaaagctgacactctcaccctgaaggaacgggagcggctgaagaaaagggcataaaggcatcacaagtggtc

SEQ ID NO: 593886 - DNA, 80 bp, Homo sapiens
ccgcaagctgagcgagctgtcagagcccggggacggcgaggccctcatgtaccacacgtgatgatccagtaaatgatttc

SEQ ID NO: 593887 - DNA, 100 bp, Homo sapiens
agaaattctggaacacctatatgttcactgagacttttttgacggagagggacaaacaatccaagtggagtggaattcctcagctgctcctcaagctgca

SEQ ID NO: 593888 - DNA, 90 bp, Homo sapiens
gcttatgggatacagctggacaagaagattatgacagattacgccccctatcctatccgcaaacatgggtaattccagaattgattggcc

SEQ ID NO: 593889 - DNA, 75 bp, Homo sapiens
gggggctgccgcaatttcctggcaatcaaagccttagatgggagatctcaagtttcaacaccacgttttggcaaa

SEQ ID NO: 593890 - DNA, 82 bp, Homo sapiens
cgcagtttctcacgacgggccgagcctgccactgacgcccctttcgccccaacggtctcttggacaaagccgtgagcaacgt

SEQ ID NO: 593891 - DNA, 50 bp, Homo sapiens
aggaatccaccttcttacgctatggcagacagtctcactctgtcacccag

SEQ ID NO: 593892 - DNA, 82 bp, Homo sapiens
cacgtgcagaaaggagccccgcgagtggcgcgccggggattgcctgatttgagatggggtcccaggtctcggtggaatcggg

SEQ ID NO: 593893 - DNA, 83 bp, Homo sapiens
agggtgaaggaggcgaattttcagttgataggtactttgtttgcaagaagttcaagaagatcattatggagcagagatcaggc

SEQ ID NO: 593894 - DNA, 98 bp, Homo sapiens
caaggcccttaatgctacaggacaagcaaacctcagcctggaggcacttttccaggtgacaatctccaatagacttgtgtcttcaccttgctgcattg

SEQ ID NO: 593895 - DNA, 82 bp, Homo sapiens
ctcgtcagcctcccgccggccgtctccttaacaccgaacaccttgctctaggtcgtaaccagcctttgaaaaaggagaaacc

SEQ ID NO: 593896 - DNA, 96 bp, Homo sapiens
caaggggcttacgcagaaggacctggccacgataccggggagaccacgacgctgcctcctgggcgccatgagttcctgttcagcttccagctgccc

SEQ ID NO: 593897 - DNA, 100 bp, Homo sapiens
ctatgatctggagacggcctcctgttccaccttcaatgtgtcgtggaggccgaatgtttgcaccaaccaaaacctggcgccgttggcatcgtagagtgaa

SEQ ID NO: 593898 - DNA, 100 bp, Homo sapiens
gattaggacaaggaaattcagatgaccttcatgtgctgacagttatttcagccttacaagctttcatgacgctggtcattatcttgctgcatgtattctg

SEQ ID NO: 593899 - DNA, 100 bp, Homo sapiens
gatcaatcagccagtgagggtcaacgtcaagcgggagtatgaccacatgaatggatccaggatttgtacacacagatatgacgaaagacttgaaagaaga

SEQ ID NO: 593900 - DNA, 98 bp, Homo sapiens
cgacatccctcagggctccttggcctacctggagcaggcatctgccaacatccctgcacctctgaagccaacgtgtcaaagtcgtgttctcaggccac

SEQ ID NO: 593901 - DNA, 100 bp, Homo sapiens
atagagagaatccaggaagaggaaaataaaccttcaaggcaaactgtgttcattgagaccctgattgaagagagagaactgataaatttcaaacggaaga

SEQ ID NO: 593902 - DNA, 82 bp, Homo sapiens
aagccaccagctcccgggacccgctcagcgatggagtaccctgacttctaccggaagctctacggcctcttggacccctctg

SEQ ID NO: 593903 - DNA, 135 bp, Homo sapiens
ttcgttccccgccaaccgcaaccattgacgccatgtcgggttattcgagtgaccgagaccgcggccgggaccgaggacctcctgccccccgaggtctgcagtctcctgaacccagcagccatctacgccaacaac

SEQ ID NO: 593904 - DNA, 98 bp, Homo sapiens
ggcgggcacgctgtggtttgtcagctgggccgagggcaccagcacacgtctcatcagtggccacaggagcaagaccctgatgatccgagactggtgga

SEQ ID NO: 593905 - DNA, 51 bp, Homo sapiens
ttgaggataccacattagagccagaagggcctattccctggtggattccag

SEQ ID NO: 593906 - DNA, 50 bp, Homo sapiens
tcagaaccggtacctggatggcatggcagaagaagagttcaacatagaga

SEQ ID NO: 593907 - DNA, 100 bp, Homo sapiens
ctgatgagaatgctggcggaggacgagctccgggatgctgtactccttgtctttgcaaacaaacagatctcacattcttgaaggtggcattgaagagcac

SEQ ID NO: 593908 - DNA, 100 bp, Homo sapiens
tgggaagctacctgcattaagtcaggactgagggcttatttcaaaacctttgtccctcagttccaggaggcagcatttgccaatggaaagctctaggaaa

SEQ ID NO: 593909 - DNA, 83 bp, Homo sapiens
gaacagcgagctgtttgacccctttgacctcttcgatgtgcgagactttggaaaggtactccaaagattcaggtttactcacg

SEQ ID NO: 593910 - DNA, 83 bp, Homo sapiens
ctggacgcccgtgcactgggccgcgcatttcggcaagaagaaggctgaagctgcacatcggattctggaaggcctggggcccc

SEQ ID NO: 593911 - DNA, 74 bp, Homo sapiens
gtctccaccaggactgaccgctgccgcccagcacgtccagcaactttcatcctttgaaacgtgtgctgaaaaag

SEQ ID NO: 593912 - DNA, 75 bp, Homo sapiens
gggttcctggtgctgaggacggacgccattggagttcccgagaaggtatccaagcccaccaatgggatctgtctc

SEQ ID NO: 593913 - DNA, 109 bp, Homo sapiens
gggctaccccctgttccccggggagaatgaggtggagcagctggcctgcatcatggaggctttgcagagcagaacaaaataacataatggatcaaccacccaatatgga

SEQ ID NO: 593914 - DNA, 75 bp, Homo sapiens
ggtggcctaccaggaggccaggggtgtcgccatggaggacgaatccatgaaccaaccaggaccaatcaaaaccag

SEQ ID NO: 593915 - DNA, 80 bp, Homo sapiens
cagccagcgtgtgcttacttcatgtctctgggtcacattttggagatcatgaatcagacagataaaaatcaacaagaaat

SEQ ID NO: 593916 - DNA, 80 bp, Homo sapiens
acaatgccttggtttcaacactatcggaatgggatcatagacggtatttctatgtaaacgaacagtcgggcgagtctcag

SEQ ID NO: 593917 - DNA, 114 bp, Homo sapiens
cttgactactcgcatcgcgcactttttggatcggcatctagtctttccgcttcttgaatttctctctgtaaaggagctcctgagaaccatgtctatgcccaaaggtagagttct

SEQ ID NO: 593918 - DNA, 100 bp, Homo sapiens
accattcttccctgggctggtgaagtacatgaactcagggccggttgtggccatggctcagcaacagcctcaccaaggactccatgaatatcaaagccca

SEQ ID NO: 593919 - DNA, 100 bp, Homo sapiens
ctcaggcggagatggaggagtgggttaaattcctcaggagagttgctggcacaccctgtggagtgattgacataaaactggaaaagcctcaggagcaacc

SEQ ID NO: 593920 - DNA, 100 bp, Homo sapiens
gcttctcccgcttcaacgaagaccgagactttcagactctcagcgttctcatctctcttccttcaccatgaagctgatggacaaattccactcacccaaa

SEQ ID NO: 593921 - DNA, 104 bp, Homo sapiens
gagcgacaagccgctggcagccgcggatctcaccgccgctcaggtgtactaatggtcacttgatgtgcgctggctgttttatccacctactagcagatgcccgg

SEQ ID NO: 593922 - DNA, 98 bp, Homo sapiens
cagcttcgcctacgaccgggagttcctccgcaccctgcccggcttcctcatcgtggccgagatcggaaacagaagtacctgtgcgccagcagaaatga

SEQ ID NO: 593923 - DNA, 101 bp, Homo sapiens
aaaggagccacttttccaaaccctcctctcaatggatcgccaaatgaccatggtgaatccgggcagcagctcgcagccgcccccggtgacggccggctccc

SEQ ID NO: 593924 - DNA, 100 bp, Homo sapiens
cgctctgtgacctgctggcattgaatgatttatagctaagactccaggacacccctgaagccgagaaatgctctgggtgaaccaggaggatgaggtggag

SEQ ID NO: 593925 - DNA, 100 bp, Homo sapiens
caacttctatgtacctgcagaacccaaattggcgtttgtcatcagaatcagaggtttgcctatctggggcgcctggctcacgaggttggctggaagtacc

SEQ ID NO: 593926 - DNA, 98 bp, Homo sapiens
ctctgaggcccaaagcacagcctgaggaggaggatgaagacgaggtgtggaagaactggccagagagtctggaagtttgggttctggtcctggctgtg

SEQ ID NO: 593927 - DNA, 90 bp, Homo sapiens
ccgagccattgaccaagaggagaaggggaagatcacattcggtttactagaaattcccaactgttccaaagtggtggtacccgcaggccc

SEQ ID NO: 593928 - DNA, 96 bp, Homo sapiens
gggagctgaggaaccagatatcttgaaaagctgccagaaaggacccgtgcatctcttccgactctcgggcaagtgcttcagcctggtggagtccac

SEQ ID NO: 593929 - DNA, 75 bp, Homo sapiens
tcgaacagatgtgagcgagaaagccgttgcctccagcaccacttctaatggaaatctactttcttcaatgtgtta

SEQ ID NO: 593930 - DNA, 97 bp, Homo sapiens
aagaatcaatatcgtgaaaatggccatactgcccaagatgacctcttggtacttcatctctctgacctcattcgcatggcattcatggctgcaactg

SEQ ID NO: 593931 - DNA, 91 bp, Homo sapiens
acaagttctattgcccagctgctgtggagacaggcagcccacaacaagggcatgagtacagtaccagaagttatcgttgcacggcactgtg

SEQ ID NO: 593932 - DNA, 100 bp, Homo sapiens
gacctgtggaatatgagtgatgacaaaccctttctatgtactgcgcctggatgtggccaggtatgatctcgtgaaatcttgagagaaactgaatgacgaa

SEQ ID NO: 593933 - DNA, 101 bp, Homo sapiens
cgcctccattgtttgaccacaacaagggccggattctcacccaggaggcggcggctcagagaggagtgactcgcctgaagccccgtgaacaatgcatggtg

SEQ ID NO: 593934 - DNA, 100 bp, Homo sapiens
ggcgagggagcccgcgtcggctgagagcccacaggcccccacagatggagtcatcagaacccactgtgaggaagtgacttctccttgaggtcacccagac

SEQ ID NO: 593935 - DNA, 100 bp, Homo sapiens
accctcgaagtgcgcaaacttgacactcaccctgaccgatgagattgtggggaacctgggtgaaggcacctttggcaaggtggtggagtgcttggaccat

SEQ ID NO: 593936 - DNA, 74 bp, Homo sapiens
gaagatggtgctgatcaaggaatttgccggatggagtgctgtgatgtgccagccgagacactctacgacgtcct

SEQ ID NO: 593937 - DNA, 90 bp, Homo sapiens
gctttgccgcagttcatcttcctccctgtgtactttccatttgccttcctgggtgaagcaaaaaatttattgccatatcttggaccccac

SEQ ID NO: 593938 - DNA, 96 bp, Homo sapiens
gactaataagtaaactgaaggaacagtacaagaaggaacgaaaggggaagaaaggggtgaagagtgccgtgagcgatgtggagatgcaggaacact

SEQ ID NO: 593939 - DNA, 100 bp, Homo sapiens
tccttcgggacaagattcgcttctatgagggagccaaaaacctgtatatcatctccgtgaaggggatcaagggacggctgaacagacttcccgctgctgg

SEQ ID NO: 593940 - DNA, 100 bp, Homo sapiens
cctgaccatccgcgccaagcccttccacgacagtgaggcagccagataagctggtggtggtatggacccgtcggaaccgacgcatctgctccaaggtggg

SEQ ID NO: 593941 - DNA, 100 bp, Homo sapiens
aactttgtctacaaacagttagaagatgcagcccaagggctcaccatgggtggcgatgttgaagaacatgggcgaactttctgaccaagtatacaactac

SEQ ID NO: 593942 - DNA, 82 bp, Homo sapiens
agacaaacagcccgcccgaccccgtcccgaccctggccgccccgagcggagcctggagtgtgccgtgcaggtgaagctggag

SEQ ID NO: 593943 - DNA, 76 bp, Homo sapiens
tcgattccgacctgctctgtgcctgtgaccttgctgaagagaaaagccccaatgcaacaaggagacgcgcctttgc

SEQ ID NO: 593944 - DNA, 98 bp, Homo sapiens
ctccaccaaaacccaacagaccaccaaatgttgacctgacgaaattccacaaaacctcttctggaaacacaaaagatacagatattgtggatgaagcc

SEQ ID NO: 593945 - DNA, 75 bp, Homo sapiens
aggttccaaacctttatcaaatccttcaagtcctggcatttcagctgttgcttttaaaaatgccaaacagtttga

SEQ ID NO: 593946 - DNA, 74 bp, Homo sapiens
gctgccggcctgtgtggtggactgtggcacggggtgctgttgaattagaaaacttgccattaaagaaagatgcc

SEQ ID NO: 593947 - DNA, 83 bp, Homo sapiens
aagatcgagcccagcgtcaacttcctcaagtcgcccaaagaaaaagatgttgctggtccatttgacgaagaagtccagagcgg

SEQ ID NO: 593948 - DNA, 121 bp, Homo sapiens
agttcagaggattgtttgtggagtcactgaagtcacaacttgccaggaggttgtcatagccttagctcaagcaatagttggcccgccacaataaactgttgcagcagatgctcaaaccagg

SEQ ID NO: 593949 - DNA, 78 bp, Homo sapiens
tgctgctggtcacggccaacgtgggctcgctcttcgacgacaggagcaggagcggcttcgcttggagcaggagcgaga

SEQ ID NO: 593950 - DNA, 98 bp, Homo sapiens
ctgaacttttgggttgccttaagtgagaaatcagcatggctcaggcaacatttcatacaccatttagtcacctaggccaaagtccggaaggatgctcc

SEQ ID NO: 593951 - DNA, 89 bp, Homo sapiens
gctgcttcctcgtcctagtgatccacgcgcagttcctcaaagaagggtgactatgaccagagcaggaccaaagtgctgcacatgagcct

SEQ ID NO: 593952 - DNA, 100 bp, Homo sapiens
agctgcagaatttcctctacaacgtgctggagcggccgcgcggctgggcgttcatctaccacgcctacgtgagctctgtgtgtcgtctgagcagtcgcga

SEQ ID NO: 593953 - DNA, 96 bp, Homo sapiens
ccctcagctggacacggccatcgggcagtggctccgctgggataagatcatggaagggaagtggttgctgtgtatgttactggtgcttggaactgc

SEQ ID NO: 593954 - DNA, 100 bp, Homo sapiens
gcttctcttttcccgttgaaggtgctaccgctgacgacacccctggtggatggcgaggatgagagggaggaggtaaatgacaaattgcgggatatgccag

SEQ ID NO: 593955 - DNA, 75 bp, Homo sapiens
agaccccgcggctgggcgttcatctaccacgctttcgtagtgtgaacatggctacgcctcttcattcccgtccat

SEQ ID NO: 593956 - DNA, 100 bp, Homo sapiens
tttgaccacccgactctcatagaaaacgagagtatatgcgatgagtttggccccttcacagatgtagtcactacaaatcttaaattgcgaaatccatcgg

SEQ ID NO: 593957 - DNA, 99 bp, Homo sapiens
ccatgatcgacatcaatggcatcatcgtgtttggcacccggatcctggatgaggaggtgtttgaggtggccctcatgacactgacgctcttcccggtcc

SEQ ID NO: 593958 - DNA, 100 bp, Homo sapiens
cgaaggagctggaaaccgagccagggctgagccggctgacaacagaagtgtatgctgacttgtaaagtgaagaagccagtggtgctgcgggtgttctttt

SEQ ID NO: 593959 - DNA, 100 bp, Homo sapiens
aaagaatccaagcaacaggctctgtccaatatgatatggctcgtggacagcagaaaattcagtctcagcagaaaaatgccaaaaagcaagctggacaaaa

SEQ ID NO: 593960 - DNA, 101 bp, Homo sapiens
ggtgattgttggtctgctggtgggactcaatgttctcgatgccaatctctgcttgaaaggagaagacttggattctcagaatggaaaaatggccctcttca

SEQ ID NO: 593961 - DNA, 100 bp, Homo sapiens
cgggctgaagggttagcggagcacgggcaaggcggagagtgacggagtcggcgagcccccgcggcgacagctgcagatctgggacacggccggccaggag

SEQ ID NO: 593962 - DNA, 75 bp, Homo sapiens
ctgcgagccgacaacgccttcatgctgctcacgcagcatgtccggcatgatttcgggtggcaacaaccccttggg

SEQ ID NO: 593963 - DNA, 50 bp, Homo sapiens
gaagaaacaaaagtgccaccgaagaggagccaggaggaactctctcccag

SEQ ID NO: 593964 - DNA, 98 bp, Homo sapiens
cggccgtggttgtggggaccataactgatgatgtgcgggttcaggaggtacccaaactgaagccggtggctgctggcagcggaatcccccagatcaag

SEQ ID NO: 593965 - DNA, 100 bp, Homo sapiens
tacctttatccactctatggccttggagaactgccccaaggatttgcaagacaaaatagaagccacctggaggcaacttcctcacccatcgacaagctca

SEQ ID NO: 593966 - DNA, 90 bp, Homo sapiens
caaggaaaaagcaaagaatagcaaaaaaaagggggccaagaaggaagtcggtcctcggtaacaccagcggcctgtggtccaccactccat

SEQ ID NO: 593967 - DNA, 100 bp, Homo sapiens
actacaagggtcctgaagtcagttgttgcatcaaatacttcatatttggcttcaatgtcatattttgggttacataatgctgtgcaaatgaagcaaaaag

SEQ ID NO: 593968 - DNA, 100 bp, Homo sapiens
gccgagtggcggtccgacagagtcctccgtgtcctcccccgcatgacccccttggccaaagaactgccaactctgaaagataatgatttcattaatgagg

SEQ ID NO: 593969 - DNA, 82 bp, Homo sapiens
gcctgccaggcgctcgggggccgaactggccctggactacctctgcaggtgttgtgactgcagtgcctccctgtcgcaccag

SEQ ID NO: 593970 - DNA, 75 bp, Homo sapiens
ggcacctgagcggcggagacggctgtagcacaaggtatggacctgtctgccaatcaggacgaggagaccgaccag

SEQ ID NO: 593971 - DNA, 90 bp, Homo sapiens
cagagtggagtatctggtgaaatggagaggctggtcgcccaactgaaaatgtgtgtctgacatgcaagctcagtggggcagagacccgtg

SEQ ID NO: 593972 - DNA, 90 bp, Homo sapiens
ttttgagtcccaccatcttccatccctgatgcttggagaagctgaggacacacagggcccagattgccttcctgcagggagaaaggaagg

SEQ ID NO: 593973 - DNA, 151 bp, Homo sapiens
agcccatctacctgtcagctgtggtcattgggaagtgcccatacagccaggaagccatgcagagagcactgattggaagagatgacctgatcagagccatcaagaaactaaaggcacttggcactggcttcggcatcatccctgtgggcgg

SEQ ID NO: 593974 - DNA, 90 bp, Homo sapiens
gttccgccatgagctggggcacggagctgtgggttggacgtgataagtatgagcctgcagctgtttcagaacaaggtgataaaaagggca

SEQ ID NO: 593975 - DNA, 75 bp, Homo sapiens
cagcacacaaggaaccgtcaagggcagtcatcagatccaccatctgcttcaacgactggattatggacagaactt

SEQ ID NO: 593976 - DNA, 121 bp, Homo sapiens
gtccagcaaccatcgatgtcaagtatccacacacctggcctgaatggatccctctgcctttcagaggtctgtgggttctggcaccacctgagcccactgggcatctggtcatccctggcac

SEQ ID NO: 593977 - DNA, 80 bp, Homo sapiens
aaggaggtgctgaagagcgaggagggccgttgctccagggagaactgcaaatatcttcatccacccccacatttaaaaac

SEQ ID NO: 593978 - DNA, 100 bp, Homo sapiens
tgctaaactgtgtggggcgcggatgggatccagctgttagtcggctgctgtgacttactcgaagcctcgattggccacattttggtactacgccaaggtt

SEQ ID NO: 593979 - DNA, 75 bp, Homo sapiens
gcccagaggatctcttctaacatccagaagatcacacagtgttgttttgctgatttgggaaaataaagactatgg

SEQ ID NO: 593980 - DNA, 51 bp, Homo sapiens
catctacaaccttcgatctcctgacgagttccaatgattcttgttggtaat

SEQ ID NO: 593981 - DNA, 59 bp, Homo sapiens
gggaaacagataaaacttcagatatgggatacggtggccttgggggacttgcaggtctg

SEQ ID NO: 593982 - DNA, 100 bp, Homo sapiens
tatcagtctacgtgcaaccaccattagaattgacttgtgatcagttcacctttgaatttatgatgagcaggtatacccagcagctgcgacaccatctggg

SEQ ID NO: 593983 - DNA, 83 bp, Homo sapiens
cgccctggcggagaagactcgaacggctcccacagccgggcgttgggggaaaggaatcctacgccaacgtgaagcagtggctg

SEQ ID NO: 593984 - DNA, 97 bp, Homo sapiens
gaccaggaagatctgcatggtgggaaggacctgatgatacagagagcccataggcagcatgtcatccatggaagtgaacgtggacatgctggagcag

SEQ ID NO: 593985 - DNA, 95 bp, Homo sapiens
ccgctctcttcggctgccccaatccccggcagctctctcaggagaggagaggcagcagcatggcgagtgtcctgtcccgacgccttggaaagcgg

SEQ ID NO: 593986 - DNA, 100 bp, Homo sapiens
gagctccatgccaaggtctctgaaggcgacaggctcagggtggagctggcggagaaagcaagtaagctgcagaaataccattagccagtttacgagggga

SEQ ID NO: 593987 - DNA, 119 bp, Homo sapiens
gaagaaactgaggcctggaatttgattaactcattcaaggttacccagttgatcattccatcggaaagaggtcgaaaatgtacagtaggcatgcacaaaggataccgcctggaaagaag

SEQ ID NO: 593988 - DNA, 101 bp, Homo sapiens
gaggggctccgggtcttccagagcgtgaagatcaagatcggtatagacacgtgtggccgtttacgctgtaggatcctcattcccactggctttgaacattt

SEQ ID NO: 593989 - DNA, 74 bp, Homo sapiens
ctctaccaatggtgcttcagaagtttcatactttcaggttacagattatgccattgccaggcgcatagtagatt

SEQ ID NO: 593990 - DNA, 75 bp, Homo sapiens
ttccgatttaaagctgagctgcgaggaaaatggcggcgggaggggctgaaagaagtgacacttcttggtcagaat

SEQ ID NO: 593991 - DNA, 75 bp, Homo sapiens
tcccatcaccatcacagagagcgatcttcttggacacttaatgattgttggcaagaaatgtgctgctgatctggg

SEQ ID NO: 593992 - DNA, 75 bp, Homo sapiens
acgcccgccgcctcactgtttctagccttcagctcgggttcatgacgctctcgatattcctgtgcagaaacctgg

SEQ ID NO: 593993 - DNA, 83 bp, Homo sapiens
gctcgatccagcaccatggggaagcgggacaatcgggtggtggccagcatcgaaatgttcagccttttagtgatgaagatgca

SEQ ID NO: 593994 - DNA, 50 bp, Homo sapiens
cttttgggcttcagaatgcagtgttttcgctttgacattgtaaaccacag

SEQ ID NO: 593995 - DNA, 101 bp, Homo sapiens
accaggacaaagttaagggatcactactcaagcataaggtcagtttaggggctggtgcaaaggatgagttgcacattgttgaagcagaggcaatgaattac

SEQ ID NO: 593996 - DNA, 82 bp, Homo sapiens
ttgcaatgaaattccttcatctgtttcacatcgcaacaaaaaggaagatgagaatgtgcctactgctcctgatcctccaagt

SEQ ID NO: 593997 - DNA, 95 bp, Homo sapiens
tggatagcctgaaggcagccattcagatcaaaggtccatcatcaaaacaccaaagactcaagacacagaagatgatgagggagctcagtggaatt

SEQ ID NO: 593998 - DNA, 83 bp, Homo sapiens
ctacagcctgcgtccagccataacccaggagtaacatcagatggatgatgatgacgacgacgatgacgtaggagatcatgacg

SEQ ID NO: 593999 - DNA, 100 bp, Homo sapiens
gccagttactatggcagttgcaaaatattcaggagaccgtcgttgccttgtatttccagagaacaggtcatacttacctggttgcttgcgcatctagtaa

SEQ ID NO: 594000 - DNA, 87 bp, Homo sapiens
gaggacgacgaggactacgtgccctatgtgccgttacggcagcgccggcagctactggtctctaattaacagaagatggcaaagccc

SEQ ID NO: 594001 - DNA, 76 bp, Homo sapiens
gaaccaccaaaagtccattatgaaactgagttctaaagttcctgttgcttcagacaatggatgagcaatcacaagg

SEQ ID NO: 594002 - DNA, 100 bp, Homo sapiens
tgcataatttaaatgaaacctatgtgtatataactttcaaaacttctttttcaagaaactaagaggatgtgatcttcgtggtggaaagctaaattttaaa

SEQ ID NO: 594003 - DNA, 83 bp, Homo sapiens
gaattatttgctgttggatcgtttcatactttacgcttgtgtgataaaactgggattactgacagccctgtcctaggagcaca

SEQ ID NO: 594004 - DNA, 83 bp, Homo sapiens
cggctcccggcggccccagctgtcaccggcctacttggatgattgtcaccggaggtatagctgtgcccactgccgcgctcacc

SEQ ID NO: 594005 - DNA, 100 bp, Homo sapiens
gctagtggcttattacttgtgactgaattggttccttccattatgagcaacttgttgaatccagatgccattttctcaaacaatgaaatgagcctgtcag

SEQ ID NO: 594006 - DNA, 75 bp, Homo sapiens
ccgggagaggcaccaaatctggcctgggggcccgagaagcttcctctcagctattgacctgaaaagtggttctgg

SEQ ID NO: 594007 - DNA, 90 bp, Homo sapiens
tgaaggagctcatgcagtggtacaaggaccagaagaaactgcaccggaaatgtgcctaccagtgccctctggtggtcagaagatgctgtg

SEQ ID NO: 594008 - DNA, 83 bp, Homo sapiens
cagggaggatgtcgggacaccccggaagctgggaaatgcccgaccctgcccgccctggactggcagctgccgtcccactcagg

SEQ ID NO: 594009 - DNA, 83 bp, Homo sapiens
cgcgcccccgacgaccgcccgacgtgcattcccggaggatacgaagcgttttcggcttcctgcccggagctgtgcagcaaaca

SEQ ID NO: 594010 - DNA, 95 bp, Homo sapiens
cccccacctgtggactctgaccgcaaacaaggagagcctactgagcagcctgagtggacctgatggccaaaagaaaggaagaaaatttttcctct

SEQ ID NO: 594011 - DNA, 95 bp, Homo sapiens
acattggtctctcccagggcaacctccgcgtccactacaaagatccaaaaagttggcagctcttgcagaagccttaaaggaagtctcccttacaa

SEQ ID NO: 594012 - DNA, 76 bp, Homo sapiens
tcggcgtgggtctgtgcaacaatggcttcatgcaccacgggactcggagatcatgcagcagaagcagaaaaaggca

SEQ ID NO: 594013 - DNA, 89 bp, Homo sapiens
gcacatccaggcgggccagtgcggcaaccagatcggcgccaaggtgtcgtgaaaactacccctaaaagccaaaatgggaaaggaaaaga

SEQ ID NO: 594014 - DNA, 98 bp, Homo sapiens
tcagggtcttcagtggtaacagccagtgtgcagagaatggatcttggagaatgtctgaaagtccatgacctggctttaagagcggattatgaaattgc

SEQ ID NO: 594015 - DNA, 100 bp, Homo sapiens
ttctgcatgatgacagaagccgagcaggacaagtggcaggctgtgctgcaggactgcatccggcactgcaacaatgatgccatggacaatattaccaggc

SEQ ID NO: 594016 - DNA, 100 bp, Homo sapiens
tgtccacgtgatcattggggggcacgattctccctctcctagaggcgagctgtaggtaaaacttgcctactgatcagttacacaaccaatgcatttcctg

SEQ ID NO: 594017 - DNA, 100 bp, Homo sapiens
ctggattcccggagcaggcgacagctttccaagagcagccgttccagcacctactcctatcccgagacgccgctgtacacgcagacggcaagcaccagct

SEQ ID NO: 594018 - DNA, 50 bp, Homo sapiens
ttaaggcttctttgtacagtgcaaaagtcaacaactctagcttaattgga

SEQ ID NO: 594019 - DNA, 83 bp, Homo sapiens
ccgcctccctggccggggcgcagttcggaggttcaggctccccacaggtgcaggaagccgccgcccagccatggacggggagg

SEQ ID NO: 594020 - DNA, 100 bp, Homo sapiens
cccgctcgctgggagagaggtacctctccttttccctctccctttccctaagttcacagccatgaatgaaccacagtgcttctacaacgagtccattgcc

SEQ ID NO: 594021 - DNA, 101 bp, Homo sapiens
ctgaagaagaacttaagaaacacaacaaaaaagatgattgttggatatgcataagagttggacagagagactctgaagatgtgagcaaaagagactccgat

SEQ ID NO: 594022 - DNA, 95 bp, Homo sapiens
cggagagctgagcagtcaagatggtactatgaagcatttccaccactttctgagaaaccagtttgcctgcaagaaatcatgactgtgtggaacaa

SEQ ID NO: 594023 - DNA, 100 bp, Homo sapiens
taacattgctgtgttctggtgcctgctcacggtgaccttctccatatgtggcccggccagataagatttcaggagctgatattaactccatctgtcagga

SEQ ID NO: 594024 - DNA, 75 bp, Homo sapiens
agctgcctctgaggaacacgccgcaggttgttcctcaaagtcattcaagctgtactcgccgaaggagcccccgaa

SEQ ID NO: 594025 - DNA, 83 bp, Homo sapiens
cggggaggctgaagggacgctcgggtaggcaaggtttggtgcacctcgatttggaggaagtagggcagggcccttatctggaa

SEQ ID NO: 594026 - DNA, 100 bp, Homo sapiens
ccgtcgcggagccggagggcgggaggaacatgacatcgcggagtgccggtggtggtgtgcacattgagccccggtatagacagttcccccagctgaccag

SEQ ID NO: 594027 - DNA, 74 bp, Homo sapiens
aaagaacaacctgtcttggagcgcttgcagtttgcagaaaaaacttcagcatgtgccaggaacacaacctcacc

SEQ ID NO: 594028 - DNA, 96 bp, Homo sapiens
aggaactgcgcagcctcttcgagcgccgcggacgcgtcatcgagtgtgacgtggtgaaaggcattcccatcaagagcaccatggacaaccccacca

SEQ ID NO: 594029 - DNA, 90 bp, Homo sapiens
cggcttcctagtgagtcggcggctgatttagaaggaggttcaggctacggtgagccgaagtgatgaattgactctggaaggcatcaagca

SEQ ID NO: 594030 - DNA, 80 bp, Homo sapiens
catgctctttgtagcgtggtgcttctgttgctcacaggttaaaccttctctcgatgaagcttttgtcatccaagaacaga

SEQ ID NO: 594031 - DNA, 115 bp, Homo sapiens
ggaaaattgagttaaacagttacttacagagtttgatgaatgcttcaacggatgtagcagaggtcctttcccataacctgtgcacggtgctgaaggttcctcatgacccagttgc

SEQ ID NO: 594032 - DNA, 50 bp, Homo sapiens
tggacagacagctactccacgtgcaatgctgcaggtggagctggagcaag

SEQ ID NO: 594033 - DNA, 83 bp, Homo sapiens
gatgaagcttctgaaccatccacacatcataaagctttaccagtgtactaatggtcacttgatgtgcgctggctgttttatcc

SEQ ID NO: 594034 - DNA, 95 bp, Homo sapiens
ccggctcccgcaccatggaggaggacgacagctacgcaagttgtcctcgaagaaggtacaattgcttttaaaaattgggttaaaacaggcacaga

SEQ ID NO: 594035 - DNA, 75 bp, Homo sapiens
ctttgctttatgattatgggaatgctaccaaagcctcagacggagtttcactcttgttgcccaggctggagtgca

SEQ ID NO: 594036 - DNA, 50 bp, Homo sapiens
gagggaagatctttttcctcaattggattggagaatccatgttgaccaaa

SEQ ID NO: 594037 - DNA, 75 bp, Homo sapiens
gaaaatgaatgaatgtacacacctcattgtgcaagaaccaaaaggagccggtgaaacctgaagaaggcagagata

SEQ ID NO: 594038 - DNA, 88 bp, Homo sapiens
cagttacttcatcgtctccatcctctacctcaagtatgagccagacccaagcaccagccgccgcttcacacctccctccccggccttc

SEQ ID NO: 594039 - DNA, 75 bp, Homo sapiens
tccacgtccgatgatgaacctccctcctctgtcagtcatggagcaaaaggctgctttgctggctctgcaagaaaa

SEQ ID NO: 594040 - DNA, 80 bp, Homo sapiens
gcagaagaagccaaaaacattctgggaatactcccccagttgcaagaggcgcaggaccgtggaagacttcaacaaattct

SEQ ID NO: 594041 - DNA, 82 bp, Homo sapiens
gccgatccagcctgcggagcctgtggggcagtatggactttctgtcagattttgagatgatgttgcagcgaaaaaagagcat

SEQ ID NO: 594042 - DNA, 82 bp, Homo sapiens
aggcagacaaaaacctttccaagcaagcatgggacaccaagaagggcaaaataacatggcagccagacgaattacacaggag

SEQ ID NO: 594043 - DNA, 99 bp, Homo sapiens
ttctggaagaagaagaagagcatgatcggcatgtccaccaaggcaggctactgcagcactggggtgtcagttgttggtccgacccagaacgcttcagtt

SEQ ID NO: 594044 - DNA, 87 bp, Homo sapiens
tggcattacttctatagaaatggctgaaggaaaacctccttatgctgatatacatccaatgagggccaggagtggtggctcacacct

SEQ ID NO: 594045 - DNA, 83 bp, Homo sapiens
tctatatttaagtatctccgctacttcactcgcactatccttgatgctaggattgaaagaaggtggcaagaggaagaagcaga

SEQ ID NO: 594046 - DNA, 100 bp, Homo sapiens
cttctctgtggaactgctctggcagtcatcgtgcctgaaggagtacatgccctttatgaagatattcttgagggatgaccagtgtcccagtgaaggaacg

SEQ ID NO: 594047 - DNA, 74 bp, Homo sapiens
gaacattcctgctcttgttggcaaagcaaaatcctgacagatgactttgcagacaaggagggtctggaaatggg

SEQ ID NO: 594048 - DNA, 100 bp, Homo sapiens
tcagcaagtggcaagcctatggactcaaaggctatcctggtgagctccagaagctgggaatcaaatgcttttaccataacgctgatctggtgagttgggc

SEQ ID NO: 594049 - DNA, 98 bp, Homo sapiens
gcagaggaaccacacgctgatcatgtgatcccagctgcagacctctctgagcagatctccactgcgggcactgaagcctcaggcaccggcaacatgaa

SEQ ID NO: 594050 - DNA, 100 bp, Homo sapiens
cgattatggacccggccgaggcggtgctgcaagagaaggcactcaagtttatggggatgtggagacgctggtagcggggccaggaaggctccggacggag

SEQ ID NO: 594051 - DNA, 50 bp, Homo sapiens
gccgcacacaagctggctgacccgggcggctgagtgacagcccatcaatg

SEQ ID NO: 594052 - DNA, 85 bp, Homo sapiens
ccaacatggtcttcattggaggtatcaactgtaagaagaggaaagacttgtctcagatggcagaaacggtggacacaagcgaaat

SEQ ID NO: 594053 - DNA, 50 bp, Homo sapiens
acgaaaaatgctaacaacagcttcacggaaacttggctgtaacttcaaaa

SEQ ID NO: 594054 - DNA, 75 bp, Homo sapiens
agatcaagaccctggagggcgagttctcggtcaccatgtggtcctcaggctcgtggtcccaagaagcatctgaag

SEQ ID NO: 594055 - DNA, 50 bp, Homo sapiens
ctgcgatgcatgtgatcaagcgagatgcatggtcatggaggctatgattc

SEQ ID NO: 594056 - DNA, 100 bp, Homo sapiens
gggggaaaacatggcgtctgccctggagcagttcgtgaacagtgtccgacagctctcagctcaagggtgactgttggatctgtatggaactcatgtctac

SEQ ID NO: 594057 - DNA, 75 bp, Homo sapiens
gaaaaactccagcccagcctcagagtggatccaaacttctacagcaaaaacttacttcttttaggaaagacatac

SEQ ID NO: 594058 - DNA, 50 bp, Homo sapiens
tccgaaagcctgcgcatcaaggagggttccacctgagtgctacagtggtg

SEQ ID NO: 594059 - DNA, 88 bp, Homo sapiens
ccgtcactccccagggcggcatcgtcgtctatgggggctactcgaaacaggagctctgtgtgtcgtctgagcagtcgcgagaagattt

SEQ ID NO: 594060 - DNA, 98 bp, Homo sapiens
gtaaaactcattttctggggaataggaatttcgctaaggagtttgtgatcagtgatcggaaggagctggaggaagatttcatcaagagcgagctgaag

SEQ ID NO: 594061 - DNA, 100 bp, Homo sapiens
agtcagctgcgtgattcccgtgattgcgttacaagctttgtctccttcgacttggagtctttgtccaggacggtggtcagccgtgaattaagaatgccaa

SEQ ID NO: 594062 - DNA, 100 bp, Homo sapiens
tacaggaggagtcctccactcacaagatcgtgaggtgctgactcattctgatgaaggaaagagcgtccctgtgcagctgcgtgtccttcagttctttggc

SEQ ID NO: 594063 - DNA, 50 bp, Homo sapiens
gagaagtgaccctcctgcgcctggttcgaagtcaacaataccattcttca

SEQ ID NO: 594064 - DNA, 114 bp, Homo sapiens
cccccactctttccgccctaatggaggtctccagtttcggctttcagagtatggatgcatgctggagattaaggacgtgagaacgtttcctgatggaagttctgttgtagacgc

SEQ ID NO: 594065 - DNA, 100 bp, Homo sapiens
ggcaggaggaacgggacaggaggagcggcggatggggcacgcacagagtgcaagacgctgagcaatgcaggtgccgtgagcgatgtggagatgcaggaac

SEQ ID NO: 594066 - DNA, 90 bp, Homo sapiens
gtgagggtgtacaaatacccctttgaattaattatggcttttcggagcaacatcccctgtcacctggttgatatctcttgcggattaccc

SEQ ID NO: 594067 - DNA, 102 bp, Homo sapiens
gccggctttacgttcacctcggtgtctgcagcaccctccgcttcctctcctaggcgacgagacccagtggctaggcagtttggagcatgtgaacaccttgag

SEQ ID NO: 594068 - DNA, 98 bp, Homo sapiens
ctccagctgcgagtgcggcctcggctggcggcggcaccaggtcgcaatggaagaagagatcgccgcgctggtcattgacaatggctccggcatgtgca

SEQ ID NO: 594069 - DNA, 120 bp, Homo sapiens
tcccagctttggttggaagacctattatcagatcaaccaccaaagtgggaaacattgaaatcaagttttagaggatgtccttgggaggatcgcaaagcagtctggtgagctggagagcca

SEQ ID NO: 594070 - DNA, 82 bp, Homo sapiens
ccgacctcgacgtcttgcctgtgtcccacttgttcgcggcctatagactgcctctgtcaccgggtccctccacccttgtctc

SEQ ID NO: 594071 - DNA, 50 bp, Homo sapiens
aaaggaggttttaaacagtataacagccctggaggctgcccgaatttgtg

SEQ ID NO: 594072 - DNA, 101 bp, Homo sapiens
ctctgtaggaaggaacttggttccccctccctcagcttccgccccaaaagcacgtcagctaactgttcagatgatgcaaaatcctcagattcttgcagccc

SEQ ID NO: 594073 - DNA, 90 bp, Homo sapiens
ctgaaattttgggggcaggttctcttgctaggcaatggtggcttgctatccgggaaatggaacaggttatgttcgccacgtggacaaccc

SEQ ID NO: 594074 - DNA, 100 bp, Homo sapiens
ctggacctacatgcttcctgctgtggctgtctcggaacccgtggtcctccgcttcatatctgcaactatgtgggaccagcaaaggttattgttcagttgg

SEQ ID NO: 594075 - DNA, 82 bp, Homo sapiens
cccggagtgagcggagtagcgagtcggcaacccggaggtgacttaagagattaaaattaatttggttgctgttggttctgaa

SEQ ID NO: 594076 - DNA, 100 bp, Homo sapiens
cccagatctacctgacgggcctgcgagggttgaagattgtgaagcaatagcctaaggtgctggagaatctggtaaaagcaccattgtgaagcagatgagg

SEQ ID NO: 594077 - DNA, 82 bp, Homo sapiens
tttttctaggtcctaggcctacttacaagcctccagtctcaaattatccagtatcctaagaaatccggtaaccaataagaag

SEQ ID NO: 594078 - DNA, 75 bp, Homo sapiens
cagaaagtcgatgagttaaataaagaaattcagaaggagatggatcaaaggatcagttacagttgtggattcgag

SEQ ID NO: 594079 - DNA, 90 bp, Homo sapiens
ctatgaatttgctaaacttaaaagcaagctggttctctgggatataaataaggtggaatgaatcttacttgttgaatatcttctggttac

SEQ ID NO: 594080 - DNA, 80 bp, Homo sapiens
caggcatggaaccagcaaggatttaacagcagccgctcttctaaaacattcaaaccaaagaagaatatccctgaaggatc

SEQ ID NO: 594081 - DNA, 88 bp, Homo sapiens
caaagaggagctggccaagaaatgcagcatcacagtgtcacagggcaaagatgagtcccagcacacagaatctatggtacttcagtcc

SEQ ID NO: 594082 - DNA, 75 bp, Homo sapiens
atgagaccgggggaggcgacgctaagttgctgatcgtggcgatgagcgggatcgtgtgcagaagaaaaccttcac

SEQ ID NO: 594083 - DNA, 82 bp, Homo sapiens
aggacaaaaactctttgagtttcggagaggagtaaagagatctggtggctggacccagagctgacctatggctgcgccaagc

SEQ ID NO: 594084 - DNA, 100 bp, Homo sapiens
aagatgaagatgcacatgtctgggaggataattgggatgatgacaatgtagaggatgacttctctaatcagttacgggcatcttttatgaccaaaactgt

SEQ ID NO: 594085 - DNA, 100 bp, Homo sapiens
cagacacggacctgagccgcgaggacacgggctgcaacctgcagcacatcagcgaccgggagaacatagacgattcattccacttaaaacctgaaaacat

SEQ ID NO: 594086 - DNA, 75 bp, Homo sapiens
ttctcttccggatgtcccggagcaagctctacaaaaacctctggggcgctgtcctgcaggaaagcaaggtgttgg

SEQ ID NO: 594087 - DNA, 75 bp, Homo sapiens
gagagcacacctattcagcaactcctggaacacttcctccgccagcttcagagttgtcaggaggaagaagaccta

SEQ ID NO: 594088 - DNA, 73 bp, Homo sapiens
ttttatctagccacatcttggagagcattacagcattgtgaagaactgattcagcagtacaaccgtgctgagg

SEQ ID NO: 594089 - DNA, 101 bp, Homo sapiens
actacatggcatctaccataggggtcaccatcagaaaagctaagtttgctgtatagtgaggatcaggagatctgatcctgattgcagaaccttccctgatt

SEQ ID NO: 594090 - DNA, 76 bp, Homo sapiens
acgttgacacttaccatgctgctgcccttaggtatgatgccgggcgggacggcttcatcgacctgatggagctaaa

SEQ ID NO: 594091 - DNA, 100 bp, Homo sapiens
gaaacattaagacctactaccagcaattctgtggtgttcttggtcacacatttatggagtttctgaagggcagtggagattactgccaggcacagcacga

SEQ ID NO: 594092 - DNA, 100 bp, Homo sapiens
caattaaacatgaagatccttgtgccaaacgtctggccaatgtcgttcgccaagtacaggacttgaaagaggagattgatattcgactctccagggttca

SEQ ID NO: 594093 - DNA, 98 bp, Homo sapiens
cggagccggcgctgagaggggctgcggccggagcgggcggctgagacaaaggcgacgttggcctttaccagagtttgatccaagccagattcgactga

SEQ ID NO: 594094 - DNA, 49 bp, Homo sapiens
gcgtcatcctaaggaacatcgacgttgcccgaagctcagcagagagtcg

SEQ ID NO: 594095 - DNA, 100 bp, Homo sapiens
ttccacaaaacctcagtcatcgtcacgagtcctgagtcggttaagctccaaaaggaattcttcatttgtctcctgatgtttatcaagagatggaagccag

SEQ ID NO: 594096 - DNA, 102 bp, Homo sapiens
gtggcatcctgaagttaatggttctatgaaacagtgtatcaaagtgtggactgaggtgtatgcaacagcgttattgcaacaggctaacgaaaacagacaaaa

SEQ ID NO: 594097 - DNA, 75 bp, Homo sapiens
cctgaaccggcacctgcacacctggatccaggataacggaggctgggtaagaagagttcctgggtcaagtggtca

SEQ ID NO: 594098 - DNA, 75 bp, Homo sapiens
cggagcccgagggaggagaaagcggcagccgctggagcaggatgaagttaaaggaagtagatcgtacagccatgc

SEQ ID NO: 594099 - DNA, 75 bp, Homo sapiens
ccgcctgctcgttcctgacagaattactatactggcaattgctggagaagattttgcaattgttgcttctgatac

SEQ ID NO: 594100 - DNA, 80 bp, Homo sapiens
tgggccggaagatcggcagcggctccttcggagacatctatctcgtgccctctggtggtcagaagatgctgtgctgtctc

SEQ ID NO: 594101 - DNA, 90 bp, Homo sapiens
ctaagtttttggcaccatatactactttttccagaattcatacaaagagtggtgtccgcaatgttgccagtgtctgtctgcagattggct

SEQ ID NO: 594102 - DNA, 90 bp, Homo sapiens
ggcgttcatctaccacgctttcgtatgaccgcacctcgagcaggagtggggatgccacgtctgcccccagcgcccggccctctgtccacc

SEQ ID NO: 594103 - DNA, 98 bp, Homo sapiens
cgggcctcaaaatggccacacgcgtacccccgtagcggaaaaacccggcacagtcttcactaccgtagaagaccttggctccaagatactcctcacct

SEQ ID NO: 594104 - DNA, 100 bp, Homo sapiens
cctgcgtggtggactgtggcaccgggtcacccaacctgcctgcagtttaccctgaacatgaccgaggctgtcaagacctacaagtggcagtgcatagagt

SEQ ID NO: 594105 - DNA, 98 bp, Homo sapiens
gcaaggctaagattagaacagctcataggagagtcatgattttgaatcacccagataaagtgagatggaagattttcgaggtatagcagaagaatcat

SEQ ID NO: 594106 - DNA, 75 bp, Homo sapiens
gaccggagggacacaccctgctgatggctctgagagattcctctgcgaatctgtttttagctatcaagtggcatc

SEQ ID NO: 594107 - DNA, 82 bp, Homo sapiens
gatggggagaaggaagcgagactcatacgcaacctcaatggtattagtgctttggttgaaatacctaagaactgtgttgtgg

SEQ ID NO: 594108 - DNA, 96 bp, Homo sapiens
ggaagaggaaccacaagaaaatcaaaagaaacttttgcccttatcagtaacacctgaggtcagaaagcaacattgaatgcagaagaaatggcggac

SEQ ID NO: 594109 - DNA, 75 bp, Homo sapiens
gtggaaaaataggccactacatgaaagactgccctaaaaggaaaagggagatgcacttatttacatggaaccaga

SEQ ID NO: 594110 - DNA, 74 bp, Homo sapiens
aatgatccttactaaccacgaccatcaaatccgtgtcggagtccttacagagaaagcatgggattatggcaacc

SEQ ID NO: 594111 - DNA, 100 bp, Homo sapiens
gacgcggaggcagagaagggaacgcccggcccagccccgtactccaaagattcaggtttactcacgtcatccagcagagaatggaaagtcaaatttcctg

SEQ ID NO: 594112 - DNA, 83 bp, Homo sapiens
gaatagagttgagcctgtgggacacttcgggcctgccttgctctgccaggaaccatgagtgaggcccgcagggacagcacgag

SEQ ID NO: 594113 - DNA, 75 bp, Homo sapiens
ggaagctctttgaccttctggatgtccttgagttcaaccaggcttcgaacctaatgaacaatccccagattcagc

SEQ ID NO: 594114 - DNA, 90 bp, Homo sapiens
gtttctttgagcagtttgtggaagcgatcagttcccgtgtcagtggctatgatgacacctcaagttatcactccccagcaaatgcagcag

SEQ ID NO: 594115 - DNA, 75 bp, Homo sapiens
cccagggcgctgccagagccctgccggctaagggatggggaaacaaacagccaccagtgaagactataagctcct

SEQ ID NO: 594116 - DNA, 100 bp, Homo sapiens
ctggaaccctggggactacgacgtccctcaaaccttgcttctaggagataaaaagatgaggtttatataactttccaagacaaggaagttgtgcaaagcc

SEQ ID NO: 594117 - DNA, 98 bp, Homo sapiens
ggggcctgggcctcccggtccgcaagcagaataatccagaatggctactctgatctatgttgataaggaaaatggagaaccaggcacccgtgtggttg

SEQ ID NO: 594118 - DNA, 99 bp, Homo sapiens
aactttaaacagaatgacaccaaggtcctgaggtctaagagcttactcaatgagattgagagtatctatgatgaggcaatctgaaagcaaatcctgttt

SEQ ID NO: 594119 - DNA, 100 bp, Homo sapiens
acttgtgacacggacggcgcgtcctgctgaccccagccggcgccgagggcttggaatctcgagcgggaaaaggtccagtggcattgcagagcacggatgg

SEQ ID NO: 594120 - DNA, 51 bp, Homo sapiens
tcccgatggcagcgatgaagagaactgcactccacctgaagaagattgtac

SEQ ID NO: 594121 - DNA, 100 bp, Homo sapiens
ggggaccgagcctgggaggccggccggtgccagcacctttcggcttctgagacggcggcagcagcggcattcagggctgacagtgagtgacgtggacatc

SEQ ID NO: 594122 - DNA, 100 bp, Homo sapiens
ctccaccagctgccaagactgtggttgagaacctccccaggacagtcatcagaggctctcaggctgatgcgctggctccctccctccgaggctacttctc

SEQ ID NO: 594123 - DNA, 100 bp, Homo sapiens
ctgatacacaccaaccaaccagtcaaccagccattgctgtttactggatacctggagtgtatggtgaataaattcaagaaaacatctattcgtaagcaac

SEQ ID NO: 594124 - DNA, 100 bp, Homo sapiens
tcgtttcttcactcaacctgacaaggctttcgggtcacctccagcagctcccagttcagctcacgtgattcggcacagctctctgactctggctctgctg

SEQ ID NO: 594125 - DNA, 90 bp, Homo sapiens
tgcggacgtccaagctgctgcttccggatgactttaagatcccggagatcgcccgccatggctttacttactgcggccgcccggctcttg

SEQ ID NO: 594126 - DNA, 98 bp, Homo sapiens
aaacaagcaagcctgccataagtgagaaggttctagtaaataccgcttgctgtgttttgatgttggtggctaagctcatccagtgtattgtgtttggc

SEQ ID NO: 594127 - DNA, 75 bp, Homo sapiens
ccgacctcgacgtcttgcctgtgtcccacttgttcgcggcctataggtcccatctgatgccgaggctgaaggagt

SEQ ID NO: 594128 - DNA, 100 bp, Homo sapiens
ggcgcgcacaggctgtagcaggttccggcggacggcgttgcgaaggccatggttgcttgttatccgggcaatggaacgggttatgtacgtcatgttgata

SEQ ID NO: 594129 - DNA, 88 bp, Homo sapiens
gtggagtatgtgatggtcaggaatgagatcacaggacatacctacaagtaagtaaggaggtctctgtaccatggctcgtacaaagcag

SEQ ID NO: 594130 - DNA, 75 bp, Homo sapiens
gcaatgtcacttacaacattaatcagatactgcatttaagaatagcctaacatggcagaccagagacagcgctca

SEQ ID NO: 594131 - DNA, 100 bp, Homo sapiens
ggagagcgcgtgcgcacagagctggccgacaaggtcaccaagctgcaggcaatccggctcatccaggcctgcgtggatgtcctttccagcaatgggtggc

SEQ ID NO: 594132 - DNA, 51 bp, Homo sapiens
ggaaatcagcttttgcttagtgatcaggaggaagaacgtgcaaaacgtgag

SEQ ID NO: 594133 - DNA, 97 bp, Homo sapiens
gagaggaactgaggcctcccaccaaaaccaagcactgacatgccactcatgggacttggactaaagtctgatgaacttcccaatcagatgagcatgg

SEQ ID NO: 594134 - DNA, 101 bp, Homo sapiens
caggcagccagccaggaagggaggcagaagcatgctaagaacaacagtcaggccaagccttctgcctgtgatgattatttactggcaagatgagcaggatt

SEQ ID NO: 594135 - DNA, 98 bp, Homo sapiens
aatgggacaagacccatctttatgcaaagccagcgttacagtaatgttccaggttcaaaccttgtactactcagctgatcacaagctgcttgatggga

SEQ ID NO: 594136 - DNA, 100 bp, Homo sapiens
tgcgcgagggagttcgacacccaagagcagcttgtgcacgatttaagtgccctgtatgctcaaaatttgtatcctcagatgaaatggatttgcatcttgt

SEQ ID NO: 594137 - DNA, 100 bp, Homo sapiens
ggccgacaaggaagtgaagaaggcgcatcactcccagctgcgcaaagcttgcgaggtggcgttaggaatgtcgttgtctgctgggtcttcccctcttcat

SEQ ID NO: 594138 - DNA, 74 bp, Homo sapiens
atcctgggcaaacctgcggacctctgcttatgataatgtcaacaaagttcgagtagctatcaagaaaatcagcc

SEQ ID NO: 594139 - DNA, 90 bp, Homo sapiens
atctgcaaacatagagaattctgggcttccacacaactccagtgctaactcaacagggaattccaaatgaaagctggagaataacaaaga

SEQ ID NO: 594140 - DNA, 98 bp, Homo sapiens
cgcgctccaagacctgtcgcaacccggccgactgcagcagtggcccagggcaaagagtgtgcgtcatcgatgagattgggaagatggagctcttcagt

SEQ ID NO: 594141 - DNA, 74 bp, Homo sapiens
attcagcaatttagttactcatcttgagctgtattttcaaggccctagcagcaacaagcctcgtgtgatccggg

SEQ ID NO: 594142 - DNA, 75 bp, Homo sapiens
gggactcatggactgcttgtgaagcaggaagacaggtgttgattgcctttgctcagtatcttcagcagtgtccat

SEQ ID NO: 594143 - DNA, 88 bp, Homo sapiens
gctcctggacttcgcctttcccgagccctggaggtggggagaaaagaatggctgcagtctgtccaggccaccatgatcctgtcgatca

SEQ ID NO: 594144 - DNA, 50 bp, Homo sapiens
cagcggcgagcagaactacggcgagcggtaagactttgaccccgacgcag

SEQ ID NO: 594145 - DNA, 75 bp, Homo sapiens
atgcctgtcactgggggcaccattaacatgatggagtacctgttgcaggatgcaaagtacagttcgagagcacag

SEQ ID NO: 594146 - DNA, 82 bp, Homo sapiens
gcctggctaaggaaaccctattacctccagtttaagctatgaagaaggacatccctcacactctgaaacagatctccttcag

SEQ ID NO: 594147 - DNA, 88 bp, Homo sapiens
gtgcacattctctgttctaagtgccttaagagaggatcgcccaatccacatgcttttccaggaaaaacggatcgtgtccctggattca

SEQ ID NO: 594148 - DNA, 83 bp, Homo sapiens
ccgcgcccgcttcggagagagaaatgctgggacaatgcagatcttcgtgaagactctgactggtaagaccatcaccctcgagg

SEQ ID NO: 594149 - DNA, 75 bp, Homo sapiens
accagatatcttgaaaagctgccagaaaggctcagtagatgaaggcgtttctgagggcttgcctacacttcaaag

SEQ ID NO: 594150 - DNA, 97 bp, Homo sapiens
cttcggtggactccttcggcagtccacccaccgccgccgcctcccagcatcccagccatcactcttccacctgctccttagagaagggaagatgagt

SEQ ID NO: 594151 - DNA, 75 bp, Homo sapiens
tggggatggctataatgggtatggaggaggacctggaggcagtccttgatggagatgcagagtcgtcatggggcg

SEQ ID NO: 594152 - DNA, 98 bp, Homo sapiens
tgattccctgcggtgtgcaagtccgactggaacaggactggctggacaatggcccagaacaagctattcaacaagatcctcaaagccctgcagtctga

SEQ ID NO: 594153 - DNA, 100 bp, Homo sapiens
gacatctattccatctgtgagtgactctttgacatggagagaatttcactatattcagatacagatccacgggttttagaaaaacaagaattacagcagc

SEQ ID NO: 594154 - DNA, 100 bp, Homo sapiens
cgtccaccaagaagctgagcgagtgtctcaagcgcatcggggacgaactggacagtaacatggagctgcagaggtgctggagctggcaggtaatgcttct

SEQ ID NO: 594155 - DNA, 100 bp, Homo sapiens
cctatcagatcctcaacagctacaagccacaggcaagaagccccatgtgccactcccctgatctgcagcttcggtaggccggtggacctggagaaggacg

SEQ ID NO: 594156 - DNA, 88 bp, Homo sapiens
tcaagatggcgtgcttgttggagaccccaatccgcatgagcgtcctttcggattttatagctaccttgggaaaactttcaggattaca

SEQ ID NO: 594157 - DNA, 75 bp, Homo sapiens
gtggcgtgccagcggaagataggtgccgggcaaactctttgattctacaatagctgatgagggaacatggacttt

SEQ ID NO: 594158 - DNA, 75 bp, Homo sapiens
aggtccaggagtacccgaccctcaagttgattatggaagattcccacaagagtaccacgtcagagacagcacctc

SEQ ID NO: 594159 - DNA, 52 bp, Homo sapiens
atcaataattacttttccattggcgtgcgcagataaagtgagcccggaaagg

SEQ ID NO: 594160 - DNA, 80 bp, Homo sapiens
cagtttctggaagaagaagaagagcatgatcggcatgtccaccaaggccaagtcctgtatctgccatgtctgtggcgtcc

SEQ ID NO: 594161 - DNA, 100 bp, Homo sapiens
gccttctgccgctcgccctctgcctgctggctgcacccgcctccgcgctcgtcagacctaccagcagctcaatggccttcccaaagaagaaacttcaggg

SEQ ID NO: 594162 - DNA, 97 bp, Homo sapiens
agtgaatatccagttgggaatctgaaagcagcagtgggcagaaaattgtgttaaggaatggtactgaggcatttgactcctgggagaagccccctct

SEQ ID NO: 594163 - DNA, 100 bp, Homo sapiens
cagagattgagaatgtccatggatttgtttctcattctcatatttcaccaataaagaatacagatatggtccagaaatcagtcagcaaaaccttgccctc

SEQ ID NO: 594164 - DNA, 100 bp, Homo sapiens
ctgggggttggttgaggcggacggcggggtccgggccggagtacgtcgttcccgctgcgctaggggaagcgggcagtatatcctttcgggctctgatgac

SEQ ID NO: 594165 - DNA, 100 bp, Homo sapiens
ctctgagaatgacccgttctggaatcagcttctctcattttctttccctgcaccaactagcagtgatccgtatgtgaaactttcattgtacgtagcggat

SEQ ID NO: 594166 - DNA, 82 bp, Homo sapiens
cctgcagaaggagcaatggccttggctcctgagagggcagccccgagaaccacaggtgtacaccctgcccccatcccgggat

SEQ ID NO: 594167 - DNA, 108 bp, Homo sapiens
atccccactttgtgattccctaccgctgcttaggagttccgattctgaagaggcatttgagaccccggagtcaacgacccctgtcaaagctccgccagctccaccccc

SEQ ID NO: 594168 - DNA, 74 bp, Homo sapiens
gacaggattcgttggctgccgtccccgctgctgtgcattggaagctgcagttcatcatctgctgtgatagttcc

SEQ ID NO: 594169 - DNA, 98 bp, Homo sapiens
gcaccagagtcggcgtaactatcgcctgacagggtcatcatcagatttgaaatatttaaagtggatacaaaactatttcagcaatgcagacaattaag

SEQ ID NO: 594170 - DNA, 75 bp, Homo sapiens
ccttgcccgcatctatagtttccagatggctctaacctcagtggtggtgtaaattggtccaatgtaacttgccag

SEQ ID NO: 594171 - DNA, 50 bp, Homo sapiens
actgtggaccctactgtacctcaaaagtacgaattggagcaatgttggct

SEQ ID NO: 594172 - DNA, 83 bp, Homo sapiens
ggatcgggtggagtgtaggtcatatcgccgcggttcgagaacttgtcttggacaattgcaaatcaaatgatggaaaaattgag

SEQ ID NO: 594173 - DNA, 74 bp, Homo sapiens
gtgtatacttacttcagtgctgttgctggacaggacatggatttgattgacatactttggaggcaagatataga

SEQ ID NO: 594174 - DNA, 97 bp, Homo sapiens
tgtgactgcagccatggccacaggcttagctgttaacgggaaaggctacccacctttctgttctgagacccctcaagagacatataagaaggtgatg

SEQ ID NO: 594175 - DNA, 51 bp, Homo sapiens
gatctttctggacattctgtgagaattcctagaggacctgtgcaacaacct

SEQ ID NO: 594176 - DNA, 114 bp, Homo sapiens
ggttctcccggcagcagcccgacgcaaaccaaggatctggggatcttcgcactatcccaagagtaatcaagtcagaggattatatgacttttatctgcctagagaagaactatg

SEQ ID NO: 594177 - DNA, 75 bp, Homo sapiens
gaaacgatcctctcaatcaaaataagctcaccaaagctcatcgacaaggacacatggtgaaagtagattggctgg

SEQ ID NO: 594178 - DNA, 100 bp, Homo sapiens
gctaacccggcctctggacaagaagaaaatattctctttggaatgggaaatcctctgcttgacatctctgctgtagtggacaaagatttccttgataagt

SEQ ID NO: 594179 - DNA, 100 bp, Homo sapiens
tgaggactaccttatgatttcctgcaacttgttccagcgatggcatgttcctctagaactccagatgacaagacaaatggctagctctggtgcatcaggg

SEQ ID NO: 594180 - DNA, 90 bp, Homo sapiens
caggacatgaacacacacctggcagagatttcccggtctcgcccaagaacttcaaggtgaaaatgatcatgaagacatcagttctgctca

SEQ ID NO: 594181 - DNA, 100 bp, Homo sapiens
agctgcctgacctcatgggcctaaaggctacaaatgttcatcgagtgattgggtgtccttctgtgctgaacatgtccgtaggaatgccctggcacttcat

SEQ ID NO: 594182 - DNA, 75 bp, Homo sapiens
tggatatcagctacagactttcctgagtcagaactgccattggatgtccagaatcccctgtagttgataatgttg

SEQ ID NO: 594183 - DNA, 88 bp, Homo sapiens
gggatcgtgaccgagaccgtgaccgagagcgtgaccgagagcgcgaatatcgtcatcgttagaaggtacaccaggggttggaaaaacc

SEQ ID NO: 594184 - DNA, 121 bp, Homo sapiens
tgtcactcgcgctggccggccgggggaagggacccgcacgccgggctttgttgtggaaatcccggttacctggaacgtcagtaatccaggtgacagcttcagatgcagatgaccccactta

SEQ ID NO: 594185 - DNA, 100 bp, Homo sapiens
ggaaggcactcaaaagtggggggcaggaaaggaagcctggagccagaggacttttggtggctgaggccttagctacctggcttacacattaaggaggaca

SEQ ID NO: 594186 - DNA, 75 bp, Homo sapiens
gagccctggaatgtgaagagacatgagacagtagtcaaatactcaggccctgggaggagcggggacactgaggac

SEQ ID NO: 594187 - DNA, 98 bp, Homo sapiens
gttggcgggcaccataggccgaagcacccggcaacatggccaatctttcctaagctgctcagcttacaagaaaaggaatcatactgctaagaattcaa

SEQ ID NO: 594188 - DNA, 100 bp, Homo sapiens
acgcacgcagctgactttgtcttctccgcacgactgttacagaggtctccagagccttctctctcctgagggcagctgtagaagatataaacccagcaga

SEQ ID NO: 594189 - DNA, 78 bp, Homo sapiens
gcgactgcataggaggacccagctggcgggaccgcgaggggatcgtccattatatcttcatgttcagggccagacacg

SEQ ID NO: 594190 - DNA, 100 bp, Homo sapiens
gacaaggccttccagtttggaagccactgagaatgcaaaggaggaagtgaggcgaattctggggctgctggatgcttacttgaagacgaggacttttctg

SEQ ID NO: 594191 - DNA, 89 bp, Homo sapiens
gccctcaacatctctcagagacgaaagatatttgatttaatggatgccaaagcacgtgctgattgcatcaaagaaatagatcttcttaa

SEQ ID NO: 594192 - DNA, 100 bp, Homo sapiens
gggccccctggaccccccggtgaacaggggcttccgggccttgctggaaaagaagggacgaagactctgggacatctggagaaagctgtagtcttggaat

SEQ ID NO: 594193 - DNA, 100 bp, Homo sapiens
cttcaatgtgggttatcataatgaacatcatgatttccccaacattcctggaaaaagtcttccactggtcgctgaaaattttgttccccctctgttggat

SEQ ID NO: 594194 - DNA, 100 bp, Homo sapiens
tatggagagccatgttttcctgaaggccaagacccggctgtgtcagcgtgttatgatgccgtcccgtaccaacctggctactggaatccccagtagtaaa

SEQ ID NO: 594195 - DNA, 84 bp, Homo sapiens
tgttgtcaaggtggcctaccaggaggccaggggtgtcgccatggcaatggatcacttggagtcctttattgctgaatgtgatcg

SEQ ID NO: 594196 - DNA, 82 bp, Homo sapiens
cgggcgtgggaacccaggccccgccgaggcggccagaagtccattggaatattaagcccaggagttgctttggggatggctg

SEQ ID NO: 594197 - DNA, 82 bp, Homo sapiens
gacgacaaggcttggaaacatacttacaggtgctgctgttttttcaaacgaaggaaaaggaaaaccatacagcgccacaaat

SEQ ID NO: 594198 - DNA, 83 bp, Homo sapiens
acagatggacttcaaatgctgtttgtattccagagactaggtggaattctactaagtatcagtcggccctacaagacaaagcc

SEQ ID NO: 594199 - DNA, 100 bp, Homo sapiens
tgcccatggtcacagacaacaaaatggaaaagcaaggtgatctcatccggtatatagttcttcattttggcagtagccggatcgagctgggagatgtgac

SEQ ID NO: 594200 - DNA, 100 bp, Homo sapiens
attgctttaataatcgactttcacccttagtagcagaaaaacgaccgtggccacagtaccacaaagtctctgagctcaaccttcaacaagactacacaga

SEQ ID NO: 594201 - DNA, 90 bp, Homo sapiens
ccgcgaaccaacggttagcggtggcaggggctgactgagagcgtctgcttggtgtaatggataggtaacagagaagacctcgtcccttcc

SEQ ID NO: 594202 - DNA, 82 bp, Homo sapiens
ccaggcggtgacagagtggagccatggctagaggagaaccaggtgcatcagcgcattgcggagctgaggaaagcaggtctgt

SEQ ID NO: 594203 - DNA, 100 bp, Homo sapiens
caccagctatggcattagcccacaggccaaggtggtattaaagataatcaaacattatcaagaagaaggacaaggaactgaagttgttcaaggagtgctt

SEQ ID NO: 594204 - DNA, 100 bp, Homo sapiens
ggaatatggaatcacaagtgatgacatcttctggctgaaggaatcccctggaaaaactcagggccgggacctgaagctgtgcctgtgggacctcgcggag

SEQ ID NO: 594205 - DNA, 100 bp, Homo sapiens
agcaaggacatccggcctgtgtgcaggaagttcatgcaggatttctctgattctgagtgtgcccggcgggccctggaacagttgaatgggtttgagcttg

SEQ ID NO: 594206 - DNA, 100 bp, Homo sapiens
ccccggcgccacctggagagaggccgcgtcctgggcagagggctgaaagaatcaggattcctgaaccttggatcacacctccagatttgcaagagaaaat

SEQ ID NO: 594207 - DNA, 75 bp, Homo sapiens
ctcagtaccaacaaccccacgaggttcggctttccagtttggcagcagcactacaaatttcaacttcacaaacaa

SEQ ID NO: 594208 - DNA, 100 bp, Homo sapiens
cggaatgtggtgctgagagactacatttataattggagatcctgaacaccaaaacagaacaatggcagcccgagtacttataattggcagtggaggaagg

SEQ ID NO: 594209 - DNA, 100 bp, Homo sapiens
ccaacagagtctaggctgggttcattacatgattcatgagccagatcgttaactgaagacaatatgcaaaattctcacatggatgaatacagaaattcta

SEQ ID NO: 594210 - DNA, 75 bp, Homo sapiens
gacttggccaaatggacgggactattaaggaagatgataagatcagatgggcgtctagatgggactatattctgg

SEQ ID NO: 594211 - DNA, 100 bp, Homo sapiens
atgaaaggagctcagacaatttctgtccagcaacatgacagcaagctcaggctggtaccgctagagcgacatgatggtggaatctgcctcggagacaatc

SEQ ID NO: 594212 - DNA, 78 bp, Homo sapiens
aaaaactttcgcctgagcctattttgacatttctcttgggaagttgtgcatctgacaggaatatagtactgtacgata

SEQ ID NO: 594213 - DNA, 98 bp, Homo sapiens
ccagaggaggactacgtgggggacgtgccaccagaaccctacttaggggcgggatgtcactccgagagagagccaggtagagctccgggaacaaattg

SEQ ID NO: 594214 - DNA, 101 bp, Homo sapiens
gcgctcctgcatctgcctccccatgccctggagagtgaatttgtttcctgccagcttcaccaatggattgatctcatttttggctataaacagcaaggacc

SEQ ID NO: 594215 - DNA, 50 bp, Homo sapiens
cgcgaatatcgtcatcgttagaaggtaactaggatttctacctcaaccgc

SEQ ID NO: 594216 - DNA, 75 bp, Homo sapiens
gacgggctcccccgggatgatctacagaaaaatggctacaaacttcctagcacatgagaagatctggttcgacaa

SEQ ID NO: 594217 - DNA, 100 bp, Homo sapiens
aagatccgcagctccacgcagcaagacccgcgccgccgggacccccaggacgacgtgtacctggacatcaccgatacctctaacctatttggaaacagtg

SEQ ID NO: 594218 - DNA, 90 bp, Homo sapiens
aagacacgcttcttctggaagaccagccaacagctcatctttgggtgaaaaattgtcgggatcttctgcagtccagctacaacaaacagc

SEQ ID NO: 594219 - DNA, 82 bp, Homo sapiens
ggggcagaccgctggggactgcgggcggcgctgtgtccgtcgccatgacagaaacctctgtagaggagcaggatgcaaccga

SEQ ID NO: 594220 - DNA, 76 bp, Homo sapiens
cgtggagctccagagatgattactctcgggatgattataggcgtgatgatagagggtggcccttgggtagggtgaa

SEQ ID NO: 594221 - DNA, 83 bp, Homo sapiens
ctctacttcaacccgcaccttgtgttccggaagttccagcaaattgtggctactaatttgccccctgaagatcaagatggctc

SEQ ID NO: 594222 - DNA, 82 bp, Homo sapiens
ggccactgcatcggctacgcgcccacttggcgggccctggctggggatgtgcgagcacatggattaattgatgtatgttgag

SEQ ID NO: 594223 - DNA, 98 bp, Homo sapiens
ttgtgacctttgacttgtttaagatacacaatcatcatcttactagttctctgtgttgctcgctaaccagtcccccagttcagtagactggagcccag

SEQ ID NO: 594224 - DNA, 74 bp, Homo sapiens
cactacgaaggccacctacaaatagcaggttgacatcatggacatatgtgagtccatcctggagaggaagcggc

SEQ ID NO: 594225 - DNA, 82 bp, Homo sapiens
agggaagatggcggctgtggtggagaatgtagtgaagctgtgtcgtgaaaactacccctaaaagccaaaatgggaaaggaaa

SEQ ID NO: 594226 - DNA, 100 bp, Homo sapiens
ctaactagctccaggttaggccgagctttgcgggaaagcagcgctcctttagcggcagagttttccgagtgaccttcttgatgctggctgtttctctcac

SEQ ID NO: 594227 - DNA, 50 bp, Homo sapiens
cctgcttgacctgtgtgatccgagggggcacccaagccaattgccattga

SEQ ID NO: 594228 - DNA, 75 bp, Homo sapiens
ccggaaaccacaatagcgggattgatctccttaggacctcttgaactcagtgaaaatagaatctttggaggtctg

SEQ ID NO: 594229 - DNA, 75 bp, Homo sapiens
ctgaggcctcctcagccatgtggaactccataaggatgagtttaccattattcctgtactggttggagctctgag

SEQ ID NO: 594230 - DNA, 83 bp, Homo sapiens
ggcaggggaacccagtcgcccctataaatcctggatcagtgacattcgagcaggaaccgccccttcatgcaggaaccacatca

SEQ ID NO: 594231 - DNA, 100 bp, Homo sapiens
gatgacacccagttctgggacttaaatgccaaattaactgataaatttcaaacggaagagagtggcagcatttagaaagaatctaattgaaatgtctgaa

SEQ ID NO: 594232 - DNA, 97 bp, Homo sapiens
ctggagtctgcgaaggccgggacccggttccccggcccacagtgggggtgtgcaaacccgagagaactgggagaccctgccctggttcaccaaaggc

SEQ ID NO: 594233 - DNA, 83 bp, Homo sapiens
atgttcactacccttcatgcatgaaagacaaagctactcagagaaccatggagtctggcagtaccgccgccagtgaggaggca

SEQ ID NO: 594234 - DNA, 50 bp, Homo sapiens
ctcagagcttggagacagacgtttggtgccctggttgtcagatgttggaa

SEQ ID NO: 594235 - DNA, 73 bp, Homo sapiens
gatcacgttctagatcacatactccaagaagacacgcgatgtacaatacggtgtggagtatggaccgcgatga

SEQ ID NO: 594236 - DNA, 51 bp, Homo sapiens
atgcaggactgctctcctactacacgccgagaccgacccgcccgcccgcgg

SEQ ID NO: 594237 - DNA, 82 bp, Homo sapiens
tggagtacagatctctgcagttacaggaacatcgtctgcttcatgagtactgtggacaaactcattaagaagacaaacctgg

SEQ ID NO: 594238 - DNA, 82 bp, Homo sapiens
gagacacaagaagcggatccagatcaacctctccacttctcctacacctgcacagttaataagccgttcccaggcttccagt

SEQ ID NO: 594239 - DNA, 87 bp, Homo sapiens
ataaaacatttagaacgatgtgaacatcgaatcatggaatcccttgcatggctctcaccacccacacagaatatgcctatgggtcct

SEQ ID NO: 594240 - DNA, 100 bp, Homo sapiens
agaaagagtgcaagatagaatatgatgatttcgtagagtgtttgcttcggcagaaaacggttcagcagactgtacaggatctttttggcagagccccaag

SEQ ID NO: 594241 - DNA, 90 bp, Homo sapiens
ctggcagaagtgattccagtgcctatagaggtacctcttaccagaaagattctgtacagagtaatgagatgtgtgacggctgcaaaccag

SEQ ID NO: 594242 - DNA, 100 bp, Homo sapiens
ggctgcttgtagtaagttcttctacaaattctttcaggagtttacccaagaaccattggtggagatagaagagtgttgttcgctgcctgtggcatccaaa

SEQ ID NO: 594243 - DNA, 83 bp, Homo sapiens
tgcagatgaaggccagtgagctggagcaggagcaggagacagagctccagggtcacgaccgctgcaagcaggctttgctgcag

SEQ ID NO: 594244 - DNA, 75 bp, Homo sapiens
gcaatcgtcagcatccgaagaatccaggcagacatctggtccctgggcataacagctattgaacttgcaagaggg

SEQ ID NO: 594245 - DNA, 98 bp, Homo sapiens
ctggttcaacgaggcatggctccagggcatctcggaagatccaggtcccaactggaagctgaaggcttactgtggatttctccgtcctggagtttctt

SEQ ID NO: 594246 - DNA, 100 bp, Homo sapiens
actctgcttaaaaccacgtggttcgatggctgccgcggctacgctgaggctctccgctcagacaagttggatggcttgaggactggtactaaaaggaaac

SEQ ID NO: 594247 - DNA, 49 bp, Homo sapiens
ggatcccggccaccagcaattgtccgcattatgccagtacatacaggct

SEQ ID NO: 594248 - DNA, 83 bp, Homo sapiens
cggaactcaaaacagacccatctttggatcttcattcattaagcagtgcagaaacacaggtttttcgttggaatatacgttgc

SEQ ID NO: 594249 - DNA, 75 bp, Homo sapiens
gtgatattgaccatgatggaatgcttgacagagatgagtttgcagttggtcttaccaggatgtgcttccagccct

SEQ ID NO: 594250 - DNA, 75 bp, Homo sapiens
aactcacctacgagtttgttaatctacaaagatgcaccagcattcaatgaaaagagacagggtctcgctctgtcg

SEQ ID NO: 594251 - DNA, 75 bp, Homo sapiens
tgttgcccccactgttgccttgagaattgaagacatctccccggataccccctgacaagaggattttcactacgc

SEQ ID NO: 594252 - DNA, 100 bp, Homo sapiens
cgggcagccaaggcaggcgagaagaccatctctgtggtcctacaggtgacacccctgcgctttgggaaggacgtcgatgggaaatgccacagcctcacag

SEQ ID NO: 594253 - DNA, 75 bp, Homo sapiens
ctcaagatggatgaagacggcggcggcgagggtggtggcgtgtcggagatgtatgcagtgtgacgccaagtttga

SEQ ID NO: 594254 - DNA, 75 bp, Homo sapiens
gaacttggttccccctccctcagcttccgccccaaaagaacctgcacttgttgccaagtcttccatcttactaga

SEQ ID NO: 594255 - DNA, 82 bp, Homo sapiens
agagattcatatgagagttatggacagtcattttgtttactcattcagccctgttgcaggtcccaataaactcttcataagg

SEQ ID NO: 594256 - DNA, 83 bp, Homo sapiens
ctgtgcagccgcgaggaggcgcgggaggtgttcgagaacgaccccgagacgcttgctgagcgagagcgagaagcggcccttcg

SEQ ID NO: 594257 - DNA, 98 bp, Homo sapiens
tctgatacaaagtcagatactgcaacaggtcagcccttcataaacccagatgggagtccagttgtgtataatcctcctatgactcaacaaccagttag

SEQ ID NO: 594258 - DNA, 75 bp, Homo sapiens
gtgagcatcatggcaaccgttagttgtctgctggttctcagcttgaagaagattctgcagtccttattgatcctt

SEQ ID NO: 594259 - DNA, 83 bp, Homo sapiens
cggagagtgacggagtcggcgagcccccgcggcgacagccatggccatgcagaaaatctttgcccgggaaatcttggactcca

SEQ ID NO: 594260 - DNA, 117 bp, Homo sapiens
gccaactatcggaacacgagcgagattcctctggttctggtgggaacccagggtttccaatacttatctacaggaatcgccatgaccccagctctgagggaggcaacagcaaagggt

SEQ ID NO: 594261 - DNA, 90 bp, Homo sapiens
gaagacaccaagaagagcaaagaaaaggagccagggtggctcttcctcagtgacttttttgaacgaaccattctgtgcaacagccttgtg

SEQ ID NO: 594262 - DNA, 74 bp, Homo sapiens
ggaccacgcatccatccagatgaacgtggccgaggaccgccgggagagcctgcccacctccccaccctggacgc

SEQ ID NO: 594263 - DNA, 90 bp, Homo sapiens
acagccgcttcactgacctaccccctggacctggtcagagcgcggatggccgtaaccccgaaggaaatgcagcggaggaggagaaagaga

SEQ ID NO: 594264 - DNA, 75 bp, Homo sapiens
accatggtgcccactgctgcgcttgccaagcctcatgggccccggtctctctgaagaggctatcatggagctgaa

SEQ ID NO: 594265 - DNA, 76 bp, Homo sapiens
gaacatctcgctgtcggtgaagaagatcgatcctgtcctcggtaccgtgggctttgggtctggcctccacgggtgg

SEQ ID NO: 594266 - DNA, 76 bp, Homo sapiens
caagctgttactttcctatggagcctccagaaatgctgttgatggaatggggagaagatattaaagcagtttcaaa

SEQ ID NO: 594267 - DNA, 100 bp, Homo sapiens
ttccgccggagcccccggcccaagggcgacttctccagccgggcccgcgaagtggttggacaccgaggaacagtaagagattatccagactttagcccat

SEQ ID NO: 594268 - DNA, 101 bp, Homo sapiens
gcgagcgctcgcgagcggctgcgggacgcgaggtttccgggtcaatgagctgaaggagaaaggcaacaaggccctgagcgtgggtaacatcgatgatgcct

SEQ ID NO: 594269 - DNA, 100 bp, Homo sapiens
acttggtgtcttttctacaaactctgtgcctcaacaaccatttctaagtgaccctgaggggcgagctgcgcttcgacatcaggaaggcggggaccctgca

SEQ ID NO: 594270 - DNA, 82 bp, Homo sapiens
gcttggacggcgggaaccggctccggagcgagaacgcgcgtcttgaggaccggcccagctcaggctcctggggcagcggcga

SEQ ID NO: 594271 - DNA, 82 bp, Homo sapiens
cgcgaggcgggcagccggggcgtccagatcagtcgcatcgaatacattcattcaaagaacttcatccaccgggatgtgaagc

SEQ ID NO: 594272 - DNA, 50 bp, Homo sapiens
gccgccctgggccgggccccaccggacgggaaagcaggcaggatgggaga

SEQ ID NO: 594273 - DNA, 118 bp, Homo sapiens
ccgttacggccatcacggcggccgcagtggcgtcctggagccctcctcaggtgggaagtctgaagctcagagagcctgggccaatggtacaggtcacacagcacatcagtggctacat

SEQ ID NO: 594274 - DNA, 50 bp, Homo sapiens
ctgctttgtatccaaatgtagtgcagttctgtggctcctgatggatctga

SEQ ID NO: 594275 - DNA, 90 bp, Homo sapiens
tggcctaattggaaagaatttcaggatcaccggtttctcctgcttcatcactgatagccattgggcgatacagcatgacaatagagactg

SEQ ID NO: 594276 - DNA, 100 bp, Homo sapiens
aggctgaccgcatgatcgacatgggcttcgagggtgacatccgtaccatcttctcctacttcaagggccagctcttccgaggctccagcctgcttttccg

SEQ ID NO: 594277 - DNA, 50 bp, Homo sapiens
cccaggtccccaggacagtgcaggattacctgagctggaattggaagcaa

SEQ ID NO: 594278 - DNA, 100 bp, Homo sapiens
tcactgctctgctgtctcctgcaagaactggctcaagaaatttgcctcgaaaaccaagtattaggggaatattcctacctcttagataaggaaacgccag

SEQ ID NO: 594279 - DNA, 82 bp, Homo sapiens
gtttgcacggagcagcaaacgcagagacaaaagaaacgggccccgactggttcgtgctggccgtgggcagcgccgtctttga

SEQ ID NO: 594280 - DNA, 87 bp, Homo sapiens
gacatgtctgatcccttgctcccatccctgcagcatgaacaagatcctgggaagactctgcctgaagcccttgattattgcactgtt

SEQ ID NO: 594281 - DNA, 75 bp, Homo sapiens
gagtacgtgctgcatgtctacggtaatgctatgggctatgtacgaatgataagatctggtggtcttcattgtagc

SEQ ID NO: 594282 - DNA, 48 bp, Homo sapiens
gactgtggctgggcaccgtttggcggtgtgggctggctggggccatgc

SEQ ID NO: 594283 - DNA, 100 bp, Homo sapiens
cacattcccatgcatgcgttgcctgaagaaatccaaaagagacatcgagctgcttgtttgatccaagcacattatagaggatataaaggaaggcaggtct

SEQ ID NO: 594284 - DNA, 75 bp, Homo sapiens
aaaaattcttcagattggaaaataccacaggatggagactacgagtttgtctacaaggaagtcttcacgaggagc

SEQ ID NO: 594285 - DNA, 82 bp, Homo sapiens
cccaggtgtaagcgcagaaagcaggcgaacccgcggcgcaataacggactgatcctttgaaatactccagccatgactaaaa

SEQ ID NO: 594286 - DNA, 51 bp, Homo sapiens
cttcggcccgggccgctcaggtgcaggggggacacagcgattgccacgcgc

SEQ ID NO: 594287 - DNA, 51 bp, Homo sapiens
cctgattatagattagaagaggtcaagaatatgatgctttggcaaaagtga

SEQ ID NO: 594288 - DNA, 100 bp, Homo sapiens
aaagaaaagtccgaaagagctgttagagatgtttatgattacttccgagctgtcctgcagcgtgatgaaagaagtgaacgagcttttaagctaacccggg

SEQ ID NO: 594289 - DNA, 75 bp, Homo sapiens
tgggtcagtccgccgctcaccccgcggccgcaccttcccgccttctcaggctggagtgtgatggcgccatctcag

SEQ ID NO: 594290 - DNA, 90 bp, Homo sapiens
attcattggaggacactggaagatgggaagaaagaagcagctgccaggaattgaatgatctggcacgggaccctccagcacagtgttcag

SEQ ID NO: 594291 - DNA, 100 bp, Homo sapiens
gctgcagccccaagacagagcgctactcctggcagtgcgtcaatcagagcgtcctgtgcgtatttcactggccttgaatgtggacataagttttgtatgc

SEQ ID NO: 594292 - DNA, 83 bp, Homo sapiens
cgtgaagctgctgctgtccaagggctctgacatcaacatccgagacaacactccatcaagaatgctggaggaagggtgtttgt

SEQ ID NO: 594293 - DNA, 78 bp, Homo sapiens
ggcccgggcctcccgctcctccgtacaggtgaaagtcaatataataggagaagtggttgaccagggaagtaccaattt

SEQ ID NO: 594294 - DNA, 100 bp, Homo sapiens
cgccggggaggcagcgcgggatcccagcctcaggcgtgcgcggacggtgtgcgggatcctaagcacttcaagtcagagaagacaggacggggacagttga

SEQ ID NO: 594295 - DNA, 75 bp, Homo sapiens
tgagcaccgccaccatggggaagggggaccttcgggagaaaaactgggaagcaatggaagcattggcatcaactg

SEQ ID NO: 594296 - DNA, 75 bp, Homo sapiens
ttcatgcactctgtcaagctgagattgtcagaagcttcagttctggtaaaagagaaggtggggactttgtttgct

SEQ ID NO: 594297 - DNA, 100 bp, Homo sapiens
taccagaaggcttatgaggatggctgcaagactgtcgacctaaagcctgactggggcaaggccattggctgtggtattgtagaaagcatactaaactggg

SEQ ID NO: 594298 - DNA, 87 bp, Homo sapiens
cagcgctctcgtcttctgcggctctcggtgccctctccttttcgtttccggaaacatggtcaatgagctgaaggagaaaggcaacaa

SEQ ID NO: 594299 - DNA, 83 bp, Homo sapiens
attcatctttcatgcagtgacatgttgataaaaaatgatgatattgaaatggattccaggcgtgtgcctcgagacaagctggc

SEQ ID NO: 594300 - DNA, 90 bp, Homo sapiens
gtctggacgagaatgaggctaccatgtgccagatgatggtgtgagcatccccggggagtacacttcctttctggctcccatctcttcctc

SEQ ID NO: 594301 - DNA, 98 bp, Homo sapiens
ggaggcatcggaggcggctgcgagagtggcagaggagctggcggagagcggcctgcgggcgatcgggccgagactgtgccctgtccacggtgcctcct

SEQ ID NO: 594302 - DNA, 75 bp, Homo sapiens
tgactttcctccaagagcacattgcctggtaagatgaaaacgttgtgtgacgtgatcctcatggtccaggaaaga

SEQ ID NO: 594303 - DNA, 75 bp, Homo sapiens
tccactggacgctcatcagagggaagatctttttcctcaattgatccttcatggatttaaaaatcaagttggcga

SEQ ID NO: 594304 - DNA, 75 bp, Homo sapiens
aactccatgaagtatgtggagctttacctcgtggctgattatttagagtcgttgctgctcctagcttacctcata

SEQ ID NO: 594305 - DNA, 97 bp, Homo sapiens
catgtggtacgcgaaaaaacaggggcagaagaacaaggaagcggagaggcaagagatcacaaaatttgtccaggatagacatagagctagaagaaac

SEQ ID NO: 594306 - DNA, 82 bp, Homo sapiens
tgaatttccatgtcaacatagtcctgcttcaagcacaaatgccagcctgatatctacttcttctacaattgccaatattcca

SEQ ID NO: 594307 - DNA, 99 bp, Homo sapiens
tgaactctttgctcgttctccagatcctcgatcaccaaaggttcaacagagtttggaaaagatttctaaactggagcaggaaaaagaacattggatgtt

SEQ ID NO: 594308 - DNA, 97 bp, Homo sapiens
cacgtcgccggcctggaggggcgaagaggacgagggggccaaggcttcctccgggaaatggaccaattttgacaagatatagtgctgcagcgtgcct

SEQ ID NO: 594309 - DNA, 109 bp, Homo sapiens
catcgaggatttggcgctgcagaaccagatccgggagcacgtcatctccatcgaggggactttgaacatgtcggggatcgccctcagcagactcgcccaggagaggaaa

SEQ ID NO: 594310 - DNA, 83 bp, Homo sapiens
caaggcccctccggccagggccgggagccgggccggcctagccaggtgcgcgcggagccatggttatcatgtcggagttcagc

SEQ ID NO: 594311 - DNA, 51 bp, Homo sapiens
agacaatatcatgcaagtgtggcaaatggcaattaagttggaatatgcaag

SEQ ID NO: 594312 - DNA, 51 bp, Homo sapiens
cctgcacttagccccgcgcccgaggtcaaaatgcagatcttcgtgaaaacc

SEQ ID NO: 594313 - DNA, 88 bp, Homo sapiens
agtgacggtcatgctgcggcgtccttgaaaagatcttttgaggtcgaggaggtcgagacacccaactccaccccaccccggagggtcc

SEQ ID NO: 594314 - DNA, 100 bp, Homo sapiens
cttgggtccgtcgctgcttcggtgtccctgtcgggcttcccagcagcggcctagcggggcatttgtttacctgagcaatctgctgtatcccgtgcccctg

SEQ ID NO: 594315 - DNA, 100 bp, Homo sapiens
gatgtaacagagcagaggaccagcagatgaatggacaccttgaagcagaggagcagcaggaccagatcttcttggaaacagaattgttctacaaaggtat

SEQ ID NO: 594316 - DNA, 50 bp, Homo sapiens
aacctacaggatgaaagtttcaccagccacagagatcccttttttggagg

SEQ ID NO: 594317 - DNA, 75 bp, Homo sapiens
caatttcccagctgctaaaggaagaggaagcttatgttcctgaggaagaattgaaggcagcagaaatagatgaag

SEQ ID NO: 594318 - DNA, 100 bp, Homo sapiens
caataacccaagcaaaacttcagatgcattgttgtggaattataagctgaacctaactacagatcccaaatttgaatctgtggccagagaggtttgcaaa

SEQ ID NO: 594319 - DNA, 75 bp, Homo sapiens
cttgccctggtcttgctcggccgatgaagtgcagaggtttttttctgtgcaactgcagatagaagacctgactcg

SEQ ID NO: 594320 - DNA, 127 bp, Homo sapiens
ctgtgtctctctctatattcttcatcacactgcttgttctgggtagacaggattttctgccgtctcttggcaaaaatggcaaataatgatgctgttctgaagagactggagcagaagggtgcagagg

SEQ ID NO: 594321 - DNA, 76 bp, Homo sapiens
atgcttgctcaagaacttatggtctagtaacaaatgtggcaattattttggatctatcacctgtcatcataactgg

SEQ ID NO: 594322 - DNA, 83 bp, Homo sapiens
tgaacaaatccgggggcaaggccaaaaagaagtggcagatattgatgggagcactttctggagtcaccctttcaatagtttat

SEQ ID NO: 594323 - DNA, 82 bp, Homo sapiens
ggcaccgacgtcatcatgctgaccaccaatcagatccgtaagctgagcgggctttggacaccatgaactttgatgtgattaa

SEQ ID NO: 594324 - DNA, 100 bp, Homo sapiens
ggaccagatcacaggcggagaccactctaggacgctcttccagctgaagcaggacatggtccggcgaggagagatcatcgacaatgacaccgaggaggag

SEQ ID NO: 594325 - DNA, 86 bp, Homo sapiens
cctggctggaaatcaaagtccaccatgtgcttttgcacatccatcaccttcaggccattcagaggaggaaagagaggggaatatga

SEQ ID NO: 594326 - DNA, 99 bp, Homo sapiens
aaagtcaccgtgaagaccccgaaggaaaaggaggaattcgccgtgcccgagaatagctccgtccagcaggattttcctgttgaactggtcataattgga

SEQ ID NO: 594327 - DNA, 82 bp, Homo sapiens
ccctgtggacatcagcgccatccccgagcagcggtggaagctggtgctcttacagcctgttccaagtgtggcttaatccgtc

SEQ ID NO: 594328 - DNA, 96 bp, Homo sapiens
ggacagaaggttcaagatgtaaagaagactattcagaaaaagatgattgacgctagacggggtttcatcatgttggccacgctggtcttgaattcc

SEQ ID NO: 594329 - DNA, 83 bp, Homo sapiens
cagctgcttcctcaacagtgccctgcaggatttaatcaaagatctcaaatcagagttaagtggaaatatggaagaactgatcc

SEQ ID NO: 594330 - DNA, 100 bp, Homo sapiens
ttgaaaaagctgccctgagacggtgtcccgccgaaagggaaaggcgtaggaggaggagcaggagttcttccagatcgccaagaacatcaaaaaccataaa

SEQ ID NO: 594331 - DNA, 75 bp, Homo sapiens
ggaagatcgtcgccacctggatgctggagatgtggacgagtgctcactagcagaaaaaacctgtgtgaggaaaaa

SEQ ID NO: 594332 - DNA, 75 bp, Homo sapiens
gaatggtgcaggcaggcgctgagaaggacgcgcagtccatctctctcaggtcactcctggaagcaaggcggctct

SEQ ID NO: 594333 - DNA, 75 bp, Homo sapiens
tttgagaaaggaaggaatatatcctgactgattgtcctgctgccgtgaccagccagtctcctgttccatgtaaac

SEQ ID NO: 594334 - DNA, 100 bp, Homo sapiens
gtgtgatgaagattggcacccagctgccgcagcgggaaccgcaagagcttggtggtaggaacgccctccccgaccctctcccggcccctgtcgccattgt

SEQ ID NO: 594335 - DNA, 100 bp, Homo sapiens
ggaggcaccgtcccagccgaccttgaggctgccgccgcgagtctgccatcgtccaaggaggtggcaggtcttgaggaccggcccagctcaggctcctggg

SEQ ID NO: 594336 - DNA, 83 bp, Homo sapiens
tgaatgtgactaccctggttacctcatatgaccgtatccttgatgagcttgacaaagacgatagtacccatgagtctctgtct

SEQ ID NO: 594337 - DNA, 101 bp, Homo sapiens
agtccatcccatgacagaagcagaacggtttcagcctccagtactggggatttgccaaaaggctgagtcatcactagagagtgggaagggcagcagcagca

SEQ ID NO: 594338 - DNA, 75 bp, Homo sapiens
gtggcagctgctgagttctcggtgaagcaaattgtggctactaatttgccccctgaagatcaagatggctctggg

SEQ ID NO: 594339 - DNA, 82 bp, Homo sapiens
atgacgcaggtgcaggtgtctcttctcgccctggcggggaagccggcacagtcttcactaccgtagaagaccttggctccaa

SEQ ID NO: 594340 - DNA, 110 bp, Homo sapiens
agaactcgcaaaagctcagaggtgctcctatatccctccctgtaagagagaaaatcagaagaatttggaaagtgtcatgaattggcaacagtactggaaagatgagattg

SEQ ID NO: 594341 - DNA, 100 bp, Homo sapiens
ccagctctcaggcggagatggaggagtgggttaaattcctcaggagagttgctggcacaccctgtggagctgtgatgcagatccatccgccctagcaaaa

SEQ ID NO: 594342 - DNA, 133 bp, Homo sapiens
cggcgccagcgggaattaaatcgcagaaagtaccaggcactaggtcggcgctgccgggagatcgagcagtgatgggaccagtggaggccgcgcctgaataccgcgtcatcgtggatgccaacaacctgaccgt

SEQ ID NO: 594343 - DNA, 90 bp, Homo sapiens
gttctactccttctacaggtgtgtatggggcaagattcttgccaagagaattaatgtgcgtattgagcacattaagcactctaagagccg

SEQ ID NO: 594344 - DNA, 100 bp, Homo sapiens
aacagagcagtcagcagagcagccacgatgatgattctagcaggttcctgagtcctcgagcgcgggaagaaagactcacagatgaatgcttctcacccgg

SEQ ID NO: 594345 - DNA, 83 bp, Homo sapiens
ggaatcggggcgcttcgccccgggccccccagcatgaagaccccggcggacacagacacgatgaggcgagtggtacgacagag

SEQ ID NO: 594346 - DNA, 50 bp, Homo sapiens
gcctcctgagtagctgggactacagagacgtctcccacaacctgctccgg

SEQ ID NO: 594347 - DNA, 100 bp, Homo sapiens
actgacacttcagatatggaagcagtagatgaatttcacccattcatcgaggcacttcttccacatgtccgtgcaattgcctatacttggttcaacctgc

SEQ ID NO: 594348 - DNA, 90 bp, Homo sapiens
gggcaggagcctggcgaggatgcaccttcccctgccttggaaaggggaaactgactctactctgtgatgccaagacagatgggagtttcc

SEQ ID NO: 594349 - DNA, 75 bp, Homo sapiens
gggcggcacgcacgcggtgcagggtaacatggcggatgcggaaggaattgaatgatctggcacgggaccctccag

SEQ ID NO: 594350 - DNA, 73 bp, Homo sapiens
tcctcctcagcttgcagacggcctattgtgagacttcacctcgtgatcattcttgctctgtcgcccaggctgg

SEQ ID NO: 594351 - DNA, 100 bp, Homo sapiens
aatgatccacagtatccaaaatagccaggacatgaggcagatcagtgacggtgaccaagatggagttttctggaagaaagtggaggaagctgaggttggc

SEQ ID NO: 594352 - DNA, 101 bp, Homo sapiens
cgtctcgaagaaacccatattgtcggaaattatctcattcaaagctagtgcaactttatggagtctgtatacagcggaagcccctttacattgtgacagag

SEQ ID NO: 594353 - DNA, 100 bp, Homo sapiens
taaacatgcaatgaacccaaaaggaaaccagcctggacaccaagtctgtgtcagaaggccacctcaagaggaacatcgtggtgaagaccgtggagatgcg

SEQ ID NO: 594354 - DNA, 125 bp, Homo sapiens
ctgctggccctcatgacagtggtcatggccgtgtgctccctgcctctcacgttgtggacatcggatacccaaggagacgaagctgaagcaggagaaggaggggaaaattaaccggccttccaact

SEQ ID NO: 594355 - DNA, 76 bp, Homo sapiens
caaccaccaaagtgggaaacattgaaatcaagagctccttaataagcatttatagtcagtttttggcagcaataga

SEQ ID NO: 594356 - DNA, 98 bp, Homo sapiens
ggtcgatgaggactcggagcctgagcgggaggtgcgagaatctgaattatccagaacagaaagttgtgactgttggacagttcaaaattggtctgatc

SEQ ID NO: 594357 - DNA, 100 bp, Homo sapiens
cggggcgctgcggtctagcgggcgcggcgggcggcgcgcagagaggtaatgaggagtacctgatcaatctgatagactctccaggacacgtggacttttc

SEQ ID NO: 594358 - DNA, 100 bp, Homo sapiens
tagagaacatccatttgtcttgcaaagtgttggaggacagacattaacagtatttactgagagctcatcagaatgcagtaatagtggccttgtcttcaaa

SEQ ID NO: 594359 - DNA, 100 bp, Homo sapiens
gtctctctgctgcggcgcggggaccgctgtgctctcgggcttgtcaatgaggcagatcagattcaggttcgacgggcagccaatcaatgaaactgacact

SEQ ID NO: 594360 - DNA, 82 bp, Homo sapiens
ctgccgtccttctccactttcgccagcccgtgccgcgagcgcggcctgcaggagtgtcaggggctcatgtcagaggagtgcg

SEQ ID NO: 594361 - DNA, 51 bp, Homo sapiens
ccgatgaagtgcagaggtttttttctggtgttgctctcttgccattcgtgg

SEQ ID NO: 594362 - DNA, 110 bp, Homo sapiens
gcttcgaggacgtcacggccatcattttctgtgtcgcgctcagcggctatgaccaggtgctccacgaagacgaaaccacggaccgtagcctgacgggcaagctggaaccg

SEQ ID NO: 594363 - DNA, 83 bp, Homo sapiens
caagtggccatggggagcctcagcggtctgcgcctggcagcagcgctggccgcgcgccgaacccgagtccggcggcaccgacg

SEQ ID NO: 594364 - DNA, 83 bp, Homo sapiens
gcgatggctgggcccgcgtggatctctaaggagtgtggccatctggggccgtgtggtatttgccactcaggagacatgtccct

SEQ ID NO: 594365 - DNA, 112 bp, Homo sapiens
gtgctggcgctgggggcgctggcgggcgttggcgtaggagataaacctctacttgaaaatggagaaaaaacctaacaaaaaggaggaactgacactagtgaataatgtttta

SEQ ID NO: 594366 - DNA, 75 bp, Homo sapiens
gtcaccgccctgcgcttcaacagctccagcctgcagtgccagaattcctcggttttgggatttgagattgacgcg

SEQ ID NO: 594367 - DNA, 95 bp, Homo sapiens
ggggttcgggtgtctcgtgtgtgaacatcacaggctactgcagcactggggtgtcagttgttggtccgacccagaacgcttcagttctgctctgc

SEQ ID NO: 594368 - DNA, 80 bp, Homo sapiens
ccccgacaaacaccacgagaattccgcagcccacacggtactccaaagattcaggtttactcacgtcatccagcagagaa

SEQ ID NO: 594369 - DNA, 80 bp, Homo sapiens
agctggtgaaggcagacagcgagtggcgacgataaatcccaagttgaccgtcaagtccaacgctcgctgcagacatctag

SEQ ID NO: 594370 - DNA, 102 bp, Homo sapiens
ggagaagctgcatcccagaggagcgcgtccaggagcggacccgacaggccgacggtcgcaaggtcctacggtcaagcatccgggagtttctatgcagcgaag

SEQ ID NO: 594371 - DNA, 51 bp, Homo sapiens
aggaggcgtcttcctttgcatgtcaggtgcgaggaagtggctggagtggag

SEQ ID NO: 594372 - DNA, 97 bp, Homo sapiens
tcgatctgctcttcgtctgcttcttcctcttcagtcaagagttttatggacgaggagccccctacaatgccttgacggggaaggactccactagagg

SEQ ID NO: 594373 - DNA, 100 bp, Homo sapiens
agaagctctaagtacactcgtcttgaatagcctagaagaagtccaaagtgccctttacaacaaagagatggaatgccttagaatgactgatgaagtcgaa

SEQ ID NO: 594374 - DNA, 100 bp, Homo sapiens
gccagcctaatccaaagactgtggaacttttaagtggagtggtggatcagaccaaagatggagttcctggaataactattgctacagatattatctgtgg

SEQ ID NO: 594375 - DNA, 98 bp, Homo sapiens
gctactggaggcggcccgcttcctggaatggcaagcgcagcaacaacagagagcacgtgcaaagcttcgaggcgcaccaggacgaggcagtgagcgtg

SEQ ID NO: 594376 - DNA, 75 bp, Homo sapiens
cagctctgctgagagagtgcaagccgtgggaatgacaatggcttacagaaatcatcctctctaaagtgcattgat

SEQ ID NO: 594377 - DNA, 80 bp, Homo sapiens
acctggagaatgtcatcaagcagcacattcaagaagccctacaggtggcaactactagcccaactgccaatactactggt

SEQ ID NO: 594378 - DNA, 100 bp, Homo sapiens
gtgcttgccaggcctggctccattttccagataacagaaagtaacgtgaaggaattcaggtgactcagacatggaggagagaagacctcatctggatgcc

SEQ ID NO: 594379 - DNA, 90 bp, Homo sapiens
gtcctcctgaccctcacaaagggatcgggatcagtttcattcacggatgtgactgtggactttacccaggaggaatgggaacaactggac

SEQ ID NO: 594380 - DNA, 82 bp, Homo sapiens
gcccagctggcagcccagcgggaggatctggagacagccatggagttctacttagagggtgttaatctttatgtgaaaaatc

SEQ ID NO: 594381 - DNA, 49 bp, Homo sapiens
caggaaccaccagtgacagagtaaatattgcagattttcaagagaatca

SEQ ID NO: 594382 - DNA, 100 bp, Homo sapiens
tagtcatacattcagctgatgcatttgcacctgtggcttatctacgctttttagaattgcacttggaggacaaggatgaccatgaaagctgtggttctaa

SEQ ID NO: 594383 - DNA, 75 bp, Homo sapiens
gaaacaggaggaagaattcccaagccaaagctttccagcctcccgcgacgatgcccctcaacgttagcttcacca

SEQ ID NO: 594384 - DNA, 82 bp, Homo sapiens
tcgagtccctgcgcccgtgcgtccgtctgcgacccgaggcctccgctgcgcggattgtgcagactggtgcttaaaatggaag

SEQ ID NO: 594385 - DNA, 75 bp, Homo sapiens
ctggcagctgccggagacataccagggagacaaggcatgagtacagtaccagaagttatcgttgcacggcactgt

SEQ ID NO: 594386 - DNA, 80 bp, Homo sapiens
cagatcatttactgcacctaaagacaaagagcacgaacttccaggagccggtgcagccgctgacacagcagcaggtggcg

SEQ ID NO: 594387 - DNA, 75 bp, Homo sapiens
caagctggtggtccacgactgtcccgtctggtggctggcacatgtgtatcaatcccaaggaatgatgagagctgc

SEQ ID NO: 594388 - DNA, 100 bp, Homo sapiens
ctcaggaacagggacagcacctcatcccctggatgggggaccacaagatcctcatcgacagagtaaaaacaaccgtcctctccgtacgagccagatctat

SEQ ID NO: 594389 - DNA, 100 bp, Homo sapiens
cgaggagacgctggaggacagcccgcagccagagactgctgctactttgaaacgtacgatagaggccctgatggacagaggagcaatagtgagggacttg

SEQ ID NO: 594390 - DNA, 87 bp, Homo sapiens
atttttcatgctggatacagcttaaagaagatgtgttcagagcaacattgttttgttgacacaagcatttagaagaaagtttgtgat

SEQ ID NO: 594391 - DNA, 50 bp, Homo sapiens
cgtggagtattacaacgacagtaacggtggtgctttctacacagcagaga

SEQ ID NO: 594392 - DNA, 136 bp, Homo sapiens
tcaaagccatctggcacgccttcaccgcactcgaccaggaccacagcggcaaggtctccaagtcccagctcaagaattctatgaggagatcttctctttagcgcacagtttgacatgtcaacaagtgtctccacag

SEQ ID NO: 594393 - DNA, 105 bp, Homo sapiens
taccgccccacgcgcgcgcgctcgcgcaccacgcgccccgcgcggcccgcccggatcgtggcctctcgagagcaagttaccttatcccatatcacacaactggtc

SEQ ID NO: 594394 - DNA, 100 bp, Homo sapiens
ggatgatggagaagcttggtgtccccaagacccacctggagatgaagaagatgatctcagaggtgacaggaggggttcatcatgcctagtggcgtataag

SEQ ID NO: 594395 - DNA, 87 bp, Homo sapiens
gacgggctttaggctggaagcgccttagaggagccatttttccagatggagaacttaatgttctggatgatattttaactgaagtac

SEQ ID NO: 594396 - DNA, 100 bp, Homo sapiens
tgttcgtggacaaggagaacctcaccatgccgggcctcaggttcgacaacatccaggaatgataacaggaattcgaggattatgcaatggtctgggaccg

SEQ ID NO: 594397 - DNA, 82 bp, Homo sapiens
gaaacacctctacctcctgcgaggcctcccgggctccgggaaaactacactggccagatataattggtgattacaactttcc

SEQ ID NO: 594398 - DNA, 75 bp, Homo sapiens
gggaacgtgaattccaaactcaccaaggattcagtgtgtgtgaagaaggtccttgcttccccttcaccttctgcc

SEQ ID NO: 594399 - DNA, 100 bp, Homo sapiens
gctgcttatggcggcgctggagagggggcgctgagctgttggggtaacggaaggccattggaaatggggcggcgtcacagtccaagtgaacagtgccttt

SEQ ID NO: 594400 - DNA, 131 bp, Homo sapiens
cagagccgcgccgcccgcaccacagaccttcgcctcgccccgccggttcctcaccctcggggagcaacatggtaccttccactggaagaatctcaaacagcgctacttactcaggatcagtggcaccagcc

SEQ ID NO: 594401 - DNA, 82 bp, Homo sapiens
aataagctatatactttggttacctatgtacctgttaccactttcaaaaattgaagatctcaaacagacaaatcatggcttg

SEQ ID NO: 594402 - DNA, 75 bp, Homo sapiens
tctgaccctccgccaggcaaaaggaaggtagttgatgtcacttggcgatattcctgcaaacatgaagaggtgatt

SEQ ID NO: 594403 - DNA, 88 bp, Homo sapiens
taaggattccaagtaactcttatttggagcagctgcattggcatggaagaatcctatttcaagctggtttactgctatgctccactgt

SEQ ID NO: 594404 - DNA, 82 bp, Homo sapiens
gtcacacacggtcctaagagctgggcaccaggaagcgaaggctgggaactgtctgggacctttgctcatctgtgtcagcaag

SEQ ID NO: 594405 - DNA, 51 bp, Homo sapiens
catcgcggagccgctgtgtgtgggacaaggaccacatgtgcagtgtcaaaa

SEQ ID NO: 594406 - DNA, 125 bp, Homo sapiens
aacaccaggaaggaactggcacttggagtccagacatctaaaatttgcctctaaagagagcaatcactacacttatggctgggattttgcgcttagtagttcaatggcccccaggcagactacag

SEQ ID NO: 594407 - DNA, 80 bp, Homo sapiens
tgaggtgctatctcggagacacatgaaggtggcattttttggcaggttctaaggcccagcagctactacaaggattgcaa

SEQ ID NO: 594408 - DNA, 75 bp, Homo sapiens
tagcaagcaatgtggcaaaacgaaaaagctcaatgcctcagaaattcattgtactatactggcaattgctggaga

SEQ ID NO: 594409 - DNA, 98 bp, Homo sapiens
agagacacgctgggccgaccccagagaggcgctggacaggtgaccatggaggaagaagatgagtctcgagggaagacagaggagtcgggggaggatcg

SEQ ID NO: 594410 - DNA, 96 bp, Homo sapiens
agcagcagcagcagtggaggaaagctgtgcatactggcctttgtcttctttctcagtgcaaggtgtcatggagaaactccagctgggcccagagat

SEQ ID NO: 594411 - DNA, 100 bp, Homo sapiens
ctcagggggaacaaaagcatctccatgagtgtggctgggtcacgacaaggggaggagccccagccccgcgacgaggaggaagcggagctggagctgctga

SEQ ID NO: 594412 - DNA, 100 bp, Homo sapiens
caagtaccgggattccttgccccagttgatttgataatgggctgcattaaaagtaaagaaaacaaaagtccagccattaaatacagacctgaaaatactc

SEQ ID NO: 594413 - DNA, 75 bp, Homo sapiens
cctgcagcacatcagcgaccgggagaacatagacgcagcccactcacccagtgtacaacattggaccagacaagg

SEQ ID NO: 594414 - DNA, 75 bp, Homo sapiens
gaaactgttgtgcctcttcatattggcgatcctgttgtgcataatcaccagcaacacccgggacaataatacggg

SEQ ID NO: 594415 - DNA, 100 bp, Homo sapiens
ggttgcagcgtggacgccggatgagttgcttttaggcttgctggcccgcggggctgtccaggcacgcgaggcccctcagatattgatgatgttaagaagt

SEQ ID NO: 594416 - DNA, 95 bp, Homo sapiens
ggatcctccgccaggaaggcagggacactcccgagcgcaggctccaaacaggcatgcgaggtgcctttggaaagccccagggcactgtggccagg

SEQ ID NO: 594417 - DNA, 100 bp, Homo sapiens
caagtgaagactttgaacgcactcctcagagtccgactctcccacctgctaaggctgaagtccctgctgtaaaggacatgctggaagctggtattctaga

SEQ ID NO: 594418 - DNA, 74 bp, Homo sapiens
ccgtcccagttcgcaatgagaaagcatgacgacagagatgatggtgtggattattgggccaaaagaggaagagg

SEQ ID NO: 594419 - DNA, 100 bp, Homo sapiens
tcagacagcatatttgagtcatttccttcgtacccacagtgcttcatgagaggtaagaatgattgatgttggctgatattggagtgctcattcacatgaa

SEQ ID NO: 594420 - DNA, 87 bp, Homo sapiens
ccagtgccaaacccccgccagacagcctgatgtgcagtgggcttttgaacacttgcagcaattagaattaataaagcccatggaaag

SEQ ID NO: 594421 - DNA, 88 bp, Homo sapiens
ccttgtccaggcgggcctcccgtttctggctccgggctgagcttcctggagaagaggaagctatcatggtgaacttacttcagattgt

SEQ ID NO: 594422 - DNA, 75 bp, Homo sapiens
tcgcagcctcgggagctgcggccgccgcggcattcggggaatctgcagggcagatcctggctgcagctctgaccg

SEQ ID NO: 594423 - DNA, 116 bp, Homo sapiens
gaattcgaatcaccctaacaagccgcaacgtaaaatccttggaaaagggtgtaatcctgagagattcacatggtgttgcacaagtacgttttgtgacaggcaataaaattttaaga

SEQ ID NO: 594424 - DNA, 83 bp, Homo sapiens
gctgtttggtcactctcatcttgcaaaccagcttctcggacaaactatttagtggaaaaggcttacattttcagccatcagtt

SEQ ID NO: 594425 - DNA, 80 bp, Homo sapiens
ctgtgaggcccgccgctcgcatgagcacctcatacggctgcttctggagaaggtgggcttggtgcttgcatttcctgcgt

SEQ ID NO: 594426 - DNA, 100 bp, Homo sapiens
ggctattgagcatgcagattttgcaggtgtggaacgcctagctcttgtcacaggtggaacgtgtgatcaccattatgcagaatccacgccagtacaagat

SEQ ID NO: 594427 - DNA, 132 bp, Homo sapiens
tcgaccccaagccatgcacaccccgggggatgcagccggagagaacacggccgaaggaaggatggacgctgcaggagctgaagatggcgagctccgtggcgccctacgagcagctggtgaggcaggtggagg

SEQ ID NO: 594428 - DNA, 75 bp, Homo sapiens
ggcctcggccaccgagatcctgctgacgccggctagggtgggccttaatgtcctggttcagaaagccaacaagtt

SEQ ID NO: 594429 - DNA, 82 bp, Homo sapiens
aagcatttacaataagaagagaagatggacagtttcagtgcattacagaatgtttcatccatttgtggaccaaaagatggag

SEQ ID NO: 594430 - DNA, 82 bp, Homo sapiens
ccacctcccgggacgctgcccacggcgtccccggtcgcgacatgtcatgctgcccaaggacatagccaagctggtccctaaa

SEQ ID NO: 594431 - DNA, 102 bp, Homo sapiens
gactttgtctctgatgagctgagaaacaaagccacccagccaatgaaggagtctactcttcatcttgtgttgagacttcgtggtggtgctaagaaaaggaag

SEQ ID NO: 594432 - DNA, 100 bp, Homo sapiens
acgcccccgggacatgcatcgtcccctggactctctcaagcaggagtagggctgattggagccattgtacagtgtcgggaacataccaggacactgagaa

SEQ ID NO: 594433 - DNA, 75 bp, Homo sapiens
cagaacctgctgcagcagaagaggtataccaagcttggctacgcaggcaacactgagccccagttcattattcct

SEQ ID NO: 594434 - DNA, 90 bp, Homo sapiens
aaaggaaatgcatctttatgtcagaaacacaaagcagcccaaccaaagggctcccagtaccagccttgcaagagaacttttcttcactgt

SEQ ID NO: 594435 - DNA, 83 bp, Homo sapiens
cttctttgagaaccacccatatttcagaatttgaggttaacatcgtggtgctgcttcaccctgaccacctcatcacggagaac

SEQ ID NO: 594436 - DNA, 74 bp, Homo sapiens
tcgactgcgagggcctgagacggctgcttggcaaggaaacattggcaaatttggagcgacagatctatgctttt

SEQ ID NO: 594437 - DNA, 100 bp, Homo sapiens
gcagccaacaaggtctttgtaagttttactctggacaccggtcccctcacatcccgtataagttgctgcacctggtgtggacccacgcgaggcacctagc

SEQ ID NO: 594438 - DNA, 97 bp, Homo sapiens
aactggataacactaagtttagatctcatgagcacacagcaagaaggaggccatcagcaaactgggaagaggaccctcaccaggaaccacatctgcc

SEQ ID NO: 594439 - DNA, 98 bp, Homo sapiens
cgacgcagccacctgctttgtggacgctggcaacgcattcaagaaagccgacccccaaggtacggacattgctgcaggagaagaggttgccatcaagc

SEQ ID NO: 594440 - DNA, 100 bp, Homo sapiens
cttaaggaaataggggatcaaaagttgcttttagacctcttcaggtagctcatactaaaatccaggccttggaatcaaacctggaaaatcttttgacgag

SEQ ID NO: 594441 - DNA, 74 bp, Homo sapiens
ccgtgccccgaggccagacggccggctctgtgagcgccaagaccggctgaagatctctgttgaggagctggcgc

SEQ ID NO: 594442 - DNA, 101 bp, Homo sapiens
agcagccaggagtcatgagcgacagcggcgagcagaactacggcgagcgggcccagcagcaaagaaacctggataacatcgtcttgcaacaacccagaata

SEQ ID NO: 594443 - DNA, 96 bp, Homo sapiens
gtgcatgggccccatctggtccagttactatggaaactgccgttctctcctggtacaggtgaacaaaggcagagtaaactgtcaccccagatgcag

SEQ ID NO: 594444 - DNA, 87 bp, Homo sapiens
tccgtgtatatattgcatcttcctctggctctacagcgtgtggaaattggtgaaagtgtacgtggagaggatgtctacattgttcag

SEQ ID NO: 594445 - DNA, 87 bp, Homo sapiens
agcagccagcagaggtcagagagagacagctcacgttccggatgatgtgcgaggtgatgccgaccatcagcgaagcagaaggccccc

SEQ ID NO: 594446 - DNA, 82 bp, Homo sapiens
cagaagttgaagcagcagcttatgcagtcttctcattcacaggttaaggctacctttccagataatccaacagctaaatcac

SEQ ID NO: 594447 - DNA, 97 bp, Homo sapiens
cttgatccccggccgcggggccaggaagtcggagtttgagccccggaggcagagcggctgccatgatttggatcatacagcagatgtccagtgagta

SEQ ID NO: 594448 - DNA, 117 bp, Homo sapiens
gggaaaatggcggacgggaaggcgggagacgagaagcctgaaaagtcgcagcgagctggagccgccggagagcgtttcccaaagtgtattctgcggaactagcacctactgtgttct

SEQ ID NO: 594449 - DNA, 83 bp, Homo sapiens
ctggcgcgatgcgtcaagtacactgaaattcatcctgagatgaggaccaagaatcgccttcagccctgtctggtgcatccttg

SEQ ID NO: 594450 - DNA, 94 bp, Homo sapiens
cctcggcgccccgccaagggcgcagattctttctgtacgggcgtgatggtgggcatgggtcagaaggattcctatgtgggcgacgaggcccaga

SEQ ID NO: 594451 - DNA, 90 bp, Homo sapiens
aggtgatgatggacatcggctccacccggatcttgcaggagagagagttactgcctgtgaagaaatttgaaagtgagattctggaagcaa

SEQ ID NO: 594452 - DNA, 90 bp, Homo sapiens
tccctgcaactaactccattcttaattgggcgaacctttcctacacacccatacttctctgcccagcttggagcaggacagctatcgctt

SEQ ID NO: 594453 - DNA, 95 bp, Homo sapiens
atctaactcgaaggcgcctgaaaagatcaaattctatatcccagataccttccggagtgctggtttgccacaaaactccatcgtaactgaaagag

SEQ ID NO: 594454 - DNA, 75 bp, Homo sapiens
gcaaccgagggaaccgaggcagcggaggtggtggtggaggtggccattaagcagatgaatcttcagcagcagccc

SEQ ID NO: 594455 - DNA, 98 bp, Homo sapiens
cgcagccccgggcacggcggaggcagcggagccctgggccatcggttattcagcgatagttatgacctcccggttacgtgcgttgggtggaagaatta

SEQ ID NO: 594456 - DNA, 101 bp, Homo sapiens
ctggaggaagagatagaggaacatgcttttgacgacaataaatcaagccgagactgtctgaagctgggcccacctgctgagggagaagtcgtccaagtcaa

SEQ ID NO: 594457 - DNA, 90 bp, Homo sapiens
atgggaacaggagcaggcgcctacatcctaactcgatttgctgctctctaggaaacaccagaattatcagtgaagaatatattaaatggc

SEQ ID NO: 594458 - DNA, 82 bp, Homo sapiens
gagcctcaggcggcagcgcttctaggtgttgacttcaaaatcaaaactgtagagctaagaggaaagaaaattagattacaga

SEQ ID NO: 594459 - DNA, 90 bp, Homo sapiens
gtcaaaatagcggaagaaaatggagctgcatttgcaggaggcactagtctgatacagaaggatgtaattaaaaccattgtgcagagtggt

SEQ ID NO: 594460 - DNA, 101 bp, Homo sapiens
gggaatttccttgtgcctccattcccgggaggggggagcggcgttggaggccaccgtttccaggtactaggttttgacaagcttgcatcatgcgtgagtat

SEQ ID NO: 594461 - DNA, 50 bp, Homo sapiens
ctcaagtcgacaggggatgggaccctagattgacttgatgcaaaacatca

SEQ ID NO: 594462 - DNA, 50 bp, Homo sapiens
gacgtcaacctgtcccacagcgaaaggccctgccctgggagaagccctgc

SEQ ID NO: 594463 - DNA, 98 bp, Homo sapiens
tcttcgtagacattgtctcccaagacaacttcctcaccagcaccttacaggtttcattgtttgcggaacttttcaacgaaatgcttcaaagagatttt

SEQ ID NO: 594464 - DNA, 51 bp, Homo sapiens
cagcccttcagaaacagtattacaagtggggagcattaagcgggaaatgac

SEQ ID NO: 594465 - DNA, 74 bp, Homo sapiens
agcagttctgacattttgccttctgattctaactgcaaaggactgcatcaaaacatgtaaacaaggacctcggt

SEQ ID NO: 594466 - DNA, 82 bp, Homo sapiens
gagggagtgatgtcttccagactcggtgctgtacccgccttggatgaaaaatctgacaaacagtatgctgaaaattatacaa

SEQ ID NO: 594467 - DNA, 111 bp, Homo sapiens
gaaaagtgacgtggaggatcactcggtgcacctgcttttttctgcaaatcgctgggaacaagtctactctgacctacgacactctccggtttgctgagtttgaagattttc

SEQ ID NO: 594468 - DNA, 74 bp, Homo sapiens
cgggcatggtggtctggggcaacgcggaagggggggccctcagcctcttggccttgaacgggctgttcatcttg

SEQ ID NO: 594469 - DNA, 74 bp, Homo sapiens
ctccatgttgaacatgcctggccctcaggtgctggagaatctggtaaaagcaccattgtgaagcagatgaggat

SEQ ID NO: 594470 - DNA, 100 bp, Homo sapiens
ttgaccacaaacctcgggacggctttcatctggtcaagtggcttcgtcctgttcatcgccaactaggggaagcgaatgaggagtttgcactccgtgtaca

SEQ ID NO: 594471 - DNA, 74 bp, Homo sapiens
tcagttggaagcagccgatccagcctgcggagcctgtggggcaggtacaatgactcttcttgcttttcacctaa

SEQ ID NO: 594472 - DNA, 74 bp, Homo sapiens
tcagtttcctgcttactgcttcattatggattatacagaacatcgatatattgaactcttcttgaattctactc

SEQ ID NO: 594473 - DNA, 90 bp, Homo sapiens
cctggagcggccgccttccagcgtgctgcagcagagaacatgttaggcagtttgctgtgcctcccaggttcagggtcagtgcttcttgac

SEQ ID NO: 594474 - DNA, 83 bp, Homo sapiens
agagaacactggatagacttcgaacatttaaacagcctttgcaaaatgttagcacagtgctgcagaagcctaatcctctctat

SEQ ID NO: 594475 - DNA, 82 bp, Homo sapiens
ctgtaacttacgtgtactttaccaacgagctgaagcaggtggtttgtcctgattgtagtgatgagattgctgtaaaaaagga

SEQ ID NO: 594476 - DNA, 101 bp, Homo sapiens
caggaatcccaatttgcctccacttagtgagcggaagaatggtgaccaagaatatggcccaggtgaccaaagccctggacaaggccctgagcaccatggac

SEQ ID NO: 594477 - DNA, 80 bp, Homo sapiens
ttcccaaaaacctcctcgaaatgacctttgagtctactgttagcagacttggccgatggattgactttgacaatgactat

SEQ ID NO: 594478 - DNA, 74 bp, Homo sapiens
tttttgcctcctggagggtcgtgctggaaggttccgccacacttcaccactggcagcagttggcccaacctcac

SEQ ID NO: 594479 - DNA, 100 bp, Homo sapiens
gtcttccaagaacagaagaaaatgatccaggcccagcccacaggtgctgagaacaagagaaatcaagtgaaggaaggaggcggagtttccaagacttggg

SEQ ID NO: 594480 - DNA, 100 bp, Homo sapiens
gattaccttattggatgaagaaaggaaggaacctgggatggttgtgagggaagggacaagaagatactgccctgcctcccgagcacaacaaggagaggtg

SEQ ID NO: 594481 - DNA, 100 bp, Homo sapiens
ggagtcacacttggagcagaaggcataattagtgaatttacacctttgccaagcaattttccagattattcaaagtatcaggatgggcatgtgaagtgac

SEQ ID NO: 594482 - DNA, 83 bp, Homo sapiens
caagaaggccctggacacagcaatatctctgggctttcacaggagagaaggaggacgaggacgaggatgtgaagaagagaagg

SEQ ID NO: 594483 - DNA, 90 bp, Homo sapiens
cgaggtgctctgtggccgcgagtgcatcttccacgaggaagacaatgtgtggcaccctggactacctgcccccagagatgattgaggggc

SEQ ID NO: 594484 - DNA, 83 bp, Homo sapiens
ataaagacaaggaagaagaacaccaaagtggttttttctctgctttaacaaatatgaattctccaaaacaccagtggggagaa

SEQ ID NO: 594485 - DNA, 103 bp, Homo sapiens
ggcggcggatcccggagagccccggagtgagcggagtagcgagtcggcaacccggagggcgccaatgcttcggcattagagaaagagattggtccagaacagt

SEQ ID NO: 594486 - DNA, 100 bp, Homo sapiens
gccgacggcaaaggtgtcgtggtggtcattaagcggagatccgaaagcggcgtggagcttttaacagcaagcaacttctgtatttggagaagtatcgtcc

SEQ ID NO: 594487 - DNA, 100 bp, Homo sapiens
agcctaactgaaaggaagagggagcagagcaagaaaaaaaggaagacgatgacttcagatcttcttcagcagtatcgttctgctgtgtgcaaactagaca

SEQ ID NO: 594488 - DNA, 75 bp, Homo sapiens
aagaaattggcttctgcctctgcaaagctaaaggtttcccaacagtgatgtcacaagattgaccacattgatcac

SEQ ID NO: 594489 - DNA, 90 bp, Homo sapiens
cgagactggaggctgagtgctaaactgtgtggggcgcggatgggatccagctgttagtcgggagaagatggtataaactggtccatcagt

SEQ ID NO: 594490 - DNA, 75 bp, Homo sapiens
cttggcctcttcagcaactacagcaccgggacaggggaggcctcctcaggatccacagatgcccagtctcccaag

SEQ ID NO: 594491 - DNA, 100 bp, Homo sapiens
ggaaggtgttccgctcccagtgcctgcaggtgccagagagagaggcgcaggacgctcaggtgctgttggcagcagcggtctgcacaaaagcaggaaaggc

SEQ ID NO: 594492 - DNA, 98 bp, Homo sapiens
ctttgggagccatcgttctgctgcccacacttctccaggatttgctttcattagggaacacaacttccagcagccacaagggatgctgctactcaggt

SEQ ID NO: 594493 - DNA, 75 bp, Homo sapiens
aagacaatatcatgcaagtgtggcaaatggattggattcagcatcaaaatacatctactcatattgagagctgtc

SEQ ID NO: 594494 - DNA, 82 bp, Homo sapiens
cggcgcccggcgagggcgcgcggctggtgtccgccccgcccgaaagatgctgtgggccctgagggaaaggatcacagaggcg

SEQ ID NO: 594495 - DNA, 90 bp, Homo sapiens
aacgactgtaatcaggttgtcaaaccgcaggcatttcaatcacattatgtgtttacaggcattggagtttttacatgctaatcaagtgat

SEQ ID NO: 594496 - DNA, 98 bp, Homo sapiens
ctcgctccgtggccttagctgtgctcgcgctactctctctttctggcctggaggctatccagcgtcatccatgcctggcttattatatcatctctatt

SEQ ID NO: 594497 - DNA, 98 bp, Homo sapiens
agctggctgcggagaacaggctcacggagatggagacgctgcagtctcaggtaaaggcgacacaggaggagaaccgggagctgaggagcaggtgtgag

SEQ ID NO: 594498 - DNA, 101 bp, Homo sapiens
ccctacgagatcaccacagaccctttggggccatttggatcacacgatgttttttcaagattttagaccctttctaagtagcagtccactggaccaagata

SEQ ID NO: 594499 - DNA, 100 bp, Homo sapiens
cagctatcctgcgctacagtgagggtttggagaagctgaaggacatgaaagtgctgtacaccaaccgagcccaggaggttgtggctcactggattgctga

SEQ ID NO: 594500 - DNA, 75 bp, Homo sapiens
aaacagttttgcctcagcccttcgtgtttctaagcatgaattgaggaacagaagaagcagagcagatgatcggag

SEQ ID NO: 594501 - DNA, 98 bp, Homo sapiens
gcagctgcattttcagaagattgtgattcagcctctactaaagttgtcatccgtggagcaggaaaccaggcatgttatttgaaagcaattgagacgca

SEQ ID NO: 594502 - DNA, 101 bp, Homo sapiens
cagatctccgctcgagaatctgaaggtgccctggtcctggaggagttccgtcccagcccgcggtctcccgggcacttcaggcaaccggggcctccaggggg

SEQ ID NO: 594503 - DNA, 50 bp, Homo sapiens
gaaggattccgggagcacagttccgccgaagtgttttctgcctacattaa

SEQ ID NO: 594504 - DNA, 101 bp, Homo sapiens
ggaacgagggccgatgagagtcaggagccccagagccaagtgcgagcccagcgggagaaaatcaaggagggaggagtgagatgtggatgttgcttttgcac

SEQ ID NO: 594505 - DNA, 95 bp, Homo sapiens
cggagctgcagtcggcactgctactgcgaagacagctggcaggagccttcacgtaaatgggtccagtcatgcctcccagtaagaagccagaaagc

SEQ ID NO: 594506 - DNA, 98 bp, Homo sapiens
ggtgctgtggtgcagagctagttcctctccagctcagccgcgtagctatgctaagaaggaatctgatcttaatggcgcccagatcaagcttcgagaat

SEQ ID NO: 594507 - DNA, 51 bp, Homo sapiens
cttcccctttccagagagccagaaagaaggaccattgcaatttagagatgt

SEQ ID NO: 594508 - DNA, 120 bp, Homo sapiens
cccagaccctggagcctcagttggaagcagccgatccagcctgcggagcctgtggggcagggactttgaatccaaagcaaaccatcttggtgattctggtgggactcctgtgaagacccg

SEQ ID NO: 594509 - DNA, 101 bp, Homo sapiens
gttcatgtgggccctgaaaaacggagacttggatgaggtgaaagactatgtggccaagcttggatttacactgggcaacgtggttggaatgtatctggctc

SEQ ID NO: 594510 - DNA, 90 bp, Homo sapiens
cgggatcgtgaccgagaccgtgaccgagagcgtgaccgagagcgcgaatatcgtcatcgttagaaggcatgttatttgaaagcaattgag

SEQ ID NO: 594511 - DNA, 100 bp, Homo sapiens
cagaggtggaggcgctttgaaagcttcaggatgagttagagaaaggtgaacgggacaatgcagaactgcaggagtttgccaacgccattcttcagcagat

SEQ ID NO: 594512 - DNA, 82 bp, Homo sapiens
accatctgtgacgtcctgcaggaacccgaacagttccccctggtgcagggagtggccataacaatgcagatcttcgtgaaga

SEQ ID NO: 594513 - DNA, 100 bp, Homo sapiens
ctcgtgccgctgagcctggcgcagatcgtctccctttatggcaagattgtcatgagttatggagtaaaaagcgaagaagacagaagcagatgggcatgac

SEQ ID NO: 594514 - DNA, 100 bp, Homo sapiens
ctgtcgagtcccgactactacgagaggctgggccaactccagcacgggctgcgggacaggtgctggagaatctggtaaaagcaccattgtgaagcagatg

SEQ ID NO: 594515 - DNA, 75 bp, Homo sapiens
gtcggatgttgtgttgcccgccaccatgagctacacagtggatctccagcttgtagctgcatcagcccctcctcc

SEQ ID NO: 594516 - DNA, 83 bp, Homo sapiens
ttctgctcggcgtgcgcccggaaggcgtcgtcttctcttaaaatttttccaagagataacttcaccaagatgtccagtgatag

SEQ ID NO: 594517 - DNA, 80 bp, Homo sapiens
aggccaccaacttccctctgcggccgtttgtcattcccttcctgaagttatgcaaagggtgacctggacatatcttacat

SEQ ID NO: 594518 - DNA, 80 bp, Homo sapiens
ccgggcgcccgaggcttcccggtgcgctccgccagatgccatggacaatattaccaggcagaaccaattctacgataccc

SEQ ID NO: 594519 - DNA, 98 bp, Homo sapiens
ttgcagtaacagctgtggtgtcctctacaccatctgtggtcatgtcaacagtagcacaagtttctctgcaggtggatattgttcccagccagggggag

SEQ ID NO: 594520 - DNA, 50 bp, Homo sapiens
ctcttctcgccctggcggggaagttactaaaagatgtaactgaactgcag

SEQ ID NO: 594521 - DNA, 75 bp, Homo sapiens
atcttttcaatgctgcgaaagctgccaaaagtgacatgcaggtgcaaagttccccatcaagtggacggcccccga

SEQ ID NO: 594522 - DNA, 74 bp, Homo sapiens
ccctgtttgagaaaaggcctaagaattttggcattggttttggcacaaataccagtgggaatagtatttttgga

SEQ ID NO: 594523 - DNA, 87 bp, Homo sapiens
atagcctggatgaattgcatattctggacatgatagagcagtgttccttgcctgtatctccccttggttcaatagctaccagatttt

SEQ ID NO: 594524 - DNA, 101 bp, Homo sapiens
cggcgacggaccagcgacccaagcgccgcggttaaccacgtctcgtccacgacctccctaggatcccatggtccattattgcctttaccaagtcgttacag

SEQ ID NO: 594525 - DNA, 104 bp, Homo sapiens
cccaggcctgcgtccgagtctccgccgctgcgggcccgctccgacgcggaaggattttttatcaagcagaaatgcatcgaacaacgagaatcaagatcactgag

SEQ ID NO: 594526 - DNA, 75 bp, Homo sapiens
ggctctcagacccgcagtgaggtctgacgtcatttcctgccagctgaagccatttattggtatcttggatggtta

SEQ ID NO: 594527 - DNA, 98 bp, Homo sapiens
aaaggatcttccttattactctggacaacagatatgggccctcacattttccaaacctgtccatctgctaactattttgactgcagagccatgtccat

SEQ ID NO: 594528 - DNA, 83 bp, Homo sapiens
ggaagatggcggcgccgctcatccccctctcccagcagcaaacggggattcagcgtccgatcctttggaacagggactcacgt

SEQ ID NO: 594529 - DNA, 117 bp, Homo sapiens
caggacctggcctgaagacatttcctctcctcccctctggatttctcagaggtcaactttgtagtgtgccaactctttgccttgctagcagccatttggtttcgaacttatctacat

SEQ ID NO: 594530 - DNA, 51 bp, Homo sapiens
ttctgcctcctcatagagcaagctctgagacccaagaagccaccgcctcca

SEQ ID NO: 594531 - DNA, 100 bp, Homo sapiens
tgggagtctccgcgtcccgctcgctgggagagaggtacctctccttttccctctccctttccctaaggtgctgcagggtgcacagctgatcgccgtggcc

SEQ ID NO: 594532 - DNA, 100 bp, Homo sapiens
cgagatgccgggggagcggggccttccacaccccctccgtgggtgtgtggaccatggccaacctggagcgcaccttcatcgccatcaagccggacggcgt

SEQ ID NO: 594533 - DNA, 122 bp, Homo sapiens
ctgaggagcgggatctaacccaggagcagacagagaagctgctgcagtttcagccgtgcttcctcaaagactgggaaatgcacgtccacttcaaagtccacggcacagggaagaagaacctc

SEQ ID NO: 594534 - DNA, 74 bp, Homo sapiens
ggatcccgagcgcggggaggcagaccggacttgatcatcttccctgacgactgtgagttcaagcgggtgccgca

SEQ ID NO: 594535 - DNA, 74 bp, Homo sapiens
cggcggattagccttcgcggggcaaaatgatgcttgctctgtcaaggcacagcctattgtctcctttgctcagt

SEQ ID NO: 594536 - DNA, 82 bp, Homo sapiens
atcttcaatgagtaaacatattcctggttggggtgctggaggactgcttcaccttcctgggcatcttcctggccatcatcct

SEQ ID NO: 594537 - DNA, 75 bp, Homo sapiens
ccgatgctggtccgatggttgtgcactgcaggctccactttgaggctctgatgaacattccagtgctggtgttgg

SEQ ID NO: 594538 - DNA, 89 bp, Homo sapiens
agaaagcaggcgaacccgcggcgcaataacggaccgcagctgaatgcacagctagaaggttggctttcacaagtacagtctacaaaaag

SEQ ID NO: 594539 - DNA, 90 bp, Homo sapiens
catggagcacaaacgcatcaatgggcccttcctcatcatcgtgcctctctcgtgtgtccagcatcatggcctcctcccagtaacttcagg

SEQ ID NO: 594540 - DNA, 100 bp, Homo sapiens
gggggaatggtattggagacaaatatgaatgagattgttacacaaattgatgcacaaaataagctggaaaaatctgagaaagtctttatctcttgcaagg

SEQ ID NO: 594541 - DNA, 50 bp, Homo sapiens
ggctcccgatggcgggagctccaggaaagttttgagtatccgaggagccc

SEQ ID NO: 594542 - DNA, 74 bp, Homo sapiens
agaaagaatagctagagaagaacatgggtctgggaaaatcgctgtgatatcagtccaggcaactcctagtagta

SEQ ID NO: 594543 - DNA, 75 bp, Homo sapiens
gttaaggattccaagtaactcttatttggttgcccgaagctcagcagagagtcggaggctgctttttaaacctga

SEQ ID NO: 594544 - DNA, 87 bp, Homo sapiens
aattacagcggcgggggcagtgcgcgcttcgggacgcaattggaaacgcatcctgtcggctcacaagataatagccagctccccaga

SEQ ID NO: 594545 - DNA, 75 bp, Homo sapiens
cgcagtggcctccaaggtgcagacagctgtgactatgaaggggtcacctggaacctctatgactccaagtagtgg

SEQ ID NO: 594546 - DNA, 100 bp, Homo sapiens
gctctgatgacggcactgttagaatctgggactttcttcgttgccatgaggaaagaattctccgaggatgcccaggctgaggaagagatcaagcaagaga

SEQ ID NO: 594547 - DNA, 101 bp, Homo sapiens
cattggaacagcgaatagatattcgtgatgcagaagatggggaagaatatgatgacccttttgctgggcctccagacactatttcattagcctcagaacga

SEQ ID NO: 594548 - DNA, 80 bp, Homo sapiens
acaatggctttggtccccagcgcagtgaagtggtgagcctttttgtcactggacttcctcgttctgcccatcttcctaac

SEQ ID NO: 594549 - DNA, 90 bp, Homo sapiens
cataaaacagttctcactgaactacaggttgtggcagcactgcctgaaggtatgagaccagattctaatctttatggttttccatgggaa

SEQ ID NO: 594550 - DNA, 82 bp, Homo sapiens
cttcggtctcctggggtcggcgccgagtgggaggatggcggaaggtgaggtggctttgaccccgggttgcccggccagcacg

SEQ ID NO: 594551 - DNA, 83 bp, Homo sapiens
ccaagaatgcgctttgcgctctcaacgtggtctacatggttggtgacatcgtgaaagtcacaaggatgaatataaatggccag

SEQ ID NO: 594552 - DNA, 75 bp, Homo sapiens
ggaatcagcttctctcattttctttccctgcaccaactagcagtgagaaagatcagtctaaagaaaaggagaaga

SEQ ID NO: 594553 - DNA, 100 bp, Homo sapiens
gtgattgctcttgaaggagatattgtcagctttttgcctgaattcatcaatggagactttgattctattaggcctgaagtcagagaatactatgctacta

SEQ ID NO: 594554 - DNA, 98 bp, Homo sapiens
tcgttttgtgcagcttcagcacaatgacattgacaaacggcccgctgaatatggactccaacggtgccctaggggatggtggagccaccagatggaag

SEQ ID NO: 594555 - DNA, 100 bp, Homo sapiens
aaagaatgtcagtgattgttcgcactccatctggaaagttacgactctactgcaaaggagctgtcttgagagctgatgacaataacatgggcaatggctg

SEQ ID NO: 594556 - DNA, 100 bp, Homo sapiens
tcatacctcagtgaaaaaatttcactggaccgttccattccggattatcgtcccaccaagtgctagtgtatgagttgttgttgggaaagggctttcgagg

SEQ ID NO: 594557 - DNA, 88 bp, Homo sapiens
tcggtggactccttcggcagtccacccaccgccgccgcctcccagggccgagaactactggtggcgtggccagaacacacggacgctg

SEQ ID NO: 594558 - DNA, 131 bp, Homo sapiens
acagtattacctccagaaactgtggttccaccattcactgtcttctcaggctgcccaggcttggagaaccccctgcctgagcgtccccgggaaaaagaagaaccagtggttcgagagacaggtgaggtggt

SEQ ID NO: 594559 - DNA, 76 bp, Homo sapiens
atccatctcgtctgctccaggggcaggctgggaggtggggaagacagggctccagctaccacaggacgggctctgg

SEQ ID NO: 594560 - DNA, 50 bp, Homo sapiens
ttttgccagcgggagcacttcatcaggcagcacacttctgcttttgttcc

SEQ ID NO: 594561 - DNA, 119 bp, Homo sapiens
aaagaattcagaaggaacttgcagaaatcacattggaccctcctcccaactgtaggtttgaaggtccgcgaagtgttcatcaatgttactaggcaacaggtggaggacttccatgggcc

SEQ ID NO: 594562 - DNA, 75 bp, Homo sapiens
gaagaagatgcagcagaacatccaggatggtcgtgtgttcatttggacctgtgatgatgcctcaagcaatacgtg

SEQ ID NO: 594563 - DNA, 90 bp, Homo sapiens
gtcccactaaaggatcaacgtaacgtgagcatgaggttttccaatcaggttgatgctcgaagtgaccgaactggggaggtcatctttaag

SEQ ID NO: 594564 - DNA, 82 bp, Homo sapiens
aggatctgggtaaaagtagagaaggatcaaggacggatgatgaagtagtacagaggaaatctgagaatgaagatgacagcga

SEQ ID NO: 594565 - DNA, 74 bp, Homo sapiens
cacttttcaccaaggaactggtgctgcagcgagagggtatgtccagaaatcttgatgcatgtatctgaaaagaa

SEQ ID NO: 594566 - DNA, 98 bp, Homo sapiens
atgggttttagctgccgccggagtcgaggttcaaaccttgtactactcagctgatcacaagctgcttgatgggaacctactagatggacaggctgagg

SEQ ID NO: 594567 - DNA, 82 bp, Homo sapiens
atgcaaccaacgcagccttgcaaacggtcataatggaccgaatatccacagaacatgacccagtcctgaaacagatagaccc

SEQ ID NO: 594568 - DNA, 51 bp, Homo sapiens
tcacagagttagagagagggatggtggcaccatactggacataccttttat

SEQ ID NO: 594569 - DNA, 100 bp, Homo sapiens
gccgcggctggtgggcgctgctggcgctgcagctgcacttgctccgggcgctggcgcaagaaccgcatgcacgagtctctcatgctcttcgactccatct

SEQ ID NO: 594570 - DNA, 100 bp, Homo sapiens
tggtggatgaagaggccatggagaaggttctgcggggagtgtctccagccctgcctgcaggtgccatccccgctgtgcccactctgccgcctgcccttcg

SEQ ID NO: 594571 - DNA, 100 bp, Homo sapiens
aaagtttgtcagatatccagattgtacaggttgcttgtggttactatcattcacttgcactttctaaagctacaagagactgtgaaaaggaagttggaag

SEQ ID NO: 594572 - DNA, 87 bp, Homo sapiens
gcacctttcggcttctgagacggcggcagcagcggcattcaggtatcatgatattagctggtttgacatcaagtcatttgtgagtca

SEQ ID NO: 594573 - DNA, 82 bp, Homo sapiens
cctgccgtggctgctcaacaaggagctgggctgcatcaactcgatcagtcgcatcgaatacattcattcaaagaacttcatc

SEQ ID NO: 594574 - DNA, 91 bp, Homo sapiens
aggccgtctcgctctgggtctccaggcccgcgaccgtccgccagtcgtcccgagcttccacagcgcggcacctgtacctccggggtggcgc

SEQ ID NO: 594575 - DNA, 75 bp, Homo sapiens
ctgcctttgagcggactcccttttaaggtcaaggtcagcatctcctcgacgatcaagatctatctctcttcgtag

SEQ ID NO: 594576 - DNA, 50 bp, Homo sapiens
gccgctctactcttgctcagcggagagtggaggccatagtggagtttgac

SEQ ID NO: 594577 - DNA, 76 bp, Homo sapiens
ggaggagctggacaatgaagactattactcgttgctgaacgtgcgcagggaggtttctctggaaacccccctggta

SEQ ID NO: 594578 - DNA, 100 bp, Homo sapiens
gtgcttcctgagccagtgcggggcctggcatggagagagtcgcggttgctgatcgtggtgcttgagtagagccgtggttggtgacagcatgacgagcgag

SEQ ID NO: 594579 - DNA, 100 bp, Homo sapiens
gcgtccgccccgcgagcacagagcctcgcctttgccgatccgccgcccgtccacacccgccgccaggattctgtttcactgaggccatctatccgatttc

SEQ ID NO: 594580 - DNA, 82 bp, Homo sapiens
gctgcagccgcttgtcagtgtgatgaagattggcacccagggatcgactacaagaccaccaccatcctgctggacggccggc

SEQ ID NO: 594581 - DNA, 75 bp, Homo sapiens
gactgacttttcttatgctgggatgtgccttagaggattatgggtattaaaaagtgtcagcaaactgcattgaat

SEQ ID NO: 594582 - DNA, 100 bp, Homo sapiens
aatcaacgcaaccacagaaacaagtggtacaggtggaatgaggtaccatctactgtctccagaggaccgagaagaacttgtagatggcacaagacctaga

SEQ ID NO: 594583 - DNA, 90 bp, Homo sapiens
ctacaacccgcagtgggcccatcttccgcacgacctcagcaaggcacgtccctcccctgatgtgaaggccgagctgtttgagctcctttt

SEQ ID NO: 594584 - DNA, 100 bp, Homo sapiens
ctctcttggccctcctgaaatgataagtgccatagagttcatttccatttgccgtatcgatggcaattcttggatagaggcaaatgggaggatttggaca

SEQ ID NO: 594585 - DNA, 82 bp, Homo sapiens
cttgtaaccattttaaacaaagccgtctgtagaggatcctttccccattgcaatctgaaagcaaatcctgtttagatgcagg

SEQ ID NO: 594586 - DNA, 100 bp, Homo sapiens
gcaagggccatgcttgacatagtcaaacgttacaattggacctatgtctctgcagtccacacggaagatcttcctcagaagaataggcttgttgttttac

SEQ ID NO: 594587 - DNA, 75 bp, Homo sapiens
ctctgcgggactatgtccgaggatacatccttcaggaaggaactgcaggagctgcagaatctttacaaacagaac

SEQ ID NO: 594588 - DNA, 100 bp, Homo sapiens
gagtggagctcagccaggggcagccggctctggtgctcccagaagagttgtgttggtgttgaagaggagaaggctgctgacattgacctctaccactgcc

SEQ ID NO: 594589 - DNA, 50 bp, Homo sapiens
ttcattcatttgagcatagcaactacttgaaggaaattttgccaaagaag

SEQ ID NO: 594590 - DNA, 90 bp, Homo sapiens
taggagcctggggttcggcgctatggaggagctcgatggcgagccaacagtcactgataatttcactggatacagaatcaaatagttccc

SEQ ID NO: 594591 - DNA, 100 bp, Homo sapiens
tcagttcttccagacgctttctgagagaatgggggcaggagctctagccatctgtgcaaccactgagaaaacggaaccgaatagtcaagaggacaagaat

SEQ ID NO: 594592 - DNA, 123 bp, Homo sapiens
aaacttcttaacccctagaccggtttttagtccattgactatgcagcctaatggtgtcatggagaaactccagctgggcccagagattctgcagcgggaaaatccaaggcttatttatgccag

SEQ ID NO: 594593 - DNA, 100 bp, Homo sapiens
cactggtgggccacgcgctgctgatgaagccggacgggcgaggcttctccagctcacacaactccacagacccaaagtacaagtggtcgtcggagaagag

SEQ ID NO: 594594 - DNA, 100 bp, Homo sapiens
caaaacgggcaataagactctttaaagaaggcaaggagagaatgtatgaagaacagtcacaggacagacagcaaatcaaaaggcctccagtggataatag

SEQ ID NO: 594595 - DNA, 75 bp, Homo sapiens
aactgggttttgcagtatgaccctcccagcaatgcaagggtaattgggatacttctggcagcgaactgagtgaag

SEQ ID NO: 594596 - DNA, 90 bp, Homo sapiens
ctcccctgtgcgcgtgtctcccaacaaccgctcagtgaaagctggtggaatgcgaattgtgcagaaacacccacatacaggagacaccaa

SEQ ID NO: 594597 - DNA, 90 bp, Homo sapiens
tacagctatccgttcaggacttgaacttcttaaggtgtattacctgactgcttaaccgatggctctgatgtggtcagtgaccttgaacac

SEQ ID NO: 594598 - DNA, 100 bp, Homo sapiens
ctcggacttccaatatgagaatgccaacatgtggttcaagaaccttgacaagctcatccggctggtaaatgcgcaggttatgaagacagtatggagtttc

SEQ ID NO: 594599 - DNA, 83 bp, Homo sapiens
actttgggaagcagtgacatccaacctgtatcaagtcttctaatctgtgaacatggtgccgggagcaaagagatgattaagac

SEQ ID NO: 594600 - DNA, 75 bp, Homo sapiens
ctttaggcgacgtcgtcatcgacttgtacaccgaagaacggccgcgtgaataataataacctggatgcctgctgt

SEQ ID NO: 594601 - DNA, 75 bp, Homo sapiens
tgcagaggttcctctacagcaaggatcagttacagttgtggattcgaggcaacgtgagtgcctgtgcgaggtcca

SEQ ID NO: 594602 - DNA, 75 bp, Homo sapiens
acagccgcccctggtgcacacaccctcgtattctcctgcccttccccagcggaatagaagatgaactcaactgaa

SEQ ID NO: 594603 - DNA, 100 bp, Homo sapiens
gaataatcagttgaaaacagtacccagtgaagccattcgagggctgagtgctttgcagtctttgaaaatatataccatgatctacaggaacttggtagta

SEQ ID NO: 594604 - DNA, 100 bp, Homo sapiens
gagtcttcctgaccgactccaccatcacccaatctgttgattctccattgggaaaggcatttacagacgcaggaggagggagacgcactgatgacatcgg

SEQ ID NO: 594605 - DNA, 100 bp, Homo sapiens
tgctctactccctggatgaggctgtcattatgacaggggtcatgacagatgaggcagagcccagcaagggattaatgaaaatcaagttccatcctcagac

SEQ ID NO: 594606 - DNA, 83 bp, Homo sapiens
ccagctccgaaatcaccaccaaggcactaggaagcttttattttcttcatgagtccttaaaaaacatctaccagtttgacttt

SEQ ID NO: 594607 - DNA, 95 bp, Homo sapiens
cctgagacgttctgtgcaatgctcaaagttatgaagtttcaggatgaattggaatctgggaaaagacctaaaaaaccaggccagagttttcagga

SEQ ID NO: 594608 - DNA, 80 bp, Homo sapiens
ggggaatccggaagggacacgctgaacagtgccctcggctagcatgacccgcctgatgcggtcccgcacagcctctggtt

SEQ ID NO: 594609 - DNA, 98 bp, Homo sapiens
tggttctgctgcttctgggccctacgcgcggcttgcgcgcaagattgtggcagagcgtcctggcactaactcaacaggccctgcacccatggcccctc

SEQ ID NO: 594610 - DNA, 76 bp, Homo sapiens
ctgcatttacggggtctcccggagggccagagtcggtcagttgctccgattaaaaatgtttcgagaagatcatggg

SEQ ID NO: 594611 - DNA, 100 bp, Homo sapiens
gaactggattcgtggcgccacaagctcattcactgtgtagatgttttcagtcatccccaacaaattccttccaaacagtaagagcccctgttggtacgag

SEQ ID NO: 594612 - DNA, 98 bp, Homo sapiens
gccgcccggcttcaaggcccgcggaacagcggaggacgaagagcgggacccgagccctggaaaatctggagagctgaagagttggagctattcacgag

SEQ ID NO: 594613 - DNA, 78 bp, Homo sapiens
tcaaggtcccaaaggtggtggcaatgcagtaaagggatgactgtggaagtgctgggcacagtgctgggcacggcgatc

SEQ ID NO: 594614 - DNA, 82 bp, Homo sapiens
agattcgcagtggtcgcttcttctccttgatatcaatgatgtcaaacggctgaaacctggctacttagaagctactgtggac

SEQ ID NO: 594615 - DNA, 50 bp, Homo sapiens
gggctggactacttcagcagcctgtggagctccaaacgagaatggaagcc

SEQ ID NO: 594616 - DNA, 51 bp, Homo sapiens
gagctcccccaagagccggaaagtttgttgcatattctaaggacccagaca

SEQ ID NO: 594617 - DNA, 100 bp, Homo sapiens
ttcagtaagcacgaaacatgctctcatcatggatgaagtagatggcatggcaggcaatgaggataggggaggaattcagtgggagatccagaataccagc

SEQ ID NO: 594618 - DNA, 88 bp, Homo sapiens
tgaaaattggatctgcttctacagcaacatcttccgctgggaaactctgctattcctctacacagccgactagttatgatcagagcag

SEQ ID NO: 594619 - DNA, 83 bp, Homo sapiens
cagaagtccagagctgagaaggactgcctgtttgcagcggagctggagtttgttcagatcatcatcatcgtggtggtgatgat

SEQ ID NO: 594620 - DNA, 50 bp, Homo sapiens
ggaaagcgcatacaggaccctaaacaggctgcatgcagggcatggtgccc

SEQ ID NO: 594621 - DNA, 75 bp, Homo sapiens
caccggcttatggagcatggcatcatccagcatggggatgttcgtctaaccccagaagactttgctagagctcag

SEQ ID NO: 594622 - DNA, 76 bp, Homo sapiens
attttttgtagaaaacaggatttcaatatgtacagaattcatggatgattctcacatgcttaacactggaaatgat

SEQ ID NO: 594623 - DNA, 100 bp, Homo sapiens
tgtctgataactgactctgatctcaacattttggctgaaatgtcatttgtcagagtgaaccgctgtggtccccgagttggtgtaagaaagacaccgaaag

SEQ ID NO: 594624 - DNA, 100 bp, Homo sapiens
cctgttatgttctggttgaaatcacctgtgtgtcttaatttctcaattcctttttggcaagaatatcaagcaaggttgatggacggatggctacatggat

SEQ ID NO: 594625 - DNA, 75 bp, Homo sapiens
ccgagatacctctatggttcatgagcttaatagagaagctgatcgtcgaagggcatctaaccaaagcggtagaag

SEQ ID NO: 594626 - DNA, 97 bp, Homo sapiens
gttctcttcccaaagtggaagccaaattcatcaattatgtgaagaattgcttccggatgactgaccaagaggatatgggccctcacattttccaaac

SEQ ID NO: 594627 - DNA, 100 bp, Homo sapiens
ctggccccagagggagccctgaatatacacgagaaagcctggaatgcttacccctactgcagaaccggaaacccaaaacactgcagctgcatggattgaa

SEQ ID NO: 594628 - DNA, 75 bp, Homo sapiens
caccaacaacaccacaataatccacagccaagcgggtccatatggaatatttgctggtagggatgcctccagagg

SEQ ID NO: 594629 - DNA, 75 bp, Homo sapiens
catcacaaaagagttgattgaaattatctctggtgctgcagctctgtttcatcacacaaccccagacagtaaaac

SEQ ID NO: 594630 - DNA, 90 bp, Homo sapiens
aagaactgttgaatcttacaaaagaaagtctggctgatgatttgaaaattggttatgatgtgattgctcaagcccaatctgggactggga

SEQ ID NO: 594631 - DNA, 98 bp, Homo sapiens
ggcgcggccatggcgacgggcggccagcagaaggagaacacgctgcttcacctcttcgccggcgggtattttgaaggtggcgtctcatctgtctacct

SEQ ID NO: 594632 - DNA, 82 bp, Homo sapiens
cgaaagcgacgttcggccaccggaggagcgggagccaagcagccctgggcgctgcctatggcacagccaagagcggtaccgg

SEQ ID NO: 594633 - DNA, 83 bp, Homo sapiens
gcaagatccagatcgggatttacgtggagatcaagcgcagcgatgaatgcagagccagagccccggagcctctccctgggcgg

SEQ ID NO: 594634 - DNA, 83 bp, Homo sapiens
cctggcgcgatgcgtcaagtacactgaaattcatcctgagatgaggtttactcctggcttgggggcattaggaagcactggag

SEQ ID NO: 594635 - DNA, 111 bp, Homo sapiens
gtggaatatgccaaggaaaaactggagagcttcatcaaaaatagtgatagctttgataaggttctcggaccagcagtgaccttcaaagtgagcgccaatgtccaaaacgtg

SEQ ID NO: 594636 - DNA, 100 bp, Homo sapiens
tgcttcccagagctttcacgaaggcaccgacgtcatcatgctgaccaccaatcagatccgtaaggtgtccctgggcttacctcagcaaccgacagcgccg

SEQ ID NO: 594637 - DNA, 87 bp, Homo sapiens
ggaggattgtcactccaacctcttttcgctgaatggtagctgagtggaggttgtctcgaggtgttgaagaacagacacaagctttct

SEQ ID NO: 594638 - DNA, 100 bp, Homo sapiens
cgctcggcctggccctgagcttgcggctggcgctggcgcggagcggcgcggagcgcggcgggggccggccccagcccagactggaagatgagattgactt

SEQ ID NO: 594639 - DNA, 100 bp, Homo sapiens
gccgaaagtcgcagagctgaagcagaagatcgaggacacgctatgtccttttggcttcgaggtttaccccttccaggatacttctacatagacataatca

SEQ ID NO: 594640 - DNA, 100 bp, Homo sapiens
cgagtggtctgccgagaagccagtcacgccgggagctggtacacagcctcaggtgagtgctccagttgtaacatctaccactcaggaaaagccgaaggat

SEQ ID NO: 594641 - DNA, 74 bp, Homo sapiens
tgacagtctgcatgtgcagttttcagagcttagaaaccaagatagccaagtggaacctgcaatcaagaatgaat

SEQ ID NO: 594642 - DNA, 100 bp, Homo sapiens
atgcttcagaatcactgagaaaagaagaagaacaagctacagagacacaacccattgtttatgtgctgtccccggcataggtccatctctgcagaagcca

SEQ ID NO: 594643 - DNA, 73 bp, Homo sapiens
ccgcgctgagggcgcccagctgtgcacgatctgattttctggagagatgtgaagaagactgggtttgtctttg

SEQ ID NO: 594644 - DNA, 51 bp, Homo sapiens
caggtactaccgaccggacctggaccagtgtgaccaacgcccagccactgc

SEQ ID NO: 594645 - DNA, 100 bp, Homo sapiens
tgacaaaaggcatggtgatccttcgggacaagattcgcttctatgagggctccttcgagagcagtggatccgggccaagtacgagcgacaggagttcatc

SEQ ID NO: 594646 - DNA, 98 bp, Homo sapiens
cggccttgagcgaggaggagctggacaatgaagactattactcgttgctgaacgtgcgcagggaggtggatggaagtttgcttagttgaagaattgcc

SEQ ID NO: 594647 - DNA, 75 bp, Homo sapiens
caaagttgcatttcctcgtcgagcgcaacccaagacgaacaggaggcattgaactcaatcatgaacgatctggtg

SEQ ID NO: 594648 - DNA, 83 bp, Homo sapiens
cgtggagggacgagacctgaccttgcagtacaacatctacaatgttggctcaagagttaaacatgaagtttctggagagacag

SEQ ID NO: 594649 - DNA, 80 bp, Homo sapiens
gggtctcactgacttcaagaatgaagccgcggaccctcctgcagccaaaggattacctgatatggattcttcgatcctta

SEQ ID NO: 594650 - DNA, 50 bp, Homo sapiens
ttcggaaaggagccaatgaggaacccttaggagaaatcttgagagtggac

SEQ ID NO: 594651 - DNA, 50 bp, Homo sapiens
gaaggatatcggtttcattaaggatatttggatgtttcgagctcgacttg

SEQ ID NO: 594652 - DNA, 75 bp, Homo sapiens
gaattagcggttccacttcctgtctcctggggttgacgacctagctgggaatgggtaccacagaccatgtcatcg

SEQ ID NO: 594653 - DNA, 82 bp, Homo sapiens
tatacgaacggctctgcggcgaggaggtgtttcccattaaacactaccaggacaaaatcaggccttacatccagctgccatc

SEQ ID NO: 594654 - DNA, 90 bp, Homo sapiens
gcattgaggactttccttacctgtttttccagctcacccactgccagcagaggaattgaatgatctggcacgggaccctccagcacagtg

SEQ ID NO: 594655 - DNA, 100 bp, Homo sapiens
agattcctctcacagtcactgcttcaaacgtcccagcacaactccgggctgggggccgagaggggagcgccggtgccgccgccagacctgcagcctagcc

SEQ ID NO: 594656 - DNA, 100 bp, Homo sapiens
gggaaatgaaagagcttccggagcagcttcaggaacatgcttctctgctggatgaaccgaatcctaacagtccagccaatagccaggcagcacagcttta

SEQ ID NO: 594657 - DNA, 100 bp, Homo sapiens
gtcacagagtgcaccgtatcctgtcacttctggatgtgagaataacctcaacgtgggaagtgacaccacatcagaaaccagcttttctctctccaaagaa

SEQ ID NO: 594658 - DNA, 74 bp, Homo sapiens
cccgcagaacctccacagtcaagaggacgagtctctgtgagactgtttcacagaaggatgtgtgtttacccaag

SEQ ID NO: 594659 - DNA, 74 bp, Homo sapiens
caggctgcaggaagaagaagggacacctttcacagctatcagggaagggagaagatgtcaaccggacactagaa

SEQ ID NO: 594660 - DNA, 90 bp, Homo sapiens
gaatgaagccgcggaccctcgcaggaggaataagtttttttcatctgtaatttggaagccaagtcagtaacaaaatgaaaccagtaaagc

SEQ ID NO: 594661 - DNA, 101 bp, Homo sapiens
tttatgataattggatcaaagatgctgtacctataactacctgggaaaaaagacaaaccagatgttggaggcttttgaacaaaaggacttctctttagccc

SEQ ID NO: 594662 - DNA, 100 bp, Homo sapiens
ctgaggccggaaggagctagacggcggtcggttctggacatggcaagacatgtgccactctatcgggcactgctggaattgcttcgggccattgcttctt

SEQ ID NO: 594663 - DNA, 50 bp, Homo sapiens
gtcaatggcttcatcagcactttggggatgtgataggccaggttctgcct

SEQ ID NO: 594664 - DNA, 75 bp, Homo sapiens
acacaagtgtgaggagttgctaaatgctcagactattgcccagaagaaaagatgtttggttttcacaagccaaag

SEQ ID NO: 594665 - DNA, 82 bp, Homo sapiens
ctctgcagtgtcttccacaacctggggtgtgtccgcagccggccaggtggtatccctgaaggtgtggctgattgacgacatt

SEQ ID NO: 594666 - DNA, 112 bp, Homo sapiens
cgtgaccgagagcgtgaccgagagcgcgaatatcgtcatcgttagaaggaatgttacgttcataacttactaaggattagtgtatattttccaaccttgaggcatgaaattc

SEQ ID NO: 594667 - DNA, 100 bp, Homo sapiens
tctggcggccatggtgttgctgctgtactccttctccggccagaagcggactcctagaagaggggagcagcaaggatggaatgacagccgtgggccggag

SEQ ID NO: 594668 - DNA, 100 bp, Homo sapiens
aagattgcacagctggaggagcaggtcgagcaggaggccagatcaactctaccagcaacttgagcaaaatcgccgcctcactaatgaactaaagctggcc

SEQ ID NO: 594669 - DNA, 100 bp, Homo sapiens
ctggagatgttcgactggaacctggagcaggccggctgccaccttctgggctcctggggccctgcccaccacaactgagatctgtatctgtggacctgaa

SEQ ID NO: 594670 - DNA, 106 bp, Homo sapiens
tatgccaaggaaaaactggagagcttcatcaaaaatagtgatagctttgataatttctgtagaaaatgtttcctgactgcaatgagggaaagcggagcacattgtc

SEQ ID NO: 594671 - DNA, 100 bp, Homo sapiens
gaaggaactggtagtgccgatggcaatgatggttatgaagctgatgatgctgaggttggggataaaagtggtgaactaacagcacgacttaatctctcag

SEQ ID NO: 594672 - DNA, 90 bp, Homo sapiens
ccaacccatgagagtcgaattggagaacttgttggagtgctggtgaatcatttcaagagtgccggtggtggtgtgcacattgagccccgg

SEQ ID NO: 594673 - DNA, 98 bp, Homo sapiens
caacaccctgatctggcatggacatgtagatgatgagctggagatcaaggcctactatgcaggccacgtgctgggggcagccatgttccagattaaag

SEQ ID NO: 594674 - DNA, 123 bp, Homo sapiens
aagctaaactcaatgctgctgtgtgggaagaagatttgtaaagaaaactcttaggtgtggtggctcacgtctgtaatcccagcactttgacaggctgagcgagggagtggatcttgaggtcag

SEQ ID NO: 594675 - DNA, 75 bp, Homo sapiens
accaggatgaaggagaagagaccagacaggatggtgaggaaataagatatgtggaacggagttatgtatcaaaac

SEQ ID NO: 594676 - DNA, 51 bp, Homo sapiens
gctctaacggggctttctacaagccgcagagagaagaagctgcccaagaat

SEQ ID NO: 594677 - DNA, 98 bp, Homo sapiens
gcggggagtcgcgggcgcctccgcctcaggcttcttgcacctgggtggcctccgcactgccttgtacaactacatctttgctaagaagtaccagggga

SEQ ID NO: 594678 - DNA, 83 bp, Homo sapiens
caacatcgcggtgcagcgaatcaagcgggagttcaaggaggtgctgaagagcgaggaggtgacagcgggaaggtgaccacagt

SEQ ID NO: 594679 - DNA, 100 bp, Homo sapiens
cgcaggcggggcacgcgctgcccctgctgccacaggaggaatgggtaccacagaccatgtcatcgtcctggcgtccacgaaccgagctgacattttggac

SEQ ID NO: 594680 - DNA, 75 bp, Homo sapiens
cgtccatcgcccctcgggccgacgccatgaagatcaaagatgccaagaaaccctcagaagatggctgtgccaccc

SEQ ID NO: 594681 - DNA, 84 bp, Homo sapiens
cgaagttggaagtgtctcttagcagcgcgcggagaagaacggggagccagaaaccaaggtgtatgttggtaacctgggaactgg

SEQ ID NO: 594682 - DNA, 100 bp, Homo sapiens
ctcggcactgtattctttacctgcttcccaatcccactgatgaggatcagcccatgatcagccaaatggccgatgacacagtggcagaactggacaggca

SEQ ID NO: 594683 - DNA, 74 bp, Homo sapiens
atctgaagacctattttactgataagaaaacacatctttacacactaaacaaactagatgccgactacatcaag

SEQ ID NO: 594684 - DNA, 76 bp, Homo sapiens
aaggaatctggaggaaagctgaccaggcggcttgtgaacagtcagctccagaaacatgacaaggaggactttcctg

SEQ ID NO: 594685 - DNA, 99 bp, Homo sapiens
gggttttcgtacagcaaggcactggggattcttggtagatctgactgccctgtgagctacaggacatggttcggaaacatttgcacagtggtcaagagg

SEQ ID NO: 594686 - DNA, 97 bp, Homo sapiens
gaaaatattctgctggcgagtctccacagtcaccagtacagctggcgctctcacaaatccccacaggttgcatgatggaatttgaacattacttcaa

SEQ ID NO: 594687 - DNA, 90 bp, Homo sapiens
gttcacctcggtgtctgcagcaccctccgcttcctctcctaggcgacgagacccagtggctagccgagccgctgccgctcatggatttgt

SEQ ID NO: 594688 - DNA, 98 bp, Homo sapiens
ggaaagaagatggccatctgggcttggcttccggctccccccatctggctggaacacacatcagtcacgccataaaattttgagtagaaaaatccaga

SEQ ID NO: 594689 - DNA, 50 bp, Homo sapiens
gtgttgatgaagatgaaagagactgcaggcaattattacagtttacgttc

SEQ ID NO: 594690 - DNA, 100 bp, Homo sapiens
aagtaccggctcgtggtggtcggcgggggcggcgtgggcaagtcggcgctcaccatccagttcatccaggtctgtcatgctaatccatcagaaagagctc

SEQ ID NO: 594691 - DNA, 75 bp, Homo sapiens
gttatcaaagcctatggcttcagctgcgacggggaaggtttacaaaggaggaaaacgacttcttctagatttttt

SEQ ID NO: 594692 - DNA, 82 bp, Homo sapiens
ccttcgaggaggtcatgaaggacctgagcctgacgcgggccgcgcgggtcaaaatgcagatcttcgtgaaaacccttaccgg

SEQ ID NO: 594693 - DNA, 88 bp, Homo sapiens
cgcggacggcgcacgacgagtactggcatgcgcacgtggacaaggaagcacaagcctatgcagacgacaacagtttgctgttcatgga

SEQ ID NO: 594694 - DNA, 82 bp, Homo sapiens
tttgagctgcacgttgcacaaggatatcggccgggtagcaggaccaccaatactcaatccaatagcaaatgagatttacttg

SEQ ID NO: 594695 - DNA, 75 bp, Homo sapiens
cgcgtatcgccagcacgatcccaccgcacgttcagaagtcggatctcagaaaactgatcttcacaatgaaggcta

SEQ ID NO: 594696 - DNA, 98 bp, Homo sapiens
aacatgcatgcttctgtcaaaaacaaggttctggaaacaactgggcatatgggtagtagccatggttatgtgggttccagtagtagaatatcaagaag

SEQ ID NO: 594697 - DNA, 100 bp, Homo sapiens
agcgactcttacatgatgaacaaagtactgatgacagatatattcgactttatgggagaaaatttagcaaagaagatcatgttctttttattaagttatt

SEQ ID NO: 594698 - DNA, 82 bp, Homo sapiens
atcatgtctgcgagccaggattcccggcattgaagttgatatcgatgtggagcacggagggaaaagaagccgcctgaccccc

SEQ ID NO: 594699 - DNA, 88 bp, Homo sapiens
agcggcgttatgacaggaagcagagtggctatggtgggcaaactaagccgattttccggaaaaaggtattaatctctggagaagacac

SEQ ID NO: 594700 - DNA, 83 bp, Homo sapiens
ccaataaccaggtgcttggcaaaatcgagcgggccattggtcaaaatgcagatcttcgtgaaaacccttaccggcaagaccat

SEQ ID NO: 594701 - DNA, 90 bp, Homo sapiens
gaatttcaacacttcgagatgaaactggtgctctcacatcagtaaagcaacagctagaaaacaatttggaagagtttaagcaaaagttgt

SEQ ID NO: 594702 - DNA, 95 bp, Homo sapiens
cgagaccgtgaccgagagcgtgaccgagagcgcgaatatcgtcatcgttagaaggtgtactttcggctccatgcttccatcctgaagctcctggg

SEQ ID NO: 594703 - DNA, 100 bp, Homo sapiens
gatggtacaagttggactgcttcccaagctcactgcactcctagtgacagctggagtatcagccttggaagtatatacgccaaaagaaatcttcgtggca

SEQ ID NO: 594704 - DNA, 101 bp, Homo sapiens
cacagccccctacagatctgtgggactggtttgaatccttccttgatgatgaagagatatgagggaaggcaccattggagatatggctatcctgggtataa

SEQ ID NO: 594705 - DNA, 96 bp, Homo sapiens
cccactccctctcagcctccgcctggtctctgaaccagaaggaccctggtgtccttgaccgcatgatgaagaaactggacaccaacagtgatggtc

SEQ ID NO: 594706 - DNA, 100 bp, Homo sapiens
gaatgcacagccaggattgaaattggactgcattacaagattccttacccaaggccattgcatttgctggtctggcctttgcgtccttctacctggcagg

SEQ ID NO: 594707 - DNA, 82 bp, Homo sapiens
gctgctcaagttccagatttgataacagtcttcactcctatgctgatttttctggtgccactgaagttattttggaagcaga

SEQ ID NO: 594708 - DNA, 100 bp, Homo sapiens
gtggtctgtgaagccacacagtgtccagatacgagggaggtatctttaaaatagcttcctgggcagatctagtaaatgctcacgtggtgccaggctcagg

SEQ ID NO: 594709 - DNA, 100 bp, Homo sapiens
cctcactgcctgagggcatcatggtcaagacttttgaagatagaatgggctgcatgttcctctgtgttttcggccttcctggtgataagaagccagacga

SEQ ID NO: 594710 - DNA, 76 bp, Homo sapiens
gatcaactcctctctgttaatggagtggtaaaagaaatcattgagtcccccgccttcagaagagggtgcattttca

SEQ ID NO: 594711 - DNA, 80 bp, Homo sapiens
agaagcgccgcgcacggacttcggcagaggagcatccggtgcctgcgaaacatcatccactggaacctcatctccgcctt

SEQ ID NO: 594712 - DNA, 50 bp, Homo sapiens
ttggcggcataccaccctgcactgtgagctgtggcagaggtaaaacttcg

SEQ ID NO: 594713 - DNA, 100 bp, Homo sapiens
agccacaatgtgcctttgcaggggagcctgagagccacaggtttggcagttctctaccagtggaccaatcttttcatccccgtgtacctcaccatcagag

SEQ ID NO: 594714 - DNA, 100 bp, Homo sapiens
accccgtggggtggtgcacacagaacaacaaggtgttgatgccgccggacgctgaggagtacctgtcatttgcctttgagcattgtcaccgttctagtca

SEQ ID NO: 594715 - DNA, 82 bp, Homo sapiens
tcacaagcaatgcctactctagtccaagtgtagtcctggcctcatacaatcatgatggctggtataaagcaaattacagcat

SEQ ID NO: 594716 - DNA, 78 bp, Homo sapiens
tgcccaacagagggaactacaaccaggttttcctttggaatatggataaatacaccatgatacggaaactagaaggac

SEQ ID NO: 594717 - DNA, 83 bp, Homo sapiens
tgacaatgctccctctccttatatgattctgcctgatcaatgcaggagtcctgtacctctacttcagcaattacctacagatt

SEQ ID NO: 594718 - DNA, 99 bp, Homo sapiens
cgaggatgtatctgtggcccttccaaataagcggcataaagcaattgagaattcaggtacgagtggctgctttacagaatctggtgaagataatgtcct

SEQ ID NO: 594719 - DNA, 83 bp, Homo sapiens
cggtgtgtggcgcgcccagagccccgcgtttcagccctagggaagggtgaggtggctttgaccccgggttgcccggccagcac

SEQ ID NO: 594720 - DNA, 100 bp, Homo sapiens
ggcgagggcgccgtcagcctcatggagcggcggaggctcaaccagctgctcctgcccctgctgcagatgttcatgagagcgcagtttgactatgatccca

SEQ ID NO: 594721 - DNA, 75 bp, Homo sapiens
ctctttcagtagcagcagcttttaatgaagatgaagattttctgtagaaaatgtttcctgactgcaatgagggaa

SEQ ID NO: 594722 - DNA, 83 bp, Homo sapiens
gtagataagacactgcaacaatatggccgcgtggaaagtgtcaaaattcttcccaagaggggatctgaaggaggagtggctgc

SEQ ID NO: 594723 - DNA, 100 bp, Homo sapiens
tgtagaggatgacttctctaatcagttacgctctgtctgatctggagcttgtggcccagtcaattatcatcatttttgctgcctatgacacaactagcac

SEQ ID NO: 594724 - DNA, 83 bp, Homo sapiens
cagtatgggaaagatctaccttctggaagctactactacgtggtgcttggaaaggtttttagaacttcagccataaaaatggg

SEQ ID NO: 594725 - DNA, 100 bp, Homo sapiens
aaaggaacaacatctttaccatctcatctcaagaatggaggggcggcgactggcggcgcgatggacctgaccgggctcctgctggacgaagaaggcacct

SEQ ID NO: 594726 - DNA, 100 bp, Homo sapiens
ccaagacctatgattctgttacagataaatttatggacttctcttttgaaaagttcttacagcagctgtgacacaagcctcactgcagtctataattcat

SEQ ID NO: 594727 - DNA, 82 bp, Homo sapiens
agcttcagaagaccgaagcgttcgtatctggaaggttattcagcttctcaaggctggaaaagcgaaggaagtttcctacaat

SEQ ID NO: 594728 - DNA, 101 bp, Homo sapiens
tacctgggtgctgagtgccgcactgtccgggaggagatgggcgatgagagcgaggagttcctgcaggtgcaatgaagggcgtgttggtagacattgtgaat

SEQ ID NO: 594729 - DNA, 75 bp, Homo sapiens
gacttccgtttgcagaacagcacactaatggccgagttcagcaaggccatcctggaggctccagagaagcagcgg

SEQ ID NO: 594730 - DNA, 75 bp, Homo sapiens
cggtgctgcagacggcgagacctcctgcacaggctccccacaggtgcaggaagccgccgcccagccatggacggg

SEQ ID NO: 594731 - DNA, 100 bp, Homo sapiens
ttatggtcgcctttttgaatgagtggaatttcccgttggttatgctcatttggaagatagggcctgcactgagctgtggaaacacagtggttgtcaaacc

SEQ ID NO: 594732 - DNA, 117 bp, Homo sapiens
acttctctggggactctgaacttccctggtcgaacagttttttctaatggctattcaagaccccaagactgcttctgagacagaaacagatatctgtgctgaatgggagataaagac

SEQ ID NO: 594733 - DNA, 73 bp, Homo sapiens
tcttatttaatccacatcatagctccaaagacaacaggccctccctctgccctcccgtctgtgagctccctgc

SEQ ID NO: 594734 - DNA, 49 bp, Homo sapiens
aaaaaccaaacatgagggtagcaggacgccaggaaagcatgtgcagatg

SEQ ID NO: 594735 - DNA, 82 bp, Homo sapiens
aagtattcaccagttaatagcaccagggaaaagagtgcaaattcggaaagcacctcaagctgtttcagatacagttcctgag

SEQ ID NO: 594736 - DNA, 87 bp, Homo sapiens
ggaattttcaacacatgatgatgttttcaggtactgggcctaatcgctacgtgcctctttggctatgatgcctatgtcaccttcccc

SEQ ID NO: 594737 - DNA, 100 bp, Homo sapiens
ggaaaggtctgcagtatgaatgcacagatctttcattcgtacgtgcctttgagtttacctatgttaatgtttatggcactcacgttttggtaagtgctgc

SEQ ID NO: 594738 - DNA, 100 bp, Homo sapiens
gtttctgagtccagccaacagcagaagagaaagccagttatccacggactggaagatcaaaagaggacattgatgaatgtgccttaagaactcacacctg

SEQ ID NO: 594739 - DNA, 97 bp, Homo sapiens
tactgagaatcttgctgaagagctcaaatttacactgactgggccaaccactacctagcaaaatcaggccacaagcggctgatcaaggacttgcaac

SEQ ID NO: 594740 - DNA, 100 bp, Homo sapiens
ccaaagccctgtgagttcatcagagtcagctccaggaaccatcatggattgagataagtttggatgatgatgaaaatggacaaaatccagagtgcttact

SEQ ID NO: 594741 - DNA, 87 bp, Homo sapiens
ttaccaaagagaagaaccactctctggcgctggggtgacctgctggctgggcctgtaagggtggtggagaaaataacctgaagagtc

SEQ ID NO: 594742 - DNA, 100 bp, Homo sapiens
cgaaccccttcatgcccaaatcccggaaactccagcgtgtctccagccgtggtgcccgtggttgacacgagctgtgtccccagctgttcccgtctacaat

SEQ ID NO: 594743 - DNA, 82 bp, Homo sapiens
cccagcggcagcagcagcggcgggaggagcctccgggccacctgtctgtccagccacccttccacagactgaggcttgacac

SEQ ID NO: 594744 - DNA, 96 bp, Homo sapiens
gaatgctggagtcagtggaagacggagctggtcggcccgaaggcccgcgatgctcccagcccggtgagacctgcctgaatggcgggaagtgtgaag

SEQ ID NO: 594745 - DNA, 50 bp, Homo sapiens
ctggggagcccttctgcgccacagctgcagatctgggacacggccggcca

SEQ ID NO: 594746 - DNA, 111 bp, Homo sapiens
ttggcgaagcgctgcgctcgcgcccggatccctcaggactttttttatgaagacatggagtccttgacgcagatgcttagggccttggcaacagatggaaataaacaccgg

SEQ ID NO: 594747 - DNA, 91 bp, Homo sapiens
gccgccaccacgccggggactgttgacagccagaacctttaagcgtaacagagtcacctggcaatgtcggagatgtatgcagtgtgacgcc

SEQ ID NO: 594748 - DNA, 96 bp, Homo sapiens
ctccatctggttcgaagtctcagcggtattctggtgcttatggtgcctcaggtataccaagcttggctacgcaggcaacactgagccccagttcat

SEQ ID NO: 594749 - DNA, 100 bp, Homo sapiens
ccaagtcaaacgcagaaggactgcctcactgagcaaccaagaggacttcagtactagtgctaataacatccagattgataaaaccaagcctttgtggcac

SEQ ID NO: 594750 - DNA, 98 bp, Homo sapiens
ctgggttggacctttacctgtggaggcaacactggccaagaagaggaaaggcagaagctctccggaggatccaggtggtgcatgcatttgacatcttc

SEQ ID NO: 594751 - DNA, 96 bp, Homo sapiens
caatcctaaagaaaatcatttgtgatgggtcagctagtatgcaggctaggcaaacttcttttagagattcctgccaaaaattctaccaagcagaga

SEQ ID NO: 594752 - DNA, 100 bp, Homo sapiens
cagaccaccctcctccaccgtcgcctcccactgcaaaaaggcctggcaataattcggcatagacctgctcttgttaaagtaattttaatttcgagcgtag

SEQ ID NO: 594753 - DNA, 82 bp, Homo sapiens
taggccacaatcttcaatgagtaaacatattccttgacatcgtctttaaaccctgcgtggcaatccctgacgcaccgccgtg

SEQ ID NO: 594754 - DNA, 90 bp, Homo sapiens
ccatggagtttgtgatgaagcaggctctaggagggcggcgactggcggcgcgatggacctgaccgggctcctgctggacgaagaaggcac

SEQ ID NO: 594755 - DNA, 75 bp, Homo sapiens
ccccgccccctgcggcccagcgcccccaggtatatgccctcattttgcttaagacctctggccagagcagggcat

SEQ ID NO: 594756 - DNA, 82 bp, Homo sapiens
aagtccggcaaatgatagagcaggaatcctgcaatatggcgaacataagagaatattatgagagagctttgagagagtttgg

SEQ ID NO: 594757 - DNA, 100 bp, Homo sapiens
caccaggctctggagcaattaaagccactgctttcggtatcctccatgaaatgtgggatccttccaatttctcaagagtctcttcttctgggagatgttg

SEQ ID NO: 594758 - DNA, 76 bp, Homo sapiens
gagatctccgaccagtctgggggcgctggcggcctgcgcagccacctcaaggcttctccagggaaagtgaccgagg

SEQ ID NO: 594759 - DNA, 90 bp, Homo sapiens
actacaggaacctgctttctctcgatgaggataacatccctccagaagatggttgggggccgtcccgctcctaaggcaggaagatggtgg

SEQ ID NO: 594760 - DNA, 101 bp, Homo sapiens
gtggattggatattctcaaggaaccacacatgtattaagatttgaaatacaaacctggtcgatgtgatgatattttgaaatggaagcctcccagtctgaat

SEQ ID NO: 594761 - DNA, 90 bp, Homo sapiens
cgcctcacagctcatctttcctaaaggaaacaaacgtacttggatttaaaggtcctaggaaaatgtctgtgatcattcctggaatgacac

SEQ ID NO: 594762 - DNA, 101 bp, Homo sapiens
aagcacgttgttgttaagtttgtggtgaaattctttccgcctgaccacacacaactccaagaagaactcacaagaacatcatcaagaaggtgatcgggcag

SEQ ID NO: 594763 - DNA, 82 bp, Homo sapiens
gaatccattatctttcgggaaagctctctggggcaggtacaaaattggacagctgtacatgatcagcaaacacagccatgaa

SEQ ID NO: 594764 - DNA, 83 bp, Homo sapiens
tcatctcttgtgtggggagtttcatcctagcgggttcaaggtgtttgcagactatgaagcctacatgcagtgccaggcacagg

SEQ ID NO: 594765 - DNA, 101 bp, Homo sapiens
tgtcaaaactttacaagttaattgaagagtcttgtccacagctggcaaattcagtgcagatcagatataaagatgaagcgcagctgtataaagaagagcac

SEQ ID NO: 594766 - DNA, 100 bp, Homo sapiens
tgttgatggagaagctctaagtacactcgtcttgaatagcctgaagcaggacattctaaatgaaaagactgaattggaagcaacacttaaggaagcggag

SEQ ID NO: 594767 - DNA, 100 bp, Homo sapiens
gataattgcaaaattgaaacagagcatgggactagcatcttgcagtctgttaaggacgcgtgaccaaaaccaaagacggccatgaagtgagatcgtgcaa

SEQ ID NO: 594768 - DNA, 74 bp, Homo sapiens
tcacatcttcaggtgcctcattcacatacgtcaaggaaattgaggtacggacattgctgcaggagaagaggttg

SEQ ID NO: 594769 - DNA, 100 bp, Homo sapiens
gaactcggcgccgccaaacagcccagctcgcgcttcagcgtcccggcgccgtcgcgccactcctccgaggctggtgaattaccatatctccgtcaagtgc

SEQ ID NO: 594770 - DNA, 100 bp, Homo sapiens
aacctgatggacaaatcccactgcggttatagtttagactggtcactggtagaaaccgtttctgaattacaaatgggttcgatacaagaggctgttttcc

SEQ ID NO: 594771 - DNA, 100 bp, Homo sapiens
cgcagggaaaagctccagtcttttgactctccagaaaggaaacggattaagtactccagggaaactgacagatctcacattcttgaaggtggcattgaag

SEQ ID NO: 594772 - DNA, 75 bp, Homo sapiens
tgtgcccaacggtcggtgtccccggctgaggcagcgcggccgcagcagccctcttctagaggccacccgcatccc

SEQ ID NO: 594773 - DNA, 74 bp, Homo sapiens
ttcctttgcggatcttctccttcttcccagttccagatgttttctggcaaaggccttcctgcatttatgaattc

SEQ ID NO: 594774 - DNA, 100 bp, Homo sapiens
ccgccacaggtcatcacaggactgtttattcactggatctctgaatacccaggccccctccaccatggccagccggggtgggggccggggtcgtggccgg

SEQ ID NO: 594775 - DNA, 100 bp, Homo sapiens
gtaaaaagcccccaaatcgccctggaatcacttttgagattggtgctcgtttggaggcactggactacttacaaaaatgaagaacccagcaagtccctat

SEQ ID NO: 594776 - DNA, 100 bp, Homo sapiens
gctccaagacctcatcaacaattaaggcagcctggcatcctcgctacaacctcattgttgtgggccgatacccagatcctaatttcaaaagttgtacccc

SEQ ID NO: 594777 - DNA, 75 bp, Homo sapiens
acaaatgctccttctcctggagacgcaactcaagctactgtgtgaagacattcacaggacacagagaatgggtac

SEQ ID NO: 594778 - DNA, 122 bp, Homo sapiens
ctgaagtcagtgagaccaagaaccaaccaattccggacacacttggactcgacagactctaagattccacctgctcctacgaagcccgactttgatggtcctcgagagaagatgcagaaact

SEQ ID NO: 594779 - DNA, 100 bp, Homo sapiens
ccccccactgatcgcgctggataaagatgcgcctctgcgatttgcagctttgaaaagtccagccgcatttcatgagcagagaaggagcttggagcgggcc

SEQ ID NO: 594780 - DNA, 82 bp, Homo sapiens
cactgttcctggaggaatccgagaagagcagagcggagggagccccagacacggggttatggttttgtgaaattcacagatg

SEQ ID NO: 594781 - DNA, 51 bp, Homo sapiens
ggcagcagcatctcagcccaagagaaggggaagatggtgaaaggaatggga

SEQ ID NO: 594782 - DNA, 82 bp, Homo sapiens
cacctactttgactatgcggcctcactgcctgaggacgacgtggactacagattatattccatcacaacaagatattctgct

SEQ ID NO: 594783 - DNA, 100 bp, Homo sapiens
ggcagaacttcctgaacctgtgtatctgccaggagacccagctgcagcacgtggaggactaccgccggatcttgcaggagagagagttactgcctgtgaa

SEQ ID NO: 594784 - DNA, 83 bp, Homo sapiens
caaagtgaccaagaacgtgagcaagcccaggcacagccgacgccgcgggctcaccatggatgatgatatcgccgcgctcgtcg

SEQ ID NO: 594785 - DNA, 80 bp, Homo sapiens
gaaaatgactttctgccggtagaaaaggacactgtcttcagccttttcttcaagtttttgaccgtggattgtgttgtgtc

SEQ ID NO: 594786 - DNA, 82 bp, Homo sapiens
ccgggagggatccgggtcctgaaggtactccaaagattcaggtttactcacgtcatccagcagagaatggaaagtcaaattt

SEQ ID NO: 594787 - DNA, 83 bp, Homo sapiens
gacgcagccgcccgtggcgcttaagaaagaagtcggcgtggcacaagcctaatggaagatgatgaagagccaattgtggaaga

SEQ ID NO: 594788 - DNA, 80 bp, Homo sapiens
tcccccaacgaggaaggaaggagcagttggttcaatctctggtaagactttgaccccgacgcaggcttcagtgattgccg

SEQ ID NO: 594789 - DNA, 101 bp, Homo sapiens
aaggagaagatccatggttattagagaaagagaaaggatttctaagcaggaactccccaggttacaaaagtggatgaaaccagagggatcgcacatgttta

SEQ ID NO: 594790 - DNA, 100 bp, Homo sapiens
cctgctcatcggggctgcctggggccggctctttgggatctccctgtcctacctcacgggggcggcggtttctgaaggggctgcaggtgaggccggcccc

SEQ ID NO: 594791 - DNA, 50 bp, Homo sapiens
ggcctccttcccctccaaggcatgctgcactctcgagtggaccctgagga

SEQ ID NO: 594792 - DNA, 100 bp, Homo sapiens
gaagctgcttctgatttttataggaagggagttgatttactcctagaaggtgttcaagatattaataaggcagcggaaagaagaaatatgaatacggctc

SEQ ID NO: 594793 - DNA, 75 bp, Homo sapiens
attggaggcctacttgcagcatattacctatcaggagaggaggggtctctctttttggcatgtcggccctgttac

SEQ ID NO: 594794 - DNA, 97 bp, Homo sapiens
gaccggagactttggggcctaactagcaggtagagcagagccggagccaggtgcaggccattggagagaaggtctccttggcccaggccaagattga

SEQ ID NO: 594795 - DNA, 82 bp, Homo sapiens
cgtgcgcgtgcgcctgggggcaccgctgccgttccgagggtgagcagggcagcatttccttctcccactgctgctgagatgg

SEQ ID NO: 594796 - DNA, 83 bp, Homo sapiens
ctggggatcttcgcactatcccaaggtgtggacactgccagcggctgcagccgacttggaatgacctgggagacaaatacaac

SEQ ID NO: 594797 - DNA, 82 bp, Homo sapiens
ggtggaggacgaggggctccgggtcttccagagcgtgaagatcaagatcgggacccagacatggagctgcgggaagaagcct

SEQ ID NO: 594798 - DNA, 142 bp, Homo sapiens
aaagaagaagggcagcgcaaaggagcgggtttttgggtgcgacttgcaggagcacctgcagcactcaggccaggagggtcagcccaaggctgccccctcggtcactctgttcccgccctcctctgaggagcttcaagccaac

SEQ ID NO: 594799 - DNA, 82 bp, Homo sapiens
ctggaggtggctctcaccctggtgtttcccattaaacactaccaggacaaaatcaggccttacatccagctgccatcgcaca

SEQ ID NO: 594800 - DNA, 92 bp, Homo sapiens
cccagaccctggagcctcagttggaagcagccgatccagcctgcggagcctgtggggcagatcaacagtacaaattctgaagtttgtaaact

SEQ ID NO: 594801 - DNA, 99 bp, Homo sapiens
gtgagtcgcggtgggtcctcgcttgcagttcagcgaccacgggttgtgagtcccggcccagcccctccacccccctgcccccccgatgcgaccatgggc

SEQ ID NO: 594802 - DNA, 100 bp, Homo sapiens
gacgaaggggtagcgggagtgatgtctgtggggccgccggcggcccggcttcagactgtgccctgtccacggtgcctcctgcatgtcctgctgccctgag

SEQ ID NO: 594803 - DNA, 87 bp, Homo sapiens
tcaacgacgggctccccggctcggctctcgctgcggcagacgggctcccccgggatgatctacaggggcataaggaaatggtggcag

SEQ ID NO: 594804 - DNA, 83 bp, Homo sapiens
gatcctgctcctctgggttgaaacccgggcgccgccaagatgccggtggccaccgagtactaaattcacttgggaataaaaga

SEQ ID NO: 594805 - DNA, 90 bp, Homo sapiens
ccgtcctccatcagtgccatggaggccaccatcaccgaacggggcatcaccagccgacacctgctgaatgaagattatggaagagattcg

SEQ ID NO: 594806 - DNA, 82 bp, Homo sapiens
cggcagtgctgcaaccgctacagcagccgcaggaagcagctcaccttccaccgacaatgcagatcttcgtgaagactctgac

SEQ ID NO: 594807 - DNA, 85 bp, Homo sapiens
gatatacaagggtgtgatccaagctatccagaaatcagatgaaggccacccattcagtctctgagcctgttccatttgaaactga

SEQ ID NO: 594808 - DNA, 73 bp, Homo sapiens
cgaggaaagtcccaggatgactactgtgtcaagtatgctgccccacaaaaccaagcgaggccaggccgctctg

SEQ ID NO: 594809 - DNA, 75 bp, Homo sapiens
ttacctacgttggcggccccagaaggggaagatggtgaaaggaatgggaggtgctatggatttagtgtccagtgc

SEQ ID NO: 594810 - DNA, 75 bp, Homo sapiens
gggaccacggtcaccgtctcctcagaaacgttaatggacaccagaacggctactgcagagctgggctggacggcc

SEQ ID NO: 594811 - DNA, 96 bp, Homo sapiens
ggaggctcatgcgggatttcaagcgatgccttcaattaagttgcagagttctgatggagagatatttgaagttgatgtggaaattgccaaacaatc

SEQ ID NO: 594812 - DNA, 75 bp, Homo sapiens
ccttgccttgagtcagtgcgccgctctccagcccgcttgaacgtttggtgccctggttgtcagatgttggaaagc

SEQ ID NO: 594813 - DNA, 100 bp, Homo sapiens
ttgctgcccggccgcggccgcagcctgcaccccgtgatttaccacctgggccagctcgcacttcttggtgagaagccctaccactgcaactgggacggct

SEQ ID NO: 594814 - DNA, 112 bp, Homo sapiens
tccgccttctctgtcagctctttccccgtcagcatcccagccgtgctcacgttccagggtctccctccactgctgtagtaacccgggtccggggcctcggtggtgctcctga

SEQ ID NO: 594815 - DNA, 90 bp, Homo sapiens
ggcgacccggagtgatgagcccgcccgagtagcctctagttcgttagtcaaaacgtgaaaaaaaagacctgctttgccctgggaaatagt

SEQ ID NO: 594816 - DNA, 75 bp, Homo sapiens
ctgggctgaactcgcccatccctgagaaaagacaactggcagtgcagagtttagcatttaatttgaaagataaag

SEQ ID NO: 594817 - DNA, 88 bp, Homo sapiens
tccctggctccctcattaccgtcgccagcggagcgaacccgagagcgtggagcgggctgggccagtggaatgcagtagccctctgggc

SEQ ID NO: 594818 - DNA, 74 bp, Homo sapiens
aactgaacaaagggattaaattgtgagaaaatgttcctgagaaagatcttcatggaagactttttatcaaccgt

SEQ ID NO: 594819 - DNA, 73 bp, Homo sapiens
cgcccggcgcgcacaggctgtagcaggttccggcggacggcgttgcgaaggtgctggagaatctggtaaaagc

SEQ ID NO: 594820 - DNA, 90 bp, Homo sapiens
gtttagccaacccaaattaccttaattgcctggagctgctgaagactgctattgggaaagctggctacactgataaggtggtcatcggca

SEQ ID NO: 594821 - DNA, 111 bp, Homo sapiens
gggcaggagcaggcatgataacccaacattcaaggctgaagccgacgtagcttctctgaacagacgcatccagctggttgaggaagagttggatcgtgcccaggagcgtct

SEQ ID NO: 594822 - DNA, 83 bp, Homo sapiens
gaaaaataccatcttcaactgtacaagaagctttacacaatttccttaagtgagtgtgtccgcttgaaaccaactgacataca

SEQ ID NO: 594823 - DNA, 75 bp, Homo sapiens
cgggaggtgttcgagaacgaccccgagacggaaaactttattctcaagagatttctcattccgcagaaataagga

SEQ ID NO: 594824 - DNA, 74 bp, Homo sapiens
caccaccaccacccccagctactacacaaaactaccagattgggaaaatgaggtacgttagtgttcgcgatttt

SEQ ID NO: 594825 - DNA, 100 bp, Homo sapiens
gcattctccagggaaaggatgacatatttttggacctgaaacagaaattctggaacacctatatgaatgtatgacaacatgtccacaatggtgtacataa

SEQ ID NO: 594826 - DNA, 50 bp, Homo sapiens
agaaaatccttgtgcaaataaatgcttaaagactgtgcagtctttgtaac

SEQ ID NO: 594827 - DNA, 100 bp, Homo sapiens
ctctgatggcgtttctcagacaaatgataagcatggattcctggttcattcttgttctgctcggcagtggtctgatatgtgtcagtgccaacaatgctac

SEQ ID NO: 594828 - DNA, 83 bp, Homo sapiens
cgccgagcccgacctcgggcgccccgccggtcacctccgcgcggacaccaggatgccggctccaggagcagcagtggaggtcg

SEQ ID NO: 594829 - DNA, 100 bp, Homo sapiens
tgccattcaaggaattgatgatgatgctacaagccagcttgcaagaaattggggatcggaatccatgtcagtgaacgcctcacatggaaaaggattttcc

SEQ ID NO: 594830 - DNA, 82 bp, Homo sapiens
ctggatttccaaggaagaatttcctctgaagcaccggagcatcagatccatgctgctgctgactcggagccccacagcttgg

SEQ ID NO: 594831 - DNA, 100 bp, Homo sapiens
acagatagtaaagatgatgatgacattgacctctttggatctgatgatgaggaggatgtggggaaaagagaatttgtcgaagatggtgaggtagatgaga

SEQ ID NO: 594832 - DNA, 90 bp, Homo sapiens
ttggatgtggaatcaatttttcttacttgaagaatatacaggatctgattatcagtacgtaggcaagtttgccaccgtttacaaggccag

SEQ ID NO: 594833 - DNA, 99 bp, Homo sapiens
tcggcggccgctctgcctgcgcgctgctcctgctctgctacctggtagctacagcaagctgggtagcaggcagatccaaaggatatcatgaagtttcca

SEQ ID NO: 594834 - DNA, 88 bp, Homo sapiens
cttatcatctgtcaacatcatcagtttttcgattagattcgttgggcttttgccagctctttttagattgtcctcttgagacctgttt

SEQ ID NO: 594835 - DNA, 100 bp, Homo sapiens
aaagagacctctacttagctcagcaattcttaccttacttctgctggatgtgtctaggagattggaagactcatggcagtgaatactatgagtgcagtcg

SEQ ID NO: 594836 - DNA, 75 bp, Homo sapiens
tacgttttctcaggtcctgcagctgggagacggcacaggacactaaaccagtgtgtaaaggttgccataaaggac

SEQ ID NO: 594837 - DNA, 82 bp, Homo sapiens
gactatcggggccgcactgtggtattcgccggcacgcgaagtggccgcatccgcaaggctgaccccgcactacatctaccca

SEQ ID NO: 594838 - DNA, 108 bp, Homo sapiens
cgcagggcctgcagcgggagctggacggcgagcgcgagcggcgcgagaaaggagtaccctgacttctaccggaagctctacggcctcttggacccctctgtctttcac

SEQ ID NO: 594839 - DNA, 82 bp, Homo sapiens
cccaagcccccacagctactccaacccaaacaacaaccaagccagtttaatgattcgacggaggcgccttgcacgacttgct

SEQ ID NO: 594840 - DNA, 96 bp, Homo sapiens
caaaatccaagacatacaactgaagacaagtgagccagatttcacctctgcaaatatgagagattctgcagaagagcagaaagaccatgggtttga

SEQ ID NO: 594841 - DNA, 128 bp, Homo sapiens
ctgcgactcaggctccggcgtctgcgcttccccatggggctggcctgcggcgcctgggcgctctgaggctcaggccacagggtcaccacatacatcgcccacccatggaggcggccggccaatgccca

SEQ ID NO: 594842 - DNA, 82 bp, Homo sapiens
agcacttcaacgctggacgaaggtgatcagcccatgacctaaacctccagacaaaataaaacggaaaatttgctagaatcaa

SEQ ID NO: 594843 - DNA, 75 bp, Homo sapiens
cttcagcaggatcctgatgccaaagtagcttgtggcgcctactggctgaagcagctcttcagaaactggatctat

SEQ ID NO: 594844 - DNA, 100 bp, Homo sapiens
ggattttctctgcgttctgctcctactgcttcgcgtccagacagcaatggctgccatccggaagaaactggtgattgttggtgatggagcctgtggaaag

SEQ ID NO: 594845 - DNA, 98 bp, Homo sapiens
aggccttcgagaagatccctagtgagactttgaaccgtatcctgggcgacccagaagccctgagaggctctgcatacaaactggtctgctactacacc

SEQ ID NO: 594846 - DNA, 117 bp, Homo sapiens
cccatcctgccgtccttctccactttcgccagcccgtgccgcgagcgcggcctgcaggagggagtgcatccgccccaacccttttccccctcgtctcctgtgagaattccccgtcgg

SEQ ID NO: 594847 - DNA, 100 bp, Homo sapiens
cgaggagttgctgctgctgaggcgggagcggcgggagcacagcctggagggtctaaaattcccaggactccacagctttgcaccagataagcctggagga

SEQ ID NO: 594848 - DNA, 75 bp, Homo sapiens
tacagcatctgtcctcatagcaggtaagaaggtgttttaccctgtggtgttcagtctttacaatcctgccattgt

SEQ ID NO: 594849 - DNA, 117 bp, Homo sapiens
gctcaggtcttctgtgaggaatctggattgtcacctttgctgcaaaaaattacgggtggattctccacagttttcctcgtgcgtactcacggtggaatccgatgtgcattgaagcga

SEQ ID NO: 594850 - DNA, 82 bp, Homo sapiens
ggtggagccaccagcctctccttgattcatggaaacagctattctcataaagtggacatcttttctttaggcctgattctat

SEQ ID NO: 594851 - DNA, 87 bp, Homo sapiens
ggaaaacaacttcgagggcagagaacatccaatacttgggcaacccttttttgtacttcatccctgcaagacgaatgaattcatgac

SEQ ID NO: 594852 - DNA, 112 bp, Homo sapiens
cgcggggcgacgctggctgcagggacccggtgacagcgtgagagacaatgcagatcttcgtgaagactctgactggtaagaccatcaccctcgaggttgagcccagtgacac

SEQ ID NO: 594853 - DNA, 51 bp, Homo sapiens
ataactcagttcctggtagattgatgacgtagctttgccaaagacttagaa

SEQ ID NO: 594854 - DNA, 119 bp, Homo sapiens
cagacatcaagctctttgggaagtggagcaccgatgatgtgcagatcaatgacatttccctgcaggtaaagtggaattgcatgggaaaatcatggaagttgattactcagtctctaaaa

SEQ ID NO: 594855 - DNA, 75 bp, Homo sapiens
gtttcagccagtgcatgaccttactattggtgccgtgagcgatgtggagatgcaggaacactatgatgagttttt

SEQ ID NO: 594856 - DNA, 98 bp, Homo sapiens
gaagaggacgacgacgacgaggaagaggaggtttctgagaatgtttctccatcccagagagatgaagtaattcaatggctggccaaactcaagtacca

SEQ ID NO: 594857 - DNA, 131 bp, Homo sapiens
ccgacatgttcacgcacgggatccagagcgccgcgcacttcgtcatgttcttcgcgccctggtgagaagccctaccactgcaactgggacggctgcggctggaagtttgcgcgctcagacgagctcacgcg

SEQ ID NO: 594858 - DNA, 97 bp, Homo sapiens
aagcaggcgaacccgcggcgcaataacgcaaatcagccggcaccaggagcagttcatccagatgctgaacgagccccctggggagctggcggacatc

SEQ ID NO: 594859 - DNA, 100 bp, Homo sapiens
cgaactgctttggagataatgatcctattgatgtttgcgaaataggctcaaagttacgaccacctcagcctccagtgtatctctttgtatttgatgtgtc

SEQ ID NO: 594860 - DNA, 100 bp, Homo sapiens
atgatgtattgagtaaaaggaacttcggtacacaggcctttagtgatgtggtggtaagatgtatggtgaatcatccatgataatggaaatagaactccag

SEQ ID NO: 594861 - DNA, 83 bp, Homo sapiens
gtggagtgtaggtcatatcgccgcggtcttgaggaccggcccagctcaggctcctggggcagcggcgaccagagcagctcctc

SEQ ID NO: 594862 - DNA, 100 bp, Homo sapiens
ggcctgcacgcggggcgcgggccccgaaggctctccatcgaaggcaacattgtgagttccttcggggttactcctgcagtaggtggactatcatctggga

SEQ ID NO: 594863 - DNA, 51 bp, Homo sapiens
gtagagaaagaaggcggagcagagttactgtgacaacaacatactttggcc

SEQ ID NO: 594864 - DNA, 83 bp, Homo sapiens
ctttttatttttccccaattcagcagagaatattttcaagggggggacccagacatggagctgcgggaagaagcctggtctcc

SEQ ID NO: 594865 - DNA, 100 bp, Homo sapiens
gggccggccccggggaccacaaccgctccgactgcggcccgcagccgccgccgccgcccaagtgcgagggctcctcgcacctaccccagcaactcaaatt

SEQ ID NO: 594866 - DNA, 98 bp, Homo sapiens
cctggctttgacgccgagagctacacgttcacggtgccccggcgccacctggagagaggccgcgtcctgggcagagacaccattcgcttttcacccaa

SEQ ID NO: 594867 - DNA, 100 bp, Homo sapiens
tggctggaacacacatcagtcactttctagacccaaaccattatcagcagttccaaagcaagttgtaacaggaactgtgttgacaagatctgttttcatc

SEQ ID NO: 594868 - DNA, 100 bp, Homo sapiens
ctactgacatgaatgaccagaatctagaagagccatccagatatgtgctgttggcagcagcggtctgcacaaaagcaggaaaggctattgtttctcgaca

SEQ ID NO: 594869 - DNA, 100 bp, Homo sapiens
aaaaactccaaactcctctccaccagcgccaagaggtccgcgggagagctgtggggcttggtgagtgtttcgtggcctctcgggttggtcagcaccccca

SEQ ID NO: 594870 - DNA, 83 bp, Homo sapiens
ttcagacagaacaatcagtgatgaagatgaatcggtcttcccaatgttgggaagagcagcctgatcaatagcctgaagcgcag

SEQ ID NO: 594871 - DNA, 71 bp, Homo sapiens
gcgatgtgtagtgccttccatagggctgagtctgggaccgaggtgaagaagctaagtctcagaaagataac

SEQ ID NO: 594872 - DNA, 100 bp, Homo sapiens
gtcaccaagagaggctgagagaccagttccagctttacatgtggtttggctggggctctggcctccaacccggttgatgtggttcgaactcgcatgatga

SEQ ID NO: 594873 - DNA, 98 bp, Homo sapiens
aactacctggtggtggctgccatgatgatttccattgtgggatccatgttcactagcggccttacagaaagtactcaaaaagaagttcgaatagttgg

SEQ ID NO: 594874 - DNA, 100 bp, Homo sapiens
cttaaactccctaaaatctccgcagctctggttcctgttgcggccggctgaccggttccctgatgtgttacctgcttctgctactgatccaaactgcaga

SEQ ID NO: 594875 - DNA, 50 bp, Homo sapiens
tattgcttgtgaagactgctccaacacctccagctccctctcatgtatgg

SEQ ID NO: 594876 - DNA, 101 bp, Homo sapiens
ctgcttgaaaggagaagacttggattctcagatagaagaggagttatgggaagaagaatttattgaacgctgtttccaagaaatgctggaagaggaagaag

SEQ ID NO: 594877 - DNA, 100 bp, Homo sapiens
cgaccccgtcccgaccctggccgccccgagcggagcctggagaaattcggaactatccgggcagatttgattgaacagatgagattcaaacagagactga

SEQ ID NO: 594878 - DNA, 74 bp, Homo sapiens
aggacttccaaggagagcatgtcggaggctgatcgcgcccagaagtattaaaggtggaagaaggtccatatctt

SEQ ID NO: 594879 - DNA, 100 bp, Homo sapiens
ccgccaggccaccaccggccgcctcagccatggacgcgtccctggagaagggagaccaaattttgaggaaggtggaccaacatcagtagggagaaagcat

SEQ ID NO: 594880 - DNA, 82 bp, Homo sapiens
gtatgcaagttttcacttatctcgaaagcctatcagcatagttaagcacatggattaattgatgtatgttgagtttatggag

SEQ ID NO: 594881 - DNA, 98 bp, Homo sapiens
ctcgcctccggaggcggcgaggagcggcggtaagactttgaccccgacgcaggcttcagtgattgccgcggatcagaagcctgagcactttggctcga

SEQ ID NO: 594882 - DNA, 82 bp, Homo sapiens
tgtgcctgctggagtacccccgggggaagaggaagaagggctccaccatggagcgctggcagcgtctatcccagactaccgg

SEQ ID NO: 594883 - DNA, 100 bp, Homo sapiens
catgtgggccctgcacgagctcaaaggacactatgcaatcacccgaaaggtggagaaaatcagaattcttttgcgtaatgttgatctgatggatataaag

SEQ ID NO: 594884 - DNA, 100 bp, Homo sapiens
ctcatgctcagtttggttctgagtctcctcaagctgggatcaggtgcatggctgcctcctaatcccatagtccagaggaggcatccctaggactgcgggc

SEQ ID NO: 594885 - DNA, 105 bp, Homo sapiens
ggagaagctgtctctgatccgcaagcatgctcagaccttcattgctctgtgtgccaccgaaccaaaaacttttgctagaaaatcagcttttacgagagaaaactc

SEQ ID NO: 594886 - DNA, 95 bp, Homo sapiens
tgaagactctagtccttcagaataacctaatccccaaagtgtgtccagagttatgcaacttgacccaggtttactaactgtggaatctccagaat

SEQ ID NO: 594887 - DNA, 98 bp, Homo sapiens
cgccatcgttgctgccttcttcgtcaagctgtcggaaaaggtaacagaagatggaactcgaaatcccaatgaaaaacctacccagcaaagaagcatag

SEQ ID NO: 594888 - DNA, 82 bp, Homo sapiens
cggaattccagtctctgtggacaaaatgacccagttggcgagctttagcccctctcctccttctccgtaccctaccactgtt

SEQ ID NO: 594889 - DNA, 82 bp, Homo sapiens
aatgaatccttctagagacgtccacggaccaagaatcgccttcagccctgtctggtgcatccttggcagaaagtgaggagga

SEQ ID NO: 594890 - DNA, 50 bp, Homo sapiens
cagagtggagccatggctagaggagatcgggcgcatctccattgagatga

SEQ ID NO: 594891 - DNA, 100 bp, Homo sapiens
atgaggaccagggagggaaatatgtcatgtatcccatagctgtgagtggcgatcacgagaacaataagttaagggaagaaagtcggaggctggctttggc

SEQ ID NO: 594892 - DNA, 100 bp, Homo sapiens
gctgcggcgcagggcgaggcggaggcgcccaccctctatctgtggaagactgggctggtgaattaccatatctccgtcaagtgcagtaaccagttcaagt

SEQ ID NO: 594893 - DNA, 100 bp, Homo sapiens
gactaacttccatggcatggatcttacccgtgacaaaatgtgttccatggtcaaaaaatggcagcccgagatgatcggccactacctgggcgagttctcc

SEQ ID NO: 594894 - DNA, 82 bp, Homo sapiens
ccttggtctgggccgcttcttcagctctgagaccaccgcagcccactccctagacacatgcctcactcctgtcagcagttcc

SEQ ID NO: 594895 - DNA, 100 bp, Homo sapiens
gtcagagcaccagtcagaacagcaacagatgataccaaacctaaaaccacatgtgcatctaaagacagttggcacgggcaccatgactcctgtgaggatg

SEQ ID NO: 594896 - DNA, 97 bp, Homo sapiens
ggctcgtctggtgctatcctgtcatacatcatgtgtgtggcatggattccgtgaaggaacaacacctaaacccaagagggcagctgttgcagcatcc

SEQ ID NO: 594897 - DNA, 98 bp, Homo sapiens
gtccctcagcccttctgagctctgtgctgaacaagagtcctgtgtatggaaactcacatgagtcagctcagtctagaagggtagtaatttctcataat

SEQ ID NO: 594898 - DNA, 100 bp, Homo sapiens
tgtgcagattgccagtctaaagcaacttcgtgtacgacgacgggaaccaacccctcctaccggcaaagagggagaaaagaccctatcagcagtagacatg

SEQ ID NO: 594899 - DNA, 73 bp, Homo sapiens
gttgatcactgaaaatgatttatgcaagtttaaggcctggtgcgaaacaaacctgcggaggtgcatcagcgag

SEQ ID NO: 594900 - DNA, 74 bp, Homo sapiens
ccatgatctccttaacggacacgcagattcctctgtgacgagggtgcaggtatctctggggactacatcgatcg

SEQ ID NO: 594901 - DNA, 141 bp, Homo sapiens
cttctgaagaacaaatcagcctggtcaccagcttttcggaacagcagagacacagagggcagtcatgaggtggaaccgtcccaaaatgtcccttgctcagaagaaggatcgggtagctcaaaagaaggcaagcttcctcag

SEQ ID NO: 594902 - DNA, 75 bp, Homo sapiens
tgaatttcccatatgatgatgacttggaaaaggagagtgacacacccctccagcaagtatccattgaagaaattc

SEQ ID NO: 594903 - DNA, 88 bp, Homo sapiens
aagtccgtggacgacgtgctttcccattttgctcagcgactgtttgatgacgtcccgcagacaaagctctgatggcaccaaatcttga

SEQ ID NO: 594904 - DNA, 100 bp, Homo sapiens
aaacacttaagaataaactgtgcagatatcgcaaacggcaccagttcaggggggtaccgcccgcctcccagaaccaaagaagtcatcatcaatggccaga

SEQ ID NO: 594905 - DNA, 100 bp, Homo sapiens
gctccgtggcggcggcgaccgtgacgagaagcccacggccagaattagaagtgcgtctcaccaaccagccaagatgaacatggtgaagaggatcatgggg

SEQ ID NO: 594906 - DNA, 83 bp, Homo sapiens
cagctgctcccttcgccttcgccctttccacctcgcggcagttcgcagaaaaatatggctcaggagactaaccagaccccggg

SEQ ID NO: 594907 - DNA, 82 bp, Homo sapiens
ggagtgcgtgggggaccggctgttggcggaccatggtgaatccgggcagcagctcgcagccgcccccggtgacggccggctc

SEQ ID NO: 594908 - DNA, 83 bp, Homo sapiens
agaccctggagcctcagttggaagcagccgatccagcctgcggagcctgtggggcaggtgttgacttcaaaatcaaaactgta

SEQ ID NO: 594909 - DNA, 100 bp, Homo sapiens
caaacaagtgtaatcgtttatacatacccacaggttaacacagaaatctgcctcctgggccatgccgcttctaaggcctgtttcttctcatgagccccag

SEQ ID NO: 594910 - DNA, 100 bp, Homo sapiens
tgtccatcaaacatcttccaccacagcttagaggccgccctacagaagctgaaggcagaggagtatgttcaacagaagagggagctcctgaccctctatc

SEQ ID NO: 594911 - DNA, 82 bp, Homo sapiens
atagagatgtgatgttggagaactacagaaacctcgtctccctgggtaaagaaactgcggcaatgaaagctgatctcctgag

SEQ ID NO: 594912 - DNA, 101 bp, Homo sapiens
aacagccagacgagagcttcagccatcacgaggatgatttcggaacctggagaaaattgagaaagatcagtctaaagaaaaggagaagaaagtgaaaaaaa

SEQ ID NO: 594913 - DNA, 100 bp, Homo sapiens
tggcgctggccggatggaaatcctaatgacagtctccaaattcgcctccatctgtaccatgatggcccactgcgtgaccttggttcagctgtccatttcc

SEQ ID NO: 594914 - DNA, 100 bp, Homo sapiens
gtcaatatgtattgtggcattcaaatcctagcactctgggagagcttactgaaacaaatgcaggtatcaagtgcttggactccatgtgctgtttcccgga

SEQ ID NO: 594915 - DNA, 100 bp, Homo sapiens
aaggtccttagggaggaccccagacaccggagactgggaaatgggatctgaaacttgcccacccttcgggatattgcaggacgctgcatcatgagcgaca

SEQ ID NO: 594916 - DNA, 75 bp, Homo sapiens
ttggtattgttggattgccaaatgttgggatgaccgagtgggagacagcagcaccagcggtggcagagaccccag

SEQ ID NO: 594917 - DNA, 100 bp, Homo sapiens
ggctgggatgaaaatgtctactatacagatgaggtttatataactttccaagacaaggaagttgtgcaaagcctcacagctactaagaggctgggctggg

SEQ ID NO: 594918 - DNA, 100 bp, Homo sapiens
cctcaggctgtctgaaacctggctcagaaattatcaggaacaggagtacagctgtgtagtaaagatgccttctggtgaatttgcacgtatatgccgagat

SEQ ID NO: 594919 - DNA, 82 bp, Homo sapiens
cgcctccgaagatgggggatttctacgacccggagcacccgacccctgaaggcttcgtgacggagttatcagagacattgag

SEQ ID NO: 594920 - DNA, 98 bp, Homo sapiens
ctgcgaaggccgggacccggttccccggcccacagtgggggtgtgcaaacccgagagaactggttctgctaagccaatattctctagaatgagcacaa

SEQ ID NO: 594921 - DNA, 50 bp, Homo sapiens
gccgccaccacccactccggacacaggtactgtctgatgagcgtgaaagg

SEQ ID NO: 594922 - DNA, 51 bp, Homo sapiens
tggggttccccagagcccgcgctcttcccttggaccagacgcttcctcgcc

SEQ ID NO: 594923 - DNA, 101 bp, Homo sapiens
agagttttctgtcctccttgtttgcacggagcagcaaacgcagagacaaaagaaacgggccccgactggatgcagcagtctcggccctggctgctctatgc

SEQ ID NO: 594924 - DNA, 100 bp, Homo sapiens
ggaggtggctctgagggcagggacgtgttggacacgctgactttgtaggctccgccaagaggcgccgcaggagagaatgtaactggtcactacatttccc

SEQ ID NO: 594925 - DNA, 75 bp, Homo sapiens
attgactgctgctggggctgggctcgccagtcttggggacagtgtcagccctcactaagcagtcttttgatcaca

SEQ ID NO: 594926 - DNA, 82 bp, Homo sapiens
cttggactgagtcctgcaggacacagggagttctgggaaatcgttcattcatttacagatgaacagaaaagactcttcttgc

SEQ ID NO: 594927 - DNA, 75 bp, Homo sapiens
agctaagttggataacttggatgaagaatgggccacagaacatgcctgccaggtcgatggccaggtggtcttcat

SEQ ID NO: 594928 - DNA, 75 bp, Homo sapiens
caaagttttgcagatcttcaacaagaggacccaggagaaattcgccctcaaagtcttgagtcaccacgtccgaat

SEQ ID NO: 594929 - DNA, 100 bp, Homo sapiens
gactccatcctctacaaagctatctccggggtgctgatgcccactgtgctgcaggcattacctgacaggtgctggaggatgaggcccgggagcagggccg

SEQ ID NO: 594930 - DNA, 87 bp, Homo sapiens
tcctcctccgatacttcccgcagtcgcctacgaggacaagcagaaactcaagcggaccgagatcatcagccgctcctggttcccctc

SEQ ID NO: 594931 - DNA, 87 bp, Homo sapiens
tccccagagccaggcacaaggatgaacattctgccgaagagaacaagacgtgtgaagactcaggatccaacgcatgcctggagtgga

SEQ ID NO: 594932 - DNA, 100 bp, Homo sapiens
aacacgagaccagtacaagcaaatctgtttttgagcctgaagattcttcaatagtagataatgaggaaatgactataccctggtgcttaaggagagcgga

SEQ ID NO: 594933 - DNA, 99 bp, Homo sapiens
ttggataaattatttaatctccctaaacctcagtgtcctcatctgtgaagtgaggattggatagctttagtcaaagcagctgctgcagctgcagccaag

SEQ ID NO: 594934 - DNA, 80 bp, Homo sapiens
ggaagtcttgaagaatagagccataaagaaagcaaagcgcagaaatgttggatttgaaatgtgggccagtttctggcaag

SEQ ID NO: 594935 - DNA, 78 bp, Homo sapiens
cgccgcgcccgggatgtattcgtccccgctctgcctcacccagcctcaaggcacttctaggacctgcctcttctcacc

SEQ ID NO: 594936 - DNA, 79 bp, Homo sapiens
gaccgggaaggagcatcccaggacctaccagaatctgtactatactggcaattgctggagaagattttgcaattgttgc

SEQ ID NO: 594937 - DNA, 100 bp, Homo sapiens
aacaaatgcgacgtggtcgtggtggggggcggcatctcagggagtaccctgacttctaccggaagctctacggcctcttggacccctctgtctttcacgt

SEQ ID NO: 594938 - DNA, 75 bp, Homo sapiens
cggcggaggggagccagggcgccccagcaggataaaaactttgaatctggtcctaggattaaaaagagcactgga

SEQ ID NO: 594939 - DNA, 100 bp, Homo sapiens
gaaaagctggcccgtgacctgaaggctgtcaagtatgtggagtgttctgcacttacacagggcaagcaggaggacttcaagacgacagttctggagggta

SEQ ID NO: 594940 - DNA, 98 bp, Homo sapiens
ctgaaggcggcctcatcacagtcggaggcagacctcaacaccaacatcgaggatgaaggcagctccttctatggggtctccagccagtatgagagccc

SEQ ID NO: 594941 - DNA, 96 bp, Homo sapiens
ataacactgtacaagctttcaaagtcaatctccccaggacctggtgcaccccatgtctcctgcagggtgaccgctggctggcaaagcctgtccctg

SEQ ID NO: 594942 - DNA, 100 bp, Homo sapiens
tggagctggggagatcccggcaccttctgagacacgccatctggctgctgtgcacaggcgctcgtgaggctgccttccggaacattaagaccattgctga

SEQ ID NO: 594943 - DNA, 101 bp, Homo sapiens
cgaggagatgctggatgttaaaatggaggacatcaagactgatgggaagaagagttactataagaaggtgtgcattgatgcggaaaccctggaagtggggg

SEQ ID NO: 594944 - DNA, 83 bp, Homo sapiens
accatgccgtccgccttctctgtcagctctttccccgtcagcatcccagccgtgctcacggcttctgccctaagaagatggcc

SEQ ID NO: 594945 - DNA, 80 bp, Homo sapiens
gtctgatgggtggagacctcacgtctggtgcaggcaccagtgcaggtggaagaactcagtaaaatactccaacgtgggag

SEQ ID NO: 594946 - DNA, 75 bp, Homo sapiens
gcagcgccgagcgcggcccgggcgccatcgagccttggcggcggacgtgcaggaacttgctactaccagcaccat

SEQ ID NO: 594947 - DNA, 50 bp, Homo sapiens
ggtgaatttccatgtcaacatagtcctggcatctccctacctggatgttc

SEQ ID NO: 594948 - DNA, 100 bp, Homo sapiens
tcaacgactccattgccgaggagctgaacaagaagttggccaacaaggaaaagaagatttttcagatcccctggatgcatgcggctagacatgggtggga

SEQ ID NO: 594949 - DNA, 100 bp, Homo sapiens
tactttgccgaagaggttcagtgcgaaggcaacagcttccataaatcctgcttcctgtgcagcaaccactgagaaaacggaaccgaatagtcaagaggac

SEQ ID NO: 594950 - DNA, 100 bp, Homo sapiens
gctgtctctggcctcatttctgatcgggaagcctcatctagcccagaggatcggaatgacagattttacttcagcacttaaatccccgaggagtctgccc

SEQ ID NO: 594951 - DNA, 108 bp, Homo sapiens
ggagctgggtcagtccgccgctcaccccgcggccgcaccttcccgccttctcagagttgcatgctgagaatttgaaaaatgaagatgatgtagacactggactattag

SEQ ID NO: 594952 - DNA, 100 bp, Homo sapiens
tgcctttctggacacagaagtatttgtgacaggctcagtttatgaacctcttaaaagcattaatcttccaagacctgataatgaaactctctgggataag

SEQ ID NO: 594953 - DNA, 75 bp, Homo sapiens
ggctgcgcggcggggctgaggcggccgcggggcccgagcgcaggcaaaatacatatctcagtgcattgatgagat

SEQ ID NO: 594954 - DNA, 100 bp, Homo sapiens
tatgaaatatgggagacgacagaccgtttgtgtgcaatgccccgggctgtggacaggtgaccaagaatatggcccaggtgaccaaagccctggacaaggc

SEQ ID NO: 594955 - DNA, 96 bp, Homo sapiens
cgtgaacgaagattcgaaaagccacttgaagaaaagggtgaaggaggcgaattttcagttgatagcccactgtacaatttctaccactacttctac

SEQ ID NO: 594956 - DNA, 75 bp, Homo sapiens
gaacttcttcagaattagaaaggagctgcttcccaataaggaaacatggccacagatgtctttaattccaaaaac

SEQ ID NO: 594957 - DNA, 51 bp, Homo sapiens
ggaggaggacgcggtggaatgggattggaagtaaaggaagatcagagaaaa

SEQ ID NO: 594958 - DNA, 100 bp, Homo sapiens
tgcagaaggagggggagaacttggagttcatatcacggatgataccatcggggaccttaagaagctgattgcagcccaaactggtacccgttggaacaag

SEQ ID NO: 594959 - DNA, 100 bp, Homo sapiens
ctcgtcagcggctccctgcccttcgacgggcacaacctcaagggtgaactgccccatgatcaagatgtggtagagtatatcatgaatcagccaaatgttg

SEQ ID NO: 594960 - DNA, 101 bp, Homo sapiens
ttccaatatcagtctatcttttattcaacgtttttcaacacatgtcctggtaatgaacaacttaatatagaaaatccttcatttacatcaacccctatttg

SEQ ID NO: 594961 - DNA, 99 bp, Homo sapiens
gttttggcagctgccaaccctgtctacggcaggatcaagcttcaggagtctccggaagacatgcctgcagggcagacaccacacacagttatcctgttt

SEQ ID NO: 594962 - DNA, 100 bp, Homo sapiens
gattctgatgacctcattagcatgggatccaacgacagtaagtacagaatttaagcagaacggtgggaagccctatttgtctgtgattacggggagagga

SEQ ID NO: 594963 - DNA, 90 bp, Homo sapiens
agaagaccggttccagccgaacatgacgatctgtgactttggcctggcccgtgttgcagatccagaccatgatcacacagggttcctgac

SEQ ID NO: 594964 - DNA, 100 bp, Homo sapiens
catgactcccaatggcaccgaagccttgataaatttgctgaagttccttatgtcaaatgagactgtacttttggccaaacacaacatttttacattagcc

SEQ ID NO: 594965 - DNA, 73 bp, Homo sapiens
gaagctatggaaactcatctgattccagatatgatgatggaagaggccttatgtttgatcatcggccaaggtc

SEQ ID NO: 594966 - DNA, 75 bp, Homo sapiens
gcccgccgctcgcgccgggcccgtggccggtgccggtggtggtgtgcacattgagccccggtatagacagttccc

SEQ ID NO: 594967 - DNA, 75 bp, Homo sapiens
aagaggtgggcaagatcctgtgcactgactgcgactgttctgcgatgaccacaacaaggtaccggcccacctggg

SEQ ID NO: 594968 - DNA, 100 bp, Homo sapiens
cccggacagaagatggtgcagaagaaaccagccgaacttcagggtttccaccgttcgttcaagtatgatgagctgccgcactacccaggcatcgtggatg

SEQ ID NO: 594969 - DNA, 100 bp, Homo sapiens
ccgagcaggaggcgccatcatgatggcagcctatttcacccactcaaacctgcagcctgtgcacatgatcctggtgctgcgtacagccctcaatctgttc

SEQ ID NO: 594970 - DNA, 93 bp, Homo sapiens
agattcgcagtggtcgcttcttctccttggccctccacgcccttcaggaggagcaggccagactcaagatgaggctgtgggacctgcagcagc

SEQ ID NO: 594971 - DNA, 108 bp, Homo sapiens
aaggcagccgcggatcgccgcgctcagcgacaaacaagttatgaagacagtatggagtttccagaccatagtagacatttgctacagtgtctgagcgagcagagacac

SEQ ID NO: 594972 - DNA, 100 bp, Homo sapiens
cccacgactgcctgggacctggccaagggctccacacaccaagaccaaggctgaagacttgaagatgctaatcagacacatggagcactgggcacatagg

SEQ ID NO: 594973 - DNA, 98 bp, Homo sapiens
agcattctccagggaaaggatgacatatttttggacctgaaacagaaattctggaacacctatatgatgaataatacggcagctagtccaatgtctac

SEQ ID NO: 594974 - DNA, 100 bp, Homo sapiens
aacattaagaggcgtcggtttgagctgctctcagaacctcagtctggggacctgacctctgtcactctcatgaaagacgatgccccgaattcccaccctg

SEQ ID NO: 594975 - DNA, 104 bp, Homo sapiens
cgggctgtctgattctccttcgctgtggcgggaagatggccggatttgaaggtgtccctggccagtgtccttccacctgtccacaagcatggggaacatcttcg

SEQ ID NO: 594976 - DNA, 75 bp, Homo sapiens
ttatgagggtatcttcaagacgctaagctcaaagcggaacggggccgactacgctgtttacatcaacacagccca

SEQ ID NO: 594977 - DNA, 106 bp, Homo sapiens
atccgggccagccagagctccccaggggacttctccatctctgtcagatcacctcttaggcagagcagtgggcgcagatgccatggcgggaagcaggcctttctga

SEQ ID NO: 594978 - DNA, 87 bp, Homo sapiens
actaccccagacctcatcatcaactccatccaacacttcgtttactccggtttggacttctcccactgagcatgacaagcactcgaa

SEQ ID NO: 594979 - DNA, 83 bp, Homo sapiens
cttggactgagtcctgcaggacacaggcatgactacggggccccccaggaggcgactctcggggccaacaaggtgatcgaagg

SEQ ID NO: 594980 - DNA, 73 bp, Homo sapiens
acttgtttagattcatcatccaatcccgagtgctctacttgagttgcatttgctggtctggcctttgcgtcct

SEQ ID NO: 594981 - DNA, 96 bp, Homo sapiens
gtgcaatgccccgggctgtggacagatcctttacctcctgctaggtttggagtcagtaaagagaagacgacttcaaccagcttgcatgtttggtgg

SEQ ID NO: 594982 - DNA, 108 bp, Homo sapiens
aattgagactgacaaagctgtggttaccttagatgcaagtgatgatggaatcttggccaaaatcgtgggtaagcttgatgattaccaggaacgaatgaacaaagggga

SEQ ID NO: 594983 - DNA, 100 bp, Homo sapiens
taaagatggcggcttcctagtgagtcggcggctgatttagaaggaggttcaggctacggtgagccgaagggtgattctgggggcccacttgtctgtaatg

SEQ ID NO: 594984 - DNA, 100 bp, Homo sapiens
acttattggcatgatggagtgacaggaaaaacagctggcatggaagggaagcaaaggtgtctaccagtaccactggcaaagccacaatgtcaagcacagt

SEQ ID NO: 594985 - DNA, 96 bp, Homo sapiens
tgaagatcaactactcctgcgaggaaaaggctgtgccttcctcacctactgtgccagggattccgccatcaaagctcagactgccctgcacgagca

SEQ ID NO: 594986 - DNA, 50 bp, Homo sapiens
gaagatggctatttcagaatagtgaagttattgccagtggactgtgagag

SEQ ID NO: 594987 - DNA, 127 bp, Homo sapiens
gagattcaggccagagttgtgggccgccgtcggcagcaagaacagagagagaggtggacagatctgagagatactgagatttttgatgaaattgagtcatgaaactgtaaccattgaattgaagaac

SEQ ID NO: 594988 - DNA, 75 bp, Homo sapiens
agcagcagcagcgcgtctccttcagctgacagcagccatggcgagcggcagtggagacagcgtcacccgtcggag

SEQ ID NO: 594989 - DNA, 82 bp, Homo sapiens
atgcaacagccacggaagattaagcaggggagagaatgtagaagatgccttccttgaggctgccaagaaaatctatcagaac

SEQ ID NO: 594990 - DNA, 75 bp, Homo sapiens
gctgcatcgacctcgacttatctgtaagcagcggaaggatctctctaggagctgacactcgaaccttcacgaccc

SEQ ID NO: 594991 - DNA, 113 bp, Homo sapiens
gggtattggatgattggtagctaagactcccgaatacttcagaagtggggaaatggcgtccgacctccgatcatgaacgggcccctgcacccgcggcccctggtggcattgct

SEQ ID NO: 594992 - DNA, 82 bp, Homo sapiens
gtctgacttccagttccagcgtacgaggtctgggatctgccgatatgggggatatgaagacccctgattttgatgacctcct

SEQ ID NO: 594993 - DNA, 74 bp, Homo sapiens
atggaccccgatggtgtcatcgagcccaggagttctgtttccgaagaaagagccagatgattctagagatgagg

SEQ ID NO: 594994 - DNA, 51 bp, Homo sapiens
tggagtgcccccagcccagagcccgactagacgcttgaagcaaagctgcca

SEQ ID NO: 594995 - DNA, 82 bp, Homo sapiens
gtccgcgggaagatggcggcgccgctcatccccctctcccagcaggtgcgcgcggagccatggttatcatgtcggagttcag

SEQ ID NO: 594996 - DNA, 50 bp, Homo sapiens
agagcaaattgaaacgtccgggccctcagatcctgatgattgcagtcttc

SEQ ID NO: 594997 - DNA, 79 bp, Homo sapiens
gcgggcccgggccatggccgccgccgatgccgagggagtgcatccgccccaacccttttccccctcgtctcctgtgaga

SEQ ID NO: 594998 - DNA, 100 bp, Homo sapiens
gaaggacgctggaaagtcggccaagaaagacaaagacccagtgaacaaatccgggggcaaggccaaaaagaaggagtcacccacttgcaatctgttccct

SEQ ID NO: 594999 - DNA, 100 bp, Homo sapiens
aaccgcacagagccgcgggccctttgcagctgcgattttcgccctacgttttcaacggagggaggaactagaacgggacaagagggtcacttggattgtg

SEQ ID NO: 595000 - DNA, 50 bp, Homo sapiens
ctctactggacaaacatttcctccaagatgaagagttacctaagtcagtg

SEQ ID NO: 595001 - DNA, 97 bp, Homo sapiens
atgggattgctgggatcttgctgggtgagatggcagtgtgtgcaaaaaagcgccccccagtggagacctttggcgacttggcctttggcgacatctt

SEQ ID NO: 595002 - DNA, 75 bp, Homo sapiens
ccaggacccactggaagcctagaaatgtgagaaagatcagtctaaagaaaaggagaagaaagtgaaaaaaacaat

SEQ ID NO: 595003 - DNA, 75 bp, Homo sapiens
gagttctccaaacatgatcgtttactgcaaaaaccacaatggacactgccagccatagccttgttcttctccagc

SEQ ID NO: 595004 - DNA, 90 bp, Homo sapiens
cgacccaagaaaaagaagaattcagatgatgctccatggagtcctaaagatccactgtgtgtggagagtaatgcagcatcatgccaacag

SEQ ID NO: 595005 - DNA, 101 bp, Homo sapiens
ggatggcctctggacatccgagtgggacagcccgggcctcagctggccccgtgttcaagggcgtctgtaagcagttctcacgctcacagggccatggcttc

SEQ ID NO: 595006 - DNA, 75 bp, Homo sapiens
acagcctggtcaatttgtacctgcaggcctcctacacctacctctctctgccaagacaatgcaaactccagtgaa

SEQ ID NO: 595007 - DNA, 100 bp, Homo sapiens
ccgtcgcgtggcggcgggaactgttggccgcgcggcctcgggaacggcccaggtccccgcccgcaggtcccgggcagtgtcagagatggctttggattcc

SEQ ID NO: 595008 - DNA, 90 bp, Homo sapiens
gtctgggaccgaaccagcatggggagtcggaaggggacaaatccgcgatcccagtcatgcatgaaacagtgacatttaaggatgtggctg

SEQ ID NO: 595009 - DNA, 90 bp, Homo sapiens
ccccggggtgtaataatgttaactgaggttggcgttgcaaacgctatggtcaccgaacgggtgacaaagaatgccctttctttatcaaag

SEQ ID NO: 595010 - DNA, 90 bp, Homo sapiens
gcagaatttgtatagagatgtgatgttggagaactacagaaacctggtctccctagcaatcatcctcttccagtggtagcgtgtttgggt

SEQ ID NO: 595011 - DNA, 98 bp, Homo sapiens
ctggagtctgcgaaggccgggacccggttccccggcccacagtgggggtgtgcaaacccgagagaactgggagttggtggtgaccccgcccagttggc

SEQ ID NO: 595012 - DNA, 72 bp, Homo sapiens
gttcggcctggaggagccgcagtgggtcccggacaaggagcctgacatttaccccggtaactgctgggcatt

SEQ ID NO: 595013 - DNA, 100 bp, Homo sapiens
cacctcagctcggccggggccgcagtctggccacccgcttccatgcggttcgggtccaagatgatgccggcgggcgctaatattgacacctgctcagaag

SEQ ID NO: 595014 - DNA, 100 bp, Homo sapiens
tccctctccctgcagtccaccacagatgccacagcagtactcagctccagtcagtctcagtcatcctacatcatcaggaatccacagcagaggcgcatca

SEQ ID NO: 595015 - DNA, 74 bp, Homo sapiens
agatcggcggagaccctcgaagtgcgcaaacttgacactcaccctgaccggctttgtgccttgggcaaagggca

SEQ ID NO: 595016 - DNA, 80 bp, Homo sapiens
ggacgaagagctgcagctcctcctgtgcggacctgcctagagctggaacgttacctccagagcgagccctgctatgtttc

SEQ ID NO: 595017 - DNA, 100 bp, Homo sapiens
tgagaactgtggcatctgcaggatggcatttaacggatgctgccctgactatgaagatctccttcaacgacaaaagcctgcagaccacatttgagtaccc

SEQ ID NO: 595018 - DNA, 75 bp, Homo sapiens
gcaggacttaggaatggagctcttttactcacaggaggaaagtgtcccttgcccacggccccatccgccacccgt

SEQ ID NO: 595019 - DNA, 100 bp, Homo sapiens
aagcccaacccaagcttcatgagacaactggaagagtatcaggggatcttgctggcaaggtagtttgtgaagctataaaaaatgaaatgaatgttatgct

SEQ ID NO: 595020 - DNA, 90 bp, Homo sapiens
aggagaaacacagggcaccaactatgaagactctcagggcgcgatttaagaagacagaggaatagctattcagtcagacagaaccactta

SEQ ID NO: 595021 - DNA, 82 bp, Homo sapiens
gaggccggctgaggagcgccgctgcctcgcctcggttttgtagtgcatccctgagcatgagcacagaatgaagcggcgtttg

SEQ ID NO: 595022 - DNA, 100 bp, Homo sapiens
aattacgggaacagaaagaaaagtccgaaagagctgaggactactgagcccagccaggctgtatgccattgctgccaaagaaaaagatattcaagaggag

SEQ ID NO: 595023 - DNA, 100 bp, Homo sapiens
ggctagttactcctctctcccagaatttgaactggccctttgacattatgatctcaaccagctgctggagcctcgaagcataacagcagatcctttggac

SEQ ID NO: 595024 - DNA, 98 bp, Homo sapiens
ggttctattttccctcctcaaactgactttgcagccacggagaggttttgagatagaaactgtgaagaacaacctcaggatcctttttaataatgctg

SEQ ID NO: 595025 - DNA, 90 bp, Homo sapiens
cctcctgtattggacgagtcttggattcgtgaacagaccacagtggaccacttctgggatataaagatgaagcgcagctgtataaagaag

SEQ ID NO: 595026 - DNA, 83 bp, Homo sapiens
atcaacgtggagcaggcgttccagacgattgcacggaatgcacttaagcagtatcctagaaggaaaacatcaccatggctaca

SEQ ID NO: 595027 - DNA, 90 bp, Homo sapiens
gttctggggagcgcctcgtcgacatgagtgatgtggaggaaaacaacttcgagggcagagacccctcgtccagtcattgtggaacccatg

SEQ ID NO: 595028 - DNA, 75 bp, Homo sapiens
actgaagggggccaggccggccatgagcagggcaggattctgagaaacgaacccctcttcatgtggccgcatttc

SEQ ID NO: 595029 - DNA, 101 bp, Homo sapiens
tggaggcagaggtggcatgggtgcatacattcccttgaataattacttggtgtttaatgatgtagatgggctgtatacatacacatttgaagcagaaagaa

SEQ ID NO: 595030 - DNA, 83 bp, Homo sapiens
ccagcaacaccaaggtggacaagaaagttgagcccagcccaggggcgctggacgtgaccatcatgtacaagggccgcacggtg

SEQ ID NO: 595031 - DNA, 111 bp, Homo sapiens
cgcagcccacgcaggtcggcgtcggcaagcaggggcaacccacaccgctggttggtgttcgaggaagagacattgttgttcttggtgtggagaagaagtcagtggccaaac

SEQ ID NO: 595032 - DNA, 95 bp, Homo sapiens
gtagacaccagctccgaaatcaccaccaagaataccctctaccatctgctttggtcagggtgccgctcgaggatttaaaagcaacaagaagaaaa

SEQ ID NO: 595033 - DNA, 50 bp, Homo sapiens
aaacaacgttctcccgcaaaaactgtgagaacattctctttgaagggaat

SEQ ID NO: 595034 - DNA, 100 bp, Homo sapiens
aatatctgtgggcagaaaaatacaaagttggaagcaataccaaacagtggcatggaccacacccagcggaaccttcaaagctggagtctgtcctcctaag

SEQ ID NO: 595035 - DNA, 97 bp, Homo sapiens
gaaggtggaggcgccgcaagcgctgaggttgcatcataaatacaaaggactgaagttataaaagagaaaagagaagtttgctgctaaaatgaatctg

SEQ ID NO: 595036 - DNA, 75 bp, Homo sapiens
agatagacattgaccccgaggagacgggagaaactctggaaaccttgacaatggcaacagtgtgtctcttcagcg

SEQ ID NO: 595037 - DNA, 90 bp, Homo sapiens
acaacctggcggtcagcaaccatgtgttccacctgcggcccacggtccaccagacgctgatgtggagaatgtacctgaaacatgggagcc

SEQ ID NO: 595038 - DNA, 100 bp, Homo sapiens
cgcagaagtatctccgaatggagccatcccccttcggcgacgtctcctcccgcctcaccacagcacccttacccttctgaagaacagaaaaagcagttgg

SEQ ID NO: 595039 - DNA, 100 bp, Homo sapiens
cgaggggctccgggtcttccagagcgtgaagatcaagatcgcggttaagaagattgtctaccaaatatagaacagaaaagatatatcccacagccactgg

SEQ ID NO: 595040 - DNA, 73 bp, Homo sapiens
aaatccagatgtcatattcaggtgcatctgagaaagacatcgtgcactctggcttggcatacacaatggagcg

SEQ ID NO: 595041 - DNA, 74 bp, Homo sapiens
tgccatgaaagaaataaggcttcccaagaaacattattccatcatttgtgttgatggatatccaggcttctaca

SEQ ID NO: 595042 - DNA, 95 bp, Homo sapiens
accatggaggaggacgacagctacgatgaagacagtcagtgttgccttagttttgtgcctgaatgttggtgtggaccctcccgatgtggtgaaga

SEQ ID NO: 595043 - DNA, 100 bp, Homo sapiens
cccgctcggctcccatagcgcccgcgacagcggtccggacgccgcccgaacatggactccgccggccaagctccgtggatggccgcgtgagacgctatga

SEQ ID NO: 595044 - DNA, 83 bp, Homo sapiens
cgaccacaagttccacaggcacctcattgggaagagcggtgccaacaagttcccgattttgaaatgctgggctcactcagaag

SEQ ID NO: 595045 - DNA, 88 bp, Homo sapiens
tcccaaagtgatgggattacaggaaagatacaaaattcttgtgtgcagcctcttttggactccagctcttgttctctcgctgaatccc

SEQ ID NO: 595046 - DNA, 75 bp, Homo sapiens
ctcacccgaacatcagggccctccagactcaggcgccccaacaccttggaagccgccagccccagaagatgcctg

SEQ ID NO: 595047 - DNA, 100 bp, Homo sapiens
caagtgttggcggatggaagggaggagactcctgaccctcagaatggttggtcaaagaaaaagtgatgtatgaaaaagaggcaaaacaacaagaagaaaa

SEQ ID NO: 595048 - DNA, 83 bp, Homo sapiens
caaggaataaacatgcaatgaacccaaaaggcatgaatctagagaaacattattgggatttaatatggtgaattacagagcat

SEQ ID NO: 595049 - DNA, 100 bp, Homo sapiens
aatgagatcgtggacaagatcatgggcaaaggacagatccagctggtcagtgagaaggtcggaggggccgaggggaccaagctggatgatgacttcaaag

SEQ ID NO: 595050 - DNA, 90 bp, Homo sapiens
tttaactctccttatgctgggtgaaaacaaagagcgtttcccaaagtgtattctgcggaactagcacctactgtgttctcaacaccgtgc

SEQ ID NO: 595051 - DNA, 50 bp, Homo sapiens
ggggatttgggtatcttctttcctgaaggaatctgagaaaaaggggttga

SEQ ID NO: 595052 - DNA, 75 bp, Homo sapiens
gagttcgagcagatcgacaagtccgggagctgggcggccatttaccagtgcaagtggtgacccaggatgaaagag

SEQ ID NO: 595053 - DNA, 101 bp, Homo sapiens
tgctcctatacaagattaacattcatatctggagtccatctttcaccatcttctcctgagattgtactggaccgtgaccactcttcttccattggctgcct

SEQ ID NO: 595054 - DNA, 100 bp, Homo sapiens
atcaggacgtggacttggtgtgcattaacctgccgccgcccctcaccagacagatcgctgtcaaaaccctaggggcccagctggagtaagagcccaggcc

SEQ ID NO: 595055 - DNA, 82 bp, Homo sapiens
ctgtgtcaaacatccatatcataagtggaattttggagatattcaaaggtatacccgaaatcttgtggatcaaggaaatgga

SEQ ID NO: 595056 - DNA, 75 bp, Homo sapiens
ttgggactaacagctggagagaacagttcattgaagctatcactgtcagtgctgcagttactcgggagttaccca

SEQ ID NO: 595057 - DNA, 75 bp, Homo sapiens
cctgcaccatgagctggggcaccgagctctgggctttcatagattctattcacaaagaataaccaccattttgca

SEQ ID NO: 595058 - DNA, 51 bp, Homo sapiens
ctatgaacttatgaaaaccttcagttacagagtttctctcttgttgcccag

SEQ ID NO: 595059 - DNA, 98 bp, Homo sapiens
cgcgtctcggaaaccggtagcgcttgcagcatgattggcagtatggagttactcaggccttccctcacacagaggaggaggtggaagttgattcacac

SEQ ID NO: 595060 - DNA, 98 bp, Homo sapiens
acttcctggaggagcgcatgcaacagaagtatgaggccagccgggaggacatctacaagcggggtgataaaagaaaatgtggctgaagttacccgaag

SEQ ID NO: 595061 - DNA, 100 bp, Homo sapiens
cacagcccgtgctgaagccgctggagtacagccagtatgaagtgcgcgcacaagaagctggctgagggcagtgcctacgaggaggtgcctacatccatga

SEQ ID NO: 595062 - DNA, 73 bp, Homo sapiens
tttagggtcctttatatagaagggagagtagagctgtgacttgtggtccctaggggtgattatctatgtgatg

SEQ ID NO: 595063 - DNA, 100 bp, Homo sapiens
tcccaatcccccactctttccgccctaatggaggtctccagtttcggtaactataactacccaatattgcagccatggagtccatgcttaataaattgaa

SEQ ID NO: 595064 - DNA, 75 bp, Homo sapiens
ggaagagggaggcgtggacgcgtcagtcattggcaccatgaactggaataaaggtggtcctggcactaagcgagg

SEQ ID NO: 595065 - DNA, 71 bp, Homo sapiens
atcaccacctcggaacccagggtaacgctgtcagtctttgcaaacggggattcagcgtccgatcctttgga

SEQ ID NO: 595066 - DNA, 74 bp, Homo sapiens
tcagtcctccagtgtttggatattcaggcaccccagcctgcggtccatgtgcaggggcaggagccactgactgc

SEQ ID NO: 595067 - DNA, 96 bp, Homo sapiens
gaaaactgaggaatttgaagtgaccaaaacagcaggaatgccatatggcagccgagagaactccctcctctactctgagattcccaagaaggtccg

SEQ ID NO: 595068 - DNA, 100 bp, Homo sapiens
cccccgtgtcaactgaactggcaaagccgccgcagggaagatgaacctgtacgagtcatttgcccaggctacccagctgggcgatctgcacacctgcctg

SEQ ID NO: 595069 - DNA, 101 bp, Homo sapiens
caaaaagaaacctagcaacaaaaagaaagctgcgttaatgtttgcaaatgcagaggaagaatttttctatgagtccaacgtggagcacctgacggagaaaa

SEQ ID NO: 595070 - DNA, 73 bp, Homo sapiens
gcctggcccaggcgcacacggaagtgctgcagaaccttggcctgaaaatgctacattatatcagcaattgaaa

SEQ ID NO: 595071 - DNA, 147 bp, Homo sapiens
agatgtctcgctccgtggccttagctgtgctcgcgctactctctctttctggcctggaggctatccagcgctgaagccgacgtagcttctctgaacagacgcatccagctggttgaggaagagttggatcgtgcccaggagcgtctg

SEQ ID NO: 595072 - DNA, 74 bp, Homo sapiens
aggatatcttgggcgggggatgtgagcgctgagcccttggcagaaatcatgagtggaggatctcaagtccacat

SEQ ID NO: 595073 - DNA, 82 bp, Homo sapiens
gagaagtatccaatagggatattgtagaaactgtctttaacctgcttcaaacactccagagtgaaaattcgaacctcaggaa

SEQ ID NO: 595074 - DNA, 98 bp, Homo sapiens
agaatatctacatttatctaacagctgggaaagagaatcaggaaacccaggcccaacggcaggtggatgcaagaagaaatgttccccaaaacgaccca

SEQ ID NO: 595075 - DNA, 50 bp, Homo sapiens
gggaatttctcctggggctcagagtgttcaagggcagcaggaaagacgag

SEQ ID NO: 595076 - DNA, 119 bp, Homo sapiens
cggtctatgagtgaaaatgctgttcgccaaaatggacagctggtcagaaatgattctctaaatatcgacagtatatggcaggacttctggctcctccttatggtgttatggaaacgggc

SEQ ID NO: 595077 - DNA, 78 bp, Homo sapiens
ttgatggtcgaggccatctcctgggccgcctggcggccatcgtggctaaacaggtgtcccgacccaggctaagcttga

SEQ ID NO: 595078 - DNA, 117 bp, Homo sapiens
agcagaggccagctgtttttgaggatcctgctccacagagaatgctctgcacccgttgattatgagtttaaagccaagaacatcaagaagaagaaagtgagcattatggtttcagtg

SEQ ID NO: 595079 - DNA, 84 bp, Homo sapiens
cgcggattcgccgaggcaccgaggcactcagaggagaccatggtgaatccgggcagcagctcgcagccgcccccggtgacggcc

SEQ ID NO: 595080 - DNA, 98 bp, Homo sapiens
gaggctgaaggaagatggcggacggcgtggaccacatagacatttacgcggatgtcggcgaagagttcaaccagcttgccgggattgctgtccttgcc

SEQ ID NO: 595081 - DNA, 90 bp, Homo sapiens
ggcggatcttagatggaagtcttggctttgctgcagggataagggcctcgctctgttacccaggctggagtgctgtggtgtgtttgtgac

SEQ ID NO: 595082 - DNA, 74 bp, Homo sapiens
ggacatcctggaagctgggaaatggttctcggtgctcgccatctccccaaacttggacgaagtattgcctgtcc

SEQ ID NO: 595083 - DNA, 83 bp, Homo sapiens
gtcatcagcctggagaagctggagaatgacaagagcttccgcggtgtcattctgacctcgagcaacagcgagctcgccatcct

SEQ ID NO: 595084 - DNA, 75 bp, Homo sapiens
gagaaataatttaagtcaaagaatctgctctatgctaaccaagatctccagcaccctgccggtggcactactgag

SEQ ID NO: 595085 - DNA, 51 bp, Homo sapiens
tacctcggagtggcggaccacaagttagcaaaaggtgtgacaagcaacctg

SEQ ID NO: 595086 - DNA, 100 bp, Homo sapiens
tgctgtttccaggggctgcagagcatggactgttaaatcttgcacttcttctgagtgagaaactaattctgaagcaagcccttatagttgtgctgcagtg

SEQ ID NO: 595087 - DNA, 100 bp, Homo sapiens
ctccggtctacagctcccagcgtgagcgacgcagaagacgggtgatttctgcatttccatctgagattcattccacttaaaacctgaaaacattggacca

SEQ ID NO: 595088 - DNA, 88 bp, Homo sapiens
tttacttttaattttgcaaagaatccaggacaaaaaggattagaaaatgatgcatcctgttgccagcagtaatccagctttctgtggg

SEQ ID NO: 595089 - DNA, 98 bp, Homo sapiens
tcgggcattaccagaagagtcttcatgtggacagtctcagggacaccatgtagagaattttggtctcgattcagccgactttgtggtagcccttgtcc

SEQ ID NO: 595090 - DNA, 51 bp, Homo sapiens
cttcgggccctcctgccttctactggtgcgataccagcgggaggatggcaa

SEQ ID NO: 595091 - DNA, 100 bp, Homo sapiens
agaatctcggaggatgctcagaggtccaatgatgcatcagcagcctccttctcagcaatacaatatgccacagggaggcggacagcattaccaaggacag

SEQ ID NO: 595092 - DNA, 100 bp, Homo sapiens
aagtctgggccctccttcttgagatccctaaaatgaaagaagaaacaagggacctgtatagtatgggcctttgggtccccgaggattagctgaagctaca

SEQ ID NO: 595093 - DNA, 75 bp, Homo sapiens
agtgcaaagtgatacttctcgatggatcagaatatacctgtgatgtagaggaacagcgcctaaaagaacttgcaa

SEQ ID NO: 595094 - DNA, 90 bp, Homo sapiens
acaagactggggctgctcccatcattgatgtggtgcgatcggctttatctgagtgtgcagtgacactgaaaacaattcatctcaaacggg

SEQ ID NO: 595095 - DNA, 100 bp, Homo sapiens
tgaagctcaagttgctactcgggacgctgcacctcccgcgccgcacggtggacgaggctcagcaacagcctcaccaaggactccatgaatatcaaagccc

SEQ ID NO: 595096 - DNA, 100 bp, Homo sapiens
caacgatatatgtcagatctaaagtatttccaacttggggatgtttggcatcgacgaatttactgcagtgattaaccctcctcaggcctgcattttggcg

SEQ ID NO: 595097 - DNA, 74 bp, Homo sapiens
cggttagtgcaagcatctgggccatcttcaatgttcagcagactgtacaggatctttttggcagagccccaagt

SEQ ID NO: 595098 - DNA, 90 bp, Homo sapiens
cggcttcgggcatccaacgcaatgatgaacaacaatgaccttgattctctcgggcctagccgtccttggaacccgatattcgggctgggc

SEQ ID NO: 595099 - DNA, 82 bp, Homo sapiens
atcggcctctgcaggcttgccgaagaagggaggtcatcatcagatttgaaatatttaaagtggatacaaaactatttcagca

SEQ ID NO: 595100 - DNA, 100 bp, Homo sapiens
ctgcgtgctggtacgtgcttttcctcctgcagcccaccgtctacttggtgaatctggattgggaaagtcgacattaatcaactcattattcctcacagat

SEQ ID NO: 595101 - DNA, 103 bp, Homo sapiens
tctcagccggccgggatggctaccacggccgagctcttcgagcactattcctgatcagagaactccagttgcttcaacacacagtatcagtagtgcagccacc

SEQ ID NO: 595102 - DNA, 75 bp, Homo sapiens
ctcagaaagatggatttttgcatgagacgcttctggacagctctcatttcactcttcagtgttcctgttatttat

SEQ ID NO: 595103 - DNA, 100 bp, Homo sapiens
gccctcgccaccgctcccggccgccgcgctccggtacacacagattgagaggatccagaatccagatctctggaatagctaccaggcaaagaaaaaaact

SEQ ID NO: 595104 - DNA, 83 bp, Homo sapiens
tctcaatatctgtcttcggtggactccttcggcagtccacccaccgccgccgcctcccagagctcccagctcctccagcagcc

SEQ ID NO: 595105 - DNA, 100 bp, Homo sapiens
ctcctgttccgcttctcagaggacgccttcaacaccaccttcatctccaccatcggagtatacggaggagatagaacgtttaaaacgagatcttgctgca

SEQ ID NO: 595106 - DNA, 100 bp, Homo sapiens
gtgcaatcctggagccccccagtgaggtgatgaatcaccaacaccagcagcagatggcccccagtaccctgagccagcagaaccaccccactcagaaccc

SEQ ID NO: 595107 - DNA, 83 bp, Homo sapiens
gttggaagcagccgatccagcctgcggagcctgtggggcaggctcagaacgcccagcagctccatgaacgaatccagtcctcg

SEQ ID NO: 595108 - DNA, 83 bp, Homo sapiens
gcggagccctcatccctaacggtgaaaggaagtgagctcacaatgactcaagctgccacatagtgttgattgtgaaatgccag

SEQ ID NO: 595109 - DNA, 82 bp, Homo sapiens
tctgcaaagaaggagaaagcgtgcagggggatatgagactttctactcggaatatcctgagtgttgcgtggatgtaaaaccc

SEQ ID NO: 595110 - DNA, 95 bp, Homo sapiens
tgggcaccaggaagcgaaggctgggacccagacatggagctgcgggaagaagcctggtctccggggccgctggattctgaggaccagcagatggc

SEQ ID NO: 595111 - DNA, 82 bp, Homo sapiens
tatctgtcttcggtggactccttcggcagtccacccaccgccgccgcctcccagatgtcacacaccaagccctacatcagga

SEQ ID NO: 595112 - DNA, 75 bp, Homo sapiens
gtgaacacagcactaaatacaactcaggcactaactgtgacatctatgaccttttttatcatcgcacaagcccct

SEQ ID NO: 595113 - DNA, 100 bp, Homo sapiens
agtgggaaaaatggaccaacttctttggcaagtggacattttactggctcaaatccgatcacataggacagtatgcaccttaagatcctgaagaaacggc

SEQ ID NO: 595114 - DNA, 100 bp, Homo sapiens
atgaatggccccatcagaaagaagctcaaaattattcctgaggatcaatcctggggaggccaggtgatgactccagccacgacctcatgctgctccgcct

SEQ ID NO: 595115 - DNA, 100 bp, Homo sapiens
ggacgagctgcctccgggctgggaggagagaaccaccaaggacggctgggtttactacgccaaggtaattgggatacttctggcagcgaactgagtgaag

SEQ ID NO: 595116 - DNA, 90 bp, Homo sapiens
ctgacggcaacctctacaaggccaagttcatctcctccgtcaccagccacatctaccaggaagctcttcgtgggcggtcttgactggagc

SEQ ID NO: 595117 - DNA, 100 bp, Homo sapiens
ggactcccgagacccttggaacccaggattttttatcaagcagaaatgcatcgaacaacgagaatcaagatcactgagctaaatccccacctgatgtgtg

SEQ ID NO: 595118 - DNA, 95 bp, Homo sapiens
aggcagccccagccccacccaccgaagactctacaggggcaggtaattcactggtccacaagcggtctcctttacgtcgaaaccaaaagacccca

SEQ ID NO: 595119 - DNA, 100 bp, Homo sapiens
tcagcctctgcaccctcaacgtggtcaccgacagcatgctgatcaaggctgtctccacctcggacacaggcatctctgggaaaggacctggggctggtga

SEQ ID NO: 595120 - DNA, 100 bp, Homo sapiens
tcttgggcttggccggtttttcagctcaaaaaccacagctgcacattctttagaccaggatgaaagagcagctgagctcagcagggagcagaacgagaaa

SEQ ID NO: 595121 - DNA, 153 bp, Homo sapiens
tttgttggggagaagaggattggaggtgtcagtgttaaaggaacctctacaacgaaggtgaagccacggaagataagacacgatgaggcgagtggtacgacagagcaagtttcggcatgtatttgggcaagcggtgaaaaatgaccagtgcta

SEQ ID NO: 595122 - DNA, 122 bp, Homo sapiens
tgggacacacctccattggatttaaaagacagtcctcgtcagcactgactttcagctatggaatcgcacatcaggtccacccatctggccgggcagtaccttcttcaagagaaatggagccc

SEQ ID NO: 595123 - DNA, 96 bp, Homo sapiens
tccaaataatcatctgttgaaaaatatgaagaaaattgtggatcaaaacacaaaggctccttttctgggcagtggagggactatagctccatcatc

SEQ ID NO: 595124 - DNA, 75 bp, Homo sapiens
aaaccagtcccttggacagtctgcaccttctcttactgctggcctggcatgtactggcattgaaaacattgacga

SEQ ID NO: 595125 - DNA, 100 bp, Homo sapiens
gctgcctcggcaagaacggcgtcttcgtggacggggccttccagagacgcggcgcgcccgccctgcagctgcccaagcacgcccgggggctggagaaggc

SEQ ID NO: 595126 - DNA, 100 bp, Homo sapiens
aaaagatccctggaatatgaagagacacagtatggtagccacacccccagctcatggggcattcagaatgggaccacaaacgagggccaagaggatcaca

SEQ ID NO: 595127 - DNA, 100 bp, Homo sapiens
gtactctcaggaactattccagctttctcagtatctacagggccgttgctccagggagaactgcaaatatcttcatccacccccacatttaaaaacgcag

SEQ ID NO: 595128 - DNA, 101 bp, Homo sapiens
cgaattcaggtcggcaagaatgaacctagcacttatgactatggcaggcagttgctacaggccacagttgtgttatgccaatctttgcgctgcacttctcg

SEQ ID NO: 595129 - DNA, 100 bp, Homo sapiens
cttttcttatgctgggatgtgccttagaggattatggatatgaagaagctgaagtccggaaaaaacttgaggaaaaagacaggcaggaggaagcacagcg

SEQ ID NO: 595130 - DNA, 75 bp, Homo sapiens
gcgcatctggctgcagctctgcggggcgcaggaggcggtgcacagcgccaaggttgcagagaacacatcttagaa

SEQ ID NO: 595131 - DNA, 82 bp, Homo sapiens
tgatgtggctaagatgctgccgactctgggcggcgaggaaggcgtctcccggataacgaaggaggcccaacttcattcaata

SEQ ID NO: 595132 - DNA, 75 bp, Homo sapiens
agactagccacctttctgatacagcattcctctgaatattgatttgctgaatagcccagacttattggaagcaac

SEQ ID NO: 595133 - DNA, 82 bp, Homo sapiens
aggatggctggataaactctctcctcaaggagaccatcatgcagacatcagagactgggtcggacacaggctcgacagtgac

SEQ ID NO: 595134 - DNA, 100 bp, Homo sapiens
aaaaccagtcatgaccactagacccacagctgttaaagcaacaggaatgtctgatcacagatacggggatggtggctctactttccagagcacaacagga

SEQ ID NO: 595135 - DNA, 50 bp, Homo sapiens
ggttcctcgcccagagcgtcttggcgatgtctttggtggacttgggaaag

SEQ ID NO: 595136 - DNA, 88 bp, Homo sapiens
cctggccccggctctctggaccttgtctcgctcgggagcggaaacagcggcagccagagaactgataaatttcaaacggaagagagtg

SEQ ID NO: 595137 - DNA, 75 bp, Homo sapiens
gcggaaatctggaaccgggatggcgacgtctacactgagtcggaggcgaagagttttgcggcctccaggtggtgg

SEQ ID NO: 595138 - DNA, 90 bp, Homo sapiens
gcttgccctggtcttgctcggccgatgaagtgcagaggtttttttctggggacggcaaaacagaacagaaaggcggagataaaaagaggg

SEQ ID NO: 595139 - DNA, 101 bp, Homo sapiens
ctgtggatacagagggacagaggcctactgtacatggcacatgaacagtaaatgtcctgagggaacaaaacccatgctgatatttgctggcgatgatttcg

SEQ ID NO: 595140 - DNA, 90 bp, Homo sapiens
ataacagttgatgaaaaattggaaaatggttctcctgaagaacatgcaatctatgtttgggatcatttcatagctcaggctgctgctgag

SEQ ID NO: 595141 - DNA, 82 bp, Homo sapiens
gcggatcccgtggagtgaaggtcgcaccgcggcggaactgtggaaggtgcatcagtgaagaaatggaccaatgtgtataatc

SEQ ID NO: 595142 - DNA, 87 bp, Homo sapiens
ctcttcagataatcagagtggaggaagtacagccagcaagctgccaaacggaggcccgaagaaaaagaacctgaaaaagtaaatcca

SEQ ID NO: 595143 - DNA, 74 bp, Homo sapiens
tcagaaatgcctgggaaagaagattccattatggaggaagagagcaaagaatggccgagtggattctgaggacc

SEQ ID NO: 595144 - DNA, 82 bp, Homo sapiens
gaggaaaacaacttcgagggcagaatcctgataacttaagtgactctctcttttccggtgatgaagaaaatgctgggactga

SEQ ID NO: 595145 - DNA, 100 bp, Homo sapiens
ggattgaaccctgctgatgaaagcacacggaggcgcagttgtgtagcagttgagtaatgctggttagctgttaaggtggcgtgttgcagtgcagagtgct

SEQ ID NO: 595146 - DNA, 100 bp, Homo sapiens
ttgactactcgcatcgcgcactttttggatcggcatctagtctttccgcttcttgaatttctctctgtaaaggagctgaagtgagtagtgaatatagtat

SEQ ID NO: 595147 - DNA, 80 bp, Homo sapiens
cgctttctgctcaagtcctgtcctcttctgaccaaagagatgccaagggagtacaatgaggatgaagacccagctgcacg

SEQ ID NO: 595148 - DNA, 51 bp, Homo sapiens
cggagcataggaggaaaattcatcatctggattctcagagccggcaaggag

SEQ ID NO: 595149 - DNA, 100 bp, Homo sapiens
cgccggtggctcggggccccgcggaaaagggttattcaaatgctcagaagactattcttctgcaggtggatcagaactgtgttcgcaattcttacgatgt

SEQ ID NO: 595150 - DNA, 100 bp, Homo sapiens
gacaattccatttggggaccagagatggacggtcactcagcctatggaggtttgcagattttatcaggggtatgctgaaactaattcttctcctcctgtt

SEQ ID NO: 595151 - DNA, 75 bp, Homo sapiens
ggagaccaggcagctgcgctcttgacagccaggtaccagggacccgtgacattaaaggatgttattgtggaattc

SEQ ID NO: 595152 - DNA, 100 bp, Homo sapiens
gttttgtttatataactcaagttgtttggctaaattcttcagtagaacttcatggaggaacacggagtgacccaaaccgaacatatggctaccatagaag

SEQ ID NO: 595153 - DNA, 75 bp, Homo sapiens
taccagcagctttcgcgctaccggggactctgctcacccatgacatcagcctggaggagtttgaggatgaagacc

SEQ ID NO: 595154 - DNA, 50 bp, Homo sapiens
gtggaccacaggccctcgttgcccagataccatggtgaatccgggcagca

SEQ ID NO: 595155 - DNA, 50 bp, Homo sapiens
gaataaacatgcaatgaacccaaaagggaagtaatggctgaacacaatcc

SEQ ID NO: 595156 - DNA, 100 bp, Homo sapiens
cactgccaaagctgcagggccactgcaagtctataaagaacacgctcaggagcgtcatcacgtagacataaccaagaaacttcacccaaatcaagctggc

SEQ ID NO: 595157 - DNA, 90 bp, Homo sapiens
aggctcagagatgcctgtaccgtgatgtgacgctggagaacctggcacttatatcctccctgggctgtgccaagaccttgtaccactcgg

SEQ ID NO: 595158 - DNA, 100 bp, Homo sapiens
aacgacctggcggtggggctgcggcgcctgggactgcaccgcaccgagggcgagctccagggtgtctgatgccatcaagtgttgcaggagaaacttcagt

SEQ ID NO: 595159 - DNA, 82 bp, Homo sapiens
cccaggtgtaagcgcagaaagcaggcgaacccgcggcgcaataacggaagttctactacatcaccctgctacgagaccccgt

SEQ ID NO: 595160 - DNA, 82 bp, Homo sapiens
actgagaaaagaagaagaacaagctacagagacacaacccattgtttatggtcagggaagaaggacaagcactcacagagcc

SEQ ID NO: 595161 - DNA, 100 bp, Homo sapiens
ggatgctttgataggcaccttatctttagcaggttgctccttgagggcaggacagttcttatggctttatccgttgcgtaagcacagagaggtctgcgag

SEQ ID NO: 595162 - DNA, 90 bp, Homo sapiens
cagccttcctgatttctgcagctctgtgtgaagttgtggaagaaggactctgggaaaatggcctttcctatgaatgtaggacgctgctct

SEQ ID NO: 595163 - DNA, 75 bp, Homo sapiens
tctcagagcgtcgctttcttccctttggaggtcgtgagcagctcgtcgggctctgtgcctcagacaaaattctgg

SEQ ID NO: 595164 - DNA, 100 bp, Homo sapiens
tcaccttcgtggtcgtctggtcctactacgcgtacgtggtggagctctgcgtgtttttcatatgagtccaacaagcaatgaagacctcaggaaaatcccg

SEQ ID NO: 595165 - DNA, 100 bp, Homo sapiens
ctcgcgagtctccgtctggggtagggcagcaaacggggattcagcgtccgatcctttggaacagggactcacgtgaagcttccaggaccagctcccgaca

SEQ ID NO: 595166 - DNA, 88 bp, Homo sapiens
aggagctgggcccagagacgcggggacgggccgtgggcccccggaacgagaatgcatacacagccacagctatcaacagcaccaactt

SEQ ID NO: 595167 - DNA, 82 bp, Homo sapiens
agaccaacatccgtgacacctggactctttcaggttctgaagacacaactcagatgggaagttcatcgcccgggcacagcgg

SEQ ID NO: 595168 - DNA, 80 bp, Homo sapiens
gaaggacccaggacacccggaagccggaaatgaaagtttcctacactactgaggtttaggggcactgtgaagcaaaagcc

SEQ ID NO: 595169 - DNA, 98 bp, Homo sapiens
aggcagggaccgcttcaggtcctgggtcgatgtctgtctatggaataaagccccgtcagcatgctcatgcacattcatctggatacttcatcactcaa

SEQ ID NO: 595170 - DNA, 75 bp, Homo sapiens
tgaagcccatccagactgtttgatgctgaacttcaccgttaagatcatgtttgagaccttcaacaccccagccat

SEQ ID NO: 595171 - DNA, 100 bp, Homo sapiens
gggttttacttcaggttatgtacgcttctacactgaggaagtatactgaagatgcaagtttttttcatctggagttctgcctgaccaagaattaagccta

SEQ ID NO: 595172 - DNA, 90 bp, Homo sapiens
cctcaacatcccggagcagctgccacaatgggacatgtgcaaatacctggactacagacgagtgcccaacagcaaccccccggagtatga

SEQ ID NO: 595173 - DNA, 100 bp, Homo sapiens
ttaaggagacatcagagaaagcagaaaaacaccaggctactgagtagggctgattggagccattgtacagtgtcgggaacataccaggacactgagaata

SEQ ID NO: 595174 - DNA, 74 bp, Homo sapiens
aaggaacttgcagaaatcacattggaccctcctcccaactgtaggtccattttagcttcctatctcctgaagga

SEQ ID NO: 595175 - DNA, 111 bp, Homo sapiens
cgcgcgcagggcctgcagcgggagctggacggcgagcgcgagcggcgcgagaaacagttggaattgatcacaccttttcagttgtacttcaatcctgaattaatctttaaa

SEQ ID NO: 595176 - DNA, 98 bp, Homo sapiens
tttttccagaggtgccctgaggagcagggaagcatggctattgtggatgtaaaagccatgttcaagcaagagtgagccatggagctacgtgtggggaa

SEQ ID NO: 595177 - DNA, 50 bp, Homo sapiens
cagcctcatgtacttcgcctttaccaggattctttgcccataaagtggag

SEQ ID NO: 595178 - DNA, 75 bp, Homo sapiens
atcaagagcaagactcccaagcagcttgttgtatatgtcatatcagctcccatgtccccggtgtttgggctcctg

SEQ ID NO: 595179 - DNA, 100 bp, Homo sapiens
gggacctgaaatcttttttcatccagagaattttgattctgacattagcagtgtgggaatagatggctgctggcaggcagacagccaaaggcttctcaat

SEQ ID NO: 595180 - DNA, 112 bp, Homo sapiens
gaaggcgtgggcgacccggtgtgtggcgcgcccagagccccgcgtttcagccctagggaagacctgcctagagctggaacgttacctccagagcgagccctgctatgtttca

SEQ ID NO: 595181 - DNA, 88 bp, Homo sapiens
ggatttgttaaggattccaagtaactcttatttgacacgatgaggcgagtggtacgacagagcaagtttcggcatgtatttgggcaag

SEQ ID NO: 595182 - DNA, 98 bp, Homo sapiens
gggacagggacctatcatcactggactaaaatacaaatggagagatttgcatgggatgcagaaatatggaagactaaccaagcagaccaggagagacc

SEQ ID NO: 595183 - DNA, 100 bp, Homo sapiens
taaacatgagaatagctgctggtgaatctttggcacttctctttgaattggccagaggaatagagagtcatgctccttttgatgcaatgattatggtgaa

SEQ ID NO: 595184 - DNA, 82 bp, Homo sapiens
tgttcgacgtgcggcccgaatgccagcgcctcttctaccggggcaagcagtaaagatgacggcgccttgaggtaagctacag

SEQ ID NO: 595185 - DNA, 90 bp, Homo sapiens
tggtctccaggtttccctattacaactccctcaaggactgcctttcctgtgcatctagtgagagtgaagctgaaaatcttgaagcacaac

SEQ ID NO: 595186 - DNA, 50 bp, Homo sapiens
gagaggttcagctaaagagctgctacagccaatggagatcttcgtggatg

SEQ ID NO: 595187 - DNA, 82 bp, Homo sapiens
ggaagcgagactcatacgcaacctcaatgcaaacggggattcagcgtccgatcctttggaacagggactcacgtgaagcttc

SEQ ID NO: 595188 - DNA, 82 bp, Homo sapiens
acagctacaacacgcgagagaagaactgcctgggcatgaaactggctttatcctgtggataaacgcagagtgaacgagtttg

SEQ ID NO: 595189 - DNA, 94 bp, Homo sapiens
ctgcgctgtgatgcctgcagagctgtggcttaccagatccgagtgaatgcagtaaaccccacagtggtgatgacgtccatgggccaggccacct

SEQ ID NO: 595190 - DNA, 111 bp, Homo sapiens
cagccacctcagcaacagtcccacctggtccctgtatctctcagcaacctcatgagctgggcatccaagaagaagcagcctcatttgttttctggtgtcatcgtaggtggc

SEQ ID NO: 595191 - DNA, 106 bp, Homo sapiens
ctgcgtgagtgtggtctacgagctgtttctcatctttatactcttccaggacggggaggtttactgcatcgacgcgcggttctacgggaacgtcagccggttcatc

SEQ ID NO: 595192 - DNA, 100 bp, Homo sapiens
agccttttacctgcagcttttcctgcttgatatagcacaggcatagaatgtcaagctaaccaggcgtccgctacttcagaagagtgtactgtcgcatggg

SEQ ID NO: 595193 - DNA, 101 bp, Homo sapiens
ctaagatggcgactgtcgaaccggtggtatcacggcaacctcacacgccatgctgctgaagctcttctcctctcaaatggatgtgacggcagctaccttct

SEQ ID NO: 595194 - DNA, 75 bp, Homo sapiens
ccgccatgtcatccacttcgcccaacctccaggttgaattgaccaaagcaatggtgatggagaagcctagtcccc

SEQ ID NO: 595195 - DNA, 82 bp, Homo sapiens
aagatctcagagaaggaggaggtgaccacgcgcgagttatttctcaaactctgaggctgcggagttcacacattgaaatctg

SEQ ID NO: 595196 - DNA, 98 bp, Homo sapiens
gactcctatttgaagtatttgacgaaaatagactgggtaaaccagacttgaatacaacattgccaattagacaaacagcatcaattttcaaacaaccg

SEQ ID NO: 595197 - DNA, 75 bp, Homo sapiens
aaattgtcctgataggatcaaagacaaatggaaagttcctctgtgttggggtggaagaggaggaggcgcccgaca

SEQ ID NO: 595198 - DNA, 98 bp, Homo sapiens
ggagtagcaagtggccatggggagcctcagcggtctgcgcctggcagcagaatgatatggaacctagcaaagctgttccactgaatgcatctaagcaa

SEQ ID NO: 595199 - DNA, 90 bp, Homo sapiens
ctagagaaaaaagatgttgtggggagagccagggggtcggagcagagcatggacatgggaacgagtgctctcagcaagaagccgtggtgg

SEQ ID NO: 595200 - DNA, 83 bp, Homo sapiens
ccggcctaggagaccccgagaggagacggtcccgcagcccccggaagccaatagactccctcagggactctcggtccctcagc

SEQ ID NO: 595201 - DNA, 75 bp, Homo sapiens
tttttccttcctaggagaaatcgaggagctgcggctctaccccccggacaaatcatgaaggacaggtggatcaat

SEQ ID NO: 595202 - DNA, 100 bp, Homo sapiens
cacgaagcacagctgtcacccggacatcaagtattcaccagttaatagcaccagttacttacaatgcatctttagacgctatcatttccagtacaaccag

SEQ ID NO: 595203 - DNA, 76 bp, Homo sapiens
aaaagaaggggaagaagatcaaaacccaccatgccccagttatctccagaagaagaagagaaaaggagaatccgaa

SEQ ID NO: 595204 - DNA, 51 bp, Homo sapiens
cgccctacgttttcaacggaggctgccactggtgacatgccaacttaccag

SEQ ID NO: 595205 - DNA, 50 bp, Homo sapiens
gcgcaaagcttgcgaggtggcgttaggaccccaaattacgtgaacttttg

SEQ ID NO: 595206 - DNA, 51 bp, Homo sapiens
cgacaaatttagagaaacctcggcagcagatataatttctacagtagaatt

SEQ ID NO: 595207 - DNA, 51 bp, Homo sapiens
gttcactccagcatgggggctccagggtctcactctgccacccaggctgga

SEQ ID NO: 595208 - DNA, 123 bp, Homo sapiens
acacgatctctccagtttccatatgttgagattctacttattcatcagtttgttgtgcttgtcaagatcagtatgtgcagaagcttataatcctgatgaagaagaagatgatgcagagtccag

SEQ ID NO: 595209 - DNA, 98 bp, Homo sapiens
cagctgtctcagtttggggcaagtttatacgggcaacaaagtgttatatgaacttcccaccaacacacagtggtgcttcgatattcagtggtgtcccc

SEQ ID NO: 595210 - DNA, 83 bp, Homo sapiens
ggaagagaggcagaaactcactgcccagacattatgatctcaaccagctgctggagcctcgaagcataacagcagatcctttg

SEQ ID NO: 595211 - DNA, 116 bp, Homo sapiens
gtcagcctggggaatgagacccaaactgctcatacagaattacgcatttccacttctaatgacttcattagaggggtggtagactcggaggatctccctctaaacatatcccgtga

SEQ ID NO: 595212 - DNA, 100 bp, Homo sapiens
aagcgagcctcttctgataactcaggatttacttgaaatgaaaggagattccaacctacttcaggaatactcccccagttgcaagaggcgcaggaccgtg

SEQ ID NO: 595213 - DNA, 82 bp, Homo sapiens
ccgtgtttgctgcgcccgcactgcgcttcaaagacttctatgagctggagcctcataagttccagaataagaccaacggcat

SEQ ID NO: 595214 - DNA, 83 bp, Homo sapiens
cctgcagaggtgccgacatggggcttaagatgtcctgcctgaaagaagctccaccatgaggcgaggtggatggaggaagcgag

SEQ ID NO: 595215 - DNA, 100 bp, Homo sapiens
gccggctgagtgctgacatccggtggataattactgtaccttcctcatggaaaaagttttatttaaagtgttatttctcattgaatactatcaaaaagga

SEQ ID NO: 595216 - DNA, 124 bp, Homo sapiens
gctataagggaattggccaatatgatatacaagacaaggtgaagcctcggaagaggcatttcatccttcatgaagccattcaggattttgaattgcatatgagtgcttggctcttccttctgtt

SEQ ID NO: 595217 - DNA, 97 bp, Homo sapiens
gcggccgcgacgactgcctgctgttcgaggccggcacggtggccacgctgggccgctttgaagaggaatttatcaaaatgcgcatggagagacttca

SEQ ID NO: 595218 - DNA, 74 bp, Homo sapiens
cccaacatcctgctcctgctcatggacgacgtacgaggaacagcaaattcaggaaaaagtggcgacctttcgac

SEQ ID NO: 595219 - DNA, 95 bp, Homo sapiens
gactgcagcctcggcggtcagcaggatgatcggctgaatgtaacagaggaactaacgtccaacgacaagacgaggattctcaacgtccagtccag

SEQ ID NO: 595220 - DNA, 100 bp, Homo sapiens
tcgagtttgtggggaagatgctggggaaggctgtgtatgaggtgttcaatatgaatgccccagttcctcctgttaatgaaccagaaactttaaaacagca

SEQ ID NO: 595221 - DNA, 97 bp, Homo sapiens
tgtgatctgcgctaggtggcatctcctctcacggatgcctcgttctccaggtccccgtgcttgcccatggaggatgctgcagagaagataaagtggt

SEQ ID NO: 595222 - DNA, 75 bp, Homo sapiens
gtgttcatcaaggaatccatgtttcttccaagaagcagatacactgcctctaggactgggacagatagccactga

SEQ ID NO: 595223 - DNA, 83 bp, Homo sapiens
ccgcggatctggggccgtcctcaggcaatggacctcatcatgaccgttgctgtacttacaatgaaaacaacttggtggatggt

SEQ ID NO: 595224 - DNA, 100 bp, Homo sapiens
tcaaaagcccacttggcgatgggttacagtaagagatctttaatctcatgaagtacgacagctacagccgcttcttaaagtctgacttgtttttaaaaca

SEQ ID NO: 595225 - DNA, 98 bp, Homo sapiens
gagcagatgagaccgctactcacccgggcattgtttccaagtcgtacgagtgccgtctaaagggacaaggagccaccttcgtggagacagacagcccc

SEQ ID NO: 595226 - DNA, 101 bp, Homo sapiens
cctgcggcagtactttgaagaggcttttgagttcattgagggaagcatacgcacctcggatattctttgaggcttccagacctccatggtttactcccaga

SEQ ID NO: 595227 - DNA, 75 bp, Homo sapiens
cccgtccatcatagtcaactgcgtggaagagaagatattctggaggaaggtgtgaacgcaactttgcctcccagg

SEQ ID NO: 595228 - DNA, 84 bp, Homo sapiens
agggaaccctggtcaccgtctcctcaggggccccttactggacacggcccgagcggatggacaagaagctgctggccgtgccgg

SEQ ID NO: 595229 - DNA, 75 bp, Homo sapiens
ccttcagttcaaaacataatgtgattgtttggatttaggtggcgagtagaaaaagaagtaatttcaggaaaaggt

SEQ ID NO: 595230 - DNA, 80 bp, Homo sapiens
atgtcaacacgaccaccaatgatcaatgaactgagccatgttcaaatccctgttatgttgatgccagatgacttcaaagc

SEQ ID NO: 595231 - DNA, 100 bp, Homo sapiens
aatcgcaaggatatgatatcatggaaccagcagcaaagaagtgctatctggaaagagaggtttggaaagaaatcccggcctgcaatgtatgatgtgagcc

SEQ ID NO: 595232 - DNA, 75 bp, Homo sapiens
cagactgactggcacagtggagaaaccgcctcgaaaacggagaagcaggtgagacatggaatccattaaaattgc

SEQ ID NO: 595233 - DNA, 50 bp, Homo sapiens
gcacggagtcgccgcggagcgcaggactcacaccacccggcaagaactgc

SEQ ID NO: 595234 - DNA, 97 bp, Homo sapiens
ctgtcattatgacaggggtcatgacagatgaggcagagcccagcaaggtcagtttaggggctggtgcaaaggatgagttgcacattgttgaagcaga

SEQ ID NO: 595235 - DNA, 83 bp, Homo sapiens
ccgcggtccgccctcccgtgcgtccgtctgccggtgagcccgcccgcccgccggcccaggtattagaaaactactcggatgct

SEQ ID NO: 595236 - DNA, 98 bp, Homo sapiens
tcggcttctctacgcagaacccgggagtaggagactcagaatcgaatctcttctccctccccttcttgagccccccaagatgaacccagtggtggagc

SEQ ID NO: 595237 - DNA, 75 bp, Homo sapiens
tcggacactgcccccgccgccgccggagctctgcagcacgagtttccaggatggcttctgcatcaacttctaaat

SEQ ID NO: 595238 - DNA, 80 bp, Homo sapiens
atcgacattactgctcatgcctaaccttctatgaggcagagatcaatcttcaggttggacgtgataagtatgagcctgca

SEQ ID NO: 595239 - DNA, 75 bp, Homo sapiens
gaattgatctcgccaaaaaggacatctttggagccaggagtacaagcgcaagctagccagagtttccctggtgcg

SEQ ID NO: 595240 - DNA, 90 bp, Homo sapiens
ctgtacaagctttcaaagtcaatacagagtttcactcctgttacccaggctggaggacaatgatgtgatctcgggtcaccacaacctccg

SEQ ID NO: 595241 - DNA, 50 bp, Homo sapiens
gatcctggaccccatcttcaaggcccaggaagtacacgagaagctccgag

SEQ ID NO: 595242 - DNA, 100 bp, Homo sapiens
tggccaaagcctgcccagacggctcacctgtgcgggatggaacaaaaggcttctcgtcagtgcctcgcaggatggtaaacttatcatctgggacagctac

SEQ ID NO: 595243 - DNA, 80 bp, Homo sapiens
gtcaagacgatcatagtcactgcccaagaagatgaaaggattgttcttgttgacaacaaatgtaagtgtgcccggattac

SEQ ID NO: 595244 - DNA, 76 bp, Homo sapiens
actgcagcccaagcttcccatcacagtgaaagcagcccagagcctccccacggtcaacctgcagcctctggaatgg

SEQ ID NO: 595245 - DNA, 100 bp, Homo sapiens
ctcgagtgaatgggcggatctcatatcttcacttggcaaactcaacaagaccattcctcaagaattttgtatccaaggcccaaaagtttgttacccaaga

SEQ ID NO: 595246 - DNA, 100 bp, Homo sapiens
cggggcccgaggaggccaaggcgccagtgagaggcggttcattggcatggaaaaatgttcagtgggaggattagagttgactgaacagactcctgcttta

SEQ ID NO: 595247 - DNA, 100 bp, Homo sapiens
ggctgcgacgtgttccacctccgctacgcacaccacctccgtacaccaggggttggaaaaaccacactaggcaaagaacttgcgtcaaaatcaggactga

SEQ ID NO: 595248 - DNA, 100 bp, Homo sapiens
gctttgtaccaaagacctgggaaaaatgaacagactagccactttgcattgactggaaacaatggcatttacagaaagagtcaacagcagtggcaacagg

SEQ ID NO: 595249 - DNA, 96 bp, Homo sapiens
ctcagcctcccgaatagctgggactacagaaaactgtggatttagttactccactctgccatgtctttccaccactgcctgcacatttgagaccaa

SEQ ID NO: 595250 - DNA, 75 bp, Homo sapiens
ctaaacttttggccaagagaatgaagccccatggctgggggttatggagtgatgggtgacgatggttctattgat

SEQ ID NO: 595251 - DNA, 100 bp, Homo sapiens
attgttggcgccatcatcatgccccacaacatctacctgcactcggccctggtcaaggctgttatcaaagaacagcttcaagagactcagggattgtgtg

SEQ ID NO: 595252 - DNA, 82 bp, Homo sapiens
ttcggccctgggaccaaagtggatatcaaacattctgcagaaggagagtacagtgcactctgtagctatctatctttaccta

SEQ ID NO: 595253 - DNA, 110 bp, Homo sapiens
ctttgaaaccggcttctttgctggtggctgcttggacagctttcctgcccgctttggaggagtccactttgtcaaccagccctggtacattcatgccctctacacactca

SEQ ID NO: 595254 - DNA, 82 bp, Homo sapiens
gaggggctccggctggtctgtggtgagccggtggctgctggcagcggaatcccccagatcaagtgcttcctcaacggggtga

SEQ ID NO: 595255 - DNA, 87 bp, Homo sapiens
cggagcggtccgcgagccaccgaggcccagaacatccagtcatggataaaaatgagctggttcagaaggccaaactggccgagcagg

SEQ ID NO: 595256 - DNA, 90 bp, Homo sapiens
ttagagattgtgaagaagaatttcgatctccgccctggggtcattgtcagagctcaaccttcaacaagactacacagaacctggcccaga

SEQ ID NO: 595257 - DNA, 100 bp, Homo sapiens
ttctgcaaggtccggctgctggatggaggggattttgtcagcttgtcgtcaaggatcctcagtcttccacaatgaaccctgtttacagccccgtgcagcc

SEQ ID NO: 595258 - DNA, 88 bp, Homo sapiens
tctagcctctactcttccagttgcggcttattgcatcacagtaattgctgtacgaaggagggagccatggatttgctgcgggagctga

SEQ ID NO: 595259 - DNA, 100 bp, Homo sapiens
attatttgcacccagtcctgcagcgccagcagctggactatggcatctatgttatcaaccaggatttacaagaccagctagaggatatgatggaagatgc

SEQ ID NO: 595260 - DNA, 102 bp, Homo sapiens
tgagctgcgaggaaaatggcggcgggaggagcctgtgacattcagggatgtggccgtgttcttcagccaggacgagtggttgcacctggactctgcccagag

SEQ ID NO: 595261 - DNA, 96 bp, Homo sapiens
ttggttggtggaggctgtggcaatggaacaggcttgagaaacaggctgcccggcagctctgacagactcagaggacgagtccccagaagacatgag

SEQ ID NO: 595262 - DNA, 110 bp, Homo sapiens
ggttcaaggcccttcatgaaagtggaagtcaaaacaagaagacaaaaacattgctgaggcctgagagaagcaaaattgaagccaaggaagcttgtgattggctacgggca

SEQ ID NO: 595263 - DNA, 74 bp, Homo sapiens
ctctgtgctgcgtgtggtggaaggtgaacacacagtgttcatcccctcaggaggacacagcttttgaggtacca

SEQ ID NO: 595264 - DNA, 74 bp, Homo sapiens
ctggacatctgggtgaagttttaataagggtacatatgcaacagtatataaaggaagaagtaaattgacagaga

SEQ ID NO: 595265 - DNA, 90 bp, Homo sapiens
cgggcgggtgctggagctgttccgggccgcgcagctgccgaacgacgtggtcctacagacctctttattgtgcaaagctgccatccatgc

SEQ ID NO: 595266 - DNA, 90 bp, Homo sapiens
ccaatcctattgagatagacttccaaacctcagatgatactacaaatcattctaactcctccaaggaggtcccttcctcagctgttttga

SEQ ID NO: 595267 - DNA, 122 bp, Homo sapiens
agaaagtcattcacacggaggattaccggctgcgactcatctccctcaagttctttattggtgaaaacatgaatccagatggcatggttgctctattggactaccgtgaggatggtgtgacc

SEQ ID NO: 595268 - DNA, 75 bp, Homo sapiens
attgcattggtaactggtggagaccaaattttgaacctcctcagatgtgccgtttgggggtgctaaagctggtgt

SEQ ID NO: 595269 - DNA, 90 bp, Homo sapiens
gcgagctgagtggttgtgtggtcgcgtctcggaaaccggtagcgcttgcagcatgggctggttgatatgtgaagagccaacctgtcgcaa

SEQ ID NO: 595270 - DNA, 100 bp, Homo sapiens
gaggacctcaaagtgggacaatatcctctgtggagaacacccccccatggaggcgaggttaatggggttgacctgaggaactccagccacgaagaagcca

SEQ ID NO: 595271 - DNA, 83 bp, Homo sapiens
gcaatagcctggctgagggctcttgctcagcaatctttgtggtcaaaatgcagatcttcgtgaaaacccttaccggcaagacc

SEQ ID NO: 595272 - DNA, 98 bp, Homo sapiens
cactgaccagcgcgcaggacagcgccttcctcaacgacgcggacatggtcatgagctttgtgaacctgggaaaatcacagtgccttctgggtatatca

SEQ ID NO: 595273 - DNA, 75 bp, Homo sapiens
ggactgcggcgcttgcacgtcaacgggaggtgtgagcccaaagtgcacttacatttcaatcgaccaagttccaag

SEQ ID NO: 595274 - DNA, 90 bp, Homo sapiens
cacgataacatttagcctggaacagagcggcactcggcctgagcgggctggtgtgcagtggtgcgaccacggctcacggcagcctcagcc

SEQ ID NO: 595275 - DNA, 82 bp, Homo sapiens
gccgagcaggctgagcgatacgacgaccctggctgggcatccatcagcaggggtgtgctggtgtgtgacgagtgctgcagcg

SEQ ID NO: 595276 - DNA, 75 bp, Homo sapiens
gccacagagggctgccacaccaggaaggaagcctcaggtgaagcaaaaaatttattgccatatcttggaccccac

SEQ ID NO: 595277 - DNA, 75 bp, Homo sapiens
gaggtcgcacctgctgggggaacttcggaaccaaaaagaagcttcccagagccggggccaggagccccaagcgcc

SEQ ID NO: 595278 - DNA, 75 bp, Homo sapiens
ttctagtgtactcttactttgaaaaggtgaagacactggtggaattcctcattgataactgctttgaaatatttg

SEQ ID NO: 595279 - DNA, 99 bp, Homo sapiens
cagactagccagccggctacaattggagtcagagtcccaaagacatgggtactgagtttgagggtgcagtcatagctctgttccatttgttggccacca

SEQ ID NO: 595280 - DNA, 127 bp, Homo sapiens
cgccactgccctggggcagctgaactgagcgtatgtgccacgccgcccaggagacccctctgctgcaccacttcatgactatgagaagatgtttggcacgaaatgccatggctgtgacttcaagatc

SEQ ID NO: 595281 - DNA, 82 bp, Homo sapiens
ctgcagagcgcgcagtacctccgatctgcttggctttgaggaagagtggcagtactgcctcactgcataagggatgggatca

SEQ ID NO: 595282 - DNA, 100 bp, Homo sapiens
cctgcagcattgccaggactggacaccaaacacatagtgggaattgcctgtgggcctgcccagcctgtgtccatggcggctccaacagcaatcacagaag

SEQ ID NO: 595283 - DNA, 100 bp, Homo sapiens
cagagcaggacgaaccgccaatcgcaaggcacctctgagaacttcaggaggttccccaatacaactcatgagggtttcaatgtcaccctccacaccaccc

SEQ ID NO: 595284 - DNA, 98 bp, Homo sapiens
agaagaccgaagcgttcgtatctggaagttctgcctcctgggggcattgctggcccccatccgagtgcttctggcctttatcgtcctctttctcctct

SEQ ID NO: 595285 - DNA, 74 bp, Homo sapiens
tgtgctcgcgctactctctctttctggcctggaggctatccagcgattccgttggtgaacctgtaaaaacaaaa

SEQ ID NO: 595286 - DNA, 82 bp, Homo sapiens
gggaggtgaccaaggaggagtacaaggacatcctgcgcaaggccgtgcagaagaggctgtggccaggccagctgggctcggg

SEQ ID NO: 595287 - DNA, 51 bp, Homo sapiens
tttctcatctttatactcttccaggttatgaagacagtatggagtttccag

SEQ ID NO: 595288 - DNA, 82 bp, Homo sapiens
cgaccctagtgctcgtcgccgtggcgccatgggtgttgtccgcagccgcagggccgcctgggcagaatgtcacgatggacga

SEQ ID NO: 595289 - DNA, 74 bp, Homo sapiens
aaaagtagggcttctcaaggagtctattgcgtctgcagacatggatttcaaccagctggaggcattcttgactg

SEQ ID NO: 595290 - DNA, 100 bp, Homo sapiens
ccgacttgtccactgaagtaacagcagcaatgaccttccctcgggaattccacctctgcgtttttccctccaggctactccagagcaaataagcatggac

SEQ ID NO: 595291 - DNA, 96 bp, Homo sapiens
caccaaccgtgatgacgtccagggctatgccgccaagaccgtctttgaggcaatgtcccctgatggggaggccatcgtcactggtgctggagacga

SEQ ID NO: 595292 - DNA, 51 bp, Homo sapiens
ttgaagatgttactgctcaatttgaaagatttcagtaatgtgatcagcaag

SEQ ID NO: 595293 - DNA, 75 bp, Homo sapiens
gctccagagagacgccctcctccattctcttaggctccaaccaaggctctgctcttccaccaaagccacctaagc

SEQ ID NO: 595294 - DNA, 50 bp, Homo sapiens
attctcgtcagcatcacagtattcagatgtttcctgactttctgagaagc

SEQ ID NO: 595295 - DNA, 100 bp, Homo sapiens
acagctgctgcaatcgcttgggagagctcctgggccacccctcctttcaggtcaaggttttcacctcaaatggccccacggtgatcatgcccacctggtt

SEQ ID NO: 595296 - DNA, 97 bp, Homo sapiens
aaggaatatatcctgactgattgagggcctgaggctatggcaggaggagcaggagaggaaggtgcaagccctctcggagatggcatctgaacaactg

SEQ ID NO: 595297 - DNA, 83 bp, Homo sapiens
ctgggcaggctttgaggtgcttgtcggtctggactgatgaaaatccatatggtctcctttacagaaaggggcttggataagga

SEQ ID NO: 595298 - DNA, 95 bp, Homo sapiens
cgacaagccgctggcagccgcggatctcaccgccgctcaggccctgggcgctgcctatggcacagccaagagcggtaccggcattgcggccatgt

SEQ ID NO: 595299 - DNA, 75 bp, Homo sapiens
aaatggtcatccccacctgtttgcttggcaatgaaaccttgtgagtttccagaaattcaacatggacatctatat

SEQ ID NO: 595300 - DNA, 100 bp, Homo sapiens
tcccggatgaacagagaaagcgacagggatgacgtagctttgccaaagacttagaagctaagcagaaaatgagcttaacatcctggtttttggtgagcag

SEQ ID NO: 595301 - DNA, 96 bp, Homo sapiens
aaaagagccctggaatatgaagcaacatgagatggtggatgaacccacagataacaacgaacttgatgcaagtgataggtttgccaaggtcagacc

SEQ ID NO: 595302 - DNA, 50 bp, Homo sapiens
agacagtctgcctgggggaaattccaacaatgtctcacccatcttggctg

SEQ ID NO: 595303 - DNA, 76 bp, Homo sapiens
tcttgggtttagcaaaagttcatctccttctgcatccttaactgagaatgagcaaatgcagccctgaggatttggc

SEQ ID NO: 595304 - DNA, 50 bp, Homo sapiens
ccatcccttccgaggcccgacttcgacacgaatgcagagtttgagtccag

SEQ ID NO: 595305 - DNA, 95 bp, Homo sapiens
tgagaagcaagaaggccctggacacagcaatatctctgggctttcacaggctgtcagccagatgaaacagcaaaaatatccaacaaaagtctcct

SEQ ID NO: 595306 - DNA, 100 bp, Homo sapiens
ttactttggagcatcattttgcactggcaggttcaaaccttgtactactcagctgatcacaagctgcttgatgggaacctactagatggacaggctgagg

SEQ ID NO: 595307 - DNA, 83 bp, Homo sapiens
gtgcatctgcagtacaggatatgaagaaattgagggttcttgccatgaataccaagctgctattttacacttgaagagggagc

SEQ ID NO: 595308 - DNA, 118 bp, Homo sapiens
ctggcttgatcgtcaagtccttcaagcagttcgcactacagcgggagcaggagctggagaacctgctgggactacagaacatccccaggccgttcttcctgcaggtgtaccacacctt

SEQ ID NO: 595309 - DNA, 100 bp, Homo sapiens
ccatccgaagcaagattgcagatggcagtgtgaagagagaagacatattctacacttcaaaggtttgtcaagggctatttaatgagttactagaaaatgg

SEQ ID NO: 595310 - DNA, 51 bp, Homo sapiens
gaaggaatatatcctgactgattaccacgttgatgagcgaacaatatgcaa

SEQ ID NO: 595311 - DNA, 100 bp, Homo sapiens
ggccctgtccctggctccctcattaccgtcgccagcggagcgaacccgagagcgtggagcgggctgggccaggaggatttgacagctaaggatattgaag

SEQ ID NO: 595312 - DNA, 100 bp, Homo sapiens
taagaagatcaatagactgtctacaccaatagcaggattgagcttttgtgctgccttgcaccaggaactcagagaatactatcgattgctctctgtttta

SEQ ID NO: 595313 - DNA, 90 bp, Homo sapiens
atcggctgcgagctcctcaagaatctcgtgctcaccggtttctcccacatcgacctgatcatggaagggaagtggttgctgtgtatgtta

SEQ ID NO: 595314 - DNA, 89 bp, Homo sapiens
gcaagaggccccagcccgtgaaaagtgaggcctccgaccagggagaccttccatcctcctccacctgttccacccagaggacgctgatt

SEQ ID NO: 595315 - DNA, 104 bp, Homo sapiens
aagaagggctccaccatggagcgctggtcccgcagcccccggaagccaatagactccctcagggactctcggtccctcagctactcgcctgtggagcgtcgccg

SEQ ID NO: 595316 - DNA, 82 bp, Homo sapiens
cagacacgacgtctggcaggaacctcggcctcagaggattatattccatcacaacaagatattctgcttgccagaagaccca

SEQ ID NO: 595317 - DNA, 98 bp, Homo sapiens
cttttccttggagagtcataacatatcactgactgggaaactgaacagccaagactcctataacaattttaccaacaacaaccctggcaaccctcggc

SEQ ID NO: 595318 - DNA, 90 bp, Homo sapiens
ggaggccgcagcagtcagggacatttctgaagcgagcgtcttcgatgaatatatacagccctgctctgggacacacctccattggattta

SEQ ID NO: 595319 - DNA, 98 bp, Homo sapiens
tatgagaagtatcgtaacccccaaagagaaaaagaaatgatgcaattgtatatcagagacccccgcagcaaacacaagtttaagatccacacgtactc

SEQ ID NO: 595320 - DNA, 75 bp, Homo sapiens
ctccatcctgctggccatgctctacgggacaggctgcaggtgcaccaggagctgcgagaggagctggccaaggtg

SEQ ID NO: 595321 - DNA, 100 bp, Homo sapiens
tgggggtcgagcacataacggggttcgggtgtctcgtgtgtgaacatcacagattatctttctcaaggaatagatctttctggaatagaagtgatagaaa

SEQ ID NO: 595322 - DNA, 75 bp, Homo sapiens
tggctgacaacctgctgagggtcttcgaggctgtggaacaggatagccgcttcccaaagatcctggagaacctaa

SEQ ID NO: 595323 - DNA, 101 bp, Homo sapiens
ccgaggtagaagaagatgaacccacagatttgaaatgtgttacggatgagtgtttcttttttgaacgattggaatctaataactacaatacttaccggtca

SEQ ID NO: 595324 - DNA, 100 bp, Homo sapiens
gccccaccagcccagtccctcaaccctttcctggcaccaggtatggttccgaccggcgtttagccgagctctctgattaccgccgtttatcagagtcgca

SEQ ID NO: 595325 - DNA, 83 bp, Homo sapiens
acactgaagctgggaggcaaaggctacaagctgtccccagaggactacacgctcaagttggaatcgaagcctcttaaaatggc

SEQ ID NO: 595326 - DNA, 80 bp, Homo sapiens
gtctccattatttgagatgagttacatcttggaggtgacttaagagattaaaattaatttggttgctgttggttctgaac

SEQ ID NO: 595327 - DNA, 100 bp, Homo sapiens
ggccctgatcatcctgctgggcttcgtccagatcgggaaggggggatatgagactttctactcggaatatcctgagtgttgcgtggatgtaaaacccatt

SEQ ID NO: 595328 - DNA, 100 bp, Homo sapiens
ggactttcttccagcttctgctgtccttctttgtggagagcaagcaaattcaacacccaacagcttccttaatagcaaaggtagcaacagcccaggatga

SEQ ID NO: 595329 - DNA, 74 bp, Homo sapiens
aaagatacgaggctctaggagaggatcccattgaagataccacgctgcatgtgtccttagtagtcatgtctcct

SEQ ID NO: 595330 - DNA, 75 bp, Homo sapiens
tgagtctcctcaagctgggatcagattcagaatggacagtttagaagaacctcagaaaaaagtctttaaggctcg

SEQ ID NO: 595331 - DNA, 98 bp, Homo sapiens
tctcttcccacggacgcgcgagacaatgaggaggctggtgggcttaaactggatggccggcagctcaaggttgacttggcggtgacccgtgatgaggc

SEQ ID NO: 595332 - DNA, 82 bp, Homo sapiens
caccatgccgctcctaagcctgcacagccgcggcggcagcagcagtgagaggctccctggggaagggaatgcagggttgctg

SEQ ID NO: 595333 - DNA, 109 bp, Homo sapiens
gatcctggtcctcgatccgcccacagacctcaaattcaaagaaggcagacggtaacaagtactccttgctggattgaacttcatctgaatggacctctacagtggttgg

SEQ ID NO: 595334 - DNA, 90 bp, Homo sapiens
ctttcactgccatcggggacaagttctctcctgcgctatggtggaaacctgtccctccaaagtgccatgagtgtacgattcaacagcaac

SEQ ID NO: 595335 - DNA, 71 bp, Homo sapiens
tcctcagccaccgctccctcttcccacggaacctggagtagagcgtgtgctccgagatcttcgcatcttcc

SEQ ID NO: 595336 - DNA, 100 bp, Homo sapiens
agcaactgaggcagcggcaggctcaggtgcagccgctgcagatataatttctacagtagaatttaatcattctggagaattactagcaacaggagataaa

SEQ ID NO: 595337 - DNA, 90 bp, Homo sapiens
cgggttttgatcgcgcgtttgtgtagcggccctccaggcactgaagcgtaagaagaggtatgagaagcagctggcgcagatcgacggcac

SEQ ID NO: 595338 - DNA, 75 bp, Homo sapiens
cgccccctacccgcttctcgtagtcctgggagcacagcagaagtaacattgatgatggcacctcagatcgcccct

SEQ ID NO: 595339 - DNA, 75 bp, Homo sapiens
gattttttcctaagagtttactggattctgtcaaggccaaatacctcaccaagaaaacccaggcagccagcgtgg

SEQ ID NO: 595340 - DNA, 82 bp, Homo sapiens
cactggccctggtggggattgacagccacgggaaggatgcagcaccgaggcttcctcctcctcaccctcctcgccctgctgg

SEQ ID NO: 595341 - DNA, 100 bp, Homo sapiens
gagagcagagggagaccgttctgcaagcctacatcagcaatgacctcttggactgttatagccacaaccaggaggagcagcccccacaacatcgatccaa

SEQ ID NO: 595342 - DNA, 74 bp, Homo sapiens
tcggcctcggagcaacgagcgcagcgccggactcctcctattttgaggacttctccaacatctccatcttctcc

SEQ ID NO: 595343 - DNA, 75 bp, Homo sapiens
tgctgaagagtttccaaggagagcggctatgtgactacgtttgtgacctcctcttagaagagtcaaatgttcagc

SEQ ID NO: 595344 - DNA, 99 bp, Homo sapiens
acaacggctgggtaacccagatcgctactaccccgcagttcccggacatgatcctctccgcctctcgagcaaaccagtccagctacgggggcccagcca

SEQ ID NO: 595345 - DNA, 74 bp, Homo sapiens
agggcagccggcgggaggaacgctcactgtcagcgcctggaaacttgctcacttgcagagtgggcaggatctta

SEQ ID NO: 595346 - DNA, 97 bp, Homo sapiens
tgggggcctgcctgggagcctgctccctgctcagctgccggagctggagtttgttcagatcatcatcatcgtggtggtgatgatggtgatggtggtg

SEQ ID NO: 595347 - DNA, 83 bp, Homo sapiens
aaaagattgcccacgaattgggtcgatctgtgacagatccaccgctggagtcgctggccacagtggaggagacagtggtgcgg

SEQ ID NO: 595348 - DNA, 83 bp, Homo sapiens
acgagggttcccgggattggaccgacgcagccatggtacacatgacattcacgccctgatccttgggagagctatcacgggaa

SEQ ID NO: 595349 - DNA, 87 bp, Homo sapiens
ccaagcctgtactcttgccagagctgcccacgacagtggcaaccctgagcatactgggaactcggcgagtagtctccatcctgggcg

SEQ ID NO: 595350 - DNA, 86 bp, Homo sapiens
ttgagtggtgatgcttttttacaccttcttccacatccaaggccacctttgatgccatttctaagacctacagctacctgaccccc

SEQ ID NO: 595351 - DNA, 73 bp, Homo sapiens
cgcttcagttctcccggtgtggccacgagtcgggttctagtaaataccgcttgctgtgttttgatgttggtgg

SEQ ID NO: 595352 - DNA, 75 bp, Homo sapiens
gccgtcttttgaagcaccctaatattggataaagataaagtttctctaaccaagaccccaaaactggagcgtggc

SEQ ID NO: 595353 - DNA, 90 bp, Homo sapiens
gagaacttgagaaagcaaaagtcgctgctgccaatgtggacagtgtggcactgaaggggggccgtggcagtgcttccatggtccagaagt

SEQ ID NO: 595354 - DNA, 82 bp, Homo sapiens
cagcgcctcggaggccgcccccgcggcggccgcgctcttcgcctggatttggagcaagaggtggtggtggccttcccccgaa

SEQ ID NO: 595355 - DNA, 87 bp, Homo sapiens
ataacaccctgtaacagctgaacctgcttttttaaaggctgcagaaaacttcactcttttggttaagaacaacatctggtatcccaa

SEQ ID NO: 595356 - DNA, 90 bp, Homo sapiens
ccacgatgccggggatcgacaagctgcccatcgaggagacgctggaggacagcccgcaggtctacttccccagcaggacagcatcattct

SEQ ID NO: 595357 - DNA, 105 bp, Homo sapiens
ttcgcctccttcaccgccgcagaccccttcaagttctagtcatgattgtcactgctgttccaagggcacacgcagagggatttggaattcctggagagttgcctt

SEQ ID NO: 595358 - DNA, 74 bp, Homo sapiens
ctgggaaggaattcaggctggaaatggacgtgatgctgaatccaggcagtgccacttcgaatgttgctatttct

SEQ ID NO: 595359 - DNA, 100 bp, Homo sapiens
cctattcggccatctttgctcctccctgcaactaactccattcttaattgctcccaaaagtggcccacgaaaccttcaagtgtacaatgcaacatctaac

SEQ ID NO: 595360 - DNA, 100 bp, Homo sapiens
cgccatcgttgctgccttcttcgtcaagaccagcatctcagacatgtcgaaaaagatgttttgatccctaaaataatgagagaaaaggccaaagagaggt

SEQ ID NO: 595361 - DNA, 80 bp, Homo sapiens
gacaaatcctagcgaatttttggagcatctccacccaggaacctcgccatccagaaaatctcagagtgcggagcagcggg

SEQ ID NO: 595362 - DNA, 82 bp, Homo sapiens
cgccgctctgtctacaacccgaggtgtggaaacaggaagagaactagaactggaagtaaagcattgaagatgtgactgaatt

SEQ ID NO: 595363 - DNA, 75 bp, Homo sapiens
gagcgcgcgcgcgaaaactccgggcagctgagatgagtgaactgagtgtggcacagaaaccagaaaaacttttgg

SEQ ID NO: 595364 - DNA, 100 bp, Homo sapiens
cttccccttcaattctcccgaactgggcctctttgcccagcctgcatgaaagctacacttcaaccagaggctaatgtaatgcttgaatatgatattgatg

SEQ ID NO: 595365 - DNA, 134 bp, Homo sapiens
ctggacaagagcatcacgctgccccccgacgagatcttccgcaacctggagaacgccaagcgcttcgccatcgacatagcaaacggggattcagcgtccgatcctttggaacagggactcacgtgaagcttcca

SEQ ID NO: 595366 - DNA, 74 bp, Homo sapiens
ctctgccaaaatctccaaccagattttccacatcattcatttttctgaagccagaagatgagaactatcaaatg

SEQ ID NO: 595367 - DNA, 90 bp, Homo sapiens
gaagcaggctccagagctgagcttatctagtcaggatttggagactgcctcttcaaggtgtgccccatgaaccgctactcggcccagaag

SEQ ID NO: 595368 - DNA, 83 bp, Homo sapiens
tgtctcctcagcagacgcggaagctgaaggaattgaagaatctgcagcagcaatacttacagattaatcaagagatcactgag

SEQ ID NO: 595369 - DNA, 82 bp, Homo sapiens
gcgcccgggaggaaggaacgaggcaaggagctaaagcagcgtgcgttcagccctgggaggctgaggggatctggcggtggag

SEQ ID NO: 595370 - DNA, 100 bp, Homo sapiens
aagaccttcaatatcaaaaatgactttactgaagaggaggaagcccagccggctcagttcggggaagctgcaggagttcggcgtgggtgatggcagcaag

SEQ ID NO: 595371 - DNA, 98 bp, Homo sapiens
cgtgctcttgctaaagaggtagcaagaaagaaaattagagtgaatgtagttgcaccagggtgttttgaatgctgtatcaaatgcctggggggcattcc

SEQ ID NO: 595372 - DNA, 60 bp, Homo sapiens
attacttggactagtttatatgaaatttgtgggatatgaacgagactgccaaacaagaag

SEQ ID NO: 595373 - DNA, 83 bp, Homo sapiens
ttagatgcaggataatatgctccaacgttacaacattaaaggtcggtgcccactttctggaggcagtggtgaggaagttcgat

SEQ ID NO: 595374 - DNA, 100 bp, Homo sapiens
cttcgccctttccacctcgcggcagttcggagccttcacgtaaatgggtccagtcatgcctcccagtaagaagccagaaagctcaggaattagtgtctcc

SEQ ID NO: 595375 - DNA, 100 bp, Homo sapiens
accctcactggagaatccagagtaactctcaggagccttctccgcagttggcttcctcggtagcttccacacggagcatgcccgagagcctggacagccc

SEQ ID NO: 595376 - DNA, 75 bp, Homo sapiens
agtaaagaccaagtgctttgaaatgacgattccacagtttcagaagacacgggcatatcataggctgaaggatga

SEQ ID NO: 595377 - DNA, 101 bp, Homo sapiens
gctggtgcgggatccttgtctttgtcctgtactttgtgcagctggttgtcttcttgcctgccctgtgtcgtaaaatgggggtcccttactgcattatcaag

SEQ ID NO: 595378 - DNA, 88 bp, Homo sapiens
aagcgggctggcaggcgagggagcccgcgtcggctgagagcccacaggcccccacagttccagggtctccctccactgctgtagtaac

SEQ ID NO: 595379 - DNA, 82 bp, Homo sapiens
ctggagcaattaaagccactgctttcgacatatctgaagagatggattaagaatgctttggattaaggattgtggagcacat

SEQ ID NO: 595380 - DNA, 75 bp, Homo sapiens
caaataatagcaagatatgtaccattgactactgttcgaagatttttggaagaatactgagaacggcataaagtg

SEQ ID NO: 595381 - DNA, 100 bp, Homo sapiens
ctcttgccgccacctccagttctgggagcggagcgccgccgctgttgccgggcaacgcggtaagaatgattgatgttggctgatattggagtgctcattc

SEQ ID NO: 595382 - DNA, 98 bp, Homo sapiens
ccaggccggccgggcaggatgcgctaccgggcgtcggtaaataccagctgtcccctacagtgaatatgccccaagatgacactgtcattatagaagat

SEQ ID NO: 595383 - DNA, 49 bp, Homo sapiens
gcttcagactgtaaattccaaagggatcatagacggtatttctatgtaa

SEQ ID NO: 595384 - DNA, 100 bp, Homo sapiens
attggcaccttcaaggcttttgacaagcacatgaatttgatcctctgtgactgtgatgagttcagaaagatcaagtgctgggtaggccaggtttcagcat

SEQ ID NO: 595385 - DNA, 74 bp, Homo sapiens
agggaggatgacgaacccaacctggtgcccggcccgcaggattttttatcaagcagaaatgcatcgaacaacga

SEQ ID NO: 595386 - DNA, 98 bp, Homo sapiens
cacgctgaggccgaggcggagaaggggcttcctgagcgtcccagtacactgacagaggaaggaagcagccaccctcgccatggcctccccgcccgcct

SEQ ID NO: 595387 - DNA, 100 bp, Homo sapiens
actgcataacattggcagtgtggtgcagcacagtgagggggatgaggagaacaatccccttgagacagaatatggcctttctgtctacaaggatcaccag

SEQ ID NO: 595388 - DNA, 75 bp, Homo sapiens
ggaggaggattcagggaataggagctggggagcccttctgcgccacaggtgaaaggtgtagcagtcactcggcct

SEQ ID NO: 595389 - DNA, 75 bp, Homo sapiens
ccgcccatgaagccagatttctcccagaggtatatggaggtcagtgggaacctgagggatttgtatgatgataag

SEQ ID NO: 595390 - DNA, 82 bp, Homo sapiens
accagagataattgataacaccctgtaacagctgatttttcagaagaagtgaagtcaagatgaagaaccatttgcttttctg

SEQ ID NO: 595391 - DNA, 99 bp, Homo sapiens
tgagcatagtgatcccattgggggttgatacagcagagacgtcatacttggaaatggctgcaggttcagatctggctcttgctgattgaattcctttgg

SEQ ID NO: 595392 - DNA, 100 bp, Homo sapiens
ggaattgatttgggaacaactggtcgtcttcagttaatggcaagacttgcagagggacactttgccaccatcaccttgaccttcatcgacaagaacggag

SEQ ID NO: 595393 - DNA, 95 bp, Homo sapiens
gctgctggatggaggggattttgtcagcttgtcgtcaaggctgcacatggtccgtctaatgctgttggagagattactgcagaccctgcctcaat

SEQ ID NO: 595394 - DNA, 51 bp, Homo sapiens
gacactgtccggatcttccctccctgtattaggagagttcctgcatccctg

SEQ ID NO: 595395 - DNA, 100 bp, Homo sapiens
cagcctttccatatgctcctcctcctgtcccggacctatgaatcctctgatcgcatcacccttgagttactcatcgaatctgaaagcggctgatactgac

SEQ ID NO: 595396 - DNA, 101 bp, Homo sapiens
cgcaaaagaaaagaatctcaaagtgaaaggaccagttcgaatgcctaccaaggcctgaagctgcccagcaggcattccaaggcctgggtcctggtttctcc

SEQ ID NO: 595397 - DNA, 100 bp, Homo sapiens
ccgcggcgaaggtgaagagttgtcccagctcggcccgcgggggagccccgggagccgcacgcggtgcagaggggcaggatgccgccgacccagccgaccc

SEQ ID NO: 595398 - DNA, 101 bp, Homo sapiens
gagtgaggagaccatagctgcacagccagggcgagctgaggatcagtgtcctgcctgcctacctgtcctatgatgccccatggcctgtcaggaagatcccg

SEQ ID NO: 595399 - DNA, 82 bp, Homo sapiens
tgcgtccgagtctccgccgctgcgggcccgctccgacgcggaagccattcaaactcctccccacgacactctgaagcagcga

SEQ ID NO: 595400 - DNA, 75 bp, Homo sapiens
caacatcgatgggcggcggaaaatagcctttgccatcactgccattaagggaaatgaataagcgtctaacagaag

SEQ ID NO: 595401 - DNA, 88 bp, Homo sapiens
gaagccaccttactctgagggtcaagaattgccgcttccttttagttacttgtgctcactgatccgcctccagggccaccgccatgtc

SEQ ID NO: 595402 - DNA, 83 bp, Homo sapiens
ccactattctttctccatcaccaggaatccggtcaataatgagggtggcaatcaaggtttgacagtagtaattcaaggacaag

SEQ ID NO: 595403 - DNA, 100 bp, Homo sapiens
cccgggccgccctctctcggagttggcaggaagccaggttgcagggtgtccgcttcctcaggtccacgctgcttttatgagctgtaacactcaccgcgaa

SEQ ID NO: 595404 - DNA, 78 bp, Homo sapiens
cgtgcagcgcaaccacgagacggccttccaagttgttgacctcctgtactggagagacattaagaagactggagtggt

SEQ ID NO: 595405 - DNA, 100 bp, Homo sapiens
ctggctccagcagcccagttgacagtggctgaggccagttcctgatcatcctgaggaacaccaggtaattattcgaggtggaggacatattttaccctat

SEQ ID NO: 595406 - DNA, 83 bp, Homo sapiens
ctcatcttcgtggggcgtgaggagtgtgagctcatgctacagaggttgacggatatattcagacgttacgacacggatcagga

SEQ ID NO: 595407 - DNA, 100 bp, Homo sapiens
ctcagcctcccgactagctgggattacagcctgcctgctccgcttcagcggactctcgctggtctacctgctcttcctgctgctgctgccctggttcccc

SEQ ID NO: 595408 - DNA, 100 bp, Homo sapiens
agcgctatcgtgacctgcttttcggttccgggtcttggccccgtccttacctcacagattgttgtaggagataaagttgttttgatgcctgtgaatgcag

SEQ ID NO: 595409 - DNA, 133 bp, Homo sapiens
aagccccaaccacacaccagcggctgcaggactgggcacagcatgagatccaaaggcagggcaaggaaactggccacaattgtatatgaacacagatcaagattagagaaatccttgcaaaaagaaagacttg

SEQ ID NO: 595410 - DNA, 75 bp, Homo sapiens
ccctccatcttgcagcccagaagattagaagcccaggacccaggaaggagacacaggaaatttattcaaagtccc

SEQ ID NO: 595411 - DNA, 90 bp, Homo sapiens
cgatcatgatggagaagtatatgctacaggaggagaggttcaaattgcaatggttcaaaccttgtactactcagctgatcacaagctgct

SEQ ID NO: 595412 - DNA, 90 bp, Homo sapiens
ctccagaaaaatgcttatttggggcaatgctaaatattgcggcagttttatatccataatgagatggcatcaacatcagataaaggtgcc

SEQ ID NO: 595413 - DNA, 100 bp, Homo sapiens
attcaaggatgatccagttggaccttttggacaggaaagtgtaacatcagttacagagcctccccatggccacccatggaccagtcggcattcacttcct

SEQ ID NO: 595414 - DNA, 100 bp, Homo sapiens
ctcacaccaaagccttggacccctcccagcctgtgacctttgtgaccaactccacctacgcagcagacaagggggagatgaaagatgaccaggatcatta

SEQ ID NO: 595415 - DNA, 100 bp, Homo sapiens
agaacctcaggcggctgctgtacgtctcatgcaacccccgggcagccatgggcaactttgtggaggggtccactggacggggcctgagctacaacttcac

SEQ ID NO: 595416 - DNA, 98 bp, Homo sapiens
aataattctccattgagaagagagaagaacattctcgaatacctagaatgggtttcagctcctggcatcagctctattcaaatctggttcagatttta

SEQ ID NO: 595417 - DNA, 83 bp, Homo sapiens
cggcagtcctgtttccctgtaagccatatcctgcaaatgagagttctaaacttgtctctgagaaggtggatgactatgaacat

SEQ ID NO: 595418 - DNA, 90 bp, Homo sapiens
aacagtaagaaatcttgttggcaaatcagatgcagctgttttaactatccctgcctgtgactttcaagcttgtcaaaattcccaaaaatg

SEQ ID NO: 595419 - DNA, 100 bp, Homo sapiens
cgagcccagcggagcctgagcaaggagcgggtccgtcgcggagccggagggcgggaggaacatgacatcgcggaggaaattgacaatggcccttcagcta

SEQ ID NO: 595420 - DNA, 82 bp, Homo sapiens
gtctggagtgcgtgggggaccggctgttggcggatctggtggctggacccagagctgacctatggctgcgccaagcccttcg

SEQ ID NO: 595421 - DNA, 73 bp, Homo sapiens
aggacacacctaaacatgtggaatcccaatgccggtcatcatcagatttgaaatatttaaagtggatacaaaa

SEQ ID NO: 595422 - DNA, 116 bp, Homo sapiens
aaacctagtaatctagctgtgaatgaagactgtgagctgaaggcagaagtcaattcatctggaaagactatctctgagtcagacttaaaccactctttttcactaactgatttaca

SEQ ID NO: 595423 - DNA, 96 bp, Homo sapiens
tgccataaacaaaagctattacaatgtgacaaggcgcctctgtcgaagagccttctgctggtccccagtgccctctccctcctgctcgccctcctc

SEQ ID NO: 595424 - DNA, 100 bp, Homo sapiens
tgtatgtagaagaccagaagtggatggagacttcacgttacagcatggaagctgttgccaagtttgatttcactgcttcaggtgaggatgaactgagctt

SEQ ID NO: 595425 - DNA, 77 bp, Homo sapiens
cgaaaagccacttgaagaaaagggtgaaggaggcgaattttcagttgatagtgattcgcctttgccagtctcatctc

SEQ ID NO: 595426 - DNA, 50 bp, Homo sapiens
tggagagtcataacatatcactgactgctatgaagacggccaagtgggag

SEQ ID NO: 595427 - DNA, 61 bp, Homo sapiens
cgaccccagagaggcgctggacagggcagctggtggaatttttgaagaaaatggaatctcg

SEQ ID NO: 595428 - DNA, 75 bp, Homo sapiens
caccctcctgccctgcttttatttcgtcgagtttgcagtcctgatgtggctcctgacctacgttggcgctctctt

SEQ ID NO: 595429 - DNA, 100 bp, Homo sapiens
atgaaatttagagttcaagcaagcaagatacgagagcttttagcagagaagggtcttactacatattgcaacagaagataatattggaggtgaagagggt

SEQ ID NO: 595430 - DNA, 75 bp, Homo sapiens
aattacaactttcggggcatgtacaatcagaggagaatgcagttgaaactaattttgtggatagagaaactgttg

SEQ ID NO: 595431 - DNA, 83 bp, Homo sapiens
gtaatggaaaaggtggagaatcaatttatggtggatattttaaagatcagtgtactgttacccggacatacctattccttcac

SEQ ID NO: 595432 - DNA, 101 bp, Homo sapiens
tccttcagtgaggccttgctgaagaggaatcaggacctggctcccaattctgctgaacagggtatagttaataaagtgtcttctagccacattggctgttt

SEQ ID NO: 595433 - DNA, 83 bp, Homo sapiens
ctggcaccccgaacgggttgcttcccccgctgcgaggtgtccctggccagtgtccttccacctgtccacaagcatggggaaca

SEQ ID NO: 595434 - DNA, 100 bp, Homo sapiens
aaaacccacagaagttgtattagatgatgacagagaagatctttttgcaggtgccgtgagcgatgtggagatgcaggaacactatgatgagttttttgag

SEQ ID NO: 595435 - DNA, 92 bp, Homo sapiens
tcggtcccgcgctgcgcatccccgcggacgccacagcgctgtcgcaatggaagaagagatcgccgcgctggtcattgacaatggctccggca

SEQ ID NO: 595436 - DNA, 95 bp, Homo sapiens
gattggaagctttatcgatatataccaacaagaaggcaccaggggtctgtggaggggactgccaaaaagagcaagatcctgtccaaggaagaaca

SEQ ID NO: 595437 - DNA, 82 bp, Homo sapiens
agcgcgagcggcgcgagaaagtcccagagggtggaaggagccaggacgcacccccactgctgctgcaggagccgctgctgag

SEQ ID NO: 595438 - DNA, 117 bp, Homo sapiens
cctccccctcggcctcgcggcgacggcggcggtggcggcttggacgactcggagagccgggggatatgagactttctactcggaatatcctgagtgttgcgtggatgtaaaacccat

SEQ ID NO: 595439 - DNA, 100 bp, Homo sapiens
agcttatactcctcccagtgacgggtctggagtgcgtgggggaccggctgttggcgggcacgggcgagagcgggaagagcacgttcatcaagcagatgcg

SEQ ID NO: 595440 - DNA, 87 bp, Homo sapiens
ataatgggcatacatttcaccgtataattaagtgatgcggctgactaagcctactttattcaccaatatcccagtaacatgtgaaga

SEQ ID NO: 595441 - DNA, 100 bp, Homo sapiens
aggaaaacatgacgtctccagccaaattcaaaaaggataaggagatcatagcagagtacgatactcaggtcaaagaaatgacctccaccttcaacccccg

SEQ ID NO: 595442 - DNA, 111 bp, Homo sapiens
caagggcatcgccgcctcagccgccgccgccgccgttttcgcctgcagctgctcaccgtggaagatagatgataagcctgtaaaaattgacaagtgggatggatcagctgt

SEQ ID NO: 595443 - DNA, 100 bp, Homo sapiens
acgggtactggcaattggttttcggctttggcgctcggggtgactcttctcaaatgccttctcatccccacatagtgttcaggcgcttcgtggaggttgg

SEQ ID NO: 595444 - DNA, 100 bp, Homo sapiens
ttcaggagaccgtcgttgccttgtatttccagagaacagagaatggtggcatgaagctcaaaaaaatccaaagataagacctaatcctcatgacaccaaa

SEQ ID NO: 595445 - DNA, 101 bp, Homo sapiens
gcaggaggccgtcaagaagggctcgaccgcgacctcaggatatcattgtgtttgtaattggaggagccacctatgaagaggctctaacagtttataacctg

SEQ ID NO: 595446 - DNA, 75 bp, Homo sapiens
tgactcctggagaacggatcaagtgcttattacagatgactttgaagaagccaaggaaattttgacaaagatgag

SEQ ID NO: 595447 - DNA, 125 bp, Homo sapiens
ccggctgcccgtgtgcccggcaggtggagccgcccgcatcagcggcctcggggaatggaagcggagaacgcgggcagtgagttattctccccacctcagaagtaccagcttttggtgtatcatgc

SEQ ID NO: 595448 - DNA, 100 bp, Homo sapiens
agctgagcaagctttggtgcggcctcggggccgagctgtgccccccttcgtattcacgcgccgcggggaactctaatgatccaggacaaagaagttaccc

SEQ ID NO: 595449 - DNA, 75 bp, Homo sapiens
tcaagaagggagggaggctggtggagaagggaactctaatgatccaggacaaagaagttaccctggagtatgtat

SEQ ID NO: 595450 - DNA, 83 bp, Homo sapiens
gccgctccactgtcggtagcaacaaggtgagacacagtaacctggttgaactctgcatctggaaagctgaagactgaagaaag

SEQ ID NO: 595451 - DNA, 75 bp, Homo sapiens
agatctacaggatcccccgccccaaatggccccggaggtgtttccccccgggccggcctgccgtgacgatcacag

SEQ ID NO: 595452 - DNA, 100 bp, Homo sapiens
ccgccaccaggtcaccctggaagagtcgctggccgaagacttaattcagtgcacaaatgagatgaatgtgaacatcccacagttggcagacagtttattt

SEQ ID NO: 595453 - DNA, 51 bp, Homo sapiens
acagccgcggcggcagcagcagtgagaggagtacgaccccagcaaagcgac

SEQ ID NO: 595454 - DNA, 100 bp, Homo sapiens
ttgatgtgcgcggagagcaatcgccgggacagctgcaagggggatatgagactttctactcggaatatcctgagtgttgcgtggatgtaaaacccatttc

SEQ ID NO: 595455 - DNA, 83 bp, Homo sapiens
aattaggtggatttgcagcaatccaagccaagctccattcagaagatatagaacttgggggtttggattcaggatttgttcct

SEQ ID NO: 595456 - DNA, 75 bp, Homo sapiens
tggtctcacaaagatctattaagattgtcacatcttaaaccttccagtgaagggatattggagaagatattccac

SEQ ID NO: 595457 - DNA, 75 bp, Homo sapiens
gctagacaaggaattactatggaatcttcaacttttgtctgaggaccctgatgctcccataagacagaaaatgcc

SEQ ID NO: 595458 - DNA, 75 bp, Homo sapiens
ggccgggggcgcctgcgactgcggggacagcaacgtgatgcgggagagcggcattttgaaagcgaagcagaagcc

SEQ ID NO: 595459 - DNA, 98 bp, Homo sapiens
tctgctcttcgttttgggaagcgcgtcgctctgggtcctggcagaaggagtgatcagggccaaagcggtcagtgagaaggaagtggactctggaaacg

SEQ ID NO: 595460 - DNA, 99 bp, Homo sapiens
gaatatgctgcattagacaaacgagaggtcccagctagtccacagggaccagcagtgccatggaaggatttaacatgtctcagagcatcccaagagtca

SEQ ID NO: 595461 - DNA, 74 bp, Homo sapiens
gcagacatcaccgacttgttaaaagaaggaattacatgaacgacagccttcgcaccgacgtcttcgtgcggttc

SEQ ID NO: 595462 - DNA, 75 bp, Homo sapiens
cgcggctctaacggggctttctacaaggagaaggaagccaacatccttttggagccatgaatattgtccgaactc

SEQ ID NO: 595463 - DNA, 73 bp, Homo sapiens
gccaagaaaggcagcgaggtggagagcggtagtgggcagcagtcagtgacaggtgtaacctctgtggatgaca

SEQ ID NO: 595464 - DNA, 126 bp, Homo sapiens
aaattgaaaaagaggaagaaaatcttcaggttgttttaaggcagatgtctaaacataaaaccggtaccaggacattattcactctattcatctagcacggaagccaaatttgggtctaaaatcttg

SEQ ID NO: 595465 - DNA, 51 bp, Homo sapiens
ttggacttctatttttgggaggaggaagcccaaggcttattgatatttgcg

SEQ ID NO: 595466 - DNA, 75 bp, Homo sapiens
ggggaggagggccactgggctcccagcagcccaggttcagactgtgccctgtccacggtgcctcctgcatgtcct

SEQ ID NO: 595467 - DNA, 83 bp, Homo sapiens
gcagtacctgcagaaggtctctggagacatcttcagcagcgtcgagggcgaggcccccagcagtgagactggcacatccctgg

SEQ ID NO: 595468 - DNA, 97 bp, Homo sapiens
ttaatatatctactcccagaggaattccagacatttaatccagagactgacttcactatagaacccacagttgtatcaatggttggggaaagatagt

SEQ ID NO: 595469 - DNA, 73 bp, Homo sapiens
ttcactccaggctgaagttacaggtgaacataaaatctctggaggatgttgttagggcatatttgaaaatggc

SEQ ID NO: 595470 - DNA, 75 bp, Homo sapiens
cagtcattccaaatgaagagatgcctggacaaacagcatattctatggcctaaaagagcagattgtacagaaagc

SEQ ID NO: 595471 - DNA, 96 bp, Homo sapiens
atgacttaagtcagcccacgggatttttagcccagcccatgaagatatgtgcagcgggggctacagcgagtggggctagatccccagctgccactg

SEQ ID NO: 595472 - DNA, 75 bp, Homo sapiens
gtggacttgaaagaagctgcagcggaggaaggcgagagacggtgccgagacctcaaggccaagggaattttattt

SEQ ID NO: 595473 - DNA, 100 bp, Homo sapiens
gaactttcacggacaacctcagaggacaacgaagtgttcgcggaagaagtccctatagaaccatacaacatcccactgtcccaggccgaagtcatacagg

SEQ ID NO: 595474 - DNA, 100 bp, Homo sapiens
cggccttcacacatcccagccggtgactgcagtgagaaaggagaacctgactgctgtgcactctctctggagacaagcgagcagctcacctttgagatcc

SEQ ID NO: 595475 - DNA, 104 bp, Homo sapiens
ctcaatatctgtcttcggtggactccttcggcagtccacccaccgccgccgcctcccaggcaatagccctctggaacaagacaattcatgtgagataagaaaga

SEQ ID NO: 595476 - DNA, 97 bp, Homo sapiens
catgactacgacatccacttctaccccaccttccggcatgcagccagtaaagatcccagagaagttcgagaagctagagatcataaggaaccaaaag

SEQ ID NO: 595477 - DNA, 100 bp, Homo sapiens
cttccgtatctgcctaggcattttgctgtctcctcctaatacgaaacaagccaatgaccttgtgagcaccctgatgaaatgtacgccccactacattcgc

SEQ ID NO: 595478 - DNA, 88 bp, Homo sapiens
gtgggggctcctcatacatggcctcacattgtggcagccttagtttggctaatagactgcatcaagctagtgtcagcagtgggatacc

SEQ ID NO: 595479 - DNA, 100 bp, Homo sapiens
aaaaagaagtgttaagaattgcctttgggactctgaaggctgaagggccaaggagatctgttgaagaatgccaagaatgaagctatagaaaacatgaagc

SEQ ID NO: 595480 - DNA, 100 bp, Homo sapiens
agtgccaactctaatttcttttatgccatcacactgaccttcaacgttgggcaggaacagcgccttttgatagtcctaagtaattgctgctatctagaac

SEQ ID NO: 595481 - DNA, 82 bp, Homo sapiens
cagagaactacaagaacagagggattctttgactcagaaactacaggctactaaggcaggtgcagcatcaatgattcactac

SEQ ID NO: 595482 - DNA, 100 bp, Homo sapiens
gacgcggcacagagagggcctgggagcttgctgcagcttcagtaatctatgccagcaattatgacaatgttagcagaccatgcagctcgtcagctgcttg

SEQ ID NO: 595483 - DNA, 100 bp, Homo sapiens
tgacacccccgtgacagagtccgacctcagtcgcgcacccataaaaatgacaatgcagatcttcgtgaagactctgactggtaagaccatcaccctcgag

SEQ ID NO: 595484 - DNA, 98 bp, Homo sapiens
gttatagagtcaatctaattgatacaccagaaaaggaagatggcgccatttctaccatagtacttcgaggctctacagacaatctgatggatgacata

SEQ ID NO: 595485 - DNA, 90 bp, Homo sapiens
aggcagtgggaagaactatgccaccaggtcaacaaaaatctctcatttacttcaccaccagcagtttcctcacaacagtctaagttaaag

SEQ ID NO: 595486 - DNA, 82 bp, Homo sapiens
aatgtcatttccatcactgacggacagggtggctgtgccagtgtcattgtgtcattaactactcagtgtcctcaggacctaa

SEQ ID NO: 595487 - DNA, 98 bp, Homo sapiens
gaaatcttcagcctccaaaaaaccactgaaggaaaaagtggtgctgatgtatgatgagatcttcatgcagcagtgttgtactgctacttctataaacg

SEQ ID NO: 595488 - DNA, 100 bp, Homo sapiens
agctgagatccatctgcaccacggtgctggtatcagacttggtgataattctgaattatgaccgtgctgtagaagcttttgcaaaaggcggaaatctgac

SEQ ID NO: 595489 - DNA, 100 bp, Homo sapiens
gaagaaactcaatgatcgtgtcatgagacaggtggtccattatggctgacatgcaaaatctggtagaaagattggagagggcagtgggccgcctggaggc

SEQ ID NO: 595490 - DNA, 99 bp, Homo sapiens
cgcgcgcctcgggcgcggctccgcagtgagcccaccaagaaggaagcgacggttgatgatgaagcgccggccgtgtaaatgaagatcgggtgaggagca

SEQ ID NO: 595491 - DNA, 80 bp, Homo sapiens
gtggtttgcaacatccttcttctggataacactgtacaagctttcaaagtcaatctctcgtgctcattcccccatgatcg

SEQ ID NO: 595492 - DNA, 75 bp, Homo sapiens
gatcagaggtccctggagtttctgcttcctccagagccaggaactgtggctgcaccatctgtcttcatcttcccg

SEQ ID NO: 595493 - DNA, 100 bp, Homo sapiens
cagaccctggagcctcagttggaagcagccgatccagcctgcggagcctgtggggcagcactttgttgaacgtggtggtgagagcacacgtcctcgtctc

SEQ ID NO: 595494 - DNA, 101 bp, Homo sapiens
cagcaatcagctggcctggtttgatactgacctgtaaatcatcctttagtactgccaaatctgtcgaaagggagataatgaagaactgcttcttctttgtg

SEQ ID NO: 595495 - DNA, 101 bp, Homo sapiens
ctcaggaaatgtccaccactgtttctcatcatcaccaaacgttggctagagatttactacatccgtccttggaagaggaaaagaaaaaacataaaaagaaa

SEQ ID NO: 595496 - DNA, 96 bp, Homo sapiens
ctggaggcggcccgcttcctggaatggcaagcgcagcaacaacagagagcacgtggtactccaaagattcaggtttactcacgtcatccagcagag

SEQ ID NO: 595497 - DNA, 75 bp, Homo sapiens
gtcggggatggacctccagatttccttactggttcgatacaagaggctgttttcctagcgtggcttgctgccttt

SEQ ID NO: 595498 - DNA, 100 bp, Homo sapiens
aggctggtcactactccgagcctgtgacgtttgcggcagccaggccgtcgacgatgcccaggtgacaccggctccgacacgccgctaaccggccgctcgt

SEQ ID NO: 595499 - DNA, 82 bp, Homo sapiens
cacgcaaacaacttatcagtagtgacttacagtaaggcagaagtcaattcatctggaaagactatctctgagtcagacttaa

SEQ ID NO: 595500 - DNA, 109 bp, Homo sapiens
gaggcaccgggatcgtgaccgagaccgtgaccgagagcgtgaccgagagcgcgaatatcgtcatcgttagaagatgtgttcagagcaacattgttttgttgacacaagc

SEQ ID NO: 595501 - DNA, 100 bp, Homo sapiens
catcaaggcagcagctgttacccttaaagaaaattgcctaagaattatgacccaaaagttaccccagatccagaaagatggctgccaatgcgagaacgtt

SEQ ID NO: 595502 - DNA, 83 bp, Homo sapiens
cgttcctgggagccgagggccagagactaagtaccatgtctgcaaaggagaagtcgaagtttgaagatatggcaaaaagtgac

SEQ ID NO: 595503 - DNA, 82 bp, Homo sapiens
gagcaccgagctcgcggcacggtaggagcagcctcccgcgacgatgcccctcaacgttagcttcaccaacaggaactatgac

SEQ ID NO: 595504 - DNA, 76 bp, Homo sapiens
ggatggctataatggatttggtaatgatggaagcaggaagagctggtgcagcaggtgcggaagcggctggaggagg

SEQ ID NO: 595505 - DNA, 100 bp, Homo sapiens
cttgtgctgctgctgctgctgctgctgcatgtctaccaggagaggagggaactgcggagcgggcatttatgtttgaatcatctttaagtctggcggtcac

SEQ ID NO: 595506 - DNA, 101 bp, Homo sapiens
gagggactctgaaagggccccggccagcgtccctgagacgccaacggcagtcactgccccccattccagctcctgggcctgctgggaacgggacttctaaa

SEQ ID NO: 595507 - DNA, 74 bp, Homo sapiens
ttgcccagtcagcaaaggttcagccctccaagatcttcttggaaacagaattgttctacaaaggtatccgccct

SEQ ID NO: 595508 - DNA, 100 bp, Homo sapiens
caacgatatttggatatctaacatcgtaaccagagaagaaaggagactcacttatgtgcacaatgagcaactggacgtggcagggcgggtgatgcagtac

SEQ ID NO: 595509 - DNA, 75 bp, Homo sapiens
tcatccacttcgcccaacctccagggttgatttgggaagcagagcacagcagcccaaatttgcttgtaatgtcgg

SEQ ID NO: 595510 - DNA, 51 bp, Homo sapiens
gattccaagcaaagatcttccctgagagcagacctgttatcctaaactagg

SEQ ID NO: 595511 - DNA, 78 bp, Homo sapiens
acgagtaatcgcctgctttgattcattgaaattgccaaaacaaaggggatttggtgatggaggctttgttagaaggaa

SEQ ID NO: 595512 - DNA, 100 bp, Homo sapiens
ccatcttattcagtgtataatggactctcagaataaaggaaagacctcagagtgttctcattacagcaattggaacttgcacagatacagcatagagacg

SEQ ID NO: 595513 - DNA, 73 bp, Homo sapiens
ccctggaatatgaagagacacagtatggtagccacacccccaggctaatagctcgtcagcttgctaaaatcca

SEQ ID NO: 595514 - DNA, 124 bp, Homo sapiens
cgggaagggcgagactggagcagagccgctgggcgccggagccgaggcgagcgccgcgcgcaccactgcaagtaactggcagaagttttggtgataaagattttcggacaggtttagaaaatgg

SEQ ID NO: 595515 - DNA, 50 bp, Homo sapiens
ggctgatctcaaactcctgacctcaggtgatctgcccacctcagcctccc

SEQ ID NO: 595516 - DNA, 74 bp, Homo sapiens
ggggacgcccgcgcgacgagcaggtggcggcggctgcaggtgctggagaatctggtaaaagcaccattgtgaag

SEQ ID NO: 595517 - DNA, 75 bp, Homo sapiens
ctgcaaccttagcgacatcaggaagaacagggtcgaggatcgagttcacaaagatgtccaaaactaatggcttat

SEQ ID NO: 595518 - DNA, 90 bp, Homo sapiens
acgccctcgtcctccaatgacaccagggagcaggtgctgccagccggccagattgtgagcatccgtgtcattctggaccttactcccaac

SEQ ID NO: 595519 - DNA, 75 bp, Homo sapiens
acaagcgaatggctgacagcctggcctccaaagtcaccaggctcaaatcgtctagggacaggaagatggttggcg

SEQ ID NO: 595520 - DNA, 82 bp, Homo sapiens
gccgcagagtcccaccgccacagatatggatcagaaactttcgaagttggtagaagagctcacaacttcaggagaaccccga

SEQ ID NO: 595521 - DNA, 90 bp, Homo sapiens
tctccctgctccgcagcgacatcaccaagctggaggtggacgccatcgtcaacgccgatgccatggacaatattaccaggcagaaccaat

SEQ ID NO: 595522 - DNA, 90 bp, Homo sapiens
caggaagatggtggccgcaaagaagacgaaagcggcgtggagcttttaacagcaagcaacttctgtatttggagaagtatcgtcctaaaa

SEQ ID NO: 595523 - DNA, 50 bp, Homo sapiens
ccccaggccgcctccgcccgtgaaggcttgaagaaaatttgcctacacgt

SEQ ID NO: 595524 - DNA, 82 bp, Homo sapiens
accttggagtccagcactctgcatgtgactccccgcagcctggacagcattccaagaatcaagcactacaaagtgatgagcg

SEQ ID NO: 595525 - DNA, 50 bp, Homo sapiens
ctttccttgcctaacgcagccatgatggttcacaggcaccagccagaccc

SEQ ID NO: 595526 - DNA, 96 bp, Homo sapiens
ggaaagtgatactaagaatgaggtcaatgggaccagtgaagacattaaatctgaaggtgatcacgaaactcgctggcatggaggaggaagacttgg

SEQ ID NO: 595527 - DNA, 71 bp, Homo sapiens
tgttaacacttcctagataacgggagggtatacaaggaaaggttaggacttcctccaaagatagtgattgg

SEQ ID NO: 595528 - DNA, 87 bp, Homo sapiens
gaaggtccggggcttgccctggtcttgctcggccgatgaagtgcagaggtttttttctgaagggagttaagccccaagccaaggcag

SEQ ID NO: 595529 - DNA, 100 bp, Homo sapiens
caacttacccgagaacgtgcgggaagagaagatcatcgagcatttcaaacggacgctgtgcagagctgcaagtccgtatcactgaggctgtggccacagc

SEQ ID NO: 595530 - DNA, 90 bp, Homo sapiens
ggatacagctggacaagaagattatgacagattacgccccctatcctatccgcaaacagttcattttccagacactgaaagagcagaatg

SEQ ID NO: 595531 - DNA, 100 bp, Homo sapiens
gggaccggtgtctggcggatgcggtcgtgaagatagcaaagcttcgaggcgcaccaggacgaggcagtgagcgtgacacacatggtgaaggcgggcagcg

SEQ ID NO: 595532 - DNA, 100 bp, Homo sapiens
gtttgcaaagcacctgaactggcagaagaagagttcaacatagagaaaggtcggcttgtgcaaacccaaagactaaagattatggaatattatgagaaga

SEQ ID NO: 595533 - DNA, 75 bp, Homo sapiens
ccggggtgtgccggggggaaaggggcagcatgatggtctgagatggtttttcgttggaatatacgttgcacattt

SEQ ID NO: 595534 - DNA, 102 bp, Homo sapiens
tgggaacaaagacagggaaaggggaaatgagttcaccagaaaccaacaggcagcacaggagatttattgccaaaccctgtgcactctgtattggcatcgagg

SEQ ID NO: 595535 - DNA, 75 bp, Homo sapiens
accctgctgaatagctggggctacaggcgtgtgtcactgcgcccagggaaaagttaaccattggatgccgccagc

SEQ ID NO: 595536 - DNA, 74 bp, Homo sapiens
atattttggaaagcagtttttaagacaatgagaagcgccaccttcaagtgaacgtcaccaacccagtacagtgc

SEQ ID NO: 595537 - DNA, 75 bp, Homo sapiens
cgcggccagggaacggggcatcgcggttccaacgccccagcatgagaccagatgtaagctctcctccatccagct

SEQ ID NO: 595538 - DNA, 90 bp, Homo sapiens
aagaactaaaaagaagaaaagaaaggatctgaacaggggtcagatcattggtgaagggcgcactgtgtgaggagaacatgcggggtgtgc

SEQ ID NO: 595539 - DNA, 100 bp, Homo sapiens
caaaccggtatctttacttccatttgcagaatgacagtccctatcagggtggagtatttttcttgacaattcatttcccaacagattaccccttcaaacc

SEQ ID NO: 595540 - DNA, 100 bp, Homo sapiens
caaggttgaggtcatgcagtgtcaccgacgcagttgcagaacagggccatctaccaccggaccgcagctgaatgcacagctagaaggttggctttcacaa

SEQ ID NO: 595541 - DNA, 98 bp, Homo sapiens
tggctatgtgaccatgtcggtgggaaaagtctttcaccctgtctccaaaaaaagttggtgatgacattgccaaggcaacgggtgactggaagggcctg

SEQ ID NO: 595542 - DNA, 83 bp, Homo sapiens
cctccattgctgttccaattgtccttaaaagtcaaatgaattccttcgaaatgtatttgaacttggacccccagtgatgcttg

SEQ ID NO: 595543 - DNA, 75 bp, Homo sapiens
tcagttctttggaattccattcttttccttattcttctgatgtggatccaggtcctaacgccagccccgatggtc

SEQ ID NO: 595544 - DNA, 78 bp, Homo sapiens
gcgtgtgttggttgctttcggccagcgggacggcatccgagaaatgcttacatattgaccccgacaaaagacccttct

SEQ ID NO: 595545 - DNA, 80 bp, Homo sapiens
tgtggctgaggctacaccccggagccaggagggtcagaagttgagtagcaggggcctaggagggctcgaagccttcacag

SEQ ID NO: 595546 - DNA, 73 bp, Homo sapiens
aggaacagggcaatagtatgatgggtcaaagaattgactgtagatccaactgctgctggtgatgttcgtccaa

SEQ ID NO: 595547 - DNA, 80 bp, Homo sapiens
ccaggactttgagccagtccagaccctgctgctgtcttcaaagaaggtgtccctacctgcaccggacgacgggggacaca

SEQ ID NO: 595548 - DNA, 119 bp, Homo sapiens
aaagaatgcgtgtattttgtggaaagttccaaactgtctgatgctgggtcgtcgtcccgcagacacacaatccagaagtcactttcctcgagacattggtcagcccatcactcccagcc

SEQ ID NO: 595549 - DNA, 99 bp, Homo sapiens
gaggtgaaccttcgaccttggacttctcagcctccagaatgttcctggtccagaactttacacagaaaaggtgctcaaaggatatttgtttaatgaatg

SEQ ID NO: 595550 - DNA, 82 bp, Homo sapiens
cccgccgctgctaaatatatccgtaggaatggagagggaccggatctcaggcgaagctggtccgttacatttgtaagcagag

SEQ ID NO: 595551 - DNA, 100 bp, Homo sapiens
ggccaatggagtgtgggagctgaaagggtcttcgctggcggccggttgctccttgagggcaggacagttcttatggctttatccgttgcgtaagcacaga

SEQ ID NO: 595552 - DNA, 90 bp, Homo sapiens
cggaggggccgcgggagcccgaaagcgagagcttcagagaagaggcagaagtgtgcaaacaggagcaggtccaagatttgcatggccaga

SEQ ID NO: 595553 - DNA, 83 bp, Homo sapiens
acatcaaggcctccggcagctatgcagaaagcgtggatacccatcaacgaagttttgatattggaattcagattggctatcag

SEQ ID NO: 595554 - DNA, 75 bp, Homo sapiens
gatttaatgacctcaggtttgtcggtcgaagtggaagagtttcaccagtgatcattaaagaatgggcagcttaca

SEQ ID NO: 595555 - DNA, 86 bp, Homo sapiens
gtcatcatgtcgcgttacgggcggtacggaggaggtgagaagccctaccactgcaactgggacggctgcggctggaagtttgcgcg

SEQ ID NO: 595556 - DNA, 82 bp, Homo sapiens
ctccacaaggagaacaggagacccccaaaagggtcagactcagtcacatgcccactcgaagtcgcactgctatggaaagtgg

SEQ ID NO: 595557 - DNA, 82 bp, Homo sapiens
ctgcagacttggccaaatggacgggactattaagaacccttaggagaaatcttgagagtggacagcaattgtgaagatcgcc

SEQ ID NO: 595558 - DNA, 88 bp, Homo sapiens
cgctgttgctgccgccatacgcgctctccctgtttagaccgagacatgggtgcccggcaccgcgcccgagcccactccattcagatca

SEQ ID NO: 595559 - DNA, 75 bp, Homo sapiens
caaggggctgggttagcaaaaggcttttaaagccatatacaggagcaaagaatctgcagagtgttgtgcttagta

SEQ ID NO: 595560 - DNA, 74 bp, Homo sapiens
ggaagatggcggctgggttcaatctcagagaaagatgtcacatctgctaaagcactgtatgaacatttgactgc

SEQ ID NO: 595561 - DNA, 100 bp, Homo sapiens
atattcatctcaaaaacaaaattctgaactcaggacttggcaagtgtgagctaccacgccttgcctgagttgatcttctacaagagttcaaacaaaaaac

SEQ ID NO: 595562 - DNA, 100 bp, Homo sapiens
tgctctcggttgcacaataaaccgacgtttagccaggtttattacccagaactctttgtctgggtcagtcaagaaccatttccaaacaaggacatggagg

SEQ ID NO: 595563 - DNA, 98 bp, Homo sapiens
tattgtcaaagagcttattgtcacattcttcttgggaattactgtggcaacgccctgctgcggcggctggtccgcattggggtgctggatgagggcaa

SEQ ID NO: 595564 - DNA, 82 bp, Homo sapiens
agcaagctgaatggaggccagatagtaccatgatagctgtatcaatggcagatgatcagggctgtattgaagagcagggggt

SEQ ID NO: 595565 - DNA, 100 bp, Homo sapiens
ctggttcgaatgagaaaccagtcccttggacagtctgcaccttctcttactgctggcctggagtggagtcaacatatcaatggagcaagtcacagtcgtc

SEQ ID NO: 595566 - DNA, 100 bp, Homo sapiens
cagacttcgctgtgagtgcccaaggtttcaaagcattatatgaagctgctgataaagatgatagttcagaagacatttcagtgccgagtagtccacatac

SEQ ID NO: 595567 - DNA, 95 bp, Homo sapiens
tgtctgtgagctgcggaggctgcggcccccaggattggcagccaccatttgcatgtgatgttgataaacttcattttacgccacgtatccagaga

SEQ ID NO: 595568 - DNA, 100 bp, Homo sapiens
gctgctggacgcagtgcttcggactgcttcgcaaggaagcggggcggctgcagcgagtaggcggcggcggagggtccagtggcattgcagagcacggatg

SEQ ID NO: 595569 - DNA, 51 bp, Homo sapiens
cagaagattgatcatcatatgggttgtttatcttgcagattatggactttc

SEQ ID NO: 595570 - DNA, 80 bp, Homo sapiens
tatttcctcccagaagacactccccagggcagaaatagcgaccatggcgagaaacctgtttccctccaatcttgtggttg

SEQ ID NO: 595571 - DNA, 90 bp, Homo sapiens
cgggtccccgcaccacctcctgctgccttcccgtcgccgctcccgaagcttttccaggtgagaagccctaccactgcaactgggacggct

SEQ ID NO: 595572 - DNA, 101 bp, Homo sapiens
cccttcttcatggagattgcagctgacaaactgctgagcctgccaatgcaacagccacggaagattaagcaggtgaccaagaatatggcccaggtgaccaa

SEQ ID NO: 595573 - DNA, 90 bp, Homo sapiens
gagctgagggcgcagaggcaggcagagttgtgaaaaccgtggctgtgaaaatactgaaaaacgaggccaatgaccccgctcttaaagatg

SEQ ID NO: 595574 - DNA, 100 bp, Homo sapiens
aaaatgaagatggaacatggccaaggggtccttctactcctaaggacatgagagatggctttagaagaaaaagtttctactcttcccattatgcgagaga

SEQ ID NO: 595575 - DNA, 99 bp, Homo sapiens
aaaagagaagacgctttacccgactctttgggccgttatctcacgtacaatgactcttcttgcttttcacctaagttgaataagcaccctgtgcacttt

SEQ ID NO: 595576 - DNA, 82 bp, Homo sapiens
ctgcttttggaaacatactgtcctgcaaggcaatgttgtttaatgtagaaaatggaaccccagcttcacgtgaagccttgtg

SEQ ID NO: 595577 - DNA, 75 bp, Homo sapiens
ggcgaaaggagctggtgcctgtgcaagttgttgagggtcgagctgtgcagttttagcgggtacaagatctacccc

SEQ ID NO: 595578 - DNA, 75 bp, Homo sapiens
gggcggcggccaagatgtccgtgcctgatgccggctccaggagcagcagtggaggtcgggaacgcctcattgtgg

SEQ ID NO: 595579 - DNA, 101 bp, Homo sapiens
tatgcctctcttggagcaaatgatgaagacatccggaagaagataacaacgaacttgatgcaagtgataggtttgccaaggtcagacctctcatcatccgg

SEQ ID NO: 595580 - DNA, 100 bp, Homo sapiens
caacatcgcagccagaaatctttgaaaatatttacccaaagctcgaaagagcattccagacacatatgcagagcacctcattgctggcggactcatgacg

SEQ ID NO: 595581 - DNA, 100 bp, Homo sapiens
ttagctgtgctcgcgctactctctctttctggcctggaggctatccagcaactggtcatgctgctggagtggtggtcctgcacggagtgtacactgttca

SEQ ID NO: 595582 - DNA, 82 bp, Homo sapiens
tcgagaccgcttaccgcatctggctggagccctgcattcgcggcgtgtgcaggctaatctagacgaaatccagatgagttca

SEQ ID NO: 595583 - DNA, 82 bp, Homo sapiens
aagggagttttccggggccctctcagcaagaacgggaacaaaactctgatatgagatcctgactccaaactccattcccaag

SEQ ID NO: 595584 - DNA, 75 bp, Homo sapiens
ggcctggactgtgggctggtgtgtggaactgtctctggcatctctatcccctatgaggcaccacgtaagacctcc

SEQ ID NO: 595585 - DNA, 100 bp, Homo sapiens
tcggcttctccccgcgggagcccccagcatgggtatctgctcgctcgtgggaccacaatgaattctttgcccagtttgctggtgaccacactctgctaac

SEQ ID NO: 595586 - DNA, 82 bp, Homo sapiens
ccttgctcctcgccgcggcggggactgcagacctggaatcatttttctgataatgaggcagagcgggttaaaatgatggaag

SEQ ID NO: 595587 - DNA, 100 bp, Homo sapiens
caggagcgggtagtgccagctacggtccgcggctggggttccctcctccgtttctgtatccccacgagaaatgagccgtcagactgctacagcattacct

SEQ ID NO: 595588 - DNA, 74 bp, Homo sapiens
gaggacacgctatgtccttttggcttcgaggtttaccccttccagagctcccagctcctccagcagccgacagg

SEQ ID NO: 595589 - DNA, 83 bp, Homo sapiens
aagcaccagaaagagataacagtaatagcaagaggaccatgctactctggacgactgggtttggattcagaagaggattatta

SEQ ID NO: 595590 - DNA, 100 bp, Homo sapiens
gcaaccccagatccatttacactttacagcattgatgacggggagccttcctggctttgtcgacgtcatcaggaacctcaattctcctgcactgctggaa

SEQ ID NO: 595591 - DNA, 90 bp, Homo sapiens
ccagcagggcctggagcttggcgtgggtgatggtgtccttctcaaggcagtggcccaggccacagatgaccgcacctcgagcaggagtgg

SEQ ID NO: 595592 - DNA, 51 bp, Homo sapiens
cggaaattcagaagccagagaggaaggctgtggtccaaggccatttttgct

SEQ ID NO: 595593 - DNA, 90 bp, Homo sapiens
aggagctgcaaaccacccaagtctgcaatcttaccagggaggccaagcgaccacccaaagaagtgttatagttttgccgctggactcttc

SEQ ID NO: 595594 - DNA, 99 bp, Homo sapiens
catggatgaacttcaggatgttcagctcacagagatcaaaccacttctaaatgataagtgagaaagatcagtctaaagaaaaggagaagaaagtgaaaa

SEQ ID NO: 595595 - DNA, 100 bp, Homo sapiens
ccggccgtcccgggccgggggacccgcccgccatggccaccaagatgccttcaattaagttgcagagttctgatggagagatatttgaagttgatgtgga

SEQ ID NO: 595596 - DNA, 100 bp, Homo sapiens
tcaccgagcacgtggcggccgccgagctgggcgcgcgcggtatctcaggagattacatttcagcttgaaaaagggtcggtggaatttaaaagaagaggaa

SEQ ID NO: 595597 - DNA, 95 bp, Homo sapiens
cagccactaatgaagttgggaactcagaccgtaccttgcaacaagctatgaccatgagttagtgtttggtgtctccttgaagaacatgaataaag

SEQ ID NO: 595598 - DNA, 96 bp, Homo sapiens
aggaaattcaacaggagctgatcaaccaaggtgatgctgcagcagggcgaggccatgcgctgcccccagtgccagatcgtggtacagaagaaggac

SEQ ID NO: 595599 - DNA, 100 bp, Homo sapiens
ttctgaaaccactgaaaggggtagatcctaacttaatcaacaacctggaaacattctttgaattggattatcccaaatctgagtaccactatgagtacac

SEQ ID NO: 595600 - DNA, 80 bp, Homo sapiens
gggccttgtgggagggcttaaggaagtaaaatggcggacctggcgaacgaaggtctcggcgcggaagatggccggcggcg

SEQ ID NO: 595601 - DNA, 100 bp, Homo sapiens
gcccccgccgccctcgctgccctcgctgcagccgccacggagacaatggacgcgggagccgccccgcagaagcacagcgggctgcatgctgttcccccac

SEQ ID NO: 595602 - DNA, 100 bp, Homo sapiens
gtgcggggatgattggagcgtcatcacgggagaatctcgactcgctgtatggagaggacgctggtgacttttttgacacatatgctgcagcttttatacc

SEQ ID NO: 595603 - DNA, 117 bp, Homo sapiens
cctgttgcgatggcgcagaaaccccgttgacaaggcactgctttttcatgacggtactccaaagattcaggtttactcacgtcatccagcagagaatggaaagtcaaatttcctgaa

SEQ ID NO: 595604 - DNA, 75 bp, Homo sapiens
ctcgatcctgctggctgctgtctctattctctcggcctgtcagcaaaagcccccctccatgcgcctgaaggcccg

SEQ ID NO: 595605 - DNA, 51 bp, Homo sapiens
aggaggagtggattaagtgcattaatcattatattttggagagaacagatt

SEQ ID NO: 595606 - DNA, 90 bp, Homo sapiens
gtggccgaggcggggaggcggctgggccggggcctgagctgccgcggcggccgctcctcggaaggaggagacagttactgtctatcccgc

SEQ ID NO: 595607 - DNA, 75 bp, Homo sapiens
gcgggccagcgcaccggtcccccagcggcagccgagcccgcccgcgcgccggctactgcagcactggggtgtcag

SEQ ID NO: 595608 - DNA, 98 bp, Homo sapiens
gtactgggggattcgcagggaggatgtcgggacaccccggaagctgggaaatgcacgtgtggagtgagagcgaggactgcctgcctttcttgcagcta

SEQ ID NO: 595609 - DNA, 82 bp, Homo sapiens
agtacaagttcggctttgagcttcctcagggggaacaacttaattctttattgaagacctataacattttttatgagaacca

SEQ ID NO: 595610 - DNA, 100 bp, Homo sapiens
tttcctgatgacatgcccaccctgagtgccttaccatgggaagaacgagaaaagattttgtcttccatggggaatgatgctgctgtgacttactcgaagc

SEQ ID NO: 595611 - DNA, 78 bp, Homo sapiens
gcagaaggtctctggagacatcttcagcagaaactatgttccaacttcctgtcaacaatcttggcagtttaagaaaag

SEQ ID NO: 595612 - DNA, 83 bp, Homo sapiens
ccgatcgccaatggtgagctttggagcttaaaggcatgacttcctggcaccacagggaaaatcgggtgcaagcccagaaacta

SEQ ID NO: 595613 - DNA, 96 bp, Homo sapiens
cgcgaatatcgtcatcgttagaaggtgcatgcctacatcatcagctacctgaagaaggagatgccaagtgtatttggaaaggaaaacaagaagaga

SEQ ID NO: 595614 - DNA, 78 bp, Homo sapiens
ccttgggcaatggtgaatttgaaaagttactgaacatgctaatcaggccaaggagactctgtatgagattaacataga

SEQ ID NO: 595615 - DNA, 50 bp, Homo sapiens
ggattccaagtaactcttatttgcaacatggccaacgccctggccagcgc

SEQ ID NO: 595616 - DNA, 100 bp, Homo sapiens
cttgaccgtctactggaaatctgaatgctgttatcacgactcttcaacatgatgtagaacaagattctgaccagcttgatagcagtgggatgtttcactg

SEQ ID NO: 595617 - DNA, 107 bp, Homo sapiens
gagcccacctttcttcttttttgctattagatgggcttgctgctcccgcccatctaattggctttggtctagcaaaatgatgcttcaacacccaggccaggtctctg

SEQ ID NO: 595618 - DNA, 100 bp, Homo sapiens
ctacaacactggagtcatcaatgccccccagaagctcctgggcaacgtgctggtctgtgtgctggcccatcactttggcaaagaattcaccccaccagtg

SEQ ID NO: 595619 - DNA, 98 bp, Homo sapiens
atgtgggccctgaaaaacggagacttggatgaggtgaaagactatgtggccaaggcaaatacgccatgcgagacctagtccacaggcttccaggaggg

SEQ ID NO: 595620 - DNA, 100 bp, Homo sapiens
cgtgtctcagtccacccaaggtctcctcggatcgcctggagaggcactcggacctgtgcctggctctctggctatgaaaatcctgtggtgtctcgaatta

SEQ ID NO: 595621 - DNA, 97 bp, Homo sapiens
tgctccccggtggcccaggcctcggactccgcggccggcccggcgcggcccagcgccctcagggcgccctgcgtccggcagaggaggcgagcatccc

SEQ ID NO: 595622 - DNA, 89 bp, Homo sapiens
aattgatcccaagttgtcgacgaccgacagggtggtgaaaggagccttcacgtaaatgggtccagtcatgcctcccagtaagaagccag

SEQ ID NO: 595623 - DNA, 82 bp, Homo sapiens
gtttgtggatcgctgtgatcgtcacttgtttgaaggatgacctctaggaagaaagtgttgctgaaggttatcatcctgggag

SEQ ID NO: 595624 - DNA, 75 bp, Homo sapiens
gggagaacggggaagggacatttagtttggtaacctgtgtatggtgactggaggtgctaacctaggaagaattgg

SEQ ID NO: 595625 - DNA, 98 bp, Homo sapiens
gagctgcgtgaggctgcacgccgggagcagcgctatcaggagcagggtggcgaggccagcccccagagaaggcggtcaccttctccttactatagtcg

SEQ ID NO: 595626 - DNA, 100 bp, Homo sapiens
agccaacgcccccgtgtatcagcagaacggcttttaaggataccggaaaaacacccgtggagccggaggtggcaattcaccgaattcgaatcaccctaac

SEQ ID NO: 595627 - DNA, 98 bp, Homo sapiens
aaatcctacaccttactttgaaacaccactgggcatccgtttccgaggctttagtatccctgaatgccagaaactgctacccaaggctaagggtgggg

SEQ ID NO: 595628 - DNA, 100 bp, Homo sapiens
ctcccacccttattacctggagatgatgacatggatagatgtatgtccatccctgtgacgatgagggctattcggaggaaagctgaaaccattcaagccg

SEQ ID NO: 595629 - DNA, 83 bp, Homo sapiens
cagatggcggatgccctgcagtacctgcagaaggtctctggagacatcttcagcaggctgcaagatcaaggccctgcgggcca

SEQ ID NO: 595630 - DNA, 143 bp, Homo sapiens
tggagggaaaccacatggtgtaccggatctcggcccccacgcaggaggagaaggacgagtggatcaagtccatccaactgatgatgcttcggatgcacaatctgcatgggacaaagcccccaccctcagagggcagtgatgaa

SEQ ID NO: 595631 - DNA, 75 bp, Homo sapiens
ggtgcagggtagcctctatctgctctccctgtccagccgcctgcagctgaccctgtaccagtacaagacgtgtcc

SEQ ID NO: 595632 - DNA, 90 bp, Homo sapiens
gcctactggctgggaagaagcatatacttttgaaggtgcaagatactatataaagctctttggtgtaacgggaaactgcgctgcctgtag

SEQ ID NO: 595633 - DNA, 53 bp, Homo sapiens
gtcattgccggggggaccatgcagccggtgtctgacttccggcagcagctgct

SEQ ID NO: 595634 - DNA, 73 bp, Homo sapiens
gctctcacagatgtgaatacacatcagacactcctctaatttacaaagcagtgcccagctggtttgtgcgagt

SEQ ID NO: 595635 - DNA, 78 bp, Homo sapiens
ttgccctgtctcctcgcagatgaggaatctggtggacagtaacaaactttggtgaaatttcaggaaccatagccattg

SEQ ID NO: 595636 - DNA, 82 bp, Homo sapiens
aggggcttacgcagaaggacctggccacggtgacgcggcgcacggcgcggatggtggccgagtggcagtgtgtgggcttctg

SEQ ID NO: 595637 - DNA, 82 bp, Homo sapiens
cacccctacaccatgacaacgccttacccttcgctcccagcccaggttcctgcacttggccatcatccatgaagaaaaggca

SEQ ID NO: 595638 - DNA, 82 bp, Homo sapiens
aggaagcgatgaaagagatgtctgcctcatgttttttggctagacctatgaccattttcgctagacttcactgcacgttttc

SEQ ID NO: 595639 - DNA, 100 bp, Homo sapiens
ccaagcgtgaccagctttctgttgggaacactcaaaggaccgtataatagacgctggccccaaaggaaactactctcgatttatgaatcacagctgccag

SEQ ID NO: 595640 - DNA, 90 bp, Homo sapiens
caggcctggtatggagaacgagaggaaagaagtcccttatcacggtttttcgttggaatatacgttgcacatttatggcgattctgagtg

SEQ ID NO: 595641 - DNA, 95 bp, Homo sapiens
gtcatgctctttgtagcgtggtgcttctgttgctcacagaaacaggtggcatctgcatcgcaccacggccctcggaagaaggggcggaaatcctc

SEQ ID NO: 595642 - DNA, 90 bp, Homo sapiens
tacatcatgctcagatattgcggagggtcttgggcgtctttggtactggcttttttaggggtctgcctggggattacccttgctgtggat

SEQ ID NO: 595643 - DNA, 75 bp, Homo sapiens
ctagagactaaagctggacacccgcccgccgatgtccggtctgtgctacgacagcaaaatgttccaggtgcatca

SEQ ID NO: 595644 - DNA, 83 bp, Homo sapiens
ctgctcgacgaccaagaggcgaagaggctcttgtcaggatggtgaagctgttcatcggaaacctgccccgggaggctacagag

SEQ ID NO: 595645 - DNA, 100 bp, Homo sapiens
tggctgaaacacagtcgaaaagaatactgtgaattatgcaagcacagatttgcttttacaccaagtaccttaacatggggaatcttcttaaagttttgac

SEQ ID NO: 595646 - DNA, 100 bp, Homo sapiens
gtccccccggcttccagggaccccgctgtcagtatggtgaaaggtgtagcagtcactcggcctacacccacagcatcgaccttgtgaacccagcgacctg

SEQ ID NO: 595647 - DNA, 82 bp, Homo sapiens
ccgagacgcactgggggccggatggtttgtttgaagagactgtaccagagggccagggaggaggagaaaggaattgagctgg

SEQ ID NO: 595648 - DNA, 75 bp, Homo sapiens
acgacaccatgcatctcctcggcccctggctcctgctcctggggcattttgtcagtgatgctgatctttgccttc

SEQ ID NO: 595649 - DNA, 74 bp, Homo sapiens
ccgggaccgggaccgccgccgccgccgccaccatggtgaaagaacttgtcctggacaacagtcggtcgaatgaa

SEQ ID NO: 595650 - DNA, 100 bp, Homo sapiens
cacactccaccaagcatcccattacagatagaagaggttatcaatactctggctgaccatcatcatcgtgggactgactttggtggaagtccttggttac

SEQ ID NO: 595651 - DNA, 99 bp, Homo sapiens
caaggcgaggccccgggggcgggccggggtcaccacgcctgccccagggaaccgcacagatgaaggatttgggggcagagcacttggcaggtcatgaag

SEQ ID NO: 595652 - DNA, 75 bp, Homo sapiens
ctctggaggctttggtggaaaacggacatcagacaaagtcaagtcgactcctttacatctagcagcgggctacaa

SEQ ID NO: 595653 - DNA, 87 bp, Homo sapiens
caaagccagtagtaacacctgaagcaaaggacagagcgggatgccaccagcttgtccaaagggaagttccaggagctcctggtgggc

SEQ ID NO: 595654 - DNA, 83 bp, Homo sapiens
ctgggtccggcttccccctgggaacctcagtgctctgttaccagggcttcaagatgggctgcgctccagttccaacagccgca

SEQ ID NO: 595655 - DNA, 100 bp, Homo sapiens
atccaagtgcgcgccctggcgggtccggaccaaggctattcagcttgaccctgaagaaactcgtcatgctaaaagaaatggacaaagatcttaactcagt

SEQ ID NO: 595656 - DNA, 96 bp, Homo sapiens
cagtctgagtgtctgtccccagagcctcagtttgtgcaggacaccgacatggaacagggactcactggggcccgaggagttgcagaaagaacacca

SEQ ID NO: 595657 - DNA, 90 bp, Homo sapiens
attaagttggagcagggagaggagctgtggataacgggaggtgaatttccatgtcaacatagtcctgaaagcataacccctactgtagaa

SEQ ID NO: 595658 - DNA, 83 bp, Homo sapiens
gagctctgtcctccagaaacagatcctccagccactaacctgacccgagctctgccacttggagcaattatgtttgcctctcc

SEQ ID NO: 595659 - DNA, 100 bp, Homo sapiens
aaatacatcagatactttcctggacatagcaaaagaatgtcaaaactggaccaatggggccaggctgaagtattgaactttctgctacgctaccaacccc

SEQ ID NO: 595660 - DNA, 51 bp, Homo sapiens
ggaagagacagaggaactctgagctgtaggtaaaacttgcctactgatcag

SEQ ID NO: 595661 - DNA, 100 bp, Homo sapiens
ggcggtctctgctgaagagagaagatggcgcttgacggaccagagcaggtatcaaagagagtgtgtgctggggtccaccacctgccgctagtcctctaaa

SEQ ID NO: 595662 - DNA, 87 bp, Homo sapiens
tctcggagactagaggctggataccaaatagcagtggaaaccgagaatgggacattttagagactgaagagcattataagagccgat

SEQ ID NO: 595663 - DNA, 100 bp, Homo sapiens
caaatttgaatctgtggccagagaggtttgcaaatctactataacagaggaaagaccgttgtttaccttgtggctttccatctgttctttgttatgtttg

SEQ ID NO: 595664 - DNA, 98 bp, Homo sapiens
tgctggtcagcactgcggctgtaggatatatctgcatcttgaaaggaagataaaacaaaagccttctttggaatagatggatttttgtcactttctgt

SEQ ID NO: 595665 - DNA, 112 bp, Homo sapiens
gaccatcgaaaggagcaagagcaagatcaccgtgacatccgaggtgcctttctccaaaaggtggagccgccaccaaaatgcagattttcgtgaaaacccttacggggaagac

SEQ ID NO: 595666 - DNA, 95 bp, Homo sapiens
ctcctgccgtcgagatcgccgccgacgccgctgctgtggccgctgctgctgctgctgctcctggaaaccggctggagtgcaatggcgtgatctca

SEQ ID NO: 595667 - DNA, 125 bp, Homo sapiens
gcggagtcgagacctacccgaacgacgcgggcgagcggggctttggacgccggtggagacgcaggcgagatggggtcgaggatttggtcttttgggttccatttttggaaaggatggtgtattaa

SEQ ID NO: 595668 - DNA, 100 bp, Homo sapiens
tatggcaattgacctcacctcaagcacacccaatggacagcatgcctcaccaagtcacatgacaagcactgctctgttaaaagcgaaaatgaaacaattg

SEQ ID NO: 595669 - DNA, 75 bp, Homo sapiens
ggttgcgctccgtgcacctcttgcggttgaagagggggaggcctcagacttctcgctggcctgggattcctccgt

SEQ ID NO: 595670 - DNA, 100 bp, Homo sapiens
gcggcggcggcacagagccggtggtggagccgccgaggttgttcctcaaagtcattcaagctgtactcgccgaaggagcccccgaacggcaacgcctttc

SEQ ID NO: 595671 - DNA, 82 bp, Homo sapiens
aaagaagatacacagcagttgtcttaaacagacaatgcagatcttcgtgaagactctgactggtaagaccatcaccctcgag

SEQ ID NO: 595672 - DNA, 100 bp, Homo sapiens
agtggatttccttgcggaaaggatgttggcggtccctgtgacctgtggagacacggccagatctgccctccagcctttttgcaaatgtgtaacttgccta

SEQ ID NO: 595673 - DNA, 119 bp, Homo sapiens
gatgaagacgagacgcaccccaacatcgacacggccagtctcttccgctggcggcatcaggccacacactctgcatccgacacccaccccctctttgtgtacttcagtcttggagtttg

SEQ ID NO: 595674 - DNA, 139 bp, Homo sapiens
accaatcggacacctaccaggtggacggcacggacgacagaagcgactttggtgagactctggcccggtatgaaagccagcggatccagctggagtcggagctggctgtgcagctggagcagcgggtgacagagcggct

SEQ ID NO: 595675 - DNA, 87 bp, Homo sapiens
gcaacgccttcagaacgatttgaagatggaggagatgtataagaaagctcatgctgctatacgagagaatccagtctatgaaaagaa

SEQ ID NO: 595676 - DNA, 100 bp, Homo sapiens
aaacctggaggcccggggggcccagctcccgtagggagccgtgggcgctcggtgcccgggccgggcaggagagctcaaaggatggctactgacatgcaga

SEQ ID NO: 595677 - DNA, 96 bp, Homo sapiens
agcagatgattaaggatttagccaaagaaaaagataaaactgagaaagaattgcccaaaatgagccaggctggtgagattggagagatgaaggatg

SEQ ID NO: 595678 - DNA, 90 bp, Homo sapiens
ctgctggaggacgagggccagctgacggagatggtgcagaagatggaggagcttgatcagttactggcagtcgcagactttggaccccgg

SEQ ID NO: 595679 - DNA, 83 bp, Homo sapiens
cacagacatggatcctgaagtggcggccctgtattttcccaaaaaaacacagatatgtagaactcttcttgaattctacagca

SEQ ID NO: 595680 - DNA, 75 bp, Homo sapiens
gcacctcatcccctggatgggggaccacaagatcctcatcgacagatccccgtcgaggtcaagatcaagatccag

SEQ ID NO: 595681 - DNA, 101 bp, Homo sapiens
cgctggccggatggaaatcctaatgacagtctccaaattcgcctccatctgtaccatggaactccattctccaactttaaaaatatctacatgtgccccaa

SEQ ID NO: 595682 - DNA, 82 bp, Homo sapiens
ttgacccagctgagattgatctcctattaattagtcagaactgtggctgcaccatctgtcttcatcttcccgccatctgatg

SEQ ID NO: 595683 - DNA, 75 bp, Homo sapiens
gtattgaagatggggcattcagggctctccgggacctggaagtgctaaatcaagatgactaccagctggttcgaa

SEQ ID NO: 595684 - DNA, 95 bp, Homo sapiens
ctccatgtgacatggtttctccctatgttacgtggatgtttgtaacatattccaatggagacagttggaaaacctgtacttcagagaaaagaagt

SEQ ID NO: 595685 - DNA, 75 bp, Homo sapiens
aatttcccagctgctaaaggaagaggaagtgtcgtgtgggagccaatgggagatgggaagaaaatcatttccttg

SEQ ID NO: 595686 - DNA, 100 bp, Homo sapiens
ccaccctcatcgagcctgcgcccagtggtattcatgggtagtttgaaatatccagatgagaatggatttgatgccttcctgaagaagcatgggggtagtg

SEQ ID NO: 595687 - DNA, 101 bp, Homo sapiens
tcagccaaagaaacaagccgtggaataggtgtatcaagtaatggtgcaaagcctgaaggagaagagaagtttacctttattgagaaatgtaacaaccctcg

SEQ ID NO: 595688 - DNA, 90 bp, Homo sapiens
tgtgtgctgagtgaactacatcctttggtgttaccgcgagtgccacagtctaagttgtggacatcggatacccaaggagacgaagctgaa

SEQ ID NO: 595689 - DNA, 82 bp, Homo sapiens
cccgggaggaaggaacgaggcaaggagctaaagcagcgtgcgttcagccctgggagtccggcagcgtcttctcttgagggag

SEQ ID NO: 595690 - DNA, 50 bp, Homo sapiens
agacttgcttcagcatttctcagtgtttgatcagtatgtaaagaccaggg

SEQ ID NO: 595691 - DNA, 73 bp, Homo sapiens
tttataatacattccatgggaggagagttggtcaaacgccatgctggggtgctaggacttggtgcatgtgttc

SEQ ID NO: 595692 - DNA, 101 bp, Homo sapiens
aaatggccgctgtgtggttgcaacggagataaattcccggaaccgcgattcggcgtgtcagtgagaaggcaaccaaagtgcaggacatcaaaaacaacctg

SEQ ID NO: 595693 - DNA, 98 bp, Homo sapiens
ctgcctccgccggctacagcgggaagagcgggtgcggggggcaatggcactgcagctctgggccctgaccctgctgggcctgctgggcgcaggtgcca

SEQ ID NO: 595694 - DNA, 76 bp, Homo sapiens
aattgctcacagctgatcctaaggtctgtggctgtcctctctattggaaagcccccatgttcagggctgcaggggg

SEQ ID NO: 595695 - DNA, 75 bp, Homo sapiens
aagttggacagacgggaaaaatagtagcaccagtgattgaaatctctgaatatcgaacccagctctatgaatatc

SEQ ID NO: 595696 - DNA, 101 bp, Homo sapiens
agaggattggaggtgtcagtgttaaaggaacctctacaacgaaggtgaagccacggaagataagacggagtctcagtggcgtgatcctggttcactgcaac

SEQ ID NO: 595697 - DNA, 100 bp, Homo sapiens
ggcatactttgttggttgcatctgctaaagaggatcctgccaacattttacagctggaactgattattgactcagaaaccggctttgcgtcttccacaaa

SEQ ID NO: 595698 - DNA, 50 bp, Homo sapiens
tggagatggtacaggcgctttacgagtgcctccggagccagcgtggtggc

SEQ ID NO: 595699 - DNA, 89 bp, Homo sapiens
gacgaagcttggaagttgcagaaggtcagacacattctatgtgaaaaacatggcaaaatcatggaagccatggaaaagttaaagtctgg

SEQ ID NO: 595700 - DNA, 112 bp, Homo sapiens
cttaaatatgcatgagtcttctcaacttgaaggtcatttaaccaacctcagctttacaaaccctgaatttataactgaggttttggccaaattgggcgagggcacaaaataa

SEQ ID NO: 595701 - DNA, 83 bp, Homo sapiens
cggctctcggagccggcgcgaatccggcccccgcagcgggacccggtgggtaaaggaagaagccccagatatactgtgccttc

SEQ ID NO: 595702 - DNA, 51 bp, Homo sapiens
gggctgtcagagcctcatggagtacggttggtgaaagatgctccttgggat

SEQ ID NO: 595703 - DNA, 75 bp, Homo sapiens
ctgggcatccacccggccaggttcccaggaagatgaggagcgggaaggcctcctgcaccctggagaccgtgtggg

SEQ ID NO: 595704 - DNA, 90 bp, Homo sapiens
cacctttaactctccttatgctgggtgaaaacaaaggttttgggacttggcttacccagaaaggtcctatgttgttgcaggaagtactag

SEQ ID NO: 595705 - DNA, 75 bp, Homo sapiens
gcctcgtgggcggcaaggacttcgagcagcctctcgccatttcccgggtggaaacttcagaacattttcgtatag

SEQ ID NO: 595706 - DNA, 74 bp, Homo sapiens
actggattgggaaagaccatggcaggattccatatggctctcatatcattccattccatctctgccaagatttg

SEQ ID NO: 595707 - DNA, 50 bp, Homo sapiens
taggcggcactccagccccagctcggtcccctcttgctgttggctgcaca

SEQ ID NO: 595708 - DNA, 100 bp, Homo sapiens
agaggtctccagagccttctctctcctggttagagcagccagcgggtacagaatggattttggaagagggagtcaccactggacctccaaggaagccacg

SEQ ID NO: 595709 - DNA, 82 bp, Homo sapiens
caatgctgtccaaacttaaacatggaggaatgcaggctcaggttggaatgccaggaagtggaccagtgtccatggaacgggg

SEQ ID NO: 595710 - DNA, 100 bp, Homo sapiens
agagccctccgtgattgttggaatgccaagtcctgtatctgccatgtctgtggcgtccacctcaacaggctgcattcctgcctctactgtgtcttcttcg

SEQ ID NO: 595711 - DNA, 95 bp, Homo sapiens
agcttaaagagctccacattcaggggaaccgcctcaccgttctgcccccagaactagattctatggaggtgaaacctatcatgaccagaaagttg

SEQ ID NO: 595712 - DNA, 100 bp, Homo sapiens
actacaggaacctgctttctctcgatgaggataacatccctccagaagatgttcatagccctgatgaagcaagttactctgctctcctaataaatgcaag

SEQ ID NO: 595713 - DNA, 50 bp, Homo sapiens
tcaagaggacactgaagatcacagacttgaaacagattcagatagttcaa

SEQ ID NO: 595714 - DNA, 75 bp, Homo sapiens
cagcttcctgggagggaacatcttaatgaacctggaaactttgagggaaattttgagtcactggaccttgcggaa

SEQ ID NO: 595715 - DNA, 96 bp, Homo sapiens
gaggaattttgaagtacaccgtggtgacattgtatcattggtctatggcattgctggttctaccaacgtgacaggtgatcaagttaagaagctgga

SEQ ID NO: 595716 - DNA, 98 bp, Homo sapiens
tccgcaacctggaggtcaagttcaccaagggtataaaattcccgtcattgaaaatctaggtgctacgttagaccagtttgatgctattgatttttctg

SEQ ID NO: 595717 - DNA, 150 bp, Homo sapiens
ggcagtcattaccactcacactgtacttccagggagacaccgattataagaagagaaactcagcgctggggaagaagactcacagatgaatgcttctcacccggaaacaaacttgccagttgggtatcctcctcagtatccaccgacagc

SEQ ID NO: 595718 - DNA, 75 bp, Homo sapiens
aagatgagactgatgaccggcctgaatgtccctatggaccatcctgttataggtggtatcacggaaaacttgaca

SEQ ID NO: 595719 - DNA, 101 bp, Homo sapiens
cacgtcgttccgcgacggcctggctttctgcgccatcctgcaccgccaccggcccgacctcatgtattgttgcagcatctggcagtgagactgaggatgag

SEQ ID NO: 595720 - DNA, 83 bp, Homo sapiens
cctgaagccccgagccctcccagcgcaggaggatcccttttcccccagaaattactcaatgctgaaacctctcaaagtggtat

SEQ ID NO: 595721 - DNA, 110 bp, Homo sapiens
aaagtgagcgaggagtcagaaactcagccactggttgccttggtaggcaataaaaaccattaaaaatctcaagtgacgactttgggaaactctggttatccttcgcaaat

SEQ ID NO: 595722 - DNA, 90 bp, Homo sapiens
catttatgaaagcccaaatcacctgtacttggtcatgcagctgaatgtatcctgtcaggtataatgtcagtgaatggcaagaaagttctt

SEQ ID NO: 595723 - DNA, 82 bp, Homo sapiens
gaaggaacgaggcaaggagctaaagcagcgtgcgttcagccctgggatgaggtggaaagtgagaaatggtacctgtctacag

SEQ ID NO: 595724 - DNA, 75 bp, Homo sapiens
agacagtggtcaatactggcccagcatttaccacacaatggcctctgacgaagaatttgatgaactatgttttga

SEQ ID NO: 595725 - DNA, 97 bp, Homo sapiens
tgaatttctctatgatgagcactaacactgtgggacttggtttgcctatgtcaagatcacaggttctcggggtataaggcaggggtctgcaagcaag

SEQ ID NO: 595726 - DNA, 98 bp, Homo sapiens
ccccgccaggcgctctgaccactctccagcaccagcttccagttagtggatatagcacaccatccccagccacagggcccaggacacagtgagcatac

SEQ ID NO: 595727 - DNA, 100 bp, Homo sapiens
cttcaaaagcagtgcaactggctcagtattcacagggaaagctgtgagggtgaccaagaatatggcccaggtgaccaaagccctggacaaggccctgagc

SEQ ID NO: 595728 - DNA, 90 bp, Homo sapiens
aatttacgcgccgtgtaactgtgaatctttcaaaggaaggtgggagtcaatcattttgacaagtctcctgaaaggaacagctagcaggaa

SEQ ID NO: 595729 - DNA, 83 bp, Homo sapiens
ccagagtcggcgtaactatcgcctgacaggagcggttctggtgaggttggaaggatgcagccacccggttgtcatgaaaggcc

SEQ ID NO: 595730 - DNA, 97 bp, Homo sapiens
tatagatgagaaaccatacaagctgtgttcctggtccagaactttacacagaaaaggtgctcaaaggatatttgtttaatgaatgtggtatgctgac

SEQ ID NO: 595731 - DNA, 82 bp, Homo sapiens
cgatttctatttgactggcaatagtctgactgtgccctgtccacggtgcctcctgcatgtcctgctgccctgagctgtcccg

SEQ ID NO: 595732 - DNA, 75 bp, Homo sapiens
gtggggggcaagcagtacctcctaggactctatgacacggccggacagattgagaggatccagaatccagatctc

SEQ ID NO: 595733 - DNA, 75 bp, Homo sapiens
caaagaatgccccatcactgccctccagaacatgctacaaaactgctccaggtgagactgctgctcctcgggcca

SEQ ID NO: 595734 - DNA, 97 bp, Homo sapiens
ttagatgctgtcattttcagaagaagctgatgtaaatgcctctacaacctaaagcccagtttgggacccactctggaacctgaggaagtggtaaaca

SEQ ID NO: 595735 - DNA, 98 bp, Homo sapiens
cggaatctatctctgagaatgacccgttctggaatcagcttctctcattttctttccctgcaccaactagcaggacactttcttcatgagcaacaaac

SEQ ID NO: 595736 - DNA, 90 bp, Homo sapiens
gcagaagtcgcgtgtctaggtgagtcgcggtgggtcctcgcttgcagttcagcgaccacggagaaccaggtgcatcagcgcattgcggag

SEQ ID NO: 595737 - DNA, 95 bp, Homo sapiens
gaaaagggaagtgaaaagagatctgttttcagagtggatccgggctgcatgagcccagatgtgaagaattccatccacgtcggagaccggatctt

SEQ ID NO: 595738 - DNA, 100 bp, Homo sapiens
ttaaggaattctttcgaggattaaatcttgaagtggccactctcatctccacccctcacatcaggagcatggccaaccagctcatacagttcaacaccac

SEQ ID NO: 595739 - DNA, 100 bp, Homo sapiens
tcaaaataaaggaaacacatttcatatactgcagcaaaaatttctctgaagatgattttgcttctgcattgagaaaaaaacaatccgcatcttgggcttt

SEQ ID NO: 595740 - DNA, 90 bp, Homo sapiens
atcggaatgtgatcacagagcctatttacccagaagtagtccatatgatcttatgccttcattcatccggcatggtccaacaattccaag

SEQ ID NO: 595741 - DNA, 100 bp, Homo sapiens
gtggatctgtgagggaaaagacccaataggataactcaagttactgggagtgatgatgaatacagtgatgatgatgacatgagttggaaagtgagacgtg

SEQ ID NO: 595742 - DNA, 74 bp, Homo sapiens
cagtggtcgcttcttctccttgtaacatccaggagatgagggctcggcacaaagaggcttttttgaagaaacat

SEQ ID NO: 595743 - DNA, 101 bp, Homo sapiens
caatggaaatatggtcaacatgcatgcttctgtcaaaaacaaggttctggaaacaactgggcatatgggctctggaatgtttttgtcaggcagcatctgaa

SEQ ID NO: 595744 - DNA, 90 bp, Homo sapiens
ttctctcagaaagggaatcttcagtcgcacgtgcagcgagtccactcagaggttttctgtctcaactggtctctgacaagcctctgactg

SEQ ID NO: 595745 - DNA, 100 bp, Homo sapiens
cttatggcggcgctggagagggggcgctgagctgttgggtgaagctgtggtctaccaatctagacaactcagtggcaagcattgaggcaaaggctaatgt

SEQ ID NO: 595746 - DNA, 100 bp, Homo sapiens
ctttgggaagtatgttaatttcatggtacatgagtggctatcatactggctattatatgcacctatttgccctggctgtggatgatgaccccgaggtgcg

SEQ ID NO: 595747 - DNA, 101 bp, Homo sapiens
cttggaacccattggaaatgtccatccagttgggagctatgagtcctctgaaatgaacagcataataaagtggagaattttcatgaagaacatgaaaagaa

SEQ ID NO: 595748 - DNA, 96 bp, Homo sapiens
gtgtgtgccatttgccttggtttagctggaaaacctgctttcatgggacgagcagataagcacagacaaatggctgcaggattctcctgtgaaata

SEQ ID NO: 595749 - DNA, 96 bp, Homo sapiens
gaaaatattaaaaatgccatgctgattaaagggggaaatgcaaatgcaacagtgacaaaagtacttaaagatgtgattccaggagggcttcgtgta

SEQ ID NO: 595750 - DNA, 83 bp, Homo sapiens
caagctgagcgagctgtcagagcccggggacggcgaggccctcatgtaccacacgattctgctagcctaccaagaatccaaga

SEQ ID NO: 595751 - DNA, 118 bp, Homo sapiens
tgtggttggggctgtgggacttcgaaggagggctctcctgtctgccaccatcctgggttgacaattctacacaaggaggatggagctatgacattgaagagaggaaggttccaaaacc

SEQ ID NO: 595752 - DNA, 82 bp, Homo sapiens
actgctcatcctggcctacgtcatcgggatgaccgagtgggagacagcagcaccagcggtggcagagaccccagacatcaag

SEQ ID NO: 595753 - DNA, 80 bp, Homo sapiens
gccacgggggccgccgcagcaccatggcgaccaccgtcagcactcagcgcgggccgcgtccgtctccaagagagtatgaa

SEQ ID NO: 595754 - DNA, 100 bp, Homo sapiens
ttctacgcctggttacccaagtgtcggaactcgaatcatttatgacagaaagtttctgttggatcgtcgcaattctcccatggctcagaccccaccctgc

SEQ ID NO: 595755 - DNA, 98 bp, Homo sapiens
accaggtcaccctggaagagtcgctggccgaagaatgaagaaggagccccacaggaaggaattctggaagatatgcctgtggatcctgacaatgaggc

SEQ ID NO: 595756 - DNA, 100 bp, Homo sapiens
gctggtatcgatgactgctacacctcagcccggggctgcactgccaccctgggcaacttcggtcgatgagcagatgcttaacgtgcagaacaagaacagc

SEQ ID NO: 595757 - DNA, 87 bp, Homo sapiens
ttgaaatggtgctggatgaaattagaaaggttatacattggctcttcaaagacgttcacctcatcagagaaatccctgactcctttg

SEQ ID NO: 595758 - DNA, 75 bp, Homo sapiens
gtttttccgtaagcatactcagattgctcgctgtaagcagctcatctgtgaccccagctacgtaaaagatcgggt

SEQ ID NO: 595759 - DNA, 97 bp, Homo sapiens
cacatgaaagttttcagcctcatccagcaggcggtgacccgctaccggaaggccatcgccaaggatgctgatatgctaactggtgatgagcaagtat

SEQ ID NO: 595760 - DNA, 82 bp, Homo sapiens
cgcaccgacatctgcctgctcaaaggctgaccccgcactacatctacccaccagccatcgtgcagcccagcgtggtgatccc

SEQ ID NO: 595761 - DNA, 98 bp, Homo sapiens
tgacatggaggatgatttcatgtgcgatgatgaggaggactacgacctggtgcagctatcttctttgaattcaaacactacaagcctaaaaaaaggtt

SEQ ID NO: 595762 - DNA, 83 bp, Homo sapiens
atcggctgcgagctcctcaagaatctcgtgctcaccggtttctcccacatcgacctggatgatcctttcaaaaataaagcctt

SEQ ID NO: 595763 - DNA, 74 bp, Homo sapiens
gtgtccccaaggaaggatgagaatagctactgaaggtcctaacctgattataaaacaaccagatgagttgctgg

SEQ ID NO: 595764 - DNA, 82 bp, Homo sapiens
tgtcttcggtggactccttcggcagtccacccaccgccgccgcctcccaggtaccacatggaatgcttggacccccctctcc

SEQ ID NO: 595765 - DNA, 74 bp, Homo sapiens
ggacttaaaatctccgcaccgcaccctccacctcaggatgatcggctgaatgtaacagaggaactaacgtccaa

SEQ ID NO: 595766 - DNA, 82 bp, Homo sapiens
cgcgagcgaacgaccaagagggtgttcgactgctagagccgagcgaagctgcagagcagagcgggcggaggaccccgggcgc

SEQ ID NO: 595767 - DNA, 87 bp, Homo sapiens
gcagactcctattagacatcatgccagggctggaaactgctgtcgtctttcaagaaaaggtcaagagcaatctgaatccaaatgcaa

SEQ ID NO: 595768 - DNA, 98 bp, Homo sapiens
ccagaagtccagagctgaggactgcctgtttgcagctctacgtggccacggaggccatcctcattgcactggttggggccacgccatcctaccactgg

SEQ ID NO: 595769 - DNA, 100 bp, Homo sapiens
ggattttggctctggcacggaaacacccgtaccttacccaactctactgctgcttccagaccaagaaaccagcccaaaagacttcctcttttgaaagaga

SEQ ID NO: 595770 - DNA, 75 bp, Homo sapiens
aaaacagccaccttcagtatctcagtcctccagtgtttggatattcaggtatgaaaatgaaagtcttcagaatgg

SEQ ID NO: 595771 - DNA, 101 bp, Homo sapiens
cccggactccatcgactcccccggctcttagactagatcaaagttctgatcgtaccagtctttcttcagtgggagcccaggattctgaatctacctcttta

SEQ ID NO: 595772 - DNA, 100 bp, Homo sapiens
ctagccaaggaaaaaaagcagagaggagcggggagcaatgcaggaagccagttgagggaagttctccatgaatgtacgtcacaatgatgatgaccgacca

SEQ ID NO: 595773 - DNA, 100 bp, Homo sapiens
aaaacatagagtatgaggcactaaaaacacaattgcaagaaaatgagacacattctcaggggctcttggctttgggcctcagtgcaagtccattggaaaa

SEQ ID NO: 595774 - DNA, 100 bp, Homo sapiens
cggccccagagctggcgggagggagaggccaccagcagcgcgcgcgggagcccggggaacagcggtgccttggcatctcccaatggggtggctttgctct

SEQ ID NO: 595775 - DNA, 74 bp, Homo sapiens
ccggcgcggcgcgacaccgggctccggaaccactgcacgacggggctggactcatccgtccttggctcaggatt

SEQ ID NO: 595776 - DNA, 83 bp, Homo sapiens
ggcagggactgaaggtcacaccacagcgcgctctacagattctcccctgcccctggagaaggaggagcaggtccgacttcagg

SEQ ID NO: 595777 - DNA, 100 bp, Homo sapiens
gcaaaggggaggttacgcagcaaaccatccagaagactcggtgaaatacctggagtgctcagctctcacccagagaggcctgaaaaccgtgttcgacgag

SEQ ID NO: 595778 - DNA, 98 bp, Homo sapiens
gaccgggcggcgcgggtctgcggctccagcgtgcagaagcatttcttctgaggccctgaagaagtatcaagtgggctttgacattgcggtggtgagag

SEQ ID NO: 595779 - DNA, 74 bp, Homo sapiens
cagaactcggaaacatggtatcactcaggatgaatctggttatagatggacaagagacgatcattctgcaagca

SEQ ID NO: 595780 - DNA, 85 bp, Homo sapiens
agggaacgagtggaagattgcgtcacgacgcacataaagacgtacgaagccgtcgccaagtgtctctacatgccattttgcctgg

SEQ ID NO: 595781 - DNA, 90 bp, Homo sapiens
gcggagccgtgtgcgccgggagcgcggaacagcttgtccacccgccggccggaccaggagaacatattgtgatgttcgtgcctcagagct

SEQ ID NO: 595782 - DNA, 90 bp, Homo sapiens
tattcatgttgctttttgatggccatggcataaggaactctatcccaggaatacagctttgcattagagttgatctctctaatgtattag

SEQ ID NO: 595783 - DNA, 74 bp, Homo sapiens
ccggatcctggagaacatctcgctgtcggtgaagaagtgagtctgccaaaaaagaggtggttgctgaagtggta

SEQ ID NO: 595784 - DNA, 97 bp, Homo sapiens
agaagtaaaagtggtggctaatctgtcggaaaaggtaacagaagatggaactcgaaatcccaatgaaaaacctacccagcaaagaagcatagctttt

SEQ ID NO: 595785 - DNA, 74 bp, Homo sapiens
aatctatgagatgaacaagagactgcagtctcgcacagaggcaggaatttgtggatgcttatgtgaattatgtc

SEQ ID NO: 595786 - DNA, 100 bp, Homo sapiens
aaacctcctgcaaaagtggaagcgaagccgaaaaaggcagcagcgaaggtttgtttggcagctgtgggcttagtgggagacttgtgccgtgccctgcaat

SEQ ID NO: 595787 - DNA, 80 bp, Homo sapiens
tttggagtgtgcgtgcgcgccgagcgatataattggtgattacaactttcctctataaattaactcttgacactccttgg

SEQ ID NO: 595788 - DNA, 111 bp, Homo sapiens
agacaaagaaagttcgaaaagttcctccaggtttgccatcttcatactggagaaaatgaaactgggattgacccatcaagatgcttggctcaataagaaaaccacgttagg

SEQ ID NO: 595789 - DNA, 101 bp, Homo sapiens
ctgtgccagacatgtcttggagaaaacccatatatccgaatggtggtgatctttgtgaagtctgtgcagcggtgcattgccttggcccagctactagtgga

SEQ ID NO: 595790 - DNA, 83 bp, Homo sapiens
gtccgtgacgcagttggatcagtcggctttaaattactcaggctaaatagagtcccagcacctcctgatgtctgagctccatg

SEQ ID NO: 595791 - DNA, 100 bp, Homo sapiens
ggtggaatgcgtccccaacttttcggaggggaagaaccaggaggtgttcttcaacggtgccaacgtccggcaggtggacgtgcccacgctgaccggagcc

SEQ ID NO: 595792 - DNA, 100 bp, Homo sapiens
cagcaccgtgtcttgtgaactcccatcaccttcaagaaagcttccgaggtcagcgtttctcgcagcacacatcccactttttttgtacccctttttgcac

SEQ ID NO: 595793 - DNA, 75 bp, Homo sapiens
cgcgatgcgtcaagtacactgaaattcatcctgagatgagacacgttggtcgtcattgcctccgagcccacttta

SEQ ID NO: 595794 - DNA, 80 bp, Homo sapiens
ccagctccgaaatcaccaccaagcgccatcatgaccgggtcctataacaacttcttcaggatgtttgatagagacacgcg

SEQ ID NO: 595795 - DNA, 50 bp, Homo sapiens
aggacaccccgaaagccggaaaacgatttctgagagagcagacaccatct

SEQ ID NO: 595796 - DNA, 100 bp, Homo sapiens
ggtgacactcaacaggattcccgacggagttagaagccaaaagtgaaaccaggcaggaaaattactggctgattcagtatcaacggcttttgaaccagaa

SEQ ID NO: 595797 - DNA, 95 bp, Homo sapiens
tcccatcactttgggaggccaagtgactccgcctcaattctccattgtcatggagtactgtgaactcgggaccctgagggagctgttggataggg

SEQ ID NO: 595798 - DNA, 100 bp, Homo sapiens
ctccccatcgcgttttgccagcgataatacgcctcagttcttcaccaaaggacatggatgaaaatgaaagcaaccagtctctgatgacaagcagccaata

SEQ ID NO: 595799 - DNA, 82 bp, Homo sapiens
aatggccttccacccaccccaaaagttctggggtgatccattcatgttgcagcagtctacaaatccagcaccaggaattctg

SEQ ID NO: 595800 - DNA, 83 bp, Homo sapiens
cgtgcacatccaggcgggccagtgcggcaaccagatcggcgccaaggtgattgaattactcagatatgaagatcatcatctag

SEQ ID NO: 595801 - DNA, 100 bp, Homo sapiens
ggacacccacacccctgtattctcctccgaaccccttcatgcccaaatcccggaaactccagcgtgtctccagccgtggcgggcgctaatattgacacct

SEQ ID NO: 595802 - DNA, 51 bp, Homo sapiens
gaggaactcagccctgattgcgtgagtgatagttgcttcaggaatcttgca

SEQ ID NO: 595803 - DNA, 96 bp, Homo sapiens
ccgccgcccttctgctccacgaggagcacagccgggccgctgcgaaggcgcaaatatcctgcgagattcaacaggcaacgtcaaactaggagattt

SEQ ID NO: 595804 - DNA, 83 bp, Homo sapiens
ttttttgccatggtggattttgatgaaggctctgatgtatttcagatgaaactggcagacctttcacttcgtatccaacaaat

SEQ ID NO: 595805 - DNA, 98 bp, Homo sapiens
aagccaagaggaggacagttcgctacacagcaatgcatcgaggtggtggctaatgccgtagcggcattatctgaaatcagtgagtctcacccaaacag

SEQ ID NO: 595806 - DNA, 100 bp, Homo sapiens
accaaacctgtgataacctgtctcaaaaccctcctcatcatctactccttcgtcttctggatttaaattccaggttgtcatcaatggccgagagtttccc

SEQ ID NO: 595807 - DNA, 83 bp, Homo sapiens
acggcgagcgcgagcggcgcgagaaaatgagacaaggggccttcctggtgaacacagcccggggtggcctggtggatgagaag

SEQ ID NO: 595808 - DNA, 82 bp, Homo sapiens
acagagggaagcctgctcctacaccatccacgcagagggagacgagagggggaccaaggtgatgtgtccaatctagatccca

SEQ ID NO: 595809 - DNA, 101 bp, Homo sapiens
gggcgtctgcggctctccgccgtccccagccctgcctctccctgggctctggtgccagctattcaacagaaaagaacggtggcttttctaaaccaatttgt

SEQ ID NO: 595810 - DNA, 98 bp, Homo sapiens
aaagaacaacttcggatacaatgggaggtgtcaaggaaacgcgaagctgccgcccatgctgtcgccaccctggctgaggccaccttacaaggtggggg

SEQ ID NO: 595811 - DNA, 83 bp, Homo sapiens
attcctcgtcagcaacatgctcctagcagaagcctatggatctggagaggctgaggctgcagtggccacccaggagacatcca

SEQ ID NO: 595812 - DNA, 97 bp, Homo sapiens
aaccctcactggagaatccagaggggaaagctctggcaatttaaatgacccaaataaggaggcactggctaagacggaagtgtctctcaccctgacc

SEQ ID NO: 595813 - DNA, 82 bp, Homo sapiens
ccgtttctggctccgggctgagcttcctggagaagaggaagagtcatcttagtgggatttggggaagcaacagggctgtgtg

SEQ ID NO: 595814 - DNA, 90 bp, Homo sapiens
ctcgggaatccggcacaaggcactgggctacgtgctggacagtgtcttgggacaaggtgcgcattcctggtgtgctgcagcgattgggag

SEQ ID NO: 595815 - DNA, 75 bp, Homo sapiens
ctccaactgtgggaactctttccagcttgtgtctgaatctccctggaaaaggagacatgaatgtctgcaatgata

SEQ ID NO: 595816 - DNA, 97 bp, Homo sapiens
cacacatggtggacagcagcacgctggcaggactggagccaggcaccaccccctttaaggatattgctgcatatcgagctaaaggaaagcctgatgc

SEQ ID NO: 595817 - DNA, 80 bp, Homo sapiens
gcagccctgcatggagcaagtctgtcagcaccatctttctaacagtgatggcatcagctgagaagggaaggaagcccatg

SEQ ID NO: 595818 - DNA, 83 bp, Homo sapiens
caggaagcagctcaccttccaccgcgggagatacagatgacccaccaagaattactcagaaccctgtgatcaatgggaatgtg

SEQ ID NO: 595819 - DNA, 50 bp, Homo sapiens
gtgaccgagaccgcggccgggaccgaggaccctcagtgcagacgcaagcg

SEQ ID NO: 595820 - DNA, 102 bp, Homo sapiens
taaaaagacggacagcccatcgtgtgaactatagagtttgtggacagatttatattgtgccgtggaggtcccagcccccgctgcggttctcggaggtccgga

SEQ ID NO: 595821 - DNA, 82 bp, Homo sapiens
ccagttctccggcgggaaggaaaaccgcgcagagaggagcagtgaggagaatgaataccttccaagaccagagtggcagctc

SEQ ID NO: 595822 - DNA, 101 bp, Homo sapiens
agtctttccaaaaggtcaaggttcacaaggtgaagccatataatgtctacatcacagttgcttacccaccagacacagacacacctggctttgccgaagaa

SEQ ID NO: 595823 - DNA, 98 bp, Homo sapiens
ctgcctggtgcagaggatcctggaggcctgggaagccaacgaccacacgcagctgaggccctgacgtggatgggcaaactgcaggcctgggaaggcag

SEQ ID NO: 595824 - DNA, 98 bp, Homo sapiens
cccagactgcaaatggaacaagtcgccacctaaggaagtcctcggcaattacgagattctgaggaactgccaggtcggatgtggagatgaacccggag

SEQ ID NO: 595825 - DNA, 97 bp, Homo sapiens
gagcagcccatcgtgcttaaagaagggattactacagcatcccatttcccacacccactactccgctgactgggagggatggtagcctggccagcaa

SEQ ID NO: 595826 - DNA, 88 bp, Homo sapiens
tcctggacccattgataactctggacttctcaaagatggagtctcattctgtcgctcaagctgaagggcagtgccgtgatcttgaccc

SEQ ID NO: 595827 - DNA, 51 bp, Homo sapiens
gctctgttctgcccggaggagccgcccgttaatgttcgtgaagaaattgaa

SEQ ID NO: 595828 - DNA, 75 bp, Homo sapiens
ggcggagcggagacgggagtattatgaaaagatcctgctggagccagttctgcttctcggcaaggagcgatttgc

SEQ ID NO: 595829 - DNA, 89 bp, Homo sapiens
cggccccggccgcctccgcgagggcaccatggaggtgaatgcaggtgtggaaacaggaagagaactagaactggaagtaaagcattgaa

SEQ ID NO: 595830 - DNA, 51 bp, Homo sapiens
ggcgaggagcatcccttctatgacagggtggagagattcaaccagttagcg

SEQ ID NO: 595831 - DNA, 100 bp, Homo sapiens
tcccaagtggctgggattacagcaaaacgtcatattatttcacaaaaagcccagcgatttcacctgaagaagcttgggaactcctgccaaaaattgtagc

SEQ ID NO: 595832 - DNA, 75 bp, Homo sapiens
ctttcttggcctgatgctgaactctcgaggagtttcgctgttgttgcccaggctggagtgctggagtgcaatggc

SEQ ID NO: 595833 - DNA, 48 bp, Homo sapiens
ctcccaaggtgctgggattacaggtagctccttggatattcctttctg

SEQ ID NO: 595834 - DNA, 99 bp, Homo sapiens
atgctcctctgcgttggtgcttctgtaatgtctatactgccaaaaatccaacacaaggccaatcagcccccccacggtgtcccccaactctctctctac

SEQ ID NO: 595835 - DNA, 75 bp, Homo sapiens
aaaccagaactttttttttttttttctgttcagtgacatctggaaagctggcagttaaggaaaggagtaagtgaa

SEQ ID NO: 595836 - DNA, 75 bp, Homo sapiens
aaacagtcagtgctgttctttgtgccagccaggagattgctgcgatgattgacactgagtttgccaagcagacct

SEQ ID NO: 595837 - DNA, 80 bp, Homo sapiens
aacgacgttccatctgtggaaggacctaccaaccagattacgggcagggacgacctgtcaaagcgcggagtggaccaaac

SEQ ID NO: 595838 - DNA, 83 bp, Homo sapiens
cggcgcccggcgagggcgcgcggctggtgtccgccccgcccgaaagcgggctgacgcacgaggcacacaggaaggaggtggag

SEQ ID NO: 595839 - DNA, 75 bp, Homo sapiens
ggcacgggagcatggcagccaacgtctcggttttcggctttgtgagaaaccttaccatcaaacacgatggccagc

SEQ ID NO: 595840 - DNA, 75 bp, Homo sapiens
gtggactgcagcctcggcggtcagcagtaccaaaagaattggtggagctccatttgaagctgatgaggaaaattg

SEQ ID NO: 595841 - DNA, 100 bp, Homo sapiens
ttcatcaaagactgcgttcgaatccataacaagttccgatcagaggtgaaaccaacagccagtgatatgctatacatggggccaactcaccctatgcagc

SEQ ID NO: 595842 - DNA, 75 bp, Homo sapiens
ggtgagcacgggctgagcgcagcgtgagcacaggaggagaaggcagagcccccccaggctatgaatgccctgatg

SEQ ID NO: 595843 - DNA, 83 bp, Homo sapiens
actaacagggagctcatgagcagcattgtccatcagactcatgatagtaaagagcacctggcaatgatggaacgaatattagg

SEQ ID NO: 595844 - DNA, 100 bp, Homo sapiens
gcgggagattttgggtgaagaggacctgctgaagttcccatgatgtcacccaatggatccattcctcccattcatgtgcctccaggttatatctcacagg

SEQ ID NO: 595845 - DNA, 90 bp, Homo sapiens
gtgatataaaagcagcaaatctacttttgggttacaaaaatccagaccaggcctatggcatgtctgcgttacctttaaatctgataaaag

SEQ ID NO: 595846 - DNA, 82 bp, Homo sapiens
gtcgtggccttcagcacgttaatgcagatgccctgtatccaagcccaatatgggacaccagcaccgagtccgggaccccgtg

SEQ ID NO: 595847 - DNA, 96 bp, Homo sapiens
tggcgcttcacgttcccaaggctccgggctttgcccagatgctcaaggagggagcgaaagtgcgggccagtgctattgcccaggacgcggaccaga

SEQ ID NO: 595848 - DNA, 75 bp, Homo sapiens
accccctctcttggggtttaagctggatgatggggttggcatgctgggaagctggcacacggttcgagtcccagg

SEQ ID NO: 595849 - DNA, 100 bp, Homo sapiens
ggtgtggaacatcattctcaccaccagtctcttctctggaaacctgtaggaagtgtcagggactctggaaagaacataatggcctcacctgtgaagagct

SEQ ID NO: 595850 - DNA, 101 bp, Homo sapiens
gcagaggaggcggccaaggacctggccgacatcgcggccttcttccgatccggtctgaaggggcgtctcgattacctgagctctctgaaggtgaagggcct

SEQ ID NO: 595851 - DNA, 50 bp, Homo sapiens
gcggcggcaacggggcactgacctgggtgtctccacaaaccggaggacta

SEQ ID NO: 595852 - DNA, 90 bp, Homo sapiens
gcgccgggcactgagcaccgccaccatggggaaggggatggagttttaacattgaatgcggagaacactaattatgcctatcaagttcca

SEQ ID NO: 595853 - DNA, 100 bp, Homo sapiens
cagaagaaaagtggctgtcgtgaagacatctgcgtgtgcggggtgcgtgggtgcctggagatgaagctggaaaggtatgtctccctgcaacacagctgtt

SEQ ID NO: 595854 - DNA, 51 bp, Homo sapiens
tttggaaacttatgaattctggcagtataactccaactgtggaactgaatg

SEQ ID NO: 595855 - DNA, 83 bp, Homo sapiens
ctactgccgaggagtgagcgccatcgttttttcctacgatggcaggtggaaacaaaaattacagacatctgtggacttcccgt

SEQ ID NO: 595856 - DNA, 100 bp, Homo sapiens
tccccatggcatgggggcctcagggcagcctgcctggaggctccagaaacaggttgataagaactttcttaaagcagaaaagcaaaggttgcgagctgag

SEQ ID NO: 595857 - DNA, 100 bp, Homo sapiens
tgaaggcaatgatttataccatgaaatgattgaatctggtgttatcaacttaaaagatgccacctctaaggagaactgcgctatcctcaaggagctggtg

SEQ ID NO: 595858 - DNA, 75 bp, Homo sapiens
gcgggcccgtagctgggctctgcgagatgatgtcagttcatacagactgtattgtgtcagtgcagattttaagta

SEQ ID NO: 595859 - DNA, 74 bp, Homo sapiens
tccacctggagctgaggaaccggaccccggcagctgggacggcaaaacagaacagaaaggcggagataaaaaga

SEQ ID NO: 595860 - DNA, 75 bp, Homo sapiens
cggttccaggtgcccaccgcgcactcggagatgcagccgctgtgtccacaggatgaaatgtccgagtcaggccag

SEQ ID NO: 595861 - DNA, 100 bp, Homo sapiens
gccagacacctggaagccggaaaatgccaagaacctacacggaggaggaactgaatgccaagctgacccggcgtgtgcaaaaggcagctcggagacaggc

SEQ ID NO: 595862 - DNA, 83 bp, Homo sapiens
ccgggacccggtgtctgctcctgtcgccttcgcctcctaatccctagccactatggattttttatcaagcagaaatgcatcga

SEQ ID NO: 595863 - DNA, 75 bp, Homo sapiens
cttgtcctggctcttgccctcatcctggttctggaatcctcagttcaagaaacaccattgcaacaccagctacac

SEQ ID NO: 595864 - DNA, 75 bp, Homo sapiens
agagggtgttcgactgctagagccgagcgaagcaataccctctaccatctgctttggtcagggtgccgctcgagg

SEQ ID NO: 595865 - DNA, 100 bp, Homo sapiens
aacagaaattctggaacacctatatgtggacatcctcatcatggatgatgacgacgtccccagctggcctcccaccaagctgtccccgccccagtctgcg

SEQ ID NO: 595866 - DNA, 75 bp, Homo sapiens
acgatcttcagctggccaacagcaccatcattgcatttacctcggatcatgatggcagaagattttcaagtcccg

SEQ ID NO: 595867 - DNA, 74 bp, Homo sapiens
gagaggtgctgtgctgtgtatgaagaggcagtgaagactctgccaacagtgatatggagaatgcagaaaacatt

SEQ ID NO: 595868 - DNA, 75 bp, Homo sapiens
gcgttatggggatttcttcatccgtcagatccacaaatttgaggaggacaccagcccccaggaaggaccccccat

SEQ ID NO: 595869 - DNA, 98 bp, Homo sapiens
ccttcttcccggggcgccataaacgcccccaatttcccagctgctaaaggaagaggaagggagatgcagttaaagacttgatgcttcgctttctgggt

SEQ ID NO: 595870 - DNA, 100 bp, Homo sapiens
acagagttgccctgtcaccatttctttcacaaaccttgtgtctcaatttggctacaaaagctcaaatagctataactgtaccaaagacatggaagaaacc

SEQ ID NO: 595871 - DNA, 100 bp, Homo sapiens
ctgacgacctagagagatcccggctcccagcccactgagtggcttcagcctcgctgcttttcctccgcaaccatgtctgacaaacccgatatggctgaga

SEQ ID NO: 595872 - DNA, 110 bp, Homo sapiens
cagaggttgaagttaataagtttccagtggttgcagtcatgtcaacagggaatgagtatcataatgaagacctggaaaaagacaaaacatcacaaaactgcctaggaaga

SEQ ID NO: 595873 - DNA, 82 bp, Homo sapiens
gtcacagaaagagctgttaacacttcctagataacggagtctccaaaaaatgaccgtgaggggcctcagtgagaccagattg

SEQ ID NO: 595874 - DNA, 96 bp, Homo sapiens
acgtgctgtgcgtagctgctcctttggttgaatccccaggcccttgttggggcacaaggtggcagggaaatcctcattgacgattcaatttgttga

SEQ ID NO: 595875 - DNA, 83 bp, Homo sapiens
agacgaggagcgcgtcgtgcgcctgggggtgcgcgcctgcgacctgcccgcctggggcgtgatggtgggcatgggtcagaagg

SEQ ID NO: 595876 - DNA, 100 bp, Homo sapiens
aggaatgaaacccttccagctcgatctgctcttcgtctgcttcttcctcttcagtcaaggtgtctgacaacaaagcatccctgccgcccaagccggggac

SEQ ID NO: 595877 - DNA, 50 bp, Homo sapiens
gtccggacccgctgtggccacgtgctggagtgcaatggtgccatctcagc

SEQ ID NO: 595878 - DNA, 95 bp, Homo sapiens
tggtggaggtgttaaatgaaaaaattccgggtagatatgcctggctcaggcagtgcattcatccccaccatcaacgccatcacgaccagccagga

SEQ ID NO: 595879 - DNA, 100 bp, Homo sapiens
gattaatccaaaagagggatgtaaagttcacgtggtcttcagcacagagcgctacaacccagaggggtatagaacaggctatgcttacaggcatcctctc

SEQ ID NO: 595880 - DNA, 100 bp, Homo sapiens
agtttatggttttctaatagaagatatcaggaaggaagtgaatagagcttctaaactgacttgtcagcttgtgggaaagtgacatcagcgtccacccgct

SEQ ID NO: 595881 - DNA, 100 bp, Homo sapiens
gccgcttgtgctgcagccatggagggcatgctcagagacctgcagaagagcgtggaggaggaggagcaggtgtggagggccaaggtgggcgccgcagagg

SEQ ID NO: 595882 - DNA, 100 bp, Homo sapiens
agatgaagacagatgcaccaacgagttgcctttccccatcttcctggttctgctccttcgtggcctagtcttgtggacaccagcaagcagtgggactatt

SEQ ID NO: 595883 - DNA, 82 bp, Homo sapiens
atgtcatcagcttctgaggaatctgtgctttctgtcccagaactccagagtgaaattcacatgtctgaagaagctatacagg

SEQ ID NO: 595884 - DNA, 100 bp, Homo sapiens
ctgggtcagtccgccgctcaccccgcggccgcaccttcccgccttctcaggtgaaatgacaatggatgctctgttggctcgattgaaacttctgaatcca

SEQ ID NO: 595885 - DNA, 90 bp, Homo sapiens
ccagcttgccaccaaagacctgcgactttgctcagtggacatcctcatcatggatgatgacgacgtccccagctggcctcccaccaagct

SEQ ID NO: 595886 - DNA, 74 bp, Homo sapiens
ggccatctccgggggctccattcagtttcgtggtgggctcggacggctacgtgtacgagggacgcggctggcac

SEQ ID NO: 595887 - DNA, 101 bp, Homo sapiens
gtgttgaaccggttcttgggggactatgtggtggacttggacacgtcccagctctctctgggcatctggaaaggttgttatcgtcaggagctgtgcaaact

SEQ ID NO: 595888 - DNA, 100 bp, Homo sapiens
agccacgcagccctctgtgactttggccatgctgtgtgtcttcaacctgatggcctgggaaagtccttgctcacagagacggagtcttgctctgtcaccc

SEQ ID NO: 595889 - DNA, 100 bp, Homo sapiens
agatctggcttcctttcactggagtttacttggtccagaacatccactagcctcactaaaggctgtttatatcactggaaaagaagttttcagcttcaaa

SEQ ID NO: 595890 - DNA, 71 bp, Homo sapiens
atttccattttatggtaaaccaatgcttggaatccacgaagactccactaaccgccgccgcctgtctgagc

SEQ ID NO: 595891 - DNA, 100 bp, Homo sapiens
cgccaaagcatccagcagccccctgctccggcccagcatggcgaccccgacccagacccccacaaagggttgaaggggcccggccaggactcggggaagg

SEQ ID NO: 595892 - DNA, 75 bp, Homo sapiens
acatcaggaagatactgcagagatattctactccatctcattcattgtacagagggcagtggaagcatgagagga

SEQ ID NO: 595893 - DNA, 78 bp, Homo sapiens
tgacatggaggatgatttcatgtgcgatgatgaggaggactacgacctgggttgttacaagttgagttgaaaacaaga

SEQ ID NO: 595894 - DNA, 90 bp, Homo sapiens
caaggtcatgatgttggattctgttgcctgggtaccaccagagggaaagctggggcggcatgttatttgaaagcaattgagacgcaaccg

SEQ ID NO: 595895 - DNA, 83 bp, Homo sapiens
ctaaacaaagctctcagcttgatgaggttggtgttcgaggaagagacattgttgttcttggtgtggagaagaagtcagtggcc

SEQ ID NO: 595896 - DNA, 82 bp, Homo sapiens
gatggtagagtgcagcctggagcggcagctcagcttggagcaggaggtccagactgattcttgctattccaaatcctcttcc

SEQ ID NO: 595897 - DNA, 75 bp, Homo sapiens
gcggggcggcggcggcggcggctgcggcccaatatagcatccgcagtcggaaggctcgagccgtgtatccgtgtg

SEQ ID NO: 595898 - DNA, 100 bp, Homo sapiens
acaggttaacgtgtatggcgtgtgcgtgccagcttctcacctggggcgggtgggttctgcaccaccctcccaccctccttcctccgtgtggacgatagag

SEQ ID NO: 595899 - DNA, 75 bp, Homo sapiens
gatggaaccaaggatgacagcactaattctagtgctggagaatctggtaaaagcaccattgtgaagcagatgagg

SEQ ID NO: 595900 - DNA, 75 bp, Homo sapiens
taggggggaaacctcaagatataatcttcacttccgggggcactgaggttcctgattatgtcactgtaataaagc

SEQ ID NO: 595901 - DNA, 100 bp, Homo sapiens
agaggaggcagctgttgcaatcaaggccatggcaaaataactggctcccagggtggctgaggtcctggaaggcaaaggagcagggaagaaaggccgtttt

SEQ ID NO: 595902 - DNA, 75 bp, Homo sapiens
tgctggattgctgcaaggctgagggacgagaacgaggtcctcatgctgataccgccagtggatgccagaatttgc

SEQ ID NO: 595903 - DNA, 75 bp, Homo sapiens
gacgggggcagtctcactacatggcccagtggtcttctgtgtaaagtgagcgcaggaaatgaaaatgcttgtctg

SEQ ID NO: 595904 - DNA, 100 bp, Homo sapiens
ttctaccagacgtgccgcgccgtgcagcacatgcaccggcagaagccgcccatcatccacagggacctcaagatgaagatctccttcaacgacaaaagcc

SEQ ID NO: 595905 - DNA, 100 bp, Homo sapiens
aatttagccatctgtgtgattatcctcttgtttatcctggctgtcatcaatttaataagcattggggagtcagcaatgtccgttgtgttaaatcagctgc

SEQ ID NO: 595906 - DNA, 100 bp, Homo sapiens
accacagtccttctgcagtccctcgtccagccacccccaggttcatctcagaagaagttgttggcacctgatatgtttacagaatctgatgatatgtttg

SEQ ID NO: 595907 - DNA, 83 bp, Homo sapiens
catcaaggacgggaagtcactcataagcgcgctcaagagcatgggttggaattggagcctatcccccaacccgaaggctaaca

SEQ ID NO: 595908 - DNA, 75 bp, Homo sapiens
ggaccagaacatcttctccttctacctgagcagcaattctgtggtgttcttggtcacacatttatggagtttctg

SEQ ID NO: 595909 - DNA, 100 bp, Homo sapiens
ccacagcagtcctagaggagcagcattcggccagagcccccttgctggattatatctacagggtctgtagcatctctgtctgttggagaaggcacaggtg

SEQ ID NO: 595910 - DNA, 50 bp, Homo sapiens
ggcccgtagctgggctctgcgagggacatgttgtcttaacagattttggg

SEQ ID NO: 595911 - DNA, 98 bp, Homo sapiens
gctttctaaaacaccagaactcaacctgatatttgttcagtcgaatcaaggtgaagaggaaacaacaagaatttcatattttacttttattggtactc

SEQ ID NO: 595912 - DNA, 75 bp, Homo sapiens
gcagatcttctcatattcgggaaggagctaaggctcagctgtcgcaggccctggaggagctgggaggccagaaac

SEQ ID NO: 595913 - DNA, 97 bp, Homo sapiens
cgggaggggacctggatcatggctgccgcgccgccgctacgggaccgcctgagctttctacaccgggtcagccctgacaaaggtcagctagcccctt

SEQ ID NO: 595914 - DNA, 51 bp, Homo sapiens
agcctgcagagcgcgcagtacctccggtgtggtttcagaaccgaagagcca

SEQ ID NO: 595915 - DNA, 100 bp, Homo sapiens
gaagaaaagaggagagttgaaagagaacaggacaggttgaagggcggcttggcccatccactgtggtcctggaccacacaggcggctttgaggggcttct

SEQ ID NO: 595916 - DNA, 100 bp, Homo sapiens
gtgctcggaaagcatctattgtgaaaaacctaaaggataccttaggtttggggcaagatggaaagacactgctaattacgaatattgacatggagccatg

SEQ ID NO: 595917 - DNA, 99 bp, Homo sapiens
ccctatcctcccgactctgcttaaaaccacgtggttcgatggctgccgcggctacgctgaggctctccgctcaggacctggtgttttctgcttcccccg

SEQ ID NO: 595918 - DNA, 101 bp, Homo sapiens
cagacagacagctggcaagaggcagcctgggggccacagctgcttcagtggacatcatgcagatgtgcatcatcgagctgaaggacagaccgggcaagccc

SEQ ID NO: 595919 - DNA, 100 bp, Homo sapiens
agtttcttccgacagttgtgttgtgccaatggtggagaagaaaacttcgggcgtttactgaagcatttgaaagggaactaagaagacataaagttcaaga

SEQ ID NO: 595920 - DNA, 98 bp, Homo sapiens
cactgcagcagacagctccctgggcaccaggcagctaacagactgcctcttcaaggtgtgccccatgaaccgctactcggcccagaagcagtactgga

SEQ ID NO: 595921 - DNA, 136 bp, Homo sapiens
gccctggcttctcaggcagacctggtgtctccagctgatgatttgtccctgtctgaagcggatgtcaatttggatatatcaaagcctttgaaagcaaacctgagtttcaccaaactggatcagataaacctttttt

SEQ ID NO: 595922 - DNA, 76 bp, Homo sapiens
tgcaagagcagaggccttctctagaccttgccaagatggcacagaaacttgaagggtcaaagtgcaaagggcagct

SEQ ID NO: 595923 - DNA, 96 bp, Homo sapiens
gcccccaccgacatgctggacctcagctcttgcacacccgagccgcccgccgagcactaccagactttgttccagtcacctatatgctgcccgctg

SEQ ID NO: 595924 - DNA, 100 bp, Homo sapiens
agcatttggcggcataccaccctgcactgtgagtacttacagatcatcagtatttggagaggacaccactatgtgccattttgaaacaaaaagctcctca

SEQ ID NO: 595925 - DNA, 97 bp, Homo sapiens
agacacgtggccccggaaatcagggagctcttaacccagtttgaaacgtaactggttccctgaccagaaaacactttcctggataaaaaagaaaaca

SEQ ID NO: 595926 - DNA, 82 bp, Homo sapiens
ccgcggcgaggtggcccggaccgcagtgccccaagagagccggaagaattaacctcgagtctgcacgcttttaagaacaagg

SEQ ID NO: 595927 - DNA, 98 bp, Homo sapiens
aaatactgcttaccttttctacaaccaggtcgtttggtaaagcagttggtagcaagaccttccagtataaactatatggtggctcctgtaactggtaa

SEQ ID NO: 595928 - DNA, 84 bp, Homo sapiens
gcgcggattcgccgaggcaccgaggcactcagaggagaattcagaaggagctggcggacatcactttagaccctccacctaatt

SEQ ID NO: 595929 - DNA, 97 bp, Homo sapiens
cccgcctggcctgcagcgctcccacccccggcggcggcacgatgccctttgacttcaggagacaatgcagatcttcgtgaagactctgactggtaag

SEQ ID NO: 595930 - DNA, 101 bp, Homo sapiens
cgatgccacgccagtcctcaactatgacctcctctatgctgtggccaaactaggaccaggaaccctgattgctgtccttcaacgtgttcattatgaagtta

SEQ ID NO: 595931 - DNA, 100 bp, Homo sapiens
cggagaggagcatgaatggagcaaaatggcggatcatgtgcagtggcaggacctccacctgaaggagaacgtccctccttcccttttgctcctgtcccgc

SEQ ID NO: 595932 - DNA, 100 bp, Homo sapiens
aggattatgaagccgtatttgtgggcaatattgatgaccacttcaggattgacctgatggccaaaagaaaggaagaaaatttttcctctcctaaaaatgc

SEQ ID NO: 595933 - DNA, 79 bp, Homo sapiens
cactttccttcttccggaagttacgtctgattcgaggagagaccttggaaattggactatggaaatgatgttagacaaa

SEQ ID NO: 595934 - DNA, 100 bp, Homo sapiens
gtcccggcctccgtaatgagagcccggaaccactctttgtgccgcagcttcgcagtgtgaagcctcagtttaggtcatctggtggttcagaacactcaac

SEQ ID NO: 595935 - DNA, 98 bp, Homo sapiens
ccaccgccccaccgtacttgcaagaaagcagccccagagatttaaagatcatccaacgctaaatgacagatatttgttgttacatcttttgggtagag

SEQ ID NO: 595936 - DNA, 100 bp, Homo sapiens
gtcagaaggtgcattttaccttttatacacaccatctcagcaaggagtggcattcaactctggagctaaacagagggttattcggatggtagaaatgcag

SEQ ID NO: 595937 - DNA, 100 bp, Homo sapiens
gaggaggtggagttgctgcccttccggagtccgccccgtgaggagaatgcaaaaatattttgattctggggattacaacatggctaaagcaaaaatgaag

SEQ ID NO: 595938 - DNA, 101 bp, Homo sapiens
gagaaggttcagttggcaaaccagatatatgacttgcggatctgaaaagaacaattgctgtccttctggatgacattttgcaacgattggtgaagctggag

SEQ ID NO: 595939 - DNA, 100 bp, Homo sapiens
cttcaatactacctttatttccaccatagacacgatgaggcgagtggtacgacagagcaagtttcggcatgtatttgggcaagcggtgaaaaatgaccag

SEQ ID NO: 595940 - DNA, 83 bp, Homo sapiens
agaataagagactggacgctgtgaggtcatcatcagatttgaaatatttaaagtggatacaaaactatttcagcaatgcagac

SEQ ID NO: 595941 - DNA, 98 bp, Homo sapiens
ccggaaatcctgccaacagtgcaaggaagcctggttcagcaggtggccctaaggttggaggttaccttccgaacaagaatctatcactgtaatattaa

SEQ ID NO: 595942 - DNA, 100 bp, Homo sapiens
caccacgcggcctacgtgaacaacctgaacgtcaccgaggagaagtaccaggaggcgttggccaaggggtcttgctctgttgcccacgctggagtgcagc

SEQ ID NO: 595943 - DNA, 111 bp, Homo sapiens
ggagaatatttaatggaaaatcgcttggttaaaacctgacacttttaacaggtctacttccccagcaggacagcatcattctcctatatcttctagacatcactcatcttc

SEQ ID NO: 595944 - DNA, 96 bp, Homo sapiens
cgtctgttctgcgtggctgtcgggcggcgtttggtcccgggagcctcgccgggtgaatcaggtctaggaaaatcgactctcataaacagcctattc

SEQ ID NO: 595945 - DNA, 135 bp, Homo sapiens
tctctccggcccggtttccctcggcgtgctactgtgcgctcgatccagcaccatggggaagcgggacaatcgggtgggtggatccatgctgtgctcacttctcaggactgtatggcttttggggggaacttcctg

SEQ ID NO: 595946 - DNA, 98 bp, Homo sapiens
ggcaccccacggcccgaaacgtgctgctcagtgcaggctgctggtggtctacccttggacccagaggttctttgagtcctttggggatctgtccactc

SEQ ID NO: 595947 - DNA, 101 bp, Homo sapiens
cttgctcgcccggcggccgcagccatgtcccgggggcccgaggaggtgaaccggctcacggagagcacctaccggagacggggtctcactatgttgcccag

SEQ ID NO: 595948 - DNA, 75 bp, Homo sapiens
accatcgggaagatttcagctgccagcaaaacgtctgctgcagagaccatgtctgccgacggggcagaggctgat

SEQ ID NO: 595949 - DNA, 100 bp, Homo sapiens
gccgcggtaatgctggtggtctgcatcaccaccggatcaacttcgacaaatacacttttcaggattagaagaggctgtgtatagaaacatacaagcttgc

SEQ ID NO: 595950 - DNA, 97 bp, Homo sapiens
gctgcaggcaccatggaccgagcccccacggagcagggaaatcctcattgacgattcaatttgttgaaggccaatttgtggactcctacgatccaac

SEQ ID NO: 595951 - DNA, 74 bp, Homo sapiens
aaagaagggttaaaatggctgccattgtatgggtgttactttgctcagtttgctgatggccgccaaagttggag

SEQ ID NO: 595952 - DNA, 100 bp, Homo sapiens
aacaaggcagacctggccagcaagagagccgtggaattccagggtttgtaccagttgctggagccccgaatgattgttcgttgcaggaaacaagatttcc

SEQ ID NO: 595953 - DNA, 85 bp, Homo sapiens
agggagcattccgatcatctgaggaacagcagctggaggaaagcaggaatgttcagaggcaaatgaagattctgcagaataagca

SEQ ID NO: 595954 - DNA, 80 bp, Homo sapiens
gacactcctgctctcttccatccccatcttacagatgtattaagaagcctcaggtgtgagttcttgatacgaatgaaagg

SEQ ID NO: 595955 - DNA, 75 bp, Homo sapiens
actttcccagaacgcaccgcaagctccctcctcggttccgaggcctcatcctgctgctgaccttcctaatttacg

SEQ ID NO: 595956 - DNA, 101 bp, Homo sapiens
ccttgaagctgatggtgaatgtgtgcggacacactctgttggcgtgcagtggtgtgatctcagctcattgcaacctctgcctcccggactcaagcaatcct

SEQ ID NO: 595957 - DNA, 83 bp, Homo sapiens
ccgaggcggccacccgagacgcggcgcgcacgctccggcctgcgtgttatagttttgccgctggactcttccctcccttcccc

SEQ ID NO: 595958 - DNA, 97 bp, Homo sapiens
gacttcacctcccgtgtcatcggcttcactgtcctcacagaggcagaccctgcagccattccaagatgagatgggattctccaacatggaagatgat

SEQ ID NO: 595959 - DNA, 100 bp, Homo sapiens
ccagaacccaagagcagtggattcccagtgtccccacgagctgtgtggtccatgatgagcaaatgcagccctgaggatttggctactgcatataacaaca

SEQ ID NO: 595960 - DNA, 100 bp, Homo sapiens
gatcgaagacagtcaagtgtagactctcgccaaagccgctctgggcaaggccccttcacagatgtagtcactacaaatcttaaattgcgaaatccatcgg

SEQ ID NO: 595961 - DNA, 100 bp, Homo sapiens
tgctatgtgagatcttgaaagtgggcgagttgcggggcttggagtacccataatacagtgagcccaccttcctggtccccagacatttcagaaggtcggg

SEQ ID NO: 595962 - DNA, 101 bp, Homo sapiens
ctccctgcagtagcaccaaatttgacaactgtctacacagaaaagtaccttcatgagagccaaaaatcagctctctgatgtaaaggatggagtaaatcaag

SEQ ID NO: 595963 - DNA, 100 bp, Homo sapiens
gagataattgataacaccctgtaacagctgagtgtcagttgtacccgaggcgttctcagcagcagcaagtacctgtggtggatttccaggctgaactgag

SEQ ID NO: 595964 - DNA, 100 bp, Homo sapiens
gggaccccagcgcgggcggcggcggctgggcgggagccccagaggtctcctctgagcctccggcctccataagacccaaaacagatgacacctcttccca

SEQ ID NO: 595965 - DNA, 100 bp, Homo sapiens
aagcgtctttgctcaaggatcccagttttctctggatgacgtgaaggaagaggcccagcagaagggactcgctgagccaccccccgccccactccatgtt

SEQ ID NO: 595966 - DNA, 75 bp, Homo sapiens
actgtttgtgcggccagatggtcctagtgctggattagtgggatggtttggccatgaactcagcaccagatttaa

SEQ ID NO: 595967 - DNA, 75 bp, Homo sapiens
cgcgatggctgcgcagggagagccccaggactgggtctcttttttgagatcttttggccagctgaccctgtgtcc

SEQ ID NO: 595968 - DNA, 74 bp, Homo sapiens
gagctcctccctgtgaactcagcattgctgcagctcgtgggtgctcagttccaaagaggtgtttgaaagctcga

SEQ ID NO: 595969 - DNA, 85 bp, Homo sapiens
cctcatcatcttcctcctgtgcaccctcttcatcagtcaccttcaggccattcagaggaggaaagagaggggaatatgaagtcag

SEQ ID NO: 595970 - DNA, 82 bp, Homo sapiens
gacacggctttggaaacgacgtcatgtgttagaatgacacgctggggggaatttgacgatctctatcgtattagtgagctgg

SEQ ID NO: 595971 - DNA, 50 bp, Homo sapiens
gggcggccacgttcccgctgcaggtaagaatgattgatgttggctgatat

SEQ ID NO: 595972 - DNA, 48 bp, Homo sapiens
tacctcggggcagatccggaccaaggtggaacggccgccttctccatt

SEQ ID NO: 595973 - DNA, 83 bp, Homo sapiens
ccggcgggatgtggcgactacgtcgggccgctgtggcctggttttaaagacgctagagtgccaaagaagactttgaagtgtga

SEQ ID NO: 595974 - DNA, 74 bp, Homo sapiens
aaactaatcctgatattaagccatcaaatgtggaacctatggaaaaggagttctgtttgctcagccgccggccc

SEQ ID NO: 595975 - DNA, 83 bp, Homo sapiens
ccagccaaaatcatttttgaggatgaccgggtgtccctggccagtgtccttccacctgtccacaagcatggggaacatcttcg

SEQ ID NO: 595976 - DNA, 82 bp, Homo sapiens
cttgggacccaccgctgccctcagctccgagtccagggcgaggctcttgtcaggatggtgaagctgttcatcggaaacctgc

SEQ ID NO: 595977 - DNA, 100 bp, Homo sapiens
cttcacttccctcggtctgggcttctctgaggcggcgagagatggtcaggtctggagctcgaccgggccagtatgcagatctcaatcgccacgtggatgc

SEQ ID NO: 595978 - DNA, 100 bp, Homo sapiens
gccgcagaccccttcaagttctagtcatgcaaaatgatgcttcaacacccaggccaggtctctgcctcggaagtgagtgcttctgccatcgtcccctgcc

SEQ ID NO: 595979 - DNA, 75 bp, Homo sapiens
gggaccattcccaccaggtccgggtgaaagcctactaccgcggcatttttcagttgaaggacagttggaattcag

SEQ ID NO: 595980 - DNA, 82 bp, Homo sapiens
gttcaggccagaccctctgggagcttctcagccattttccacagatcaggagcatcagatccatgctgctgctgactcggag

SEQ ID NO: 595981 - DNA, 90 bp, Homo sapiens
acgacatccacttctaccccaccttccgggtctacgacgttcctccatcggtgagcaaggatgtgcccgatggcccactgctgcgtgagg

SEQ ID NO: 595982 - DNA, 97 bp, Homo sapiens
ccagatttgttgatgttttgtgaccaagaggagaaggcagagcccccccaggctatgaatgccctgatgcggttgaaccagctgaagccagggctgc

SEQ ID NO: 595983 - DNA, 51 bp, Homo sapiens
tccagcccagcgattctcagtcagttgttagagttggaagcttggcagttg

SEQ ID NO: 595984 - DNA, 100 bp, Homo sapiens
atgaattctatggacaggcacatccagcagaccaatgaccgactgcagtgcatcaagcaggcctcccgaggagcccagacagctgcagccacagctcccc

SEQ ID NO: 595985 - DNA, 100 bp, Homo sapiens
cttccgtcacctccgctcccccgatcctattcccagtcgtgattcagtgacctttgacgatgtggctgtggacttcacccaggaggagtggactttactg

SEQ ID NO: 595986 - DNA, 100 bp, Homo sapiens
caccacggagagcacgagagacccgagttcatcgcctacccccatctccgcatcaggaccaaggacttgcatgggtattaggagatgctgaagaactgcc

SEQ ID NO: 595987 - DNA, 75 bp, Homo sapiens
aacacggcgaccatcatcatcttcctgccggtcctggcagagctggtggcatacactgtcctgggcttcatccct

SEQ ID NO: 595988 - DNA, 75 bp, Homo sapiens
acctctacccttgaaagcagagatagtggcatcattgatattctatattgagcgcattataccaataatcagaaa

SEQ ID NO: 595989 - DNA, 132 bp, Homo sapiens
tgctaagtggatcctctggccagctgactgcacttcttttttgagaaaggaaggaatatatcctgactgattaggcggggtttcaccatgttgcccagactggtcttgaactcctgagcttaagcaatccac

SEQ ID NO: 595990 - DNA, 75 bp, Homo sapiens
ggactcattgatgaaatttatggcattcagaacagtcatgatgatgggcagcgcccgagtggcggagctgctgct

SEQ ID NO: 595991 - DNA, 82 bp, Homo sapiens
tggggccagggaaccctggtcaccgtctcctcaggtgggcttgggcatcagcacgctgctgatgtatgtcccaactcctctg

SEQ ID NO: 595992 - DNA, 90 bp, Homo sapiens
ggcagccggagtcgtcttcgggacgcgcctgctcttcgcctttcgctgcagtccgtcgacatggctctttggttatgaactaactgatac

SEQ ID NO: 595993 - DNA, 100 bp, Homo sapiens
aagatcgcccctgccgtggttcatatcgaattgtttcgcaagatttggatcaaaggtacaacactattctgcagatgtatggagaaaaagcagaagaggc

SEQ ID NO: 595994 - DNA, 121 bp, Homo sapiens
gcttggtggagcagctgcctgggagaatgttgactctactgcagccagcagcgatgacatgaccctcaccagccccagcatggacaactccagcgcagagctacttcccagcggggactcg

SEQ ID NO: 595995 - DNA, 90 bp, Homo sapiens
taagctgaataaagctgttttggaactgtcaggtacctcaaagcgtaacgttaaaaggatctgaacaaagtctgctcaaatctcctgctg

SEQ ID NO: 595996 - DNA, 100 bp, Homo sapiens
atacctcaacagcagccgtgccagcaccgatgagccccccgcagacacccagggcgtggactccctggtgctagaaagcgtgatgttcgccatacttgcg

SEQ ID NO: 595997 - DNA, 89 bp, Homo sapiens
cccctttagccatgtggatacctacggagcacgagaaatacggcgtgggataaaagaatcagagtgtctcaacccttgacaagaggacc

SEQ ID NO: 595998 - DNA, 90 bp, Homo sapiens
cggagcaggcagagcagccgagccaggttcctgggggaagccaaggtcccactccgagaggtcctcgccacccctagtctgtccgccagc

SEQ ID NO: 595999 - DNA, 90 bp, Homo sapiens
atcgacgtcgtgatccagaagtccagagctgaggactgcctgtttgcaggaagcagaatctggtaatataagtcaaaagtctgatgaaga

SEQ ID NO: 596000 - DNA, 75 bp, Homo sapiens
ctttccaccgaatgccacctggtttataacaaaagagcattggggagtcagcaatgtccgttgtgttaaatcagc

SEQ ID NO: 596001 - DNA, 100 bp, Homo sapiens
aaaaaatcccagaaattggcaaatttggggaaaaaggcctatggcatgtctgcgttacctttaaatctgataaaaggcactagaagcgctgcttatgaac

SEQ ID NO: 596002 - DNA, 75 bp, Homo sapiens
tacctggctaaagacggctcgaaattctactgcaggctctcactatgttgcccaggctcgtctcaaattcctgga

SEQ ID NO: 596003 - DNA, 100 bp, Homo sapiens
atttgccaaaggaaacttgccttatcaccttcttgcttgcaggaagctggagacaacagccagttctgctggaggaacctcttttcctgcatcaacctcc

SEQ ID NO: 596004 - DNA, 91 bp, Homo sapiens
gctcaggcccacatacagcaacttagcgaagctgccggtgaagatggcaatgaatcgctccctggctaatgtgattcttggaggctatggc

SEQ ID NO: 596005 - DNA, 87 bp, Homo sapiens
tgctcacagtgaaggcaataccactgctggattggaccatgctcgacagctgaccaaggccatgatgcgaaaggccacggccagccg

SEQ ID NO: 596006 - DNA, 100 bp, Homo sapiens
gtccgcggctccggtcacgtcaccgttattgaatttgaccgggattgtgactattttgcgattgctggagttacaaagaagattaaagtctatgaatatg

SEQ ID NO: 596007 - DNA, 100 bp, Homo sapiens
aagttggtaccttcttttcagaagtaaagcctgcaggtcagggccctaaatatgtaaaaatttttatcaacctaccccgatctatggattttgaagaggc

SEQ ID NO: 596008 - DNA, 75 bp, Homo sapiens
gccggctcccctctcaggacaacccagatgtgcaacaaagtgcgatgaataccctctaccatctgctttggtcag

SEQ ID NO: 596009 - DNA, 74 bp, Homo sapiens
gcagctctggaagtggtcggggaatcccacacagaacccccagtcggatcttcaggcccaggatagatgtcata

SEQ ID NO: 596010 - DNA, 100 bp, Homo sapiens
aagctgtttcgggccagcgacccgctgctcagcgtcctcatgtggggggtaaaccactcgaggctgaggctgcagtggccacccaggagacatccaccgt

SEQ ID NO: 596011 - DNA, 100 bp, Homo sapiens
cagccaggggcagccggctctggtgctcccagaagagcactattcatggccgaattgatcaagtcaaccaactccttgaactggatcatcagaagagggg

SEQ ID NO: 596012 - DNA, 100 bp, Homo sapiens
ccaacgtcaacaaggccctggatttcatagccagcaaaggcgtcaaactggtgtccatcggagccgaagatgaggacggggacttggttgccttttccag

SEQ ID NO: 596013 - DNA, 100 bp, Homo sapiens
cgtgtccaggttcctcatgggcagtgctcggggtgacaaagaagaggaggaaggaagagacttgagctgttgtgtagcttctcttgttcaagtgatgctg

SEQ ID NO: 596014 - DNA, 90 bp, Homo sapiens
ttatgtgaagggcagaagggcaagctctcggctggcagaattcctccctggtgttcctccaagaaaagctggttatattgaagacctggt

SEQ ID NO: 596015 - DNA, 96 bp, Homo sapiens
ctcatccgcatgtataaggccgagactcgtagaggatgaggagaggcgttggactgatgagaacatcgacacggttgctctgaagcacttccctaa

SEQ ID NO: 596016 - DNA, 98 bp, Homo sapiens
gccgtccatcgcccctcgggccgacgccatgaagatcaaagatgccaagaaaccctaatgtgtctgtgaaaactacaagctggccgtaaactgctttg

SEQ ID NO: 596017 - DNA, 83 bp, Homo sapiens
cgaggcaaggagctaaagcagcgtgcgttcagccctggggactcagtggcttttgaggatgtgtctgtgagcttcagccagga

SEQ ID NO: 596018 - DNA, 75 bp, Homo sapiens
gtgcgcaccacttttgtgtccaggcataagaaatttgacggttttgatgatgatggttcagaatttcatgaacat

SEQ ID NO: 596019 - DNA, 97 bp, Homo sapiens
gtggggagctggttatccaacagaagcttctggtgcccaaagaatcttatgtggtgcaaacggcctcctcattgagtatgaagacatgtttccctac

SEQ ID NO: 596020 - DNA, 76 bp, Homo sapiens
atgttgacacgggctgggcgcccccagaagcccgggaacaaacggccgttgctccagggagaactgcaaatatctt

SEQ ID NO: 596021 - DNA, 75 bp, Homo sapiens
aaatactggaaaccatcggaggcaaacagctcagagtcttcgtatatcgtacaaaaacatgtctcaacttagcga

SEQ ID NO: 596022 - DNA, 51 bp, Homo sapiens
accaggacccccaggcggcgttagagtagagacggggtttcgccatgttgg

SEQ ID NO: 596023 - DNA, 104 bp, Homo sapiens
gggagctgcaggaaccagactgggggcgagctgagcacctgtagtcaatcacacgcagattgcagagggaatggcatacatcgagcggaagaactacattcacc

SEQ ID NO: 596024 - DNA, 100 bp, Homo sapiens
atcacaatcccattattcagagcgcgtatggagtggaaacgcttgtagggtttcaccaggggcttacggtgagacatatcctgccattgaagatgacgtc

SEQ ID NO: 596025 - DNA, 100 bp, Homo sapiens
aggacgagacttggattttgtttctccccatggaatggggggactcaggagtctaccaatgtgttataaaagttgtggaaagtaaaaatgtagccctacc

SEQ ID NO: 596026 - DNA, 101 bp, Homo sapiens
acggcgctctccgacctctacctggagcatttgctgcagaagcgtagtcggccagagaaaacctcggatcaattctcagctggtggcacaacaagtggcac

SEQ ID NO: 596027 - DNA, 98 bp, Homo sapiens
ttcagttgcaaaaagaaactggagccaccatcaagctgtctaagtccaaagatttttacccaggtatggtctgaatatgcgttgcttggcagctcggg

SEQ ID NO: 596028 - DNA, 75 bp, Homo sapiens
atgatgttcgtcaaagccggccagagccaagacttggctctttgtgacaggacctctgccctacccccactggac

SEQ ID NO: 596029 - DNA, 75 bp, Homo sapiens
gaaaatgattgggaagaggttgaaggaaggtgtcttgctgcaggtaactaatgaagaagtggtcaaccacagagt

SEQ ID NO: 596030 - DNA, 75 bp, Homo sapiens
aggtgattccgtgaaggcttcgaagttcaaatggtgaaagacgatgacccctcctggaagcccacttttatcgtg

SEQ ID NO: 596031 - DNA, 71 bp, Homo sapiens
gcgctgatctacaagaaaatccacaagaacgcactttcctcccagaccatcatggagcagttcaaccctag

SEQ ID NO: 596032 - DNA, 117 bp, Homo sapiens
tcctcgccgccacagctttaggaaacacctctacctcctgcgaggcctcccgggctccgggaaaactacactggccaggtgtcgtgaaaactacccctaaaagccaaaatgggaaag

SEQ ID NO: 596033 - DNA, 100 bp, Homo sapiens
gagacaaggatggctcttcctcagagcaaacgaggcccctgagagctccacctagttcacaggataaaatcccacagcagaactcggagtcagcaatggc

SEQ ID NO: 596034 - DNA, 50 bp, Homo sapiens
tccccatgtggcactccaaacaacgtagagatggggtttcgccatgttgg

SEQ ID NO: 596035 - DNA, 100 bp, Homo sapiens
agaacggacaggggccgcgccgctgccgctgctgctggtgttagcgctcagtcaagaatttcgctaaggagtttgtgatcagtgatcggaaggagctgga

SEQ ID NO: 596036 - DNA, 101 bp, Homo sapiens
gcccaattaggcttggcatctgctctgaggccagatggagaatacactttgctggcacctgtgaataatgcattttctgaaattgcccaggttattgcctc

SEQ ID NO: 596037 - DNA, 83 bp, Homo sapiens
ccacaatcttcaatgagtaaacatattccttaccatggggcgcaagttggaccctacgaaggagaagcgggggccaggccgaa

SEQ ID NO: 596038 - DNA, 100 bp, Homo sapiens
ttccaaagttctgcagcctcaaactgggccacccagtgctcctgcagaagatcgttcaggaacacccgacagcattgcttcctcctcctcagcagctcac

SEQ ID NO: 596039 - DNA, 100 bp, Homo sapiens
gaaacagctatatgggaacaacatacagtgacgcttcacaggaatcaccacgacagcagcatgcatgatggacctcaggagataccccctggacgagcag

SEQ ID NO: 596040 - DNA, 82 bp, Homo sapiens
ggaggatccacttgactggacaggaggccccgtgtgggccgcggcccggccctcaccatggagtccatgttcgaggacgaca

SEQ ID NO: 596041 - DNA, 83 bp, Homo sapiens
ccaccctccaactttgcgacggaaatgtgtcatcgaaagccaggagaggagtggatgattcggaaggtgaaggtggaggacga

SEQ ID NO: 596042 - DNA, 87 bp, Homo sapiens
agctatggtgaaacaccactgaagcattgccaagagtaaagctaaaacattttgagaaatttcaggatacagcagaagcattagcag

SEQ ID NO: 596043 - DNA, 82 bp, Homo sapiens
ctgctgaagagtttccaaggagaggttttaaaatcaaagatgggaaaatcggagaaaattgcccttccccatggccagcttg

SEQ ID NO: 596044 - DNA, 132 bp, Homo sapiens
caggtgggggtcatctctggattcaagctggagtgcaggaagaccacctgcaacccctgccccctgatatacccctgctccctggctccccacgccggctgagccctcaggcagggtccagagggggccagg

SEQ ID NO: 596045 - DNA, 100 bp, Homo sapiens
tacaactgtcagagtgaatacacatttagcctcagtacaacatgtgaaaaatctgttacttgatgaacttcagaaggtatttataacagcaatgatgtag

SEQ ID NO: 596046 - DNA, 82 bp, Homo sapiens
aagacctggagttgtctgtgcagatgtacgcccaagccgccctggatggagactcccagtctattatcctcccagtccacaa

SEQ ID NO: 596047 - DNA, 100 bp, Homo sapiens
ggatggccgtaaccccgaaggaaatgcaagaggaggaacgacgtagaagagaggaagagatgatgattcgtcaacgtgagatggaagaacaaatgaggcg

SEQ ID NO: 596048 - DNA, 75 bp, Homo sapiens
gaaaaagtactatgaggaaccaaggaaggggatacaggacatcatgtgaggctctgtaaaccatgcaagcttgag

SEQ ID NO: 596049 - DNA, 100 bp, Homo sapiens
aaggaggtggacaagaactggctggagggagagcaccacggccgcctgggcatcttccctgctaattatgtggagggtggggagaaacagcgggtcttca

SEQ ID NO: 596050 - DNA, 100 bp, Homo sapiens
tcgcttgggagagctcctgggccacccctcctttcaggtcaaggaggtccaacacacttgacaaaaccaaccaccacgtcctcgtccgagcgggagcgag

SEQ ID NO: 596051 - DNA, 96 bp, Homo sapiens
tcagaacgctggggaggttgggctgaactgcagtgggagaggagaagagatgctggcgtgaagggtctgacggttccatcctggccatcgccctgc

SEQ ID NO: 596052 - DNA, 74 bp, Homo sapiens
gcatgtttgctgactacctcgcccacgagagtcggagtgccggtggtggtgtgcacattgagccccggtataga

SEQ ID NO: 596053 - DNA, 100 bp, Homo sapiens
gccgggaggatcgcaagctggatgagcttctaggcaaggaccacacgcaggtggtggtggtatcatggatacagaaatgtctgaagatatagaccacaac

SEQ ID NO: 596054 - DNA, 101 bp, Homo sapiens
cccaccgctgccgaaatgaagtataaggtgtcagttgtacccgaggcgttctcagcagcagcaagtacctgtggtggatttccaggctgaactgaggcagg

SEQ ID NO: 596055 - DNA, 75 bp, Homo sapiens
tggatcggaatggtggagaacttcaaccaggcactcaagttaaaagaagaattcagtgcagaagaaaattttctc

SEQ ID NO: 596056 - DNA, 89 bp, Homo sapiens
gtgcgcggagccgtctgcctgcatctgctgctgaccctcgtggtcaaactgtgctgaaaatatccgcaaacacattctgcatactggca

SEQ ID NO: 596057 - DNA, 100 bp, Homo sapiens
agcagagtggctatggtgggcaaactaagccgattttccggaaaaagcttgccgaactaaagcaagaatgtcttgctcgtggtttggagaccaagggaat

SEQ ID NO: 596058 - DNA, 82 bp, Homo sapiens
tagcagctgcggttcaaatcttggccctgggaggagcggggacactgaggacctctctccaaattggcctctcaactcacag

SEQ ID NO: 596059 - DNA, 100 bp, Homo sapiens
agaagagcttctcctcatcaactggggatgattacagttcttcctaaaaaaggcagaagtcaattcatctggaaagactatctctgagtcagacttaaac

SEQ ID NO: 596060 - DNA, 100 bp, Homo sapiens
agaaatgcttacacacagaaatgcatcctgatgaaaagagattggaaggcctctccaagcaactggactgggatgttcgaagcattcagcgctggtttcg

SEQ ID NO: 596061 - DNA, 75 bp, Homo sapiens
agcgtctttttccgaaacaaccactttagcaccatgactaagcataaggctggaggacacacctaaacatgtgga

SEQ ID NO: 596062 - DNA, 100 bp, Homo sapiens
caaaccgggaaaggagaggatcccggagccggtacaggtttgcagattccgccagcagcacagcaagctctacagatgagtggctctttggcatttggtg

SEQ ID NO: 596063 - DNA, 75 bp, Homo sapiens
tggaattttgccgatttcatgactaaccagtgtacctgtctgaccttcatgcgtctggtgaccctgcttggcaat

SEQ ID NO: 596064 - DNA, 75 bp, Homo sapiens
cgctgcccgaggggagcaaggacaggttaaagaattgcccacccttaaggatatggactttctcaacaagaacca

SEQ ID NO: 596065 - DNA, 100 bp, Homo sapiens
tctgaggcggcgagagatggtcaggtctggagctcgaccgggccagtatgaacggtgccttagcgtttgtggacacttcggactgcacggtcatgaacat

SEQ ID NO: 596066 - DNA, 82 bp, Homo sapiens
ctctgccgcaaacatgctccgccagatcatcggtcaggccaagaagcatccgagcaaatacactttcgggaaatggcctcta

SEQ ID NO: 596067 - DNA, 75 bp, Homo sapiens
cccgagtggttccatggtgcaatctcaagagaagatgcagaggatgctatttatggaagaaatggttatgattat

SEQ ID NO: 596068 - DNA, 75 bp, Homo sapiens
acaagaggaaagctgaagccagagtggccaaaattcagcaatgtcaaggcacagaaaactgaatctgtagataac

SEQ ID NO: 596069 - DNA, 84 bp, Homo sapiens
ctttcctacactctgaagaccactttccagcactgccagtgaaagatgtagaagataaacctgaacaacaaaccagaacaagag

SEQ ID NO: 596070 - DNA, 80 bp, Homo sapiens
tgtggaaagaagttgcaaaacactgggttaacgtccctaaaacccgccggactttctgtaagaagtgtggcaagcaccaa

SEQ ID NO: 596071 - DNA, 98 bp, Homo sapiens
gggacagagccagggcactcaccaggctgcaagaacagtgctggggtaagtttgttcctgtcaattgggaaccccctcaaccacttccattccccaaa

SEQ ID NO: 596072 - DNA, 100 bp, Homo sapiens
ttatgaactgagccctcacatgtagcacaggcggagtgcagcggaggcccctgccgctgccgtcatgccgttcccgtttgggaagtctcacaaatctcca

SEQ ID NO: 596073 - DNA, 82 bp, Homo sapiens
ccccgcccttccccctgtctctgccctcctggcgggcccggcggctctcactatccagtgtactaatggtcacttgatgtgc

SEQ ID NO: 596074 - DNA, 101 bp, Homo sapiens
ggggctcagtaaactgcaggagacagagttcttccagaaactaggctatgagaggaaactccagaaaccacaggaatatgatgaattagctgaaacacaag

SEQ ID NO: 596075 - DNA, 75 bp, Homo sapiens
cgccgatgcccggggctgcgacggctgcaggttgttcctggtcattgagtacgtcaacggcggggacctgatgtt

SEQ ID NO: 596076 - DNA, 100 bp, Homo sapiens
gccccttcctgagaagatcccaggcaaactgtccttggaagaattcatcagaggtgccaagagcgacccctccatcgtccgcctgctgcagtgcgacccc

SEQ ID NO: 596077 - DNA, 76 bp, Homo sapiens
cccggagcacccgacccctgattttcggctttgtgagaaaccttaccatcaaacacgatggccagcaacgttacca

SEQ ID NO: 596078 - DNA, 75 bp, Homo sapiens
agctccaggccgtgcgcatgtttgctgactacctcgcccacgagagtcggaggttcctttgcccaaagactcaac

SEQ ID NO: 596079 - DNA, 82 bp, Homo sapiens
ccttggggcaaaatgtggacaaggttttccaaagaaattagaccattttcttcgtgagaaagaaatcgacgtgctgttttca

SEQ ID NO: 596080 - DNA, 75 bp, Homo sapiens
gtcgatggtcggcggcgcccggatgggcagctgaggtgaacctgagcaaggtgggcgagtattggtggaacgcca

SEQ ID NO: 596081 - DNA, 121 bp, Homo sapiens
catttccgagcgggtggaggtggtgtccccactgagctcttggaagagaggcagaggtggaggagacactgaagcgactgcagagccagaagggagtgcagggaatcatcgtcgtgaacac

SEQ ID NO: 596082 - DNA, 90 bp, Homo sapiens
gttggagattctccggggacccttccgtatctgcctaggcattttgctgtctcctcctaatacggatgctgaaaacgccattcaacagat

SEQ ID NO: 596083 - DNA, 98 bp, Homo sapiens
acggccggaccgaaggtgcggcggcggaggggagccagggcgccccagcaggctgtccatctggcccaggcaagcttccagattgaagccttcggctc

SEQ ID NO: 596084 - DNA, 75 bp, Homo sapiens
tcgatgtgaaagactgctcctggtgcagccacacaggagccatggaagtggcagagcccagcagccccactgaag

SEQ ID NO: 596085 - DNA, 96 bp, Homo sapiens
ttcgatgctggatttttcagagttgaaagtcctgttaaattattctcaggtcagtctgcggtattttgtggccgttctggaaaacagctgaagcgt

SEQ ID NO: 596086 - DNA, 75 bp, Homo sapiens
gcacaggaagccgtgaaactggtggaaaatgaggttgatcgcagcattcagaaagtgtataagacctacaatgga

SEQ ID NO: 596087 - DNA, 74 bp, Homo sapiens
cgtggatgccctgcaccgggtccggcagcgaaaacagtgttacaccagaagagcagccggcctcctgtaccgat

SEQ ID NO: 596088 - DNA, 75 bp, Homo sapiens
cctgggttttcttagccctctacttttcaagacaccaagtgagaggccaaccagattgtgttcacctattgaaaa

SEQ ID NO: 596089 - DNA, 101 bp, Homo sapiens
atgatgggagagattgttcctgtggagcaaagagctgcatcatgaattcaggagcatctgtatgggtttcgacagaccatgatgaaattgagaatgtggcc

SEQ ID NO: 596090 - DNA, 83 bp, Homo sapiens
gtcgccgccgccccgagtcccggaaagagccagacttctcagaggtcagtctgttcaacaagtgggaccccagggccttctgt

SEQ ID NO: 596091 - DNA, 100 bp, Homo sapiens
ccgggaggggacggccgccggagccgcgaggccaatgtactaatggtcacttgatgtgcgctggctgttttatccacctactagcagatgcccggctgaa

SEQ ID NO: 596092 - DNA, 80 bp, Homo sapiens
gtaaaatatggtgaactcattgtcttaggacctgcctagagctggaacgttacctccagagcgagccctgctatgtttca

SEQ ID NO: 596093 - DNA, 83 bp, Homo sapiens
ccccgcgcagcccccggccgcagcgcaggcagcccagcaggaaaaccaattctgtgtcctcggaggaccacagcccagttggg

SEQ ID NO: 596094 - DNA, 100 bp, Homo sapiens
gcacagcgagggcaccaccgtcctgctcttccagttcgggatggatcccgttgaagataccacattacacttaggctcctgttggccatgacagcttctt

SEQ ID NO: 596095 - DNA, 83 bp, Homo sapiens
ccgccgaaaaagagaagacgctttacccgactctttgggccgttatctcacactccgtgggaaggaggcttgtttaaactacg

SEQ ID NO: 596096 - DNA, 97 bp, Homo sapiens
tggggacagctgtcagtggcctaggccgcagatatttgttcagtcgaatcaaggtgaagaggaaacaacaagaatttcatattttacttttattggt

SEQ ID NO: 596097 - DNA, 74 bp, Homo sapiens
gggaacctgctcaaagccctgggtcgcttggaagaagccaaggttgcaaagcagctgaaggagcagcagatggt

SEQ ID NO: 596098 - DNA, 100 bp, Homo sapiens
tgcgaaggaaagaagaagcagaccaactacttgcgcacgctgatcaacgagctagtgaaagtgatcgtccgtgccgctgactgtaagaaggtacaccaga

SEQ ID NO: 596099 - DNA, 83 bp, Homo sapiens
actttctgggcgttcatgatcctggccagcctgctcatcgcctactgcaggcgcggatggcgtcggggcgccccgaggagctg

SEQ ID NO: 596100 - DNA, 99 bp, Homo sapiens
cggtacctgacgggcacatatgtccaggaggagtctccggaagggcctgctttcttccccgggcgatgtgcagagatctttgccaggggtcaaagcgtc

SEQ ID NO: 596101 - DNA, 88 bp, Homo sapiens
acgccatctgttctgccctggctgcctcagccctaccagcactggtcatgtctaaagtggaggccatagtggagtttgactaccaggc

SEQ ID NO: 596102 - DNA, 74 bp, Homo sapiens
cagcaagtcctcatagccaggccaccaaagtccttggcactgtcaaatggttcaacgtcagaaatggatatgga

SEQ ID NO: 596103 - DNA, 100 bp, Homo sapiens
tgccgctgtcgctgctgctcgttcgagtcgcaggtgctggagaatctggtaaaagcaccattgtgaagcagatgaggatcctgcatgttaatgggtttaa

SEQ ID NO: 596104 - DNA, 80 bp, Homo sapiens
atcctggagctgctgttgcagcacttgttccccaaacaagtgctcctacattctgcagcgatggattttgggtggggaag

SEQ ID NO: 596105 - DNA, 100 bp, Homo sapiens
ctggtacccattggcaactgcctatgcaacgctgggcatgaggagcggagcggagaatgccaaggatgagaagaaccaagttttaaccaccaacatttgg

SEQ ID NO: 596106 - DNA, 89 bp, Homo sapiens
agcaccgatgatgtgcagatcaatgacatttccctgcaggcctcgaaggagctccagcaagcccagacaaccagaccagaatcgacaca

SEQ ID NO: 596107 - DNA, 98 bp, Homo sapiens
tacatcaagattctgaatctggtgatgaacttagcagcagctccactgaacagataagggagatgggtctcactctgtcacccagactggagtgcagt

SEQ ID NO: 596108 - DNA, 90 bp, Homo sapiens
aggacgcgcgggccgagttggcaccacaggcattcttacacagaatgaaccagtgtgcagcatcaaaagttgacaaaaatgtgacagaag

SEQ ID NO: 596109 - DNA, 100 bp, Homo sapiens
ctacactaaaccatatttgggaagacgagcatgttggcagataaattgaacatgactccagaagaagctgaaaggtggattgtaaatttgattagaaatg

SEQ ID NO: 596110 - DNA, 100 bp, Homo sapiens
gcgcctgagcccgcccttgatcttcgctgtggcatggcggacgaggggaagtcgtacagcggcatcatggccgccctcagaccccttgtgaagcccaaga

SEQ ID NO: 596111 - DNA, 75 bp, Homo sapiens
cgcaaacgaaaaagaacgacatgatgcaatcttcaggaaagtaagaggatcataggtatattgaactgttcctga

SEQ ID NO: 596112 - DNA, 100 bp, Homo sapiens
cgactgcggcgcgctgctggacgaagagctctcctccttcttcctcaactatctcgctgacacgcagatgcctgaggaaacccagacccaagaccaaccg

SEQ ID NO: 596113 - DNA, 98 bp, Homo sapiens
agaagatcctggtggactcccgggaagccacctctgtgccccacatctacgccattggtgacgtggtggaggtgcgtgggactcatgaactcaccaat

SEQ ID NO: 596114 - DNA, 75 bp, Homo sapiens
aaaccatcaagttgtgtatcggggaacttgcatcagcactgaagtcagccttatctggccacctggagacggtga

SEQ ID NO: 596115 - DNA, 100 bp, Homo sapiens
accttggagagaggagaacgaacatcttctggacctttgtccaggtgtggccgacgacgatgccctcgctgaggagcgcatgcggagaggccagaacgcc

SEQ ID NO: 596116 - DNA, 76 bp, Homo sapiens
tatcaggattattgctgaaatccttatggagttaactggctgagaggaagacggagtctctctctgttgcccaggc

SEQ ID NO: 596117 - DNA, 136 bp, Homo sapiens
cttcgccacaagaagatgggcagatcatgtttgatgtggaaatgcacaccagcagggaccatagctctcagcccccaaatacatcaagatgtttgtactggatgaagctgacgaaatgttaagccgtggattcaag

SEQ ID NO: 596118 - DNA, 100 bp, Homo sapiens
agtttacagataagcggttccagcctgtccacgacctcacaatagggattttagccattggtttaattaatgaagccctggatgaaggtgatgcccaaaa

SEQ ID NO: 596119 - DNA, 82 bp, Homo sapiens
cgaggccctcatgtaccacacggtcaagtctggcaccatctttgacaacttcctcatcaccaacgatgaggcatacgctgag

SEQ ID NO: 596120 - DNA, 100 bp, Homo sapiens
aagatctccgcactctggagcataatgttaagactttgaccccgacgcaggcttcagtgattgccgcggatcagaagcctgagcactttggctcgagaca

SEQ ID NO: 596121 - DNA, 75 bp, Homo sapiens
gtctcggcaggctcttcgggaaggattggttcgagtgagtaaaaactaccgatcagtcatcagagcatgtatgga

SEQ ID NO: 596122 - DNA, 50 bp, Homo sapiens
ggccagtctcttccgctggcggcatcagggaaccagtggatgaggtgctg

SEQ ID NO: 596123 - DNA, 83 bp, Homo sapiens
tcaagatttgaccatatctgttttgaggattcattatgaacaaagaagtctcccagaaaacctcggatcaattctcagctggt

SEQ ID NO: 596124 - DNA, 75 bp, Homo sapiens
agagaccccgcaagtggcctgtttgcctggacatccacctgtacgtccccaggtgaggagtaagaggagcaggct

SEQ ID NO: 596125 - DNA, 82 bp, Homo sapiens
tcgggttattcgagtgaccgagaccgcggccgggaccgagggggcctagaagacagttcccaggaggccgaggacgaggcat

SEQ ID NO: 596126 - DNA, 100 bp, Homo sapiens
gctggatgtcaacggcctctggtttgtgtttagtgaatcagagggatctgcattagaacagtttgaaggtggcccctgtgctgttattgcacctgttcag

SEQ ID NO: 596127 - DNA, 83 bp, Homo sapiens
aggtcatggatgccaagcacaagaactgcatggagctctggattaatcgaattacagctgctagccaggaacatggactgaag

SEQ ID NO: 596128 - DNA, 99 bp, Homo sapiens
caaatgttgtggtcaagtgcctcacccctttctacaaggagggcaagtttgcttccaaggtgtgccacggaccacaatgtggacaacaccacagagatg

SEQ ID NO: 596129 - DNA, 112 bp, Homo sapiens
ctccgaaccccttcatgcccaaatcccggaaactccagcgtgtctccagccgtgcacttgcacctcctgcgccgccgccccccatccaaggatatgccttcaagcctccacc

SEQ ID NO: 596130 - DNA, 100 bp, Homo sapiens
gaaaaccacccagattggatgcctgctgcgcttggagccgaacctgcaagcccaggtggatccataaagaacccagccaacccgcagagggaggggaggg

SEQ ID NO: 596131 - DNA, 80 bp, Homo sapiens
gatttctgcagtgaagattgctgtaaaaaatttcaggattggtactacaaggtgttacagcacatgaaggccgtgcaggc

SEQ ID NO: 596132 - DNA, 90 bp, Homo sapiens
gcgctacgacgacatggcctccgctatgaaggcgtctgaaccggacggcttttctcatttccacttgtacgtgtgcgctgcttttctcgt

SEQ ID NO: 596133 - DNA, 100 bp, Homo sapiens
tgaggatgaactggcgggtgtggacgccactacagttcatcaacatcaactacgtccctctgaaggacctgaaggagaagaaggagaaggtggaggagaa

SEQ ID NO: 596134 - DNA, 75 bp, Homo sapiens
tccctcaccgagtacgaagcgggcgtttgcgaagatttctctatgaatcatcatcaagaactctgggagaacttt

SEQ ID NO: 596135 - DNA, 76 bp, Homo sapiens
ctgactttcagctatggaatcgccttcaagatggtcagcaaggccagcagtccacagcccaggtcaaagtccagtc

SEQ ID NO: 596136 - DNA, 82 bp, Homo sapiens
ttggatgcctgcaaagcgaggctgaagaaggccaaggctgcagaagccaaagccacgggagtgcatccgccccaaccctttt

SEQ ID NO: 596137 - DNA, 82 bp, Homo sapiens
ccaagaagatcaagaggtggttgttgtcaaagagcctgatgttggaggacgagtaagtcgtgaattaaattatactcgccag

SEQ ID NO: 596138 - DNA, 51 bp, Homo sapiens
cattgctccaaatatccgttgaagcaggaagatgagaatgtgcctactgct

SEQ ID NO: 596139 - DNA, 83 bp, Homo sapiens
acgccatgtcgggttattcgagtgaccgagaccgcggccgggaccgagggtaaggggcctggataccaagaagtgactgctca

SEQ ID NO: 596140 - DNA, 74 bp, Homo sapiens
ctggtgaaatggagaggctggtcgcccaagtcaaaatgcagatcttcgtgaaaacccttaccggcaagaccatc

SEQ ID NO: 596141 - DNA, 100 bp, Homo sapiens
tccgccccgtgtctgcacccgccaagagaaacttgcccaggccaaagaagagaacgtgggcttacatcagacactggatcagacactaaacgaacttaac

SEQ ID NO: 596142 - DNA, 75 bp, Homo sapiens
ctgcggaggagaccggcgaggagaagcagtctccatctgctgctgcctcttcatcctcttcctcttcctctcgga

SEQ ID NO: 596143 - DNA, 76 bp, Homo sapiens
aggccctccattgtgcggagcaacgtcgcaccagcttttcctgtaccttggccatgtagaagttgatgaatcaaga

SEQ ID NO: 596144 - DNA, 100 bp, Homo sapiens
gggaaacagaagcttactttgctgacctgataatgaagaattattttgcaccactggatgttgtttactgtgtcgtgtgggagccaatgggagatgggaa

SEQ ID NO: 596145 - DNA, 93 bp, Homo sapiens
ggtggaagctgggaaacccacaggaggcaaccacactagtttagtgaaagaattcttagccaaagccaaagaagattttcttaaaaaatggga

SEQ ID NO: 596146 - DNA, 100 bp, Homo sapiens
gcctcagaacagactgtcacagtggaggaagaggcacagttgaatgctgttgatgctttgattgactccatgagcttggcaaagaaagatgagaagacag

SEQ ID NO: 596147 - DNA, 83 bp, Homo sapiens
ctggttgttccgttgcgagctgcagctgcgatctctgtggtaggcccaggatactggtatcgggatgacacaggaagagctgg

SEQ ID NO: 596148 - DNA, 100 bp, Homo sapiens
gcgtcaacttcctcaagtcgcccaaagatggttctggcatttatgacccttgtgaaaaagaagccactgatgctattgggcatctagacagacagcaacg

SEQ ID NO: 596149 - DNA, 100 bp, Homo sapiens
cgacgctctctctgaccgtgaattcaggagaccctccgctaggttttggcttgtgatcaaccaggagggaaacatggttactgctcgccaggaacctcgc

SEQ ID NO: 596150 - DNA, 82 bp, Homo sapiens
tctgttaaagctggtctgttctaactgaggaactgtggctgcaccatctgtcttcatcttcccgccatctgatgagcagttg

SEQ ID NO: 596151 - DNA, 74 bp, Homo sapiens
gcggggacctgctccgggacaacatgctgcggggcacagaggagaaggcagagcccccccaggctatgaatgcc

SEQ ID NO: 596152 - DNA, 51 bp, Homo sapiens
tgtgcaaacccgagagaactggaaccagacgtcctgggtcctctccagcat

SEQ ID NO: 596153 - DNA, 50 bp, Homo sapiens
cggggccgtggctgacatggagcagatgaagactggcccatttgcagagc

SEQ ID NO: 596154 - DNA, 100 bp, Homo sapiens
gcaggtgtcacgggccactcagggtgaacaggacaattacgagatgcatgtgcgagccgccaacatcgccacgtttaagggatggatggatattatgtat

SEQ ID NO: 596155 - DNA, 100 bp, Homo sapiens
tgtgaaatagcagaaggcattgtttcagactcctttcctcttgctgatgacatgattcctgtttgaatctgttgacaagattctgaaagctgaacagaga

SEQ ID NO: 596156 - DNA, 50 bp, Homo sapiens
cttcggcccgggccgctcaggtgcaggtacctcatcgcccatccttatca

SEQ ID NO: 596157 - DNA, 50 bp, Homo sapiens
ggaggacccggcaagcccgggggaggaggaggtgtgattgcctatatcag

SEQ ID NO: 596158 - DNA, 82 bp, Homo sapiens
cccaggagtcatcggacgccagaatctggccgatacaaagcaggggaaaaggagccagatcccaagacgtggaaggccaact

SEQ ID NO: 596159 - DNA, 143 bp, Homo sapiens
gctgcctctacggctgaggaagcagccaagaaaaaaagacgaaagaagaagaagagcaaagggccttctgcaggtatggagagtgcaatcacgctgtggcagttcctgttgcagttgctgctggatcagaaacatgagcattt

SEQ ID NO: 596160 - DNA, 82 bp, Homo sapiens
tggaagcagaggcacccacgctcctacaatatccctgaatattgccgagccttagaagagaatgaaatatctgagcactgtt

SEQ ID NO: 596161 - DNA, 75 bp, Homo sapiens
acacagacactgtcactggagtggccttcaacccatcagcgccccaggttgctccgactgtgtgttccaggagtg

SEQ ID NO: 596162 - DNA, 75 bp, Homo sapiens
gcctcccgagtggctgggattacaggactattatgcagcatggaagatgggagtgtgacagacctctgtattgaa

SEQ ID NO: 596163 - DNA, 90 bp, Homo sapiens
ctctgacttgcgagagcctgcctccatagctgtggacccactgtctgggattcactttggacagatcactagcaatcaaatgcttgtgcc

SEQ ID NO: 596164 - DNA, 75 bp, Homo sapiens
atggcgagcaggaccaagctggtgtgatccctcacatccacaaatctctgattggaaagaagggacagcagaaaa

SEQ ID NO: 596165 - DNA, 75 bp, Homo sapiens
ccgcctcctgggaagatggcgctgcacttccagactttgagagttttgacctgcctgaagagcaccagattgcgc

SEQ ID NO: 596166 - DNA, 75 bp, Homo sapiens
ctggacgcggatttttggcctcatactctgttatagataaacaagggtgttttgaatgctgtatcaaatgcctgg

SEQ ID NO: 596167 - DNA, 100 bp, Homo sapiens
gctgggttcattacatgattcatgagccaggagcctcctcaacaagcccaagagtgagatgaccccagaggagctgcagaagcgagaggaggaggaattt

SEQ ID NO: 596168 - DNA, 90 bp, Homo sapiens
caatgagaagctcttgactgtcttttgtggcatgctgatgaactatagcaatgagaatgtaccttctccaggcaaattccgttcccctgc

SEQ ID NO: 596169 - DNA, 105 bp, Homo sapiens
gcacttcctgcagcacgagtgggcccgcttcgaggtggagagagcccagtgggaggtggagcgggcggagctgcagctgctgccaccgtctttctgggaaaacaa

SEQ ID NO: 596170 - DNA, 90 bp, Homo sapiens
cgcgcagcccggcgggacagcggggcggctggcgccgggggccggggagcgccaggtcgaaatgagaaggggcagctgggacatggtgac

SEQ ID NO: 596171 - DNA, 75 bp, Homo sapiens
gccggcgatatgatgatcctgaagtacagaaagacatgcagctcacagtgtgccaccatggagttggggccccta

SEQ ID NO: 596172 - DNA, 82 bp, Homo sapiens
ggttattcgagtgaccgagaccgcggccgggaccgaggatctggtggctggacccagagctgacctatggctgcgccaagcc

SEQ ID NO: 596173 - DNA, 98 bp, Homo sapiens
cataaggatttgcacacctatgggcaaactgggagacagctgccatccactgactcgtaaagtttcccttgggggctttgaaataacaccaccagtgg

SEQ ID NO: 596174 - DNA, 50 bp, Homo sapiens
tctgggaccttaacagggagccatggccataggaaaaggatacagagtag

SEQ ID NO: 596175 - DNA, 75 bp, Homo sapiens
tcagcatcacgcactttaaactgcatgcctgcactgaagaaggacagctggagcttactgcagagtgggtctggg

SEQ ID NO: 596176 - DNA, 98 bp, Homo sapiens
gccccctgtgcgccaccattgcagccaaaggtggtggacataatgcgagttaacgtggacaaggttctggaaagagaccagaagctctctgagttaga

SEQ ID NO: 596177 - DNA, 100 bp, Homo sapiens
gccaacgcgcaggtgctagcggccccttcgccctgcagtctgtgtctgtgtggagtgttgcaggacgagtggaaatgactgtttccaagttcatggcaat

SEQ ID NO: 596178 - DNA, 100 bp, Homo sapiens
ctgcgagcgagccgcgaaccgagcgggcggcgggcgcgcgcaccatgggggagaaacccgggaccaggcatcaagcagatcctgccacaccagatgacca

SEQ ID NO: 596179 - DNA, 75 bp, Homo sapiens
atcccggctcccagcccactgagtggcttcagcctcgctgatatctcttccaaatgcatgatgaaggagttctcg

SEQ ID NO: 596180 - DNA, 100 bp, Homo sapiens
gctgttgtcaggtcttcagggtctcgagttttcggctttgtgagaaaccttaccatcaaacacgatggccagcaacgttaccaacaagacagatcctcgc

SEQ ID NO: 596181 - DNA, 100 bp, Homo sapiens
gcaagacaagctcagaactgagaagctgtcaccacagtctgcgctcctcagaccaccggcaggtgaacagcctgatgcagaccgaggagtgcccacctat

SEQ ID NO: 596182 - DNA, 101 bp, Homo sapiens
gaggctgaggcgggcggatcacctgaggcaaacatgtcccaggtaaggcaagtgggattgctggctgctggatgtcagccatggaacaaggatgtatgtgc

SEQ ID NO: 596183 - DNA, 95 bp, Homo sapiens
cgcgcccgcccaggggtcgctgtcgcctgctgctggctcctcactgaggatggcattccctgtggatatgctggaaaattgcagccatgaggaat

SEQ ID NO: 596184 - DNA, 87 bp, Homo sapiens
cctgcttggagacggacttgcttccggttttgagagattacctgaagttgcactcaaaagcaagatatactactaactttgaaatgg

SEQ ID NO: 596185 - DNA, 50 bp, Homo sapiens
cagccttcccagtagctgggaccacagaatgctgacaaggtactggagct

SEQ ID NO: 596186 - DNA, 83 bp, Homo sapiens
catgaagccagtcctgacaatgggcagaacgaattcagtgatatcattaagtccagatctgatcaatgtccgagttaccacca

SEQ ID NO: 596187 - DNA, 75 bp, Homo sapiens
caactgcctgctgccctacacagtgctctcagcgcaacagattcttcacgtgaaacaagaaaagccatatggtcg

SEQ ID NO: 596188 - DNA, 98 bp, Homo sapiens
attatcttaaatacttgctttactggaaagacccagaatatgccaagtatctaaaaaacctctgtagaggagcaggatgcaaccgacaggctgtggcc

SEQ ID NO: 596189 - DNA, 97 bp, Homo sapiens
cggcgacgtcgagaacgacgaggacgcgttgctgcggcgtctgcgaggcccgagggcttccgaagatcttctcaaggaacactacgttgacctgaag

SEQ ID NO: 596190 - DNA, 150 bp, Homo sapiens
actgcaaaggcggctcaagcgcccagaaacccctactcatgatccggaccctgagactcccctaaaggccagaaagaagccagctgaagatgagtggggtaaaaccccagacgccatgaaagctgccatggccctggagaaaaagctgaa

SEQ ID NO: 596191 - DNA, 87 bp, Homo sapiens
ggccctgagtcaaagaagatgcctcgaactaaacaaattcatcccagaaatctaagaggccaggggttatcaccatgcaagctttgt

SEQ ID NO: 596192 - DNA, 50 bp, Homo sapiens
tggctacagagagcgtggaccatgaagaattacatgaacgacagccttcg

SEQ ID NO: 596193 - DNA, 100 bp, Homo sapiens
actgtgggcgtggagccggcagccgacggcaaaggtgtcgtggtggtcattaagcggagatccgactctaaaatagagctcaagcttgagaagagagaac

SEQ ID NO: 596194 - DNA, 95 bp, Homo sapiens
ggcgttcccctgagtgctcggaaaatggccttgtctccggtcgttcccgttcaggagcaggtgctggagaatctggtaaaagcaccattgtgaag

SEQ ID NO: 596195 - DNA, 90 bp, Homo sapiens
cctgtctcccatggtcgtcatgaagaatgtgcttgtcaaacagattgttgtgtccactgtatcctggcttgcttgttctgcgaattcctg

SEQ ID NO: 596196 - DNA, 74 bp, Homo sapiens
cgccagtcttggggacagtgtcagcaaggtgggtgcggctgctatttggacgagagttccccctgcaggacctt

SEQ ID NO: 596197 - DNA, 87 bp, Homo sapiens
actgtatacagaatcttgaatcagaaattgagaagctggctgagtcatcactagagagtgggaagggcagcagcagcagagaatcca

SEQ ID NO: 596198 - DNA, 75 bp, Homo sapiens
cctggctttctgcgccatcctgcaccgccaccggcccgacctcatggcaccgcgtccgtgctgcagcgccggtcc

SEQ ID NO: 596199 - DNA, 109 bp, Homo sapiens
agcagccgatccagcctgcggagcctgtggggcaggcagatcgggagcggtgccgagaaaaatttccttactagatgacatttcatcgcaatgtccgatcgtttggggc

SEQ ID NO: 596200 - DNA, 75 bp, Homo sapiens
acagcgcggcggggagcgacgacatggcggacaccgacctgttcatggaatgtgaggaggaggagttggagccat

SEQ ID NO: 596201 - DNA, 99 bp, Homo sapiens
catggaactcagacatctgcaaatcatgactttgtgtggacagtaatgacctcacgtttccgattgcctgctggcagaacctacaatgtacgagcatca

SEQ ID NO: 596202 - DNA, 80 bp, Homo sapiens
ctatcagactttactagaggcaacaaccagtagtgatcaatgagtactattaatcccgtagatgcaatatatcaacctag

SEQ ID NO: 596203 - DNA, 76 bp, Homo sapiens
tatttacatccatatgtagaagcaggcaatccccaggcaagacctctcagatcttgcagttctacttctaagtatg

SEQ ID NO: 596204 - DNA, 100 bp, Homo sapiens
atcgacagccctgacagcctggaaaatatttacaccagcagctccagttcataccaataaagaagatcctgctacccaaactaatttgggatttatccat

SEQ ID NO: 596205 - DNA, 76 bp, Homo sapiens
ttcggcacaagggcccaactggaattccacttacgggtggtgatgatgtccagcaactctgtgaagcaggagaaga

SEQ ID NO: 596206 - DNA, 83 bp, Homo sapiens
accgcgggcgccaatggggagcagaaggactcggacacagggccaccagatgcctccacccagaaaggtcagatgtgggagag

SEQ ID NO: 596207 - DNA, 90 bp, Homo sapiens
cgcggcgcgggctggcggtggctccacggccttctggcggccgcccctggtttctcctggggggtgatgagcgggagcggctctgggccg

SEQ ID NO: 596208 - DNA, 75 bp, Homo sapiens
cgtttcctatagatgagaaaccatacaagctgtggctgaccggttccctgatgtgttacctgcttctgctactga

SEQ ID NO: 596209 - DNA, 83 bp, Homo sapiens
ctctcgccactccctgcgggcaacgccttggcatcgctcgccctgggcctcaggcccaggcccaaggccaagtgagagagccc

SEQ ID NO: 596210 - DNA, 100 bp, Homo sapiens
tctgcagggcctgggccgccgctgctacctgcagcgccgtgtggcacgacacaaaaatcagggtgaggacgcttgagcggaagttagaagcaaaaatgat

SEQ ID NO: 596211 - DNA, 112 bp, Homo sapiens
tttaccatgacgataagcaaccagcatttagagctgtttatgaagcactgagaaatgagggagtatgattttgaggacgactgtgacagcctgacttgggaggagactgagg

SEQ ID NO: 596212 - DNA, 107 bp, Homo sapiens
ccagaacccggccctcaccgccctcaccacccctatccagacggctgcccttcaagtaccagccctggccaacgtcaacattgggagcctcatctgcaatgtagggg

SEQ ID NO: 596213 - DNA, 101 bp, Homo sapiens
gcactccacagattctgttgcgaaggcagccatctttagttcgtctttcctagagagggcttcactccggacagactgtcttctagctgttgtcatacagt

SEQ ID NO: 596214 - DNA, 96 bp, Homo sapiens
ggggatttctgaacccaaaacatcaaatctgtgtgggaatcgagcatatggaaaatctctggcaaacatgctgaagacatatttggtgagttgttt

SEQ ID NO: 596215 - DNA, 100 bp, Homo sapiens
aaggagttcatcgacctgctactggaccggattcggaagctgaggctgacccgcggctgattgagtccctctcccagatgctgtccatgggcttctctga

SEQ ID NO: 596216 - DNA, 100 bp, Homo sapiens
gtggaaagaagttgcaaaacactgggcttgggaacaatgggccgaggcattgtcatttcttttgcaagggccaggattcctgtgattgctgtagactcgg

SEQ ID NO: 596217 - DNA, 75 bp, Homo sapiens
ccacccctatccagacggctgcccttcaagtaccatgggctcgggatgagtttgaaggcctcttcaagcagccag

SEQ ID NO: 596218 - DNA, 83 bp, Homo sapiens
atccttctcaaccttgtgggatgtgaaaactctgttactgaagctgggatctagcaattgggaggcagcagacttgggtaatg

SEQ ID NO: 596219 - DNA, 75 bp, Homo sapiens
cttaggtctgttagaggaagacgacgagtttgaagagttccctgccgaagatgcaacagcattttgaatttgaat

SEQ ID NO: 596220 - DNA, 119 bp, Homo sapiens
agagcctggagtctgcgaaggccgggacccggttccccggcccacagtgggggtgtgcaaacccgagagaactgggtaccaggatcatctatgaccggaaattcctgatggagtgtcgg

SEQ ID NO: 596221 - DNA, 90 bp, Homo sapiens
tgacaatgacctgcaaccttcctggcaggaggcaagagcaccaggctccatctatgagatctctgggaatgagtgctgcctctccacggg

SEQ ID NO: 596222 - DNA, 101 bp, Homo sapiens
ggagactgggcggccggccgacccttcctgtcgctgacggcgactgcgggaggccaggtatcattgcccagtgcctaagatcttttatgttcagctcactg

SEQ ID NO: 596223 - DNA, 88 bp, Homo sapiens
tcgagagacctgcgtacattcggggtgccagaaggaaagcataggtgaacctatgggtcgtggaacaaaagttatcctacacctgaaa

SEQ ID NO: 596224 - DNA, 100 bp, Homo sapiens
tttacaatttaaagaaccccactttgttcatttttgctgaaaatgatgttgtgattccactcaaggacctttatcttcaagccaggatgaagggagactg

SEQ ID NO: 596225 - DNA, 82 bp, Homo sapiens
gtggctatggtgggcaaactaagccgattttccggaaaaagatgacttgtttaaagttcacaagcttaagccaaatctgaag

SEQ ID NO: 596226 - DNA, 75 bp, Homo sapiens
ggaaagacaagcttcttgcaatgggatcggggaactttggcgaaataaaagaagtccaaggcttgcgagaaggtc

SEQ ID NO: 596227 - DNA, 100 bp, Homo sapiens
cgccatcaccgacctcatcagtgagctgtccctgctggaggagcgcttccggcttggatttacactgggcaacgtggttggaatgtatctggctcagaac

SEQ ID NO: 596228 - DNA, 95 bp, Homo sapiens
gctatctaaagaaggagttgaatgtgaggagccagcaccgctctttgaccttgccatgcttgccttagatagtccagagagtggctggacagagg

SEQ ID NO: 596229 - DNA, 88 bp, Homo sapiens
aagatgtatctactgtatccatgcactcaggacctcagcagccatgtcgaagccccatagtgaagccgggactgccttcattcagacc

SEQ ID NO: 596230 - DNA, 90 bp, Homo sapiens
ggcttgagagctgggttctattttccctcctcaaactgactttgcagccacggagagtgagcatgtttttgaacacattaacaccgaagt

SEQ ID NO: 596231 - DNA, 93 bp, Homo sapiens
gcagatcgggagcgcaaggtcgccctcaaggccatgatcaaaacgtttcggtctaagtaccacccagatgaggtggggaagcgtcggcaggag

SEQ ID NO: 596232 - DNA, 95 bp, Homo sapiens
agtgacatcttctgggatttagtctggagtgagctgttgccgcagaatgggctgctggctcctgccctgcttcctgtgatcgagccggccctgag

SEQ ID NO: 596233 - DNA, 100 bp, Homo sapiens
ctggcgtccgcgcgctgcacaatggcggctctgaagagttggctgtcgcgcagcgtaacttcattcttcaggcccctcgacgtctgtgctctttctgttc

SEQ ID NO: 596234 - DNA, 75 bp, Homo sapiens
tggaagcccgggaccgtttaaaaaactgaaatgggatttgaccgatacaaaatggtggtgcaagtagtgattgga

SEQ ID NO: 596235 - DNA, 75 bp, Homo sapiens
tgtagagacggtggaatgtgaaaaggaagggatttgcagatttacagaatggctgcacattaatggaaagagaag

SEQ ID NO: 596236 - DNA, 74 bp, Homo sapiens
tgggttctggtgccgcgcagctttccccgcccagcgatctgctcacgagctgcccatggttgaaagacaagaca

SEQ ID NO: 596237 - DNA, 100 bp, Homo sapiens
tgtacgggtgcctggcctcgcttctgtcccagtttttgtatgaatatgcaagaaggcatcctgattactctgtcgtgctgctgctgagacttgccaagac

SEQ ID NO: 596238 - DNA, 74 bp, Homo sapiens
aaggggaaggcgcctgaagaggacgaagaatggacgcgatctctctatctggtccagtggcagccggcacatga

SEQ ID NO: 596239 - DNA, 50 bp, Homo sapiens
gtcaatattgcagctactgcttctgagaggaagtccacaaatgaagggga

SEQ ID NO: 596240 - DNA, 100 bp, Homo sapiens
ccaaggaggaagggttgtccggatccatatcatagattttgacgatgaaaacaacattataaataaaaatgtcctcctccatcaagcgggtgaaatctgg

SEQ ID NO: 596241 - DNA, 95 bp, Homo sapiens
ctcaaactcccaggctcaagcaatcctaccatgtcagccttcccagtagctggaactacagatgacacacaataatttttggttgaagaagatag

SEQ ID NO: 596242 - DNA, 100 bp, Homo sapiens
gcctcaaactcccaggctcaagcaatcctaccatgtcagccttcccagtagctggaactacagtacagaacctgctaaggccatcaaacctattgatcgg

SEQ ID NO: 596243 - DNA, 98 bp, Homo sapiens
tggaacctcactgaaaattggtattgttggattgccaaatgttgggtggctttctagaagatgaccatagaggaccttccagattttccattagaagg

SEQ ID NO: 596244 - DNA, 75 bp, Homo sapiens
gtaaatattcaagaagctggtcagttggcagggagagcttatggatggagaccaaacatccagatctggagtgcc

SEQ ID NO: 596245 - DNA, 100 bp, Homo sapiens
attttccttagttgctccaaatactgagttctcaaaagtctatggccctgtgttcactgtgtattttggcctgaagcccattgtggtgttgcatggatat

SEQ ID NO: 596246 - DNA, 100 bp, Homo sapiens
ccgaaacacaagagtaagaccttttaaggacctcaagcaatgatagaaggcccttcattgcactctgtctttccaatgttgcttttatgcttccctggca

SEQ ID NO: 596247 - DNA, 100 bp, Homo sapiens
cgtgtccgagggcaccaaggcggtcaccaagtacaccagctcgaaacacgttggtcgtcattgcctccgagcccactttagccctcagctctgtatcaga

SEQ ID NO: 596248 - DNA, 83 bp, Homo sapiens
gactggctgaggcaggggtctgccagtgagattgagatctaggaccttgttacagaactctgccaaaaaaaaaatgtttacag

SEQ ID NO: 596249 - DNA, 100 bp, Homo sapiens
agagcagcctcgaggtggagaagaaggacaagcttgcggtctgtaaacagatttggctaggattatttgatgatagatcttcagcaattccagacttcag

SEQ ID NO: 596250 - DNA, 99 bp, Homo sapiens
gaaaagatggtcccaaacgttctgtactgtccaagtcagttcctgggtacaaggaccaaactcttacccaggatctactggagcagctgttggagccca

SEQ ID NO: 596251 - DNA, 82 bp, Homo sapiens
tgcgcagacctggtggaggtgttaaatgaaatttttgaaatcatgaatcctgtttatagtcctggatcttctggggttccct

SEQ ID NO: 596252 - DNA, 82 bp, Homo sapiens
gaaaaggcgctccgtcatggggatccagacgggcactgtgacctttgaagatgtggctgtgaacttttcccaggaggagtgg

SEQ ID NO: 596253 - DNA, 75 bp, Homo sapiens
ataaaagagacctctacttagctcagcaattcttaccttattttataggaagacgaaacttgtcggctttcaaga

SEQ ID NO: 596254 - DNA, 75 bp, Homo sapiens
attcgtctttctggagtggaagaccacgtgaaaaactttaggttgaagctgtctccaagcccttcttcccgtgtg

SEQ ID NO: 596255 - DNA, 99 bp, Homo sapiens
aaaacttgtagaaggttgtgaaaaaactactaggatcacgcggcatgtattgaggttgggataattcttcactattccacccttgccacagtactatgg

SEQ ID NO: 596256 - DNA, 73 bp, Homo sapiens
ggaacccgtggtcctccgcttcatgtcatttatagcaaatacactgacctggttccaaaggaggttatgaatg

SEQ ID NO: 596257 - DNA, 100 bp, Homo sapiens
agcagcatccgcctgggaaccgggagccggagatccaggaaacgctccagtccgagcactttcagctctgcaaggacatccaggcagaaattgatgccca

SEQ ID NO: 596258 - DNA, 100 bp, Homo sapiens
tgcacttgccattctggagaacgccaacgtgctggcccgttatgccagtatctgccagcagattctcgcctctattgagctgctggcccgctcattgcca

SEQ ID NO: 596259 - DNA, 100 bp, Homo sapiens
gaggaggacaacagctacaaccggggggaactctaatgatccaggacaaagaagttaccctggagtatgtatcaagcctggatttttggtactgcaaacg

SEQ ID NO: 596260 - DNA, 75 bp, Homo sapiens
aagtttaaggcagcgctttggagggggccaggttttgggatttgagattgacgcggtgaactctgtccagttttc

SEQ ID NO: 596261 - DNA, 83 bp, Homo sapiens
tgtaaagcaatatttcgagcagtttggcaaggtggtataagttgaaatccaaaccaggaaagaaggacaaggagcgaggagaa

SEQ ID NO: 596262 - DNA, 101 bp, Homo sapiens
taggggctgtcactggagtcccctctttgctgaggagagtgtgatcacaagagagatggtggagatgctcttttctgatgattctgacctgcagttagcaa

SEQ ID NO: 596263 - DNA, 92 bp, Homo sapiens
cgaggaggcagccaagctcgtagcctgccactccgtgccggagctggagtttgttcagatcatcatcatcgtggtggtgatgatggtgatgg

SEQ ID NO: 596264 - DNA, 100 bp, Homo sapiens
ggtggccccgacatgattccttacttctccgccaacgcggtcatctcgcagaacgccatcaaccagctgaaatctactttcttcaatgtgttaaccaata

SEQ ID NO: 596265 - DNA, 98 bp, Homo sapiens
tgcgcctcttctactgcactgtcctggtctgctccaaagagatctcagcgctcaccgacttctctggtttggaattcacccagttgcaggccgaatgc

SEQ ID NO: 596266 - DNA, 97 bp, Homo sapiens
tcttcccttagaagaactgctgaaccgactctgagaaatttgaaggaagaggcccagcagaagggactcgctgagccaccccccgccccactccatg

SEQ ID NO: 596267 - DNA, 101 bp, Homo sapiens
cgttggtgctgtttgcggatgctgatgcagagttgtggaaagtaaaaatgtagccctaccaaaaggaactattgtactggcttctccaggctggacaacgc

SEQ ID NO: 596268 - DNA, 95 bp, Homo sapiens
ctgcgattgaggaagagcgagccagcgcccggagcaagcggagctcccccaagagccggaaagcaacatggccaacgccctggccagcgccactt

SEQ ID NO: 596269 - DNA, 100 bp, Homo sapiens
gatcatcacccggcaaattgcctcggacaaggatgcgagggaacgtggctctcaaagttcagactcttctagtagctgcaacagcattattgagaaaagc

SEQ ID NO: 596270 - DNA, 114 bp, Homo sapiens
tcatttccttaggtacaggtccccagcttactccagggatgatgtcagaaaatgagctctagccggcccggtccttggactgaaagaatgcaccaggggctcggcagtgtggtg

SEQ ID NO: 596271 - DNA, 100 bp, Homo sapiens
ctctcctgggatcggcccaaggccagttctccgcaggtgtcatggagaaactccagctgggcccagagattctgcagcgggaaaatccaaggcttattta

SEQ ID NO: 596272 - DNA, 74 bp, Homo sapiens
tccggtacaatagaattaaagcgcttccttctgggattggagctcaccaacaacactaagcagttgagatttga

SEQ ID NO: 596273 - DNA, 74 bp, Homo sapiens
atgaagaggccattaaaaatggggcaacagttataactcgaaacgaactcatgctggaagaaactagaaacacc

SEQ ID NO: 596274 - DNA, 75 bp, Homo sapiens
cgagcagatcgacaagtccgggagctgggcggccatttaccagtggatccaaacttctacagcaaaaacttactt

SEQ ID NO: 596275 - DNA, 85 bp, Homo sapiens
tatttcagatccagatcagtaggattgaaacatccaatgtcatctgggtggcttttgatgaattaccacattatgctttgttaaa

SEQ ID NO: 596276 - DNA, 75 bp, Homo sapiens
tccaggcttgcaagcgattaccagcatttaaatcaaacggtattgagatggattgggttatgaaacataatggtc

SEQ ID NO: 596277 - DNA, 100 bp, Homo sapiens
accctcgcattgaccttcctcttccaagctagagaggtcagaggaggtactccttccaggatgaggaggacatgttcatggtggtggacctgctcctggg

SEQ ID NO: 596278 - DNA, 100 bp, Homo sapiens
ctctcctctggggactgcagagaagcaggacctcgggccatgggtgctgactgggttacttttttaaacactaggaatggtaatttctactcttctggac

SEQ ID NO: 596279 - DNA, 100 bp, Homo sapiens
gtgggagacgggtgaggtacaggctcagtctgcggccaagactccgtcctgcaaggcaagataacccctgtgacagaaggctactgttgctgtaacaaag

SEQ ID NO: 596280 - DNA, 87 bp, Homo sapiens
gacggagtatctggaaagctcgggacaggatgggcaccatgccggtggaaaggatgcgcatgcgcccgtggctggaggagcagataa

SEQ ID NO: 596281 - DNA, 100 bp, Homo sapiens
cgcttctacccccgggctgaccgggtcatgagcgtctgtctgcgggtagagctctatggctgcctctggaggggctgctacctgcccagcaaccctgagg

SEQ ID NO: 596282 - DNA, 98 bp, Homo sapiens
tcgtctagcatttccaggcattatggaaatggaatctagttcatcagactactataataaagacaatgaagaggaaagtttgcttgcaaatgttgctt

SEQ ID NO: 596283 - DNA, 98 bp, Homo sapiens
aaaagcagagcgactcggttaagggaaagcgccgagatgacgggctttctgctgccgcccgcaagcagagaatgtggccccgtcccagagcaccaccc

SEQ ID NO: 596284 - DNA, 100 bp, Homo sapiens
ctgccgttctgtacttgcttttcatgattggagaacttgtagagaatagtgacagtggtacaggaaagaaagaaaaagaaaagaaaaacagaaagggcaa

SEQ ID NO: 596285 - DNA, 98 bp, Homo sapiens
cagaaggatgggaggaaggtcctcctacagatccaagttgatgaagtcagaaggctggtatattttgaaggcaccaaagactcccctttagagcatca

SEQ ID NO: 596286 - DNA, 115 bp, Homo sapiens
cggggcttgccctggtcttgctcggccgatgaagtgcagaggtttttttctggcaactcatgcagcaattccagaaccccgacttcccacccgaagtagaggaacaggatgccag

SEQ ID NO: 596287 - DNA, 74 bp, Homo sapiens
cttcagttagtaacccaggcagatgtggaaacagagatgcaacaggcctgaagctgcccagcaggcattccaag

SEQ ID NO: 596288 - DNA, 50 bp, Homo sapiens
ctcctgagtagttgggactacagccatcaaacacagaccacctgttggga

SEQ ID NO: 596289 - DNA, 100 bp, Homo sapiens
agcttgcttggcgtttgacttagatggacaggctcatcagattcaagagatgtttccccaggttccataccatctggtactgcaggacctccagctgaca

SEQ ID NO: 596290 - DNA, 83 bp, Homo sapiens
accggagtttgacgaagaggtggtttttgagggtatttgaagtataccatacaactgttttgaaaatccagcgtggacaatgg

SEQ ID NO: 596291 - DNA, 85 bp, Homo sapiens
tggattcagataattttattggactgtttgtctttgttctctgcctcttgtattctagaacacagttctctggctttttggaaaa

SEQ ID NO: 596292 - DNA, 100 bp, Homo sapiens
ccgcttcttgaatttctctctgtaaaggagcaaagaacagtctgaacttgatcaagatttggatgatgttgaagaagtagaagaagaggaaactggtgaa

SEQ ID NO: 596293 - DNA, 58 bp, Homo sapiens
ttggcccgatcaagcctgacttctagccaagatggacttcagcagaaatctttatgat

SEQ ID NO: 596294 - DNA, 87 bp, Homo sapiens
taaaagaaaagcagtctgtggaaagaaagtcacaccgacaaatctgaagcgggtttgccaggggagtgtacccgtctccccagcctg

SEQ ID NO: 596295 - DNA, 98 bp, Homo sapiens
tccaccgtttcctccaggacagcacctagtcgtggccggaggagtctcagagctgtcagaaagggtgccattattatccatgaagtttatgaagaagg

SEQ ID NO: 596296 - DNA, 148 bp, Homo sapiens
tccacggtcagcgccaacaccaccaacatggacgaggtgccgcggccacaagccttgagtggcagcagtgttgtctggggaaccccaacattccaaaacctcggcgaatcttgcgctcggcctggggcagcaacccttacttccgcgg

SEQ ID NO: 596297 - DNA, 100 bp, Homo sapiens
cgacgacgacgaggaagaggaggtttctgagatggagaacttaatgttctggatgatattttaactgaagtaccagaacaagatgatgaactgtataatc

SEQ ID NO: 596298 - DNA, 97 bp, Homo sapiens
tgtcacctccaacaacatccgcgagatcgagtaccttaaggcaggttctatgaaagatcctctgctagatgaccatggtgattttattagaatgtgc

SEQ ID NO: 596299 - DNA, 75 bp, Homo sapiens
tcaaatacttcatatttggcttcaatgtcatattttgggtactccaaagattcaggtttactcacgtcatccagc

SEQ ID NO: 596300 - DNA, 100 bp, Homo sapiens
tctgcaaacaatggacggagattcttcactttacaggacttcctcgttctgcccatcttcctaacaaggctatggctgataacagcagtgatgagtgtga

SEQ ID NO: 596301 - DNA, 100 bp, Homo sapiens
cgggacgccaagcacttcctgccgcgggcggcgcgccgcagctgcccaggccggaccgggccgggcgcccgcaggacgtctgctcactggagatgacacg

SEQ ID NO: 596302 - DNA, 100 bp, Homo sapiens
tgaatgctgctaaaaacaagactggggctgctcccatcattgatgtggtgcgatcgagcatcccgcgggtgttcagcaagtttcctataaaggaagctcg

SEQ ID NO: 596303 - DNA, 50 bp, Homo sapiens
tccgaaggttcaattatgtggtcaaactttcagcttatgtggagaagtcg

SEQ ID NO: 596304 - DNA, 100 bp, Homo sapiens
ctcgacagtacgcctacttctataaagtcatccagtcctctttgatacgcaacctacggctctctgagtccttgaaaaagaaccaactctggaacgggat

SEQ ID NO: 596305 - DNA, 98 bp, Homo sapiens
gctactgtggtgccatcctatactcagagtgctacttacagtaccacagcagttacatattctggcctgatcaaccccgtataaccaaagatgtaatt

SEQ ID NO: 596306 - DNA, 83 bp, Homo sapiens
ttctcccttgatccgggagtctttccactggacctgcctagagctggaacgttacctccagagcgagccctgctatgtttcag

SEQ ID NO: 596307 - DNA, 100 bp, Homo sapiens
gcctgagaaggaaatcagaccagctttggagctcttggaaccaattgaacagaattttgtgcaccgagggcggcctgagcctctggatcttcacttgggc

SEQ ID NO: 596308 - DNA, 75 bp, Homo sapiens
ctgtgggatctgtaatagaaatgcaatggtggcttgctatccgggaaatggaacaggttatgttcgccacgtgga

SEQ ID NO: 596309 - DNA, 74 bp, Homo sapiens
aaagcttgggatataaggactggcaaggtgtcatggagaaactccagctgggcccagagattctgcagcgggaa

SEQ ID NO: 596310 - DNA, 100 bp, Homo sapiens
aacgcccctccagccttcgagtcgttcttgctcttcgagggcgagaaggacacggccaacacggtgaaggaaaagttcgggaggaagctttatgaatcct

SEQ ID NO: 596311 - DNA, 82 bp, Homo sapiens
gaaaaagatccaaataaagaaaaacaagcatttgtcaaaacagttaaagggttagtcagcaacataaaatcaacctaatgac

SEQ ID NO: 596312 - DNA, 87 bp, Homo sapiens
cagaagctggtcctctggcttctgtccctgctcagtcggccaagaagccctgcccagaaaagcacttggttctgcttcgagatggaa

SEQ ID NO: 596313 - DNA, 75 bp, Homo sapiens
tgaggggatgcagttatgggctctgtcgccgtggatcagcttatgagacagacattctcaccatttggacaaatt

SEQ ID NO: 596314 - DNA, 90 bp, Homo sapiens
ccagcctcatcttgcatctcttgcaaatgttccggaagctacacaactcctacacagacgtgatgtgcaaccccttctacaacccggggg

SEQ ID NO: 596315 - DNA, 98 bp, Homo sapiens
gggttcgccgagccgcaggagagacacgctgggccgaccccagagcggcgctggacagttacagatgtagagctaaaacgactgaaggatgctttcaa

SEQ ID NO: 596316 - DNA, 82 bp, Homo sapiens
gctgcttagacgctggatttttttcgggtagtggaaaaccagcagcagcagcagccacgacgaggcccccgtcctgaacgac

SEQ ID NO: 596317 - DNA, 51 bp, Homo sapiens
gcctaccaggaggccaggggtgtcgccatgagctctgagctcttcaccctg

SEQ ID NO: 596318 - DNA, 82 bp, Homo sapiens
ctgctgcggcgcggggaccgctgtgctctcgaagctggcagggcggagatgctggaccacgccgtcctgcttcaggtgatca

SEQ ID NO: 596319 - DNA, 100 bp, Homo sapiens
gtggcgcctaaagtctgagagagggaagtcgcctctgtgctcgtgagtgcatggggtataagctgagctgactgctgcccactttggaggaggcggtggg

SEQ ID NO: 596320 - DNA, 75 bp, Homo sapiens
gagcggacggggtcgagtcagtgcgttcgcgcgaggttattcagcttctcaaggctggaaaagcgaaggaagttt

SEQ ID NO: 596321 - DNA, 90 bp, Homo sapiens
gaatgccggtcacagcccaggaggagagccttgaacttaggaattcttcgagatcctggatcagaaatcgaagacagacaataccaaata

SEQ ID NO: 596322 - DNA, 82 bp, Homo sapiens
cgctcgctgggagagaggtacctctccttttccctctccctttccctaagagtaatcaagtcagaggattatatgactttta

SEQ ID NO: 596323 - DNA, 83 bp, Homo sapiens
gtggagatcaaccgtgagcagtggatccagactacagtggtagtggaggccgaagcggcgggaacagctacggctcaggcggg

SEQ ID NO: 596324 - DNA, 75 bp, Homo sapiens
agctgccccacggcttcaccaacatggcccatgttacccaggaccagctgcgcttcccgcgcatgctcatgaagc

SEQ ID NO: 596325 - DNA, 78 bp, Homo sapiens
ggaggaagaggagaatgtcagagccaccgaggctgtggttgcactctgccagtcaactttgaccattttcagattctg

SEQ ID NO: 596326 - DNA, 75 bp, Homo sapiens
gctgaggcggaggctgacgaggaggcggatcccccggcgtcagggtgactatgaccagagcaggaccaaagtgct

SEQ ID NO: 596327 - DNA, 50 bp, Homo sapiens
actaaagtgttacatgacagatgtatgagctgaaagtacccatggcagac

SEQ ID NO: 596328 - DNA, 78 bp, Homo sapiens
gtcgttgtcgccggagcctggagccgtgaacccagccgcgccaggagcatcagatccatgctgctgctgactcggagc

SEQ ID NO: 596329 - DNA, 100 bp, Homo sapiens
ctcaagcaatccttctgctttggccttccagagtgctgaaattacagagcacgtgcccccggagctgtgggagcccttctataccgaccagtacgcgcag

SEQ ID NO: 596330 - DNA, 75 bp, Homo sapiens
gtggtggtcggatttcaccacaagaagggctgccagggacatgagagatggctttagaagaaaaagtttctactc

SEQ ID NO: 596331 - DNA, 100 bp, Homo sapiens
ctgtacccggacagcgaccgtcaagaggcgaacctttcctacacacccatacttctctgcccagcttggagcaggacagctatcgctttacaacattttg

SEQ ID NO: 596332 - DNA, 82 bp, Homo sapiens
caaaggagagcacaaccatcgcagttggaagcccatggggcagagtagtgaagccccgtgtcaactcactgaggcccaaggg

SEQ ID NO: 596333 - DNA, 98 bp, Homo sapiens
accaccgacgcaaaggatttaacgctcagttccaagagtccagcctctgatgaagcaggagagaaagaagccaagtctgattaataaccatataccat

SEQ ID NO: 596334 - DNA, 100 bp, Homo sapiens
ttgtcaacattcttgtcacactgaaatttccttctactgatctccaatggattgtattacacagagcatgaatatacttctttaggttacacgcatgggg

SEQ ID NO: 596335 - DNA, 83 bp, Homo sapiens
ctggattgaggatgtgaggaagtatgcgggctccaacattgtgcagctgctgatcggtcctgatccggttccccatgcagagg

SEQ ID NO: 596336 - DNA, 57 bp, Homo sapiens
cgacagcagcagcagcgcatctccttcagtccagggagctcccagggaagtggtcga

SEQ ID NO: 596337 - DNA, 98 bp, Homo sapiens
acaaagacaaaaggagattctgatgaagaagttattcaagatgccttcgtgaccctgctgaatggggagcaggccgaggccgcaatcaatgctttcca

SEQ ID NO: 596338 - DNA, 73 bp, Homo sapiens
ccaatgccatgatgcctggtgccccattacaacccgtgagccatgggaccacaccaccaccaccacaaccaat

SEQ ID NO: 596339 - DNA, 90 bp, Homo sapiens
gcggtgttcccggctccgtggggccgtcttcccggcgagtccgcgacggtcgccgcccacggcgagatctcacattcttgaaggtggcat

SEQ ID NO: 596340 - DNA, 90 bp, Homo sapiens
gggataacattacgtcagcgtgatgctgaggtgactcgactaagagaattaaccagtctccggagtagagatgaagagagaatttctaaa

SEQ ID NO: 596341 - DNA, 100 bp, Homo sapiens
cgggacccggcggggcgcaccacagagaccggcttcaatatcttcacccagcatggtcgaattgacataaaacagttgatagcaaagaagataaagttga

SEQ ID NO: 596342 - DNA, 98 bp, Homo sapiens
aaagtgcaggtttaccaggaacctaacagaggaaggaaaatcacctcggcagtgtttgaaggaaggatactgcaactctttgaagtacgcattttttg

SEQ ID NO: 596343 - DNA, 100 bp, Homo sapiens
ttcaagcgttgggaagtggcaggatcgatatgggagggccgaatcacctgatctaaggaaggatttgatgccctggatccctttattcccatcctggttt

SEQ ID NO: 596344 - DNA, 74 bp, Homo sapiens
tgctcctggctacatagctccagctggtgctcaagaccgaatcggctgggcttttggcctaggattagaaaggc

SEQ ID NO: 596345 - DNA, 99 bp, Homo sapiens
aagcacgctactacctggtgcagggcctgattgaggactgccagctggcgctgcagaccgtctatgaccagtatttcatcaccctgtataacatcgtgt

SEQ ID NO: 596346 - DNA, 90 bp, Homo sapiens
caggccatgagccaggctgtggggctgccgccctggctgcaggacccggagctcatgctgaaacttgtggtggagaatgttgatgtgtta

SEQ ID NO: 596347 - DNA, 100 bp, Homo sapiens
cagcaagctagaagacctgttgcggaaggttcgcgccaaggagaccaggaagcgagcactcagcagtgatcattcaggatatgttcgtccagtaccagtg

SEQ ID NO: 596348 - DNA, 75 bp, Homo sapiens
gtttaccttcaccttcgctaagaacccagggcagaaaggtttaggtactccaaagattcaggtttactcacgtca

SEQ ID NO: 596349 - DNA, 75 bp, Homo sapiens
tgcggcgcggggaccgctgtgctctcggcaagataacccctgtgacagaaggctactgttgctgtaacaaagggc

SEQ ID NO: 596350 - DNA, 51 bp, Homo sapiens
ggccgggcgtcttctgagagtcagggtaacaagatgctcaactatagtgct

SEQ ID NO: 596351 - DNA, 113 bp, Homo sapiens
cgcacccggtcctcagcgactcttctgacctccgcgcgacgtacccgccgccgccgttggctggaggtgacttaagagattaaaattaatttggttgctgttggttctgaaca

SEQ ID NO: 596352 - DNA, 50 bp, Homo sapiens
gcctcccaagtagctggggctacagtgctggggagacaacctacagtctg

SEQ ID NO: 596353 - DNA, 51 bp, Homo sapiens
gcatgtcgtctttatcgctcaggatgatgatgctgaagctatccttgctgc

SEQ ID NO: 596354 - DNA, 74 bp, Homo sapiens
gtactggcatgtgccttatgaccctcgccctggccaacgtcaacattgggagcctcatctgcaatgtaggggcc

SEQ ID NO: 596355 - DNA, 90 bp, Homo sapiens
ccacagccgggagatccgagagctcttcagatccaagagctcctgtctccccaggagccccccaggcctcccgaggcagagaacagcagc

SEQ ID NO: 596356 - DNA, 96 bp, Homo sapiens
aaagcatcccgctggtcatcggacaatttctggaggctgtggatcagaatacagccatcgtgggctctaccacagtggaaagaggcaaaacctgat

SEQ ID NO: 596357 - DNA, 80 bp, Homo sapiens
aaagtgctttacaaacactaatgaattaatcctcacaacaccccagtgagggatattccaatgcctttagttagctcagg

SEQ ID NO: 596358 - DNA, 50 bp, Homo sapiens
gccagggactggggtgagcggcccaggacactttacttcggccgaagact

SEQ ID NO: 596359 - DNA, 100 bp, Homo sapiens
atacaacaaggccattttctcaaacgagagtcagcctttaacgcaatggtcgaattggatggagatgatgtaagagtctcctctagaggaaaatatgctg

SEQ ID NO: 596360 - DNA, 75 bp, Homo sapiens
tcgtgctgctgagctgcccaggcttcacggagcgtactatactggcaattgctggagaagattttgcaattgttg

SEQ ID NO: 596361 - DNA, 100 bp, Homo sapiens
gatatgcctgctaacatggataagcatgccctgaaaaagtatcgtcgagaagcctatcatcgttaccttatcccatatcacacaactggtcctcagccat

SEQ ID NO: 596362 - DNA, 90 bp, Homo sapiens
cctccgcaggcccaaccgccgccagcaccatggccagcaccatttccgaatagcctaacatggcagaccagagacagcgctcactgtcta

SEQ ID NO: 596363 - DNA, 101 bp, Homo sapiens
acgagtcgaggtcctgcaggtggagctccggcagccgccctggaagatgagaatgtgcctactgctcctgatcctccaagtcaacatttacgtgggcatgg

SEQ ID NO: 596364 - DNA, 87 bp, Homo sapiens
agctcaacgactcagctgcctagtgctgacctggaggggaagcggcagatgaaggtcagtaatcggcacctggatttcctgccgccg

SEQ ID NO: 596365 - DNA, 100 bp, Homo sapiens
agggaggccctccgcgttgtctggcggaggaggggagtggcaggtgatcctcacagtgtttggaaacatctgagcctctttggttgctggggaaggccag

SEQ ID NO: 596366 - DNA, 51 bp, Homo sapiens
gcaccgcaccgagggcgagctccagcaatggctgccatccggaagaaactg

SEQ ID NO: 596367 - DNA, 110 bp, Homo sapiens
ttagcggcccggcgttgaattccgggaagtgggagcttcaggctcgctccgtgcggtttccaggaatatggatctactggaacagcccatgctgatagtgaatatgaaag

SEQ ID NO: 596368 - DNA, 100 bp, Homo sapiens
ctctgttcctcctgctcttacttgtcctgctcctgctgctcgaggacgctggagcccagcaagctgaggagtacctgtcatttgcctttgagcattgtca

SEQ ID NO: 596369 - DNA, 75 bp, Homo sapiens
ccatcatcctgctcctgggtgccgtggcatgtcgatttgtccttcactacagcaatctgcacatcgtgctgccac

SEQ ID NO: 596370 - DNA, 83 bp, Homo sapiens
cacaaagtaatcactctcccatctctgcttggtacctttgggaagacatgtaaggaatttgcataagacagttatgcaaaatg

SEQ ID NO: 596371 - DNA, 75 bp, Homo sapiens
ggccgagacttccggatcaagcactatgcaggggacgtcactatcgtgaagagcgcttccgactgacgagcgaga

SEQ ID NO: 596372 - DNA, 75 bp, Homo sapiens
cggcatcaccagtggcttcgtgaagcccaagctgggtatccacaaattacccattatcaaaaacaaatagttcat

SEQ ID NO: 596373 - DNA, 75 bp, Homo sapiens
gagaaggaggaggtgaccacgcgcgaggtggcctgtgagtacggcatggtgcacgtggtctcccaggccgggggc

SEQ ID NO: 596374 - DNA, 90 bp, Homo sapiens
gggccctgcgggctgagctggaggcactgctgagcagcaaggatgacgtcggcaagagcgaggcaagatccaaactgagatggagactgt

SEQ ID NO: 596375 - DNA, 82 bp, Homo sapiens
gggagattgaaaaccgaatcacagataacgaaggaggcccaacttcattcaataaggagcctgacggatttatcccagacgg

SEQ ID NO: 596376 - DNA, 82 bp, Homo sapiens
cacacaccgggagaggtcagaggtacaatgccagggagtactacgaccacctgcccgagctgaagcaggccgtggaccagat

SEQ ID NO: 596377 - DNA, 55 bp, Homo sapiens
atgagagaagccaccactttggcaaatggacggagtctcactctgtcgcccaggc

SEQ ID NO: 596378 - DNA, 100 bp, Homo sapiens
cacaggagggctgtggaaaaacttattgaagagcgtcgccaacaattccttgcagacaaaactgatgatggagaagatgatctgaaaaaaggtacacagt

SEQ ID NO: 596379 - DNA, 100 bp, Homo sapiens
cgaacgagagactacgcgctctggaagacattgaacgggaaatcggcgccatccttcagaatgcagtgaataaccctataccttccaatttgaaatcaga

SEQ ID NO: 596380 - DNA, 82 bp, Homo sapiens
cgcgtggaacggctgcttttggaagaggactactgagcccagccaggctgtatgccattgctgccaaagaaaaagatattca

SEQ ID NO: 596381 - DNA, 90 bp, Homo sapiens
tgcatggaatgccttgaaaagcccatggccccccagaacgacaagaatgagggccatgtttatgagtggactaagtgaaagcaaacaaac

SEQ ID NO: 596382 - DNA, 98 bp, Homo sapiens
ccagctgctgaggaaatgcataaaaatgtggagcaagatgagttgcagcaagtcatacgggagaaatgattctggggaccattctgaccacatgcatt

SEQ ID NO: 596383 - DNA, 100 bp, Homo sapiens
agcggaaggtgatgcccaagatggaccagatgtctttggtggacttgggaaagaggttgctagaagcagcaagaaaaggccaagatgatgaagtgagaac

SEQ ID NO: 596384 - DNA, 100 bp, Homo sapiens
ctgatacagaagagatggatattgaaatggacagtggagatgaagcctaagaatatgatcagtttgtgtttaaggagaaactaacaatgaaaacggcctc

SEQ ID NO: 596385 - DNA, 103 bp, Homo sapiens
aatagtggcaggtgacagtctgcatgtgcagttttcaggccatcgagtcagtggaaaggaaaaagcaagagaaaaagcaagaacaagaggacaacttggccga

SEQ ID NO: 596386 - DNA, 100 bp, Homo sapiens
gtcgggccgctgggcgccgccgcgggcgccgggagcgagctgggagggagccgcgcgcctttgtgcgcgcgccgagaagtcctggagggtatttgggagc

SEQ ID NO: 596387 - DNA, 74 bp, Homo sapiens
ttcatgaagattcaataacagttgcatttgaaaacaagtccggcgccagctgccagtcgaggaaccgaacccag

SEQ ID NO: 596388 - DNA, 51 bp, Homo sapiens
ttacgaaaatttgtgcaacacatcaagaagccaaatctcctcagccacctg

SEQ ID NO: 596389 - DNA, 100 bp, Homo sapiens
tctggctgaaacatattccgtggtgtatctgtacagcagtttcctcatccctgcagctgtgtttgaacaggatgtacagttacccagcacgtgtacctcc

SEQ ID NO: 596390 - DNA, 100 bp, Homo sapiens
cagaatccaaaggcagcgcaaaaaacagccaccgattttgctatgtctctgagctgcgagggtgttttgaatgctgtatcaaatgcctggggggcattcc

SEQ ID NO: 596391 - DNA, 75 bp, Homo sapiens
ttgaatgtttcccgcgagactcttcagcaacataaactgcttaaggtggatgagaatggcaaaattagtcgcctt

SEQ ID NO: 596392 - DNA, 50 bp, Homo sapiens
gcttcaggctcgctccgtgcggctgtggattcaaactctcaaactttgca

SEQ ID NO: 596393 - DNA, 82 bp, Homo sapiens
gccgagggcgagcaggagcgagagtgtgtcgaatccacatgaagaccatgcccgccgccatgttcaggctcctcacgggtca

SEQ ID NO: 596394 - DNA, 88 bp, Homo sapiens
ctgaagtaatatctggactttgaaattatggtgaccctctttcagatgtgggttgttcccctctatttcacagtgaagctgcactggt

SEQ ID NO: 596395 - DNA, 100 bp, Homo sapiens
cttgacagctcttcagaagaaaatacctcctgcctgttctgttcagtcctggtgcagaatcttgtggaagaagaatgaagttgctgattatgaagctaca

SEQ ID NO: 596396 - DNA, 101 bp, Homo sapiens
ctggtttatgatgatgagacttatatgatgcaagatgtggcagaagaacaagaagttgagaccgagaatgtggaaacagtcaacgaaacggaatattccaa

SEQ ID NO: 596397 - DNA, 100 bp, Homo sapiens
aaataccatgctttcaaaatagctcctcaaaaatttcatctgagttcacctatgcatggtcggtgggccgttgctccagggagaactgcaaatatcttca

SEQ ID NO: 596398 - DNA, 100 bp, Homo sapiens
aacaggagctacgaggagttggagctgctgctcttcctccagaacctgcccacagcccactgggatgatgaggacatcagcctgttgctggccgaggcct

SEQ ID NO: 596399 - DNA, 75 bp, Homo sapiens
aggcttttccctctgtctgagaaatcagatctctcaaaggccttggttctgacagaaattggccccaaacgtgac

SEQ ID NO: 596400 - DNA, 74 bp, Homo sapiens
cacacgcataatggatgaaaggaaccgacaggctggaacctatttgcctcagtcctatctgattcatgagcaca

SEQ ID NO: 596401 - DNA, 100 bp, Homo sapiens
ttctcttatcaaggctaccatagctgggggtggaatactgtatgtctgagtatttgagaatgagtggcatctattggggtctgacagtaatggatctcat

SEQ ID NO: 596402 - DNA, 100 bp, Homo sapiens
gcctgggaggccggccggtgccagcacctttcggcttctgagacggcggcagcagcggcattcaggtgtctgacttccagcaactgctggcctgtgccag

SEQ ID NO: 596403 - DNA, 112 bp, Homo sapiens
cggcgaatgcaattaggaactgttctgccggaatttgaaaagtgcctgtaaaatatacccaggaccataaacagatgaaaggtagaccaagtctgattttagatacacctgc

SEQ ID NO: 596404 - DNA, 90 bp, Homo sapiens
caggaattcattatttgtttccacaaacatgtaaggattgaaaggcttgtaatccaaagttactttgtgtccccatgaactcccttgtcc

SEQ ID NO: 596405 - DNA, 50 bp, Homo sapiens
gaaaatcttcgaagacttttcaattgccctcttagactcccccacagctt

SEQ ID NO: 596406 - DNA, 75 bp, Homo sapiens
ccggttccccggcccacagtgggggtgtgcaaacccgagagaactggactactcgagggcagattttgcaggaat

SEQ ID NO: 596407 - DNA, 96 bp, Homo sapiens
aattgggagactgactgcctatgaatttgctaaacttaaaagcaagctggttctctgggatataaataagaaatcctgcaggacggactggactgg

SEQ ID NO: 596408 - DNA, 82 bp, Homo sapiens
gaataaaaacagagtccgatgaaaggaatgggtctgggaccttaacagggagccatgatttctttatgaggcacagtgttgc

SEQ ID NO: 596409 - DNA, 50 bp, Homo sapiens
atcactttagaccctccacctaattgcagtttggaaattttagcattcag

SEQ ID NO: 596410 - DNA, 100 bp, Homo sapiens
gatcagatgagcagattggttagtgaagggatcctggagttcttccaccaccagctgaaggacatcattgagtacgcagagctcaaaacagacgtgttcc

SEQ ID NO: 596411 - DNA, 74 bp, Homo sapiens
aagaacctaatcttgctggtgaagcactggtaccaccagctttgaagatactgctataatttgaaaatttgaaa

SEQ ID NO: 596412 - DNA, 100 bp, Homo sapiens
tgaacggcttacgaaaatttgtgcaacacatcaagagttaaatggaagctgatcggcgttcacatggaatcctcctcacgtagctcagatggatggccac

SEQ ID NO: 596413 - DNA, 50 bp, Homo sapiens
ccctgattgaccggagacgcaccccagcctggcaggagatcgcagatgct

SEQ ID NO: 596414 - DNA, 100 bp, Homo sapiens
ctcagagctcgggggcggcgctcagcagcggctgcttacctgtttcagagacagctttcaccaactccaggttacccaagtcagtatcagctttacgcaa

SEQ ID NO: 596415 - DNA, 100 bp, Homo sapiens
caatgacttccttatgctctctaatacccagttcattgagaatcttttcggagactgggaagcccaactgcgaagaataatgaagctcattgctggaggt

SEQ ID NO: 596416 - DNA, 100 bp, Homo sapiens
cagaagtgttatttcagacatatttgatggaacaatcattagttcagtgcagtgtctgacttgtgacagggccctcgggaccaaggatcacgtcatgact

SEQ ID NO: 596417 - DNA, 76 bp, Homo sapiens
gccagatccgctgatctagtgcttctcgaaaaaaaccttcaggcggcccatggaataatcatgggccagactggga

SEQ ID NO: 596418 - DNA, 75 bp, Homo sapiens
gtccagagaaggtggaggaatcctgatactgagcggtcgctgtcaagatggagtttccaacccagtaaatccaag

SEQ ID NO: 596419 - DNA, 100 bp, Homo sapiens
atcctgcggcagaagccgagttcaacatcctcctggccaccgactcctacaagaacaccttccaccatgaccacctcagcaagttcccacttaaataaag

SEQ ID NO: 596420 - DNA, 100 bp, Homo sapiens
gagctccacattcaggggaaccgcctcaccgttctgcccccagaactaggaaggaaaatcacctcggcagtgtttgaaggaaggatactgcaactctttg

SEQ ID NO: 596421 - DNA, 74 bp, Homo sapiens
gaagaaggaggacctctacctgaagccaatccagagctgggcgcaagcagtttgcccgccatgagtgggcccag

SEQ ID NO: 596422 - DNA, 95 bp, Homo sapiens
tgcgctgctgaggccgggccggccgcccagacgctgcccgcgggcccggccacggcggagccaagagtgcatctccctcgccccctgagagtctc

SEQ ID NO: 596423 - DNA, 80 bp, Homo sapiens
tttatcaacaaaggcaaaggattcggatttattaagcttgtgtggaaacaggaagagaactagaactggaagtaaagcat

SEQ ID NO: 596424 - DNA, 99 bp, Homo sapiens
agggaaagtgccgctttaaggagaactgcaggacggcggacccagccgagaagacgccgctgggggtcccgcgccagtcgggccgtccgggttgctgcg

SEQ ID NO: 596425 - DNA, 100 bp, Homo sapiens
cgccgcgcaggagcctcccggagctggttttttattggcacctcagtctcaacattttcttttcggattcatgaggaaagagaaatcctggggttggacc

SEQ ID NO: 596426 - DNA, 87 bp, Homo sapiens
taaacccatcgacaagaaggcacctgcagctgaaaaagttggatgaagatagtttaaccaaacaaccagaagaagtatttgatgtct

SEQ ID NO: 596427 - DNA, 97 bp, Homo sapiens
gctgcttctgggccctacgcgcggcttgcgctacatcgacgccatcagcaacaagcagggcgagctggagaattacgtgtccgacggctacaagacc

SEQ ID NO: 596428 - DNA, 100 bp, Homo sapiens
aaagggataggagaaggatgtggactgcagtgctgcagtgccaggagtggctgtaaggtgaagaagcatgaaactcagtctctcgccctggatgcatgtt

SEQ ID NO: 596429 - DNA, 100 bp, Homo sapiens
caaccaaagcaagaaagcctcatgttttgggggaaagtttgatatcagcaatgtccagacaaggcagtaacgtgatgagatctattcatggcgtgggaga

SEQ ID NO: 596430 - DNA, 100 bp, Homo sapiens
tcagacgaactacgaacccctggacgggagagtctgccggcggagaatataagggaaagatcgaactggaagaaacaattaaagtatggaagcagcggac

SEQ ID NO: 596431 - DNA, 74 bp, Homo sapiens
cctagaggggattgcagaatctccaacaactttacaggtgaatttgacaggcaagaagatgacattcacttagt

SEQ ID NO: 596432 - DNA, 87 bp, Homo sapiens
attttggatgaatgtgataagatgcttgaacagctcgcttcaaggttactgactttttatgatgtttggtggctatgagactataga

SEQ ID NO: 596433 - DNA, 90 bp, Homo sapiens
gcggcttctggttctcacttgtcgtgttttagagcactttgctgcaagggaccaccacctgcacgaccagaatatgacctggtttgcata

SEQ ID NO: 596434 - DNA, 100 bp, Homo sapiens
caacaagatgttgtcctgtgctggggctgacagcacccagtcagcttgaagagtttcaaatggaccctaccactgagaaatcaagatggcagtctactat

SEQ ID NO: 596435 - DNA, 75 bp, Homo sapiens
gacacttaccacaatgaggtggatgccttcctgctggctgatgttgatgacaacaagaaactaggagaatgggta

SEQ ID NO: 596436 - DNA, 101 bp, Homo sapiens
tcacgagtctcagtccgaccgggctagctttggcgaggggacggagccggatcaggagccgccgccgccatatcagatgctgagggttggaaaagcaaaag

SEQ ID NO: 596437 - DNA, 100 bp, Homo sapiens
tcatcctctgtaacatcttgtcaggctagtctttggatgggaaggtcagttgctgataaagaggccattgcaaatttcacaaatcagaagaacatcagca

SEQ ID NO: 596438 - DNA, 100 bp, Homo sapiens
atctgatcctaattcccttgctgatgatattggtatcaatataagtgatgaggattttcttttgctggagcttttgcactggtttaaggaagaatttttt

SEQ ID NO: 596439 - DNA, 87 bp, Homo sapiens
gtgacctgctggcattgaatgatttatagctaagactccaggacacccctgaagccgagaaatggaccaagaatcgccttcagccct

SEQ ID NO: 596440 - DNA, 100 bp, Homo sapiens
cttgtggcagtgtcctttttcatggttacttgcccccaccaggaaagattcagatgaggcagacttggtgctggcgaaagaggcaaatatgaagtgtcct

SEQ ID NO: 596441 - DNA, 100 bp, Homo sapiens
ctcgcttgcttccctcggccgggccgtcctcggcggcagtgtcaggatcaatgtaaccactgtgcgggaatatctgccagaaggagacttttcaataatg

SEQ ID NO: 596442 - DNA, 75 bp, Homo sapiens
cgtcgtggaagcaggactgcgccgcgtcttcctcaagagccaagagctgggtagagctgcaaggacaccgcctgc

SEQ ID NO: 596443 - DNA, 100 bp, Homo sapiens
gagtgcgcagggcgacggccccacctccggccactgggacggcggcgcggagaaggcaggtcatcaagagagagggcacaggtacagagatgcccatgat

SEQ ID NO: 596444 - DNA, 75 bp, Homo sapiens
aacagaagctttatctgtgatagaattgctgcttaaaaaacttgaaggtctctcaggcagctgcagagcttcaac

SEQ ID NO: 596445 - DNA, 101 bp, Homo sapiens
gaggacttccctttggatgtagcaaggaagaaattgttcagttcttctcagattctgaaaaagagttccacgtcctcccttatcgagtctttgttcccctt

SEQ ID NO: 596446 - DNA, 98 bp, Homo sapiens
agataatgtccttatattatcagtacatggagacatatatgggtcctgctctttttgcatcatcttatcccatgcgtgtgaacagatgcaaggaaatc

SEQ ID NO: 596447 - DNA, 90 bp, Homo sapiens
gctccacagagctgctgcggcagttagcatgctgctgcagattgctgatgattttatcgagagtgtggtgacagcagcctgtcagcttgc

SEQ ID NO: 596448 - DNA, 51 bp, Homo sapiens
ggctgaacatgaatccacagatcagaatgtatgacaacatgtccacaatgg

SEQ ID NO: 596449 - DNA, 100 bp, Homo sapiens
ttgacctatgaaggagctgtcaatctgaattcaataactgatcctgtgttgagagaggagctgaccagtgctttggtgcatctaaaactgcatcttttta

SEQ ID NO: 596450 - DNA, 100 bp, Homo sapiens
atctgaagtacaaaatattttccaggtgtaaggagctcaagtactccaaggacctgccccagatatccatcatattcatcttcgtgaacgaggccctgtc

SEQ ID NO: 596451 - DNA, 97 bp, Homo sapiens
gaaggatccaaaagggcccccactgtgggaggaagatcctggagccaaagatgttgtccaccttgacagtgaaaagattgtgaataagtggaataca

SEQ ID NO: 596452 - DNA, 80 bp, Homo sapiens
cgcgttcccagcccgggtccccgcgttcacagccccagcgcagcggaaggagagttttacatggaagtggcttacagaaa

SEQ ID NO: 596453 - DNA, 83 bp, Homo sapiens
attcagctgaagacagagatgaaacatttgtacaagatggttccatgtgtggtcctgatatgaacccagcttagactagaaag

SEQ ID NO: 596454 - DNA, 75 bp, Homo sapiens
gccctgcaggtactttaggagaaaagccagtcaactcctagtaataacagatgagcggggcaaggaccacctccg

SEQ ID NO: 596455 - DNA, 50 bp, Homo sapiens
gtgcgcgaggtcaaggccagcgagtcattcaggagagcaggaaagaaaag

SEQ ID NO: 596456 - DNA, 100 bp, Homo sapiens
ctagactagcgggggcagcctcagagcggatgctgaagttccgaacagtccatgggggcctgaggctcctgggaatccgccgaacctccaccgcccccgc

SEQ ID NO: 596457 - DNA, 100 bp, Homo sapiens
ctcgacttctagtttttgtcttatttcaggcagctctgtccagtggagtgacccgttgccagagtgcagaggaatatattaaaggaatctgtgaacctga

SEQ ID NO: 596458 - DNA, 75 bp, Homo sapiens
ggagcagattaacacatgggagaaaccaatgctggaccaggcagtgcccacagaaccctgccatcagcatcactg

SEQ ID NO: 596459 - DNA, 78 bp, Homo sapiens
tcaggtgccggacgctggcggatgtgcgagcgaggtcactttagacaactgtgttgaagttggacggattgccaacac

SEQ ID NO: 596460 - DNA, 100 bp, Homo sapiens
aatggctactttcaatacaataccaatgtggtgtataatacagaaggaaaactcgtggcacgttaccataagatgctggcatatatgttctattctgttc

SEQ ID NO: 596461 - DNA, 82 bp, Homo sapiens
cagggcctgcagcgggagctggacggcgagcgcgagcggcgcgagaaagtccaaccgtgactgccagatcgaccagcaccac

SEQ ID NO: 596462 - DNA, 74 bp, Homo sapiens
agaatgaacactgtccttcaaaacgattacggcagtcccagtcctactgcacagacacagagtgtcttcaggaa

SEQ ID NO: 596463 - DNA, 75 bp, Homo sapiens
tgagggatatctttcttcactcctcttcacttcttcaatcttgagccagatgattgtgcatccatttacatcttt

SEQ ID NO: 596464 - DNA, 100 bp, Homo sapiens
ggacactacgtgctgggcgacacgctgggcgtcggcaccttcggcaaagtgaagactgatttagaagaaagttttaatgaacatgaactggagccctcat

SEQ ID NO: 596465 - DNA, 100 bp, Homo sapiens
ccccaaccccaccatcccaccaaagggggctgctgaccgagagagctcactcagccagtgataccaagaagaagcaggggatgaagaagaggagcaacag

SEQ ID NO: 596466 - DNA, 83 bp, Homo sapiens
tccggcccgggactcgggtttgggcgaccaggaggtgccggtggccgcgctcggacccgagatatagatcagctatcaggaag

SEQ ID NO: 596467 - DNA, 74 bp, Homo sapiens
tggctacccctatccaccgcccccacctgggagtgcatccgccccaacccttttccccctcgtctcctgtgaga

SEQ ID NO: 596468 - DNA, 100 bp, Homo sapiens
ttgggaccggttgtaggtggcttgaccgtcactagtagacgtttctgagtgtgtcgcggtcaccatgacttccaccgctgtcagaaggcaatgaccgcta

SEQ ID NO: 596469 - DNA, 90 bp, Homo sapiens
gacatatggaaatgtcagtccaatacagacctcagcttccccattatttcgaggaaggaacttccatgcctatggctgttctaaaattgg

SEQ ID NO: 596470 - DNA, 73 bp, Homo sapiens
ggccgtgaacgaaagcagtgacggaggagcttgtaccaccgatccctccaaaccttccatgttctgtgacact

SEQ ID NO: 596471 - DNA, 83 bp, Homo sapiens
aggcgatccgctggcgctagtctgaccctccgccaggcaaaaggaagatgccgctcctacgaggactgctgtggctccaggtg

SEQ ID NO: 596472 - DNA, 74 bp, Homo sapiens
cgcatttatcagaaagatgccaccttctataacagaacagggtgaggacgcttgagcggaagttagaagcaaaa

SEQ ID NO: 596473 - DNA, 75 bp, Homo sapiens
gcagctgatgcagtccgagagctagatggaaggctaagtcctatcagccatggaaacaccattgctctcttcttc

SEQ ID NO: 596474 - DNA, 100 bp, Homo sapiens
caagaatggaaaaccaatcacctcagaagacatcaagaatcaaagtggaagatgctttctacaaaggtgaactcaggctgaatgaggaaaaattatggaa

SEQ ID NO: 596475 - DNA, 90 bp, Homo sapiens
attctgctgttcagcaggagaaaatttcagagctgcaaaattatcagcacatatgcgtcatcaatgagcacggtaaagaaaaatatcgag

SEQ ID NO: 596476 - DNA, 100 bp, Homo sapiens
gtcaagtacctcatgttcgccttcaacctgctcttctggcacctggccacattcatcatggacaagagcgaagccatcacgtctgtggacgacgccatcc

SEQ ID NO: 596477 - DNA, 75 bp, Homo sapiens
cagccggcagctcccagactggagatgctctggggaaagcacttgcttcggagttgattgaccaccagttgagag

SEQ ID NO: 596478 - DNA, 100 bp, Homo sapiens
caaatctgaggtcttattttgttgagtcgaaagtgaaattttcctttggccaacgtgacagaatttctccaagaagcaacgctatttttccaaacccaga

SEQ ID NO: 596479 - DNA, 51 bp, Homo sapiens
ggacactccaacacatttctttacacaggtgctggagaatctggtaaaagc

SEQ ID NO: 596480 - DNA, 98 bp, Homo sapiens
cacaacatggcctcctccgcctcctcctctcccgcgggcaccgaggactccgctcctgcccagggactttgaacatgtcggggatcgccctcagcaga

SEQ ID NO: 596481 - DNA, 80 bp, Homo sapiens
aatgctggagtcagtggaagacggagctggtcggcccgaagcatttatgacattaacagagaacaggactatgtcaagaa

SEQ ID NO: 596482 - DNA, 100 bp, Homo sapiens
aattgttttggcctaggatcatccagtccacagatttgcatcattctgttggcacagaacttctttccctggtttataaaggcattgcccctggagatga

SEQ ID NO: 596483 - DNA, 82 bp, Homo sapiens
caacatcactttgacagcccaatcacgatgaagaggaggcggggagacctttggtgccctggttgtcagatgttggaaagca

SEQ ID NO: 596484 - DNA, 75 bp, Homo sapiens
ttgaaaaaacaacgtacatggatcctactggtaaaactagggacaagaatccttcaagaaacaggaaaaaactcc

SEQ ID NO: 596485 - DNA, 100 bp, Homo sapiens
taacatttgagaaacacgaagaatggctaaccacctcccctaagacaagtgtgaagcctcagtttaggtcatctggtggttcagaacactcaacagaggg

SEQ ID NO: 596486 - DNA, 75 bp, Homo sapiens
catgagatggtagccaacccctcaggtggcccacaaactctttaacaacttgaaataaatgtgtggacttaattc

SEQ ID NO: 596487 - DNA, 100 bp, Homo sapiens
tgctggcagccctggtcctggcccaggctcctgcagctttagcagatgttctggaaggagacagctcagagccccggagctatgtggagtctgtggcacg

SEQ ID NO: 596488 - DNA, 98 bp, Homo sapiens
ggcggaggcagcggggccgggatggaggacgttaactctaacgtgaacgcggaccaggagttgctctaggtcgtaaccagcctttgaaaaaggagaaa

SEQ ID NO: 596489 - DNA, 75 bp, Homo sapiens
aggaatccgagaagagcagagcggagggagccccagacacgtctctggcatctctatcccctatgaggcaccacg

SEQ ID NO: 596490 - DNA, 90 bp, Homo sapiens
gaagatgcttacaagaaacagttctctcaatacataaagaacagcgtaactccagacatggtcatttttatcacagaatacatgtcatct

SEQ ID NO: 596491 - DNA, 100 bp, Homo sapiens
ctggagcacttccacaagtatatggggattccgcagatccggcagctttccgaaaggcaacttcaaagtgggagttcacattgctgacgtgagttacttt

SEQ ID NO: 596492 - DNA, 75 bp, Homo sapiens
caagaagagggcggagcggagacgggagtattatgaaaagatcgttatgatgtgattgctcaagcccaatctggg

SEQ ID NO: 596493 - DNA, 75 bp, Homo sapiens
ggaagtcagggtactgggccagtcatttagccgggcgaaagtatcatatcaggaaggatttgatgccctggatcc

SEQ ID NO: 596494 - DNA, 82 bp, Homo sapiens
aagttccggcacaccgaggctcggccgccccgccgcgagagctcaggccccggggcctccagcggcaccagcggagaccacg

SEQ ID NO: 596495 - DNA, 122 bp, Homo sapiens
gcttgtccttcttccagtgccgctgggatgactccgtcacctacatcttccaccagcttctgggttgaatcctgttccctgaaaaagacgtattcggatcctaacccccaggacctgtggct

SEQ ID NO: 596496 - DNA, 100 bp, Homo sapiens
ttgatccccggccgcggggccaggaagtcggagtttgagccccggaggcagagcggctgccatggcctccggtgtggctgtctctgatggtgtcatcaag

SEQ ID NO: 596497 - DNA, 83 bp, Homo sapiens
cacagggatgtcttttactatagacatgcaagaaagcacttcagccaagcagaagggagccagctggacgaggtgcgccaggc

SEQ ID NO: 596498 - DNA, 105 bp, Homo sapiens
aaggagaaaattttggtggagaattatccaacaagaaaaagacctgtggctattaagatagacacgaagatcgattgagaagttattagaatgggaaaacaatag

SEQ ID NO: 596499 - DNA, 50 bp, Homo sapiens
aagacactccaagtttggcatgaaagccgattacacctcaacaagaaggc

SEQ ID NO: 596500 - DNA, 103 bp, Homo sapiens
ccccagatcacctcgctcgacgtgttgcagcacatcctcatccgagcctttgatttgagtggtgtctttgctcagttcaaaagccacagaagaagttctggac

SEQ ID NO: 596501 - DNA, 75 bp, Homo sapiens
gtgctggcggcggcgggtcaggagcagccgcagcgacggcggcgacagcagaattcagaaggagctggcggacat

SEQ ID NO: 596502 - DNA, 100 bp, Homo sapiens
ctctgggacacacctccattggatttaaaagacagtcctcgtcagcactgactttcagctatggaatcgctctattaccaggttttaaacttcgccatga

SEQ ID NO: 596503 - DNA, 80 bp, Homo sapiens
ggcaggaccagctgcagctgctgagtctgtgtgaagcagcacaagcggttgacccaggccatccagaaagccagggatca

SEQ ID NO: 596504 - DNA, 88 bp, Homo sapiens
gggcggcttcctggcctgggcgctccggtggcggcggagagcttggggcttccttggtcgcacccaccacctgcctgcccactggtca

SEQ ID NO: 596505 - DNA, 90 bp, Homo sapiens
gccaagacagagactgcggtcttcaaaagtattcaagtcaaacaacgttgaaatggattgggtgttgaagcatactggtccaaatagtcc

SEQ ID NO: 596506 - DNA, 83 bp, Homo sapiens
agcaagatggcggacgagaaggacagggaagacctgcctagagctggaacgttacctccagagcgagccctgctatgtttcag

SEQ ID NO: 596507 - DNA, 98 bp, Homo sapiens
catttcaagctgccaaggtggagagagggattacagaaaggagaacaccttatttcagtgccttcgtgcatcgctgcggtcgcacagctcgcattggc

SEQ ID NO: 596508 - DNA, 74 bp, Homo sapiens
tgacccttctttgtcttcgcacagtttgccagatccggcccggtgcctgggttccaggaggacacgctgcagtt

SEQ ID NO: 596509 - DNA, 100 bp, Homo sapiens
gatttccaggatgtcctgaaggagccctcaattgcattggaaaagctgcgggaactcagctttagtgctgaaacagaaccgcatgagggaaagaggaaag

SEQ ID NO: 596510 - DNA, 99 bp, Homo sapiens
ctgtctctagactttttggacgatgtgcggcggatgaacaagcggcagcttcatcagcaatggaagtggctgatatgtggactctgcagattatataac

SEQ ID NO: 596511 - DNA, 100 bp, Homo sapiens
cctcggtacgccgcgcggcgcggacggcgcttggaatcgaagcctcttaaaatggcagatgacttggacttcgagacaggagatgcaggggcctcagcca

SEQ ID NO: 596512 - DNA, 90 bp, Homo sapiens
tgaagagttgtcccagctcggcccgcgggggagccccgggagccgcacgaaaaagcttgagtctccacccccatctaccaatcccttcct

SEQ ID NO: 596513 - DNA, 90 bp, Homo sapiens
tcatactaaagaacacatctggaaggtcagaatggcggcagtggagcatcgtcattcttcaggattgccctactggccctacctcacagc

SEQ ID NO: 596514 - DNA, 100 bp, Homo sapiens
tcaccaacaagttgtggcagtgggtcaacctttagcagtccagcctcaagggacagtaatgttgcctgctaataaagatgcctttcgaaagacatggaat

SEQ ID NO: 596515 - DNA, 100 bp, Homo sapiens
atcctgctcctgggtgccgtggcatgtcgatttgtccttcactacagatttgctcccattcatgctgaggctccagagttcatggaaatgagtgttgagc

SEQ ID NO: 596516 - DNA, 100 bp, Homo sapiens
ccttgctctccttcctgggtctgtctctgccacctggtctggtggtttgaagtgtcctgtttgcagctttgtatatggcaccaaatgggagttcaatagg

SEQ ID NO: 596517 - DNA, 51 bp, Homo sapiens
gtggattcaacagcttttaggactcagaacattctagtatgccagtagaaa

SEQ ID NO: 596518 - DNA, 90 bp, Homo sapiens
taaaaacatccccgtcatcgagtatgagcagttcatcgcaggtaatgtgaggctacaggagatgatggcaacaatgtgccaggaacgtgg

SEQ ID NO: 596519 - DNA, 80 bp, Homo sapiens
caacactatcagcagtacatgcagcagttgtatcaagtccagcttgcacagcaacaggaaatctggcattttttaaagtt

SEQ ID NO: 596520 - DNA, 100 bp, Homo sapiens
ttcgtggccaccggcctgatggaagacgacggcaagcctcgtgccccgcaggcacccctgcactcggtggtacagggaaattggattccaagatccatca

SEQ ID NO: 596521 - DNA, 50 bp, Homo sapiens
ctcgatccgcctgcctgcgcacctgcgtctgagtgtacggtttgcagata

SEQ ID NO: 596522 - DNA, 101 bp, Homo sapiens
gctgcgggctgagcggcgagtttccgatttaaagctgagctgcgaggaaaatggcggcgggaggctattgagggcacctacattgacaagaaatgcccctt

SEQ ID NO: 596523 - DNA, 98 bp, Homo sapiens
tgctattcttatagaaaatatggatctttacatgttgaatccttgcagcactaaaatttggaagacaattattgaccaacatgagaaagagattcact

SEQ ID NO: 596524 - DNA, 76 bp, Homo sapiens
tgacaacagcctcaagatcatcaggaatccattacattgggcgtatggaagagggcagcattggccgttttatctt

SEQ ID NO: 596525 - DNA, 75 bp, Homo sapiens
gtcgtcttccacttgcacgaaagctttcctaggccaaaaagagctagtatgttcaacacaccaggaatgcagagc

SEQ ID NO: 596526 - DNA, 50 bp, Homo sapiens
cccccaagacacctccgaaggcagcccagcgctcagctcaggagctgcct

SEQ ID NO: 596527 - DNA, 100 bp, Homo sapiens
cggatacaggagggacgtgcaccaggacatagagacactgcatattttaccaaggctttgactggaatggcatgctttcaaatataaacagacggcttta

SEQ ID NO: 596528 - DNA, 100 bp, Homo sapiens
caaaaaagctatcctcgaagatatggtgagacttgggaaggattctggtctgaaaccatttgaacaggtcaaaatgcagatcttcgtgaaaacccttacc

SEQ ID NO: 596529 - DNA, 51 bp, Homo sapiens
cggggctgcggctcttcgggcacagacctctgtgagtgaaagccttcagag

SEQ ID NO: 596530 - DNA, 80 bp, Homo sapiens
atgtcacaagaaattgtatacaggacctggcttagctattcattgcatgcaggtgtgtagaccacactccaaaactgaaa

SEQ ID NO: 596531 - DNA, 50 bp, Homo sapiens
ccgcgagcgactgcggcgccgagccggctgaccccgcactacatctaccc

SEQ ID NO: 596532 - DNA, 99 bp, Homo sapiens
aacgagccggacggcgtcctcagctatcagagctgacctgtcctggacgcagcataactaacgaagctgctgcaggatgagaagatggcagcgcggctg

SEQ ID NO: 596533 - DNA, 50 bp, Homo sapiens
cgtcaatggcttcatcagcactttgggtccacctggaaggccgctgtggt

SEQ ID NO: 596534 - DNA, 99 bp, Homo sapiens
agtatcctaatgaaaatcttcacagtgctgttactaaagcctgcctttccagccgtgctatcaagactaatcaggaccttctcccagaaactccatgga

SEQ ID NO: 596535 - DNA, 90 bp, Homo sapiens
ctcctctctcaagagaagctgcaagagcaacatctttcctcaccccaagaaacgggtatgcaggagattagaagccagtgggcatgagcg

SEQ ID NO: 596536 - DNA, 75 bp, Homo sapiens
ttcgcggtggtcaagcgggccacgcacctcgtcaccaaggccaaggttcctcaacttaaaagggatgaggagacc

SEQ ID NO: 596537 - DNA, 96 bp, Homo sapiens
cagacagatcgccggggaggcagcgcgggatcccagcctcaggcgtgcgcggacggtgtgcggagttctatatacccctggccacactgatgatca

SEQ ID NO: 596538 - DNA, 100 bp, Homo sapiens
gacagacaggatggggaggaggttcttcagtgtatgcctggtgtcaactctgcccgctcagttcctccttcctacccaccaccgcaggacccgttaaacc

SEQ ID NO: 596539 - DNA, 100 bp, Homo sapiens
cttcatgtgttcctgtagctctgatgagtgcaatgacaacatcatcttctcagaaggtgctggagaatctggtaaaagcaccattgtgaagcagatgagg

SEQ ID NO: 596540 - DNA, 100 bp, Homo sapiens
acattggaccctcctcccaactgtaggggatatcattttcaatgcccaatacccagaactgcctcccgattttatctttggagaagatgctgaattcctg

SEQ ID NO: 596541 - DNA, 100 bp, Homo sapiens
ttaaacaattgcctgaaagtgaaagcttcaaactggttctctctttaggagcagatgtcctacctgaatacaaactgcagacaccacgcatcaacaagtt

SEQ ID NO: 596542 - DNA, 73 bp, Homo sapiens
tgaaggtcgaagacatgaacttgtttaccctttctgccttggttggtgatttgaagatattaaagctagaaat

SEQ ID NO: 596543 - DNA, 88 bp, Homo sapiens
tgcgagctgcagctgcgatctctgtggtaggcccaggtggtgtgtgatgagaacggctctaagggttatgcctttgtccacttcgaga

SEQ ID NO: 596544 - DNA, 50 bp, Homo sapiens
ggagactcacttatgtgcacaatggaaaagctgttactagaaccaatgtt

SEQ ID NO: 596545 - DNA, 82 bp, Homo sapiens
cagggattttgaaaatgctgcacatcccttaatagtcatctacatagtctgaccagtgcacaggacttcagggcttcctggt

SEQ ID NO: 596546 - DNA, 96 bp, Homo sapiens
ccaacagacggtgcttcctcatcaaattgtgtgactgatatttcccaccttgtcagaaagaagatactgaagtactctttcccagtgggactaaga

SEQ ID NO: 596547 - DNA, 83 bp, Homo sapiens
cggcaaagttttgcagatcttcaacaagaggacccaggagaaattcgccctcaaagtggaaaggagactatggaaccaggatc

SEQ ID NO: 596548 - DNA, 100 bp, Homo sapiens
ggaagtgaaccaagcattcctcagatcccaagcaggtctgttccagcctctgattgtgtatcggggcaagatttgcacagtacagtgtatgaagttattc

SEQ ID NO: 596549 - DNA, 50 bp, Homo sapiens
ctggcctgttccatcgtggaccagaagtgtgtcccggcatggatatccgg

SEQ ID NO: 596550 - DNA, 99 bp, Homo sapiens
ggcaaacttgtaaaacctggaacagcagcatcattgtcaaaggtgggttggctatgagttccccggctaccgtgggcgccagtacgtgtttgagcgggg

SEQ ID NO: 596551 - DNA, 50 bp, Homo sapiens
aaactgcaataagccgccttccaaggctggagcattggatttgctaaagg

SEQ ID NO: 596552 - DNA, 98 bp, Homo sapiens
gtctcaatgttgccaaaatgtttcctaaagttcgtgaatctcaacttgtacaccaggggttggaaaaaccacactaggcaaagaacttgcgtcaaaat

SEQ ID NO: 596553 - DNA, 100 bp, Homo sapiens
gaccgtcaccaactggttcaagccggagcctcaacagaaagctcctttagttcctcctcctccaccgccaccaccaccaccaccgccacctttgccagac

SEQ ID NO: 596554 - DNA, 98 bp, Homo sapiens
gagggctgagcagtcaactcaaatgcaagtccaagaggaggaggaggcggaggtccaagcggaaagagacacctatggctgccgatgaaggctcagca

SEQ ID NO: 596555 - DNA, 75 bp, Homo sapiens
ctggtcgggggaccacattttatcagagccttagagaggaggtgacccaccttacccgctcacttcggcgtgcgg

SEQ ID NO: 596556 - DNA, 100 bp, Homo sapiens
gagaagctgggattggagattccacccaaacttgctggtcactgggagattataagcgccatggctatggctagtgttaaattgcttgccggtgttttaa

SEQ ID NO: 596557 - DNA, 97 bp, Homo sapiens
tgaagaatgcaaaatggctggcaaagatcccacaatgctggcatcaccatctacatcaggtcagctgtctcagtttggggcaagtttatacgggcaa

SEQ ID NO: 596558 - DNA, 100 bp, Homo sapiens
cgggccctggtggccgacagccatcctgaaagtactctttccattccttaccccagtttttgaagcattaaatgtctctctgtttccaaaagataccata

SEQ ID NO: 596559 - DNA, 100 bp, Homo sapiens
tggagctgaggaaccggaccccggcagctgtggtgatgatgtccagcaactctgtgaagcaggagaagaggagtttttggaaatcatggcactcgtgggc

SEQ ID NO: 596560 - DNA, 85 bp, Homo sapiens
tttctttctcgctgatcgcctaacttctactgacgaagcttggaagttgcagaagctgaagaaatcaggggagaaacccctgctt

SEQ ID NO: 596561 - DNA, 100 bp, Homo sapiens
aagtccttatacttcagttgttcagtcagattggaccctgtaaaagctgtaaaatgataacagagtggatgaggatcgcagtacggaacctgaccgattg

SEQ ID NO: 596562 - DNA, 101 bp, Homo sapiens
catcgatctcctgggaggtcgcaacattccaatcacaggccctctccggaccagactggagacttttttggtgagatcgagggagctgtgatgaacaaatt

SEQ ID NO: 596563 - DNA, 75 bp, Homo sapiens
tttgctgagaaatcactgatgggaagtgagacttgttaaacttgaaaggtcttcccagagtttgctgctgcccat

SEQ ID NO: 596564 - DNA, 100 bp, Homo sapiens
aggtcaccacgcaccgactatgtcgcctgccaccgagccgggcccacctccccaccaaggaaggtgagcgagtgctgtgctttcatgggcctcttcttta

SEQ ID NO: 596565 - DNA, 100 bp, Homo sapiens
aggcaaaactcacacttactatcaggtgctgattgatgctcgtgactgcccacatatagatggtgtcaccctcccggcatctgtcaccagtgatccgtag

SEQ ID NO: 596566 - DNA, 100 bp, Homo sapiens
agattataagaagcttgggttcattgttgaaggtttagaacagatgtggaaaaatgtttacttcagagaaaggggttgtggaggaatggttgtcagagtt

SEQ ID NO: 596567 - DNA, 75 bp, Homo sapiens
tctgcaagaccgcgaggcgagacctcttgtatggacctgtctgccaatcaggacgaggagaccgaccaggagacc

SEQ ID NO: 596568 - DNA, 80 bp, Homo sapiens
gaacttcatcatcatctacttcacaggaattgccatttgcagtcatggatcaggtaatgcagtttgttgagccaagtcgg

SEQ ID NO: 596569 - DNA, 78 bp, Homo sapiens
tgaggacaatggacctgcctgggcatagacttccttaaggcaaggtcagcctgtatatcccatcacgggtggattcag

SEQ ID NO: 596570 - DNA, 75 bp, Homo sapiens
gccaaaggcaggacgctgatcccttgctatgaaggtttccttaatgacaacaaaaaagggagtaatcctacccac

SEQ ID NO: 596571 - DNA, 97 bp, Homo sapiens
ttgaatatcaagaggaggagttgttgctgcaggacaaattcgagcatcttaaaatgattcaacaggaggagataaggaagctcgaggaagagaaaaa

SEQ ID NO: 596572 - DNA, 74 bp, Homo sapiens
tttcctaccatctaaaatacgaaggtttctggctggattatcaacgcctgatgactgtggcagaaggcatcacc

SEQ ID NO: 596573 - DNA, 100 bp, Homo sapiens
tgccgcctcgcctactcactctggagccgtggtggcggtggcggcccgcgatctgagccgtgcgaaggagtttgcacagaaacacgacatccccaaggcc

SEQ ID NO: 596574 - DNA, 100 bp, Homo sapiens
acgctttaaagagagataaagatgccatttatggaatgaagaaggagccccacaggaaggaattctggaagatatgcctgtggatcctgacaatgaggct

SEQ ID NO: 596575 - DNA, 75 bp, Homo sapiens
gctaaggccattggacacagaatccgagtggttctgaagccagacacaagatgaaaaagctaactccaaaacaga

SEQ ID NO: 596576 - DNA, 98 bp, Homo sapiens
tgcatagcgaatttgcccagctgcccgcgctttatgaaatgactgtcaggcatatggctacccattctccccagaaatctcaccagtgtgctcactgt

SEQ ID NO: 596577 - DNA, 75 bp, Homo sapiens
ctggcagaaatcatcgacgattgtgtgcattcctcctcttcctcctcctcttccagcagtgattctgactgaata

SEQ ID NO: 596578 - DNA, 100 bp, Homo sapiens
tcttgtcaggctagtctttggatgggaagaaccatggccaactgtgagcgtaccttcattgcgatcaaaccagatggggtccagcggggtcttgtgggag

SEQ ID NO: 596579 - DNA, 82 bp, Homo sapiens
gagatggaagttgagcaagagcagcggcgcagaaaggtggaggccgggaggacgaaggtacggctcctacctggtctggaaa

SEQ ID NO: 596580 - DNA, 100 bp, Homo sapiens
ggctgatgcagcaggcatcatccgctatgcaattggggtacaaatcaagacctaccagctcctacattccatctttcagtatccaaatccagctgtttcc

SEQ ID NO: 596581 - DNA, 80 bp, Homo sapiens
attcgtctgagcattttaaagtttctcacgtactctttttacattgcaatgagtgatcagcagctggactgtgccttgga

SEQ ID NO: 596582 - DNA, 118 bp, Homo sapiens
tgcgacgctgccccacggccgttttcatggctgcttaaaatggtctatggtctgtctctgtgagaagccctaccactgcaactgggacggctgcggctggaagtttgcgcgctcagac

SEQ ID NO: 596583 - DNA, 75 bp, Homo sapiens
agcgcagaatatcaagtgctgaccaagatcactccatggatgaaatgacagctgtggtgaaaattgaaaaaggag

SEQ ID NO: 596584 - DNA, 100 bp, Homo sapiens
ggcatgttggtgcatttaactacaaaaccagattgctcgctgtaagcagctcatctgtgaccccagctacgtaaaagatcgggtagaaaaagtgggccag

SEQ ID NO: 596585 - DNA, 48 bp, Homo sapiens
ctgtgcgagagcctcctcacttggaaattgaagccaaggaagcttgtg

SEQ ID NO: 596586 - DNA, 76 bp, Homo sapiens
cttattgaatttaatcccagccattttcaaagtgctgtgccacgttgctgctcctgctccatgggaaatggtgaat

SEQ ID NO: 596587 - DNA, 99 bp, Homo sapiens
caatgtagaagaggtgacacttcccaaaacagaggcggccttagcaacatgctgttccagtgctccctacctgacaccacagccacccttggtgatgag

SEQ ID NO: 596588 - DNA, 73 bp, Homo sapiens
cagcaccacagtccttctgcagtccctcgtccagccacccccaggaaaatgtttcaacgtgcgcaagagttgc

SEQ ID NO: 596589 - DNA, 76 bp, Homo sapiens
ttcagatactctgactccacctttacttttacctacgttggcggccccagaaggcttgatagttctgaaatggatc

SEQ ID NO: 596590 - DNA, 101 bp, Homo sapiens
gcgcacgatgattgaccccacttccaaggaagaccccaagttcaaggaactggtcaagtttcattcattggctcccatgtactatcgaggctcagctgcag

SEQ ID NO: 596591 - DNA, 80 bp, Homo sapiens
ggcaatggcacaaagttctctcgatcagggcatacatctttcttcgacaaaggagcagtcattatggcgaaccttggctg

SEQ ID NO: 596592 - DNA, 75 bp, Homo sapiens
agaatccaccgccatccgccaccatggacggcggctccctggaccaggtgctgaaagaggccaagaggattcccg

SEQ ID NO: 596593 - DNA, 74 bp, Homo sapiens
ggagaagatcaagaggtggagctggttgtagattatttatcaggaactgttgccgttattacatcagatgggag

SEQ ID NO: 596594 - DNA, 89 bp, Homo sapiens
aggccgcttggttctgacccagctgagcctcacagcccaaggagcgtcctcggtccgcagtcctcctggtggatgaaaccgctaccacc

SEQ ID NO: 596595 - DNA, 98 bp, Homo sapiens
tgactgctgtagttcagaagaggtttggctttccagagggcagtgtagagactttggcttcatgtttgaaagctcgccgggcggcaatctcggctggg

SEQ ID NO: 596596 - DNA, 75 bp, Homo sapiens
ttgattgcatcagggccattgcgataaacattgacgatcttgaggatgaccctgtggtgaacggggagaggtctg

SEQ ID NO: 596597 - DNA, 100 bp, Homo sapiens
ccagtttatggcttccagtggaggcattttggggcagaatacagagatatggaatcaggagcagctgcattggcatggaagaatcctatttcaagctggt

SEQ ID NO: 596598 - DNA, 83 bp, Homo sapiens
attcgcatgcctggggttacacctaaacaggaggcaggtggaagtcatcataaagtttctgtttcacccgtcgtccatgttcg

SEQ ID NO: 596599 - DNA, 83 bp, Homo sapiens
ttcaagtattggtcttaaaacagtaattggagaacttcctccagcttccagtgattgccatcagtttccaaacttaatggcag

SEQ ID NO: 596600 - DNA, 74 bp, Homo sapiens
tggcggatgcggtcgtgaagatagatacttgccagaactaatacagctgatgaaatacctgaccttttctgctc

SEQ ID NO: 596601 - DNA, 102 bp, Homo sapiens
gaagtttcagttcagtatgaagaaaaatttcagaaccatcacaaactggggcaccaccacgaggcgatttgtgggccataccaaggatgtgctgagtgtggc

SEQ ID NO: 596602 - DNA, 90 bp, Homo sapiens
ggagttacagagggccgagaaggacaggatcaggactttccttatcccagttgattgtgcagaatacactgcctgtcgcttgtcttctat

SEQ ID NO: 596603 - DNA, 75 bp, Homo sapiens
tattgcaccacgcccggggggacgctcttctccaccacaccgggaggggtttgtgaccatgactctggaaagcct

SEQ ID NO: 596604 - DNA, 75 bp, Homo sapiens
atgtcacaaaagcggatgttgaaaaggtgcagcggaactgctgcctgacgctctgcaacttcagcatccccgagg

SEQ ID NO: 596605 - DNA, 83 bp, Homo sapiens
cacttgcttgggatcctttatcctggtcatcttctatttccaaagtcttgccccagaagctgcgggcacatccacgcctgaaa

SEQ ID NO: 596606 - DNA, 97 bp, Homo sapiens
ctggtgttcgcccacgaccatggtacaaggaaatggtagaactagtgatctcacccagcctcactgtaaacagcgattgtctggataaactgaagtt

SEQ ID NO: 596607 - DNA, 50 bp, Homo sapiens
agaagaactgcctcctcttgctcagtgagaattatgaagatgatgaccta

SEQ ID NO: 596608 - DNA, 100 bp, Homo sapiens
tgatcctgattatattaatcagtatgtcatatggatgtaatctatgccagcaattatgacaatgttagcagaccatgcagctcgtcagctgcttgatttc

SEQ ID NO: 596609 - DNA, 76 bp, Homo sapiens
tggccgcctggacggctcgggcgctggagaggctccaccggttagagagatgaccctccgtgacctcccgagccca

SEQ ID NO: 596610 - DNA, 101 bp, Homo sapiens
gcccggccatcatcacccaggtgaccaaccccaaggaggacgagggccggttgccgggcgcgggcgagaaagtgtcctgtttcccagaggaacagttcatt

SEQ ID NO: 596611 - DNA, 83 bp, Homo sapiens
attaaacacaagaagttctcgaaatgggagtttgaagacctggaatgggggagctgcatcttcctcccgtgaggctggccgag

SEQ ID NO: 596612 - DNA, 90 bp, Homo sapiens
ccgtccttttgtctctgcctttgaggttggcgggaactgaaactgatcaccgcagacctgctgtccaacggcatcgacgtgtacccccag

SEQ ID NO: 596613 - DNA, 51 bp, Homo sapiens
cctggaaggaagaccatttaaggttaatttggagtggcccctggagtcagt

SEQ ID NO: 596614 - DNA, 98 bp, Homo sapiens
tccattccacaatgtcaactgtccccgcggcttcctgtacttcaacagacagctcttcatcacggtcatggacaagctgcgcctggagatccgcgcca

SEQ ID NO: 596615 - DNA, 50 bp, Homo sapiens
cgagaccgcggccgggaccgaggatttatcatagaatccccgactcagac

SEQ ID NO: 596616 - DNA, 82 bp, Homo sapiens
cttcctctggattattgcagcagacacctctaacctccttaatctgtgcgaggattaaatccaccacacagggtgaaatcta

SEQ ID NO: 596617 - DNA, 75 bp, Homo sapiens
tgtcaagttttatcagaataataaagacttcattgattcacttggacttatcaaactggtttcaaagcacagagc

SEQ ID NO: 596618 - DNA, 74 bp, Homo sapiens
ggccccatatcctacctcccaggtggcccacaaactctttaacaacttgaaataaatgtgtggacttaattcac

SEQ ID NO: 596619 - DNA, 96 bp, Homo sapiens
tgggcagtgctggcgctaagaaagagatcagccatgcagaagctggggacagaagtatttgaagaggtctataattacctcaagagagcaaggcat

SEQ ID NO: 596620 - DNA, 50 bp, Homo sapiens
gaagaagactcccccacatctggtataaccccgttttcacacgaatggcc

SEQ ID NO: 596621 - DNA, 75 bp, Homo sapiens
ctcagcttagaaggaagccaagacttaaagtttcctagatcccagctttgaagagtgaatctaccaagaacgttg

SEQ ID NO: 596622 - DNA, 100 bp, Homo sapiens
cttcagtaacacacctggaacaggaacccagcaacaattcttctgccaggccaccccagcagacatgtttgccaaggcctttcgggtcaagtccaacacg

SEQ ID NO: 596623 - DNA, 90 bp, Homo sapiens
attagcttcgcagtctggaaagctttaggagttcacagttggaaattgatgacttgaaaaaaattaccaattcactgactgtgctttgca

SEQ ID NO: 596624 - DNA, 100 bp, Homo sapiens
ttattacagtaaaaacaaaagaaaggcaagagaatacttactagttaaagcttccctctgtgtgttgcagtcctgtggcattatgcatgccccctcccag

SEQ ID NO: 596625 - DNA, 71 bp, Homo sapiens
gtgatcccagctttaaaggagatgcaggagaaaatacggcattgctaggcattgaatgccccagaggagcc

SEQ ID NO: 596626 - DNA, 90 bp, Homo sapiens
ctgagtggtttttcggatcatgtctggtggctccgcggattataacaggtaccaggatcatctatgaccggaaattcctgatggagtgtc

SEQ ID NO: 596627 - DNA, 75 bp, Homo sapiens
gcctgtggactgacttagggaatcccgaacgagagaagatgactgaggaggaggtggagaccgttctggcaggac

SEQ ID NO: 596628 - DNA, 74 bp, Homo sapiens
atgtacattctttgctgtctattcttcgctatggtgccttatgcaatatgctttctgatgcagcacctgggaaa

SEQ ID NO: 596629 - DNA, 74 bp, Homo sapiens
ctcaacggcagaagcttcaccacaaaagcgaaatgggcacaccacaggagacactgcttggctcctctatgaca

SEQ ID NO: 596630 - DNA, 82 bp, Homo sapiens
ctgaaggaaaacctccttatgctgatatacatccaatgagggtcagatgtaccaacagtaccagcaacaggccggctatggt

SEQ ID NO: 596631 - DNA, 100 bp, Homo sapiens
tttctacggaaaagccatcgagctcaacccagccaacgccgtctatttctgcaacaggacagagcgggatgccaccagcttgtccaaagggaagttccag

SEQ ID NO: 596632 - DNA, 100 bp, Homo sapiens
caggcccacatcgacagggacgtcctcattgtcctcggggctttccgaggcgtgtgcaagaaaatcgatcacttccctgaagatgctgactacgaacagg

SEQ ID NO: 596633 - DNA, 75 bp, Homo sapiens
tcagcgaggaagctacacttttcaccaaggaactggtgctgcagcgagagcagatccagtttgctgaccagaagc

SEQ ID NO: 596634 - DNA, 74 bp, Homo sapiens
gcctcacctttattctctcagcacactgcagaatctttagaacacgatgttcttgatgataatacagagcagac

SEQ ID NO: 596635 - DNA, 90 bp, Homo sapiens
atcatgctcttctgtatcacgatgaagaggcaaatcaagacctatgccagatttactggtgctccactgaaggtacacaagatcagcaac

SEQ ID NO: 596636 - DNA, 100 bp, Homo sapiens
caagcagctttttgaattactttgttatgcagaaagtaagcctaaagaaactgttccaactcttgctccaaaaactctttcagtagcagcagcttttaat

SEQ ID NO: 596637 - DNA, 100 bp, Homo sapiens
gtgaggcctacagctctgccggggaggaggaggaggaggaagaggaggagaaggtttgtgagttgcctgctggagcagcctgaagtgttagtcaccggtg

SEQ ID NO: 596638 - DNA, 75 bp, Homo sapiens
gcccgcactcgctgccgccgccactcacgctccactgcaacatcacgggagaatgctggagaaccagactcctgg

SEQ ID NO: 596639 - DNA, 82 bp, Homo sapiens
gaaagtgtagaacgttccttcattctctcagccaggctaaaggttggtcttcaggttgtggcagtcaaggctccagggtttg

SEQ ID NO: 596640 - DNA, 80 bp, Homo sapiens
gaagcctgcgtaactttctcccttgatccgggagtctttccactggtattctgaagtctcaggaaactggaccatttaaa

SEQ ID NO: 596641 - DNA, 51 bp, Homo sapiens
cctcccaagtagctggtattacagatgctgggctcttgcactgtttggtgg

SEQ ID NO: 596642 - DNA, 100 bp, Homo sapiens
ctgcgaccccgagggaagatgaacgggacgcggaactggtgtaccctggtggacgtgcacccagaggaccaggcggcgtttatgctaaaggaatttgaag

SEQ ID NO: 596643 - DNA, 75 bp, Homo sapiens
ggagcggccgggagcccgccgcgctggtagcggttcttgattattacagacctctttctgaaaagcccggaattg

SEQ ID NO: 596644 - DNA, 96 bp, Homo sapiens
ctcgactttattattaatacgtctacgagaacgaagaccagctgctctgggaccccagcgtcctccctgagagggaggtggaggagttcctgtaca

SEQ ID NO: 596645 - DNA, 100 bp, Homo sapiens
caggaggagactctccctggaaaacttcccttccctttcgcttggggccctggtccacagtcctgtcaactgtcccctgctgggtttctcagcagtcagc

SEQ ID NO: 596646 - DNA, 75 bp, Homo sapiens
gttaaagagacccgttcagagtcctacagtggcagattgtggagtcctgcatggaagggatctgtaagccagacc

SEQ ID NO: 596647 - DNA, 75 bp, Homo sapiens
gcttcaagcttaggaccacccaccatgcctatccaggtagatatagttgtaggtactccgggaagactagatgac

SEQ ID NO: 596648 - DNA, 75 bp, Homo sapiens
gaaggacgttcaacctccaaagcagcaaccaatgatatatatctgtggagatgatgaacaacatgggtggtgatg

SEQ ID NO: 596649 - DNA, 89 bp, Homo sapiens
ggaacccgcaccaagctctgctccacactgccaaccggccagaggacgagtgtgacaaggtgctcatctactctgtgcaaccgtacacg

SEQ ID NO: 596650 - DNA, 75 bp, Homo sapiens
atcgtctccatcctctacctcaagtatgagccaggtactgggcctaatcgctacgtgcctctttggctatgatgc

SEQ ID NO: 596651 - DNA, 92 bp, Homo sapiens
gccgccggtcctgaccaccgtgaacggacagtcccccccaggaagtttctaaaacatcatttgcgaggaaagaactgtgaactcctgctggt

SEQ ID NO: 596652 - DNA, 98 bp, Homo sapiens
cgctctccagcccgcttgaacgtcattgaagtcaacaagagagacatagtcttcctggtggatggctcatctgcactgggactggccaacttcaatgc

SEQ ID NO: 596653 - DNA, 98 bp, Homo sapiens
gcgcatttcaagaagaacaacctaactccagatatctacctaattgattgatgaacagactagccactttgcattgactggaaacaatggcatttaca

SEQ ID NO: 596654 - DNA, 50 bp, Homo sapiens
aggcacagccgacgccgcgggggccacatctgccagagcctggagtctgc

SEQ ID NO: 596655 - DNA, 50 bp, Homo sapiens
gctgggcaccttcatctggaataaggacttgttctttaagtacacctgga

SEQ ID NO: 596656 - DNA, 51 bp, Homo sapiens
cacaaatgttcttaatggcatctagaatggacaccatgtaaaattgaacct

SEQ ID NO: 596657 - DNA, 50 bp, Homo sapiens
cgggaggccgagggcgcagaagatgacgtccggttgtttgccttcgtgcg

SEQ ID NO: 596658 - DNA, 82 bp, Homo sapiens
cgcggagcagagctgagctgaagcgggacccggagcccgagcagccgccgccatggcaagctgaccggttccctgatgtgtt

SEQ ID NO: 596659 - DNA, 90 bp, Homo sapiens
ggagagcagggaaatggactgctatctccgtcgcctcaaacaggagctggtacgcatagctgctaaattcatcactcatgcacccccagg

SEQ ID NO: 596660 - DNA, 82 bp, Homo sapiens
cgggcgcttagaacagaggcttgcacaggtggagagatgccctgtatccaagcccaatatgggacaccagcaccgagtccgg

SEQ ID NO: 596661 - DNA, 89 bp, Homo sapiens
ctggaagacgtgcggctacaggagcgcacgagcggatcactttgggaagcagtgacatccaacctgtatcaagtcttctaatctgtgaa

SEQ ID NO: 596662 - DNA, 101 bp, Homo sapiens
cccgagtgcggcagtaccgcctccttcccagccgcgcggcttcctccagacctctcggcgcggaattctggggagacattgccaaggaattttactggaag

SEQ ID NO: 596663 - DNA, 82 bp, Homo sapiens
cgctttggagggagaaaggagattgcctcggattccgacagcaggtcaaaatgcagatcttcgtgaaaacccttaccggcaa

SEQ ID NO: 596664 - DNA, 75 bp, Homo sapiens
attacaggccaaattagcaagtttcagatcgggtggagcggcggcttcaggaactggagagagagatgcgcacag

SEQ ID NO: 596665 - DNA, 100 bp, Homo sapiens
gaagggcgagactggagcagagccgctgggcgccggagccgaggcgagcgccgcgcgcaccactgaaaactttagaaactgttcctttggagaggaaaaa

SEQ ID NO: 596666 - DNA, 98 bp, Homo sapiens
aatgtaaatttgcacatccttcgaaaagctgccaagttgaaaatggacgagtaatcgcctgctttgattcattgaaatcactgtgtgcccagtattct

SEQ ID NO: 596667 - DNA, 82 bp, Homo sapiens
ctggagatacgcggtgcagctgccgacaccccagcctgttgctgacactagttggccaacagtgttgcaaacaggaacccga

SEQ ID NO: 596668 - DNA, 100 bp, Homo sapiens
tggattctcactgaagccctgtgccctttcagaaattgttgtaggacagtcccatctggacagcaacattgagaatcaagagattgtcaccaatccgcca

SEQ ID NO: 596669 - DNA, 100 bp, Homo sapiens
tcccccttgttctccagtacaaccttcaaaacaactggaatatttagcaaggattcaaggctttcagcttggtaaaatgcggctgacaattccgtgtcgg

SEQ ID NO: 596670 - DNA, 75 bp, Homo sapiens
gcccaatctcctttctgggcaaacgttccaagagatgtggtactggatcttcctctgggctctcttctcttctct

SEQ ID NO: 596671 - DNA, 100 bp, Homo sapiens
ccacacccacacgtgttcaatacacctcccacctgtcctcaggcatatcaaaggtcatttgattgcccgcctcagaacgatggatctgcatctcttcgac

SEQ ID NO: 596672 - DNA, 98 bp, Homo sapiens
cagggaagtctataagctttgcaacagaattacagagtatgatgtccgtaaaagccctgggctcagccagagcagggcagaggatgacgggatgacca

SEQ ID NO: 596673 - DNA, 76 bp, Homo sapiens
tgccagaagcttatcaaaaatattgaatatcctgtggacttggaaattagtaaagacagagtcttgctctgtcacc

SEQ ID NO: 596674 - DNA, 75 bp, Homo sapiens
aatgcagtgaagcatctcacactacaggatacaatatcacagaagtctgtagatattcatgattctattcaacca

SEQ ID NO: 596675 - DNA, 98 bp, Homo sapiens
gcgtccaaccccgaacggggggagattctgctcacggaactgcaggatgctcgtcagaagttccgctctgttctggttgaagcaacggtgaaactgga

SEQ ID NO: 596676 - DNA, 96 bp, Homo sapiens
gactaagaagaatgagaactataagagcctggtgagacggagctatcggcgccgcggcaagagccagatcggtgttgctggaagtcggtccaggag

SEQ ID NO: 596677 - DNA, 100 bp, Homo sapiens
gagcacatcgagaccgcttaccgcatctggctggagccctgcattcgcggcgtgtgcagaaggtagaagatagcaccatgccgattcgtcgaactgtgaa

SEQ ID NO: 596678 - DNA, 82 bp, Homo sapiens
ctgatcgacaacagtgtaaaagaaatcatttcactgttagtttcaaagatgtggaagatgtgaaatttgtcatcaattatga

SEQ ID NO: 596679 - DNA, 98 bp, Homo sapiens
gctgtatgaataatagataagcgtcttgaataacatctgaatttcctagttaaaagcatattggcagaggaagagccctggcattccagcaggagcta

SEQ ID NO: 596680 - DNA, 100 bp, Homo sapiens
aaggatatcactgtgtgtgaacctccgaaagctcagcacacactcccgcaggatcccgccattgttcaggactggaatgtcacgtggaataccagcaacc

SEQ ID NO: 596681 - DNA, 89 bp, Homo sapiens
atggagtccttaaaaggcacaggagattcagtagatgaacagcacacggaccctgactactcggctgcctatgtcgtcatagaaactga

SEQ ID NO: 596682 - DNA, 99 bp, Homo sapiens
cgcattttggcattgacatttaattttagggtcctttatatagaagggagagtagatgggccagttttactattctgccaaagcttttgatgtccttga

SEQ ID NO: 596683 - DNA, 100 bp, Homo sapiens
gctccggatctcttcgtctttgcagcgtagcccgagtcggtcagcgccggaggaaattatggaagtggaaattacaatgattttggaaattataaccagc

SEQ ID NO: 596684 - DNA, 75 bp, Homo sapiens
accgtctttattctgtgggctctgattctccaatgggaataccaagggggttttggccaaattgggcgagggcac

SEQ ID NO: 596685 - DNA, 50 bp, Homo sapiens
gaaagttttgtgaagggtaaagatggaggactgtcctgattgcctgtaat

SEQ ID NO: 596686 - DNA, 76 bp, Homo sapiens
tctaccagccactgaacctgaccattggggtcacggtgtttgccgtggggaatttctgtgtttgaagaacatacgc

SEQ ID NO: 596687 - DNA, 90 bp, Homo sapiens
cattgagattatacggaaccagaagcagattgccaacattgaccgtattacaaactgccattcgatttcacatggaagatgctaaaggac

SEQ ID NO: 596688 - DNA, 75 bp, Homo sapiens
gcagagggaaagggataggagaaggatgtggactgcagtgctgcagtgccaggttcttcacacacccccattcgg

SEQ ID NO: 596689 - DNA, 100 bp, Homo sapiens
tacccaaagacagagagaccagggaccagttactctccacaagaaaattcacacaaccacagtgctcttcatagttcaaattcacattcttctaatccaa

SEQ ID NO: 596690 - DNA, 74 bp, Homo sapiens
aggggaagaagaaggagatgaggaaaatgatccagactatgacccaaagaaggaacccagccagccggcggaat

SEQ ID NO: 596691 - DNA, 100 bp, Homo sapiens
taggatttggtgcaaaactgcctccagatggaaggatatctcacgaatttgctttgcattactctactgactggcagagacaggagaggtagatgtccac

SEQ ID NO: 596692 - DNA, 89 bp, Homo sapiens
tgcttgccatccaggagctcccagtcccaatgaggaaccagcagtccctgaagaggaaggagaaggaatatgagcatgaaatggagcgg

SEQ ID NO: 596693 - DNA, 100 bp, Homo sapiens
tcatctcgctcggctgcgggaaatcgggctgaagcgactgagtccgcgatggagaaccagcagatagacacccaaatcgtaaagcaagaggacagctacg

SEQ ID NO: 596694 - DNA, 98 bp, Homo sapiens
cttaggaattattggcatcaacttggtggagaatagaaggcaaatgtgtgcaggagaagagaattgggtggacagcaggaccatctacgtgggacaca

SEQ ID NO: 596695 - DNA, 75 bp, Homo sapiens
ggaagccacgtgcagacatctacaaccttcgatctcctgacgattgatttggagcatatgcgaacaataaaacct

SEQ ID NO: 596696 - DNA, 100 bp, Homo sapiens
tcagccgaaattcagatcgatttgtctcaatgaaggttgatttcatcagactaaaaagttacaggtgctgctgcagcacggagctgacccaaacattcgg

SEQ ID NO: 596697 - DNA, 75 bp, Homo sapiens
gtagacgtggggatttcagtaggaaacattatggatctgtggagctggaggagatgttaaagtaacccatcttgc

SEQ ID NO: 596698 - DNA, 74 bp, Homo sapiens
ttccagaaatggctgcaggccaagcgcctcacgccggacctggtgcaggatgctcgacatgcagcagaaggaga

SEQ ID NO: 596699 - DNA, 100 bp, Homo sapiens
gctccatgaaccatttcttctgtatagaaatgcaagctggtgactgacgaagtcttcaacttcctgctggtgtggtattactgcaccctgaccattcggg

SEQ ID NO: 596700 - DNA, 100 bp, Homo sapiens
tgtcatagctgttatacgtcatggggatcgaacaccaaaacaaaaaatgaaaatggaagtgagacatcagaaggagaatgaagttgaagaggtaaaagag

SEQ ID NO: 596701 - DNA, 90 bp, Homo sapiens
gttgcttttaggcttgctggcccgcggggctgtccaggcacgcgaggcccctcaggatgagctttctgatgttagccaaggcggatctaa

SEQ ID NO: 596702 - DNA, 104 bp, Homo sapiens
cgcggcgcgggctggcggtggctccacggaaggaatcgtgtctcctagtgacctggaccttgtcatgtcagaagggttgggcatgcggtatgcattcattggac

SEQ ID NO: 596703 - DNA, 100 bp, Homo sapiens
cagtcctagctaaacttcgccaactccgctgcctttgccgccaccatgcccaaaacggtgtcaactctgcccgctcagttcctccttcctacccaccacc

SEQ ID NO: 596704 - DNA, 98 bp, Homo sapiens
aagagccatggtctttagaagatgaattcctgaaccagaggtacccaggtgaccaagaatatggcccaggtgaccaaagccctggacaaggccctgag

SEQ ID NO: 596705 - DNA, 98 bp, Homo sapiens
acatgctgcccagtggcttccggaagttcctggtccacaacgtcaaggagctggaagtgctgctgatgtgcaacaagaacaagactgccaatggagac

SEQ ID NO: 596706 - DNA, 90 bp, Homo sapiens
ggccgtggaggcagaggtggcatggggtatgttgagtctaaaaaggacagagtcacagtagtcttcagcacagtgtttaaggatgacgac

SEQ ID NO: 596707 - DNA, 74 bp, Homo sapiens
gcttcatcatgcccatcgaggtgcacttcaaaaacaagggacgcatggaatacctcgtgaaatggaagggatgg

SEQ ID NO: 596708 - DNA, 82 bp, Homo sapiens
caccggcaagaccaccttcatcaggtcacgagaagagaatgccttctagatgcaaaatcacctccaaaccagaccacttttc

SEQ ID NO: 596709 - DNA, 98 bp, Homo sapiens
ttgcatcttcctctggctctacagcggagccatgtggctagaaatcctcctcacttcagtgctgggctttgccatctactggttcatctcccgggaca

SEQ ID NO: 596710 - DNA, 50 bp, Homo sapiens
aggagctggcgtctctggagaaaggatttggggtggaaggcaggcatggt

SEQ ID NO: 596711 - DNA, 103 bp, Homo sapiens
ctcaagatctcagagaaggaggaggtgaccacgcgcgagcaggttacgggcaggacttgagtggcttcggacagggcttctcagaccccagccagcagcctcc

SEQ ID NO: 596712 - DNA, 75 bp, Homo sapiens
tgcaggtctctgtcgagcagcggacgccggtctctgttccgcaggatgggagccgatatgtggatttactccctt

SEQ ID NO: 596713 - DNA, 80 bp, Homo sapiens
caaagaagaccacacactgggaaacatcattaaatccctcggccaccttcgaggacttccagatccgcccgcacgccctc

SEQ ID NO: 596714 - DNA, 87 bp, Homo sapiens
taatcacatgaagaatttctctgaatctcctaaatttcgtagtctacactttctgaattttccagactgtgatagatgccaacattt

SEQ ID NO: 596715 - DNA, 100 bp, Homo sapiens
cagcaacagaggcacagcttcaagggggaggagtgtccagcaggttactataacaacagtaccaaggtggctgtgaaaaccctgaagccaggaactatgt

SEQ ID NO: 596716 - DNA, 100 bp, Homo sapiens
gctcaagatggcgtgcttgttggagaccccaatccgcatgagcgtcctttcggactcacaccacccggcaagaactgctcactacggctccctgccccag

SEQ ID NO: 596717 - DNA, 98 bp, Homo sapiens
caacaaatggcacgcatgcgtcctatggacccttctacctggaatactctcttcttgcagaattgaaggaaaatcacctcggcagtgtttgaaggaag

SEQ ID NO: 596718 - DNA, 98 bp, Homo sapiens
gatttccgtgagggtggaagaaaatcataccatatcagatgcctcgcagagcaccaggcccaccgtgaaagcagctgcacggtatgaatgtgctccgg

SEQ ID NO: 596719 - DNA, 51 bp, Homo sapiens
gcaggtggtgcgcgcccgcaagcagtgttctggacttggtgcctctttctg

SEQ ID NO: 596720 - DNA, 100 bp, Homo sapiens
caagaaaagcctctgggagcagaagggaggctccaagacctcatcaacaattaaggcaatggatcacttggagtcctttattgctgaatgtgatcggaga

SEQ ID NO: 596721 - DNA, 100 bp, Homo sapiens
ccggccgccgcgccgcccggcagcctcggcagaaaatatttacaccagcagctccagttcataccaataaagaagatcctgctacccaaactaatttggg

SEQ ID NO: 596722 - DNA, 75 bp, Homo sapiens
cccgccagccagctgctgcaggagttgcatgctaaggatgatcggctgaatgtaacagaggaactaacgtccaac

SEQ ID NO: 596723 - DNA, 90 bp, Homo sapiens
caaaggcgcaagtcgagaggaaactgttgtgcctcttcatattggcgatcctgttgtgagcgtcgctggattttctctgagacaagccca

SEQ ID NO: 596724 - DNA, 74 bp, Homo sapiens
caaattgtctcgaatacttgatgtggcccaggacttgaaggaccctgatgctcccataagacagaaaatgcccc

SEQ ID NO: 596725 - DNA, 75 bp, Homo sapiens
attcactgatttggcaagtcaagaaaagccactgctgtgtcagcgtgttatgatgccgtcccgtaccaacctggc

SEQ ID NO: 596726 - DNA, 75 bp, Homo sapiens
accaagatcgagcccagcgtcaacttcctcaagtcgcccaaagacattcactactttcactgcctaagaatcctg

SEQ ID NO: 596727 - DNA, 131 bp, Homo sapiens
ctagtctcagaactgttccttcagccaaagaaacaagccgtggaataggtgtatcaagtaatggtgcaaagcctgaagagccagatgaccaggatgccccagatgagcatgagccctctccatcagaagat

SEQ ID NO: 596728 - DNA, 79 bp, Homo sapiens
agcattttcggcaaccgctgctggcagttttgccaggtgtttgttaccttgtgggtaattccagaattgattggccata

SEQ ID NO: 596729 - DNA, 100 bp, Homo sapiens
taagtgatgtcctgctagttccagaaaagtgccagtttttccacaaagagcggatggaggtgtggtatgacattcaaagctaccagaagcatcatggtcc

SEQ ID NO: 596730 - DNA, 75 bp, Homo sapiens
cgtccagtggctgaggctggacagagcacagcattactctactgactggcagagacaggagaggtagatgtccac

SEQ ID NO: 596731 - DNA, 99 bp, Homo sapiens
tcatagcagtggctgatgaagggtggcacattttacagaataagtcagatgactttctgttgaagatagtgatccggggagacaggaacacgggcaaga

SEQ ID NO: 596732 - DNA, 75 bp, Homo sapiens
ggcggaggcagaggtggaggcgctttgaaagcctccggcacccacaggccctgaggctccagtgcccacaggcag

SEQ ID NO: 596733 - DNA, 99 bp, Homo sapiens
ccagggccagccgccatgacgaacggtggtccagctgctcacctgtgacctgctactgtcgctacggacagcgctctggcaaaaacaggccagtgccag

SEQ ID NO: 596734 - DNA, 89 bp, Homo sapiens
gcaaatcacacttcagggcagccggaggcgccaggggaggttgacaatggtctccaggatggtctctaccatgctatctggcctactgt

SEQ ID NO: 596735 - DNA, 83 bp, Homo sapiens
gccctcctggttcggcctccccgcgcactagaacggttatcctacgcggagagccaggtaccaatgggtgcgctgcaatccag

SEQ ID NO: 596736 - DNA, 76 bp, Homo sapiens
cgttaacaagccccaaacttgttaaaggaccgcagctgaatgcacagctagaaggttggctttcacaagtacagtc

SEQ ID NO: 596737 - DNA, 50 bp, Homo sapiens
agaagatcaaaacccaccatgccccagtggttggaataaaaacagggttg

SEQ ID NO: 596738 - DNA, 101 bp, Homo sapiens
gttcaagctggtgcctatcctacagaaaaggctattcaagatctctggcagtggaggaagtctctttaagaaaatagtttaaacaatttgttaaaaaattt

SEQ ID NO: 596739 - DNA, 82 bp, Homo sapiens
aagaccttttggatcctgattcagccatccatcgttattagcttggatttacactgggcaacgtggttggaatgtatctggc

SEQ ID NO: 596740 - DNA, 100 bp, Homo sapiens
gatggagcgggcgcactgggaggtggaacgggccgaactgcagaaggccaatgatgaggccaatcagagtgatacaagtgtctccttgtcagaacccaag

SEQ ID NO: 596741 - DNA, 100 bp, Homo sapiens
tcgaagtatctcaaaaagtcgctcccggctcctctgcacccgagcactctccccgcacttccgggctgggctgccgcctgcacagcgcccccaacctgtc

SEQ ID NO: 596742 - DNA, 83 bp, Homo sapiens
gtcatggcggtcgcggggcccgcgcccggagctggcgccaggaagtactagccggacatcatgagtggctgtcgggtattcat

SEQ ID NO: 596743 - DNA, 90 bp, Homo sapiens
gccagctgactgcacttcttttttgagaaaggaaggaatatatcctgactgattggcagagcggcttgggtaaatccaccttaatcaaca

SEQ ID NO: 596744 - DNA, 90 bp, Homo sapiens
ctgactttcagctatggaatcggagacgaaaccagacagagggtcaagtttacagatgaccgtgtctgcaagagtcaccttctggactgc

SEQ ID NO: 596745 - DNA, 75 bp, Homo sapiens
atattgatctgaaaagaggctttggttttgtgaaaaatatggtgttatccctaagaaatgcttccctgaatctta

SEQ ID NO: 596746 - DNA, 100 bp, Homo sapiens
agctgtcctttcaggaaggagccattatttatgtcatcaagaagaatgacgatgctctttccaacaactgatcctgtgggtactttgctccaagttccag

SEQ ID NO: 596747 - DNA, 100 bp, Homo sapiens
cgaatgccagttgagcggggcctcgaggacgcgtcacacacagcgaggatttgaggagggaagcgccttccagcggcagtacatacctgtgaaaatgaag

SEQ ID NO: 596748 - DNA, 116 bp, Homo sapiens
cgtcgcgcccgggaggaaggaacgaggcaaggagctaaagcagcgtgcgttcagccctgggtttggtgccctggttgtcagatgttggaaagcagtaggacggaacatactcttcg

SEQ ID NO: 596749 - DNA, 100 bp, Homo sapiens
gcccagtggtgcttcaactggtatctatgaggccctagagctccgggacaatgataagactcgctatatggggaagggatgaccattctgccccccttgg

SEQ ID NO: 596750 - DNA, 100 bp, Homo sapiens
aagaatttggacttctgggttccacagaatgggctgaggtgctgccatgcttactgagtcccttctctctccttctctatcatcttccatcagtgagtat

SEQ ID NO: 596751 - DNA, 99 bp, Homo sapiens
ttgcacaccatccaggagtcagtttattactggaaagtatctagaagagcagaagacagagaatggaaaagataaggaacagaaacaaacaaataccga

SEQ ID NO: 596752 - DNA, 100 bp, Homo sapiens
agagaggcaccgggatcgtgaccgagaccgtgaccgagagcgtgaccgagagcgcgaatatcgtcatcgttagaagtttttgaagagcctgaagatccca

SEQ ID NO: 596753 - DNA, 100 bp, Homo sapiens
gccggagctgagaccgggcggccacagtccgcagggatgaacctcgagttgctgggttttgtagtgcatccctgagcatgagcacagaatgaagcggcgt

SEQ ID NO: 596754 - DNA, 100 bp, Homo sapiens
tacgggctcccttcgccaaactcttcattttctctactcagcccacctgcacccaggtgaaataaacagctttattgctcacacgaagcctgtttggtgg

SEQ ID NO: 596755 - DNA, 73 bp, Homo sapiens
cagagagagagatgtggatcgagaggatcgcttcagaagacctagggatgaagacatggatggagaatgggag

SEQ ID NO: 596756 - DNA, 100 bp, Homo sapiens
ggccagagttgtgggccgccgtcggcagcaagaacagagagagaggtggacagatctgagagatactgagtttgtcagggagccactggtgatgtggatg

SEQ ID NO: 596757 - DNA, 98 bp, Homo sapiens
tatcacccataatcggaatgtgatcacagagcctatttacccagaagtagtccatatgccctttctaaggcacaaaatgatgtgatggaaatgaagat

SEQ ID NO: 596758 - DNA, 80 bp, Homo sapiens
cgcctgccttctgccgccggccggcgcgtcgtccccacagagtcttttattcaaaacttcagcgttctctatagtccctt

SEQ ID NO: 596759 - DNA, 50 bp, Homo sapiens
gacgagatggtggaggaggcggtggaaggaacgtatcaatgagtgtgatg

SEQ ID NO: 596760 - DNA, 100 bp, Homo sapiens
cgcccgggaggaaggaacgaggcaaggagctaaagcagcgtgcgttcagccctggggacagagcgggatgccaccagcttgtccaaagggaagttccagg

SEQ ID NO: 596761 - DNA, 100 bp, Homo sapiens
gcatttgttcactgtaaacttcataatgggataaacagagacagcagcatgactgagcaattgtatgatggctatgatgaagagtatgactgtcccattt

SEQ ID NO: 596762 - DNA, 75 bp, Homo sapiens
taatctggacctgaactctgaaaaacagagtggaggagcaagtacagcgagcagactcagaattcatgattgaag

SEQ ID NO: 596763 - DNA, 147 bp, Homo sapiens
gaagagggagtcaccactggacctccaaggaagccacgtgcagacatctacaaccttcgatctcctgacgagaaggatctgagtctctccctgcggagacagccctgaagaactcctgtaacgtcaagctggcaatttccaagaagc

SEQ ID NO: 596764 - DNA, 88 bp, Homo sapiens
gacatgagatggtagccaaacccccaggccaggagtggtggctcacacctgtaatcccagctctgggaggccaaggccagtggattgc

SEQ ID NO: 596765 - DNA, 74 bp, Homo sapiens
attttttctcatggatgttcttcttcgagtatttgtagaagggttgctagaacacatcacgtccaagcagaaag

SEQ ID NO: 596766 - DNA, 98 bp, Homo sapiens
tcggggccactgcactgggtgattcacgtgtgcccaggccctgaggtgggccggacctgggagtggcaggatttgaagacaagcttgaaggataaaaa

SEQ ID NO: 596767 - DNA, 100 bp, Homo sapiens
gccgcgtagcttccatccgccagctgccatgagcgagcgcctccgtcccagtttctccacagacactacccaaagcagtccttcactacagtggcagaca

SEQ ID NO: 596768 - DNA, 82 bp, Homo sapiens
gtgccggccgggattcgcggcccggagctcgggaccggtttgtgggggagagaaaccttatttgtctccagacattctagag

SEQ ID NO: 596769 - DNA, 98 bp, Homo sapiens
aggacatcaagcccatgcgggaccagatcatccgcgtgaagcgacctgcaaatccaagagacacatctttggaagataagagagcttcttcaagacca

SEQ ID NO: 596770 - DNA, 100 bp, Homo sapiens
aaaaaagaatcctcatcattaatgcaagtggaaggaaactcttcaccaaagaattgatcacatcatgaaagaccaagccaccctggtagaacaagtaaaa

SEQ ID NO: 596771 - DNA, 100 bp, Homo sapiens
ccaaagcaactctttagtgaccagcacactgctgatgaggaagagatgcttgataatctaccagaggctggtgactccagagtacacaactcaacacaga

SEQ ID NO: 596772 - DNA, 90 bp, Homo sapiens
ccttgtttaatgactttggtgccctcaacatctctcagagacgaaaggtttggcagttctctaccagtggaccaatcttttcatccccgt

SEQ ID NO: 596773 - DNA, 75 bp, Homo sapiens
tgcgtgggggaccggctgttggcggcgtctgcttctgcgctttgcctgggagaggccctggtggcctcgttcctg

SEQ ID NO: 596774 - DNA, 83 bp, Homo sapiens
cagttcgagatcaccttcgagtgcatcgaggacctgtctgaaggttggacgtgataagtatgagcctgcagctgtttcagaac

SEQ ID NO: 596775 - DNA, 71 bp, Homo sapiens
aaaatcggcagctgagacggccttggccgattctgacagagaagatggaaattactgccctcctgtcaagc

SEQ ID NO: 596776 - DNA, 97 bp, Homo sapiens
tgggtttatctcaaggcctgagtagccggtaacaaacgagggttcccgggattggaccgacgcagccatggctggaaccaatggttacatggctcct

SEQ ID NO: 596777 - DNA, 82 bp, Homo sapiens
gaacttcgttgcttgcttgcctgtgcgcgcgtgcgcggacatggcctcaaacgcatcacaggacatggccccctcagccacc

SEQ ID NO: 596778 - DNA, 100 bp, Homo sapiens
gacctccgcatcctggacagcgcgcccaccggcatctccttggaaacaatgccatctttgaatgtgagagataaacctagtttcagcatgtctgcagcag

SEQ ID NO: 596779 - DNA, 100 bp, Homo sapiens
cggtgctcgaatgataactattgatgggaaacagataaaacttcagatatgggatacggttgagcaatgtttaaagcgtttgaaaaacatgaatttggag

SEQ ID NO: 596780 - DNA, 83 bp, Homo sapiens
cccctccggccagggccgggagccgggccggcctagccagcatcacaggacatggccccctcagccacctagctggggcccat

SEQ ID NO: 596781 - DNA, 75 bp, Homo sapiens
agccattaccatcttacttatttaagtgagaaagatcagtctaaagaaaaggagaagaaagtgaaaaaaacaatt

SEQ ID NO: 596782 - DNA, 90 bp, Homo sapiens
cggagacagcttggactaccagatctaatgaggcgtcaagaagaactcagacgcttggaagaactcagaaaccaagagttgcaaaaacgg

SEQ ID NO: 596783 - DNA, 75 bp, Homo sapiens
gatttggcacctatgcgcctgcagaggaggttgtgcccagacatttccttcttccagagggccactgactaccct

SEQ ID NO: 596784 - DNA, 73 bp, Homo sapiens
ggaggtagatcaccctttctgcgggggacgatttcgtcggtggtaggcgctggcgtgctggttaccacagtgg

SEQ ID NO: 596785 - DNA, 75 bp, Homo sapiens
ggaaagaaaaagaatggcgtccgtttcaggtttgtaaccaaattattggaagatctcatattctttgttgctgat

SEQ ID NO: 596786 - DNA, 90 bp, Homo sapiens
cctaaagaacatccacagaatagacctgaagacaaaaatccagaagtacaagcagtctggttgaatttagtattagtgacaaacagaggc

SEQ ID NO: 596787 - DNA, 75 bp, Homo sapiens
tcaggatgttcagctcacagagatcaaaccacttctaaatgataagtcaaataattggagtctggaagatgtgac

SEQ ID NO: 596788 - DNA, 101 bp, Homo sapiens
attttggaagagggagtcaccactggacctccaaggaagccacgtgcagacatctacaaccttcgatctcctgacgaatgcctgaggaagtgcaccatgga

SEQ ID NO: 596789 - DNA, 95 bp, Homo sapiens
tatttcttcattgctgcttcttatgctccatggctgctctttggcgtaaattgcaatcgattagggatcgtttctcagaatcaagttagaagtga

SEQ ID NO: 596790 - DNA, 80 bp, Homo sapiens
ttccttgagaaatatgatgcagctatgtacacgttgcttgagcaactgtaccaagacatttctcttgggaagttgtgcat

SEQ ID NO: 596791 - DNA, 100 bp, Homo sapiens
aaaggccatcaagacagttgtggacctctcaaataacctgaagcccccacaagcaaaaaggaagatacaacatgttacttggccctgaagaaaagtttcc

SEQ ID NO: 596792 - DNA, 50 bp, Homo sapiens
ggggctccggctggtctgtggtgaggtggaaaggagactatggaaccagg

SEQ ID NO: 596793 - DNA, 50 bp, Homo sapiens
ttcttaggacttcagaaaaagcagagacacgctgtgaacaagacaggcct

SEQ ID NO: 596794 - DNA, 100 bp, Homo sapiens
tgaagagttgcaggtcctccgaggagccgggagctgcaaggttaagtgcatggaaagaacctctgatggaaatcaaggagtactgacagcacgatgtgga

SEQ ID NO: 596795 - DNA, 100 bp, Homo sapiens
tcttaattattcagaatgctgcggttttccaagattccagtgtagttagtgacgttgtacttcaagacttactggcatatgtgtcctcaaaacattccta

SEQ ID NO: 596796 - DNA, 75 bp, Homo sapiens
caacaatgagatcgtggacaagatcatgggcaaaggacagatccaggaaccacgtgaatgttgagggggcgacac

SEQ ID NO: 596797 - DNA, 100 bp, Homo sapiens
gccaagagaagaggcggtggaggacacgacgcgcttaaaggcacttgctctgaaatttggggactgagtacaccaaatacgatagatcagtgggatacaa

SEQ ID NO: 596798 - DNA, 75 bp, Homo sapiens
gttgttctactttatgacgacgctttataaagtgatcagcagctggactgtgccttggacctaatgaggcgcctg

SEQ ID NO: 596799 - DNA, 90 bp, Homo sapiens
tgaccgagagcgcgaatatcgtcatcgttagaaggtgacgccgcagccgccgggagccgcgagggacggggcaggatgaaccgggccaag

SEQ ID NO: 596800 - DNA, 99 bp, Homo sapiens
ccggtgtcacgtcctgaacatgagcctcctcctctccttctacctgctggggttgcttgtcagtagcgggcaagggggacagccgcgccgctgctgctt

SEQ ID NO: 596801 - DNA, 100 bp, Homo sapiens
tcccgggaacagcgcttttacgagtccctccctcccgaaatgaaggagttcacccctgaatacaaagaagaatggttgagaccggtgatgagaaaagaga

SEQ ID NO: 596802 - DNA, 75 bp, Homo sapiens
cgagagcgtgccaggcgtgtactgcctatgtgtgctgatgtaatccctgttcattactacttaatacctccacca

SEQ ID NO: 596803 - DNA, 75 bp, Homo sapiens
ccgggctgagcttcctggagaagaggaaggtccggcctctttggcctacccccgttggctccgctgccccaggtc

SEQ ID NO: 596804 - DNA, 83 bp, Homo sapiens
cgggcagcccgggaaatctccaagtcagaaagaccgcaggaactagattttaaatatgtaatgaaagtgtcttccttgaaaaa

SEQ ID NO: 596805 - DNA, 73 bp, Homo sapiens
aggatgacggagctgcagtcggcactgctactgcgaagacagctggcagctctggagaggttttgccttcagc

SEQ ID NO: 596806 - DNA, 98 bp, Homo sapiens
ggctctgcgtacgctggttggcatttgctctgagcatcagtcacggctgggagcccattgagaagtacatcaatgagcagtacgagaagttcctgaag

SEQ ID NO: 596807 - DNA, 83 bp, Homo sapiens
ctgcgggaaatcgggctgaagcgactgagtccgcgatggagatcacacgccgctatgcagagttctcctccgctcttgtcagt

SEQ ID NO: 596808 - DNA, 80 bp, Homo sapiens
cgggaggtgttcgagaacgaccccgagacggctgctctttggcgtaaattgcaatcgattagggatcgtttctcagaatc

SEQ ID NO: 596809 - DNA, 100 bp, Homo sapiens
atgaagccacactgtgccatctgcactctgctcatgccgtaccacaagccaagcaggttgagtatctggtcaatgaaaagcacatctacctgctgccaag

SEQ ID NO: 596810 - DNA, 85 bp, Homo sapiens
tcacttggcctatggaaaacggggatttccaccatctgtcccagcttcagatgatgaatttgagaatcttagaattaaaggccct

SEQ ID NO: 596811 - DNA, 75 bp, Homo sapiens
ctggtgagcttcactgcttcctggtctctgatatcagggattatctcaatgatgaggccttatggaacaagtgcc

SEQ ID NO: 596812 - DNA, 101 bp, Homo sapiens
tgtatttgtggcttaaactcttggcatttggctttgcctttctggacacagaagtatttgtgacagatggtccagtagtctatgcagcatatttaaaaatg

SEQ ID NO: 596813 - DNA, 98 bp, Homo sapiens
tggactcatagtcactgccagaaagagagagtctacaaggagattgaacaggtggttggcccacatcgccctccagcgcttgatgaccgagccaaaat

SEQ ID NO: 596814 - DNA, 100 bp, Homo sapiens
aagaaacacttcctataaatctcgcccaaacaggaaaggggcccgagaacaacctgtacagccagtacgagcagaaggtgcgcccctgcattgacctcat

SEQ ID NO: 596815 - DNA, 98 bp, Homo sapiens
gacattgagctcctccctgtgaactcagcattgctgcagctcgtgggtgctcaggctcagcagggagctgctggatgagaaagggcctgaagtcttgc

SEQ ID NO: 596816 - DNA, 75 bp, Homo sapiens
gcatcgttaaagtctctcttcaccctgccgtcatgtctaagtcagagaactccatccggcacaacctgtcactgc

SEQ ID NO: 596817 - DNA, 88 bp, Homo sapiens
tgatcccactttcaaaggacccatttacaataggtatgagtcgtcatccgaggactccagcacagcagagaacatctcagacaacgac

SEQ ID NO: 596818 - DNA, 75 bp, Homo sapiens
cgcaccacagagaccggcttcaatatcttcacccagcatggtggagtgtgttactcttggggctggaatgagcat

SEQ ID NO: 596819 - DNA, 100 bp, Homo sapiens
aaaagaacacctgtgaaagaccgattttctgcagaagatgaagctttgagtaacattgccagagagacaagttggatggcttgaggactggtactaaaag

SEQ ID NO: 596820 - DNA, 90 bp, Homo sapiens
cagaaacaaaatgtcaacaaattgatggagcaggctactacagtggaactgtttctgtttcatctgacatccggatagatgccagccacc

SEQ ID NO: 596821 - DNA, 117 bp, Homo sapiens
ccaacagggcctggtccgtgtccggtcccccaaatctgtcgtccctgcccccaggtctgaagatgatgagaaactgaaaaagaggaaggagcgatttgggattgtcacaagttcagc

SEQ ID NO: 596822 - DNA, 102 bp, Homo sapiens
gccatgttgcaagttcttctacagccccagttatgtggacgagctgttaaaccaggtggaggcaatgcccagagctgtggcagccaccttgcagccgtgaag

SEQ ID NO: 596823 - DNA, 50 bp, Homo sapiens
agaaatatccggacagggtccccggtatcagcatggaagccatgagtgag

SEQ ID NO: 596824 - DNA, 74 bp, Homo sapiens
gccgagctggatgactcggacggaagatccacgtttgaaatttccagtacatatgcggtcaaagacatctttaa

SEQ ID NO: 596825 - DNA, 82 bp, Homo sapiens
gtggatgccaaccagaaaagtgtgctggggcggaatttcaagatggatcgggtgtgagttcttgatacgaatgaaaggccaa

SEQ ID NO: 596826 - DNA, 100 bp, Homo sapiens
ccattgcccttctggaaggaggcaacaccaccatccaggttgaaatcacaaagattagacacctttttagataggtgttcttcagcaccactgacaacac

SEQ ID NO: 596827 - DNA, 83 bp, Homo sapiens
cggatgctgaagcaaaattcagagagattgcagaagcaattgtgggcacacttgaagctgaaaaagaaagaagaaaatctggg

SEQ ID NO: 596828 - DNA, 101 bp, Homo sapiens
tgcggatcggagccagccggttgttgccatggcattcgccagctggtggtacaagacgtttatctggaagaatgtgaactggctaaacagctttatccaaa

SEQ ID NO: 596829 - DNA, 85 bp, Homo sapiens
tgggactggaaatcaaatgttacagctagtatgttcaacacaccaggaatgcagagcttgttgcaacaaataactgaaaacccac

SEQ ID NO: 596830 - DNA, 100 bp, Homo sapiens
ctttgctgaattggagagctggtttatcaccagatcttcaatctatggagcagattcggcgaattatgcgaccaactgatgtaccagatcaaggtcttct

SEQ ID NO: 596831 - DNA, 97 bp, Homo sapiens
agagccccaggtccgaaggtgcaacttgcacccctgccagtcacggtgcactacatcctccaggaggtggtgatgggtgggatggtgttggaaacaa

SEQ ID NO: 596832 - DNA, 101 bp, Homo sapiens
agccgacagactgaaggacagcggcaccgccagacggccagaaagttccgccatgagctggggcacggagctgtgggctccctggcattgggcagtgttac

SEQ ID NO: 596833 - DNA, 83 bp, Homo sapiens
ccccggttgccgctttctcctctcctaaccgttaagtgcgctaagaaattggagatattgctggtgttgctgatgttacaatc

SEQ ID NO: 596834 - DNA, 100 bp, Homo sapiens
cacgggtcatcttttccccagaggcgtcggaatggacctgtgccacccaggatgttttagaagaatgtatgtctcttcccaagctatcttcttattctgg

SEQ ID NO: 596835 - DNA, 100 bp, Homo sapiens
ggtttggtctttgtatgtattgatagaccggacagcggaggaaatcaagcaaggcaatgacaatgcggcgtcttcgacatcttcggaacattgctgcccg

SEQ ID NO: 596836 - DNA, 100 bp, Homo sapiens
tgacaacgccagcatgccagtgctatcggaggactctggtcccgcagcccccggaagccaatagactccctcagggactctcggtccctcagctactcgc

SEQ ID NO: 596837 - DNA, 147 bp, Homo sapiens
ctttgaaaaacattcaggactactttaatccagctactctacctctaacacagtacctgttaacaacgatatcgaacgccaagttagagaattgaaaacaaaaatttcagctatgaaagaagaaaaagaacagcttagtgctgaaag

SEQ ID NO: 596838 - DNA, 100 bp, Homo sapiens
gtcggtggcggggctgaagaagcagttctacaaggcgagccagctggtcacttgctctggggctttcaaggaaggttctttgcggatcatccggaatgga

SEQ ID NO: 596839 - DNA, 73 bp, Homo sapiens
gtgattagcttcgcagtctggaaagctttaggagttcacagtaaatacaggtatcaggatgaagatacacctc

SEQ ID NO: 596840 - DNA, 90 bp, Homo sapiens
gtcaagcttctgcgctcccttcctcagcgtttcaaggtctgttgcggttctcccacttttccataagcagaacaagaaccaaatcaaacg

SEQ ID NO: 596841 - DNA, 100 bp, Homo sapiens
tcatcatggggctcctgtacaagaaatattcctggaagaggggattctctgcggggcaggcatcctccggggagagaatcctgctgggaggacatcgtcg

SEQ ID NO: 596842 - DNA, 87 bp, Homo sapiens
atataataatggcagcacagagctacattcgaggttattctggtacaagttaacccaggagaagcatttacaataagaagagaagat

SEQ ID NO: 596843 - DNA, 75 bp, Homo sapiens
cggtggctcacacttccactggaaatcaagtcacagcaaactgtacaatggcagttgagtgggttttgaaaaacg

SEQ ID NO: 596844 - DNA, 82 bp, Homo sapiens
catcgaggagacgctggaggacagcccgcagaattcagaaggagctggcggacatcactttagaccctccacctaattgcag

SEQ ID NO: 596845 - DNA, 75 bp, Homo sapiens
tgcacgctgctggtcagccagttccgctcctgtcaggtttgttggcatccaaagctgttggggttgatggtgctg

SEQ ID NO: 596846 - DNA, 88 bp, Homo sapiens
ccaaagcctgaacaggcagggccagacccagggctcttccgtgggcggcggcttcgcgggcttggagttcgcgcggccgcaggagtcg

SEQ ID NO: 596847 - DNA, 101 bp, Homo sapiens
tggctttaacatacatcagtttcagggtgccagatagattggaaaaaaggaaagaatgtcactttgaaaactattaagaagaagcagaaacacaagggacg

SEQ ID NO: 596848 - DNA, 100 bp, Homo sapiens
ttcccactcaaatgcaaaggcttactaagtacccacttctgttggataatattgccaaatacacagatgatgaggagtctgatgaggaagctgtgaagaa

SEQ ID NO: 596849 - DNA, 50 bp, Homo sapiens
ctttcggagtacatgggcaatgatttgcctcaaagggcactgcaaaaatt

SEQ ID NO: 596850 - DNA, 100 bp, Homo sapiens
gagcaagcggagctcccccaagagccggaaaggtcagtatgggaatcctttaaataaatatatcagacattatgaaggattatcttacaatgtggattca

SEQ ID NO: 596851 - DNA, 100 bp, Homo sapiens
gccattcgccaggctcttcaggatctgctttcagagtacatgaacaacgaggaatgccagctcctgagcaggcctcattggtggaggaggggcaaccaca

SEQ ID NO: 596852 - DNA, 100 bp, Homo sapiens
gatctgcacttcgcattttggcattgacatttaattttagggtcctttatatagaagggagagtagccccctattagtgatgaatttggaagaaaaagac

SEQ ID NO: 596853 - DNA, 100 bp, Homo sapiens
gtttaaagctatccagccggaggaaaagatgctcgcctctttgtcttcaggctaagtgctctgcaaaagggccttgaggggaagcaggctgggaagagca

SEQ ID NO: 596854 - DNA, 82 bp, Homo sapiens
ccgagtccgcgggaagatggcggcgccgctcatccccctctcccagcagggactttgaacatgtcggggatcgccctcagca

SEQ ID NO: 596855 - DNA, 100 bp, Homo sapiens
cagtggcgccagatagaaaacggcgagagtgggcgagaacgtccactgcgggccggcgaaagctggaacaagcacatcatgattgacttggggactggca

SEQ ID NO: 596856 - DNA, 98 bp, Homo sapiens
ataagatcaatgccctcattaaagcagccggtgtaaatgttgagcctttttggcctggcttgtttgcaaagacagagattgcgaagagactgaacaca

SEQ ID NO: 596857 - DNA, 100 bp, Homo sapiens
atcttcttcactgcctctggcatggatgaggaatgggtaccacagaccatgtcatcgtcctggcgtccacgaaccgagctgacattttggacggtgctct

SEQ ID NO: 596858 - DNA, 80 bp, Homo sapiens
aaggtccggggcttgccctggtcttgctcggccgatgaagtgcagaggtttttttctgttgccgatatggagctgctgag

SEQ ID NO: 596859 - DNA, 75 bp, Homo sapiens
cacgctaataatgcaattactgagagacaacttgacatatgagaataatgttatcactattgatctggttcaaaa

SEQ ID NO: 596860 - DNA, 50 bp, Homo sapiens
cagagtttggagtatttggagcaagattgtctccagctttaagaccacga

SEQ ID NO: 596861 - DNA, 74 bp, Homo sapiens
gaaatacccaatctttctgaggaaaatgaagtagatgacactgagctatgagtggaaagggaagatcgaggaag

SEQ ID NO: 596862 - DNA, 73 bp, Homo sapiens
ctaaagtgagagtgaccaggcttgttctggatccctatttattaaaggattggcctaatgaagaagttcaacc

SEQ ID NO: 596863 - DNA, 96 bp, Homo sapiens
tctggaagcggctcaatgaccatggcaagaactggcgtcacgtttacaaggctctgccaaggctgagaatgacaaacatctaagtgtagggcctgg

SEQ ID NO: 596864 - DNA, 50 bp, Homo sapiens
aatggaatgctttacctggaatggatgccaactgtgatttgagacggcag

SEQ ID NO: 596865 - DNA, 75 bp, Homo sapiens
caaacatcgatggcctactggggataacattcatgcagaacatcaggagcgtgaggatcatccccggagaggacg

SEQ ID NO: 596866 - DNA, 100 bp, Homo sapiens
caggatggcgccaccacagatgcaaacggacgggccaacgccgtggccagctccactgagagaaccccagaaggggaaactgaggcccaaggaaattgag

SEQ ID NO: 596867 - DNA, 90 bp, Homo sapiens
cagccacgcgggcgagcggctgtgtggatgtcggcgaagccgcgggcgagaattcagaaggagctggcggacatcactttagaccctcca

SEQ ID NO: 596868 - DNA, 96 bp, Homo sapiens
tcgccagggagaaaacaaaggcggccggcctggtgcgcaaggccccgaacaacaggcaccccagccaccgccatggaccgccttgcctacctcccc

SEQ ID NO: 596869 - DNA, 82 bp, Homo sapiens
accgagaccgcggccgggaccgaggtttgtgatggacgcctctgaccccacccagctctctgcatcctgtgtgcagctctta

SEQ ID NO: 596870 - DNA, 82 bp, Homo sapiens
aatagctgctggtgaatctttggcacttctctttgaattggccagaggaatagagagtgctggacagtcttgtgaaattgag

SEQ ID NO: 596871 - DNA, 50 bp, Homo sapiens
cacaactccagtgctaactcaacaggtgaacctatgggtcgtggaacaaa

SEQ ID NO: 596872 - DNA, 100 bp, Homo sapiens
tacaagtcagcccataatagagcctctggttgaaaatcaagattttggtgttcacttggcaatatttactaagagtgacttttttgaacgaaccattctg

SEQ ID NO: 596873 - DNA, 100 bp, Homo sapiens
gcctcccaaagtactgtgattacagccctgtgtgtccaaatgctgggagaacatcaccccttggatgaattgccaccacattaaataaaacatatccaaa

SEQ ID NO: 596874 - DNA, 82 bp, Homo sapiens
caaggactcagccctgctggagaccactgagagcagcaagagtggcatttctgttaacatccaggacttggccccgtcctgc

SEQ ID NO: 596875 - DNA, 76 bp, Homo sapiens
agggaagatctttttcctcaattggcttgactcccagcattctcatctcaccttgccatactataagatgtctggt

SEQ ID NO: 596876 - DNA, 82 bp, Homo sapiens
taacctctcagaactgaacaaagacaacattgttcctggaacgccctctttttaaaaaaggatgggagcaaagtgtttacgg

SEQ ID NO: 596877 - DNA, 75 bp, Homo sapiens
cacagagctatgaacagaatatcaaacagattggcacctttgcctctgatgtacagttacccagcacgtgtacct

SEQ ID NO: 596878 - DNA, 90 bp, Homo sapiens
tgtccccaaaaagcctcccccatcaccccaacctacagcccccatggactggatgcaggagtaccgctgcctgctcacgctggaggggct

SEQ ID NO: 596879 - DNA, 98 bp, Homo sapiens
cagttgagcgagcccgaggacatggagatggaaggctcccaatcgtcaactcatgacttactggttacaggagcttcagcagaagagatgggaatatt

SEQ ID NO: 596880 - DNA, 100 bp, Homo sapiens
gagatagtccagagcaacctctttaaaaagcaagaatgttctgaaggatctggaaaagagaaaagctgatttaaataccatcacagagagtagtgctgcc

SEQ ID NO: 596881 - DNA, 74 bp, Homo sapiens
agtgcctgtgatggcatctttcatctaacacgtaaagtcagtgataaatcttttgtttgctgcatatactggag

SEQ ID NO: 596882 - DNA, 75 bp, Homo sapiens
cagagtacctgaaggaaaagccaagagtctccctgtacagggtctctaattaacagaagatggcaaagcccagcc

SEQ ID NO: 596883 - DNA, 95 bp, Homo sapiens
ggcttatttggaggtggtgcacaatctcttgacagagaagaactatgaataaacatcatcctgaccttcatctctgggcttgttccgggaagcga

SEQ ID NO: 596884 - DNA, 100 bp, Homo sapiens
gtgaagcccacatccctggaaaccccctcggcccctctgctgagccgctgcgtctccatgccaggggacatctcaggcctaaagatccctcctggctgtg

SEQ ID NO: 596885 - DNA, 100 bp, Homo sapiens
gcgccgagggctggaggatgcgttccctggggtccgggtcacaaggcacttaaagcattgttgaggtcattggtaggtcttcaggaagagttgcttttcc

SEQ ID NO: 596886 - DNA, 82 bp, Homo sapiens
agaccctcggcctcctcccccgccgccttcctgcagtcgtggcattcctggtggctttccatcagaacaagcagctcatcgg

SEQ ID NO: 596887 - DNA, 50 bp, Homo sapiens
ctgtgtgccccttctccacccagaggtactccaaagattcaggtttactc

SEQ ID NO: 596888 - DNA, 83 bp, Homo sapiens
gttgcagcccatggagatccagttcaattatgaatctcaggaacaccaccttctgtcaggatgacgtagctttgccaaagact

SEQ ID NO: 596889 - DNA, 96 bp, Homo sapiens
cttaaaaacatcatggatcaatctcaaacaaaggtggataggcatgtagacctgctagaagttgcccaggaaactgatgggttttcaggaagtgac

SEQ ID NO: 596890 - DNA, 96 bp, Homo sapiens
catgagcgagagggaggctgccccaaatgaggaagcagacctcaacaccaacatcgaggatgaaggcagctccttctatggggtctccagccagta

SEQ ID NO: 596891 - DNA, 90 bp, Homo sapiens
cttggaaatggaggaaaaagaagaccagcgacaaatttagagaaacctcggcaggtgccatgctatgtgtttgatgaagagttgaggaag

SEQ ID NO: 596892 - DNA, 90 bp, Homo sapiens
caagcactgttttcttctactggagtctgctcaatagggacgtcagctttgctggggtaagaagattgctgtatcaactcaagaaagcag

SEQ ID NO: 596893 - DNA, 100 bp, Homo sapiens
tgaacctggaccaggaggaggttttcaggaccaaaattgtggaaaagtcactctgagttgcatgctgagaatttgaaaaatgaagatgatgtagacactg

SEQ ID NO: 596894 - DNA, 83 bp, Homo sapiens
tagaactccaaggagaaaggcggcggtttttagaacttcagccataaaaatgggcagaattttccttgatcatatcggtggta

SEQ ID NO: 596895 - DNA, 74 bp, Homo sapiens
tgtttgcaagagagtcaggaaaaagactttggttggaggaaaccatcagagccatgcagttgctgaagaggaag

SEQ ID NO: 596896 - DNA, 92 bp, Homo sapiens
cagtttattagtcatcagttccctgattatcatgaccctactataggcaaactcttccacatagactttggatatattttgggtcgggatcc

SEQ ID NO: 596897 - DNA, 82 bp, Homo sapiens
caccatcagcaggacaaccctggaggtgttgcaactcttccccatcaacatcaaaagggtacccagttcccaaacctgcact

SEQ ID NO: 596898 - DNA, 75 bp, Homo sapiens
tcagcctcttgagtagcctgagtagctgggactaaaggagaagatggtataaactggtccatcagtgacaaagac

SEQ ID NO: 596899 - DNA, 75 bp, Homo sapiens
aggagaaaacagcaggcacccaagcgggcggcaggaaataaagtctttgcttttgctttttggaggtcagtttgc

SEQ ID NO: 596900 - DNA, 100 bp, Homo sapiens
tgagctacagagactgaagaggactcaggagcaaatcagtaatgctcgcatgtcttgggatagagagtcgacagaaattcggtaccgtagacttcaacat

SEQ ID NO: 596901 - DNA, 83 bp, Homo sapiens
cctccggccgcgggcggcgcgggagcctggatggacaaggtggcccagttgaaatccttcccttcctctaccttggaagtgcc

SEQ ID NO: 596902 - DNA, 83 bp, Homo sapiens
ctcgactccctgcagaggctcttcctcatcatctcagccacgaagtacagccggaggtacctaaaacagatccaggacctgcc

SEQ ID NO: 596903 - DNA, 90 bp, Homo sapiens
atcatatgcaccagcacgcctggctaagaagttggtgaaccatctaaagaagagaaggctgtggccaagtatcttcgattcaactgtcca

SEQ ID NO: 596904 - DNA, 98 bp, Homo sapiens
ggggctgacaggaatcttctggtgtactctttttatgaaaagcagcagccgctcttctaaaacattcaaaccaaagaagaatatccctgaaggatctc

SEQ ID NO: 596905 - DNA, 75 bp, Homo sapiens
tgaatatcgtaagcgcacgtttaaacatctcaaggctcatgcacaattagttcgagaagttgatgtggagaaggt

SEQ ID NO: 596906 - DNA, 75 bp, Homo sapiens
atcgactacaaacggaacttgccgcgtcgaggactgtcgggctgtggaaaatctctgttctcacaaagtctcccc

SEQ ID NO: 596907 - DNA, 90 bp, Homo sapiens
cggctcctggagaacatggcccggcctcccgggggctctggtcccctcctcggtgaatgaaaactttgccattgatttgatagcagagca

SEQ ID NO: 596908 - DNA, 90 bp, Homo sapiens
gtggaggacatcgacatccaggcgaactcggcctatcgctaccctccgaagtccgggcagagcggcttgggtaaatccaccttaatcaac

SEQ ID NO: 596909 - DNA, 90 bp, Homo sapiens
aaattcaaaccctagtgaataaagccaagagagaccttggagtaattcgtcgacagggcaaactctttgattctacaatagctgatgagg

SEQ ID NO: 596910 - DNA, 90 bp, Homo sapiens
tgggaatgtacacgataattaaagagtaaagttgtgctcaacggaggaataaacatggtgtgtctcgaaagaagattgctcagatgttgg

SEQ ID NO: 596911 - DNA, 98 bp, Homo sapiens
cttgcaacacaatgtttccaactctctaacatgtttaaccctcaaactacagctttatggcggtcatccactttgcggggctcaaggccgtgggcgag

SEQ ID NO: 596912 - DNA, 100 bp, Homo sapiens
ctagtaaaaagggagcacttaaggaagagatgtttggatctggccgagaacataactttacacgacccaatgagaaaggagagtatgaggtggcagaggg

SEQ ID NO: 596913 - DNA, 76 bp, Homo sapiens
ctgccctcaaggtcgtgcgtctgaagcctacaagaaagaagagccacgtgctggagccattgtccagccttgccct

SEQ ID NO: 596914 - DNA, 96 bp, Homo sapiens
tggcatcaccaacagtcagctcaagccagacacatcactattcctgatcagagaactccagttgcttcaacacacagtatcagtagtgcagccacc

SEQ ID NO: 596915 - DNA, 90 bp, Homo sapiens
gggagagaggtacctctccttttccctctccctttccctaagattctgtttctggcgtctgcatacgcaagtccccaactcgctgaggag

SEQ ID NO: 596916 - DNA, 100 bp, Homo sapiens
ttccaacaccagtggaagatgatcacatcccaggtctacttccccagcaggacagcatcattctcctatatcttctagacatcactcatcttcctcacaa

SEQ ID NO: 596917 - DNA, 74 bp, Homo sapiens
ctggtctcgaactcccgacctcaggtccttaatgcaagtcggttatgcctgtaggttgaaaggcatcagggagg

SEQ ID NO: 596918 - DNA, 75 bp, Homo sapiens
ggagccctcggggcggcggactggctcgcggtgcagctagtgagacctgcaacgacttccacccgatgttcttca

SEQ ID NO: 596919 - DNA, 87 bp, Homo sapiens
cgagtcaacaaccgcttcgagctgtcgaggggagctgcagcgggagtcagacttcatggccagtgtagacagcagctggatctcctg

SEQ ID NO: 596920 - DNA, 100 bp, Homo sapiens
gtggattcccttaaggaagccttgacatacgatggtgcagactggatcattgcacccaagggctatgctgccaattactgtgatggagaatgctccttcc

SEQ ID NO: 596921 - DNA, 83 bp, Homo sapiens
gcgctgcctggcccaggcgcacacggaagtgacctgcctagagctggaacgttacctccagagcgagccctgctatgtttcag

SEQ ID NO: 596922 - DNA, 100 bp, Homo sapiens
tataattactgcagacaaaacttcttgtctggaagagttctgcagaaaccaaggtgtatgttggtaacctgggaactggcgctggcaaaggagagttaga

SEQ ID NO: 596923 - DNA, 120 bp, Homo sapiens
tggaaattctcgcctgtcttcccttcacccagagcaaattgagacgtcccgtgaccaggagttaaactttgggatgtgcccgtgatgttggaccacaaggacttagaggccgaaatccac

SEQ ID NO: 596924 - DNA, 97 bp, Homo sapiens
gctggtccaggcgcggccgctaagaggagaccaagaggcgggggctgcacttgacaaccagcatgccgagatggctggtctcaaactcctgacctca

SEQ ID NO: 596925 - DNA, 100 bp, Homo sapiens
ctccctgcagcaacgtagagccactgccccaacacagatccatttctgaattcaattcgtcataatctgtccctacacagcaagttcattcgtgtgcaga

SEQ ID NO: 596926 - DNA, 82 bp, Homo sapiens
tctgctgctgttgcacactgggttgcagcctatggcctgttatttgtctcaacaaaagagcctgccgaggaggaactgaaga

SEQ ID NO: 596927 - DNA, 82 bp, Homo sapiens
acctggacccgacctcctcgccttggaggaagaatataagtgtttgatcagagtgcgctttcaactgaagctaaagaagaaa

SEQ ID NO: 596928 - DNA, 75 bp, Homo sapiens
agaccacccaagggcaagcagctctggccatctcccacttgccggagccctactgccaataaagggaaaataaga

SEQ ID NO: 596929 - DNA, 100 bp, Homo sapiens
cgaagccttgaaaaagctgccctgagacggtgtcccgccgaaaggttgtggaaaatgcccttaaagtgaacccaatactaggtccacaaatgtttcaacc

SEQ ID NO: 596930 - DNA, 75 bp, Homo sapiens
tgtacctgcagaacccaaattggcgtttgtcatcagaatcagaggttgggatgaatgggttccggagagcagagt

SEQ ID NO: 596931 - DNA, 90 bp, Homo sapiens
gctacatgctggcgctgctgctcactgccgcgctcatcttcttcgccatttggcacggttttgacccaccacatcagagtgacacaagaa

SEQ ID NO: 596932 - DNA, 51 bp, Homo sapiens
ctcctacgtttacctgtccatggtgaaatgacaatggatgctctgttggct

SEQ ID NO: 596933 - DNA, 90 bp, Homo sapiens
gcgggcccgggccatggccgccgccgatgccgagggggcgacgatggccttctgaggggctgggacaccagggtacccggcaaatttctc

SEQ ID NO: 596934 - DNA, 75 bp, Homo sapiens
ccggtttctcggcgaatgacagcacagaaaagtacgaagatctgagctcttctgacgagtcctgccctgctcctc

SEQ ID NO: 596935 - DNA, 83 bp, Homo sapiens
atttggcgatcaacatcaccaacggcgagggtgaggtggctttgaccccgggttgcccggccagcacgaccgaggaggtggct

SEQ ID NO: 596936 - DNA, 87 bp, Homo sapiens
actggagtaaacttcccctcaccagaagagctggaagtcgagtgtgctactcaactcaggagatttggagacaaactgaacttccgg

SEQ ID NO: 596937 - DNA, 98 bp, Homo sapiens
ggtgcagggcgaggacggacaggtggtgctcatcaagcaggagaaagaccgatttcagaaagtgctttctctctgtggacatgaggattggattagag

SEQ ID NO: 596938 - DNA, 121 bp, Homo sapiens
ctgcattacaagcagcagtggggacgagctttgaaagaacttgccagacttaaacagacagctttattaaaccgcctggagcgaattttcgaagcatgttttccttccatacttgtccctg

SEQ ID NO: 596939 - DNA, 75 bp, Homo sapiens
cacctggtccctgtatctctcagcaacctcatctccgtggactcagagctgacctcactttgccagtcagtcctg

SEQ ID NO: 596940 - DNA, 75 bp, Homo sapiens
ccgacctcgacgtcttgcctgtgtcccacttgttcgcggcctatagattcttcaaagtgacgcctcccccaggaa

SEQ ID NO: 596941 - DNA, 83 bp, Homo sapiens
gggaccacggtcaccgtctcctcaggccttcctgggctatgtgctgtatggagagtgccaggaggtcttgtggtggggaggag

SEQ ID NO: 596942 - DNA, 82 bp, Homo sapiens
ctggtttcaagcgattatccagtacacattgataagggtgaatctgtaaaatatttcctggataacttggataaacttggag

SEQ ID NO: 596943 - DNA, 74 bp, Homo sapiens
agttgttcattgtttgtcaccacaaaaaggacaggcagctgagtatgtcccagagaaggtgaagaaagcggaaa

SEQ ID NO: 596944 - DNA, 95 bp, Homo sapiens
cgcgcccccggggctcgcggagccaggtccggcctctttggcctacccccgttggctccgctgccccaggtcgatgagtcccctgtcaacgacag

SEQ ID NO: 596945 - DNA, 100 bp, Homo sapiens
cggggccgcaagcagtgcaagacccatccccactttgtgattccctaccgctgcttaggtaaatttggaaggcaaagccagccctctgtcacttctacaa

SEQ ID NO: 596946 - DNA, 75 bp, Homo sapiens
acgtggggaatttctcctggggctcagagtgccatttgtgtaggaccagaaaacatgcagataatgtatccagct

SEQ ID NO: 596947 - DNA, 116 bp, Homo sapiens
tgctacacatgctaaaagatgacagacttggacaacatgtcccaacattacatcccaggacttcatctgcagcatcctcaccattaaaaaaagaacagcccttatttactctacgg

SEQ ID NO: 596948 - DNA, 83 bp, Homo sapiens
caaatgtcagccctggagttccatgataccacacgaacacagtgaattgaatgcaggaattataaaaacagatcaaaactatg

SEQ ID NO: 596949 - DNA, 75 bp, Homo sapiens
agtctacgttcattcagggcctgctgtggaagaccagccccaaagggatctaccgaacagaaagggacaaaggga

SEQ ID NO: 596950 - DNA, 83 bp, Homo sapiens
cacagcttgtgccaccgccgtgctgggcaatcagtgggtgaatttgtaagtgatgtcctgctagttccagaaaagtgccagtt

SEQ ID NO: 596951 - DNA, 82 bp, Homo sapiens
gatgctttgccacccccatatcatcaggctctaccagctggcaggacctaatctgtcggatggctgcatcagtgaaggagca

SEQ ID NO: 596952 - DNA, 98 bp, Homo sapiens
agcgcctcgcctggatgtgagtttcagccaggggttcaactagatatagcttcacaatctctggatcaagaaattttattaaaagttaaaactgaaat

SEQ ID NO: 596953 - DNA, 101 bp, Homo sapiens
ttctgattgaaaatgatcagtcgatcagccgaaatcatgctgtgttaactgctaacttttctgtaaccaacctgggtgcctttagccgtctggacccaact

SEQ ID NO: 596954 - DNA, 83 bp, Homo sapiens
ccaggagttcgtctcttacgtctgcggaagtgcagctgcctcagttcttagcgcagattcccaaatgctggaaaatcctcttt

SEQ ID NO: 596955 - DNA, 75 bp, Homo sapiens
ccgggccggagtacgtcgttcccgctgcgctaggggaagcgggcagcacaacaagccgctctactcctttgaaga

SEQ ID NO: 596956 - DNA, 98 bp, Homo sapiens
gcgcccgtggccgccgtgcaggcggccgtcagcaacctcgtccggaaactggaccaggatcttaatgaagtcaaagctcgagtagaagaactggacag

SEQ ID NO: 596957 - DNA, 83 bp, Homo sapiens
catttgtgtatgaagctcaagatgtggggagtggcagagagtatgcattaaaggtcctgaacgaggctgtgggggccctgatg

SEQ ID NO: 596958 - DNA, 75 bp, Homo sapiens
cggcgactggacttacgaggagcagtttaagcagtctgcgctcctcagaccaccggcaggtgaacagcctgatgc

SEQ ID NO: 596959 - DNA, 83 bp, Homo sapiens
gaccgcctgagctttctacaccggatcatggaagggaagtggttgctgtgtatgttactggtgcttggaactgctattgttga

SEQ ID NO: 596960 - DNA, 100 bp, Homo sapiens
caagcacacccaatggacagcatgcctcaccaagtcacatgacaagcagtgaaaaaccatttcgctgtgatgaatgtggtatgagattcatacaaaaata

SEQ ID NO: 596961 - DNA, 50 bp, Homo sapiens
ccagagctgaggactgcctgtttgcagctcaaccaaatcccgggagatga

SEQ ID NO: 596962 - DNA, 99 bp, Homo sapiens
aaaggcttttcacggagcaggctcggagcctacggggctggcctcggactggatggggattataagactggttttggaggcaaattcggtgttcagtcg

SEQ ID NO: 596963 - DNA, 74 bp, Homo sapiens
gattggcatcgatctctccatcccttccgaggcccgacttcggtgtacatcggtgagctcccgcaggacttcct

SEQ ID NO: 596964 - DNA, 100 bp, Homo sapiens
cattgaatacagagggaagtttatgctgagagaacagtttgaagcaaatgggtatttctttaaaaggagaactgcgacacatcaccaagctgaagccctg

SEQ ID NO: 596965 - DNA, 75 bp, Homo sapiens
gggcctggtggaggaggtggagagacgcgtcctgggatccagtgagagacatgtcctggacttgaacagtatgct

SEQ ID NO: 596966 - DNA, 87 bp, Homo sapiens
gcttccgtgagctgacctatcagtatcggcagaacattcctgcttccgagttgccagaccacactgcccacgtttcagagcccagag

SEQ ID NO: 596967 - DNA, 75 bp, Homo sapiens
cggcgacggcggcggcggcgggcacagacaatgcagatcttcgtgaagactctgactggtaagaccatcaccctc

SEQ ID NO: 596968 - DNA, 75 bp, Homo sapiens
gctgcattctcgttgtctttcaggacctctggtcctcaatcgagttcctctacgaagaacacaccagaaatttgt

SEQ ID NO: 596969 - DNA, 82 bp, Homo sapiens
gctacgcgggtcttgcgagatatctggccgcctctgccgcagctggaggatgtcatccaagtctccaagaagttcctgccag

SEQ ID NO: 596970 - DNA, 75 bp, Homo sapiens
gcggccgccgccgctgccgcttccaccacagcatttgacattgtgcagcaaagaaatggttatggagaagcccag

SEQ ID NO: 596971 - DNA, 73 bp, Homo sapiens
cttcagccactacagtatcgtgggacagaagctggcacagtaccacctgatgctgcacatccagatgcagctg

SEQ ID NO: 596972 - DNA, 116 bp, Homo sapiens
gcagcatctcctggaaagatgtaaatctcccaagtccaaagggtccctttgtggtacgtgctttccttcgtagttcaacaagtgaaggtttattactgaagattgatccattgttg

SEQ ID NO: 596973 - DNA, 88 bp, Homo sapiens
aaatccatcaagctcatcaaaagagcttggggcttccttggtcgcacccaccacctgcctgcccactggtcagccttcagggaccctg

SEQ ID NO: 596974 - DNA, 92 bp, Homo sapiens
ccaatgatgcttcctacttcctttccgtgcataagaagccgaatgaagctgaacatggttatgcctccatgttaccatacaataacaaggac

SEQ ID NO: 596975 - DNA, 97 bp, Homo sapiens
gccctcagccagaagggctacgccagcggcgtcgagaggaccatcctgggtgctggccctgtgctggagggcaacgggcatgaggaggtagttgcat

SEQ ID NO: 596976 - DNA, 80 bp, Homo sapiens
agacatcttcaccaccacagagcccatcaagcccgagcagacaatgcagatcttcgtgaagactctgactggtaagacca

SEQ ID NO: 596977 - DNA, 100 bp, Homo sapiens
caagcctggcacggcggctgagctccggcagagcgtgtctgaggccgtgcggggctccgtggtgctggcccacctgccgtttgctgtcattggcagcaca

SEQ ID NO: 596978 - DNA, 80 bp, Homo sapiens
gaacaagaagctccggaattctgattgacgagatgcctgaggctgccgtgaaatcaacagccaacaaataccaagtcttt

SEQ ID NO: 596979 - DNA, 100 bp, Homo sapiens
cgagaaaggaacaggcgccttcaaaagcccacttggcgatgggttacagtaagagatggcagtggcagcaccatgatgcaaaccaagaccttctcctctt

SEQ ID NO: 596980 - DNA, 50 bp, Homo sapiens
gcgccgcagacctccatcctgaggcaggtggaagtcatcataaagtttct

SEQ ID NO: 596981 - DNA, 111 bp, Homo sapiens
gacaatgcaagccctggagaaggcctacatcaaggactgtgtctcccccagcgaggttcctgagctcactgaaaagactattgtgccttaggaaaagcatttgctgtgttt

SEQ ID NO: 596982 - DNA, 75 bp, Homo sapiens
ggaacctcttccagttggaattgaagaatattcccaagtccttcacccggtttagattttgaagaatgtgctcac

SEQ ID NO: 596983 - DNA, 98 bp, Homo sapiens
ggagccatgtcagaaggagtggacttgattgatatatatgctgacgaggagttcaaccaggagctcgaggccatgagcagatataccagcccagtgaa

SEQ ID NO: 596984 - DNA, 82 bp, Homo sapiens
tcaaggagatcggcctcttgaaggtcaaaatgcagatcttcgtgaaaacccttaccggcaagaccatcacccttgaggtgga

SEQ ID NO: 596985 - DNA, 82 bp, Homo sapiens
gggatcccagcctcaggcctgcacggacggtgttggttgggaggctgggaggcggcagaatgcagccagaggagggcacagg

SEQ ID NO: 596986 - DNA, 100 bp, Homo sapiens
ttaaaggagaagaaggaagttgtggaagaggccaccaggaaaccctccccgaagaatgggtagaatcaatcatctgcgtggccctagtccccctccaatg

SEQ ID NO: 596987 - DNA, 50 bp, Homo sapiens
atccgagcccatgccacagccaaggaagctgaagagggaactaccctttt

SEQ ID NO: 596988 - DNA, 74 bp, Homo sapiens
ggccgcgccgaccaccatcccggtcaccacgagaaagaagatgctgatatgctacaacacggatgaacctggag

SEQ ID NO: 596989 - DNA, 75 bp, Homo sapiens
ccggcggctgctgctgctgctgacgctgctgctgcccggcctcggggagtgctacctggagggtgaccagacgag

SEQ ID NO: 596990 - DNA, 75 bp, Homo sapiens
gaaatcgacacacaaagaatagagttgagcctgtgggacacttcgggcgatcagtgggtgaccgcggctgcgagg

SEQ ID NO: 596991 - DNA, 101 bp, Homo sapiens
aggaggatgaagagctattaacagaaagctccaaagcaaccaatgtttgcactcgatttgaagactctccatcgtgaacaagagttgaatgctcgagcccg

SEQ ID NO: 596992 - DNA, 74 bp, Homo sapiens
ccgcgcgcgcaggtgcattcgctccagcaagtctggaaaagtttgaaattccagtaaaaattcgtttgagtcct

SEQ ID NO: 596993 - DNA, 100 bp, Homo sapiens
ggaatctcactctgttaaagctggtctgttctaactgagggatttagtgcaagaagaagaacagttgatggaagaaaagaaaaagaaaaaagacgacaag

SEQ ID NO: 596994 - DNA, 100 bp, Homo sapiens
accgtagacttccctttccagccctacaaatgccaacaggagtacatgaccaaggtcctggaatgtctgcagcagaaggacaagttctgcgtgtacgagg

SEQ ID NO: 596995 - DNA, 75 bp, Homo sapiens
tggacactgaaaccaccgtggaagtcgcctggtgtgaactgcaggtgagtcatcatccccctgctgctgcgcacc

SEQ ID NO: 596996 - DNA, 82 bp, Homo sapiens
ccctcggccttccgacgtgggcggtgggccccagccccacagaccagcccagcattcagtgagacggtttaagcggaagcat

SEQ ID NO: 596997 - DNA, 98 bp, Homo sapiens
acctcaagaagcagctccacgaaaggcagccgcggatcgccgcgctcagcgacaaacaaagaacagcccatcttcaccacccgagcgcatgtcttcca

SEQ ID NO: 596998 - DNA, 82 bp, Homo sapiens
agagtgagcgagccttcacctacagcatcgtgggcgccggctcccagtttggcctcctgcccgaaggccacctgaacctaac

SEQ ID NO: 596999 - DNA, 100 bp, Homo sapiens
gatcgccaagagatcaaagataaaatcttttgtgaaagtgtataactacaatcacctaatgcccacaagggcaaacctggtggacctgcagaagaagctg

SEQ ID NO: 597000 - DNA, 89 bp, Homo sapiens
ggggcgcctgcgactgcggggacagcaacgtgatgcgggagagcggtgtatgtggtagaagaccaaagaagagatgagctaggaccatc

SEQ ID NO: 597001 - DNA, 82 bp, Homo sapiens
ttggtgaagtcggccagcctgagcaagcggaggacctacgccggcctggggacccagacatggagctgcgggaagaagcctg

SEQ ID NO: 597002 - DNA, 100 bp, Homo sapiens
cacaatatgttgagatgtgctattttgacaacacttattcatcttgttcaggttatcaatagtctggctgtctatcgtcatcgtgagactgactttggtg

SEQ ID NO: 597003 - DNA, 74 bp, Homo sapiens
ccgcgggatccgagtgcgggcgcgggcgcgggcgctcccggcgagccacgtaagaagaggaggaggccaggcag

SEQ ID NO: 597004 - DNA, 100 bp, Homo sapiens
aggtggaacagattcagaaggagcaggattaccaaagggcaggtggacacgaacaccaaaaatgtctttgggcaaccgaggttgagggcatccctccgag

SEQ ID NO: 597005 - DNA, 75 bp, Homo sapiens
tcctggcgcccctgctctgcctggcgctgctgcccgcgctcgccgcacgaggaagagctaaagatggctgaattt

SEQ ID NO: 597006 - DNA, 101 bp, Homo sapiens
gcctcgcgaccgccgagcctgcagcctgccccgcggccaacatgagcttcttgttctattgtggacgatgaaaggctctctgcagaggagatggatgagag

SEQ ID NO: 597007 - DNA, 100 bp, Homo sapiens
ttgcctttgttacatttgcagatgatcagggtaaaatccagtacaaggaatatatcattgaaggatttgaaaacatgccagctgcatttatgggaatgct

SEQ ID NO: 597008 - DNA, 98 bp, Homo sapiens
ggcgcctcgacacgagcgacgtcctgcagcagatcatggccatcaccgaccagagcctggacgaggcacaggccaggattactacagcatcccatttc

SEQ ID NO: 597009 - DNA, 101 bp, Homo sapiens
caccagtggagagaagattttgcagaatggatactaatgatgaccctgatgaagaccatcttacaagttatgatattcagctaagtattcaagaatccatt

SEQ ID NO: 597010 - DNA, 75 bp, Homo sapiens
aacaagaagtaggcattgaccccttgtccagttactctaacaagtctggagccatggaattccatgaacacttgc

SEQ ID NO: 597011 - DNA, 101 bp, Homo sapiens
gtctcatcaaggtgaacgggcggcccctggagatgattgagccgcgcacgctacagtacaagctagttcttctggagctcaacttcttgccaaccacaggg

SEQ ID NO: 597012 - DNA, 90 bp, Homo sapiens
ggcctgtgtggactcgcatcttgcccgaagccgggcggaggagagctcaagctaaggtccttttggtgtgaaccatggggtggaacttca

SEQ ID NO: 597013 - DNA, 50 bp, Homo sapiens
aagaaatcgacgtgctgttttcataggcggatactctgttttcaaggaag

SEQ ID NO: 597014 - DNA, 97 bp, Homo sapiens
ggcagaatacagagatatggaatcaggtcaattctttgtgatgatgtcaccacaagaagtactgcagggaggaagccagcgctcaattgcccctagg

SEQ ID NO: 597015 - DNA, 100 bp, Homo sapiens
acctccaccttacctccgtcatgggcaacatcatccatgcccagcttgacatcaaaggaatcatgttcgttcaggaggaggccctggccagcagcctctc

SEQ ID NO: 597016 - DNA, 80 bp, Homo sapiens
ccagtccaggcccagcctctcgaatgggcacacctgtgtaggtatattacagctaatactgacacagaagaacagagttt

SEQ ID NO: 597017 - DNA, 75 bp, Homo sapiens
gcagagtggaccaccccatgaacctcgggctacttctacaagtccgaacagccagtccagcaaaatgaacagcat

SEQ ID NO: 597018 - DNA, 101 bp, Homo sapiens
gagcaacagaaggactcacctgtgttttgccgcttctttcacttcaggaggtgttggagcgggccggagagaagtagagtgggctgcgaggagaaggaaac

SEQ ID NO: 597019 - DNA, 50 bp, Homo sapiens
gagaaggaagaactgtgctgagaatcatattctaagaactcagccactca

SEQ ID NO: 597020 - DNA, 82 bp, Homo sapiens
gtcggcggagcttcgccaaggctggcgcagtcgataacgaaggaggcccaacttcattcaataaggagcctgacggatttat

SEQ ID NO: 597021 - DNA, 75 bp, Homo sapiens
tcctgccgtctgctcttctgcctcttgatctccgccaccgtcttcaggccagcagcctcccgcgacgatgcccct

SEQ ID NO: 597022 - DNA, 75 bp, Homo sapiens
cgatggactattccctggctgcagccctcactcttcatggtcactggaaagaccacagcaagattctttcattcg

SEQ ID NO: 597023 - DNA, 100 bp, Homo sapiens
acgatgccatcatcaccaaggccagcatcaaggacgtcctggacagcgaagggtctcaccaacggctttgggggtgcgaggagcgagcaggagccgggcg

SEQ ID NO: 597024 - DNA, 101 bp, Homo sapiens
ctcctgagtagctgggattgcagtgcggagcttgttaacagacgtgcatgcctggcctgtggactgtgcagtaagtgttgaaaaaggcactcttccctgac

SEQ ID NO: 597025 - DNA, 83 bp, Homo sapiens
ccgcgcctgggctgccggcacttcgcggcagcggacaaggcaaaatctcagcaagttcggacctctagtacaataaggcgaac

SEQ ID NO: 597026 - DNA, 99 bp, Homo sapiens
gcctcaggtggctcctcagagtgtctgtggttctctgtcccaggctgttccctaagaaggtctgcccaggactcagggcagccgatgaagtgcaacctt

SEQ ID NO: 597027 - DNA, 73 bp, Homo sapiens
ccaatggcagtgatgatggagctcagccctccacctccacagttggatcacaaggacgagtcataagttttga

SEQ ID NO: 597028 - DNA, 83 bp, Homo sapiens
cgagctcaacgccaggcgccgctcctttacagcaacatggctgacaaggccaagcctgccaaagctgccaacaggacgccccc

SEQ ID NO: 597029 - DNA, 75 bp, Homo sapiens
caacgcggtcacggcccagcgcgttcggtataaagatggctgtgaccacatcggggagcaccgagatgatgaaag

SEQ ID NO: 597030 - DNA, 74 bp, Homo sapiens
gagcaggcagagcagccgagccaggtgtgaccatgaagctcatggatgaggtcgccgggatcgtggctgcacgc

SEQ ID NO: 597031 - DNA, 75 bp, Homo sapiens
gatgaactgaaacggattgccagagaattggcagaagaccaagatcactccatggatgaaatgacagctgtggtg

SEQ ID NO: 597032 - DNA, 100 bp, Homo sapiens
gccggcagcgccgcctcctcgcggctaaagacaacagtgagctgggacggagacaagctccagtgtgtgcagaagggtgagaaggaggggcgtggctgga

SEQ ID NO: 597033 - DNA, 75 bp, Homo sapiens
cgcggtcgacgcgggcctgagctccctccagcatcctgaggttagcattacacttctcccagtggagcccatgac

SEQ ID NO: 597034 - DNA, 100 bp, Homo sapiens
cggctgagcccccatcattgggagaaatccccactcctccaagaaccaacccccaaattggctgggacagactctcttgagcctgagggatccattacag

SEQ ID NO: 597035 - DNA, 74 bp, Homo sapiens
cgggagttacaccgccaccgccaggtgactgcttagaaaactgcacagcatctgatgaaattagcgaataagaa

SEQ ID NO: 597036 - DNA, 83 bp, Homo sapiens
tgctgcttctggcctctgggcatcgcagccttctacttgtcccatgaggttaacacagaaatctgcctcctgggccatgccgc

SEQ ID NO: 597037 - DNA, 83 bp, Homo sapiens
gggaggtgcttctgcggctgtacggagccatcttgcagttattacaagaactgtgtacagtatttaatgtagatttaccatgc

SEQ ID NO: 597038 - DNA, 78 bp, Homo sapiens
acattacagtggttggaataaaaacaggaggatgcattagcacaacaggcctttgaagaggctcggagaaggacacgc

SEQ ID NO: 597039 - DNA, 50 bp, Homo sapiens
tgagatgtttcatcccaacagttatggaggttttgatgactatggtggct

SEQ ID NO: 597040 - DNA, 100 bp, Homo sapiens
cgtgagcgcgcctgcgccgccggggccgctgcaaggggaggagagaggccgcctcagggtgttctaaggatacattttattgaagctcaggatcttcagg

SEQ ID NO: 597041 - DNA, 87 bp, Homo sapiens
aaaaagcatccccgaggaggaagacgaatcgttaaacatcttaggtcaggcggtgctgatgcagtcacgggaacaggtttcagaaga

SEQ ID NO: 597042 - DNA, 100 bp, Homo sapiens
aagcgcagggagaaggaagaggtgtttgaaaaggcatggctaatgtaaaagcagccccaaagataattgacacaggaggaggcttcattttagaagagga

SEQ ID NO: 597043 - DNA, 100 bp, Homo sapiens
gtcgccgcatcccggacggtacttctgccactgctgctccgtggagatcgtcccgcgcctgccgtttgacaagtatgcgcccaagctggacagcccctac

SEQ ID NO: 597044 - DNA, 108 bp, Homo sapiens
ggcccgggagcgcgatgtggagcgcttctttaagggctacgggaagatcctggaggtggatctgaagaacggatatttggagttcttacaacatggcagacattgaca

SEQ ID NO: 597045 - DNA, 50 bp, Homo sapiens
catgtcgcgttacgggcggtacggaggagcagcctagggcctaggcccgg

SEQ ID NO: 597046 - DNA, 75 bp, Homo sapiens
ggcgctggggacccgcgagcagaaagagttcctagagagagaagacaaagacagtctgtgttgcaaaagaagccc

SEQ ID NO: 597047 - DNA, 100 bp, Homo sapiens
atgcagttttttgatgctgaggagctcctggtcgatgaagaggatgatgtttttggtgaagcatggaaataaccagcctgcaagaactggcacactgtcg

SEQ ID NO: 597048 - DNA, 100 bp, Homo sapiens
gcctgcctcacaactccaaaaacaaaagggagatactccagcttcagcaacaggataacttcaaactaatgtgtactaatgccatgatttacaataaacc

SEQ ID NO: 597049 - DNA, 83 bp, Homo sapiens
gtcccgcctcacctggggtatggagaggaaggaagagatgctgtgccacttttcctgaggcttctccattcaccccatcagaa

SEQ ID NO: 597050 - DNA, 82 bp, Homo sapiens
cggttcgggtgcgctgctcaaggacacggtctacaccgacttcgacgcagcccctgtcaaagggaacaggaagcagtccacg

SEQ ID NO: 597051 - DNA, 73 bp, Homo sapiens
tgccaccttacgctcagggcttggcctcccctcaggatgccgaggaatgtgacagggctgggagtgtggccac

SEQ ID NO: 597052 - DNA, 75 bp, Homo sapiens
gcgatggcttacaatgttcagcaagccatcaggaaatatggccgagattttcaggcaatctcagacgtgattggg

SEQ ID NO: 597053 - DNA, 82 bp, Homo sapiens
ggatttagtgaaatgccgtatgcagactgaaactgttgaggagcccatggaggaagaagaagcagccaaagaagagaaagaa

SEQ ID NO: 597054 - DNA, 100 bp, Homo sapiens
gtccgagccagccgctgttttgccggaggagcccctcaggcctgtactaatggtcacttgatgtgcgctggctgttttatccacctactagcagatgccc

SEQ ID NO: 597055 - DNA, 74 bp, Homo sapiens
cagaaaccctgtctttcaggattcctgggacacagagatgatgatgtgcctgcagatatggttgcagaagaatc

SEQ ID NO: 597056 - DNA, 100 bp, Homo sapiens
gtgcggctccaccccttccacgtcatccgcatcaacaagatgttgtcctgtgctggggctgacagagagaaaaggaacagttccgtaagctctttattgg

SEQ ID NO: 597057 - DNA, 98 bp, Homo sapiens
cccctgagcccatgcccatgtcaatggcacccatcacgggggaaaacataagaccatttattagtaggtgtgagcagctgtgcccggccaagttttcg

SEQ ID NO: 597058 - DNA, 103 bp, Homo sapiens
cttagctgtgctcgcgctactctctctttctggcctggaggctatccagcgcacaacagcaacgccatgaaagagacttggccctcttgaaactaaaggctga

SEQ ID NO: 597059 - DNA, 90 bp, Homo sapiens
gtgatatttcctattttggtgttgggggcaagcaagctgtcttctttgttggacaatcagccagaacaatgattgaagctcacgttgatg

SEQ ID NO: 597060 - DNA, 95 bp, Homo sapiens
ccatggagtcctacgatgtgatcgccaaccagcctgtcgtgatcgacaacatggctctgagagattcctctgcgaatctgtttttagctatcaag

SEQ ID NO: 597061 - DNA, 100 bp, Homo sapiens
ggtagaggctgaggaaggccgtgttgtttgtctacctgggactagtgccgtgagcgatgtggagatgcaggaacactatgatgagttttttgaggtgaga

SEQ ID NO: 597062 - DNA, 75 bp, Homo sapiens
aacatgagcttttcaagaaatggaattgaaaagtccagaggaagaggaaactttgagggaaattttgagtcactg

SEQ ID NO: 597063 - DNA, 75 bp, Homo sapiens
ggaagcagccgatccagcctgcggagcctgtggggcagggtatgttagagcccaccaaggaaccactgaaaccac

SEQ ID NO: 597064 - DNA, 75 bp, Homo sapiens
gaggcagccaagctcgtagcctgccactccgtgcgtctcggtccagctcgacttccagctcaggctccagcacca

SEQ ID NO: 597065 - DNA, 98 bp, Homo sapiens
aacagtctggccacctctgtattcagcatagctattcctgttgatggtgatgaagacaggaggaaatgagtctcaaccagacagccaggaagaccccc

SEQ ID NO: 597066 - DNA, 82 bp, Homo sapiens
cacggaggagccgctggggctgccgccacggccgcccggaggattttttatcaagcagaaatgcatcgaacaacgagaatca

SEQ ID NO: 597067 - DNA, 119 bp, Homo sapiens
gaattcagaaggatatcgacgtcgtgatccagaagtccagagctgaggactgcctgtttgcaggtcatcatcagatttgaaatatttaaagtggatacaaaactatttcagcaatgcag

SEQ ID NO: 597068 - DNA, 51 bp, Homo sapiens
atctgggcttggaaatgcctcaggtacctctcccacaccgagctggctcca

SEQ ID NO: 597069 - DNA, 100 bp, Homo sapiens
ctcttgtcagacttaactaagcagatttcccgagactacggtgtgctgttagaaggttctggtcttgcactaagatacctccaggtgctccactgctgct

SEQ ID NO: 597070 - DNA, 82 bp, Homo sapiens
cggtcctgtactggctgctgctgccctgcgcgctgctggctgcagcctcccgcgacgatgcccctcaacgttagcttcacca

SEQ ID NO: 597071 - DNA, 96 bp, Homo sapiens
gaaggtggaggagaaggcaagccggaaagagcgaaagaaagaagtggtggaggaggctgcattgaggcgtgagcaaaagaagttggaaaagaagca

SEQ ID NO: 597072 - DNA, 50 bp, Homo sapiens
ggaggccctgctggtttctgtgcggagacaagaggagcagcagcggcacc

SEQ ID NO: 597073 - DNA, 90 bp, Homo sapiens
cccacgctggccggacagggccgcctgtcgccggctccagaacctgggtatcaacccagcaaacattggcttcagtaccctgactatgga

SEQ ID NO: 597074 - DNA, 90 bp, Homo sapiens
gttggtacctgcagatcatccgcttcctcctcttgttttccaacatcatccccattaggtggcagatatctacctagcatctcagtacac

SEQ ID NO: 597075 - DNA, 125 bp, Homo sapiens
ggtttgggaactggactgggatttggaggatttaatacacagcagcagcagcaaactaacgcaaacatgcagatctttgtgaagaccctcactggcaaaaccatcacccttgaggtcgagcccag

SEQ ID NO: 597076 - DNA, 98 bp, Homo sapiens
cttgaagtggaaaatcaagctaagcgcctactagagcagggtttggagactcagggcaccaagggaaaggacccgacgtccggagccaaggatgggaa

SEQ ID NO: 597077 - DNA, 100 bp, Homo sapiens
gtcaaatacatgaaaaatggggcagaagaagagcagaaaatagcagccaggaaccaagaaaacttggtatggaaacctgacaagcccaaactgtgaagaa

SEQ ID NO: 597078 - DNA, 149 bp, Homo sapiens
tacttgcacccacccagccccgccgtcgccccgccgcgccgcgctccaaccgcctcctcctcctcagtaacgcggatttatgtgatcagtttggctgaaccccgtctgcccctgcagctggatgatgctgttcggcctgaggcagaagg

SEQ ID NO: 597079 - DNA, 100 bp, Homo sapiens
actacaagacggctgaggagaagtacatcaaggggccttcgctgagctaccggtgagaagccctaccactgcaactgggacggctgcggctggaagtttg

SEQ ID NO: 597080 - DNA, 50 bp, Homo sapiens
tgccgctttaaggagaactgcaggaacgtcaaggtcgtgggaaataaaag

SEQ ID NO: 597081 - DNA, 100 bp, Homo sapiens
gattcgccgaggcaccgaggcactcagaggaggcccgctgcccaggtatgcacaagtcaaggccttttctgcagaccaagtagccttccctggagagcgc

SEQ ID NO: 597082 - DNA, 106 bp, Homo sapiens
ccgtccaggcggcgcggcggctcctcactcatcccagataaacaacttgatgcagatgtttcccccaagcccactatttttcttccttcaattgctgaaacaaagc

SEQ ID NO: 597083 - DNA, 90 bp, Homo sapiens
caagatcaaggtcaacaatcaccttttccacagtgttgacccgaatgatcagaaaaagacagcttgttatgacattgatgttgaagtgga

SEQ ID NO: 597084 - DNA, 98 bp, Homo sapiens
ggaacatcagactggaagaacagtgtcatcagtggctgcatcacgggaggagctattggtttcagagcggatcgtgtgaagaagggatttgacttcca

SEQ ID NO: 597085 - DNA, 83 bp, Homo sapiens
caatgggaggcattgtgatgaccaatgatggcaatgccattcttcgagagccctgcatctggcctgtgcaggtcagcacttgg

SEQ ID NO: 597086 - DNA, 105 bp, Homo sapiens
tgaagcctgcctacagttttcacaaatctacattgtggatatcaagcctgccaatatggaagagctaacagaggtgattacagcagcagaatttcatccaaacag

SEQ ID NO: 597087 - DNA, 73 bp, Homo sapiens
cgcgggcagccctctgccttcctggccgctcccaaatataggtggatccataaagaacccagccaacccgcag

SEQ ID NO: 597088 - DNA, 100 bp, Homo sapiens
ttgctatggttactggaaaaagtatgcagaccttgaaaagcggcacgacaacattaaaccatcagatgaggctatgaccagggccagagcactcagatct

SEQ ID NO: 597089 - DNA, 97 bp, Homo sapiens
agaatctgccggatggtgctggccacttgcttgggatcctttatcctggtcatcttctatttccaaagtggttgctgtatatggaactttatctgat

SEQ ID NO: 597090 - DNA, 101 bp, Homo sapiens
gagaaaggggtgttggtggctttgcccaaatccaaatggatgaatgtagaccatcccattcatctaggaggatagatcactgcgaccagaggaaattgaag

SEQ ID NO: 597091 - DNA, 98 bp, Homo sapiens
gctccggctggtctgtggtgaggtgaactaccgaggccaggtggtgagcctgatccggatgcggaacccctggggcgaggtggagtggacgggagcct

SEQ ID NO: 597092 - DNA, 107 bp, Homo sapiens
tcacaagaagacatgccccgagtgcggaagaggatttacaaggagctatctgtgctacagtgctgttctcctacccacatggatgctctaagtagttgtgtcactcc

SEQ ID NO: 597093 - DNA, 82 bp, Homo sapiens
ggagggtgtcctgaacagcaaggcaagagcggtgagcggggcgcctatgcctccttcgggagagacgcaggcgtgggcggcc

SEQ ID NO: 597094 - DNA, 100 bp, Homo sapiens
cagagctagactacaccctcatgagggtctgcaagcagatgataaagctttgtgcaaatgacatattagatggtgttgatgagttcattgagagtatttc

SEQ ID NO: 597095 - DNA, 83 bp, Homo sapiens
ctgcagcatgtcctcctgcatctcctcctgctccccatcgccatcccctatgcaggcagactgccagattcacttacagcccc

SEQ ID NO: 597096 - DNA, 83 bp, Homo sapiens
atttcctgctcggaaccttgtttactaattgcacaattcagattcagaagcgtcaacagttagtcagaaagatacatgaagat

SEQ ID NO: 597097 - DNA, 75 bp, Homo sapiens
caggacagctgttccttggccatcccaaagctattctgggggcaacagaggacttaaagcagcgtcttggccaca

SEQ ID NO: 597098 - DNA, 100 bp, Homo sapiens
cgaggatccgcgggagctgcccggcagggcggagcctcccctcgcagtactatactggcaattgctggagaagattttgcaattgttgcttctgatactc

SEQ ID NO: 597099 - DNA, 98 bp, Homo sapiens
tgggtatagaacatcattggaagatcccaacagatgctactacaagccagctgaaattaaggtgctggtggatgtgccctgtaccacagaccgccact

SEQ ID NO: 597100 - DNA, 100 bp, Homo sapiens
accccacaggcccacagagacaggatcctggtgcacctgagccgtggaggggctgaagtccagatctttgctcctgacgtccctcagatgcacgtgattg

SEQ ID NO: 597101 - DNA, 100 bp, Homo sapiens
gaggatgagcttgagcacctgaccaaaaagatgctgtatgacatggaaaatccacctgctgacgaatactttggcaaagatgcaatctacacaatcccag

SEQ ID NO: 597102 - DNA, 100 bp, Homo sapiens
gttgcggcgaaaggaacggctgaaggccctacgggagaaaaccgggcgcaaggcctgtagtggtggagacacgcccagtggatgatcctactgctcccag

SEQ ID NO: 597103 - DNA, 58 bp, Homo sapiens
cttccagagcgtgaagatcaagatcgggcagcatctcatcacggcagttgctgaccat

SEQ ID NO: 597104 - DNA, 82 bp, Homo sapiens
ggagatggaagcgaaaactgaccgggacctgtgcaagccggattatatctgtccaagatgcgagtctggttttatcgaggag

SEQ ID NO: 597105 - DNA, 87 bp, Homo sapiens
tcatgcagtggtacaaggaccagaagaaactgcaccggaaatgtgcctaccagatacattggtgaagtaggagacatcgtagtggga

SEQ ID NO: 597106 - DNA, 141 bp, Homo sapiens
tcatgagaagtacctgaaaaccactgtcttcggcatgacaggccatctgcctgacttctgcatgctcatgatttggagcaagaggtggtggtggccttcccccgaagaaatttggtaatcctggggagcgtttgcgtaaaa

SEQ ID NO: 597107 - DNA, 50 bp, Homo sapiens
cggatggggagcgtgagtggcgaggattgatcggaagatgtcaagtactc

SEQ ID NO: 597108 - DNA, 75 bp, Homo sapiens
cagcagcaaaggggctgacacgtgccagaaaaatggctacaaacttcctagcacatgagaagatctggttcgaca

SEQ ID NO: 597109 - DNA, 101 bp, Homo sapiens
ggccccagggaggatgacgaacccaacctggtgcccggcccgcagggcatcttcgtctcccgcattgccgagggcggtgctgctcaccgcgcgggcacact

SEQ ID NO: 597110 - DNA, 101 bp, Homo sapiens
tcgggctgaagcgactgagtccgcgatggaggtattagaaaactactcggatgctccaatgacaccaaaacagattctgcaggtcatagaggcagaaggac

SEQ ID NO: 597111 - DNA, 80 bp, Homo sapiens
tccactggctggctgaggaccgtgtggactttgtctcggcgcggaagatggccggcggcgtggacggccccatcgggatc

SEQ ID NO: 597112 - DNA, 100 bp, Homo sapiens
ctcaagtatatcaagcattcaaattgctcacagctgatcctaaggtggatcatccatgccatggagtatgaacttcagatccgtggcggagacaagccag

SEQ ID NO: 597113 - DNA, 100 bp, Homo sapiens
tcaaggttgaagcagaagaataaggagaaggataagtcgaaggggaaggcgcctgaagaggacgaaggggggacttcccctgggatgacgaggatttccg

SEQ ID NO: 597114 - DNA, 100 bp, Homo sapiens
gtctatatgcttgtgcttctccaaaaacacccatccaggcagggggatatgatcctggtgtatagcctggaagcaggacgccgcctcttgaagctgggta

SEQ ID NO: 597115 - DNA, 75 bp, Homo sapiens
ctcttctccttcacagtaaagtggctgacaggcaaatgtacactggggaccaccatgttcacgtgacatcaagag

SEQ ID NO: 597116 - DNA, 75 bp, Homo sapiens
tgaggacgaggaccagtgggaggatggagcagaggacattctagagaaagcacacgtgtcaaagttcgactcctt

SEQ ID NO: 597117 - DNA, 82 bp, Homo sapiens
ggcaactcagaaacatcaggtccaagtgtggacgaatgtggaacctcgctctgtggctgtgttcccttggcactccttagtc

SEQ ID NO: 597118 - DNA, 100 bp, Homo sapiens
ctgggcccagagacgcggggacgggccgtgggcccccggaacgaggagctagtgaagatcctgcacaaggcactggaggccgcccagcaggagaagcggg

SEQ ID NO: 597119 - DNA, 83 bp, Homo sapiens
tggtggactactctcagcctactatctgtctggagaagagcctacagacctggtacctggatttttgcccgagatgattccta

SEQ ID NO: 597120 - DNA, 50 bp, Homo sapiens
tgaagatccacacctcactgcagtcgaagaccccagagggtataagtgaa

SEQ ID NO: 597121 - DNA, 100 bp, Homo sapiens
agatgccttccctctctgttttgtctgtgtgcacagaggaatcatcacctccaaatactggtcccacgctatttgtcgtagatgtccagacaagccagat

SEQ ID NO: 597122 - DNA, 146 bp, Homo sapiens
ctgccctgtgtgtaacaagaaattctccagagtggctagtctcaaagcgcatattatgctacatgaaaaggaagagaaggcggtcaccttctccttactatagtcgtggaggatacagatcacgttccagatctcgatcatactca

SEQ ID NO: 597123 - DNA, 98 bp, Homo sapiens
ggagcccgaggcgggagccatgccggagaagcgcgcgggcgcgcaggccgcggggagcacctggccatatcagcgggaacaagattggctgggagaag

SEQ ID NO: 597124 - DNA, 83 bp, Homo sapiens
cacatggtgtcagatgaatatgagcagctgtcctctgaaggaactgtggctgcaccatctgtcttcatcttcccgccatctga

SEQ ID NO: 597125 - DNA, 75 bp, Homo sapiens
tccatggtcttgcctccttgcaggtttgatattaaactgctctcagaattttcctcttgcctagcagatcagcat

SEQ ID NO: 597126 - DNA, 75 bp, Homo sapiens
catcttctgtcatatgctggagtcagccctcactcaggttcggaacctcacttacatggtgacccgcagggaaaa

SEQ ID NO: 597127 - DNA, 80 bp, Homo sapiens
tcatgctgctgtggtcattgctggtcatctttgttgacgccagagggaggcatcaaaaaaagattcggagcaaaactcag

SEQ ID NO: 597128 - DNA, 100 bp, Homo sapiens
tctgtggcctcgttacctgcaggtattgggagatccacagctaagacgccaggacccactggaagcctagaaatgttcacaagattcctttgcagttcac

SEQ ID NO: 597129 - DNA, 100 bp, Homo sapiens
aaagcaagaccccgagtggaagatatggctcgtggacagcagaaaattcagtctcagcagaaaaatgccaaaaagcaagctggacaaaagaagaaacaag

SEQ ID NO: 597130 - DNA, 147 bp, Homo sapiens
tttgtcgtatttgggttttgaaacttaccaggttatctctcaggctgctgtggttcatgccacagccaaagagcatctctcagggattcttaaaataaaataagtcactgtgaatacacaaaggaaatgaaaacatatacagagtgt

SEQ ID NO: 597131 - DNA, 100 bp, Homo sapiens
aggaacaaacggagacatgtgactttaccctcttcccctcgaagcaacactccaatggggactacagctattcacttcttcctgagcctgcacccagctg

SEQ ID NO: 597132 - DNA, 101 bp, Homo sapiens
gtcaggctgcacacacagagcgtgtcggagtgcatcacggaggacggcaggactgtggccgtgggggacatcgtctgggcccgttttacggagaagacttt

SEQ ID NO: 597133 - DNA, 100 bp, Homo sapiens
tctgttttggaagttagagaaaagggctatgaacgattaaaagaagaactcgcaaaagctcagaggtgatcgaactgtgagaatttggaaggctcgcaat

SEQ ID NO: 597134 - DNA, 98 bp, Homo sapiens
tagctttctccttctggtgtggggcccgagaaatggtggagtcaatgaagaaagtagcagggatggatgtggagctgacagttgaagaaagaaacctc

SEQ ID NO: 597135 - DNA, 74 bp, Homo sapiens
agtgagaagcaagaaggccctggacacagcaatatctctgggctttcacaggccaaacatggtgatccatgtgt

SEQ ID NO: 597136 - DNA, 100 bp, Homo sapiens
aataaagtacttaaacaaaaagccaaaaagaggagaaggggagaaaccaggcagtggcaaacaggctctgtgtgctccgggatggagcaggtgtgcagag

SEQ ID NO: 597137 - DNA, 100 bp, Homo sapiens
gaggagcgcatgcaacagaagtatgaggccagccgggaggacatctacaagcggggggcacccaagccaattgccattgaaccatgtgctgggaacagag

SEQ ID NO: 597138 - DNA, 75 bp, Homo sapiens
aaaagtgcctgcaatttgccatttatttgtaataagatgattcaacgagaagccgatgtaaaaaataaggtaact

SEQ ID NO: 597139 - DNA, 75 bp, Homo sapiens
tgtttctctctgcctgatttctcctgaatttggaaactatttatgacctcccttgccacttcacttctgcctttg

SEQ ID NO: 597140 - DNA, 100 bp, Homo sapiens
tagtggagctggaatggtgagaccaacatccgtgacacctggactctttcaggttctgaactgcagaatcctactggatgtccacttggatgtcctgaag

SEQ ID NO: 597141 - DNA, 86 bp, Homo sapiens
gtgacagtaactgaacattggtctaaagtctttccaaaaggtcaaggttcacaagctgtgtgtgccactgaggtttttaaaatagc

SEQ ID NO: 597142 - DNA, 98 bp, Homo sapiens
agtccgagctgagatccatctgcaccacggtgctggagctgactgctgggcaggaacgtctctcaggagaaagagtggaagagaaaattgtgaactaa

SEQ ID NO: 597143 - DNA, 50 bp, Homo sapiens
gcctcccgaatagctgcgattacaggagccaaggcaaagagggaccactg

SEQ ID NO: 597144 - DNA, 100 bp, Homo sapiens
ctctcactaagcagttggaggctgtgtctgtacagctattggaatcagatgcaaagatggtgttgtctttggggtagaaaaattagtcctttctaaactt

SEQ ID NO: 597145 - DNA, 83 bp, Homo sapiens
gccggcagctgctgcctcgcgcccgggagcaggaggagctgctggcgcccgcagatgttccagggtctccctccactgctgta

SEQ ID NO: 597146 - DNA, 88 bp, Homo sapiens
acaaaagacaactctgcttttccagaaactgtgccaggatcacgcttcgtgctctgtctgatgatggagtatctgatcttgaagaccc

SEQ ID NO: 597147 - DNA, 51 bp, Homo sapiens
ttttcgccttacattcttacgaggtggcagtccatgtgtcctctgcgccag

SEQ ID NO: 597148 - DNA, 75 bp, Homo sapiens
ccatgagattcccaccttctttatctgaaacaaacaaggtatcagctctgtgataacagcgtgggggtgctcttc

SEQ ID NO: 597149 - DNA, 71 bp, Homo sapiens
gcaagtgtaagaagtgcgaagggccttgccgcaaagattctttgtgggaaagagattcctcgctggatcaa

SEQ ID NO: 597150 - DNA, 100 bp, Homo sapiens
aagtgcgcgccctggcgggtccggaccaagggttcttctttgagccaactgttttcacagacgtggaagaccacatgttcatagccaaggaggagtcctt

SEQ ID NO: 597151 - DNA, 100 bp, Homo sapiens
cacaggaattgtggatggttcggggagcattggagctgcagtgggccaggagaggagttcattacttcggaagtggtacaatttaatgatacaaaataag

SEQ ID NO: 597152 - DNA, 100 bp, Homo sapiens
cgcgcggcgctggagagagacaagatgtccgccagagctgcggccgccaaggtgtggatgaggtcaccattgtcaacattttgaccaaccgcagcaatgc

SEQ ID NO: 597153 - DNA, 83 bp, Homo sapiens
cggagcctggcgcagcctccctctattaccagggactttgaacatgtcggggatcgccctcagcagactcgcccaggagagga

SEQ ID NO: 597154 - DNA, 75 bp, Homo sapiens
tggatgttcttggacttgacggagtgatttgggccccgatgttggctatgaagctattggtcttgtggacagtag

SEQ ID NO: 597155 - DNA, 100 bp, Homo sapiens
cggctgcgtcgcccgaggcgaggaggagcgctggcgactactggtgcctggatgatctgtaccgggagatggtgagatgctatgtggaaatcgttgagaa

SEQ ID NO: 597156 - DNA, 50 bp, Homo sapiens
gtgagatgtttcatcccaacatgaagaaaaaatgactgctgcccgcatta

SEQ ID NO: 597157 - DNA, 100 bp, Homo sapiens
ggtggaggaggagtccccaggaaagcgcctggacgcagagtgtgtggcaggccccaacatcgccgccatcgtcgggggcaccgtggcaggcatcgtgctg

SEQ ID NO: 597158 - DNA, 100 bp, Homo sapiens
atggcggatgccctgcagtacctgcagaaggtctctggagacatcttcagcagggatgtcgctgggggccaagggcgccgccggccctctgccctccgag

SEQ ID NO: 597159 - DNA, 100 bp, Homo sapiens
ggaagagatcccctagagtaaatctgtgcattaaacctgtaacttcattttatgatatcccagacttctgctggatgtgtctaggagattggaagactca

SEQ ID NO: 597160 - DNA, 90 bp, Homo sapiens
ttggacttctcagcctccagaatggtttttcgttggaatatacgttgcacatttatggcgattctgagtgtgagggcagacttctgccag

SEQ ID NO: 597161 - DNA, 90 bp, Homo sapiens
ccggggcttgccctggtcttgctcggccgatgaagtgcagaggtttttttctgatcatcatgcatgtattttgcacctaccttgattcca

SEQ ID NO: 597162 - DNA, 74 bp, Homo sapiens
ctggagcacaaggagctcggggagagagagcatcagtgatgtcacgtttggagcaggggtcagttacatcggga

SEQ ID NO: 597163 - DNA, 50 bp, Homo sapiens
tgacaaggcactgctttttcatgacgggagaagaaatgggtgaccgttgg

SEQ ID NO: 597164 - DNA, 82 bp, Homo sapiens
gctggacggcgagcgcgagcggcgcgagaaaaacagcagagaggggcagcaggatgaatgtgggcacagcgcacagcgaggt

SEQ ID NO: 597165 - DNA, 89 bp, Homo sapiens
gagagaggaaaaggatgaaggccttgatgacaatgatgggtcttcgggattcagcgttctggatttgttaaggattccaagtaactctt

SEQ ID NO: 597166 - DNA, 100 bp, Homo sapiens
gaagtttctaggaaaggccggacaccaggtggtccccaaaaagaaagagcgtaaggtggcttccgatgatgacatctctgagcaggacggggaggtgaac

SEQ ID NO: 597167 - DNA, 80 bp, Homo sapiens
gccgcctctgtattacttaccaggtgctcttacagcctgttccaagtgtggcttaatccgtctccaccaccagatctttc

SEQ ID NO: 597168 - DNA, 97 bp, Homo sapiens
gaaggaaattgtcccgaatccctgcaggaatactcccccagttgcaagaggcgcaggaccgtggaagacttcaacaaattctgcacctttgtcttgg

SEQ ID NO: 597169 - DNA, 75 bp, Homo sapiens
gcttctcaggcagacctggtgtctccagctgatgatttgtccctgtctgaaggaacctgggcaagtctggcctgc

SEQ ID NO: 597170 - DNA, 90 bp, Homo sapiens
tttggtcctatcctcaactacctccgccacgggaaactcatcatcactaaggagttggcagaagaagtagagacggggtttcgccatgtt

SEQ ID NO: 597171 - DNA, 100 bp, Homo sapiens
gtttttccttgagctgaacgtcttgcaacagtggccgcacgcatagatcaagatattttggaaactatattgatagacagctgtatcttcccaagtacca

SEQ ID NO: 597172 - DNA, 75 bp, Homo sapiens
ctgtgctcgcgctactctctctttctggcctggaggctatccagcattcttctgatgtagagcgactggaaagat

SEQ ID NO: 597173 - DNA, 100 bp, Homo sapiens
aagaagtaggcattgaccccttgtccagttactctaacaagtctggaggtatggtgatccggtccaccgtgtggttaggattcccaaattttgttgacag

SEQ ID NO: 597174 - DNA, 81 bp, Homo sapiens
gggatcttcaaccacctcgagcggctgctggacgaaggtgtggacactgccagcggctgcagccgacttggaatgacctgg

SEQ ID NO: 597175 - DNA, 50 bp, Homo sapiens
cccgggtcgtctttcgtgtggccgcgaggaatctgcaagcagaatatgac

SEQ ID NO: 597176 - DNA, 100 bp, Homo sapiens
ttgtgttgtacagccagaaaccggggaccttaacaatccacctaagaaattcagagtggaagtatgcgagacttaagagctcaagtgactagtggtctcc

SEQ ID NO: 597177 - DNA, 50 bp, Homo sapiens
cgtgtatggcgtgtgcgtgccagatagaggaactgatgaatgcactggag

SEQ ID NO: 597178 - DNA, 80 bp, Homo sapiens
ccgaggaggctttcctgctggtggcaaccgcctacgagacactcaaggaagcagttcaggtacttttgaagcattctgca

SEQ ID NO: 597179 - DNA, 75 bp, Homo sapiens
ggcagatcctcaggggcaagtacagttactctggggagagtcggatggcagagagcttgcgcctctttgactcca

SEQ ID NO: 597180 - DNA, 75 bp, Homo sapiens
ttgcaatccagccaaatacaactggaaaacagctttttgatcagtaccaaatatgccccaacagcggcaagacca

SEQ ID NO: 597181 - DNA, 97 bp, Homo sapiens
cgtcctggaattacttcaatcaagaactcgctttgaacgcttgcttatgagaataggacatcaatcaaagaatgccccagtggagctaaaaattaga

SEQ ID NO: 597182 - DNA, 98 bp, Homo sapiens
gtcagggctgcgcctctctgcagcagattccactgtgtaaagtaattagattcaacatagactacacgattcatttcattgaagagatgatgccggag

SEQ ID NO: 597183 - DNA, 73 bp, Homo sapiens
tctttcctaccatctaaaatacgaaggtttctggctggaggagaggagacgccgtgagcgggacgaccagatg

SEQ ID NO: 597184 - DNA, 75 bp, Homo sapiens
ccgggatctcaggtcctcgggggcggcggccacgccaaggacggtgctggcctacatgcagttgctggaggacta

SEQ ID NO: 597185 - DNA, 75 bp, Homo sapiens
ctgatgagtcccactgtgctgagggttatgtggtccgaatcagtggtgggaacgacaaacaaggtttccccatga

SEQ ID NO: 597186 - DNA, 100 bp, Homo sapiens
cgtcgcccgaggcgaggaggagcgctggcgtattggtaaaggttttcaaggtgtcatgaaaagatggggatttaaaggccagcctgctacgcatggtcaa

SEQ ID NO: 597187 - DNA, 109 bp, Homo sapiens
tgaccctgtaacccaaaggaggaaacagctggctaagctcatcattgttactgagtatgcagagaacatcggggacggccggagcccggagttccgggagaacgagcaa

SEQ ID NO: 597188 - DNA, 98 bp, Homo sapiens
cgggtgggagtgacccgattttccaggcccgtacagaattcctacggaagaaagccagacatcagaactcactgcctgagcttgaagcagcagaggcg

SEQ ID NO: 597189 - DNA, 82 bp, Homo sapiens
gattacgctatttcttgccgtttgacaaaactaatagggatgccaaaggaaaaatatgatcctccagatcctcgcagaattt

SEQ ID NO: 597190 - DNA, 75 bp, Homo sapiens
agctcctgggcaaggggacgtctgcagctgattacctgtagtcaaccacagtctgaaaatattaaggtattttaa

SEQ ID NO: 597191 - DNA, 83 bp, Homo sapiens
gcgccaccgagtccggaccggagactttggggcctaactaggttcagccgtctgtatatctccccagatacctgaaactgacc

SEQ ID NO: 597192 - DNA, 50 bp, Homo sapiens
aattgggtcctgcaccaaaaaagattgggtctcactgtgttgcccaggct

SEQ ID NO: 597193 - DNA, 98 bp, Homo sapiens
ggcaggaggaagagagagagaggtttttggctttcacccccaaccagtgaccaaagacttgaccactcaaagtccagctccccagaacactgctcgac

SEQ ID NO: 597194 - DNA, 50 bp, Homo sapiens
cgaatcgttaaacatctgaaagggtcaggagagcttgtttcatatccata

SEQ ID NO: 597195 - DNA, 76 bp, Homo sapiens
tgccctccgctcagctcgagcttccctcgtggccgacggaacaatgaagttccatgatccagactcagcagttgtg

SEQ ID NO: 597196 - DNA, 100 bp, Homo sapiens
tggtggcgcccctccccgtgaccaccgctgcgttttctcggggtggtgtgggcatggaaggaaggccagtggagacaatggatgatcttgttcttagcag

SEQ ID NO: 597197 - DNA, 82 bp, Homo sapiens
caagcccagagagagacgtggagagggacgtcttcctgtatagagcgtacctggcgcagacgcatcttctctccagactgcc

SEQ ID NO: 597198 - DNA, 72 bp, Homo sapiens
ggacaacggctgcggcgacaattttatgaagactggcccatttgcagagcactccaaccagctgtggaacat

SEQ ID NO: 597199 - DNA, 100 bp, Homo sapiens
tggcccccggtgcaagaggcgcaaacaagccaatcccaggaggaaaaacgacctgtcatttactccatcctttatagtgatgctacaggacgaagaggaa

SEQ ID NO: 597200 - DNA, 82 bp, Homo sapiens
ggccagggaaccctggtcaccgtctcctcaggtgctcttacagcctgttccaagtgtggcttaatccgtctccaccaccaga

SEQ ID NO: 597201 - DNA, 100 bp, Homo sapiens
gaaatgtgtgcagactacatggcatctaccataggggatccaccttgatgttcagtgaagagtaccagaaaagtctgctagagcagtaccatctgggtct

SEQ ID NO: 597202 - DNA, 100 bp, Homo sapiens
tgtgaaggtgtcatttctaagattatcatcttcagcagtggtggtgaagttaaatgtgaatgttatagttttgccgctggactcttccctcccttccccc

SEQ ID NO: 597203 - DNA, 83 bp, Homo sapiens
cagaaagcggcttatcgaacagagccgggagttcaagaagaacactccagaggtggtttatgaaataccagcatgtagaccca

SEQ ID NO: 597204 - DNA, 99 bp, Homo sapiens
agaaagagaaaggatttctaagcaggaactccccaggggggattgacggtgaagatgctaatacctgcccagcatcgaccctagtgcgggtcccaagac

SEQ ID NO: 597205 - DNA, 53 bp, Homo sapiens
agacttggcccagattccacagaaggaagacccactacgttatctgagacaat

SEQ ID NO: 597206 - DNA, 90 bp, Homo sapiens
gccgtccagcagatggcggatgccctgcagtacctgcagaaggtctctggagacatcttcagcaggtatcatgatattagctggtttgac

SEQ ID NO: 597207 - DNA, 99 bp, Homo sapiens
cagaagcctggatacaggactcagactcttactgttaagtgggcagaccaacatccacctcagcaaaaacttcttcctgacgaatcgcgccagggagcg

SEQ ID NO: 597208 - DNA, 95 bp, Homo sapiens
atctgcacttcgcattttggcattgacatttaattttagggtcctttatatagaagggagaatgctgttgatggagtaatgaatggtgaatacta

SEQ ID NO: 597209 - DNA, 75 bp, Homo sapiens
gtttgtggatcgctgtgatcgtcacttgctcaccatggatgatgatatcgccgcgctcgtcgtcgacaacggctc

SEQ ID NO: 597210 - DNA, 100 bp, Homo sapiens
ctgaggtgaaccttcgaccttggacttctcagcctccagaatgtttggctgggatcactcgcttcacaaaaggaaaagacttcctcctgtgaagagatcc

SEQ ID NO: 597211 - DNA, 82 bp, Homo sapiens
caaagattacaccaagatctgtgctgaccacaggaattggatctactagtgcaggaagaagcactgcatgggtttcgagtga

SEQ ID NO: 597212 - DNA, 85 bp, Homo sapiens
gccagcaatcctcagacgcctcacttaggacaagtacaggtttgcagattccgccagcagcacagcaagctctacagatgagtgg

SEQ ID NO: 597213 - DNA, 75 bp, Homo sapiens
ctcaaaacatcctgaggacagtgcctggagtaagactttgaccccgacgcaggcttcagtgattgccgcggatca

SEQ ID NO: 597214 - DNA, 51 bp, Homo sapiens
cagcctcccaagtagctgagactacagaatagttctgtcccaagaagaact

SEQ ID NO: 597215 - DNA, 75 bp, Homo sapiens
caaacggcaagatgtccagtaatgtcccggcggatatggttccagcaacaaattatatatatacacccctgaatc

SEQ ID NO: 597216 - DNA, 74 bp, Homo sapiens
caccatggccctcctccaatggattcttttcctgggcccactgatgcagctctctatggattgcccttgtgacc

SEQ ID NO: 597217 - DNA, 90 bp, Homo sapiens
gaaaaggaatatgcattgaagcaaattgaaggcacaggaatatccatgtcggcttgtagagagattgcatttcttaaatgacgaagaggc

SEQ ID NO: 597218 - DNA, 116 bp, Homo sapiens
ggggcctttatttctcgtcggcggcgccctgcaccgcgcctcgcaaagctgtattcatcaccaaagaaaaaacttacaccaatgcagaaatcggttagtccattagtttggtgcag

SEQ ID NO: 597219 - DNA, 51 bp, Homo sapiens
ctctcatttgctggccatcggattgggatggactcaccctgtcacccaggt

SEQ ID NO: 597220 - DNA, 75 bp, Homo sapiens
gtggtattgtggaaattcccagaggactttggagaccagacctgtcatttactccatcctttatagtgatgctac

SEQ ID NO: 597221 - DNA, 100 bp, Homo sapiens
agcgcagtggcggcgcaaccagccttctagggcggcggaggtgctggagaatctggtaaaagcaccattgtgaagcagatgaggatcctgcatgttaatg

SEQ ID NO: 597222 - DNA, 101 bp, Homo sapiens
gttggggacagggatggaaaatggtggttccatgcagctccacagcacctgttgccttcattagcagcttttcctcctcttccctgcacttcccagaacca

SEQ ID NO: 597223 - DNA, 95 bp, Homo sapiens
cggaaaaggaacagattgttcctaaaccagaagaggaggttgcccagaagaaaaagataccacttgaaagatgtcattgtagggaagatatactt

SEQ ID NO: 597224 - DNA, 76 bp, Homo sapiens
tctattgcacatcaatgatatcatcccagctgatgaacttattagtcctaaagacattgatcctgtccagcgctat

SEQ ID NO: 597225 - DNA, 75 bp, Homo sapiens
acagtaacagtacttgggatcccccagttccaaagtgtcttaaaggtatgaaaactttcaaagacgactagcaca

SEQ ID NO: 597226 - DNA, 51 bp, Homo sapiens
ctgactttcagctatggaatcgctgttgttggcctactgtacccctgtatc

SEQ ID NO: 597227 - DNA, 50 bp, Homo sapiens
gtgacgaggacgaagtgtccgagggcagcccaatggatccaatggtgatg

SEQ ID NO: 597228 - DNA, 74 bp, Homo sapiens
atacacctgaaggaaggccggaacctggttgtccgagatcgctgtgcaccgaacaagatttgtgatgaaatgga

SEQ ID NO: 597229 - DNA, 50 bp, Homo sapiens
gccttgttaaactgtgccaggctcccctcccacccggtcactccgtccag

SEQ ID NO: 597230 - DNA, 78 bp, Homo sapiens
gcgatcaaggccaagtatccgccagtcaataggaagtacgagtgtctcttaaccttcattaactgtgcctatgtcaaa

SEQ ID NO: 597231 - DNA, 82 bp, Homo sapiens
gccagtgcggcatcacctcctccaagaccgtgctggtctttctcaacctcatcttctggtattgactcggagacaaaaagag

SEQ ID NO: 597232 - DNA, 75 bp, Homo sapiens
ggggctgggcctgccatcattcaaaccagggccaatggagatcttcgtggatgatgagacgaagttgacgctgca

SEQ ID NO: 597233 - DNA, 96 bp, Homo sapiens
aagagattcagccagcacactcctcgcgagcaagggcgaactttctgaccaagtatacaactacccagagggcctaggagaagtgctgtatagaga

SEQ ID NO: 597234 - DNA, 100 bp, Homo sapiens
agatattggccgacaaggaagtgaagaaggcgcatcactcccagctgcgcaaagcttgcgaggtggcgttaggaggtgaagatcgagaacttattcagag

SEQ ID NO: 597235 - DNA, 100 bp, Homo sapiens
tttgttacaagttggcttatgagtggaacatggctagcaggaatgcttactgttgcgtggttcgttattaacaggggcaagctctgtgtgattgattgga

SEQ ID NO: 597236 - DNA, 50 bp, Homo sapiens
agctgcttcccaataaggaaacaggggacttgatctcatcttcatgccag

SEQ ID NO: 597237 - DNA, 100 bp, Homo sapiens
ctgcacggcagtctgtttatgagggtctcatgttccggtgcagcgccagctgttgtgaggacagccaggcctccatgaagcaggtgcaccagtgcatcga

SEQ ID NO: 597238 - DNA, 100 bp, Homo sapiens
cgttggggtctgcgccctaggatgcactgagatggtacatcaggataactgctcgtatcagaataatcatgggccagactgggaagaaatctgagaaggg

SEQ ID NO: 597239 - DNA, 100 bp, Homo sapiens
gtggaagcatttggcggcataccaccctgcactgtgagggagatgttaatctctgtggccctaggccaggtgttatccctccttatttgtggaattggct

SEQ ID NO: 597240 - DNA, 96 bp, Homo sapiens
agggggcggcaccgccggtcggctccagtcgcctccggaggaaggaagaagaggacgccgggcgcgcaggctttggatctggctgccctctccaca

SEQ ID NO: 597241 - DNA, 75 bp, Homo sapiens
ttccatttaccatgaacatcttagtcaaggttgtctgcattcaaaagagcattctattaaagctaccttaatttg

SEQ ID NO: 597242 - DNA, 73 bp, Homo sapiens
agtcagcaaaacacactaaagattgggcagtcactggggagaacatggacacccgctccgggagccagtgttc

SEQ ID NO: 597243 - DNA, 75 bp, Homo sapiens
ctcccatccctgcagcatgaacaagaaatacaaacctggtcgatgtgatgatattttgaaatggaagcctcccag

SEQ ID NO: 597244 - DNA, 83 bp, Homo sapiens
cgcactgggaccccggaatcccgcgcgctgcccacgattcgcttctgagcaatggctgccatccggaagaaactggtgattgt

SEQ ID NO: 597245 - DNA, 101 bp, Homo sapiens
agagaatgttccgggatgtgaaattattcacaatctattgttcaaagaagacagttgattatgggacggaagaacatccagtcatggataaaaatgagctg

SEQ ID NO: 597246 - DNA, 83 bp, Homo sapiens
ctcccaagtagctgggataacagaattttttagacaacttccctagcagtgacaccctgtccttcattgcaaggatattcctg

SEQ ID NO: 597247 - DNA, 110 bp, Homo sapiens
cgacccgcagagggctttcttcgccgtgctggccgcggcccgcctcagcatctggtacagccgagatctgagtgatgagacgtgtccccactgaggtgccccacagcagc

SEQ ID NO: 597248 - DNA, 75 bp, Homo sapiens
aagccaagagatttcctcataagaagcctcccgcgacgatgcccctcaacgttagcttcaccaacaggaactatg

SEQ ID NO: 597249 - DNA, 75 bp, Homo sapiens
acaagaaaattgaaagatgggaaattagtggtgacaatgcagatcttcgtgaagactctgactggtaagaccatc

SEQ ID NO: 597250 - DNA, 82 bp, Homo sapiens
cagattcgcagtggtcgcttcttctccttgctgtttcagatagagagccttgcccgggaggcctccactggagtactaaaag

SEQ ID NO: 597251 - DNA, 83 bp, Homo sapiens
gcctccctcaccttggacacctcgcttggagcagccatcagcagggaccctttctacgaaatgctcgcagcacggaaaaagaa

SEQ ID NO: 597252 - DNA, 82 bp, Homo sapiens
caagctcaagcagcaggaagatcttttgaggggtctgttcctggtttcccagatgcataaaggaagacatatccctcccctg

SEQ ID NO: 597253 - DNA, 82 bp, Homo sapiens
tttcccgagaccgtcctggcgcgatgcgtcaagtacactgaaattcatcctgagatgaggagccttcacgtaaatgggtcca

SEQ ID NO: 597254 - DNA, 90 bp, Homo sapiens
cgcttctgcaatccaagccgactgatgactggagaggatggctactatttcaccaatctgagccatgtccattggagcccgttcccaatc

SEQ ID NO: 597255 - DNA, 100 bp, Homo sapiens
aaaaagtatcgtcgagaagcctatcatcgatagggatgaggaagaaatgaccaaacgagatgacaaaagagatatcaacagatactgcaaggagaggccc

SEQ ID NO: 597256 - DNA, 100 bp, Homo sapiens
ctcgaacgagtgtgggcgcgaggcaggctgactgtgctgtcctgattgttgctgctggtgttggtgaatttgaagctggtatctccaagaatgggcagac

SEQ ID NO: 597257 - DNA, 100 bp, Homo sapiens
tgctggtgggagtgtagcagtgaggaagaccagagttcgccctcgtcgccgtcttggttttgggagaaacaaaggcagcgctgccctcgggggagcattg

SEQ ID NO: 597258 - DNA, 99 bp, Homo sapiens
gcctccaggccaagagggatccttcacccgtgtctggaacctagaaagattgtacaatgaatggtgattctcgtgctgcggtggtgacctcaccacccc

SEQ ID NO: 597259 - DNA, 82 bp, Homo sapiens
aaatgtactccttgtgtcttttagcaacattaatggacaaagaaacagccttggtataatagcacgttagcatcaagacgaa

SEQ ID NO: 597260 - DNA, 90 bp, Homo sapiens
gtcgtggtccagacagtttagcagaacagcctccgcggctccggggagaaggtttactcatggggtagcaatacctttggtcaacttggg

SEQ ID NO: 597261 - DNA, 101 bp, Homo sapiens
gagaccttagaaaggatcaggactggcggatggcccactgcgtgaccttggttcagctgtccatttcctgtgaccatctcattgacaaggacatcggctcc

SEQ ID NO: 597262 - DNA, 74 bp, Homo sapiens
tcctgtacagcctgcagaactgaggagaacatttgcctgcactgggcggcgttctccggctgcgtggacatagc

SEQ ID NO: 597263 - DNA, 75 bp, Homo sapiens
ggaaccaaggagacgctcctggcactgcagatgagctgcttcagaaagagcaaaactattcagatgacgtcttgg

SEQ ID NO: 597264 - DNA, 90 bp, Homo sapiens
ctggtggaagccagcagaaccaggaaactgttaaggcagcaataatagaagagcagaaacgaagtgaaaaggctgtggaagaggcagtga

SEQ ID NO: 597265 - DNA, 100 bp, Homo sapiens
tcttcatgtttgctttcgcttccctctacacgcaaatcccaggctgaccggttccctgatgtgttacctgcttctgctactgatccaaactgcagaactt

SEQ ID NO: 597266 - DNA, 99 bp, Homo sapiens
caagaaggacgtcgggctctggcatggcatcctgacatactatactggcaattgctggagaagattttgcaattgttgcttctgatactcgattgagtg

SEQ ID NO: 597267 - DNA, 142 bp, Homo sapiens
agccaccccgtccgggagggaggtggggggggtcagccccccgcccggccagccgccccgtccgggaggggatgactccagcagagcacctcactcctttgaagagcacagaggaagatgtcagcccagtcccttcctgcag

SEQ ID NO: 597268 - DNA, 100 bp, Homo sapiens
tgatattttgacctccttccatgaatcacaaatgttcttaatggcatctagaatggccacggaaaggtatgatatatttgatccaagacagtccattcca

SEQ ID NO: 597269 - DNA, 83 bp, Homo sapiens
ggtgcccgtggaccacaggccctcgttgcccagatcatcaagatggtgctcatgtggaccagtggtgacgccttcaagacggc

SEQ ID NO: 597270 - DNA, 83 bp, Homo sapiens
cacacggggacgcctcctccccacccttcctcgcagctcttcctggtgctggagaatctggtaaaagcaccattgtgaagcag

SEQ ID NO: 597271 - DNA, 51 bp, Homo sapiens
tgctgcataagaccttgtcagagaaaattgcctttaaaggaagaagatggg

SEQ ID NO: 597272 - DNA, 75 bp, Homo sapiens
aacaccttaaacctcctctggattcaagttaaaggaatgtcgttgtctgctgggtcttcccctcttcattccccc

SEQ ID NO: 597273 - DNA, 80 bp, Homo sapiens
gctcatcatgatattgtacgatttctggtacagttagatgactacagccatatcagcgggaacaagattggctgggagaa

SEQ ID NO: 597274 - DNA, 74 bp, Homo sapiens
aacccaccaagccccgctaggagccacctagactggatgcagagcatggaacatcatcttcagcgggctatttc

SEQ ID NO: 597275 - DNA, 74 bp, Homo sapiens
gaaaatgaaaaggaagcttcaggtggagacagcccgaagctgagatctgtatctgtggacctgaatgttgatcc

SEQ ID NO: 597276 - DNA, 101 bp, Homo sapiens
gaagaagcaggatgaactgaaacggattgccagagaattggcagaagctggatctaccatgaaagacttgtgaatccaggaagagagactgactgggcaac

SEQ ID NO: 597277 - DNA, 98 bp, Homo sapiens
tcacccaggtgaccaaccccaaggaggacgagggccggttgccgggcgcgggcgagaaagctcagaccatgaccgacttcataccttggtaactgaac

SEQ ID NO: 597278 - DNA, 75 bp, Homo sapiens
agcttcagcatcaacttcaacatcaccaaggtaagaatgattgatgttggctgatattggagtgctcattcacat

SEQ ID NO: 597279 - DNA, 98 bp, Homo sapiens
aaaatccagcagtatgacaaggcactggatgatgcaatcaaagctcgacttctcaatcccaagtggccaaagatgcaccagcaaggaatactgaagac

SEQ ID NO: 597280 - DNA, 100 bp, Homo sapiens
aagccactaaccctggagctagtggaggaaactgtgcaggctatggaggtggaggttcaagacggccccaatgaagatggggagatgttcatgcggccag

SEQ ID NO: 597281 - DNA, 83 bp, Homo sapiens
gacggcgagcgcgagcggcgcgagaaagcggctatgagaggttttcctccgagtacccagaattctgttctaaaaccaaggcc

SEQ ID NO: 597282 - DNA, 82 bp, Homo sapiens
ctggtctgcggcagccatgctgaactcgtatggagaggttttaaaatcaaagatgggaaaatcggagaaaattgcccttccc

SEQ ID NO: 597283 - DNA, 100 bp, Homo sapiens
accactggacctccaaggaagccacgtgcagacatctacaaccttcgatctcctgacgagctgaactagaagcttttgaaaacagactgaagggtcgtcg

SEQ ID NO: 597284 - DNA, 74 bp, Homo sapiens
agacgacgtgatatttccaacacacttataatgctcgcagataagcatgctagaagggaaaaggccgaggcatc

SEQ ID NO: 597285 - DNA, 100 bp, Homo sapiens
tgatggagaagatcaaagagttgctgcctgactgtgccactccacgggcagtccccactagtgacgggtgaacgtgtggccaccagcatgcggacggtag

SEQ ID NO: 597286 - DNA, 100 bp, Homo sapiens
gaaataaaaatggatgcaagtttaggaaatctatttgggtgctgataagactgtgaaaggcccagatggactgaccgcctttgaagccactgacaaccag

SEQ ID NO: 597287 - DNA, 100 bp, Homo sapiens
gcttgggaaggggaaggaaacctctctgaaatctgacacctgctctcccggcaaggaaacttcgcaggctggtggaacaatccaaagttttaatcaaaga

SEQ ID NO: 597288 - DNA, 73 bp, Homo sapiens
gggtgaccaacgcaagaacatatgccagttcctcgtagaggccctcgggaccaaggatcacgtcatgactccg

SEQ ID NO: 597289 - DNA, 74 bp, Homo sapiens
actaattcaccctgatgattctgtaaaaatcctcactctttcccagatgaattttgataagaggcaacatgaag

SEQ ID NO: 597290 - DNA, 75 bp, Homo sapiens
aagagaagaaagatgaaacttcgagctcctctgcctggagtactcgggtactttgagttcagtggctcaccccag

SEQ ID NO: 597291 - DNA, 80 bp, Homo sapiens
gggcgccttcacccccgtggtgcggcagcgcacgctgcagtccagggaacgcccttttgcttgtgactggcagggctgcg

SEQ ID NO: 597292 - DNA, 78 bp, Homo sapiens
tcagacctgccaatttaccagagataattgataacaccctgtaacagctgagtgtggccgacgacgatgccctcgctg

SEQ ID NO: 597293 - DNA, 100 bp, Homo sapiens
gtgccagacaaacctctccaccctcagtgacccggtgcagctagaagtccatatcgtgcctcctttggtgaaggtgacacatcatgtgacctcttcagtg

SEQ ID NO: 597294 - DNA, 83 bp, Homo sapiens
gtttagcaaaagttcatctccttctgcatccttaactgagaatgagccttgatgacttacaagccctcaaggggaagcatttt

SEQ ID NO: 597295 - DNA, 96 bp, Homo sapiens
gacgaagagattgggaaggtggcggcggcggtgcctgtcatcatctccctgaaaagcaaaggcctcatctccatggcacaggtgatgaaacaggaa

SEQ ID NO: 597296 - DNA, 124 bp, Homo sapiens
gcttcggagcggccggtactgttgaaagcgacaagtggaggcgccgctctagcggccgggactctgaactatggcgtcaggtgacacacagtcttttgcacagaagctccagctccgggtgccc

SEQ ID NO: 597297 - DNA, 101 bp, Homo sapiens
tctgtcttcggtggactccttcggcagtccacccaccgccgccgcctcccaggtgcatggcggcctgctgcagatcttccctgagggccggcccgtggtag

SEQ ID NO: 597298 - DNA, 98 bp, Homo sapiens
tggcagatccttcagcaaaagctgtccttacaggatttcaaatatgcgtgcattagagaatgattttttcaattctcccccaagaaaaactgttcggt

SEQ ID NO: 597299 - DNA, 83 bp, Homo sapiens
cccgggactacgaccacctcttcaagctgctcatcatcggcgacagcgaagcctcagtgtaaagtctgccgatcatgccctgt

SEQ ID NO: 597300 - DNA, 83 bp, Homo sapiens
tggctctgccccggaagggcctgcatccccaggctcccaccgcttacaaacacgcagatggcaagaagattgatggcaggagg

SEQ ID NO: 597301 - DNA, 75 bp, Homo sapiens
tatttcagcagttggccacaacttcattgctgggaaaagagctccctctttgcccactagcagggcattagctgg

SEQ ID NO: 597302 - DNA, 100 bp, Homo sapiens
aaacctggggtcacagagatggacatggaatcgagggcagaagatctgggtttgagtccagcagtgctttagttgtgttcgatatatacagagacagtag

SEQ ID NO: 597303 - DNA, 51 bp, Homo sapiens
ttgccaacagtccttgggttgttcagatacgtggttgcagtaggattggag

SEQ ID NO: 597304 - DNA, 100 bp, Homo sapiens
gatgaagaggatgatgtttttggtgaaggaccgcagctgaatgcacagctagaaggttggctttcacaagtacagtctacaaaaagacctgctagagcca

SEQ ID NO: 597305 - DNA, 102 bp, Homo sapiens
aaaagctgctcagagtctcaatgaacttggtgggaaagcagtgccactctccgcttcacagatgccccctgccaagatgtcagtgatgctgccgtcagtgaa

SEQ ID NO: 597306 - DNA, 95 bp, Homo sapiens
agcctgcaagattgtggtgcacacgccctgcatcgagcagctggagaaggtaacagcactaacattgttgaaagaagaagacttcccaaatcttg

SEQ ID NO: 597307 - DNA, 82 bp, Homo sapiens
taaggacaaaagccaagaggaggacagttcgctacacagcaatgcatcgaggtggtggcagaagtgggatccaaagtagagc

SEQ ID NO: 597308 - DNA, 100 bp, Homo sapiens
tcagcctcccgggtagctgggactacagggtaaagcatcaagtcgaatatttgggtctgaaagagaacattcgagtgagaagagctggctatgcctatcg

SEQ ID NO: 597309 - DNA, 85 bp, Homo sapiens
aaagaggaggggaggaggaggaggattcagggaataggagctggggagcccttctgcgccacagagttgtggaaagtaaaaatgt

SEQ ID NO: 597310 - DNA, 76 bp, Homo sapiens
agtaccagcacttcatccagcagtgcacagtgagtatcttcccagtcttgttattctctttgcttcatgctgccac

SEQ ID NO: 597311 - DNA, 100 bp, Homo sapiens
tgggcgtcgaccacagtattccaaccctcctgtgcagggagaagtgatggaggtgctgaacagcattttttttgagcttgaagcggatgagagagagccc

SEQ ID NO: 597312 - DNA, 50 bp, Homo sapiens
ctgggctcaacagaacacaggggtatattttcctggagtacgcgtcccct

SEQ ID NO: 597313 - DNA, 101 bp, Homo sapiens
cctgcagagcgcgcagtacctccggtggatctccttacgtagcagccaaaataaatgaagcaaaagacttgctagaaacaaccaccaaacattgatgctta

SEQ ID NO: 597314 - DNA, 100 bp, Homo sapiens
aagaagaggacgccgggcgcgcagtttcgttgattgcaaggagtgtggccggaagatgcatcagatttgcgttctgcactatgacatcatttggccttca

SEQ ID NO: 597315 - DNA, 82 bp, Homo sapiens
cacctgagtggcgcggcggtgtcaggatttttagactctgaggagcagttggagctaatccacattatggaaatggaaacca

SEQ ID NO: 597316 - DNA, 83 bp, Homo sapiens
cacacaactcgggcctccccagcgacactgtccgcaggcttgtccaaaaggaaacatcggaatgaccacttaacatctacaac

SEQ ID NO: 597317 - DNA, 90 bp, Homo sapiens
tttgagaacagagtgctgttttagagctggcagcagcatctcagcccaagagaagcgggctacattgagagacctcagctgattcgagca

SEQ ID NO: 597318 - DNA, 100 bp, Homo sapiens
tcgcctttctccgccagcatcccctccgcttcattctacagcttgtggtctctgtggctatgaggtgtcaggtcgcattgaggccattgagggctcaaga

SEQ ID NO: 597319 - DNA, 97 bp, Homo sapiens
gtgcccgcggggctggagaaacgactctgcgccgccgctgcctccatcctgggcaaacctgcggacgccaaacgtaccaagaaagtcgggatcgtcg

SEQ ID NO: 597320 - DNA, 82 bp, Homo sapiens
tttcttaacctgggaagtggaaccggatatttaagtacaatggtgggcttaattttagaccaaactgcagctggaataccca

SEQ ID NO: 597321 - DNA, 100 bp, Homo sapiens
gtctgtacctactgatggtgctgtaaccacctcacagattccagcttcggaacaagagaccctggtatggcctcacaagtcttggtctacccaccatatg

SEQ ID NO: 597322 - DNA, 74 bp, Homo sapiens
gcactctggctgcgcttcaagtactacagcttcttcgatttggatcccaagtgtctcgactgcattgtgagagt

SEQ ID NO: 597323 - DNA, 132 bp, Homo sapiens
gtcagagctgccttctccccctgcacttcccatgtctctgagtgcaaagggccaacttaccaacatagtctcccaggatcagtcagccaagagacccgagattctcaaatcacggcagccgccagaggtgcc

SEQ ID NO: 597324 - DNA, 83 bp, Homo sapiens
tggttctggtgctggtattggaacagtctttggcagccttatcattggttatgccagaggaattcttcagttggataaagtgg

SEQ ID NO: 597325 - DNA, 98 bp, Homo sapiens
tctgctgttgctcttctccgccgcggcactgatccccacaggcttgcagatgggtcaagggttgtggagagtggtcagaaaccagcagctgcaacaag

SEQ ID NO: 597326 - DNA, 100 bp, Homo sapiens
ggcatcctccttgaagtatttggctgaggagttttcaatcccagggacggcaaaacagaacagaaaggcggagataaaaagaggggtgttaaaagaccac

SEQ ID NO: 597327 - DNA, 100 bp, Homo sapiens
cctgctgtccttcactgggagcactcaggtgggaaaacaggtgggcctgatggtgcaggagaggtttgctgagattggggattttgatgaagccttggac

SEQ ID NO: 597328 - DNA, 100 bp, Homo sapiens
cggatattgcgcaagactggggcgttggaaaccctagtcaagggtccagagaaggaggagaagttgagacaggcggtcaagcaggtgctgaagtgtgatg

SEQ ID NO: 597329 - DNA, 75 bp, Homo sapiens
gcagttccccagcagcccccaggatgtgcttgctctgcagtccttcatccaagcctacgccacctaccccaggga

SEQ ID NO: 597330 - DNA, 100 bp, Homo sapiens
aaatattcatcaacctagagctgccaagaagcattcttcatctaaagataagttatttcaagtaccattggaagaggaaggacaacgtggtggacctatc

SEQ ID NO: 597331 - DNA, 134 bp, Homo sapiens
caaattcgagaattccttgaacatcaagtcagctgtaaaattgaggagaaagcactactctcttcagtttggtgccttgccagctgattgtaatattcctttgcctccctctaaagaaggtggaactggccact

SEQ ID NO: 597332 - DNA, 82 bp, Homo sapiens
caggccccggcagcgcctgggacaagattctgaagactactttgaggtcaacattccaacagacctacgagcaaaacattct

SEQ ID NO: 597333 - DNA, 90 bp, Homo sapiens
ccaggacgacgaggagcagggcctgactgcgcaggggagttgctggaagccatcaaacgtgactttggttcctttgacaagtttaaggag

SEQ ID NO: 597334 - DNA, 100 bp, Homo sapiens
agaatgtacaacagacagtgagtgctaaaggcccccctgaaaaacggatgagacttcaactggctatgtggatgctggaagatggggaaaacttgtttca

SEQ ID NO: 597335 - DNA, 100 bp, Homo sapiens
tgcactaacagttcaacagttaactgcagctcaacagcagcaatatgcattagcagcagctcagcagccacatatagctcttcacctgaaagactatgaa

SEQ ID NO: 597336 - DNA, 100 bp, Homo sapiens
gcagacgcgggccagcctcagcaccgacagccgacgcgcagatagcagagccatccttggggtgccccacctcaaccagaatgcctggaacaacctggag

SEQ ID NO: 597337 - DNA, 90 bp, Homo sapiens
aagatcagccctttttggaaacatacaggatatctaccacttcaatagggaccaggggaagagacatgcgagggcctcatcatgccccag

SEQ ID NO: 597338 - DNA, 80 bp, Homo sapiens
ggagacggcggccttcgaggaggtgatgatggacatcggctccacccgggctttatcctgtggataaacgcagagtgaac

SEQ ID NO: 597339 - DNA, 90 bp, Homo sapiens
tcctgtgccaggtgccttgcgctgggtccagaatgtggatggtgtgttcaagaggagtacctctctctagaactgtacgctgtacctgca

SEQ ID NO: 597340 - DNA, 100 bp, Homo sapiens
cgcacacgctcggcgctgcgatccgcgcatataacgttatgaagggggccaaatcgggaaaaggtgcagtgaccagcgaggccctcaaggaccccgacgt

SEQ ID NO: 597341 - DNA, 90 bp, Homo sapiens
gaaccgctcgctgcagtccgagaacgccgcgctgcgcatctccaacagcgacctgagcggaatactcccccagttgcaagaggcgcagga

SEQ ID NO: 597342 - DNA, 100 bp, Homo sapiens
aagcagaatcgatctggtcggcttaccataaagagtctctgtctgtcaaatggaggcttcagggatgacttcttagggggcaggggaggtagtcgcccag

SEQ ID NO: 597343 - DNA, 74 bp, Homo sapiens
cgcagtcggcaaggagagacgtcgctgaggggcttgcctgaagcgagggcgcaaatctgtccaaggctgcctgg

SEQ ID NO: 597344 - DNA, 100 bp, Homo sapiens
cgagagctacacgttcacggtgccccggcgccacctggagagaggccgcgtcctgggcagaggtctgctgacatttgtgaactgtgcctatgtcaagtgg

SEQ ID NO: 597345 - DNA, 113 bp, Homo sapiens
aaagaattcaagaagtgagttgctgtttgctccataggcttacattagtcactctctgaaagagaacaaagtaattttctgaagggaagctgcagaatatggaaaacatatat

SEQ ID NO: 597346 - DNA, 100 bp, Homo sapiens
gtagagccgtgcaagtttgccggccccagggcccaggaagaagaccgaaaactgttagttggattcttagaagatgtaatgacgctgctttcattatctc

SEQ ID NO: 597347 - DNA, 100 bp, Homo sapiens
ctgaaatggcagacgatctcggagacgagtggtgggagaaccagccgactggagcaggcagcagcccaggatgcatcctcattcttggctgagtggcaaa

SEQ ID NO: 597348 - DNA, 51 bp, Homo sapiens
cttcttccccactcccgagacagggtgtatcaaggtcagaagaagtcaaaa

SEQ ID NO: 597349 - DNA, 51 bp, Homo sapiens
gtgatgtctgcaaccacatgatagtggatcagggagcagagaaacatgaag

SEQ ID NO: 597350 - DNA, 48 bp, Homo sapiens
gcggcggcgccatggcagggcttgcagtggggacgccctactacatgt

SEQ ID NO: 597351 - DNA, 75 bp, Homo sapiens
agagggtcagctgggacttcaagacggccgagagccactgctgtgctggaattgatgttcgtctgtgtgatgttg

SEQ ID NO: 597352 - DNA, 82 bp, Homo sapiens
cgcgtccgtgtgaagagaccaccaaacaggctttgtgaaatggctagtgatgagctgaaagagatgcggaaaaacttgacca

SEQ ID NO: 597353 - DNA, 78 bp, Homo sapiens
gcgaaggtgaagagttgtcccagctcggcccgcgggggagccccgggagccgcacggctttggtatcaggatgatgct

SEQ ID NO: 597354 - DNA, 98 bp, Homo sapiens
ccacccagactcagaccaccaccagaaccatcacctcggagacccagacaatcacagacttcacagagaatgcagttgtcttgacttcaggtctgtct

SEQ ID NO: 597355 - DNA, 83 bp, Homo sapiens
tttcaatagaaacagatatacagatgtggagaagttgaaacattgtagtcggtatatacatgacttatttccttcactcatca

SEQ ID NO: 597356 - DNA, 100 bp, Homo sapiens
gaactactgggacgtcagagcttctccgtgaaagacccaaggttgcctgtggctggagaaaggaatgtgctcatcaccagtgccctcccttacgtcaaca

SEQ ID NO: 597357 - DNA, 96 bp, Homo sapiens
gagggatccttcacccgtgtctgaccctgaaggaagattgggaatctgaaaaagatttatgtttagaaaatctacgcaaagaactgtctgcaaagc

SEQ ID NO: 597358 - DNA, 100 bp, Homo sapiens
ctggtctcaggcaaggtggggactgggcacatcatcaatacgtgaatggtagtgtctagaaagggtatgtcccttcaagagagaggtgccaatgtccaac

SEQ ID NO: 597359 - DNA, 100 bp, Homo sapiens
gcgaccgctgccgaagcatgaagaaggggtaaggcgtgagcccccaagatttcacggcctttgtggaggcccagaataagattactgtgccatttcttga

SEQ ID NO: 597360 - DNA, 75 bp, Homo sapiens
gacagatctgagagatactgagtccccacagagaccacctatcacacgctggaggagggcgtggtggagtactgc

SEQ ID NO: 597361 - DNA, 74 bp, Homo sapiens
cctggcctcgaggccgctgctgctggcgctcctgtcgttggcctcacagttagccaagttggccagaacttcac

SEQ ID NO: 597362 - DNA, 101 bp, Homo sapiens
caagaacagaatgaagaaagtcagggggactgcaaaggccaatgttggtgctggcaaaaaggttccagcaacagatagaaatgctttaagttcactctggg

SEQ ID NO: 597363 - DNA, 83 bp, Homo sapiens
cagagctggagtttgcaatccagccaaatacaactggaaaacagctttttgatcaggcaatttgaatcaacccatagaagtga

SEQ ID NO: 597364 - DNA, 75 bp, Homo sapiens
tcacgttttaatgccgagaggtctctgtgacgattttggctggagcattggatttgctaaaggagcttaagaata

SEQ ID NO: 597365 - DNA, 100 bp, Homo sapiens
accactgtggaacttgtgacaggctggttaaagcagcaaagtttggaaattttagcattcaggtgccaggaatgcagatgggacagccagtgccagaaac

SEQ ID NO: 597366 - DNA, 51 bp, Homo sapiens
gcacgacatgctggcctcgctgggttgcccccaagtttcctggcagtgtgt

SEQ ID NO: 597367 - DNA, 100 bp, Homo sapiens
gtaggatctgatgaaaattctcttcattctcttggactgaacttaaatactgatagggtcttgttttgccacccaggctggagtgcagtaatataatctt

SEQ ID NO: 597368 - DNA, 115 bp, Homo sapiens
cgcctccagcttgccaccaaagacctgcgactttgctcagatgggcaccaacaaatgcgccagccagtcgggcatgactgcctacggcacgagaaggcatctctatgaccccaag

SEQ ID NO: 597369 - DNA, 90 bp, Homo sapiens
cggatcccgtccgagccccggccccaagtaacgccgccgccccggagccgcctagccacgatggaggtgatgaacctgatggagcagcct

SEQ ID NO: 597370 - DNA, 50 bp, Homo sapiens
tgatggcctcggagcgcccggagccggagtgccggtggtggtgtgcacat

SEQ ID NO: 597371 - DNA, 100 bp, Homo sapiens
agcttgtacaacttcaaaaaaacattcaatctcaacacaactgaagtggagccttgtagaagacatggctgggcagctgcccctggggccgcacctccag

SEQ ID NO: 597372 - DNA, 100 bp, Homo sapiens
ttcagaagaaggctggaaacagaaacccaacctcaatgccatccgctctctggaggccgtgatccgggtgcacagggtgctggcactgtgggtcctggtg

SEQ ID NO: 597373 - DNA, 90 bp, Homo sapiens
tcccccctcagtttctgaaatgattctccagaatttctcctcataaaaaagcttgctctgtcaccatcgccccggaatcctgcagagccc

SEQ ID NO: 597374 - DNA, 101 bp, Homo sapiens
gccaatagagtgattttagactatttacatcgtgggttacaaccaatgttgtggacatcggatacccaaggagacgaagctgaagcaggagaaggagggga

SEQ ID NO: 597375 - DNA, 75 bp, Homo sapiens
aagccagcctggcatactttgaagatcgtcatgggcctgggagcctcgatctgaaagccaagcatcacgcaagga

SEQ ID NO: 597376 - DNA, 76 bp, Homo sapiens
cccatccatgggaagccctgctactgctggattagcgccaggtataccaagcttggctacgcaggcaacactgagc

SEQ ID NO: 597377 - DNA, 83 bp, Homo sapiens
gcgaaggtctcagagctttacgatgtcacttgggaagttggcagttctgcaagtagtagtgccacaaggagagagtctctatc

SEQ ID NO: 597378 - DNA, 76 bp, Homo sapiens
gagccgcccggagaggagcctcggccccgtacccagaaagctgatgtcctgaccactggagctggtaacccagtag

SEQ ID NO: 597379 - DNA, 100 bp, Homo sapiens
gtgaaccacatgcccagcacgggtgacccatgggctgagggcatacgatggcttgtctctgcctgaggacatagagaccgtcacagcaagccaaatgcgc

SEQ ID NO: 597380 - DNA, 51 bp, Homo sapiens
ggattccaagtaactcttatttgtggctgtgtggagtggtgtgaatgtggc

SEQ ID NO: 597381 - DNA, 75 bp, Homo sapiens
ggagttcctcctggggaacccgttcagcacaccagtggggcagtgcctcggatcctaagcacttcaagtcagaga

SEQ ID NO: 597382 - DNA, 100 bp, Homo sapiens
caccatctgatattttcatggtgatggaatatgtctcaggaggagagctatttgattatatctgtaagaatggaaggatagaagcagatttgggatatcc

SEQ ID NO: 597383 - DNA, 100 bp, Homo sapiens
gtgattctctgctagatgttgtggttgaaaataatctagatattgatggctttgggcttccttctgaactctccccagctattgaggaagaagagtcaaa

SEQ ID NO: 597384 - DNA, 75 bp, Homo sapiens
ccaggcctggcaactcttcgtcaatgaggtggctctgtttctcagtactttgaagttataactaatctgcctgaa

SEQ ID NO: 597385 - DNA, 137 bp, Homo sapiens
cagtcaaaaccccagcgtttgcagaatctgtcacagagggagatgtcaggtgggagaaaggctgtagtacatgagcgagctagagaaatcaccaccgtttagaccaagctgtaaggccctactacagacagtgttta

SEQ ID NO: 597386 - DNA, 100 bp, Homo sapiens
agtggaagttactgccgcgccaccgagtccggaccggagactttggggcctaactagcttctcggtgaactactactagatagacacaacttcacaatta

SEQ ID NO: 597387 - DNA, 80 bp, Homo sapiens
atctaccgcaactctcagttcgagagtaaagaaggagaacttatggattgtgatggaaaatcagaatctagtcctgagcg

SEQ ID NO: 597388 - DNA, 100 bp, Homo sapiens
attagcgccaggttggggttgtggggtcgcgtcagtgcggagacagcggtgtcctgcgcgtcttcggagagctggcggtcaccatggcaatgcgggagct

SEQ ID NO: 597389 - DNA, 100 bp, Homo sapiens
gatccctggaactccatcacaagtggtgccttaacgggagccatactggcagcaagaaggaatgtgaaaaaacttggagacacatacccaagtatctcaa

SEQ ID NO: 597390 - DNA, 99 bp, Homo sapiens
gaaaccacagacatgactgagtcctccatgaagagtatgattatcgggaaatgctgcacaatgccactttctgtctggttcctcgtggtcgcaggcttg

SEQ ID NO: 597391 - DNA, 95 bp, Homo sapiens
gagagaagcccttcgggggaggaggaggcagccaggctgtgctcagaggcatttctctttgctgaattgccaacactcctgatagctgaatgtgt

SEQ ID NO: 597392 - DNA, 74 bp, Homo sapiens
cccgttaagtcccccaaagatgagatttacctgtgagatgtttcatcccaacaaacatccagtcatggataaaa

SEQ ID NO: 597393 - DNA, 90 bp, Homo sapiens
aaaaattttcagaagcacatgtattataacagccagtcgccctatggttattcaggaatcaaagtctttgctcagaaatccttttgaagc

SEQ ID NO: 597394 - DNA, 82 bp, Homo sapiens
ggcaacgagggaatagtggacgaactgcacgtgtacaacacggcctatggcgttggcctccttgtgacattcgtggcactgg

SEQ ID NO: 597395 - DNA, 82 bp, Homo sapiens
gccgcgaggccgcagctcccggggttgtgtccactgtggtccccgactctgcccacaagctgttcatcgggggcttacccaa

SEQ ID NO: 597396 - DNA, 97 bp, Homo sapiens
ctgccgcagctggcgcagcccacgctcatgatcgacttcctcacccgcgcctgcgacctcgtcctgtgtcccttgatctgtcacaatggcggtgtgt

SEQ ID NO: 597397 - DNA, 83 bp, Homo sapiens
agcggatcgggtggagtgtaggtcatatcgccgcgcccgcggcgccatggctcacgtcggctcccgcaagcgctcgaggagtc

SEQ ID NO: 597398 - DNA, 50 bp, Homo sapiens
cgacgctaagttgctgatcgtggcggatcaaaatacttgctggatggtgg

SEQ ID NO: 597399 - DNA, 50 bp, Homo sapiens
tgaagatccaagatgttctacaggtgtatgcaacagcgttattgcaacag

SEQ ID NO: 597400 - DNA, 100 bp, Homo sapiens
accgcctcaccgttctgcccccagaactagcttctgaaagttctgctgaagacagtgagcaggaagatgagagaggtgctcaagacatggataataatgg

SEQ ID NO: 597401 - DNA, 100 bp, Homo sapiens
ctctagtgtgtttgtacgctgtgatgaggagcgacttgatatcatgaaggtgcaggcccagttgaatacagaacaactgctagacgatgtagtagcaaag

SEQ ID NO: 597402 - DNA, 94 bp, Homo sapiens
ggcgtggacggtgtggggcggtcccggccccgcaggtactccaaagattcaggtttactcacgtcatccagcagagaatggaaagtcaaatttc

SEQ ID NO: 597403 - DNA, 90 bp, Homo sapiens
agaaaacctccacgcaggagtacgcagcaaaaatcatcaataccaagaagttgtctgcccgggctctagccggcccggtccttggactga

SEQ ID NO: 597404 - DNA, 100 bp, Homo sapiens
gcggcggcggcggccagagagcagcagccgcctgggctggttgatatgtgaagagccaacctgtcgcaatcgaactcgtcaccttccccttcaattctcc

SEQ ID NO: 597405 - DNA, 100 bp, Homo sapiens
cacctgaagctggtaaaatgcttgaagatgaactcgtcgacttctcagaagatcaggataaccaggatgagagccactcagagtgggtgtcttgtgtccg

SEQ ID NO: 597406 - DNA, 101 bp, Homo sapiens
tgggaagagggattataatttggtgctgtttgtagagatgacaacactgataaaatccactcattgctggcgatatgagtctcatccagtctgtgctgatc

SEQ ID NO: 597407 - DNA, 100 bp, Homo sapiens
caaggacaaacccaccttcatcaaaggggtggcaattttggaggtagccccggttatggaggaggaagaggaggatatggtggtggaggacctggatatg

SEQ ID NO: 597408 - DNA, 83 bp, Homo sapiens
cagtcaataggaagtacgagtacaatgcagatcttcgtgaagactctgactggtaagaccatcaccctcgaggttgagcccag

SEQ ID NO: 597409 - DNA, 98 bp, Homo sapiens
cctctgatccacgcccagaccctagctccagagggccatggccggccagggggactgctgcgtcaaggtggccgtcagatgagcgggatcgtgtgcag

SEQ ID NO: 597410 - DNA, 74 bp, Homo sapiens
ccaggaggacacgctgcagttggccttcatcgacttgagacaaataacaacgaacttgatgcaagtgataggtt

SEQ ID NO: 597411 - DNA, 50 bp, Homo sapiens
ctaagaggaagaagctgcggacctcagcccctgcagatcaagtcagtagt

SEQ ID NO: 597412 - DNA, 100 bp, Homo sapiens
ctactcctccctgagcagattcctcatggtcatgggggccaccgttgttatgtacctgtgcccgaaatcaggtggtgataagagcagagccccaactctg

SEQ ID NO: 597413 - DNA, 100 bp, Homo sapiens
tggctgagtgggaggcaaacccactcatctgtcctgtatgtacaaagatgataagggaaatgtcgtctttggattatatgattgtcaaaccagacaaaat

SEQ ID NO: 597414 - DNA, 50 bp, Homo sapiens
caagcatcttgatctagaaaatataacgacaattggtgtgacctttgcag

SEQ ID NO: 597415 - DNA, 100 bp, Homo sapiens
tccggatgctagactctggggccgattatctgcacctggacgtaatggacgggttaccaacatcaagaagacactcaaagccaccgcatcctcctcggct

SEQ ID NO: 597416 - DNA, 100 bp, Homo sapiens
taattgtcagtctaacagaatcctgtcggagttgtagccatgccctagattttaccaaatgttgcaagaactctggagttcttatggtagtaaaatgccg

SEQ ID NO: 597417 - DNA, 100 bp, Homo sapiens
cactgaggtgtccagttgcagcccatggagatccagttcaattatgaatctcaggaacaccaccttctgtcaggagtctaccatggctcaagaatctccc

SEQ ID NO: 597418 - DNA, 101 bp, Homo sapiens
agcgagcaaacgggcgccccggagccttgctgagaggcaggtactccaaagattcaggtttactcacgtcatccagcagagaatggaaagtcaaatttcct

SEQ ID NO: 597419 - DNA, 82 bp, Homo sapiens
cctgggtgttcgacagctacagcctgacaggggtctggcccacgccctgcgactgagggaaggacagagccgctgtgacggc

SEQ ID NO: 597420 - DNA, 80 bp, Homo sapiens
gaagaaagctggtaatagatgtctgacaaactaaagaaagacttgtgttacggttctccaaaaaatgtggaatcctttgc

SEQ ID NO: 597421 - DNA, 88 bp, Homo sapiens
agcagtcaagtatgtcccaaacgtctgccagtgaagaagcaaaggaagacatgaaaattgacgctcattcttcttcctattgttccct

SEQ ID NO: 597422 - DNA, 75 bp, Homo sapiens
agtgggggctgccagtgctaccctgagaaaggtggacgtgtgtggctggatctcctaaaacccattgtgaaacag

SEQ ID NO: 597423 - DNA, 75 bp, Homo sapiens
aaaacaatagctcaaggaaacctttccaacacagatgtccaagctgccaaaaactatggaggagtatatgttggc

SEQ ID NO: 597424 - DNA, 100 bp, Homo sapiens
gatggacagttgcacacactaggagatctcctcaaagaagtttgtccttctgctattgatcctgaagctctttagtcaagagacggtgatgaagtttgtg

SEQ ID NO: 597425 - DNA, 83 bp, Homo sapiens
cggtgacttccgtgtcctgttgccatggaaacaccctcctggctgttcgattttggcaatgaggagcagcagctggcgtgggc

SEQ ID NO: 597426 - DNA, 130 bp, Homo sapiens
tagaggaagaggcgttgcggcgaaaggaacggctgaaggccctacgggagaaaaccgggcgcaagaaataatagtgtaatccttgctgatgaaatgggcctaggaaagaccatccagaccatatcattcc

SEQ ID NO: 597427 - DNA, 100 bp, Homo sapiens
tcttagtggtctgtgttctaatgactgtcctcgtaagataacagtggatcatccatgccatggagtatgaacttcagatccgtggcggagacaagccagc

SEQ ID NO: 597428 - DNA, 74 bp, Homo sapiens
tgatggtggagtaggaggcaggtctccgcggagctgcacagtaaaggtcccaaaatacacaccaccacgagtgc

SEQ ID NO: 597429 - DNA, 100 bp, Homo sapiens
ccccgtgcaccgcgggccgcctcgcgcaggacttccgcagctcgccaaggtggactgggtggttatggatcaggagacagtgaagatgagaggagtgaca

SEQ ID NO: 597430 - DNA, 98 bp, Homo sapiens
gacaatggttagagaagaattttccaaatgaatttgcaaaacttactgtaggttactataacaacagtaccaaggtggctgtgaaaaccctgaagcca

SEQ ID NO: 597431 - DNA, 100 bp, Homo sapiens
cagtattgaaacctgacctcattgatgtggtaactaaggaagtggatgctacatctaaagaggccaaatccttcttcaagcagaatgagaaagaaaaacc

SEQ ID NO: 597432 - DNA, 74 bp, Homo sapiens
gaagacttgtaacctggagaagaggtcggcagcttcactcccgagggtgccgcgagcccaggcggcgaacaccc

SEQ ID NO: 597433 - DNA, 98 bp, Homo sapiens
gaaagcgccctctatcatcttcattgatgagttggatgccatcggcaccaagcggaaacttggatttaactggccagaagcaggtattcaaagcagag

SEQ ID NO: 597434 - DNA, 100 bp, Homo sapiens
tgaaaaccgaagaagaggcccggactcatacagagattgaaatgttccttagaaaggagcagcagtatgccaagtacatggaaaaccatagcattgaagg

SEQ ID NO: 597435 - DNA, 83 bp, Homo sapiens
cgcagaccccgcttgttcagcagcagaatggtcctacatctcttttgatatcttgagaagagtgttgaaggattacttcaaat

SEQ ID NO: 597436 - DNA, 90 bp, Homo sapiens
ttcagatcttcacagcacagttcctgggaaggtggagccaccagcctctccctggattctcagctggtagctggtgttgcattcaagaag

SEQ ID NO: 597437 - DNA, 98 bp, Homo sapiens
tgcagcgggagctggacggcgagcgcgagcggcgcgagaaagtgagcatgggtttatgcgtcttaggcattattgtgatggcgagcaccaattctctg

SEQ ID NO: 597438 - DNA, 83 bp, Homo sapiens
cagctccaggccttactaagcattgccctggagcctgttgccgaggtactgtctgaatgccgcctgctcgcctacatatccca

SEQ ID NO: 597439 - DNA, 83 bp, Homo sapiens
aatagacctgaagacaaaaatccagaagtacaagcagtctggttatggaaacaaaggacatgctttacatcgtcactgaattt

SEQ ID NO: 597440 - DNA, 91 bp, Homo sapiens
agaaaaggcaacatcctgtcacaggccatgctctggcaaaaacggggatatgagactttctactcggaatatcctgagtgttgcgtggatg

SEQ ID NO: 597441 - DNA, 75 bp, Homo sapiens
caaacggaggaatacctcgtatgcaacctcaggcttcagccatgagttctactgtagaaatcattataatgcaag

SEQ ID NO: 597442 - DNA, 100 bp, Homo sapiens
ctttgttattggagaaacatgcagattatatcgcatcctatggctcaaagaaagatgattatccgattccacgactcttctttgcgggagaacatacgat

SEQ ID NO: 597443 - DNA, 90 bp, Homo sapiens
gggaaatgtctgccgccgccggctctcgggagcgcaacactgcaggtctcctctgagcctccggcctccataagacccaaaacagatgac

SEQ ID NO: 597444 - DNA, 75 bp, Homo sapiens
atcacacgcataatggatgaaaggaaccgacaggtcttcggggacgaggaagccacagccccatgagaactccag

SEQ ID NO: 597445 - DNA, 100 bp, Homo sapiens
gtgaagtgctcgtcaccgccccctcctgccccttcatgcatgcgcggaggccgcctgctagcaaggaatactcccccagttgcaagaggcgcaggaccgt

SEQ ID NO: 597446 - DNA, 74 bp, Homo sapiens
cagggtccctgaagagggaagacacgcggaaacaggatcttttgccagaaatgagggcatactggcctgacgta

SEQ ID NO: 597447 - DNA, 100 bp, Homo sapiens
gataacgacaagaaaaacaatcgcttcaatgatgggaaggtggatcccgccgggaggtactttgctggggaactgccctctagggagacgttccctgcct

SEQ ID NO: 597448 - DNA, 75 bp, Homo sapiens
ggtttcgagcccggaaggtccggcgcccagagctaacgggagtcccagacagccgctcaggaagcaatcttgcat

SEQ ID NO: 597449 - DNA, 75 bp, Homo sapiens
gactaacatgtatgaaggtgtaggaagaatgttagctgctgaatcaaagcttcaaacagaagttaaagaaggaaa

SEQ ID NO: 597450 - DNA, 100 bp, Homo sapiens
cgctgctgctcgttcgagtcgcagggctcaaaatttgggcggggaactggactcactcagccttctcaacgcacgtctgctcggagatcatttgggagat

SEQ ID NO: 597451 - DNA, 100 bp, Homo sapiens
tggccgagcaggctgagcgatacgacggtggaggtggaggaagcgtccctgggatcgagaggatgggtcctggcattgaccgcctcgggggtgccggcat

SEQ ID NO: 597452 - DNA, 75 bp, Homo sapiens
atctggtacttcagctaagacaccctctgagaacactatgtggctgccgtgtaagagtggaactgtcgaatggtg

SEQ ID NO: 597453 - DNA, 90 bp, Homo sapiens
agccccggcctctcggcctctgccggagaaacagattcatgacagatgctgcccgccgagagcaggagtccctaaagaagaagattcagc

SEQ ID NO: 597454 - DNA, 50 bp, Homo sapiens
gctacctcttcttgcaccacaggattacagtttaaagacaatttctgtga

SEQ ID NO: 597455 - DNA, 97 bp, Homo sapiens
cgacgccaggagaccccaagctgcatcgccgagtggtttgatgaaggccggaacaactttgaaggggaggtcaccaaggagaacctgctggacttta

SEQ ID NO: 597456 - DNA, 100 bp, Homo sapiens
agatcagtacaaaaattcttcaagaaatctaagcatcgccctgagcaactggtggtttgtggcccacctgacagacctgctggaccactgcaagctcctc

SEQ ID NO: 597457 - DNA, 88 bp, Homo sapiens
tgggctccatgccagtgggcaaagcacaggagttgtatcccgcattttgtattcacaacggaggctccgaccttgagcggctccccac

SEQ ID NO: 597458 - DNA, 74 bp, Homo sapiens
tggagaagaaagatgttttgcctactgttgatccggtttgtgaaatggctgctgacatttctgaatccagcggg

SEQ ID NO: 597459 - DNA, 76 bp, Homo sapiens
caaaaagtaaaccacgatcgttatgctgagcatttatgtttgaatcatctttaagtctggcggtcacaaagtgggg

SEQ ID NO: 597460 - DNA, 100 bp, Homo sapiens
cctgaggacgtctcaaagaagctcggcgggagagctgagcgctcggaagaaccaaggatttgctgtcacagatgcatcactacaatgctggggttaaaca

SEQ ID NO: 597461 - DNA, 74 bp, Homo sapiens
gagtgtgagcggaaaggggcccggcgtctgcctcgagactgaagaccggtgctcgcggtgaggatcgatgacct

SEQ ID NO: 597462 - DNA, 90 bp, Homo sapiens
ccacaatcttcaatgagtaaacatattcctcaatgcagagtcctcagagaagagattcagaatgaacagctttgtgtcagactttggaag

SEQ ID NO: 597463 - DNA, 82 bp, Homo sapiens
cccaagcaacttagaatgcagcttcagcagaggctgcagggccagcagggaggctccgcactctccccggccgccgtcatca

SEQ ID NO: 597464 - DNA, 50 bp, Homo sapiens
ccggctccagaaaatattccccggtgtgattctggaagaagcaactgaag

SEQ ID NO: 597465 - DNA, 98 bp, Homo sapiens
ttcttgctggatttgcattccttacaggtactttacaaccttggaacagtgactccaccctgaacagcaggcagctggagccaagaactgagacagac

SEQ ID NO: 597466 - DNA, 100 bp, Homo sapiens
ggaggatcgtgcgggtcgcaaagggaagccgagtgctcctgcggctcccagactgcaaccaggattgccccctgtgggtcactttctcagtcattttgag

SEQ ID NO: 597467 - DNA, 98 bp, Homo sapiens
tatctggagcaaggaaaagagccctggaatatgaagcaacatgagatggtggatgaacccacaggcttgttagcagtggcacaagatcttacagagga

SEQ ID NO: 597468 - DNA, 75 bp, Homo sapiens
caagacaagccagcagctcgctcagtacaagagtactgccaaatctgtcgaaagggagataatgaagaactgctt

SEQ ID NO: 597469 - DNA, 100 bp, Homo sapiens
accaagaactaacacatcctggagctgcccggagttccgctcctgcgggcttagcaggaaagggtgcctaagctctcgtggcattatccttcagtggggc

SEQ ID NO: 597470 - DNA, 76 bp, Homo sapiens
cctgcgaccccagtcggtgctccggggaggtcacctgacgaggaggtcagcccaaggccaaccccactgtcactct

SEQ ID NO: 597471 - DNA, 74 bp, Homo sapiens
tgaacttggatgattatatcgatgcagaacacctgggtgacttccacagcgagaaccctctgcccacagtggag

SEQ ID NO: 597472 - DNA, 96 bp, Homo sapiens
caggacatggagtatgaaagacgcaagagtgagccatggagctacgtgtggggaacaagtaccgcctgggacggaagatcgggagcgggtccttcg

SEQ ID NO: 597473 - DNA, 82 bp, Homo sapiens
aattatcgtctttatttaagaagtttggaaacgggccatgtgaaactttctgactttggtctttgcacaggactgaaaaaag

SEQ ID NO: 597474 - DNA, 96 bp, Homo sapiens
atcgtcggcctcaacatgaatggctactttcacgtttccaaggtgctattgggagctcatgcactcttggccaacgggtctgtgatgtcacgggta

SEQ ID NO: 597475 - DNA, 83 bp, Homo sapiens
gaggagacggggacccttctcacaccggccgctgccgccgccgcgctccggaacaggtgaaatgacaatggatgctctgttgg

SEQ ID NO: 597476 - DNA, 82 bp, Homo sapiens
acaaattgcctccttatgtctccaacatggaccgcctgggggactcggaacttttcaggaaaatgccagtgaagggaaggcc

SEQ ID NO: 597477 - DNA, 82 bp, Homo sapiens
ccagggctcgtacttctgctcgcaggtgtggacactgccagcggctgcagccgacttggaatgacctgggagacaaatacaa

SEQ ID NO: 597478 - DNA, 74 bp, Homo sapiens
cgggcgatgtgaagatgtcagtgggctgtgcctgtcctggtctgtccacgttctctgtgggttcattgccggac

SEQ ID NO: 597479 - DNA, 75 bp, Homo sapiens
accagtctgggggcgctggcggcctgcgcagccacctcaaggacatggatttgattgacatactttggaggcaag

SEQ ID NO: 597480 - DNA, 100 bp, Homo sapiens
gtgaatgctgctaaaaacaagactggggctgctcccatcattgatgtggtgcgatcggttgactatagtcaatggggccaatggagccaagtgtatggaa

SEQ ID NO: 597481 - DNA, 105 bp, Homo sapiens
gtctgggtgagccttctcgtggcggcggggaccgtccagcccagcgattctcagtcagaggaggtgtctgcaaggatagttcaagtagtcactgctgaggctgta

SEQ ID NO: 597482 - DNA, 75 bp, Homo sapiens
cacgacaccatgcatctcctcggcccctggctcctgctcctggctgccactgcagagccccgccatggaagacac

SEQ ID NO: 597483 - DNA, 100 bp, Homo sapiens
actagtgccctagatgtgcagtgcgagcaggccgccatcatgcacggacgaggcagaggagtggccggtcccatgggccgggggcgcctgatgccaaaca

SEQ ID NO: 597484 - DNA, 85 bp, Homo sapiens
agcatcgattttaacacatgactcaagtattcgaacatacatatgatagttgagaaagacacatattctgatcatgaagaaataa

SEQ ID NO: 597485 - DNA, 75 bp, Homo sapiens
gaagagagaaacacaagctattcttcctatgcagtttcattcctttgacaggcctatgagagctacaagaagaag

SEQ ID NO: 597486 - DNA, 75 bp, Homo sapiens
aaactggagccaccatcaagctgtctaagtccaaagatttttacccagaatctacctgttactcgtattttggac

SEQ ID NO: 597487 - DNA, 75 bp, Homo sapiens
cccggggctgggatcccatcaccctccacggccgtccgtccagagtatgttggataaaggacattgttgtggcag

SEQ ID NO: 597488 - DNA, 97 bp, Homo sapiens
gacgctggcgggcgcagtttctcacgacgggccgagcctgccactaaccaaccatcatcacagttgatccacctgcatgtggggagttatcaaactg

SEQ ID NO: 597489 - DNA, 100 bp, Homo sapiens
caaacttaatataccagacactgcaactgcacttttccagccattaactccaggctctcgagaatttgaagatgttgtaaatattctccattcttcttac

SEQ ID NO: 597490 - DNA, 100 bp, Homo sapiens
ccaaattatggtagaagaaatcgtagctggcgtgagttatcttctggaaatgagtcttcaagctctgtaagacataaccagagaggggcagcaattttgg

SEQ ID NO: 597491 - DNA, 75 bp, Homo sapiens
attcgtggctgctgctgaactgcccagtccctcaacaccttacactaagtcaaagcgtggccacagagaagagga

SEQ ID NO: 597492 - DNA, 73 bp, Homo sapiens
ggggcgttagccccgcgcagccgccggcgtcgccgccatggacctagacccaacatgagtgaagtttcctgca

SEQ ID NO: 597493 - DNA, 100 bp, Homo sapiens
aagcaatcttcctgctaaggccattggacacagaatccgagtggaatgatgagaagacagcagctgattacaagattttaggtggttcagtccttcacct

SEQ ID NO: 597494 - DNA, 100 bp, Homo sapiens
cacaaagcctgcgaaagtgctcgggaagagggagagcaaacttggctcagcccactcaagactgcagtgcagatgacgacaacttccttgtgcccatagc

SEQ ID NO: 597495 - DNA, 51 bp, Homo sapiens
acgcggatgtcggcgaagagttcaaccagctactcaggaggctgaggcagg

SEQ ID NO: 597496 - DNA, 100 bp, Homo sapiens
agtggtgggataaacggagagcagcagccgcccgcttcaaccccaggggaccagaggaactcagccctgattgcgatgtggaaatggaggcccagaaaga

SEQ ID NO: 597497 - DNA, 50 bp, Homo sapiens
tgatgacatacaagtgtgcagtggttgagtcttgctctgtcgcccaggct

SEQ ID NO: 597498 - DNA, 100 bp, Homo sapiens
tgggtgtgaaccatgagaagtatgacaacagcctcaagatcatcaggttattattgcagcagaactcctaaaaaatgcagatgaattagtcaaacagaaa

SEQ ID NO: 597499 - DNA, 100 bp, Homo sapiens
cggttccaggtgcccaccgcgcactcggagatgcagccgctggtctctaattaacagaagatggcaaagcccagccacagcagctatgtccttcagcagc

SEQ ID NO: 597500 - DNA, 100 bp, Homo sapiens
ccgtgaagtgctcgtcaccgccccctcctgccccttcatgcatgcgcggaggccgcctgctagcaagtgcgcgtcccgggacgactggcgctgtgcgcgc

SEQ ID NO: 597501 - DNA, 82 bp, Homo sapiens
aagagggcggagcggagacgggagtattatgaaaagatcctcttagaacaagctctggtgattgaggaacagctgcgccggg

SEQ ID NO: 597502 - DNA, 90 bp, Homo sapiens
cacgggtaacttggcaatgaatgacagcactgtagaacagctttatgaaacagcttgcttcctacagggagctgagcacataacgactta

SEQ ID NO: 597503 - DNA, 101 bp, Homo sapiens
gtccgactcgctacgcgggtcttgcgagatatctggccgcctctgccgcagctggaggtgtacagtgccaccaacgtggagctggtgacacgcacacgcac

SEQ ID NO: 597504 - DNA, 82 bp, Homo sapiens
gtctacaagactctcttcgctctttgcatcttaactgcagaccatggtgaatccgggcagcagctcgcagccgcccccggtg

SEQ ID NO: 597505 - DNA, 75 bp, Homo sapiens
gtctggaggtccaacatcagggagttgccgggactggtttcagacccaacatgagtgaagtttcctgcaagaaac

SEQ ID NO: 597506 - DNA, 75 bp, Homo sapiens
aaagcagatctggatcatcaaagacagattgttagccctgaaaacaccaaatctagctcagatgatgaggagcag

SEQ ID NO: 597507 - DNA, 100 bp, Homo sapiens
atggtgaaacaccactgaagcattgccaaggaatcaaacattttaagtccagtgcaggatggaacaaagaaacctcagattgacagcaacaagagcaata

SEQ ID NO: 597508 - DNA, 96 bp, Homo sapiens
atcctactcagaagaacttgtacagagatgtgatgttggagaactatagcaatctggttttcttggccgcagggccgtaggcagccatggcgccca

SEQ ID NO: 597509 - DNA, 83 bp, Homo sapiens
caggcgcctcctgccaggtctgctcctcggtcgcccacccgcctgcccgccatgtgttcgagaacttgtcttggacaattgca

SEQ ID NO: 597510 - DNA, 98 bp, Homo sapiens
ccgggcgtccgctcctcagcggatgtggcagccccgagccatggctctcgccgtccgagtcgtttattggtagacaagggcgtggtccccctggcagg

SEQ ID NO: 597511 - DNA, 100 bp, Homo sapiens
agaaataaggacaaaagccaagaggaggacagttcgctacacagcaatgcatcgagtgattccagcagtctcagcagcactgatgctggattgtttacca

SEQ ID NO: 597512 - DNA, 100 bp, Homo sapiens
tacattctgggtgacacgctgggggtcggcaccttcggcaaagtgaaggattgaaaaggaagatcaggccaaccccaaagaagaagtgaccaaggaggag

SEQ ID NO: 597513 - DNA, 75 bp, Homo sapiens
ttcaaacaaagacgaatcaaacttggattcactcagtttggaaattttagcattcaggtgccaggaatgcagatg

SEQ ID NO: 597514 - DNA, 82 bp, Homo sapiens
cggagcgagagcgcgcgggcgcggccgacagggggatatgagactttctactcggaatatcctgagtgttgcgtggatgtaa

SEQ ID NO: 597515 - DNA, 101 bp, Homo sapiens
atgtgttcctgtagctctgatgagtgcaatgacaacatcatcttctcagaaggtccaactggcccaccttcaacactccctctaagcacccagacctctag

SEQ ID NO: 597516 - DNA, 100 bp, Homo sapiens
acgctgctcaaaacctcgctccggaaaggggacacctgtttttgaaatcatgaatcctgtttatagtcctggatcttctggggttccctatgcaaatgcc

SEQ ID NO: 597517 - DNA, 80 bp, Homo sapiens
atgggaaattccagagataatttatgaagtggaaagggaaggacctctttgatttggtgtgccggactctggggctccga

SEQ ID NO: 597518 - DNA, 96 bp, Homo sapiens
ccgccgccgggactcccgtcccagcagaattggtggatccaaatatttttatccagcccatcacagaagaacgtgcttctaggactttgtatcgca

SEQ ID NO: 597519 - DNA, 111 bp, Homo sapiens
agactttaatcggggtggtggcaatggtcgtggaggccgagggcgaggaggcttccgaggaggcagaggaggaggaggtgaccacaagccacaaggaaagaagacgaagtt

SEQ ID NO: 597520 - DNA, 74 bp, Homo sapiens
taccccttcgagcaggtggtcgccagctttctccgaaagtaaaatgtttatcggtggactgagctggcagacct

SEQ ID NO: 597521 - DNA, 74 bp, Homo sapiens
tgcgattctcaagatctctggacctggacaagttggatggcttgaggactggtactaaaaggaaacgtgactgg

SEQ ID NO: 597522 - DNA, 75 bp, Homo sapiens
gtagccacagcggcagctccagcccggcccggcagcgacatggaagacagagtgttgctcagttacccaggctgg

SEQ ID NO: 597523 - DNA, 82 bp, Homo sapiens
agcggattcgtcgctttcacggccatcgagccgaacctctcgcaagagccttcacgtaaatgggtccagtcatgcctcccag

SEQ ID NO: 597524 - DNA, 101 bp, Homo sapiens
gattggggaaaaatccagagaccccctgaagattcggttatcaggacaccccatgggagagacttcgatgactctttagaaaaatgtgaagagtatttgag

SEQ ID NO: 597525 - DNA, 51 bp, Homo sapiens
tggaggacatggctcggaggaccctgggcgctgcctatggcacagccaaga

SEQ ID NO: 597526 - DNA, 76 bp, Homo sapiens
agagggcatggatatctctactcgctccaaagaaactatgttccaacttcctgtcaacaatcttggcagtttaaga

SEQ ID NO: 597527 - DNA, 100 bp, Homo sapiens
tgagtccttatggcatattcagatcagtagaagcagatttcttttggatagtgatgggaaaaggtactctgtggatatccccttggacaaaactgtcgtc

SEQ ID NO: 597528 - DNA, 100 bp, Homo sapiens
cctgagcgcactctggagggattctggcatcagggaggctttcagccggagaagcgagtttcagctgtaagcactatcctttgtactccctcaacgtggc

SEQ ID NO: 597529 - DNA, 83 bp, Homo sapiens
tggccctggccctgatcatcctgctgggcttcgtccagatcgggaagggctgcaagatcaaggccctgcgggccaagacaaac

SEQ ID NO: 597530 - DNA, 75 bp, Homo sapiens
ccgccgcctcccgcccgccccggagcagccccgggcccgcccgcccgcatccagatttctccacccaggtgaact

SEQ ID NO: 597531 - DNA, 76 bp, Homo sapiens
ccaccatcctgaatggtttaacgtgtacaacaaggtacggttcctggagcagcagaacaagatgctggagaccaag

SEQ ID NO: 597532 - DNA, 87 bp, Homo sapiens
gctggtgggcctgggcgtggccaccgtcaaggccaacatcacgcccttcggcgccgaccagggagtgtggagctggtacatttgtca

SEQ ID NO: 597533 - DNA, 100 bp, Homo sapiens
cgcacggactgctggagatggtggagtccgtcagccgggatagaaaatcgtcagctggacacagtaaatttctttttgaagagcaaggaaaatcttttta

SEQ ID NO: 597534 - DNA, 50 bp, Homo sapiens
ggtcaatacattcattgtcatgcaaaggaagaagaccgaaaactgttagt

SEQ ID NO: 597535 - DNA, 90 bp, Homo sapiens
cttcaccttaaaatcaaagccacaagacactgctgataaggatggttttttgcatgtctgacacccatgactccacctggaccttatggc

SEQ ID NO: 597536 - DNA, 83 bp, Homo sapiens
atctgtaaagggtatctgatcaagccaacaacagtgacggaatgcctccatacatgatgggtttgtggagttcttccatgtag

SEQ ID NO: 597537 - DNA, 74 bp, Homo sapiens
cgccagggctgcgttcccgtctcgcgtcccggactgagaaggtgctggagaatctggtaaaagcaccattgtga

SEQ ID NO: 597538 - DNA, 74 bp, Homo sapiens
ttcattcccactcatgagatccaagtctctacagttaactggcaaagaagtctgagggaaaaggccataccaat

SEQ ID NO: 597539 - DNA, 100 bp, Homo sapiens
tatcttggccagggaactcaaacagcagatgcagggaagaactgctaaagctttgaggtcattacaatttacgaatccaggaaggcaaactgaatttgct

SEQ ID NO: 597540 - DNA, 98 bp, Homo sapiens
tccaaagtcgcccaggcaccttctccatgcattgcaagttgcatttgctggtctggcctttgcgtccttctacctggcagggaagttacactgcttca

SEQ ID NO: 597541 - DNA, 83 bp, Homo sapiens
tgggtgaccgccctgaacgaggaggccgagaggaaaggggatcatggggttgacagcagcattttccagaatcctaaaaagct

SEQ ID NO: 597542 - DNA, 121 bp, Homo sapiens
ccagaatccaccgtcaggcataaattgattattcctcgcccacatctgtgccagagtgaattactggaactgaaacggcagcagcaagagcaagaaagagccaaaatccaccagactgaac

SEQ ID NO: 597543 - DNA, 58 bp, Homo sapiens
atcgggctgaagcgactgagtccgcgatggagtttaaaggatttgacccaaatcagct

SEQ ID NO: 597544 - DNA, 100 bp, Homo sapiens
gccagccatcaccctcgagagcccggacatcaagtacccgctgcggctcatcgaccgggagatttacaaccctgaagaatctccctatccctattttgtc

SEQ ID NO: 597545 - DNA, 51 bp, Homo sapiens
ttgggaagagcggtgccaacaatggacacccgctccgggagccagtgttcc

SEQ ID NO: 597546 - DNA, 100 bp, Homo sapiens
caaggccacaactctgcagtggaccacagcattcctgaaatacatccaggaaagacatggagattctcttaaaaaggtaagtaaggaggtctctgtacca

SEQ ID NO: 597547 - DNA, 88 bp, Homo sapiens
tctttatatcctgacactatgaatgctacttggatgcctcttaaggccaatgagtgccaggagcgccctgttgagtgtaagttctgca

SEQ ID NO: 597548 - DNA, 75 bp, Homo sapiens
atctggaacgggtggccgattactgcgagaacaactacatacagggagctggaactgactgcaagatgccttaag

SEQ ID NO: 597549 - DNA, 76 bp, Homo sapiens
atcaaaacaaaagctattttgaattcaaaatccagtccacaggtctctaattaacagaagatggcaaagcccagcc

SEQ ID NO: 597550 - DNA, 100 bp, Homo sapiens
acgggttcagttcgtcatggggctgtttggaaagacccaggagaagccgcccaaagaactgttgatagtggaaaagagaagttgattcccttgcttcagg

SEQ ID NO: 597551 - DNA, 88 bp, Homo sapiens
cagcgtttctgcagtacatgacgagggggagtctcctccagtgactgctcaagaaactacccgctacagtggtggctgtgttgccatg

SEQ ID NO: 597552 - DNA, 87 bp, Homo sapiens
ccggcggcgggccgaggagccgggcgcaatggagcggaagagaccatggtgaatccgggcagcagctcgcagccgcccccggtgacg

SEQ ID NO: 597553 - DNA, 136 bp, Homo sapiens
gccggcacggcgagaacgagcacaacctccagggccgcatcgggggcgactcaggcctgtccagccggggcaagaagaataccctctaccatctgctttggtcagggtgccgctcgaggatttaaaagcaacaaga

SEQ ID NO: 597554 - DNA, 134 bp, Homo sapiens
cgcggagagagccactcccgcccacgtcccatttcgcccctcgcgtccggagtccccgtggccaggagtcgctcaggagcaagctgtggcaagctggagggagggacacatcccgtgttccatccactccctcc

SEQ ID NO: 597555 - DNA, 75 bp, Homo sapiens
ctgcaaaaatgtctctctatccatctctcgaagacttgaagagtgcagccgtagcagagcgggagagggtgagcc

SEQ ID NO: 597556 - DNA, 100 bp, Homo sapiens
cgaaggaggaagggaaccaacccactttctcggcgccgcggctcttttctaaaagtgtgatggaattttactgccagtcctgtgagactgccatgtgtcg

SEQ ID NO: 597557 - DNA, 51 bp, Homo sapiens
ctgctgtcgtcacatctgacctcaaatgttcaatttcagaagcttcagcaa

SEQ ID NO: 597558 - DNA, 98 bp, Homo sapiens
tgagcgcaccctggaccccaactcagccttcctgcataccctggaccagcagaaacctagagtggagctggagtcagatggcagcactatggaggact

SEQ ID NO: 597559 - DNA, 99 bp, Homo sapiens
caaacaggctggctcccgtctccaggccccaaggagccacacctggaccagaccccaggaaagcggagattctggagctggctggcaatgcagcgagag

SEQ ID NO: 597560 - DNA, 100 bp, Homo sapiens
gtggaagcgtggccggcagcgtcccggacgaggagttgttcttcctaacataaaatcagaagatacaccatgccttctgtctatagatctgtttcatgtt

SEQ ID NO: 597561 - DNA, 113 bp, Homo sapiens
caaacaagattgagattagcatggactgtatccgcatgcaggactcggacctgagtgaccccatgtggcttaaccagctcgaaaaagcagtggaagcagctcacacatttttc

SEQ ID NO: 597562 - DNA, 99 bp, Homo sapiens
cctccaaagagcattgaagaattcttaaagtttcaaaattgggtgttggagcgggccggagagaagtagagtgggctgcgaggagaaggaaacaggcct

SEQ ID NO: 597563 - DNA, 82 bp, Homo sapiens
tagaaactcacatgagacaaatgcgctcagcttcaattgagatcaagtcactctttgtgcatcccttcctggctgagcgcat

SEQ ID NO: 597564 - DNA, 101 bp, Homo sapiens
gtcgcggcgacctccggcggcgggaggcccggcctgggcaggaaacttccattttagaagaatacagtatcaattggactcagaagctgggagctggaatt

SEQ ID NO: 597565 - DNA, 80 bp, Homo sapiens
cattgctactgccctctgcgctcctgcatctgcctccccatcaaattgtggctactaatttgccccctgaagatcaagat

SEQ ID NO: 597566 - DNA, 51 bp, Homo sapiens
acccagacaggtggcgaaggcagaggaagcagataaaatccccccatctct

SEQ ID NO: 597567 - DNA, 75 bp, Homo sapiens
gccatgtgagatacaaggctacacagagacagatcaaagcagctcatgctgtgaaacaagctatgcagaagcatc

SEQ ID NO: 597568 - DNA, 75 bp, Homo sapiens
ggccagcactggctccttgatgattgaagatggatacgtgacaatcccagggaccgctgcactgacttcatttcc

SEQ ID NO: 597569 - DNA, 100 bp, Homo sapiens
agctggacccggaccggttttggaacgtgctggccaaagcgctctatgacaatgtggccgagtccccggatgagctctccttccgcaagggtgacatcat

SEQ ID NO: 597570 - DNA, 75 bp, Homo sapiens
tgcaaaaaaggaggccaaagactttgtcagatgtaccaacagtaccagcaacaggccggctatggtgcacagcag

SEQ ID NO: 597571 - DNA, 100 bp, Homo sapiens
acgaaaacatgtactacagccagtcttctatgtttccacatcggtcagaaaaagataccagatgatgtgcttctgcatcgcactcatgatgagattgtcc

SEQ ID NO: 597572 - DNA, 75 bp, Homo sapiens
gtgaaactggcctcccaagccctgataagctccctggggaagggaatgcagggttgctggggctgggcccagaag

SEQ ID NO: 597573 - DNA, 100 bp, Homo sapiens
tcaaagcttgacagaaacacgagctttcggcttccatcccttcgcagtacagatgacaggatcacctgctgttaccagctaccacccataacaagaccac

SEQ ID NO: 597574 - DNA, 75 bp, Homo sapiens
catttcaacttctgccgacaacttttctcctgatttgagggctatgaccagggccagagcactcagatctcagtc

SEQ ID NO: 597575 - DNA, 82 bp, Homo sapiens
aataaacagctggagtctcagctccaccgcctccgacagctgctggagcagcaacagcagcagcaacagcaacagcagcagc

SEQ ID NO: 597576 - DNA, 75 bp, Homo sapiens
gaggagcccatggcatcatagttgtgtatgatgtgacagatcagctggatgctgacaaatatgagaatgatccag

SEQ ID NO: 597577 - DNA, 100 bp, Homo sapiens
ttcaaatcagaaggggcttattttgggaactattttacttattattctattcaagaaggatcaggaaagatacttggatgatattgatgatgagatggac

SEQ ID NO: 597578 - DNA, 74 bp, Homo sapiens
gatgtcagctcagtgctgtgcgggccagactgtcttctgaagattgatgtctatttccttgagctctttaattt

SEQ ID NO: 597579 - DNA, 100 bp, Homo sapiens
ctacctgaccatcatcctgctcctgggtgccgtggcatgtcgatttgtccttcactacagggtgtccgcaatgttgccagtgtctgtctgcagattggct

SEQ ID NO: 597580 - DNA, 124 bp, Homo sapiens
gttcagacttccagcccagcatgtaaacaagagaaagacgataaggaagagaagaaagacgcagctgaaaccgagctgaagctgccatggaattcttacaagaattaaatagcgatgtctctgg

SEQ ID NO: 597581 - DNA, 84 bp, Homo sapiens
ggacatcttcatttacagagcaacttgatgaaggtacacccaatagagagattcgggagctctataagcagcggctggatgagt

SEQ ID NO: 597582 - DNA, 90 bp, Homo sapiens
tacagcagcaaacaagtggattgaaatctcctaagagcagtgataaacagagaccactgcaggatatcaatgcttacaattgtgaagagc

SEQ ID NO: 597583 - DNA, 100 bp, Homo sapiens
gaacctgtggcgtccagccctgaaaggaggagacggcaacccagccgcgcggagttgaccacatttggccatttcccagaagggccccaccccaagggtg

SEQ ID NO: 597584 - DNA, 50 bp, Homo sapiens
ctcaacaggatttcctaagagagctgataacaacgaacttgatgcaagtg

SEQ ID NO: 597585 - DNA, 90 bp, Homo sapiens
cgcttggagatcctagagtggatgtgtacccgctcaagaggtgaggaaattgtccgcctgcagatcctgacacccagggcaggactccgc

SEQ ID NO: 597586 - DNA, 100 bp, Homo sapiens
tcgtttggaaccgttgtggattttcaaataggaaaatcaaaaggcccaaagagacagctcactggttgctgttgaagaaatctggttgcagaacaccacg

SEQ ID NO: 597587 - DNA, 100 bp, Homo sapiens
ctccagggcatttcctggtcgctgccacagatctacggaatccagaggcagcattgtctccaaccttccgtagtgacagcccagtgcctactgcacccac

SEQ ID NO: 597588 - DNA, 100 bp, Homo sapiens
gagaagtgtatatcaagccacaatttccatcaaaaagtgattaagcagagaatggagaagaaggttgattccaggacttatttggagacaaagaatttct

SEQ ID NO: 597589 - DNA, 83 bp, Homo sapiens
taggaagcccctatcgccgagctcgttggagcttgaacccattgtcacccctccgccaggcgggcaccacggcaggggctgag

SEQ ID NO: 597590 - DNA, 100 bp, Homo sapiens
ccggagaccccgaaaacggaagcgcagggagaaggaagaggtgtttgaaaagcactgtttgctgcctacctgggtgctgccctggctaacatgttatctg

SEQ ID NO: 597591 - DNA, 100 bp, Homo sapiens
ggggcatggagtgcaccctggggcaggagggcatcctggctgtttcacccgtggacttgaacttgccattggactgagctctttctcagaagctgctaca

SEQ ID NO: 597592 - DNA, 75 bp, Homo sapiens
ccttgctcccatccctgcagcatgaacaaggtcattgctagaatcgtggatggaagcagattcactgagttcaaa

SEQ ID NO: 597593 - DNA, 100 bp, Homo sapiens
gtttgactacataataaggatgatgaattgtactctacagcgtcaagggttccacactgttgggagtcgctgcaagaatcggacaggcgctgagcacctg

SEQ ID NO: 597594 - DNA, 83 bp, Homo sapiens
gatgcagccagtagcttggatccttgtgggcatgatccataatcggtttcaagcccaaaactggcctcattgactacaaccag

SEQ ID NO: 597595 - DNA, 75 bp, Homo sapiens
gcaggcggttgtggactctctccaaggtcagaatggcggcagcggagcatcgtcattcttcaggattgccctgct

SEQ ID NO: 597596 - DNA, 75 bp, Homo sapiens
gtcaagaactcaggccacagtggcttggccaatggcacagatctatccatactaatggaaatgtaactggaactg

SEQ ID NO: 597597 - DNA, 83 bp, Homo sapiens
gaaaacatatccattaaatgggtgactacaatttagactgcatgcctccccatggatacatccatgtgctgtctttgacagag

SEQ ID NO: 597598 - DNA, 82 bp, Homo sapiens
gctgcactacgcctttcaggacgagaaccacctggtattagaaaactactcggatgctccaatgacaccaaaacagattctg

SEQ ID NO: 597599 - DNA, 100 bp, Homo sapiens
gtcacctgcctgagggcacttctgtcccaccagcatcagaccaggtgaatattggcttggaaatgataaaattagccagcttaccaggatgggacccaca

SEQ ID NO: 597600 - DNA, 98 bp, Homo sapiens
aaaccatgagtgtaaggttaccccagagtatagacaggtaccccaagaagctagtgcagacttattcagtgtttccctaccaggacgagatgagcgac

SEQ ID NO: 597601 - DNA, 100 bp, Homo sapiens
cgggaacggccatgagcactgcagcgattgcgagaatgaggaggacaacagctacaaccggggatccctagcaactggaactaaagccgggtataagctg

SEQ ID NO: 597602 - DNA, 90 bp, Homo sapiens
gggctggttcgggatgagcgatggcatcggtcaaggtggccgtgagggtccggcccatgaatcgcaggtggctttcttcctccagaagaa

SEQ ID NO: 597603 - DNA, 100 bp, Homo sapiens
ggcaagagtaacagcagcgccgtcccgtccgacagccaggcccgggagaatttaaggaagaaatctctaaacgttttaaatcacatactgaccaacttgt

SEQ ID NO: 597604 - DNA, 51 bp, Homo sapiens
aaggtggaggaggagctgaggaaggtgcagcggaactgctgcctgacgctc

SEQ ID NO: 597605 - DNA, 146 bp, Homo sapiens
gccgctagacctggacaagtatgtggaaatagcgcggctgtgcaagtacctgccagagaacgacctgaaggtcagaaagcaacattgaatgcagaagaaatggcggacttctacaaggaatttttaagtaaaaattttcagaagca

SEQ ID NO: 597606 - DNA, 96 bp, Homo sapiens
gcgggctcggagccggagacgccgagctggggccggacaatggcgatgaccactcagaaggaggcctggtggagaaccacgtggacagcaccatga

SEQ ID NO: 597607 - DNA, 100 bp, Homo sapiens
ccggagcgcatctcgcccaggagccggagcagcggcactgcctgggcaggctgtccctgcaggatcccacgtacggctgaatcttcagactggggaaaga

SEQ ID NO: 597608 - DNA, 50 bp, Homo sapiens
cgccgcccgtccacacccgccgccaggtgaagttcatccacgaccagacc

SEQ ID NO: 597609 - DNA, 50 bp, Homo sapiens
atcatgcggcagtgcatcgcgggagtgcatccgccccaacccttttcccc

SEQ ID NO: 597610 - DNA, 100 bp, Homo sapiens
ccagttccgtctgtgtgttcgagtggacaaaatggcgaagatcgccaagactcacgaaggagtagccactctataaaagaaccagtatctacacttcacc

SEQ ID NO: 597611 - DNA, 101 bp, Homo sapiens
tgacagactatggggcctttatcaaaatcccaggctgtcggaagcaaggagctggtcaggctcaccatcgagaagcagggacgtccgtctccgacgagccc

SEQ ID NO: 597612 - DNA, 82 bp, Homo sapiens
agcggcgcagaaaggtggaggccgggaggacgaagaacaccttccaccatgaccacctcagcaagttcccacttaaataaag

SEQ ID NO: 597613 - DNA, 100 bp, Homo sapiens
gactgggatcctacgtgcatgaagatggacgaggtcctgtacagcatcgccgagaagaaggacagaataacgggctcccagattcacaagccccaccaag

SEQ ID NO: 597614 - DNA, 76 bp, Homo sapiens
tgcccacccctcctgtaacccagcctgtttcacttcttgcctcagaagaggaaagtggaaagcctttccagtgtcc

SEQ ID NO: 597615 - DNA, 82 bp, Homo sapiens
cgccgcctctagggatggacggctgtcacccttgacccaaactttctggatgcttatatcaatttaggaaatgtcttgaaag

SEQ ID NO: 597616 - DNA, 82 bp, Homo sapiens
ttcacatggatcctcttcaagcttaaacctgggacactgcccatctctaagataagaacctggaaaggggactctgttggcc

SEQ ID NO: 597617 - DNA, 75 bp, Homo sapiens
ctccgcggcgttcggggaaatggctgcgagaccctagaggcctgcggcctgcgggcatcttttatgaccaagact

SEQ ID NO: 597618 - DNA, 97 bp, Homo sapiens
ccccacctccataccccgcggcatccctctggacgcaggttttcagcagcttccggaggccgcctggactgcagaaggcgccctgggcgtgtgtact

SEQ ID NO: 597619 - DNA, 101 bp, Homo sapiens
ctgacaagggtccagcctccgattgccagaacagataaagcccagtgtaagccagcctcagcctgccaactctaataacggcacttccacagcaaccagca

SEQ ID NO: 597620 - DNA, 71 bp, Homo sapiens
tgcggtgctgctcagtgcagttcaggtgtctgaggcctgtgatgccgtgttcgtggctggcaaggagagcc

SEQ ID NO: 597621 - DNA, 75 bp, Homo sapiens
cgcccatgcactaccacctgcgggagatcatcatctgcacctaccgccaggctgcagtgcaatggcgcgatctcg

SEQ ID NO: 597622 - DNA, 83 bp, Homo sapiens
cttcacgtggtctttaccgtttgttggagaaaaagaatgtcatacccaggctatcccccaacaggctacccacctttccctgg

SEQ ID NO: 597623 - DNA, 74 bp, Homo sapiens
agaatgtcagcatggaggctgctgggcaggtcatgagtcaccatgcatctggaatcaagagacccatggcatct

SEQ ID NO: 597624 - DNA, 100 bp, Homo sapiens
cggtgaagtgccatcttcggctaggtcgtcacaggctccggctcatggcatcaagtggcatccatcataagtgaacagagtatctgccaagcccgggctt

SEQ ID NO: 597625 - DNA, 98 bp, Homo sapiens
cttcgacggcctggctgatccggactgagtggagtagctggagtgagttcccgctgtgaaaaagcctgcaaccctcggatgggaaatttggctttggg

SEQ ID NO: 597626 - DNA, 100 bp, Homo sapiens
cggcgctgcctgtggagatccgcggaggccgacaggattcgttggctgccgtccccgctgctgtgcattgggtccactggtctccacataatgaaactat

SEQ ID NO: 597627 - DNA, 83 bp, Homo sapiens
ctggactctctgccacatcgttcggttcccacaacagcctgacacaacatttgcctgcaacaaggacagcggccagtggcact

SEQ ID NO: 597628 - DNA, 100 bp, Homo sapiens
ttccctggggccacatccacaggccatgaccttgcctcctttcctggagttcggtgtcccgtccccagcccacctcagagcctggacggtggagaggaag

SEQ ID NO: 597629 - DNA, 88 bp, Homo sapiens
cccggtgtgtggcgcgcccagagccccgcgtttcagccctagggaagttaaaagaagatggatgcacagtgttcagccaaggtcaatg

SEQ ID NO: 597630 - DNA, 100 bp, Homo sapiens
agtgaccgagaccgcggccgggaccgaggatttctctatgaatcatcatcaagaactctgggagaacttttgaattcataaccaagccaacatctccaga

SEQ ID NO: 597631 - DNA, 76 bp, Homo sapiens
gaaaaacagaagcccttgaaacgaagtcatctgtacccctggaaacaaggtggcttcggtgctgctccagtgtttg

SEQ ID NO: 597632 - DNA, 98 bp, Homo sapiens
tgcccagacggctcacctgtgcgggatggaacaaaaggggcagacactggcctcagatacctgacctggtaccctctatgaggcctgcggtgctgggc

SEQ ID NO: 597633 - DNA, 84 bp, Homo sapiens
cggcggagaccgcctctgctcccgcctgggggtaatacctgcctggagaatggatctttcttactgaactttacaggctgtgca

SEQ ID NO: 597634 - DNA, 105 bp, Homo sapiens
cgacagtgagcgccggcgcgaggacagcgcgtgcccgcgaggagccgccgcgcgcccgcgccctccgcgcgacgccagcacatacccccggcctcatgagtacct

SEQ ID NO: 597635 - DNA, 74 bp, Homo sapiens
tttaattttagggtcctttatatagaagggagagtaggtgatgctgggaggttcctggttacagacactggagg

SEQ ID NO: 597636 - DNA, 90 bp, Homo sapiens
gaaaccgacgcccatgggcgaaagggacctgctcaagttcactcacaaagtgaaaaggagagcttgttgaaggaaagagatcacattttg

SEQ ID NO: 597637 - DNA, 100 bp, Homo sapiens
gatgtatcacctatagaaagaaatgagcagctttggataatgacgacagcaacccgaagacagggaaatttaggattgagtcatcgggctccaatgcgtg

SEQ ID NO: 597638 - DNA, 100 bp, Homo sapiens
gagatcattgacctcgtgttggaccgaattcgcaagctggtaaaataccatgaagattttgaaaaaacaaaggggagaggctttactcccgtcgtggacg

SEQ ID NO: 597639 - DNA, 83 bp, Homo sapiens
ttccactcggctcctgtcgtccgttctctcaggctcccgttcaggttctccttactatgacaatgtccgccccctctcttacc

SEQ ID NO: 597640 - DNA, 50 bp, Homo sapiens
ctgcagatcccattataaccagaatgtctactagagtccttttagccact

SEQ ID NO: 597641 - DNA, 75 bp, Homo sapiens
acaggtccagacccatggagccccccgggaggagcagcagctgtccactgccaaggagatcatccagcactttaa

SEQ ID NO: 597642 - DNA, 75 bp, Homo sapiens
tccgtgtctgggacctggaagctgccaaaactactacccacagatggcatgatccgaaaacactctcatgtcaag

SEQ ID NO: 597643 - DNA, 105 bp, Homo sapiens
tcagatctgagaggcttctgaggggccgatgcagtgacttctctgctgcaggtctctttttcagtcatgcaggagtcagtcgaagtgtggccataataactgctt

SEQ ID NO: 597644 - DNA, 50 bp, Homo sapiens
acagcctctggatgagagttggccaagaaaatgtggacacagacttgcca

SEQ ID NO: 597645 - DNA, 82 bp, Homo sapiens
tcgaggacataaggaactagtcacagtgttgctgcaacatagagctgacattaactgtcagttctgcagaatcagaagattt

SEQ ID NO: 597646 - DNA, 75 bp, Homo sapiens
gtggaatcttttaactcccaaggtgcacattaaagatccaaagtcatgactgactccaagtatttcacaaccaat

SEQ ID NO: 597647 - DNA, 90 bp, Homo sapiens
cgggtgatgacagcactatagtgcaggtgttggaagtgaaagccaagacaatgcaaactccagtgaacattcccgtgcctgtgctccggc

SEQ ID NO: 597648 - DNA, 50 bp, Homo sapiens
ccgtgatgttggcctttaaatgaggcaagtgaggcctatctggttggcct

SEQ ID NO: 597649 - DNA, 50 bp, Homo sapiens
aaagctgaaagggagacgtttgcatttaattggttggggtcagataagaa

SEQ ID NO: 597650 - DNA, 75 bp, Homo sapiens
ctgctgctgctgctgctgccccggacccgggcggacgagcacgaacacacgagctctttgacatctgtcttgccc

SEQ ID NO: 597651 - DNA, 83 bp, Homo sapiens
aacaatgcctctgttcaaactcccaggaatgtatcctgtcaggtataatgtcagtgaatggcaagaaagttcttcatatggat

SEQ ID NO: 597652 - DNA, 100 bp, Homo sapiens
ggagaagccaaacctaagcggcggaagaaaatatttggttcccgggtaagagttgactctacagcaaaggttgcagaaatagaacatgcggaaaaggaaa

SEQ ID NO: 597653 - DNA, 75 bp, Homo sapiens
gaaggaaggaaacagaattcattttcaaaccaagggcagaagataagattattggactgactactagtcctctac

SEQ ID NO: 597654 - DNA, 100 bp, Homo sapiens
ctggactccaaggccggcctgcgcacttgctgccaccagaaactggaggacatgatccaggagcttcagggctggtgcaggcactgcagaccaaggtgac

SEQ ID NO: 597655 - DNA, 82 bp, Homo sapiens
tgcagcccaggagcctcaaggcggcccggcgggcgactggacggccggacaggtgctttgcaagatatcaccttgtcacagc

SEQ ID NO: 597656 - DNA, 74 bp, Homo sapiens
ggtgatcagcaccgcgaaagccccaggggccattggaccctacagcactgttgcaagaattcaattccgtcttc

SEQ ID NO: 597657 - DNA, 83 bp, Homo sapiens
ccgcagccttgggcctcgcgccggctatggccgtgccctggggctgagccctcaggctgtctgtccccagaccccagagcacg

SEQ ID NO: 597658 - DNA, 100 bp, Homo sapiens
tttctagtaatcaaaaatcttgtacctgatgccgatattcaacgctttcggtatgaacatgctaatgatgataagagcagtttgaaatcagatcccgaag

SEQ ID NO: 597659 - DNA, 100 bp, Homo sapiens
attggtgcaatagcaatgacagagcctggagctggaaggcactggtgaggtggattgatgatgaatcttctggcacacctggagcaactccagaacacag

SEQ ID NO: 597660 - DNA, 90 bp, Homo sapiens
gcccggcgaagccacagaaaccgtccctgctacagagcaggagttgccgcagccccaggctgagacaggctcaatattgtgcatgacacc

SEQ ID NO: 597661 - DNA, 90 bp, Homo sapiens
tgggggcctcgggcgccccgcagccccccaacatcctgctcctgctcatggacgacgcagcgtctatcccagactaccggggccctaatg

SEQ ID NO: 597662 - DNA, 82 bp, Homo sapiens
gctaaagcagcgtgcgttcagccctggggcaccatgactcctgtgaggatgcagcactccctggcaggtcagacctatgccg

SEQ ID NO: 597663 - DNA, 90 bp, Homo sapiens
cttagaaggacaaacgtttgaggggcataaggaaatggtggcaggcacttcctcctaacaagaaggaagtagttaaagaaaatataagga

SEQ ID NO: 597664 - DNA, 75 bp, Homo sapiens
cccggggtgtaataatgttaactgagactgagaactatgagcagagaatacgtgaacaacaggaacagctgtcac

SEQ ID NO: 597665 - DNA, 87 bp, Homo sapiens
cgacggcgccatgagtctgacttccagttccagcgtacgagattaatcctaccatatgaaagatttattaaaggagaagaagataag

SEQ ID NO: 597666 - DNA, 84 bp, Homo sapiens
ggccatctccaagaacgtgctcttcgctcacctggatgacaacgagaggaggtctcggcgcggaagatggccggcggcgtggac

SEQ ID NO: 597667 - DNA, 100 bp, Homo sapiens
aaggcaaatactcctgtaaatttgagtgtgtatcggttttatggagaacctgtaataaaagcatgtattgaaaatggagccagttgtatcgacatcagtg

SEQ ID NO: 597668 - DNA, 100 bp, Homo sapiens
aagcacaataatcagcaagcactcagtcacagcattgaggaaggactgaagatacaggccatgaacagagctgcagcccgatgcaacaaaggcatagaag

SEQ ID NO: 597669 - DNA, 83 bp, Homo sapiens
caaaggcaagagtaacagcagcgccgtcccgtccgacagccaggcccgggagaatgcatccactctgggagagcgtggacctg

SEQ ID NO: 597670 - DNA, 75 bp, Homo sapiens
atcaatgtttccaaggcccgcaagaagtacaaagtggaggagaatgtactactcatcacctcccacctgtgaaag

SEQ ID NO: 597671 - DNA, 90 bp, Homo sapiens
gacaccagcaatgagaggacccgcgtgggcaccctgcaggtggtcagacatgtcatcaactcagctggatcccatgacagattctgttgt

SEQ ID NO: 597672 - DNA, 75 bp, Homo sapiens
ggagaggttaaagagacccgttcagagtcctacagtggcaggggcattactctagtgtgccttaaatgtgatttc

SEQ ID NO: 597673 - DNA, 100 bp, Homo sapiens
tcaaatccatcaagctcatcaaaagtgccggtggtggtgtgcacattgagccccggtatagacagttcccccagctgaccagatcccaggtgttccagag

SEQ ID NO: 597674 - DNA, 99 bp, Homo sapiens
caaccatggctgaagaacaaccgcaggtcgaattgttcgtgaagttatttctcaaactctgaggctgcggagttcacacattgaaatctgtcatctttt

SEQ ID NO: 597675 - DNA, 49 bp, Homo sapiens
gggaccacaagatcctcatcgacaggaatttgagagcgtattttgcggt

SEQ ID NO: 597676 - DNA, 101 bp, Homo sapiens
aatgttctcgatgccaatctctgcttgaaaggagaagacttggattctcaggtgctcgcatttggcttttcgttggtttcatgttggcctttggatctctg

SEQ ID NO: 597677 - DNA, 100 bp, Homo sapiens
agattttcagtctgataaccacatatctgaagagatggattaagaatgctttggattaaggattgtggagcacatttcaatcattttaggattgtcaaaa

SEQ ID NO: 597678 - DNA, 83 bp, Homo sapiens
tccgtatcggctggtccctggactcctgcagcacccagctaggctgcatagagcctggacctgggcactggggtgagctgagc

SEQ ID NO: 597679 - DNA, 100 bp, Homo sapiens
tgtgcagccgcgaggaggcgcgggaggtgttcgagaacgaccccgagacggacttcagggccacaggtgctgccaagatgctccagggcacctgctccgt

SEQ ID NO: 597680 - DNA, 89 bp, Homo sapiens
ggctctactgcgtctaccagagcatggtgctcttcttcttcgagaattacaccggggtccagattccatcacccagcacaaggtctgtg

SEQ ID NO: 597681 - DNA, 82 bp, Homo sapiens
cgagggcaggacgaacttcaccagtgcagagcagagcgggcggaggaccccgggcgcgggcgcggacggcacgcggggcatg

SEQ ID NO: 597682 - DNA, 100 bp, Homo sapiens
ggcattacgcaggccagcaactcccagctcaatgcaatggtgacctccttcagcacaccccccaccccagaacggaacaaccggcctgccttcttctccc

SEQ ID NO: 597683 - DNA, 50 bp, Homo sapiens
agaagatgtcggagcccatagcagggctccgtcgggcacgactgggcggc

SEQ ID NO: 597684 - DNA, 100 bp, Homo sapiens
actcattcacttttctggggttgcccttgggaccaaccacttcctaccccagagctccagatgcctaccatggtgccttcttatgaccttggaatggccc

SEQ ID NO: 597685 - DNA, 100 bp, Homo sapiens
gtacagagatgaaaacttggtgactatactggggaccagcctcttaatcggatgtatcttgtattcatgggcggcgactggcggcgcgatggacctgacc

SEQ ID NO: 597686 - DNA, 96 bp, Homo sapiens
cccgcccaagtccggccacctggtcttcccctcggccccggccgtctcaggtgtcatggagaaactccagctgggcccagagattctgcagcggga

SEQ ID NO: 597687 - DNA, 90 bp, Homo sapiens
tgaattatgaaggacttcccataggaaaggtacatggaaaacttggggatttcacaataatttcttggacaataatgaggctacagacat

SEQ ID NO: 597688 - DNA, 96 bp, Homo sapiens
gctgaacagcacagagcccctcgtgaaggagtatgctgcgtttgtgctgggcgctgccttttccagccccagcatgagaccagatgtaagctctcc

SEQ ID NO: 597689 - DNA, 100 bp, Homo sapiens
ggcctagatgtcttgcggcaaattgaggattccttcctcaaggctcagcagtggctgaaggacctggaggaggagctgcacccaggagaagtcctggtga

SEQ ID NO: 597690 - DNA, 75 bp, Homo sapiens
gacaaaacaccagatgatgaccctgagcaaggaaaatctgaggagataattgacgaccttgccaacctagtggag

SEQ ID NO: 597691 - DNA, 101 bp, Homo sapiens
gcccgccgctgcgcccgacgctccctgtctgggaccttctccctgcctggacccctactattgcaacaagatatttggagttcttacaacatggcagacat

SEQ ID NO: 597692 - DNA, 49 bp, Homo sapiens
catatgcaccagcacgcctggctaagctaaagaattacctccaaagcca

SEQ ID NO: 597693 - DNA, 82 bp, Homo sapiens
gcgagtttccgatttaaagctgagctgcgaggaaaatggcggcgggaggaaatttccagaactctttgcacagttcaagtcc

SEQ ID NO: 597694 - DNA, 105 bp, Homo sapiens
gccgaccgccatttcacatccagcagaggaggcgggggcagccgctgagacggtttttcacaaggtgctggagaatctggtaaaagcaccattgtgaagcagatg

SEQ ID NO: 597695 - DNA, 96 bp, Homo sapiens
gagaccaccaaacaggctttgtgtatgataagtattatcagcaacataatagttctgggcatcttcattaagtacaaggaacttcggacacccaca

SEQ ID NO: 597696 - DNA, 50 bp, Homo sapiens
gacagagccaggatttgaaaccagaacagtccaggctctgcagacagcat

SEQ ID NO: 597697 - DNA, 82 bp, Homo sapiens
tcatggggctgtttggaaagacccaggagaagccgcccaaagaactgggtctccatcacccaactccatgcttcgagtcctg

SEQ ID NO: 597698 - DNA, 100 bp, Homo sapiens
cttaaaccagtttatttcaccgaagaaatgcctcaagtggctggcacatgtgtatcaatcccaaggaatgatgagagctgcagagatgtgttacagaaag

SEQ ID NO: 597699 - DNA, 74 bp, Homo sapiens
cgagatccgctgctgctgaggagaggagcgtcaacagcagcaccatggaaatcatgaccaccccaggaaaagag

SEQ ID NO: 597700 - DNA, 50 bp, Homo sapiens
agtttttattagaaaactccagcaaggttttggggccttgtcacagatgc

SEQ ID NO: 597701 - DNA, 74 bp, Homo sapiens
cacggggagcagagcagcaactcacccagcacacaaaatggatctcttacggaaaatgtttcaacgtgcgcaag

SEQ ID NO: 597702 - DNA, 100 bp, Homo sapiens
ctacctgcagacatacggcgagtggaatcgggctgcatggctggcaaaaccgccgccatgtctgcgcatctgcaatggatggtcgtgcggaactgctcca

SEQ ID NO: 597703 - DNA, 105 bp, Homo sapiens
aggtgatccagcaaggtcggcagagcaaggggcttacgcagaaggacctggccacgatgtgaagttcatttccaatccgccctccatggtggcagcggggagcgt

SEQ ID NO: 597704 - DNA, 82 bp, Homo sapiens
gcgtgtctaggtgagtcgcggtgggtcctcgcttgcagttcagcgaccacggatttggggtggaaggcaggcatggtcaaac

SEQ ID NO: 597705 - DNA, 110 bp, Homo sapiens
gcggagtatctggcctccatcttcggcaccgagaaagacaaatggtcagtaggacagaaggtaacattgatgactcgctcattggtggaaatgcctccgctgaaggcccc

SEQ ID NO: 597706 - DNA, 98 bp, Homo sapiens
aatgagaagaattatgaactcttgaaaccctggaagctgtcctgaatttcaaatactctggaggcccgggccacactgaaggatattacaggaatctc

SEQ ID NO: 597707 - DNA, 97 bp, Homo sapiens
gggcaagtgcatgtggacgcggcagttcaagaggacaggactgaacgtcttgctcgagatgtgatgaaggagatgggaggccatcacattgtagccc

SEQ ID NO: 597708 - DNA, 100 bp, Homo sapiens
gccgccctggagaaacagatcgatatttaacaccgtgcccgatatgcctctcaccaatgcccagctgcacctgtctcggaagaagagcagtgactccaag

SEQ ID NO: 597709 - DNA, 87 bp, Homo sapiens
agtcagaatccagttcccatcccgccttgagccagtcaccaatgccacaggaaagaggtgcttgaggaatccaaagccctcgtgcgc

SEQ ID NO: 597710 - DNA, 75 bp, Homo sapiens
atggcggaacgcaggagacacaagaagcggatccagagcaagtggaattacctgctgtggcatcagtcagtgctt

SEQ ID NO: 597711 - DNA, 75 bp, Homo sapiens
acagcagagaccttgagggatatctttcttcactcctcttcacttcttcacaacagccaactcagtttataaatc

SEQ ID NO: 597712 - DNA, 85 bp, Homo sapiens
gctatcgagtaaagcagcttgtcttccccaacaaggagacgatgaggtgagccactgcgcctgatcaaggcatcaccgttgaacc

SEQ ID NO: 597713 - DNA, 100 bp, Homo sapiens
ccgcagtcggtcgtccgctggacaagcacgagggcgcgctcgagacgctcctgaggtatgaaccctctcgtgagatgaaaagtcagtggacagctgtctg

SEQ ID NO: 597714 - DNA, 90 bp, Homo sapiens
attagcagtaatatagtttctgtgtctcctttcctcttgggccgggcactttgggctgccagtcggttcactgttgctatgtcccctgaa

SEQ ID NO: 597715 - DNA, 82 bp, Homo sapiens
aagcctctacaggggcctcccgcgccccccgggacccccacgccgccgccaggcacgggcgaaacgcccacgctgggcactc

SEQ ID NO: 597716 - DNA, 82 bp, Homo sapiens
gtgcattgtgttgcaggattgggaaggacgaatgccttagtttccactttccagcctggatcccctcacactgaacccttct

SEQ ID NO: 597717 - DNA, 95 bp, Homo sapiens
atagtgcctttcagccctaccagataacagcccgccgtcagtggaaacatatttatgatgaattaggcggtaatcctgggagcaccagcgctgcc

SEQ ID NO: 597718 - DNA, 97 bp, Homo sapiens
aatgaagttagattaccaccaccacctgatataaaaaaagaaattagtgaaggagatgaagtagaggaagatgagaatgtgcctactgctcctgatc

SEQ ID NO: 597719 - DNA, 75 bp, Homo sapiens
cattgaactacaatcagtttctaatccagttcacagaaaggctggctcacagttggaccaacgcttacaaatagc

SEQ ID NO: 597720 - DNA, 98 bp, Homo sapiens
atttcatcgatgatctggcagacctcagctgcctggtagttacatccatatgggagaatagtctccagatcactacaatttctagctttgtaggagca

SEQ ID NO: 597721 - DNA, 102 bp, Homo sapiens
cggggttcctggagcctcccgccgcgctccctccgccgccgcgcaacggtgaaaggtgtagcagtcactcggcctacacccacagcatcgaccttgtgaacc

SEQ ID NO: 597722 - DNA, 75 bp, Homo sapiens
ctggagaaactggtcaagaagaggcagtagaagaactgtttaacctgatgcagctgtttatagctcagaggccag

SEQ ID NO: 597723 - DNA, 83 bp, Homo sapiens
caggaggaagcaggagcagcccaagcgccttccctcacgtcaaaatgcagatcttcgtgaaaacccttaccggcaagaccatc

SEQ ID NO: 597724 - DNA, 100 bp, Homo sapiens
gtcattgtcaaagttcacgctgccagtgtaaatcctatagacgttaatatgagaatgccggtggtggtgtgcacattgagccccggtatagacagttccc

SEQ ID NO: 597725 - DNA, 50 bp, Homo sapiens
gaagagggaagacacgcggaaacagtcttactactttgaccgcgatgatg

SEQ ID NO: 597726 - DNA, 83 bp, Homo sapiens
attcgagtgaccgagaccgcggccgggaccgagggggtctaatgtgatggaagagcaggacctgcgggacatcggcatcagcg

SEQ ID NO: 597727 - DNA, 100 bp, Homo sapiens
gcgctttcctgggttgcttctggcggccatggtgttgctgctgtactccttctccggcactttgtgagtgtgccctccagactccttatgacagcttaaa

SEQ ID NO: 597728 - DNA, 73 bp, Homo sapiens
aagttcaatgcctcacagctgatcacccagcgggcccaggttggttttcagaagatcctgacactgacatatg

SEQ ID NO: 597729 - DNA, 75 bp, Homo sapiens
ctctgctcggccgcgggctcccggaggactgcaggtatgacctggacgcgtgtgacattcaagaaaaatacccgg

SEQ ID NO: 597730 - DNA, 100 bp, Homo sapiens
atggtgttgctgctgtactccttctccgagcactgcagcctgtggtgttgaggctcacagcgatgccatccagccctgccacatcagagaggccattcga

SEQ ID NO: 597731 - DNA, 90 bp, Homo sapiens
gaggaagtcagggggaaatgagtgtggcaaaggagcagagaactttgacaagttcttcacacgaggacagcccgtcttaacaccacctga

SEQ ID NO: 597732 - DNA, 51 bp, Homo sapiens
ggattccaagtaactcttatttggaatacaaacagaagcttgcacgagtaa

SEQ ID NO: 597733 - DNA, 87 bp, Homo sapiens
ctgacagatccgtagggaggacaccgtgacttcccggacgctgggaaatgcgctgataaagcagtttgtgtccgacgtggcctgggg

SEQ ID NO: 597734 - DNA, 100 bp, Homo sapiens
catcaacgaggcctacgtggagacgctgaagattgatgtcatgtatgaggaggaacctttaaaggattattatacactaatggatattgcctacatttat

SEQ ID NO: 597735 - DNA, 100 bp, Homo sapiens
agtttgagacgcgggagaatgcaggctgcgtgctggtacgtgcttttcctcctgcagcccaccgtctacttggaacttaaaaggagtctagaaaatccag

SEQ ID NO: 597736 - DNA, 50 bp, Homo sapiens
catatatgtcattgggcagggatcagaacggccggtttgtgggcgatgct

SEQ ID NO: 597737 - DNA, 101 bp, Homo sapiens
cgtggcagagaaaaccagctgagacagggcgccacttactagacaatgcagatcttcgtgaagactctgactggtaagaccatcaccctcgaggttgagcc

SEQ ID NO: 597738 - DNA, 100 bp, Homo sapiens
aaggacaaggacagaatcaccagcactggctgaagtggcactaaggaaaacagatcatctctccctagacaaagccaccatcccgcccgaaatctttcag

SEQ ID NO: 597739 - DNA, 100 bp, Homo sapiens
aacaaggagaaacattagccttaaatgaaagaatcatgttgtctcttgtcagcacaggaggcactgtgtttagtcttgagtcagaggaggaggaataccc

SEQ ID NO: 597740 - DNA, 75 bp, Homo sapiens
aaagaaagcaaagcgcagaaatgttggatttgaaaaatcatgaccaccccaggaaaagagaactttcgcctgaaa

SEQ ID NO: 597741 - DNA, 89 bp, Homo sapiens
aggagctggaggaagcagggacggagctgtgcaggttctgcgttagacctgcatcttagcaatgtgaatattgcatccctagagaagga

SEQ ID NO: 597742 - DNA, 100 bp, Homo sapiens
ggcagcagcggcgccgtgctcgctccaggtgctggagaatctggtaaaagcaccattgtgaagcagatgaggatcctgcatgttaatgggtttaatggag

SEQ ID NO: 597743 - DNA, 97 bp, Homo sapiens
taagtgccttaagagaggatcgcccaatccacatgcttttccagcaatggccaatgtacatggtggactatgccggcctgaacgtgcagctcccggg

SEQ ID NO: 597744 - DNA, 100 bp, Homo sapiens
ttacctgtaattctgatggcgaatgggtgtataacaccttctgtatctcagagcactgtccagagcttcctccagtggacaatagcatatttgtcgcaaa

SEQ ID NO: 597745 - DNA, 100 bp, Homo sapiens
tcaaaaggagcggggtcgacggtccccactttcccctgagcctcagcacctgcttgtttggaagaatgattacggacctgaagccaaagaacaagatgcg

SEQ ID NO: 597746 - DNA, 100 bp, Homo sapiens
ggcagcgcacgctgcagtccagggatgccaacagacagatcagcgacctcaaatttaaacttgcaaaatctgagcaagagataactgcattagaacaaaa

SEQ ID NO: 597747 - DNA, 75 bp, Homo sapiens
cagcgttacagtaatgttccagttttctggatatgccgcagaaggatccgtgccagaagcaagcctgtgagatac

SEQ ID NO: 597748 - DNA, 90 bp, Homo sapiens
tgactgatgatgaagcctggaatggattcgtggctgctgctgaactgcccaggtcctggctataagtcaccatggcacagcaagctgccg

SEQ ID NO: 597749 - DNA, 96 bp, Homo sapiens
ttcgagtctgtcctggccttggtggcctattaccaaatgagaagaagaagttggatgggataccgagattaaggatgatgtgattgaagaatgtaa

SEQ ID NO: 597750 - DNA, 73 bp, Homo sapiens
ccgtatactgcagcaggattggctgcagcagctacattagcagcttattacagccaaacttacacagataagt

SEQ ID NO: 597751 - DNA, 100 bp, Homo sapiens
ctgcctcacccagttccaggtagacatggaggccgtcggggagacgctgtggtgtgactggggcaggaccatcaggcgcggatcaagaagatcatgcaga

SEQ ID NO: 597752 - DNA, 76 bp, Homo sapiens
cgagagtatatgcgatgagtttggaattgagtgatctacagcgcgatccacctgctcactgttcagctggacctgt

SEQ ID NO: 597753 - DNA, 100 bp, Homo sapiens
cgctgacaaaggagcggaggagcagtcgcagctgctttccgaggaagccggtgttgccgagtctctggatggtcgtcagatccgtgtggatcatgcaggc

SEQ ID NO: 597754 - DNA, 100 bp, Homo sapiens
tccccctgctcggcgggcagtgaggaggaggatatggatgcacttttgaacaacagcctgcccccaccccacccaggtcaaaatgcagatcttcgtgaaa

SEQ ID NO: 597755 - DNA, 50 bp, Homo sapiens
ggcagcatcacccccggacagcaagataacgaaggaggcccaacttcatt

SEQ ID NO: 597756 - DNA, 100 bp, Homo sapiens
gacggcgagagcacggacagactcatggggaagggccaggtccaggacaggaagatgtcacccaagcgcatagctaaaagaaggtcccccccagcagatg

SEQ ID NO: 597757 - DNA, 88 bp, Homo sapiens
tcccagttccgcagtccttcctggcaaacagggggggccctcagcctcttggccttgaacgggctgttcatcttgattcacaaacaca

SEQ ID NO: 597758 - DNA, 82 bp, Homo sapiens
ccgcggttaaccacgtctcgtccacgacctccctaggctttgtgccttgggcaaagggcagcttactcctggaagaggactg

SEQ ID NO: 597759 - DNA, 88 bp, Homo sapiens
cagtaccagaggtggggactgttgttggaggaacactttccagccgagtcgtccggaaatccattgcccgtgttctcacagttattaa

SEQ ID NO: 597760 - DNA, 100 bp, Homo sapiens
ggcagcagaggatgatgagggcttcagtgcagacgcagtggtggccctggagcagtatgccagcaagaaatacccgcagcccaaagggcagaagaagaag

SEQ ID NO: 597761 - DNA, 90 bp, Homo sapiens
gtcctgggccccgggcggcggtcgccaggtctcagggccgggggtacccgaggatgccttccgcgccttccaccctgacctggaattcgt

SEQ ID NO: 597762 - DNA, 100 bp, Homo sapiens
cagcaccatcaaacaggatgactttaccgctcgtctctttgacatccacaagcaagtcctaaaagagggcattgcccagcttggccggactgaacgggtg

SEQ ID NO: 597763 - DNA, 90 bp, Homo sapiens
cattatcttaactgaggcacccaaaatgctccgggagtgtgagctgagccctggtgtgaacagggacctgacccggcgcgttcgcaacat

SEQ ID NO: 597764 - DNA, 100 bp, Homo sapiens
tcttcctctgacttggtactattctctctcccagttgaaaacaatcctcgaacaggaaatcttggtgcactaattaaggtcttcctttctagaaccaaag

SEQ ID NO: 597765 - DNA, 97 bp, Homo sapiens
gtctgtccgcttagtcatcacatcatttcactgtgcaattgctaaccatccaggaggagttaaacaacaaaaagtcagaattggaacaagcaaagga

SEQ ID NO: 597766 - DNA, 90 bp, Homo sapiens
aaagcctttgctatgatcattgacaaactggaagagtggaatgcagtagccctctgggcctgggatattgtggttgataactgtgccatc

SEQ ID NO: 597767 - DNA, 99 bp, Homo sapiens
caaacttcttaacccctagaccggtttttagtccattgactatgcagcctaatggagagcaaagcagttagagttcagaggccagcggcctcagggcca

SEQ ID NO: 597768 - DNA, 80 bp, Homo sapiens
ggagcgcgaggacagtgggaccttcaggtttccaatacttatctacaggaatcgccatgaccccagctctgagggaggca

SEQ ID NO: 597769 - DNA, 98 bp, Homo sapiens
cttctttacttggtgcaggaaggcagtctttgctacgtacagcaaaaggctttttagaccccgagaagaagcttttttctcaccgaatattatcaagg

SEQ ID NO: 597770 - DNA, 50 bp, Homo sapiens
caacgattgagatcatttaaagatctcattgctatggacagtgctatcac

SEQ ID NO: 597771 - DNA, 80 bp, Homo sapiens
cggccaacttcggcaagatccagatcgggatttacgtggagatcaagcgcagcgatggagcatcgtgcatcaagtcacca

SEQ ID NO: 597772 - DNA, 100 bp, Homo sapiens
tgaatgcagttgcttcagtacccataatgtattcttggtctcccctacagcagaattttatgcacaggagaaaacgacgctccacacctttaacttcttc

SEQ ID NO: 597773 - DNA, 100 bp, Homo sapiens
agctgcaaagtttgttgcaaggaagaattgggttgtgacaggagcgcaaatagtagtgatagtgaagaactttcagctggtgaaagtataactaagagtc

SEQ ID NO: 597774 - DNA, 75 bp, Homo sapiens
gtattcccaagataagaccgggatggtggactttgctctggaatctggtggtcagcccaaggccaaccccactgt

SEQ ID NO: 597775 - DNA, 90 bp, Homo sapiens
tcggcctatcgctaccctccgaagtccggaagtattacttaattcacctctacaggaggaacataacttccccccagaccattatggcct

SEQ ID NO: 597776 - DNA, 83 bp, Homo sapiens
gttgatggagaagctctaagtacactcgtcttgaataggttgtcatttagtaaaaacggagtagttagaatagatggtttctc

SEQ ID NO: 597777 - DNA, 80 bp, Homo sapiens
tctacattttcgatagagacgttttccggagggattccatcatagacctgcctagagctggaacgttacctccagagcga

SEQ ID NO: 597778 - DNA, 95 bp, Homo sapiens
agtagatggccacctctacctccacagaggcaaagtcagcctcgtgagaccacctgggaacgtcccagcagttctcctgggattccagccagccc

SEQ ID NO: 597779 - DNA, 50 bp, Homo sapiens
atcaacctgaggccgcagatgtcccaggaaattgcccggcatttacgccc

SEQ ID NO: 597780 - DNA, 83 bp, Homo sapiens
ctgggagagactggaccagaccatgggcctgagcatcaggtgtccctggccagtgtccttccacctgtccacaagcatgggga

SEQ ID NO: 597781 - DNA, 98 bp, Homo sapiens
tcagcctcatctactgcacacttgagtccatgagattttagagtggagagggctgaacccccctcatcgtgtcaagtcaatctccatgacaactttca

SEQ ID NO: 597782 - DNA, 77 bp, Homo sapiens
attatgctgcagcatattgtactggcctgctgctggcccgcaggtttgaaaatctgaacacagttgctgagtgtctg

SEQ ID NO: 597783 - DNA, 106 bp, Homo sapiens
cctggaccaggaggaggttttcaggaccaaaattgtggaaaagtcactctgagtggagactgctgcacggactctggaaccatgaacatatttgatcgaaagatca

SEQ ID NO: 597784 - DNA, 74 bp, Homo sapiens
tggcggcttccaggcgcactaccgcggtgcagaccatgaattacgtggggcagttagccggccaggtgtttgtc

SEQ ID NO: 597785 - DNA, 74 bp, Homo sapiens
ctggacatgcccaatgttagagaggataccgttaaccctggataaagagaatggaggttacctctgtccgtgta

SEQ ID NO: 597786 - DNA, 101 bp, Homo sapiens
cgtccttctccactttcgccagcccgtgccgcgagcgcggcctgcaggagatgttccaggtcatccagccagagcgtgcgctgtacatccaggccaacaac

SEQ ID NO: 597787 - DNA, 100 bp, Homo sapiens
agaggagctgtggataacgggaggtgaatttccatgtcaacatagtcctgagcccccctccatgcgcctgaaggcccgacccagcagccctggcttttcc

SEQ ID NO: 597788 - DNA, 83 bp, Homo sapiens
gaggggagcctgatcctatcgttttgacgccaggatgaaacaggcgcctatttaatcgacagagaccccacctactttgggcc

SEQ ID NO: 597789 - DNA, 106 bp, Homo sapiens
ctgccgtccttctccactttcgccagcccgtgccgcgagcgcggcctgcaggagcccgtggaccgggagcccgtggaccgggagccggtggtgtgccaccccgacc

SEQ ID NO: 597790 - DNA, 51 bp, Homo sapiens
attaattgcaaatatattaccagtggcaagtgacatcgatgtggcccagca

SEQ ID NO: 597791 - DNA, 100 bp, Homo sapiens
agtaaagaatggctgttgaacatccacaaggcacctgcaaggcagcttcatcagccttgagcagtctgggccacgtgtacacagccattggagactaccc

SEQ ID NO: 597792 - DNA, 101 bp, Homo sapiens
ggctaagctggcacgtcacttccgactagtggagtttttagccttttaacattcaaggattaggactaccgaccagactcccggaaatcatgttggtagga

SEQ ID NO: 597793 - DNA, 105 bp, Homo sapiens
tggtatgcggccttctatgccaagaagatggacaagcccatgctgaagcaggccggctctggcgtccacggtcatattgaacattccagatacctatcattactc

SEQ ID NO: 597794 - DNA, 82 bp, Homo sapiens
gagagcggcagcgggaccccagcgcgggcggcggcggctgggcgggagccccagaggtggcgggacaggcttcattgggaca

SEQ ID NO: 597795 - DNA, 74 bp, Homo sapiens
ggatattgatgcattcttaaaggtccctttgctactacaccagaagcaggcattggcttggttactatggcgag

SEQ ID NO: 597796 - DNA, 90 bp, Homo sapiens
ggcggcggtcgacatgttccaggtcccggatagcgagggcggccgcgccggctccagataaacattgacgatcttgaggatgaccctgtg

SEQ ID NO: 597797 - DNA, 82 bp, Homo sapiens
ccgccgccgccgccttgctgctgctcaaagctgctgccgccccttgggctaaaaggggacggcaaaacagaacagaaaggcg

SEQ ID NO: 597798 - DNA, 100 bp, Homo sapiens
aggggctccggctggtctgtggtgaggtgcagttcttagagcaacagaataaggtcctggagaccaaatggaacctgctccagcagcagacgaccaccac

SEQ ID NO: 597799 - DNA, 75 bp, Homo sapiens
gaaagaggaaattccatgtcattgtagcagagtgtgctcctttctgccaggactgatgggcggcgctggtctttg

SEQ ID NO: 597800 - DNA, 145 bp, Homo sapiens
aaaagaaaaaagaatgggtcaaccaagaacgtcaaacactccaacgattgagagcatttaaagatgagcaatttacagcaatgagggatttatacatgaaaaatggacaaggatttgcattagtttattccatcacagcacagtc

SEQ ID NO: 597801 - DNA, 100 bp, Homo sapiens
tggcgtggccgtcaaggagctggacctctacctggcctacttcgtgcgtgagcgaggcacgggcgagagcgggaagagcacgttcatcaagcagatgcgc

SEQ ID NO: 597802 - DNA, 82 bp, Homo sapiens
cccgtacaaagtgtacaggattgttcctgagggagccaaaaaagataatcttgtgccgtggaaatcagaagggcaaaacgaa

SEQ ID NO: 597803 - DNA, 98 bp, Homo sapiens
gcatggaagacgcagcctggccgcgctctcccactctcaaaggtctatggccctgtgttcactctgtattttggcctgaaacccatagtggtgctgca

SEQ ID NO: 597804 - DNA, 82 bp, Homo sapiens
tggccgagtggtctaaggcgccagactcaaggttcgagaacttgtcttggacaattgcaaatcaaatgatggaaaaattgag

SEQ ID NO: 597805 - DNA, 101 bp, Homo sapiens
tggaaatgtctgatgatgagaactgtgacagccctacaaagaaaatgagagtcgatgaatcaggtgctggagaatctggtaaaagcaccattgtgaagcag

SEQ ID NO: 597806 - DNA, 75 bp, Homo sapiens
cagattcgcagtggtcgcttcttctccttggaatcaagagagacccggccaaggcttttgtgcccaggactgtta

SEQ ID NO: 597807 - DNA, 75 bp, Homo sapiens
tgatttccagatgcagtttcgaaaatgtggtgggggaaaagtagctccagctcaaccatctgaggaaggaccagg

SEQ ID NO: 597808 - DNA, 73 bp, Homo sapiens
agttcgctacacagcaatgcatcgagcggagtttaagagagctgtgaaagtagcaacaggacaagaactctca

SEQ ID NO: 597809 - DNA, 75 bp, Homo sapiens
aggcttccgcccggcacaggggttaccggtattgtaagaacaagccgtacccaaagtctcgcttctgccgaggtg

SEQ ID NO: 597810 - DNA, 73 bp, Homo sapiens
gggatctgatttagtcagtcagttggctcattacaagcatgctttcttgcaaagaggaatttccagattgatg

SEQ ID NO: 597811 - DNA, 90 bp, Homo sapiens
caaggaaaaactggagagcttcatcaaaaatagtgatagctttgataacaactacatgcgattatagcagcatctgtctctataaagtcg

SEQ ID NO: 597812 - DNA, 83 bp, Homo sapiens
acttcattgctccttcaggacatggcctggtctgccacctcagaacttttcaatgtctgtcacagttccagtgaccagcccca

SEQ ID NO: 597813 - DNA, 87 bp, Homo sapiens
accacccacttctgatacaaagtcagatactgcaacaggtaatgtgaggctacaggagatgatggcaacaatgtgccaggaacgtgg

SEQ ID NO: 597814 - DNA, 50 bp, Homo sapiens
cgggtcgtctttcgtgtggccgcgagcctcgctcaaggagcacccccggg

SEQ ID NO: 597815 - DNA, 75 bp, Homo sapiens
aagccgaagtgtcagaattggagacccgtctggaaaagatctgacaggatggcatctgatgactttgacatagtg

SEQ ID NO: 597816 - DNA, 100 bp, Homo sapiens
tcatgagcgacagcggcgagcagaactacggcgagcggttttaaccatgctgaccaacgaaactggctttgaaatcagttcttctgatgctacagtgaag

SEQ ID NO: 597817 - DNA, 90 bp, Homo sapiens
gcggcggcccacgcgcagcgacagggagagcttcggaaccaaaaagaagcttcccagagccggggccaggagccccaagcgccctctagc

SEQ ID NO: 597818 - DNA, 100 bp, Homo sapiens
ccccggtcacagagtgcaccgtatcctgtcacttctggatgtgagctgcaagctttcttcctggtggcagatgacatcatggattcatcccttacccgcc

SEQ ID NO: 597819 - DNA, 101 bp, Homo sapiens
aagcacctggtgaagtcagcggagcccggggagcagcaggaatttgctgattcccttggaattccgtttttggaaaccagtgctaagaatgcaacgaatgt

SEQ ID NO: 597820 - DNA, 100 bp, Homo sapiens
tagagctgaaacaatgggacccatgggttgggcatttgatgtagaactactgtacatagcacagttctttaaaattccaatagcagaaattgctgtcaac

SEQ ID NO: 597821 - DNA, 107 bp, Homo sapiens
cagcatgagatccaaaggcagggcaaggaaactggccacaagtgctggagaatctggtaaaagcaccattgtgaagcagatgaggatcctgcatgttaatgggttta

SEQ ID NO: 597822 - DNA, 51 bp, Homo sapiens
ccgaggattggttcttcagcaagagcccccatcacctcaggcttctcagtt

SEQ ID NO: 597823 - DNA, 100 bp, Homo sapiens
gatcaaggagcgcaagtgcctgctcctcaagatccgcggtgggaaacagttcattttgcagtgcgatggtcctagtgggaaggacaaggacctggtgttg

SEQ ID NO: 597824 - DNA, 49 bp, Homo sapiens
gaaatgggaagaggcccagtccagagagatgctgcagttggagaagaaa

SEQ ID NO: 597825 - DNA, 90 bp, Homo sapiens
aagcaagaggccatggaccctgtctcagtgcgtgactctggtggccctgtggtctgcaacggacagctccaaggagttgtctcctggggc

SEQ ID NO: 597826 - DNA, 98 bp, Homo sapiens
aacgcagagacaaaagaaacgggccccgactgtctgcgggccaggcatcgacatccgcaacgactatcagcagctgaagcgcctggagaactgcacgg

SEQ ID NO: 597827 - DNA, 98 bp, Homo sapiens
actcacaaatacctgtgatttctctccccgtctccacctccagctgatcgtcgtgtgttgccacccattcatgtcaagatgactaagtttggattttt

SEQ ID NO: 597828 - DNA, 74 bp, Homo sapiens
gcagttttcatggatgcccctgtttctggtgattctgatgctcacagtaccacctcaagtgcctccccagctca

SEQ ID NO: 597829 - DNA, 88 bp, Homo sapiens
agaaataaggacaaaagccaagaggaggacagttcgctacacagcaatgcatcgagttcccagtgacctgacagcagaggagcgtcaa

SEQ ID NO: 597830 - DNA, 75 bp, Homo sapiens
ggcgcatcactcccagctgcgcaaagcttgcgaggtggcgttaggatgacatgcacttggtgataagaaagcagc

SEQ ID NO: 597831 - DNA, 88 bp, Homo sapiens
ccgagagctacacgttcacggtgccccggcgccacctggagagaggccgcgtcctgggcagaggtacggttcctggagcagcagaaca

SEQ ID NO: 597832 - DNA, 96 bp, Homo sapiens
ctggcagcttctccgagaccccaacaccccactgttgcaagatcctgatctggtccattcagcagaggactgcagaagtctgaggagccttaagat

SEQ ID NO: 597833 - DNA, 83 bp, Homo sapiens
ggaggtgccgcgcggctcggagccctggaagcagcagctcaccgaggacggggactcgctgatcagctgaccgaagaacagat

SEQ ID NO: 597834 - DNA, 98 bp, Homo sapiens
ctgttccaccttcagagcgtcacggcgtacgccctcatggggaaaatctccccggtgactttcaggattgtgcacctgtgcctgcgaaaggctgacca

SEQ ID NO: 597835 - DNA, 98 bp, Homo sapiens
tctgaaggacttgctgaaatgggtcttagaggtaatggaactgctggtccatctgaataaacgtataaaaagccgccccaaaatacaacttccagtag

SEQ ID NO: 597836 - DNA, 90 bp, Homo sapiens
ggcagggagtgcatcaaaggtgtgaacacaggggcgacctatctactgctcttgaggtcgccattgactgctatgaaaagtataaagtat

SEQ ID NO: 597837 - DNA, 75 bp, Homo sapiens
ccgggacacctggaagccgagaaatgatgtttgtcccacacaaagaaaatgggcacatgctgaaattccttgaag

SEQ ID NO: 597838 - DNA, 74 bp, Homo sapiens
attgatgagaaaaactttgtggtggttatggtgaccaaaaactttcacgatggccgtaaagcacagcagcacat

SEQ ID NO: 597839 - DNA, 111 bp, Homo sapiens
cctggacatcaagattaaaagagcgaataaagtttatcacgccggggaaagaacatgaggttcccttggaaatcattcaagaggaagatggaaggggctgtttagaagagc

SEQ ID NO: 597840 - DNA, 100 bp, Homo sapiens
cggcagcggcgggcctgaggcgaaggagcggccgggagcccgccgcgctggtagcggctgcctgctgtttcccggggagatcatgaaacgaggtcgcctt

SEQ ID NO: 597841 - DNA, 75 bp, Homo sapiens
cttctcggcgctgccgtctctggaggagtactggcaacaggcaggaagttatgttcgtgatgatgcagtccccaa

SEQ ID NO: 597842 - DNA, 100 bp, Homo sapiens
gagggaggaccctggaacatcccggaagccgggaaatgtactatactggcaattgctggagaagattttgcaattgttgcttctgatactcgattgagtg

SEQ ID NO: 597843 - DNA, 90 bp, Homo sapiens
tcttaattcccctgaccgtgcctgcaggtgggtcatgataactgggtacgtggagttctgttccattctggggggaagtttattttgagt

SEQ ID NO: 597844 - DNA, 100 bp, Homo sapiens
ggcaactgctggtttgtggcagcctgctcgtcacttgcctcccgggagtcgctgtggcaaaagaaattccgggtagatatgcctggctcaggcagtgcat

SEQ ID NO: 597845 - DNA, 100 bp, Homo sapiens
aaccttttgctaacaaaaacaggttcgatacaagaggctgttttcctagcgtggcttgctgcctttggtaagaacatgtcgtccatcttgccattcacgc

SEQ ID NO: 597846 - DNA, 75 bp, Homo sapiens
gagaccgtgaccgagagcgtgaccgagagcgcgaatatcgtcatcgttagaagcatgttggcagataaattgaac

SEQ ID NO: 597847 - DNA, 90 bp, Homo sapiens
tgacaagtgggatggatcagctgtgaaaaactctttggatgattctgccaaaaagacaatgcctgtggaagacaagtcagaccccccaga

SEQ ID NO: 597848 - DNA, 85 bp, Homo sapiens
ctcctggacaggatggattgccagggcttcctggcccgaaaggagagcctctctggattaatcgaattacagctgctagccagga

SEQ ID NO: 597849 - DNA, 82 bp, Homo sapiens
actaagaccaagtcctcgctggactgctcagggtgccagacctcatcctccaggtttacaccctgtacctggtggagtgttc

SEQ ID NO: 597850 - DNA, 50 bp, Homo sapiens
gcaagatggcagccaccacgggctcggtagagacggggtttgaccgtgtt

SEQ ID NO: 597851 - DNA, 88 bp, Homo sapiens
agctgcctcagttcttagcgcaggaacacgatgaacctattctgaagcacttgaaagatattaaagtgaagttctcagatgctggcca

SEQ ID NO: 597852 - DNA, 100 bp, Homo sapiens
tcggggctacaggcagtggccagcatagcaggtggtgggagtgaaggacgatcggatgggggaagagatttgtgcctgcattcggctgaaggacggggag

SEQ ID NO: 597853 - DNA, 100 bp, Homo sapiens
aagtatggcatgaagtgtgaaggcatctacagagtatcagatagtaaagctgttacttcgtcacggtggaaatccatttcaagctaataaacatggggag

SEQ ID NO: 597854 - DNA, 100 bp, Homo sapiens
gatggaggaagtgctcctgctgggcctcaaggaccgcgagctcagctcaagatagacatttctcccgcacctgaaaatccccattattgcctaactccgg

SEQ ID NO: 597855 - DNA, 101 bp, Homo sapiens
gatggccgacttcgatgatcgtgtgtcggatgaggagaagatgcattcctggagcaagctgtgtcatatcaacagtttgtggacaaccccgctattatcga

SEQ ID NO: 597856 - DNA, 74 bp, Homo sapiens
cgggagagtagcagtgccttggaccccaggccctcagcatcctcatgctccctcacaacatcccgtccagcctg

SEQ ID NO: 597857 - DNA, 82 bp, Homo sapiens
ggcgagtttccgatttaaagctgagctgcgaggaaaatggcggcgggaggtcttagaaaaataccccaatacacccatgagt

SEQ ID NO: 597858 - DNA, 100 bp, Homo sapiens
gttttccggtttggtgatcaatacagctggaggttaagaaatatcctctcagttgtcggtactgatgccttgaaaaagaccaaaaaggatgatgagaagt

SEQ ID NO: 597859 - DNA, 100 bp, Homo sapiens
cccgggagtgccgtgcgccgcagcccgggcccaggccccggcagcgcctgggacaaggaactagcttctaaaaaatccctgcctatgaattattacacag

SEQ ID NO: 597860 - DNA, 74 bp, Homo sapiens
tgcgaccgcgtgtaaatcggtgcaggtgaacggagccgccacgggtgattctgggggtccacttgtctgtaatg

SEQ ID NO: 597861 - DNA, 82 bp, Homo sapiens
tgctcctgggactccaggataccaggtcatcatcagatttgaaatatttaaagtggatacaaaactatttcagcaatgcaga

SEQ ID NO: 597862 - DNA, 88 bp, Homo sapiens
aagaaattgttcagttcttctcaggaaagtacacaggaagatgctatgaaatttccatcttcccaatcttcccagccttccaggcttt

SEQ ID NO: 597863 - DNA, 98 bp, Homo sapiens
cccccctgaaccccaaggccaaccgcgagaagatgacccagatttttggggacatcaggacagaacgtgagtgacattttccgatacagcagcatgga

SEQ ID NO: 597864 - DNA, 82 bp, Homo sapiens
cttggggctagctgcggcggggctggagtgaagacatttccacctggacacctgaccatgtgcctgccctgagcagcgaggc

SEQ ID NO: 597865 - DNA, 83 bp, Homo sapiens
ctccttcggcagtccacccaccgccgccgcctcccagctcttccgccctctctggatgagggaacagaagtggaggaaacaaa

SEQ ID NO: 597866 - DNA, 88 bp, Homo sapiens
gagattgatcaattcaatgatgatacatttgggtcaggtgcagttggaactcgaatcatttatgacagaaagtttctgttggatcgtc

SEQ ID NO: 597867 - DNA, 75 bp, Homo sapiens
cacccaggcgcggagggaagacgccctggtgctcaccaagcaagttctgctaagccaatattctctagaatgagc

SEQ ID NO: 597868 - DNA, 75 bp, Homo sapiens
aggggaccaagctggagatcaaacctatgtttccagtgtcctctgggtgtttccaagagcaacaagaaacgaata

SEQ ID NO: 597869 - DNA, 75 bp, Homo sapiens
ttcaacaccaccttcatctccaccatcggtggaatatgtgatcaagtgtgacatgtcagctctgcagaagattct

SEQ ID NO: 597870 - DNA, 88 bp, Homo sapiens
ctgttacaacacctactgtgtcatcaggtcaagcaacacctacatcacctattaaaaagattccaaacagaggcattgatttactgaa

SEQ ID NO: 597871 - DNA, 87 bp, Homo sapiens
ttgatcttcatgacccaccacaagatgttgtttgcattgacttggatacgaacatgttatatgtgaggagacatcacagctttccca

SEQ ID NO: 597872 - DNA, 98 bp, Homo sapiens
ttcgcgggcgattcgcgtagcctcagagaattttctctacatgtgcacccatttaaaggactcggcttcaagggaagcagcttccaccgcattatccc

SEQ ID NO: 597873 - DNA, 100 bp, Homo sapiens
tgttgaaagaacccacaggtgcatttcacagcactctgggcgaaaattggatgtgaaaatgaagccagaccgagtgagttccttcggggttactcctgca

SEQ ID NO: 597874 - DNA, 51 bp, Homo sapiens
gtggaggaaaacaacttcgagggcagagggaggacgaggaagaaacgaacg

SEQ ID NO: 597875 - DNA, 50 bp, Homo sapiens
aatcacagcagtgcccagtttctaatgcacaagctgagtgtggaagcccc

SEQ ID NO: 597876 - DNA, 75 bp, Homo sapiens
gactttcttccagcttctgctgtccttctttgtggagagcaagccaagacaatgcaaactccagtgaacattccc

SEQ ID NO: 597877 - DNA, 101 bp, Homo sapiens
aagtgcgaatgttaaatcagctggagaaggagaagtggagaagaaatcagtcagccgcaggcactggagatattattgctgtcatgataacagaattgagg

SEQ ID NO: 597878 - DNA, 100 bp, Homo sapiens
gagaactggttctacacgcgagctgggcagggtgccatttgccgtgcctgacaaagtgctgtggccacagctgtgtgaggcgctcaacatgaaattcaag

SEQ ID NO: 597879 - DNA, 145 bp, Homo sapiens
cttctggcgctgccgcccaccttgtggccctgggctttaccatctttgtggctgtgcttgccaggcctggctccaagagatgcaggtcagctcctccagtaccacaacttctgagagtcaagatccgtcttctggggaccctgcc

SEQ ID NO: 597880 - DNA, 100 bp, Homo sapiens
actaggcaaagaacttgcgtcaaaatcaggactgaaatacattaatgtgggtgatttagctcgagaagatctgcgatttccttctggttggctgtcctgc

SEQ ID NO: 597881 - DNA, 90 bp, Homo sapiens
tcggcctatcgctaccctccgaagtccgatctacgcagaccccaccaagaggctggagctgtacttccggcccaaggacccatactgcca

SEQ ID NO: 597882 - DNA, 90 bp, Homo sapiens
tgccctttcccagtcacgtgcttccggaacccgggttcccagacacagacccctctcagggcttaacctctaaggagcgcaagacccaag

SEQ ID NO: 597883 - DNA, 74 bp, Homo sapiens
caatgctccagaagcagcggctggaatttgcgttttatgtcattgaacagttttgctacttgagaagatagaac

SEQ ID NO: 597884 - DNA, 75 bp, Homo sapiens
aaaccctgcaaaggagtccctagagacacctagtaatggttcaggagctccatgaggaggaggcacagtgggtga

SEQ ID NO: 597885 - DNA, 71 bp, Homo sapiens
gctgcgcaagatggcctcctcctccggcgagggcaaggctataatagatgaatttgagcagaagcttcggg

SEQ ID NO: 597886 - DNA, 74 bp, Homo sapiens
tccaggcctgacagctctgcggctcgggccctgagtaatagttatgcacgagtgcgagctgtggtgatgacccg

SEQ ID NO: 597887 - DNA, 100 bp, Homo sapiens
gctggctgcaaacccaactcctgagaatcatttctgggagaatgccgaagactgcatttcaacttcaagaatggagacgttgacatttagggatgtggcc

SEQ ID NO: 597888 - DNA, 100 bp, Homo sapiens
agaaagataggcggccatggtccaaccttgaagggacatctctacaccgttcccatccgggaacagggcaacatctacaagcccaacaacaaggccatgg

SEQ ID NO: 597889 - DNA, 87 bp, Homo sapiens
aagattaaaaaactggagccagtccttttgccaggtactccaaagattcaggtttactcacgtcatccagcagagaatggaaagtca

SEQ ID NO: 597890 - DNA, 75 bp, Homo sapiens
gcttgtgtagcgtcagatccttgagtgataaaggagtagagcagcagtgttgtactgctacttctataaacggac

SEQ ID NO: 597891 - DNA, 100 bp, Homo sapiens
ctgaccgtgtctacaccagcaagagcgatgtgaatcatgtccctaaggaggaagctggagctccacgaggggaggggccggccatcccaggagacacccc

SEQ ID NO: 597892 - DNA, 77 bp, Homo sapiens
gtgtcaggatctgaagagctatggtgaaacaccactgaagcattgccaagtattctaccttgtaaatactgttattt

SEQ ID NO: 597893 - DNA, 80 bp, Homo sapiens
ggatctacgagatcgaggacaggacgcggtgagggccccaaggctgttgcagctcctcgacctgatcggttggtcaatcg

SEQ ID NO: 597894 - DNA, 50 bp, Homo sapiens
gtggaggcagaggtggcatggggtttgggagcagcagcaacaccacatcc

SEQ ID NO: 597895 - DNA, 80 bp, Homo sapiens
acggactgtgtccggcgatgggcacgggaagccccatgtgccactcccctgatctgcagcttcggtaggccggtggacct

SEQ ID NO: 597896 - DNA, 74 bp, Homo sapiens
cgacaggcggcgcgggcggcggaagaactgtaggaatagtcacagcttgacaaccgaacacaacctgagtgtgc

SEQ ID NO: 597897 - DNA, 80 bp, Homo sapiens
gtgagctgtccctgctggaggagcgcttccggaaaacttctgtgaagctatcagtaaacttcaagaaaattacattgcag

SEQ ID NO: 597898 - DNA, 75 bp, Homo sapiens
cagaggaatcgttactctttcaggtttgggccccatggtatccctgtgacagtatttcccaaaagggaatataag

SEQ ID NO: 597899 - DNA, 95 bp, Homo sapiens
aagttttcagcctcatccagcaggcggtgacccgctaccggaaggccatcgccaagcccaagctgttggccaaggagcttcttgaccttgtggct

SEQ ID NO: 597900 - DNA, 101 bp, Homo sapiens
tttaacattccaacacataaaaattatttatccaacagctcctcccagctgtatgcaggagctattcttgaagtttgtggatgaaaattgggaaggttccc

SEQ ID NO: 597901 - DNA, 75 bp, Homo sapiens
atggctgcaatagcaagaaagcctattttctgtatatgtattccagatatctgggcaatagtctgaccttgattg

SEQ ID NO: 597902 - DNA, 100 bp, Homo sapiens
gctaaacgtgggtttcttactaaggacgagctgatcaagtatatgactgaagaaggaaggaagcagccaccctcgccatggcctccccgcccgcctgccc

SEQ ID NO: 597903 - DNA, 98 bp, Homo sapiens
ggtcaggctcgccgccgagctgtatggctgtgacccgatccaaagacgctcctcctttcggcccccccatccccagtggaaccacattccgcaaatcc

SEQ ID NO: 597904 - DNA, 100 bp, Homo sapiens
tggatgggtaaaacctatcatcataggtcgtcatgcttatggggatcaaactgacaatcacctgaaacattatttacatatcattgaaaacaaacccctg

SEQ ID NO: 597905 - DNA, 76 bp, Homo sapiens
ccgatttaaagctgagctgcgaggaaaatggcggcgggagaagcatcaagtgtacctgatttgtgaacctatcttg

SEQ ID NO: 597906 - DNA, 75 bp, Homo sapiens
agcatcttgagaggaacagaaagattagcctgaggcctgctcagtcgttcctaatgaataaaaatcaagtgccaa

SEQ ID NO: 597907 - DNA, 82 bp, Homo sapiens
ctgctcatttgtctactgcctcattcctggaaattgcactggaactgtctgattaagatccaaacgatcaaagatgttgctg

SEQ ID NO: 597908 - DNA, 49 bp, Homo sapiens
aaagttcttgggacaaacttcatttgtggcccgaacctgtaacttgatc

SEQ ID NO: 597909 - DNA, 100 bp, Homo sapiens
gtgaagataggatcaagatggccatgtggcaggattgaagatggaggcaaggcagctttgtcccagaagatgaggactggtgatgagctggtgaatatca

SEQ ID NO: 597910 - DNA, 97 bp, Homo sapiens
ccgagagagtgaggagccagacgacaagcacacactatggcgctgaaacggattaataaggtgcaacagctgcagcccggaaagaggtgataaggaa

SEQ ID NO: 597911 - DNA, 100 bp, Homo sapiens
ccgcgccccagggcctgctcagccccacgcaggtgcccaccggcctcggcctggatgggcagcgccagagggtctgcccagggagccccgtcacagtacc

SEQ ID NO: 597912 - DNA, 100 bp, Homo sapiens
gtgaacagccttttatctccaagcggaaagaaaggtgctgcgacaagagactttggacaaaaattgacttgagtaggtgtaaggccattgtgccccaggc

SEQ ID NO: 597913 - DNA, 90 bp, Homo sapiens
ctgccgggattttggaggccggggccgcgctgagggcgcccagctgtttgggagcctctggtggagcaagtaattgggattcctacagtg

SEQ ID NO: 597914 - DNA, 51 bp, Homo sapiens
ggtttggaaaaatttcattagagcctacaacacagcagtcccctcaggatg

SEQ ID NO: 597915 - DNA, 83 bp, Homo sapiens
gccctctcgctgttgctggtctctggctccctcctcccagggccaggcgccgctcagaacgatgatcacagtcgtgttaaact

SEQ ID NO: 597916 - DNA, 100 bp, Homo sapiens
tagaggaaaaaaaattgaagaatgtaaagggagagcgcctttggctagtatagcgaggtgtgtgcggattttaggcaaacaagaaaatattagagtgatg

SEQ ID NO: 597917 - DNA, 90 bp, Homo sapiens
aacgctgctgtccgggctgtgacgcgcatgggcatttatgtgggtgccaaagtcttcctcatctacgagcagggagagcaacaagccccg

SEQ ID NO: 597918 - DNA, 100 bp, Homo sapiens
gttggggctgtgggacttcgaaggagggctctcctgtctgccaccatcctgggttgacaattctacacaaggaggttgcaaaagcttctcatttcagaga

SEQ ID NO: 597919 - DNA, 50 bp, Homo sapiens
cagcccaagcgccttccctcacgtgccttagctggaccaattattgtgga

SEQ ID NO: 597920 - DNA, 75 bp, Homo sapiens
ctaagttcttaagagacaccaagaaaatggatattccagctaaattgattgtttgtggaatgacatcaaatggtt

SEQ ID NO: 597921 - DNA, 82 bp, Homo sapiens
atcctgatgaagttcgagcactaatatttaagaaagaagatgttaactttcagacagtatgctggctatgactattcgcagc

SEQ ID NO: 597922 - DNA, 73 bp, Homo sapiens
agatgaggagctcaagcccaagaagaaagtcttcgagaagttgcagaagaaggaggtcttcgaggggagaaga

SEQ ID NO: 597923 - DNA, 98 bp, Homo sapiens
gctgcattcagtaaaaataaggtgcccagcagagatctccaggacttcaagttagatgtgcagcacgtgattgaagtggatgagggaaacacagcagt

SEQ ID NO: 597924 - DNA, 100 bp, Homo sapiens
gtgaatgtgaagaatcagaaatctttactgattccaatttcccagtgacctgacagcagaggagcgtcaagaactggagaacatccgacggagaaaacag

SEQ ID NO: 597925 - DNA, 82 bp, Homo sapiens
ctcgtactgagaaaatacaaggagctggacatcgagcctgagggaggggaaaggcgcagggccctgggctgcatcttgtacc

SEQ ID NO: 597926 - DNA, 88 bp, Homo sapiens
gaaaagtctttcagaataaaatgactggcatagtgagtatggtatacacacaatcggagattctacagaaggaagtgtacctctttga

SEQ ID NO: 597927 - DNA, 50 bp, Homo sapiens
cgagaccgcggccgggaccgagggaggctgctggtacaaatactgcagaa

SEQ ID NO: 597928 - DNA, 74 bp, Homo sapiens
ccccgctacgagctggctttaatcctgaaagccatgcagcgggcactcaaggagttgcccctggtcctgtaatt

SEQ ID NO: 597929 - DNA, 51 bp, Homo sapiens
cccaacattgactgcacatggaacattgagaaccttgtgaaacatcttcct

SEQ ID NO: 597930 - DNA, 82 bp, Homo sapiens
caaggaggtgctgaagagcgaggagattcccaacctgctgagcatccgcacacccactcaggagttggggcccagctcccag

SEQ ID NO: 597931 - DNA, 87 bp, Homo sapiens
tggcccagatccaaaataacttttcactagagatcaatgggaaggacttgacacagcaagcaaaagacatacagaacataacagtcc

SEQ ID NO: 597932 - DNA, 98 bp, Homo sapiens
tgtggttctcaaatataggcattctgatgggaacttgtgtgttaaagtaacagatgatttagttctggagcagttcaagaaggacaacgaggaaacag

SEQ ID NO: 597933 - DNA, 83 bp, Homo sapiens
agaaactagagcaaataaccgttttgaaattacctagaggatcaagacataatgggagcatttttagacaagccaaagatgga

SEQ ID NO: 597934 - DNA, 75 bp, Homo sapiens
tctgaactgggaggtgactttgagttcatggatgatgccaatgttggggatcagccaggtgaggtaggttattca

SEQ ID NO: 597935 - DNA, 100 bp, Homo sapiens
aaaaaagagaaacctgggtgaactttcacggacaacctcagaggacaacgaagtgttcgatgtgctggtggacggacagccatgtgaccgcgaggctgtg

SEQ ID NO: 597936 - DNA, 82 bp, Homo sapiens
tcaagattaaaagagcgaataaagtttatcacgccgggggtgaatttggaagtgaaaagaaaactgctttgcatgaaaaaga

SEQ ID NO: 597937 - DNA, 82 bp, Homo sapiens
agagaacttgccatgctacgaagacagcagatcaaggttgaatttcaggcaggatctgaaggccaacttctgcctcagcatt

SEQ ID NO: 597938 - DNA, 100 bp, Homo sapiens
tgaatttctctctttgggaggaggaagggacaccgagggaccaaagggcgagccgacgcgcagcctccaggttccgccagcaccaacgtggtcctgcgcc

SEQ ID NO: 597939 - DNA, 98 bp, Homo sapiens
ggggcccgtactgcacatcgtggtggtcggatttcaccacaagaagggctgccaggtaggtgatgctctgatgctgctgcctcttatgaattgacgac

SEQ ID NO: 597940 - DNA, 119 bp, Homo sapiens
cacagccagacctatggcaatgggtccaagtgcgaccttaatgggaggccccgggaggccgaggttcggaattacctctctgaacaggactttgtgtctgtgtttggcatcacaagagg

SEQ ID NO: 597941 - DNA, 99 bp, Homo sapiens
aaagaaaaagataaaactgagaaagaattgcccaaaatgagccagacggcggagactggctgagtggaaagcaactaaactgaagaataaattcggaga

SEQ ID NO: 597942 - DNA, 83 bp, Homo sapiens
tgacaggcaagtttcaagacagtggctaagcccaggtcctgaagagaggaggattgcacctctgcctccacctcccctactac

SEQ ID NO: 597943 - DNA, 75 bp, Homo sapiens
agctacgggcccagttgagcctcatggctcaccctggggaaggagatggaacagcagctgcagagctcacaccag

SEQ ID NO: 597944 - DNA, 100 bp, Homo sapiens
tctcctgatacagcaggcgctcaccatgttccctggagctcaggggaccccaggtatggctccaccgccagcccctgccactgcttctgccagtgctggc

SEQ ID NO: 597945 - DNA, 82 bp, Homo sapiens
atgctcctgttttcccggctatgccatcatggcggatggcgtgtcctgtgaaggtttggtgcacctcgatttggaggaagta

SEQ ID NO: 597946 - DNA, 99 bp, Homo sapiens
ccacgtcttcctggggcgctttgacgtggccgccgagtactacaaaaatatcgaagagatcctgacggccagaggcgagcaggtgcaccgtgtggcggg

SEQ ID NO: 597947 - DNA, 94 bp, Homo sapiens
ggacttcagagaaattctcatgatagcttccaagggacaaggtgtcaacaatgtgccggtagctacagcaagctgggtagcaggcagatccaaa

SEQ ID NO: 597948 - DNA, 100 bp, Homo sapiens
cagagttgtgggccgccgtcggcagcaagaacagagagagaggtggacagatctgagagatactgagtgatcagcctttgagcctttcccacattgaaga

SEQ ID NO: 597949 - DNA, 50 bp, Homo sapiens
gggaaacgctgtttgaagcgggtgactttggcaggctatggcttcgcctt

SEQ ID NO: 597950 - DNA, 82 bp, Homo sapiens
gggtgacccacgcggaggccgtcaagacaccttcagcagtaaacaagataaaacaacttcttaaagataagcctgagcatgt

SEQ ID NO: 597951 - DNA, 112 bp, Homo sapiens
cgtcgcttcagcgttctcgggtgctacgctgctgcagctgccgcctcttccaggcgcaccaggagctcgcccgtcagcgaggagtcctggagcgcacagagaagatggtgga

SEQ ID NO: 597952 - DNA, 83 bp, Homo sapiens
cctcgagaccggcagcctcgacgaagaaccggaaggaggaaaaggaacgggagggaggaagaaaaaagcttgtggtgaagggg

SEQ ID NO: 597953 - DNA, 75 bp, Homo sapiens
gggacccagtgcgcccgcatcgtcgagagctgtacaaaaagtttttcctaataagagaagcttcattcttacccg

SEQ ID NO: 597954 - DNA, 73 bp, Homo sapiens
tcctgcctcagtctcccaaagtgctggaattacagggatccagggcctggagcaaagagcggatggggagcgg

SEQ ID NO: 597955 - DNA, 100 bp, Homo sapiens
cgctggagaggacgcgaggagccatgaggcgccagcctgcgaaggtggcggcgctgctgctcgggctgctcttggagggtcccctggaagtgacgctgac

SEQ ID NO: 597956 - DNA, 90 bp, Homo sapiens
tttgatccctgtgtgctgaagaggggcaccaccacgaggcgatttgtgggccataccaaggatgtgctgagtgtggccttctcctctgac

SEQ ID NO: 597957 - DNA, 100 bp, Homo sapiens
gttcttcttgttatctttccttggctactgtaaagcatttagagaaagtagcagaaggtcaagaaatttgtgtgattgaagccatgaaaatgcagaatag

SEQ ID NO: 597958 - DNA, 75 bp, Homo sapiens
gattcgcagtggtcgcttcttctccttggcaagttaggaaatcaacattgaatcccaatgcaaaggagttcaacc

SEQ ID NO: 597959 - DNA, 75 bp, Homo sapiens
gccaaggaaaaatcgagcagaaagaatgtctttcagacattgcagaaacgcttcactttctcctgtgtggtgcct

SEQ ID NO: 597960 - DNA, 100 bp, Homo sapiens
cttaccagctttgacaatacaggaaatgttttttcaccagtgatcattaaagaatgggcagcttacaaaggaaagtctcctcaaaccccggaactggttg

SEQ ID NO: 597961 - DNA, 100 bp, Homo sapiens
gttccaccttcagagcgtcacggcgtacgccctcatggggaaaatctccccggtgactttcaggcataaacttggaggaggcagtggagagagcatcctg

SEQ ID NO: 597962 - DNA, 107 bp, Homo sapiens
gcctgccctgccacacagtgtgcctgcaacctgtccggggatcccagggagggggatatgagactttctactcggaatatcctgagtgttgcgtggatgtaaaaccc

SEQ ID NO: 597963 - DNA, 75 bp, Homo sapiens
cccctgagccatgcccatcgcagccgccccgaaggagccagatcaacagtacaaattctgaagtttgtaaacttg

SEQ ID NO: 597964 - DNA, 75 bp, Homo sapiens
gctacttgaagatagccatcagccgctacgtgactcttttctccagccacctaatgatccccatggtatccagag

SEQ ID NO: 597965 - DNA, 100 bp, Homo sapiens
agctgctgaagcccaccgaattagcgagttcctggggaaaaccccagggcaaaacgctcagaaatggattcctgcacgaagcactagacgagatgacaac

SEQ ID NO: 597966 - DNA, 100 bp, Homo sapiens
agcgaggaagacattgaccgctgcgtggaggccttcgtggaagtggggcgactgcacggggcactgccctgagctctggctgccaatttgtggtgtctga

SEQ ID NO: 597967 - DNA, 100 bp, Homo sapiens
cggggccgctgctcaagttccagatttgccctgggcgctgcctatggcacagccaagagcggtaccggcattgcggccatgtctgtcatgcggccggagc

SEQ ID NO: 597968 - DNA, 75 bp, Homo sapiens
gatggcctctcttttatctccagttctgtcatcatcaccaccacacactgttctgttatgttctgaacccacaca

SEQ ID NO: 597969 - DNA, 99 bp, Homo sapiens
ggatgtgatgctggagaactgcaggaacctggcctcactagcttgagagtttttccagcagtaccagctccagccaggatcaccctctctactctgggc

SEQ ID NO: 597970 - DNA, 83 bp, Homo sapiens
cggacacataacaagcagcagtgaggacaccaaagggggaaatttgcagtggtgagaaaatgtataaagaaagattctgggaa

SEQ ID NO: 597971 - DNA, 74 bp, Homo sapiens
agatagtaaagatgatgatgacattgacctctttggatctgatgatgaggagcaaacccgctggttcagaacca

SEQ ID NO: 597972 - DNA, 139 bp, Homo sapiens
ggaaaactaggaatctatgatgctgatggtgatggagattttgatgtggatgatgccaaagttttattagacatatctgaagagatggattaagaatgctttggattaaggattgtggagcacatttcaatcattttag

SEQ ID NO: 597973 - DNA, 100 bp, Homo sapiens
aggatgggacgtggagtaacaagattcccacctgtaaaaaaggccagggatgtaccgcctacgacgtagctgtcaacagcgacttctaccggaggatgca

SEQ ID NO: 597974 - DNA, 100 bp, Homo sapiens
caacctcagggggaacaaaagcatctccatgagtgtggctgggtcacgacaaggcgcagcccagcctcgaaatgcagaacgacgccggcgagttcgtgga

SEQ ID NO: 597975 - DNA, 80 bp, Homo sapiens
acaagtttggcagcatccggcagacgtacacgctggacgtgctggcggctggctgtcggcaattggattcttccagtaca

SEQ ID NO: 597976 - DNA, 100 bp, Homo sapiens
cagatgttccagtggttcgagggaaacccaccttgcgtacaagaggtgtaccagccccagcaataaccagaaatgagccgtcagactgctacagcattac

SEQ ID NO: 597977 - DNA, 130 bp, Homo sapiens
ttcctaatcaatttttattttccagactcatctttcaagaggactttagactaattgcagataattaagagacagagtctcactatgtcgcccaggcttgtcttgaactcctggactcaagagatcctcc

SEQ ID NO: 597978 - DNA, 75 bp, Homo sapiens
cttgttccatgaaagtacattggggcacggacagcatcgtggccgagctggaccgagagatgagcaggagcgtgg

SEQ ID NO: 597979 - DNA, 82 bp, Homo sapiens
gccgaggcaccgaggcactcagaggagatattaataaggcagcggaaagaagaaatatgaatacggctccatcaagacccag

SEQ ID NO: 597980 - DNA, 88 bp, Homo sapiens
tttattgacttctcagtgtacaacgccaacattaacctgttctgtgtggtcagattcaggaattgtagggcctcaacctatagacttt

SEQ ID NO: 597981 - DNA, 98 bp, Homo sapiens
ttgaactccgagaggaggtggaccagaacttttggaactagtgccggcggctctccaccccccagatttttgcactgagtggccagccgcactggaca

SEQ ID NO: 597982 - DNA, 101 bp, Homo sapiens
tccgggagctgggcggccatttaccagaacaagttgaaatcatcgcagaaggataaagttcgtcagtttatgatcttcacacaatctagtgaaaaaacagc

SEQ ID NO: 597983 - DNA, 103 bp, Homo sapiens
tctcaatatctgtcttcggtggactccttcggcagtccacccaccgccgccgcctcccagccgcttacaaacacgcagatggcaagaagattgatggcaggag

SEQ ID NO: 597984 - DNA, 75 bp, Homo sapiens
actactggggccagggaaccctggtcaccgtctcctcagctcattgctatggacagtgctatcaccctgtggcag

SEQ ID NO: 597985 - DNA, 100 bp, Homo sapiens
acgagagattaaacagttattgtctgagttggatgaagagaagaaaatccggcttcggttgcaggaaaaaagggttgctcattttgggtatcactggagt

SEQ ID NO: 597986 - DNA, 100 bp, Homo sapiens
gccaaagattttatgacttatttgtctgcacctaatgcttctgttgaaccctaaggactctgcaatatgaataattccctagagaacaccatctcctttg

SEQ ID NO: 597987 - DNA, 74 bp, Homo sapiens
gcgtatacaggaacaatattgatgatgtagtaaggcagcttcaaaagatggtccatgatattaaaaacaatgaa

SEQ ID NO: 597988 - DNA, 98 bp, Homo sapiens
ccgccgcccggcccgcgatgtcaccattgttcagctgggtggccaaggttggagttgctgtgggtgagctgctgtggtctgtagccaagcatgctgtg

SEQ ID NO: 597989 - DNA, 99 bp, Homo sapiens
ccggctggcccagccagacagtttgagcaaggaggaggaggtggcctgtttgtaccggaagcaaagtcagattcagaaccaacaaggcgaggactcagg

SEQ ID NO: 597990 - DNA, 100 bp, Homo sapiens
ctgcagggcaggatgcccactgtcagctcctgcgcttccaggcacatcaacagcagggcaacaaggcagagaaggccgggttttacacaggctggctcct

SEQ ID NO: 597991 - DNA, 95 bp, Homo sapiens
ctggatgagacatttgctacagcatcccacattaagtcaacggcagcctgcttctgcaaagtggtacgatcgaagggactatgtcttcattgaat

SEQ ID NO: 597992 - DNA, 80 bp, Homo sapiens
gtgttcctggtgcagggtagcctctatctggaggatacgaagcgttttcggcttcctgcccggagctgtgcagcaaacag

SEQ ID NO: 597993 - DNA, 100 bp, Homo sapiens
gacgggtctaggtgagacagaagccaaacaggaggaggaagtggagggtagctacagcaagctgggtagcaggcagatccaaaggatatcatgaagtttc

SEQ ID NO: 597994 - DNA, 96 bp, Homo sapiens
cacgctggcaggactggagccaggcaccaccccctttaagggtcctgcagttctgagcttgggttccctttgcctggacaccaaccaagcccccaa

SEQ ID NO: 597995 - DNA, 100 bp, Homo sapiens
agctcggcccgcgggggagccccgggagccgcacgagtgattctcatcagttccgtgtaatggcagctgtccttcgtcattgtttactaatcgtaggtcc

SEQ ID NO: 597996 - DNA, 50 bp, Homo sapiens
atgacttctctaatcagttacggatgatgcacgccaactctttgtgctag

SEQ ID NO: 597997 - DNA, 87 bp, Homo sapiens
ccaggctgctccagtactcaagggaacgggcagcacacttctgcttttgttccttcatcaggacgaatttactcttttgggcttggt

SEQ ID NO: 597998 - DNA, 75 bp, Homo sapiens
aaggtgaacgggcggcccctggagatgattgagccgcgcacgctacagtacaagtggagacctttggcgacttgg

SEQ ID NO: 597999 - DNA, 74 bp, Homo sapiens
ggtgaggaattcaagagctgaaggacaaacactggttcagggtgtcagtgtggaggcagttgatccagtgttcc

SEQ ID NO: 598000 - DNA, 90 bp, Homo sapiens
tcgccttcagctcgcacttcgaccccggtgtagacggggcactgccttcagagcaggtcctgccagcctcgctggagaggatgccctcgt

SEQ ID NO: 598001 - DNA, 100 bp, Homo sapiens
tgtagcagttggtctcaagcaggggaaggtcatcattgtggttaagtgatgcagccaacacgaacggttgtcatgtgtaacacaactttcgatcaccgcg

SEQ ID NO: 598002 - DNA, 150 bp, Homo sapiens
agatcatctactccaagaacaatgtctgcgtgcacccgccggaggggctgcaggggctgggggagcaccacccaggttggctgatcaagatgacactgagtaacccttcagaactagatgaacttatgagtgaagaagcatatgagaaat

SEQ ID NO: 598003 - DNA, 50 bp, Homo sapiens
caagctggcgcgccagagcggcatcgagctttagccagggccctctgaag

SEQ ID NO: 598004 - DNA, 96 bp, Homo sapiens
ttcctcacccgcgcctgcgacctcggtcgccgccctggagaggcaggtgtttgacttcctgggctaccagtgggcgcccatcctggccaactttgt

SEQ ID NO: 598005 - DNA, 99 bp, Homo sapiens
atggcctcctccgaggtggcgcggcacctggccaatggaagcactgttgtgaagaacttatgaaaattgagattatgtcaccacggaaaccacctttgt

SEQ ID NO: 598006 - DNA, 51 bp, Homo sapiens
ccgggagaagagcgaccctcacactgagatctgtatctgtggacctgaatg

SEQ ID NO: 598007 - DNA, 50 bp, Homo sapiens
cggatcaacttcgacaaatagactggaaggatcaccagcacatatgcggc

SEQ ID NO: 598008 - DNA, 119 bp, Homo sapiens
cacgcaccccactcggcgtcgcgcggcgtgccctgcttgtcacaggggatatcattttcaatgcccaatacccagaactgcctcccgattttatctttggagaagatgctgaattcctg

SEQ ID NO: 598009 - DNA, 75 bp, Homo sapiens
agctgcactgtggcaaggcttttgcttccaaatacaagctgtatagcacaatcctggaggaagagaaggctcagc

SEQ ID NO: 598010 - DNA, 75 bp, Homo sapiens
cagaaaatcctcactctgagtacggtctcacagacaacgttgagggctacaccaagtccattgatatttggtctg

SEQ ID NO: 598011 - DNA, 74 bp, Homo sapiens
agccgtggtacgaccaccaggacctccagcaagggcaagtgtccagagaatggctgggatgaaagtacacttga

SEQ ID NO: 598012 - DNA, 51 bp, Homo sapiens
aggaaggagagaaaatggcgtccacggtggctgcttcaacccccaactcca

SEQ ID NO: 598013 - DNA, 75 bp, Homo sapiens
tgaagagggaagacacgcggaaacaggagtgtttctcaggagctatcagaaactatcctcaccatggtagccaat

SEQ ID NO: 598014 - DNA, 100 bp, Homo sapiens
catggtttctccctatgttacgtggatgtttgtaacgtcacagctacttcttcaagggtgcctattacctgaagctggagaaccaaagtctgaagagcgt

SEQ ID NO: 598015 - DNA, 101 bp, Homo sapiens
ttgaggaaaaccagaatgctttgaagttctgtaatttggctttattgcttcctactgttaccaaagaggtttatcttgcagattatggactttcctacaga

SEQ ID NO: 598016 - DNA, 75 bp, Homo sapiens
ccgagagatgaggccggagcccaccaagttctgggaaactcggggtctaaatgtgagaccaagaagttacctcca

SEQ ID NO: 598017 - DNA, 51 bp, Homo sapiens
aaatccttaaaagagtcttaacggtgtgtcgtttggactggtgatgagcgg

SEQ ID NO: 598018 - DNA, 100 bp, Homo sapiens
tcgcgctcaccaagcaggtgctgaaaggctcccggagctccgagctttggaaacatgatgagcaaggagaagcgagaggctgtcagtaaagaggacctgg

SEQ ID NO: 598019 - DNA, 101 bp, Homo sapiens
cgactccgaagacttctctacgtcggaggaggacgaggactacgtgccgtcggatgaagatgacgccaacagactcggggagaaggtgatcctgcgggagc

SEQ ID NO: 598020 - DNA, 97 bp, Homo sapiens
tcctcccggaggcgacatggggcacccggtgtaccgcggcgagaagccccagctgcactacgcggtgaaagaaaatggcccgaaccaagcagactgc

SEQ ID NO: 598021 - DNA, 88 bp, Homo sapiens
ccaaccccttcgcggacccagtggatgtaaaccccttccaggctcgcgatgcctctacacaagtatcccgtgtggctctggaagcggc

SEQ ID NO: 598022 - DNA, 100 bp, Homo sapiens
aagccagtcctgacaatgggcagaacgaattcagtgatatcattaagtccagatctgatgccttcaattaagttgcagagttctgatggagagatatttg

SEQ ID NO: 598023 - DNA, 51 bp, Homo sapiens
tctttctggcctggaggctatccagcaacatgccgagtttttgcactgcaa

SEQ ID NO: 598024 - DNA, 83 bp, Homo sapiens
ccttggtctgagtggactgtcctgcagaggccacaagaggaagctgaatgaagaggacgccgccagcgagtccagcagggagt

SEQ ID NO: 598025 - DNA, 98 bp, Homo sapiens
gtctacctgtccacctgcaaggattcaaagaaggtgtacaaaggctacatggatgacccgaggaacacggacaatgcctggatcgagacggtggccgt

SEQ ID NO: 598026 - DNA, 100 bp, Homo sapiens
acttccatccctgtaatttcacagccccagttcccagtcagtcaagtgcatcttcagacaagtatgcagctctggcagaactagacagcgttttcagttc

SEQ ID NO: 598027 - DNA, 100 bp, Homo sapiens
cgccatcctgccgcagctggcgcagcccacgctcatgatcgacttcctcacccgcgcctgcgacctcgaaccgggctgtgggtcggcccaaggggaagct

SEQ ID NO: 598028 - DNA, 98 bp, Homo sapiens
gagttcgtctcttacgtctgcggaagtgcagctgcctcagttcttagcgcagctacctatggcctgccccacccgcatcctgtgcctgtaaagccccg

SEQ ID NO: 598029 - DNA, 51 bp, Homo sapiens
ctgaactcctccagcctccagaaaacagccagctaaaggtgtggatgagca

SEQ ID NO: 598030 - DNA, 100 bp, Homo sapiens
gccaagcccagccaagccccgccgatcgcgggcaccggagccagccccgcagcggaccaacaaagccgtggccaagggggacttgcaccaggccagcacc

SEQ ID NO: 598031 - DNA, 51 bp, Homo sapiens
gatccagcctgcggagcctgtggggcagcacttttcaggattagaagaggc

SEQ ID NO: 598032 - DNA, 73 bp, Homo sapiens
caggaatgcttactgttgcgtggttcgttattaacagcggaccctcgaagtgagagtgagcgggtggaattct

SEQ ID NO: 598033 - DNA, 74 bp, Homo sapiens
atccaccccgctgcacttcgccgcagagagaagaagaaggaggttcctgctgtgccagaaacccttaagaaaaa

SEQ ID NO: 598034 - DNA, 83 bp, Homo sapiens
acctcttcaacatgttctttggcggcggcttcccttctacaaccatgtccaagggacctgcagttggtattgatcttggcacc

SEQ ID NO: 598035 - DNA, 97 bp, Homo sapiens
tgtatgtgatcagaagctgcgtcccaacatccccaactggtggcagagttatgagcaaaaaggcattgggatgaacgagccgctggtggactgtgag

SEQ ID NO: 598036 - DNA, 50 bp, Homo sapiens
atactgcatatcagaaacaacagtcaatcttcaagaagtatcaagtccat

SEQ ID NO: 598037 - DNA, 83 bp, Homo sapiens
ggcggcggcggagcgggagcgggtaccgggcgcgggcagagcgcggcggcgcggattcttctaacagagaaaatgccattgag

SEQ ID NO: 598038 - DNA, 100 bp, Homo sapiens
tggagttaaggaacagatccccggaggagtgtggacaacagtgagtatatgcggaatggagacttcttacccaccaggctgcaggcccagcaggatgctg

SEQ ID NO: 598039 - DNA, 75 bp, Homo sapiens
accagctactacttttcagcatccttatgtgaggtctggcttgtctccacattgccacccttcagaagaaccaac

SEQ ID NO: 598040 - DNA, 75 bp, Homo sapiens
caacaacaccacaataatccacagccaaggtgttgctgcactggattccaacgtatccggaaaaattggtctgcg

SEQ ID NO: 598041 - DNA, 101 bp, Homo sapiens
cgtacaccaagctagctctggatcggcacactgacactacctattttcaagagccctgtggttttctggatatgccgcagaaggatccgtgccagaagcaa

SEQ ID NO: 598042 - DNA, 100 bp, Homo sapiens
ggaccatcccccaatcctctcatcttgtcctacctgaagtatgccattagttcccagtgccggtggtggtgtgcacattgagccccggtatagacagttc

SEQ ID NO: 598043 - DNA, 98 bp, Homo sapiens
aagagtcaacagcagtggcaacagggggaaatttgcagtggtgagaaaatgtataaagaaagattctgggaaagaatttgctgcaaagttcatgagaa

SEQ ID NO: 598044 - DNA, 100 bp, Homo sapiens
attctcttcactcgagagatgaggacactgaaattcagagaggggaagtgatttgcctcagcttgtactccatcagtggcctatgtacataccacgccgg

SEQ ID NO: 598045 - DNA, 83 bp, Homo sapiens
ggagacttcaccaggggagatggcacaggagctgggaagcacacagccaactcgcaccacctctctgccttggtcacccccgc

SEQ ID NO: 598046 - DNA, 100 bp, Homo sapiens
ctgcctctcgtctggatcgtggtctgcttcgtctatctctggcagcaccctggaggagaagaggttctgctggaacaagctggtgtagatgcaagtgaaa

SEQ ID NO: 598047 - DNA, 90 bp, Homo sapiens
gatgcagtgaaagaaacttcctcagtaaagcattggctgataggctgaataatctcctgtagggtaagaagtgtcaactgtatcaagcac

SEQ ID NO: 598048 - DNA, 75 bp, Homo sapiens
gtcagtgttatatcctccaggaatactggccagctgctcaagaagccagaaaaaggagatgaaaaagaattggac

SEQ ID NO: 598049 - DNA, 100 bp, Homo sapiens
ggcttctccagggagaccacagaagctgtcggaaaaggtaacagaagatggaactcgaaatcccaatgaaaaacctacccagcaaagaagcatagctttt

SEQ ID NO: 598050 - DNA, 100 bp, Homo sapiens
tgagaccaaaagatctctggaagcgattaatgataaaatttcatggagaagaaggccttgactacggaggggttgccagctcctggacttctagggatct

SEQ ID NO: 598051 - DNA, 74 bp, Homo sapiens
aattttcacctggaacatgagaggctaatggaggttggcaggatgctactaccccttcatcagtgacctcccct

SEQ ID NO: 598052 - DNA, 96 bp, Homo sapiens
gtcgctgagagctgggaagaggcggcagacagcgggcattaataataagctacagcagccggaggcagcggccggagtgttagaatatgccatgaa

SEQ ID NO: 598053 - DNA, 100 bp, Homo sapiens
tccagcggctcccggggcgcgtctgagggtgatgaattagaagacaatggaaagaatttctacgaatctgatgatgatcagaaggaaaagactgacaaaa

SEQ ID NO: 598054 - DNA, 50 bp, Homo sapiens
ggaccccttctttgtggtgaaaggagctccactggttcaacagcctctcc

SEQ ID NO: 598055 - DNA, 98 bp, Homo sapiens
gatcaggaagcctatgtcaactatggaacaacaacttgcagctcatctctattgatggtacattttacatactttgggaaaaaaaaacgttgctgaag

SEQ ID NO: 598056 - DNA, 82 bp, Homo sapiens
ccagcagccttgttagggcgtggcctgaggcttggataagtggggtgatgtgtccaatctagatcccaacttctcatttgaa

SEQ ID NO: 598057 - DNA, 90 bp, Homo sapiens
caagataaaaatgcaaatcggaggaggaaattttatatcacacaactgaaaacagattctgagctggaggagcaccggaattcacagaag

SEQ ID NO: 598058 - DNA, 90 bp, Homo sapiens
ggaaaaactttccagccattggtcccagagggtggaaggagccaggacgcacccccactgctgctgcaggagccgctgctgagctgcgtg

SEQ ID NO: 598059 - DNA, 90 bp, Homo sapiens
tttgtctttgaggactttgtctctgatgagctgagaaacaaagccacccagccaatgaagccggcagcaaaagtggaccaagaaaccttg

SEQ ID NO: 598060 - DNA, 121 bp, Homo sapiens
gggaagacgtcgctggtgctgcgctactgcgagaacaagtttaacgacaagcacatcaccactctgcagatcactggggtgatcctgctggctgttggagtctggggcaaacttactctgg

SEQ ID NO: 598061 - DNA, 104 bp, Homo sapiens
agaaggttcgaggcctacagaacctagcctatcagctggggctggatgagtgacaatctttacctcctaccagctagaggagctggagaaggcattcaacgaag

SEQ ID NO: 598062 - DNA, 100 bp, Homo sapiens
tgccccggcttcaggatttacacagacgtggggcgatgcttgtgaccctgcagctcctcaaagaggactcagagagagtaatgataattaccggaccaaa

SEQ ID NO: 598063 - DNA, 100 bp, Homo sapiens
tccttgtgcctccattcccgggaggggggagcggcgttggaggccaccgtttccaggaaattcgaaatgagtcccatgactatcctcatagagtggccaa

SEQ ID NO: 598064 - DNA, 100 bp, Homo sapiens
aaggcaatatcgttccttggaagttctaatcggatctggctataatacccctgctgacatttggagcacggcatgcatgttctttaaggaaaaacagtag

SEQ ID NO: 598065 - DNA, 75 bp, Homo sapiens
agcagctggacaggagcaagccacaggagagtggcaggtttattgttggccaaaaccaggctttgattgaaccag

SEQ ID NO: 598066 - DNA, 98 bp, Homo sapiens
caaggctgtgctcaagcatttcaacgtgcgtgtcacccacgcagacatcttcagccgctgccagaggtgctgatactcaaagaaggtttaagttgtct

SEQ ID NO: 598067 - DNA, 75 bp, Homo sapiens
aggcagtctttctatagaaatccaattgagttttcggctttgtgagaaaccttaccatcaaacacgatggccagc

SEQ ID NO: 598068 - DNA, 100 bp, Homo sapiens
tggatcctgtccttcatgcagtctctcattggcttctttgagactgaaatggcaggtgatgggcagaatctgtttacgaaagacgtgacagtgatcgagg

SEQ ID NO: 598069 - DNA, 100 bp, Homo sapiens
cgctgttgtgacaagaaaagctgtggcaaccgaaatgagactccctcagatccagtgataattgacagtgttttacctcaatcatatatccacacaagtg

SEQ ID NO: 598070 - DNA, 75 bp, Homo sapiens
ctaaactggctgctgaggacttcagactgaacattgggaagctgtccattgaaaaggccttggatttatccctgt

SEQ ID NO: 598071 - DNA, 89 bp, Homo sapiens
taccaaaggtggaaagtcctgaagaaatccagtggggaatatatacattgtatccatttattaactcaagaattattactgtatcaatg

SEQ ID NO: 598072 - DNA, 101 bp, Homo sapiens
accagcagtcactaaggtctgatctcttttctaaccatacctggaagatggaatgctggacccagggctcatggatttgagatcttatgctccaaatgtag

SEQ ID NO: 598073 - DNA, 75 bp, Homo sapiens
tctacgagagcaaaatgattgaatacgatcctgaaagaagattagttttctggatatgccgcagaaggatccgtg

SEQ ID NO: 598074 - DNA, 83 bp, Homo sapiens
ctactggacttcatgcttagatacatgtataacaagtattcaaaggtggaaaggcatcctgtgactgcattggagaaaatgat

SEQ ID NO: 598075 - DNA, 88 bp, Homo sapiens
cacaagaaaacatggggaggggggtgacagtccaaagattgacttggccggcagttcgctatctggcatcctggacaaagatctctcg

SEQ ID NO: 598076 - DNA, 83 bp, Homo sapiens
ctgtaatcaggttgtcaaaccgcaggcatttcaatcacattatggatctaaaatgtccactgaggcacaaagagttgatgaca

SEQ ID NO: 598077 - DNA, 90 bp, Homo sapiens
gattgtgggagtctccgcgtcccgctcgctgggagagagatgtgacaagccgaggcggtgagccgggcaggaggaaggagcctccctcag

SEQ ID NO: 598078 - DNA, 76 bp, Homo sapiens
agttcatatgtatccttccctggcagctttggaagaagtagaaggtgatgtggcagaattggaactaaaacttgat

SEQ ID NO: 598079 - DNA, 75 bp, Homo sapiens
atttattgcccttccatcaatcttgcaaagaatcttacagaattcagaggtgtctgtgtttgaagtcaacattcg

SEQ ID NO: 598080 - DNA, 97 bp, Homo sapiens
aatcatgggtatttttgctaaagctgagtctcaggagcaggggctgcggcagaggctgctggacgagcagttcgcagtgttgcggggcgctgctgcc

SEQ ID NO: 598081 - DNA, 74 bp, Homo sapiens
cggtccgcgagccaccgaggcccaggtactccaaagattcaggtttactcacgtcatccagcagagaatggaaa

SEQ ID NO: 598082 - DNA, 97 bp, Homo sapiens
ggggccagctggtggaggcgatagacgagtatcagattatgttggtgagagtgaacgtgctgtgcgacaagtttttcaacgagccaagaactcagca

SEQ ID NO: 598083 - DNA, 90 bp, Homo sapiens
aaaacctggttcctgaagatgaggcaaatataggggcatcagagatgtggtactggatcttcctctgggctctcttctcttctctgtttg

SEQ ID NO: 598084 - DNA, 97 bp, Homo sapiens
ttctccgccatgcaaggctggcgcgtctccatggagtgttcctaaacccaaaggaaagaaaaccaaagatatgaaaaaacctgtcagagtacctgct

SEQ ID NO: 598085 - DNA, 75 bp, Homo sapiens
gcccaggagtcatcggacgccagaatctgggagtaccctgacttctaccggaagctctacggcctcttggacccc

SEQ ID NO: 598086 - DNA, 100 bp, Homo sapiens
ctttggccctgcgcctcgtccagcctaggttccacccttttctgggaaccgatgccctcctagctagccgtcacgggatggagggcttcatggactcagg

SEQ ID NO: 598087 - DNA, 134 bp, Homo sapiens
ccgacatgacgcccgaggacccagaggaaacccagccgcttctggggcctcctggcggcagacaatgcagatcttcgtgaagactctgactggtaagaccatcaccctcgaggttgagcccagtgacaccatcg

SEQ ID NO: 598088 - DNA, 111 bp, Homo sapiens
ggacgggccatacccaataaccaggtgcttggcaaaatcgagcgggccattggagcatcagatccatgctgctgctgactcggagccccacagcttggcacaggctctctc

SEQ ID NO: 598089 - DNA, 97 bp, Homo sapiens
tcgatccgcctgcctgcgcacctgcatacgggaatatgaatggattcattcccaaaccaaaagattgaagttcaacgcacttataacaacatatgag

SEQ ID NO: 598090 - DNA, 100 bp, Homo sapiens
ggggtggtggcccatctcagtgacagacactcctgcaacccagttttccagccaccagtgggatgatggagcaggggagagaagacagaagaggttggag

SEQ ID NO: 598091 - DNA, 101 bp, Homo sapiens
aagaatctggttatgatacaatcttgcgtgtcctgggctctaatgtcagagaatttctacagacttatcagatgtagacttcctagatgattcttcaacgg

SEQ ID NO: 598092 - DNA, 93 bp, Homo sapiens
cctccattcccgggaggggggagcggcgttggaggccaccgtttccaggtcagcccaaggccaaccccactgtcactctgttcccgccctcct

SEQ ID NO: 598093 - DNA, 73 bp, Homo sapiens
caaacagctgcttatttcggctgtgaaggacctgtttggggaggtacaggtttgcagattccgccagcagcac

SEQ ID NO: 598094 - DNA, 100 bp, Homo sapiens
catcagtaaactctgcaaacaaattgcacaggttgatgccggcccaggatggatcagacctgtgaactacccagaagaaattgtctgctgcccttttcca

SEQ ID NO: 598095 - DNA, 96 bp, Homo sapiens
tgtataagcacagcaggacaccaggacctggcctgaagacatttcctctcctcccctctggatttctcagaggcctcggcaagacgcgcaggaaga

SEQ ID NO: 598096 - DNA, 75 bp, Homo sapiens
atctggtggtcgtcatcaccttattctggtcccggatgtcaagccctccaacatcctagtcaactcccgtgggga

SEQ ID NO: 598097 - DNA, 100 bp, Homo sapiens
agagattccgcgagccgacaccatgcgatccaaggcgagggcgaggaagctagccaaaactgcggataaccgtctggtccttgtgcacaaaatccgtgtc

SEQ ID NO: 598098 - DNA, 95 bp, Homo sapiens
ctaagaatattattagcacaagagcaccatactttgaggggtatgtccagaaatcttgatgcatgtatctgaaaagaaaatttctgtttcatgtg

SEQ ID NO: 598099 - DNA, 100 bp, Homo sapiens
aaagttgatgatcttccccctgatatgaagaagctgaagtccggaaaaaacttgaggaaaaagacaggcaggaggaagcacagcggctacaacaaaaaag

SEQ ID NO: 598100 - DNA, 100 bp, Homo sapiens
cgcatgtttaaacaaactgctattgccaagatgcctggaatgatgtcgtcagtaatgcctggaatgatgatgtctcatatgtctcaggcttccatgcagc

SEQ ID NO: 598101 - DNA, 100 bp, Homo sapiens
gccaaaaatggagaaatttttggttatgatgtgattgctcaagcccaatctgggactgggaaaacggccacatttgccatatcgattctgcagcagattg

SEQ ID NO: 598102 - DNA, 80 bp, Homo sapiens
gattctcctgtctcagcctctcaagtacctggaattacagaaccaaaaacttttgctagaaaatcagcttttacgagaga

SEQ ID NO: 598103 - DNA, 51 bp, Homo sapiens
atccacattgaggtagtggacaaaggtaggaattctgataccaaccgggag

SEQ ID NO: 598104 - DNA, 83 bp, Homo sapiens
ctcccttgtcagcacaacctgtgtaggaaatgtgccagtgatattttccaggccataaagaatgctgatgggagaaccatttt

SEQ ID NO: 598105 - DNA, 83 bp, Homo sapiens
cagagctggaagagaccacagcagaagctgaagaggagatccaggcactcacggtactccaaagattcaggtttactcacgtc

SEQ ID NO: 598106 - DNA, 100 bp, Homo sapiens
aggctgcggcggggcggacggtcgcgcggcggcaggcacagattacaccaccaccttcactgtcagatccacttaaagagctttttcgacaacaggaagt

SEQ ID NO: 598107 - DNA, 145 bp, Homo sapiens
gtgagcaaatgcattgagcttgggtcaggacaattccatttggggaccagagatggacggtcactcagcctatggagaatgattacggacctgaagccaaagaacaagatgcgctagtggacagattgctgaccaggggcttgag

SEQ ID NO: 598108 - DNA, 100 bp, Homo sapiens
cgttgctgccttcttcgtcaagtacctggagtagaacagaaaaattattatgtctgtgttcccttgggactcattggaaattgtacagtgacatcttctg

SEQ ID NO: 598109 - DNA, 83 bp, Homo sapiens
gcggtggaggacacgacgcgcttaaaggggtcacagaatgatcatactcaagatcttcctggggagtcaatggcaaatttcac

SEQ ID NO: 598110 - DNA, 73 bp, Homo sapiens
tatgatgaaaccaaaaggccagactgaacacgatgagggtgacaggccgctgcggctctgtgctggtacgcct

SEQ ID NO: 598111 - DNA, 100 bp, Homo sapiens
cggcctgggagaagcagcagcgcaaggttctggcctataggaacaagacattttcagtaatggaagaaggagcttccaggctggggaagatcatcatttc

SEQ ID NO: 598112 - DNA, 50 bp, Homo sapiens
ctgcattcaatacctagatgatggtcaacatatttcactggcacctattc

SEQ ID NO: 598113 - DNA, 100 bp, Homo sapiens
attctcagtccaagtttaaagttaagggttacacatcattttggaatgactgtatatcatctggattacgtggctgtatgttaattgaattagcattgag

SEQ ID NO: 598114 - DNA, 96 bp, Homo sapiens
caacgatcagcacttcagtcggaaagttggaacctctgacaagaccaagtactaccttcaagagatcacccctgacctgctacctcggccgccccg

SEQ ID NO: 598115 - DNA, 90 bp, Homo sapiens
ggagagtacagagaaaggagcttggaaagaagatgctctacagggactttaatatgacaggctggccagctctggggtctcggcaggtgg

SEQ ID NO: 598116 - DNA, 101 bp, Homo sapiens
aaattcttcaggatcaattacatgtttgcaaaatggatggtcagcacaaccaatttgcattagttaaaaatctgtaagagcctgattttagaattcaccag

SEQ ID NO: 598117 - DNA, 90 bp, Homo sapiens
caacctgtttgaagagtttggacagattgaatccattaatgagatactggatgctttgcaaaaagcagagcctagaacagaggatctcaa

SEQ ID NO: 598118 - DNA, 106 bp, Homo sapiens
acagacttcgacgttcagacctgggttcccgtccagttccattccttgcacaggttggcttggatgcggctggcaagaccacaatcctgtacaaactgaagttggg

SEQ ID NO: 598119 - DNA, 98 bp, Homo sapiens
ttacatataatatcccaacatgcctggccacctggaaaataaagttactgtggcccatgtcctaaaaactggatatgttacaaaaataactgctacca

SEQ ID NO: 598120 - DNA, 74 bp, Homo sapiens
gttagcgtgagtgatcactctcaatcccggctttccccagacatggccaacaagggtccttcctatggcatgag

SEQ ID NO: 598121 - DNA, 83 bp, Homo sapiens
caagccaacaacagtgacggaatgcctccatacatacaatgcagatcttcgtgaagactctgactggtaagaccatcaccctc

SEQ ID NO: 598122 - DNA, 100 bp, Homo sapiens
gccaggcagaaggcctctctcctgatacagcaggcgctcaccatgttccctggagggtctctggacaccagctcttccatcaccagccagcctgaggcct

SEQ ID NO: 598123 - DNA, 51 bp, Homo sapiens
cgcaacgccaacctcaggcgagatggcttgttagcagtggcacaagatctt

SEQ ID NO: 598124 - DNA, 82 bp, Homo sapiens
accgccctcaccacccctatccagacggctgcccttcaagtaccactcaagaggtttggatatggaccttcttcaattcctg

SEQ ID NO: 598125 - DNA, 95 bp, Homo sapiens
cgactcatggagctgccgtaagtgagacggtttaagcggaagcatcttactgccattgactgccagcatttggctcggagtcacttggctgtgac

SEQ ID NO: 598126 - DNA, 98 bp, Homo sapiens
tcggatgccggcggtctctgctgaagagagaagatggcgcttgacggaccagagcagggtgaggtggctttgaccccgggttgcccggccagcacgac

SEQ ID NO: 598127 - DNA, 100 bp, Homo sapiens
catttagcgtcagaaataagccgttttttgacatctgtacttcaagaaagtactttccaggagcagatgagccattacagtatccttgtcagtattcaga

SEQ ID NO: 598128 - DNA, 122 bp, Homo sapiens
cttagaagcatcggtcggagtaaaaaggaacggaggcctgtgcgcccacacacggtcgaggctggagtgcagtaacaccactgaagctcactgtaactttgaactgctggacttggaatcct

SEQ ID NO: 598129 - DNA, 90 bp, Homo sapiens
ctgaggctctggaacttctgcccagctctccttgagagtgtgacgcaggaaaggaggcctcccaaacttgcctttatgtcaagaggtgtt

SEQ ID NO: 598130 - DNA, 109 bp, Homo sapiens
gaaccgccgggccgaacagcatgacgtccgctttggagaactacatcaaccctatacacagaatgggattttacatatgctggacagaaataagagaatcaagccccgg

SEQ ID NO: 598131 - DNA, 80 bp, Homo sapiens
ccagcaagatcggcaggcgagattgcctgacccaggcctgctcggccctcacaggccgcggcgagtcctttgcacatgtt

SEQ ID NO: 598132 - DNA, 99 bp, Homo sapiens
gtggaataaacgtcagccaaaggtcagaatggcggcagtggagcatcgtcattcttcaggattgccctactggccctacctcacagctgaaactttaaa

SEQ ID NO: 598133 - DNA, 100 bp, Homo sapiens
gcggcggcgagcggttccttgtgggctaggtgctggagaatctggtaaaagcaccattgtgaagcagatgaggatcctgcatgttaatgggtttaatgga

SEQ ID NO: 598134 - DNA, 82 bp, Homo sapiens
tacagcagtgctgtttactcattggaggaacagtaccttggcttggctcttgacgtggacaccctgccctgcttggatagag

SEQ ID NO: 598135 - DNA, 98 bp, Homo sapiens
gagcagcccagccagtcagcacaaaggaggacgtgcctcagaatattctgttgacaagtgaatctccattgggtgacattaagattgttgattttggc

SEQ ID NO: 598136 - DNA, 82 bp, Homo sapiens
tctccactttcgccagcccgtgccgcgagcgcggcctgcaggaggggttcagtcggctgccgtcaatgtcatctgcgagctg

SEQ ID NO: 598137 - DNA, 98 bp, Homo sapiens
gagaaggtgaactgtctggataagcatttaaatcaaacggtattgagatggattgggttatgaaacataatggtccaaatgacgctagtgatgggaca

SEQ ID NO: 598138 - DNA, 100 bp, Homo sapiens
aaggagagaaaatggcgtccacggttactccacaggatccgctgaacataggatgttgccacaaaatctacctcgtgtatttttctctttcactcatgag

SEQ ID NO: 598139 - DNA, 83 bp, Homo sapiens
cttggactgagtcctgcaggacacaggaacgaatgcaggaatttgggaactgagctgtgcaagtgctgaagaaggagatttgt

SEQ ID NO: 598140 - DNA, 71 bp, Homo sapiens
acgacaatatcattttgaaagtaaccagaggacttgcaatatgacagctcagcctgagacccacagtggca

SEQ ID NO: 598141 - DNA, 75 bp, Homo sapiens
aagaaaggaaatgttaggatcactttattctggaggagatgttaaagtaacccatcttgcaggacgacattgaag

SEQ ID NO: 598142 - DNA, 51 bp, Homo sapiens
gctacttcctgcctgccatgccccaggtggaaaatgaggttgatcgcagca

SEQ ID NO: 598143 - DNA, 98 bp, Homo sapiens
cgaggatatcgtgtctggagcagtggagcccaaagacccctggagacatgatacactctggaaatgattaaactagtaccacataatgaaagtgcatg

SEQ ID NO: 598144 - DNA, 83 bp, Homo sapiens
cctgaacaagtcccagctgaagctgggcatctggggcggtctgctgagaacagacccagtccctgaggaaggagaagatgttg

SEQ ID NO: 598145 - DNA, 149 bp, Homo sapiens
tgagctttccaagcctgttgtttatgatgtctgcgatgatcaagagatccagaagaggctcgctgagcagcagctcttgaatgtcgtctctcaactagccaaacggaatctgcgactgctggtcctaggccggaagcacatgctaagac

SEQ ID NO: 598146 - DNA, 100 bp, Homo sapiens
ctgcgagctctctgtttgggttccgaggaagacagaatgggctgaactggaactgacctaaatgtcagcaagaggagatggagtctcactctgttgccca

SEQ ID NO: 598147 - DNA, 101 bp, Homo sapiens
atgctctctgggctttgttgaggcggcagtatgaccgggtttctttgatgcgacctcaggaaggagatgagcatttgacattgtgcagcaaagaaatggtt

SEQ ID NO: 598148 - DNA, 98 bp, Homo sapiens
tgatgttggagaactacagaaacctggtctccctaggttctcctgcgctgcccaacagcatggtgtattttggaagctctcaggatgaggaggaagtc

SEQ ID NO: 598149 - DNA, 98 bp, Homo sapiens
agccatccaatggatgcaggaaaactgtcgacagaggtacgttcttggagacacagcaatgcagaagatggccaagtcccatgttttcttaagtggga

SEQ ID NO: 598150 - DNA, 82 bp, Homo sapiens
cttgaaacaaaaggagaccctaatcttcaggttgttgatcattatgaaaatcctagaaacgtggggtcccttgacaagacat

SEQ ID NO: 598151 - DNA, 75 bp, Homo sapiens
cagggttgtatatagccatgaatggagaaggttacctctacccatcagtagcagaaggtcaagaaatttgtgtga

SEQ ID NO: 598152 - DNA, 100 bp, Homo sapiens
tgtccaggtgggcggccgcgggcgcgatgcggcactgcaggttatgcaatggtctctgcaagatggtttattcttgaattggacctttttaagactgaca

SEQ ID NO: 598153 - DNA, 82 bp, Homo sapiens
caagaagaaatccacagatttagttcttgctgttccctcgtcacaccaatgccagtgctcgagacaacaccatcaacctgat

SEQ ID NO: 598154 - DNA, 100 bp, Homo sapiens
aaaaagaagtagactatgaagcaggggatattccaacagaatgggaagatttcgccagaagtttgagtatcactactcctgaagagatgattgaaaaagc

SEQ ID NO: 598155 - DNA, 100 bp, Homo sapiens
aggaactgtcggaacagaaccaaaggctattggatcagctcagcagggacacagccagtgtgaagtcctctagtagtcttgaacccaatcttttttgtga

SEQ ID NO: 598156 - DNA, 87 bp, Homo sapiens
ggactttagggctgtggtgatggatgaggtggtgctgacaatcgagcaaggaaacctggcggggatctgacgagcttttctctactt

SEQ ID NO: 598157 - DNA, 100 bp, Homo sapiens
ggataagtcgaaggggaaggcgcctgaagaggacgaagaccatgctcgacagctgaccaaggccatgatgcgaaaggccacggccagccgcctggtcacg

SEQ ID NO: 598158 - DNA, 98 bp, Homo sapiens
aagtggccacagggggctgttcctcagctcccaccctcagcccctgccactagtgagatgaccacgaccccaccaacaactgaacgctttggtcaggc

SEQ ID NO: 598159 - DNA, 101 bp, Homo sapiens
ctcacctgtgcgggatggaacaaaaggacgagcctgtggagtgggagacacctgacctttctcaagctgagattgagcagaagatcaaggagtacaatgcc

SEQ ID NO: 598160 - DNA, 83 bp, Homo sapiens
cggagcgcggtccctgtattggtctcctgctcctagaggtgctacctttttacccacacttaagtgacgcaaaatgcccttca

SEQ ID NO: 598161 - DNA, 50 bp, Homo sapiens
agaacccccagcttggagcgcaagcttgtacatgcagtggccatgcaaat

SEQ ID NO: 598162 - DNA, 102 bp, Homo sapiens
cggggacgccgcgtgctcccaacgtcgccccggtttgacgcacacggcaccaaactgtaagaatgattgatgttggctgatattggagtgctcattcacatg

SEQ ID NO: 598163 - DNA, 100 bp, Homo sapiens
accaggatttcatctgtactatcagcttcttcaaagagagagaggttgttgagtgcaacccagtttatgcctgaccccaagctcatggatcacgggcagt

SEQ ID NO: 598164 - DNA, 75 bp, Homo sapiens
ccctcattcaggcccagccctggagcgaatccgtttagctcgacagattgagaaatctgagtatcggaacttcca

SEQ ID NO: 598165 - DNA, 89 bp, Homo sapiens
gagatggtcaggtctggagctcgaccgggccaggtccggggttacccagagccccaggtgacatggcacagaaacgggcaacccatcac

SEQ ID NO: 598166 - DNA, 50 bp, Homo sapiens
catggccaaggggtccttctactcctaaccttcagtttggaaacctgcag

SEQ ID NO: 598167 - DNA, 50 bp, Homo sapiens
agttcttgtgagcacaaagccaagagacctctcttctagatcaagtcatg

SEQ ID NO: 598168 - DNA, 75 bp, Homo sapiens
tgcagccacatactatccgtttgttcaggaaccaccagtgacagaggacaggagagagtggcaagagtacgttta

SEQ ID NO: 598169 - DNA, 50 bp, Homo sapiens
ctgagtatgagacgcaagtcaaaggtagtgctagagaccttggctggtca

SEQ ID NO: 598170 - DNA, 98 bp, Homo sapiens
gcactgcctgtgcacgggattggcagtaattggaggaagaatgatagcacagaaaatctctgtcagaactggaaaatgtttataggaggccttagctg

SEQ ID NO: 598171 - DNA, 75 bp, Homo sapiens
caagggcccagcagggacccagaccagaaaggcaagattgttgttataatgagaggattacctggcagtggaaag

SEQ ID NO: 598172 - DNA, 100 bp, Homo sapiens
tcccaaagtgctgtgattacagttggatcctccagatagccactgccttttcctcaagggagcaacgttagctttcctgaatgatgaagtttggaatttg

SEQ ID NO: 598173 - DNA, 101 bp, Homo sapiens
tagctgttgatgctgtaattgctgaacttaaaaagcagtctaaacctgtgaccacccctgaagaaattgcacaggtgactcctgcacctgcgccggctcct

SEQ ID NO: 598174 - DNA, 100 bp, Homo sapiens
caggaggcagtagccaaacacccaggaatgtctgatcacagatacggggatggtggctctactttccagagcacaacaggacactgtgtacacatgcggg

SEQ ID NO: 598175 - DNA, 82 bp, Homo sapiens
agagaggggaaaccccgtaaagtggttggttgcagttgtgtagtagttaaggtggctgtacttttgatgatggtccaggggc

SEQ ID NO: 598176 - DNA, 96 bp, Homo sapiens
gacagcacaggtcacagtaaggccaaaaatgtgcatactcacagagttagagagagggatggtggtaggtgatgctctgatgctgctgcctcttat

SEQ ID NO: 598177 - DNA, 82 bp, Homo sapiens
gcaaaggcaagaaggcaacgacgttccatctgtggaaggacctaccaaccagaatgtcacaggtagactaatggttggccta

SEQ ID NO: 598178 - DNA, 97 bp, Homo sapiens
aaacctcctacctccgttgaaaggagagccagttactaacttactatgaataaaagggactctcaacaaacatttgctgaataaatgaatgaaccct

SEQ ID NO: 598179 - DNA, 101 bp, Homo sapiens
cggagggagctggaaattcctgacgttcattgatctgtttggaaattttagcattcaggtgccaggaatgcagatgggacagccagtgccagaaacaggcc

SEQ ID NO: 598180 - DNA, 75 bp, Homo sapiens
cgggccgtcttcccctccatcgtggggcgccccaggcaccaggcagaagaaattagaagtggccatggaagaaga

SEQ ID NO: 598181 - DNA, 102 bp, Homo sapiens
ccccggcccgggcccggcaggtgggcgaggagggcgggcgcagtcgggctctgcaggagcgcgcggagacttgggaggctgcattctgataattctcaggag

SEQ ID NO: 598182 - DNA, 100 bp, Homo sapiens
cgttgcccccttaggattgagcgtcccgtctgacgtggagttggaagatgagaatgtgcctactgctcctgatcctccaagtcaacatttacgtgggcat

SEQ ID NO: 598183 - DNA, 100 bp, Homo sapiens
agaatggcagtgctcaaactcaccgaccaggcaccaccaggaccagctgatcattccagcccacagcaatggagccacatgactcctcccacatggactc

SEQ ID NO: 598184 - DNA, 83 bp, Homo sapiens
gagatggtgcagaagatggaggagttactaaaccaaggagatttaactgaaagacggacatgagcgtgggtgctgactcctgg

SEQ ID NO: 598185 - DNA, 100 bp, Homo sapiens
tggtcgtagcggtgctggcatccgaacaccgggtggctggtgcagccgaggtcttcgggaattccagcgaggtgtattgagagtgagaacacttggagag

SEQ ID NO: 598186 - DNA, 99 bp, Homo sapiens
cacgccacagcagaggaggtggaggaagaagagagggaccggatcccaggccccgtttgcaaggagagaaggttgcacatgtacatagcttattgtcaa

SEQ ID NO: 598187 - DNA, 98 bp, Homo sapiens
agatggcggatgccctgcagtacctgcagaaggtctctggagacatcttcagcaggttgtaaagaagaaagttctaccctttctgtcaaaatgaagtg

SEQ ID NO: 598188 - DNA, 98 bp, Homo sapiens
agctgctggaccggcagctgatgttctctcagtttgcacaagggaggcgacagagacagcagcagggttctgagcaaggttcaaccagtcaagaacag

SEQ ID NO: 598189 - DNA, 74 bp, Homo sapiens
agagaagtttctggtcactccccaggattatgcgcggatgacggaggctggacacccatgatctgggccacaga

SEQ ID NO: 598190 - DNA, 75 bp, Homo sapiens
ctgcactgagcgggacctgcgagcagcgcgggcggcagcccgggggaagcggtgtttacacttcctgctgctgtg

SEQ ID NO: 598191 - DNA, 100 bp, Homo sapiens
gttcggaaccccagagcacgagtagtagtcttaagaggagttctgtccaacatctcttccatcaccgatctcggcggctttgacccagtttggctcttcc

SEQ ID NO: 598192 - DNA, 95 bp, Homo sapiens
acgcagcgaagattctgcccatcatgtttccttccttgtaccgcaactcaaagacccattggaacaagtgttatcttcaggaaggcacactggac

SEQ ID NO: 598193 - DNA, 100 bp, Homo sapiens
aaaaagttaaagatggagcaaaaccactttccctgaaatccgacactactgattctagtcaaggcatcattcttaacaaagaagttaaatattggtggga

SEQ ID NO: 598194 - DNA, 100 bp, Homo sapiens
aggccctcggggagacagcacgccagtgagggagatggagaccaatcacccacccagtgtgcggtttgtcctggttgtggtcaagactggatgatgtaac

SEQ ID NO: 598195 - DNA, 75 bp, Homo sapiens
cttggtatactacatggcaaaatgggaaaggtgttctttgacctaatgagagaaatcagaacaaagaagatgtca

SEQ ID NO: 598196 - DNA, 75 bp, Homo sapiens
gggccacccagtgccctcgcagggcaagtgtccagagaatggctgggatgaaagtacacttgaactctttttaca

SEQ ID NO: 598197 - DNA, 100 bp, Homo sapiens
agatgccgctggcgcagctggcggacccgtggcagaagatggctgtggagagcccgtccgacagcgctgagatagctgatcagcttccttgggttttgct

SEQ ID NO: 598198 - DNA, 75 bp, Homo sapiens
aaacccttggaaaaattcagaaaagagcaacttggagctgtaaaggtttatattgctgtgacagagctgaagacc

SEQ ID NO: 598199 - DNA, 74 bp, Homo sapiens
gaccacctggagaatgtcatcaagcagcacattcaaggtgaatctggattgggaaagtcgacattaatcaactc

SEQ ID NO: 598200 - DNA, 98 bp, Homo sapiens
tctgagctggtggacatcataggtggggaagctcagggagccagctgacgctgcaggacctggccaagttccagcccgaggtggtggatgccctggag

SEQ ID NO: 598201 - DNA, 100 bp, Homo sapiens
cacgaggacgcccagcgcgaggtgcagcggctgcggagcgccaacgagctcctgagcaggtggtgaaattgcctctacctttgatcacccagaactggtg

SEQ ID NO: 598202 - DNA, 95 bp, Homo sapiens
tccgccagttctacatcaacgtggaacgagaggactggaagctgaccctgatcaccagggtgggactggcgctgtcactcttctgcctgctgctg

SEQ ID NO: 598203 - DNA, 100 bp, Homo sapiens
gagacctggagcccatcccctttcatttgcagatggaaagtttttaaattataagcgccatggctatggctagtgttaaattgcttgccggtgttttaag

SEQ ID NO: 598204 - DNA, 100 bp, Homo sapiens
cagccttcccagtagctggaactacagatggatgacccctctgtgggccccaagatcccccaggctttggagaagatcctgcagctgaaggagagccgcc

SEQ ID NO: 598205 - DNA, 97 bp, Homo sapiens
ctaatttctcttgctcctcctgttcttactcttcatttaaagagatttcagcagaatacaaatcatattcccctgaagccctctggagatacctcac

SEQ ID NO: 598206 - DNA, 89 bp, Homo sapiens
ggtctccagggttctttggggcccgagaatccttgcagcctttcctggaagcctgtagcaactctttattttttcgtacttgctctgtg

SEQ ID NO: 598207 - DNA, 83 bp, Homo sapiens
cgcgggctgcgcggccgaccaggcgaagcagttgctgcaggcggcccactggcagttcgaggatggcactggatctttaaaac

SEQ ID NO: 598208 - DNA, 75 bp, Homo sapiens
atatttggcagctgtcctccagtcttaaaaggttcaactttcatttgagcagccagatgataaagcacagatgcc

SEQ ID NO: 598209 - DNA, 75 bp, Homo sapiens
gttcaatcataagtgtgacaaaaactgacaagcaggaagcttatgtactcagtatctcaacatcaaactaactga

SEQ ID NO: 598210 - DNA, 100 bp, Homo sapiens
tgaaaatggggcggaagaaaatacaaatcacacgcataatggatgaaaggaaccgacagggcgggctctacgaggcggtgaatgaggtctacaagaacct

SEQ ID NO: 598211 - DNA, 101 bp, Homo sapiens
gtctacagtggttcagaccgacatgctgtacaggtgggtttggaggatttgggacaacatctacaactgcaggttctgcattcagcttttctgccccaact

SEQ ID NO: 598212 - DNA, 75 bp, Homo sapiens
tttccaaggggattcaaacttcaacagaatgtggcaaccagatctgtgagtaatggactaattgctattaaattt

SEQ ID NO: 598213 - DNA, 99 bp, Homo sapiens
caaaagactttttaatgttgatcggcatgttggaatgatctgcgatgagctgggagtgaagcggccatcttctgtgaaagtattctcaggcaaaagtga

SEQ ID NO: 598214 - DNA, 85 bp, Homo sapiens
acccagtgaacaaatccgggggcaaggccaaaaagaaggttgactatagtcaatggggccaatggagccaagtgtatggaaaccc

SEQ ID NO: 598215 - DNA, 75 bp, Homo sapiens
cagccgcgcttctgtccgcctgcagtgtggacaacagtgagtatatgcggaatggagacttcttacccaccaggc

SEQ ID NO: 598216 - DNA, 82 bp, Homo sapiens
ggatctgccccagagaaagtcctcgctcgtcaccagcaagcttgcgggatctgtgaagtcctggaacgctcccactctccac

SEQ ID NO: 598217 - DNA, 74 bp, Homo sapiens
gccgggagggcctcgggggactgactggtatgtaggaaaccttcccagaatatttgactactcgcctttagatc

SEQ ID NO: 598218 - DNA, 83 bp, Homo sapiens
cgaattatctggcccctggggggctttcagaattctctggtggttgagatcccgccatttcggaatcagaggataaccagccc

SEQ ID NO: 598219 - DNA, 100 bp, Homo sapiens
ctaacatggataagcatgccctgaaaaagtatcgtcgagaagcctatcatcggtgccaaaagaacatcttttagtctcgattcctctcttgattaatcat

SEQ ID NO: 598220 - DNA, 48 bp, Homo sapiens
tcattgaggaccagtcaattctaaactaaccacacgatgagccagcac

SEQ ID NO: 598221 - DNA, 97 bp, Homo sapiens
gggaggagccgctggagaaggcggcgcgcgcccgcactgccaaggaccccaacacctataaagtactctcgctgttgcagtaccatgcaggactagc

SEQ ID NO: 598222 - DNA, 88 bp, Homo sapiens
ggccacggaggcaccatgaagaagtcttactcaggtgaaaggtgtagcagtcactcggcctacacccacagcatcgaccttgtgaacc

SEQ ID NO: 598223 - DNA, 126 bp, Homo sapiens
gtatatttgcagccagtactctatatgaacaatccgtctggatcacggatgtaggaagtgatccacacaacttaaagatctgctgccgagtgaatggggaagtggtccagagcggcaacaccaacc

SEQ ID NO: 598224 - DNA, 74 bp, Homo sapiens
ctggcttctcctggctgtcagcctggtgctcctctatctgtattaatctctggagaagacacatccacagttag

SEQ ID NO: 598225 - DNA, 100 bp, Homo sapiens
tcaacaagatgttgtcctgtgctggggctgacagggctcggagcccagctacctggaccgcacggagcagctgcaggccgtcctgtgcagcaccatggag

SEQ ID NO: 598226 - DNA, 50 bp, Homo sapiens
cgcggctactacaatcagagcgaggccgcgggacctggacttcaccatcg

SEQ ID NO: 598227 - DNA, 71 bp, Homo sapiens
aaaccaattctgagtctccctctgtcacgcccttaggtacctgtgttttgtttgggaactcggaggccctc

SEQ ID NO: 598228 - DNA, 75 bp, Homo sapiens
gtccttcaagcagttcgcactacagcgggagcaggagctggaggaagccagttgagggaagttctccatgaatgt

SEQ ID NO: 598229 - DNA, 96 bp, Homo sapiens
ctgtaacttacgtgtactttaccaacgagctgaagcagtatatttgccttccctccatgatctccaacactatccgataaagtagaagcaactgag

SEQ ID NO: 598230 - DNA, 74 bp, Homo sapiens
aaaattcgtcaagttatccgaaaatataattacgttgctatgcgtaaatgtatgcagcccaaagattttaattt

SEQ ID NO: 598231 - DNA, 102 bp, Homo sapiens
cctgaggaagatgaccaaggtcaccactctccctagatacagcccagagaggggccaccgggatgactaggcaccagcttgtagattttcagtggaaactgg

SEQ ID NO: 598232 - DNA, 98 bp, Homo sapiens
gactttggggcccgtcaccctcaggcggtgcgtctttctacgtgaataggattttgtggctggccagatacactgcatcatctttttcatcattttta

SEQ ID NO: 598233 - DNA, 74 bp, Homo sapiens
cagcctcccaagtagctaggaggtgtgtaccaccacacacagaccctgatgctcccataagacagaaaatgccc

SEQ ID NO: 598234 - DNA, 121 bp, Homo sapiens
cttctccactgttcctggaggaatccgagaagagcagagcggagggagccccagacacgatcaatgtccgagttaccaccatggatgcagagctggagtttgcaatccagccaaatacaac

SEQ ID NO: 598235 - DNA, 75 bp, Homo sapiens
ccggcagctgccccgtctgagaacagggcccatggcggacacccagtacatcctgcccaatgacatcggcgtgtc

SEQ ID NO: 598236 - DNA, 74 bp, Homo sapiens
gatgatcctggccatgaatgaaaaggagattcacagagagacgagcccaggaggctgactgagctcaaaggaac

SEQ ID NO: 598237 - DNA, 90 bp, Homo sapiens
cgggccgcgggctgcggacgctcggtcccgcgctgcgcatccccgcggacgccacagcgctctgctccctggtggttacctgtgaaaggc

SEQ ID NO: 598238 - DNA, 82 bp, Homo sapiens
tccaaggagctgctgacggcgggaagcgacggccgcggagggtccccagccccaccccagccccaaaggaggctgttcgaga

SEQ ID NO: 598239 - DNA, 100 bp, Homo sapiens
ggagagactgtcagacagttcctgctgctgcccaggtgcatctgagtatcagtcagagccggatctctcattggctgttgcagcagggatcagacctgag

SEQ ID NO: 598240 - DNA, 74 bp, Homo sapiens
cgtgcccttccgggagctcaagaacattgtggacaaagccctagaagagccaaagtatagctcactgtatgctc

SEQ ID NO: 598241 - DNA, 75 bp, Homo sapiens
ctgctgtctcctgcaagaactggctcaagaaatttgcctcgaaaaccaaggcgtctctggccgagcctctttttg

SEQ ID NO: 598242 - DNA, 100 bp, Homo sapiens
cctgcgggtgcctttgaaaatcaacgacaacttgagcacaggtgagccggcctcatcctagtgactaccccctcctgatcctctttgtggtaggtggggt

SEQ ID NO: 598243 - DNA, 50 bp, Homo sapiens
gagctcctgggcatcccgctggaccaggttactataacaacagtaccaag

SEQ ID NO: 598244 - DNA, 88 bp, Homo sapiens
aacttggtagtagtcaatcagcaggtttgactgtgaaacatctaggtttgcaagagttcattattttaaaccttgtgatggttgggct

SEQ ID NO: 598245 - DNA, 100 bp, Homo sapiens
agcgaacatgtcgcggcctgtcagtgttctaagaacggaagcatctgggctggatggaatttagcatcaagcagagtcccctttctgttcagagtgttgt

SEQ ID NO: 598246 - DNA, 51 bp, Homo sapiens
gtgagaaacaggcagcaggatgtgcggatgcgtaagaggggttccgttcga

SEQ ID NO: 598247 - DNA, 89 bp, Homo sapiens
aatgagtgaacgatgttgctctagatacagggattggagtttggaatcctgccttcgatgtcaccccccacgacctcatcactggtggc

SEQ ID NO: 598248 - DNA, 75 bp, Homo sapiens
ggaaatatcagataaaatatctaaagaggagatggtgagacgattaaagcatggtggctgtatggacagtctgac

SEQ ID NO: 598249 - DNA, 98 bp, Homo sapiens
tcggcagtcaagcagttctgcaaattctcagcagggtcagtgggagacagttgcagaatgaagaagagtctggagaacctgaacaggctgcaggtgat

SEQ ID NO: 598250 - DNA, 82 bp, Homo sapiens
cagcacaatcgggcggaggtggcgctgccccttcaggtctcctctgagcctccggcctccataagacccaaaacagatgaca

SEQ ID NO: 598251 - DNA, 50 bp, Homo sapiens
ccgtgaaggcgtccgtcctgcgcatcgcaagttttgattcatcatggata

SEQ ID NO: 598252 - DNA, 100 bp, Homo sapiens
ctggcaggacgtgaaggggaagaggcccaccctggagtaaccctcactggagaatccagagtgctacagctagaatgaagcacatcaacctatcatttgc

SEQ ID NO: 598253 - DNA, 76 bp, Homo sapiens
ctgggggatcgggggcggcggtggcgccggcggcgggacaggccctaaaggacagcaaggtggtggagatcgttga

SEQ ID NO: 598254 - DNA, 142 bp, Homo sapiens
cggggcgggcgctgatccggagccccagcttggccaagcagagctgggggggcggtggccggcaccgcatttcagagactcctccactctctgggaatgacacggactccctctcctgcgacagtggcagttcggcaactag

SEQ ID NO: 598255 - DNA, 100 bp, Homo sapiens
cggcattttgaggcggtcctcctagcggcctgttggaaaatggatataccttatttgattatgatgttggactgaatgatataattcagctgctagttcg

SEQ ID NO: 598256 - DNA, 82 bp, Homo sapiens
agaaaccaaattttattatcaagaccccaaagtccaaaattgaagacattagagcagaacaagagagagaaggtgagaagct

SEQ ID NO: 598257 - DNA, 74 bp, Homo sapiens
aaggaagtgcctatccaccgtgttgcagatatatctgggagggtacaccacccggactacaacaatgagttgac

SEQ ID NO: 598258 - DNA, 83 bp, Homo sapiens
ggcagagcaaggggcttacgcagaaggacctggccacggaggataagatcaatgccctcattaaagcagccggtgtaaatgtt

SEQ ID NO: 598259 - DNA, 100 bp, Homo sapiens
tgagatggaagcataggtcaaagctgtttggagaaaatcagaagtacagttttatctagccacatcttggaggccaccccagcagacatgtttgccaagg

SEQ ID NO: 598260 - DNA, 100 bp, Homo sapiens
gttcttgcagtctggaccctgcaacaaatccgctcagattcccgtcgtaacttaaagggaaattttcacaatgtccggagcccttgatgtcctgcaaatg

SEQ ID NO: 598261 - DNA, 75 bp, Homo sapiens
atccggagagtggacaagaaaaatgtgaaaacctttgcatcttctgatagtctagccaaggtccaagaagtagca

SEQ ID NO: 598262 - DNA, 74 bp, Homo sapiens
aaaatggacgctgacatcaatgtcacaaaagcggatgttgaaaagtcttcccaagggattgttgaagaaacttc

SEQ ID NO: 598263 - DNA, 100 bp, Homo sapiens
gcgggaagacgcggcggcggcggcggaggatgagcctgcagagcgcgcagtacctccggaccagcattagcagtacagggcccagccatgtttacagagc

SEQ ID NO: 598264 - DNA, 75 bp, Homo sapiens
ctgatggcctctcagtaccaacaaccccacgaggaagcccagaacctcatggccctcaccaatgtggacacccca

SEQ ID NO: 598265 - DNA, 82 bp, Homo sapiens
tctctttctggcctggaggctatccagcatcgatgctatagaagacaaacaagggaaggttttttttccttttgcatcatgg

SEQ ID NO: 598266 - DNA, 101 bp, Homo sapiens
atccagaaccactttgtagatgaatatgatcccaccatagaggcgaaagggcgtgtggttgcgcctgaggaagatacttttctgtgttttggggttgtaca

SEQ ID NO: 598267 - DNA, 74 bp, Homo sapiens
gtgctttgtttgcatttaattgaatcagtgacagactggatattggaaagagatccccatgaagaaatactcaa

SEQ ID NO: 598268 - DNA, 97 bp, Homo sapiens
ggagaatttgagaaggaactggaagggatcctgcttccgtcagaccgagaccggctccgttcggaggtttgatgaaatcctggaggccagtgatggg

SEQ ID NO: 598269 - DNA, 89 bp, Homo sapiens
gcgattcggtgaagcgattcctgcaggcgttggttcccctctttgacctggttacaggaggttccagtggcatcgggaagtgcattgct

SEQ ID NO: 598270 - DNA, 104 bp, Homo sapiens
gaagaccgcgcgcagggcctgcagcgggagctggacggcgagcgcgagcggcgcgagaaagccactcttcacctccaccatgagcctggacatccagagcctgg

SEQ ID NO: 598271 - DNA, 101 bp, Homo sapiens
ctgtaattacagctactccagcaacatcttgtccataaggctgaaccggcaagacggaaccactgcactccaggttccttgctgggtgctgagcgtggcct

SEQ ID NO: 598272 - DNA, 101 bp, Homo sapiens
gtgtacaaatacccctttgaattaattatggctggggcagaccgggccgttccagtgctgatcattggcattctggtgttcctacccggattttaccacct

SEQ ID NO: 598273 - DNA, 100 bp, Homo sapiens
atccaccgttgcctccagcccacccacctccaggctgctgacttgagtaaaccaatagataaaaggatatacaaaggaacacagcctacttgtcatgact

SEQ ID NO: 598274 - DNA, 83 bp, Homo sapiens
atttgagtcatttccttcgtacccacagtgcttcatgagagttgtatcacggactgattcaccgagcccaaccgtactcaact

SEQ ID NO: 598275 - DNA, 98 bp, Homo sapiens
gtgatctttcagagaaagcgcctgttcaactttgtcctctctcagcttcctgcctgacacagctcacttcaagaagtgcacaatgtcagaacgtggaa

SEQ ID NO: 598276 - DNA, 88 bp, Homo sapiens
ggtattccccttcctgctagtcctggtggatctgcagtacgaagataagtaatggaacatcatctgtgatcgtctccagaaagaggcc

SEQ ID NO: 598277 - DNA, 100 bp, Homo sapiens
gaggatgatgccccagctgcagttcaaagatgccttttgggaatcctatccatcttcttcaccgatatggtttgtggattctgaagacccaaatctgaca

SEQ ID NO: 598278 - DNA, 100 bp, Homo sapiens
aagagtggatttcagcctgcacggatggtcttgaaacacaaatggtttttgagaacctgcagttttggaggatttgacttgacgaatcgctctctgcacg

SEQ ID NO: 598279 - DNA, 97 bp, Homo sapiens
gagaacagaaggatctctccttaacgcctttcaccattaagaggaaagcgatggaggagctgagcgctgatgaggttgattcttcaccacactgaaa

SEQ ID NO: 598280 - DNA, 90 bp, Homo sapiens
tggatgcacagccccggcgctggtgtggtatctgtgcgctttgaagaagatgaagacaggaacttgtgtctaatagcatatccattgaaa

SEQ ID NO: 598281 - DNA, 100 bp, Homo sapiens
ttcagttttcttcagaagaaggacttcggaatgcactacaacaggaaaatcatattatagatggagtaaagccgcggcccatggagcccgccggcccggc

SEQ ID NO: 598282 - DNA, 82 bp, Homo sapiens
caccaattctggacacattgggattaaagttactccacaggatccgctgaacataggatgttgccacaaaatctacctcgtg

SEQ ID NO: 598283 - DNA, 75 bp, Homo sapiens
cccagcaacaagaagaaaaaggtgtggagagaggagaaaggatccatcagttacacaagtgacaagaaatgttcc

SEQ ID NO: 598284 - DNA, 77 bp, Homo sapiens
gaattaggtgtgagacaccatgcccagcccctgagggccgttgctccagggagaactgcaaatatcttcatccaccc

SEQ ID NO: 598285 - DNA, 75 bp, Homo sapiens
tccagtctgctggagcagtttgagaaatcagaaggaatttgctgattcccttggaattccgtttttggaaaccag

SEQ ID NO: 598286 - DNA, 100 bp, Homo sapiens
gacaaaggctttgccgcagttcatcttcctccctgtgtactttccatttgccttcctgggtcagatgtaccaacagtaccagcaacaggccggctatggt

SEQ ID NO: 598287 - DNA, 101 bp, Homo sapiens
attgcaagtttgtgccccatagctgcacagttgactatattgtggagtatgactatgatgctgtacatgatgatgaattaactattcgagttggagaaatc

SEQ ID NO: 598288 - DNA, 75 bp, Homo sapiens
ggcaactgcctgccttcaacgatttacttaaatccattgtttcaagaatgaaaaaggcagtagaagatgatgttt

SEQ ID NO: 598289 - DNA, 100 bp, Homo sapiens
cttacacttgaaatacagactgttggggaacaagagcacccagaggcctccattcaggctgttttttcagatgcccaaatgcatatttgggcattagaag

SEQ ID NO: 598290 - DNA, 100 bp, Homo sapiens
ctcgccagcagccgtccggagccagccaacgagcggtgtggccgacgacgatgccctcgctgaggagcgcatgcggagaggccagaacgccctgccagcc

SEQ ID NO: 598291 - DNA, 71 bp, Homo sapiens
gaaggggagcgtggggccgctgaggagatttgcaccctagttatcgctgagactttccctgaagatgcagg

SEQ ID NO: 598292 - DNA, 83 bp, Homo sapiens
gcggacgccattttcttctgcacttctgtctggagaggtgtttcccattaaacactaccaggacaaaatcaggccttacatcc

SEQ ID NO: 598293 - DNA, 75 bp, Homo sapiens
gttttttattcaacttagaaaagaattgaataacaagcctttgtattcatttgaagataatgcagactatgttta

SEQ ID NO: 598294 - DNA, 100 bp, Homo sapiens
tgcaatacacctacccatatgcatattacatggagtccggacccaggaagaagctggcgtaatgttattgaagctgtttatagtagactgaatccacata

SEQ ID NO: 598295 - DNA, 98 bp, Homo sapiens
ggcgggacacaaaagccctgtcacagctgtctctgccagtgaaacctcaggtgatattgctactgtgtgtgattcagcagttggggaggagatgactg

SEQ ID NO: 598296 - DNA, 100 bp, Homo sapiens
gtcgccatcaagaaagtattgcaggacaagagatttaaggactctgtttggaaacaagatcaagtctgtggctaagagagcattctcggggctggaaggc

SEQ ID NO: 598297 - DNA, 50 bp, Homo sapiens
tgcagaaaccacagtggtagaggatccatcagttacacaagtgacaagaa

SEQ ID NO: 598298 - DNA, 74 bp, Homo sapiens
aagtccagagctgaggactgcctgtttgcagagttctaaagttcctgttgcttcagacaatggatgagcaatca

SEQ ID NO: 598299 - DNA, 83 bp, Homo sapiens
ccgtttcctccaggacagcacctagtcgtggccggaggagtctcagagctgtcagaaaggtcgggaaagaggttaaagaagac

SEQ ID NO: 598300 - DNA, 82 bp, Homo sapiens
atctggcagatgcagaaacaggcccagagagtacctggagtagaacagaaaaattattatgtctgtgttcccttgggactca

SEQ ID NO: 598301 - DNA, 75 bp, Homo sapiens
agagagcaaggaaaggcttggaaacattgctgaggctcttgtcagcaaaggtctagccacagtgatcagataccg

SEQ ID NO: 598302 - DNA, 82 bp, Homo sapiens
gactcaaaagcaagaacaagctcaactacttgaggaattactggcttctgataggtaagccaagatgggtgcatacaagtac

SEQ ID NO: 598303 - DNA, 100 bp, Homo sapiens
aacatgtctgagtcggagctcggcaggaagtgggaccggtgtctggcggatgcggtcgtgaagataggccctcgggaccaaggatcacgtcatgactccg

SEQ ID NO: 598304 - DNA, 75 bp, Homo sapiens
gcgtttccacttcagagatctgtgcactagtgaaattgatgaataagtcaatagaggggacagcagatgatgaag

SEQ ID NO: 598305 - DNA, 75 bp, Homo sapiens
atgcaactttgcacttcagatccaacgaggaggaggaaggcgtgtgctgtggccccgacgaagacccatcatgag

SEQ ID NO: 598306 - DNA, 75 bp, Homo sapiens
tcgccttcacacaggtgaactcagtcaccatcctggtaaatagagggttcgttcccaggaagaaagtgaatcctg

SEQ ID NO: 598307 - DNA, 100 bp, Homo sapiens
ctggtggtgcaggaggtctccagcgtgctcaggtcggcggaggagaaggtgctccatctcgaaaagcgagaaaggcctccagaccaccaacactcagctc

SEQ ID NO: 598308 - DNA, 75 bp, Homo sapiens
ctgacccgcttcaagaagcctgctgagttcaccacaggttggcccagcacatcacctatgtgcaccagcacagcc

SEQ ID NO: 598309 - DNA, 82 bp, Homo sapiens
cgtggagctgcgaccccggccctaggtcagcccaaggccaaccccactgtcactctgttcccgccctcctctgaggagctcc

SEQ ID NO: 598310 - DNA, 80 bp, Homo sapiens
ctgggcgacggcgccttcggcaaggtttacaagagtgaagacatttccacctggacacctgaccatgtgcctgccctgag

SEQ ID NO: 598311 - DNA, 101 bp, Homo sapiens
gcctagaatgcatcagtgcccttgtggcgaatggggctcacgtcgactctagaggacaaaatcccagtccttggcacaaactcaggaaatggaagccggag

SEQ ID NO: 598312 - DNA, 98 bp, Homo sapiens
ttccagagagcaatatggctggttccccaacatgcctcaccctcatctatatcctttggcagctcacagatccagaagcagcaaggtctagcaattcc

SEQ ID NO: 598313 - DNA, 99 bp, Homo sapiens
accatgtatattttttgctggaggcataacaatgggaaacattggtcgacaactggcaatgcaggcattttggagatcaaagatgggtagaaaagatgc

SEQ ID NO: 598314 - DNA, 100 bp, Homo sapiens
tggggaaaaggcaaaaatcccatctaccgcaactctcagttcgagagtaaagaatatgcttttaaggctattaaccagggtggccttacatcagtagctg

SEQ ID NO: 598315 - DNA, 75 bp, Homo sapiens
ggggtcacttagactaccccaggaacccgcgccgcgagggctccttccctcagctctaagcgaaagacatgaggc

SEQ ID NO: 598316 - DNA, 82 bp, Homo sapiens
acctgggcaccagcaggacccgaggccaggagccaggggcccagaaggaacaagatcactcaaggtgaaggataatctacta

SEQ ID NO: 598317 - DNA, 78 bp, Homo sapiens
aagaacagttggatagactcatgcaacaattacaagatctggaggaatgcagactcagtggagaaggagttggaccag

SEQ ID NO: 598318 - DNA, 50 bp, Homo sapiens
cttttttggagagtcagagagaaaagatggagtctcactctatcacccag

SEQ ID NO: 598319 - DNA, 75 bp, Homo sapiens
caaaacttcggaaaaccatcataaacgagagccttaatttcaaggttactctggccaggacttcgactgggcaga

SEQ ID NO: 598320 - DNA, 98 bp, Homo sapiens
tcttaatattatttcccttctgtggaaactctctaaacaacaggatgaaacccataaattgtgtcagaataaattatcacttattggaactgaaacac

SEQ ID NO: 598321 - DNA, 98 bp, Homo sapiens
ttgatgaagatcagaatgatccccttctgccaggacctatatccagactttgcctgacactgcagggtccaagagaattaaagaaatatggaatgaca

SEQ ID NO: 598322 - DNA, 80 bp, Homo sapiens
tggaggaagtgctcctgctgggcctcaaggaccgcgagccctgggcatttccagctcgagagttccttcgaaagaagctg

SEQ ID NO: 598323 - DNA, 89 bp, Homo sapiens
ttgaccgagagcaggctggagcagccgcccaactcctggcgcgggatctgctgaggggtcacgatctgcaaagcccctgagcccaaaac

SEQ ID NO: 598324 - DNA, 74 bp, Homo sapiens
acccccaggagtaagagcccatagcagtctgccagacaatagagcatatggtatcccttttactattcagcgac

SEQ ID NO: 598325 - DNA, 100 bp, Homo sapiens
caagaactgcactgatgggctttgcatgcagaaatgtctacacaaggaagtacaggatttggcttttctagatgtcgtatccaaacttcgcagtcatgag

SEQ ID NO: 598326 - DNA, 99 bp, Homo sapiens
acaccattggcaaggagatcattgacctcgtgttggaccgaattcgcaagctggccgaagaacagttgagaattgttgaagaacaaagaaagattcatg

SEQ ID NO: 598327 - DNA, 98 bp, Homo sapiens
tggtgctgtaaccacctcacagattccagcttcggaacaagagaccctggctaccctagatacaaggaaaatagtagaagcttgtaaagccaaaactg

SEQ ID NO: 598328 - DNA, 100 bp, Homo sapiens
ctgaatccatcattgcagctgcatgttcaagaagtggccggagagttctgcatgttgattcccttgccttacacccagacaaaactctcgttgcaactgg

SEQ ID NO: 598329 - DNA, 100 bp, Homo sapiens
cctcatgatccaccggcctcggcctcccaaagtgctgggattataggcgtgagccaccgtgcctggctgaagagatcagggaagatgtgccttggagagg

SEQ ID NO: 598330 - DNA, 82 bp, Homo sapiens
ctctttccgccctaatggaggtctccagtttcggatttaagtgccctgtatgctcaaaatttgtatcctcagatgaaatgga

SEQ ID NO: 598331 - DNA, 97 bp, Homo sapiens
tgaggtctgcaagatggcactcaacatgaacaactacaaaggctatgaaaagaagccctattgtaatgcgtatttataacagcaatgatgtagcagt

SEQ ID NO: 598332 - DNA, 50 bp, Homo sapiens
caggtgcccaccaccatgcccaggaaatgtgactggaaacagtaactcca

SEQ ID NO: 598333 - DNA, 97 bp, Homo sapiens
gcagcatggagaggggccgtggcccctgcagcggaaccggacccagtccctgagccgcccctacacccacaggcccgacaacaagctcaaatacgtc

SEQ ID NO: 598334 - DNA, 82 bp, Homo sapiens
gcagctcttgggttttttgtggcttccttcgttattggagccaggcctacaccccaggaaattgaacttagctcattaaggg

SEQ ID NO: 598335 - DNA, 75 bp, Homo sapiens
tgtccccagacgcagacctcaagggccttctccagcggctggagacagtatcggtttaatccagatggatatttt

SEQ ID NO: 598336 - DNA, 75 bp, Homo sapiens
ttcccaagaaagaggacgctttactctaccagagcaaggtctgcgggccaggcatcgacatccgcaacgactatc

SEQ ID NO: 598337 - DNA, 51 bp, Homo sapiens
ccagtgagaaacatatgctcctcaagcgaccactttgggaacctgaagaaa

SEQ ID NO: 598338 - DNA, 90 bp, Homo sapiens
tgcctcatctgctccagcagagaatcacatcttacctgggcaaagtctcacaccattttgctggtacagcctaccaagaggccagaaggc

SEQ ID NO: 598339 - DNA, 73 bp, Homo sapiens
ggcatatgtatgtgtttggagacttcaaagatgtattacgcccactattgcttggttctacttcctttatccc

SEQ ID NO: 598340 - DNA, 75 bp, Homo sapiens
cttgaagctgccgctgtcgctgctgctcgttcgagtcgcaggtgaatgaaggcaaggaggagcctggaagacctg

SEQ ID NO: 598341 - DNA, 101 bp, Homo sapiens
cagatgaagacgaagttgatggcctggagaagaaagatgttttgcctactgttgatccggattactacagcatcccatttcccacacccactactccgctg

SEQ ID NO: 598342 - DNA, 75 bp, Homo sapiens
ctcagccttccaagtagctgggactacagacatgcgccagcacgcctgggaggagatatcaccaaacatgatgga

SEQ ID NO: 598343 - DNA, 50 bp, Homo sapiens
cacggccaagctcacaaatcgggtttttagaacttcagccataaaaatgg

SEQ ID NO: 598344 - DNA, 83 bp, Homo sapiens
cgcgtctctctgctgcggcgcggggaccgctgtgctctcggtgctggagaatctggtaaaagcaccattgtgaagcagatgag

SEQ ID NO: 598345 - DNA, 90 bp, Homo sapiens
gagagagattaagcattcatcatttggaagaaatgtatttgcaatttcatatataccaggcagatgccgaggccaagtggactgaccccc

SEQ ID NO: 598346 - DNA, 89 bp, Homo sapiens
ccgcatcaatgcccagtacctggaagtcaagtgcggtgctatgatccttaagctgaggttgggttaacggcatggagaacagtcacccc

SEQ ID NO: 598347 - DNA, 90 bp, Homo sapiens
gccgtccccaggacactgtccggatcttccctccctgctccctgtgctgtcaggaatctacaggacttggctcgtatttacattcgacgc

SEQ ID NO: 598348 - DNA, 100 bp, Homo sapiens
cgcgtagcttccatccgccagctgccatgagcgagcgcctccgtcccaggcactcgaagactccagcttcctgaaaagaagtggcagggacagtggctac

SEQ ID NO: 598349 - DNA, 75 bp, Homo sapiens
atgaaagtgtgatgttcgcgtatttcttgacagatgtgttcagagcaacattgttttgttgacacaagcatttag

SEQ ID NO: 598350 - DNA, 96 bp, Homo sapiens
cgccgcgcagcctgcgttttctccggtacaggttgaggctactaagaaagctctgggtgtgcggcagtaccatgtggcctcagtcctgtgccaacg

SEQ ID NO: 598351 - DNA, 100 bp, Homo sapiens
gagaagtaccaggaggcgttggccaagggtacctcaggatgagtggggagggtaccccaccggtggcaaagatgaggagattccctgcaggagaatgaga

SEQ ID NO: 598352 - DNA, 128 bp, Homo sapiens
tcggcgcccagcaatcacagaagccgacaaggcgttcaagcgaaaacatgaccgctgagcccatgagcctgaactctttgcttccggaatccgggattgttgctgacatagaattagaaaacgtcctt

SEQ ID NO: 598353 - DNA, 100 bp, Homo sapiens
cgcctggagcgttacaaggccttctacattaccggtgtcatggagaaactccagctgggcccagagattctgcagcgggaaaatccaaggcttatttatg

SEQ ID NO: 598354 - DNA, 100 bp, Homo sapiens
caaggactctgcgtgcattctccactgccgtctactcggccactccggtcccgacacctagcctgcgtggttcatcatgacccatgccgtgggggtgcag

SEQ ID NO: 598355 - DNA, 75 bp, Homo sapiens
cctggatccaggataacggaggctgggtcctggacccaagccagaagcctctgcaaagcttccttccagacctgc

SEQ ID NO: 598356 - DNA, 100 bp, Homo sapiens
cccgctcgctgggagagaggtacctctccttttccctctccctttccctaaggcaaggcaggctgaggtaaagcggctcttccgccccattgaggaactg

SEQ ID NO: 598357 - DNA, 100 bp, Homo sapiens
ccaccacgcctggcctcactcaaacagtaaacgagttggttgaatctggcgatgtggaacccatggatatggagggctgactatatacaccatgtttttt

SEQ ID NO: 598358 - DNA, 48 bp, Homo sapiens
ggagaaggcagcgcgttgtacccgagaccccatatcatgtgaacctcc

SEQ ID NO: 598359 - DNA, 100 bp, Homo sapiens
ttcatcttaagaatgtcaacgattagtcatgcaataaatgttctggttttaaaaaatacatatctggttttggcctccccatggccacccatggaccagt

SEQ ID NO: 598360 - DNA, 98 bp, Homo sapiens
tctgacttccgaagatgccggactccggaacagcaagaactgcaccgaaccaggaagtgtttggattgtgagctatttcagaactgttctcaggactc

SEQ ID NO: 598361 - DNA, 75 bp, Homo sapiens
ctgacacctgctctcccggcaaggaaacttcgcaggctgaatcagcatgattcttcagaggctcttcaggttctc

SEQ ID NO: 598362 - DNA, 75 bp, Homo sapiens
catggtgctcttcttcttcgagaattacaccggggtccagagagtattatgagggaggccgaggacttcatgctc

SEQ ID NO: 598363 - DNA, 83 bp, Homo sapiens
cctgagaccatggaaaacttgcctgctctctacactattttccaaggagagaattcccatttgcagaaaccctatgagattaa

SEQ ID NO: 598364 - DNA, 82 bp, Homo sapiens
gtgaagtaggagacatcgtagtgggacgaatcacagagctcactcatgtgactgcactgaaatctaaggatcggaaaggtat

SEQ ID NO: 598365 - DNA, 75 bp, Homo sapiens
tcaacaccaaaaagctttctgctagggcaacttgagttggtggaaccaagtggctggattcatgttcccttaact

SEQ ID NO: 598366 - DNA, 75 bp, Homo sapiens
cgctggcaagtctcaaagtcgccacagaacaaagaactttgagtctggcaaggcttataagacaacatggggaga

SEQ ID NO: 598367 - DNA, 145 bp, Homo sapiens
cattgggatgccaggatactttattctacagcgaagttaattttgtatccgtcgaggctacagtagagatggactcaccctgtcacccaggttggactgcactggcctcaacctcctgagttcaagtgatcgtcccacctcagcc

SEQ ID NO: 598368 - DNA, 75 bp, Homo sapiens
gggagatccacagctaagacgccgggactccctggaaacctagaaatgaaagatgtagcacttaagcctcaggaa

SEQ ID NO: 598369 - DNA, 51 bp, Homo sapiens
gctgagaatgtgcaggaaatgaacgttcagttcatcagttacttcctccca

SEQ ID NO: 598370 - DNA, 97 bp, Homo sapiens
ctgcgggatacaaagtcagcccaggcagacctccaggatgaaaactttcggaagagaaagttgcctgtggtaagttcagttgttaaagtaaaaaaat

SEQ ID NO: 598371 - DNA, 75 bp, Homo sapiens
ggcgaacccgcggcgcaataacgtattctaccttgtaaatactgttatttgtatatactgtaaatgatgacatcg

SEQ ID NO: 598372 - DNA, 100 bp, Homo sapiens
gcgctggatcatccaggtgccccggatttagtctgtttctgtcgactgtggaccacttatgtgcgatccgtggaccacttgcgtgcgatctgtcggccga

SEQ ID NO: 598373 - DNA, 100 bp, Homo sapiens
ttgggcttctcgggcaagttctatcatactgaggaaggcttgctgtaccgggcacgctactttggcgacacagatatgtaccacagagcacagaagatgg

SEQ ID NO: 598374 - DNA, 100 bp, Homo sapiens
actttgctgctgcatcaacacatggagcattgtgtttagagcttctagttggcaatggggccgatgtcaatatgaagggcacaagagactatagtccccg

SEQ ID NO: 598375 - DNA, 75 bp, Homo sapiens
tgaatcgaccaaggcctacctgggaagaagtggagaagcgctttgagggtcggctcaccaagaacatgtcaggat

SEQ ID NO: 598376 - DNA, 75 bp, Homo sapiens
tggattcccgtgagcacaggccccgtactgcttccatcaggaagaattcctttggctaccggaagaaaagggagg

SEQ ID NO: 598377 - DNA, 82 bp, Homo sapiens
agacaggacagtgtcatgggctccaaaggaggaactgtggctgcaccatctgtcttcatcttcccgccatctgatgagcagt

SEQ ID NO: 598378 - DNA, 82 bp, Homo sapiens
gatgccatcatcaccaaggccagcatcaaggacgtcctggacagcgaaggaggctgggaggcggcagaatgcagccagagga

SEQ ID NO: 598379 - DNA, 90 bp, Homo sapiens
actttatactcttggactacatctttctcgggctcaggaccgctcaggaagtggcagcgaagaagactgagccccgacattccagtctcg

SEQ ID NO: 598380 - DNA, 73 bp, Homo sapiens
ggcggtggagcgggagcgcgcagcagcctctgaagagccaatccattcaggatgggaaaccacgcaggcaaac

SEQ ID NO: 598381 - DNA, 98 bp, Homo sapiens
gagacgttggagttttatcctagaggataaaggaaatctttgggaaagtcagtattttatatagcaagttcctgggtggagctacccatgaacagcag

SEQ ID NO: 598382 - DNA, 100 bp, Homo sapiens
gatggttttatgcagaactgcgatttccaaatcgatagttttagagcctatctattggaattcctcgaactccaagggggacacagcgattgccacgcgc

SEQ ID NO: 598383 - DNA, 100 bp, Homo sapiens
tgccccctgcttctgccccagaaccggtcgaaaaccgtgtatgagggattcatctcggctcagaactacacgcagtacatccctctgtccatatatgacc

SEQ ID NO: 598384 - DNA, 71 bp, Homo sapiens
gacatttggaagcatttttggatataagcggagaggttgcaaattgctttataaacatgacttggcaaaac

SEQ ID NO: 598385 - DNA, 101 bp, Homo sapiens
aaactctcagtccagaaatgcagagctttgtgagataccacccacttctgatacaaagtcagatactgcaacaggttgacctgacagttcaagaaaaggag

SEQ ID NO: 598386 - DNA, 80 bp, Homo sapiens
gtccgagagcagcacgggcgcgatgagtcggtgcacagatggatgcggcagacaggagctgcacagtgtctgtgcactgc

SEQ ID NO: 598387 - DNA, 75 bp, Homo sapiens
tgctgctaaaaacaagactggggctgctcccatcattgatgtggtgcgatcgtatcctgtggagcacccagacaa

SEQ ID NO: 598388 - DNA, 98 bp, Homo sapiens
cgccggctaccatgtccgcccaggcgcagatgcgggccctgctggaccagctcatgggcacggctcgggacgaacagctttgctgagccatcaaggtc

SEQ ID NO: 598389 - DNA, 100 bp, Homo sapiens
gtctgccaggtggtgtccatcatgcctgagaaatgccagtggcctgacagcagcagacattgcacaaacccagggtttccaagagtgtgcccagtttctc

SEQ ID NO: 598390 - DNA, 75 bp, Homo sapiens
gtcccgggggcgcagggaaggagggcgtccgagtcaacaaccgcttcgagctgatgcgagccacccctctggctg

SEQ ID NO: 598391 - DNA, 107 bp, Homo sapiens
ctatggcagcagcgtggcctccgccaccgtgcacatccgaatggattaacgtcttcaaggacccagttgctgatcccaacaaaaggtccaaaaagggccgattatct

SEQ ID NO: 598392 - DNA, 90 bp, Homo sapiens
gcatgaccctcacggccagccctggggtgttccccgtcactgtggtctcgactctgaagacagagttcctgccgctcctaagtgtgtcat

SEQ ID NO: 598393 - DNA, 75 bp, Homo sapiens
cagccgaggccgccgccgcctctccttgctgcagccatggagccgccatggcatcagatgaaggcaaactttttg

SEQ ID NO: 598394 - DNA, 100 bp, Homo sapiens
cggctgctgtcgcccagcgccgccccgtcgtcgtctgccttcgcttcacggcgccgagccgcggtccgagtgttgtgtaacggaccaggaacatgtgttc

SEQ ID NO: 598395 - DNA, 74 bp, Homo sapiens
aagaggctggactcggattcgttgcctgaggtttaagaattgtttaagctgcatcaatggagcacatacaggga

SEQ ID NO: 598396 - DNA, 90 bp, Homo sapiens
cttcctctggtgcaaccagcaagtcttccagtatgaatcccacagaaaccaaggaattctcctactttcaaatcatttgaggagagggtt

SEQ ID NO: 598397 - DNA, 96 bp, Homo sapiens
gtcgccggcagcgccgcgaaggcggtgctcgggccagcccttctctgccgtccctgggaggtgaacgaggtggtcttcagccccggggagtcccac

SEQ ID NO: 598398 - DNA, 74 bp, Homo sapiens
cccagagtatggctaccctgccgacaccgtctggcctgccatggagcaaggcggctgccgagtgatagagcaga

SEQ ID NO: 598399 - DNA, 83 bp, Homo sapiens
caaaaatggcagcattggaaaacagactggttctagaaaagcccatgactgaagagttgctgaaacaacaaaagctgaattca

SEQ ID NO: 598400 - DNA, 75 bp, Homo sapiens
cgtgtgctccctgcctctcacggtggaacggcacatgtgtgatggggacattgttatcttcaaccggcagccaac

SEQ ID NO: 598401 - DNA, 101 bp, Homo sapiens
gcaacctcaaactcctgggctcgagcgatcctcccacctcagtctcctgagtagctatgactacgggttgaaatcacaaagattagacacctttttagata

SEQ ID NO: 598402 - DNA, 105 bp, Homo sapiens
ctcggaccagctctgtaaaagccccgcctctgccttcggatagtgttttccaagcagtgaagcacttgccgtgttgaactgaatgcactactggagaatgttctg

SEQ ID NO: 598403 - DNA, 90 bp, Homo sapiens
gccccgggtggcgcctccctgcgactcctggaccaccgggcgctggtctgctcccagccgactgaaccggccgctgacactctcggagaa

SEQ ID NO: 598404 - DNA, 123 bp, Homo sapiens
tggagagaggcctgaaatcagcagaccctcgggatggcaccggttacactggctgggcagtgacaacgcgcctgcaaaagggaacaagagcccttcgcctccagatggctcccctgccgccac

SEQ ID NO: 598405 - DNA, 50 bp, Homo sapiens
atcggcccaaggccagttctccgcaggtactccaaagattcaggtttact

SEQ ID NO: 598406 - DNA, 50 bp, Homo sapiens
tcccaaagtgctgagattacaggggtgctgagttcttcacctccttttag

SEQ ID NO: 598407 - DNA, 87 bp, Homo sapiens
cggaacccctccttgaagctgatggtgaatgtgtgcggacacactctatgaagaacttcctgattacattatggtgatggtggccaa

SEQ ID NO: 598408 - DNA, 116 bp, Homo sapiens
ggggtgtcctccacagggcgacggcggcaggagctcgggaaccgggactgcgagcggcatgatgccttcttctgtagagtgggcgctttgcagaatacgtgttgaatgaaatcact

SEQ ID NO: 598409 - DNA, 82 bp, Homo sapiens
gcagtgctggctcggctgaacagtgagctccagcagcagctcaaggatagagtggtgacttccaagcttcatgcagaaccgg

SEQ ID NO: 598410 - DNA, 97 bp, Homo sapiens
cttctcagaagacagagggttttcttttgaggaaacaaaccatcaggcctcccagaaagtatccgggatctgaaaatcaccaaatcaccacatccgg

SEQ ID NO: 598411 - DNA, 75 bp, Homo sapiens
gggacctgaagtgcagacccctaagtggccataaaatgcagtaaaaacaaatccagttcccaagaagctgtacaa

SEQ ID NO: 598412 - DNA, 89 bp, Homo sapiens
gatggatgtgatgcctgctagccaaaaggttgtctgggttcatgtctaagcttgttccagctatccagaatgcccacaagaattcaact

SEQ ID NO: 598413 - DNA, 100 bp, Homo sapiens
gtcctgtattcctataccatcatcacagtggattcctgcaaaggcttgagtgacatccaccacagtttaagctatgaagaaggacatccctcacactctg

SEQ ID NO: 598414 - DNA, 75 bp, Homo sapiens
tcgtgatttggtaactgaagacactggtgtgaggttaaaggaagatggaagtggaagtgcttatgacaaagaatc

SEQ ID NO: 598415 - DNA, 100 bp, Homo sapiens
actcaatccaaataattccactgctatgctgagaaaaggtctttctctaatacacagaattctaggaaggaggctgttcttttagccaaaatgaaacacc

SEQ ID NO: 598416 - DNA, 82 bp, Homo sapiens
ccaaggaaaaactggagagcttcatcaaaaatagtgatagctttgataatcgtcctcttgagttctggcgccttgactactg

SEQ ID NO: 598417 - DNA, 50 bp, Homo sapiens
gatcatcattaaggacggaggcacggacaggaagatgtcacccaagcgca

SEQ ID NO: 598418 - DNA, 75 bp, Homo sapiens
cagagattcatctttcatgcagtgacatgttgataaaaaatgatgtctggctcttgctgattgaattcctttggt

SEQ ID NO: 598419 - DNA, 75 bp, Homo sapiens
tgatgttggagaactacagaaacctggtctccctagtggcctgaagcacgaggacaaacgtggaggtagcggatc

SEQ ID NO: 598420 - DNA, 50 bp, Homo sapiens
ccagatcctccaaagacagatctggtcctcagaatggttggaatgaccct

SEQ ID NO: 598421 - DNA, 100 bp, Homo sapiens
agcttctcctcctccaagccaggctttacttccacctgggaatctggccagagaagattcttcaaacttcatgagagaaagtgtgaacctattattatga

SEQ ID NO: 598422 - DNA, 50 bp, Homo sapiens
cccgagtgcagtttcgatggaaaatgaagtgggcctttggagtgacgctg

SEQ ID NO: 598423 - DNA, 75 bp, Homo sapiens
ggggtgggaggcgggccccgagtccccagctgtgctttgggacatccggaagaaagcagccatccagacatttca

SEQ ID NO: 598424 - DNA, 82 bp, Homo sapiens
tggagagactgtcgcaagggaagtgagagccacgagccaaggtgggcacttgatgtcggatctcttcaacaagctggtcatg

SEQ ID NO: 598425 - DNA, 80 bp, Homo sapiens
atttagaggaccactagttggaccccatcctcgtgctggaggaacagccactcatctctgcccagctgctgccctcccca

SEQ ID NO: 598426 - DNA, 100 bp, Homo sapiens
aagacccgcagcaaccctgagaacaacgtgggccttatcacactggctaaccatggacctggctcaggcaggcagcacagtggaatctaagatctacgac

SEQ ID NO: 598427 - DNA, 75 bp, Homo sapiens
atgttactcatagagtccgactataccacatacaggctctctatcaatatcagctcacatcattgaaaagataat

SEQ ID NO: 598428 - DNA, 82 bp, Homo sapiens
ccgccgccccctaaagcggaaccggatcaccgagggcatttacggcaggtggaatttcagtgttggccactttgaacttcgg

SEQ ID NO: 598429 - DNA, 82 bp, Homo sapiens
acatatccgagggtgtcctgttacttccaagtcatcaccagaaaggagatttactgaccttaagcactatagtgatgaactg

SEQ ID NO: 598430 - DNA, 98 bp, Homo sapiens
ccacggcatgcacgataagtttgtgccggtggaggaagaccagcgcatggccgaggacagagcgggatgccaccagcttgtccaaagggaagttccag

SEQ ID NO: 598431 - DNA, 100 bp, Homo sapiens
cagcctccagagtagctgggaccacaggctaatggtcgatttgaagtgggcaagaaaatctgtttgagcatctcaggccatcatcctgaaacttggcagc

SEQ ID NO: 598432 - DNA, 50 bp, Homo sapiens
gacgctccctgtgatttatgtcaagggccgttgctccagggagaactgca

SEQ ID NO: 598433 - DNA, 75 bp, Homo sapiens
gtgaaggacaaggaatatgggctttactaggcagaatcacagggcagggaactgctcgcagaaagaagaaggtgg

SEQ ID NO: 598434 - DNA, 82 bp, Homo sapiens
tgaacttagcacacatctatgtggagcaaaagcagtacatcagcgccgttcagatgtggaatgcagtagccctctgggcctg

SEQ ID NO: 598435 - DNA, 83 bp, Homo sapiens
tttggggaatctatagttaatcttggcgacattgacaatgatggctttgaaggatggaatttttaagatgagcctttctccag

SEQ ID NO: 598436 - DNA, 75 bp, Homo sapiens
ctcgctgaccccatcactgtgcaagctggggctgcagctgcaagctttcttcctggtggcagatgacatcatgga

SEQ ID NO: 598437 - DNA, 101 bp, Homo sapiens
atcgggagaaaacaagtccaaggatgaatcccagtccctgttacgggaacatcatcttcagcgggctatttcagcacagcaggtgtatggcgagaagaggg

SEQ ID NO: 598438 - DNA, 100 bp, Homo sapiens
aattttagggtcctttatatagaagggagagtaggcacctctaagatactgatggctctgcagaggacccattcattgcttctgcttttgctgctgaccc

SEQ ID NO: 598439 - DNA, 100 bp, Homo sapiens
cctgactaccctggaagtagcaggccgcatgcttggaggttatcttatgatgaggcttttgctatggctaatgatcccttggaaggcttccatgaagtaa

SEQ ID NO: 598440 - DNA, 75 bp, Homo sapiens
ccgagatgcagctgatgcagtccgagagctagatggaagagagacaagagagacacctccaacttcgacaaagag

SEQ ID NO: 598441 - DNA, 88 bp, Homo sapiens
cagatcctgtttcagccccctgtgcgccaccattgcagccaaagggccgttgctccagggagaactgcaaatatcttcatccaccccc

SEQ ID NO: 598442 - DNA, 83 bp, Homo sapiens
cggggccgcactgtggtattcgccggcacgcgaagtggccgcatccgcaagaaaaatggctacaaacttcctagcacatgaga

SEQ ID NO: 598443 - DNA, 100 bp, Homo sapiens
aagtttgcatgaaaactgcactttattgcaagatgctgtcctcttccataatactatttattacaacctcttatatggaaacatcagtgcttcacctgag

SEQ ID NO: 598444 - DNA, 75 bp, Homo sapiens
ccttcctgctcatctccaccctgaaggacaagcgcgggacccgctatgaggattttttatcaagcagaaatgcat

SEQ ID NO: 598445 - DNA, 60 bp, Homo sapiens
ccctaggctccacaactctaagaagctttgggacgacctggcccagctgcccttcctgac

SEQ ID NO: 598446 - DNA, 50 bp, Homo sapiens
cccattcccaagtcccacgaggcgaagatggcagtgaacgtatactcaac

SEQ ID NO: 598447 - DNA, 98 bp, Homo sapiens
agccggcaaataaattcaacaagaagagaaaattccagccagatggtagaagcgatggtgtcttctctttagggatggtgaggttggaaaaaggctcc

SEQ ID NO: 598448 - DNA, 90 bp, Homo sapiens
ttggcatccagggtcggactcccggggccatggccggaatgcagtaccctcagcagcagattgctcgctgtaagcagctcatctgtgacc

SEQ ID NO: 598449 - DNA, 100 bp, Homo sapiens
aagcgcagggagaaggaagaggtgtttgaaaaggttatcaatagtctggctgtctatcgtcatcgtgagactgactttggtgtaggagttcgagaccacc

SEQ ID NO: 598450 - DNA, 83 bp, Homo sapiens
ccactcccgcccacgtcccatttcgcccctcgcgtccggagtccccgtggccaggcctccggtgtggctgtctctgatggtgt

SEQ ID NO: 598451 - DNA, 74 bp, Homo sapiens
tttttacccggccaaagtcactgctgttaacaaggatgtgccaggtggagctcaacaggaaagtcctagcggat

SEQ ID NO: 598452 - DNA, 98 bp, Homo sapiens
agaaattgttgaagagttcaactttcccagaagttgttctaacgctgcctttgctttaaaacagtattacttgcggctaatagctcgtcagcttgcta

SEQ ID NO: 598453 - DNA, 75 bp, Homo sapiens
gaggagcggagcggagaatgccaagcaagtctggaaaagtttgaaattccagtaaaaattcgtttgagtcctgaa

SEQ ID NO: 598454 - DNA, 75 bp, Homo sapiens
ggccagtgagcccatcccgttctctgatttgcagcaggcacagtaaccttggtgcacgaccgaaagggctgtcta

SEQ ID NO: 598455 - DNA, 98 bp, Homo sapiens
cgggcagtgcggcaaccaaatcggcgccaagggaagaggaagaacgtctgagaaataaaattcgagctgatcatgagaaggccttggaagaagcaaaa

SEQ ID NO: 598456 - DNA, 128 bp, Homo sapiens
cgtgaagctcaccgacagtgccctgagggccttcgagagctaccgcgccagacaggtgaaaggtgtagcagtcactcggcctacacccacagcatcgaccttgtgaacccagcgacctgactgccttg

SEQ ID NO: 598457 - DNA, 100 bp, Homo sapiens
ggcagaggagctggcggagagcggcctgcgggcgatcgggccgaggttatgatgtgattgctcaagcccaatctgggactgggaaaacggccacatttgc

SEQ ID NO: 598458 - DNA, 75 bp, Homo sapiens
tcagtgttatatcctccaggaatactggccagaatttacatagtacatgacgaagttaaggataaagcttttgaa

SEQ ID NO: 598459 - DNA, 98 bp, Homo sapiens
aaacatccccgtcatcgagtatgagcagttcatcgcaggaaatcagtacgctgaggggccaagtgggaggccaggtcagtgtggaggtggattccgct

SEQ ID NO: 598460 - DNA, 75 bp, Homo sapiens
ctcgcccgccaccctgcgctgccgccgctctgaggagttaaaggcattctggagctgcaagagcaggtgtttaca

SEQ ID NO: 598461 - DNA, 114 bp, Homo sapiens
gctacatcatttgaggaatcagaacgcaagcaaaatgcgttaggaaaatgtgatgcatgtctcagtggaaaactagaagaattgtctaatcagttacatcgcagtcaagaggag

SEQ ID NO: 598462 - DNA, 90 bp, Homo sapiens
gacgacctgtctcgccgagcgcacgccttgccgccgccccgcaggctatggaacaccatatggttacagcacagctgcccctgcctatgg

SEQ ID NO: 598463 - DNA, 75 bp, Homo sapiens
tgatcccagctgtgctctggacagggcaattaagttggaatatgcaaggttggttaagttggcccaagaagacac

SEQ ID NO: 598464 - DNA, 83 bp, Homo sapiens
gagttgggaggacccgggacaccgcacagccgggaaatggttgattcttcaccacactgaaaccattaggaaaaatccttgtg

SEQ ID NO: 598465 - DNA, 50 bp, Homo sapiens
ggcagaaaatttactggttaaggaggctattttcaaaatgatcactcccg

SEQ ID NO: 598466 - DNA, 101 bp, Homo sapiens
gagaggaactgaggcctcccaccaaaaccaagcactgacatgccactcatggctcttcagtaggttacctgcaacatccaggatcagaacaagtacaattt

SEQ ID NO: 598467 - DNA, 100 bp, Homo sapiens
gagcggagggagccctccatcaccaaggaggagaaggacagcaggagcgagaacccgagcagcgccatgagcaacactaccgtcgtccccagcactgcag

SEQ ID NO: 598468 - DNA, 100 bp, Homo sapiens
cagaggaagctgtaccgagatgtcatggtggagaacttcaagaacctggttgcagtgggatgctgtatgattatgttgaaaggaaacgaaaagaaaattc

SEQ ID NO: 598469 - DNA, 100 bp, Homo sapiens
gcggtggtttggacgccggcggagacgcgggcgaggtcaaaatgcagatcttcgtgaaaacccttaccggcaagaccatcacccttgaggtggagcccag

SEQ ID NO: 598470 - DNA, 89 bp, Homo sapiens
aactatagaagatcgtatagtcctagaaaatgatgtggagaaagcacaaaaacaaggacaattggaaactcctggaaaactgcccagtc

SEQ ID NO: 598471 - DNA, 75 bp, Homo sapiens
ctgatattacaatctaccaccttattcagattggaattccaccagcccctcgtggagttcctcagattgaagtta

SEQ ID NO: 598472 - DNA, 75 bp, Homo sapiens
cacctcatccagaacgccatcatcgaaatcggtcctgaccgccagcctgtcgtacatggtggggatgatcgccag

SEQ ID NO: 598473 - DNA, 75 bp, Homo sapiens
gacgccagcatcatacaccggctgttcgaggccttgactgtagaaactggcgatggaatatgagaggagccctct

SEQ ID NO: 598474 - DNA, 75 bp, Homo sapiens
actgaaaagtgatgaggaactggcaagaaagctaagcattgatattgccaaagagtgtggccagatgcaaaataa

SEQ ID NO: 598475 - DNA, 96 bp, Homo sapiens
aggatttcaactcggggctgattgggcccctgcttatctgtaaaaaaggacagagcgggatgccaccagcttgtccaaagggaagttccaggagct

SEQ ID NO: 598476 - DNA, 74 bp, Homo sapiens
ccgtgacgctgagcgaggcggagaaggtgtacatcgtgcatggcgtccaggatccagccgcagaagccaggatg

SEQ ID NO: 598477 - DNA, 89 bp, Homo sapiens
cctctttcaataatattcagacagcaattaacaaagaccagccagctaaccctacagaagggtgctgccccacgtcccccaccaaagcc

SEQ ID NO: 598478 - DNA, 98 bp, Homo sapiens
cggagtgtatgtctttggagaacttctggagctggccaacgtgcaggagctaaagcttgctttcactctggaccacgagaccggattgcctcaaggat

SEQ ID NO: 598479 - DNA, 100 bp, Homo sapiens
gataacactttagtacagtcgccaactgatgtctacagtatcaccttttgccatgatagcatttctttcattggacagttccttacaagggctccactca

SEQ ID NO: 598480 - DNA, 74 bp, Homo sapiens
actatggtttaatgaaaatagatgaaccaagcactccttaccatagtgattcgcctttgccagtctcatctcgt

SEQ ID NO: 598481 - DNA, 100 bp, Homo sapiens
ctcgcatcctgttccaacgcggagctgctaagccgcacatctcttgagacccagaagctcgatctgatgactgaagtgtctgagctgaagctcaagctgg

SEQ ID NO: 598482 - DNA, 50 bp, Homo sapiens
agaggattcctaccgagagtggatacagcttcacgaggctgacattgtgg

SEQ ID NO: 598483 - DNA, 75 bp, Homo sapiens
agctaggcaacagcagcagattgaaaatcagcagcagatgttggttgccaaggttctgcggcatgaggaatttga

SEQ ID NO: 598484 - DNA, 98 bp, Homo sapiens
atcatttctagtctccctcagctgttgagcaggaccggaacagggacctggccactgccctggagcagctgctgcaggcctaccctagagacatggag

SEQ ID NO: 598485 - DNA, 50 bp, Homo sapiens
tgaagacacgcacttatcattcagtggtatgccgagattttgctgtcctg

SEQ ID NO: 598486 - DNA, 90 bp, Homo sapiens
ggggcgccgcggccgggcgggcagcaataccaggagctgctggatgacaaccaagctcctttttttttgtttacgtgtgcgatgcggtgg

SEQ ID NO: 598487 - DNA, 75 bp, Homo sapiens
cgtgggcctgtggactgcagcctcggcggtcagcagggcatccgcttcgatcctgaaattccgcaaacactacga

SEQ ID NO: 598488 - DNA, 75 bp, Homo sapiens
tatgattttgccaattttggtgttctcaggttatcgattgttcagattccattctgtggggaaattgactgtgag

SEQ ID NO: 598489 - DNA, 75 bp, Homo sapiens
ccctcccctgagggcatgagtgagatctacctgcggtgccaggatgctcacatccggttcaagccaacactttcc

SEQ ID NO: 598490 - DNA, 100 bp, Homo sapiens
gggcacagactgttcatccgcttctcatggcagcggcggtgctgatggaccgggttcagactgtgccctgtccacggtgcctcctgcatgtcctgctgcc

SEQ ID NO: 598491 - DNA, 98 bp, Homo sapiens
gtagcctcaaactcccaggctcaagcagtcctaccatgtcagccttcccagtagctgggaccacaggtacttcatgaacatcacgtgggataaccggg

SEQ ID NO: 598492 - DNA, 90 bp, Homo sapiens
gcaacaagtgttgttaaacacaaaccaccctttaaattttcaagggaaggacagcaaattcaacacccaacagcttccttaatagcaaag

SEQ ID NO: 598493 - DNA, 87 bp, Homo sapiens
tcaagcaactgaaaaaattcttaatgttaacagaatgtttttgaagaagcttcaggaacaatccctgatcatggtgttcgctcatct

SEQ ID NO: 598494 - DNA, 50 bp, Homo sapiens
cggggcgcccgaggtctggaaggcgcagaatgtcgagtggtaaagtccac

SEQ ID NO: 598495 - DNA, 100 bp, Homo sapiens
gacaaaactcagctaaatcctaccagtctacaaaagaaaaagcttgtggtgaaggggggcaaaaaaaagaagcaagttctgaagttcactcttgattgca

SEQ ID NO: 598496 - DNA, 100 bp, Homo sapiens
aaataatctagatattgatggctttgctccagggcccacaacggcagtgtcctacatgtcggtgaaatgtgtggatgcccgtaagaaccatcacaagaca

SEQ ID NO: 598497 - DNA, 75 bp, Homo sapiens
catgggactagcatcttgcagtctgttaagatcttgtaaggccacaagatacatatcaattttttgttaagcatg

SEQ ID NO: 598498 - DNA, 83 bp, Homo sapiens
cggcagggcaggcagctccaggagggtaatggggccacctgcttgacacattgtgacggaaccgacaccaaagctgaggtccc

SEQ ID NO: 598499 - DNA, 82 bp, Homo sapiens
ccttgctgtgctgaatcctggctgtgtgaccccaacctgtcaggattggagctgctttccgagcacctggaccccaaactcc

SEQ ID NO: 598500 - DNA, 73 bp, Homo sapiens
cttacccgagaacgtgcgggaagagaagatcatcgagcatttcaaacgctgagatctgtatctgtggacctga

SEQ ID NO: 598501 - DNA, 75 bp, Homo sapiens
cgagagaccattactgcccctgtcccgtccaggtcaagacctcgtctccgttctcatagtcgtagcagtgaaagg

SEQ ID NO: 598502 - DNA, 90 bp, Homo sapiens
cctcctctgtgcggtgctgctcagtgcagttcaggaagaaggagagacgaccatcttgcaactagaaaaagatttgcgcacccaagtgga

SEQ ID NO: 598503 - DNA, 90 bp, Homo sapiens
gccatggggagcctcagcggtctgcgcctggcagcaggtttgagcacaaaatgaacataattagggaaaataaggatctggcatgtttct

SEQ ID NO: 598504 - DNA, 100 bp, Homo sapiens
agaagaagctgtctctgctgatagactccttccagaataactcaaaggtcgatggccaggtggtcttcataaactatactgccttgtgatgcctccctag

SEQ ID NO: 598505 - DNA, 125 bp, Homo sapiens
tttcctgggttgcttctggcggccctggtgttgctgctgtcctccttctccggtgtatactcttgatgtaccagatgcattctattactgttatagtccagaccctggtaatgcaaagggaaaag

SEQ ID NO: 598506 - DNA, 100 bp, Homo sapiens
ttttgacagtcgtagatacaaatttttggatgatgatggatccatttctcctattgaggagtcaacaacagctttgctgagccatcaaggtctaatggaa

SEQ ID NO: 598507 - DNA, 128 bp, Homo sapiens
ttttccacccctccaggccggctctccatgatgtccttcatcctcaacgccctcacctggacaacgagacattagaggtgcacccacccccgaccactacatatcaggacgtcatcctaggcactcgg

SEQ ID NO: 598508 - DNA, 75 bp, Homo sapiens
ggtgccggtggtgcgagtcttcggagcgaccccggcagattctggaacttttcaaagcctgactctcttcttgaa

SEQ ID NO: 598509 - DNA, 100 bp, Homo sapiens
ctggcatggtcagtggtggcatgggcagtgggcagcccctgccaatggcctggcaacagctggtcctccaggcagcggaggaggagaaagagatggacct

SEQ ID NO: 598510 - DNA, 74 bp, Homo sapiens
ccgaagcgttcgtatctggaagggggatatgagactttctactcggaatatcctgagtgttgcgtggatgtaaa

SEQ ID NO: 598511 - DNA, 100 bp, Homo sapiens
gaggaagcttctagtgtactcttactttgaaaagattagcctgaggcctgctcagtcgttcctaatgaataaaaatcaagtgccaaagcttcagccccag

SEQ ID NO: 598512 - DNA, 122 bp, Homo sapiens
gtgcggagctcctgtttgacggtattaagaaacatcgagtcactttgcctggacaggaggaaccctgtgcagattcactttataggaacagcttcagcttcagtgatgaaaaactgaattct

SEQ ID NO: 598513 - DNA, 73 bp, Homo sapiens
cgagagcgtgaccgagagcgcgaatatcgtcatcgttagaagtcttttctgaagcactcttcgagtacagttt

SEQ ID NO: 598514 - DNA, 90 bp, Homo sapiens
gcgcgcccggccggcccggagcaccgagctcgcggcacggtaggaggattacggggcgctgaaagacatcgtgatcaacgcaaacccggc

SEQ ID NO: 598515 - DNA, 100 bp, Homo sapiens
ggacctttgagcatacaccgagagagtgaggagccagacgacaagcacacactatggcgctgaaacggattaataagactctgttgacgttcagggatgt

SEQ ID NO: 598516 - DNA, 75 bp, Homo sapiens
atacgtcaccttgagtacagggggcatcgagactttggctgccgtcttctctctgcctgctcaactaccgcgtgg

SEQ ID NO: 598517 - DNA, 75 bp, Homo sapiens
ccggctcccgcaccatggaggaggacgacagctacggttcggagcgaccttggccgttggcctgaccatctttgt

SEQ ID NO: 598518 - DNA, 101 bp, Homo sapiens
aagtttctgaagttggtggccgccatcaaagccgccttggctcagggctaatgcgccctgaaggcagagtttggaatctgtgagtgcaacgtgtaaacagc

SEQ ID NO: 598519 - DNA, 98 bp, Homo sapiens
agtgtgtccacaaagggactcctgaaactgactgagagccagtggatttgccagcagtctggtgctggagaatctggtaaaagcaccattgtgaagca

SEQ ID NO: 598520 - DNA, 80 bp, Homo sapiens
ggctgaagagattgctaatgagatgattgaggcagccaagcccatcatcttcgtttcggacagagcaaacagcaacaagg

SEQ ID NO: 598521 - DNA, 75 bp, Homo sapiens
ttcctcggcaagaaatgtgtggtgcgtatagcagcaaaattcatcattcatgcccctcctggagaatttaatgag

SEQ ID NO: 598522 - DNA, 117 bp, Homo sapiens
tgaaaacttcaacgttgcctcctttgcccctcccacccttattacctggagatgatgacatggataggtgaagattgtccccagtggatggtccctatcacaatctctactagtgaa

SEQ ID NO: 598523 - DNA, 75 bp, Homo sapiens
ggacatcggcttctgcctggtgctctgcgtcctcatcgggcttatgttcgaggctattttggcattctgctggat

SEQ ID NO: 598524 - DNA, 83 bp, Homo sapiens
actacctgctgtacaccctcaacaaacaccagcgctttggggatgtttcagcagcccctgagaaggaagaggaggaagctgag

SEQ ID NO: 598525 - DNA, 83 bp, Homo sapiens
accaatagtggaactgaaaagatctcaaaatctggacttgaaaaggatcagttcttaagagcagccccggtaactggaggaat

SEQ ID NO: 598526 - DNA, 98 bp, Homo sapiens
gggagccggtctatggactttccgaagacgagttgaggagctcaagcttgggaaaatggtgtgcattccttgtatcgtcattccagttctgctctgga

SEQ ID NO: 598527 - DNA, 97 bp, Homo sapiens
tatctcagataacaaatacagatacacttgcggctgtagctcagatcttgcaaagtcctcaaggccagcagatgtgctcatcttttgctacgggacc

SEQ ID NO: 598528 - DNA, 75 bp, Homo sapiens
ggaagatctttttcctcaattgacatatctgaagagatggattaagaatgctttggattaaggattgtggagcac

SEQ ID NO: 598529 - DNA, 100 bp, Homo sapiens
acctcagcagaattttttgcaggggaaaacatccagtgtggtggaaatggtggttattggagatcatgatggggtagttatgtgctttggcatgaagaaa

SEQ ID NO: 598530 - DNA, 97 bp, Homo sapiens
gataaaaatttcagtgaagaagaaagtaaagttggaagttaagggagacaaagttgaaaacaaagtgctggtgtccaaggcagctgcagatttgatg

SEQ ID NO: 598531 - DNA, 146 bp, Homo sapiens
tgggccgggtggaggtgtcctgcatggagtcttgtgaaatcgcgtggactgcaacacccagcagcgcggtcccttcaccgatgttgtcaccaccaacctaaagcttggcaacccgacagaccgaaatgtgtgttttaaggtgaaga

SEQ ID NO: 598532 - DNA, 75 bp, Homo sapiens
ctgcccaagagggtccgctctcggctgggtggtgaaggaggagatctttgatgacaatgccaagcttccctgctt

SEQ ID NO: 598533 - DNA, 90 bp, Homo sapiens
gagcgagtacttcgttccaacatggacatcctgaagccaatcctgcttctggctagcaaggaggacgaggacacgatcaaaattggggag

SEQ ID NO: 598534 - DNA, 100 bp, Homo sapiens
acagattcgaattttacttctgaacgaaatggagaaactggaaaagaccctcttcagacttgaacaagcaagcccttgtgattcgaaatggtgagaaaat

SEQ ID NO: 598535 - DNA, 97 bp, Homo sapiens
tgatgatgaagttatgagctctacattgcaacagttttcaaaagttatagatgaggtgaccaagaatatggcccaggtgaccaaagccctggacaag

SEQ ID NO: 598536 - DNA, 88 bp, Homo sapiens
caccgtcatctctcaggagccctttgttcccaagaaagagaagaaatcagttgctgaatgctcagatgcatcagttccttaatataca

SEQ ID NO: 598537 - DNA, 51 bp, Homo sapiens
gcagggctcccctccttcaggaacggaagtggcactaaggtccaaaggaag

SEQ ID NO: 598538 - DNA, 100 bp, Homo sapiens
ggcgctgctcccgggggcgacggagcttcagagaagaggcagaagtgtgcaaacaggagcaggtccaagatttgcatggccagaagcaattcttgatcct

SEQ ID NO: 598539 - DNA, 100 bp, Homo sapiens
gcgcgagcgagcagacgcgcacaccggcgagccaagttccgcagcctggcatggcttctggggacctttacgaggagattacctggggcaattgatgtta

SEQ ID NO: 598540 - DNA, 100 bp, Homo sapiens
ttaaagttcgagaacataaagttttgggaccatatgtagatggtttatctcaactagctgtcactagttttgaggaaagtaatggaccagtgaaggtgtg

SEQ ID NO: 598541 - DNA, 82 bp, Homo sapiens
aagagccgagcacgcgggtctgtcatcatgtcgcgttacgggcggtacggaggagcattttgaaagcgaagcagaagccgta

SEQ ID NO: 598542 - DNA, 83 bp, Homo sapiens
cgccggggcgatgctggaggagctggagtgcggggcgcccggcgccaggggagccgccacagcatacatcaagagagtgatcg

SEQ ID NO: 598543 - DNA, 96 bp, Homo sapiens
ggggaagcagcacgggatcccagcctcaggcctgcacggacggtgttggttgggggccaattcctgtccccccagcagcatggcatcgtgtgctga

SEQ ID NO: 598544 - DNA, 74 bp, Homo sapiens
gacatcgtcttcagcaagatcaaatctaccacaactaacccaaagtggggtttttcagtgtttaaaacaagaga

SEQ ID NO: 598545 - DNA, 90 bp, Homo sapiens
gctgtggcccctgcggcgcttctggaggagcacaggcttctgctcccctgggacctgtggccgccgcccacagaccatgctcctggggcg

SEQ ID NO: 598546 - DNA, 88 bp, Homo sapiens
attagtgcgtagtgctgaagatgaaagaacacccaggttaatgcctgataaagaaagcatgtattacccacgggtacaacattaccga

SEQ ID NO: 598547 - DNA, 100 bp, Homo sapiens
gcgacatcaggaagaacagggtcgaggatcgaggttaaaaagatcaagtggcatgagcagccttttggggaaaattggtgccaagaagcagaaaatgagc

SEQ ID NO: 598548 - DNA, 75 bp, Homo sapiens
cgctgccctacggcttctccgccatgcaaggctggcgcgtctccatggaggtggtcataatgtcacaatctcctt

SEQ ID NO: 598549 - DNA, 76 bp, Homo sapiens
ctggctttgttgaccgggagaaacgagatgggggtgaagctggagatatttcggaagcagatccagagcttgaata

SEQ ID NO: 598550 - DNA, 82 bp, Homo sapiens
ccacccaccgccgccgcctcccaggttcctgcacttggccatcatccatgaagaaaaggcactgaccatggaagtgatccgc

SEQ ID NO: 598551 - DNA, 80 bp, Homo sapiens
tttttatggctgtgagacacgttaaaatttcaggatccctccctggtgccacagcagctgagtgcgcatcaaatctgaag

SEQ ID NO: 598552 - DNA, 75 bp, Homo sapiens
tactacctttatttccaccataggttctgtacagagtaatgagatgtgtgacggctgcaaaccaggtgttttttt

SEQ ID NO: 598553 - DNA, 100 bp, Homo sapiens
agcggagacccgggagcaggagctgggcctaggtctgcgccctgtcttaggaaaagtcctcagtgctgtgggcagtgcccagctactgatgtcccagaaa

SEQ ID NO: 598554 - DNA, 83 bp, Homo sapiens
caggcgcgcctggccgcgaacccggaccctaagaaggtcccgcagcccccggaagccaatagactccctcagggactctcggt

SEQ ID NO: 598555 - DNA, 100 bp, Homo sapiens
ggacagggcgcagcagtactttgagaaaatggacgctgacatcaatgtcacaaaagcggatgttgaaaaggagatggaaaaatcttttgatgaacaaaat

SEQ ID NO: 598556 - DNA, 80 bp, Homo sapiens
cggcgtcgtcggatgttgtgttgcccgccaccatgagctacacagggagtgcatccgccccaacccttttccccctcgtc

SEQ ID NO: 598557 - DNA, 90 bp, Homo sapiens
gggaaagagagcgccaggtgcttagcagatggtagtgaaaacctttatggatatggatcaggactcagaagatgaaaaacagcagtatct

SEQ ID NO: 598558 - DNA, 89 bp, Homo sapiens
gcaacgaggtcaccccgcggatctacgtgggcaacgcaggatctgaagaggcaaaatgcagtattacaagctgcacaagatgatttggg

SEQ ID NO: 598559 - DNA, 101 bp, Homo sapiens
aagactgggctgtagtgaggaaggacctgctgatgaatattacatcatataccgaaatgtttttgataaggagtctccccaggacagtgctatcacccggg

SEQ ID NO: 598560 - DNA, 100 bp, Homo sapiens
cagggaaccctggtcaccgtctcctcagggatatgtggtgcctgtcataagctccagagagctgccttccacaagaccagcagaagagtgggcaaacatg

SEQ ID NO: 598561 - DNA, 127 bp, Homo sapiens
aatgcagaatgcagagattttgttttgaattgtgaaatacttccacctcttttagagtaaaaatgcatttgcaaagggagaaaatgaaggccaaacagaagcaggctccagcttctgcaaaaacttg

SEQ ID NO: 598562 - DNA, 96 bp, Homo sapiens
gcgccgggtcccgcggggaaagtacatgtcccagagcaagcacacggaggcccgggagctcatgtactcgggagccctgctcttcttcagccatgg

SEQ ID NO: 598563 - DNA, 100 bp, Homo sapiens
acttgagagtgagactttgaaatcagaggaattccagaagaggctgcacccttataaggacttgtctccaactgaagaggaagagccagagcatcctttt

SEQ ID NO: 598564 - DNA, 100 bp, Homo sapiens
gagggaagtctgcgatgatgaaagagattgtattgctgttttggaaagaattagcagattggccgatgattcaggccccttcacagatgtagtcactaca

SEQ ID NO: 598565 - DNA, 75 bp, Homo sapiens
ctatgtgtcccagtattacaaccacttctgcagtcctggccaagttatgtgtctcggtaccacgtgaaagactcc

SEQ ID NO: 598566 - DNA, 100 bp, Homo sapiens
agcctcattatctaccacccgagatgccccaagacttaattcagtgcacaaatgagatgaatgtgaacatcccacagttggcagacagtttatttgaaag

SEQ ID NO: 598567 - DNA, 100 bp, Homo sapiens
acaaaggagagtttaaacagccaaaacagttcattcatattcagcatcccaaactgatcttccaggctagccttgcaaatgctcagattttgattcccac

SEQ ID NO: 598568 - DNA, 98 bp, Homo sapiens
gttgccctgtcaccatttctttcacaaaccttgtgtctcaatttggctacaaaagtgcaggaatcacagccatggcccccaccctccaggatttggtc

SEQ ID NO: 598569 - DNA, 96 bp, Homo sapiens
caacgggcgggtgctggagctgttccgggccgcgcagctgccgaacgacgtggtcctacagcggtttccaacctagatgaggaaagccgatggaca

SEQ ID NO: 598570 - DNA, 87 bp, Homo sapiens
ctcattgacatcactgtgcggcacatcgcagacctgtcaccaggagacaagcagcaaagtggggcaccaaggccctgtgctaagcac

SEQ ID NO: 598571 - DNA, 51 bp, Homo sapiens
aatcccagcactttgggatgctgagggcactgtgacctttgaagatgtggc

SEQ ID NO: 598572 - DNA, 71 bp, Homo sapiens
aaggggcttacgcagaaggacctggccacgggagcggcaccgggggggcgtggccccgggcttccaggtgg

SEQ ID NO: 598573 - DNA, 83 bp, Homo sapiens
cttcctccccgcgctctggcgtagaggtacggacattgctgcaggagaagaggttgccatcaagcttgaatgtgtcaaaacca

SEQ ID NO: 598574 - DNA, 101 bp, Homo sapiens
gctgtcgagtgatccagagccaaagaaagagcctgcaggacacagtcagaagaaaggaaaagccattaacattgggcaggccgccatggcatcagatgaag

SEQ ID NO: 598575 - DNA, 100 bp, Homo sapiens
ccctagtccctacagcagcagcagctggcgccgctctcgcagtccctacagccctgtgctcaggggcaagctctgtgtgattgattggaagacatcagag

SEQ ID NO: 598576 - DNA, 99 bp, Homo sapiens
gcgcaaagcttgcgaggtggcgttagatccctgggtatcagtatgtgtcacctgaaggcaattgtatagaacatgttcagcctacttctgcctttattc

SEQ ID NO: 598577 - DNA, 75 bp, Homo sapiens
acagcactatagtgcaggtgttggaagtgaaaggtgtcattccacacatccacaaatctctgattgggaagaaag

SEQ ID NO: 598578 - DNA, 75 bp, Homo sapiens
cggagatgcctctttttgccaccaatcccttcgatcaggatgttggtttgtttgaagagactgtaccagagggcc

SEQ ID NO: 598579 - DNA, 100 bp, Homo sapiens
cttagcgaagcaagcacatgtggatgtgaaatttcagttgccaatatgatctgaaaacccagtggatggctgaagaatgtgaaagatgttgcagaagtgt

SEQ ID NO: 598580 - DNA, 96 bp, Homo sapiens
agactcgacaacatgtcacccgcgctccaagacctgtcgcaacccggtcctcagaatggttggaatgaccctccagctttgaacagagtacccaaa

SEQ ID NO: 598581 - DNA, 75 bp, Homo sapiens
caagaaagaaaattagagtgaatgtagttgcaccagccataaggatgagtttaccattattcctgtactggttgg

SEQ ID NO: 598582 - DNA, 50 bp, Homo sapiens
agcctatattcagtagctcgcagtataagccatgtagaactgaatgttat

SEQ ID NO: 598583 - DNA, 101 bp, Homo sapiens
agggaaccctggtcaccgtctcctcagatagcctgggctggaagctcttctacgtcacaggctgcctgtttgtggctgtgcagaacttggaggactgggag

SEQ ID NO: 598584 - DNA, 123 bp, Homo sapiens
tagctttgtaggagcatggcttggagcacttcctattccactggattgggaaagaccatggcaggtctgcgagctctgcaagggagcggcccctcctgacagccccgtggtctactcggacag

SEQ ID NO: 598585 - DNA, 75 bp, Homo sapiens
ctcctcggcccctggctcctgctcctggactcaaaagcctcgaaagtttgactgtgaacttccagatatttcatt

SEQ ID NO: 598586 - DNA, 100 bp, Homo sapiens
cctgaacttccacaactgcaacaattcagtgccaggaaaggagcatccattcgacatcacggtggcccgctgcaagcagctgatctgtgaccccagctac

SEQ ID NO: 598587 - DNA, 100 bp, Homo sapiens
aaaactgcagttcatgtgctaaacttttggtgcttaaatccagctgtggccgccatggcatcagatgaaggcaaactttttgttggagggctgagttttg

SEQ ID NO: 598588 - DNA, 75 bp, Homo sapiens
ctactccgagacgcccctggaagacttcgtcccccagaaggttgtcagactccaaccgggaagactttgacccag

SEQ ID NO: 598589 - DNA, 97 bp, Homo sapiens
aaacttccagaacatctgggagaatatttaatggaaaatcgcttggttaaaacctgacacttttaacagggttttggccaaattgggcgagggcaca

SEQ ID NO: 598590 - DNA, 50 bp, Homo sapiens
ccgtgaacggacagtcccccccaggcaacatcagatgctgacctgaaaga

SEQ ID NO: 598591 - DNA, 100 bp, Homo sapiens
gagccgacgctggggcatttgcgctcgcacctgaggcagtccctgctgtgcacctgggggtacagaaaagagtagttgaacagctacggaagaacctgat

SEQ ID NO: 598592 - DNA, 83 bp, Homo sapiens
tcttgtgtggggagtttcatcctagcggccttgtcttaaaagaagaagcatctgattaccttgaattggatacaattaaaaat

SEQ ID NO: 598593 - DNA, 100 bp, Homo sapiens
tcggcccttgccttggcagagctgaggtactccaaagattcaggtttactcacgtcatccagcagagaatggaaagtcaaatttcctgaattgctatgtg

SEQ ID NO: 598594 - DNA, 99 bp, Homo sapiens
tgggtttctagaaggaaaatcacagaggtaaagcatcatttcatcacatcctgtcaagggcgtcctgcctctgcggctctgccccctgcatcctgtgca

SEQ ID NO: 598595 - DNA, 100 bp, Homo sapiens
ccatgccgtcgcctcagtccagctctgtcatcactcaggcaccttccaccaaccgccagatcggaggaggcctaccagaaactggccagcgagaccctgg

SEQ ID NO: 598596 - DNA, 75 bp, Homo sapiens
gccaagtcggccacctggacggtacggaatggccacatcaaaagaatcactgataatgacatccagtccctggtg

SEQ ID NO: 598597 - DNA, 76 bp, Homo sapiens
gacctttccactgaggatgacgggacagtggccttcgcgctaacgaagtaaccccaagaaaggcatcagggttctg

SEQ ID NO: 598598 - DNA, 91 bp, Homo sapiens
cggagatcctgatgaagttcgagcactaatatttaagaaagaagatgttaactttcaggtcatcatcagatttgaaatatttaaagtggat

SEQ ID NO: 598599 - DNA, 100 bp, Homo sapiens
gttgcggcagctgcctgagcgatacatgatgaacagcgtcctggaaaacttcaccatcctccaggtaatctatgtcttggtactgctcccctgtttcatc

SEQ ID NO: 598600 - DNA, 102 bp, Homo sapiens
ggagcatttcagataaatacctttgatctaagggttcagcctttcaatgtgacacaaggaaagtattctacagtattgactcggagacaaaaagaggccaag

SEQ ID NO: 598601 - DNA, 75 bp, Homo sapiens
cggagggggagactgtgccgtggagggcctcgccatgtcctgctgcccgattcctctctttggtgctgacactat

SEQ ID NO: 598602 - DNA, 100 bp, Homo sapiens
aggcctgtgacgaaggtgctaccatcgtgagagtaaggaggatacgaagcgttttcggcttcctgcccggagctgtgcagcaaacagtcgacccccatgg

SEQ ID NO: 598603 - DNA, 100 bp, Homo sapiens
ttcggctttgacttcatggtcgatgaggagctgaaggtgtggctcattgaggtcaacggtgcccctgcatgtgctcacagcagccgctcttctaaaacat

SEQ ID NO: 598604 - DNA, 82 bp, Homo sapiens
gcagcacttccactctgagagcaaattaaatgtgagggagtctgacgtaagagtttgtgatgagtcatcatgtaaatatgga

SEQ ID NO: 598605 - DNA, 83 bp, Homo sapiens
ggacgttcccttcacggagaaagattttgattcgtgtttagtaggagcacagtagctgtttggggaacgaccttaagtgaata

SEQ ID NO: 598606 - DNA, 98 bp, Homo sapiens
ggccctggtcttcctgtttacgttcttgtcagaactcgtgccttttgagtctccccggtacctgcaggctctgtggatagcaactggatcgtgggtgc

SEQ ID NO: 598607 - DNA, 75 bp, Homo sapiens
tttcaagaacagtaaagttggaacacagcagagggtgtgtaataaaatacagctgtgattgggttattatacccc

SEQ ID NO: 598608 - DNA, 87 bp, Homo sapiens
ggagcctgagctcgaggcccggctggcgcacctgggcgtgcagggccctcatctttgtgtcccatggagccggagagcacagtggcc

SEQ ID NO: 598609 - DNA, 75 bp, Homo sapiens
attagtagctaatgtgattacagcaggagattatgaccttaacatcagtgatttggagcaagaggtggtggtggc

SEQ ID NO: 598610 - DNA, 100 bp, Homo sapiens
tctggaagacggtcctttccctgctgcccccagagttgaagtattgataacaccaaggaactctatcacaatttgaaaagataagcaaaagtttgatttc

SEQ ID NO: 598611 - DNA, 100 bp, Homo sapiens
aagagaccctcttcatatatacaacattcaggaaaatggcaaatgcacgacagcggcctcctgaacatcaccaaggtatccttctcagaccgaggtaaat

SEQ ID NO: 598612 - DNA, 100 bp, Homo sapiens
agctgtgcagccgcgaggaggcgcgggaggtgttcgagaacgaccccgagacgggctacagaactggctacccttatcgataccctgctctgagagagaa

SEQ ID NO: 598613 - DNA, 97 bp, Homo sapiens
gtgaactttgttcacaccaacttgcgcaaaaacaacagacagccctatgctgtcagtgaattagcaggctcagcccaaagctgatgaggacagacca

SEQ ID NO: 598614 - DNA, 101 bp, Homo sapiens
tggatgacgagcggaggaacgccgagcagtacaaggaccagggcaaatgacacagctttgtgaactgatcaacaagagtggggaactccttgcgaagaact

SEQ ID NO: 598615 - DNA, 100 bp, Homo sapiens
cggcgctggactggagcagaaccccaggactgcgcccccgggagcgggcgcccagaggtgctccatacttgcttgcagtgcctacgtggctctggctttg

SEQ ID NO: 598616 - DNA, 90 bp, Homo sapiens
cgtgaccgagagcgtgaccgagagcgcgaatatcgtcatcgttagaagccgtttccctggggagatggtaaccatactctattccataac

SEQ ID NO: 598617 - DNA, 94 bp, Homo sapiens
aagtttgcagatcgggagcgcaaggtcgccctcaaggccatgatcaaaacgccccagtgcagagagcccacggccatccagtgcctacaatggg

SEQ ID NO: 598618 - DNA, 75 bp, Homo sapiens
gaagatctggaataatatgccgaaggatcatcctttttttgctccactcaagcctgttagaatcaccatggaata

SEQ ID NO: 598619 - DNA, 75 bp, Homo sapiens
gaggggagagcggccgccgccgctgccgcttccaccacagacaaacaaaggtgatgcacttgccaaccgagtcca

SEQ ID NO: 598620 - DNA, 83 bp, Homo sapiens
gtgaagctcaagttgctactcgggacgctgcacctcccgcgccgcacggtggacgagacctgaccctgcagctgctggctgtg

SEQ ID NO: 598621 - DNA, 50 bp, Homo sapiens
gcgctgctcccgggggcgacggctgacatagcccagagatacaggataag

SEQ ID NO: 598622 - DNA, 74 bp, Homo sapiens
cggcgcttcaccgagatctacgagttccattgtctgcactgcttggggaggaagatgaagaggcactgcattat

SEQ ID NO: 598623 - DNA, 96 bp, Homo sapiens
gggggcagtcagagcggagccaagatgcgaatgggaatctgtctatgatcttctcccaaaggagttacagttacctccatctagagaaacatctgt

SEQ ID NO: 598624 - DNA, 75 bp, Homo sapiens
gggactgcgcagcgccccgcgtgccgacccgagagggactcacttatgggaattcatccgcgacatcctcttgaa

SEQ ID NO: 598625 - DNA, 74 bp, Homo sapiens
accgacaagatcaccacggacgagatgatcaaacgcctgaagtgatgttcctccatcttacgttcaaactaaat

SEQ ID NO: 598626 - DNA, 75 bp, Homo sapiens
caaagaaggagaaggatatgaggaaatgcgattcttctcagaaatggcacctcgaaaggggaaggaaaagaagga

SEQ ID NO: 598627 - DNA, 101 bp, Homo sapiens
aaaagaaatgggctccatcttcctgaacaagtacagaatgccagcgagaccgaggagaatggctccgacagcttcatgcattccatggacccacagctgga

SEQ ID NO: 598628 - DNA, 75 bp, Homo sapiens
aaaaagtgaatttcgtaaccagaagccgaagccggagaaccaaggaagaagaagcagacgttgaaggcattcagt

SEQ ID NO: 598629 - DNA, 100 bp, Homo sapiens
ccgggagctgggcggccatttaccaggttactgtgcagtatatgcaggatcgaggtgctgtgcttcccatcagagtccacacaattgttatatctgttca

SEQ ID NO: 598630 - DNA, 75 bp, Homo sapiens
aaaaacaagactggggctgctcccatcattgatgtggtgcgatcggatttttactctgttccacgaactattcta

SEQ ID NO: 598631 - DNA, 51 bp, Homo sapiens
tggaggctgtgcgcatgcagcacctgcatctggctgccagctcaggcacag

SEQ ID NO: 598632 - DNA, 82 bp, Homo sapiens
caacaaggagctgggctgcatcaactcgggctctgtacacatatgaagatggctccgatgacctcaagcttgcagcatcagg

SEQ ID NO: 598633 - DNA, 87 bp, Homo sapiens
cccgaccgcgtgctggagctcttcgacccacccaagatcctctgccttgtcaatgttagtcacaatggtgtgagtgaatcagaactg

SEQ ID NO: 598634 - DNA, 100 bp, Homo sapiens
ggcttggcacctggcagcaatgggcaagacaaagcttagaccatgctcagcctccaagcagccttgtcatcgacaaagaatctgaagtttacaagatgct

SEQ ID NO: 598635 - DNA, 98 bp, Homo sapiens
gccagtattatcaggcatggagatgctactgatgtcaggaacttcatggaggaacacggagtgacccaaaccgaacatatggctaccatagaagcaca

SEQ ID NO: 598636 - DNA, 100 bp, Homo sapiens
tccagtggaatgcaccacagccatctcacatttccaagtacattctcaggtggagacctctcttagaacaagctctggtgattgaggaacagctgcgccg

SEQ ID NO: 598637 - DNA, 101 bp, Homo sapiens
cttccagcggtggccacacgtcacacagtggggacaacagcagtgagcaaggtgggcagtgtcaaaccgggaaatgcttatagctcaaaacagctccttgg

SEQ ID NO: 598638 - DNA, 100 bp, Homo sapiens
tggaggacgtgaagctggagttcccttcccttccacagtgcaaggaagacgccgagacaaatgtagtaggacattctttaggatgtacttggcattcctt

SEQ ID NO: 598639 - DNA, 90 bp, Homo sapiens
ctttaatgacaacagtgttaaatatcagcaaagaaaacatgaccctcacagaaaatgtgctgttacactaccaaactgtcagtgaacccg

SEQ ID NO: 598640 - DNA, 75 bp, Homo sapiens
aaaaaagtaatcctcttggaaagctggaaacatagtccgagagcacagtcagacgaactcgaaaaaatagaaaag

SEQ ID NO: 598641 - DNA, 94 bp, Homo sapiens
ggaacaaaattgtatctgtttttctcagaagagaattccacaagggatgtgtttggccaaatgggagagtggttacaacacacgagctacaaac

SEQ ID NO: 598642 - DNA, 83 bp, Homo sapiens
gcggagccgcgcagccctcggagcacgttttgtaccaatggctagaagcagatcgtcatggcaagagccaaggtgctgcaaat

SEQ ID NO: 598643 - DNA, 100 bp, Homo sapiens
acaagtcggcgccccagagcggacgaggtatcattgcccagtgcctaagatcttttatgttcagctcactgtaggaaataatgaattttttggggaagga

SEQ ID NO: 598644 - DNA, 100 bp, Homo sapiens
caggaaccagccctggcagaagtgttccaccagttgcacgatcctcaccgcaacattccttatccaatcccttaccggatgcagaaggctatcaacaggc

SEQ ID NO: 598645 - DNA, 82 bp, Homo sapiens
catgccgctcctaagcctgcacagccgcggcggcagcagcagtgagagctggtaggtgagtgctgtcctcggctcactttcc

SEQ ID NO: 598646 - DNA, 82 bp, Homo sapiens
gaggagctcaaggggatgtcgctgctggttcgggcagagtccgacgacaatgcagatcttcgtgaagactctgactggtaag

SEQ ID NO: 598647 - DNA, 100 bp, Homo sapiens
ggtcctgctgagtgtgcctgggcctccagtcttgtccctggaggcctctgaggaagtggagcttggaccagtcttctctccaggttcccaggaacccaag

SEQ ID NO: 598648 - DNA, 100 bp, Homo sapiens
cttccacaagagatcctgctatgtcttcggttacgcttacaccacctacgtctcctgaggaagtccaaacagaagccccagggccatcaaaagttaagac

SEQ ID NO: 598649 - DNA, 88 bp, Homo sapiens
attacctgtgcctgtccctcctattcctgttcctgcacctataacagtgccacctccacaggccggacagtggctgtggattgggccg

SEQ ID NO: 598650 - DNA, 50 bp, Homo sapiens
gtcagcagagcctggggacgccatggatgatcagaattccagtttttcaa

SEQ ID NO: 598651 - DNA, 71 bp, Homo sapiens
agcaaggtcggcagagcaaggggcttacgcagaaggacctggccacggacgcaggcctgagcagcggggag

SEQ ID NO: 598652 - DNA, 75 bp, Homo sapiens
ctcggagaggtgctcggattctcgtagctgtgccggggccaaatccttgtagctgtcttcttgccccggtcagtg

SEQ ID NO: 598653 - DNA, 75 bp, Homo sapiens
gagggtgtacaaatacccctttgaattaattatggctagctcgctgcccaaatcattcaagaggaagatctccgt

SEQ ID NO: 598654 - DNA, 100 bp, Homo sapiens
aaaaggcagactttttgatattcagagccttggaagtcaacactgtcattctccttcctgatgaccgaggcactactggtgttttctcctgagagttcgc

SEQ ID NO: 598655 - DNA, 100 bp, Homo sapiens
ggggctgtttggaaagacccaggagaagccgcccaaagaactggcagagacatttgtttgggtgaacaatgcatctgcacattcccagagtgttgccaag

SEQ ID NO: 598656 - DNA, 74 bp, Homo sapiens
ggaacaaaggcgacccaagacacccagagagggacagggagtgcatccgccccaacccttttccccctcgtctc

SEQ ID NO: 598657 - DNA, 100 bp, Homo sapiens
cagcccgtttgtgaatcagcgattgcttccaagtatgatcatcaggcagaagaagatcttcgcaattggatagaagaggtgacaggcatgagcattggcc

SEQ ID NO: 598658 - DNA, 138 bp, Homo sapiens
atagtgagtttggagtcaagagatttttattttcccttcacaagctgaacaggagcctttggagagaacgctctggaccgaacacgacttaaaagtggcttcagaggaaaagcaagaaacgcttgaaagaagtgaaaa

SEQ ID NO: 598659 - DNA, 74 bp, Homo sapiens
cggctcagcagagaggaaaaatggtgctttgtaacagagccagactggtttcctatctcccaggattttgctct

SEQ ID NO: 598660 - DNA, 75 bp, Homo sapiens
tgcgccgccggggccgctgcaaggggaggagagaggccgcctcagaacatccagtcatggataaaaatgagctgg

SEQ ID NO: 598661 - DNA, 100 bp, Homo sapiens
ccggggtggtagcagagctcggaatcttcctcttcctccaccaccaccacctagaggggggatggagcgctacgtctccatgcccagggaagaggctgcg

SEQ ID NO: 598662 - DNA, 97 bp, Homo sapiens
gaaatggctgcaggttcagacaaaaacccgggcagctgacttgttggtgaatcccctggatccgcggaatgcagataaaattagagtaaaaattgct

SEQ ID NO: 598663 - DNA, 101 bp, Homo sapiens
agcccaccgactttgaggatctggaggacggagaggacctgttcaccagcactgtctccaccctagagatggactagaggcttttaccagatttcttaaaa

SEQ ID NO: 598664 - DNA, 82 bp, Homo sapiens
tgctcgtcgagttcttcgccccctgaactgtaagagtaaatgggtccagtaattggaatgactccagataagagagctgaaa

SEQ ID NO: 598665 - DNA, 100 bp, Homo sapiens
gagctctggaaaaaccccacagaaaaagcttgtggtgaaggggggcaaaaaaaagaagcaagttctgaagttcactcttgattgcacccaccctgtagaa

SEQ ID NO: 598666 - DNA, 50 bp, Homo sapiens
gggggcgctgcctccccttgggaaaagctccagtaataaaccgattcaca

SEQ ID NO: 598667 - DNA, 75 bp, Homo sapiens
gccaaaagatgaagacattctccaagtggagattcatatgggacattgtgtaaatctgactgatggggctgtcga

SEQ ID NO: 598668 - DNA, 75 bp, Homo sapiens
gaaattattcacatgcttgaatactgtggaaagaaagctgtggtgattcgtcacttgtataatgaagataatgtt

SEQ ID NO: 598669 - DNA, 100 bp, Homo sapiens
ctccggtgtggtgaagagcgtccaccggcggctccgcaagaagtaccgagaaggcgtggtgtccctcgtggccgttcacccctccaccgtcaacccgctc

SEQ ID NO: 598670 - DNA, 100 bp, Homo sapiens
cttgaaccccggaggtggaggctacagcttccctgattgtgactgaggagctgcacctgatcacctttgagaccgaggtgtatcaccaaggcctcaagat

SEQ ID NO: 598671 - DNA, 75 bp, Homo sapiens
taaaaataacaagaatgggaggagaaggatgctctacccatggtaccccaggaccagaaggcaaccatatttcag

SEQ ID NO: 598672 - DNA, 112 bp, Homo sapiens
cctcaccaagggtgagctgggctgcttcctgagccactacaacatctggaaggagcaggaagaaccggacccggcgaacctggaagtggaccatgatttcttccaggacaag

SEQ ID NO: 598673 - DNA, 50 bp, Homo sapiens
ctcggagctaatccacaatctccgcattcatatcaggtgttagtgcttcc

SEQ ID NO: 598674 - DNA, 101 bp, Homo sapiens
gaagaacttgtacagagatgtgatgttggagaactatagcaatctggttttcttggattaaagagtctattgttggggaaatcagacgggaaattgtaagt

SEQ ID NO: 598675 - DNA, 83 bp, Homo sapiens
ggccaagcagccaaccatgctcaacttcggtgcctctctccagcagactgcgcgggctgacgcacgaggcacacaggaaggag

SEQ ID NO: 598676 - DNA, 74 bp, Homo sapiens
ccccaagttcaaggaactggtcaagacaatgcagatcttcgtgaagactctgactggtaagaccatcaccctcg

SEQ ID NO: 598677 - DNA, 82 bp, Homo sapiens
tgaagtacatgaactcagggccggttgtggccatgaaagtgctaggtggcgacagtgctatgagggccttccagaacacggc

SEQ ID NO: 598678 - DNA, 50 bp, Homo sapiens
gacaggaggcagtagccaaacacccaggtggaaccgtcccaaaatgtccc

SEQ ID NO: 598679 - DNA, 74 bp, Homo sapiens
aactcagcagcggaggctggacgcttgcatggcgcttgagacctcaagccagtttgaagcaggatgtatgtcag

SEQ ID NO: 598680 - DNA, 75 bp, Homo sapiens
cccttgcagtgttgctgcttatgtgccaagaggtagtgatgaagaccggaacatgaacattttgcagtactgccc

SEQ ID NO: 598681 - DNA, 90 bp, Homo sapiens
ccgactgcaactgctggattgctgcaaggctgagggacgagaacgaggcttgcagatgggtcaagggttgtggagagtggtcagaaacca

SEQ ID NO: 598682 - DNA, 100 bp, Homo sapiens
ctggactgtgccttggacctaatgaggcgcctgcctccccagcaaatcgagaaaaacctcagcgacctgatcgacctgagttatgcccagccaagtcttc

SEQ ID NO: 598683 - DNA, 74 bp, Homo sapiens
ttcaaactgccctgatgggcagtcaacagctaaaaccttcctcaccgtgtactaacctcaagaaggcatgaagc

SEQ ID NO: 598684 - DNA, 117 bp, Homo sapiens
aagcctggtggtggaagaaatccaggaacaactgtgtcagcagctagcccttttcctcaaggtatgaccgcttgcttcggatcagagcactcagatgggaatatggtagcgtcttgc

SEQ ID NO: 598685 - DNA, 75 bp, Homo sapiens
tttctccccgacaatgaagagggcctgaaaatcaggaatatggactttctgtcagattttgagatgatgttgcag

SEQ ID NO: 598686 - DNA, 75 bp, Homo sapiens
gcgttctctttccctctcccaacatggcggcctcagttgccactctaaattcagaagaggagagcgaccctccaa

SEQ ID NO: 598687 - DNA, 100 bp, Homo sapiens
acttcttaacccctagaccggtttttagtccattgactatgcagcctaatgagaggagtctgcaatgccgagtggaggaaggaggaaccggagtgtgagc

SEQ ID NO: 598688 - DNA, 100 bp, Homo sapiens
gaagggagcgaaggtttttgctgcgccaacgcagtgaccgaaggctccgctcacgcccggcaacattgaaggaactcatctcacagacgatgatctgctg

SEQ ID NO: 598689 - DNA, 96 bp, Homo sapiens
gaggccgccgccgctacgcgcccgggcccgcggcgaaggcgctgccgcgaagacgcctggcgctgcagtcccagggccaccatctgtgcaagtagc

SEQ ID NO: 598690 - DNA, 100 bp, Homo sapiens
agccaaggattctggaaaactggcatccgttctgatgtctgtcaggttcaaaccttgtactactcagctgatcacaagctgcttgatgggaacctactag

SEQ ID NO: 598691 - DNA, 100 bp, Homo sapiens
ccgagagccgcggctccgtgtttctggaaagtgacagcaggaaacatgccctgaactgtcacagaatgaaaccagcgctcttcagcgtcctgtgtgagat

SEQ ID NO: 598692 - DNA, 100 bp, Homo sapiens
gagccacaccccctgcagtttctcagcaaacggggattcagcgtccgatcctttggaacagggactcacgtgaagcttccaggaccagctcccgacaagc

SEQ ID NO: 598693 - DNA, 95 bp, Homo sapiens
taaatgcagcatctgcgatgtgaggaaaggcacctccaccagtttgaaggatgacctctaggaagaaagtgttgctgaaggttatcatcctggga

SEQ ID NO: 598694 - DNA, 80 bp, Homo sapiens
ctgcaggcctcctacacctacctctctctggcaccacactgtaactcgaggcatcaccaaaggcgtgaaggaggactttc

SEQ ID NO: 598695 - DNA, 96 bp, Homo sapiens
ttcacaagctaatggatggttccttgcaaagggcacgtatagcattggtaaagaacgatcgtccagtggagaattgtgacctggatcagcagagca

SEQ ID NO: 598696 - DNA, 100 bp, Homo sapiens
cacacctcaaactaacacagtccctatcaaacctttgatcagtactcctcctgtttcatcacagccaaagttagggcctagtcaaaattttgaagctgag

SEQ ID NO: 598697 - DNA, 50 bp, Homo sapiens
gggtgacccccgatgctgtgcattcaggaaaatatgttgtgttcttcttt

SEQ ID NO: 598698 - DNA, 75 bp, Homo sapiens
gctgaagcctttaaatgcagcatctgcgatgtgaggaaaggcacctccaccaggatgaccagtgtcccagtgaag

SEQ ID NO: 598699 - DNA, 90 bp, Homo sapiens
acatagagctgacattaactgtcagggaggaggtacaggagaactgtgtgcggtggcgaaagaggttcaccttcgtgtgtaagatgagtg

SEQ ID NO: 598700 - DNA, 100 bp, Homo sapiens
tgtttcagtcggctgggattcggatgataaacaacagaggagaaaagcacggaacaattactgccagggggccgttgacatttagggatgtggtcataga

SEQ ID NO: 598701 - DNA, 87 bp, Homo sapiens
tcgatgtgcgagactttggaaagactgtattggtgatcacgtaccgagaacccccaaatcctgagtatcaggaattccagaatcgtc

SEQ ID NO: 598702 - DNA, 75 bp, Homo sapiens
ctctgcgacctggggccctgggtgaagtgctccgccgcccttgcctccaggtcccgcggcagtgctggtggccat

SEQ ID NO: 598703 - DNA, 100 bp, Homo sapiens
caacaccctgagtgcggatttctgctatgatgacaggcttcatagagcccagtgtgcaattaaacagactcaggtaactgttcagaaaattggaaaggaa

SEQ ID NO: 598704 - DNA, 101 bp, Homo sapiens
cggcggggcatgaggagggggccaccaggttggccaggaagccctcccgggaacacccagcagccgctgcctggcctgccactggcttccccgccaggggt

SEQ ID NO: 598705 - DNA, 95 bp, Homo sapiens
gccgccagtgtttccgtcagtacgcgaaggatatcggtttcattaagcaggttcaggagaagtggcacctggtggaggacctgtcgcgactgctg

SEQ ID NO: 598706 - DNA, 51 bp, Homo sapiens
agagagtactacagtgaagcagatgccagtgacagaaatgttggtaaatgt

SEQ ID NO: 598707 - DNA, 83 bp, Homo sapiens
ctcaccgccgccgccgccaccactgccaccacggtcgcctgccacaggacaaatcccaatctgctgaaatatgggaaaaattg

SEQ ID NO: 598708 - DNA, 75 bp, Homo sapiens
caccttcgcaagaagcaccagttcaagtggccctcagggcatccccgttttcgtctacgccttctccgtcggcag

SEQ ID NO: 598709 - DNA, 83 bp, Homo sapiens
agatattgaagagttctgcaatcatctattccagaggggagcttcaccacttcattgacggctttaatgaagagaaaagcaac

SEQ ID NO: 598710 - DNA, 100 bp, Homo sapiens
acgatctgcacttcgcattttggcattgacatttaattttagggtcctttatatagaagggagagtaggatctcatggtccggaatgacaccccctgtgg

SEQ ID NO: 598711 - DNA, 90 bp, Homo sapiens
ccgagtcctgtgtctgagccagagcgaggggcgtgttgcactgggggccacagtgctgatctcagcagctccattttttgtcctcttcct

SEQ ID NO: 598712 - DNA, 50 bp, Homo sapiens
agttatttgcctcagtaaaagagtcctcatgctgataccgccagtggatg

SEQ ID NO: 598713 - DNA, 75 bp, Homo sapiens
tagcttggttggtggtaccctaaaattagggcatgattaagaggcgaaaatgtggcaacatcaaggcagccaacg

SEQ ID NO: 598714 - DNA, 82 bp, Homo sapiens
gtgtactcgggaatccggcacaaggcactgggctacgtgctggacagcgccatcatgaccgggtcctataacaacttcttca

SEQ ID NO: 598715 - DNA, 100 bp, Homo sapiens
ttggctgtctcaacccccagccagggtcaccatcaaaatggaatgtaaccctagccaggtgaatggctcaaggtagtaagcattaataatgtctttcatc

SEQ ID NO: 598716 - DNA, 75 bp, Homo sapiens
ctccacttccacattccagcccaagggaaagtccaagccgtctttaaatcctgagtatgagagagaaccaaatca

SEQ ID NO: 598717 - DNA, 100 bp, Homo sapiens
aagcagtgtcgacttaaagaccctctgcattagtcctcgggagcactgctgggttctctatgtggatgtgctggagctcccggacgtgcctctgtactac

SEQ ID NO: 598718 - DNA, 82 bp, Homo sapiens
gccctgatccaaccactccagactttctcaactccttgctgtcctgaattgcggcgagcagtaagaagcagcgtgtggaaaa

SEQ ID NO: 598719 - DNA, 75 bp, Homo sapiens
ggaaactgttcagctcccacaggtttcagtggttggaataaaaacagggttgaatgagttccagaaagcagggtt

SEQ ID NO: 598720 - DNA, 83 bp, Homo sapiens
taaaatacccgcaacagccccttcgtcccaaacctgcctagagctggaacgttacctccagagcgagccctgctatgtttcag

SEQ ID NO: 598721 - DNA, 50 bp, Homo sapiens
aggcctgcattgaggccaagcacatgacccagcagatggctgggatgaac

SEQ ID NO: 598722 - DNA, 78 bp, Homo sapiens
atccctggaggagacctggcagcaggttaaacccatccagagtaatggctgcggccttacccaggaccctgggggagt

SEQ ID NO: 598723 - DNA, 150 bp, Homo sapiens
ttgtctcttatttagttctggggagcgcctcgtcgacatgagtgatgtggaggaaaacaacttcgagggcagaagaagatggcgaattagaagatggtgaaatagacgatgcaggatttgaagaaatacaagaaaaagaagcaaaagaga

SEQ ID NO: 598724 - DNA, 99 bp, Homo sapiens
ggaacatggcaagggcgagtgaagcagtgtcacgcattttagaagaatgggtactgctagttgaacagctcttccgcaaggagttccaaccatttttga

SEQ ID NO: 598725 - DNA, 100 bp, Homo sapiens
ataaaaaggaaaaacatcttgatctggagaaaaactggatgttggtagaaaaagcaagagtttgttatatagcaagatatactgccattggagaactggg

SEQ ID NO: 598726 - DNA, 83 bp, Homo sapiens
gtgcagtcagccagcccggacatcagggtgaccaggatggaggaggcggctatgagaggttttcctccgagtacccagaattc

SEQ ID NO: 598727 - DNA, 74 bp, Homo sapiens
gcctcccaccaaaaccaagcactgacatgccactcatggatagggatgaggaagaaatgaccaaacgagatgac

SEQ ID NO: 598728 - DNA, 82 bp, Homo sapiens
gccatcattggacccaatggctctgcagcccctgtcaaagggaacaggaagcagtccacggagggtgacgccctagacccac

SEQ ID NO: 598729 - DNA, 97 bp, Homo sapiens
ttggagaaaacgggatacctttaattcctccattgtcacagcagaacatcggatttcggagttctaaggacatatggaattggctatggataattca

SEQ ID NO: 598730 - DNA, 98 bp, Homo sapiens
gtctacacctggaggagaggaagctattgaacgtttaaaggttgtacatcctggagacctgaagaattctgttgaagtcgcactgaacaagttgctgg

SEQ ID NO: 598731 - DNA, 73 bp, Homo sapiens
ggacctcctggtgcgcatcctgctgctggctgcccttgtctcctttgtggagttctacttcctttcccagtac

SEQ ID NO: 598732 - DNA, 90 bp, Homo sapiens
cgacgaggacgcgttgctgcggcgtctgcgaggcccgagggaccatggccaacctggagcgcaccttcatcgccatcaagccggacggcg

SEQ ID NO: 598733 - DNA, 76 bp, Homo sapiens
ggagccaagcgtcctgcccggccagaacaccttctgcagtggggaccatgtgtcctggcacagccctttggataac

SEQ ID NO: 598734 - DNA, 98 bp, Homo sapiens
tctttctttttccctgtggctcagcccgttcgctggactgcaaaccgagctcccgtctgccttgcagctctcaagctctcgcctttcctatcagcctg

SEQ ID NO: 598735 - DNA, 83 bp, Homo sapiens
cgtgcacggcgggactggagcaagtcgctcacctgaaatgattatctccagaagaagaagagaaaaggagaatccgaagggaa

SEQ ID NO: 598736 - DNA, 100 bp, Homo sapiens
ttcttcgttatggacagcatccaaacattatcactctaaaggattgcgagtctggatccgagggcgatgggacagtgcaccgcaggaagaagaggaggac

SEQ ID NO: 598737 - DNA, 75 bp, Homo sapiens
cagcctcggcctccacacctggcagagccagagcccagaggtggagcagttagggagggttgtggaactggacag

SEQ ID NO: 598738 - DNA, 100 bp, Homo sapiens
ttttagagtaccaaccattgtgtgctgtgaggtaaagatttgttgttggggatagataaggaaagaagaaaaaggctctggtgagaaacccattgtacct

SEQ ID NO: 598739 - DNA, 82 bp, Homo sapiens
gcggcttcctggcctgggcgctccggtggcggcggagccttatgccagcctggaccatcttggaggcagtgtaggatcatgg

SEQ ID NO: 598740 - DNA, 98 bp, Homo sapiens
ggccatctgattgcttgggccaataatatgaatccagactccaaaatgatgcaaatcaacctgactggatttttgaatggaaaaaatgctcgagaatt

SEQ ID NO: 598741 - DNA, 75 bp, Homo sapiens
ttgtgctcccctcccccatcaaaggaaaggggaaaatgtctcagtcgaaaggaggttgtgcccagacatttcctt

SEQ ID NO: 598742 - DNA, 108 bp, Homo sapiens
gcggcgaaggtgaagagttgtcccagctcggcccgcgggggagccccgggagccgcacgaacatccagtcatggataaaaatgagctggttcagaaggccaaactggc

SEQ ID NO: 598743 - DNA, 101 bp, Homo sapiens
gacggtgccgagaagcagctgcgagcagcgtccgtctccaagagagtatgaagagagtgcgtctgtagggcagggaagatggcggacaagcgcaaactcca

SEQ ID NO: 598744 - DNA, 100 bp, Homo sapiens
agcaaaaagagcatggagctgaggagtacagcagcccccagagctgagggctacagcaacgtgggcttccagaaatatggctacacacacctttctgcag

SEQ ID NO: 598745 - DNA, 75 bp, Homo sapiens
ttcggagagagaggtgctagtggctggacttgacctggaaaggaacccaagacagaccaggatgaggagcattgc

SEQ ID NO: 598746 - DNA, 83 bp, Homo sapiens
attacctccagaaactgtggttccaccattcactgtcttctcaggctgcccaggtcagcccaaggctgccccctcggtcactc

SEQ ID NO: 598747 - DNA, 83 bp, Homo sapiens
acagatgtacctgaaaagtcgtcactctttcaccaagagccagcagccacccccgcccagccaacacctccccaggcccaagg

SEQ ID NO: 598748 - DNA, 50 bp, Homo sapiens
cgcgcggccaagccatgctcggccccagatggagtcccactctgtcgccc

SEQ ID NO: 598749 - DNA, 75 bp, Homo sapiens
gcaggtcctcaagaagacaggcaaggaggtggtgctggaggggtgaagatgtcccccttacggagcagaccgtgt

SEQ ID NO: 598750 - DNA, 100 bp, Homo sapiens
gaaaccttcacatcttggtcaagatatctacgtctgcatgatctcctttgcgcacaatgtagcagcacaagggaagtacattgctatagttagtacaact

SEQ ID NO: 598751 - DNA, 143 bp, Homo sapiens
ctaaaggagagttattccagtttaggaggaagatgcaagcggtttgggaccttgaacaaggcaaatatggttttggttttagctaaagaagatactgaggcagctattcaatcaatattatacaaagaaaattctgtaattaa

SEQ ID NO: 598752 - DNA, 96 bp, Homo sapiens
gaaaaaattgcccttagccgaagagttgaaaaacactggcggttttcaaaaatacctggcaagaaatctggaaattctataattttgttgaaatat

SEQ ID NO: 598753 - DNA, 83 bp, Homo sapiens
ctcggcgagccctctgcagcggagccccctgcccatttggttttggaagtccattggaatattaagcccaggagttgctttgg

SEQ ID NO: 598754 - DNA, 100 bp, Homo sapiens
tgagaaatggatggaacgaatacacctcaatgtctctgactcagattgatggacaacttttcttaattaagcaccttttgatacttcgtgaacaaattgc

SEQ ID NO: 598755 - DNA, 82 bp, Homo sapiens
agagtcgctggagcgggcggagctgtgcgagagcctcctcacttgggaatttaaactttgggataatgagctgcagtatgtg

SEQ ID NO: 598756 - DNA, 76 bp, Homo sapiens
ctgatagtctccagcgggcctggactgtgggctggtgtgtggaactgaacctagaagtcggaatccggaagaagat

SEQ ID NO: 598757 - DNA, 100 bp, Homo sapiens
gggaacatgtacacctcatccctgtacgggtgcctggcctcgcttctgtcccatgcacttgttgagctcgtgaaacacaagcccaaggcaacaaaagagc

SEQ ID NO: 598758 - DNA, 90 bp, Homo sapiens
gatgtcgggacaccccggaagctgggaaatgcttcttccagaccagctggtcttgcttctggagcatctcttggagcagaagactctgag

SEQ ID NO: 598759 - DNA, 99 bp, Homo sapiens
tgactcttgaaaagaaatgagatcgtgtttcatttcaggaagatatatgcgtcagctgatccaccttgagatcaagccggccatccggaaccagatcat

SEQ ID NO: 598760 - DNA, 90 bp, Homo sapiens
tgttcagaaaactgaaacccgattagctcgtgtcaatgagcagagaatgaagattgggcagaactgacagcttcttggtgagaaatagga

SEQ ID NO: 598761 - DNA, 51 bp, Homo sapiens
cagtggtcgcttcttctccttgagcccatggatttcagaaaattatctaca

SEQ ID NO: 598762 - DNA, 75 bp, Homo sapiens
cggccacaggggcggcgacggcgcagtgcgaagcgaaacaggtaagaatgattgatgttggctgatattggagtg

SEQ ID NO: 598763 - DNA, 104 bp, Homo sapiens
gcagacatctacaaccttcgatctcctgacgaaatgaagaatccccacctgagggccaaactagcagaggtgttggaagcagtgatgccccacctggatcagac

SEQ ID NO: 598764 - DNA, 75 bp, Homo sapiens
ttaggataatggcgacagctgaggggatactcatatttatgatgcaaggcgattgaattccaggagaagtcagcc

SEQ ID NO: 598765 - DNA, 51 bp, Homo sapiens
ctgattgtctgtgtgcacggtttagatgatggccctgctgtggcaccagtg

SEQ ID NO: 598766 - DNA, 100 bp, Homo sapiens
tagataaccctatgtttgatacagaggaaggaattgtcttagaaagtcctcattatgctgtgaaaatattaggccgcattgacaggaagattgagttccc

SEQ ID NO: 598767 - DNA, 75 bp, Homo sapiens
ctggaaaggaagtaccaggacttgcacagtttctattccaaggacaatgaaggcagctggttccgctccctcttt

SEQ ID NO: 598768 - DNA, 100 bp, Homo sapiens
gttggccgccggctccgcggcgatggcgctctataacccctaccgccacggctctgacgcccgctctgcggcttcggtgtttgaacaggccacagtccag

SEQ ID NO: 598769 - DNA, 78 bp, Homo sapiens
caaggtgttggagcagctcacagggcagacccctgtgttttccaaaggtaagaatgattgatgttggctgatattgga

SEQ ID NO: 598770 - DNA, 100 bp, Homo sapiens
gcggaagctgcccttcaccgcgggcgccaatggggagcagaaggactcggacacagagtctctggtaagaagagtgaaagcaaagaagccaagaagtctg

SEQ ID NO: 598771 - DNA, 87 bp, Homo sapiens
gccatcaggggccttgataacacagagtttcaagcgtggtaccatgcgacgacgctatgaagatgatggcatttcagatgatgaaat

SEQ ID NO: 598772 - DNA, 82 bp, Homo sapiens
cgattactctttttgcagagctctgaagggaggcttcagcaaccaggagggattgactgagatcttaacaacagcagcaacg

SEQ ID NO: 598773 - DNA, 101 bp, Homo sapiens
ccacgatgtgaagcggggcagagccgggggagcccagcccagccagcctccaggtcacagagatgcggcggaccctgacgcctgccagctccccagtgtcc

SEQ ID NO: 598774 - DNA, 100 bp, Homo sapiens
ttggacttcattgatgtactcctgctgagcaagacagccgctcaggaagcaatcttgcatgcgtctggaaatggcacaaccaaggactactgcatgcttt

SEQ ID NO: 598775 - DNA, 100 bp, Homo sapiens
caggagctccagatcgtgcacgagaccggctacttctcggcgctgccgtctctggaggagtactggcaacagggccacaggagaatggtatgctgctcgg

SEQ ID NO: 598776 - DNA, 82 bp, Homo sapiens
ccaccgcgcactcggagatgcagccgctgttcattagaactaccatatactccccctttggaaagtaagcaacgtagaaatc

SEQ ID NO: 598777 - DNA, 100 bp, Homo sapiens
tggaatacctgggcggtggttcagcactggatcttgaagatttcgatgtcgatcattttgtgtctgactgtaggaagcgggtccagctggaagaactgag

SEQ ID NO: 598778 - DNA, 102 bp, Homo sapiens
cccatctcgagccatccagaccttgcagatggaactgcagcaaatcatgaaagtgtactaatggtcacttgatgtgcgctggctgttttatccacctactag

SEQ ID NO: 598779 - DNA, 100 bp, Homo sapiens
gaccaagcaggacctggagctcccaaaggcgacattgactacagcaccgtgctcctcggcatgctggtgacgcaggacgtgcagctcgggctcttcatgg

SEQ ID NO: 598780 - DNA, 75 bp, Homo sapiens
acaagccaccgtccactctagcatggtgttcaggcgcttcgtggaggttggccgggtggcctatgtctcctttgg

SEQ ID NO: 598781 - DNA, 90 bp, Homo sapiens
ccgactcccctttcttcccaatgatgcttcctacttcctttccgtgcataagaagccgaatggcgttggagaccagggccagccctggcc

SEQ ID NO: 598782 - DNA, 100 bp, Homo sapiens
tgtaggagcatggcttggagcacttcctattccactggattgggaaagaccatggcagctctgagagagaccgaactctgcaggtggaactggaaggggc

SEQ ID NO: 598783 - DNA, 123 bp, Homo sapiens
gtttgcagatttggacctgcgagcgggttctgacctgaaggctctgcgcggacttgtggagacagccgctcaccctctggactgaagccaaggtctaatgtcatcagttatgtcactgtcaat

SEQ ID NO: 598784 - DNA, 100 bp, Homo sapiens
tctctatatccagtcccactaccagctggaactgcagtgctgcatcgactggacccatgtcactgaccccctcatagagcctgtggggcccggatagtca

SEQ ID NO: 598785 - DNA, 100 bp, Homo sapiens
gtgatgggttacgctgagccagcaatgtgcacgcactaactccacaggtgttaaaggcccgatgagagaaagggaaagttaaggatgctggagcagaaca

SEQ ID NO: 598786 - DNA, 75 bp, Homo sapiens
gccaaatggaccaaggtgcacgagctcaaggagcacaacgggcaggtgacagtccagggaccttgacccagcccc

SEQ ID NO: 598787 - DNA, 100 bp, Homo sapiens
gagaaaaggcctaagaattttggcattgatgatgttgaatttgaagtatcatcggaccgacggactgggaaacccattgctgttaaactggtgaagataa

SEQ ID NO: 598788 - DNA, 98 bp, Homo sapiens
tgctcttgaggttcacagatgatacctttgatccagaacttgcagcaacaataggcccgatgagagaaagggaaagttaaggatgctggagcagaaca

SEQ ID NO: 598789 - DNA, 100 bp, Homo sapiens
cacggttatactctgcaaggtggtgttccagtggcaaacagctgtataaactcttgtaaacaggaattgtcttagaagaaagaaggcaagccaccatttt

SEQ ID NO: 598790 - DNA, 100 bp, Homo sapiens
ggtgcggtcagctcgctgcagcttcaacggagacttcgtgtgcggacagtgtgtgtgcagcgagggctgtgtgacaccatcgccacaacaggctcgggtc

SEQ ID NO: 598791 - DNA, 75 bp, Homo sapiens
taaatccttctttgataatatttcttgtgatgacaatagtgattcgcctttgccagtctcatctcgtgtctgctt

SEQ ID NO: 598792 - DNA, 75 bp, Homo sapiens
ctgaaattcagagaggggaagtgatttgcctcagcttgtactcttggacagcttttagcagctacatgcaaagaa

SEQ ID NO: 598793 - DNA, 50 bp, Homo sapiens
gtcatctcgcagaacgccatcaaccagctaatggtgaggttctggagaat

SEQ ID NO: 598794 - DNA, 100 bp, Homo sapiens
gatgtaaatctcccaagtccaaaggtgcctacaccaactaatgttacaattgaatcctataacatgaaccctatcgtatattgggagtaccagatcatgc

SEQ ID NO: 598795 - DNA, 75 bp, Homo sapiens
ttgtttatgtcagtaatttcacctggcccatcaaaattcagttaatgacagttcggactatcacaggaaatatct

SEQ ID NO: 598796 - DNA, 74 bp, Homo sapiens
cttcctggcccgaaaggagagcctactgccactctccgcccctacctgagtgccgtgcgggccacattgcaggc

SEQ ID NO: 598797 - DNA, 106 bp, Homo sapiens
ctgtgctcgcgctactctctctttctggcctggaggctatccagcgagcttactccacgggaacagcctctagataatctgagttgttgaaaatacgaagcctgtt

SEQ ID NO: 598798 - DNA, 80 bp, Homo sapiens
aacaaattgctatgatgaaaccaaaaggccagactgaacacgatgaggtttttcagaagaagtgaagtcaagatgaagaa

SEQ ID NO: 598799 - DNA, 100 bp, Homo sapiens
gtgattttgaattttttggcagcagaagggcgactgagtactcaacatattgactgtatttgggctgcagcacaggtcgctgaaaattttgttccccctc

SEQ ID NO: 598800 - DNA, 100 bp, Homo sapiens
atggctacattgttggagccaacattgagacttttatcatagagacctgcctatttattctttggcgccatctggagtactacttgttacattgcatgcc

SEQ ID NO: 598801 - DNA, 100 bp, Homo sapiens
gcagtctgggttgggcagaaggcagaaaaccagcagagtcacagaggagatggaaccctaaggactctgcaatatgaataattccctagagaacaccatc

SEQ ID NO: 598802 - DNA, 85 bp, Homo sapiens
ttcatggtgaaacgcataagatatgggaagactctctatgataactaccagcgggctgtggcaaaggctggacttgcctctcggt

SEQ ID NO: 598803 - DNA, 100 bp, Homo sapiens
ttgccgcgtcgaggactgtcgggcctccagccagctgtcccggggttcggccacgacgccccgaggtgtcctgcacacgttcagtccgtcacccaaactg

SEQ ID NO: 598804 - DNA, 102 bp, Homo sapiens
tgcagaccctggtctatgagaactacaacaagttcatctcagccacagggcaacctgtgaagaaatcagtgagccaggtcaccaaatcagttgacttccact

SEQ ID NO: 598805 - DNA, 100 bp, Homo sapiens
ttctcccaccccctcacgcagagtgcagtcatgggccaccgcagaccctgtccccagaggggctggttctgccatgagtactgatgcttacccaaagaac

SEQ ID NO: 598806 - DNA, 90 bp, Homo sapiens
gccgccaagagtgagcgagcggacccgcgatggggtttggattcaggatttgttcctagtgtccaagattttgataagaaacttacagaa

SEQ ID NO: 598807 - DNA, 83 bp, Homo sapiens
gctatggccgtgccctggggctgagccctcagcgaatgacaacagagctgctcaaggcgggaactctgagctaagcagtggag

SEQ ID NO: 598808 - DNA, 83 bp, Homo sapiens
ccgctcacctgcgctgtgatgcctgcagagctgtggcttaccaggcttctcacggcattcagcagcagcgttgctgtaaccga

SEQ ID NO: 598809 - DNA, 75 bp, Homo sapiens
tccgcattgatccttttgtgaggaccttcctgaagaagaaaggtggcaaaagctcggctagaagaaacagaccgg

SEQ ID NO: 598810 - DNA, 75 bp, Homo sapiens
gagatccaaaggcagggcaaggaaactggccacaagggaacgcccttttgcttgtgactggcagggctgcgacaa

SEQ ID NO: 598811 - DNA, 75 bp, Homo sapiens
gctgagccctacaacacccccagcggccgccggctcccccacgaggagcggtggtgccccccccgggcacggggc

SEQ ID NO: 598812 - DNA, 100 bp, Homo sapiens
ttcagccaaagaaacaagccgtggaataggtgtatcaagtaatggtgcaaagcctgaagcttcagcaaccaggagggattgactgagatcttaacaacag

SEQ ID NO: 598813 - DNA, 114 bp, Homo sapiens
cgacagagccaaaatcagagctggaacctgaggagagaggtgctgctggtgagtagcagccggtacccagaccagtggattgtcccaggaggaggaatggaacccgaggaggaa

SEQ ID NO: 598814 - DNA, 75 bp, Homo sapiens
cagccattgaacgggagtatgggcaggtgtgggcccatcgctggatggatctgtcagaacacggctttgggctgg

SEQ ID NO: 598815 - DNA, 100 bp, Homo sapiens
ttgtccctttgcctcatcccaggttgccttggaaaatgccaacgccgtgtctgaaggagatgtaatcagtgtagagaaaaccgtgaagagatgccttttg

SEQ ID NO: 598816 - DNA, 96 bp, Homo sapiens
cagctctgcagctcagccaatcagtgacatcattggtctatgctccatcagcaagcactgccgactacaatagggactcgccaggctatccttcct

SEQ ID NO: 598817 - DNA, 101 bp, Homo sapiens
gcactaccctgactacagctggagcgcccagaggcgagccctggtggaggaagagacacctgaaagaccccgccgtggcatcccagggcttcctgatggcc

SEQ ID NO: 598818 - DNA, 100 bp, Homo sapiens
ctggctaagctcatcattgttactggtctcagccttagatccaaggacagtccaaggaagtcctaagaccatggagttggtgatctgggatctgggtttg

SEQ ID NO: 598819 - DNA, 100 bp, Homo sapiens
gaggtggtgaaactcaagatccccatggacaacaaggaggcctgtagtggtggagacacgcccagtggatgatcctactgctcccagcaacctctacatc

SEQ ID NO: 598820 - DNA, 88 bp, Homo sapiens
tttgatgcataaaggcagctttgaaacactggacagtgccacatcgcttatccaggcagctaaaaacctgatgaatgctgttgtcctc

SEQ ID NO: 598821 - DNA, 96 bp, Homo sapiens
gtccactgcctgtggaactccaggctatgtcgcctctacggcagacacatgcaggccaacccagaaccaccgaagaagaataatgacaaatcgaaa

SEQ ID NO: 598822 - DNA, 82 bp, Homo sapiens
tttgcttcaggttatagatggagagacctataaagaataactgaagtgaagtgatggactccgatttggagagtagtaagac

SEQ ID NO: 598823 - DNA, 83 bp, Homo sapiens
tcaccggtttctcccacatcgacctgacaatgcagatcttcgtgaagactctgactggtaagaccatcaccctcgaggttgag

SEQ ID NO: 598824 - DNA, 90 bp, Homo sapiens
tcccgcgggcaccgaggactccgctcctgcccagggggcagctggcattttatgctatgtgggagcctatgtcttcatcacttatgatga

SEQ ID NO: 598825 - DNA, 100 bp, Homo sapiens
cttgagaccctgagactttcagaaacttattcacagttaccaaagctgggactggttaaatatgttgagcccaccaatcgttcctcccagtcaacagccg

SEQ ID NO: 598826 - DNA, 100 bp, Homo sapiens
tgacagagagatgatatacccgaagctgctggataattttatcccagggtggctgaatcacggaatggaaacctaacgaagcatatgaaatctaaagcac

SEQ ID NO: 598827 - DNA, 100 bp, Homo sapiens
agaacctggagcaaagattagcagaggtgctaaagggaagaaggaggaaaagcaggaagctggaaaggaagttcctccgtgtcacaaagcagtacctgcc

SEQ ID NO: 598828 - DNA, 110 bp, Homo sapiens
gccgcgatcgtggggcccgcgaggcgggcagccggggcgtccagctctggctttctggatctgtgcttctctggtagaggaaccctgaggactgatctactcttgcagtt

SEQ ID NO: 598829 - DNA, 96 bp, Homo sapiens
cccaccagtatggcccggcacgtgttcctaacggggcccccaggatattcaaatagaagccttgctgatgagagcctgtgagcccataattcagaa

SEQ ID NO: 598830 - DNA, 90 bp, Homo sapiens
gttcggccatcttggctcctccctgccagatagctcttattttgaggaaagaccacagcaagattctttcattcgtctcctcctagcctg

SEQ ID NO: 598831 - DNA, 100 bp, Homo sapiens
caagtggtggaagtagcttgtggctcacatcattcaatggctctggcagctgatggagagaaatctcctgcaaagaagctgagccatgcaattagtaaat

SEQ ID NO: 598832 - DNA, 98 bp, Homo sapiens
tccggccccaggtcaccgccagcacgcgcctgcttcccgtctgcgcgagtccacgcagctccccaggggtagaaatatttctgtcatggctcattcaa

SEQ ID NO: 598833 - DNA, 73 bp, Homo sapiens
tcaccgatcttcttgtgtcaccatgctattatgcatagaaaggtgaaatgacaatggatgctctgttggctcg

SEQ ID NO: 598834 - DNA, 75 bp, Homo sapiens
gggggcgagagtgaacgattcaacccgggggagctcaggtttaaatgtgatactggtgtagatctccttgttcta

SEQ ID NO: 598835 - DNA, 99 bp, Homo sapiens
tgtacaccacataacccatctgagcctcatcttcctcatctgttttgaggctgttgacagtgtcttgaagaggatgacaataattggtgtaattttatc

SEQ ID NO: 598836 - DNA, 100 bp, Homo sapiens
gcgcgtctggtggcggcggcgtgatgttctcggcaggagcggagagtttgctccaccaggccagaggagaggagacgccgtgagcgggacgaccagatgt

SEQ ID NO: 598837 - DNA, 83 bp, Homo sapiens
gccccatcgagaaatggccgcgtcggcagacacatgcctcactcctgtcagcagttccaccttttcatggttgaggagcacat

SEQ ID NO: 598838 - DNA, 75 bp, Homo sapiens
tcacgttcatcatggtgcctggctgccaggcagaacctgcacttgttgccaagtcttccatcttactagatgtga

SEQ ID NO: 598839 - DNA, 90 bp, Homo sapiens
caaaaaggaagcatgttggacgatatctaatattacagctggaaatagggcacagatccaggtgtggatgtggaagcagccaagcgggca

SEQ ID NO: 598840 - DNA, 75 bp, Homo sapiens
atcaacatgttgttggaaatgagccacgagaggggggaaaagtccaggcaaggccccatggctgggggttatgga

SEQ ID NO: 598841 - DNA, 82 bp, Homo sapiens
tatcgtgcctctagcaaaaagggtggacaagttccggcagttcatgcagaatttcaggtgtttcccattaaacactaccagg

SEQ ID NO: 598842 - DNA, 83 bp, Homo sapiens
tgtcagcatggcccaggctcctgctgacccgggcagagaaggtgggtgtttctctatgagaagggctaccagacctcgagcgg

SEQ ID NO: 598843 - DNA, 100 bp, Homo sapiens
ccggcaggcagcagcatgaaattcagcccagcgcactacctgctgcctctcctgcctgcgctggtcctcagcaccagggccctgttggctggtggcggct

SEQ ID NO: 598844 - DNA, 98 bp, Homo sapiens
tactattacccccagtatctgcaagccaagcaatggctgccatccggaagaaactggtgattgttggtgatggagcctgtggaaagacatgcttgctc

SEQ ID NO: 598845 - DNA, 116 bp, Homo sapiens
aaaatcgacaacactgtagagatcacccccacctccaacggaccctgtgcagagcccgagtgcgcgctcaggaacccgagttcagctacggctgcgcagaaggcagctgctatccc

SEQ ID NO: 598846 - DNA, 74 bp, Homo sapiens
ttagtcgcagacatggacaccaaacatttcctgccgctcgaaacgcttcgttaagggactcaggcagtacggga

SEQ ID NO: 598847 - DNA, 85 bp, Homo sapiens
cttctgccccagctccgtctcggcggcggcggggggatatgagactttctactcggaatatcctgagtgttgcgtggatgtaaaa

SEQ ID NO: 598848 - DNA, 75 bp, Homo sapiens
ctttgactgttctagaacttcatagaacaagatcatcaggtagctgagcagctcatcaaccccttcggagaggac

SEQ ID NO: 598849 - DNA, 100 bp, Homo sapiens
tgctgtccaaatactactctctgtgattaaacgcctacaaaaggaaatccaggaactgaaggatgaactggccatggtcactggggagcagaggacagag

SEQ ID NO: 598850 - DNA, 83 bp, Homo sapiens
ctgcagtacaggatatgaagaaattgagggttcttgccatgtggcaaatgacaatgctccagagcatgctttgcgacctggtt

SEQ ID NO: 598851 - DNA, 100 bp, Homo sapiens
ctcaggagaacagggggaagagagagattcaagtcttcctaatgtctaccttatatgcaggtgtgatgaatgcagactctgctaccattttggctgtttg

SEQ ID NO: 598852 - DNA, 50 bp, Homo sapiens
ggcctccccagccatgtggaactaagatgaacaagtttctgctgtttgag

SEQ ID NO: 598853 - DNA, 82 bp, Homo sapiens
ccagccttcaatgtgtcctacaccaggcagcccccaaatcccggcccagcggacaaggcaaaatctcagcaagttcggacct

SEQ ID NO: 598854 - DNA, 90 bp, Homo sapiens
gagctgaacaagaagttggccaacaagtgccggtggtggtgtgcacattgagccccggtatagacagttcccccagctgaccagatccca

SEQ ID NO: 598855 - DNA, 50 bp, Homo sapiens
atgatagccaacctgataaaaaagctaatcaggaaacccaggcccaacgg

SEQ ID NO: 598856 - DNA, 100 bp, Homo sapiens
ctgcctttgcgattgtacatgccagatcctaagcaaagtcgtggagggcccccaagacccaacagagggatgccgcaaatgaacactcagcaagtgaatt

SEQ ID NO: 598857 - DNA, 100 bp, Homo sapiens
gaagatgcccatgattcagaggccaaagtggcgagcctgagaggaatggagttacaggggtgcgccagttcaaactggaaacaagatggatgatgtgtca

SEQ ID NO: 598858 - DNA, 100 bp, Homo sapiens
gcactcagaacattcctgctggcaagccatcactccaggccggctgcgtgcacttttcctacaaagcatcgtgtgagatccgcgtgcttatgctcctgta

SEQ ID NO: 598859 - DNA, 100 bp, Homo sapiens
tcgggaacatggccctggagcggctctgctcggtcctcaaaggtcctgaacgaggctgtgggggccctgatgtaccacaccatcactctcaccagggagg

SEQ ID NO: 598860 - DNA, 100 bp, Homo sapiens
tttgcaaccattggtctgcaggacatcactttagatgatggaaaaccaattctgtgtcctcggaggaccacagcccagttgggccccaggcgaaacccag

SEQ ID NO: 598861 - DNA, 82 bp, Homo sapiens
caggagctcgggaaccgggactgcgagcgggaggccccgtgtgggccgcggcccggccctcaccatggagtccatgttcgag

SEQ ID NO: 598862 - DNA, 75 bp, Homo sapiens
ggctcaccctctgcctgtgttacatttagccaacaccacactttcaggctacgtgtgccgcctggccattcaaac

SEQ ID NO: 598863 - DNA, 82 bp, Homo sapiens
agtttcatctgtggatggagtattggtgaaaggtgtagcagtcactcggcctacacccacagcatcgaccttgtgaacccag

SEQ ID NO: 598864 - DNA, 100 bp, Homo sapiens
ggagccggagaccctcccttgaaaccggcactgggacttctcgatctctggaggcacctgttgcaagtgacaggtttggacatatttgactcttttcccc

SEQ ID NO: 598865 - DNA, 75 bp, Homo sapiens
tcagtgatcttggtgccatagagagtctccgggtccctggaaagcctaaaatgaccaatgtgtgatttcagtgga

SEQ ID NO: 598866 - DNA, 99 bp, Homo sapiens
ggcggaggggagccagtcggcgcctgaggcaggacagagtttagggtatggatttgttaactatattgatccaaaggatgcagagaaagccatcaacac

SEQ ID NO: 598867 - DNA, 90 bp, Homo sapiens
cgacgacgacgagggcgaggaggaggaagaggcggcggcggcggcgattgggtaccgagcctttgaagaagatggtggagagaattcgca

SEQ ID NO: 598868 - DNA, 90 bp, Homo sapiens
agtcactgccccacccctgcctggagcctcacacatgactcgcctcctctcagtgaccacaggtttgctggttggctcccgagcagacag

SEQ ID NO: 598869 - DNA, 50 bp, Homo sapiens
ctcttttctctccactgccaatattgagaggatccagaatccagatctct

SEQ ID NO: 598870 - DNA, 82 bp, Homo sapiens
gggattacaatggagaaagagtaattcacgcagagccggctttgcagaatttaattccttttcgaccttcaatccagttcca

SEQ ID NO: 598871 - DNA, 100 bp, Homo sapiens
gcagcagcttaccggaatgccttggctaatcccttgtattgtcctgactataggattggaaaagtgacatcagaggaggatcttcagcctgttaaacaag

SEQ ID NO: 598872 - DNA, 82 bp, Homo sapiens
cgtcctggcgcgatgcgtcaagtacactgaaattcatcctgagatgagaacaccttccaccatgaccacctcagcaagttcc

SEQ ID NO: 598873 - DNA, 80 bp, Homo sapiens
tgtttttggcagggtgatgcagataggacacattcagctaacgtattttagcaggtggagtgaggttgaagattcctgtg

SEQ ID NO: 598874 - DNA, 50 bp, Homo sapiens
acgcgtacgtggtggagctctgcgtgtgaacttagtgatttggcccgtga

SEQ ID NO: 598875 - DNA, 83 bp, Homo sapiens
cgacacgccccacaggtcttgggaggattaagtgaggggacatgaggttttaaaatcaaagatgggaaaatcggagaaaattg

SEQ ID NO: 598876 - DNA, 88 bp, Homo sapiens
gaaagctagaagaaaaggtgtacttgcaagaaacctcaggacttgagtaacagcaacatgggtagctataaccagcctctgggcctgt

SEQ ID NO: 598877 - DNA, 100 bp, Homo sapiens
ccggcaggctgagaaaagcgagaccgcgtgcgaggaccggtcaaaatgcagatcttcgtgaaaacccttaccggcaagaccatcacccttgaggtggagc

SEQ ID NO: 598878 - DNA, 100 bp, Homo sapiens
cagccattgaaaagtgtggagaagctgctttaaatactatgtcttcagcagtggtgcagttatatgcagcagatcggaactgtatgtggtcaaagaagtg

SEQ ID NO: 598879 - DNA, 100 bp, Homo sapiens
ccggtgcagcagccttcagcttttggcagcatgaaagttagcaattaaatctcttgatgaacagtgtgtggttggcaaaatttccaagcactggactgga

SEQ ID NO: 598880 - DNA, 101 bp, Homo sapiens
ggcgggagcgcgaacgagcgacggcggaacccgtgggcctgtggactgcagcctcggcggtcagcagtgatttgcgtcatgtggattgggtgaagtcatat

SEQ ID NO: 598881 - DNA, 100 bp, Homo sapiens
gtcctcagctcactcccactgctgtccctggcagtgcagaagtccagggaatggctggcccagcagctgagatcacagggtgtggccactgtaagaaaat

SEQ ID NO: 598882 - DNA, 90 bp, Homo sapiens
ccgggccggccgcccagacgctgcccgcgggcccggccacggcggagccaagggagtgcatccgccccaacccttttccccctcgtctcc

SEQ ID NO: 598883 - DNA, 133 bp, Homo sapiens
cctctgttgacctatgatctgcagggagacgcacagccaggacatcctggaacctgggaaagggtttgtccagaggggttgcgtttatccggtttgacaaacggtcggaggcagaagaggcaattaccagttt

SEQ ID NO: 598884 - DNA, 114 bp, Homo sapiens
agaggcaccgggatcgtgaccgagaccgtgaccgagagcgtgaccgagagcgcgaatatcgtcatcgttagaagaggtccagttccggccgtaccgcacagacgacttcatcac

SEQ ID NO: 598885 - DNA, 101 bp, Homo sapiens
atgaagtaccaccctgacaaaaataagagcccggatgctgaagcaaaattcagagagattgcagaagcaatggtacagcagttccatgaaagtcatttgcg

SEQ ID NO: 598886 - DNA, 87 bp, Homo sapiens
aatcgtcactgaggttgcagttggcgtgaagaatggtttagaagttcatggacctataaggatgacccatgccaaaaatactatgag

SEQ ID NO: 598887 - DNA, 82 bp, Homo sapiens
ccacccaccgccgccgcctcccagaacatacatatgatagttgagaaagacacatattctgatcatgaagaaataaacacaa

SEQ ID NO: 598888 - DNA, 75 bp, Homo sapiens
cggcataccaccctgcactgtgagatctgccgacaccccaggccatcgagccccaggccatcgtgcagcaggtcc

SEQ ID NO: 598889 - DNA, 119 bp, Homo sapiens
accgctgaaacttcacttctacacagaggctttctttcccagaaacccagaccaggcaaccaagttgttaaaagccttgaaaggctacattaaacatgaggcaagaaaaggaaatgaga

SEQ ID NO: 598890 - DNA, 100 bp, Homo sapiens
ccaacatccgcatccgatgccatttagaaatgcctccacggctgtgtacgcctgttgcaaccccatccaggagacatatttccagcagctggcacctgca

SEQ ID NO: 598891 - DNA, 100 bp, Homo sapiens
tggaaccatgatgcattgtcagaccctaaaggatcaaccctctgcatacagtaaagcctctcttctgtggaaactctgaagccgaccagttgggcaaaat

SEQ ID NO: 598892 - DNA, 100 bp, Homo sapiens
ttcgccatcttcatgggcctgcgggcctccaaggagatccaccacctgcatcacctggtcagcacccttatcctctcctccacctctgcctacgccgtca

SEQ ID NO: 598893 - DNA, 75 bp, Homo sapiens
ctttcagccggagaagcgagtttcagctgtgctgacttgctcatcagttttgcacagtggcaattttgggactga

SEQ ID NO: 598894 - DNA, 82 bp, Homo sapiens
tagcaagaactgaggagcaccaggagacgcaactcatcgggtgtggacactgccagcggctgcagccgacttggaatgacct

SEQ ID NO: 598895 - DNA, 75 bp, Homo sapiens
gcctcagttggaagcagccgatccagcctgcggagcctgtggggcaggactacaaagctgatgaagacccagcat

SEQ ID NO: 598896 - DNA, 50 bp, Homo sapiens
ccgagaggagctgagcgagcgcggaagagatggggtttcgccatgttgcc

SEQ ID NO: 598897 - DNA, 99 bp, Homo sapiens
ctggcagtttacatattcacttgatgcagctttctcaaggtgctactacattccaagaatatcagaaaactggggaactctcaacatccgatcacatat

SEQ ID NO: 598898 - DNA, 90 bp, Homo sapiens
ttggtgcacaaaaagacacttatactatgaaagaggttctccttccccagtcaccagttgctcgagttagaattgtctgcaatggccgcc

SEQ ID NO: 598899 - DNA, 75 bp, Homo sapiens
cgggaactcgactcttggcgccaccgcctcatgcactgtgtaggaaatttggtgagcggcctccacctaaacgac

SEQ ID NO: 598900 - DNA, 75 bp, Homo sapiens
ctcggcccgtgggcttctccccgagtctccccgagtcggttggcattaagagcttttatcaaaatacaactcaaa

SEQ ID NO: 598901 - DNA, 75 bp, Homo sapiens
aaaggagctcaactccaaccacgacggggccgacgagacctcaggtcgcgtggggcaggcagtggcgctgcgggc

SEQ ID NO: 598902 - DNA, 98 bp, Homo sapiens
gaactatagcaatctggttttcttgggcttcctgttggataaaaaaattggagtaaatcaaccaaaacgaattgaaaatgctaaaattcttattgcaa

SEQ ID NO: 598903 - DNA, 90 bp, Homo sapiens
gccagtccacggacacttcaggctatggccagagcagctattcttcttatggccagagccagaacaactcagatgccactgcatcatcag

SEQ ID NO: 598904 - DNA, 83 bp, Homo sapiens
ggcgcgcccagagccccgcgtttcagccctagggaagacatgggaaagcggaaccaccaaaaggagtgatgatcaacgatctc

SEQ ID NO: 598905 - DNA, 75 bp, Homo sapiens
gcgggagaggagtctccaccaggactgaccgctgccgcccagcacgtccagaatcagacacaagtttggcagaag

SEQ ID NO: 598906 - DNA, 74 bp, Homo sapiens
acgagctgtttctcatctttatactcttccaggtggccaaggtggaatacgtcaggaagaagccaaaattaaaa

SEQ ID NO: 598907 - DNA, 74 bp, Homo sapiens
aagtggtgaaggagtgtgtgcagcggccagcactccttgcccgaggacagagatggcgagcgcccggattgggg

SEQ ID NO: 598908 - DNA, 100 bp, Homo sapiens
ccagttgctggatatccaagcctctcagcttcggagaatggagtcttccatcaatcatatctcacaggacttggatgttgtgggtgatggtatgcagtgt

SEQ ID NO: 598909 - DNA, 100 bp, Homo sapiens
aaagaaggagggtcctctcagtgattaagacgtgggttggcaataagagaagaaagatgagtagtaagaactctgaatctggaacagcaacaacaggaac

SEQ ID NO: 598910 - DNA, 76 bp, Homo sapiens
aacctgggggctccctggacaactccgagcaggtccagctgggagctccccgacctccaggagggcaagatccaag

SEQ ID NO: 598911 - DNA, 100 bp, Homo sapiens
aaccgtttgcggaggtacggatactcagttgtggagagctgattcccaaatctaaagaggaaaatttgctgtggttagacaatgtatatcaaaatctact

SEQ ID NO: 598912 - DNA, 75 bp, Homo sapiens
cgtccagtggctgaggctggacagagcacaggagaggagaggcagcagcatggcgagtgtcctgtcccgacgcct

SEQ ID NO: 598913 - DNA, 82 bp, Homo sapiens
ctaaaggccccatacaatgaagtagacattggtggaaacatttaattcctggtcgggtggcttccagtggtcttcagtctgt

SEQ ID NO: 598914 - DNA, 50 bp, Homo sapiens
caacaacttcatgggctgccttaaagagctgtgtctgggataacctcggc

SEQ ID NO: 598915 - DNA, 112 bp, Homo sapiens
cttctcggagtacttcagaagttaatccacaaatgcttcaagacttgcaagctgctggatttgatgagcatgcatatgcgctagaacttctatttgatcagttgcatgaagg

SEQ ID NO: 598916 - DNA, 100 bp, Homo sapiens
tagcgcggcagcggggccacgatgaagaagcagttcaatcgcatgcgccagctggccaaccagacggtgggcagcacctgtggaatcctctcaagaggaa

SEQ ID NO: 598917 - DNA, 98 bp, Homo sapiens
ccggaatcagttccttgatgagctcatggaggggagcctggtgaacacgctgcgggaggtggagcccacatcacacatgggggtgccccgggtatggg

SEQ ID NO: 598918 - DNA, 75 bp, Homo sapiens
cggctgccctgtggcctcgctcctcggagggtgactgtggggatcatgttgttataatgaacacaagacacattg

SEQ ID NO: 598919 - DNA, 100 bp, Homo sapiens
catggagacaggtgctctcggttgcacaataaaccgacgtttagccagaatattccaacccgggaccggctagagggcatggcagccttcagggagaagc

SEQ ID NO: 598920 - DNA, 100 bp, Homo sapiens
gtcgcagacatggacaccaaacatttcctgccgctcgtacaaaatggttcgttacatcagaaggatacagttcatgacaatgactttgagccctacctta

SEQ ID NO: 598921 - DNA, 75 bp, Homo sapiens
agctggaccagtgctttcagctgcggctcttcgagcaggatgctgagaagactcagcccgcctgcacccaggtga

SEQ ID NO: 598922 - DNA, 85 bp, Homo sapiens
ctcagcctccggagtagctgggattacagtgccctgcaggagtcattaaatcaaaacttcatgctgatcatcacccaccgagaag

SEQ ID NO: 598923 - DNA, 80 bp, Homo sapiens
cgctaccaccaccacaccagaaactagcaccagccccaaatttcgtcagcccaaggccaaccccactgtcactctgttcc

SEQ ID NO: 598924 - DNA, 144 bp, Homo sapiens
aaggcatcgtctcacaagtcctgtgccaggacagactgtcctccacatttagctgtgggagactggtcgaagagttcttggagtctctgcggagtccctgggccagatctcacagtgaaagctgcaggatcttccttctgaccc

SEQ ID NO: 598925 - DNA, 100 bp, Homo sapiens
tgaaaagctggcccgtgacctgaaggctgtcaagtatgtggagtgttctgcacttacacagaaccagacataagttcagaggaatctgtctccactgtag

SEQ ID NO: 598926 - DNA, 98 bp, Homo sapiens
ctggaaaggaaaattgctgagattcacaagacggaactgaggtgttcctgatccaagcagaaccctgttatttgaagagcctgagaaatcttatcccg

SEQ ID NO: 598927 - DNA, 83 bp, Homo sapiens
tctggctgtgctgcgcggcccccgcgcatggtcatgcaagacaagataatctgccttccgaaaagagtgcagcctgctcagaa

SEQ ID NO: 598928 - DNA, 98 bp, Homo sapiens
gccaagctgtcatcacaaaagagttgattgaaattatctctggtgctgcagctctggtgaatctgtaaaatatttcctggataacttggataaacttg

SEQ ID NO: 598929 - DNA, 75 bp, Homo sapiens
cttcggaagctagtttttcatctagtgaaggaagtcctttgtcaagcattcagcaactagttcctgaatataagg

SEQ ID NO: 598930 - DNA, 90 bp, Homo sapiens
gtaaccttcccccacaagccctcattgagcaccatgaggaggcagagttgcacactgacaagaaacagatcagtgttgggttcattggct

SEQ ID NO: 598931 - DNA, 100 bp, Homo sapiens
acatcttgaagatgctcaacagatgtatattcatgaaggttgcagatatcaagaaagtcaacaacttcatcagagaacaagacttatatgctttgaaatc

SEQ ID NO: 598932 - DNA, 98 bp, Homo sapiens
tattctatacacagtattccaaagggaactgaaattactattgcctttgattttgactatggaaattggagaactgcgacacatcaccaagctgaagc

SEQ ID NO: 598933 - DNA, 90 bp, Homo sapiens
cgagaaggcatctgtctctgccttatagcaacactcaatgcgtgaccccagtggctgaaagcaggagaaagtgtttcatcacgggccctc

SEQ ID NO: 598934 - DNA, 75 bp, Homo sapiens
aggttgtccgagcatctgggaagagggcagtggctcagagatgcccttcacctcccatgatcaatctgatctcgg

SEQ ID NO: 598935 - DNA, 98 bp, Homo sapiens
catcactgtcgtctcatgggagaaagacactgtttcacttgtctcagaaatctccaaattggacatccagagcagcattcttgttctgtctacgtctt

SEQ ID NO: 598936 - DNA, 89 bp, Homo sapiens
gcttctgcctggtgctctgcgtcctcatcgggcttatgttcgaggtgctgtttcaggtactgggaatatggcaaaagaacaaagcaaat

SEQ ID NO: 598937 - DNA, 98 bp, Homo sapiens
gatatatttcaagagtgtgggtgatggcgttcacacaaactggtcagcgtttccctggagaggaagaggcaaggtgtggtcactcacctgtctaccac

SEQ ID NO: 598938 - DNA, 110 bp, Homo sapiens
cgcaaccattgacgccatgtcgggttattcgagtgaccgagaccgcggccgggaccgaggaattcagaaggagctggcggacatcactttagaccctccacctaattgca

SEQ ID NO: 598939 - DNA, 100 bp, Homo sapiens
ctacatctcagactactgtgtgtggattcagaaagtcaagactggactgactatgatgaaaaggcccaggagtctgtgggaatctatgaggtcacccacc

SEQ ID NO: 598940 - DNA, 90 bp, Homo sapiens
ccatgacccacttcaacaagggcccttcctatgggctctcggccgaagtcaagaacaagtctattgcgtctgcagacatggatttcaacc

SEQ ID NO: 598941 - DNA, 100 bp, Homo sapiens
atgggcagacagcggcatacagaatgcctatgaccggcgtcgagaatttcaactgctgagatctgtatctgtggacctgaatgttgatccctcgcttcag

SEQ ID NO: 598942 - DNA, 75 bp, Homo sapiens
gcctcttcaccatgttcggaatgctgctgttcgctggtgggaagcctctcttctcacccccaggcatgtcgggcc

SEQ ID NO: 598943 - DNA, 90 bp, Homo sapiens
ctgatgtcgtggactgatctgttcagcaatgaagagtactaccctgcctttgagcatcagacagcatgcaatgatgctacctgttctgac

SEQ ID NO: 598944 - DNA, 51 bp, Homo sapiens
ccgacgcaacgcggccacgtggaaggcttatgtagacatgaggaagattgg

SEQ ID NO: 598945 - DNA, 75 bp, Homo sapiens
gagtgacacaggtcaggaagcagaatattccttatatgattctgaaaaagagttccacgtcctcccttatcgagt

SEQ ID NO: 598946 - DNA, 82 bp, Homo sapiens
ccagcggcaggaccagcgggcgggggcccacgagtgaaaggaaagcaagccaggatggatatttacgacactcaaaccttgg

SEQ ID NO: 598947 - DNA, 101 bp, Homo sapiens
ggaagttcaacagaaggcaaatacgaagacgaggcaaagcacccagctttcttcactcttccgttctccaaggagaagtacatcctggactcatcgccaga

SEQ ID NO: 598948 - DNA, 83 bp, Homo sapiens
agcagaaccccaggactgcgcccccgggagcgggcgcccagagatccgagagactgaggtcatcgacccccaggacctcctag

SEQ ID NO: 598949 - DNA, 51 bp, Homo sapiens
cctcagtgtaaatggggaagcgctgtgtgggtcctacgtgtatgaactcag

SEQ ID NO: 598950 - DNA, 82 bp, Homo sapiens
ccggcgggtacctgcggccaattcggtggaacgaggacgcggactgcgaaggcaggttcgagaacttgtcttggacaattgc

SEQ ID NO: 598951 - DNA, 80 bp, Homo sapiens
cctacttcctttccgtgcataagaagccgaatggattttttatcaagcagaaatgcatcgaacaacgagaatcaagatca

SEQ ID NO: 598952 - DNA, 74 bp, Homo sapiens
ttatggcagagttagctaaagaactccctcaagtttcatttgtgaagctggaagagcctgtattgtcctcacaa

SEQ ID NO: 598953 - DNA, 83 bp, Homo sapiens
ggagcttatactcctcccagtgacgggtctggagtgcgtgggggaccggctgttggcgggacctgaaggagaagaaggagaag

SEQ ID NO: 598954 - DNA, 100 bp, Homo sapiens
tggaagagggagtcaccactggacctccaaggaagccacgtgcagacatctacaaccttcgatctcctgacgagtttttctatatgagtggagaagacag

SEQ ID NO: 598955 - DNA, 78 bp, Homo sapiens
agccatgtgagcactgggggtggtgccagtttggagctcctggaaggttacagtctctagcttcgccatgtacatggc

SEQ ID NO: 598956 - DNA, 82 bp, Homo sapiens
attcagtggtgttaaggattccaacaacaattccgatggcaaagccgttgccaagcaagccagggctgagcaggaagaagaa

SEQ ID NO: 598957 - DNA, 90 bp, Homo sapiens
gcctcccacactcctgagccaggaacagatcaaggtgtgacgtatgcagccaaaggctactttgacgccctggtgaagatgggggagctg

SEQ ID NO: 598958 - DNA, 100 bp, Homo sapiens
cgggcacctacgcgggacagttcgtgatggagatgcaagtgctgctggaccaggcgggctgctgtatcgtgggtcagagtgagcagctggttcctgcgga

SEQ ID NO: 598959 - DNA, 75 bp, Homo sapiens
attaaagcaagatggccgcgccctgcagattgtctcttgttgcatggcttaagcaaaatcagactaaactatagc

SEQ ID NO: 598960 - DNA, 88 bp, Homo sapiens
cctgagtttttcaagtctgccctgcaagcgataggagtggaagcccaccaggctgctcaggagtcaacacacatatacactaaggagg

SEQ ID NO: 598961 - DNA, 83 bp, Homo sapiens
actttcacctgatccaggccaacaaggttgtctttctactcgggacactcttcctttgggatgtactgcatggtgttcttggc

SEQ ID NO: 598962 - DNA, 98 bp, Homo sapiens
tgaagaagcaaccaagagagtgcccaaactgaaaaagctggatggtccgaggctgtccggaggccacagccttcacgaaacatccacggttctggtgg

SEQ ID NO: 598963 - DNA, 100 bp, Homo sapiens
aactggcgccgccctgaccccaagattccagatgttcctgtggaccccagtccaggtaaaagagaacctgctttcatgcaagatgctgctgcactgcaaa

SEQ ID NO: 598964 - DNA, 50 bp, Homo sapiens
cgggacaccccggaagctgggaaatggaggaacgagaatgaatatgactc

SEQ ID NO: 598965 - DNA, 51 bp, Homo sapiens
cagcgagttgcagatctacacttgatccacctccgacccttaagccagaga

SEQ ID NO: 598966 - DNA, 75 bp, Homo sapiens
tccaaaggcagggcaaggaaactggccacaaatcccacatctggtagctgtaaaatcccagggacctgccttgac

SEQ ID NO: 598967 - DNA, 82 bp, Homo sapiens
gcaccctactccagcatcgcaccccaagaaaccagacaatgcagatcttcgtgaagactctgactggtaagaccatcaccct

SEQ ID NO: 598968 - DNA, 101 bp, Homo sapiens
tacagaactctgccaggtcagaacagtgacatgaagcagcagcagcagatggaaaaaggaaccacttcgaaacaggcgcagtggctcatgcctgtaatccc

SEQ ID NO: 598969 - DNA, 98 bp, Homo sapiens
gaagaggacggccctgagcaaggttcaaaccttgtactactcagctgatcacaagctgcttgatgggaacctactagatggacaggctgaggtgtttg

SEQ ID NO: 598970 - DNA, 100 bp, Homo sapiens
gacgggcttggtggattctggttcctgccgccgacagggctcgccgggagagagttactggaggtgaactgtttgaagacatagtggcaagagaatacta

SEQ ID NO: 598971 - DNA, 87 bp, Homo sapiens
atgatggcatccacccggacgacttgtctttcaagaaaggagagaagatgaaagtcctggaggaggagatgcacttatttacatgga

SEQ ID NO: 598972 - DNA, 100 bp, Homo sapiens
gaaaccgacacagtcaatcagtcaggagagctcaggccccggggcctccagcggcaccagcggagaccacggtgagctcgtcgtccggattgccagtctg

SEQ ID NO: 598973 - DNA, 100 bp, Homo sapiens
actcggtgattgaggacaagaccatcgagctcatgtgtatgtggtagaagaccaaagaagagatgagctaggaccatccacctgcctcacagcctgctgg

SEQ ID NO: 598974 - DNA, 83 bp, Homo sapiens
cagtgcccctatcaggaagagggggtatcaacacttacattcctttaatcaggtgaagtgatgaacctcctgatgttcctgtc

SEQ ID NO: 598975 - DNA, 75 bp, Homo sapiens
gtggactttcccgctgcacactgccctccgaagtcggggacgcgggctcgctctcgtgctcattcccccatgatc

SEQ ID NO: 598976 - DNA, 51 bp, Homo sapiens
aaggtcaatgcgtaggggtagagtaagcccatatagttgcaaggaagcccc

SEQ ID NO: 598977 - DNA, 78 bp, Homo sapiens
ggagcccggctcccgcaccatggaggaggacgacagctacgataacgaaggaggcccaacttcattcaataaggagcc

SEQ ID NO: 598978 - DNA, 100 bp, Homo sapiens
gtcgtggaagcaggactgcgccgcgtcttcctcaagcatcacaggacatggccccctcagccacctagctggggcccatctaggagtggcatcttttttg

SEQ ID NO: 598979 - DNA, 76 bp, Homo sapiens
tggggtgttccccgtcactgtactccagcgggaggaagaagaggcctttgccagcagtcagagcagccaaggggcc

SEQ ID NO: 598980 - DNA, 101 bp, Homo sapiens
cgtgcctgtcttcagatcttcacagcacagttcctgggaaggtggagccaccagcctctccctgatcttagcaaagcaatgtctcaagatggtgcttctca

SEQ ID NO: 598981 - DNA, 83 bp, Homo sapiens
cgacgtcatcatgctgaccaccaatcagatccgtaaggcctcctcgctggggaggcagagtcctcgcgtggtctcctgcctcg

SEQ ID NO: 598982 - DNA, 90 bp, Homo sapiens
cagcacacagaagccgagacgggggattttggcaattgcttggagcatggcagatcctgaattgttactgagctgtggaaaagatgctaa

SEQ ID NO: 598983 - DNA, 98 bp, Homo sapiens
accgccatgcccaagaataaaggattcactccttctccagttgcacagccacacccttcagctggccttaatgttgactttgaatctgtgtttggaaa

SEQ ID NO: 598984 - DNA, 117 bp, Homo sapiens
tcttcagttactgcagcacccttgctgcagttctccttcaaagtttgagctctgagcctgaaattaatgcagagaactcctagttgggcaatcagttccagactccacagaccccag

SEQ ID NO: 598985 - DNA, 103 bp, Homo sapiens
ctggagcctcagttggaagcagccgatccagcctgcggagcctgtggggcaggttttaaaatcaaagatgggaaaatcggagaaaattgcccttccccatggc

SEQ ID NO: 598986 - DNA, 75 bp, Homo sapiens
gagtgatttgcgccatcatcctcatcatcatcatagatgaggacggggacttggttgccttttccagtgacgagg

SEQ ID NO: 598987 - DNA, 98 bp, Homo sapiens
tttgctggagcacttgagccacgtgcatgaaccaaacccacttcgttcaagacaggtgtttaagccacaacctccaagagggaaaacatttctccaga

SEQ ID NO: 598988 - DNA, 97 bp, Homo sapiens
agggccgagaaggacaggatcaggtgtggccgacgacgatgccctcgctgaggagcgcatgcggagaggccagaacgccctgccagcccagcctgcc

SEQ ID NO: 598989 - DNA, 75 bp, Homo sapiens
cagctctgatgacgatttggatgaatatacccttagaaaaaatgtggcagtgaaactggtggtgacaaaagagaa

SEQ ID NO: 598990 - DNA, 83 bp, Homo sapiens
gggtaaagttccagggaggccgcgaagacctcctgccccccgaggtctgcagtctcctgaacccagcagccatctacgccaac

SEQ ID NO: 598991 - DNA, 87 bp, Homo sapiens
gctgtaaagccacccacaaacaaactacccattttcttttttggaactcatgagacgatcagtttgacaacttagaaaaacacacac

SEQ ID NO: 598992 - DNA, 110 bp, Homo sapiens
gctggtccgtgccgcggcggccgcgcagggagctctcgaggcaacgccggggcgcccgaggtctggaaggcgcagcttccctctgtgtgttgcagtcctgtggcattatg

SEQ ID NO: 598993 - DNA, 75 bp, Homo sapiens
tattgacttggcaagggcttattgttcctcttcccatcgacggtcagtgcgcacgttgtaatcagctgaggccat

SEQ ID NO: 598994 - DNA, 76 bp, Homo sapiens
ttcacttgggtggagaaggacatcagcgaaaatgtggacacagacttgccaggcagcctggggcagagtgaagaga

SEQ ID NO: 598995 - DNA, 100 bp, Homo sapiens
aggaggcggcagaacattgcttatgaatatctgtgccacttagaggaagccaaaaggaaattgccaccgccacttcaactttcagcaaccaccgccctga

SEQ ID NO: 598996 - DNA, 88 bp, Homo sapiens
ctaaactgaaagaagactcaagctgagacctgtttgttggaggtgcagttcatcatcacaggcaccaaccaccactcagagaaggagt

SEQ ID NO: 598997 - DNA, 88 bp, Homo sapiens
aataaagagtggagctgaagctaagaaattgagcaaggtccgtggtcctgtcagtggaagcccggatagcatgaatgcctctcgactt

SEQ ID NO: 598998 - DNA, 82 bp, Homo sapiens
ctggttcctgctgctggctgtggacgggaaccggcgaatatttggcttgttgatgggtacccttcaaaaatttaaacaagaa

SEQ ID NO: 598999 - DNA, 98 bp, Homo sapiens
acagagccatctatatggacagttgatgatgtctgggccttcatccattctttgcctggtaaagaaactgcggcaatgaaagctgatctcctgagggc

SEQ ID NO: 599000 - DNA, 96 bp, Homo sapiens
gggtgtgagcagggctgagatgggcaccgcggatctggggccgtcctcagattactctcgtggctttggtggccggtacggggtggagaaggataa

SEQ ID NO: 599001 - DNA, 87 bp, Homo sapiens
ggggcttaagttccgtgaactcagtactgatgcccagtggggcattcgtcttggtaaacttggtgctggtgaatcaaagacttctgg

SEQ ID NO: 599002 - DNA, 83 bp, Homo sapiens
aaacggcgagaggactggaggggtgcctctgatcaaagcccccaagagaggatgggtttgtggagttcttccatgtagaggac

SEQ ID NO: 599003 - DNA, 100 bp, Homo sapiens
ggtggccgtaattccgcggcccgagccgatgctcagaggtatcatgaactgatcactaaatatgggaagttggagcctttggcagaagtggacctaagac

SEQ ID NO: 599004 - DNA, 100 bp, Homo sapiens
ctccccagctggtggctggagcgaccccttgttctttggtggcgctggatgactcactggttgtgtggaaggaagtcgatttgacccggctgtctgagaa

SEQ ID NO: 599005 - DNA, 100 bp, Homo sapiens
aaggtgatcctggtatttcaagcattggtcttccaggtcttcctggtccaaagctgggctcaaaatgcagagaactcaaagatattcatttcggccagtg

SEQ ID NO: 599006 - DNA, 100 bp, Homo sapiens
ccaaaaagctggagaagatggtggccaggaagaacacggcaatctgaaagcaaatcctgtttagatgcaggcgaaggttcctggtgacccaggctctcac

SEQ ID NO: 599007 - DNA, 82 bp, Homo sapiens
cttggcagctggacaggcagagtgctgatgtgaaaaataccacgacaaaaccaccctacttgctttgaccagatcaagttct

SEQ ID NO: 599008 - DNA, 100 bp, Homo sapiens
acgggccctcagagcaccaaaacacactggaaacaaacagtatttctactggaaaaaccattttcagttaaagcagatttggcagagagtgatttggcat

SEQ ID NO: 599009 - DNA, 50 bp, Homo sapiens
gaaagagaagaaacgttttctcagagtgctgcagcagctcccagtccagt

SEQ ID NO: 599010 - DNA, 100 bp, Homo sapiens
tactgtgtgacaagactcaatgatcggcagtttgttcacgaccctcaacttggctactccctgccttgtgtggtttccaagccagcgccctactgggaag

SEQ ID NO: 599011 - DNA, 51 bp, Homo sapiens
ggggggttccatctcccaacttgtccatgctgaaaggttccctgagtcgag

SEQ ID NO: 599012 - DNA, 100 bp, Homo sapiens
gctgatcgcagtccggaggtgaggcggaactctgagtgcccaaggttgaagcaatgaataaaagactgggctccttggtggatgagtttaaggagcttgt

SEQ ID NO: 599013 - DNA, 75 bp, Homo sapiens
cttcccggacgctgggaaatgggagttctgggaaatcgttcattcatttacagatgaacagaaaagactcttctt

SEQ ID NO: 599014 - DNA, 75 bp, Homo sapiens
aatttgttcacatgtttcatttctatgtctcctgaagctgtccaatgcataataccacttcagccaaaggatttc

SEQ ID NO: 599015 - DNA, 90 bp, Homo sapiens
caccaacctctcgtacatcggcgagggcgcctacggcatggtgtgaacctaaaggcagacccagaagagctttttacaaaactagagaaa

SEQ ID NO: 599016 - DNA, 100 bp, Homo sapiens
tggagtggagaggcgaggcctcacggtggaactctcagatgtggtcctggctctgccatatgacacccccgtgcccggctacatgaataacactgtcaac

SEQ ID NO: 599017 - DNA, 100 bp, Homo sapiens
cagcgccgacgtccgggtgcacgtgccacgcacgagtgtgaacatggctacgcctcttcattcccgtccatgccgagcccccgactgcagcattcaaagc

SEQ ID NO: 599018 - DNA, 82 bp, Homo sapiens
gtctcctggtgaccgagcacccgcctccgggcatcttcaactcaattctgtggtgttcttggtcacacatttatggagtttc

SEQ ID NO: 599019 - DNA, 100 bp, Homo sapiens
gacctgggaggagttcagccgcgctgccgagaagctttacctcgctgaccctatgaaggagtatgctgctgctgttccgctttgcgtcctcgctacaaac

SEQ ID NO: 599020 - DNA, 74 bp, Homo sapiens
gctcatcatgatattgtacgatttctggtacagttagatgactacagaactatgaatagactgacccagctgga

SEQ ID NO: 599021 - DNA, 75 bp, Homo sapiens
ttcgatgatcgtgtgtcggatgaggagaagcaagtttatttctgatcgtgaaagtagaagaagtctcacaaacag

SEQ ID NO: 599022 - DNA, 82 bp, Homo sapiens
cgcgggaggtgttcgagaacgaccccgagacgctgtgagccgtgagctttgaggcggtgggatgtgtcagcagaatgtctcc

SEQ ID NO: 599023 - DNA, 98 bp, Homo sapiens
cttccctccgtgtcctgaaaagtgcgaccgttctcccaaggaatttccacggccaccatggcggagctgcaggaggtgcagatcacagaggagaagcc

SEQ ID NO: 599024 - DNA, 100 bp, Homo sapiens
atctgcaaagaacagaccgttcagtatatactaactatggtggatgatatgctgcagggtccctgcaagtcatgaacaaaacgagaaagattatggaaca

SEQ ID NO: 599025 - DNA, 90 bp, Homo sapiens
caaagccaatgggaatcacctggttcaagtgtggcaaaggagcagagaactttgacaagttcttcacacgaggacagcccgtcttaacac

SEQ ID NO: 599026 - DNA, 88 bp, Homo sapiens
attttcatgcatcattttttcaaaataggatcccagatgcagtgactggttactacctgaaccgtgctggctttgaggcctcagaccc

SEQ ID NO: 599027 - DNA, 87 bp, Homo sapiens
cgggtctcaggtcatggcggtcgcggggcccgcgcccggagctggcgccagatacttggtgcttgaaaaactgaagaaggaagacgc

SEQ ID NO: 599028 - DNA, 100 bp, Homo sapiens
ggagagtcgaagcagcagctctcgctccagaagcttcactttggactttgtttggagaagctgcctatttcttcttctaccagtaatctccatgtggacc

SEQ ID NO: 599029 - DNA, 75 bp, Homo sapiens
aaagcaaaggagtcagggatggctcttcctcaggctattgagggcacctacattgacaagaaatgccccttcact

SEQ ID NO: 599030 - DNA, 82 bp, Homo sapiens
tgatgatggacatcggctccacccgggtggctattatcatggaaaactaatttttcccagagaatttcctttcaaacctccc

SEQ ID NO: 599031 - DNA, 82 bp, Homo sapiens
cgcaggagaagaacaccctgccgaccaaagagaatctgattccggagctgccatgattgaagtggtagcagagctcagccgg

SEQ ID NO: 599032 - DNA, 100 bp, Homo sapiens
caacaagctctccaagacctccggccagcccagtgatgcgggcagcaggcccctcctgcgcacaggttggagcaaaacgtcccactcactggaggcacct

SEQ ID NO: 599033 - DNA, 98 bp, Homo sapiens
cagcagacaaagactatggtttaatgaaaatagatgaaccaagcactccttaccatagtataaatgtcatgaaacagctcattggttcatctaactta

SEQ ID NO: 599034 - DNA, 100 bp, Homo sapiens
tggaggagcagttgtctgatgaagagaagctcaaggatctaaatttacttgatcgctgtataaaagaaacattaagacttagacctcctataatgatcat

SEQ ID NO: 599035 - DNA, 80 bp, Homo sapiens
tgaaattatccaaagcatcactgacgttttaaaatcaaagatgggaaaatcggagaaaattgcccttccccatggccagc

SEQ ID NO: 599036 - DNA, 100 bp, Homo sapiens
ctgagtgagtgttacaacgagaaggggggcatcccaggcaaggcagctaccaagcacaggtgtgaagaattcagaaggagctggcggacatcactttaga

SEQ ID NO: 599037 - DNA, 88 bp, Homo sapiens
tcagtacgcgaaggatatcggtttcattaagtcatctggggacctggagaatgatgagcaggcagccagtgccatctctgagctggtc

SEQ ID NO: 599038 - DNA, 82 bp, Homo sapiens
tagaatttatgtccaccagtgctgtggcttccaggtctcaaaggcagaagttggtgttggtattaggagatctgcacatccc

SEQ ID NO: 599039 - DNA, 98 bp, Homo sapiens
ttctatcctgctctgtggaagaaatgggcatgccagatgcctggaagatcagaggctcacattccagagaaccatggagtctggcagtaccgccgcca

SEQ ID NO: 599040 - DNA, 100 bp, Homo sapiens
gggcatggtggtctggggcaacgcggaaggccagcgatctgtacatgagacccaggaattatttccaaagcaagattcatatgctgaaggggtaacagac

SEQ ID NO: 599041 - DNA, 111 bp, Homo sapiens
tgaatttctgctgaatttccttctgcctgctgcccgatttctatttgactggcaatagtctgatttggcagctgatcggaagctctttcgtcttgtctccaatgactcctt

SEQ ID NO: 599042 - DNA, 90 bp, Homo sapiens
acaatatctatattctggcccatcaggatctcatagatcagaacatactggagcctgtaacccgtgcacagagggtgtggattacaccaa

SEQ ID NO: 599043 - DNA, 82 bp, Homo sapiens
gtcattttactgtcaagacatttcttcggcattctgcaacagaacatacatatgatagttgagaaagacacatattctgatc

SEQ ID NO: 599044 - DNA, 50 bp, Homo sapiens
ctttctcttcctctgggtcacaggcagagaatgctctcatcactcagtca

SEQ ID NO: 599045 - DNA, 100 bp, Homo sapiens
ttatactggtgagaaatcttagaaatctgaagaatgagacaaagcctttaaatggttgtcacacttgattgtaggacgacttgaaatatggagtgtatcc

SEQ ID NO: 599046 - DNA, 75 bp, Homo sapiens
gaatctgcatggaatatcaggaaactgagtccaacactatgctggtttgaggtcagcttttgccaactgttttca

SEQ ID NO: 599047 - DNA, 51 bp, Homo sapiens
gccatgactcaaagaaaactgagggctacatatcgaaatcgaattgtgagc

SEQ ID NO: 599048 - DNA, 100 bp, Homo sapiens
tggtttgtgtatcctgggaacccactgaggcacccggacctcgtcaggccgctgcagatgaccattccaggtcttgagagctgatgacaataacatgggc

SEQ ID NO: 599049 - DNA, 83 bp, Homo sapiens
ctttgtggaatattcccatctcctgcctcctaatagctttgaggtgcctggagaagttccctgtgatccagcacttcaagttc

SEQ ID NO: 599050 - DNA, 75 bp, Homo sapiens
aggacacacagacccagctggaactcggcaaactcagctttcaccagacccaggtgtcccagcgcctggccaccg

SEQ ID NO: 599051 - DNA, 97 bp, Homo sapiens
acgggaggacggggaaaaagcggccaaagaagtgaagctgctgctactcgggaaaagcttcactctgaccatcactgtcttcacaaacccaccgcaa

SEQ ID NO: 599052 - DNA, 98 bp, Homo sapiens
atgcagcctttgccaccagcctggacacacccgtcccttttgtcctcagaacagatgagctcaggagtcatgtgctgttcctggggcttggatgatgt

SEQ ID NO: 599053 - DNA, 96 bp, Homo sapiens
caggcagggaggagaccggcacccagacaggtggcgaaggcagaggaaccctctttcccagctgcccgctcctcagcacccgaagattcgcctgta

SEQ ID NO: 599054 - DNA, 100 bp, Homo sapiens
tctcaggcattaacaccatcatgtatctgatcaatgtcacttttgaggggaggaatttgtccttcagtgaagatggctaccagatgcacccgaaactggt

SEQ ID NO: 599055 - DNA, 100 bp, Homo sapiens
aaaaaacacaaatgaattctataagaccattccccggttttattatagggtaaatcttacaaaccattgtggttttatgggaggactacaaaaaaacaaa

SEQ ID NO: 599056 - DNA, 87 bp, Homo sapiens
gaacggcggcgggtacggcggccccgcgcagcccccggccgcagcgcaggcagcccagcaggcgtccgacctccgatcatgaacggg

SEQ ID NO: 599057 - DNA, 100 bp, Homo sapiens
aatggccgctgtgtggttgcaacggagataaattcccggaaccgcgattcggcgtgtcaggtatgtgaggagcagcgctgtgaggaggaagtcttccccc

SEQ ID NO: 599058 - DNA, 51 bp, Homo sapiens
cgccgcagtcccgggaacggaggccatggttgcttgttatccgggcaatgg

SEQ ID NO: 599059 - DNA, 100 bp, Homo sapiens
gaccgtgtgtcagaacaatcttgaatcatgaagctactaaccagagccggctctttctcggcatgaaagatggccagaagataacattccatggtgaagg

SEQ ID NO: 599060 - DNA, 72 bp, Homo sapiens
acaacgaccacaggaatctggaattttattaaacatgggagttctgggaaatcgttcattcatttacagatg

SEQ ID NO: 599061 - DNA, 100 bp, Homo sapiens
atctgtgagtcttctggcaaacagtgtttgcctctggttcagctcatacaacagcttcttaggtacaggtgaacaaaggcagagtaaactgtcaccccag

SEQ ID NO: 599062 - DNA, 76 bp, Homo sapiens
ttgctgcatcaagaaacccaagctgctgaggtgccttattaagtggctggaggttcgtaaagtgtgtcccctgtgc

SEQ ID NO: 599063 - DNA, 75 bp, Homo sapiens
gccgggccggcggagcgcgcagcgggggctgcaggaatcagagatcattgatttcttcctgggggcctctctcaa

SEQ ID NO: 599064 - DNA, 74 bp, Homo sapiens
tggtcggaatcagatttgaaaatgaaagtggttggggtctgctaggtccccggaatgagttgtttgacgcagcc

SEQ ID NO: 599065 - DNA, 100 bp, Homo sapiens
agcagttgttgcacaggtaacagtattgcctgtcagggcacccaaccttaccatgcaatgtgctcaaattcaaatcaaccaccattatgttggactgcgg

SEQ ID NO: 599066 - DNA, 95 bp, Homo sapiens
ttagagagagatgtcccagaagatgttgcacaagaaatggtggaagcactgcaggctcagctgggagagcagaccaaactttctcgagaacaaat

SEQ ID NO: 599067 - DNA, 112 bp, Homo sapiens
cagatggcggatgccctgcagtacctgcagaaggtctctggagacatcttcagcagcggagcgtgctttggacaccatgaattttgatgttataaagggcaagccagtacgc

SEQ ID NO: 599068 - DNA, 101 bp, Homo sapiens
gaccgagaccgtgaccgagagcgtgaccgagagcgcgaatatcgtcatcgttagaaggctcctcctcagccatcctggccgtgctcagtcatctgaccagc

SEQ ID NO: 599069 - DNA, 111 bp, Homo sapiens
tcttcccggcccctgaagttggcactgcagcagacagctccctgggcaccaggcagctaacaggctctgtgtgctccgggatggagcaggtgtgcagagggtgagaaccca

SEQ ID NO: 599070 - DNA, 75 bp, Homo sapiens
ggctatggaacaccatatggttacagcacagctgcccctgcctatgggcagctcagttctggcaccaaaccaaat

SEQ ID NO: 599071 - DNA, 87 bp, Homo sapiens
cagcagaggaggcgggggcagccgctgagacggtttttcacaagatcaggatcctcatgaccagccaaagagaagaagaattaggaa

SEQ ID NO: 599072 - DNA, 51 bp, Homo sapiens
agtgaattcggattgtttgctggtgttggggatgtcctttgcactgaccct

SEQ ID NO: 599073 - DNA, 97 bp, Homo sapiens
cagcgattggacagaatttgtgaaggacgcaatgagcccctgaagaaagagcggcttaagtggaagagcgactaccccatgactgacgggcagctgc

SEQ ID NO: 599074 - DNA, 83 bp, Homo sapiens
ctgattctttaagaaaatcagataacttgtactggagagaaatcctacaagtgtggataagaaactctttaagcctccagtgt

SEQ ID NO: 599075 - DNA, 80 bp, Homo sapiens
caactattcgcagtccgagcggactggcattgcggactgacctccagggagaggcccagatctgatctgcagagatctcc

SEQ ID NO: 599076 - DNA, 100 bp, Homo sapiens
tcgtcgacatgagtgatgtggaggaaaacaacttcgagggcagaaaggatgccctgcagtggtctcgccatccagctacagtggagggagaggagccaga

SEQ ID NO: 599077 - DNA, 83 bp, Homo sapiens
cgcccacgaggtcccctcgaggaacatcttttcaacatgctgctgctgaagaaacacacggaggacatcagcagcgtctacga

SEQ ID NO: 599078 - DNA, 75 bp, Homo sapiens
tgcccgccgaccctcagcatcctcctcagaaaggctggtggcatcaggctgcaggtcaaggtgatatgaggcagg

SEQ ID NO: 599079 - DNA, 74 bp, Homo sapiens
atggcactcagcagcaagcacagagtatgaccaccactattaaacctgcctagagctggaacgttacctccaga

SEQ ID NO: 599080 - DNA, 100 bp, Homo sapiens
agaggccgtgcgggacgcgggcgccaggaccggccgaacgcagaggtccacaaggcgattacaatttccagtcccctaaccacagacctgactgcagagc

SEQ ID NO: 599081 - DNA, 50 bp, Homo sapiens
cgcggggactgcaaccctaatcagagacggtctcgccacattgcccagac

SEQ ID NO: 599082 - DNA, 75 bp, Homo sapiens
cgacggggccaggaagcaattctggaagcgcagcaacagcaagctcccgggcagccttttgtcatacatgatatg

SEQ ID NO: 599083 - DNA, 83 bp, Homo sapiens
ggcggacagattgaccttcagagcgagacatctaggcttgctgtcaaggcttctgatcaacatgagatgaccgccgtgtggta

SEQ ID NO: 599084 - DNA, 95 bp, Homo sapiens
gagtcagtgtgacagtccatatgtaaccaaatattatggatcctatctgaagacattgctacaagtggttggtgtggtctctgtggctgtggccg

SEQ ID NO: 599085 - DNA, 100 bp, Homo sapiens
cgcgcctcggccgctgcctggacgacgtgaaggagaaattcgactatggcaacaagtacaagcggcgggtgccccggcttcgagagcatgcagaggctct

SEQ ID NO: 599086 - DNA, 82 bp, Homo sapiens
aaaggatgagcggaaccttggaaaaggataccagaaggccctattgatcaggggccagctataggaagagtacgcgttttag

SEQ ID NO: 599087 - DNA, 85 bp, Homo sapiens
aggaggtgtctttaccaaacttattaataggaataccactattccaaccaagaagagccagatcctaagtgtgaacgtgaagtcc

SEQ ID NO: 599088 - DNA, 50 bp, Homo sapiens
tggctgaggagttttcaatcccagctatgtccaaactgggtcttcggcag

SEQ ID NO: 599089 - DNA, 100 bp, Homo sapiens
gccaaggggggcctggccagcctggcaaaagatggtttttgccaatccagaagactgtgtagcatttggcaaaggagaaaatgccaagaagtatcttcga

SEQ ID NO: 599090 - DNA, 98 bp, Homo sapiens
agaaacaaggatttctactaagagaacatttcacacctgaagcaacccaattagcatctgaacaattgcaagcagtgtttggagaagagggattgacc

SEQ ID NO: 599091 - DNA, 96 bp, Homo sapiens
agcagagacaccaggacagaaaagacagtgttctgctttcatggagttcacagaagagtcgaggaggaagtcctggctgagcaaggttggaagccc

SEQ ID NO: 599092 - DNA, 82 bp, Homo sapiens
ggcctgcagcgggagctggacggcgagcgcgagcggcgcgagaaagaacctcctggacaaagacatgttttccaagtccgac

SEQ ID NO: 599093 - DNA, 101 bp, Homo sapiens
ccctccacgcggaaagaagtaccttcgccggtcaccggctcctgcaggatccagacatttaatgtggatgcaccatgccagaccgtggaagatttaacgaa

SEQ ID NO: 599094 - DNA, 100 bp, Homo sapiens
caagaatcctcagagccaggctgtagaggggtttaaagccaatttgtctctcttgaggaggcctggagagaaaacttacacacagcgatgtcggttgttt

SEQ ID NO: 599095 - DNA, 75 bp, Homo sapiens
gacaatgtccctcacaccccttccagctacatcgaaacattttggaaccagtactagcagtggaggactctttgg

SEQ ID NO: 599096 - DNA, 75 bp, Homo sapiens
actactggggccaggagctccccacagccgggaagattgtcaagacagagcgggatgccaccagcttgtccaaag

SEQ ID NO: 599097 - DNA, 75 bp, Homo sapiens
tcagcctcctgaatagctgggactacagtctgaaccaatcagagtccttgtgactggagcagctggtcaaattgc

SEQ ID NO: 599098 - DNA, 48 bp, Homo sapiens
gagggaggatgttaaagccccgcggttactataacaacagtaccaagg

SEQ ID NO: 599099 - DNA, 82 bp, Homo sapiens
atgctggccaagaagatcatcattaaggacggaggcacgagatggagtctcactgtattgcctaggctggtcttgaactcct

SEQ ID NO: 599100 - DNA, 100 bp, Homo sapiens
cagggcatcaaggccggggacgcactctggctgcgcttcaagtactacagcttcttcgatttggatcccaagtgatgttgcacctgtaaccatcttttta

SEQ ID NO: 599101 - DNA, 75 bp, Homo sapiens
ttgtgtcttccccggccggtccctcgcctcccggccgagctgacggttcaaaatcaaaggaagcccagaagggag

SEQ ID NO: 599102 - DNA, 75 bp, Homo sapiens
ggaaatcgtgcacttgcaggccgggcagtgcggcaaccaaatcggcgccaagacaggaacacagaggacgatcgc

SEQ ID NO: 599103 - DNA, 120 bp, Homo sapiens
gtacagccatgcaggcatggagccctgcccagaatcaccccatttacctagcaacagaggccagtgctgctgaggaagcagatgtgcacgtagctgtggtggtgagaccaggcaacgcag

SEQ ID NO: 599104 - DNA, 100 bp, Homo sapiens
agaatcaactgaggcgcctgcaggacatggagagatcctcccaagaaggtgaccacagtgattcaaaaccccatgccgattcgagaaggagacacagtga

SEQ ID NO: 599105 - DNA, 98 bp, Homo sapiens
gccttcgtacccgtcttgattgaggagaggcagatgcgaaccagaacaatgggacctcctctcaggacacagcggtgactgactccaagcgcacagcg

SEQ ID NO: 599106 - DNA, 75 bp, Homo sapiens
atgagcgaggagacggcgacttctgacaacgagtggaagatgcaatgctgatgtttgataaaactaccaacaggc

SEQ ID NO: 599107 - DNA, 118 bp, Homo sapiens
ggagccgcgaggagacagctgaggcccgcggagaccagggctctgcttatgataatgtcaacaaagttcgagtagctatcaagaaaatcagcccctttgagcaccagacctactgcca

SEQ ID NO: 599108 - DNA, 83 bp, Homo sapiens
aacaggctaaattagaaaagggagtattttgtcaaagttgaaggttgagaacttgttgcttagtaaccaagggaccattaagc

SEQ ID NO: 599109 - DNA, 90 bp, Homo sapiens
tgtggaaacgtctccaggttacaaacccagatctcacacaagtggtcagtttggttgtggaaagtgccggtggtggtgtgcacattgagc

SEQ ID NO: 599110 - DNA, 100 bp, Homo sapiens
tcaaactcccaggctcaagcaatcctaccatgtcagccttcccagtagctggaactacaggccgccatggcatcagatgaaggcaaactttttgttggag

SEQ ID NO: 599111 - DNA, 76 bp, Homo sapiens
cagagcgtcacggcgtacgccctcatggggaaaatctccccggtgactttcagttctacagcgagtcgggcatgcc

SEQ ID NO: 599112 - DNA, 75 bp, Homo sapiens
ctgggggttcggggagcgcttggaccccggcttctgggacgcgtcaggctccacataaacacggtttccttgaag

SEQ ID NO: 599113 - DNA, 96 bp, Homo sapiens
ctgagcaccgtctcccagtacgaccgggacaagtactggaaccgctttcgagacgagtggagtcaacatatcaatggagcaagtcacagtcgtcga

SEQ ID NO: 599114 - DNA, 73 bp, Homo sapiens
agacaccactttttagtaggcaaagacacttctaccacaacaatcagccttatgtttgatcatcggccaaggt

SEQ ID NO: 599115 - DNA, 80 bp, Homo sapiens
actacgtctttgactggaacatgctgaaattcagaggtggagaagagcgagtacttgagaaagaagaggaagaagatgat

SEQ ID NO: 599116 - DNA, 96 bp, Homo sapiens
ctgcccgccgccagcatgttgggcgccccggacgagagctccgtgcgggtggctgtcagaccagatgatgtgcttctgcatcgcactcatgatgag

SEQ ID NO: 599117 - DNA, 82 bp, Homo sapiens
ggacttcggcgcgggactcaagtacaactcccggcacgagacgagatgatgcctattggccagaaggaaagcgtgtggcaat

SEQ ID NO: 599118 - DNA, 74 bp, Homo sapiens
caaaactgcagccatcttcacagcagtgtactcgacagattatctctgagaagctaggccgtggctcaagaact

SEQ ID NO: 599119 - DNA, 104 bp, Homo sapiens
gaccgccgcccgactgccatcgcccggcccggccgcgcccgcggaaccagaccagtgaagatagtgatccggggagacaggaacacgggcaagacagcgctgtg

SEQ ID NO: 599120 - DNA, 74 bp, Homo sapiens
ggtctcggcaggctcttcgggaaggtgagaaagatcagtctaaagaaaaggagaagaaagtgaaaaaaacaatt

SEQ ID NO: 599121 - DNA, 75 bp, Homo sapiens
ccagactcaggcgccccaacaacaaccaggattggagttgctgttaatggggtccgcaagcactgctcagacaag

SEQ ID NO: 599122 - DNA, 97 bp, Homo sapiens
cggggcctggcggtcttcatctcggatatccgcaactaatctccggcctgtgaaactgtgaggggattcggccaagacgtcctcttccctctgcctc

SEQ ID NO: 599123 - DNA, 100 bp, Homo sapiens
cttcattccatcatcaatcctcccatagctaagcaaaggcagctcgagcatctcatctgacgtgagttcaagtacagatcacacgcccactaaagcccag

SEQ ID NO: 599124 - DNA, 50 bp, Homo sapiens
gcaagaagaacatcccgcggatcacggagaactcctggaagccccgtctt

SEQ ID NO: 599125 - DNA, 98 bp, Homo sapiens
ggcaacatggtgcggtcggggaataagatgagatcgtggggctcaccagcgtcccccatggcttctgagtagcgtgggagtggagtcagcaccaagcc

SEQ ID NO: 599126 - DNA, 74 bp, Homo sapiens
aaagagtagcctgggctgtctggaaatctgaggtaagaatgattgatgttggctgatattggagtgctcattca

SEQ ID NO: 599127 - DNA, 90 bp, Homo sapiens
caacagaccaccccacaggctcagcaaggacagcagcagctagatgctggtgtgccagaaaaaataagcctgatttccagagatgagaag

SEQ ID NO: 599128 - DNA, 75 bp, Homo sapiens
gtggcaggttcaaatggctggtataattataggcaccaggggctttgttatgcacctaaagccatattggaagct

SEQ ID NO: 599129 - DNA, 89 bp, Homo sapiens
gggattacaggcacgcgccaccactcccaggatcctaagcacttcaagtcagagaagacaggacggggacagttgagggaaggctggag

SEQ ID NO: 599130 - DNA, 75 bp, Homo sapiens
acacaccctcgtattctcctgcccttccccaggttggatttggtctagggagtcccagaaagaagtagaaaaaga

SEQ ID NO: 599131 - DNA, 100 bp, Homo sapiens
tttcaactgctgtattgcagaacagcctcagcctgctggacgtaaagaaagaagtgatgcactcaattctgcaatagataaaatgaccaagaagaccagg

SEQ ID NO: 599132 - DNA, 100 bp, Homo sapiens
agattgccctcttagactcccccacagctttaagtatggaggaaaaacttcagcagaatgaagcaagagctagagtaccgtggcacaatctcagctcatt

SEQ ID NO: 599133 - DNA, 97 bp, Homo sapiens
aactcctgggctcgagcgatcctcccacctcagtctcctgagtagctatgactacgggcaccttggaagttgttttcaaccatatccagcctttgcc

SEQ ID NO: 599134 - DNA, 100 bp, Homo sapiens
ctaccaagacttcgaggcagatattcctccccagcatgtcagcatgaccaagcgcctctactacctctggatgtgagaactacgatgacccgcacaaaac

SEQ ID NO: 599135 - DNA, 74 bp, Homo sapiens
tcagacagaatctattaccttggtgtatcaatatatgcatgaaacgataactgttaatggctgtcccgaattcc

SEQ ID NO: 599136 - DNA, 90 bp, Homo sapiens
gaaaaattgactgtatcctatgatgaagcaggacagtcattttgtttactcattcagccctgttgcaggtcccaataaactcttcataag

SEQ ID NO: 599137 - DNA, 75 bp, Homo sapiens
gacagccctgtgtgacaccaagataagtaacgagtttccagatgtcttggaatgcactgtatctcatgcagtaga

SEQ ID NO: 599138 - DNA, 50 bp, Homo sapiens
cgcccgcctcccgcagaccatgttccatggatcgaatcatcaatttagtt

SEQ ID NO: 599139 - DNA, 100 bp, Homo sapiens
ctcaggagctcaactgatcacggctttcacgacaggctaagcttatgttcctgaggaagaattgaaggcagcagaaatagatgaagagcacgtggaggat

SEQ ID NO: 599140 - DNA, 100 bp, Homo sapiens
taggagaagcactgttgttttccacacaggtgtcagctgtgatgcatgtttaaaaggaaattttcgaggtcgcagatataagtgtttaatttgctacgat

SEQ ID NO: 599141 - DNA, 82 bp, Homo sapiens
ccgttcttgcctcaggccagtcgcctccaggccaagagggatccttcacccgtgtctgacacgatgaggcgagtggtacgac

SEQ ID NO: 599142 - DNA, 98 bp, Homo sapiens
ccaaaggcagcaaaaacaagagtccctctaaagcagctcaaaagatcggacagctggcttttaaaggaatgaagagactcaatagaatccagtcaata

SEQ ID NO: 599143 - DNA, 100 bp, Homo sapiens
ttacactgacagaagcagtggtcgaatccagtagaaaactggtcaaggaagctctatccgtggtcctgaaccagttatgtgtgttgcatgagaaaacgcc

SEQ ID NO: 599144 - DNA, 80 bp, Homo sapiens
gggcactgcccagtgggctgatctttcctcccaggatatgggccctcacattttccaaacctgtccatctgctaactatt

SEQ ID NO: 599145 - DNA, 75 bp, Homo sapiens
agctgtataatcaaacctccaatccacctggctctccggttctgctccagacgagcccttaccacgttgactcac

SEQ ID NO: 599146 - DNA, 89 bp, Homo sapiens
cagggcacaccaaactccatctggccaccagcccctcgggttccaagatgcagctactggagacagagttctcacacaccgtgggcgag

SEQ ID NO: 599147 - DNA, 51 bp, Homo sapiens
agtccggacatctgaaacttggggaatcccggaggcaagacacttgaggag

SEQ ID NO: 599148 - DNA, 87 bp, Homo sapiens
caagaacagagatggcggggagagacggccaagcagcaccagcgtgcctttgggtgataagggtgcctggatcaaagtggaacagct

SEQ ID NO: 599149 - DNA, 88 bp, Homo sapiens
gaagccaacactaaaccacaaatatacaacaaggccattttctcaaacgagagtcagcctttaacgtctcgctctgtcgtccaggctg

SEQ ID NO: 599150 - DNA, 84 bp, Homo sapiens
ctggtgcagccaccctcgctccctctgctcttcctcccttcgctcgcaccatgcgtgagtgcatctccatccacgttggccagg

SEQ ID NO: 599151 - DNA, 98 bp, Homo sapiens
gactctatatctgaaacagtcgacttaaacaaccaggaaactgtcaaagtgcaaatacacagcagagcttcagggtctcattctgtcagccaggctgg

SEQ ID NO: 599152 - DNA, 88 bp, Homo sapiens
gggtttctgttaaggaactcgatttatatttggcatactttgtgcatgcagcaggtcaaatgggctctctcattcttggagtgaaagg

SEQ ID NO: 599153 - DNA, 75 bp, Homo sapiens
ccgaggtggagctgcggggccctggcatgaaaggtatctacgagaccccagcaggcaccatcctttaccatgctc

SEQ ID NO: 599154 - DNA, 100 bp, Homo sapiens
tgggtattactttgcaatcgatcctaatggttatgttttattacatccaaatcttcagccaaaggactactgttcgaagatttttggaagaatactgaga

SEQ ID NO: 599155 - DNA, 75 bp, Homo sapiens
caagaagccagtcaagcggccaggtaactaggatttctacctcaaccgcgagacctatgcaaggacggtgtggac

SEQ ID NO: 599156 - DNA, 90 bp, Homo sapiens
gccttttgggcagcttttccggcctgacaacttcatctttgccttgaaaagatcttttgaggtcgaggaggtcgagacacccaactccac

SEQ ID NO: 599157 - DNA, 75 bp, Homo sapiens
taccttcagtttgtggcagctctcacagatgtgaatacacccggccaagagccactgcacaatgaggagctggca

SEQ ID NO: 599158 - DNA, 75 bp, Homo sapiens
ggttcgaagggaagtaagaaacagatggaagtgcatcttagaagatttagaatgcaatgtgcaaggaaattattc

SEQ ID NO: 599159 - DNA, 88 bp, Homo sapiens
gcggcgagcagaactacggcgagcggccacaatggtgcgcatgaatgtcctggcagatgctctcaagagtatcaacaatgccgaaaag

SEQ ID NO: 599160 - DNA, 82 bp, Homo sapiens
caaggcttttgaagactggctgaatgatgacctcggctcctatcaaggatcaagaagtacgagaagctggagacggaggagg

SEQ ID NO: 599161 - DNA, 82 bp, Homo sapiens
cggagctgttcctattgggccatcttggctccaccaccctggaatgtatcctgtcaggtataatgtcagtgaatggcaagaa

SEQ ID NO: 599162 - DNA, 90 bp, Homo sapiens
gcaacgagttactgccgataatgaaacctcatggctcttcagagtaacctgaggtactccttgttgccaagacggctcctcatcagcaaa

SEQ ID NO: 599163 - DNA, 82 bp, Homo sapiens
ccgagctttgcgggaaagcagcggtcagcccaaggccaaccccactgtcactctgttcccgccctcctctgaggagctccaa

SEQ ID NO: 599164 - DNA, 97 bp, Homo sapiens
ttaatttatacactttattattggaaatcttcaagttcaggaaagtatactgcattggaacaaaaactgaaaaaattgacggaagatttgagttgtc

SEQ ID NO: 599165 - DNA, 83 bp, Homo sapiens
ctgcgttgtaccatccgcctgtgggacacctaccagacaatgcagatcttcgtgaagactctgactggtaagaccatcaccct

SEQ ID NO: 599166 - DNA, 101 bp, Homo sapiens
ctggaaagcaagggattgctggctacagcttcagaagaccgaagcgttcgtatctggaaggctttatcctgtggataaacgcagagtgaacgagtttgggg

SEQ ID NO: 599167 - DNA, 75 bp, Homo sapiens
taatggtggatgaagttgttcattgtttgtcaccacaaaaaggacaggctgtggaaaatctctgttctcacaaag

SEQ ID NO: 599168 - DNA, 75 bp, Homo sapiens
tcccacactttcaatggggaggcccacccaggttttttgccctgacatctcttcgtcttgtgtttttacttgcat

SEQ ID NO: 599169 - DNA, 100 bp, Homo sapiens
tgcaagtgagaacatatttaacagggactgctgagatgtcctctattcttgaagagcgtattcttggagctgatacctctgttgatcttgaagaaactgg

SEQ ID NO: 599170 - DNA, 75 bp, Homo sapiens
gtggacgctcagacacctattaccagagggttctgatgactgtcttgtgaaaatatgggcaacagatgatgggag

SEQ ID NO: 599171 - DNA, 100 bp, Homo sapiens
gtgggtgcggcggcagcggcggcggcgcccgcgggtggtataaaatggcggatttcgaagagttgagggcgtctgtagaggcttctggtgaaatcgcatt

SEQ ID NO: 599172 - DNA, 82 bp, Homo sapiens
acagaggtctccagagccttctctctcctggtgaggaagaggatggagatgaagatgaggaagctgagtcagctacgggcaa

SEQ ID NO: 599173 - DNA, 100 bp, Homo sapiens
ccatcaccacgcagaacgtcaacaccaagtgcatcaccatccccaggcaccccccgagcccagctccacacaccgttcctggatctcctctccccaggcg

SEQ ID NO: 599174 - DNA, 100 bp, Homo sapiens
ttgaagccaacggagaactcaaggtcttcatagaccagaaccttagtcccgggaaagataaaatttgatgctgggactctccttcttagtacacaccgac

SEQ ID NO: 599175 - DNA, 100 bp, Homo sapiens
gataaagaccaagaagtgggattactggattatatgctctatagtatcaaccctccttgctcttatggatggattagataataggggtgaaattgttgtt

SEQ ID NO: 599176 - DNA, 83 bp, Homo sapiens
cacagccaatttcatgctccactataggcctagccgcccgtgactctcacactgtctcctgcatgacgggtggcgcctcccgc

SEQ ID NO: 599177 - DNA, 88 bp, Homo sapiens
gggacatcactgaattcaaatgactatggttatgggggacaaaaaagacctttagaagatggaggaaaactgtttgtatgtggtggct

SEQ ID NO: 599178 - DNA, 80 bp, Homo sapiens
aattctctgagtaggaacaatgaaggaacagcacaggagaaggaggagagcgatgttgacctaacagccacgcagagccc

SEQ ID NO: 599179 - DNA, 90 bp, Homo sapiens
atttcccgcaggaacaatggcgctgtcttcagtggcacagtggagcagctctgaagatgcaaagggctagttgcacatagtgatttagat

SEQ ID NO: 599180 - DNA, 102 bp, Homo sapiens
acagcactgccaaatagcagaagaataccatgaggtcaaaaaggaaatcaccctgcttgagcaaaggaagtatgcctggactgttgcccagtgtaagatctg

SEQ ID NO: 599181 - DNA, 75 bp, Homo sapiens
cagccttcctgtgtggttttaccgcccagagagcgtcatggacctggatgccatggacaatattaccaggcagaa

SEQ ID NO: 599182 - DNA, 87 bp, Homo sapiens
caaacatcaggctgggataacaacgcctccaaatcgagggtcagctgattagccaccttagttccatctgcaactttagttcccact

SEQ ID NO: 599183 - DNA, 97 bp, Homo sapiens
cgaggggctgcaagagcccctcaccctgagctggggcgtggtgaccaagatgaagatgcagaggaccattgtcatccgccgagactatctgcactac

SEQ ID NO: 599184 - DNA, 90 bp, Homo sapiens
ttcggctgcgcggcggggctgaggcggccgcggggcccgagcgcagaagccccatgtgccactcccctgatctgcagcttcggtaggccg

SEQ ID NO: 599185 - DNA, 75 bp, Homo sapiens
agccccgcctgaggtgccctaaacacactatgaccgttttcctgggggggctcaggaagctacttcaacaacctg

SEQ ID NO: 599186 - DNA, 80 bp, Homo sapiens
ctgagagaaacccactgaagacgtctgcgtgagaatagagaccaccgagtaagactttgaccccgacgcaggcttcagtg

SEQ ID NO: 599187 - DNA, 75 bp, Homo sapiens
ggcaaaaccacttacagctgaaaagaaagaatcttcaagagggagacatagggaaaaggaagacataaaaatcac

SEQ ID NO: 599188 - DNA, 99 bp, Homo sapiens
cggagagccccggagtgagcggagtagcgagtcggcaacccggaggtgattttcttccacccccacctccacctctagatgattccagtgcccttccat

SEQ ID NO: 599189 - DNA, 83 bp, Homo sapiens
catgaacttaggggcacttctgttttcctgagggctacaccgttttcttttgaaagagatttattgctaaacatgggtgcatt

SEQ ID NO: 599190 - DNA, 82 bp, Homo sapiens
cgtcatccgcggctacgtgggcaaccgggcggccacgttcccgctgcagaaacgcttcgttaagggactcaggcagtacggg

SEQ ID NO: 599191 - DNA, 100 bp, Homo sapiens
atatatcttcaagcagaagaacaagaggtgttgcctgaagaggatctatctggttcaatagatgacctccccatggggacagaaggagctctgagtcctg

SEQ ID NO: 599192 - DNA, 100 bp, Homo sapiens
agctgaggaggggagtaaattgaaaatattggggccatttagtaacttctttgcaagattttcagctgaactctcatctctcaacactggcaaatattca

SEQ ID NO: 599193 - DNA, 100 bp, Homo sapiens
tctcagatgttggatatttgcttggaaaaacgtgtgggtacgaccttggaactgtggctgcaccatctgtcttcatcttcccgccatctgatgagcagtt

SEQ ID NO: 599194 - DNA, 75 bp, Homo sapiens
attgttttttctacctgttgacgtgtcaagcactaactcgggtattcccctacatctcagccatggtgaacaacg

SEQ ID NO: 599195 - DNA, 73 bp, Homo sapiens
ccaccccacctgccaccgaggccccctcttcgcctcctccaggatcttagaaatgaagttgaaaaattacgca

SEQ ID NO: 599196 - DNA, 100 bp, Homo sapiens
cgtgcctgtcttcagatcttcacagcacagttcctgggaaggtggagccaccagcctctccctgagagaagaagaaggaggttcctgctgtgccagaaac

SEQ ID NO: 599197 - DNA, 75 bp, Homo sapiens
cggcttctccccgcgggagcccccagcatggtttctaattaggtgtggagttgcaagagctctggaaaagatgtt

SEQ ID NO: 599198 - DNA, 100 bp, Homo sapiens
cgagctgccacacggcctgcactctgcgctttgagctactgggctgtgagctgaacgcctactcagtgtgaagacaaccaggatgaagacctttataatg

SEQ ID NO: 599199 - DNA, 82 bp, Homo sapiens
cttggagtctttgtccaggacggtgacagagctgaatgaacctctctccaatgaagatcgaaatctcctctctgtggcctac

SEQ ID NO: 599200 - DNA, 75 bp, Homo sapiens
gatattgaccatgatggaatgcttgacagagatgagtttgcagttcatttgaagacacttcgtcacccttgcttg

SEQ ID NO: 599201 - DNA, 74 bp, Homo sapiens
acatatgatgattccgttggagtagaagtgtccagcgacagcttctgggaggaaaaggccaaagttgttgagcc

SEQ ID NO: 599202 - DNA, 100 bp, Homo sapiens
ctgggaagaaagtgaaactatctcatgaagaagttatgcagaaaatcggtgaactctttgctctaaggccccgatcgaaaagcctgggagggccgccgaa

SEQ ID NO: 599203 - DNA, 101 bp, Homo sapiens
cgcagagccgagtgcagaagatctgggtgcccgtggaccacaggccctcgttgcccagatccccctcggaaaaccacactgagagttgcattaaaaaccag

SEQ ID NO: 599204 - DNA, 75 bp, Homo sapiens
cgctcactgtagaccatctcaagcagaggcatttcatccttcatgaagccattcaggattttgaattgcatatga

SEQ ID NO: 599205 - DNA, 83 bp, Homo sapiens
cgggagcgcaaggtcgccctcaaggccatgatcaaaacgaggccatgatggatttcttcaacgcccagatgcgcctggggggg

SEQ ID NO: 599206 - DNA, 75 bp, Homo sapiens
acagtctggcctctaactgctctgccaaagaaatggggatatgagactttctactcggaatatcctgagtgttgc

SEQ ID NO: 599207 - DNA, 76 bp, Homo sapiens
cataaaggcagctttgaaacaaaacttgaggagaggctggagttctggatggagaaatacgataaggacacagaaa

SEQ ID NO: 599208 - DNA, 90 bp, Homo sapiens
ggaaaggtgcctagaagaacaaggtgcaggaccccgtggatctatctggttcaatagatgacctccccatggggacagaaggagctctga

SEQ ID NO: 599209 - DNA, 90 bp, Homo sapiens
cattttgggaaactactaaatggactgatctctttgacaataaggccagtactgatgcaggcactgcaggagccctgactccacagcatg

SEQ ID NO: 599210 - DNA, 101 bp, Homo sapiens
tgggtcacacagtgactgtctggaaccgcactgcagagaaattttctggatatgccgcagaaggatccgtgccagaagcaagcctgtgagatacagaaatg

SEQ ID NO: 599211 - DNA, 100 bp, Homo sapiens
ttcatgaaacaaccccaaataaaggaagtggaaccacttcagataagtactcctctcagtttggtggtggaagtcaatatgcttatttccatgaggagga

SEQ ID NO: 599212 - DNA, 100 bp, Homo sapiens
ttcgcctcagacgcggtggagccgccggagtctgagaagccccaccatggctgcaatccgaaagaagctggtgatcgttggggatggtgcctgtgggaag

SEQ ID NO: 599213 - DNA, 90 bp, Homo sapiens
ggatttctcaactgtgttttagaaacttttgccagcacattcttacgacagggagcccagaaggtatcttggaattcatcagtgtggcag

SEQ ID NO: 599214 - DNA, 101 bp, Homo sapiens
aaaagatctaaagtcacccggcggccaaaggccagtgactaccaacgtttggaccagaagggcaccgaagccaaagcactgtccatgccggagaagtggaa

SEQ ID NO: 599215 - DNA, 74 bp, Homo sapiens
ttacattagaagttgtgaaatttacccaggcatacttcataaattgggaataaaattgaagggtgtttttctta

SEQ ID NO: 599216 - DNA, 100 bp, Homo sapiens
ctgactcctgcttcccgggtgttgctcgtgatgctccagaccttgtatgattacttctggtgggaacgtctgtggctgcctgtgaacttgacctgggccg

SEQ ID NO: 599217 - DNA, 75 bp, Homo sapiens
ccacttaccccttctcaccgaggaagagcgggagaaaggctccctcgtgaaagatgcttctgttcctctgattga

SEQ ID NO: 599218 - DNA, 100 bp, Homo sapiens
acaagacccatctttatgcaaagccagcgttacagtaatgttccaggttctcccatgggcaggtggtctctctggatgagctgcgccccttccaggaccc

SEQ ID NO: 599219 - DNA, 83 bp, Homo sapiens
cacaaatctcatatgcagtccattattgacaagttttaaccatgctgaccaacgaaactggctttgaaatcagttcttctgat

SEQ ID NO: 599220 - DNA, 83 bp, Homo sapiens
ctctgcctgtcatcctgctggatgaggccctcaagtacctgtcccggaaccacatgcacggaatagctattcagtcagacaga

SEQ ID NO: 599221 - DNA, 100 bp, Homo sapiens
gaaagatttggtttgccaggttgggctgtagcatctaggacgtttttactgtaagtgttggaaacttaccccctaaggctaaggttcttataaaaattac

SEQ ID NO: 599222 - DNA, 100 bp, Homo sapiens
gcagcccgggcagagaccatgtttgacaagacgcggctgccgtacgtggccctcgatgtgctctgcgtgttgctggttcctaacaggccatggacccgta

SEQ ID NO: 599223 - DNA, 100 bp, Homo sapiens
gacgtgctggccgtgatcaaacactgcaaggaccccctccggctcaagtgtgtcaagcaagggagaagatgtcaaccggacactagaaggtggaaggaaa

SEQ ID NO: 599224 - DNA, 100 bp, Homo sapiens
ggatttggtttcagcatgtccttctctgaatgatgaatacttttactactgtgacaacattaacgttgcattaaaatcctcccctactgaaagaaacgga

SEQ ID NO: 599225 - DNA, 100 bp, Homo sapiens
gcaggctgcggcagacggcgacagtggcggcggcgccatggcagggcttgcaggcccagggccccggccagtgcccagccccgctgggagacccggccag

SEQ ID NO: 599226 - DNA, 75 bp, Homo sapiens
cctggagcctcagttggaagcagccgatccagcctgcggagcctgtggggcagtgtgctggagaagagaaacgag

SEQ ID NO: 599227 - DNA, 100 bp, Homo sapiens
aacattggatgtgaaaattgccttttgtcaggtgtgtgttccttacaggtaaaacaagaagaaagctgtggtgattcgtcacttgtataatgaagataat

SEQ ID NO: 599228 - DNA, 100 bp, Homo sapiens
gtgcggcctcaccatacaggaacagggcagacgttagcgtgagtgatcactctcaatcccgggtacttgaagaaacagaagctcaacatttatatcagtc

SEQ ID NO: 599229 - DNA, 98 bp, Homo sapiens
ggagatctctctcatctcgctcggctgcgggaaatcgggctgaagcgactgagtccgcgatggaggggcgagaggtcaatgatcttaaaagaaaatct

SEQ ID NO: 599230 - DNA, 98 bp, Homo sapiens
cagataccctcgtgattagaggtcttttgctggaggttgactgtgctgtctgaaaatatggacttgaaggagcagccaggtaacactatttcggctgg

SEQ ID NO: 599231 - DNA, 100 bp, Homo sapiens
cttggctcccacaagagagttggctgtgcagatccagaaggttgaagatgacagcgatgcagagacctatggagaagagaatgatgaacagggaaattat

SEQ ID NO: 599232 - DNA, 88 bp, Homo sapiens
tcacttacaacattaatcagatactgcatttaaggtgctggagaatctggtaaaagcaccattgtgaagcagatgaggatcctgcatg

SEQ ID NO: 599233 - DNA, 100 bp, Homo sapiens
gcaagcagcaggagctggaggccgtgcggaagagtttgctctccaaagctcggggaattgattccagctctgttaaactccggggtagttctctcttcat

SEQ ID NO: 599234 - DNA, 100 bp, Homo sapiens
ccagccttggtctgagtggactgtcctgcagatggtcagtaggacagaaggtaacattgatgactcgctcattggtggaaatgcctccgctgaaggcccc

SEQ ID NO: 599235 - DNA, 100 bp, Homo sapiens
caaattcgagaccaagagcgcgcgggtcaaaggaatgtatacaaagactatcgcttccttgagctggcatgtgattcccaggaggatgtcgacagctgga

SEQ ID NO: 599236 - DNA, 100 bp, Homo sapiens
tcagctagttgtgatggatctgtcagagtgtggcaaatttcagatcaggctcaacagtcactggagcttatccagtcaaaaatagtaaaagctgctggag

SEQ ID NO: 599237 - DNA, 100 bp, Homo sapiens
agggccgggcgggaccgcggggaccatggcggagccgcctcggtgccggtggtggtgtgcacattgagccccggtatagacagttcccccagctgaccag

SEQ ID NO: 599238 - DNA, 98 bp, Homo sapiens
ggaagacatggccactccagtcggtgttgagcacggcgagcagtctcaggcctttagtgatgatgattggtacacagaacagcttggagcttcttgag

SEQ ID NO: 599239 - DNA, 100 bp, Homo sapiens
cccttgcagatctattccggccacccattgatttgatgcataaaggcagctttgaaacactgtcggaaaaggtaacagaagatggaactcgaaatcccaa

SEQ ID NO: 599240 - DNA, 90 bp, Homo sapiens
aagctccgcaacaagatagcagggtcacacatcccgggtcctgagtctgaccatgagcccagatggggccacagtggcatccgcagcagc

SEQ ID NO: 599241 - DNA, 100 bp, Homo sapiens
ggagaaattgttgaagagttcaactttcccagaagttgttctaacgctgcctttgctttaaaacagtattacttgcgaataagaccacagcttgccaaag

SEQ ID NO: 599242 - DNA, 51 bp, Homo sapiens
ctccgcccggcagccaccccatctgggaatagagacggggtttcaccgtgt

SEQ ID NO: 599243 - DNA, 98 bp, Homo sapiens
catatccctctccacgacctcggtcgagcatgttcaccagggcccaggttatcaatactctggctgaccatcatcatcgtgggactgactttggtgga

SEQ ID NO: 599244 - DNA, 100 bp, Homo sapiens
ccgagaccgtgaccgagagcgtgaccgagagcgcgaatatcgtcatcgttagaagaatatcagctgcatccagtgtccccagacgagaatacaagccaag

SEQ ID NO: 599245 - DNA, 75 bp, Homo sapiens
cctccagtatgttgccatctctaacctaccagctgccactttccaggactcatctgatgatgtgagaagagttca

SEQ ID NO: 599246 - DNA, 100 bp, Homo sapiens
tgacttcggggtgagcggccagctcatcgactccatggccaactccttcgtgggcacgcgctcctacatggcttccagaatgacagggtccagaaactgg

SEQ ID NO: 599247 - DNA, 105 bp, Homo sapiens
cctgaggcctccccagccatgcagaactgactgagcagggggaggaacatttaagctgatggaagtggaagtggaagttgctgtacattggcagcaaggcctccg

SEQ ID NO: 599248 - DNA, 100 bp, Homo sapiens
gtcgtggatctggccaacaagaagacaatgcagatcttcgtgaagactctgactggtaagaccatcaccctcgaggttgagcccagtgacaccatcgaga

SEQ ID NO: 599249 - DNA, 73 bp, Homo sapiens
tggtagtgccgatggcaatgatggttatgaagctgatgatgctgaggaaggccgggacatggcgaaccggatc

SEQ ID NO: 599250 - DNA, 101 bp, Homo sapiens
attcccagaggcaggtggtgctgaccctgtaacccaaaggaggaaacagctggctaagctcatcattgttactggatcgaggccatcaagctacagatggt

SEQ ID NO: 599251 - DNA, 75 bp, Homo sapiens
agacggaggaggggcggccaagcgctgttgaaggaaaaggctgaggaggtgtatcgtctgtatcagaactcgccc

SEQ ID NO: 599252 - DNA, 100 bp, Homo sapiens
cgttgcggccagtcgccactgctactttgctaccaggacttgctggcccctctggggagatggttaaatccacaacaagtctgacctcgtcttctacttc

SEQ ID NO: 599253 - DNA, 50 bp, Homo sapiens
gtgaaaaccgagctgctgggagaagggccatgctgcaccttacaaaacgg

SEQ ID NO: 599254 - DNA, 101 bp, Homo sapiens
ctttccactcggctcctgtcgtccgttctctcaggctcccgttcagcaaaatgatgcttcaacacccaggccaggtctctgcctcggaagtgagtgcttct

SEQ ID NO: 599255 - DNA, 75 bp, Homo sapiens
tcctgacccttttgtgcctgaccctactggacaccccgaagttggagatcaaggtcactcccagtgatgccatag

SEQ ID NO: 599256 - DNA, 103 bp, Homo sapiens
tctactctgtgatgccaagacagatgggagtttccttgtacaccactttctctccttctatctcaaagctgttctccatagtggtgttcggctccatcgtgaa

SEQ ID NO: 599257 - DNA, 83 bp, Homo sapiens
cggcagggaggatgacggagctgcagtcggcactgctactgcgaagacagctggcaggagcatcagatccatgctgctgctga

SEQ ID NO: 599258 - DNA, 75 bp, Homo sapiens
ctgcacaactgcaggaacaccgtcacgctgctggaggaggttcatctgcagaagccagcggacgcctctgttcaa

SEQ ID NO: 599259 - DNA, 75 bp, Homo sapiens
cttcagcaactcagtacggggctcatgagcagacgcatgcgatgtatgatttggtgcttccagatgtgagttatc

SEQ ID NO: 599260 - DNA, 73 bp, Homo sapiens
atcatcctgatttgatcttttgccgcaagcaggctggtgttggtcagtggctttgtatgactgccgaagtcca

SEQ ID NO: 599261 - DNA, 82 bp, Homo sapiens
aaaagactgggcttgtccttgctggtgcatgcgtcgtcggcctctgggcagcaggtgctatgcttacatttgaaaagatttc

SEQ ID NO: 599262 - DNA, 83 bp, Homo sapiens
ctcaagtgggaaccactgagattaactcattatccgttggcagcatgttggaacaggattccaggagaatgaaccctagtgtg

SEQ ID NO: 599263 - DNA, 90 bp, Homo sapiens
caacatagagctgacattaactgtcaggaaattgcccggcatttacgccctggaactctcagagcaatctttggtaaaactaagatccag

SEQ ID NO: 599264 - DNA, 75 bp, Homo sapiens
accaactctgacacctgactaggagtttgttctggcagctcagaaatttggtcaggttacacccatggaagttga

SEQ ID NO: 599265 - DNA, 96 bp, Homo sapiens
agtatgctccatgtagatcacaaaaggaagaccagtgtctcatgcctgaagcctggaatgtggaccagggagtaattaccaaactcaaggaacaat

SEQ ID NO: 599266 - DNA, 75 bp, Homo sapiens
tgagcacaagtacagatcttgaagctgctgttgctgatgctttggtttctgacgtagaagagcttacccctccag

SEQ ID NO: 599267 - DNA, 75 bp, Homo sapiens
gagcgagtcgccgctgcagccctagtgactgcggcctgcatcccgaatggcttcagttctgtgcaggccacgcag

SEQ ID NO: 599268 - DNA, 100 bp, Homo sapiens
atataaatgatgactttgaaatgatagattgtgaacagcacattagttccagaagaaagatggaaattctgaaaactgaatgtcaagaaaaggagtcaag

SEQ ID NO: 599269 - DNA, 74 bp, Homo sapiens
cggcagggtcccgcatggcggcgcacaggaagcacgcatggccgaaatggatgaacgattccagcagattctgt

SEQ ID NO: 599270 - DNA, 90 bp, Homo sapiens
agcctccggtggaggagagcgccttggaacgccgacctgaaaccatctctgagcccaagacctaggaccagttactctccacaagaaaat

SEQ ID NO: 599271 - DNA, 100 bp, Homo sapiens
gaacttcgaaccatggaccaggccctcaagtccctgatggcctcagaggaggaggttgactgcattcagccagtgccaaaagaggagcccagtcccgcta

SEQ ID NO: 599272 - DNA, 93 bp, Homo sapiens
tccgtcccggacagagcccgtggtcgcgcagggcaggctgtccctgcaggatcccacgtacggctgaatcttcagactggggaaagagaggca

SEQ ID NO: 599273 - DNA, 97 bp, Homo sapiens
ccagaccctggagcctcagttggaagcagccgatccagcctgcggagcctgtggggcaggaacctagaaagattgtacaatgaatggtgattctcgt

SEQ ID NO: 599274 - DNA, 126 bp, Homo sapiens
acatggataagcatgccctgaaaaagtatcgtcgagaagcctatcatcggttcctgggtggagctacccatgaacagcagcaatggcaatgataatggcaatgggaaaaatggggggctggaacac

SEQ ID NO: 599275 - DNA, 75 bp, Homo sapiens
ggaggcgttgacctgccccttgtcctggccccgggcagcgggtggcatgagacgtgggaacatgggccacctcac

SEQ ID NO: 599276 - DNA, 100 bp, Homo sapiens
ggcggcagaacattgcttatgaatatctgtgccacttagaggaagccaaaagtataaccccgttttcacacgaatggccccttcacatatttgaagacta

SEQ ID NO: 599277 - DNA, 75 bp, Homo sapiens
cttcagccgaggccgccgccgcctctccttgctgcagccatggagaaaatatgagagccacacccgtgttcacac

SEQ ID NO: 599278 - DNA, 75 bp, Homo sapiens
cctgcgggtgcctttgaaaatcaacgacaacttgagcacaggtgcaatgattctggactgagacgcgcttgggca

SEQ ID NO: 599279 - DNA, 88 bp, Homo sapiens
aattgtttagaagaaaaaagcaagagagactattttacacagttggtattagcatgtttgaattttgataagctgaatgtaaggacaa

SEQ ID NO: 599280 - DNA, 100 bp, Homo sapiens
attgccgccttcccctcaaaaaagcttctcccgttggcaacggttacatcaagcctccggttccacctgcttctggcacgcacagggagaaagggccgcc

SEQ ID NO: 599281 - DNA, 150 bp, Homo sapiens
gcgcagaaagtgaagctgtttcgggccagcgacccgctgctcagcgtcctcatgtggggggtaaaccactcgcctctacggcagacacatgcaggccaacccagaaccaccgaagaagaataatgacaaatcgaaaaagatcagccggaa

SEQ ID NO: 599282 - DNA, 83 bp, Homo sapiens
cccttgcaaatttacatacgagaatggcttgtgaaatcatgcctctgcaaaggccaagaagcttgagagaagaaaaatttcag

SEQ ID NO: 599283 - DNA, 100 bp, Homo sapiens
gaaagtggatgaatacacagacactgacctgtacacagctgcacctgtggggggacctctcatgcagacttgcacatatgcagggagtattgcactgaag

SEQ ID NO: 599284 - DNA, 90 bp, Homo sapiens
gaagttgcgccaggcagccctgaaatcagctcgagacatgtgggctgattacatcctgtgtactaatggtcacttgatgtgcgctggctg

SEQ ID NO: 599285 - DNA, 100 bp, Homo sapiens
aaccaagactctgaggctgatatgcaatgtcacttacaacattaatcagatactgcatttaagttacatccagagcattccagttgttaatgaagaacac

SEQ ID NO: 599286 - DNA, 83 bp, Homo sapiens
gctcttgccctcatcctggttctggaatcctcagttcaaggtggagtattgctcctggaaaatccaaaaggtgacaataggtt

SEQ ID NO: 599287 - DNA, 82 bp, Homo sapiens
aagggccaggagaggagcactttgaggacatggcctccgacgaggacatcgagccatccagcaggctgtgggaagctccctg

SEQ ID NO: 599288 - DNA, 101 bp, Homo sapiens
gtttcacgggcacattttacctcagccaccgagaaggctacggcaccatgtacatgaagacacggcttttccagacagttcccagcgcgctgctcgtccag

SEQ ID NO: 599289 - DNA, 98 bp, Homo sapiens
tttccttctggagtttccccggcgggtaacaacaagctcaccctcttccgccagctgcagcagatgacgtacagcctgatcgagtggcggtcccagat

SEQ ID NO: 599290 - DNA, 98 bp, Homo sapiens
gtgcccgagtcggccaagcatgggcaaccactcaggacggcccgaggatccggaaccaggtatcattggaacatttcaagatcatcaaatcaaattcc

SEQ ID NO: 599291 - DNA, 75 bp, Homo sapiens
gatgaagaagcagaggaagaacaagaagagaaccttgaagcaagtgatgctaatactggagaccgtggacagacc

SEQ ID NO: 599292 - DNA, 83 bp, Homo sapiens
tgccctgtcaccatttctttcacaaaccttgtgtctcaatttggctacaaaagggaccttgctgcaagaaactgcctggtagg

SEQ ID NO: 599293 - DNA, 100 bp, Homo sapiens
cttttgctgaaacacaccaagcttttgaaaccatgttccatgactccagcatttctgaaggatttaagtgccctgtatgctcaaaatttgtatcctcaga

SEQ ID NO: 599294 - DNA, 131 bp, Homo sapiens
caggcgaggaggaagatggcgggacggctgccggcctgtgtggtggactgtggcacggggaatttcttcacatggctcctggagaagtgaccatcacagttcgcctcatccgttcctttgaacatcgcaat

SEQ ID NO: 599295 - DNA, 75 bp, Homo sapiens
ggccaaggctggcttggtggatgactttgagaagaaggtctatgttaacaatgaatgggcaaccagtgttgggga

SEQ ID NO: 599296 - DNA, 74 bp, Homo sapiens
cgtggatgtcgctgaattgcccgtgcccccagctgctacaggagctgagagaccctaccctcactttccgtctg

SEQ ID NO: 599297 - DNA, 90 bp, Homo sapiens
tatgatgataaagactacaggagaattcggtttgtaggtcgtcagaaagagaccaggatggagcagagcccagcgccaattccgtgtcag

SEQ ID NO: 599298 - DNA, 100 bp, Homo sapiens
agtgggggtgtgcaaacccgagagaactggaattcaaagaagctttttcactatttgacaaagatggtgatggaactataacaacaaaggaattgggaac

SEQ ID NO: 599299 - DNA, 100 bp, Homo sapiens
atcttactgaaggcagtgaagcgaagaaaaggatcccagaaagtttcagatccagtttgtcctggtctcactgcacatctcccagtactactttatgtcc

SEQ ID NO: 599300 - DNA, 98 bp, Homo sapiens
gcaaatcaagcctagtgcttcgttttgtgaaaggccaatttcatgaatttcaagagagtaccattggggagcaatggtggaacaaagcggcaaaagat

SEQ ID NO: 599301 - DNA, 87 bp, Homo sapiens
gtggtgaatgccgcaattccagcctatcacctaagagaccttatcaaaaggcgatcattatttcgaagttctagtattctggatcac

SEQ ID NO: 599302 - DNA, 96 bp, Homo sapiens
caatatctgtcttcggtggactccttcggcagtccacccaccgccgccgcctcccagtatggtttgaagtggtgaacatggatttttctcggcttc

SEQ ID NO: 599303 - DNA, 114 bp, Homo sapiens
aagcctccatctatctgcttgcaatctgccaggacaaagacaatacactacgtgaggtttgtttgaagagactgtaccagagggccagggaggaggagaaaggaattgagctgg

SEQ ID NO: 599304 - DNA, 51 bp, Homo sapiens
tacagctctaacaaaatagacggaatcccgttctgcttccagaagtggaag

SEQ ID NO: 599305 - DNA, 100 bp, Homo sapiens
ggccctcttgataaaaagagatgtggggggattctcgacctgctaacagaactggaccttttcgtgacattctacgaatggattccaccaatgcagatgc

SEQ ID NO: 599306 - DNA, 76 bp, Homo sapiens
cctcgaacctgcactgtggacttttcgatgtatggtggcatgagaggcatgaagggattggtctatgaaacatcag

SEQ ID NO: 599307 - DNA, 83 bp, Homo sapiens
atgctaacctactatgagggtcgagcagaggttatatcttaagtgtggtgctgctaacattgcccaggcagcatctggttcag

SEQ ID NO: 599308 - DNA, 74 bp, Homo sapiens
ttgaattttctaaggtgtcattaggtaggtttaggtgctggagaatctggtaaaagcaccattgtgaagcagat

SEQ ID NO: 599309 - DNA, 82 bp, Homo sapiens
agcaggactgcgccgcgtcttcctcaaggcgatcagtgggtgaccgcggctgcgagggactttgtcatccgtcctccaggat

SEQ ID NO: 599310 - DNA, 100 bp, Homo sapiens
aaaatggggtgaggaagattttgaagacaatcgtcacttatacaggtagctacagcaagctgggtagcaggcagatccaaaggatatcatgaagtttcca

SEQ ID NO: 599311 - DNA, 83 bp, Homo sapiens
acgatcctctcaatcaaaataaggtctatgctccatcagcaagcactgccgactacaatagggactcgccaggctatccttcc

SEQ ID NO: 599312 - DNA, 98 bp, Homo sapiens
tccatttgtgccacagatgggtgatgagtccacaagccctagccatgccgtggtagccaatgttcagcttgtcttgcatctaatgaagcaacacagta

SEQ ID NO: 599313 - DNA, 82 bp, Homo sapiens
tctcaaaaactttcatgtagacctttgtcgtccatttgctgctcactgacatatctgaagagatggattaagaatgctttgg

SEQ ID NO: 599314 - DNA, 96 bp, Homo sapiens
ttgaagagatcgactacaaggagatcgaggtggaagagaggaagtggcttttaggaagaagaggctgtgcattaaatttattccacgggattcaac

SEQ ID NO: 599315 - DNA, 83 bp, Homo sapiens
cgaggccctcatgtaccacacgatgtgccggtgacttcagcgccagtcaccgcgttctaccgcggctgcatgacactggaggt

SEQ ID NO: 599316 - DNA, 50 bp, Homo sapiens
ccatgccaaggactatgtggagaggaattccagggaagaaatgtggtaca

SEQ ID NO: 599317 - DNA, 82 bp, Homo sapiens
gtaatgacaatccagaaatgccttctaattcaggcaatttgcaaaagaaagatgcttcatcttaggaaacagttattatcgc

SEQ ID NO: 599318 - DNA, 96 bp, Homo sapiens
tcccaggctcaagcagtcctaccatgtcagccttcccagtagctgggaccacagttggtgcttcccgtgctgctgttgatgctggctttgttccca

SEQ ID NO: 599319 - DNA, 58 bp, Homo sapiens
cgctgcgcatccccgcggacgccacagcgctgctcttcttcgtggggtcccgggaagg

SEQ ID NO: 599320 - DNA, 87 bp, Homo sapiens
gtgatgatgaagagcctagcacctcttatactgattttgcagaaaaaacttcagcatgtgccaggaacacaacctcaccttgatcag

SEQ ID NO: 599321 - DNA, 85 bp, Homo sapiens
agccgagatgccgggggagcggggccttccacaccccctccgtgggtgtgtgcaaacggggattcagcgtccgatcctttggaac

SEQ ID NO: 599322 - DNA, 87 bp, Homo sapiens
cctcaacagcccagccctcccctcgggatccctcaccccagccttcttcaccgcacagaattctccactttaccaatacttacagga

SEQ ID NO: 599323 - DNA, 101 bp, Homo sapiens
ttcaagatttaaactggcagagaaagaacatgcaactcacagctggatctaaattgagagaaatggagtcaaagctttggaagtgataaagcagttaaaag

SEQ ID NO: 599324 - DNA, 90 bp, Homo sapiens
tcttctccactgttcctggaggaatccgagaagagcagagcggagggagccccagacacggcggagctggtcaccacccacaagtgcctg

SEQ ID NO: 599325 - DNA, 99 bp, Homo sapiens
ctactgagttcggccggtccgagtcactgtgcgtcgcctgggcccgttcctggtcttctcccccaggtggctagaggtgcaggtagctaatttaacaag

SEQ ID NO: 599326 - DNA, 74 bp, Homo sapiens
tccagcccagcttcgcccatgcacgagcggaatagttctgtcccaagaagaactctgaagatgattcagccttc

SEQ ID NO: 599327 - DNA, 74 bp, Homo sapiens
gcggacagcagcctcgggtgcaatcctggagccccccagtgaggaaaggaagctgttgaagttattgaagtacc

SEQ ID NO: 599328 - DNA, 75 bp, Homo sapiens
tctagagtagccgagaccacaggagcctcacagtctactcagagaaaaataaaagaaggcaaaatgagtcctccc

SEQ ID NO: 599329 - DNA, 99 bp, Homo sapiens
ctcggagcttctacagaaggtggagcccctacagaaggtggagcccgggcggggggattcccgaagtcttccgttttctgagaatgtgagtgctgttca

SEQ ID NO: 599330 - DNA, 100 bp, Homo sapiens
ttcctatagttcaccgagtcttgaagattcatgaaaaagtcctgtgtatggaaactcacatgagtcagctcagtctagaagggtagtaatttctcataat

SEQ ID NO: 599331 - DNA, 90 bp, Homo sapiens
tgtgtcctgagatcaaatggcacttcattggccacctacagaaacaaaatgtcaacaaattgatgggttgttcctcaaagtcattcaagc

SEQ ID NO: 599332 - DNA, 83 bp, Homo sapiens
atttgttaaggattccaagtaactcttatttggaaacttggatttaactggccagaagcaggtattcaaagcagagaacaatc

SEQ ID NO: 599333 - DNA, 75 bp, Homo sapiens
gcatggtgacaaccagagagcgcttaagcaggtaaagcagtcactgtgaagaaaataacattttaagaaactttt

SEQ ID NO: 599334 - DNA, 98 bp, Homo sapiens
gggagaacttcagccatccctactacctgaggctcctctgtgagcagtgagaaagatcagtctaaagaaaaggagaagaaagtgaaaaaaacaattcc

SEQ ID NO: 599335 - DNA, 75 bp, Homo sapiens
agccatggaaacaggaggaagaattcccaagccaaagctttccagccatttccccaaaggaatgtcttgcatatt

SEQ ID NO: 599336 - DNA, 88 bp, Homo sapiens
cgagcatggcaggctccctgcctccctgcgtggtggactgtggcaccggcctacaacacagcagtcccctcaggatgagcaggaaaag

SEQ ID NO: 599337 - DNA, 76 bp, Homo sapiens
tgaagccatccgcagaaggggagacacattttatgttgtgtcatttcgaaggtacaagccagctgccatgttgtga

SEQ ID NO: 599338 - DNA, 90 bp, Homo sapiens
ctggagcaagaagaggacctgtgcagggcagagcaggaggccccccgaggaagaaaaaatgctgggcatcttggtgcagcacaaagtccg

SEQ ID NO: 599339 - DNA, 74 bp, Homo sapiens
ggccaggatgtgggcccagccctgtgccaggaggctggctggaataaaggctgaacatatgcagaagaaaagga

SEQ ID NO: 599340 - DNA, 75 bp, Homo sapiens
gcggcctcggcctccccttggattcagacgccgattcgcccaggaaccaaatggcgagacaccatcatctttata

SEQ ID NO: 599341 - DNA, 98 bp, Homo sapiens
ttgagtctactctgtcgctcttgtgccctagcaccccgagaaccgtcagtttgagccagatggaggtatatcgaattccaaagaaaagtcaaactgaa

SEQ ID NO: 599342 - DNA, 51 bp, Homo sapiens
aagagcccacggacaccacctcaacggaccccaaatcaaatttgatccaac

SEQ ID NO: 599343 - DNA, 95 bp, Homo sapiens
gtgaccgagagcgcgaatatcgtcatcgttagaagtggtccactgtaggtgtgccaagtgtttctgttatcctacaaagcgaagaataaggagga

SEQ ID NO: 599344 - DNA, 90 bp, Homo sapiens
aaggactcatcccaaagcctggcttcagggatgacttcttagggggcaggggaggtagtcgcccaggcgaccggcgaacaggccccccca

SEQ ID NO: 599345 - DNA, 100 bp, Homo sapiens
cttcgaagtgaccagcgctaacgttgtcaaggacccgccctccaagtacgtggttgacagactaatggagttgcattttaaatatctgggtgcaatgcag

SEQ ID NO: 599346 - DNA, 82 bp, Homo sapiens
cgcacctctgtttgggggtcctcagattatctgactccagaaaaagaacgcgtacaggaagatcttggcctgctgcaatacc

SEQ ID NO: 599347 - DNA, 100 bp, Homo sapiens
tagccatacctaatagacctcctgatgctgtacttacagataccacctctcttaatcagctgggctcaaaatgcagagaactcaaagatattcatttcgg

SEQ ID NO: 599348 - DNA, 90 bp, Homo sapiens
cacaatttatcattgaataagtgttttaagaaagtggacaaagagaggagtcaggttcagcagctggacatggagaaccaacgctcatca

SEQ ID NO: 599349 - DNA, 75 bp, Homo sapiens
cagattcgcagtggtcgcttcttctccttggaattggcagcaatgaaacagattctcgttaagatgcatagtaaa

SEQ ID NO: 599350 - DNA, 100 bp, Homo sapiens
gatcaggattgctggggtttgtagggccgattaaccagaagggctcggagaagccacttgagcagacatttgcaacaatggtgtcttccttgggaagtgg

SEQ ID NO: 599351 - DNA, 75 bp, Homo sapiens
ccaaaactgatggctgcactggaaaaaacaagagatcctgaaacctctgtcatggaaaagtaccacgtgttggag

SEQ ID NO: 599352 - DNA, 100 bp, Homo sapiens
ccgagagtcaccacaaggccaagggcaagtgatttgacaggtcctttctgaaagatctgctactgaagtagacaacaattttagcaaaccacctccgttt

SEQ ID NO: 599353 - DNA, 82 bp, Homo sapiens
ggacgggtctaggtgagacagaagccaaacaggaggaggaagtggaggcaattctgtggtgttcttggtcacacatttatgg

SEQ ID NO: 599354 - DNA, 71 bp, Homo sapiens
agggttcccgggattggaccgacgcagccatgttgcagaatgaagaagagtctggagaacctgaacaggct

SEQ ID NO: 599355 - DNA, 100 bp, Homo sapiens
gagctctgcctcttccagtaacattgaggattactgtgttttgtgagagctcgctaggcgccctaagcaacagaggaattctcctactttcaaatcattt

SEQ ID NO: 599356 - DNA, 97 bp, Homo sapiens
gtccctcttcaagaagaaaaccgtggatggatgaccatgaaagctgtggttctaattctaccaaccgtagtactgctgagagcacaaaatcatcaat

SEQ ID NO: 599357 - DNA, 98 bp, Homo sapiens
gcacagatcagctccggagaggggaaaaccacgctcctcggaccaagcctcgggagctaagactgaagttgctgaagatcctcaacaagtttcaactg

SEQ ID NO: 599358 - DNA, 100 bp, Homo sapiens
tgacccatatgccaacccacctaactacggaaaacctgatcccaaaattattgaaaacactcgaagggtctctaattaacagaagatggcaaagcccagc

SEQ ID NO: 599359 - DNA, 100 bp, Homo sapiens
tgtatagttttggcctcatcctttgggaggttgctaggagatgtgtatcaggaggagctactctcctcctggtgaggtggaaattccagcaagaatagag

SEQ ID NO: 599360 - DNA, 100 bp, Homo sapiens
gcacaatatcatggattttgccatgccctatttcatccaggtcatgaaggagtacttgacaaagagagaaaaggaacagttccgtaagctctttattggt

SEQ ID NO: 599361 - DNA, 100 bp, Homo sapiens
ggatgatgaaattagttgagcaattaaaagaagagagagaactgctaaggtccacaacgtcgggtaatgcaaacctggatatccagaatgtgaaccaaca

SEQ ID NO: 599362 - DNA, 50 bp, Homo sapiens
ccttccagctgtttgaccgaacaggacacaatgtttgcacgaggactgaa

SEQ ID NO: 599363 - DNA, 100 bp, Homo sapiens
aggaatcctgatgacatccttctttttagagatcgttttgatggatatatcttccttgacagcaaagccctggtacctgacagtgtaaagaaggagctcc

SEQ ID NO: 599364 - DNA, 75 bp, Homo sapiens
ccttcgcgtcccctgcaccatgagctggggcaccgagctctggggccaattcctgtccccccagcagcatggcat

SEQ ID NO: 599365 - DNA, 90 bp, Homo sapiens
aaagaatcacaggtgagggaaatagtggataccttcagagtggttttgcagggagaaggttttaaggtgaaaacgaagaaagaaatccgg

SEQ ID NO: 599366 - DNA, 98 bp, Homo sapiens
agcgagcgggaggaggcccagtacgacctgcggggggcccgcagctaccccacgctggaggacgaaggaccgccgggagagcctgcccacctccccac

SEQ ID NO: 599367 - DNA, 82 bp, Homo sapiens
gcttgagagctgggttctattttccctcctcaaactgactttgcagccacggagaggtgcaatgattctggactgagacgcg

SEQ ID NO: 599368 - DNA, 100 bp, Homo sapiens
atccagagctgcatcattccttggggcaaaatgtggacaagggacccagatgatgtggtaccagttggccaaagaagagcctggtgttggtgcatgtgct

SEQ ID NO: 599369 - DNA, 100 bp, Homo sapiens
cagccttcctgggcaccgccatcttcattgaggccgaccgccggcgggcacagctgcacgtgcaggatatgtgccactgtttccaacttttcatcaacaa

SEQ ID NO: 599370 - DNA, 82 bp, Homo sapiens
tacagcctccaagagtgcctctgctgtgtactggagtgagtttgaagaagttcaggccctgggaggagcggggacactgagg

SEQ ID NO: 599371 - DNA, 100 bp, Homo sapiens
cttcggcacaagggcccaactggaattccacttacgggtttaatacaacatggaagccaccaaggcttacagaatgtgctttccagagctgtgacctgaa

SEQ ID NO: 599372 - DNA, 96 bp, Homo sapiens
gaagtgcagatgtcgaaggacaaggaagctgttgatgtcactacaggaaaagatatcttcattaaagtgcaacagcacactgagagcaacacacca

SEQ ID NO: 599373 - DNA, 75 bp, Homo sapiens
ggccactgaataacacccaaaagagcaagcagcccctgccatcggcacctgcagggaatacagcagacagcccct

SEQ ID NO: 599374 - DNA, 82 bp, Homo sapiens
aaaacgggtcgcccgcgattctcagggattgatcgcctcttcagggcgtgatggtgggcatgggtcagaaggattcctatgt

SEQ ID NO: 599375 - DNA, 82 bp, Homo sapiens
cggacgtgggggcggcagccagctcgcagggtcaccttccgcaaccctgtcattgagaggattcctcggctccgacggcaga

SEQ ID NO: 599376 - DNA, 82 bp, Homo sapiens
actgaatcaaggtccagagaaggtggaggaatcctgatactgagcggtgagaagccctaccactgcaactgggacggctgcg

SEQ ID NO: 599377 - DNA, 82 bp, Homo sapiens
cttcaagcttaggaccacccaccatgcctatccaggtgacttaagagattaaaattaatttggttgctgttggttctgaaca

SEQ ID NO: 599378 - DNA, 50 bp, Homo sapiens
cctgacacccggcatgaccaaagatgcagatgcctccagctattacgagt

SEQ ID NO: 599379 - DNA, 75 bp, Homo sapiens
agacatcatttgggaccaagctgatgagcccttgaagcacagcaggtagatgacaaggtgaatttccattttatt

SEQ ID NO: 599380 - DNA, 51 bp, Homo sapiens
ccggaacaccctggaagccgagaaatggctttggaactgcgacataactag

SEQ ID NO: 599381 - DNA, 50 bp, Homo sapiens
gtctacagagcggcctgcgccagcgaggccaattcctgtccccccagcag

SEQ ID NO: 599382 - DNA, 82 bp, Homo sapiens
accatggctgactacctgctgtacaccctcaacaaacaccagcgctttggggtttgccttcccggattgggcctacaagcca

SEQ ID NO: 599383 - DNA, 96 bp, Homo sapiens
ggtgaagatgctgagccggaatccggacaattatgtccgcgaaaccaagttggacttacagagagttaagtgggcagaccaacatccacctcagca

SEQ ID NO: 599384 - DNA, 83 bp, Homo sapiens
gcccggagcagctggctggctttgataagtacaagggattaaagcctgtggtttccacagaagcaccacctatcatatttgcc

SEQ ID NO: 599385 - DNA, 100 bp, Homo sapiens
gcctcccaaagtgctaggattacaggaaactggagaggcgtggctggaccaagacctccccccatgtgagcaggcttcctcctcccccaacaaccgttgc

SEQ ID NO: 599386 - DNA, 75 bp, Homo sapiens
agctgctggacaacaccatggaaatatttgacattgagatttatgtgatcagtttggctgaaccccgtctgcccc

SEQ ID NO: 599387 - DNA, 82 bp, Homo sapiens
ctctccttgcagctgcttagacgctggatttttttcgggtagtggaaaaccaggttgtggcagcactgcctgaaggtatgag

SEQ ID NO: 599388 - DNA, 51 bp, Homo sapiens
tgatttctctccccgtctccacctccaggattttggagattaccaagatgg

SEQ ID NO: 599389 - DNA, 75 bp, Homo sapiens
aagtggttcgttcgactgaacaagcttcattacagtcttcagtacaacaatatgaagaaaaaaacaccaaaatca

SEQ ID NO: 599390 - DNA, 90 bp, Homo sapiens
caaagagttcttctggagaaacagatcaattcaagatttaagcatgaagaggaaccacctcagaatatgaaaccacaatcaggaaacgat

SEQ ID NO: 599391 - DNA, 100 bp, Homo sapiens
cggccgccgcgccgcccggcagcctcggcagtggaaggaggcaaaaccggaagaccttatggattcaaaacttagatgtgtgtttgaattgccagcagag

SEQ ID NO: 599392 - DNA, 100 bp, Homo sapiens
ggacatcaggctgccccgcagtaccagggagcgactgaagtgcccatgccgcttgctccggagaagatcctgataacttaagtgactctctcttttccgg

SEQ ID NO: 599393 - DNA, 100 bp, Homo sapiens
agtaaaattgcttggttccttgtcacaagaatatcctccgaatcctaaatctagagctccaaggatgctggtcattaagaaaggtaatacaaaagactta

SEQ ID NO: 599394 - DNA, 82 bp, Homo sapiens
cgggagggcgcgcggccgagcggaggcggagtcggcgccgagaacatggtaaggggcctggataccaagaagtgactgctca

SEQ ID NO: 599395 - DNA, 80 bp, Homo sapiens
cctctcgcatgtccacctcacaggttaatttggagtggcccctggagtcagtttcctacaccatccgaggccccacccag

SEQ ID NO: 599396 - DNA, 75 bp, Homo sapiens
tgccaagttatttactttcccatcaggtttcctgatgtgagcagattagtgggatggtttggccatgaactcagc

SEQ ID NO: 599397 - DNA, 90 bp, Homo sapiens
tgaatatttcagaaaagatccaagaccattcttcaagtttgcaaaggtgtctgatgatttgtgagcctcaagtgactactctgtggaatc

SEQ ID NO: 599398 - DNA, 101 bp, Homo sapiens
gacaaagacccagtgaacaaatccgggggcaaggccaaaaagaaggttatcaatagtctggctgtctatcgtcatcgtgagactgactttggtgtaggagt

SEQ ID NO: 599399 - DNA, 83 bp, Homo sapiens
ccgggcccgacgagggcgaggtggactcctgcctgcggcatgtggcgggcgtgtttgtgtgcctgctggagtacccccggggg

SEQ ID NO: 599400 - DNA, 88 bp, Homo sapiens
gccatggcggccgccctgggagcgagcggaggagcaggcgccggagacatgcgaggattcatgacagcgcatggacagccagaccagc

SEQ ID NO: 599401 - DNA, 74 bp, Homo sapiens
tgcatttgactcctgtagcaattaaaaagcactgtgaagcccttaaaggacacagcattgttggttttgccatg

SEQ ID NO: 599402 - DNA, 75 bp, Homo sapiens
tcagccccctgtgcgccaccattgcagccaaaggaaataacatcaagatttgtaatgaatcagctagcagaaaat

SEQ ID NO: 599403 - DNA, 98 bp, Homo sapiens
tcattttaaatctatgtatctggcttactgtgcaaaccatccttcagctgtaaatgtgctcactcagcacaggatcgaatcatcaatttagttgttgg

SEQ ID NO: 599404 - DNA, 87 bp, Homo sapiens
agtctttgaccatgagtcgaataatacagtggatgtgagcaaccctacaaggatcagaagctgccaggaacaaggagaagacgctcc

SEQ ID NO: 599405 - DNA, 75 bp, Homo sapiens
cccggaaagctgcccagccaccagcaaccccccagccatccagtccaatggatcagatgggcaagatgagacctc

SEQ ID NO: 599406 - DNA, 125 bp, Homo sapiens
gcccagctggtcagcgacgggagccccatggtccggaagatgagcagcaccagcagtaagagggctccgaccacggcaacccagaggctgaagcaggactaccttcgcattaagaaagacccggt

SEQ ID NO: 599407 - DNA, 50 bp, Homo sapiens
gacgttatttccatcaaaaattggaagaggatcacctagcccgggtagaa

SEQ ID NO: 599408 - DNA, 98 bp, Homo sapiens
ccacattgagagcaaaatctacaagatgatgcagggaggagtgcacagccagagaacaacacatcacacacaggaaacagttgtgctcatgtgatggg

SEQ ID NO: 599409 - DNA, 76 bp, Homo sapiens
aaagattttgcagaacagagatgacatgccagcccagactttcatgttctgacaacaaaggagattgtgacatatt

SEQ ID NO: 599410 - DNA, 101 bp, Homo sapiens
ccaggatggacaagcttggccgcaccattgcagaccatgtgagagaacgccgagccgtcgccgcagcctccgccgccgagaagcccttgttcccgctgctg

SEQ ID NO: 599411 - DNA, 76 bp, Homo sapiens
cagaagatcgtctgaatgaagtgaaagctgaacaagctgtttgaaagcatccaggaaggcaagtatgagtttcctg

SEQ ID NO: 599412 - DNA, 83 bp, Homo sapiens
cttttatacaagaagagaccggtgtctcaatgcttgtacctactgcaaaactaaacacgccagaggaaatttggccagttatc

SEQ ID NO: 599413 - DNA, 90 bp, Homo sapiens
ctcggaaagcgctcagaagaacgcttcgcccgttggtgctatagcccatggatttcagaaaattatctacattcagagaaagttttaaga

SEQ ID NO: 599414 - DNA, 96 bp, Homo sapiens
gccaactccttcgtgggcacgcgctcctacatggctgttgcagagcctgaggcctgtgatcagatgtacgagagcttagcgcgactccattcaaac

SEQ ID NO: 599415 - DNA, 100 bp, Homo sapiens
aagcccctgaccattgaagaggtggcccccgccccgtcgggcctcacgagctggagaatgctggaggagaccttaaggatggccaccaccactatgaagg

SEQ ID NO: 599416 - DNA, 78 bp, Homo sapiens
tcatcatcccgtcagagctgaggtacttcgtgaagcaagtgctctcagaagaggagattgacgagaacttcaaggccc

SEQ ID NO: 599417 - DNA, 85 bp, Homo sapiens
gatattggctgttcagaggacctcaaagactgtgaaagtttcctacactactgaggtttaggggcactgtgaagcaaaagccacg

SEQ ID NO: 599418 - DNA, 100 bp, Homo sapiens
taagaatgaagaaccctcaagcaatcatattccacatgggaaaggaatacggggtgctttgcattcaggaatacagaaaaaacagcaaagtggagtcaag

SEQ ID NO: 599419 - DNA, 100 bp, Homo sapiens
gaaaccccgtaaagtggttggttgcagttgtgtagtagttaaggacacggtgcagcgatgccgggagattttcttcccagagacagctcatgaggcgtga

SEQ ID NO: 599420 - DNA, 90 bp, Homo sapiens
atttatgaaagcccaaatcacctgtacttggtcatgcagctcgtgacgacagcatgtacgatccctgaatgggcccgtgggcatatttag

SEQ ID NO: 599421 - DNA, 76 bp, Homo sapiens
gctcgcgctactctctctttctggcctggaggctatccagcggggaggcagtttccggacccccatccaagaggag

SEQ ID NO: 599422 - DNA, 75 bp, Homo sapiens
gcccagctctgcttcgaggccagccaatgagtgccaggagcgccctgttgagtgtaagttctgcaaactggacat

SEQ ID NO: 599423 - DNA, 110 bp, Homo sapiens
tgattatccacttggggacttgactccaaccactatggaagaggctacctctgggagtcagagctgacaaatttggcaggattatacagagatgaacgattgaaacagaa

SEQ ID NO: 599424 - DNA, 100 bp, Homo sapiens
atccgggaggtcaacgaggtcatccaggaagccagcagacctgcagaacttggctcccgggacccacccaccatttataactttcaacagtgaagtcaaa

SEQ ID NO: 599425 - DNA, 73 bp, Homo sapiens
aactgtcagaaaagagtagcctgggctgtctggaaatctgaggacccatggatgaaggaccagatcttgatct

SEQ ID NO: 599426 - DNA, 99 bp, Homo sapiens
gatcaccgcactcgggccatgcaagatgctctggcacgttttgggggaggtgcctgcaggacccaacatactcaatgagcttccagcgcaatgtccgat

SEQ ID NO: 599427 - DNA, 100 bp, Homo sapiens
gactctaccaagtctgaacccctgaagggatcaccagaggaacttgctactaccagcaccatgccctaccaatatccagcactgaccccggagcagaaga

SEQ ID NO: 599428 - DNA, 100 bp, Homo sapiens
acattcgcaccgtcatggtcacaggtacacatttaatgaggatgagggggagcttccggagtggtttgtgcaagaggaaaagcagcaccggatacgacag

SEQ ID NO: 599429 - DNA, 75 bp, Homo sapiens
gacttccccgttagaactcgcgtttccacttcagagatctgcctcgtcacgtgttcaatatgctaaagaagtatg

SEQ ID NO: 599430 - DNA, 100 bp, Homo sapiens
gcagtacctgcagaaggtctctggagacatcttcagcaggactcctgagagcagcctccatgaggccctggaccagtgcatgaccgccctggacctcttc

SEQ ID NO: 599431 - DNA, 90 bp, Homo sapiens
gcctactccccgcgggacgaggaggacagcatgtgctcatctctcagagatctagaacttgcctaccaagtacatggccttttaaaaacc

SEQ ID NO: 599432 - DNA, 100 bp, Homo sapiens
tatttttggcttcaagattttgtgccaaccagggcaaacttgaagataaatcttttgactccagctctttagaggatctaaagtgaccttgatggacagt

SEQ ID NO: 599433 - DNA, 100 bp, Homo sapiens
cacgctgctactgcctgggggctgaggatgacaaaaaagccttcataggtgtgatccctcacatccacaaatctctgattggaaagaagggacagcagaa

SEQ ID NO: 599434 - DNA, 90 bp, Homo sapiens
tgatcacattcattttaattttgccggaatatttcaagacaccgaaagattggtgctctcctctgtctcagactattttgctgccatgtt

SEQ ID NO: 599435 - DNA, 100 bp, Homo sapiens
agttccgtgaagaagatcaaagctgcctttgctgaattacacaactgaggatgtgaagccactgaaagcttgactcagggaaaagaaatgtgggaccatc

SEQ ID NO: 599436 - DNA, 83 bp, Homo sapiens
ctgcagatattgggagatccacagctaagacgccgggactccctggaaacctagaaatgtacctggagtagaacagaaaaatt

SEQ ID NO: 599437 - DNA, 74 bp, Homo sapiens
gaaaaggcaaggagaagagaccttctataactcaggttcttgcacgcattgcaaatgccacgaggccaactatt

SEQ ID NO: 599438 - DNA, 100 bp, Homo sapiens
caggaggagcttaagcggctgcatcgagcccagattctgaaagtcaagaagacatcatccggaatattgccaggcacctcgcccaggtcggggacagcat

SEQ ID NO: 599439 - DNA, 80 bp, Homo sapiens
agaactcttaacggccgatgcagctcttccaaagctaaggctctgaagggctccaagaagctggtgctgtctgtgtactc

SEQ ID NO: 599440 - DNA, 50 bp, Homo sapiens
tcagggtcttcatccagaaacgaggtgccagcgagatttcagattcctgt

SEQ ID NO: 599441 - DNA, 95 bp, Homo sapiens
cgagcgacagagacaagctgagcttgccgcacaaaaagctagagagatttctacctggacaaggactggtactatacccacagataggagacaaa

SEQ ID NO: 599442 - DNA, 94 bp, Homo sapiens
ctgctcctgtcgccttcgcctcctaatccctagccactatggtcctcagccagcagagccacgttccttatgagcaccgtgggtttatttcatt

SEQ ID NO: 599443 - DNA, 100 bp, Homo sapiens
ttcgatgcacaggagtggccgttatggaacgcagtgtactcgacagattatctctgagaagctaggccgtggctcaagaactgtggaccttgaacttgaa

SEQ ID NO: 599444 - DNA, 90 bp, Homo sapiens
gaaacatggcactgttgcctatcagaagtcaattcaaaggacctgcccccagagagaatagggatgaggaagaaatgaccaaacgagatg

SEQ ID NO: 599445 - DNA, 83 bp, Homo sapiens
gagatattctactccatctcattcattgtacagatgacgaaggaactcccaggacaaaagaagaggattgccgtttaaatggt

SEQ ID NO: 599446 - DNA, 101 bp, Homo sapiens
ccagactgttactacaacctcgggcgtctggctaatctggtggctgcttttgagcagagcctggtgaatatgacatcccgcctgcgacacctggcagagac

SEQ ID NO: 599447 - DNA, 75 bp, Homo sapiens
tggcgtgcttgttggagaccccaatccgcatgagcgtcctttcggggatatcattttcaatgcccaatacccaga

SEQ ID NO: 599448 - DNA, 100 bp, Homo sapiens
tcctgtacacaatcttcatgaaagaggtgtctgcacttccatgtacaacaaacgctccgggaaatggaaagccagttggcagcccacatgtggttacctc

SEQ ID NO: 599449 - DNA, 83 bp, Homo sapiens
gctttgtctccttcgacttggagtctttgtccaggacggagcgagcccagggcgtggtgctgaaagtgctcacaaacttcaag

SEQ ID NO: 599450 - DNA, 90 bp, Homo sapiens
gaccccgtcggacccatggtttccagtgcagcgcggagtgggcgatgccagcgtgccaggtgggtcctgaataccatcccaagtgtcctt

SEQ ID NO: 599451 - DNA, 50 bp, Homo sapiens
gccaagcgtcctgcccggccgtaacaattctgtggtgttcttggtcacac

SEQ ID NO: 599452 - DNA, 97 bp, Homo sapiens
gattccttatccaatcgttctttgattgttaccaccattttggttgttggaagaggagcctttggagttgtttgcaaagctaagtggagagcaaaag

SEQ ID NO: 599453 - DNA, 100 bp, Homo sapiens
tgggttttagtcctgactgtcactacatggctgtgttacttctgattagaagcccaggacccaggaaggagacacaggaaatttattcaaagtccccacg

SEQ ID NO: 599454 - DNA, 96 bp, Homo sapiens
gggacatcgtggagacggtgctcaacctgattgatatcagtaaatgccattatttagtggatttggacaccatgagagaaacaccccgggagccaa

SEQ ID NO: 599455 - DNA, 75 bp, Homo sapiens
atgaggttacgagtagccatgtgccatatgatttatcggaagctcaaatctaatccaagtgaaaatgaagaaaag

SEQ ID NO: 599456 - DNA, 82 bp, Homo sapiens
tgaggcctgggagagtggagtggctggcctcaggccacacggaaagaccccaccaacaactgaacgctttggtcaggctgct

SEQ ID NO: 599457 - DNA, 100 bp, Homo sapiens
tgaagtggaccccacacattttgaaaagcgcttcctaaagaggatccgtgacttgggagagagattaatgattcatcaagggatagttgtacttgtctcg

SEQ ID NO: 599458 - DNA, 75 bp, Homo sapiens
attaatattttctccgttgcatctggtcatctctacgaaagatttcttcgggaaaaagacctcgatgaagttctg

SEQ ID NO: 599459 - DNA, 113 bp, Homo sapiens
attcgagtgaccgagaccgcggccgggaccgaggccctccagaatacccatcatatagcccctgaggtggcatggtgatgtctccatgagggaaccccttcccactcatcctg

SEQ ID NO: 599460 - DNA, 75 bp, Homo sapiens
ctggaacttatgctgtagacatttctttgtggtttatctaaaaaccaaagacatacaacagctgtgccagactct

SEQ ID NO: 599461 - DNA, 83 bp, Homo sapiens
tgggtttcccgggagatcccaggcggtgacagagtggagccatggctagagggttttggctgaagcggagcagctacgaggag

SEQ ID NO: 599462 - DNA, 50 bp, Homo sapiens
ggaagccctggtcggagcgagccggtgaaaaccggcagaaagacattaag

SEQ ID NO: 599463 - DNA, 82 bp, Homo sapiens
ggacagcacctcatcccctggatgggggaccacaagatcctcatcgacaggtacaggaagaaggaatggaatcggaaggaag

SEQ ID NO: 599464 - DNA, 90 bp, Homo sapiens
cgagctgagggtggcggcggtcgacatgttccaggtcccggatagcgagggcggccgcgccggctccagtgcaccgtccaggtgaggtta

SEQ ID NO: 599465 - DNA, 98 bp, Homo sapiens
atgaagccgaggtagaagaagatgaacccacagatttgaaagcgtcctttgagaggatggatcacctgcgacagctgcagaacatcattcaggccacg

SEQ ID NO: 599466 - DNA, 83 bp, Homo sapiens
ctcacagattccagcttcggaacaagagaccctggtcagatgtaccaacagtaccagcaacaggccggctatggtgcacagca

SEQ ID NO: 599467 - DNA, 100 bp, Homo sapiens
atattttgcgagtactcaacaccaacatcgatgggcggcggaaaatagcctttgccatcactgccattaagctcttggggtgaagccttattcctgatgc

SEQ ID NO: 599468 - DNA, 100 bp, Homo sapiens
gcgggaggtcttcgtggactgggactcgaacctgaccgacccggcagtgcgggttttcgactccactgctaacaaagataagttgcttcgcttgaagtta

SEQ ID NO: 599469 - DNA, 82 bp, Homo sapiens
gattgtgtctgcttggtgtggagccatgaagtattctaccttgtaaatactgttatttgtatatactgtaaatgatgacatc

SEQ ID NO: 599470 - DNA, 51 bp, Homo sapiens
cagcgctggacacccagcctccagcgtggtaccatgcgacgacgctatgaa

SEQ ID NO: 599471 - DNA, 100 bp, Homo sapiens
tgctgatctgagctcagacctgccaatttaccagagataattgataacaccctgtaacagctgaagagaaaaggaacagttccgtaagctctttattggt

SEQ ID NO: 599472 - DNA, 87 bp, Homo sapiens
tagacctggaatcgcccaagtccctctactcgcgaggcatcaagcatgatggaaccatgtgtgatacctgccgccagcaaccaatca

SEQ ID NO: 599473 - DNA, 75 bp, Homo sapiens
cgggccctgctggaccagctcatgggcacggctcgggacgacaagttggatggcttgaggactggtactaaaagg

SEQ ID NO: 599474 - DNA, 96 bp, Homo sapiens
cgcggcgctgggtcggtggcggaggctgaggagaaggaggagcgggccgtggaggcttcgccgcctaggtatgggcactaggaaaagacttcttcc

SEQ ID NO: 599475 - DNA, 100 bp, Homo sapiens
caacgcctggctcggagcagcagcctctgaggcgccatgtcagaaccggctggggatgtccgtcagaacccatgcggcagcaaggcctgccgccgcctct

SEQ ID NO: 599476 - DNA, 75 bp, Homo sapiens
gaaaatcaaaacaagctctttatgagaatggcatctaagaacagctttgctgagccatcaaggtctaatggaagc

SEQ ID NO: 599477 - DNA, 94 bp, Homo sapiens
ggaggttcgagcgctgttctcgctccggagccgctgcacatttcgattgtcctgggtcacataatgccagctgagcgtaaaaagccagcaagta

SEQ ID NO: 599478 - DNA, 74 bp, Homo sapiens
gctcctcagagagcctcggctagaattcagaaggagctggcggacatcactttagaccctccacctaattgcag

SEQ ID NO: 599479 - DNA, 74 bp, Homo sapiens
gggaccggtgtctggcggatgcggtcgtgaagataggtactccaaagattcaggtttactcacgtcatccagca

SEQ ID NO: 599480 - DNA, 75 bp, Homo sapiens
aggacaccgagtactcttatgcagtccccatggttgatgttctcaatcaagttgattggaatgcctggctctact

SEQ ID NO: 599481 - DNA, 90 bp, Homo sapiens
tggctattggaaggaggagattctgaagataaggaggtttggcagttctctaccagtggaccaatcttttcatccccgtgtacctcacca

SEQ ID NO: 599482 - DNA, 71 bp, Homo sapiens
aaaggctttgatgaatacatgaaggagctagatggcatggcagtgatcaaggttggagatcaagaaacaca

SEQ ID NO: 599483 - DNA, 100 bp, Homo sapiens
gctgcggaggcgttggagcgcggaaatctggaaccgggatggcgacgtctacactgagtcggaggcgaaggtctctaccttgacagacctccagccgtac

SEQ ID NO: 599484 - DNA, 101 bp, Homo sapiens
catcctggccgtgtcccccgccaactctgacctggccaattctgacgccctcaaggtcgccaaggaggtggacccccaggatgccgttccattgtttgctg

SEQ ID NO: 599485 - DNA, 71 bp, Homo sapiens
ccaacagaagcttctggtgcccaaagaatcttatgtggtgaataagtctgatgacacagcagaacatcttc

SEQ ID NO: 599486 - DNA, 100 bp, Homo sapiens
tggcacttcattggccacctacagaaacaaaatgtcaacaaattgatgggtatatgtattttaccaatcttcaggaaaggtctcctaaaattgaacgggc

SEQ ID NO: 599487 - DNA, 100 bp, Homo sapiens
agtgcgagttcttagaaatgatcgacgagaagtgagtgttgaaaagatagacctgaagggattatcacacacaaaaaatgacagaaatgttgaatgttcc

SEQ ID NO: 599488 - DNA, 100 bp, Homo sapiens
ctgtacattgaataaaaagattcgaaatgcacagttagcacagtataacttcattttaggttgggggccgtcccgctcctaaggcaggaagatggtggcc

SEQ ID NO: 599489 - DNA, 82 bp, Homo sapiens
ttgttgcaacatcccttgcgaggatgccaaagaagagtgaatggcccacaaagagcctggtagcacatacgcttttcaaaag

SEQ ID NO: 599490 - DNA, 100 bp, Homo sapiens
ccgcgacgtctatgtgggaaggcccagcctgaaccggcccatccatgcctcagagccacagccccacaaccgcacgatgcctggagttactgtaaaagac

SEQ ID NO: 599491 - DNA, 82 bp, Homo sapiens
agatgaaatgggaattcaccagctggggttgcctgtggctggagaaaggaatgtgctcatcaccagtgccctcccttacgtc

SEQ ID NO: 599492 - DNA, 75 bp, Homo sapiens
tggacgtgcacgcagcccggcgggaggataaagaccaccacgctatgaaatggccacctcacggggcatcatggg

SEQ ID NO: 599493 - DNA, 74 bp, Homo sapiens
agaaccgtgggtggtttctggatgttcattctggacagagtggaaggtgatacttgttcccttaatgagtttac

SEQ ID NO: 599494 - DNA, 98 bp, Homo sapiens
ggcggggacgtgctggccggccccggcggcggcggcggccttgggccggtggacgtacccagcgctcgcgtggaggtcctgaataaccatggtggctg

SEQ ID NO: 599495 - DNA, 101 bp, Homo sapiens
gggaaagggcgagaagcgcgccgtctccttccacagcctaaatgcgatggccaggtattactgacacaagtgtggaagcgtttaaacctggtagaatgtga

SEQ ID NO: 599496 - DNA, 80 bp, Homo sapiens
tttccgcccgcttcgatcgcctcgcgccggctgctctttccgggaatgaatctgaagtctgctgcagtaaaacacagaag

SEQ ID NO: 599497 - DNA, 101 bp, Homo sapiens
catgcccaccactgccacaaacgccgcaccaggtcttgtagcagcgcctcctcgggatcgtgggactttaccagatcggtttgtaataacacctcgaagac

SEQ ID NO: 599498 - DNA, 129 bp, Homo sapiens
ctggaacaccttcacccgcttccgcagcccgctcgtgcccggcttctggtcctgaaatatggctacacacacctttctgcaggagagctgcttcgtgatgaaaggaagaacccagattcacagtatggt

SEQ ID NO: 599499 - DNA, 90 bp, Homo sapiens
cgcgaccagaccggcccccccgagaataccctctaccatctgctttggtcagggtgccgctcgaggatttaaaagcaacaagaagaaaac

SEQ ID NO: 599500 - DNA, 89 bp, Homo sapiens
ctttgcaaagttgataacatttcaaaccctgaaggacagtgacttattatgatgccttccgtgccttccatcaagatctcaattttgtg

SEQ ID NO: 599501 - DNA, 100 bp, Homo sapiens
tgggaccgggtcaaaattgtttgcagccagccctacagcaagacttcacagagaatgcagttgtcttgacttcaggtctgtctgttctgttggcaagtaa

SEQ ID NO: 599502 - DNA, 101 bp, Homo sapiens
tgtcctggacggtgtcctaatggaactgcaagactgtgcccttcccctcctgaaaggtgggatgcagatcttcgtgaagaccctgactggtaagaccatca

SEQ ID NO: 599503 - DNA, 75 bp, Homo sapiens
ctgggagctgaggaaccagatatcttgaaaagctgccagaaaggtaagaatgattgatgttggctgatattggag

SEQ ID NO: 599504 - DNA, 75 bp, Homo sapiens
cttgaaggtttacacttgtcaacttcctcttcagtcatcagtctgcaagcctccagagaagcaggagcagcagct

SEQ ID NO: 599505 - DNA, 50 bp, Homo sapiens
ggtctctataagaagatgatccagaaaaagtcctacctggagcgaagcgt

SEQ ID NO: 599506 - DNA, 50 bp, Homo sapiens
cacggaacatgaaggactttgaaaatagtatgtatgtaactgctctgtgg

SEQ ID NO: 599507 - DNA, 83 bp, Homo sapiens
cgagagagaattcctgagagagttgtgcatgctaaaggagcagataccagcgggcaagcagaaaacaagaggctcaagagggg

SEQ ID NO: 599508 - DNA, 100 bp, Homo sapiens
aaacaacttacagacttccacaagcaagtcactagctggaatagtcaaatgatttcagttcgtgaagccaaagccattccaaggcctgatggtattgaat

SEQ ID NO: 599509 - DNA, 51 bp, Homo sapiens
aacactcagcctcttcagcaaggaatgtatcctgtcaggtataatgtcagt

SEQ ID NO: 599510 - DNA, 101 bp, Homo sapiens
agatgaagctttgagtaacattgccagagagattttaggtgatgggcaagtcagaaagtcagatggatataactgatatcaacactccaaagccaaagaag

SEQ ID NO: 599511 - DNA, 74 bp, Homo sapiens
tgtacaccctcaacaaacaccagcgctttgggatgaggatgggacagaagaggataacagtcgtgttgaacctg

SEQ ID NO: 599512 - DNA, 50 bp, Homo sapiens
gccgaaaggatgcaaactcgtgggaaaggaactgaaacatttgatcttgg

SEQ ID NO: 599513 - DNA, 88 bp, Homo sapiens
ttaaatgacagttcacataagaagttcttcgatgtatctaaacttggcaccaagtatggaggcaagtgaggcctatctggttggcctt

SEQ ID NO: 599514 - DNA, 101 bp, Homo sapiens
tgttcttgttgtggatgaagctcacaggttgaaaaaccaaagctccctgctgcataagaccttgtcagagatctttctcctggcctgccctccatgtcggg

SEQ ID NO: 599515 - DNA, 101 bp, Homo sapiens
gggacgtgcgcttccccacgtcgcttgggggccacggcgcggacgccatgaagctgcagttcatcatctgctgtgatagttccacaaccagaggatccaga

SEQ ID NO: 599516 - DNA, 82 bp, Homo sapiens
tcctgccgtccatgcggaagatcgtcgccacctggatgctggaggtcgcaatggaagaagagatcgccgcgctggtcattga

SEQ ID NO: 599517 - DNA, 122 bp, Homo sapiens
aaaaggccatttgttggaagatgttgttactcctgcactccccagagctggccagatatagctgagaagtacctgtcggcttcagagtatgggagctccgtggatggccaccctgaggtccc

SEQ ID NO: 599518 - DNA, 75 bp, Homo sapiens
gatcgtcttcagctacatattctgccttttcaacactacacagattgtggtggtgccatgcagcaagaatcagag

SEQ ID NO: 599519 - DNA, 100 bp, Homo sapiens
ctggagggacggcgccgtcaccctggcgcccgcggccgacgacgcgggagagccgcccccagttgcgggaaatgagtggcttatactctcctgtcagtga

SEQ ID NO: 599520 - DNA, 75 bp, Homo sapiens
ccggaaccgccgggccgaacagcatgacgtccgctttggagaactacatcaacccctcccacatgtcatcagcag

SEQ ID NO: 599521 - DNA, 101 bp, Homo sapiens
aaggacttgaggattcgttttcctggctttgagcccctcacaccctggatccttgacctactagatgtgggctctcttgatgagaagatgaagagcttgga

SEQ ID NO: 599522 - DNA, 51 bp, Homo sapiens
cttcctgtgcagtcctgttggaatttggttacacatcattttggaatgact

SEQ ID NO: 599523 - DNA, 90 bp, Homo sapiens
gcccacatgcccgctcacctgcgctgtgatgcctgcagagctgtggcttaccagaggagcacccccagtcccgtgctgcagccccgtgac

SEQ ID NO: 599524 - DNA, 90 bp, Homo sapiens
gcccgactcggtgattgaggacaagaccatcgagctcatgtgttatccaagataaattctgtgggattataaacatttcagtagaaggcc

SEQ ID NO: 599525 - DNA, 80 bp, Homo sapiens
caaaaagtatgatggattacagcaacagttgtcttcagtagaaagggctatcaagaattttaatggagctggatggacca

SEQ ID NO: 599526 - DNA, 100 bp, Homo sapiens
ggaagatgttggagaagatgggttggaagaaaggagagggcctggggaaggatggtggaggaatgaaaacgccggacagagcgggatgccaccagcttgt

SEQ ID NO: 599527 - DNA, 75 bp, Homo sapiens
cgaggaggcggcggagcagcgggcggaggtggaccggatgctcagttggaaatctacatttctgaaggaacccac

SEQ ID NO: 599528 - DNA, 100 bp, Homo sapiens
gggtttcgtgtgtttgacaaggaggggaacggcaaagtcatgggagcagagctcagacatgttctcaccacccttggccgttaattaaggaaaagttgag

SEQ ID NO: 599529 - DNA, 80 bp, Homo sapiens
gaaggctgaggtggcagcggcaggagagtccggccgcgacaggacgatgggggctccggaggtggcgcccaggctctgag

SEQ ID NO: 599530 - DNA, 51 bp, Homo sapiens
cgccggcgacatggccagctccggagagggtattctcccaacagaaatgag

SEQ ID NO: 599531 - DNA, 88 bp, Homo sapiens
gacaggcctacactctattcaaacaggcttcgggagcaagttctgcttgaacctagccgacggttatggaaacccattgacattccaa

SEQ ID NO: 599532 - DNA, 50 bp, Homo sapiens
attccttggggcaaaatgtggacaaggggacactccggacgcaggcccgg

SEQ ID NO: 599533 - DNA, 97 bp, Homo sapiens
ctctttctggcctggaggctatccagcatggccgccaagaacgagtcatgtttgacaaaattacatctcgaatccagaagctttgttatggactcaa

SEQ ID NO: 599534 - DNA, 50 bp, Homo sapiens
ctgctctccaaggagcatgctcgcagctccttatacaggatgctgtgttc

SEQ ID NO: 599535 - DNA, 73 bp, Homo sapiens
atctaaaagaatatgatccagatgatcatctgatagaagaggttacctgggcttgtatgtgttctatgtggtc

SEQ ID NO: 599536 - DNA, 82 bp, Homo sapiens
atcagtgatgaatgcaagaggcgtttctataagaattggtggcttcagtaagttccaagccgagttctccctgcattgcgag

SEQ ID NO: 599537 - DNA, 104 bp, Homo sapiens
ggaacccgtggtcctccgcttcatgatacattaattgtttggtcagaagcagagaactatgatttggctctgagttttcaggagaaagctggctgtgatgagat

SEQ ID NO: 599538 - DNA, 100 bp, Homo sapiens
atcagaacctcaattctgttgatcttcaaaatgctgcagaaatgctcactgcaaaagtgaaaggtggcatggaatattcacatgggagagccgcatgagg

SEQ ID NO: 599539 - DNA, 100 bp, Homo sapiens
agtactatatttagtagtgaaaccaaatacatcctctaaaagaagttcattatcacacaagatcctgataacttaagtgactctctcttttccggtgatg

SEQ ID NO: 599540 - DNA, 74 bp, Homo sapiens
gctgcacataacaaaaattccaacaagtccagaatgtcacattaactttgctctagaagacaactttacaagga

SEQ ID NO: 599541 - DNA, 100 bp, Homo sapiens
tgtgcgggttcaggaggtacccaaactgaagggttatgtggtccgaatcagtggtgggaacgacaaacaaggtttccccatgaagcagggtgtcttgacc

SEQ ID NO: 599542 - DNA, 75 bp, Homo sapiens
agaaggtggtagacaagttcatcaagcaaagggactaccaccagcagatgtatcggcaagcagtgtaaacggagg

SEQ ID NO: 599543 - DNA, 99 bp, Homo sapiens
cgagactggaggctgagtgctaaactgtgtggggcgcggatgggatccagctgttagtcgggtgtcctggggaagtgtcgctacgtttactatgggaaa

SEQ ID NO: 599544 - DNA, 100 bp, Homo sapiens
gcagtatccttggggtgttgctgaagataattctgaaataatcagcagaaacggaatggaatgccaagaatctgcattgagaataactaaacattgttac

SEQ ID NO: 599545 - DNA, 90 bp, Homo sapiens
gctacttaaaatatgctggggaccatcaccatcacagtatcgtcgtcctccccgcagtcaggctgcccatcacccaccattccagcaggt

SEQ ID NO: 599546 - DNA, 98 bp, Homo sapiens
ttggttctcccggcagcagcccgacgcaaaccaaggatctggggatcttcgcactatcccaagaccatgtcgcctgaagaatggacgtatctagtggt

SEQ ID NO: 599547 - DNA, 101 bp, Homo sapiens
cgctggggactgcgggcggcgctgtgtccgtcgccatgacaggtactaggttttgacaagcttgcatcatgcgtgagtataagctagtcgttcttggctca

SEQ ID NO: 599548 - DNA, 100 bp, Homo sapiens
agccgcaagtacccgtccatcatagtcaactgcgtggaagagaagaaactagaaaaactgcttttggaattatctctacagtgaagaaacctcggccatc

SEQ ID NO: 599549 - DNA, 100 bp, Homo sapiens
ctggtggatggctgctactccttctggcaggcggggctcctgcccctgctccaccgcgcactgcacgcccaagatattgcatgacattgaaacagacaaa

SEQ ID NO: 599550 - DNA, 50 bp, Homo sapiens
ggagcccagacaccagccccccaccatgtctattatcctcccagtccaca

SEQ ID NO: 599551 - DNA, 83 bp, Homo sapiens
ctctacttttcaagacaccaagtgagaggccaaccagataagaccatcatcatgtggaaactgaccagggatgagaccaacta

SEQ ID NO: 599552 - DNA, 50 bp, Homo sapiens
cgaggaaacctggtctcccggagccagagtcttgctctgtggcccaggct

SEQ ID NO: 599553 - DNA, 100 bp, Homo sapiens
atgttttctcctgatcaagaaaatcatccatctaaagcaccagtaaaatatggtgaactcattgtcttaggattgtagaaggcatgaaacaaaaaatgtg

SEQ ID NO: 599554 - DNA, 75 bp, Homo sapiens
ttgtgcttcctgctggccgtgctgctgcagtgaaacgtgttcctggagcttctgaatatcctgtcaaagacttga

SEQ ID NO: 599555 - DNA, 74 bp, Homo sapiens
ggcggcgagaggctgggggcccagattccttcgcttaattacctccccagccaggaggatatgcctcataacca

SEQ ID NO: 599556 - DNA, 100 bp, Homo sapiens
cccgcagctgccgctgttgcagtcgtccgggcctttcgtggaaggctctatcgtccgcatctcgatggagaacttcctacatggagcagagtaaccctgc

SEQ ID NO: 599557 - DNA, 75 bp, Homo sapiens
gaaacttttgcccttatcagtaacacctgagatgatgaggccgttgtggaagttaacattcctggaagtgaaagc

SEQ ID NO: 599558 - DNA, 96 bp, Homo sapiens
tgggccatgagctcttcaaattggcccagatctttttcaacggggcaattgaaggaacagactaaaaatcgtgtcctggaaggaaactacaggtac

SEQ ID NO: 599559 - DNA, 82 bp, Homo sapiens
gacccccagccaaacagagagaccttgaaggggcagtcagtagcactgctccgtgtggagatggcgccctctttgacaagtc

SEQ ID NO: 599560 - DNA, 76 bp, Homo sapiens
tgcctcccagatgaccaaagtgacacaggttgatgccggcccaggatggatcagacctgtgaactacccagaagaa

SEQ ID NO: 599561 - DNA, 90 bp, Homo sapiens
acgatcctcaccgcaacattccttatccaatcccttaccggccttcccttcttcttggtggtgttcttgagtaagataatctggactggc

SEQ ID NO: 599562 - DNA, 83 bp, Homo sapiens
caactctcagttcgagagtaaagattgttagactgctgttggaacgcggctgtgatgtgaacctaagtgacaagcaaggccgg

SEQ ID NO: 599563 - DNA, 74 bp, Homo sapiens
cctttccgtctggcggcagccatcagggagaaggctctggccctcacagggaaccagggcatcgaggctgcgat

SEQ ID NO: 599564 - DNA, 80 bp, Homo sapiens
gccttattggaaaaacatttcttaccctgatcctgcctgaagatggtgccactggtggctgtggtatcagggccccgtgc

SEQ ID NO: 599565 - DNA, 82 bp, Homo sapiens
gaatgcatacttggaatgaatccttctagagacgtccacgatccaaaatacggagctggcatatacttcaccaagaacctca

SEQ ID NO: 599566 - DNA, 101 bp, Homo sapiens
agttttatttgctgccaaaagggaagcaaagcatctcaaagggatggtctcactgtgttgctgatcttgaactcctgacctcaagcaatcctctgtcttgg

SEQ ID NO: 599567 - DNA, 83 bp, Homo sapiens
caagacatttcctgctcggaaccttgtttactaattatcaggatcctcatgaccagccaaagagaagaagaattaggaagcat

SEQ ID NO: 599568 - DNA, 82 bp, Homo sapiens
ctgtctccagcgcctcttctttgagaaccaccctgcctccatccctgccaaggtggaaaaggagggagctactctaaggctg

SEQ ID NO: 599569 - DNA, 100 bp, Homo sapiens
tggagagcttcatcaaaaatagtgatagctttgataaccagagactgctgctactttgaaacgtacgatagaggccctgatggacagaggagcaatagtg

SEQ ID NO: 599570 - DNA, 100 bp, Homo sapiens
atttcccaaatggaaaccaggaagcctagcatcccatgtcaaaaacttggatgaaaatggcttggatttgctctcgagctggaaaggtgctggcgaagct

SEQ ID NO: 599571 - DNA, 96 bp, Homo sapiens
gactggcccaagttctttgaaaagagctggaagtcgagtgtgctactcaactcaggagatttggagacaaactgaacttccggcagaaacttctga

SEQ ID NO: 599572 - DNA, 100 bp, Homo sapiens
cagaaaccccgttgacaaggcactgctttttcatgacggtacatgtgaagattttttggcagcttagcgtggaaaccattgatcaccctgctctcatttc

SEQ ID NO: 599573 - DNA, 75 bp, Homo sapiens
gtgtacttgcaagaaacctcaggacttgagtaacagcaacatggtaacctgtgtatggtgactggaggtgctaac

SEQ ID NO: 599574 - DNA, 82 bp, Homo sapiens
ggaagctgctaacccgacccggattggcgctgaggtggcccgtggggcaggatgcagcagtctcggccctggctgctctatg

SEQ ID NO: 599575 - DNA, 82 bp, Homo sapiens
cagcaacatcttaatgcacagccacaagttacaatgcaacagatggagtctacctttgtcacccaggctggaatgcagtggg

SEQ ID NO: 599576 - DNA, 100 bp, Homo sapiens
gttcctactgtaaaggagatgggttagatgttgagtatgctgtgaactgccatgtgatcacctgggagaggattatcagccactttgatatttttgcatt

SEQ ID NO: 599577 - DNA, 100 bp, Homo sapiens
cggctggatttctctctggaaaggattttcattcatcatgagagagcagaaggaggccagggagaacagcagcctttgagtggaagttggaccagccctc

SEQ ID NO: 599578 - DNA, 98 bp, Homo sapiens
atcgtattcccggaatcagacggtgccccatagatggccagctttcccccgagggtcaacgagaaagagatcgggtactagatggaaacttgagaaag

SEQ ID NO: 599579 - DNA, 75 bp, Homo sapiens
tgtaattcttaatcagcctttggacaactattttcgtcatctttggaacaaagggtttgtggatgcacttagatg

SEQ ID NO: 599580 - DNA, 75 bp, Homo sapiens
tggtgagcgaggagctctccgagaagcaatgagtgttaaaagatcactgaagttggatggtctgttagaagaaaa

SEQ ID NO: 599581 - DNA, 74 bp, Homo sapiens
atatagagatgtgatgttggagaactacagaaacctcgtctccctgggctcccgtcttcgtcaggaagattttc

SEQ ID NO: 599582 - DNA, 82 bp, Homo sapiens
gggccagctgacggagatggtgcagaagatggaggagcaaattgtggctactaatttgccccctgaagatcaagatggctct

SEQ ID NO: 599583 - DNA, 98 bp, Homo sapiens
cagttcttcatccacccactaatgatcagagatgcaattgaccgtgaagttgaagctgttgatagtgatgaccgtcgtgatgtgagtaggtatggaga

SEQ ID NO: 599584 - DNA, 100 bp, Homo sapiens
caacggacgctggcatagcacagcctgcgagtcatttctgcaaggtgccatttgtcatgtgccacctgaatatgtacagctttatactgacttccttctg

SEQ ID NO: 599585 - DNA, 98 bp, Homo sapiens
agcgctctgcatgctggggctggtcctggccttgctgtcctccagctctgctgaggagtacgtgggcctgtgagtttgacctggacattgttgcagtc

SEQ ID NO: 599586 - DNA, 100 bp, Homo sapiens
gacacagctgttcagcccctggtggctgtgctcattgattcaggtgacacctattattttggagacaagttggatggcttgaggactggtactaaaagga

SEQ ID NO: 599587 - DNA, 89 bp, Homo sapiens
ttctggttggaaacttgtcaaatttcatcagtttttggctttcacccccaaccagtgaccaaagacttgaccactcaaagtccagctcc

SEQ ID NO: 599588 - DNA, 75 bp, Homo sapiens
tgagcttgccgcacaaaaagctagagaggttgtttacattcagagctctatcaataagaggaatacatattacag

SEQ ID NO: 599589 - DNA, 100 bp, Homo sapiens
cagagaatggagaagaaggttgattccagaacccattaaaagagccagtaaatcctgtggaaaatggccttcagtgatcttacatcgaggactgtgcatc

SEQ ID NO: 599590 - DNA, 49 bp, Homo sapiens
ggtgtgctgtgcctgaggccaggtttgccaggcactttgtggagaacgg

SEQ ID NO: 599591 - DNA, 82 bp, Homo sapiens
agtgaccgagaccgcggccgggaccgagggtcatagagctgcccaacatccagaaggtcgaagtgtacccagtagaactgct

SEQ ID NO: 599592 - DNA, 90 bp, Homo sapiens
gcagtgcctccaagggttcttaaagcagaggttgcagagcctgaggcctgtgatcagatgtacgagagcttagcgcgactccattcaaac

SEQ ID NO: 599593 - DNA, 100 bp, Homo sapiens
gaagtttcaaggaagctttgaatgtcatcaatactcacaccaaagtgttagccaacgcgcagggaccatgtcggcggagaccgcgagcggccccacagag

SEQ ID NO: 599594 - DNA, 98 bp, Homo sapiens
gccattccagcactggactcatggaggctgagcatttattcagatagggtctctctctctgccacccaggccagagtgcagttgacgcagggcagggg

SEQ ID NO: 599595 - DNA, 74 bp, Homo sapiens
tcggaccagcttttcaaacaatacagggatttgtcttggctgttactatgacacgggaagcaattgatgaattt

SEQ ID NO: 599596 - DNA, 75 bp, Homo sapiens
ggaaaaactggagagcttcatcaaaaatagtgatagctttgataaaattcagaaggagctggcggacatcacttt

SEQ ID NO: 599597 - DNA, 119 bp, Homo sapiens
cagctgtgatcacagtcactgacaccaacgataatcctccgatcttcaatcccaccacggaccgtctcattgcacttgatgctgcagaagagttctttaagcttgctcgtcgaacttac

SEQ ID NO: 599598 - DNA, 83 bp, Homo sapiens
ggcatttacagaaagagtcaacagcagtggcaacagaaaccgaaacttcattgccccttcaatgtgggaatccagccagaccc

SEQ ID NO: 599599 - DNA, 50 bp, Homo sapiens
cagccgacgccgttcaaaggaacgaggtcaaaatgcagatcttcgtgaaa

SEQ ID NO: 599600 - DNA, 75 bp, Homo sapiens
ctttttcttcaatgggcagcatatgaaagtggattatggggtgataaaagaaaatgtggctgaagttacccgaag

SEQ ID NO: 599601 - DNA, 50 bp, Homo sapiens
tgagcatgaggttttccaatcagtcaggtagcattggtgctgcagatagt

SEQ ID NO: 599602 - DNA, 100 bp, Homo sapiens
agtcatgctcgcttcacggaggcaatagctagccggtggcacaagatctctgtaaagtagcaggcatagcaaaagttctggtggctcagcatgatgtgta

SEQ ID NO: 599603 - DNA, 75 bp, Homo sapiens
tgtcaaaaggctgtgttaagtgattctctgacaaggccaaagatgaagaggaagcctttctggattggagtgatg

SEQ ID NO: 599604 - DNA, 74 bp, Homo sapiens
ggcaggagcgcttccgcaccatcacctccacggccaattcctgtccccccagcagcatggcatcgtgtgctgaa

SEQ ID NO: 599605 - DNA, 50 bp, Homo sapiens
ctcggtgatgggctgcgatgtactcaaagtgttttaaccaaacagttgtg

SEQ ID NO: 599606 - DNA, 75 bp, Homo sapiens
ccatcccggccacgcgggtggaggtgtccgtgtcctgcagatttcagaagttgattgcaaagatgcactggaaat

SEQ ID NO: 599607 - DNA, 95 bp, Homo sapiens
gagcaacagctttcagcaacacagaaattcaggaagctgctttcaaaagatgaaccggacgacccccgaccaggagctggtgccggcgtcggagc

SEQ ID NO: 599608 - DNA, 82 bp, Homo sapiens
ggcctcatctggacaatcattctgcacttccaggatctcgaggacctggaagaagcagaggagccagacatggaggaagacg

SEQ ID NO: 599609 - DNA, 75 bp, Homo sapiens
ctcgggagattcagccgtgaagcaagtgcagatagatggccttatttggaggccaatcactgccaccttttattt

SEQ ID NO: 599610 - DNA, 90 bp, Homo sapiens
tggattattctataaccaagagagcgcacacaccaacaccaggcatctacatgggcagaccaactcactacctggtgttcaatgtcatcc

SEQ ID NO: 599611 - DNA, 51 bp, Homo sapiens
ccgcggccggggcaggagcgcaggaaaacggacgatgtattactaagctgg

SEQ ID NO: 599612 - DNA, 100 bp, Homo sapiens
tcaaggagattaaatccccagaaatggcagagatggtggaagagagtgaagagcggctcacggaggagcagattgaagctcttctccacaccgtcaccag

SEQ ID NO: 599613 - DNA, 100 bp, Homo sapiens
ctcatatgtctcaggcttccatgcagcctgccttaccggattccagtggaatgacactggtgatgcttgccgccgccggagggcaggacgacctcctgcg

SEQ ID NO: 599614 - DNA, 82 bp, Homo sapiens
cctaggggcagcgagcaagacagcaagcaggaagcgccgcggagccatcaacagcaagcagctcacctacctggagaaatac

SEQ ID NO: 599615 - DNA, 74 bp, Homo sapiens
gtccaactgtgaagccagatgataagtttttagtgggcatgaaaggcaaggatgaagctatggccattggaggc

SEQ ID NO: 599616 - DNA, 75 bp, Homo sapiens
gctgtattaaaactctgtgactttggaagaaattgtatgctgctatgcatgaacctgatggagtggccggagtca

SEQ ID NO: 599617 - DNA, 89 bp, Homo sapiens
cttcctgtcgctgacggcgactgcgggaggccagttgtcgagatgtccacagaaggaggatttggtggtactagcagcagtgatgccca

SEQ ID NO: 599618 - DNA, 75 bp, Homo sapiens
gccgcccggctcttgggaaccaagcacttggctgctgttgaggaaaggaagatcaaatctttggtggccctgctg

SEQ ID NO: 599619 - DNA, 82 bp, Homo sapiens
ggtgggtcctcgcttgcagttcagcgaccacgattcttctgatgtagagcgactggaaagattcttcgactcagaagatgaa

SEQ ID NO: 599620 - DNA, 98 bp, Homo sapiens
tgcttctcaacttacagatgggacttcacctatagatcattgccgcgtatgatgctgtccttgacagaaatgtggccattaagaagctcagcagaccc

SEQ ID NO: 599621 - DNA, 90 bp, Homo sapiens
gtaaccagtctatgggaagtgaggctgaagccgacgtagcttctctgaacagacgcatccagctggttgaggaagagttggatcgtgccc

SEQ ID NO: 599622 - DNA, 101 bp, Homo sapiens
ggatcacactcttgtgagtgtccccagtgttgcagaggggctggctgtgggcaatggactctcctcctatgagcagaatgacaactccctggtctactttg

SEQ ID NO: 599623 - DNA, 97 bp, Homo sapiens
tcctggcgctttcctgggttgcttctggcggccatggtgttgctgctgtactccttctccgtggtctgcaagaagaatctggacagtaccactgtgg

SEQ ID NO: 599624 - DNA, 90 bp, Homo sapiens
gcactgggtgtacctgctttgcttctctgcagaatattggaagtggcaagatgttctcaattaacagatgtgggctttaccactctagcc

SEQ ID NO: 599625 - DNA, 100 bp, Homo sapiens
gtacgtgtacatcatttacggcatgtacttctgcatgaacatctccagccaggaattcaaggaagccttctccctatttgataaagatggcgatggcacc

SEQ ID NO: 599626 - DNA, 83 bp, Homo sapiens
cagcgaccgatatagctcgccaggtggtaaaagtgcagttttaaagtgtctcctggatattcacaaaatttttcaggaaaatg

SEQ ID NO: 599627 - DNA, 80 bp, Homo sapiens
catcattggacccaatggctctggctttatcctgtggataaacgcagagtgaacgagtttggggagtcctacgaggagaa

SEQ ID NO: 599628 - DNA, 75 bp, Homo sapiens
caacgcctacttaaatgctgtgcgctggcaccctcagaacaggattaaagcctgtggtttccacagaagcaccac

SEQ ID NO: 599629 - DNA, 100 bp, Homo sapiens
gaggagagacagaagaagctggaggccggcaaagccaagtgaatggacctgagtggaccctttgatcacatcagtaaacatgagcggtaccaaacctgat

SEQ ID NO: 599630 - DNA, 75 bp, Homo sapiens
ccccgcttccgccgcgtcggaatgagctcccggaaaggaatttggataaagagagggcagtgctactacaacgcc

SEQ ID NO: 599631 - DNA, 83 bp, Homo sapiens
cacaacagacccactgatacgctgggactcgtacgagaacctcagtgcagatggagaaggtcatgtccatcctgttgcatggg

SEQ ID NO: 599632 - DNA, 75 bp, Homo sapiens
tacacatcggtttcccttccagccattggaacaggacaatggtgggagctcaggccccacggagcaggcggcctg

SEQ ID NO: 599633 - DNA, 100 bp, Homo sapiens
cacaaacggcgcacattggtatgatgtggaaggagaactcctggaagccccgtcttcctcctcatgcccattgcctgaccagagccaccctgcactcagg

SEQ ID NO: 599634 - DNA, 75 bp, Homo sapiens
tccacacatgcttgtaaaataaaggcatattacctgacctacattcttcttcatttagtcggtgaagttagttgt

SEQ ID NO: 599635 - DNA, 76 bp, Homo sapiens
ccccagtgagctcctggattctgctggtactggaggcgcaaagaaggcatcagaaggagaaatctggcatcatacc

SEQ ID NO: 599636 - DNA, 75 bp, Homo sapiens
gcgtgatattttaaacatggaaaagacactgaaaggcctcaacaggaagattgttgatcgaatcgacaatgatgg

SEQ ID NO: 599637 - DNA, 97 bp, Homo sapiens
aactttttgtatctcgacactctgcaagattctctcctgaagtcccagctccagcgccagagtggttcacattcaaccctcctcccccagtgcagag

SEQ ID NO: 599638 - DNA, 100 bp, Homo sapiens
tggaagtattttgttatgccagtggatgatgttggagaaaaattagagcatatggggaatacaccattaaaaattggcagtgatggttcacaagaagatg

SEQ ID NO: 599639 - DNA, 98 bp, Homo sapiens
gagtgacatgttcacgggaaggctgcggaccgagatcccaccagccctgatattctaaagggaaggactgagaccctgaagccagacccccacctccg

SEQ ID NO: 599640 - DNA, 100 bp, Homo sapiens
cttccccagctctgcagccacatactatccgtttgttcaggaaccaccagtgacagaccttgataaatttgctgaagttccttatgtcaaatgagactgt

SEQ ID NO: 599641 - DNA, 74 bp, Homo sapiens
ctctgcaaatatgagagattctgcagaagttgctgccaaacaaggtgaatccgacccagagaggaaagaaacaa

SEQ ID NO: 599642 - DNA, 96 bp, Homo sapiens
tgcccaagtgatttcttcttgcattattcccatcaatgttactggcatctgtcatcagttctggggaataagtttgaccatggagctgaagccatt

SEQ ID NO: 599643 - DNA, 75 bp, Homo sapiens
cacattgtgttctgcaaaaaacaaaaaggatagcctccggcattccagggaagaatggacagaagctatccaggc

SEQ ID NO: 599644 - DNA, 74 bp, Homo sapiens
gacacagagaatttttccaagttacagctacctaggaagttattccaacttttgacatggctgtcaatgaaatc

SEQ ID NO: 599645 - DNA, 82 bp, Homo sapiens
cgcgcccgcccgcttgccgggctcccgcggccgcggcgccccgaagggggatatgagactttctactcggaatatcctgagt

SEQ ID NO: 599646 - DNA, 83 bp, Homo sapiens
ggcgcctcccgaggacgcagaggctggggagtagctgctgaggtgtggacactgccagcggctgcagccgacttggaatgacc

SEQ ID NO: 599647 - DNA, 100 bp, Homo sapiens
gccctgagcgcactctggagggattctggcatcagggaggctttcagccggagaagcgagtttcagctgctgctactgtttgaacggtcttggatgaaca

SEQ ID NO: 599648 - DNA, 95 bp, Homo sapiens
cgagatgtctcgctccgtggccttagctgtgctcgcgctactctctctttctggcctggaggctatccagcgttcgatacaagaggctgttttcc

SEQ ID NO: 599649 - DNA, 83 bp, Homo sapiens
cctggatcttcgaacttttgacacggctttggaaacgacgtcatgtgttagggtgtccgcaatgttgccagtgtctgtctgca

SEQ ID NO: 599650 - DNA, 98 bp, Homo sapiens
cctcttggagtcggagcttcgcgacggcagcggcaagaagcccttgccagcatccagccatgggggatatgaaaaccccagattttgatgaccttctg

SEQ ID NO: 599651 - DNA, 80 bp, Homo sapiens
gaccctggactccaacaacaacacagagctggaagtcgagtgtgctactcaactcaggagatttggagacaaactgaact

SEQ ID NO: 599652 - DNA, 101 bp, Homo sapiens
atcacaccaacttcctctcgaatatcaagaaatgcagtaaccagcatgtcaataaggggtcataggtggaaaagacatgagtctcgctctgttgcccaggc

SEQ ID NO: 599653 - DNA, 100 bp, Homo sapiens
ggaaccctggtcaccgtctcctcaggtttacccaaggtccagcctagcccctaggcaccatgtcggacagtgatctaggtgaggacgaaggcctcctctc

SEQ ID NO: 599654 - DNA, 74 bp, Homo sapiens
cgaaccaacggttagcggtggcaggggctgactgagagcgtctgcttgcactattcctgatcagagaactccag

SEQ ID NO: 599655 - DNA, 50 bp, Homo sapiens
gttcgacatcctggccgtgctgcagatgggggctccggaggtggcgccca

SEQ ID NO: 599656 - DNA, 75 bp, Homo sapiens
ttccccggctcgccaactcggctgctctgggggattcgtgcgcgattgatatgctgctgaaagaatatttactct

SEQ ID NO: 599657 - DNA, 90 bp, Homo sapiens
cggcgccgaggctcgcaccgggagctgcccatgggccgggcccggagttccggcgcgccgggagccgtagagacgggggttcaccatgtt

SEQ ID NO: 599658 - DNA, 82 bp, Homo sapiens
ctacggtcctcacggccggcgcttacctctgctacaggcttcctgcctgacacagctcacttcaagaagtgcacaatgtcag

SEQ ID NO: 599659 - DNA, 77 bp, Homo sapiens
gtggagcgtgtcctgaaggagttccaccaggccgggaagcccatcgggacggggaggtttactgcatcgacgcgcgg

SEQ ID NO: 599660 - DNA, 99 bp, Homo sapiens
aagctgatcacctggagtgaagacctcacacgcccagactgatcttgcttccttggcctttatccccttggctttcctagacactgccttgtgctggtg

SEQ ID NO: 599661 - DNA, 83 bp, Homo sapiens
tgaatatctgcacacaaattccccaagaagatgaaaggattgttcttgttgacaacaaatgtaagtgtgcccggattacttcc

SEQ ID NO: 599662 - DNA, 98 bp, Homo sapiens
ccgcctgcgggctgcttcgggccagggtcgacccgagggccagcgcaagcagcggcaacaggagcgccaggaggtaccccagagttcatggcccctga

SEQ ID NO: 599663 - DNA, 100 bp, Homo sapiens
tcttcatgtgtctcttctaagctgaataaagctgttttggaactgtcaggtacctcaaagctgtctcagtttgaaactgaattctacatcagtggacttg

SEQ ID NO: 599664 - DNA, 76 bp, Homo sapiens
tgcctgggcctcaacgtcttgttcctcactttgaatgaggatcaaagaaatcggctggacagatgtcgggggctgg

SEQ ID NO: 599665 - DNA, 100 bp, Homo sapiens
ggagcttaaaaagctgcacgcaagtgttaaacttctggacactgcccatctctaagataagaacctggaaaggggactctgttggccattggaaattgca

SEQ ID NO: 599666 - DNA, 98 bp, Homo sapiens
tgggatccggctcctccagctaccggcccaaggccatctacctggacatcgatggacgcattcagaagaatcatattctaagaactcagccactcagg

SEQ ID NO: 599667 - DNA, 84 bp, Homo sapiens
cctgcagtacctgcagaaggtctctggagacatcttcagcagtaatctcaggggcgatataatcaatgaggtggtcctaaagtt

SEQ ID NO: 599668 - DNA, 75 bp, Homo sapiens
tgatggtgatggagattttgatgtggatgatgccaaagttttattagagctagagccggtgcaggccacgcagaa

SEQ ID NO: 599669 - DNA, 100 bp, Homo sapiens
ggctgtttggaaagacccaggagaagccgcccaaagaactgatatacacagaagttcctgctcttcgctacaatgagggaaaaaagtggcaacatcgata

SEQ ID NO: 599670 - DNA, 75 bp, Homo sapiens
agcacctccaagtgttcctcgaagggactacgcttcaggtggaagttaaacgagctgagcctcgggacagcaaga

SEQ ID NO: 599671 - DNA, 75 bp, Homo sapiens
ggagaagttagcttcagagttctttgtggatggacttgattctgatgagagaataactgaagtgaagtgatggac

SEQ ID NO: 599672 - DNA, 50 bp, Homo sapiens
ttgtcagccagggctgaacccccgcagctactgatctacttcttgcctgg

SEQ ID NO: 599673 - DNA, 83 bp, Homo sapiens
cggacacttcaggctatggccagagcagctattcttcttatggccagagccagaacaatgtccagctcgccgctgtccaagaa

SEQ ID NO: 599674 - DNA, 100 bp, Homo sapiens
cgtgatctggcgggatgggcgtttgcctaacgtatttaatggagttggtagctggcagtgttgtgatggcttttgaagaagtatgcccggacagaataga

SEQ ID NO: 599675 - DNA, 50 bp, Homo sapiens
gtcaaacccacccggcccaactcactgccccctcttctctcctggaggtc

SEQ ID NO: 599676 - DNA, 110 bp, Homo sapiens
gagggagttaaggacattccaggcagaggcaagatcagtatcaaggtcatggtacaggatatgctcactggcattgagaagcttgttagtgtggctttctccacatttgt

SEQ ID NO: 599677 - DNA, 71 bp, Homo sapiens
ccgacttcgatgatcgtgtgtcggatgaggagaagctgcaagctttcttcctggtggcagatgacatcatg

SEQ ID NO: 599678 - DNA, 90 bp, Homo sapiens
agctggtgtggacagaggagggaacccacaatacattatatgcaccagaaatgctagccaaaatggcagagcctttcaccaaggctctgg

SEQ ID NO: 599679 - DNA, 100 bp, Homo sapiens
agcggattaaagctaaagacatagttcctggtgatattgtagaaattgctggacacattcagctaacgtattttagcaggtggagtgaggttgaagattc

SEQ ID NO: 599680 - DNA, 82 bp, Homo sapiens
gtgaataaagaagtggagcgtgtcctgaaggagttccaccaggccgggaagcccatcgggctgcagtgcacctgccagcaca

SEQ ID NO: 599681 - DNA, 101 bp, Homo sapiens
agccgaaggccaaggaatcactgaagatcggcgagggaggacagggggttcatcatgggaagcgagcagctgcaaagcatctaatagaacgctactaccac

SEQ ID NO: 599682 - DNA, 100 bp, Homo sapiens
gaaaaacatcatccagtcacagtgggcatgagccagaaggagagctctaagtctgccatgatgtatattcaggagttgaggtcaggcttgcgggatatgc

SEQ ID NO: 599683 - DNA, 100 bp, Homo sapiens
ccttgtacagggacgtgatgttggagaactacaggaacctgctttctctcgatgaggataacatccctccagaagatgttccctgtattgaacactgata

SEQ ID NO: 599684 - DNA, 90 bp, Homo sapiens
caggactgcgccgcgtcttcctcaagttggagtgcttagtgcagttggtgagagcgggagccacactcaacgtctccaccacacggtacg

SEQ ID NO: 599685 - DNA, 101 bp, Homo sapiens
gctccctgcagtaccctttaacggcatccgtgtacaagatttgcagagaaatgtatgacgatggagtgggtttaccctttcaaagtcagcctgatcttatt

SEQ ID NO: 599686 - DNA, 100 bp, Homo sapiens
ggcgcggggcacaggatccggagctggagcccccaggcggaaggtgctctaccagcgtgcacccaggaatatccaccgccatgtgatcctctctgagatc

SEQ ID NO: 599687 - DNA, 82 bp, Homo sapiens
tgcccagaatgacaagcatactggcccagtgagagccttggatgtgaacattttccaggactatttaagaaacaactgaggc

SEQ ID NO: 599688 - DNA, 75 bp, Homo sapiens
ccgagaaggtgtccgaggcccgcaaaagcaggggaaatggaaggtgatgcagtcgaagccattgtggaggagtcc

SEQ ID NO: 599689 - DNA, 90 bp, Homo sapiens
cgactgcatgttttcccacgaccctctgaccgaagagacgagggagctcttggataaggtgtccaagtcacacagagccacggaatctca

SEQ ID NO: 599690 - DNA, 97 bp, Homo sapiens
cggaagcggagagcaacagcgcgccggaggtcctgcacataggaagcgcccacaaccgaagtgccatgccctttaccgcctcgcctgcctccagcac

SEQ ID NO: 599691 - DNA, 100 bp, Homo sapiens
ccagcgaaagcgaggctgatggagcgaagccaggaagaggatgcggagacgcggggaggctctgtcggtggtgagcgacgaccagtccctctttgactca

SEQ ID NO: 599692 - DNA, 74 bp, Homo sapiens
gccatggccacaggcttagctgttaacgggaaagagcccataggcagcatgtcatccatggaagtgaacgtgga

SEQ ID NO: 599693 - DNA, 75 bp, Homo sapiens
agaatgtgatttgcttgaagatatgagatctttccagaaatcgttttacagaaattccttctgatgtctggttat

SEQ ID NO: 599694 - DNA, 83 bp, Homo sapiens
tttaagaaagaagatgttaactttcagaaagcgtggatacccatcaacgaagttttgatattggaattcagattggctatcag

SEQ ID NO: 599695 - DNA, 100 bp, Homo sapiens
cagattctaatcaaaatatgcagtctcttttaccagcagactcagcccaggagagtgttattactcgagatattcatcgtacatttcccgcacatgatta

SEQ ID NO: 599696 - DNA, 100 bp, Homo sapiens
gtttgtaagacatgagtccgaaacaactaccagtttggttcttgaaagatgtttctgacgtagaagagcttacccctccagagcatctttctgatcttcc

SEQ ID NO: 599697 - DNA, 101 bp, Homo sapiens
ttgagattagccaaggagctaggattggagacctacaaagtgaatgaggttgagcgtctgatccaccatgtaaaggcaacattaaatatcattcacagtgt

SEQ ID NO: 599698 - DNA, 83 bp, Homo sapiens
ataagctttggatttgcatggagttttgtggaggtggttctttacaggatatttatcacggtttcagcaacatttgctgcaag

SEQ ID NO: 599699 - DNA, 82 bp, Homo sapiens
gcgttgaacaaccacagctctattcccatggacccagcaattctgtggtgttcttggtcacacatttatggagtttctgaag

SEQ ID NO: 599700 - DNA, 83 bp, Homo sapiens
cggagtcagtcattttactgtcaagacatttcttcggcattctgcaacaggtaaaaatgcatttgcaaagggagaaaatgaag

SEQ ID NO: 599701 - DNA, 51 bp, Homo sapiens
ctggtgaaggtcaattctgcaggtgtcattctgacagatgaggaagtgcag

SEQ ID NO: 599702 - DNA, 100 bp, Homo sapiens
gcaagttcacaaagaagtattaaactgtgctttccaaggaatcccttcaatctgtggatgtcctccgagaggaagtgagtgagatcttagatgaaatgag

SEQ ID NO: 599703 - DNA, 97 bp, Homo sapiens
cccgaactgggcctctttgcccagcctgcatgaaagctacacttcaaccagagaattctgcttggtcagaatcgtgatggcattgtgttcagcactg

SEQ ID NO: 599704 - DNA, 73 bp, Homo sapiens
cggcgctcccttgtcacgcctcgggaagcgcgcacctgccaagcaggccagccctccagatctctatattgaa

SEQ ID NO: 599705 - DNA, 117 bp, Homo sapiens
aagagaagctcaaggccgaagccgagcagaggatctaaatacaagagtggcctattggtgtgtggaggtcattgcaaaggaaggacaaaacctgaaagagctatatttggtgtcctg

SEQ ID NO: 599706 - DNA, 75 bp, Homo sapiens
tcaaaatccagcccttgagtggaatatggccagcagtatcctaagaaatccggtaaccaataagaagcattacag

SEQ ID NO: 599707 - DNA, 90 bp, Homo sapiens
gccaatggcaacatagtctatgagaagaactgcagaaatgaggccagtaatagtagccatgagtctcgtattggtctagctgaggggttg

SEQ ID NO: 599708 - DNA, 101 bp, Homo sapiens
atgccaatctctgcttgaaaggagaagacttggattctcaggtaactgcgtcattgattggctggtatccaaccagtctgttaggaatcgccaggaaggcc

SEQ ID NO: 599709 - DNA, 114 bp, Homo sapiens
gtgaaaatggagatattgggaaagaaagatatagagacaacgactatgtccaattttcatgctcagcggttaagaagattgtctaccaaatatagaacagaaaagatatatccc

SEQ ID NO: 599710 - DNA, 100 bp, Homo sapiens
gttgatgaagatgaaagagactgcagacttcacagagaatgcagttgtcttgacttcaggtctgtctgttctgttggcaagtaaatgcagtactgttctg

SEQ ID NO: 599711 - DNA, 98 bp, Homo sapiens
tgttgcactggatccacccagtgaccggacttctcacccccaggatgtcatcgaggttccagggccctgcgaaccagaagacctcatcgacgggatca

SEQ ID NO: 599712 - DNA, 75 bp, Homo sapiens
agaatgtcatcaagcagcacattcaagacgtgccaaatactggtgtaagcaaacctagagtttctgacgctgtcc

SEQ ID NO: 599713 - DNA, 85 bp, Homo sapiens
tatgaactggctcagtttatcacttcctgaaagacctgaagcttcttggacacttaatgattgttggcaagaaatgtgctgctga

SEQ ID NO: 599714 - DNA, 99 bp, Homo sapiens
gccgagggacaccgcagtatgaggcagagtaatctatgccagcaattatgacaatgttagcagaccatgcagctcgtcagctgcttgatttcagccaaa

SEQ ID NO: 599715 - DNA, 75 bp, Homo sapiens
caagcgacaggcgtggaagctggtcagcgggcccgggaccaccctccgggatagatcactgcgaccagaggaaat

SEQ ID NO: 599716 - DNA, 83 bp, Homo sapiens
gaaagaaaccgctgaggcttatttgggaaagaaggactcaaaagcttattaccacctgcttgagcaggtggctccaaaaggag

SEQ ID NO: 599717 - DNA, 125 bp, Homo sapiens
ggttaatggatctgggccctgcacatataccatctctggctccagggaatgtgagggagatgcagttaaagacttgatgcttcgctttctgggtgaaaaagctgcagcaaagagacaagtcctaa

SEQ ID NO: 599718 - DNA, 100 bp, Homo sapiens
agaaacccagccgaagcatttaaaaggattttctgccgtctcttggcaaaaatggcaaataatgatgctgttctgaagagactggagcagaagggtgcag

SEQ ID NO: 599719 - DNA, 75 bp, Homo sapiens
ctacgaggcgcaccagatgtaccggaccctgttcttcagcgcccgggggctggagaaggccaggcagcagctgca

SEQ ID NO: 599720 - DNA, 75 bp, Homo sapiens
acgggaggtgaatttccatgtcaacatagtcctggccgggtgagagcaaaactttcagcaccacttgctggcatg

SEQ ID NO: 599721 - DNA, 100 bp, Homo sapiens
cccgtccttaccgccggctgctgtggagtgcctcgctgtctcccaggcactcttaaaagacccattttacatgggcttgtaccagaaacgagatcgcaca

SEQ ID NO: 599722 - DNA, 82 bp, Homo sapiens
tccgccttctctgtcagctctttccccgtcagcatcccagccgtgctcacggtattatcgggggacccacggggtcattgtg

SEQ ID NO: 599723 - DNA, 97 bp, Homo sapiens
aatcatgggaatttccaaggggattcaaacttcaacagaatgtggcaaccaggaccagacaacagtacgaactgtagcatcagctacaactgccatt

SEQ ID NO: 599724 - DNA, 96 bp, Homo sapiens
ggacaagatcccgtccatgaatcagtgggaagtggtggttcaagtggaggatgatggggatggcgattacatgtctgagcctgaggctgtgctgac

SEQ ID NO: 599725 - DNA, 97 bp, Homo sapiens
ctcctgcaaaagtggaagcgaagccgaaaaaggcagcagcgaagacctgcgaccgcatcaagcagtccgccagcggaaccaagcggcgcgtgttcat

SEQ ID NO: 599726 - DNA, 100 bp, Homo sapiens
gagaccatatagctgccctcagctgcactgtggcaaggcttttgcttccaaatacaagctgtatagggcctgcttccgcgaggccaacatcccaacccac

SEQ ID NO: 599727 - DNA, 83 bp, Homo sapiens
cccgccgtctacccgtggccgctgccggtctacacaatgcagatcttcgtgaagactctgactggtaagaccatcaccctcga

SEQ ID NO: 599728 - DNA, 96 bp, Homo sapiens
ggggtccgcaaggccggagaaggccgccgggcccgggcatggtggtctggggcaacgcggaagggcgggtcatgaggaggctgtagccaaggacga

SEQ ID NO: 599729 - DNA, 100 bp, Homo sapiens
ttcatgagcatagacagtctgtgtaagaagtactccagggaaacctcccagaaatgcactcggtgatggaaagagagccactattctgaagaacacttgg

SEQ ID NO: 599730 - DNA, 73 bp, Homo sapiens
gcagcgccagacccaaggcccccgagtgagcgcgggcgccgagggtaagcaggaagagaacgacgtggtggag

SEQ ID NO: 599731 - DNA, 100 bp, Homo sapiens
agggggaagtagagagataacaaaagctgctcagagtctcaatgaacttgaagaagctcattcacacagaagacccatttaatgatgaacatcaggagag

SEQ ID NO: 599732 - DNA, 100 bp, Homo sapiens
gagcgatgaggagcggattcagctaatgatgatggtcaaagaaaagatgatcacaattgaggaagcacttgctaggagaaacttgcccaggccaaagaag

SEQ ID NO: 599733 - DNA, 83 bp, Homo sapiens
ttttgatgtggatgatgccaaagttttattagttacatcatgctgatgacagcttcctggtcctcaccacagatggaattaac

SEQ ID NO: 599734 - DNA, 100 bp, Homo sapiens
gggagagagaatgagccagagggacacgctggtgcatctgtttgccggagggtatgcatcttctattgatgatattttggaagatgaagaacattatgca

SEQ ID NO: 599735 - DNA, 90 bp, Homo sapiens
cgacgtgatcgtgctgggcaccggcctgacggtggtattaaagataatcaaacattatcaagaagaaggacaaggaactgaagttgttca

SEQ ID NO: 599736 - DNA, 90 bp, Homo sapiens
tctattgttgtcagtggagagagtggtgctggaaagaccgagtgtgtcagcagccaggactttctctctgggtccccttccaaaacgcag

SEQ ID NO: 599737 - DNA, 98 bp, Homo sapiens
ttcaggtaccccttccagagaagccaggagcacccggcgtcccagacaagtcaaaatgcagatcttcgtgaaaacccttaccggcaagaccatcaccc

SEQ ID NO: 599738 - DNA, 82 bp, Homo sapiens
gtctccggggccgctggattctgaggaccagcagatggccagtcacgagaacccagacaatgcagatcttcgtgaagactct

SEQ ID NO: 599739 - DNA, 100 bp, Homo sapiens
acaccaggctggagaatatggtgcagaggccctccacggactcagcccaaaaccatgtttgcccaagttgaatctgatgatgaggaagcaaagaatgagc

SEQ ID NO: 599740 - DNA, 76 bp, Homo sapiens
aggaggagcagcaggcctccgggcccggcgccgccgcccgcagggggcagctggcattttatgctatgtgggagcc

SEQ ID NO: 599741 - DNA, 100 bp, Homo sapiens
gtgaaatgtttggatatatgaaattacatccagaggattttcctgaagaagctgatcttgcatctttaatggataaaacatttgagagaaagttgcctgt

SEQ ID NO: 599742 - DNA, 98 bp, Homo sapiens
tggaagacggttgtgggcggtgccatgttcttcatcggtttcaccgcgctcgttatcatgtggcagaagcactatggagctggaggagggaatgatat

SEQ ID NO: 599743 - DNA, 100 bp, Homo sapiens
cgcacaactacctcaacgccgtgccgcccccctcccgcccccagatcatccagacttgaaacatatcgacccagtggttttaaaacattgtcatgcagca

SEQ ID NO: 599744 - DNA, 83 bp, Homo sapiens
ctcagttggaagcagccgatccagcctgcggagcctgtggggcaggctgctttgtaccgcctcagtggagactggaatccctt

SEQ ID NO: 599745 - DNA, 100 bp, Homo sapiens
agattttgaggagatgaggaaggctggtatctttcagagtgtaaagtaatcttggaatataaagccctaccacttatgtcttggatgaagatgaacctcg

SEQ ID NO: 599746 - DNA, 100 bp, Homo sapiens
agggtgcgaggggcacctcccgtggccgaatggcatctgtactaagtgccagccgagcgccatcacgctgaacagacagagctcccagctcctccagcag

SEQ ID NO: 599747 - DNA, 75 bp, Homo sapiens
agtatccccggactctttggataatgctagtgcttttaataccacagagttcaccgaacagcagaaagaatttca

SEQ ID NO: 599748 - DNA, 100 bp, Homo sapiens
ggaagagtgtgactgtggtactccaaaggactatgatgatggatatggcactgcttatgatgaacagagttatgattcctatgataacagctatagcacc

SEQ ID NO: 599749 - DNA, 90 bp, Homo sapiens
tgcaacaaaggcagactgagcgccagagaggacgtttccaactcaaaaacttgatcttttccctgaattaattggaactgaagaaataat

SEQ ID NO: 599750 - DNA, 100 bp, Homo sapiens
ccagaggactttcttccagcttctgctgtccttctttgtggagagcaagatttctttaccaactcccgcctcccacagccgcccatgccttcaaacttcc

SEQ ID NO: 599751 - DNA, 82 bp, Homo sapiens
gggcctactcgcccgccaccctgcgctgccgccgctctgaggagttaaagcccgagcgggaagaagttccgcagcaagccgc

SEQ ID NO: 599752 - DNA, 100 bp, Homo sapiens
cttcagcttctttgtcaccataggagacatggacgaagccttcaaatccatcaagctcatcaaaagagagccttctccatggacgaccgcattgcctgga

SEQ ID NO: 599753 - DNA, 99 bp, Homo sapiens
ggggcatcaccagccgacacctgctgaggtcaaggaggaggtcaagttggcctgaatggacctctccagctctggcttcctgctgagtccctcacgttt

SEQ ID NO: 599754 - DNA, 100 bp, Homo sapiens
agacagatacttctcaggagtcaaagggtcttgacaatgttcacaaacagagggtggcagaagtgctcaatgaccctgagaacatggagaagcgcaggag

SEQ ID NO: 599755 - DNA, 100 bp, Homo sapiens
acgaccttcagcaagaggaagacgggcatcatgaagaagagagaagctagtgaagatgctggtggagctgctgaccaaccaggtgggagagaagatggtg

SEQ ID NO: 599756 - DNA, 97 bp, Homo sapiens
aggtggaccagaacttttggaactagtgccggcggctctccaccccccagtttccgttactatggcaatgacggcagggactacaacaacctttcct

SEQ ID NO: 599757 - DNA, 75 bp, Homo sapiens
acccacgttttgaggcaccactgtttaatgctagaattcgaaagagagagctggcggtcaccatggcaatgcggg

SEQ ID NO: 599758 - DNA, 99 bp, Homo sapiens
catgcacttttccctggcatttttcctgcatgcaatggctgccatccggaagaaactggtgattgttggtgatggagcctgtggaaagacatgcttgct

SEQ ID NO: 599759 - DNA, 96 bp, Homo sapiens
gagtaaagctgctggacaacaccatggaaatatttgacattgaggttcaactccttccacccggacacgcgcaagccgatgcacagagagtgtggc

SEQ ID NO: 599760 - DNA, 99 bp, Homo sapiens
cccattgggcctcctggtccccgtggacgatcaggcgaaaccggccctgctaacttggctgcagcccatgaggtccacagctttcagcaggcagcagct

SEQ ID NO: 599761 - DNA, 100 bp, Homo sapiens
gtggatgcctctcatcgggagaatgctcttcaggatagtatcttggccagggaactcaaacagcagatgcagagtcgggccacaaaaagttaaaaagtac

SEQ ID NO: 599762 - DNA, 103 bp, Homo sapiens
gccgacatgttcacgcacgggatccagagcgccgcgcacttcgtcatgttcttcgcgccctgcctcccgcgacgatgcccctcaacgttagcttcaccaacag

SEQ ID NO: 599763 - DNA, 97 bp, Homo sapiens
tgttaaggattccaagtaactcttatttgagtgtgaacatggctacgcctcttcattcccgtccatgccgagcccccgactgcagcattcaaagccc

SEQ ID NO: 599764 - DNA, 123 bp, Homo sapiens
acaacgttaccagcatccattgcaaaccttattaatctcagggaactggatgtcagcaagaatgctgggatctagcaattgggaggcagcagacttgggtaatgaagagagaaaacaaaagtt

SEQ ID NO: 599765 - DNA, 75 bp, Homo sapiens
tgcccttatcagtaacacctgaggtaggtgatgctctgatgctgctgcctcttatgaattgacgacaggtgcaga

SEQ ID NO: 599766 - DNA, 76 bp, Homo sapiens
gttgtggagagctgattcccaaatctaaagctgcagaaccttggcctgaaaatgctacattatatcagcaattgaa

SEQ ID NO: 599767 - DNA, 90 bp, Homo sapiens
cccatttctacaatatcgccccagaagctccaacattgtctcactttcagcaaacattctgtgaatatgagaagggcgtagaccatctga

SEQ ID NO: 599768 - DNA, 82 bp, Homo sapiens
ccctggggggcaccacgggaagacatgacacccctgaacctgtgtgaaagaaaatggcccgaaccaagcagactgctcgtaa

SEQ ID NO: 599769 - DNA, 88 bp, Homo sapiens
tgctgtttggcccctgcctactcggaatggaacaaaggtagcttatttaaaactcgatgtacctcttgtggagttgtggctgagaatt

SEQ ID NO: 599770 - DNA, 50 bp, Homo sapiens
gagcatcctgaagctgacccaggtacaccctgaagcgggcccttgaagtc

SEQ ID NO: 599771 - DNA, 98 bp, Homo sapiens
tgatgccaccccagcccgtggtcctgatgccaacagtgtaccagcagggcgttggctatgtgcccatcacagagttgacgggcgccgacctgaaggac

SEQ ID NO: 599772 - DNA, 97 bp, Homo sapiens
ccattggcaacgagttaaatatcacccacgcccaatagaatcctgccagaatttctacaaagatttcacattacagatcgacatggctttcaacgtg

SEQ ID NO: 599773 - DNA, 75 bp, Homo sapiens
agtgaatgtttcagggtggagaagaatctgcttgtctatggatggcagtcttgggcacgtccatctgtaaacctg

SEQ ID NO: 599774 - DNA, 80 bp, Homo sapiens
tatcgacgtcgtgatccagaagtccagagctgaggactgcctgtttgcaggattacttccttaggatagattgccagaag

SEQ ID NO: 599775 - DNA, 89 bp, Homo sapiens
gagctgggtcagtccgccgctcaccccgcggccgcaccttcccgccttctcaggtgtccctggccagtgtccttccacctgtccacaag

SEQ ID NO: 599776 - DNA, 82 bp, Homo sapiens
cggaagccgcgccgccgccgccaggattttttatcaagcagaaatgcatcgaacaacgagaatcaagatcactgagctaaat

SEQ ID NO: 599777 - DNA, 74 bp, Homo sapiens
cgagaactgcgcagacctggtggaggtgttaaatgaaagtcaaaatgcagatcttcgtgaaaacccttaccggc

SEQ ID NO: 599778 - DNA, 100 bp, Homo sapiens
atggggcatacctatggctttattgacctcgactcccatgcggaatgacgggacagagtttggcggctccatttaccagaaagtgaacaagaagttggag

SEQ ID NO: 599779 - DNA, 96 bp, Homo sapiens
ctggtgcatgctgatgacgaaaaacgtgggtttggaggatttgggacaacatctacaactgcaggttctgcattcagcttttctgccccaactaac

SEQ ID NO: 599780 - DNA, 74 bp, Homo sapiens
ccacttttgctagagagcaaggctttgaggttatcaatactctggctgaccatcatcatcgtgggactgacttt

SEQ ID NO: 599781 - DNA, 82 bp, Homo sapiens
ggctgtgtcgcagcctctcgggatgacaccactctgaatgcactgaacacagcctccgatgaagcagaggaaagtggatcac

SEQ ID NO: 599782 - DNA, 101 bp, Homo sapiens
ggtcttcactgactttcagctagaagaaggatatgatttcttagagatcagtggcacggaagctccatccatatgtgccggtggtggtgtgcacattgagc

SEQ ID NO: 599783 - DNA, 75 bp, Homo sapiens
ccagaaaaattacagcacatctcagtgaatttgcaagtggccaaagaactgccaactctgaaagataatgatttc

SEQ ID NO: 599784 - DNA, 74 bp, Homo sapiens
atgggaaggaagaagtatccaagccctaccacttatgtcttggatgaagatgaacctcgattccttgaagaagt

SEQ ID NO: 599785 - DNA, 100 bp, Homo sapiens
ctgatgaagggaaggaaatcatgtcaagcgaagccttgaaaaagctgccctgagacggtgtcccgccgaaagtatgaagtgtaacagaacagactttacc

SEQ ID NO: 599786 - DNA, 74 bp, Homo sapiens
gttattatttctgccctttgtacccttacaaggttcctcatgagagtgctggactcctacggggatgactaccg

SEQ ID NO: 599787 - DNA, 100 bp, Homo sapiens
gatgatggtgtttctccaaaagatgttggacacaatatctatattctggcccatcagactctcctttccaattcctcggaaacaggcactgccagtggac

SEQ ID NO: 599788 - DNA, 82 bp, Homo sapiens
tgcttgctgctttttctaactatttcaagatgatatttattcaccaaacaagatgacagatttgaagatctggaagaggcaa

SEQ ID NO: 599789 - DNA, 83 bp, Homo sapiens
cgcggattcgccgaggcaccgaggcactcagaggaggtcagaagttgagtagcaggggcctaggagggctcgaagccttcaca

SEQ ID NO: 599790 - DNA, 100 bp, Homo sapiens
cacctacaaagattttaccaaaaaccttaggaccaataaatgtgaatgttggaccccaaatgattgaagatctcaaacagacaaatcatggcttggaaga

SEQ ID NO: 599791 - DNA, 75 bp, Homo sapiens
tggcagaataatctgcttccatcccgccagtttggataaagctgtacaccaagcatgggactttgaaataccaga

SEQ ID NO: 599792 - DNA, 82 bp, Homo sapiens
tcccagtgacgggtctggagtgcgtgggggaccggctgttggcggatctctggaaacatggctacagaacatgttaatggaa

SEQ ID NO: 599793 - DNA, 98 bp, Homo sapiens
ctgggtgccgccgtcccccagctgcgcaaccctaggaactctcggtacgtaggaagcctggacgtgccaaggcccaacagcagggtggagatcgtggc

SEQ ID NO: 599794 - DNA, 83 bp, Homo sapiens
ctgggagtgaaaagaaatattacagccatgcctaactgacttcttgaggtctccatcacttttgacccgtttctttatctgcc

SEQ ID NO: 599795 - DNA, 101 bp, Homo sapiens
aaaggaagcaagcagttcagaagagccaaggaataaacatgcaatgaacccaaaagggaaaatgtttataggaggccttagctgggacactacaaagaaag

SEQ ID NO: 599796 - DNA, 50 bp, Homo sapiens
gtgtctcgtgtgtgaacatcacagccactgaggcggctcccagctgcgtt

SEQ ID NO: 599797 - DNA, 51 bp, Homo sapiens
aagatggctactctggagttgaggagatcacaaatcaacatctcacttccg

SEQ ID NO: 599798 - DNA, 98 bp, Homo sapiens
atactacctctggccccgagatcagaatgccgcttttgcgagaattgaagcaccctaatgtgattgcattgcagaaggtgttcctttctcacagtgac

SEQ ID NO: 599799 - DNA, 100 bp, Homo sapiens
ttttgactgcattgactttcgtagtacttgtcattaggcacgtgtggttctcaaatataggcattctgatgggaacttgtgtgttaaagtaacagatgat

SEQ ID NO: 599800 - DNA, 99 bp, Homo sapiens
gccacctgttcctcagttccaaccacagaacccctgaacagtgcccaagtgttgtctctttgttgtcagagagttacaaccctcatgtgcgctacggag

SEQ ID NO: 599801 - DNA, 98 bp, Homo sapiens
acgccacggggccgctgctcaagttccagatttgcacccagtcagcttgaagagtttcaaatggaccctaccactgagaaatcaagatggcagtctac

SEQ ID NO: 599802 - DNA, 98 bp, Homo sapiens
gaaaatttagtgctgtcttcacatactggattttgccaatcttcaggcaggatggggaagcagaatagcaaactggcccctgaagtgatggaggacct

SEQ ID NO: 599803 - DNA, 82 bp, Homo sapiens
ccgcatggtcagtgccatttcgcctttatcgtggtggagtccaccctggctgtgtttttcccaggtcatgagtctcgggcta

SEQ ID NO: 599804 - DNA, 90 bp, Homo sapiens
aggccgtccatcgcccctcgggccgacgccatgaagatcaaagatgccaagaaaccctctggtaatagcaatggaagagctgaagcagtg

SEQ ID NO: 599805 - DNA, 75 bp, Homo sapiens
cgcagaattaccgcctcttctttaatttaatttacccacacccaaatgcttctgcagaaaaagccagaaatgtcc

SEQ ID NO: 599806 - DNA, 75 bp, Homo sapiens
catttttgagcctccacctcccaaaaaacagaatggagcaattggaagaaagctgtctctctggatcaatgagaa

SEQ ID NO: 599807 - DNA, 76 bp, Homo sapiens
gttctatgaaacagtgtatcaaagtgtggactgaggagtggtaaaatttcagccttccctttggccttgggactca

SEQ ID NO: 599808 - DNA, 100 bp, Homo sapiens
ccccctgaaccccaaggccaaccgcgagaagatgacccaggagaggcagcttccccccttgggtccaacaaacccgcgtgtgacgctggccccaccgtgg

SEQ ID NO: 599809 - DNA, 100 bp, Homo sapiens
ctacctcggccctggcctgaccccggcggccctgcccgcccctccctccagcaagcggtctcctgaggctggctgtgctgcctgaggaccggctgcagat

SEQ ID NO: 599810 - DNA, 75 bp, Homo sapiens
tgaagtcccttcatggaactgttatgaaaattaaccaggagcgagcagagtgacctgaccaacggtgcagatggg

SEQ ID NO: 599811 - DNA, 75 bp, Homo sapiens
tcggtttttggttgggacgcagtctcttaaatatgataatcagcatcaacaaagagagcattgtggatgtagaag

SEQ ID NO: 599812 - DNA, 101 bp, Homo sapiens
gccaagcgggatgccctgctcctaagcttcaaggatgccaagctgaagtggtgtgcttgggtcgctgtctactgctccttcatcagctttgccaactctcg

SEQ ID NO: 599813 - DNA, 100 bp, Homo sapiens
agcagccactgggtctcccatacccagcaacgagaggatgtagagatagacatcgaactagctcctggggatcagaccagcacgcccaaaaccaaagaac

SEQ ID NO: 599814 - DNA, 100 bp, Homo sapiens
cagcttttccggcctgacaacttcatctttggtgttggtggcaatctggtggccattcagaccagccgaatctcaacctacctgcacatgtggagtgcac

SEQ ID NO: 599815 - DNA, 101 bp, Homo sapiens
gagcccggggaaactgggaacaacctcaaaaccaaaaccagacacagcacaagcagcggccacagtgctgacaatacttgggaacctgaagaaaatttaga

SEQ ID NO: 599816 - DNA, 80 bp, Homo sapiens
cggcgactccggggatggcgaagcagatgtgaaagctggaaacattcttcttggagaagatggctcagtacagattgcag

SEQ ID NO: 599817 - DNA, 88 bp, Homo sapiens
agccgccagggctctatcaaggggctggtgtactccagcaacttccagggagaagaagtgggtgactgtgggtgacacgtccctgagg

SEQ ID NO: 599818 - DNA, 50 bp, Homo sapiens
gtgggggtgatcagcttcgcccagaagttgaagatgagcagccgtcaaca

SEQ ID NO: 599819 - DNA, 74 bp, Homo sapiens
ctcaatgttgccaaaatgtttcctaaagttcgtgaatctcaacttgctgctgctcctgctgccctgtgggctgt

SEQ ID NO: 599820 - DNA, 100 bp, Homo sapiens
cggggctactcgactgctctggaggtagcggccgcggtgaggagagccatgggacgggcagtcaaggtgctggagaatctggtaaaagcaccattgtgaa

SEQ ID NO: 599821 - DNA, 50 bp, Homo sapiens
gcgcctgcgacctgcccgcctgggtagatcgacacttgagaaagctggat

SEQ ID NO: 599822 - DNA, 75 bp, Homo sapiens
actggccctgagtctttgggggcagcctgcagaggctgcgggagaaaatcctccacctccgggtttcataatgca

SEQ ID NO: 599823 - DNA, 96 bp, Homo sapiens
cgaggggctccgggtcttccagagcgtgaagatcaagatcgatggacacccgctccgggagccagtgttccgtcaccccagaagccatactcaata

SEQ ID NO: 599824 - DNA, 96 bp, Homo sapiens
atcaaaaatgccattgaagatgcgctcctttaccctcatcgtggaggcctgggactgggacaacgataccaccccgaatggtgagtgagccctggg

SEQ ID NO: 599825 - DNA, 102 bp, Homo sapiens
cgcgatgcgtcaagtacactgaaattcatcctgagatgaggttgactatagtcaatggggccaatggagccaagtgtatggaaacccacaacagtatggaca

SEQ ID NO: 599826 - DNA, 74 bp, Homo sapiens
gtgaaactggcctcccaagccctgataagattggagacacaaaatcagaaattaagattctaagcataggcgga

SEQ ID NO: 599827 - DNA, 76 bp, Homo sapiens
ccacttggtgaatggagatgcagctcagcagatgacttcaaacctgcttctattgacacttcttctgaaggatacc

SEQ ID NO: 599828 - DNA, 100 bp, Homo sapiens
tccatggagagcctggagttaggatcctggtggacctgctgaagctgaacgtggcccccctcgccgtcttccagatgctcaagtccatgtgtgccgggca

SEQ ID NO: 599829 - DNA, 83 bp, Homo sapiens
gtggagtcctgtgcagagtgtggagaagatcctgctgtcggtggtgagcatgctggcaggttcctggtagagttacacagttg

SEQ ID NO: 599830 - DNA, 82 bp, Homo sapiens
ggaggaggacgcttgccacctcatcatacccctgagggaggaccaactgttgccaatcctgagctgttccgcaagttcggac

SEQ ID NO: 599831 - DNA, 101 bp, Homo sapiens
acccgcggtggcggcggcgacggcggccctggcaggaggcaagtgaggcctatctggttggcctttttgaagacaccaacctgtgtgctatccatgccaaa

SEQ ID NO: 599832 - DNA, 50 bp, Homo sapiens
gtgcagtgtctgacttgtgacagggcagccaatcctttctttaagttgtt

SEQ ID NO: 599833 - DNA, 100 bp, Homo sapiens
tgagaagtcgctgcagatgatccgccagctggcagggccactgtttagtgagaacaccctgcagttctacaatgagagctcccagggttgctagagctcc

SEQ ID NO: 599834 - DNA, 99 bp, Homo sapiens
agggctgcacggccttgcactatgctgttcttgctgatgactaccgcactgtcaaggagctgcttgatggaggatttgtacacacagatatgacgaaag

SEQ ID NO: 599835 - DNA, 110 bp, Homo sapiens
cttcccccacccccgactcgggcttggcgcggcggccagaggaaccccgagcctctgaagagccaatccattcaggatgggaaaccacgcaggcaaacgagaattaaatg

SEQ ID NO: 599836 - DNA, 74 bp, Homo sapiens
aagcgctgcggaaagccatgaagggactcgaccccccaaagacacacgtgacccaccaccccatctctgaccat

SEQ ID NO: 599837 - DNA, 100 bp, Homo sapiens
ctacaacatgacgtttttccctaatctgatgggtcattatgaccagagtattgccgcggtggaaatggagtttgaggtggtatcaacatcctacagaaga

SEQ ID NO: 599838 - DNA, 100 bp, Homo sapiens
attgcatgtgggaccttcagccgtgaactggtagagtacagagagatggatgaaagcttggccaacctctcagaagatgagtattattcagaagaagaga

SEQ ID NO: 599839 - DNA, 75 bp, Homo sapiens
taacagaactggaccttttcgtggttggcacttaccatggttccccagaccagtcccatcaagtgactggtaacc

SEQ ID NO: 599840 - DNA, 51 bp, Homo sapiens
ctgccattgcgattgtccagaggagaataaaggcagccccgttgatgactg

SEQ ID NO: 599841 - DNA, 100 bp, Homo sapiens
gtaccaagtacaccattacaccagtgaagatgaggaagtctgggggccgagaccacacagattttgctggaggagcttgccaacagcgatcccaagttag

SEQ ID NO: 599842 - DNA, 83 bp, Homo sapiens
gcgaggccctcatgtaccacacgatggcccactgcgtgaccttggttcagctgtccatttcctgtgaccatctcattgacaag

SEQ ID NO: 599843 - DNA, 100 bp, Homo sapiens
ccatggcggagctaggagctggcggcgacggccacaggggcggcgacggcgcagtgcgaagcgaaacagtactatactggcaattgctggagaagatttt

SEQ ID NO: 599844 - DNA, 100 bp, Homo sapiens
aatgacttacctgtaaatagtggtgtaacccgaataagctgtcagactttgataggatatctatagagaaatggggtttggtcactatgaagaagaagaa

SEQ ID NO: 599845 - DNA, 82 bp, Homo sapiens
tgagggccacggggaggccctgctgttcgaagggatcaagagaattgaatgatctggcacgggaccctccagcacagtgttc

SEQ ID NO: 599846 - DNA, 90 bp, Homo sapiens
ctaatggaatcaggcagttttgtgtccatgtgaacaactgcatccagtaccctgctgactctgacatgcccccagcctcccccagctctg

SEQ ID NO: 599847 - DNA, 100 bp, Homo sapiens
catccgaggctggggtctctgcatctttttaccttttgtgctgagccaactcgagccaggctgcaaaaagggaacgtgatgttctcttcccggggtacac

SEQ ID NO: 599848 - DNA, 83 bp, Homo sapiens
tgtagaattctgtcatcctgaagaccagcagcttctaagagacagcttccaacaggtagttgatgtcacttggcgatattcct

SEQ ID NO: 599849 - DNA, 100 bp, Homo sapiens
ctccgatgtgcgcccattgtaaccaggtcatcaggagaacttgcgcctgtcaggggctggatccagaaacctgtggtgcctccttctcttttggttgttc

SEQ ID NO: 599850 - DNA, 76 bp, Homo sapiens
cgcggggcacgatgttgaacatgtggaaggtgcgcgagctggtggacaaagcttacagaatgtctgaaggggacag

SEQ ID NO: 599851 - DNA, 75 bp, Homo sapiens
caagtgaagaccaatattcaacaggcactcggggtgtggttttctctcggttgtgcctatttggccttggaagac

SEQ ID NO: 599852 - DNA, 97 bp, Homo sapiens
accggctacgcgccgtggacacagacggggtggagcccatggaatcggtcctggaggacaggctcccacatcaggacgagaaggagccctcgagtta

SEQ ID NO: 599853 - DNA, 95 bp, Homo sapiens
ggagatgacggcgcccgccctcccgccgccgccctaagaatggccaacatgcagggactggtggaaagactggaacgagctgtcagccgcctgga

SEQ ID NO: 599854 - DNA, 82 bp, Homo sapiens
taatgttgacaacaggctcgagataacgaaggaggcccaacttcattcaataaggagcctgacggatttatcccagacggta

SEQ ID NO: 599855 - DNA, 96 bp, Homo sapiens
tcaggacaattccatttggggaccagagatggacggtcactcagcctatggagcctttccgctgtgcccattgccattactcctgcaacatatctg

SEQ ID NO: 599856 - DNA, 74 bp, Homo sapiens
tgaaatgtttgacgacactgatggtttgctatctcccctggttcgaggtattttataagctgcttaacatcctg

SEQ ID NO: 599857 - DNA, 96 bp, Homo sapiens
tgcagtacctgcagaaggtctctggagacatcttcagcaggattgtcagtggcttcgccccgaggagagctgactgccctgggctgctgcctccgg

SEQ ID NO: 599858 - DNA, 90 bp, Homo sapiens
gccggtcgaccccagccagcgcagcgacggggcgctgcctggcccaggcgcacacggaagtggggacggcaaaacagaacagaaaggcgg

SEQ ID NO: 599859 - DNA, 76 bp, Homo sapiens
ctcggctcattcagaacagcaagatgcaaccttaaaatcagtgacaagaaacattccaaacaagcaacagtcttca

SEQ ID NO: 599860 - DNA, 100 bp, Homo sapiens
tggagatctggaagatcaagaagctcattaagagcttggaggcggcccgcgggttctggccactgcatttgacacgacattgggaggtagaaaatttgat

SEQ ID NO: 599861 - DNA, 98 bp, Homo sapiens
caaaagttgtcaggttgaaaatggaagagtaattgcctgctttgattccctaaagacaatctccgggaaggggcagagcagaaggtggtattcatcac

SEQ ID NO: 599862 - DNA, 51 bp, Homo sapiens
aagatcctggaggtggatctgaagaacggatcagtgtactgttacccggac

SEQ ID NO: 599863 - DNA, 98 bp, Homo sapiens
cgctttcctgtccccaagccgttctagacgcgggaagatgagaatgtgcctactgctcctgatcctccaagtcaacatttacgtgggcatgggacagg

SEQ ID NO: 599864 - DNA, 75 bp, Homo sapiens
tgaaagtcatggcttttgggattctgacatttctcttgggaagttgtgcatctgacaggaatatagtactgtacg

SEQ ID NO: 599865 - DNA, 75 bp, Homo sapiens
agcagtggacttggatgctgctggtctagaagtacttgtatgaatctgggtgctccagtgttgggtgcaaatata

SEQ ID NO: 599866 - DNA, 75 bp, Homo sapiens
aaaatagcatatgatgtgcagtgtccaaagagagagtcaagggtccagagaaggaggagaagttgagacaggcgg

SEQ ID NO: 599867 - DNA, 90 bp, Homo sapiens
ctgctcaccatgtggtttggggagtctgaggccaatgtcagagaaatctttgacaaggatgatgactttgagttcactggcagccacctg

SEQ ID NO: 599868 - DNA, 100 bp, Homo sapiens
gatggaggaagactcgatccgcctgcctgcgcacctgcgcagcagtgaggatgccagagttcatgggtttctagaagacaagttttcaactgcagataca

SEQ ID NO: 599869 - DNA, 73 bp, Homo sapiens
aagcagcaagtgcgcggttggggccactgcgaggccgttttagatacgtaggtaacctttccagagatgtgac

SEQ ID NO: 599870 - DNA, 100 bp, Homo sapiens
tttagagctggcagcagcatctcagcccaagagaagacctgtggatgaagagccagagtcctctgaggtcgatgctgctggtcggtggcctggtgtctgt

SEQ ID NO: 599871 - DNA, 83 bp, Homo sapiens
agcgagactcatacgcaacctcaatgtccacaggtcctggctaccctgggaagagacaagaagtaaatgaagaaagaggaaga

SEQ ID NO: 599872 - DNA, 100 bp, Homo sapiens
gtggaataggtgtatcaagtaatggtgcaaagcctgaaaactcatcccaagaacagtatccataaggaagatggaaaagggggacagaataaatgttacc

SEQ ID NO: 599873 - DNA, 98 bp, Homo sapiens
cactggactcatggaggctgagcatttattcagatttgaggcttaagcaacttcttccggggaagagtgccagtgcagccactgttacaattcaagat

SEQ ID NO: 599874 - DNA, 100 bp, Homo sapiens
cctggggatggcgcatcacacaccaaagttacagaatgtctgaaggggacagtgtgggagaatccgtccatgggaaaccttcggtggtgtacagattttt

SEQ ID NO: 599875 - DNA, 82 bp, Homo sapiens
ttccacttcatctgtcctgaaacggaaatcggacagaaagcctttgcggggaggaggtggatcagtacaagggaaagcggga

SEQ ID NO: 599876 - DNA, 82 bp, Homo sapiens
cgctgacagctgaggaagtctgcatccacattgcacataaagttgaggcctgagtccagtgactgcaaactaaagccagtga

SEQ ID NO: 599877 - DNA, 100 bp, Homo sapiens
gcggagcggagacgggagtattatgaaaagatcaacggccggtttgtgggcgatgctgaccttgaaagacagaaattttcagatttgaaactcaacggac

SEQ ID NO: 599878 - DNA, 98 bp, Homo sapiens
gggaaatgaggcaagttatcctttggaaatgtgctcacactgaaataatgcaaaaggtgtcccaaggctcctgaccagtgaacaaagatttgagaaag

SEQ ID NO: 599879 - DNA, 80 bp, Homo sapiens
attcaccttgaagaggaagacggggcggaagaccaagatcatcgagatgatcatgagcgtcttgttgttcatcgagcact

SEQ ID NO: 599880 - DNA, 83 bp, Homo sapiens
ctttctgctgctgaagtaatgcaatggtctcaatctctggaaaaacttcttgccaaccaaaacttcatcctgtgaagccaatg

SEQ ID NO: 599881 - DNA, 97 bp, Homo sapiens
acatacagtgacgcttcacagggtcccctcttgctgttggctgcacatcaggaaggctgtgatgggaatgaaggtgaaaacttggagatttcacttc

SEQ ID NO: 599882 - DNA, 82 bp, Homo sapiens
cgctactctctctttctggcctggaggctatccagcgttaaataggattgcgaatcaggtggccattcagcggaagaagcag

SEQ ID NO: 599883 - DNA, 100 bp, Homo sapiens
gtgtctacagtgttctcgacttcgtcgctgttggtgacaaagttcctgctgatataaggttaacttccatcaaatctaccacactaagagttgaccagtc

SEQ ID NO: 599884 - DNA, 83 bp, Homo sapiens
tgaatcttggtgtttggacataggagttttctggatatgccgcagaaggatccgtgccagaagcaagcctgtgagatacagaa

SEQ ID NO: 599885 - DNA, 83 bp, Homo sapiens
acaaagtgaccaagaacgtgagcaagcccaggcacagccgacgccgcggggacgccaacaaggagagcagcaagacctccaag

SEQ ID NO: 599886 - DNA, 83 bp, Homo sapiens
cggagatcctgatgaagttcgagcactaatatttaagaaagaagatgttaactttcagcaaaagatacagatattgtggatga

SEQ ID NO: 599887 - DNA, 98 bp, Homo sapiens
ctgcctgcctgctgctgcttggagagccccagacagtcgcttgaagagctgtgcggtcagagaagaaacgccttaggaagccaagcaagtggcttttg

SEQ ID NO: 599888 - DNA, 75 bp, Homo sapiens
ccaggtgctgacagcgcgagagagcgcggccctcaggagcaaggcggtttgtccagaggggttgcgtttatccgg

SEQ ID NO: 599889 - DNA, 74 bp, Homo sapiens
ccatggcaagacttcccgcaacatccactccttggaccacctcaaaccgagacatgggtgcccggcaccgcgcc

SEQ ID NO: 599890 - DNA, 100 bp, Homo sapiens
ccggagcccggtgagcccgaggagaggaaggcgggtgccccggtgatgactggtgcgggagagagcaccaatcccgagaacagcgagctcaagtattcgg

SEQ ID NO: 599891 - DNA, 100 bp, Homo sapiens
ctggaggtgggatccacacagctcagaacagctggatcttgctcacactctttcaagagaagcttccttgagctccagagattatattggggttgccatt

SEQ ID NO: 599892 - DNA, 117 bp, Homo sapiens
aaagatgtaactgtttggagaaaaccctcagaagaatttaatggatatctaataagacctggaagtttgttgaaggtctccctattaatgatttctcacgtgagaagatggatctta

SEQ ID NO: 599893 - DNA, 74 bp, Homo sapiens
ggatgatagttcgtgtgacaaacagagatatcatttgtcagcaatacttcatgctgttgctgctgactgatggt

SEQ ID NO: 599894 - DNA, 131 bp, Homo sapiens
ggggacctgcatgtgtgtgcgcgcgaaggagcggaagaatggcagtgctcaaactcaccgaccagctctccacacaaggagatgcaagtcaggtgattgggcctcttactgaaggacagagaagaaatgtg

SEQ ID NO: 599895 - DNA, 83 bp, Homo sapiens
ctcgcttgcagttcagcgaccacgtcgggaacatgccctgtgtgccgccgtcatttcccacctgcggttattgaagcatctgc

SEQ ID NO: 599896 - DNA, 80 bp, Homo sapiens
atcgtaggccaggctgatggagagctgaacattactcttccagaagagtgcatgcaagagatgggaaatggaaaggcaaa

SEQ ID NO: 599897 - DNA, 82 bp, Homo sapiens
ctgctaacaaccagctggaggtttcctattctgtgaaacagaagacattgtgatggagtggttcttcagctactggatggaa

SEQ ID NO: 599898 - DNA, 100 bp, Homo sapiens
agcgacccgcgcaagcgcgagatcttcgaccgctacggggaggaaggttaacacagaaatctgcctcctgggccatgccgcttctaaggcctgtttcttc

SEQ ID NO: 599899 - DNA, 90 bp, Homo sapiens
gccggccggtgccagcacctttcggcttctgagacggcggcagcagcggcattcaggaaggaagcagccaccctcgccatggcctccccg

SEQ ID NO: 599900 - DNA, 100 bp, Homo sapiens
gaaaaactgtgcattaaaattcttcagacattacgagaaatgttagagaagaaagacagctttgtggaagagattcacagtctgagaatgaggcttcacc

SEQ ID NO: 599901 - DNA, 90 bp, Homo sapiens
tgctgacaaaacagaaaagtataataaatgtaaacaactcttgcaggttaatgttcgtgaagaaattgaagagttttttccaagaatgtg

SEQ ID NO: 599902 - DNA, 100 bp, Homo sapiens
cggcagtcagagtcaaaacagagcttttggaatctgaacaagggggccgttgctccagggagaactgcaaatatcttcatccacccccacatttaaaaac

SEQ ID NO: 599903 - DNA, 83 bp, Homo sapiens
ctcaatatctgtcttcggtggactccttcggcagtccacccaccgccgccgcctcccagttatctccagaagaagaagagaaa

SEQ ID NO: 599904 - DNA, 101 bp, Homo sapiens
cggagaggagtggcctcgcccgcttgctgaagtctatatcggcatcgggaagcctgcagaagccacagcctgtacccaagaagctgccaacctcttcccaa

SEQ ID NO: 599905 - DNA, 75 bp, Homo sapiens
tgactgccttggatacaactgggaaagccgtctacactctcacctatggaaaacgggccttactatacatcatat

SEQ ID NO: 599906 - DNA, 100 bp, Homo sapiens
gttttgaggaacagctgttttgggcactttcagaccatgctgaagtctaaattgaatgtcttaacactgaaaaaggaacctctcccagcggtcatcttcc

SEQ ID NO: 599907 - DNA, 100 bp, Homo sapiens
cagcgccccctctagaagtttctgaggaacaggttttgacctgtagcagagaaccaattctggagaacagcctcacttctttgattgaatacttacataa

SEQ ID NO: 599908 - DNA, 100 bp, Homo sapiens
gaagctgagaatgctgtttcctcaggctgcacttaccagtgggctaccatggccgtgcctcctctgtcgtggtgtctggcaccccaatccgaaggcccat

SEQ ID NO: 599909 - DNA, 82 bp, Homo sapiens
gccgatgaagtgcagaggtttttttctggattgacttctaaagacttggtacgtgaggaaaaaacacggaagaggaagagga

SEQ ID NO: 599910 - DNA, 119 bp, Homo sapiens
caggatgtcatcacctgttatgagaaagcaggggacatcgcactcctgtatctccaagagatagaaaggtgtgtaaatatgttgctgtggagctgaagtcagcctttgaggaaaccggc

SEQ ID NO: 599911 - DNA, 98 bp, Homo sapiens
gacaactgcaagggggaagtagagagataacaaaagctgctcagagtctcaatgaacttggtgatgatgaacagtctacacagatggctgcaagttgg

SEQ ID NO: 599912 - DNA, 110 bp, Homo sapiens
aagttgaagtcgattgccaacagtgtatgctcgaaatcctggatactgcagggacaaatgaagtggagctgggggagctgcttctgtcactgaattatctcccaagtgct

SEQ ID NO: 599913 - DNA, 101 bp, Homo sapiens
aacatatctgcccctatagaaccaacaaatatggagagtattatctccttctcttgcctgggtcttatataataaatttcctctgtgacgagggtgcaggt

SEQ ID NO: 599914 - DNA, 78 bp, Homo sapiens
tggaatgatgttccctgcaattaccatctcacctatacgtgcaagaaaggaacagaatcgggaccagtattcacatct

SEQ ID NO: 599915 - DNA, 75 bp, Homo sapiens
ccagacagagacacacggtcactgcagctgaagccgctgcccctgctacagggttgtgagtcccggcccagcccc

SEQ ID NO: 599916 - DNA, 96 bp, Homo sapiens
tattcgagatggaatgtgtagacagtctttcacgggacatgtctcagatatcaatgctgtcagtctggagaatgctggaggagaccttaaggatgg

SEQ ID NO: 599917 - DNA, 90 bp, Homo sapiens
caacatgatagttgatctggataatgtggtcaaaaagctcctctggtgcaagtgtggtagctattgacaacaaaatcgagcaagctatgg

SEQ ID NO: 599918 - DNA, 55 bp, Homo sapiens
ccatctggctggaacacacatcagtcacaatcatgtgagggccaaccggggaagg

SEQ ID NO: 599919 - DNA, 75 bp, Homo sapiens
ggcgggggggatggcgtctccccgactccacctgagggactggctcctggggtgaaaggtgtagcagtcactcgg

SEQ ID NO: 599920 - DNA, 88 bp, Homo sapiens
cgcacttgctcaacaagggcctgccgcttgaaaccaaggtgtatgttggtaacctgggaactggcgctggcaaaggagagttagaaag

SEQ ID NO: 599921 - DNA, 50 bp, Homo sapiens
ggaggcagaggtggaggcgctttgaaaggaattgattattacaacaagat

SEQ ID NO: 599922 - DNA, 74 bp, Homo sapiens
ggcaacgtgtggcgcttcccctacctgtgtcagagccacggaggagagcaacaagatatggatttggatataga

SEQ ID NO: 599923 - DNA, 100 bp, Homo sapiens
acagatctgcgcttccagagcgcagctatcggtgctttgcaggtgcttgaggaatccaaagccctcgtgcgctgcaacatgaagatggagctggagcagg

SEQ ID NO: 599924 - DNA, 75 bp, Homo sapiens
acacacaaagaatagagttgagcctgtgggacacttcggtgcctccggagccagcgtggtggccatagacaacaa

SEQ ID NO: 599925 - DNA, 96 bp, Homo sapiens
atcattctgacttaagcagattgactgaggctgcgagcttggagtggaagaataaggagaatcaagatactggttttaaatttctttttacattgt

SEQ ID NO: 599926 - DNA, 50 bp, Homo sapiens
cctcctgagtaactgggattacagaaatctttagagatggatcattttcc

SEQ ID NO: 599927 - DNA, 90 bp, Homo sapiens
ctttgatgcagccagtttcattggaggaattgtcctggtcttgggatagtggccaaagcctccaagaacctcatgtccacgcaaagcttg

SEQ ID NO: 599928 - DNA, 98 bp, Homo sapiens
aagactcgatccgcctgcctgcgcacctgccaatacgagaattggagacccaaccagccagacagcttcttttctgctggagaagactgtgttgtaat

SEQ ID NO: 599929 - DNA, 74 bp, Homo sapiens
cgccgcccctcaccagacagatcgctgtcaaaaccctaggtttggtgcacctcgatttggaggaagtagggcag

SEQ ID NO: 599930 - DNA, 101 bp, Homo sapiens
gcggatggccccaggtgtaagcgcagaaagcaggcgaacccgcggcgcaataacggtccatgatgggaaaaaaagcatcagagctacgaactatgttgaaa

SEQ ID NO: 599931 - DNA, 75 bp, Homo sapiens
cctggtggaaaaggttgatctcatagacaagtttgtacatccaaagagtcgatagcagcagttggtgacgagatg

SEQ ID NO: 599932 - DNA, 73 bp, Homo sapiens
atcctggggaatttaagatgccaaagcagctcattcacatacagcataccctatattaatcttgtgaagcatt

SEQ ID NO: 599933 - DNA, 97 bp, Homo sapiens
ctcccaagtagctgggattgcagcaagtttcctccaagcctttatgctaccaggatttctaaagcacaccaagaggaaatagcaggtgctttcctag

SEQ ID NO: 599934 - DNA, 98 bp, Homo sapiens
tggctgatgattcagttcggtctctaaagctctattaccaggttttaaacttcgccatgatcgtgtcttctgcactcatgatatggaaaggcttgatc

SEQ ID NO: 599935 - DNA, 75 bp, Homo sapiens
cttttatttataatgacccaaccttggaagtttgtcacagtgaatcaaaacatggttcagcactgagtcatgctt

SEQ ID NO: 599936 - DNA, 90 bp, Homo sapiens
gaccaatgttcatataaatggtggcagaaataccagaagagttgttgaagcagaaggcggctgattgtcaataagtcactacagttgcat

SEQ ID NO: 599937 - DNA, 82 bp, Homo sapiens
agagcctcgcctttgccgatccgccgcccgtccacacccgccgccagaagtctggctagataatcccaaaatgtggctccga

SEQ ID NO: 599938 - DNA, 82 bp, Homo sapiens
ggagaccctcacggagctgggcgacgagctgaccctgggagacatcgacggtctcggcgcggaagatggccggcggcgtgga

SEQ ID NO: 599939 - DNA, 100 bp, Homo sapiens
cggccggtgccagcacctttcggcttctgagacggcggcagcagcggcattcagtgttcccagtgaagcggcggaaccggcacagcctagtggggcctca

SEQ ID NO: 599940 - DNA, 100 bp, Homo sapiens
ggcggttgagacagcggcggtactgggaggcgtagtcctgctgccggccacagagatggcatcgctgctgtcgctgcaggaggagaaccagctgctgcag

SEQ ID NO: 599941 - DNA, 100 bp, Homo sapiens
ggtccaatatacaagcatcttctgtcctgaatacagtatctccttaagtacagtgctgtggataccaatccactttctctgtatgtcatgcatccattct

SEQ ID NO: 599942 - DNA, 100 bp, Homo sapiens
ggagagcagatggcagatttgcatctttacaaccagaagctcagggagaagttgaaggaggaggagaacacagtggtgatgtgaactccatgtatctgtc

SEQ ID NO: 599943 - DNA, 75 bp, Homo sapiens
ggggagctgggaagacggacaccgaaagtggtggaagaaagctgaatgaaaataaagctttgacttcaaaaaaag

SEQ ID NO: 599944 - DNA, 100 bp, Homo sapiens
atggaatgcattttgaaacttaaggatgggatacagaatatgacagatacctagcatctagcaaaataatggcagctgcttaccttgaccccaacttgaa

SEQ ID NO: 599945 - DNA, 100 bp, Homo sapiens
gggccctccccccatggccaatggaaaacctggcgaccctaagtcaggccataggaaaaggatacagagtagagtttcatgaacctgaaacttggtggaa

SEQ ID NO: 599946 - DNA, 74 bp, Homo sapiens
tgtggccagtaggcaatcacctgaaggatctgacttccagaaggtgtcccgacccaggctaagcttgagcatgg

SEQ ID NO: 599947 - DNA, 96 bp, Homo sapiens
gccccggcctggccccggcccctcctgcccatggcggtggccgagctgtacacgcaggaggagatgaccgccgggttctgctatggcacatggaac

SEQ ID NO: 599948 - DNA, 101 bp, Homo sapiens
aaggattccaagtaactcttatttggcatcagaacacaccatgatggctgtgacctaagaccctcaggaagccccggggtcatggcccagaagcaccccgg

SEQ ID NO: 599949 - DNA, 101 bp, Homo sapiens
cagggctgaggaaccatgtctccatccccgaccgccctcttctgtcttgtgtgcaacttgctttggtgtttgctgttttattgccacagatgacattactg

SEQ ID NO: 599950 - DNA, 50 bp, Homo sapiens
cggattattctgcctttgaagtgacaccacctctccctcgaggccaccag

SEQ ID NO: 599951 - DNA, 98 bp, Homo sapiens
aacagacgcatcactggccgagcccactggggctcacaccacgcagactcacagatgaatgcttctcacccggaaacaaacttgccagttgggtatcc

SEQ ID NO: 599952 - DNA, 99 bp, Homo sapiens
aagctactgaggtgaaccctgagagcctggacacccatccaacctgatgctggaccgtctgagtgggaagatcctgcacattgactttggggactgctt

SEQ ID NO: 599953 - DNA, 75 bp, Homo sapiens
aaatattatctaaaagtccacaacagatgggtcccacccaggcgtataacagccaattcatgaaccagcccgggc

SEQ ID NO: 599954 - DNA, 80 bp, Homo sapiens
gccttattttttctcatggatgttcttcttcgagtatttgtagaagggaactgtggctgcaccatctgtcttcatcttcc

SEQ ID NO: 599955 - DNA, 100 bp, Homo sapiens
agaaaaactgtaaagatcccgagacatttccctgactggtgatgtacatcgagagagacagcagaaagaccactccaggcaaggagcagcaaagtggcaa

SEQ ID NO: 599956 - DNA, 80 bp, Homo sapiens
gttgttgggaatccctgccccatctgtcgagatcacaagttgcatgttgactttaggctcctgacccctgaggattacca

SEQ ID NO: 599957 - DNA, 74 bp, Homo sapiens
gattgtccatagagatatcaaagctgctctgttaaaagcgaaaatgaaacaattgcctgcggcaacagttcgac

SEQ ID NO: 599958 - DNA, 100 bp, Homo sapiens
agatgtctgacatggaggatgatttcatgtgcgatgatgaggaggactacgacctgagtcactgctagttggattgaagcacacctgccagatgattcta

SEQ ID NO: 599959 - DNA, 73 bp, Homo sapiens
agcagaagaacgcttagaaagagatcacatctttcgacttgaaaaagtggtctgacccaggacctgaaagctg

SEQ ID NO: 599960 - DNA, 96 bp, Homo sapiens
agtatgaacatgcggccaactgtgccacccatgctgtcggagctcttaggcctgctgaaaacctacaactgctaccatgagggcaagagcttccag

SEQ ID NO: 599961 - DNA, 100 bp, Homo sapiens
gagaaccaggaaaacctttcaatgaactgtgggattatgaagatgttagtaggcaggaagaggcggagggagagctcagtgaaggagaacactggtatgg

SEQ ID NO: 599962 - DNA, 125 bp, Homo sapiens
atagctgataatggaaatgagacaattgaagctcaagcagagcttacagtgcaagatacactctgtgcagttttagagagagacacactcagtattcgagaaagtcgactttttggagctgttgt

SEQ ID NO: 599963 - DNA, 82 bp, Homo sapiens
atgagatcaagatgaccgacgacgacctgtttgtggacttggggagcgaattcagaaggagctggcggacatcactttagac

SEQ ID NO: 599964 - DNA, 50 bp, Homo sapiens
gtcaatcatgacttcacccctctggaggattacattgcagtgaaggagaa

SEQ ID NO: 599965 - DNA, 100 bp, Homo sapiens
ctcaaccacactccgtccacggactctccgttattttaggaggctcatcacacactccttctgggctctggtcatgttggccttcgaaacctgggaaaca

SEQ ID NO: 599966 - DNA, 90 bp, Homo sapiens
ggtgccaaggatgggaaaggtagaggtcgtcaagtcattgcagtctgcagatctccaggggagcccaccagcctagtcaacatggcctcg

SEQ ID NO: 599967 - DNA, 100 bp, Homo sapiens
gaaaagtggcactgaggctctggaacttctgcccagctctccttgagatcctgcatattttgatgaaaattggctaaacagaatcaaaactgaagtagga

SEQ ID NO: 599968 - DNA, 112 bp, Homo sapiens
gcgagaccatgacgcccatgcactaccacctgcgggagatcatcatctgcacctaccgccaggcgggcctcatccgcacagacagcaccgacttcttcattgagcctctgga

SEQ ID NO: 599969 - DNA, 100 bp, Homo sapiens
cgagggactgggagtcgttagtgagcccaataggggcacaaaacgtccccgggatgatgaagaggaggagcagaagatgcgtcggaaacaaactggtact

SEQ ID NO: 599970 - DNA, 80 bp, Homo sapiens
agccggcagcggcgcgggaggccgtgcgggtgtgaccaattcagtgaaaggaacgaatgcgattctctggacctgtttgg

SEQ ID NO: 599971 - DNA, 75 bp, Homo sapiens
agagtcagcctctggttcagactgcagtaaccagaggaagaacgtgcaaaacgtgaggagctagagcgaatactg

SEQ ID NO: 599972 - DNA, 82 bp, Homo sapiens
cctctcgggagaagcagcgcctgttcccggggcagatccaggttcagatggtcatcatgggccagtgctactacaacgagac

SEQ ID NO: 599973 - DNA, 74 bp, Homo sapiens
gatcttcgagttcaaagagaccctcggaacgatgcgtattggatagcaatgaatagttctctgaaatgtaaaac

SEQ ID NO: 599974 - DNA, 100 bp, Homo sapiens
ggggctttgtgctgggcctgctcttccttggggccgggctgttcatctacttcaggaatcagaaagtacctccagaggtaactgtgctcacaaacagccc

SEQ ID NO: 599975 - DNA, 50 bp, Homo sapiens
ctgctattctccgagcttcgcaatgcttggctctctggcagatttcctct

SEQ ID NO: 599976 - DNA, 82 bp, Homo sapiens
gaacgggcgaggttgggctgccgtgctgctcggcggcgctgagccacacctgcatgctgtggcgggcgctggcggtggagcc

SEQ ID NO: 599977 - DNA, 98 bp, Homo sapiens
gggagtcgaagcgagggtctgaagttcacgactactagaaggggaggggagtggaaaggctctcagtgaaaaagctcaaaagccaaaagtctctgaga

SEQ ID NO: 599978 - DNA, 83 bp, Homo sapiens
tcagcccccgcaggatggctgcccgggtcttctacctgctcctgggtcagcccaaggccaaccccactgtcactctgttcccg

SEQ ID NO: 599979 - DNA, 121 bp, Homo sapiens
gggcccgatgagcggcggcctcggcctccggcgcagcccggaaatgtccggcaagatcgagaaagcagatatgttgatgatgtgatcagccgcattgacaggatgtttcctgaaatgtcca

SEQ ID NO: 599980 - DNA, 75 bp, Homo sapiens
ttcagctacagggtgaccaacgcaagaacatatgccagttcctcgtagaggcattaattcatggactaaacagac

SEQ ID NO: 599981 - DNA, 75 bp, Homo sapiens
tcctgttgcaccaggttcttcgaaaactgaagcagatgttgaacaacaaggctctattccgttcgctggttcgcc

SEQ ID NO: 599982 - DNA, 90 bp, Homo sapiens
gaaatggccaaccaagccctgttgaaacacagggaagaaattggtaatcggccaacagagcacttatggcaaggcatctcgagggggtgg

SEQ ID NO: 599983 - DNA, 87 bp, Homo sapiens
acctgccttcgctcccgcaccgatttccagcaagctctctatgagttgtcatatcatgtaattaaaggaaatctaaagcatgaacag

SEQ ID NO: 599984 - DNA, 50 bp, Homo sapiens
ttcgtacccacagtgcttcatgagagaccgagaagatcaatccatcttgt

SEQ ID NO: 599985 - DNA, 50 bp, Homo sapiens
cttcatagcattcgcctactccgtgaagaatgtgagcatttgatccgcca

SEQ ID NO: 599986 - DNA, 91 bp, Homo sapiens
ctgagcacatcagtgatgaatgcaagaggcgtttctataagaattgttctgtgcacccttacgaagtggccgaggtaattgcattgcctgt

SEQ ID NO: 599987 - DNA, 89 bp, Homo sapiens
tccgctgcgcgcaggctgggctgcaggctctcggctgcagcgctgggtgtggatgaggtcaccattgtcaacattttgaccaaccgcag

SEQ ID NO: 599988 - DNA, 88 bp, Homo sapiens
aggagtagctgatttctctgccacctatcttcgctgtcaactacttctcatcaagggcggcgactggcggcgcgatggacctgaccgg

SEQ ID NO: 599989 - DNA, 100 bp, Homo sapiens
ccagcgacggcaccgaggccaaggtggatgaggcccaggctgatgggaaggagcacccaggagctgaaggcgcagatcaggcctctataaccgccaggaa

SEQ ID NO: 599990 - DNA, 96 bp, Homo sapiens
gtaaaacgctgtggaaagtctgcactctttcaactggcagaggccaatatacccagtagaagaattagaagaagaaagcgttgcagaagatgatgc

SEQ ID NO: 599991 - DNA, 99 bp, Homo sapiens
agagagggcaccaccaaaagtgaggtcttctacccagaaagctgccttggaagacacactggcagaaacggaggcgcgctttggagcccagctggcgca

SEQ ID NO: 599992 - DNA, 100 bp, Homo sapiens
cggccacgtgcgcagcctgcaggagctggagcagacgcggctgggcacgcacggccgacaagaacggggccctcaagtgcaccttctcggcacccagcca

SEQ ID NO: 599993 - DNA, 100 bp, Homo sapiens
atttaatcaacttttttatccagtgttcaggatgtcgagcactgcaagaagctgaagctcgttttcgtgaaattaagcttcagagggaagcccgagaaac

SEQ ID NO: 599994 - DNA, 75 bp, Homo sapiens
ctgattgactgggctggcgttaactgtgcggaggcaggcatgaacaaccgggaggtgctggagcaggtggagcga

SEQ ID NO: 599995 - DNA, 100 bp, Homo sapiens
ggtggttggatcatttgaagtggtgtctacacttataaaagttaaaggactggatgcatttgttctgagcctgctcactctagatggtgaatcaatctac

SEQ ID NO: 599996 - DNA, 75 bp, Homo sapiens
agatgtttctggaatatcaaaatccacaaagtacatgctcaagtcatcagataacatgctccaatggtcagtgta

SEQ ID NO: 599997 - DNA, 80 bp, Homo sapiens
ccaactttgcgacggaaatgtgtcatcgaaagccaggtctcagcggcggtggcagccgaggtgcaggatgcaagaaggcg

SEQ ID NO: 599998 - DNA, 90 bp, Homo sapiens
ctttcctcgtggaatttgaagattctacagataaatcaggttatgaagacagtatggagtttccagaccatagtagacatttgctacagt

SEQ ID NO: 599999 - DNA, 90 bp, Homo sapiens
gaccacttacaaggcttccaccagcaagtgctgaagctgctgaaagatggcagaagaagtggtggtagtagccaaatttgattatgtggc

SEQ ID NO: 600000 - DNA, 100 bp, Homo sapiens
cggaggacaaggccaagagggccaagggcaaaggccgaggctctgataaacatcattaagcctccagtgagggatccaaaaggctttctgcagcagcaca

SEQ ID NO: 600001 - DNA, 108 bp, Homo sapiens
aaaaatgagtgtgaggcgaacagccatcccgggcactatgtgaatttgggatatcagtacccatctctggaccagcttgcagacatgatcccttgcgtcctgcagtac

SEQ ID NO: 600002 - DNA, 75 bp, Homo sapiens
gattcttctcaacatttctgcagactgcctcaacagagtgataggtaaaccccagtgataggtaccatcttatgc

SEQ ID NO: 600003 - DNA, 99 bp, Homo sapiens
cgcgtcggcgctggggacaaaggcaatctgaaagcaaatcctgtttagatgcaggcgaaggttcctggtgacccaggctctcaccttaccgtcccttac

SEQ ID NO: 600004 - DNA, 50 bp, Homo sapiens
aatgggtaaatgcacaattttctaaggctgttcgctgctatgaatctcta

SEQ ID NO: 600005 - DNA, 50 bp, Homo sapiens
tggtcagtgcctgtggtatcatcgtagtgctgctctacgttcgaaaggag

SEQ ID NO: 600006 - DNA, 50 bp, Homo sapiens
gtcggaatcagatttgaaaatgaaagtgtggtttttcaaggatataacca

SEQ ID NO: 600007 - DNA, 82 bp, Homo sapiens
acgaatttcagctactgcaagctcagtaccacagatcattgagaagcagccaggccacattcggagcagggttttcagggag

SEQ ID NO: 600008 - DNA, 100 bp, Homo sapiens
atttctgctgtatgcaagttttcacttatctcgaaagcctatcagcatagttaagttcccctggagatgggagtctttcttcgggaacacctgaactact

SEQ ID NO: 600009 - DNA, 82 bp, Homo sapiens
tgggacctgtgaccttcatcattttggaattagaaggtgacgaggagggagaagacgaggatgatgcggaaattaaccccaa

SEQ ID NO: 600010 - DNA, 75 bp, Homo sapiens
ggacctccaaggaagccacgtgcagacatctacaaccttcgatctcctgacgaagtgtcaatccatatctacaag

SEQ ID NO: 600011 - DNA, 50 bp, Homo sapiens
cacgagtgtggcacccagcctggtccggatctgggcggaccccggcaaat

SEQ ID NO: 600012 - DNA, 82 bp, Homo sapiens
tgagaaacattaagacctactaccaggtttgcctgcaatgagatttcattctctacatttaaaggacatcctttctgagctg

SEQ ID NO: 600013 - DNA, 75 bp, Homo sapiens
cctgaggtttcagagcgcagccatcggtgcgctgcaggcaaggaccagatgcattcacacaggaaacgaaccatg

SEQ ID NO: 600014 - DNA, 98 bp, Homo sapiens
tcaaccagcccactggccccatatcctacctcccagggggtttctcttctcctggatcttagtctcgtttgcctgtcacctggcctccacccaaggag

SEQ ID NO: 600015 - DNA, 88 bp, Homo sapiens
tgagaagcgacctccccacttcgtctgattcaaagataacaattggtgtatatgatccctgtaacttagcccagtaccctggatggcc

SEQ ID NO: 600016 - DNA, 99 bp, Homo sapiens
gggatccctgtggaccagcaggatgatgacaaaggcaactgtgaggactaccttatgatttcctgtgattcatggcaggggacgtggaaggattctgtt

SEQ ID NO: 600017 - DNA, 100 bp, Homo sapiens
atagatcaacttttaactcagagtcctggtgactatatccccatatcctatgaacagatatacaggtgaccattgtgaggtagatattttgttctaattt

SEQ ID NO: 600018 - DNA, 112 bp, Homo sapiens
ccgaggcgttcggtcctgctgttgcggccgctgccccagggctgcggggacgtgtactaatggtcacttgatgtgcgctggctgttttatccacctactagcagatgcccgg

SEQ ID NO: 600019 - DNA, 100 bp, Homo sapiens
gagatctctctcatctcgctcggctgcgggaaatcgggctgaagcgactgagtccgcgatggaggtcatgaagacatatcacatgtacaatgccgacagc

SEQ ID NO: 600020 - DNA, 75 bp, Homo sapiens
tccacagcaccccaaacgggctgagctcagagtccagccgcaaaaccaagaagcaggacagcaaggaggccaacg

SEQ ID NO: 600021 - DNA, 90 bp, Homo sapiens
cctcaatgttaccctggaacaccccctcttcgttggaggaatgtgccaaaactgcaaggccccccggacagaccacccagccctgtacag

SEQ ID NO: 600022 - DNA, 101 bp, Homo sapiens
acaatattaaccaggatgaatggcggtccaagacaagctgctgctatctgcgtgccacttactggtctcactggccaccaccgtgcggcccgtctttctga

SEQ ID NO: 600023 - DNA, 83 bp, Homo sapiens
gttggcgtgtccctgcagcgaaggatcctggcgggcgctaatattgacacctgctcagaagaccagaggaccccgttgatgga

SEQ ID NO: 600024 - DNA, 100 bp, Homo sapiens
ttctacaacttccaagacagttactacatcaggctcccagccaacctctgataaaccctcccagcggccatcagagagcacaaattgtagccctacccgg

SEQ ID NO: 600025 - DNA, 73 bp, Homo sapiens
ttcgcttcactgagttcattgaacagtacacgggccatgtgcaacagcaggaacattatacatggcagtgatt

SEQ ID NO: 600026 - DNA, 75 bp, Homo sapiens
cagagagggaagagattcagccagcacactcctcgcgagcaagggatccaggtccggcacgatcaagacccaggc

SEQ ID NO: 600027 - DNA, 90 bp, Homo sapiens
cggggacgggggcgagagtgaacgattcaacccgggggagctcagacacttccctctgtgaccatgaaactctgggtgtctgcattgctg

SEQ ID NO: 600028 - DNA, 51 bp, Homo sapiens
tcgggcctcatccgccgccggaggctgcagtttgtttcgacgccggaccgc

SEQ ID NO: 600029 - DNA, 75 bp, Homo sapiens
ccagcattccctgcaggagccctacacagcctccgtggatgtgcactcccagcaacacccctgccacgccgccca

SEQ ID NO: 600030 - DNA, 74 bp, Homo sapiens
atctactactcggacaagtacttcgacgaacactacgagtaccggtgcttttgaagatgatgatatcacgcacg

SEQ ID NO: 600031 - DNA, 75 bp, Homo sapiens
cggcggcagcccagcccccagcctcccacggacctgagaatggagatttacagacagtcatctgggtggaggaca

SEQ ID NO: 600032 - DNA, 100 bp, Homo sapiens
ggatgaggcgttgaaggtagatgattgtgactgtcatcctgaattttcaccaccatcaaaaaacctacagagatttccgattgcaaggggtcctggactc

SEQ ID NO: 600033 - DNA, 100 bp, Homo sapiens
tagggatcatctacggcaaactctattggatatgattgcaagagagcggaaaggagaagtcgtagacaggtggtagagaaaacgaaccctacagaaccag

SEQ ID NO: 600034 - DNA, 88 bp, Homo sapiens
tgagtcaatatgtattgtggcattcaaatcctagcactctgggagagcggggatctgatgagcttctttcttctggcatcattaacgg

SEQ ID NO: 600035 - DNA, 100 bp, Homo sapiens
aacagcgtctgggaagagagcagccaggggcggacgaaaccatcggtagactccacaaggtgctggctgccagctgctgcgccccccatgtagaaggtgc

SEQ ID NO: 600036 - DNA, 98 bp, Homo sapiens
gtgattggcgggaaaaagaggccaaagatctgacagaactggttcagcggagaataacatatcttcaggtcatggaaaatggaagatttgcaaaatac

SEQ ID NO: 600037 - DNA, 100 bp, Homo sapiens
tcgccttgtatctcaacaccctgagtgcggatttctgctatgatgacaggaccagtcctgcctctgttgtagaagacatgtggtgtatataaagtttgtg

SEQ ID NO: 600038 - DNA, 100 bp, Homo sapiens
gaagatctttgatgcacttgaaaatcaccagtcagccccgcgagttgtatccctgattcctgcggtggtttccggtaactgccaaggttaggaagtgctg

SEQ ID NO: 600039 - DNA, 49 bp, Homo sapiens
tgccgctggcgagcgccaccgcatgggaaagaccacagcaagattcttt

SEQ ID NO: 600040 - DNA, 48 bp, Homo sapiens
tctttcgggaaagctctctggggcaggaattctcaatcgcaatcctct

SEQ ID NO: 600041 - DNA, 75 bp, Homo sapiens
tcttaacccagaagtagctgaatgtgttactccattgctgaggagtgccagattctactgcaactgaaagagcaa

SEQ ID NO: 600042 - DNA, 83 bp, Homo sapiens
ttacactgaagaagtagagtatttcaaccataaagacatcttaattgggcacgaaagagttcaaaaggtgatgacctatcaac

SEQ ID NO: 600043 - DNA, 59 bp, Homo sapiens
caagatggccgcgccctgcagattgtctcttgttgctgagatgaacccggtacctcaga

SEQ ID NO: 600044 - DNA, 100 bp, Homo sapiens
tttgttggggcgacagctgctcctggctacatagctccaggagcttgcagagctagaaagtgccctccaagagcagcatgaggtgaatgcatctttgcag

SEQ ID NO: 600045 - DNA, 75 bp, Homo sapiens
cagcctccctagaagctggaattacagaccaccgctgaaacttcacttctacacagaggctttctttcccagaaa

SEQ ID NO: 600046 - DNA, 75 bp, Homo sapiens
atgcggtggtgggggacctgccggcacgcgactccccccgggcccaaagagcatcagatccatgctgctgctgac

SEQ ID NO: 600047 - DNA, 97 bp, Homo sapiens
cacagcaagcaccacgcggcctacgtgaacaacctgaacgtcaccgaggagaagtaccaggaggcgttggccaaggcgtggggtagagcagcggctg

SEQ ID NO: 600048 - DNA, 83 bp, Homo sapiens
agaggcagcgccatggcggagcagacctactcgtggtggtttcctagaaacatgattgtttattggcattgatctcacagtct

SEQ ID NO: 600049 - DNA, 101 bp, Homo sapiens
gttattttctgagtcagtttcagggctaccctgagaggaatctacatgcagagaagttcaggagactgaactaacggaacgtcaggaagcgctgcgggctg

SEQ ID NO: 600050 - DNA, 101 bp, Homo sapiens
caaattgcagtgaagaaagtgctagggaaatccatggtgcaccttccaatttcagttccagccatctggaatcaaagcacgtatactgtgtagatgttaat

SEQ ID NO: 600051 - DNA, 74 bp, Homo sapiens
cggagcaacgagcgcagcgccggctgaaggtgatgtggccgccctcaaccgacgcatccagctcgttgaggagg

SEQ ID NO: 600052 - DNA, 101 bp, Homo sapiens
ccgccatgggctgctgcagctccgcctcctccgccgcgcagaatcctgctgcatcacagaagctggaagttctgatgttccactgaaatcacaatggaaag

SEQ ID NO: 600053 - DNA, 74 bp, Homo sapiens
cttccagtagctccaaggaggttaaggtttcctatcctgggagcaggagagtgtgcctatttgaatgacaaagg

SEQ ID NO: 600054 - DNA, 90 bp, Homo sapiens
atgaaggagtaggacttgtgcattcaaacatagcaactgaggagcaactacagcgagccctagattttcgaaactcttcagctacttgcc

SEQ ID NO: 600055 - DNA, 75 bp, Homo sapiens
aatgggtctgggaccttaacagggagccatgatgccttattggaggaactggaacgctccacccttcaggacagt

SEQ ID NO: 600056 - DNA, 100 bp, Homo sapiens
tccagccttagtccagatgaccagtttttagtcagtggctcaagtgatgaagctgcctacatatggaaggttaccatggggaagaaagtggccatcattg

SEQ ID NO: 600057 - DNA, 100 bp, Homo sapiens
ttcgacgccatccctgtgaccatgacgatgtcctccatcgtgatgaaggcagagagcagagacatcccgatctggggaattccagaaacgccgctggact

SEQ ID NO: 600058 - DNA, 87 bp, Homo sapiens
ctgattcaagactcctctgctttggactgaagggtttggacagaggagccaaaggccaaatttccactttcagcagttttatttcag

SEQ ID NO: 600059 - DNA, 100 bp, Homo sapiens
gatccgcatggagcctgacgagacggtgtttggagaagagggattgaccctgaatcttgaagacgttcagcctcatgacttaggaaaagttggagaggtc

SEQ ID NO: 600060 - DNA, 100 bp, Homo sapiens
gctcaagagcccattcttttcatcattcggaagcaacagcggcagtcccctgcccaagagttttactacccttggatgctgctgttgacatggaaaagat

SEQ ID NO: 600061 - DNA, 100 bp, Homo sapiens
gtccagcatgggagagtacatgagacgatgaagcaaagtgtaaacaggaacatcgataagtagtgtaaaaacttgcacaatgaaatccgaagccaaggat

SEQ ID NO: 600062 - DNA, 111 bp, Homo sapiens
gataatgatgaagaagatccttcaaaattaaaagaggagcagcatggcatttcagtcactggtttgcagagtccagactccaagaatgaaaaggctctgggccgcaaaata

SEQ ID NO: 600063 - DNA, 120 bp, Homo sapiens
ctccccggctgattggattcgttactgctttgcaacgcgcacctaactccaggtctgtggctcaggacatccccaagctgcagaaactaggcatcacccatgtgctgaacgcggctgagg

SEQ ID NO: 600064 - DNA, 74 bp, Homo sapiens
tgccacaggaggctgtgcgggccccgctccgcttcgaatgggatgtgggaatgagtgacacagcaatgacatct

SEQ ID NO: 600065 - DNA, 100 bp, Homo sapiens
gtctggagcagctgaaggcctgcacgatctgattttctggagagatgtgaagaagactgggtttgtctttggcaccacgctgatcatgctgctttccctg

SEQ ID NO: 600066 - DNA, 95 bp, Homo sapiens
cagctagcaccttcgccctctccagccaggtacctagcatctgctgcacccaagcctgagccggttcctgttcaaaaggtgtgtttttaagctag

SEQ ID NO: 600067 - DNA, 96 bp, Homo sapiens
tttgaagatgaacaccaagatgaaagcagcagttttcatcatctaagtgaaagcagcgtcaccctttacaccagaaagctggcgggcactatgggg

SEQ ID NO: 600068 - DNA, 90 bp, Homo sapiens
gatggtccagaattcacttttactaccccaaagtttgggaatgacaccactccactgggcggctttccacaaccagcctcaacacacaca

SEQ ID NO: 600069 - DNA, 75 bp, Homo sapiens
cgccttcgctatctcatggacacagcagcagcagttgcaagctcagcatctttctcatggccacggacccccagt

SEQ ID NO: 600070 - DNA, 90 bp, Homo sapiens
gcaccatatactactttttccagaattcatacaaagagtatgctggccctggctctacttgatagaattgtctccgtggataaacagcag

SEQ ID NO: 600071 - DNA, 74 bp, Homo sapiens
tccgccgccaccacccactccggacacaggagtgtggccatctggggccgtgtggtatttgccactcaggagac

SEQ ID NO: 600072 - DNA, 75 bp, Homo sapiens
aaaacattggaattctgcttatctaggttgactatagtcaatggggccaatggagccaagtgtatggaaacccac

SEQ ID NO: 600073 - DNA, 76 bp, Homo sapiens
tggtgatcggctccttaccagctcacctctcaccgcgcatgtttggaggtgttttcacagtcctgtgtttggtatg

SEQ ID NO: 600074 - DNA, 100 bp, Homo sapiens
gaccgcagggagcgcctccggcagctggccctggagaccatcgacatcaacaaggttatcagtgagctgaatggaaaaaacattgaagacgtcattgccc

SEQ ID NO: 600075 - DNA, 75 bp, Homo sapiens
actacagaattcttttcaggggtgcaagaggattgcctacagcgctcctttaaggcacaggttttctcctgccct

SEQ ID NO: 600076 - DNA, 101 bp, Homo sapiens
aggccctcccggtccccctggtacatctggtcatcctggttcccctgggccacatggtattcagggtccgataggcccacccggtgaagaaggcaaaagag

SEQ ID NO: 600077 - DNA, 75 bp, Homo sapiens
ggattggaactgtgtttgggagcctcatcattggttatgccaggaacttgatactaaatttgggactctttgctg

SEQ ID NO: 600078 - DNA, 95 bp, Homo sapiens
ctggggcagtatcaacggagtctccgggggcatccgcttcgatcctgaaattccgcaaacactacgactagagtttgctaaggcaaacacgaaga

SEQ ID NO: 600079 - DNA, 88 bp, Homo sapiens
tggaggactacactcgggaattcatcaaccgcatcacacagagtgaacttcctgccaagatgtgtagagatggggtttcaccgtgtta

SEQ ID NO: 600080 - DNA, 75 bp, Homo sapiens
aggaagtatgctgttctctatcagcctctatttgataaggacatgatccacatcgcggacaccaaggtcgccagg

SEQ ID NO: 600081 - DNA, 83 bp, Homo sapiens
cgacagccaggcccgggagaaccctcccaggcccaatacttcaaagcatcctacctctgctcaatatatattacttggagagg

SEQ ID NO: 600082 - DNA, 100 bp, Homo sapiens
agaaatgctctgcccttggagaactgctaacctagggctactgttgattttgactatcttcttagtggccgtgggaaagaagcctaaggaataaagtcat

SEQ ID NO: 600083 - DNA, 75 bp, Homo sapiens
cgagatattcctcaagctgcgaaagtaaagtatttaaaccatgtcagagctgcctcaccacaggaccttgctgga

SEQ ID NO: 600084 - DNA, 100 bp, Homo sapiens
tatcctcggaagagcgctcccaggagaaacaaatggtgatggaatttcctgataatgtgttaaatctcgatggacatcagaataatggtgcacagctaaa

SEQ ID NO: 600085 - DNA, 75 bp, Homo sapiens
tcctttcaggaaggagccattatttatgtcatcaagaagaatgacgatggtgctggagaatctggtaaaagcacc

SEQ ID NO: 600086 - DNA, 50 bp, Homo sapiens
gccccaatccccggcagctctctcaggtatcagcagatgttgcacacaaa

SEQ ID NO: 600087 - DNA, 90 bp, Homo sapiens
actttttgtatctcgacactctgcaagattctctcctgaagtcccaggctcctggagtccatgatccctatcaagatggtcaacttcccc

SEQ ID NO: 600088 - DNA, 74 bp, Homo sapiens
ggcagcggcccatggcgccctaccggccctcccagcaagggaaagccaccagggtgggtggcgagcctgggatc

SEQ ID NO: 600089 - DNA, 75 bp, Homo sapiens
caataagccatggcatctaagaaatttgctgttaaagctccagtgcgttcggggccccgcccggccgggccaggc

SEQ ID NO: 600090 - DNA, 90 bp, Homo sapiens
gatgaagcctaagaatatgatcagggacatatttggagaagactgtgtaagtgtaaaggatgactctattcttagcgtcacagtggacgg

SEQ ID NO: 600091 - DNA, 100 bp, Homo sapiens
aaagagatgaagaagaaagatacagtgccttggtggataactgaagatgattttaaagatgatggtgaagatgttgacctttttgatatgaaacaattta

SEQ ID NO: 600092 - DNA, 73 bp, Homo sapiens
tgaagtcggtgtctgctgcgttcacggcaggattcggttagacctacattgccccaccagctgccatttttta

SEQ ID NO: 600093 - DNA, 100 bp, Homo sapiens
ccggagtattaaatccagctagagaatggcatgtgcaaagatacagaggaactttcgaaagaaggtaccacctatcataggtattaccacacaatttcat

SEQ ID NO: 600094 - DNA, 83 bp, Homo sapiens
ttacacggccagttttgaaatcgacacacaaagaatagagttgagcctgtgggacacttcggtgatcagggccaaagcggtca

SEQ ID NO: 600095 - DNA, 97 bp, Homo sapiens
gaaaaacttccgtaacatccaggttgatgaagctaatttattgacttggcaagggcttattgttccttctctcatcacttttgtgaacaagcacctg

SEQ ID NO: 600096 - DNA, 48 bp, Homo sapiens
cgggggagccccgggagccgcacggtccacaactcccaggcctgttgc

SEQ ID NO: 600097 - DNA, 98 bp, Homo sapiens
gcccgccgcgctccagatgaagtgtgagcactgcacgcgcaagctgagatctgtatctgtggacctgaatgttgatccctcgcttcagattgacatac

SEQ ID NO: 600098 - DNA, 82 bp, Homo sapiens
tcggatcgaatccctcacgcgggcgcggatcgaccggagcagagagctggcgagcaaggtttgtttgtaaaaacaatggtgt

SEQ ID NO: 600099 - DNA, 51 bp, Homo sapiens
ttttgttcaagtacacatttcatcagacatctgacccagatgtgatcctct

SEQ ID NO: 600100 - DNA, 100 bp, Homo sapiens
ttcactatggggtggagacgtggtactcagcaagctcgagttaaagttggatgtgctggaacagtaataaaagactagtggccttagtgcccatgcccag

SEQ ID NO: 600101 - DNA, 82 bp, Homo sapiens
ttgctccagggcatttgtggaacatgaagagtatttctggagaagaatcatcccatggagtgattatgacaaggcttaccga

SEQ ID NO: 600102 - DNA, 100 bp, Homo sapiens
gagactgggcgcagctgcccttgtgcccgaggcccaggacagccaggtcaccagcaccaagaccccataggctccttcaatttccgtgatcctcggagtc

SEQ ID NO: 600103 - DNA, 88 bp, Homo sapiens
aggatggcatcaccttcattgacagcaagataaaggataggttacagttacgggtgctcttgcgtcgggaagacgtcgtcctggggag

SEQ ID NO: 600104 - DNA, 50 bp, Homo sapiens
cccaggagaaattcgccctcaaaaagcatcaagtgtacctgatttgtgaa

SEQ ID NO: 600105 - DNA, 75 bp, Homo sapiens
atttcgatattgaagtgtcaaaatccatagatggaaaagatgatgtgctggtggacggacagccatgtgaccgcg

SEQ ID NO: 600106 - DNA, 75 bp, Homo sapiens
taccaagaacgttaaaggaaacaagtagaaatcagcagtggagtgtctgtgaataactgtgcttgaagaagaaaa

SEQ ID NO: 600107 - DNA, 100 bp, Homo sapiens
acccctacaacttattcctgtccggagacagcctaagggcttcaggtgagaccacaggagttgacatcactaaaattcaagtcaagagatgtgagaccat

SEQ ID NO: 600108 - DNA, 75 bp, Homo sapiens
ccggcccggagcccccagcgcagcggccgcgctgtggactactgtgcctcagaaaaccacggatgtgaacatgag

SEQ ID NO: 600109 - DNA, 50 bp, Homo sapiens
cttgtggagcaaatgggaaaagatccaaaattaacgggacaggctcttat

SEQ ID NO: 600110 - DNA, 90 bp, Homo sapiens
tgctgctgctgctcttcccgctgctgctcttctccaggctctgtgattaacgtgacagtgtcaggtggacccacagccatcccacctccc

SEQ ID NO: 600111 - DNA, 83 bp, Homo sapiens
ggcttgcagccttgaggaaatagcatcttcatgatacagttaagaggaatcttgacagcgccacttcccctcagaatggcgat

SEQ ID NO: 600112 - DNA, 100 bp, Homo sapiens
ttgtggatattatggctaataacacaacaagtttagggagtccatggccagaaaacttttgggaatgtgacagtgatgataacatgggtgccaaaaatac

SEQ ID NO: 600113 - DNA, 75 bp, Homo sapiens
gatgcccctgataaaggatacgttgctgccagtgaaggaggagccaatgtttttactgtgtcatattttaaaaat

SEQ ID NO: 600114 - DNA, 143 bp, Homo sapiens
gccgagatgtctcgctccgtggccttagctgtgctcgcgctactctctctttctggcctggaggctatccagcacttcgattttcagaattcctcctgggaatgctgactccttgcttggtgccctgatgcttctctgagata

SEQ ID NO: 600115 - DNA, 96 bp, Homo sapiens
gaagctctttgcggtggcgttggtgctgtttgcggatgctgatgcaggattatatgcgtcaggcaggagaagtgacttatgcagatgctcacaagg

SEQ ID NO: 600116 - DNA, 100 bp, Homo sapiens
tttgttaaggattccaagtaactcttatttgggaaagaaatggagctggtatttggactatttattttcacaggggttacaaggcttgaaactttttata

SEQ ID NO: 600117 - DNA, 83 bp, Homo sapiens
cttgaaaagactgggcttgtccttgctggtgcatgcgtcgtcggcctctgggcagcagaattaaacaaccaccatgtcgagca

SEQ ID NO: 600118 - DNA, 51 bp, Homo sapiens
caaccaaattgtcgccattaagaaagtcgggtcacaaatcttcgaagagtg

SEQ ID NO: 600119 - DNA, 75 bp, Homo sapiens
tcgcggagctggaatgactggcaacccagattacctaggaacagtacgatttggggttatcacaaataaacatct

SEQ ID NO: 600120 - DNA, 95 bp, Homo sapiens
cactggactcccgagacccttggaacccaggtaatattaatcagtcactaatgacgctaagaacatgtatggatgtcctaagagagaaccaaatg

SEQ ID NO: 600121 - DNA, 90 bp, Homo sapiens
cagcccctcaccagagcgatcgctattgctgaaatgtgaccaagaatatggcccaggtgaccaaagccctggacaaggccctgagcacca

SEQ ID NO: 600122 - DNA, 75 bp, Homo sapiens
taatcttgtacttcaagaggaggaatcacgctcggaaacaatggggtgtgctggaccggttttctcaaattcagc

SEQ ID NO: 600123 - DNA, 74 bp, Homo sapiens
ttccggagggattccatcataggtttggtgcacctcgatttggaggaagtagggcagggcccttatctggaaag

SEQ ID NO: 600124 - DNA, 75 bp, Homo sapiens
attaaattcccgaactggggagatctgtatctgtaattcttgcccaccaaacaagcctgcagaatctgttcagtc

SEQ ID NO: 600125 - DNA, 98 bp, Homo sapiens
atgggggaacatggcctggagctggcttccatgatccccgccctgcgggagctgggcagggaactctaatgatccaggacaaagaagttaccctggag

SEQ ID NO: 600126 - DNA, 89 bp, Homo sapiens
cgcctcgaggtgcgcgccggcccggactcggcgggcatcgccctctacagccgaaggtgctcgggtcttcggggcactgggtcccatcg

SEQ ID NO: 600127 - DNA, 110 bp, Homo sapiens
aaagacttgaaggcgtatacaggaacaatattgatgatgtagtaagggtttggacagaggagccaaaggccaaatttccactttcagcagttttatttcagctgttagcc

SEQ ID NO: 600128 - DNA, 100 bp, Homo sapiens
ctgcaattgagaaacccactggagatgaacagtcttcagggtgtttagaaaaccagctatccgtggtcctgaaccagttatgtgtgttgcatgagaaaac

SEQ ID NO: 600129 - DNA, 75 bp, Homo sapiens
gcggcagggcaagctgtgcgacgtgaccctcaagacaatgcagatcttcgtgaagactctgactggtaagaccat

SEQ ID NO: 600130 - DNA, 100 bp, Homo sapiens
tgagccagttggagttgcggcggcgggaacgattgggctgagcagaggacgacatgttgcttttcgtggagagggatggagagacctgccccgccttcgt

SEQ ID NO: 600131 - DNA, 80 bp, Homo sapiens
actaaagactttgtagccatcaacccgagtgcagtttcgatggaaaatgaaggacagtgatatcgaagcgttggccaggt

SEQ ID NO: 600132 - DNA, 90 bp, Homo sapiens
catccgacgcaaccggcagcagcgctgccgccgcgtcctcagccaccgctccctcttcccacggacatccaggcagaaattgatgcccac

SEQ ID NO: 600133 - DNA, 140 bp, Homo sapiens
cgggaagggcgagactggagcagagccgctgggcgccggagccgaggcgagcgccgcgcgcaccactggatttgcctcaaagggcactgcaaaaattgaacagaggaatcccaaggaagctgcctgaatttgcctgtata

SEQ ID NO: 600134 - DNA, 49 bp, Homo sapiens
gctgaacttaaggaggcagagaaagaggctgaagaggacgcccacctgg

SEQ ID NO: 600135 - DNA, 100 bp, Homo sapiens
aactattccaatgttcagtggcggaacttgcataattagtgaatgccaaaggcagcaactggaggctgtgagctactcctctcgatatgctctgggcctc

SEQ ID NO: 600136 - DNA, 95 bp, Homo sapiens
gcaatttccacctctgtgtgtgtacgagctcatgtcaccaggagactaaagtccatcaaaaacatccagaaaattaccaagtctatgaaaatggt

SEQ ID NO: 600137 - DNA, 83 bp, Homo sapiens
ggtgcgtgcggcggcggttgcgagagagatgagccgcggcgatgagcccggctacctggaccagccctgccttgagaccgtca

SEQ ID NO: 600138 - DNA, 74 bp, Homo sapiens
ctggacgcggcgctgctgaccgacatcgaagaactgcatgaacttgcccccagacaaggtccagctgctgagcc

SEQ ID NO: 600139 - DNA, 48 bp, Homo sapiens
gagctttgtaccaaagacctgggaaaacacgtcagctaactgttcaga

SEQ ID NO: 600140 - DNA, 101 bp, Homo sapiens
cgagaggaacctctatgccgacatcgacgccgcctggcaggccctgcgcaccagcccggggcctgccaagctaatgagaccatcttttgcgagctggggaa

SEQ ID NO: 600141 - DNA, 50 bp, Homo sapiens
ggatgtcaacaattttttggagagttactggaggtgaactgtttgaagac

SEQ ID NO: 600142 - DNA, 136 bp, Homo sapiens
gggatttcaggagagcagtccactgaaggttctttccctttaagatatgtgcaggatcaagttgcggcaccttttcagcgcagccagcagttagattccattcatgtaacacagttggagagagataccgttttag

SEQ ID NO: 600143 - DNA, 100 bp, Homo sapiens
tcagtaacagccaagatgctgcggaatctgctgcaattctgtggtgttcttggtcacacatttatggagtttctgaagggcagtggagattactgccagg

SEQ ID NO: 600144 - DNA, 83 bp, Homo sapiens
cggcgccgaacttgggctcgggaagccggcggaccgcgtcctgcgccggagcagacaatgcagatcttcgtgaagactctgac

SEQ ID NO: 600145 - DNA, 100 bp, Homo sapiens
tttctgcaggaaaagatctctctacttctcctaagggattaaagcctgtggtttccacagaagcaccacctatcatatttgccacaccaactaaactgac

SEQ ID NO: 600146 - DNA, 100 bp, Homo sapiens
aaatcattgaacgtgcatgctttgtcctagagaagaaatctgacccggtcgtctcgtaccgcgagacggtcagtgaagagtcgaacgtgctctgcctctc

SEQ ID NO: 600147 - DNA, 75 bp, Homo sapiens
ctgaaggtgacaatgattccgaagaattttattacggagggcaggctgaaggtgatgtggccgccctcaaccgac

SEQ ID NO: 600148 - DNA, 75 bp, Homo sapiens
tcatgagtgggtcaagtgtattgctaaggtaaatcgggtccttcctcgctccaacatggtctacaatctctatga

SEQ ID NO: 600149 - DNA, 75 bp, Homo sapiens
cctggagattgacgcagagtgggcggcggtggtggctaagtgctatttatggaggtacctatatgctgaataaac

SEQ ID NO: 600150 - DNA, 100 bp, Homo sapiens
gggatctctatcctttcaccaggaagccactgttcatcattgtggattcgtctaatagtgttgcgtataaggtcactgctgaaactcaagagaaagaaga

SEQ ID NO: 600151 - DNA, 82 bp, Homo sapiens
gctacatcagacacagatggcaaatgatgattctgataccgagacgtcaaatgacttgccaaaatttgcagatggaatcaag

SEQ ID NO: 600152 - DNA, 75 bp, Homo sapiens
atttcctgcttctccttttcatgagtgttcctgtggtctctgcacctcctttctattttaggtgatgggcaagtc

SEQ ID NO: 600153 - DNA, 75 bp, Homo sapiens
tcctcaaagaggaacaaagtcatcaagctagtggacatcacggacatccagaagcacaggaagtcctggagaacc

SEQ ID NO: 600154 - DNA, 75 bp, Homo sapiens
tggcggaccgcttctcccgcttcaacgaagaccgagactttcaggagtggaggcagcacagacagtgaggacgaa

SEQ ID NO: 600155 - DNA, 95 bp, Homo sapiens
tttagcaaatacagtaatagatttttggaggatgatatgggagtataatgttgtgaaaatggacccaagtggggtcaaagtgctggaaacagcag

SEQ ID NO: 600156 - DNA, 98 bp, Homo sapiens
catggcagcagcgcgggccagagcgcagcgccgagcgcggcccgggcgccatcgagccttggcggcggacgtgcaggaccttttaccaatttgaggct

SEQ ID NO: 600157 - DNA, 75 bp, Homo sapiens
agcagccaggagtcatgagcgacagcggcgagcagaactacggcgagcgggatctgacggcattagccaaagaac

SEQ ID NO: 600158 - DNA, 75 bp, Homo sapiens
cgctgccagcatcgccgccgccaggtttgaaaaataacaggtcagcctcttcccagatttcttgacatccttgga

SEQ ID NO: 600159 - DNA, 83 bp, Homo sapiens
ccagagttggagccaattaaaccaggcacctgaatggacagaagaggacctcagccaactgacaagaagtatggttaagttcc

SEQ ID NO: 600160 - DNA, 82 bp, Homo sapiens
ggaagaacccatcgggcagctacacatcttgaaagagaagctcttcctgtgaggtcttgtggatgagcagcagaaagttcgg

SEQ ID NO: 600161 - DNA, 87 bp, Homo sapiens
gctcaacgacgaggacctgacgcagggcggcgactggcggcgcgatggacctgaccgggctcctgctggacgaagaaggcaccttct

SEQ ID NO: 600162 - DNA, 106 bp, Homo sapiens
tgatagaatgaagaccacaataaaagagacctctacttagctcagcaattcttaccttgaccgtataatagacgctggccccaaaggaaactactctcgatttatg

SEQ ID NO: 600163 - DNA, 90 bp, Homo sapiens
cttctctagaccttgccaagatggcacaggaccgcagctgaatgcacagctagaaggttggctttcacaagtacagtctacaaaaagacc

SEQ ID NO: 600164 - DNA, 100 bp, Homo sapiens
ttttcaccggcgccgcggtggtcccgtcattgtgtggcactggacggggaatcaagagacccggtttctaatccctgctctgtcactaacaagctgcgtg

SEQ ID NO: 600165 - DNA, 51 bp, Homo sapiens
caatgcatgggaggcacagaaaaggccaggctgtacaggaagcatgactgg

SEQ ID NO: 600166 - DNA, 100 bp, Homo sapiens
tgtccatcccaagccactaagtccagattccagagcctccagtctttctgaaagttctcctcccaaagcaatgaaggatgctggaggtcagcagattggc

SEQ ID NO: 600167 - DNA, 88 bp, Homo sapiens
ggctgagcttcctggagaagaggaagtacgtagagaaatcgacactcttaatgaacgtttagctgctgaaggacaagcgattgatgga

SEQ ID NO: 600168 - DNA, 74 bp, Homo sapiens
gacagccctgtgtgacaccaagataagtaacaagatggctgtgccacccacgtatgccgatcttggcaaatctg

SEQ ID NO: 600169 - DNA, 100 bp, Homo sapiens
tgcccatgggctccataaaaaatgtggtcagtgaacctatcgaaggacatgaagactaccacatgatggtcctgggaactccaacaagggagcaaatcag

SEQ ID NO: 600170 - DNA, 90 bp, Homo sapiens
cagctatagctactacaaagaaaagtggctgatgataagcatgtaactcaaagttgggtgggactatatcagcatacaagatagtaccag

SEQ ID NO: 600171 - DNA, 82 bp, Homo sapiens
tcgccatggccgacgaaaagcccaagtctggccatccctcttcaacgtcaacttgtccaagaaggttcaggaaagcatccag

SEQ ID NO: 600172 - DNA, 100 bp, Homo sapiens
tggacgctcatcagagggaagatctttttcctcaattgttttagaaagagcgttttcgctacgtaaagcacattcgataaaggatatggaaaatactttg

SEQ ID NO: 600173 - DNA, 75 bp, Homo sapiens
aaattgcctgtgacctggctgtgaacgaggatccagttgatagtaaccttcgcatttccggagagttcttttgaa

SEQ ID NO: 600174 - DNA, 98 bp, Homo sapiens
gaattatgcaagcacagatttgcttttacaccaacatatgcaggaagcggcaggaataaggaaaagcagcctcctgactttcctcgcttggtggtttg

SEQ ID NO: 600175 - DNA, 90 bp, Homo sapiens
gaaacaaaattaaggcagttctaactacgtagagaaatcgacactcttaatgaacgtttagctgctgaaggacaagcgattgatggagca

SEQ ID NO: 600176 - DNA, 100 bp, Homo sapiens
aattaaaccacccccaatcattggaagatttggaacctcactgaaaattggtattgttggattgccaaatgttggacctgtcatttactccatcctttat

SEQ ID NO: 600177 - DNA, 100 bp, Homo sapiens
accctttcattttgtttggaagatggaccaaagcgatacagtttattcttcagtccaaggaagcaattcacagtcagctgttagagaagcagaaaatagc

SEQ ID NO: 600178 - DNA, 75 bp, Homo sapiens
gccgagggccatcgccttggaccccgctcacgggtgagggttcagagtatggtgccagtggagaagatgcgctca

SEQ ID NO: 600179 - DNA, 83 bp, Homo sapiens
agaattcagaaggagctggcggacatcactttagaccctccacctaattgcaggtttctgagtcccttcaacatgatcctggg

SEQ ID NO: 600180 - DNA, 80 bp, Homo sapiens
ctcctagtagaaaaagttcttgggacaaacttcatttgcttcccaagctcttccttcagtcccacgactacagtctgtat

SEQ ID NO: 600181 - DNA, 74 bp, Homo sapiens
ccagagtcatttttcactcaattcgatgctgtctaagagtgtaaccagttccagtagcagtagcagtgacagtt

SEQ ID NO: 600182 - DNA, 90 bp, Homo sapiens
tgctcaatggagagaaggaaagtcaatcgtaggaagaacacagtacagctgttgtagcaaacagtgacgaatctcagcttctgacaccag

SEQ ID NO: 600183 - DNA, 75 bp, Homo sapiens
gcggaaggccctcaacatcccggagcagctgccacaatgggacatgtgcaagaggccatgctctaccacaaccag

SEQ ID NO: 600184 - DNA, 83 bp, Homo sapiens
ctctctgaaaagaaggtggcagacccggtttgctgatcgccccagggatcaggaggtgctggagaatctggtaaaagcaccat

SEQ ID NO: 600185 - DNA, 100 bp, Homo sapiens
tcattgtactgaatattacccttgtgcttgccggaaagaaccggaggctgaagcaggccaaagaagaagctcaggctgaaattgaacagtaccgcctgca

SEQ ID NO: 600186 - DNA, 88 bp, Homo sapiens
gaggcctgggccatggaactggcggacgtgggggcggcagccagctcgcaggtaatggcaacgttgcagctaccagccactaatttgg

SEQ ID NO: 600187 - DNA, 75 bp, Homo sapiens
cctggatgggggaccacaagatcctcatcgacaggttttttattggcacctcagtctcaacattttcttttcgga

SEQ ID NO: 600188 - DNA, 100 bp, Homo sapiens
ccagaatgtctttgcaccaagaaacaagaacttcaacatccatggaacgatgctgtattatgtaaaagacatcccagctaccctgaaattcttccatagt

SEQ ID NO: 600189 - DNA, 87 bp, Homo sapiens
gcctgggcgtggccaccgtcaaggccaacatcacgcccttcggcgccgaccaggttaccatgccagcaatgattccttttgagtttc

SEQ ID NO: 600190 - DNA, 75 bp, Homo sapiens
gagtgatgacaaaccctttctatgtactgcgcctggatgtggccagcggcgcgcgagcgggccgggcgggcggcc

SEQ ID NO: 600191 - DNA, 100 bp, Homo sapiens
cttgtccttccatatcttcccaggtgggaatgatggttagatgctgccgaacatacgaagaagtgtgcgaaggtgatgtgatgttggcaaagtcatcaag

SEQ ID NO: 600192 - DNA, 82 bp, Homo sapiens
cactccagtagccaattctggaaccaaacccaagactacggaattgaatgatctggcacgggaccctccagcacagtgttca

SEQ ID NO: 600193 - DNA, 132 bp, Homo sapiens
ctatctttctgatgctccatcccactactctcaagatacgccaatgcgctcaaaggcaaaaagggtattagaaaactactcggatgctccaatgacaccaaaacagattctgcaggtcatagaggcagaagg

SEQ ID NO: 600194 - DNA, 100 bp, Homo sapiens
atctgagctccacaatgataacttctccctctccaccattgccgagggctctcacccaaatgtggttcagtacatcggggagatctgccgctacctgctg

SEQ ID NO: 600195 - DNA, 82 bp, Homo sapiens
cccgggacgacgagtacgactacctattcaaagggttgtgagtcccggcccagcccctccacccccctgcccccccgatgcg

SEQ ID NO: 600196 - DNA, 83 bp, Homo sapiens
ctggcgatcagcaccaagaacccactgcagacaatgcagatcttcgtgaagactctgactggtaagaccatcaccctcgaggt

SEQ ID NO: 600197 - DNA, 50 bp, Homo sapiens
caccgtgacttcccggacgctgggaaatgtttggaaattttagcattcag

SEQ ID NO: 600198 - DNA, 82 bp, Homo sapiens
agcgtggggacagaggctgacatttcttgcgttgaaatcacaaagattagacacctttttagataggtgttcttcagcacca

SEQ ID NO: 600199 - DNA, 75 bp, Homo sapiens
acaccgctgatgaagacaaggactcacagtggctgcaaggtacggttcctggagcagcagaacaagatgctggag

SEQ ID NO: 600200 - DNA, 75 bp, Homo sapiens
tggtgacaaaggggaaaaagggagtcccatcctcgaggcctttgctgccaatgacagcgtcttcgtggagaactg

SEQ ID NO: 600201 - DNA, 96 bp, Homo sapiens
gataaatcagacagaacagttaatcctcaatttaagcctgatctaacccctagaaacagagccccccaagatgaacccagtggtggagccactgtc

SEQ ID NO: 600202 - DNA, 50 bp, Homo sapiens
atgagaagctgtcggagcttcccaagtgtttgtggagaaggtgctgcaga

SEQ ID NO: 600203 - DNA, 100 bp, Homo sapiens
gcaaacgcctggatcagccacaaatgtacccccagtacacttactactatcctcattatctccaaaccaagattcaaccctatgaaaagataaaggccag

SEQ ID NO: 600204 - DNA, 98 bp, Homo sapiens
ggtagccgcagcgccagcaccaggtagagctgaagtttcctgcaccaggcaagcctggaaattatcagtatactgtgtttctgagatcagactcctat

SEQ ID NO: 600205 - DNA, 93 bp, Homo sapiens
tctgggcgttcatgatcctggccagcctgctcatcgcctactgcaacaatgcagatcttcgtgaagactctgactggtaagaccatcaccctc

SEQ ID NO: 600206 - DNA, 102 bp, Homo sapiens
ggcgggtcaggagcagccgcagcgacggcggcgacagcagaaaactgtggatttagttactccactctgccatgtctttccaccactgcctgcacatttgag

SEQ ID NO: 600207 - DNA, 90 bp, Homo sapiens
ggtgtgagaggttttctcgctctagaagtcttcaggacggggtgagttactgatctctctctgctatcagtccaccacaaacactctaac

SEQ ID NO: 600208 - DNA, 83 bp, Homo sapiens
gaggacacgaccttcctgcccttcacgctccaggagctaggtcgcaatggaagaagagatcgccgcgctggtcattgacaatg

SEQ ID NO: 600209 - DNA, 75 bp, Homo sapiens
cctcctgtaacccagcctgtttcacttcttgaatctccgccacctccctactctcggctgtctcctcgcgacgag

SEQ ID NO: 600210 - DNA, 101 bp, Homo sapiens
ccgcgggcgcccgaggggccgagcgagggaggagctttatctttatatactgcccttaccacacagcagaaactggcaggtgtcactgcactcagttgctg

SEQ ID NO: 600211 - DNA, 82 bp, Homo sapiens
caagttcaagcagctgcttgccggccccaacacggaccttgactacatgaggaaataattgacttttataacttcatgtccc

SEQ ID NO: 600212 - DNA, 83 bp, Homo sapiens
caacaagtcaactacattgcttcacaaccagatggaaagcaattgcaggtttatgcatgtatgatggttttcttcttgagcaa

SEQ ID NO: 600213 - DNA, 90 bp, Homo sapiens
gccatgttcagcgggcgcatggaagtgctcaccgacagtgaagcacttgcacctcctgcgccgccgccccccatccaaggatatgccttc

SEQ ID NO: 600214 - DNA, 100 bp, Homo sapiens
actacagcgccacggtggatcagcgcctacccgagtgtgcgaagctagccaagcctccatttgatggtgaagatgaagacgagctatttcagtctatcat

SEQ ID NO: 600215 - DNA, 100 bp, Homo sapiens
ggaacctctacaacgaaggtgaagccacggaagataaggctctgtgtgctccgggatggagcaggtgtgcagagggtgagaacccagctctgggaccaag

SEQ ID NO: 600216 - DNA, 98 bp, Homo sapiens
gcacacaagagagagagacgcagcaatggtacaacagctccatgaacgtgatctgcacctggttgacggaccggatggacttacagcttcatatttat

SEQ ID NO: 600217 - DNA, 76 bp, Homo sapiens
tgacaatgacaccgtgcctagcgtcagttccatcaacaggcggctgagccagaggccaactgcagaggaactggaa

SEQ ID NO: 600218 - DNA, 50 bp, Homo sapiens
tctcctggtagacctcggtccaaacagatatgaggccccaggattcctgg

SEQ ID NO: 600219 - DNA, 100 bp, Homo sapiens
caccatttggaaggaacagtacagagttgtacaggaggaaaaccagatggcaggatggtggctggcaaagtgttgatggcaaagcaagaaattgttgaat

SEQ ID NO: 600220 - DNA, 100 bp, Homo sapiens
catcttcccagctttggttggaagacctattatcagatcaaccaccaaagtgggaaacattgaaatcaagactccagggattagagctcgatctgcaagg

SEQ ID NO: 600221 - DNA, 75 bp, Homo sapiens
acctggctgccatagatgaggccctggcagccttgcacgtgacggttgtacatcctggagacctgaagaattctg

SEQ ID NO: 600222 - DNA, 111 bp, Homo sapiens
tgaggagcggcgggcggcggcgcgcggacccaggcgcggatggcgaggccagcaggtagtgaagcgcgcagtggcgagccagccagactctgtggatgcagccgagagggc

SEQ ID NO: 600223 - DNA, 101 bp, Homo sapiens
cttcctgtcttctctcgaaccctggggtgtccgcaatgttgccagtgtctgtctgcagattggctacccaactgttgcatcagtaccccattctatcatca

SEQ ID NO: 600224 - DNA, 75 bp, Homo sapiens
agcagagcggccggaagcgcggagggagccgcgggatggaccgcagggccccggagctgcagttctacaccagcg

SEQ ID NO: 600225 - DNA, 74 bp, Homo sapiens
tttatggtgtgctttaagagccctgcagaaaaatgagtctgccaaaaaagaggtggttgctgaagtggtaaaag

SEQ ID NO: 600226 - DNA, 83 bp, Homo sapiens
ccccaacccccccggacaggacccccttgagcttgtccctcagctgccaccatgagcgagcgacaccacaggcaagctgggct

SEQ ID NO: 600227 - DNA, 82 bp, Homo sapiens
tcacagctgctgcaatcgcttgggagagctcctgggccacccctcctttcaggtcaaggccctcaagagtattgagtatctg

SEQ ID NO: 600228 - DNA, 98 bp, Homo sapiens
gggacgttggggagggggctgtgccgggcggagagaactcagcgaggattctgagtgaacttcgaccacttccagatccttcgggccattgggaaggg

SEQ ID NO: 600229 - DNA, 74 bp, Homo sapiens
atggatctggcctcaagactggtggccaataacggaaaactgcctgacaacaaagtcattgctagtgaactagg

SEQ ID NO: 600230 - DNA, 90 bp, Homo sapiens
cgatgtgcggcgcccgctgtataaggttatggaggttttgatgactatggtggctataataattacggctatgggaatgatggctttgat

SEQ ID NO: 600231 - DNA, 75 bp, Homo sapiens
cctggactgtgaagagtgaggagaccatagctgcacagccagggcctgccttaagtgtgaaagtaatgactgatg

SEQ ID NO: 600232 - DNA, 100 bp, Homo sapiens
aaggaaagtccctggagtcacttgatacctctttgtttgccaaaaatcccaagtcaaagggcaccaagcggcaatttgaatcaacccatagaagtgacag

SEQ ID NO: 600233 - DNA, 82 bp, Homo sapiens
ccccacgcctagaagacagcggaactaagaaaagaagaggcctgtggacagaacaatcatgagatcctgaaggagctagacg

SEQ ID NO: 600234 - DNA, 75 bp, Homo sapiens
agctctcggggtcagaaggcgaaggctcttgatggaaatgtgtatgatcatctcaaggattatttaatagccttc

SEQ ID NO: 600235 - DNA, 75 bp, Homo sapiens
gtcgcagatcctgagacccggacagtggcagtgaaacaggccctggccaacgtcaacattgggagcctcatctgc

SEQ ID NO: 600236 - DNA, 76 bp, Homo sapiens
cacgtgcatgaaccaaacccacttcgttcaagacaggtgtttaagcttatcaggaactgttgccgttattacatca

SEQ ID NO: 600237 - DNA, 83 bp, Homo sapiens
atcctggagagcctgcaggacggcgcggcagagtccccgtacgcctacagtaacggtgtcgtgaaaactacccctaaaagcca

SEQ ID NO: 600238 - DNA, 82 bp, Homo sapiens
ctagaatcaaggatttcagcaacaatgcctctgttcaaactcccaggaattgaatgatctggcacgggaccctccagcacag

SEQ ID NO: 600239 - DNA, 100 bp, Homo sapiens
tcttgaacagacagaaggatgtaaaggatggaaaatacagccaggcaattactaaagatatgtttgaagaagcactgcgtgccctggcagatgatgattt

SEQ ID NO: 600240 - DNA, 83 bp, Homo sapiens
gggtcagaggcttcctaacgcagactcgagtgcgaagcgcgcagtcgccggggttcgggggtgattaaagctggctttgcagg

SEQ ID NO: 600241 - DNA, 83 bp, Homo sapiens
tgctcacttttcttttgttcctgcccgtagggtgcagtgtctggctcggtgcaggccactgaccggctgatgaaggagctcag

SEQ ID NO: 600242 - DNA, 90 bp, Homo sapiens
cgggaggaacatgacatcgcggagccaacatggcagcagccttcggaggcttcctctacttcttcacctacatcccctacttcttcgtgg

SEQ ID NO: 600243 - DNA, 75 bp, Homo sapiens
cggaggccgcctggggtagcggcggcgggagtcctggcgctctgcaggtttggtgcacctcgatttggaggaagt

SEQ ID NO: 600244 - DNA, 100 bp, Homo sapiens
tggccgtcaggcagaagaagaatgtgcccatcgaggaagcccccttcctaaaaaggttctgctccagacgagcccttaccacgttgactcactcctgcag

SEQ ID NO: 600245 - DNA, 100 bp, Homo sapiens
tggtgggcactcagcaccctctgcttaccacagccagatgttccatttaagcagacctcttccatagctgtagctggagcggtaattggagctgttcttg

SEQ ID NO: 600246 - DNA, 74 bp, Homo sapiens
cggcacacgcgcagccccggcctctcggcctctgccggagaaacaggttttcctttggaatatggataaataca

SEQ ID NO: 600247 - DNA, 74 bp, Homo sapiens
ctcccctcggaactcgggcatcatggcctcagctcctggtaacgtttttatccatggatgacttgcttgggtaa

SEQ ID NO: 600248 - DNA, 98 bp, Homo sapiens
acacacacgccctcacgcccggcgagcccgcgagagaagcctgtgtctcccaaatcaggaacactgaagagccctcccaaaggatttgatacgactgc

SEQ ID NO: 600249 - DNA, 101 bp, Homo sapiens
ttctgttgagcctctctctgccacaatggtagttgaggtatagccaggctggagaaaagaagctgccaccatggttgcactttcactgaagatcagcattg

SEQ ID NO: 600250 - DNA, 100 bp, Homo sapiens
ttcccagccttcagaaattgccggtctgggagttgggggcaaggagaagatcctggttacaagcctgatgaagggaaacgaggggatgcctgtgaaggtg

SEQ ID NO: 600251 - DNA, 101 bp, Homo sapiens
ggggcatgtgcagaggggtgggacgccatcagcctttgacagaattctgggccaagaccagcttcaagtctccatggtaccagaaaacaacaacctcacag

SEQ ID NO: 600252 - DNA, 100 bp, Homo sapiens
atgtttcaatattggaagcgctttgatttacagcagctgcaggctcacagaacatttcctgcctgttgctcacactctgttgtccacagcatacccgcac

SEQ ID NO: 600253 - DNA, 100 bp, Homo sapiens
ctcggaagagcgctcccaggagaaacaattacagaatgtctgaaggggacagtgtgggagaatccgtccatgggaaaccttcggtggtgtacagattttt

SEQ ID NO: 600254 - DNA, 99 bp, Homo sapiens
cgggtcctggaggctgctaacctcttccagggaaatcctcattgacgattcaatttgttgaaggccaatttgtggactcctacgatccaaccatagaaa

SEQ ID NO: 600255 - DNA, 100 bp, Homo sapiens
ggccagccaccagttcaggagcacttgggagtgatctagaagaccacgtggccttaaaccaactgctgcaactctgtgtgcaggatgattctgtgggccc

SEQ ID NO: 600256 - DNA, 75 bp, Homo sapiens
agcgttgacttcagtcaactgagcaggagatccaagtcaggtccagtggctcctggacaactatgagacggctga

SEQ ID NO: 600257 - DNA, 101 bp, Homo sapiens
agtagccgcagcaccgcagccttgggcctcgcgccggctatggccgtgccctggggctgagccctcagcacaagctccgggtggataaggcagctgctgca

SEQ ID NO: 600258 - DNA, 75 bp, Homo sapiens
aagagatggcctggtggaaagcctggggcaaactctttgattctacaatagctgatgagggaacatggactttgg

SEQ ID NO: 600259 - DNA, 90 bp, Homo sapiens
tgcagaaatgaccatttatatcaagcagctgggcagaagaagatgaaactgttggcacaagtgacgcttcggtagaggatcctgttgttg

SEQ ID NO: 600260 - DNA, 100 bp, Homo sapiens
atttaatgatgaaactaatgtgagtcaggatttgcatgaagatgtcgaagaagctggtgcactgcagaaaaatcatgctcttgtgacatctgcaaactcc

SEQ ID NO: 600261 - DNA, 82 bp, Homo sapiens
gcaaggtcggcagagcaaggggcttacgcagaaggacctggccacggacgtctgctcactggagatgacacgtgcgtggggt

SEQ ID NO: 600262 - DNA, 101 bp, Homo sapiens
gaaccaactggtcccgaaagagaccagagtgaactccgagcaggaacacttcctcattgtcccttttgggcttctttacagtgaagtgactgcatccagtt

SEQ ID NO: 600263 - DNA, 75 bp, Homo sapiens
cttgaagatccagaaaaactaggatccctttttgttaaacacgcatggattccgtgaaggaacaacacctaaacc

SEQ ID NO: 600264 - DNA, 100 bp, Homo sapiens
tgtattcagattcggaataggaaaggggatcacgctaatgtcaatgccatggtgaacttcaatgagcccctgtccatgctccagcggctgacagaggacc

SEQ ID NO: 600265 - DNA, 101 bp, Homo sapiens
ggcagctgctggcgagatcatctacaacaagtgccccccgaatgcctcaggtgcacaatgcccaccttcacagcaggaaggactcaaattggaacacagta

SEQ ID NO: 600266 - DNA, 101 bp, Homo sapiens
gcagcttctggatgaaatacatcgtgagaagagaggataccagaaggccctattgatcaggggccagctataggaagagtacgcgttttagaagagcagct

SEQ ID NO: 600267 - DNA, 75 bp, Homo sapiens
aggacacctacagccccgacgaacatttctgggtgacactcaacaggattcccgaaagtgactgagaccgaagat

SEQ ID NO: 600268 - DNA, 98 bp, Homo sapiens
gccagccccagcagcaacagcagcacaggtactactgagcgagtgtgcttgatccagggaacggttgaagcactgaatgcagttcatggattcattgc

SEQ ID NO: 600269 - DNA, 90 bp, Homo sapiens
cgtgcttcgggatggaaacctatggttatctgcagagggagtcatgctttcaaggacctcatagaaacaaggctggccctgcggccccgc

SEQ ID NO: 600270 - DNA, 90 bp, Homo sapiens
cggggacacttacaaattgctgcttgtccaaatcaggatccactgcaaggaacaacaggaaagtacacaggaagatgctatgaaatttcc

SEQ ID NO: 600271 - DNA, 98 bp, Homo sapiens
ctcacattcaagctgataggctgcgctaccggaatgtcatccagcgagtgattagaggttccctataaaagagaagaggaagccttagaggagaggag

SEQ ID NO: 600272 - DNA, 71 bp, Homo sapiens
ctgtgtgcagctaatggtcgtcgtcggcatcctcctggcctacctggcagccgattcgaagacagtctctt

SEQ ID NO: 600273 - DNA, 100 bp, Homo sapiens
ctggacggcggcagcggcggcgcgaggagccggcgggcagcggcgcgatggggcccctccgcgagagcaaggtacactggctttctcaaaggactattgc

SEQ ID NO: 600274 - DNA, 90 bp, Homo sapiens
cgagttgcagcttacaacaagaaaaagaagcgtatggactactatgactctgaacagactttccgtgacatttctgaagatctgaaatct

SEQ ID NO: 600275 - DNA, 83 bp, Homo sapiens
cttagcatcggaactgcaatgttaggagcagggtctagacaaactgaaaggcaataaatcctatgtgaacatggacctctctc

SEQ ID NO: 600276 - DNA, 50 bp, Homo sapiens
tacttcacaggaattgccattttggctatgattttggctatatggtaaag

SEQ ID NO: 600277 - DNA, 100 bp, Homo sapiens
ctcacctttgtctccccgatctacggggctgacatcagcggctctttgtatgatgacgaccctgctgggatctttgagcttgtggaggtggtcggcaatg

SEQ ID NO: 600278 - DNA, 73 bp, Homo sapiens
cggaaaggagctctggcacaaggcaaagcccctcgcccagattctttccaccatggccagacgcccccggaac

SEQ ID NO: 600279 - DNA, 74 bp, Homo sapiens
atgatgatgatgacgacaatgatcctgagaatagagaccttgtacacagacagacggctagtgcagtggtacag

SEQ ID NO: 600280 - DNA, 140 bp, Homo sapiens
cggctgtgcagtgtcgtgcatggcgctgctcaccctgctcgccatctatgccgccttttggaggctgccgcgggcggacacgccagaggaggaggccggggaatggccgcggtgtggcagcaagtcttagcagtggacgc

SEQ ID NO: 600281 - DNA, 101 bp, Homo sapiens
cactccctgccgaagcccagcccctgatgtcccagcagcccgtggaccgggagcccgtggaccgggagccggtggtgtgccaccccgacctggaggagcgg

SEQ ID NO: 600282 - DNA, 83 bp, Homo sapiens
cgacatcatcgtcttcgcctatgcctgccaggctgctgaggccagctccaccagggcaagggtttttccctgcctgccactgt

SEQ ID NO: 600283 - DNA, 83 bp, Homo sapiens
gaacaatgattctgaaaagaacggagcttgaagcaaagctgcaggttttaaaggtgcgtcagcaatttcctgctcctcttggt

SEQ ID NO: 600284 - DNA, 117 bp, Homo sapiens
gcaaagctgggagagactggaccagaccatgggcctgagcatcagatctgccgacaccccaggccatcgagccccaggccatcgtgcagcaggtcccagcccccagtcgaatgcaga

SEQ ID NO: 600285 - DNA, 100 bp, Homo sapiens
gccagaaggaagcaaatgtaccaagtgttcctgcactgtaagcacagacacctccagcttgcgaagggcagatccgaaaggccggagtgcgctgttggct

SEQ ID NO: 600286 - DNA, 50 bp, Homo sapiens
tgttctcgggctgtttggcgggtacagcagttgcaaggagtttacagttt

SEQ ID NO: 600287 - DNA, 74 bp, Homo sapiens
ccgcccgccggcagcgccgctccccagggagggagtccgcagcctgaggtggcggctttgaaatacatcccatc

SEQ ID NO: 600288 - DNA, 82 bp, Homo sapiens
ccgagccggagccgagtctgcgcctgggggccacggcgtatgcctccgaggacggggtcctgaccgaggccatgatggacac

SEQ ID NO: 600289 - DNA, 101 bp, Homo sapiens
cgtcttattggtaaagaaggaagaaatcttaaaaaaattgagcaagacacagacactaaaatcacgatatctcccttcaaacactccagagtgaaaattcg

SEQ ID NO: 600290 - DNA, 75 bp, Homo sapiens
actgatgggaagtgagacttgttaaacttgaaaggtgaatctggattgggaaagtcgacattaatcaactcatta

SEQ ID NO: 600291 - DNA, 90 bp, Homo sapiens
tttgagatgagttacatcttggagagagcagagctgacatctgataaagacatgtaccttgacaacagctccattgaagaagcttcagga

SEQ ID NO: 600292 - DNA, 89 bp, Homo sapiens
ccctccaagagcactagtgtctagaaggcactaagggttatcaatactctggctgaccatcatcatcgtgggactgactttggtggaag

SEQ ID NO: 600293 - DNA, 98 bp, Homo sapiens
gatgtggagatggcctacgtccaggacagcttcctgaccaatgacatccttcacgagatggatgatgatgacgacatgggagaggatgaagatgagga

SEQ ID NO: 600294 - DNA, 83 bp, Homo sapiens
tgaaaaacgttttgaatcacatgacgcattgtcaggctgggaaagcctgccaagaaggtgctaatcggaagaagaacttgccc

SEQ ID NO: 600295 - DNA, 100 bp, Homo sapiens
tgggtgcctgttaccgtcgagggttactggcagatcaccgtggacagccagcagggctccagcgggggagcggttgtctttgggggtgtggatagcagcc

SEQ ID NO: 600296 - DNA, 93 bp, Homo sapiens
gttctgaagagtgttactgtgaacattcatgcacaaatttttatgtggaggtactccaaagattcaggtttactcacgtcatccagcagagaa

SEQ ID NO: 600297 - DNA, 90 bp, Homo sapiens
cctatacctgagtattgggttgctgtcagcttattcccagcacctggacaatgagatcagtcacagcagctacctgggcaccgactaccc

SEQ ID NO: 600298 - DNA, 97 bp, Homo sapiens
agcggtcacctacccccagcaccacctccagcccctgcgcctcggcaccatactggacataccttttatgtgcactgggactttttatttaccagtc

SEQ ID NO: 600299 - DNA, 75 bp, Homo sapiens
ctactaatggacagttagtcacccacctacatgttgaggctatggagttactagtagagaaagcaatcagcagtg

SEQ ID NO: 600300 - DNA, 100 bp, Homo sapiens
aacagcaggtcaccatcctggccacgccccttcccgaggagatgtccgcagcggctacctctatgtgaccctcatctacaacgcctccgtcagcctcgcc

SEQ ID NO: 600301 - DNA, 96 bp, Homo sapiens
ctgcaaaagtggaagcgaagccgaaaaaggcagcagcgaaggtgaagatctttaagcaagaagttaaagagtgaacatggtggaaaaaatataatt

SEQ ID NO: 600302 - DNA, 95 bp, Homo sapiens
aggtcgggaaccatccttggaaatcctgccgcggacttctctgcacagcatccctgtgacagatgatccctctgataagccaccttgccgaggct

SEQ ID NO: 600303 - DNA, 101 bp, Homo sapiens
atctttgctggcaagcagctggaagatggacgtactttgtctgactacaatattcaaaaggccacaaggggcaccagtgcctgagccctccactcccctcc

SEQ ID NO: 600304 - DNA, 75 bp, Homo sapiens
gagtgaacttggaatcttggacctcatccaggaagaaggagagacgaccatcttgcaactagaaaaagatttgcg

SEQ ID NO: 600305 - DNA, 75 bp, Homo sapiens
ctttggattttatgtgctacagtctgcggaacggagcagtatttcaatgtggagtggacagaggactgcagaaaa

SEQ ID NO: 600306 - DNA, 100 bp, Homo sapiens
ctgtgagcccgcggagtatacaccatgagcaaagctcaccctcccgagttgaaaaacggtcttgcgagtggctggttccctgcagaagagcacagaagtg

SEQ ID NO: 600307 - DNA, 80 bp, Homo sapiens
ctgagcatttcctcctgacggctgtacttgagcagtcacctggcacagtacctggagtagaacagaaaaattattatgtc

SEQ ID NO: 600308 - DNA, 133 bp, Homo sapiens
caaacgccaggtgcttattaggccgtgctccaaagtcatcgtccggtttctcactgtgatgatgaagcatggttcagtgtctgtggtcagatatcaatcattcgcttccccgacaccgtcaagcagatgaata

SEQ ID NO: 600309 - DNA, 83 bp, Homo sapiens
gtcatttatgcattatggctaacttcagctgatattttgggggaagaaaaagcggacaaggcaaaatctcagcaagttcggac

SEQ ID NO: 600310 - DNA, 90 bp, Homo sapiens
gggaagtgagaagcccaactaaagccccacatttgcagctcattgaaggaaagtgcttatcagattgttgtggaagaactgcacccacac

SEQ ID NO: 600311 - DNA, 51 bp, Homo sapiens
ctgctggccatgctctacgggacagaacgccagccaggcccctctgtggcc

SEQ ID NO: 600312 - DNA, 83 bp, Homo sapiens
ggaagtcccacagaagctacagctgccaggattcagatcagcccttcccagggtctgcaggtgtcacatgatcacagttcagc

SEQ ID NO: 600313 - DNA, 51 bp, Homo sapiens
tacttggatagacttatacctcagaaatcttctctacatataccctcagag

SEQ ID NO: 600314 - DNA, 82 bp, Homo sapiens
tgcagccgcagctggactggcaggcccgagggcgagatctcgaggaatttcgaagctacctggagaagcgttttgactttga

SEQ ID NO: 600315 - DNA, 100 bp, Homo sapiens
tggaagacaacaaaaacaactgcattgtgtacagcaaaggttgctattggcagaacagacattgaagacttagacctttatgccacatctcgggagaggc

SEQ ID NO: 600316 - DNA, 100 bp, Homo sapiens
ctggtacttcagaggtatgaacttgccgaggcttttaacaagaccatatctacaaaagaccaggttgattgcactgccaacactaacacctgtaataaat

SEQ ID NO: 600317 - DNA, 99 bp, Homo sapiens
ggaggatgacggagctgcagtcggcactgctactgcgaagacagctggcaggtcatttaggaaatcgtaaatcatgtgaagatgggactcttggtattt

SEQ ID NO: 600318 - DNA, 129 bp, Homo sapiens
gtggacggcgtgttccagaggcgcggggcgccgccgctgcagctgccgcgcgtgtgacctacggctccttcgactacacctcgctgctgtacctctccaactacctggaggacttcggcggagggcggt

SEQ ID NO: 600319 - DNA, 75 bp, Homo sapiens
tgacggcgaggaggagtgtcctgatggctccgatgagtccgaggccacttgcaaatccacacaggcgacagaccc

SEQ ID NO: 600320 - DNA, 87 bp, Homo sapiens
caagggaccaaggtggaaatcaaacatgtatcggcaagcagtgtaaacggaggacttggggaaaaaggaccacatagtccatcgaag

SEQ ID NO: 600321 - DNA, 100 bp, Homo sapiens
tacatttggctcacgctagcttaaaaaaggaatttatggaccttactgcagaacgtcccaattcttcaggccaagcaattctgtggtgttcttggtcaca

SEQ ID NO: 600322 - DNA, 96 bp, Homo sapiens
tggtggcctagatgcccgatacaacagcacttatgactatggcaggcagttgctacaggccacagttgtgttatgccaatctttgcgctgcacttc

SEQ ID NO: 600323 - DNA, 75 bp, Homo sapiens
tcctcatggtcatgggggccaccgttgttatgtacctgaggagatgttaaagtaacccatcttgcaggacgacat

SEQ ID NO: 600324 - DNA, 113 bp, Homo sapiens
ttgggctcagagcaaggatgcgtgaaattgtccatattcagattggccagtgtggcaaccagatcggagccaagcccacaatgcagttgttacatcagccatctttgcaccaa

SEQ ID NO: 600325 - DNA, 90 bp, Homo sapiens
ggaatcccgcagtggccggggggcttgaggccgctgctttgtctcttcgtccagagccttatgagaccagtatgatgtctgtgccatttg

SEQ ID NO: 600326 - DNA, 110 bp, Homo sapiens
ccactaccaagaagggatctatcacctctgtacagggtgtccgcaatgttgccagtgtctgtctgcagattggctacccaactgttgcatcagtaccccattctatcatc

SEQ ID NO: 600327 - DNA, 101 bp, Homo sapiens
tgggacgagaccttcatcctcgtgtcaggaggggagctgtttgagcgcatcattgacgaggactttgagctgacggagcgtgagtgcatcaagtacatgcg

SEQ ID NO: 600328 - DNA, 75 bp, Homo sapiens
ctcggctatggagtccccatgttgtaccatgagctcccgacactctgccagcccagtggttttcaccagtgcccg

SEQ ID NO: 600329 - DNA, 100 bp, Homo sapiens
ttgatggagaaagaaaccgcaaaaccaaaaccagatcctttcaaaggcccaggaagtacacgagaagctccgaggatggctgaagtccaacgtctctgat

SEQ ID NO: 600330 - DNA, 99 bp, Homo sapiens
cacaaatagatgtaggcagaatacctttacagaggttaaaattgattgtcagaagcttcagttctggtaaaagagaaggtggggactttgtttgctgtg

SEQ ID NO: 600331 - DNA, 100 bp, Homo sapiens
atacaggaacaatattgatgatgtagtaagtattctaccttgtaaatactgttatttgtatatactgtaaatgatgacatcggtgggcactaaccgagcc

SEQ ID NO: 600332 - DNA, 75 bp, Homo sapiens
aagcacaagcacaaacagagccgtacccaggatcctgtccccccagataccccgtggtgctcccccatcaaggtg

SEQ ID NO: 600333 - DNA, 75 bp, Homo sapiens
cagattcgcagtggtcgcttcttctccttggtcacctggattcttcaggacttcaggaagtgcatttagctggga

SEQ ID NO: 600334 - DNA, 100 bp, Homo sapiens
cacaaaacttcatcttctgtaggatctgatgaaaattctcttcattctcttggactgaacttaaatactgatagtgcacagccagagaacaacacatcac

SEQ ID NO: 600335 - DNA, 74 bp, Homo sapiens
gaggccagcggccgggatagccccggcggagcccgcagcttccctgccggaatcaaccctgcctaccggactga

SEQ ID NO: 600336 - DNA, 83 bp, Homo sapiens
gcccacagtgctccgcccccatcctgcagcgccgacttcctgcacctgggctttatcctgtggataaacgcagagtgaacgag

SEQ ID NO: 600337 - DNA, 75 bp, Homo sapiens
tgcggtgcctgagctgagtgaggccgaggccgggaggccgtgcccggaggtggaaaaccatgaattccttgtaaa

SEQ ID NO: 600338 - DNA, 95 bp, Homo sapiens
atactccaagagcaaaagtattgaaaatagaagaagtcagtgatacttcatccctgcaaattggcagagggggtcgatttgggaggaaaggtgtg

SEQ ID NO: 600339 - DNA, 75 bp, Homo sapiens
tccggctcaagtgtgtcaagcaagaagtgaaatttgtctgtcaaactccagcaattgctgacattgtaatcctgg

SEQ ID NO: 600340 - DNA, 76 bp, Homo sapiens
ggaccacaaaccgctgccagaaaagagtacttgattcttcagaaaacctccaaagtagatgtggactcaagtggaa

SEQ ID NO: 600341 - DNA, 50 bp, Homo sapiens
cacctgtagacgttcgccaggtaaagtccttcagtgaatctacagaccta

SEQ ID NO: 600342 - DNA, 100 bp, Homo sapiens
ggcttgctgccccccgacaccgctatcctgtactttgatggaaacctggagaagctctttgctgagtgtcatgtaattaatccaagtaaaaagtctcgaa

SEQ ID NO: 600343 - DNA, 100 bp, Homo sapiens
ccggttgctgtttcttctcaggctcagggaccggccgcggccccgtaggggtcaaaatgcagatcttcgtgaaaacccttaccggcaagaccatcaccct

SEQ ID NO: 600344 - DNA, 100 bp, Homo sapiens
cattcgagaagcaatgcatggggttttcctttaccatgcaatcaagtgtgccgggctcctgatgaccctcaagggacttcccagcacctacaacaaagac

SEQ ID NO: 600345 - DNA, 75 bp, Homo sapiens
ggcgaggctagggaggacctcacttccccggggtgtaataatgttaactgagggccctccagaatttccacagca

SEQ ID NO: 600346 - DNA, 83 bp, Homo sapiens
cagagactgcggcgagtgtgaagtgggctgggtgctggacgagggcgcctgtgtgggtcctaggcctacttacaagcctccag

SEQ ID NO: 600347 - DNA, 100 bp, Homo sapiens
gacgccgccgccaacaagctcttccactacatcccgggcacgccactgtcaacaacagctcagacaccgagagcatcccctctcctcacactgaggccgc

SEQ ID NO: 600348 - DNA, 75 bp, Homo sapiens
aactactacaaactgcgcacagaaggagatggacacagcattgttggttttgccatgtactattttacctatgac

SEQ ID NO: 600349 - DNA, 82 bp, Homo sapiens
gctggccaagcacgccgtgtccgagggcaccaaggcggtcaccaagtacaccagctcgaaggtcctgcagttctgagcttgg

SEQ ID NO: 600350 - DNA, 90 bp, Homo sapiens
gagtgcccaaggtttcaaagcattatatgaaggtagaatggaagaatctcacttcaattctaacccgtacttctggccttctatccccac

SEQ ID NO: 600351 - DNA, 83 bp, Homo sapiens
acctgccttctcatcagctacaccaccaacgcctttcccggagagtacatccccaccgtgttggtcctgcactttggtggtgg

SEQ ID NO: 600352 - DNA, 75 bp, Homo sapiens
atgagcagagagctgtgaaatatctttggcttgcagccaacaatgggggcatgagccagaaggagagctctaagt

SEQ ID NO: 600353 - DNA, 51 bp, Homo sapiens
atcctctgtacgcccgttcactggagagtcgcggttgctgatcgtggtgct

SEQ ID NO: 600354 - DNA, 75 bp, Homo sapiens
gcgtttcctatatactggctctcagattggaagtcaggccgtcaccgatgggttgtatatactactgaaatgaat

SEQ ID NO: 600355 - DNA, 100 bp, Homo sapiens
ccatcaccggcacacattgtcattaacgtcttcaaggacccagttgctgatcccaacaaaaggtccaaaaagggccgattatctttacataggacgccag

SEQ ID NO: 600356 - DNA, 100 bp, Homo sapiens
gaccagaaccttagtcccgggaaagaatgaccgaagaagcatgccgaacacggagtcagaaacgagcgcttgaacgggacccaacagaggacgatgtgga

SEQ ID NO: 600357 - DNA, 50 bp, Homo sapiens
acgcctgccccagggaaccgcacaggttgaaatcacaaagattagacacc

SEQ ID NO: 600358 - DNA, 98 bp, Homo sapiens
ccgacctgacgagcccctacctccccaacggatcgctctcgcccaccgcccgaaccaaaaggtcacggatcgcctacagtgacgaagtacggaatgag

SEQ ID NO: 600359 - DNA, 80 bp, Homo sapiens
ggacaccgcacagccgggaaatgaacccacaatacattatatgcaccagaaatgctagccaaaatggcagagcctttcac

SEQ ID NO: 600360 - DNA, 73 bp, Homo sapiens
tgtctggagtttgatgaggagcgagcccaggcatatgatgctgagctggctgctccagaatgaaccacagctc

SEQ ID NO: 600361 - DNA, 101 bp, Homo sapiens
cattagtgctctggtctctgacccttgcagtcttcagatgttagtaggcaggaagaggcggagggagagctcagtgaaggagaacactggtatggaaactc

SEQ ID NO: 600362 - DNA, 100 bp, Homo sapiens
ggagagtctgggccgcgcgggagccgcagggcgccctagccttcgcagaaacgatggcggaggaagaaggagctgatgaggatgtagagagtccagagct

SEQ ID NO: 600363 - DNA, 100 bp, Homo sapiens
agaaggacagcaacaccacctggggggagccaaacagatccaggtccagagagcatcgcagacatcgatctcgctccatgtcacgtgaacgcaagaggag

SEQ ID NO: 600364 - DNA, 49 bp, Homo sapiens
ctttggaaatgtgctcacactgtcaatgagtggtcattgaagataagaa

SEQ ID NO: 600365 - DNA, 89 bp, Homo sapiens
ttcattgtttgtcaccacaaaaaggacaggccagggagctggagagcagagaggcagagctaagacgccgtgacaccttctacaaggag

SEQ ID NO: 600366 - DNA, 90 bp, Homo sapiens
agatggcaaccccaagttgaccctgggtctgatctggaccattattttgcatttccagagttgtctctgtgggaagtttgtcctccgtcc

SEQ ID NO: 600367 - DNA, 100 bp, Homo sapiens
gcgcccgtggccgccgtgcaggcggccgtcagcaacctcgtccggatctttaatctcatgaagtacgacagctacagccgcttcttaaagtctgacttgt

SEQ ID NO: 600368 - DNA, 100 bp, Homo sapiens
cctgcccgagccggagcgccagctcagcgtgcccatcccggggggcagcaacggcgacatccagcaagatcgtcagtatttaaacagatcacatcatgcg

SEQ ID NO: 600369 - DNA, 100 bp, Homo sapiens
ccaagacttgactgtaactggaacagaacctggtcagatgattaaacttcaggaagtatttaaggcattttatcttggaaagcacagtggtcgaaaactt

SEQ ID NO: 600370 - DNA, 90 bp, Homo sapiens
ggtcaatcatgacttcacccctctggagaagcctgccctggactgctcacaggtctccccgccccgtcctgccacatctcctgagaacaa

SEQ ID NO: 600371 - DNA, 97 bp, Homo sapiens
gaaaaatgctgcatctccctgaatggccggagcagccgcctggtggtccagctgcattgcaagttcgtgtccaactgaaaccaaagcaacatttggg

SEQ ID NO: 600372 - DNA, 75 bp, Homo sapiens
tttccttggagagtcataacatatcactgactggggctgataacatccggaaatactggagccgctactaccaag

SEQ ID NO: 600373 - DNA, 100 bp, Homo sapiens
gtccctcgcctcccggccgagctgacgatgttcctcctgctgatcaagagaagctttttatccagaagttacgtcagtgttgcgtcctctttgactttgt

SEQ ID NO: 600374 - DNA, 100 bp, Homo sapiens
gcgcgcacagagctctcagcgccgctcccagccacagcctcccgcgcctcgctcagctccaacatgttaaaagaagatggatgcacagtgttcagccaag

SEQ ID NO: 600375 - DNA, 75 bp, Homo sapiens
ctcagttctgcgctgctcccgttccccctccccagagcaaggacactggggttgggaaatcaagcatcgtgtgtc

SEQ ID NO: 600376 - DNA, 50 bp, Homo sapiens
tggcagcagcgtgtcggagcgtgaaggtacatgtgaagattttttggcag

SEQ ID NO: 600377 - DNA, 100 bp, Homo sapiens
tccgattccacacttgattctcttatacgctacttttactcagagtttgaaggttgtgaccaaaagaggctccgatctctcgtggaagaggaagaccaac

SEQ ID NO: 600378 - DNA, 100 bp, Homo sapiens
gaaaagatgaaaaggaatatgcattgaagcaaattgaaggcacaggaatatccatgtcggcttgtagagagattgcatagagacgggggttcaccatgtt

SEQ ID NO: 600379 - DNA, 100 bp, Homo sapiens
accgtgacagcccgcaggatcaggggaagtcatctacaataagaccgaccgagccggctgccatttctacgcagtgtgcaatcagcactgtgacattgac

SEQ ID NO: 600380 - DNA, 97 bp, Homo sapiens
gaaggcgggagacgagaagcctgaaaagtcgcagcgagctggagccgccggagtgtctttctcgagaagcaggtggaaacatgagcattcagtttct

SEQ ID NO: 600381 - DNA, 75 bp, Homo sapiens
agttggcattgaaggttcactcaaaggcaggcctgtgattggaattgaaacagtacaactgcctccaccagagga

SEQ ID NO: 600382 - DNA, 50 bp, Homo sapiens
cttctactcatctgccggcagggccaggattaaagcaaggagagccaatc

SEQ ID NO: 600383 - DNA, 100 bp, Homo sapiens
gttcagaagttcatggatgctgtcaacaagaagagcagttcccaggatctgcataaagcaccaaatcagatgaaagccaaggaagggaggaatgtgtaca

SEQ ID NO: 600384 - DNA, 83 bp, Homo sapiens
cgatggtcttcctgctggggctcatgtttgaggtactccaaagattcaggtttactcacgtcatccagcagagaatggaaagt

SEQ ID NO: 600385 - DNA, 75 bp, Homo sapiens
gtctcggaaaccggtagcgcttgcagcatggaaacctgtaggaagtgtcagggactctggaaagaacataatggc

SEQ ID NO: 600386 - DNA, 87 bp, Homo sapiens
ctggacctggaattcaaggtggaggagccattgtccagagggctattaagcggcgaccaggtctgcgctcctcagaccaccggcagg

SEQ ID NO: 600387 - DNA, 98 bp, Homo sapiens
tttgttgggagtgatggatggacagccgtgttgccgcccgctgtgctatgagcagtcagagcgccgtctccacaagagtttacaaatgaaaatggagg

SEQ ID NO: 600388 - DNA, 102 bp, Homo sapiens
gcctaagccaactcgaaaaagccgtacaaaaaataagcaaaagcgtcccaggagctgtcgccggtgtgcgcgagacggagagcaagatctacctgctggtga

SEQ ID NO: 600389 - DNA, 100 bp, Homo sapiens
gcttgagcaggtggctccaaaaggagatgaagaaggtgttcctgctgttgttattgacatgtcaggactgcggggccgcgttcgcaccaaaaccgtgaag

SEQ ID NO: 600390 - DNA, 75 bp, Homo sapiens
ggatgcgaattgtgaatcgcttctccaaacagtatgaacgctgccgtccgtgccgtggtgcgcatgggtatctac

SEQ ID NO: 600391 - DNA, 84 bp, Homo sapiens
cggccgtcgacatgatggagttgtacaacaggttacctcgagctgaagtgcttcattggagatgggaagacccgcctcatcctg

SEQ ID NO: 600392 - DNA, 82 bp, Homo sapiens
cgcaaccccagatccatttacactttacaagtcccctttacttggtaaatcacggcgagagtggaccagtcagatgcaacag

SEQ ID NO: 600393 - DNA, 82 bp, Homo sapiens
tcagctccgagtccagggcgagtgtgccgtgcaggtgaagctggagctggggcaccgcgcccaggtgaggaaaaaacccacc

SEQ ID NO: 600394 - DNA, 100 bp, Homo sapiens
tgtccttgtatcacaggaaagccaaaagttgcctttcgagagaccattactgcccctgtcccgagaactgcgacacatcaccaagctgaagccctggagc

SEQ ID NO: 600395 - DNA, 83 bp, Homo sapiens
cttggactgagtcctgcaggacacagggcacaaatagtttacatttcatggaggcaagtcctgggcaacatgctttaagtgca

SEQ ID NO: 600396 - DNA, 90 bp, Homo sapiens
ccacctactttgggagcattgtcctgctgggaagtcttctgaccaactggccctccgtccctcctaccataaaggaggaggaaaacagtg

SEQ ID NO: 600397 - DNA, 82 bp, Homo sapiens
gagcagttagaaagggaacagctggaatgggagagagagcgcagaatatcaagtgctggacttcgtcttctatgctccccgg

SEQ ID NO: 600398 - DNA, 100 bp, Homo sapiens
aatttatggtcgcctttttgaatgaggacaaggctttgcttttcgaagaaaactgaaaatacagcaaagttacaagaaattgctacggaaggaaaagaag

SEQ ID NO: 600399 - DNA, 111 bp, Homo sapiens
tcatttttttcctcttacccccccttctggagcggttgtgcgatcagatcgatctaagatggcgactgtcgaaccgctgcagggaagtcaacatttgtgaatatccttaaa

SEQ ID NO: 600400 - DNA, 78 bp, Homo sapiens
caactccaatgggcctttccagcccgtggtccttctccatattcgaggttggctggctcctctggctgatggcatgtt

SEQ ID NO: 600401 - DNA, 75 bp, Homo sapiens
cggagctcaaccatgaccaagtgcagaaggcctgggcaatatttaagggaaagtataaggagggggacacaggag

SEQ ID NO: 600402 - DNA, 132 bp, Homo sapiens
ccgggatcgtgaccgagaccgtgaccgagagcgtgaccgagagcgcgaatatcgtcatcgttagaagcatgtggatgccatggagactggaagaccattccaacttggacgcgttaccatgagagcatatcc

SEQ ID NO: 600403 - DNA, 97 bp, Homo sapiens
gttctggaatcctcagttcaagcgccatcatgaccgggtcctataacaacttcttcaggatgtttgatagagacacgcggagggatgtgaccctgga

SEQ ID NO: 600404 - DNA, 83 bp, Homo sapiens
agagaaccgaggaacgaagaaacagacattcaacatgattgcatttgaaggtttgtgtttagtgaatcagagggatctgcatt

SEQ ID NO: 600405 - DNA, 75 bp, Homo sapiens
aggtattcattaaagaaaataatgggaaggaagaagtatccaagtacagaacctgctaaggccatcaaacctatt

SEQ ID NO: 600406 - DNA, 100 bp, Homo sapiens
ggcatcttcaaagcttacattcagaggctgcttcacgccttggctcgacactgccagctggaaccagaccataaaatgatgcatcctgttgccagcagta

SEQ ID NO: 600407 - DNA, 74 bp, Homo sapiens
ccagctgcacactcttggggctctacctctttttcaaatgagaaggcaaccaaagtgcaggacatcaaaaacaa

SEQ ID NO: 600408 - DNA, 50 bp, Homo sapiens
cgcccgcctcagcctcccaaattacagccaagttctacttctgaatctat

SEQ ID NO: 600409 - DNA, 90 bp, Homo sapiens
gtcctacttccagaatgcacagatgtctgaggacaaccacctgagcaatactgatgctccaggatgaaacgccataggcctgtcagcagc

SEQ ID NO: 600410 - DNA, 98 bp, Homo sapiens
gagcccgcggcgctgagccagccgggacggacatgcgcgggagggcgccgcggggcagccgccgctcctccgggttaataaaggtatccatggagaac

SEQ ID NO: 600411 - DNA, 100 bp, Homo sapiens
attagaaggtgacgaggagggagaagacgaggatgatgcggaaattaaccccaagatagtacacatcctaaatatgacttctgcaaagataatttctttt

SEQ ID NO: 600412 - DNA, 110 bp, Homo sapiens
acagcggctgcggccgtggccgtggcgggaggagccggaagccccgcccccggggaggggccgtcctgcagggcccagtgttcaccatcataccaggggccagaggcgat

SEQ ID NO: 600413 - DNA, 83 bp, Homo sapiens
attcaacggggttccggaccgcgctgcgctatggagcagacacgatgaggcgagtggtacgacagagcaagtttcggcatgta

SEQ ID NO: 600414 - DNA, 100 bp, Homo sapiens
attgcaaagagttatggatattctggtggggagatgaacccaacctagtgggtgtaatacatcatgaactgcaggaaaatgtttcgatgaaagatcctcc

SEQ ID NO: 600415 - DNA, 83 bp, Homo sapiens
tgaagacgtctgcgtgagaatagagaccaccgagattatgatgcatcattatcacagaagaaattcgtgtctatagcttttaa

SEQ ID NO: 600416 - DNA, 83 bp, Homo sapiens
acccacattaccaccagtgacagcttcaatgacgataacgaaggaggcccaacttcattcaataaggagcctgacggatttat

SEQ ID NO: 600417 - DNA, 75 bp, Homo sapiens
tcagattgcaacgtcatcctccacagctaaggccatagtgtatgaaggccaagacaagaacccagaaatgtgccg

SEQ ID NO: 600418 - DNA, 74 bp, Homo sapiens
tgtcaaggagctgcttgatggagttaaacacagtgggaatatcacttttgatgagattgtcaacattgctcgac

SEQ ID NO: 600419 - DNA, 90 bp, Homo sapiens
cgaagaaacagacattcaacatgattgcatttgaagcaggcagtggttaaaggttcccttccacatccttttgccttgacgttatttgag

SEQ ID NO: 600420 - DNA, 83 bp, Homo sapiens
gccttcacaccccggacatccgcgccacacacatctgaatgggactccgagtgccttacatccctgcagccccttcctcttcc

SEQ ID NO: 600421 - DNA, 59 bp, Homo sapiens
agcgaggcagctgtactaggactgggaacggcatgggtcggagccctcgcgatgggtat

SEQ ID NO: 600422 - DNA, 100 bp, Homo sapiens
ctgggagaagtgaccctcctgcgcctgactctaaaatagagctcaagcttgagaagagagaaccactaaagggcagagcaaagactccagtaacactcaa

SEQ ID NO: 600423 - DNA, 75 bp, Homo sapiens
gctgtgctcgctggcaccccgaacgggttgcttcccccgctgcgagattcttggtgccaccattgagaactccag

SEQ ID NO: 600424 - DNA, 100 bp, Homo sapiens
tgccacttcgacatcgagatcaaccgggagccggctgactttggattctgtgcacagataaccccagagcagagcaaacggagcaccatggtaggaaccc

SEQ ID NO: 600425 - DNA, 75 bp, Homo sapiens
acttggcaagatttgatgctcttgtgctcagtgacatcattcaggtcatacttacctggttgcttgcgcatctag

SEQ ID NO: 600426 - DNA, 100 bp, Homo sapiens
aggaggaagaatatgaagaggaggaggaggaggactatgacgaggaggaggaagagtccagtgaagatggtcatcatgggccagtgctactacaacgaga

SEQ ID NO: 600427 - DNA, 76 bp, Homo sapiens
ttcatccaggaagccgagaagagcaagaatcctcctgcaggtcagcaaaacggttactggaccagattgttgaaaa

SEQ ID NO: 600428 - DNA, 100 bp, Homo sapiens
atcagaacacagtggagaccttacagagaatgcacactacatttgagcatgacatccaggctctgggcacacagacttctaggccactgggaagaagcag

SEQ ID NO: 600429 - DNA, 100 bp, Homo sapiens
gatggctgcggggatgtatttggaacattatctggacaaacagatctcggcccctttccaaacactcctgatgcctcatttgcctctcgcctcttttcga

SEQ ID NO: 600430 - DNA, 76 bp, Homo sapiens
gccacagtcctgggaagtcagatgggattgaaaggtcagcagatccggaagctcatcaaagatgggctgatcatcc

SEQ ID NO: 600431 - DNA, 136 bp, Homo sapiens
gcaggatgggatccggctcctccagctaccggcccaaggccatctacctggacatcgatggacgcattcagaagtgatgatgacagcctcttcatctatgactgcagtgctgcagaaaagaagtcacaagaaaata

SEQ ID NO: 600432 - DNA, 80 bp, Homo sapiens
ctcttgtatcatgagcattggatttgatcacatggatttgcttgtaaatgcatcacgaagaggcagcccagaatgaagaa

SEQ ID NO: 600433 - DNA, 101 bp, Homo sapiens
atgttaacctctctgcatcatccatgctaatgattgcaatgcagtacacatccaatccagacaggcaaatgtacactggggaccaccatgttcacgtgaca

SEQ ID NO: 600434 - DNA, 100 bp, Homo sapiens
attggatttaaaagacagtcctcgtcagcactgactttcagctatggaatcggggtcgggccccggctcagtggtcccaggcagctcgggtgtcggaacc

SEQ ID NO: 600435 - DNA, 98 bp, Homo sapiens
ggctggtcctgggggtggggctgtaggggaaagtgctaaagccgctgaggcagaggtggaggagacactgaagcgactgcagagccagaagggagtgc

SEQ ID NO: 600436 - DNA, 97 bp, Homo sapiens
gaacattgaaatgcacaagcagcatggcggacaccgacctgttcatggaatgtgaggaggaggagttggagccatggcagaaaatcagtgatgtcat

SEQ ID NO: 600437 - DNA, 100 bp, Homo sapiens
cctgtgtcgcccgcacctcagccaaccgaggagaggctgccctcgagccccgtctatgaggtttaaagttctagctaaccaatacaaatctatatacccc

SEQ ID NO: 600438 - DNA, 100 bp, Homo sapiens
gaggagtatgtcaagcgagccctggctggccagctaaactatgtggatccagctactggctatgtggtgctcacacagattgcccacttgcaaagaggtg

SEQ ID NO: 600439 - DNA, 100 bp, Homo sapiens
tcacatccttgtctgtgaagctaaactcaatgctgctgtgtgggaagaagatttgtaaagaaaactcttaggtgctggagaatctggtaaaagcaccatt

SEQ ID NO: 600440 - DNA, 75 bp, Homo sapiens
atacagaagctgattatgaagatgattctaaaattgctttcttgatgcaggctgaacatgaactaaatctggcaa

SEQ ID NO: 600441 - DNA, 100 bp, Homo sapiens
tgaatttggaagggatcgtgtggcatgaaacagaagaagctctctatcaatatcagctcacatcattgaaaagataattttgaagacatgttttgctgaa

SEQ ID NO: 600442 - DNA, 90 bp, Homo sapiens
ctgctggacaagtactgtgtggcctacggcgtgggcatcattggcttcttcaaggttaccaggtgacaggggtgtttatgaagaactggg

SEQ ID NO: 600443 - DNA, 98 bp, Homo sapiens
gaagatggggcctatggagaaattctggaataaatttttggagaataaatccccttggaggaaaatggtgctcttacagcctgttccaagtgtggctt

SEQ ID NO: 600444 - DNA, 75 bp, Homo sapiens
taaagattaacaataaggaatgtgccatatatacaaacagagaatttggatggagagacccggaactgccggaag

SEQ ID NO: 600445 - DNA, 96 bp, Homo sapiens
aggtggtgcctctggcagtgacgaggacgaagtgtccgaggtgcactttacaggtccccgatgaaccaagagaaccctccaccatatccaggccct

SEQ ID NO: 600446 - DNA, 75 bp, Homo sapiens
cggaacacagcatcatcccagtaagctccaaccagggaaagcgtcgagaagagacactccagccacccttcacca

SEQ ID NO: 600447 - DNA, 75 bp, Homo sapiens
gggaggccagttaaatgtctctgggaactgtacctggggaatgaattgtaggtttatacaccctggagtgaacga

SEQ ID NO: 600448 - DNA, 101 bp, Homo sapiens
gagaggtggaaacagcggatgattctggaactgggagaagatggctttaaagaatacacttcaaaggacagcctcaaggatgggcaccagctgaaacaact

SEQ ID NO: 600449 - DNA, 50 bp, Homo sapiens
caggtgtgcaggggcgtggcgcgtagctgctgctgctgcactacaaggcc

SEQ ID NO: 600450 - DNA, 101 bp, Homo sapiens
gtatgacgcttctgagctaaaagcttccatgaagattggtggaacgagaatgcctacacgcagccacaggaatccagtttccatggaaaccaaaagcagtt

SEQ ID NO: 600451 - DNA, 90 bp, Homo sapiens
caactattcgcagtccgagcggtggaatgaggtaccatctactgtctccagaggaccgagaagaacttgtagatggcacaagacctagaa

SEQ ID NO: 600452 - DNA, 96 bp, Homo sapiens
cgtacggggcaccaggcgccggcaacggctccctctcgggcgactggtaccgcaggaaccaggccagtcctgctcctataattgtcaacacagata

SEQ ID NO: 600453 - DNA, 100 bp, Homo sapiens
tgctttgtggagggtacttcattgatgccacaaccataatagaatgtctacattcctgtattgaagcccctgggtgataatttgatggaggaaaacataa

SEQ ID NO: 600454 - DNA, 100 bp, Homo sapiens
ctgcagtactcgggcaagaccaccttcgtcaatgtcatcgcggtgaacatgattaaagatgatgggacagttattcatttcaacaatcccaaagtccaag

SEQ ID NO: 600455 - DNA, 82 bp, Homo sapiens
ggaggtcatgaaggacctgagcctgacgcgggccgcgcggctgtgagccgtgagctttgaggcggtgggatgtgtcagcaga

SEQ ID NO: 600456 - DNA, 100 bp, Homo sapiens
ccggggagctgcaggaaccagactgggggcgagctgagcacctgtagtcaatcacacgcagaacaagaaactcctttacgagaagatgaagggaggagag

SEQ ID NO: 600457 - DNA, 100 bp, Homo sapiens
tggtggagaagtgctggaagctcatggacaaggtgtagaatgagccaaggagactcaaacccagcagctattccgcatgcagcagaagatattcaaggag

SEQ ID NO: 600458 - DNA, 73 bp, Homo sapiens
agcaccccgagaaccgtcagtttgagccagatggtgtgatgaatgcagactctgctaccattttggctgtttg

SEQ ID NO: 600459 - DNA, 97 bp, Homo sapiens
tcgcctccagaccgcagacatgaaacttgtcttcctcgtcctgctgttcctcggggccctcgggatactacatcaacctcgctaacgcctgaggaca

SEQ ID NO: 600460 - DNA, 100 bp, Homo sapiens
attaaaagatgatgagaaataaggacaaaagccaagaggaggacagttcgctacacagcaatgcatcgaggagatgcatttagaagatactaccagattc

SEQ ID NO: 600461 - DNA, 82 bp, Homo sapiens
cgcaggacagcgccttcctcaacgacgcggacatggtcatgagctttgtgaacctggcttgaaatccatggcccaaaatgac

SEQ ID NO: 600462 - DNA, 100 bp, Homo sapiens
acggcgctgatgagtctgtttgggatcccgctgtggtacttctcgcagtccccgcgcgtggtcatccaggctcttgtcaggatggtgaagctgttcatcg

SEQ ID NO: 600463 - DNA, 100 bp, Homo sapiens
gtgccggctcgcgcgatcggtgggacagaatttcgttgttttcaccgacgagactggagtattctgacaagtccctgtacacccagctgtgcttttaccg

SEQ ID NO: 600464 - DNA, 78 bp, Homo sapiens
agatacgctgccagcaacacgggcgaccatgctgatgagcaggacggcgattccaggctggagtgcagtggagtgatc

SEQ ID NO: 600465 - DNA, 100 bp, Homo sapiens
tcgtcgacatgagtgatgtggaggaaaacaacttcgagggcagacttgcccagttattggcggaattgaactcgatgccagatttcttcccagtacgaac

SEQ ID NO: 600466 - DNA, 87 bp, Homo sapiens
cgagacttttctcagatgttggatatttgcttggaaaaacgtgtgggtacgaccttgggaaattggattccaagatccatcaaggag

SEQ ID NO: 600467 - DNA, 100 bp, Homo sapiens
agttgatgcaaagacaaaggcacagctggatgaatggaaagcaaagaagaaagcttctaatgggcatgattttgaagtcagaggagatgtggtcaatgga

SEQ ID NO: 600468 - DNA, 100 bp, Homo sapiens
ctgccaagactgttgaggaagatgaggtttttttaacatgtggggatttggaagagtcagcaaacaagccagccaacctgttaaaaagcagcaagaaaat

SEQ ID NO: 600469 - DNA, 74 bp, Homo sapiens
cctgccggagcttcctacaatccatcctttgaagaccaccaggctgagcggaaggaggagaaaaaggcggctgc

SEQ ID NO: 600470 - DNA, 101 bp, Homo sapiens
ctggcgctgggggcgctggcgggcgttggcgtaggagcttagaccatgctcagcctccaagcagccttgtcatcgacaaagaatctgaagtttacaagatg

SEQ ID NO: 600471 - DNA, 75 bp, Homo sapiens
tccatggggttccccagagcccgcgcagagcatcagtgatgtcacgtttggagcaggggtcagttacatcgggac

SEQ ID NO: 600472 - DNA, 104 bp, Homo sapiens
aaatggctgggctaccctattcctccgaaccagcatccccaccatcaacatggagaacaagaccacgtgggatccagcaatgcctgtgagaaaacctccttcac

SEQ ID NO: 600473 - DNA, 100 bp, Homo sapiens
cttcaacggaaactagctcatctgtagagactgatttgcaacccttccgggaagccatagctctgcatgagccgctcccgaggccccggcgcggcgcgag

SEQ ID NO: 600474 - DNA, 98 bp, Homo sapiens
cttttgtaacttttgatgatcatgatacagttgataaaattgttggaagggaaaaggccgaggcatcagcgtgtgaagaccgcaaagacgatcccgag

SEQ ID NO: 600475 - DNA, 119 bp, Homo sapiens
gccaactccaatgggcctttccagcccgtggtccttctccatattcgagaataatccagaatggctactctgatctatgttgataaggaaaatggagaaccaggcacccgtgtggttgc

SEQ ID NO: 600476 - DNA, 100 bp, Homo sapiens
gatccttgaatgttgaagatgtccttaccagctttgacaatacaggaaatgtttacactttttcaaaaatggcaatggtatcagaattcctcaagcaggc

SEQ ID NO: 600477 - DNA, 100 bp, Homo sapiens
gagagcgcgaatatcgtcatcgttagaagagtctagtcctcaactctaaccaaagtaaaggaaactggaaagacacacgctttttcagtcattaatagaa

SEQ ID NO: 600478 - DNA, 83 bp, Homo sapiens
cccaccaacaacaccacaataatccacagccaaggtttacaaaggaggaaaacgacttcttctagatttttttttcagtttct

SEQ ID NO: 600479 - DNA, 100 bp, Homo sapiens
gaagtcatgtacgggaccaagaaggtggcagggcccagccccgaaccagacaagggacccctcaaggagcttcattctagcaggagaaaattgagaagta

SEQ ID NO: 600480 - DNA, 82 bp, Homo sapiens
gacagggccacgcacctgatcgccgcgcgagctggttaacacagaaatctgcctcctgggccatgccgcttctaaggcctgt

SEQ ID NO: 600481 - DNA, 90 bp, Homo sapiens
agtgtttccggaaggtgcccagacctcgggatgaccctgggaaggggaaaaatgggaagacccgaatgttgaagatcaacacaaaaacca

SEQ ID NO: 600482 - DNA, 50 bp, Homo sapiens
gaatcagaaagcactacgctaagtagttagaaacaaacctgtggcaaggc

SEQ ID NO: 600483 - DNA, 74 bp, Homo sapiens
cttggaagttccaaagttgcaacgatttctgcatttgaggctcaagaatgtgaacgaataaacttcttccggaa

SEQ ID NO: 600484 - DNA, 78 bp, Homo sapiens
tcgcccgggtcctcctagaaattccccccgaagaagactcccccacatctgggttaaacccatccagagtaatggctg

SEQ ID NO: 600485 - DNA, 100 bp, Homo sapiens
cacttgggtacaaacttatgaagaaggtctcttttatgctcaaaaaaggcaatggtggcttgctatccgggaaatggaacaggttatgttcgccacgtgg

SEQ ID NO: 600486 - DNA, 100 bp, Homo sapiens
actcggcctatcgctaccctccgaagtccgagctccccggattatggtgcactgagaaggcatctggaagcctgggccctcatggcatccaacgataaag

SEQ ID NO: 600487 - DNA, 83 bp, Homo sapiens
cctttgccaccatgggggagaccgtaatgagcgtcaaaattatccgaaaccgcctcactggggcctactgcagtgcatgaagg

SEQ ID NO: 600488 - DNA, 75 bp, Homo sapiens
tccctgccaggctcttcatccaaggtgctggagaatctggtaaaagcaccattgtgaagcagatgaggatcctgc

SEQ ID NO: 600489 - DNA, 100 bp, Homo sapiens
agaataagcgctctccactgcacgccgcggcagaggctggacacgtggacatctgccacatgctggttcaggcctccggtgtggctgtctctgatggtgt

SEQ ID NO: 600490 - DNA, 100 bp, Homo sapiens
ggccccgcgtcgtctggcgccgccgccgccagcgcggtgaaatggctccagcaacaggaagtgaaacgaagggtgaagagacaggtgcgaagtgacccgc

SEQ ID NO: 600491 - DNA, 98 bp, Homo sapiens
aaaaacatgatatctaaaaagcagaatgtgcagagtcttttctttgccaagcaaaacagtttccaccacgctgcacaaatggagcatcagaaggagag

SEQ ID NO: 600492 - DNA, 83 bp, Homo sapiens
caggaggagtgcgtgcagaagtatcaagcgtccttagtcacacacggcaagaggatgaggctgaaggtgatgtggccgccctc

SEQ ID NO: 600493 - DNA, 85 bp, Homo sapiens
cgacctccccgcgttccatgcgcacagggacaggggaccccctcccaggcctcagctccgggcgacgtggagtggggcggtcctg

SEQ ID NO: 600494 - DNA, 82 bp, Homo sapiens
ccaagagcagagcgccagcatgaacttgggggtcagcatgctgaggatcctcttcctcctgggcatacttttttgatgcacc

SEQ ID NO: 600495 - DNA, 88 bp, Homo sapiens
gcatttgccccctttggtaaaatatcaatgagtccctggaacgccagatgcgtgaaatggaagagaactttgccgttgaagctgctaa

SEQ ID NO: 600496 - DNA, 100 bp, Homo sapiens
caaggaggtggacaagaactggctggagggagagcaccacggccgcctgggcatcttccctgctaattatgtggaggtgggaggattgcttgagcctggg

SEQ ID NO: 600497 - DNA, 88 bp, Homo sapiens
gaacgcttattcaacggcaaaaggtaccccttgttacgtggattcagaaggaattgttcgaatgcttaacagaggacttggtaatacg

SEQ ID NO: 600498 - DNA, 100 bp, Homo sapiens
ctgaacaaattttaggaaaagttagcattgctgttgaagaattagccctccaatcaatgatcagttctagaagaggggatgagatgctgtcttctcacac

SEQ ID NO: 600499 - DNA, 88 bp, Homo sapiens
cgagtctgtcacctacttctggcagaactggaacatccctgtgcacaagtggtgcatcagggagggcctgtgccggctgctggagctc

SEQ ID NO: 600500 - DNA, 75 bp, Homo sapiens
acagttgccatccacagtgatgttgatgctagttctccatgctgtgacctacaagcaaactaaatagccaacatt

SEQ ID NO: 600501 - DNA, 50 bp, Homo sapiens
aatcctataacaatgcagtgtataaagacctacaacaagaaaggggcctc

SEQ ID NO: 600502 - DNA, 75 bp, Homo sapiens
acactgagctcacccacagagcccgtgaagaggatggagatgaagatgaggaagctgagtcagctacgggcaagc

SEQ ID NO: 600503 - DNA, 100 bp, Homo sapiens
gcagctccatctgggaggtcgattctcttcatgctaagacaagaacactgcatgacaggtacctgtttcccaggcaactactgatcaggcatttctggac

SEQ ID NO: 600504 - DNA, 100 bp, Homo sapiens
gtgccttttgcctcccaccgtgattctgaggcctccccaaccatgtgcaattagttgcatgctgagaatttgaaaaatgaagatgatgtagacactggac

SEQ ID NO: 600505 - DNA, 95 bp, Homo sapiens
gtcatccgcgtgttcatcgcctcttcctcgggcttcgtggcgaattctgcttggtcagaatcgtgatggcattgtgttcagcactgatgactatt

SEQ ID NO: 600506 - DNA, 100 bp, Homo sapiens
ataagaagccctttgatgcaatgaataacattgtggcaaatttgctcctcaacctaacgagatgtgttcagagcaacattgttttgttgacacaagcatt

SEQ ID NO: 600507 - DNA, 100 bp, Homo sapiens
gcacaccgaagacatggacctctatagcattaattatctccactttggagagcccaagtcttggatgtacagttacccagcacgtgtacctcctcctcct

SEQ ID NO: 600508 - DNA, 100 bp, Homo sapiens
gtttgaatgaaattaatgaagctgtacctcaggtgaagttttatgaagaggactacaaagctgatgaagacccagcattattccagtcagtcaagaccaa

SEQ ID NO: 600509 - DNA, 75 bp, Homo sapiens
cgggcttctcgccccggccgcggccgggtcctcaggatgctgctccaacagagtctttactgaactggcaagact

SEQ ID NO: 600510 - DNA, 83 bp, Homo sapiens
aatcttcacccctaacttgaacttcataacactggagagaactaaagatgactcagagccatctggagaagaaacagtagaaa

SEQ ID NO: 600511 - DNA, 98 bp, Homo sapiens
cggcagccgaggagaccccgcgcagtgctgccaacgccccggtggagaagctgagatatggccgcgtggaaagtgtcaaaattcttcccaagagggga

SEQ ID NO: 600512 - DNA, 76 bp, Homo sapiens
aaagttcttccagtcctcctaggcatcttattgatcctccagtcgagccctttaactaaggtgaagctgatcaacg

SEQ ID NO: 600513 - DNA, 75 bp, Homo sapiens
cgccatgtcgggttattcgagtgaccgagaccgcggccgggaccgaggatgccgctcctacgaggactgctgtgg

SEQ ID NO: 600514 - DNA, 50 bp, Homo sapiens
acatgtcccaacattacatcccagtgcataagctggagcctgaggcgtgg

SEQ ID NO: 600515 - DNA, 83 bp, Homo sapiens
gttttctagaagcctgtcgaaaaatgggggtgcctgagggtgctttcttctgcgacctggtactcatctacctcatcaaaaag

SEQ ID NO: 600516 - DNA, 98 bp, Homo sapiens
tgacaatagcagtgctatgttactgcaatggcatgaaaagattgcttccaagtatgatcatcaggcagaagaagatcttcgcaattggatagaagagg

SEQ ID NO: 600517 - DNA, 101 bp, Homo sapiens
tccagaagccgatccctacttcatccaagaccgaagatgagaatgtgcctactgctcctgatcctccaagtcaacatttacgtgggcatgggacaggcttt

SEQ ID NO: 600518 - DNA, 98 bp, Homo sapiens
cctgcatccaccagcagccaggaatccaaggtcaacggcagagacttatccagagcaactcatgaccaggctgtggaagctttcaagacagccaagga

SEQ ID NO: 600519 - DNA, 50 bp, Homo sapiens
ttccagtgcccgagtccattctcaaaccactcacgaattcttgtttggtg

SEQ ID NO: 600520 - DNA, 98 bp, Homo sapiens
gacggaaagagctacttgctgaatgtcaccgggtgcgcatcaatgtacctccacacagagggcttctctgggccctctccaggtgacggggccatggg

SEQ ID NO: 600521 - DNA, 107 bp, Homo sapiens
taaaaacaagtgtgtgcatctggctgttagaagaattcatgctcatccggacctgcctagagctggaacgttacctccagagcgagccctgctatgtttcagcctca

SEQ ID NO: 600522 - DNA, 100 bp, Homo sapiens
tgagttaacacctctgccgctgctaaaagaggtgtgctctgaacaagccgagacggggccgtgccgagcaatgatctcccgctggtactttgatgtgact

SEQ ID NO: 600523 - DNA, 82 bp, Homo sapiens
atccagtgttcaccatcctggccccggaaggtttggtgcacctcgatttggaggaagtagggcagggcccttatctggaaag

SEQ ID NO: 600524 - DNA, 75 bp, Homo sapiens
ggtggccatcaaagtgattccccggaatcgtgtgctgggctggtcccccttgactgaaactgttgaggagcccat

SEQ ID NO: 600525 - DNA, 75 bp, Homo sapiens
tgttgatcagcttcgtgatatcaaagacacttttgggagtgtggaagtccataatttgcaaccagagaaggttca

SEQ ID NO: 600526 - DNA, 127 bp, Homo sapiens
acaaaaacttggcagtggaagttttggaactgtctatctggtttcagacaagaaagccaaacgaggagaggaattgtccaggtcaagacctcgtctccgttctcatagtcgtagcagtgaaaggtcc

SEQ ID NO: 600527 - DNA, 100 bp, Homo sapiens
agtcgtgaggacgcccagggtagcgagatggtaacttgcaagtccgagttctaccatgatgagtttaaaagcctaagaaagctgtcaagataaaacctca

SEQ ID NO: 600528 - DNA, 82 bp, Homo sapiens
cagaaaggtggaggccgggaggacgaagctcctggggagtttgcttcacctacggcacctggtttggcctggaggccttcgc

SEQ ID NO: 600529 - DNA, 75 bp, Homo sapiens
gacaaaatggctgatgatttgctggcagctgctgacaagacatttctcttgggaagttgtgcatctgacaggaat

SEQ ID NO: 600530 - DNA, 90 bp, Homo sapiens
tcgtggtgaaggtccggggcttgccctggtcttgctcggccgatgaagtgcagaggtttttttctgatgcttccctgcaggtggacacag

SEQ ID NO: 600531 - DNA, 82 bp, Homo sapiens
gcggcggcagcagcagtgagaggactgcctccgggcctgccaggagcagatcgaagccctgctggagtcaagcctgcgccag

SEQ ID NO: 600532 - DNA, 100 bp, Homo sapiens
tggaatgtattggggacagatcagagtttgcatgctctaagcgaaagacatgaggcctcagcctgaaatgaggttgttttgaggtcatctgatttctgac

SEQ ID NO: 600533 - DNA, 74 bp, Homo sapiens
ttgaaacaaaattggcgattattcctggtggaggtgctggagaatctggtaaaagcaccattgtgaagcagatg

SEQ ID NO: 600534 - DNA, 100 bp, Homo sapiens
ttttgatgtggatgatgccaaagttttattagggaataaccagcaagtacctgtcaagaatgaagtagatcattgtgaaaatttgaagaaggtggacaca

SEQ ID NO: 600535 - DNA, 100 bp, Homo sapiens
cgcataacacctatctcactgagaacctgtggagtacgtacgcgcacgcgggggcgtttgtggagaagaaaggtgtgccctcggtgcccgtggcagagga

SEQ ID NO: 600536 - DNA, 100 bp, Homo sapiens
ggtgtggtgtgcggaggagctccaggcccgtcggcgcggaggtgaagtgtcagactctgacagcaacagctcctcttccagttcagattcagactcttcc

SEQ ID NO: 600537 - DNA, 108 bp, Homo sapiens
atggcctcgtcccggtcatctgggcgtgcgggtcccgggttttgatcgcgcgtttgtgtagagtatcctgagctccagctggaccctaaattggatcctcttcctgct

SEQ ID NO: 600538 - DNA, 50 bp, Homo sapiens
cccagatgaagcatccagggaaaggatgttggttcctgcaaacaagaact

SEQ ID NO: 600539 - DNA, 75 bp, Homo sapiens
ccgccgcgcaggagcctcccggagctgtgaagatagtgatccggggagacaggaacacgggcaagacagcgctgt

SEQ ID NO: 600540 - DNA, 100 bp, Homo sapiens
tggccacgatattttgatggctactatgctgaacggtgcagcagtgatggatgcagctcttctgttgataggacgaaaaggaggttgtgctaaagggaaa

SEQ ID NO: 600541 - DNA, 95 bp, Homo sapiens
aagaggatgtcaacggttatgtcatgccagatacacacctcaaaggtactccagcgtctcattcgctcccgggggaagtcacagatgaagcacct

SEQ ID NO: 600542 - DNA, 86 bp, Homo sapiens
gtttacagataagcggttccagcctgtccacgacctcacaatagggtcatcacactgaaacggtgttcaaccgggttttgccaggg

SEQ ID NO: 600543 - DNA, 75 bp, Homo sapiens
ggatgacagcactaattctagtctgtcatgctaatccatcagaaagagctcgttttattcgctgcatctataact

SEQ ID NO: 600544 - DNA, 83 bp, Homo sapiens
ccgcacctttgccgtgtacctcaatagcactggctaccggacaggttttaaaatcaaagatgggaaaatcggagaaaattgcc

SEQ ID NO: 600545 - DNA, 100 bp, Homo sapiens
gtggggccggaggagtcagctgtgtgtccagaacgtgccatggagacgcttaacggttgatgccggcccaggatggatcagacctgtgaactacccagaa

SEQ ID NO: 600546 - DNA, 75 bp, Homo sapiens
caaggatcctggcaatggagtgatcgtacaccagtggaaccgtcccaaaatgtcccttgctcagaagaaggatcg

SEQ ID NO: 600547 - DNA, 100 bp, Homo sapiens
accctaaaggatcaaccctctgcatacagtaaaggcccagtgttcaccatcataccaggggccagaggcgatggcttgcctccatgagacccgaacaccc

SEQ ID NO: 600548 - DNA, 135 bp, Homo sapiens
actaaatcggcttcacagaaaggagtcactgccttctaacgaaagggcagtacagactttggcaggtgccttcagccgctacaagagcagaagcagtgggcattggatggagctgagtacaggaccatacaggct

SEQ ID NO: 600549 - DNA, 75 bp, Homo sapiens
acttatatcgccagtccagcagctaaggatattttgtgcagcctgagaacagtggcccggagagctgcctgtatg

SEQ ID NO: 600550 - DNA, 110 bp, Homo sapiens
ttcatagccatttattaccatgcttcaagagccattccttttggaacaatgtttttcagaagaagtgaagtcaagatgaagaaccatttgcttttctggggagtcctggc

SEQ ID NO: 600551 - DNA, 82 bp, Homo sapiens
tcagccccgtcctcttgtcctcctcagcctcgaactcaagacatggctgcccagtgtgtcacaaaggtggcgctgaatgttt

SEQ ID NO: 600552 - DNA, 80 bp, Homo sapiens
ggcggctcctgccctctcgctttccctctcgcgtctctggctgcaggttcgagaacttgtcttggacaattgcaaatcaa

SEQ ID NO: 600553 - DNA, 80 bp, Homo sapiens
atcccgacctggactcagacaaggtgtggacactgccagcggctgcagccgacttggaatgacctgggagacaaatacaa

SEQ ID NO: 600554 - DNA, 129 bp, Homo sapiens
ctggagcctcagttggaagcagccgatccagcctgcggagcctgtggggcagggccatgaagcccccaggaggagaatcgagcaatctttttggaagtccagaagaagctactccttccagcaggccta

SEQ ID NO: 600555 - DNA, 100 bp, Homo sapiens
tggcgctggcgctggccaaggctggcggcgactggcggcgcgatggacctgaccgggctcctgctggacgaagaaggcaccttctccctcgccggcttcc

SEQ ID NO: 600556 - DNA, 58 bp, Homo sapiens
cgccgaggcaccgaggcactcagaggagtgaagatagtgatccggggagacaggaaca

SEQ ID NO: 600557 - DNA, 100 bp, Homo sapiens
ccctcggcaagggcgtcctgagcaggagacctgaatctgctaggatccagcttaagagatccagtactggagtcggcagaactggagtaaaatcctggtc

SEQ ID NO: 600558 - DNA, 100 bp, Homo sapiens
actggattctttaaatggcaaaaaaatagcctgcctcagctatgggagtggtccacatattgtccttgcaacaacagcgtgaaataactaagaagttggg

SEQ ID NO: 600559 - DNA, 88 bp, Homo sapiens
cgacaagccgctggcagccgcggatctcaccgccgctcagggttccccctaaaggactcaaaacgtctaatccaatggttaaaagctg

SEQ ID NO: 600560 - DNA, 90 bp, Homo sapiens
ctgggagctgttagagggcagggatcctagctgacacatctatgtcctcgccttggttggagatttatgtgatcagtttggctgaacccc

SEQ ID NO: 600561 - DNA, 100 bp, Homo sapiens
aatgaaagcttgggatataaggactggcaagcatgcagcagattggaataaatatgatgaccgattgatgaaagcagcagaaaggggggatgtagaaaaa

SEQ ID NO: 600562 - DNA, 75 bp, Homo sapiens
gaaaaaactactaggatcacgcggcatgtattgaggttcacagctggagcaaagctgttgtttcacctgaggcag

SEQ ID NO: 600563 - DNA, 100 bp, Homo sapiens
actacgcgctctggaagacattgaacgggaaatcggcgccatccttcagaatgcaggcccccgacagctgctctcgggagccgcctcccgacacccgagc

SEQ ID NO: 600564 - DNA, 90 bp, Homo sapiens
tcagcagagagctattattccctgtattaaagcaccggaagcagtactcagaacaagtcatacctaatgctgcaggaaacatttccaaac

SEQ ID NO: 600565 - DNA, 88 bp, Homo sapiens
cttatatttcaagttaaggtccaaaaaaactccagctgtgaaagcaacataaatggccaggagggccgagggccacacgggtgccaca

SEQ ID NO: 600566 - DNA, 100 bp, Homo sapiens
gcgaggctagggaggacctcacttccccggggtgtaataatgttaactgagggctacaacagaccaaaagcttatattgctgcccaaggcccactgaaat

SEQ ID NO: 600567 - DNA, 83 bp, Homo sapiens
gctcgctgggagagaggtacctctccttttccctctccctttccctaagccacccggcccaagttgaagaagatgaagagcca

SEQ ID NO: 600568 - DNA, 95 bp, Homo sapiens
aaggagaagagccatggaaacaggaggaagaattcccaagccaaagctttccagccactggagcatctactactgtatatgcgattgaagctaat

SEQ ID NO: 600569 - DNA, 75 bp, Homo sapiens
aaaagagacctctacttagctcagcaattcttaccttgtggggagcagcctattcctctctggaacgaacatgat

SEQ ID NO: 600570 - DNA, 83 bp, Homo sapiens
aagacatcaagaagatcttcgagttcaaagagaccctcggaacgttcgagaacttgtcttggacaattgcaaatcaaatgatg

SEQ ID NO: 600571 - DNA, 90 bp, Homo sapiens
caacagttgagactcttcattacccggcacctagctcacttctcctcagaggtcaaagatgtggacgagtgtgcaacagattcccaccag

SEQ ID NO: 600572 - DNA, 98 bp, Homo sapiens
tgtttacagaagaggcttcaagctgttagtgagtccacggttccgccaagcttttagtaaaacatggaggagacttgtttgctgagaatgaaaataaa

SEQ ID NO: 600573 - DNA, 75 bp, Homo sapiens
cagcccatggagggtagatctcgcattgtaggtttaacactcaatgtacaagaccggactgcacattctaccatc

SEQ ID NO: 600574 - DNA, 100 bp, Homo sapiens
gctcagaacagagcagaaatcaaattgaagagagcagttgaagaagtgaagaaattattggtacctgcaagtgggaaaccacccatcaatgatatgttca

SEQ ID NO: 600575 - DNA, 75 bp, Homo sapiens
cttcctgtctcaacgatacctattttctagtgctgagatcctgagacaatggttgcttataatggtgatcctgaa

SEQ ID NO: 600576 - DNA, 82 bp, Homo sapiens
gagtgaagctgcagaccttcgcgatagttcatttaaagcccccatccctgcaaggtggtgctttctaccaatatgaatcttt

SEQ ID NO: 600577 - DNA, 125 bp, Homo sapiens
gagctgtacctgccactgctatcgattgcacgggataccttgccacggctgcatgactttgctgagatgaccaagcgagacgtgcctggcttcgccatcgggggcctgagcgggggtgagagcaa

SEQ ID NO: 600578 - DNA, 100 bp, Homo sapiens
tgaagaaatgaaacaagaagaaaatttgagtgtaccgtttttccaatgacaggatttacacagagagcaactattgatccagaactgaatgaaatacacg

SEQ ID NO: 600579 - DNA, 75 bp, Homo sapiens
ctggatggagaatatttcacccttcaggataatcgtgctggatcagagtgacttgtcagactgattggaattgga

SEQ ID NO: 600580 - DNA, 90 bp, Homo sapiens
agttctagaatgaagctgcagaccctcgcagtgagtgttacagctcttaaggagtgtggccatctggggccgtgtggtatttgccactca

SEQ ID NO: 600581 - DNA, 131 bp, Homo sapiens
ggaatatcctggaaccttcttttgtttgtcagcagccaaggtgtttccaggaagttcagagagaacagccggcagcaaaagtggaccaagaaaccttgacagaaatggtgaaacccagtattgattatgtg

SEQ ID NO: 600582 - DNA, 100 bp, Homo sapiens
gaagaaccagctgtaatcgatgtggtcggggtttcctcaagcatctgcttcctacatattactacaatttgcacagtatgggaatatcttaaaacatgtg

SEQ ID NO: 600583 - DNA, 133 bp, Homo sapiens
cctgcatgtctggctacctcgtggacaagtttgcagatcgggagcgcaaggtcgccctcaaggccatgatcaaaaccaattaccagctctggctgggtcgccacaacttgtttgacgacgaaaacacagccca

SEQ ID NO: 600584 - DNA, 75 bp, Homo sapiens
gagaagttgtgaacagactcgatcgttagggaatgggaataaccagcaagtacctgtcaagaatgaagtagatca

SEQ ID NO: 600585 - DNA, 51 bp, Homo sapiens
cgccactgccgcaggaggcgtgagaccattactgggacttccacccccacc

SEQ ID NO: 600586 - DNA, 100 bp, Homo sapiens
tctgcctaagaagaccgagagtcaccacaaggccaagggcaagtgatttgacagggtgtcaaattgagaaccaggtagatccccaccacctacagtaaaa

SEQ ID NO: 600587 - DNA, 124 bp, Homo sapiens
cggcggcggcggcgcctcccgggctccggctccggcttctgctgttgctcttctccgccgcggcactgatccccacagagtcaagggtccagagaaggaggagaagttgagacaggcggtcaag

SEQ ID NO: 600588 - DNA, 75 bp, Homo sapiens
tcgaccccgttctgcggccgttgaatgtggacgagtgccaccgcgtgccgccgccgtgtgacctcgggcgctgcg

SEQ ID NO: 600589 - DNA, 97 bp, Homo sapiens
gcacgtgtttgcggttcagccctttgatgaccgcagcagatcctcccgtgcacatcgtggacccccgagaacatgtgttcgtgcatgccataacttc

SEQ ID NO: 600590 - DNA, 83 bp, Homo sapiens
gctgaaggagctgatccagaaggagctcaccattggctcgtcatgtctcacaagagaacagcgagtacggatcttaagcaact

SEQ ID NO: 600591 - DNA, 88 bp, Homo sapiens
agagctcaatgtcctcattgccgcacaacattctgaaattttttggttattgtaatgatgttgatcgggagttgagaaaatgcctgaa

SEQ ID NO: 600592 - DNA, 75 bp, Homo sapiens
caggctccactaactggggctacgactctgatgggcagggccttgttttggacatttactaccagggcactgagg

SEQ ID NO: 600593 - DNA, 75 bp, Homo sapiens
acacggagcactgcaggcgccggattgtcactgctgttccaagggcacacgcagagggatttggaattcctggag

SEQ ID NO: 600594 - DNA, 75 bp, Homo sapiens
cagcaagacccaggaagccgcgggcaaactcagactcgaagagtttgaacaactgactcttgatggacacaacct

SEQ ID NO: 600595 - DNA, 100 bp, Homo sapiens
atgacatctacctccatcaggaccccagatgtctgacagccctgtgtgacaccaagataagtaaccaaacatgtctgacaaagagctaaagaagctacgt

SEQ ID NO: 600596 - DNA, 98 bp, Homo sapiens
tgcggctactcctgcccagcgtggtggggcagcagaagctccagagcccagacttgcagcttggatttacactgggcaacgtggttggaatgtatctg

SEQ ID NO: 600597 - DNA, 82 bp, Homo sapiens
tgcctcttgatctccgccaccgtcttcaggccaggagaagtacagcatcggggagcccacagtgccatccaccctggcagag

SEQ ID NO: 600598 - DNA, 98 bp, Homo sapiens
ctggccaacctgctgctggaggaggataacaagttttgtgcagattgccagtctaaaggacgctgtgcagagctgcaagtccgtatcactgaggctgt

SEQ ID NO: 600599 - DNA, 90 bp, Homo sapiens
aaagtgagcaagaatactctcttgtcaccagattactgaggtgtactggaggacgccaggaaagcatgtgcagatgcaactctctctcag

SEQ ID NO: 600600 - DNA, 98 bp, Homo sapiens
cgagaggctctggccttacaggggtccctggagtttgatgatgctggaggtgaagcttgtgagacccagctgcctgtctccttccggcacctgatctt

SEQ ID NO: 600601 - DNA, 100 bp, Homo sapiens
aaaagtacagcatatccagcttctgcagaaaaatgttagagctcagttggttgatatgaaacgactggaggtggacacctgtataaatgaggatgttgag

SEQ ID NO: 600602 - DNA, 75 bp, Homo sapiens
gaaagagtcaacagcagtggcaacagattatcttagaagacctaggactccaaaaatgtttcccctgaaggacgc

SEQ ID NO: 600603 - DNA, 75 bp, Homo sapiens
aaaccatctatggagagtggagatggcaacacaggtccggcgccagctgccagtcgaggaaccgaacccagccaa

SEQ ID NO: 600604 - DNA, 95 bp, Homo sapiens
ggacgggaaggcgggagacgagaagcctgaaaagtcgcagcgagctggagccgccggagaccatgggggatgtgaagctggttgcctcgtcacac

SEQ ID NO: 600605 - DNA, 95 bp, Homo sapiens
cagggctctcaaaggcctttgtgggccagaagagttccttcctggtggactgcagcaaagctgaccccccaccccctggattttccttctccctc

SEQ ID NO: 600606 - DNA, 83 bp, Homo sapiens
gaacaggcaagaagtggtccagccggcgaagcctactcaatttgaagacattgaggatgaagacctttatgatgatccacttc

SEQ ID NO: 600607 - DNA, 82 bp, Homo sapiens
tgctgctgtatcctcagttgactcattcactcaggacctatatccagactttgcctgacactgcagggtccaagagaattaa

SEQ ID NO: 600608 - DNA, 100 bp, Homo sapiens
aaggcctggaatctgatcctccacttcagagaacagggtatttgtgtggaagtaatcgaaaagacaacatatttattgatcctggataccaaacatttga

SEQ ID NO: 600609 - DNA, 101 bp, Homo sapiens
ctgggagtcctaaaacctgcgacaggaaggtgtggaaacaggaagagaactagaactggaagtaaagcattgaagatgtgactgaattgctgcaatctcat

SEQ ID NO: 600610 - DNA, 75 bp, Homo sapiens
ctttgagtgcatctgccccgagcagtgggtgggggccacctgccagctggatgaactgcctctcctcctccctgc

SEQ ID NO: 600611 - DNA, 95 bp, Homo sapiens
gctgaagccgctgcccctgctacagccctgaccctctattctgcaccctgtgagccaccgagactgaaccaaacccaggaagcggcgccaccaac

SEQ ID NO: 600612 - DNA, 82 bp, Homo sapiens
gcgcacaggccggtggaatgggtccaggccgtggtcagccgcttcgacgagcaggtcctcagaatggttggaatgaccctcc

SEQ ID NO: 600613 - DNA, 78 bp, Homo sapiens
tccttttaagaagaaatgctaatgtcaacctcaaaaaccagggtttgaaagtattcttgaagggctgtttggacctgc

SEQ ID NO: 600614 - DNA, 100 bp, Homo sapiens
catagctggaaacagtcagagccaccagccaatgatcttttcaatgctgcgaaagctgccaaaagtgacatgcagatagagccacgaaccccctgaacaa

SEQ ID NO: 600615 - DNA, 87 bp, Homo sapiens
tacaatctaagaaggatttcagcaaatttggagcaggagctattaagaatggcaaaggattgcatagcaagaaggaagtgcctatcc

SEQ ID NO: 600616 - DNA, 50 bp, Homo sapiens
cctcccagctacgagctgccccagcactattcctgatcagagaactccag

SEQ ID NO: 600617 - DNA, 100 bp, Homo sapiens
gtggaacagctggctgtgtactgtgtgtctctcaagaagtgcgtcctggctgagagttggagctctccagcaacatgcctgagcagagtaacgattaccg

SEQ ID NO: 600618 - DNA, 74 bp, Homo sapiens
gtacccgccgccgccgttggctggaggtccagcccagaatcaaatgcaggttccatctggatatggattgcatc

SEQ ID NO: 600619 - DNA, 90 bp, Homo sapiens
tggaggactattcggcagagtacatcattcagcaaggtggctggacttgcacacctacccctgtggagcgtgcaccctataagggagaag

SEQ ID NO: 600620 - DNA, 100 bp, Homo sapiens
cacaacttcattgctgggaaaaggagacgaaaccagacagagggtcaagtttacagatgaccgtgtctgcaagagtcaccttctggactgctgcccccat

SEQ ID NO: 600621 - DNA, 51 bp, Homo sapiens
tcctgggctgcgggcaaggcgaattatatccagatcgagagacagaagatt

SEQ ID NO: 600622 - DNA, 50 bp, Homo sapiens
ctgaagagggaagacacgcggaaacagtgcctccggagccagcgtggtgg

SEQ ID NO: 600623 - DNA, 51 bp, Homo sapiens
aagaaacatctcaccaatttcaaatctgtggcaaatccaactgaccagaag

SEQ ID NO: 600624 - DNA, 82 bp, Homo sapiens
aggtctgccgaagccttggcgttctcagaggagaagatctgcagaagatgagcttgcaatgagaggtttcttacaggaaggg

SEQ ID NO: 600625 - DNA, 82 bp, Homo sapiens
ctgcctcttgatctccgccaccgtcttcaggccaggatgaaacgaggaggaagagatagtgaccgtaattcatcagaagaag

SEQ ID NO: 600626 - DNA, 97 bp, Homo sapiens
ttatgggagcgcatttccccaggggagcatgattgagcggatattagtgtcgtgcaacaaccagcaggatctgcaggaatgggtggagcacctacag

SEQ ID NO: 600627 - DNA, 75 bp, Homo sapiens
gtttacggcgaagtctactcaacgtttccaaggtctcctccgggctggggctgagcaagccctcggagtgaccgt

SEQ ID NO: 600628 - DNA, 83 bp, Homo sapiens
ggcgttgcggcgaaaggaacggctgaaggccctacgggagaaaaccgggcgcaaggtcacatatcctggagcaggaaaacttc

SEQ ID NO: 600629 - DNA, 90 bp, Homo sapiens
tttggctgctgcaggagccattttagaaacagactgaatttgatctgattaatgtgaaggactggccagtctgggaaaccgcctgccacg

SEQ ID NO: 600630 - DNA, 50 bp, Homo sapiens
ggaagctattgctgggattttgaggaggttgtactccaggatttagataa

SEQ ID NO: 600631 - DNA, 87 bp, Homo sapiens
cgggagaggcgagctcgcgatgagtggtctcggcaggctcttcgggaagggactcctcctattttgaggacttctccaacatctcca

SEQ ID NO: 600632 - DNA, 51 bp, Homo sapiens
ccagtgctactgctacaaataaggtatcgagaaccttccctgcgaacttca

SEQ ID NO: 600633 - DNA, 75 bp, Homo sapiens
cggcgacatactacctctggccccgagatcagaatgccggaagaggatcacctagcccgggtagaagaggcaatc

SEQ ID NO: 600634 - DNA, 75 bp, Homo sapiens
gcgtgggtgaagataggatcaagatggccatgtggcaggactctcagcgttctcatctctcttccttcaccatga

SEQ ID NO: 600635 - DNA, 83 bp, Homo sapiens
ctcgacagcatctcgggtaacaaccgagcccctcctcgcagcgaatgggccttgacgaaggagaagtcggtgaagcacatgga

SEQ ID NO: 600636 - DNA, 82 bp, Homo sapiens
gaggcaccacgtctctaccgagcacaaactccacgaagccaacgcccagatatggctcgtggacagcagaaaattcagtctc

SEQ ID NO: 600637 - DNA, 100 bp, Homo sapiens
gataaatcacgagaggaagcttaaatctgtcgtttgaatttaggaccacctcggtagtggaggacatgctagaggacgaggaagaagaagatgacaaaga

SEQ ID NO: 600638 - DNA, 100 bp, Homo sapiens
gaggaagccggaggcctgcgtggaggaggcgccccgcgcagctggctggcggagcatgagcgccccaggtgacttaagagattaaaattaatttggttgc

SEQ ID NO: 600639 - DNA, 96 bp, Homo sapiens
atttcgtggttcacccgctgccgggcaccgaggaccagctcaatgacagtatgagcccagaggacctggtcggcccttgtaccaaagaagaatctc

SEQ ID NO: 600640 - DNA, 89 bp, Homo sapiens
agactactcagtaccattccaccatacgccaatatcaagcatgtcatcagatttgccaggtatgagggtgctggttgatgctcgagaga

SEQ ID NO: 600641 - DNA, 117 bp, Homo sapiens
gaaagagcccgtgaagatcgcggcgccggagttgcataagggagatgaatttttcacagacaacctatgggacacactcccttgctcatggcaggaagcattggatggactgaaacc

SEQ ID NO: 600642 - DNA, 90 bp, Homo sapiens
ccgctggtcgtgttcgtcctcggcggccccggcgccggcaaggggacccagtgcgcccgcatcgtcgagatgccatggacaatattacca

SEQ ID NO: 600643 - DNA, 100 bp, Homo sapiens
ggccctgactgcttaggcgggagctgcgtgcagctcagcttctccggggcatttttttctacacgggttttggccaaattgggcgagggcacaaaataac

SEQ ID NO: 600644 - DNA, 82 bp, Homo sapiens
atatcaatgactgcaagcacctattatgcccaagaagatgaaaggattgttcttgttgacaacaaatgtaagtgtgcccgga

SEQ ID NO: 600645 - DNA, 51 bp, Homo sapiens
ggcagaatgcactgcttgaaaaggttctaggcgcccacgaggtcccctcga

SEQ ID NO: 600646 - DNA, 97 bp, Homo sapiens
aaagacaaagcttttgttaattatcttaaatacttgctttactggaaagacccagaatatgccaagtatctaaaggatcatagacggtatttctatg

SEQ ID NO: 600647 - DNA, 74 bp, Homo sapiens
cagctgtgtgtccagaacgtgccatggagacgcttaacggtgtgatgaatgcagactctgctaccattttggct

SEQ ID NO: 600648 - DNA, 130 bp, Homo sapiens
gagtaaatgaaattgctgtaaaagtgccttctgtttttaagcttctaattaaagaggtatctgaacttaggactggagctgcagaaggactagccaagctgatgttctctgggcttttggtcagcagcag

SEQ ID NO: 600649 - DNA, 97 bp, Homo sapiens
tggagacggcggcggctgtagcggcgtgacagatttcaggtatgctgctgaaagtgggaatcctctacattggtgggcagctggtgaccagtggggc

SEQ ID NO: 600650 - DNA, 75 bp, Homo sapiens
aaaatagaacctgtctttattcccttggtgttagcctttcgctactgggctaagatcatgcaacagatgagtgac

SEQ ID NO: 600651 - DNA, 75 bp, Homo sapiens
gaggctgcccggcgcctggaggtggccatgtaccccttcaagaagattttcatcgtggaatttgggggtaaaccc

SEQ ID NO: 600652 - DNA, 88 bp, Homo sapiens
tcgccatgcatcagatcatgcccaaaggcagagatcctacaagaatccaggatgatgatcccagattgccagcgcaggttggaagccg

SEQ ID NO: 600653 - DNA, 96 bp, Homo sapiens
gggcgctgctgtctgtgaattctttttgaaagctgcctgcggcaaagaaactgttcaggttccattatcaaaacgagcaaaatttgttggacctgg

SEQ ID NO: 600654 - DNA, 100 bp, Homo sapiens
tgcttctgactatcttctcttcaccagctcttcagatcaatatggcagaaaacgctcttccaaatgtaatggagtcagctttttattttgaacaagctgg

SEQ ID NO: 600655 - DNA, 100 bp, Homo sapiens
ttgattcaccacccatcacagcccggaacactggcatcatctgtaccattgccaaggccacctttgatgccatttctaagacctacagctacctgacccc

SEQ ID NO: 600656 - DNA, 75 bp, Homo sapiens
gcttctcagaagacagagggttttcttttgaggaaccctcagtgctgcgtctagattctgcaggggaggtttgct

SEQ ID NO: 600657 - DNA, 50 bp, Homo sapiens
atttactgcaaaactcagatagacttcacagagaatgcagttgtcttgac

SEQ ID NO: 600658 - DNA, 82 bp, Homo sapiens
tatatcgcatcctatggctcaaagaaagatgattattttggcagtcttgaacagaagctggctttggcagaacggattcgag

SEQ ID NO: 600659 - DNA, 100 bp, Homo sapiens
cttagatgagaaaattcgaagtagcgatgagatataaacttctgcactggaggggcctctcctcccctcgttctgcacatggagctctaatccccacgcc

SEQ ID NO: 600660 - DNA, 82 bp, Homo sapiens
atctgggacaccgcattcgccatccaggctctgcttgagagacaagaggagcagcagcggcaccgcccctcaccctggaggg

SEQ ID NO: 600661 - DNA, 100 bp, Homo sapiens
aacagatttcagtgtcctccttagctctgcagctagagatgatcgctatggaaaatcctgcagacttgaagaagcagttgtatgtggaatttgaaggaga

SEQ ID NO: 600662 - DNA, 75 bp, Homo sapiens
tgaggtcatcggggatgtggacgaaggggccgacctcctaggtgctggagaatctggtaaaagcaccattgtgaa

SEQ ID NO: 600663 - DNA, 101 bp, Homo sapiens
ggaagaggttacattgcacaatatttgaataagggccgttgctccagggagaactgcaaatatcttcatccacccccacatttaaaaacgcagttggagat

SEQ ID NO: 600664 - DNA, 90 bp, Homo sapiens
ttagtggattaaaatctcccaagaggaatgacaaacaaccagctcttcagagttgcatgctgagaatttgaaaaatgaagatgatgtaga

SEQ ID NO: 600665 - DNA, 100 bp, Homo sapiens
cttcgccaagggggtgcagtacaacagcagtggctctgccaatgatcctgtgagtattcaggaatcactgttgcccctggggatccttgtcctggagtgg

SEQ ID NO: 600666 - DNA, 100 bp, Homo sapiens
ccagggccgacccgggccggaccgaccccaggcggcgactaaaatccacggagtcgggtttgtgaaaatccatgccccctggaacgtgctgtgcagagag

SEQ ID NO: 600667 - DNA, 82 bp, Homo sapiens
acaaagaaaaatcccgctgaaagcgccaaggccggctgggttccccgcacctcctgcagggggatatgagactttctactcg

SEQ ID NO: 600668 - DNA, 75 bp, Homo sapiens
caacatgctgaggacgttcagcagcattcccgtctcacggatatgcaagtacaagattctgctgtactcattgga

SEQ ID NO: 600669 - DNA, 75 bp, Homo sapiens
gcggaaaatgatccagtcacaggtgggtttggaggatttgggacaacatctacaactgcaggttctgcattcagc

SEQ ID NO: 600670 - DNA, 82 bp, Homo sapiens
gaccgcgcgcagggcctgcagcgggagctggacggcgagcgcgagcggcgcgagaaaaaaattgtacaagctggagataagg

SEQ ID NO: 600671 - DNA, 75 bp, Homo sapiens
ggatctgaagagctatggtgaaacaccactgaagcattgccaagatgtgctggtggacggacagccatgtgaccg

SEQ ID NO: 600672 - DNA, 82 bp, Homo sapiens
ccgtcctgcggaaccgctggctgtcagacagcttcaaggagacgcttccgccctgcgctgccagtctcctacctgcaggccg

SEQ ID NO: 600673 - DNA, 100 bp, Homo sapiens
gacggcgaggccctcatgtaccacacggtaatctgtaagtcagatgctccaacaggggatgttcttcttgatgaagctctgaagcatgttaaggaaactc

SEQ ID NO: 600674 - DNA, 74 bp, Homo sapiens
ggcggcggcggcggctgcggcccaatatagcaggaggatgcattagcacaacaggcctttgaagaggctcggag

SEQ ID NO: 600675 - DNA, 130 bp, Homo sapiens
ggtgcatgccgtggtcaccgtccgagacgccaaacacaccaactttgtggaggtgaagctgtgtgactttggctttgctcgcatcatcggcgagaagtcgttccgccgctcagtggtgggcacgccggcc

SEQ ID NO: 600676 - DNA, 100 bp, Homo sapiens
gtactgaaggctcatcatgatattgtacgatttctggtacagttagatgactacagttgagtcagcagatactggagttatttgaaacatgtcagcagca

SEQ ID NO: 600677 - DNA, 98 bp, Homo sapiens
ttctactagcgtggaggaacggaggaagaatccattcacactccccaaaccaggaggaagagttcatcgattggtggagcaaattctttgcctccata

SEQ ID NO: 600678 - DNA, 74 bp, Homo sapiens
ttcaactacagatactttgaagtagaagaagctgatgtggaagaagttgttccgaatgtaattgaaccttcctt

SEQ ID NO: 600679 - DNA, 101 bp, Homo sapiens
cgagaaaccatgagtgtaaggttaccccagagtatagacaggcccagtggagcaggcagcaagtaaaggaggagctggccacctggctgcgaccattgaca

SEQ ID NO: 600680 - DNA, 97 bp, Homo sapiens
tcgctgggggaaatgacagcttggaccatgggcgcccgcggtctggacaagcgaggaagtttctttaaggagttgctcaatgaactacagaaatttc

SEQ ID NO: 600681 - DNA, 75 bp, Homo sapiens
gcaggaaggcagtctttgctacgtacagcaaaaggttcaggcccctcctgttgttgctgcaactccctcacccac

SEQ ID NO: 600682 - DNA, 82 bp, Homo sapiens
gtgccagagtttgtagcctattggaggaaaacacaccaaggactatttaagaaacaactgaggcatcagaccaactttcccc

SEQ ID NO: 600683 - DNA, 90 bp, Homo sapiens
tggcggtgctggtgcagcgggttgtgaaggacatcactaacgccttcaggaggaacccacacatgggggacacagcgattgccacgcgcc

SEQ ID NO: 600684 - DNA, 110 bp, Homo sapiens
gctatacatgatgtcttcagccagtataaaaacacagctcgacagtacgcctacttctataaagtcatccaggtcgaacaagtaaaattacttgaccgattcagtaccag

SEQ ID NO: 600685 - DNA, 75 bp, Homo sapiens
ggcacggacgacagaagcgactttggtgagactctggatgctttggagtctgcaatgaagaatggcctgtggggt

SEQ ID NO: 600686 - DNA, 100 bp, Homo sapiens
agaaaattaagcctgtgactgaaaatttagtgctgtcttcacatactggattttgccaatcttcagacctgtcgcgaaatcgcctttcagaaattcctat

SEQ ID NO: 600687 - DNA, 101 bp, Homo sapiens
tcatcaaagacgtaatcaaagacggcaacgcgcttatcagcgctatgagaagttgcaaaagcttctcatttcagagagatgccaggatcctaagtgcctgc

SEQ ID NO: 600688 - DNA, 100 bp, Homo sapiens
gggagataactttcgtatcacaaaagcagatgctgctgaattctggagaaagttttttggagacaagtatgaggatacatgggctgcacttcacagaaga

SEQ ID NO: 600689 - DNA, 76 bp, Homo sapiens
tggagaaacgcaagtccatgtacacgcgagattataagaagcttgggttcattatgccgctcctacgaggactgct

SEQ ID NO: 600690 - DNA, 75 bp, Homo sapiens
tccttattcttctgatgtggatccaggcctgaggagcgatgcgacaggcatgatggaggtcgagtcctcctactc

SEQ ID NO: 600691 - DNA, 97 bp, Homo sapiens
tggggctggaggaggccggacccaaggagagcagtgaggaaggtagagttgttggcagaaatcctgggataagagaatagtttcctggaagatctgt

SEQ ID NO: 600692 - DNA, 90 bp, Homo sapiens
gcagcttgtgatgatgccaaacaagattatctccctccaaactctaaagaaggaatataaatcctatgaagccaagctccgccttctgag

SEQ ID NO: 600693 - DNA, 75 bp, Homo sapiens
aaaactgtgaaggaggctcatttgacaaagaccttgcctcatagtattcgatcagattcagaagatatctgttta

SEQ ID NO: 600694 - DNA, 100 bp, Homo sapiens
atgcgagggtatgtccaagacttgcttgagtgtttcagtgaaaagtatgttccagtaaaaggagaccatgtgattggcatagtgacagctaaatctggag

SEQ ID NO: 600695 - DNA, 98 bp, Homo sapiens
gaaaggtgccacagcagagacgcgaaggagaggccctagaacccaaatgccagatgttaatgtaagctgggatggagagggcccaaagcaactgccat

SEQ ID NO: 600696 - DNA, 101 bp, Homo sapiens
aagaagaaaccagggcagaagaagtctaaaaatggaagcgaccagcatctcagacatgtcgaaaaagatgttttgatccctaaaataatgagagaaaaggc

SEQ ID NO: 600697 - DNA, 75 bp, Homo sapiens
tgatggcgataagtcattaccacagctctaagcgaaagacatgaggcctcagcctgaaatgaggttgttttgagg

SEQ ID NO: 600698 - DNA, 90 bp, Homo sapiens
ggagttggtgctgggaaacccggggctaatgttgacaacaggctcgagggacaaagtggccttcatcacaggaggcggctctgggattgg

SEQ ID NO: 600699 - DNA, 82 bp, Homo sapiens
ccgccgctccttgggctacgcgtatgtgaacttccagcagccggcggacggtttggtgcacctcgatttggaggaagtaggg

SEQ ID NO: 600700 - DNA, 82 bp, Homo sapiens
ggaaattgcgctggaccgtcgccttgctcctcgccgcggcggggactgcagacttcccaagtaagaagcggaagaggagccg

SEQ ID NO: 600701 - DNA, 96 bp, Homo sapiens
tagaggaaaaaattgaaagagaaaaggaattagcagaagacattatgtcaggtacctactgtcaacaacgggaagtggaggccattactgaaggtg

SEQ ID NO: 600702 - DNA, 82 bp, Homo sapiens
ccagcgacccaccatggagacccgctacaacctgaagagtccggacagccctcagcgcctttttccaggagaccaacatccc

SEQ ID NO: 600703 - DNA, 80 bp, Homo sapiens
gtcgcgtctcggaaaccggtagcgcttgcagcatggatttaagtgccctgtatgctcaaaatttgtatcctcagatgaaa

SEQ ID NO: 600704 - DNA, 90 bp, Homo sapiens
gttggaacaaggagaaccactatggacactagaagatgaaatccacagtccagcccacccagggagcagctatgcattgggaagcaatgc

SEQ ID NO: 600705 - DNA, 90 bp, Homo sapiens
ccagcagatggcggatgccctgcagtacctgcagaaggtctctggagacatcttcagcaggattcggaaacttcagatacgaaatatccc

SEQ ID NO: 600706 - DNA, 101 bp, Homo sapiens
ggcggtggggctggagaacccgaagcacctcccggcgccgggacgcttcttctgtaagaatgattgatgttggctgatattggagtgctcattcacatgaa

SEQ ID NO: 600707 - DNA, 99 bp, Homo sapiens
gaagaacactttcaagaaccagaatgtcgtactctcaggaggctccaccatgttcagggatttcggacgccgactgcagagggatttgaagagagtggt

SEQ ID NO: 600708 - DNA, 74 bp, Homo sapiens
cagattcgcagtggtcgcttcttctccttggggatgttggaaattactattatggacaaggccacccaatgaag

SEQ ID NO: 600709 - DNA, 147 bp, Homo sapiens
cggggccagctccagcgctggctggagatggagcaatgggtggatgctcaagttcaggagctcttccagaaaatgtggacacagacttgccaggcagcctggggcagagtgaagagaagcccgtgcctgctgcgcctgtgcccagcc

SEQ ID NO: 600710 - DNA, 74 bp, Homo sapiens
gagcgggtgcgtctgccgcagagtcggcacctgaaggacatggaggattatggccactgcggtctgaccctaat

SEQ ID NO: 600711 - DNA, 87 bp, Homo sapiens
caaagccgggagatcgactgtttgagcccggaagcgcagaagctgctactctgacctacgacactctccggtttgctgagtttgaag

SEQ ID NO: 600712 - DNA, 100 bp, Homo sapiens
cgcgtccgccgattcctcctccttggtcgccgcgtccttggctggcgtgcatgtcgggccccaggcctgtggtgctgagcgggccttcgggagctgggaa

SEQ ID NO: 600713 - DNA, 90 bp, Homo sapiens
tccggctgcagggcggtaaggatttcaacatgcctctgacaatctctagtgtctcattcaggaacgtcgcctgataacactgcaccacca

SEQ ID NO: 600714 - DNA, 96 bp, Homo sapiens
ggaagtcgcctggtgtgaactgcagcttcaggatgagttagagaaaggtgaacgggacaatgcagaactgcaggagtttgccaacgccattcttca

SEQ ID NO: 600715 - DNA, 114 bp, Homo sapiens
ccggaggccactgtcttctcttcctcctccaccgagtcgtgctctcgccccaacccgcgcgccagacaatgcagatcttcgtgaagactctgactggtaagaccatcaccctcg

SEQ ID NO: 600716 - DNA, 100 bp, Homo sapiens
tgataaggaacaagatccgagcaataggcaaaatggccagagtgttctcagtgctcagcgagtgatagacagccaagcagagaaactgaaggagcttgac

SEQ ID NO: 600717 - DNA, 100 bp, Homo sapiens
ggaaaatggcggtgtctacagtgttctcgacttcgtcgctgaaactcccatcaagactgaagcagacgttttggcagaaaaccaggttcttgatagcagt

SEQ ID NO: 600718 - DNA, 82 bp, Homo sapiens
tggagcctcagttggaagcagccgatccagcctgcggagcctgtggggcaggatccctgctgccttggtgatcccgggctga

SEQ ID NO: 600719 - DNA, 98 bp, Homo sapiens
gcgcggagcccggctcccgcaccatggaggaggacgacagctacggaatgtttacccttgcggaagttgcatcacttaatgacattcagccaacttac

SEQ ID NO: 600720 - DNA, 100 bp, Homo sapiens
tccagccagagggggccgacactactgtgtcgagcataccagaaattcctgatgacctgaagcaactttataaaactgtgtgggaaatctctcagaaaac

SEQ ID NO: 600721 - DNA, 104 bp, Homo sapiens
cttgggccagaaggttctctggtggaggcgctcttcctggtgtcccgcccagtagacaatgcagatcttcgtgaagactctgactggtaagaccatcaccctcg

SEQ ID NO: 600722 - DNA, 133 bp, Homo sapiens
gaaagtggagatttggggacggcacccgatgaggccgtgagggccccactggactgggcgctgccgctttctgaggttttgacctgtagcagagaaccaattctggagaacagcctcacttctttgattgaat

SEQ ID NO: 600723 - DNA, 100 bp, Homo sapiens
gagaggtaccttgcacagtgacctctgcatctatatgtgcagcgggggctacagcgagtggggctagatccccagctgccactgaatctggctgcccttc

SEQ ID NO: 600724 - DNA, 95 bp, Homo sapiens
atttgtgcaatgtttagccaacccaaattaccttaattgccagctgcgggccgtccagcggctgtgccacttctacagcgccgtcatgcccagcg

SEQ ID NO: 600725 - DNA, 100 bp, Homo sapiens
ttccttctctaccttggtcattctctctctacttgggttcagccgtctgtatatctccccagatacctgaaactgaccacctgagtacgttttcccattg

SEQ ID NO: 600726 - DNA, 97 bp, Homo sapiens
gcatcaccagggtggctgtggacaaccagccccgagacatcggactgcaggtggctgagaacaacctgtgcagccagtatgaggagaaggtgcgccc

SEQ ID NO: 600727 - DNA, 82 bp, Homo sapiens
ggaagagccgggcagtccctggagcgggccaggatgggagtcccagcttctggagacggggttcctggggatcttcctgtgc

SEQ ID NO: 600728 - DNA, 83 bp, Homo sapiens
tacttcaaggataagggcgacagcaacagctctgccggctggaagcatcacaggacatggccccctcagccacctagctgggg

SEQ ID NO: 600729 - DNA, 100 bp, Homo sapiens
gtgctgggactcggcgagctcctccaggacttccagaagcagggcgtcgccctggcctttgtgggcctgcaggtctgcactgtgggagcgccctcttccg

SEQ ID NO: 600730 - DNA, 50 bp, Homo sapiens
ccgagcagcgtcatgtacccctgagacatggtctcaaagtaccgagaacc

SEQ ID NO: 600731 - DNA, 90 bp, Homo sapiens
gtctactaggtgactgtctcctggaaatgttatgcagctcagcaaggtgaaggtagaagaccatgatggagaaggtgatgtggctggaga

SEQ ID NO: 600732 - DNA, 59 bp, Homo sapiens
ttactgatttcatcaagttcgacactggttactggttggttcaccctggagtggctttc

SEQ ID NO: 600733 - DNA, 100 bp, Homo sapiens
aggagtcgcaggagcagccgcagtagatctcgaagtatctcaaaaagtcgctcccgctttgcccgaagtttttacatacaaattctactagtcacacctg

SEQ ID NO: 600734 - DNA, 82 bp, Homo sapiens
taggccgtctcgctctgggtctccaggcccgcgaccgtccgccagtcgtcccgaggacaggcatgttgttgggactggcggc

SEQ ID NO: 600735 - DNA, 98 bp, Homo sapiens
gcaatttgaagatacatgagacagcagccaaacccccaggggtttgccaacttgttaataagatggaggagaatactggcaaggttaagcctttcaac

SEQ ID NO: 600736 - DNA, 90 bp, Homo sapiens
cctagctatccagacagagcagctaccctcagctctagctgatactacagacagtacaacagagctgaactagagaaacatggttataag

SEQ ID NO: 600737 - DNA, 82 bp, Homo sapiens
tctcgcctcgggtctcgggggccgctctgggatcccggccaccagcaattgtccgtgtaaagaaagaatgaggcctgttaaa

SEQ ID NO: 600738 - DNA, 76 bp, Homo sapiens
gcgatcttaagcgcgcatctgtggaaacaattaaatgccttgtgaatacctctctttggatgcaatggaaaagtgg

SEQ ID NO: 600739 - DNA, 82 bp, Homo sapiens
aagaaagtttctcagaagtaaaatggacatacctaatactttccagagctggctttatgtgctggggcagaagagatccgat

SEQ ID NO: 600740 - DNA, 90 bp, Homo sapiens
ctctgagtacggtctcacagacaacgttgagatatgttccatttaaggctctgaagatggggagagaattctggatgatccaggtgggcc

SEQ ID NO: 600741 - DNA, 75 bp, Homo sapiens
tcagctccgagtcatcgcgtctctccacagagccatccagcgaggtttcggtggaacggcatgtctcgattggag

SEQ ID NO: 600742 - DNA, 82 bp, Homo sapiens
cgaggaggctttcctgctggtggcaaccgcctacgagacactcaaggtcctcgaggccacacgggttaatcgaagaaagagc

SEQ ID NO: 600743 - DNA, 75 bp, Homo sapiens
aaactgcgaataaaattcgagccaagttaaagggtatttgaaatatctcaccaaaaaatatttgaagaagaataa

SEQ ID NO: 600744 - DNA, 75 bp, Homo sapiens
cacaagtcatgaagccgacaagcccgggagacacagtgtcagaattacaagatggagtcatcagaacccactgtg

SEQ ID NO: 600745 - DNA, 100 bp, Homo sapiens
caagaaaaatgaaagacacagacagtgaagaagaaattagagaagcattccgtgtgtttgataaggatggctggctttgatggctcagcatgggatgagg

SEQ ID NO: 600746 - DNA, 90 bp, Homo sapiens
gaaggaagaggaaaaggacaagggagatgaggaggaggaaggagaagagaaacttgggttccccactgaaggacttggtccagctgtctg

SEQ ID NO: 600747 - DNA, 110 bp, Homo sapiens
atcttttggagctgctggatcaagtatcacttgaagatgcaataacagaacccagtgtgcagtggtggcaggtcctgatgtttttccagacccgtgtccaggaacctata

SEQ ID NO: 600748 - DNA, 100 bp, Homo sapiens
gtaactctcatcttttgcctggaccttgcatattttggacctgatggccaaaagaaaggaagaaaatttttcctctcctaaaaatgccaaaaggccaaga

SEQ ID NO: 600749 - DNA, 90 bp, Homo sapiens
cacgctgatggactgccgtagaccctttgtcatcctcttcaatcaagtattaaagaaacagtggaggcatatgaggcagcattaggggtg

SEQ ID NO: 600750 - DNA, 74 bp, Homo sapiens
gccttagctgtgctcgcgctactctctctttctggcctggaggctatccagctggaagtatgcgagacttaaga

SEQ ID NO: 600751 - DNA, 100 bp, Homo sapiens
ctgagtggttgtgtggtcgcgtctcggaaaccggtagcgcttgcagcatgctgtcacaagatgaaggtagaggcacattatacaaatacagacctgaaga

SEQ ID NO: 600752 - DNA, 100 bp, Homo sapiens
ggagactgtgccgtggagggcctcgccatgtcctgctgcccgctctgcttatgataatgtcaacaaagttcgagtagctatcaagaaaatcagccccttt

SEQ ID NO: 600753 - DNA, 100 bp, Homo sapiens
gccgtggtcggtggaggagatccgcaggagcagccagagctggtcgctggcggccgacgcgggcgcgttggagaccagggccagccctggccacacccca

SEQ ID NO: 600754 - DNA, 75 bp, Homo sapiens
cgagaactcggagggcaccggaggcatgggcaagaaggacgaccccaagctgatgcaggagtggttcaagctagt

SEQ ID NO: 600755 - DNA, 83 bp, Homo sapiens
caccaggaaaatgtccacactggacaggaagatgtcacccaagcgcatagctaaaagaaggtcccccccagcagatgccatcc

SEQ ID NO: 600756 - DNA, 83 bp, Homo sapiens
taccccggagacaagctctgtccgcggagaggagtgggacaactcctaaagatggtgttgaaactctggattctggatggctg

SEQ ID NO: 600757 - DNA, 75 bp, Homo sapiens
tctgccagaggatggcctattagaggtcggatcatgctaaaaggagataatattactctgctacaaagtgtctcc

SEQ ID NO: 600758 - DNA, 100 bp, Homo sapiens
tattgcacgacagactgcacagggcatggaagcaacaagatatggatttggatatagaatttgatgtacaccttggaatagctcatacccgttgggcaac

SEQ ID NO: 600759 - DNA, 74 bp, Homo sapiens
cgtatgagcagaacaagctcagcctcatcaacttcagttacagaatgtctgaaggggacagtgtgggagaatcc

SEQ ID NO: 600760 - DNA, 100 bp, Homo sapiens
atgagccccctgaggccccagaactatcttttcggatcagttccatgacaagaccccttatacgattatgtttggtccagataaatgtggagaggactat

SEQ ID NO: 600761 - DNA, 100 bp, Homo sapiens
tactcgttggccctggtcaccgtgctgaacgaggatgccggctccaggagcagcagtggaggtcgggaacgcctcattgtggagcccccgctccctcagg

SEQ ID NO: 600762 - DNA, 75 bp, Homo sapiens
cgctggcagccgcggatctcaccgccgctcaggagaggaggttcagatgagcccctgctgacttgagagagacag

SEQ ID NO: 600763 - DNA, 75 bp, Homo sapiens
ttcaaattggacttaagtctgaatttcggcagaatttaggtccttgaatgggcaagagggcacatgaagtacggc

SEQ ID NO: 600764 - DNA, 90 bp, Homo sapiens
tgacaaacgaaaagaatttcttaaaacctgtgttgggacagtcattttgtttactcattcagccctgttgcaggtcccaataaactcttc

SEQ ID NO: 600765 - DNA, 100 bp, Homo sapiens
tgcgctgctacagatgttaccacttctgtggctgctaccccactcctgggccgtccctgaaggggggacacagcgattgccacgcgccattggaatgtcc

SEQ ID NO: 600766 - DNA, 95 bp, Homo sapiens
ccccgctgctaactcggctacaacatttggcagagatttccattttgacagtgccagcagaggaaccaggaacttttgctgttcgggtcattgag

SEQ ID NO: 600767 - DNA, 101 bp, Homo sapiens
gcccgacgctccctgtctgggaccttctccctgcctggacccctactattgcaacaaggaggaggcaaaacagattcagaatctgcagaaagcaggcactc

SEQ ID NO: 600768 - DNA, 90 bp, Homo sapiens
aagaaccatttccaaacaaggacatggagggaaggcttcctaagcagccgactgaggcacatcatggccgagatgatcgccacagagagg

SEQ ID NO: 600769 - DNA, 100 bp, Homo sapiens
agatgagatttacctgtgagatgtttcatcccaacactcactgcaaatctaacttcatcatggtgaactaatttagagcatcctccagagctgaagcaga

SEQ ID NO: 600770 - DNA, 75 bp, Homo sapiens
caactgcagagccaggaaaactttgaagccttcatgaaggcaatcggcattgaacctggccacatcccaggtacc

SEQ ID NO: 600771 - DNA, 100 bp, Homo sapiens
ggtggactgcttgctcagctcagtatcaacacttatgggaccgacgtcatggttcggtgcctcaagctgctgaaggaatttaaacggaatgaccatgatg

SEQ ID NO: 600772 - DNA, 100 bp, Homo sapiens
ggagcaactggtgaggatgttaacccgagaagtcatggacctaatcaggctgtgggacagatgatgtctaccatgttctacccactggtcacctttgtcc

SEQ ID NO: 600773 - DNA, 96 bp, Homo sapiens
atcatcggacaacctcgacagagcccccctcggccctcgggagagcggcgggcatcaccgacctggctcttacctccctgaaaagcaaaggcctca

SEQ ID NO: 600774 - DNA, 75 bp, Homo sapiens
cacaaaccttcttggaaggccagaagattctcacatgcttaacactggaaatgatttgaaagaaaatgtcaaaag

SEQ ID NO: 600775 - DNA, 82 bp, Homo sapiens
gcccccccagggcccccgcaccaggatgttctcaggtgcccaaggaccaagtccttgacactgtctacctgttccatatgcc

SEQ ID NO: 600776 - DNA, 83 bp, Homo sapiens
gctgtgtcctgcaccgctcatgctcgcccggctttggggtcaagcagattgataagaatgtgccttttgatgaaagaacttta

SEQ ID NO: 600777 - DNA, 130 bp, Homo sapiens
gcggcctggagcgcaggagccggagacctggaggcccgggacaagcagcacaggcctggcagctgcgattcagccacctcgtggggtatggtgctagatattactcttacctcatgtccagagcggtcgc

SEQ ID NO: 600778 - DNA, 100 bp, Homo sapiens
gagatgcacacggcactcgagtgtgaggatgaccgagtgggagacagcagcaccagcggtggcagagaccccagacatcaagctctttgggaagtggagc

SEQ ID NO: 600779 - DNA, 99 bp, Homo sapiens
tattaaagggagcattccgatcatctgaggaacagcagatgcttgctctgtcaaggcacagcctattgtctcctttgctcagtgtgacatcattcagac

SEQ ID NO: 600780 - DNA, 83 bp, Homo sapiens
atggaactgtatgccagcagcttgttgtacagtccaggtcaagacctcgtctccgttctcatagtcgtagcagtgaaaggtcc

SEQ ID NO: 600781 - DNA, 100 bp, Homo sapiens
agtgcccttgtggcgaatggggctcacgtcgatttgcagtgttgatgtgggtatttacctatgttggtgccttgtttaatggtctgacactactgatttt

SEQ ID NO: 600782 - DNA, 84 bp, Homo sapiens
ccgagcgcaaggacagcgcgaggtccgcgcagcccagcgcagccatgtgagcatgggtttatgcgtcttaggcattattgtgat

SEQ ID NO: 600783 - DNA, 100 bp, Homo sapiens
gtcgccgcagcagccgagtctgacggcgccggttcgctgcccggtccgcccgcggtgagaggatctggagtgggagagcaggatgggggactgatcggtg

SEQ ID NO: 600784 - DNA, 75 bp, Homo sapiens
ctggacaggagattccagcttcaagaagtcatgatggagttccaggtaacagttaacctcttccacatgcagcat

SEQ ID NO: 600785 - DNA, 80 bp, Homo sapiens
ttcctatggtctagatattacttgtaaagaaaaaagggttgctcattttgggtatcactggagtctgatggaaagagata

SEQ ID NO: 600786 - DNA, 74 bp, Homo sapiens
ttctgaactcaggacttggcaatactatactggcaattgctggagaagattttgcaattgttgcttctgatact

SEQ ID NO: 600787 - DNA, 74 bp, Homo sapiens
caacgctgccggccctgggactccgaagctcggcccaggacccccaggccttggacaagattcgctatgagagc

SEQ ID NO: 600788 - DNA, 100 bp, Homo sapiens
gttcaagaagtggccggagagttctgcatgttgattcagatgaagcatctggtttttgttatctcaatgatgctgtcctgggaatattacgattgcgacg

SEQ ID NO: 600789 - DNA, 75 bp, Homo sapiens
gccaaaaccaatgaaggagttctttgtgtagttaagcttgtgagaagaatgagttgatgacatgctccataccag

SEQ ID NO: 600790 - DNA, 75 bp, Homo sapiens
tcgccaaactcttcattttctctacaacgactgaaagacctttcattcagaagctgtttcgtcctgtggctgcag

SEQ ID NO: 600791 - DNA, 73 bp, Homo sapiens
gggaagcaagaggcaaagagaatcggttgatatgtcttgtcgttcaagacttgcaacactaaacgagaaattg

SEQ ID NO: 600792 - DNA, 78 bp, Homo sapiens
aagtggtgaatcccctgtttgagaaaaggcctaagaattttggcattgatgaataatacggcagctagtccaatgtct

SEQ ID NO: 600793 - DNA, 100 bp, Homo sapiens
cacaatgatccttttgctcctggtggaacagttgttgcagcaagcgattcagacaagttggatggcttgaggactggtactaaaaggaaacgtgactggg

SEQ ID NO: 600794 - DNA, 82 bp, Homo sapiens
gccaaagaattgagctgaagcagggctacacatttttcatcccttccgggctgaaatctctttaatgatggagggaagcagg

SEQ ID NO: 600795 - DNA, 51 bp, Homo sapiens
cgacaagggtgttcccgaactagagtggggcggcgactggcggcgcgatgg

SEQ ID NO: 600796 - DNA, 50 bp, Homo sapiens
cgaatatcgtcatcgttagaaggatgaccatgaaagctgtggttctaatt

SEQ ID NO: 600797 - DNA, 90 bp, Homo sapiens
tgagaaacttaaaagatctggctcaccgaatagccagtggcgaagaggaatcggatggcataagtgattaaggtggtattgaggatttct

SEQ ID NO: 600798 - DNA, 51 bp, Homo sapiens
ggccctgccctgggctggaacgaccctgctcaaattgaaattattccatgc

SEQ ID NO: 600799 - DNA, 99 bp, Homo sapiens
ctgaggagccggcggccgccgaggcagctggggcgccagaccgcggggcagatgatgatctatgcgaagtttgacaaaaatgtgtatcttcctgaagat

SEQ ID NO: 600800 - DNA, 93 bp, Homo sapiens
gagaaactccacctctgtgaagagaaagcaaagtcctattccaacagtcatgagtgtgaagcttattcatgaagagacctctgcctgaacata

SEQ ID NO: 600801 - DNA, 90 bp, Homo sapiens
ttggtttggaaaaatttcattagagcgtttatgtcatggttggtgcagatgtcccgttttcttcttgtttacgagaagttgaaaatccac

SEQ ID NO: 600802 - DNA, 90 bp, Homo sapiens
ctaatactttacttgtgaatgaagattcattatgaggctaatagctcgtcagcttgctaaaatccatgctattcatgcacacaatggctg

SEQ ID NO: 600803 - DNA, 82 bp, Homo sapiens
ctccactccgtcccccgcgggtctgctctgtgtgccatggacgggtgatgtgtccaatctagatcccaacttctcatttgaa

SEQ ID NO: 600804 - DNA, 75 bp, Homo sapiens
cgttcgccaccaattatgggagggctggccaacttctgctacagacgactcagctctggaagaggatctgaacca

SEQ ID NO: 600805 - DNA, 76 bp, Homo sapiens
tctctgtaattggaaacacaatcagaagagaagctgaatttggacgacagccagtgggaggacatccacgttgtca

SEQ ID NO: 600806 - DNA, 80 bp, Homo sapiens
accaaggtcctgaggtctaagagcttactcaatgagattgagagtatctatgatgagcccgagacagtgatggagctgag

SEQ ID NO: 600807 - DNA, 89 bp, Homo sapiens
ccgagaacgcctccagcggggatgacacagaagttactgtaaaatggggaaaggagaaatttgaaggtgtagaattgaatacagatgaa

SEQ ID NO: 600808 - DNA, 87 bp, Homo sapiens
gctcaacaagaatcactcggagggcggcggagtgatcgtcaataacaccgagagggactgccaaaaagagcaagatcctgtccaagg

SEQ ID NO: 600809 - DNA, 55 bp, Homo sapiens
cctcggtcgagcatgttcaccagggcccagagccgatgcacctgcaagctgggct

SEQ ID NO: 600810 - DNA, 98 bp, Homo sapiens
cgcgggtctgtcatcatgtcgcgttacgggcggtacggaggaggtttgatctgtggatgaaatgaatcatgattttcaagctcttgcattagaatctc

SEQ ID NO: 600811 - DNA, 100 bp, Homo sapiens
attaaacttgtccagataaaaattctcctgagaatgatattcctatggagatcaccacggcagaaccacaggtttccgaggcagtatatgactgtgttat

SEQ ID NO: 600812 - DNA, 117 bp, Homo sapiens
cagtgcctgtgcattgctgccactacacagctagtatcatgacagcagcttcagaaccagagctggcttccagcttagaccatgctcagcctccaagcagccttgtcatcgacaaag

SEQ ID NO: 600813 - DNA, 95 bp, Homo sapiens
gaaaatgaatgccaaatgggacacggtaacagtacttcaatttctaccttaaggacttcctgtctactgggttgtgcagtaatgcaagataaccc

SEQ ID NO: 600814 - DNA, 144 bp, Homo sapiens
ccgagcctcgctggcggatgctctacctctgcacatcgcacccaggtggttcagctcgcatagtgtgatggctcatgaagcaatggaatatgatgttcaggtgcagttaaatcatgccgaacaacagccagctcctgctggcat

SEQ ID NO: 600815 - DNA, 100 bp, Homo sapiens
ctgcgttcaagtcggccaagcacaggcccgaggatgtcgtccagttcttggtagtaaacctattgatggcaattttgctgactgtggaagtgactcatcc

SEQ ID NO: 600816 - DNA, 51 bp, Homo sapiens
gtggccggcctgacaacacagggcgtggattgaaactgcttctgccttggc

SEQ ID NO: 600817 - DNA, 100 bp, Homo sapiens
tggggatgcaggatgtccatttcaacgaggactatacaggctccaacccaagttccagtggttgtgtctcctaggaatcagcagttgcatacagtaacac

SEQ ID NO: 600818 - DNA, 75 bp, Homo sapiens
gaagactggatgggctcttcggtggatcctccatgttttggacaaaattgagaggatccagaatccagatctctg

SEQ ID NO: 600819 - DNA, 100 bp, Homo sapiens
ccaagaaccaaccctgccagcacctggaccttggacattcagacttcagaatggatactgctattgttcatccagttcccattcgtatgactccaagcaa

SEQ ID NO: 600820 - DNA, 83 bp, Homo sapiens
gtccgagccagccgctgttttgccggaggagcccctcaggccaagctccaccatgaggcgaggtggatggaggaagcgagctg

SEQ ID NO: 600821 - DNA, 83 bp, Homo sapiens
agagaatgcagttgtcttgacttcaggtgagccccaggtgtatcccagagggatccgggtgacttctctgcagactgtttgcc

SEQ ID NO: 600822 - DNA, 98 bp, Homo sapiens
tctgcttcatttctctgcagcaagaggaaaggaaagatgtgttcgggtttttctagaacacggaggtcctaggcctacttacaagcctccagtctcaa

SEQ ID NO: 600823 - DNA, 82 bp, Homo sapiens
tgcccgaggaggcagccaagctcatggcctgccactgcgtgcactctgagatttgcccacctgatgaccttgccagcttgcc

SEQ ID NO: 600824 - DNA, 83 bp, Homo sapiens
ctcttcctcccttcgctcgcaccatgagacaaattaaatgccttacgaagacataaggaaaagctggaagaaaaaatcatgga

SEQ ID NO: 600825 - DNA, 75 bp, Homo sapiens
agttggaattgaagaatattcccaagtccttcacccggacaccaatgggaatcccaatggggaagtcgatgctgg

SEQ ID NO: 600826 - DNA, 83 bp, Homo sapiens
caacaccgttcccccagccgggctggtgatgtgtccaatctagatcccaacttctcatttgaaggcaccaaactggatgtggg

SEQ ID NO: 600827 - DNA, 75 bp, Homo sapiens
ccgcacctcggggacattattgcgcgtggaacggctgcttttggaagatgagaccctttttgctcttcctgctgc

SEQ ID NO: 600828 - DNA, 113 bp, Homo sapiens
cgggagtcgtagggaggacgccgggacacctggaagccgagaaatgccgcttacaaacacgcagatggcaagaagattgatggcaggagggtccttgtggacgtggagagggg

SEQ ID NO: 600829 - DNA, 90 bp, Homo sapiens
ttgacgcgctggagcttgagagcccattccagatgatgggatttattggcaggccaaccttgacagattccaccaacacttccgtgacca

SEQ ID NO: 600830 - DNA, 100 bp, Homo sapiens
ggcgtcgccatggatgtggaacggagtcgcttcccctactgcgtggtgtggacgcccatcccggtgctcacttgctctaggtcgtaaccagcctttgaaa

SEQ ID NO: 600831 - DNA, 82 bp, Homo sapiens
aagccggactacaaggtcgcctacgtgcagctgggcgtctctggccgagcctctttttgtggaaaacgacagcagcagcagt

SEQ ID NO: 600832 - DNA, 74 bp, Homo sapiens
tttctatgcccctctatgcagtcatgtatcctgtgtttaatgaggagttggtccaggtagcaatgatgagaccc

SEQ ID NO: 600833 - DNA, 100 bp, Homo sapiens
ctgggcgagtagactgagggccccaacttcgacagaggccaatcacatccgtcttgccacttgcctagtgaggcttttccgaacctggaaggagacgtct

SEQ ID NO: 600834 - DNA, 99 bp, Homo sapiens
aaaacacggaagaggaagaggaaagcaaaggagtcagggatggctcttcttcaggtggagccgccaccaaaatgcagattttcgtgaaaacccttacgg

SEQ ID NO: 600835 - DNA, 98 bp, Homo sapiens
ctaccaaatgttccctctatagccctaccatcaaaacccgcccccacgcacacattactccaacattgaggccaacgagagtgaggaggtccggcagt

SEQ ID NO: 600836 - DNA, 82 bp, Homo sapiens
aaaggactcagcagatgcttcatggtcttcagtgccctctggtggtcagaagatgctgtgctgtctcgttaggatgaatgga

SEQ ID NO: 600837 - DNA, 98 bp, Homo sapiens
cggagacccgacagaggctgctacgcaccgtcaagaaggagatatttctccctcgagtggctgggaaacttggcaagagaccagaggacccaaatgca

SEQ ID NO: 600838 - DNA, 82 bp, Homo sapiens
tcacttccagccagctgtgaagaaggtctgtcgagttgcttatgaaattatgcaaacactacatcctgatgcctctgcaaac

SEQ ID NO: 600839 - DNA, 90 bp, Homo sapiens
aacagtttggcgtgcaacatggggcttgagaaagggaagaaggtagataatgactataatgcccttcgagaaagactcagcaccttgcct

SEQ ID NO: 600840 - DNA, 90 bp, Homo sapiens
gaccgagagcgcgaatatcgtcatcgttagaagaaccacgaccatgcctgcatcgcctgtcggatcatctatcggtcagacgagcaccac

SEQ ID NO: 600841 - DNA, 82 bp, Homo sapiens
tgtggcgatggtcttcctgctggggctcatgtttgagggtgatcagcccatgacctaaacctccagacaaaataaaacggaa

SEQ ID NO: 600842 - DNA, 55 bp, Homo sapiens
caggggccactcagagtcgcccgagaaggagtgcatccgccccaacccttttccc

SEQ ID NO: 600843 - DNA, 83 bp, Homo sapiens
ggcactgttgcctatcagaagtcaattcaaaggacctgcccccagagagagggttgcagatggtgtaggaggctggagagact

SEQ ID NO: 600844 - DNA, 75 bp, Homo sapiens
cgcgggaagatggcggcgccgctcatccccctctcccagcagatgctgttgatggagtaatgaatggtgaatact

SEQ ID NO: 600845 - DNA, 51 bp, Homo sapiens
ttaaggattccaagtaactcttatttgcctttccgctgtgcccattgccat

SEQ ID NO: 600846 - DNA, 100 bp, Homo sapiens
agaaactgtgggtcctttactcggtcagatgtcatgtaatccttcctttggtggcatcggaaagggacatttaatgagggaagtagatgccttggatggc

SEQ ID NO: 600847 - DNA, 110 bp, Homo sapiens
atgcttttatagacgacgtgatatttccaacacacttataatgctcgcagataagcatgctagtgatctgtgaaaatggttcgctattcacttgacccggagaaccccac

SEQ ID NO: 600848 - DNA, 98 bp, Homo sapiens
ccggccggtgccagcacctttcggcttctgagacggcggcagcagcggcattcaggtcacaagaggaccagattaaaaatgctattgataaacttttt

SEQ ID NO: 600849 - DNA, 50 bp, Homo sapiens
gcaagatggcagccaccacgggctcggtagaggcggggtttcaccgtgtt

SEQ ID NO: 600850 - DNA, 83 bp, Homo sapiens
gtgctgtaaccacctcacagattccagcttcggaacaagagaccctggtgtggtggacacaggcctattcatcaacatggctg

SEQ ID NO: 600851 - DNA, 100 bp, Homo sapiens
agctggaggtggacgccatcgtcaacgccgatgtgaagttcatttccaatccgccctccatggtggcagcggggagcgtggtggccgcagtgcaaggcct

SEQ ID NO: 600852 - DNA, 82 bp, Homo sapiens
gggacacgcggttcttctccagcgccctggcctccctcaccttggacacctcgcttggctcaccatggatgatgatatcgcc

SEQ ID NO: 600853 - DNA, 82 bp, Homo sapiens
ggacattattgcgcgtggaacggctgcttttggaagcggagctggagtttgttcagatcatcatcatcgtggtggtgatgat

SEQ ID NO: 600854 - DNA, 49 bp, Homo sapiens
tgagatggcagccgtgatgtcacagatggagcttcactcttgttgccca

SEQ ID NO: 600855 - DNA, 98 bp, Homo sapiens
cgcagaggccaggatctcctttaacctgggggcagccctgttcacagagacaccccatgacatgacagcacggacgggcgaggacgtggagatggcct

SEQ ID NO: 600856 - DNA, 100 bp, Homo sapiens
gtccatctatggtccgagagtttgtaatgcaagaagctcagcagagtgatgacgggttccaatttcatctgctgttgcaggcgtagcaataggattggtc

SEQ ID NO: 600857 - DNA, 100 bp, Homo sapiens
tccactgtaagggtgtcaggatctgaagagctatggtgaaacaccactgaagcattgccaagaaccttctgataacttaagagagattctccaaaatgtg

SEQ ID NO: 600858 - DNA, 100 bp, Homo sapiens
cgagccgacgggcgagtgaggggcgcagccatgatcacctcggccggtacttccgaagatcccagtttacagcgatcagtttcggttgcaacgggactga

SEQ ID NO: 600859 - DNA, 80 bp, Homo sapiens
gaaacacctgaagcatcactgtaacaaccatgacagttgaaaaagcaagtccagtgggtgatggaaatttccggaatcgt

SEQ ID NO: 600860 - DNA, 99 bp, Homo sapiens
tgtctacggatgaggaaactgaggcctggagaggttaaagagacccgttcagagtcctacagtggcagtcaagctgtattagtcgacaggaccatttac

SEQ ID NO: 600861 - DNA, 50 bp, Homo sapiens
cgcagctctggttcctgttgcggccgatttgaggcttaagcaacttcttc

SEQ ID NO: 600862 - DNA, 83 bp, Homo sapiens
ggggagctgaacgtggacagcctcatcacccggctgctggaggtttccagagtgtggattctttggcatgtatgacaaaattc

SEQ ID NO: 600863 - DNA, 90 bp, Homo sapiens
gcaagcagagggcagccattgaacgggagtatgggcaggagctgtatgcggccggggagaaccgcctgggaacagacgagtccaagttca

SEQ ID NO: 600864 - DNA, 95 bp, Homo sapiens
cggccatgtcactgctctgcgtgcgcggcgcatattaaatttcctattgactacccctattcaccacctaccttcagattcttgaccaaaatgtg

SEQ ID NO: 600865 - DNA, 75 bp, Homo sapiens
tctggaggacgccaaagaaggctacagaacacttaaggagttccgtgatcgaccgaaaggacttaataatcaaaa

SEQ ID NO: 600866 - DNA, 100 bp, Homo sapiens
agaaactgaaggggtgaaagaaaacccaagcttctcacctggggcgggtgggttctgcaccaccctcccaccctccttcctccgtgtggacgatagagcc

SEQ ID NO: 600867 - DNA, 82 bp, Homo sapiens
aatccactcaccggagagatgtcgagtgacatctatgtgaagagcgaagacaacgtcccggaccccaaggatgtgaaggaga

SEQ ID NO: 600868 - DNA, 96 bp, Homo sapiens
ccgccctaaccacactatttatatcaacaacctcaatgagaagatcaagaaggatggtctccaccagctcctggccgggttcgaggacaagtcagc

SEQ ID NO: 600869 - DNA, 75 bp, Homo sapiens
ccacacaggagatccaggtcaccagcatccactggagctacaagaggaaacaaaggacccatcgcaaatgttttc

SEQ ID NO: 600870 - DNA, 83 bp, Homo sapiens
ccgggactccctgtgccttgcttggagctgacgccgacgggttatggaggttttgatgactatggtggctataataattacgg

SEQ ID NO: 600871 - DNA, 98 bp, Homo sapiens
tccaatcttttacaaagcatgggagtgcagctgcctgacaacaccgatcacagaccaacaaatctgactgcagccatgagcagcaatgagtgcttcaa

SEQ ID NO: 600872 - DNA, 83 bp, Homo sapiens
gtgctgcggagcgacgcggcctgggaggataaggttaaacactttaagatgagaaaaattgatctctgtctgagctctgaagg

SEQ ID NO: 600873 - DNA, 100 bp, Homo sapiens
aaatagattttcatttgcatgtcctacggagaaaaggagaacatcgtatgagcaatatccagattattatgcaataattaaggagcctatagatctcaag

SEQ ID NO: 600874 - DNA, 128 bp, Homo sapiens
cgcaaagcggggacccagaccctggagcctcagttggaagcagccgatccagcctgcggagcctgtggggcagtatacgctcaacggcaagaaagtggaagttgccgtcaaacagatcatcgctggaa

SEQ ID NO: 600875 - DNA, 90 bp, Homo sapiens
catggccgagaaggactcgctcgacccgtccttcactcacgccatgcagctgctgacggcagaatttggaggttttggttcagttagtgg

SEQ ID NO: 600876 - DNA, 100 bp, Homo sapiens
gttggcgacgtccctgggcgcgtcagaacaggcgctgcggctgatcatctccatcttcctggggggactcccccaggtctggtagcccaaagctgctgct

SEQ ID NO: 600877 - DNA, 75 bp, Homo sapiens
ccgccatctcagaatccacacggtggtctaccatcacggcaacagtgcgacgggcggccattacactacagacgt

SEQ ID NO: 600878 - DNA, 75 bp, Homo sapiens
caaactccgaagtttgtaccttcatcaaggcttctgcttcagtttacccaacctcagcaaacatcgtttgctttg

SEQ ID NO: 600879 - DNA, 100 bp, Homo sapiens
tccgtttgttcaggaaccaccagtgacagagccagaagcctgtcttagatgttcatgcagaactagacagaattacacgaaaaccagttacagtttctcc

SEQ ID NO: 600880 - DNA, 50 bp, Homo sapiens
tccaattcgggttgtcaatgcattgcaggaaacagagcaaatgcagcgtt

SEQ ID NO: 600881 - DNA, 82 bp, Homo sapiens
tcaaacttggacagctctctatggaactgtggctgcaccatctgtcttcatcttcccgccatctgatgagcagttgaaatct

SEQ ID NO: 600882 - DNA, 51 bp, Homo sapiens
gctctacgtgaagctgctcatccaggacagagcgggatgccaccagcttgt

SEQ ID NO: 600883 - DNA, 75 bp, Homo sapiens
cagaacaacatctttgagattggagtcccgcgtgtgcacaggcagctccactcggcacatcgtgacctttgatgg

SEQ ID NO: 600884 - DNA, 90 bp, Homo sapiens
gagctgagcctgccacgccgaggacgtggggagtgcatccgccccaacccttttccccctcgtctcctgtgagaattccccgtcggatac

SEQ ID NO: 600885 - DNA, 100 bp, Homo sapiens
gggaggactacagccgccaccgctccgaccacaagatcaaccacctgggctgcctggtcttcagcaggcctgagaactgggaggaagctggagaaaagat

SEQ ID NO: 600886 - DNA, 97 bp, Homo sapiens
agaccccctcgtgcatggcaagcctctggacagctcctctcgtcatgagaactacaaacctttatgaatacttcaatgctgtgctgataaatgaaag

SEQ ID NO: 600887 - DNA, 73 bp, Homo sapiens
agcgttacaaggccttctacattaccggctgctatccatgtccagggccaaacatgaatcctattgctcttgg

SEQ ID NO: 600888 - DNA, 100 bp, Homo sapiens
gacgcggaactggtgtaccctggtggacgtgcacccagaggaccaggcggcggcatcattcttaacaaagaagttaaatattggtgggaaaagagtaaac

SEQ ID NO: 600889 - DNA, 75 bp, Homo sapiens
caacaccacgacaatccagtttcctgctaatttgcagcttcctccagctcgaattacatctttacaagaggaggt

SEQ ID NO: 600890 - DNA, 75 bp, Homo sapiens
agaatggaacaaaccttacctttattggagacaaaaccgagaaagaccatttatctgcgaattatgtggaaattc

SEQ ID NO: 600891 - DNA, 58 bp, Homo sapiens
ccacaaagggacctgatgaagcgaagatcaaggagtccaagattgatctccttgatcg

SEQ ID NO: 600892 - DNA, 75 bp, Homo sapiens
ggagtgcagaggcatcacctgaaagacagccattgatatcctgacaacagtagtacgaaatacaaagcctcccct

SEQ ID NO: 600893 - DNA, 118 bp, Homo sapiens
aaaaaagagaggatttgcttttgtaacttttgatgatcatgatacagttgataaaattgttggagtcagtggatcggtggggaaaatgctgcttaccctgggccctgggctgtagaaa

SEQ ID NO: 600894 - DNA, 100 bp, Homo sapiens
tgggaggccagttaaatgtctctgacttaattcagtgcacaaatgagatgaatgtgaacatcccacagttggcagacagtttatttgaaagaactactaa

SEQ ID NO: 600895 - DNA, 100 bp, Homo sapiens
ccgggaaaagtggcactgaggctctggaacttctgcccagctctccttggtgacacagtggtcttgtccctgaagaagttcctgaagcaggatacatatg

SEQ ID NO: 600896 - DNA, 98 bp, Homo sapiens
caaagggccctgggcctctaggtcctggcgccccgcccccactgctgtttctcaataagcaaaaagctcttttgaaacagatggtcaccatgtttaga

SEQ ID NO: 600897 - DNA, 75 bp, Homo sapiens
tcggtcatccacctgctgcagatggggcaggtgtggagatgcaggacagctggagcacacattgatgaatcattg

SEQ ID NO: 600898 - DNA, 100 bp, Homo sapiens
catcagtgcccttgtggcgaatggggctcacgtcgattggttgaatctggcgatgtggaacccatggatatggagggctgactatatacaccatgttttt

SEQ ID NO: 600899 - DNA, 90 bp, Homo sapiens
agtgacatcttctgggatttagtctggtcttttgccaactcctattactcagcaagccagtttgacatctctggcacagggaactggaac

SEQ ID NO: 600900 - DNA, 75 bp, Homo sapiens
cccaggatgagcagctatccaagtcaagcgatatgagtctcatccagtctgtgctgatctgcaggccaaaattct

SEQ ID NO: 600901 - DNA, 90 bp, Homo sapiens
gaagtacatggccggcctgaatctccatccgcacccgggcgagaaccactgtctctgatcaacgtgcggaagaggaacgtggaatctggg

SEQ ID NO: 600902 - DNA, 96 bp, Homo sapiens
ggcaaaaatcccatctaccgcaactctcagttcgagagtaaaggtcttgacccctgaatttaagaaattcttaaagacaatgtcaaatatgatcca

SEQ ID NO: 600903 - DNA, 90 bp, Homo sapiens
ctacttcgagttcttcgccgccgacctgagttggcaggatcttgtggccagtggggtagtggagtatattgataccctggaagaagaaac

SEQ ID NO: 600904 - DNA, 83 bp, Homo sapiens
agcgaagagcaggcggaggaacaaaggcgacccaagacacccagagagggacaggaacatcgtcttgagcaatcccaagaaga

SEQ ID NO: 600905 - DNA, 100 bp, Homo sapiens
atgtgtccttccccctggagctggacatgacccctttcatggcctccagggtgtccgcaatgttgccagtgtctgtctgcagattggctacccaactgtt

SEQ ID NO: 600906 - DNA, 75 bp, Homo sapiens
accaacaacaccacaataatccacagccaaggtaaatattgggaagatggattcacccattgaaaagtggaacct

SEQ ID NO: 600907 - DNA, 80 bp, Homo sapiens
cacagatcggaacggaggcctgtgtccagaagcactggaaatccatggatcattcacatggcttggacaaacacagtata

SEQ ID NO: 600908 - DNA, 75 bp, Homo sapiens
ccgcgacgacgagtacgactacctctttaaagtttgctgctttgtggtgcacaagcggtgccatgaatttgtcac

SEQ ID NO: 600909 - DNA, 97 bp, Homo sapiens
cctcattcgggtggagctgagccggagacaggaaacctgtccagtttaagtcgtcttggtctgagatataacagactgtcagcaatacccagatcat

SEQ ID NO: 600910 - DNA, 100 bp, Homo sapiens
gcggccggcaagagcggcggtagcgcaggggagattacttttctggaagagctctcgatgttctgaagtatgaggaagttgacatggattcattagccaa

SEQ ID NO: 600911 - DNA, 96 bp, Homo sapiens
ccctcctcgaactgctgagggagctgtcaatctcatctcaaggtggctttctagaagatgaccatagaggaccttccagattttccattagaagga

SEQ ID NO: 600912 - DNA, 82 bp, Homo sapiens
gcgtggcgcgggccgccgtttccgcaaacagaatcgcgtttggctgtgctgagcggttctggtgaggttggaaggatgcagc

SEQ ID NO: 600913 - DNA, 89 bp, Homo sapiens
ccctgatctaagcccttatcatctgcttgaatcacttgtccatgaaactgggaggcgaccgtgttagctgccagttcctgacagccacc

SEQ ID NO: 600914 - DNA, 74 bp, Homo sapiens
attttagggtcctttatatagaagggagagtagagagcccgagcccagcacattgtgccctgtactatatctca

SEQ ID NO: 600915 - DNA, 82 bp, Homo sapiens
atcacatcctgcccaagtgcaagctggccagggacctcaaggaagcttatgacagggacacttgacattcagggacgtggcc

SEQ ID NO: 600916 - DNA, 110 bp, Homo sapiens
ggcaagggcggcgaggctccggccaacgggctgcgcagagccgcggcgccggaggttttgacacaagggcgcatatcttcaaagcacctagtacctcctaccattgtcaa

SEQ ID NO: 600917 - DNA, 75 bp, Homo sapiens
tgttgccaacattcgtaaggtccattcctgatggctctgatgcatcatcccattcagatgaaacctgcagatagt

SEQ ID NO: 600918 - DNA, 76 bp, Homo sapiens
gggttacaaaaatccagaccagctgtgaagacaagtaaatctacattgggtcaaacagattttccaggtaagcaag

SEQ ID NO: 600919 - DNA, 98 bp, Homo sapiens
tgggagcacatccatttcattggcaaggttctccggcgcttggcaaccaaatggggctacagagaagcatctaagccagttcacagagcgagcgtgtg

SEQ ID NO: 600920 - DNA, 100 bp, Homo sapiens
catggcactagaagaacgcttagcccaggctatggagatttacagccagttacttactcagaacctgcattttggtgttcgatagcatattatgaattaa

SEQ ID NO: 600921 - DNA, 82 bp, Homo sapiens
gtgctgcagaggacacgaggcggcgggctggagacatggaccgcggcgagcaagtcctattttgtaacggattatgatccaa

SEQ ID NO: 600922 - DNA, 75 bp, Homo sapiens
cggcagtcatctcgcggccgttcaggtggctttctagaagatgaccatagaggaccttccagattttccattaga

SEQ ID NO: 600923 - DNA, 83 bp, Homo sapiens
gagttatcttctggaaatgagtcttcaagctctgtaagacatgttgatgataattagaagcatgctttccactgaacttcccg

SEQ ID NO: 600924 - DNA, 95 bp, Homo sapiens
tcggagaagatgtggtggcttccgtttgttggtggaggaggtggcaggcctcggcgaatatttcttccccagaaagttctccagaaataaagaga

SEQ ID NO: 600925 - DNA, 122 bp, Homo sapiens
gggctagtggtcctctggtcttccctgaccccgcggccggacgacccaagcccgctgagcaggatgaggggcaccatgccggtggaaaggatgcgcatgcgcccgtggctggaggagcagat

SEQ ID NO: 600926 - DNA, 83 bp, Homo sapiens
cttgtttgtggatcgctgtgatcgtcacttgaatgtcatacccaggctatcccccaacaggctacccacctttccctggatat

SEQ ID NO: 600927 - DNA, 74 bp, Homo sapiens
ttgccttgaaggacaagaacagcgccgtcaccagcaggctccttcgagagcagtggatccgggccaagtacgag

SEQ ID NO: 600928 - DNA, 96 bp, Homo sapiens
gcccgggtggcagagttgccaaccccagagctgccgagcaaggatgcctgagaacagttaaatctcacacagaaacagatgagaaacaaacagaga

SEQ ID NO: 600929 - DNA, 82 bp, Homo sapiens
ggaaaacagagaaagaagtgataggagggctctgtaggccgccatggcatcagatgaaggcaaactttttgttggagggctg

SEQ ID NO: 600930 - DNA, 90 bp, Homo sapiens
tttgcaattcagtgcagtaggatactgaaactgacattatttgggctgttgataatcaggtgtatgtggccacagcctctcctgcccggg

SEQ ID NO: 600931 - DNA, 75 bp, Homo sapiens
atgtgaagagtccccgatgtttgtagaccttatggctatggaacacacctgatgaatcatttgaaagaatatcac

SEQ ID NO: 600932 - DNA, 100 bp, Homo sapiens
aaaatccagatgctggatgacacccaggaggcatttgaagttccagtaaatgtgaatgtggcaaatgcacctgctatcctccaggagatcgccgggtgta

SEQ ID NO: 600933 - DNA, 100 bp, Homo sapiens
cccaaatcggaagtgaattcggattgtttgctggacttaaccaccaccatgtcgagcaaaagaacaaagaccaagaccaagaagcgccctcagcgtgcaa

SEQ ID NO: 600934 - DNA, 100 bp, Homo sapiens
ttccaggcacccagcaacggcggcctccaggcctcaggccccctcaccatcctagaggtcaagatcagctctggctagtgtatccaaagtgtgtacatca

SEQ ID NO: 600935 - DNA, 50 bp, Homo sapiens
cttcccggacaggattgacgaggagctcgaggagcagcacggcatccact

SEQ ID NO: 600936 - DNA, 100 bp, Homo sapiens
gagacagaagcagccatggaaaaattaatcaacagagtgggacctaatggtgagaggaaacttttgagaagaactttgaaagagaaacccataaaataag

SEQ ID NO: 600937 - DNA, 90 bp, Homo sapiens
ctgaagaggagctgaccaccacactaaagagtgaagtcaccctgctgagaaatgaagtggcacagctgaaacagcttcttctggctcata

SEQ ID NO: 600938 - DNA, 99 bp, Homo sapiens
cggcagagcacgagcggatcctgcgagagatcgagagcactgacacggcctgcatcgggcccacgctcagatgccttcaattaagttgcagagttctga

SEQ ID NO: 600939 - DNA, 100 bp, Homo sapiens
gaaaactagagctgaaacaatgggacccatgggttgaggaaatactatgtgaagtatgccggaaaacatttaaacgcaaagattaccttaagcaacacat

SEQ ID NO: 600940 - DNA, 100 bp, Homo sapiens
cacacatctctctggaggagccccttggggccagcacccaggttgtcccaccagacccaggcacccccctgcctccagaccccacagccccgagcccagg

SEQ ID NO: 600941 - DNA, 82 bp, Homo sapiens
taaggaagtaaaatggcggacctggcgaacgaagcagtggtctcggaaagagggtcgtggtcccgcacggatgcgcttgttg

SEQ ID NO: 600942 - DNA, 100 bp, Homo sapiens
aagatggcagccaccacgggctcgggtgaatggaagagaatccgaagaagaaaatctcaataaatctgaaataagtcaagtgtttgagattgcacttaaa

SEQ ID NO: 600943 - DNA, 100 bp, Homo sapiens
ggggatggctataatggatttggtaatgatgaaatatgagattacggagcagcgcaagattgatcagaaagctgtggactcacaaattttaccaaaaatc

SEQ ID NO: 600944 - DNA, 49 bp, Homo sapiens
aaggattccaagtaactcttatttgctctattaccaggttttaaacttc

SEQ ID NO: 600945 - DNA, 51 bp, Homo sapiens
gaaaaggaacgggagctgagaggcttgcattgatgacaatgttgatatggt

SEQ ID NO: 600946 - DNA, 89 bp, Homo sapiens
agtgagtagcttggttggtggtaccctaaaattagggcatgattaagattctactctgctactcaagtagtggtcactatgattctgtg

SEQ ID NO: 600947 - DNA, 98 bp, Homo sapiens
ttaaagcagccggtgtaaatgttgagcctttttggcctggcttgtttgcaaagtaattataaagtggactgtgcctgtcacaagggaaaccggaattg

SEQ ID NO: 600948 - DNA, 100 bp, Homo sapiens
caaatgaaaagattgaagacatcaatggctgtccgaagaacagatcccaaatggattttttatcaagcagaaatgcatcgaacaacgagaatcaagatca

SEQ ID NO: 600949 - DNA, 75 bp, Homo sapiens
ttgaggaagaacgcgccagagcaaaatgggacacaggtggggtctggagcttatgaacaagttgtgatcaaacgc

SEQ ID NO: 600950 - DNA, 75 bp, Homo sapiens
tcaccgacctcatcagtgagctgtccctgctggaggagcgcttccggcatgatgctcctgttaaaaccatccatt

SEQ ID NO: 600951 - DNA, 101 bp, Homo sapiens
tggccctctgtctgcctgtgtccctgaccatggctccctgcagtaccctttaacgagaaatggtcaatgcatggtttgctgagagagttcacaccatccct

SEQ ID NO: 600952 - DNA, 97 bp, Homo sapiens
gcggcggcgaaggaggaggcaagaggcgattcctcttctcctgtaaatgaccacagaggaagacaatgaatgaggtgaaagaatcccttcgcagcat

SEQ ID NO: 600953 - DNA, 50 bp, Homo sapiens
gctccttggtgtggacactgcaaaaattccgatgaagttaaattccgtca

SEQ ID NO: 600954 - DNA, 50 bp, Homo sapiens
ggagagctcattgtgtcagggggtccaaattccaagcctgtagtgtcctt

SEQ ID NO: 600955 - DNA, 110 bp, Homo sapiens
gcttttgttaattatcttaaatacttgctttactggaaagacccagaatatgccaagtatctaaagtcaccaaggtcctgggcaggaccggttctcagggacagtgcacg

SEQ ID NO: 600956 - DNA, 74 bp, Homo sapiens
ttgaatggcgactagatgtacagttgtatatgaacacagatcaagattagagaaatccttgcaaaaagaaagac

SEQ ID NO: 600957 - DNA, 75 bp, Homo sapiens
ccgcgggcgcccgaggggccgagcgagggagtgcatccgccccaacccttttccccctcgtctcctgtgagaatt

SEQ ID NO: 600958 - DNA, 90 bp, Homo sapiens
ctcagatgactttgacttttcaaaaggaagtggcagagaaggccaatgatgaggccaatcagagtgatacaagtgtctccttgtcagaac

SEQ ID NO: 600959 - DNA, 83 bp, Homo sapiens
ctttgctgctgaccctgaggacatctgctgggctacttctacaagtccgaacagccagtccagcaaaatgaacagcattgtct

SEQ ID NO: 600960 - DNA, 75 bp, Homo sapiens
caggcacctgcggacgctgcagataagttacgacgcataaaggcatgacttcctggcaccacagggaaaatcggg

SEQ ID NO: 600961 - DNA, 74 bp, Homo sapiens
tcaactacagatactttgaagtagaagaagctgatggcctggagctgctgaagactgctattgggaaagctggc

SEQ ID NO: 600962 - DNA, 51 bp, Homo sapiens
ttgcagacaaggtcccaaagacagcagaaaaggttgaaagctgctgaagca

SEQ ID NO: 600963 - DNA, 98 bp, Homo sapiens
gaaggatggcctctggacatccgagtgggctactgggaacgttatttggaaacattcctgtggaaaaccactcttctcttccccacaatgttgctcac

SEQ ID NO: 600964 - DNA, 98 bp, Homo sapiens
gtggccttagctgtgctcgcgctactctctctttctggcctggaggctatccagcgactacaggaatatgtggaagctgtctcttttcaacacttcat

SEQ ID NO: 600965 - DNA, 100 bp, Homo sapiens
gtataataaaaatattcaatgcactgcaagaaacaagagccaacaagcatctgttatataaggtgcttcctggaggggcctgccccactgttcctgtgct

SEQ ID NO: 600966 - DNA, 107 bp, Homo sapiens
cccagaccctggagcctcagttggaagcagccgatccagcctgcggagcctgtggggcagctgtgttggggtggaagaggaggaggcgcccgacatcgacatatacc

SEQ ID NO: 600967 - DNA, 106 bp, Homo sapiens
gcgcgcagggcctgcagcgggagctggacggcgagcgcgagcggcgcgagaaagttttgggatttgagattgacgcggtgaactctgtccagttttcaaaccacac

SEQ ID NO: 600968 - DNA, 51 bp, Homo sapiens
gagagagagcgcagaatatcaagtgctgcaactttcatcctttgaaacgtg

SEQ ID NO: 600969 - DNA, 75 bp, Homo sapiens
gcatcgcaaccaccgccctggccatctaccatgtggaacttgctactaccagcaccatgccctaccaatatccag

SEQ ID NO: 600970 - DNA, 76 bp, Homo sapiens
ggctcgctcgcctccgtgttcgtccggctcccttgcggtggtgttggggaaaactaggtgtctgtgttcactccag

SEQ ID NO: 600971 - DNA, 100 bp, Homo sapiens
tacactgaagatgaagcaaggcccaatgacccaggcggtacctggaatggaaacacaaaagtagccataaagactcttaaaccaggcacaatgtcccccg

SEQ ID NO: 600972 - DNA, 51 bp, Homo sapiens
cgcggatgtcggcgaagagttcaaccagttgtgggatttgtaagaagaacc

SEQ ID NO: 600973 - DNA, 100 bp, Homo sapiens
ggaagtacgggcagttgcagtgttggagctaaaaagtctggaacgttttttcttagagttccagaattgagactgaagtgtacccagagacacaaagaaa

SEQ ID NO: 600974 - DNA, 51 bp, Homo sapiens
gagcactagtgtctagaaggcactaaggacaatgcagatcttcgtgaagac

SEQ ID NO: 600975 - DNA, 100 bp, Homo sapiens
tgatgattcttgtagtatcaacagtgacccagaagccaaggatgataatgaagataattcaaatgatgggacccagccatccaaaaggaggcgaatgggc

SEQ ID NO: 600976 - DNA, 96 bp, Homo sapiens
ggaaaagaactatgtcatggatcaaggaaggagagctgtcactttgggagcggttctgtgccaacatcataaaggaaactatggtccaggaggcag

SEQ ID NO: 600977 - DNA, 98 bp, Homo sapiens
ttggctggtcaggatatacaagaaaggaaggcagaggaagccacggccactggaccctggcgagggttccaaggacacagacagttcagcagggcgac

SEQ ID NO: 600978 - DNA, 95 bp, Homo sapiens
aggctgcatcaggatgaatgatgacccaagtatggaattcacttcttcaactgagatggacatgatataatctccattgagtcaaagaatggcat

SEQ ID NO: 600979 - DNA, 100 bp, Homo sapiens
cttcctcaaggtggaccccgagctggtggtgaccgtgctgggagacctggagcagctgctcttcagccagatgctggatgccacttcaaatgaacaacaa

SEQ ID NO: 600980 - DNA, 94 bp, Homo sapiens
gtcgggttattcgagtgaccgagaccgcggccgggaccgaggccctgccaggagcccggaagtgggtccgcacgagacagaatagactacactc

SEQ ID NO: 600981 - DNA, 75 bp, Homo sapiens
ggaagatgacgattcagagactgaaaaacctgaggctgatgacccaaaggtctccagtgggggctgcagactaag

SEQ ID NO: 600982 - DNA, 100 bp, Homo sapiens
ggacgtggagtgcgatacgtgcgccatctgcagggtccaggtgatgggctggactgggatcagatgggaagcggaagctcatcatgaccagaaactgttt

SEQ ID NO: 600983 - DNA, 88 bp, Homo sapiens
ccaggtttaagtgattctcctgcctcagcctcctgagtagttgagattacagtgatgaattgactctggaaggcatcaagcaattttt

SEQ ID NO: 600984 - DNA, 82 bp, Homo sapiens
cgccgaggcaccgaggcactcagaggagggagcatcgagtacagctgtccggcctccaacgagtgtgagatcaccaagcgga

SEQ ID NO: 600985 - DNA, 100 bp, Homo sapiens
tacacacatcactaaaaattatccctactacaggactgcggacaagggctggcagagtccctgcaggaagcatcacccaggctggcagatcatggtagca

SEQ ID NO: 600986 - DNA, 100 bp, Homo sapiens
cacagagcagtgcttgctgctttttctaactatttcaagatgatatttattcaccaaacaagggtcatctttctgaaggattggttactaaatggtacag

SEQ ID NO: 600987 - DNA, 76 bp, Homo sapiens
aggcctgcctgagctcagctgctccaaagacatccagtatctcaaggggatggcattcctactgtatttgtggcag

SEQ ID NO: 600988 - DNA, 98 bp, Homo sapiens
cccaggaccctgcggccgtgtctctgcccacgtcgagcgtgcccgagacccgaggctattcaagatctctggcagtggaggaagtctctttaagaaaa

SEQ ID NO: 600989 - DNA, 98 bp, Homo sapiens
tcgcgatgagtggtctcggcaggctcttcgggaagggtgatgatgaacagtctacacagatggctgcaagttgggaagatgataaagttacagaagca

SEQ ID NO: 600990 - DNA, 75 bp, Homo sapiens
cttgcgggcccggaactacgagtacctgatccgcctcttccaggagtgggagtgatgaacggcagcagccactca

SEQ ID NO: 600991 - DNA, 100 bp, Homo sapiens
ctcttcctcacttttctcctcgctgggcaaaccttggagaggagtccagccagtctctgagcaggcctcatgtggaatgcagcctctgagaaaagcactt

SEQ ID NO: 600992 - DNA, 100 bp, Homo sapiens
aatatacaagaggggagttactggtacttgatttgcaagacaacagtgggacctacggcaagatctgggagggcagcagcaagtgcaacatcaacaactt

SEQ ID NO: 600993 - DNA, 100 bp, Homo sapiens
taaaaaagaggccactgctatttgaaagagttgctcagtggaatgagaccgtggagctttttcgtgctaagatgccgttacggaaacatcgctgtcgttt

SEQ ID NO: 600994 - DNA, 83 bp, Homo sapiens
ggccaagagttacgggattccattcattgaaacctcagccaagaccagacagttgggtatccctggtcagtaagaattatgag

SEQ ID NO: 600995 - DNA, 98 bp, Homo sapiens
tgcagccccggcctccacctgctgcccttagccagccagtgttgcccttggccccctcgtcgtctgccccaggccctgggaggagcggggacactgag

SEQ ID NO: 600996 - DNA, 113 bp, Homo sapiens
cacacctctcagtgacgttcttttggatcctagtggccataaccaattcaggagaatttgtgttcccattagattctccacacaaaaagccctacgaaggtcttatactgggg

SEQ ID NO: 600997 - DNA, 97 bp, Homo sapiens
agaatgtcatcaagcagcacattcaaggactgcttcaccagtttttctactggctccttctttgaactggatggacgtccattctgtgagctccatt

SEQ ID NO: 600998 - DNA, 104 bp, Homo sapiens
gtgaaacagattggaaattaattgctatcaatgcgaatgatcctgaagcctcaaagtttcatgattcgcttcaagctcagcttatcaatatgggtgttattcct

SEQ ID NO: 600999 - DNA, 90 bp, Homo sapiens
gcgggaaccacctccagtaaaacaggataaggaagcctgtgtgggtaccaacaatcaaagctacatctgtgacacaggacactgctgtgg

SEQ ID NO: 601000 - DNA, 100 bp, Homo sapiens
agacaccaaataaaatagccatctcacctttgaaatcgccaaataaggaggaacatatgcagcagaaaaaagaggaggaagaagttcttaaagaagtaac

SEQ ID NO: 601001 - DNA, 49 bp, Homo sapiens
gtcgaccattccaaaaaaatcgtagccggatcgagctgggagatgtgac

SEQ ID NO: 601002 - DNA, 82 bp, Homo sapiens
gtgtcaaagcttttggacattcctgggatccatagccgggtggatgtcatcagacacgtggtgaagaatggtctactctggg

SEQ ID NO: 601003 - DNA, 100 bp, Homo sapiens
cctgcacctggtgacgcttggcgaaactgaggtctcatggagaagccccggagtattgagtttgaaggaagaaagtactgtgaacatgactttcagatgc

SEQ ID NO: 601004 - DNA, 97 bp, Homo sapiens
tggagaataacggctgcacctggagattgacgcagagtgggcggcggtggtgggttggcaatgtttgattgcactgggcatgtccttcctggactgt

SEQ ID NO: 601005 - DNA, 100 bp, Homo sapiens
gagtatctgaggatggagaactcagcagaaccaaccggtgagccctctcctaagagacccaggggaagacccaaaggcagcaaaaacaagagtccctcta

SEQ ID NO: 601006 - DNA, 98 bp, Homo sapiens
gtggagtgacggtcccacggcagcgccagcgtccgtctccaagagagtatgaagagagtgcgtctgtagggcagggaagatggcggacaagcgcaaac

SEQ ID NO: 601007 - DNA, 97 bp, Homo sapiens
gctggataccactacatgcagcagcttcctgtggatatcttgatattgcagaaccaactgccagagttttctctgggtgttaacagcggttggacta

SEQ ID NO: 601008 - DNA, 100 bp, Homo sapiens
atatgagaaagctaggccatctgaataactttactaaggtgaatgaaaactttgccattgatttgatagcagagcagcccgtgagcgaggtggagactcg

SEQ ID NO: 601009 - DNA, 82 bp, Homo sapiens
agacctgcgtggtgcactacaccggtttttagaacttcagccataaaaatgggcagaattttccttgatcatatcggtggta

SEQ ID NO: 601010 - DNA, 88 bp, Homo sapiens
ataaaggatgggttttaactacagacccagtctctgccaaatatgaagcaacagcatgtcatagaaaccttgattggcaaaaagcaac

SEQ ID NO: 601011 - DNA, 97 bp, Homo sapiens
tctgaggactataataccttgggatgtggacacaatttgtaagttggcttcagctgttctggaggctgtggaaaacaatactctaagcattgaacca

SEQ ID NO: 601012 - DNA, 101 bp, Homo sapiens
gagcctgtggcgcggcttctgtgggccggaaccttaaagaagctgtacattggaatgcgtttacagtcattgtaatggaagcaaaatacatgaaggaaaaa

SEQ ID NO: 601013 - DNA, 51 bp, Homo sapiens
gggaagcagaaacttgggccatacccaaatagacggggtttcgccatgttg

SEQ ID NO: 601014 - DNA, 82 bp, Homo sapiens
gccgagctgggcttggagatccccgcctatagcaggtgagaagccctaccactgcaactgggacggctgcggctggaagttt

SEQ ID NO: 601015 - DNA, 75 bp, Homo sapiens
gcgagcagcagttgagcgagcccgaggacatggagatggaagaacccagcgggtgccgcttctccacccgaggct

SEQ ID NO: 601016 - DNA, 75 bp, Homo sapiens
cgagctcctgaggtacggcgtcgggggaccagccacatcaccagccacctaatagagctggtgctcctggggagt

SEQ ID NO: 601017 - DNA, 75 bp, Homo sapiens
gtaatggtgcaaagcctgaagccaggagacaagcttctcaagtctttacagccgagaagattccttgaagaatca

SEQ ID NO: 601018 - DNA, 98 bp, Homo sapiens
catggcagaaatctgaaaatgcccctggggagacacatgcacaagacagatctgaacgtctatgacactctttcgagctgacacagtgaagaacatag

SEQ ID NO: 601019 - DNA, 50 bp, Homo sapiens
gtgactaccaacgtttggaccagaagatgcttctgatgagcagaattcac

SEQ ID NO: 601020 - DNA, 90 bp, Homo sapiens
aaatgccaaaggaattggttatccagagggaatctggaaaaattgcaatcaaaacatcatttctctaagaaaattttgggtaaccgaagt

SEQ ID NO: 601021 - DNA, 83 bp, Homo sapiens
caagtaatggtgcaaagcctgaagaaggatttgatgccctggatccctttattcccatcctggtttccaactataacccaaag

SEQ ID NO: 601022 - DNA, 75 bp, Homo sapiens
ggcctgatgctgaactctcgagggttgcctgtggctggagaaaggaatgtgctcatcaccagtgccctcccttac

SEQ ID NO: 601023 - DNA, 88 bp, Homo sapiens
cccccggccgcagtatgctggccgctctcatcgctgcccaggccacgttggtagctggcagtgttgtgatggcttttgaagaagtatg

SEQ ID NO: 601024 - DNA, 100 bp, Homo sapiens
ggaggagatgaaggcagtggacacacagcatggagaaatccttcgcaatgtcaccatcctacgaggtgaagtggaggttctggatccgaacgacccttta

SEQ ID NO: 601025 - DNA, 75 bp, Homo sapiens
agatgttcctggggttactgtaaatgggaaggacaggcagagctaaacaagtttttcagaagaagtgaagtcaag

SEQ ID NO: 601026 - DNA, 50 bp, Homo sapiens
ctggcctggaggctatccagcgaagtgggaaaactcttgcctttgccatc

SEQ ID NO: 601027 - DNA, 83 bp, Homo sapiens
ccgcagcccccaggactttgacagcttcctcctcactgtctgtgtccagtgaaggagaacgacctgctcagaatgagaagagg

SEQ ID NO: 601028 - DNA, 75 bp, Homo sapiens
aacggcagcaacgtggaggaggttgtgtctactgggctggagagcccaggtgaaaggaagcatgtttacaccaat

SEQ ID NO: 601029 - DNA, 100 bp, Homo sapiens
gaaaagggggaaaatgcccaggaggaagcaggagcagcccaagcgccttccctcactgcacactggtttttggctgttgtttgtttccccggtttggaaa

SEQ ID NO: 601030 - DNA, 100 bp, Homo sapiens
atctgcgggccggggacctgcatgtgtgtgcgcgcgaaggagcggaagaatggcagtgctcaaactcaccgaccaggtatacaaaactaggatatgctgg

SEQ ID NO: 601031 - DNA, 145 bp, Homo sapiens
tttgtctgaagggtaaggagtccaacaagaaaggaaaggctgaatcacttatacactgctcccaatgtgagaatagtgttgtggaagctgatcgaggaagcctaagcaggctctgtgaagtgggaatagtggtatttgagtcaag

SEQ ID NO: 601032 - DNA, 98 bp, Homo sapiens
tcagcctcctcagtagctgggactacaggttttgattcccaccatggccatcacccagtttcggttatttaaattttgtacctgcctagcaacagtat

SEQ ID NO: 601033 - DNA, 100 bp, Homo sapiens
cagcaaacagtcttccgcaggaaggagatgtgaatagcctaacatggcagaccagagacagcgctcactgtctacctctggggagtcattgtaccacgtc

SEQ ID NO: 601034 - DNA, 125 bp, Homo sapiens
ctgccttgtaattcttaatcagcctttggacaactattttcgtcatctttggaacaaagatgtcaagccctccaacatcctagtcaactcccgtggggagatcaagctctgtgactttggggtca

SEQ ID NO: 601035 - DNA, 101 bp, Homo sapiens
acctgaccagtggcgtgggcaccctgtcaggatcatatgtggcccccaaagcagcacttgaaaataactatgaagttatattccgagaacctgacactcgc

SEQ ID NO: 601036 - DNA, 75 bp, Homo sapiens
caagttcttaattattcagaatgctgcggttttccaagatcagaccccaacaccaacaagattcttgaaaaactg

SEQ ID NO: 601037 - DNA, 100 bp, Homo sapiens
ggtcaccgccagcacgcgcctgcttcccgtctgcgcgagtccacgcagctccccagacctgcgaccgcatcaagcagtccgccagcggaaccaagcggcg

SEQ ID NO: 601038 - DNA, 50 bp, Homo sapiens
aaccaattaatcataaatacactctggtggtattaaagataatcaaacat

SEQ ID NO: 601039 - DNA, 75 bp, Homo sapiens
cagggagtgatcaactagaatccacagctcatagtagaattagcctgcaagtattcctgccacaagaaatgtgaa

SEQ ID NO: 601040 - DNA, 83 bp, Homo sapiens
ccgcttcctggaatggcaagcgcagcaacaacagagagcacgtggtgccagaaccctgtggagcatcatgaactgggaagagt

SEQ ID NO: 601041 - DNA, 112 bp, Homo sapiens
ctggagcctcagttggaagcagccgatccagcctgcggagcctgtggggcagatgtgttcagagcaacattgttttgttgacacaagcatttagaagaaagtttgtgattcc

SEQ ID NO: 601042 - DNA, 100 bp, Homo sapiens
agagcaagatgcagtcagtggagggaataccttggcaagcagctccagtccgagcagccccagaccgctgccgcccgaagctaagcctgcctctggcctt

SEQ ID NO: 601043 - DNA, 90 bp, Homo sapiens
gaaaaagaagaccagcgacaaatttagagaaacctcggcagatggtatagctgcatgctgggaaagaaatgcagcctggcgcctctgaag

SEQ ID NO: 601044 - DNA, 75 bp, Homo sapiens
gaaaaagagaagacgctttacccgactctttgggccgttatctcacgtactgtctgatgagcgtgaaaggttgtt

SEQ ID NO: 601045 - DNA, 101 bp, Homo sapiens
cagcggcggctgcggcgcgcgcgagccgagtgtgagcggaaaggggcccggcgtctgcctcgagactgaagaccgcctcctgacaaggtgatccgggcggg

SEQ ID NO: 601046 - DNA, 74 bp, Homo sapiens
ccggagcaagcgggcgagggcagcgccctaagcaggcggcacaggcaccaagatgtccaaccgagtggtctgcc

SEQ ID NO: 601047 - DNA, 100 bp, Homo sapiens
gccggttccgggccgtgtttggggagagcggcgggggaggcggcagcggagagaaggtagaagatagcaccatgccgattcgtcgaactgtgaattctac

SEQ ID NO: 601048 - DNA, 75 bp, Homo sapiens
gctcagagaggtaccagaccatgaagcaaattcaacacccaacagcttccttaatagcaaaggtagcaacagccc

SEQ ID NO: 601049 - DNA, 74 bp, Homo sapiens
cggagcgctgtcgcggccatgtctgccaggtggtcattgtgcagaggccaagaccgttttgcccaagaaggaga

SEQ ID NO: 601050 - DNA, 99 bp, Homo sapiens
cagcctttcaatgtgacacaaggaaagtattctacagaactgataaatttcaaacggaagagagtggcagcatttagaaagaatctaattgaaatgtct

SEQ ID NO: 601051 - DNA, 83 bp, Homo sapiens
gtttatgaatgagttgcataaaattccatgggcttctttcctgtcgttgttggctttattagaagagtgccagtccttggatc

SEQ ID NO: 601052 - DNA, 78 bp, Homo sapiens
caatatattctcacttatgggtataaagggctgatcccttatccaacatggttctaaccttcagtactaaagaagatg

SEQ ID NO: 601053 - DNA, 100 bp, Homo sapiens
cgaagtgccccctctgcctcccaggtacaggtttcgagatttgctgctaggggaccaaggatggcaaaacgacgacaggatatcctaaacctgaggaagg

SEQ ID NO: 601054 - DNA, 101 bp, Homo sapiens
accgctggatatatgatggggagcttgaggacacttaccacgaagatattatcaactcactggtaacaacagtattcatgctcatcgtatctgtgttggca

SEQ ID NO: 601055 - DNA, 75 bp, Homo sapiens
ccgaactcgggttctgacaagatggccgggctgccccgcaggatcatcaaggtgcgcgcggagccatggttatca

SEQ ID NO: 601056 - DNA, 100 bp, Homo sapiens
cggacgctcctgctcggctgggtcttcgcccaggtggccggcgcttcaggtttgaaatatctccattcagctggcattttacatcgagacattaagccag

SEQ ID NO: 601057 - DNA, 82 bp, Homo sapiens
gaggatgcagtgaaatatcttgcttctaagcctgtgcctactacactggcacaagtggatagagaaaagatctatcagtgga

SEQ ID NO: 601058 - DNA, 83 bp, Homo sapiens
ggaatatgagagaaccaagttccaggaaattttggaagaaactccaagtgcagtctttgcaagccacatttggaacttttgag

SEQ ID NO: 601059 - DNA, 100 bp, Homo sapiens
cgaactctaatatgagcagcatggtagttacagattgcccaaggactccagatactccaaataatgaccctcgttgttctactagcaacaatagattgaa

SEQ ID NO: 601060 - DNA, 74 bp, Homo sapiens
gggctcgccttgtatctcaacaccctgagtgcggatttctgctatgatgacagcttccttcttcttcaacgtgg

SEQ ID NO: 601061 - DNA, 75 bp, Homo sapiens
cgaggcctcgggcgggggctggcccggggttccaggcttcaacggaccacaccaaaatgccatctcaaatggaac

SEQ ID NO: 601062 - DNA, 74 bp, Homo sapiens
atttcctacaagcagtgtggcaagagaggagcaagcaagggagctgtacaggagactaagggaaaaacctcgag

SEQ ID NO: 601063 - DNA, 82 bp, Homo sapiens
gcggccgggcgcgcggcgccgccacaagttgcgctgctcgcgacgagggggatatgagactttctactcggaatatcctgag

SEQ ID NO: 601064 - DNA, 75 bp, Homo sapiens
tgattctgctagtagtgggcacagagatgagtccttcaataatgttaaacagtggctgcaggaaatagatcgtta

SEQ ID NO: 601065 - DNA, 50 bp, Homo sapiens
gttttatacctaccagtatttttgtcaagtgaaacaaagagtcctcttcg

SEQ ID NO: 601066 - DNA, 50 bp, Homo sapiens
aggggccactcggagtcgcccgagaatgccagatccgctttggagggaga

SEQ ID NO: 601067 - DNA, 100 bp, Homo sapiens
agaaatgatttttgaagttcttgctccattggcagaaaatggtcacttatacatctcaagaggatctggtggagaaaaagtgcttagcaaaaaaatatac

SEQ ID NO: 601068 - DNA, 83 bp, Homo sapiens
ctcagcgacactacctgggccatacagactgtgtgaaatgtctatacgaaaacaagagtggactgcaatcattccaaattccc

SEQ ID NO: 601069 - DNA, 75 bp, Homo sapiens
cgggctcaggcccgggagctgcggaccgaggttggctcgatgctgttcccaggagctgggctggtgatgaaggtc

SEQ ID NO: 601070 - DNA, 100 bp, Homo sapiens
gaagagggtctggaggagccttctcaagaacagagcaacatggccaacgccctggccagcgccacttgcgagcgctgcaagggcggctttgcgcccgctg

SEQ ID NO: 601071 - DNA, 75 bp, Homo sapiens
gaaagaaggaaactagctcggaccgtgcagcattacctacatgaacttgttatcaaaacccttgtccagcacaac

SEQ ID NO: 601072 - DNA, 82 bp, Homo sapiens
cgcgcagccgccggcgtcgccgccatggacctagcttcggaaccaaaaagaagcttcccagagccggggccaggagccccaa

SEQ ID NO: 601073 - DNA, 98 bp, Homo sapiens
tgggcaagcgcgggccgcggaggaggtctcagggcatgggcaagaaggacgaccccaagctgatgcaggagtggttcaagctagtgcaggagaagaac

SEQ ID NO: 601074 - DNA, 98 bp, Homo sapiens
aatagtattggatcctgaatttatggtgcaacttctcacaggggtttattatgccatgctgcagtactttgcacggggcctgcaagtttatatcagac

SEQ ID NO: 601075 - DNA, 51 bp, Homo sapiens
ccgagctccagccgaaggagaagggggaaacctctgcgccatgagagccaa

SEQ ID NO: 601076 - DNA, 83 bp, Homo sapiens
aagatggcgccagaacgaagaccctactaggcaagaaatggtggagtcaatgaagaaagtagcagggatggatgtggagctga

SEQ ID NO: 601077 - DNA, 89 bp, Homo sapiens
atcatctattgttggaaaaaatcttctgtggattaactcagtggctcaacaggctgaagggaggccagctggtctctggctccaggccc

SEQ ID NO: 601078 - DNA, 82 bp, Homo sapiens
tcggtgccgatcagcggaagaccaaagaggatgagaaggacgacaagcccatccgaggatttgcctcaaagggcactgcaaa

SEQ ID NO: 601079 - DNA, 102 bp, Homo sapiens
ctgacaaattatgctgcagcatattgtactggcctgctgctggcccgcagggtcctgcattcagctcttttcacatttgatttgattgaaagtgttctagct

SEQ ID NO: 601080 - DNA, 100 bp, Homo sapiens
caacagtggaattattgacccagggtcaactgtgactgtttcagggagaagatgtcaaccggacactagaaggtggaaggaaacctcttcattatgcagc

SEQ ID NO: 601081 - DNA, 95 bp, Homo sapiens
cggccgcaggtgaccccttagcccagctccagtgggcgggtggcaggtcaactttgtagtgtgccaactctttgccttgctagcagccatttggt

SEQ ID NO: 601082 - DNA, 95 bp, Homo sapiens
aagtacaagttagaactctttatctttctgtggatccttacatgggaacaacctatcttcagcactcgagctcatgtcttccaaattgacccaaa

SEQ ID NO: 601083 - DNA, 100 bp, Homo sapiens
caacaagtgtctttggttataaattatgatctacctaccaatcgtgaaaactatattcacagagtcttgctatggagatacacttcaattcctacttcag

SEQ ID NO: 601084 - DNA, 100 bp, Homo sapiens
gtgctcaccggtttctcccacatcgacctggagcatctttccttgaagaagtacattattgacattgtggttgaaagtacagctccagcagaagctttga

SEQ ID NO: 601085 - DNA, 97 bp, Homo sapiens
ctgttcgtgctgctgggattcgcgctgctgggcacccacggagcctccggggctggatattaccttccaaatgatgatggagaattttatcagttct

SEQ ID NO: 601086 - DNA, 100 bp, Homo sapiens
cacttcattggccacctacagaaacaaaatgtcaacaaattgatgggtaccacaagagccaggccatctatctggagtcaaaggacaaccagaaactgag

SEQ ID NO: 601087 - DNA, 100 bp, Homo sapiens
gggatccggttccttggtgtcatccagccttagcaaaccagaggtgcgtatagcagcaaaattcatcattcatgcccctcctggagaatttaatgaggtt

SEQ ID NO: 601088 - DNA, 51 bp, Homo sapiens
tttgtggtttatctaaaaaccaaaggatatgggccctcacattttccaaac

SEQ ID NO: 601089 - DNA, 115 bp, Homo sapiens
gccaccatccacgccagccgcaccatgccgctcctaagcctgcacagccgcggcggcagcagcagtgagagatgaagaaactgagtctcagagaggtgaagtgacttgcccaaga

SEQ ID NO: 601090 - DNA, 96 bp, Homo sapiens
ttaattcagtcatctgtcttaatggagggatctgtgttgatgggcctggacatacttttgactgcagatccctgcatgtcactgagtccaccatgc

SEQ ID NO: 601091 - DNA, 83 bp, Homo sapiens
cccgcaccatggaggaggacgacagctacgggatccaggtccggcacgatcaagacccaggctacatgcatcacaagtttgcc

SEQ ID NO: 601092 - DNA, 88 bp, Homo sapiens
ggtctggaaaagcggtacattgcttcttatttagcactcacaggtcttatatccagatggccaggctcagatgattcaccccaagcct

SEQ ID NO: 601093 - DNA, 50 bp, Homo sapiens
ccaggaccctctggaagcctagaaatgggtcggcactcttcaccctcccg

SEQ ID NO: 601094 - DNA, 100 bp, Homo sapiens
ggagaagccgctggcggcagtcacttgtacagcgccggtcaacatcgcggtcatcaagtactgctatgtggttgatgttgcagaatgatgagccggagga

SEQ ID NO: 601095 - DNA, 99 bp, Homo sapiens
tctggtcggatggggcaggatggctgcgttgacacgtcttatttaatccacatcataggttcctcatgccatgcacctgctgtcacccagcatgcaccc

SEQ ID NO: 601096 - DNA, 100 bp, Homo sapiens
gccaacagtgtaccagcagggcgttggctatgtgcccatcacagaacatccagtcatggataaaaatgagctggttcagaaggccaaactggccgagcag

SEQ ID NO: 601097 - DNA, 75 bp, Homo sapiens
acctgaacttgatatgtctttattactggagttcattggttactatgcgagtcagaagaaaacatttgaaattaa

SEQ ID NO: 601098 - DNA, 100 bp, Homo sapiens
caaaaatttgtacagacaactcatctcttacccacagggtgtccgcaatgttgccagtgtctgtctgcagattggctacccaactgttgcatcagtaccc

SEQ ID NO: 601099 - DNA, 75 bp, Homo sapiens
ggcgctatggcacccggctgcaaaagaattgattcggaaggccatgcagctaactttgtagaaacagaacaaatt

SEQ ID NO: 601100 - DNA, 97 bp, Homo sapiens
atgggttcaagcagatccgacagtcatccaaggaggaagccgagatggcctacaaagacttcctgctccagtccagcaccgtggccgccgaggccca

SEQ ID NO: 601101 - DNA, 96 bp, Homo sapiens
ccctcgtgctcggcttcctgcgcgataaccaactctcagaggtggccaataagttcgccaaagcgacaggagcttagagacggggtttcaccctgt

SEQ ID NO: 601102 - DNA, 51 bp, Homo sapiens
ggccaggccagtcatgctagaacgtccatcttgagtggcctcttcccaccc

SEQ ID NO: 601103 - DNA, 83 bp, Homo sapiens
ttctggaagaagaagaagagcatgatcggcatgtccaccaaggcagaggctgggaggcggcagaatgcagccagaggagggca

SEQ ID NO: 601104 - DNA, 82 bp, Homo sapiens
cgatcttcttgtgtcaccatgctattatgcatagaaagtgcctccggagccagcgtggtggccatagacaacaagatcgaac

SEQ ID NO: 601105 - DNA, 50 bp, Homo sapiens
ctgccaccctgggcaacttcgtgagaactcaacagaggcaaaagcagtag

SEQ ID NO: 601106 - DNA, 119 bp, Homo sapiens
gcaaggcgacgaaccttggagagaggagaacgaacatcttctggacctttgtccaggccagaagcggactcctagaagaggggagcagcaaggatggaatgacagccgtgggccggagg

SEQ ID NO: 601107 - DNA, 101 bp, Homo sapiens
tcccagatatagccgttggtacaaagggcgaagctgtgctcaggcccgggctggacgcagagccagagctgtccccagaggagcagagggtcctggaaagg

SEQ ID NO: 601108 - DNA, 101 bp, Homo sapiens
gtggatgagagttggccccgatatccgctcagggagagcactgtgaggtggatgcccgctcaggccgctgtgccaacggggtgtgcaagaacgggggcacc

SEQ ID NO: 601109 - DNA, 90 bp, Homo sapiens
ccaccccctcttcctcacttccctgtactctcatcgctctcggcctccgacacggctcaccagctggattccctcctgggggcttcattc

SEQ ID NO: 601110 - DNA, 100 bp, Homo sapiens
cctgtttcctacagccactgcgtcgcttccctctggatgctgccatcattttctccgacatccttgttgtaccccagatggagtctcactctgtcaccca

SEQ ID NO: 601111 - DNA, 100 bp, Homo sapiens
atggccgctggcgtggactgcggggacggggttggcgcccggcagcacgtgttcctggtttcagggttgtgagtcccggcccagcccctccacccccctg

SEQ ID NO: 601112 - DNA, 75 bp, Homo sapiens
tcctgggagctgagactgtgctcaatcaaatgaggtctagacaggtaaaccggaacaataagcaggaagttcgag

SEQ ID NO: 601113 - DNA, 75 bp, Homo sapiens
ccgtgaggacggcgagaaggcggcgcgcgaggtcaagctgctgctgctcggctgccagctgttggtatatccagg

SEQ ID NO: 601114 - DNA, 100 bp, Homo sapiens
aggctatgtttgtaaatgtccccgaggatttaatgggattcactgtcagcacactgctgtaagtaaagatgattccattatttcaagtcttgatgtcact

SEQ ID NO: 601115 - DNA, 74 bp, Homo sapiens
gaaaacaatttcaaatacttttaaaccgtcttctcctggtaaaaaggtaaagaaactgcggcaatgaaagctga

SEQ ID NO: 601116 - DNA, 100 bp, Homo sapiens
tgctggctgttatgtacgcaggagctctagccggcccggtccttggactgaaagaatgcaccaggggctcggcagtgtggtgccagaatgtgaagacggc

SEQ ID NO: 601117 - DNA, 133 bp, Homo sapiens
gtcctcatatgtgccacaggaagccatcagcagtgccatccagcttctagaagacccattacagagggagcttgccatgcccggggaggacctgaagttcaacctaatcttgcggcagccaatgatcttagag

SEQ ID NO: 601118 - DNA, 100 bp, Homo sapiens
gtggtggccaagtatgcgcccagcggattctacattgcctccggagccgaggcctgcctggagccccagatcaccccttcctactacaccacttctgacg

SEQ ID NO: 601119 - DNA, 112 bp, Homo sapiens
ggatctggacacccagcggtctgacatcgcgacgctgctcaaaacctcgctccggaaaggggacacctggttggccttcattccacgatgtgatcaattctgaggcaatcac

SEQ ID NO: 601120 - DNA, 100 bp, Homo sapiens
tgtttgagaactatgtggcagatatcgaggtggatggaaagcaggtgctagtaattgagcctcaaaatgaagatggcacatggcccaggcagaccttgca

SEQ ID NO: 601121 - DNA, 83 bp, Homo sapiens
gggcaggagcttctgggagccaccgtctgaaggaaaactttattctcaagagatttctcattccgcagaaataaggatctggc

SEQ ID NO: 601122 - DNA, 75 bp, Homo sapiens
tttaaccaaaatagaccctggagtgaaaccattaagcttgtgcgtcaagtcatgcctcccccactggcaggattg

SEQ ID NO: 601123 - DNA, 75 bp, Homo sapiens
attgacattgctgaagtggagacaggcacaaagcagacattcgtagagaaacatggatgaaacaggaaatctgac

SEQ ID NO: 601124 - DNA, 101 bp, Homo sapiens
ctccaagaagaacacatcaaggagcgccaagagctagagcagactcagaatgagctcaccagggagctgaaactcaagcaagctttgttgcttctgaaaac

SEQ ID NO: 601125 - DNA, 50 bp, Homo sapiens
ccgagtacctgagattagcccaggttcaaaccttgtactactcagctgat

SEQ ID NO: 601126 - DNA, 100 bp, Homo sapiens
aaggagagctccaacctcaatctgcctcgaaccttcctggtgtcaggaaagcagcgctccctcgagctccaggccagctggcaaactgatacaactcaga

SEQ ID NO: 601127 - DNA, 82 bp, Homo sapiens
tggtcttggaggagcaacggctgcgcaggtgactcggtggcctcaagtgtcactgaacctaccagatgtatttgggttggtc

SEQ ID NO: 601128 - DNA, 74 bp, Homo sapiens
cagccttggtgctcaggtgccagatgcaaagattgcccgtgaggcagaggctgccatctaccacttgcaattat

SEQ ID NO: 601129 - DNA, 90 bp, Homo sapiens
tcgggccgcagccgccggcaatgccgcgaaggaaggttgaagaagcctcagcggaggcgatacggcctcctcgccaacactgaggacccc

SEQ ID NO: 601130 - DNA, 100 bp, Homo sapiens
tcctttaaatccggagggggaaaaaatcccaaggtctgcaaaggctggagtgcagtggcgagatctcgactcactgcaggctccgactccccagttcaag

SEQ ID NO: 601131 - DNA, 74 bp, Homo sapiens
agcatcttcaagagatggacagtggacagaggagtcttcattttggcttcccctgtatggcaacatgtgctgcc

SEQ ID NO: 601132 - DNA, 100 bp, Homo sapiens
aaaattggatgtgaaaatgaagccagaccgaggaatactctgaagatagtaactccgagccaaatgtggatttggaaaatcagtactataattccaaagc

SEQ ID NO: 601133 - DNA, 90 bp, Homo sapiens
gcctcgccatgtcctgctgcccggcttcccttccggtgcaggagtacctgtttatgccattcgaccaggctcacaagcagtatgagacag

SEQ ID NO: 601134 - DNA, 74 bp, Homo sapiens
caggcgtgcgcggacggtgtgcggggccatttctgagcagtggaggtttcaagtaatccactaacaaccagttc

SEQ ID NO: 601135 - DNA, 95 bp, Homo sapiens
ttaaatggttctggcaaactgctcaagcttccagataagacaattgcaagccttgtaaaatattactattcttggaaaaaaactcgctctaggac

SEQ ID NO: 601136 - DNA, 96 bp, Homo sapiens
tggcttgtgaaatcatgcctctgcaaagaacaaattggagctctggcagatcagcatatcattcatgtggcatgtggcgagtcccacagtctggcc

SEQ ID NO: 601137 - DNA, 50 bp, Homo sapiens
gccttctggacaatctttccgcatcttttcctggaatcaggacatctctg

SEQ ID NO: 601138 - DNA, 90 bp, Homo sapiens
gttatacataagccattttccgaatatacagctgtcgacttgctggagaagatgcttgtattggactcagataagagaattacagcggcc

SEQ ID NO: 601139 - DNA, 100 bp, Homo sapiens
ccgagcccgccttctccgaggcgcagaagtggattgagggcgtctctggccgagcctctttttgtggaaaacgacagcagcagcagtggcctggaagacg

SEQ ID NO: 601140 - DNA, 83 bp, Homo sapiens
tgctaaacagagaatacaagaggattatcttagaattttaagatacttcaggatgtagagtcctacattcatcgatccgggcg

SEQ ID NO: 601141 - DNA, 100 bp, Homo sapiens
cttgtcagtaccattcaacaagatgctgactgggacagcgttctgtcatctcagcaaagaatggtttgtggagaaaaacagcgctttgagaagttgatgg

SEQ ID NO: 601142 - DNA, 78 bp, Homo sapiens
aacaccctcagctccacattgagagcaaaatctacaagatgatgcagggaggagatgccttattggaggaactggaac

SEQ ID NO: 601143 - DNA, 100 bp, Homo sapiens
ccccgacgaagatgaccacctgctctcacccacgaaaggcatctgtcccaagcaggagaacattgcagacgttccatcctcagagcagcctgaactgttc

SEQ ID NO: 601144 - DNA, 83 bp, Homo sapiens
agccgatccagcctgcggagcctgtggggcaggtgatgaaggattcggctccggaactgaatgtgagtagttctgaaacagag

SEQ ID NO: 601145 - DNA, 100 bp, Homo sapiens
ctttccctctcccaacatggcggcctcaggcgggtgccacgtctatgtgggcttcgtgctgtgggctgctgaatgaagtcatgggaactggagctgtcag

SEQ ID NO: 601146 - DNA, 98 bp, Homo sapiens
ttcatcaacgccgagtacacagaggaggcctatgaagccttatgccagcctggaccatcttggaggcagtgtaggatcatggaagaactttgaattag

SEQ ID NO: 601147 - DNA, 99 bp, Homo sapiens
ggaagcaagtctggtctctgtgattgaagaagtcggctctgggctccagtgcgggaatcacacacatacctcaggaagatgatccctatgatcttgaag

SEQ ID NO: 601148 - DNA, 100 bp, Homo sapiens
ctaataagacaatggttgtcagtggggccgcaggtgcctgtggatctgtggctgggcagttgtggacatcggatacccaaggagacgaagctgaagcagg

SEQ ID NO: 601149 - DNA, 100 bp, Homo sapiens
ccgatcccgaccccaaaagagtattcttggatcttgcacaggaaggaattaaaggactatcctattaagtgtaatctcactgcttaatgagcccaacacc

SEQ ID NO: 601150 - DNA, 116 bp, Homo sapiens
caaaccgcacgctatggctgacagccgggatcccgccagcgaccagatgcagcactggaaggagcagcgggccgcgcagtgactcgccataatcacctcaaggacttcatgctggt

SEQ ID NO: 601151 - DNA, 82 bp, Homo sapiens
aaacgagatgggggtgaagctggagatatttcgggttttaaaatcaaagatgggaaaatcggagaaaattgcccttccccat

SEQ ID NO: 601152 - DNA, 90 bp, Homo sapiens
gagatgtgcagtgttacaactccttgaatgatgagaagacagcagctgattacaagattttaggtggttcagtccttcacctggtgttgg

SEQ ID NO: 601153 - DNA, 75 bp, Homo sapiens
agtgcaaccttcttctgagttctgtttctattgccttgggaaacactggctggcatttataagacgctgtttggc

SEQ ID NO: 601154 - DNA, 83 bp, Homo sapiens
atggaaaaccagttattgaatatcaagaggaggagttgttgcttcaaggttactgactttttatgatgtttggtggctatgag

SEQ ID NO: 601155 - DNA, 90 bp, Homo sapiens
cagattcgcagtggtcgcttcttctccttggggaccacttctataagagaaacaagaacctgccacctgaggaacagatgatttcagccc

SEQ ID NO: 601156 - DNA, 75 bp, Homo sapiens
ctgaagggcaaggaaagcagcatagagaatgagatagccgtcctgagaaagaatgaatgtgatttgaactcattc

SEQ ID NO: 601157 - DNA, 88 bp, Homo sapiens
gagagagggaagtcgcctctgtgctcgcactgattgtggggtacgcattccacttcccgcacctgctgagcccgcagatccagcgctc

SEQ ID NO: 601158 - DNA, 100 bp, Homo sapiens
cctgattctacccaagtacatatgatttcagctgcaatggcagaaacctctgtagaggagcaggatgcaaccgacaggctgtggccggacagctgctgcc

SEQ ID NO: 601159 - DNA, 97 bp, Homo sapiens
aggaagatggacagctgggaattgctgaattagaactgcagaggttcctctacagcaaggcacgaaggcagttccagtctcagctggctgacctgca

SEQ ID NO: 601160 - DNA, 101 bp, Homo sapiens
aaagtcatgggagcagagctcagacatgttctcaccacccttggctatgtcttgcccagccacgtgactgaggagatgctatgggagtgcaagcagcttgg

SEQ ID NO: 601161 - DNA, 100 bp, Homo sapiens
tttgactatttttcatgacctttctcatctgactcgtgatctgcccatcttgttactccctagcagtgtggtaagacttaattcagtgcacaaatgagat

SEQ ID NO: 601162 - DNA, 75 bp, Homo sapiens
cggctcacctgtgcgggatggaacaaaaggagatccgcgttctccagtcccacatctcagacacctccgtggttg

SEQ ID NO: 601163 - DNA, 98 bp, Homo sapiens
tgaggcaaaggctaatgtgtgctgtgttaaattcagcccctcttccagataccatttggctttcggctgtgcagttgtcgagatgtccacagaaggag

SEQ ID NO: 601164 - DNA, 50 bp, Homo sapiens
agcactactggctattggaaataacattaaccaggtggtatttgttggaa

SEQ ID NO: 601165 - DNA, 95 bp, Homo sapiens
cgggcgtggacggtgtggggcggtcccggccccgcagcccccaggctccgctcttgccagagggacaggagccatggctcagaaaatggactgtg

SEQ ID NO: 601166 - DNA, 88 bp, Homo sapiens
ctcaagatggcgtgcttgttggagaccccaatccgcatgagcgtcctttcggtgcactttacaggtccccgatgaaccaagagaaccc

SEQ ID NO: 601167 - DNA, 100 bp, Homo sapiens
cttggattgtctgcttcaagccctggctcaaaatactgtagtgatggtcctaaatagcatgagtgtcagctggagcgcccggatccagattttcttaacc

SEQ ID NO: 601168 - DNA, 75 bp, Homo sapiens
tccctgcactctcatcgctctcggcctcggcctcggcctccgacacgaatccacacaggcgacagaccctacaag

SEQ ID NO: 601169 - DNA, 100 bp, Homo sapiens
ggcacccagagcatttctgctgcgtcagttgcggggagcccttcggagatgaggggatttcttccagaaagcatgtatgaacgtattctcactggtcccg

SEQ ID NO: 601170 - DNA, 100 bp, Homo sapiens
ttggggccctcttgataaaaagagatgtggggggattctcgacctgctaacagaactggaccttttcggccctgttaaacctggcagagcgactgggaga

SEQ ID NO: 601171 - DNA, 90 bp, Homo sapiens
ccgccgattcctcctccttggtcgccgcgtccttggctggcgtctgataggaagatgtcttcaggaaatgctaaaattgggcaccctgcc

SEQ ID NO: 601172 - DNA, 101 bp, Homo sapiens
acacgccgccatccgggaggcccagggaaggatccagctggttgaagaagagctggaccgtgctcaggagcgcctggccactgccctgcaaaagctggaag

SEQ ID NO: 601173 - DNA, 74 bp, Homo sapiens
agcgcagcagggaccacggcctcccagatgggaagctgcaatgggaggaggaggccacagtgaaccgactgcag

SEQ ID NO: 601174 - DNA, 82 bp, Homo sapiens
gcatcgtcgtcctccccgaccgcgtcctgcagcagctgccagtggagccgccttgcctacaccaactaatgttacaattgaa

SEQ ID NO: 601175 - DNA, 100 bp, Homo sapiens
cccgaggcccctatggcagatttgaaaattcacccttgtagagtcattcctgcctttgagcggactcccttttaaggctaccaagcagtttctcgaagag

SEQ ID NO: 601176 - DNA, 80 bp, Homo sapiens
agttgaaccagctgtgggagaaggcccagcgaggtttccaggcctgaggtgcccgccctggccccaggagaatgaaccag

SEQ ID NO: 601177 - DNA, 100 bp, Homo sapiens
agagctcgccggaaccgtggctcacgagctgcagggagtgcaccagaagccccatgtgccactcccctgatctgcagcttcggtaggccggtggacctgg

SEQ ID NO: 601178 - DNA, 89 bp, Homo sapiens
ggaaattggactaaattaccagaatgcaggggtaaaactctgctggcacaaaccctagctaaatgccttgatgtcccttttgctatctg

SEQ ID NO: 601179 - DNA, 90 bp, Homo sapiens
cagccgccatcaagaagaccatcctggacaaggtctacatgttcaagtgcgtgtggcggtgctacagattgatcaagtgcatgaactcgg

SEQ ID NO: 601180 - DNA, 100 bp, Homo sapiens
ctggatgtttgcgacatcccagagagcttccagacctcttccttggttgtgccactactgagttctccagttctctttcagcgattgttcagcatacttc

SEQ ID NO: 601181 - DNA, 100 bp, Homo sapiens
aggggccttcctcatccgggagagccagaccaggagaggaggattccagtgctggggaagacagtgttcatgacaggtttataggtccgcttccaagaga

SEQ ID NO: 601182 - DNA, 50 bp, Homo sapiens
catggcttccgaggagctgtacgagattcacagtctgagaatgaggcttc

SEQ ID NO: 601183 - DNA, 51 bp, Homo sapiens
cgtggccctgatccagacctgggcagtttgacaagtatgcgcccaagctgg

SEQ ID NO: 601184 - DNA, 75 bp, Homo sapiens
cacgaaataaagctcctgggcaaggggacgtctgcagctgatactatactggcaattgctggagaagattttgca

SEQ ID NO: 601185 - DNA, 101 bp, Homo sapiens
agaacaagatcatgaaccggcttttcctggactgtgaggaggagcagtggaagttccagccactggtgccagccggcgtaggcatttcatccttcatgaag

SEQ ID NO: 601186 - DNA, 101 bp, Homo sapiens
caaagaagatggctgcttctatttcagattgaaaagtatggattcccacctgatcttaccctcacccctcaagaaagcatccagctttatgataccatggc

SEQ ID NO: 601187 - DNA, 83 bp, Homo sapiens
caaagaaaaagtggtgccgcttgcagacattatcacgcccaaccagtttgaggccgaatctggtggctggacccagagctgac

SEQ ID NO: 601188 - DNA, 50 bp, Homo sapiens
actggctgctggagcttgtcaccaccagggatgtttcagcagcccctgag

SEQ ID NO: 601189 - DNA, 101 bp, Homo sapiens
attcatgacagctgagttccttttggaggatccgtcttcaggcagtggagtacgacaaggagttctcccctcgtcagcgacaccacaaagagttcaagttc

SEQ ID NO: 601190 - DNA, 100 bp, Homo sapiens
gggccggagggcccacaacccgcagagacttctactggctgcgctcctttctggccggaggggacatcacccagaagggctatgaaaagaaaaggtccaa

SEQ ID NO: 601191 - DNA, 110 bp, Homo sapiens
gtggagcagatcctggaggatgtgcggggtgcgccggcagaggatccagtgttcaccatcctggccccggaaggaggcaggtggaagtcatcataaagtttctgtttcac

SEQ ID NO: 601192 - DNA, 100 bp, Homo sapiens
aacgagatcttgggcaccgagagggactacgtgggcaccttgcgcttcttgcagtcgcagtggccggtgtccagctgcctactttctgcccggatctctg

SEQ ID NO: 601193 - DNA, 90 bp, Homo sapiens
gtggccgggaccctggcccactccttcgtcacttccttttcaggcagcgaggtgccccctgacccgagccttctgatgaagattgacgcc

SEQ ID NO: 601194 - DNA, 100 bp, Homo sapiens
cagcagaatttgtatagagatgtgatgttggagaactacagaaacctggtctccctagatctcgacatggcaggagctgaggcagctgcaggagcagatc

SEQ ID NO: 601195 - DNA, 100 bp, Homo sapiens
ggcggcggatcccggagagccccggagtgagcggagtagcgagtcggcaacccggagacaagttggatggcttgaggactggtactaaaaggaaacgtga

SEQ ID NO: 601196 - DNA, 82 bp, Homo sapiens
ctaccttgcaccacgttctgcagaggaccatccagtgtgcaaaaggttgacatcatggacatatgtgagtccatcctggaga

SEQ ID NO: 601197 - DNA, 75 bp, Homo sapiens
gtccgcgccaggcgtctcggggattgctcatttagaaagtggatgtgtgggataacatgtccaatgtgtccgagg

SEQ ID NO: 601198 - DNA, 98 bp, Homo sapiens
gccatacttctgtcgccctgtcgtctgtgttgtgactgctttggacgtgggagtcacctgaaagccaggaaatggctcatccacctgcagacatgggg

SEQ ID NO: 601199 - DNA, 95 bp, Homo sapiens
agaaactcctctactggaacatggctgttcgagacttcagtatcctcatcaacttgataaagaccactctgcttcatttttgggagaaaacttct

SEQ ID NO: 601200 - DNA, 100 bp, Homo sapiens
ctcctccgagccatgagaaataaggtgaggcaggcgactaatcagattgtgatgaattgtgctgatattgatattattacagcttcatatgcaccagaag

SEQ ID NO: 601201 - DNA, 100 bp, Homo sapiens
caaggagagacgtcgctgaggggcttgcctgaagcgagggtggaaggaatgaaggccagctgaatggtgaaacaaatacacccattgaaggaaaccaggc

SEQ ID NO: 601202 - DNA, 83 bp, Homo sapiens
aactagcggcgggtcgtgggcacctccaggtatggaacgccgtggactccgggcactgcctgcagacctactccctgcacaca

SEQ ID NO: 601203 - DNA, 100 bp, Homo sapiens
atgcacctggaaggggaccctgaaagaatacgagttggaatcgaagcctcttaaaatggcagatgacttggacttcgagacaggagatgcaggggcctca

SEQ ID NO: 601204 - DNA, 75 bp, Homo sapiens
ggtgatgagcaaaagctctgctgaggtcatcgcccaggcacggaagaaggaggaggctgcggaggaggaggagga

SEQ ID NO: 601205 - DNA, 50 bp, Homo sapiens
gaagacttgcttcagcatttctcaatattacagtgacagagagaaacaca

SEQ ID NO: 601206 - DNA, 95 bp, Homo sapiens
cggaggtctcatctttgaactactgccggagcttctgccaggtaccagcaactaaggtttcagagctgaaccctaatgcagaagtgtggggggct

SEQ ID NO: 601207 - DNA, 123 bp, Homo sapiens
tgaagctcaccgacagtgccctgagggccttcgagagctaccgcgccagacaggctgaaggtgatgtggccgccctcaaccgacgcatccagctcgttgaggaggagttggacagggctcagg

SEQ ID NO: 601208 - DNA, 98 bp, Homo sapiens
gaagcacctgcacctcagagtaaagctgctggacaacaccatggaaatatttgacattgaggacgtgttcctcatgatccggcgccacaagaccacca

SEQ ID NO: 601209 - DNA, 100 bp, Homo sapiens
ccatgcagaatgccaccaagtatggcaacatgacagaggaccatgtgatgcacctgctccagttttgcacagtaataagttgactcacacagacttaaag

SEQ ID NO: 601210 - DNA, 87 bp, Homo sapiens
aatttgaaagtaaagaacgaacagcatgtaaaggaaagattgccatatcaggtgaccaagaatatggcccaggtgaccaaagccctg

SEQ ID NO: 601211 - DNA, 82 bp, Homo sapiens
tgcgggaaatcgggctgaagcgactgagtccgcgatggaggaacctacaagcagcaattggcgcctattatgactttgagag

SEQ ID NO: 601212 - DNA, 75 bp, Homo sapiens
gacctgagcctgacgcgggccgcgcggacaaagatcattccactcagcctgggacgatggggaggaaaaaaatcc

SEQ ID NO: 601213 - DNA, 115 bp, Homo sapiens
cgccgctccccgtcctgctcgcggacccaggggcgcccacgccaggaatgaatctgaagtctgctgcagtaaaacacagaaggctttaaaatgttttcttgcataaaattcaaaa

SEQ ID NO: 601214 - DNA, 98 bp, Homo sapiens
gccgagccatggggaatatgaggaagacctactggagcagtcgcagtgagtttaaaaaaaacgcttcgttaagggactcaggcagtacgggaagaact

SEQ ID NO: 601215 - DNA, 100 bp, Homo sapiens
gaaacttcggtctcagttggagttattaattagcccaacctgttcttgcaaacaagcagatatttgtgtggttgtttacattcagagctctatcaataag

SEQ ID NO: 601216 - DNA, 74 bp, Homo sapiens
ggagcgctcggccggcgtgggagcgccaaggccgcagccgcttacaaacacgcagatggcaagaagattgatgg

SEQ ID NO: 601217 - DNA, 50 bp, Homo sapiens
tgaggcctccccggccatgtggaactgcccgtaggtggaagggacttgcc

SEQ ID NO: 601218 - DNA, 100 bp, Homo sapiens
atgtctttgttccaccagagtcattgcaggaagtggatgagttccacctcattttagagtatcaagcaggagccctggtggaccaaggcatcttcgaaga

SEQ ID NO: 601219 - DNA, 51 bp, Homo sapiens
ggcaactggagcgaaaccagcgacagttgtgaagatgacctctccgacgac

SEQ ID NO: 601220 - DNA, 100 bp, Homo sapiens
gggtgagcttgtttgtgtccctgtgggtggacgtggttggtgattggcaggatcctggtatccgctaacagtgtttcaggctgcatgtaccaagtagttc

SEQ ID NO: 601221 - DNA, 82 bp, Homo sapiens
ctcatccggaagattgaggcctacatggaaggagccttcacgtaaatgggtccagtcatgcctcccagtaagaagccagaaa

SEQ ID NO: 601222 - DNA, 88 bp, Homo sapiens
caagtctatcagcccttagcagtccgggaactgcttatcctccagggaggaccaccccagggtcctgagaacattatctgtagctgta

SEQ ID NO: 601223 - DNA, 100 bp, Homo sapiens
aagccaacagcgaggctttcagttctttggaattccattcttttccttattcttctgatgtggatccaggtgcatcatttctggcatggcttcaggaagc

SEQ ID NO: 601224 - DNA, 97 bp, Homo sapiens
gctgggcgcggattcgccgaggcaccgaggcactcagaggagatgaaggatttgggggcagagcacttggcaggtcatgaaggggtccaacttctcg

SEQ ID NO: 601225 - DNA, 101 bp, Homo sapiens
cgacgacgagtacgactacctctttaaagaaggatgccctgcagtggtctcgccatccagctacagtggagggagaggagccagaggacacggctgatgtg

SEQ ID NO: 601226 - DNA, 75 bp, Homo sapiens
gcggcatcggggggctgctgctgctgctgctcattttcatagtgctgtacaagatggtgtcggacggcatgacag

SEQ ID NO: 601227 - DNA, 74 bp, Homo sapiens
gcaagggctgtctccgcttccaggacatgtattcctctgagaaaccttggacagcagattttggtttaatatct

SEQ ID NO: 601228 - DNA, 75 bp, Homo sapiens
tgctgtattggagctcatgcagtcttcagtggataataccaaaatgttaaatccagatgtgaatgttttccaacg

SEQ ID NO: 601229 - DNA, 93 bp, Homo sapiens
ccacaagaccttcaagtttgtcgtcgtcggggtcctgctgcaggtccgggttgactctgccaccatcccccggcaggacgaagttccccagca

SEQ ID NO: 601230 - DNA, 90 bp, Homo sapiens
ggaagaatggcagtgctcaaactcaccgaccagactgagaactatgagcagagaatacgtgaacaacaggaacagctgtcacttcaacag

SEQ ID NO: 601231 - DNA, 88 bp, Homo sapiens
ggctatgtcgagatcccctgtgtggccaagaagctggtgtgcggagatgaaggaaggatctgagtctctccctgcggagacagccctg

SEQ ID NO: 601232 - DNA, 100 bp, Homo sapiens
ttccgctggctcagccgcaagtacccgtccatcatagtcaactgcgtggaagagaaggaaaagaagatttttcagatcccctggatgcatgcggctagac

SEQ ID NO: 601233 - DNA, 82 bp, Homo sapiens
ctatcgtggacgtcactggccctggtggggattgacagccacgggaagttctgggaagtcatcagtgatgagcatggcatcg

SEQ ID NO: 601234 - DNA, 101 bp, Homo sapiens
tatgaggaagagatcaaggtcctttccgacaagctgaaggagggagatcttgtgcgaaaactcaaagaagataaagcaccccaagtagacgtagacaaagc

SEQ ID NO: 601235 - DNA, 82 bp, Homo sapiens
aaaaacttcagagcaaaacatcactgtaattcttgctgtagaaagcttaaacttccaggtgacttgatggagggtgagctct

SEQ ID NO: 601236 - DNA, 75 bp, Homo sapiens
cgcttcctgagggagtgggtggagagcaattggggcactgaagatgatgagacccagagttaccacaatggcaat

SEQ ID NO: 601237 - DNA, 100 bp, Homo sapiens
gatcagccccacagcctcctgagtatcctggacgcccagacatggctgtcccagcatcctaatgtcctatgatcacgtggaactcacattcaatgacatg

SEQ ID NO: 601238 - DNA, 50 bp, Homo sapiens
atcgcgaccaacacataccagcagctgtcaggcctgtccctgtttgctga

SEQ ID NO: 601239 - DNA, 131 bp, Homo sapiens
gatcacacagttcaacctgacacaggtcacctgtcactcagccctgctggacctggagaagctcccagaattcaacaggagcatatcagcgcttcccactgtagttgcctataacaatcgagctcaagcag

SEQ ID NO: 601240 - DNA, 87 bp, Homo sapiens
gtgcggctactcttgatcctctccggctgcttggtctacggcacagagtactcctgattgtgacatcacattcatcccctgggcgat

SEQ ID NO: 601241 - DNA, 100 bp, Homo sapiens
cagcaatagagctaatcccctcagttaccaatccagaaaaccttccatcgctgccagatattccacccatacaggagggctctgagagatttcatttctg

SEQ ID NO: 601242 - DNA, 83 bp, Homo sapiens
caaggatattcaacgcatccccagcttaccgcccagtacgcagactcttccaagttcagctgaaaaagtgaaagctaataaag

SEQ ID NO: 601243 - DNA, 90 bp, Homo sapiens
ctcagtttgtgcaggacaccgacatggaacagggactcactggggctgccccagagcacatcagctatgtgccccagctctcaaacgaca

SEQ ID NO: 601244 - DNA, 139 bp, Homo sapiens
tttcctatccttattgctggtggctgctgtggtatggaagatcaaacaaacttgttgggcttctcgacggagagagggaggtggggaagacagggctccagctaccacaggacgggctctgggtatagccgttccagtc

SEQ ID NO: 601245 - DNA, 131 bp, Homo sapiens
cgatgcggaagaagctaatcttgtacttcaagaggaggaatcacgctcggaaacaatgggagcttgatcctggatagtgtttgtatgatgtgcacacgtctctgcaaatgcttgtttgaagattggctgtg

SEQ ID NO: 601246 - DNA, 100 bp, Homo sapiens
caaccccttcgagcaagacgtggtgaaattaaatggtggcagacatgtccaaggaatattgcggggatttgatccctttatgaaccttgtgatagatgaa

SEQ ID NO: 601247 - DNA, 89 bp, Homo sapiens
caagatccttaagttcgtcgtcttcatcgtcgcggttctgctgccgcaagtgaaactggaggaatttggaagaccaaagattgacgggg

SEQ ID NO: 601248 - DNA, 74 bp, Homo sapiens
ccggcccctgcagtccggatactcacgccagaaggcatcaagcagatcctgccacaccagatgaccacggcagg

SEQ ID NO: 601249 - DNA, 101 bp, Homo sapiens
ggagttccttctcctcactctggagcagactgtgccctgtccacggtgcctcctgcatgtcctgctgccctgagctgtcccgagctaggtgacagcgtacc

SEQ ID NO: 601250 - DNA, 75 bp, Homo sapiens
gtcttcaagagcccacggacaccacctcaacggttgatgataattagaagcatgctttccactgaacttcccgac

SEQ ID NO: 601251 - DNA, 75 bp, Homo sapiens
tgtggatgagattcttcaaatccctccactctcttcaactgcaactctggagcaatttacagcaatgagggattt

SEQ ID NO: 601252 - DNA, 75 bp, Homo sapiens
tttatattcaaccagctggaagtgaagttttcattgctggcagaagccatatcacaggaacatcaagaacttaaa

SEQ ID NO: 601253 - DNA, 106 bp, Homo sapiens
ctcggctacagactgctggctgtgtgtgctgcaaaccgagacaagttcaccccgaagtctgccggtgtcatggagaaactccagctgggcccagagattctgcagc

SEQ ID NO: 601254 - DNA, 76 bp, Homo sapiens
aaatcaatgttagcagatagccagcccatacaagatcgttgtaaacaggaacatcgataagtagtgtaaaaacttg

SEQ ID NO: 601255 - DNA, 121 bp, Homo sapiens
tccatatgcgaccacagaaggaaattcaacagaacttagcataaatgctgaaggccaagattgacagacacctaatattcatgacttgagaatattctgcagctataaattttgaaccatt

SEQ ID NO: 601256 - DNA, 100 bp, Homo sapiens
ctttcctgtttacctccagtgtcccttcttccacatgaaaaggataagaacattcctgatgtagatgaagaaggctacagtattaaaccagaaacaaatc

SEQ ID NO: 601257 - DNA, 100 bp, Homo sapiens
gctaaatcccctgaagatttgcctgccctcagtggttaacttttttgctgcaatcacaaacgccgtgccgtccctgcagtgacaccgaggtgctcctagc

SEQ ID NO: 601258 - DNA, 90 bp, Homo sapiens
ccggaaggtccttagggaggaccccagacaccggagactgggaaatgctgatttgaataggatgcacagacaaaatatagatgcctacca

SEQ ID NO: 601259 - DNA, 83 bp, Homo sapiens
ggagaagatcacccggaccaaggaggaggccctggagctgatcaacggctgatgaaccaattgcagattatgctgcaatggat

SEQ ID NO: 601260 - DNA, 75 bp, Homo sapiens
gaacatgccattgagataactacccaagagatcactcaggtctcctcatttaccacatcccccaggttgaaccac

SEQ ID NO: 601261 - DNA, 83 bp, Homo sapiens
tgggatcttgctgggtgagatggcagtgtgtgcaaaaaagcgccccccagggggggccctcagcctcttggccttgaacgggc

SEQ ID NO: 601262 - DNA, 100 bp, Homo sapiens
acagagttagagagagggatggtggattcttactacagatttaatgaccttaactacagatgggtctctttggataactggacctatagcaaagaattta

SEQ ID NO: 601263 - DNA, 82 bp, Homo sapiens
gcgcgtgctgcgggtctgctcgggggtctacttcgaggctgctgtgacttactcgaagcctcgattggccacattttggtac

SEQ ID NO: 601264 - DNA, 90 bp, Homo sapiens
aaaaaaccaaaattatcgccaagattcagcaacaaatggagctgctcctggtgaacaagctcaagtggaacctggccgcaatgaccccgc

SEQ ID NO: 601265 - DNA, 100 bp, Homo sapiens
tgagaatgtccatggatttgtttctcattctcatatttcaccaataaaggcttgtacagcatatgtggattttatgatttctgtggccagattgattcgt

SEQ ID NO: 601266 - DNA, 100 bp, Homo sapiens
tatcttaactgtagccaaggatccaagatatgccagatatctcaaaatggttcaagtggaagaagaagcagacgttgaaggcattcagtataaaacactt

SEQ ID NO: 601267 - DNA, 100 bp, Homo sapiens
gatgcctatgtattccctggggatggcgcatcacacaccaaagctgatccttgtaggcgaccactgccagctgggcccagtggtgatgtgcaagaaggcg

SEQ ID NO: 601268 - DNA, 100 bp, Homo sapiens
ccatgaacaactcgggcgccgacgagatcggatctgggcacgaaagcttctctctgtcccttggcttctgtgtggtcccagaagatatgcctcctccagt

SEQ ID NO: 601269 - DNA, 50 bp, Homo sapiens
tggagtagatattaataccttacaagagggacaatgactcattcttccca

SEQ ID NO: 601270 - DNA, 100 bp, Homo sapiens
agaacatccccgccgggctgcagtccatgaaccaggcgttgcagaggcgcttcgccaagggggtgcagtacaacagtatctcaggagattacatttcagc

SEQ ID NO: 601271 - DNA, 83 bp, Homo sapiens
ccatcaagtgttgcaggagaaacttcagtcttggctggcagaagctcctcctggggtagagacagatcttattgatgttggat

SEQ ID NO: 601272 - DNA, 80 bp, Homo sapiens
ggaaccctggtcaccgtctcctcagcttcatggcggctgaagagatgcattggcctgtccctatgaaggccattggtgcc

SEQ ID NO: 601273 - DNA, 83 bp, Homo sapiens
cacctgctgacatctacctgccagcgccgtgccgtccctgcagtgacaccgaggtgctcctagccgtctgcaccagcgacttc

SEQ ID NO: 601274 - DNA, 82 bp, Homo sapiens
ctgtgcttgccaggcctggctccagtctcggcgcggaagatggccggcggcgtggacggccccatcgggatcccgttccccg

SEQ ID NO: 601275 - DNA, 75 bp, Homo sapiens
caggatatacagcagcgaggaggggaagagagatcttgcttctgaaatatctacctgggatggagtgatagtaac

SEQ ID NO: 601276 - DNA, 100 bp, Homo sapiens
ggcacagagggatttcggaatgccaagaagggcacaggcatcgcagcacagacagcaggcatagccgcagcggcgaatgaactctggaagcccagccagg

SEQ ID NO: 601277 - DNA, 100 bp, Homo sapiens
caccttcgtcaatgtcatcgcggttccatgcctctgcagcggtgcctcatgtttgctgtgtagttgctgtcctaacagtaagaattccacggtgactcgc

SEQ ID NO: 601278 - DNA, 100 bp, Homo sapiens
tctcaagagcaaaagaacggtggaaaagtttcagtgaaacaagttcagagaatgatacagaaggcataaaggcatcacaagtggtcgggctcagctactc

SEQ ID NO: 601279 - DNA, 113 bp, Homo sapiens
tgtgagggggaaaagcgcaagctggtgatcccatccgagctagccgcttacaaacacgcagatggcaagaagattgatggcaggagggtccttgtggacgtggagaggggccg

SEQ ID NO: 601280 - DNA, 100 bp, Homo sapiens
agttatttgcctcagtaaaagagtcacgagaagagaatgccttctagatgcaaaatcacctccaaaccagaccacttttcttgacttgcctgttttggcc

SEQ ID NO: 601281 - DNA, 100 bp, Homo sapiens
ggcgagtccgcgacggtcgccgcccacggcgaggtacaggtttgcagattccgccagcagcacagcaagctctacagatgagtggctctttggcatttgg

SEQ ID NO: 601282 - DNA, 82 bp, Homo sapiens
cgcgcccggccggacccgggcccgaggattttttatcaagcagaaatgcatcgaacaacgagaatcaagatcactgagctaa

SEQ ID NO: 601283 - DNA, 100 bp, Homo sapiens
ggacgctccgtggatgaggctctgcggctggtccaggccttccagtacacagacgagcatggggaaggtgacccgaggagggactccgcctccgagcggc

SEQ ID NO: 601284 - DNA, 102 bp, Homo sapiens
atttacaatgctaccctgctttttctggtgtcctgaacctggaagttgtgctttttaagtctgggttctgcccgcacacattcctcgccaccttcttggtgt

SEQ ID NO: 601285 - DNA, 118 bp, Homo sapiens
cgggagccgggatctgagcgagcgccggggccagcggagccggagccgccgggacatggagcggttccgccaccccagccgcagatgtttggtgaagagctgcctgacgctcaggacg

SEQ ID NO: 601286 - DNA, 82 bp, Homo sapiens
cacacttctcagagctgcccctggacgaccaggtcatcctgctgcgggcaggacactcatgaggaccatgatacttccactg

SEQ ID NO: 601287 - DNA, 100 bp, Homo sapiens
gtgaaagagaagattgcaactttgagtcagacctgtaggcctgatagactgattaaaccacagcagcatctggaatcaagagacccatggcatctgaggt

SEQ ID NO: 601288 - DNA, 90 bp, Homo sapiens
atgggatctttccggatcaatccagatggcagccagtcagtggtggagccctggcctcccacgactacatcctgaagattgtgcccacgg

SEQ ID NO: 601289 - DNA, 100 bp, Homo sapiens
ggaagggtgatgtggctgcggcatcgccggcctcgctatggagatggcagcagaaaaggccaaagcagcagccggggaggccaaagtgaaaaagcagctg

SEQ ID NO: 601290 - DNA, 83 bp, Homo sapiens
tggagagggagtttctcgccctcgtcgcgcctgccgcgcggagagataagccctgattgagtccctcaaccagaaaccacaga

SEQ ID NO: 601291 - DNA, 101 bp, Homo sapiens
aaaacacactggaaacaaacagtatttctactggaaaaaccattttcagttaaagcagcttgcttggctcaggaacaacagaagagaataaagaaaatgac

SEQ ID NO: 601292 - DNA, 100 bp, Homo sapiens
gtttattgcattggtggagagaatctatctgtagcaaaagcggtaaatttttccataaccttatggagagaaaggactttgagacatggcttgataacat

SEQ ID NO: 601293 - DNA, 90 bp, Homo sapiens
actattcggggaaagaattgaaccttcaccatataagacagccattgatatcctgacaacagtagtacgaaatacaaagcctcccctttc

SEQ ID NO: 601294 - DNA, 87 bp, Homo sapiens
gctgtcaataaagaacggcagtttgaatcggtgctgaacagatgccatcccgcccactttctacagaccctacttcagaattgttcg

SEQ ID NO: 601295 - DNA, 100 bp, Homo sapiens
acccttaggctgagaatactttctgaggacatagaggttacaggaaatacaggaggcagaggaacaaataaaagacaccacgagaaacagacacatccag

SEQ ID NO: 601296 - DNA, 107 bp, Homo sapiens
cgactctggcctctgaaacactaccactgctggcgctgaccttcatcacagacaacagcctggtggcagcggttggatggcaagcatgtggtgtttggcaaagtgaa

SEQ ID NO: 601297 - DNA, 50 bp, Homo sapiens
cttcaggacgctgtgaattcggtccccaggtgcatccaatttttcaactt

SEQ ID NO: 601298 - DNA, 51 bp, Homo sapiens
aatcggcagctgagacggccttggccgaatcaggaaacccaggcccaacgg

SEQ ID NO: 601299 - DNA, 90 bp, Homo sapiens
gtaaagaagttccaccagagtagagaagctgccagtaactcagattctagccatgaaggtcaagaggaatcttcaaaggaaaatgtgtca

SEQ ID NO: 601300 - DNA, 90 bp, Homo sapiens
tgcccaggcattgctggggtcagaagagaggaaagtggaggtcacctactatcacaaaaatggggatccagttcttggtggagaatgaac

SEQ ID NO: 601301 - DNA, 90 bp, Homo sapiens
ttgcagaacagcctcagcctatgtgtatggactcagaaaaacatatgatctacacttttggtggtagaattttgacttgtaatggcagcg

SEQ ID NO: 601302 - DNA, 100 bp, Homo sapiens
gaaactttcatttgatgaagagcatagacatgcaatgaatgaactagttgctgatagtccaactccaccgccaccacctccaccagatgacattcccatg

SEQ ID NO: 601303 - DNA, 75 bp, Homo sapiens
cagcgacggcagcggcggcggctggactaaacaggtcacctgcagctcaccatggatgatgatatcgccgcgctc

SEQ ID NO: 601304 - DNA, 100 bp, Homo sapiens
ctggctgtacaattcgtaacacaccttcagaacctatacattgcatcgtttgggcaaagtacttgttcaaatctttaatctcatgaagtacgacagctac

SEQ ID NO: 601305 - DNA, 82 bp, Homo sapiens
ctcccaaagtgctgggattgcagcctgtgcctactacactggcacaagtggatagagaaaagatctatcagtggatcaatga

SEQ ID NO: 601306 - DNA, 100 bp, Homo sapiens
aaagtccgtgtggccgcatttggaagcctgggcggcgtggagacggcgccttcagcttgagatattgggccatatggtgctcttcccagtctggttcctg

SEQ ID NO: 601307 - DNA, 75 bp, Homo sapiens
cgagggttcccgggattggaccgacgcagccatgtgaggactcagaagacaaagatgtgaagaccaagaaggatg

SEQ ID NO: 601308 - DNA, 103 bp, Homo sapiens
gcgcgctgctggacgaagagctctcctccttcttcctcaactatctcgctgacacgcaggattttttatcaagcagaaatgcatcgaacaacgagaatcaaga

SEQ ID NO: 601309 - DNA, 75 bp, Homo sapiens
ttgcactggaccaatttttaaacttatgaacatccaacagcaactaatgcaactttcatcctttgaaacgtgtgc

SEQ ID NO: 601310 - DNA, 82 bp, Homo sapiens
tgtcttcggtggactccttcggcagtccacccaccgccgccgcctcccagaaaactttagaaactgttcctttggagaggaa

SEQ ID NO: 601311 - DNA, 75 bp, Homo sapiens
atcgggtggagtgtaggtcatatcgccgcgttggtgaggatagccaaggttctggggacagaagatttatatgac

SEQ ID NO: 601312 - DNA, 98 bp, Homo sapiens
aatgagaccaatgaaatcgccaatgccaactccccaaagtacccacgtttgttcgaatgctggccccagagggagccctgaatatacacgagaaagcc

SEQ ID NO: 601313 - DNA, 75 bp, Homo sapiens
gccatgtcaactttgttcggaaggaaaccacccctactcctaatcccccgactacagaagaggagaaaacggaat

SEQ ID NO: 601314 - DNA, 90 bp, Homo sapiens
ggagcgcggacgcctccctcagccagggcaagactaaggagctggatggagtttcgttcttgctgcccaagctggagtgcaatggcgcca

SEQ ID NO: 601315 - DNA, 80 bp, Homo sapiens
acgtgcacgcagcccggcgggaggataaagaccaccacggaccaagaatcgccttcagccctgtctggtgcatccttggc

SEQ ID NO: 601316 - DNA, 83 bp, Homo sapiens
ctgcgcctctgccgccgccgccgccgcctgcggcccggccctgctccaggtccggacaggccgagatgacgccgagccccctg

SEQ ID NO: 601317 - DNA, 82 bp, Homo sapiens
cctgctcatcgcctactgcagaaggcaacagcccccaggggagcaaccagggagtcaaaatcacaccggaccagcagaagag

SEQ ID NO: 601318 - DNA, 100 bp, Homo sapiens
ctcccctagagcctcaagaaggaacacagccctgctgacagcttgattttaggatttctgacctccagactccacgacgtttttccaccacatcaacctg

SEQ ID NO: 601319 - DNA, 133 bp, Homo sapiens
ctctgtaccgggcgatgctgagagagagcaagcgtttcagcgcctacaattacaggctatgtggttgatgttgcagaatgatgagccggaggacttcgttatagctactggggaggtccatagtgtccgggaa

SEQ ID NO: 601320 - DNA, 100 bp, Homo sapiens
gcggcgagaggaggccgtccagcagatggcggatgccctgcagtacctgcagaaggtctctggagacatcttcagcagatgtcaagaccaggaagtggag

SEQ ID NO: 601321 - DNA, 100 bp, Homo sapiens
ccttaccgcatcctgcaccagacccaggactcccaggtctactggacagtggcgtgtggatggaggaaccaggggacgccgctgtgccattgaagcagat

SEQ ID NO: 601322 - DNA, 87 bp, Homo sapiens
gccagcccagctaaagcagacggctcgcactgcgacccgaaggttggctcaaaaacagaagttgctgagtgcaaggagaaattcgcc

SEQ ID NO: 601323 - DNA, 98 bp, Homo sapiens
cgcggagagagccactcccgcccacgtcccatttcgcccctcgcgtccggagtccccgtggccaggtccttccatagtgacgccccccaaggacatct

SEQ ID NO: 601324 - DNA, 98 bp, Homo sapiens
ccagaggggcctcccggtgtcctcgggatatcgccaatgtgatgcagaggctgcaaggtgggccatgcacagacacagctcatgtctcattaatcaca

SEQ ID NO: 601325 - DNA, 109 bp, Homo sapiens
tgcaaggagggcggcgggactgcactcgagtgtccagacctgctcgatggatttctctctgatcaaacggacagttcaggactcagaatctaaggatgaatgttcaccg

SEQ ID NO: 601326 - DNA, 51 bp, Homo sapiens
gccgtggaggcagaggtggcatggggacacaactcagatgggaagttcatc

SEQ ID NO: 601327 - DNA, 83 bp, Homo sapiens
gcaagaagtttctaggaaaggccggacaccaggatctggtggaacgagactgcaatggggacacgccaaacctgagtttctac

SEQ ID NO: 601328 - DNA, 100 bp, Homo sapiens
ctggacagagaacatccaaggttccattaaatacatcatgcttaaccctagttcacgaatcaaggaggaagttaagtcttcagagcctactgaggatgtg

SEQ ID NO: 601329 - DNA, 90 bp, Homo sapiens
gagagagaccggagaggtggagagggtggcaatgaccatgagatcttcacagaccccagaaccatgggctactccgtgacagcgcctgag

SEQ ID NO: 601330 - DNA, 51 bp, Homo sapiens
aattcttcgacatactctccagcttcaaatattcaagattaaagcagtgca

SEQ ID NO: 601331 - DNA, 98 bp, Homo sapiens
tttactccattcaagagcagcattcataaatttccaggttaaaaatgctgaatttcccagaggtgtattaaatttaattgaaagcctcatagaaggac

SEQ ID NO: 601332 - DNA, 96 bp, Homo sapiens
cggacaagtaagtggatcacacgcgccggctgctgctactactaccactttgggctgatggcaactgtcttccgtgtgtgctaagatcgtgcagct

SEQ ID NO: 601333 - DNA, 98 bp, Homo sapiens
tggtgcagacacccacttcggctgatgatactaatggaccatactaccaaggaccagtccacctgaaccacacactctaaagaaatattttttaagat

SEQ ID NO: 601334 - DNA, 50 bp, Homo sapiens
ccggtcatctttgcaggtggtcagctgatgtaagcaatggtacagtaaag

SEQ ID NO: 601335 - DNA, 100 bp, Homo sapiens
ggaagcggaggaaggtgaagtaggaccgaattcctgtgccgaagaggcctgcagtgggagagcagggctttatcctgtggataaacgcagagtgaacgag

SEQ ID NO: 601336 - DNA, 51 bp, Homo sapiens
taatgtttcttccagaaaagaaaggagggtgaggacaaaatcttcttaatc

SEQ ID NO: 601337 - DNA, 97 bp, Homo sapiens
gcagcgccggttccttgcggtcaagatgctgcaaaacgtgactccccacaataagtataatacttctccacgtctgcttcaggaagaaagtgcctgc

SEQ ID NO: 601338 - DNA, 83 bp, Homo sapiens
aatttgattgatagaagcaccctaaatgcagtttataagaaggctgaacttgctaaaaaaacagaagttcaggcccactctcc

SEQ ID NO: 601339 - DNA, 156 bp, Homo sapiens
aattaaagataccagatcatgtcagagagagagcttggttaacttgggagaaagtttcatctgtggatggagtattgagttcaaagaggccttttcattgtttgaccggaccccgactggagagatgaagatcacctacggccagtgcggggatgt

SEQ ID NO: 601340 - DNA, 96 bp, Homo sapiens
cttctaccaacctgagtgtctgagtaagatgagcagaattccctcacccaccaatgctatcgacaaggtgctggggcaaccaatggaaaagacaag

SEQ ID NO: 601341 - DNA, 100 bp, Homo sapiens
ttgtgcacaaatgaagatgtttccagccctgcctcggcggaccaaaggattggttcgagtgagtaaaaactaccgatcagtcatcagagcatgtatggag

SEQ ID NO: 601342 - DNA, 50 bp, Homo sapiens
ctgaccgctctggcccagggtgcgcgtgcctgcagacgaggcctacttca

SEQ ID NO: 601343 - DNA, 83 bp, Homo sapiens
tcaagcattaataaagcagactggcagggaattacatgaatgacagtcttcgaaccaatgtgtttgttcgatttcaaccagag

SEQ ID NO: 601344 - DNA, 51 bp, Homo sapiens
aaggattccaagtaactcttatttgaacctaaatcacagccacagcagctt

SEQ ID NO: 601345 - DNA, 80 bp, Homo sapiens
taccgagctgctagccgagagattttactaccaagccctgtcagtagctcctcagattgatgaagcagatgatgatgatg

SEQ ID NO: 601346 - DNA, 75 bp, Homo sapiens
ctggagaaccctttattttacatcattcaacatcttttggtacgccttattacatgtctccagagagaatacatg

SEQ ID NO: 601347 - DNA, 74 bp, Homo sapiens
gagcagccctggtgtcacctatcagtaaaagacggtctggaaaatcccgaagcagaagcccgtattcatctagg

SEQ ID NO: 601348 - DNA, 49 bp, Homo sapiens
ggggtcttcctcctccgccgttgacagggaagaaacccttttttcttgg

SEQ ID NO: 601349 - DNA, 100 bp, Homo sapiens
gtatgaagaacagtcacaggacaggtttgagcacaaaatgaacataattagggaaaataaggatctggcatgtttctacacaacaaaacattcatggagg

SEQ ID NO: 601350 - DNA, 82 bp, Homo sapiens
tggactgtattctggagaagaatttcacgagacttttgactgtcccattaaacagatcgccaaactgaggcagcaactacaa

SEQ ID NO: 601351 - DNA, 88 bp, Homo sapiens
agtgcaaagacatcaccatgaacactagcagtgaaaggtgtagcagtcactcggcctacacccacagcatcgaccttgtgaacccagc

SEQ ID NO: 601352 - DNA, 82 bp, Homo sapiens
ccctggattatctactactgctcctcctggcatccgcagtggctgcgatggaaggaatactcccccagttgcaagaggcgca

SEQ ID NO: 601353 - DNA, 108 bp, Homo sapiens
cgtccctgtgacctggccgatgaggaagtactgagcctgttggaggaactggcccggaaacaggaggacagtttatgtggccgaggcagacaagtggaattaggcctt

SEQ ID NO: 601354 - DNA, 113 bp, Homo sapiens
cggcgccgagaggccgtgcgggacgcgggcgccaggaccggccgaacgcagaggtctcctctgagcctccggcctccataagacccaaaacagatgacacctcttcccagtcc

SEQ ID NO: 601355 - DNA, 83 bp, Homo sapiens
gacgaggatatcgtgtctggagcagtggagcccaaagacccctggagacatgttcaaatctgaacatcaatgatgtactaggg

SEQ ID NO: 601356 - DNA, 83 bp, Homo sapiens
gttgaaccagctgtgggagaaggcccagcgagtccttgaatgggcaagagggcacatgaagtacggcgtcctccacattcacg

SEQ ID NO: 601357 - DNA, 82 bp, Homo sapiens
tgcaataatgaatcattagtatcggacacagaaacggatttgaaactggacaacatccttctggatgcagaaggtcactgca

SEQ ID NO: 601358 - DNA, 100 bp, Homo sapiens
taaggatgttaatgtaaattttgaaaaatccaaacttacattcaggtgtgatgaatgcagactctgctaccattttggctgtttggatcctcctttgaaa

SEQ ID NO: 601359 - DNA, 76 bp, Homo sapiens
cttggtgccaacagagttactctcatacctccagataatctctctattcaagagtttcaaagaaatgaaaatattg

SEQ ID NO: 601360 - DNA, 75 bp, Homo sapiens
agaattagaaactccaatgagagaacgttttaggaatctagatgaagtgaagggaatttggccgcagcccatgcc

SEQ ID NO: 601361 - DNA, 101 bp, Homo sapiens
cggcagaagggctacgaagaagtgcttcagcgggccaggaagcgcatccaggagggaacaacctatcttcagcactcgagctcatgtcttccaaattgacc

SEQ ID NO: 601362 - DNA, 90 bp, Homo sapiens
cagctcccagaccaccaccgaagggcctgattcagctgttaccccttcagacagttctgaaattaaagtgactgagaccgaagatgatag

SEQ ID NO: 601363 - DNA, 75 bp, Homo sapiens
ggcgagcggggctttggacgccggtggagacgcaggcgagatcatgaatcggttcagtggtgttatgacaacttc

SEQ ID NO: 601364 - DNA, 75 bp, Homo sapiens
gctgcctaatttacagcaaccatgagcagtgctacaaatgggaagtcagagaccatcacagctgatgtcaatcac

SEQ ID NO: 601365 - DNA, 50 bp, Homo sapiens
cgcggagccgccgaaacctgcagaggagctgatcacgcagtacctggctg

SEQ ID NO: 601366 - DNA, 100 bp, Homo sapiens
atccccttctccccgtaccgcgtgcgtgccgtgcccaccggggacgccagcaagtgcactgtcacagtgcccccactcccaactcccgccccaagccgcc

SEQ ID NO: 601367 - DNA, 137 bp, Homo sapiens
gtccagcctgcatctgcccctcggccttccgacgtgggcggtgggccccagccccacagaccagcccagcattcaggtgaaaggtgtagcagtcactcggcctacacccacagcatcgaccttgtgaacccagcgac

SEQ ID NO: 601368 - DNA, 82 bp, Homo sapiens
aggtatccagcaatgaggacctggtaatactgcattgcatgattgtgcagaatctggaagtttggacatcatgaagatgctt

SEQ ID NO: 601369 - DNA, 100 bp, Homo sapiens
atgctgctaaaaacaagactggggctgctcccatcattgatgtggtgcgatcgcccctcatatggaaaatttgaaatgcagaggggaaacagtagcaaag

SEQ ID NO: 601370 - DNA, 102 bp, Homo sapiens
tggcacagtcacttcacaagttgtctaccgcctgtccaggaagggtcaagactgatacagttcttatattgtgtagaaagaaagtggaaaacacaaggtggg

SEQ ID NO: 601371 - DNA, 51 bp, Homo sapiens
gagaaccccaagatcccacatggagggatgcttgaagatggaaagaaattt

SEQ ID NO: 601372 - DNA, 74 bp, Homo sapiens
ccctgaagctctgctgccccgcaggcaccttcgggccctcctgccttcagggaaatctggtgctcctccagatg

SEQ ID NO: 601373 - DNA, 94 bp, Homo sapiens
cctcgcctttgccgatccgccgcccgtccacacccgccgccaggaacttgctactaccagcaccatgccctaccaatatccagcactgaccccg

SEQ ID NO: 601374 - DNA, 90 bp, Homo sapiens
gaagatgcaagcggtttgggaccttgaacaaggcaaatatggttttgtttgcaatggattttggataaacaagatctgttgaaggagcgc

SEQ ID NO: 601375 - DNA, 51 bp, Homo sapiens
agctggctggcggagcatgagcgccccagtctgtagatcttttaccaccaa

SEQ ID NO: 601376 - DNA, 100 bp, Homo sapiens
cagggcacgacggccctgcctaagaacaagaaccaggagggcaccgggcaccggctgctgaacgttctaaatgagaagaaacttcaagaggttgatagtt

SEQ ID NO: 601377 - DNA, 83 bp, Homo sapiens
atggaaccctccttttactcctctcggaggccctggcccttacccagacctgggcggtggttggatttcatcccttactggtc

SEQ ID NO: 601378 - DNA, 97 bp, Homo sapiens
agcaggtagatgagtggacagttgaaacggttgagctacttgtcctgcactgacgaggatgaaatgtgggattggaccaccagcatccttaaagccc

SEQ ID NO: 601379 - DNA, 76 bp, Homo sapiens
aatgtgaagagacaggaggcagcagacggacatccagataagaccatcatcatgtggaaactgaccagggatgaga

SEQ ID NO: 601380 - DNA, 101 bp, Homo sapiens
cgagaaaccagtgaccttgaggactcctgggatgaatcctcgggtgcagagtcggccattgaaaactcaagagcttcgagagccagtgttgtcagcagcca

SEQ ID NO: 601381 - DNA, 95 bp, Homo sapiens
ctctgcttggcatccccttgctggacagtggctgtggtgagcacctgcggatctgtccccagggctacacctgctgcaccagcgagatggaggag

SEQ ID NO: 601382 - DNA, 90 bp, Homo sapiens
agcgcgggaggcaggttccgcacgggcagcagcgttctcggatgctagctactctttttaaggatgaaaggtgccagcaacttgctgcct

SEQ ID NO: 601383 - DNA, 100 bp, Homo sapiens
cgaagaggtacgattccggagaatcgcgaggcagagcgggagcgcgcagccaggtgaattcatcattggccgagttatcaaagccatgaataacagctgg

SEQ ID NO: 601384 - DNA, 100 bp, Homo sapiens
gctaccggcaccacgaacgcctttgtatgggcctaaaggccaaggtggccactaacacggacaccagccgaaatgccggaaatgcggtcctgtttgagac

SEQ ID NO: 601385 - DNA, 98 bp, Homo sapiens
cagagttcaaggaggccttccagctgtttgaccgaacagaagattaagattgcggccctgcgcatgtatactagctgtgtggagaaaactgacttcga

SEQ ID NO: 601386 - DNA, 100 bp, Homo sapiens
agagacccgttcagagtcctacagtggcaggtaatggagccagtactttgacagcaggttgcaaagttgcagaagttttacaagtacctccaatgagagt

SEQ ID NO: 601387 - DNA, 107 bp, Homo sapiens
cggcgcctcctcggagtccttggggacggagcagcgcgtcgtggggcgagcggcagggagtgcatccgccccaacccttttccccctcgtctcctgtgagaattccc

SEQ ID NO: 601388 - DNA, 100 bp, Homo sapiens
ctgaaagctgtttggaagaaacaggtggcctgggagtagatattgtcctagatgctggagatggagtctcccaggcgggaatgcaatggtgcgatctcga

SEQ ID NO: 601389 - DNA, 88 bp, Homo sapiens
ggccgacttcgatgatcgtgtgtcggatgaggagaaggaccatggccaacctggagcgcaccttcatcgccatcaagccggacggcgt

SEQ ID NO: 601390 - DNA, 100 bp, Homo sapiens
gtttgatggctgatcttgaaggtttacacttgtcaacttcctcttcagtcatcagtgggaaggtgtggctcattgactttaatccatttggtgaagtcac

SEQ ID NO: 601391 - DNA, 100 bp, Homo sapiens
ttactgatgaaggcaaatattattgcacttcttgccacaatgttacagagtgatgggctggtgattttggcagcagcatggcactcagcagacaatccat

SEQ ID NO: 601392 - DNA, 100 bp, Homo sapiens
agccgccgacggttcgctcttcgacaaccccaggacgttctccagacgtcccccagcccaggcgagtcgggaatccggagatgatgagtatcaaggggac

SEQ ID NO: 601393 - DNA, 82 bp, Homo sapiens
gctgtactttatatgatatgcttgcttctattaaaagtggtgatgaacttcaggatgaggcagtcttgattgatatggaaga

SEQ ID NO: 601394 - DNA, 90 bp, Homo sapiens
gtggctcctggtcagtgtaattctaatctcacggatatcctctgttgggggagaaggtaagtggaggtatacttcgaatttttccagaag

SEQ ID NO: 601395 - DNA, 100 bp, Homo sapiens
ccaggttgcaagatttaatgacctcaggtttgtcggtcgaagtggaagagtggcatcattggggagcgcctgccgattaggtattacctaactttcggga

SEQ ID NO: 601396 - DNA, 101 bp, Homo sapiens
gcgagctgagtggttgtgtggtcgcgtctcggaaaccggtagcgcttgcagcatgatctcctgggaggcccccgtggagaagaagactgagtgtatccaga

SEQ ID NO: 601397 - DNA, 91 bp, Homo sapiens
tggatcttcgaacttttgacacggctttggaaacgacgtcatgtgttaggttgttgcaagacatgaagatttactggcacaagcaactggg

SEQ ID NO: 601398 - DNA, 100 bp, Homo sapiens
ccaacctcagtgcagccaaccatgatgctgccatctttccaggaggctttggagcggctaaaaacctcctcccggcatggtgctcaaggccttcttcccc

SEQ ID NO: 601399 - DNA, 100 bp, Homo sapiens
agtcctatgtactcaacttccatgggcgcgtcacacaggcctccgtgaagaacttccagatcatccatggcaatgaccacgagcttccccaactggtaac

SEQ ID NO: 601400 - DNA, 50 bp, Homo sapiens
caaacctgtatctgtgcaggcaatgtggcacctgcggaactcgagtcatg

SEQ ID NO: 601401 - DNA, 90 bp, Homo sapiens
cagggtataaatgatctcgtcactcctttctttgtggtcttcatttgtgaatacatagtccaaagcacttagaatctccacaccactaac

SEQ ID NO: 601402 - DNA, 101 bp, Homo sapiens
caaaacagcagatttcccaagagcagcggaaaatgatccagtcacagccgaatttgccatgtactgataacgtagcattcgatatggaaaggctcaccaga

SEQ ID NO: 601403 - DNA, 143 bp, Homo sapiens
ttactggattcaaggaccctgatgaagaccttgaacaagtctcgagagtggaaacaactctcacgttcatgtgaaatggattttggacactgatattttcaatgaatggatgaatgaggaggattatgaggtggatgaaaata

SEQ ID NO: 601404 - DNA, 75 bp, Homo sapiens
agaacctatgctggtggaacagcctcggccaccaagatgccttcaattaagttgcagagttctgatggagagata

SEQ ID NO: 601405 - DNA, 100 bp, Homo sapiens
gggctccctgaagccccacgattaccccaagtgggagatggagtctcccaggcgggaatgcaatggtgcgatctcgacttcactgcaatcttcacctccc

SEQ ID NO: 601406 - DNA, 74 bp, Homo sapiens
ttgcagaggatgtcatcattgtcaccagcagtggctggcacatgtgtatcaatcccaaggaatgatgagagctg

SEQ ID NO: 601407 - DNA, 74 bp, Homo sapiens
acggccgcctccggagcccgacgcggtgaccattgtgaggtagatattttgttctaattttccagatgaggaag

SEQ ID NO: 601408 - DNA, 80 bp, Homo sapiens
ccgtttgttcaggaaccaccagtgacagagcattgggatcccgtggcagttgcagcactgaagtggagaaggagacccag

SEQ ID NO: 601409 - DNA, 83 bp, Homo sapiens
attcggccatgagccgctacatactcatcatggggctcctgtacaagcaaacggggattcagcgtccgatcctttggaacagg

SEQ ID NO: 601410 - DNA, 75 bp, Homo sapiens
agaaactggcctctgagttaagttttgattttcgcattgaatctgtagacctgcaggctgggacaatgaaaagaa

SEQ ID NO: 601411 - DNA, 116 bp, Homo sapiens
tattgctactctgtattcagatcttcatgtgtctcttctaagctgaataaagctgttttggaactgtcaggtacctcaaagcactaaaggttctcaaaccatgacatcctctggag

SEQ ID NO: 601412 - DNA, 100 bp, Homo sapiens
ccttctggacaagccagacaactgtcctgacatgctggtgtatcaaggtcagaagaagtcaaaagaagctttgtcccactatcaagcagctttggaatat

SEQ ID NO: 601413 - DNA, 101 bp, Homo sapiens
cgctggggactgcgggcggcgctgtgtccgtcgccatgacagcctctgaagagccaatccattcaggatgggaaaccacgcaggcaaacgagaattaaatg

SEQ ID NO: 601414 - DNA, 90 bp, Homo sapiens
agactccaggacacccctgaagccgagaaatggaacaagcacatcatgattgacttggggactggcaacaacaacaagattaactgggcc

SEQ ID NO: 601415 - DNA, 87 bp, Homo sapiens
gagaatgaggaggacaacagctacaaccggggaaatcgagctatagcagattatcttcgttcaaatggctatgaagaggcatattca

SEQ ID NO: 601416 - DNA, 80 bp, Homo sapiens
gccgaggcaccgaggcactcagaggaggccgactcgcgggccgctgcacccaccgccaaggacaaaaggagcccagcgct

SEQ ID NO: 601417 - DNA, 96 bp, Homo sapiens
cctgcgggtgcctttgaaaatcaacgacaacttgagcacagatctcccttgagtttagaaatctggctgagaaataccaaacagtgattgccgaca

SEQ ID NO: 601418 - DNA, 75 bp, Homo sapiens
cggggaggaggatgggggctaaccagttagtggtgctcaacgtgtacgacatgatctgaaatagctcaactcagt

SEQ ID NO: 601419 - DNA, 100 bp, Homo sapiens
ctacacttgcgcaaatgtctccggagctcgaggccatgagcagatataccagcccagtgaacccagctgtcttcccccatctgaccgtggtgcttttggc

SEQ ID NO: 601420 - DNA, 100 bp, Homo sapiens
gcagaagatctggattccacacagcagcggcagcagcaggctgcaacggagaaggggctccaaaactggacaagccaaggcatctgtagccaaagtaaac

SEQ ID NO: 601421 - DNA, 82 bp, Homo sapiens
ttcctgctggggctcatgtttgagccactgtcaacaacagctcagacaccgagagcatcccctctcctcacactgaggccgc

SEQ ID NO: 601422 - DNA, 96 bp, Homo sapiens
cagcaagcggggccggtggcgcccgtgtcggagaccccgcgccggaccctgaggcagcgaaaacacctggattcttatctagctgactgctacgat

SEQ ID NO: 601423 - DNA, 90 bp, Homo sapiens
ccatgaaagacttctgaatccaggaagagagactgactgggaaacatgttattcaggaccctgatgctcccataagacagaaaatgcccc

SEQ ID NO: 601424 - DNA, 98 bp, Homo sapiens
acgttttcgattaatatataatagtcttggtggaaataatcggcaatctgcacatcgtgctgccacacgaggcttcattcgttatggctggcgctggg

SEQ ID NO: 601425 - DNA, 98 bp, Homo sapiens
ggaaagcttggttacaacccgggacacccgagctcaaatgatacttttcccacagcaatgcacattgctgctgcaatagaagttcatgaagtactgtt

SEQ ID NO: 601426 - DNA, 100 bp, Homo sapiens
cgagtctgaggcggagggagtaatgtcgtcctcttgagttctggcgccttgactactgggaagatgacttgcggcgccggcgacgatttgtgcgtaaccc

SEQ ID NO: 601427 - DNA, 83 bp, Homo sapiens
cacagagcctcgcctttgccgatccgccgcccgtccacacccgccgccaggatcccatgacagattctgttgtcacgtctcct

SEQ ID NO: 601428 - DNA, 75 bp, Homo sapiens
ctgccaacgtccagccttattacctctatggatccaagaaaaggcgacggcggattgacagaagtatgattggag

SEQ ID NO: 601429 - DNA, 100 bp, Homo sapiens
gtcacggccaacgtgggctcgctcttcgacgacagtcttcctgcgagcaattaatcagtatgcagatatgctgaacaaaaaatttctggatcaagccaac

SEQ ID NO: 601430 - DNA, 98 bp, Homo sapiens
aaagaatgtcagtgattgttcgcactccatctggaaagttacgactctactgcaaaggagctacttcgcatatcatttaagtggatggttcgagcttt

SEQ ID NO: 601431 - DNA, 100 bp, Homo sapiens
tgtggtagagagaaaaatcctggatctgtatgctttgagcaagaaagtaactcatgacatggacatgtgctatgggatgatgggaagcctgtttcgcagt

SEQ ID NO: 601432 - DNA, 89 bp, Homo sapiens
gctgtggggtttctcagataactgggcccctgcgctcaggaggccttcaccctctgctctgggtaaagcgagcagctgatgcagctgta

SEQ ID NO: 601433 - DNA, 100 bp, Homo sapiens
cgagcaatgggaattcacgctggaactgccattggatgtccagaatcccctgtagttgataatgttgggaataagctctgcaactttctttggcattcag

SEQ ID NO: 601434 - DNA, 75 bp, Homo sapiens
ggagcaaagagctgcatcatgaattcaggagcatccaggagcattggtttgaaaaggccctacgagacaagaagg

SEQ ID NO: 601435 - DNA, 100 bp, Homo sapiens
ccgtggagaacctcaagaacatcttctcagccatgtttgaccgtgagaacaaggccggcgtgaacttcagcgagttcacgggtgtgtggaagtacatcac

SEQ ID NO: 601436 - DNA, 100 bp, Homo sapiens
ccctgaccatggctccctgcagtaccctttaacgcaaagtggaagatgctttctacaaaggtgaactcaggctgaatgaggaaaaattatggaagaaaag

SEQ ID NO: 601437 - DNA, 89 bp, Homo sapiens
ggccgagagtgggtgtggaggaggaagactggatgccaatgatcctatggcctctccagaggagaagtgtcaacaagtcttggaacccc

SEQ ID NO: 601438 - DNA, 83 bp, Homo sapiens
caaaatacaaatcatggagccgctggggtcccttttgcctcagatactattttgaagcttcaagaaacacaggatcaacttac

SEQ ID NO: 601439 - DNA, 83 bp, Homo sapiens
gggaggtgcccctgcgttgtaccatccgcctgtgggacacctaccaggattttttatcaagcagaaatgcatcgaacaacgag

SEQ ID NO: 601440 - DNA, 51 bp, Homo sapiens
atgcctcaccaagtcacatgacaagcagctctgccgacttccagttctgga

SEQ ID NO: 601441 - DNA, 75 bp, Homo sapiens
ggtgaatttcccagaaaccagatgcagccctactcaagatggtgccatgacaatggtgtgaactacaagattgga

SEQ ID NO: 601442 - DNA, 102 bp, Homo sapiens
atccagaactggtgcaagcggggccgcaagcagtgcaagacccatccccactttgtgattccctaccgctgcttagatcaggatcctcatgaccagccaaag

SEQ ID NO: 601443 - DNA, 82 bp, Homo sapiens
ctcacctccctaaactggttaatagtggcatggaagatccatttgtaaataacagatgcgggtgaaagatccaactaaagct

SEQ ID NO: 601444 - DNA, 98 bp, Homo sapiens
cgtcgccccggtttgacgcacacggcaccaaactgtggcgacagacaaagttgcagaaaagctgagctctactctctcatgggtgaagaacacagtat

SEQ ID NO: 601445 - DNA, 76 bp, Homo sapiens
cttctgcagtgattttaaccaaggcagttggtggaaatgaggtcatggaaaatggaagatttgcaaaatacaaata

SEQ ID NO: 601446 - DNA, 100 bp, Homo sapiens
gccagtcctgcctccaatgtagttgtcttgccaagtggaagtactgtttatgtcaaaagtgggtttggaggatttgggacaacatctacaactgcaggtt

SEQ ID NO: 601447 - DNA, 100 bp, Homo sapiens
tgctggatatccaagcctctcagcttcggagaatggagtcttccatcaatcatatctcacagaacttccagcactatgttgaataagagtggtgagagca

SEQ ID NO: 601448 - DNA, 75 bp, Homo sapiens
tgtttatgagaattttatgttgctgatgaacaacttagaatggagtataaagtgatccaaaccaaccagttcctc

SEQ ID NO: 601449 - DNA, 98 bp, Homo sapiens
aggcgctgcgccgcaacgccgagcgcaccgacatctgcctgctcaaagaacatccagtcatggataaaaatgagctggttcagaaggccaaactggcc

SEQ ID NO: 601450 - DNA, 109 bp, Homo sapiens
aagaaacgggccgcgaaccgcagtatcatgctggccaagaagatcatcattaaggacggaggcacgataatttgcggtaaaagcctttcagtgaatgaaatgactctta

SEQ ID NO: 601451 - DNA, 90 bp, Homo sapiens
gggaaatgcaacaatccaaatggccatgggcacaattataaaggaagttcatcagcagaggaaatggtcactctcttggttcaggcgggc

SEQ ID NO: 601452 - DNA, 83 bp, Homo sapiens
cttgaaccagctgagcgctgccatcccggccacgcgggtggaggtgtccgtgtcctgcagcaaacggggattcagcgtccgat

SEQ ID NO: 601453 - DNA, 98 bp, Homo sapiens
gcggatcgccgcgctcagcgacaaacaaatcaggatcctcatgaccagccaaagagaagaagaattaggaagcataaatcaaagaaaaaatttaaaaa

SEQ ID NO: 601454 - DNA, 82 bp, Homo sapiens
aagaaagcagctgatagcacatcacagagctgacaaggaaggtttcgagcgttttgctggcaaagggatttcttacaacctc

SEQ ID NO: 601455 - DNA, 80 bp, Homo sapiens
agaagatgactatgaaagtgacgcagctacaattgtccagaaatgtgacagtcattttgtttactcattcagccctgttg

SEQ ID NO: 601456 - DNA, 100 bp, Homo sapiens
acccgtggaccctggcgctaggcaggcgttgaggaagaagccacccgagcggactcccgagcagaagatggctgtgccacccacgtatgccgatcttggc

SEQ ID NO: 601457 - DNA, 100 bp, Homo sapiens
gaccttcgagcaccccaacgtggtcagaggatgaggaagatgaggaaatggtggaatctaaagttggccaggactcagaactggaaaatcaggacaaaaa

SEQ ID NO: 601458 - DNA, 100 bp, Homo sapiens
ttgccagtggcggattacttcaagcagtggattaatctgaaaaagggcttaaaagacaaccttcttgcttctgggacatccagcctgacagccaccaaac

SEQ ID NO: 601459 - DNA, 73 bp, Homo sapiens
atagctacaaaccatactaaattattccatttgcaacttatccccaacaggtctcagacttgatccgcagtgg

SEQ ID NO: 601460 - DNA, 101 bp, Homo sapiens
tcaaagctgctgccgccccttgggctaaaagaactgataaatttcaaacggaagagagtggcagcatttagaaagaatctaattgaaatgtctgaactgga

SEQ ID NO: 601461 - DNA, 83 bp, Homo sapiens
gggccacatcaccgccttcctgggccacaacggggccggcaagaccaccaccctgcggcttacagggagaacacagttggcct

SEQ ID NO: 601462 - DNA, 96 bp, Homo sapiens
cccagtgggtcctcacagctgcccactgcatcaggaaagtggaagtttccagagaaaacagccatcaaagaaggttgagagtgagaattaagagac

SEQ ID NO: 601463 - DNA, 100 bp, Homo sapiens
tccggctgtaaagatggcggcttcctagtgagtcggcggctgatttagaaggaggttcaggctacggcctgggcaatatttaagggaaagtataaggagg

SEQ ID NO: 601464 - DNA, 75 bp, Homo sapiens
gccttgttagggcgtggcctgaggcttggataagtggggcctagtaaatgacaaagactcaaaagattctatgac

SEQ ID NO: 601465 - DNA, 100 bp, Homo sapiens
gctgcagcagtggcgggcgcaggagcccggccccggagccaccggtgcgttccatggatgaactgaatcatgattttcaagcacttgctctggagggaag

SEQ ID NO: 601466 - DNA, 83 bp, Homo sapiens
gcaccagtaaaatatggtgaactcattgtcttagggatttgtataagtccttgaaaacactatctgcagaactggtaccttgg

SEQ ID NO: 601467 - DNA, 100 bp, Homo sapiens
atctgctttgttgggagtgatggatggacaggttgttgcaactgaagaagatctcgtcccacccagtctgcgggagccatcccccagagcagacgggcta

SEQ ID NO: 601468 - DNA, 75 bp, Homo sapiens
ccctgctcggaggcggtggcgacaatgcagatcttcgtgaagactctgactggtaagaccatcaccctcgaggtt

SEQ ID NO: 601469 - DNA, 75 bp, Homo sapiens
caaaatatgatggtggttggacagtcagcatttgcagactttgtctgatgatttgaagaagagaagagagcctca

SEQ ID NO: 601470 - DNA, 75 bp, Homo sapiens
aagaccgaagcgttcgtatctggaaggtgtggaaacaggaagagaactagaactggaagtaaagcattgaagatg

SEQ ID NO: 601471 - DNA, 102 bp, Homo sapiens
ctgaaccgcactggcctctgctacctgcccgaggagctggccgccctgcagaagctgccaaggccacctttgatgccatttctaagacctacagctacctga

SEQ ID NO: 601472 - DNA, 95 bp, Homo sapiens
agttccagaacctggctacgcttaagccttccaacaaggcttttgagaagaagcccgtaggtggaagggacttgccttgtctcggatgagacttt

SEQ ID NO: 601473 - DNA, 74 bp, Homo sapiens
aaatgctgccttccttgttggatgctacatggtagttgatgtcacttggcgatattcctgcaaacatgaagagg

SEQ ID NO: 601474 - DNA, 75 bp, Homo sapiens
gaagatggctgtggaaggtgttttaaaggccaagaagcttgagagaagaaaaatttcagaaaaattgtctcaatt

SEQ ID NO: 601475 - DNA, 82 bp, Homo sapiens
ggagcctcagttggaagcagccgatccagcctgcggagcctgtggggcagagatttacaaacgaggaccacctggcagttca

SEQ ID NO: 601476 - DNA, 101 bp, Homo sapiens
cagggctcctgcttggtgtaccagaattcggccatgagccgctacatactcatcatggggctcctgtacaaggtcaacaccttcatgtccttcatattccc

SEQ ID NO: 601477 - DNA, 76 bp, Homo sapiens
aaatccaggagattgttgataaggtaaaccgtcctattggcagggtacagatcttcactgcagacttatctgaaat

SEQ ID NO: 601478 - DNA, 83 bp, Homo sapiens
cagaagaatccgccatgggctactcagtttacagccactgcagtatcacagccaggcccttctgcgatgttttacctggctgc

SEQ ID NO: 601479 - DNA, 95 bp, Homo sapiens
gcctatgtgaaactgctttctaaaacaccagaactcaacctggaaacttacatgcttgctgtaactttggatgaatggaaaaagaaactggaatc

SEQ ID NO: 601480 - DNA, 50 bp, Homo sapiens
ccgggactctgaactatggcgaatgctgaccccctgaaggtgtacccgcc

SEQ ID NO: 601481 - DNA, 101 bp, Homo sapiens
tgcctctttcaatgatatgaagttaaaaccagtaattcgccaaaatgacgaacacaaagggaaagaggagaggcacccgatatatgttctctaggcctttt

SEQ ID NO: 601482 - DNA, 100 bp, Homo sapiens
caggtgatgtgtctaaggattgtcctgagaagatcctgtattcttggggagagttgctaggaaaatggtgactctgacatcattagaagcatgccagaac

SEQ ID NO: 601483 - DNA, 89 bp, Homo sapiens
tcgtcattaattggacacagtgccagagtgtatgcactttactacaaagatggacttctctgtacagagacattttaaatccaaaggat

SEQ ID NO: 601484 - DNA, 75 bp, Homo sapiens
aatcacctttaagaagcccatgcctaccaagaccaaacctggaccacccaaaaagccgaagaccccttcaagacc

SEQ ID NO: 601485 - DNA, 83 bp, Homo sapiens
gaggacccaggagaaattcgccctcaaagcctatatgaacccaatagcaatggcgagatcaaggggtccaatccagtcttcag

SEQ ID NO: 601486 - DNA, 100 bp, Homo sapiens
gtcaaccctaaacagtggactcaacttcaaagacgttctcaaggagaaggcagacctggaatggccaaagttttctggtcttggatgagcaacgatttgc

SEQ ID NO: 601487 - DNA, 75 bp, Homo sapiens
cagacacagaaggccgacaccctgcacctgcatgttcagctcttgacacaaatccaccttcttgccacctgcaac

SEQ ID NO: 601488 - DNA, 74 bp, Homo sapiens
tgcaaaaatgggcctggttgaaacaaaattggcgattattcctggtggaggcagctgcaatatttaattcagcc

SEQ ID NO: 601489 - DNA, 100 bp, Homo sapiens
aaggaagattactcagagattatagggagcatgggtttggtgcacctcgatttggaggaagtagggcagggcccttatctggaaagaagtttggaaaccc

SEQ ID NO: 601490 - DNA, 98 bp, Homo sapiens
cttcaaggttgccatgcacatcctcaacaatggaaggtttggcatggctgcggccctggcaggtaccatgagaggcaggagaatcgcttgaacccagg

SEQ ID NO: 601491 - DNA, 75 bp, Homo sapiens
attcaacattttaatggaaaatatctgaaaacaccaccaggcatcccagactctttttgatcagaacaatgctgc

SEQ ID NO: 601492 - DNA, 100 bp, Homo sapiens
ccgcttccggccctcgctgcgcctcaaaagttctcagccaaaaccagtgatagatgtgttctggacttggtgcctctttctgttatatgctttcctattt

SEQ ID NO: 601493 - DNA, 75 bp, Homo sapiens
ctgatcttcgccaaactgtggagcctcttctgtaaccaagattgcagagggaatggcatacatcgagcggaagaa

SEQ ID NO: 601494 - DNA, 83 bp, Homo sapiens
gattcgccgaggcaccgaggcactcagaggagttcaaatctgaacatcaatgatgtactagggaactactcattgactcttgt

SEQ ID NO: 601495 - DNA, 100 bp, Homo sapiens
gcagctcaaacttctgctccctctaagtaccaccgaactcgatctgggggagccagggatgaacgatatcgatcagagctgcatgcttctgggaggccgg

SEQ ID NO: 601496 - DNA, 76 bp, Homo sapiens
acccaagcccgctgagcaggatgagggtttatctggcaagactgaggcaaataagactacagaatttcaatgagcg

SEQ ID NO: 601497 - DNA, 100 bp, Homo sapiens
catctggaattactacccaatcaaggaatgctgatcaagtttccaccgtgcacattatgaagaaaagaaatggaggtgggagtttaaataactattcctc

SEQ ID NO: 601498 - DNA, 75 bp, Homo sapiens
tgctgacaaaaggcatggtgatccttcgggacaagattcgcttctatgaggcaaacggggattcagcgtccgatc

SEQ ID NO: 601499 - DNA, 100 bp, Homo sapiens
gctgtcagggggctgccggattcgccgcgggcagcaaagagctcctgggaaggtgctgctggatgcagtttgcaaccacctcaacctcgtggaaggtgac

SEQ ID NO: 601500 - DNA, 95 bp, Homo sapiens
ccactttcaagcatgaaagctactatgccacagtgaatgaggctaatctagacgaaatccagatgagttcacctacattccttagagctttaatg

SEQ ID NO: 601501 - DNA, 90 bp, Homo sapiens
gtttgtggaagatggcgcctgttgtgacaggcgtggagattggtgaaagcgtgagaggggaagatgtctacatcatccagagcggctgcg

SEQ ID NO: 601502 - DNA, 100 bp, Homo sapiens
ttatcctgtgaggtcccttggaagtggggcccacagactgacgctgctctgcttcctggattcagccctcttcctaaggacgccctcctgcaaaacggcc

SEQ ID NO: 601503 - DNA, 80 bp, Homo sapiens
atattctggtggggagatgaacccaacctagtgggtgtaatacatcatgaactgcaggatgatagtgaaatgtttcgagg

SEQ ID NO: 601504 - DNA, 97 bp, Homo sapiens
cggcagcggttggaggcttcgcccggctttgcagcggggacttcggcggcggcgcctcaggcacctcggcccggtactatactggcaattgctggag

SEQ ID NO: 601505 - DNA, 100 bp, Homo sapiens
gaacaaataaatgaaggagaacaacagctaaagtctaaaaatctggaaggcaggttacattgattacccacctagtacaacatcttacgggaagagcata

SEQ ID NO: 601506 - DNA, 98 bp, Homo sapiens
tggagctcgcccccaacttccagggctgccataagaaaagaattaaatgaatttaaaagctccgagatggaggttcatgaagagagcaaacattttac

SEQ ID NO: 601507 - DNA, 96 bp, Homo sapiens
gtggaggaaaacaacttcgagggcagagggtttcacagaccagctgcgtaagatttctaaggatgcagggatgcccatccagggccagccatgctt

SEQ ID NO: 601508 - DNA, 74 bp, Homo sapiens
aaagaagtccaagaagcaaaaaagggactgctaagaagataccaccagcaatgtctcaggctgtgcagacaaac

SEQ ID NO: 601509 - DNA, 100 bp, Homo sapiens
agccgtgctctacctctatccggacacaactcagatgggaagttcatcgcccgggcacagcggatagagtacgactgtgaactagttccccggcgagtgg

SEQ ID NO: 601510 - DNA, 109 bp, Homo sapiens
gtttctctccctctgcccccccttccccacgcaaccccagatccatttacactttacagtgagaagccctaccactgcaactgggacggctgcggctggaagtttgcgc

SEQ ID NO: 601511 - DNA, 100 bp, Homo sapiens
cttggacgggacagggtcgggggacacgcaggatgagccccgcgaccactggcacattcttgctgacagctttgtaggcagccaatcccagagaagcaga

SEQ ID NO: 601512 - DNA, 98 bp, Homo sapiens
ggggctaatggtaaccgaaactcaaagttaatggagccaaatttaataaaggttcaaaccttgtactactcagctgatcacaagctgcttgatgggaa

SEQ ID NO: 601513 - DNA, 75 bp, Homo sapiens
gagctgttcctattgggccatcttggctccaccaccctggtgcaattaaaaactagcatttctagtcagtatgta

SEQ ID NO: 601514 - DNA, 74 bp, Homo sapiens
gcaacagtttctctagtgggcccttctagatgagtgatgtgtctgcaggaggagccactgtttttcctgaagtt

SEQ ID NO: 601515 - DNA, 75 bp, Homo sapiens
tcccacctcagggcccccttcagccatgactcctccctacccgcagtttgaggtgtgggcagaagaaaaagctag

SEQ ID NO: 601516 - DNA, 100 bp, Homo sapiens
cctccccgaagctgccggagccctctgtcctaagctggcagggcggagatgctggaccacgccgtcctgcttcaggtgatcaaagaacagcaggtgcagc

SEQ ID NO: 601517 - DNA, 100 bp, Homo sapiens
gcccggcggcggaggtaacaggcgaggcagcccgagcgcagcgttcacctttccggacaccgaattcaaagaagctttttcactatttgacaaagatggt

SEQ ID NO: 601518 - DNA, 100 bp, Homo sapiens
gaccttctccctgcctggacccctactattgcaacaagtgtcgtgtgggagccaatgggagatgggaagaaaatcatttccttggctgataaccatatcc

SEQ ID NO: 601519 - DNA, 100 bp, Homo sapiens
ggaaatgtcttgaaagaggcacgcatttttgacagggccaaaacactcattgactcagatctctcaatccatgctggatctctgtgatgaaaaactcaaa

SEQ ID NO: 601520 - DNA, 82 bp, Homo sapiens
gagacggcggcagcagcggcattcagccacaggtgtcaagctctcataaccctacatcaacagaagaacaacagttatattg

SEQ ID NO: 601521 - DNA, 100 bp, Homo sapiens
cggcggtcgacatgttccaggtcccggatagcgagggcggccgcgccggctccaggagaagtacagcatcggggagcccacagtgccatccaccctggca

SEQ ID NO: 601522 - DNA, 74 bp, Homo sapiens
cgggcccttcctcgaggcggtgtcccacctgccgcccttcttcggtcattcccaaaagcaagttcgtcttggtg

SEQ ID NO: 601523 - DNA, 98 bp, Homo sapiens
cacgccgtccttatgaacttcctgttcaccatgctgcgggaagagcttagcagtgtctgcaaaaacgaatcttttcctacaacctgttaactgactgg

SEQ ID NO: 601524 - DNA, 82 bp, Homo sapiens
aggaggggtgccggccgggattcgcggcccggagctcgggaccgtatcctagaaggaaaacatcaccatggctacagaaatt

SEQ ID NO: 601525 - DNA, 75 bp, Homo sapiens
tcagtctaactctgtgtgctacgccaagaacgggcaggctcatgctgaagattcggttatggaccatcatttccg

SEQ ID NO: 601526 - DNA, 50 bp, Homo sapiens
cagagccaggcgcagcgtccccccagcccccaggaccaaattaccatcac

SEQ ID NO: 601527 - DNA, 100 bp, Homo sapiens
acccagtctgagtgtctgtccccagagcctcagtttgtgcaggacaccgacatggaacagggactcactggggaccattcctcaagaattttgtatccaa

SEQ ID NO: 601528 - DNA, 73 bp, Homo sapiens
gaagattagactggagcatgaacttgaaatatgagaagaggcatggtctcctaccatgcacacaacagtcctg

SEQ ID NO: 601529 - DNA, 75 bp, Homo sapiens
gctttggcgaggggacggagccggatcaggagccgccgccgccatatcaggtaaagagaaatgtgtatgacctta

SEQ ID NO: 601530 - DNA, 98 bp, Homo sapiens
atggaatctggtccaaacaatcatgggaatttccaaggggattcaaacttcaacagaatgtggcaaccagctgctgtgacttactcgaagcctcgatt

SEQ ID NO: 601531 - DNA, 100 bp, Homo sapiens
gtcggaatcagatttgaaaatgaaagtgtggttatcactaggctaaaactggacaaagaccgcaaaaagatcctcgaacggaaagccaaatctcgccaag

SEQ ID NO: 601532 - DNA, 100 bp, Homo sapiens
gaggagtctctgtccgggggcctggctaaggaaaccctattacctccaggtgagaagcctcacaagtgccaggtgtgcggcaaggcattcagccagagct

SEQ ID NO: 601533 - DNA, 100 bp, Homo sapiens
agctgttcagaagttcttccttgaagaaatacagcttggtgaagagttactagctcaagctggcggaggcagtgacctcagactctggacggtgaacggg

SEQ ID NO: 601534 - DNA, 75 bp, Homo sapiens
aggagctgaaccttcaagaatacaacaccatcatccgagcagtattgatttttgcagaaggaatttttacaggtg

SEQ ID NO: 601535 - DNA, 50 bp, Homo sapiens
aaaggctactgccccctgggtgcaaaggaccctcgagatgcccctcctcc

SEQ ID NO: 601536 - DNA, 75 bp, Homo sapiens
ggacaaggtgtttgtggccacagatgccgtcagaaaggtttggtgccctggttgtcagatgttggaaagcagtag

SEQ ID NO: 601537 - DNA, 75 bp, Homo sapiens
aaggattccggtctactttgagggcccccagcttgctctataaacaatgggatgaacagttggatcctcgactaa

SEQ ID NO: 601538 - DNA, 98 bp, Homo sapiens
atacccgcaacagccccttcgtcccaagcaagaagctaccggatgtttcacgacgacagcatgaagtctttcttccgtagactgagtttcactcccga

SEQ ID NO: 601539 - DNA, 100 bp, Homo sapiens
caaaggagactaatgaacttcaagcagaatgctgctccattggttaaatacttccaggaaaaggggctcatcatgacagaagcctgtctagcagtccaga

SEQ ID NO: 601540 - DNA, 97 bp, Homo sapiens
ctgctgcagcggccggggaacgcgcgctgcgcggactgcggcgccccgggtgaatgaaaactttgccattgatttgatagcagagcagcccgtgagc

SEQ ID NO: 601541 - DNA, 100 bp, Homo sapiens
ccgagtgctcctgcggctcccagactgcaaccagggaattcggcaccggttgagaggtagtgccaatgctgtgaggatccgagccccccagattggaggt

SEQ ID NO: 601542 - DNA, 90 bp, Homo sapiens
taaactttgaaaaagcaggaccagatccttcccctgtagaaggttactagtattggaatctactgctccatcaggagacctcacccgccc

SEQ ID NO: 601543 - DNA, 100 bp, Homo sapiens
tacccccacagcggactcggaagacatgtattaccatctgcctgtgggacatcagtgccgttccaaaggagggaaaagtggtagatgcgaagaccatctt

SEQ ID NO: 601544 - DNA, 85 bp, Homo sapiens
tttagcttaaaaacagctcattctcctaatgttttccttcagcaaggacaaaggtaaagggagaagatgaggaagagaacaattt

SEQ ID NO: 601545 - DNA, 129 bp, Homo sapiens
gcggtttgctgggaacggagggctgcagcgcccaccctgcgccagagaccagataaagtgctggagaatctggtaaaagcaccattgtgaagcagatgaggatcctgcatgttaatgggtttaatggag

SEQ ID NO: 601546 - DNA, 50 bp, Homo sapiens
cctcgggatagttctagaactcaatattgaccaggatgttgtcattacta

SEQ ID NO: 601547 - DNA, 74 bp, Homo sapiens
caatgttggtgctggcaaaaagatggcgagcggctgcagctgcaggatgaggaagacgacagcctgtgtcgcat

SEQ ID NO: 601548 - DNA, 100 bp, Homo sapiens
taattgctatcaatgcgaatgatcctgaagcctcaaagtttcatggtggagccgccaccaaaatgcagattttcgtgaaaacccttacggggaagaccat

SEQ ID NO: 601549 - DNA, 100 bp, Homo sapiens
tcaacgtggtatactcgcagacaacccaaccggtatacaatggttttgatgatgatggttcagaatttcatgaacatatatttctggagaaacacctgga

SEQ ID NO: 601550 - DNA, 50 bp, Homo sapiens
ccgagcggcgacggaccgcgaggctgatcagctgaccgaagaacagattg

SEQ ID NO: 601551 - DNA, 97 bp, Homo sapiens
ggcgacaccccgaatagccaaggcagaacagcataattatcctggtatcaaattacagattggtccaatccctagtgaacagcagagaatttcaaag

SEQ ID NO: 601552 - DNA, 50 bp, Homo sapiens
ccagctcattgcctcagctaagaatgggtaccacagaccatgtcatcgtc

SEQ ID NO: 601553 - DNA, 98 bp, Homo sapiens
tacttggtggtgtgtaacgactgtaatcaggttgtcaaaccgcaggcatttcaatcacattatgaaacgggtatgcaggagattagaagccagtgggc

SEQ ID NO: 601554 - DNA, 75 bp, Homo sapiens
ccagcccctgatgtcccagcaggttggatggcaagcatgtggtgtttggcaaagtgaaagaaggcatgaatattg

SEQ ID NO: 601555 - DNA, 74 bp, Homo sapiens
tgagcctccgcgccccgcaggccctgggatgatcggctgaatgtaacagaggaactaacgtccaacgacaagac

SEQ ID NO: 601556 - DNA, 80 bp, Homo sapiens
ggggattccactctccagtgtaatgattattgacaacaggcagaatatgaagttgccgatgatgaggaccgaagtgattg

SEQ ID NO: 601557 - DNA, 97 bp, Homo sapiens
agaaactgaaactctccgagggaaaaggccttgaagggccattagacctgataaattatatagacgttgcccagggaaacactactatgaagtatcc

SEQ ID NO: 601558 - DNA, 124 bp, Homo sapiens
gagctgggtcagtccgccgctcaccccgcggccgcaccttcccgccttctcaggtgtcatggagaaactccagctgggcccagagattctgcagcgggaaaatccaaggcttatttatgccagg

SEQ ID NO: 601559 - DNA, 98 bp, Homo sapiens
tgtgctgacgacctgctacaacagaaagaccatcatgcagacatcagagactgggtcggacacaggctcgacagtgaccttacaaacatctgtggcta

SEQ ID NO: 601560 - DNA, 82 bp, Homo sapiens
cggcgtgtcaggtggttgcggagctggtaaggtggacgacccaccggagcccgtgtacgcgaacatagagaggcagccccgg

SEQ ID NO: 601561 - DNA, 100 bp, Homo sapiens
tccgccctaatggaggtctccagtttcgaacatccagtcatggataaaaatgagctggttcagaaggccaaactggccgagcaggctgagcgatatgatg

SEQ ID NO: 601562 - DNA, 75 bp, Homo sapiens
cgaacacaaatgcaggagggagaggtgccaagaagcagcggtacacttgctcaggtacctgaatattggctttgt

SEQ ID NO: 601563 - DNA, 100 bp, Homo sapiens
atcttctgtaggatctgatgaaaattctcttcattctcttggactgaacttaaatactgataggtaaaagtgctgtttgtacgcaaccttgccaatactg

SEQ ID NO: 601564 - DNA, 87 bp, Homo sapiens
tgatattgaaacaattggagaaattctgaagaaaatcatccctaccttggaagaggaggctatggtggtggaggtggtggcagcaga

SEQ ID NO: 601565 - DNA, 49 bp, Homo sapiens
aacccacccggcccaactcactaatcaggaaacccaggcccaacggcag

SEQ ID NO: 601566 - DNA, 74 bp, Homo sapiens
cagcatctgcgatgtgaggaaaggcacctccaccaggtcagcccaaggccaaccccactgtcactctgttcccg

SEQ ID NO: 601567 - DNA, 75 bp, Homo sapiens
gcaaggtcaatatgcagaaaatgctcccaggtaattctgttccacaggatatctgctgtatggcagctgatggca

SEQ ID NO: 601568 - DNA, 102 bp, Homo sapiens
ggcggaggcttcgagtgacccgggtgccgaggagcgggaagagttgctggggaacttgctactaccagcaccatgccctaccaatatccagcactgaccccg

SEQ ID NO: 601569 - DNA, 87 bp, Homo sapiens
cccttcccagtttatgcctttggtggttaacctcaccctacagatgaagataatagagcaagaaaaagaaattgcagaactaaagaa

SEQ ID NO: 601570 - DNA, 74 bp, Homo sapiens
tcaggagtacttcatcatccagtaccaggagagcctgaggatccaagggttgagttccagaataaattctacag

SEQ ID NO: 601571 - DNA, 100 bp, Homo sapiens
gagaacccgcccatgaagccagatttctcccagattctgcctgatcaatgcaggagtcctgtacctctacttcagcaattacctacagattgatgaggaa

SEQ ID NO: 601572 - DNA, 100 bp, Homo sapiens
agttaatatctggttgggtgagccgatccaatgatccacagatggttggtgttcgaggaagagacattgttgttcttggtgtggagaagaagtcagtggc

SEQ ID NO: 601573 - DNA, 100 bp, Homo sapiens
gcctcctgagtacctgggactacagctgcctgtgtcagggaatctgcttgatgtgtacagtagtcaaggcgtggccacaccagccatcactgtcagcaac

SEQ ID NO: 601574 - DNA, 100 bp, Homo sapiens
ccagaaaggtcctgtatgttaactggaacacctgaatctgtccagaaaagcttttgacatcacctatgtgcgtctcaagttccacaccagccgcccggag

SEQ ID NO: 601575 - DNA, 100 bp, Homo sapiens
ctgcctggtcgctggtgaagcccgcggcgcgcgcctctcccggaccctgcaggaggtctctttattactatccacgatcgagggcatattgcttcagttc

SEQ ID NO: 601576 - DNA, 90 bp, Homo sapiens
ggctcatcatgatattgtacgatttctggtacagttagatgactacagccgagcctcttgaagccattcttacagatgatgaaccagacc

SEQ ID NO: 601577 - DNA, 90 bp, Homo sapiens
gagaatctgaacttaggacagtattgagcttcctacaagctgttctggccagaatcagacttgtcagcttgtgggaaagtgacatcagcg

SEQ ID NO: 601578 - DNA, 75 bp, Homo sapiens
gcggcaacgtcgccaagacctcggtatagtggaggattacaagccaccgttctacgatgtggttcccaatgaccc

SEQ ID NO: 601579 - DNA, 74 bp, Homo sapiens
aatgcagaatactatggcccatcactcttcctcctaggtctagatgttgatggaatatatcgagttagtggcaa

SEQ ID NO: 601580 - DNA, 82 bp, Homo sapiens
gcaaatgacatcatgacactggaatggtcctcgtccgaagtgagaatgggcagttgttaatgattcctcagcaggccttggc

SEQ ID NO: 601581 - DNA, 99 bp, Homo sapiens
ataatccaaagatggtcaaggtcgcaaggttctctacttaaaagacaatgactactgatgaaggtgccaagaacaatgaagaaagccccacagccactg

SEQ ID NO: 601582 - DNA, 83 bp, Homo sapiens
gtcagagcccggggacggcgaggccctcatgtaccacacggtcaaaatgcagatcttcgtgaaaacccttaccggcaagacca

SEQ ID NO: 601583 - DNA, 82 bp, Homo sapiens
tccctcccagttttagatgatcagtgttggctgcaccaattctagaagtaagctctccaagttcagactccattcttgtgca

SEQ ID NO: 601584 - DNA, 75 bp, Homo sapiens
tgagttccacctcattttagagtatcaagcagtgctgggctttgacaaacttcctctgtggggtaccatcctcat

SEQ ID NO: 601585 - DNA, 100 bp, Homo sapiens
ctcaggagcgcctggccactgccctgcaaaagctggaagaagctgaaaaagctgctgatgagagtgagaggagccatgtgttcacatgtcatgtggacca

SEQ ID NO: 601586 - DNA, 97 bp, Homo sapiens
cagtgaaagtcggactgtccgatgcatttgtcgttgtccacaggatccaacaaattcccagtagaacacctgaaggagaagctcattagccaggccc

SEQ ID NO: 601587 - DNA, 82 bp, Homo sapiens
caaggaactggtgctgcagcgagagaccgagtctcagtctgtcacccaggctagtgcaatggtgcaattttggctcactaca

SEQ ID NO: 601588 - DNA, 90 bp, Homo sapiens
agaaaagggtgaaggaggcgaattttcagttgataggtacatcaggaacgtctctatcaagaatacaatttcagcaaggctgagggccat

SEQ ID NO: 601589 - DNA, 100 bp, Homo sapiens
gtggattatttggtcactgaggaagagatcaatcttaccagagggccctcaggtgtttgtaaaatgtatgaagaacatctgaaaagaatgaatcccaaca

SEQ ID NO: 601590 - DNA, 98 bp, Homo sapiens
gggacccggcggggcgcaccacagagaccggcttcaatatcttcacccagcatggacagagcgggatgccaccagcttgtccaaagggaagttccagg

SEQ ID NO: 601591 - DNA, 82 bp, Homo sapiens
ccaggaagatgcctttgggaagcatgtcaccaacccggccttcaccaaactccctgaactgtggctgcaccatctgtcttca

SEQ ID NO: 601592 - DNA, 75 bp, Homo sapiens
atcagccgcatcctgcagcattcccacgatgctgggctcttgcactgtttggtggaaatggtgagacaggatttg

SEQ ID NO: 601593 - DNA, 50 bp, Homo sapiens
ccaagcagccttagccctagtgtagagcatgtagagcgcatgaagtacag

SEQ ID NO: 601594 - DNA, 90 bp, Homo sapiens
ctgcaacctacggggtgtacttgggaacgaggggtgaagcggcccaggtgagggagcagtagagaactgtggactattctgcttggaagg

SEQ ID NO: 601595 - DNA, 100 bp, Homo sapiens
cgcgcctgcacttagccccgcgcccgagttgcacactgacaagaaacagatcagtgttgggttcattggctatccaaatgttggcaagagctctgtgata

SEQ ID NO: 601596 - DNA, 75 bp, Homo sapiens
gggagactggagtcgaaggccgtgaggtatttttctaagtttgctaatccagactttacacaacctatctcagaa

SEQ ID NO: 601597 - DNA, 82 bp, Homo sapiens
gtcggcaagaagatcggctgcggcaacttcggggagctccgcctagaatgaccgaagaagcatgccgaacacggagtcagaa

SEQ ID NO: 601598 - DNA, 50 bp, Homo sapiens
gtgaaaagcctccttctggttccaaatggaaaaccaattctgtgtcctcg

SEQ ID NO: 601599 - DNA, 82 bp, Homo sapiens
agtgcggagagaggctgcctcctgcagcccccatagcaggtaaatccatttcggatggccactcgtggcatgttcccgacag

SEQ ID NO: 601600 - DNA, 100 bp, Homo sapiens
gttggaacaggatcatgatttgcaagcaatgaggtggaggaccatcctgctacagtattgctttctcttgattacatgtttacttactgctcttgaagct

SEQ ID NO: 601601 - DNA, 74 bp, Homo sapiens
aaaacttcaagccaaacatcaagcagaatgtgatttgcttgaagatatgagctctttcgacgtgtagcagcagc

SEQ ID NO: 601602 - DNA, 96 bp, Homo sapiens
taacctgtggatttccagcaaactccttagccatgatcttccccattaagactgagggaaaacctgcagaagtcaagaagatgactgcaaagtctg

SEQ ID NO: 601603 - DNA, 75 bp, Homo sapiens
ggagatcccgctggtgaccctgccgctggcgagcgccaccgcatggcaattaccagctctggctgggtcgccaca

SEQ ID NO: 601604 - DNA, 97 bp, Homo sapiens
atggagaaggagaggctgcggctgaaacagcaagaactgcttcggcagatccaaaacgctaacgatgtattaattgcaccacttgagaaatttcgaa

SEQ ID NO: 601605 - DNA, 100 bp, Homo sapiens
atttgatctaaacacaagctattacatatttctagcagatggtgcagctaatgatgggtgtgctgatctgcaaaccctggacacaatgcagccaattgag

SEQ ID NO: 601606 - DNA, 83 bp, Homo sapiens
gcaacatcctgtcacaggccatgctctggcaaaaacgtgaagccaaaaaccttccctcttacccggggccgagcaagatgagg

SEQ ID NO: 601607 - DNA, 90 bp, Homo sapiens
gttaccgggagaggctgtgtcaaagccttgaaaagatcttttgaggtcgaggaggtcgagacacccaactccaccccaccccggagggtc

SEQ ID NO: 601608 - DNA, 100 bp, Homo sapiens
aaaggatgttcatgaagattcaataacagttgcatttgaaaacaaagccctatgagtttgtctctctggaatggctgcaaaagtggttggatgaatcaac

SEQ ID NO: 601609 - DNA, 75 bp, Homo sapiens
ccatttggctttcggctgtgcagggatatctgcattacctccacctcctccacctccaccaccaccagcagctcc

SEQ ID NO: 601610 - DNA, 83 bp, Homo sapiens
caggtcttgtagcagcgcctcctcgatggcgattttgctgacagctgccaagaaaatgcttcactcaacagtcctcatgtgcc

SEQ ID NO: 601611 - DNA, 99 bp, Homo sapiens
cagcacccgcctgccaggcgctcgggggccgaactggccctggactacctctgcagatggaacccctccaattgatgcccatacaaggaatttgcttcg

SEQ ID NO: 601612 - DNA, 98 bp, Homo sapiens
gcgattgtggaagctgctcggagaaaatacggtacatgtccccatggaggatatggcttgggcttggaacgattcttaacgtggattctgaataggta

SEQ ID NO: 601613 - DNA, 100 bp, Homo sapiens
ccgtgcggggacccatcgtgctcaaggccggcgagatcgagctcgagctgcagcggatgaactgcctctcctcctccctgcctggggagcccagtggcca

SEQ ID NO: 601614 - DNA, 100 bp, Homo sapiens
gccagtcgcctccaggccaagagggatccttcacccgtgtctggaacaagatcactcaaggtgaaggataatctactaataccagcactttgaatgaaaa

SEQ ID NO: 601615 - DNA, 97 bp, Homo sapiens
caaaatccatctcattaatgacaatcagccatcctggattggacagcttcacaggctgctcaagaagccgagatcaatgccagaaaagccaaaaact

SEQ ID NO: 601616 - DNA, 100 bp, Homo sapiens
ttgaacatccacaaggcacctgcaagatttggagaccaagtatgagaccaagaagttatctttagaaaatgacatttatgaaataaatttatcccagtgg

SEQ ID NO: 601617 - DNA, 95 bp, Homo sapiens
tggaagaattctgttcgacataatctgtccctgaataaatgttttcagaaagtggaaagaagccatggcaaggctgacttcaaaatttctgagga

SEQ ID NO: 601618 - DNA, 82 bp, Homo sapiens
ttcgatcgcctcgcgccggctgctctttccgggttcgagaacttgtcttggacaattgcaaatcaaatgatggaaaaattga

SEQ ID NO: 601619 - DNA, 75 bp, Homo sapiens
gataaatgaaatcttcctaagtatagtctgcgggccaggcatcgacatccgcaacgactatcagcagctgaagcg

SEQ ID NO: 601620 - DNA, 75 bp, Homo sapiens
gacgcttttcttaagacgctgcgcagaggcaccatcatgtctgattattcagatgcctcgatttggaaaagactt

SEQ ID NO: 601621 - DNA, 82 bp, Homo sapiens
gaagcagccaaacactctattcaattctggggtcagaagccatggagtcagcattatcaccaaggatattattgaataccca

SEQ ID NO: 601622 - DNA, 101 bp, Homo sapiens
ccagatgccagtagtgcccgccccacccgcatgctctttgtcactccccggcggcagcacgaaagtaccatatgaggcctgcctgtgttaatacacctagt

SEQ ID NO: 601623 - DNA, 100 bp, Homo sapiens
tagcagacactgcaaatgaagctctcgaggctgctaagagactaacttcaaaagcagtggactgtcttttggattcaaagtgggcaaaggccaagaaagg

SEQ ID NO: 601624 - DNA, 100 bp, Homo sapiens
cagcgggcggtgttcccggctccgtggggccgtcttcccggcgagtccgcgacggtcgccgcccacggcgagtgaaggagaacgacctgctcagaatgag

SEQ ID NO: 601625 - DNA, 51 bp, Homo sapiens
atcttcacttggcaaactcaacaaggcgtcgattagcaaggtaaaagtaac

SEQ ID NO: 601626 - DNA, 83 bp, Homo sapiens
agcagcatgcagtgactatttccgggatctttcgaagatggtttggctgccttggagatttggagatctgatgccacgatgag

SEQ ID NO: 601627 - DNA, 88 bp, Homo sapiens
gagccccagagtcagctcccctttctcgcccagcgcccccaggccgctcccggggctcacggtgctcctgacctctgataaagctgca

SEQ ID NO: 601628 - DNA, 74 bp, Homo sapiens
tcggaggcgttcagctgcttcaagatgaagagattgggtctctccacattgccccggctgctctccaacccctg

SEQ ID NO: 601629 - DNA, 100 bp, Homo sapiens
gctgcggctgcgccgaggcgccctactcaggcagaaatggtgcacagtgctttccaggcccagcgggctttccttctgatggcctctcagtaccaacaac

SEQ ID NO: 601630 - DNA, 101 bp, Homo sapiens
agaatgaacactgtccttcaaaacgatgaacgagataattgggagagacatgtcccagatttctgtttcccaaggagcaggggtgagcaggcaggctcccc

SEQ ID NO: 601631 - DNA, 82 bp, Homo sapiens
caagctgtgtgcattagtacaaatgcaaaatcaccaggacagccaatacaagtggtttatgtaccatcccatctctatcaca

SEQ ID NO: 601632 - DNA, 100 bp, Homo sapiens
tgcggctttcggttaacaccgcaggtgaaggtgctaaaggagaagatagaagctgagaagggtcgtgatgccttccccgtggctggacagaaactcatct

SEQ ID NO: 601633 - DNA, 100 bp, Homo sapiens
ccgcaactgctgggactgtccccactgcgagcagtacaacggcttccaggaggctgagactcgggctgagtttgcggagaggtcagtaactaaattggag

SEQ ID NO: 601634 - DNA, 100 bp, Homo sapiens
gctgttcatctatggccactacaaacaagcaactgtgggcgacataaatacagggaaagaatatggcaaagctgatgcaagatgggtttattttgatcca

SEQ ID NO: 601635 - DNA, 78 bp, Homo sapiens
ggatcaagatcagctccaggcctgggaaagtgaagcatgcttcatgatgatccaagcagaagaattcctgctgaaatg

SEQ ID NO: 601636 - DNA, 83 bp, Homo sapiens
agacaaggctaccagcaacatctgtacagctcaggttattggagtgatgagtaaagaatacataccaaagggcacacgttttg

SEQ ID NO: 601637 - DNA, 75 bp, Homo sapiens
tgaagcccagcttctgaggaaaattcagttgttgtgcctcatggagcacttttctgtagaaggtcagttggaatt

SEQ ID NO: 601638 - DNA, 75 bp, Homo sapiens
gcgcagggagaaggaagaggtgtttgaaaaggtggtcattgggactcccacacttaaacaaagaaaggaaattct

SEQ ID NO: 601639 - DNA, 80 bp, Homo sapiens
ggaccggcgtccccggcgcgaagaggctggactcggattcgttgcctgaggtggtctttgggaagaagcttcctgccttt

SEQ ID NO: 601640 - DNA, 50 bp, Homo sapiens
taatttttaaacttggtttgaaaggaatacggttggacagaatgaactga

SEQ ID NO: 601641 - DNA, 82 bp, Homo sapiens
agccgcttcttcagccggccgtcaggtgtacaagggagaagaagccacattccaaatctcaggcctccagaccaacacagac

SEQ ID NO: 601642 - DNA, 101 bp, Homo sapiens
cgtctccgttgggtccggccgctctgcgggactctgaggaaaagctcgcaccagcaattctgtggtgttcttggtcacacatttatggagtttctgaaggg

SEQ ID NO: 601643 - DNA, 74 bp, Homo sapiens
cagaagtgagacagctgaagcgtgttggggaaggagctgtaaagagatgggaagtaccttctgtctatagtggt

SEQ ID NO: 601644 - DNA, 75 bp, Homo sapiens
cagtgggtgaaaatatgttgatgggcttagcggaaacaaatggaagactgctgcgaccctgcccatctctttgct

SEQ ID NO: 601645 - DNA, 82 bp, Homo sapiens
tcggctgcgggaaatcgggctgaagcgactgagtccgcgatggaggactgcaagatggaggaaggcgggaacctaggaggcc

SEQ ID NO: 601646 - DNA, 100 bp, Homo sapiens
acttcaggtgtggtagccggcgccgcgcccatagccggacggggatctgagctggcagaagctgaaacctatcaacactcttcaaaatgcaatggaatgt

SEQ ID NO: 601647 - DNA, 82 bp, Homo sapiens
aaatcagcctggtcaccagcttttcggaacagcagagacacagagggcagtcatgagcaataccaagtttccaggcccgaag

SEQ ID NO: 601648 - DNA, 99 bp, Homo sapiens
catttggattttctgccaggcgtgtgttacagcagtttgcagataatgatgtgtcaagattcaaggcaattaaggtgtttaagatagaagtgctaatga

SEQ ID NO: 601649 - DNA, 80 bp, Homo sapiens
ctgtgctgcgcggcccccgcgcatgctccagggcccacaacggcagtgtcctacatgtcggtgaaatgtgtggatgcccg

SEQ ID NO: 601650 - DNA, 89 bp, Homo sapiens
cgcggtccggcccggggccccgggatctcggctgtccttcctcccgcaacatggctgacaaggccaagcctgccaaagctgccaacagg

SEQ ID NO: 601651 - DNA, 100 bp, Homo sapiens
actctatcataagaatatggagtgtcaatcagcacaagcttgaacatgcgaaagtgacacagacagagttgatgcgtgagtcatttagacagaaacaaga

SEQ ID NO: 601652 - DNA, 49 bp, Homo sapiens
caaaggagtatgacgatgagctggtgaccgaatcccaccatctgcacct

SEQ ID NO: 601653 - DNA, 103 bp, Homo sapiens
gttggtgtgattagcttcgcagtctggaaagctttaggagttcacagtcggcagtacatacctgtgaaaatgaagagcaaagccttctggatcttttcttggg

SEQ ID NO: 601654 - DNA, 83 bp, Homo sapiens
agaggacccagaaacttgatgagaaaaggaagaaagtgaagcttgaatgaaaaaggcaggcattgacctccctctgaggcagt

SEQ ID NO: 601655 - DNA, 100 bp, Homo sapiens
gtgcagcgcggagtgggcgatgccagcgtgccaggcaagtatatcgcgtcaacacagcgacctgacgggacctggcgcaagcagcggagggtgaaagaag

SEQ ID NO: 601656 - DNA, 100 bp, Homo sapiens
ggcgcttcgctgatggtgtcggtgagcgcgtttcccgcctgagcgcaactagcggcgggtcgtgggcacctccagagtgcctggtgaagaatgtgatggg

SEQ ID NO: 601657 - DNA, 100 bp, Homo sapiens
gctttgtgttcaccaaggaggacctcactgagatcagggacatgttgctggccaataaggttggcagagtcagcatatatgattccaaaaggcaatccgg

SEQ ID NO: 601658 - DNA, 83 bp, Homo sapiens
ggccgagtcgcggaggcgcctccgctgcagtcgctgcgtctccaagcaagagtgagccatggagctacgtgtggggaacaagt

SEQ ID NO: 601659 - DNA, 99 bp, Homo sapiens
ggaccgggcgccccggcaccgccgcgcgccacccgctaggatgccggtggccccagcgccctcagccgacggagaaagaatgtgctaatttcatcaagg

SEQ ID NO: 601660 - DNA, 100 bp, Homo sapiens
cgcaaatgactggtcacgcgggactgaacaccgcacaggcaggaggcatggccaagtctgaagatgatgagaaactgaaaaagaggaaggagcgatttgg

SEQ ID NO: 601661 - DNA, 50 bp, Homo sapiens
gcagccgctctgagggcgcctgctcagatcctgcactggatggatcagcg

SEQ ID NO: 601662 - DNA, 51 bp, Homo sapiens
gcagcatgcagtgactatttccggaatgaccagtccatgggtgagatgcag

SEQ ID NO: 601663 - DNA, 100 bp, Homo sapiens
cagggttgaatacagagacagaaatgttgatgtggtacttgaagacacctgtactgttgacaatctccgggaaggggcagagcagaaggtggtattcatc

SEQ ID NO: 601664 - DNA, 91 bp, Homo sapiens
gggatggaaggccacatgcattggaaataatagcgcttacgaattggagcaatgttggcttatacacctctggatgagaagagccttgctt

SEQ ID NO: 601665 - DNA, 100 bp, Homo sapiens
gaaagctcttgagtttattccttcagaccagcaggtaattccgggggccatcaagtataagaccacaggaccacgtgattcataaagaactactgtcaaa

SEQ ID NO: 601666 - DNA, 75 bp, Homo sapiens
caagaaaggagagaagatgaaagtcctggaggagagagaaaatacaggctcaggaattgagtcatccaagttcac

SEQ ID NO: 601667 - DNA, 74 bp, Homo sapiens
agacgtttgagtcggaaaccttggagtgcagtgaacccgctgctcagtttagctgctgtggagggatttcctac

SEQ ID NO: 601668 - DNA, 90 bp, Homo sapiens
gagatcatagccgagtatgaaagtcaagtcaaaggccaatggtggcagagtctacatagaactatgcttcgtggtgttctggggaaaacc

SEQ ID NO: 601669 - DNA, 74 bp, Homo sapiens
cccgaactccaggacagcatccaggcctcattggacagcattcgaggtgtcccgacccaggctaagcttgagca

SEQ ID NO: 601670 - DNA, 96 bp, Homo sapiens
gcgtgtcctcggagcgcggtccctgtattggtctcctgctcctagagccccatggctgggggttatggagtgatgggtgacgatggttctattgat

SEQ ID NO: 601671 - DNA, 100 bp, Homo sapiens
tcaagtagagatttgctcaatgcattgaagtcagtcattaatgaccctgtggtcccgggattcttgagctgtgcccagctgacgagcttttgaagatggc

SEQ ID NO: 601672 - DNA, 100 bp, Homo sapiens
gctagtctcagaactgttccttcagccaaagaaacaagccgtggaataggtgtatcaagtaatggtgcaaagcctgaatgctgcctccatctagtacaaa

SEQ ID NO: 601673 - DNA, 100 bp, Homo sapiens
gctggaacaaggagaagaaccatggagactggaggaagaattcccaagccagagctttccaggtgtcatggagaaactccagctgggcccagagattctg

SEQ ID NO: 601674 - DNA, 75 bp, Homo sapiens
cgaccctagcgggtgagaggcccttcagggccgcggcggtgatggtcattgtcctccagagcagtgatggaggaa

SEQ ID NO: 601675 - DNA, 98 bp, Homo sapiens
ctcaactgcccagcgtgaccagtggccacctctgcagtgtcttccacaacctgggaaactactaaagttcctggggaagcaaagtagaatttcataag

SEQ ID NO: 601676 - DNA, 74 bp, Homo sapiens
tgagaagctgcagacttacatagctcttcttgccttgccaattgaagcatatgtcctgtgagcttaggggtgct

SEQ ID NO: 601677 - DNA, 75 bp, Homo sapiens
gatccaagagattcagtatcactcgctcccttgatgatcttgaggagctggagtcagatggcagcactatggagg

SEQ ID NO: 601678 - DNA, 97 bp, Homo sapiens
gggcggaaccagcctgcacgcgctggctccgggtgacagccgcgcgcctcggccaggaactgtggaaggtgcatcagtgaagaaatggaccaatgtg

SEQ ID NO: 601679 - DNA, 100 bp, Homo sapiens
agcccctggtctcatagctccctgttggatgtgtcagaaagaggaatgcaaggacagtgaggccaggaatgatcaacagcatcaagcagctgagcttgaa

SEQ ID NO: 601680 - DNA, 98 bp, Homo sapiens
tcgggactactatagcagatcatacagatatctcttccaaatgcatgatgaaggagttctcgtcaacagcacaaggcaatagagaagtgttccatgca

SEQ ID NO: 601681 - DNA, 88 bp, Homo sapiens
caggcagaagctgagacggctaagaagatggcagtgaacgtatactcaacgtcagtgaccagtgataacctaagtcgacatgacatgc

SEQ ID NO: 601682 - DNA, 98 bp, Homo sapiens
gcaggtcccctagtcccccgcagtcccccgagactcgccgagcgccgttgctgagccctgcaaatagcaggctgtggatctttccattgatgagtcca

SEQ ID NO: 601683 - DNA, 100 bp, Homo sapiens
gggtgattctgaagagggtctggaggagccttctcaagaacagagaagtcacctgcaccggtgcccgtgacgtacgagctgcccacactgtataggacgg

SEQ ID NO: 601684 - DNA, 98 bp, Homo sapiens
gccttttcagaagcggctgcgcacggactgctggagatggtggagtccgtcaaattcctagaggacctgtgcaacaacctcttgaggatcgaatcttc

SEQ ID NO: 601685 - DNA, 80 bp, Homo sapiens
accgacaaccttcccagaaagtccaagctcgtgctgcatcttcctcccgtgaggctggccgagctccacgctgatctgaa

SEQ ID NO: 601686 - DNA, 100 bp, Homo sapiens
gctcttcttcttttctctctcgtcctcgctgctgtacttcgtctatgtggcgcccggcataggtaccggtccgtagtggatctcatgaagtcctggtctg

SEQ ID NO: 601687 - DNA, 50 bp, Homo sapiens
acataaatgccagctatattgatttatgatatgactctgacaaatgcttg

SEQ ID NO: 601688 - DNA, 75 bp, Homo sapiens
caagccgctggcagccgcggatctcaccgccgctcaggcgctgataaagcagtttgtgtccgacgtggcctgggg

SEQ ID NO: 601689 - DNA, 98 bp, Homo sapiens
gacaccaaggtacccaatgcctgtttattcaccatcaacaaagaagaccacacactgggaaacatcattaaatcacacgtcaagttcttgaggagctg

SEQ ID NO: 601690 - DNA, 51 bp, Homo sapiens
ctcagatggctcggtcatcacgggatgtgggctctcttgatgagaagatga

SEQ ID NO: 601691 - DNA, 75 bp, Homo sapiens
aaagcctattttctgtatatgtattccagatatctggtgaccaagaatatggcccaggtgaccaaagccctggac

SEQ ID NO: 601692 - DNA, 76 bp, Homo sapiens
aaaggggaagaatcatgtgtctaatgttgtaaggatgaatgctatcaagtaagacaagtgtttgcccagaaacttc

SEQ ID NO: 601693 - DNA, 100 bp, Homo sapiens
aggccctgagagaggctgcaataaagcataagcttaaatcgtctcagaaggacaaggtccgccagtttatggcgtgcactcaggctggcgagagaactgc

SEQ ID NO: 601694 - DNA, 82 bp, Homo sapiens
gagtcatgtggcagtggaaaatgcgctcgggctggaccagcaggccccttcccagctgcctgcctgccctagccagctccca

SEQ ID NO: 601695 - DNA, 75 bp, Homo sapiens
cgaactcccggcccgaactccaggctgctctttggcgtaaattgcaatcgattagggatcgtttctcagaatcaa

SEQ ID NO: 601696 - DNA, 75 bp, Homo sapiens
cacagaatcaggggaggcatgcttcaggctctgtgtgctccgggatggagcaggtgtgcagagggtgagaaccca

SEQ ID NO: 601697 - DNA, 97 bp, Homo sapiens
atttcgaaccgagcactgaattttttgctccactcaagcctgttagaatcaccatggaatacagctccagtgggaaggccactggagaagctgatgt

SEQ ID NO: 601698 - DNA, 83 bp, Homo sapiens
cggaacgaggctttctgtcgttaataggttccaaagaactactggttcagattttagctcttcccaagttgtgaaaatagtga

SEQ ID NO: 601699 - DNA, 90 bp, Homo sapiens
atccagctgcctcaaatcgtcgtagtgggaacgcagaaatgcactcggtgatggaaagagagccactattctgaagaacacttggccaaa

SEQ ID NO: 601700 - DNA, 82 bp, Homo sapiens
aggaggacaacgactaccaccgcagcgacgagcagagatgccctgtatccaagcccaatatgggacaccagcaccgagtccg

SEQ ID NO: 601701 - DNA, 75 bp, Homo sapiens
ccagaacttgcagcaacaataggtcccgttcaagaagttcttccagttcgcagtcaagatctcgttccagttcca

SEQ ID NO: 601702 - DNA, 96 bp, Homo sapiens
tgaacaacctgaacgtcaccgaggagaagtaccaggaggcgttggccaagggatctgtctggctccattgatgacctccccacgggaacggaagca

SEQ ID NO: 601703 - DNA, 90 bp, Homo sapiens
gttaaggattccaagtaactcttatttgggtatttctcaagctgccagatacgtttaccaacgactcatcaacgacgggattttgagcca

SEQ ID NO: 601704 - DNA, 50 bp, Homo sapiens
cccgagctatagagaaaggagatgagatgaaggatttgggggcagagcac

SEQ ID NO: 601705 - DNA, 74 bp, Homo sapiens
atctggcaacaatacagaagttaagatttattgtcaaccaaggttccttcaatggtgccttagctgctgttcct

SEQ ID NO: 601706 - DNA, 100 bp, Homo sapiens
ccagagctgaggactgcctgtttgcaggaaatcacattctgcctgatgaagatctggcttcctttcactggagtttacttggtccagaacatccactagc

SEQ ID NO: 601707 - DNA, 82 bp, Homo sapiens
gggcagttgcagtgttggagctaaagtggtataagttgaaatccaaaccaggaaagaaggacaaggagcgaggagaaattga

SEQ ID NO: 601708 - DNA, 82 bp, Homo sapiens
gtcgttctgcacgtgcatttccatatggcaatgaaataaactatcaatcttgcccagactggagaaaggactgcagcaacaa

SEQ ID NO: 601709 - DNA, 52 bp, Homo sapiens
gagaaaagcgagaccgcgtgcgaggaccgccgtggtccttcagcatatctct

SEQ ID NO: 601710 - DNA, 100 bp, Homo sapiens
tctacgagtggatggtgcgttgcgtgccctacttcaaggataagggcgacagcaacagctctgccggctggaagctgctggctgggcgctggccttttga

SEQ ID NO: 601711 - DNA, 74 bp, Homo sapiens
ggctgccgcgccgccgctacgggaccgcctgagctttctacaccgggatgatctgtctgctgtgcgtccggacc

SEQ ID NO: 601712 - DNA, 98 bp, Homo sapiens
cagaacctgtccaggagctggcatgacgtgcaggtctctagcgcattgggagagtcatattaataccaaatggtcagcacctcagcagaattttttgc

SEQ ID NO: 601713 - DNA, 75 bp, Homo sapiens
gtcgtggaagcaggactgcgccgcgtcttcctcaagaattggctgtgaaaggactgaggcagccatctgggggta

SEQ ID NO: 601714 - DNA, 100 bp, Homo sapiens
gttcctttcgtgctggcgccgcgacctccggatgacccgggcttcggcccccaccagagactcgtaagactttgaccccgacgcaggcttcagtgattgc

SEQ ID NO: 601715 - DNA, 100 bp, Homo sapiens
gaccctcggtctcccggcgctgctactgctgctgctgctccggccgccggcgacgcgggcccttgccctgttggatgaataggcacctctggaagagcca

SEQ ID NO: 601716 - DNA, 75 bp, Homo sapiens
cgagcagcccggggatccagcacgcaggctgagggtaaaaagctgggattggtaggctgggtccagaacactgac

SEQ ID NO: 601717 - DNA, 75 bp, Homo sapiens
ctggaaagctttaggagttcacagtatttatgatattcagactggcaacaagctgttgactctgtttaacccaga

SEQ ID NO: 601718 - DNA, 100 bp, Homo sapiens
acaacccaaaaacgatacgccatctgttctgccctggctgcctcagccctaccagcactggtcatgtctaaagaacctccacattttgttgtgaaacccc

SEQ ID NO: 601719 - DNA, 80 bp, Homo sapiens
ccagcacacagaagccgagacgggagtgcatccgccccaacccttttccccctcgtctcctgtgagaattccccgtcgga

SEQ ID NO: 601720 - DNA, 97 bp, Homo sapiens
atcccaaatatgatacgttattaaaagctgtaaaagatgctactaacactggaataaaggtggctttttctcaagtatattttccagtctgtttgga

SEQ ID NO: 601721 - DNA, 75 bp, Homo sapiens
catgtacccggtggactcggtgaaggccaggaacctaccttgaaaactgtattaaataaaataggagatgagatc

SEQ ID NO: 601722 - DNA, 100 bp, Homo sapiens
cgcgtgtcctcggagcgcggtccctgtattggtctcctgctcctagagaactcggttgcctttgaggatgtggctgtgaacttcacccaggaggagtggg

SEQ ID NO: 601723 - DNA, 73 bp, Homo sapiens
ctggtggacatgagtcaaaactactgcagtccacaggtcctggctaccctgggaagagacaagaagtaaatga

SEQ ID NO: 601724 - DNA, 51 bp, Homo sapiens
accggtagcgcttgcagcatggtggctttctagaagatgaccatagaggac

SEQ ID NO: 601725 - DNA, 75 bp, Homo sapiens
cctgctctcacccacgaaaggcatctgtcccaagcaggagaacattgcaggagctggccaagaggactcccggca

SEQ ID NO: 601726 - DNA, 75 bp, Homo sapiens
tcagggtcatgattacacatggtgtggatgtgacagcccaagatactaccggtttgggccccatggtatccctgt

SEQ ID NO: 601727 - DNA, 100 bp, Homo sapiens
cggcgtcgcgctttggccaaccgctgcgtcgtccctgggcccgaataactgtcgcccgcttccctcagcgtgagaaaggagatgaagttgctggagcagg

SEQ ID NO: 601728 - DNA, 100 bp, Homo sapiens
tacgagagcgaccccaccgagtgggcaatgtacgccaagttcgaccagtacaggtcgttgaggacttccacatggagattggcacaggaccagactcaag

SEQ ID NO: 601729 - DNA, 100 bp, Homo sapiens
gagacaccgctatcacagctgctgcaatcgcttgggagagctcctgggccacccctcctttcaggtcaagggcacagactccatcaagatggagaacggg

SEQ ID NO: 601730 - DNA, 85 bp, Homo sapiens
ccggaacaggatgtcctcaagcatggtgttcactacctcgaagtcgcacacatctccagtccctctccaagatcctggatgtggc

SEQ ID NO: 601731 - DNA, 100 bp, Homo sapiens
ccgccatggagcccgactcggtgattgaggacaagaccatcgagctcatggggagcctggagctgttggtcagatgggcagccctgggcagcagggggct

SEQ ID NO: 601732 - DNA, 83 bp, Homo sapiens
cgccggcgccgccgcccccgggctcgcggcctgcaggagccacacaggacagttgacccaacacttctgccacctgaagaacg

SEQ ID NO: 601733 - DNA, 100 bp, Homo sapiens
cgaacagcgggcggtgttcccggctccgtggggccgtcttcccggcgagtccgcgacggtcgccgcccacggcgaggaacacagcctattggatccctag

SEQ ID NO: 601734 - DNA, 101 bp, Homo sapiens
atgtccgccagcgccgtctacgtgctggacctgaagggcaaggtggaagaaaaggccaaatttgatgggatttttgaaagcctcttgcccatcaatggttt

SEQ ID NO: 601735 - DNA, 51 bp, Homo sapiens
gaggatgaagatgtggatctggcccaggttgcagtgagagcagatgctggc

SEQ ID NO: 601736 - DNA, 101 bp, Homo sapiens
tcggggtggtctgtctgctcctggcatgccctgccacagccactgggattgtggtccatcaggagtctgtgtgtgccacctatggaagtggcttaagcagc

SEQ ID NO: 601737 - DNA, 100 bp, Homo sapiens
aagagggccccgctgaccaggtggctgcaggagacttggaagatgcagaactggatgactactcattctcatgctatagccagttggaagtgaatggatc

SEQ ID NO: 601738 - DNA, 100 bp, Homo sapiens
gcatcgcttgtcctgagctggttgccggggcaggggcggaggcggaggcagaggtggaggcgctttgaaagggaagacatgtaaggaatttgcataagac

SEQ ID NO: 601739 - DNA, 100 bp, Homo sapiens
aggttatgaggcttaataaagaaggattaacctccatttcagctaatcatgggagagattaaagtctctcctgattataactggtttagaggtacagttc

SEQ ID NO: 601740 - DNA, 83 bp, Homo sapiens
atctaccaacttcgccaccctgcggtggattgactacggcaaagtggccactcaggtctcctctgagcctccggcctccataa

SEQ ID NO: 601741 - DNA, 114 bp, Homo sapiens
aacttgcaagggaactggagacaatgaaaatcttgtcaggtcaagagcaatctgaatccaaatgcaaaggagtttgttcctggggtgaagtacggaaatatttgagtagacggg

SEQ ID NO: 601742 - DNA, 80 bp, Homo sapiens
cacctcttatgatggctgcagaaaatggacaaacaaatacagttggtttgtatccctatacagaggaccatgtcatacat

SEQ ID NO: 601743 - DNA, 75 bp, Homo sapiens
cacaagcgtaccaaacgggcaaggacatctctacaaaggtgtccgcaatgttgccagtgtctgtctgcagattgg

SEQ ID NO: 601744 - DNA, 102 bp, Homo sapiens
ggaccttcaagactgtctttgctgagcacatcagtgatgaatgcaagaggcgtttctataagaattgggagtgcctgcagggcaccatccgcaacagccagg

SEQ ID NO: 601745 - DNA, 90 bp, Homo sapiens
gccaagtgaagacatgcttacttccccttcaccttccttcatgatgggtcgggattactgttcggaagaagaggatatcacatagcacca

SEQ ID NO: 601746 - DNA, 75 bp, Homo sapiens
ccaaatcccggaaactccagcgtgtctccagccgtgaatactctggagcagtgcaatgtgtgttccaagcccatc

SEQ ID NO: 601747 - DNA, 75 bp, Homo sapiens
ctggactgggatttggaggatttaatacacagcagcagcagcaaactaaaactggcgatggaatatgagaggagc

SEQ ID NO: 601748 - DNA, 88 bp, Homo sapiens
ccgcgctgctgctgctgccgctgctcgccgccgtggaaggtaagaatgattgatgttggctgatattggagtgctcattcacatgaag

SEQ ID NO: 601749 - DNA, 82 bp, Homo sapiens
ttggaattgaagaagataatgaagccccatgtgccactcccctgatctgcagcttcggtaggccggtggacctggagaagga

SEQ ID NO: 601750 - DNA, 90 bp, Homo sapiens
cccagcgtgccaggcatgggaggtatggacctgtctgccaatcaggacgaggagaccgaccaggagaccttccagctggagatcgaccgc

SEQ ID NO: 601751 - DNA, 90 bp, Homo sapiens
tcagaggagatgcaccggctcacggaaaatgtctataagctatttcggcttcatcaccaaacaccccctgctgagccgcttcgcctgcca

SEQ ID NO: 601752 - DNA, 75 bp, Homo sapiens
gtccgccccgtgaggagaatggagaaagctttgcagaattcagatctgcaggaactgatgatggtttcaccgatt

SEQ ID NO: 601753 - DNA, 75 bp, Homo sapiens
tctcctagaaggtggctggcctgcgcccatttcagaaggctgcaggctagtagacggggtctccctatgtggccc

SEQ ID NO: 601754 - DNA, 83 bp, Homo sapiens
gatcgcctgggtggttgttggcgtgtccctgcagcgaaggatcctggttggcctcgggccagcggccaggagctgcctccccc

SEQ ID NO: 601755 - DNA, 100 bp, Homo sapiens
agcaattcagatggcccaagaacaggctacagatactgaaattttggaagagaggatggtgatgcaccggttacaaaagatgagaccacctgcatttcac

SEQ ID NO: 601756 - DNA, 74 bp, Homo sapiens
ggaagcagaaacaactcagatggagttatccccagctcccactataactaacaacctgagagaagattacaaat

SEQ ID NO: 601757 - DNA, 83 bp, Homo sapiens
tgcggagcgacggagagagactgtgccagtcccagccgccctaccgccgtgggaacggaaccacgtgaatgttgagggggcga

SEQ ID NO: 601758 - DNA, 98 bp, Homo sapiens
cggatggcccccggtgcaagaggcgcaaacaagccaatcccaggaggaaaaacgccaaaactggacaagccaaggcatctgtagccaaagtaaacaaa

SEQ ID NO: 601759 - DNA, 104 bp, Homo sapiens
ggcctagacctgaactcttcagataatcagagtggaggaagtacagccagcaattatcaagaatgatctgtgggttaaccctctacgctactacctgagagaaa

SEQ ID NO: 601760 - DNA, 75 bp, Homo sapiens
gaagggaccatgtggctgccttgggctctgttgcttctctgggtcccagagtctcgctctgtcgcccaggctgga

SEQ ID NO: 601761 - DNA, 75 bp, Homo sapiens
cttcctgcttcatctctaaaggtccttctaggagagaggtgaaaggtgtggaaacaggaagagaactagaactgg

SEQ ID NO: 601762 - DNA, 75 bp, Homo sapiens
ttcctgtggtctctgcacctcctttctaggcgccacagggcagtaatggctgatgggcaccccctggagtctgac

SEQ ID NO: 601763 - DNA, 76 bp, Homo sapiens
aatcgccggtgtgccttgaatgaagaatggtttcacccaaatatcactggtgtggaggcagaaaacctactgttga

SEQ ID NO: 601764 - DNA, 51 bp, Homo sapiens
tggcggagcagacctactcgtggtcactgcagccagaggggtccagaagag

SEQ ID NO: 601765 - DNA, 100 bp, Homo sapiens
ccaatcgctcctgtttgtcttctgctttggcccagccagcaatacaggaatgcacaggaggcaaatcactgaccttttagaccaaagtattcaagtgcat

SEQ ID NO: 601766 - DNA, 75 bp, Homo sapiens
gcttcttcaagcagcccaccttctgcagccactgcaccgacttcatctggtgcagagcattgtagaccaaggagc

SEQ ID NO: 601767 - DNA, 75 bp, Homo sapiens
ctttgactactggggccagggaaccctggtcaccgtctcctcagtttgtttcgacgccggaccgcgtaagagacg

SEQ ID NO: 601768 - DNA, 75 bp, Homo sapiens
cggagatccgagagctctgcttctctgaaaagcgtgtggctttctggacttgcatcccagccatcactcttccac

SEQ ID NO: 601769 - DNA, 77 bp, Homo sapiens
tttttagatacttttaaacacccgagcgctgagcaatcatttggggaagaatctacagttgctgatggacagagtgg

SEQ ID NO: 601770 - DNA, 95 bp, Homo sapiens
ggacactgaagaggatcgggggccagtaatcttggatccagttgacccaaccaataatgtgagtggagataaaatatgctggcaatggctgaaaa

SEQ ID NO: 601771 - DNA, 74 bp, Homo sapiens
gggcaggacacggaggaccggagcggcctgtccgagagagtaatgccttctagctttttcctgctgttgcggtt

SEQ ID NO: 601772 - DNA, 99 bp, Homo sapiens
caagagattggatctgatgatgaacgtgaacaccagaggcacctaccttgctgttgatgggaaccattttcagcatcctgctggtgactgtcatcctta

SEQ ID NO: 601773 - DNA, 75 bp, Homo sapiens
gaaaaatgggcaccaagggcaaaggcagtagctcgcctgagccagagatttcccaaagctgagtttgcagaagtt

SEQ ID NO: 601774 - DNA, 89 bp, Homo sapiens
aagcctccagaggacataccacctccaggatcaggatgcagagatgaagtggccattctgcctgcccctcagaacctctctgtactctc

SEQ ID NO: 601775 - DNA, 100 bp, Homo sapiens
cggcggtgaagaaggaagggggtgctctgagccttgttagatgacttggataaagaactaaacaactacattatgcgatgtagagaatggtatggctggc

SEQ ID NO: 601776 - DNA, 90 bp, Homo sapiens
atgaaaatgcaatggatgctgatggtggtgatgatgatgatcaaggtatcttctcagtcctcagcttggcctctgagtgcacaacccttg

SEQ ID NO: 601777 - DNA, 80 bp, Homo sapiens
ccagctcctgaggaacatgcaggggtatagaacaggctatgcttacaggcatcctctcattcgagagaagcctaggcaca

SEQ ID NO: 601778 - DNA, 101 bp, Homo sapiens
tggagtcatttccaaaacttttcagctatcttcccatccaatacttggtgactggtctattcaagttcaagtgaatagaatgtaactggtcactacatttc

SEQ ID NO: 601779 - DNA, 100 bp, Homo sapiens
aacgtggtggaggatgagattgatcagtacctcagcaaacaggacgggaagatttacagaagccgagacccacagctgtcactctacatgacatgatcct

SEQ ID NO: 601780 - DNA, 89 bp, Homo sapiens
atctaatggctatgggagatgtgatgtcttggcattgcccattttcaagcaggaagattccagccttccattggatggtgaaacagagc

SEQ ID NO: 601781 - DNA, 75 bp, Homo sapiens
ctgctaaaaccacctttgtcaccagaatgaatgaagtgcttcagatttaaataggcatatcgatgcatttacttc

SEQ ID NO: 601782 - DNA, 51 bp, Homo sapiens
acctgcactcggccctggtcaaggtgaccatggaggaagaagatgagtctc

SEQ ID NO: 601783 - DNA, 101 bp, Homo sapiens
ctgagatggacctgggaactccaacatatgatgaaaaccccatgaagccaacaaatggaattttcttgagcatgtttctaatcgttttgccattggaatcc

SEQ ID NO: 601784 - DNA, 100 bp, Homo sapiens
gcccgccccgaagcgactttcggtccccgacccgctccgcctgacccctatgatgaagagggcgtccactggagacttaattcagtgcacaaatgagatg

SEQ ID NO: 601785 - DNA, 75 bp, Homo sapiens
taaagcagcgtgcgttcagccctgggttggttaccacagagaagcgcttcctcaaagacagtttgtacaatgaag

SEQ ID NO: 601786 - DNA, 130 bp, Homo sapiens
gggaccggcggcgctggaggagcgaggcagctgtactaggactgggaacggtaagactttgaccccgacgcaggcttcagtgattgccgcggatcagaagcctgagcactttggctcgagacaattaagg

SEQ ID NO: 601787 - DNA, 98 bp, Homo sapiens
gaagacatgtggtgtatataaagtttgtgatcgttggcggacattttgtactatactggcaattgctggagaagattttgcaattgttgcttctgata

SEQ ID NO: 601788 - DNA, 101 bp, Homo sapiens
cacagccggtccaaggcggtgcgctgggggccggggcgcgtcgcaggtgacagtatgttgactgctgtctctgtggccagagattgtggaatgattctacc

SEQ ID NO: 601789 - DNA, 82 bp, Homo sapiens
aagagtcctcaatccaacagcccagtgcttctgtctcgactgcactttgagaaggtgtgagttcttgatacgaatgaaaggc

SEQ ID NO: 601790 - DNA, 100 bp, Homo sapiens
gaaagtctagcctcctgtgcaaaggtcaaaatgaaggaagatgagaatgtgcctactgctcctgatcctccaagtcaacatttacgtgggcatgggacag

SEQ ID NO: 601791 - DNA, 83 bp, Homo sapiens
ttcctggtgatattgtagaaattgctggccacagccttcctcgaagacacccaggatccccaagatttacaccaaaacgggag

SEQ ID NO: 601792 - DNA, 75 bp, Homo sapiens
gggacaacatgatgagcatgatgaagacgatcaccgcacagcagatcaccacccctggcgcgcagcagaaggttg

SEQ ID NO: 601793 - DNA, 74 bp, Homo sapiens
cagccacatactatccgtttgttcaggaaccaccagtgacagaaggaggaagaaggtgggaaaggtgaaaagag

SEQ ID NO: 601794 - DNA, 83 bp, Homo sapiens
cgacgcggacagcgggctggagcctgacgagctggcggcgtgagtgcatctccatccacgttggccaggctggtgtccagatt

SEQ ID NO: 601795 - DNA, 100 bp, Homo sapiens
aacagagcagaaatcaaattgaagagagcagttgaagaagtgaagaaattattggtacctgcaaacaccttccaccatgaccacctcagcaagttcccac

SEQ ID NO: 601796 - DNA, 97 bp, Homo sapiens
cgcacagtagaaccgatctcagccttgctgatcatctcgtacagcagcagaaaatgaccatgttacaggtggagccgccaccaaaatgcagattttc

SEQ ID NO: 601797 - DNA, 75 bp, Homo sapiens
aagtatccgccagtcaataggaagtacgagtgtcttgggcgtctttggtactggcttttttaggggtctgcctgg

SEQ ID NO: 601798 - DNA, 100 bp, Homo sapiens
cacaagttcacgaaagcctacaaaagtgtggagaggttccttcaggaggatcaggtgtgatgaatgcagactctgctaccattttggctgtttggatcct

SEQ ID NO: 601799 - DNA, 95 bp, Homo sapiens
ctctcaggcttactgtggatctggattctaaggcaacacttccttgaagaaacaagcttacaggatgcagaagaagctgtcagaattgcaaggga

SEQ ID NO: 601800 - DNA, 96 bp, Homo sapiens
tttcgaaaggaacagatcggggctgccaagcaaccccaaggtccaggtggaggccatcgaagggggagccctgcagaagctgctggtcatcctggc

SEQ ID NO: 601801 - DNA, 50 bp, Homo sapiens
gcggagctgcccatcttcccgcagctgtgttcctggaaaacaatggaaag

SEQ ID NO: 601802 - DNA, 100 bp, Homo sapiens
gattgtcctgagaagatcctgtattcttggggagagttgctaggaaaatgatgcctgtgaggagccaccaacatttgaagctatggagctcattggtaaa

SEQ ID NO: 601803 - DNA, 95 bp, Homo sapiens
gttttggccactggacatcagaaccacattttgggtttgaagaatcttctacatgctgtggaaagtgaagaaggcattgaagatgactatttttt

SEQ ID NO: 601804 - DNA, 75 bp, Homo sapiens
gggaaaattgaggagagtcctttcagtgtcgagtgatgtcttggcattgcccattttcaagcaggaagattccag

SEQ ID NO: 601805 - DNA, 50 bp, Homo sapiens
ccaatcccaggaggaaaaacggaggaatgccagctcctgagcaggcctca

SEQ ID NO: 601806 - DNA, 101 bp, Homo sapiens
atttatctggtgacagaatatgctagtggaggggaaatatttgagtgacaaccaacaagctgctgctttccattatcatcttactggagctcgccatcctg

SEQ ID NO: 601807 - DNA, 75 bp, Homo sapiens
tatgtaaccaaatattatggatcctatctgaagattgatgtacagctatatattttgtcctttctttcacctcat

SEQ ID NO: 601808 - DNA, 97 bp, Homo sapiens
ggacatcaggacaccgggagtgggagagattggactgggagactcagcaggaaagaccacagcaagattctttcattcgtctcctcctagcctgggg

SEQ ID NO: 601809 - DNA, 101 bp, Homo sapiens
gccaagcgcgtcacattcccgtccgacgaggatatcgtgtctggagcagtggagcccaaagacccctggagacatgctgccgcagcgggaaccgcaagagc

SEQ ID NO: 601810 - DNA, 88 bp, Homo sapiens
gatgtgatgccagaggtcaacaaggttctggacaagatgaagtctttctgccagaaacacatcatccatggccttttacctgcagcca

SEQ ID NO: 601811 - DNA, 100 bp, Homo sapiens
cttggagagactctatatgaaaaggaactccctgacatccttggctgcagagactgcaagtctggaagaacagctgcaaggatggggagaagtgatgctg

SEQ ID NO: 601812 - DNA, 75 bp, Homo sapiens
ggaccttccggagcttctcagaagacagagggttttcttttgagattgatcgtgtcctgtgctgaagatgtttcc

SEQ ID NO: 601813 - DNA, 88 bp, Homo sapiens
caccaggcccggctgctggccctcctggtcatcccgcctgccatcacccccggaggtattgtggccagtattttggttttcttatgtt

SEQ ID NO: 601814 - DNA, 100 bp, Homo sapiens
caagaactggctcaagaaatttgcctcgaaaaccaatgcttcaccgatatagacacattttgggattgtggcagccagatatcgggccatacggaggact

SEQ ID NO: 601815 - DNA, 95 bp, Homo sapiens
gtcgcccagcgccgccccgtcgtcgtctgccttcgcttcacggcgccgagccgcggtccgagtcccttcaccgatgttgtcaccaccaacctaaa

SEQ ID NO: 601816 - DNA, 76 bp, Homo sapiens
ctcttcagcaccctcagcagctcggccatctgctccagcgccacgccagaccaactccaggctgataggaaaaaag

SEQ ID NO: 601817 - DNA, 108 bp, Homo sapiens
actgcatggaggcacaatatcatggattttgccatgccctatttcatccaggtcatgaaggagtacttgacaaagccgtgttgaaatccttgtctcctgtagacccag

SEQ ID NO: 601818 - DNA, 100 bp, Homo sapiens
aaaaaggtgctgtgactatctaagcttctcacctggggcgggtgggttctgcaccaccctcccaccctccttcctccgtgtggacgatagagccacatcc

SEQ ID NO: 601819 - DNA, 100 bp, Homo sapiens
gcagatctcacctaccctgaagtcatcaagctcatggaaagcataacagactctctccaaatgctcatcaaaaggatggtgctgctccactggtgcctgc

SEQ ID NO: 601820 - DNA, 98 bp, Homo sapiens
gcgagcagcggcgggggcccgaggggagaggcagatgcgaaccagaacaatgggacctcctctcaggacacagcggtgactgactccaagcgcacagc

SEQ ID NO: 601821 - DNA, 100 bp, Homo sapiens
ccccaaggacaaggaggaaattgtgatctgcgatcgagcctcggtcaaggagctcccctcccacccggtcactccgtccagcaagcacgcagacagcaag

SEQ ID NO: 601822 - DNA, 83 bp, Homo sapiens
ggagtgtgcgtgcgcgccgagcgattggagctggagtgagccttccaggaattttggctgccaaatgtggtgcagaagtaata

SEQ ID NO: 601823 - DNA, 50 bp, Homo sapiens
gcgattcttccagcagatatgaagatgtggttgccctgcttggctttcct

SEQ ID NO: 601824 - DNA, 83 bp, Homo sapiens
ggcaagagagctctgcatcaatgcgccggccatagtgctgctcacggccgtgaactgctacagcgtgaaggccgccacccggg

SEQ ID NO: 601825 - DNA, 74 bp, Homo sapiens
ggcagcctgaggtgctcagttcacaagagatgcaggaactgtggctgcaccatctgtcttcatcttcccgccat

SEQ ID NO: 601826 - DNA, 100 bp, Homo sapiens
ctggaccaccgggcgctggtctgctcccagccggtacatgtactgggcagattggggtgagacgccctggatcgagcaggtggggatggacgacagcacc

SEQ ID NO: 601827 - DNA, 75 bp, Homo sapiens
caggaaggcagtctttgctacgtacagcaaaaggtgaaaggtgtagcagtcactcggcctacacccacagcatcg

SEQ ID NO: 601828 - DNA, 83 bp, Homo sapiens
ccattctggccttggatatccaggatccaggggtccccaggctaaagaacatgggccattatgctgtgatgaacaaccccacc

SEQ ID NO: 601829 - DNA, 75 bp, Homo sapiens
cgaccaatcctcacgattgagtgtcaaagaagttcacttcttcaactgagatggacatgatataatctccattga

SEQ ID NO: 601830 - DNA, 73 bp, Homo sapiens
gatttgcaacccttccgggaagccatagctctgcatggtcctgtgggaatggccgctgctgctgctgtggcaa

SEQ ID NO: 601831 - DNA, 75 bp, Homo sapiens
tcacaccagacctacggagggagctggaaattcctgacgttcattgatctggtcaaaatgcagatcttcgtgaaa

SEQ ID NO: 601832 - DNA, 90 bp, Homo sapiens
agtgcgattgtggaagctgctcgggacacaactcagatgggaagttcatcgcccgggcacagcggatagagtacgactgtgaactagttc

SEQ ID NO: 601833 - DNA, 105 bp, Homo sapiens
gtcactgcatcagtttttactagagccaatcacctgtcatgcctggaacagggatcgtactcttccaagagcctctgagttcctgccttttttcatctctgaatc

SEQ ID NO: 601834 - DNA, 90 bp, Homo sapiens
gtaaaggaggagaaggaagaggaggaggaggaggaaacagccaggaattgaatgatctggcacgggaccctccagcacagtgttcagcag

SEQ ID NO: 601835 - DNA, 100 bp, Homo sapiens
aaattttacggatcagaaggaattcagtctccaggacattgagaacccctcatgatgaccactttggcacttcgtaccagcagtggctgagctcagtgga

SEQ ID NO: 601836 - DNA, 100 bp, Homo sapiens
gcgtgatgtggctaagatgctgccgactctgggcggcgaggaaggcgtctcccggggaagaaggagaaagggccaacccctgaagaagcaatacagaaac

SEQ ID NO: 601837 - DNA, 74 bp, Homo sapiens
gaagatgcctagcacagaccttctgatgttggacctgcaggcccgtgcccgtgtggatgagtacctggcatggc

SEQ ID NO: 601838 - DNA, 100 bp, Homo sapiens
ccaggattagggaaagtcaatggctcgaaaggacacagaagcgggagaaacgttttcatctgtccaagccaatttaagtaaagcagaaaaacataaatat

SEQ ID NO: 601839 - DNA, 74 bp, Homo sapiens
tgctgccgctgctccctggccggtcatttcagtttttcagttatgggacaaaaatattatatcaaaacactgaa

SEQ ID NO: 601840 - DNA, 74 bp, Homo sapiens
gttccacacgcgcttcaagcaggagggtgtcctgaacagcaagacggccgaagccctgcagcccacgctacagc

SEQ ID NO: 601841 - DNA, 74 bp, Homo sapiens
ggagaagctgaggacacacagggaaatatgttcaagtttgtgtccagaatttgtcagaacttgactttcagctg

SEQ ID NO: 601842 - DNA, 75 bp, Homo sapiens
gcggtgagcgcccatatgggggttctggagagcggggtgtggggaaagaccacagcaagattctttcattcgtct

SEQ ID NO: 601843 - DNA, 131 bp, Homo sapiens
aacaagtgtctttggttataaattatgatctacctaccaatcgtgaaaactatattcacagtgagggtcgctgtctgcccattgatagaggccagattgtcttggaagttccaaagttgcaacgatttctg

SEQ ID NO: 601844 - DNA, 90 bp, Homo sapiens
cttgacctatgcagatcttattccaggaaagaccacagcaagattctttcattcgtctcctcctagcctgggggaccaggctcgaactga

SEQ ID NO: 601845 - DNA, 51 bp, Homo sapiens
cgcggatttggctggcgtcccgcggaggagctttatctttatatactgccc

SEQ ID NO: 601846 - DNA, 83 bp, Homo sapiens
atcgccgccatcatgggtcgcatgcatgctcccggggggatatgagactttctactcggaatatcctgagtgttgcgtggatg

SEQ ID NO: 601847 - DNA, 132 bp, Homo sapiens
tggaggctggtgggagggacagatcaacggcaggagaggtttgttccctgacaactttgtaagaatttgaacatggaattcaatccttcagatcatcctcgggccagcacaatattcctcagtaaatctcag

SEQ ID NO: 601848 - DNA, 100 bp, Homo sapiens
agctgccgtctgcaccagccatggactgctacacggcgaactggaacccactcggggactctgccttttaccgctgagatctgtatctgtggacctgaat

SEQ ID NO: 601849 - DNA, 130 bp, Homo sapiens
ctgcgctaaggaatgaaacccttccagctcgatctgctcttcgtctgcttcttcctcttcagtcaagaggattgcggcctgttggcagaagagtagtgtcttgggccccagctgacctgatgaatatcaa

SEQ ID NO: 601850 - DNA, 100 bp, Homo sapiens
ctgtctggttgtgagcagggtctgcacgaaataaagctcctgggcaaggggacgtctgcagctgaagtccctgtgaagcaggaagagtgagggcaggttc

SEQ ID NO: 601851 - DNA, 100 bp, Homo sapiens
ccgaagagtggggcgtgcagtacgtggagacgtcagcgaagacccgggccaacgtggacaagaatgaaactagtgatcgagaagatggcctccccaaagg

SEQ ID NO: 601852 - DNA, 50 bp, Homo sapiens
gtgcctgacctgctgctgccactggcttcaacggaccacaccaaaatgcc

SEQ ID NO: 601853 - DNA, 92 bp, Homo sapiens
cgcctgtcacctggacccgcgcgtgttcgtggacggcctgtgccggccagagactgctgctactttgaaacgtacgatagaggccctgatgg

SEQ ID NO: 601854 - DNA, 83 bp, Homo sapiens
ggggactactggtgcctgcgctgaaaaagggtgataaaagaaaatgtggctgaagttacccgaagttcagcttgcagtgtaat

SEQ ID NO: 601855 - DNA, 100 bp, Homo sapiens
gaggggattttgtcagcttgtcgtcaaggtgtgttccagagaacaagccttcagacatttgctatattgacgctgagctgtcaggggactcaggcttatg

SEQ ID NO: 601856 - DNA, 100 bp, Homo sapiens
gtcccagcccggccagaagcccgccgcctccccgcggccccggcgagcagccgccgcccgccgcacccatgagacctgcctagagctggaacgttacctc

SEQ ID NO: 601857 - DNA, 90 bp, Homo sapiens
acagattagcaagcaatgtggcaaaacgaaaaagctcaatgcctcagaaattcattggtaatttcatctgtgccaaagcctccagaggac

SEQ ID NO: 601858 - DNA, 100 bp, Homo sapiens
gctgcagaggatccatctgtcttagcaaggctgtcatcacattccaacaaggacaatccagacagcaattttgtgagcctgcaaatcaacatcactgctg

SEQ ID NO: 601859 - DNA, 100 bp, Homo sapiens
cttccctatgaggaggaagatcaacgaagtcacagggccgcgatgggcctcttggaacattggtgtgttcatctgcattcgatgtgctggaatccacagg

SEQ ID NO: 601860 - DNA, 73 bp, Homo sapiens
ggcgaaggaggcagaggcacttatgcttgtcaggcctggtactgtggcgctccgtgaaattagacgttatcag

SEQ ID NO: 601861 - DNA, 76 bp, Homo sapiens
actttttggtacccctttttatccactcattggcagagaagctgtaaaaatgcatttgcaaagggagaaaatgaag

SEQ ID NO: 601862 - DNA, 100 bp, Homo sapiens
aacgtgtgcagagagagtctttctggagtcacctcccatggcctgtcctgcgaaggtcctcatgctgataccgccagtggatgccagaatttgcagtgtg

SEQ ID NO: 601863 - DNA, 82 bp, Homo sapiens
gacataccatggctgctgctcttcatcctcttctgcattgggatgctagtatgttcaacacaccaggaatgcagagcttgtt

SEQ ID NO: 601864 - DNA, 75 bp, Homo sapiens
gatgattcagaaacacaaagctgttcttttcaaaatgggtttgatatacgtttgatgaaagaaggtcgtatgaaa

SEQ ID NO: 601865 - DNA, 75 bp, Homo sapiens
atgagatggtagccaaacccccagaacctatccagtgctgattcagggagagacatcagttggtaaaacaagcct

SEQ ID NO: 601866 - DNA, 82 bp, Homo sapiens
ctcttctgcctcttgatctccgccaccgtcttcaggccaggaaccctaaggactctgcaatatgaataattccctagagaac

SEQ ID NO: 601867 - DNA, 82 bp, Homo sapiens
ccggagggccagggtctcccggagccctccagaatacccatcatatagcccctgaggtggcatggtgatgtctccatgaggg

SEQ ID NO: 601868 - DNA, 100 bp, Homo sapiens
gtaccttgaaaatgtctatccagagttaagactgtggcacgtttcaggcaggattcctccttcattcaaactgcatcacccaggagtctgcaaattcccc

SEQ ID NO: 601869 - DNA, 76 bp, Homo sapiens
gatctggaccattattttgcatttccaggtctctctgaagaggctatcatggagctgaacctgccgactggtattc

SEQ ID NO: 601870 - DNA, 106 bp, Homo sapiens
ccgaaggccctatcaggacatggagtatgaaagacggctgagtatgagtttatcagctctggtctctacctagtggtgttattgcacttgtgcgaacaaagctttt

SEQ ID NO: 601871 - DNA, 83 bp, Homo sapiens
ggaattacgggaacagaaagaaaagtccgaaagagctgatattgaaaactcttgggctgaactgtggaatagtaatttcgaat

SEQ ID NO: 601872 - DNA, 75 bp, Homo sapiens
gaattcatgacacctttgactcttctactgtctcagaccttagggcgaactttctgaccaagtatacaactaccc

SEQ ID NO: 601873 - DNA, 100 bp, Homo sapiens
gaggagttcgcgtcccggaaaattggagtgcttagtgcagttggtgagagcgggagccacactcaacgtctccaccacacggtacgcgcagacgccagcc

SEQ ID NO: 601874 - DNA, 75 bp, Homo sapiens
tgtttgcacatgcccccctgaccaatgtgagacatggaatccattaaaattgcattatcagttaagaaatgtacg

SEQ ID NO: 601875 - DNA, 100 bp, Homo sapiens
gcaacgtgttggaccttccggagcttctcagaagacagagggttttcttttgaggaaactttgagggaaattttgagtcactggaccttgcggaatttgc

SEQ ID NO: 601876 - DNA, 76 bp, Homo sapiens
gagggagtttgacagctattaaaaccagggctccacagttaggaggactcagaattcatgattgaagaaatgcagg

SEQ ID NO: 601877 - DNA, 80 bp, Homo sapiens
gcgagcagaactacggcgagcggaaactggcagacctttcacttcgtatccaacaaattgaaacaactctcaatatttta

SEQ ID NO: 601878 - DNA, 99 bp, Homo sapiens
aagtagggcatccttcacccatctgaagggaggaaatagtggcaggtgacagtctgcatgtgcagttttcaggcaagtgaaccggagcaaacgacttcc

SEQ ID NO: 601879 - DNA, 108 bp, Homo sapiens
aggagctcctgccctccgtccggcaggaagtgaaggagatcctcctccggaagggcgtgcagctgctgctgagctgagaatcaggctgaaagccgggcagcagtggag

SEQ ID NO: 601880 - DNA, 100 bp, Homo sapiens
gagagaggcaccgggatcgtgaccgagaccgtgaccgagagcgtgaccgagagcgcgaatatcgtcatcgttagaaggggctgacgtttaccctacgtcc

SEQ ID NO: 601881 - DNA, 75 bp, Homo sapiens
ttgtagccataagtggacttcctctacaaccccacgtcagagtgtgggattctgttactctatccacactgcaga

SEQ ID NO: 601882 - DNA, 82 bp, Homo sapiens
gcgcggctactacaaccagagcgaggccgcacctgaactcctggggggaccgtcagtcttcctcttccccccaaaacccaag

SEQ ID NO: 601883 - DNA, 51 bp, Homo sapiens
tgggcctgaccaacccgaaaacattgctagttcagaagtttatcaatgaag

SEQ ID NO: 601884 - DNA, 88 bp, Homo sapiens
aagggcccaactggaattccacttacggtgctggaactttgcctgtcacctttcgttgcctggaagaaaatctggggattgataagcg

SEQ ID NO: 601885 - DNA, 75 bp, Homo sapiens
cgccttccaccatgattgcaagctttctgaactgatgacgcggcatggcaagaactgcaccgcaggggccgtcta

SEQ ID NO: 601886 - DNA, 100 bp, Homo sapiens
aggcagcatctggttcagctttatctatattttttgactgctctgctcctctatgctggacatcaaatttccagcaccaatgttgttatgaattattcag

SEQ ID NO: 601887 - DNA, 121 bp, Homo sapiens
tcgccgccaccgcccaggaccgccggccgggggacgagctcggagcagcagccagaaactggcgatggaatatgagaggagccctctggaaagaaaaggacagaccctgtgctttcatgaa

SEQ ID NO: 601888 - DNA, 100 bp, Homo sapiens
gcctccgctccccatacggcggccccaggcgagaaccactgtctctgatcaacgtgcggaagaggaacgtggaatctggggaagaagagctggcgtccaa

SEQ ID NO: 601889 - DNA, 98 bp, Homo sapiens
cggagctccacgacgagctggaaaaggctgctttgtaccgcctcagtggagactggaatcccttacacattgatcctaactttgctagtctagcaggt

SEQ ID NO: 601890 - DNA, 89 bp, Homo sapiens
gtgggagtctccgcgtcccgctcgctgggagagagaaatgactgctgtccatgcaggcaacataaacttcaagtgggatcctaaaagtc

SEQ ID NO: 601891 - DNA, 73 bp, Homo sapiens
cttgccctggtcttgctcggccgatgaagtgcagaggtttttttctgaacaacgcttcttcggtgaagttctt

SEQ ID NO: 601892 - DNA, 99 bp, Homo sapiens
ggtctactaggtgactgtctcctggaaatgttatgcagctcagcaaggtgaaggttcccccagatctccagaacgaagtgctgatcagcctgttagaga

SEQ ID NO: 601893 - DNA, 75 bp, Homo sapiens
cacatcggatcgatgctacgctaacctatcgggttctctctccgcgcgttcaggacaacataacgatgcacggat

SEQ ID NO: 601894 - DNA, 100 bp, Homo sapiens
gcccggcaccccccgccgacaaggaggttaaaagaagatggatgcacagtgttcagccaaggtcaatgcaaggaagaggagaaaagaggcgcccggaccc

SEQ ID NO: 601895 - DNA, 88 bp, Homo sapiens
tgctgcccgcgtccgaggctcgcgggcggcgggcccggacggttgatgatgaagcgccggccgtgtaaatgaagatcgggtgaggagc

SEQ ID NO: 601896 - DNA, 100 bp, Homo sapiens
tagaatcagtgctgtgaccccgagtaacaacgcgcgcttgagttggtataaactcctgaagggtggaaaaattccagtaaggtggacagcacccgaagcc

SEQ ID NO: 601897 - DNA, 75 bp, Homo sapiens
ggagtctctctcatcctcccggattgctctgaggccaggaggccattcctgtatcacgagactgggagctgcttc

SEQ ID NO: 601898 - DNA, 86 bp, Homo sapiens
attcgcagtggtcgcttcttctccttggtgcactacatcctccaggaggtggtgatgggtgggatggtgttggaaacaaacatgaa

SEQ ID NO: 601899 - DNA, 100 bp, Homo sapiens
gctgggctgcttggagctggtgggactgtgagcgtcgtctatatctttgaaggacaggacaatggggcggaagattctggggacacagaggatgagctga

SEQ ID NO: 601900 - DNA, 90 bp, Homo sapiens
cgcgacctggccagctgccgcgactgggaggagcgccggaacgccgaggcccagggaaatcctcattgacgattcaatttgttgaaggcc

SEQ ID NO: 601901 - DNA, 82 bp, Homo sapiens
gaagctgcccgtgccaacaatatgcaagaagtcagcagatgccgacaaaaggatcaaggtggcgaagcccgtggtggagatg

SEQ ID NO: 601902 - DNA, 75 bp, Homo sapiens
gaccaagtggagccccaaacaagtggtggactggactagagtgatcctgccatgaagcagtttctgctgtacttg

SEQ ID NO: 601903 - DNA, 125 bp, Homo sapiens
gagaatggagaccaaacctgtgataacctgtctcaaaaccctcctcatcatctactccttcgtcttctggtgggctcgggatgagtttgaaggcctcttcaagcagccagcagaaaatgtcaacc

SEQ ID NO: 601904 - DNA, 82 bp, Homo sapiens
ccaccggctggagcggatcccacacctccggaccgagggacgcggccacgccgcaatgaagagcttcttacagtgaaagcaa

SEQ ID NO: 601905 - DNA, 100 bp, Homo sapiens
cccagattgatattgtgaacatcagcgacagctttgagatgacctatagatatattgatgatgttaagaagttcaaaccgggttacctggaagctactct

SEQ ID NO: 601906 - DNA, 74 bp, Homo sapiens
gcagatccacccgtcgaaggatgagaataattccgttgatgcagcaaagccgctgctgcggaaggcgatccaga

SEQ ID NO: 601907 - DNA, 90 bp, Homo sapiens
gattcatctccatgataaaccgagagggaagccccttggatattccagtcgatgtatttgtacaccaagaattgaatgatctggcacggg

SEQ ID NO: 601908 - DNA, 75 bp, Homo sapiens
gctgggattttctggacatacttttgagtgccaaagttcgagaacttgtcttggacaattgcaaatcaaatgatg

SEQ ID NO: 601909 - DNA, 146 bp, Homo sapiens
aaagacacagataaaagagaaagatagatgccctctctcttcatcttcacttgaaataccggatgattttggaggtttctgctttgggacaaccatacatctaattccttaaagtagttttatatgtaaaacttgcaaagaatcag

SEQ ID NO: 601910 - DNA, 87 bp, Homo sapiens
tcacacgcataatggatgaaaggaaccgacagggttatatcctgtgttgtgacctcatggtttaagtgggaataaagatgagtataa

SEQ ID NO: 601911 - DNA, 75 bp, Homo sapiens
ccggaatgcagtaccctcagcagcagctgcagaagaaagatcagcaactggagcctaaaaaaagtaccagcccta

SEQ ID NO: 601912 - DNA, 145 bp, Homo sapiens
gtccggcggtcgcagagccaggaggcggaggcgcgcgggccagcctgggccccagcccacaccttcaccagtctgctcctctgacaaacgaattgcctgtgaggaagagttctccgattctgaagaggagggagaggggggccgc

SEQ ID NO: 601913 - DNA, 75 bp, Homo sapiens
ctcctgagtagccgggattacaggcagcaagaattattgccaagttagcagcttggggaaaagaactgatggaag

SEQ ID NO: 601914 - DNA, 99 bp, Homo sapiens
gcgggccagcctcagcaccgacagccgacgcgcagatagcagagccatccttgggtttgctaatccagactttacacaacctatctcagaagttgtaga

SEQ ID NO: 601915 - DNA, 82 bp, Homo sapiens
ttactcgtgttccctgccactgtcttgttccgaggcggccccagaggctactgctgcttcaagacagtgacgtttctctccg

SEQ ID NO: 601916 - DNA, 100 bp, Homo sapiens
taatgaagttagattaccaccaccacctgatataaaaaaagaaattagtgaaggagatgaagtagagtctgactgacagtactccacaagcttgcctgcc

SEQ ID NO: 601917 - DNA, 100 bp, Homo sapiens
atcatcctggggacctggtacatggcggaagcccggctcgctgcaaaacgggcggcccgcgcggaggctcgcgagatccgcatgaaggagctggagcggc

SEQ ID NO: 601918 - DNA, 109 bp, Homo sapiens
ctacagcctggaaagaaatatcctactgtgctgttcatatatggtggtcctcagtgttctacgcagaaatagaagagctgaaactggtgtatccttatcacggcgttct

SEQ ID NO: 601919 - DNA, 83 bp, Homo sapiens
gaccgccgccgccgccgccaccatgggggatatgagactttctactcggaatatcctgagtgttgcgtggatgtaaaacccat

SEQ ID NO: 601920 - DNA, 101 bp, Homo sapiens
catgtcctagaattgatactcagcagctggaccggcaaattaaagcaattatgaaagaagtcattccttttttgaagtatgagcccagaggacctggtcgg

SEQ ID NO: 601921 - DNA, 50 bp, Homo sapiens
atgagatttgccctcgttcctaaacttggatccaaacttctacagcaaaa

SEQ ID NO: 601922 - DNA, 75 bp, Homo sapiens
cacgccgggctttgttgtggaaatcccggttacctgacggttacctggcacgctggccacattctgcctcactct

SEQ ID NO: 601923 - DNA, 74 bp, Homo sapiens
ctcaccacccctatccagacggctgcccttcaagtaccaatctgtgactttggcctggcccgtgttgcagatcc

SEQ ID NO: 601924 - DNA, 78 bp, Homo sapiens
ttttgttgagtcgaaagtgaaattttcctttggccaacgtgacagtttgaacaaaaaagtggtgcagtttttgatgaa

SEQ ID NO: 601925 - DNA, 89 bp, Homo sapiens
cccagaaccaaccagtggtctccagtggtggccatgacatcacgccgtagtggaggatcaacgagcaagggctgtatcgaattgtgggt

SEQ ID NO: 601926 - DNA, 82 bp, Homo sapiens
tggggacaatccagaggtgggagaagctcgggaagtctttgacttacctgttgtaaagcctaagaaagctgtcaagataaaa

SEQ ID NO: 601927 - DNA, 84 bp, Homo sapiens
gaaagatccaaaacaagtggctgcggccgtcgcccaggagtcatcggacgccagaatctggagtggagtcaacatatcaatgga

SEQ ID NO: 601928 - DNA, 100 bp, Homo sapiens
tgatgtcttcagccagtataaaaacacagctcgacagtacgcctacttctataaagtcatccagctgcagtgagaagaggagtttgttactttaaacaga

SEQ ID NO: 601929 - DNA, 110 bp, Homo sapiens
tggctcggagactcctgcctgctgagaggaagaacttgtcgcttttcctaagcattagtttgttaattttctggggttcctcccttttgggtgcccggttatactggatg

SEQ ID NO: 601930 - DNA, 100 bp, Homo sapiens
ccggatcgccgtataccgccgggttttctcccaacgtcaggcccgatggctcggcttccccaggcatatgggcaacaaagctatggaacctatggacagc

SEQ ID NO: 601931 - DNA, 98 bp, Homo sapiens
acagttataaaagcttggtagacagctttcgaatgattttccaaatggaagggatatttctttaatgggaaaaatgtacctcaaaacatcacctatgc

SEQ ID NO: 601932 - DNA, 73 bp, Homo sapiens
gacggattcatttagagctgcggaacaggacgccctctgataactgaagcgctgcggcatggcgcgcgcctgc

SEQ ID NO: 601933 - DNA, 100 bp, Homo sapiens
gttcggttcacggagtggctacatgaagttctgaaggatgttcagccccgggtcactccacttgcaatggctgccatccggaagaaactggtgattgttg

SEQ ID NO: 601934 - DNA, 100 bp, Homo sapiens
aggaaagatggcgatgtctccgccgcatggagcggctcaggccggagcctggtaccgtcgagaaccactcacgaattcttgtttggtgcccttgctgaac

SEQ ID NO: 601935 - DNA, 75 bp, Homo sapiens
ctgagatcagggacatgttgctggccaataagctcaacgggacccaggtggagtctgtacagctcaaagtcaaca

SEQ ID NO: 601936 - DNA, 75 bp, Homo sapiens
ggataaatctcaaagatctcgtacaagatccttctttatcttcttggaaacagaattgttctacaaaggtatccg

SEQ ID NO: 601937 - DNA, 75 bp, Homo sapiens
gagagcgcgaatatcgtcatcgttagaagtcaggtgacactgcagtaatggtcacagcggtcagtaaaacaaaac

SEQ ID NO: 601938 - DNA, 83 bp, Homo sapiens
aggagaagttagcttcagagttctttgtggatggacttgattctgatgagagacttcagtgccctgaacggttagagaaatta

SEQ ID NO: 601939 - DNA, 75 bp, Homo sapiens
ccggcaaggggacccagtgcgcccgcatcgtcgaggaatttagataatgggctgtgtgcaatgtaaggataaaga

SEQ ID NO: 601940 - DNA, 100 bp, Homo sapiens
tcaaataatgtgggagaaataagtgtatccaccagactcacagttttgcgggatatgtcttctccgactactatgaagaagcctgaaaagccattgttca

SEQ ID NO: 601941 - DNA, 100 bp, Homo sapiens
gtcttttctacaaactctgtgcctcaacaaccatttctaagtggtcctcagaatggttggaatgaccctccagctttgaacagagtacccaaaaagaaga

SEQ ID NO: 601942 - DNA, 98 bp, Homo sapiens
cctggctcccttctgccccagctccgtctcggcggcggcggtcgtggcattcctggtggctttccatcagaacaagcagctcatcggtgacagggggc

SEQ ID NO: 601943 - DNA, 50 bp, Homo sapiens
atttggtccctggtcagtttctgctttgagatttaccgcattgtttctca

SEQ ID NO: 601944 - DNA, 83 bp, Homo sapiens
cctacggtgagcgccggagccggagaggcaggtgagaagccctaccactgcaactgggacggctgcggctggaagtttgcgcg

SEQ ID NO: 601945 - DNA, 75 bp, Homo sapiens
gtaactgccaaacccaagttggttggagatgtggattttgaagcctctccccaccggtcactgttagcctcgagt

SEQ ID NO: 601946 - DNA, 73 bp, Homo sapiens
tatcaggattattgctgaaatccttatggagttaactggctgagaggaagaatactagttgatcagcaagttt

SEQ ID NO: 601947 - DNA, 88 bp, Homo sapiens
gaaaacgcaaaggaagtgattcagacccatcccaagacagggcagggcattgttcatgcactgaccgacctcagcagccccggcatga

SEQ ID NO: 601948 - DNA, 100 bp, Homo sapiens
aagccgtccccggccacgcgggacggttgttgacctcctgtactggagagacattaagaagactggagtggtgtttggtgccagcctattcctgctgctt

SEQ ID NO: 601949 - DNA, 73 bp, Homo sapiens
tagatccaatggattctgcgatgctgtctggactttgctgtctctgaacattactccattcgccattccataa

SEQ ID NO: 601950 - DNA, 51 bp, Homo sapiens
gtgggcagccagggtcggtgaaggcatctaataggattcaggaatcaaaga

SEQ ID NO: 601951 - DNA, 106 bp, Homo sapiens
caaagtgtgtgcaagcaaatgcttttattcaggctgcctctcccagggagccacttgaaccactgaacttcccagatcctgaatataaagaggaggaggaagacca

SEQ ID NO: 601952 - DNA, 100 bp, Homo sapiens
ccggggcttgccctggtcttgctcggccgatgaagtgcagaggtttttttctgtttcctcaagaggagagaacttagtccaccaaattcaataccgggag

SEQ ID NO: 601953 - DNA, 51 bp, Homo sapiens
gcgatgaagagggcgtctgctggaggcccgcagccgtgccgggtgctcttc

SEQ ID NO: 601954 - DNA, 83 bp, Homo sapiens
cagagcgccgcgcacttcgtcatgttcttcgcgccctgctcaagaggtttggatatggaccttcttcaattcctggccttcct

SEQ ID NO: 601955 - DNA, 100 bp, Homo sapiens
ttttaatgtgggttttctgtttccttttggcctactcccaagaagatattgtgttgttaataacagtactggtagtggaagggattgccgtggcccaaaa

SEQ ID NO: 601956 - DNA, 50 bp, Homo sapiens
ctccttctcatgtaacacagggttccaagaccaaagattaaattaagaga

SEQ ID NO: 601957 - DNA, 100 bp, Homo sapiens
ccggatcaatccagatggcagccagtcagtggtggaggacatgtctcaggaaggctatggaactagatctcaacctcctctggcccccggaaaacctaac

SEQ ID NO: 601958 - DNA, 90 bp, Homo sapiens
tctctggcaccttggagacagtgcgaggccgaggggtagtgggcagggtggagcgaatcaaggagcgtgtggaggagaaagagggaatcc

SEQ ID NO: 601959 - DNA, 82 bp, Homo sapiens
ggcgagtttccgatttaaagctgagctgcgaggaaaatggcggcgggagaactttcacgatggccgtaaagcacagcagcac

SEQ ID NO: 601960 - DNA, 75 bp, Homo sapiens
ctacagtcatcacaatggtctggatggttatgaagacagtatggagtttccagaccatagtagacatttgctaca

SEQ ID NO: 601961 - DNA, 100 bp, Homo sapiens
cgtcctcagagtcggagagctccagtgagtccagctcctctgacagcgaagactccgaaacagggcgtctctggccgagcctctttttgtggaaaacgac

SEQ ID NO: 601962 - DNA, 75 bp, Homo sapiens
gcacacttcgagttttatcaatcaaagacaaagaaacagccttggtataatagcacgttagcatcaagacgaaaa

SEQ ID NO: 601963 - DNA, 100 bp, Homo sapiens
gggaaatccttcggatggtgaactcattagaatggaagatagatgataagcctgtaaaaattgacaagtgggatggatcagctgtgaaaaactctttgga

SEQ ID NO: 601964 - DNA, 100 bp, Homo sapiens
ctggccccaactgggacttcactttggtgacaaacagcatgtttggtgcttcaagaaagaagtttgtagagggggtcgacagtgactaccatgacgaaaa

SEQ ID NO: 601965 - DNA, 100 bp, Homo sapiens
ctcttacagcggccccacctcggtctcccgccagcgcgtcgaaagcctgaggaaaaagcggccgcgttgcaacaaggacagtgtcagagcaggctgtaaa

SEQ ID NO: 601966 - DNA, 74 bp, Homo sapiens
caagacccttgtgctcgttgtcgccgcggtcctgctgttggtgctggagaatctggtaaaagcaccattgtgaa

SEQ ID NO: 601967 - DNA, 74 bp, Homo sapiens
ggattatcttagaattttaagatacttcagggaactagattctggtctggctgaatctgtgtctacattgatct

SEQ ID NO: 601968 - DNA, 98 bp, Homo sapiens
gaagccacgtgcagacatctacaaccttcgatctcctgacgaaatccagattatcttcagtattctatcagtacagctctctgcagcttaaactcggt

SEQ ID NO: 601969 - DNA, 74 bp, Homo sapiens
catgtacccggacctttccgagctgcttatggtgtctgccccaagaatcggtgagtttcaaggatgtggctgtg

SEQ ID NO: 601970 - DNA, 97 bp, Homo sapiens
ctgctgttgtagcacagatttatgtaatgtcaactttactgagaattttccacctcctgacacaacaccactcagtgggaaatacaccaagagtgat

SEQ ID NO: 601971 - DNA, 74 bp, Homo sapiens
aatcaacgacaacttgagcacagcaagctgaacagctgggaagagaagaccagcagcgactgcaccgaaaccgg

SEQ ID NO: 601972 - DNA, 75 bp, Homo sapiens
gccttagctgtgctcgcgctactctctctttctggcctggaggctatccagcctgcagaaccttggcctgaaaat

SEQ ID NO: 601973 - DNA, 100 bp, Homo sapiens
tctaacgctgcctttgctttaaaacagtattacttgcgtctggctcttgctgattgaattcctttggtgcagtttagcatgttcctctgtgttctgcatc

SEQ ID NO: 601974 - DNA, 75 bp, Homo sapiens
catgagttagtcgcagacatggacaccaaacatttcctgccgctcggtgatgtgtccaatctagatcccaacttc

SEQ ID NO: 601975 - DNA, 98 bp, Homo sapiens
atctatctctggaaactttcctcctccaccacctcttgatgaagaggctttcaaagtacagttgtcggacaagtaaccgcaagagcttgattgtgacc

SEQ ID NO: 601976 - DNA, 75 bp, Homo sapiens
gactcaacgtgagacgcaccgcccggactcaccatgaccaagatcactccatggatgaaatgacagctgtggtga

SEQ ID NO: 601977 - DNA, 100 bp, Homo sapiens
ccccctcctgacttatgagctctatgagaaattcacgaatcgagagctccagatcatgagaaagctagatcactgtaacatagtccgattgcgttatttc

SEQ ID NO: 601978 - DNA, 82 bp, Homo sapiens
gacgatgggaacttcttcccaggcagcggggctcctgatgagggtggcccagttgaaatccttcccttcctctaccttggaa

SEQ ID NO: 601979 - DNA, 82 bp, Homo sapiens
cccggagcggtccgcgagccaccgaggcccagaaggaggcccaagttgcagcccgggtttggagggagtttgagatgaagcg

SEQ ID NO: 601980 - DNA, 96 bp, Homo sapiens
cacggctgtgctcagggctcgcgggtgaccgaaaggatcatgaactagtgacctggaaaggtttgtggtaaatatgccagctctagaacacatgaa

SEQ ID NO: 601981 - DNA, 100 bp, Homo sapiens
cctccggggcacctcagctcggccggggccgcagtctggccacccgcttccatgcggttcgggtccaagatgatgccggaggttcgtaaagtgaatgaaa

SEQ ID NO: 601982 - DNA, 75 bp, Homo sapiens
ctctcccacctgaacttgttgagcagtttggacatcttcatcataaaagaggagaaacagataaaagacaaattg

SEQ ID NO: 601983 - DNA, 97 bp, Homo sapiens
tcgggggaagctcattgaagcagaggacaacatgaactgccagggaccaggcccagctggatgcagcctccgtgtcttccatccaggtggtgggcgt

SEQ ID NO: 601984 - DNA, 100 bp, Homo sapiens
gcccacttggcgatgggttacagtaagaggaacaccaagcggacagctgaagtgtggatggatgaatacaagcaatactattacgctgcccggccattcg

SEQ ID NO: 601985 - DNA, 107 bp, Homo sapiens
cgagctgtgaggggattcacttgtgtgcggaactcctcggaaccatgattggcggcagtaagcacacaatgaatgatcacctgcatgtcggcagccacgctcacgga

SEQ ID NO: 601986 - DNA, 51 bp, Homo sapiens
tctgaaggcaaagtgacctgtggtgaaaggtgtagcagtcactcggcctac

SEQ ID NO: 601987 - DNA, 75 bp, Homo sapiens
cggagatggcggcgcgctcggcgcaggagaactacgatgacccgcacaaaacccctgcctccccagttgtccaca

SEQ ID NO: 601988 - DNA, 83 bp, Homo sapiens
gcatccactggagctacaagaacctcctgccccccgaggtctgcagtctcctgaacccagcagccatctacgccaacaacgag

SEQ ID NO: 601989 - DNA, 90 bp, Homo sapiens
ctcggggtcgctgtaggcgctgaggctgcagaaggtgatttactacctctgcatcttattgaaagatccagtggaaccacatgggatatc

SEQ ID NO: 601990 - DNA, 50 bp, Homo sapiens
gaagaatcttgaccttttcaaacagccaatggagatcttcgtggatgatg

SEQ ID NO: 601991 - DNA, 74 bp, Homo sapiens
gatagaataaatgtaacatcaaatgctcgacgaagcttaaattttgggtatgaggatacatgggctgcacttca

SEQ ID NO: 601992 - DNA, 50 bp, Homo sapiens
attacataaacctgtgtaccatgcactgaacactggccaaaagaagaccc

SEQ ID NO: 601993 - DNA, 90 bp, Homo sapiens
ccgcgcccgcctcaccacgcggcgggccaccggccggcacgaaggcgtccccacgctggaaggattgactggggcgactttggggtagag

SEQ ID NO: 601994 - DNA, 78 bp, Homo sapiens
gaggtgaaagtggatggcagcgagccgaaactgagcaagaactgatgaacttattagtcctaaagacattgatcctgt

SEQ ID NO: 601995 - DNA, 90 bp, Homo sapiens
cacagcatgaccgctcgcggcctggcccttggcctcctcctgctgctactgtgtccagcgcagactcacagatgaatgcttctcacccgg

SEQ ID NO: 601996 - DNA, 116 bp, Homo sapiens
tgctcttgcaactgacgcagtcactgcagcactggtggaacttgaggttgtgtgtcgcagccctgtcggtgaataacttctgtgacaaccgcgaagccctgtatggtgtgtttgac

SEQ ID NO: 601997 - DNA, 124 bp, Homo sapiens
ttaaccagagccatccttcgggagaggatatgtagcgaggaggaacgcgctaaggcaaagcacctggactacaatgatgaaattcgtcaggaacaactacgtgaattatcttacttaaatggct

SEQ ID NO: 601998 - DNA, 96 bp, Homo sapiens
cctcaggcttggcaacatcgctcggttggaacttaattactgcgtccccatgggagtacagacaggcgacagggtgcttcaaggatgaccgcatcg

SEQ ID NO: 601999 - DNA, 75 bp, Homo sapiens
gccgccgccgctgtccggagccccacagaacactcgtgaaactgctcaggccatcaagggtatgcatatacgaaa

SEQ ID NO: 602000 - DNA, 74 bp, Homo sapiens
gctgtggaaagaagttgcaaaacactggaccccccaaagacacacgtgacccaccaccccatctctgaccatga

SEQ ID NO: 602001 - DNA, 100 bp, Homo sapiens
ggctgcgctctccaaaaaaagcaagggccaggtcaaggaggaaggtaagatctcagagactacagcccggacctactcgcacctgaacatcgcgggccta

SEQ ID NO: 602002 - DNA, 74 bp, Homo sapiens
cggcgctttgagaactgagcgcatgtggagttcggaggaaaagggctcagaactgataaatttcaaacggaaga

SEQ ID NO: 602003 - DNA, 100 bp, Homo sapiens
caccgccatgcccaagaataaagagaaaattcctgttccaagagaaaataaggcaacatcaatgaaggagagaagagccagccagaaattatccagcaaa

SEQ ID NO: 602004 - DNA, 100 bp, Homo sapiens
cgctgctgtgaatcacatatcccaactgtcagaggagcagacgcccctgtcctggcaagagctagaaggtgagcgtgccagttcctgtgcacacaagcgc

SEQ ID NO: 602005 - DNA, 101 bp, Homo sapiens
gagcaaggagaggagccgggggccttgattctgcaggtggctgaacagagcgtggccaaagccagcctgtgcacaggctggagtgcaatagctcgatctcg

SEQ ID NO: 602006 - DNA, 75 bp, Homo sapiens
gtttttcaccctcacgctgatgaacttgtacttcacgcaggatcagttcttaagagcagccccggtaactggagg

SEQ ID NO: 602007 - DNA, 75 bp, Homo sapiens
aatgtgtgtgaattggatttgatcttccatatggataagcgaggtgctcagtcccctctgatctttctctatgtg

SEQ ID NO: 602008 - DNA, 74 bp, Homo sapiens
tggcaatagaaacgaaacgccctcagaccctgtaatcattgacaggtttgatgaacttgtgaaaaaattcaaag

SEQ ID NO: 602009 - DNA, 97 bp, Homo sapiens
acattcctgattacctgccacccattgtgtcttctcaagaaggaataccaaattgacatattttttgctcagacctggacagatagtcgccttcgat

SEQ ID NO: 602010 - DNA, 75 bp, Homo sapiens
caaggaattacataacatcaaacgtggtagccggatcgagctgggagatgtgacaccacacaatattaaacagtt

SEQ ID NO: 602011 - DNA, 100 bp, Homo sapiens
gggaaggcgcgagtgaggaaaggaggtactgtagtctcccatcaaaggacgtgcacagccttatgatcccaatttttacgatgaaacctatgattatggt

SEQ ID NO: 602012 - DNA, 100 bp, Homo sapiens
gtactatgtgactatcattgatgccccaggacacagagactttatcaaaaacatgattacagggacatctcaggctgaacaatgccgcaaaatatctgcc

SEQ ID NO: 602013 - DNA, 82 bp, Homo sapiens
cgggatcctcatgttcactacccttcatgcatgaaagacaaagctactcagggtgtcaagaagaattgtaagcagattgaat

SEQ ID NO: 602014 - DNA, 98 bp, Homo sapiens
cggccttctacatcctgttcttcaccgttatcatctatgttcggctggacttctccatcaccaaggttgatgtgatcgtgacactgggaggccttgct

SEQ ID NO: 602015 - DNA, 100 bp, Homo sapiens
ctgggatcccggccaccagcaattgtccgaaaaggtggacaagtcctattttcaagagaagatgacttttaacagttttgaaggatctaaaacttgtgta

SEQ ID NO: 602016 - DNA, 50 bp, Homo sapiens
gccgtggaggcagaggtggcatgggcgacgagtagaacagcccctctatg

SEQ ID NO: 602017 - DNA, 101 bp, Homo sapiens
ccaacacctgagccaggtgaagggccccgtaaattggaaggatgcacaagttccaaggttacgtttcagttatgaagacagtatggagtttccagaccata

SEQ ID NO: 602018 - DNA, 87 bp, Homo sapiens
cggcgctggaggagcgaggcagctgtactaggactgggaacggaatgttgtaccatctttgggtaggcagacttccctgacgacatc

SEQ ID NO: 602019 - DNA, 143 bp, Homo sapiens
ctgggcctcggcttttggtggggagataaaatccattgctgctaagtactccggttcccagcttctgcaaaagattgagtctggattcttccacgagagtgacgtcaagatcgtggccaagtccatccgtgaccgcgtggcct

SEQ ID NO: 602020 - DNA, 83 bp, Homo sapiens
caaaaatcccatctaccgcaactctcagttcgagagtaaagtagagacgggatttcaccatgttggtcaggccagtcccgaac

SEQ ID NO: 602021 - DNA, 98 bp, Homo sapiens
ttcctgaggaagcgcgggcggacgacagaggatgccgaaccactccagaggagacatcacagctttcccagatcgggaggaaaaatatggaatgtgtt

SEQ ID NO: 602022 - DNA, 75 bp, Homo sapiens
ccaggggcagagggaccactctgacaggtgctcctgacctctgataaagctgcagccaatttctcagatcgttct

SEQ ID NO: 602023 - DNA, 100 bp, Homo sapiens
gtcggcaaactcggcctcatcagcccggcctacctcttcctctggcccgaagccttcctttatcgctttcagatgaacacaatgacgtacagaagaaaac

SEQ ID NO: 602024 - DNA, 75 bp, Homo sapiens
acaagactctcttcgctctttgcatcttaactgcagaatacagttatggccacccaggtaatggggcagtcttct

SEQ ID NO: 602025 - DNA, 100 bp, Homo sapiens
cggcagccgacggcaaaggtgtcgtggtggtcattaagcggagatccggtcctcgcaagggccgagaggtgtaccggcatttcggcaaggccccaggaac

SEQ ID NO: 602026 - DNA, 100 bp, Homo sapiens
cagaaactgttattcgggcattctacggagggagatattcttgagacagtacaatgtagattataaactggagacttacttgaagattgctaggctatat

SEQ ID NO: 602027 - DNA, 90 bp, Homo sapiens
gcgcaagcggcggcgtggaagctgtgagcgcccccatcccggaggtctccgccggctcccggctgaagcaggagatgggcggcatcgtga

SEQ ID NO: 602028 - DNA, 100 bp, Homo sapiens
gatgccccgttactgtctctttggggatacagtcaacacagcctcaagaatggagtctaatggggaagagattggaaaggtgtatgagcattgtgacatc

SEQ ID NO: 602029 - DNA, 85 bp, Homo sapiens
aggagcgatttgccatcgtgctgggttcagcggattcctacacaagcaggccgtctgactccgatgtctctttggaagaggaccg

SEQ ID NO: 602030 - DNA, 100 bp, Homo sapiens
ttggaggaggtgaccgcgtccctgggctgggacctagatagtctggatcccggggaagaggaggcggcggagcgtaagagacccatacagaaagtagaaa

SEQ ID NO: 602031 - DNA, 100 bp, Homo sapiens
caaaaacatccattactatttcatggccctgaagaatgatgaggttatcaatactctggctgaccatcatcatcgtgggactgactttggtggaagtcct

SEQ ID NO: 602032 - DNA, 75 bp, Homo sapiens
cacacgactgggtatatttcctctctgaatcatgtcaaccctgccatggacttcacgcagactccacctgggatg

SEQ ID NO: 602033 - DNA, 75 bp, Homo sapiens
gcctcccgagtagctgggcttacaggcctaagatctggcaaacttggtgaacagtgtgaagcagttgttcgcttt

SEQ ID NO: 602034 - DNA, 75 bp, Homo sapiens
gccgacaccatgcgatccaaggcgagggcgaggaagctagccaaaaggtcctcactgagcagcgagtcgtccccc

SEQ ID NO: 602035 - DNA, 82 bp, Homo sapiens
tgggcgagaacgtccactgcgggccggcgaaagctgtgtgtcccggcatggatatccggaacaacctcactaggttgcatga

SEQ ID NO: 602036 - DNA, 82 bp, Homo sapiens
ctggagatgattgagccgcgcacgctacagtacaaggagaactacgatgacccgcacaaaacccctgcctccccagttgtcc

SEQ ID NO: 602037 - DNA, 75 bp, Homo sapiens
ttggcgtgcaacatggggcttgagaaaggagcaaggtccgtggtcctgtcagtggaagcccggatagcatgaatg

SEQ ID NO: 602038 - DNA, 51 bp, Homo sapiens
gtacctccaggaaatgtgctaggtactccaaagattcaggtttactcacgt

SEQ ID NO: 602039 - DNA, 100 bp, Homo sapiens
ggcatcaccagtggcttcgtgaagcccaagctgggcagatataatgcacctgactgactctgtggtgcgtcgccagctctttcttgacgtgcttgatgga

SEQ ID NO: 602040 - DNA, 82 bp, Homo sapiens
cggcctggaagcctacgccctggggctggacacccaattctgtggtgttcttggtcacacatttatggagtttctgaagggc

SEQ ID NO: 602041 - DNA, 75 bp, Homo sapiens
gcatccaccccaaagacttcaagcgagcgacggaggcgccggtgccaggtggcattcagctacctgccccagaat

SEQ ID NO: 602042 - DNA, 100 bp, Homo sapiens
gtggcccctgcagcggaaccggacccagtccctgagccgcccctacacccacaggtggtgatctttgtgaagtctgtgcagcggtgcattgccttggccc

SEQ ID NO: 602043 - DNA, 104 bp, Homo sapiens
tatagatgtaaaaatgctatcaggatttactccaaccatgtcatccattgaagagttgctgtcatcctcacctaatcgtattcctagtagcagactgcatcaga

SEQ ID NO: 602044 - DNA, 75 bp, Homo sapiens
actcacaatgactctgttgtggtacaccaggggttggaaaaaccacactaggcaaagaacttgcgtcaaaatcag

SEQ ID NO: 602045 - DNA, 100 bp, Homo sapiens
gttcacgtgacatcaagaggaagcggaaaccagtggccacagcatctttgtctagccccagtgcagcaatgctggggtgaaaacaacacggctagaagct

SEQ ID NO: 602046 - DNA, 97 bp, Homo sapiens
tatatgctggaatggttcctttggccctcatggagcacagcaactgctcgtcggagcccggcttctgggcacaccctcctggggcccaggcgggcac

SEQ ID NO: 602047 - DNA, 95 bp, Homo sapiens
cccgtaggaaggtgctgtccgaacgatcgggataggagcggtccctgcgcttgctgctgggaagtggagacttcagatggattttaaaattgaac

SEQ ID NO: 602048 - DNA, 83 bp, Homo sapiens
ggcgtgtccctgcagcgaaggatcctggttgtaagactttgaccccgacgcaggcttcagtgattgccgcggatcagaagcct

SEQ ID NO: 602049 - DNA, 97 bp, Homo sapiens
attgaaatgttccttagaaaggagcagcaggtgctggagaatctggtaaaagcaccattgtgaagcagatgaggatcctgcatgttaatgggtttaa

SEQ ID NO: 602050 - DNA, 74 bp, Homo sapiens
tggcatcaaggacaaacccaccttcatcaaaggggtactaccaactgagcagtcaccacggccggagaaaacgg

SEQ ID NO: 602051 - DNA, 82 bp, Homo sapiens
ccaacatgcctcaccctcatctatatcctttggcagctcacaggttttctgtctcaactggtctctgacaagcctctgactg

SEQ ID NO: 602052 - DNA, 74 bp, Homo sapiens
aagaccaagaccgcaggaaggactggggccacgtggagctgctggaggtcgccctggcagcatacaagtggctg

SEQ ID NO: 602053 - DNA, 99 bp, Homo sapiens
tcaggccgtccgagcccttcctgaccccgtacctgctggggccggacaagaacctgaccgagagggaggcagttgtgaaaaacttcaggacaaaaatgt

SEQ ID NO: 602054 - DNA, 90 bp, Homo sapiens
cgcgaaccctgctgggcctccagtcaccctcgtcttgcattttcccgcgtgcgtgtgagatggtaacctgcacctcaatgtgacggcgga

SEQ ID NO: 602055 - DNA, 51 bp, Homo sapiens
atttccatgtcaacatagtcctggaacctatccgcttacggtacaagctga

SEQ ID NO: 602056 - DNA, 87 bp, Homo sapiens
acaggtgtcgtctctttgagtatggccaggcacccgccgaggcccgagtaccagtctccgtttctgcagagcgcccagttcctcttc

SEQ ID NO: 602057 - DNA, 100 bp, Homo sapiens
cagaagatgatgatgaaagtggaagtgttcgccagttactacatgaaaagataagagatgcttatactcacccacaatttgtgaccgatgtaatgaagcc

SEQ ID NO: 602058 - DNA, 101 bp, Homo sapiens
ttcgaaggcgacttcaagacgcggcccaaggtgtcccttggcggcgcgagcaggaagggtgctgataagactgtgaaaggcccagatggactgaccgcctt

SEQ ID NO: 602059 - DNA, 75 bp, Homo sapiens
cagagcggagggagccccagacacggacagctcggggctccgtctctggaaacgccgctggttcgtcctctccgg

SEQ ID NO: 602060 - DNA, 100 bp, Homo sapiens
tatgtgagtggaggaaatacgcaggcccgccaagctgccccctgtgtgctattctttgatgagctggattcgattgccaaggctcgtggaggtaacattg

SEQ ID NO: 602061 - DNA, 83 bp, Homo sapiens
cgcgcgaccgccgaatcgctcctgcagcagagggttgtgagtcccggcccagcccctccacccccctgcccccccgatgcgac

SEQ ID NO: 602062 - DNA, 100 bp, Homo sapiens
tttgggtgtaaagaaacaaacccaggcagaaagctttgtcctcacaagttctgatgcagacaagaagctacagtggatggaaactctgtgagaattgtgg

SEQ ID NO: 602063 - DNA, 75 bp, Homo sapiens
acgcaaaagccactgtttcagctgccacggccacctggctcgtgaaaggttgcctgcggacacgctgggcctctg

SEQ ID NO: 602064 - DNA, 73 bp, Homo sapiens
gtgcaacatctgcaaggtccgcttcaccaggaaattcgaaatgagtcccatgactatcctcatagagtggcca

SEQ ID NO: 602065 - DNA, 88 bp, Homo sapiens
agtggcttctgctcaccaacagatgaagacagatgcaccaacgagcaataccaagtttccaggcccgaagagcatcccagactattgg

SEQ ID NO: 602066 - DNA, 89 bp, Homo sapiens
aacaagtggctgcggccgtcgcccaggagtcatcggacgccagaatctggtttggtgcacctcgatttggaggaagtagggcagggccc

SEQ ID NO: 602067 - DNA, 100 bp, Homo sapiens
gagaagtgatgtcttcgttgagtttttaaaactggcgcagctgcaatcatcaaggtgctacccctttagttctggcaaagcgcagaggagtaaataaaga

SEQ ID NO: 602068 - DNA, 100 bp, Homo sapiens
ccaaattcgtctgcgaagaagaaagaggagaaggggaagaacatccaggtggtggtgagatgcaggcccgccagctcatcctgcagtatggcttgaccct

SEQ ID NO: 602069 - DNA, 88 bp, Homo sapiens
aggacccgctttctaccattaagggcgaactttctgaccaagtatacaactacccagagggcctaggagaagtgctgtatagagagca

SEQ ID NO: 602070 - DNA, 73 bp, Homo sapiens
tcctggagcacctgcagctggcgcctctgcagtgggatggtttgtgaagaaggtgacaagctaacctactcaa

SEQ ID NO: 602071 - DNA, 74 bp, Homo sapiens
gcggaggtcgataagctggaactgatgattacctaaaaccagatccatggatgatcttctttctgcctgtgaca

SEQ ID NO: 602072 - DNA, 100 bp, Homo sapiens
catgaatgtggtggaataagtgctagtatcggacatgatcctcatcttttatacactcttagtgctgtccaggcctgctatgagagaggcgaggaagtca

SEQ ID NO: 602073 - DNA, 74 bp, Homo sapiens
gagccgaggcgagcgccgcgcgcaccactgcaacatggccaacgccctggccagcgccacttgcgagcgctgca

SEQ ID NO: 602074 - DNA, 101 bp, Homo sapiens
acgaaggtgaagccacggaagataagtttgtgatgtctggctggggtataggttattcatttcgatgtgacattgttgactattcacggtcacccacagct

SEQ ID NO: 602075 - DNA, 83 bp, Homo sapiens
cacactggacgcgagctgcgctgcaagcaattctgtggtgttcttggtcacacatttatggagtttctgaagggcagtggaga

SEQ ID NO: 602076 - DNA, 80 bp, Homo sapiens
ggatggaccgccgaggcggcggccggggcggcggaggcggaggcggccggcccgggaatgtatcctgtcaggtataatgt

SEQ ID NO: 602077 - DNA, 75 bp, Homo sapiens
tggaaaggaaaaccactgcgtctccttatctggacacgtgcaggctggtccaggtgcaggtacagcagtctccgc

SEQ ID NO: 602078 - DNA, 51 bp, Homo sapiens
agagccatccctgacacccggcatgaccaacccaacatgagtgaagtttcc

SEQ ID NO: 602079 - DNA, 100 bp, Homo sapiens
ggctgtgctcttggtgaggaagtttaactctcaggagccttctccgcagttggcttcctcggtagcttccacacggagcatgcccgagagcctggacagc

SEQ ID NO: 602080 - DNA, 75 bp, Homo sapiens
taaattttaatgaagatattctgtgtccacatgcgtccgtctccaagagagtatgaagagagtgcgtctgtaggg

SEQ ID NO: 602081 - DNA, 75 bp, Homo sapiens
gaccctttgggttggcttcgtggctccacgacttactctctacccttggcagacaccagagaagcctatgatgac

SEQ ID NO: 602082 - DNA, 100 bp, Homo sapiens
ccgcactgactgtgatgtagtttcctgacctctgacacgtattgtctcaagattaaaggtttgttatccaggcataagaccaagaaattatcttcagaaa

SEQ ID NO: 602083 - DNA, 101 bp, Homo sapiens
tacgcttcgaggacttcacggagctctggagaaacatgaagttcgggactatcttctgctcctctggtgcaagtgtggtagctattgacaacaaaatcgag

SEQ ID NO: 602084 - DNA, 75 bp, Homo sapiens
atcagtctgttcggcctgccatgtggaaaatgatgcttaatatcgatgtttgaacaaaaaagtggtgcagttttt

SEQ ID NO: 602085 - DNA, 100 bp, Homo sapiens
tgtaatgaagtcttccaggacgagacatcactggctacacatttccagcaggctgcagatacgagtggacaatcccggctgagacaacaggacatcggcc

SEQ ID NO: 602086 - DNA, 100 bp, Homo sapiens
atcccctcctcggtggaggcgtacatcactgtcgtctcatgggagaaagacactgtttcacttgtctcaggtaagaatgattgatgttggctgatattgg

SEQ ID NO: 602087 - DNA, 99 bp, Homo sapiens
tggcccgcggggctgtccaggcacgcgaggcccctcagtgaagatagtgatccggggagacaggaacacgggcaagacagcgctgtggcaccgcctgca

SEQ ID NO: 602088 - DNA, 100 bp, Homo sapiens
gttctgcttcctgctgctctgtctcagcgccgcctccctgcttcttaacagatctctggaaacatggctacagaacatgttaatggaaatggtactgaag

SEQ ID NO: 602089 - DNA, 98 bp, Homo sapiens
acctgcgtttcctggatgctcttaaagaatctttagaacacgatgttcttgatgataatacagagcagacagatgacaaaataccagctacagaacag

SEQ ID NO: 602090 - DNA, 79 bp, Homo sapiens
gattcgcagtggtcgcttcttctccttggttcattattatgaagatggtaatgttcagctagtgagtcataaagatata

SEQ ID NO: 602091 - DNA, 100 bp, Homo sapiens
cagaaaggggctcatactcatcttatgggagagaatcaaacttacagggttgccaccagaattcagcggggtgccaagtcgttttctgtgtgggttgaga

SEQ ID NO: 602092 - DNA, 51 bp, Homo sapiens
gcagtgggcattagccacgtccagggttctgtgtagcctcacctagtgcat

SEQ ID NO: 602093 - DNA, 101 bp, Homo sapiens
aggagacttacatcgatgaccttggacacctccatgttatggacacggtctttcttattcagaggccagttggagaacagaaagaacttcttaataaatgg

SEQ ID NO: 602094 - DNA, 109 bp, Homo sapiens
tcaccaacttggattcatccacagagacatcaaaccagacaaccttcttttggacagcaagtcctcctgcaaggagaatccttttaaccggaagccatcacctgcagcg

SEQ ID NO: 602095 - DNA, 73 bp, Homo sapiens
tttgggcgtcccattgccatggcatggattccgtgaaggaacaacacctaaacccaagagggcagctgttgca

SEQ ID NO: 602096 - DNA, 100 bp, Homo sapiens
atacaaagcactggatgatacccaagttaaaaatgcctgtgaggagccaccaacatttgaagctatggagctcattggtaaaccaaaaccctactatgag

SEQ ID NO: 602097 - DNA, 100 bp, Homo sapiens
gaaagagcttccggagcagcttcaggaacatgctatgtcaatgccaatcgcatcatcccgaggagacgtggagagtgtccgccgctgcctggctcacagc

SEQ ID NO: 602098 - DNA, 83 bp, Homo sapiens
cagtgctggcggcggcgggtcaggagcagccgcagcgacggcggcgacagcaggctgtattcatcaccaaagaaaaaacttac

SEQ ID NO: 602099 - DNA, 97 bp, Homo sapiens
tagactttcagctacttgaagatagccatcagccgctacgtgactcttttctccagctgctaggggagctgatcctggaccgtcacaactttgccat

SEQ ID NO: 602100 - DNA, 88 bp, Homo sapiens
gattgagccacaagtatactgaaggaagggctccctcgagttctggtgtgaagagataaatcaccagtgtctcctttcctcttgggcc

SEQ ID NO: 602101 - DNA, 102 bp, Homo sapiens
catgctctccatcacctatcacagcagcatccgctctctggaggaactctaatgaatcattgattgaccagcactattttaccagttggaatgaatgatcag

SEQ ID NO: 602102 - DNA, 87 bp, Homo sapiens
ggagtagagtcttttttcactgaggacaatgcagatcttcgtgaagactctgactggtaagaccatcaccctcgaggttgagcccag

SEQ ID NO: 602103 - DNA, 82 bp, Homo sapiens
gggcagtgctagctcgccgcggccgcctccgggacctgcctagagctggaacgttacctccagagcgagccctgctatgttt

SEQ ID NO: 602104 - DNA, 98 bp, Homo sapiens
gtggttgtgtggtcgcgtctcggaaaccggtagcgcttgcagcatgcgctcctttaccctcatcgtggaggcctgggactgggacaacgataccaccc

SEQ ID NO: 602105 - DNA, 75 bp, Homo sapiens
gagtattttactaagcccctaaaatgtcgagatttgtacaagggattaaagcctgtggtttccacagaagcacca

SEQ ID NO: 602106 - DNA, 90 bp, Homo sapiens
gtgacatccgaggtgcctttctccaaaaggaaccacgtgaatgttgagggggcgacacacaagcaggtggtggacctgattcgagcaggc

SEQ ID NO: 602107 - DNA, 100 bp, Homo sapiens
ccacagctgcgagcacaggtttggcgctacctgacatacatcttcatgcatgcaggctctgaaatagaaaatgtctgcagacggcggaggcatccaggac

SEQ ID NO: 602108 - DNA, 50 bp, Homo sapiens
aggccgcggagcgccagctcaatgaagcagaggtggaggagacactgaag

SEQ ID NO: 602109 - DNA, 100 bp, Homo sapiens
attcttccacttcctcagaatgtgaaggattatttactcgatgatggaactctggtggtttcaggaagaggtaaataccggattgtatacgtaactccag

SEQ ID NO: 602110 - DNA, 48 bp, Homo sapiens
ggcccacggtagcgcagccgctctgagctatgaaacccacgtagtcga

SEQ ID NO: 602111 - DNA, 98 bp, Homo sapiens
cactcttgagtttgctggatcactacgaatggaactgttttgtcttcctgtatgacacagacagggtttctctgcaggtggatattgttcccagccag

SEQ ID NO: 602112 - DNA, 88 bp, Homo sapiens
attcctttaaatccggagggggaaaaaatcccaaggtctgcaaagctgtgtcagcgtgttatgatgccgtcccgtaccaacctggcta

SEQ ID NO: 602113 - DNA, 80 bp, Homo sapiens
tccaggatgtctacaaaattggtggagatacaactcgtcaacgaatcaaattcagtgatgacagagtatgcaagagtcac

SEQ ID NO: 602114 - DNA, 88 bp, Homo sapiens
tcctcacatgacaagatgctggcacaacccctcaaagacagtgatgttgaggatcccaaaatggctgggcgaaaacttgctctaaaaa

SEQ ID NO: 602115 - DNA, 50 bp, Homo sapiens
gtcaattgccatgcacacttctggagcagcccgacggccatggaggctga

SEQ ID NO: 602116 - DNA, 83 bp, Homo sapiens
aaaatggacttgactatgcactcagaacatccatgatagcagtcttctgtaaatcgaacttttcaagaattctctgaaggaac

SEQ ID NO: 602117 - DNA, 100 bp, Homo sapiens
ggaactaccaagcatgtggctcctggtcagtgtaattctaatctcacggatatcctctgttgggggagaagctgctgccaatcgcaatgatcctgtgttt

SEQ ID NO: 602118 - DNA, 100 bp, Homo sapiens
gacgaacctggcggcctatgtgcccctgctgacccagggctgggcggagatcctggtccggaggcccacagaaagtttcctacactactgaggtttaggg

SEQ ID NO: 602119 - DNA, 50 bp, Homo sapiens
tccctgagtctcgtgtgtcatgagtacctctgtgagtgtcagtttgatga

SEQ ID NO: 602120 - DNA, 75 bp, Homo sapiens
agtgcagacgcagtggtggccctggagcagtatgccagcaagtatgggcgtctctttgtggaagcatttctgaag

SEQ ID NO: 602121 - DNA, 100 bp, Homo sapiens
agatacgccaatgcgctcaaaggcaaaaagggtagtgggcagcagtcagtgacaggtgtaacctctgtggatgacagcaacagttactggaggatacggg

SEQ ID NO: 602122 - DNA, 83 bp, Homo sapiens
atgatcaacctcgtcatgtcctacgcgggaaccctactctggaaactgtcagtcccagggcactggggagggctgaggccgac

SEQ ID NO: 602123 - DNA, 100 bp, Homo sapiens
tgagaaattgcccatgggctccataaaaaatgtggtcagtgaacctatcgaaggacatgaagactaccacatgatgaagatgggtgtgaacctgacacgc

SEQ ID NO: 602124 - DNA, 82 bp, Homo sapiens
ccttacagccgctcgtcagactccagcagccaagatggtgaagcagatcgagagcaagttcacttcttcaactgagatggac

SEQ ID NO: 602125 - DNA, 82 bp, Homo sapiens
gccaaagaacagaatcctgcactgggaaagaggtggacccccaaaagtacaagggcatatttaacggattctcagttacact

SEQ ID NO: 602126 - DNA, 100 bp, Homo sapiens
cactctcccagcctggagcagccggaccagcccagaaggcagcggcggcccaggccagcattcccgcagagccggaaaattcaaatccgaaatattccac

SEQ ID NO: 602127 - DNA, 73 bp, Homo sapiens
tgcaacaagtcccacttccgaaaccacaagtttgccgatattcttggtgccaccattgagaactccaggattg

SEQ ID NO: 602128 - DNA, 73 bp, Homo sapiens
acattctggtggctggtggaatgctggggaactgatggagtagagtatttattaattcctgttgataatggaa

SEQ ID NO: 602129 - DNA, 103 bp, Homo sapiens
ccgtggtgacagcctctgggtcctcggtcggtacagtctctgcacctcgcgccccagcagattccagcaagattatggaagagcatagctacatacaaaagga

SEQ ID NO: 602130 - DNA, 90 bp, Homo sapiens
aaaagacagagaaactatgggacacagatatgttgaagatgtaataatgaaacttcctggactattttggccaacaatgtctcaaacatc

SEQ ID NO: 602131 - DNA, 100 bp, Homo sapiens
aattgcattttgatgaaacagtacattgagtttgtagctgacagattacttgtggaacttggattctcaaagactcagcccgcctgcacccaggtgaaat

SEQ ID NO: 602132 - DNA, 100 bp, Homo sapiens
cagacaatgccggtggaggaatttgtggctggctggatctctgggttccccactgaaggacttggtccagctgtctggcagggaggagagacagaagctc

SEQ ID NO: 602133 - DNA, 75 bp, Homo sapiens
ccgaccgctacgctgtctactggaacagcagcaaccccaggtggagccgccaccaaaatgcagattttcgtgaaa

SEQ ID NO: 602134 - DNA, 75 bp, Homo sapiens
tgggccgccgctgctacctgcagcgccgtgtggcacgacacaaaaatcaggtccagtgcacgtgccaacattaca

SEQ ID NO: 602135 - DNA, 101 bp, Homo sapiens
catcattgataacaagggcatcgactcagacgcttcctatccctacaaagccatgtcccatgaagctgaggtcttgaagcagctggctgagaaacgagagc

SEQ ID NO: 602136 - DNA, 88 bp, Homo sapiens
gtcttcggtggactccttcggcagtccacccaccgccgccgcctcccagtctttcccagggaactccgatgaagtgttccaacaaaat

SEQ ID NO: 602137 - DNA, 74 bp, Homo sapiens
ggcaggcgctgcgctgcactagaaagcagatggtggagctgaatatgccacttaccagactaaatcaaccactc

SEQ ID NO: 602138 - DNA, 100 bp, Homo sapiens
gggagatccacagctaagacaccgggacctcctggaagccaaaaatggtttatccagcatccaaaaaactttggactaattgcatcatacttggagagga

SEQ ID NO: 602139 - DNA, 124 bp, Homo sapiens
agcgagaggatggtcatccgcgtgttcatcgcctcttcctcgggcttcgtggcgcaattctgtggtgttcttggtcacacatttatggagtttctgaagggcagtggagattactgccaggcac

SEQ ID NO: 602140 - DNA, 90 bp, Homo sapiens
cgaaatcatgagcatgttaatgttagctggtgctttgtgtgctcagaagctcagttttcagttcagaaagtcactcctcagtctgatggc

SEQ ID NO: 602141 - DNA, 96 bp, Homo sapiens
caagctttagagcctggctactcacagttgaagcctgattgcaggtggtgatcgtggcagaggtggccctggtggcatgcggggaggaagaggtgg

SEQ ID NO: 602142 - DNA, 100 bp, Homo sapiens
aacaagatgtatcacctatagaaagaaatgagcagctttggataatgacgacagcaacccgaagacagggaaatttagtatggctgtgacccgatccaaa

SEQ ID NO: 602143 - DNA, 75 bp, Homo sapiens
tgtgcagcagatgaagagagggccagaagcagcccgacggccatggaggctgaagagacgatggaatgccttcag

SEQ ID NO: 602144 - DNA, 98 bp, Homo sapiens
aggagaccatagctgcacagccaggagagcgacttgcagttgtggaggtacagtgtgaacggctgaggatgctctaccgggactgtgctcggccccca

SEQ ID NO: 602145 - DNA, 125 bp, Homo sapiens
cggacgcgccgcgccctggcggctctagggaccccccccgcgcctgcacttagccccgcgcccgaggctagcttgtcactttctgcaaaggtttccctcagggagcctcctgctgccaggcacca

SEQ ID NO: 602146 - DNA, 75 bp, Homo sapiens
gtcacttctgcctttccagtgacaaaatggtgtggagctcttgtccctggcaaagcgaaagcgcagtgactctga

SEQ ID NO: 602147 - DNA, 149 bp, Homo sapiens
ggatttttctcggcttcacatgtacagtcctccccagtgtgtgccggagaacacgggctacacgtatgcgctcaggccctgccctgggagaagccctgccacacgtcgtgcccacgctgagggcctgtctgcagccctcccaagacccg

SEQ ID NO: 602148 - DNA, 100 bp, Homo sapiens
ggtgaatggctggtacccattggcaactgcctatgcaacgctgggcatgaggagcggagcggagaatgccaagttcgatcctttggtacagaagacagac

SEQ ID NO: 602149 - DNA, 82 bp, Homo sapiens
tgcggggccgtggcgctcggctgcgcgctgctcctcgccctcaagttcacctgcagtgttctaagaacggaagcatctgggc

SEQ ID NO: 602150 - DNA, 96 bp, Homo sapiens
aagacagctttcacagtttgcgggactcagtcccatcactccaaggagagaaggtattgatgaagatgaccctactgctgatgataccagtgctgc

SEQ ID NO: 602151 - DNA, 97 bp, Homo sapiens
agcagttacctcagccaaacaggacaagcagtcttcccatgcacaagatgattaatacagatcttagcagaatcttgaaaagcccagagatccaaag

SEQ ID NO: 602152 - DNA, 83 bp, Homo sapiens
cttgagattatcatcggctgagggtggaagcggcccccgcagacgctcggcaggtgatgtgtccaatctagatcccaacttct

SEQ ID NO: 602153 - DNA, 75 bp, Homo sapiens
cagatgtggggaatgccatcacacctgcggaacctgcgtggcacatcaaccccgtggccgcctccctcatccaga

SEQ ID NO: 602154 - DNA, 75 bp, Homo sapiens
gtgaggcctccccagccatgtggaacttgcacctgtggcgattctcaggtggctacccagccctcatggactgca

SEQ ID NO: 602155 - DNA, 100 bp, Homo sapiens
atttaattttagggtcctttatatagaagggagagtagtttagaagaagaatgtgaatcctctctttgcacatctgcgttaagagccaggaatctagagc

SEQ ID NO: 602156 - DNA, 75 bp, Homo sapiens
cgtctctctgctgcggcgcggggaccgctgtgctctcgttccagggtctccctccactgctgtagtaacccgggt

SEQ ID NO: 602157 - DNA, 100 bp, Homo sapiens
atgggagtgatgttcacgcctctgacagtgaaatacgcgtactacgacactgaacgcatcggagtgtcttagatgatgagggcagaaacctgaggcagca

SEQ ID NO: 602158 - DNA, 88 bp, Homo sapiens
tcggtggcaggagggccggcggagcgccatggcctgcatcctgaagcggggatctgatgagcttctttcttctggcatcattaacgga

SEQ ID NO: 602159 - DNA, 75 bp, Homo sapiens
gtggctgtgcttgccaggcctggctccagtgccgtgagcgatgtggagatgcaggaacactatgatgagtttttt

SEQ ID NO: 602160 - DNA, 100 bp, Homo sapiens
aatcagtcaacctagaccaatggacagcagaacagatacagcagatccagtttgctgaccagaagcaagaattcaacaaacgtcccaccaaaattggacg

SEQ ID NO: 602161 - DNA, 101 bp, Homo sapiens
ctgcacttgtcggggaccgcgagggcacacctgtctccattgttgtcactacgcgccatccctgtcatcaatcgggcacagatcattaatgacgccttcaa

SEQ ID NO: 602162 - DNA, 88 bp, Homo sapiens
tgatctgtgggcgcattgtctgtgaacaagaaggctcaggcccttgcttattctgtggcactctgacggagtctcgctttgtcgccca

SEQ ID NO: 602163 - DNA, 100 bp, Homo sapiens
gtggatgtcgagaacggtgcttctatggcaggatatggtataagtgtgctagcggagtgtctagattgtcctgaattgaaagcaactgcagatgacttta

SEQ ID NO: 602164 - DNA, 75 bp, Homo sapiens
agagaggaccccggtacatctgaaagccgggaaatgacacaatgaggcatatacatggacaaatcccacctgctg

SEQ ID NO: 602165 - DNA, 82 bp, Homo sapiens
ccgatccagcctgcggagcctgtggggcaggtttttagaacttcagccataaaaatgggcagaattttccttgatcatatcg

SEQ ID NO: 602166 - DNA, 88 bp, Homo sapiens
gatgagagtgaggatgaagaagatgactaccagctttctctcctttgaaaacactaagaataatgtcactgcatcagtttttactaga

SEQ ID NO: 602167 - DNA, 88 bp, Homo sapiens
taactgtcaagacaacagtgatgaggaaagctgtgaaagttctcaagatcccaaatcagcaaagtggaactcttcagatcattccaga

SEQ ID NO: 602168 - DNA, 100 bp, Homo sapiens
cgctgggtgcgtggggctgcctcgccgcgtctcgccacggtagtaagcattaataatgtctttcatctttgagtggatctacaatggcttcagcagtgtg

SEQ ID NO: 602169 - DNA, 74 bp, Homo sapiens
cagaacctcacctcagagcccaccctcctgcagcacagggtggagcacctcctcctctgatgcgtcacagtcac

SEQ ID NO: 602170 - DNA, 75 bp, Homo sapiens
atcactcgcaaccaaaagcgcaagcatgatgagatcaaccatgtgcagaagggtggagagattcaaccagttagc

SEQ ID NO: 602171 - DNA, 100 bp, Homo sapiens
gggtggtgaccatcgaaaggagcaagagcaagatcaccgtgacatccgaggtgcctttctccaaaagctgagcgggctttggacaccatgaactttgatg

SEQ ID NO: 602172 - DNA, 100 bp, Homo sapiens
ctaagatgccaggaccccctgaaagcctagacatggtgccatacacagaggctgcctctttgtctactggttctactgtgacaatcaaagggcgaccact

SEQ ID NO: 602173 - DNA, 100 bp, Homo sapiens
acggaaacagctttagtgatgagagcacccagacttcacagagaatgcagttgtcttgacttcaggtctgtctgttctgttggcaagtaaatgcagtact

SEQ ID NO: 602174 - DNA, 74 bp, Homo sapiens
gggaaaatcacctttgcagaaaaggagaagaaataccacttgcaggagagggttgacaaagtaaagaagaaagt

SEQ ID NO: 602175 - DNA, 100 bp, Homo sapiens
gaaaaggcgtcgggatcggataaataacagtttatctgagttgagaagacttgtgccaactgcttttgaaaaacaagatgaaacaggcgcctatttaatc

SEQ ID NO: 602176 - DNA, 100 bp, Homo sapiens
gctaagcagaattgcaagggacaagtggccacactccctcaggcaaggcactgacgtttcttctgctacagcctccaagccccaaacttcctccacacag

SEQ ID NO: 602177 - DNA, 100 bp, Homo sapiens
gtcatattacaaaaccgagggcgatgaagaagcagaggaagaacaagaagagaaccttgaagcaagtggagacgaaaccagacagagggtcaagtttaca

SEQ ID NO: 602178 - DNA, 100 bp, Homo sapiens
cggggagctgcgcgaagccggggcggagcacgcgagctatgggggatatgagactttctactcggaatatcctgagtgttgcgtggatgtaaaacccatt

SEQ ID NO: 602179 - DNA, 75 bp, Homo sapiens
gtggccccgcaaccctccctcccggctcctcggagcggccgccgggcagcgacagagggataaattggaagaaat

SEQ ID NO: 602180 - DNA, 100 bp, Homo sapiens
ccggggtctccctcccaggacacaggagtcaaggtgtggatgaggtcaccattgtcaacattttgaccaaccgcagcaatgcacagagacaggatattgc

SEQ ID NO: 602181 - DNA, 104 bp, Homo sapiens
ccaacccactttctcggcgccgcggctcttttctaaaagtgaacttagtgatttggcccgtgaccctccagcacaatgttctgcaggtccagttggggatgata

SEQ ID NO: 602182 - DNA, 100 bp, Homo sapiens
cagcactgctccctgcccatcctcaggccgagcgggggccggccccagcccagactggaagatgagattgacttcctggcccaggagcttgcccggaagg

SEQ ID NO: 602183 - DNA, 83 bp, Homo sapiens
cagagccgggagttcaagaagaacactccagagttgatattcactgatggactccaaagaatcattaactcctggtagagaag

SEQ ID NO: 602184 - DNA, 90 bp, Homo sapiens
ccaaaagtggaggatcctatgcctgaatctaaggtacaaatctattgtcaagtacaagacagctttctactccttctaccttcctatagc

SEQ ID NO: 602185 - DNA, 101 bp, Homo sapiens
ctgaagctgcctccaactgatgcttattacaagctgcgccacattgtggatgaggtcaatggattaataaggaggctggtggcatgttgtcctcaatctcg

SEQ ID NO: 602186 - DNA, 75 bp, Homo sapiens
caagcaacaagtgaaattgaggtcacaccttcagtccttcgagcaatttgccaccgtttacaaggccagagataa

SEQ ID NO: 602187 - DNA, 141 bp, Homo sapiens
aagatggctgtcacctattcgcggctcttcccgcccgccttccgccgtctcttcgagttcttcgtgctgctcaaggtgagaagccctaccactgcaactgggacggctgcggctggaagtttgcgcgctcagacgagctca

SEQ ID NO: 602188 - DNA, 90 bp, Homo sapiens
ttgctgcgtgggcatggaggactagggtgtactctgtgtgaccgcgcctatccctcggactgtcccgaacatggaccagtgacttttgtt

SEQ ID NO: 602189 - DNA, 97 bp, Homo sapiens
gctgcaacacccctactgttctccgtgtattggcttttctgggcagcagtgtgaccgcaacaagggaaaacatggcttatactgtggaatgcctgcg

SEQ ID NO: 602190 - DNA, 82 bp, Homo sapiens
gtggccttagctgtgctcgcgctactctctctttctggcctggaggctatccagcgtgctgaaggtcgccatcctggctgag

SEQ ID NO: 602191 - DNA, 83 bp, Homo sapiens
gcgctcctcagcctccgtcttggctcagacgctcatgagtattgttacaatcacatttgacgtaccaggaaatgcaaaggaag

SEQ ID NO: 602192 - DNA, 92 bp, Homo sapiens
gagcacagagcctcgcctttgccgatccgccgcccgtccacacccgccgccagggacccagacatggagctgcgggaagaagcctggtctcc

SEQ ID NO: 602193 - DNA, 100 bp, Homo sapiens
tcggcagtgaagctcaagttgctactcgggacgctgcacctcccgcgccgcacggtggacgagggcagctggtggaatttttgaagaaaatggaatctcg

SEQ ID NO: 602194 - DNA, 97 bp, Homo sapiens
catctggttcagctttatctatattttttgactgctctgctcctctatgctggacatcaaatttccagctcttgtagtgagatttctgaccaaacgg

SEQ ID NO: 602195 - DNA, 51 bp, Homo sapiens
agaggagtgggacaactcctaaagtgctcatcttcaaactctatcagcggg

SEQ ID NO: 602196 - DNA, 82 bp, Homo sapiens
acgatcgcccgtcggggacctggagccccggacagagaggggtttggaaatcccttgtctccaggttgctgggattgacttc

SEQ ID NO: 602197 - DNA, 123 bp, Homo sapiens
gaagtcacccggaattgggaagtgctcagaagcttacaaagctgcctcgaggagaactatgccatttttgggtcaggactggagatctcctggatggagttggattaagacagaagatggctg

SEQ ID NO: 602198 - DNA, 75 bp, Homo sapiens
agcgcagcgacggggcgctgcctggcccaggcgcacacggaagtggagaaaatgcagaagtctccatggacgttt

SEQ ID NO: 602199 - DNA, 100 bp, Homo sapiens
gaataattttgatgacatcaagcacacgactcttggtgagcgaggagctctccgagaagcaatgaggcgcattgaacagtcctgggcactacatgtaaat

SEQ ID NO: 602200 - DNA, 98 bp, Homo sapiens
gatcttgggccacaatgagccgaggagctgaggtagctacagcaagctgggtagcaggcagatccaaaggatatcatgaagtttccagggcctttgga

SEQ ID NO: 602201 - DNA, 100 bp, Homo sapiens
ttcacgaaggagacataattctcaagatttccacagagattacaaatgggccactcataagcctcttgcctaaacccccaaagcatgacgctcctctcac

SEQ ID NO: 602202 - DNA, 74 bp, Homo sapiens
catacaccggctgttcgaggccttgactgtaggagcacgtgaattgcctctgcttacgttcaggccctgtccta

SEQ ID NO: 602203 - DNA, 82 bp, Homo sapiens
tagaagactcagaaaaagaatatgttcttgatcccaaaccgccgccgttgactttgggaatcactagatttgatctacttgg

SEQ ID NO: 602204 - DNA, 75 bp, Homo sapiens
aatgaatattattgcagatgctacaattgatttgctgtttaccaaaaataggtatgacatgatgggaagaaatca

SEQ ID NO: 602205 - DNA, 98 bp, Homo sapiens
catttgggtacaaagtgagaatttacagagatcatcctcttcagaaacaatgctgctgcagcttcagcaatggtgtcttcatccgccccgtcggtgta

SEQ ID NO: 602206 - DNA, 83 bp, Homo sapiens
aaggtcttcagcggggcgctccaggaggcactcacaggtacgaggctaccccacgttattgcttttccgaggagggaagaaag

SEQ ID NO: 602207 - DNA, 75 bp, Homo sapiens
ggagagaggatcggggacccgctgatcttccagctcccctcacccaacgtcgttactatactggcaattgctgga

SEQ ID NO: 602208 - DNA, 75 bp, Homo sapiens
ggcaaatagtacttcaagagcacagtcttatgtaaggtaagaaagcaaacttaggtaaaaatgcaagcatgaaca

SEQ ID NO: 602209 - DNA, 98 bp, Homo sapiens
aaggacatcgagacggcctgcaagctgctcaacatcaccgcaggtctggagggtgagcgacctgcgagactcacaagaggggaagctgacagagatac

SEQ ID NO: 602210 - DNA, 82 bp, Homo sapiens
ctctctgctgcggcgcggggaccgctgtgctctcgatgtctttggtggacttgggaaagaggttgctagaagcagcaagaaa

SEQ ID NO: 602211 - DNA, 100 bp, Homo sapiens
cgccgtgctggatgccgtgatctccagcgccggcctcctcagtgcgaagaagctgcagccgcacctggccaaggacaatgccatccccatcaaatcctgg

SEQ ID NO: 602212 - DNA, 74 bp, Homo sapiens
cgggagctggctgaagatggctactctggagttgagattcagtacctctcgccagactctcacctggatcccag

SEQ ID NO: 602213 - DNA, 83 bp, Homo sapiens
ccctctgcgctcctgcatctgcctccccatcggcgtcttcgacatcttcggaacattgctgcccggaacattgttaatagaaa

SEQ ID NO: 602214 - DNA, 83 bp, Homo sapiens
cctcgcttgcagttcagcgaccacggctaccggctctctgaccagttccacgacatcctcattcgaaagtttgacaggcaggg

SEQ ID NO: 602215 - DNA, 100 bp, Homo sapiens
cccaagatgaagatgctgttagcctttgcagtctcgacataagtgacttccaatagtagtcagacattatcatcctgtcatactatggagccatgtacat

SEQ ID NO: 602216 - DNA, 100 bp, Homo sapiens
gaactgaataagagcatcaaccctgatgaagctgttgcttatggtgcaggtctcgatctagaagacggtcacgaagtaggagtcgcaggagcagccgcag

SEQ ID NO: 602217 - DNA, 100 bp, Homo sapiens
gaaaaagtgcctgaagtgacacaacacatgttttcttctggtatctggctaaaacccaacatgagtgaagtttcctgcaagaaacgggacgactatttgg

SEQ ID NO: 602218 - DNA, 82 bp, Homo sapiens
cgctcggaagggtctttgttccctgcagccctcccacgaactgccattggatgtccagaatcccctgtagttgataatgttg

SEQ ID NO: 602219 - DNA, 83 bp, Homo sapiens
gaagatcagtggatgggggtcaccgtccagagccaaggtccagggggcaaggtcgtggccataggaaaaggatacagagtaga

SEQ ID NO: 602220 - DNA, 82 bp, Homo sapiens
cagattcgcagtggtcgcttcttctccttgaaggtgcttcctggaggggcctgccccactgttcctgtgctgagttccagga

SEQ ID NO: 602221 - DNA, 101 bp, Homo sapiens
ggagagagcgagctgagtggttgtgtggtcgcgtctcggaaaccggtagcgcttgcagcatgaacatggtccaagacaattcctgggaaagttcagttctt

SEQ ID NO: 602222 - DNA, 101 bp, Homo sapiens
ggacaaagccgctccacctcccatgtcggcacagattgactggggcgactttggggtagaggcagtgtctgaggggactgactctggcatctctgccgagg

SEQ ID NO: 602223 - DNA, 75 bp, Homo sapiens
gcctgcgcagctccggccgcctggctccccatactagtcgccgaactgataaatttcaaacggaagagagtggca

SEQ ID NO: 602224 - DNA, 75 bp, Homo sapiens
gcttggtaatactggtgatagctgtggtcctgggtaccatgggtgctgaagaaaaaatcctaacagaattccgtg

SEQ ID NO: 602225 - DNA, 82 bp, Homo sapiens
cacaagtcaggtccggcacatgtttccgcggagcggacccagcaatgacgatcatagcaatggatcatttaacttgaaagct

SEQ ID NO: 602226 - DNA, 87 bp, Homo sapiens
tccaacactacttagctttccaaggaatactgtatgtctgagtatttgagaatgagtggcatctattggggtctgacagtaatggat

SEQ ID NO: 602227 - DNA, 100 bp, Homo sapiens
cagttgcacatttcctgcaaggactccaaagtggtgagacttaattcagtgcacaaatgagatgaatgtgaacatcccacagttggcagacagtttattt

SEQ ID NO: 602228 - DNA, 75 bp, Homo sapiens
caccaaagtgggaaacattgaaatcaaggtacaggtgaacaaaggcagagtaaactgtcaccccagatgcaggta

SEQ ID NO: 602229 - DNA, 119 bp, Homo sapiens
gcaaaggcaaaggcggctcgggagattcagccgtgaagcaagtgcagatagatggccttctgccaaatggtgtcacttaccacactggaacatatcaagaccggttaacaaagctacag

SEQ ID NO: 602230 - DNA, 74 bp, Homo sapiens
tggtgcagccaccctcgctccctctgctcttcctcccttcgctcgcaccatgagtaagcaggaaattcacagga

SEQ ID NO: 602231 - DNA, 100 bp, Homo sapiens
tgcttggcaaaatcgagcgggccattgctttagccagggccctctgaaggatgcacccaacctcatctgcaccccccatgctgcatggtacagcgagcag

SEQ ID NO: 602232 - DNA, 126 bp, Homo sapiens
cggccggggcagcgctcctggcgctgctggctgcgctctgcccggcgagtcgggctctggaggaaaagaaaggcagtcatggatcaggtaatgcagtttgttgagccaagtcggcagtttgtaaag

SEQ ID NO: 602233 - DNA, 74 bp, Homo sapiens
ctatttgcacaccatccaggagtcagtttattactggaaagctgtattcatcaccaaagaaaaaacttacacca

SEQ ID NO: 602234 - DNA, 100 bp, Homo sapiens
attcacatatgttctggatgtactggaattaaaaggatttaagagatcatggtgtgcatgttctagggtcaatgcatcacgtcaagaagccaaattgaca

SEQ ID NO: 602235 - DNA, 95 bp, Homo sapiens
caggtggactgaaggccgctatgatcgaattggtggaaaggttgaagttcaagagctcagaccctaaatctccacaaaccggaggactaccccca

SEQ ID NO: 602236 - DNA, 83 bp, Homo sapiens
acctcactggcatccatgcagtggaggaagtcagcctggaggagttctgcgtccaggtgatcccccaaacagcatgtgctcag

SEQ ID NO: 602237 - DNA, 90 bp, Homo sapiens
ttgaggacaagaccatcgagctcatgatgagttttgatcatcctgagaaaaatgggccttggcctgcagacccaataaaccttccctccc

SEQ ID NO: 602238 - DNA, 73 bp, Homo sapiens
cctcttcttagttgatgatttagttgattctctgaaggaagagctaaagatggctgaatttctagatgaccag

SEQ ID NO: 602239 - DNA, 75 bp, Homo sapiens
agccgctgcccaccctccccgaggacgagggggggccctcagcctcttggccttgaacgggctgttcatcttgat

SEQ ID NO: 602240 - DNA, 75 bp, Homo sapiens
tgagccagggcctctcaatgctgtgtttaatgcgctgaaggttcccgtgccagaggataaatatactgcccaggt

SEQ ID NO: 602241 - DNA, 96 bp, Homo sapiens
ccggctcagtcccgacgtggaactcagcagcggaggctggacgcttgcatggcgcttgagctcattggaggtgaagtgctccctgtgtgttgtggg

SEQ ID NO: 602242 - DNA, 71 bp, Homo sapiens
cgcggtcgacgcgggcctgagctccctccagatgaagttggagcccttgtttttgacattggatcctatac

SEQ ID NO: 602243 - DNA, 74 bp, Homo sapiens
aagccagcccagcatccgggcccagaatgctgcctttttatatggtcttggtttggtctacttccattataatg

SEQ ID NO: 602244 - DNA, 82 bp, Homo sapiens
gaccttcctgcccttcacgctccaggagctaggcgaacctcttcccggccgctctggtgcacttgggagccgaggagccggc

SEQ ID NO: 602245 - DNA, 75 bp, Homo sapiens
aaggacccatgggttcaggaattgatgagctgtcttgatctcaaagacaaagatcattccactcagcctgggacg

SEQ ID NO: 602246 - DNA, 82 bp, Homo sapiens
ctgacatggaggatgatttcatgtgcgatgatgaggaggactacgacctggttttgattcccaccatggccatcacccagtt

SEQ ID NO: 602247 - DNA, 100 bp, Homo sapiens
ctggcagatccagtcttgctcagctctcacaggagagggcgttcagggatagctgggagtatggccaccctgctccacgatgcggtaatgaatccagcag

SEQ ID NO: 602248 - DNA, 100 bp, Homo sapiens
aaggcaccaagacgcaggggggatatccacagttcgatcaaggtgggccaagagaagggaaactgctctttccagaaaaacccaactccctgcatcatcc

SEQ ID NO: 602249 - DNA, 83 bp, Homo sapiens
cccaaattaaaggatggatattacatgagaccttgtgtattaagcaaagcagagagcagaggttcttcagtccacgcaacggt

SEQ ID NO: 602250 - DNA, 83 bp, Homo sapiens
aatgactgcaagcacctattatggtagacagattggaagtcgtcaacaagcgttttgttcgagtgacctttacaccaggaaaa

SEQ ID NO: 602251 - DNA, 82 bp, Homo sapiens
caggacaccatccgttcaattggtacaaagctggctttccttaaagtttcccatgtctcaatggactcctgaatataacgag

SEQ ID NO: 602252 - DNA, 100 bp, Homo sapiens
gtaaaacaaggtgcagagaatatgatacagatgtattcaaatggatcttcaaaggttcgatctggggctaatgttctaatttgtggtccaaatggctgcg

SEQ ID NO: 602253 - DNA, 75 bp, Homo sapiens
attactatcagtgatatacttaggtgtccaaggcagctgcagatttgatggcctactgtgaagcacatgccaagg

SEQ ID NO: 602254 - DNA, 75 bp, Homo sapiens
aggatgtgttcgaggtggagaagatcctggacatgaagaccgagggggcaaacctgcccttgctgcagcgggagc

SEQ ID NO: 602255 - DNA, 89 bp, Homo sapiens
gcgacggcccagtgcagggcatcatcaatttcgagcagaaggtggtgaaggcatttgtgatcctggcctcgcagttcctatcccatgac

SEQ ID NO: 602256 - DNA, 97 bp, Homo sapiens
agagatccgatagctatgttctgctggagcattctgtgaagaaggcagtacattttgggttaccggtgcccctgggcgctgggattgctctagcctg

SEQ ID NO: 602257 - DNA, 88 bp, Homo sapiens
gcgtctggtggcggcggcgtgatgttctcggcaggagcggagagtttgctccaccaggccagatgattcattccggactcgtaatgcc

SEQ ID NO: 602258 - DNA, 100 bp, Homo sapiens
gcggcacggcatggagaagatctggaggcccaaccgaggtctcaccaacggctttgggggtgcgaggagcgagcaggagccgggcggcggcctggggagg

SEQ ID NO: 602259 - DNA, 80 bp, Homo sapiens
cgacctgctaacagaactggaccttttcggaactgtggctgcaccatctgtcttcatcttcccgccatctgatgagcagt

SEQ ID NO: 602260 - DNA, 50 bp, Homo sapiens
catcctgctctttgtatatgaacagaaggacttcattcacctctcagcca

SEQ ID NO: 602261 - DNA, 100 bp, Homo sapiens
ggcgacaagggtgttcccgaactagagtggaaatacatgctacaggatttaactatcagaatgaagatgaaaaagtcaccttgtctttccctagtactct

SEQ ID NO: 602262 - DNA, 98 bp, Homo sapiens
tcccggggcgccataaacgcccccaatttcccagctgctaaaggaagaggaagttagaacctggcccattagatgaaacccagatcgctactatatta

SEQ ID NO: 602263 - DNA, 100 bp, Homo sapiens
gtactgggagatccatagggaggacggcggaacatctggaggctgggaaatggtttttcccactcggctttcacgtttgggattgagagccacatcagcc

SEQ ID NO: 602264 - DNA, 51 bp, Homo sapiens
accagttgggcaaaatctttgagccgtcagtgcccagataccagagtccgg

SEQ ID NO: 602265 - DNA, 75 bp, Homo sapiens
cagaacagaattcacgtgtgggagcaaacggctcaccaggtggtgggggattttggcactcaaaaagaagctgct

SEQ ID NO: 602266 - DNA, 100 bp, Homo sapiens
ggaagttctgcggcgacgcagtcccgggggtggacccgaactccccggtgctcttggaggacccagtcctttgtgccttggcaaaaaagcacaagcgaac

SEQ ID NO: 602267 - DNA, 51 bp, Homo sapiens
attttttgggggtggatttccttcagggaagaaggagaaagggccaacccc

SEQ ID NO: 602268 - DNA, 50 bp, Homo sapiens
cttcctcccttcgctcgcaccatggctgaccccgcactacatctacccac

SEQ ID NO: 602269 - DNA, 96 bp, Homo sapiens
ttagaactgcagaggttcctctacagcaaggacagtcattttgtttactcattcagccctgttgcaggtcccaataaactcttcataaggttgaca

SEQ ID NO: 602270 - DNA, 50 bp, Homo sapiens
ccaccccagccctgggatcctctccacccacattggcctagacccagtct

SEQ ID NO: 602271 - DNA, 90 bp, Homo sapiens
aaattacagagaacctaagtctgtttgcaaagcacctgaactgctcgatgcattctatttctcatcatttggctcataactggaggaagg

SEQ ID NO: 602272 - DNA, 100 bp, Homo sapiens
ccacctcggtcgcgatgggggcgcaggaccggccgcagtgccacttcgacatcgagatcaaccgggagccgggtatgagcacattcttttagaacctgac

SEQ ID NO: 602273 - DNA, 73 bp, Homo sapiens
gctggaagaagtctcaaaaagctcccgactagagtctcactgtgttgcccaggctgaagcagcctcaaactcc

SEQ ID NO: 602274 - DNA, 100 bp, Homo sapiens
tgaggagttgctggccaaaggggcctgtgtacttgctgtagatgaaaatggatcaaaatacttgctggatggtggactcagagaccaataaaaataaact

SEQ ID NO: 602275 - DNA, 98 bp, Homo sapiens
ttgaaacaaaagggtatttcttttctctcttcagcccccaacccagtggagggtcctggcggcagagaccacgtcccagcaggagcggctgcaggcca

SEQ ID NO: 602276 - DNA, 100 bp, Homo sapiens
gaggggaagatggacgagaatgaatgggggtaccacggagagggcaataagagcctggtggtggcccacgcgcagtcaggatggctaaaggtgaccccaa

SEQ ID NO: 602277 - DNA, 134 bp, Homo sapiens
tgtacctggtccactgaaaaattcttcagattggaaaataccacaggatggagactacgagtttttcctggtccagaactttacacagaaaaggtgctcaaaggatatttgtttaatgaatgtggtatgctgac

SEQ ID NO: 602278 - DNA, 98 bp, Homo sapiens
ttatttcagcgtgtaggaataatacctccaaaaggctgtttgttatatggaccaccaggaataagacgagttggaagaagacctgatcaacaacttca

SEQ ID NO: 602279 - DNA, 89 bp, Homo sapiens
gggctgcggcgtgtgcgcgcccgccagctgctccggagatacgggcgtgatggtgggcatgggtcagaaggattcctatgtgggcgacg

SEQ ID NO: 602280 - DNA, 51 bp, Homo sapiens
agaagccctcagcttcggagcaagaatggctttgactacttactaacatac

SEQ ID NO: 602281 - DNA, 101 bp, Homo sapiens
tgcggttcagccctttgatgaccgcagcaggaattcctcctgatcagcagagactgatctttgctggcaagcagctggaagatggacgtactttgtctgac

SEQ ID NO: 602282 - DNA, 83 bp, Homo sapiens
ctccttgccaggccttcaaccactatctcagtgcaatgggttataactcgaaacgaactcatgctggaagaaactagaaacac

SEQ ID NO: 602283 - DNA, 99 bp, Homo sapiens
agcggtttgggaccttgaacaaggcaaatatggttttgacagccgctcaggaagcaatcttgcatgcgtctggaaatggcacaaccaaggactactgca

SEQ ID NO: 602284 - DNA, 50 bp, Homo sapiens
aatctacacagtacagacagtacagaacaattttggaaatggaaggcagg

SEQ ID NO: 602285 - DNA, 76 bp, Homo sapiens
gctatatccgcagactccgggctatccgggagctcaataggtgcagaggacgtggtgatggcgttttccaggtcgg

SEQ ID NO: 602286 - DNA, 74 bp, Homo sapiens
gcgagttctcggaaggctacgatcctacagtggagaatagaatcagagatcattgatttcttcctgggggcctc

SEQ ID NO: 602287 - DNA, 83 bp, Homo sapiens
cgggaggagaaggaaggcatggaaagttccagccggttcgagagctagatgtggaaatggaggcccagaaagatgaaatcatc

SEQ ID NO: 602288 - DNA, 101 bp, Homo sapiens
cgaggaggcggatcccccggcgtcagatgccatggacaatattaccaggcagaaccaattctacgatacccaagtcatcaaacaagaaaacgagtcaggct

SEQ ID NO: 602289 - DNA, 74 bp, Homo sapiens
cccgacgccgccgcccccgccgggtgcctaagcaggcccggcgcggccccagagacaagaggagcagcagcggc

SEQ ID NO: 602290 - DNA, 75 bp, Homo sapiens
ccaagaaggacgcactgactcgcctcaagcacctgcgcatcgtcatcggttgcagtgtaggattttggaagtcct

SEQ ID NO: 602291 - DNA, 98 bp, Homo sapiens
actccaaggacaactgcaagggggaagtagagagataacaaaagctgctcagagtctcaatgaacttgaaagctaccctggttgaccatgggatccgg

SEQ ID NO: 602292 - DNA, 85 bp, Homo sapiens
tggagctgggtcagtccgccgctcaccccgcggccgcaccttcccgccttctcagggctgaaatctctttaatgatggagggaag

SEQ ID NO: 602293 - DNA, 50 bp, Homo sapiens
gctgaagcgactgagtccgcgatggagcaaaccagtccagctacgggggc

SEQ ID NO: 602294 - DNA, 90 bp, Homo sapiens
agaagcgccaagctaaatttataatgaacaggtggttttggaatgtatgcttaaaaaagacctcatttataataaggtcactccaacatt

SEQ ID NO: 602295 - DNA, 90 bp, Homo sapiens
agaagctggagaatgacaagagcttccgcggtgtcattctgacctcgaacttggaccacgggaaggcctggggcatcctgaccttcaaag

SEQ ID NO: 602296 - DNA, 83 bp, Homo sapiens
gctgcgccgcaacgccgagcgcaccgacatctgcctgctcaaagcagcctcccgcgacgatgcccctcaacgttagcttcacc

SEQ ID NO: 602297 - DNA, 98 bp, Homo sapiens
cacaatttatatggccaacttgactggtcgaattgacaaatcttaccctacagtatgtggccacacaggaccagtgctggacatagactggtgcccac

SEQ ID NO: 602298 - DNA, 87 bp, Homo sapiens
agaagacaatgagaagtaatctagagtgatcagggccaaagcggtcagtgagaaggaagtggactctggaaacgacatttatggcaa

SEQ ID NO: 602299 - DNA, 100 bp, Homo sapiens
aatgagggagctggaacggaagtggatcgatttgcttagtggtataatacctgaactctgtcagaaatatccagatttaaatttcataattggaggagag

SEQ ID NO: 602300 - DNA, 82 bp, Homo sapiens
gtactttaccaacgagctgaagcagagagaactcgatgccaccgcaacggtattggcgaaccggcaggatgaaagtgagcag

SEQ ID NO: 602301 - DNA, 74 bp, Homo sapiens
tctacaatttcttcgagacactcatataaagttcttgcaagtgttggtggcctctacacttctgttgtggttaa

SEQ ID NO: 602302 - DNA, 73 bp, Homo sapiens
tgctgtccctggagcagcatcgaggcccgggaggctgcgggcctctcgggtgcttcttgtcggcttgaaagga

SEQ ID NO: 602303 - DNA, 83 bp, Homo sapiens
ctgtgtcaaacatccatatcataagtggaattttggagatattcaaaggaatttggataaagagagggcagtgctactacaac

SEQ ID NO: 602304 - DNA, 90 bp, Homo sapiens
accgttcacagagctagccggacgtcctccgactcaaggaagaggatcacctagcccgggtagaagaggcaatcacccgtatgcttgtgt

SEQ ID NO: 602305 - DNA, 101 bp, Homo sapiens
tatgaaccaaagatggaatgacttaaaagcaaaatctgctagcatcaggtgtaaattttgataccaccattgccgccttcccctcaaaaaaggtgagaact

SEQ ID NO: 602306 - DNA, 90 bp, Homo sapiens
actccagaagtgctttgaagtgggaatgtccaaagaatggtgctgtgattacaccaaccatggaccatcccatgtcaatgcagccagcca

SEQ ID NO: 602307 - DNA, 82 bp, Homo sapiens
cagccttggaaagtcaggaccgcgacggcagcagagcagaggaagagatcacgaaggaggaaatcgacatcctcagcgatgc

SEQ ID NO: 602308 - DNA, 74 bp, Homo sapiens
tcagtgagatggcttctaacaaggctatgcattcctgctgtttcaagatgaaagctctgtgcaggctctcattg

SEQ ID NO: 602309 - DNA, 80 bp, Homo sapiens
taggtgtggcctacaacgcccgcattggagaatgcgatgctggtggcagagaaggcagctttgcaggggcagctgcagca

SEQ ID NO: 602310 - DNA, 96 bp, Homo sapiens
atcgtggtggtcggatttcaccacaagaagggctgccagccatatgtgtcattggctcagcagatggcaccacctagcccaagcaacagtacacct

SEQ ID NO: 602311 - DNA, 73 bp, Homo sapiens
ggaagcggaggaggcccctgcagaaacatttaattggttggggtcagataagaagaggagtgacaatcaagcc

SEQ ID NO: 602312 - DNA, 74 bp, Homo sapiens
agaccaataaaaataaactgcttgaacatcctttgactggttagccagcagagcatcctggccagaacaagcca

SEQ ID NO: 602313 - DNA, 83 bp, Homo sapiens
gcccggccgacccgcggcccggaagttctccagcagctgattgtaatgaatttgcccaatgttttgatgattggcagagaccc

SEQ ID NO: 602314 - DNA, 101 bp, Homo sapiens
aagataaagtgattttttgcctttgttgattaactggacaaattcaggaggagatgaccgccgggttctgctatggcacatggaacaagccatccactcca

SEQ ID NO: 602315 - DNA, 82 bp, Homo sapiens
ccctgaatgtgtttgtcagtgataactatcagttccaccattctatttccaacatctggaccacattggaagaagactggac

SEQ ID NO: 602316 - DNA, 100 bp, Homo sapiens
gagctggctgaagatggctactctggagttgaggtctgccatcatggatgttctcgcagaagcaaatggcacctttgccttaaaccttttgaaaacgctg

SEQ ID NO: 602317 - DNA, 90 bp, Homo sapiens
aggccatggaggacgaggagagacagaagaagctggaggccggcaaagccaaggacttttcttggtagagatggaaatccaaataaacgg

SEQ ID NO: 602318 - DNA, 87 bp, Homo sapiens
cagggtttggtgacaatagaaagaaccagcttaaagatatggctattgctactggtggtgcaggtgctgccccacgtcccccaccaa

SEQ ID NO: 602319 - DNA, 80 bp, Homo sapiens
ctatattttttcttccagaatctcagcagctgggagaagcggagggtgctgctcaaccaaacaactcattaatgctgcaa

SEQ ID NO: 602320 - DNA, 100 bp, Homo sapiens
cggaaatgtccggcaagatcgagaaagcaggtgctggagaatctggtaaaagcaccattgtgaagcagatgaggatcctgcatgttaatgggtttaatgg

SEQ ID NO: 602321 - DNA, 98 bp, Homo sapiens
gacaggcagagtgctgatgtgaaaaataccacgacaaaaccaccctatctattgcgtctgcagacatggatttcaaccagctggaggcattcttgact

SEQ ID NO: 602322 - DNA, 97 bp, Homo sapiens
actgtacaaactacacagctcatgtgaagaaaaaatgactgctgcccgcattagaaaatgccacaagtgtgggactggcctcatcaaatctgaaggc

SEQ ID NO: 602323 - DNA, 116 bp, Homo sapiens
cttggaagcaccatgtccggatgagatcgcacttcctgcagtgggcattagccacgtccaggaattacatgaatgacagtcttcgaaccaatgtgtttgttcgatttcaaccagag

SEQ ID NO: 602324 - DNA, 99 bp, Homo sapiens
aaacgggcggtcgagcagaacgtgtagccgcgtcccctccagtccgctccgggcaggtcactgcagccagaggggtccagaagagagaggaggcactgc

SEQ ID NO: 602325 - DNA, 75 bp, Homo sapiens
ctgctgtatgaaatgttggctgggcagctggtcagtgagaaggtcggaggggccgaggggaccaagctggatgat

SEQ ID NO: 602326 - DNA, 100 bp, Homo sapiens
actgatctggagaaggacattatttcggacacatctggtgacttccgcaagctgatggttgccctggcaaagaagacgatcaccttctccttattatagt

SEQ ID NO: 602327 - DNA, 101 bp, Homo sapiens
aatattagtggaagtgtcaccctaaaaatcttaccaagttatagagataccattactcctcaacagtttgctggagatccttcacgaacagcttcctgaga

SEQ ID NO: 602328 - DNA, 101 bp, Homo sapiens
ctgaggcatctgagtcaacaacggatgaaaatgaagacgacattcagtttgtcagtgccccttcacagatgtagtcactacaaatcttaaattgcgaaatc

SEQ ID NO: 602329 - DNA, 74 bp, Homo sapiens
cttcagtctgtcacaaagcctattctgaaatgggtttgaaattcctgatatagatgctgaaaagttaatgtgtc

SEQ ID NO: 602330 - DNA, 75 bp, Homo sapiens
agtgccttcggccagagcggcaagttcaagatccacatcccaggtgccagaaccctgtggagcatcatgaactgg

SEQ ID NO: 602331 - DNA, 50 bp, Homo sapiens
ttaatccagaagatagtactttccctgcttgcacctacaaaaaccaggag

SEQ ID NO: 602332 - DNA, 74 bp, Homo sapiens
ttcgatggacatggacatgagccccctgaggccccagaactatcttttcgggaccttgctgcaagaaactgcct

SEQ ID NO: 602333 - DNA, 76 bp, Homo sapiens
tttaccaaattaggcctggacgaatacttggacaaaagaggggatctgatgataaaaaaagtagtgtgaagtccgg

SEQ ID NO: 602334 - DNA, 101 bp, Homo sapiens
atttgatctaaacacaagctattacatatttctagcagatggtgcagctaatgatggttacaatggccaacattggaataaatggaaatcattctctggaa

SEQ ID NO: 602335 - DNA, 83 bp, Homo sapiens
gagttcctgggcaacagcaagaagcagttcaaccgcgacgtgctggatcaccttcaggccattcagaggaggaaagagagggg

SEQ ID NO: 602336 - DNA, 100 bp, Homo sapiens
gcgctctggggctcgccttgtatctcaacaccctgagtgcggatttctgctatgatgacaggtaaaaatgtctccatcgtatcatcagtccaaaggggat

SEQ ID NO: 602337 - DNA, 75 bp, Homo sapiens
ggaaaccggtagcgcttgcagcatggttcagcagctggacatggagaaccaacgctcatcacctctgtcgttccc

SEQ ID NO: 602338 - DNA, 80 bp, Homo sapiens
ctttgatatgattgaagaagcatacatgacaaaatgtggccacagcttttgttatcagggaataccaagagcagagagag

SEQ ID NO: 602339 - DNA, 101 bp, Homo sapiens
cacagtgtggctgtttgtctccttgcccgccaaagttctgcccagtccaacgactccacgcagctcgcccttgaccttcacggcatggtgcaactcccacc

SEQ ID NO: 602340 - DNA, 100 bp, Homo sapiens
ctgccgcaggcacgaagaagcataatcactctcatatctggtgtcaggcccttgaaaggaaaaattctgcaattccatcagagttgaatgaaaagcaaga

SEQ ID NO: 602341 - DNA, 82 bp, Homo sapiens
cagaagtttctctttcgctcttcgcgctacacacccagattggcttccagcgcgcaggattttttatcaagcagaaatgcat

SEQ ID NO: 602342 - DNA, 83 bp, Homo sapiens
aagccccacgctggccggacagggccgcctgtcgccgggtcaaaatgcagatcttcgtgaaaacccttaccggcaagaccatc

SEQ ID NO: 602343 - DNA, 100 bp, Homo sapiens
gcctctcgcttgcttccctcggccgggccgtcctcggcggcagtgtcaggaggcggggtttcaccatgttgcccagactggtcttgaactcctgagctta

SEQ ID NO: 602344 - DNA, 75 bp, Homo sapiens
cagaagaaattagaagctgcagaagaaagacgcaaggtttatgaaggcgagcgtgccatgacaaaggataacaac

SEQ ID NO: 602345 - DNA, 74 bp, Homo sapiens
ggagctggcaagatttgggccgtggagcaaaccctcctggggcttgcccatagatgctgttcagtgggatatct

SEQ ID NO: 602346 - DNA, 100 bp, Homo sapiens
agggtctgaagttcacgactactagaaggggaggggagtggaaaggctctcagtgaaaaagaccaagatcactccatggatgaaatgacagctgtggtga

SEQ ID NO: 602347 - DNA, 97 bp, Homo sapiens
gcaatttgaagatacatgagacagcagccaaacccccagggcccgatgatgcacaacaaaaaatagaacctcatcacacagcagtgcttggagaagg

SEQ ID NO: 602348 - DNA, 75 bp, Homo sapiens
cgtgaagttacttccaccggactttgaaaaggaagggaatgaaattcgaaatgagtcccatgactatcctcatag

SEQ ID NO: 602349 - DNA, 100 bp, Homo sapiens
atcggcgctttgagaactgagcgcatgtggagttcggaggaaaagggctcaggtgatcgccatgatcaaaggcctgcaggtgctgatgggcaggatggag

SEQ ID NO: 602350 - DNA, 75 bp, Homo sapiens
ttcgccagcccgtgccgcgagcgcggcctgcaggagaaagaagatgctgatatgctacaacacggatgaacctgg

SEQ ID NO: 602351 - DNA, 100 bp, Homo sapiens
cctccggagtagctgggactgcagccttgttagatgacttggataaagaactaaacaactacattatgcgatgtagagaatggtatggctggcatttccc

SEQ ID NO: 602352 - DNA, 102 bp, Homo sapiens
ttttcctctgattgaagccaagaaaaaggatcaagtgactgctcaggaaattttccaagacaagatggagagcaatacatcatcatctttggagaatttagc

SEQ ID NO: 602353 - DNA, 100 bp, Homo sapiens
gatagtatcttggccagggaactcaaacagcagatgcaggacatgtctcaggaaggctatggaactagatctcaacctcctctggcccccggaaaaccta

SEQ ID NO: 602354 - DNA, 100 bp, Homo sapiens
gtggataacgggaggtgaatttccatgtcaacatagtcctggcttgaacatgacaagcagatttgggagtccaaggcccagacagaggtccagcttcagc

SEQ ID NO: 602355 - DNA, 82 bp, Homo sapiens
agaaatttggagtgtgcgtgcgcgccgagcgaattcagaaggagctggcggacatcactttagaccctccacctaattgcag

SEQ ID NO: 602356 - DNA, 101 bp, Homo sapiens
tgcaatgtggaaagtgtgatcgctgggtccattccaaatgtgagaatctttcaggtacagaaggagacggtggctcagggagtaaaggaaggccagttgag

SEQ ID NO: 602357 - DNA, 75 bp, Homo sapiens
tcgcagtggtcgcttcttctccttgagggagagacaagctcaacgagaagatgccctcgagctcacggagaagct

SEQ ID NO: 602358 - DNA, 75 bp, Homo sapiens
cagagacacacggtcactgcagctgaagccgctgcccctgctacaggacccctaccatggaggagaccatcaaag

SEQ ID NO: 602359 - DNA, 74 bp, Homo sapiens
tgcagtggaggccatcaggggccttgataacacagagtttcaagtgcacactggtttttggctgttgtttgttt

SEQ ID NO: 602360 - DNA, 100 bp, Homo sapiens
atatgcctgctaacatggataagcatgccctgaaaaagtatcgtcgagaagcctatcatcggcatagaatgtcaagctaaccaggcgtccgctacttcag

SEQ ID NO: 602361 - DNA, 75 bp, Homo sapiens
tcaggtgaaaggagcagtagatgatgatgtagcagaagattctctttgtggccagatgggtttgtatggacaggc

SEQ ID NO: 602362 - DNA, 82 bp, Homo sapiens
tcctgctgggcttcgtccagatcgggaaggggagtgcatccgccccaacccttttccccctcgtctcctgtgagaattcccc

SEQ ID NO: 602363 - DNA, 100 bp, Homo sapiens
ctcagacctgccaatttaccagagataattgataacaccctgtaacagctgactaactgccttctatgaaagcagtcattattcaaggtgatcgtattct

SEQ ID NO: 602364 - DNA, 90 bp, Homo sapiens
gccctccagtcagtactgattgaattactcaaggctgcctctctgcaaagttgaggcatgaaaacagccctggaagtctgccctggcgcc

SEQ ID NO: 602365 - DNA, 100 bp, Homo sapiens
tgaggaccgtgttcaagaggaagcccgctgccttgtggaggagttgagaaaaaccaaggtataaccccgttttcacacgaatggccccttcacatatttg

SEQ ID NO: 602366 - DNA, 75 bp, Homo sapiens
tatactggaatcgtccagggattaaagggggatcaggagaacgtacaccccaacaggaaggccgggtgtgcagtc

SEQ ID NO: 602367 - DNA, 96 bp, Homo sapiens
cccgaaattcgccccgattaaagactgtgttgcattatcaggaggcaaaaccttcaactgaggacttgggggataagaaggaaggtgaatatatta

SEQ ID NO: 602368 - DNA, 100 bp, Homo sapiens
ctcccgagtagctggggttacaggggtgggaaccgccaaacctctcccttctttttgacttcacccttggataccatcaaggccagaggatggaaccaag

SEQ ID NO: 602369 - DNA, 82 bp, Homo sapiens
ttgtgtccagagccggactgattctctcaatttgcgacttctgcacggacctggccgtctccagtgccaacttcattcccac

SEQ ID NO: 602370 - DNA, 96 bp, Homo sapiens
cgacggcttcgccatcgccagcttcagcaccctggaggccctggagtgtaggaagaatgatgatggagacacagttgttgtggttgagaaagatca

SEQ ID NO: 602371 - DNA, 100 bp, Homo sapiens
cgggcccagcgagcggacgccgggcgcggcggcgcgcggagaagtgcggcggagcggcgcctgcattagcagggatatagctagtgcaataaaagaactt

SEQ ID NO: 602372 - DNA, 102 bp, Homo sapiens
tgaaaatgcccgtctcttcatatttgagactttctgtcgcatccaccagtgtatcagcattaagtatcatgatattagctggtttgacatcaagtcatttgt

SEQ ID NO: 602373 - DNA, 75 bp, Homo sapiens
gctacacaaagagggtcatctcttctattgtacctgcagaatcgagagctccagatcatgagaaagctagatcac

SEQ ID NO: 602374 - DNA, 85 bp, Homo sapiens
ccggctatggccgtgccctggggctgagccctcagatttggtcgtattgggcgcctggtcaccagggctgcttttaactctggta

SEQ ID NO: 602375 - DNA, 71 bp, Homo sapiens
gaggtctcctcagccatgctgaactcaaaagtactttgactcaggagactacaacatggccaaagccaaga

SEQ ID NO: 602376 - DNA, 98 bp, Homo sapiens
gcggcgcggccatggctcacctccggggatttgccaaccagaccatcatcaaagaggggatgctgaccaaacagaacaattcattccagcgatcaaaa

SEQ ID NO: 602377 - DNA, 100 bp, Homo sapiens
agggatttcctgggacatctggctctggagagtattgggaaagggtcgttgtggtgcatagacccagagtatagacaaaatctaattcaggctttgaaaa

SEQ ID NO: 602378 - DNA, 100 bp, Homo sapiens
gctggcgcgagccccgtcctccttcgccgccgcgcacaaccgcacgtgcagcgggctgacgcacgaggcacacaggaaggaggtggagcaggtgtatctg

SEQ ID NO: 602379 - DNA, 82 bp, Homo sapiens
gcctcccgagtggctgggattacagattacctaggaacagtacgatttggggttatcacaaataaacatcttgcgaaactgg

SEQ ID NO: 602380 - DNA, 76 bp, Homo sapiens
gtggagttcacccgcgcactcgaagtgcctttgcaaagtggtgttcccactgatgaagagcaggcgactgggttgg

SEQ ID NO: 602381 - DNA, 99 bp, Homo sapiens
gccgccctgagtcactgcctgcgcagctccggccgcctggctccccatactagtcgccggatgaggatgagaacagtacggggaacaagggagagcaga

SEQ ID NO: 602382 - DNA, 100 bp, Homo sapiens
ttttccgggtggggatctctgaaattactcagcatgttggcagataaattgaacatgactccagaagaagctgaaaggtggattgtaaatttgattagaa

SEQ ID NO: 602383 - DNA, 130 bp, Homo sapiens
tgccagcaagccggagcctgccagagccaaggccaagctctccaagttcagcatccccaagcagggggaggaatacttggacctcagtcagcctctcgaaccgtattcaccttgttatcctgacccaaga

SEQ ID NO: 602384 - DNA, 98 bp, Homo sapiens
gcaagtacccgtccatcatagtcaactgcgtggaagagaagacttccttgccgtccaggaagggatttcgacaccagaccaccaagtttttgtatcgc

SEQ ID NO: 602385 - DNA, 100 bp, Homo sapiens
aactttctcttataagttaatatttttccagggatataacagtccactttggaaagaagatttctcagtgctgtgctgtggctttcattgagaagctaga

SEQ ID NO: 602386 - DNA, 75 bp, Homo sapiens
acagtggccacaccatagtctccctggatgcagcccgcagggacaaggagcagtccaaggttgtgctcttggaag

SEQ ID NO: 602387 - DNA, 82 bp, Homo sapiens
ccctgcgccccggagcaggccaagttcggggccaggacgtcgggaggacctggtgagaagccctaccactgcaactgggacg

SEQ ID NO: 602388 - DNA, 75 bp, Homo sapiens
tgtataatggactctcagaataaaggaaagacctcagagtgttctcaactaatagggatgccaaaggaaaaatat

SEQ ID NO: 602389 - DNA, 75 bp, Homo sapiens
gaaaaccttgaaaaaaatctccctgagtttgccgatgggcaacactccagattcagcctcagacaacctcggttt

SEQ ID NO: 602390 - DNA, 98 bp, Homo sapiens
gccacagagtcggggtcttcacggttgaaatcacaaagattagacacctttttagataggtgttcttcagcaccactgacaacacggttctgacagta

SEQ ID NO: 602391 - DNA, 100 bp, Homo sapiens
cacttcatgggataatgcaggttttaaaggctatggaatacagatagagcaggttcaaaccttgtactactcagctgatcacaagctgcttgatgggaac

SEQ ID NO: 602392 - DNA, 75 bp, Homo sapiens
ctcaagctttgatcttggctcccacaagagagttggctgtgcagatccagaagacctcttctcttctagccgctc

SEQ ID NO: 602393 - DNA, 100 bp, Homo sapiens
ggatgccctgatggcagttagcacactggtggaagtcttaaaatccttgcacgtttgatgactgccaaattcttgcatacagaaattcgagaaaaaggcg

SEQ ID NO: 602394 - DNA, 100 bp, Homo sapiens
cagccactcaggctggtcctgggggtggggctgtaggggaaagtgctaaagccgctgaggtaccacttaatgggcaagtttatgaacttttaactgtctt

SEQ ID NO: 602395 - DNA, 90 bp, Homo sapiens
tagacagtgaatgtggaaaggagattgacagtcacaattttgtaataaggtgtggtcactcacctgtctaccactcccgtgaaatggcag

SEQ ID NO: 602396 - DNA, 96 bp, Homo sapiens
ctctgcaatagatacatggagcccatcagaatggcagatggcttatgaaccacagctgccaatttgtggtgtctgaagaccaagactacacagctc

SEQ ID NO: 602397 - DNA, 82 bp, Homo sapiens
gtttggcagcttgatcattggctatgccaggtcccgcagcccccggaagccaatagactccctcagggactctcggtccctc

SEQ ID NO: 602398 - DNA, 100 bp, Homo sapiens
gtggtctggagaccatggagaccctcacggagctgggcgacgagctgaccctgggagacatcgacggtgcagaccatgaattacgtggggcagttagccg

SEQ ID NO: 602399 - DNA, 100 bp, Homo sapiens
tgtgggctggtgtgtggaactggtctggtgctccgtccgcacacctgagagctcccacgaaggcctcatcaccgatccccacagcccctctcgcttccgg

SEQ ID NO: 602400 - DNA, 78 bp, Homo sapiens
tcagcccggcgatattgtcattattgatcagttcattgacagacttcaggcccgcatagctcataggatacaagaact

SEQ ID NO: 602401 - DNA, 99 bp, Homo sapiens
ctgtgaagaaaaagaagcaccgctttgggctacccgatcacagaagaactgcagcttcctggggagcagtttcacctccacaggcatcgcttcatactc

SEQ ID NO: 602402 - DNA, 75 bp, Homo sapiens
aaggggtcccgaagccccctgcaggaactctacaacccaatccaggaattgaatgatctggcacgggaccctcca

SEQ ID NO: 602403 - DNA, 100 bp, Homo sapiens
caaggatttctctttgggaaactaaaggaagagcctaggttccaggtgccttttcagttgctgacttctcttatggacatagattcactgatgaccaaat

SEQ ID NO: 602404 - DNA, 82 bp, Homo sapiens
actccttgggggtcgagcacataacggggttcgggtgtctcgtgtgtgaacatcacagcgggtccatatggaatatttgctg

SEQ ID NO: 602405 - DNA, 49 bp, Homo sapiens
gaaactttctccctttatccacagtagagacgaggtttcaccatgttgg

SEQ ID NO: 602406 - DNA, 85 bp, Homo sapiens
ctgtcttcggtggactccttcggcagtccacccaccgccgccgcctcccaggtggcttctggcacagcagcttaattgaccggaa

SEQ ID NO: 602407 - DNA, 100 bp, Homo sapiens
agtggtcctctggtcttccctgaccccgcggccggacgacccaagcccgctgagcaggatgaggaacctgatgatttggaaacagaaattctacaagagc

SEQ ID NO: 602408 - DNA, 91 bp, Homo sapiens
agacctaaagccacagtcttcaagagcccacggacaccacctcaacggaaatggctagtgatgagctgaaagagatgcggaaaaacttgac

SEQ ID NO: 602409 - DNA, 75 bp, Homo sapiens
tttaacagactcaacacccagagatcttgattattccagaaactcttcatcttggcttatacctatactgcctga

SEQ ID NO: 602410 - DNA, 50 bp, Homo sapiens
cggatatctgcggctgatcctgccagatgcaagtgctgctggaccaggcg

SEQ ID NO: 602411 - DNA, 75 bp, Homo sapiens
gttttgatgctgtcacaggggagtttacggtatccttctgatgaagagaagaaaggcctaaactcccaggcatgg

SEQ ID NO: 602412 - DNA, 50 bp, Homo sapiens
gaccaccttcgtcaacgtgatcgcggtacaagtatgagttctgcccgttc

SEQ ID NO: 602413 - DNA, 50 bp, Homo sapiens
cagatatcttgaaaagctgccagaaagccctgggcgctgcctatggcaca

SEQ ID NO: 602414 - DNA, 82 bp, Homo sapiens
tttggtagagaagaatgaacattgtattgagaacaatatagatttgcagactgttggcaacacttacggtaatttttcgtta

SEQ ID NO: 602415 - DNA, 100 bp, Homo sapiens
cctgagactgctccagaagtggagaccagcagaactccaccagcaggggaaatgctgtctgtagctgagcacttcctggagcagcagatgcacccaacag

SEQ ID NO: 602416 - DNA, 98 bp, Homo sapiens
ctccgccggctaccatgtccgcccaggcgcagatgcgggccctgctggaccagctcatgggcacggctcgggacgataaacccactgccctacagccg

SEQ ID NO: 602417 - DNA, 96 bp, Homo sapiens
cacggagtgtatgaccacaaacagccatcaaggcttgttagcagtggcacaagatcttacagaggatgaagaaacagtagaagattccataattga

SEQ ID NO: 602418 - DNA, 90 bp, Homo sapiens
gttcaggcataaggttgtttacagggattgtcgatcagtcacaacaagcataccaagaagcttttgaaatcagcaaaaaggaaatgcaac

SEQ ID NO: 602419 - DNA, 83 bp, Homo sapiens
catccagcaggcggtgacccgctaccggaaggccatcgccaagacctgcctagagctggaacgttacctccagagcgagccct

SEQ ID NO: 602420 - DNA, 100 bp, Homo sapiens
gccactttccggggtgcacagcaagtgattgcagcaggagagaagattcctttgagccaggaagaaataactctgcagggccatgccttcgaagctagaa

SEQ ID NO: 602421 - DNA, 50 bp, Homo sapiens
gaaaggcgatgttggaaaaagacggagtgctggagaatctggtaaaagca

SEQ ID NO: 602422 - DNA, 75 bp, Homo sapiens
cagaggggaggaggactctggagctgacagcgcgcacttcacccgcagttgactgattcttgctattccaaatcc

SEQ ID NO: 602423 - DNA, 82 bp, Homo sapiens
agtgaatccccctaaacaggagcacctgctggcgctaaaagctaatggcagcattagccgctgttgggcctcctaatcctcg

SEQ ID NO: 602424 - DNA, 100 bp, Homo sapiens
gtggcgcggcgggacgcgagcggcgagccggagcgcggagcccggctcccgcaccatggaggaggacgacagctacgcattccacgcctacgggaaggca

SEQ ID NO: 602425 - DNA, 97 bp, Homo sapiens
ctgcttccaggacaagtcctgcgcttggggatcctctgtacgcccgttcactgagtaatcaagtcagaggattatatgacttttatctgcctagaga

SEQ ID NO: 602426 - DNA, 75 bp, Homo sapiens
ctccactggttcctgggcaccgaaagttaaacacagtgggaatatcacttttgatgagattgtcaacattgctcg

SEQ ID NO: 602427 - DNA, 82 bp, Homo sapiens
tgttgtcgtggccggagcggcccgcgcctgggctgccggcacttcgcggcagcatacagaaactgctgtaaaagaagaagtt

SEQ ID NO: 602428 - DNA, 100 bp, Homo sapiens
gctctatgcaggttccactgtcaaggtagtaagcattaataatgtctttcatctttgagtggatctacaatggcttcagcagtgtgctccagttcctagg

SEQ ID NO: 602429 - DNA, 73 bp, Homo sapiens
ggcattcccatgagccacgttgcccggcagataaaccacataatcctatggtaaatgctggagcaattgttgt

SEQ ID NO: 602430 - DNA, 82 bp, Homo sapiens
tctggctgtggaagaagcataatatggtgaacggccgcctggcagcaaagaatggctcaagaagtactgacacatttaaagg

SEQ ID NO: 602431 - DNA, 75 bp, Homo sapiens
gatatccgaaggttcaattatgtggtcaaacattagtgaccagaaggatcccaaggatcgaatggttcaggttgt

SEQ ID NO: 602432 - DNA, 74 bp, Homo sapiens
actgcgccgcgtcttcctcaaggaacatcgtgaagggcatgagagagctccgggaggtgctgcggactgtggag

SEQ ID NO: 602433 - DNA, 80 bp, Homo sapiens
cgcaggacagcgccttcctcaacgacgcggacatggtcatgagctttgtgaacctgggcgaccactttatcaagttcttc

SEQ ID NO: 602434 - DNA, 100 bp, Homo sapiens
attggatctggatcatttggaacagtctacaagggaaagtggcatgtgccggtggtggtgtgcacattgagccccggtatagacagttcccccagctgac

SEQ ID NO: 602435 - DNA, 90 bp, Homo sapiens
tcggaggcaagtttggtgtccagatggacagagttgatcaggtccagggagtcggtagtaagggatggcgggacgtcaccaccttttttt

SEQ ID NO: 602436 - DNA, 100 bp, Homo sapiens
ctttatgaaccttgtgatagatgaatgtgtggagatggcgactagtggacaacagaacaatattggaatggtgtcagattcctaccaggaagacatttac

SEQ ID NO: 602437 - DNA, 75 bp, Homo sapiens
ttttgccagagaaaggacgagcagcaagtcagggagcttaaggtgattaaggctgcagaagacagtgcgttgcag

SEQ ID NO: 602438 - DNA, 75 bp, Homo sapiens
ctcgatggaaccaaggatgacagcactaattctagtcaaaatgcagatcttcgtgaaaacccttaccggcaagac

SEQ ID NO: 602439 - DNA, 100 bp, Homo sapiens
gacacactaaaggaaagagaaagagagcttcagatgactcttaataccaggactctacatcaacagatgatatgtggtaaaactgctcatctagccatgg

SEQ ID NO: 602440 - DNA, 97 bp, Homo sapiens
tgtgcagccgcgaggaggcgcgggaggtgttcgagaacgaccccgagacgatcattgagaagcagccaggccacattcggagcagggttttcaggga

SEQ ID NO: 602441 - DNA, 111 bp, Homo sapiens
ttaaagacacagctgaaatcctggaaaccatgcctttcccctaaaagtgatggtgagaacaagaccaagattggaaagccagcttcagaggagggaattacagcaaaaatt

SEQ ID NO: 602442 - DNA, 82 bp, Homo sapiens
cgaacgaccaagagggtgttcgactgctagagccgagcgaagctaagactttgaccccgacgcaggcttcagtgattgccgc

SEQ ID NO: 602443 - DNA, 75 bp, Homo sapiens
ccttgcagacctcaacctctcagggatgaccaacccggaggtgattcagaacctggagcgaggctaccgcatggt

SEQ ID NO: 602444 - DNA, 90 bp, Homo sapiens
ttcttactcgggagctggctgaagatggctactctggagttgagagcagcccgacggccatggaggctgaagagacgatggaatgccttc

SEQ ID NO: 602445 - DNA, 98 bp, Homo sapiens
cgcaacacttctccgagccagcgagccagcgagccgccgacccgccgagcaaaatgcactctcgagtggaccctgaggagctcttcaccaagctcgac

SEQ ID NO: 602446 - DNA, 83 bp, Homo sapiens
cggcgctgctctgtggggctctggccgcgcctggcctggccgggaccatggttttttattggcacctcagtctcaacattttc

SEQ ID NO: 602447 - DNA, 141 bp, Homo sapiens
ttttgcctgaagattttgtggtttatacttacaacaaggaagggactttaatcactgaccatcccaatatacaggaaatccacactgatttgtacgtctgactgagagaaagatggtcgtctccagcagagaaagtgaaca

SEQ ID NO: 602448 - DNA, 82 bp, Homo sapiens
gatcgctgtgatcgtcacttggtgtccttaagtttgctcgcttggtcaagtcctacgaagcccaggatcctgagatcgccag

SEQ ID NO: 602449 - DNA, 83 bp, Homo sapiens
caacatcaatggagccgggcagctggagggggaaagcgtcttggatgatactgtgccctgtccacggtgcctcctgcatgtcc

SEQ ID NO: 602450 - DNA, 109 bp, Homo sapiens
gagagaagaggattccggcgggaactcgactcttggcgccaccgcctcatgcactgtgtagacaatgcagatcttcgtgaagactctgactggtaagaccatcaccctc

SEQ ID NO: 602451 - DNA, 114 bp, Homo sapiens
gggcagacgctgtgctcgctggcaccccgaacgggttgcttcccccgctgcgagacaatgcagatcttcgtgaagactctgactggtaagaccatcaccctcgaggttgagccc

SEQ ID NO: 602452 - DNA, 75 bp, Homo sapiens
cagcgcgggatcccagcctcaggcgtgcgcggacggtgtgcgggcaagtatatcgcgtcaacacagcgacctgac

SEQ ID NO: 602453 - DNA, 100 bp, Homo sapiens
gggctcggtttggctgactggggagtcggcaggcggcaggtgacaaggcaactgtatgagccactagttatgcagctgattcactggttcactaacaaca

SEQ ID NO: 602454 - DNA, 97 bp, Homo sapiens
ggttcagattgcaaggtggcaaggagcagaagcagcccttacaagttgcaaagagcatctgctgcacccaagcctgagccggttcctgttcaaaagg

SEQ ID NO: 602455 - DNA, 95 bp, Homo sapiens
tgaagcatctgatgcacgttccatccggcgctcagctgggcttgagagaaatcttacaggagatccagagacttcggctagagcatgaacaagct

SEQ ID NO: 602456 - DNA, 83 bp, Homo sapiens
tgcagatgagaaggttcagttggcaaaccagatatatgacttggtgtgtcaaggatgccacaatgccatcgacccagaagtgc

SEQ ID NO: 602457 - DNA, 83 bp, Homo sapiens
cgcccgctggccgggctggctgcggccgccctgggccgggccccaccggacggttttgggatttgagattgacgcggtgaact

SEQ ID NO: 602458 - DNA, 90 bp, Homo sapiens
ccatgcagccttcctcctctgcctcctcagtcttggcggagccatcgaaattcctatggatcgggagacagcaggaaggcagcaagtccc

SEQ ID NO: 602459 - DNA, 74 bp, Homo sapiens
tctcctgccaccgcgtggtgcttgccgcagccagcaactatttcagggcaaactctttgattctacaatagctg

SEQ ID NO: 602460 - DNA, 50 bp, Homo sapiens
caggaatgggacctcgagtcactgtgccatggccatgcagaaaatctttg

SEQ ID NO: 602461 - DNA, 82 bp, Homo sapiens
gaggctacacgtgcgtctgccgcccgcgcttcaccggtgtcctgtggccaggcggaaagcagtgagaagcccaacgctgagg

SEQ ID NO: 602462 - DNA, 51 bp, Homo sapiens
acctcactgcagaggtgctggagctggcagacctcctgccccccgaggtct

SEQ ID NO: 602463 - DNA, 103 bp, Homo sapiens
cgagcttcagcaagctctctccaacgatcaatgaactgagccatgttcaaatccctgttatgttgatgccagatgacttcaaagcctattcaaaaataaaggt

SEQ ID NO: 602464 - DNA, 75 bp, Homo sapiens
agcagtgccaagacttggttaaagtcattgaggactttccagcaaagatctgactgcagccatgagcagcaatga

SEQ ID NO: 602465 - DNA, 75 bp, Homo sapiens
gcgtgaccgagagcgcgaatatcgtcatcgttagaagagctacagagacttctgaagtggagagtctgcgacctc

SEQ ID NO: 602466 - DNA, 107 bp, Homo sapiens
gggcaggccttccgagaggaacctctatgccgacatcgacgccgcctggcaggccctgcgcaccagggccaattcctgtccccccagcagcatggcatcgtgtgctg

SEQ ID NO: 602467 - DNA, 98 bp, Homo sapiens
cagacggctcacctgtgcgggatggaacaaaagacttaagcccttagatgtggcgtttatgaaggcaatacacaacaaggtgaatattgtgcctgtca

SEQ ID NO: 602468 - DNA, 59 bp, Homo sapiens
ttcttagttgatgatttagttgattctctgaagagtcattttctgaggatgaatggaat

SEQ ID NO: 602469 - DNA, 100 bp, Homo sapiens
cctgtttgagaaaaggcctaagaattttggcattgatgaggtttatataactttccaagacaaggaagttgtgcaaagcctcacagctactaagaggctg

SEQ ID NO: 602470 - DNA, 100 bp, Homo sapiens
ctgctggtcagcttcccacatctccaggtcatatgcacacccaggtaccaccttatccacagccacagcttccacctcttgaaggttttgtaatgaatcg

SEQ ID NO: 602471 - DNA, 100 bp, Homo sapiens
ctaaattacatattccagtaatggtggatgaagttgttcattgtttgtcaccacaaaaaggacagctgggatctagcaattgggaggcagcagacttggg

SEQ ID NO: 602472 - DNA, 83 bp, Homo sapiens
ccagccccgcggccgctcaaagccgggagatcgactgtttgagcccggaagcgcagaagctgactgtgtcagggaaaagggag

SEQ ID NO: 602473 - DNA, 83 bp, Homo sapiens
aaccaagggcctccgtctggatttccaaggaagaatttcctctgaagcaccgctgctgatgcaaggaatcccctgggctcccg

SEQ ID NO: 602474 - DNA, 100 bp, Homo sapiens
acagaagagggagacctggagaccgttacgacggcatgtttaaggaagaaatctctaaacgttttaaatcacatactgaccaacttgtgttgatatttgc

SEQ ID NO: 602475 - DNA, 75 bp, Homo sapiens
ggagccctggaagcagcagctcaccgaggacggggactcctattcctctacacagccgactagttatgatcagag

SEQ ID NO: 602476 - DNA, 75 bp, Homo sapiens
ggaaaatttcgatattgaagtgtcaaaatccatagatggaaaagatgtttgagttcctgagatctagttggtgag

SEQ ID NO: 602477 - DNA, 83 bp, Homo sapiens
gccctcaaggccatgatcaaaaccagatcaatgacaacagccattggaagcttaggaaaagcgaatgtaacgtgaaaaaatag

SEQ ID NO: 602478 - DNA, 97 bp, Homo sapiens
ccgggtttggtagagtgacttctattcactaaaaccatgtgtctgaactgaagaagcttgggctcacttccacaaatactcctgcccctgccacgag

SEQ ID NO: 602479 - DNA, 88 bp, Homo sapiens
cggtaccgctgcagccaccgcggcccccgcgggaaagtgatgaagcattgggcccaacaatgatgagttggaatgcagttgaaaagtt

SEQ ID NO: 602480 - DNA, 90 bp, Homo sapiens
ggcgcctaaagtctgagagagggaagtcgcctctgtgctcaggcggggtttcaccatgttgcccagactggtcttgaactcctgagctta

SEQ ID NO: 602481 - DNA, 51 bp, Homo sapiens
cgaagatttagcaaagctgacacaataggtggagccgccaccaaaatgcag

SEQ ID NO: 602482 - DNA, 75 bp, Homo sapiens
aaagactctggatggcattttctcagagcaggaagaagtttcttgcccaaatgcctggatgtgtctgcttgactt

SEQ ID NO: 602483 - DNA, 75 bp, Homo sapiens
atgaatttaaagatgtttctgcaacagaaccacgtcatcactccccaaaatggacgttaccaaatagattccgat

SEQ ID NO: 602484 - DNA, 98 bp, Homo sapiens
atgggctgggcagcctgagtcccagtgatggccggtgcataaacttctcccgagttccatctcagtaaaagggaagcaggaagaccaagaaggtacga

SEQ ID NO: 602485 - DNA, 50 bp, Homo sapiens
ctcaggaacaccaccttctgtcagttaactatgaaggcattgcccgaaat

SEQ ID NO: 602486 - DNA, 75 bp, Homo sapiens
cggagaaggactccaaggcggagcaggccaaagtgaagaagagtccagcctctgatgaagcaggagagaaagaag

SEQ ID NO: 602487 - DNA, 90 bp, Homo sapiens
gttccgattcatgcagactgaccccaactgggccaacttcctgtatgatgcctccagccaccaggctcccagccccattgccaatacctt

SEQ ID NO: 602488 - DNA, 50 bp, Homo sapiens
gaaaatcttcgaagacttttcatatgtgccaagagttgtaacctctgcac

SEQ ID NO: 602489 - DNA, 75 bp, Homo sapiens
atcgatctaagatggcgactgtcgaaccggcataatcaccagcaacacccgggacaataatacgggggccaccta

SEQ ID NO: 602490 - DNA, 83 bp, Homo sapiens
gcgcgtgcctatgagcctcaggagctgaagccctttgtgactgcaatctcgagcgccgtgccgtccctgcagtgacaccgagg

SEQ ID NO: 602491 - DNA, 100 bp, Homo sapiens
cgcgaacgagcgacggcggaacccgtgggcctgtggactgcagcctcggcggtcagcagccggcccgctggggctggaggcacgggcccatcaacgtgaa

SEQ ID NO: 602492 - DNA, 82 bp, Homo sapiens
tgctcctctccatggggttccccagagcccgcgcgttttaaaatcaaagatgggaaaatcggagaaaattgcccttccccat

SEQ ID NO: 602493 - DNA, 75 bp, Homo sapiens
caacttcgcggtggtcaagcgggccacgcacctcgtcaccaaggccaagcaaacaggactttgagtctacagatg

SEQ ID NO: 602494 - DNA, 83 bp, Homo sapiens
gtttggattccatcagtctgttcggcctgccatgtggaaaatgatgcttaatatcgatggatgccgtgcgcatgctcaatacc

SEQ ID NO: 602495 - DNA, 75 bp, Homo sapiens
cgggctcccacctgctcctccagcgcaccagatatgaagatcaatgatgcagactgatggttttgatgaagctgg

SEQ ID NO: 602496 - DNA, 100 bp, Homo sapiens
gcaaagtttgagaacctctgcaagctcatgaaagaaatcttagataagaaggttgagaagctacgagagtacaaggtagtgggtcgctgcctgcccaccc

SEQ ID NO: 602497 - DNA, 90 bp, Homo sapiens
gccaagcctggaacatcacatctgtacgttgcaatctgtggatcagctacgaggttcagcagctggacatggagaaccaacgctcatcac

SEQ ID NO: 602498 - DNA, 95 bp, Homo sapiens
atcgatgaccttggacacctccatgttatggacacggtctttcttattcaggatcactactcttggaatcaaagataaatccaaatactgcatat

SEQ ID NO: 602499 - DNA, 50 bp, Homo sapiens
tatgagtccacctccaggcaatggtatagtcgtctccccctccaccacgg

SEQ ID NO: 602500 - DNA, 100 bp, Homo sapiens
ggaagttggtagctctgaaggtgatcaggctgcaggaagaagaagggacacctttcacagctatcagggaagaaataagcgggttttgaaaacaaaaaaa

SEQ ID NO: 602501 - DNA, 100 bp, Homo sapiens
agatcgccaagagatcaaagataaaatcttttgtgaaagtgtataactacaatcacctaatgcccacaagcttagcagtgtctgcaaaaacgaatctttt

SEQ ID NO: 602502 - DNA, 82 bp, Homo sapiens
atttgactgagagaaacccactgaagacgtctgcgtgagaatagagaccaccgaggaactgtggctgcaccatctgtcttca

SEQ ID NO: 602503 - DNA, 100 bp, Homo sapiens
ctcaagaagatcatcaagcgcaagcacaccctaccgaattacaagatcagatccctcatgtccatgatccggaaacgatcccaccccagtggcagtggtg

SEQ ID NO: 602504 - DNA, 99 bp, Homo sapiens
ccggcgacagcagccaggagtcatgagcgacagcggcgagcagaactacggcgagcggctgcatccagatctcattatgcatcagaaaaatgaaaaaac

SEQ ID NO: 602505 - DNA, 90 bp, Homo sapiens
tggccaagaagggccttactccttcacagatcgatattcttgtgactactccaaatcgactaatctatttattaaagcaagatccccccg

SEQ ID NO: 602506 - DNA, 99 bp, Homo sapiens
atcagaagcagatgctggcaccactcttcttatgctgtctgcgtaactaatgtcatacccaggctatcccccaacaggctacccacctttccctggata

SEQ ID NO: 602507 - DNA, 100 bp, Homo sapiens
tgatttgctgccgctgacgtttttagatttcatccagctcggtgctgattatcacaactgtttggtgacctacttcactgacctgtgaggattccttccc

SEQ ID NO: 602508 - DNA, 50 bp, Homo sapiens
cagagaagagcacagaatgtaccagagagaagcatcagatggtgaaggag

SEQ ID NO: 602509 - DNA, 99 bp, Homo sapiens
gccactgtggctccggaagatgtgtctgaggtcatctttggacatgtcttggcagcagggggccaacgcagtcaccgccgtccgcagtcacagtccagc

SEQ ID NO: 602510 - DNA, 125 bp, Homo sapiens
agaaaaattaaagaagatgatgctccaagaacaatagcttgccctcataaatgaacagagtatctgccaagcccgggcttccgtgatggtctacgatgacaccagtaagaaatgggtaccaatca

SEQ ID NO: 602511 - DNA, 98 bp, Homo sapiens
ctaacatcacctgcttcatccttgtttaatgactttggtgccctcaacatctctcagagacgaaagatatgtgtcacaaagatgtctacacggaactg

SEQ ID NO: 602512 - DNA, 100 bp, Homo sapiens
ctcagcgctcccatgatcgcccggtgccttttggctgtgcgaagcctccgcagggtctgcaagtggatgatgagattgtggagttcggctctgtgaacac

SEQ ID NO: 602513 - DNA, 75 bp, Homo sapiens
acgagcagatcctggtcctcgatccgcccacagacctcaaattcaaaggggttggccggagacctacgacatgaa

SEQ ID NO: 602514 - DNA, 75 bp, Homo sapiens
gtgaggagaccatagctgcacagccagccaggcccagacatgtccgtccttgtaagttaaaagcttccatgggag

SEQ ID NO: 602515 - DNA, 75 bp, Homo sapiens
aacgaatgggacaagatcccgtccatgaatcagactcgtcctcccactgacttgagctttaactttgatgccaac

SEQ ID NO: 602516 - DNA, 96 bp, Homo sapiens
catggtcataaaatttgtgacccttacgcctggcttgaagaccccgacagtgaacagactaagatccggccagttattgaacaaacctttcctttt

SEQ ID NO: 602517 - DNA, 75 bp, Homo sapiens
accatctaaaatacgaaggtttctggctggtgggcagatttgtccttcccattctgcaaccatggcaagcgttcc

SEQ ID NO: 602518 - DNA, 90 bp, Homo sapiens
tgtgtgaagctgaatgatggtcacttcatgcctgtcctgggatttggcacctatgcgcctgcagagtttgaaattggcacaatggaagaa

SEQ ID NO: 602519 - DNA, 75 bp, Homo sapiens
ctgactgccacacacctccagaatcaggtgtctgaaaaagccaaagccttggctggacagtcagtacgaatctgt

SEQ ID NO: 602520 - DNA, 100 bp, Homo sapiens
cagcgcaagggagctggcgactgcataggaggacccagctggcgggaccgcgaggagatcctgaaggagctagacgagtgctacgagcgcttcagtcgcg

SEQ ID NO: 602521 - DNA, 75 bp, Homo sapiens
ttctgtcaacggcaggggcaggcctagtttgactctgacagtcctcccactaagtcataccatgggcagttttac

SEQ ID NO: 602522 - DNA, 100 bp, Homo sapiens
gaaggggaactcctgctgcccactcagttggttaccacagagaagcgcttcctcaaagacagtttgtacaatgaaggaatcctaattgtatgggacccat

SEQ ID NO: 602523 - DNA, 90 bp, Homo sapiens
cgataaatcagacagaacagttaatcctcaatttaagcctgatctaacccctagaaacagctccagatgaagatgagtgagcgggccgcc

SEQ ID NO: 602524 - DNA, 98 bp, Homo sapiens
aaatgctttgggttcatctttcattgctgcaaggaacttccatgcctctaacactcatcttcaaaagactgtgtctgagcagcaggagagagccttca

SEQ ID NO: 602525 - DNA, 130 bp, Homo sapiens
catctgcctgtccagccagcatggaaccaaagcggatcagagagggctaccttgtgaagaaggtgatggcttggacaacagtgtagcttcccccagcacaggtgacgatgatgaccctgataaggacaaa

SEQ ID NO: 602526 - DNA, 100 bp, Homo sapiens
agactcttggagccagaagctacatgacccctaaacgcttatgttcctgaggaagaattgaaggcagcagaaatagatgaagagcacgtggaggatgacg

SEQ ID NO: 602527 - DNA, 82 bp, Homo sapiens
gcagccccaagacagagcgctactcctggcagtgcgtcaatcagagcgtcctgtgcggaccaggaatcaccttcaagcctat

SEQ ID NO: 602528 - DNA, 100 bp, Homo sapiens
tagaatcttgaggggtctccatccagatcagctgaatcagagtttgcattgttaacaaggattagaatggctgaacacagaagaacctatttctgtctac

SEQ ID NO: 602529 - DNA, 75 bp, Homo sapiens
ctgaagatggctactctggagttgaggccagaggcattgatgtgcagcaggtttctttagtcatcaactatgacc

SEQ ID NO: 602530 - DNA, 90 bp, Homo sapiens
gaggagaccaaaataaaactaacagtctatgatgtcaaggataagtctcatgacacctaatctatgccagcaattatgacaatgttagca

SEQ ID NO: 602531 - DNA, 97 bp, Homo sapiens
ggtgcccacgtgctgaggtgcagccacgtgaccctggaaccaggggccaaccagataacattcaggactcaggcggaagtgtttcgagacacagtcc

SEQ ID NO: 602532 - DNA, 83 bp, Homo sapiens
tcgacatccaggcgaactcggcctatcgctaccctccgaagtccgaactgggcacctccgggctgtgaaaagttagggaagtg

SEQ ID NO: 602533 - DNA, 75 bp, Homo sapiens
ctcgggaacatggccctggagcggctctgctcggtcctcaaagctgtcaataccagcaaatatgcagaaagctat

SEQ ID NO: 602534 - DNA, 90 bp, Homo sapiens
cgccctggtgctcaccaagcaagaactggatgttggagccagctctagccacaggagaggagctgccggaactgaccttgctgaccacac

SEQ ID NO: 602535 - DNA, 50 bp, Homo sapiens
tgcaatgtctgtgtctaatctatcatgacagtactacgcttacctcaccg

SEQ ID NO: 602536 - DNA, 75 bp, Homo sapiens
tgatgattagagacatactaatgtacatggcagatgtttggagcatgggcatactgttatatgttcttatgtgtg

SEQ ID NO: 602537 - DNA, 100 bp, Homo sapiens
tggacatccaggtgctgagccaggagcggcagcctttctctattcctgcaccaactgacctgaagttcactcaggtcacacccacaagcctgagcgccca

SEQ ID NO: 602538 - DNA, 75 bp, Homo sapiens
atttggcccttttggggaacacaccgtgaacgccagttggattgcagttcaggccgccatggcatcagatgaagg

SEQ ID NO: 602539 - DNA, 100 bp, Homo sapiens
aacggagacttggatgaggtgaaagactatgtggccaagggcatttttggtcgaagagagctgaagtaatgagaagacatcatggaggcccagtcccaca

SEQ ID NO: 602540 - DNA, 125 bp, Homo sapiens
agatctcttccccttgtccatagcctagatcgagctccctgtgtgcaccgcgcgctgcccgaggcgcttcctctgtgacgagggtgcaggtatctctggggactacatcgatcgcgtggacgagc

SEQ ID NO: 602541 - DNA, 105 bp, Homo sapiens
ctggagccaatcagcgcgggcagcgaaccgggggagcgaggcacggttttaaaatcaaagatgggaaaatcggagaaaattgcccttccccatggccagcttgtt

SEQ ID NO: 602542 - DNA, 96 bp, Homo sapiens
tctcgttcccgctcaagatcaagacacaggcataggactagaagcaggagtaggacaaggagtaggagtcgatggccaacttagcatttatacggg

SEQ ID NO: 602543 - DNA, 90 bp, Homo sapiens
ctcacgggtcgttgaggccggtgacatgtctgtgagctgcggaggctgcggcccccaggttattctggtacaagttaacccaggagaagc

SEQ ID NO: 602544 - DNA, 100 bp, Homo sapiens
aaagatgagatttacctgtgagatgtttcatcccaacatttcagtctagaaggcttgacaggaggagctggtgtcggaaacaagccatcctcatctctag

SEQ ID NO: 602545 - DNA, 83 bp, Homo sapiens
cccaggcctgcgtccgagtctccgccgctgcgggcccgctccgacgcggaagtttctatggagaactgctgagccttctggag

SEQ ID NO: 602546 - DNA, 98 bp, Homo sapiens
tctttgtggtcgtgtttttaaagtaggagagcctacatattcttgcagcgaggatgccatgaggaaagctggtgtggcacacagtaaatccagcaagg

SEQ ID NO: 602547 - DNA, 80 bp, Homo sapiens
ctccagatgttcttcctcttgcttgccagaggaagtggccatgcgcaagctggtgcgctcagtgactgtggttgaggacg

SEQ ID NO: 602548 - DNA, 82 bp, Homo sapiens
caacgccttaacccaaggaagtgactcaaactgtgagaacttcaggctttgatgacagtagggaaagaaccatttcctacca

SEQ ID NO: 602549 - DNA, 75 bp, Homo sapiens
aaatcaatgacgtgtttgaaggaagacgagagtatgatttttgagaccactacaaagaatgaaactatagcccag

SEQ ID NO: 602550 - DNA, 90 bp, Homo sapiens
gcaggtgacagtctgcatgtgcagttttcagtccctcagcccgtacacctgtctgccacctcttgggggggcaccccaacctctcaaccc

SEQ ID NO: 602551 - DNA, 83 bp, Homo sapiens
ctgcatcctcaccagcatttggtgtggatattggtgctggaaaaggcaaatactatgctgtcaattttccaatgagagatggt

SEQ ID NO: 602552 - DNA, 75 bp, Homo sapiens
tgccgtggtgctgctggtgtttggagttgcagcctacctaaaaatcagagaaagcgtcgtggtggagcaataaat

SEQ ID NO: 602553 - DNA, 98 bp, Homo sapiens
ctatagtcattatcaccacatcccctggcatccaattcctgcagaaataccataccatcaatggtcataatgcagaagtaagaaaggctttgtctaga

SEQ ID NO: 602554 - DNA, 100 bp, Homo sapiens
ctgagggagcttcacttggacaacaacaagcttaccagagtacctggtgggctggcagagcataagtacatccagaagactacttacgtgtggcgagaac

SEQ ID NO: 602555 - DNA, 94 bp, Homo sapiens
ccctgttccccgcgctgcggcctggcggcttccaggcgcactaccgcgacttaattcagtgcacaaatgagatgaatgtgaacatcccacagtt

SEQ ID NO: 602556 - DNA, 49 bp, Homo sapiens
ggggacttggggccgcagggagataaccagcccgagtcatgcagtcttt

SEQ ID NO: 602557 - DNA, 74 bp, Homo sapiens
gcccggacgagttcgatgacttcgtcacctatgagtaagactttgaccccgacgcaggcttcagtgattgccgc

SEQ ID NO: 602558 - DNA, 74 bp, Homo sapiens
cggacatcgagaaagggctgcagttcattcaactgaggctgatgtgaatccaaaggcctatccccttgccgatg

SEQ ID NO: 602559 - DNA, 100 bp, Homo sapiens
gaggacccagctgatcgacgccgttctgaatctgtgcacctaccatcaccctgaaaacatccagctcccaccggggtacatgtcccagagcaagcacacg

SEQ ID NO: 602560 - DNA, 100 bp, Homo sapiens
gtcctgatgaaagcaaacagaaatttgtgctcaaaacccccaagatttaaattccaggttgtcatcaatggccgagagtttcccccagctgaagctggaa

SEQ ID NO: 602561 - DNA, 97 bp, Homo sapiens
gagacagggcacaccaaactccatctggtcatattgaacattccagatacctatcattactcgatgctgttgataacagcaagatggctttgaactc

SEQ ID NO: 602562 - DNA, 143 bp, Homo sapiens
ctgggacttatttttgtatagctgataatggaaatgagacaattgaagctcaagcagagcttacagtgcaaggaccaggactaaaacctccagaggaacggacaatagaatacctagaagaagttgcaattacttttgccaaa

SEQ ID NO: 602563 - DNA, 80 bp, Homo sapiens
tgacacaactgtagagcagctgtatagcatcttcactgtaaaggaggtcagataaaactctccaagatattgtatacaaa

SEQ ID NO: 602564 - DNA, 85 bp, Homo sapiens
cgctgctacctgcagcgccgtgtggcacgacacaaaaatcaggacttcctcgttctgcccatcttcctaacaaggctatggctga

SEQ ID NO: 602565 - DNA, 90 bp, Homo sapiens
tggggccagggaaccctggtcaccgtctcctcaggaactgtggctgcaccatctgtcttcatcttcccgccatctgatgagcagttgaaa

SEQ ID NO: 602566 - DNA, 80 bp, Homo sapiens
ctggacccggacccaaagtgccatgtctttaatgaatgtatcctgtcaggtataatgtcagtgaatggcaagaaagttct

SEQ ID NO: 602567 - DNA, 99 bp, Homo sapiens
actggatttgcagcttttgccatggttattattacaggtcttgtccagaaggctaaaaaagcaaaggacaggttgttgaaacgagaaggggatgatcga

SEQ ID NO: 602568 - DNA, 100 bp, Homo sapiens
agaccgtggaagatttaacgaatggggttgtgatggcccaggttcttcaaaagatagaggagagattgaatttgaagtagtttatgtggctcctgaagtg

SEQ ID NO: 602569 - DNA, 114 bp, Homo sapiens
cctctgggagcagaagggaggctccaagacctcatcaacaattaaggtggcacgcactacccttcttcctggcctcctgaagaccatagcagcaaatcgtaagatgccccttcc

SEQ ID NO: 602570 - DNA, 90 bp, Homo sapiens
cctctgcgacctggggccctgggtgaagtgctccgccgcccttgcctccagatggcagttgaattcctgcatgaactgaatgttccattt

SEQ ID NO: 602571 - DNA, 75 bp, Homo sapiens
cgagaggaaactgttgtgcctcttcatattggcgatcctgttgtgtcagcccaaggccaaccccactgtcactct

SEQ ID NO: 602572 - DNA, 100 bp, Homo sapiens
aggcgaagctggccgagcaggctgagcgatacgacgactgttggtagagaaaatctttgctcagtatcttgtcccccacaacctggaaacagaagagaga

SEQ ID NO: 602573 - DNA, 100 bp, Homo sapiens
caggaactacgtcccggggaagacagaccccgtgcggctgacacagctgtatgagcaggcccggtgggacctgctgctggaggagattgactgcaccgag

SEQ ID NO: 602574 - DNA, 100 bp, Homo sapiens
acttttcacccatctgtacatcctatgtcaactgcttctcaggtagcaagtacatggggaggtactaccaactgagcagtcaccacggccggagaaaacg

SEQ ID NO: 602575 - DNA, 75 bp, Homo sapiens
caaacagattgggaacatctcagtttttctttggagatacttcttcctgtccaagatccggtcccacgtggctac

SEQ ID NO: 602576 - DNA, 100 bp, Homo sapiens
cgccgactggagaggaaatactcttccatccctgtcatccagaaaaggttaagaagttcttacaagagttctaccaggatgatgaactcgggaagaagca

SEQ ID NO: 602577 - DNA, 82 bp, Homo sapiens
gagctggatgatgaacttttggacccggacgtagacaagtttggcaacgagatcacccagctggcccggcccctgcctgtgg

SEQ ID NO: 602578 - DNA, 90 bp, Homo sapiens
ggagtatgaccgcttcatcgagtccggcaggaagtacaaatcgaatgaagattatgtatatgtcagaggacgtggccggggaaagtacat

SEQ ID NO: 602579 - DNA, 83 bp, Homo sapiens
tgggcttcatagcattcgcctactccgtgaagatgctcagccagcattgggcagcccccgcttcctgctcccctacccccttc

SEQ ID NO: 602580 - DNA, 100 bp, Homo sapiens
tgcccgttcctatgtcctgcgtgatgctattgctgagattagagccatttgtattgaagaaattggagtatggatgaaaatgtatagtgatgccttccta

SEQ ID NO: 602581 - DNA, 82 bp, Homo sapiens
tctgcccctcagggtgcgagcgcctcagtggtctttaaagaacaggactctccttcagcaactccagaagcttcagactttg

SEQ ID NO: 602582 - DNA, 50 bp, Homo sapiens
actggaggccaccctgtggttcagggcacctggacgatgacggattaccg

SEQ ID NO: 602583 - DNA, 99 bp, Homo sapiens
ctccagaaggaactaaccctgtcaataccttgatttcggacttctggactccagaactgtacaccttgactgtccctggagacagcccctgtgctcgag

SEQ ID NO: 602584 - DNA, 75 bp, Homo sapiens
gccacctgcatgcggcgcagctccatccaaagcaccttcagcatcaacccaggccttcttggagcgatacttggc

SEQ ID NO: 602585 - DNA, 100 bp, Homo sapiens
ctgcacctggctcatcctgggcagcaaggaacagactgtcaccatcagggatgtattcttggcctgggtagcctctagaaattcaaacacagtggtgttt

SEQ ID NO: 602586 - DNA, 83 bp, Homo sapiens
ttgttcccccaaatgtctgactctgactctcggactgagaaacgcaagagcactacaaacaccactggtttcccgaaaagccg

SEQ ID NO: 602587 - DNA, 100 bp, Homo sapiens
ctcaatttaagcctgatctaacccctagaaacaggtgattttctatgatagcgactggaaccccactgtggaccagcaggccatggacagggcccaccgc

SEQ ID NO: 602588 - DNA, 75 bp, Homo sapiens
aaaataaaaagaagaagaagaaaagcaagatactgaaatgtgatgaacatcttttctcatcagaaagaattgatt

SEQ ID NO: 602589 - DNA, 75 bp, Homo sapiens
ctcaagggttctcttgtttatcgagggttttgggctggtggtctcggcagatgtgttcagagcaacattgttttg

SEQ ID NO: 602590 - DNA, 50 bp, Homo sapiens
cctcggagcaacgagcgcagcgccgctgtcgcctggttgggcccggaaat

SEQ ID NO: 602591 - DNA, 50 bp, Homo sapiens
aagacccttcagcgctcagcaagcagagctatgtcttgcccagccacgtg

SEQ ID NO: 602592 - DNA, 82 bp, Homo sapiens
cttcgagttaatcatccccaatgtgggcttccaggaactggaacccgaccgcatgtctgtcatggacctcgccaatacttgc

SEQ ID NO: 602593 - DNA, 83 bp, Homo sapiens
gctccttcaacccgtggctgatagctgaaagccttccctctgagctacagaggtacatatccaccagtctactcggcttctcc

SEQ ID NO: 602594 - DNA, 50 bp, Homo sapiens
acaaggcactgctttttcatgacgacctgtcatttactccatcctttata

SEQ ID NO: 602595 - DNA, 96 bp, Homo sapiens
agcttccctgtatgtgatgatgaccgtcaccaactggttcaactctggcagaattcacagaggcagatgaagcaatggcagaactcgcaattgctg

SEQ ID NO: 602596 - DNA, 100 bp, Homo sapiens
attagaaggtgacgaggagggagaagacgaggatgatgcggaaattaaccccaaggtcattgaccacagtggcgcccgccttggtgagtatgaggacgtg

SEQ ID NO: 602597 - DNA, 100 bp, Homo sapiens
ataaacgttgccaccgtgaatggtgctgctggacatccatcctctccttgagaaggaggcagtggagaaggtgacacagcacatccacggcctgtctggg

SEQ ID NO: 602598 - DNA, 82 bp, Homo sapiens
gacatttgctacagcatcccacattaagtcaacgatctaatgaggcgtcaagaagaactcagacgcttggaagaactcagaa

SEQ ID NO: 602599 - DNA, 83 bp, Homo sapiens
catcctgcctatagaccaggcgtcttttgccagccaaaacaggaccaaactcttacccaggatctactggagcagctgttgga

SEQ ID NO: 602600 - DNA, 97 bp, Homo sapiens
agtccacaagttgaagagggcgatagtcgttttcttgcaaatgaagttttacaggagaaggtggaggaaagttacaccattctttgccaaaggctgg

SEQ ID NO: 602601 - DNA, 100 bp, Homo sapiens
gggcggcggaggcagcggggccgggatggaggacgttaactctaacgtgaacgcggaccaggaggtttgaattttgggaagattttgaagaagaccatgg

SEQ ID NO: 602602 - DNA, 100 bp, Homo sapiens
accctaaacacctcaacgatgacgtggtcaagattgtgaaagatgcataccaagaaaagacagccacagtttatcctgaaccgcaaaacaaagaagcatt

SEQ ID NO: 602603 - DNA, 75 bp, Homo sapiens
cctggaatgtgaagagacaggaggcagcagacggacatccagccatggattgttacagaacttcactaagcagtt

SEQ ID NO: 602604 - DNA, 100 bp, Homo sapiens
tatcagttatacagaaatactactttgggaaacagtcttcaggagagcctagatgagctcatacaggatgcagaaaatgcgattgtgcatatgggcggtc

SEQ ID NO: 602605 - DNA, 100 bp, Homo sapiens
cagaagacaaacttgccaaagctacaagagacagctatgatagtagtggagcttccaaagatgaaattaaggagagatttgctcagaccatggagtttgt

SEQ ID NO: 602606 - DNA, 90 bp, Homo sapiens
aggcggcggcgccgccggctttggtgttatatgaacttcccaccaacacacagtggtgcttcgatattcagtggtgtccccgaaatcctg

SEQ ID NO: 602607 - DNA, 100 bp, Homo sapiens
ctgagacacagttgccgctgactcgggaggaggacctgatcaagactgatgatgtcctggatctgagatttaagtgccctgtatgctcaaaatttgtatc

SEQ ID NO: 602608 - DNA, 99 bp, Homo sapiens
actgctcgcaggtggactcggtccgtggcttcggaggcaagtttggtgtccagatggacagagttgatcaggctctatctaatgttcctcctctccgga

SEQ ID NO: 602609 - DNA, 90 bp, Homo sapiens
ttcttgcctcaggccagtcgcctccaggccaagagggatccttcacccgtgtctgattaaaaggagcccaagccccatctcatcctagca

SEQ ID NO: 602610 - DNA, 75 bp, Homo sapiens
cctttcccgctggcgcgcagcctcagctagcaaagccttctagacaagctcagtggaatctgaagggcccacccc

SEQ ID NO: 602611 - DNA, 83 bp, Homo sapiens
ggacaccattttctgccgctggacgcaaggaggaggaagccaagaatctggtgagcgaagccatcgcagctggcatcttcaac

SEQ ID NO: 602612 - DNA, 82 bp, Homo sapiens
agcgcttccgcaccatcacctccacgctcatcggaacctgtcccagctccctaattttgccttctctgttccactggcgtat

SEQ ID NO: 602613 - DNA, 50 bp, Homo sapiens
ggtggggttggcatcccccacatacggaaagtgatgaagcattgggccca

SEQ ID NO: 602614 - DNA, 112 bp, Homo sapiens
aggccgactactacgccaaggaggtcacccgcgtgctaatggtggaaacccacaacgacaatgcagatcttcgtgaagactctgactggtaagaccatcaccctcgaggttg

SEQ ID NO: 602615 - DNA, 51 bp, Homo sapiens
caagacagtgctgaccattgcccataggagctgtggctaaaggaagtggag

SEQ ID NO: 602616 - DNA, 100 bp, Homo sapiens
aggatctactctgaagatccctgtggtagagagaaaaatcctggatctgtatgctttgagcaagtttggaaattttagcattcaggtgccaggaatgcag

SEQ ID NO: 602617 - DNA, 82 bp, Homo sapiens
gtggaagcaggactgcgccgcgtcttcctcaagaggagctctacggtgactttgaagacttggaaacaggggacgtgcacaa

SEQ ID NO: 602618 - DNA, 91 bp, Homo sapiens
agggaggtcctcaaaagattagagatgtgtccatgggaagagactttggacaaagtttaccaaatgaaaagcaaacctcggggatactgtc

SEQ ID NO: 602619 - DNA, 75 bp, Homo sapiens
tttcttcatggtgtccattttatttagcaaggtttgctggttggctcccgagcagacagcaggaaagaagaagcc

SEQ ID NO: 602620 - DNA, 95 bp, Homo sapiens
aagttgactgaaaatggggcggaagaaaatacaaatcacacgcataatggatgaaaggaaccgacagatcagtacaatggaacatgaattttcaa

SEQ ID NO: 602621 - DNA, 107 bp, Homo sapiens
cctccttcagcccactagtagtgcgctggtaaatgctacggaatggagacgagttgtactgctgtcacaggaaatggacgctggattacaagcatggcagctcaggc

SEQ ID NO: 602622 - DNA, 75 bp, Homo sapiens
aagatgacagacttggacaacatgtcccaacattacatcccaaggcggggtttcaccatgttgcccagactggtc

SEQ ID NO: 602623 - DNA, 83 bp, Homo sapiens
tgcgtcccgccaccggccgcttctgtcctcggaaagatgaatgggagggctgattttcgagagccgaatgcagaggttccaag

SEQ ID NO: 602624 - DNA, 83 bp, Homo sapiens
cggatgggagtgacagtgtaatagaaaaacaagcaagaaaccttttaggggctttgttatgcacctaaagccatattggaagc

SEQ ID NO: 602625 - DNA, 100 bp, Homo sapiens
taggggggctggagagcccccaggtggaccatggcggtgagattccagtaagactttgaccccgacgcaggcttcagtgattgccgcggatcagaagcct

SEQ ID NO: 602626 - DNA, 100 bp, Homo sapiens
agcgctgcggccgcggcggtgcagcagaggcgcctcgggcaggaggagggcggcttctgcgagggcagcctgaggcatgaatgctttacagttgcagaac

SEQ ID NO: 602627 - DNA, 120 bp, Homo sapiens
tgcttttgaaccactggaaagtgaggaattttgaagtacaccgtggtgacattgtatcattggtgtgtatgcaacagcgttattgcaacaggctaacgaaaacagacaaaattcaactgg

SEQ ID NO: 602628 - DNA, 75 bp, Homo sapiens
gaacactctcctgaatggacacaaggccgtgcataaggctgtgctgaccatcgacgagaaagggactgaagctgc

SEQ ID NO: 602629 - DNA, 90 bp, Homo sapiens
gtctccgcgtcccgctcgctgggagagaggtacctctccttttccctctccctttccctaaggtcgttgaggacttccacatggagattg

SEQ ID NO: 602630 - DNA, 51 bp, Homo sapiens
gccagaagctacatgacccctaaacgattcatgatgttgctatcaaaagtt

SEQ ID NO: 602631 - DNA, 100 bp, Homo sapiens
cggcctgtatcaccagaggagattagacgtagcagattaggttgattcttcaccacactgaaaccattaggaaaaatccttgtggttaacagcagaggct

SEQ ID NO: 602632 - DNA, 82 bp, Homo sapiens
cttcatgcagagtgacatgggtcgggaagcagcatatgagacaagaggagcagcagcggcaccgcccctcaccctggagggt

SEQ ID NO: 602633 - DNA, 100 bp, Homo sapiens
ttctgtgtcagggaatgctcctggctggtgcggacacaacccaataggtttccaatacttatctacaggaatcgccatgaccccagctctgagggaggca

SEQ ID NO: 602634 - DNA, 74 bp, Homo sapiens
atgagtataaaggatgggttttaactacagacccagtctctgccaagaaatgctgacttttaacccacacaagc

SEQ ID NO: 602635 - DNA, 101 bp, Homo sapiens
gagcgcctcgtcgacatgagtgatgtggaggaaaacaacttcgagggcagactgtcaccactgactaaagaagagaaaactgcggcagagcaattcaaatt

SEQ ID NO: 602636 - DNA, 100 bp, Homo sapiens
atcctgctatggaaccacggttcaaagtggtggattgggacaagtaatcaagatgattaccaactggttcgaaaacttggtcggggaaaatatagtgaag

SEQ ID NO: 602637 - DNA, 98 bp, Homo sapiens
actgggggcaacttggcacttagaaccgcagcagggacgtcggtttgctatcgggactcggcgaggacggtcaaaatgcagatcttcgtgaaaaccct

SEQ ID NO: 602638 - DNA, 100 bp, Homo sapiens
gggccctcagctcagagggaaagccttacgtgaccaaggaggagctctaccaggacttgagcagccccagccagtacgacacaggtgttgcactgacggg

SEQ ID NO: 602639 - DNA, 90 bp, Homo sapiens
actgagagattgaagcatgctctggaaatgttcccagaacattgcacgatgcctcctgaaaaacacaccttgactttagtcagatacatc

SEQ ID NO: 602640 - DNA, 75 bp, Homo sapiens
tagccctgtgttctgctggaaagtaattgaaggcctgaaacgcccatgtgccactgactaggaggcttccctgct

SEQ ID NO: 602641 - DNA, 138 bp, Homo sapiens
tggccccggcgcaggctgcccgtactgcccgtggcatgagggagccggaagagctgatgcccgactattgggaagaagttacctgcaactacagcaactccagactcatcaaaaacagaaatggacagcaggacaaag

SEQ ID NO: 602642 - DNA, 100 bp, Homo sapiens
gccacctgtggacgctcagacacctattaccagagttgctgaaggcccatacatagatgttgtgaaacttcaaactatgagatgtctttttgaagcatat

SEQ ID NO: 602643 - DNA, 90 bp, Homo sapiens
ctctgcgctggccgggggcgcgggcggcggcgccggcaggaaggcgacattgactacagcaccgtgctcctcggcatgctggtgacgcag

SEQ ID NO: 602644 - DNA, 75 bp, Homo sapiens
tcgccggagccgcgccccaccccgccagctccagagccacgtacggtgctggagaatctggtaaaagcaccattg

SEQ ID NO: 602645 - DNA, 98 bp, Homo sapiens
ttcaccagcgtgatcgaatgcgagaagccaaacaacgacctgagtaggtttcgcggctgcatgtggtggagtctatggcccttctccttgaatctgag

SEQ ID NO: 602646 - DNA, 100 bp, Homo sapiens
ggccaaggtgctccagcgcaccaacggcgaccggatccggttcattctggacgtgcttctgcccgaggagcacagaaaatggttctgccccctccacagc

SEQ ID NO: 602647 - DNA, 98 bp, Homo sapiens
aaaaacttcctcggctgtacaaagttttaaaggtcaactttgtagtgtgccaactctttgccttgctagcagccatttggtttcgaacttatctacat

SEQ ID NO: 602648 - DNA, 100 bp, Homo sapiens
tccattatggtgtcattacatgtgaaggctgcaagcacaatcctggaggaagagaaggctcagcaagaagagcgcatgaggatggagtccagaagacagg

SEQ ID NO: 602649 - DNA, 75 bp, Homo sapiens
ggcagtgccttctatgacatggccaggcaaaatcctgacagatgactttgcagacaaggagggtctggaaatggg

SEQ ID NO: 602650 - DNA, 100 bp, Homo sapiens
tctctgccattcgtgtctcaaggacaagcgcttcagcctcgttctctgtgagctgatctgtggatcgcggcgtgtcggattggacgactgattattggac

SEQ ID NO: 602651 - DNA, 76 bp, Homo sapiens
cacttaacaagaaagcatatgaactcgctttatacctgaggaggcccggctggacattttgaagattcattctcgg

SEQ ID NO: 602652 - DNA, 75 bp, Homo sapiens
gaacccatcgggcagctacacatcttgaaagagaagctcttcctgtgaggttttccctgatgaatttcacctcca

SEQ ID NO: 602653 - DNA, 75 bp, Homo sapiens
ccagttattaatgtgtgccatttatgtgatggcaaagtctgatgatttgaagaagagaagagagcctcacatctc

SEQ ID NO: 602654 - DNA, 75 bp, Homo sapiens
caactattttcgtcatctttggaacaaagggccatgtgaaactttctgactttggtctttgcacaggactgaaaa

SEQ ID NO: 602655 - DNA, 100 bp, Homo sapiens
gccgcttctagaccctactgcggtctcggatattgccgggagtggaagctggacacactatgtgacttgtatgaaaccctgaccatcacccaggcagtca

SEQ ID NO: 602656 - DNA, 83 bp, Homo sapiens
ctgctcctcatggcgcaggagcatctggagttccgcctgccggatggctggctgtggtgaaattgatcattcaataaacatgc

SEQ ID NO: 602657 - DNA, 78 bp, Homo sapiens
gaaggagtggagtctttggctggctatgcagacatctttctgaaacttgaggagaggctggagttctggatggagaaa

SEQ ID NO: 602658 - DNA, 74 bp, Homo sapiens
ggaggacgacgtttcttttctcatggtattggtcatcattgatgtgaagccgaaggacctagggctgcctacag

SEQ ID NO: 602659 - DNA, 50 bp, Homo sapiens
catcagcttgtaggagacagaggttgtgggctgcacactgcagaaagata

SEQ ID NO: 602660 - DNA, 82 bp, Homo sapiens
agacgtccaatctgagcgtgctgcggacggcgctgcggtacatccagaacccagtgacttgattgtaaaaatttacagagcg

SEQ ID NO: 602661 - DNA, 74 bp, Homo sapiens
ggatgaagttgattgactatggtctctccggctaccaggaagaaggtagataatgactataatgcccttcgaga

SEQ ID NO: 602662 - DNA, 101 bp, Homo sapiens
cctactcttgttcgtctgagaaaactgaagtttgccataaaagttgatggagattacctttggatgttcccttcggagaggcagctccttcacattcttaa

SEQ ID NO: 602663 - DNA, 75 bp, Homo sapiens
gccgctggcagccgcggatctcaccgccgctcaggggcttgctctcaattttgcgcaagttgaaaagtgcaccag

SEQ ID NO: 602664 - DNA, 88 bp, Homo sapiens
tacatcgcctcggtgcagggctccaccccgtcgcctcgacaggtagtcaaaccacacactccattaataaggtttcctgacagaagag

SEQ ID NO: 602665 - DNA, 96 bp, Homo sapiens
ataaatttgaccatggctgtagaacccagcagctcagaatccattaaaaggagagctgggaggaggttgcacgttttcaaaaaatacctaatggtg

SEQ ID NO: 602666 - DNA, 74 bp, Homo sapiens
cacgtattgtgccaatcacccttctgcagtgaatgtcctcacggaacacaggttgacatcatggacatatgtga

SEQ ID NO: 602667 - DNA, 129 bp, Homo sapiens
agctccaggcccagatcgcggagctcaagatgcagctggccaagaaagaggaggagctccaggccgccctggccagattttggaagatggcaaagttcatgacacccgtgatccaggacaacccctcag

SEQ ID NO: 602668 - DNA, 75 bp, Homo sapiens
ccgtgcgccgcagcccgggcccaggccccggcagcgcctgggacaaggcgatggatgactacagtgtgatcggcc

SEQ ID NO: 602669 - DNA, 97 bp, Homo sapiens
ccttcatgtcaagtcccttggagcaagtccaacagttgctggaatagtagtgaagtttagcaactgcaatggaaaaagaaaagtacaatatgagagc

SEQ ID NO: 602670 - DNA, 95 bp, Homo sapiens
ctgatgaaacttgggactctgcaatagatacatggagcccatcagaatggcagatggcttatgaaccacagatcaacaacccctccccgtcgtaa

SEQ ID NO: 602671 - DNA, 75 bp, Homo sapiens
tggaaccgcaggactgcagggtctctccaggctctgctctgaccaacgggggattgaacctgcacagtccagtga

SEQ ID NO: 602672 - DNA, 134 bp, Homo sapiens
cagcgtcctgaagcttttgatcaccattggctgggaaggaaaaacagaatcagctgttccctgcgaaagtgcgtcagcatttatcccgtttgccaaccattgatccgaataccaggaccctgcttttgtgtggg

SEQ ID NO: 602673 - DNA, 100 bp, Homo sapiens
gtccaaagttcttccagtcctcctaggcatcttattgatcctccagtcgagaggctgaggggatctggcggtggagcgctaggatcagacgcccccgcga

SEQ ID NO: 602674 - DNA, 75 bp, Homo sapiens
caggactggggacttccagctacacactaatgtgtgaaagcagccctctgggctttgcaaggtggcacttctgtt

SEQ ID NO: 602675 - DNA, 74 bp, Homo sapiens
cgggaacatggccctggagcggctctgctcggtcctcaaagaggttgacggatatattcagacgttacgacacg

SEQ ID NO: 602676 - DNA, 100 bp, Homo sapiens
ccccggggtccccgcgggaccgcggccactggacggatacctcggagtggcggaccacaagccatccttacccgacctgggatggagatcaccaaagatg

SEQ ID NO: 602677 - DNA, 74 bp, Homo sapiens
tactacagccagtcttctatgtttccacatcggtcagaaaaagatcagcctcgtcttacagcgtgactgcaaag

SEQ ID NO: 602678 - DNA, 82 bp, Homo sapiens
gccggtcgacgaccgccccgcgtcatgcggctcctcggctggtggacctgaaggagaagaaggagaaggtggaggagaaggc

SEQ ID NO: 602679 - DNA, 82 bp, Homo sapiens
cttcccgctgctgctcttctccaggctctgtgctcctggctaaatacaaaagcttgcaatgggacaaagtactgaggctgga

SEQ ID NO: 602680 - DNA, 51 bp, Homo sapiens
tgaagactaaagcatctgtcagaaaactccccagttaaagatctcagatga

SEQ ID NO: 602681 - DNA, 98 bp, Homo sapiens
atccgcccacagacctcaaattcaaaggaggaagccagtgaaggtggaggaaatgatcgtgtgcggaacctgcaaagtgaggtggagggagttaagaa

SEQ ID NO: 602682 - DNA, 82 bp, Homo sapiens
gctgcagcatggagagatagataaacggggggatatgagactttctactcggaatatcctgagtgttgcgtggatgtaaaac

SEQ ID NO: 602683 - DNA, 75 bp, Homo sapiens
ttttgttctctggcatggaaggggtcctcagagttactgggacaattggtgtgacctttgcagccatggttggag

SEQ ID NO: 602684 - DNA, 75 bp, Homo sapiens
gtggacttgaaagaagctgcagcggaggaaggcgagatgcctgggaaccactcacctccttctgtgccatgaggc

SEQ ID NO: 602685 - DNA, 100 bp, Homo sapiens
gatgggaaggcacagggagaagggataaccctacacccagaccccagcttccacagcgcggcacctgtacctccggggtggcgctggggttggctccatg

SEQ ID NO: 602686 - DNA, 80 bp, Homo sapiens
acggctcggcctataccattgactggagccgggagcccttgccgggatccagaaactcatcaaggagcccgccccagaca

SEQ ID NO: 602687 - DNA, 87 bp, Homo sapiens
aaagccaagaggaggacagttcgctacacagcaatgcatcgaggcacaagtgatccttatgtgaaatttaagctgaatgggaagacg

SEQ ID NO: 602688 - DNA, 75 bp, Homo sapiens
gacaatgtagaggatgacttctctaatcagttacggaactgatgaggagtttcaacagagacaggcggatttttt

SEQ ID NO: 602689 - DNA, 75 bp, Homo sapiens
ccagtgagactgaggacaatgataacagtttggggagacaccacgaaatcattctttgcctaagtgtaattccca

SEQ ID NO: 602690 - DNA, 50 bp, Homo sapiens
tggctcttcctcaatgcttgtgtgggaactcgaatcatttatgacagaaa

SEQ ID NO: 602691 - DNA, 82 bp, Homo sapiens
ccggcggctgctgctgctgctgacgctgctgctgcccggcctcgggctgaaactagaggaccgttctgtggtgccccgagat

SEQ ID NO: 602692 - DNA, 50 bp, Homo sapiens
cagtgagctccagcagcagctcaaggtcctaaaaacatcctgagtttctt

SEQ ID NO: 602693 - DNA, 128 bp, Homo sapiens
cgctcgctccgctcgtcccgctcgtcatggcctacccgggatacggaggagggggaggtggggaagacagggctccagctaccacaggacgggctctgggtatagccgttccagtcagggacagccgt

SEQ ID NO: 602694 - DNA, 75 bp, Homo sapiens
gtgcaccatgcgagaaggggagattgcccagttcctctgtgacatcaaggctaaagtaaataatgccagcctgat

SEQ ID NO: 602695 - DNA, 74 bp, Homo sapiens
ccggaagagtgtgttcgaggaggatagaccatgaagctgaaggaacttgagcggccagctgtccaggcatggag

SEQ ID NO: 602696 - DNA, 83 bp, Homo sapiens
ggaagccgcccgccccccaccgccgccccctccggcgtgttcatgcccccgggctgtcgcctggttgggcccggaaatgggac

SEQ ID NO: 602697 - DNA, 88 bp, Homo sapiens
ttttttctagcagcttttttgtcatataccagatcaaaaggaccagacaattccataaggaaggccaaaaatccccctggagactcca

SEQ ID NO: 602698 - DNA, 75 bp, Homo sapiens
tttggagtgtgcgtgcgcgccgagcggaacaagatcactcaaggtgaaggataatctactaataccagcactttg

SEQ ID NO: 602699 - DNA, 97 bp, Homo sapiens
ctcctcccgcctgccccctcagccctgtggctgggggcagagctcagatgccttcaattaagttgcagagttctgatggagagatatttgaagttga

SEQ ID NO: 602700 - DNA, 89 bp, Homo sapiens
tggaagcgattaatgataaaatttcatggagaagaaggccttgactacggaggggttgccagccctccttacagcctagaaaaaatgac

SEQ ID NO: 602701 - DNA, 83 bp, Homo sapiens
cagaggaggagcttgctgcagagtggacccagacatggagctgcgggaagaagcctggtctccggggccgctggattctgagg

SEQ ID NO: 602702 - DNA, 100 bp, Homo sapiens
ccctggcctcttgggatgcaaagcagatataatttctacagtagaatttaatcattctggagaattactagcaacaggagataaaggtggtagagttgtc

SEQ ID NO: 602703 - DNA, 97 bp, Homo sapiens
agggtgggcgcctttcgccgtggacgccgaccgtccgggacgagactggcggttcatggagagcaaggagaaggatcgccaggtgctggaggacttc

SEQ ID NO: 602704 - DNA, 50 bp, Homo sapiens
tggaggagcgatttgccatcgtgctgttactagaaaaggcagaagcccgt

SEQ ID NO: 602705 - DNA, 100 bp, Homo sapiens
gtgacagagtggagccatggctagaggtacactgaggaggggacggctccgtcttcacattgtgcacagatctgaggatgggattagcgaagctgtggag

SEQ ID NO: 602706 - DNA, 75 bp, Homo sapiens
tccaactttgcgacggaaatgtgtcatcgaaagccaggtgatggctggaccggcggaggaggcgggagcccattg

SEQ ID NO: 602707 - DNA, 87 bp, Homo sapiens
gatgacgggctttctgctgccgcccgcaagcagagggcgtggtcgagttctctctgtgtctgctgtttgccaagctggtcagttaca

SEQ ID NO: 602708 - DNA, 100 bp, Homo sapiens
gctggcgtgtctcctcctagtgcttcccgtctcagaggcaaactatgtgcctggcatcagaagggatgaaaatggaagaatcaaagctaataaaagcaaa

SEQ ID NO: 602709 - DNA, 83 bp, Homo sapiens
ctcgcgccggctatggccgtgccctggggctgagccctcagataacatccctgaggacctcagagaccctttctacgttgacc

SEQ ID NO: 602710 - DNA, 100 bp, Homo sapiens
cctgcccctcgttgatgagagcattcgaagtgacctcagcagggcatccagggtccctgatgggcctgggtgacattatctcacagcagctggtggagag

SEQ ID NO: 602711 - DNA, 80 bp, Homo sapiens
ggccaagaagcagctcctgcatctggcggaggagaagagagaagaagaaggaggttcctgctgtgccagaaacccttaag

SEQ ID NO: 602712 - DNA, 98 bp, Homo sapiens
agaaggtctgcttggtgacttggatacagaaatttcctgggctaaagttgcttctagaactgctggagttactgtttgacaagtttaatgctgtagcc

SEQ ID NO: 602713 - DNA, 50 bp, Homo sapiens
cgagtgcctgcaggatgtgagggagacaatgcagatcttcgtgaagactc

SEQ ID NO: 602714 - DNA, 50 bp, Homo sapiens
ctttggaagccatacatatgaaaatcagaatacctaaaggggcaggacct

SEQ ID NO: 602715 - DNA, 98 bp, Homo sapiens
gcaactttttagtaaatttactaggacagtgggccgttctactgtttctaaggcttatggtgcttcaaagacatttggaaaagctgcaggtcccagcc

SEQ ID NO: 602716 - DNA, 75 bp, Homo sapiens
cccttcttactgcgcaccctctctgaagcacaaaaagttaatcactttcccagggtatgttagagcccaccaagg

SEQ ID NO: 602717 - DNA, 100 bp, Homo sapiens
gcgacctccgtgggccacctcataggtgacaaacagcatgtttggtgcttcaagaaagaagtttgtagagggggtcgacagtgactaccatgacgaaaac

SEQ ID NO: 602718 - DNA, 98 bp, Homo sapiens
gtcagatgtctggtccttcggggtgaccctgtatgagctgctgacgcactgtgactccagccagagcccccccacgaaaccagcctggacaccaagtc

SEQ ID NO: 602719 - DNA, 90 bp, Homo sapiens
aatgggtgccggaatctgtctcctgatcatcattcaggtttatcatgttcattccgatagctatgagacagaaaaccagcattacggaag

SEQ ID NO: 602720 - DNA, 90 bp, Homo sapiens
gaagaatcttctggtggcgaagaagaagatgaagatgagaacattgaggaatttagtggttatgttcaacaagtaaaatatgcaatgaca

SEQ ID NO: 602721 - DNA, 80 bp, Homo sapiens
ccttccgccttcttctgcaggagtcagattgagaggatccagaatccagatctctggaatagctaccaggcaaagaaaaa

SEQ ID NO: 602722 - DNA, 75 bp, Homo sapiens
ttcagttctttggaattccattcttttccttattcttctgatgtggatccagggttcggcaaaagcagaacaaat

SEQ ID NO: 602723 - DNA, 50 bp, Homo sapiens
ccgggagatccgagagctcttcagggatcaaaggaagcagttccaggtac

SEQ ID NO: 602724 - DNA, 75 bp, Homo sapiens
gactcccatgcatcggctaatagcccggagacaagcgtggccttggataagggctgctcccaattccgcctggcc

SEQ ID NO: 602725 - DNA, 115 bp, Homo sapiens
caagctcatcgacttcggttcgggtgcgctgctcaaggacacggtctacaccgacttcgacgctggtcagtgagaaggtcggaggggccgaggggaccaagctggatgatgactt

SEQ ID NO: 602726 - DNA, 100 bp, Homo sapiens
aaccaagataccattttgctgctttggaaaagacctattatgagaggcttccatatcggcggaaccataatcatatttggcaggtattaatgtatgcaag

SEQ ID NO: 602727 - DNA, 75 bp, Homo sapiens
gatgatgctcagtttgatgcgtcacactacgacagtgagaaaggaggccataaaattttgagtagaaaaatccag

SEQ ID NO: 602728 - DNA, 96 bp, Homo sapiens
gtgatcagtgcggtgcacagttttcgaaggaggatgccctggagacacacaggcagacccatactggtggatcacacaataataatgtacttgatt

SEQ ID NO: 602729 - DNA, 100 bp, Homo sapiens
tcctggtgcgggagaaggccactggccgctactacgccatgaagatcctgcggaaggaagtcatcattgccaaggctttgagcataagatcacagtccag

SEQ ID NO: 602730 - DNA, 100 bp, Homo sapiens
aaggattccaagtaactcttatttggccacgtgcgagcgagggtttgcagcaatggaagaaacgcaccagaagaagattgaagatctccagaggcagcac

SEQ ID NO: 602731 - DNA, 50 bp, Homo sapiens
atgtatctaaacttggcaccaagtatgaactgctggtgaggacactggag

SEQ ID NO: 602732 - DNA, 50 bp, Homo sapiens
cccgagaaaccgcagcactacaccacacgtcacatggagatgggcgtcaa

SEQ ID NO: 602733 - DNA, 100 bp, Homo sapiens
aaacaagttcttggcaagagaggcatcctccttgaagtatttggctgaggagttttcaatcccacctcagagtttgaagaccccttagttggtgaagata

SEQ ID NO: 602734 - DNA, 74 bp, Homo sapiens
gataaaattcaggatttcttaaaggatagccaattgcagtttgaggctcactcgactatgacatcaacattgag

SEQ ID NO: 602735 - DNA, 82 bp, Homo sapiens
ccgaccacttgcggcctgagtatgaaagaagcttccggttctgaggtcctggaggtgccatttccctctctgttgaagcaaa

SEQ ID NO: 602736 - DNA, 75 bp, Homo sapiens
ctaatacccatctttactggcatcctaaagacgaccggcgcgttctggcagacgtggaaggactttgaggtccgg

SEQ ID NO: 602737 - DNA, 74 bp, Homo sapiens
ctccgacttatttctgtgggcagacattaacattcagtcagcagtcagcagaggaccttgcccgagtacctgcc

SEQ ID NO: 602738 - DNA, 75 bp, Homo sapiens
gaccccacctccataccccgcggcatccctctggacgcagcccagtgtgccatcataatgtttgatgtaacatcg

SEQ ID NO: 602739 - DNA, 90 bp, Homo sapiens
gagatctacaaccttggagcccagagccacgtcaaaaggatgatgtggacctggaagccctggtgaacgatatgaatgcatccctggaga

SEQ ID NO: 602740 - DNA, 75 bp, Homo sapiens
cggttcgggtgcgctgctcaaggacacggtctacaccgacttcgacgctgctgatgcaaggaatcccctgggctc

SEQ ID NO: 602741 - DNA, 83 bp, Homo sapiens
ccgcgttcccagcccgggtccccgcgttcacagccccagcgcaggtgtcccgacccaggctaagcttgagcatggctgagcag

SEQ ID NO: 602742 - DNA, 97 bp, Homo sapiens
atttccacagaaggactgggatgatacaccttttccacagggaattgagttgtgtagtgactatgacttggaatttggaactgagtgtttgcaattg

SEQ ID NO: 602743 - DNA, 99 bp, Homo sapiens
aggggccgggccggctggaggagcacagtgcggattctatccctcatccacctacatcaggcaactggagagcaaagtgaggctgctggagggtgacaa

SEQ ID NO: 602744 - DNA, 75 bp, Homo sapiens
gcatagagaatgagatagccgtcctgagaaaatggcccactgcgtgaccttggttcagctgtccatttcctgtga

SEQ ID NO: 602745 - DNA, 100 bp, Homo sapiens
cccctcggagtgctggccagccagactgctgtcgtcaagcttgccactcagcctcacaggccaaagcatcagcaccagaacgcacacccagcccagcccc

SEQ ID NO: 602746 - DNA, 51 bp, Homo sapiens
gcggcgctcgctcaaggaactgatcccggtcctctgtgtgggaacccgctg

SEQ ID NO: 602747 - DNA, 100 bp, Homo sapiens
acagctaagacgccaggtaccccggaagcctagaaatgcaattctgtggtgttcttggtcacacatttatggagtttctgaagggcagtggagattactg

SEQ ID NO: 602748 - DNA, 100 bp, Homo sapiens
tttgaatccttccttgatgatgaagagaaagttactgtggcccatgtcctaaaaactggatatgttacaaaaataactgctaccaattttttgatgagag

SEQ ID NO: 602749 - DNA, 75 bp, Homo sapiens
gctccgggaccggccgaaaggcgaggaaccggacagtcattttgtttactcattcagccctgttgcaggtcccaa

SEQ ID NO: 602750 - DNA, 100 bp, Homo sapiens
caggcgcagctggacctcattgagaaggactatgctgaccgagaggcacgagaactctggtcccggctacaggtgaaaggtgtagcagtcactcggccta

SEQ ID NO: 602751 - DNA, 76 bp, Homo sapiens
gaggccttccagctgtttgaccgaacagctcctgcccctcctaaagctgaagccaaagcgaaggctttaaaggcca

SEQ ID NO: 602752 - DNA, 82 bp, Homo sapiens
cagacctgtcaccaggagacaaggtgcctggagcaattctgtggtgttcttggtcacacatttatggagtttctgaagggca

SEQ ID NO: 602753 - DNA, 100 bp, Homo sapiens
caggtcattgccagcggttcagaggactgcacggtcatgatcaaactcttcattgaagtactcatcaggcgtgatggctgtggggttgtttgcagtagca

SEQ ID NO: 602754 - DNA, 98 bp, Homo sapiens
ggagcggcccgcgcctgggctgccggcacttcgcggcagaatgtcgtactctcaggaggctccaccatgttcagggatttcggacgccgactgcagag

SEQ ID NO: 602755 - DNA, 95 bp, Homo sapiens
aacaaaaatgaagcttggtgtacaggtggtcattacagaccctgaaaaactggaccaaattagacagagaagaagcctgagaagatgatgcacag

SEQ ID NO: 602756 - DNA, 101 bp, Homo sapiens
gccgaagataccagcagacgatggggagcttgcagcccctttgccactcagatgagagtccggagtgttgtcatgtgaagcctgccatccaggaacctcca

SEQ ID NO: 602757 - DNA, 100 bp, Homo sapiens
ggaataccgtggagctcccagaggaggagaacactcctgagaagagggtggaccggatctttgccatgatggataagcaacacgggattcccatcccggt

SEQ ID NO: 602758 - DNA, 82 bp, Homo sapiens
ttttaccgtgacaagaagtacgaggaagtgagttcgtgtttagtaggagcacagtagctgtttggggaacgaccttaagtga

SEQ ID NO: 602759 - DNA, 82 bp, Homo sapiens
tgccctcccgctcggccccgccagcagcactgtggaggccgtcctcgacaatgcagatcttcgtgaagactctgactggtaa

SEQ ID NO: 602760 - DNA, 75 bp, Homo sapiens
agatcagatgactaagcagcatcaaaccagattagatttccatgccattgcagtgtcaactaggcctcagttact

SEQ ID NO: 602761 - DNA, 122 bp, Homo sapiens
acagaagagcggggtcggggccggctgaccaggaacctgggcgagcagcggcgggggcccgaggggtgaattatgtaacctcattacgctggatgtagctcacaatcaacttgaacaccttc

SEQ ID NO: 602762 - DNA, 101 bp, Homo sapiens
tcgccgcgtccaagtcggtgactgcccacttggccgcgaagtggcccgagaccccgctgctgctggaggcaaggttatatacaggcatgtagaggacttat

SEQ ID NO: 602763 - DNA, 100 bp, Homo sapiens
caagaatgctcgcgccacgctcagcagcatcagacacatgatccgcaagaacaagtaccgccccgacctgcgcatgccaaagcagaagtttgagaggccc

SEQ ID NO: 602764 - DNA, 75 bp, Homo sapiens
gcaaggatggcctttcctaccagaatgaggaaaatggggagcaggaggctgacaatgaggtagacgaagaagagg

SEQ ID NO: 602765 - DNA, 75 bp, Homo sapiens
tgaaacatttatttccagtccaaagtgacagattgactgggatcccctcgcacatcctcaacagctccccatcag

SEQ ID NO: 602766 - DNA, 97 bp, Homo sapiens
aacagacaagacacttttcagaaagacaggaactttccgctgtactttttgccatacagaggtagaagaggatgaatcagcaatgcccaaaaaagat

SEQ ID NO: 602767 - DNA, 90 bp, Homo sapiens
aggaaatgaagggtattgccgctgttactgatatacctttaggtgtatgcaacagcgttattgcaacaggctaacgaaaacagacaaaat

SEQ ID NO: 602768 - DNA, 75 bp, Homo sapiens
gggggatggttccatcatggcgtcaatgcagtttaaggccaatcctcctgctgtgacttttgaactaactgggga

SEQ ID NO: 602769 - DNA, 75 bp, Homo sapiens
gttggaagcagccgatccagcctgcggagcctgtggggcagacctaccagcagctcaatggccttcccaaagaag

SEQ ID NO: 602770 - DNA, 96 bp, Homo sapiens
attgaagcctgtgatgtgtgtctgaaggaggatgataaagcaatactatgaggtaccaataacaatgaagtctgtgtttgatctgatcgatacttt

SEQ ID NO: 602771 - DNA, 100 bp, Homo sapiens
gtcggactggtctgtctgagggagatggtgacaagctcaaggcctgcgaggatatggctttagttgcccctgaagctccttcagaacaagccagaagagt

SEQ ID NO: 602772 - DNA, 100 bp, Homo sapiens
acagcggctgaaatggaagcatatgttctagaagacattcttgagctctacgaactcgacggggaccccaagaggaaggaattcctggatgacttgttca

SEQ ID NO: 602773 - DNA, 82 bp, Homo sapiens
cagctgccccctgtgtggcaaacctttcttgagctcaggacggcggctccctggaccaggtgctgaaagaggccaagaggat

SEQ ID NO: 602774 - DNA, 98 bp, Homo sapiens
aggccattagatccaaagccattcccaaattatagagctaattacaactttcggggcatgtacaatcagagcccttcgccacaagaagatgggcagat

SEQ ID NO: 602775 - DNA, 100 bp, Homo sapiens
tggaaaaacaacatacggtggggcagcagctgctgtaagacagtctaaactacgaaatacaccttatcaggtgacttggcatgaaattgcaaggcctcag

SEQ ID NO: 602776 - DNA, 98 bp, Homo sapiens
agagagggcctgggagcttgctgcagcttcagactgtgccctgtccacggtgcctcctgcatgtcctgctgccctgagctgtcccgagctaggtgaca

SEQ ID NO: 602777 - DNA, 90 bp, Homo sapiens
cttcgacatactctccagcttcaatatccggctgctttgatgaacctgggagccattctgcacctcaatggcagactccagaaggccgag

SEQ ID NO: 602778 - DNA, 99 bp, Homo sapiens
caccaagatgacactccacgccacccggggggctgcactcctctcttgggtctagtgacggagcccgcgcgcggcgccaccatgcggcagaaggcggta

SEQ ID NO: 602779 - DNA, 75 bp, Homo sapiens
tcttctggatgaagatgaaccacagcttaagatgcttcaggactgccccaaggcccgcagggaggtggagctgca

SEQ ID NO: 602780 - DNA, 100 bp, Homo sapiens
gaggatgccaaccgcgccatgcagactggtgtcaccgggatcatgattgcccggcatgggttcaggagcggctgccactggccatgcagacagagcgagg

SEQ ID NO: 602781 - DNA, 50 bp, Homo sapiens
ttggcttcaatgtcatattttgggtgtacatcggtgagctcccgcaggac

SEQ ID NO: 602782 - DNA, 96 bp, Homo sapiens
aaataccagtatggtggactgaattctggacgtcctgtcactccacctcgaacagctaatccgccgaagaaaaggagtagctcggagaggaggaag

SEQ ID NO: 602783 - DNA, 90 bp, Homo sapiens
aagaagtagttataaaagcaaacacaggattcaccacagtacttcacatcgtcgttcacatggggtgattgcatactcggaacatcgtta

SEQ ID NO: 602784 - DNA, 100 bp, Homo sapiens
ggagttcttacaacatggcagacattgacaagccccctcttctctcctggaggtcagccggccccttgtggctctcaggccagctggaccaagtctcaga

SEQ ID NO: 602785 - DNA, 87 bp, Homo sapiens
cgccgggcgacgacgaggaggaggcggccgccgcagccggggcccccgccgccgccggagcgatctatccatactaatggaaatgta

SEQ ID NO: 602786 - DNA, 76 bp, Homo sapiens
aggataagggtgacagcaacagctcggcgggctggaaggttttgatgatgatggttcagaatttcatgaacatata

SEQ ID NO: 602787 - DNA, 98 bp, Homo sapiens
gggggccggagaggagcatgaatggagcaaaatggcggatcatgtgcagaaaatgacagatggcgagacctggacaggaaatgccctcttcagattga

SEQ ID NO: 602788 - DNA, 100 bp, Homo sapiens
tgccctggcactgagcggccgcggccatggcgtacgcctatctcttcaagtacatcataatcggcgacacagttagagatgtttatgattacttccgagc

SEQ ID NO: 602789 - DNA, 75 bp, Homo sapiens
gaagatccaggtcccaactggaagctgaagggaaacactactatgaagtatcctgtcatgaccaagggttatgca

SEQ ID NO: 602790 - DNA, 100 bp, Homo sapiens
atccctcaaagtacatccgcttcatctataaccgagtggtcttggagcatgaggaggtccgggcagggccatgctatgatagtggaagcttatccaaaat

SEQ ID NO: 602791 - DNA, 83 bp, Homo sapiens
ccatttcaaagaacagaatgctaaggaagctgtggcaacaatattttggtgtttaagcttggaggaacatccttatctctcag

SEQ ID NO: 602792 - DNA, 100 bp, Homo sapiens
cgcggacgctggcgctcccggggggctcggacccgcccccgactcgccgagccagatgagcagcaccagcagtaagagggctccgaccacggcaacccag

SEQ ID NO: 602793 - DNA, 98 bp, Homo sapiens
ggagaacaaatccaagattagcacaggacacattcagctaacgtattttagcaggtggagtgaggttgaagattcctgtgacagcgatgccatagaga

SEQ ID NO: 602794 - DNA, 71 bp, Homo sapiens
tggatgttctcatcgtccctgccaactttccaagtctggggatggccagggctggtggactaggcctcaat

SEQ ID NO: 602795 - DNA, 100 bp, Homo sapiens
aggaaccaggatccgaacccgcctccccagtatctccagatgaaatggccactgcttgatgtccaggcagggagcctccagagtagacaagccctcaagg

SEQ ID NO: 602796 - DNA, 100 bp, Homo sapiens
cttcgccaccatcccgcaggacacggtgaccgaggaacaaggagtgtcctacctgccgaaagaagctggtgtccaagcgatccctacggccagaccccaa

SEQ ID NO: 602797 - DNA, 82 bp, Homo sapiens
caacgcgagtgggagcaccaggatctcgggctcggaacgagactgcacggggccagcagcctcccccgatgggtcgtcagca

SEQ ID NO: 602798 - DNA, 113 bp, Homo sapiens
ccggaatctaaaaagccctcagtaccagagacagaagcagatggattcgtccttttagttgggacagaaataacccagagccctggaacaaactgggtcccaatgatcaatac

SEQ ID NO: 602799 - DNA, 100 bp, Homo sapiens
aggaagtaggggaggcaatttgtactgatcctctggtgtccaaaatttcctttactggttcaacaactacaggaaagattactcttgtctctgctgctcc

SEQ ID NO: 602800 - DNA, 100 bp, Homo sapiens
gccgcgcgttgctgctgctgccggtcgagcaggtatgtcaccacgccgactgccagcagctgcaccgccgggggcccctcaacctctgcgaggcctgtga

SEQ ID NO: 602801 - DNA, 100 bp, Homo sapiens
ctcaaggaaacctttccaacacagatgtccaagctgccaaagtcactcaagggaaaggattaatgccagatggtaccagcagatttacttgcaaaggaaa

SEQ ID NO: 602802 - DNA, 101 bp, Homo sapiens
cgcaccaccagctggatcgacccgcgggacagtgccggtggtggtgtgcacattgagccccggtatagacagttcccccagctgaccagatcccaggtgtt

SEQ ID NO: 602803 - DNA, 75 bp, Homo sapiens
ctggtggtgaatcctccatagtctggaatcattgcaatttagagatgtggctgtagaattctctctggaggagtg

SEQ ID NO: 602804 - DNA, 50 bp, Homo sapiens
tcgaagacgggatactgctcagcaaggtaaagaagcttgtgtaatcgcag

SEQ ID NO: 602805 - DNA, 98 bp, Homo sapiens
gggaacgattgggctgagcagaggacgacatgttgcttttcgtggaggggacatcacccagaagggctatgaaaagaaaaggtccaaactcctatctc

SEQ ID NO: 602806 - DNA, 100 bp, Homo sapiens
cgcggatccccaagcccgccacgccgcccagcccggccccgcccgcgccggaagagccacgccgtgtactaatggtcacttgatgtgcgctggctgtttt

SEQ ID NO: 602807 - DNA, 111 bp, Homo sapiens
accatttgttgaggaaggtgtccttcttaaagttgtcacagctgctaaggaacacggggttggaagaatgtgggttaacgagcacctgctgtaaggatctcgcgtctgttc

SEQ ID NO: 602808 - DNA, 100 bp, Homo sapiens
ctctacgcagaacccgggagtaggagactcagaatcgaatctcttctccctccccttcttgaaaggagaagatgagtatgccaacgttgatgccattgtt

SEQ ID NO: 602809 - DNA, 118 bp, Homo sapiens
cagtacgaggagattgcccagaggagcaaggctgaggctgaagccctgtaccagaccaaggtccagcatcctttgaagcatgagttcttaccagcagaagcagacctttaccccacca

SEQ ID NO: 602810 - DNA, 82 bp, Homo sapiens
gtggagcccaaagacccctggagacatgtgtctccagaacgctatagctatggcacctccagctcttcaaagaggacagagg

SEQ ID NO: 602811 - DNA, 90 bp, Homo sapiens
tgaggcgctgcctgagcagcaatacaagccagctgccatgttgtgagcacataccacatagctccatggagatgcccatgtgactgtgat

SEQ ID NO: 602812 - DNA, 100 bp, Homo sapiens
ggagttcttgctgcccgaactgtttccatctcagtccagattatcagagcctgtggtctgcaagcagcagccaacaacacagtcactcctggcggcaaac

SEQ ID NO: 602813 - DNA, 100 bp, Homo sapiens
aaatctaaacaaggatctattgactgtgtgtgctgacttgataagaggcgcaaaagaaaagaatctcaaagtgaaaggaccagttcgaatgcctaccaag

SEQ ID NO: 602814 - DNA, 88 bp, Homo sapiens
aatcatattatagatggagtaaaggacatccccttgaatttttacggaatcagcctcagtttcaacagatgagacaaattattcagca

SEQ ID NO: 602815 - DNA, 98 bp, Homo sapiens
ggacccccctacccacgctgaacgagagggacacggagcaggtcctggctataagtcaccatggcacagcaagctgccgataagtatctctatgtgga

SEQ ID NO: 602816 - DNA, 96 bp, Homo sapiens
cagcccccaagtagctgggacctacagcaatgccctgccctaaggaagacactcccaattctgtttgggagcctgcgaaggcaaaatatgtcttta

SEQ ID NO: 602817 - DNA, 99 bp, Homo sapiens
gctccctggctggccagcctctgcttggcatccccttgctggacagtggctgtgtctcggaagggtgctgacctggaccgggagaagaaggctgccgag

SEQ ID NO: 602818 - DNA, 50 bp, Homo sapiens
tctttcgggaaagctctctggggcaggagctcccagctcctccagcagcc

SEQ ID NO: 602819 - DNA, 100 bp, Homo sapiens
agagtgaggagccagacgacaagcacacactatggcgctgaaacggattaataaggtatatgactgatgggatgttacttcgtgaagctatgaatgatcc

SEQ ID NO: 602820 - DNA, 75 bp, Homo sapiens
tatttggctgaggagttttcaatcccatacatccagcagtggtcattcgacaacgaaagtcataccgtagaaaag

SEQ ID NO: 602821 - DNA, 75 bp, Homo sapiens
gtccctcacatccgatgcaccctttttgtcagattatcaggatgagggaaaatcagttggagtggaaatgaacac

SEQ ID NO: 602822 - DNA, 75 bp, Homo sapiens
cctcttgttggagttacatctactcctggaacagggtgcccgggaaacatttgagaattactaccgaaaacagag

SEQ ID NO: 602823 - DNA, 73 bp, Homo sapiens
agccctttgcacctcgcagctaaaaacggccacatcgacatcatcagaggatggttagaacgagagagcaggt

SEQ ID NO: 602824 - DNA, 101 bp, Homo sapiens
ctgagtttcccacttgattacccgttaagtcccccaaagatgagatttacctgtgagatgtttcatcccaacagtgactcctgcacctgcgccggctcctg

SEQ ID NO: 602825 - DNA, 98 bp, Homo sapiens
ggagatcctcagaggggagacccctcgggtggaagaagtggggccatacacctacagtaatggcatagaggagcctttggaagaatcctctcatgaac

SEQ ID NO: 602826 - DNA, 88 bp, Homo sapiens
cggcagcctagcgcaatgaggcgggcagcactgcggcgaggattaaatccaccacacagggtgaaatctatctccatgacaacattca

SEQ ID NO: 602827 - DNA, 80 bp, Homo sapiens
aagctgcggcgagtcctgagcggccaggacgacgaggagcagggcctgactgcgcaggacatggatttgattgacatact

SEQ ID NO: 602828 - DNA, 100 bp, Homo sapiens
atgacatcagctcccaagggctctgtgctgcaggaagcaaaactgtaggtctctaattaacagaagatggcaaagcccagccacagcagctatgtccttc

SEQ ID NO: 602829 - DNA, 80 bp, Homo sapiens
gagctccaggccgtgcgcatgtttgctgactacctcgcccacgagagtcggagatgatatcatcaagttgaatcgaaagg

SEQ ID NO: 602830 - DNA, 95 bp, Homo sapiens
ccaatttggagatgtacatcaaggcatttatatgagtccagcctgtctcctccctcctacacatttccagctcctgctgcagttattcctacaga

SEQ ID NO: 602831 - DNA, 74 bp, Homo sapiens
ttcgcggagctggaatgactggcaacccagagtatgtagagaagcccttgaagctggtcctcaaagtaggaggg

SEQ ID NO: 602832 - DNA, 75 bp, Homo sapiens
cggcgagcagtctcaggcctttagtgatgatggtgaattttgaagtcttcatcagtatatccatattaaaacgag

SEQ ID NO: 602833 - DNA, 88 bp, Homo sapiens
aagcatattttcacatgggaaaagccaacctggccctgaagaactacagtgtggggccttggacaagttgttactgactatgttcatg

SEQ ID NO: 602834 - DNA, 75 bp, Homo sapiens
gggagatcctgatgagggcagcaaaggcatctggtgaatgctggagtcctcaccgtccgagatgctgggagctgg

SEQ ID NO: 602835 - DNA, 88 bp, Homo sapiens
tggccgtcgggcaggcgctacgctaggacggagtacgagagggcctccaaagtggaccagtttgtgacgcgcttcctgctgcgggaga

SEQ ID NO: 602836 - DNA, 100 bp, Homo sapiens
tacgggggtggtgccgcgctcctggccccgcgcgggcggacggcggaggcgcctcccaggtccttctggcactcctctggtggaccgcccccatcggcca

SEQ ID NO: 602837 - DNA, 100 bp, Homo sapiens
aaagggacccaaaaatgtcttgtattagagtcacaattgatccgtcatgttcttcctcaaattttttccatattgtaaaatcaaacttaaatcattagaa

SEQ ID NO: 602838 - DNA, 100 bp, Homo sapiens
taggtgtatcaagtaatggtgcaaagcctgaaactgttggcaagagtagcaagatgctgcagcacattgactatagaatgagatgtatcctgcaagatgg

SEQ ID NO: 602839 - DNA, 96 bp, Homo sapiens
gctgggacgtggagtgcgatacgtgcgccatctgcagggtccaggtgatgggatgttgcttcagagtgtgaagtcaaatgcatgccaacattccag

SEQ ID NO: 602840 - DNA, 121 bp, Homo sapiens
taaagatggagttcgacagattcctatagaaagcattcctggaattaagcatatgctcgaattggcaactcctacttcaaagaagaaaagtacaaggatgccatccatttctataacaagt

SEQ ID NO: 602841 - DNA, 101 bp, Homo sapiens
cctgaaaagctaccccccaaagtcctggagctgtgaatttcgctaaggagtttgtgatcagtgatcggaaggagctggaggaagatttcatcaagagcgag

SEQ ID NO: 602842 - DNA, 98 bp, Homo sapiens
gcaaaagatcagcgaggagcagcagcagctccagcaggcgctggctcctgctcagtgacaccacagccaaagccctatgggaagctttactgaacact

SEQ ID NO: 602843 - DNA, 75 bp, Homo sapiens
aacccagaaccgggagaaatggatctactactgcaatggccatggagtgtacctcacagccttctaggatctcca

SEQ ID NO: 602844 - DNA, 75 bp, Homo sapiens
accttgccagagacctggcaaatgacatcatgacactggttgaaggggcccggccaggactcggggaagggtggc

SEQ ID NO: 602845 - DNA, 100 bp, Homo sapiens
gaacgtcccgctggatctgacccgagttatttctcaaactctgaggctgcggagttcacacattgaaatctgtcatctttttcagagagaaactttcggt

SEQ ID NO: 602846 - DNA, 110 bp, Homo sapiens
aaccgccggggacgaaacaataaagaccggaagctgagtttttatccgaatcaaagatcaactcccactgaggacaaatggacctgtaattccgggtgtgacgagagaac

SEQ ID NO: 602847 - DNA, 90 bp, Homo sapiens
gattggctcttcctcaatgcttgtgtggcattgtcgtggaagttctccgaatcctggttttgattggtcagattcttttttcactagcgg

SEQ ID NO: 602848 - DNA, 97 bp, Homo sapiens
gaacaccgcgccaggcgcgctgccgcccgacacactggccgagcttcaaggactgcatcccgcgctccttccgccggcatatccggcagcacagcgc

SEQ ID NO: 602849 - DNA, 100 bp, Homo sapiens
cagcgctgcagtgaattttccccccaaactgcaataagccgccttccaagccttttatgtcacctcggtaccctggaggtccaaggcccccattgaggat

SEQ ID NO: 602850 - DNA, 75 bp, Homo sapiens
gcaatactctgtcctgcagtaggacgtggtgggtcctctggtgcgaaattccggatttccttgggtcttccggta

SEQ ID NO: 602851 - DNA, 80 bp, Homo sapiens
atgggaaacttacactgctgcataatggagaacctctctacattccagtaacccaggccataggaaaaggatacagagta

SEQ ID NO: 602852 - DNA, 82 bp, Homo sapiens
ccgcccgcttcgatcgcctcgcgccggctgctctttccggaaccgggctgtgggtcggcccaaggggaagctgggcccggcc

SEQ ID NO: 602853 - DNA, 90 bp, Homo sapiens
tcatattatgtagaatacttgggtgacatctgcctgagagatctccaagaattacagctgagatctgtatctgtggacctgaatgttgat

SEQ ID NO: 602854 - DNA, 100 bp, Homo sapiens
ccactgttcccccaggatcactcaagaccctgtgacttgtggtcactgatgagtggaccaagtgaaggcacgtgtggttctcaaatataggcattctgat

SEQ ID NO: 602855 - DNA, 83 bp, Homo sapiens
cgtgccccaccatgtcagacgcagccgtagacaccagctccgaaatcaccaccaaggctctgtgtgctccgggatggagcagg

SEQ ID NO: 602856 - DNA, 98 bp, Homo sapiens
gagatggtgctttgtcagccctgattgagcccaagaaaaccccctgcatacacaggtgctggagaatctggtaaaagcaccattgtgaagcagatgag

SEQ ID NO: 602857 - DNA, 98 bp, Homo sapiens
tgctatagtatacatgcatcgattctacatgattcagtccttcacacagttccctggaaatgatacttttgtggaactctatgggaacaatgcagcag

SEQ ID NO: 602858 - DNA, 100 bp, Homo sapiens
gggaatgattctgatgatgatgatgagggtctaaaattcccaggactccacagctttgcaccagataagcctggaggaatactaatgatggatctaaaag

SEQ ID NO: 602859 - DNA, 99 bp, Homo sapiens
caattatgtgcctgccttgaagctgaaccaaactctgaagattaatgttatgtatcggttttatggagaacctgtaataaaagcatgtattgaaaatgg

SEQ ID NO: 602860 - DNA, 75 bp, Homo sapiens
gagcagttagagaagtacatgcaagctgaggagaaggcagagcccccccaggctatgaatgccctgatgcggttg

SEQ ID NO: 602861 - DNA, 100 bp, Homo sapiens
cccaacttctgcttcttgcagtgtaccagcgcatacccgctccagcctgaggacgtcaacctgcgggtcatctcggtgatctttgcagagctgtttcaac

SEQ ID NO: 602862 - DNA, 75 bp, Homo sapiens
cacgattcagtcccctggactgtagataaagaccctttcttgccaggtctgctcaccaggtggccagataccgcc

SEQ ID NO: 602863 - DNA, 75 bp, Homo sapiens
tgtggacaaggtcgtggcctgcacctcggagatcacccctgacctgctacctcggccgccccggttgcttctatt

SEQ ID NO: 602864 - DNA, 75 bp, Homo sapiens
tctgcctccctgccccagcccatcctctctaaccaagacatctttccaggaacagcgtgaggaggacagaagcac

SEQ ID NO: 602865 - DNA, 100 bp, Homo sapiens
ttatgaagaggctcagaagcgcctcaagatggccgaggaagaccggaaggccatgtttgcagagcagtctctgatgaagaatgccataaaaacatcggag

SEQ ID NO: 602866 - DNA, 75 bp, Homo sapiens
caatttaaagatcctctccaagttggtccaggcgcaatgttcagcgtatttgaggaaatcacaagaattgtagtt

SEQ ID NO: 602867 - DNA, 75 bp, Homo sapiens
ctcaatgaccatggcaagaactggcgtcacgtttacaaggaatccagacgctctgcagtgtcccatcgtcttatg

SEQ ID NO: 602868 - DNA, 100 bp, Homo sapiens
actggggagtgcgctggtcggaagttgggtatccctggtcagtaagaattatgagattgaacggactattgttcagctagaaaatgaaatctatcaaatt

SEQ ID NO: 602869 - DNA, 100 bp, Homo sapiens
acgatgaggtcccagaggaggggccgggggccccagccagagtgatgaccaagaaggacacagcattgttggttttgccatgtactattttacctatgac

SEQ ID NO: 602870 - DNA, 88 bp, Homo sapiens
acgccgtggcagcctgaacggagtgtgcgacggattgggaggttggtgttcgaggaagagacattgttgttcttggtgtggagaagaa

SEQ ID NO: 602871 - DNA, 75 bp, Homo sapiens
gtccgtgtcaccgccggaacctggcgcagtgcacagccagagaacaacacatcacacacaggaaacagttgtgct

SEQ ID NO: 602872 - DNA, 75 bp, Homo sapiens
ttcctcttgacactgcagctgcagtcaacctcttccccaatttcaatgcgcaaggagtaaataatgctgaaaaat

SEQ ID NO: 602873 - DNA, 100 bp, Homo sapiens
gttaatccttattcgagaattccagtctcctgatgaggaaatgaaaaaaattgtgctgaaggtggtatgcagatcttcgtgaagaccctgaccggcaaga

SEQ ID NO: 602874 - DNA, 75 bp, Homo sapiens
cccgcccaacgcccgactctactggagcgctgctcagcgctttcgttcagctgtgccacatttccacgacgctgg

SEQ ID NO: 602875 - DNA, 100 bp, Homo sapiens
cggcgggactgcactcgagtgtccagacctgctcgatggtccctccagctacaaggtgggcaccatggcggagaagtttgactgccactactgcagggat

SEQ ID NO: 602876 - DNA, 98 bp, Homo sapiens
ttctccaaataccagctcgacaaagatggggttgtcctctttaagaagatccaaggattaatgtcgtgcttgctggtggccacgttgtgccccgagat

SEQ ID NO: 602877 - DNA, 98 bp, Homo sapiens
gagaggcaccgctggaacactaatgagttttcggctttgtgagaaaccttaccatcaaacacgatggccagcaacgttaccaacaagacagatcctcg

SEQ ID NO: 602878 - DNA, 100 bp, Homo sapiens
ccgcgtcccgctcgctgggagagaggtacctctccttttccctctccctttccctaaggtacattttgaccaatttaaagaagcattaatactcatcttg

SEQ ID NO: 602879 - DNA, 100 bp, Homo sapiens
agagtcaggaacaagaaaatcatgctacattagttgtttttcagaggcaccaaataatgtcatctgaaatgttgccagcatttattgaaacttctaatgt

SEQ ID NO: 602880 - DNA, 100 bp, Homo sapiens
ggggaaacacaaagccggctacgcgctgcgagaataccctctaccatctgctttggtcagggtgccgctcgaggatttaaaagcaacaagaagaaaacca

SEQ ID NO: 602881 - DNA, 101 bp, Homo sapiens
ccatccttccatccctccaaaaaatttacccaggacctcctggcactccaggtcctcagggtcttcttggtgctcctggtattctgggtctccctggctcg

SEQ ID NO: 602882 - DNA, 100 bp, Homo sapiens
accagaaacatacccatttaatccccctaaggattactacagcatcccatttcccacacccactactccgctgactgggagggatggtagcctggccagc

SEQ ID NO: 602883 - DNA, 100 bp, Homo sapiens
caggagaagatggcggtctccacagagagattctccctgagaaacaagcagaattttttgaaccatgggtgtactcattttcatatgaattaattttgca

SEQ ID NO: 602884 - DNA, 100 bp, Homo sapiens
tgcagaatgccaccaagtatggcaacatgacagaggaccatgtgatgcacctgctccaggaggagctcaagcacttcgaagccaaaatcgagaagcacaa

SEQ ID NO: 602885 - DNA, 82 bp, Homo sapiens
ccctgtggctgggggcagagctcagacctgatggccaaaagaaaggaagaaaatttttcctctcctaaaaatgccaaaaggc

SEQ ID NO: 602886 - DNA, 50 bp, Homo sapiens
gcaggatgatccgttccgcccagcagtgtactaatggtcacttgatgtgc

SEQ ID NO: 602887 - DNA, 75 bp, Homo sapiens
cagtgacccagaccctctcctttccctttgagaccgtgaagagaaagatgcagctgtcggaaaaggtaacagaag

SEQ ID NO: 602888 - DNA, 75 bp, Homo sapiens
ctttgatctaagggttcagcctttcaatgtgacacaaggaaagtattctacaggaaatgcaacctcaccacaagt

SEQ ID NO: 602889 - DNA, 75 bp, Homo sapiens
gatgatcgtgtgtcggatgaggagaagggacaagaatccttcaagaaacaggaaaaaactcctaaaacaccaaaa

SEQ ID NO: 602890 - DNA, 74 bp, Homo sapiens
gcatatgaaattcctcatcgaggaaacactggagatgttgctgttgaggccatcatctctcagcaaggtgacat

SEQ ID NO: 602891 - DNA, 99 bp, Homo sapiens
ttcctgacctctgacacgtattgtctcaagattaaaggttcttgggtgtctctggggagtccctgggccagaccttcctccagactccagcccacctct

SEQ ID NO: 602892 - DNA, 90 bp, Homo sapiens
gctttccacttcagaaaatgccctgacaggtagtggattggacttggctgatgctttggatgatcaagatgatggccgcaggaaaccggg

SEQ ID NO: 602893 - DNA, 101 bp, Homo sapiens
ttctggaatgtcctgatgagctcattgagagaaccatgatggtcaattgccatgcacacttctggatgtttctttctcagcaaaatagaggagaagcttac

SEQ ID NO: 602894 - DNA, 97 bp, Homo sapiens
cttttcccctccccgggccacccagcccgcccaactcccagcggagagcaagggcaccatgccggtggaaaggatgcgcatgcgcccgtggctggag

SEQ ID NO: 602895 - DNA, 75 bp, Homo sapiens
gaagaagcagctggacccgctcaccatctacggcatccggtcacggctgtgggaactttgtccgtgtaattcaga

SEQ ID NO: 602896 - DNA, 75 bp, Homo sapiens
ccgtcaaggaccggcacaaggacgttctcaagtggggcgatgagatggactcaccctgtcacccaggttggactg

SEQ ID NO: 602897 - DNA, 86 bp, Homo sapiens
aggctgcagaatatgctaaacttttggccaagagaatgaaggagaagaaggaagttgtggaagaggcagaaaatggaagagacgcc

SEQ ID NO: 602898 - DNA, 100 bp, Homo sapiens
cggcgacctccggcggcgggaggcccggcctgggcaggttctcagaggcactgtgactgacttccctggatttgatgagcgggctgatgcagaaactctt

SEQ ID NO: 602899 - DNA, 126 bp, Homo sapiens
gatgaatggagggatgtcgctggtggcctttgtcttgcttaatgaatgtgtgggcaccgcctactgggcacttgcagggtctcactgtgccacccagctggagtatagtggtgcaaacacagcttg

SEQ ID NO: 602900 - DNA, 75 bp, Homo sapiens
attcaagtcaattaccatcctttaccaggttttctggatatgccgcagaaggatccgtgccagaagcaagcctgt

SEQ ID NO: 602901 - DNA, 74 bp, Homo sapiens
ttttgccaccacactccagcttgggataaatgctgtatccaatgctcaggtgagaggtgatagctatgaaagcg

SEQ ID NO: 602902 - DNA, 80 bp, Homo sapiens
gtttctggcgatgcagcaattccaagaagagtgttctgccagttctggataatccactgtccaagaaggttcgaggcctc

SEQ ID NO: 602903 - DNA, 51 bp, Homo sapiens
ccgtgttcggggagtctttcagtgatgtccttgcattgcccatttttaagc

SEQ ID NO: 602904 - DNA, 100 bp, Homo sapiens
gtcaaaggaaaaagaaaaaggggtcgtcctggccggcctccagactaccaagaagcctccaatttggaacaattcgtaactagatttttattgaaggaaa

SEQ ID NO: 602905 - DNA, 75 bp, Homo sapiens
cttcgtttttcgccgtcatgggcgcctcggccgccatggtcttcagcgggactttgaacatgtcggggatcgccc

SEQ ID NO: 602906 - DNA, 99 bp, Homo sapiens
tggcttggggagctgcagcgttcgggttgttacaagttgagttgaaaacaagaaaaacttgcttttggcgccatcaaaaaggaaagccagatactttcc

SEQ ID NO: 602907 - DNA, 100 bp, Homo sapiens
tgttttgatccctaaaataatgagagaaaaggccaaagagaggtgttctgaacaagttcaagataaaagcttcgatgatgaagaatcagtggatggaaat

SEQ ID NO: 602908 - DNA, 100 bp, Homo sapiens
aggcaaaaatatccatgtgcctctgttgatcgtcttggactcctatatgagagtcgcgagtgtgcagcaggtactaggttttgacaagcttgcatcatgc

SEQ ID NO: 602909 - DNA, 100 bp, Homo sapiens
aacacattctgggatgtggatggaagcatggtgcctcctgaatgtactatactggcaattgctggagaagattttgcaattgttgcttctgatactcgat

SEQ ID NO: 602910 - DNA, 80 bp, Homo sapiens
cgccttcaacatcatagaagtgatgagtgcctccaagttcaccttcaaggaagccatcttcgacaagagcacagggaagg

SEQ ID NO: 602911 - DNA, 100 bp, Homo sapiens
cgcctgtaatctcagcactttgggaggacattccatttctaaaccagttgtggttgatttactggagcgaggaaaagagccctggatgattttgagggaa

SEQ ID NO: 602912 - DNA, 74 bp, Homo sapiens
cagagttcgaggtggtgggactcaccgctctggccagggtgcttttggaaactctctcaagtcccgaggctacg

SEQ ID NO: 602913 - DNA, 75 bp, Homo sapiens
ttccatctcttcagagatgaaccaggacccagatgatgtggtaccagttggccaaagaagagcctggtgttggtg

SEQ ID NO: 602914 - DNA, 101 bp, Homo sapiens
gctggagacatggaccgcggcgagcaaggtgggaccagggagattggatctgctctcaccaggatgtgcatgaggcacagaagcattgaagccaagctgag

SEQ ID NO: 602915 - DNA, 74 bp, Homo sapiens
tcagtgatgtttgagcaaatggaacgtatgcttcagaagtgtccttctgttgatgacttcgtaagtgccctcgt

SEQ ID NO: 602916 - DNA, 90 bp, Homo sapiens
ctcacagaaactatatgccaccatggagaagcataaagagaaaatatttacaccagcagctccagttcataccaataaagaagatcctgc

SEQ ID NO: 602917 - DNA, 134 bp, Homo sapiens
agaacagcaacagatgattgagaaagaaatgtaaagaaggttctctttgtgtgagtaagcaagaacctgctctacccttctccaaaagaagagccaagagaaggtccttttctacaaatatcagagccatggct

SEQ ID NO: 602918 - DNA, 100 bp, Homo sapiens
ccccagtaactgggaactgctccgcagtccgctcacgtggacccctgtgggaatagcaagcaggaaatccaaatctcctcccaaagtgcccattgtgatt

SEQ ID NO: 602919 - DNA, 100 bp, Homo sapiens
tgtagactcagcctcactctgtacaacaatggccaatgtacatggtggactatgccggcctgaacgtgcagctcccgggacctcttaattactagacctc

SEQ ID NO: 602920 - DNA, 75 bp, Homo sapiens
agattctcttgaccatgtgacatctgatgctgtggaacttgcaaatcgaagattcatgttacatgtaaagctgtc

SEQ ID NO: 602921 - DNA, 82 bp, Homo sapiens
ccgccatgcaaggctggcgcgtctccatggaggtgcagaccatgaattacgtggggcagttagccggccaggtgtttgtcac

SEQ ID NO: 602922 - DNA, 98 bp, Homo sapiens
gaaaaactacagaggagaggactactgtaattcccagccttgttcctttatagcggctgcatttcaacaaggaaagatacctcctactccattctctg

SEQ ID NO: 602923 - DNA, 51 bp, Homo sapiens
tagacaccagctccgaaatcaccaccaagggccatgaagcccccaggagga

SEQ ID NO: 602924 - DNA, 50 bp, Homo sapiens
acagtatgagagagcatgcaaaggtgtcaccaccccaataaacttagaca

SEQ ID NO: 602925 - DNA, 51 bp, Homo sapiens
caccttttccacagggaattgagttgactatgagaagatgtttggcacgaa

SEQ ID NO: 602926 - DNA, 82 bp, Homo sapiens
aggctgcagggcatcgtcacgcggccgcaccacctaaggcctattcagagcagcaaggacaagttccttacctccgagttac

SEQ ID NO: 602927 - DNA, 82 bp, Homo sapiens
agaaagagccctggattgttttctgccttcccaggaccctgcccttccccagaaggagcaggagaaaatgaccaagtttcag

SEQ ID NO: 602928 - DNA, 75 bp, Homo sapiens
caagactttgacatgtgtgaaaacatgaaatgggttggaaatcgtgccaaatgggataacattgacgatggacta

SEQ ID NO: 602929 - DNA, 108 bp, Homo sapiens
aaccccagccgaccttgagctccaggagttcgtctcttacgtctgcggaagtgcagctgcctcagttcttagcgcaggccctggccaacgtcaacattgggagcctca

SEQ ID NO: 602930 - DNA, 90 bp, Homo sapiens
tgggtcctgcatttggccaccaagacctgggaacaagtcaagaggcctagaaggagagccagagtgcgatcagaaaaccagccgtgcgct

SEQ ID NO: 602931 - DNA, 76 bp, Homo sapiens
gccacgtgcatgaaccaaacccacttcgttcaagacaggtgtttaagcgttacattgattacccacctagtacaac

SEQ ID NO: 602932 - DNA, 82 bp, Homo sapiens
tccgagcgcaaggacagcgcgaggtccgcgcagcccagcgcagccatatccagagacaatggccccgatgggatggagcccg

SEQ ID NO: 602933 - DNA, 90 bp, Homo sapiens
atatgcctggcacaagcagaagccaactgggctgattgggcagaaagtggcccatgctctggcagagggactcggagtaatcgcctgcat

SEQ ID NO: 602934 - DNA, 105 bp, Homo sapiens
ccggcccacagtgggggtgtgcaaacccgagagaactgggccaggaatagttgctgaacaccccaggcctgctgaggtccctccttgagtctcatgttcaagcag

SEQ ID NO: 602935 - DNA, 89 bp, Homo sapiens
tgaccccgcggccggacgacccaagcccgctgagcaggatgaggctgggatctagcaattgggaggcagcagacttgggtaatgaagag

SEQ ID NO: 602936 - DNA, 112 bp, Homo sapiens
ccacagttcagtgtattcgttctgtgcctgaactcaaagatgcccttaaaagggaaagaatatggcaaagctgatgcaagatgggtttattttgatccaaccattgtgtctg

SEQ ID NO: 602937 - DNA, 82 bp, Homo sapiens
ctaactcctgggcttatgtgatcttcccacctcagcctcccaaagtattgagattacagctgagctgactgctgcccacttt

SEQ ID NO: 602938 - DNA, 120 bp, Homo sapiens
tgaatggcaatggcacaaagttctctcgatcagggcatacatctttcttcgacaaaggacaatgcagatcttcgtgaagactctgactggtaagaccatcaccctcgaggttgagcccag

SEQ ID NO: 602939 - DNA, 98 bp, Homo sapiens
aacaaattgtacatttgcccattctcaggaagagcttgaaaagtatcagtaccccacaatggatgagctggctgaaatgctgcctcctgttcttaccc

SEQ ID NO: 602940 - DNA, 75 bp, Homo sapiens
cagggaagcatggctattgtggatgtaaaagccatgttcaaggtgaggacaccagtgatgaattctgaagcaaaa

SEQ ID NO: 602941 - DNA, 75 bp, Homo sapiens
cggaaaaggacgcaaagttctccggcgagactgctcactagaagctcagcccaaatatgttagaggtgggaagcg

SEQ ID NO: 602942 - DNA, 101 bp, Homo sapiens
ctccatccggctgcccctggagcacctggtggaagaacaagtggcaggtgccgtggccagcacagaagtgaagatgaagttacaagaatttgtcctcaata

SEQ ID NO: 602943 - DNA, 73 bp, Homo sapiens
aagagaagactgatagagacttcgttaagattttatcttccaggcaaggacatttggaccgatcttttacatg

SEQ ID NO: 602944 - DNA, 50 bp, Homo sapiens
tgtggcctcgctcctcggagggcattgctcatcgtgatctgaaaccagaa

SEQ ID NO: 602945 - DNA, 100 bp, Homo sapiens
ccgggacccggttccccggcccacagtgggggtgtgcaaacccgagagaactggatctgcagcctcctccgtggtggcatcgccgagcgtgggggcatcc

SEQ ID NO: 602946 - DNA, 100 bp, Homo sapiens
cctgctatcacatgggtccaaccccagggtggtggatgacgacggcatgaccagtctgcataaggtttggcagttctctaccagtggaccaatcttttca

SEQ ID NO: 602947 - DNA, 100 bp, Homo sapiens
aaccagttcgtttaaggctttcttctttctcctgtggacaagccagtgctaccccattcacagacatcaaggtagttgatgtcacttggcgatattcctg

SEQ ID NO: 602948 - DNA, 87 bp, Homo sapiens
aggcagctgtactaggactgggaacgggtgttttcacagtcctgtgtttggtatggagagtgtggaattgcatatggggacaagagg

SEQ ID NO: 602949 - DNA, 97 bp, Homo sapiens
atgatgccatgcacctcagcatgctggaaggcaaaggcagctcgagcatctcatctgacgtgagttcaagtacagatcacacgcccactaaagccca

SEQ ID NO: 602950 - DNA, 90 bp, Homo sapiens
ctggctctgccccttttcttcttctgctgggaggttggggtctctgggagctctgcagggcaccatgccggtggaaaggatgcgcatgcg

SEQ ID NO: 602951 - DNA, 112 bp, Homo sapiens
cgagcacagagcctcgcctttgccgatccgccgcccgtccacacccgccgccagaaaccaaggtgtatgttggtaacctgggaactggcgctggcaaaggagagttagaaag

SEQ ID NO: 602952 - DNA, 74 bp, Homo sapiens
catttaacaaggcggtgtggtttactccatgcagttgtcaggagctagatacactgtcagatcctttggcatcc

SEQ ID NO: 602953 - DNA, 100 bp, Homo sapiens
ggaaaagagggtggaaaaagcagggaggttatgaggcttaataaagaagcaatgcagcaagtcttggaaaaccttacggagctgccctcgtctactggag

SEQ ID NO: 602954 - DNA, 75 bp, Homo sapiens
cgcagggaaggagggcgtccgagtcaacaaccgcttcgagctggcaggagctgggaggaggcggcagcggcggcg

SEQ ID NO: 602955 - DNA, 87 bp, Homo sapiens
ggagttcgcctcagacgcggtggagccgccggagtctgagaaggcagttgcagtggtgcagaatggctgacctcagtcttgcagatg

SEQ ID NO: 602956 - DNA, 100 bp, Homo sapiens
ttcagagcaaaaactaacagggatcttgaaattaaagatcagggaagaatggacagaagctatccaggctgtagcagacagactgcagaggcaagaagag

SEQ ID NO: 602957 - DNA, 71 bp, Homo sapiens
aaggggttgtcctcacttctgtgcaacttcactaagtccatggaagaagatatgagggaaggcaccattgg

SEQ ID NO: 602958 - DNA, 100 bp, Homo sapiens
atttcatagctcaggctgctgctgagaatgtgtttttcgttgctcacagctatggaggacttgcttttgttgaactgagagtctactgtggccacgagta

SEQ ID NO: 602959 - DNA, 75 bp, Homo sapiens
cgcggcatccggctcccgcccgtcttcaggtaagaagacaagaggtttcttctcctagaaaagaaacttcagcaa

SEQ ID NO: 602960 - DNA, 75 bp, Homo sapiens
cacggtcaagtacacagagagacggcagccgctgtacagattcatcaccacgagttatcattaccatgttggtga

SEQ ID NO: 602961 - DNA, 74 bp, Homo sapiens
ccatggtgaagtataggctgaggctacctgtgaacagtacgcagtgaatgttcaatatgttaaggatacctgta

SEQ ID NO: 602962 - DNA, 50 bp, Homo sapiens
ctcagaagacagagggttttcttttgagattagaaatgatatttgccaaa

SEQ ID NO: 602963 - DNA, 100 bp, Homo sapiens
gtcaactgggcagtgaattttgtgaattggaagtttttgctaaagtactgagagctttggataaaagtgtaatgaacaagtctggggtgaatcgtgtagt

SEQ ID NO: 602964 - DNA, 101 bp, Homo sapiens
cgggagcggcggccgcgccatgtggctgctggggccgctgtgcctgctgctgagcagcgccgcggggccatgaagcccccaggaggagaatcgagcaatct

SEQ ID NO: 602965 - DNA, 90 bp, Homo sapiens
ccaaagacagattgaagaaatgcagagacagagagttttcaacgtcctttatcccatgcctgccgaccagcggagacatgtcagtatcaa

SEQ ID NO: 602966 - DNA, 100 bp, Homo sapiens
gccaagcagccaaccatgctcaacttcggtgcctctctccagcagactgcggtttggtgcacctcgatttggaggaagtagggcagggcccttatctgga

SEQ ID NO: 602967 - DNA, 90 bp, Homo sapiens
cccaaagctattctgggggcaacagaggattttggcattagagaagctcggtgctgtcttcaatcaagtagccttcccactgcagtacac

SEQ ID NO: 602968 - DNA, 82 bp, Homo sapiens
tgattttgatgcttgcgaagagttgattgaaaaggctgtaaatgaaaaatatgtcgtaactgcaagtgtggccaagaagagc

SEQ ID NO: 602969 - DNA, 75 bp, Homo sapiens
ggctctggcccgggctccgcgtacttcctgttcagctcactgcaaatctaacttcatcatggtgaactaatttag

SEQ ID NO: 602970 - DNA, 74 bp, Homo sapiens
ctctgtcgctgacgggaggatctgaagccggccgcagatatctcccggggccaattcagcatctctacctggcc

SEQ ID NO: 602971 - DNA, 75 bp, Homo sapiens
aatgtggagaaagccccctgtgccacctccagctgccaaggggccaagggatgagctggggccctccttcccaat

SEQ ID NO: 602972 - DNA, 73 bp, Homo sapiens
ttacagaggagggcactgcggctcagaggctgggttcctcaagccaggacctacgcacctgttgtgagtggtg

SEQ ID NO: 602973 - DNA, 74 bp, Homo sapiens
ttcgcagtggtcgcttcttctccttggatgcagcagtctcggccctggctgctctatgcagtgaatattacatg

SEQ ID NO: 602974 - DNA, 100 bp, Homo sapiens
accagcagtgaccttcaaagtgagcgccaatgtccaaaacgtgaccactgaggatgtggagaaggccacagaaatcttacaggctggtgttaaaggaact

SEQ ID NO: 602975 - DNA, 75 bp, Homo sapiens
ctgtgaggaatctggattgtcacctttgctgcaaaaaattacgggagaagaaactgaggcctggaatttgattaa

SEQ ID NO: 602976 - DNA, 98 bp, Homo sapiens
gcatttgtttcccttagccagcccgagcaagtaaagattgatatggaatgtgcagatgtcccactattaactccaagcagcaaagaaatgatgtctca

SEQ ID NO: 602977 - DNA, 74 bp, Homo sapiens
agattgccaacattgaccgtattacaaagtaaaataccatgaagattttgaaaaaacaaaggggagaggcttta

SEQ ID NO: 602978 - DNA, 75 bp, Homo sapiens
acgggccggcccagagctcccgggtcgtctttcgtgtggccgcgaggtggcttctggcacagcagcttaattgac

SEQ ID NO: 602979 - DNA, 82 bp, Homo sapiens
agattcgcagtggtcgcttcttctccttgatatcccagaggcatccttcctggaggaagaggatgaagaccccatcccaccc

SEQ ID NO: 602980 - DNA, 101 bp, Homo sapiens
gaaggagaggccaaagggcaaagtgatcaaggacagcgtcaccctcctgccctgcttttatttcgtcgagttctttccttatggagacgcctccaagtttg

SEQ ID NO: 602981 - DNA, 82 bp, Homo sapiens
cgtccttctccactttcgccagcccgtgccgcgagcgcggcctgcaggagctacccagccttcatgctgttttggaacatgt

SEQ ID NO: 602982 - DNA, 50 bp, Homo sapiens
gttcttcgttccctcagcaatatgattgtgtttcaaaatcttgagtgcta

SEQ ID NO: 602983 - DNA, 82 bp, Homo sapiens
ctcagcgaagtggtgaaagagcatcagggcgccctgcgtccggcagaggaggcgagcatcccgctcaggtgatgaggaaccc

SEQ ID NO: 602984 - DNA, 75 bp, Homo sapiens
agcaggaagaaatactaagggtgccttttaggagaaataaagaggtggacccccaaaagtacaagggcatattta

SEQ ID NO: 602985 - DNA, 75 bp, Homo sapiens
agttgtcgacgaccgacagggtggtgaaagtttcagaatggcttcggttattgcctttccttggtgtactcgcac

SEQ ID NO: 602986 - DNA, 98 bp, Homo sapiens
gggagcacggcgacgccagcggcggattgaaaaggaagatcaggccaaccccaaagaagaagtgaccaaggaggagtttaaactgaatgaacaacctc

SEQ ID NO: 602987 - DNA, 100 bp, Homo sapiens
tgttttagtgctttttatttttccccaattcagcagagaatattttcaagggggatgtgaagttcatttccaatccgccctccatggtggcagcggggag

SEQ ID NO: 602988 - DNA, 82 bp, Homo sapiens
ccgccgccgcctgaggaggcgagctagccgggagttacaccgccaccgccagggagtgcatccgccccaacccttttccccc

SEQ ID NO: 602989 - DNA, 75 bp, Homo sapiens
ctcaaacatgaataggacaaagaacagaccgctggttcgtggacagatcaggtggatcacacaataataatgtac

SEQ ID NO: 602990 - DNA, 100 bp, Homo sapiens
gaaggaggtcatcgccgtcagctgtgggcctgcacagtgccagcttggatcctagcatgactatacattgtgacatggtcattacatatggattagacca

SEQ ID NO: 602991 - DNA, 121 bp, Homo sapiens
ggcatctcctagtattgcatcctacagatgtgctgtaaacatcaaaagaagacggtgggatcaggagatgtttctctgcaggtggatattgttcccagccagggggagatcagcgttggag

SEQ ID NO: 602992 - DNA, 101 bp, Homo sapiens
cctgctcgccgtccccgccatgctgtctctagactttttggacgatgtgcggcggatgaacaagcggcagatgctggcccgcgagagacattgatgcattt

SEQ ID NO: 602993 - DNA, 83 bp, Homo sapiens
cgccgcgggacctctccgggccatggaatagcctaacatggcagaccagagacagcgctcactgtctacctctggggagtcat

SEQ ID NO: 602994 - DNA, 75 bp, Homo sapiens
tcacatacctcctttttctcatagtcttgtgcatctgtgacagaccatgccaccactgccctgctccactatcag

SEQ ID NO: 602995 - DNA, 90 bp, Homo sapiens
gatcttacacttgaaatacagactgttggggaacaagaggatctagtttgaagcactaagaagaataagacatcagtttgaaaagaggct

SEQ ID NO: 602996 - DNA, 100 bp, Homo sapiens
ggggtcggcgggagccagcgagccacgggagcgagccagggcagctggtggaatttttgaagaaaatggaatctcgaggccccctttcgtgcgacacggt

SEQ ID NO: 602997 - DNA, 90 bp, Homo sapiens
tccaggcctacgagcagattctcgggatcacctaggagaaatgtctgaagtaagacccctctccagagacatcttgatggagaccctcct

SEQ ID NO: 602998 - DNA, 75 bp, Homo sapiens
gtggaagcgaagccgaaaaaggcagcagcgaagatggaaaaattgtacctgcattacttgagagcagagagcttt

SEQ ID NO: 602999 - DNA, 83 bp, Homo sapiens
gtcggcggctcagttgtccatgaccctgaaggtccaggagtacccgaccctcaaggatccacctctgatgttcagtgaagact

SEQ ID NO: 603000 - DNA, 100 bp, Homo sapiens
cgtggtgggccacatcaacagggatgcccccggccgggagcagaagtacatgctggggaccaatcaccaactcacggcagggaatgtggtaacaggagag

SEQ ID NO: 603001 - DNA, 100 bp, Homo sapiens
tttccacgtgcggtgctcgtcgggagtgatcacctaccctacagaaaagcatcagatttttctttggaagcatctgtggctgagatgaaggaatacataa

SEQ ID NO: 603002 - DNA, 100 bp, Homo sapiens
ctgttcacctgggaagaactgatatctgagaacaacttaaacggcgattttagtgaagttgacgctcaagagcaggctggagtgcaatggtgcaatctcg

SEQ ID NO: 603003 - DNA, 98 bp, Homo sapiens
tcctaatgacagtctccaaattcgcctccatctgtaccatggctggtgagattggagagatgaaggatggagtcccagagggagcacaacttcaggga

SEQ ID NO: 603004 - DNA, 76 bp, Homo sapiens
aaagaaccagcggacctgagtcttcaatgaaagatggcgatgaagatgatgaagaggaagaggaaaatgaagctgg

SEQ ID NO: 603005 - DNA, 101 bp, Homo sapiens
agagaaccgagcatccagtcatctcctataaaggtatgataagtattatcagcaacataatagttctgggcatcttcattaagtacaaggaacttcggaca

SEQ ID NO: 603006 - DNA, 97 bp, Homo sapiens
ctacaaccctgaagtgcttgatatcacagaggaaactctgcattctcgcttcctggagtggtggacttgctttgtgaagagacagttcatgaacaag

SEQ ID NO: 603007 - DNA, 75 bp, Homo sapiens
tgggacctcgctgctctgctcccagaatctgaaacggtgatgtcatggatgtcctgccagtgccagagtcccgcg

SEQ ID NO: 603008 - DNA, 75 bp, Homo sapiens
ttctgccggatcagatgagcagattggttagtgaaggtcaccctcggagtccagctcagagtcccgctcccgctc

SEQ ID NO: 603009 - DNA, 51 bp, Homo sapiens
aaatctgggaggttgaacttattaatattttgatgcatacgaaagagatgg

SEQ ID NO: 603010 - DNA, 96 bp, Homo sapiens
ccgtcttatgggacttgaggccctcaaggcactggaggatcgccccagctcactccttgttgaccagggagatagtagcagcccttccttcaaccc

SEQ ID NO: 603011 - DNA, 82 bp, Homo sapiens
gggccgtggcccctgcagcggaaccggacccagtccctgagccgcccctacacccacagagaaatgttctttactaccatgg

SEQ ID NO: 603012 - DNA, 83 bp, Homo sapiens
cttgatccagcggacttacgggccatcagcatcagcaaagccatcaacacccaggaggcccccgtgaaggagaagcacgcccg

SEQ ID NO: 603013 - DNA, 98 bp, Homo sapiens
ctgtcacagaactctgtaaatctgtctcccagcagtcacgcaaacaacttatcagtagtgacttacagtaagtgtgccccaggctacgatggacagaa

SEQ ID NO: 603014 - DNA, 102 bp, Homo sapiens
ctgtactgacaagcgagaatggtggacagggcggctggcactggaccacaggatggaggtgaattttaccgggaaggccgagatgggaggaccgttttccta

SEQ ID NO: 603015 - DNA, 138 bp, Homo sapiens
ggggaggctcctcagagtgcactgagatcccaggaggatggccacatccccccgggctacatctcacaggtgaccaagaatatggcccaggtgaccaaagccctggacaaggccctgagcaccatggacctgcagaag

SEQ ID NO: 603016 - DNA, 100 bp, Homo sapiens
caggaggctgtgcgggccccgctccgcttcgaatgggctgaccggttccctgatgtgttacctgcttctgctactgatccaaactgcagaacttctcatt

SEQ ID NO: 603017 - DNA, 75 bp, Homo sapiens
cctttagtgatgtggtggtaagatgtatgtggcctgattccaccaagagaaggcccaggaggaagaagagaaaaa

SEQ ID NO: 603018 - DNA, 75 bp, Homo sapiens
gatatcaagagggtcatggcggcgatcgagaaagtgcgcaaatggttgggttaacggcatggagaacagtcaccc

SEQ ID NO: 603019 - DNA, 100 bp, Homo sapiens
ggaggaccaggtgtacaactaggaagcccagataagaaaaagcgcaaggcaaatacacaggaaatgtggctttagataatctacagataaaagaaaatgc

SEQ ID NO: 603020 - DNA, 75 bp, Homo sapiens
gacttgacaatgtccctcacaccccttccagctacatcgaaacacctacctggtggttctgtgccttcccctact

SEQ ID NO: 603021 - DNA, 76 bp, Homo sapiens
gaggcaagaatattaaggctctccgtacagactgccagactcttcaggtatccgtggctgatgcagagcagcgagg

SEQ ID NO: 603022 - DNA, 88 bp, Homo sapiens
aggtttcctggcctgttgcagccatggtgcattgcagttgcgtgttgttcagaaaggtagcagcagcagcagcagcagcagcagcagc

SEQ ID NO: 603023 - DNA, 90 bp, Homo sapiens
ctgcaaagtgtccccggcaagaagcaggacagaaggagcaagctgtggaatggtataagaaaggtattgaagaactggaaaaaggaatag

SEQ ID NO: 603024 - DNA, 98 bp, Homo sapiens
atcggtgcaaatttacagaagcagtacgagaactggcagccaagggatgctgaaaacgccattcaacagatgggtggccagtggcttggtggaagaca

SEQ ID NO: 603025 - DNA, 90 bp, Homo sapiens
tggagatcctttcctgcttttggtttccctggcaggggttgaactgtggagtgtgtggataacccaacagcttgagggaatctgcttaca

SEQ ID NO: 603026 - DNA, 75 bp, Homo sapiens
gaaatggaggaaaaagaagaccagcgacaaatttagagaaacctcggcaggcaccgcacgtggtattgttgtcta

SEQ ID NO: 603027 - DNA, 100 bp, Homo sapiens
gggaagtggagcaccgatgatgtgcagatcaatgacatttccctgcagcctcagccctgaccctgtggaagcatttcgcgatggacagactcacaacctg

SEQ ID NO: 603028 - DNA, 76 bp, Homo sapiens
aagagaaatggagcccttctccaagaaaaccatgagctgttttccaagagcttcatctccatggaagtgcctgtca

SEQ ID NO: 603029 - DNA, 96 bp, Homo sapiens
ctgtgctgggcgctgtcatgatcgtgatggtgccgtcgctcatcaagcagcaggtccttaagaaaactttagaaactgttcctttggagaggaaaa

SEQ ID NO: 603030 - DNA, 100 bp, Homo sapiens
ctattttcacgttttaatgccgagagccccataggctccttcaatttccgtgatcctcggagtccccaggagaccaggtgatggcagcagccagactcct

SEQ ID NO: 603031 - DNA, 75 bp, Homo sapiens
gatggaggccggggaagagagatctctcgagattttgccaagactacgcgtttgttcacatggagaaggaagcag

SEQ ID NO: 603032 - DNA, 100 bp, Homo sapiens
aaaactggagagcttcatcaaaaatagtgatagctttgataaggtcatcgagcagctcggtgggaagcagctggtcatgaaccacatgcatcatgaagac

SEQ ID NO: 603033 - DNA, 100 bp, Homo sapiens
ggctgactgagagcgtctgcttgattgttgtgtccactgtatcctggcttgcttgttctgcgaattcctgaccctttgcaacattgtcctgggacaagcg

SEQ ID NO: 603034 - DNA, 103 bp, Homo sapiens
tgtattctccgagtcagattggagcatttgtgttgatgaagatgaaagagactgcaggcctgaattattggaacaactttggaaagccagagctgaaaaaaag

SEQ ID NO: 603035 - DNA, 100 bp, Homo sapiens
ctcagttgctgctccgacgcggaccccagtaccaagacacccgggactacatctgtgagttctgcgcccggtctttccgcactagcagcaaccttgtcat

SEQ ID NO: 603036 - DNA, 100 bp, Homo sapiens
gattcacaattatggagactgtccattcaaactcctccccacgacactctgaagcagcgacggcacagcgggaagaatggtaaaacttttaaattttatt

SEQ ID NO: 603037 - DNA, 92 bp, Homo sapiens
tgcgggaaatcgggctgaagcgactgagtccgcgatggagctcaccatggatgatgatatcgccgcgctcgtcgtcgacaacggctccggca

SEQ ID NO: 603038 - DNA, 50 bp, Homo sapiens
gtgtctagcccagtggaccttctgaaggcaatagagcatatgttctacag

SEQ ID NO: 603039 - DNA, 140 bp, Homo sapiens
tccagggataaatcccaaacttcttaacccctagaccggtttttagtccattgactatgcagcctaatggtatttcagtgtctgtagacaagatggaatcatctccatttaatagacggcaatggacctcactatcattg

SEQ ID NO: 603040 - DNA, 100 bp, Homo sapiens
gatcaagcctccccaaccccaccatcccaccaaagggggctgctgaccgagagagctcactcagccaggtccctcaaagttctggaaccctggctcctgc

SEQ ID NO: 603041 - DNA, 101 bp, Homo sapiens
catgaggtcccctccgcccgtggggactggctgctgccgtcgcaggtgtctgacttccagcaactgctggcctgtgccagggtgcaagctgagcactggag

SEQ ID NO: 603042 - DNA, 100 bp, Homo sapiens
gcggaagcccaggaaacacaggcagcgggttaattcctgtaccaatggtgggttttaaggaacttctccgaagactgaaggttcaagatcagatgactaa

SEQ ID NO: 603043 - DNA, 98 bp, Homo sapiens
ttcctgagggccgagcaacagtgtagtggcgtattccacatagcaaacaggattccacgcagaacttggaagacagagaagttttgaatggtgtacag

SEQ ID NO: 603044 - DNA, 50 bp, Homo sapiens
aatcttcaggaaagtaagagggtcttgtggatgagcagcagaaagttcgg

SEQ ID NO: 603045 - DNA, 82 bp, Homo sapiens
tagaatcaaggatttcagcaacaatgcctctgttcaaactcccaggtaagaatgattgatgttggctgatattggagtgctc

SEQ ID NO: 603046 - DNA, 90 bp, Homo sapiens
atggagccttcctgtggcaggagagacaacaaagcgctattatcctaaggtttttgccaatccagaagactgtgtagcatttggcaaagg

SEQ ID NO: 603047 - DNA, 82 bp, Homo sapiens
cctgcgctgtgatgcctgcagagctgtggcttaccagcactgtcgccatgtgctgtcagcagcactctccccgactggcaca

SEQ ID NO: 603048 - DNA, 82 bp, Homo sapiens
caggcttcagtggtatggactgtgaggaggacattgatgactgccttgccagaagacaactgttagttttgtggcttactgc

SEQ ID NO: 603049 - DNA, 97 bp, Homo sapiens
ggccccacctacgttaacatgacggtcggctccttcgtgtgtacctcctgctccggcagcctatgagccccgctagggccgccccgcgctgagagcc

SEQ ID NO: 603050 - DNA, 100 bp, Homo sapiens
ctctgctgcggcgcggggaccgctgtgctctcgaatgtgaaaccaagggagagagtcaaaatacagacttgagtccgaagccattaatttcagagcaaac

SEQ ID NO: 603051 - DNA, 88 bp, Homo sapiens
ccgccgccgcgcacctgccttcgctcccgcaccgcaattctgtggtgttcttggtcacacatttatggagtttctgaagggcagtgga

SEQ ID NO: 603052 - DNA, 75 bp, Homo sapiens
ccggccgggagggcctcgggggactgactgggttttgacccaccacatcagagtgacacaagaaccatctacgta

SEQ ID NO: 603053 - DNA, 76 bp, Homo sapiens
acccagcccgcccaactcccagcggagagcaaggtacatgtcccagagcaagcacacggaggcccgggagctcatg

SEQ ID NO: 603054 - DNA, 89 bp, Homo sapiens
cacagactacgagggagtttgacagctattaaaaccagggctccacagttaggagtgcatcccaggcagctcttagtgtggagcagtga

SEQ ID NO: 603055 - DNA, 100 bp, Homo sapiens
cctatcagctggggctggatgagtatgactttgaagaagccaaggaaattttgacaaagatgagatacttttcaaatatagaagaaaagatcaagttaaa

SEQ ID NO: 603056 - DNA, 75 bp, Homo sapiens
tgcttttgccacagcagttcctgcagcttccttgaggtttttagaacttcagccataaaaatgggcagaattttc

SEQ ID NO: 603057 - DNA, 89 bp, Homo sapiens
tgctggctgcggccaacaacaaggagacactgctcgccggccgcctggtcgtgggactcggcatcgggctggctgtgtgaactgctccg

SEQ ID NO: 603058 - DNA, 90 bp, Homo sapiens
gtccgccgccaccacccactccggacacaggactgagcagggggaggaacatttaagctgatggaagtggaagtggaagttgctgtacat

SEQ ID NO: 603059 - DNA, 75 bp, Homo sapiens
ctcactggaaggatcataggtggcactcatgtctcactgccccactcaggtatgccattttgaagactgagacgt

SEQ ID NO: 603060 - DNA, 50 bp, Homo sapiens
gggaccagattacaagtctttccaaacgctgaccggaaaggagattgaga

SEQ ID NO: 603061 - DNA, 82 bp, Homo sapiens
tccactgttcctggaggaatccgagaagagcagagcggagggagccccagacacgaaaactttagaaactgttcctttggag

SEQ ID NO: 603062 - DNA, 80 bp, Homo sapiens
ccagagatgcaaaaatgcaccctactccagcatcgcaccccaagaaaccagggatttttgccaagcctgaccatgttaag

SEQ ID NO: 603063 - DNA, 83 bp, Homo sapiens
acattttcgatagagacgttttccggagggattccatcataggggggtcctgtggagatccttcccttcctctacctcggcag

SEQ ID NO: 603064 - DNA, 99 bp, Homo sapiens
tggctctcggcactcccaggctgggagctggatacctgccctggcagcatggctcagactgcatgacagagctccagcattgactttctagcaagccag

SEQ ID NO: 603065 - DNA, 90 bp, Homo sapiens
gctcttcctgcacctggaaaagagttccccacattggcagacaaaattagaagcggcacagaatgttctcttatgtaaagaaatttttgc

SEQ ID NO: 603066 - DNA, 100 bp, Homo sapiens
ccgggatcgtgaccgagaccgtgaccgagagcgtgaccgagagcgcgaatatcgtcatcgttagaagactatggaaatgatgttagacaaaaagcaaatt

SEQ ID NO: 603067 - DNA, 102 bp, Homo sapiens
gccctaatggcccatcaccaattgcaactgcttcaggacaaaggtggacccaagtggagagattgtggaactggcgaaaggtgcatgtccctggaaggagca

SEQ ID NO: 603068 - DNA, 75 bp, Homo sapiens
agaccctcacggagctgggcgacgagctgaccctgggagacatcgacgatgatatcatcaagttgaatcgaaagg

SEQ ID NO: 603069 - DNA, 90 bp, Homo sapiens
gcggaagatccaggagctgttccacgtggagccaggcctgcagaggctgttctacaggggcaaacagaaaaagcttgtggtgaagggggg

SEQ ID NO: 603070 - DNA, 75 bp, Homo sapiens
cagttgcagtgttggagctaaaaatggcagttcggaaaaccctcattcctcctcagcctcctgatgttgctagtc

SEQ ID NO: 603071 - DNA, 100 bp, Homo sapiens
ctcctggagggagagagtgaaggatgttgtgactgtgacagactcactggggtttgtacatgctggggaggagccttcctttcaggggtgaccacattca

SEQ ID NO: 603072 - DNA, 111 bp, Homo sapiens
ccgacggcgacgactcgctgtaccccatcgcggtgctcatagacgaactccgcaatgaggacgttcagcatccctctctacctgccaacatcctgtattagagaacttgtg

SEQ ID NO: 603073 - DNA, 74 bp, Homo sapiens
tagaaacagtagtggagaatcaaggatggaatccgacgtggtaggcccagagcagatactgtccgcgatttaat

SEQ ID NO: 603074 - DNA, 75 bp, Homo sapiens
tggttgtttctggtgggatcgttggctatgtaaaaacagatgatgcaaaattgaggggccttgcagcccccagta

SEQ ID NO: 603075 - DNA, 98 bp, Homo sapiens
cctatcactaaaggatttcctatattgcggtggtggagatgagcgatgccttccggcagccgtccttgttttaccaccttggggtgagagaaagtttc

SEQ ID NO: 603076 - DNA, 118 bp, Homo sapiens
aggccttccagtcagtcaagatgtggaggcggaagacagtgatataaatgatcctgaccctgatctacaatgcagtgagaagagaagaaacagaaaatacagttggatctctactcca

SEQ ID NO: 603077 - DNA, 101 bp, Homo sapiens
ctcgactccaaatggttgaaaacagatatacaggttggtcaaagaaaaagtgatgtatgaaaaagaggcaaaacaacaagaagaaaagattgaaaaaatga

SEQ ID NO: 603078 - DNA, 75 bp, Homo sapiens
gttcaagcgaaaacatgaccgctgagcccatgagcgtttgctgccaattgatggggcaaatgatctcttttttca

SEQ ID NO: 603079 - DNA, 102 bp, Homo sapiens
gatgtaatgtccttctcatacagaaatctattctaagtaatctatgccagcaattatgacaatgttagcagaccatgcagctcgtcagctgcttgatttcag

SEQ ID NO: 603080 - DNA, 75 bp, Homo sapiens
tttgaagaaagatgacaccacctttgatgagaatgtgaaagatgttgcagaagtgttccagaagtggctgaagat

SEQ ID NO: 603081 - DNA, 50 bp, Homo sapiens
cagcatctttgtctagccccagtgcagaaaaattggaagctccaccaccc

SEQ ID NO: 603082 - DNA, 104 bp, Homo sapiens
cagaaacaaaatgtcaacaaattgatgggacccttctgcagaggggctgtcggaggaggttcctgtggtgtttgaggagctgccggtggtgttcgaggatgtgg

SEQ ID NO: 603083 - DNA, 101 bp, Homo sapiens
cttaaaaagatgcagaaagatggatttttgcatgagatgcttctggacaggctacagagtgcggtggcgccagcacagaactctgctcaatgtccctctgt

SEQ ID NO: 603084 - DNA, 100 bp, Homo sapiens
agccaatactgtggaagaaattattgaaaacttacagcaagatggttcatcttttgccctagagcaattgaagaattggtagggtgcccccctttttcac

SEQ ID NO: 603085 - DNA, 98 bp, Homo sapiens
aaaggctcggctcatgttctgggacttaggagggcaggaagagctgcagtctttgtgggacaagtgtcggagatgtatgcagtgtgacgccaagtttg

SEQ ID NO: 603086 - DNA, 100 bp, Homo sapiens
cagatatttgagcatgtgttcctggtgggtcatgataactgggtacgtggagttctgttccattctggggggaagtttattttgagttgtgctgatgaca

SEQ ID NO: 603087 - DNA, 100 bp, Homo sapiens
gtgagggtccatcttcttctgatcacagatggagtggaatggcttgaagatgtgaaagagtttctagccaaagccaaagaagactttttgaaaaaatggg

SEQ ID NO: 603088 - DNA, 73 bp, Homo sapiens
aacattcttggcattacgcaggccagcaactcccagctcaatgcaatgagagattggaacaattatcaggtca

SEQ ID NO: 603089 - DNA, 98 bp, Homo sapiens
ctgggcaccagcaggacccgaggccaggagccaggggcccagaagtgcgggacacgcaggctgtgcggcactacaagatctggcggcgtgccgggggc

SEQ ID NO: 603090 - DNA, 117 bp, Homo sapiens
ccgtggccttagctgtgctcgcgctactctctctttctggcctggaggctatccagcaaacgcttcgttaagggactcaggcagtacgggaagaacttcttcagaattagaaaggag

SEQ ID NO: 603091 - DNA, 100 bp, Homo sapiens
gtgcaattcttaaagaatgggcagcattgctatggcaacaaaagaaaatatgacttcacagagaggaatgttgaagtcaattcacagcaaaatgaacact

SEQ ID NO: 603092 - DNA, 100 bp, Homo sapiens
gaggaagaggaagaggaggaattagtggatgtctttcagtgacttcctgaggcactattcccgcctggagatctgtaacctgaccccagacactctcacc

SEQ ID NO: 603093 - DNA, 98 bp, Homo sapiens
aaaggctgcggcgcgcagagcgaggctgcgggaccccaggatgggggacaggaggctgcggggcctcagatggactcaccctgtcacccaggttggac

SEQ ID NO: 603094 - DNA, 74 bp, Homo sapiens
gccgaggcgttcggtcctgctgttgcggccgctgccccagggctgcggggacgagccagcagccacccccgccc

SEQ ID NO: 603095 - DNA, 98 bp, Homo sapiens
atggaacccaagcagtggcgaagggaatcgcaaggctcttccctgaccattttctactgtccctgcgcgaggagtctcgctctcagtcaaaatctcca

SEQ ID NO: 603096 - DNA, 101 bp, Homo sapiens
tgttcagctcacagagatcaaaccacttctaaatgataagctctagaggacaaaatcccagtccttggcacaaactcaggaaatggaagccggagtctgtt

SEQ ID NO: 603097 - DNA, 82 bp, Homo sapiens
ggagcacgggcaaggcggagagtgacggagtcggcgagcccccgcggcgacagatcaatgtccgagttaccaccatggatgc

SEQ ID NO: 603098 - DNA, 100 bp, Homo sapiens
aaatactcctctttcaacaagacttgtatctgtgcaagaggatgctgggaaatctcctgctcgaaataggaatgctgtctctgcaatttgagaggaggtg

SEQ ID NO: 603099 - DNA, 74 bp, Homo sapiens
tcaaatggaaagtttttccaaatattcatctgtacaggaaaccacccctactcctaatcccccgactacagaag

SEQ ID NO: 603100 - DNA, 100 bp, Homo sapiens
gagaggcatttagaattcattgaaaacagctggtggacaaaattttgtggcgctctgcgtcccctgaaggtgaccaagaatatggcccaggtgaccaaag

SEQ ID NO: 603101 - DNA, 75 bp, Homo sapiens
atcatcatcatcatcgccacctctgtccgaaagtgatgctacccgtgccaacacaagccatcagccccatgctca

SEQ ID NO: 603102 - DNA, 74 bp, Homo sapiens
gctcatcaccggtatcacaggccagatgacacccccaaccatggttgtgaagatgctagcgacacatcgctgtt

SEQ ID NO: 603103 - DNA, 104 bp, Homo sapiens
gcgggcaccgaggactccgctcctgcccagtttgtggggacattcatggacaattctttgatttgatgaagctctttgaagtcgggggatctcctgccaacact

SEQ ID NO: 603104 - DNA, 78 bp, Homo sapiens
tggctttgcacgcctctgtcctggagatcaatatgaaaggcatttcatccttcatgaagccattcaggattttgaatt

SEQ ID NO: 603105 - DNA, 50 bp, Homo sapiens
gatgtccagtaatgtcccggcggatatggatacccaaagcagaggactgc

SEQ ID NO: 603106 - DNA, 75 bp, Homo sapiens
gggagagtgagagctccccaggggagttctctgtgtctgtgaagttgcacactgggccacagaggatccagcaag

SEQ ID NO: 603107 - DNA, 75 bp, Homo sapiens
gtcacatcagcattttctgttgactgtaaaggtgctggtaagatttcttctgatgttcctcctgctgatcaagag

SEQ ID NO: 603108 - DNA, 83 bp, Homo sapiens
ccagtgtggaaaaccagtggtaaatgtcagctacaggccagcttatgaccaggtgcgtcagcaatttcctgctcctcttggtt

SEQ ID NO: 603109 - DNA, 90 bp, Homo sapiens
ctggaaccatctcagaagccatgcccctcaggctggaacttgccctgtctcctcgcagatgagggggaaatttgcagtggtgagaaaatg

SEQ ID NO: 603110 - DNA, 75 bp, Homo sapiens
ggctctccgccgtccccagccctgcctctccctgggctctggccctttctggttactgtggctttatggcagcca

SEQ ID NO: 603111 - DNA, 100 bp, Homo sapiens
gttctcagggacagtgcacgcaggtgacaaacagcatgtttggtgcttcaagaaagaagtttgtagagggggtcgacagtgactaccatgacgaaaacat

SEQ ID NO: 603112 - DNA, 98 bp, Homo sapiens
ccagtgccaacagccaattctacaggaaaaccaattctgtgtcctcggaggaccacagcccagttgggccccaggcgaaacccagcctggagcttgca

SEQ ID NO: 603113 - DNA, 76 bp, Homo sapiens
cctatgttgccctgagttacataaataggtgctacctttttacccacacttaagtgacgcaaaatgcccttcaatg

SEQ ID NO: 603114 - DNA, 101 bp, Homo sapiens
atgaaaagtgaagaaagtgatcataggagaaaaccatttcagattcatgatgttgctatcaaaagttgagaaattgtcagaagaaatcatggagataatgc

SEQ ID NO: 603115 - DNA, 83 bp, Homo sapiens
cccccctccttcacgccacacacacgtgctgccgaaaagaaccaacttccctgggatcagctccacagaccgcgggggccttc

SEQ ID NO: 603116 - DNA, 100 bp, Homo sapiens
ctggggcggcaccggatcaccaagacggaggtgtgatgaatgcagactctgctaccattttggctgtttggatcctcctttgaaaaagtctcctaaacag

SEQ ID NO: 603117 - DNA, 100 bp, Homo sapiens
ggcgcctagagggaaagcgagagggagacggacgttgagagaacgaggaggaaggagagaaaatggcgtccacgggttaaacccatccagagtaatggct

SEQ ID NO: 603118 - DNA, 80 bp, Homo sapiens
cgtgaacctggcatatctgggcgccaagccgcggagcctccagacggactgattcttgctattccaaatcctcttccacg

SEQ ID NO: 603119 - DNA, 100 bp, Homo sapiens
gcctggccctccagctgtatgtgcggcgccgaaagaagctacccagtgtcctgatgtgtcactccatccccgtgtctcacatccgcgccgtggagcgcgt

SEQ ID NO: 603120 - DNA, 88 bp, Homo sapiens
tcttgacgaggctgcggtgtctgctgctattctccgagcttcgcaatggtcccaggtgtgacaccttcagcaggtctcagggaagatg

SEQ ID NO: 603121 - DNA, 87 bp, Homo sapiens
gagatctgcgtcaacgtgctcaagagggactggacggctgagctgggcatccgacacgtactgctgttcaccaaccgctgcctgctc

SEQ ID NO: 603122 - DNA, 83 bp, Homo sapiens
acaatgttgtagtagacacagaagattttttatcaagcagaaatgcatcgaacaacgagaatcaagatcactgagctaaatcc

SEQ ID NO: 603123 - DNA, 98 bp, Homo sapiens
ttttgcagcaacagcagcagcaacagcttcgaaggcgaccttccttgctttcagaatttcacccaggttctgacagctggcaatcctttggtccagca

SEQ ID NO: 603124 - DNA, 73 bp, Homo sapiens
caataaggaagacattcttaataaagcattagagttatgtttgcttatgaacagtgcctgcttgtgctgggcc

SEQ ID NO: 603125 - DNA, 100 bp, Homo sapiens
gccaatgcttcccagcattgtgaacagtggatcgagttctcctgctacaattcccggctgctcaacactgcaggaggtgaacacagaaaagctgacagcc

SEQ ID NO: 603126 - DNA, 98 bp, Homo sapiens
gatgccgctgaatgggctgaaggaggaggacaaagagcccctcatcgagctcttcgtcaagatgccagtatggacagaatagcttatgatgcttatcc

SEQ ID NO: 603127 - DNA, 100 bp, Homo sapiens
gaagaggatggcaaaggtggctaaggacctcaacccaggagttaaaaaggtgtgcaactgaggaacatggctcaagaaactaatcacagccaagtgccta

SEQ ID NO: 603128 - DNA, 75 bp, Homo sapiens
atccgatgcctctactttgcacctccggaattcctcttagggtggtatttccaacattttggaggaactggttgt

SEQ ID NO: 603129 - DNA, 75 bp, Homo sapiens
tgctgctgcccctcgcccacttcttcctgagccacgaaaccatcatagcctttgcctgggaaccaaatggaagta

SEQ ID NO: 603130 - DNA, 75 bp, Homo sapiens
cgctacaatgaagccacactatataaggcacatcttggaaggtccgtcctgctcggcttttcgcttgaacattcc

SEQ ID NO: 603131 - DNA, 112 bp, Homo sapiens
ccagaactggccagaagataccaacttttgtttccaacctgagcaagtggtcgatcctatccagactgcagacggtgtggtccggaccaccacgcccctagagttagctcgc

SEQ ID NO: 603132 - DNA, 73 bp, Homo sapiens
tcgacaccgaaaactccaccgtagcccttgccaaaggccgtcatgattggggacgatatcgtgggcgacgtcg

SEQ ID NO: 603133 - DNA, 75 bp, Homo sapiens
tgggctcagccggtcgagctgcgcgggagacaaggcgcctctgtcgaagagccttctgctggtccccagtgccct

SEQ ID NO: 603134 - DNA, 75 bp, Homo sapiens
tttgctgtgccttctctactgatggcagtgttttagctgctgggagagaagtggatgggccctatacctccagcc

SEQ ID NO: 603135 - DNA, 82 bp, Homo sapiens
gcggtgaaggcgaacgcggtctgcaagctgacgtatctcagttcctacccccggttgcgagaggagacagagcgaatcgtca

SEQ ID NO: 603136 - DNA, 75 bp, Homo sapiens
agagaagaattttccaaatgaatttgcaaaacttactgtaggttgtggcagcactgcctgaaggtatgagaccag

SEQ ID NO: 603137 - DNA, 75 bp, Homo sapiens
cctggaatatgaagatatgtgagatggtggatgaatccccaggttgtcatgaaggttgacgtggtgtatgagaag

SEQ ID NO: 603138 - DNA, 75 bp, Homo sapiens
ccagtattctccagaaggtgctaaaattgaaagtggactatttaatagctagagagtttcattctgtcgcccagg

SEQ ID NO: 603139 - DNA, 75 bp, Homo sapiens
gaagacccagaggacactaaccaagagattcagttgtggaaattctttttgaacaagataatgaagagcaatcag

SEQ ID NO: 603140 - DNA, 98 bp, Homo sapiens
cagaggatgtccggcttccagatcaacctcaacccgctcaaggagccactcggcttcatcaaggtcctcgagtggaacctcaagaaggcatgaagcca

SEQ ID NO: 603141 - DNA, 100 bp, Homo sapiens
gaggagtcagacacggggcaggctgagttcctcttgctcacagagctctgtaaaggtccctgtgcgttttattgcgacctgccggtgggaactttgtctc

SEQ ID NO: 603142 - DNA, 100 bp, Homo sapiens
accggaagcaccccggcggccgcggtaatgctggtggtctgcatcaccaccggatcaacttcgacaaatagaattacatgaacgacagccttcgcaccga

SEQ ID NO: 603143 - DNA, 100 bp, Homo sapiens
atgacaactggctgattaaatatgactgtccaatggatagttctagctctcgggggtttgtgaccatgactctggaaagcctagaggaaatacaggatgt

SEQ ID NO: 603144 - DNA, 82 bp, Homo sapiens
aggaagcacagagctgtaccagtacacggcccacgttgccaggagaacaaggggtctgtggaaatcatgagaaaggacttga

SEQ ID NO: 603145 - DNA, 87 bp, Homo sapiens
gtcctctggtcttccctgaccccgcggccggacgacccaagcccgctgagcaggatgagggaatccagacgctctgcagtgtcccat

SEQ ID NO: 603146 - DNA, 100 bp, Homo sapiens
gtgcgcttcctgtgggagtgacccgccgcccccgacccaggtgtcatggagaaactccagctgggcccagagattctgcagcgggaaaatccaaggctta

SEQ ID NO: 603147 - DNA, 90 bp, Homo sapiens
actatgtggttccccttgactggaagacactaaagatgatctacttgcaatggaagatgtcagtggaggctggagtgcaatggcgcgatc

SEQ ID NO: 603148 - DNA, 100 bp, Homo sapiens
ttcagaagatcaaagaggccctgggcttcatgcgaaatcagcattttgaggcatcaacagtgatgacagcaacctctacctaactgccagcaagaagaag

SEQ ID NO: 603149 - DNA, 90 bp, Homo sapiens
ggtgagtgtgtcggggggcttggcggcttttctcctcagttttctggagtgctttggaggagagcaatcagccatgactgcctttgcact

SEQ ID NO: 603150 - DNA, 98 bp, Homo sapiens
cctggctgccggcttgttcttactggccctgagtctttgggggcagcctgcagaggctgcggaaatacaactggagcacgcaaagcaagcctttgtgc

SEQ ID NO: 603151 - DNA, 83 bp, Homo sapiens
ctgggtggcgaacggggcgagcctggaggattgtcactccaacctcttttcgctggaagccagttgagggaagttctccatga

SEQ ID NO: 603152 - DNA, 75 bp, Homo sapiens
aactattggacagagaatttgaccttctaagatcaattgcctttccccatcttcctggttctgctccttcgtggc

SEQ ID NO: 603153 - DNA, 50 bp, Homo sapiens
acacggcctctgatttcatagaagtgatgactcgtggcactgcctccagc

SEQ ID NO: 603154 - DNA, 90 bp, Homo sapiens
gacagttttggagaaggagatgcgtagtcttggtgttgacatggacgataaagacgatgttcgttccaccagtcataaaccagatgaaat

SEQ ID NO: 603155 - DNA, 74 bp, Homo sapiens
ttggctctatggaaaacactgcctgcctagggtagttaaaagacgagtgaatgctctcaaaaacctgcaagtta

SEQ ID NO: 603156 - DNA, 82 bp, Homo sapiens
gaagcaattcatagagctgtggaatttaatcctcatgttccaaaaaatgaagcccaaactgccaaggagtttattaaaatca

SEQ ID NO: 603157 - DNA, 83 bp, Homo sapiens
ctgactttcagctatggaatcggaacgatggcactgaatttggaggttctatctaccagaaggtgaatgagaagattgaaaca

SEQ ID NO: 603158 - DNA, 51 bp, Homo sapiens
gcggagcagtgcgtcagagtttcaggacccagatgatgtggtaccagttgg

SEQ ID NO: 603159 - DNA, 100 bp, Homo sapiens
aaagagttacatgaagcacacccttggtttgaatttttagttcagtgtcgacaagttgccagtaacttaacagggaaggtggagttgcagcaagggctac

SEQ ID NO: 603160 - DNA, 50 bp, Homo sapiens
aggattctgacagggatgttgcgaagataacagacgagtacctttggaaa

SEQ ID NO: 603161 - DNA, 95 bp, Homo sapiens
catggggcccaagaaaaagcacctggactcttcgagagctgtgcccaggagtgaacaaccagccctacctctgtgagagtggtcactgctgcggg

SEQ ID NO: 603162 - DNA, 100 bp, Homo sapiens
tgagataccactcagtggggagaaagctgatattgcaattgctccattaactattacccttgtgagagaagaggtgattgacttctcaaagcccttcatg

SEQ ID NO: 603163 - DNA, 100 bp, Homo sapiens
aaaacgtccttaccactgtctcctgtgaaaacagctccactctttagcaatgacaggttgaaagcacgagacattcagaagtgggagtatgtccctctcg

SEQ ID NO: 603164 - DNA, 90 bp, Homo sapiens
tttgatattgatgaagctgaagaaggtgtaaagatttctctatgaatcatcatcaagaactctgggagaacttttgaattcataaccaag

SEQ ID NO: 603165 - DNA, 96 bp, Homo sapiens
gatgtcctggatcgctgatacctatgccagcaccatagggcactatgcctcccagtagcattggatgcaggaaaaaatacattgacggtgaaaaac

SEQ ID NO: 603166 - DNA, 100 bp, Homo sapiens
gagcgggcgagcggcgacggcggcggcggcgggcacaggttatgaagacagtatggagtttccagaccatagtagacatttgctacagtgtctgagcgag

SEQ ID NO: 603167 - DNA, 75 bp, Homo sapiens
gcactagtgtggctctcctgttccagcaattggccaagccccagaacacagctgaggttcagaaggtccagctca

SEQ ID NO: 603168 - DNA, 82 bp, Homo sapiens
cgggagcctcgtggctgcgtcaccgccgcccccccagacaagatggacaccgcggaggaagagcggttctggtgaggttgga

SEQ ID NO: 603169 - DNA, 100 bp, Homo sapiens
caagctcaaagacattgaacacgcgttgtctgtgtcggttttcaataacaagaacaatggcccagacgaccccaccatttccccctcatacacctattac

SEQ ID NO: 603170 - DNA, 97 bp, Homo sapiens
gcgggagtgttcgttgtgccagcgactaaaaagaggttccaagtgttcaggattccatagctgcttcacttgtgcttgtggtcagcctgcatatgcc

SEQ ID NO: 603171 - DNA, 100 bp, Homo sapiens
gctcaagaagatcatcaagcgcaagcacaccctaccgaattacaagatcagcttaaagtatcagtggttgagaagagcttttcggacctgttactacccc

SEQ ID NO: 603172 - DNA, 100 bp, Homo sapiens
cagttccggaaggtgtcttagaggacattaaagatgaccaggataaaaaggtggaaactctcatggtaccatcaaaaaggcaagaagcattgcccctcca

SEQ ID NO: 603173 - DNA, 87 bp, Homo sapiens
cgaattctcaacccctacaacttattcctgtccggagacagcctaaggattcaagtccagcatccagcggccaagtccatgatcgaa

SEQ ID NO: 603174 - DNA, 100 bp, Homo sapiens
ggcagaacgaattcagtgatatcattaagtccagatctgcttattcagctgattctgaatcatcttacactaccagacctgtgtagattagcacagactt

SEQ ID NO: 603175 - DNA, 102 bp, Homo sapiens
gccggccacagactggattttctgacatcaagtcccacgcgttcttccgcagcatagactgggacttgcaaacggggattcagcgtccgatcctttggaaca

SEQ ID NO: 603176 - DNA, 76 bp, Homo sapiens
ttgaattatggcatagatcttgggaaaattgcgacattgcctccttttgaagccaatggaaaaatcttggattatg

SEQ ID NO: 603177 - DNA, 108 bp, Homo sapiens
gttccattggcaagctacaataatggggccaagaatgtaaagctgtacagttatggcgaccccaaagagaaagcatgaaagaacctttagagtagagttcaacactta

SEQ ID NO: 603178 - DNA, 90 bp, Homo sapiens
tccattacgtcaggcctggacaaccatggagaagaagaggaatctcttgttggcatttgaagcggctgaaagtgtaggcatcaaacccag

SEQ ID NO: 603179 - DNA, 87 bp, Homo sapiens
aagagaaaaagcccaggcataaaatcatctccatattctcaggcacagagaaaggtcatcttccacgatgttgctgtgctgacggat

SEQ ID NO: 603180 - DNA, 50 bp, Homo sapiens
cttagtgccagggtcaccatctaccagccttgatgacttacaagccctca

SEQ ID NO: 603181 - DNA, 100 bp, Homo sapiens
cattgagcaacagcagataaggaacgccctggaaaacatcagccaccaaaaccctcaacaggggcatctctgagttcatcgtgatggctgcagacgccga

SEQ ID NO: 603182 - DNA, 100 bp, Homo sapiens
gcagaattccatatcctcgccctggaactgaatccagaaccctggctgaaattgcaaaagcagagctggacggcaccattctcaagagcagacctctacg

SEQ ID NO: 603183 - DNA, 101 bp, Homo sapiens
ccgcccgacctgcgagcgccgcccgggcatgcgaagccgtccctccccggtactatactggcaattgctggagaagattttgcaattgttgcttctgatac

SEQ ID NO: 603184 - DNA, 80 bp, Homo sapiens
tattccccttcctgctagtcctggtggatctgcagtacgaaggtgggatgtgtgtgggctgaaattccgagctgcggttg

SEQ ID NO: 603185 - DNA, 98 bp, Homo sapiens
caggctgaggctggactacctctgggccgcacaggattcaggagcagttccagaaaaatcccgacagttacaatggtgctgtccgagagaactacacc

SEQ ID NO: 603186 - DNA, 98 bp, Homo sapiens
tggcaacatgacagaggaccatgtgatgcacctgctccagtgtgagatcaaggtggcccagcccaaagaagtctatcagcagcagcagtatggctctg

SEQ ID NO: 603187 - DNA, 100 bp, Homo sapiens
ggtaccgagaaagctttcgagccagcaaccgacacttggagaccagaaagcttctttgacaaagtgaagaagaacagacaaaatggcatgcacacattat

SEQ ID NO: 603188 - DNA, 88 bp, Homo sapiens
cggtttcaaacggcttagagcaggccgcttggttctgacccagctgaggtttggtgcacctcgatttggaggaagtagggcagggccc

SEQ ID NO: 603189 - DNA, 75 bp, Homo sapiens
ccccgtacgtcactaccactgtctctgctcacagtgccaaggtgggatgctatggaatatgatgagaagctggcc

SEQ ID NO: 603190 - DNA, 82 bp, Homo sapiens
ccccaacccagaccacacccttgagcctgagcccgacattattcctgagaccccccaaagacacacgtgacccaccacccca

SEQ ID NO: 603191 - DNA, 75 bp, Homo sapiens
gcagcgtgcgttcagccctggggagtgtgaggaagaggctgtctgtgtcattatgtgtgcgtcggtcaagtataa

SEQ ID NO: 603192 - DNA, 83 bp, Homo sapiens
cttggtttcgggatctcggtgctgcagacggcgagacctcctgcacagatcttcgtgaagactctgactggtaagaccatcac

SEQ ID NO: 603193 - DNA, 75 bp, Homo sapiens
cctgcagaacaggacctgactacaaaggcgcggatcaagaagatcatgcagacggacgaagagattgggaaggtg

SEQ ID NO: 603194 - DNA, 100 bp, Homo sapiens
gccctcatgtacgagtccgagaaggttggggtcgcctcttccgagatgttgaaagtgtgatgaacagtgtggtatccctactcttgatcctggaaccaga

SEQ ID NO: 603195 - DNA, 75 bp, Homo sapiens
gatcaattcttggagaacacaaagaagtgtgatggggtgacagtccaaagattgacttggccggcagttcgctat

SEQ ID NO: 603196 - DNA, 75 bp, Homo sapiens
gacggccagaaagttccgccatgagctggggcacggagctgtggagagatgcaggtcagctcctccagtaccaca

SEQ ID NO: 603197 - DNA, 50 bp, Homo sapiens
gccgctgccgtcgccatgacccgtcaaaatgcagatcttcgtgaaaaccc

SEQ ID NO: 603198 - DNA, 82 bp, Homo sapiens
taaccaggtgcttggcaaaatcgagcgggccattgcccgtggaccgggagcccgtggaccgggagccggtggtgtgccaccc

SEQ ID NO: 603199 - DNA, 75 bp, Homo sapiens
agaggtgccctgatgtctgctttcagtcctgaaaagctgaacgaggtaatttcatctgtgccaaagcctccagag

SEQ ID NO: 603200 - DNA, 148 bp, Homo sapiens
tttgttcagaaaggagaagcagatgacgaagatgatgatgaagatgggcaagacaatcagggcacagtgactgaaggattactctttcaacctgatcagaacgcaccaccaattcgtctccgacacagacgatcacgctctgcaggag

SEQ ID NO: 603201 - DNA, 100 bp, Homo sapiens
ggccaggatcctgcgctgagcacgagtcacccgttctacgacgtggccagacatggcattctgcaggtggcaggcatcctagaatacgtttccacacggg

SEQ ID NO: 603202 - DNA, 74 bp, Homo sapiens
ctgttcttatgacctttccacaacttggaccagttcagcctattccttgttgtccttatgtcgtcagaagatcg

SEQ ID NO: 603203 - DNA, 87 bp, Homo sapiens
ttctggacgcggatttttggcctcatactctgttatagataaacaagataatgagtgtgtatatggcaactaccctgaaataccttt

SEQ ID NO: 603204 - DNA, 129 bp, Homo sapiens
cagatgccagcgtagctgaatccagtaccaaaaacgtcaacaacagttttacggtgtacgaagccatcgacagcagagatggagcatcttgtgcagagttggtgtcttttaaacatcctcatgttgcaa

SEQ ID NO: 603205 - DNA, 96 bp, Homo sapiens
cccttttcagggcccccaaactgtcacagaaagagctgttaacacttcctagataacggaaggacagaataacgggctcccagattcacaagcccc

SEQ ID NO: 603206 - DNA, 100 bp, Homo sapiens
acagaaccctgggaggggaattccagcaccgcagcaaccactccagaaactttccctccttcagagatcgagatggtgatcatggagcgtagcaagctct

SEQ ID NO: 603207 - DNA, 111 bp, Homo sapiens
gaaaccaaaacggcgctgatgagtctgtttgggatcccgctgtggtacttctcgcagtccccgcgcgtggtcatccagtgacatattcgatgccatgttccctgtcactca

SEQ ID NO: 603208 - DNA, 98 bp, Homo sapiens
cagaacgattctgagtgaattggcaccaagccttcccagttatcataaccttgaatggcgactagatgtacaggaaaccactgattgcttgtgtggag

SEQ ID NO: 603209 - DNA, 89 bp, Homo sapiens
cccacgacgaggcggtgcaggcgttgaagcgcgcgggcaaggaagtgctgctggaagattcctgggaacaccaccatggagggcctggc

SEQ ID NO: 603210 - DNA, 75 bp, Homo sapiens
cctcggagtgagagaaaactctttttagatatcatctgagagcattcgacttaagagtctcaatgccaacacaga

SEQ ID NO: 603211 - DNA, 100 bp, Homo sapiens
cagtccctgatccctgacctaatgttatcgcggaatgatggtgctgtaaaatacctggagtgctcggcgctcacacagcgaggcctcaagacagtgtttg

SEQ ID NO: 603212 - DNA, 90 bp, Homo sapiens
cagaaggtctctggagacatcttcagcagtgcaccaggtggcggagcgggtggaggccctggggcagtttgtcatgaagaccagaaggac

SEQ ID NO: 603213 - DNA, 98 bp, Homo sapiens
gcgcagggtcgcgatgctgcccggtttggcactgctcctgctggccgcctggacggctcgggcgctggagaccggagtacactgggaagcatcaaaga

SEQ ID NO: 603214 - DNA, 100 bp, Homo sapiens
tagcatgtggcaatgatgattgcagaattcacatatttgctcaacaaaatgatcagattatggcatcgtcaaagcattgtggtgtcttttttactgctgc

SEQ ID NO: 603215 - DNA, 75 bp, Homo sapiens
gccactttgcatcccacgccggaggaggcattaacgagaccgggtaaggaatcaaacattttaagtccagtgcag

SEQ ID NO: 603216 - DNA, 75 bp, Homo sapiens
tggactcttgattggaatgttctccctgcagcagtcagcccaaaggaagatgaaactggagcgagcagagtgggg

SEQ ID NO: 603217 - DNA, 100 bp, Homo sapiens
agcaggaaaaacggcatgttttgcatctggtgtgcaatgtgaagagtccttcaaaaatgccagaaatcaacgccaaggttttaaaaagacaaggctatga

SEQ ID NO: 603218 - DNA, 75 bp, Homo sapiens
gccatcgtgaaggagctcctggagctgggaacacctgtccattgaagatttcactcaggcctttgggatgactcc

SEQ ID NO: 603219 - DNA, 82 bp, Homo sapiens
gtccgcgtcagcgccttgccaccctcatctccaatatgaaactaatctggattcactccctctggttgatacccactcaaaa

SEQ ID NO: 603220 - DNA, 95 bp, Homo sapiens
agaaggaaagaatcctgttgactatatccagattaacggtgtagacgtccagaaccgggaagaggcggtggccatcctgagccaggaagagaaca

SEQ ID NO: 603221 - DNA, 75 bp, Homo sapiens
gcttcaagctctggtacacgctggacagagcccctgaaggtttggatgcatctgctcagactacttctcatgaac

SEQ ID NO: 603222 - DNA, 89 bp, Homo sapiens
ctgctttgagaagagcaatgacattgggggcctgtggaaattttcagacccatccattttcacagtattgactgctaagtctgtccgcc

SEQ ID NO: 603223 - DNA, 100 bp, Homo sapiens
atgatgtttaagaacatgacgccgtcacccttcctgcgattctacttaggtgtaaagcaggccctctggctcaccaagaccaagttaatagaaggccttc

SEQ ID NO: 603224 - DNA, 75 bp, Homo sapiens
gatgattatgttgctgtagctaccagactctaaaatagagctcaagcttgagaagagagaaccactaaagggcag

SEQ ID NO: 603225 - DNA, 50 bp, Homo sapiens
caaacatacaagcagtctcacctcaggatatgatgatgcctatagatttg

SEQ ID NO: 603226 - DNA, 100 bp, Homo sapiens
aggcccagtatgaggagattgccaaccgcagccggacagaagccgagtcctggtatcagaccaaggtccagcagctccagatctcggttgaccaacatgg

SEQ ID NO: 603227 - DNA, 75 bp, Homo sapiens
aaaaattaattcatagagatcttaagctgataccccaatgtccttctttgactttgtggttgatcctcattcttt

SEQ ID NO: 603228 - DNA, 74 bp, Homo sapiens
cgcagagctggccgcgccaaataatgtctctgaatggtggaaagcagcagacataattggagtgggttggataa

SEQ ID NO: 603229 - DNA, 74 bp, Homo sapiens
cttggagcagaagaagcaggaccgcggggagctgaagctgctgcttttggagccactccatccccaaattcaag

SEQ ID NO: 603230 - DNA, 90 bp, Homo sapiens
tttataccggttcagcaagtatgttctcagaagctatacactcattatctgatacttgtaatcagggtatgttagagcccaccaaggaac

SEQ ID NO: 603231 - DNA, 100 bp, Homo sapiens
tgcgccttacacagtaccatggaggatccttaccaaatgtgagccagctgcggagcagtgcgtcagagtttcagattaccagagactgatgactgtggcg

SEQ ID NO: 603232 - DNA, 100 bp, Homo sapiens
ggagccgaggcgcaggtggcgctggatatggctcgtggacagcagaaaattcagtctcagcagaaaaatgccaaaaagcaagctggacaaaagaagaaac

SEQ ID NO: 603233 - DNA, 100 bp, Homo sapiens
tgaaggagctggagcggcagcagaaggagttctccagtgctgatgaagcggctttaaaagagcccatcattaagaagtttgaagaggaaggaaaccctta

SEQ ID NO: 603234 - DNA, 100 bp, Homo sapiens
acaagcagcagaagccactggaagagtgtgaagatgatgatgattcctccccggggctgtgcttatgtctgcatggttcatcgacaagatgcatttcgag

SEQ ID NO: 603235 - DNA, 100 bp, Homo sapiens
aaccatttgtggagttaaatagaatattagaggcattaaaggtcagagttctgagacctgctctggatttctccttggaccaagatgactgatggaaaac

SEQ ID NO: 603236 - DNA, 98 bp, Homo sapiens
gggcgcgcggctggagccggcgccgggcacggcatcgggggcctggactgcacggcccggcagcagccctgggcgctgcctatggcacagccaagagc

SEQ ID NO: 603237 - DNA, 99 bp, Homo sapiens
ctgggatggcgcgggccgggccggcgtggctgctgctggcaatctggacaatgcagatcttcgtgaagactctgactggtaagaccatcaccctcgagg

SEQ ID NO: 603238 - DNA, 75 bp, Homo sapiens
gcgcactcgcctcagctgagcctgggcaatctgaaagcaaatcctgtttagatgcaggcgaaggttcctggtgac

SEQ ID NO: 603239 - DNA, 90 bp, Homo sapiens
agtgggcagcaggagctcctgacttgggaccatggtgattcttcagcaggaggttgtggctcactggattgctgaaagccgcattgccat

SEQ ID NO: 603240 - DNA, 101 bp, Homo sapiens
aaccacctaaggttgagaatggctttctggaggtccagatggctgtggaggccaagtttgtccaggacaccctgaaaggagacggtgtgacagaaatccgg

SEQ ID NO: 603241 - DNA, 98 bp, Homo sapiens
gtgttcactttttacacactcgtgatgtagttcatcttgatttgaagtcatccgtccttggctcaggatttggagagcttgcaccaccaaaaatggca

SEQ ID NO: 603242 - DNA, 75 bp, Homo sapiens
ttgcagccctagtgtttgccggagccatggaatttgctgaaggtcagaatgaaggaacgatttccgtagttgaag

SEQ ID NO: 603243 - DNA, 74 bp, Homo sapiens
atgcacctatcttaacaaatacaacattgaacgtcataagacttgttgtccaatatcagatggaaatgatgcgg

SEQ ID NO: 603244 - DNA, 98 bp, Homo sapiens
gacctccaaacccaaaatccactgcttcaggagcctaaagcgtgggtgctgccttaacaatttcaggaaaagactaaaatgcttccgatgtggagcag

SEQ ID NO: 603245 - DNA, 101 bp, Homo sapiens
gctctcgtggcattatccttcagtggggctattggactgacttttcttatgctgggatgtgccttagaggattatgggaaggagctcattgccaagttaga

SEQ ID NO: 603246 - DNA, 90 bp, Homo sapiens
agggatgaacctcgagttgctgggtcctggatgttctgaccaaagggaagcagcaggcattctttgtgccaccaagccgagctattgcac

SEQ ID NO: 603247 - DNA, 90 bp, Homo sapiens
ctccaggcccgtcggcgcggagagttatgcccagccaagtcttcagtatatccaggggcaacagattttcacagctcatccacaaggagt

SEQ ID NO: 603248 - DNA, 75 bp, Homo sapiens
ggccgggccaccgacagcttctcgggcaggtttgaaggttcgtgctggccgtgggcagcgccgtctttgatgcca

SEQ ID NO: 603249 - DNA, 101 bp, Homo sapiens
caggtgccttacaactacaaccagctggaaggcagattcaagcagctgcaagccagatgaaaactcgctggatttttcctcctgtatgttacggcctggga

SEQ ID NO: 603250 - DNA, 82 bp, Homo sapiens
gcggcaggcgctgcgctgcactagtgtccctggccagtgtccttccacctgtccacaagcatggggaacatcttcgccaacc

SEQ ID NO: 603251 - DNA, 82 bp, Homo sapiens
acggccctgccgaccttggcgagagccccctcgcctttctcaccagcaacccagattcttcaaacacctaaatgaaagtgat

SEQ ID NO: 603252 - DNA, 100 bp, Homo sapiens
gggatgtgaaaactctgttactgaagtagtttatgccaacgtgacttcattcatacagatgaaccaaggatcgggatagcagtataaaattagaatcaag

SEQ ID NO: 603253 - DNA, 90 bp, Homo sapiens
acagggggtacacatatctgtatatagctggacatcgtggagttcatcccctctctcctctactttggctacacggccctcatggtcttg

SEQ ID NO: 603254 - DNA, 74 bp, Homo sapiens
aggagtacgacgtgatcgtgctgggcaccggcctgacgggatgcttgaagatggaaagaaatttgattcctccc

SEQ ID NO: 603255 - DNA, 75 bp, Homo sapiens
cggaaaaggacgcaaagttctccggcgaggatttctacagtcatagcaactgggtggagctgggcgagcagcagc

SEQ ID NO: 603256 - DNA, 100 bp, Homo sapiens
acatgtgcttggtgtcgtttttccttgagctgaacgtcttgcaacagtggccgcacgcatagaatcaccacgacagcagcatgcatgatggacctcagga

SEQ ID NO: 603257 - DNA, 100 bp, Homo sapiens
tggaggaaacaaacaggccctggaagaggcggcaacagactgtttgcaacctctaagcatgcaggctctcccagcccagcctgagtccttgtgtatcgtg

SEQ ID NO: 603258 - DNA, 100 bp, Homo sapiens
tcggcctcccaaagtgctgtgattacaggcaactctggtagctctccttgtctggttgttttgaagaaagaagagtagaagaaaaagttgagtaaatcat

SEQ ID NO: 603259 - DNA, 75 bp, Homo sapiens
gcaaagccggctgttaccctgcacagccgtcaccctcaactttcccttcagaggctgacccgcggctgattgagt

SEQ ID NO: 603260 - DNA, 90 bp, Homo sapiens
cccgtcgtcgtctgccttcgcttcacggcgccgagccgcggtccgaaatgtttctccatcccagagagatgaagtaattcaatggctggc

SEQ ID NO: 603261 - DNA, 73 bp, Homo sapiens
cacggagttcgggggatggcacagaatgggtgtttgatgatggtgatgagcgaacattgagacgtacctcact

SEQ ID NO: 603262 - DNA, 74 bp, Homo sapiens
ggaacttggttccccctccctcagcttccgccccaaaaggttctcagaggcactgtgactgacttccctggatt

SEQ ID NO: 603263 - DNA, 82 bp, Homo sapiens
cctttggggtgtgggcagtgccctgaacaagactggactcagcacactcctgggaatcttgtatgaagacaaggagagacag

SEQ ID NO: 603264 - DNA, 100 bp, Homo sapiens
gcggtgaggcggcgacgggctccggcttaagagttggacagtggaggaccttcagaagaggctcttggccctggaccccatgatggagcaggagattgaa

SEQ ID NO: 603265 - DNA, 100 bp, Homo sapiens
cagcatgcggaaggcattgctgggagcctgaaaactgtgaatgagtgcgtcagtttatagaaatggtgaatggtacagatagtgaagtacgatgtttggg

SEQ ID NO: 603266 - DNA, 90 bp, Homo sapiens
attttccctcctcaaactgactttgcagccacggagagctcgaagacgcgacgtccatttgtcgaaagaacaggagagccgcctaccctc

SEQ ID NO: 603267 - DNA, 83 bp, Homo sapiens
aaaccttatagcctgcttatgggggaagaatagcctaacatggcagaccagagacagcgctcactgtctacctctggggagtc

SEQ ID NO: 603268 - DNA, 100 bp, Homo sapiens
aggtgatgcaagcaacagccactagtgggtttgccagtggaaatcaatgaactgagccatgttcaaatccctgttatgttgatgccagatgacttcaaag

SEQ ID NO: 603269 - DNA, 86 bp, Homo sapiens
ggaggtgatggtggatataatggatttggaggtgatggcatctatatcataaatctcaagaggacctgggagaagcttctgctggc

SEQ ID NO: 603270 - DNA, 98 bp, Homo sapiens
cccgagttcatcgcctacccccatctccgcatcaggaccaagacccagaagtccacattcccctcgagaatctacagcagtttcctgccttcaattct

SEQ ID NO: 603271 - DNA, 100 bp, Homo sapiens
gaagatggccctcagcacacgctacaggccatatagctaccggcactttgcaccccccaccacaccctgcagcacagatgtttgtgacagtgactatgct

SEQ ID NO: 603272 - DNA, 100 bp, Homo sapiens
tcaagggggtgttacactttgacgactgactaaacctcgagggccagaaacaaaccaaagcaaaattctgcctccaaggaatggtcctcgtccgaagtga

SEQ ID NO: 603273 - DNA, 82 bp, Homo sapiens
acgaggcaaggagctaaagcagcgtgcgttcagccctggggtcctgaacgaggctgtgggggccctgatgtaccacaccatc

SEQ ID NO: 603274 - DNA, 100 bp, Homo sapiens
cgggaactgtttggctgccccagtgaggctgatgtcaacagtgaaaaccccacagaagaagaagcatcttcaaaggaggattctgcaccttctaagccag

SEQ ID NO: 603275 - DNA, 98 bp, Homo sapiens
gcaggagctgggcctaggtctgcgccctggggtcgggccccggctcagtggtcccaggcagctcgggtgtcggaacccccagacagttcacgcgacaa

SEQ ID NO: 603276 - DNA, 82 bp, Homo sapiens
ccttgggtttgaagatgatgttgtgattgagtttatattcaaccagctggaagtgaagttgctgaaccaggcagcagagtgg

SEQ ID NO: 603277 - DNA, 75 bp, Homo sapiens
aggagatcgaccggttccaggtgcccaccgcgcactcggagatgcagccgctgacatccccgattgaaagaacca

SEQ ID NO: 603278 - DNA, 74 bp, Homo sapiens
gctgtatccaggccttattcttatagactatggacattttcacacggatgataccatcggggaccttaagaagc

SEQ ID NO: 603279 - DNA, 83 bp, Homo sapiens
ctctactgtaatcggggtacggttaattccaagggagtaagccctgaaccaattcatcttaagattttttcacccaacgttgt

SEQ ID NO: 603280 - DNA, 90 bp, Homo sapiens
aggtggaattatgccctgttggttccaatgctgggattggctgcttttcgctttaccctctgaacttctgatcgaaggtcatccctctcc

SEQ ID NO: 603281 - DNA, 105 bp, Homo sapiens
tgttcaaacagcactgccaaatagcagaagaataccatgaggtcaaaaaggaaatcaccctgcttgagcaaaggaaatatttggagttcttacaacatggcagac

SEQ ID NO: 603282 - DNA, 82 bp, Homo sapiens
ggaagagattcagccagcacactcctcgcgagcaagctgctgatgcaaggaatcccctgggctcccgtccactccactgctg

SEQ ID NO: 603283 - DNA, 100 bp, Homo sapiens
cgccgagcgcgccgcgtagacctccgctcccccagaatacatccagcctgtgtgcctcccagctgccggccaggccctggtggatggcaagatctgtacc

SEQ ID NO: 603284 - DNA, 75 bp, Homo sapiens
gttgtaacactctacaagatgggttttccggaagccgccaggttaaacactttaagatgagaaaaattgatctct

SEQ ID NO: 603285 - DNA, 148 bp, Homo sapiens
gcggccagtaaagaaccagaatgcactggtcagttaatacaagaactgcggagagctgcatgcagtcgaaccagatctgaactcagaagtcaccttcccggccttctctgagaatctgatttgatatgtggtccttcccttctgctcc

SEQ ID NO: 603286 - DNA, 83 bp, Homo sapiens
atctttgctcctccctgcaactaactccattcttaattgtgagacggtttaagcggaagcatcttactgccattgactgccag

SEQ ID NO: 603287 - DNA, 138 bp, Homo sapiens
gccgcggcgaccaccccggacggcccctgtccccgctggcgggcttccctgtcgccgttcgctgcgctgccgggtgggcaatgcagcactcaacagcaagctctgtgatctcctgctctccaagcatggcatctatgt

SEQ ID NO: 603288 - DNA, 100 bp, Homo sapiens
ctggcacccggtgcttatgtctttggctctccttgaggagaatgaccagctgatccgctgtattgtggagtatcagaacaagggccgcgggaacgagtgc

SEQ ID NO: 603289 - DNA, 141 bp, Homo sapiens
ccccattttaccagtgtgcagaagttctcgaatcattctttgtacagaaattgaaaggcttcaaagctagcaggacacatgacggaagtgtgtatttttgggccactccacggcaggtccctagcctgcaacatttatgtc

SEQ ID NO: 603290 - DNA, 82 bp, Homo sapiens
cctctgcttggacagcccccacacgagcacgagatgcttcgccacccagttttcgggaaaaagacctcgatgaagttctgca

SEQ ID NO: 603291 - DNA, 75 bp, Homo sapiens
atcaaggatgtcattgagcagctcaacctgttcaccaaccgctgcctgctcaagtggctgaagttgtgggacctg

SEQ ID NO: 603292 - DNA, 82 bp, Homo sapiens
tgcgagaccctagaggcctgcggcctgcggctactgcagcactggggtgtcagttgttggtccgacccagaacgcttcagtt

SEQ ID NO: 603293 - DNA, 74 bp, Homo sapiens
aagctgtttcctaccaggtcacacactgttgcagcacaggataaggaggtagaatttggaggacctgcacccag

SEQ ID NO: 603294 - DNA, 83 bp, Homo sapiens
ttcctctcggtcgccatgcatcagatcatgcccaaaggcgatcagtgggtgaccgcggctgcgagggactttgtcatccgtcc

SEQ ID NO: 603295 - DNA, 75 bp, Homo sapiens
gctcaagcagagcttacagtgcaagtgtgccggtccaacaaaagcccttgggtctgtttgacttgttcaagtgtc

SEQ ID NO: 603296 - DNA, 83 bp, Homo sapiens
aagaaaccaacattcccaacagccaccaccaccaccagatgaactcccccactggaaaggattctgaaagaaatgaagtcagc

SEQ ID NO: 603297 - DNA, 90 bp, Homo sapiens
ccggcggcgggacccaggcggttgaggctggtcagaccaaagagaaccctgtacagtaagaaatatggtgtggacctcatcagatacact

SEQ ID NO: 603298 - DNA, 96 bp, Homo sapiens
agaggccacagcccggactccatcgactcccccggctcttagactagttgttatcgtcaggagctgtgcaaactgatgtgtgaacggctaaaactc

SEQ ID NO: 603299 - DNA, 101 bp, Homo sapiens
tggtcttatcaaaggaggagctgccaaacttcaggttgtacgtggacactataaaggtcagcaaattggcaaagtagtccaggtttacaggaagaaatatg

SEQ ID NO: 603300 - DNA, 100 bp, Homo sapiens
cggcggcagcggctgcggagaaggcgagcgaagatcactggggtgatcctgctggctgttggagtctggggcaaacttactctgggcacctatatctccc

SEQ ID NO: 603301 - DNA, 98 bp, Homo sapiens
ctcgcgctgattctcacgggcccggctgccggcccccgctctgccctggtgtggagggcgcagctttccagagccgacttcctcatgaccggatgact

SEQ ID NO: 603302 - DNA, 90 bp, Homo sapiens
accgagaaaagaagccagaggaactcatctcctgtgccgactgtggcaacagtggtcctgaacgaggctgtgggggccctgatgtaccac

SEQ ID NO: 603303 - DNA, 75 bp, Homo sapiens
agccatcctgattctggacaatgatggagatcgactttttgccaagggatgcagttattaaatgctgttcttctc

SEQ ID NO: 603304 - DNA, 88 bp, Homo sapiens
gctgacggccccgagcacggccgcccggccacggaggaggaagccaagaatctggtgagcgaagccatcgcagctggcatcttcaacg

SEQ ID NO: 603305 - DNA, 82 bp, Homo sapiens
ggacggcgtggaccacatagacatttacgcggatgtcggcgaagagttcaaccagatcaacaggcggtccttcgggtcggag

SEQ ID NO: 603306 - DNA, 82 bp, Homo sapiens
gcccggtgcccgaggaggcagccaagctcgtggcctgcctctgcgtgcgaggaggcccagcctcgtgatgaggaatagcaag

SEQ ID NO: 603307 - DNA, 100 bp, Homo sapiens
cggagacagccaccacgggggagccagctatgtccccgagaggacctcctccctgcagcggcagagggacatcaaagacgtcagactggatggcgagtcc

SEQ ID NO: 603308 - DNA, 100 bp, Homo sapiens
acaaaccaccctttaaattttcaagggaaggacaggttgactacagacaaaaagctgctgcagcaggtagaattcccacaaactatctgagaagagagat

SEQ ID NO: 603309 - DNA, 90 bp, Homo sapiens
gttcatgcagacttttttaacggcttcaagcactttcctgaagcggggattcattatccagacagtaccacaggagatgggaagcccctc

SEQ ID NO: 603310 - DNA, 100 bp, Homo sapiens
acagccctcggcctacaagctctttagagaggacatgtactcccaggattccatagatctccttgctaactcaggactacagtttcagaagcatgaagag

SEQ ID NO: 603311 - DNA, 50 bp, Homo sapiens
cagcccccaaatcccggcccaggtctattctggataagcaggttttgtga

SEQ ID NO: 603312 - DNA, 100 bp, Homo sapiens
atcggagagaataaataccgggttattgataaggaaactatagatttattggcgttcacctctgttgcagaactggagttgctgggtttggagaagctca

SEQ ID NO: 603313 - DNA, 72 bp, Homo sapiens
tccccttcgagaggaggcagattcccctctacatagacgacaccctgacgctcatgcaccctgtgctggagt

SEQ ID NO: 603314 - DNA, 90 bp, Homo sapiens
cctcgaactaaacaaattcatcccagaaatctaagagcagcctggaagtttttctagctggtctggtagtttcctcatggatgataacat

SEQ ID NO: 603315 - DNA, 128 bp, Homo sapiens
taaacaagacagtgactccaggatttctgaagactattgtggaagaagcatccattaaggttcaaaccttgtactactcagctgatcacaagctgcttgatgggaacctactagatggacaggctgag

SEQ ID NO: 603316 - DNA, 100 bp, Homo sapiens
ccaccccacgaaggatccctcacagcccagctcgggaagtggacagactgggcgtcatgacccttgtccttgaatgggcaagagggcacatgaagtacgg

SEQ ID NO: 603317 - DNA, 109 bp, Homo sapiens
ttacctgacagcacaatatcacagagccgcccatgcacttcggtcacgaaaactggacaaaatggcctctccagaggagaagtgtcaacaagtcttggaacccccttat

SEQ ID NO: 603318 - DNA, 82 bp, Homo sapiens
atctaatcacagactcctatttgaagtatttgacgaaaatagactggtgacttaagagattaaaattaatttggttgctgtt

SEQ ID NO: 603319 - DNA, 105 bp, Homo sapiens
ggcgttcacacaaactggtcagcgtttccctggagaggaagaggcaaggacctcccagagttgcccaaacttctgacccagactcttcagaggcctgcgcggagg

SEQ ID NO: 603320 - DNA, 100 bp, Homo sapiens
ctgcctgcgcgcggccaagccatgctcggccccaggtcatggaaaatggaagatttgcaaaatacaaatattttacccatgtcatgatcaataagacaga

SEQ ID NO: 603321 - DNA, 80 bp, Homo sapiens
ctgatatttaatgaaaatgacttcgtagaaggcgacctgggagacccagccagtaccgcccagacggacttcggagtggt

SEQ ID NO: 603322 - DNA, 75 bp, Homo sapiens
gaggattgtaaatgcaccaatcagcatgctgtgtctagctcaaggtgctggagaatctggtaaaagcaccattgt

SEQ ID NO: 603323 - DNA, 75 bp, Homo sapiens
gccgtgaagtcagaggcgaacgccactcagcttttgcggcacttggagagtccctgtgaagcaggaagagtgagg

SEQ ID NO: 603324 - DNA, 75 bp, Homo sapiens
tcttataacttctggctggaattaaggatgtgctgggtggcgtcctgatcaccgcactcctcatcgtcctcacct

SEQ ID NO: 603325 - DNA, 100 bp, Homo sapiens
aaatggacaaattgcttggagaacttcatacacttcgagatcagcatcttaacaattcatcatgtggatgcccggagcataccagtgttagcaaaatggc

SEQ ID NO: 603326 - DNA, 100 bp, Homo sapiens
gtaaactacttgaaaaatttagccttgttcaaaaagagctaattttgtcttctaaagatgatgaaattattgagtatcagcaaatgttacataacctaag

SEQ ID NO: 603327 - DNA, 102 bp, Homo sapiens
tttccactcggctcctgtcgtccgttctctcaggctcccgttcagcaattctgtggtgttcttggtcacacatttatggagtttctgaagggcagtggagat

SEQ ID NO: 603328 - DNA, 88 bp, Homo sapiens
ataaccgattgtgtaatggctgaaattgagaaattggggcagaagtatcgagtggctctaagcttggagaacagccatctctggaaga

SEQ ID NO: 603329 - DNA, 51 bp, Homo sapiens
aggccacgccctacaactacccaggctttcgggtcacctccagcagctccc

SEQ ID NO: 603330 - DNA, 82 bp, Homo sapiens
ctgcgaggaaaatggcggcgggagccatggcaatgacaggctcaacaccttgctcatccatgagtaaccacacaaaggaaag

SEQ ID NO: 603331 - DNA, 75 bp, Homo sapiens
gtgttttagaggataccttggtcccagagtcatcatgaaggagacgttgatccagcagcacgtgtcatttcatta

SEQ ID NO: 603332 - DNA, 126 bp, Homo sapiens
ccagcaaacgtctacactgtacatgctttttattacaagactacggagcataggaggaaaattcatcatctgttgctgatgattcctctgatcatgtcagtactttatgtctgggcccagctgaac

SEQ ID NO: 603333 - DNA, 96 bp, Homo sapiens
catacccgtgacctggggatcgctacggaccttaaaatacccgcaacagccccttcgtcccaaagctatcagcttcccagtttgcacaattcatca

SEQ ID NO: 603334 - DNA, 90 bp, Homo sapiens
gaaagaaaaaggaaaaaatagaaaaacaaattgctacatccgggcccccaccagaaggtggacttaggacaggagaatatgccacagatg

SEQ ID NO: 603335 - DNA, 50 bp, Homo sapiens
caaagactggtgctatgaagctgaaatggagaagcatcatgtgccaagtg

SEQ ID NO: 603336 - DNA, 90 bp, Homo sapiens
gtacagtctctgcacctcgcgccccagcaggagctggaggagggaatgatattcagtggtgtttttctcaggtgaaaggagcagtagatg

SEQ ID NO: 603337 - DNA, 124 bp, Homo sapiens
gggacctcgaatgtgggaccccagcccctctccagctcgaaatcgtatggaacgccgtggactccgggcactgcctgcagacctactccctgcacacagaggcagtgcgggccgcccggtgggc

SEQ ID NO: 603338 - DNA, 75 bp, Homo sapiens
tttcacggctcttcactgaggtgctggatcacaatgaatgtctaattatcacagatttggattcctagacttgcc

SEQ ID NO: 603339 - DNA, 51 bp, Homo sapiens
cagattctatttttactgaagaaggagagaaactgcttggaaactccctgc

SEQ ID NO: 603340 - DNA, 87 bp, Homo sapiens
tccttctggaagaggcgaaactgagatagaatctcactatgttgaccaggctggtcttgaactcttggcacccaagcgatccttttg

SEQ ID NO: 603341 - DNA, 74 bp, Homo sapiens
gctgaaccaactcagaatgcattgccattttcacatagtgtatcctactcagtacatgtatctgaagattaccc

SEQ ID NO: 603342 - DNA, 101 bp, Homo sapiens
cggcccgggactcgggtttgggcgaccaggaggtgccggtggccgcgctcggacccggccgctacctgtctgaggaacccgagccctacctggcagtctac

SEQ ID NO: 603343 - DNA, 100 bp, Homo sapiens
gaggctcaacggcagaagcttcaccacaaaagcgaaatgggcacaccacagtacataccgagcatcaaatattaaggcacccggagaacagacagtacca

SEQ ID NO: 603344 - DNA, 100 bp, Homo sapiens
atcgatgggacccagacaaggctggagacaaacctcatatgcagacttatgaagttgaccttaataaatgttaattattcatactgcatgactgaggatt

SEQ ID NO: 603345 - DNA, 82 bp, Homo sapiens
ccacacgaagagctgccgtcgctgcagagaccccgctatggctgtcgcgtggggcaggcagtggcgctgcgggccaaggcct

SEQ ID NO: 603346 - DNA, 73 bp, Homo sapiens
tcaggtcaaagactacagctttgtcactgaaggtttaggattgggtgtgtgtgtctcctctctgaatggcact

SEQ ID NO: 603347 - DNA, 80 bp, Homo sapiens
attcctttcttggcaactggaggtcaaggcgaatatttaacttatatctgcctgtcagctttagccacagtagaagactt

SEQ ID NO: 603348 - DNA, 75 bp, Homo sapiens
gtcggcatgaagagctacatgaagctgtttctgaaggattgtcattcttgcatagcagtgtgaaaatggtgcatg

SEQ ID NO: 603349 - DNA, 101 bp, Homo sapiens
gtccgcaagcaaggcctgtgctgcacttttctttatagctccaagctctacagattcttcaaatatattgagaatagggatgttgcaaaaacagtgttaaa

SEQ ID NO: 603350 - DNA, 87 bp, Homo sapiens
ttacagacgctgccagcatcgccgccgccagcaaattgtggctactaatttgccccctgaagatcaagatggctctggggatgactc

SEQ ID NO: 603351 - DNA, 74 bp, Homo sapiens
tcggagaccccgcgccgacggctgctcaaacatcagggattcaggtccgttcctctgaagaatgggtacagcga

SEQ ID NO: 603352 - DNA, 100 bp, Homo sapiens
aagcaagatcatgcagtaggcaactttgcttccaaaagaagttaccaacatttagaatttctacttattctgagcttggaaaacactgcagttgacttgt

SEQ ID NO: 603353 - DNA, 74 bp, Homo sapiens
gacgttcggccaagggaccaaggtggaaatcaaacggagtgcatccgccccaacccttttccccctcgtctcct

SEQ ID NO: 603354 - DNA, 101 bp, Homo sapiens
cttcaagaatgtttttgaccagaaaaccgacaaccttcccagaaagtccaagctcgtggtccaagatagccactctaccagctacccatccctcctcagcc

SEQ ID NO: 603355 - DNA, 75 bp, Homo sapiens
tgacgacccctactgcgaagttggtgtcatcatcgttggtccaggcgcaatgttcagcgtatttgaggaaatcac

SEQ ID NO: 603356 - DNA, 74 bp, Homo sapiens
ggactgcgcccccgggagcgggcgcccagaggtggtttagattagaatccaaacaaggaaaacgaatcaaaaac

SEQ ID NO: 603357 - DNA, 100 bp, Homo sapiens
agactgaaggacagcggcaccgccagacggccagaaagttccgccatgagctggggcacggagctgtgggttagcactctacgtatatgaatatctgctc

SEQ ID NO: 603358 - DNA, 96 bp, Homo sapiens
gtgaggagaagtatgaggtggtgaaactcaagatccccatggacaacaaggagatatgattctataacagactcttccagaaatgatatgaagagg

SEQ ID NO: 603359 - DNA, 83 bp, Homo sapiens
cgcgcgcagggcctgcagcgggagctggacggcgagcgcgagcggcgcgagaaagtctgtgaggaacagaagtgcgaagaaga

SEQ ID NO: 603360 - DNA, 71 bp, Homo sapiens
tgcgcaacctcgccgtggccatgtgcagccgctacattctgattcccagcatagccacgaagtgatgcctc

SEQ ID NO: 603361 - DNA, 82 bp, Homo sapiens
gctggcggcctgcgcagccacctcaaggatcctggggcgtcctttggcagtcgattgcaccctgcactagagagaagtccag

SEQ ID NO: 603362 - DNA, 149 bp, Homo sapiens
gtttacgaagagaaaagaacctggaagaagcaaagaagattaccattaaaaatgatccaagtctcccagagccaaaatgtgtacaactccaaaaggagacattggagaagaaccaagctgggtctataaggaattgcacatgagatggc

SEQ ID NO: 603363 - DNA, 146 bp, Homo sapiens
cagtgcgggacccatcaggcaggcccctccgcctgccgcctgtcctttctcatcccatctttgacaatcggaccccggagtggagatgacagtgttccggaaagtcagttccacacccccggtgcgctgcagctcccagcactctg

SEQ ID NO: 603364 - DNA, 100 bp, Homo sapiens
gacaaaagcttcctcctctcagctccctattcccactaccacctaggcctgctacctgactctgagatgaccaggactcaggacacccctgcacggcggc

SEQ ID NO: 603365 - DNA, 74 bp, Homo sapiens
gagtattcttggatcttgcacaggaaggaattaaaggtttgaatggggatgtgaatgttaatggcttatctact

SEQ ID NO: 603366 - DNA, 99 bp, Homo sapiens
tggaaggcccccggtctctggaggggagcaggcggtagcgagtttagtgacgtggagcaggcgcagaacagtcggagaggaatgttacggcatccggag

SEQ ID NO: 603367 - DNA, 89 bp, Homo sapiens
tcgtggtagtgatggccgtcggactgtggatggcccactgcgtgaccttggttcagctgtccatttcctgtgaccatctcattgacaag

SEQ ID NO: 603368 - DNA, 100 bp, Homo sapiens
ggtcggcggcgcccggatgggcagctgaggatatgaacgagactgccaaacaagaagatattttggaatccacaacagatgctgcagaatggagcctaga

SEQ ID NO: 603369 - DNA, 100 bp, Homo sapiens
gcacttagtgcccacaaccgcaccaagaagcacgacctgctgagaactgggcacctccgggctgtgaaaagttagggaagtgtctgacacctccagaatc

SEQ ID NO: 603370 - DNA, 83 bp, Homo sapiens
taccactcacccgcagactccttctccagcatgggctcgcctgtcaacgcgcagctccataatgggagaagtaaagaacaaag

SEQ ID NO: 603371 - DNA, 97 bp, Homo sapiens
ttgaagagggaatttgatgaagtttttacaaagaaaatgattgagtctatgggaatgaagtgaggccagtggccgggtctgctgagtccgcagcact

SEQ ID NO: 603372 - DNA, 140 bp, Homo sapiens
agaagatgccagaagatggcttgtcagatgacaagaaaccattcaagtgtttcactcctaaaggttcatctctcaagggtgctgataagactgtgaaaggcccagatggactgaccgcctttgaagccactgacaaccag

SEQ ID NO: 603373 - DNA, 100 bp, Homo sapiens
cctgagctgaaatggcagacgatctcggagacgagtggtgggagaaccagccgactggagcaggcagcagcccaggcctgctgggaacgggacttctaaa

SEQ ID NO: 603374 - DNA, 98 bp, Homo sapiens
catctcctagtattgcatcctacagatgtgctgtaaacatcaaaagaagacggtgggatcaggagatgaaagtgagtgagaaggttggaggagctgaa

SEQ ID NO: 603375 - DNA, 75 bp, Homo sapiens
ctgggatccgcaggttccctacacggtctcctgggtcaaggagcttgaagaaatccgcaaatgtgggatgaaaaa

SEQ ID NO: 603376 - DNA, 100 bp, Homo sapiens
tctctttaattggttgcagttgagctaatggtggagccaaaatgctattgccctgtcttcatcaacatttaatcaactttataggccattttatcttcag

SEQ ID NO: 603377 - DNA, 98 bp, Homo sapiens
gtaagaagaggtcccaatcccccactctttccgccctaatggaggtctccagtttcggaagctcttcgtgggcggtcttgactggagcacgacccaag

SEQ ID NO: 603378 - DNA, 83 bp, Homo sapiens
cgcgctgcccgcactcctggtcctgctcggggctctgttcccagtcagggccgggacctgaagctgtgcctgtgggacctcgc

SEQ ID NO: 603379 - DNA, 107 bp, Homo sapiens
tctcgctccgtggccttagctgtgctcgcgctactctctctttctggcctggaggctatccagcgttcgagaacttgtcttggacaattgcaaatcaaatgatggaa

SEQ ID NO: 603380 - DNA, 83 bp, Homo sapiens
cgctgtgtccgtcgccatgacagatgatatcatcaagttgaatcgaaaggaagggaagaagcagaattttccaagactaaata

SEQ ID NO: 603381 - DNA, 100 bp, Homo sapiens
gcgagagccgcgggagagtgtgcagccgagtcactactgcctgcctgcctgcctgctacgctcaccatgccttctcctatgcctgagtacctgaatgtgc

SEQ ID NO: 603382 - DNA, 50 bp, Homo sapiens
tttaatcctgaaagccatgcagcgggagcagcagccaagctggacagatg

SEQ ID NO: 603383 - DNA, 83 bp, Homo sapiens
ccacgacaatccagtttcctgctaatttgcagcttcctccaggagccttcacgtaaatgggtccagtcatgcctcccagtaag

SEQ ID NO: 603384 - DNA, 75 bp, Homo sapiens
cctcggtgaccaggagactcggcgcaaggcccgagacacatcatctcagagttggagcacctgacgtttgtcaac

SEQ ID NO: 603385 - DNA, 100 bp, Homo sapiens
ctggccaagggctccacacaccaagaccaagtgaaggagaacgacctgctcagaatgagaagaggaaggagaaaaacataaaaagaggaggcaatcgctt

SEQ ID NO: 603386 - DNA, 82 bp, Homo sapiens
gcgacccgggcgcggcgcggggaggctgaagggacgctcgggtgagaagccctaccactgcaactgggacggctgcggctgg

SEQ ID NO: 603387 - DNA, 100 bp, Homo sapiens
cttcgttaagggactcaggcagtacgggaagaacttcttcagaattagaaaggagctgcttcccaataaggaaacaatttggagcaagaggtggtggtgg

SEQ ID NO: 603388 - DNA, 100 bp, Homo sapiens
tctccctgagtctttgaggacacagcctcgctggaggcagtttctggtgggcaaacgcagaggcgggaacaaactagccctcaagacgggaatagtagcc

SEQ ID NO: 603389 - DNA, 74 bp, Homo sapiens
ggaaccgaaaaggcgaggagtatagtacggcaaaaaactgtcggtttcaaccgcagcggaggtggtggctatag

SEQ ID NO: 603390 - DNA, 73 bp, Homo sapiens
cagccaggggaacatggcagtgcctgtgaggctcagcaacagcctcaccaaggactccatgaatatcaaagcc

SEQ ID NO: 603391 - DNA, 100 bp, Homo sapiens
ggccccaggcctcctgtgggacgccagtcaccagcaggagcagccaaccagcagcagccatcatggagatgttcaagacagagttccttcatattcacaa

SEQ ID NO: 603392 - DNA, 73 bp, Homo sapiens
ttaagtcggccttccctcacctacaagaaactggcattgcccgccttgtcgaggaatctgcaactgcagtttc

SEQ ID NO: 603393 - DNA, 101 bp, Homo sapiens
ggagtactcggtgctgagtggggaatacgctgccatcaactccatgctggaccagatcaactcctgtctggaccacctggaggagaagaatgaccacctcc

SEQ ID NO: 603394 - DNA, 50 bp, Homo sapiens
attgctgggaagctgacatcacaggtctgtgtgaaaatgtgtgaccctgc

SEQ ID NO: 603395 - DNA, 101 bp, Homo sapiens
gagaagtatccaatagggatattgtagaaactgtctttaacctggtaaaagtttcatttgatctgaatagtattaaaataaaatacctggatgaggaagat

SEQ ID NO: 603396 - DNA, 100 bp, Homo sapiens
agctcttccgcaacctcttccaccggcagggcttctcctatgactacgtctttgactggaacatgctgaaattctgccctgaaactctaatctcattgcc

SEQ ID NO: 603397 - DNA, 98 bp, Homo sapiens
ggagcagtgctggaccgcgcgcatccgtgctggagaatctggtaaaagcaccattgtgaagcagatgaggatcctgcatgttaatgggtttaatggag

SEQ ID NO: 603398 - DNA, 100 bp, Homo sapiens
aacacccacatacaggagacaccaaagaagagaaagacaaggatgaccaggaatgggaaagccccaggtcaaacatgtgttgacatcaaggacaacgtgg

SEQ ID NO: 603399 - DNA, 74 bp, Homo sapiens
aaaagatcacaagcaactctggatgggattgcaaaatgcacaaacacagagcagtctaaagcaaccgagcactg

SEQ ID NO: 603400 - DNA, 82 bp, Homo sapiens
cgcggcctcacaggtctgaggggaatgtatcctgtcaggtataatgtcagtgaatggcaagaaagttcttcatatggatcga

SEQ ID NO: 603401 - DNA, 90 bp, Homo sapiens
cagtgggagagcgaggcctgagcctctgcgtctagggcgccctgcgtccggcagaggaggcgagcatcccgctcaggtgatgaggaaccc

SEQ ID NO: 603402 - DNA, 100 bp, Homo sapiens
gtggtggatgatgcctgtaactacccagatgaaatcaagacgcaacagccctcatcgagggatgctcagcttcctgattggagaagacgggctcgtatac

SEQ ID NO: 603403 - DNA, 101 bp, Homo sapiens
aactatggacgactccgaggaacattgagtctatgcagatggtagtatatgtctggacatacttcagaaccgttggagtccaacctatgatgtgtcttcca

SEQ ID NO: 603404 - DNA, 75 bp, Homo sapiens
tggcacctggcgcccagcgcgcccgtggccgctgccgcctccgccccaggcccctccagccagcgtcaggtgcag

SEQ ID NO: 603405 - DNA, 75 bp, Homo sapiens
gcatcgatgagaagaactttgtggtcgtcatggtgaccaaggtgttctcccggcccggctgctcagccatacgcc

SEQ ID NO: 603406 - DNA, 75 bp, Homo sapiens
attggaacaagcgttcagaactgcacctgtggggggacctctcatgcagacttgcacatatgcagggagtattgc

SEQ ID NO: 603407 - DNA, 98 bp, Homo sapiens
aacccagatcgctactaccccgcagttcccggacatgatcctctccgcctctcgagaggagaggagacgccgtgagcgggacgaccagatgtaccgag

SEQ ID NO: 603408 - DNA, 50 bp, Homo sapiens
cccgcgtgaaccacatgcccagcacgggtgatgatgaacagtctacacag

SEQ ID NO: 603409 - DNA, 90 bp, Homo sapiens
gcggtggctgaactgtccccggcgcggccagccggtggcaggtaaaacttccttttcctgtagatcaaatcacagatcttccaaggaacg

SEQ ID NO: 603410 - DNA, 83 bp, Homo sapiens
ggtctcgggggccgctctgggatcccggccaccagcaattgtccggtttttctatatgagtggagaagacagctgttaccagg

SEQ ID NO: 603411 - DNA, 100 bp, Homo sapiens
gctgcagcacgtggacgctgactcggaagtgcaggctcacagaacatttcctgcctgttgctcacactctgttgtccacagcatacccgcaccctagatg

SEQ ID NO: 603412 - DNA, 82 bp, Homo sapiens
aggaatgctgcccgcctttgcttcatctacagtcaggatgctggatgttcatggagtgagtattacagcgtgaaataaattc

SEQ ID NO: 603413 - DNA, 90 bp, Homo sapiens
cctgtgatctgcaagtcctgggagacgcacagctaagatgcccggacatcctggaagctgggaaatgatgccaacaagattcagaagaac

SEQ ID NO: 603414 - DNA, 46 bp, Homo sapiens
cccaagcgtggctatccccctgacatggaagagaaggtgagaagtt

SEQ ID NO: 603415 - DNA, 75 bp, Homo sapiens
atcagaactgtgttcgcaattcttacgatgtcttctctttgctacggacggagaacgtgaccttgaagaagccag

SEQ ID NO: 603416 - DNA, 100 bp, Homo sapiens
actcactcacccttccgaactcttaacatcaatgggcaaatccccacaggagaaggagatcagttcttaagagcagccccggtaactggaggaatgggag

SEQ ID NO: 603417 - DNA, 101 bp, Homo sapiens
ctcacaatgaggctccctgctcagctcctggggctgctaatgctctgggtctctgcaattctgtggtgttcttggtcacacatttatggagtttctgaagg

SEQ ID NO: 603418 - DNA, 83 bp, Homo sapiens
tgcctagtgtaccttctactcatctgccggcagggccagtatcaagaggactgcttttaaaacattggtcgatgaagttcagg

SEQ ID NO: 603419 - DNA, 96 bp, Homo sapiens
cgggacctcgcagctctacgtgtaccgcctcaaccgcgacgccgaggtgcagctctgtcatttccactctgctctgctgcacagaaggcagaagcc

SEQ ID NO: 603420 - DNA, 74 bp, Homo sapiens
acagccgtcaccctcaactttcccttcaggaatactcccccagttgcaagaggcgcaggaccgtggaagacttc

SEQ ID NO: 603421 - DNA, 97 bp, Homo sapiens
ccatcctctacaggacccgctttctaccattaaggtacagccagctctaatggcttccatttggcgtttccaaccataatagcctttaccagtcaag

SEQ ID NO: 603422 - DNA, 83 bp, Homo sapiens
agaggtttggctttccagagggcagtgtagagcccgatggcaccagcaaggagtgtgtgttcatcgagaaggttctggagaac

SEQ ID NO: 603423 - DNA, 82 bp, Homo sapiens
ccagcaccggcactttacagagaagcaagccagccaagtaacaaagcagtttcaacgaaccaaacttttaaatggaccggga

SEQ ID NO: 603424 - DNA, 83 bp, Homo sapiens
tgagcagagctccgaggccgagagccgacccaacgatctgaactcctcagtaatctcaggggcgatataatcaatgaggtggt

SEQ ID NO: 603425 - DNA, 80 bp, Homo sapiens
atgactttcaacgggactattatgataggctcgtgctgtcttggaaagagaatttaacaaccttttggtcatggggactg

SEQ ID NO: 603426 - DNA, 96 bp, Homo sapiens
aggacgccgcggtcttcccaggcgtcgcggagagcaggtccttccatagtgacgccccccaaggacatctggaatgtcactggtgcccaggtgtac

SEQ ID NO: 603427 - DNA, 75 bp, Homo sapiens
ccctgagttccttgacatgttggaagagtcaccatttttaaaacctaaaatgaccaatgtgtgatttcagtggaa

SEQ ID NO: 603428 - DNA, 100 bp, Homo sapiens
ctctgccttcctgttcacggtgaccttcgcttggtgtcctcctggcctcagcaacctgacaattctgtcgtgtcccggtaagaatgattgatgttggctg

SEQ ID NO: 603429 - DNA, 100 bp, Homo sapiens
ttgaaaaacagtacatttctgcaattgagaaacaggcacacaagtgtgaggagttgctaaatgctcagcatgacgacagagatgatggtgtggattattg

SEQ ID NO: 603430 - DNA, 98 bp, Homo sapiens
taagccgcaactggaagcgtagaggcgagagggcgggcgctttacggcgaactcaggtcagtcattggcaccatgaactggaataaaggtggtcctgg

SEQ ID NO: 603431 - DNA, 98 bp, Homo sapiens
gccaactcttcgttcgattattagctttagtgaaatgggctaataatgctggcaaagtggaaaaatgtgcggccaagcagatagaacttcagttcact

SEQ ID NO: 603432 - DNA, 83 bp, Homo sapiens
ccaccgtccaagtctttgaggccacgataaggtagaacgtcatgacatgaataccttaagcctgcccctgaacatacgccgag

SEQ ID NO: 603433 - DNA, 98 bp, Homo sapiens
cagcgggggcagcgcgatgaggcgggtgaccctgttcctgaacggcagccccaagaacggaaagcctgtggacatctctacagcaatgagtgaacggg

SEQ ID NO: 603434 - DNA, 100 bp, Homo sapiens
ttacatacataacatgggaattgtgcaccgagatctgaagtctgttctctggggaggcagtaaggggccgtggagctggcctcggcctcggcatcgggag

SEQ ID NO: 603435 - DNA, 101 bp, Homo sapiens
atcatgctgcgcggccttcccatcaccatcacagagagcgatgagtctactcttcatcttgtgttgagacttcgtggtggtgctaagaaaaggaagaagaa

SEQ ID NO: 603436 - DNA, 100 bp, Homo sapiens
ccagacgacaagcacacactatggcgctgaaacggattaataaggtctctggggaacaagactcatggaggaaagcagcactaaccgagagaaatacctt

SEQ ID NO: 603437 - DNA, 75 bp, Homo sapiens
ccggcggccctgcccgcccctccctccagcggggatctgacgagcttttctctacttgtgtcactaacggaccgt

SEQ ID NO: 603438 - DNA, 83 bp, Homo sapiens
cctcctgacggctgtacttgagcagtcacctggcacaggtgtggacactgccagcggctgcagccgacttggaatgacctggg

SEQ ID NO: 603439 - DNA, 75 bp, Homo sapiens
ggaaagccaaaagttgcctttcgagagaccattactgcccctgtccctgagtccattcttgcacaccgagaaaat

SEQ ID NO: 603440 - DNA, 74 bp, Homo sapiens
accattcgtttattagaaactattgatgtccataggttgtggacctggcctattagcagatgccaagatgcggg

SEQ ID NO: 603441 - DNA, 76 bp, Homo sapiens
attactgaaagttttgaaattagagacgcagacagatgtggaagatgtgaaatttgtcatcaattatgactaccct

SEQ ID NO: 603442 - DNA, 75 bp, Homo sapiens
agctggacggagctccctggctgagtctgcgctcctcagaccaccggcaggtgaacagcctgatgcagaccgagg

SEQ ID NO: 603443 - DNA, 104 bp, Homo sapiens
gatggaaacctcatagcagctgcctgccagaatggaagcatacagatctgggaccgaaatttgactattgaccaggatgttgtcattactaactcttatgaaac

SEQ ID NO: 603444 - DNA, 89 bp, Homo sapiens
gataatttctttcattgaaggaatcattgctcgtgggaacgcttattcaacggcaaaagataaagagttctatctgtcttctacgcggg

SEQ ID NO: 603445 - DNA, 83 bp, Homo sapiens
taaatctgtctgcagcccagacactgagagccgctttcatcaagatcttgatgtggaagaaatggaggactcagaaccaagga

SEQ ID NO: 603446 - DNA, 90 bp, Homo sapiens
gtttccagcctcaggaatttatggtcgcctttttgaatgaggtacgtcgtttcagagaaaccagacaaaaaaatactaatgaagaagatg

SEQ ID NO: 603447 - DNA, 95 bp, Homo sapiens
gaacgattgggctgagcagaggacgacatgttgcttttcgtggagggtggcccttgggtagggtgaagatcccctgtctttatcctagttccaca

SEQ ID NO: 603448 - DNA, 90 bp, Homo sapiens
gctgcaaatgctcgtgctacctgccctggccctgctcagcgccagcggcactggctccgccgcccaagagaatgtaactggtcactacat

SEQ ID NO: 603449 - DNA, 89 bp, Homo sapiens
accccttagtgcccagccctctgttgaaaaagagaacttggcaatagaaagtcaatcgtttctggaactaatgcaactgaagtatcatg

SEQ ID NO: 603450 - DNA, 83 bp, Homo sapiens
ggcgagtcctacaccgtggtccagaggccctcactcaagaacttctccgcaggcacatcaggctgatcagctgaccgaagaac

SEQ ID NO: 603451 - DNA, 75 bp, Homo sapiens
ggctgctcttgcctgggagtcatggctctggtgtttgccatcaagcaaacggggattcagcgtccgatcctttgg

SEQ ID NO: 603452 - DNA, 83 bp, Homo sapiens
caagaaggacctgtgtaactttaacgaacagcttgaaaatgaatttgttcctgttgaagagtggctcctcttctaatttccag

SEQ ID NO: 603453 - DNA, 100 bp, Homo sapiens
cgctgccccagggctgcggggacggaccagaggagcgagagcagcaagaaccacacccagcagcaatgtcagcggaagtggaaacctcagagggggtaga

SEQ ID NO: 603454 - DNA, 100 bp, Homo sapiens
aggggccccagcagcccccgaaggccctatcaggacatggagtatgaaagacggattgtggctgcacggctcaacggttcccttgatttcttctccttgg

SEQ ID NO: 603455 - DNA, 100 bp, Homo sapiens
atgcaatgaaaaaagttggaagaaagggtgtcatcacagtaaagcccaaacaaattcgaatatcttctaaaacaggaatacctctcaatgtcttaccaaa

SEQ ID NO: 603456 - DNA, 51 bp, Homo sapiens
gactgtctctgtatagtgacaaccaagatccacctccgacccttaagccag

SEQ ID NO: 603457 - DNA, 74 bp, Homo sapiens
atttacatggggatggggaatacaaggactttgtatctttgctaaagtcagtgatgtgaaaagacttgaaatgg

SEQ ID NO: 603458 - DNA, 100 bp, Homo sapiens
atgactttcatgaaatatgtggattccaatctctgttgcttcatcccaggaaaggtgaccaagaatatggcccaggtgaccaaagccctggacaaggccc

SEQ ID NO: 603459 - DNA, 50 bp, Homo sapiens
tggctttggccccacaggctgtcaagggtcctgccctccggaggagcagc

SEQ ID NO: 603460 - DNA, 83 bp, Homo sapiens
tgaaggactgtggagctctcgggtgatagaaattgaagatgcttcacccaccaagtgtccaataacaaccaagttggttttag

SEQ ID NO: 603461 - DNA, 95 bp, Homo sapiens
ggccatcacactctgctggagccaacctgaggcgctacaatgaagccacactatataaggattggcatctctacactgaccctcgggagatcttt

SEQ ID NO: 603462 - DNA, 100 bp, Homo sapiens
gttatctgcaggtattgggagatgcacagctaagatgccaggaccacctggaagcctagaaatggtctttaaggaggagaagtacttgaaagaggccatg

SEQ ID NO: 603463 - DNA, 87 bp, Homo sapiens
ccagaaagcggcttatcgaacagagccgggagttcaagaagaacactccagagatacagatccacgggttttagaaaaacaagaatt

SEQ ID NO: 603464 - DNA, 50 bp, Homo sapiens
gtaaaaatcattaaattggagcctgattcgacggaggcgccttgcacgac

SEQ ID NO: 603465 - DNA, 60 bp, Homo sapiens
acaggatttatcaaatcgagtcactgtcaagtgaagagcgattatatgttagagatagct

SEQ ID NO: 603466 - DNA, 75 bp, Homo sapiens
ctggtccctcagtcacacatgccagagattgctcaggaagcaatggagtatgactatgaatatgatgaaaatggt

SEQ ID NO: 603467 - DNA, 75 bp, Homo sapiens
cctccgagccccttcctgagaagatcccagggcgaccattgacgaggtggagacggacgtggtggagattgaggc

SEQ ID NO: 603468 - DNA, 100 bp, Homo sapiens
atttgccggccctgctggagttttacaagatccactacctggacaccaccaccctcatcgagcctgcgcccaggttgggaatccacgtgttgaacttacc

SEQ ID NO: 603469 - DNA, 74 bp, Homo sapiens
tttaccatctcatctcaagaatggagggtaggccacctgttgagacctggtgaaagatcaggtataataatgtt

SEQ ID NO: 603470 - DNA, 97 bp, Homo sapiens
agtgatattgaccatgatggaatgcttgacagagatgagtttgcagttttcttctggatctgcctcagtcctgacacacagcagctcgggaaatagt

SEQ ID NO: 603471 - DNA, 100 bp, Homo sapiens
gcagaatgcttctcagcagcaacatccccaaacagcggcgtttcacggtggcacatacatggtttccacttgagcggcacagtgacagaacctgcaatac

SEQ ID NO: 603472 - DNA, 96 bp, Homo sapiens
ttctaattttcattccttcaaagtaaagatgacggcgccttgaggtaagctacaggcaacaccacttccgcgtttctcttgcgccctggtccaaga

SEQ ID NO: 603473 - DNA, 90 bp, Homo sapiens
ggaaattaggaacctgttggcaggaaaaccagtagattcccagacatcgcgaagtgaatctgaaattgtgccaaaagttgctaaaatgac

SEQ ID NO: 603474 - DNA, 98 bp, Homo sapiens
tttgaaacttgtttctaaaatccagttggttgaatctggcgatgtggaacccatggatatggagggctgactatatacaccatgttttttcctggcac

SEQ ID NO: 603475 - DNA, 50 bp, Homo sapiens
gtccctgtgtctagcagtttcagaggtagtgacagctactgaaacacttg

SEQ ID NO: 603476 - DNA, 90 bp, Homo sapiens
actaaaatgaaagaaaccgctgaggcttatttgggaaagaaggccataggaaaaggatacagagtagagtttcatgaacctgaaacttgg

SEQ ID NO: 603477 - DNA, 90 bp, Homo sapiens
tgcccgagttcaagaacgtggggaaagtgattcagttcaaggctgctttgaatgctgcatcaagtgtctgggaggagtcccctacgcctc

SEQ ID NO: 603478 - DNA, 100 bp, Homo sapiens
atacagtatgcattggaccagggcgtgaacgtcacccaggaattcaaccccgaggagttctaccacctgctggaggcggccgaaggacacgccaaggagg

SEQ ID NO: 603479 - DNA, 100 bp, Homo sapiens
ccatgggtcctcgacctgcagggagcagaggggacagaggcaccaaggacctccaagacaggtgagcgagtgctgtgctttcatgggcctcttctttatg

SEQ ID NO: 603480 - DNA, 100 bp, Homo sapiens
ggaggagaggaaaatcatcctggccgtcatggataggcagaagaaagaagaggagaaggagcagtccgtgctcaaatgtgctggtggacggacagccatg

SEQ ID NO: 603481 - DNA, 83 bp, Homo sapiens
cggcgggacagagcgcctgcgaccccagtcggtgctccggggaggtcacctgacgaggaggaaaaatatattcagggggaaga

SEQ ID NO: 603482 - DNA, 74 bp, Homo sapiens
gattgttaagcagattacttccatcagtattgagccaggagttgaggtggagcccagtgacaccatcgaaaatg

SEQ ID NO: 603483 - DNA, 100 bp, Homo sapiens
aaggccaagtgctcgcagttctgcaccactggcatggatggcggcatgagtatctgggatgtgaagaggatggagatgaagatgaggaagctgagtcagc

SEQ ID NO: 603484 - DNA, 76 bp, Homo sapiens
cttgactccgctgctcgccatgactttgagaatcactacaagaaaaactccttgtggtgaaggttctaagacgtgg

SEQ ID NO: 603485 - DNA, 100 bp, Homo sapiens
cggacggggagctgaacgtggacagcctcatcacccggctgctggaggattaagatgttctacgaggagcatttgcacttggacgatgagatccgctaca

SEQ ID NO: 603486 - DNA, 101 bp, Homo sapiens
ccgggaccgccagctctgtccgctgcccacagcctagcagtcgggaccgtactgaggtctccgtgaggccgggtgacgctccagaatgggagacaagccaa

SEQ ID NO: 603487 - DNA, 100 bp, Homo sapiens
tggcccaagggtctcccttctcggtgaacgttcagctgctgcaggaccacggggaaattgccaagagcatcagtgtttttctgaccgaagttctcatttc

SEQ ID NO: 603488 - DNA, 87 bp, Homo sapiens
caatttaccagagataattgataacaccctgtaacagctgaagtcctgtgtatggaaactcacatgagtcagctcagtctagaaggg

SEQ ID NO: 603489 - DNA, 75 bp, Homo sapiens
gctgacatcaatgtcacaaaagcggatgttgaaaaggtagcagcaattgcagagacagatgaatctgcagaatca

SEQ ID NO: 603490 - DNA, 90 bp, Homo sapiens
gagaaaggcggcggtgcgtgttgctgcgagtgggacgcgcactggtcggtgccggctcaggagccgggatggctattcatatgaaaagga

SEQ ID NO: 603491 - DNA, 75 bp, Homo sapiens
tccttgaaggagagccagggaaggtgtctaatcttcaatacttgcatagggcccagtcctatgcggagagactgc

SEQ ID NO: 603492 - DNA, 75 bp, Homo sapiens
tttggggagttctgtcatgggtgctccctgctgatgacagggccttttatggatgaacgtgaagccagagaaaat

SEQ ID NO: 603493 - DNA, 75 bp, Homo sapiens
cctgcggctgtcggctggtgcttggcggcagggacgatattgactggggcgactttggggtagaggcagtgtctg

SEQ ID NO: 603494 - DNA, 100 bp, Homo sapiens
cctcaccatacaggaacagggcagacgttagcgtgagtgatcactctcaatcccgggatctgcataaagtattacaaacaaaatcctcttgatgagcaac

SEQ ID NO: 603495 - DNA, 137 bp, Homo sapiens
cgccgcccggcccgcgttcctcccgccggccccaaagacgctaaacgtgccctactctgccccgggggagaggtactccaaagattcaggtttactcacgtcatccagcagagaatggaaagtcaaatttcctgaat

SEQ ID NO: 603496 - DNA, 80 bp, Homo sapiens
aaagagtggatttcagcctgcacggatggtcttgaaacacaaatggtttttgttccagtgtctcgccccatcctcaccct

SEQ ID NO: 603497 - DNA, 99 bp, Homo sapiens
ctcgactgcttcgcctgccagctctgcaaccagaggcagctaaggattataactggtgagtggttttttgaagaaaaggcaaaacgtttcaagcaagtc

SEQ ID NO: 603498 - DNA, 99 bp, Homo sapiens
acctgagtcaccagttaactatggtagcccacccagcattggttcaagtgctggattgtgtcatgtgaccatcccaaaactcagagcaccctatggccg

SEQ ID NO: 603499 - DNA, 75 bp, Homo sapiens
ataagacggcaggaggaagagagagagagggacacaactcagatgggaagttcatcgcccgggcacagcggatag

SEQ ID NO: 603500 - DNA, 82 bp, Homo sapiens
cgcctctactacctctggatgtgcaagtgaaccggagcaaacgacttccgatccagtctgcgctgttgcggctcccgtttgg

SEQ ID NO: 603501 - DNA, 82 bp, Homo sapiens
gccaggactgctcgcttctgctgacggccacagggtttcgtggctgtcccaacaaaaaatcccgatggcacgatgaacctca

SEQ ID NO: 603502 - DNA, 74 bp, Homo sapiens
caccatctccatcacccaccaacaacaccacaataatccacagccaagacatagatgcccttgtaggaggagaa

SEQ ID NO: 603503 - DNA, 80 bp, Homo sapiens
gcgagtcgccgctgcagccctagtgactgcggcctgcatcccgactgggctggcttagatgaagatgaagatgcacatgt

SEQ ID NO: 603504 - DNA, 75 bp, Homo sapiens
ttcgcatttgggaccctgcaggtctctgctttctatccgtcaagatgataaagtcgtgtgcccgagaaccaaaga

SEQ ID NO: 603505 - DNA, 82 bp, Homo sapiens
tcgcaaccaccgccctggccatctaccatgtggtgtcgtgaaaactacccctaaaagccaaaatgggaaaggaaaagactca

SEQ ID NO: 603506 - DNA, 90 bp, Homo sapiens
cgagtacatcgcaaggatggttcagcagcctggcatcctcgctacaacctcattgttgtgggccgatacccagatcctaatttcaaaagt

SEQ ID NO: 603507 - DNA, 95 bp, Homo sapiens
cgtcagactccagcagccaagatggtgaagcagatcgagagcaaggcgcagtgagcctgcaggccgacctcactcgtggcacacaactaaatctg

SEQ ID NO: 603508 - DNA, 82 bp, Homo sapiens
tattttggtgcagactttgctgagggtgacccagcaggaacgaatgcaggaatttgggaactgagctgtgcaagtgctgaag

SEQ ID NO: 603509 - DNA, 100 bp, Homo sapiens
cagcagacagttccaggaagtgaacaagtccaagaggaccttctgattagtccacagtcttcctctatagatgatcacagtcgtgttaaactgcaaaatg

SEQ ID NO: 603510 - DNA, 87 bp, Homo sapiens
tgatgtggaacacgtgctcatcgatgtgggaactgggtactatgtagagaaggccagcttggagaacagcctgagggaggtggaggc

SEQ ID NO: 603511 - DNA, 97 bp, Homo sapiens
aactcttgccctttgagggaccaggaaaagcttttgacatcacctatgtgcgtctcaagttccacaccagccgcccggagagctttgccatttacaa

SEQ ID NO: 603512 - DNA, 75 bp, Homo sapiens
tctcagtcgggctccatccgtgtctgggacctggaagctgccaaaaactggcacagcctccaggttggcgggctc

SEQ ID NO: 603513 - DNA, 102 bp, Homo sapiens
catctttatgcaaagccagcgttacagtaatgttccaggtgtgatgaatgcagactctgctaccattttggctgtttggatcctcctttgaaaaagtctcct

SEQ ID NO: 603514 - DNA, 142 bp, Homo sapiens
tggaaatgaagatgcagtcagagagactttcgaaagaatatgatcaactcctgaaagaacactctgaacttcaggctaatgtaatgcttgaatatgatattgatgaagctcaggcattgttggaaaagaatttatcgactgc

SEQ ID NO: 603515 - DNA, 100 bp, Homo sapiens
gcctgagcaccccaggacctgcgctcagggaaggacaccactggtaccagctgcgccaggctctgaaccagcggttgctgaagccagcggaagcagcgct

SEQ ID NO: 603516 - DNA, 100 bp, Homo sapiens
tcaaataatgaagaaggtgtaaagcttgttcgaatgtctgcaagccagttagaagccctctgtcctcagggatttatcaaagatgttcatgaagactccc

SEQ ID NO: 603517 - DNA, 50 bp, Homo sapiens
cagcatacagcatttctcccaccaggacatggtctgctatacagctcaga

SEQ ID NO: 603518 - DNA, 75 bp, Homo sapiens
ttggaccttccggagcttctcagaagacagagggttttcttttgagccactgaggcggctcccagctgcgttggc

SEQ ID NO: 603519 - DNA, 80 bp, Homo sapiens
ctcggattctcgtagctgtgccgggagccttggtcatcatttgatatatacacccggaaagggccgctggaaaacccaaa

SEQ ID NO: 603520 - DNA, 75 bp, Homo sapiens
acaatgagatcgtggacaagatcatgggcaaaggacagatccaggaccacagccgctttgtcaactgtgtgcgat

SEQ ID NO: 603521 - DNA, 50 bp, Homo sapiens
tgacaacatctatcaacagaagatcaagtcctattttgtaacggattatg

SEQ ID NO: 603522 - DNA, 101 bp, Homo sapiens
cccgattaaagactgtgttgcattatcagcagaagatggctgtgccacccacgtatgccgatcttggcaaatctgccagggatgtcttcaccaagggctat

SEQ ID NO: 603523 - DNA, 98 bp, Homo sapiens
atcgccgcagcccccagccttgcgcgtcgtcgctacctcctcggacagggagtgcatccgccccaacccttttccccctcgtctcctgtgagaattcc

SEQ ID NO: 603524 - DNA, 75 bp, Homo sapiens
ctacctttttcagaaatgcgcagagcaaacatctttcaaagacatttgaagacagtgatttgttccatttgattg

SEQ ID NO: 603525 - DNA, 98 bp, Homo sapiens
tgcacagggagccaggtggatggagaaacatggatttgagaggccaaagtactttgttccccccgacaaggatgatgggattagtccagaaagagctg

SEQ ID NO: 603526 - DNA, 50 bp, Homo sapiens
ggcggatctgggaacagtacaattatagactcacaaggcaatgtcaattg

SEQ ID NO: 603527 - DNA, 51 bp, Homo sapiens
gttcctccaccagcatggagtcatctacagcccaatgatgatcattactca

SEQ ID NO: 603528 - DNA, 50 bp, Homo sapiens
tacatttagcgcatcatgtgatccggttctgcttgagatttcaagaattt

SEQ ID NO: 603529 - DNA, 101 bp, Homo sapiens
gaagacctgcgtcctttttcgtttttcggatgatgccttcaatactacctttatttccaccataggagttcatgatcaagtgttgcccacaccaaatgctt

SEQ ID NO: 603530 - DNA, 82 bp, Homo sapiens
atcatgtctgcgagccaggattcccgcaaatggagctgctcctggtgaacaagctcaagtggaacctggccgcaatgacccc

SEQ ID NO: 603531 - DNA, 89 bp, Homo sapiens
cgcggattcgccgaggcaccgaggcactcagaggaggccccttcccagctgcctgcctgccctagccagctcccaggtgaagagactct

SEQ ID NO: 603532 - DNA, 75 bp, Homo sapiens
ttcaaggtcaagatggtggacgagcttaagagagctgaggtggcaggcagcaaggttgtccctgcactaccagag

SEQ ID NO: 603533 - DNA, 82 bp, Homo sapiens
attaaggatgactgaaaacatcctggaatcaaatagtgttacggcaacaagagtgaagacatttccacctggacacctgacc

SEQ ID NO: 603534 - DNA, 50 bp, Homo sapiens
ctcccaaggtgctgggattacaggaaacactgacgggaacacacgtgccg

SEQ ID NO: 603535 - DNA, 75 bp, Homo sapiens
ggcaaccctaagaacatggcctacacgggtatatttgcttacttaaactaccatgttcctcgaacgagacgagaa

SEQ ID NO: 603536 - DNA, 101 bp, Homo sapiens
cctaaggcttgcaacaagtgttgttaaacacaaaccaccctttaaattttcaagggaaggacaggttgtctgcattcaaaagagcattctattaaagctac

SEQ ID NO: 603537 - DNA, 97 bp, Homo sapiens
aaaggaaacattaaggcgggcccaaacatgaaccactctcgccagttctgcagaggcggggtttcaccatgttgcccagactggtcttgaactcctg

SEQ ID NO: 603538 - DNA, 100 bp, Homo sapiens
gacttgctgccaggggaacgcagactcagagcgtcctctttggagaaaaatgatgatgcacgtgcaacagctgtctcttgcgtctttatgtgtgaaaaaa

SEQ ID NO: 603539 - DNA, 90 bp, Homo sapiens
tggagagattgccttgatagaggactgatgtttttcactgatgagatggtttctgctgatgtactccacggttctgtgcagctattacaa

SEQ ID NO: 603540 - DNA, 74 bp, Homo sapiens
gagggcatgatcaacctcgtcatgtcctacgcggacctgaaggagaagaaggagaaggtggaggagaaggcaag

SEQ ID NO: 603541 - DNA, 75 bp, Homo sapiens
gtcagaacaatcttgaatcatgaagctactaaccagagccggctctttctcgataaacattgacgatcttgagga

SEQ ID NO: 603542 - DNA, 82 bp, Homo sapiens
cgacgtcgtgatccagaagtccagagctgaggactgcctgtttgcagatgatgataattccgaagaaggcttccacactatt

SEQ ID NO: 603543 - DNA, 126 bp, Homo sapiens
cggagacatggccaacatcgcggtgcagcgaatcaagcgggagttcaaggaggtgctgaagagcgaggagataatctcagtgataccttgaagaagctgaagataacagctgttgacaagactgag

SEQ ID NO: 603544 - DNA, 100 bp, Homo sapiens
atgcatgctctcactaagcagttggaggctgtgtctgctctggaggctgccatcgagaacctcaatgaagccaagaactattttgcaaaggttgactgca

SEQ ID NO: 603545 - DNA, 100 bp, Homo sapiens
gggcaatgccggggagtggtgcctcatggaaagcgaccccggggtcttcaccgagctcattaaaggattcgaattagactttcttgtacctaaggctgga

SEQ ID NO: 603546 - DNA, 75 bp, Homo sapiens
cacagatggaaccagaaaagatacgaggctctaggagaggatccaaggattctgtagctacaatgttgtcaagac

SEQ ID NO: 603547 - DNA, 100 bp, Homo sapiens
ttcgggccgagatgtctcgctccgtggccttagctgtgctcgcgctactctctctttctggcctggaggctatccagctgtcctgggtcatgaaacttaa

SEQ ID NO: 603548 - DNA, 100 bp, Homo sapiens
cccagaccgtgtcaccctctacgggctgatggtcaagcccatccagaggttcccacagttcatactcctgcttcagcttatgtccctgatgccaaaaatg

SEQ ID NO: 603549 - DNA, 95 bp, Homo sapiens
gattccaagtaactcttatttgatgtaaacagtgttctagtttgagatccatacaaaatctaaattccctggttgataaaacatcgtggattcct

SEQ ID NO: 603550 - DNA, 50 bp, Homo sapiens
tgggggtgtgcaaacccgagagaactggaaacctctgcgccatgagagcc

SEQ ID NO: 603551 - DNA, 117 bp, Homo sapiens
ctgaagttacacccatcacagaattttcatagagctggactattggaaggaatcatattgacaggtcatgaaaatgagaccaaaagatctctggaagcgattaatgataaaatttca

SEQ ID NO: 603552 - DNA, 95 bp, Homo sapiens
ccggcggctgctgctgctgctgacgctgctgctgcccggcctcggggttttgaacgaagaatgtgatcagaactggtacaaggcagagcttaatg

SEQ ID NO: 603553 - DNA, 118 bp, Homo sapiens
ccaagaagaccattcagatgggatctttccggatcaatccagatggcagccagtcagtggtggaggctgtcagcttgttggaagaggtcatcactccccggaaggacctgcctccttt

SEQ ID NO: 603554 - DNA, 83 bp, Homo sapiens
aaggaatgggtctgggaccttaacagggagccatgtactgccaaatctgtcgaaagggagataatgaagaactgcttcttctt

SEQ ID NO: 603555 - DNA, 100 bp, Homo sapiens
acatccatcctgatgctggtcaccggaggacggctcagcggtctgatgcctggagcaccactgcagccagaaagcgaggcgcaggactgcccccgagcgg

SEQ ID NO: 603556 - DNA, 100 bp, Homo sapiens
cttgaatgttgaagatgtccttaccagctttgacaatacaggaaatgtttggtgttttgaatgctgtatcaaatgcctggggggcattccctatgcctct

SEQ ID NO: 603557 - DNA, 100 bp, Homo sapiens
caggagttcattcctcttatcaaccagattacggccaaattcaagtttaagtgctgtggggctgctaactacacagattgggagaaaatcccttccatgt

SEQ ID NO: 603558 - DNA, 100 bp, Homo sapiens
tagggacccatttctcctcctttgacagggacatcagtggagccttctcagacccacaggtaaagtgaatgccgaagacagaagatttggatgatacacc

SEQ ID NO: 603559 - DNA, 101 bp, Homo sapiens
aagtgagatgattgcactcaacagatctttaccagatgttaggttagaagggagtacaagcgcaagctagccagagtttccctggtgcgcaaagaactcag

SEQ ID NO: 603560 - DNA, 112 bp, Homo sapiens
ctccggactcagccaagttccccaacggctccccgtcgtcctggtgctgcagcgacaatgcagatcttcgtgaagactctgactggtaagaccatcaccctcgaggttgagc

SEQ ID NO: 603561 - DNA, 100 bp, Homo sapiens
aacgaaaagagaattgtacactgcagtctatacgagatactccagccaaaaatgcacaaaagtcaaatcagaatggaaaagactcaaaaccatcatcaac

SEQ ID NO: 603562 - DNA, 50 bp, Homo sapiens
tctcctgagtagctatgactacggagctcagccggtctatcagtgtcgat

SEQ ID NO: 603563 - DNA, 75 bp, Homo sapiens
caggaatcccaatttgcctccacttagtgagcggaagaatgatgaaggatttgggggcagagcacttggcaggtc

SEQ ID NO: 603564 - DNA, 73 bp, Homo sapiens
gaggatgacttctctaatcagttacgattttaccaaatgttgcaagaactctggagttcttatggtagtaaaa

SEQ ID NO: 603565 - DNA, 101 bp, Homo sapiens
cgtggaacggctgcttttggaagaacgacaaatcctccacccctgggctcaagtccaacacaccaaccccaaggaacgacgccccaactccaggcaccagc

SEQ ID NO: 603566 - DNA, 83 bp, Homo sapiens
aagtacctccttttcagctacaacatcatcttctgggaggaaattatcactgtttcaggaggagagttacttcaggaaccctg

SEQ ID NO: 603567 - DNA, 98 bp, Homo sapiens
catcctagaagattacctcatccagagaagataatctgcaaaatggcttcaatgctgagtaagagtaccgttgaacgcctgctactcccccgattctg

SEQ ID NO: 603568 - DNA, 50 bp, Homo sapiens
gcggaacaggacgccctctgatgtatgtgaggagcagcgctgtgaggagg

SEQ ID NO: 603569 - DNA, 101 bp, Homo sapiens
gctcttgcttttcctcgctggggtgtacggccgaatacatcaagcaatggtaacatctttaaatgaagataatgaaagtgtaactgttgaatggatagaaa

SEQ ID NO: 603570 - DNA, 101 bp, Homo sapiens
aaatgaatgccatttcccatccagtactgaagtgttaaagttagaagacatttgctaagtcaaatcacttcaggtggtggacataatgcgagttaacgtgg

SEQ ID NO: 603571 - DNA, 82 bp, Homo sapiens
caggcccagggcaggcgacccgagggccgagggtttggaactcgcagaggttagctttatacgtctacgaatatttactgca

SEQ ID NO: 603572 - DNA, 100 bp, Homo sapiens
tgagcgcccctctgctgaccccggggagcgtggactacgagttggcgcccaagtccagaatccgcgcgcaccgcgacagcaaatcaaaaggcctccagtg

SEQ ID NO: 603573 - DNA, 80 bp, Homo sapiens
ctgtccgcggagaggagtgggacaactcctaaagacaatgcagatcttcgtgaagactctgactggtaagaccatcaccc

SEQ ID NO: 603574 - DNA, 100 bp, Homo sapiens
ccaagccgcgccgtcgcggggctcccgggagcggcccttagcgaccccgcccgggccccctcagatggcagccaccataatgatactatatgtgtccaag

SEQ ID NO: 603575 - DNA, 100 bp, Homo sapiens
tgcgggagctcctgccgcccgccgctggcttcaagtgcaagatccgagtgaagcctgacaggaccggtgtggtcacggatggtgtgaagcactccatgaa

SEQ ID NO: 603576 - DNA, 105 bp, Homo sapiens
gtctgcggttgtcagcccgcgaggcctcggaagaggagctgggcctggtgcacagggtttagatgtagattctctggtcattgagcatatccaagtgaacaaagc

SEQ ID NO: 603577 - DNA, 82 bp, Homo sapiens
tgtgcgcgctggcgctgagcctgcagccggccctgccgctttagccagggccctctgaaggatgcacccaacctcatctgca

SEQ ID NO: 603578 - DNA, 83 bp, Homo sapiens
ggtgctcaagaacatgggctatgccgccaaggccatgaaggcggcccatgacaacatgatgaccagtgtcccagtgaaggaac

SEQ ID NO: 603579 - DNA, 83 bp, Homo sapiens
aacagatcaaggaatcgaattttaccagatgtctttggtggacttgggaaagaggttgctagaagcagcaagaaaaggccaag

SEQ ID NO: 603580 - DNA, 82 bp, Homo sapiens
gatggcgagtgctttgtgatcgaaaccctgaccggatcccataaacactgtcgttaagtatgagagagaagctagtaaatac

SEQ ID NO: 603581 - DNA, 100 bp, Homo sapiens
ggcagacagacttatgctggaactgggttttagcaagagaaaattcctgttccaagagaaaataaggcaacatcaatgaaggagagaagagccagccaga

SEQ ID NO: 603582 - DNA, 74 bp, Homo sapiens
agaaagcaaagcgcagaaatgttggatttgaagcaaatccagatcccaacacttgccttggagtgtttggcctc

SEQ ID NO: 603583 - DNA, 75 bp, Homo sapiens
gaacagagcctgaaggatggggaggagcggggggaggaggacccagaaggttggatggcaagcatgtggtgtttg

SEQ ID NO: 603584 - DNA, 74 bp, Homo sapiens
aggaattcgccgtgcccgagaatagctccgtccagcagagcccactgcggaagagggcagcccggcaagcccgg

SEQ ID NO: 603585 - DNA, 75 bp, Homo sapiens
gaccccagcgtgggtgaagataggatcaagatggccatgtggcagggtgtcaactctgcccgctcagttcctcct

SEQ ID NO: 603586 - DNA, 75 bp, Homo sapiens
ggatgccaaacgagattggggccatgccaaggactatgtggaggttgctagaacacatcacgtccaagcagaaag

SEQ ID NO: 603587 - DNA, 73 bp, Homo sapiens
caagagcaagatcaccgtgacatccgaggtgcctttctccaaaagtgtgaagcctcagtttaggtcatctggt

SEQ ID NO: 603588 - DNA, 50 bp, Homo sapiens
ctacaggaacctgatctccctgggttttgtgatctctaacccagacctgg

SEQ ID NO: 603589 - DNA, 96 bp, Homo sapiens
tacacctcttccatggctctgaaaaaattcaaaactagtccttattttccaaccacatatttccaacttggggatgtttggcatcgacgaatttac

SEQ ID NO: 603590 - DNA, 50 bp, Homo sapiens
agatattgaaagaatctgatgaaaggaagaattttaaatcgtttctccaa

SEQ ID NO: 603591 - DNA, 98 bp, Homo sapiens
cagatctctacgaacttgtacagtatgctggaaacattatcccaaggctgtgggctctgttgtgtctgttggctggctccggtccaagaaggctgttg

SEQ ID NO: 603592 - DNA, 50 bp, Homo sapiens
aatattatgctacagaatttgagattgtgcagactggtgcttaaaatgga

SEQ ID NO: 603593 - DNA, 100 bp, Homo sapiens
cctgcatcgggcccacgctcaggttccatcataatgaatggatccaatatggcaaatacatcaccgagtgtaaaatccaaagaggaccaggggttaagtg

SEQ ID NO: 603594 - DNA, 100 bp, Homo sapiens
agccattagatttaaagatctcaaaaactttcatgtagacctttgtcgtccatttgctgctcactgggcaaacttgaagataaatcttttgactccagct

SEQ ID NO: 603595 - DNA, 97 bp, Homo sapiens
ggacacggacgtggtcaagctctatacacagaatgggattttacatatgctggacagaaataagagaatcaagccccggccagaaagattccagaac

SEQ ID NO: 603596 - DNA, 82 bp, Homo sapiens
aagacgccacagacagcagcgcagtaccaccttccagagataatgagtccctggaacgccagatgcgtgaaatggaagagaa

SEQ ID NO: 603597 - DNA, 97 bp, Homo sapiens
caagaccctacccgcttcactggcaccatgcaaatacttccctggacaagaaagccagatgaaactgatctaccagggccgcctgctacaagaccca

SEQ ID NO: 603598 - DNA, 75 bp, Homo sapiens
tagaccgtctgcaaggcaccaccatcaggttgtgaactaaaggccgacaaagattatcactttaaggtggataat

SEQ ID NO: 603599 - DNA, 75 bp, Homo sapiens
ccccaggagccatcctgcccgcggggatcccgtcagccggttctcccatgggcaggtggtctctctggatgagct

SEQ ID NO: 603600 - DNA, 100 bp, Homo sapiens
aagtaccacaacagggacacctggttccagctgcagcacgtggacgctgactcggaagtgcaggaatactcccccagttgcaagaggcgcaggaccgtgg

SEQ ID NO: 603601 - DNA, 48 bp, Homo sapiens
taactcattcaaggttacccagttgggagtggctgaggctgaactgga

SEQ ID NO: 603602 - DNA, 74 bp, Homo sapiens
aggatgagaatagctactgaaggtgcggaggcagcaaatgttacaggtcctggtggtgttccagttcaaggcag

SEQ ID NO: 603603 - DNA, 100 bp, Homo sapiens
acagttggagaagatctatgggtcagacagaattacactacaacaacaggagtgcaaacttctctacagccgaaaagagggtcaaaggcaagaaaacaaa

SEQ ID NO: 603604 - DNA, 100 bp, Homo sapiens
ggccaccctgggaggaagccgactaggcgaattcacttactgaccggcctgggctgctctgagacatggtttatgaaaaccccagatgaaatcatgagtg

SEQ ID NO: 603605 - DNA, 100 bp, Homo sapiens
gacggtaaccgggacccggtgtctgctcctgtcgccttcgcctcctaatccctagccactatggcttatcaggagggcagacttcaaaagctactaaaaa

SEQ ID NO: 603606 - DNA, 88 bp, Homo sapiens
ccccgtcctccttcgccgccgcgcacaaccgcacgtgcagggtgtcttttatgaataatcaaaagcagcaaaagccaacgctatcagg

SEQ ID NO: 603607 - DNA, 83 bp, Homo sapiens
cagacgctggcgggcgcagtttctcacgacgggccgagcctgccactcaattctgtggtgttcttggtcacacatttatggag

SEQ ID NO: 603608 - DNA, 75 bp, Homo sapiens
gtttgactggacagtaaagctttggacaactaagactggattatggacagaacttggaaatattgagaataattt

SEQ ID NO: 603609 - DNA, 74 bp, Homo sapiens
ccttttataataaagacacttatcttgcccaagagctggtttaatggatcgagaagtggcgttgcttgctgaaa

SEQ ID NO: 603610 - DNA, 100 bp, Homo sapiens
ccagaatgtcacaggtccagggcagaggaccaacatgggcattttgtttatgagcaaggtgggtgacatcaccatcctggtgaacaatgccgccgtggtc

SEQ ID NO: 603611 - DNA, 106 bp, Homo sapiens
gaccccagaaactgatccgcaaagtgtctacctcggggcagatccggaccaaggtgattgcccacagtgagtatcaaaagtccaaaagaatttccatctttctgag

SEQ ID NO: 603612 - DNA, 50 bp, Homo sapiens
gcaatgtctgtgtctaatctatcatgtccaatatcagatggaaatgatgc

SEQ ID NO: 603613 - DNA, 90 bp, Homo sapiens
aagcaccttcattctgctggaattattcatcgggtggagccgccaccaaaatgcagattttcgtgaaaacccttacggggaagaccatca

SEQ ID NO: 603614 - DNA, 74 bp, Homo sapiens
gtggccctgtcagtggctctcttggccctcctgaaatgaattaaacaaccaccatgtcgagcaaaaaggcaaag

SEQ ID NO: 603615 - DNA, 100 bp, Homo sapiens
caggggggacagccagccagcagcaggaggatccagaagtggggcaacattgagtgggcccatgactatgagctgcaggagctgcgggcccgcaccgccg

SEQ ID NO: 603616 - DNA, 74 bp, Homo sapiens
ctttgctgattttggaaggcagacacctggtggaagaggcgtacctctttgggacatccggaagaaagcagcca

SEQ ID NO: 603617 - DNA, 98 bp, Homo sapiens
tgggggtgtgcaaacccgagagaactgggtggaatgaatcttacttgttgaatatcttctggttactagttggattcatttgtgaaagaatcattttc

SEQ ID NO: 603618 - DNA, 75 bp, Homo sapiens
ccgggattcccagccatggcagattcctccgggcagcaggaggatgaagtttttgctgctgcagcagaagtacct

SEQ ID NO: 603619 - DNA, 82 bp, Homo sapiens
gccgtattgacatcgtggagaaccgcttcattggaatgaagtcccgaggttgtggcagcactgcctgaaggtatgagaccag

SEQ ID NO: 603620 - DNA, 100 bp, Homo sapiens
tgcggccgcgagaagcagcgggggggcaggcgatcgaagagtggagactgctgcacggactctggaaccatgaacatatttgatcgaaagatcaactttg

SEQ ID NO: 603621 - DNA, 90 bp, Homo sapiens
gagttacataaagaagacctaaaactgatggctactaaaaagcagagcatttctgttgtcgagatgtccacagaaggaggatttggtggt

SEQ ID NO: 603622 - DNA, 74 bp, Homo sapiens
ggagacgcagatgtggacttgaaagaagctgcagcggaggaaggcgaggtcaatcatgcgaggctgtgacaaca

SEQ ID NO: 603623 - DNA, 100 bp, Homo sapiens
caggcaacagctccgagtgtgggcagcagccggtcgtggagaaatgcgagagttacactgttagaccttatgatagccaagataacgagtgatgagccac

SEQ ID NO: 603624 - DNA, 90 bp, Homo sapiens
gcgacggaaatgtgtcatcgaaagccaggtgggtttggaggatttgggacaacatctacaactgcaggttctgcattcagcttttctgcc

SEQ ID NO: 603625 - DNA, 75 bp, Homo sapiens
ggagcggctgggcaccggcggcttcgggaacgtctgtctgtaccagcatcgggaagcagagcaagccatccagtg

SEQ ID NO: 603626 - DNA, 76 bp, Homo sapiens
gcgatggggcccagcctgaggaaacacccagggatggcgacaagcttgaggcagccctaggtgaggccaagaagca

SEQ ID NO: 603627 - DNA, 148 bp, Homo sapiens
tctgcctcatcttcagcgtgctgtccaccatcgagcagtatgccgccctggccacggggactctcttctggatgttcctgagggaagacctcaattaccatgacccaacagtgaaacacagcaccttccatggtgaggataagctcat

SEQ ID NO: 603628 - DNA, 80 bp, Homo sapiens
atctacctaccaatcgtgaaaactatattcacaggtccatgaaaaagcagatgacttgggcaaaggtggaaatgaagaaa

SEQ ID NO: 603629 - DNA, 100 bp, Homo sapiens
ctccggggccagctccgcctgctggagaatgatagccgggagatggcccgcgtgcttgggggtgtgggccgaagatatgctcatgtggtgttgaggaaag

SEQ ID NO: 603630 - DNA, 98 bp, Homo sapiens
acgtactgaacttctcacaaaacaggacagagcgggatgccaccagcttgtccaaagggaagttccaggagctcctggtgggcatcgttgtggagaat

SEQ ID NO: 603631 - DNA, 101 bp, Homo sapiens
aaaggactgtgggattccattaaaaggtaaaaaagctccagttttatttaataaagaaatgattgagtcaatgaaggaaggttcagttgttgtggatttag

SEQ ID NO: 603632 - DNA, 98 bp, Homo sapiens
agactacaggctgatggcggaggcttcgagtgacccgggtgccgaggagcgggaagagttgctgggactcggtgaaatacctggagtgctcagctctc

SEQ ID NO: 603633 - DNA, 75 bp, Homo sapiens
cttacacagaagctattagctgttagtaagacaaggctgcgacgcttcctcatgagcaaagaaaagtgcatgcag

SEQ ID NO: 603634 - DNA, 83 bp, Homo sapiens
ttgtccttgctggtgcatgcgtcgtcggcctctgggcagcaggttgatgataattagaagcatgctttccactgaacttcccg

SEQ ID NO: 603635 - DNA, 100 bp, Homo sapiens
gacaacgtggatcgttgttttgaaacgctgatgtagaccctcaaagaccaccaaggccagaagtaaaaattaccagtccagaagaaaatgaaaacaacca

SEQ ID NO: 603636 - DNA, 100 bp, Homo sapiens
attaaacaagactgctgtattttgtttttcgttggaatatacgttgcacatttatggcgattctgagtgtgagggcagacttctgccaggctcagcacag

SEQ ID NO: 603637 - DNA, 89 bp, Homo sapiens
agcggggcacagaacagcgacagtacaaagaagactcttgtcacactaattgccaacaacaatggaccctgatgctcccataagacaga

SEQ ID NO: 603638 - DNA, 75 bp, Homo sapiens
gaagacttgtaacctggagaagaggaagtcctggctgagcaaggttggaagccctagttctcgcattgaccgcac

SEQ ID NO: 603639 - DNA, 98 bp, Homo sapiens
aacggagccaggggcccgagggcggggaccggcggcgctggaggagcgaggcagctgtactaggactgggaacggatcctaattatctcatggctaat

SEQ ID NO: 603640 - DNA, 100 bp, Homo sapiens
aaaggaagacttgtaacctggagaagagttctcttgcaactagcaagtgaagccttgccaaatgacatgaccttggctcttgcttaccttcttgccttac

SEQ ID NO: 603641 - DNA, 89 bp, Homo sapiens
cagatgaagaaataacatttgtatttcaagaaaagaataatgcatatactgccatgtcagattcctacttacccagttactacagtccc

SEQ ID NO: 603642 - DNA, 51 bp, Homo sapiens
gctttgaggtcaacgagagggaggaggcagatgaggacggggacttggttg

SEQ ID NO: 603643 - DNA, 76 bp, Homo sapiens
gtgcccacgcccacaaggaccagcataacctctacaatgggtgcaccgtgatttggagcaagaggtggtggtggcc

SEQ ID NO: 603644 - DNA, 75 bp, Homo sapiens
gtgaggcctccccagccacgtggaacttggcttacagaagagacgaaatgtggtctgagggacgatatgaatatg

SEQ ID NO: 603645 - DNA, 97 bp, Homo sapiens
aatctagaaacttattggcaatcagatggttcccagcctcatttagtgaacatccaattcaggtgctggaccagggactgagcgtcccccggagagg

SEQ ID NO: 603646 - DNA, 98 bp, Homo sapiens
ctggttaatagtggcatggaagatccatttgcaactagaagccatttgtgtcaaggtaacgtctggagaaacaaaaggtcaggaaaggccaatgctcc

SEQ ID NO: 603647 - DNA, 83 bp, Homo sapiens
acgtctgagactttctccttcaagtacttggcagatcactctcttagcagattcaggcttcttcaggagaaagcaagtacact

SEQ ID NO: 603648 - DNA, 98 bp, Homo sapiens
tcggggtgactcttctcaaatgccttctcatccccacatagtctcctctgagcctccggcctccataagacccaaaacagatgacacctcttcccagt

SEQ ID NO: 603649 - DNA, 75 bp, Homo sapiens
cacgcccagccaggagcaccgccgaggactccagcacaccgagggaagctcttcgtgggcggtcttgactggagc

SEQ ID NO: 603650 - DNA, 82 bp, Homo sapiens
cgctccagaccggcgtgtgctatggcatcaagtggctgttaatttggagtggcccctggagtcagtttcctacaccatccga

SEQ ID NO: 603651 - DNA, 100 bp, Homo sapiens
atgattccatgtccatgacggacagcagtgtgtttggtgcacctcgatttggaggaagtagggcagggcccttatctggaaagaagtttggaaaccctgg

SEQ ID NO: 603652 - DNA, 100 bp, Homo sapiens
taaggattccaagtaactcttatttgctgtgaaagtgaagtttggcttgaaaacacattctgccagtgcaaatccaaaaagtatcaagacaggattcttc

SEQ ID NO: 603653 - DNA, 100 bp, Homo sapiens
cccgccagctgctccggagatacgggcccaacatctgtaccacgcgaggtgtgagctcctgccagcagtgcctggctgtgagccccatgtgtgcctggtg

SEQ ID NO: 603654 - DNA, 101 bp, Homo sapiens
aatgggtcaaccaagaacgtcaaacactccaacgattgagagcatttaaagatcggagtttaagagagctgtgaaagtagcaacaggacaagaactctcaa

SEQ ID NO: 603655 - DNA, 75 bp, Homo sapiens
tggggatgaacatgatttcaaaggttgtgctgtgttacaggtcagcccagtgactgaaacacgtacttaccatga

SEQ ID NO: 603656 - DNA, 75 bp, Homo sapiens
ctgatgaagacaaggactcacagtggctgcaaggaaatgcttccagactgcacacttttacttagaggacagtac

SEQ ID NO: 603657 - DNA, 97 bp, Homo sapiens
ataaccacacattataaggggccaagaatagtgcttgctgctgctggagcactgccagtgaaagatgtagaagataaacctgaacaacaaaccagaa

SEQ ID NO: 603658 - DNA, 97 bp, Homo sapiens
atctcatattagtgcctgtgatggcatctttcatctaacacttccacttacttacatgatcatttcgagagatgtaatgttgattgctgctgttttt

SEQ ID NO: 603659 - DNA, 100 bp, Homo sapiens
gccttggcttcaggaaaggagcattcagacgcttccgtcagcctcccaggatggcagcccctgacctggcccacgctcggccgcctgtcagtgcaatgct

SEQ ID NO: 603660 - DNA, 90 bp, Homo sapiens
gcgcctggcctgcgcgccgctgcccgcgccacagaattaaacaaccaccatgtcgagcaaaaaggcaaagaccaagaccaccaagaagcg

SEQ ID NO: 603661 - DNA, 100 bp, Homo sapiens
caacctcacacggtgtgggctgaatgaagagctgccagatcccacaggttcgttaccgtgaacgcatcaccattcttcgagggaatcatgagagcagaca

SEQ ID NO: 603662 - DNA, 100 bp, Homo sapiens
tcactgcgcaggcgccgagcggccgaggcgccgcggtcggctctgggactcgtctggcgtccctcaggtctggccgtgggcctgggcttcggggcactgg

SEQ ID NO: 603663 - DNA, 90 bp, Homo sapiens
gtcagagctgaggtacttcgtgaaggtttgtccgatatgtgcctcgatgccctggggagaccccaactaccgcagcgccaacttcagaga

SEQ ID NO: 603664 - DNA, 100 bp, Homo sapiens
gagaaatccaattcagctttttgtgctgccagcaagaaatgatcagtagcaccagtgtttatgctggaataagctctgattatagccttgaagagataga

SEQ ID NO: 603665 - DNA, 103 bp, Homo sapiens
agattcgcagtggtcgcttcttctccttggcaccataaggatgaagtggctggtgacatattcgacatgctgctcaccttcacagattttctggcttttaaag

SEQ ID NO: 603666 - DNA, 87 bp, Homo sapiens
ctcctgatggcatgcctgtaaagaacttgcagttgaaggagtataacacaggctgcctctaagaatcaaacttcactcttgggagaa

SEQ ID NO: 603667 - DNA, 75 bp, Homo sapiens
cttgagccacgtgcatgaaccaaacccacttcgttcaagacaggtgtttaagccaggatgaagttaaaggaagta

SEQ ID NO: 603668 - DNA, 143 bp, Homo sapiens
tggtgcgtaataagaaggtgggcgttatcttccgactgatccagctggtggtcctggtctacgtcatcgggctgaagccgacgtagcttctctgaacagacgcatccagctggttgaggaagagttggatcgtgcccaggagc

SEQ ID NO: 603669 - DNA, 75 bp, Homo sapiens
ctgttgatggagaaaaaaattcccaagctgagatatctagggtgataaaagaaaatgtggctgaagttacccgaa

SEQ ID NO: 603670 - DNA, 96 bp, Homo sapiens
ccgatctgtcatcaatacctcagccaagaccattgtgatgattcccgactcccagaagctcctgcgatgtgaacttgagtcactcaagagccagtt

SEQ ID NO: 603671 - DNA, 50 bp, Homo sapiens
tgttactccattgctgaggagtgcctgtttctgcgccggaccagtcgagg

SEQ ID NO: 603672 - DNA, 101 bp, Homo sapiens
atcttctcttcctgttaaagtcatggaagccctaacattggctgaaggagacagaggagctggaggaggagaagtcaggcctgcagaaggagattgctgag

SEQ ID NO: 603673 - DNA, 98 bp, Homo sapiens
aggattccaagtaactcttatttgtttttggctttcacccccaaccagtgaccaaagacttgaccactcaaagtccagctccccagaacactgctcga

SEQ ID NO: 603674 - DNA, 96 bp, Homo sapiens
cagagattgagaatgtccatggatttgtttctcattctcatatttcaccaataaagaatccaaaggactgcatgacacaccataggatatagtcaa

SEQ ID NO: 603675 - DNA, 73 bp, Homo sapiens
gccgccgctgccgccgccgcgcgcgggtgattcgcatctaggtggcggcagtcgagaaggctcgtttaaagaa

SEQ ID NO: 603676 - DNA, 82 bp, Homo sapiens
ctcgtgtcccatttgtgacttttccttacagagggagctgtggccacctgagaagacaatgcagatcttcgtgaagactctg

SEQ ID NO: 603677 - DNA, 82 bp, Homo sapiens
gggtgctctacgtcacggagaaaagctggcagggcggagatgctggaccacgccgtcctgcttcaggtgatcaaagaacagc

SEQ ID NO: 603678 - DNA, 83 bp, Homo sapiens
atccgggaccggcggttgtctgtggccggaggctgatcagaataccctctaccatctgctttggtcagggtgccgctcgagga

SEQ ID NO: 603679 - DNA, 82 bp, Homo sapiens
cgacgggcgcccccgagccgccgccgctgtccggagccccacagagctgcagaaactggagggcagcagtggacctgtgcgg

SEQ ID NO: 603680 - DNA, 74 bp, Homo sapiens
gacgaagacagtccctggatcaccgacagcacagacagaatccctgctaccaaaaatctgcagctgtgcctagg

SEQ ID NO: 603681 - DNA, 75 bp, Homo sapiens
gcctttgttcaccgccaaccccttcgagcaagacgtggggacttgccatgaggtgttgaagccttgtttcactga

SEQ ID NO: 603682 - DNA, 50 bp, Homo sapiens
cgggcggcgagcagaggagctaacagtaaaagcagtctgggcgcaggctg

SEQ ID NO: 603683 - DNA, 100 bp, Homo sapiens
tgttcagaatcctccaaaaccagtcatgaccactagacccacagctgttaaagcaacagcagccaacagggaagagtgtcgcacccaggagaaagttaat

SEQ ID NO: 603684 - DNA, 100 bp, Homo sapiens
gaccagacctggaagcggatccggccccggcccactaagaccagcttcgtgggctcctactacctgtgcaaagctaagtttggtgcgaacgccattctgg

SEQ ID NO: 603685 - DNA, 100 bp, Homo sapiens
tgagaagagcaatgacattgggggcctgtggaaattttcatatactgcattggaacaaaaactgaaaaaattgacggaagatttgagttgtcagcgacaa

SEQ ID NO: 603686 - DNA, 100 bp, Homo sapiens
catttaaaccacatggctatctaaagagatgtgtcttgctgaatcagggctctcttatccctgccatcgacttacagtgggaagaagatcttcacctgca

SEQ ID NO: 603687 - DNA, 102 bp, Homo sapiens
caaggattctcgctgtgacagagacaacaccgagtatgagaaatctccaggacttcaagttagatgtgcagcacgtgattgaagtggatgagggaaacacag

SEQ ID NO: 603688 - DNA, 100 bp, Homo sapiens
acgtgagcccggagcagctggctggctttgataagtacaagattccagaatgactatcttgacttacccctttaaaaatcttcccactgcatcaaaatgg

SEQ ID NO: 603689 - DNA, 100 bp, Homo sapiens
caactcggcaggcacacgttactcagcccctgcgaacctgtatgtgcgagtggattgggccgtggaacaggcccacttcgccctgttcttcaaccagggc

SEQ ID NO: 603690 - DNA, 90 bp, Homo sapiens
tgcagcttgcgtttggggctttcgacatgacaggtcactagaggtgagaataatgtttgaggtacaggacttgaaatacgcgaccttggc

SEQ ID NO: 603691 - DNA, 100 bp, Homo sapiens
gctgagcagctctgtcagcatgaacaccttctccgacagcagcacacccgcttgtacagcatatgtggattttatgatttctgtggccagattgattcgt

SEQ ID NO: 603692 - DNA, 74 bp, Homo sapiens
aacgctgcctttgctttaaaacagtattacttgcgctgagcgggctttggacaccatgaactttgatgtgatta

SEQ ID NO: 603693 - DNA, 100 bp, Homo sapiens
caggcgggggtgctgcagaggacacgaggcggcgggctggagacatggaccgcggcgagcaagatttacactgactgggccaaccactacctagcaaaat

SEQ ID NO: 603694 - DNA, 100 bp, Homo sapiens
cagaactgcaggcgtgagctacagcagatgcatgggcagctggcagattcgggcaagtccaccactactggccatctgatctataaatgcggtggcatcg

SEQ ID NO: 603695 - DNA, 98 bp, Homo sapiens
atggactccctggccgagtctcggtggcctccgggcctggcagtcatgaaggttcctggtacagttcagacaggacaaagtatgtgtgaagtttattc

SEQ ID NO: 603696 - DNA, 74 bp, Homo sapiens
agccccgagacatcggactgcaggtctgtttctgtcgactgtggaccacttatgtgcgatccgtggaccacttg

SEQ ID NO: 603697 - DNA, 100 bp, Homo sapiens
ggaagttcctggtccacaacgtcaaggagctggaagtgctgctgatgtgcaacaaggtccgcaagcaggtggtgaacatcccgtccttcattgtccgcct

SEQ ID NO: 603698 - DNA, 116 bp, Homo sapiens
cggacggcggcgacggaggagagcagctcctcactgtcaagcacgagctgcggactggggctttgttatgcacctaaagccatattggaagctccagaagaaagagcaccccccgg

SEQ ID NO: 603699 - DNA, 101 bp, Homo sapiens
tctgtccagaacctgctcccacctcaggcccaggccaaccgatattaatgcacacgcctgtgttactggtaaacccatcagccaagggggaatccatggac

SEQ ID NO: 603700 - DNA, 100 bp, Homo sapiens
ggaccagccagaggacgcgggctctgaggatgagctggaggagggggtgtcatggagaaactccagctgggcccagagattctgcagcgggaaaatccaa

SEQ ID NO: 603701 - DNA, 82 bp, Homo sapiens
atcgccagctgcacactcttggggctctacctctttttcaaacttaacaaacaacagttgcagttactgaaagaacggttcc

SEQ ID NO: 603702 - DNA, 88 bp, Homo sapiens
agaagcagatggattcgtccttttagccctaccacttatgtcttggatgaagatgaacctcgattccttgaagaagttgattacagtg

SEQ ID NO: 603703 - DNA, 50 bp, Homo sapiens
caaatacttcctgcaaggcatgggctacaacaccaaccttctaccgtgtg

SEQ ID NO: 603704 - DNA, 83 bp, Homo sapiens
gcttcagatactacttacagtagacacaggagaaaaaccagaggctgatagaaatccgcctgtgctatatcacaatagccgag

SEQ ID NO: 603705 - DNA, 83 bp, Homo sapiens
ctattcgttgtggtccaaaacagtttacctcttatctaacagctggagatttggccaatgaactcgtccggcactttttgatc

SEQ ID NO: 603706 - DNA, 74 bp, Homo sapiens
ggacctgtctgggtctcagccgccaaagaccccgtccgttgctggatttgtgcgactcggtgaaggatgatgcc

SEQ ID NO: 603707 - DNA, 100 bp, Homo sapiens
gagcttatactcctcccagtgacgggtctggagtgcgtgggggaccggctgttggcgggtaattttttctgcaggatgaattaagagaagagacacttgc

SEQ ID NO: 603708 - DNA, 83 bp, Homo sapiens
ggaacccgtgggcctgtggactgcagcctcggcggtcagcagagcctggcagagagcaggtgtgtgatacacgtcgtcaggtg

SEQ ID NO: 603709 - DNA, 100 bp, Homo sapiens
agtggtggacctgtttgtgcgcacagtgctggtctgcctgacatccacaatggtgcgcatgaatgtcctggcagatgctctcaagagtatcaacaatgcc

SEQ ID NO: 603710 - DNA, 75 bp, Homo sapiens
tcaggcatcctcatataattaaactatgatggacttccaaaaccagaactaatatcctggattgaacacggggga

SEQ ID NO: 603711 - DNA, 95 bp, Homo sapiens
ctcggatatgtcgacttctgaaacatccaaacatcgcgtgtataccaatgcatggccctcttctgatttcaggtttgagtatcttagctctagca

SEQ ID NO: 603712 - DNA, 96 bp, Homo sapiens
ctcagctgataaacatgaatctgagagtatttatgaactgccaatccaaactttctgacatgcctttaaaaagctgcaattctcattgcaagatca

SEQ ID NO: 603713 - DNA, 96 bp, Homo sapiens
cttctgtatcttcatggtgcggctcatcttcgagaggacctcagcagccatgtcgaagccccatagtgaagccgggactgccttcattcagaccca

SEQ ID NO: 603714 - DNA, 87 bp, Homo sapiens
ttcccccagactgccctccacttgtgcagaagggtgaatgccatgtcaactttgttcggaagcatgtgcagtctttgccaacaaaaa

SEQ ID NO: 603715 - DNA, 102 bp, Homo sapiens
agagtgtcagcaatgggaccttctcttcggatgaggagaccctggaagacaatctaaggaaaattgcctaagaattatgacccaaaagttaccccagatcca

SEQ ID NO: 603716 - DNA, 100 bp, Homo sapiens
gcagaagaagctgaggatgaagaagatgtgagcatttgtcctgtgctttcacattctttctgcatggagaaagtaatgtatgcacaagtgtggagattgc

SEQ ID NO: 603717 - DNA, 74 bp, Homo sapiens
gtcagaaacaataggattatcatgagaatggaggtatcgcatcaaagataaggcagacagagcaactgtagaac

SEQ ID NO: 603718 - DNA, 102 bp, Homo sapiens
ttggactcatagtcactgccagaaaggtagtctgggttggaggaggcagagccatgaccaaggggacctgggtactggctgaaggaataggctggggtagag

SEQ ID NO: 603719 - DNA, 100 bp, Homo sapiens
gagaaagcaaaggctgctctgaagcgcacgacctccgactactttctccttcaaggatttggatgaagtaatggatcactaatgaactacagtgctggtg

SEQ ID NO: 603720 - DNA, 78 bp, Homo sapiens
ccgcggatctcaccgccgctcaggggtaaatgttgtccagactcagagtttaagaaacactttcctgttggaaatcca

SEQ ID NO: 603721 - DNA, 75 bp, Homo sapiens
ctgggggctttccggtcggggccgcagccgcttccggagccgcgggcgagttaaacaggtgttcaaggagctgga

SEQ ID NO: 603722 - DNA, 82 bp, Homo sapiens
gtgatactcacacagtggcttctgctcaccaacagatgaagacagatgcaccaacgaggatccacctctgatgttcagtgaa

SEQ ID NO: 603723 - DNA, 90 bp, Homo sapiens
ctggcctcccatctggtccagtcggccctcctccacgctgacttccgggtctcactctcccacgcctgtaagaacgctgtgaagacggat

SEQ ID NO: 603724 - DNA, 75 bp, Homo sapiens
ccagaacccaagaagattccgataagaaacacgatcaatgaactgagccatgttcaaatccctgttatgttgatg

SEQ ID NO: 603725 - DNA, 82 bp, Homo sapiens
atggccacgatgtggatgatcctcactccttccaccagtcttgggcgtctttggtactggcttttttaggggtctgcctggg

SEQ ID NO: 603726 - DNA, 75 bp, Homo sapiens
cagccccgacgaacatttctgggtgacactcaacaggattcccggcagtaacgtgatgagatctattcatggcgt

SEQ ID NO: 603727 - DNA, 99 bp, Homo sapiens
cgcccctccgtccctccgccccgcggcgcaggtgagcctgggggacaggtgagccgggggacaggtgtcgtgaaaactacccctaaaagccaaaatggg

SEQ ID NO: 603728 - DNA, 97 bp, Homo sapiens
ttcgcgtctctctgctgcggcgcggggaccgctgtgctctcgtgtccccagttgtcctcatccagggtgctattcgagtccagcctgaagggccggc

SEQ ID NO: 603729 - DNA, 100 bp, Homo sapiens
aagaagaaattagagaagcattccgtgtgtttgataaggagggcttgtgcagggttttgtaagcagtgatctagtttcattaaaaaaagaaaacaataac

SEQ ID NO: 603730 - DNA, 83 bp, Homo sapiens
actagagcaaataaccgttttgaaattggtgagcccatcactttctgtgaggagagttttgtaaagcaccgctcaagcgtgat

SEQ ID NO: 603731 - DNA, 75 bp, Homo sapiens
tggaccccaaacaagtctgcgcaaaatttgtcgaggaggtttgccgcggcagtattggtaaaggttttcaaggtg

SEQ ID NO: 603732 - DNA, 51 bp, Homo sapiens
ctccgccgcgctgcgcacgcccagaaagtatgctgaggccttggattacca

SEQ ID NO: 603733 - DNA, 101 bp, Homo sapiens
aagtcatcgacggcacctcgggggccacactgcaggcctccgcgctcagtgggaagaacagtgattattgagcagagttggggaagtcccaaagtaacaaa

SEQ ID NO: 603734 - DNA, 75 bp, Homo sapiens
aacagttaatcctcaatttaagcctgatctaacccctagaaacagccaacaagtcccaaatttggaaaagctgac

SEQ ID NO: 603735 - DNA, 75 bp, Homo sapiens
tgcgcggttggggccactgcgaggccgttttaggtcctgatgaagttgtagggccagaaggaatggaaaaatttt

SEQ ID NO: 603736 - DNA, 83 bp, Homo sapiens
gcctcgggagctgcggccgccgcggcattcggggaatctgcagggcaggtggcgacatgtctaagaatgtgagccagtcacag

SEQ ID NO: 603737 - DNA, 98 bp, Homo sapiens
caggtgaagactgggggctgcaggcgcgctagtgaatggtagtgtctagaaagggtatgtcccttcaagagagaggtgccaatgtccaaccggcctaa

SEQ ID NO: 603738 - DNA, 100 bp, Homo sapiens
acacctctgccgctgctaaaagttgctgaacctgtttgcatgagttgctcctgacggccctttaggatacttccatgtctgtagggtctagagtgacatc

SEQ ID NO: 603739 - DNA, 75 bp, Homo sapiens
ggcggcgctgccgctcccgggcggccgcgggcgggaagctcttcgtgggcggtcttgactggagcacgacccaag

SEQ ID NO: 603740 - DNA, 75 bp, Homo sapiens
agaatttatatagagatgtgatgttggagaactacagaaacctcgtctccctggtaacaaatgtggcaattattt

SEQ ID NO: 603741 - DNA, 90 bp, Homo sapiens
agaagtaaaattacgaactcactgagctggaagtcattcaacgggaattgaataggtcacggagctgctggacgtctccatggagctggg

SEQ ID NO: 603742 - DNA, 83 bp, Homo sapiens
agatgcctggcagccccgctctctgcaagttttcttgaagtacaactaaggacaggtcaccactaggcactaacatcgctgac

SEQ ID NO: 603743 - DNA, 75 bp, Homo sapiens
ctcatggacaaggccctgctctgcagcggacacagcagggcaagagcggtaccggaccatcaccaccgcatacta

SEQ ID NO: 603744 - DNA, 100 bp, Homo sapiens
ctggaaaggcacccatccttattgctacagatgtagcctcccgtgggctagagccccagtttgagggacagcgggatatccaccatgctgctgtgagact

SEQ ID NO: 603745 - DNA, 98 bp, Homo sapiens
tgcctctgaggatatttctggctgtcgccaactccatggctttccagattccattggccgtgacatccccaaaatgcttgaattatttaaaaatggac

SEQ ID NO: 603746 - DNA, 100 bp, Homo sapiens
cacgcagccaccctggtgatgaagctgcagctgttcatccaagaggtgaaccacgccgtggagggaaaaccaattctgtgtcctcggaggaccacagccc

SEQ ID NO: 603747 - DNA, 75 bp, Homo sapiens
caggacatcctggaacctgggaaagggtgccgtgagcgatgtggagatgcaggaacactatgatgagttttttga

SEQ ID NO: 603748 - DNA, 95 bp, Homo sapiens
cttcccacctagctctcctctctttgcagagccatacaaagttaacactggaactattttggggctgatgagaatcttggtccagtggctgtgag

SEQ ID NO: 603749 - DNA, 100 bp, Homo sapiens
ggcgcttcaggactaccgcaagaagttgcttgaacacaaggagatcgacggccgtcttaaggagtgttcgatacaagaggctgttttcctagcgtggctt

SEQ ID NO: 603750 - DNA, 100 bp, Homo sapiens
cagagggcttctgagatccagggtgtgaggctggagaaggcgttgcgaggagaagcagatttgaatataacctgccgctttgcaggtgtattccacgtgg

SEQ ID NO: 603751 - DNA, 101 bp, Homo sapiens
gttgcagataagcggaaagagactcagagccgtggaatggaaggcactgcagctcgagtgaagcatccctacccaacagaggatgagaaaaaacagattgc

SEQ ID NO: 603752 - DNA, 75 bp, Homo sapiens
cagggacagcacctcatcccctggatgggggaccacaagatcctcatcgacagagcactgacacggctcccggga

SEQ ID NO: 603753 - DNA, 100 bp, Homo sapiens
gcgaaaaaacaggggcagaagaacaaggaagcggagaggcaagaggtgaaaagaaagggattatctcagacagtaagccaggaggaaagaaagagacaag

SEQ ID NO: 603754 - DNA, 101 bp, Homo sapiens
cgccgccgaagaagcatcgttaaagtctctcttcaccctgccgtcatgtctaagtcagagagcctcagcagcttggcagtctcatgtccccttacctcact

SEQ ID NO: 603755 - DNA, 75 bp, Homo sapiens
gacacggctttggaaacgacgtcatgtgttaggttttaaaatcaaagatgggaaaatcggagaaaattgcccttc

SEQ ID NO: 603756 - DNA, 59 bp, Homo sapiens
ccccactaacacggcttctcctccatccagtcctcatatacatatgaaccagatggtta

SEQ ID NO: 603757 - DNA, 82 bp, Homo sapiens
cgcgaggaccatggctgcctccgagcgccgcgccttcgcgcacaagatcaacagggagtgcatccgccccaacccttttccc

SEQ ID NO: 603758 - DNA, 90 bp, Homo sapiens
aaaaaatatctgagtctgcaaaacaagacaaattcctgtcccttgtgccgctatgagctgcccactgatgacgacacttatgaggagcac

SEQ ID NO: 603759 - DNA, 95 bp, Homo sapiens
agtcatgctttgcggtctgtaatgtcagcagaacaggagaaggatcccatttcgctgaagagagttcgagatcgtcagtatttaaacagatcaca

SEQ ID NO: 603760 - DNA, 74 bp, Homo sapiens
gtctgaggccaatgtcagagaaatctttgacaaggctgcagagagactaagggcacttcctgaggttcattacc

SEQ ID NO: 603761 - DNA, 98 bp, Homo sapiens
ctccgcaccgcggcttaaatgatgtattttgtgatcgcagcgatgaaagcaattctgtggtgttcttggtcacacatttatggagtttctgaagggca

SEQ ID NO: 603762 - DNA, 100 bp, Homo sapiens
gaagactcatcggagcgtgtggatttgagccgccgcattttttaaccctagatctcgccatggcaatgacaggctcaacaccttgctcatccatgagtaa

SEQ ID NO: 603763 - DNA, 100 bp, Homo sapiens
gggcattactatgttagttggaataactggactcttttacactcaactaattggcatcatcacagaaatggctagtgatgagctgaaagagatgcggaaa

SEQ ID NO: 603764 - DNA, 50 bp, Homo sapiens
ggcccgcgggccaggagagcgctcggcggactgattcttgctattccaaa

SEQ ID NO: 603765 - DNA, 90 bp, Homo sapiens
tacaagacgattcacctgtccagcatccgaccaccgaggctggagggggagaacacccaggtgtgtcaaggatgccacaatgccatcgac

SEQ ID NO: 603766 - DNA, 100 bp, Homo sapiens
tgtttccagcaagacccaaagctagaaaaggaggaggaagaaactgacccgatcagtgccagaacttggtagtcaagccagaccagctgatcaaacgtcg

SEQ ID NO: 603767 - DNA, 83 bp, Homo sapiens
tgttgtggcaatggcacgaaagctacaggatgttatcggcttcaatatggctggtcttgattatctcaagagggaatgcgagg

SEQ ID NO: 603768 - DNA, 82 bp, Homo sapiens
ccccaccgaaaaaccttaaagggctgagagcttgagggcaggcacctgaatggacagaagaggacctcagccaactgacaag

SEQ ID NO: 603769 - DNA, 75 bp, Homo sapiens
ggcggcggccgccaccggctctagagagatcgatgtcttattgtgatgagtctcgactgtcatatcttcttcgga

SEQ ID NO: 603770 - DNA, 134 bp, Homo sapiens
gcaccaggcacgcgcctggcagggtgccatggacgcaggcgcggctagccgggagcacgccaggtggcaaggactcacaccacccggcaagaactgctcactacggctccctgccccagaagtcacacggccgg

SEQ ID NO: 603771 - DNA, 50 bp, Homo sapiens
ccggcgcagcagcatcatcaagataactttgtggtagattccagttcttg

SEQ ID NO: 603772 - DNA, 145 bp, Homo sapiens
cctgcggaaaacagagaggttccagaaatggctgcaggccaagcgcctcacgccggacctggtgcagacatttgaagacagtgatttgttccatttgattggtgttatctgtggcttagcaatttataattgtaccattgtggac

SEQ ID NO: 603773 - DNA, 108 bp, Homo sapiens
ttcttctcgtcctaatctcaatcttactgtactggaaacgtcaccggaatcaggaccgagatatgtgtcacaaagatgtctacacggaactgccagggaatggactca

SEQ ID NO: 603774 - DNA, 98 bp, Homo sapiens
ctttgctgctctgtctgccggttcttgaggttttgctgttactgctcagtgtagtcacaccttgaataagaaatggaaaaccttgggatgttgataaa

SEQ ID NO: 603775 - DNA, 83 bp, Homo sapiens
cttcccaatgatgcttcctacttcctttccgtgcataagaagccgaatgattgacgagatgcctgaggctgccgtgaaatcaa

SEQ ID NO: 603776 - DNA, 100 bp, Homo sapiens
gttgtatcagtgggtgttgatgaagaaattgtttatgccaaatcaactgccttacagtgggctcgggatgagtttgaaggcctcttcaagcagccagcag

SEQ ID NO: 603777 - DNA, 83 bp, Homo sapiens
cagcagcctcagctcccactcgcaccagcacatgattaagtaccggtacatcccgttcacacatgggaagagaaggtacagag

SEQ ID NO: 603778 - DNA, 98 bp, Homo sapiens
caatgaatttgaggaagaattagtgtctccatcgtcatcagaaactgaaggcaactttgtctatcgcacagatagaatgagtccatttaagtcccagg

SEQ ID NO: 603779 - DNA, 88 bp, Homo sapiens
gctgggaccatggagacacccagagtatccagaccgagacatgggtgcccggcaccgcgcccgagcccactccattcagatcatgaag

SEQ ID NO: 603780 - DNA, 100 bp, Homo sapiens
gctgcagcagaggctaagaatattaatggccagatctagctgattcattggaaagtaacatctcggaccaagatagtgattcaaatatggatcttatgcc

SEQ ID NO: 603781 - DNA, 100 bp, Homo sapiens
cttccacactgccacctgattaaaggaattggtcgggtcacaaatcttcgaagagtgacatatgttgttttagatgaagcagacagaatgtttgacatgg

SEQ ID NO: 603782 - DNA, 98 bp, Homo sapiens
gacgcaaaccaaggatctggggatcttcgcactatcccaagctttcggaaaatgtgattgatcgaatgaaggaatcctctccatctggttcgaagtct

SEQ ID NO: 603783 - DNA, 100 bp, Homo sapiens
aaatcaacgacaacttgagcacagctttctcctgtgcttctggagagtatctagaaatgaagaaccaggtatgcagtaagtgtggtgaaggcacctattc

SEQ ID NO: 603784 - DNA, 51 bp, Homo sapiens
cccactcgcctcacctgagcctgggctttagaaaagaactcaggaatttgg

SEQ ID NO: 603785 - DNA, 75 bp, Homo sapiens
aagatgtttccagccctgcctcggcggaccaaaggtgggctcgggatgagtttgaaggcctcttcaagcagccag

SEQ ID NO: 603786 - DNA, 98 bp, Homo sapiens
gaaagttgatatcagctttaatgtacagaatggcgtgagagcagctgacctcatcaaagattttaccaagagctgaggaactgcgtgtggagtcagcc

SEQ ID NO: 603787 - DNA, 101 bp, Homo sapiens
cacggcgtacgccctcatggggaaaatctccccggtgactttcagcctcccgcgacgatgcccctcaacgttagcttcaccaacaggaactatgacctcga

SEQ ID NO: 603788 - DNA, 97 bp, Homo sapiens
cgggcggcggcggcgggcccggcggcgggccgaggagccgggcgcaatggagcggaagaggttcgtgctggccgtgggcagcgccgtctttgatgcc

SEQ ID NO: 603789 - DNA, 83 bp, Homo sapiens
gtcaccaacgggaagggccggcccgcctccctggccggggcgcagttcggaggttcagctgcatcttcctcccgtgaggctgg

SEQ ID NO: 603790 - DNA, 83 bp, Homo sapiens
attaccgtcatattccacccattactaagtttcagctcctggcatcagctctattcaaatctggttcagattttacagctctg

SEQ ID NO: 603791 - DNA, 88 bp, Homo sapiens
gaacacgtgaaggaaaagcagctccgtccacaacgccgcttcggggctcctagaggccacaagaggaagctgaatgaagaggacgccg

SEQ ID NO: 603792 - DNA, 89 bp, Homo sapiens
ggcaagagaaagccctaccacaagaagcggaagtatgagttggggcgcccagctgccaacaccaaggatgaatttttagatgtgatcta

SEQ ID NO: 603793 - DNA, 100 bp, Homo sapiens
taggggcgcgtcatgtggccgctcacggtcccgccgccgctgctgctgctgctgtgctcaggcctggccggacaggtgatgttctgcaccctgaacaccc

SEQ ID NO: 603794 - DNA, 98 bp, Homo sapiens
aaccagaagcagattgccaacattgaccgtattacaaagacagagcgggatgccaccagcttgtccaaagggaagttccaggagctcctggtgggcat

SEQ ID NO: 603795 - DNA, 82 bp, Homo sapiens
ctcaaggcaagcctattgagttaacacctctgccgctgctaaaaggattatcgagattgcagcctgtcactccacacacacg

SEQ ID NO: 603796 - DNA, 100 bp, Homo sapiens
gagagatggaaactactatgcatgtaaacaaatgaagcagcgctttgaaagagacggtgtcttgctttgttgccctggctgttctcaaactcctggcctc

SEQ ID NO: 603797 - DNA, 98 bp, Homo sapiens
ggcgggcacgcacggcccgggccggcgctccaaggcccgcccgggagggccggggccgcgctcaggaagctcttcgtgggcggtcttgactggagcac

SEQ ID NO: 603798 - DNA, 75 bp, Homo sapiens
cagacggattcatttagagctgcggaacaggacgccctctgatgatggttcctacctggctgagttcctgctgga

SEQ ID NO: 603799 - DNA, 73 bp, Homo sapiens
cgcagtggcggcagaacagatgctgaaaggacaatacaagatggtcagtaggacagaaggtaacattgatgac

SEQ ID NO: 603800 - DNA, 95 bp, Homo sapiens
gagctcgtactgagaaaatacaaggagctggacatcgagcctgagggaggggaaaggcgcagggctcctgtaaccgccaggcagcggccccgcca

SEQ ID NO: 603801 - DNA, 83 bp, Homo sapiens
gtatttttattggaagaggatctaggagaaaattcatagtgaccacttagtagctagtgagaaacagcatatgctccagtggg

SEQ ID NO: 603802 - DNA, 75 bp, Homo sapiens
agaaaacctgccaatcaagatgagtatgggtctagtgacggagcccgcgcgcggcgccaccatgcggcagaaggc

SEQ ID NO: 603803 - DNA, 75 bp, Homo sapiens
taacttaaccccttcgctgctctgggcctgcgtttctccaccggtgaaatgagctctggcaggctgccctgagca

SEQ ID NO: 603804 - DNA, 51 bp, Homo sapiens
ttagtccacagtcttcctctataggcctaagatctggcaaacttggtgaac

SEQ ID NO: 603805 - DNA, 82 bp, Homo sapiens
atcggagttcacctgggctgcacctcagcctgtgtggccgtctataagtctgggttctgcccgcacacattcctcgccacct

SEQ ID NO: 603806 - DNA, 97 bp, Homo sapiens
agccatcacgcccagctagccatcttctaattttcattccttcaaagaattactttcctagtaagcaagatatcctgctggctaggaaagccaccaa

SEQ ID NO: 603807 - DNA, 51 bp, Homo sapiens
tgaagagggaagacacgcggaaacagggttccaggaagaagccctggccag

SEQ ID NO: 603808 - DNA, 83 bp, Homo sapiens
cgcccagctcgcccagcgtccgccgcgcctcggccaaggtaaattcgaaccaccattatttcacccgaatgtgtacccttcgg

SEQ ID NO: 603809 - DNA, 100 bp, Homo sapiens
aaattgctcaactaagaccaagtcctcgctggactgctcagggtgccagacctcatccgagttcctggggaaaaccccagggcaaaacgctcagaaatgg

SEQ ID NO: 603810 - DNA, 83 bp, Homo sapiens
ggcctaccacgagaccctggctggctcactcagtaacttgatggattttgtgaagaaaacaggcatttgcgcttcaaagtggg

SEQ ID NO: 603811 - DNA, 49 bp, Homo sapiens
ctgtaattgaacgggtcgaggtgccaagtgtaaagaactggccaagtcc

SEQ ID NO: 603812 - DNA, 75 bp, Homo sapiens
gggggattctcgacctgctaacagaactggaccttttcggactcaggtacttctgccctccctttggtctccctg

SEQ ID NO: 603813 - DNA, 73 bp, Homo sapiens
aatatagaacccatcacacagtacaactagttaatttcacctaccagtttttgaaaaagaagttctatatatt

SEQ ID NO: 603814 - DNA, 100 bp, Homo sapiens
agaagacttgactggtcttacattgctgcatcaagaaacccaagctgctgaggtccttatgtcgtcagaagatcgagaagctcaggaggatgaattgctg

SEQ ID NO: 603815 - DNA, 50 bp, Homo sapiens
agcgaagtgattctcttataaggtggatggaagtttgcttagttgaagaa

SEQ ID NO: 603816 - DNA, 102 bp, Homo sapiens
tggagatatgcccttagttggagctttgtctatcttcttccttaggaaaccagaagatgagaatgtgcctactgctcctgatcctccaagtcaacatttacg

SEQ ID NO: 603817 - DNA, 87 bp, Homo sapiens
gaggtcttattttgttgagtcgaaagtgaaattttcctttggccaacgtgacaggtgtgaagatgccttaagaaaaaataagagctt

SEQ ID NO: 603818 - DNA, 83 bp, Homo sapiens
cctggggcatcgacgatctccatatttcattgcaagatgcagaatcctgatacactatcagcaatgtcaaaccctagagcaat

SEQ ID NO: 603819 - DNA, 100 bp, Homo sapiens
aaatattctagaaggggaaaagctacttcaaggtgctgactgggttacttttttaaacactaggaatggtaatttctactcttctggacttcaaactaag

SEQ ID NO: 603820 - DNA, 100 bp, Homo sapiens
gcggccgtggacaacatgatggtcagaaaaggggacacggcggtgcttaggcgtgcaatggaattgagttttgccctggtaaatgggaataatatccgag

SEQ ID NO: 603821 - DNA, 75 bp, Homo sapiens
tgcccctcgttgatgagagcattcgaagtgacctcagcagggcatccagggaaacctgtttgacttcttacgctt

SEQ ID NO: 603822 - DNA, 75 bp, Homo sapiens
ttgcagcagcccctgcccaagtctcaagtccacaggaggcccccctgttgctgtccagctcctggtcgaattgct

SEQ ID NO: 603823 - DNA, 75 bp, Homo sapiens
tcctgcaaaccagggtatcagagcagatagatctggatggacatctgcatccagctgggccgtgagaaagacttt

SEQ ID NO: 603824 - DNA, 71 bp, Homo sapiens
accacaaaccgctgccagaaaacaaccatgtccaagggacctgcagttggtattgatcttggcaccaccta

SEQ ID NO: 603825 - DNA, 98 bp, Homo sapiens
attgtttacaaattggtaccaggcctccaagaaggtatgacctggacgcgtgtgacattcaagaaaaatacccggatttatttcaagtgaacctggaa

SEQ ID NO: 603826 - DNA, 100 bp, Homo sapiens
gcagatgcccgggccgtggctctagcaggctccactaactggggctacgactctgatgggcagacttcacagagaatgcagttgtcttgacttcaggtct

SEQ ID NO: 603827 - DNA, 46 bp, Homo sapiens
agagcaaataaccgttttgaaattggatcatagacggtatttctat

SEQ ID NO: 603828 - DNA, 82 bp, Homo sapiens
gccggccggtgccagcacctttcggcttctgagacggcggcagcagcggcattcaggtgggatggatagcagggtctcaggc

SEQ ID NO: 603829 - DNA, 90 bp, Homo sapiens
ctggaagacatggccactccagtcggtgttgagcacggcgagcagtctcaggcctttagtgatgatgtactatactggcaattgctggag

SEQ ID NO: 603830 - DNA, 101 bp, Homo sapiens
gctatgaagaggtgcatgtgcctgctctgaagcccaagccctttggctcagaagaacctcttctgaaacagtctccctggagcaaccatcagagcagtggc

SEQ ID NO: 603831 - DNA, 100 bp, Homo sapiens
accttccagaattacgggcaagcgctgttcaaacccatgaaatgaagtggttttaaagtttgatcggaaccgtgtgcgtatccggaacgtggcctacgac

SEQ ID NO: 603832 - DNA, 78 bp, Homo sapiens
agacacagactatgcagatgggaggtgcaatgaagggcgtgttggtagacattgtgaatgcagcacagatgaagttaa

SEQ ID NO: 603833 - DNA, 100 bp, Homo sapiens
gctctgccggctcaacacgatggacttactgctggtcagtgcaactgaatggccagcccttagtgatggtggacgacgggaccctcccagaattgaagcc

SEQ ID NO: 603834 - DNA, 75 bp, Homo sapiens
ggggggatggttccatcatggcgtcaatgcaggttctctacttaaaagacaatgactactgatgaaggtgccaag

SEQ ID NO: 603835 - DNA, 74 bp, Homo sapiens
acacaaggaaacctactgttgcactgtctgctgttggacacaggttgaacatcacggcggagaacgactgccgg

SEQ ID NO: 603836 - DNA, 100 bp, Homo sapiens
gtgtcaaccatccattccaggagccagctatctgaggttggtactaagaagtgcctttcctgacgtctctgctgcttggaaccgcttctagagcagtctc

SEQ ID NO: 603837 - DNA, 120 bp, Homo sapiens
agggccgtgccgcagatgcccaccggaatggagaaggaagaggagtcgggccgttgctccagggagaactgcaaatatcttcatccacccccacatttaaaaacgcagttggagataaat

SEQ ID NO: 603838 - DNA, 51 bp, Homo sapiens
ctggacaaaggaacaggtatctcaggtcagctccgccgaaggcgccgccaa

SEQ ID NO: 603839 - DNA, 100 bp, Homo sapiens
tgggacatcaccccagagattccctgccctgattccaggagaacctggcagatcttttgagagtatggtctccggcttgggagtcagatcttcgtaaagg

SEQ ID NO: 603840 - DNA, 97 bp, Homo sapiens
agctggaagtaaccccttccgggagcctagatcctgtgctttactctgaagactctgccctctggtggtcagaagatgctgtgctgtctcgttagga

SEQ ID NO: 603841 - DNA, 51 bp, Homo sapiens
aattcctcaagacaccattccaggtgcggccgcgggcactgccgagctgct

SEQ ID NO: 603842 - DNA, 75 bp, Homo sapiens
ctacaacatggaccgggccgcggtccagaccaacatgagagactcttactactttgaccgcgatgatgtggcttt

SEQ ID NO: 603843 - DNA, 102 bp, Homo sapiens
cggatgaaagctacaatgaagtatatgcagaggaggtcccacaggctcctgccctggactaccgaggcattgaatgccccagaggagcccgaaacctcccag

SEQ ID NO: 603844 - DNA, 75 bp, Homo sapiens
gaagcggccaatggcacggaggcctgcgtagacacctatggctgccgatgaaggctcagcagagaaacaggcagg

SEQ ID NO: 603845 - DNA, 100 bp, Homo sapiens
cccaagaaacatctcaccaatttcaaatccgaccaagatcactccatggatgaaatgacagctgtggtgaaaattgaaaaaggagttggtggcaataatg

SEQ ID NO: 603846 - DNA, 50 bp, Homo sapiens
gtggaggcagaggtggcatggggtggctccaggatgtatttaacgtgccc

SEQ ID NO: 603847 - DNA, 75 bp, Homo sapiens
gggagctccagagcctgctggtggaggagccccccctcctctgcacctctcctctcagccacagcaccggcagcg

SEQ ID NO: 603848 - DNA, 75 bp, Homo sapiens
ttggcatcaacttggtggagaatagaaggcaaatggaatactctgaagatagtaactccgagccaaatgtggatt

SEQ ID NO: 603849 - DNA, 82 bp, Homo sapiens
tgtgaagactctgatatagatggtgattatagagtgataagcaacgatgtgctgagctgaagaaagccttgtgtactgccca

SEQ ID NO: 603850 - DNA, 100 bp, Homo sapiens
gcagacttacgcactgtggatccagagacacaggcacgactagaagcattgctagaagcagcagctcccaaaatggcgatgacaccggcacctggcccaa

SEQ ID NO: 603851 - DNA, 83 bp, Homo sapiens
ctcaaggacacggtctacaccgacttcgacgggctgaaatctctttaatgatggagggaagcaggcagacgcgagtgtctcgg

SEQ ID NO: 603852 - DNA, 74 bp, Homo sapiens
gatgatatccttctcaaccttgtgggatgtgaaaactctgttactgaaggccctgcaggagcagccaaagatgt

SEQ ID NO: 603853 - DNA, 90 bp, Homo sapiens
cagcaagaagacggaaatccaaaggcagacagtacgggctcccttcgccaaactcttcattttctctgcatatcacacctgaaaaatttt

SEQ ID NO: 603854 - DNA, 82 bp, Homo sapiens
gaaaaggaatcgtatcgtatgtccgctatccagaacctccactctttcggtacatgtcccagagcaagcacacggaggcccg

SEQ ID NO: 603855 - DNA, 82 bp, Homo sapiens
gccacatactatccgtttgttcaggaaccaccagtgacagagaacagtggaggccatgtgtcttttggcagtcagtccagat

SEQ ID NO: 603856 - DNA, 75 bp, Homo sapiens
ctaacctcttggcttctgaggcatctgacaaggttcgatacaagaggctgttttcctagcgtggcttgctgcctt

SEQ ID NO: 603857 - DNA, 101 bp, Homo sapiens
gtttggcaagggagcattcattcagcttctgcggcagtttggaaagggggtgaatctctacattaagaacttggatgacactattgatgatgagaaattaa

SEQ ID NO: 603858 - DNA, 74 bp, Homo sapiens
cggaacacttcagcacaagaacgctaccttttcttagtctcggcgcggaagatggccggcggcgtggacggccc

SEQ ID NO: 603859 - DNA, 97 bp, Homo sapiens
gaatcacctgactcggaggcgctccctcagaaggaaggacatggatttgattgacatactttggaggcaagatatagatcttggagtaagtcgagaa

SEQ ID NO: 603860 - DNA, 50 bp, Homo sapiens
aggattgtcactccaacctcttttcgctgcagagtctccttggaggtgac

SEQ ID NO: 603861 - DNA, 82 bp, Homo sapiens
ctggaatgttcggccgaggagattgcggggctgcgttcaaggagatctgcccagctgggaagggataccacattctcacctc

SEQ ID NO: 603862 - DNA, 98 bp, Homo sapiens
gtcttcaccaattcagagaggagatgtgacaatagaccgcagacacagggcccatcaccctaaggtgccagctattcaacagaaaagaacggtggctt

SEQ ID NO: 603863 - DNA, 100 bp, Homo sapiens
ctctcatcctacgggccacgcctgggccttgctgccaggaagcttcggccccgcagctcggcttgctgcggtctcagtttgaaggatgacctctaggaag

SEQ ID NO: 603864 - DNA, 100 bp, Homo sapiens
gaagttttcacaagtctcagaccttgcgattctacgattgcagcgcagtggaagtcaagagcaaggcaccatgactcctgtgaggatgcagcactccctg

SEQ ID NO: 603865 - DNA, 75 bp, Homo sapiens
agagtcggcacctgaaggacatggagtacaaaattggacagctgtacatgatcagcaaacacagccatgaacaga

SEQ ID NO: 603866 - DNA, 75 bp, Homo sapiens
ccggtgcagcagccttcagcttttggcagcatgaaagttagcagttttgagcaaaattttggactgtgaagcaag

SEQ ID NO: 603867 - DNA, 75 bp, Homo sapiens
tttggggaatctatagttaatcttggcgacattgacaatgatggctttgaagctccaaagacaacaggccctccc

SEQ ID NO: 603868 - DNA, 75 bp, Homo sapiens
ctgggaccaaggtcaccgtcctaggtacgaggctaccccacgttattgcttttccgaggagggaagaaagtcagt

SEQ ID NO: 603869 - DNA, 100 bp, Homo sapiens
ccagaagctggagagtatgctgacacctcctattgccaggagagtcccctttctcaaggagaagacagactgctgctttggacctgttggtaatgatggc

SEQ ID NO: 603870 - DNA, 75 bp, Homo sapiens
acacagcctgttctctctggaacgggagaagaaactgttaggctaggaagccctcctatgacactgaaacagatc

SEQ ID NO: 603871 - DNA, 82 bp, Homo sapiens
agggacagcacctcatcccctggatgggggaccacaagatcctcatcgacaggtcgcaatggaagaagagatcgccgcgctg

SEQ ID NO: 603872 - DNA, 96 bp, Homo sapiens
gaagatatacttgtatctgtccccacaattattctgtaacgcatccccaattaatagaattgtacaaatcagtggcaattccatgccaagaggaag

SEQ ID NO: 603873 - DNA, 100 bp, Homo sapiens
aacaccgacaaccccttcggagacaacaacctgctgggcaccttcatctggaataaggtgtctgactccgtgagtggacagaccgtcgttgaccccaaag

SEQ ID NO: 603874 - DNA, 148 bp, Homo sapiens
gctgatgctgaagctgtgcaccgaggtccgtgtggccaacgagctcaacgccaggcgccgctcctttacaggtgtcatggagaaactccagctgggcccagagattctgcagcgggaaaatccaaggcttatttatgccaggctgagt

SEQ ID NO: 603875 - DNA, 51 bp, Homo sapiens
tttcaattggctctttgcgtttccaggctatgtagaaccaatgcagacact

SEQ ID NO: 603876 - DNA, 101 bp, Homo sapiens
ctgaatgacaacatcgccacactgctccaccagtcctctgacaagtttgtctcggagctgtggaaggatgagctctgcgtgcctcttgctgtgccctacct

SEQ ID NO: 603877 - DNA, 90 bp, Homo sapiens
agcaggagcagcccaagcgccttccctcacattgatatcagtaaatgccattatttagtggatttggacaccatgagagaaacaccccgg

SEQ ID NO: 603878 - DNA, 50 bp, Homo sapiens
cgtctctgttgctgctcgagagacgctgaccggaaaggagattgagattg

SEQ ID NO: 603879 - DNA, 103 bp, Homo sapiens
ctgggtctggagacgccgtggcagcctgaacggagtgtgcgacggattgggaggccattctggaggaaaacaaggagaagctgccacttgacatcaaccccgt

SEQ ID NO: 603880 - DNA, 49 bp, Homo sapiens
agcctcctgaatatctgggattacaggagctgccgttatactgttctgg

SEQ ID NO: 603881 - DNA, 73 bp, Homo sapiens
attctcttctgcacaatttacctttgtgtggttgtgtcaaaccgattggtgacatctccatgctgtattgtca

SEQ ID NO: 603882 - DNA, 51 bp, Homo sapiens
cgccagtcaataggaagtacgagtgtgagacctcagcagccatgtcgaagc

SEQ ID NO: 603883 - DNA, 100 bp, Homo sapiens
ttaaaacattgtcatgcagcagctgcaacttacatactagaggcaggaaagcaccgagctgacaagtcaactctaaggtggatccataaagaacccagcc

SEQ ID NO: 603884 - DNA, 100 bp, Homo sapiens
acctacagaaacaaaatgtcaacaaattgatggaactaaaattccagatggcaaactcaatgaatggcagaaaccctggtggtcgaggaggaaatccccg

SEQ ID NO: 603885 - DNA, 50 bp, Homo sapiens
agacaaggactcacagtggctgcaaggtttcacgtgccacgatcatggtg

SEQ ID NO: 603886 - DNA, 100 bp, Homo sapiens
gagctggggagatcccggcaccttctgagacacctgctggaacccaatgtgaatattggactggcggagccttgggaagtgaaccttccataggaagcat

SEQ ID NO: 603887 - DNA, 82 bp, Homo sapiens
gagcgagctgagtggttgtgtggtcgcgtctcggaaaccggtagcgcttgcagcatgtctgcgctcctcagaccaccggcag

SEQ ID NO: 603888 - DNA, 100 bp, Homo sapiens
ggccatcacggcggccgcagtggcgtcctggagccctcctcagcagtcactcaggaaatgttgtttaaggggaaccttctggatccttttcatggcacca

SEQ ID NO: 603889 - DNA, 107 bp, Homo sapiens
cttccccaacgccccggagccgccggccgctagcgtcagcgccagccagatcttagcaaagcaatgtctcaagatggtgcttctcagttccaagaagtcattcggca

SEQ ID NO: 603890 - DNA, 90 bp, Homo sapiens
ctgggatgatacaccttttccacagggaattgagttgatcctgtttgaccaaactcagagatcaattaaggcacagcttcagaactttgt

SEQ ID NO: 603891 - DNA, 75 bp, Homo sapiens
aaccatgttccctgtgaaggtgaaagtggagaaatcaggcagtcgatgatgtgaagaaaggttacatcaaagcag

SEQ ID NO: 603892 - DNA, 100 bp, Homo sapiens
ccggaggaggcattaacgagaccgggtaagctaatggcagcattagccgctgttgggcctcctaatcctcgggcagatccagagtgctgcagtattctgc

SEQ ID NO: 603893 - DNA, 118 bp, Homo sapiens
tggaccgagctcaccagctgtgtgccctccgtggtggacggcaagcgcgacgccaggctgagaccgtccagaaaccgaagctgaaagactggcatcctcctgggggctttattctggg

SEQ ID NO: 603894 - DNA, 75 bp, Homo sapiens
gcctcccaagtagcttggattacaggaaacttccattttagaagaatacagtatcaattggactcagaagctggg

SEQ ID NO: 603895 - DNA, 124 bp, Homo sapiens
aacccacccaacctcaccaagaagatgaagaagattgtggatgccgtgatcaagtacaaggacagagcaagttgcaaacatcagttcatttcaccccagcacttcaatatgcattgcattaact

SEQ ID NO: 603896 - DNA, 74 bp, Homo sapiens
gctgctgtgtgcggtgctgctgagcttggcctcggcgtcctcggggttatgtaccgaaggactctaccgtgtca

SEQ ID NO: 603897 - DNA, 98 bp, Homo sapiens
cgggtcctgaacgctgtgaaatgatgaagagccctttaatccagactacgtagaggtggataggatattggatgagtctcacagtattgacaaggaca

SEQ ID NO: 603898 - DNA, 49 bp, Homo sapiens
gcagaatgctcttctggagcagcaaggccctcgggaccaaggatcacgt

SEQ ID NO: 603899 - DNA, 75 bp, Homo sapiens
attggggtgcagcagctgcaccccaccttgatccagcggacttacggatatggctcgtggacagcagaaaattca

SEQ ID NO: 603900 - DNA, 100 bp, Homo sapiens
gagacagataaaaatggatttttgcagtacgatggtgctggagaatctggtaaaagcaccattgtgaagcagatgaggatcctgcatgttaatgggttta

SEQ ID NO: 603901 - DNA, 75 bp, Homo sapiens
caagcaacttatgctccaaacagctaaaccaacttttggccatctgacagatagctgctctggataaggctaccg

SEQ ID NO: 603902 - DNA, 90 bp, Homo sapiens
tgcaggtcctgggcatctctgcggaggtctgtgccagcgacccgcctcaggcaaagtgattggaaagaacgggaaagtgatccaggagat

SEQ ID NO: 603903 - DNA, 96 bp, Homo sapiens
ctctccgcctccatgtgccggatagcgggagcgctgcggaccctgctgccgctgctggcggccctgcttcaggactcacaccacccggcaagaact

SEQ ID NO: 603904 - DNA, 50 bp, Homo sapiens
tgctcatggaagatccaaatccgccggagtcagagtggtggctacagtga

SEQ ID NO: 603905 - DNA, 75 bp, Homo sapiens
ccagatcgaatctgggccaaatagaaagtttgtcactcaagccctatcagaaggttggtttgaattggctggcat

SEQ ID NO: 603906 - DNA, 50 bp, Homo sapiens
ccaaattcgcctccatctgtaccatggctgactttgccatcgaggccttg

SEQ ID NO: 603907 - DNA, 100 bp, Homo sapiens
aggcattttgctgtctcctcctaatacgcacaacattctgaaattttttggttattgtaatgatgttgatcgggagttgagaaaatgcctgaagaatgag

SEQ ID NO: 603908 - DNA, 100 bp, Homo sapiens
tggagcttaaaaagctgcacgcaagtgttaaacttctgcaagtctggaaaagtttgaaattccagtaaaaattcgtttgagtcctgaaccgtggacccct

SEQ ID NO: 603909 - DNA, 76 bp, Homo sapiens
aaatgatctcgtcactcctttctttgtggtcttcatttgtgaatacataggaacttggatacgattggtgttgctg

SEQ ID NO: 603910 - DNA, 82 bp, Homo sapiens
cctacatttggagcctggacacgcagtacagcaaggccagcatccttcagaaaaagcatccccgaggaggaagacgaatcgt

SEQ ID NO: 603911 - DNA, 83 bp, Homo sapiens
ccgggtacgcaggggtgcctcaaccacactccgtccacggactctccgttattttaggagatatggccgcgtggaaagtgtca

SEQ ID NO: 603912 - DNA, 88 bp, Homo sapiens
tggacatttggacacagaggaggcatcaccccagtcctaggcaagacccctttgctgatgcaagtaagggtgatgacctgcttcctgc

SEQ ID NO: 603913 - DNA, 88 bp, Homo sapiens
gaaagacaaacaccccagcttgttccaggcattgctggagatggatctgctgaccgcacacagcaagaaggaggccatcagcaaactg

SEQ ID NO: 603914 - DNA, 100 bp, Homo sapiens
caaatttgatagactgctgtttttctggtctgaccgtcgcaaccctcatgaagtacaaccagcatatgctacaagagtttcgctcttgttgcccaggctg

SEQ ID NO: 603915 - DNA, 100 bp, Homo sapiens
tattgatcatcttgtggtagagagaagtgacgatggctcttttcatatcagaggtcttgtccaataagcatgtggctcctgatcatcttttgcaaatctg

SEQ ID NO: 603916 - DNA, 82 bp, Homo sapiens
gggaaactttttgtcccgtgagaacaaagtacaagttatatcagagtctgggtgagccactgcgcctgatcaaggcatcacc

SEQ ID NO: 603917 - DNA, 96 bp, Homo sapiens
gaggagcccgcgggcggccggtcgggcggggcggcggcgctgacagaacggccggtttgtgggcgatgctgaccttgaaagacagaaattttcaga

SEQ ID NO: 603918 - DNA, 75 bp, Homo sapiens
ttgcatttcctcgtcgagcgcaacccaaggtgatgtgtccaatctagatcccaacttctcatttgaaggcaccaa

SEQ ID NO: 603919 - DNA, 100 bp, Homo sapiens
ggacacccctgaagccgagaaatgatcatcagaaaagcccttactgaggaaaaacgtgtctcaacaaaaacatcagctgcagatcttgtgacagaaacag

SEQ ID NO: 603920 - DNA, 50 bp, Homo sapiens
gctgatgcctcaaaaagtgtgcaagcaatttgtgatctaccaggttggct

SEQ ID NO: 603921 - DNA, 50 bp, Homo sapiens
caagaagccagtcaagcggccaggcaggaggaaaggcaggagccagtccg

SEQ ID NO: 603922 - DNA, 100 bp, Homo sapiens
gcaaaatggcggcgcctgaggagcgggatctaacccaggagcagacagagaagctgctgcagtttcagggtttggaaatcccttgtctccaggttgctgg

SEQ ID NO: 603923 - DNA, 100 bp, Homo sapiens
ttggctgaagaggaaataaaaacagaacaggaggtggtagagggcatggatatctctactcgctccaaagtgccaccatggcaactgcaccatacaacta

SEQ ID NO: 603924 - DNA, 99 bp, Homo sapiens
ctgggtcagtccgccgctcaccccgcggccgcaccttcccgccttctcaggtcagcccaaggccaaccccactgtcactctgttcccgccctcctctga

SEQ ID NO: 603925 - DNA, 100 bp, Homo sapiens
tcttgccatcgccccagacatggggaacgcggcgaccgccaagaaaggcagcgaggtggagagcgatcattgataactggaagtatcataaaaccaaagt

SEQ ID NO: 603926 - DNA, 98 bp, Homo sapiens
gggtgccactgctgccgtgcacagggctgcgattccggggtacctcactgcagaggtgctggagctggcaggattgatttccagagacttatgttact

SEQ ID NO: 603927 - DNA, 51 bp, Homo sapiens
ttgaatcagctcaatcaatcgctgactttgaagattatccaatgagaattt

SEQ ID NO: 603928 - DNA, 75 bp, Homo sapiens
acctggagctctacgcctcctacgtttacctgtccatgcttctccccagacctggctctggactcaccaggcact

SEQ ID NO: 603929 - DNA, 100 bp, Homo sapiens
cagcgttccaccgctcgggtttggctggatggcccactgcgtgaccttggttcagctgtccatttcctgtgaccatctcattgacaaggacatcggctcc

SEQ ID NO: 603930 - DNA, 88 bp, Homo sapiens
gctggaggatgcggacgcggaggccgcctggggtagcggcggcgggagtcctggcgctctgcagcaatgcatgagagctggaagtgga

SEQ ID NO: 603931 - DNA, 83 bp, Homo sapiens
agaaaatcaagaagctgaatttccaggccttcgccgagctgtgcagggcgtgatggtgggcatgggtcagaaggattcctatg

SEQ ID NO: 603932 - DNA, 75 bp, Homo sapiens
cttccttataggcgtcagcgggggaacagctagcggcaaggtatgtcgagagtaccaacgtggcaattgcaaccg

SEQ ID NO: 603933 - DNA, 127 bp, Homo sapiens
aaagtcttggacagacttaaaccagttataggggtaaacactgatccagaacggacttggacaacttcattgccaactttggggatgcagggtttgtccttgtggcctttggctccatgttgaacac

SEQ ID NO: 603934 - DNA, 74 bp, Homo sapiens
ggagatggacaagattccttatataaaatatgcaagttgcagtaccatgcaggactagcatctggccttttaaa

SEQ ID NO: 603935 - DNA, 100 bp, Homo sapiens
ggtggagatgcgggcaacgacacaagaaacacaacttcagacttgcagaaaaccagtgaagggcatgtggagagggccaaatgtgaactgtgttgacagc

SEQ ID NO: 603936 - DNA, 100 bp, Homo sapiens
cagacggcgctatgtacgccctcttcctcctggccagcctcctgggcgcggcatatcgcacggatgactgccatccctgggttttgccagtagtgaagaa

SEQ ID NO: 603937 - DNA, 76 bp, Homo sapiens
gtttgctcgagggaacgtggtcggaggccgattcgacacagacaaggaaaatgagcgtaccaaggatctaatcatt

SEQ ID NO: 603938 - DNA, 90 bp, Homo sapiens
tgaaaagaagccctattgtaatgcgggaaggtgtggctcattgactttaatccatttggtgaagtcacagattcactgctgttcacctgg

SEQ ID NO: 603939 - DNA, 75 bp, Homo sapiens
aaacaagtgaaatacttcatacattacagtggttggaataaaaatgagaaagatcagtctaaagaaaaggagaag

SEQ ID NO: 603940 - DNA, 82 bp, Homo sapiens
ccgggccccccagcatgaagaccccggcggacacagaacactctgctccagccaaggtggtgagggcagctgttcctaaaca

SEQ ID NO: 603941 - DNA, 74 bp, Homo sapiens
gcggagctgacggtggaggttcgcggctctaacggggctttctacaaggcatccgtgtacaagatttgcagaga

SEQ ID NO: 603942 - DNA, 80 bp, Homo sapiens
aaagcagccaagcgggagcaggagaagaaacctaagaaggaagcaaatcaggccccgatttttcagaagaagtgaagtca

SEQ ID NO: 603943 - DNA, 50 bp, Homo sapiens
ggagaaccaactggtcccgaaagagacagttaaatctcacacagaaacag

SEQ ID NO: 603944 - DNA, 74 bp, Homo sapiens
ttctgtggaagagtggacaacagaagactggactgaagattttcggagcaacatcccctgtcacctggttgata

SEQ ID NO: 603945 - DNA, 100 bp, Homo sapiens
agaacctgcccttcgccaaggagatcgtctctctcatcgaggcccaaaccgccaagagactaaggtgtcagtatgttcttcaagctgctctgctcctggg

SEQ ID NO: 603946 - DNA, 75 bp, Homo sapiens
gcgagttctacatgatcggctccgaggccctggccaacgtcaacattgggagcctcatctgcaatgtaggggccg

SEQ ID NO: 603947 - DNA, 142 bp, Homo sapiens
gacaattgttcagttgcaaaaagaaactggagccaccatcaagctgtctaagtccaaagatttttacccaggttagtctgaatgattcccacaatcagatggtggtgcactgggctggagagaaaagcaacgtgatcgtggc

SEQ ID NO: 603948 - DNA, 75 bp, Homo sapiens
atcttgacatttccgtggcaaccaaagacgggcgcctatcagtacacaataaggcttactttgcaaagaaggaag

SEQ ID NO: 603949 - DNA, 100 bp, Homo sapiens
cagaacccgagtatcctaaaggcatccgggccgtgctgctggggcctcccggggccggtaaagggacccaggagcgggctgcagatgacagcaaagaggt

SEQ ID NO: 603950 - DNA, 51 bp, Homo sapiens
gccgcagtgggtcccggacaaggagacccaacatgagtgaagtttcctgca

SEQ ID NO: 603951 - DNA, 100 bp, Homo sapiens
ccatcggcacccgttctggagccatcaagctatcgtgttcgacgagtgtcacaaagccaagaatgccggctccaccaagatgggcaaggctgtgctagac

SEQ ID NO: 603952 - DNA, 100 bp, Homo sapiens
gacgcacagctaagatgccaggacatcctggaagctgggaaaaggatcaagcaaccccttctgagcctgagattgacctggaagctctcatggatctatc

SEQ ID NO: 603953 - DNA, 100 bp, Homo sapiens
gagtccgcaccaggggccctcagggaagagaccctgcaaagatcctgggagaccaaggtgaacagtggtatagcagccactccagcctctgctgcagcag

SEQ ID NO: 603954 - DNA, 95 bp, Homo sapiens
tgcctcagcctcccgagaagctgggattacagggaactcaaaactgtatgatctaccagatgagccttttacaagacagttttactttgtccact

SEQ ID NO: 603955 - DNA, 134 bp, Homo sapiens
cgcgtccccactgaccagcgcgcaggacagcgccttcctcaacgacgcggacatggtcatgagctttgtgaacctgggtgctggagaatctggtaaaagcaccattgtgaagcagatgaggatcctgcatgtta

SEQ ID NO: 603956 - DNA, 98 bp, Homo sapiens
aaaacaattttggaagctcaaaggctgtgggtgagcgtggaggatgctcagatgcacaccgtcaccatctggctcacagtgcgccctgatatgacagt

SEQ ID NO: 603957 - DNA, 50 bp, Homo sapiens
ggcgcgccgtgcactggagacaccctcgccctggagagtgaatttgtttc

SEQ ID NO: 603958 - DNA, 100 bp, Homo sapiens
tttgttttggattacataaaccagtcacccaagtgcattgcctttggaaacgagggttacacatcattttggaatgactgtatatcatctggattacgtg

SEQ ID NO: 603959 - DNA, 82 bp, Homo sapiens
gctaggagccacctagactggatgcagagcatggcacctgtttcccccacctactccaatatttgctggaggagcaaatgac

SEQ ID NO: 603960 - DNA, 100 bp, Homo sapiens
taacgagcggcggcggcggcagcgggtcttgggtcctccgagagcagcagcgatatctccggagcatttggataatgtgacagttggaatgcagtgatgt

SEQ ID NO: 603961 - DNA, 96 bp, Homo sapiens
acagacatatcgctgaccgaatgggaaccccacacctgcagaaggtccttaatcaggaaagcttcctgctgactcaaaaggatttttcttcttctg

SEQ ID NO: 603962 - DNA, 88 bp, Homo sapiens
aagaaaagatagttgcttattcctctattgctgcaaaaaatgcagaactagaacaggagcttatgcctatgctattggcatgatactt

SEQ ID NO: 603963 - DNA, 74 bp, Homo sapiens
ccggggccggccagaagcgggcggcgcgggggagatgggcgaccattgacgaggtggagacggacgtggtggag

SEQ ID NO: 603964 - DNA, 100 bp, Homo sapiens
ggaggccggattgtactgtatggggactccaattgcttggatgacagtcaccgacagaaggctaccaagatgaatgaactaatggagaaatagaaagtct

SEQ ID NO: 603965 - DNA, 100 bp, Homo sapiens
aacataatgcccagagttggagccaattaaaccaggttattaacacggggatcaaagtctggtgtagaaataacagcggtgaagagtttgactgtgcttt

SEQ ID NO: 603966 - DNA, 82 bp, Homo sapiens
tcttcgaacttttgacacggctttggaaacgacgtcatgtgttagcagcctggaagtttttctagctggtctggtagtttcc

SEQ ID NO: 603967 - DNA, 75 bp, Homo sapiens
gcaacatctgcaaggtccgcttcaccagggacccagacatggagctgcgggaagaagcctggtctccggggccgc

SEQ ID NO: 603968 - DNA, 82 bp, Homo sapiens
caggatgctaccatcaaagtgcgcccacagcagcaaccttggagcaggcagaggccattaactgtttgatgcgagcaatcga

SEQ ID NO: 603969 - DNA, 90 bp, Homo sapiens
acctgccagctcatcacaaagtgatgctgtggagtcttcaaaaagcccgaccactctggattacaaatttacaggaggatgaaacagaag

SEQ ID NO: 603970 - DNA, 50 bp, Homo sapiens
gtcagcatcccagccgtgctcacggccctgggcagtgacggggttcgggt

SEQ ID NO: 603971 - DNA, 50 bp, Homo sapiens
ggaatctccatgagagaacttaccattgagaaagatcagtctaaagaaaa

SEQ ID NO: 603972 - DNA, 75 bp, Homo sapiens
ccgctgctgctgaggagaggagcgtcaacagcagcaccatggctttgctctggtgagtgacaagctgtaccagcg

SEQ ID NO: 603973 - DNA, 83 bp, Homo sapiens
ggcttattttactcctttatggagcaaatatgaactcttctgaagaaaggttacttttcacatagaaccatatagcaatcgag

SEQ ID NO: 603974 - DNA, 90 bp, Homo sapiens
gctgagacatgagatcttcagcctccaggctctccagtttttcgtcgagagattcactatggaatcggagtggaaacaaaatgtcagtca

SEQ ID NO: 603975 - DNA, 101 bp, Homo sapiens
tcaaatcagctacctggtggacaatttaaccaagaaaaattaccgagccagccagcaggaaatacagcatgcagtgaaatcaactgtgcagaccatcactg

SEQ ID NO: 603976 - DNA, 90 bp, Homo sapiens
agagggcagataaaacttgcagactttggacttgctcgattgtatagctcagaagaaaggcatgaagaactcttgactgacagaaacgga

SEQ ID NO: 603977 - DNA, 100 bp, Homo sapiens
ctgccccaggaggtcctggacattcaaaataacctttaccagctgctcattgggaactttggtctcagcttagagcaatcccgggcccagatggccctgt

SEQ ID NO: 603978 - DNA, 100 bp, Homo sapiens
ttacttcttcctcaacaccagcaccgcagatgttgtcaaggtggcctaccaggaggccaggggtgtcgccatggttcgagcatacgggccaggtttggag

SEQ ID NO: 603979 - DNA, 100 bp, Homo sapiens
ggaacctactgtggggccgcggccggaccgagcgcctcgacctcggtctgagcatgatgccttcttctgtagagtgggcgctttgcagaatacgtgttga

SEQ ID NO: 603980 - DNA, 100 bp, Homo sapiens
tgaacggcatgtcatctttgccaggactgatgcagatgcccctcctccaccagaggactgggaggagcatgtcaacagctctttccaacaactgatcctg

SEQ ID NO: 603981 - DNA, 73 bp, Homo sapiens
tagaagcagatctggaatgcaaacagatctggcaaaatttgggcctctactcttcatggatcttttggatgaa

SEQ ID NO: 603982 - DNA, 98 bp, Homo sapiens
ggtccggcccggggccccgggatctcggctgtccttcctcccgaaaagagtagttgaacagctacggaagaacctgatagtaaagcaagaacaaccgg

SEQ ID NO: 603983 - DNA, 82 bp, Homo sapiens
aagctcatggcctgccactgcgtgcgaccgtggcaaggaggtgtacagccctgactttcatagcctcggaggagaaggtctt

SEQ ID NO: 603984 - DNA, 90 bp, Homo sapiens
ctggacctccaaggaagccacgtgcagacatctacaaccttcgatctcctgacgagtgatggcatcagctgagaagggaaggaagcccat

SEQ ID NO: 603985 - DNA, 83 bp, Homo sapiens
ctgccgtccatgcggaagatcgtcgccacctggatgctggagatccgggtcttcctccagcagctcaagggccgcgtagcccg

SEQ ID NO: 603986 - DNA, 95 bp, Homo sapiens
ggaagaagaggtgaagctcaaggcacaggtggcccgatcccagcaggacattgaaagccgcggcgagtcctttgcacatgttggcaacacacgca

SEQ ID NO: 603987 - DNA, 75 bp, Homo sapiens
gtgaaagggtggggagcagaataccggctattttggcattctgctggatatatgttcgtaaataccaaagtcggc

SEQ ID NO: 603988 - DNA, 83 bp, Homo sapiens
tagaaactcgctctaaagacggaaccgccacagcactcaaggaaggatggagacgctgaaggataagaccctgcaggagctgg

SEQ ID NO: 603989 - DNA, 87 bp, Homo sapiens
aggaatcgtcacccggcggcctctcattctgcagctcatcttctcaaaaacaggattgttaaaatgagtcttcggaagcaaacccct

SEQ ID NO: 603990 - DNA, 90 bp, Homo sapiens
tcttgcatcagtgggaacaagactacctcctcctttaccccagaacctcctttacacagtatcagaacctgtgatgcagatccatccgcc

SEQ ID NO: 603991 - DNA, 100 bp, Homo sapiens
ggaaagcaagcttcttggtacattcacaaatacgtacagatcggtcgcttggttatcggacagaatggaatcctctccacccctgctgtatcctgcatca

SEQ ID NO: 603992 - DNA, 83 bp, Homo sapiens
cggacgccgacgaaagccagcgagctcctcagcctcaggtttgcctgcaatgagatttcattctctacatttaaaggacatcc

SEQ ID NO: 603993 - DNA, 50 bp, Homo sapiens
cagagcctgccccagagcccaagcaaaccagtccagctacgggggcccag

SEQ ID NO: 603994 - DNA, 75 bp, Homo sapiens
cagttggagtgaagattggcaatccagtgccctataatgaagagatggaatttcaccgtgttgcctaggctggtc

SEQ ID NO: 603995 - DNA, 98 bp, Homo sapiens
gggcccaggccccggcagcgcctgggacaagttccaatgacaggatttacacagagagcaactattgatccagaactgaatgaaatacacgtcttatc

SEQ ID NO: 603996 - DNA, 51 bp, Homo sapiens
ctcagccggtcgagctgcgcgggagaataacattgctatggctttggaagt

SEQ ID NO: 603997 - DNA, 82 bp, Homo sapiens
gatgaacccaacctagtgggtgtaatacatcatgaactgcagggttgaaatcacaaagattagacacctttttagataggtg

SEQ ID NO: 603998 - DNA, 75 bp, Homo sapiens
caaaaatcccatctaccgcaactctcagttcgagagtaaaggttctgcggggagtgtctccagccctgcctgcag

SEQ ID NO: 603999 - DNA, 87 bp, Homo sapiens
cgtctcccacttccgcttccatcttaattggcttagtgtcgacttcaataattggaaagactgggaagatgattcagatgaagacat

SEQ ID NO: 604000 - DNA, 87 bp, Homo sapiens
agacaaggatagtaagcttgaaaaagccctaaagcttctgcagaaagccgtcattacacctgattttgaaaaaaaccactgtgttcc

SEQ ID NO: 604001 - DNA, 133 bp, Homo sapiens
gggaggccggccggtgccagcacctttcggcttctgagacggcggcagcagcggcattcaggaagccaaagctgtagttgaagaaacaagagccctgcgtagtcggattcatcttgctgaagctgctcagaga

SEQ ID NO: 604002 - DNA, 75 bp, Homo sapiens
ttcgagttcaaagagaccctcggaaccaattctgtggtgttcttggtcacacatttatggagtttctgaagggca

SEQ ID NO: 604003 - DNA, 100 bp, Homo sapiens
ttttctttctggaatcagaaggctttgctggcctgaaaaaggctctctatgagaacatgctggtggagctgccctttgcaggcttctttctttccaagtt

SEQ ID NO: 604004 - DNA, 82 bp, Homo sapiens
caaggaactggtgctgcagcgagaggtatttctgggaaaagccagcttctgtttgcactggtcttcacaactcgttacctgg

SEQ ID NO: 604005 - DNA, 99 bp, Homo sapiens
catcattaagttggagcagggagaggagctgtggataacgggaggtgaatttccatgtcaacatagtcctgggacttctggagccccgtcctggacagg

SEQ ID NO: 604006 - DNA, 75 bp, Homo sapiens
caagtttgacattgaggcctggatgccaggccgaggccgctttggagaggccaacactgagctggaggtgaagat

SEQ ID NO: 604007 - DNA, 100 bp, Homo sapiens
ttgcccaaaactacagttctgtcactcacttacacagtattgggaaatctgtgaaaggcaattaagttggaatatgcaaggttggttaagttggcccaag

SEQ ID NO: 604008 - DNA, 135 bp, Homo sapiens
cggagtctgggggttcgcgcccgccgacccgcgccctgctccctctcagcacctgggcggacgaagcctcagtgtaaagtctgccgatcatgccctgtggtgcagtcgagccagcacctgtttctggacctgcct

SEQ ID NO: 604009 - DNA, 99 bp, Homo sapiens
cagcagccccgagcactgtggccgaggcccacctgctgacatctacctgccagggtgcgcaggtcccaaaccagccctcatctcctggttggaacgaaa

SEQ ID NO: 604010 - DNA, 100 bp, Homo sapiens
ccattgacgccatgtcgggttattcgagtgaccgagaccgcggccgggaccgaggcttgctaatctggacctgaactctgaaaaacagagtggaggagca

SEQ ID NO: 604011 - DNA, 100 bp, Homo sapiens
gggacatgcagcctcttccgcctgagccccggaagggtgatgtggctgcggcatcgccggcctcgctatgctgaagaataagttcatgaaaaaattgcca

SEQ ID NO: 604012 - DNA, 51 bp, Homo sapiens
ccggacaacggctgcggcgacaattttctttcggaaaatgtgattgatcga

SEQ ID NO: 604013 - DNA, 97 bp, Homo sapiens
gacggtcgtagctgcggtcgcgccgagaaaggtcccctgaagtcatgggttgctggctcctgctcagagtgacagcaccctgtggagtctgctggta

SEQ ID NO: 604014 - DNA, 50 bp, Homo sapiens
ctgaggccctggagggagagaagaccaagatcactccatggatgaaatga

SEQ ID NO: 604015 - DNA, 107 bp, Homo sapiens
ttatgcaagaaactgttgaattagacccgtttcctatagatgagaaaccatacaagctgtgatctggaaagcatgaagactgggctttttttcctatgtctcttggg

SEQ ID NO: 604016 - DNA, 100 bp, Homo sapiens
ccctacttcaaggataagggcgacagcaacagctctgccggctggaaggtgcaaagttccccatcaagtggacggcccccgaggcagccctgtacgggag

SEQ ID NO: 604017 - DNA, 100 bp, Homo sapiens
gcgcgggagcgctacggccccaacggttttaaaatcaaagatgggaaaatcggagaaaattgcccttccccatggccagcttgttcatggtatacacttg

SEQ ID NO: 604018 - DNA, 87 bp, Homo sapiens
aggagtcagaaactcagccactggttgccttggtaggcaataaaagtagtgggcagcagtcagtgacaggtgtaacctctgtggatg

SEQ ID NO: 604019 - DNA, 75 bp, Homo sapiens
gtgctcttcgctcacctggatgacaacgagaggagcatggggaaatgattgatgactgacagctgctgaagccct

SEQ ID NO: 604020 - DNA, 96 bp, Homo sapiens
tctgggagctgaggaaccagatatcttgaaaagctgccagaaagaacaagaaactcctttacgagaagatgaagggaggagagagacgaaagcgga

SEQ ID NO: 604021 - DNA, 100 bp, Homo sapiens
gctggatgcagaatttgatcactttgtggttgatatgaagccctttgttctaaaattacctcataggacagttgacttttgtgccctggtaattctgtat

SEQ ID NO: 604022 - DNA, 100 bp, Homo sapiens
gggcatccttcacccatctgaagggaggaaatagtggcaggtgacagtctgcatgtgcagttttcagacccaacatgagtgaagtttcctgcaagaaacg

SEQ ID NO: 604023 - DNA, 88 bp, Homo sapiens
ccgcgttggcctcgccgcccctgctcgggtttccaatacttatctacaggaatcgccatgaccccagctctgagggaggcaacagcaa

SEQ ID NO: 604024 - DNA, 83 bp, Homo sapiens
cgccccgccgctgagccgtcgcggagccgcgcagccctcggagcacggctggcctgccactcctcctgctatgatgcctgggc

SEQ ID NO: 604025 - DNA, 100 bp, Homo sapiens
caagctggggacgcgtcctcagacgcagcgtctagtccctggccatagctccgccgctgcccgaaataagcgggttttgaaaacaaaaaaaagaaggagt

SEQ ID NO: 604026 - DNA, 98 bp, Homo sapiens
cagcatagtcatggtgatgggtattacagatgtagatgataaaatcatcaaaagagccaatgagttgactggtctgagtgtctccaatggaaaggacc

SEQ ID NO: 604027 - DNA, 50 bp, Homo sapiens
ccaggcacagccgacgccgcgggtgcaccgtccaggtgaggttagagctg

SEQ ID NO: 604028 - DNA, 88 bp, Homo sapiens
gagacctacaaaccccacttagaaagagaaagcccaggaggaaccacctgccaagctgctggatgaccttttccgaaagaccaaggca

SEQ ID NO: 604029 - DNA, 100 bp, Homo sapiens
tggagtacaatgtcagtgtttacactgtcaaggatgacaaggaaagtgtccctatctctgataccatcatcccaggcaacagttgcagcttttgcagcta

SEQ ID NO: 604030 - DNA, 89 bp, Homo sapiens
cgagaagaggaggatcgcccacatccccaacccccgcctggctgcaggtgctaactttgagtacatcatcgcagaaaaaagagggaaga

SEQ ID NO: 604031 - DNA, 75 bp, Homo sapiens
caaaagttcatctccttctgcatccttaactgagaatgagcttgtcagctcatttgcagcttacatttttggttt

SEQ ID NO: 604032 - DNA, 50 bp, Homo sapiens
caacagtgacggaatgcctccatacatgttactataacaacagtaccaag

SEQ ID NO: 604033 - DNA, 82 bp, Homo sapiens
cttttcttaacctgggaagtggaaccggatatttaagtacaatggtgggcttaattttagatatgtgtcacaaagatgtcta

SEQ ID NO: 604034 - DNA, 74 bp, Homo sapiens
gaaaactggataacactaagtttagatctcatgaggtggctacagtttcagaaaagtcacgtataatggaactg

SEQ ID NO: 604035 - DNA, 83 bp, Homo sapiens
accgaggacatggacctgtacagcatcaactacctgcactttggggagcctaagtcctgctggtaggtgagtgctgtcctcgg

SEQ ID NO: 604036 - DNA, 82 bp, Homo sapiens
aagccataccatccactggttccagctgacagaatgagtccctggaacgccagatgcgtgaaatggaagagaactttgccgt

SEQ ID NO: 604037 - DNA, 82 bp, Homo sapiens
gaaataagtttcacacctaagagattatttggtagcaattgaagagaaaaacaaagctacatttctacgtgcttatgtgaac

SEQ ID NO: 604038 - DNA, 83 bp, Homo sapiens
cccgcgagcacagagcctcgcctttgccgatccgccgcccgtccacacccgccgccagatggacacccgctccgggagccagt

SEQ ID NO: 604039 - DNA, 83 bp, Homo sapiens
gacaaaaatccagaagtacaagcagtctggagctctttgttcaatgcctagccacctattcctacagacacggcagtggaaag

SEQ ID NO: 604040 - DNA, 100 bp, Homo sapiens
taatgtctgaaaatactgaaattgatagcagtttgaatgatgtcctggagaacatgatggagccaccacagcgagactccagtgcaccagggaggtttca

SEQ ID NO: 604041 - DNA, 101 bp, Homo sapiens
aacttgtggatggacttgctacctcttgggtgaactctagcaattacaaggtgatgatgaacagtctacacagatggctgcaagttgggaagatgataaag

SEQ ID NO: 604042 - DNA, 83 bp, Homo sapiens
cgcctgggtggttgttggcgtgtccctgcagcgaaggatcctggttggtgctggagaatctggtaaaagcaccattgtgaagc

SEQ ID NO: 604043 - DNA, 51 bp, Homo sapiens
caagtgaagcaaaagcctttcatgattatgaagacagagatgtcaatgacc

SEQ ID NO: 604044 - DNA, 90 bp, Homo sapiens
gaagtggaaggagcagaacgtgagggtgtaacttacaaaaagagcccaatgacgaaagtggagctaacgtggatgcgtccaaaatgtggc

SEQ ID NO: 604045 - DNA, 71 bp, Homo sapiens
tgaattaaaccaaactggacaaatccttgtggagcaaatgggaaaaggtgacagagctgaatgaacctctc

SEQ ID NO: 604046 - DNA, 82 bp, Homo sapiens
aggacccgaagcctaaattccaggaggccttcttcgccttctcctcggctgtggagccctggtggggggtctgcgcccggtc

SEQ ID NO: 604047 - DNA, 75 bp, Homo sapiens
ctgcagaaagacttgaaggcgtatacaggaacaatattgatgatgtagtaagagtgaagatgaaatcaggacact

SEQ ID NO: 604048 - DNA, 75 bp, Homo sapiens
ccgtgcgcggggaggcggcggcggcagcgttatcagcttcctgcctgacacagctcacttcaagaagtgcacaat

SEQ ID NO: 604049 - DNA, 100 bp, Homo sapiens
tcgttggtggggctgggggatgagagctgcaccgcgcgggacaagtcgccggcggcgcccgacggagcagtgtgggccgacccaagcacgttcgtgtcat

SEQ ID NO: 604050 - DNA, 75 bp, Homo sapiens
cccgaatgccagcgcctcttctaccggggcaagcaggttttgacctgtagcagagaaccaattctggagaacagc

SEQ ID NO: 604051 - DNA, 100 bp, Homo sapiens
cctgctcctcgggtgcctgcacctcggccgtcccggcgcccctggggacgccgccctcccggaaggaagaggcccagcagaagggactcgctgagccacc

SEQ ID NO: 604052 - DNA, 98 bp, Homo sapiens
tcggctgctgatcacgaaccggagagcaaggttgaggcctcccagtagcattggatgcaggaaaaaatacattgacggtgaaaaacaagccgaaccag

SEQ ID NO: 604053 - DNA, 98 bp, Homo sapiens
tgcttatgaactgaaacatgccttgaagggtgtgggccgaagatatgctcatgtggtgttgaggaaagcagacattgacctcaccaagagggcgggag

SEQ ID NO: 604054 - DNA, 75 bp, Homo sapiens
aagacaacttcctcaccagcaccttacagggggatatgagactttctactcggaatatcctgagtgttgcgtgga

SEQ ID NO: 604055 - DNA, 100 bp, Homo sapiens
acacccataggccagtcaatgtcgtcaatgtatacaacgatacccagatgctgggctcttgcactgtttggtggaaatggtgagacaggatttgagcaaa

SEQ ID NO: 604056 - DNA, 75 bp, Homo sapiens
aagatacaagacacaaatgtaacttctgaggacaaaaagtactacgacatttctgccaaaagtaactacaacttt

SEQ ID NO: 604057 - DNA, 100 bp, Homo sapiens
cagccagtataaaaacacagctcgacagtacgcctacttctataaagtcatccagccaaatttgtatcctactgtggggcttcaaacaccaggagaagtg

SEQ ID NO: 604058 - DNA, 75 bp, Homo sapiens
ggaaccaaagcggatcagagagggctaccttgtgaagaagttctggagagtcttggcttctgggaggaagtcaga

SEQ ID NO: 604059 - DNA, 100 bp, Homo sapiens
acgaggaggaaaaggcccctgtgacctgttttaaaatcaaagatgggaaaatcggagaaaattgcccttccccatggccagcttgttcatggtatacact

SEQ ID NO: 604060 - DNA, 100 bp, Homo sapiens
gtcatatgaaggacccactgcagaagtggtggaggacactcaatcacttgtcggaagtccctcaacccgtatagcacctcatattattggagcagaagat

SEQ ID NO: 604061 - DNA, 88 bp, Homo sapiens
ggatcatgtctgcgagccaggattcccgcttccccgggcgctgcctggacaggcctgcctgcgtgctgggacatgtctggcctccaag

SEQ ID NO: 604062 - DNA, 82 bp, Homo sapiens
tggggctgtccacagttgggcggtaaaagagatacggcttatgaatttgaaaggcatcttgcaggatttgagttgaggaaaa

SEQ ID NO: 604063 - DNA, 50 bp, Homo sapiens
tcatggaatcccttgcatggctctcactattgacctgaaaagtggttctg

SEQ ID NO: 604064 - DNA, 100 bp, Homo sapiens
aacgagaagaaccggaagctctttgaccttctggatgtccttgagttcaaccaggcgtggtggaagtggaggagggcgaggtgaacgggcaggagctgtg

SEQ ID NO: 604065 - DNA, 50 bp, Homo sapiens
aatctaatgaaccgaaactttgggtgagtatttggacattctcgctatct

SEQ ID NO: 604066 - DNA, 100 bp, Homo sapiens
ttcatattgaagaacttcaaccccacagtgtatccttttcaaggatttttagactctgaggagcagttggagctaatccacattatggaaatggaaacca

SEQ ID NO: 604067 - DNA, 74 bp, Homo sapiens
aacttcagattttgtggaaagctattaactgtcctgaagctgtgttggggtggaagaggaggaggcgcccgaca

SEQ ID NO: 604068 - DNA, 82 bp, Homo sapiens
tcatgtctgcgagccaggattcccggatgagacctgcacgcagtggctcacagcagcacgatttgtgacagcccgaggcgga

SEQ ID NO: 604069 - DNA, 82 bp, Homo sapiens
ccgctcgatcttgggacccaccgctgccctcagctccgagtccagggcgagcatccgcagtgtcatgcagaagtacctggag

SEQ ID NO: 604070 - DNA, 82 bp, Homo sapiens
ggagaaacaggcgccgcgggctccgcgcccggccggacccgggcccgaggtgaaaacttttggcccgtttggaagcggcagc

SEQ ID NO: 604071 - DNA, 75 bp, Homo sapiens
aggtatctgaggctaccccacagcactctctggcattggcttgcgaggatccctggaacgcctccagctgggata

SEQ ID NO: 604072 - DNA, 96 bp, Homo sapiens
cgccgcagcccccagccttgcgcgtcgtcgctacctcctcggacagggctcaagggttcttgttgatgcacgagataagcttggcattccttggca

SEQ ID NO: 604073 - DNA, 98 bp, Homo sapiens
ggacttcggaccctggcctcttgggatgcaaagggaatgaaagctactggttgattttaaagtgcctgggcctcacaggtttggagatgtcccagaat

SEQ ID NO: 604074 - DNA, 75 bp, Homo sapiens
agggggagactgtgccgtggagggcctcgccatgtcctgctgcccgtattggtaaaggttttcaaggtgtcatga

SEQ ID NO: 604075 - DNA, 108 bp, Homo sapiens
gtactctttgccgtacccaccggagcctggcgcagcctccctctattaccagacaatgcagatcttcgtgaagactctgactggtaagaccatcaccctcgaggttga

SEQ ID NO: 604076 - DNA, 75 bp, Homo sapiens
tttgcagtgaacggcattctcttcaatcatgagagtcccagaagaggaatggtctggaacacggacctggtggag

SEQ ID NO: 604077 - DNA, 50 bp, Homo sapiens
atttttccaagttacagctacctaggttcgaagtcaacaataccattctt

SEQ ID NO: 604078 - DNA, 100 bp, Homo sapiens
cctcggaagttgctgatgaacctcctaccctcaccaaggaagaaccagttccactagagacacaggttgggaaggagaaaatgctcaaggtgaagattgt

SEQ ID NO: 604079 - DNA, 50 bp, Homo sapiens
ccggagagtacatccccaccgtgaaagatgaatgggagggctgattttcg

SEQ ID NO: 604080 - DNA, 100 bp, Homo sapiens
tgaaaatgaagaagccattgctcttagcaggaaggacaaaactattcaacatgtggaagtattttgttatgccaggattctccttttacaaatgcaggaa

SEQ ID NO: 604081 - DNA, 88 bp, Homo sapiens
tcgagttacccctcttaccaccgtcatggcagtcccagctttgactctcccggatcttgcagagcagtttgcccctcctgacattgcc

SEQ ID NO: 604082 - DNA, 98 bp, Homo sapiens
ctggccctcgccgcggccctgctgctcctggccctctgcttgcttgtccggcgcaccaggacagcggggattttcagtttgattgacaccctgtggcc

SEQ ID NO: 604083 - DNA, 50 bp, Homo sapiens
ggagtatctgagcttctgtccaatgcagcgttttaccaacgaggatcatt

SEQ ID NO: 604084 - DNA, 111 bp, Homo sapiens
taaagccaaaagcttactgctcactaccatacctcagatagggtccacagaatggtcagaaaccctccataacctgaagtacaagccagctgccatgttgtgagcacatac

SEQ ID NO: 604085 - DNA, 76 bp, Homo sapiens
atctacttttgggttacaaaaatccagaccagtccacaagaatcggaatgtcagttaatgctattcgcaagcagag

SEQ ID NO: 604086 - DNA, 100 bp, Homo sapiens
ggcggcgtgggcatgggcatgtacaacaccgacgagagaatggagttcagtggtggaggactgcttttgtgaacatgagaaagcagcgcctggtccctat

SEQ ID NO: 604087 - DNA, 100 bp, Homo sapiens
agccaaccggtgcacccaccccttcgcctgcaccccagcagtacatcgtggtcactgtctctgaacctagaagtcggaatccggaagaagatcgaacatg

SEQ ID NO: 604088 - DNA, 101 bp, Homo sapiens
agagtttattaaccacttaacctctcagaactgaacaaagacaacattgttcctggaacgccctctttttaaaaaagagctagccaacatggaagaagatg

SEQ ID NO: 604089 - DNA, 90 bp, Homo sapiens
ggagaactatagtaacttggtgtcactgggcaatttgaatcaacccatagaagtgacagcgctgtattcatttgaaggacagcagcctgg

SEQ ID NO: 604090 - DNA, 100 bp, Homo sapiens
ggagccggagccgacgggcggtggccgcactgggaccccggaatcccgcgcgctgcccacgattcgcttctgaggcctgcctcgtcccctcagctttcac

SEQ ID NO: 604091 - DNA, 87 bp, Homo sapiens
aagggcggcggggagcacacggagcactgcaggcgccgggtgactctcctattccatctgtttcttcgggatcatcttcacctcttt

SEQ ID NO: 604092 - DNA, 82 bp, Homo sapiens
acaaggactcgccctccgtctgggccgccgtccccgggaaaacgttcgtcaacatcacgaaacgcttcgttaagggactcag

SEQ ID NO: 604093 - DNA, 73 bp, Homo sapiens
gaagatcctggaggtggatctgaagaacgggaggaatgccagctcctgagcaggcctcattggtggaggaggg

SEQ ID NO: 604094 - DNA, 101 bp, Homo sapiens
gaacagactagccactttgcattgactggaaacaatggcatttacagaaagagtcaacagcagtggcaacaggtgtctgacttccagcaactgctggcctg

SEQ ID NO: 604095 - DNA, 100 bp, Homo sapiens
catcaggaccagtggggacctatacttgcagacagatatttacaagaattctgagaagcttgaacctcccagtgggaagcagtcaagtgttagtcccaag

SEQ ID NO: 604096 - DNA, 75 bp, Homo sapiens
gtccagaacgtgccatggagacgcttaacgggagactcatgcatctgtatgccgtgtgcgtggactgcctggaag

SEQ ID NO: 604097 - DNA, 100 bp, Homo sapiens
acttgtctgtgtcgtcaaccccacacacaacctaaaggctgctgatactttggctgtgaggcaaaaaaggagaatttatgatatcaccaatgtcttagag

SEQ ID NO: 604098 - DNA, 90 bp, Homo sapiens
ggatactacagacaacagagaaaacttgttgaagagattggctggtcctatacagggccatgtttatgagtggactaagtgaaagcaaac

SEQ ID NO: 604099 - DNA, 83 bp, Homo sapiens
ccgcccaccagttcgcccgtccccctgccccgttcacaattgagacggtttaagcggaagcatcttactgccattgactgcca

SEQ ID NO: 604100 - DNA, 50 bp, Homo sapiens
gaactacaggaacctggtcttcctggccatccacgaaaatgctttcattg

SEQ ID NO: 604101 - DNA, 100 bp, Homo sapiens
cgcaccagtcgtgcatgttcttggtgaagtcggccagcctgagcaagcggaggacctacgccggcctgggtctgtttctgtcgactgtggaccacttatg

SEQ ID NO: 604102 - DNA, 90 bp, Homo sapiens
aattcaaagtcgaatatcatgctggtggctctacccagaattcaattaaagtggctcaggtgttgactttaaggtgaaaacaatttcagt

SEQ ID NO: 604103 - DNA, 100 bp, Homo sapiens
acttcatctatgtggccccaggcatcgggcgtctctggccgagcctctttttgtggaaaacgacagcagcagcagtggcctggaagacgccaccgctaac

SEQ ID NO: 604104 - DNA, 100 bp, Homo sapiens
tccttcggcagtccacccaccgccgccgcctcccagaaatctcccaagcctaagaagaagaagcacaggaaggagaaggaggagcggaccaaaggcaaga

SEQ ID NO: 604105 - DNA, 76 bp, Homo sapiens
agcaactgaggcagcggcaggctcagggaactctaatgatccaggacaaagaagttaccctggagtatgtatcaag

SEQ ID NO: 604106 - DNA, 73 bp, Homo sapiens
catcacatgtggagacccccctgagaggttctgctcccatttatgtgggccattactgaattctgacatcttt

SEQ ID NO: 604107 - DNA, 75 bp, Homo sapiens
gttgggagagcgtctgtagcttccttgtgtgaagcctcagtttaggtcatctggtggttcagaacactcaacaga

SEQ ID NO: 604108 - DNA, 97 bp, Homo sapiens
gttcatatatggtggtcctcagacaaatggtggcccggagtttgctcgataccttgagggaagtctgcgatgatgaaagagattgtattgctgtttt

SEQ ID NO: 604109 - DNA, 98 bp, Homo sapiens
gacttgcaggatgacttagacgactacaatgcagatcttcgtgaagactctgactggtaagaccatcaccctcgaggttgagcccagtgacaccatcg

SEQ ID NO: 604110 - DNA, 111 bp, Homo sapiens
ggaaaactagctgccaaattggataagacactgcaggtatttattacagtatcaggagccaataccttgtgagcagttggttacagcgctgtgtgatatcaaacaagctta

SEQ ID NO: 604111 - DNA, 83 bp, Homo sapiens
gaccctcgcgcgcgaccgccgaatcgctcctgcagcagaggcctctccttccgatgaaaagagaaaggaagaatggactacag

SEQ ID NO: 604112 - DNA, 98 bp, Homo sapiens
acatactttaaagccaaagcagcaggagtttggaagcccttttcctccaaatcctgggaaagcatggcttctcgctgtttctgggatgctgacactga

SEQ ID NO: 604113 - DNA, 75 bp, Homo sapiens
gcgcggctcgcggactacttcgtgctggtggcgttcgggccgcacccgcgcgctcaccatggatgatgatatcgc

SEQ ID NO: 604114 - DNA, 101 bp, Homo sapiens
tggctgatagatggtacagtgaaatcaagaactataacttccagcagcctggcttcacctcggggactgaactgataaatttcaaacggaagagagtggca

SEQ ID NO: 604115 - DNA, 101 bp, Homo sapiens
agggagctggtggaaagacgccaggatcaactgggactcatgtccctgcagctacaggaggagcccctcaatagtgaagatgatgtgagtgatgaggaagg

SEQ ID NO: 604116 - DNA, 100 bp, Homo sapiens
cttctttctggttccgtgttcatcaaggaatccatgtttcttccaagaagcagcacaggaagaagacgacgtcctgggagaggaagcacaaggcagcccg

SEQ ID NO: 604117 - DNA, 100 bp, Homo sapiens
ggaactgcagatgaaaatagtgtgccatggtctccatgaactgatttttttgtgcagtgggcaggaagaacccatcgggcagctacacatcttgaaagag

SEQ ID NO: 604118 - DNA, 101 bp, Homo sapiens
tcaggatgtcctgcgtgataaggtcaatgaggagatgtacatagaaaggttatttgatttgtcgagatgtccacagaaggaggatttggtggtactagcag

SEQ ID NO: 604119 - DNA, 82 bp, Homo sapiens
cgccgcgggacctctccgggccatgggctgaaggtgatgtggccgccctcaaccgacgcatccagctcgttgaggaggagtt

SEQ ID NO: 604120 - DNA, 75 bp, Homo sapiens
tcacccatccatgggaagccctgctactgctggattagcgccagctggagctctcaaacactgctgtcctgcacc

SEQ ID NO: 604121 - DNA, 100 bp, Homo sapiens
ccaccggcgtggtcaacatccctgccgcagagcatcctttcctgaaactggccaaaccgttatctagcttgacaccactgatcatggcagctaaagaagc

SEQ ID NO: 604122 - DNA, 100 bp, Homo sapiens
acgcacaggccgtcgctatgagcgggaccaccctgggcacagcaggcatcggaggactgagcagggggaggaacatttaagctgatggaagtggaagtgg

SEQ ID NO: 604123 - DNA, 99 bp, Homo sapiens
tctcttgctgccaccatgtaagaagtgcctttcgcctcccaccatgattctgagacctccccagcaatgtggaacttatgaatacttcaatgctgtgct

SEQ ID NO: 604124 - DNA, 88 bp, Homo sapiens
aagacaggtgatttctgcatttccgactgagcatgccaatgaagatgtggaaagaatgttactaggaaacaagtgtgatatggacgac

SEQ ID NO: 604125 - DNA, 83 bp, Homo sapiens
gggggaccacaagatcctcatcgacagggagtgcatccgccccaacccttttccccctcgtctcctgtgagaattccccgtcg

SEQ ID NO: 604126 - DNA, 96 bp, Homo sapiens
agggaccccagaaactgatccgcaaagtgtctacctcggggcagatccggaccaagcagcctcccgcgacgatgcccctcaacgttagcttcacca

SEQ ID NO: 604127 - DNA, 75 bp, Homo sapiens
ctccccttcgtcactcacctgttcttgcccctggtgttcctgacagaatccttgcagcctttcctggaagcctgt

SEQ ID NO: 604128 - DNA, 95 bp, Homo sapiens
gaacatccactagcctcactaaagttctgggaggtgatcagtgatgaacatggcatcgaccccaccggcacctaccacggggacagcgacctgca

SEQ ID NO: 604129 - DNA, 100 bp, Homo sapiens
caaaaaaacctttcaagcaagtactcattacagaaggaccatatgttccaagacattcttcttttggccgatgaaaaatttgacttcgatctttcattgt

SEQ ID NO: 604130 - DNA, 100 bp, Homo sapiens
gaactgttccttcagccaaagaaacaagccgtggaataggtgtatcaagtaatggtgcaaagcctgaattattagaggaagtaacacaaggggatatgag

SEQ ID NO: 604131 - DNA, 100 bp, Homo sapiens
gctgtcgctgagagcctcacgagtcgaggtcctgcaggtggagctccggcagccgccctgatcttgtagaaaatttcagctgtagcccttggactagaag

SEQ ID NO: 604132 - DNA, 50 bp, Homo sapiens
agtcaagacgatcatagtcactgatggcccagacgaccccaccatttccc

SEQ ID NO: 604133 - DNA, 100 bp, Homo sapiens
cgagaggaggccgtccagcagatggcggatgccctgcagtacctgcagaaggtctctggagacatcttcagcagacaccattcgcttttcacccaagatg

SEQ ID NO: 604134 - DNA, 100 bp, Homo sapiens
gaaaacacaggaagctttccggcccctgctcatcgacatgaacaaggtgtaccggcagaccaacctggagaacctggaccaggccttctctgtggcggag

SEQ ID NO: 604135 - DNA, 82 bp, Homo sapiens
ctgggaacgggacttctaaaaggaactatgtctggaagggttatgtggtccgaatcagtggtgggaacgacaaacaaggttt

SEQ ID NO: 604136 - DNA, 74 bp, Homo sapiens
ggctcaagcaggacaatcgcactttataccacctgcgattactccgattacacctcaacaagaaggcaactgac

SEQ ID NO: 604137 - DNA, 90 bp, Homo sapiens
gcggcccgaatgccagcgcctcttctaccggggcaagcaggccaagcagatagaacttcagttcactattggcgaagccattaccagtgc

SEQ ID NO: 604138 - DNA, 100 bp, Homo sapiens
ccgacctcgacgtcttgcctgtgtcccacttgttcgcggcctataggtccctgtgcgttttattgcgacctgccggtgggaactttgtctccgagtcgga

SEQ ID NO: 604139 - DNA, 100 bp, Homo sapiens
gccgcaccaggctcatcctgtccatcgtgtgcctgatgatcacgcagctggctggcttcagtggaccagtcaaaatgcagatcttcgtgaaaacccttac

SEQ ID NO: 604140 - DNA, 99 bp, Homo sapiens
aaaggcgcaagtcgagaggaaactgttgtgcctcttcatattggcgatcctgttgtactcacagatgaatgcttctcacccggaaacaaacttgccagt

SEQ ID NO: 604141 - DNA, 100 bp, Homo sapiens
ccggagaagcaaagtttgtttgctaccaaacctggagcaaaaacccgggcagctgacttgttggtgaatcccctggatccgcggaatgcagataaaatta

SEQ ID NO: 604142 - DNA, 100 bp, Homo sapiens
agcaggttactcgcacgcggatttggctggcgtcccgctttaaagctgatggaacaggatacttgcaatcttgaagaggaagagcgaaaagcaagtacca

SEQ ID NO: 604143 - DNA, 74 bp, Homo sapiens
gtgaccgagagcgcgaatatcgtcatcgttagaagcctagatattatcctactgaagatgtgcctcgaaagctg

SEQ ID NO: 604144 - DNA, 100 bp, Homo sapiens
ccagaacctgagtatctgcaaaagttgcacaaatacctaataaccagaacagaaagaaatgttgcagtatatgactatttggagttttcctcgtcttact

SEQ ID NO: 604145 - DNA, 100 bp, Homo sapiens
cagaggtagtcggacctttcccgctggcgcgcagcctcagctagtgtgctggagaagagaaacgagttggcacacgcacagtgtttgttggcaatcatcc

SEQ ID NO: 604146 - DNA, 98 bp, Homo sapiens
tcaagttctacttcagtttgataaggctataaatgcagcactggctcagagggtcaggaacagagtcaatttcaggattcatgcccaagcacaaaaca

SEQ ID NO: 604147 - DNA, 100 bp, Homo sapiens
aagaccctgtacaccctggtgaccaagagggattcaaaggctattcccaacagaagagcttgaacaatgctgcatttgcatcaggttcaaatgagcgaga

SEQ ID NO: 604148 - DNA, 75 bp, Homo sapiens
gttttaactacagacccagtctctgccaagcagtagacccaggcctgccttctgtgaagcaagagccacctgacc

SEQ ID NO: 604149 - DNA, 90 bp, Homo sapiens
cttgcgactcgtctttctccaggaaaacagggaccgctctccgcctacagacgtttggcgccgatgacgtggtctgcaccagaatttatg

SEQ ID NO: 604150 - DNA, 82 bp, Homo sapiens
gcccgcagcctggacgacatcgacctgtccgccctgcggatatccctcctaaatgtacaatcaaggatttgctaccaaaaga

SEQ ID NO: 604151 - DNA, 88 bp, Homo sapiens
cagcattatctagtcctttccaccccgaaattcgccccgattaaagactgtgttgcattatcagtactttggaagtgttgctgaaatc

SEQ ID NO: 604152 - DNA, 100 bp, Homo sapiens
ttccgggagcacagttccgccgacccttcctgttctccaagttccttcccttcccctgaaggacagccaggagctgacagcttcacttctctcaactggg

SEQ ID NO: 604153 - DNA, 74 bp, Homo sapiens
agccagtactctatatgaacaatccgtctggatcacggatgtaggaagtgagcttgatgcattagatgccaatg

SEQ ID NO: 604154 - DNA, 83 bp, Homo sapiens
ctcgggtccgcggaggctgcgctctgcgggggccgggtgaagacgtggaagcggcgctggtttatcctcacagacaactgcct

SEQ ID NO: 604155 - DNA, 75 bp, Homo sapiens
ttattgatggaaatcaggtcagcggagaagatgctggaaacaagccctttctggttactgtggctttatggcagc

SEQ ID NO: 604156 - DNA, 98 bp, Homo sapiens
atcagaatgacttgactttcagagtatcttgtcgctgcagtggaactattggaaaggccttcactgcacaggttaattggactcctgagattaacaaa

SEQ ID NO: 604157 - DNA, 104 bp, Homo sapiens
cagaaaatgaatccatacaagattgatataggcgcagtatattctcacagagttacagtacctttaccagcatcgcagctttccttgcctaattttggatctac

SEQ ID NO: 604158 - DNA, 88 bp, Homo sapiens
tcagtcccccgccctccacctgccagggaggctccgggcgttgtacctgccaccacgggattaactgctgaagtactgatcgagttct

SEQ ID NO: 604159 - DNA, 51 bp, Homo sapiens
agattggacagcaggtcgacagtgaggagcattacaactgcatctccgccc

SEQ ID NO: 604160 - DNA, 75 bp, Homo sapiens
attagattcctctagtattctctatgctagaaaggtggcttaccttatccaacaaaatgttatcccacctttttg

SEQ ID NO: 604161 - DNA, 74 bp, Homo sapiens
taacaatcagtgccgagcaattgtgatgagatattctgctgagtggaagtttgtgatggacgcctctgacccca

SEQ ID NO: 604162 - DNA, 90 bp, Homo sapiens
gggcgggggcgatggcggcggcggcggccggagcttctctcagccgtcttgttactacagctataattcaaagaggaactttaagaaaag

SEQ ID NO: 604163 - DNA, 100 bp, Homo sapiens
cagggctgcccgggccagagaggagtaaagggtgcagaagctgccaatgtgactggcccggatggagttcctgtggaagggagtcgttacgctgcagatc

SEQ ID NO: 604164 - DNA, 83 bp, Homo sapiens
ctggttctggaatcctcagttcaaggagcgtgaggatcatccccggagaggacgggaggatcggcagcacagggaaccatcag

SEQ ID NO: 604165 - DNA, 100 bp, Homo sapiens
cgagctgtaatgcgtaatcctgaagaggatggaaaaggcaaagcctttggttgtgttggagggtacatcgccagcacgagttctctgattgacaccgtac

SEQ ID NO: 604166 - DNA, 102 bp, Homo sapiens
ctcccccagcagatacattctcagtttaagaaaatctacgaagaaacgcagtgagtctccacctgctgagctccccagtttgaggcggagcacacgccaaaa

SEQ ID NO: 604167 - DNA, 118 bp, Homo sapiens
cgccgcccgcgcctgttccgcagcccgcgtccgcgccggccccacagctctgcgtccggagcctggcagagagcaggtgtgtgatacacgtcgtcaggtgactgaccgaggaattcag

SEQ ID NO: 604168 - DNA, 97 bp, Homo sapiens
ttgcaaatatacctcctgagattcagaaaagttgtcttaatatgttgattcagtccttacaattttccatggtctggacaccctaaccgtgatgggc

SEQ ID NO: 604169 - DNA, 51 bp, Homo sapiens
agtagtggcattacacctaaaggattaggcttgaagaaaatttgcctacac

SEQ ID NO: 604170 - DNA, 85 bp, Homo sapiens
gaatccggaacctgggcccgtgtccggaactgctgtgcccaggcagcttgcctggaaatcagattgtcctgggtcacataatgcc

SEQ ID NO: 604171 - DNA, 83 bp, Homo sapiens
ccgggacagctaccggcgcatccttatgatgtgaggtgaggatgagccgcagccctttcctgggacatggatgtacatggcgt

SEQ ID NO: 604172 - DNA, 75 bp, Homo sapiens
agaggaaaattcaggcaacgcctcgcgttgcaaattgacttctttaaatgaagagtataccaaaaataaaacaga

SEQ ID NO: 604173 - DNA, 90 bp, Homo sapiens
gatctgaagagctatggtgaaacaccactgaagcattgccaagtgggtgtttcttcccgatcaagatcagagatctcagttaatcctccc

SEQ ID NO: 604174 - DNA, 83 bp, Homo sapiens
ctgtcctgcttcgtcaccccagaccttgccagagacctggcaaatgacatcatgacactgggggatatgagactttctactcg

SEQ ID NO: 604175 - DNA, 90 bp, Homo sapiens
aaggatggtccagaattcacttttactaccccaaagtttgataaagtgaaatctttccgtgcagctctacaagaggaggaacaagccagc

SEQ ID NO: 604176 - DNA, 97 bp, Homo sapiens
cgcgagcacagagcctcgcctttgccgatccgccgcccgtccacacccgccgccaggcgccatgtcagaaccggctggggatgtccgtcagaaccca

SEQ ID NO: 604177 - DNA, 80 bp, Homo sapiens
gagtcatcctgtacaccctcgtcagcggctccctgcccttcgacgggcacaacctcaagatcctaagtgtgaacgtgaag

SEQ ID NO: 604178 - DNA, 75 bp, Homo sapiens
cggcggcggctgcggcccaatataggagagaaggatattcctggactgactgatactacagtgcctcgccgcctg

SEQ ID NO: 604179 - DNA, 100 bp, Homo sapiens
ctgtgggcaccttggggactgttacagcagtattagttcagaagcaggcctagaaattgatagccagcaggaagaagagccggttcaagcatctgatgag

SEQ ID NO: 604180 - DNA, 100 bp, Homo sapiens
gccctgactcacaagatcactcacctgtccacactgcaggtgagaagccctaccactgcaactgggacggctgcggctggaagtttgcgcgctcagacga

SEQ ID NO: 604181 - DNA, 100 bp, Homo sapiens
ctgtaagagtcagaaaatccttcctggagagtccttaggctgtggctgccagttatctctcagacatagggcctgattacattccaacagaggaagaaag

SEQ ID NO: 604182 - DNA, 74 bp, Homo sapiens
ctggacccagctgagcgggcggtcattcgcatcgcagggcagctggtggaatttttgaagaaaatggaatctcg

SEQ ID NO: 604183 - DNA, 83 bp, Homo sapiens
gtccccagccctgcctctccctgggctctgggacttgcaacaaagcattgccagagaacctagtgctccttcaattcctacac

SEQ ID NO: 604184 - DNA, 100 bp, Homo sapiens
ctccgcgctccctgcctcgctcgctgccgggggcggtcggaaggcgcggcgcgaagcccgggtggcccgagggcgcgaaacatgccaaaggccaggattt

SEQ ID NO: 604185 - DNA, 98 bp, Homo sapiens
tcctcgccagcagccgtccggagccagccaacgagcgcctacaacacagcagtcccctcaggatgagcaggaaaagctcttggatgaagccatacagg

SEQ ID NO: 604186 - DNA, 75 bp, Homo sapiens
ttggttacctatgtacctgttaccactttcaaaaagattgagaatttatcacaagttgatggtcctcaagtggaa

SEQ ID NO: 604187 - DNA, 82 bp, Homo sapiens
cctagaaattccccccgaagaagactcccccacatctgggctctgtgtgctccgggatggagcaggtgtgcagagggtgaga

SEQ ID NO: 604188 - DNA, 88 bp, Homo sapiens
tcaggccgcgacgagggcgctgaggagcgggacggtatgcgggccatcctggggtcctacgacagcgagctgaccccggccgagtact

SEQ ID NO: 604189 - DNA, 100 bp, Homo sapiens
agttctccacccaaatggatggctgagatagaacgtgatgacatcgacatgttgaaagttatggctgcagcttcgattgccaatattgtaaaaagttctc

SEQ ID NO: 604190 - DNA, 83 bp, Homo sapiens
ccaatgtgactgtccactacatttcactggccgcttctgtgaaaaaggtcagtcattggcaccatgaactggaataaaggtgg

SEQ ID NO: 604191 - DNA, 100 bp, Homo sapiens
agaacttctgcagcaatgtcccaggttggcttcatgagttgggaaagagactggaatctccatactatggcaacaataccttggggggcccgtcgatccg

SEQ ID NO: 604192 - DNA, 85 bp, Homo sapiens
tgatcttggcttgattcagtctgccttgtaacagaaagaagatgctgatatgctacaacacggatgaacctggaggacgtggtgc

SEQ ID NO: 604193 - DNA, 80 bp, Homo sapiens
ctcaacaccaacatcgatgggcggcggaaaatagcctttgccatcactgccattaaggaagctcttcgtgtggtgaagat

SEQ ID NO: 604194 - DNA, 82 bp, Homo sapiens
gccgagttcaacatcctcctggccaccgactcctacaagcatatgaaacactctcagatgctaatagacgaaaagagtatga

SEQ ID NO: 604195 - DNA, 100 bp, Homo sapiens
aggcgctcgatgccagccgtcatcggtttccagacagctggctggctcaactaccctctggagaagataggcttctggcgacgcctggaggacctcatcc

SEQ ID NO: 604196 - DNA, 90 bp, Homo sapiens
gttcaagcaagcaagatacgagagcttttagcagagaagccacagtacatgtgtgaggccatgctgatcctgggcaaactgcattacgtg

SEQ ID NO: 604197 - DNA, 100 bp, Homo sapiens
gaaagcgttggagaggtgttaccggaacggcggcgacaagggtgttcccgaactagagtgggttatatgtaaagtcagatgtgccactgaacttgacaga

SEQ ID NO: 604198 - DNA, 101 bp, Homo sapiens
aagagcgttttgatggagcggctgaagaagtgcacgtgccggaaggacatggtcaagatctccatggacgtgttcgtgcgcatcctgcagcccgagcgcta

SEQ ID NO: 604199 - DNA, 100 bp, Homo sapiens
ttggtttggggttttcctctgagcagcagctgacaaaggtacaccaggggttggaaaaaccacactaggcaaagaacttgcgtcaaaatcaggactgaaa

SEQ ID NO: 604200 - DNA, 100 bp, Homo sapiens
gatctccgaccagtctgggggcgctggcggcctgcgcagccacctcaaggtttgtggcccgcaggtgtccaggatgcaggtgtaaatggacagtgtggcg

SEQ ID NO: 604201 - DNA, 75 bp, Homo sapiens
cccggaccctggaagagaagagggtggctaatgattaagggtaaagcatcaagtcgaatatttgggtctgaaaga

SEQ ID NO: 604202 - DNA, 100 bp, Homo sapiens
cacccttctactttctgtctctaggaatttcactactctagtccatcaataaagccatggagaaagaccatgaagaatacaacattggcgtcctagacat

SEQ ID NO: 604203 - DNA, 100 bp, Homo sapiens
gtttttctgttttgcctgaatacatgatttaaacaagagatttccacagaaggtagctttggatatgttaaatcctcatgttactttgcctgttttttac

SEQ ID NO: 604204 - DNA, 75 bp, Homo sapiens
gacttggagcaggttgaggtgctccagaagaagtttgatgacttccagaagctggcagccaggaggcaggagcag

SEQ ID NO: 604205 - DNA, 50 bp, Homo sapiens
ctgcccaagagggtccgctctcggctgatagagtctccctctgtcgccca

SEQ ID NO: 604206 - DNA, 120 bp, Homo sapiens
agtccaaggcggagatcctactggcacagggagtggtggagagtctatctatggagcgccattcaaacattggtgccttgattggactaggaattgctgcccttgttttactcgcctttg

SEQ ID NO: 604207 - DNA, 100 bp, Homo sapiens
atcgaggtaagaaacggttgtggatcttgaagctttggaaagtgtttcctgaggttataggcgggtgtttgaggagtacatgcgggttattagccagcgg

SEQ ID NO: 604208 - DNA, 101 bp, Homo sapiens
ggcgggcggccgggagccatggagcgcggccctggggcccgggggcgcgggccggggtggtctcctctgagcctccggcctccataagacccaaaacagat

SEQ ID NO: 604209 - DNA, 90 bp, Homo sapiens
ctccgattatgtgggctcggggcctcccaagggcacaggtatcacagatgtcgtaagaatctgaatcctccaaaagacagatgatgcgga

SEQ ID NO: 604210 - DNA, 75 bp, Homo sapiens
gcccgcgtccgaggctcgcgggcggcgggcccggaggacacgcagaggagcagctggcttgcccggagtcctccc

SEQ ID NO: 604211 - DNA, 101 bp, Homo sapiens
tgcggaggaactttgtgaacattcgcccagccaagttgaagaacctaatcttgctggtgaagcactggtaccaccaggattttgtgaaaatggaaaattat

SEQ ID NO: 604212 - DNA, 50 bp, Homo sapiens
gagcgcgagcggcgcgagaaaggtaacaagatgctcaactatagtgctcc

SEQ ID NO: 604213 - DNA, 100 bp, Homo sapiens
tttggacctgaaacagaaattctggaacacctatatgctccagacaattcaaacattgagattcctgggaactaccagatagtagcatcagttcaccaag

SEQ ID NO: 604214 - DNA, 100 bp, Homo sapiens
ctgcagaccctcgtccacctcctgcagctcggccaggtctggaggtgacagagctgaatgaacctctctccaatgaagatcgaaatctcctctctgtggc

SEQ ID NO: 604215 - DNA, 100 bp, Homo sapiens
caaagccattcctgacctcaccgcgcccgtggccgccgtgcaggcggccgtcagcaacctcgtccggagaaaatattctctttggaatgggaaatcctct

SEQ ID NO: 604216 - DNA, 75 bp, Homo sapiens
aggccatcgagaagatgaatggcatgctcctcaatgaccgcaaagtagttatagatagtagtatgaaaaacttca

SEQ ID NO: 604217 - DNA, 82 bp, Homo sapiens
cagagacactgccaagcagccttagccctagtgtagagacgtccttctatggccgcttcaggcacttcttggatatcatcga

SEQ ID NO: 604218 - DNA, 74 bp, Homo sapiens
gaaggttcagttggcaaaccagatatatgacttgatcagcaaagacccgatttttgtaccaggcgtctgggggc

SEQ ID NO: 604219 - DNA, 85 bp, Homo sapiens
gacagcagccaggagtcatgagcgacagcggcgagcagaactacggcgagcgggtcgacatttataactcagaccccctgatctg

SEQ ID NO: 604220 - DNA, 73 bp, Homo sapiens
aaatgccttgagacagctacaaggatttccattttatggtaaaccaatggcctcaggagtgcaagtagctgat

SEQ ID NO: 604221 - DNA, 101 bp, Homo sapiens
gaggtgatcgagaggctggcccgcagtcagatccacagcatccgggacctccagcgactcctggagatagactccgtaggctgtattcatcaccaaagaaa

SEQ ID NO: 604222 - DNA, 75 bp, Homo sapiens
ggggggagattctgctcacggaactgcagacccaatgtctgtggatcacgttataatgcttactgttgccctgga

SEQ ID NO: 604223 - DNA, 100 bp, Homo sapiens
ggaacatacagatgaaatgacctgaaccctgcccaccatttaaccaagatctcccagccatccagccccggctagtggcggtcagcaaaaccaaacctgc

SEQ ID NO: 604224 - DNA, 100 bp, Homo sapiens
gaggtagatcatgaaagagatcctggacctatgaatatccagtttgagccatcggatctaagatccaaaagcttcgcagaatcaagaacggctatgtgcg

SEQ ID NO: 604225 - DNA, 75 bp, Homo sapiens
cgtggctggggaggcgaggccggacgcacctctgtttgggggtcctcagaatggagatgtatgcatttcgattct

SEQ ID NO: 604226 - DNA, 88 bp, Homo sapiens
tgtcttccccagctctgcagccacatactatccgtttgttcaggaaccaccagtgacagagtgctgtacttctttgcagtatacaagg

SEQ ID NO: 604227 - DNA, 100 bp, Homo sapiens
tgttgtgtttgtcgggtctcgcctgggtgactcccagcttgtgaaggagtctcgctctcagtcaaaatctccaacgggaactcctgctcgtgtaaaatcg

SEQ ID NO: 604228 - DNA, 127 bp, Homo sapiens
cgggaggctggcgctgcgccgggccccgggccccgatggccccgaccgcgtgctggagctcttcgacccacccaaggtacatccagacactgaaggaccacaggccccggatggtgtgggacagcca

SEQ ID NO: 604229 - DNA, 82 bp, Homo sapiens
aggctcctgtgtctgctgccggggcagcggggcccggaagggaatcctatccatcttcttcaccgatatggtttgtggattc

SEQ ID NO: 604230 - DNA, 100 bp, Homo sapiens
aggaaggggacgggacggacggtgatggtggtcgccgcggcggcgtgtgcgcccctcagggtgataaaagaaaatgtggctgaagttacccgaagttcag

SEQ ID NO: 604231 - DNA, 90 bp, Homo sapiens
aggagcccctgaccgcgtccatgctggctgcggcgcccctgcatgagcaaaagcagatgattggtgggaatggaagtggccccacatctc

SEQ ID NO: 604232 - DNA, 90 bp, Homo sapiens
gaaagctgaaagtgttggctaaatccactgaaggaacagaaacaattgaaggagtctataacacactgtggtgcacgtaccatgagaagg

SEQ ID NO: 604233 - DNA, 75 bp, Homo sapiens
ctgcgctaccggaatgtcatccagcgagtgattagaatatcctccgaatcctaaatctagagctccaaggatgct

SEQ ID NO: 604234 - DNA, 100 bp, Homo sapiens
gcttctcagaagacagagggttttcttttgaggcgcgagggctggacttgtcccgagtgaggacctgcgtggttgtggcggaagagaggcctcggatcgc

SEQ ID NO: 604235 - DNA, 88 bp, Homo sapiens
ggggctacgactctgatgggcaggccaaaaagcaaatggatttccacctgacaaatcttcgggatccaagaagcagaaacaatatcag

SEQ ID NO: 604236 - DNA, 75 bp, Homo sapiens
cgccaggacaatggggacccgggacgacgagtacgactacctattcaaaggtgatgtgtccaatctagatcccaa

SEQ ID NO: 604237 - DNA, 129 bp, Homo sapiens
ctggtccttcggggtgaccctgtatgagctgctgacgcactgtgactccagccagagcccccccacgagcccacaggcggttttgtgagctgcttccccaggagcagcggagcgtggagtcgtcacttc

SEQ ID NO: 604238 - DNA, 75 bp, Homo sapiens
gaagagggagagcaaacttggctcagcccagtgctgctgttttttcaaacgaaggaaaaggaaaaccatacagcg

SEQ ID NO: 604239 - DNA, 83 bp, Homo sapiens
ctttttaaagacagaaagctcatggtgcaaattgttatttccagtttttcagaagaagtgaagtcaagatgaagaaccatttg

SEQ ID NO: 604240 - DNA, 110 bp, Homo sapiens
cacaaacagtaaagtgttcctgtctacctggaaaagtggctggaacaacaagaaaccggccttcttgcgtcgatgaaaacctcggatcaattctcagctggtggcacaac

SEQ ID NO: 604241 - DNA, 80 bp, Homo sapiens
gggcggagatcctggtccggaggcccacaggtgccaagtcctgccctgccaacttcttggcagctgccgacgacaaactc

SEQ ID NO: 604242 - DNA, 99 bp, Homo sapiens
atcaattgatttcaaaccttcagaaatagaagttggagtagtgacagttgaaaatcctaaattcagcattgtaggtttaacactcaatgtacaagaccg

SEQ ID NO: 604243 - DNA, 74 bp, Homo sapiens
tcaactctgttcacctgcttgcagattcagaatggacagtttagaagaacctcagaaaaaagtctttaaggctc

SEQ ID NO: 604244 - DNA, 74 bp, Homo sapiens
attgctaatccagtatttgcggatagctccaaactgggatatgttatcaggacaccccatgggagagacttcga

SEQ ID NO: 604245 - DNA, 75 bp, Homo sapiens
gcagggcttcgagttcaacatcatggtggtcgagttgaacaatgaccatagttgacaaagcttctgaatcttcag

SEQ ID NO: 604246 - DNA, 97 bp, Homo sapiens
ctagcagggctctagagaccacgtgaagtctcctcgtatcatcgagaaaggagaagaacactgtggacatctaattgaggcccacaaggaatgcatg

SEQ ID NO: 604247 - DNA, 75 bp, Homo sapiens
ctgcgcagctccggccgcctggctccccatactagtcgccgcggggatctgatgagcttctttcttctggcatca

SEQ ID NO: 604248 - DNA, 100 bp, Homo sapiens
gggaggaggaggaggagagctggaaagagtgagcaagaagccaaagaaagccggcctgtcagaggaggacgacagccttgtggacgtgtactatcgggag

SEQ ID NO: 604249 - DNA, 123 bp, Homo sapiens
atttccaactccaggaccctttccttctctacagaaatgccagatgaaagaccacagcaagattctttcattcgtctcctcctagcctgggggaccaggctcgaactgaccctggacatcaaa

SEQ ID NO: 604250 - DNA, 82 bp, Homo sapiens
gagagccgcgggagagtgtgcagccgagtcactactgcctgcctgcctgcctgctacggaattgaatgatctggcacgggac

SEQ ID NO: 604251 - DNA, 100 bp, Homo sapiens
tgctgctgaagatctggaagacgcgctcctgcgccgcataagctgtggccatgactactgaagtaggctctgtgtctgaagtgaagaaggactctagcca

SEQ ID NO: 604252 - DNA, 98 bp, Homo sapiens
caaattcatcatttaggacaccctcagtgtcttctgggactctcctactcattgcttgcctgtgcattgtggccaatggtggcatttgtagttcctga

SEQ ID NO: 604253 - DNA, 82 bp, Homo sapiens
ggaaatcgggctgaagcgactgagtccgcgatggaggaactagtcagccggaagctgagtttggttcctggtgcagaagaag

SEQ ID NO: 604254 - DNA, 100 bp, Homo sapiens
tttcccgtcaccaattttccttggaattggacagatgccaacaagattcagaagaactgttgaaactagcaacatctataagtgaaaccttggaagagaa

SEQ ID NO: 604255 - DNA, 100 bp, Homo sapiens
cgcgactgggactaggccggaggcagcgggggaccggcagacaccaatgggaatcccaatggggaagtcgatgctggtgcttctcaccttcttggccttc

SEQ ID NO: 604256 - DNA, 50 bp, Homo sapiens
gcgcaaattcactccccagtacaaaggcataatcaccagcaacacccggg

SEQ ID NO: 604257 - DNA, 75 bp, Homo sapiens
cggccaaagaagagggcacgatctgtagaacggtgccggtggtggtgtgcacattgagccccggtatagacagtt

SEQ ID NO: 604258 - DNA, 88 bp, Homo sapiens
gaaggacaacagcacccgtaacatcttcatctaccatgaggacgggaagaaggagcccagcgaagtgccaacacctaagagacctcgg

SEQ ID NO: 604259 - DNA, 101 bp, Homo sapiens
ggcacttgcccttagtggccgtcttttgcctctttctctcaggctttcctacaactcatgcccagcagcagcaagcaggctggcaaagcacacaggctgag
